United States Patent Application Publication US 2005/0244851 A1 - sequence listing, part 30

SEQ ID NO: 1155382 - DNA, 25 bp, Homo sapien
acaaacaaacgcggccagccatgga

SEQ ID NO: 1155383 - DNA, 25 bp, Homo sapien
ggctcagtccctcgaaacgagagct

SEQ ID NO: 1155384 - DNA, 25 bp, Homo sapien
ccaacttcgtgcgaatggcggcctc

SEQ ID NO: 1155385 - DNA, 25 bp, Homo sapien
cacagccacgcggaagtgagtctca

SEQ ID NO: 1155386 - DNA, 25 bp, Homo sapien
tcgttgcgaagctctagcacctcgg

SEQ ID NO: 1155387 - DNA, 25 bp, Homo sapien
tagtccagggcaagagcagtagtga

SEQ ID NO: 1155388 - DNA, 25 bp, Homo sapien
catcaggtctggtgcaattctgtca

SEQ ID NO: 1155389 - DNA, 25 bp, Homo sapien
gaaggcctcggtaattcgtgctcac

SEQ ID NO: 1155390 - DNA, 25 bp, Homo sapien
tcttcggagagtatgtatggacccc

SEQ ID NO: 1155391 - DNA, 25 bp, Homo sapien
caagggtaatttcagcggatgcaca

SEQ ID NO: 1155392 - DNA, 25 bp, Homo sapien
gaaaccaggcatctggtcaaaccag

SEQ ID NO: 1155393 - DNA, 25 bp, Homo sapien
cactacagcacaggcgggaatagca

SEQ ID NO: 1155394 - DNA, 25 bp, Homo sapien
cacagtctagggagatctgagggca

SEQ ID NO: 1155395 - DNA, 25 bp, Homo sapien
agcttgcacaccatggccctcatgg

SEQ ID NO: 1155396 - DNA, 25 bp, Homo sapien
tggaatgcctcatcctggacctcct

SEQ ID NO: 1155397 - DNA, 25 bp, Homo sapien
tcatggcttaggacatccccacgct

SEQ ID NO: 1155398 - DNA, 25 bp, Homo sapien
tctcagatgcagcttgcacaccatg

SEQ ID NO: 1155399 - DNA, 25 bp, Homo sapien
agactcatgtctacttgtgcctaga

SEQ ID NO: 1155400 - DNA, 25 bp, Homo sapien
acttgaaactagttgtgtcctcctg

SEQ ID NO: 1155401 - DNA, 25 bp, Homo sapien
ttcttaatctcagctaccgtgatag

SEQ ID NO: 1155402 - DNA, 25 bp, Homo sapien
ggtgacctaattgccaaatctcggg

SEQ ID NO: 1155403 - DNA, 25 bp, Homo sapien
tctgctgcagatagtggtgttaact

SEQ ID NO: 1155404 - DNA, 25 bp, Homo sapien
caacaagatggcctagaaatcgcat

SEQ ID NO: 1155405 - DNA, 25 bp, Homo sapien
tcactaagaaggtctgagtttctgc

SEQ ID NO: 1155406 - DNA, 25 bp, Homo sapien
gaatgaggcggatacaggaaacacc

SEQ ID NO: 1155407 - DNA, 25 bp, Homo sapien
ggttgaggcccatggaatgcattag

SEQ ID NO: 1155408 - DNA, 25 bp, Homo sapien
ggtggtgctctgtagcctttaggac

SEQ ID NO: 1155409 - DNA, 25 bp, Homo sapien
gcaggtgtatacctctttgttccag

SEQ ID NO: 1155410 - DNA, 25 bp, Homo sapien
gctggagcgtagtcattagatcttg

SEQ ID NO: 1155411 - DNA, 25 bp, Homo sapien
agtgacttcgtgttgtatatctgcg

SEQ ID NO: 1155412 - DNA, 25 bp, Homo sapien
tgttctgagaacctagcttttgcca

SEQ ID NO: 1155413 - DNA, 25 bp, Homo sapien
gacaaacaagaattagcagtgactt

SEQ ID NO: 1155414 - DNA, 25 bp, Homo sapien
tatatctgcggggtgatactgagcc

SEQ ID NO: 1155415 - DNA, 25 bp, Homo sapien
agtttgttttgcttcattctttcgg

SEQ ID NO: 1155416 - DNA, 25 bp, Homo sapien
atagtgaagtttgttttgcttcatt

SEQ ID NO: 1155417 - DNA, 25 bp, Homo sapien
tagtgaagtttgttttgcttcattc

SEQ ID NO: 1155418 - DNA, 25 bp, Homo sapien
tgaagtttgttttgcttcattcttt

SEQ ID NO: 1155419 - DNA, 25 bp, Homo sapien
tttaggccttcatatcatagaatgg

SEQ ID NO: 1155420 - DNA, 25 bp, Homo sapien
ttgaacactagcgagaacaccactg

SEQ ID NO: 1155421 - DNA, 25 bp, Homo sapien
tataagttagccaatcccaattccg

SEQ ID NO: 1155422 - DNA, 25 bp, Homo sapien
accaaacaacaggtggctcagacac

SEQ ID NO: 1155423 - DNA, 25 bp, Homo sapien
cagaaagccaccgatcctgaaccag

SEQ ID NO: 1155424 - DNA, 25 bp, Homo sapien
tcccgtgcggagcaacagctgcggt

SEQ ID NO: 1155425 - DNA, 25 bp, Homo sapien
tttccggccggacagcagaaagcca

SEQ ID NO: 1155426 - DNA, 25 bp, Homo sapien
ctccggccggaaactggcgcctgtt

SEQ ID NO: 1155427 - DNA, 25 bp, Homo sapien
agcggcgctaaaggcggggctgcga

SEQ ID NO: 1155428 - DNA, 25 bp, Homo sapien
ggagcggcgctaaaggcggggctgc

SEQ ID NO: 1155429 - DNA, 25 bp, Homo sapien
gggcaagcgccaaactggccgcagc

SEQ ID NO: 1155430 - DNA, 25 bp, Homo sapien
acgcgcggggcaagcgccaaactgg

SEQ ID NO: 1155431 - DNA, 25 bp, Homo sapien
tggcttctcaacttgttcaccctcc

SEQ ID NO: 1155432 - DNA, 25 bp, Homo sapien
tctggcttctcaacttgttcaccct

SEQ ID NO: 1155433 - DNA, 25 bp, Homo sapien
agcatcagccttcttgacttcaggt

SEQ ID NO: 1155434 - DNA, 25 bp, Homo sapien
accagcatcagccttcttgacttca

SEQ ID NO: 1155435 - DNA, 25 bp, Homo sapien
cagatggagaatatctgccaatccc

SEQ ID NO: 1155436 - DNA, 25 bp, Homo sapien
tggagaatatctgccaatccctctg

SEQ ID NO: 1155437 - DNA, 25 bp, Homo sapien
gcagatggagaatatctgccaatcc

SEQ ID NO: 1155438 - DNA, 25 bp, Homo sapien
gatggagaatatctgccaatccctc

SEQ ID NO: 1155439 - DNA, 25 bp, Homo sapien
ttgaaagcacatcttcagtaagata

SEQ ID NO: 1155440 - DNA, 25 bp, Homo sapien
ctttgaaagcacatcttcagtaaga

SEQ ID NO: 1155441 - DNA, 25 bp, Homo sapien
tttgaaagcacatcttcagtaagat

SEQ ID NO: 1155442 - DNA, 25 bp, Homo sapien
tgaaagcacatcttcagtaagataa

SEQ ID NO: 1155443 - DNA, 25 bp, Homo sapien
ggaaaatcaccctcttgcccctgtg

SEQ ID NO: 1155444 - DNA, 25 bp, Homo sapien
tcttgcccctgtggctttcagtgag

SEQ ID NO: 1155445 - DNA, 25 bp, Homo sapien
ggtgtgttctttgtagaggaacttg

SEQ ID NO: 1155446 - DNA, 25 bp, Homo sapien
ctttgtagaggaacttgattgagga

SEQ ID NO: 1155447 - DNA, 25 bp, Homo sapien
ttggttaaaatctgtgagtccacag

SEQ ID NO: 1155448 - DNA, 25 bp, Homo sapien
tgattttggttaaaatctgtgagtc

SEQ ID NO: 1155449 - DNA, 25 bp, Homo sapien
tttggttaaaatctgtgagtccaca

SEQ ID NO: 1155450 - DNA, 25 bp, Homo sapien
attttggttaaaatctgtgagtcca

SEQ ID NO: 1155451 - DNA, 25 bp, Homo sapien
ccaagagagtggagcctcgcgaaat

SEQ ID NO: 1155452 - DNA, 25 bp, Homo sapien
tcacacgcggtatttgcgaaacagt

SEQ ID NO: 1155453 - DNA, 25 bp, Homo sapien
aacgacggagtgtggctacgtgccc

SEQ ID NO: 1155454 - DNA, 25 bp, Homo sapien
tattgccctttggtgctggaggccc

SEQ ID NO: 1155455 - DNA, 25 bp, Homo sapien
tggaaaaatccggctgagacggcct

SEQ ID NO: 1155456 - DNA, 25 bp, Homo sapien
ttcggcttccgggagtccgggcagc

SEQ ID NO: 1155457 - DNA, 25 bp, Homo sapien
ttgtagttccgctggagtgtacagg

SEQ ID NO: 1155458 - DNA, 25 bp, Homo sapien
gaattgacaagtaccctacagccct

SEQ ID NO: 1155459 - DNA, 25 bp, Homo sapien
agtactttcataccaggcccgctgt

SEQ ID NO: 1155460 - DNA, 25 bp, Homo sapien
cgctgtcctctatcattttggaaat

SEQ ID NO: 1155461 - DNA, 25 bp, Homo sapien
gagaagtactttcataccaggcccg

SEQ ID NO: 1155462 - DNA, 25 bp, Homo sapien
caggcccgctgtcctctatcatttt

SEQ ID NO: 1155463 - DNA, 25 bp, Homo sapien
tgagtggaaacagtaggcccatccc

SEQ ID NO: 1155464 - DNA, 25 bp, Homo sapien
gtctgtggccaacaaataatctgtc

SEQ ID NO: 1155465 - DNA, 25 bp, Homo sapien
atgtagactgaaaacccaccgggca

SEQ ID NO: 1155466 - DNA, 25 bp, Homo sapien
gagagggttccttcacaaatgctga

SEQ ID NO: 1155467 - DNA, 25 bp, Homo sapien
tgcgttcaaagaggtacacttcctt

SEQ ID NO: 1155468 - DNA, 25 bp, Homo sapien
cgattttgagaatcaatgcgttcaa

SEQ ID NO: 1155469 - DNA, 25 bp, Homo sapien
caggtgtttcatgatctctcgattt

SEQ ID NO: 1155470 - DNA, 25 bp, Homo sapien
gaatctccgattgtgtgtataccat

SEQ ID NO: 1155471 - DNA, 25 bp, Homo sapien
tgggcagatggaagctcagtttatg

SEQ ID NO: 1155472 - DNA, 25 bp, Homo sapien
gttctgcatctgcctgggcagatgg

SEQ ID NO: 1155473 - DNA, 25 bp, Homo sapien
ttctgcatctgcctgggcagatgga

SEQ ID NO: 1155474 - DNA, 25 bp, Homo sapien
ttcggagctcctgaataatataatc

SEQ ID NO: 1155475 - DNA, 25 bp, Homo sapien
gggtcttcggagctcctgaataata

SEQ ID NO: 1155476 - DNA, 25 bp, Homo sapien
ggagctcctgaataatataatccac

SEQ ID NO: 1155477 - DNA, 25 bp, Homo sapien
tgtatttgggtcttcggagctcctg

SEQ ID NO: 1155478 - DNA, 25 bp, Homo sapien
agcttcagccaatgacttcacgtca

SEQ ID NO: 1155479 - DNA, 25 bp, Homo sapien
aatgacttcacgtcactcttgctga

SEQ ID NO: 1155480 - DNA, 25 bp, Homo sapien
ttcacgtcactcttgctgatcacat

SEQ ID NO: 1155481 - DNA, 25 bp, Homo sapien
agccaatgacttcacgtcactcttg

SEQ ID NO: 1155482 - DNA, 25 bp, Homo sapien
taaaaagggccaacatacgagatgt

SEQ ID NO: 1155483 - DNA, 25 bp, Homo sapien
ttgggtaacaacagtcaacgtggga

SEQ ID NO: 1155484 - DNA, 25 bp, Homo sapien
tccaatgtgttgtcatgagagagaa

SEQ ID NO: 1155485 - DNA, 25 bp, Homo sapien
ggagacctctatgcatacttatcaa

SEQ ID NO: 1155486 - DNA, 25 bp, Homo sapien
gtgggttcacagcaatgtaatcacc

SEQ ID NO: 1155487 - DNA, 25 bp, Homo sapien
aatgtgggttcacagcaatgtaatc

SEQ ID NO: 1155488 - DNA, 25 bp, Homo sapien
ggttcacagcaatgtaatcaccata

SEQ ID NO: 1155489 - DNA, 25 bp, Homo sapien
caaatgtgggttcacagcaatgtaa

SEQ ID NO: 1155490 - DNA, 25 bp, Homo sapien
tgaattaactctcgactgataaatt

SEQ ID NO: 1155491 - DNA, 25 bp, Homo sapien
tcttacaagtctaattatttgctga

SEQ ID NO: 1155492 - DNA, 25 bp, Homo sapien
ttctcttacaagtctaattatttgc

SEQ ID NO: 1155493 - DNA, 25 bp, Homo sapien
ctctcgactgataaattaaaccttt

SEQ ID NO: 1155494 - DNA, 25 bp, Homo sapien
gagctgtaagcccttgagttgttct

SEQ ID NO: 1155495 - DNA, 25 bp, Homo sapien
gctgggctggatcccaatttcgacc

SEQ ID NO: 1155496 - DNA, 25 bp, Homo sapien
gataaaaggagagctgtaagccctt

SEQ ID NO: 1155497 - DNA, 25 bp, Homo sapien
cttgagttgttctagatagctgggc

SEQ ID NO: 1155498 - DNA, 25 bp, Homo sapien
gctgataacgaatcatgggacactt

SEQ ID NO: 1155499 - DNA, 25 bp, Homo sapien
gatgagagctgataacgaatcatgg

SEQ ID NO: 1155500 - DNA, 25 bp, Homo sapien
gagagctgataacgaatcatgggac

SEQ ID NO: 1155501 - DNA, 25 bp, Homo sapien
ctgatgagagctgataacgaatcat

SEQ ID NO: 1155502 - DNA, 25 bp, Homo sapien
gaaggattcaaaagtctcacaaagt

SEQ ID NO: 1155503 - DNA, 25 bp, Homo sapien
tgcacccacatagatcttccatatg

SEQ ID NO: 1155504 - DNA, 25 bp, Homo sapien
tttcgcggaaacctaacatacaatc

SEQ ID NO: 1155505 - DNA, 25 bp, Homo sapien
taagaggttaggatatgaaacccta

SEQ ID NO: 1155506 - DNA, 25 bp, Homo sapien
tggcatcatcacagcgatctaaaat

SEQ ID NO: 1155507 - DNA, 25 bp, Homo sapien
ttagcaatggggtgatggcatcatc

SEQ ID NO: 1155508 - DNA, 25 bp, Homo sapien
gatctaaaataaggagcaatggagg

SEQ ID NO: 1155509 - DNA, 25 bp, Homo sapien
tctgtccgacggaattcaaacagtt

SEQ ID NO: 1155510 - DNA, 25 bp, Homo sapien
agtgcagtggcatgatctcagctta

SEQ ID NO: 1155511 - DNA, 25 bp, Homo sapien
gctattattcatataaatcatttta

SEQ ID NO: 1155512 - DNA, 25 bp, Homo sapien
ggagtgcagtggcatgatctcagct

SEQ ID NO: 1155513 - DNA, 25 bp, Homo sapien
tattctttgctattattcatataaa

SEQ ID NO: 1155514 - DNA, 25 bp, Homo sapien
tacagagaagtttcactccacagat

SEQ ID NO: 1155515 - DNA, 25 bp, Homo sapien
gaaactgaaacatagactgtgcctt

SEQ ID NO: 1155516 - DNA, 25 bp, Homo sapien
tacttagtttagtacgtggcacaaa

SEQ ID NO: 1155517 - DNA, 25 bp, Homo sapien
taacattagtacaagctgggaagaa

SEQ ID NO: 1155518 - DNA, 25 bp, Homo sapien
gaaggactggtttccagtctcacaa

SEQ ID NO: 1155519 - DNA, 25 bp, Homo sapien
tagattactttcagtcataggtctg

SEQ ID NO: 1155520 - DNA, 25 bp, Homo sapien
cttaaaataagtacaacaaggctgg

SEQ ID NO: 1155521 - DNA, 25 bp, Homo sapien
aaaagcaagttccattaagtcgcac

SEQ ID NO: 1155522 - DNA, 25 bp, Homo sapien
gatcaatccgattgttgtttatgcc

SEQ ID NO: 1155523 - DNA, 25 bp, Homo sapien
tctttactgattcccggcactctgg

SEQ ID NO: 1155524 - DNA, 25 bp, Homo sapien
tcccggcactctggaaagatcaatc

SEQ ID NO: 1155525 - DNA, 25 bp, Homo sapien
tagtagttcgtggaccatggcctga

SEQ ID NO: 1155526 - DNA, 25 bp, Homo sapien
attcatcattttcagcagataggac

SEQ ID NO: 1155527 - DNA, 25 bp, Homo sapien
gaattcatcattttcagcagatagg

SEQ ID NO: 1155528 - DNA, 25 bp, Homo sapien
tagaattcatcattttcagcagata

SEQ ID NO: 1155529 - DNA, 25 bp, Homo sapien
tagcatagaattcatcattttcagc

SEQ ID NO: 1155530 - DNA, 25 bp, Homo sapien
ctttatattgctaccaatctcagca

SEQ ID NO: 1155531 - DNA, 25 bp, Homo sapien
tctgaaaatcttccatgagattctt

SEQ ID NO: 1155532 - DNA, 25 bp, Homo sapien
tctcagcaaagttcaggtacatatt

SEQ ID NO: 1155533 - DNA, 25 bp, Homo sapien
tctgctattgattctagtttttgct

SEQ ID NO: 1155534 - DNA, 25 bp, Homo sapien
ggccagttcttgctcaacctctgaa

SEQ ID NO: 1155535 - DNA, 25 bp, Homo sapien
gtcacatgctttgaaacagtcccag

SEQ ID NO: 1155536 - DNA, 25 bp, Homo sapien
gattccgttcactgaccaatcgaga

SEQ ID NO: 1155537 - DNA, 25 bp, Homo sapien
actgtggataattctcaacaaacgc

SEQ ID NO: 1155538 - DNA, 25 bp, Homo sapien
gattaagtcaacagctccatgtcac

SEQ ID NO: 1155539 - DNA, 25 bp, Homo sapien
ttggtgcgatgaaaagcagatcttc

SEQ ID NO: 1155540 - DNA, 25 bp, Homo sapien
tctttctagtagactaggctgccct

SEQ ID NO: 1155541 - DNA, 25 bp, Homo sapien
cacaaagcctgtaagtggtatacca

SEQ ID NO: 1155542 - DNA, 25 bp, Homo sapien
taaaccaacagattaggacagtaag

SEQ ID NO: 1155543 - DNA, 25 bp, Homo sapien
cagtaagatggaattggcagaagac

SEQ ID NO: 1155544 - DNA, 25 bp, Homo sapien
gaaagcagacaagacccaattctac

SEQ ID NO: 1155545 - DNA, 25 bp, Homo sapien
tactgactggtaaatacatcggagc

SEQ ID NO: 1155546 - DNA, 25 bp, Homo sapien
tgccaaaggtcctgaagaatcagta

SEQ ID NO: 1155547 - DNA, 25 bp, Homo sapien
gaacaaatatgtggtgttataacag

SEQ ID NO: 1155548 - DNA, 25 bp, Homo sapien
tgggttgttgagaaattaggaaaga

SEQ ID NO: 1155549 - DNA, 25 bp, Homo sapien
ttgagaaattaggaaagacttcaca

SEQ ID NO: 1155550 - DNA, 25 bp, Homo sapien
gtgatacatcactactatgacaatt

SEQ ID NO: 1155551 - DNA, 25 bp, Homo sapien
tttcacttgagtcatctgttgtaca

SEQ ID NO: 1155552 - DNA, 25 bp, Homo sapien
ttgtacaatgccttagatctaataa

SEQ ID NO: 1155553 - DNA, 25 bp, Homo sapien
taattattgaatggtagtgatacat

SEQ ID NO: 1155554 - DNA, 25 bp, Homo sapien
agtcctggcaggctattgctgctgt

SEQ ID NO: 1155555 - DNA, 25 bp, Homo sapien
cctgaggtccatcattagtcctggc

SEQ ID NO: 1155556 - DNA, 25 bp, Homo sapien
aaagcataaagcatcaccaggcggg

SEQ ID NO: 1155557 - DNA, 25 bp, Homo sapien
agcataaagcatcaccaggcgggca

SEQ ID NO: 1155558 - DNA, 25 bp, Homo sapien
tttgattgcttaggcatcaggaagc

SEQ ID NO: 1155559 - DNA, 25 bp, Homo sapien
tatcattcgttagagctaagaatat

SEQ ID NO: 1155560 - DNA, 25 bp, Homo sapien
taacagagttggttcctgtttggtg

SEQ ID NO: 1155561 - DNA, 25 bp, Homo sapien
gtgggctaatatggaaactggttac

SEQ ID NO: 1155562 - DNA, 25 bp, Homo sapien
tcagtcctttgaggaattgtttggt

SEQ ID NO: 1155563 - DNA, 25 bp, Homo sapien
ggtgatagccacagcatctttgggg

SEQ ID NO: 1155564 - DNA, 25 bp, Homo sapien
ttaccaccatattcaacaactgcag

SEQ ID NO: 1155565 - DNA, 25 bp, Homo sapien
tgaagaggtcacttcctctgactcg

SEQ ID NO: 1155566 - DNA, 25 bp, Homo sapien
caaggacttcaactgttctcactca

SEQ ID NO: 1155567 - DNA, 25 bp, Homo sapien
tagcagcaatcttcaagatactttg

SEQ ID NO: 1155568 - DNA, 25 bp, Homo sapien
taactgacacagtactaaattagca

SEQ ID NO: 1155569 - DNA, 25 bp, Homo sapien
tcaaggacttcaactgttctcactc

SEQ ID NO: 1155570 - DNA, 25 bp, Homo sapien
tgtaggaaaggttgatgctgtgtat

SEQ ID NO: 1155571 - DNA, 25 bp, Homo sapien
gaaaggttgatgctgtgtatataca

SEQ ID NO: 1155572 - DNA, 25 bp, Homo sapien
ccttcctttgatgagatgatccagg

SEQ ID NO: 1155573 - DNA, 25 bp, Homo sapien
tttccttaagccttcctttgatgag

SEQ ID NO: 1155574 - DNA, 25 bp, Homo sapien
aaatggtacagttcttatgagcatt

SEQ ID NO: 1155575 - DNA, 25 bp, Homo sapien
tagcaacaagattctactacatttg

SEQ ID NO: 1155576 - DNA, 25 bp, Homo sapien
taagctgtagcaacaagattctact

SEQ ID NO: 1155577 - DNA, 25 bp, Homo sapien
caaaaaataagctgtagcaacaaga

SEQ ID NO: 1155578 - DNA, 25 bp, Homo sapien
gaaatcttagcctgttcctaggtcc

SEQ ID NO: 1155579 - DNA, 25 bp, Homo sapien
aaatcttagcctgttcctaggtcca

SEQ ID NO: 1155580 - DNA, 25 bp, Homo sapien
aatcttagcctgttcctaggtccag

SEQ ID NO: 1155581 - DNA, 25 bp, Homo sapien
tcttagcctgttcctaggtccagaa

SEQ ID NO: 1155582 - DNA, 25 bp, Homo sapien
gagccaggctacatggattgaagaa

SEQ ID NO: 1155583 - DNA, 25 bp, Homo sapien
agtgctttccccgaatatgtggtag

SEQ ID NO: 1155584 - DNA, 25 bp, Homo sapien
gagtcccctggatttactactgtga

SEQ ID NO: 1155585 - DNA, 25 bp, Homo sapien
gaggttgaggcccaactgagtctca

SEQ ID NO: 1155586 - DNA, 25 bp, Homo sapien
ccatgagtgtagctgatactggaca

SEQ ID NO: 1155587 - DNA, 25 bp, Homo sapien
cagtcactagcttcacttgggtagc

SEQ ID NO: 1155588 - DNA, 25 bp, Homo sapien
tactggacatgcgaacacagctcag

SEQ ID NO: 1155589 - DNA, 25 bp, Homo sapien
tacaatggcctctgtacaaggacct

SEQ ID NO: 1155590 - DNA, 25 bp, Homo sapien
gcctcttcataggtggctcctccaa

SEQ ID NO: 1155591 - DNA, 25 bp, Homo sapien
tacaaacacaatgatatcctgaggt

SEQ ID NO: 1155592 - DNA, 25 bp, Homo sapien
gagtggtgcggttcaggttataaac

SEQ ID NO: 1155593 - DNA, 25 bp, Homo sapien
ttttcgtgttgtgcactgtggtgcc

SEQ ID NO: 1155594 - DNA, 25 bp, Homo sapien
tgtaatcactactttcaataattcc

SEQ ID NO: 1155595 - DNA, 25 bp, Homo sapien
gagtttcttgtaatcactactttca

SEQ ID NO: 1155596 - DNA, 25 bp, Homo sapien
tcttgtaatcactactttcaataat

SEQ ID NO: 1155597 - DNA, 25 bp, Homo sapien
taatcactactttcaataattcccc

SEQ ID NO: 1155598 - DNA, 25 bp, Homo sapien
caacaatcatgtcacggttctccag

SEQ ID NO: 1155599 - DNA, 25 bp, Homo sapien
tctagaatacatggctcagcatgga

SEQ ID NO: 1155600 - DNA, 25 bp, Homo sapien
tagaagacgtttacatcagactgca

SEQ ID NO: 1155601 - DNA, 25 bp, Homo sapien
acacagaatgtacgatgagatccct

SEQ ID NO: 1155602 - DNA, 25 bp, Homo sapien
gccttccacagtgctcaaaatgctg

SEQ ID NO: 1155603 - DNA, 25 bp, Homo sapien
tttgtatgtactatgactaaattac

SEQ ID NO: 1155604 - DNA, 25 bp, Homo sapien
tagtcaaacacatctaaaacatgta

SEQ ID NO: 1155605 - DNA, 25 bp, Homo sapien
cgtgcccagcccatagcactattaa

SEQ ID NO: 1155606 - DNA, 25 bp, Homo sapien
aaattatgttcatttttggaaatat

SEQ ID NO: 1155607 - DNA, 25 bp, Homo sapien
aattatgttcatttttggaaatata

SEQ ID NO: 1155608 - DNA, 25 bp, Homo sapien
actgctttttaactgaccttctcca

SEQ ID NO: 1155609 - DNA, 25 bp, Homo sapien
tgaccttctccatacacattgataa

SEQ ID NO: 1155610 - DNA, 25 bp, Homo sapien
taagcttcacactattaatctgttt

SEQ ID NO: 1155611 - DNA, 25 bp, Homo sapien
gaaactagataacatctaccttgct

SEQ ID NO: 1155612 - DNA, 25 bp, Homo sapien
catctggaaataccaggcatctcac

SEQ ID NO: 1155613 - DNA, 25 bp, Homo sapien
aaacaaacaaatctacatctggaaa

SEQ ID NO: 1155614 - DNA, 25 bp, Homo sapien
gagatagactttacttatgaagaac

SEQ ID NO: 1155615 - DNA, 25 bp, Homo sapien
cctgcccctcactggagatagactt

SEQ ID NO: 1155616 - DNA, 25 bp, Homo sapien
gagaccatataaggcctggcatgtc

SEQ ID NO: 1155617 - DNA, 25 bp, Homo sapien
tagagcgggctataaggagagacca

SEQ ID NO: 1155618 - DNA, 25 bp, Homo sapien
gacatctggagggttctgcaaaaag

SEQ ID NO: 1155619 - DNA, 25 bp, Homo sapien
tgagtcaagacctgaatgaggcaac

SEQ ID NO: 1155620 - DNA, 25 bp, Homo sapien
tcactgttcctaaacacgtcatgag

SEQ ID NO: 1155621 - DNA, 25 bp, Homo sapien
agtggctcagctgggattcagatcc

SEQ ID NO: 1155622 - DNA, 25 bp, Homo sapien
cagcatcttgcaatactgcttccca

SEQ ID NO: 1155623 - DNA, 25 bp, Homo sapien
ccacttgtctgttccatctctcaga

SEQ ID NO: 1155624 - DNA, 25 bp, Homo sapien
taactcagtaccatgttacatcagc

SEQ ID NO: 1155625 - DNA, 25 bp, Homo sapien
tgaaactgtctcagagcttgtatgt

SEQ ID NO: 1155626 - DNA, 25 bp, Homo sapien
gatctattaagactaacatttcaag

SEQ ID NO: 1155627 - DNA, 25 bp, Homo sapien
taggatcccagaatttttaagggca

SEQ ID NO: 1155628 - DNA, 25 bp, Homo sapien
gacttgagagctctccttgcttcgg

SEQ ID NO: 1155629 - DNA, 25 bp, Homo sapien
tgcagtccagaagccagaacttcct

SEQ ID NO: 1155630 - DNA, 25 bp, Homo sapien
ccttgcttcggctgtgcagtccaga

SEQ ID NO: 1155631 - DNA, 25 bp, Homo sapien
cttgatgtgacttgagagctctcct

SEQ ID NO: 1155632 - DNA, 25 bp, Homo sapien
ccaaggagtgtggtatgtacatcaa

SEQ ID NO: 1155633 - DNA, 25 bp, Homo sapien
tgtctgtgccaaccacgtatccgtg

SEQ ID NO: 1155634 - DNA, 25 bp, Homo sapien
gatgagttctaacaaccagcacaga

SEQ ID NO: 1155635 - DNA, 25 bp, Homo sapien
tattgttaggacaactctgggagtc

SEQ ID NO: 1155636 - DNA, 25 bp, Homo sapien
gattcgtgaagactggagatcgcca

SEQ ID NO: 1155637 - DNA, 25 bp, Homo sapien
gacacagtgtcaatgctggcaggaa

SEQ ID NO: 1155638 - DNA, 25 bp, Homo sapien
ttcttccagcgtacaatgcctcagg

SEQ ID NO: 1155639 - DNA, 25 bp, Homo sapien
caggccttattgtagcttcaggaga

SEQ ID NO: 1155640 - DNA, 25 bp, Homo sapien
atcgcggagccgcagctcgggcgct

SEQ ID NO: 1155641 - DNA, 25 bp, Homo sapien
aataaagggcgaatcgcggagccgc

SEQ ID NO: 1155642 - DNA, 25 bp, Homo sapien
gcgagttcagaataaagggcgaatc

SEQ ID NO: 1155643 - DNA, 25 bp, Homo sapien
gccgctgacgttgcgagttcagaat

SEQ ID NO: 1155644 - DNA, 25 bp, Homo sapien
ctcgcattcgcactcgcacacacac

SEQ ID NO: 1155645 - DNA, 25 bp, Homo sapien
aggccggcctccctcgcattcgcac

SEQ ID NO: 1155646 - DNA, 25 bp, Homo sapien
tagctccggtttcactcaaggccgg

SEQ ID NO: 1155647 - DNA, 25 bp, Homo sapien
gcgggagggcgtcggagctgccccg

SEQ ID NO: 1155648 - DNA, 25 bp, Homo sapien
gcttggcggaattgttcttcttcat

SEQ ID NO: 1155649 - DNA, 25 bp, Homo sapien
cgcttggcggaattgttcttcttca

SEQ ID NO: 1155650 - DNA, 25 bp, Homo sapien
cttggcggaattgttcttcttcatc

SEQ ID NO: 1155651 - DNA, 25 bp, Homo sapien
gaagcgggcggttaggagattccag

SEQ ID NO: 1155652 - DNA, 25 bp, Homo sapien
cgcggggactaacggcgtttctctg

SEQ ID NO: 1155653 - DNA, 25 bp, Homo sapien
gcccagtctcctccgaaggctgcgg

SEQ ID NO: 1155654 - DNA, 25 bp, Homo sapien
ccgaataaacaaccggggctgcaag

SEQ ID NO: 1155655 - DNA, 25 bp, Homo sapien
ttcagcaccacatagcggtttttcc

SEQ ID NO: 1155656 - DNA, 25 bp, Homo sapien
ttctcagagatgtagagctggtccc

SEQ ID NO: 1155657 - DNA, 25 bp, Homo sapien
ttcccgcagaatttccggacccagc

SEQ ID NO: 1155658 - DNA, 25 bp, Homo sapien
cagccgaccttctcgggcggtgcag

SEQ ID NO: 1155659 - DNA, 25 bp, Homo sapien
ggctatgagaaaacggagagttaga

SEQ ID NO: 1155660 - DNA, 25 bp, Homo sapien
gagagttagaggcaagaggcaccca

SEQ ID NO: 1155661 - DNA, 25 bp, Homo sapien
ctggtcttctcattaaagggtggcc

SEQ ID NO: 1155662 - DNA, 25 bp, Homo sapien
aaaaacactgagtaagcggccaact

SEQ ID NO: 1155663 - DNA, 25 bp, Homo sapien
gaacacagaatacctcccgtgaggg

SEQ ID NO: 1155664 - DNA, 25 bp, Homo sapien
tctaaccggtacacaggacagtctt

SEQ ID NO: 1155665 - DNA, 25 bp, Homo sapien
tagttcttccctagatgcctcagta

SEQ ID NO: 1155666 - DNA, 25 bp, Homo sapien
tctactgaataaggatgtctactgc

SEQ ID NO: 1155667 - DNA, 25 bp, Homo sapien
tttgtgattgggcagaggtaactct

SEQ ID NO: 1155668 - DNA, 25 bp, Homo sapien
caacttgctagttttgtgtaaacag

SEQ ID NO: 1155669 - DNA, 25 bp, Homo sapien
tagaaagccagaaaattgtggagaa

SEQ ID NO: 1155670 - DNA, 25 bp, Homo sapien
cctggtcaacaacgcgaaacactgt

SEQ ID NO: 1155671 - DNA, 25 bp, Homo sapien
ctttgatgtgtaggaagttctccct

SEQ ID NO: 1155672 - DNA, 25 bp, Homo sapien
ctctttgatgtgtaggaagttctcc

SEQ ID NO: 1155673 - DNA, 25 bp, Homo sapien
aagttctccctgattcgtaactaga

SEQ ID NO: 1155674 - DNA, 25 bp, Homo sapien
gttctccctgattcgtaactagagt

SEQ ID NO: 1155675 - DNA, 25 bp, Homo sapien
tctctgtacctaaaagcaaggatca

SEQ ID NO: 1155676 - DNA, 25 bp, Homo sapien
aggacaccagatatcctaggctgag

SEQ ID NO: 1155677 - DNA, 25 bp, Homo sapien
gaccagtcagatggtcctgactcat

SEQ ID NO: 1155678 - DNA, 25 bp, Homo sapien
caaggatcaactacgcttttgcccc

SEQ ID NO: 1155679 - DNA, 25 bp, Homo sapien
ggtgtccaagagcaattcccagaaa

SEQ ID NO: 1155680 - DNA, 25 bp, Homo sapien
gctgaacgtctcatcgaggccgcat

SEQ ID NO: 1155681 - DNA, 25 bp, Homo sapien
gacagacctgtatggcccttgatgg

SEQ ID NO: 1155682 - DNA, 25 bp, Homo sapien
tagttacaagtccagaccgtgcagt

SEQ ID NO: 1155683 - DNA, 25 bp, Homo sapien
catagtcactcaggtcaaatacctc

SEQ ID NO: 1155684 - DNA, 25 bp, Homo sapien
gacttccggagctcttcacacttct

SEQ ID NO: 1155685 - DNA, 25 bp, Homo sapien
tgttaccgggctgtttggagtgggc

SEQ ID NO: 1155686 - DNA, 25 bp, Homo sapien
aagagtaaacttgctatgatttttc

SEQ ID NO: 1155687 - DNA, 25 bp, Homo sapien
ttctcttctggactcactgccagga

SEQ ID NO: 1155688 - DNA, 25 bp, Homo sapien
aagatacggttcttggctcgggtga

SEQ ID NO: 1155689 - DNA, 25 bp, Homo sapien
ctcatccaagatacggttcttggct

SEQ ID NO: 1155690 - DNA, 25 bp, Homo sapien
cagagttgagggcattgatccacga

SEQ ID NO: 1155691 - DNA, 25 bp, Homo sapien
agagatcagggcttttaaaagggcg

SEQ ID NO: 1155692 - DNA, 25 bp, Homo sapien
tgagtgctcttcagcgactcgctgt

SEQ ID NO: 1155693 - DNA, 25 bp, Homo sapien
gctctttaagctgacccaaggctgg

SEQ ID NO: 1155694 - DNA, 25 bp, Homo sapien
gaacatgtgcccactccattcactg

SEQ ID NO: 1155695 - DNA, 25 bp, Homo sapien
atgggcaagatagctgtcctcctca

SEQ ID NO: 1155696 - DNA, 25 bp, Homo sapien
ggcaagatagctgtcctcctcaacg

SEQ ID NO: 1155697 - DNA, 25 bp, Homo sapien
caagatagctgtcctcctcaacggt

SEQ ID NO: 1155698 - DNA, 25 bp, Homo sapien
ggatttttgccctgtctcgagtggg

SEQ ID NO: 1155699 - DNA, 25 bp, Homo sapien
tgtggactctcagcaattaaactgc

SEQ ID NO: 1155700 - DNA, 25 bp, Homo sapien
gggcgccctcttccttggtattgtg

SEQ ID NO: 1155701 - DNA, 25 bp, Homo sapien
gaagacttaagagctcagaggcatg

SEQ ID NO: 1155702 - DNA, 25 bp, Homo sapien
gctgattacagtgaggttccaactc

SEQ ID NO: 1155703 - DNA, 25 bp, Homo sapien
ctgtggaggaaggggggaatgagtg

SEQ ID NO: 1155704 - DNA, 25 bp, Homo sapien
tgtggaggaaggggggaatgagtgg

SEQ ID NO: 1155705 - DNA, 25 bp, Homo sapien
catcccatccgaggtagaggtggaa

SEQ ID NO: 1155706 - DNA, 25 bp, Homo sapien
tctgactcagaatccggcggagacc

SEQ ID NO: 1155707 - DNA, 25 bp, Homo sapien
gatcaagtccaaggtcagcatccca

SEQ ID NO: 1155708 - DNA, 25 bp, Homo sapien
tctctgtgggcgtcaacttcttggg

SEQ ID NO: 1155709 - DNA, 25 bp, Homo sapien
ggtgggacataacagaaaacatcct

SEQ ID NO: 1155710 - DNA, 25 bp, Homo sapien
acttccatgtgcacggacaggtgac

SEQ ID NO: 1155711 - DNA, 25 bp, Homo sapien
taaaaacttcctgctactgctgcgg

SEQ ID NO: 1155712 - DNA, 25 bp, Homo sapien
taagagtctgtccaacccgacaagt

SEQ ID NO: 1155713 - DNA, 25 bp, Homo sapien
ggctgtttgctgtcatggctttaat

SEQ ID NO: 1155714 - DNA, 25 bp, Homo sapien
cttcaaatcaggaaccttaggagaa

SEQ ID NO: 1155715 - DNA, 25 bp, Homo sapien
gcatgccaaggacataggacaggag

SEQ ID NO: 1155716 - DNA, 25 bp, Homo sapien
gacataggacaggagactatgccac

SEQ ID NO: 1155717 - DNA, 25 bp, Homo sapien
tacccaggtaaagatgtcaagttga

SEQ ID NO: 1155718 - DNA, 25 bp, Homo sapien
gcatgaattgcggtacaagcggagt

SEQ ID NO: 1155719 - DNA, 25 bp, Homo sapien
taagatgcatgttagatacccaggt

SEQ ID NO: 1155720 - DNA, 25 bp, Homo sapien
catacagatttggtgtgtctcggaa

SEQ ID NO: 1155721 - DNA, 25 bp, Homo sapien
ccttctcggttctccagagcaacat

SEQ ID NO: 1155722 - DNA, 25 bp, Homo sapien
tctgctcacccttctcggttctcca

SEQ ID NO: 1155723 - DNA, 25 bp, Homo sapien
ggtgtctgctcacccttctcggttc

SEQ ID NO: 1155724 - DNA, 25 bp, Homo sapien
gattggtgtctgctcacccttctcg

SEQ ID NO: 1155725 - DNA, 25 bp, Homo sapien
ctgtcctcttgctgtttggggtcat

SEQ ID NO: 1155726 - DNA, 25 bp, Homo sapien
cttctgtcctcttgctgtttggggt

SEQ ID NO: 1155727 - DNA, 25 bp, Homo sapien
ttctgtcctcttgctgtttggggtc

SEQ ID NO: 1155728 - DNA, 25 bp, Homo sapien
tctgtcctcttgctgtttggggtca

SEQ ID NO: 1155729 - DNA, 25 bp, Homo sapien
attagttaacctcttgtagacattc

SEQ ID NO: 1155730 - DNA, 25 bp, Homo sapien
aattagttaacctcttgtagacatt

SEQ ID NO: 1155731 - DNA, 25 bp, Homo sapien
ggtagaagaaataaggtgaatttga

SEQ ID NO: 1155732 - DNA, 25 bp, Homo sapien
ctggggtagaagaaataaggtgaat

SEQ ID NO: 1155733 - DNA, 25 bp, Homo sapien
gctggggtagaagaaataaggtgaa

SEQ ID NO: 1155734 - DNA, 25 bp, Homo sapien
gccgaggcagtttccccaacgaatc

SEQ ID NO: 1155735 - DNA, 25 bp, Homo sapien
cccaacgaatcactggtacggcatg

SEQ ID NO: 1155736 - DNA, 25 bp, Homo sapien
ttctgaatgagaatctaagtgctgc

SEQ ID NO: 1155737 - DNA, 25 bp, Homo sapien
ctggtacggcatgaatgcgtttgtt

SEQ ID NO: 1155738 - DNA, 25 bp, Homo sapien
tttgccattatacttggttttccaa

SEQ ID NO: 1155739 - DNA, 25 bp, Homo sapien
tgccattatacttggttttccaagt

SEQ ID NO: 1155740 - DNA, 25 bp, Homo sapien
gttcttcacatggtcacttggctta

SEQ ID NO: 1155741 - DNA, 25 bp, Homo sapien
ttcttcacatggtcacttggcttac

SEQ ID NO: 1155742 - DNA, 25 bp, Homo sapien
ggtgccttcggaaaccagctctcga

SEQ ID NO: 1155743 - DNA, 25 bp, Homo sapien
tgaaaggcttcattgacacagcagc

SEQ ID NO: 1155744 - DNA, 25 bp, Homo sapien
caaaacaagagagccgtacaggagg

SEQ ID NO: 1155745 - DNA, 25 bp, Homo sapien
gagttcactgttctcgccagctgag

SEQ ID NO: 1155746 - DNA, 25 bp, Homo sapien
cccgataattgcaacggatgtgact

SEQ ID NO: 1155747 - DNA, 25 bp, Homo sapien
cgataattgcaacggatgtgacttt

SEQ ID NO: 1155748 - DNA, 25 bp, Homo sapien
taattgcaacggatgtgactttggg

SEQ ID NO: 1155749 - DNA, 25 bp, Homo sapien
ctgcccgataattgcaacggatgtg

SEQ ID NO: 1155750 - DNA, 25 bp, Homo sapien
gaggacaccttgatgcccacattga

SEQ ID NO: 1155751 - DNA, 25 bp, Homo sapien
acaccttgatgcccacattgatgcc

SEQ ID NO: 1155752 - DNA, 25 bp, Homo sapien
ggacaccttgatgcccacattgatg

SEQ ID NO: 1155753 - DNA, 25 bp, Homo sapien
aggacaccttgatgcccacattgat

SEQ ID NO: 1155754 - DNA, 25 bp, Homo sapien
tcacaagcacgatcctgctactgat

SEQ ID NO: 1155755 - DNA, 25 bp, Homo sapien
cacaagcacgatcctgctactgatc

SEQ ID NO: 1155756 - DNA, 25 bp, Homo sapien
gtgcggacacgcgatcggtatagca

SEQ ID NO: 1155757 - DNA, 25 bp, Homo sapien
cggacacgcgatcggtatagcacac

SEQ ID NO: 1155758 - DNA, 25 bp, Homo sapien
cctcaaaagtcggaacaattgcctg

SEQ ID NO: 1155759 - DNA, 25 bp, Homo sapien
gaagcagtgttagtgttcctcaaaa

SEQ ID NO: 1155760 - DNA, 25 bp, Homo sapien
ccgctctctcaaaaggaacttggga

SEQ ID NO: 1155761 - DNA, 25 bp, Homo sapien
tccagagacatgcaggtgagccctt

SEQ ID NO: 1155762 - DNA, 25 bp, Homo sapien
aaagaactagaatttctgagtatgg

SEQ ID NO: 1155763 - DNA, 25 bp, Homo sapien
tgataattgcctgtgtgtcaatggg

SEQ ID NO: 1155764 - DNA, 25 bp, Homo sapien
agtccttgataattgcctgtgtgtc

SEQ ID NO: 1155765 - DNA, 25 bp, Homo sapien
ttcaaagaactagaatttctgagta

SEQ ID NO: 1155766 - DNA, 25 bp, Homo sapien
cccacacctatctggtggtggtagt

SEQ ID NO: 1155767 - DNA, 25 bp, Homo sapien
tagtgggcgtttatatttgcgttcc

SEQ ID NO: 1155768 - DNA, 25 bp, Homo sapien
tggagttaaggaacagatccccgga

SEQ ID NO: 1155769 - DNA, 25 bp, Homo sapien
gatgaagaagaagattaacctggag

SEQ ID NO: 1155770 - DNA, 25 bp, Homo sapien
gatgcgtgaagtgaacaagcaagct

SEQ ID NO: 1155771 - DNA, 25 bp, Homo sapien
aataccagatcgatgcgtgaagtga

SEQ ID NO: 1155772 - DNA, 25 bp, Homo sapien
ttaatatattggactcggatagaaa

SEQ ID NO: 1155773 - DNA, 25 bp, Homo sapien
ttggactcggatagaaaatatatca

SEQ ID NO: 1155774 - DNA, 25 bp, Homo sapien
aatagcacgatttcggttcaccgca

SEQ ID NO: 1155775 - DNA, 25 bp, Homo sapien
tcttatcccactcttttgtatccca

SEQ ID NO: 1155776 - DNA, 25 bp, Homo sapien
agggtttcgcttttgctgtctaggc

SEQ ID NO: 1155777 - DNA, 25 bp, Homo sapien
tatcccatcccacatagacagactg

SEQ ID NO: 1155778 - DNA, 25 bp, Homo sapien
tgattgatctgcaaagccaagccat

SEQ ID NO: 1155779 - DNA, 25 bp, Homo sapien
gagacagcggctgtaactgccagac

SEQ ID NO: 1155780 - DNA, 25 bp, Homo sapien
tggaggctgcacgtctcaggaatgt

SEQ ID NO: 1155781 - DNA, 25 bp, Homo sapien
taaagcccatttgtatgcccagtgg

SEQ ID NO: 1155782 - DNA, 25 bp, Homo sapien
taggagatatataacaagaaggaat

SEQ ID NO: 1155783 - DNA, 25 bp, Homo sapien
cctgagttgtgtcctaagttctaag

SEQ ID NO: 1155784 - DNA, 25 bp, Homo sapien
gaatgggaagagtccagaattagga

SEQ ID NO: 1155785 - DNA, 25 bp, Homo sapien
gctccctgggtggtatgcggcagat

SEQ ID NO: 1155786 - DNA, 25 bp, Homo sapien
taaggtggctctgaactggtgtatg

SEQ ID NO: 1155787 - DNA, 25 bp, Homo sapien
cgagctcctggcgtgagtgtattta

SEQ ID NO: 1155788 - DNA, 25 bp, Homo sapien
tagctggccagcgactttacaactg

SEQ ID NO: 1155789 - DNA, 25 bp, Homo sapien
cagtagggtatcatgggtttctgga

SEQ ID NO: 1155790 - DNA, 25 bp, Homo sapien
ggggactgggaatttgaggactaga

SEQ ID NO: 1155791 - DNA, 25 bp, Homo sapien
gactgggaatttgaggactagagga

SEQ ID NO: 1155792 - DNA, 25 bp, Homo sapien
ggactgggaatttgaggactagagg

SEQ ID NO: 1155793 - DNA, 25 bp, Homo sapien
caggggactgggaatttgaggacta

SEQ ID NO: 1155794 - DNA, 25 bp, Homo sapien
ggatccaaatcacctccagcaggag

SEQ ID NO: 1155795 - DNA, 25 bp, Homo sapien
ctccagcaggagggcggagaacaac

SEQ ID NO: 1155796 - DNA, 25 bp, Homo sapien
gccaggatccaaatcacctccagca

SEQ ID NO: 1155797 - DNA, 25 bp, Homo sapien
ccagcaggagggcggagaacaacat

SEQ ID NO: 1155798 - DNA, 25 bp, Homo sapien
tcctcccacccgcacagtgtgtctt

SEQ ID NO: 1155799 - DNA, 25 bp, Homo sapien
gattagagcaggatctaggagccat

SEQ ID NO: 1155800 - DNA, 25 bp, Homo sapien
gagcaggatctaggagccatatatg

SEQ ID NO: 1155801 - DNA, 25 bp, Homo sapien
taggagccatatatgtgaaactcaa

SEQ ID NO: 1155802 - DNA, 25 bp, Homo sapien
gagggcagaggggatgcatagaaaa

SEQ ID NO: 1155803 - DNA, 25 bp, Homo sapien
ggcagaggggatgcatagaaaacct

SEQ ID NO: 1155804 - DNA, 25 bp, Homo sapien
cagaggggatgcatagaaaacctga

SEQ ID NO: 1155805 - DNA, 25 bp, Homo sapien
ggggatgcatagaaaacctgaatac

SEQ ID NO: 1155806 - DNA, 25 bp, Homo sapien
taagaggctggccaatggtcctgac

SEQ ID NO: 1155807 - DNA, 25 bp, Homo sapien
tgttgtgcaggtccaaaggctcggt

SEQ ID NO: 1155808 - DNA, 25 bp, Homo sapien
cactgtctgtctgaatatcgatggg

SEQ ID NO: 1155809 - DNA, 25 bp, Homo sapien
tcggtgccaggctggtcatatccgt

SEQ ID NO: 1155810 - DNA, 25 bp, Homo sapien
ttgacaagatttgagggcggcacat

SEQ ID NO: 1155811 - DNA, 25 bp, Homo sapien
acatcttgacaagatttgagggcgg

SEQ ID NO: 1155812 - DNA, 25 bp, Homo sapien
gcacatcttacgcatgctcaggaac

SEQ ID NO: 1155813 - DNA, 25 bp, Homo sapien
ttacgcatgctcaggaacaccccat

SEQ ID NO: 1155814 - DNA, 25 bp, Homo sapien
ccctggggatcctttctgaccccag

SEQ ID NO: 1155815 - DNA, 25 bp, Homo sapien
gctgggcagctacatattttcgggg

SEQ ID NO: 1155816 - DNA, 25 bp, Homo sapien
cggggaagtccacccagatacaggg

SEQ ID NO: 1155817 - DNA, 25 bp, Homo sapien
cagctacatattttcggggaagtcc

SEQ ID NO: 1155818 - DNA, 25 bp, Homo sapien
caagctgtcataggaatcagagtca

SEQ ID NO: 1155819 - DNA, 25 bp, Homo sapien
tgtcataggaatcagagtcataatg

SEQ ID NO: 1155820 - DNA, 25 bp, Homo sapien
gctgtcataggaatcagagtcataa

SEQ ID NO: 1155821 - DNA, 25 bp, Homo sapien
aagctgtcataggaatcagagtcat

SEQ ID NO: 1155822 - DNA, 25 bp, Homo sapien
cagaatgtgttcataagctatattc

SEQ ID NO: 1155823 - DNA, 25 bp, Homo sapien
ctttatgcctgacttcatgcaagtg

SEQ ID NO: 1155824 - DNA, 25 bp, Homo sapien
tgacttcatgcaagtgactcagaat

SEQ ID NO: 1155825 - DNA, 25 bp, Homo sapien
taagctatattcttagtctcaccca

SEQ ID NO: 1155826 - DNA, 25 bp, Homo sapien
gtagcggaagtactgccccagctgt

SEQ ID NO: 1155827 - DNA, 25 bp, Homo sapien
cattgtagcggaagtactgccccag

SEQ ID NO: 1155828 - DNA, 25 bp, Homo sapien
ttgtgagcgagccattgtagcggaa

SEQ ID NO: 1155829 - DNA, 25 bp, Homo sapien
cgagccattgtagcggaagtactgc

SEQ ID NO: 1155830 - DNA, 25 bp, Homo sapien
atctgggaccttctataaaaaactg

SEQ ID NO: 1155831 - DNA, 25 bp, Homo sapien
ggtagttctgtaccagaagcttaga

SEQ ID NO: 1155832 - DNA, 25 bp, Homo sapien
aaagaccatgcgctgattgagaggc

SEQ ID NO: 1155833 - DNA, 25 bp, Homo sapien
ctgaagggctcggtagttctgtacc

SEQ ID NO: 1155834 - DNA, 25 bp, Homo sapien
ggagaacaatgtcccctgaagcttt

SEQ ID NO: 1155835 - DNA, 25 bp, Homo sapien
caatgaaataaacagccaggagaag

SEQ ID NO: 1155836 - DNA, 25 bp, Homo sapien
cgaatctttctagcaatgaaataaa

SEQ ID NO: 1155837 - DNA, 25 bp, Homo sapien
gcagagacagccaaccaagattcct

SEQ ID NO: 1155838 - DNA, 25 bp, Homo sapien
tcctacacctagactcagcatttca

SEQ ID NO: 1155839 - DNA, 25 bp, Homo sapien
ttatgcctcagtcgtggcttgtgct

SEQ ID NO: 1155840 - DNA, 25 bp, Homo sapien
tatgcctcagtcgtggcttgtgctg

SEQ ID NO: 1155841 - DNA, 25 bp, Homo sapien
cactctttcggttttccagcctctt

SEQ ID NO: 1155842 - DNA, 25 bp, Homo sapien
tgaagaccacactctttcggttttc

SEQ ID NO: 1155843 - DNA, 25 bp, Homo sapien
gggaagtcatccacatccatggtat

SEQ ID NO: 1155844 - DNA, 25 bp, Homo sapien
tgttctctgcattaacaacacagcg

SEQ ID NO: 1155845 - DNA, 25 bp, Homo sapien
tagaggcttcctgataggcatgaag

SEQ ID NO: 1155846 - DNA, 25 bp, Homo sapien
tactactcctacagtgtttctggcc

SEQ ID NO: 1155847 - DNA, 25 bp, Homo sapien
ctttatcctaaggagagatcccgca

SEQ ID NO: 1155848 - DNA, 25 bp, Homo sapien
tatattgatcaaaaatatacaactt

SEQ ID NO: 1155849 - DNA, 25 bp, Homo sapien
ccaaatatattgatcaaaaatatac

SEQ ID NO: 1155850 - DNA, 25 bp, Homo sapien
tattgatcaaaaatatacaacttca

SEQ ID NO: 1155851 - DNA, 25 bp, Homo sapien
tgatcaaaaatatacaacttcaaca

SEQ ID NO: 1155852 - DNA, 25 bp, Homo sapien
ggcattactggaactaatggtttta

SEQ ID NO: 1155853 - DNA, 25 bp, Homo sapien
tggaggagtcagactaccatgacat

SEQ ID NO: 1155854 - DNA, 25 bp, Homo sapien
taccatgacatcgtagggaaggagg

SEQ ID NO: 1155855 - DNA, 25 bp, Homo sapien
ggagtgtcccatccttttaatcaag

SEQ ID NO: 1155856 - DNA, 25 bp, Homo sapien
aactcttctaacctccttgggctat

SEQ ID NO: 1155857 - DNA, 25 bp, Homo sapien
tggctgggctcatttcggtcccttt

SEQ ID NO: 1155858 - DNA, 25 bp, Homo sapien
tctggacagtgcaggttgccaagaa

SEQ ID NO: 1155859 - DNA, 25 bp, Homo sapien
ggacctagtttagccattgccctgg

SEQ ID NO: 1155860 - DNA, 25 bp, Homo sapien
aggacagtcgggtgatggtgtattc

SEQ ID NO: 1155861 - DNA, 25 bp, Homo sapien
cctctgcaggccgacggcaggagga

SEQ ID NO: 1155862 - DNA, 25 bp, Homo sapien
cggcaggaggacagtcgggtgatgg

SEQ ID NO: 1155863 - DNA, 25 bp, Homo sapien
gatggtgtattctgccctgcgcatc

SEQ ID NO: 1155864 - DNA, 25 bp, Homo sapien
tcagcgcagcctcttgtgtaaggac

SEQ ID NO: 1155865 - DNA, 25 bp, Homo sapien
gctctgggccttcatcacagctgga

SEQ ID NO: 1155866 - DNA, 25 bp, Homo sapien
gagggtccctccgaagtattcagcg

SEQ ID NO: 1155867 - DNA, 25 bp, Homo sapien
ggtttgaatctgcacttatccccac

SEQ ID NO: 1155868 - DNA, 25 bp, Homo sapien
tcggctgcactttcgtcgcgttcgg

SEQ ID NO: 1155869 - DNA, 25 bp, Homo sapien
ccggccttcgcgcttttcttgatca

SEQ ID NO: 1155870 - DNA, 25 bp, Homo sapien
tcgcgttatcatcctggtcgcaggg

SEQ ID NO: 1155871 - DNA, 25 bp, Homo sapien
gagatttgtcctttcccgcagttgg

SEQ ID NO: 1155872 - DNA, 25 bp, Homo sapien
tcatcagtctcttttcgtcacagtg

SEQ ID NO: 1155873 - DNA, 25 bp, Homo sapien
gggtgagcatttttctagactgaaa

SEQ ID NO: 1155874 - DNA, 25 bp, Homo sapien
ccagagttgcctttctctctgaggc

SEQ ID NO: 1155875 - DNA, 25 bp, Homo sapien
tcgtcacagtggaaatgttctgagg

SEQ ID NO: 1155876 - DNA, 25 bp, Homo sapien
ccctcctcctccaaagcagggaagg

SEQ ID NO: 1155877 - DNA, 25 bp, Homo sapien
tcccctcctcctccaaagcagggaa

SEQ ID NO: 1155878 - DNA, 25 bp, Homo sapien
cctcctcctccaaagcagggaagga

SEQ ID NO: 1155879 - DNA, 25 bp, Homo sapien
cctcccctcctcctccaaagcaggg

SEQ ID NO: 1155880 - DNA, 25 bp, Homo sapien
taagtggcacagcaaagatggctac

SEQ ID NO: 1155881 - DNA, 25 bp, Homo sapien
gtggcacagcaaagatggctacaaa

SEQ ID NO: 1155882 - DNA, 25 bp, Homo sapien
caggataagtggcacagcaaagatg

SEQ ID NO: 1155883 - DNA, 25 bp, Homo sapien
gataagtggcacagcaaagatggct

SEQ ID NO: 1155884 - DNA, 25 bp, Homo sapien
ctgtataataatagaccacctgata

SEQ ID NO: 1155885 - DNA, 25 bp, Homo sapien
gactcaaatatggagtaatcaatgg

SEQ ID NO: 1155886 - DNA, 25 bp, Homo sapien
cctctgactcaaatatggagtaatc

SEQ ID NO: 1155887 - DNA, 25 bp, Homo sapien
ctctgactcaaatatggagtaatca

SEQ ID NO: 1155888 - DNA, 25 bp, Homo sapien
tcaaatatggagtaatcaatggtga

SEQ ID NO: 1155889 - DNA, 25 bp, Homo sapien
caagactaatggtagtctctattgc

SEQ ID NO: 1155890 - DNA, 25 bp, Homo sapien
gcttcggatggtctgcacgtgctgt

SEQ ID NO: 1155891 - DNA, 25 bp, Homo sapien
tctgttatgtccttatccaacctgt

SEQ ID NO: 1155892 - DNA, 25 bp, Homo sapien
tccgttgttactggtttcacagtta

SEQ ID NO: 1155893 - DNA, 25 bp, Homo sapien
tcagttaccttagcagccttaggca

SEQ ID NO: 1155894 - DNA, 25 bp, Homo sapien
tccacgtcactagggatgtcctgtc

SEQ ID NO: 1155895 - DNA, 25 bp, Homo sapien
ggccaagttgagatgaatacctgca

SEQ ID NO: 1155896 - DNA, 25 bp, Homo sapien
ccttgaggacagtaacatagatttc

SEQ ID NO: 1155897 - DNA, 25 bp, Homo sapien
ttttcagacaactctagcctgtact

SEQ ID NO: 1155898 - DNA, 25 bp, Homo sapien
ggctaaagcactgccagtatcttct

SEQ ID NO: 1155899 - DNA, 25 bp, Homo sapien
catgttggccattgaactagccttg

SEQ ID NO: 1155900 - DNA, 25 bp, Homo sapien
catctattcttcagggtgtatctca

SEQ ID NO: 1155901 - DNA, 25 bp, Homo sapien
catcgtgtttttaccataatgaaga

SEQ ID NO: 1155902 - DNA, 25 bp, Homo sapien
cataatgaagaacttactaggctcc

SEQ ID NO: 1155903 - DNA, 25 bp, Homo sapien
tactaggctccttgttgattatgag

SEQ ID NO: 1155904 - DNA, 25 bp, Homo sapien
tatgagtccagacttcagcctgaca

SEQ ID NO: 1155905 - DNA, 25 bp, Homo sapien
aaataccgacatccccacacagtag

SEQ ID NO: 1155906 - DNA, 25 bp, Homo sapien
ctgaccataccagggaggccaattc

SEQ ID NO: 1155907 - DNA, 25 bp, Homo sapien
cactgtaaggagtccttctgtgcct

SEQ ID NO: 1155908 - DNA, 25 bp, Homo sapien
tgtgcctttcagctatccctgacca

SEQ ID NO: 1155909 - DNA, 25 bp, Homo sapien
gggaataggacttcgcaaactggac

SEQ ID NO: 1155910 - DNA, 25 bp, Homo sapien
tggacacggcatcgttcagatctgg

SEQ ID NO: 1155911 - DNA, 25 bp, Homo sapien
aacaaaggcacacgacaggaggagg

SEQ ID NO: 1155912 - DNA, 25 bp, Homo sapien
ctgaacaaaggcacacgacaggagg

SEQ ID NO: 1155913 - DNA, 25 bp, Homo sapien
tattatttcacagactcccccaaag

SEQ ID NO: 1155914 - DNA, 25 bp, Homo sapien
cctggacttaaactatgttgctcag

SEQ ID NO: 1155915 - DNA, 25 bp, Homo sapien
ccaggctggaaacactaactagaga

SEQ ID NO: 1155916 - DNA, 25 bp, Homo sapien
cagtggctgataattgaccaggctg

SEQ ID NO: 1155917 - DNA, 25 bp, Homo sapien
tctaccaggttgtaagacccaccca

SEQ ID NO: 1155918 - DNA, 25 bp, Homo sapien
aggagacccgagaaaccccttcatg

SEQ ID NO: 1155919 - DNA, 25 bp, Homo sapien
gcattcgccatgacttgaaacgtgg

SEQ ID NO: 1155920 - DNA, 25 bp, Homo sapien
tgccatacatcagagaaccgccatc

SEQ ID NO: 1155921 - DNA, 25 bp, Homo sapien
ctcccatccaaagagtcatagcagc

SEQ ID NO: 1155922 - DNA, 25 bp, Homo sapien
cgtggaaaccgtcagtgatttgtgt

SEQ ID NO: 1155923 - DNA, 25 bp, Homo sapien
cgcagcacgtggaaaccgtcagtga

SEQ ID NO: 1155924 - DNA, 25 bp, Homo sapien
gagcgcagcacgtggaaaccgtcag

SEQ ID NO: 1155925 - DNA, 25 bp, Homo sapien
cagcacgtggaaaccgtcagtgatt

SEQ ID NO: 1155926 - DNA, 25 bp, Homo sapien
ttcgccgtctctccgggtctatcta

SEQ ID NO: 1155927 - DNA, 25 bp, Homo sapien
tccttcgccgtctctccgggtctat

SEQ ID NO: 1155928 - DNA, 25 bp, Homo sapien
gctcagccctggctcggtttccagc

SEQ ID NO: 1155929 - DNA, 25 bp, Homo sapien
gccctggctcggtttccagctcctt

SEQ ID NO: 1155930 - DNA, 25 bp, Homo sapien
aaatactccctaacagctcgctttg

SEQ ID NO: 1155931 - DNA, 25 bp, Homo sapien
gtgatgcaaaccctcccaataccaa

SEQ ID NO: 1155932 - DNA, 25 bp, Homo sapien
ctttcaagatcaggatccctgcgcc

SEQ ID NO: 1155933 - DNA, 25 bp, Homo sapien
caataccaagatctgcattcagccc

SEQ ID NO: 1155934 - DNA, 25 bp, Homo sapien
ttccctcagttcagagtaaataccg

SEQ ID NO: 1155935 - DNA, 25 bp, Homo sapien
tgttcgccagggctattcgccagcc

SEQ ID NO: 1155936 - DNA, 25 bp, Homo sapien
cattaagagcttgggattccctctc

SEQ ID NO: 1155937 - DNA, 25 bp, Homo sapien
agcaaagcgagggagtttgaaacca

SEQ ID NO: 1155938 - DNA, 25 bp, Homo sapien
aggggctatagaacagctcctggag

SEQ ID NO: 1155939 - DNA, 25 bp, Homo sapien
gaagcaggggctatagaacagctcc

SEQ ID NO: 1155940 - DNA, 25 bp, Homo sapien
agtacccaaagatcggaacctgcaa

SEQ ID NO: 1155941 - DNA, 25 bp, Homo sapien
ctggagtacccaaagatcggaacct

SEQ ID NO: 1155942 - DNA, 25 bp, Homo sapien
aggaagaaacgctagatggagaatc

SEQ ID NO: 1155943 - DNA, 25 bp, Homo sapien
aagaaacgctagatggagaatccat

SEQ ID NO: 1155944 - DNA, 25 bp, Homo sapien
gaaaagacgaagagagagagtagga

SEQ ID NO: 1155945 - DNA, 25 bp, Homo sapien
aggaataggaagaaacgctagatgg

SEQ ID NO: 1155946 - DNA, 25 bp, Homo sapien
ctcactatcagaggggaagccaaag

SEQ ID NO: 1155947 - DNA, 25 bp, Homo sapien
gaggggaagccaaagtcactgttca

SEQ ID NO: 1155948 - DNA, 25 bp, Homo sapien
tgtcctccctctcactatcagaggg

SEQ ID NO: 1155949 - DNA, 25 bp, Homo sapien
ctatcagaggggaagccaaagtcac

SEQ ID NO: 1155950 - DNA, 25 bp, Homo sapien
tgggccgtgaacctcccctctgccc

SEQ ID NO: 1155951 - DNA, 25 bp, Homo sapien
ggctgggccgtgaacctcccctctg

SEQ ID NO: 1155952 - DNA, 25 bp, Homo sapien
tgtatgctggttaccggaaaccttc

SEQ ID NO: 1155953 - DNA, 25 bp, Homo sapien
gatgagatggtgtatgctggttacc

SEQ ID NO: 1155954 - DNA, 25 bp, Homo sapien
gttaccggaaaccttcgatcgatgc

SEQ ID NO: 1155955 - DNA, 25 bp, Homo sapien
ctgtttcggatgagatggtgtatgc

SEQ ID NO: 1155956 - DNA, 25 bp, Homo sapien
ccttgggtgtttagactggtctcca

SEQ ID NO: 1155957 - DNA, 25 bp, Homo sapien
tcctgccataggagaagccgaaccc

SEQ ID NO: 1155958 - DNA, 25 bp, Homo sapien
tcttgatcttttcgccccagatcct

SEQ ID NO: 1155959 - DNA, 25 bp, Homo sapien
cccagatcctgccataggagaagcc

SEQ ID NO: 1155960 - DNA, 25 bp, Homo sapien
cccattgagtaggtctgtgagagga

SEQ ID NO: 1155961 - DNA, 25 bp, Homo sapien
aaaacgacccatcttcagcccattg

SEQ ID NO: 1155962 - DNA, 25 bp, Homo sapien
gaggaggtataaatccttggagttc

SEQ ID NO: 1155963 - DNA, 25 bp, Homo sapien
catcttcagcccattgagtaggtct

SEQ ID NO: 1155964 - DNA, 25 bp, Homo sapien
ggatcctgtccattgccacactctg

SEQ ID NO: 1155965 - DNA, 25 bp, Homo sapien
ttctgcaaaacacctacaatacgct

SEQ ID NO: 1155966 - DNA, 25 bp, Homo sapien
aacacctacaatacgctggatcctg

SEQ ID NO: 1155967 - DNA, 25 bp, Homo sapien
aatacgctggatcctgtccattgcc

SEQ ID NO: 1155968 - DNA, 25 bp, Homo sapien
tgccaccacccaatgatgacttctg

SEQ ID NO: 1155969 - DNA, 25 bp, Homo sapien
gacttctgggcagctatttgtggaa

SEQ ID NO: 1155970 - DNA, 25 bp, Homo sapien
cctgtagcaaggttcctaggtaacg

SEQ ID NO: 1155971 - DNA, 25 bp, Homo sapien
cttggtcagctgatgcttgccacca

SEQ ID NO: 1155972 - DNA, 25 bp, Homo sapien
tatgaccagtccttgaaacccagtg

SEQ ID NO: 1155973 - DNA, 25 bp, Homo sapien
cgctcccggctgaaaataggtcact

SEQ ID NO: 1155974 - DNA, 25 bp, Homo sapien
tctacgcagaaagcagataagctgt

SEQ ID NO: 1155975 - DNA, 25 bp, Homo sapien
gaagctgaggtgtattcccgcatga

SEQ ID NO: 1155976 - DNA, 25 bp, Homo sapien
tgggtgaagggttgcactccatgct

SEQ ID NO: 1155977 - DNA, 25 bp, Homo sapien
ggaaaagaatgacgccaatgccggt

SEQ ID NO: 1155978 - DNA, 25 bp, Homo sapien
caatgccggttccagtgcctaaagg

SEQ ID NO: 1155979 - DNA, 25 bp, Homo sapien
ccatggctaaaggagatagtacctg

SEQ ID NO: 1155980 - DNA, 25 bp, Homo sapien
ttactggcaaactgtagcaacgagg

SEQ ID NO: 1155981 - DNA, 25 bp, Homo sapien
tctccagatagtttcataggctcac

SEQ ID NO: 1155982 - DNA, 25 bp, Homo sapien
ttctctgctgctcccggtgtcctat

SEQ ID NO: 1155983 - DNA, 25 bp, Homo sapien
gatagggtatagctccagtctgatg

SEQ ID NO: 1155984 - DNA, 25 bp, Homo sapien
gtcacagtggacagctgtatgccct

SEQ ID NO: 1155985 - DNA, 25 bp, Homo sapien
cacagtggacagctgtatgccctgg

SEQ ID NO: 1155986 - DNA, 25 bp, Homo sapien
aagtcacagtggacagctgtatgcc

SEQ ID NO: 1155987 - DNA, 25 bp, Homo sapien
agaagtcacagtggacagctgtatg

SEQ ID NO: 1155988 - DNA, 25 bp, Homo sapien
ctagcccaccggaagggttctcact

SEQ ID NO: 1155989 - DNA, 25 bp, Homo sapien
gctcagtacctagcccaccggaagg

SEQ ID NO: 1155990 - DNA, 25 bp, Homo sapien
ctcgcgcgctcagtacctagcccac

SEQ ID NO: 1155991 - DNA, 25 bp, Homo sapien
tagcccaccggaagggttctcacta

SEQ ID NO: 1155992 - DNA, 25 bp, Homo sapien
tgagaaggacacgagcgacaaggat

SEQ ID NO: 1155993 - DNA, 25 bp, Homo sapien
ataatacaaactacaccgcgcggct

SEQ ID NO: 1155994 - DNA, 25 bp, Homo sapien
tggcagcagggcgttaccacaaaga

SEQ ID NO: 1155995 - DNA, 25 bp, Homo sapien
gaaattcaacatgctcagggacgcg

SEQ ID NO: 1155996 - DNA, 25 bp, Homo sapien
tggatttaaaccttcactctgtaga

SEQ ID NO: 1155997 - DNA, 25 bp, Homo sapien
ttggatttaaaccttcactctgtag

SEQ ID NO: 1155998 - DNA, 25 bp, Homo sapien
gatttaaaccttcactctgtagagc

SEQ ID NO: 1155999 - DNA, 25 bp, Homo sapien
ggatttaaaccttcactctgtagag

SEQ ID NO: 1156000 - DNA, 25 bp, Homo sapien
acagtcctggcgatgaacttcagat

SEQ ID NO: 1156001 - DNA, 25 bp, Homo sapien
tggcgatgaacttcagatgttttgc

SEQ ID NO: 1156002 - DNA, 25 bp, Homo sapien
cacagtcctggcgatgaacttcaga

SEQ ID NO: 1156003 - DNA, 25 bp, Homo sapien
cgatgaacttcagatgttttgccat

SEQ ID NO: 1156004 - DNA, 25 bp, Homo sapien
gtcctgtatgcgctttccacgttcc

SEQ ID NO: 1156005 - DNA, 25 bp, Homo sapien
tagggtcctgtatgcgctttccacg

SEQ ID NO: 1156006 - DNA, 25 bp, Homo sapien
agggtcctgtatgcgctttccacgt

SEQ ID NO: 1156007 - DNA, 25 bp, Homo sapien
tgtatgcgctttccacgttcccttc

SEQ ID NO: 1156008 - DNA, 25 bp, Homo sapien
caccgcacttcccagagagtctagg

SEQ ID NO: 1156009 - DNA, 25 bp, Homo sapien
ttttaagagactgtgaacacctggg

SEQ ID NO: 1156010 - DNA, 25 bp, Homo sapien
gaagggagagaataaccaccgcact

SEQ ID NO: 1156011 - DNA, 25 bp, Homo sapien
agagtctaggcatgattctggtccc

SEQ ID NO: 1156012 - DNA, 25 bp, Homo sapien
tcctttgatctttcaataacaaaca

SEQ ID NO: 1156013 - DNA, 25 bp, Homo sapien
tttaccattaagcaacagctatcct

SEQ ID NO: 1156014 - DNA, 25 bp, Homo sapien
cattaagcaacagctatcctttgat

SEQ ID NO: 1156015 - DNA, 25 bp, Homo sapien
ttgttttaccattaagcaacagcta

SEQ ID NO: 1156016 - DNA, 25 bp, Homo sapien
tcttctctcaaaagataagagctgg

SEQ ID NO: 1156017 - DNA, 25 bp, Homo sapien
gggatgcattccatatatgatatgg

SEQ ID NO: 1156018 - DNA, 25 bp, Homo sapien
aacctggtatcagtgaagaggatca

SEQ ID NO: 1156019 - DNA, 25 bp, Homo sapien
taaaaatatagtggctggacaagga

SEQ ID NO: 1156020 - DNA, 25 bp, Homo sapien
ttgcagtgaggcgagaccacgcagt

SEQ ID NO: 1156021 - DNA, 25 bp, Homo sapien
gttgcagtgaggcgagaccacgcag

SEQ ID NO: 1156022 - DNA, 25 bp, Homo sapien
caagaaagtggttgtgaagggatcc

SEQ ID NO: 1156023 - DNA, 25 bp, Homo sapien
tcactctggtgctaaaaaatctttc

SEQ ID NO: 1156024 - DNA, 25 bp, Homo sapien
taaagttccatcctgtcaggctggt

SEQ ID NO: 1156025 - DNA, 25 bp, Homo sapien
ggaggcattaaacctgaacttgaga

SEQ ID NO: 1156026 - DNA, 25 bp, Homo sapien
caataagaatctgtgggccgggtgc

SEQ ID NO: 1156027 - DNA, 25 bp, Homo sapien
gaagtcgattgaccaaacaattggt

SEQ ID NO: 1156028 - DNA, 25 bp, Homo sapien
agcattaactgcctacttacaaagg

SEQ ID NO: 1156029 - DNA, 25 bp, Homo sapien
caatgaggttagacatttgggatca

SEQ ID NO: 1156030 - DNA, 25 bp, Homo sapien
catgttgtagatccgccggcacctt

SEQ ID NO: 1156031 - DNA, 25 bp, Homo sapien
taataccgccgatgcttaatgtcct

SEQ ID NO: 1156032 - DNA, 25 bp, Homo sapien
tcgccggcggcatggcttctcataa

SEQ ID NO: 1156033 - DNA, 25 bp, Homo sapien
tgccacggatctgcccgattctttc

SEQ ID NO: 1156034 - DNA, 25 bp, Homo sapien
gacatgtgatttgagtttattgcag

SEQ ID NO: 1156035 - DNA, 25 bp, Homo sapien
gaaaactggatgagggtttcgcact

SEQ ID NO: 1156036 - DNA, 25 bp, Homo sapien
ttgcagagaatggtaataggaaatg

SEQ ID NO: 1156037 - DNA, 25 bp, Homo sapien
gtttcgcactgggtgtcccacccac

SEQ ID NO: 1156038 - DNA, 25 bp, Homo sapien
aaataccattctactcctagagtac

SEQ ID NO: 1156039 - DNA, 25 bp, Homo sapien
tacattcaactttttgagcaaccgc

SEQ ID NO: 1156040 - DNA, 25 bp, Homo sapien
tgccaggccatcgtctcctgaactt

SEQ ID NO: 1156041 - DNA, 25 bp, Homo sapien
aatttaccatcgtgaccatttaagg

SEQ ID NO: 1156042 - DNA, 25 bp, Homo sapien
caagagcgagacttcctcttaaaaa

SEQ ID NO: 1156043 - DNA, 25 bp, Homo sapien
gggacaagagcgagacttcctctta

SEQ ID NO: 1156044 - DNA, 25 bp, Homo sapien
ggggacaagagcgagacttcctctt

SEQ ID NO: 1156045 - DNA, 25 bp, Homo sapien
gacaagagcgagacttcctcttaaa

SEQ ID NO: 1156046 - DNA, 25 bp, Homo sapien
aggcagggggatcacgagaccagga

SEQ ID NO: 1156047 - DNA, 25 bp, Homo sapien
ccaaggcagggggatcacgagacca

SEQ ID NO: 1156048 - DNA, 25 bp, Homo sapien
caaggcagggggatcacgagaccag

SEQ ID NO: 1156049 - DNA, 25 bp, Homo sapien
gcagggggatcacgagaccaggaga

SEQ ID NO: 1156050 - DNA, 25 bp, Homo sapien
aatacatacatgcatcttctcctct

SEQ ID NO: 1156051 - DNA, 25 bp, Homo sapien
gtaagattttgcttggggattcaaa

SEQ ID NO: 1156052 - DNA, 25 bp, Homo sapien
tctctacctaacatggaacagttta

SEQ ID NO: 1156053 - DNA, 25 bp, Homo sapien
gatgctttctcagtaagattttgct

SEQ ID NO: 1156054 - DNA, 25 bp, Homo sapien
tcacaaacttcagcccctgagacgg

SEQ ID NO: 1156055 - DNA, 25 bp, Homo sapien
aaccttctgaccgccctacggcgtg

SEQ ID NO: 1156056 - DNA, 25 bp, Homo sapien
ttctgaccgccctacggcgtgccgt

SEQ ID NO: 1156057 - DNA, 25 bp, Homo sapien
tgagacggagcccgaacgttacacc

SEQ ID NO: 1156058 - DNA, 25 bp, Homo sapien
caggcagcagaatccaaatccagtc

SEQ ID NO: 1156059 - DNA, 25 bp, Homo sapien
ctcaacaataactgcgaggtgcggg

SEQ ID NO: 1156060 - DNA, 25 bp, Homo sapien
gaaagcgaggtacaatgatctctcc

SEQ ID NO: 1156061 - DNA, 25 bp, Homo sapien
gaaggaattccttactccgtgctct

SEQ ID NO: 1156062 - DNA, 25 bp, Homo sapien
gaacaatagctcaaacaggactcaa

SEQ ID NO: 1156063 - DNA, 25 bp, Homo sapien
aacaatagctcaaacaggactcaat

SEQ ID NO: 1156064 - DNA, 25 bp, Homo sapien
gctcaaacaggactcaatactacac

SEQ ID NO: 1156065 - DNA, 25 bp, Homo sapien
caatagctcaaacaggactcaatac

SEQ ID NO: 1156066 - DNA, 25 bp, Homo sapien
tatccatggtttcagctcatccagc

SEQ ID NO: 1156067 - DNA, 25 bp, Homo sapien
caccgtaggctctgagaaacccagg

SEQ ID NO: 1156068 - DNA, 25 bp, Homo sapien
cccacacagttcaatgctgctgtga

SEQ ID NO: 1156069 - DNA, 25 bp, Homo sapien
tccagctccctctttgacagtgcca

SEQ ID NO: 1156070 - DNA, 25 bp, Homo sapien
tagagcttcggccttcctccacagc

SEQ ID NO: 1156071 - DNA, 25 bp, Homo sapien
ctctcgttttctgctcctgtcactg

SEQ ID NO: 1156072 - DNA, 25 bp, Homo sapien
ttagctctcgttttctgctcctgtc

SEQ ID NO: 1156073 - DNA, 25 bp, Homo sapien
agctctcgttttctgctcctgtcac

SEQ ID NO: 1156074 - DNA, 25 bp, Homo sapien
tgttaccattcaaaacagtcctgag

SEQ ID NO: 1156075 - DNA, 25 bp, Homo sapien
tatcaacgtgtgaactggtaagctc

SEQ ID NO: 1156076 - DNA, 25 bp, Homo sapien
cagtcctgagctcattagacagtaa

SEQ ID NO: 1156077 - DNA, 25 bp, Homo sapien
gctctaaatagaggatatcaacgtg

SEQ ID NO: 1156078 - DNA, 25 bp, Homo sapien
gcagaggaccagcaatatgccatag

SEQ ID NO: 1156079 - DNA, 25 bp, Homo sapien
gggtactgacaactcctccaagtgt

SEQ ID NO: 1156080 - DNA, 25 bp, Homo sapien
gaaagaggccaggatcagtcggcaa

SEQ ID NO: 1156081 - DNA, 25 bp, Homo sapien
gatactgctaatactgaaagaggcc

SEQ ID NO: 1156082 - DNA, 25 bp, Homo sapien
ctacagttcaagaaaaaggactctc

SEQ ID NO: 1156083 - DNA, 25 bp, Homo sapien
cccataatatattgtgtggggtggg

SEQ ID NO: 1156084 - DNA, 25 bp, Homo sapien
tacagttcaagaaaaaggactctcc

SEQ ID NO: 1156085 - DNA, 25 bp, Homo sapien
aaaaggactctcccataatatattg

SEQ ID NO: 1156086 - DNA, 25 bp, Homo sapien
tcccctcttcactaggagggctcgt

SEQ ID NO: 1156087 - DNA, 25 bp, Homo sapien
tgcaaggacatatcctcggccaggg

SEQ ID NO: 1156088 - DNA, 25 bp, Homo sapien
gtggtaggctttgggtgacatcccc

SEQ ID NO: 1156089 - DNA, 25 bp, Homo sapien
cactaggagggctcgtgttttgcaa

SEQ ID NO: 1156090 - DNA, 25 bp, Homo sapien
aaggtgaatttaacaggaccgagag

SEQ ID NO: 1156091 - DNA, 25 bp, Homo sapien
tgaatttaacaggaccgagagtggc

SEQ ID NO: 1156092 - DNA, 25 bp, Homo sapien
tgatgactaatttgcaaggtgaatt

SEQ ID NO: 1156093 - DNA, 25 bp, Homo sapien
ttaacaggaccgagagtggccaact

SEQ ID NO: 1156094 - DNA, 25 bp, Homo sapien
gccagaagcagggtctactagactc

SEQ ID NO: 1156095 - DNA, 25 bp, Homo sapien
caactaagtctaagctcttccagga

SEQ ID NO: 1156096 - DNA, 25 bp, Homo sapien
gacacaaccttgcaaatagccacct

SEQ ID NO: 1156097 - DNA, 25 bp, Homo sapien
gaagaattatcctagcccctaccag

SEQ ID NO: 1156098 - DNA, 25 bp, Homo sapien
ggtattcgtcgcttctttactcctg

SEQ ID NO: 1156099 - DNA, 25 bp, Homo sapien
ctggagcttagtcagcatgccaggg

SEQ ID NO: 1156100 - DNA, 25 bp, Homo sapien
tggagcttagtcagcatgccagggc

SEQ ID NO: 1156101 - DNA, 25 bp, Homo sapien
ctctctgatggaggcccagggatca

SEQ ID NO: 1156102 - DNA, 25 bp, Homo sapien
tgccagggctctctgatggaggccc

SEQ ID NO: 1156103 - DNA, 25 bp, Homo sapien
caaaaaagtgagaccttgcctgaaa

SEQ ID NO: 1156104 - DNA, 25 bp, Homo sapien
tttttcctctcctcgatttgtcgtg

SEQ ID NO: 1156105 - DNA, 25 bp, Homo sapien
tcctctcctcgatttgtcgtgttgc

SEQ ID NO: 1156106 - DNA, 25 bp, Homo sapien
tcctcgatttgtcgtgttgctgcct

SEQ ID NO: 1156107 - DNA, 25 bp, Homo sapien
tcgatttgtcgtgttgctgcctcca

SEQ ID NO: 1156108 - DNA, 25 bp, Homo sapien
tgttgccaataggaagtcgttctgg

SEQ ID NO: 1156109 - DNA, 25 bp, Homo sapien
caataggaagtcgttctggttggga

SEQ ID NO: 1156110 - DNA, 25 bp, Homo sapien
gaatagtgttgccaataggaagtcg

SEQ ID NO: 1156111 - DNA, 25 bp, Homo sapien
tagtgttgccaataggaagtcgttc

SEQ ID NO: 1156112 - DNA, 25 bp, Homo sapien
gggagcaatgcccatggcatggaga

SEQ ID NO: 1156113 - DNA, 25 bp, Homo sapien
gggggagcaatgcccatggcatgga

SEQ ID NO: 1156114 - DNA, 25 bp, Homo sapien
tggcatggagattagccaggcccac

SEQ ID NO: 1156115 - DNA, 25 bp, Homo sapien
cccatggcatggagattagccaggc

SEQ ID NO: 1156116 - DNA, 25 bp, Homo sapien
tgaaaaatagcccgcaaagaaataa

SEQ ID NO: 1156117 - DNA, 25 bp, Homo sapien
ttcagagtaggcatgcggtgtgtca

SEQ ID NO: 1156118 - DNA, 25 bp, Homo sapien
acgaatattggctttcagagtaggc

SEQ ID NO: 1156119 - DNA, 25 bp, Homo sapien
gaattgttccctcttcacagcacga

SEQ ID NO: 1156120 - DNA, 25 bp, Homo sapien
agtgcgcccttgctcatccaggatc

SEQ ID NO: 1156121 - DNA, 25 bp, Homo sapien
gtcgaagtatggatgcctgtttttc

SEQ ID NO: 1156122 - DNA, 25 bp, Homo sapien
cgaagtatggatgcctgtttttcga

SEQ ID NO: 1156123 - DNA, 25 bp, Homo sapien
tcgaagtatggatgcctgtttttcg

SEQ ID NO: 1156124 - DNA, 25 bp, Homo sapien
gaagtatggatgcctgtttttcgag

SEQ ID NO: 1156125 - DNA, 25 bp, Homo sapien
aaagccattggggattatgtaagag

SEQ ID NO: 1156126 - DNA, 25 bp, Homo sapien
agccattggggattatgtaagagtc

SEQ ID NO: 1156127 - DNA, 25 bp, Homo sapien
ccattggggattatgtaagagtccc

SEQ ID NO: 1156128 - DNA, 25 bp, Homo sapien
attggggattatgtaagagtcccac

SEQ ID NO: 1156129 - DNA, 25 bp, Homo sapien
gacagacgctatgttctctcattag

SEQ ID NO: 1156130 - DNA, 25 bp, Homo sapien
ctcattagtgacaataagtccctgg

SEQ ID NO: 1156131 - DNA, 25 bp, Homo sapien
catgccacagctgacagacgctatg

SEQ ID NO: 1156132 - DNA, 25 bp, Homo sapien
tagtgacaataagtccctggaacag

SEQ ID NO: 1156133 - DNA, 25 bp, Homo sapien
gaaaagaaaacacgatatgcgggta

SEQ ID NO: 1156134 - DNA, 25 bp, Homo sapien
aaaacacgatatgcgggtagagatg

SEQ ID NO: 1156135 - DNA, 25 bp, Homo sapien
aagaaaagaaaacacgatatgcggg

SEQ ID NO: 1156136 - DNA, 25 bp, Homo sapien
aagaaaacacgatatgcgggtagag

SEQ ID NO: 1156137 - DNA, 25 bp, Homo sapien
gctgggctggatgttcaacaagatt

SEQ ID NO: 1156138 - DNA, 25 bp, Homo sapien
gttcaacaagatttgtgattccaaa

SEQ ID NO: 1156139 - DNA, 25 bp, Homo sapien
tgcttggctgtctcatgaaattcta

SEQ ID NO: 1156140 - DNA, 25 bp, Homo sapien
aatgtatgttcactggtcaaacaac

SEQ ID NO: 1156141 - DNA, 25 bp, Homo sapien
caaacaacaaactattgtcaggaaa

SEQ ID NO: 1156142 - DNA, 25 bp, Homo sapien
aaattctaagcacaggaatatgcac

SEQ ID NO: 1156143 - DNA, 25 bp, Homo sapien
cccctcattcaatgatacctggcaa

SEQ ID NO: 1156144 - DNA, 25 bp, Homo sapien
tgatacctggcaaatgtagaaaaca

SEQ ID NO: 1156145 - DNA, 25 bp, Homo sapien
gggggtgaaagttgcagtgaacgga

SEQ ID NO: 1156146 - DNA, 25 bp, Homo sapien
tgttaaaccccctcattcaatgata

SEQ ID NO: 1156147 - DNA, 25 bp, Homo sapien
gtcaggcagagatattagtatacca

SEQ ID NO: 1156148 - DNA, 25 bp, Homo sapien
ctgtcaggcagagatattagtatac

SEQ ID NO: 1156149 - DNA, 25 bp, Homo sapien
ggcagagatattagtataccaaagc

SEQ ID NO: 1156150 - DNA, 25 bp, Homo sapien
caggcagagatattagtataccaaa

SEQ ID NO: 1156151 - DNA, 25 bp, Homo sapien
gcatcaggcccagcctgactttttc

SEQ ID NO: 1156152 - DNA, 25 bp, Homo sapien
ggcatcaggcccagcctgacttttt

SEQ ID NO: 1156153 - DNA, 25 bp, Homo sapien
cttcgtggggtcttgaacagcttct

SEQ ID NO: 1156154 - DNA, 25 bp, Homo sapien
tcctaatactcgcatcaaattagaa

SEQ ID NO: 1156155 - DNA, 25 bp, Homo sapien
ggtcttgaacagcttctgttcctaa

SEQ ID NO: 1156156 - DNA, 25 bp, Homo sapien
cctaatactcgcatcaaattagaaa

SEQ ID NO: 1156157 - DNA, 25 bp, Homo sapien
caaatatggaccccccagaagagtt

SEQ ID NO: 1156158 - DNA, 25 bp, Homo sapien
aatatggaccccccagaagagtttg

SEQ ID NO: 1156159 - DNA, 25 bp, Homo sapien
ccaaatatggaccccccagaagagt

SEQ ID NO: 1156160 - DNA, 25 bp, Homo sapien
atatggaccccccagaagagtttgg

SEQ ID NO: 1156161 - DNA, 25 bp, Homo sapien
gaaaggcattgaagatcagaggcag

SEQ ID NO: 1156162 - DNA, 25 bp, Homo sapien
ctgctgtgagttttcgggcagcgtt

SEQ ID NO: 1156163 - DNA, 25 bp, Homo sapien
ctgttctgctgtgagttttcgggca

SEQ ID NO: 1156164 - DNA, 25 bp, Homo sapien
gttctgctgtgagttttcgggcagc

SEQ ID NO: 1156165 - DNA, 25 bp, Homo sapien
tctgttctgctgtgagttttcgggc

SEQ ID NO: 1156166 - DNA, 25 bp, Homo sapien
gaagaactgggtaaccataaacata

SEQ ID NO: 1156167 - DNA, 25 bp, Homo sapien
cttggcctgaacaagtatattgact

SEQ ID NO: 1156168 - DNA, 25 bp, Homo sapien
tagctcttgatccacactagggtca

SEQ ID NO: 1156169 - DNA, 25 bp, Homo sapien
cattaactctcgctattttacaaga

SEQ ID NO: 1156170 - DNA, 25 bp, Homo sapien
taaagagagtggttctaagggatca

SEQ ID NO: 1156171 - DNA, 25 bp, Homo sapien
tatataggatcactatataggcatg

SEQ ID NO: 1156172 - DNA, 25 bp, Homo sapien
gatacacatgtactcaacataaaag

SEQ ID NO: 1156173 - DNA, 25 bp, Homo sapien
gaaacacagcaatacatcagggtaa

SEQ ID NO: 1156174 - DNA, 25 bp, Homo sapien
cagctgcctgaatggagtggcaagt

SEQ ID NO: 1156175 - DNA, 25 bp, Homo sapien
tcctctctataaacaaaggcctctg

SEQ ID NO: 1156176 - DNA, 25 bp, Homo sapien
aaggcctctggagtaaacaaataga

SEQ ID NO: 1156177 - DNA, 25 bp, Homo sapien
ccaaagtttactctaagagtcaggg

SEQ ID NO: 1156178 - DNA, 25 bp, Homo sapien
ccttgtgcagtaccaccacccctgt

SEQ ID NO: 1156179 - DNA, 25 bp, Homo sapien
gcagtaccaccacccctgtcaggta

SEQ ID NO: 1156180 - DNA, 25 bp, Homo sapien
ttgtgcagtaccaccacccctgtca

SEQ ID NO: 1156181 - DNA, 25 bp, Homo sapien
gtgcagtaccaccacccctgtcagg

SEQ ID NO: 1156182 - DNA, 25 bp, Homo sapien
tcaggtatggcactaaaatacgatc

SEQ ID NO: 1156183 - DNA, 25 bp, Homo sapien
cactctaagcctagggttgtctggg

SEQ ID NO: 1156184 - DNA, 25 bp, Homo sapien
gttgaagcaatctcaggaaccacat

SEQ ID NO: 1156185 - DNA, 25 bp, Homo sapien
gcagagacctagcatattatatcag

SEQ ID NO: 1156186 - DNA, 25 bp, Homo sapien
agacgcttaaatttcttctgggcct

SEQ ID NO: 1156187 - DNA, 25 bp, Homo sapien
taagacgcttaaatttcttctgggc

SEQ ID NO: 1156188 - DNA, 25 bp, Homo sapien
tgtaaccggtactcagatccaggac

SEQ ID NO: 1156189 - DNA, 25 bp, Homo sapien
taagatgaacggacagatgcaccat

SEQ ID NO: 1156190 - DNA, 25 bp, Homo sapien
ccagctggtagaaaagccttaaatg

SEQ ID NO: 1156191 - DNA, 25 bp, Homo sapien
tctaggaggctcaaagtctaaacgg

SEQ ID NO: 1156192 - DNA, 25 bp, Homo sapien
tgaagagcatatgtgtgagtatgta

SEQ ID NO: 1156193 - DNA, 25 bp, Homo sapien
aaccccatcattaagttgaagagca

SEQ ID NO: 1156194 - DNA, 25 bp, Homo sapien
taagttgaagagcatatgtgtgagt

SEQ ID NO: 1156195 - DNA, 25 bp, Homo sapien
tggaactaaccccatcattaagttg

SEQ ID NO: 1156196 - DNA, 25 bp, Homo sapien
tagacagacagtccttgacttacaa

SEQ ID NO: 1156197 - DNA, 25 bp, Homo sapien
gattttcctgggctagcaatatgca

SEQ ID NO: 1156198 - DNA, 25 bp, Homo sapien
cactaatgggagtatgatggccaga

SEQ ID NO: 1156199 - DNA, 25 bp, Homo sapien
tgtctggccttcaaatatagacaga

SEQ ID NO: 1156200 - DNA, 25 bp, Homo sapien
gttatgaatcaagagctccaccagg

SEQ ID NO: 1156201 - DNA, 25 bp, Homo sapien
tacagacttagacttgagattcagg

SEQ ID NO: 1156202 - DNA, 25 bp, Homo sapien
tccccaaattagacttgaagctcca

SEQ ID NO: 1156203 - DNA, 25 bp, Homo sapien
gaagctccaagtaggcagtaatatt

SEQ ID NO: 1156204 - DNA, 25 bp, Homo sapien
cccagactagtacacatttgttggt

SEQ ID NO: 1156205 - DNA, 25 bp, Homo sapien
ctcccagactagtacacatttgttg

SEQ ID NO: 1156206 - DNA, 25 bp, Homo sapien
gactagtacacatttgttggttttc

SEQ ID NO: 1156207 - DNA, 25 bp, Homo sapien
cagactagtacacatttgttggttt

SEQ ID NO: 1156208 - DNA, 25 bp, Homo sapien
tctcagtaagtactcttctgtataa

SEQ ID NO: 1156209 - DNA, 25 bp, Homo sapien
cactgtgctgggtctcagtaagtac

SEQ ID NO: 1156210 - DNA, 25 bp, Homo sapien
tactacttttgtaataatgtaccac

SEQ ID NO: 1156211 - DNA, 25 bp, Homo sapien
taagtactcttctgtataattagaa

SEQ ID NO: 1156212 - DNA, 25 bp, Homo sapien
ttgaaatgctcacgagccatgttct

SEQ ID NO: 1156213 - DNA, 25 bp, Homo sapien
ttttgaaatgctcacgagccatgtt

SEQ ID NO: 1156214 - DNA, 25 bp, Homo sapien
aaatgctcacgagccatgttctctg

SEQ ID NO: 1156215 - DNA, 25 bp, Homo sapien
tttgaaatgctcacgagccatgttc

SEQ ID NO: 1156216 - DNA, 25 bp, Homo sapien
aaataactctttaatcatatgcaca

SEQ ID NO: 1156217 - DNA, 25 bp, Homo sapien
aaagggcaacaccaggctgactcag

SEQ ID NO: 1156218 - DNA, 25 bp, Homo sapien
aagatattctccctttgtcccagtg

SEQ ID NO: 1156219 - DNA, 25 bp, Homo sapien
tctgagatcacacaaacaagtggga

SEQ ID NO: 1156220 - DNA, 25 bp, Homo sapien
gaatgtgtgaaaaatatcacaccaa

SEQ ID NO: 1156221 - DNA, 25 bp, Homo sapien
aatgtgtgaaaaatatcacaccaag

SEQ ID NO: 1156222 - DNA, 25 bp, Homo sapien
cctgcaaccttactataatcattta

SEQ ID NO: 1156223 - DNA, 25 bp, Homo sapien
atacaggagagcgactgatttttgt

SEQ ID NO: 1156224 - DNA, 25 bp, Homo sapien
tgttcattactcgtatacaggagag

SEQ ID NO: 1156225 - DNA, 25 bp, Homo sapien
cattactcgtatacaggagagcgac

SEQ ID NO: 1156226 - DNA, 25 bp, Homo sapien
ttcttttaacgtctcctcactgcgg

SEQ ID NO: 1156227 - DNA, 25 bp, Homo sapien
aacgagttgttgaacctcttgtgcc

SEQ ID NO: 1156228 - DNA, 25 bp, Homo sapien
cagggaacctgttttgtcaagttca

SEQ ID NO: 1156229 - DNA, 25 bp, Homo sapien
tccgggatttagtggcaggacacca

SEQ ID NO: 1156230 - DNA, 25 bp, Homo sapien
taaatgtaatactacccgactgccc

SEQ ID NO: 1156231 - DNA, 25 bp, Homo sapien
gccaggtcgggcgttaatatcttaa

SEQ ID NO: 1156232 - DNA, 25 bp, Homo sapien
tacttttcggctctcagtgctaagg

SEQ ID NO: 1156233 - DNA, 25 bp, Homo sapien
aagcctttcaaaacgcctgacgccg

SEQ ID NO: 1156234 - DNA, 25 bp, Homo sapien
tggggatggtgcacgcgctgggctc

SEQ ID NO: 1156235 - DNA, 25 bp, Homo sapien
ggggatggtgcacgcgctgggctct

SEQ ID NO: 1156236 - DNA, 25 bp, Homo sapien
gggatggtgcacgcgctgggctctt

SEQ ID NO: 1156237 - DNA, 25 bp, Homo sapien
ggtggggatggtgcacgcgctgggc

SEQ ID NO: 1156238 - DNA, 25 bp, Homo sapien
ggcgggagcgggcaaaacaatcact

SEQ ID NO: 1156239 - DNA, 25 bp, Homo sapien
acaatcactgcgagtgcgtgaaagc

SEQ ID NO: 1156240 - DNA, 25 bp, Homo sapien
gcgggcaaaacaatcactgcgagtg

SEQ ID NO: 1156241 - DNA, 25 bp, Homo sapien
caaaacaatcactgcgagtgcgtga

SEQ ID NO: 1156242 - DNA, 25 bp, Homo sapien
cccctgccgaagaggccgacgagga

SEQ ID NO: 1156243 - DNA, 25 bp, Homo sapien
tggttaccgactggaattttcgatc

SEQ ID NO: 1156244 - DNA, 25 bp, Homo sapien
cgaggaggaggccttactgctgcct

SEQ ID NO: 1156245 - DNA, 25 bp, Homo sapien
ttcgatccaacgaggactccagagc

SEQ ID NO: 1156246 - DNA, 25 bp, Homo sapien
acgacaagccttgaatggactccat

SEQ ID NO: 1156247 - DNA, 25 bp, Homo sapien
agacgacaagccttgaatggactcc

SEQ ID NO: 1156248 - DNA, 25 bp, Homo sapien
gacgacaagccttgaatggactcca

SEQ ID NO: 1156249 - DNA, 25 bp, Homo sapien
caagacgacaagccttgaatggact

SEQ ID NO: 1156250 - DNA, 25 bp, Homo sapien
gagccacttcatccaatgatagacg

SEQ ID NO: 1156251 - DNA, 25 bp, Homo sapien
atctccggagccacttcatccaatg

SEQ ID NO: 1156252 - DNA, 25 bp, Homo sapien
catccaatgatagacgatagtactg

SEQ ID NO: 1156253 - DNA, 25 bp, Homo sapien
gacgatagtactgtggtgttttttg

SEQ ID NO: 1156254 - DNA, 25 bp, Homo sapien
gccagaaatcattaacacgtcaagg

SEQ ID NO: 1156255 - DNA, 25 bp, Homo sapien
aagccagaaatcattaacacgtcaa

SEQ ID NO: 1156256 - DNA, 25 bp, Homo sapien
ggaaagccagaaatcattaacacgt

SEQ ID NO: 1156257 - DNA, 25 bp, Homo sapien
ccagaaatcattaacacgtcaaggc

SEQ ID NO: 1156258 - DNA, 25 bp, Homo sapien
ttactactgcttaaaaccacagctc

SEQ ID NO: 1156259 - DNA, 25 bp, Homo sapien
actactgcttaaaaccacagctcgc

SEQ ID NO: 1156260 - DNA, 25 bp, Homo sapien
aacatcactggatttactactgctt

SEQ ID NO: 1156261 - DNA, 25 bp, Homo sapien
catcactggatttactactgcttaa

SEQ ID NO: 1156262 - DNA, 25 bp, Homo sapien
gacacttatcaccttgaagacccaa

SEQ ID NO: 1156263 - DNA, 25 bp, Homo sapien
gggcggaaagtcacaacctctagtc

SEQ ID NO: 1156264 - DNA, 25 bp, Homo sapien
gacacgctatggtgattgctgaaca

SEQ ID NO: 1156265 - DNA, 25 bp, Homo sapien
gaaatgggacagagaccaaatagag

SEQ ID NO: 1156266 - DNA, 25 bp, Homo sapien
gggtttacatagaggaagtactcaa

SEQ ID NO: 1156267 - DNA, 25 bp, Homo sapien
atctctttcagcacccaatacaggg

SEQ ID NO: 1156268 - DNA, 25 bp, Homo sapien
tctgtatctttaggcataacatatt

SEQ ID NO: 1156269 - DNA, 25 bp, Homo sapien
taggcataacatattataagagaat

SEQ ID NO: 1156270 - DNA, 25 bp, Homo sapien
gtttcttcattttggccaggctggt

SEQ ID NO: 1156271 - DNA, 25 bp, Homo sapien
cctccgggtccaagggattatcctg

SEQ ID NO: 1156272 - DNA, 25 bp, Homo sapien
caggctgatgtgcagtggcaccatc

SEQ ID NO: 1156273 - DNA, 25 bp, Homo sapien
ctgcaacttccacctccgggtccaa

SEQ ID NO: 1156274 - DNA, 25 bp, Homo sapien
cagtatcttataatgagaaaagcca

SEQ ID NO: 1156275 - DNA, 25 bp, Homo sapien
aataaaggccaggcgtgcttcacgc

SEQ ID NO: 1156276 - DNA, 25 bp, Homo sapien
taaacaaggcagtatcttataatga

SEQ ID NO: 1156277 - DNA, 25 bp, Homo sapien
caaataatctgttgttagcagttta

SEQ ID NO: 1156278 - DNA, 25 bp, Homo sapien
ttgcactaaccttgaaactctggtg

SEQ ID NO: 1156279 - DNA, 25 bp, Homo sapien
tgcactaaccttgaaactctggtgc

SEQ ID NO: 1156280 - DNA, 25 bp, Homo sapien
ataccgaacagagatagttttgtcc

SEQ ID NO: 1156281 - DNA, 25 bp, Homo sapien
taaaggtcattaatgggccagtgtg

SEQ ID NO: 1156282 - DNA, 25 bp, Homo sapien
tcctttccctgaagtatatgtcctt

SEQ ID NO: 1156283 - DNA, 25 bp, Homo sapien
ggttaccaatttacttgcttagcac

SEQ ID NO: 1156284 - DNA, 25 bp, Homo sapien
catgcccagtccactctcttcttga

SEQ ID NO: 1156285 - DNA, 25 bp, Homo sapien
ccatgcccagtccactctcttcttg

SEQ ID NO: 1156286 - DNA, 25 bp, Homo sapien
atgcccagtccactctcttcttgaa

SEQ ID NO: 1156287 - DNA, 25 bp, Homo sapien
cacacaaacatttcttaacagcaca

SEQ ID NO: 1156288 - DNA, 25 bp, Homo sapien
acacaaacatttcttaacagcacac

SEQ ID NO: 1156289 - DNA, 25 bp, Homo sapien
caacacacaaacatttcttaacagc

SEQ ID NO: 1156290 - DNA, 25 bp, Homo sapien
agcaacacacaaacatttcttaaca

SEQ ID NO: 1156291 - DNA, 25 bp, Homo sapien
gctaatgtttctgtagatgcgattt

SEQ ID NO: 1156292 - DNA, 25 bp, Homo sapien
ttctgtagatgcgattttgccatgt

SEQ ID NO: 1156293 - DNA, 25 bp, Homo sapien
aatgtttctgtagatgcgattttgc

SEQ ID NO: 1156294 - DNA, 25 bp, Homo sapien
tgtttctgtagatgcgattttgcca

SEQ ID NO: 1156295 - DNA, 25 bp, Homo sapien
cactaccttccgtaagagacatata

SEQ ID NO: 1156296 - DNA, 25 bp, Homo sapien
caatgtaggagagtccctttacctc

SEQ ID NO: 1156297 - DNA, 25 bp, Homo sapien
tcattttctcaagagtaggttcagg

SEQ ID NO: 1156298 - DNA, 25 bp, Homo sapien
actttgttggcattgtataccaccc

SEQ ID NO: 1156299 - DNA, 25 bp, Homo sapien
ggagaaaattctgacgtacgccata

SEQ ID NO: 1156300 - DNA, 25 bp, Homo sapien
ggaatattatccacccataagaagg

SEQ ID NO: 1156301 - DNA, 25 bp, Homo sapien
taccatgacgtatctaggagtagaa

SEQ ID NO: 1156302 - DNA, 25 bp, Homo sapien
taaaagaatgtggacgcatacaatg

SEQ ID NO: 1156303 - DNA, 25 bp, Homo sapien
cacaaaacacgcgttaataaaagca

SEQ ID NO: 1156304 - DNA, 25 bp, Homo sapien
acacgcgttaataaaagcaaacaca

SEQ ID NO: 1156305 - DNA, 25 bp, Homo sapien
agaatttacttgtaagtacttggca

SEQ ID NO: 1156306 - DNA, 25 bp, Homo sapien
aatttacttgtaagtacttggcagg

SEQ ID NO: 1156307 - DNA, 25 bp, Homo sapien
gttcaagactagcttcactaacatg

SEQ ID NO: 1156308 - DNA, 25 bp, Homo sapien
gagttcaagactagcttcactaaca

SEQ ID NO: 1156309 - DNA, 25 bp, Homo sapien
catgtagtctttacagaaaacaagc

SEQ ID NO: 1156310 - DNA, 25 bp, Homo sapien
tttatgtctaccttgccttgttcca

SEQ ID NO: 1156311 - DNA, 25 bp, Homo sapien
aaagggcatcagcacgagagtccaa

SEQ ID NO: 1156312 - DNA, 25 bp, Homo sapien
ccaacaatgggctaagacagctgat

SEQ ID NO: 1156313 - DNA, 25 bp, Homo sapien
gccagggactgtttaaagaggatac

SEQ ID NO: 1156314 - DNA, 25 bp, Homo sapien
tatgccagggactgtttaaagagga

SEQ ID NO: 1156315 - DNA, 25 bp, Homo sapien
cagggactgtttaaagaggatacag

SEQ ID NO: 1156316 - DNA, 25 bp, Homo sapien
tatatgccagggactgtttaaagag

SEQ ID NO: 1156317 - DNA, 25 bp, Homo sapien
gggactatgggtgcgcatcaccacg

SEQ ID NO: 1156318 - DNA, 25 bp, Homo sapien
tgggactatgggtgcgcatcaccac

SEQ ID NO: 1156319 - DNA, 25 bp, Homo sapien
aactgggactatgggtgcgcatcac

SEQ ID NO: 1156320 - DNA, 25 bp, Homo sapien
actatgggtgcgcatcaccacgcct

SEQ ID NO: 1156321 - DNA, 25 bp, Homo sapien
tcctttataatctgcatcctgcctt

SEQ ID NO: 1156322 - DNA, 25 bp, Homo sapien
ttcctttataatctgcatcctgcct

SEQ ID NO: 1156323 - DNA, 25 bp, Homo sapien
aacaggggagcaaggtagggaagtg

SEQ ID NO: 1156324 - DNA, 25 bp, Homo sapien
tatcaaatctgtcaatgatttcgca

SEQ ID NO: 1156325 - DNA, 25 bp, Homo sapien
atcaaatctgtcaatgatttcgcac

SEQ ID NO: 1156326 - DNA, 25 bp, Homo sapien
atgggacataaatcaatccccgttt

SEQ ID NO: 1156327 - DNA, 25 bp, Homo sapien
ccaaaggatgcgattttatatctca

SEQ ID NO: 1156328 - DNA, 25 bp, Homo sapien
cacagcccaaaggatgcgattttat

SEQ ID NO: 1156329 - DNA, 25 bp, Homo sapien
aaaggatgcgattttatatctcaag

SEQ ID NO: 1156330 - DNA, 25 bp, Homo sapien
agcccaaaggatgcgattttatatc

SEQ ID NO: 1156331 - DNA, 25 bp, Homo sapien
tgtctacacttttaactcccattaa

SEQ ID NO: 1156332 - DNA, 25 bp, Homo sapien
cctggcttatcctcgcttcttgtat

SEQ ID NO: 1156333 - DNA, 25 bp, Homo sapien
gcacctggcttatcctcgcttcttg

SEQ ID NO: 1156334 - DNA, 25 bp, Homo sapien
gcttatcctcgcttcttgtatttta

SEQ ID NO: 1156335 - DNA, 25 bp, Homo sapien
ggcttatcctcgcttcttgtatttt

SEQ ID NO: 1156336 - DNA, 25 bp, Homo sapien
aaagagattcaaacggtggggatat

SEQ ID NO: 1156337 - DNA, 25 bp, Homo sapien
gcaaatgattcacggaatatgattg

SEQ ID NO: 1156338 - DNA, 25 bp, Homo sapien
gagattcaaacggtggggatatgca

SEQ ID NO: 1156339 - DNA, 25 bp, Homo sapien
catcagcaaatgattcacggaatat

SEQ ID NO: 1156340 - DNA, 25 bp, Homo sapien
taagggctggcaaattatgaacctc

SEQ ID NO: 1156341 - DNA, 25 bp, Homo sapien
gactttctatgtaggctaagggctg

SEQ ID NO: 1156342 - DNA, 25 bp, Homo sapien
gctggcatacataggaaagctactg

SEQ ID NO: 1156343 - DNA, 25 bp, Homo sapien
gctgtgacagagacactatggctca

SEQ ID NO: 1156344 - DNA, 25 bp, Homo sapien
ttcctttgggtggtatcttaactgc

SEQ ID NO: 1156345 - DNA, 25 bp, Homo sapien
aattgtaagttagattaggagggct

SEQ ID NO: 1156346 - DNA, 25 bp, Homo sapien
taggagggctatttggcagaacaga

SEQ ID NO: 1156347 - DNA, 25 bp, Homo sapien
aataataaaatctgggccgcgtgcg

SEQ ID NO: 1156348 - DNA, 25 bp, Homo sapien
gcccctaattatatcatatatttga

SEQ ID NO: 1156349 - DNA, 25 bp, Homo sapien
tcaaagaagataataaagatggaag

SEQ ID NO: 1156350 - DNA, 25 bp, Homo sapien
gatttgagaatcaaagaagataata

SEQ ID NO: 1156351 - DNA, 25 bp, Homo sapien
tatttgatttgagaatcaaagaaga

SEQ ID NO: 1156352 - DNA, 25 bp, Homo sapien
gatacttagctcaccgatttttaga

SEQ ID NO: 1156353 - DNA, 25 bp, Homo sapien
ctcacagcatccctaagagacaaac

SEQ ID NO: 1156354 - DNA, 25 bp, Homo sapien
ctaccaagtaagagatccaggattt

SEQ ID NO: 1156355 - DNA, 25 bp, Homo sapien
gacattgaaagtacctcactgtgta

SEQ ID NO: 1156356 - DNA, 25 bp, Homo sapien
gagaggttaaaaagccactactggc

SEQ ID NO: 1156357 - DNA, 25 bp, Homo sapien
gcctgagaggttaaaaagccactac

SEQ ID NO: 1156358 - DNA, 25 bp, Homo sapien
cctgagaggttaaaaagccactact

SEQ ID NO: 1156359 - DNA, 25 bp, Homo sapien
aggttaaaaagccactactggctgg

SEQ ID NO: 1156360 - DNA, 25 bp, Homo sapien
ccacggctggccttcatttttcatt

SEQ ID NO: 1156361 - DNA, 25 bp, Homo sapien
tatagaaatgaggtcccactgttgc

SEQ ID NO: 1156362 - DNA, 25 bp, Homo sapien
tcattttccccactccttatttctc

SEQ ID NO: 1156363 - DNA, 25 bp, Homo sapien
cactttggcctcacatgatgggatt

SEQ ID NO: 1156364 - DNA, 25 bp, Homo sapien
ctgaatttgactactgaaggtgact

SEQ ID NO: 1156365 - DNA, 25 bp, Homo sapien
caaagttcacccatgctgcggcatg

SEQ ID NO: 1156366 - DNA, 25 bp, Homo sapien
tctccagcaaccatgattctacttc

SEQ ID NO: 1156367 - DNA, 25 bp, Homo sapien
gtgacaggcgtgtttcacttagcat

SEQ ID NO: 1156368 - DNA, 25 bp, Homo sapien
gtgcaattctcactactatttccaa

SEQ ID NO: 1156369 - DNA, 25 bp, Homo sapien
tacagtactctgtaccaataactcc

SEQ ID NO: 1156370 - DNA, 25 bp, Homo sapien
cagctcctgataacctttaatctct

SEQ ID NO: 1156371 - DNA, 25 bp, Homo sapien
tctctatggacctaacaattctagg

SEQ ID NO: 1156372 - DNA, 25 bp, Homo sapien
tgactacacaatactccattagtat

SEQ ID NO: 1156373 - DNA, 25 bp, Homo sapien
gactacacaatactccattagtatt

SEQ ID NO: 1156374 - DNA, 25 bp, Homo sapien
aggctgttcttaaatatctaagaac

SEQ ID NO: 1156375 - DNA, 25 bp, Homo sapien
tatctaagaacagctttaactgttc

SEQ ID NO: 1156376 - DNA, 25 bp, Homo sapien
tgagtgatcctagctgaagctctgg

SEQ ID NO: 1156377 - DNA, 25 bp, Homo sapien
gccagacagctgtattagctcctaa

SEQ ID NO: 1156378 - DNA, 25 bp, Homo sapien
gatcttctatccaggccactaactt

SEQ ID NO: 1156379 - DNA, 25 bp, Homo sapien
tgtatatgaacagtggcttcaactc

SEQ ID NO: 1156380 - DNA, 25 bp, Homo sapien
ttaaacaacaagaattgaaaggtca

SEQ ID NO: 1156381 - DNA, 25 bp, Homo sapien
tttaaccatgggcagaataaatgtt

SEQ ID NO: 1156382 - DNA, 25 bp, Homo sapien
aacaacaagaattgaaaggtcaaat

SEQ ID NO: 1156383 - DNA, 25 bp, Homo sapien
taaacaacaagaattgaaaggtcaa

SEQ ID NO: 1156384 - DNA, 25 bp, Homo sapien
aaaaggaatcattattagcggcaac

SEQ ID NO: 1156385 - DNA, 25 bp, Homo sapien
tgagtctccagcaaatcatattctt

SEQ ID NO: 1156386 - DNA, 25 bp, Homo sapien
gatgactgatcatggtagctgggac

SEQ ID NO: 1156387 - DNA, 25 bp, Homo sapien
tataagaagtgacaacagagtctgt

SEQ ID NO: 1156388 - DNA, 25 bp, Homo sapien
tatatatatttttttagttgagatg

SEQ ID NO: 1156389 - DNA, 25 bp, Homo sapien
gactacaggccagtgacaccatgcc

SEQ ID NO: 1156390 - DNA, 25 bp, Homo sapien
tgtatatatatttttttagttgaga

SEQ ID NO: 1156391 - DNA, 25 bp, Homo sapien
caggccagtgacaccatgcccggct

SEQ ID NO: 1156392 - DNA, 25 bp, Homo sapien
agtctggccaattctgggaggccga

SEQ ID NO: 1156393 - DNA, 25 bp, Homo sapien
ggcaagaggatctgtactgtactga

SEQ ID NO: 1156394 - DNA, 25 bp, Homo sapien
tgtagtacccgctacatgggagtct

SEQ ID NO: 1156395 - DNA, 25 bp, Homo sapien
tactgtactgactggtgatcacaac

SEQ ID NO: 1156396 - DNA, 25 bp, Homo sapien
ccagattttaaagattcgttctaca

SEQ ID NO: 1156397 - DNA, 25 bp, Homo sapien
tcccagattttaaagattcgttcta

SEQ ID NO: 1156398 - DNA, 25 bp, Homo sapien
tcaaagcttctctcaatgccacaat

SEQ ID NO: 1156399 - DNA, 25 bp, Homo sapien
aagcttctctcaatgccacaatcat

SEQ ID NO: 1156400 - DNA, 25 bp, Homo sapien
caaagcttctctcaatgccacaatc

SEQ ID NO: 1156401 - DNA, 25 bp, Homo sapien
aaagcttctctcaatgccacaatca

SEQ ID NO: 1156402 - DNA, 25 bp, Homo sapien
tgaaaaaaggcaatccgagactgtg

SEQ ID NO: 1156403 - DNA, 25 bp, Homo sapien
tcctacccgatctaagaagctgtca

SEQ ID NO: 1156404 - DNA, 25 bp, Homo sapien
gacggtcatggtagcagattatcac

SEQ ID NO: 1156405 - DNA, 25 bp, Homo sapien
ccacttcagtgccaaagttgcagca

SEQ ID NO: 1156406 - DNA, 25 bp, Homo sapien
gcttattcggttgtttgttcagatt

SEQ ID NO: 1156407 - DNA, 25 bp, Homo sapien
actgcttattcggttgtttgttcag

SEQ ID NO: 1156408 - DNA, 25 bp, Homo sapien
tgatttcttccactgcttattcggt

SEQ ID NO: 1156409 - DNA, 25 bp, Homo sapien
tcttccactgcttattcggttgttt

SEQ ID NO: 1156410 - DNA, 25 bp, Homo sapien
ggtacgatgtcaaatggtctacatt

SEQ ID NO: 1156411 - DNA, 25 bp, Homo sapien
tattagttgagattttgttccttac

SEQ ID NO: 1156412 - DNA, 25 bp, Homo sapien
cccatggtttatgccaggtacgatg

SEQ ID NO: 1156413 - DNA, 25 bp, Homo sapien
tgtttagcataggtcactgggagcc

SEQ ID NO: 1156414 - DNA, 25 bp, Homo sapien
actatcttagacttgagagcagctt

SEQ ID NO: 1156415 - DNA, 25 bp, Homo sapien
cagcaactatcttagacttgagagc

SEQ ID NO: 1156416 - DNA, 25 bp, Homo sapien
caactatcttagacttgagagcagc

SEQ ID NO: 1156417 - DNA, 25 bp, Homo sapien
gcaactatcttagacttgagagcag

SEQ ID NO: 1156418 - DNA, 25 bp, Homo sapien
tatctgatcttctgagcgcttgtat

SEQ ID NO: 1156419 - DNA, 25 bp, Homo sapien
tccaccctcatagttgacaactgct

SEQ ID NO: 1156420 - DNA, 25 bp, Homo sapien
gcgcttgtatagcaacagctcttca

SEQ ID NO: 1156421 - DNA, 25 bp, Homo sapien
aagcatttgagagtttctgtgctgc

SEQ ID NO: 1156422 - DNA, 25 bp, Homo sapien
aggatctccttatgaggtaaaccag

SEQ ID NO: 1156423 - DNA, 25 bp, Homo sapien
ggaaaaatgacacatatggaaagaa

SEQ ID NO: 1156424 - DNA, 25 bp, Homo sapien
ggaaaccagaggtgccacaactgct

SEQ ID NO: 1156425 - DNA, 25 bp, Homo sapien
tatatgcatgaaataactacctggg

SEQ ID NO: 1156426 - DNA, 25 bp, Homo sapien
aacagactcatgtgaacctgccaga

SEQ ID NO: 1156427 - DNA, 25 bp, Homo sapien
tatcttaaacaagtttctccaaatc

SEQ ID NO: 1156428 - DNA, 25 bp, Homo sapien
gaacctgccagagtgaaggcacttg

SEQ ID NO: 1156429 - DNA, 25 bp, Homo sapien
taaacaagtttctccaaatcacaaa

SEQ ID NO: 1156430 - DNA, 25 bp, Homo sapien
agcttgcctcttcaaattctttgga

SEQ ID NO: 1156431 - DNA, 25 bp, Homo sapien
tcacctgcttatctaatccattcac

SEQ ID NO: 1156432 - DNA, 25 bp, Homo sapien
attcttccagcttggagcttgcctc

SEQ ID NO: 1156433 - DNA, 25 bp, Homo sapien
tgcttctgttaatgagggtccgttt

SEQ ID NO: 1156434 - DNA, 25 bp, Homo sapien
aactggccaatatgaatcggttctg

SEQ ID NO: 1156435 - DNA, 25 bp, Homo sapien
aaccaaacttgtgtgccatctgaca

SEQ ID NO: 1156436 - DNA, 25 bp, Homo sapien
gagagatgacaaccgaatgcaactt

SEQ ID NO: 1156437 - DNA, 25 bp, Homo sapien
ggtcacgaaaatcaaggagaaagct

SEQ ID NO: 1156438 - DNA, 25 bp, Homo sapien
tatactggagagtgctaaggccacc

SEQ ID NO: 1156439 - DNA, 25 bp, Homo sapien
taatgctcccatcaagaacaagtag

SEQ ID NO: 1156440 - DNA, 25 bp, Homo sapien
gacacacttgtttgaatatactgga

SEQ ID NO: 1156441 - DNA, 25 bp, Homo sapien
taagtggcaaatactatcagaggga

SEQ ID NO: 1156442 - DNA, 25 bp, Homo sapien
cagaacatttagtagtcatgtcttc

SEQ ID NO: 1156443 - DNA, 25 bp, Homo sapien
tattaatcacgtacattgctggcac

SEQ ID NO: 1156444 - DNA, 25 bp, Homo sapien
cctggcgacccattttgactctgat

SEQ ID NO: 1156445 - DNA, 25 bp, Homo sapien
tcttaaatgagagatgaggtcctgc

SEQ ID NO: 1156446 - DNA, 25 bp, Homo sapien
aatatatcatctgtcaagcatgcag

SEQ ID NO: 1156447 - DNA, 25 bp, Homo sapien
ctcggttagcaaaggttttatatgc

SEQ ID NO: 1156448 - DNA, 25 bp, Homo sapien
gagggagcgtccatgcttggggaag

SEQ ID NO: 1156449 - DNA, 25 bp, Homo sapien
ggagactcagaaccagtcggggagg

SEQ ID NO: 1156450 - DNA, 25 bp, Homo sapien
acttcaattgatccaacttcttctt

SEQ ID NO: 1156451 - DNA, 25 bp, Homo sapien
cttggggaaggaactggtgattctt

SEQ ID NO: 1156452 - DNA, 25 bp, Homo sapien
cactctccatggttggtgactggga

SEQ ID NO: 1156453 - DNA, 25 bp, Homo sapien
ggtgtggcagatttctcactctcca

SEQ ID NO: 1156454 - DNA, 25 bp, Homo sapien
catcacgattatctgtcacaggttc

SEQ ID NO: 1156455 - DNA, 25 bp, Homo sapien
ggtgactgggattcctcacctccca

SEQ ID NO: 1156456 - DNA, 25 bp, Homo sapien
ctttggaagaggtggagttgctgtc

SEQ ID NO: 1156457 - DNA, 25 bp, Homo sapien
cacaggcactggggtacatgaagag

SEQ ID NO: 1156458 - DNA, 25 bp, Homo sapien
aagaggcctttgagatattttctgt

SEQ ID NO: 1156459 - DNA, 25 bp, Homo sapien
gagttgctgtcatggtcacaggcac

SEQ ID NO: 1156460 - DNA, 25 bp, Homo sapien
gctaaggatggaactgatctttgcc

SEQ ID NO: 1156461 - DNA, 25 bp, Homo sapien
gatggaactgatctttgccagatcc

SEQ ID NO: 1156462 - DNA, 25 bp, Homo sapien
taaactgctaaggatggaactgatc

SEQ ID NO: 1156463 - DNA, 25 bp, Homo sapien
actgatgttaaactgctaaggatgg

SEQ ID NO: 1156464 - DNA, 25 bp, Homo sapien
cagccactcaaaggctcaggtggga

SEQ ID NO: 1156465 - DNA, 25 bp, Homo sapien
cacagtgaactacacgtcctggaat

SEQ ID NO: 1156466 - DNA, 25 bp, Homo sapien
actgcacaaggcaagtaactggaga

SEQ ID NO: 1156467 - DNA, 25 bp, Homo sapien
gggactacacggtatcccaccttgc

SEQ ID NO: 1156468 - DNA, 25 bp, Homo sapien
ctggagaaggtcttgatgcaggact

SEQ ID NO: 1156469 - DNA, 25 bp, Homo sapien
gagaaggtcttgatgcaggactgac

SEQ ID NO: 1156470 - DNA, 25 bp, Homo sapien
gaaggtcttgatgcaggactgaccc

SEQ ID NO: 1156471 - DNA, 25 bp, Homo sapien
ggagaaggtcttgatgcaggactga

SEQ ID NO: 1156472 - DNA, 25 bp, Homo sapien
ctgactgtgtctgggttttggaaag

SEQ ID NO: 1156473 - DNA, 25 bp, Homo sapien
tggagaggatatttgccagagggtt

SEQ ID NO: 1156474 - DNA, 25 bp, Homo sapien
gttgtgagatgttgtcgtggcaggt

SEQ ID NO: 1156475 - DNA, 25 bp, Homo sapien
ggctgactgtgtctgggttttggaa

SEQ ID NO: 1156476 - DNA, 25 bp, Homo sapien
ttgggctcaaaagatttatctgcct

SEQ ID NO: 1156477 - DNA, 25 bp, Homo sapien
caaaagatttatctgccttagcttc

SEQ ID NO: 1156478 - DNA, 25 bp, Homo sapien
cctcttgggctcaaaagatttatct

SEQ ID NO: 1156479 - DNA, 25 bp, Homo sapien
gctcaaaagatttatctgccttagc

SEQ ID NO: 1156480 - DNA, 25 bp, Homo sapien
tcactgaatacactaacattgttcc

SEQ ID NO: 1156481 - DNA, 25 bp, Homo sapien
aagaatttcaagtcccctccatcct

SEQ ID NO: 1156482 - DNA, 25 bp, Homo sapien
tctaacagatttggcctaaagaatt

SEQ ID NO: 1156483 - DNA, 25 bp, Homo sapien
tactttagttatgatccttctgaag

SEQ ID NO: 1156484 - DNA, 25 bp, Homo sapien
cctctgaagattggcagatggtaac

SEQ ID NO: 1156485 - DNA, 25 bp, Homo sapien
actggctggaactgggttcccagta

SEQ ID NO: 1156486 - DNA, 25 bp, Homo sapien
tgtgggtagctgtaaaccccaaaga

SEQ ID NO: 1156487 - DNA, 25 bp, Homo sapien
tgggctttgcccaattgaggccttg

SEQ ID NO: 1156488 - DNA, 25 bp, Homo sapien
gatacagaattggagagctctcggg

SEQ ID NO: 1156489 - DNA, 25 bp, Homo sapien
gctgcttatagggagattcactgcc

SEQ ID NO: 1156490 - DNA, 25 bp, Homo sapien
gctgaaggcaccaaatagcccaggg

SEQ ID NO: 1156491 - DNA, 25 bp, Homo sapien
cagaattggctggtactcggtggta

SEQ ID NO: 1156492 - DNA, 25 bp, Homo sapien
tggcaaactgagatgcccagtggta

SEQ ID NO: 1156493 - DNA, 25 bp, Homo sapien
ccagtggtagattgagacaagctat

SEQ ID NO: 1156494 - DNA, 25 bp, Homo sapien
actgggtgaggagagtctgggtact

SEQ ID NO: 1156495 - DNA, 25 bp, Homo sapien
gagaaaagggaacgatgtgggactg

SEQ ID NO: 1156496 - DNA, 25 bp, Homo sapien
catctgagggcttacgtgaggcgtt

SEQ ID NO: 1156497 - DNA, 25 bp, Homo sapien
tctcgtacacggctaaggccagggc

SEQ ID NO: 1156498 - DNA, 25 bp, Homo sapien
ggttcgaaagatccacagagggtag

SEQ ID NO: 1156499 - DNA, 25 bp, Homo sapien
aactgttggaacgaaagctgccgac

SEQ ID NO: 1156500 - DNA, 25 bp, Homo sapien
tggtgtctctgtgtgagggacccaa

SEQ ID NO: 1156501 - DNA, 25 bp, Homo sapien
cactccggctgatggtgtctctgtg

SEQ ID NO: 1156502 - DNA, 25 bp, Homo sapien
gacccaagggggggccactgctgct

SEQ ID NO: 1156503 - DNA, 25 bp, Homo sapien
tgtctctgtgtgagggacccaaggg

SEQ ID NO: 1156504 - DNA, 25 bp, Homo sapien
gggaagaatgggcgttttggtgcaa

SEQ ID NO: 1156505 - DNA, 25 bp, Homo sapien
tggccggggactccgtaagattata

SEQ ID NO: 1156506 - DNA, 25 bp, Homo sapien
gcaaagaacggagggcccctagcaa

SEQ ID NO: 1156507 - DNA, 25 bp, Homo sapien
tggtgcaaagaacggagggccccta

SEQ ID NO: 1156508 - DNA, 25 bp, Homo sapien
cagttactaagctgccgagagaggg

SEQ ID NO: 1156509 - DNA, 25 bp, Homo sapien
gccgagctggctacagcagttacta

SEQ ID NO: 1156510 - DNA, 25 bp, Homo sapien
acatctcttggctgttagcaggaca

SEQ ID NO: 1156511 - DNA, 25 bp, Homo sapien
tgactactcgataagccaagcccaa

SEQ ID NO: 1156512 - DNA, 25 bp, Homo sapien
ttgtatcaatagtcaactgtagtga

SEQ ID NO: 1156513 - DNA, 25 bp, Homo sapien
ctgtagtgactgtctttctggccac

SEQ ID NO: 1156514 - DNA, 25 bp, Homo sapien
tcaatagtcaactgtagtgactgtc

SEQ ID NO: 1156515 - DNA, 25 bp, Homo sapien
tcaactgtagtgactgtctttctgg

SEQ ID NO: 1156516 - DNA, 25 bp, Homo sapien
taaaaatgcagggataatatttctg

SEQ ID NO: 1156517 - DNA, 25 bp, Homo sapien
aaaaatgcagggataatatttctgt

SEQ ID NO: 1156518 - DNA, 25 bp, Homo sapien
ttaaaaatgcagggataatatttct

SEQ ID NO: 1156519 - DNA, 25 bp, Homo sapien
tgcagggataatatttctgttgcac

SEQ ID NO: 1156520 - DNA, 25 bp, Homo sapien
tcacttacattagggaggcaccatg

SEQ ID NO: 1156521 - DNA, 25 bp, Homo sapien
tacattagggaggcaccatggtaaa

SEQ ID NO: 1156522 - DNA, 25 bp, Homo sapien
acttacattagggaggcaccatggt

SEQ ID NO: 1156523 - DNA, 25 bp, Homo sapien
cttacattagggaggcaccatggta

SEQ ID NO: 1156524 - DNA, 25 bp, Homo sapien
gattatcagttgagtatgccttggg

SEQ ID NO: 1156525 - DNA, 25 bp, Homo sapien
gccttgaaatgggatagacacatgt

SEQ ID NO: 1156526 - DNA, 25 bp, Homo sapien
ctgttttactcatctagctggagat

SEQ ID NO: 1156527 - DNA, 25 bp, Homo sapien
tcccaaatcatgatgtgcacctggt

SEQ ID NO: 1156528 - DNA, 25 bp, Homo sapien
taaatggtcagagagccttatcaag

SEQ ID NO: 1156529 - DNA, 25 bp, Homo sapien
cacacgtaaggtcatggtatcatgc

SEQ ID NO: 1156530 - DNA, 25 bp, Homo sapien
caaaagtcagagcatggtcacggag

SEQ ID NO: 1156531 - DNA, 25 bp, Homo sapien
ttttgaggacaattatcccgcccca

SEQ ID NO: 1156532 - DNA, 25 bp, Homo sapien
tatctcgataggtttgctggaccca

SEQ ID NO: 1156533 - DNA, 25 bp, Homo sapien
gaagctcaattctgcaggaaccggt

SEQ ID NO: 1156534 - DNA, 25 bp, Homo sapien
gattttacagtgagtaccaaggacc

SEQ ID NO: 1156535 - DNA, 25 bp, Homo sapien
tgagagtgaatatcctgccattagg

SEQ ID NO: 1156536 - DNA, 25 bp, Homo sapien
tatttgcactcactaggaagccagg

SEQ ID NO: 1156537 - DNA, 25 bp, Homo sapien
aaagcagcggtttcagctcctgaga

SEQ ID NO: 1156538 - DNA, 25 bp, Homo sapien
taaagtgcaagtggttacgaagtgg

SEQ ID NO: 1156539 - DNA, 25 bp, Homo sapien
tggtttcaccttcggccctggacag

SEQ ID NO: 1156540 - DNA, 25 bp, Homo sapien
tcacaggagcctccatggatcttgg

SEQ ID NO: 1156541 - DNA, 25 bp, Homo sapien
gtttcccgggcagggcagttgatct

SEQ ID NO: 1156542 - DNA, 25 bp, Homo sapien
tcttgggtccatcttctggtagaca

SEQ ID NO: 1156543 - DNA, 25 bp, Homo sapien
gcagttgatctgagtcacaggagcc

SEQ ID NO: 1156544 - DNA, 25 bp, Homo sapien
caagggttgtagaggaagaggtgtc

SEQ ID NO: 1156545 - DNA, 25 bp, Homo sapien
tttcaatggtgatagaatcaagggt

SEQ ID NO: 1156546 - DNA, 25 bp, Homo sapien
tgaagtttcaatggtgatagaatca

SEQ ID NO: 1156547 - DNA, 25 bp, Homo sapien
tagaatcaagggttgtagaggaaga

SEQ ID NO: 1156548 - DNA, 25 bp, Homo sapien
cttgggggtagccatcaggctgtca

SEQ ID NO: 1156549 - DNA, 25 bp, Homo sapien
agtaattctcattagtcccctcacc

SEQ ID NO: 1156550 - DNA, 25 bp, Homo sapien
tcattagtcccctcacctggaggtg

SEQ ID NO: 1156551 - DNA, 25 bp, Homo sapien
tagtaaagtatgaagggaaactgac

SEQ ID NO: 1156552 - DNA, 25 bp, Homo sapien
ccccagacccgtggcgtttcagctg

SEQ ID NO: 1156553 - DNA, 25 bp, Homo sapien
aaatagcaattaggcgtcctgtggc

SEQ ID NO: 1156554 - DNA, 25 bp, Homo sapien
gacccgtggcgtttcagctgaaacc

SEQ ID NO: 1156555 - DNA, 25 bp, Homo sapien
ccaaaaatagcaattaggcgtcctg

SEQ ID NO: 1156556 - DNA, 25 bp, Homo sapien
cttcacaccagtgcctacatcctca

SEQ ID NO: 1156557 - DNA, 25 bp, Homo sapien
agtgcctacatcctcaaacagatta

SEQ ID NO: 1156558 - DNA, 25 bp, Homo sapien
gttccttcacaccagtgcctacatc

SEQ ID NO: 1156559 - DNA, 25 bp, Homo sapien
acaccagtgcctacatcctcaaaca

SEQ ID NO: 1156560 - DNA, 25 bp, Homo sapien
tgtaaaccttggagccggagacacc

SEQ ID NO: 1156561 - DNA, 25 bp, Homo sapien
tagcctgcaagcctgtaaaccttgg

SEQ ID NO: 1156562 - DNA, 25 bp, Homo sapien
tgcaagcctgtaaaccttggagccg

SEQ ID NO: 1156563 - DNA, 25 bp, Homo sapien
caagcctgtaaaccttggagccgga

SEQ ID NO: 1156564 - DNA, 25 bp, Homo sapien
ccaagccgctctgccaaccagcgtg

SEQ ID NO: 1156565 - DNA, 25 bp, Homo sapien
aagccgctctgccaaccagcgtgga

SEQ ID NO: 1156566 - DNA, 25 bp, Homo sapien
ggccaagccgctctgccaaccagcg

SEQ ID NO: 1156567 - DNA, 25 bp, Homo sapien
agccgctctgccaaccagcgtggag

SEQ ID NO: 1156568 - DNA, 25 bp, Homo sapien
gtgatatcttaatagtccggggttc

SEQ ID NO: 1156569 - DNA, 25 bp, Homo sapien
agtgatatcttaatagtccggggtt

SEQ ID NO: 1156570 - DNA, 25 bp, Homo sapien
tgatatcttaatagtccggggttcc

SEQ ID NO: 1156571 - DNA, 25 bp, Homo sapien
ctgatctgccgggctagttggtagg

SEQ ID NO: 1156572 - DNA, 25 bp, Homo sapien
tgatctgccgggctagttggtaggg

SEQ ID NO: 1156573 - DNA, 25 bp, Homo sapien
gatctgccgggctagttggtagggg

SEQ ID NO: 1156574 - DNA, 25 bp, Homo sapien
atctgccgggctagttggtaggggg

SEQ ID NO: 1156575 - DNA, 25 bp, Homo sapien
aacaaaatcttcaggaaaggctatc

SEQ ID NO: 1156576 - DNA, 25 bp, Homo sapien
aagcagaccaagttttcttcccctg

SEQ ID NO: 1156577 - DNA, 25 bp, Homo sapien
cctggtagttacaggatgggcctgt

SEQ ID NO: 1156578 - DNA, 25 bp, Homo sapien
tgaaatgagttaccagagcaacaga

SEQ ID NO: 1156579 - DNA, 25 bp, Homo sapien
gaatctgtctccaagggccgctcca

SEQ ID NO: 1156580 - DNA, 25 bp, Homo sapien
ggaatcgaatgtcagaaatctgagg

SEQ ID NO: 1156581 - DNA, 25 bp, Homo sapien
cataaggttctccattcacttgagc

SEQ ID NO: 1156582 - DNA, 25 bp, Homo sapien
gaatgtcagaaatctgaggtcagaa

SEQ ID NO: 1156583 - DNA, 25 bp, Homo sapien
agtttcctaaccagaaatagtcaag

SEQ ID NO: 1156584 - DNA, 25 bp, Homo sapien
caaatggagaaactgcggcaaaaga

SEQ ID NO: 1156585 - DNA, 25 bp, Homo sapien
aggtctccctcccaactgcaaatgg

SEQ ID NO: 1156586 - DNA, 25 bp, Homo sapien
gtcaagacagtctgtggtaggtctc

SEQ ID NO: 1156587 - DNA, 25 bp, Homo sapien
tgcccccaggacatgggtgctggag

SEQ ID NO: 1156588 - DNA, 25 bp, Homo sapien
cagagaacagcacctaggaattgtt

SEQ ID NO: 1156589 - DNA, 25 bp, Homo sapien
gaacagcacctaggaattgttcagc

SEQ ID NO: 1156590 - DNA, 25 bp, Homo sapien
tgcagagaacagcacctaggaattg

SEQ ID NO: 1156591 - DNA, 25 bp, Homo sapien
gaaatcatggtaaaagccatattct

SEQ ID NO: 1156592 - DNA, 25 bp, Homo sapien
aaagccatattctgtacttggacct

SEQ ID NO: 1156593 - DNA, 25 bp, Homo sapien
ggtaaaagccatattctgtacttgg

SEQ ID NO: 1156594 - DNA, 25 bp, Homo sapien
ttcccaggaagaaatcatggtaaaa

SEQ ID NO: 1156595 - DNA, 25 bp, Homo sapien
ctggcaaatccgctccaaaacaggc

SEQ ID NO: 1156596 - DNA, 25 bp, Homo sapien
cctccggaagggtcgagcagcagct

SEQ ID NO: 1156597 - DNA, 25 bp, Homo sapien
caactggcgaagctgatcccgtgaa

SEQ ID NO: 1156598 - DNA, 25 bp, Homo sapien
gtgaagcctctagcctccggaaggg

SEQ ID NO: 1156599 - DNA, 25 bp, Homo sapien
cactttctcctcaatcaagtgaagc

SEQ ID NO: 1156600 - DNA, 25 bp, Homo sapien
ctttctcctcaatcaagtgaagctt

SEQ ID NO: 1156601 - DNA, 25 bp, Homo sapien
tcaagtgaagcttaaaggggttatc

SEQ ID NO: 1156602 - DNA, 25 bp, Homo sapien
ttctcctcaatcaagtgaagcttaa

SEQ ID NO: 1156603 - DNA, 25 bp, Homo sapien
tttgccttaatcttgacaactctta

SEQ ID NO: 1156604 - DNA, 25 bp, Homo sapien
tgtttgccttaatcttgacaactct

SEQ ID NO: 1156605 - DNA, 25 bp, Homo sapien
gtttgccttaatcttgacaactctt

SEQ ID NO: 1156606 - DNA, 25 bp, Homo sapien
ttgccttaatcttgacaactcttac

SEQ ID NO: 1156607 - DNA, 25 bp, Homo sapien
tctttagctgacagaagaggtgaag

SEQ ID NO: 1156608 - DNA, 25 bp, Homo sapien
agcttctagctttctccctctcatg

SEQ ID NO: 1156609 - DNA, 25 bp, Homo sapien
gggccctggcaaaggtcaaccaatg

SEQ ID NO: 1156610 - DNA, 25 bp, Homo sapien
ctccaatctgtccagtatgccgaag

SEQ ID NO: 1156611 - DNA, 25 bp, Homo sapien
gcaaaggtcaaccaatgtgccacac

SEQ ID NO: 1156612 - DNA, 25 bp, Homo sapien
atctgtccagtatgccgaaggtggg

SEQ ID NO: 1156613 - DNA, 25 bp, Homo sapien
cctggccgacagtctgtattttaca

SEQ ID NO: 1156614 - DNA, 25 bp, Homo sapien
tggccgacagtctgtattttacagc

SEQ ID NO: 1156615 - DNA, 25 bp, Homo sapien
cgcacctggccgacagtctgtattt

SEQ ID NO: 1156616 - DNA, 25 bp, Homo sapien
cacctggccgacagtctgtatttta

SEQ ID NO: 1156617 - DNA, 25 bp, Homo sapien
gaaggtggagctagcagtgagtcgc

SEQ ID NO: 1156618 - DNA, 25 bp, Homo sapien
gctagcagtgagtcgcgatcgcacc

SEQ ID NO: 1156619 - DNA, 25 bp, Homo sapien
tggagctagcagtgagtcgcgatcg

SEQ ID NO: 1156620 - DNA, 25 bp, Homo sapien
aaggtggagctagcagtgagtcgcg

SEQ ID NO: 1156621 - DNA, 25 bp, Homo sapien
cctgctctctcctttaacagtacta

SEQ ID NO: 1156622 - DNA, 25 bp, Homo sapien
tctcctttaacagtactaatgagcc

SEQ ID NO: 1156623 - DNA, 25 bp, Homo sapien
cacatgaaatccaaaagcctctgcc

SEQ ID NO: 1156624 - DNA, 25 bp, Homo sapien
ttaacagtactaatgagccgggcgc

SEQ ID NO: 1156625 - DNA, 25 bp, Homo sapien
cctgaagacctccataaggatgatg

SEQ ID NO: 1156626 - DNA, 25 bp, Homo sapien
gggcccctgaagacctccataagga

SEQ ID NO: 1156627 - DNA, 25 bp, Homo sapien
gaagacctccataaggatgatgagt

SEQ ID NO: 1156628 - DNA, 25 bp, Homo sapien
gcccctgaagacctccataaggatg

SEQ ID NO: 1156629 - DNA, 25 bp, Homo sapien
tctgttgtggggaaggaaatccctg

SEQ ID NO: 1156630 - DNA, 25 bp, Homo sapien
cgccggtggtcccgcaattctgctt

SEQ ID NO: 1156631 - DNA, 25 bp, Homo sapien
ccagaccctcagcaattctgttgtg

SEQ ID NO: 1156632 - DNA, 25 bp, Homo sapien
cggtggtcccgcaattctgcttcct

SEQ ID NO: 1156633 - DNA, 25 bp, Homo sapien
cctgataaacgccactagtgcatta

SEQ ID NO: 1156634 - DNA, 25 bp, Homo sapien
atacacccttgtccctcgtggcagg

SEQ ID NO: 1156635 - DNA, 25 bp, Homo sapien
gccactagtgcattatacacccttg

SEQ ID NO: 1156636 - DNA, 25 bp, Homo sapien
cagggctcagttcatggaagaagaa

SEQ ID NO: 1156637 - DNA, 25 bp, Homo sapien
acaggcgctgccaccacactggcta

SEQ ID NO: 1156638 - DNA, 25 bp, Homo sapien
caggcgctgccaccacactggctaa

SEQ ID NO: 1156639 - DNA, 25 bp, Homo sapien
tcggagaaaccacgatgggcatact

SEQ ID NO: 1156640 - DNA, 25 bp, Homo sapien
ggtagaatcgtcactctgggagctg

SEQ ID NO: 1156641 - DNA, 25 bp, Homo sapien
tcataggcttgagggcgagtgtatc

SEQ ID NO: 1156642 - DNA, 25 bp, Homo sapien
ggctgcacggcaaacatgtcttcct

SEQ ID NO: 1156643 - DNA, 25 bp, Homo sapien
catagggaggactagcccccgaaga

SEQ ID NO: 1156644 - DNA, 25 bp, Homo sapien
cactgagtcctgtcaatcccactca

SEQ ID NO: 1156645 - DNA, 25 bp, Homo sapien
ctttctctgcaccatctgctataac

SEQ ID NO: 1156646 - DNA, 25 bp, Homo sapien
ctactttctctgcaccatctgctat

SEQ ID NO: 1156647 - DNA, 25 bp, Homo sapien
tgtacagaagatgtgagcgtcatcc

SEQ ID NO: 1156648 - DNA, 25 bp, Homo sapien
tggaagcaccgcagtcgggtcagtc

SEQ ID NO: 1156649 - DNA, 25 bp, Homo sapien
caccagaggcttcggcccggtgtag

SEQ ID NO: 1156650 - DNA, 25 bp, Homo sapien
ggtgtagagccccaaagtcagctag

SEQ ID NO: 1156651 - DNA, 25 bp, Homo sapien
tagacggaacggaggaaatcaagac

SEQ ID NO: 1156652 - DNA, 25 bp, Homo sapien
ggagaagccaagaacggcatagacg

SEQ ID NO: 1156653 - DNA, 25 bp, Homo sapien
caggaagccagatggccgggtggac

SEQ ID NO: 1156654 - DNA, 25 bp, Homo sapien
agtgccaggcggaaggagaagccaa

SEQ ID NO: 1156655 - DNA, 25 bp, Homo sapien
accatctccagagttgaggtcccag

SEQ ID NO: 1156656 - DNA, 25 bp, Homo sapien
attgtcccacactgatgtggccggc

SEQ ID NO: 1156657 - DNA, 25 bp, Homo sapien
tctcaggggcagttggaagtcaagc

SEQ ID NO: 1156658 - DNA, 25 bp, Homo sapien
ccacactgatgtggccggcccaggg

SEQ ID NO: 1156659 - DNA, 25 bp, Homo sapien
ttatactggaggtcaaatctcaggg

SEQ ID NO: 1156660 - DNA, 25 bp, Homo sapien
ggcagaaggacttattccatgcact

SEQ ID NO: 1156661 - DNA, 25 bp, Homo sapien
aaaggcagaaggacttattccatgc

SEQ ID NO: 1156662 - DNA, 25 bp, Homo sapien
gaattgtgtacccaagatcaccttc

SEQ ID NO: 1156663 - DNA, 25 bp, Homo sapien
gatggaatggtggaagtatcacgaa

SEQ ID NO: 1156664 - DNA, 25 bp, Homo sapien
actgctcggtgaatgaggactggac

SEQ ID NO: 1156665 - DNA, 25 bp, Homo sapien
tctttccacagaaccgagcactgct

SEQ ID NO: 1156666 - DNA, 25 bp, Homo sapien
ccgagcactgctcggtgaatgagga

SEQ ID NO: 1156667 - DNA, 25 bp, Homo sapien
aggactggacgctccagggcacccg

SEQ ID NO: 1156668 - DNA, 25 bp, Homo sapien
ccccgcagctttctgccagcactcc

SEQ ID NO: 1156669 - DNA, 25 bp, Homo sapien
tccccccgcagctttctgccagcac

SEQ ID NO: 1156670 - DNA, 25 bp, Homo sapien
tttccccccgcagctttctgccagc

SEQ ID NO: 1156671 - DNA, 25 bp, Homo sapien
catttccccccgcagctttctgcca

SEQ ID NO: 1156672 - DNA, 25 bp, Homo sapien
ggtgatggcaaattagtcactctgg

SEQ ID NO: 1156673 - DNA, 25 bp, Homo sapien
aggtgatggcaaattagtcactctg

SEQ ID NO: 1156674 - DNA, 25 bp, Homo sapien
caggtgatggcaaattagtcactct

SEQ ID NO: 1156675 - DNA, 25 bp, Homo sapien
ccacagggatgaccaccacctggaa

SEQ ID NO: 1156676 - DNA, 25 bp, Homo sapien
tttggcgtattcctcttgctcactc

SEQ ID NO: 1156677 - DNA, 25 bp, Homo sapien
agggatgaccaccacctggaacggg

SEQ ID NO: 1156678 - DNA, 25 bp, Homo sapien
ctctttggcgtattcctcttgctca

SEQ ID NO: 1156679 - DNA, 25 bp, Homo sapien
caagctgggcccggcggattctccg

SEQ ID NO: 1156680 - DNA, 25 bp, Homo sapien
tccagagtctgcatccaggtcactg

SEQ ID NO: 1156681 - DNA, 25 bp, Homo sapien
gattctccggctgagggtcagtcca

SEQ ID NO: 1156682 - DNA, 25 bp, Homo sapien
ctgaaaattgtagtgggcaagctgg

SEQ ID NO: 1156683 - DNA, 25 bp, Homo sapien
gtaaacttaacagcaagaatgcaga

SEQ ID NO: 1156684 - DNA, 25 bp, Homo sapien
ggtaaacttaacagcaagaatgcag

SEQ ID NO: 1156685 - DNA, 25 bp, Homo sapien
tggtaaacttaacagcaagaatgca

SEQ ID NO: 1156686 - DNA, 25 bp, Homo sapien
gtagctccaccagtcgctgcacagc

SEQ ID NO: 1156687 - DNA, 25 bp, Homo sapien
gttcactgttctcttactttgctct

SEQ ID NO: 1156688 - DNA, 25 bp, Homo sapien
actccccaaggcgacgattatctcg

SEQ ID NO: 1156689 - DNA, 25 bp, Homo sapien
tctcgagtccgaatgttcactgttc

SEQ ID NO: 1156690 - DNA, 25 bp, Homo sapien
tcagaaaatttcttcggcatttggg

SEQ ID NO: 1156691 - DNA, 25 bp, Homo sapien
gatggcactcgcaggtttttgcctc

SEQ ID NO: 1156692 - DNA, 25 bp, Homo sapien
cattctcctcacatccaaacagcta

SEQ ID NO: 1156693 - DNA, 25 bp, Homo sapien
gggctccacattgtcagctgggttg

SEQ ID NO: 1156694 - DNA, 25 bp, Homo sapien
tttcaggagagcagacatgtgcctc

SEQ ID NO: 1156695 - DNA, 25 bp, Homo sapien
gctctgtcgcctaggggggtgcagt

SEQ ID NO: 1156696 - DNA, 25 bp, Homo sapien
caatctcagctcactgcaacctcta

SEQ ID NO: 1156697 - DNA, 25 bp, Homo sapien
ggattacaggcgtgtgccaccatgc

SEQ ID NO: 1156698 - DNA, 25 bp, Homo sapien
agctcactgcaacctctacctcccg

SEQ ID NO: 1156699 - DNA, 25 bp, Homo sapien
tgaagggccggccactgaagcttgt

SEQ ID NO: 1156700 - DNA, 25 bp, Homo sapien
tcaggaccagctcttcttttataat

SEQ ID NO: 1156701 - DNA, 25 bp, Homo sapien
tgttacggttgtgagcttcaggacc

SEQ ID NO: 1156702 - DNA, 25 bp, Homo sapien
tgaagcttgtctggtggctgttacg

SEQ ID NO: 1156703 - DNA, 25 bp, Homo sapien
actggacactcagaggtgggtcctc

SEQ ID NO: 1156704 - DNA, 25 bp, Homo sapien
caaataggtcaagaccaaggctgct

SEQ ID NO: 1156705 - DNA, 25 bp, Homo sapien
aacagccaaataggtcaagaccaag

SEQ ID NO: 1156706 - DNA, 25 bp, Homo sapien
agaagcaacagccaaataggtcaag

SEQ ID NO: 1156707 - DNA, 25 bp, Homo sapien
taggtcaagaccaaggctgctctgg

SEQ ID NO: 1156708 - DNA, 25 bp, Homo sapien
gacatgaccagctgggttctgagaa

SEQ ID NO: 1156709 - DNA, 25 bp, Homo sapien
acatgaccagctgggttctgagaaa

SEQ ID NO: 1156710 - DNA, 25 bp, Homo sapien
ctagacatgaccagctgggttctga

SEQ ID NO: 1156711 - DNA, 25 bp, Homo sapien
gctgggttctgagaaagcctgtggc

SEQ ID NO: 1156712 - DNA, 25 bp, Homo sapien
tcagctgcctctgtcctgtagccgt

SEQ ID NO: 1156713 - DNA, 25 bp, Homo sapien
gctgcctctgtcctgtagccgtgaa

SEQ ID NO: 1156714 - DNA, 25 bp, Homo sapien
tgcctctgtcctgtagccgtgaagc

SEQ ID NO: 1156715 - DNA, 25 bp, Homo sapien
agctgcctctgtcctgtagccgtga

SEQ ID NO: 1156716 - DNA, 25 bp, Homo sapien
agggccatgctgagaggagtcaggg

SEQ ID NO: 1156717 - DNA, 25 bp, Homo sapien
aggagtcagggtgatccatggggag

SEQ ID NO: 1156718 - DNA, 25 bp, Homo sapien
gggccatgctgagaggagtcagggt

SEQ ID NO: 1156719 - DNA, 25 bp, Homo sapien
ggagtcagggtgatccatggggagg

SEQ ID NO: 1156720 - DNA, 25 bp, Homo sapien
ggagggcatgggatggtgaccttac

SEQ ID NO: 1156721 - DNA, 25 bp, Homo sapien
ctgaggagggcatgggatggtgacc

SEQ ID NO: 1156722 - DNA, 25 bp, Homo sapien
tgaggagggcatgggatggtgacct

SEQ ID NO: 1156723 - DNA, 25 bp, Homo sapien
aggagggcatgggatggtgacctta

SEQ ID NO: 1156724 - DNA, 25 bp, Homo sapien
tgggatataggccagattagaaacc

SEQ ID NO: 1156725 - DNA, 25 bp, Homo sapien
tataggccagattagaaacctggag

SEQ ID NO: 1156726 - DNA, 25 bp, Homo sapien
gccagattagaaacctggagggtca

SEQ ID NO: 1156727 - DNA, 25 bp, Homo sapien
ggatataggccagattagaaacctg

SEQ ID NO: 1156728 - DNA, 25 bp, Homo sapien
caccctttctcctagccagggctgg

SEQ ID NO: 1156729 - DNA, 25 bp, Homo sapien
ctttctcctagccagggctgggagt

SEQ ID NO: 1156730 - DNA, 25 bp, Homo sapien
aatgtgtgagcagcccaccctttct

SEQ ID NO: 1156731 - DNA, 25 bp, Homo sapien
gggaatgtgtgagcagcccaccctt

SEQ ID NO: 1156732 - DNA, 25 bp, Homo sapien
cagggagttgggcaggtagcagctt

SEQ ID NO: 1156733 - DNA, 25 bp, Homo sapien
ttccttttcagcagggagttgggca

SEQ ID NO: 1156734 - DNA, 25 bp, Homo sapien
ggagttgggcaggtagcagcttttc

SEQ ID NO: 1156735 - DNA, 25 bp, Homo sapien
tccttttcagcagggagttgggcag

SEQ ID NO: 1156736 - DNA, 25 bp, Homo sapien
acaggatccatagtgggatagaggt

SEQ ID NO: 1156737 - DNA, 25 bp, Homo sapien
caacaggatccatagtgggatagag

SEQ ID NO: 1156738 - DNA, 25 bp, Homo sapien
gatccatagtgggatagaggtgagg

SEQ ID NO: 1156739 - DNA, 25 bp, Homo sapien
gtcaacaggatccatagtgggatag

SEQ ID NO: 1156740 - DNA, 25 bp, Homo sapien
cttccttctgttcattggggtgctg

SEQ ID NO: 1156741 - DNA, 25 bp, Homo sapien
agagagggcagctctttttggaggg

SEQ ID NO: 1156742 - DNA, 25 bp, Homo sapien
gctctttttggagggggacagcttc

SEQ ID NO: 1156743 - DNA, 25 bp, Homo sapien
cttctgttcattggggtgctggaga

SEQ ID NO: 1156744 - DNA, 25 bp, Homo sapien
tgaaggaacccacaaaggctggatg

SEQ ID NO: 1156745 - DNA, 25 bp, Homo sapien
gaaagcctggctagtttacatgcac

SEQ ID NO: 1156746 - DNA, 25 bp, Homo sapien
cctctctcggcatggaatggatgat

SEQ ID NO: 1156747 - DNA, 25 bp, Homo sapien
tgcttctcaaggctcgggcttcctg

SEQ ID NO: 1156748 - DNA, 25 bp, Homo sapien
tggtccccaaatggagctggcgttc

SEQ ID NO: 1156749 - DNA, 25 bp, Homo sapien
tggatggctctggtccccaaatgga

SEQ ID NO: 1156750 - DNA, 25 bp, Homo sapien
ctctggtccccaaatggagctggcg

SEQ ID NO: 1156751 - DNA, 25 bp, Homo sapien
gatggctctggtccccaaatggagc

SEQ ID NO: 1156752 - DNA, 25 bp, Homo sapien
ggttccagggaccatataccacatg

SEQ ID NO: 1156753 - DNA, 25 bp, Homo sapien
tggcagcagcgggaatatccaatct

SEQ ID NO: 1156754 - DNA, 25 bp, Homo sapien
taccacatgctgacggttaggaagg

SEQ ID NO: 1156755 - DNA, 25 bp, Homo sapien
aaattgagggtctcaccctggcgag

SEQ ID NO: 1156756 - DNA, 25 bp, Homo sapien
ctgggcaggcagataaagaagagac

SEQ ID NO: 1156757 - DNA, 25 bp, Homo sapien
gagacagtggttgtcctctgctccc

SEQ ID NO: 1156758 - DNA, 25 bp, Homo sapien
gccagtgaacgggacctgaggttcc

SEQ ID NO: 1156759 - DNA, 25 bp, Homo sapien
ggaggatcagcccactttccacatt

SEQ ID NO: 1156760 - DNA, 25 bp, Homo sapien
aggtgtgattgttcccctggcggca

SEQ ID NO: 1156761 - DNA, 25 bp, Homo sapien
tcaagacccgaggaaatatcaggct

SEQ ID NO: 1156762 - DNA, 25 bp, Homo sapien
gaagcgcctcaggtggcagatgttc

SEQ ID NO: 1156763 - DNA, 25 bp, Homo sapien
ccaggagggaaaggcagctcaagac

SEQ ID NO: 1156764 - DNA, 25 bp, Homo sapien
cactcatcccgagtagggctgggag

SEQ ID NO: 1156765 - DNA, 25 bp, Homo sapien
caacacaagtggtggtgggtcttca

SEQ ID NO: 1156766 - DNA, 25 bp, Homo sapien
ggtcttcacagcatactcccggtca

SEQ ID NO: 1156767 - DNA, 25 bp, Homo sapien
tgtcaatggtcaagatgtcccggtc

SEQ ID NO: 1156768 - DNA, 25 bp, Homo sapien
cagcgggcagtcatgttgtggatca

SEQ ID NO: 1156769 - DNA, 25 bp, Homo sapien
gtcacagcagcgggcagtcatgttg

SEQ ID NO: 1156770 - DNA, 25 bp, Homo sapien
cagtcatgttgtggatcagcccagg

SEQ ID NO: 1156771 - DNA, 25 bp, Homo sapien
cgggcagtcatgttgtggatcagcc

SEQ ID NO: 1156772 - DNA, 25 bp, Homo sapien
tagagccacgttcctcagataattg

SEQ ID NO: 1156773 - DNA, 25 bp, Homo sapien
cagggtctcgccagatgttacgtcg

SEQ ID NO: 1156774 - DNA, 25 bp, Homo sapien
gaagcagttgacctgttcatcccca

SEQ ID NO: 1156775 - DNA, 25 bp, Homo sapien
ttcatccccaggactcaggtaacag

SEQ ID NO: 1156776 - DNA, 25 bp, Homo sapien
tggagctgatatttgttcctccagt

SEQ ID NO: 1156777 - DNA, 25 bp, Homo sapien
ttggcgttctcagtgtctccagaca

SEQ ID NO: 1156778 - DNA, 25 bp, Homo sapien
ccttggcgttctcagtgtctccaga

SEQ ID NO: 1156779 - DNA, 25 bp, Homo sapien
aggtggagctgatatttgttcctcc

SEQ ID NO: 1156780 - DNA, 25 bp, Homo sapien
tcaagatggcaaagtgacgtcaagc

SEQ ID NO: 1156781 - DNA, 25 bp, Homo sapien
tagctagctaacaaggtggcactcc

SEQ ID NO: 1156782 - DNA, 25 bp, Homo sapien
tgtgtctgaaaacgccagtgccctc

SEQ ID NO: 1156783 - DNA, 25 bp, Homo sapien
tagttatggtcgcatcccacagcct

SEQ ID NO: 1156784 - DNA, 25 bp, Homo sapien
gattcgcccgccaggtgacaaggct

SEQ ID NO: 1156785 - DNA, 25 bp, Homo sapien
aagtctccgcttgcggattcgcccg

SEQ ID NO: 1156786 - DNA, 25 bp, Homo sapien
agccctttaaagacaagtctccgct

SEQ ID NO: 1156787 - DNA, 25 bp, Homo sapien
ggcttcgtgggccaggactccgccc

SEQ ID NO: 1156788 - DNA, 25 bp, Homo sapien
gaactcatgtcttccctctgtgaaa

SEQ ID NO: 1156789 - DNA, 25 bp, Homo sapien
actgaggacaccgactactgagaag

SEQ ID NO: 1156790 - DNA, 25 bp, Homo sapien
ttaagagcaggctacaagtgctgcc

SEQ ID NO: 1156791 - DNA, 25 bp, Homo sapien
cgtttgaagttgctaccactgagga

SEQ ID NO: 1156792 - DNA, 25 bp, Homo sapien
gaatggctaaccacattgacaacct

SEQ ID NO: 1156793 - DNA, 25 bp, Homo sapien
catactgaggtaccattgcaccaca

SEQ ID NO: 1156794 - DNA, 25 bp, Homo sapien
taagccaaataaactctgacccagc

SEQ ID NO: 1156795 - DNA, 25 bp, Homo sapien
gaataactgaatctccaaacggaat

SEQ ID NO: 1156796 - DNA, 25 bp, Homo sapien
gcagataattctggataagctccca

SEQ ID NO: 1156797 - DNA, 25 bp, Homo sapien
tcaaagtgtcatcaggactggttcc

SEQ ID NO: 1156798 - DNA, 25 bp, Homo sapien
gcgcctggtcgccacatatgtaatt

SEQ ID NO: 1156799 - DNA, 25 bp, Homo sapien
ttgtgatgccatttagagtctgcgc

SEQ ID NO: 1156800 - DNA, 25 bp, Homo sapien
gtattgtgaagataggcgtgagcca

SEQ ID NO: 1156801 - DNA, 25 bp, Homo sapien
tgcacctggccctaggaactttaga

SEQ ID NO: 1156802 - DNA, 25 bp, Homo sapien
gcacctggccctaggaactttagaa

SEQ ID NO: 1156803 - DNA, 25 bp, Homo sapien
gcctctccgaatcatggttgctcaa

SEQ ID NO: 1156804 - DNA, 25 bp, Homo sapien
tagcaaccattttcggaaagcctgg

SEQ ID NO: 1156805 - DNA, 25 bp, Homo sapien
gaccattccgctttggcttgacgca

SEQ ID NO: 1156806 - DNA, 25 bp, Homo sapien
tggcttccagccgttgagtccgtgt

SEQ ID NO: 1156807 - DNA, 25 bp, Homo sapien
tccaggcaacctcgctccgcggcgg

SEQ ID NO: 1156808 - DNA, 25 bp, Homo sapien
tctgcgagcccccggtggcccgtta

SEQ ID NO: 1156809 - DNA, 25 bp, Homo sapien
tggcccgttaacccttctgcgccca

SEQ ID NO: 1156810 - DNA, 25 bp, Homo sapien
gttaacccttctgcgcccaggcgct

SEQ ID NO: 1156811 - DNA, 25 bp, Homo sapien
gggacacaccgtccgagagcaccct

SEQ ID NO: 1156812 - DNA, 25 bp, Homo sapien
agtgggggacacaccgtccgagagc

SEQ ID NO: 1156813 - DNA, 25 bp, Homo sapien
ccctcgcggcgaccctgtcctccaa

SEQ ID NO: 1156814 - DNA, 25 bp, Homo sapien
tgcgtccctcgcggcgaccctgtcc

SEQ ID NO: 1156815 - DNA, 25 bp, Homo sapien
tttgtcaacctcttctgccatcggg

SEQ ID NO: 1156816 - DNA, 25 bp, Homo sapien
gagaatccctgtcctgagtccgaat

SEQ ID NO: 1156817 - DNA, 25 bp, Homo sapien
gtagaccctggtctggacaaacgcg

SEQ ID NO: 1156818 - DNA, 25 bp, Homo sapien
tctgggcctagccatggagaatccc

SEQ ID NO: 1156819 - DNA, 25 bp, Homo sapien
acataatcccatcccgagctgggtt

SEQ ID NO: 1156820 - DNA, 25 bp, Homo sapien
tccacgggtctacccagtacacata

SEQ ID NO: 1156821 - DNA, 25 bp, Homo sapien
ttctctgatgccgacccctcttcat

SEQ ID NO: 1156822 - DNA, 25 bp, Homo sapien
aatggggtgatagtcactgcctgcc

SEQ ID NO: 1156823 - DNA, 25 bp, Homo sapien
ccctcgcattgctgaggtgggccag

SEQ ID NO: 1156824 - DNA, 25 bp, Homo sapien
agcaactccaccctgactgaacggg

SEQ ID NO: 1156825 - DNA, 25 bp, Homo sapien
agaagggcccatgttccacccaagt

SEQ ID NO: 1156826 - DNA, 25 bp, Homo sapien
tctgttggatctgaaaggcacccgg

SEQ ID NO: 1156827 - DNA, 25 bp, Homo sapien
cggcaatgtaacacccactctgggt

SEQ ID NO: 1156828 - DNA, 25 bp, Homo sapien
tcattctgaagagccgggaagtcca

SEQ ID NO: 1156829 - DNA, 25 bp, Homo sapien
tctctagagaagaagccggcaatgt

SEQ ID NO: 1156830 - DNA, 25 bp, Homo sapien
tctttagggaacatccaggcacatc

SEQ ID NO: 1156831 - DNA, 25 bp, Homo sapien
gatgcgccagacactctctctgagg

SEQ ID NO: 1156832 - DNA, 25 bp, Homo sapien
ggatgcgccagacactctctctgag

SEQ ID NO: 1156833 - DNA, 25 bp, Homo sapien
tgggtcttccagacacaagaccttc

SEQ ID NO: 1156834 - DNA, 25 bp, Homo sapien
ttccttgggtcttccagacacaaga

SEQ ID NO: 1156835 - DNA, 25 bp, Homo sapien
agatgggatccagctaaattgcaca

SEQ ID NO: 1156836 - DNA, 25 bp, Homo sapien
ggcatctgggcgtggagggtgctct

SEQ ID NO: 1156837 - DNA, 25 bp, Homo sapien
aggcaggagcggactggtcacaaaa

SEQ ID NO: 1156838 - DNA, 25 bp, Homo sapien
cacaaaaactacgcaggcatctggg

SEQ ID NO: 1156839 - DNA, 25 bp, Homo sapien
gagcggactggtcacaaaaactacg

SEQ ID NO: 1156840 - DNA, 25 bp, Homo sapien
aagcagcagcagatacagccagggc

SEQ ID NO: 1156841 - DNA, 25 bp, Homo sapien
ctcctgatccaagcagagctgaggg

SEQ ID NO: 1156842 - DNA, 25 bp, Homo sapien
cctgatccaagcagagctgagggag

SEQ ID NO: 1156843 - DNA, 25 bp, Homo sapien
tgagggagggacagaagcagcagca

SEQ ID NO: 1156844 - DNA, 25 bp, Homo sapien
ctgtaggtgtctgaagagagtgtcc

SEQ ID NO: 1156845 - DNA, 25 bp, Homo sapien
tctgaagagagtgtccggacaacac

SEQ ID NO: 1156846 - DNA, 25 bp, Homo sapien
tgtctgaagagagtgtccggacaac

SEQ ID NO: 1156847 - DNA, 25 bp, Homo sapien
ggtgtctgaagagagtgtccggaca

SEQ ID NO: 1156848 - DNA, 25 bp, Homo sapien
tggccgctcgaatctcctgggtctc

SEQ ID NO: 1156849 - DNA, 25 bp, Homo sapien
tccccgagactgtgtcctgtacaag

SEQ ID NO: 1156850 - DNA, 25 bp, Homo sapien
cagactcgggtggagctgcactgta

SEQ ID NO: 1156851 - DNA, 25 bp, Homo sapien
ctgtagggagctgacatgtccggct

SEQ ID NO: 1156852 - DNA, 25 bp, Homo sapien
tcctggcttgatggggtctcgaagc

SEQ ID NO: 1156853 - DNA, 25 bp, Homo sapien
tctcccataaccgaacattcctggc

SEQ ID NO: 1156854 - DNA, 25 bp, Homo sapien
attcctggcttgatggggtctcgaa

SEQ ID NO: 1156855 - DNA, 25 bp, Homo sapien
tcccataaccgaacattcctggctt

SEQ ID NO: 1156856 - DNA, 25 bp, Homo sapien
cctgcggttccggtgcagtggcaat

SEQ ID NO: 1156857 - DNA, 25 bp, Homo sapien
tgccgtttgcggagaatggctctgc

SEQ ID NO: 1156858 - DNA, 25 bp, Homo sapien
ggaaaaggatcagggcgtctccctg

SEQ ID NO: 1156859 - DNA, 25 bp, Homo sapien
cccctctagaagagatcagggacag

SEQ ID NO: 1156860 - DNA, 25 bp, Homo sapien
ccagaacatcttggaatagggctac

SEQ ID NO: 1156861 - DNA, 25 bp, Homo sapien
aacatcttggaatagggctactggg

SEQ ID NO: 1156862 - DNA, 25 bp, Homo sapien
ggcatgggggccgttgctcagcagg

SEQ ID NO: 1156863 - DNA, 25 bp, Homo sapien
gcaggctcttagctgttcactctcc

SEQ ID NO: 1156864 - DNA, 25 bp, Homo sapien
gggtctggctgctcaggggggcagg

SEQ ID NO: 1156865 - DNA, 25 bp, Homo sapien
tcctgggagttaaaggctgcgcact

SEQ ID NO: 1156866 - DNA, 25 bp, Homo sapien
gtgaagggctcccactgatacagct

SEQ ID NO: 1156867 - DNA, 25 bp, Homo sapien
ctgggagttaaaggctgcgcactgc

SEQ ID NO: 1156868 - DNA, 25 bp, Homo sapien
ttcagtgtgacggacatagaagcgg

SEQ ID NO: 1156869 - DNA, 25 bp, Homo sapien
ccacggggccggcagttcagttcac

SEQ ID NO: 1156870 - DNA, 25 bp, Homo sapien
ggctgacacagggtcccatcctgga

SEQ ID NO: 1156871 - DNA, 25 bp, Homo sapien
agacagcgtccagccacacagatgt

SEQ ID NO: 1156872 - DNA, 25 bp, Homo sapien
caaggcgacaggtagaatcatcacc

SEQ ID NO: 1156873 - DNA, 25 bp, Homo sapien
ctggagccgcaaggctcccgctgga

SEQ ID NO: 1156874 - DNA, 25 bp, Homo sapien
cgctggaatccacaagatcttctga

SEQ ID NO: 1156875 - DNA, 25 bp, Homo sapien
tgaggttccccgaaacaaggcgaca

SEQ ID NO: 1156876 - DNA, 25 bp, Homo sapien
tccctgggaggacggttatatcgaa

SEQ ID NO: 1156877 - DNA, 25 bp, Homo sapien
cctgtaggacccagggggatccaca

SEQ ID NO: 1156878 - DNA, 25 bp, Homo sapien
attgatgatggaccggcccccaggg

SEQ ID NO: 1156879 - DNA, 25 bp, Homo sapien
tggtggggccttcagccgacagact

SEQ ID NO: 1156880 - DNA, 25 bp, Homo sapien
cgcctgggttttcctcctgaaagat

SEQ ID NO: 1156881 - DNA, 25 bp, Homo sapien
gcctgggttttcctcctgaaagatc

SEQ ID NO: 1156882 - DNA, 25 bp, Homo sapien
ctgggttttcctcctgaaagatcat

SEQ ID NO: 1156883 - DNA, 25 bp, Homo sapien
cctgggttttcctcctgaaagatca

SEQ ID NO: 1156884 - DNA, 25 bp, Homo sapien
gattggaggaggtgaagagatgaca

SEQ ID NO: 1156885 - DNA, 25 bp, Homo sapien
ctcaaggattggaggaggtgaagag

SEQ ID NO: 1156886 - DNA, 25 bp, Homo sapien
gttctcaaggattggaggaggtgaa

SEQ ID NO: 1156887 - DNA, 25 bp, Homo sapien
tctggggtggggttctcaaggattg

SEQ ID NO: 1156888 - DNA, 25 bp, Homo sapien
ccggagcaagtgggggctccaccct

SEQ ID NO: 1156889 - DNA, 25 bp, Homo sapien
cggggtgccggagcaagtgggggct

SEQ ID NO: 1156890 - DNA, 25 bp, Homo sapien
tgccggagcaagtgggggctccacc

SEQ ID NO: 1156891 - DNA, 25 bp, Homo sapien
ggtgccggagcaagtgggggctcca

SEQ ID NO: 1156892 - DNA, 25 bp, Homo sapien
ccgcacctgacgctggagggtgcct

SEQ ID NO: 1156893 - DNA, 25 bp, Homo sapien
gggatccgcacctgacgctggaggg

SEQ ID NO: 1156894 - DNA, 25 bp, Homo sapien
ctgggggatccgcacctgacgctgg

SEQ ID NO: 1156895 - DNA, 25 bp, Homo sapien
atccgcacctgacgctggagggtgc

SEQ ID NO: 1156896 - DNA, 25 bp, Homo sapien
caggacgctgagcatgcagagtgtc

SEQ ID NO: 1156897 - DNA, 25 bp, Homo sapien
tttcccgcaggacgctgagcatgca

SEQ ID NO: 1156898 - DNA, 25 bp, Homo sapien
ccactcgtttccagtacgcagctgg

SEQ ID NO: 1156899 - DNA, 25 bp, Homo sapien
catgcagagtgtcccactcgtttcc

SEQ ID NO: 1156900 - DNA, 25 bp, Homo sapien
agttcctctcccgactcacgggaga

SEQ ID NO: 1156901 - DNA, 25 bp, Homo sapien
tatggggggcatggggtgccgtggc

SEQ ID NO: 1156902 - DNA, 25 bp, Homo sapien
tccagttcctctcccgactcacggg

SEQ ID NO: 1156903 - DNA, 25 bp, Homo sapien
ttcctctcccgactcacgggagatg

SEQ ID NO: 1156904 - DNA, 25 bp, Homo sapien
gagccaacttcccaatggccacaga

SEQ ID NO: 1156905 - DNA, 25 bp, Homo sapien
aattcctgccggcactgcagctggc

SEQ ID NO: 1156906 - DNA, 25 bp, Homo sapien
ctgcaggatgtccactcgccagcct

SEQ ID NO: 1156907 - DNA, 25 bp, Homo sapien
ggcgcagctggcaagactgggtgat

SEQ ID NO: 1156908 - DNA, 25 bp, Homo sapien
acatggcttcgtgggctgaggagga

SEQ ID NO: 1156909 - DNA, 25 bp, Homo sapien
ccaggctctgccttcgatccccagc

SEQ ID NO: 1156910 - DNA, 25 bp, Homo sapien
cagtcacatggcttcgtgggctgag

SEQ ID NO: 1156911 - DNA, 25 bp, Homo sapien
tctgccttcgatccccagcccagca

SEQ ID NO: 1156912 - DNA, 25 bp, Homo sapien
gctccagtcgctgtggaaccaggca

SEQ ID NO: 1156913 - DNA, 25 bp, Homo sapien
cattgttcccaacacagcgaacctg

SEQ ID NO: 1156914 - DNA, 25 bp, Homo sapien
gtacagggccccatgtcacaggcct

SEQ ID NO: 1156915 - DNA, 25 bp, Homo sapien
aaccaggcagtagtacagggcccca

SEQ ID NO: 1156916 - DNA, 25 bp, Homo sapien
tacccaggatgcaggatatggctgg

SEQ ID NO: 1156917 - DNA, 25 bp, Homo sapien
tgtcctgggcgtggttacccaggat

SEQ ID NO: 1156918 - DNA, 25 bp, Homo sapien
ctatgctggaaaggctgaggtgtcc

SEQ ID NO: 1156919 - DNA, 25 bp, Homo sapien
atatggctgggggttccgggctcac

SEQ ID NO: 1156920 - DNA, 25 bp, Homo sapien
gcagaccacagagcgccgctggatt

SEQ ID NO: 1156921 - DNA, 25 bp, Homo sapien
gggccctgtgtaccagcgccaagtt

SEQ ID NO: 1156922 - DNA, 25 bp, Homo sapien
gggccggcttcctgttggacagctc

SEQ ID NO: 1156923 - DNA, 25 bp, Homo sapien
ctggattcccgtcccacactcggct

SEQ ID NO: 1156924 - DNA, 25 bp, Homo sapien
gcgtggaaaaccatcggtcctggca

SEQ ID NO: 1156925 - DNA, 25 bp, Homo sapien
agtcacgttgaactccgtccccagt

SEQ ID NO: 1156926 - DNA, 25 bp, Homo sapien
gatgtctctacgctgtgtgccagag

SEQ ID NO: 1156927 - DNA, 25 bp, Homo sapien
gtgagaacagttgctcggagaagtc

SEQ ID NO: 1156928 - DNA, 25 bp, Homo sapien
ttcccccttggcaggagcgagaaca

SEQ ID NO: 1156929 - DNA, 25 bp, Homo sapien
ggttggtgctcaggcactggacctc

SEQ ID NO: 1156930 - DNA, 25 bp, Homo sapien
gagggcatcgggtgctgagggtctg

SEQ ID NO: 1156931 - DNA, 25 bp, Homo sapien
gagggccgcagttgaggagggcatc

SEQ ID NO: 1156932 - DNA, 25 bp, Homo sapien
ggagaccgctccaggacatgtgcgc

SEQ ID NO: 1156933 - DNA, 25 bp, Homo sapien
catgtgcgcaagagcggcaacaggt

SEQ ID NO: 1156934 - DNA, 25 bp, Homo sapien
ggtagacgcagagccgggcctgtac

SEQ ID NO: 1156935 - DNA, 25 bp, Homo sapien
ctccaggacatgtgcgcaagagcgg

SEQ ID NO: 1156936 - DNA, 25 bp, Homo sapien
tctgtcacctggaggacatccctgc

SEQ ID NO: 1156937 - DNA, 25 bp, Homo sapien
gtcagagacacagggcggcttagaa

SEQ ID NO: 1156938 - DNA, 25 bp, Homo sapien
ggagaccacactctaagtagctcag

SEQ ID NO: 1156939 - DNA, 25 bp, Homo sapien
cacagaaaaccgtgaaggtgccccg

SEQ ID NO: 1156940 - DNA, 25 bp, Homo sapien
tggcggggattctctgacccaaact

SEQ ID NO: 1156941 - DNA, 25 bp, Homo sapien
tcacactgctgaggggtccatagcc

SEQ ID NO: 1156942 - DNA, 25 bp, Homo sapien
tgggctctaatgctgttcccctgcc

SEQ ID NO: 1156943 - DNA, 25 bp, Homo sapien
tccatagccgacaaggaagagctca

SEQ ID NO: 1156944 - DNA, 25 bp, Homo sapien
ttaagcggtatactcctttcctcca

SEQ ID NO: 1156945 - DNA, 25 bp, Homo sapien
taagcggtatactcctttcctccac

SEQ ID NO: 1156946 - DNA, 25 bp, Homo sapien
aatacctctctagtgaggtggctca

SEQ ID NO: 1156947 - DNA, 25 bp, Homo sapien
caaaataaatacctctctagtgagg

SEQ ID NO: 1156948 - DNA, 25 bp, Homo sapien
caacacggttaaacgccactactgg

SEQ ID NO: 1156949 - DNA, 25 bp, Homo sapien
gccactactggtggcgggcactagt

SEQ ID NO: 1156950 - DNA, 25 bp, Homo sapien
cagattaagaaacagctctccgggt

SEQ ID NO: 1156951 - DNA, 25 bp, Homo sapien
tacaactggtgcgtaccatggctcc

SEQ ID NO: 1156952 - DNA, 25 bp, Homo sapien
taaaacagttgtgacagccgaagga

SEQ ID NO: 1156953 - DNA, 25 bp, Homo sapien
tagtgctattgctcccattgacgtg

SEQ ID NO: 1156954 - DNA, 25 bp, Homo sapien
taggcttgcttgttacacacacagg

SEQ ID NO: 1156955 - DNA, 25 bp, Homo sapien
gctgactggctacgtagttcgggca

SEQ ID NO: 1156956 - DNA, 25 bp, Homo sapien
caatgtgtcaaaagtcccctcagga

SEQ ID NO: 1156957 - DNA, 25 bp, Homo sapien
gaaaagcaggctagtctaaccatgg

SEQ ID NO: 1156958 - DNA, 25 bp, Homo sapien
taaatacatgggaagagtgctcccc

SEQ ID NO: 1156959 - DNA, 25 bp, Homo sapien
gcaagtggcaagaggattatggcta

SEQ ID NO: 1156960 - DNA, 25 bp, Homo sapien
agcaacctagccagaaaagcaagtg

SEQ ID NO: 1156961 - DNA, 25 bp, Homo sapien
cattgattgaagagtcactgtctga

SEQ ID NO: 1156962 - DNA, 25 bp, Homo sapien
tggcttttgcaggtgttgctggagt

SEQ ID NO: 1156963 - DNA, 25 bp, Homo sapien
tgcaggtgttgctggagtaggagct

SEQ ID NO: 1156964 - DNA, 25 bp, Homo sapien
gtagaggacctagaaggtggcatca

SEQ ID NO: 1156965 - DNA, 25 bp, Homo sapien
gacctagaaggtggcatcaggaatg

SEQ ID NO: 1156966 - DNA, 25 bp, Homo sapien
gaccaagatagtactgtaaaatgaa

SEQ ID NO: 1156967 - DNA, 25 bp, Homo sapien
catgggtccccgcttaagaaactga

SEQ ID NO: 1156968 - DNA, 25 bp, Homo sapien
ggataaatcctaataagaccaagat

SEQ ID NO: 1156969 - DNA, 25 bp, Homo sapien
ttacctcatgggaactctggaagtc

SEQ ID NO: 1156970 - DNA, 25 bp, Homo sapien
ggcatgcttcggaaactggacatca

SEQ ID NO: 1156971 - DNA, 25 bp, Homo sapien
atccatgttttcagcgacggcgtaa

SEQ ID NO: 1156972 - DNA, 25 bp, Homo sapien
cgttgtctcgagtgatgatccatgt

SEQ ID NO: 1156973 - DNA, 25 bp, Homo sapien
aactggacatcaaaaacgaagacga

SEQ ID NO: 1156974 - DNA, 25 bp, Homo sapien
tatctctcggtaccttcgggagcag

SEQ ID NO: 1156975 - DNA, 25 bp, Homo sapien
taataacaccagtacggacgggtca

SEQ ID NO: 1156976 - DNA, 25 bp, Homo sapien
cacgagacggccttccaaggtaagg

SEQ ID NO: 1156977 - DNA, 25 bp, Homo sapien
tcatgtcgcccgaagaggagctgga

SEQ ID NO: 1156978 - DNA, 25 bp, Homo sapien
acgcggtaatcggactcaacctcta

SEQ ID NO: 1156979 - DNA, 25 bp, Homo sapien
ctcaacctctactgtgggggggccg

SEQ ID NO: 1156980 - DNA, 25 bp, Homo sapien
gagggcgacttttggctacggagaa

SEQ ID NO: 1156981 - DNA, 25 bp, Homo sapien
ttttggctacggagaaggaggcctc

SEQ ID NO: 1156982 - DNA, 25 bp, Homo sapien
gacttgaattcaaatgctagccatc

SEQ ID NO: 1156983 - DNA, 25 bp, Homo sapien
catagtcttcctggataagaaaggg

SEQ ID NO: 1156984 - DNA, 25 bp, Homo sapien
gccatcaattaaaagctggctataa

SEQ ID NO: 1156985 - DNA, 25 bp, Homo sapien
ataataataatagggtgggtgaggt

SEQ ID NO: 1156986 - DNA, 25 bp, Homo sapien
gtcaatgaaagggtaaaccaggcca

SEQ ID NO: 1156987 - DNA, 25 bp, Homo sapien
agacacatatggctggaattggcga

SEQ ID NO: 1156988 - DNA, 25 bp, Homo sapien
tgccaaatcgccagtgacagagctt

SEQ ID NO: 1156989 - DNA, 25 bp, Homo sapien
gcttcaactttaatgcagtgggcac

SEQ ID NO: 1156990 - DNA, 25 bp, Homo sapien
gcactcatgatattgagattattcc

SEQ ID NO: 1156991 - DNA, 25 bp, Homo sapien
tgttaagcattccagttatggtcac

SEQ ID NO: 1156992 - DNA, 25 bp, Homo sapien
tttcttcagttggtacttgttaagc

SEQ ID NO: 1156993 - DNA, 25 bp, Homo sapien
tccttccagattgtagtatgtaacc

SEQ ID NO: 1156994 - DNA, 25 bp, Homo sapien
tctcctgccatgtagagtgatggaa

SEQ ID NO: 1156995 - DNA, 25 bp, Homo sapien
ggctagagcttgtacctactgtaaa

SEQ ID NO: 1156996 - DNA, 25 bp, Homo sapien
caattggaaatgaacgccacaggga

SEQ ID NO: 1156997 - DNA, 25 bp, Homo sapien
tcctctctgacagtaggaaaaagct

SEQ ID NO: 1156998 - DNA, 25 bp, Homo sapien
tgaagtaactcaggtgaagtaacac

SEQ ID NO: 1156999 - DNA, 25 bp, Homo sapien
gagagatgattaggaaccaaggaag

SEQ ID NO: 1157000 - DNA, 25 bp, Homo sapien
tgttgctacaatatttcaggtgaga

SEQ ID NO: 1157001 - DNA, 25 bp, Homo sapien
tcagtaaaccattatcatgggctag

SEQ ID NO: 1157002 - DNA, 25 bp, Homo sapien
gagttattacattctgcaaactggg

SEQ ID NO: 1157003 - DNA, 25 bp, Homo sapien
agtaactgtagtaagcatccaaggg

SEQ ID NO: 1157004 - DNA, 25 bp, Homo sapien
aatgctctagaagcacagaataggg

SEQ ID NO: 1157005 - DNA, 25 bp, Homo sapien
tctaagctgagatctgatgaagtag

SEQ ID NO: 1157006 - DNA, 25 bp, Homo sapien
cagctcctcactacgaggtcaggag

SEQ ID NO: 1157007 - DNA, 25 bp, Homo sapien
tcccacttacttgggaggctgaggt

SEQ ID NO: 1157008 - DNA, 25 bp, Homo sapien
tccatctaaaaaaaataaatgaata

SEQ ID NO: 1157009 - DNA, 25 bp, Homo sapien
aggagaatcgcttgaacccaggagg

SEQ ID NO: 1157010 - DNA, 25 bp, Homo sapien
cgggcgtggcggcacatgcctataa

SEQ ID NO: 1157011 - DNA, 25 bp, Homo sapien
gataaaagaaactccatccgcacag

SEQ ID NO: 1157012 - DNA, 25 bp, Homo sapien
tagttgagctctgtagataaatgcc

SEQ ID NO: 1157013 - DNA, 25 bp, Homo sapien
tccgcacagacagatgcaaacagct

SEQ ID NO: 1157014 - DNA, 25 bp, Homo sapien
tgactatccttcttaaccacgtggc

SEQ ID NO: 1157015 - DNA, 25 bp, Homo sapien
gggaaaatgctgaacaccattgtat

SEQ ID NO: 1157016 - DNA, 25 bp, Homo sapien
ctgtcattcaaattggataggagaa

SEQ ID NO: 1157017 - DNA, 25 bp, Homo sapien
gggatgaggtgtgtatatgcctttc

SEQ ID NO: 1157018 - DNA, 25 bp, Homo sapien
gtgtatatgcctttctcctgactgg

SEQ ID NO: 1157019 - DNA, 25 bp, Homo sapien
ttgcttgcctaaaactacagtgccc

SEQ ID NO: 1157020 - DNA, 25 bp, Homo sapien
ccattatggcaggtttagagaatcc

SEQ ID NO: 1157021 - DNA, 25 bp, Homo sapien
tgtagtccaggtagggcccagaaat

SEQ ID NO: 1157022 - DNA, 25 bp, Homo sapien
tataggcagggatgaaatgggcacc

SEQ ID NO: 1157023 - DNA, 25 bp, Homo sapien
gctcaaaccttggacgctgtgctat

SEQ ID NO: 1157024 - DNA, 25 bp, Homo sapien
gaagagggctagagttccaaacaga

SEQ ID NO: 1157025 - DNA, 25 bp, Homo sapien
ccgacagggtcgtgagaaagacact

SEQ ID NO: 1157026 - DNA, 25 bp, Homo sapien
tgtagaggtaagtgacccagcaacc

SEQ ID NO: 1157027 - DNA, 25 bp, Homo sapien
aagaagagaaccctgcggaggagac

SEQ ID NO: 1157028 - DNA, 25 bp, Homo sapien
gttggccactttttgcgtcacgctg

SEQ ID NO: 1157029 - DNA, 25 bp, Homo sapien
ggattggtcgccatggtctcaggct

SEQ ID NO: 1157030 - DNA, 25 bp, Homo sapien
agacggtctcccaccagtgcggatt

SEQ ID NO: 1157031 - DNA, 25 bp, Homo sapien
taaaatcgaatctgacctccaaatc

SEQ ID NO: 1157032 - DNA, 25 bp, Homo sapien
tctccacctgagaataaaaggttcc

SEQ ID NO: 1157033 - DNA, 25 bp, Homo sapien
tatttttcgcgacaaagtctcgtcc

SEQ ID NO: 1157034 - DNA, 25 bp, Homo sapien
tgctaacaccgcaaagcttaatcct

SEQ ID NO: 1157035 - DNA, 25 bp, Homo sapien
aagaaaagcacctccacggagacag

SEQ ID NO: 1157036 - DNA, 25 bp, Homo sapien
cacggagacagaaacaccgcaatcg

SEQ ID NO: 1157037 - DNA, 25 bp, Homo sapien
aaacaccgcaatcgtgcgccatcga

SEQ ID NO: 1157038 - DNA, 25 bp, Homo sapien
tgcgccatcgactcacaagatgaac

SEQ ID NO: 1157039 - DNA, 25 bp, Homo sapien
gcaaatggatgtcacgcatgtacct

SEQ ID NO: 1157040 - DNA, 25 bp, Homo sapien
atggatgtcacgcatgtaccttcat

SEQ ID NO: 1157041 - DNA, 25 bp, Homo sapien
aaatggatgtcacgcatgtaccttc

SEQ ID NO: 1157042 - DNA, 25 bp, Homo sapien
tggatgtcacgcatgtaccttcatt

SEQ ID NO: 1157043 - DNA, 25 bp, Homo sapien
gccttccgcagcgtattgtctctgg

SEQ ID NO: 1157044 - DNA, 25 bp, Homo sapien
aaacatgtgaacaaacgtctccgca

SEQ ID NO: 1157045 - DNA, 25 bp, Homo sapien
tgtgaacaaacgtctccgcatcata

SEQ ID NO: 1157046 - DNA, 25 bp, Homo sapien
gtctttcccggccagcatatttcag

SEQ ID NO: 1157047 - DNA, 25 bp, Homo sapien
tattccggctcttagctacattgac

SEQ ID NO: 1157048 - DNA, 25 bp, Homo sapien
tgttggctcactccccaaccagatt

SEQ ID NO: 1157049 - DNA, 25 bp, Homo sapien
aaaaatatgcttttgctttaggagc

SEQ ID NO: 1157050 - DNA, 25 bp, Homo sapien
tttccctccagataactgttggctc

SEQ ID NO: 1157051 - DNA, 25 bp, Homo sapien
ggcaatggcatgatctcgactctgc

SEQ ID NO: 1157052 - DNA, 25 bp, Homo sapien
gcaatggcatgatctcgactctgca

SEQ ID NO: 1157053 - DNA, 25 bp, Homo sapien
gggcaatggcatgatctcgactctg

SEQ ID NO: 1157054 - DNA, 25 bp, Homo sapien
aatggcatgatctcgactctgcaac

SEQ ID NO: 1157055 - DNA, 25 bp, Homo sapien
gaggcctgacacaccttttcttgaa

SEQ ID NO: 1157056 - DNA, 25 bp, Homo sapien
cactttcatgctcgtgcgtgtgaag

SEQ ID NO: 1157057 - DNA, 25 bp, Homo sapien
taaactgatttatattaatccaaag

SEQ ID NO: 1157058 - DNA, 25 bp, Homo sapien
tcttgaataagttagattaaactga

SEQ ID NO: 1157059 - DNA, 25 bp, Homo sapien
tcagtctggctctctaataggacaa

SEQ ID NO: 1157060 - DNA, 25 bp, Homo sapien
tcagtaagacgaggataccttcagt

SEQ ID NO: 1157061 - DNA, 25 bp, Homo sapien
taggaaacagtctctaaatgtgagg

SEQ ID NO: 1157062 - DNA, 25 bp, Homo sapien
ggttaatacagatgacccagacctg

SEQ ID NO: 1157063 - DNA, 25 bp, Homo sapien
actttaaatgtctctgctctgactg

SEQ ID NO: 1157064 - DNA, 25 bp, Homo sapien
tatatttaatccatagatgtgctcc

SEQ ID NO: 1157065 - DNA, 25 bp, Homo sapien
gatgtgctcctagtcatcagtctta

SEQ ID NO: 1157066 - DNA, 25 bp, Homo sapien
tctggccaaatctctaacacgtttt

SEQ ID NO: 1157067 - DNA, 25 bp, Homo sapien
tgtgcaactctggatactacactgc

SEQ ID NO: 1157068 - DNA, 25 bp, Homo sapien
gatgggaggcagagctcaactttac

SEQ ID NO: 1157069 - DNA, 25 bp, Homo sapien
tcctgtgggaacctaatgccactgc

SEQ ID NO: 1157070 - DNA, 25 bp, Homo sapien
tcttctgaatgggtcaatgggtcac

SEQ ID NO: 1157071 - DNA, 25 bp, Homo sapien
ggctcccaccaccacactagctaat

SEQ ID NO: 1157072 - DNA, 25 bp, Homo sapien
gatagggtttccctatactggccag

SEQ ID NO: 1157073 - DNA, 25 bp, Homo sapien
tagagatagggtttccctatactgg

SEQ ID NO: 1157074 - DNA, 25 bp, Homo sapien
gagatagggtttccctatactggcc

SEQ ID NO: 1157075 - DNA, 25 bp, Homo sapien
agaatcattgcgcagcacctcttcc

SEQ ID NO: 1157076 - DNA, 25 bp, Homo sapien
gaatcattgcgcagcacctcttcct

SEQ ID NO: 1157077 - DNA, 25 bp, Homo sapien
aagaatcattgcgcagcacctcttc

SEQ ID NO: 1157078 - DNA, 25 bp, Homo sapien
taagaatcattgcgcagcacctctt

SEQ ID NO: 1157079 - DNA, 25 bp, Homo sapien
agaaatgtttgaagtttagtaattg

SEQ ID NO: 1157080 - DNA, 25 bp, Homo sapien
aaattacacatgtaggctgggcatg

SEQ ID NO: 1157081 - DNA, 25 bp, Homo sapien
tgaagtttagtaattgtttcacttc

SEQ ID NO: 1157082 - DNA, 25 bp, Homo sapien
ttaaaattacacatgtaggctgggc

SEQ ID NO: 1157083 - DNA, 25 bp, Homo sapien
gagacagctataccaagagaaagac

SEQ ID NO: 1157084 - DNA, 25 bp, Homo sapien
gaagtttacagttgagagacagcta

SEQ ID NO: 1157085 - DNA, 25 bp, Homo sapien
gaggtcacttaaaggccttcacaag

SEQ ID NO: 1157086 - DNA, 25 bp, Homo sapien
gagtggccatgagacacataggtaa

SEQ ID NO: 1157087 - DNA, 25 bp, Homo sapien
catatgtgctgctgaagtgagcacc

SEQ ID NO: 1157088 - DNA, 25 bp, Homo sapien
ttctctatatcgttctaattttagc

SEQ ID NO: 1157089 - DNA, 25 bp, Homo sapien
gcatatgtgctgctgaagtgagcac

SEQ ID NO: 1157090 - DNA, 25 bp, Homo sapien
tatatcgttctaattttagcatatg

SEQ ID NO: 1157091 - DNA, 25 bp, Homo sapien
ctatctgttaaagcctatgaatgcc

SEQ ID NO: 1157092 - DNA, 25 bp, Homo sapien
taccgtggtttatgaactatgttca

SEQ ID NO: 1157093 - DNA, 25 bp, Homo sapien
tcaggacaccctacacaaaatacag

SEQ ID NO: 1157094 - DNA, 25 bp, Homo sapien
aacatgggttcttagtctttagcta

SEQ ID NO: 1157095 - DNA, 25 bp, Homo sapien
cacaggtcgaaattctacttagcct

SEQ ID NO: 1157096 - DNA, 25 bp, Homo sapien
tcactggctcctcacgatgatgggt

SEQ ID NO: 1157097 - DNA, 25 bp, Homo sapien
tcagctacatgatcctaacagtgcc

SEQ ID NO: 1157098 - DNA, 25 bp, Homo sapien
gggtttactcccaaatcaagatcac

SEQ ID NO: 1157099 - DNA, 25 bp, Homo sapien
gtacagagagatccccgaggggaat

SEQ ID NO: 1157100 - DNA, 25 bp, Homo sapien
ccaggaagagagttgtatgtacaac

SEQ ID NO: 1157101 - DNA, 25 bp, Homo sapien
cagtggcccgagtgggacctgtctc

SEQ ID NO: 1157102 - DNA, 25 bp, Homo sapien
tatgtacaacccaacaggcaaggca

SEQ ID NO: 1157103 - DNA, 25 bp, Homo sapien
ctcttttgggaagagttctaagatt

SEQ ID NO: 1157104 - DNA, 25 bp, Homo sapien
tttgggaagagttctaagattaatg

SEQ ID NO: 1157105 - DNA, 25 bp, Homo sapien
tctcttttgggaagagttctaagat

SEQ ID NO: 1157106 - DNA, 25 bp, Homo sapien
tcttttgggaagagttctaagatta

SEQ ID NO: 1157107 - DNA, 25 bp, Homo sapien
tggaagaagacccacaggaagcaat

SEQ ID NO: 1157108 - DNA, 25 bp, Homo sapien
agatactggacacccactgggagct

SEQ ID NO: 1157109 - DNA, 25 bp, Homo sapien
gtgtgttgcctaaatctcccgagag

SEQ ID NO: 1157110 - DNA, 25 bp, Homo sapien
caaagtccttggaaccagatgtacc

SEQ ID NO: 1157111 - DNA, 25 bp, Homo sapien
cctgatcctgacacattctgagtaa

SEQ ID NO: 1157112 - DNA, 25 bp, Homo sapien
catagggttctgatcacattgcacg

SEQ ID NO: 1157113 - DNA, 25 bp, Homo sapien
accactagggcacatctggatgcct

SEQ ID NO: 1157114 - DNA, 25 bp, Homo sapien
ggcacccacaaccagaggaatctat

SEQ ID NO: 1157115 - DNA, 25 bp, Homo sapien
caagggtggccttgaagaggccaaa

SEQ ID NO: 1157116 - DNA, 25 bp, Homo sapien
gccaaaggaatgtccatttgctgag

SEQ ID NO: 1157117 - DNA, 25 bp, Homo sapien
tggccagtagctaaagtgcaagact

SEQ ID NO: 1157118 - DNA, 25 bp, Homo sapien
catctgtgctaagctttacagtggc

SEQ ID NO: 1157119 - DNA, 25 bp, Homo sapien
ctgctctgttgcctctctaaggtaa

SEQ ID NO: 1157120 - DNA, 25 bp, Homo sapien
gaatagaactattggggtgaggata

SEQ ID NO: 1157121 - DNA, 25 bp, Homo sapien
cttccctcacccctgacatgtaccc

SEQ ID NO: 1157122 - DNA, 25 bp, Homo sapien
cttttcagaatagaactattggggt

SEQ ID NO: 1157123 - DNA, 25 bp, Homo sapien
ccagagtggtctggatctcttgact

SEQ ID NO: 1157124 - DNA, 25 bp, Homo sapien
ttcgtgatccgcccagtgttggcct

SEQ ID NO: 1157125 - DNA, 25 bp, Homo sapien
cttcgtgatccgcccagtgttggcc

SEQ ID NO: 1157126 - DNA, 25 bp, Homo sapien
gagtggtctggatctcttgacttcg

SEQ ID NO: 1157127 - DNA, 25 bp, Homo sapien
gcatgtccttcagtctttatatgta

SEQ ID NO: 1157128 - DNA, 25 bp, Homo sapien
ggcctagtcttttcaccttatataa

SEQ ID NO: 1157129 - DNA, 25 bp, Homo sapien
ttatatagttttacatggcctagtc

SEQ ID NO: 1157130 - DNA, 25 bp, Homo sapien
acacacacattttggcaccttatat

SEQ ID NO: 1157131 - DNA, 25 bp, Homo sapien
catgggctggttgcctgccttcttt

SEQ ID NO: 1157132 - DNA, 25 bp, Homo sapien
atgggctggttgcctgccttcttta

SEQ ID NO: 1157133 - DNA, 25 bp, Homo sapien
ccatgggctggttgcctgccttctt

SEQ ID NO: 1157134 - DNA, 25 bp, Homo sapien
cccatgggctggttgcctgccttct

SEQ ID NO: 1157135 - DNA, 25 bp, Homo sapien
tatctcagcctcctgagtagctggg

SEQ ID NO: 1157136 - DNA, 25 bp, Homo sapien
ctatctcagcctcctgagtagctgg

SEQ ID NO: 1157137 - DNA, 25 bp, Homo sapien
tggagttcagtggctcgattggctc

SEQ ID NO: 1157138 - DNA, 25 bp, Homo sapien
ctggagttcagtggctcgattggct

SEQ ID NO: 1157139 - DNA, 25 bp, Homo sapien
tttcactctttaaccttcacttcag

SEQ ID NO: 1157140 - DNA, 25 bp, Homo sapien
tctttaaccttcacttcagttaatc

SEQ ID NO: 1157141 - DNA, 25 bp, Homo sapien
cggcggcggtggcatctgcggccat

SEQ ID NO: 1157142 - DNA, 25 bp, Homo sapien
gccatcttggattccgcggtagcgg

SEQ ID NO: 1157143 - DNA, 25 bp, Homo sapien
gcggcggtcaggcgccgcttctggg

SEQ ID NO: 1157144 - DNA, 25 bp, Homo sapien
ccatcttggattccgcggtagcgga

SEQ ID NO: 1157145 - DNA, 25 bp, Homo sapien
gaggcggcggtcaggcgccgcttct

SEQ ID NO: 1157146 - DNA, 25 bp, Homo sapien
gaggtcagatagctctcagaaagag

SEQ ID NO: 1157147 - DNA, 25 bp, Homo sapien
ggctagagcatctgactggtcaagg

SEQ ID NO: 1157148 - DNA, 25 bp, Homo sapien
tttctctaggcctccgcagtgggaa

SEQ ID NO: 1157149 - DNA, 25 bp, Homo sapien
gagtcatgcactaacaccttggctg

SEQ ID NO: 1157150 - DNA, 25 bp, Homo sapien
ttccagtgttcagatgcgtctggac

SEQ ID NO: 1157151 - DNA, 25 bp, Homo sapien
tgttccttccagtgttcagatgcgt

SEQ ID NO: 1157152 - DNA, 25 bp, Homo sapien
gtgttcagatgcgtctggactttct

SEQ ID NO: 1157153 - DNA, 25 bp, Homo sapien
ttgttccttccagtgttcagatgcg

SEQ ID NO: 1157154 - DNA, 25 bp, Homo sapien
taagctgtcaagtcggccttttctg

SEQ ID NO: 1157155 - DNA, 25 bp, Homo sapien
ataagctgtcaagtcggccttttct

SEQ ID NO: 1157156 - DNA, 25 bp, Homo sapien
agataagctgtcaagtcggcctttt

SEQ ID NO: 1157157 - DNA, 25 bp, Homo sapien
gataagctgtcaagtcggccttttc

SEQ ID NO: 1157158 - DNA, 25 bp, Homo sapien
tggtaacaatttcacaccacataca

SEQ ID NO: 1157159 - DNA, 25 bp, Homo sapien
caatttcacaccacatacaaagata

SEQ ID NO: 1157160 - DNA, 25 bp, Homo sapien
agacctaaatgtaaggattcttaga

SEQ ID NO: 1157161 - DNA, 25 bp, Homo sapien
tagatatgacagcaaaatcacgagc

SEQ ID NO: 1157162 - DNA, 25 bp, Homo sapien
ttgtttcaacagaaattgacccttc

SEQ ID NO: 1157163 - DNA, 25 bp, Homo sapien
tgtatctatgaccaagtaattttaa

SEQ ID NO: 1157164 - DNA, 25 bp, Homo sapien
acccatgtatctatgaccaagtaat

SEQ ID NO: 1157165 - DNA, 25 bp, Homo sapien
tattttgaaatgaacccaatagtcc

SEQ ID NO: 1157166 - DNA, 25 bp, Homo sapien
gggacttgcacctcgttactgttgt

SEQ ID NO: 1157167 - DNA, 25 bp, Homo sapien
cctcgttactgttgtccagctccag

SEQ ID NO: 1157168 - DNA, 25 bp, Homo sapien
gtccagctccagctaattcctcagg

SEQ ID NO: 1157169 - DNA, 25 bp, Homo sapien
gctaattcctcaggtatagcttcag

SEQ ID NO: 1157170 - DNA, 25 bp, Homo sapien
cagcttggcacaccgaaaaatcatc

SEQ ID NO: 1157171 - DNA, 25 bp, Homo sapien
aaaatcatcactattaggaacagaa

SEQ ID NO: 1157172 - DNA, 25 bp, Homo sapien
gcttggcacaccgaaaaatcatcac

SEQ ID NO: 1157173 - DNA, 25 bp, Homo sapien
ttggcacaccgaaaaatcatcacta

SEQ ID NO: 1157174 - DNA, 25 bp, Homo sapien
agctcagagatggttctgtggttgt

SEQ ID NO: 1157175 - DNA, 25 bp, Homo sapien
cagctcagagatggttctgtggttg

SEQ ID NO: 1157176 - DNA, 25 bp, Homo sapien
tcagctcagagatggttctgtggtt

SEQ ID NO: 1157177 - DNA, 25 bp, Homo sapien
tccggtcaccgcgacggtagcctga

SEQ ID NO: 1157178 - DNA, 25 bp, Homo sapien
tgccgttccggtcaccgcgacggta

SEQ ID NO: 1157179 - DNA, 25 bp, Homo sapien
ctttagtgccgttccggtcaccgcg

SEQ ID NO: 1157180 - DNA, 25 bp, Homo sapien
agtgccgttccggtcaccgcgacgg

SEQ ID NO: 1157181 - DNA, 25 bp, Homo sapien
ggtcggcctcgacggaaaagagcga

SEQ ID NO: 1157182 - DNA, 25 bp, Homo sapien
tcggcctcgacggaaaagagcgaaa

SEQ ID NO: 1157183 - DNA, 25 bp, Homo sapien
gaaaagagcgaaagcgaagggataa

SEQ ID NO: 1157184 - DNA, 25 bp, Homo sapien
tcgacggaaaagagcgaaagcgaag

SEQ ID NO: 1157185 - DNA, 25 bp, Homo sapien
cagcttcaagggctctttttcacca

SEQ ID NO: 1157186 - DNA, 25 bp, Homo sapien
ctcccgtcttccagcttcaagggct

SEQ ID NO: 1157187 - DNA, 25 bp, Homo sapien
gtcttccagcttcaagggctctttt

SEQ ID NO: 1157188 - DNA, 25 bp, Homo sapien
gcttcaagggctctttttcaccaac

SEQ ID NO: 1157189 - DNA, 25 bp, Homo sapien
aataactcaacagtattccccgcac

SEQ ID NO: 1157190 - DNA, 25 bp, Homo sapien
acaaaacgtcccagataagcctttg

SEQ ID NO: 1157191 - DNA, 25 bp, Homo sapien
acgtcccagataagcctttggtcac

SEQ ID NO: 1157192 - DNA, 25 bp, Homo sapien
aacgtcccagataagcctttggtca

SEQ ID NO: 1157193 - DNA, 25 bp, Homo sapien
caaaacgtcccagataagcctttgg

SEQ ID NO: 1157194 - DNA, 25 bp, Homo sapien
ctacccattctaggggtgcgtccta

SEQ ID NO: 1157195 - DNA, 25 bp, Homo sapien
cacattcgtgtgaactgctttttta

SEQ ID NO: 1157196 - DNA, 25 bp, Homo sapien
cccgtgctacccattctaggggtgc

SEQ ID NO: 1157197 - DNA, 25 bp, Homo sapien
tccaaatacttcacacattcgtgtg

SEQ ID NO: 1157198 - DNA, 25 bp, Homo sapien
caaagagttggtcaacgtgagccac

SEQ ID NO: 1157199 - DNA, 25 bp, Homo sapien
aaccaatgcacccaggaagggaaga

SEQ ID NO: 1157200 - DNA, 25 bp, Homo sapien
gaagttcctccatagagatacccag

SEQ ID NO: 1157201 - DNA, 25 bp, Homo sapien
catcgatgaaatgccgaagttcctc

SEQ ID NO: 1157202 - DNA, 25 bp, Homo sapien
tgagcaaactatagcaaggacagaa

SEQ ID NO: 1157203 - DNA, 25 bp, Homo sapien
aacaccgcacgttctcattcatagg

SEQ ID NO: 1157204 - DNA, 25 bp, Homo sapien
tctgagcaaactatagcaaggacag

SEQ ID NO: 1157205 - DNA, 25 bp, Homo sapien
ccgcacgttctcattcataggtggg

SEQ ID NO: 1157206 - DNA, 25 bp, Homo sapien
cgggaagattcgtcctcagagctac

SEQ ID NO: 1157207 - DNA, 25 bp, Homo sapien
caattatttctgtaggccgggaaga

SEQ ID NO: 1157208 - DNA, 25 bp, Homo sapien
tactgtcccggtattgtagtcccag

SEQ ID NO: 1157209 - DNA, 25 bp, Homo sapien
gagtagaagtccttcaccaaagact

SEQ ID NO: 1157210 - DNA, 25 bp, Homo sapien
ttctttaatagccaactcaggcagt

SEQ ID NO: 1157211 - DNA, 25 bp, Homo sapien
gggttacacagaatgaggaaagcaa

SEQ ID NO: 1157212 - DNA, 25 bp, Homo sapien
caaagtaatacaatcagggtgtagc

SEQ ID NO: 1157213 - DNA, 25 bp, Homo sapien
tccactctttgatggaataccccaa

SEQ ID NO: 1157214 - DNA, 25 bp, Homo sapien
ccaatagccctcatgaaacagatgt

SEQ ID NO: 1157215 - DNA, 25 bp, Homo sapien
aaagtccaagcctaaatggcctcag

SEQ ID NO: 1157216 - DNA, 25 bp, Homo sapien
gaccaaggctggtttactccaggaa

SEQ ID NO: 1157217 - DNA, 25 bp, Homo sapien
taagcttccactttgagaggctaga

SEQ ID NO: 1157218 - DNA, 25 bp, Homo sapien
aatcccttgggtggtaatactatat

SEQ ID NO: 1157219 - DNA, 25 bp, Homo sapien
atcccttgggtggtaatactatata

SEQ ID NO: 1157220 - DNA, 25 bp, Homo sapien
tcccttgggtggtaatactatatat

SEQ ID NO: 1157221 - DNA, 25 bp, Homo sapien
ccttgggtggtaatactatatatat

SEQ ID NO: 1157222 - DNA, 25 bp, Homo sapien
ttttggagttctgctcccagcatca

SEQ ID NO: 1157223 - DNA, 25 bp, Homo sapien
cttttggagttctgctcccagcatc

SEQ ID NO: 1157224 - DNA, 25 bp, Homo sapien
tttggagttctgctcccagcatcac

SEQ ID NO: 1157225 - DNA, 25 bp, Homo sapien
actttcttaaggcagccatagcttc

SEQ ID NO: 1157226 - DNA, 25 bp, Homo sapien
tcttaaggcagccatagcttcacgg

SEQ ID NO: 1157227 - DNA, 25 bp, Homo sapien
tcctgggaactgctcttcttgttga

SEQ ID NO: 1157228 - DNA, 25 bp, Homo sapien
gatcctgggaactgctcttcttgtt

SEQ ID NO: 1157229 - DNA, 25 bp, Homo sapien
tactaaggatactgagtctggcatg

SEQ ID NO: 1157230 - DNA, 25 bp, Homo sapien
aactgggatttcataactactaagg

SEQ ID NO: 1157231 - DNA, 25 bp, Homo sapien
cctaaatgtaggacgctaaagaggt

SEQ ID NO: 1157232 - DNA, 25 bp, Homo sapien
cagtcatgaggatggaaacagccta

SEQ ID NO: 1157233 - DNA, 25 bp, Homo sapien
tgcctggcccatctggagaattttt

SEQ ID NO: 1157234 - DNA, 25 bp, Homo sapien
cgtgcctggcccatctggagaattt

SEQ ID NO: 1157235 - DNA, 25 bp, Homo sapien
accgtgcctggcccatctggagaat

SEQ ID NO: 1157236 - DNA, 25 bp, Homo sapien
ttgccgaggctggtctttaatgctg

SEQ ID NO: 1157237 - DNA, 25 bp, Homo sapien
tcttgcccagaattcgcatgctgac

SEQ ID NO: 1157238 - DNA, 25 bp, Homo sapien
tctccagacatctgactcaaggttc

SEQ ID NO: 1157239 - DNA, 25 bp, Homo sapien
gcctttgtgccaagtcttagttctc

SEQ ID NO: 1157240 - DNA, 25 bp, Homo sapien
ctgtctggatggcaataagggtgcc

SEQ ID NO: 1157241 - DNA, 25 bp, Homo sapien
tggtgtctcagctacaatgccagca

SEQ ID NO: 1157242 - DNA, 25 bp, Homo sapien
tttgtatttggcgaccacccgactg

SEQ ID NO: 1157243 - DNA, 25 bp, Homo sapien
cttgtcagcaggagggtggtaatca

SEQ ID NO: 1157244 - DNA, 25 bp, Homo sapien
aatgccagcatagagccagacctga

SEQ ID NO: 1157245 - DNA, 25 bp, Homo sapien
tctatggcacgaacagggcaggtgc

SEQ ID NO: 1157246 - DNA, 25 bp, Homo sapien
agagtaagggtttcagtccactggg

SEQ ID NO: 1157247 - DNA, 25 bp, Homo sapien
aaagagtaagggtttcagtccactg

SEQ ID NO: 1157248 - DNA, 25 bp, Homo sapien
gacaaaagctaattgtggtatctgg

SEQ ID NO: 1157249 - DNA, 25 bp, Homo sapien
gggttatgatatttaacatgatcca

SEQ ID NO: 1157250 - DNA, 25 bp, Homo sapien
ttatgatatttaacatgatccacag

SEQ ID NO: 1157251 - DNA, 25 bp, Homo sapien
tacttctctggatcacaacacgatg

SEQ ID NO: 1157252 - DNA, 25 bp, Homo sapien
acaacacgatgcactccagggaaga

SEQ ID NO: 1157253 - DNA, 25 bp, Homo sapien
actgtgtgacataggaagcatagcc

SEQ ID NO: 1157254 - DNA, 25 bp, Homo sapien
tggccggcaaatgggatacagttcc

SEQ ID NO: 1157255 - DNA, 25 bp, Homo sapien
gaagcatagccatcatcaaagaaaa

SEQ ID NO: 1157256 - DNA, 25 bp, Homo sapien
ggatacagttccgactgtgtgacat

SEQ ID NO: 1157257 - DNA, 25 bp, Homo sapien
gagcaaaagacatcaaccaaactta

SEQ ID NO: 1157258 - DNA, 25 bp, Homo sapien
ccaaacttatgctctttgagactga

SEQ ID NO: 1157259 - DNA, 25 bp, Homo sapien
tgacctttgggagcaaaagacatca

SEQ ID NO: 1157260 - DNA, 25 bp, Homo sapien
gcttttcaactggatgtcctaagaa

SEQ ID NO: 1157261 - DNA, 25 bp, Homo sapien
cacttgttgatcagtctagtggtaa

SEQ ID NO: 1157262 - DNA, 25 bp, Homo sapien
aatttaaaaagatcaggtggcatca

SEQ ID NO: 1157263 - DNA, 25 bp, Homo sapien
gggaaaagacttggccaggagacat

SEQ ID NO: 1157264 - DNA, 25 bp, Homo sapien
taaaatcagaacctcaagggaagca

SEQ ID NO: 1157265 - DNA, 25 bp, Homo sapien
ttcaaggaagaagtagaactgagag

SEQ ID NO: 1157266 - DNA, 25 bp, Homo sapien
gtttcaaggaagaagtagaactgag

SEQ ID NO: 1157267 - DNA, 25 bp, Homo sapien
tttcaaggaagaagtagaactgaga

SEQ ID NO: 1157268 - DNA, 25 bp, Homo sapien
cgtgccttcccactcagtcttgata

SEQ ID NO: 1157269 - DNA, 25 bp, Homo sapien
gggtaggcagtgacatactcctcta

SEQ ID NO: 1157270 - DNA, 25 bp, Homo sapien
ggccactcttgagcagtaccatggg

SEQ ID NO: 1157271 - DNA, 25 bp, Homo sapien
tactcctctatgaagtcacggcagg

SEQ ID NO: 1157272 - DNA, 25 bp, Homo sapien
aggatcctgactaggctgccatcca

SEQ ID NO: 1157273 - DNA, 25 bp, Homo sapien
ggatcctgactaggctgccatccac

SEQ ID NO: 1157274 - DNA, 25 bp, Homo sapien
gaggatcctgactaggctgccatcc

SEQ ID NO: 1157275 - DNA, 25 bp, Homo sapien
ccaaaattgtagagaagaacagtac

SEQ ID NO: 1157276 - DNA, 25 bp, Homo sapien
ctctgcctccaaaattgtagagaag

SEQ ID NO: 1157277 - DNA, 25 bp, Homo sapien
cctccaaaattgtagagaagaacag

SEQ ID NO: 1157278 - DNA, 25 bp, Homo sapien
tgcctccaaaattgtagagaagaac

SEQ ID NO: 1157279 - DNA, 25 bp, Homo sapien
acacatacgaggataagaaagagga

SEQ ID NO: 1157280 - DNA, 25 bp, Homo sapien
tttgaccaaaaacagtgagaacaca

SEQ ID NO: 1157281 - DNA, 25 bp, Homo sapien
tataaaaccatcctcattactgctt

SEQ ID NO: 1157282 - DNA, 25 bp, Homo sapien
gctataaaaccatcctcattactgc

SEQ ID NO: 1157283 - DNA, 25 bp, Homo sapien
gccgagactgcaccatcgtactcca

SEQ ID NO: 1157284 - DNA, 25 bp, Homo sapien
gagccgagactgcaccatcgtactc

SEQ ID NO: 1157285 - DNA, 25 bp, Homo sapien
tgagccgagactgcaccatcgtact

SEQ ID NO: 1157286 - DNA, 25 bp, Homo sapien
gtgagccgagactgcaccatcgtac

SEQ ID NO: 1157287 - DNA, 25 bp, Homo sapien
ctgagctgtccttgcttcttctcca

SEQ ID NO: 1157288 - DNA, 25 bp, Homo sapien
gatagatccactcacatcttttgtc

SEQ ID NO: 1157289 - DNA, 25 bp, Homo sapien
ccagccgtgtagagcctcgatagat

SEQ ID NO: 1157290 - DNA, 25 bp, Homo sapien
tgaacatgggctccagccgtgtaga

SEQ ID NO: 1157291 - DNA, 25 bp, Homo sapien
taccggtcagatcctgtgtgtactg

SEQ ID NO: 1157292 - DNA, 25 bp, Homo sapien
tgtgtgtactggacaacagggcctt

SEQ ID NO: 1157293 - DNA, 25 bp, Homo sapien
ttgaactgggttccagtaccggtca

SEQ ID NO: 1157294 - DNA, 25 bp, Homo sapien
gtgtactggacaacagggcctttgc

SEQ ID NO: 1157295 - DNA, 25 bp, Homo sapien
agattagagaagagggcatatagta

SEQ ID NO: 1157296 - DNA, 25 bp, Homo sapien
ctaggagattagagaagagggcata

SEQ ID NO: 1157297 - DNA, 25 bp, Homo sapien
gagattagagaagagggcatatagt

SEQ ID NO: 1157298 - DNA, 25 bp, Homo sapien
aggagattagagaagagggcatata

SEQ ID NO: 1157299 - DNA, 25 bp, Homo sapien
cctgcttccgtgactgggcaagctg

SEQ ID NO: 1157300 - DNA, 25 bp, Homo sapien
ccacagatcctggtcgaaaggacgt

SEQ ID NO: 1157301 - DNA, 25 bp, Homo sapien
tccgtgactgggcaagctggctttc

SEQ ID NO: 1157302 - DNA, 25 bp, Homo sapien
aggacgtgctctttttggctacctg

SEQ ID NO: 1157303 - DNA, 25 bp, Homo sapien
tatatgtctggttgatcccaggttt

SEQ ID NO: 1157304 - DNA, 25 bp, Homo sapien
tgtctggttgatcccaggtttccca

SEQ ID NO: 1157305 - DNA, 25 bp, Homo sapien
tatgtctggttgatcccaggtttcc

SEQ ID NO: 1157306 - DNA, 25 bp, Homo sapien
ctatatgtctggttgatcccaggtt

SEQ ID NO: 1157307 - DNA, 25 bp, Homo sapien
tcttaggaacttctatgggtaaagc

SEQ ID NO: 1157308 - DNA, 25 bp, Homo sapien
ctcattgctatcctgcctacagaga

SEQ ID NO: 1157309 - DNA, 25 bp, Homo sapien
taagcccttcgcttacagccaagga

SEQ ID NO: 1157310 - DNA, 25 bp, Homo sapien
tgataccatatttccaagcacccag

SEQ ID NO: 1157311 - DNA, 25 bp, Homo sapien
gtgatcagatcggaaggcaacagga

SEQ ID NO: 1157312 - DNA, 25 bp, Homo sapien
atcagatcggaaggcaacaggacct

SEQ ID NO: 1157313 - DNA, 25 bp, Homo sapien
tgagatgcaagtgatcagatcggaa

SEQ ID NO: 1157314 - DNA, 25 bp, Homo sapien
gatgcaagtgatcagatcggaaggc

SEQ ID NO: 1157315 - DNA, 25 bp, Homo sapien
ggggccgggagtgctgagggtgctg

SEQ ID NO: 1157316 - DNA, 25 bp, Homo sapien
aggggccgggagtgctgagggtgct

SEQ ID NO: 1157317 - DNA, 25 bp, Homo sapien
gataacatgaaagcccatcttgcgg

SEQ ID NO: 1157318 - DNA, 25 bp, Homo sapien
tcttgcggttaactcgacgccgggc

SEQ ID NO: 1157319 - DNA, 25 bp, Homo sapien
tgactcgagacagacaggtatagct

SEQ ID NO: 1157320 - DNA, 25 bp, Homo sapien
aaaaggtagcgttctatctcctgca

SEQ ID NO: 1157321 - DNA, 25 bp, Homo sapien
ccagagttagggttgatttggcctc

SEQ ID NO: 1157322 - DNA, 25 bp, Homo sapien
tggatagttagttgatggcaggcac

SEQ ID NO: 1157323 - DNA, 25 bp, Homo sapien
tgtagcctggatagttagttgatgg

SEQ ID NO: 1157324 - DNA, 25 bp, Homo sapien
agtctcttgtactggtagccagagt

SEQ ID NO: 1157325 - DNA, 25 bp, Homo sapien
gctgtactcctataacgatctccta

SEQ ID NO: 1157326 - DNA, 25 bp, Homo sapien
aaagccctatgtaatcaggtccctg

SEQ ID NO: 1157327 - DNA, 25 bp, Homo sapien
gaaaaacaagaacatgctcctcagt

SEQ ID NO: 1157328 - DNA, 25 bp, Homo sapien
gacctatgatctacaaagaagccag

SEQ ID NO: 1157329 - DNA, 25 bp, Homo sapien
gcaatgcaactaaacaactgtctat

SEQ ID NO: 1157330 - DNA, 25 bp, Homo sapien
gaacactcatgtaccacccagcatt

SEQ ID NO: 1157331 - DNA, 25 bp, Homo sapien
gtagtctcgatctcctctgaatgta

SEQ ID NO: 1157332 - DNA, 25 bp, Homo sapien
gaagaagtcgctcctacagcatctg

SEQ ID NO: 1157333 - DNA, 25 bp, Homo sapien
caaccggtttgtgcacatgtttggg

SEQ ID NO: 1157334 - DNA, 25 bp, Homo sapien
tgtagtccatgttgcaccaaccggt

SEQ ID NO: 1157335 - DNA, 25 bp, Homo sapien
tagctgtagccgaacttgtagtcca

SEQ ID NO: 1157336 - DNA, 25 bp, Homo sapien
aatgtcatccaagcagcggataccc

SEQ ID NO: 1157337 - DNA, 25 bp, Homo sapien
tagacaggtacatcactcatcacgt

SEQ ID NO: 1157338 - DNA, 25 bp, Homo sapien
tcacgttctttgtagaagtccctgg

SEQ ID NO: 1157339 - DNA, 25 bp, Homo sapien
ttgaaacagagtactgggctatgct

SEQ ID NO: 1157340 - DNA, 25 bp, Homo sapien
gggctatgctaaaagatctctgagt

SEQ ID NO: 1157341 - DNA, 25 bp, Homo sapien
tctgcctccgggtagcatagctccg

SEQ ID NO: 1157342 - DNA, 25 bp, Homo sapien
tattgcagctcaaccatgaggccac

SEQ ID NO: 1157343 - DNA, 25 bp, Homo sapien
gctatcatcattggactcttcaggg

SEQ ID NO: 1157344 - DNA, 25 bp, Homo sapien
ccttgatgcctagtcctgaggtgga

SEQ ID NO: 1157345 - DNA, 25 bp, Homo sapien
caggattacatcaaccagggacagt

SEQ ID NO: 1157346 - DNA, 25 bp, Homo sapien
tggaaaacaccacgagcaggattac

SEQ ID NO: 1157347 - DNA, 25 bp, Homo sapien
caccatctgtaatgtggaaagcagc

SEQ ID NO: 1157348 - DNA, 25 bp, Homo sapien
cacagcctcgggtaacaagtccaat

SEQ ID NO: 1157349 - DNA, 25 bp, Homo sapien
gacatcttgtttcggtcgtcagtgt

SEQ ID NO: 1157350 - DNA, 25 bp, Homo sapien
tgacatcttgtttcggtcgtcagtg

SEQ ID NO: 1157351 - DNA, 25 bp, Homo sapien
actgacatcttgtttcggtcgtcag

SEQ ID NO: 1157352 - DNA, 25 bp, Homo sapien
acatcttgtttcggtcgtcagtgtc

SEQ ID NO: 1157353 - DNA, 25 bp, Homo sapien
gagcagaagccatgagtcttcggct

SEQ ID NO: 1157354 - DNA, 25 bp, Homo sapien
ggctttgatgcatactagtcttact

SEQ ID NO: 1157355 - DNA, 25 bp, Homo sapien
ggattgtaaccgtaatttcgagagc

SEQ ID NO: 1157356 - DNA, 25 bp, Homo sapien
tgtaaccgtaatttcgagagctttc

SEQ ID NO: 1157357 - DNA, 25 bp, Homo sapien
tccttgctgttacccacggtttggc

SEQ ID NO: 1157358 - DNA, 25 bp, Homo sapien
ggagaagacctaacagtaattatag

SEQ ID NO: 1157359 - DNA, 25 bp, Homo sapien
caaggctaaagaagtaggagaagac

SEQ ID NO: 1157360 - DNA, 25 bp, Homo sapien
tattagactctgaataagcttgagg

SEQ ID NO: 1157361 - DNA, 25 bp, Homo sapien
tgtgctgctggacagtgtcaggaca

SEQ ID NO: 1157362 - DNA, 25 bp, Homo sapien
tgctgctggacagtgtcaggacatc

SEQ ID NO: 1157363 - DNA, 25 bp, Homo sapien
tttctgtgctgctggacagtgtcag

SEQ ID NO: 1157364 - DNA, 25 bp, Homo sapien
tctgtgctgctggacagtgtcagga

SEQ ID NO: 1157365 - DNA, 25 bp, Homo sapien
tggatatcatcactgtcaaccgctg

SEQ ID NO: 1157366 - DNA, 25 bp, Homo sapien
cagcagtgggctttcggctggtccc

SEQ ID NO: 1157367 - DNA, 25 bp, Homo sapien
gccagaggatatggtctggatatca

SEQ ID NO: 1157368 - DNA, 25 bp, Homo sapien
tgtagccgaagtctgaccagcagtg

SEQ ID NO: 1157369 - DNA, 25 bp, Homo sapien
caaacaatagtttagcttggagtca

SEQ ID NO: 1157370 - DNA, 25 bp, Homo sapien
gaactcaaagatcctaagtagcagg

SEQ ID NO: 1157371 - DNA, 25 bp, Homo sapien
gagatgctccaattcttaggatctg

SEQ ID NO: 1157372 - DNA, 25 bp, Homo sapien
gatctgctagacaaaggagctgagg

SEQ ID NO: 1157373 - DNA, 25 bp, Homo sapien
tcccatgggttgatttaagagcaaa

SEQ ID NO: 1157374 - DNA, 25 bp, Homo sapien
gttcttacgaacaggtgcgctctcc

SEQ ID NO: 1157375 - DNA, 25 bp, Homo sapien
aagcctcgggttgattttactgcca

SEQ ID NO: 1157376 - DNA, 25 bp, Homo sapien
ggtagcggcccaggttgccttcaag

SEQ ID NO: 1157377 - DNA, 25 bp, Homo sapien
aagggcttatagagtatgttaaaag

SEQ ID NO: 1157378 - DNA, 25 bp, Homo sapien
tataacaagaaaagggcttatagag

SEQ ID NO: 1157379 - DNA, 25 bp, Homo sapien
aagaaatctgaggaccatgggataa

SEQ ID NO: 1157380 - DNA, 25 bp, Homo sapien
ggataatccagcatctagaggtggg

SEQ ID NO: 1157381 - DNA, 25 bp, Homo sapien
ccacccaggggaagcgaagatcatg

SEQ ID NO: 1157382 - DNA, 25 bp, Homo sapien
gaagcgaagatcatgggtatccacg

SEQ ID NO: 1157383 - DNA, 25 bp, Homo sapien
cattctggacaaacaggttggggct

SEQ ID NO: 1157384 - DNA, 25 bp, Homo sapien
gggtatccacgaagacattctggac

SEQ ID NO: 1157385 - DNA, 25 bp, Homo sapien
gaagacgtcctctgcattcaatggc

SEQ ID NO: 1157386 - DNA, 25 bp, Homo sapien
caacagagtagctccttgccttcca

SEQ ID NO: 1157387 - DNA, 25 bp, Homo sapien
gttgtagtcccaagtaagttctgtc

SEQ ID NO: 1157388 - DNA, 25 bp, Homo sapien
cacactgcccacctcgtagttgtag

SEQ ID NO: 1157389 - DNA, 25 bp, Homo sapien
cctgctagcaccacattggaaggga

SEQ ID NO: 1157390 - DNA, 25 bp, Homo sapien
cagttcctgaggaaacgacagttca

SEQ ID NO: 1157391 - DNA, 25 bp, Homo sapien
gagtagctagcccagagacttcggg

SEQ ID NO: 1157392 - DNA, 25 bp, Homo sapien
tcgggtcagggttcaacaatcagga

SEQ ID NO: 1157393 - DNA, 25 bp, Homo sapien
tagcacctagcatttcagcagaggg

SEQ ID NO: 1157394 - DNA, 25 bp, Homo sapien
taaagccagaattacggctagcacc

SEQ ID NO: 1157395 - DNA, 25 bp, Homo sapien
tgtagcgacaggtctaagatctgac

SEQ ID NO: 1157396 - DNA, 25 bp, Homo sapien
taggaggagggtgcacataaccctt

SEQ ID NO: 1157397 - DNA, 25 bp, Homo sapien
ccagagccagggttgtgccttattg

SEQ ID NO: 1157398 - DNA, 25 bp, Homo sapien
ttgcctttgactccctgacctccag

SEQ ID NO: 1157399 - DNA, 25 bp, Homo sapien
tttggccccagctgtttgcctttga

SEQ ID NO: 1157400 - DNA, 25 bp, Homo sapien
tccagagccagggttgtgccttatt

SEQ ID NO: 1157401 - DNA, 25 bp, Homo sapien
tctaaccagcctatccccaggtagg

SEQ ID NO: 1157402 - DNA, 25 bp, Homo sapien
caaccatcgtaagaatgactgaacc

SEQ ID NO: 1157403 - DNA, 25 bp, Homo sapien
cataaagccaaggaactaccccgct

SEQ ID NO: 1157404 - DNA, 25 bp, Homo sapien
tttctactgcttttgaggccctccc

SEQ ID NO: 1157405 - DNA, 25 bp, Homo sapien
tctcattggctccatccatggcttg

SEQ ID NO: 1157406 - DNA, 25 bp, Homo sapien
ctctcattggctccatccatggctt

SEQ ID NO: 1157407 - DNA, 25 bp, Homo sapien
ctcattggctccatccatggcttgt

SEQ ID NO: 1157408 - DNA, 25 bp, Homo sapien
ccgtagcttgttaatcactagaggc

SEQ ID NO: 1157409 - DNA, 25 bp, Homo sapien
ttgttaatcactagaggcccgtggc

SEQ ID NO: 1157410 - DNA, 25 bp, Homo sapien
gctttctgggccgtagcttgttaat

SEQ ID NO: 1157411 - DNA, 25 bp, Homo sapien
ttaatcactagaggcccgtggcaag

SEQ ID NO: 1157412 - DNA, 25 bp, Homo sapien
gtaggtcccgtagcacctaggtgga

SEQ ID NO: 1157413 - DNA, 25 bp, Homo sapien
gtggctctttcagacagggccgccg

SEQ ID NO: 1157414 - DNA, 25 bp, Homo sapien
caagttcgggtttgctcttccttgc

SEQ ID NO: 1157415 - DNA, 25 bp, Homo sapien
ccgagtgatcgcaggctccgactgg

SEQ ID NO: 1157416 - DNA, 25 bp, Homo sapien
ccgaaggaagcgtgaggcctcctgt

SEQ ID NO: 1157417 - DNA, 25 bp, Homo sapien
tcctcacgccgaatctctccaaggg

SEQ ID NO: 1157418 - DNA, 25 bp, Homo sapien
ttagggagaaccgaaggaagcgtga

SEQ ID NO: 1157419 - DNA, 25 bp, Homo sapien
tcctgtttcctcacgccgaatctct

SEQ ID NO: 1157420 - DNA, 25 bp, Homo sapien
tcaggaaggccttcactggcattcc

SEQ ID NO: 1157421 - DNA, 25 bp, Homo sapien
ctggctctgcctctggctccagctc

SEQ ID NO: 1157422 - DNA, 25 bp, Homo sapien
tggctctgcctctggctccagctcc

SEQ ID NO: 1157423 - DNA, 25 bp, Homo sapien
ggaactgggcctcaatccatgtgag

SEQ ID NO: 1157424 - DNA, 25 bp, Homo sapien
gatgacctctcttagggacgaaccc

SEQ ID NO: 1157425 - DNA, 25 bp, Homo sapien
ggacgaacccagcagttgtctgact

SEQ ID NO: 1157426 - DNA, 25 bp, Homo sapien
gctgaacagccagtcagatgacctc

SEQ ID NO: 1157427 - DNA, 25 bp, Homo sapien
gaggtgccagaggtgaggtgggtgt

SEQ ID NO: 1157428 - DNA, 25 bp, Homo sapien
ctgtgtgagcactgcctccggtgtg

SEQ ID NO: 1157429 - DNA, 25 bp, Homo sapien
tgtcgttgttgtggcctggtagctt

SEQ ID NO: 1157430 - DNA, 25 bp, Homo sapien
cgttgttgtggcctggtagcttgcc

SEQ ID NO: 1157431 - DNA, 25 bp, Homo sapien
gctgatgtgagcaagagttcttgca

SEQ ID NO: 1157432 - DNA, 25 bp, Homo sapien
ggtcagcaggtgcaatctcttagct

SEQ ID NO: 1157433 - DNA, 25 bp, Homo sapien
tcttagctgatgtgagcaagagttc

SEQ ID NO: 1157434 - DNA, 25 bp, Homo sapien
gagcacaggccggaatctctaggtc

SEQ ID NO: 1157435 - DNA, 25 bp, Homo sapien
ctcaggccttggtccgcggtagatg

SEQ ID NO: 1157436 - DNA, 25 bp, Homo sapien
tgaggtctatggccctccttcctgg

SEQ ID NO: 1157437 - DNA, 25 bp, Homo sapien
tctgaggtctatggccctccttcct

SEQ ID NO: 1157438 - DNA, 25 bp, Homo sapien
ctgaggtctatggccctccttcctg

SEQ ID NO: 1157439 - DNA, 25 bp, Homo sapien
gaggatctcctgggtgagggacggt

SEQ ID NO: 1157440 - DNA, 25 bp, Homo sapien
atctcctgggtgagggacggtgcca

SEQ ID NO: 1157441 - DNA, 25 bp, Homo sapien
tctcctgggtgagggacggtgccat

SEQ ID NO: 1157442 - DNA, 25 bp, Homo sapien
ggatctcctgggtgagggacggtgc

SEQ ID NO: 1157443 - DNA, 25 bp, Homo sapien
tgaagttcaagaaggtcctgagggt

SEQ ID NO: 1157444 - DNA, 25 bp, Homo sapien
ttggccagtaatggccctcagtagc

SEQ ID NO: 1157445 - DNA, 25 bp, Homo sapien
tctgcgcatccttgtccacgctgaa

SEQ ID NO: 1157446 - DNA, 25 bp, Homo sapien
gtagcctctgcgcatccttgtccac

SEQ ID NO: 1157447 - DNA, 25 bp, Homo sapien
agcacgtccacaatggcactgcggt

SEQ ID NO: 1157448 - DNA, 25 bp, Homo sapien
ctgttgggtgcgctcctggaagttt

SEQ ID NO: 1157449 - DNA, 25 bp, Homo sapien
tttcgtgagatgagctgcctttgct

SEQ ID NO: 1157450 - DNA, 25 bp, Homo sapien
gtccacaatggcactgcggtccacg

SEQ ID NO: 1157451 - DNA, 25 bp, Homo sapien
gtcctcaattcctgggcgtcaaact

SEQ ID NO: 1157452 - DNA, 25 bp, Homo sapien
agtgctgcctgtagagacttcatca

SEQ ID NO: 1157453 - DNA, 25 bp, Homo sapien
caattcctgggcgtcaaactgggct

SEQ ID NO: 1157454 - DNA, 25 bp, Homo sapien
cctctccaggttgccggaaagtgct

SEQ ID NO: 1157455 - DNA, 25 bp, Homo sapien
tgtttgtagactgccaggcactcct

SEQ ID NO: 1157456 - DNA, 25 bp, Homo sapien
tgtgtttgtagactgccaggcactc

SEQ ID NO: 1157457 - DNA, 25 bp, Homo sapien
tgtagactgccaggcactcctgcag

SEQ ID NO: 1157458 - DNA, 25 bp, Homo sapien
tggggttcgagtggcaagaatttca

SEQ ID NO: 1157459 - DNA, 25 bp, Homo sapien
gctctctgaatcctcctgagttttc

SEQ ID NO: 1157460 - DNA, 25 bp, Homo sapien
gggtgaggagctctctgaatcctcc

SEQ ID NO: 1157461 - DNA, 25 bp, Homo sapien
gagctctctgaatcctcctgagttt

SEQ ID NO: 1157462 - DNA, 25 bp, Homo sapien
tgaggagctctctgaatcctcctga

SEQ ID NO: 1157463 - DNA, 25 bp, Homo sapien
gcaagatgccactggtctcagatgt

SEQ ID NO: 1157464 - DNA, 25 bp, Homo sapien
caagatgccactggtctcagatgtg

SEQ ID NO: 1157465 - DNA, 25 bp, Homo sapien
tgcaagatgccactggtctcagatg

SEQ ID NO: 1157466 - DNA, 25 bp, Homo sapien
tggtctcagatgtgatgtcatccac

SEQ ID NO: 1157467 - DNA, 25 bp, Homo sapien
ttccagagtagctgtcacggccccc

SEQ ID NO: 1157468 - DNA, 25 bp, Homo sapien
attccagagtagctgtcacggcccc

SEQ ID NO: 1157469 - DNA, 25 bp, Homo sapien
atgaggtgttcaggatttcgctggg

SEQ ID NO: 1157470 - DNA, 25 bp, Homo sapien
ctgctaggtccttctgcccgctgca

SEQ ID NO: 1157471 - DNA, 25 bp, Homo sapien
cgctgggtgaagactgggacccatg

SEQ ID NO: 1157472 - DNA, 25 bp, Homo sapien
tctctgctaggtccttctgcccgct

SEQ ID NO: 1157473 - DNA, 25 bp, Homo sapien
gtgctccgctggtactgatcaaaca

SEQ ID NO: 1157474 - DNA, 25 bp, Homo sapien
gctcttgcccagtgctccgctggta

SEQ ID NO: 1157475 - DNA, 25 bp, Homo sapien
tggaaacggttctggacagcctcct

SEQ ID NO: 1157476 - DNA, 25 bp, Homo sapien
tgagcatctccatggaaacggttct

SEQ ID NO: 1157477 - DNA, 25 bp, Homo sapien
ctggagggcttgatgaagtttgtca

SEQ ID NO: 1157478 - DNA, 25 bp, Homo sapien
tgatgaagtttgtcagcaaagtaca

SEQ ID NO: 1157479 - DNA, 25 bp, Homo sapien
acagcggtgtgttcttgatcaccga

SEQ ID NO: 1157480 - DNA, 25 bp, Homo sapien
agcggtgtgttcttgatcaccgaag

SEQ ID NO: 1157481 - DNA, 25 bp, Homo sapien
caggacttggtaattgggctcagtt

SEQ ID NO: 1157482 - DNA, 25 bp, Homo sapien
agaaggtcagtctcacatcgagaga

SEQ ID NO: 1157483 - DNA, 25 bp, Homo sapien
gagaagagtagagggacttcccaaa

SEQ ID NO: 1157484 - DNA, 25 bp, Homo sapien
gataaggatgcgaatcaggacttgg

SEQ ID NO: 1157485 - DNA, 25 bp, Homo sapien
ttcagccctgcacaaggccaggagg

SEQ ID NO: 1157486 - DNA, 25 bp, Homo sapien
acaaggccaggagggctgactggca

SEQ ID NO: 1157487 - DNA, 25 bp, Homo sapien
gctgactggcaatcccctttcactg

SEQ ID NO: 1157488 - DNA, 25 bp, Homo sapien
tcacatgtcttcagccctgcacaag

SEQ ID NO: 1157489 - DNA, 25 bp, Homo sapien
gacctgggtgtggattactgtagca

SEQ ID NO: 1157490 - DNA, 25 bp, Homo sapien
ggttatcctacttggaggcccagct

SEQ ID NO: 1157491 - DNA, 25 bp, Homo sapien
caatcagggaacacaaacaacagcg

SEQ ID NO: 1157492 - DNA, 25 bp, Homo sapien
gattcctgcggaatagccaagtgca

SEQ ID NO: 1157493 - DNA, 25 bp, Homo sapien
caaatctctgcttggacacatgaat

SEQ ID NO: 1157494 - DNA, 25 bp, Homo sapien
ggtagcttggccctccgcttgcttc

SEQ ID NO: 1157495 - DNA, 25 bp, Homo sapien
aatttgagggttgtgctctccacta

SEQ ID NO: 1157496 - DNA, 25 bp, Homo sapien
accttgttctaatgcctgtttctca

SEQ ID NO: 1157497 - DNA, 25 bp, Homo sapien
ttctaatatagcctgcagggggaac

SEQ ID NO: 1157498 - DNA, 25 bp, Homo sapien
gtcatttctaatatagcctgcaggg

SEQ ID NO: 1157499 - DNA, 25 bp, Homo sapien
catttctaatatagcctgcaggggg

SEQ ID NO: 1157500 - DNA, 25 bp, Homo sapien
tgtcatttctaatatagcctgcagg

SEQ ID NO: 1157501 - DNA, 25 bp, Homo sapien
gcaatagggttaagtatttgaccca

SEQ ID NO: 1157502 - DNA, 25 bp, Homo sapien
tatttgacccaattgaagaatgcaa

SEQ ID NO: 1157503 - DNA, 25 bp, Homo sapien
tgcaaaaagcgggaggtgggtcaga

SEQ ID NO: 1157504 - DNA, 25 bp, Homo sapien
tttcctgagatctgttgtttgcctt

SEQ ID NO: 1157505 - DNA, 25 bp, Homo sapien
gatgagagcaggcaacaaatgccaa

SEQ ID NO: 1157506 - DNA, 25 bp, Homo sapien
taatgtccttgacctcacgtgctgc

SEQ ID NO: 1157507 - DNA, 25 bp, Homo sapien
caggcctgtctccagttgtttcaga

SEQ ID NO: 1157508 - DNA, 25 bp, Homo sapien
ggtccctgaatagtcacacgtatgt

SEQ ID NO: 1157509 - DNA, 25 bp, Homo sapien
catgttagccaggccgatcttgagc

SEQ ID NO: 1157510 - DNA, 25 bp, Homo sapien
ccatgttagccaggccgatcttgag

SEQ ID NO: 1157511 - DNA, 25 bp, Homo sapien
gttagccaggccgatcttgagctcc

SEQ ID NO: 1157512 - DNA, 25 bp, Homo sapien
tttggaggcaagagtctcactcttg

SEQ ID NO: 1157513 - DNA, 25 bp, Homo sapien
aaaaccagcttgtagtcagggcccg

SEQ ID NO: 1157514 - DNA, 25 bp, Homo sapien
ttctcaccagagaggcacaagcgct

SEQ ID NO: 1157515 - DNA, 25 bp, Homo sapien
gatcacaaagctgctgaccgggtca

SEQ ID NO: 1157516 - DNA, 25 bp, Homo sapien
gaagactctctgagcgacctggagc

SEQ ID NO: 1157517 - DNA, 25 bp, Homo sapien
ttccccagctgtaaatcgagaggag

SEQ ID NO: 1157518 - DNA, 25 bp, Homo sapien
tgcttccccagctgtaaatcgagag

SEQ ID NO: 1157519 - DNA, 25 bp, Homo sapien
ccccagctgtaaatcgagaggaggt

SEQ ID NO: 1157520 - DNA, 25 bp, Homo sapien
ccagctgtaaatcgagaggaggtga

SEQ ID NO: 1157521 - DNA, 25 bp, Homo sapien
gcaggtactgcaaataaatggacac

SEQ ID NO: 1157522 - DNA, 25 bp, Homo sapien
ctttccagccgcagagtagtgcagg

SEQ ID NO: 1157523 - DNA, 25 bp, Homo sapien
tagggaacccttcagaatgtggagt

SEQ ID NO: 1157524 - DNA, 25 bp, Homo sapien
gaaatttcatcctgtggcggccctg

SEQ ID NO: 1157525 - DNA, 25 bp, Homo sapien
tgcccctggtcgaggagaggtttcc

SEQ ID NO: 1157526 - DNA, 25 bp, Homo sapien
ctgagggatcagtcgttcggtaaac

SEQ ID NO: 1157527 - DNA, 25 bp, Homo sapien
gctcctgggacgtctttccggcgag

SEQ ID NO: 1157528 - DNA, 25 bp, Homo sapien
cctagcaaccgagggaaggattgtt

SEQ ID NO: 1157529 - DNA, 25 bp, Homo sapien
ctgcagagcagctcgacaaccctgc

SEQ ID NO: 1157530 - DNA, 25 bp, Homo sapien
tgcagagcagctcgacaaccctgca

SEQ ID NO: 1157531 - DNA, 25 bp, Homo sapien
gaataatatcgtaaccaatttcatg

SEQ ID NO: 1157532 - DNA, 25 bp, Homo sapien
gagaataatatcgtaaccaatttca

SEQ ID NO: 1157533 - DNA, 25 bp, Homo sapien
aatgagaataatatcgtaaccaatt

SEQ ID NO: 1157534 - DNA, 25 bp, Homo sapien
taatatcgtaaccaatttcatgatg

SEQ ID NO: 1157535 - DNA, 25 bp, Homo sapien
accctcgtcgccatctcctactccc

SEQ ID NO: 1157536 - DNA, 25 bp, Homo sapien
cctcgtcgccatctcctactcccat

SEQ ID NO: 1157537 - DNA, 25 bp, Homo sapien
aaaccaccctcgtcgccatctccta

SEQ ID NO: 1157538 - DNA, 25 bp, Homo sapien
tttaaaccaccctcgtcgccatctc

SEQ ID NO: 1157539 - DNA, 25 bp, Homo sapien
tatactcatgtagggcttcacacac

SEQ ID NO: 1157540 - DNA, 25 bp, Homo sapien
cacagaggaggtaggtcaaataatc

SEQ ID NO: 1157541 - DNA, 25 bp, Homo sapien
taatgggtcctcattccatagatgg

SEQ ID NO: 1157542 - DNA, 25 bp, Homo sapien
tcttgggcatatcaaccctggttga

SEQ ID NO: 1157543 - DNA, 25 bp, Homo sapien
gtggagtccaaatcacaggcttcat

SEQ ID NO: 1157544 - DNA, 25 bp, Homo sapien
tcccagcacaacatgtagaggtcgg

SEQ ID NO: 1157545 - DNA, 25 bp, Homo sapien
gggcaagagcagacactgtggagtc

SEQ ID NO: 1157546 - DNA, 25 bp, Homo sapien
gcacaacatgtagaggtcgggactc

SEQ ID NO: 1157547 - DNA, 25 bp, Homo sapien
tttatatttaaaactggcacaaaga

SEQ ID NO: 1157548 - DNA, 25 bp, Homo sapien
ctcgcagaggtagttcagaacgttt

SEQ ID NO: 1157549 - DNA, 25 bp, Homo sapien
cagaggtagttcagaacgttttata

SEQ ID NO: 1157550 - DNA, 25 bp, Homo sapien
gtcacctcgcagaggtagttcagaa

SEQ ID NO: 1157551 - DNA, 25 bp, Homo sapien
ttggccagcctggtataatgcatgg

SEQ ID NO: 1157552 - DNA, 25 bp, Homo sapien
gcatggaggtcaatctcatcccgaa

SEQ ID NO: 1157553 - DNA, 25 bp, Homo sapien
tctcatcccgaaaaatcaagatact

SEQ ID NO: 1157554 - DNA, 25 bp, Homo sapien
taagatatgatggtcgacaaggatg

SEQ ID NO: 1157555 - DNA, 25 bp, Homo sapien
tagggtatgtctatatgccacagac

SEQ ID NO: 1157556 - DNA, 25 bp, Homo sapien
tcacacccggcacacaaaatcttaa

SEQ ID NO: 1157557 - DNA, 25 bp, Homo sapien
actcctggagcttaatggatctggc

SEQ ID NO: 1157558 - DNA, 25 bp, Homo sapien
gccacagacatacatataactgcag

SEQ ID NO: 1157559 - DNA, 25 bp, Homo sapien
tcggtcaccagggtagcacaggacc

SEQ ID NO: 1157560 - DNA, 25 bp, Homo sapien
gatgggtcgatggtctagcacctct

SEQ ID NO: 1157561 - DNA, 25 bp, Homo sapien
gtttgcctgtccaagatctctggtg

SEQ ID NO: 1157562 - DNA, 25 bp, Homo sapien
cagctcaactgaaacatggcaggga

SEQ ID NO: 1157563 - DNA, 25 bp, Homo sapien
tctccacatatttgctgtcctttgg

SEQ ID NO: 1157564 - DNA, 25 bp, Homo sapien
tagtttctccacatatttgctgtcc

SEQ ID NO: 1157565 - DNA, 25 bp, Homo sapien
ttctccacatatttgctgtcctttg

SEQ ID NO: 1157566 - DNA, 25 bp, Homo sapien
gtttctccacatatttgctgtcctt

SEQ ID NO: 1157567 - DNA, 25 bp, Homo sapien
acagccagatgggtcaaggaaggaa

SEQ ID NO: 1157568 - DNA, 25 bp, Homo sapien
ctatagatagtcttctggtcttttc

SEQ ID NO: 1157569 - DNA, 25 bp, Homo sapien
ccttgacgccttgtctatagatagt

SEQ ID NO: 1157570 - DNA, 25 bp, Homo sapien
tccaaatccatatatattgcactaa

SEQ ID NO: 1157571 - DNA, 25 bp, Homo sapien
cactaatggccaccttgacgccttg

SEQ ID NO: 1157572 - DNA, 25 bp, Homo sapien
agccaactgccgcactggctcattg

SEQ ID NO: 1157573 - DNA, 25 bp, Homo sapien
gccgcactggctcattgtgagtgtt

SEQ ID NO: 1157574 - DNA, 25 bp, Homo sapien
caactgccgcactggctcattgtga

SEQ ID NO: 1157575 - DNA, 25 bp, Homo sapien
ctgccgcactggctcattgtgagtg

SEQ ID NO: 1157576 - DNA, 25 bp, Homo sapien
ctgggaagctgaggctggtggatca

SEQ ID NO: 1157577 - DNA, 25 bp, Homo sapien
ctgcaattccagaactctgggaagc

SEQ ID NO: 1157578 - DNA, 25 bp, Homo sapien
cctgggcaacatagcgagactctgt

SEQ ID NO: 1157579 - DNA, 25 bp, Homo sapien
cttgagtccaggagttcgagaccag

SEQ ID NO: 1157580 - DNA, 25 bp, Homo sapien
cttgaagataggcatggaggttagg

SEQ ID NO: 1157581 - DNA, 25 bp, Homo sapien
cagaagtttctttcgagagacctgg

SEQ ID NO: 1157582 - DNA, 25 bp, Homo sapien
gcatggaggttagggtgggtacttg

SEQ ID NO: 1157583 - DNA, 25 bp, Homo sapien
gcagaagtttctttcgagagacctg

SEQ ID NO: 1157584 - DNA, 25 bp, Homo sapien
agcccctgatctagagggcactcat

SEQ ID NO: 1157585 - DNA, 25 bp, Homo sapien
gatctagagggcactcatccaccaa

SEQ ID NO: 1157586 - DNA, 25 bp, Homo sapien
tagagggcactcatccaccaagctg

SEQ ID NO: 1157587 - DNA, 25 bp, Homo sapien
ccctgatctagagggcactcatcca

SEQ ID NO: 1157588 - DNA, 25 bp, Homo sapien
gtggtagactgtgacagtgagatct

SEQ ID NO: 1157589 - DNA, 25 bp, Homo sapien
gatccatgccgaggacacttttggg

SEQ ID NO: 1157590 - DNA, 25 bp, Homo sapien
gacagagggatccaaagaaacagcc

SEQ ID NO: 1157591 - DNA, 25 bp, Homo sapien
tggcaacttacatggaacagagctg

SEQ ID NO: 1157592 - DNA, 25 bp, Homo sapien
agatatgtcacatcgtgcccctggc

SEQ ID NO: 1157593 - DNA, 25 bp, Homo sapien
ggagttgttggggagctggttgtcc

SEQ ID NO: 1157594 - DNA, 25 bp, Homo sapien
gagttgttggggagctggttgtccc

SEQ ID NO: 1157595 - DNA, 25 bp, Homo sapien
tgttgtagctcttgcctccaaggag

SEQ ID NO: 1157596 - DNA, 25 bp, Homo sapien
gttggggagctggttgtcccagccc

SEQ ID NO: 1157597 - DNA, 25 bp, Homo sapien
tttcctgcctcttgtatagttccca

SEQ ID NO: 1157598 - DNA, 25 bp, Homo sapien
ttcctgcctcttgtatagttcccat

SEQ ID NO: 1157599 - DNA, 25 bp, Homo sapien
gatttgccagaacgagaacctggac

SEQ ID NO: 1157600 - DNA, 25 bp, Homo sapien
gaagacggtacctagttaggcctgc

SEQ ID NO: 1157601 - DNA, 25 bp, Homo sapien
gaacccgagatttgacccagtaaga

SEQ ID NO: 1157602 - DNA, 25 bp, Homo sapien
cagctatcattgagcaaagtcggga

SEQ ID NO: 1157603 - DNA, 25 bp, Homo sapien
taagtttgggagcagacgaaagatg

SEQ ID NO: 1157604 - DNA, 25 bp, Homo sapien
tctcttgcctcctatacagatgctt

SEQ ID NO: 1157605 - DNA, 25 bp, Homo sapien
agaaaagatcaagggaactgaatag

SEQ ID NO: 1157606 - DNA, 25 bp, Homo sapien
tcaaaaggactcagatctcttgcct

SEQ ID NO: 1157607 - DNA, 25 bp, Homo sapien
ccttcagctccaactccccatgtct

SEQ ID NO: 1157608 - DNA, 25 bp, Homo sapien
gtctcagggctgctcctagttctgg

SEQ ID NO: 1157609 - DNA, 25 bp, Homo sapien
agggctgctcctagttctggtgctt

SEQ ID NO: 1157610 - DNA, 25 bp, Homo sapien
tagggaattcttcatcctgccattc

SEQ ID NO: 1157611 - DNA, 25 bp, Homo sapien
tgcccaagctcgggtgtaatggcac

SEQ ID NO: 1157612 - DNA, 25 bp, Homo sapien
ctcagctcactacaacctctgcctc

SEQ ID NO: 1157613 - DNA, 25 bp, Homo sapien
ccaagctcgggtgtaatggcacaat

SEQ ID NO: 1157614 - DNA, 25 bp, Homo sapien
cttgttgcccaagctcgggtgtaat

SEQ ID NO: 1157615 - DNA, 25 bp, Homo sapien
caatatataggttctctctccccac

SEQ ID NO: 1157616 - DNA, 25 bp, Homo sapien
caaaggcatcaagccaggactcaat

SEQ ID NO: 1157617 - DNA, 25 bp, Homo sapien
catatacaccaaaggcatcaagcca

SEQ ID NO: 1157618 - DNA, 25 bp, Homo sapien
aagagattaaaaggcggcagacata

SEQ ID NO: 1157619 - DNA, 25 bp, Homo sapien
tgtgaatctcctttagggtcttcag

SEQ ID NO: 1157620 - DNA, 25 bp, Homo sapien
gtgaatctcctttagggtcttcagg

SEQ ID NO: 1157621 - DNA, 25 bp, Homo sapien
tggccacacagggctaaagtgctgg

SEQ ID NO: 1157622 - DNA, 25 bp, Homo sapien
tagtcagactcagccgcaactctgg

SEQ ID NO: 1157623 - DNA, 25 bp, Homo sapien
tcagaactgccatcaggagaggaag

SEQ ID NO: 1157624 - DNA, 25 bp, Homo sapien
ccaattcgtctatctccaggtcaga

SEQ ID NO: 1157625 - DNA, 25 bp, Homo sapien
gggtgaagctccatcatttccaggc

SEQ ID NO: 1157626 - DNA, 25 bp, Homo sapien
tatagggctcaatgacagtcatgtc

SEQ ID NO: 1157627 - DNA, 25 bp, Homo sapien
atgtctacgcgctgctcccgtggtc

SEQ ID NO: 1157628 - DNA, 25 bp, Homo sapien
ccattcggaacaccctccagtgatg

SEQ ID NO: 1157629 - DNA, 25 bp, Homo sapien
agcctttcagctgtctcactggtgc

SEQ ID NO: 1157630 - DNA, 25 bp, Homo sapien
gttccatgacataggtgtagttggg

SEQ ID NO: 1157631 - DNA, 25 bp, Homo sapien
cagcattgaggccatcaccgtggta

SEQ ID NO: 1157632 - DNA, 25 bp, Homo sapien
ctaaacaagtgttccatgacatagg

SEQ ID NO: 1157633 - DNA, 25 bp, Homo sapien
ctgggtagataacaggaagcaaaaa

SEQ ID NO: 1157634 - DNA, 25 bp, Homo sapien
cgccgatccagggtacggtaacact

SEQ ID NO: 1157635 - DNA, 25 bp, Homo sapien
ggtaacactgacgtatccagcttag

SEQ ID NO: 1157636 - DNA, 25 bp, Homo sapien
cagcttagaggtggaacttgggccc

SEQ ID NO: 1157637 - DNA, 25 bp, Homo sapien
tgcttgtgcctccactcaaatgaac

SEQ ID NO: 1157638 - DNA, 25 bp, Homo sapien
agatgagatagagagttgtagccct

SEQ ID NO: 1157639 - DNA, 25 bp, Homo sapien
gatgagatagagagttgtagccctc

SEQ ID NO: 1157640 - DNA, 25 bp, Homo sapien
gagatagagagttgtagccctctca

SEQ ID NO: 1157641 - DNA, 25 bp, Homo sapien
tagagagttgtagccctctcatccc

SEQ ID NO: 1157642 - DNA, 25 bp, Homo sapien
taccctcgcgtaagttccttttgca

SEQ ID NO: 1157643 - DNA, 25 bp, Homo sapien
catcttgtgctctaccctcgcgtaa

SEQ ID NO: 1157644 - DNA, 25 bp, Homo sapien
caccgcgcccgaccacctggtcttt

SEQ ID NO: 1157645 - DNA, 25 bp, Homo sapien
gcttctacatcgctccatgaccaag

SEQ ID NO: 1157646 - DNA, 25 bp, Homo sapien
cccattccgtcagctgtaatctcag

SEQ ID NO: 1157647 - DNA, 25 bp, Homo sapien
tgtactgtaacttccttcattcact

SEQ ID NO: 1157648 - DNA, 25 bp, Homo sapien
ctagtttctagatttatctggtact

SEQ ID NO: 1157649 - DNA, 25 bp, Homo sapien
acccatcttatttagccctccatga

SEQ ID NO: 1157650 - DNA, 25 bp, Homo sapien
cagggctcgcaggtttttccgtagc

SEQ ID NO: 1157651 - DNA, 25 bp, Homo sapien
ccaccagggctcgcaggtttttccg

SEQ ID NO: 1157652 - DNA, 25 bp, Homo sapien
caaccaccagggctcgcaggttttt

SEQ ID NO: 1157653 - DNA, 25 bp, Homo sapien
tgtagcatggacaaccaccagggct

SEQ ID NO: 1157654 - DNA, 25 bp, Homo sapien
gatgaagggccgaagcagtgccaga

SEQ ID NO: 1157655 - DNA, 25 bp, Homo sapien
atgaagggccgaagcagtgccagaa

SEQ ID NO: 1157656 - DNA, 25 bp, Homo sapien
aaaatgtagaagtagagtggttaag

SEQ ID NO: 1157657 - DNA, 25 bp, Homo sapien
ggctagaaagaatcaaggtggagaa

SEQ ID NO: 1157658 - DNA, 25 bp, Homo sapien
tagaagtagagtggttaaggctaga

SEQ ID NO: 1157659 - DNA, 25 bp, Homo sapien
aaatcaactgtgttttgtattggga

SEQ ID NO: 1157660 - DNA, 25 bp, Homo sapien
ctgtccagaaaacggatttttcgtg

SEQ ID NO: 1157661 - DNA, 25 bp, Homo sapien
atatgagttgggccagctcccccag

SEQ ID NO: 1157662 - DNA, 25 bp, Homo sapien
tccagaaaacggatttttcgtgtga

SEQ ID NO: 1157663 - DNA, 25 bp, Homo sapien
ttcagggatgtggacttgatccagg

SEQ ID NO: 1157664 - DNA, 25 bp, Homo sapien
ccccaaggctttattcttaagtgtg

SEQ ID NO: 1157665 - DNA, 25 bp, Homo sapien
ttccccatatacattaaagcacccg

SEQ ID NO: 1157666 - DNA, 25 bp, Homo sapien
acagggccctctagcttttcgttct

SEQ ID NO: 1157667 - DNA, 25 bp, Homo sapien
tagagattggctttacacatcccac

SEQ ID NO: 1157668 - DNA, 25 bp, Homo sapien
ctgagccatggagatcccggtccag

SEQ ID NO: 1157669 - DNA, 25 bp, Homo sapien
tgagccatggagatcccggtccagc

SEQ ID NO: 1157670 - DNA, 25 bp, Homo sapien
gaatgaaagtcacccagcagatcag

SEQ ID NO: 1157671 - DNA, 25 bp, Homo sapien
ctgagaagtgaagatccggtggtac

SEQ ID NO: 1157672 - DNA, 25 bp, Homo sapien
caaagccctgctgaaagtagggtca

SEQ ID NO: 1157673 - DNA, 25 bp, Homo sapien
ggtggaaggatcacagtccctccag

SEQ ID NO: 1157674 - DNA, 25 bp, Homo sapien
gctcttggggttgggagggtggcca

SEQ ID NO: 1157675 - DNA, 25 bp, Homo sapien
gagggtggccagtgaggcaagccct

SEQ ID NO: 1157676 - DNA, 25 bp, Homo sapien
tggccagtgaggcaagccctgcctc

SEQ ID NO: 1157677 - DNA, 25 bp, Homo sapien
gggttgggagggtggccagtgaggc

SEQ ID NO: 1157678 - DNA, 25 bp, Homo sapien
cagattcagcagcaggacccacagc

SEQ ID NO: 1157679 - DNA, 25 bp, Homo sapien
catttcggtcggagtctgggtcagg

SEQ ID NO: 1157680 - DNA, 25 bp, Homo sapien
gccgcccggggacccagattcagca

SEQ ID NO: 1157681 - DNA, 25 bp, Homo sapien
ctgcatttcggtcggagtctgggtc

SEQ ID NO: 1157682 - DNA, 25 bp, Homo sapien
gctaaagccggtggacaccgtggcg

SEQ ID NO: 1157683 - DNA, 25 bp, Homo sapien
tctaggattatccttgtcttccggg

SEQ ID NO: 1157684 - DNA, 25 bp, Homo sapien
cggtgctccggtagctgcgggtcat

SEQ ID NO: 1157685 - DNA, 25 bp, Homo sapien
ggcatcattctcgtcctctaggatt

SEQ ID NO: 1157686 - DNA, 25 bp, Homo sapien
tcgtgctggaactccccgctgtatt

SEQ ID NO: 1157687 - DNA, 25 bp, Homo sapien
ggtgctatcctttccggcattaatc

SEQ ID NO: 1157688 - DNA, 25 bp, Homo sapien
gagtcgcactgggaagctctctgct

SEQ ID NO: 1157689 - DNA, 25 bp, Homo sapien
catcctcctcgttaatggcggacga

SEQ ID NO: 1157690 - DNA, 25 bp, Homo sapien
agcgcggcaggcttgaagtcagcct

SEQ ID NO: 1157691 - DNA, 25 bp, Homo sapien
ggagcgcggcaggcttgaagtcagc

SEQ ID NO: 1157692 - DNA, 25 bp, Homo sapien
gagcgcggcaggcttgaagtcagcc

SEQ ID NO: 1157693 - DNA, 25 bp, Homo sapien
gcgcggcaggcttgaagtcagcctg

SEQ ID NO: 1157694 - DNA, 25 bp, Homo sapien
ggtgagggtgacggccaccggctcg

SEQ ID NO: 1157695 - DNA, 25 bp, Homo sapien
gtgagggtgacggccaccggctcgg

SEQ ID NO: 1157696 - DNA, 25 bp, Homo sapien
cagcaccagccgcagatcctcagga

SEQ ID NO: 1157697 - DNA, 25 bp, Homo sapien
atcagcaccagccgcagatcctcag

SEQ ID NO: 1157698 - DNA, 25 bp, Homo sapien
gcatcagcaccagccgcagatcctc

SEQ ID NO: 1157699 - DNA, 25 bp, Homo sapien
agcaccagccgcagatcctcaggag

SEQ ID NO: 1157700 - DNA, 25 bp, Homo sapien
ttcccagaccggctccggctcatgg

SEQ ID NO: 1157701 - DNA, 25 bp, Homo sapien
gtgcagcttcccagaccggctccgg

SEQ ID NO: 1157702 - DNA, 25 bp, Homo sapien
atggtgcccgacttgcagtggcagt

SEQ ID NO: 1157703 - DNA, 25 bp, Homo sapien
ggctccggctcatggtgcccgactt

SEQ ID NO: 1157704 - DNA, 25 bp, Homo sapien
gacttgtgtccagggggcactcttc

SEQ ID NO: 1157705 - DNA, 25 bp, Homo sapien
ggcactcttcccgaagtcggttgca

SEQ ID NO: 1157706 - DNA, 25 bp, Homo sapien
caaggcttgtgctccgtgcggagct

SEQ ID NO: 1157707 - DNA, 25 bp, Homo sapien
cagggacattgttgataggtgcaag

SEQ ID NO: 1157708 - DNA, 25 bp, Homo sapien
ggtggtgctctgagaggcacagttg

SEQ ID NO: 1157709 - DNA, 25 bp, Homo sapien
tggtggtgctctgagaggcacagtt

SEQ ID NO: 1157710 - DNA, 25 bp, Homo sapien
caggccaatcctgacccgtttccaa

SEQ ID NO: 1157711 - DNA, 25 bp, Homo sapien
cactgaagagaggctattccaaata

SEQ ID NO: 1157712 - DNA, 25 bp, Homo sapien
gaacactgaagagaggctattccaa

SEQ ID NO: 1157713 - DNA, 25 bp, Homo sapien
aacactgaagagaggctattccaaa

SEQ ID NO: 1157714 - DNA, 25 bp, Homo sapien
aacactggctggcttagcaactggg

SEQ ID NO: 1157715 - DNA, 25 bp, Homo sapien
aaccaggtaagtcagtaacagttca

SEQ ID NO: 1157716 - DNA, 25 bp, Homo sapien
gatccgtcaacaaagaccctggctc

SEQ ID NO: 1157717 - DNA, 25 bp, Homo sapien
ggacttttcagatccgtcaacaaag

SEQ ID NO: 1157718 - DNA, 25 bp, Homo sapien
aaaaacagagaatttccaagaccag

SEQ ID NO: 1157719 - DNA, 25 bp, Homo sapien
gagaatttccaagaccaggcatggt

SEQ ID NO: 1157720 - DNA, 25 bp, Homo sapien
acatagcgagatcttgtctgtgaaa

SEQ ID NO: 1157721 - DNA, 25 bp, Homo sapien
acagagaatttccaagaccaggcat

SEQ ID NO: 1157722 - DNA, 25 bp, Homo sapien
gggtgcagtgagttgtgactgcgcc

SEQ ID NO: 1157723 - DNA, 25 bp, Homo sapien
cagtgagttgtgactgcgccaccac

SEQ ID NO: 1157724 - DNA, 25 bp, Homo sapien
ggtgcagtgagttgtgactgcgcca

SEQ ID NO: 1157725 - DNA, 25 bp, Homo sapien
tgagttgtgactgcgccaccacact

SEQ ID NO: 1157726 - DNA, 25 bp, Homo sapien
gaggatcgattcaggtaaagtgcac

SEQ ID NO: 1157727 - DNA, 25 bp, Homo sapien
tcctggaaggacagtactcccaaat

SEQ ID NO: 1157728 - DNA, 25 bp, Homo sapien
cctggtttaaatctcgtggctctgc

SEQ ID NO: 1157729 - DNA, 25 bp, Homo sapien
tgggcactggtgtcaaacctggttt

SEQ ID NO: 1157730 - DNA, 25 bp, Homo sapien
tctcctcatgtggatgaagtggcca

SEQ ID NO: 1157731 - DNA, 25 bp, Homo sapien
atctcctcatgtggatgaagtggcc

SEQ ID NO: 1157732 - DNA, 25 bp, Homo sapien
caagccagaggctgctagttacata

SEQ ID NO: 1157733 - DNA, 25 bp, Homo sapien
tatagctaatgaagataactcctcg

SEQ ID NO: 1157734 - DNA, 25 bp, Homo sapien
taactcctcgaaagtggctgagatg

SEQ ID NO: 1157735 - DNA, 25 bp, Homo sapien
tcaacattttatcctgagggacagg

SEQ ID NO: 1157736 - DNA, 25 bp, Homo sapien
tagacacacattagactcagggagt

SEQ ID NO: 1157737 - DNA, 25 bp, Homo sapien
tatttctgtgccctagtcctagaca

SEQ ID NO: 1157738 - DNA, 25 bp, Homo sapien
tccagggtaattaggaaggcagaac

SEQ ID NO: 1157739 - DNA, 25 bp, Homo sapien
tgcctgctctgagacaagaagggtg

SEQ ID NO: 1157740 - DNA, 25 bp, Homo sapien
ttgctatgatggacaggtccccctc

SEQ ID NO: 1157741 - DNA, 25 bp, Homo sapien
ctttattcagtgttttgcttgtgtt

SEQ ID NO: 1157742 - DNA, 25 bp, Homo sapien
cttgtgtttgcatgttgctatgatg

SEQ ID NO: 1157743 - DNA, 25 bp, Homo sapien
gagaggctctagaacaaggtttcac

SEQ ID NO: 1157744 - DNA, 25 bp, Homo sapien
gaaagaaacccagaatgcggcagaa

SEQ ID NO: 1157745 - DNA, 25 bp, Homo sapien
taggagtaagtccatctcaaggtgg

SEQ ID NO: 1157746 - DNA, 25 bp, Homo sapien
caaggtggacttctgatcattgagg

SEQ ID NO: 1157747 - DNA, 25 bp, Homo sapien
cgttttgccccgaaatgcctggcga

SEQ ID NO: 1157748 - DNA, 25 bp, Homo sapien
gcaatgcagcccctcctaagaaggg

SEQ ID NO: 1157749 - DNA, 25 bp, Homo sapien
tctgcgccgggctggagaaatacaa

SEQ ID NO: 1157750 - DNA, 25 bp, Homo sapien
cattggtctgcgctattattcccga

SEQ ID NO: 1157751 - DNA, 25 bp, Homo sapien
ctgtactggctactcacagggtccc

SEQ ID NO: 1157752 - DNA, 25 bp, Homo sapien
actgtactggctactcacagggtcc

SEQ ID NO: 1157753 - DNA, 25 bp, Homo sapien
aactgtactggctactcacagggtc

SEQ ID NO: 1157754 - DNA, 25 bp, Homo sapien
gaactgtactggctactcacagggt

SEQ ID NO: 1157755 - DNA, 25 bp, Homo sapien
tgcttgcccgatcattttgccaacg

SEQ ID NO: 1157756 - DNA, 25 bp, Homo sapien
gaccttgtaggtggctgtatctgac

SEQ ID NO: 1157757 - DNA, 25 bp, Homo sapien
ttccagctccgacagatccagttct

SEQ ID NO: 1157758 - DNA, 25 bp, Homo sapien
ggctgtatctgacagacccaggcct

SEQ ID NO: 1157759 - DNA, 25 bp, Homo sapien
aggtgctgtactcaaggaggccatc

SEQ ID NO: 1157760 - DNA, 25 bp, Homo sapien
gtgctgtactcaaggaggccatcac

SEQ ID NO: 1157761 - DNA, 25 bp, Homo sapien
tgaaggtgctgtactcaaggaggcc

SEQ ID NO: 1157762 - DNA, 25 bp, Homo sapien
gttgaaggtgctgtactcaaggagg

SEQ ID NO: 1157763 - DNA, 25 bp, Homo sapien
tggatgctggcaatgggagctctcc

SEQ ID NO: 1157764 - DNA, 25 bp, Homo sapien
ggatgctggcaatgggagctctcca

SEQ ID NO: 1157765 - DNA, 25 bp, Homo sapien
cccacagttaggagcaaagttgtaa

SEQ ID NO: 1157766 - DNA, 25 bp, Homo sapien
tgtgacccagtactccattgcttga

SEQ ID NO: 1157767 - DNA, 25 bp, Homo sapien
cagtcaggcctagtttctggagtta

SEQ ID NO: 1157768 - DNA, 25 bp, Homo sapien
taaaataggacttatgccgttcaga

SEQ ID NO: 1157769 - DNA, 25 bp, Homo sapien
tatcttgcgcgtctgaatagttcca

SEQ ID NO: 1157770 - DNA, 25 bp, Homo sapien
caagaacctggcgaactgctgaggg

SEQ ID NO: 1157771 - DNA, 25 bp, Homo sapien
aaggcgccgcgagtaagatttctgg

SEQ ID NO: 1157772 - DNA, 25 bp, Homo sapien
gaaaagtgcgtcaccgaggcatgct

SEQ ID NO: 1157773 - DNA, 25 bp, Homo sapien
agttcactagtaatctttcaggtca

SEQ ID NO: 1157774 - DNA, 25 bp, Homo sapien
tcattcagattaccgagttcactag

SEQ ID NO: 1157775 - DNA, 25 bp, Homo sapien
cacaccaatgtctgtctgaaagatg

SEQ ID NO: 1157776 - DNA, 25 bp, Homo sapien
cagataatgagagtcgccgtttccc

SEQ ID NO: 1157777 - DNA, 25 bp, Homo sapien
catgcctaagaacatctctactgga

SEQ ID NO: 1157778 - DNA, 25 bp, Homo sapien
gcacgtgtgaaaatacatgcctaag

SEQ ID NO: 1157779 - DNA, 25 bp, Homo sapien
tgatagtaagccatagactgtcctt

SEQ ID NO: 1157780 - DNA, 25 bp, Homo sapien
tgggtggaccaagtgattagatgaa

SEQ ID NO: 1157781 - DNA, 25 bp, Homo sapien
ggagttcaaggatgcgatgagctat

SEQ ID NO: 1157782 - DNA, 25 bp, Homo sapien
aaggatgcgatgagctatgatcact

SEQ ID NO: 1157783 - DNA, 25 bp, Homo sapien
tgggtgactgagcaacacgctgtct

SEQ ID NO: 1157784 - DNA, 25 bp, Homo sapien
ctgggtgactgagcaacacgctgtc

SEQ ID NO: 1157785 - DNA, 25 bp, Homo sapien
agttttgctcgttacgcaggctaga

SEQ ID NO: 1157786 - DNA, 25 bp, Homo sapien
cactgtgcccggcaatgttttatta

SEQ ID NO: 1157787 - DNA, 25 bp, Homo sapien
ctgtgcccggcaatgttttattatt

SEQ ID NO: 1157788 - DNA, 25 bp, Homo sapien
agagttttgctcgttacgcaggcta

SEQ ID NO: 1157789 - DNA, 25 bp, Homo sapien
ctgtgaaactactgcttgatggaaa

SEQ ID NO: 1157790 - DNA, 25 bp, Homo sapien
tgagagcccttattagcaactaact

SEQ ID NO: 1157791 - DNA, 25 bp, Homo sapien
gaaatatctgcaacacactacgacc

SEQ ID NO: 1157792 - DNA, 25 bp, Homo sapien
gagcaaggtggatgcccatctgtga

SEQ ID NO: 1157793 - DNA, 25 bp, Homo sapien
cataggaacaaaagttttcaggtag

SEQ ID NO: 1157794 - DNA, 25 bp, Homo sapien
atgcataggaacaaaagttttcagg

SEQ ID NO: 1157795 - DNA, 25 bp, Homo sapien
ctttatgcataggaacaaaagtttt

SEQ ID NO: 1157796 - DNA, 25 bp, Homo sapien
tttatgcataggaacaaaagttttc

SEQ ID NO: 1157797 - DNA, 25 bp, Homo sapien
tgcttctagcaacctctttcccaag

SEQ ID NO: 1157798 - DNA, 25 bp, Homo sapien
ggcgccatttgccatcaacgttctc

SEQ ID NO: 1157799 - DNA, 25 bp, Homo sapien
tgaatggggcgccatttgccatcaa

SEQ ID NO: 1157800 - DNA, 25 bp, Homo sapien
catcaacgttctcacttcatcatct

SEQ ID NO: 1157801 - DNA, 25 bp, Homo sapien
caattatcacctatatatccacagg

SEQ ID NO: 1157802 - DNA, 25 bp, Homo sapien
acaattatcacctatatatccacag

SEQ ID NO: 1157803 - DNA, 25 bp, Homo sapien
cttacaattatcacctatatatcca

SEQ ID NO: 1157804 - DNA, 25 bp, Homo sapien
tacaattatcacctatatatccaca

SEQ ID NO: 1157805 - DNA, 25 bp, Homo sapien
ataatgctcattgaatatccactgt

SEQ ID NO: 1157806 - DNA, 25 bp, Homo sapien
cattgaatatccactgtgtgcagag

SEQ ID NO: 1157807 - DNA, 25 bp, Homo sapien
ctcattgaatatccactgtgtgcag

SEQ ID NO: 1157808 - DNA, 25 bp, Homo sapien
tgctcattgaatatccactgtgtgc

SEQ ID NO: 1157809 - DNA, 25 bp, Homo sapien
gcaaggtggaggggtgatgttccaa

SEQ ID NO: 1157810 - DNA, 25 bp, Homo sapien
tgcaaggtggaggggtgatgttcca

SEQ ID NO: 1157811 - DNA, 25 bp, Homo sapien
ctgcaaggtggaggggtgatgttcc

SEQ ID NO: 1157812 - DNA, 25 bp, Homo sapien
caaggtggaggggtgatgttccaag

SEQ ID NO: 1157813 - DNA, 25 bp, Homo sapien
gatgtgcgcatgtccatcggctgca

SEQ ID NO: 1157814 - DNA, 25 bp, Homo sapien
aacaagcagttccacgatgtgcgca

SEQ ID NO: 1157815 - DNA, 25 bp, Homo sapien
cctgctaacacctgctcgaaggagt

SEQ ID NO: 1157816 - DNA, 25 bp, Homo sapien
ggtcctgtctactttagtccgggca

SEQ ID NO: 1157817 - DNA, 25 bp, Homo sapien
gacatctcgatggtggcgctctgtg

SEQ ID NO: 1157818 - DNA, 25 bp, Homo sapien
tcagcatgtccttggcattcacatc

SEQ ID NO: 1157819 - DNA, 25 bp, Homo sapien
catatttgataagtaactctacgac

SEQ ID NO: 1157820 - DNA, 25 bp, Homo sapien
gaccaaaatctcagcattgtttttc

SEQ ID NO: 1157821 - DNA, 25 bp, Homo sapien
ttggctctctctggattaacattca

SEQ ID NO: 1157822 - DNA, 25 bp, Homo sapien
gggttggctctctctggattaacat

SEQ ID NO: 1157823 - DNA, 25 bp, Homo sapien
ctctggattaacattcacctgattc

SEQ ID NO: 1157824 - DNA, 25 bp, Homo sapien
ccgacgtgaagatgaatggagcagc

SEQ ID NO: 1157825 - DNA, 25 bp, Homo sapien
agaaataaggcttgcgaggttaaca

SEQ ID NO: 1157826 - DNA, 25 bp, Homo sapien
ctgaggttgttttggtgttggttga

SEQ ID NO: 1157827 - DNA, 25 bp, Homo sapien
aggcttgcgaggttaacaacctcac

SEQ ID NO: 1157828 - DNA, 25 bp, Homo sapien
ataaggcttgcgaggttaacaacct

SEQ ID NO: 1157829 - DNA, 25 bp, Homo sapien
cctcagcaagagctgcaagggtagc

SEQ ID NO: 1157830 - DNA, 25 bp, Homo sapien
gaaaactgtactgttgaggcatggg

SEQ ID NO: 1157831 - DNA, 25 bp, Homo sapien
atgcctcagcaagagctgcaagggt

SEQ ID NO: 1157832 - DNA, 25 bp, Homo sapien
tttgaaaactgtactgttgaggcat

SEQ ID NO: 1157833 - DNA, 25 bp, Homo sapien
aaaaacataggagtatagcaatttc

SEQ ID NO: 1157834 - DNA, 25 bp, Homo sapien
gacaacattcagggagaggaacatt

SEQ ID NO: 1157835 - DNA, 25 bp, Homo sapien
tccttgaacctgacaacattcaggg

SEQ ID NO: 1157836 - DNA, 25 bp, Homo sapien
acctccttgaacctgacaacattca

SEQ ID NO: 1157837 - DNA, 25 bp, Homo sapien
ccccattacttgctggattgatgag

SEQ ID NO: 1157838 - DNA, 25 bp, Homo sapien
cacagttacaataaatggctggcca

SEQ ID NO: 1157839 - DNA, 25 bp, Homo sapien
ttggatattacccagagggactcca

SEQ ID NO: 1157840 - DNA, 25 bp, Homo sapien
tcagtcactatggtgatgaccctct

SEQ ID NO: 1157841 - DNA, 25 bp, Homo sapien
catttttaggtgagtatggagtatc

SEQ ID NO: 1157842 - DNA, 25 bp, Homo sapien
ttccactatttgtcttaatgcctca

SEQ ID NO: 1157843 - DNA, 25 bp, Homo sapien
caattgtctacaagagataactcac

SEQ ID NO: 1157844 - DNA, 25 bp, Homo sapien
tttaataaacaattgtctacaagag

SEQ ID NO: 1157845 - DNA, 25 bp, Homo sapien
taggcaattagcttttgccagtctg

SEQ ID NO: 1157846 - DNA, 25 bp, Homo sapien
ccagatcaactggtttttactacag

SEQ ID NO: 1157847 - DNA, 25 bp, Homo sapien
aaaaaagagccatcagtacattttt

SEQ ID NO: 1157848 - DNA, 25 bp, Homo sapien
tgaacccgggtgcgtgaacccagga

SEQ ID NO: 1157849 - DNA, 25 bp, Homo sapien
ctttgttagtggcaacttctcttct

SEQ ID NO: 1157850 - DNA, 25 bp, Homo sapien
taattacagtctcctctgcaacctt

SEQ ID NO: 1157851 - DNA, 25 bp, Homo sapien
tgtcttctctcctatccttggtttc

SEQ ID NO: 1157852 - DNA, 25 bp, Homo sapien
tgcaaccttaccagcaggtacagtt

SEQ ID NO: 1157853 - DNA, 25 bp, Homo sapien
tctttaggagctggtgtcggtattc

SEQ ID NO: 1157854 - DNA, 25 bp, Homo sapien
tggtgaaatcaactccattgggctg

SEQ ID NO: 1157855 - DNA, 25 bp, Homo sapien
tatggcctccagcttaagacggtac

SEQ ID NO: 1157856 - DNA, 25 bp, Homo sapien
ggtattcctgggctcttcgattggc

SEQ ID NO: 1157857 - DNA, 25 bp, Homo sapien
gctgacccagtcacttttgtctctc

SEQ ID NO: 1157858 - DNA, 25 bp, Homo sapien
aactctagtgtgaggctctgtggtc

SEQ ID NO: 1157859 - DNA, 25 bp, Homo sapien
gaaactctagtgtgaggctctgtgg

SEQ ID NO: 1157860 - DNA, 25 bp, Homo sapien
ggtccctgctgacccagtcactttt

SEQ ID NO: 1157861 - DNA, 25 bp, Homo sapien
cagatacgcatcataaatctaaggg

SEQ ID NO: 1157862 - DNA, 25 bp, Homo sapien
gcagttttgacctccaaggcacaag

SEQ ID NO: 1157863 - DNA, 25 bp, Homo sapien
cctgctcctttggaaatggactata

SEQ ID NO: 1157864 - DNA, 25 bp, Homo sapien
cacaagcatctgaactatagacaca

SEQ ID NO: 1157865 - DNA, 25 bp, Homo sapien
tgccgggtctggccctaattttgta

SEQ ID NO: 1157866 - DNA, 25 bp, Homo sapien
ctcattgcaactgccgcctcccggg

SEQ ID NO: 1157867 - DNA, 25 bp, Homo sapien
tcattgcaactgccgcctcccgggt

SEQ ID NO: 1157868 - DNA, 25 bp, Homo sapien
cccctttttgttgcacataagagga

SEQ ID NO: 1157869 - DNA, 25 bp, Homo sapien
caccctataaggcacaaagctctgt

SEQ ID NO: 1157870 - DNA, 25 bp, Homo sapien
tgtaacagacccaagcttaaggaaa

SEQ ID NO: 1157871 - DNA, 25 bp, Homo sapien
tactcatgccagatcaaaaggaaat

SEQ ID NO: 1157872 - DNA, 25 bp, Homo sapien
ccccatgactgctaattaagaaaac

SEQ ID NO: 1157873 - DNA, 25 bp, Homo sapien
gccagtagccaaggttaatttccaa

SEQ ID NO: 1157874 - DNA, 25 bp, Homo sapien
gaaaacctagctaaggtggccagta

SEQ ID NO: 1157875 - DNA, 25 bp, Homo sapien
aagcaagcaagtctagaatgatgag

SEQ ID NO: 1157876 - DNA, 25 bp, Homo sapien
taaagtaaggctccgaaatcccaca

SEQ ID NO: 1157877 - DNA, 25 bp, Homo sapien
tctgggatgccaagaggaccgttcc

SEQ ID NO: 1157878 - DNA, 25 bp, Homo sapien
tagacaaccatcctaagctcgaagt

SEQ ID NO: 1157879 - DNA, 25 bp, Homo sapien
ggttgggcctgaatatcatctgcag

SEQ ID NO: 1157880 - DNA, 25 bp, Homo sapien
tagagtctaggaatgtcacctcacc

SEQ ID NO: 1157881 - DNA, 25 bp, Homo sapien
aattcgaatgcctgggaaagcctca

SEQ ID NO: 1157882 - DNA, 25 bp, Homo sapien
ccttttctagctatccagagatggg

SEQ ID NO: 1157883 - DNA, 25 bp, Homo sapien
cagataagagcctagagtgcataca

SEQ ID NO: 1157884 - DNA, 25 bp, Homo sapien
gctggccagaaactctatgcagata

SEQ ID NO: 1157885 - DNA, 25 bp, Homo sapien
gaagaccctattcattccccacaag

SEQ ID NO: 1157886 - DNA, 25 bp, Homo sapien
aagaaaacatccagcatacctagag

SEQ ID NO: 1157887 - DNA, 25 bp, Homo sapien
tcttgctcaagtattgctggccaga

SEQ ID NO: 1157888 - DNA, 25 bp, Homo sapien
gagccccgtaactgtactggtgaga

SEQ ID NO: 1157889 - DNA, 25 bp, Homo sapien
gcagagtctgggcacctcgttcaat

SEQ ID NO: 1157890 - DNA, 25 bp, Homo sapien
ctgacggagagggtcaacgaaattg

SEQ ID NO: 1157891 - DNA, 25 bp, Homo sapien
ttcaattgggctttcgtcgagtcgc

SEQ ID NO: 1157892 - DNA, 25 bp, Homo sapien
gcccgcggcgatctcgatcccgctg

SEQ ID NO: 1157893 - DNA, 25 bp, Homo sapien
atcctggagcaagtaccccgggcag

SEQ ID NO: 1157894 - DNA, 25 bp, Homo sapien
gatcccgctgacccgaatcctggag

SEQ ID NO: 1157895 - DNA, 25 bp, Homo sapien
agcgcagcgcgtggccgctggccgc

SEQ ID NO: 1157896 - DNA, 25 bp, Homo sapien
cccggaaagcttacagaatggagaa

SEQ ID NO: 1157897 - DNA, 25 bp, Homo sapien
ggaaagcttacagaatggagaagct

SEQ ID NO: 1157898 - DNA, 25 bp, Homo sapien
tcccggaaagcttacagaatggaga

SEQ ID NO: 1157899 - DNA, 25 bp, Homo sapien
ccggaaagcttacagaatggagaag

SEQ ID NO: 1157900 - DNA, 25 bp, Homo sapien
tatcagctccatgtgtccagggttc

SEQ ID NO: 1157901 - DNA, 25 bp, Homo sapien
catttttggacactgactctgtgcc

SEQ ID NO: 1157902 - DNA, 25 bp, Homo sapien
taagctaagctctacaaaggaccca

SEQ ID NO: 1157903 - DNA, 25 bp, Homo sapien
ccagccggaagaggagattgctcca

SEQ ID NO: 1157904 - DNA, 25 bp, Homo sapien
ggagagtggggtatgtggtcagtca

SEQ ID NO: 1157905 - DNA, 25 bp, Homo sapien
tcctggagagtggggtatgtggtca

SEQ ID NO: 1157906 - DNA, 25 bp, Homo sapien
ctggagagtggggtatgtggtcagt

SEQ ID NO: 1157907 - DNA, 25 bp, Homo sapien
ggtcctggagagtggggtatgtggt

SEQ ID NO: 1157908 - DNA, 25 bp, Homo sapien
aaaggagccattgcggtgcagcaca

SEQ ID NO: 1157909 - DNA, 25 bp, Homo sapien
gagtccgtcacagatcttgccaagg

SEQ ID NO: 1157910 - DNA, 25 bp, Homo sapien
tccttggacacacggtagagctcat

SEQ ID NO: 1157911 - DNA, 25 bp, Homo sapien
tgatcaaacacgtggcggatgcggc

SEQ ID NO: 1157912 - DNA, 25 bp, Homo sapien
cactcttgggaaggaatgaagcctg

SEQ ID NO: 1157913 - DNA, 25 bp, Homo sapien
aaaagtgttagtgccaggtgagcag

SEQ ID NO: 1157914 - DNA, 25 bp, Homo sapien
gcagggttaggaagcccattatctg

SEQ ID NO: 1157915 - DNA, 25 bp, Homo sapien
tcaaggtggaatgtgctaggctcag

SEQ ID NO: 1157916 - DNA, 25 bp, Homo sapien
tgaatgggctcagtcttgacaaacc

SEQ ID NO: 1157917 - DNA, 25 bp, Homo sapien
caagattagggaatgggaactggac

SEQ ID NO: 1157918 - DNA, 25 bp, Homo sapien
aaaaagcagcactgtagggacctga

SEQ ID NO: 1157919 - DNA, 25 bp, Homo sapien
tataaggtatacgaagctggacaga

SEQ ID NO: 1157920 - DNA, 25 bp, Homo sapien
cggggacgcacttccacgcatgcat

SEQ ID NO: 1157921 - DNA, 25 bp, Homo sapien
taaattctctgttccggtttcgcca

SEQ ID NO: 1157922 - DNA, 25 bp, Homo sapien
tccaggccaccgtagcaagagcggg

SEQ ID NO: 1157923 - DNA, 25 bp, Homo sapien
caagagcgggacagcgccttctctt

SEQ ID NO: 1157924 - DNA, 25 bp, Homo sapien
gagttgactccaatcgtctccttcc

SEQ ID NO: 1157925 - DNA, 25 bp, Homo sapien
gagcacattgagttgactccaatcg

SEQ ID NO: 1157926 - DNA, 25 bp, Homo sapien
cattgagttgactccaatcgtctcc

SEQ ID NO: 1157927 - DNA, 25 bp, Homo sapien
tttgagcacattgagttgactccaa

SEQ ID NO: 1157928 - DNA, 25 bp, Homo sapien
cgactgaagcggctccagatcctct

SEQ ID NO: 1157929 - DNA, 25 bp, Homo sapien
ttcagggagcgactgaagcggctcc

SEQ ID NO: 1157930 - DNA, 25 bp, Homo sapien
tccagatcctctccgctcacgctta

SEQ ID NO: 1157931 - DNA, 25 bp, Homo sapien
ggagcgactgaagcggctccagatc

SEQ ID NO: 1157932 - DNA, 25 bp, Homo sapien
gctctaagtcgcctggttctctcct

SEQ ID NO: 1157933 - DNA, 25 bp, Homo sapien
aaggagtcactacacagctctaagt

SEQ ID NO: 1157934 - DNA, 25 bp, Homo sapien
acccccgagttgttgccagagcaat

SEQ ID NO: 1157935 - DNA, 25 bp, Homo sapien
gggagaacagcgatcatagaccgaa

SEQ ID NO: 1157936 - DNA, 25 bp, Homo sapien
ctcatcctctggaatgtaactggct

SEQ ID NO: 1157937 - DNA, 25 bp, Homo sapien
cgtccatcccgaagcatcagcgcct

SEQ ID NO: 1157938 - DNA, 25 bp, Homo sapien
agcatcagcgcctcatcctctggaa

SEQ ID NO: 1157939 - DNA, 25 bp, Homo sapien
catcctctggaatgtaactggctag

SEQ ID NO: 1157940 - DNA, 25 bp, Homo sapien
agctaatcgcgacgctgaggaggca

SEQ ID NO: 1157941 - DNA, 25 bp, Homo sapien
caaagaatcctaggtactcctgctg

SEQ ID NO: 1157942 - DNA, 25 bp, Homo sapien
ctattgagcctctaaccgcagaacc

SEQ ID NO: 1157943 - DNA, 25 bp, Homo sapien
caaaagtttgttgaagccaggcgtg

SEQ ID NO: 1157944 - DNA, 25 bp, Homo sapien
gtaccggtcgatgggggcagatggc

SEQ ID NO: 1157945 - DNA, 25 bp, Homo sapien
agcatggccagggtgtccagtaccg

SEQ ID NO: 1157946 - DNA, 25 bp, Homo sapien
ccagggtgtccagtaccggtcgatg

SEQ ID NO: 1157947 - DNA, 25 bp, Homo sapien
atggccagggtgtccagtaccggtc

SEQ ID NO: 1157948 - DNA, 25 bp, Homo sapien
ttcttgccatagaaaagctgcaagc

SEQ ID NO: 1157949 - DNA, 25 bp, Homo sapien
ttcctttcccggctgcttcttgcca

SEQ ID NO: 1157950 - DNA, 25 bp, Homo sapien
gatgttttggattctgctttctttc

SEQ ID NO: 1157951 - DNA, 25 bp, Homo sapien
ccggctgcttcttgccatagaaaag

SEQ ID NO: 1157952 - DNA, 25 bp, Homo sapien
tacttccggcggcagcaactgttat

SEQ ID NO: 1157953 - DNA, 25 bp, Homo sapien
tgtgcagagcactctgggtgataag

SEQ ID NO: 1157954 - DNA, 25 bp, Homo sapien
tccggcggcagcaactgttatagtg

SEQ ID NO: 1157955 - DNA, 25 bp, Homo sapien
tctgggtgataagtcgtgtctgagt

SEQ ID NO: 1157956 - DNA, 25 bp, Homo sapien
cagaatcatgaatttgggaaaggct

SEQ ID NO: 1157957 - DNA, 25 bp, Homo sapien
taagttctgcatacaaaggatttca

SEQ ID NO: 1157958 - DNA, 25 bp, Homo sapien
gtaacatctccagaacactagtatt

SEQ ID NO: 1157959 - DNA, 25 bp, Homo sapien
tcttcaagtagaattacaaagtgcc

SEQ ID NO: 1157960 - DNA, 25 bp, Homo sapien
gggtggcataggggaaagggagaca

SEQ ID NO: 1157961 - DNA, 25 bp, Homo sapien
atcttcccactttggagtttgacct

SEQ ID NO: 1157962 - DNA, 25 bp, Homo sapien
aggttcaggttccctactgatcttc

SEQ ID NO: 1157963 - DNA, 25 bp, Homo sapien
ggttcaggttccctactgatcttcc

SEQ ID NO: 1157964 - DNA, 25 bp, Homo sapien
ttcaggttccctactgatcttccca

SEQ ID NO: 1157965 - DNA, 25 bp, Homo sapien
gataatggtccagggctcgtcttct

SEQ ID NO: 1157966 - DNA, 25 bp, Homo sapien
tggtccagggctcgtcttcttgtgg

SEQ ID NO: 1157967 - DNA, 25 bp, Homo sapien
aagggtgagataatggtccagggct

SEQ ID NO: 1157968 - DNA, 25 bp, Homo sapien
gtgagataatggtccagggctcgtc

SEQ ID NO: 1157969 - DNA, 25 bp, Homo sapien
ttacccatcgacctcgtccatctgg

SEQ ID NO: 1157970 - DNA, 25 bp, Homo sapien
ccatcgacctcgtccatctgggatc

SEQ ID NO: 1157971 - DNA, 25 bp, Homo sapien
acccatcgacctcgtccatctggga

SEQ ID NO: 1157972 - DNA, 25 bp, Homo sapien
catcgacctcgtccatctgggatcc

SEQ ID NO: 1157973 - DNA, 25 bp, Homo sapien
agtccaaggggagatcaggtggttc

SEQ ID NO: 1157974 - DNA, 25 bp, Homo sapien
aggggagatcaggtggttcctcctc

SEQ ID NO: 1157975 - DNA, 25 bp, Homo sapien
ggagatcaggtggttcctcctcatc

SEQ ID NO: 1157976 - DNA, 25 bp, Homo sapien
tcagtccaaggggagatcaggtggt

SEQ ID NO: 1157977 - DNA, 25 bp, Homo sapien
cagcacccattgtaatttatttgtg

SEQ ID NO: 1157978 - DNA, 25 bp, Homo sapien
gcacccattgtaatttatttgtgaa

SEQ ID NO: 1157979 - DNA, 25 bp, Homo sapien
tcagcacccattgtaatttatttgt

SEQ ID NO: 1157980 - DNA, 25 bp, Homo sapien
agcacccattgtaatttatttgtga

SEQ ID NO: 1157981 - DNA, 25 bp, Homo sapien
aagcaggcagacaacatgaagggca

SEQ ID NO: 1157982 - DNA, 25 bp, Homo sapien
ttacaggtcgccagcaaaagaagag

SEQ ID NO: 1157983 - DNA, 25 bp, Homo sapien
cgctgggagcactggacacttaaat

SEQ ID NO: 1157984 - DNA, 25 bp, Homo sapien
gtcttattaatagggcaccaggctg

SEQ ID NO: 1157985 - DNA, 25 bp, Homo sapien
tcataagaagcggaagtgccccggg

SEQ ID NO: 1157986 - DNA, 25 bp, Homo sapien
gacatagaagggtgagtgaatctca

SEQ ID NO: 1157987 - DNA, 25 bp, Homo sapien
cccaaggaagagaacgttgacatag

SEQ ID NO: 1157988 - DNA, 25 bp, Homo sapien
tgggagtacagccacacatgctaat

SEQ ID NO: 1157989 - DNA, 25 bp, Homo sapien
gatgtatactcgttggcccactgct

SEQ ID NO: 1157990 - DNA, 25 bp, Homo sapien
cacatagtagtagacagttgctcga

SEQ ID NO: 1157991 - DNA, 25 bp, Homo sapien
cctgagacatggaaaggaaccgctc

SEQ ID NO: 1157992 - DNA, 25 bp, Homo sapien
tctgacgtccagcatacacgaggca

SEQ ID NO: 1157993 - DNA, 25 bp, Homo sapien
ggccgcttcactccgggtagccaag

SEQ ID NO: 1157994 - DNA, 25 bp, Homo sapien
taaccacggcctgttaatcgcccaa

SEQ ID NO: 1157995 - DNA, 25 bp, Homo sapien
cgggtagccaagcaaaaaatccgag

SEQ ID NO: 1157996 - DNA, 25 bp, Homo sapien
caaaggagcgaacgccccttctccg

SEQ ID NO: 1157997 - DNA, 25 bp, Homo sapien
cagacacgtcgagccggctcctgga

SEQ ID NO: 1157998 - DNA, 25 bp, Homo sapien
caaggccacaccattcgcctggcat

SEQ ID NO: 1157999 - DNA, 25 bp, Homo sapien
gctcctggaccagctcaaggccaca

SEQ ID NO: 1158000 - DNA, 25 bp, Homo sapien
tcagacacgtcgagccggctcctgg

SEQ ID NO: 1158001 - DNA, 25 bp, Homo sapien
tacagaacccgcgttctgtgggcca

SEQ ID NO: 1158002 - DNA, 25 bp, Homo sapien
ggcctggctctctttcaatccggtt

SEQ ID NO: 1158003 - DNA, 25 bp, Homo sapien
tcagcggcctggctctctttcaatc

SEQ ID NO: 1158004 - DNA, 25 bp, Homo sapien
cggaatcgaatcttcccaacgtctc

SEQ ID NO: 1158005 - DNA, 25 bp, Homo sapien
ggtacaggaagggaccgcgggatca

SEQ ID NO: 1158006 - DNA, 25 bp, Homo sapien
tacaggaagggaccgcgggatcaaa

SEQ ID NO: 1158007 - DNA, 25 bp, Homo sapien
agggaccgcgggatcaaaggatgaa

SEQ ID NO: 1158008 - DNA, 25 bp, Homo sapien
gacggcccggaggaggccgacgcca

SEQ ID NO: 1158009 - DNA, 25 bp, Homo sapien
ggtaccctcttaggtctcgctcttc

SEQ ID NO: 1158010 - DNA, 25 bp, Homo sapien
taggacattcccagctacaggtacc

SEQ ID NO: 1158011 - DNA, 25 bp, Homo sapien
tcccagctacaggtaccctcttagg

SEQ ID NO: 1158012 - DNA, 25 bp, Homo sapien
gtaacacgtaggacattcccagcta

SEQ ID NO: 1158013 - DNA, 25 bp, Homo sapien
gaaagcgtccaataacttttcgata

SEQ ID NO: 1158014 - DNA, 25 bp, Homo sapien
ctctccagaaatcgaaagcgtccaa

SEQ ID NO: 1158015 - DNA, 25 bp, Homo sapien
cttttcgatatcttttaagtcccat

SEQ ID NO: 1158016 - DNA, 25 bp, Homo sapien
cagaaatcgaaagcgtccaataact

SEQ ID NO: 1158017 - DNA, 25 bp, Homo sapien
taaaggctagaaggctggccctgta

SEQ ID NO: 1158018 - DNA, 25 bp, Homo sapien
tctttgtctgcatggtaccagagga

SEQ ID NO: 1158019 - DNA, 25 bp, Homo sapien
aaaaagactttactggcagggcatg

SEQ ID NO: 1158020 - DNA, 25 bp, Homo sapien
gctgagcaggcaactcgcttgaacc

SEQ ID NO: 1158021 - DNA, 25 bp, Homo sapien
tgaattctgctggattaaaatgaac

SEQ ID NO: 1158022 - DNA, 25 bp, Homo sapien
aagacttgggtttcctgaataagct

SEQ ID NO: 1158023 - DNA, 25 bp, Homo sapien
cctgaataagctacccatggccaag

SEQ ID NO: 1158024 - DNA, 25 bp, Homo sapien
tggcagatagccaccttccaatttt

SEQ ID NO: 1158025 - DNA, 25 bp, Homo sapien
tattaagattaatcttgatggccag

SEQ ID NO: 1158026 - DNA, 25 bp, Homo sapien
ttaagattaatcttgatggccaggt

SEQ ID NO: 1158027 - DNA, 25 bp, Homo sapien
aagattaatcttgatggccaggtgt

SEQ ID NO: 1158028 - DNA, 25 bp, Homo sapien
tttattaagattaatcttgatggcc

SEQ ID NO: 1158029 - DNA, 25 bp, Homo sapien
tatcaaagaatgagccagctgggcc

SEQ ID NO: 1158030 - DNA, 25 bp, Homo sapien
gccagctgggcccggtggctcacac

SEQ ID NO: 1158031 - DNA, 25 bp, Homo sapien
agccagctgggcccggtggctcaca

SEQ ID NO: 1158032 - DNA, 25 bp, Homo sapien
aaagaatgagccagctgggcccggt

SEQ ID NO: 1158033 - DNA, 25 bp, Homo sapien
gttggccttaatagcacagcctctc

SEQ ID NO: 1158034 - DNA, 25 bp, Homo sapien
atctactgatgagaaaccaagaagc

SEQ ID NO: 1158035 - DNA, 25 bp, Homo sapien
gaaatgagttctcctcactctagtg

SEQ ID NO: 1158036 - DNA, 25 bp, Homo sapien
tttctgtcagagatgcaatgacatc

SEQ ID NO: 1158037 - DNA, 25 bp, Homo sapien
tgggagccagcgtcaaataatgctt

SEQ ID NO: 1158038 - DNA, 25 bp, Homo sapien
tgaactaccactccaagaagtctgc

SEQ ID NO: 1158039 - DNA, 25 bp, Homo sapien
tcttagaagaagaccatgaactacc

SEQ ID NO: 1158040 - DNA, 25 bp, Homo sapien
taaaatttctctagagcagactggc

SEQ ID NO: 1158041 - DNA, 25 bp, Homo sapien
ttaagtaaagttagttcacacacag

SEQ ID NO: 1158042 - DNA, 25 bp, Homo sapien
gaaatcagaacacctaggtttgcta

SEQ ID NO: 1158043 - DNA, 25 bp, Homo sapien
taacatttacagctaggcacaatgg

SEQ ID NO: 1158044 - DNA, 25 bp, Homo sapien
cctactgtacataaaggagctcaga

SEQ ID NO: 1158045 - DNA, 25 bp, Homo sapien
gaaactttcaagtctgatacttgaa

SEQ ID NO: 1158046 - DNA, 25 bp, Homo sapien
ggcaatgccagtattctagaggagc

SEQ ID NO: 1158047 - DNA, 25 bp, Homo sapien
ttgttctgaattaggcaatgccagt

SEQ ID NO: 1158048 - DNA, 25 bp, Homo sapien
gaaagcgcagtttcacagttttaca

SEQ ID NO: 1158049 - DNA, 25 bp, Homo sapien
ccactgagcccggcctcatctttgg

SEQ ID NO: 1158050 - DNA, 25 bp, Homo sapien
gagccactgagcccggcctcatctt

SEQ ID NO: 1158051 - DNA, 25 bp, Homo sapien
ctcttgatcttgtgatccactgcct

SEQ ID NO: 1158052 - DNA, 25 bp, Homo sapien
ccactgccttggcctcccaaagtgc

SEQ ID NO: 1158053 - DNA, 25 bp, Homo sapien
gcatctgaggaattttataatgtaa

SEQ ID NO: 1158054 - DNA, 25 bp, Homo sapien
gcaagtctggataatcaaaattctt

SEQ ID NO: 1158055 - DNA, 25 bp, Homo sapien
aaataaagcaagtctggataatcaa

SEQ ID NO: 1158056 - DNA, 25 bp, Homo sapien
agtagccaagcatgatgacaccacc

SEQ ID NO: 1158057 - DNA, 25 bp, Homo sapien
tattaacactaaactgcaatgctga

SEQ ID NO: 1158058 - DNA, 25 bp, Homo sapien
tacacttggaagtgtggcacgtact

SEQ ID NO: 1158059 - DNA, 25 bp, Homo sapien
agagaggagaacctattacccaagg

SEQ ID NO: 1158060 - DNA, 25 bp, Homo sapien
aattgcttggctataaatgctacag

SEQ ID NO: 1158061 - DNA, 25 bp, Homo sapien
cagaccaagtgacaaagagaggagc

SEQ ID NO: 1158062 - DNA, 25 bp, Homo sapien
caaacatgtagctctagggctgcta

SEQ ID NO: 1158063 - DNA, 25 bp, Homo sapien
aataaagatgagacgatgtcgctcc

SEQ ID NO: 1158064 - DNA, 25 bp, Homo sapien
gactaattccaagagcacgcagggt

SEQ ID NO: 1158065 - DNA, 25 bp, Homo sapien
acggagttttgctggtcaccgaggc

SEQ ID NO: 1158066 - DNA, 25 bp, Homo sapien
tctagacccctttcttattcaaata

SEQ ID NO: 1158067 - DNA, 25 bp, Homo sapien
tattctagacccctttcttattcaa

SEQ ID NO: 1158068 - DNA, 25 bp, Homo sapien
ataggcctcgtgcatattccatttt

SEQ ID NO: 1158069 - DNA, 25 bp, Homo sapien
ttattctagacccctttcttattca

SEQ ID NO: 1158070 - DNA, 25 bp, Homo sapien
gtttgagtcaaactaaacataagta

SEQ ID NO: 1158071 - DNA, 25 bp, Homo sapien
tcataagagtgtatcacacactcac

SEQ ID NO: 1158072 - DNA, 25 bp, Homo sapien
cataagtataaactcctgcctcttg

SEQ ID NO: 1158073 - DNA, 25 bp, Homo sapien
tcaagcatactgaaaccatcagagt

SEQ ID NO: 1158074 - DNA, 25 bp, Homo sapien
cagatgccatgggtctcttgattcc

SEQ ID NO: 1158075 - DNA, 25 bp, Homo sapien
gatgccatgggtctcttgattccag

SEQ ID NO: 1158076 - DNA, 25 bp, Homo sapien
ctcagatgccatgggtctcttgatt

SEQ ID NO: 1158077 - DNA, 25 bp, Homo sapien
tgccatgggtctcttgattccagat

SEQ ID NO: 1158078 - DNA, 25 bp, Homo sapien
caatgagatgtaagaatcctgtcta

SEQ ID NO: 1158079 - DNA, 25 bp, Homo sapien
gatgtaagaatcctgtctagcttcc

SEQ ID NO: 1158080 - DNA, 25 bp, Homo sapien
gagatgtaagaatcctgtctagctt

SEQ ID NO: 1158081 - DNA, 25 bp, Homo sapien
atgagatgtaagaatcctgtctagc

SEQ ID NO: 1158082 - DNA, 25 bp, Homo sapien
agaagaagagtcaagattataatac

SEQ ID NO: 1158083 - DNA, 25 bp, Homo sapien
aagaagagtcaagattataatacaa

SEQ ID NO: 1158084 - DNA, 25 bp, Homo sapien
agagtcaagattataatacaattcc

SEQ ID NO: 1158085 - DNA, 25 bp, Homo sapien
ctagaagaagagtcaagattataat

SEQ ID NO: 1158086 - DNA, 25 bp, Homo sapien
atgggcatgccagaggcataaggca

SEQ ID NO: 1158087 - DNA, 25 bp, Homo sapien
tgggcatgccagaggcataaggcac

SEQ ID NO: 1158088 - DNA, 25 bp, Homo sapien
aggacagtgaggatacagagtagca

SEQ ID NO: 1158089 - DNA, 25 bp, Homo sapien
tgttggcctgcctaaacaagagttc

SEQ ID NO: 1158090 - DNA, 25 bp, Homo sapien
caaacatcctttagtctgagcaata

SEQ ID NO: 1158091 - DNA, 25 bp, Homo sapien
cagagtgtatctggagccctctaaa

SEQ ID NO: 1158092 - DNA, 25 bp, Homo sapien
ctctggtttggtactcaggctcccc

SEQ ID NO: 1158093 - DNA, 25 bp, Homo sapien
taatgcctaactggatggcaccttt

SEQ ID NO: 1158094 - DNA, 25 bp, Homo sapien
gtaatgcctaactggatggcacctt

SEQ ID NO: 1158095 - DNA, 25 bp, Homo sapien
gtttggtactcaggctccccacagt

SEQ ID NO: 1158096 - DNA, 25 bp, Homo sapien
aaatagctcccggaagtagcggaag

SEQ ID NO: 1158097 - DNA, 25 bp, Homo sapien
tgcataggtcttgaaacgaaagtca

SEQ ID NO: 1158098 - DNA, 25 bp, Homo sapien
tcatcgggccggataccaaatagct

SEQ ID NO: 1158099 - DNA, 25 bp, Homo sapien
aaagtcattgtagtgatgagcaggg

SEQ ID NO: 1158100 - DNA, 25 bp, Homo sapien
actagctccagagctacagagttca

SEQ ID NO: 1158101 - DNA, 25 bp, Homo sapien
aaccactagctccagagctacagag

SEQ ID NO: 1158102 - DNA, 25 bp, Homo sapien
ggaaccactagctccagagctacag

SEQ ID NO: 1158103 - DNA, 25 bp, Homo sapien
ccactagctccagagctacagagtt

SEQ ID NO: 1158104 - DNA, 25 bp, Homo sapien
taagatagaagtgctgacactgttt

SEQ ID NO: 1158105 - DNA, 25 bp, Homo sapien
gaactacactcttaagatagaagtg

SEQ ID NO: 1158106 - DNA, 25 bp, Homo sapien
cactcttaagatagaagtgctgaca

SEQ ID NO: 1158107 - DNA, 25 bp, Homo sapien
cctggcctgaactacactcttaaga

SEQ ID NO: 1158108 - DNA, 25 bp, Homo sapien
ttaccacccatcctccctttatctc

SEQ ID NO: 1158109 - DNA, 25 bp, Homo sapien
aaacagaagtaggagaacaacttag

SEQ ID NO: 1158110 - DNA, 25 bp, Homo sapien
gaaacagaagtaggagaacaactta

SEQ ID NO: 1158111 - DNA, 25 bp, Homo sapien
acaatccgaatgttcttgccacctg

SEQ ID NO: 1158112 - DNA, 25 bp, Homo sapien
cacgctgcagggtcttacagagagc

SEQ ID NO: 1158113 - DNA, 25 bp, Homo sapien
catcagggatgtcttgtaagaagtc

SEQ ID NO: 1158114 - DNA, 25 bp, Homo sapien
cctttgaggtcatatttgatatgca

SEQ ID NO: 1158115 - DNA, 25 bp, Homo sapien
atattatggattgacatcaagaggc

SEQ ID NO: 1158116 - DNA, 25 bp, Homo sapien
tatattatggattgacatcaagagg

SEQ ID NO: 1158117 - DNA, 25 bp, Homo sapien
tattatggattgacatcaagaggct

SEQ ID NO: 1158118 - DNA, 25 bp, Homo sapien
ctatattatggattgacatcaagag

SEQ ID NO: 1158119 - DNA, 25 bp, Homo sapien
ttcccacatatactataaacccgaa

SEQ ID NO: 1158120 - DNA, 25 bp, Homo sapien
ttaactcttgaacagctctccttcc

SEQ ID NO: 1158121 - DNA, 25 bp, Homo sapien
tgcagacatgcatttaagactataa

SEQ ID NO: 1158122 - DNA, 25 bp, Homo sapien
ccagccctaataaagttctaatata

SEQ ID NO: 1158123 - DNA, 25 bp, Homo sapien
tttactattccgggcagggatgcca

SEQ ID NO: 1158124 - DNA, 25 bp, Homo sapien
gtcaatgatgccaatataaagcaga

SEQ ID NO: 1158125 - DNA, 25 bp, Homo sapien
agcagaagcctttcccctttactat

SEQ ID NO: 1158126 - DNA, 25 bp, Homo sapien
gatgccaatataaagcagaagcctt

SEQ ID NO: 1158127 - DNA, 25 bp, Homo sapien
cagatggcatattctaccctggtgc

SEQ ID NO: 1158128 - DNA, 25 bp, Homo sapien
aactcactgttcttgcttccggaag

SEQ ID NO: 1158129 - DNA, 25 bp, Homo sapien
ggtgcttccaaggactgactcagct

SEQ ID NO: 1158130 - DNA, 25 bp, Homo sapien
taatgaagtaagtagccagactgca

SEQ ID NO: 1158131 - DNA, 25 bp, Homo sapien
tccgtcatgtaccagggctttccaa

SEQ ID NO: 1158132 - DNA, 25 bp, Homo sapien
tccaagagtgctccaacttcttaac

SEQ ID NO: 1158133 - DNA, 25 bp, Homo sapien
agagtgctccaacttcttaacaaac

SEQ ID NO: 1158134 - DNA, 25 bp, Homo sapien
gggctttccaagagtgctccaactt

SEQ ID NO: 1158135 - DNA, 25 bp, Homo sapien
gaagcctgggcgatgcactgagaca

SEQ ID NO: 1158136 - DNA, 25 bp, Homo sapien
tagaagcctgggcgatgcactgaga

SEQ ID NO: 1158137 - DNA, 25 bp, Homo sapien
agaagcctgggcgatgcactgagac

SEQ ID NO: 1158138 - DNA, 25 bp, Homo sapien
tatcccttaagactggcatgcctag

SEQ ID NO: 1158139 - DNA, 25 bp, Homo sapien
ggctggttccaaactatcgggctta

SEQ ID NO: 1158140 - DNA, 25 bp, Homo sapien
cgtgccgggccaagaaagataactc

SEQ ID NO: 1158141 - DNA, 25 bp, Homo sapien
ttggcagctccctaccagaggtgtc

SEQ ID NO: 1158142 - DNA, 25 bp, Homo sapien
cgccgagagaaagatgagccagacc

SEQ ID NO: 1158143 - DNA, 25 bp, Homo sapien
ctcgccgagagaaagatgagccaga

SEQ ID NO: 1158144 - DNA, 25 bp, Homo sapien
tgagccagaccgaaactttttggaa

SEQ ID NO: 1158145 - DNA, 25 bp, Homo sapien
ctgctcgccgagagaaagatgagcc

SEQ ID NO: 1158146 - DNA, 25 bp, Homo sapien
tggtaagtaatgcaggagttgccac

SEQ ID NO: 1158147 - DNA, 25 bp, Homo sapien
atggctggtaagtaatgcaggagtt

SEQ ID NO: 1158148 - DNA, 25 bp, Homo sapien
gtaagtaatgcaggagttgccactg

SEQ ID NO: 1158149 - DNA, 25 bp, Homo sapien
gctggtaagtaatgcaggagttgcc

SEQ ID NO: 1158150 - DNA, 25 bp, Homo sapien
acatcaggacgaccaaggtgaacgc

SEQ ID NO: 1158151 - DNA, 25 bp, Homo sapien
aggaataggcgagccctcactgatt

SEQ ID NO: 1158152 - DNA, 25 bp, Homo sapien
aaggtggagtctgaggtaaaacatc

SEQ ID NO: 1158153 - DNA, 25 bp, Homo sapien
gggtcaggaataggcgagccctcac

SEQ ID NO: 1158154 - DNA, 25 bp, Homo sapien
ttgtagttagcatttgcaaagtctc

SEQ ID NO: 1158155 - DNA, 25 bp, Homo sapien
ttagcatttgcaaagtctctccaac

SEQ ID NO: 1158156 - DNA, 25 bp, Homo sapien
tagttagcatttgcaaagtctctcc

SEQ ID NO: 1158157 - DNA, 25 bp, Homo sapien
cttgtagttagcatttgcaaagtct

SEQ ID NO: 1158158 - DNA, 25 bp, Homo sapien
cacttgtcagatagcccaggtgcca

SEQ ID NO: 1158159 - DNA, 25 bp, Homo sapien
gagaaatcttgagccagaggaccca

SEQ ID NO: 1158160 - DNA, 25 bp, Homo sapien
cagagagcagactatgacaggcagt

SEQ ID NO: 1158161 - DNA, 25 bp, Homo sapien
ctaacgctacaatgggatgagaccc

SEQ ID NO: 1158162 - DNA, 25 bp, Homo sapien
tacaaaatagagaccactagttccc

SEQ ID NO: 1158163 - DNA, 25 bp, Homo sapien
tctagagggtagagccaagaaccac

SEQ ID NO: 1158164 - DNA, 25 bp, Homo sapien
ctttcaaccgaaaaacagagtctgt

SEQ ID NO: 1158165 - DNA, 25 bp, Homo sapien
gccatcttggatcaaaaaggacaga

SEQ ID NO: 1158166 - DNA, 25 bp, Homo sapien
gggattataggcacaaatcaccaca

SEQ ID NO: 1158167 - DNA, 25 bp, Homo sapien
ttataggcacaaatcaccacacctg

SEQ ID NO: 1158168 - DNA, 25 bp, Homo sapien
cacacctggctaatttttctatttt

SEQ ID NO: 1158169 - DNA, 25 bp, Homo sapien
atttttctatttttagtacagatgg

SEQ ID NO: 1158170 - DNA, 25 bp, Homo sapien
tgaactctgactctgcaacttcaag

SEQ ID NO: 1158171 - DNA, 25 bp, Homo sapien
tataccttgcaaaacgttcacctcc

SEQ ID NO: 1158172 - DNA, 25 bp, Homo sapien
taccttgcaaaacgttcacctccca

SEQ ID NO: 1158173 - DNA, 25 bp, Homo sapien
aggccatcagtgatcctctttatac

SEQ ID NO: 1158174 - DNA, 25 bp, Homo sapien
ttataccttgcaaaacgttcacctc

SEQ ID NO: 1158175 - DNA, 25 bp, Homo sapien
gagtatgagattaagcagaaatgga

SEQ ID NO: 1158176 - DNA, 25 bp, Homo sapien
agaaatggaattcaagcgttaagaa

SEQ ID NO: 1158177 - DNA, 25 bp, Homo sapien
gaaatggaattcaagcgttaagaaa

SEQ ID NO: 1158178 - DNA, 25 bp, Homo sapien
atgtggagtatgagattaagcagaa

SEQ ID NO: 1158179 - DNA, 25 bp, Homo sapien
agggctgacatcttgggatcacaga

SEQ ID NO: 1158180 - DNA, 25 bp, Homo sapien
cagagatggcagaatcttgttccag

SEQ ID NO: 1158181 - DNA, 25 bp, Homo sapien
acatcttgggatcacagagatggca

SEQ ID NO: 1158182 - DNA, 25 bp, Homo sapien
ttccaggtcttctgaggctttgcgc

SEQ ID NO: 1158183 - DNA, 25 bp, Homo sapien
ggataaagattaccccatgtcccac

SEQ ID NO: 1158184 - DNA, 25 bp, Homo sapien
cacttctggagttctgatctgaaaa

SEQ ID NO: 1158185 - DNA, 25 bp, Homo sapien
gggaactctacgaataggcatcttg

SEQ ID NO: 1158186 - DNA, 25 bp, Homo sapien
cactaaggcccattcatgaggaaga

SEQ ID NO: 1158187 - DNA, 25 bp, Homo sapien
cacagatatggactgtctgttaaac

SEQ ID NO: 1158188 - DNA, 25 bp, Homo sapien
tgtctgttaaacagacagaagtgtc

SEQ ID NO: 1158189 - DNA, 25 bp, Homo sapien
tgctggcctcacagatatggactgt

SEQ ID NO: 1158190 - DNA, 25 bp, Homo sapien
tatttgctggcctcacagatatgga

SEQ ID NO: 1158191 - DNA, 25 bp, Homo sapien
atgacctcaccaaggcaagaatctg

SEQ ID NO: 1158192 - DNA, 25 bp, Homo sapien
tgacctcaccaaggcaagaatctgc

SEQ ID NO: 1158193 - DNA, 25 bp, Homo sapien
gggtatgggctaacatattatcaag

SEQ ID NO: 1158194 - DNA, 25 bp, Homo sapien
taacatattatcaaggcagggtggg

SEQ ID NO: 1158195 - DNA, 25 bp, Homo sapien
tatgggctaacatattatcaaggca

SEQ ID NO: 1158196 - DNA, 25 bp, Homo sapien
gggctaacatattatcaaggcaggg

SEQ ID NO: 1158197 - DNA, 25 bp, Homo sapien
aactgagcctgggtggtggagtagg

SEQ ID NO: 1158198 - DNA, 25 bp, Homo sapien
gggtgagcagatggtatatgaaaaa

SEQ ID NO: 1158199 - DNA, 25 bp, Homo sapien
agggtgagcagatggtatatgaaaa

SEQ ID NO: 1158200 - DNA, 25 bp, Homo sapien
gcaacatgaacaaaactgagcctgg

SEQ ID NO: 1158201 - DNA, 25 bp, Homo sapien
gagggaatcactagggccagctaac

SEQ ID NO: 1158202 - DNA, 25 bp, Homo sapien
aaaggagccttagctcaacctcaca

SEQ ID NO: 1158203 - DNA, 25 bp, Homo sapien
tgtctagtttcctatcaaaggagcc

SEQ ID NO: 1158204 - DNA, 25 bp, Homo sapien
gatcttctaagagtgacgccctagg

SEQ ID NO: 1158205 - DNA, 25 bp, Homo sapien
cggcctaacaacaactcctccaatt

SEQ ID NO: 1158206 - DNA, 25 bp, Homo sapien
gacggcctaacaacaactcctccaa

SEQ ID NO: 1158207 - DNA, 25 bp, Homo sapien
ggacggcctaacaacaactcctcca

SEQ ID NO: 1158208 - DNA, 25 bp, Homo sapien
gcctaacaacaactcctccaattgg

SEQ ID NO: 1158209 - DNA, 25 bp, Homo sapien
cggggccagggccgcctctcgccca

SEQ ID NO: 1158210 - DNA, 25 bp, Homo sapien
ggggccagggccgcctctcgcccat

SEQ ID NO: 1158211 - DNA, 25 bp, Homo sapien
ctccggggccagggccgcctctcgc

SEQ ID NO: 1158212 - DNA, 25 bp, Homo sapien
tccggggccagggccgcctctcgcc

SEQ ID NO: 1158213 - DNA, 25 bp, Homo sapien
gggtagtattcaggcacaggttcaa

SEQ ID NO: 1158214 - DNA, 25 bp, Homo sapien
tagggtagtattcaggcacaggttc

SEQ ID NO: 1158215 - DNA, 25 bp, Homo sapien
ctgtctagggtagtattcaggcaca

SEQ ID NO: 1158216 - DNA, 25 bp, Homo sapien
tctagggtagtattcaggcacaggt

SEQ ID NO: 1158217 - DNA, 25 bp, Homo sapien
tgggataacaggcatgcaaccacca

SEQ ID NO: 1158218 - DNA, 25 bp, Homo sapien
caccatacccggctaattttgtatt

SEQ ID NO: 1158219 - DNA, 25 bp, Homo sapien
ggttggtctcaaactcccaacctca

SEQ ID NO: 1158220 - DNA, 25 bp, Homo sapien
gataacaggcatgcaaccaccatac

SEQ ID NO: 1158221 - DNA, 25 bp, Homo sapien
gtaagaagtctccattccgcatata

SEQ ID NO: 1158222 - DNA, 25 bp, Homo sapien
aagaagtctccattccgcatatact

SEQ ID NO: 1158223 - DNA, 25 bp, Homo sapien
gaagtctccattccgcatatactca

SEQ ID NO: 1158224 - DNA, 25 bp, Homo sapien
ctggtgggtaagaagtctccattcc

SEQ ID NO: 1158225 - DNA, 25 bp, Homo sapien
tcagggttgctgcgggtctttgaat

SEQ ID NO: 1158226 - DNA, 25 bp, Homo sapien
gttgctgcgggtctttgaatgacaa

SEQ ID NO: 1158227 - DNA, 25 bp, Homo sapien
gggttgctgcgggtctttgaatgac

SEQ ID NO: 1158228 - DNA, 25 bp, Homo sapien
cagggttgctgcgggtctttgaatg

SEQ ID NO: 1158229 - DNA, 25 bp, Homo sapien
ctactgagtcccctcctcctctgtc

SEQ ID NO: 1158230 - DNA, 25 bp, Homo sapien
agtcccctcctcctctgtcccccat

SEQ ID NO: 1158231 - DNA, 25 bp, Homo sapien
tcccctcctcctctgtcccccatac

SEQ ID NO: 1158232 - DNA, 25 bp, Homo sapien
tgagtcccctcctcctctgtccccc

SEQ ID NO: 1158233 - DNA, 25 bp, Homo sapien
cagtctaggaaggtgatgggcaaaa

SEQ ID NO: 1158234 - DNA, 25 bp, Homo sapien
gaagagtagcatgtaacaaccaccc

SEQ ID NO: 1158235 - DNA, 25 bp, Homo sapien
aaacagaaatttcaccccaggagat

SEQ ID NO: 1158236 - DNA, 25 bp, Homo sapien
caggagatttagcttccgtactaca

SEQ ID NO: 1158237 - DNA, 25 bp, Homo sapien
aaagacctggataataaccattatt

SEQ ID NO: 1158238 - DNA, 25 bp, Homo sapien
aagacctggataataaccattattt

SEQ ID NO: 1158239 - DNA, 25 bp, Homo sapien
agacctggataataaccattatttc

SEQ ID NO: 1158240 - DNA, 25 bp, Homo sapien
tcaggtcagcacaagtacctctaaa

SEQ ID NO: 1158241 - DNA, 25 bp, Homo sapien
gaattcaggtcagcacaagtacctc

SEQ ID NO: 1158242 - DNA, 25 bp, Homo sapien
ttcaggtcagcacaagtacctctaa

SEQ ID NO: 1158243 - DNA, 25 bp, Homo sapien
aattcaggtcagcacaagtacctct

SEQ ID NO: 1158244 - DNA, 25 bp, Homo sapien
ccttgggttggacagtatgtagctt

SEQ ID NO: 1158245 - DNA, 25 bp, Homo sapien
atgggccacgcggatgcccgtgcag

SEQ ID NO: 1158246 - DNA, 25 bp, Homo sapien
tatgtagcttggacaggatacggcc

SEQ ID NO: 1158247 - DNA, 25 bp, Homo sapien
cggatgcccgtgcagaaggtgatct

SEQ ID NO: 1158248 - DNA, 25 bp, Homo sapien
attcttgccttgtcggtgcttcaga

SEQ ID NO: 1158249 - DNA, 25 bp, Homo sapien
atgatgcgcatcttgtgattcttgc

SEQ ID NO: 1158250 - DNA, 25 bp, Homo sapien
cttgccttgtcggtgcttcagagcc

SEQ ID NO: 1158251 - DNA, 25 bp, Homo sapien
tccactgggcttcccacaaaggcaa

SEQ ID NO: 1158252 - DNA, 25 bp, Homo sapien
cagaaatctattgacctccccaagg

SEQ ID NO: 1158253 - DNA, 25 bp, Homo sapien
ccaaagtgatgagcctgatgcctct

SEQ ID NO: 1158254 - DNA, 25 bp, Homo sapien
ggacccgccgcataaaagcatacag

SEQ ID NO: 1158255 - DNA, 25 bp, Homo sapien
aggttctcctgagggctggaagacc

SEQ ID NO: 1158256 - DNA, 25 bp, Homo sapien
tcttccccaaaattgataatgtcaa

SEQ ID NO: 1158257 - DNA, 25 bp, Homo sapien
ttccccaaaattgataatgtcaaca

SEQ ID NO: 1158258 - DNA, 25 bp, Homo sapien
ccccaaaattgataatgtcaacatt

SEQ ID NO: 1158259 - DNA, 25 bp, Homo sapien
tccccaaaattgataatgtcaacat

SEQ ID NO: 1158260 - DNA, 25 bp, Homo sapien
acagtacccgcactcctcagggtta

SEQ ID NO: 1158261 - DNA, 25 bp, Homo sapien
tgatgcccttcttcaggccttgctc

SEQ ID NO: 1158262 - DNA, 25 bp, Homo sapien
tctgcactactctgccacagtaccc

SEQ ID NO: 1158263 - DNA, 25 bp, Homo sapien
actcctcagggttaaggaccattct

SEQ ID NO: 1158264 - DNA, 25 bp, Homo sapien
tctttgccattcaacgtgtttacaa

SEQ ID NO: 1158265 - DNA, 25 bp, Homo sapien
tactccaaattcaaagtcactggca

SEQ ID NO: 1158266 - DNA, 25 bp, Homo sapien
aggatcagcactgggatctactcca

SEQ ID NO: 1158267 - DNA, 25 bp, Homo sapien
gcactgggatctactccaaattcaa

SEQ ID NO: 1158268 - DNA, 25 bp, Homo sapien
gctcttccatagatacacgaagggc

SEQ ID NO: 1158269 - DNA, 25 bp, Homo sapien
ttcagtcccagtcgtagcaatcccg

SEQ ID NO: 1158270 - DNA, 25 bp, Homo sapien
gccgctgctcttccatagatacacg

SEQ ID NO: 1158271 - DNA, 25 bp, Homo sapien
agtcgtagcaatcccggcctcagca

SEQ ID NO: 1158272 - DNA, 25 bp, Homo sapien
cgcagtcccaggacttcggattcca

SEQ ID NO: 1158273 - DNA, 25 bp, Homo sapien
gcagtcccaggacttcggattccac

SEQ ID NO: 1158274 - DNA, 25 bp, Homo sapien
gcagtgcctacacccagctttcaat

SEQ ID NO: 1158275 - DNA, 25 bp, Homo sapien
agtgcctacacccagctttcaatgt

SEQ ID NO: 1158276 - DNA, 25 bp, Homo sapien
ctgcagtgcctacacccagctttca

SEQ ID NO: 1158277 - DNA, 25 bp, Homo sapien
tctccctgcagtgcctacacccagc

SEQ ID NO: 1158278 - DNA, 25 bp, Homo sapien
aaaagaggagcagggtagaattggt

SEQ ID NO: 1158279 - DNA, 25 bp, Homo sapien
tcccacatattcctaccctgtcaga

SEQ ID NO: 1158280 - DNA, 25 bp, Homo sapien
aattggtgccatatccacacaggcc

SEQ ID NO: 1158281 - DNA, 25 bp, Homo sapien
gagcagggtagaattggtgccatat

SEQ ID NO: 1158282 - DNA, 25 bp, Homo sapien
tcatactgcttaggtcaggaagccc

SEQ ID NO: 1158283 - DNA, 25 bp, Homo sapien
tgcggccaaactcttgctggctgat

SEQ ID NO: 1158284 - DNA, 25 bp, Homo sapien
ggtcatcttcagcagggcatcgtct

SEQ ID NO: 1158285 - DNA, 25 bp, Homo sapien
tctgcatggcataagcaatctgctc

SEQ ID NO: 1158286 - DNA, 25 bp, Homo sapien
ggtcagtctgttcagttacacttcc

SEQ ID NO: 1158287 - DNA, 25 bp, Homo sapien
gtctgttcagttacacttcctcacc

SEQ ID NO: 1158288 - DNA, 25 bp, Homo sapien
tgaggaagagaggtcagtctgttca

SEQ ID NO: 1158289 - DNA, 25 bp, Homo sapien
tgcctaggcaccacccaggctctgg

SEQ ID NO: 1158290 - DNA, 25 bp, Homo sapien
tggcatcaatgtctgctgattccgc

SEQ ID NO: 1158291 - DNA, 25 bp, Homo sapien
cagatgtgtccatagctgagctggc

SEQ ID NO: 1158292 - DNA, 25 bp, Homo sapien
tagctgagctggcatcaatgtctgc

SEQ ID NO: 1158293 - DNA, 25 bp, Homo sapien
gagctggcatcaatgtctgctgatt

SEQ ID NO: 1158294 - DNA, 25 bp, Homo sapien
gctatggtagaaatactcccagccc

SEQ ID NO: 1158295 - DNA, 25 bp, Homo sapien
gagggatgaggatctaaattcaagg

SEQ ID NO: 1158296 - DNA, 25 bp, Homo sapien
tcaaaggacttagctatggtagaaa

SEQ ID NO: 1158297 - DNA, 25 bp, Homo sapien
ggatgaggatctaaattcaaggact

SEQ ID NO: 1158298 - DNA, 25 bp, Homo sapien
tgctctcaagacacccagttctcct

SEQ ID NO: 1158299 - DNA, 25 bp, Homo sapien
gaagacatcctagagaactgcccag

SEQ ID NO: 1158300 - DNA, 25 bp, Homo sapien
gacatcctagagaactgcccaggct

SEQ ID NO: 1158301 - DNA, 25 bp, Homo sapien
tcctgggaagacatcctagagaact

SEQ ID NO: 1158302 - DNA, 25 bp, Homo sapien
tgctgagaactctgttaattgagct

SEQ ID NO: 1158303 - DNA, 25 bp, Homo sapien
gaggggcctgctgagaactctgtta

SEQ ID NO: 1158304 - DNA, 25 bp, Homo sapien
gcctgctgagaactctgttaattga

SEQ ID NO: 1158305 - DNA, 25 bp, Homo sapien
gggcctgctgagaactctgttaatt

SEQ ID NO: 1158306 - DNA, 25 bp, Homo sapien
aatcctttatacagcatgaatgcag

SEQ ID NO: 1158307 - DNA, 25 bp, Homo sapien
taagcaggtgttaaggacaggagca

SEQ ID NO: 1158308 - DNA, 25 bp, Homo sapien
tatggagcggcaggaagtaagcagg

SEQ ID NO: 1158309 - DNA, 25 bp, Homo sapien
tgggcacctctggtcgacgtaagga

SEQ ID NO: 1158310 - DNA, 25 bp, Homo sapien
ggcttcattgttgggatccacacct

SEQ ID NO: 1158311 - DNA, 25 bp, Homo sapien
taaccctatattccgtgcttcccat

SEQ ID NO: 1158312 - DNA, 25 bp, Homo sapien
atattccgtgcttcccatgcagtcc

SEQ ID NO: 1158313 - DNA, 25 bp, Homo sapien
tctaaccctatattccgtgcttccc

SEQ ID NO: 1158314 - DNA, 25 bp, Homo sapien
cctatattccgtgcttcccatgcag

SEQ ID NO: 1158315 - DNA, 25 bp, Homo sapien
cttggtctgcgtcctcccctcgccc

SEQ ID NO: 1158316 - DNA, 25 bp, Homo sapien
gtgacctcttgcacagtgccctgca

SEQ ID NO: 1158317 - DNA, 25 bp, Homo sapien
acagtgccctgcacttttgccccat

SEQ ID NO: 1158318 - DNA, 25 bp, Homo sapien
caggtgacctcttgcacagtgccct

SEQ ID NO: 1158319 - DNA, 25 bp, Homo sapien
aggtgacctcttgcacagtgccctg

SEQ ID NO: 1158320 - DNA, 25 bp, Homo sapien
tactggccgctcgaagcttgaagct

SEQ ID NO: 1158321 - DNA, 25 bp, Homo sapien
tgaagatacctctccccattggctg

SEQ ID NO: 1158322 - DNA, 25 bp, Homo sapien
cactttcgcgaatgtaaggaaccca

SEQ ID NO: 1158323 - DNA, 25 bp, Homo sapien
tgggttggccctaaatactgccgct

SEQ ID NO: 1158324 - DNA, 25 bp, Homo sapien
ctggtgcgggccgagacccggcggt

SEQ ID NO: 1158325 - DNA, 25 bp, Homo sapien
ccggcggtctctaccccgctccagc

SEQ ID NO: 1158326 - DNA, 25 bp, Homo sapien
cgcggccgccgctacttcctgcttc

SEQ ID NO: 1158327 - DNA, 25 bp, Homo sapien
ccgcggccgccgctacttcctgctt

SEQ ID NO: 1158328 - DNA, 25 bp, Homo sapien
catccgccccaatggatggaggcgg

SEQ ID NO: 1158329 - DNA, 25 bp, Homo sapien
gcccatccgccccaatggatggagg

SEQ ID NO: 1158330 - DNA, 25 bp, Homo sapien
aacaggccaggagtttcgcccatcc

SEQ ID NO: 1158331 - DNA, 25 bp, Homo sapien
ccggctacggactgtgcttacaaca

SEQ ID NO: 1158332 - DNA, 25 bp, Homo sapien
tgcaggttctgctccggcctggccc

SEQ ID NO: 1158333 - DNA, 25 bp, Homo sapien
tggggacccaggactacacaggata

SEQ ID NO: 1158334 - DNA, 25 bp, Homo sapien
gacccaggactacacaggatagggt

SEQ ID NO: 1158335 - DNA, 25 bp, Homo sapien
gggacccaggactacacaggatagg

SEQ ID NO: 1158336 - DNA, 25 bp, Homo sapien
cccaggactacacaggatagggtgg

SEQ ID NO: 1158337 - DNA, 25 bp, Homo sapien
ggcgtgcgaagcgaaggccgggcct

SEQ ID NO: 1158338 - DNA, 25 bp, Homo sapien
agccaggccaggccctttgggagct

SEQ ID NO: 1158339 - DNA, 25 bp, Homo sapien
cgaagcgaaggccgggcctcagcca

SEQ ID NO: 1158340 - DNA, 25 bp, Homo sapien
ccctttgggagctgctgcgcagcac

SEQ ID NO: 1158341 - DNA, 25 bp, Homo sapien
tagcagacggaattaagtccctgcc

SEQ ID NO: 1158342 - DNA, 25 bp, Homo sapien
gctggcggcgattaggttgaggcca

SEQ ID NO: 1158343 - DNA, 25 bp, Homo sapien
gtccctgccatctgccgagggctgg

SEQ ID NO: 1158344 - DNA, 25 bp, Homo sapien
taggttgaggccaagctgggtagca

SEQ ID NO: 1158345 - DNA, 25 bp, Homo sapien
cagagagcacaagtgatctatgtat

SEQ ID NO: 1158346 - DNA, 25 bp, Homo sapien
tagggttattctgagcataatacaa

SEQ ID NO: 1158347 - DNA, 25 bp, Homo sapien
ccaagaatacgatttactattccag

SEQ ID NO: 1158348 - DNA, 25 bp, Homo sapien
ttgctaatgtaagaatcccaccaag

SEQ ID NO: 1158349 - DNA, 25 bp, Homo sapien
gggcgtgcagtacaagcaagtttct

SEQ ID NO: 1158350 - DNA, 25 bp, Homo sapien
tgatcctcgttcagctttatcaggg

SEQ ID NO: 1158351 - DNA, 25 bp, Homo sapien
ttatcaggggcgtgcagtacaagca

SEQ ID NO: 1158352 - DNA, 25 bp, Homo sapien
cttaagaaatgatcctcgttcagct

SEQ ID NO: 1158353 - DNA, 25 bp, Homo sapien
ttaaggactcattcatgtccgcatg

SEQ ID NO: 1158354 - DNA, 25 bp, Homo sapien
catgatgttctaggtttaaggactc

SEQ ID NO: 1158355 - DNA, 25 bp, Homo sapien
tcagtgagcattctggtggaaacca

SEQ ID NO: 1158356 - DNA, 25 bp, Homo sapien
gaacagggaagggtaatagagctca

SEQ ID NO: 1158357 - DNA, 25 bp, Homo sapien
tacagtccttgtgatattcccgcag

SEQ ID NO: 1158358 - DNA, 25 bp, Homo sapien
tccttcaagggctgacagacgggca

SEQ ID NO: 1158359 - DNA, 25 bp, Homo sapien
acttgttgaagaagaccaggcggcg

SEQ ID NO: 1158360 - DNA, 25 bp, Homo sapien
gatccgcaccttaagaggcctagag

SEQ ID NO: 1158361 - DNA, 25 bp, Homo sapien
aagctgcagcgattggggagcatca

SEQ ID NO: 1158362 - DNA, 25 bp, Homo sapien
ggtgggcgctgaagctgcagcgatt

SEQ ID NO: 1158363 - DNA, 25 bp, Homo sapien
cgattcttatgcatgcgctggtggg

SEQ ID NO: 1158364 - DNA, 25 bp, Homo sapien
tacacggcgagagacgtgcagacag

SEQ ID NO: 1158365 - DNA, 25 bp, Homo sapien
tctatggaggaagggtccgaggcac

SEQ ID NO: 1158366 - DNA, 25 bp, Homo sapien
ctacagttctatggaggaagggtcc

SEQ ID NO: 1158367 - DNA, 25 bp, Homo sapien
accctacagttctatggaggaaggg

SEQ ID NO: 1158368 - DNA, 25 bp, Homo sapien
ttctatggaggaagggtccgaggca

SEQ ID NO: 1158369 - DNA, 25 bp, Homo sapien
aaggcaggacgtactatctcagggt

SEQ ID NO: 1158370 - DNA, 25 bp, Homo sapien
tctcagggttgagtctggcaaaaca

SEQ ID NO: 1158371 - DNA, 25 bp, Homo sapien
caagaaggaaatcagtagtggagca

SEQ ID NO: 1158372 - DNA, 25 bp, Homo sapien
ctctgggactgggtagactacaaga

SEQ ID NO: 1158373 - DNA, 25 bp, Homo sapien
atgggcacttggcccagacttgaag

SEQ ID NO: 1158374 - DNA, 25 bp, Homo sapien
tgggacttgatggagttcacacccc

SEQ ID NO: 1158375 - DNA, 25 bp, Homo sapien
cttgtggaaaacctcgcagtgcgac

SEQ ID NO: 1158376 - DNA, 25 bp, Homo sapien
cctcgcagtgcgacgtctggatgtg

SEQ ID NO: 1158377 - DNA, 25 bp, Homo sapien
aagtgaggacagtgcagacatcagg

SEQ ID NO: 1158378 - DNA, 25 bp, Homo sapien
gtgaggacagtgcagacatcaggca

SEQ ID NO: 1158379 - DNA, 25 bp, Homo sapien
catggtccttttttgggcaaagagc

SEQ ID NO: 1158380 - DNA, 25 bp, Homo sapien
gacaagacgggcacttaaagacact

SEQ ID NO: 1158381 - DNA, 25 bp, Homo sapien
cttgagatgttccagcatggtcctt

SEQ ID NO: 1158382 - DNA, 25 bp, Homo sapien
tgaagactgtgtcgcacatggcgca

SEQ ID NO: 1158383 - DNA, 25 bp, Homo sapien
ggtcagtacagctaagcacccattc

SEQ ID NO: 1158384 - DNA, 25 bp, Homo sapien
cagccccaggtcagtacagctaagc

SEQ ID NO: 1158385 - DNA, 25 bp, Homo sapien
tgtgagaggagacaagggaggttgc

SEQ ID NO: 1158386 - DNA, 25 bp, Homo sapien
ccaggtcagtacagctaagcaccca

SEQ ID NO: 1158387 - DNA, 25 bp, Homo sapien
caggggagctgggtacttcctcctc

SEQ ID NO: 1158388 - DNA, 25 bp, Homo sapien
agttcccgccgaggccgtttggctg

SEQ ID NO: 1158389 - DNA, 25 bp, Homo sapien
tgaggcctttgctccctagttcccg

SEQ ID NO: 1158390 - DNA, 25 bp, Homo sapien
atgaagacgactcctcagtagcagg

SEQ ID NO: 1158391 - DNA, 25 bp, Homo sapien
cttcatgtgggccacgtattcatca

SEQ ID NO: 1158392 - DNA, 25 bp, Homo sapien
tcatgtgggccacgtattcatcacg

SEQ ID NO: 1158393 - DNA, 25 bp, Homo sapien
ttcatgtgggccacgtattcatcac

SEQ ID NO: 1158394 - DNA, 25 bp, Homo sapien
cccccagcccatggtactccccttg

SEQ ID NO: 1158395 - DNA, 25 bp, Homo sapien
tccaggaccccgtccccactgtcac

SEQ ID NO: 1158396 - DNA, 25 bp, Homo sapien
tgtcacactggcagtcccaatgctg

SEQ ID NO: 1158397 - DNA, 25 bp, Homo sapien
cccagcccatggtactccccttggg

SEQ ID NO: 1158398 - DNA, 25 bp, Homo sapien
cggagcagaaggagcgctcacacag

SEQ ID NO: 1158399 - DNA, 25 bp, Homo sapien
ggcgacaggggaactttttcactga

SEQ ID NO: 1158400 - DNA, 25 bp, Homo sapien
ggtaaactcgcttgatgccctcgtg

SEQ ID NO: 1158401 - DNA, 25 bp, Homo sapien
ctcgtgattaactctgacatggcgc

SEQ ID NO: 1158402 - DNA, 25 bp, Homo sapien
aggacaggatggcagcagcggcaca

SEQ ID NO: 1158403 - DNA, 25 bp, Homo sapien
ggtgcgttttccctctgtgcaatac

SEQ ID NO: 1158404 - DNA, 25 bp, Homo sapien
ttctctaggatcaggcggctgctga

SEQ ID NO: 1158405 - DNA, 25 bp, Homo sapien
ggctctggcactggaaccccgagcc

SEQ ID NO: 1158406 - DNA, 25 bp, Homo sapien
cgtgccggacctggacatgtttctc

SEQ ID NO: 1158407 - DNA, 25 bp, Homo sapien
tttcccactcaaagccctagcacag

SEQ ID NO: 1158408 - DNA, 25 bp, Homo sapien
tcaaagccctagcacagcaggccgg

SEQ ID NO: 1158409 - DNA, 25 bp, Homo sapien
tccagtttcccactcaaagccctag

SEQ ID NO: 1158410 - DNA, 25 bp, Homo sapien
agtttcccactcaaagccctagcac

SEQ ID NO: 1158411 - DNA, 25 bp, Homo sapien
tgaagaaaagtggaagaaactgggc

SEQ ID NO: 1158412 - DNA, 25 bp, Homo sapien
ctgaagaaaagtggaagaaactggg

SEQ ID NO: 1158413 - DNA, 25 bp, Homo sapien
tggaagaaactgggccttaccacca

SEQ ID NO: 1158414 - DNA, 25 bp, Homo sapien
tgtcgtgctgtcaggctcctcactg

SEQ ID NO: 1158415 - DNA, 25 bp, Homo sapien
tcttgaggtttagagggctgtcgca

SEQ ID NO: 1158416 - DNA, 25 bp, Homo sapien
tggctgatgaaacggtgtcggctca

SEQ ID NO: 1158417 - DNA, 25 bp, Homo sapien
gaccttacaggtcagtgggcctcca

SEQ ID NO: 1158418 - DNA, 25 bp, Homo sapien
ccaaagggaggttgcaaataactag

SEQ ID NO: 1158419 - DNA, 25 bp, Homo sapien
tggagaggtgtgtccatccatgaca

SEQ ID NO: 1158420 - DNA, 25 bp, Homo sapien
gaatggagggtccactctactagga

SEQ ID NO: 1158421 - DNA, 25 bp, Homo sapien
caggcagcagtagggaaaaccaggc

SEQ ID NO: 1158422 - DNA, 25 bp, Homo sapien
tcatgtggtaactgcgagagcttgc

SEQ ID NO: 1158423 - DNA, 25 bp, Homo sapien
caggttgtcgccgttgctcaggatc

SEQ ID NO: 1158424 - DNA, 25 bp, Homo sapien
tactgagggtactggcctagccatg

SEQ ID NO: 1158425 - DNA, 25 bp, Homo sapien
tgccgctcggaaacacatggacaag

SEQ ID NO: 1158426 - DNA, 25 bp, Homo sapien
aatctagccaacaaggccgaggcag

SEQ ID NO: 1158427 - DNA, 25 bp, Homo sapien
tcaatgctgtgtccatccatcaggt

SEQ ID NO: 1158428 - DNA, 25 bp, Homo sapien
tgaggcattcctcagtgcacagcgc

SEQ ID NO: 1158429 - DNA, 25 bp, Homo sapien
gattacttcctacaggagcacggca

SEQ ID NO: 1158430 - DNA, 25 bp, Homo sapien
tagtggcatgattgaaccagtggtc

SEQ ID NO: 1158431 - DNA, 25 bp, Homo sapien
tcaccccaccttatggtcattttgg

SEQ ID NO: 1158432 - DNA, 25 bp, Homo sapien
aactcttgggctttccagatacagc

SEQ ID NO: 1158433 - DNA, 25 bp, Homo sapien
tcagaatgagccgacaaaaggagag

SEQ ID NO: 1158434 - DNA, 25 bp, Homo sapien
tccagcctttctataactcttgggc

SEQ ID NO: 1158435 - DNA, 25 bp, Homo sapien
ccaaggacaaggtagatgggttctg

SEQ ID NO: 1158436 - DNA, 25 bp, Homo sapien
ggacgtgactcttcacccatggttg

SEQ ID NO: 1158437 - DNA, 25 bp, Homo sapien
tttgcgtgtatgaccagtgaggccc

SEQ ID NO: 1158438 - DNA, 25 bp, Homo sapien
actgctggctttgaccaccacgtgg

SEQ ID NO: 1158439 - DNA, 25 bp, Homo sapien
ttctggcccaccagggaataatggg

SEQ ID NO: 1158440 - DNA, 25 bp, Homo sapien
ccatgggagatacagtagtggagcc

SEQ ID NO: 1158441 - DNA, 25 bp, Homo sapien
tccctgctaagtgtcatcacggagg

SEQ ID NO: 1158442 - DNA, 25 bp, Homo sapien
gaactatcagtgattgaccctgagg

SEQ ID NO: 1158443 - DNA, 25 bp, Homo sapien
tgcctcaggccgttcaggacagaag

SEQ ID NO: 1158444 - DNA, 25 bp, Homo sapien
ttctgaaggccggagcaagttttga

SEQ ID NO: 1158445 - DNA, 25 bp, Homo sapien
tgacacctccctcgagtttcaggga

SEQ ID NO: 1158446 - DNA, 25 bp, Homo sapien
tttcccgtgggcttcatgtgttctc

SEQ ID NO: 1158447 - DNA, 25 bp, Homo sapien
aggtaagctactcctccttcatgag

SEQ ID NO: 1158448 - DNA, 25 bp, Homo sapien
atggaacccgggagcggtcgctgct

SEQ ID NO: 1158449 - DNA, 25 bp, Homo sapien
gcggccgctgtcagggaagcgcagg

SEQ ID NO: 1158450 - DNA, 25 bp, Homo sapien
aggcggcagtgtcggcagtccaacc

SEQ ID NO: 1158451 - DNA, 25 bp, Homo sapien
catactaatgagtacctatgaccca

SEQ ID NO: 1158452 - DNA, 25 bp, Homo sapien
tgtcctctacatagggtagcttctg

SEQ ID NO: 1158453 - DNA, 25 bp, Homo sapien
tgtcagggaatcttggttcttccca

SEQ ID NO: 1158454 - DNA, 25 bp, Homo sapien
tattgaagacctactttgtcctcta

SEQ ID NO: 1158455 - DNA, 25 bp, Homo sapien
gaatgcagaccctccagatgtatcc

SEQ ID NO: 1158456 - DNA, 25 bp, Homo sapien
tcaggcggcaccaatgagaaaggaa

SEQ ID NO: 1158457 - DNA, 25 bp, Homo sapien
tacgtgtcaggacttaggactgcgg

SEQ ID NO: 1158458 - DNA, 25 bp, Homo sapien
aagctagttctgtggtcaggcggca

SEQ ID NO: 1158459 - DNA, 25 bp, Homo sapien
aatatataggttagggatcttttgg

SEQ ID NO: 1158460 - DNA, 25 bp, Homo sapien
aaggtaggaatgggctaagtatgat

SEQ ID NO: 1158461 - DNA, 25 bp, Homo sapien
taggaatgggctaagtatgatgaat

SEQ ID NO: 1158462 - DNA, 25 bp, Homo sapien
gtatgatgaatatataggttaggga

SEQ ID NO: 1158463 - DNA, 25 bp, Homo sapien
cttgtgttggaaggcgactgttcag

SEQ ID NO: 1158464 - DNA, 25 bp, Homo sapien
gacgcccagcgcatgagttccgcta

SEQ ID NO: 1158465 - DNA, 25 bp, Homo sapien
cagaaaaagattgtagctgtatttt

SEQ ID NO: 1158466 - DNA, 25 bp, Homo sapien
catgtgcacgtgcccggaatctggg

SEQ ID NO: 1158467 - DNA, 25 bp, Homo sapien
aaattccagggttcaccgactgcag

SEQ ID NO: 1158468 - DNA, 25 bp, Homo sapien
gcagctctgaggaccgtagactaaa

SEQ ID NO: 1158469 - DNA, 25 bp, Homo sapien
caggtctgttgcgagtaagtgtgtc

SEQ ID NO: 1158470 - DNA, 25 bp, Homo sapien
agtgtgtctgcaggttgtattaggc

SEQ ID NO: 1158471 - DNA, 25 bp, Homo sapien
cttggatgttggcacttagtacact

SEQ ID NO: 1158472 - DNA, 25 bp, Homo sapien
cattctggtaagagcaattgcccta

SEQ ID NO: 1158473 - DNA, 25 bp, Homo sapien
aaaagcttaaaattccactcagcaa

SEQ ID NO: 1158474 - DNA, 25 bp, Homo sapien
gttacagggagccttgggatttaca

SEQ ID NO: 1158475 - DNA, 25 bp, Homo sapien
cttagtcacggtagcagaaaaaatg

SEQ ID NO: 1158476 - DNA, 25 bp, Homo sapien
ttagtcacggtagcagaaaaaatga

SEQ ID NO: 1158477 - DNA, 25 bp, Homo sapien
tagtcacggtagcagaaaaaatgaa

SEQ ID NO: 1158478 - DNA, 25 bp, Homo sapien
atccatgaaggaatcgggagtggac

SEQ ID NO: 1158479 - DNA, 25 bp, Homo sapien
cggaatgcggtaaaactgtcctggg

SEQ ID NO: 1158480 - DNA, 25 bp, Homo sapien
tccgcgtgattggacctctgtaaag

SEQ ID NO: 1158481 - DNA, 25 bp, Homo sapien
tgcagacgccggatccatgaaggaa

SEQ ID NO: 1158482 - DNA, 25 bp, Homo sapien
ttgcggaaacgagccaaggagccgt

SEQ ID NO: 1158483 - DNA, 25 bp, Homo sapien
aaatcagcgtagtcgccagaggcac

SEQ ID NO: 1158484 - DNA, 25 bp, Homo sapien
ggagccgtaggatcccagcatgtct

SEQ ID NO: 1158485 - DNA, 25 bp, Homo sapien
gaacttaacgccgaggactgaggtc

SEQ ID NO: 1158486 - DNA, 25 bp, Homo sapien
cattttacacctaatgccaaaaact

SEQ ID NO: 1158487 - DNA, 25 bp, Homo sapien
gagagaattaagtcggggtctccac

SEQ ID NO: 1158488 - DNA, 25 bp, Homo sapien
tctctacttgggaaccactctcctg

SEQ ID NO: 1158489 - DNA, 25 bp, Homo sapien
attgcaaacacagatcgcccacctc

SEQ ID NO: 1158490 - DNA, 25 bp, Homo sapien
aggactatagctgtgtccatctccc

SEQ ID NO: 1158491 - DNA, 25 bp, Homo sapien
aatagctctaggactatagctgtgt

SEQ ID NO: 1158492 - DNA, 25 bp, Homo sapien
tagctctaggactatagctgtgtcc

SEQ ID NO: 1158493 - DNA, 25 bp, Homo sapien
tctaggactatagctgtgtccatct

SEQ ID NO: 1158494 - DNA, 25 bp, Homo sapien
gtacatggccctggtcagccatgaa

SEQ ID NO: 1158495 - DNA, 25 bp, Homo sapien
tacatggccctggtcagccatgaat

SEQ ID NO: 1158496 - DNA, 25 bp, Homo sapien
tccacaaagggttcatcttcgagcg

SEQ ID NO: 1158497 - DNA, 25 bp, Homo sapien
caaagggttcatcttcgagcgccgg

SEQ ID NO: 1158498 - DNA, 25 bp, Homo sapien
cacaaagggttcatcttcgagcgcc

SEQ ID NO: 1158499 - DNA, 25 bp, Homo sapien
aagggttcatcttcgagcgccggct

SEQ ID NO: 1158500 - DNA, 25 bp, Homo sapien
ctctctccatcagcatagcctccga

SEQ ID NO: 1158501 - DNA, 25 bp, Homo sapien
tctccatcagcatagcctccgatga

SEQ ID NO: 1158502 - DNA, 25 bp, Homo sapien
tctctccatcagcatagcctccgat

SEQ ID NO: 1158503 - DNA, 25 bp, Homo sapien
ctccatcagcatagcctccgatgac

SEQ ID NO: 1158504 - DNA, 25 bp, Homo sapien
atcttagctgaagaaggggaccatg

SEQ ID NO: 1158505 - DNA, 25 bp, Homo sapien
acaggacacaatgggtcaaaactca

SEQ ID NO: 1158506 - DNA, 25 bp, Homo sapien
gggtcaaaactcatttcaccttaga

SEQ ID NO: 1158507 - DNA, 25 bp, Homo sapien
gggtctgagttaaagtgggattcac

SEQ ID NO: 1158508 - DNA, 25 bp, Homo sapien
gggcttcataggctacaccaagcat

SEQ ID NO: 1158509 - DNA, 25 bp, Homo sapien
tgagccaagtatgcaccataaccag

SEQ ID NO: 1158510 - DNA, 25 bp, Homo sapien
gcgaaggggcttcataggctacacc

SEQ ID NO: 1158511 - DNA, 25 bp, Homo sapien
tgcaccataaccagtggccagcgaa

SEQ ID NO: 1158512 - DNA, 25 bp, Homo sapien
gaagaagttctagggtgtcctctct

SEQ ID NO: 1158513 - DNA, 25 bp, Homo sapien
actgactcccagtcatgtcatcttg

SEQ ID NO: 1158514 - DNA, 25 bp, Homo sapien
aaaccatctgcccagtaatagcgat

SEQ ID NO: 1158515 - DNA, 25 bp, Homo sapien
tctgcccagtaatagcgatcccagc

SEQ ID NO: 1158516 - DNA, 25 bp, Homo sapien
aataacaggctagttgtctcaaatc

SEQ ID NO: 1158517 - DNA, 25 bp, Homo sapien
gtctcaaatctatggtataaaaagc

SEQ ID NO: 1158518 - DNA, 25 bp, Homo sapien
gcattagagtgaaagatgacattct

SEQ ID NO: 1158519 - DNA, 25 bp, Homo sapien
gggatattgggctgaataacaggct

SEQ ID NO: 1158520 - DNA, 25 bp, Homo sapien
gcgggcctcggtctggcttagcact

SEQ ID NO: 1158521 - DNA, 25 bp, Homo sapien
cggttgtaagaacgggcatctcggt

SEQ ID NO: 1158522 - DNA, 25 bp, Homo sapien
tctcggtagtacagcactcgcatgc

SEQ ID NO: 1158523 - DNA, 25 bp, Homo sapien
gcgttctactaagtcgcgggcctcg

SEQ ID NO: 1158524 - DNA, 25 bp, Homo sapien
caggtggaggtcttccccaatgtga

SEQ ID NO: 1158525 - DNA, 25 bp, Homo sapien
agagcccgccaattaggttcccagc

SEQ ID NO: 1158526 - DNA, 25 bp, Homo sapien
ccagggattgcaagtagccagagcc

SEQ ID NO: 1158527 - DNA, 25 bp, Homo sapien
ttcttcaaagcatagagacccaggg

SEQ ID NO: 1158528 - DNA, 25 bp, Homo sapien
gacaatggtccctctatttcaacac

SEQ ID NO: 1158529 - DNA, 25 bp, Homo sapien
ttttcggtgacagtggcgatttgaa

SEQ ID NO: 1158530 - DNA, 25 bp, Homo sapien
ttcaacacctttttcggtgacagtg

SEQ ID NO: 1158531 - DNA, 25 bp, Homo sapien
cccagttggtctctgtagacaatgg

SEQ ID NO: 1158532 - DNA, 25 bp, Homo sapien
aaagcccagcttagtgtaagccaaa

SEQ ID NO: 1158533 - DNA, 25 bp, Homo sapien
cagaaaattttcctgggtgagcctc

SEQ ID NO: 1158534 - DNA, 25 bp, Homo sapien
taaaaatagctgtactgtccaacca

SEQ ID NO: 1158535 - DNA, 25 bp, Homo sapien
ctgggtgagcctcccagaaaagccc

SEQ ID NO: 1158536 - DNA, 25 bp, Homo sapien
gagtctatctttgaactagccaagt

SEQ ID NO: 1158537 - DNA, 25 bp, Homo sapien
caaaagaagagtctatctttgaact

SEQ ID NO: 1158538 - DNA, 25 bp, Homo sapien
taaaagtagggcaacttcagttctg

SEQ ID NO: 1158539 - DNA, 25 bp, Homo sapien
tagggcaacttcagttctggataat

SEQ ID NO: 1158540 - DNA, 25 bp, Homo sapien
ttcaagaactatggttggtcacgtc

SEQ ID NO: 1158541 - DNA, 25 bp, Homo sapien
tctaggtgaccctgtttaataggct

SEQ ID NO: 1158542 - DNA, 25 bp, Homo sapien
gaatgctcaagatgtgatgggcctg

SEQ ID NO: 1158543 - DNA, 25 bp, Homo sapien
gattataccaacagtggatcagctg

SEQ ID NO: 1158544 - DNA, 25 bp, Homo sapien
taatcacgtctgagccaaggagctg

SEQ ID NO: 1158545 - DNA, 25 bp, Homo sapien
caagcaagagatactgaagcgatca

SEQ ID NO: 1158546 - DNA, 25 bp, Homo sapien
ccagagatgttggtttctacagcaa

SEQ ID NO: 1158547 - DNA, 25 bp, Homo sapien
ggtggaagccattcccagtttgagt

SEQ ID NO: 1158548 - DNA, 25 bp, Homo sapien
atatttgcaaaaacttgaaactaat

SEQ ID NO: 1158549 - DNA, 25 bp, Homo sapien
catatttgcaaaaacttgaaactaa

SEQ ID NO: 1158550 - DNA, 25 bp, Homo sapien
gcgctctagcgtgcgagacagaacg

SEQ ID NO: 1158551 - DNA, 25 bp, Homo sapien
cgctctagcgtgcgagacagaacga

SEQ ID NO: 1158552 - DNA, 25 bp, Homo sapien
gctctagcgtgcgagacagaacgag

SEQ ID NO: 1158553 - DNA, 25 bp, Homo sapien
tgcgctctagcgtgcgagacagaac

SEQ ID NO: 1158554 - DNA, 25 bp, Homo sapien
tattagaatcaaccgggccaggtgc

SEQ ID NO: 1158555 - DNA, 25 bp, Homo sapien
taagtgttcactagatacatgttgc

SEQ ID NO: 1158556 - DNA, 25 bp, Homo sapien
ctagatacatgttgctggtgccacc

SEQ ID NO: 1158557 - DNA, 25 bp, Homo sapien
tctaaattgggtttgagcttaccac

SEQ ID NO: 1158558 - DNA, 25 bp, Homo sapien
ataacccactaccacaggactagtc

SEQ ID NO: 1158559 - DNA, 25 bp, Homo sapien
gataacccactaccacaggactagt

SEQ ID NO: 1158560 - DNA, 25 bp, Homo sapien
catcctgagatagcagagtgtaggt

SEQ ID NO: 1158561 - DNA, 25 bp, Homo sapien
gaaagacggtatgccatggatcact

SEQ ID NO: 1158562 - DNA, 25 bp, Homo sapien
gaccctgagttatagatgctgaaag

SEQ ID NO: 1158563 - DNA, 25 bp, Homo sapien
aaggctgcccttgcccatgatcggg

SEQ ID NO: 1158564 - DNA, 25 bp, Homo sapien
tggttatcccaagagttagttagct

SEQ ID NO: 1158565 - DNA, 25 bp, Homo sapien
gctcttggttatcccaagagttagt

SEQ ID NO: 1158566 - DNA, 25 bp, Homo sapien
gaatctgaggcaggtgtgttgcttg

SEQ ID NO: 1158567 - DNA, 25 bp, Homo sapien
gttatcccaagagttagttagctct

SEQ ID NO: 1158568 - DNA, 25 bp, Homo sapien
ctcccgaagtgctaggattgcagat

SEQ ID NO: 1158569 - DNA, 25 bp, Homo sapien
cgaagtgctaggattgcagatgtga

SEQ ID NO: 1158570 - DNA, 25 bp, Homo sapien
cccgaagtgctaggattgcagatgt

SEQ ID NO: 1158571 - DNA, 25 bp, Homo sapien
ctaggattgcagatgtgagccacca

SEQ ID NO: 1158572 - DNA, 25 bp, Homo sapien
tacaggcaaagaaaagatagtctgg

SEQ ID NO: 1158573 - DNA, 25 bp, Homo sapien
cctctgggctcaaagaattagggct

SEQ ID NO: 1158574 - DNA, 25 bp, Homo sapien
aaagttacttgctaaaaggcttgat

SEQ ID NO: 1158575 - DNA, 25 bp, Homo sapien
gattaaactaaatgtgtcctctttg

SEQ ID NO: 1158576 - DNA, 25 bp, Homo sapien
catttagggtcggataatctccagg

SEQ ID NO: 1158577 - DNA, 25 bp, Homo sapien
tccaggctatcctatgcattgtagg

SEQ ID NO: 1158578 - DNA, 25 bp, Homo sapien
taattgccctcgttttcagaacatg

SEQ ID NO: 1158579 - DNA, 25 bp, Homo sapien
ggccactacccactagataggtcag

SEQ ID NO: 1158580 - DNA, 25 bp, Homo sapien
ttctcctccttcagcttcctcagta

SEQ ID NO: 1158581 - DNA, 25 bp, Homo sapien
gcgattctcctccttcagcttcctc

SEQ ID NO: 1158582 - DNA, 25 bp, Homo sapien
caagcgattctcctccttcagcttc

SEQ ID NO: 1158583 - DNA, 25 bp, Homo sapien
tctcctccttcagcttcctcagtag

SEQ ID NO: 1158584 - DNA, 25 bp, Homo sapien
gtgagtgagcgagcgagccttctct

SEQ ID NO: 1158585 - DNA, 25 bp, Homo sapien
gtgagcgagcgagccttctctctcc

SEQ ID NO: 1158586 - DNA, 25 bp, Homo sapien
ctcgggtcagactaccggcggcgac

SEQ ID NO: 1158587 - DNA, 25 bp, Homo sapien
acggcgccttcctcgggtcagacta

SEQ ID NO: 1158588 - DNA, 25 bp, Homo sapien
agccgtatccctccgcggggcgaga

SEQ ID NO: 1158589 - DNA, 25 bp, Homo sapien
gtggggggagtcggcgtctctctcc

SEQ ID NO: 1158590 - DNA, 25 bp, Homo sapien
gcgccagctcccgtacacggagccg

SEQ ID NO: 1158591 - DNA, 25 bp, Homo sapien
agctcccgtacacggagccgcattc

SEQ ID NO: 1158592 - DNA, 25 bp, Homo sapien
tatataaggattagggccatcaaac

SEQ ID NO: 1158593 - DNA, 25 bp, Homo sapien
atataaggattagggccatcaaacc

SEQ ID NO: 1158594 - DNA, 25 bp, Homo sapien
gtatataaggattagggccatcaaa

SEQ ID NO: 1158595 - DNA, 25 bp, Homo sapien
tataaggattagggccatcaaaccg

SEQ ID NO: 1158596 - DNA, 25 bp, Homo sapien
ctcctcagctgggatgcaaagtctc

SEQ ID NO: 1158597 - DNA, 25 bp, Homo sapien
agctcctcagctgggatgcaaagtc

SEQ ID NO: 1158598 - DNA, 25 bp, Homo sapien
cagctgggatgcaaagtctctgcat

SEQ ID NO: 1158599 - DNA, 25 bp, Homo sapien
cctcagctgggatgcaaagtctctg

SEQ ID NO: 1158600 - DNA, 25 bp, Homo sapien
tgaccgccggccaagatcccgggag

SEQ ID NO: 1158601 - DNA, 25 bp, Homo sapien
gggcgtcgcggatggtcgcgagtga

SEQ ID NO: 1158602 - DNA, 25 bp, Homo sapien
gtgaccgccggccaagatcccggga

SEQ ID NO: 1158603 - DNA, 25 bp, Homo sapien
atggtcgcgagtgaccgccggccaa

SEQ ID NO: 1158604 - DNA, 25 bp, Homo sapien
ggggcggcgaggggcgcggaggcca

SEQ ID NO: 1158605 - DNA, 25 bp, Homo sapien
ggctgcggagcgtcggggcggggcg

SEQ ID NO: 1158606 - DNA, 25 bp, Homo sapien
gggcggcgaggggcgcggaggccat

SEQ ID NO: 1158607 - DNA, 25 bp, Homo sapien
cggagcgtcggggcggggcggcgag

SEQ ID NO: 1158608 - DNA, 25 bp, Homo sapien
ctccagccgcgaagggcgggccagg

SEQ ID NO: 1158609 - DNA, 25 bp, Homo sapien
gtctccagccgcgaagggcgggcca

SEQ ID NO: 1158610 - DNA, 25 bp, Homo sapien
ccggggtctccagccgcgaagggcg

SEQ ID NO: 1158611 - DNA, 25 bp, Homo sapien
gggtctccagccgcgaagggcgggc

SEQ ID NO: 1158612 - DNA, 25 bp, Homo sapien
gctcgggcaaagcagcacgcgcagc

SEQ ID NO: 1158613 - DNA, 25 bp, Homo sapien
gggctcgggcaaagcagcacgcgca

SEQ ID NO: 1158614 - DNA, 25 bp, Homo sapien
ctcgggcaaagcagcacgcgcagct

SEQ ID NO: 1158615 - DNA, 25 bp, Homo sapien
ggctcgggcaaagcagcacgcgcag

SEQ ID NO: 1158616 - DNA, 25 bp, Homo sapien
aggaagagaccagaccacaagttga

SEQ ID NO: 1158617 - DNA, 25 bp, Homo sapien
cagggctctcctcaccaactgtact

SEQ ID NO: 1158618 - DNA, 25 bp, Homo sapien
gttgattcaggtgcatctgtctgct

SEQ ID NO: 1158619 - DNA, 25 bp, Homo sapien
tcctcaccaactgtactccaggaag

SEQ ID NO: 1158620 - DNA, 25 bp, Homo sapien
tctgttactaggatccactgggcca

SEQ ID NO: 1158621 - DNA, 25 bp, Homo sapien
caaacttgttgatgagtgagtccac

SEQ ID NO: 1158622 - DNA, 25 bp, Homo sapien
cggctaaagccactgagaggactca

SEQ ID NO: 1158623 - DNA, 25 bp, Homo sapien
gagtagctttccattccagtaggcc

SEQ ID NO: 1158624 - DNA, 25 bp, Homo sapien
aaaggtgtggaattttggcaagagc

SEQ ID NO: 1158625 - DNA, 25 bp, Homo sapien
aaggaaactgctcttatcctccaag

SEQ ID NO: 1158626 - DNA, 25 bp, Homo sapien
tggcaatgacaactaggtccaaact

SEQ ID NO: 1158627 - DNA, 25 bp, Homo sapien
ccttacatattctgcagaccttgca

SEQ ID NO: 1158628 - DNA, 25 bp, Homo sapien
tgcctcctgctggtctcgaaggagg

SEQ ID NO: 1158629 - DNA, 25 bp, Homo sapien
ccctccctcaggatgccatagatgg

SEQ ID NO: 1158630 - DNA, 25 bp, Homo sapien
catatggtccacactgcctggtggg

SEQ ID NO: 1158631 - DNA, 25 bp, Homo sapien
gatggtggccttcatatggtccaca

SEQ ID NO: 1158632 - DNA, 25 bp, Homo sapien
ctcctcacagaggtttcactttctg

SEQ ID NO: 1158633 - DNA, 25 bp, Homo sapien
cttcctcctcacagaggtttcactt

SEQ ID NO: 1158634 - DNA, 25 bp, Homo sapien
cacagaggtttcactttctgagctt

SEQ ID NO: 1158635 - DNA, 25 bp, Homo sapien
ctcacagaggtttcactttctgagc

SEQ ID NO: 1158636 - DNA, 25 bp, Homo sapien
tgcatcttctccagcaccaaactaa

SEQ ID NO: 1158637 - DNA, 25 bp, Homo sapien
ggctgcatcttctccagcaccaaac

SEQ ID NO: 1158638 - DNA, 25 bp, Homo sapien
gcatcttctccagcaccaaactaac

SEQ ID NO: 1158639 - DNA, 25 bp, Homo sapien
cactagaggctgcatcttctccagc

SEQ ID NO: 1158640 - DNA, 25 bp, Homo sapien
ccttgctcccatccagagaaggcca

SEQ ID NO: 1158641 - DNA, 25 bp, Homo sapien
ttgctcccatccagagaaggccact

SEQ ID NO: 1158642 - DNA, 25 bp, Homo sapien
gacccttgctcccatccagagaagg

SEQ ID NO: 1158643 - DNA, 25 bp, Homo sapien
acccttgctcccatccagagaaggc

SEQ ID NO: 1158644 - DNA, 25 bp, Homo sapien
ctgccagagatatggggggtgtggg

SEQ ID NO: 1158645 - DNA, 25 bp, Homo sapien
ctgccctgccacggccttagtagaa

SEQ ID NO: 1158646 - DNA, 25 bp, Homo sapien
cctgccacggccttagtagaaccag

SEQ ID NO: 1158647 - DNA, 25 bp, Homo sapien
tcctccacttttcgggtaagctcac

SEQ ID NO: 1158648 - DNA, 25 bp, Homo sapien
cacggccttagtagaaccagaagaa

SEQ ID NO: 1158649 - DNA, 25 bp, Homo sapien
taatgattacagtacccaggacagt

SEQ ID NO: 1158650 - DNA, 25 bp, Homo sapien
tagattcctaatgtgctctgcctcc

SEQ ID NO: 1158651 - DNA, 25 bp, Homo sapien
gcttagaagggtcagctcagcccat

SEQ ID NO: 1158652 - DNA, 25 bp, Homo sapien
caggatgggaactcccaaagggagt

SEQ ID NO: 1158653 - DNA, 25 bp, Homo sapien
gggatggctctagcttctgccgctt

SEQ ID NO: 1158654 - DNA, 25 bp, Homo sapien
ccagcccaacttgggatggctctag

SEQ ID NO: 1158655 - DNA, 25 bp, Homo sapien
ccaacttgggatggctctagcttct

SEQ ID NO: 1158656 - DNA, 25 bp, Homo sapien
ttgggatggctctagcttctgccgc

SEQ ID NO: 1158657 - DNA, 25 bp, Homo sapien
gggtctccagcccatgtcgtaaatc

SEQ ID NO: 1158658 - DNA, 25 bp, Homo sapien
tccagcccatgtcgtaaatcttcac

SEQ ID NO: 1158659 - DNA, 25 bp, Homo sapien
gcccatgtcgtaaatcttcaccctg

SEQ ID NO: 1158660 - DNA, 25 bp, Homo sapien
gacatgtttcagcttgttctgcagc

SEQ ID NO: 1158661 - DNA, 25 bp, Homo sapien
tgggttgcatcttgcatgctcctgc

SEQ ID NO: 1158662 - DNA, 25 bp, Homo sapien
tgtttcccctccaagacctcttcca

SEQ ID NO: 1158663 - DNA, 25 bp, Homo sapien
tgttccacctcctggtcacgggagg

SEQ ID NO: 1158664 - DNA, 25 bp, Homo sapien
gctgctctgtgtctcgctggtactg

SEQ ID NO: 1158665 - DNA, 25 bp, Homo sapien
ggaacatactctgccaatgccctgt

SEQ ID NO: 1158666 - DNA, 25 bp, Homo sapien
agccctcgcacaagggctgacatct

SEQ ID NO: 1158667 - DNA, 25 bp, Homo sapien
tcttctggaacatactctgccaatg

SEQ ID NO: 1158668 - DNA, 25 bp, Homo sapien
gcttggtggctctaagatcctcctt

SEQ ID NO: 1158669 - DNA, 25 bp, Homo sapien
ttcttgagcacctcaacctggcgag

SEQ ID NO: 1158670 - DNA, 25 bp, Homo sapien
gagtatctccagcactagctcgggc

SEQ ID NO: 1158671 - DNA, 25 bp, Homo sapien
tctaattccctctgcaagacctcta

SEQ ID NO: 1158672 - DNA, 25 bp, Homo sapien
cctccttctccattcgcagctgcag

SEQ ID NO: 1158673 - DNA, 25 bp, Homo sapien
tctgcctgcagttccttaagctcct

SEQ ID NO: 1158674 - DNA, 25 bp, Homo sapien
tggaagcctcttcacagtcctgtcg

SEQ ID NO: 1158675 - DNA, 25 bp, Homo sapien
ttcacagtcctgtcgcagttgctgg

SEQ ID NO: 1158676 - DNA, 25 bp, Homo sapien
agctcccgacctcgatcagcctcga

SEQ ID NO: 1158677 - DNA, 25 bp, Homo sapien
cgcagttgctggagggtcttttgta

SEQ ID NO: 1158678 - DNA, 25 bp, Homo sapien
tcagccctccagacaccctcagcct

SEQ ID NO: 1158679 - DNA, 25 bp, Homo sapien
tggctcctcagccctccagacaccc

SEQ ID NO: 1158680 - DNA, 25 bp, Homo sapien
cctctggctcctcagccctccagac

SEQ ID NO: 1158681 - DNA, 25 bp, Homo sapien
tctggctcctcagccctccagacac

SEQ ID NO: 1158682 - DNA, 25 bp, Homo sapien
ctgggtctcccgaagcgtcgtctcc

SEQ ID NO: 1158683 - DNA, 25 bp, Homo sapien
ggcggaattcgtcattttcctcctg

SEQ ID NO: 1158684 - DNA, 25 bp, Homo sapien
caaacccaggatgcgccggcggaat

SEQ ID NO: 1158685 - DNA, 25 bp, Homo sapien
cgctgcagcttgtcccgtagtcgtg

SEQ ID NO: 1158686 - DNA, 25 bp, Homo sapien
ttgttcagtcggtccacagtcctgt

SEQ ID NO: 1158687 - DNA, 25 bp, Homo sapien
tcctgggacgcattcagggcctcct

SEQ ID NO: 1158688 - DNA, 25 bp, Homo sapien
cagtcctgtccagcaaacgcttctg

SEQ ID NO: 1158689 - DNA, 25 bp, Homo sapien
cgctgagcctcctctaggcgtgcct

SEQ ID NO: 1158690 - DNA, 25 bp, Homo sapien
aatcatcacacattctgactaaccc

SEQ ID NO: 1158691 - DNA, 25 bp, Homo sapien
atcacacattctgactaacccctct

SEQ ID NO: 1158692 - DNA, 25 bp, Homo sapien
ataatcatcacacattctgactaac

SEQ ID NO: 1158693 - DNA, 25 bp, Homo sapien
cgcacctggccataatcatcacaca

SEQ ID NO: 1158694 - DNA, 25 bp, Homo sapien
ctcatcctgaagtcggctcagtcct

SEQ ID NO: 1158695 - DNA, 25 bp, Homo sapien
cactggcccaatccttggcctggcg

SEQ ID NO: 1158696 - DNA, 25 bp, Homo sapien
tgcttagagtcctccccgatcttct

SEQ ID NO: 1158697 - DNA, 25 bp, Homo sapien
tgaagtcggctcagtcctccagagg

SEQ ID NO: 1158698 - DNA, 25 bp, Homo sapien
ctgccgggccctgtcgtcctgggaa

SEQ ID NO: 1158699 - DNA, 25 bp, Homo sapien
cctgggaacgcttcttgttctctgc

SEQ ID NO: 1158700 - DNA, 25 bp, Homo sapien
ctcgagacccttcagctgccgggcc

SEQ ID NO: 1158701 - DNA, 25 bp, Homo sapien
ggctgtgtcccgctcagcctgggat

SEQ ID NO: 1158702 - DNA, 25 bp, Homo sapien
tgcagactcaggacaagacactcag

SEQ ID NO: 1158703 - DNA, 25 bp, Homo sapien
tcctggcagtagaccatggacaagt

SEQ ID NO: 1158704 - DNA, 25 bp, Homo sapien
aaactcatcaactgtgggctgtcgg

SEQ ID NO: 1158705 - DNA, 25 bp, Homo sapien
gaggcagtaccacgtagaggctaag

SEQ ID NO: 1158706 - DNA, 25 bp, Homo sapien
aactctgtttccagccgtgagactt

SEQ ID NO: 1158707 - DNA, 25 bp, Homo sapien
cggccacgattcacccgatctgtta

SEQ ID NO: 1158708 - DNA, 25 bp, Homo sapien
gtgttcttctcctcatctaactctg

SEQ ID NO: 1158709 - DNA, 25 bp, Homo sapien
gattcacccgatctgttagcagctc

SEQ ID NO: 1158710 - DNA, 25 bp, Homo sapien
tcctccatgcaaatcattggcttct

SEQ ID NO: 1158711 - DNA, 25 bp, Homo sapien
ccaattcaggtcagagaacagccca

SEQ ID NO: 1158712 - DNA, 25 bp, Homo sapien
agccacgcacagattcggcagccag

SEQ ID NO: 1158713 - DNA, 25 bp, Homo sapien
tccaggaactagtatcccttgtaaa

SEQ ID NO: 1158714 - DNA, 25 bp, Homo sapien
cctgccgagcagacctttcctgcat

SEQ ID NO: 1158715 - DNA, 25 bp, Homo sapien
aggtcctgccgagcagacctttcct

SEQ ID NO: 1158716 - DNA, 25 bp, Homo sapien
tccaaggagattttgtcacactcca

SEQ ID NO: 1158717 - DNA, 25 bp, Homo sapien
caaggagattttgtcacactccagg

SEQ ID NO: 1158718 - DNA, 25 bp, Homo sapien
gtccatccctaagaatcctcccctc

SEQ ID NO: 1158719 - DNA, 25 bp, Homo sapien
ctcctggggtccatccctaagaatc

SEQ ID NO: 1158720 - DNA, 25 bp, Homo sapien
tggggtccatccctaagaatcctcc

SEQ ID NO: 1158721 - DNA, 25 bp, Homo sapien
cctggggtccatccctaagaatcct

SEQ ID NO: 1158722 - DNA, 25 bp, Homo sapien
ggaagcctccacagttagcactcca

SEQ ID NO: 1158723 - DNA, 25 bp, Homo sapien
aggaagcctccacagttagcactcc

SEQ ID NO: 1158724 - DNA, 25 bp, Homo sapien
tccacagttagcactccactggcca

SEQ ID NO: 1158725 - DNA, 25 bp, Homo sapien
cagttagcactccactggccatttt

SEQ ID NO: 1158726 - DNA, 25 bp, Homo sapien
ctggccaaccgggtcttcaggtcct

SEQ ID NO: 1158727 - DNA, 25 bp, Homo sapien
tctggaagccttctgagctggccaa

SEQ ID NO: 1158728 - DNA, 25 bp, Homo sapien
ctgggactcaagctgagagaggctg

SEQ ID NO: 1158729 - DNA, 25 bp, Homo sapien
ctgtagccgctcctgcaacaactga

SEQ ID NO: 1158730 - DNA, 25 bp, Homo sapien
gggcaggatccagggcagattcaaa

SEQ ID NO: 1158731 - DNA, 25 bp, Homo sapien
tgagctccaccattagactgggcag

SEQ ID NO: 1158732 - DNA, 25 bp, Homo sapien
agaagaatgtctatgagtgtcccca

SEQ ID NO: 1158733 - DNA, 25 bp, Homo sapien
tgttccctaaagatcaggccaggct

SEQ ID NO: 1158734 - DNA, 25 bp, Homo sapien
tcgattggtagactgcagaactgtc

SEQ ID NO: 1158735 - DNA, 25 bp, Homo sapien
gatagttctttaactttccgctcca

SEQ ID NO: 1158736 - DNA, 25 bp, Homo sapien
cattgacatgctgccgctcgtcttc

SEQ ID NO: 1158737 - DNA, 25 bp, Homo sapien
tccgctccagttttcgattggtaga

SEQ ID NO: 1158738 - DNA, 25 bp, Homo sapien
catctactaccatggcctgggaccc

SEQ ID NO: 1158739 - DNA, 25 bp, Homo sapien
tccacacatctgaatagcatctact

SEQ ID NO: 1158740 - DNA, 25 bp, Homo sapien
tataattgccgctggaaaaatgtgg

SEQ ID NO: 1158741 - DNA, 25 bp, Homo sapien
caatcttgacaaggtataattgccg

SEQ ID NO: 1158742 - DNA, 25 bp, Homo sapien
aggccgtccagtcgctcaatttcct

SEQ ID NO: 1158743 - DNA, 25 bp, Homo sapien
ccttcttcctcaggccgtccagtcg

SEQ ID NO: 1158744 - DNA, 25 bp, Homo sapien
cagagacttgatccgggcctggagc

SEQ ID NO: 1158745 - DNA, 25 bp, Homo sapien
gcttcatccacctgacgcttcaaag

SEQ ID NO: 1158746 - DNA, 25 bp, Homo sapien
tggtggctgagatactaataaataa

SEQ ID NO: 1158747 - DNA, 25 bp, Homo sapien
cacagtaccatgttagagattctcc

SEQ ID NO: 1158748 - DNA, 25 bp, Homo sapien
tccaaccagaaacaagtgactacac

SEQ ID NO: 1158749 - DNA, 25 bp, Homo sapien
aaatccccaactaatcagatttggg

SEQ ID NO: 1158750 - DNA, 25 bp, Homo sapien
caatggacgagggatcgtagacact

SEQ ID NO: 1158751 - DNA, 25 bp, Homo sapien
cgtttttgagagctgactcagcagc

SEQ ID NO: 1158752 - DNA, 25 bp, Homo sapien
taacaggagctggtctgtaggttgc

SEQ ID NO: 1158753 - DNA, 25 bp, Homo sapien
tgtaggttgctctccgtaagcagtg

SEQ ID NO: 1158754 - DNA, 25 bp, Homo sapien
ggaaatatggaggtgaatcatcccc

SEQ ID NO: 1158755 - DNA, 25 bp, Homo sapien
tgggtcacccataggaatgcagaac

SEQ ID NO: 1158756 - DNA, 25 bp, Homo sapien
catgggccccatacttgtgcaaaga

SEQ ID NO: 1158757 - DNA, 25 bp, Homo sapien
gaatccagggagcacaataacatag

SEQ ID NO: 1158758 - DNA, 25 bp, Homo sapien
ccccagttcgcggtttcgcagagaa

SEQ ID NO: 1158759 - DNA, 25 bp, Homo sapien
gggtcgcagcacacacgccacttgt

SEQ ID NO: 1158760 - DNA, 25 bp, Homo sapien
gcccccttgtataggcccatcaggg

SEQ ID NO: 1158761 - DNA, 25 bp, Homo sapien
gggctgaagataggccgcgccccca

SEQ ID NO: 1158762 - DNA, 25 bp, Homo sapien
caccagggtacaccagttccgcgtc

SEQ ID NO: 1158763 - DNA, 25 bp, Homo sapien
cagggtacaccagttccgcgtcccg

SEQ ID NO: 1158764 - DNA, 25 bp, Homo sapien
ggtgcacgtccaccagggtacacca

SEQ ID NO: 1158765 - DNA, 25 bp, Homo sapien
gcacgtccaccagggtacaccagtt

SEQ ID NO: 1158766 - DNA, 25 bp, Homo sapien
tcagccacaaattaccctcctcagc

SEQ ID NO: 1158767 - DNA, 25 bp, Homo sapien
tatgatggagaccatctgaattcct

SEQ ID NO: 1158768 - DNA, 25 bp, Homo sapien
atgatggagaccatctgaattcctt

SEQ ID NO: 1158769 - DNA, 25 bp, Homo sapien
attcccagctctggagtaaaataag

SEQ ID NO: 1158770 - DNA, 25 bp, Homo sapien
ggagtaaaataagtctcaagttcag

SEQ ID NO: 1158771 - DNA, 25 bp, Homo sapien
aggttttctaagttacatttgatga

SEQ ID NO: 1158772 - DNA, 25 bp, Homo sapien
ttctaagttacatttgatgattaaa

SEQ ID NO: 1158773 - DNA, 25 bp, Homo sapien
ggttttctaagttacatttgatgat

SEQ ID NO: 1158774 - DNA, 25 bp, Homo sapien
ttttctaagttacatttgatgatta

SEQ ID NO: 1158775 - DNA, 25 bp, Homo sapien
attggtaacgtaccagtggaaatgt

SEQ ID NO: 1158776 - DNA, 25 bp, Homo sapien
ggcaatccggttcttaggcatcaac

SEQ ID NO: 1158777 - DNA, 25 bp, Homo sapien
tggatgccctcattggtaacgtacc

SEQ ID NO: 1158778 - DNA, 25 bp, Homo sapien
atgacatgaagattgggcacatcct

SEQ ID NO: 1158779 - DNA, 25 bp, Homo sapien
ctttaggctgaggacttccagtctc

SEQ ID NO: 1158780 - DNA, 25 bp, Homo sapien
tgcagcatagagtggcaggcacaat

SEQ ID NO: 1158781 - DNA, 25 bp, Homo sapien
gcagcatagagtggcaggcacaatc

SEQ ID NO: 1158782 - DNA, 25 bp, Homo sapien
taggctgaggacttccagtctctgg

SEQ ID NO: 1158783 - DNA, 25 bp, Homo sapien
ggttatctctgtccgctttccctct

SEQ ID NO: 1158784 - DNA, 25 bp, Homo sapien
ttgctgtcggcaccaggcggcacag

SEQ ID NO: 1158785 - DNA, 25 bp, Homo sapien
agctttgctgtcggcaccaggcggc

SEQ ID NO: 1158786 - DNA, 25 bp, Homo sapien
ctgtaggttatctctgtccgctttc

SEQ ID NO: 1158787 - DNA, 25 bp, Homo sapien
gaaaatataaaactcagctggctgt

SEQ ID NO: 1158788 - DNA, 25 bp, Homo sapien
aaatataaaactcagctggctgtgg

SEQ ID NO: 1158789 - DNA, 25 bp, Homo sapien
actgaaaatataaaactcagctggc

SEQ ID NO: 1158790 - DNA, 25 bp, Homo sapien
tgaaaatataaaactcagctggctg

SEQ ID NO: 1158791 - DNA, 25 bp, Homo sapien
tcctgtcagttcaccctggagagtc

SEQ ID NO: 1158792 - DNA, 25 bp, Homo sapien
tctcctgtcagttcaccctggagag

SEQ ID NO: 1158793 - DNA, 25 bp, Homo sapien
ctcctgtcagttcaccctggagagt

SEQ ID NO: 1158794 - DNA, 25 bp, Homo sapien
gagagagagatggctcagacaccac

SEQ ID NO: 1158795 - DNA, 25 bp, Homo sapien
gagaatgaccagctgagtggctgga

SEQ ID NO: 1158796 - DNA, 25 bp, Homo sapien
ccagagaatgaccagctgagtggct

SEQ ID NO: 1158797 - DNA, 25 bp, Homo sapien
agaatgaccagctgagtggctggac

SEQ ID NO: 1158798 - DNA, 25 bp, Homo sapien
cagagaatgaccagctgagtggctg

SEQ ID NO: 1158799 - DNA, 25 bp, Homo sapien
tgtccatcatgggactccaccagtt

SEQ ID NO: 1158800 - DNA, 25 bp, Homo sapien
tcctcatgtccatcatgggactcca

SEQ ID NO: 1158801 - DNA, 25 bp, Homo sapien
atgatctcctcatgtccatcatggg

SEQ ID NO: 1158802 - DNA, 25 bp, Homo sapien
aatgatctcctcatgtccatcatgg

SEQ ID NO: 1158803 - DNA, 25 bp, Homo sapien
cagctggttaatattcttctcgtga

SEQ ID NO: 1158804 - DNA, 25 bp, Homo sapien
tcactcttcagctggttaatattct

SEQ ID NO: 1158805 - DNA, 25 bp, Homo sapien
cctggatgtactggacctcactctt

SEQ ID NO: 1158806 - DNA, 25 bp, Homo sapien
tattcttctcgtgaatcatcttgtc

SEQ ID NO: 1158807 - DNA, 25 bp, Homo sapien
cctgtcaagcttgctacttatatcc

SEQ ID NO: 1158808 - DNA, 25 bp, Homo sapien
tcccggagcttctgtaggcagttcc

SEQ ID NO: 1158809 - DNA, 25 bp, Homo sapien
ctcctgtcgatggagagaatctcct

SEQ ID NO: 1158810 - DNA, 25 bp, Homo sapien
tcctaggttcctgtcaagcttgcta

SEQ ID NO: 1158811 - DNA, 25 bp, Homo sapien
tataagaagcttgatcacagaatcc

SEQ ID NO: 1158812 - DNA, 25 bp, Homo sapien
taattggtaaatgagactgcctggc

SEQ ID NO: 1158813 - DNA, 25 bp, Homo sapien
taaatgtaagtgctcatcggctgga

SEQ ID NO: 1158814 - DNA, 25 bp, Homo sapien
taaccagattgtgagtgctccagag

SEQ ID NO: 1158815 - DNA, 25 bp, Homo sapien
ggactctgactaaagccatttggct

SEQ ID NO: 1158816 - DNA, 25 bp, Homo sapien
tgtgggactctgactaaagccattt

SEQ ID NO: 1158817 - DNA, 25 bp, Homo sapien
ggctgtgggactctgactaaagcca

SEQ ID NO: 1158818 - DNA, 25 bp, Homo sapien
tgggactctgactaaagccatttgg

SEQ ID NO: 1158819 - DNA, 25 bp, Homo sapien
gtttggaccatctcgtccagaccac

SEQ ID NO: 1158820 - DNA, 25 bp, Homo sapien
gaaggggaagccctcaagtttctga

SEQ ID NO: 1158821 - DNA, 25 bp, Homo sapien
actggtttggaccatctcgtccaga

SEQ ID NO: 1158822 - DNA, 25 bp, Homo sapien
tggtttggaccatctcgtccagacc

SEQ ID NO: 1158823 - DNA, 25 bp, Homo sapien
agccacacagtctgactggtgttgc

SEQ ID NO: 1158824 - DNA, 25 bp, Homo sapien
aagtcctgcaccgtcttcctcaagc

SEQ ID NO: 1158825 - DNA, 25 bp, Homo sapien
agtctgactggtgttgccgcttggc

SEQ ID NO: 1158826 - DNA, 25 bp, Homo sapien
catcctcatttatacaggtgtccac

SEQ ID NO: 1158827 - DNA, 25 bp, Homo sapien
taaacagtgtaaacgtccaggagag

SEQ ID NO: 1158828 - DNA, 25 bp, Homo sapien
agagaatcccgagctgacctttgaa

SEQ ID NO: 1158829 - DNA, 25 bp, Homo sapien
gaaatgacttctgaatcaccggctg

SEQ ID NO: 1158830 - DNA, 25 bp, Homo sapien
gaaaagcagacaagcgttccaggct

SEQ ID NO: 1158831 - DNA, 25 bp, Homo sapien
ttccctctggtaccggctgagtgtg

SEQ ID NO: 1158832 - DNA, 25 bp, Homo sapien
tctgcttccctctggtaccggctga

SEQ ID NO: 1158833 - DNA, 25 bp, Homo sapien
tctgaagggccacattactttgttc

SEQ ID NO: 1158834 - DNA, 25 bp, Homo sapien
cattactttgttctgcttccctctg

SEQ ID NO: 1158835 - DNA, 25 bp, Homo sapien
tccatccctagcaagcgcctctgca

SEQ ID NO: 1158836 - DNA, 25 bp, Homo sapien
ctccatccctagcaagcgcctctgc

SEQ ID NO: 1158837 - DNA, 25 bp, Homo sapien
gcactgacaagcaagatcccccggt

SEQ ID NO: 1158838 - DNA, 25 bp, Homo sapien
ctgacaagcaagatcccccggttac

SEQ ID NO: 1158839 - DNA, 25 bp, Homo sapien
gtccaggcactgacaagcaagatcc

SEQ ID NO: 1158840 - DNA, 25 bp, Homo sapien
tccaggcactgacaagcaagatccc

SEQ ID NO: 1158841 - DNA, 25 bp, Homo sapien
ttcaaaaggggcatctgtacaggaa

SEQ ID NO: 1158842 - DNA, 25 bp, Homo sapien
tcaaaaggggcatctgtacaggaat

SEQ ID NO: 1158843 - DNA, 25 bp, Homo sapien
gacttcaaaaggggcatctgtacag

SEQ ID NO: 1158844 - DNA, 25 bp, Homo sapien
cttcaaaaggggcatctgtacagga

SEQ ID NO: 1158845 - DNA, 25 bp, Homo sapien
ctgcatcatgcaggcccactcgcca

SEQ ID NO: 1158846 - DNA, 25 bp, Homo sapien
ggcccactcgccagctatggctgcc

SEQ ID NO: 1158847 - DNA, 25 bp, Homo sapien
actcgccagctatggctgccagtcc

SEQ ID NO: 1158848 - DNA, 25 bp, Homo sapien
ccctgcatcatgcaggcccactcgc

SEQ ID NO: 1158849 - DNA, 25 bp, Homo sapien
ctttcgccagtaaggcctgatgctc

SEQ ID NO: 1158850 - DNA, 25 bp, Homo sapien
tgctccgaagttcctctagggccac

SEQ ID NO: 1158851 - DNA, 25 bp, Homo sapien
cctcactttcgccagtaaggcctga

SEQ ID NO: 1158852 - DNA, 25 bp, Homo sapien
ggcagtcagcattgttgctccgaag

SEQ ID NO: 1158853 - DNA, 25 bp, Homo sapien
tgctggctcttgagcatgtcatcca

SEQ ID NO: 1158854 - DNA, 25 bp, Homo sapien
ggctcttgagcatgtcatccaagtg

SEQ ID NO: 1158855 - DNA, 25 bp, Homo sapien
ctgctctatcatttgccggactttc

SEQ ID NO: 1158856 - DNA, 25 bp, Homo sapien
tttgccggactttccgctgctggct

SEQ ID NO: 1158857 - DNA, 25 bp, Homo sapien
tactatatgactgactctgttcgag

SEQ ID NO: 1158858 - DNA, 25 bp, Homo sapien
gggccttaggctctcaaaacaattc

SEQ ID NO: 1158859 - DNA, 25 bp, Homo sapien
tgaagcacatacagcctcccagtta

SEQ ID NO: 1158860 - DNA, 25 bp, Homo sapien
tatgctaccctcaagctcaggtggg

SEQ ID NO: 1158861 - DNA, 25 bp, Homo sapien
gatggtggcgtcctttgactggatc

SEQ ID NO: 1158862 - DNA, 25 bp, Homo sapien
tgcctccagataggcgattttctcc

SEQ ID NO: 1158863 - DNA, 25 bp, Homo sapien
tggcgtcctttgactggatcacagc

SEQ ID NO: 1158864 - DNA, 25 bp, Homo sapien
cctggatggtggcgtcctttgactg

SEQ ID NO: 1158865 - DNA, 25 bp, Homo sapien
ggtgttccatccggtcatgcatctc

SEQ ID NO: 1158866 - DNA, 25 bp, Homo sapien
tcaggtgttccatccggtcatgcat

SEQ ID NO: 1158867 - DNA, 25 bp, Homo sapien
caggtgttccatccggtcatgcatc

SEQ ID NO: 1158868 - DNA, 25 bp, Homo sapien
tgttccatccggtcatgcatctcta

SEQ ID NO: 1158869 - DNA, 25 bp, Homo sapien
gtttccaccactcggatgacaggca

SEQ ID NO: 1158870 - DNA, 25 bp, Homo sapien
gctaggcggcttggatatcctaata

SEQ ID NO: 1158871 - DNA, 25 bp, Homo sapien
gacaggcatgggcttcgggctaggc

SEQ ID NO: 1158872 - DNA, 25 bp, Homo sapien
aggtttccaccactcggatgacagg

SEQ ID NO: 1158873 - DNA, 25 bp, Homo sapien
caaagggctgcagtgccttgaatag

SEQ ID NO: 1158874 - DNA, 25 bp, Homo sapien
gcaggacaatgtcttccaaagggct

SEQ ID NO: 1158875 - DNA, 25 bp, Homo sapien
taggaatatagatattgccctggct

SEQ ID NO: 1158876 - DNA, 25 bp, Homo sapien
tacaacagaagggaggctctctaca

SEQ ID NO: 1158877 - DNA, 25 bp, Homo sapien
aggcctggcttatggcacagccaga

SEQ ID NO: 1158878 - DNA, 25 bp, Homo sapien
ctgatgaaggcctggcttatggcac

SEQ ID NO: 1158879 - DNA, 25 bp, Homo sapien
ggcttatggcacagccagagtccag

SEQ ID NO: 1158880 - DNA, 25 bp, Homo sapien
tgaaggcctggcttatggcacagcc

SEQ ID NO: 1158881 - DNA, 25 bp, Homo sapien
gcttttagggctgaggcaaatcttg

SEQ ID NO: 1158882 - DNA, 25 bp, Homo sapien
ttttagggctgaggcaaatcttgtc

SEQ ID NO: 1158883 - DNA, 25 bp, Homo sapien
tgtgtctccagcttttagggctgag

SEQ ID NO: 1158884 - DNA, 25 bp, Homo sapien
gtctccagcttttagggctgaggca

SEQ ID NO: 1158885 - DNA, 25 bp, Homo sapien
gaaggaacttcattcccccaggaca

SEQ ID NO: 1158886 - DNA, 25 bp, Homo sapien
ttgttgctaagaactgagctgtgtt

SEQ ID NO: 1158887 - DNA, 25 bp, Homo sapien
tggaaggaacttcattcccccagga

SEQ ID NO: 1158888 - DNA, 25 bp, Homo sapien
caaacagtttgttgctaagaactga

SEQ ID NO: 1158889 - DNA, 25 bp, Homo sapien
aaccccactatctgtctgcaggagg

SEQ ID NO: 1158890 - DNA, 25 bp, Homo sapien
ggtaaccccactatctgtctgcagg

SEQ ID NO: 1158891 - DNA, 25 bp, Homo sapien
gtaaccccactatctgtctgcagga

SEQ ID NO: 1158892 - DNA, 25 bp, Homo sapien
caggtaaccccactatctgtctgca

SEQ ID NO: 1158893 - DNA, 25 bp, Homo sapien
aagccagaatgtgagcccagtcttg

SEQ ID NO: 1158894 - DNA, 25 bp, Homo sapien
caaagcctcagggaaagtagactca

SEQ ID NO: 1158895 - DNA, 25 bp, Homo sapien
ttctcaaggttgtaggaagagccct

SEQ ID NO: 1158896 - DNA, 25 bp, Homo sapien
tctgtagccctagagaatttttccg

SEQ ID NO: 1158897 - DNA, 25 bp, Homo sapien
ggctcaatatcatgcaaataatagg

SEQ ID NO: 1158898 - DNA, 25 bp, Homo sapien
gctcaatatcatgcaaataataggt

SEQ ID NO: 1158899 - DNA, 25 bp, Homo sapien
ctggctcaatatcatgcaaataata

SEQ ID NO: 1158900 - DNA, 25 bp, Homo sapien
tcaatatcatgcaaataataggttc

SEQ ID NO: 1158901 - DNA, 25 bp, Homo sapien
gtctacttctatccacacagacccg

SEQ ID NO: 1158902 - DNA, 25 bp, Homo sapien
acttctatccacacagacccggcaa

SEQ ID NO: 1158903 - DNA, 25 bp, Homo sapien
tatccacacagacccggcaaccatc

SEQ ID NO: 1158904 - DNA, 25 bp, Homo sapien
ttctatccacacagacccggcaacc

SEQ ID NO: 1158905 - DNA, 25 bp, Homo sapien
tgcctggcagccggacgacccccga

SEQ ID NO: 1158906 - DNA, 25 bp, Homo sapien
ccgacgcgcgcgcccgatccgccgg

SEQ ID NO: 1158907 - DNA, 25 bp, Homo sapien
ccaaggcctcccggcgcgtgctcgc

SEQ ID NO: 1158908 - DNA, 25 bp, Homo sapien
ccggcgcgtgctcgccctgcctggc

SEQ ID NO: 1158909 - DNA, 25 bp, Homo sapien
gagcaggcgagccgtacccccgccc

SEQ ID NO: 1158910 - DNA, 25 bp, Homo sapien
gcgagcaggcgagccgtacccccgc

SEQ ID NO: 1158911 - DNA, 25 bp, Homo sapien
ttgcgagcaggcgagccgtaccccc

SEQ ID NO: 1158912 - DNA, 25 bp, Homo sapien
cttgcgagcaggcgagccgtacccc

SEQ ID NO: 1158913 - DNA, 25 bp, Homo sapien
ttgacgatgcgcacgacccgcgggc

SEQ ID NO: 1158914 - DNA, 25 bp, Homo sapien
gttcccggcgcagtggagcccagac

SEQ ID NO: 1158915 - DNA, 25 bp, Homo sapien
cacctccgttcctgtgaggggctga

SEQ ID NO: 1158916 - DNA, 25 bp, Homo sapien
tgagggatgaatcccttccccgtcc

SEQ ID NO: 1158917 - DNA, 25 bp, Homo sapien
cgttgaagccgtagccggactcgga

SEQ ID NO: 1158918 - DNA, 25 bp, Homo sapien
ttggccccgcacgttgaagccgtag

SEQ ID NO: 1158919 - DNA, 25 bp, Homo sapien
cccgcacgttgaagccgtagccgga

SEQ ID NO: 1158920 - DNA, 25 bp, Homo sapien
cacgttgaagccgtagccggactcg

SEQ ID NO: 1158921 - DNA, 25 bp, Homo sapien
gctccccgttgatgctccgcagttg

SEQ ID NO: 1158922 - DNA, 25 bp, Homo sapien
gcggcgcgtacagctccccgttgat

SEQ ID NO: 1158923 - DNA, 25 bp, Homo sapien
gcgctcacatgctgcagcggcgcgt

SEQ ID NO: 1158924 - DNA, 25 bp, Homo sapien
tcacatgctgcagcggcgcgtacag

SEQ ID NO: 1158925 - DNA, 25 bp, Homo sapien
tgcgatgctgaagatgagaacttgg

SEQ ID NO: 1158926 - DNA, 25 bp, Homo sapien
aactgcgatgctgaagatgagaact

SEQ ID NO: 1158927 - DNA, 25 bp, Homo sapien
gtggagaacgaaactgcgatgctga

SEQ ID NO: 1158928 - DNA, 25 bp, Homo sapien
ggtggagaacgaaactgcgatgctg

SEQ ID NO: 1158929 - DNA, 25 bp, Homo sapien
cactgaagactgctgaggagaacgg

SEQ ID NO: 1158930 - DNA, 25 bp, Homo sapien
ccataaacctgactaggaggaggca

SEQ ID NO: 1158931 - DNA, 25 bp, Homo sapien
tgtcaaggataagggtagatggcac

SEQ ID NO: 1158932 - DNA, 25 bp, Homo sapien
tgtgctgatggagacgctagattcc

SEQ ID NO: 1158933 - DNA, 25 bp, Homo sapien
caccctgggcatgtaactgagtatg

SEQ ID NO: 1158934 - DNA, 25 bp, Homo sapien
taacccttaaaaggtgagcctgaga

SEQ ID NO: 1158935 - DNA, 25 bp, Homo sapien
tctaggccctatgaaagatctactg

SEQ ID NO: 1158936 - DNA, 25 bp, Homo sapien
ggttggaattcgagagcctaacaat

SEQ ID NO: 1158937 - DNA, 25 bp, Homo sapien
tttgagagcatggtaacaggccctc

SEQ ID NO: 1158938 - DNA, 25 bp, Homo sapien
catctaatgaatgaacctgccaaag

SEQ ID NO: 1158939 - DNA, 25 bp, Homo sapien
ggctcttactggattgcccaagaag

SEQ ID NO: 1158940 - DNA, 25 bp, Homo sapien
aaacatctgtatagctgaggtggaa

SEQ ID NO: 1158941 - DNA, 25 bp, Homo sapien
tcagacagtggatcacaacctaatg

SEQ ID NO: 1158942 - DNA, 25 bp, Homo sapien
tagcatgccaatatcaggaaaagtg

SEQ ID NO: 1158943 - DNA, 25 bp, Homo sapien
tccctactgcagtgtaagcttctca

SEQ ID NO: 1158944 - DNA, 25 bp, Homo sapien
tgaaattaatgtaccaggccaccac

SEQ ID NO: 1158945 - DNA, 25 bp, Homo sapien
tcacaaatttacgtatgatccttcc

SEQ ID NO: 1158946 - DNA, 25 bp, Homo sapien
atttacgtatgatccttccacaggg

SEQ ID NO: 1158947 - DNA, 25 bp, Homo sapien
caaatttacgtatgatccttccaca

SEQ ID NO: 1158948 - DNA, 25 bp, Homo sapien
acttcacaaatttacgtatgatcct

SEQ ID NO: 1158949 - DNA, 25 bp, Homo sapien
catctgggtgaaaagcataacccct

SEQ ID NO: 1158950 - DNA, 25 bp, Homo sapien
tgaaataggagtccaccatctgggt

SEQ ID NO: 1158951 - DNA, 25 bp, Homo sapien
agtagatgaatctgtacatatctgc

SEQ ID NO: 1158952 - DNA, 25 bp, Homo sapien
gcataacccctattctacttttaga

SEQ ID NO: 1158953 - DNA, 25 bp, Homo sapien
caacgagtcgtcactgggatctagg

SEQ ID NO: 1158954 - DNA, 25 bp, Homo sapien
gatctaggttatctgcctcatgagg

SEQ ID NO: 1158955 - DNA, 25 bp, Homo sapien
ttctcgcctgctcgaatcaggtcca

SEQ ID NO: 1158956 - DNA, 25 bp, Homo sapien
tctgctccacatgtttgtatctggg

SEQ ID NO: 1158957 - DNA, 25 bp, Homo sapien
gctcaatttagacaaatcaagcaag

SEQ ID NO: 1158958 - DNA, 25 bp, Homo sapien
tctgcaggcctcactatggtcatct

SEQ ID NO: 1158959 - DNA, 25 bp, Homo sapien
cttaaaacatgtaataggctgggca

SEQ ID NO: 1158960 - DNA, 25 bp, Homo sapien
cagcagccagaccttacagctttag

SEQ ID NO: 1158961 - DNA, 25 bp, Homo sapien
gagacctccctaaatctgcatggaa

SEQ ID NO: 1158962 - DNA, 25 bp, Homo sapien
catgaaaatttgacctatgaccagg

SEQ ID NO: 1158963 - DNA, 25 bp, Homo sapien
aattagtcagtagaaacaggctcag

SEQ ID NO: 1158964 - DNA, 25 bp, Homo sapien
tccagccagaataaagagacctccc

SEQ ID NO: 1158965 - DNA, 25 bp, Homo sapien
tcttctgagtacaaccctgagtgaa

SEQ ID NO: 1158966 - DNA, 25 bp, Homo sapien
aaatgcctcctgctgtacatgcaaa

SEQ ID NO: 1158967 - DNA, 25 bp, Homo sapien
tattcaacctcaggagataatgccg

SEQ ID NO: 1158968 - DNA, 25 bp, Homo sapien
tgtttctggattttagctaccgtga

SEQ ID NO: 1158969 - DNA, 25 bp, Homo sapien
taggatagcaaactcccggtaccgc

SEQ ID NO: 1158970 - DNA, 25 bp, Homo sapien
atattcttccaatccccgacgtcgg

SEQ ID NO: 1158971 - DNA, 25 bp, Homo sapien
ccgacgtcgggcatctaattgttgt

SEQ ID NO: 1158972 - DNA, 25 bp, Homo sapien
cttcaggttctggtgtaggatagca

SEQ ID NO: 1158973 - DNA, 25 bp, Homo sapien
tcaccaattactcgtattgaacaca

SEQ ID NO: 1158974 - DNA, 25 bp, Homo sapien
gattctgataggaattcctgcatga

SEQ ID NO: 1158975 - DNA, 25 bp, Homo sapien
tctcaccaattactcgtattgaaca

SEQ ID NO: 1158976 - DNA, 25 bp, Homo sapien
ctcatcggattctgataggaattcc

SEQ ID NO: 1158977 - DNA, 25 bp, Homo sapien
tgttccatctggtaatgctactctc

SEQ ID NO: 1158978 - DNA, 25 bp, Homo sapien
ccctgactgtaaccgttgttccatc

SEQ ID NO: 1158979 - DNA, 25 bp, Homo sapien
tctacgtcggacacaccattgtagt

SEQ ID NO: 1158980 - DNA, 25 bp, Homo sapien
tatacttggtctgtagtactgttct

SEQ ID NO: 1158981 - DNA, 25 bp, Homo sapien
catgaaggagcattcattggccaaa

SEQ ID NO: 1158982 - DNA, 25 bp, Homo sapien
tataagcattagtacccagaaacct

SEQ ID NO: 1158983 - DNA, 25 bp, Homo sapien
tactaggttgcatcaaaagcataca

SEQ ID NO: 1158984 - DNA, 25 bp, Homo sapien
tacacaggcaatgattacacccagc

SEQ ID NO: 1158985 - DNA, 25 bp, Homo sapien
gactgatcacttcaaataaggcaaa

SEQ ID NO: 1158986 - DNA, 25 bp, Homo sapien
caaaggagtgactgatcacttcaaa

SEQ ID NO: 1158987 - DNA, 25 bp, Homo sapien
aataaggcaaagtaattcactgtcg

SEQ ID NO: 1158988 - DNA, 25 bp, Homo sapien
aagtaattcactgtcgtactgtcca

SEQ ID NO: 1158989 - DNA, 25 bp, Homo sapien
aatatatatgacatggaagagaccc

SEQ ID NO: 1158990 - DNA, 25 bp, Homo sapien
tcaatgcaaccaatgtgaccaccat

SEQ ID NO: 1158991 - DNA, 25 bp, Homo sapien
ggccttagccctgtataaatatata

SEQ ID NO: 1158992 - DNA, 25 bp, Homo sapien
tctatgtcattcagagagagccctc

SEQ ID NO: 1158993 - DNA, 25 bp, Homo sapien
ggcaacctaaatctaccaaactctc

SEQ ID NO: 1158994 - DNA, 25 bp, Homo sapien
caaagttattctacctggacctgag

SEQ ID NO: 1158995 - DNA, 25 bp, Homo sapien
tggacctgagatagcaaggcaacct

SEQ ID NO: 1158996 - DNA, 25 bp, Homo sapien
aaatattagggagatggctgcttta

SEQ ID NO: 1158997 - DNA, 25 bp, Homo sapien
tctgaatgtagagtttgtgaggaaa

SEQ ID NO: 1158998 - DNA, 25 bp, Homo sapien
gaaactcattaggtgccaatttacg

SEQ ID NO: 1158999 - DNA, 25 bp, Homo sapien
tttcgaatggtcaagcaggtgcctg

SEQ ID NO: 1159000 - DNA, 25 bp, Homo sapien
ggcacagctgatgtataattctgaa

SEQ ID NO: 1159001 - DNA, 25 bp, Homo sapien
tttctttgttcgtatagcttctgta

SEQ ID NO: 1159002 - DNA, 25 bp, Homo sapien
atagcttctgtaattgataggactt

SEQ ID NO: 1159003 - DNA, 25 bp, Homo sapien
ttctttgttcgtatagcttctgtaa

SEQ ID NO: 1159004 - DNA, 25 bp, Homo sapien
agcttctgtaattgataggactttt

SEQ ID NO: 1159005 - DNA, 25 bp, Homo sapien
cagcctgctgatacgtagaacattg

SEQ ID NO: 1159006 - DNA, 25 bp, Homo sapien
agcctgctgatacgtagaacattgg

SEQ ID NO: 1159007 - DNA, 25 bp, Homo sapien
tcagcctgctgatacgtagaacatt

SEQ ID NO: 1159008 - DNA, 25 bp, Homo sapien
tgtgcctggcacgtacttggtactc

SEQ ID NO: 1159009 - DNA, 25 bp, Homo sapien
tatacacaatggcaaaagaccatgg

SEQ ID NO: 1159010 - DNA, 25 bp, Homo sapien
tacatagatggaaagatagtgtgtt

SEQ ID NO: 1159011 - DNA, 25 bp, Homo sapien
ctatacttgagtttttacctgggtg

SEQ ID NO: 1159012 - DNA, 25 bp, Homo sapien
ataaaattcaaactttgatgagcct

SEQ ID NO: 1159013 - DNA, 25 bp, Homo sapien
tgaacactgatacttgaatacatat

SEQ ID NO: 1159014 - DNA, 25 bp, Homo sapien
caaactttgatgagcctttcttcaa

SEQ ID NO: 1159015 - DNA, 25 bp, Homo sapien
acactgatacttgaatacatattat

SEQ ID NO: 1159016 - DNA, 25 bp, Homo sapien
tgtagccctcacaagtccttagcat

SEQ ID NO: 1159017 - DNA, 25 bp, Homo sapien
gcagtttaaagtgcgtgatgctgat

SEQ ID NO: 1159018 - DNA, 25 bp, Homo sapien
gaaagatgatttcattgtagccctc

SEQ ID NO: 1159019 - DNA, 25 bp, Homo sapien
gatgctgatggctgtgataacgtgc

SEQ ID NO: 1159020 - DNA, 25 bp, Homo sapien
accaagacaagggagtaaggtacag

SEQ ID NO: 1159021 - DNA, 25 bp, Homo sapien
ccaagacaagggagtaaggtacagt

SEQ ID NO: 1159022 - DNA, 25 bp, Homo sapien
tcatctgtgtcccatcgctgcatct

SEQ ID NO: 1159023 - DNA, 25 bp, Homo sapien
tcttctctcctcgtgcatattcgaa

SEQ ID NO: 1159024 - DNA, 25 bp, Homo sapien
tggcgtgaagattttaacccatcgg

SEQ ID NO: 1159025 - DNA, 25 bp, Homo sapien
tattcgaaacagaaggccatccctt

SEQ ID NO: 1159026 - DNA, 25 bp, Homo sapien
ctctcgaagcactcatgcatgtaat

SEQ ID NO: 1159027 - DNA, 25 bp, Homo sapien
tcgaagcactcatgcatgtaattga

SEQ ID NO: 1159028 - DNA, 25 bp, Homo sapien
ttgagctcgcagaacaccctctcga

SEQ ID NO: 1159029 - DNA, 25 bp, Homo sapien
tctccacttgagctcgcagaacacc

SEQ ID NO: 1159030 - DNA, 25 bp, Homo sapien
tcaagacggctacaactgaggacag

SEQ ID NO: 1159031 - DNA, 25 bp, Homo sapien
cagaggccaaccttgctggaagaat

SEQ ID NO: 1159032 - DNA, 25 bp, Homo sapien
tggttcgcctagaaagactgccagg

SEQ ID NO: 1159033 - DNA, 25 bp, Homo sapien
gaagagcctgtagccaatgtccacc

SEQ ID NO: 1159034 - DNA, 25 bp, Homo sapien
tgctgtgacctcgccatctggaaaa

SEQ ID NO: 1159035 - DNA, 25 bp, Homo sapien
ctctgctgtgacctcgccatctgga

SEQ ID NO: 1159036 - DNA, 25 bp, Homo sapien
ctgtgacctcgccatctggaaaatg

SEQ ID NO: 1159037 - DNA, 25 bp, Homo sapien
ctctctgctgtgacctcgccatctg

SEQ ID NO: 1159038 - DNA, 25 bp, Homo sapien
taatgtccaagtttagcaggcggcc

SEQ ID NO: 1159039 - DNA, 25 bp, Homo sapien
ggataacccaaagctactggcctgg

SEQ ID NO: 1159040 - DNA, 25 bp, Homo sapien
gaagtctgggtagaagcctccctgg

SEQ ID NO: 1159041 - DNA, 25 bp, Homo sapien
tcaggtcaactaggatgcagtcccc

SEQ ID NO: 1159042 - DNA, 25 bp, Homo sapien
taagatctgtaccaaaggctctgcc

SEQ ID NO: 1159043 - DNA, 25 bp, Homo sapien
ttttgtgcaagcttgcagatgggag

SEQ ID NO: 1159044 - DNA, 25 bp, Homo sapien
aaggaatcctgtgattcttcaaagg

SEQ ID NO: 1159045 - DNA, 25 bp, Homo sapien
aggctctatctgcatggcagagaaa

SEQ ID NO: 1159046 - DNA, 25 bp, Homo sapien
caaagtgccacaatggtccttggtc

SEQ ID NO: 1159047 - DNA, 25 bp, Homo sapien
taaatatccaaagctaatgggtggg

SEQ ID NO: 1159048 - DNA, 25 bp, Homo sapien
tatcatggccatgcgtaagtgtctc

SEQ ID NO: 1159049 - DNA, 25 bp, Homo sapien
gggtgaatgaatgagcccctgaaca

SEQ ID NO: 1159050 - DNA, 25 bp, Homo sapien
actgtccacgtcacattgctctcat

SEQ ID NO: 1159051 - DNA, 25 bp, Homo sapien
cagccatcaacactgtccacgtcac

SEQ ID NO: 1159052 - DNA, 25 bp, Homo sapien
cacgtcacattgctctcatctgtct

SEQ ID NO: 1159053 - DNA, 25 bp, Homo sapien
tcaacactgtccacgtcacattgct

SEQ ID NO: 1159054 - DNA, 25 bp, Homo sapien
atgatccttcctgttgggctcggcc

SEQ ID NO: 1159055 - DNA, 25 bp, Homo sapien
tccagggttgcaagacagtcagacc

SEQ ID NO: 1159056 - DNA, 25 bp, Homo sapien
tagagcagtgaagcgacctgtccag

SEQ ID NO: 1159057 - DNA, 25 bp, Homo sapien
caagtcttcctaacgctgggctctt

SEQ ID NO: 1159058 - DNA, 25 bp, Homo sapien
cagctacaagggaagactagcctga

SEQ ID NO: 1159059 - DNA, 25 bp, Homo sapien
tggtaaggcacgcagggcagctaca

SEQ ID NO: 1159060 - DNA, 25 bp, Homo sapien
tgatttccagttcagagtcctcaca

SEQ ID NO: 1159061 - DNA, 25 bp, Homo sapien
tattaagatttgaggcacaccatga

SEQ ID NO: 1159062 - DNA, 25 bp, Homo sapien
cactccttctctgggtgtgtggagc

SEQ ID NO: 1159063 - DNA, 25 bp, Homo sapien
ccaccccactccttctctgggtgtg

SEQ ID NO: 1159064 - DNA, 25 bp, Homo sapien
cccactccttctctgggtgtgtgga

SEQ ID NO: 1159065 - DNA, 25 bp, Homo sapien
accccactccttctctgggtgtgtg

SEQ ID NO: 1159066 - DNA, 25 bp, Homo sapien
tctcaccagacaagaacatggagag

SEQ ID NO: 1159067 - DNA, 25 bp, Homo sapien
catggagagtggaactaggaatttc

SEQ ID NO: 1159068 - DNA, 25 bp, Homo sapien
agctctggaggacttccgtgcacag

SEQ ID NO: 1159069 - DNA, 25 bp, Homo sapien
taaattgcgaaggagcacgggacag

SEQ ID NO: 1159070 - DNA, 25 bp, Homo sapien
gaacctgattagacatcgcctggcc

SEQ ID NO: 1159071 - DNA, 25 bp, Homo sapien
taagtgatgccacacacaggatctc

SEQ ID NO: 1159072 - DNA, 25 bp, Homo sapien
tgacttctgcacttctcggcgctaa

SEQ ID NO: 1159073 - DNA, 25 bp, Homo sapien
gactgactggcatgatgcgacacct

SEQ ID NO: 1159074 - DNA, 25 bp, Homo sapien
tatttttgtgcctgggagcctatgc

SEQ ID NO: 1159075 - DNA, 25 bp, Homo sapien
tgtgcgaatccacatcagccgtggg

SEQ ID NO: 1159076 - DNA, 25 bp, Homo sapien
tgccaggagggaactgcatcctttc

SEQ ID NO: 1159077 - DNA, 25 bp, Homo sapien
cagccgtgggtatttctcgagatgc

SEQ ID NO: 1159078 - DNA, 25 bp, Homo sapien
tcacaaatcaacagttttcatctcc

SEQ ID NO: 1159079 - DNA, 25 bp, Homo sapien
ctcacaaatcaacagttttcatctc

SEQ ID NO: 1159080 - DNA, 25 bp, Homo sapien
ttttcatctccatcgctgtttgtct

SEQ ID NO: 1159081 - DNA, 25 bp, Homo sapien
catctccatcgctgtttgtcttttt

SEQ ID NO: 1159082 - DNA, 25 bp, Homo sapien
caccctcctgacactgagcataatt

SEQ ID NO: 1159083 - DNA, 25 bp, Homo sapien
cacctcctctcatcaccaggaagtc

SEQ ID NO: 1159084 - DNA, 25 bp, Homo sapien
cttgctgtagatgcatgcatttctt

SEQ ID NO: 1159085 - DNA, 25 bp, Homo sapien
gacactgagcataatttccacctcc

SEQ ID NO: 1159086 - DNA, 25 bp, Homo sapien
ttccacttgaggtggaagccacttg

SEQ ID NO: 1159087 - DNA, 25 bp, Homo sapien
acttgagggcaggaaggttatagaa

SEQ ID NO: 1159088 - DNA, 25 bp, Homo sapien
ttattccactcccaactgaatacgg

SEQ ID NO: 1159089 - DNA, 25 bp, Homo sapien
cactcccaactgaatacgggaggag

SEQ ID NO: 1159090 - DNA, 25 bp, Homo sapien
cctgggctcctcataaattctaaat

SEQ ID NO: 1159091 - DNA, 25 bp, Homo sapien
cccaactgaatacgggaggagaaag

SEQ ID NO: 1159092 - DNA, 25 bp, Homo sapien
ccagaagccaacccgtccctctgtc

SEQ ID NO: 1159093 - DNA, 25 bp, Homo sapien
tgtcccagaagccaacccgtccctc

SEQ ID NO: 1159094 - DNA, 25 bp, Homo sapien
cccagaagccaacccgtccctctgt

SEQ ID NO: 1159095 - DNA, 25 bp, Homo sapien
tcccagaagccaacccgtccctctg

SEQ ID NO: 1159096 - DNA, 25 bp, Homo sapien
gggtcgggccgctgcagcaagcctg

SEQ ID NO: 1159097 - DNA, 25 bp, Homo sapien
cttgaattttcgcagctgctccagc

SEQ ID NO: 1159098 - DNA, 25 bp, Homo sapien
gctccagctgcgctgcgctaagcgc

SEQ ID NO: 1159099 - DNA, 25 bp, Homo sapien
gcctggcagcgtctccatcttgctg

SEQ ID NO: 1159100 - DNA, 25 bp, Homo sapien
ggcctttactaaggtcggatgtgtc

SEQ ID NO: 1159101 - DNA, 25 bp, Homo sapien
tcattctgccgcttgttcaggatga

SEQ ID NO: 1159102 - DNA, 25 bp, Homo sapien
gatgtgtctggcagtaatttcggcc

SEQ ID NO: 1159103 - DNA, 25 bp, Homo sapien
taaggtcggatgtgtctggcagtaa

SEQ ID NO: 1159104 - DNA, 25 bp, Homo sapien
taggtacttttcgttagcaatccga

SEQ ID NO: 1159105 - DNA, 25 bp, Homo sapien
tttcgttagcaatccgagtctgaat

SEQ ID NO: 1159106 - DNA, 25 bp, Homo sapien
actctacttctttgtgggtccttag

SEQ ID NO: 1159107 - DNA, 25 bp, Homo sapien
agaaaccacttatgagccactctac

SEQ ID NO: 1159108 - DNA, 25 bp, Homo sapien
attctaggatgttgtctggtctttt

SEQ ID NO: 1159109 - DNA, 25 bp, Homo sapien
cagcaaattctaggatgttgtctgg

SEQ ID NO: 1159110 - DNA, 25 bp, Homo sapien
ggatgttgtctggtcttttcaaaaa

SEQ ID NO: 1159111 - DNA, 25 bp, Homo sapien
tctaggatgttgtctggtcttttca

SEQ ID NO: 1159112 - DNA, 25 bp, Homo sapien
cagagagccatcagagggctcaggg

SEQ ID NO: 1159113 - DNA, 25 bp, Homo sapien
tgggaagtcttggatccgtgaagta

SEQ ID NO: 1159114 - DNA, 25 bp, Homo sapien
tagctgcatgtgaatcttgttggga

SEQ ID NO: 1159115 - DNA, 25 bp, Homo sapien
cccgaggctggattccgtctggtct

SEQ ID NO: 1159116 - DNA, 25 bp, Homo sapien
tgattttgctaattaagccgctttc

SEQ ID NO: 1159117 - DNA, 25 bp, Homo sapien
gcttttgcgacagtagacagagccc

SEQ ID NO: 1159118 - DNA, 25 bp, Homo sapien
ggcagcttggaaacccacactgatg

SEQ ID NO: 1159119 - DNA, 25 bp, Homo sapien
actgatggcagtagggctctcatgc

SEQ ID NO: 1159120 - DNA, 25 bp, Homo sapien
tagggctctcatgcctccagatgac

SEQ ID NO: 1159121 - DNA, 25 bp, Homo sapien
aggccggctgcctcacacgtcaaag

SEQ ID NO: 1159122 - DNA, 25 bp, Homo sapien
gccggctgcctcacacgtcaaagtg

SEQ ID NO: 1159123 - DNA, 25 bp, Homo sapien
cggctgcctcacacgtcaaagtggg

SEQ ID NO: 1159124 - DNA, 25 bp, Homo sapien
aacaggccggctgcctcacacgtca

SEQ ID NO: 1159125 - DNA, 25 bp, Homo sapien
tacagcatcttggagaacactttgc

SEQ ID NO: 1159126 - DNA, 25 bp, Homo sapien
gccaggaaaccaccccaagaatgaa

SEQ ID NO: 1159127 - DNA, 25 bp, Homo sapien
tccacatcagagatccttagtaggt

SEQ ID NO: 1159128 - DNA, 25 bp, Homo sapien
caggaaaggttctcgcattgtctaa

SEQ ID NO: 1159129 - DNA, 25 bp, Homo sapien
gcattctccaaacagcatgtcaact

SEQ ID NO: 1159130 - DNA, 25 bp, Homo sapien
aggcattctccaaacagcatgtcaa

SEQ ID NO: 1159131 - DNA, 25 bp, Homo sapien
aggccttgagcaggcattctccaaa

SEQ ID NO: 1159132 - DNA, 25 bp, Homo sapien
tcaggccttgagcaggcattctcca

SEQ ID NO: 1159133 - DNA, 25 bp, Homo sapien
caggaatgaaacaacatatcactac

SEQ ID NO: 1159134 - DNA, 25 bp, Homo sapien
aaaggataagggaataccatggatc

SEQ ID NO: 1159135 - DNA, 25 bp, Homo sapien
tacacgtaaattgacagcttagaca

SEQ ID NO: 1159136 - DNA, 25 bp, Homo sapien
gggaataccatggatctatacacgt

SEQ ID NO: 1159137 - DNA, 25 bp, Homo sapien
gggtgccagcaacaaagcctggtta

SEQ ID NO: 1159138 - DNA, 25 bp, Homo sapien
gacattcactgatgcagtagttaga

SEQ ID NO: 1159139 - DNA, 25 bp, Homo sapien
gagtccatgacgttgaacccttgca

SEQ ID NO: 1159140 - DNA, 25 bp, Homo sapien
catggctcctccgttcattgatcac

SEQ ID NO: 1159141 - DNA, 25 bp, Homo sapien
actgtacttacacatgtagtggaaa

SEQ ID NO: 1159142 - DNA, 25 bp, Homo sapien
ttgtgcttcttgaagcaactgtact

SEQ ID NO: 1159143 - DNA, 25 bp, Homo sapien
tagtggaaatagtcttggtggatga

SEQ ID NO: 1159144 - DNA, 25 bp, Homo sapien
caaggggatgggtgcatgaacatgt

SEQ ID NO: 1159145 - DNA, 25 bp, Homo sapien
gaactggaattgcttcttggtggca

SEQ ID NO: 1159146 - DNA, 25 bp, Homo sapien
tggaattgcttcttggtggcattgg

SEQ ID NO: 1159147 - DNA, 25 bp, Homo sapien
aagtgtaccatcttgctcatgctgg

SEQ ID NO: 1159148 - DNA, 25 bp, Homo sapien
tgttgaagtgtaccatcttgctcat

SEQ ID NO: 1159149 - DNA, 25 bp, Homo sapien
ttcaggtggattgtgccaaggtcac

SEQ ID NO: 1159150 - DNA, 25 bp, Homo sapien
cagagctctgtaactcaagtgtggc

SEQ ID NO: 1159151 - DNA, 25 bp, Homo sapien
tatttgagctcacctaccactctga

SEQ ID NO: 1159152 - DNA, 25 bp, Homo sapien
gaggtcatgcagtttagggtagtaa

SEQ ID NO: 1159153 - DNA, 25 bp, Homo sapien
gaataagcacaatggattctgcttc

SEQ ID NO: 1159154 - DNA, 25 bp, Homo sapien
agtcatcaatgtgaataagcacaat

SEQ ID NO: 1159155 - DNA, 25 bp, Homo sapien
tcttcttagatacattgatgtagtc

SEQ ID NO: 1159156 - DNA, 25 bp, Homo sapien
ttaacacttactcttcttagataca

SEQ ID NO: 1159157 - DNA, 25 bp, Homo sapien
gactgcactgcgtatacatgttgaa

SEQ ID NO: 1159158 - DNA, 25 bp, Homo sapien
gcagcaaagcagaatcgggagcagt

SEQ ID NO: 1159159 - DNA, 25 bp, Homo sapien
tttattgggacaaacaggagagcca

SEQ ID NO: 1159160 - DNA, 25 bp, Homo sapien
taagctagatgcagtagaccgaaac

SEQ ID NO: 1159161 - DNA, 25 bp, Homo sapien
tggagctcatcctgacgcagtcggt

SEQ ID NO: 1159162 - DNA, 25 bp, Homo sapien
gacatcgcgtctataagctggtgga

SEQ ID NO: 1159163 - DNA, 25 bp, Homo sapien
gacacgaagcatcggcccaaagaaa

SEQ ID NO: 1159164 - DNA, 25 bp, Homo sapien
tctcaggctggtccggtttggcatc

SEQ ID NO: 1159165 - DNA, 25 bp, Homo sapien
tcctgccgccgacgccggggtcctc

SEQ ID NO: 1159166 - DNA, 25 bp, Homo sapien
ggcagcactggcgggggcctttcct

SEQ ID NO: 1159167 - DNA, 25 bp, Homo sapien
gcaggcagcactggcgggggccttt

SEQ ID NO: 1159168 - DNA, 25 bp, Homo sapien
ccgcaggcagcactggcgggggcct

SEQ ID NO: 1159169 - DNA, 25 bp, Homo sapien
tcagtaattctaggcgtccgtcacc

SEQ ID NO: 1159170 - DNA, 25 bp, Homo sapien
gaagagcgtcttttccggcgtcagt

SEQ ID NO: 1159171 - DNA, 25 bp, Homo sapien
taaaagttagcccagcaactggagc

SEQ ID NO: 1159172 - DNA, 25 bp, Homo sapien
gcaaaaataggcaagccgcggtgcc

SEQ ID NO: 1159173 - DNA, 25 bp, Homo sapien
caaaatttggttctgggactgccac

SEQ ID NO: 1159174 - DNA, 25 bp, Homo sapien
taaatggtattgtaagccacgagac

SEQ ID NO: 1159175 - DNA, 25 bp, Homo sapien
ggttgttaaccaagccagcatctga

SEQ ID NO: 1159176 - DNA, 25 bp, Homo sapien
tgagggtctactattagccaggcac

SEQ ID NO: 1159177 - DNA, 25 bp, Homo sapien
gctgagatcgtgccactgcactcca

SEQ ID NO: 1159178 - DNA, 25 bp, Homo sapien
ggctaacacgatgaaactctgtctg

SEQ ID NO: 1159179 - DNA, 25 bp, Homo sapien
taacacgatgaaactctgtctgtac

SEQ ID NO: 1159180 - DNA, 25 bp, Homo sapien
ctgagatcgtgccactgcactccag

SEQ ID NO: 1159181 - DNA, 25 bp, Homo sapien
gacccagtgggcactatgacatgga

SEQ ID NO: 1159182 - DNA, 25 bp, Homo sapien
tctgtactggttggccaaaagccct

SEQ ID NO: 1159183 - DNA, 25 bp, Homo sapien
cctccctgtggcaaagtgaagttca

SEQ ID NO: 1159184 - DNA, 25 bp, Homo sapien
ggaaagctcacacgttatctaaagg

SEQ ID NO: 1159185 - DNA, 25 bp, Homo sapien
aagggagtagacagaggggcgacac

SEQ ID NO: 1159186 - DNA, 25 bp, Homo sapien
gaaagggagtagacagaggggcgac

SEQ ID NO: 1159187 - DNA, 25 bp, Homo sapien
cttgatataagaaagggagtagaca

SEQ ID NO: 1159188 - DNA, 25 bp, Homo sapien
tgatataagaaagggagtagacaga

SEQ ID NO: 1159189 - DNA, 25 bp, Homo sapien
gagagtgatccggtacttgtaacag

SEQ ID NO: 1159190 - DNA, 25 bp, Homo sapien
cttctcccggagagtgatccggtac

SEQ ID NO: 1159191 - DNA, 25 bp, Homo sapien
taataggcgtatggtgaccagatcg

SEQ ID NO: 1159192 - DNA, 25 bp, Homo sapien
ccagatcgggtagaggtagttacgt

SEQ ID NO: 1159193 - DNA, 25 bp, Homo sapien
gtcctcctcttccttataagtgatg

SEQ ID NO: 1159194 - DNA, 25 bp, Homo sapien
cggggctggagtgtcaagtcctcct

SEQ ID NO: 1159195 - DNA, 25 bp, Homo sapien
gaacggggctggagtgtcaagtcct

SEQ ID NO: 1159196 - DNA, 25 bp, Homo sapien
ggctggagtgtcaagtcctcctctt

SEQ ID NO: 1159197 - DNA, 25 bp, Homo sapien
cgaatacagttctttaagctggtcg

SEQ ID NO: 1159198 - DNA, 25 bp, Homo sapien
ggttaccctgctcggtgcttttgcc

SEQ ID NO: 1159199 - DNA, 25 bp, Homo sapien
cctcctggaggcctactagggactc

SEQ ID NO: 1159200 - DNA, 25 bp, Homo sapien
agctggtcgtggttaccctgctcgg

SEQ ID NO: 1159201 - DNA, 25 bp, Homo sapien
gtagccagcaccgtcaagttcccag

SEQ ID NO: 1159202 - DNA, 25 bp, Homo sapien
ggtggagcagggggtcagtagccag

SEQ ID NO: 1159203 - DNA, 25 bp, Homo sapien
gggtcagtagccagcaccgtcaagt

SEQ ID NO: 1159204 - DNA, 25 bp, Homo sapien
tcagtagccagcaccgtcaagttcc

SEQ ID NO: 1159205 - DNA, 25 bp, Homo sapien
gaggtaaggcggaagtgaaagtcta

SEQ ID NO: 1159206 - DNA, 25 bp, Homo sapien
taaggcggaagtgaaagtctaactg

SEQ ID NO: 1159207 - DNA, 25 bp, Homo sapien
ggcggaagtgaaagtctaactgtac

SEQ ID NO: 1159208 - DNA, 25 bp, Homo sapien
agtgaaagtctaactgtactgggtc

SEQ ID NO: 1159209 - DNA, 25 bp, Homo sapien
agagaaggccgtgccaatgggcaga

SEQ ID NO: 1159210 - DNA, 25 bp, Homo sapien
gatccaaggcctgatatgggatatc

SEQ ID NO: 1159211 - DNA, 25 bp, Homo sapien
tttcccggttgccttgatccaaggc

SEQ ID NO: 1159212 - DNA, 25 bp, Homo sapien
agagtcgacggtcacagagaaggcc

SEQ ID NO: 1159213 - DNA, 25 bp, Homo sapien
gatcattctggaagttcacaaacac

SEQ ID NO: 1159214 - DNA, 25 bp, Homo sapien
tgtcgttccgatcattctggaagtt

SEQ ID NO: 1159215 - DNA, 25 bp, Homo sapien
gttccgatcattctggaagttcaca

SEQ ID NO: 1159216 - DNA, 25 bp, Homo sapien
ctctgtcgttccgatcattctggaa

SEQ ID NO: 1159217 - DNA, 25 bp, Homo sapien
caacttcccaccttcgtggtaggtg

SEQ ID NO: 1159218 - DNA, 25 bp, Homo sapien
cttgatggaacaagttacaacttcc

SEQ ID NO: 1159219 - DNA, 25 bp, Homo sapien
aaagaatccctgaaatgcctgaggg

SEQ ID NO: 1159220 - DNA, 25 bp, Homo sapien
tgtaatttcaccagtgctccttcag

SEQ ID NO: 1159221 - DNA, 25 bp, Homo sapien
cataaagatgacattgtccaaggga

SEQ ID NO: 1159222 - DNA, 25 bp, Homo sapien
ggagggcagggtgatctggtctgac

SEQ ID NO: 1159223 - DNA, 25 bp, Homo sapien
cacctcaaagcccatgtagctgaag

SEQ ID NO: 1159224 - DNA, 25 bp, Homo sapien
tagctgaaggcccgcagcagggcac

SEQ ID NO: 1159225 - DNA, 25 bp, Homo sapien
cactgggcaggtggccaacatccct

SEQ ID NO: 1159226 - DNA, 25 bp, Homo sapien
tgaatcacatcccgggcccctgatt

SEQ ID NO: 1159227 - DNA, 25 bp, Homo sapien
ccctcaaagcgttggaataagcatg

SEQ ID NO: 1159228 - DNA, 25 bp, Homo sapien
gattgcactaccctttattcctagg

SEQ ID NO: 1159229 - DNA, 25 bp, Homo sapien
gattccatgtgtcaaggcttccagc

SEQ ID NO: 1159230 - DNA, 25 bp, Homo sapien
ggtgtttatgtttcctagactatga

SEQ ID NO: 1159231 - DNA, 25 bp, Homo sapien
ttggtgtttatgtttcctagactat

SEQ ID NO: 1159232 - DNA, 25 bp, Homo sapien
gtttatgtttcctagactatgaata

SEQ ID NO: 1159233 - DNA, 25 bp, Homo sapien
gtgtttatgtttcctagactatgaa

SEQ ID NO: 1159234 - DNA, 25 bp, Homo sapien
caatttttgcgaacggtgccactca

SEQ ID NO: 1159235 - DNA, 25 bp, Homo sapien
tgattcaacgctctcatgcctcggt

SEQ ID NO: 1159236 - DNA, 25 bp, Homo sapien
tgtgtccgtgcctccgcaaaggaat

SEQ ID NO: 1159237 - DNA, 25 bp, Homo sapien
ttgagtcctcatcgccatatgcggg

SEQ ID NO: 1159238 - DNA, 25 bp, Homo sapien
ctgccccacggaggcagtagcagga

SEQ ID NO: 1159239 - DNA, 25 bp, Homo sapien
cgcagtgctggtctcgcgaggctcc

SEQ ID NO: 1159240 - DNA, 25 bp, Homo sapien
caggtattgtgatggaagctagtgc

SEQ ID NO: 1159241 - DNA, 25 bp, Homo sapien
ttcccagggtgagcccctagcgcgg

SEQ ID NO: 1159242 - DNA, 25 bp, Homo sapien
gttgtccttgagaagagcagtgact

SEQ ID NO: 1159243 - DNA, 25 bp, Homo sapien
aagatatatacttgtcatttgtgca

SEQ ID NO: 1159244 - DNA, 25 bp, Homo sapien
tagtttatggtatcaggagtcagaa

SEQ ID NO: 1159245 - DNA, 25 bp, Homo sapien
tctgctgctggttacacaaatgtat

SEQ ID NO: 1159246 - DNA, 25 bp, Homo sapien
gctgtgctggatccctgattcagga

SEQ ID NO: 1159247 - DNA, 25 bp, Homo sapien
ggacccaaagatgctgtggcaccat

SEQ ID NO: 1159248 - DNA, 25 bp, Homo sapien
tgagagcccggctaagcaatgatcc

SEQ ID NO: 1159249 - DNA, 25 bp, Homo sapien
tcctaggttagagagaggttgcaca

SEQ ID NO: 1159250 - DNA, 25 bp, Homo sapien
cagaagttttgtggcccatgtgcag

SEQ ID NO: 1159251 - DNA, 25 bp, Homo sapien
tcatggctgtctgattgaaaactcc

SEQ ID NO: 1159252 - DNA, 25 bp, Homo sapien
tgagggcctattctatgtcagtggc

SEQ ID NO: 1159253 - DNA, 25 bp, Homo sapien
catgtgcagggatgtatggtaccac

SEQ ID NO: 1159254 - DNA, 25 bp, Homo sapien
cgtatagactaaggtctccttggca

SEQ ID NO: 1159255 - DNA, 25 bp, Homo sapien
agtacatctcaacatcgcaattcag

SEQ ID NO: 1159256 - DNA, 25 bp, Homo sapien
gacattgcaacctggcgtatagact

SEQ ID NO: 1159257 - DNA, 25 bp, Homo sapien
caataactgaatcgaatctctgtct

SEQ ID NO: 1159258 - DNA, 25 bp, Homo sapien
cacctcctggatgtggcagataacg

SEQ ID NO: 1159259 - DNA, 25 bp, Homo sapien
tgccttccatggcttgactgccttc

SEQ ID NO: 1159260 - DNA, 25 bp, Homo sapien
tccatggcttgactgccttccacct

SEQ ID NO: 1159261 - DNA, 25 bp, Homo sapien
tcctggatgtggcagataacgccct

SEQ ID NO: 1159262 - DNA, 25 bp, Homo sapien
aagactcatcgccaaagcatcctgg

SEQ ID NO: 1159263 - DNA, 25 bp, Homo sapien
cgggagtaccactctctgttagaga

SEQ ID NO: 1159264 - DNA, 25 bp, Homo sapien
caggcccatcgctagctctgtaaca

SEQ ID NO: 1159265 - DNA, 25 bp, Homo sapien
tgcagtacaatctggagctggcctt

SEQ ID NO: 1159266 - DNA, 25 bp, Homo sapien
ggaataataatgtttccctgtggtg

SEQ ID NO: 1159267 - DNA, 25 bp, Homo sapien
aaagtaaaagcatggatttacataa

SEQ ID NO: 1159268 - DNA, 25 bp, Homo sapien
ggatttacataaagtgtcctgcaaa

SEQ ID NO: 1159269 - DNA, 25 bp, Homo sapien
tctcctcaaggctccatgcactggt

SEQ ID NO: 1159270 - DNA, 25 bp, Homo sapien
agattcccagcccatctgactgatg

SEQ ID NO: 1159271 - DNA, 25 bp, Homo sapien
gctagtcagtcgcagaatccagatt

SEQ ID NO: 1159272 - DNA, 25 bp, Homo sapien
tactgcagcactccaagaacatgga

SEQ ID NO: 1159273 - DNA, 25 bp, Homo sapien
cacatgaatggaaggtctggaggcc

SEQ ID NO: 1159274 - DNA, 25 bp, Homo sapien
catgatatctacactctagacccag

SEQ ID NO: 1159275 - DNA, 25 bp, Homo sapien
tttcacagtgcccatgatatctaca

SEQ ID NO: 1159276 - DNA, 25 bp, Homo sapien
tcattcatggtcaaggagagtctaa

SEQ ID NO: 1159277 - DNA, 25 bp, Homo sapien
tactaaaaaactggttgctcttcat

SEQ ID NO: 1159278 - DNA, 25 bp, Homo sapien
cactgatatgtttctcagagtacga

SEQ ID NO: 1159279 - DNA, 25 bp, Homo sapien
tgtttctcagagtacgagttagttg

SEQ ID NO: 1159280 - DNA, 25 bp, Homo sapien
agttgttttgtagcgtgttccaagg

SEQ ID NO: 1159281 - DNA, 25 bp, Homo sapien
ttggaatccagtccactgatatgtt

SEQ ID NO: 1159282 - DNA, 25 bp, Homo sapien
gaaaatatggtctaaccccagcctg

SEQ ID NO: 1159283 - DNA, 25 bp, Homo sapien
ggtctaactacatgttttttgtctg

SEQ ID NO: 1159284 - DNA, 25 bp, Homo sapien
tccaattcagaatcatatgtcacat

SEQ ID NO: 1159285 - DNA, 25 bp, Homo sapien
ttctgtggttcaggatccaattcag

SEQ ID NO: 1159286 - DNA, 25 bp, Homo sapien
tcaggaacctggctgacaaaagctt

SEQ ID NO: 1159287 - DNA, 25 bp, Homo sapien
gccaggcctccacgtggttccattg

SEQ ID NO: 1159288 - DNA, 25 bp, Homo sapien
gactccaaaatcacccttcgtgtag

SEQ ID NO: 1159289 - DNA, 25 bp, Homo sapien
ttcgtgtaggcatccagttgccaga

SEQ ID NO: 1159290 - DNA, 25 bp, Homo sapien
gggctgttcacactaagtctcaaca

SEQ ID NO: 1159291 - DNA, 25 bp, Homo sapien
gcaattcctctagtccctggccagg

SEQ ID NO: 1159292 - DNA, 25 bp, Homo sapien
ctttgggagctgacaaaaaggccct

SEQ ID NO: 1159293 - DNA, 25 bp, Homo sapien
gtctcaacatcaggttcaaaaagta

SEQ ID NO: 1159294 - DNA, 25 bp, Homo sapien
aatgtgtccacaagggaaatcaggc

SEQ ID NO: 1159295 - DNA, 25 bp, Homo sapien
tgctccagacagtcactgaaggctg

SEQ ID NO: 1159296 - DNA, 25 bp, Homo sapien
tgaccgtgggtcaccaagttcatgg

SEQ ID NO: 1159297 - DNA, 25 bp, Homo sapien
tcttccatccggatgcctgctccag

SEQ ID NO: 1159298 - DNA, 25 bp, Homo sapien
tccagccaacccagaagaagtcggt

SEQ ID NO: 1159299 - DNA, 25 bp, Homo sapien
tcaccaggtgcatccaagtggaagg

SEQ ID NO: 1159300 - DNA, 25 bp, Homo sapien
gaggcaagactcaaccaaatggtgc

SEQ ID NO: 1159301 - DNA, 25 bp, Homo sapien
ccagtgtgcagatatgggcttctca

SEQ ID NO: 1159302 - DNA, 25 bp, Homo sapien
ggagcctagggcttaaggagcaccc

SEQ ID NO: 1159303 - DNA, 25 bp, Homo sapien
ggctctgtgtcttgtgtggccacca

SEQ ID NO: 1159304 - DNA, 25 bp, Homo sapien
aaactaccaggagacctgcatctgg

SEQ ID NO: 1159305 - DNA, 25 bp, Homo sapien
gaggaccccatctgtggcattggca

SEQ ID NO: 1159306 - DNA, 25 bp, Homo sapien
tcttctagggcaaccaaatacagag

SEQ ID NO: 1159307 - DNA, 25 bp, Homo sapien
cactgcgcgaggactgatctttaga

SEQ ID NO: 1159308 - DNA, 25 bp, Homo sapien
ttctgcctcacagcaacggctgcgg

SEQ ID NO: 1159309 - DNA, 25 bp, Homo sapien
aaacatgagagtatccctgccaagc

SEQ ID NO: 1159310 - DNA, 25 bp, Homo sapien
gagccaagatcatgccacatcactc

SEQ ID NO: 1159311 - DNA, 25 bp, Homo sapien
ccaagatcatgccacatcactccaa

SEQ ID NO: 1159312 - DNA, 25 bp, Homo sapien
tcactccaacctgggcaacagaaca

SEQ ID NO: 1159313 - DNA, 25 bp, Homo sapien
atcactccaacctgggcaacagaac

SEQ ID NO: 1159314 - DNA, 25 bp, Homo sapien
gtgaccttccgaaacagccttctga

SEQ ID NO: 1159315 - DNA, 25 bp, Homo sapien
ggagaagcctgccaacagtgacctt

SEQ ID NO: 1159316 - DNA, 25 bp, Homo sapien
gcatatcgacaactctcgggccagg

SEQ ID NO: 1159317 - DNA, 25 bp, Homo sapien
tcactgctgaatccctgtagggaga

SEQ ID NO: 1159318 - DNA, 25 bp, Homo sapien
gatagagcagccattacaaagcagt

SEQ ID NO: 1159319 - DNA, 25 bp, Homo sapien
caaaaatgagcgcaaaatgaaggtg

SEQ ID NO: 1159320 - DNA, 25 bp, Homo sapien
gctttttagaagcaagagggcacca

SEQ ID NO: 1159321 - DNA, 25 bp, Homo sapien
ctcaatagcaacagtagaagccaga

SEQ ID NO: 1159322 - DNA, 25 bp, Homo sapien
tacatactgtgtcggaattgatggg

SEQ ID NO: 1159323 - DNA, 25 bp, Homo sapien
cgtgaagcatagtggcgtgaaagca

SEQ ID NO: 1159324 - DNA, 25 bp, Homo sapien
tgaaattgcggaccttcgtggtgag

SEQ ID NO: 1159325 - DNA, 25 bp, Homo sapien
cggactaacatccaaaagctgggcc

SEQ ID NO: 1159326 - DNA, 25 bp, Homo sapien
gagcagttcgctcctccctgataag

SEQ ID NO: 1159327 - DNA, 25 bp, Homo sapien
tcatgagcagatcaggacacttagc

SEQ ID NO: 1159328 - DNA, 25 bp, Homo sapien
tgataagagttgtcccaaagggtcg

SEQ ID NO: 1159329 - DNA, 25 bp, Homo sapien
caaagggtcgcttaaggaatctgcc

SEQ ID NO: 1159330 - DNA, 25 bp, Homo sapien
tatgttgtgcgttttaggtgaggcc

SEQ ID NO: 1159331 - DNA, 25 bp, Homo sapien
tagcttttcccgctaagaggtttgc

SEQ ID NO: 1159332 - DNA, 25 bp, Homo sapien
agtctccaggaatggagttttatgt

SEQ ID NO: 1159333 - DNA, 25 bp, Homo sapien
ctaagaggtttgcagttgttgcgga

SEQ ID NO: 1159334 - DNA, 25 bp, Homo sapien
ccaggattctcccagtggtctgagg

SEQ ID NO: 1159335 - DNA, 25 bp, Homo sapien
tctgcagggcgtggttagcacaaag

SEQ ID NO: 1159336 - DNA, 25 bp, Homo sapien
gaccatgtgggtgtggccggttgca

SEQ ID NO: 1159337 - DNA, 25 bp, Homo sapien
cagttccgtctctgcgggagcttct

SEQ ID NO: 1159338 - DNA, 25 bp, Homo sapien
ctgtgtgacgtggtttctctactga

SEQ ID NO: 1159339 - DNA, 25 bp, Homo sapien
ctgtcttaataagtggaaccagaaa

SEQ ID NO: 1159340 - DNA, 25 bp, Homo sapien
taagtggaaccagaaagagatggag

SEQ ID NO: 1159341 - DNA, 25 bp, Homo sapien
tactgaaagggttcccttgctgtct

SEQ ID NO: 1159342 - DNA, 25 bp, Homo sapien
tgttcgtagcctgctcccggctgta

SEQ ID NO: 1159343 - DNA, 25 bp, Homo sapien
caggccgggtctgcatgttcgtagc

SEQ ID NO: 1159344 - DNA, 25 bp, Homo sapien
tccgtcggccaaacaggcgtttctg

SEQ ID NO: 1159345 - DNA, 25 bp, Homo sapien
tgtaccgcccaagtaggcgcgggta

SEQ ID NO: 1159346 - DNA, 25 bp, Homo sapien
tccctttatgtttgcgttgctttac

SEQ ID NO: 1159347 - DNA, 25 bp, Homo sapien
ccactcgtctctcgggttaccgaat

SEQ ID NO: 1159348 - DNA, 25 bp, Homo sapien
ctttatgtttgcgttgctttactcc

SEQ ID NO: 1159349 - DNA, 25 bp, Homo sapien
tatgtttgcgttgctttactcccac

SEQ ID NO: 1159350 - DNA, 25 bp, Homo sapien
gagccggttacctctggttctgcgc

SEQ ID NO: 1159351 - DNA, 25 bp, Homo sapien
tctgaggtcgataggactccacgtg

SEQ ID NO: 1159352 - DNA, 25 bp, Homo sapien
gcagggtcatccagcaagtaattcc

SEQ ID NO: 1159353 - DNA, 25 bp, Homo sapien
taatctgatagtgcctctgaggtcg

SEQ ID NO: 1159354 - DNA, 25 bp, Homo sapien
caacagccaatattagtcagaggtg

SEQ ID NO: 1159355 - DNA, 25 bp, Homo sapien
gggattgggctcttttccaccaaca

SEQ ID NO: 1159356 - DNA, 25 bp, Homo sapien
cagaggtggcacttggaggattccc

SEQ ID NO: 1159357 - DNA, 25 bp, Homo sapien
taggatcattcattcctcccaaggc

SEQ ID NO: 1159358 - DNA, 25 bp, Homo sapien
cagggttgcacggaaagtaatagct

SEQ ID NO: 1159359 - DNA, 25 bp, Homo sapien
tatacaggaagatcttgaagagctg

SEQ ID NO: 1159360 - DNA, 25 bp, Homo sapien
tcagcaccagggttgcacggaaagt

SEQ ID NO: 1159361 - DNA, 25 bp, Homo sapien
tgtccccttgaatagtcagcaccag

SEQ ID NO: 1159362 - DNA, 25 bp, Homo sapien
tgcaacaaaagggatccgagatttc

SEQ ID NO: 1159363 - DNA, 25 bp, Homo sapien
caaaagggatccgagatttcctcca

SEQ ID NO: 1159364 - DNA, 25 bp, Homo sapien
taaacccagtcgcattgcaatccct

SEQ ID NO: 1159365 - DNA, 25 bp, Homo sapien
gatttcctccactggtgactgtgac

SEQ ID NO: 1159366 - DNA, 25 bp, Homo sapien
tacaaggtcactaggcaactggaat

SEQ ID NO: 1159367 - DNA, 25 bp, Homo sapien
gagactgattctctaatccctgaat

SEQ ID NO: 1159368 - DNA, 25 bp, Homo sapien
tgatccatcgttggctcaaacactg

SEQ ID NO: 1159369 - DNA, 25 bp, Homo sapien
tgagtaaagtattgcgctagacagc

SEQ ID NO: 1159370 - DNA, 25 bp, Homo sapien
tacagtgattcaggtacccaggctc

SEQ ID NO: 1159371 - DNA, 25 bp, Homo sapien
gctctttccaattatgactcttcca

SEQ ID NO: 1159372 - DNA, 25 bp, Homo sapien
atacagtgattcaggtacccaggct

SEQ ID NO: 1159373 - DNA, 25 bp, Homo sapien
cccaggctctttccaattatgactc

SEQ ID NO: 1159374 - DNA, 25 bp, Homo sapien
gcaagtttagacatccacaggaatg

SEQ ID NO: 1159375 - DNA, 25 bp, Homo sapien
ctttgggcaagtttagacatccaca

SEQ ID NO: 1159376 - DNA, 25 bp, Homo sapien
cattcaaaatcgactggagccagag

SEQ ID NO: 1159377 - DNA, 25 bp, Homo sapien
ccaacccctctatactcctctgaaa

SEQ ID NO: 1159378 - DNA, 25 bp, Homo sapien
gatgtcaacgcctatgccttcaacc

SEQ ID NO: 1159379 - DNA, 25 bp, Homo sapien
ccttcaacctctggccctgtgggtg

SEQ ID NO: 1159380 - DNA, 25 bp, Homo sapien
tgccttcaacctctggccctgtggg

SEQ ID NO: 1159381 - DNA, 25 bp, Homo sapien
tcagaacagttggagatgtcaacgc

SEQ ID NO: 1159382 - DNA, 25 bp, Homo sapien
ttaatacggggtgttgaggtgcacc

SEQ ID NO: 1159383 - DNA, 25 bp, Homo sapien
taatacggggtgttgaggtgcacca

SEQ ID NO: 1159384 - DNA, 25 bp, Homo sapien
aatacggggtgttgaggtgcaccaa

SEQ ID NO: 1159385 - DNA, 25 bp, Homo sapien
atacggggtgttgaggtgcaccaac

SEQ ID NO: 1159386 - DNA, 25 bp, Homo sapien
aaaagataatgaagggcatttcagg

SEQ ID NO: 1159387 - DNA, 25 bp, Homo sapien
agaagtgtctcttcaatgttaccaa

SEQ ID NO: 1159388 - DNA, 25 bp, Homo sapien
ctgaaaagataatgaagggcatttc

SEQ ID NO: 1159389 - DNA, 25 bp, Homo sapien
gtgtctcttcaatgttaccaaccaa

SEQ ID NO: 1159390 - DNA, 25 bp, Homo sapien
ctttatgtgagtactgcaagggctg

SEQ ID NO: 1159391 - DNA, 25 bp, Homo sapien
gtgagtactgcaagggctgttccag

SEQ ID NO: 1159392 - DNA, 25 bp, Homo sapien
tgtgagtactgcaagggctgttcca

SEQ ID NO: 1159393 - DNA, 25 bp, Homo sapien
tatgtgagtactgcaagggctgttc

SEQ ID NO: 1159394 - DNA, 25 bp, Homo sapien
catctgttccctcagttctgggctt

SEQ ID NO: 1159395 - DNA, 25 bp, Homo sapien
cctccccctcttgaagttgctgctg

SEQ ID NO: 1159396 - DNA, 25 bp, Homo sapien
agttgctgctgcccctcactataaa

SEQ ID NO: 1159397 - DNA, 25 bp, Homo sapien
tgctgcccctcactataaaccagct

SEQ ID NO: 1159398 - DNA, 25 bp, Homo sapien
gcatcctccccctcttgaagttgct

SEQ ID NO: 1159399 - DNA, 25 bp, Homo sapien
aagagcatccactgctacggcagcc

SEQ ID NO: 1159400 - DNA, 25 bp, Homo sapien
actgctacggcagccccaaggtcaa

SEQ ID NO: 1159401 - DNA, 25 bp, Homo sapien
ccactgctacggcagccccaaggtc

SEQ ID NO: 1159402 - DNA, 25 bp, Homo sapien
tgaagagcatccactgctacggcag

SEQ ID NO: 1159403 - DNA, 25 bp, Homo sapien
gaagattggccccattgccatgcaa

SEQ ID NO: 1159404 - DNA, 25 bp, Homo sapien
taaagggcttgtgtcgctgctctac

SEQ ID NO: 1159405 - DNA, 25 bp, Homo sapien
caaagttagactgtcattgcctcag

SEQ ID NO: 1159406 - DNA, 25 bp, Homo sapien
ttgcctcaggcatgtgtcctaaagg

SEQ ID NO: 1159407 - DNA, 25 bp, Homo sapien
ccatgtctgctgaagtctgaattct

SEQ ID NO: 1159408 - DNA, 25 bp, Homo sapien
ctgaattcttagcagtatgattcct

SEQ ID NO: 1159409 - DNA, 25 bp, Homo sapien
aattcttagcagtatgattcctttt

SEQ ID NO: 1159410 - DNA, 25 bp, Homo sapien
aagtctgaattcttagcagtatgat

SEQ ID NO: 1159411 - DNA, 25 bp, Homo sapien
cagtgattcgggctcctcccaatgc

SEQ ID NO: 1159412 - DNA, 25 bp, Homo sapien
ccttgtcctgctgaaccgtctccac

SEQ ID NO: 1159413 - DNA, 25 bp, Homo sapien
ttgtcctgctgaaccgtctccacgc

SEQ ID NO: 1159414 - DNA, 25 bp, Homo sapien
gaaccgtctccacgcactgttcaat

SEQ ID NO: 1159415 - DNA, 25 bp, Homo sapien
aaaacaaggtttgagacgcctgagc

SEQ ID NO: 1159416 - DNA, 25 bp, Homo sapien
gggagctcctgaaaacacgtgtgac

SEQ ID NO: 1159417 - DNA, 25 bp, Homo sapien
caactatactgcgtagggatactgc

SEQ ID NO: 1159418 - DNA, 25 bp, Homo sapien
cacttatggatgtcattctgggccc

SEQ ID NO: 1159419 - DNA, 25 bp, Homo sapien
gtcttctcacactggatgaagggct

SEQ ID NO: 1159420 - DNA, 25 bp, Homo sapien
tgtcttctcacactggatgaagggc

SEQ ID NO: 1159421 - DNA, 25 bp, Homo sapien
gggtactccctgctcttgatgctgt

SEQ ID NO: 1159422 - DNA, 25 bp, Homo sapien
tcttgatgctgtcactcatagatac

SEQ ID NO: 1159423 - DNA, 25 bp, Homo sapien
cagggtactccctgctcttgatgct

SEQ ID NO: 1159424 - DNA, 25 bp, Homo sapien
tgatgctgtcactcatagataccac

SEQ ID NO: 1159425 - DNA, 25 bp, Homo sapien
caaagtcttgggtgccgtctttctt

SEQ ID NO: 1159426 - DNA, 25 bp, Homo sapien
acaaagtcttgggtgccgtctttct

SEQ ID NO: 1159427 - DNA, 25 bp, Homo sapien
agtcttgggtgccgtctttcttcct

SEQ ID NO: 1159428 - DNA, 25 bp, Homo sapien
gtccttgaattgcagctcatccctc

SEQ ID NO: 1159429 - DNA, 25 bp, Homo sapien
aagcttctcgtccttgaattgcagc

SEQ ID NO: 1159430 - DNA, 25 bp, Homo sapien
gcaagcttctcgtccttgaattgca

SEQ ID NO: 1159431 - DNA, 25 bp, Homo sapien
ttctcgtccttgaattgcagctcat

SEQ ID NO: 1159432 - DNA, 25 bp, Homo sapien
tgtaatctcttccttaaccaggcca

SEQ ID NO: 1159433 - DNA, 25 bp, Homo sapien
ggatgaggttctctgtcagcctgca

SEQ ID NO: 1159434 - DNA, 25 bp, Homo sapien
tgctctcagatatcctgcccctggg

SEQ ID NO: 1159435 - DNA, 25 bp, Homo sapien
aggccagctctcgtgcctgagagtg

SEQ ID NO: 1159436 - DNA, 25 bp, Homo sapien
gggaacctccatgcttagtccagag

SEQ ID NO: 1159437 - DNA, 25 bp, Homo sapien
cagttacgaaggacgttgctgaaga

SEQ ID NO: 1159438 - DNA, 25 bp, Homo sapien
cgacagttacgaaggacgttgctga

SEQ ID NO: 1159439 - DNA, 25 bp, Homo sapien
ttcactctaacaagcgccctcctgt

SEQ ID NO: 1159440 - DNA, 25 bp, Homo sapien
cgtaaacatcgtcatccacatcttc

SEQ ID NO: 1159441 - DNA, 25 bp, Homo sapien
gggcacgtgattcccgcactttctc

SEQ ID NO: 1159442 - DNA, 25 bp, Homo sapien
ctgggggcacgtgattcccgcactt

SEQ ID NO: 1159443 - DNA, 25 bp, Homo sapien
tcagcctcctcaacgtaaacatcgt

SEQ ID NO: 1159444 - DNA, 25 bp, Homo sapien
gggcagaggggggtgaacgatgaaa

SEQ ID NO: 1159445 - DNA, 25 bp, Homo sapien
ggcagaggggggtgaacgatgaaag

SEQ ID NO: 1159446 - DNA, 25 bp, Homo sapien
aatttgatcaatatcgaatcgaacc

SEQ ID NO: 1159447 - DNA, 25 bp, Homo sapien
gatcaatatcgaatcgaaccatcat

SEQ ID NO: 1159448 - DNA, 25 bp, Homo sapien
tttgatcaatatcgaatcgaaccat

SEQ ID NO: 1159449 - DNA, 25 bp, Homo sapien
caatttgatcaatatcgaatcgaac

SEQ ID NO: 1159450 - DNA, 25 bp, Homo sapien
gaaaggataaccctgtacagcccaa

SEQ ID NO: 1159451 - DNA, 25 bp, Homo sapien
aactgctctggcaaaggtatccaag

SEQ ID NO: 1159452 - DNA, 25 bp, Homo sapien
taagttgagctggtcgagcagcatc

SEQ ID NO: 1159453 - DNA, 25 bp, Homo sapien
gactaaacttcgaagcacacctgga

SEQ ID NO: 1159454 - DNA, 25 bp, Homo sapien
ccagcatgcagtgccaatcaagtga

SEQ ID NO: 1159455 - DNA, 25 bp, Homo sapien
gtgccaatcaagtgaattcctttct

SEQ ID NO: 1159456 - DNA, 25 bp, Homo sapien
gcagtgccaatcaagtgaattcctt

SEQ ID NO: 1159457 - DNA, 25 bp, Homo sapien
catgcagtgccaatcaagtgaattc

SEQ ID NO: 1159458 - DNA, 25 bp, Homo sapien
tcccatcagcaatcacagggactcg

SEQ ID NO: 1159459 - DNA, 25 bp, Homo sapien
aatcacagggactcggctgctccaa

SEQ ID NO: 1159460 - DNA, 25 bp, Homo sapien
tgctccaagatgccatcccacagaa

SEQ ID NO: 1159461 - DNA, 25 bp, Homo sapien
catcagcaatcacagggactcggct

SEQ ID NO: 1159462 - DNA, 25 bp, Homo sapien
tgtctcaggaaagagtacacattaa

SEQ ID NO: 1159463 - DNA, 25 bp, Homo sapien
ggtgacttggatttcattataaagc

SEQ ID NO: 1159464 - DNA, 25 bp, Homo sapien
cctttgcttggataaatgagagagt

SEQ ID NO: 1159465 - DNA, 25 bp, Homo sapien
gggcatgaactcgagggcacaaaca

SEQ ID NO: 1159466 - DNA, 25 bp, Homo sapien
tgtaagtcttagagaaaagaagtct

SEQ ID NO: 1159467 - DNA, 25 bp, Homo sapien
atttgtaagtcttagagaaaagaag

SEQ ID NO: 1159468 - DNA, 25 bp, Homo sapien
gatggtcttttgggacaggaggaac

SEQ ID NO: 1159469 - DNA, 25 bp, Homo sapien
tgcgccgccaggaacgagagagaaa

SEQ ID NO: 1159470 - DNA, 25 bp, Homo sapien
agagcgtgacagaaaattccgtgaa

SEQ ID NO: 1159471 - DNA, 25 bp, Homo sapien
agaaaattccgtgaagaggaacagc

SEQ ID NO: 1159472 - DNA, 25 bp, Homo sapien
ccgccaggaacgagagagaaaattc

SEQ ID NO: 1159473 - DNA, 25 bp, Homo sapien
ctgaagcaaattctgcttattcaaa

SEQ ID NO: 1159474 - DNA, 25 bp, Homo sapien
actgaagcaaattctgcttattcaa

SEQ ID NO: 1159475 - DNA, 25 bp, Homo sapien
actgagacttgaggagaaaggccac

SEQ ID NO: 1159476 - DNA, 25 bp, Homo sapien
tacagctgggttgtaaagtccctgg

SEQ ID NO: 1159477 - DNA, 25 bp, Homo sapien
tgctctcaatgaggtggaggcaacc

SEQ ID NO: 1159478 - DNA, 25 bp, Homo sapien
gagaatctcatcgtccacctgcaga

SEQ ID NO: 1159479 - DNA, 25 bp, Homo sapien
ctgtggataaaacatcaggaatttc

SEQ ID NO: 1159480 - DNA, 25 bp, Homo sapien
caggctcttattccacaccagaggg

SEQ ID NO: 1159481 - DNA, 25 bp, Homo sapien
tacaagagccgagaacatagagtgc

SEQ ID NO: 1159482 - DNA, 25 bp, Homo sapien
tgtttactacatctcccatgccagg

SEQ ID NO: 1159483 - DNA, 25 bp, Homo sapien
gccacataagctaacttccaaagcg

SEQ ID NO: 1159484 - DNA, 25 bp, Homo sapien
tattaagtctgccacataagctaac

SEQ ID NO: 1159485 - DNA, 25 bp, Homo sapien
aagaaatactattaagtctgccaca

SEQ ID NO: 1159486 - DNA, 25 bp, Homo sapien
tccaaagcgatttagtgtgcaaaaa

SEQ ID NO: 1159487 - DNA, 25 bp, Homo sapien
cagagcttggaggcatagccagaag

SEQ ID NO: 1159488 - DNA, 25 bp, Homo sapien
ttggaggcatagccagaaggccagc

SEQ ID NO: 1159489 - DNA, 25 bp, Homo sapien
gagcttggaggcatagccagaaggc

SEQ ID NO: 1159490 - DNA, 25 bp, Homo sapien
gcttggaggcatagccagaaggcca

SEQ ID NO: 1159491 - DNA, 25 bp, Homo sapien
cactccaaatcctggtctttagtgc

SEQ ID NO: 1159492 - DNA, 25 bp, Homo sapien
ggccttatatactccttgcctttta

SEQ ID NO: 1159493 - DNA, 25 bp, Homo sapien
tcaagttctttgggccttatatact

SEQ ID NO: 1159494 - DNA, 25 bp, Homo sapien
aataatgaggtcacactccaaatcc

SEQ ID NO: 1159495 - DNA, 25 bp, Homo sapien
cagtccccgtgatcctaacagagaa

SEQ ID NO: 1159496 - DNA, 25 bp, Homo sapien
gatacgaaagacctaggccgatggc

SEQ ID NO: 1159497 - DNA, 25 bp, Homo sapien
tattgtaggagctttccgcagcccc

SEQ ID NO: 1159498 - DNA, 25 bp, Homo sapien
tcctacttcccttggcgcgacggga

SEQ ID NO: 1159499 - DNA, 25 bp, Homo sapien
gagtaccaaggcaccatgtgcgggc

SEQ ID NO: 1159500 - DNA, 25 bp, Homo sapien
catgtgcgggcagaatgtgacacgc

SEQ ID NO: 1159501 - DNA, 25 bp, Homo sapien
tggagaggaccaacgacgccccaag

SEQ ID NO: 1159502 - DNA, 25 bp, Homo sapien
gaaaaatcaaggcatgacttttggg

SEQ ID NO: 1159503 - DNA, 25 bp, Homo sapien
aataccaagtgcctgaaatggtggg

SEQ ID NO: 1159504 - DNA, 25 bp, Homo sapien
ccagtttggactaagggaccctcag

SEQ ID NO: 1159505 - DNA, 25 bp, Homo sapien
gggactgggaaagacctcgttcata

SEQ ID NO: 1159506 - DNA, 25 bp, Homo sapien
tcgttcatacatatctggccatggt

SEQ ID NO: 1159507 - DNA, 25 bp, Homo sapien
tctcagggatcaaagagtatatgtc

SEQ ID NO: 1159508 - DNA, 25 bp, Homo sapien
cagagaagtgaactccatgtgcaaa

SEQ ID NO: 1159509 - DNA, 25 bp, Homo sapien
aagacactgaggaaatagtgttctc

SEQ ID NO: 1159510 - DNA, 25 bp, Homo sapien
tgtgacaaatcagccatgcaatatt

SEQ ID NO: 1159511 - DNA, 25 bp, Homo sapien
ccaaggttgtgctatggtaatctga

SEQ ID NO: 1159512 - DNA, 25 bp, Homo sapien
tattagatgagcttcagagcaaaag

SEQ ID NO: 1159513 - DNA, 25 bp, Homo sapien
gggtattccctgtcattggatagat

SEQ ID NO: 1159514 - DNA, 25 bp, Homo sapien
cagaacaagaatcagctgtttaaca

SEQ ID NO: 1159515 - DNA, 25 bp, Homo sapien
tacggtcaacatggatctagctcag

SEQ ID NO: 1159516 - DNA, 25 bp, Homo sapien
gagctagctcaggtcagtcttccag

SEQ ID NO: 1159517 - DNA, 25 bp, Homo sapien
tcttctggctatggccgacagggct

SEQ ID NO: 1159518 - DNA, 25 bp, Homo sapien
ggttctacatcaggacagtcatcga

SEQ ID NO: 1159519 - DNA, 25 bp, Homo sapien
caacacggctctaggtcaggacagt

SEQ ID NO: 1159520 - DNA, 25 bp, Homo sapien
tcaatctttgggacacagccgacat

SEQ ID NO: 1159521 - DNA, 25 bp, Homo sapien
gctttgggcaacatgagtctggctc

SEQ ID NO: 1159522 - DNA, 25 bp, Homo sapien
acatggatctacgtcagggcaggca

SEQ ID NO: 1159523 - DNA, 25 bp, Homo sapien
tgtaatttttacacaactgaagaac

SEQ ID NO: 1159524 - DNA, 25 bp, Homo sapien
ttacacaactgaagaaccaaaatta

SEQ ID NO: 1159525 - DNA, 25 bp, Homo sapien
tgttaacttaatacaaaggatgatg

SEQ ID NO: 1159526 - DNA, 25 bp, Homo sapien
ccagagcatccaaatatataagtca

SEQ ID NO: 1159527 - DNA, 25 bp, Homo sapien
aaactgacagcgcttgctgatggac

SEQ ID NO: 1159528 - DNA, 25 bp, Homo sapien
tatttggatgaagaacaacgggtgc

SEQ ID NO: 1159529 - DNA, 25 bp, Homo sapien
caacgggtgcactatagtttgatga

SEQ ID NO: 1159530 - DNA, 25 bp, Homo sapien
gatgactcgatgttttagtctgacc

SEQ ID NO: 1159531 - DNA, 25 bp, Homo sapien
caaatagcttacacattctggaggg

SEQ ID NO: 1159532 - DNA, 25 bp, Homo sapien
caataatcgataagtgcctgccaac

SEQ ID NO: 1159533 - DNA, 25 bp, Homo sapien
gcaaggccctattctagattctgag

SEQ ID NO: 1159534 - DNA, 25 bp, Homo sapien
gacaaaataagatcagagaggcaga

SEQ ID NO: 1159535 - DNA, 25 bp, Homo sapien
ccaccacaagatcagcattgattga

SEQ ID NO: 1159536 - DNA, 25 bp, Homo sapien
gcttcaacataaaagcgcataaccg

SEQ ID NO: 1159537 - DNA, 25 bp, Homo sapien
gagacactgaaccagtcttcaccac

SEQ ID NO: 1159538 - DNA, 25 bp, Homo sapien
acttctggaactgtacttcactgat

SEQ ID NO: 1159539 - DNA, 25 bp, Homo sapien
tgtaccctatagaacccacatcatt

SEQ ID NO: 1159540 - DNA, 25 bp, Homo sapien
gagattaggcaggacccagatcaca

SEQ ID NO: 1159541 - DNA, 25 bp, Homo sapien
ctgaagtttagaaaggagattaggc

SEQ ID NO: 1159542 - DNA, 25 bp, Homo sapien
ggacccagatcacactgtaccctat

SEQ ID NO: 1159543 - DNA, 25 bp, Homo sapien
tccaggactcagaaacttgaacttt

SEQ ID NO: 1159544 - DNA, 25 bp, Homo sapien
tccttaggtgatacacggatgatga

SEQ ID NO: 1159545 - DNA, 25 bp, Homo sapien
ttattcccaggcagtaaaatgccaa

SEQ ID NO: 1159546 - DNA, 25 bp, Homo sapien
caaagcttctattcctgtccactaa

SEQ ID NO: 1159547 - DNA, 25 bp, Homo sapien
ataaataaattccagtgtggcaaaa

SEQ ID NO: 1159548 - DNA, 25 bp, Homo sapien
ctgcttataaacatgcctccacaac

SEQ ID NO: 1159549 - DNA, 25 bp, Homo sapien
tgcttataaacatgcctccacaact

SEQ ID NO: 1159550 - DNA, 25 bp, Homo sapien
gtcttgttcaactggtggcacccct

SEQ ID NO: 1159551 - DNA, 25 bp, Homo sapien
ggtgtccctctggaacaaaccttca

SEQ ID NO: 1159552 - DNA, 25 bp, Homo sapien
gaatttcggactgggcaagactaac

SEQ ID NO: 1159553 - DNA, 25 bp, Homo sapien
gcagatctcccagcataggacttga

SEQ ID NO: 1159554 - DNA, 25 bp, Homo sapien
tgctgctgctattacccatgccatg

SEQ ID NO: 1159555 - DNA, 25 bp, Homo sapien
ctaactgtgatgctagcataggcca

SEQ ID NO: 1159556 - DNA, 25 bp, Homo sapien
gcctaacctagctgactaactgtga

SEQ ID NO: 1159557 - DNA, 25 bp, Homo sapien
cacatgtgatacctatgagcttgga

SEQ ID NO: 1159558 - DNA, 25 bp, Homo sapien
gtctattaacctgggcaattagccc

SEQ ID NO: 1159559 - DNA, 25 bp, Homo sapien
tatattttggtacgtttttgcagta

SEQ ID NO: 1159560 - DNA, 25 bp, Homo sapien
ctgaggagagatccactattagtct

SEQ ID NO: 1159561 - DNA, 25 bp, Homo sapien
tgttacacaggtatcagtctgtgtc

SEQ ID NO: 1159562 - DNA, 25 bp, Homo sapien
cgtattaagttgtctaagctattta

SEQ ID NO: 1159563 - DNA, 25 bp, Homo sapien
ttttcgtattaagttgtctaagcta

SEQ ID NO: 1159564 - DNA, 25 bp, Homo sapien
tttcgtattaagttgtctaagctat

SEQ ID NO: 1159565 - DNA, 25 bp, Homo sapien
tattaagttgtctaagctatttact

SEQ ID NO: 1159566 - DNA, 25 bp, Homo sapien
ctttgcaatgtagactagttggagc

SEQ ID NO: 1159567 - DNA, 25 bp, Homo sapien
caatgtagactagttggagcagaga

SEQ ID NO: 1159568 - DNA, 25 bp, Homo sapien
agcagagaagttgtgctgatatatc

SEQ ID NO: 1159569 - DNA, 25 bp, Homo sapien
ttggagcagagaagttgtgctgata

SEQ ID NO: 1159570 - DNA, 25 bp, Homo sapien
caggagaaagacatggatccggcca

SEQ ID NO: 1159571 - DNA, 25 bp, Homo sapien
accatcatggatctgcgtgggagca

SEQ ID NO: 1159572 - DNA, 25 bp, Homo sapien
cacaatcagtgtcaggccacggaaa

SEQ ID NO: 1159573 - DNA, 25 bp, Homo sapien
ggtcggcttccagaaaccatcatgg

SEQ ID NO: 1159574 - DNA, 25 bp, Homo sapien
ggatcacttggatatagaccacaac

SEQ ID NO: 1159575 - DNA, 25 bp, Homo sapien
ttctgatggtattcaagttggctca

SEQ ID NO: 1159576 - DNA, 25 bp, Homo sapien
tgtacagaatccagatgacccagat

SEQ ID NO: 1159577 - DNA, 25 bp, Homo sapien
gacccagatatggttgatgtcttca

SEQ ID NO: 1159578 - DNA, 25 bp, Homo sapien
tcaaatcttgataccttactagtct

SEQ ID NO: 1159579 - DNA, 25 bp, Homo sapien
gataccttactagtctacatctttg

SEQ ID NO: 1159580 - DNA, 25 bp, Homo sapien
ccatcaaatcttgataccttactag

SEQ ID NO: 1159581 - DNA, 25 bp, Homo sapien
tcttgataccttactagtctacatc

SEQ ID NO: 1159582 - DNA, 25 bp, Homo sapien
tcaagtattgccatagaagagcaga

SEQ ID NO: 1159583 - DNA, 25 bp, Homo sapien
caaaagttgtctgatccagctgtgg

SEQ ID NO: 1159584 - DNA, 25 bp, Homo sapien
gaagagcagaagtcatcctgagcaa

SEQ ID NO: 1159585 - DNA, 25 bp, Homo sapien
gatacactggcttgataatccacac

SEQ ID NO: 1159586 - DNA, 25 bp, Homo sapien
atagcctctcgtctaatcaaagctg

SEQ ID NO: 1159587 - DNA, 25 bp, Homo sapien
tattgaaatagcctctcgtctaatc

SEQ ID NO: 1159588 - DNA, 25 bp, Homo sapien
gaaatagcctctcgtctaatcaaag

SEQ ID NO: 1159589 - DNA, 25 bp, Homo sapien
aagttattgaaatagcctctcgtct

SEQ ID NO: 1159590 - DNA, 25 bp, Homo sapien
tattaagacatactacacagtcaag

SEQ ID NO: 1159591 - DNA, 25 bp, Homo sapien
gaagaataaagatccacgaacaggt

SEQ ID NO: 1159592 - DNA, 25 bp, Homo sapien
tgagaagttcaataacctcaagttt

SEQ ID NO: 1159593 - DNA, 25 bp, Homo sapien
atggagtgacattccatatcttggg

SEQ ID NO: 1159594 - DNA, 25 bp, Homo sapien
attattagtgtttgccatagtgggg

SEQ ID NO: 1159595 - DNA, 25 bp, Homo sapien
tcattattagtgtttgccatagtgg

SEQ ID NO: 1159596 - DNA, 25 bp, Homo sapien
cattattagtgtttgccatagtggg

SEQ ID NO: 1159597 - DNA, 25 bp, Homo sapien
gcttgggcaacagagtgagacccag

SEQ ID NO: 1159598 - DNA, 25 bp, Homo sapien
tgggcaacagagtgagacccagtct

SEQ ID NO: 1159599 - DNA, 25 bp, Homo sapien
atgatggtgccactgttctccagct

SEQ ID NO: 1159600 - DNA, 25 bp, Homo sapien
tgatggtgccactgttctccagctt

SEQ ID NO: 1159601 - DNA, 25 bp, Homo sapien
tcagccctaccgagtaatgtggagc

SEQ ID NO: 1159602 - DNA, 25 bp, Homo sapien
tatcctctttgtgagaccccgctgc

SEQ ID NO: 1159603 - DNA, 25 bp, Homo sapien
tagtcactgggctaaactgctttgc

SEQ ID NO: 1159604 - DNA, 25 bp, Homo sapien
cattcagtcaggtttagctagccag

SEQ ID NO: 1159605 - DNA, 25 bp, Homo sapien
gaaattgccaggtacattgcaccca

SEQ ID NO: 1159606 - DNA, 25 bp, Homo sapien
catgaaattgccaggtacattgcac

SEQ ID NO: 1159607 - DNA, 25 bp, Homo sapien
aattgccaggtacattgcacccaaa

SEQ ID NO: 1159608 - DNA, 25 bp, Homo sapien
ccccatgaaattgccaggtacattg

SEQ ID NO: 1159609 - DNA, 25 bp, Homo sapien
gcgagcgatgcaaaactgtgggtct

SEQ ID NO: 1159610 - DNA, 25 bp, Homo sapien
cctaacaagtgggtcagccaatact

SEQ ID NO: 1159611 - DNA, 25 bp, Homo sapien
ttcctgcaggtaagaggctctgagt

SEQ ID NO: 1159612 - DNA, 25 bp, Homo sapien
tacaggctgtcgcaatgttactaag

SEQ ID NO: 1159613 - DNA, 25 bp, Homo sapien
tctcttctgcatagtggctatgtcg

SEQ ID NO: 1159614 - DNA, 25 bp, Homo sapien
cagctgctcacgcacagggcatggc

SEQ ID NO: 1159615 - DNA, 25 bp, Homo sapien
gtggctatgtcggtgtagcaaaaag

SEQ ID NO: 1159616 - DNA, 25 bp, Homo sapien
agctgctcacgcacagggcatggca

SEQ ID NO: 1159617 - DNA, 25 bp, Homo sapien
tcttcagctttagtttcatcatttt

SEQ ID NO: 1159618 - DNA, 25 bp, Homo sapien
ctcttcagctttagtttcatcattt

SEQ ID NO: 1159619 - DNA, 25 bp, Homo sapien
gtttcatcattttcagctggtgcag

SEQ ID NO: 1159620 - DNA, 25 bp, Homo sapien
tcatcattttcagctggtgcagtac

SEQ ID NO: 1159621 - DNA, 25 bp, Homo sapien
tgtccaaaaagcatgattatgagag

SEQ ID NO: 1159622 - DNA, 25 bp, Homo sapien
aaagttcacctaagagatacataaa

SEQ ID NO: 1159623 - DNA, 25 bp, Homo sapien
gcatgattatgagagggtaaaatgt

SEQ ID NO: 1159624 - DNA, 25 bp, Homo sapien
ttaaaagttcacctaagagatacat

SEQ ID NO: 1159625 - DNA, 25 bp, Homo sapien
catggccaatccagtgggtgcatcc

SEQ ID NO: 1159626 - DNA, 25 bp, Homo sapien
cattatgcagcttcccttttaggtc

SEQ ID NO: 1159627 - DNA, 25 bp, Homo sapien
ggaagactcagagcaagtcacccct

SEQ ID NO: 1159628 - DNA, 25 bp, Homo sapien
tttgcggtgcagaccctctcaggag

SEQ ID NO: 1159629 - DNA, 25 bp, Homo sapien
tgagactgtgactggatctggaact

SEQ ID NO: 1159630 - DNA, 25 bp, Homo sapien
catgctcagatacaggcagggacac

SEQ ID NO: 1159631 - DNA, 25 bp, Homo sapien
aggaagaaccagcaagcagacacag

SEQ ID NO: 1159632 - DNA, 25 bp, Homo sapien
ccagaacagagggactgagatccac

SEQ ID NO: 1159633 - DNA, 25 bp, Homo sapien
cttcggtctgaactacttctttggc

SEQ ID NO: 1159634 - DNA, 25 bp, Homo sapien
ctgaactacttctttggctgcctcc

SEQ ID NO: 1159635 - DNA, 25 bp, Homo sapien
ggtctgaactacttctttggctgcc

SEQ ID NO: 1159636 - DNA, 25 bp, Homo sapien
tcggtctgaactacttctttggctg

SEQ ID NO: 1159637 - DNA, 25 bp, Homo sapien
accacttgctctagaatcacgggcg

SEQ ID NO: 1159638 - DNA, 25 bp, Homo sapien
tcacgggcgtgtggtgatcctttgc

SEQ ID NO: 1159639 - DNA, 25 bp, Homo sapien
tagcaaacttttgaggaggcatcag

SEQ ID NO: 1159640 - DNA, 25 bp, Homo sapien
gctgattgcagttgtgtaaggtcca

SEQ ID NO: 1159641 - DNA, 25 bp, Homo sapien
tctgaaacttcgctggagctccatc

SEQ ID NO: 1159642 - DNA, 25 bp, Homo sapien
atcttcttgagacatggcgatgcat

SEQ ID NO: 1159643 - DNA, 25 bp, Homo sapien
catcttcttgagacatggcgatgca

SEQ ID NO: 1159644 - DNA, 25 bp, Homo sapien
gaaacttcgctggagctccatcttc

SEQ ID NO: 1159645 - DNA, 25 bp, Homo sapien
taattcgctgattccccacgagagg

SEQ ID NO: 1159646 - DNA, 25 bp, Homo sapien
aagtccttatttagcacagcactga

SEQ ID NO: 1159647 - DNA, 25 bp, Homo sapien
catagacaatgctcgagcctggctt

SEQ ID NO: 1159648 - DNA, 25 bp, Homo sapien
gagggcgcctttccacaagtcctta

SEQ ID NO: 1159649 - DNA, 25 bp, Homo sapien
caaagggttgaagcctggtttatgt

SEQ ID NO: 1159650 - DNA, 25 bp, Homo sapien
gaagcctggtttatgtctgcactgc

SEQ ID NO: 1159651 - DNA, 25 bp, Homo sapien
catgggaatggccaacaaagggttg

SEQ ID NO: 1159652 - DNA, 25 bp, Homo sapien
tataccatcttgatgctttgccctc

SEQ ID NO: 1159653 - DNA, 25 bp, Homo sapien
caagtgtctgggctgtgctgtttcc

SEQ ID NO: 1159654 - DNA, 25 bp, Homo sapien
acaagtgtctgggctgtgctgtttc

SEQ ID NO: 1159655 - DNA, 25 bp, Homo sapien
agtgtctgggctgtgctgtttccac

SEQ ID NO: 1159656 - DNA, 25 bp, Homo sapien
tcacaagtgtctgggctgtgctgtt

SEQ ID NO: 1159657 - DNA, 25 bp, Homo sapien
atcttggtagggcattcctcctcct

SEQ ID NO: 1159658 - DNA, 25 bp, Homo sapien
ggtagggcattcctcctcctggtaa

SEQ ID NO: 1159659 - DNA, 25 bp, Homo sapien
ttcatcttggtagggcattcctcct

SEQ ID NO: 1159660 - DNA, 25 bp, Homo sapien
ttggtagggcattcctcctcctggt

SEQ ID NO: 1159661 - DNA, 25 bp, Homo sapien
aatccttctctaactgaaagcctgt

SEQ ID NO: 1159662 - DNA, 25 bp, Homo sapien
aattaaatccttctctaactgaaag

SEQ ID NO: 1159663 - DNA, 25 bp, Homo sapien
tgaaattaaatccttctctaactga

SEQ ID NO: 1159664 - DNA, 25 bp, Homo sapien
gcaaccctgaaattaaatccttctc

SEQ ID NO: 1159665 - DNA, 25 bp, Homo sapien
ggactccagttaaggatagccaggg

SEQ ID NO: 1159666 - DNA, 25 bp, Homo sapien
gggatgagcgggcaccaggactcca

SEQ ID NO: 1159667 - DNA, 25 bp, Homo sapien
gtagtgcttcggagtcagaccagga

SEQ ID NO: 1159668 - DNA, 25 bp, Homo sapien
ctgttctactcagagtggcactggg

SEQ ID NO: 1159669 - DNA, 25 bp, Homo sapien
ggcgcagaaggataaggcccacagc

SEQ ID NO: 1159670 - DNA, 25 bp, Homo sapien
gatgtcagtgcttctaaggggcgca

SEQ ID NO: 1159671 - DNA, 25 bp, Homo sapien
agagctgagtgtcagtgacacttcc

SEQ ID NO: 1159672 - DNA, 25 bp, Homo sapien
caggtgagagctgagtgtcagtgac

SEQ ID NO: 1159673 - DNA, 25 bp, Homo sapien
aattttgcagatgttgtggtttcca

SEQ ID NO: 1159674 - DNA, 25 bp, Homo sapien
taattttgcagatgttgtggtttcc

SEQ ID NO: 1159675 - DNA, 25 bp, Homo sapien
cagatgttgtggtttccactaagca

SEQ ID NO: 1159676 - DNA, 25 bp, Homo sapien
gatgttgtggtttccactaagcacc

SEQ ID NO: 1159677 - DNA, 25 bp, Homo sapien
caccagcaccaagagttcatcctgg

SEQ ID NO: 1159678 - DNA, 25 bp, Homo sapien
aaaacaccagcaccaagagttcatc

SEQ ID NO: 1159679 - DNA, 25 bp, Homo sapien
tcttcaagaatggcctcaacctcca

SEQ ID NO: 1159680 - DNA, 25 bp, Homo sapien
tgcccaaaacaccagcaccaagagt

SEQ ID NO: 1159681 - DNA, 25 bp, Homo sapien
cttaggagtacacttgggagggcat

SEQ ID NO: 1159682 - DNA, 25 bp, Homo sapien
ttaggagtacacttgggagggcatt

SEQ ID NO: 1159683 - DNA, 25 bp, Homo sapien
acttaggagtacacttgggagggca

SEQ ID NO: 1159684 - DNA, 25 bp, Homo sapien
taggagtacacttgggagggcattt

SEQ ID NO: 1159685 - DNA, 25 bp, Homo sapien
aggtcggcgtcggagggactggcgg

SEQ ID NO: 1159686 - DNA, 25 bp, Homo sapien
tctgaggtcggcgtcggagggactg

SEQ ID NO: 1159687 - DNA, 25 bp, Homo sapien
agctggaactctgaggtcggcgtcg

SEQ ID NO: 1159688 - DNA, 25 bp, Homo sapien
gaactctgaggtcggcgtcggaggg

SEQ ID NO: 1159689 - DNA, 25 bp, Homo sapien
tgccagtccttctcctccgtgctcc

SEQ ID NO: 1159690 - DNA, 25 bp, Homo sapien
ttctcctccgtgctcctcatggccc

SEQ ID NO: 1159691 - DNA, 25 bp, Homo sapien
ctgggatctgccagtccttctcctc

SEQ ID NO: 1159692 - DNA, 25 bp, Homo sapien
tcctccgtgctcctcatggcccagg

SEQ ID NO: 1159693 - DNA, 25 bp, Homo sapien
tagcttcataactgaattacaacac

SEQ ID NO: 1159694 - DNA, 25 bp, Homo sapien
gcctcaggctgacacacatcttcag

SEQ ID NO: 1159695 - DNA, 25 bp, Homo sapien
aatatcacaagctagacttcaaccc

SEQ ID NO: 1159696 - DNA, 25 bp, Homo sapien
aaagccaggccagaaaatatcacaa

SEQ ID NO: 1159697 - DNA, 25 bp, Homo sapien
cctggctccactgaaagactcacta

SEQ ID NO: 1159698 - DNA, 25 bp, Homo sapien
cactgaaagactcactacgttctcc

SEQ ID NO: 1159699 - DNA, 25 bp, Homo sapien
gactcactacgttctccaactggaa

SEQ ID NO: 1159700 - DNA, 25 bp, Homo sapien
ggctccactgaaagactcactacgt

SEQ ID NO: 1159701 - DNA, 25 bp, Homo sapien
tctctgactagaagaagactgctca

SEQ ID NO: 1159702 - DNA, 25 bp, Homo sapien
tgggttctagtcacagctcttctgc

SEQ ID NO: 1159703 - DNA, 25 bp, Homo sapien
tcttctgcggacttgctgtgtaccc

SEQ ID NO: 1159704 - DNA, 25 bp, Homo sapien
tcactagaagcgtaggtgccttgcg

SEQ ID NO: 1159705 - DNA, 25 bp, Homo sapien
gcagcatcctgagctccggttgttg

SEQ ID NO: 1159706 - DNA, 25 bp, Homo sapien
gcagcaaccactactccgctgtcgg

SEQ ID NO: 1159707 - DNA, 25 bp, Homo sapien
gaaacggcgctctgttgagaggaca

SEQ ID NO: 1159708 - DNA, 25 bp, Homo sapien
gcagcagcctgagtcgccgcagcag

SEQ ID NO: 1159709 - DNA, 25 bp, Homo sapien
caagcccgtgtagacagtagggtcc

SEQ ID NO: 1159710 - DNA, 25 bp, Homo sapien
ggagttttgcgtggctgagaacaaa

SEQ ID NO: 1159711 - DNA, 25 bp, Homo sapien
gaacaaagtgggtttctgaacatca

SEQ ID NO: 1159712 - DNA, 25 bp, Homo sapien
atcaaagtgcaattcgctttacggg

SEQ ID NO: 1159713 - DNA, 25 bp, Homo sapien
gcctggagccccaaaaaggttcgca

SEQ ID NO: 1159714 - DNA, 25 bp, Homo sapien
tattcacacattttcgcctggacac

SEQ ID NO: 1159715 - DNA, 25 bp, Homo sapien
taatttggacatctaacctcaggaa

SEQ ID NO: 1159716 - DNA, 25 bp, Homo sapien
cacacgagtgcttgcttattcacac

SEQ ID NO: 1159717 - DNA, 25 bp, Homo sapien
caattccacatcatcgcagctggtg

SEQ ID NO: 1159718 - DNA, 25 bp, Homo sapien
gcagctggtgttaagagaaaatgac

SEQ ID NO: 1159719 - DNA, 25 bp, Homo sapien
ctcaattccacatcatcgcagctgg

SEQ ID NO: 1159720 - DNA, 25 bp, Homo sapien
ccacatcatcgcagctggtgttaag

SEQ ID NO: 1159721 - DNA, 25 bp, Homo sapien
cctgtaatgtagtgcccaggctctg

SEQ ID NO: 1159722 - DNA, 25 bp, Homo sapien
ggaggggtaccagttcatagccaca

SEQ ID NO: 1159723 - DNA, 25 bp, Homo sapien
tcatagccacagcaatgaggcctga

SEQ ID NO: 1159724 - DNA, 25 bp, Homo sapien
tgaaggcaactgctaccatcaggtt

SEQ ID NO: 1159725 - DNA, 25 bp, Homo sapien
tccaggatcccacaggatatcaacc

SEQ ID NO: 1159726 - DNA, 25 bp, Homo sapien
tgccagtgtgtgcaatatctgcaca

SEQ ID NO: 1159727 - DNA, 25 bp, Homo sapien
gaggtatccctagtggctcttcctg

SEQ ID NO: 1159728 - DNA, 25 bp, Homo sapien
ccccgcagagagctctgaggtatcc

SEQ ID NO: 1159729 - DNA, 25 bp, Homo sapien
atttccttgatatctggggaccaca

SEQ ID NO: 1159730 - DNA, 25 bp, Homo sapien
gtatttccttgatatctggggacca

SEQ ID NO: 1159731 - DNA, 25 bp, Homo sapien
gattcatccagccagagcagtctct

SEQ ID NO: 1159732 - DNA, 25 bp, Homo sapien
attcatccagccagagcagtctctg

SEQ ID NO: 1159733 - DNA, 25 bp, Homo sapien
gctcaaaatactacttaacctgagg

SEQ ID NO: 1159734 - DNA, 25 bp, Homo sapien
tataactggaccagagaaatagagt

SEQ ID NO: 1159735 - DNA, 25 bp, Homo sapien
tcttttacacactgggtccaaccag

SEQ ID NO: 1159736 - DNA, 25 bp, Homo sapien
ttcagcagcttatcctgaggttact

SEQ ID NO: 1159737 - DNA, 25 bp, Homo sapien
taccgagtccaagcagatgaacgac

SEQ ID NO: 1159738 - DNA, 25 bp, Homo sapien
caaataaagagcacgcattccttgg

SEQ ID NO: 1159739 - DNA, 25 bp, Homo sapien
ggtcagcttcattacaagagatgca

SEQ ID NO: 1159740 - DNA, 25 bp, Homo sapien
gatgaacgactcctccctcagtgtt

SEQ ID NO: 1159741 - DNA, 25 bp, Homo sapien
aaactgaaggttttgagggtgacat

SEQ ID NO: 1159742 - DNA, 25 bp, Homo sapien
tgacatggagtttggagacaaaact

SEQ ID NO: 1159743 - DNA, 25 bp, Homo sapien
gaaactgaaggttttgagggtgaca

SEQ ID NO: 1159744 - DNA, 25 bp, Homo sapien
gacatggagtttggagacaaaactt

SEQ ID NO: 1159745 - DNA, 25 bp, Homo sapien
taggttagtttcttatctccatctc

SEQ ID NO: 1159746 - DNA, 25 bp, Homo sapien
cacctttaccttatgacaactatca

SEQ ID NO: 1159747 - DNA, 25 bp, Homo sapien
tctctcttcaaacacctttacctta

SEQ ID NO: 1159748 - DNA, 25 bp, Homo sapien
gcagctctaacatccgtggtccact

SEQ ID NO: 1159749 - DNA, 25 bp, Homo sapien
tttgaacctgcaataccaagacagt

SEQ ID NO: 1159750 - DNA, 25 bp, Homo sapien
gctcttgatgtcaaattgtccgcca

SEQ ID NO: 1159751 - DNA, 25 bp, Homo sapien
gagttggaccaacttatgaagtttg

SEQ ID NO: 1159752 - DNA, 25 bp, Homo sapien
gccaattcttacacccactgtgagt

SEQ ID NO: 1159753 - DNA, 25 bp, Homo sapien
gggctgtggccctagctccgagggc

SEQ ID NO: 1159754 - DNA, 25 bp, Homo sapien
ctgtggccctagctccgagggcggc

SEQ ID NO: 1159755 - DNA, 25 bp, Homo sapien
caggcgccaccaccgatgccggcgc

SEQ ID NO: 1159756 - DNA, 25 bp, Homo sapien
gatgccggcgccagaggcccaactc

SEQ ID NO: 1159757 - DNA, 25 bp, Homo sapien
ttagctcttctagtgactgtcccat

SEQ ID NO: 1159758 - DNA, 25 bp, Homo sapien
tagctcttctagtgactgtcccata

SEQ ID NO: 1159759 - DNA, 25 bp, Homo sapien
attagctcttctagtgactgtccca

SEQ ID NO: 1159760 - DNA, 25 bp, Homo sapien
ggtaggagcccttttatcccgtgca

SEQ ID NO: 1159761 - DNA, 25 bp, Homo sapien
cacgatgatgcacaacctgagtatg

SEQ ID NO: 1159762 - DNA, 25 bp, Homo sapien
atgagaagcccagggtaggagccct

SEQ ID NO: 1159763 - DNA, 25 bp, Homo sapien
cccgtgcagtgtacacgatgatgca

SEQ ID NO: 1159764 - DNA, 25 bp, Homo sapien
tccctgacatgtgctttagaggctc

SEQ ID NO: 1159765 - DNA, 25 bp, Homo sapien
gtccctgacatgtgctttagaggct

SEQ ID NO: 1159766 - DNA, 25 bp, Homo sapien
ggtccctgacatgtgctttagaggc

SEQ ID NO: 1159767 - DNA, 25 bp, Homo sapien
agcccccggagcttagagcacagtc

SEQ ID NO: 1159768 - DNA, 25 bp, Homo sapien
cttagagcacagtcagaagagggtg

SEQ ID NO: 1159769 - DNA, 25 bp, Homo sapien
ccccggagcttagagcacagtcaga

SEQ ID NO: 1159770 - DNA, 25 bp, Homo sapien
gagcttagagcacagtcagaagagg

SEQ ID NO: 1159771 - DNA, 25 bp, Homo sapien
ggcgccggcattgatgggacctgaa

SEQ ID NO: 1159772 - DNA, 25 bp, Homo sapien
ccggcattgatgggacctgaagtgc

SEQ ID NO: 1159773 - DNA, 25 bp, Homo sapien
tggcgccggcattgatgggacctga

SEQ ID NO: 1159774 - DNA, 25 bp, Homo sapien
cgccggcattgatgggacctgaagt

SEQ ID NO: 1159775 - DNA, 25 bp, Homo sapien
ggacagcttggatactcaacaggaa

SEQ ID NO: 1159776 - DNA, 25 bp, Homo sapien
agcatgcatcaggatggagcttttc

SEQ ID NO: 1159777 - DNA, 25 bp, Homo sapien
aaagccagaacaaggtatctggaaa

SEQ ID NO: 1159778 - DNA, 25 bp, Homo sapien
tcaggatggagcttttcctgggcct

SEQ ID NO: 1159779 - DNA, 25 bp, Homo sapien
gttttctttcaacattctgcctatc

SEQ ID NO: 1159780 - DNA, 25 bp, Homo sapien
aactctctgggaggcaatagaagac

SEQ ID NO: 1159781 - DNA, 25 bp, Homo sapien
cctgaccaatatgacccttgacaaa

SEQ ID NO: 1159782 - DNA, 25 bp, Homo sapien
tcttcaacacctgccatctcttttg

SEQ ID NO: 1159783 - DNA, 25 bp, Homo sapien
caaattccgtttcttcaacacctgc

SEQ ID NO: 1159784 - DNA, 25 bp, Homo sapien
cttgggcagaggctggcactgctgc

SEQ ID NO: 1159785 - DNA, 25 bp, Homo sapien
tgctgctggttctgctggcaggaca

SEQ ID NO: 1159786 - DNA, 25 bp, Homo sapien
gctgctggttctgctggcaggacat

SEQ ID NO: 1159787 - DNA, 25 bp, Homo sapien
cactgctgctggttctgctggcagg

SEQ ID NO: 1159788 - DNA, 25 bp, Homo sapien
cacccaggtcttggagcacagcagg

SEQ ID NO: 1159789 - DNA, 25 bp, Homo sapien
aggcagcagccgccctcagagctgg

SEQ ID NO: 1159790 - DNA, 25 bp, Homo sapien
accacagcacccaggtcttggagca

SEQ ID NO: 1159791 - DNA, 25 bp, Homo sapien
gctgagctctttggggggcacttgg

SEQ ID NO: 1159792 - DNA, 25 bp, Homo sapien
gccggcatcggtgggacctgcagca

SEQ ID NO: 1159793 - DNA, 25 bp, Homo sapien
cgccggcatcggtgggacctgcagc

SEQ ID NO: 1159794 - DNA, 25 bp, Homo sapien
tagccacagtcggaggcaccatctt

SEQ ID NO: 1159795 - DNA, 25 bp, Homo sapien
gccacagtcggaggcaccatcttgc

SEQ ID NO: 1159796 - DNA, 25 bp, Homo sapien
gccatagccacagtcggaggcacca

SEQ ID NO: 1159797 - DNA, 25 bp, Homo sapien
catagccacagtcggaggcaccatc

SEQ ID NO: 1159798 - DNA, 25 bp, Homo sapien
tgtttcctctaaagtcgcttgtctc

SEQ ID NO: 1159799 - DNA, 25 bp, Homo sapien
gtcgcttgtctcagcatcaggaatt

SEQ ID NO: 1159800 - DNA, 25 bp, Homo sapien
ttgtttcctctaaagtcgcttgtct

SEQ ID NO: 1159801 - DNA, 25 bp, Homo sapien
gcttgtctcagcatcaggaattagg

SEQ ID NO: 1159802 - DNA, 25 bp, Homo sapien
gcccgttcagatccttccgaaaaca

SEQ ID NO: 1159803 - DNA, 25 bp, Homo sapien
ccgttcagatccttccgaaaacact

SEQ ID NO: 1159804 - DNA, 25 bp, Homo sapien
tgggcccgttcagatccttccgaaa

SEQ ID NO: 1159805 - DNA, 25 bp, Homo sapien
aagtggtcagcaaggcgggagctcc

SEQ ID NO: 1159806 - DNA, 25 bp, Homo sapien
ggccacagttctgcgggctgctgct

SEQ ID NO: 1159807 - DNA, 25 bp, Homo sapien
tcagcaaggcgggagctccagctgt

SEQ ID NO: 1159808 - DNA, 25 bp, Homo sapien
ccagctgtggccacagttctgcggg

SEQ ID NO: 1159809 - DNA, 25 bp, Homo sapien
cgttgccgttgccagagctccaact

SEQ ID NO: 1159810 - DNA, 25 bp, Homo sapien
gttgccgttgccagagctccaactc

SEQ ID NO: 1159811 - DNA, 25 bp, Homo sapien
cagtgccagcctccgcccaagtgcc

SEQ ID NO: 1159812 - DNA, 25 bp, Homo sapien
cagtgcacagcactatgcccagtct

SEQ ID NO: 1159813 - DNA, 25 bp, Homo sapien
ccccaaactgtccatcccagtgcac

SEQ ID NO: 1159814 - DNA, 25 bp, Homo sapien
ctgaaatgccccccaaactgtccat

SEQ ID NO: 1159815 - DNA, 25 bp, Homo sapien
ttcctgctgcagctctagctctggg

SEQ ID NO: 1159816 - DNA, 25 bp, Homo sapien
atgagtctcagaattagctcaggct

SEQ ID NO: 1159817 - DNA, 25 bp, Homo sapien
accagggacacctttcataggagga

SEQ ID NO: 1159818 - DNA, 25 bp, Homo sapien
tctcagaattagctcaggctgcaga

SEQ ID NO: 1159819 - DNA, 25 bp, Homo sapien
gagtctcagaattagctcaggctgc

SEQ ID NO: 1159820 - DNA, 25 bp, Homo sapien
taggttccaaaagatccactcaccc

SEQ ID NO: 1159821 - DNA, 25 bp, Homo sapien
aaaagatccactcaccctggtcaga

SEQ ID NO: 1159822 - DNA, 25 bp, Homo sapien
cctttcagttgtgctctgtctaggt

SEQ ID NO: 1159823 - DNA, 25 bp, Homo sapien
agttgtgctctgtctaggttccaaa

SEQ ID NO: 1159824 - DNA, 25 bp, Homo sapien
acatctttgtgggagttcagtcaac

SEQ ID NO: 1159825 - DNA, 25 bp, Homo sapien
gacatctttgtgggagttcagtcaa

SEQ ID NO: 1159826 - DNA, 25 bp, Homo sapien
agcaaatttttgagcccagccccaa

SEQ ID NO: 1159827 - DNA, 25 bp, Homo sapien
cacctcaggcatagcaatgctctga

SEQ ID NO: 1159828 - DNA, 25 bp, Homo sapien
ctcttgaaggtatgaaaggcactga

SEQ ID NO: 1159829 - DNA, 25 bp, Homo sapien
tctgagacacacctcaggcatagca

SEQ ID NO: 1159830 - DNA, 25 bp, Homo sapien
cctccagttcttcctgtgtgactga

SEQ ID NO: 1159831 - DNA, 25 bp, Homo sapien
gttcacctccagttcttcctgtgtg

SEQ ID NO: 1159832 - DNA, 25 bp, Homo sapien
cacctccagttcttcctgtgtgact

SEQ ID NO: 1159833 - DNA, 25 bp, Homo sapien
tccagttcttcctgtgtgactgacc

SEQ ID NO: 1159834 - DNA, 25 bp, Homo sapien
gccaatgcctttgaagggccctccg

SEQ ID NO: 1159835 - DNA, 25 bp, Homo sapien
atgcctttgaagggccctccgcagt

SEQ ID NO: 1159836 - DNA, 25 bp, Homo sapien
caatgcctttgaagggccctccgca

SEQ ID NO: 1159837 - DNA, 25 bp, Homo sapien
aatgcctttgaagggccctccgcag

SEQ ID NO: 1159838 - DNA, 25 bp, Homo sapien
gtcacatgcaaaagcacagacacgt

SEQ ID NO: 1159839 - DNA, 25 bp, Homo sapien
cctggtcacatgcaaaagcacagac

SEQ ID NO: 1159840 - DNA, 25 bp, Homo sapien
tggtcacatgcaaaagcacagacac

SEQ ID NO: 1159841 - DNA, 25 bp, Homo sapien
cacatgcaaaagcacagacacgtcc

SEQ ID NO: 1159842 - DNA, 25 bp, Homo sapien
ggtacacttgggaggacatttggga

SEQ ID NO: 1159843 - DNA, 25 bp, Homo sapien
agactgcaggggaacatggagctgg

SEQ ID NO: 1159844 - DNA, 25 bp, Homo sapien
aagagactgcaggggaacatggagc

SEQ ID NO: 1159845 - DNA, 25 bp, Homo sapien
gagactgcaggggaacatggagctg

SEQ ID NO: 1159846 - DNA, 25 bp, Homo sapien
gaagagactgcaggggaacatggag

SEQ ID NO: 1159847 - DNA, 25 bp, Homo sapien
tggtgccggcgccggtggaagagac

SEQ ID NO: 1159848 - DNA, 25 bp, Homo sapien
ctggtgccggcgccggtggaagaga

SEQ ID NO: 1159849 - DNA, 25 bp, Homo sapien
agaggccccagaaggttcactctca

SEQ ID NO: 1159850 - DNA, 25 bp, Homo sapien
gaggccccagaaggttcactctcac

SEQ ID NO: 1159851 - DNA, 25 bp, Homo sapien
agccagaggccccagaaggttcact

SEQ ID NO: 1159852 - DNA, 25 bp, Homo sapien
ccagaggccccagaaggttcactct

SEQ ID NO: 1159853 - DNA, 25 bp, Homo sapien
caggctgtagcaggtttttgaccat

SEQ ID NO: 1159854 - DNA, 25 bp, Homo sapien
tttgaccattcagtaccagagctct

SEQ ID NO: 1159855 - DNA, 25 bp, Homo sapien
aaggggaaatagttaagcatcaggc

SEQ ID NO: 1159856 - DNA, 25 bp, Homo sapien
gctccatcaagcacaaagttctggg

SEQ ID NO: 1159857 - DNA, 25 bp, Homo sapien
cagagttccagctaccgtgcagtgg

SEQ ID NO: 1159858 - DNA, 25 bp, Homo sapien
taaagagcccttcacagtgccactc

SEQ ID NO: 1159859 - DNA, 25 bp, Homo sapien
actgaccccgcatgggaagcagcta

SEQ ID NO: 1159860 - DNA, 25 bp, Homo sapien
taatgccaatgcctttaaagagccc

SEQ ID NO: 1159861 - DNA, 25 bp, Homo sapien
tcacacgcaggagcacagacacgtc

SEQ ID NO: 1159862 - DNA, 25 bp, Homo sapien
tggtcacacgcaggagcacagacac

SEQ ID NO: 1159863 - DNA, 25 bp, Homo sapien
cctggtcacacgcaggagcacagac

SEQ ID NO: 1159864 - DNA, 25 bp, Homo sapien
gtcacacgcaggagcacagacacgt

SEQ ID NO: 1159865 - DNA, 25 bp, Homo sapien
tggacattttggggtacacttggga

SEQ ID NO: 1159866 - DNA, 25 bp, Homo sapien
ggaccacagcaagaagagactgcag

SEQ ID NO: 1159867 - DNA, 25 bp, Homo sapien
cacagcaagaagagactgcagggaa

SEQ ID NO: 1159868 - DNA, 25 bp, Homo sapien
agaagagactgcagggaaacatgga

SEQ ID NO: 1159869 - DNA, 25 bp, Homo sapien
tgcagggaaacatggagctgggcac

SEQ ID NO: 1159870 - DNA, 25 bp, Homo sapien
ctggtgccggcgccggtggaagaga

SEQ ID NO: 1159871 - DNA, 25 bp, Homo sapien
tggtgccggcgccggtggaagagac

SEQ ID NO: 1159872 - DNA, 25 bp, Homo sapien
agagcccccagaaggttcactctca

SEQ ID NO: 1159873 - DNA, 25 bp, Homo sapien
cagagcccccagaaggttcactctc

SEQ ID NO: 1159874 - DNA, 25 bp, Homo sapien
ggccattcagtcccaagagctcttc

SEQ ID NO: 1159875 - DNA, 25 bp, Homo sapien
tcccaagagctcttctgtagcccag

SEQ ID NO: 1159876 - DNA, 25 bp, Homo sapien
tggccattcagtcccaagagctctt

SEQ ID NO: 1159877 - DNA, 25 bp, Homo sapien
gcaatgccaatgccttcaaagggcc

SEQ ID NO: 1159878 - DNA, 25 bp, Homo sapien
tttccaaaaaaccaccagcaatgcc

SEQ ID NO: 1159879 - DNA, 25 bp, Homo sapien
aatgccttcaaagggccctccacag

SEQ ID NO: 1159880 - DNA, 25 bp, Homo sapien
aaccaccagcaatgccaatgccttc

SEQ ID NO: 1159881 - DNA, 25 bp, Homo sapien
tcacacgcaggagcacagacacgtc

SEQ ID NO: 1159882 - DNA, 25 bp, Homo sapien
cctggtcacacgcaggagcacagac

SEQ ID NO: 1159883 - DNA, 25 bp, Homo sapien
gtcacacgcaggagcacagacacgt

SEQ ID NO: 1159884 - DNA, 25 bp, Homo sapien
tggtcacacgcaggagcacagacac

SEQ ID NO: 1159885 - DNA, 25 bp, Homo sapien
tggacattttggggtacacttggga

SEQ ID NO: 1159886 - DNA, 25 bp, Homo sapien
ctgcaggggaacatggagctgggca

SEQ ID NO: 1159887 - DNA, 25 bp, Homo sapien
tgcaggggaacatggagctgggcac

SEQ ID NO: 1159888 - DNA, 25 bp, Homo sapien
cagagatgggaccacagcaagaaga

SEQ ID NO: 1159889 - DNA, 25 bp, Homo sapien
gagatgggaccacagcaagaagaga

SEQ ID NO: 1159890 - DNA, 25 bp, Homo sapien
cccagagatgggaccacagcaagaa

SEQ ID NO: 1159891 - DNA, 25 bp, Homo sapien
ccccagagatgggaccacagcaaga

SEQ ID NO: 1159892 - DNA, 25 bp, Homo sapien
gcagccaccagccccagagttgcag

SEQ ID NO: 1159893 - DNA, 25 bp, Homo sapien
agccaccagccccagagttgcagca

SEQ ID NO: 1159894 - DNA, 25 bp, Homo sapien
agcagccaccagccccagagttgca

SEQ ID NO: 1159895 - DNA, 25 bp, Homo sapien
ccaccagccccagagttgcagcagc

SEQ ID NO: 1159896 - DNA, 25 bp, Homo sapien
ctggtgccggcgccggtggaagaga

SEQ ID NO: 1159897 - DNA, 25 bp, Homo sapien
tggtgccggcgccggtggaagagac

SEQ ID NO: 1159898 - DNA, 25 bp, Homo sapien
agagcccccagaaggttcactctca

SEQ ID NO: 1159899 - DNA, 25 bp, Homo sapien
cagagcccccagaaggttcactctc

SEQ ID NO: 1159900 - DNA, 25 bp, Homo sapien
aaagggttaagcatcaggctgtagg

SEQ ID NO: 1159901 - DNA, 25 bp, Homo sapien
catgagtctttgtggtcgctgtcca

SEQ ID NO: 1159902 - DNA, 25 bp, Homo sapien
caattgaggtgctccatcaagtgca

SEQ ID NO: 1159903 - DNA, 25 bp, Homo sapien
gctgtccacccatgaatggaatgag

SEQ ID NO: 1159904 - DNA, 25 bp, Homo sapien
cactgaggtcggcactttggaggac

SEQ ID NO: 1159905 - DNA, 25 bp, Homo sapien
tgggcactgaggtcggcactttgga

SEQ ID NO: 1159906 - DNA, 25 bp, Homo sapien
aggtcggcactttggaggacacttg

SEQ ID NO: 1159907 - DNA, 25 bp, Homo sapien
gggctgggcactgaggtcggcactt

SEQ ID NO: 1159908 - DNA, 25 bp, Homo sapien
gtgccggtgccggtggaagagacgg

SEQ ID NO: 1159909 - DNA, 25 bp, Homo sapien
aacaatcggggctctggtgccggtg

SEQ ID NO: 1159910 - DNA, 25 bp, Homo sapien
tgccggtggaagagacggggcctgt

SEQ ID NO: 1159911 - DNA, 25 bp, Homo sapien
aatcggggctctggtgccggtgccg

SEQ ID NO: 1159912 - DNA, 25 bp, Homo sapien
ccagagcccccagaaggttcacact

SEQ ID NO: 1159913 - DNA, 25 bp, Homo sapien
agagcccccagaaggttcacactca

SEQ ID NO: 1159914 - DNA, 25 bp, Homo sapien
agccagagcccccagaaggttcaca

SEQ ID NO: 1159915 - DNA, 25 bp, Homo sapien
agcagcagtccccagagctgtggca

SEQ ID NO: 1159916 - DNA, 25 bp, Homo sapien
tcctggttgcaagtttctccataag

SEQ ID NO: 1159917 - DNA, 25 bp, Homo sapien
tctccataagggttgctctgtgatg

SEQ ID NO: 1159918 - DNA, 25 bp, Homo sapien
caacagacaaaacacctcacaaggt

SEQ ID NO: 1159919 - DNA, 25 bp, Homo sapien
caaggtgtgtcagcccaaggaaagg

SEQ ID NO: 1159920 - DNA, 25 bp, Homo sapien
cagccttacactgcttacgtattta

SEQ ID NO: 1159921 - DNA, 25 bp, Homo sapien
aggcccatactgaggtgttccttca

SEQ ID NO: 1159922 - DNA, 25 bp, Homo sapien
tatttaacagttgtttcgtggagag

SEQ ID NO: 1159923 - DNA, 25 bp, Homo sapien
caggaactgagcaggcccatactga

SEQ ID NO: 1159924 - DNA, 25 bp, Homo sapien
caaaggctccaagactgccccacat

SEQ ID NO: 1159925 - DNA, 25 bp, Homo sapien
ctctgaacacgctttgctcagtccc

SEQ ID NO: 1159926 - DNA, 25 bp, Homo sapien
ccctctgaacacgctttgctcagtc

SEQ ID NO: 1159927 - DNA, 25 bp, Homo sapien
ggcaccaaaggctccaagactgccc

SEQ ID NO: 1159928 - DNA, 25 bp, Homo sapien
agcttcccagatagcctcttcggca

SEQ ID NO: 1159929 - DNA, 25 bp, Homo sapien
tcttcctgagctggatgatgagctt

SEQ ID NO: 1159930 - DNA, 25 bp, Homo sapien
atctcttcctgagctggatgatgag

SEQ ID NO: 1159931 - DNA, 25 bp, Homo sapien
tggatgatgagcttcccagatagcc

SEQ ID NO: 1159932 - DNA, 25 bp, Homo sapien
gctgggcctcggatgagccatgcta

SEQ ID NO: 1159933 - DNA, 25 bp, Homo sapien
cctcggatgagccatgctaatggca

SEQ ID NO: 1159934 - DNA, 25 bp, Homo sapien
gacgtggctgttgcacaagtgtggg

SEQ ID NO: 1159935 - DNA, 25 bp, Homo sapien
cggatgagccatgctaatggcagga

SEQ ID NO: 1159936 - DNA, 25 bp, Homo sapien
ttcagacgcagcaacagatacgtcc

SEQ ID NO: 1159937 - DNA, 25 bp, Homo sapien
tgggttcagacgcagcaacagatac

SEQ ID NO: 1159938 - DNA, 25 bp, Homo sapien
ggttcagacgcagcaacagatacgt

SEQ ID NO: 1159939 - DNA, 25 bp, Homo sapien
cgtgggttcagacgcagcaacagat

SEQ ID NO: 1159940 - DNA, 25 bp, Homo sapien
ttgggggatacttggggataggaca

SEQ ID NO: 1159941 - DNA, 25 bp, Homo sapien
atacttggggataggacacttggga

SEQ ID NO: 1159942 - DNA, 25 bp, Homo sapien
tgggggatacttggggataggacac

SEQ ID NO: 1159943 - DNA, 25 bp, Homo sapien
gggatacttggggataggacacttg

SEQ ID NO: 1159944 - DNA, 25 bp, Homo sapien
aagagattggaggtgggcatgagga

SEQ ID NO: 1159945 - DNA, 25 bp, Homo sapien
tggaggtgggcatgaggatgcacac

SEQ ID NO: 1159946 - DNA, 25 bp, Homo sapien
ctggagccacagcaggaagagattg

SEQ ID NO: 1159947 - DNA, 25 bp, Homo sapien
gagattggaggtgggcatgaggatg

SEQ ID NO: 1159948 - DNA, 25 bp, Homo sapien
tgccactgccatagcaattggagct

SEQ ID NO: 1159949 - DNA, 25 bp, Homo sapien
tagcaattggagctcttgggtctgt

SEQ ID NO: 1159950 - DNA, 25 bp, Homo sapien
cagtgggacctatggtgtctgtggt

SEQ ID NO: 1159951 - DNA, 25 bp, Homo sapien
tggcagtgggacctatggtgtctgt

SEQ ID NO: 1159952 - DNA, 25 bp, Homo sapien
atgggtccttcgcccactaattcct

SEQ ID NO: 1159953 - DNA, 25 bp, Homo sapien
ccttcgcccactaattcctttggtg

SEQ ID NO: 1159954 - DNA, 25 bp, Homo sapien
cttcgcccactaattcctttggtgc

SEQ ID NO: 1159955 - DNA, 25 bp, Homo sapien
tgcaatgggtccttcgcccactaat

SEQ ID NO: 1159956 - DNA, 25 bp, Homo sapien
ccagattttcaatggaagttgtctc

SEQ ID NO: 1159957 - DNA, 25 bp, Homo sapien
gattttcaatggaagttgtctctcc

SEQ ID NO: 1159958 - DNA, 25 bp, Homo sapien
catttgatcttacaaccccctccca

SEQ ID NO: 1159959 - DNA, 25 bp, Homo sapien
tgcatttgatcttacaaccccctcc

SEQ ID NO: 1159960 - DNA, 25 bp, Homo sapien
acttccacccagactaccacaagaa

SEQ ID NO: 1159961 - DNA, 25 bp, Homo sapien
cttccacccagactaccacaagaaa

SEQ ID NO: 1159962 - DNA, 25 bp, Homo sapien
ttccacccagactaccacaagaaaa

SEQ ID NO: 1159963 - DNA, 25 bp, Homo sapien
tcactaccaggcttcaattccaaag

SEQ ID NO: 1159964 - DNA, 25 bp, Homo sapien
ggcttcaattccaaagaacgctgag

SEQ ID NO: 1159965 - DNA, 25 bp, Homo sapien
tttcaggacctcactaccaggcttc

SEQ ID NO: 1159966 - DNA, 25 bp, Homo sapien
caaagaacgctgagcagggaaaatt

SEQ ID NO: 1159967 - DNA, 25 bp, Homo sapien
ctttcacacaagatggagggaactg

SEQ ID NO: 1159968 - DNA, 25 bp, Homo sapien
agaggcaccattgctaccctgccca

SEQ ID NO: 1159969 - DNA, 25 bp, Homo sapien
tagtcccgaacctttcacacaagat

SEQ ID NO: 1159970 - DNA, 25 bp, Homo sapien
gacagtttgggtctggcatggaact

SEQ ID NO: 1159971 - DNA, 25 bp, Homo sapien
cataagtttgagtagggcatggagc

SEQ ID NO: 1159972 - DNA, 25 bp, Homo sapien
catggaacttggtacttcacataag

SEQ ID NO: 1159973 - DNA, 25 bp, Homo sapien
tggcatggaacttggtacttcacat

SEQ ID NO: 1159974 - DNA, 25 bp, Homo sapien
gtaggtttgagtctggcatggaact

SEQ ID NO: 1159975 - DNA, 25 bp, Homo sapien
ggtgttgggtatttcacataggtcc

SEQ ID NO: 1159976 - DNA, 25 bp, Homo sapien
cataggtttggcagggtgttgggta

SEQ ID NO: 1159977 - DNA, 25 bp, Homo sapien
ataggtttggcagggtgttgggtat

SEQ ID NO: 1159978 - DNA, 25 bp, Homo sapien
acataggtttggcagggtgttgggt

SEQ ID NO: 1159979 - DNA, 25 bp, Homo sapien
ggcaaggagaagcaccctggacata

SEQ ID NO: 1159980 - DNA, 25 bp, Homo sapien
cctggacatagcacgtctgggtctg

SEQ ID NO: 1159981 - DNA, 25 bp, Homo sapien
gtactgggaggttgagccacttgca

SEQ ID NO: 1159982 - DNA, 25 bp, Homo sapien
gagcttgaacataatagctctggca

SEQ ID NO: 1159983 - DNA, 25 bp, Homo sapien
ccgaaggtccggggagccagacagc

SEQ ID NO: 1159984 - DNA, 25 bp, Homo sapien
cccgaaggtccggggagccagacag

SEQ ID NO: 1159985 - DNA, 25 bp, Homo sapien
cgaaggtccggggagccagacagca

SEQ ID NO: 1159986 - DNA, 25 bp, Homo sapien
ggccgctgaatccagcgtctcaggg

SEQ ID NO: 1159987 - DNA, 25 bp, Homo sapien
tggggccgctgaatccagcgtctca

SEQ ID NO: 1159988 - DNA, 25 bp, Homo sapien
gttctggggccgctgaatccagcgt

SEQ ID NO: 1159989 - DNA, 25 bp, Homo sapien
gaatccagcgtctcaggggactcac

SEQ ID NO: 1159990 - DNA, 25 bp, Homo sapien
tcgggacctcatggggataattccc

SEQ ID NO: 1159991 - DNA, 25 bp, Homo sapien
catgcaggacctcgggacctcatgg

SEQ ID NO: 1159992 - DNA, 25 bp, Homo sapien
cagcatgcaggacctcgggacctca

SEQ ID NO: 1159993 - DNA, 25 bp, Homo sapien
cctcgggacctcatggggataattc

SEQ ID NO: 1159994 - DNA, 25 bp, Homo sapien
gcacagaggcaaagtgatgaggttc

SEQ ID NO: 1159995 - DNA, 25 bp, Homo sapien
cactaacagagagggggccagaagc

SEQ ID NO: 1159996 - DNA, 25 bp, Homo sapien
gggactgtactaactctggcaggct

SEQ ID NO: 1159997 - DNA, 25 bp, Homo sapien
cagtgcattctggagttgagctgtc

SEQ ID NO: 1159998 - DNA, 25 bp, Homo sapien
ttgtcgggaaatttggcagaagtat

SEQ ID NO: 1159999 - DNA, 25 bp, Homo sapien
tgtcgggaaatttggcagaagtatt

SEQ ID NO: 1160000 - DNA, 25 bp, Homo sapien
tggcttatccccagaacctaagtct

SEQ ID NO: 1160001 - DNA, 25 bp, Homo sapien
cagaacctaagtctccaatcatggg

SEQ ID NO: 1160002 - DNA, 25 bp, Homo sapien
tatccccagaacctaagtctccaat

SEQ ID NO: 1160003 - DNA, 25 bp, Homo sapien
ctcttggcttatccccagaacctaa

SEQ ID NO: 1160004 - DNA, 25 bp, Homo sapien
ctggttagtggaggagcaagggctg

SEQ ID NO: 1160005 - DNA, 25 bp, Homo sapien
aggagcaagggctgtcactaacaag

SEQ ID NO: 1160006 - DNA, 25 bp, Homo sapien
tggaggagcaagggctgtcactaac

SEQ ID NO: 1160007 - DNA, 25 bp, Homo sapien
tggttagtggaggagcaagggctgt

SEQ ID NO: 1160008 - DNA, 25 bp, Homo sapien
cttaggagtacacttgggagggcat

SEQ ID NO: 1160009 - DNA, 25 bp, Homo sapien
ttaggagtacacttgggagggcatt

SEQ ID NO: 1160010 - DNA, 25 bp, Homo sapien
taggagtacacttgggagggcattt

SEQ ID NO: 1160011 - DNA, 25 bp, Homo sapien
agcccctggagctaacactgcagca

SEQ ID NO: 1160012 - DNA, 25 bp, Homo sapien
cccctggagctaacactgcagcagg

SEQ ID NO: 1160013 - DNA, 25 bp, Homo sapien
agcagcccctggagctaacactgca

SEQ ID NO: 1160014 - DNA, 25 bp, Homo sapien
cctggagctaacactgcagcaggaa

SEQ ID NO: 1160015 - DNA, 25 bp, Homo sapien
agcagggctgggtaggtcttccaca

SEQ ID NO: 1160016 - DNA, 25 bp, Homo sapien
aatatttagaaccttcctcgtgaag

SEQ ID NO: 1160017 - DNA, 25 bp, Homo sapien
tatgaggtcttcatggcccaggtca

SEQ ID NO: 1160018 - DNA, 25 bp, Homo sapien
tgagcctgcccatctggagtaatat

SEQ ID NO: 1160019 - DNA, 25 bp, Homo sapien
tcacatgttgagtctcaaagaatgt

SEQ ID NO: 1160020 - DNA, 25 bp, Homo sapien
tgaagtcataggaaactctcagacc

SEQ ID NO: 1160021 - DNA, 25 bp, Homo sapien
gaatggagagccttgcttaatcaca

SEQ ID NO: 1160022 - DNA, 25 bp, Homo sapien
cagtattgctgggttatcaatatcc

SEQ ID NO: 1160023 - DNA, 25 bp, Homo sapien
tgggaagagggctgtctttatataa

SEQ ID NO: 1160024 - DNA, 25 bp, Homo sapien
atccgcctggtgcatcaaccgggct

SEQ ID NO: 1160025 - DNA, 25 bp, Homo sapien
gtctggcttgggccatgagacagct

SEQ ID NO: 1160026 - DNA, 25 bp, Homo sapien
aagagggctgtctttatataaaggg

SEQ ID NO: 1160027 - DNA, 25 bp, Homo sapien
tcacatccaatgtggtctgagcagc

SEQ ID NO: 1160028 - DNA, 25 bp, Homo sapien
ctcacatccaatgtggtctgagcag

SEQ ID NO: 1160029 - DNA, 25 bp, Homo sapien
cacatccaatgtggtctgagcagcc

SEQ ID NO: 1160030 - DNA, 25 bp, Homo sapien
ggacccttgacgcagcactgttgga

SEQ ID NO: 1160031 - DNA, 25 bp, Homo sapien
gatgcagggcagtccacaatttgca

SEQ ID NO: 1160032 - DNA, 25 bp, Homo sapien
ttgacgcagcactgttggagcggca

SEQ ID NO: 1160033 - DNA, 25 bp, Homo sapien
tctcacaaggggcttgaaccaccac

SEQ ID NO: 1160034 - DNA, 25 bp, Homo sapien
gagcctggtctgacacctggcaaac

SEQ ID NO: 1160035 - DNA, 25 bp, Homo sapien
ggtcttagactgacattgagcctgg

SEQ ID NO: 1160036 - DNA, 25 bp, Homo sapien
tgggtggtcttagactgacattgag

SEQ ID NO: 1160037 - DNA, 25 bp, Homo sapien
agactgacattgagcctggcccttc

SEQ ID NO: 1160038 - DNA, 25 bp, Homo sapien
tcttagactgacattgagcctggcc

SEQ ID NO: 1160039 - DNA, 25 bp, Homo sapien
caaactggagcacattctacgaagc

SEQ ID NO: 1160040 - DNA, 25 bp, Homo sapien
cagggtacatagttctggactgggc

SEQ ID NO: 1160041 - DNA, 25 bp, Homo sapien
gaacaggttgtgacgcttcgcactg

SEQ ID NO: 1160042 - DNA, 25 bp, Homo sapien
tctacgaagcaagtctgaacaggtt

SEQ ID NO: 1160043 - DNA, 25 bp, Homo sapien
tgcaggacgccctctatacatctgg

SEQ ID NO: 1160044 - DNA, 25 bp, Homo sapien
gccacaactgctataggagccttga

SEQ ID NO: 1160045 - DNA, 25 bp, Homo sapien
ccttgatactggcactgggtggaga

SEQ ID NO: 1160046 - DNA, 25 bp, Homo sapien
tagttgttgcaggtagcccttgact

SEQ ID NO: 1160047 - DNA, 25 bp, Homo sapien
cacagggactaaatgaagtccggga

SEQ ID NO: 1160048 - DNA, 25 bp, Homo sapien
ccgggaccgatactgagggaaacag

SEQ ID NO: 1160049 - DNA, 25 bp, Homo sapien
ctccgagagcggtgctgttcagtga

SEQ ID NO: 1160050 - DNA, 25 bp, Homo sapien
tggtgctccgagagcggtgctgttc

SEQ ID NO: 1160051 - DNA, 25 bp, Homo sapien
cacagctctgggagcggcgtctgat

SEQ ID NO: 1160052 - DNA, 25 bp, Homo sapien
gaggaaatctcgattcggcacttgg

SEQ ID NO: 1160053 - DNA, 25 bp, Homo sapien
tgttatatatgggttcagagcggcg

SEQ ID NO: 1160054 - DNA, 25 bp, Homo sapien
aaccttcagagggtcttagtggcag

SEQ ID NO: 1160055 - DNA, 25 bp, Homo sapien
acatcgctgcagtggtgactctgga

SEQ ID NO: 1160056 - DNA, 25 bp, Homo sapien
caggaggtggacatcgctgcagtgg

SEQ ID NO: 1160057 - DNA, 25 bp, Homo sapien
acactggtcaagacgccgtggtgga

SEQ ID NO: 1160058 - DNA, 25 bp, Homo sapien
caagacgccgtggtggacagaagct

SEQ ID NO: 1160059 - DNA, 25 bp, Homo sapien
ccacagtagggagcttcggtgtcta

SEQ ID NO: 1160060 - DNA, 25 bp, Homo sapien
tagactcatgacagcctaggtctcc

SEQ ID NO: 1160061 - DNA, 25 bp, Homo sapien
ctcttgcccctggttgtaactggat

SEQ ID NO: 1160062 - DNA, 25 bp, Homo sapien
tgtctaggcggtgtggactagactc

SEQ ID NO: 1160063 - DNA, 25 bp, Homo sapien
caattcaagagatgtcaccaggcag

SEQ ID NO: 1160064 - DNA, 25 bp, Homo sapien
gagattcaaacaagagcgtactgga

SEQ ID NO: 1160065 - DNA, 25 bp, Homo sapien
tgagcatcaggacagaacatggttc

SEQ ID NO: 1160066 - DNA, 25 bp, Homo sapien
gagttctaggaagtcggcacaggtt

SEQ ID NO: 1160067 - DNA, 25 bp, Homo sapien
tgtggcggtgggacctacgccgtct

SEQ ID NO: 1160068 - DNA, 25 bp, Homo sapien
cggtgggacctacgccgtctgtggt

SEQ ID NO: 1160069 - DNA, 25 bp, Homo sapien
ctgtggcggtgggacctacgccgtc

SEQ ID NO: 1160070 - DNA, 25 bp, Homo sapien
tggcggtgggacctacgccgtctgt

SEQ ID NO: 1160071 - DNA, 25 bp, Homo sapien
agggtccttcggcacctcaggaagt

SEQ ID NO: 1160072 - DNA, 25 bp, Homo sapien
gcacagggtccttcggcacctcagg

SEQ ID NO: 1160073 - DNA, 25 bp, Homo sapien
acagggtccttcggcacctcaggaa

SEQ ID NO: 1160074 - DNA, 25 bp, Homo sapien
cacagggtccttcggcacctcagga

SEQ ID NO: 1160075 - DNA, 25 bp, Homo sapien
tgatctgagcatccctctgtggaat

SEQ ID NO: 1160076 - DNA, 25 bp, Homo sapien
ctgatctgagcatccctctgtggaa

SEQ ID NO: 1160077 - DNA, 25 bp, Homo sapien
tctgagcatccctctgtggaatccc

SEQ ID NO: 1160078 - DNA, 25 bp, Homo sapien
gagcatccctctgtggaatcccctg

SEQ ID NO: 1160079 - DNA, 25 bp, Homo sapien
agcagcctccggagctgacactgca

SEQ ID NO: 1160080 - DNA, 25 bp, Homo sapien
gacggtgggacctgtggtgcctgtg

SEQ ID NO: 1160081 - DNA, 25 bp, Homo sapien
agggcacttgggagtgcacttggga

SEQ ID NO: 1160082 - DNA, 25 bp, Homo sapien
agggggacactttggagggcatttg

SEQ ID NO: 1160083 - DNA, 25 bp, Homo sapien
caggaaaatcaagcaggctggtagc

SEQ ID NO: 1160084 - DNA, 25 bp, Homo sapien
gcagaagaaagtctctaaatgccat

SEQ ID NO: 1160085 - DNA, 25 bp, Homo sapien
taggtgtgtgctttggagttcccag

SEQ ID NO: 1160086 - DNA, 25 bp, Homo sapien
gcacatacagtatggaggaggagtc

SEQ ID NO: 1160087 - DNA, 25 bp, Homo sapien
catttaggggcggggcacttgggag

SEQ ID NO: 1160088 - DNA, 25 bp, Homo sapien
cccagagttggagccacagccgccc

SEQ ID NO: 1160089 - DNA, 25 bp, Homo sapien
agcagcccccagagttggagccaca

SEQ ID NO: 1160090 - DNA, 25 bp, Homo sapien
cagagttggagccacagccgccccc

SEQ ID NO: 1160091 - DNA, 25 bp, Homo sapien
cccccagagttggagccacagccgc

SEQ ID NO: 1160092 - DNA, 25 bp, Homo sapien
acggtgggacctgtggcgcctgtgg

SEQ ID NO: 1160093 - DNA, 25 bp, Homo sapien
gacggtgggacctgtggcgcctgtg

SEQ ID NO: 1160094 - DNA, 25 bp, Homo sapien
cccaccgcagcagctggagcccccc

SEQ ID NO: 1160095 - DNA, 25 bp, Homo sapien
gcagctggagccccccgagggctgg

SEQ ID NO: 1160096 - DNA, 25 bp, Homo sapien
tggagccccccgagggctggctgca

SEQ ID NO: 1160097 - DNA, 25 bp, Homo sapien
gctggctgctgcccccaccgcagca

SEQ ID NO: 1160098 - DNA, 25 bp, Homo sapien
ctcccaagtgccccaccccaaagtg

SEQ ID NO: 1160099 - DNA, 25 bp, Homo sapien
ctcccaagtgcacccccaagtgccc

SEQ ID NO: 1160100 - DNA, 25 bp, Homo sapien
tgcagtgtcagctccggaggctgct

SEQ ID NO: 1160101 - DNA, 25 bp, Homo sapien
tccccctaagtgccctcctgtctct

SEQ ID NO: 1160102 - DNA, 25 bp, Homo sapien
cttgttgtaaggacatagaagttca

SEQ ID NO: 1160103 - DNA, 25 bp, Homo sapien
ttgttgtaaggacatagaagttcag

SEQ ID NO: 1160104 - DNA, 25 bp, Homo sapien
tgttgtaaggacatagaagttcaga

SEQ ID NO: 1160105 - DNA, 25 bp, Homo sapien
gttgtaaggacatagaagttcagaa

SEQ ID NO: 1160106 - DNA, 25 bp, Homo sapien
tagttgtagctaattaatcacggga

SEQ ID NO: 1160107 - DNA, 25 bp, Homo sapien
gcttcaactacacacctgaatcatg

SEQ ID NO: 1160108 - DNA, 25 bp, Homo sapien
tgtagtatgtagaggagacattctg

SEQ ID NO: 1160109 - DNA, 25 bp, Homo sapien
gacagcaagttagacccaggtagag

SEQ ID NO: 1160110 - DNA, 25 bp, Homo sapien
gcagtgggacctacggcgcctgtgg

SEQ ID NO: 1160111 - DNA, 25 bp, Homo sapien
ctgtggcagtgggacctacggcgcc

SEQ ID NO: 1160112 - DNA, 25 bp, Homo sapien
tgtggcagtgggacctacggcgcct

SEQ ID NO: 1160113 - DNA, 25 bp, Homo sapien
tggcagtgggacctacggcgcctgt

SEQ ID NO: 1160114 - DNA, 25 bp, Homo sapien
tcaggctgagctatgcaaaaagaca

SEQ ID NO: 1160115 - DNA, 25 bp, Homo sapien
tatgcttgagttgagccctcaccaa

SEQ ID NO: 1160116 - DNA, 25 bp, Homo sapien
aagacctctcaacaacatgggcagg

SEQ ID NO: 1160117 - DNA, 25 bp, Homo sapien
gagcaaccacacatacgcaaactga

SEQ ID NO: 1160118 - DNA, 25 bp, Homo sapien
acggtgggacctgtggcgcctgtgg

SEQ ID NO: 1160119 - DNA, 25 bp, Homo sapien
gacggtgggacctgtggcgcctgtg

SEQ ID NO: 1160120 - DNA, 25 bp, Homo sapien
gagagatcaggactgcctaagcagc

SEQ ID NO: 1160121 - DNA, 25 bp, Homo sapien
ccctagtggaagatgtgtggacaag

SEQ ID NO: 1160122 - DNA, 25 bp, Homo sapien
tcagccagaagtagccttaccctag

SEQ ID NO: 1160123 - DNA, 25 bp, Homo sapien
gagctacatccaagtgtctcctcag

SEQ ID NO: 1160124 - DNA, 25 bp, Homo sapien
gggactcacttactaataaccatgt

SEQ ID NO: 1160125 - DNA, 25 bp, Homo sapien
gaagtccagcatttacaacccactg

SEQ ID NO: 1160126 - DNA, 25 bp, Homo sapien
cctggttaagtgcaaaggagagcca

SEQ ID NO: 1160127 - DNA, 25 bp, Homo sapien
tttacttttcccagcccaatgtcca

SEQ ID NO: 1160128 - DNA, 25 bp, Homo sapien
caccacaaggagtcgagtagggagc

SEQ ID NO: 1160129 - DNA, 25 bp, Homo sapien
ttaggcagcgcagcttttgacgagc

SEQ ID NO: 1160130 - DNA, 25 bp, Homo sapien
tctttgcagtggtaggttgtgcccc

SEQ ID NO: 1160131 - DNA, 25 bp, Homo sapien
gacattgcttggctaccaggtcgaa

SEQ ID NO: 1160132 - DNA, 25 bp, Homo sapien
tagaatcgtggaaaccggagtgaaa

SEQ ID NO: 1160133 - DNA, 25 bp, Homo sapien
gtgaaactagagagcagtggcctcc

SEQ ID NO: 1160134 - DNA, 25 bp, Homo sapien
gaagactcgtgctcacagcagtcag

SEQ ID NO: 1160135 - DNA, 25 bp, Homo sapien
gctgacgcaggtagaatcgtggaaa

SEQ ID NO: 1160136 - DNA, 25 bp, Homo sapien
tccatgcttgacttctcatgactga

SEQ ID NO: 1160137 - DNA, 25 bp, Homo sapien
gcctagtgagtccatgactatcaga

SEQ ID NO: 1160138 - DNA, 25 bp, Homo sapien
taggtattattgatcttcctcagca

SEQ ID NO: 1160139 - DNA, 25 bp, Homo sapien
ctgattccagtaggtattattgatc

SEQ ID NO: 1160140 - DNA, 25 bp, Homo sapien
cagtcccaccaatgtccccactcca

SEQ ID NO: 1160141 - DNA, 25 bp, Homo sapien
tgttttggtgggcagcattgactgc

SEQ ID NO: 1160142 - DNA, 25 bp, Homo sapien
agcattgattgccttttgctgggca

SEQ ID NO: 1160143 - DNA, 25 bp, Homo sapien
tttggctggcagcagtgattgtgtt

SEQ ID NO: 1160144 - DNA, 25 bp, Homo sapien
gactggcagcactggttctgctgtg

SEQ ID NO: 1160145 - DNA, 25 bp, Homo sapien
tcatttgcttggcctggactcattt

SEQ ID NO: 1160146 - DNA, 25 bp, Homo sapien
gacagcccttgtcctgagtttgcgg

SEQ ID NO: 1160147 - DNA, 25 bp, Homo sapien
tgagacttcaggcttggtctccaaa

SEQ ID NO: 1160148 - DNA, 25 bp, Homo sapien
gcggtgagttgggctcagactccat

SEQ ID NO: 1160149 - DNA, 25 bp, Homo sapien
caccctacaaagtgaaaggcatggc

SEQ ID NO: 1160150 - DNA, 25 bp, Homo sapien
taggagcctctcattgggtggaaat

SEQ ID NO: 1160151 - DNA, 25 bp, Homo sapien
taaatgtcaggatcactaggaaaga

SEQ ID NO: 1160152 - DNA, 25 bp, Homo sapien
taaacacaggtctagcctgactctc

SEQ ID NO: 1160153 - DNA, 25 bp, Homo sapien
gtgaggcccagtgtagcaggactct

SEQ ID NO: 1160154 - DNA, 25 bp, Homo sapien
cactggcttccaccgatgagttggg

SEQ ID NO: 1160155 - DNA, 25 bp, Homo sapien
ggaaccgcagtagtccctggagcat

SEQ ID NO: 1160156 - DNA, 25 bp, Homo sapien
aggtctcgccttggaaccgcagtag

SEQ ID NO: 1160157 - DNA, 25 bp, Homo sapien
tgggtaattaccactggcttcccca

SEQ ID NO: 1160158 - DNA, 25 bp, Homo sapien
tgcagacccatagccttgcctttca

SEQ ID NO: 1160159 - DNA, 25 bp, Homo sapien
tgcctttcacagagggttgggtaat

SEQ ID NO: 1160160 - DNA, 25 bp, Homo sapien
ccccagcaagggaaaggcgggtgag

SEQ ID NO: 1160161 - DNA, 25 bp, Homo sapien
ctgacttcatctggggggaatctgc

SEQ ID NO: 1160162 - DNA, 25 bp, Homo sapien
ttggcgctgatgcccttgtgctctg

SEQ ID NO: 1160163 - DNA, 25 bp, Homo sapien
tttggcgctgatgcccttgtgctct

SEQ ID NO: 1160164 - DNA, 25 bp, Homo sapien
tgctgacttcatctggggggaatct

SEQ ID NO: 1160165 - DNA, 25 bp, Homo sapien
tttttcccatagaacagggactgtg

SEQ ID NO: 1160166 - DNA, 25 bp, Homo sapien
tttcccatagaacagggactgtgcc

SEQ ID NO: 1160167 - DNA, 25 bp, Homo sapien
tcccatagaacagggactgtgccat

SEQ ID NO: 1160168 - DNA, 25 bp, Homo sapien
tctttttcccatagaacagggactg

SEQ ID NO: 1160169 - DNA, 25 bp, Homo sapien
gactcacagtaaggctgaggcagag

SEQ ID NO: 1160170 - DNA, 25 bp, Homo sapien
agactcacagtaaggctgaggcaga

SEQ ID NO: 1160171 - DNA, 25 bp, Homo sapien
cagactcacagtaaggctgaggcag

SEQ ID NO: 1160172 - DNA, 25 bp, Homo sapien
caccacatcgtatgctgttggaggt

SEQ ID NO: 1160173 - DNA, 25 bp, Homo sapien
gaatgaaagtccagctgaatccagc

SEQ ID NO: 1160174 - DNA, 25 bp, Homo sapien
tgtgccaaggcacttttctctcagt

SEQ ID NO: 1160175 - DNA, 25 bp, Homo sapien
tgatggtctgtcaaaacccaagagg

SEQ ID NO: 1160176 - DNA, 25 bp, Homo sapien
cttgaggagctcctgactgagggca

SEQ ID NO: 1160177 - DNA, 25 bp, Homo sapien
tgctttgatgggacctccactggga

SEQ ID NO: 1160178 - DNA, 25 bp, Homo sapien
aggcagtccctttacagcagtcatg

SEQ ID NO: 1160179 - DNA, 25 bp, Homo sapien
gctcgacaggcaccttctggcatgg

SEQ ID NO: 1160180 - DNA, 25 bp, Homo sapien
tctgggagctccagttgcttctcct

SEQ ID NO: 1160181 - DNA, 25 bp, Homo sapien
gctgctgctccagatgcttcagttg

SEQ ID NO: 1160182 - DNA, 25 bp, Homo sapien
tgggacctccaactgcccctgctgc

SEQ ID NO: 1160183 - DNA, 25 bp, Homo sapien
aggttctttggctgccccacctgct

SEQ ID NO: 1160184 - DNA, 25 bp, Homo sapien
cagatgttttagttgtccgtcctgc

SEQ ID NO: 1160185 - DNA, 25 bp, Homo sapien
tggtgctctacaggaagcaatactt

SEQ ID NO: 1160186 - DNA, 25 bp, Homo sapien
ctgctggtgctctacaggaagcaat

SEQ ID NO: 1160187 - DNA, 25 bp, Homo sapien
ttagttgtccgtcctgctgctctgg

SEQ ID NO: 1160188 - DNA, 25 bp, Homo sapien
ggttggcactggacaataattccct

SEQ ID NO: 1160189 - DNA, 25 bp, Homo sapien
tagcggacccgaaataagtggagcc

SEQ ID NO: 1160190 - DNA, 25 bp, Homo sapien
ccttgtatgagacgatctgagggcc

SEQ ID NO: 1160191 - DNA, 25 bp, Homo sapien
tcaagtagaggctctgctcacctga

SEQ ID NO: 1160192 - DNA, 25 bp, Homo sapien
tcaggtgaagcccttttctctcggt

SEQ ID NO: 1160193 - DNA, 25 bp, Homo sapien
cttttctctcggtcctgcaattcta

SEQ ID NO: 1160194 - DNA, 25 bp, Homo sapien
gcctccctcaggtgaagcccttttc

SEQ ID NO: 1160195 - DNA, 25 bp, Homo sapien
gaagcccttttctctcggtcctgca

SEQ ID NO: 1160196 - DNA, 25 bp, Homo sapien
caaggttcaccagcgactggagcag

SEQ ID NO: 1160197 - DNA, 25 bp, Homo sapien
aaggttcaccagcgactggagcaga

SEQ ID NO: 1160198 - DNA, 25 bp, Homo sapien
tggggggcagcactgttgaggcggg

SEQ ID NO: 1160199 - DNA, 25 bp, Homo sapien
ctgcgggggagcacactgcttctgc

SEQ ID NO: 1160200 - DNA, 25 bp, Homo sapien
ggggagcacactgcttctgcttctg

SEQ ID NO: 1160201 - DNA, 25 bp, Homo sapien
ctgctgcgggggagcacactgcttc

SEQ ID NO: 1160202 - DNA, 25 bp, Homo sapien
ctgcttggacgtctggcactgctga

SEQ ID NO: 1160203 - DNA, 25 bp, Homo sapien
aggctgcttggtctgttggggtggg

SEQ ID NO: 1160204 - DNA, 25 bp, Homo sapien
ttctgcttggacgtctggcactgct

SEQ ID NO: 1160205 - DNA, 25 bp, Homo sapien
caaggctgcttggtctgttggggtg

SEQ ID NO: 1160206 - DNA, 25 bp, Homo sapien
tctcctgcaagtgtgaagtgtggct

SEQ ID NO: 1160207 - DNA, 25 bp, Homo sapien
tttccagcagggcaatgtagatgca

SEQ ID NO: 1160208 - DNA, 25 bp, Homo sapien
gtgtggctgcatccagaagcactgg

SEQ ID NO: 1160209 - DNA, 25 bp, Homo sapien
gaagatgcctgtgcatgccgctcat

SEQ ID NO: 1160210 - DNA, 25 bp, Homo sapien
gaaatttcactcaagccagatggtg

SEQ ID NO: 1160211 - DNA, 25 bp, Homo sapien
catcacactcttcatcctgagacct

SEQ ID NO: 1160212 - DNA, 25 bp, Homo sapien
gttctgtggaaatttcactcaagcc

SEQ ID NO: 1160213 - DNA, 25 bp, Homo sapien
tggaaatttcactcaagccagatgg

SEQ ID NO: 1160214 - DNA, 25 bp, Homo sapien
gaatgtcagattgccagggcacacg

SEQ ID NO: 1160215 - DNA, 25 bp, Homo sapien
cagcataggtgggtataagccacgc

SEQ ID NO: 1160216 - DNA, 25 bp, Homo sapien
tcccaggaatgtcagattgccaggg

SEQ ID NO: 1160217 - DNA, 25 bp, Homo sapien
gcccagggcgtcttcagtgccaggc

SEQ ID NO: 1160218 - DNA, 25 bp, Homo sapien
cagaggcgacaagctggaccccagg

SEQ ID NO: 1160219 - DNA, 25 bp, Homo sapien
accccaggagaggaggctgagccct

SEQ ID NO: 1160220 - DNA, 25 bp, Homo sapien
tggaccccaggagaggaggctgagc

SEQ ID NO: 1160221 - DNA, 25 bp, Homo sapien
ccccaggagaggaggctgagccctt

SEQ ID NO: 1160222 - DNA, 25 bp, Homo sapien
aatgatggtgcctttcggtgggcat

SEQ ID NO: 1160223 - DNA, 25 bp, Homo sapien
tttgctcttggaggcttgctgggct

SEQ ID NO: 1160224 - DNA, 25 bp, Homo sapien
ggtgcacatgtctcttgacatttaa

SEQ ID NO: 1160225 - DNA, 25 bp, Homo sapien
ggtggctgacaaggctgcttcactt

SEQ ID NO: 1160226 - DNA, 25 bp, Homo sapien
gaaatccttacaatgcttccttaca

SEQ ID NO: 1160227 - DNA, 25 bp, Homo sapien
tgaccctacttgtcagggtggaacc

SEQ ID NO: 1160228 - DNA, 25 bp, Homo sapien
tgagaggagggtaggctcaagagct

SEQ ID NO: 1160229 - DNA, 25 bp, Homo sapien
gatgggccttagctgtggccacgct

SEQ ID NO: 1160230 - DNA, 25 bp, Homo sapien
tgtccataagagtgacttcctgaac

SEQ ID NO: 1160231 - DNA, 25 bp, Homo sapien
tgtgtccataagagtgacttcctga

SEQ ID NO: 1160232 - DNA, 25 bp, Homo sapien
actgtgtccataagagtgacttcct

SEQ ID NO: 1160233 - DNA, 25 bp, Homo sapien
ctgtgtccataagagtgacttcctg

SEQ ID NO: 1160234 - DNA, 25 bp, Homo sapien
agatacatctggatatgtttcccca

SEQ ID NO: 1160235 - DNA, 25 bp, Homo sapien
ctgagatacatctggatatgtttcc

SEQ ID NO: 1160236 - DNA, 25 bp, Homo sapien
gagatacatctggatatgtttcccc

SEQ ID NO: 1160237 - DNA, 25 bp, Homo sapien
gatacatctggatatgtttccccat

SEQ ID NO: 1160238 - DNA, 25 bp, Homo sapien
ttggcctgaggatattgggagcctt

SEQ ID NO: 1160239 - DNA, 25 bp, Homo sapien
ttgatgcaactagatgctgatgaat

SEQ ID NO: 1160240 - DNA, 25 bp, Homo sapien
gatgcaactagatgctgatgaatgt

SEQ ID NO: 1160241 - DNA, 25 bp, Homo sapien
atgtgggtgtttggcctgaggatat

SEQ ID NO: 1160242 - DNA, 25 bp, Homo sapien
gagcagaatgggctgtgtggtccct

SEQ ID NO: 1160243 - DNA, 25 bp, Homo sapien
ctggtatacggagcagaatgggctg

SEQ ID NO: 1160244 - DNA, 25 bp, Homo sapien
acggagcagaatgggctgtgtggtc

SEQ ID NO: 1160245 - DNA, 25 bp, Homo sapien
tatacggagcagaatgggctgtgtg

SEQ ID NO: 1160246 - DNA, 25 bp, Homo sapien
catgggcatttgaacaatcttctcc

SEQ ID NO: 1160247 - DNA, 25 bp, Homo sapien
tccaggactcccagttcaatgacta

SEQ ID NO: 1160248 - DNA, 25 bp, Homo sapien
caatgactatctactgaggtgggag

SEQ ID NO: 1160249 - DNA, 25 bp, Homo sapien
gaaaccctggattaacctgcttaca

SEQ ID NO: 1160250 - DNA, 25 bp, Homo sapien
caaggttgtttcacctgctgctgct

SEQ ID NO: 1160251 - DNA, 25 bp, Homo sapien
gcaaggttgtttcacctgctgctgc

SEQ ID NO: 1160252 - DNA, 25 bp, Homo sapien
ggtggaggctggcaaggttgtttca

SEQ ID NO: 1160253 - DNA, 25 bp, Homo sapien
ggctggcaaggttgtttcacctgct

SEQ ID NO: 1160254 - DNA, 25 bp, Homo sapien
gggctccttggttttggggatgcat

SEQ ID NO: 1160255 - DNA, 25 bp, Homo sapien
ggctccttggttttggggatgcatg

SEQ ID NO: 1160256 - DNA, 25 bp, Homo sapien
gctccttggttttggggatgcatgg

SEQ ID NO: 1160257 - DNA, 25 bp, Homo sapien
ggctggtgctggagtgaccgttgaa

SEQ ID NO: 1160258 - DNA, 25 bp, Homo sapien
gtgctggagtgaccgttgaagggca

SEQ ID NO: 1160259 - DNA, 25 bp, Homo sapien
gctggagtgaccgttgaagggcagg

SEQ ID NO: 1160260 - DNA, 25 bp, Homo sapien
ttctgcttggtcttctgctgggctg

SEQ ID NO: 1160261 - DNA, 25 bp, Homo sapien
tagggtgttcagtatccagtggcca

SEQ ID NO: 1160262 - DNA, 25 bp, Homo sapien
cagggtgacagcatgctaactgcag

SEQ ID NO: 1160263 - DNA, 25 bp, Homo sapien
tgcacccgagcaacaagaagactag

SEQ ID NO: 1160264 - DNA, 25 bp, Homo sapien
tcagtgagacgttcagccttacgca

SEQ ID NO: 1160265 - DNA, 25 bp, Homo sapien
ggttggtggccctgaacatactccc

SEQ ID NO: 1160266 - DNA, 25 bp, Homo sapien
ccaggagtgtcctgtgtgtacagca

SEQ ID NO: 1160267 - DNA, 25 bp, Homo sapien
ggatcggccaccttctgactacaga

SEQ ID NO: 1160268 - DNA, 25 bp, Homo sapien
caaagtaacagattgggttggtggc

SEQ ID NO: 1160269 - DNA, 25 bp, Homo sapien
catggccatcgatgttaatgagcac

SEQ ID NO: 1160270 - DNA, 25 bp, Homo sapien
tctgtaaagtaaattctgtccaagg

SEQ ID NO: 1160271 - DNA, 25 bp, Homo sapien
gatatctaagcatttgcaagcatgg

SEQ ID NO: 1160272 - DNA, 25 bp, Homo sapien
ccaagggttctcttaagatatctaa

SEQ ID NO: 1160273 - DNA, 25 bp, Homo sapien
gcggatctggaatctgattttaaga

SEQ ID NO: 1160274 - DNA, 25 bp, Homo sapien
ttctctaatgcggatctggaatctg

SEQ ID NO: 1160275 - DNA, 25 bp, Homo sapien
ttgcttctctaatgcggatctggaa

SEQ ID NO: 1160276 - DNA, 25 bp, Homo sapien
tctaatgcggatctggaatctgatt

SEQ ID NO: 1160277 - DNA, 25 bp, Homo sapien
aggcagacagaaccgccttcccact

SEQ ID NO: 1160278 - DNA, 25 bp, Homo sapien
agacagaaccgccttcccactggct

SEQ ID NO: 1160279 - DNA, 25 bp, Homo sapien
ctaggcagacagaaccgccttccca

SEQ ID NO: 1160280 - DNA, 25 bp, Homo sapien
gcagacagaaccgccttcccactgg

SEQ ID NO: 1160281 - DNA, 25 bp, Homo sapien
gattagtcctattgggcttcctcat

SEQ ID NO: 1160282 - DNA, 25 bp, Homo sapien
ggcttcctcatggttgaagtggaca

SEQ ID NO: 1160283 - DNA, 25 bp, Homo sapien
tcctcatggttgaagtggacatgga

SEQ ID NO: 1160284 - DNA, 25 bp, Homo sapien
taatctttagccagattagtcctat

SEQ ID NO: 1160285 - DNA, 25 bp, Homo sapien
tgtgcagagaaggtcgaggtgttca

SEQ ID NO: 1160286 - DNA, 25 bp, Homo sapien
cagagaaggtcgaggtgttcagcct

SEQ ID NO: 1160287 - DNA, 25 bp, Homo sapien
gagaaggtcgaggtgttcagcctct

SEQ ID NO: 1160288 - DNA, 25 bp, Homo sapien
tgcagagaaggtcgaggtgttcagc

SEQ ID NO: 1160289 - DNA, 25 bp, Homo sapien
aagtcaaaatatgtataaggtcacc

SEQ ID NO: 1160290 - DNA, 25 bp, Homo sapien
caaaatatgtataaggtcaccttaa

SEQ ID NO: 1160291 - DNA, 25 bp, Homo sapien
ccttaaacaaaagtcgttattgcat

SEQ ID NO: 1160292 - DNA, 25 bp, Homo sapien
aagaaactattggagaatattaagg

SEQ ID NO: 1160293 - DNA, 25 bp, Homo sapien
aaaattgccaatgtagtgccttcta

SEQ ID NO: 1160294 - DNA, 25 bp, Homo sapien
accttcctcgttttgccacagcatg

SEQ ID NO: 1160295 - DNA, 25 bp, Homo sapien
tacatgttgacaggagagtgctctt

SEQ ID NO: 1160296 - DNA, 25 bp, Homo sapien
tggcaggctctccacatcatcgctg

SEQ ID NO: 1160297 - DNA, 25 bp, Homo sapien
gaagaatcctctaagctcctgaatt

SEQ ID NO: 1160298 - DNA, 25 bp, Homo sapien
aattaagcagaaagtcttagtggct

SEQ ID NO: 1160299 - DNA, 25 bp, Homo sapien
cctctaagctcctgaattaagcaga

SEQ ID NO: 1160300 - DNA, 25 bp, Homo sapien
aagcagaaagtcttagtggcttttc

SEQ ID NO: 1160301 - DNA, 25 bp, Homo sapien
gaatgaagcccagtttaatgacaaa

SEQ ID NO: 1160302 - DNA, 25 bp, Homo sapien
tgattaagtaggaatgaagcccagt

SEQ ID NO: 1160303 - DNA, 25 bp, Homo sapien
aattcagtgctttgattaagtagga

SEQ ID NO: 1160304 - DNA, 25 bp, Homo sapien
aacagctaattcagtgctttgatta

SEQ ID NO: 1160305 - DNA, 25 bp, Homo sapien
ttgtggaacctttgagtggcatggc

SEQ ID NO: 1160306 - DNA, 25 bp, Homo sapien
caggttgtggaacctttgagtggca

SEQ ID NO: 1160307 - DNA, 25 bp, Homo sapien
gaacctttgagtggcatggctcctt

SEQ ID NO: 1160308 - DNA, 25 bp, Homo sapien
ttccaggttgtggaacctttgagtg

SEQ ID NO: 1160309 - DNA, 25 bp, Homo sapien
accttggtacaacctggctcaggga

SEQ ID NO: 1160310 - DNA, 25 bp, Homo sapien
ggaccttggtacaacctggctcagg

SEQ ID NO: 1160311 - DNA, 25 bp, Homo sapien
cttggtacaacctggctcagggacc

SEQ ID NO: 1160312 - DNA, 25 bp, Homo sapien
agggaccttggtacaacctggctca

SEQ ID NO: 1160313 - DNA, 25 bp, Homo sapien
tatccttgctcaggaactttgatgg

SEQ ID NO: 1160314 - DNA, 25 bp, Homo sapien
ctcaggaaacttgatgaagccttgg

SEQ ID NO: 1160315 - DNA, 25 bp, Homo sapien
ttggtcagggaccttgatgctgcct

SEQ ID NO: 1160316 - DNA, 25 bp, Homo sapien
tgaccgttgaaggacatggctctgg

SEQ ID NO: 1160317 - DNA, 25 bp, Homo sapien
tgagcagccgaagaccagaaaagcc

SEQ ID NO: 1160318 - DNA, 25 bp, Homo sapien
tcttcagatgaaccctgagcagccg

SEQ ID NO: 1160319 - DNA, 25 bp, Homo sapien
acaatgtgctgattacaaggtctac

SEQ ID NO: 1160320 - DNA, 25 bp, Homo sapien
caaggtctacagacaattaagacac

SEQ ID NO: 1160321 - DNA, 25 bp, Homo sapien
tttagattctgttcaataactttcc

SEQ ID NO: 1160322 - DNA, 25 bp, Homo sapien
caacagaaactggttgtaattttag

SEQ ID NO: 1160323 - DNA, 25 bp, Homo sapien
gtaattttagattctgttcaataac

SEQ ID NO: 1160324 - DNA, 25 bp, Homo sapien
ctggttgtaattttagattctgttc

SEQ ID NO: 1160325 - DNA, 25 bp, Homo sapien
ctgctgttgaagctgagggggtgag

SEQ ID NO: 1160326 - DNA, 25 bp, Homo sapien
gctgcttctgcttgtgggaactcat

SEQ ID NO: 1160327 - DNA, 25 bp, Homo sapien
gggtgaggtaaagggctgcttctgc

SEQ ID NO: 1160328 - DNA, 25 bp, Homo sapien
ctgagggggtgaggtaaagggctgc

SEQ ID NO: 1160329 - DNA, 25 bp, Homo sapien
tcagggatcttggtgcagcctaact

SEQ ID NO: 1160330 - DNA, 25 bp, Homo sapien
gatcttggtgcagcctaactctgga

SEQ ID NO: 1160331 - DNA, 25 bp, Homo sapien
tggttatgggaacaaatggttccta

SEQ ID NO: 1160332 - DNA, 25 bp, Homo sapien
cttggtggagattgactcaaggacc

SEQ ID NO: 1160333 - DNA, 25 bp, Homo sapien
agtgactgttgaaggatgtggctct

SEQ ID NO: 1160334 - DNA, 25 bp, Homo sapien
gaagtgactgttgaaggatgtggct

SEQ ID NO: 1160335 - DNA, 25 bp, Homo sapien
gtgactgttgaaggatgtggctctg

SEQ ID NO: 1160336 - DNA, 25 bp, Homo sapien
aagtgactgttgaaggatgtggctc

SEQ ID NO: 1160337 - DNA, 25 bp, Homo sapien
actctgtatggtcccttagaactgg

SEQ ID NO: 1160338 - DNA, 25 bp, Homo sapien
ggtgtgaagagaggaatactctgta

SEQ ID NO: 1160339 - DNA, 25 bp, Homo sapien
gaatactctgtatggtcccttagaa

SEQ ID NO: 1160340 - DNA, 25 bp, Homo sapien
aagagaggaatactctgtatggtcc

SEQ ID NO: 1160341 - DNA, 25 bp, Homo sapien
tgagggggtggggtgcaaggctgct

SEQ ID NO: 1160342 - DNA, 25 bp, Homo sapien
ctgctgctgaagctgagggggtggg

SEQ ID NO: 1160343 - DNA, 25 bp, Homo sapien
tgctgctgctgaagctgagggggtg

SEQ ID NO: 1160344 - DNA, 25 bp, Homo sapien
gctgagggggtggggtgcaaggctg

SEQ ID NO: 1160345 - DNA, 25 bp, Homo sapien
ggctccttggttttggggatgcatg

SEQ ID NO: 1160346 - DNA, 25 bp, Homo sapien
gctccttggttttggggatgcatgg

SEQ ID NO: 1160347 - DNA, 25 bp, Homo sapien
gggctccttggttttggggatgcat

SEQ ID NO: 1160348 - DNA, 25 bp, Homo sapien
cttgggctggcagggctcgggcact

SEQ ID NO: 1160349 - DNA, 25 bp, Homo sapien
gctggcagggctcgggcactttggg

SEQ ID NO: 1160350 - DNA, 25 bp, Homo sapien
cttggggtggcatggctctggaacc

SEQ ID NO: 1160351 - DNA, 25 bp, Homo sapien
tggctctggaaccttgggctggcag

SEQ ID NO: 1160352 - DNA, 25 bp, Homo sapien
tggagtgactattgaagggcagggc

SEQ ID NO: 1160353 - DNA, 25 bp, Homo sapien
tgctggagtgactattgaagggcag

SEQ ID NO: 1160354 - DNA, 25 bp, Homo sapien
ctggtgctggagtgactattgaagg

SEQ ID NO: 1160355 - DNA, 25 bp, Homo sapien
agtgactattgaagggcagggctca

SEQ ID NO: 1160356 - DNA, 25 bp, Homo sapien
ctcagagtgtgtaggaaagaaagct

SEQ ID NO: 1160357 - DNA, 25 bp, Homo sapien
ggtataagggagctgaatcatttgc

SEQ ID NO: 1160358 - DNA, 25 bp, Homo sapien
tgcaaggcaaatgggactcatacgc

SEQ ID NO: 1160359 - DNA, 25 bp, Homo sapien
tagctctggtactaagaccttcagc

SEQ ID NO: 1160360 - DNA, 25 bp, Homo sapien
tttctccttaacctgtggcctgcct

SEQ ID NO: 1160361 - DNA, 25 bp, Homo sapien
ctttctccttaacctgtggcctgcc

SEQ ID NO: 1160362 - DNA, 25 bp, Homo sapien
tccacttgcatcttctcaccaaagc

SEQ ID NO: 1160363 - DNA, 25 bp, Homo sapien
gctccacttgcatcttctcaccaaa

SEQ ID NO: 1160364 - DNA, 25 bp, Homo sapien
ctcgttccacagctccacttgcatc

SEQ ID NO: 1160365 - DNA, 25 bp, Homo sapien
cttgcatcttctcaccaaagccttc

SEQ ID NO: 1160366 - DNA, 25 bp, Homo sapien
tcaggattcatcaggagcatgagag

SEQ ID NO: 1160367 - DNA, 25 bp, Homo sapien
ttcaggattcatcaggagcatgaga

SEQ ID NO: 1160368 - DNA, 25 bp, Homo sapien
caggcctttgttaagtctctccttc

SEQ ID NO: 1160369 - DNA, 25 bp, Homo sapien
tcaggcctttgttaagtctctcctt

SEQ ID NO: 1160370 - DNA, 25 bp, Homo sapien
tctttctccttagccagtaatctgc

SEQ ID NO: 1160371 - DNA, 25 bp, Homo sapien
cttcatcttctcatcaaagcctacc

SEQ ID NO: 1160372 - DNA, 25 bp, Homo sapien
ctcgttccacagctccaccttcatc

SEQ ID NO: 1160373 - DNA, 25 bp, Homo sapien
caccttcatcttctcatcaaagcct

SEQ ID NO: 1160374 - DNA, 25 bp, Homo sapien
tcatcttctcatcaaagcctaccat

SEQ ID NO: 1160375 - DNA, 25 bp, Homo sapien
gcagtgccagcagaaatatcctcct

SEQ ID NO: 1160376 - DNA, 25 bp, Homo sapien
ctgcccaccaccaaagtgtccacag

SEQ ID NO: 1160377 - DNA, 25 bp, Homo sapien
aaagtatccaccgaagagcaagtaa

SEQ ID NO: 1160378 - DNA, 25 bp, Homo sapien
gtcttatcaacagcagcagtgcaag

SEQ ID NO: 1160379 - DNA, 25 bp, Homo sapien
gatttgtgttttagatgtgatgtga

SEQ ID NO: 1160380 - DNA, 25 bp, Homo sapien
aattcttcaattttgcatggcacaa

SEQ ID NO: 1160381 - DNA, 25 bp, Homo sapien
ttgcatggcacaaatcagatatttc

SEQ ID NO: 1160382 - DNA, 25 bp, Homo sapien
tcacacagtgatctcatctggcagc

SEQ ID NO: 1160383 - DNA, 25 bp, Homo sapien
atggattcatagggagcttctttcc

SEQ ID NO: 1160384 - DNA, 25 bp, Homo sapien
aagcttatcatggattcatagggag

SEQ ID NO: 1160385 - DNA, 25 bp, Homo sapien
agcttatcatggattcatagggagc

SEQ ID NO: 1160386 - DNA, 25 bp, Homo sapien
gcttatcatggattcatagggagct

SEQ ID NO: 1160387 - DNA, 25 bp, Homo sapien
ctgcccaccaccaaagtgtccacag

SEQ ID NO: 1160388 - DNA, 25 bp, Homo sapien
gcagtgccagcagaaatatcctcct

SEQ ID NO: 1160389 - DNA, 25 bp, Homo sapien
gtcttatcaacagcagcagtgcaag

SEQ ID NO: 1160390 - DNA, 25 bp, Homo sapien
aaagtatccaccgaagagcaagtaa

SEQ ID NO: 1160391 - DNA, 25 bp, Homo sapien
ttcctagggctgatgaagccacttg

SEQ ID NO: 1160392 - DNA, 25 bp, Homo sapien
attcctagggctgatgaagccactt

SEQ ID NO: 1160393 - DNA, 25 bp, Homo sapien
aattcctagggctgatgaagccact

SEQ ID NO: 1160394 - DNA, 25 bp, Homo sapien
gagatgggttcatgtacaacaatat

SEQ ID NO: 1160395 - DNA, 25 bp, Homo sapien
ctggcaaattgtacgaggaaagaag

SEQ ID NO: 1160396 - DNA, 25 bp, Homo sapien
ggggtggagatgggttcatgtacaa

SEQ ID NO: 1160397 - DNA, 25 bp, Homo sapien
actggcaaattgtacgaggaaagaa

SEQ ID NO: 1160398 - DNA, 25 bp, Homo sapien
ccatctcaactcgtaaagtgagcct

SEQ ID NO: 1160399 - DNA, 25 bp, Homo sapien
gctgaactgtgaggaactctgagtt

SEQ ID NO: 1160400 - DNA, 25 bp, Homo sapien
tcatgtagctgaactgtgaggaact

SEQ ID NO: 1160401 - DNA, 25 bp, Homo sapien
accatctcaactcgtaaagtgagcc

SEQ ID NO: 1160402 - DNA, 25 bp, Homo sapien
gatagcaaaaggtttcctttctgag

SEQ ID NO: 1160403 - DNA, 25 bp, Homo sapien
gatccctgatagcaaaaggtttcct

SEQ ID NO: 1160404 - DNA, 25 bp, Homo sapien
gatgatccctgatagcaaaaggttt

SEQ ID NO: 1160405 - DNA, 25 bp, Homo sapien
atagcaaaaggtttcctttctgagg

SEQ ID NO: 1160406 - DNA, 25 bp, Homo sapien
agttagcttctttcctcttagccag

SEQ ID NO: 1160407 - DNA, 25 bp, Homo sapien
ggatacacagttagcttctttcctc

SEQ ID NO: 1160408 - DNA, 25 bp, Homo sapien
acacagttagcttctttcctcttag

SEQ ID NO: 1160409 - DNA, 25 bp, Homo sapien
tcctcttagccagtgatctgcccat

SEQ ID NO: 1160410 - DNA, 25 bp, Homo sapien
gcatcttctcatcaaagcctaccat

SEQ ID NO: 1160411 - DNA, 25 bp, Homo sapien
cttgttccacagcttcacctgcatc

SEQ ID NO: 1160412 - DNA, 25 bp, Homo sapien
cacagcttcacctgcatcttctcat

SEQ ID NO: 1160413 - DNA, 25 bp, Homo sapien
ctgcatcttctcatcaaagcctacc

SEQ ID NO: 1160414 - DNA, 25 bp, Homo sapien
tctgagactccagcaggatgtctta

SEQ ID NO: 1160415 - DNA, 25 bp, Homo sapien
tgccccacgccaaagtgcccagagc

SEQ ID NO: 1160416 - DNA, 25 bp, Homo sapien
ctgcccaccaccaaagtgtccacag

SEQ ID NO: 1160417 - DNA, 25 bp, Homo sapien
gtcttatcaacagcagcagtgcaag

SEQ ID NO: 1160418 - DNA, 25 bp, Homo sapien
gtaaagtgagcctgtctgagatgct

SEQ ID NO: 1160419 - DNA, 25 bp, Homo sapien
aaagtgagcctgtctgagatgctgg

SEQ ID NO: 1160420 - DNA, 25 bp, Homo sapien
taaagtgagcctgtctgagatgctg

SEQ ID NO: 1160421 - DNA, 25 bp, Homo sapien
tccagccccacccttggtctctggc

SEQ ID NO: 1160422 - DNA, 25 bp, Homo sapien
gccccacccttggtctctggccaaa

SEQ ID NO: 1160423 - DNA, 25 bp, Homo sapien
cacccttggtctctggccaaaaatg

SEQ ID NO: 1160424 - DNA, 25 bp, Homo sapien
ccacccttggtctctggccaaaaat

SEQ ID NO: 1160425 - DNA, 25 bp, Homo sapien
ttattacctgtctactcatcatcca

SEQ ID NO: 1160426 - DNA, 25 bp, Homo sapien
ttgtatctgtctgggtcttggatag

SEQ ID NO: 1160427 - DNA, 25 bp, Homo sapien
tggatagtagacaaacccattcctg

SEQ ID NO: 1160428 - DNA, 25 bp, Homo sapien
tgttttttaccctaggaagatctgc

SEQ ID NO: 1160429 - DNA, 25 bp, Homo sapien
acgatggtttccaccttcatccatc

SEQ ID NO: 1160430 - DNA, 25 bp, Homo sapien
ctggatcaaatggtatttctttttt

SEQ ID NO: 1160431 - DNA, 25 bp, Homo sapien
cgatggtttccaccttcatccatct

SEQ ID NO: 1160432 - DNA, 25 bp, Homo sapien
tgtctgtcccctgggcatgagcttc

SEQ ID NO: 1160433 - DNA, 25 bp, Homo sapien
tggagactgagcaaaggaagtcctg

SEQ ID NO: 1160434 - DNA, 25 bp, Homo sapien
tgggaaccattagagaattctgttg

SEQ ID NO: 1160435 - DNA, 25 bp, Homo sapien
tccaccacctgtgcagttgtcactt

SEQ ID NO: 1160436 - DNA, 25 bp, Homo sapien
aaggttttctttttgaggctgccat

SEQ ID NO: 1160437 - DNA, 25 bp, Homo sapien
tctttttgaggctgccatactgcca

SEQ ID NO: 1160438 - DNA, 25 bp, Homo sapien
tttctttttgaggctgccatactgc

SEQ ID NO: 1160439 - DNA, 25 bp, Homo sapien
ggttttctttttgaggctgccatac

SEQ ID NO: 1160440 - DNA, 25 bp, Homo sapien
tcttagcctgtgatcggcctgtgat

SEQ ID NO: 1160441 - DNA, 25 bp, Homo sapien
ttagcctgtgatcggcctgtgatga

SEQ ID NO: 1160442 - DNA, 25 bp, Homo sapien
tcctcttagcctgtgatcggcctgt

SEQ ID NO: 1160443 - DNA, 25 bp, Homo sapien
tttcctcttagcctgtgatcggcct

SEQ ID NO: 1160444 - DNA, 25 bp, Homo sapien
aggattcatcaggagcatgaaagga

SEQ ID NO: 1160445 - DNA, 25 bp, Homo sapien
gaaaggataaggataattggctcac

SEQ ID NO: 1160446 - DNA, 25 bp, Homo sapien
catgaaaggataaggataattggct

SEQ ID NO: 1160447 - DNA, 25 bp, Homo sapien
tcaggattcatcaggagcatgaaag

SEQ ID NO: 1160448 - DNA, 25 bp, Homo sapien
tctgagactccagcaggatgtctta

SEQ ID NO: 1160449 - DNA, 25 bp, Homo sapien
cctcctgtgacaccttccccaccct

SEQ ID NO: 1160450 - DNA, 25 bp, Homo sapien
agagccatgtccacccccgaagtgc

SEQ ID NO: 1160451 - DNA, 25 bp, Homo sapien
gtcttatcaacagcagcagtgcaag

SEQ ID NO: 1160452 - DNA, 25 bp, Homo sapien
ccatccagggatacacagggagctt

SEQ ID NO: 1160453 - DNA, 25 bp, Homo sapien
tccccttagcctgtgatctgcccat

SEQ ID NO: 1160454 - DNA, 25 bp, Homo sapien
aagccatccagggatacacagggag

SEQ ID NO: 1160455 - DNA, 25 bp, Homo sapien
cacagggagcttctttccccttagc

SEQ ID NO: 1160456 - DNA, 25 bp, Homo sapien
tgtgtgccgcctgccaaagcgtcca

SEQ ID NO: 1160457 - DNA, 25 bp, Homo sapien
tatcaacagtagcaatgtaagcagc

SEQ ID NO: 1160458 - DNA, 25 bp, Homo sapien
agcaggatgtcttatcaacagtagc

SEQ ID NO: 1160459 - DNA, 25 bp, Homo sapien
ctgccaaagcgtccagagccatgtc

SEQ ID NO: 1160460 - DNA, 25 bp, Homo sapien
ctatggattgggtggaaaagacagc

SEQ ID NO: 1160461 - DNA, 25 bp, Homo sapien
tgtggaatctgtcctagcagagaaa

SEQ ID NO: 1160462 - DNA, 25 bp, Homo sapien
ttccttaaaaggtctgtagtacaca

SEQ ID NO: 1160463 - DNA, 25 bp, Homo sapien
ctttaatttggcgattaagagtaca

SEQ ID NO: 1160464 - DNA, 25 bp, Homo sapien
tcccaggaagtaatgcaggaactta

SEQ ID NO: 1160465 - DNA, 25 bp, Homo sapien
gattggagacattgttagcatgcct

SEQ ID NO: 1160466 - DNA, 25 bp, Homo sapien
ggtgtgagtctacgcatcttgttct

SEQ ID NO: 1160467 - DNA, 25 bp, Homo sapien
gctgtgaggaaccacataggcatgg

SEQ ID NO: 1160468 - DNA, 25 bp, Homo sapien
ctgccagcagaagtatccacccaag

SEQ ID NO: 1160469 - DNA, 25 bp, Homo sapien
agcagaagtatccacccaagagcaa

SEQ ID NO: 1160470 - DNA, 25 bp, Homo sapien
ccagcagaagtatccacccaagagc

SEQ ID NO: 1160471 - DNA, 25 bp, Homo sapien
accctgccagcagaagtatccaccc

SEQ ID NO: 1160472 - DNA, 25 bp, Homo sapien
gccaggataaatgccctcctgtgca

SEQ ID NO: 1160473 - DNA, 25 bp, Homo sapien
gataaatgccctcctgtgcaaccat

SEQ ID NO: 1160474 - DNA, 25 bp, Homo sapien
caggataaatgccctcctgtgcaac

SEQ ID NO: 1160475 - DNA, 25 bp, Homo sapien
ggataaatgccctcctgtgcaacca

SEQ ID NO: 1160476 - DNA, 25 bp, Homo sapien
tgtccacctgagcattgcccacctc

SEQ ID NO: 1160477 - DNA, 25 bp, Homo sapien
cctgagcattgcccacctccaccat

SEQ ID NO: 1160478 - DNA, 25 bp, Homo sapien
tcctccttgtccacctgagcattgc

SEQ ID NO: 1160479 - DNA, 25 bp, Homo sapien
ccttgtccacctgagcattgcccac

SEQ ID NO: 1160480 - DNA, 25 bp, Homo sapien
tgccccacgccaaagtgcccagagc

SEQ ID NO: 1160481 - DNA, 25 bp, Homo sapien
tggtccctagatactggagatttga

SEQ ID NO: 1160482 - DNA, 25 bp, Homo sapien
ggatcaaagttggtccctagatact

SEQ ID NO: 1160483 - DNA, 25 bp, Homo sapien
aacaggactgtctctcttatgagca

SEQ ID NO: 1160484 - DNA, 25 bp, Homo sapien
cactgtttcgtatgtatctttcaga

SEQ ID NO: 1160485 - DNA, 25 bp, Homo sapien
ctgttttgcagtcagggtgcgcact

SEQ ID NO: 1160486 - DNA, 25 bp, Homo sapien
cagagctatgctctggaaaggaaca

SEQ ID NO: 1160487 - DNA, 25 bp, Homo sapien
cactgtgacggaggctctaccagtc

SEQ ID NO: 1160488 - DNA, 25 bp, Homo sapien
ttgcagtcagggtgcgcactgtgac

SEQ ID NO: 1160489 - DNA, 25 bp, Homo sapien
attctccagtctcagcctcctgggt

SEQ ID NO: 1160490 - DNA, 25 bp, Homo sapien
ctgggtagctgggattataggcatg

SEQ ID NO: 1160491 - DNA, 25 bp, Homo sapien
caccaccacatctggctaatttttg

SEQ ID NO: 1160492 - DNA, 25 bp, Homo sapien
gcagcctctgtctccggggttccag

SEQ ID NO: 1160493 - DNA, 25 bp, Homo sapien
tccccttgcttgcatggccaagtct

SEQ ID NO: 1160494 - DNA, 25 bp, Homo sapien
ctccccttgcttgcatggccaagtc

SEQ ID NO: 1160495 - DNA, 25 bp, Homo sapien
cccagttagcgagttgacagtgccc

SEQ ID NO: 1160496 - DNA, 25 bp, Homo sapien
tggtacctgtacagctgccaaagtg

SEQ ID NO: 1160497 - DNA, 25 bp, Homo sapien
tctgaggacaagagcaccttggaca

SEQ ID NO: 1160498 - DNA, 25 bp, Homo sapien
aaagtccacgtgttccaactgctga

SEQ ID NO: 1160499 - DNA, 25 bp, Homo sapien
tcaggaacattagtatcccttgtca

SEQ ID NO: 1160500 - DNA, 25 bp, Homo sapien
caggaacattagtatcccttgtcat

SEQ ID NO: 1160501 - DNA, 25 bp, Homo sapien
ttcaggaacattagtatcccttgtc

SEQ ID NO: 1160502 - DNA, 25 bp, Homo sapien
cttcaggaacattagtatcccttgt

SEQ ID NO: 1160503 - DNA, 25 bp, Homo sapien
gaggagaccccagtagactatgaca

SEQ ID NO: 1160504 - DNA, 25 bp, Homo sapien
agaagaccttctgacttgaaccagg

SEQ ID NO: 1160505 - DNA, 25 bp, Homo sapien
gaatctcatatagccagcagaaggc

SEQ ID NO: 1160506 - DNA, 25 bp, Homo sapien
tctatgaaccttgcagggcctgtca

SEQ ID NO: 1160507 - DNA, 25 bp, Homo sapien
acacatcagtggtttggggccggac

SEQ ID NO: 1160508 - DNA, 25 bp, Homo sapien
cacatcagtggtttggggccggaca

SEQ ID NO: 1160509 - DNA, 25 bp, Homo sapien
aacacatcagtggtttggggccgga

SEQ ID NO: 1160510 - DNA, 25 bp, Homo sapien
gtagctctgatcttttgataccacc

SEQ ID NO: 1160511 - DNA, 25 bp, Homo sapien
tagcccaggtagctctgatcttttg

SEQ ID NO: 1160512 - DNA, 25 bp, Homo sapien
ttgccaaggcatagcccaggtagct

SEQ ID NO: 1160513 - DNA, 25 bp, Homo sapien
tctgatcttttgataccaccagttc

SEQ ID NO: 1160514 - DNA, 25 bp, Homo sapien
tttggtggtattcctgttagcatgg

SEQ ID NO: 1160515 - DNA, 25 bp, Homo sapien
ctttggtggtattcctgttagcatg

SEQ ID NO: 1160516 - DNA, 25 bp, Homo sapien
ttggtggtattcctgttagcatgga

SEQ ID NO: 1160517 - DNA, 25 bp, Homo sapien
ggtgcagggagcaacgtactgccta

SEQ ID NO: 1160518 - DNA, 25 bp, Homo sapien
cagtagatgaaaggtaatttctggg

SEQ ID NO: 1160519 - DNA, 25 bp, Homo sapien
tgaactgctctcagattgttggtct

SEQ ID NO: 1160520 - DNA, 25 bp, Homo sapien
caacgtactgcctagatgctgcggg

SEQ ID NO: 1160521 - DNA, 25 bp, Homo sapien
cttggaggaggagccgggaggatac

SEQ ID NO: 1160522 - DNA, 25 bp, Homo sapien
gcttggaggaggagccgggaggata

SEQ ID NO: 1160523 - DNA, 25 bp, Homo sapien
tccaatccttgcttggaggaggagc

SEQ ID NO: 1160524 - DNA, 25 bp, Homo sapien
gtgtccaatccttgcttggaggagg

SEQ ID NO: 1160525 - DNA, 25 bp, Homo sapien
ctacaagcaagggcaataaactggg

SEQ ID NO: 1160526 - DNA, 25 bp, Homo sapien
caagcaagggcaataaactgggggc

SEQ ID NO: 1160527 - DNA, 25 bp, Homo sapien
gcaagggcaataaactgggggccca

SEQ ID NO: 1160528 - DNA, 25 bp, Homo sapien
agggcaataaactgggggcccactg

SEQ ID NO: 1160529 - DNA, 25 bp, Homo sapien
ggctcctcctaaggtgcccaccagg

SEQ ID NO: 1160530 - DNA, 25 bp, Homo sapien
tgagggctcctcctaaggtgcccac

SEQ ID NO: 1160531 - DNA, 25 bp, Homo sapien
gagggctcctcctaaggtgcccacc

SEQ ID NO: 1160532 - DNA, 25 bp, Homo sapien
ggccacagttctttagtataacagg

SEQ ID NO: 1160533 - DNA, 25 bp, Homo sapien
ctttctcccgtggagaacttgaatg

SEQ ID NO: 1160534 - DNA, 25 bp, Homo sapien
ccgtggagaacttgaatgtgtcctt

SEQ ID NO: 1160535 - DNA, 25 bp, Homo sapien
cacagttctttagtataacaggcat

SEQ ID NO: 1160536 - DNA, 25 bp, Homo sapien
cagctgcctcttgtccatttgggta

SEQ ID NO: 1160537 - DNA, 25 bp, Homo sapien
ccagctgcctcttgtccatttgggt

SEQ ID NO: 1160538 - DNA, 25 bp, Homo sapien
gctgcctcttgtccatttgggtagg

SEQ ID NO: 1160539 - DNA, 25 bp, Homo sapien
tgcctcttgtccatttgggtagggg

SEQ ID NO: 1160540 - DNA, 25 bp, Homo sapien
gaactactactgagacgaaacacag

SEQ ID NO: 1160541 - DNA, 25 bp, Homo sapien
ctactgagacgaaacacagaacagg

SEQ ID NO: 1160542 - DNA, 25 bp, Homo sapien
cttagggtttggtggctaagtgact

SEQ ID NO: 1160543 - DNA, 25 bp, Homo sapien
aggaactactactgagacgaaacac

SEQ ID NO: 1160544 - DNA, 25 bp, Homo sapien
tgaacttgacaagcagttgagtgag

SEQ ID NO: 1160545 - DNA, 25 bp, Homo sapien
caggagatgaaccacgaaattccaa

SEQ ID NO: 1160546 - DNA, 25 bp, Homo sapien
tccatccaggttctgataaataata

SEQ ID NO: 1160547 - DNA, 25 bp, Homo sapien
ctgataaataatagggtaagggaag

SEQ ID NO: 1160548 - DNA, 25 bp, Homo sapien
tcaggagatgaaccacgaaattcca

SEQ ID NO: 1160549 - DNA, 25 bp, Homo sapien
ttgttcacacttgggatcgcagttc

SEQ ID NO: 1160550 - DNA, 25 bp, Homo sapien
tcacacttgggatcgcagttcttgg

SEQ ID NO: 1160551 - DNA, 25 bp, Homo sapien
gatttacttttatcatcactcgaca

SEQ ID NO: 1160552 - DNA, 25 bp, Homo sapien
gatcgcagttcttgggctcagtctt

SEQ ID NO: 1160553 - DNA, 25 bp, Homo sapien
cagctgggctggcatttggactcac

SEQ ID NO: 1160554 - DNA, 25 bp, Homo sapien
tttcgaaacagcgttgcagcagctt

SEQ ID NO: 1160555 - DNA, 25 bp, Homo sapien
ttcgaaacagcgttgcagcagcttc

SEQ ID NO: 1160556 - DNA, 25 bp, Homo sapien
ttttcgaaacagcgttgcagcagct

SEQ ID NO: 1160557 - DNA, 25 bp, Homo sapien
cacttgggtggtgctggacactttt

SEQ ID NO: 1160558 - DNA, 25 bp, Homo sapien
taggaggacagggcttggtgcaggg

SEQ ID NO: 1160559 - DNA, 25 bp, Homo sapien
ttaggaggacagggcttggtgcagg

SEQ ID NO: 1160560 - DNA, 25 bp, Homo sapien
aggtgggcaagcatgtgggcaggat

SEQ ID NO: 1160561 - DNA, 25 bp, Homo sapien
gcagggaggtgggcaagcatgtggg

SEQ ID NO: 1160562 - DNA, 25 bp, Homo sapien
gggcaagcatgtgggcaggatgaag

SEQ ID NO: 1160563 - DNA, 25 bp, Homo sapien
gggaggtgggcaagcatgtgggcag

SEQ ID NO: 1160564 - DNA, 25 bp, Homo sapien
gttgggtagtgcccacagtgcctca

SEQ ID NO: 1160565 - DNA, 25 bp, Homo sapien
tgggtagtgcccacagtgcctcact

SEQ ID NO: 1160566 - DNA, 25 bp, Homo sapien
gggttgggtagtgcccacagtgcct

SEQ ID NO: 1160567 - DNA, 25 bp, Homo sapien
tggggttgggtagtgcccacagtgc

SEQ ID NO: 1160568 - DNA, 25 bp, Homo sapien
gggattgcttgttggtggtttagtg

SEQ ID NO: 1160569 - DNA, 25 bp, Homo sapien
ctcagggattgcttgttggtggttt

SEQ ID NO: 1160570 - DNA, 25 bp, Homo sapien
cagggattgcttgttggtggtttag

SEQ ID NO: 1160571 - DNA, 25 bp, Homo sapien
ttctcagggattgcttgttggtggt

SEQ ID NO: 1160572 - DNA, 25 bp, Homo sapien
ctgtgctcgtgtgctgagctgcaat

SEQ ID NO: 1160573 - DNA, 25 bp, Homo sapien
gtgctcgtgtgctgagctgcaatct

SEQ ID NO: 1160574 - DNA, 25 bp, Homo sapien
tagaatttgcctgtgctcgtgtgct

SEQ ID NO: 1160575 - DNA, 25 bp, Homo sapien
aatttgcctgtgctcgtgtgctgag

SEQ ID NO: 1160576 - DNA, 25 bp, Homo sapien
cagggacttcaggtcaaagatcacc

SEQ ID NO: 1160577 - DNA, 25 bp, Homo sapien
catgccgtcatctatagggtgttca

SEQ ID NO: 1160578 - DNA, 25 bp, Homo sapien
gatgctttctacaaccgacacgctg

SEQ ID NO: 1160579 - DNA, 25 bp, Homo sapien
tgttcacagtttgggatcacaggaa

SEQ ID NO: 1160580 - DNA, 25 bp, Homo sapien
tgatcttcaacaagactcaacaaag

SEQ ID NO: 1160581 - DNA, 25 bp, Homo sapien
ctgatcttcaacaagactcaacaaa

SEQ ID NO: 1160582 - DNA, 25 bp, Homo sapien
tgcactgctgctcactgaaggacat

SEQ ID NO: 1160583 - DNA, 25 bp, Homo sapien
tcctggactttctgtgggcaaacct

SEQ ID NO: 1160584 - DNA, 25 bp, Homo sapien
cactgaggtggacactggtcttggc

SEQ ID NO: 1160585 - DNA, 25 bp, Homo sapien
gcactagacacttatcttggcaggg

SEQ ID NO: 1160586 - DNA, 25 bp, Homo sapien
cacagaggtacccacagaagaaggt

SEQ ID NO: 1160587 - DNA, 25 bp, Homo sapien
gcaagaaggtacattgcacacagag

SEQ ID NO: 1160588 - DNA, 25 bp, Homo sapien
tgcaccaaggaagctgtgctaggct

SEQ ID NO: 1160589 - DNA, 25 bp, Homo sapien
gaaggtatccttggctgttacacac

SEQ ID NO: 1160590 - DNA, 25 bp, Homo sapien
gatttttgaaacaccgcaagccgct

SEQ ID NO: 1160591 - DNA, 25 bp, Homo sapien
taagggcccacattagaccagctat

SEQ ID NO: 1160592 - DNA, 25 bp, Homo sapien
gcacagagattgacaagggcaccaa

SEQ ID NO: 1160593 - DNA, 25 bp, Homo sapien
tgtacatggtgagaactaagggccc

SEQ ID NO: 1160594 - DNA, 25 bp, Homo sapien
ttgcccattggcaccatggctttcc

SEQ ID NO: 1160595 - DNA, 25 bp, Homo sapien
cttgcccattggcaccatggctttc

SEQ ID NO: 1160596 - DNA, 25 bp, Homo sapien
tcttgcccattggcaccatggcttt

SEQ ID NO: 1160597 - DNA, 25 bp, Homo sapien
acatttccctggatatgaggcaaca

SEQ ID NO: 1160598 - DNA, 25 bp, Homo sapien
ccctgaacttagtgaggtcttcctt

SEQ ID NO: 1160599 - DNA, 25 bp, Homo sapien
ccacatttccctggatatgaggcaa

SEQ ID NO: 1160600 - DNA, 25 bp, Homo sapien
gtccctgaacttagtgaggtcttcc

SEQ ID NO: 1160601 - DNA, 25 bp, Homo sapien
ctggcaccttactattcagcagcat

SEQ ID NO: 1160602 - DNA, 25 bp, Homo sapien
aaggaggtcttcttaggctccagac

SEQ ID NO: 1160603 - DNA, 25 bp, Homo sapien
aaaggaggtcttcttaggctccaga

SEQ ID NO: 1160604 - DNA, 25 bp, Homo sapien
gggagagatgttcattcagcatgtt

SEQ ID NO: 1160605 - DNA, 25 bp, Homo sapien
tcaaacagctgctggataatcatcc

SEQ ID NO: 1160606 - DNA, 25 bp, Homo sapien
aacagctgctggataatcatcccaa

SEQ ID NO: 1160607 - DNA, 25 bp, Homo sapien
gctgctggataatcatcccaaagga

SEQ ID NO: 1160608 - DNA, 25 bp, Homo sapien
caggaggtgagaatgcagtttccta

SEQ ID NO: 1160609 - DNA, 25 bp, Homo sapien
ctccaggaggtgagaatgcagtttc

SEQ ID NO: 1160610 - DNA, 25 bp, Homo sapien
ggaggtgagaatgcagtttcctatg

SEQ ID NO: 1160611 - DNA, 25 bp, Homo sapien
ttcagggttgtagatactgctactg

SEQ ID NO: 1160612 - DNA, 25 bp, Homo sapien
ttgcttgtacccattgatggtagaa

SEQ ID NO: 1160613 - DNA, 25 bp, Homo sapien
cttgcttgtacccattgatggtaga

SEQ ID NO: 1160614 - DNA, 25 bp, Homo sapien
taggtagcagggttgataatctagt

SEQ ID NO: 1160615 - DNA, 25 bp, Homo sapien
gctcttgaagatgctgttgaatgta

SEQ ID NO: 1160616 - DNA, 25 bp, Homo sapien
tcaaatgaataggtagcagggttga

SEQ ID NO: 1160617 - DNA, 25 bp, Homo sapien
gaagatgctgttgaatgtatttaca

SEQ ID NO: 1160618 - DNA, 25 bp, Homo sapien
gagaaaggccaggtccttggtagcc

SEQ ID NO: 1160619 - DNA, 25 bp, Homo sapien
caggtccttggtagccccctcatcc

SEQ ID NO: 1160620 - DNA, 25 bp, Homo sapien
ttgagtttcaagaactcttcagcag

SEQ ID NO: 1160621 - DNA, 25 bp, Homo sapien
cttgagtttcaagaactcttcagca

SEQ ID NO: 1160622 - DNA, 25 bp, Homo sapien
gtggagggcgctatggtgaaatggg

SEQ ID NO: 1160623 - DNA, 25 bp, Homo sapien
gctccttgtaagaataaatgggtgg

SEQ ID NO: 1160624 - DNA, 25 bp, Homo sapien
caggactcctgctgcatgaagctgt

SEQ ID NO: 1160625 - DNA, 25 bp, Homo sapien
cctgctgcatgaagctgtcttcaga

SEQ ID NO: 1160626 - DNA, 25 bp, Homo sapien
ggtgcagagtgggttatgctgtgat

SEQ ID NO: 1160627 - DNA, 25 bp, Homo sapien
agtgaggtgcagagtgggttatgct

SEQ ID NO: 1160628 - DNA, 25 bp, Homo sapien
tgattgcaagacaggggatacatgt

SEQ ID NO: 1160629 - DNA, 25 bp, Homo sapien
aagttcatactgtagtatggaggac

SEQ ID NO: 1160630 - DNA, 25 bp, Homo sapien
aagaagttcatactgtagtatggag

SEQ ID NO: 1160631 - DNA, 25 bp, Homo sapien
catactgtagtatggaggacagaat

SEQ ID NO: 1160632 - DNA, 25 bp, Homo sapien
gctagagacgcctccgtagctctgg

SEQ ID NO: 1160633 - DNA, 25 bp, Homo sapien
cggagtacttgacgctcccaccgga

SEQ ID NO: 1160634 - DNA, 25 bp, Homo sapien
gtagctctggcactggaccgcctgg

SEQ ID NO: 1160635 - DNA, 25 bp, Homo sapien
gagccgccgccagagtagccgcaga

SEQ ID NO: 1160636 - DNA, 25 bp, Homo sapien
agaggaaccacctccgcagacggag

SEQ ID NO: 1160637 - DNA, 25 bp, Homo sapien
cactgatgatgcagccgctgccaat

SEQ ID NO: 1160638 - DNA, 25 bp, Homo sapien
tctggtggcagatcgggacgccctt

SEQ ID NO: 1160639 - DNA, 25 bp, Homo sapien
ccaggtaggcgcctgcttctgctgg

SEQ ID NO: 1160640 - DNA, 25 bp, Homo sapien
tagcatcatgagagctctaagccca

SEQ ID NO: 1160641 - DNA, 25 bp, Homo sapien
gatttgcaaacctcgggtagcatca

SEQ ID NO: 1160642 - DNA, 25 bp, Homo sapien
tggcttcttccaggtaggttaagac

SEQ ID NO: 1160643 - DNA, 25 bp, Homo sapien
cagcagaactagatgcagccggaga

SEQ ID NO: 1160644 - DNA, 25 bp, Homo sapien
tgcttttcataggtctggccacata

SEQ ID NO: 1160645 - DNA, 25 bp, Homo sapien
gaacagctttgaagggaactgttga

SEQ ID NO: 1160646 - DNA, 25 bp, Homo sapien
ggaacagctttgaagggaactgttg

SEQ ID NO: 1160647 - DNA, 25 bp, Homo sapien
agtgctgcttttcataggtctggcc

SEQ ID NO: 1160648 - DNA, 25 bp, Homo sapien
tgtctagtctcctgctagcactgtc

SEQ ID NO: 1160649 - DNA, 25 bp, Homo sapien
ctgtctagtctcctgctagcactgt

SEQ ID NO: 1160650 - DNA, 25 bp, Homo sapien
tagtctcctgctagcactgtcctca

SEQ ID NO: 1160651 - DNA, 25 bp, Homo sapien
tctagtctcctgctagcactgtcct

SEQ ID NO: 1160652 - DNA, 25 bp, Homo sapien
gtgaactttgggcacaccaccctaa

SEQ ID NO: 1160653 - DNA, 25 bp, Homo sapien
cctaatactgaaccaggcatgttgg

SEQ ID NO: 1160654 - DNA, 25 bp, Homo sapien
tattgtggccaagtgaccatgagct

SEQ ID NO: 1160655 - DNA, 25 bp, Homo sapien
cacgtggaaggactcttatgcttga

SEQ ID NO: 1160656 - DNA, 25 bp, Homo sapien
gctcctgttcgtgcctgtctttatt

SEQ ID NO: 1160657 - DNA, 25 bp, Homo sapien
tctgctcctgttcgtgcctgtcttt

SEQ ID NO: 1160658 - DNA, 25 bp, Homo sapien
cctgttcgtgcctgtctttattctt

SEQ ID NO: 1160659 - DNA, 25 bp, Homo sapien
tcctgttcgtgcctgtctttattct

SEQ ID NO: 1160660 - DNA, 25 bp, Homo sapien
ccctctgctggtgagatctggggga

SEQ ID NO: 1160661 - DNA, 25 bp, Homo sapien
tctgctggtgagatctgggggagac

SEQ ID NO: 1160662 - DNA, 25 bp, Homo sapien
ctctgctggtgagatctgggggaga

SEQ ID NO: 1160663 - DNA, 25 bp, Homo sapien
tcccctctgctggtgagatctgggg

SEQ ID NO: 1160664 - DNA, 25 bp, Homo sapien
cccggcctcgtagtgcctctttgct

SEQ ID NO: 1160665 - DNA, 25 bp, Homo sapien
tcggccccggcctcgtagtgcctct

SEQ ID NO: 1160666 - DNA, 25 bp, Homo sapien
tgccggcttggactccccgagggct

SEQ ID NO: 1160667 - DNA, 25 bp, Homo sapien
ttgctgcccgcgtgccttctccctg

SEQ ID NO: 1160668 - DNA, 25 bp, Homo sapien
ccatgattataagctgggaaaaaaa

SEQ ID NO: 1160669 - DNA, 25 bp, Homo sapien
ttaaagcctcctgtttcacggaaca

SEQ ID NO: 1160670 - DNA, 25 bp, Homo sapien
ctggttaaagcctcctgtttcacgg

SEQ ID NO: 1160671 - DNA, 25 bp, Homo sapien
tggttaaagcctcctgtttcacgga

SEQ ID NO: 1160672 - DNA, 25 bp, Homo sapien
taatgtatgtcctaccaaagtgaga

SEQ ID NO: 1160673 - DNA, 25 bp, Homo sapien
atgtcatcctacttcaggggccaca

SEQ ID NO: 1160674 - DNA, 25 bp, Homo sapien
tgtatgtcctaccaaagtgagaaca

SEQ ID NO: 1160675 - DNA, 25 bp, Homo sapien
catcctacttcaggggccacactaa

SEQ ID NO: 1160676 - DNA, 25 bp, Homo sapien
agccgaggagccacacagagtgttt

SEQ ID NO: 1160677 - DNA, 25 bp, Homo sapien
caaagccgaggagccacacagagtg

SEQ ID NO: 1160678 - DNA, 25 bp, Homo sapien
aaagccgaggagccacacagagtgt

SEQ ID NO: 1160679 - DNA, 25 bp, Homo sapien
aagccgaggagccacacagagtgtt

SEQ ID NO: 1160680 - DNA, 25 bp, Homo sapien
atgatggtctctatgttgcgttcca

SEQ ID NO: 1160681 - DNA, 25 bp, Homo sapien
ttttgcagatcttttcgcaccagct

SEQ ID NO: 1160682 - DNA, 25 bp, Homo sapien
tcttttcgcaccagctctttgaatt

SEQ ID NO: 1160683 - DNA, 25 bp, Homo sapien
tctatgttgcgttccagctgcgaca

SEQ ID NO: 1160684 - DNA, 25 bp, Homo sapien
tcctcgaagctcagctgcttgtctg

SEQ ID NO: 1160685 - DNA, 25 bp, Homo sapien
ttctcgtgggaggcccaggttagcc

SEQ ID NO: 1160686 - DNA, 25 bp, Homo sapien
ggttagcctcgccatcagcatgatg

SEQ ID NO: 1160687 - DNA, 25 bp, Homo sapien
agcatgatgaactcctcgaagctca

SEQ ID NO: 1160688 - DNA, 25 bp, Homo sapien
gaggcctggcttatggtggtggcca

SEQ ID NO: 1160689 - DNA, 25 bp, Homo sapien
ggcctggcttatggtggtggccagg

SEQ ID NO: 1160690 - DNA, 25 bp, Homo sapien
gcctggcttatggtggtggccaggg

SEQ ID NO: 1160691 - DNA, 25 bp, Homo sapien
aggcctggcttatggtggtggccag

SEQ ID NO: 1160692 - DNA, 25 bp, Homo sapien
cgtggccgtggccactgtgatcttg

SEQ ID NO: 1160693 - DNA, 25 bp, Homo sapien
acagccaagacagtttgacataaca

SEQ ID NO: 1160694 - DNA, 25 bp, Homo sapien
ccaagacagtttgacataacaggcc

SEQ ID NO: 1160695 - DNA, 25 bp, Homo sapien
acagtttgacataacaggccccggg

SEQ ID NO: 1160696 - DNA, 25 bp, Homo sapien
aagacagtttgacataacaggcccc

SEQ ID NO: 1160697 - DNA, 25 bp, Homo sapien
ccccagacatggcactatctaggtc

SEQ ID NO: 1160698 - DNA, 25 bp, Homo sapien
cactgcctgggtgccagtattcctc

SEQ ID NO: 1160699 - DNA, 25 bp, Homo sapien
gacatggcactatctaggtccattt

SEQ ID NO: 1160700 - DNA, 25 bp, Homo sapien
tgccagtattcctccccagacatgg

SEQ ID NO: 1160701 - DNA, 25 bp, Homo sapien
gcacagactcctcctggtagtcacg

SEQ ID NO: 1160702 - DNA, 25 bp, Homo sapien
tcctcctggtagtcacggagtcttt

SEQ ID NO: 1160703 - DNA, 25 bp, Homo sapien
agactcctcctggtagtcacggagt

SEQ ID NO: 1160704 - DNA, 25 bp, Homo sapien
tggtagtcacggagtcttttagctg

SEQ ID NO: 1160705 - DNA, 25 bp, Homo sapien
ggaccacttctgatatatatagtag

SEQ ID NO: 1160706 - DNA, 25 bp, Homo sapien
ttgatttgggaccacttctgatata

SEQ ID NO: 1160707 - DNA, 25 bp, Homo sapien
ttgggaccacttctgatatatatag

SEQ ID NO: 1160708 - DNA, 25 bp, Homo sapien
gatttgggaccacttctgatatata

SEQ ID NO: 1160709 - DNA, 25 bp, Homo sapien
tgcagcagccgcgtggcggagtctg

SEQ ID NO: 1160710 - DNA, 25 bp, Homo sapien
ggaaacttgggctcgtcctcgcgcc

SEQ ID NO: 1160711 - DNA, 25 bp, Homo sapien
gcaatgacgatggtcacgccctggt

SEQ ID NO: 1160712 - DNA, 25 bp, Homo sapien
tctgggcgaggaggtcaacgctcct

SEQ ID NO: 1160713 - DNA, 25 bp, Homo sapien
tgtctgccattacttggaagtccaa

SEQ ID NO: 1160714 - DNA, 25 bp, Homo sapien
gtgaagaattgggtcgacagttgat

SEQ ID NO: 1160715 - DNA, 25 bp, Homo sapien
tctgagcctaccagaagaggaaggt

SEQ ID NO: 1160716 - DNA, 25 bp, Homo sapien
tttcaccataagtgatgggtactgg

SEQ ID NO: 1160717 - DNA, 25 bp, Homo sapien
ttggatatcaacactgatggtgcag

SEQ ID NO: 1160718 - DNA, 25 bp, Homo sapien
caaagagtagctgagttactgggcc

SEQ ID NO: 1160719 - DNA, 25 bp, Homo sapien
cagaaaaagggtgcagacgtctggt

SEQ ID NO: 1160720 - DNA, 25 bp, Homo sapien
cgtctggttcaaagagttggatatc

SEQ ID NO: 1160721 - DNA, 25 bp, Homo sapien
tcatcgacgtctaccacaagtactc

SEQ ID NO: 1160722 - DNA, 25 bp, Homo sapien
gaccgagtgtcctcagtatatcagg

SEQ ID NO: 1160723 - DNA, 25 bp, Homo sapien
gggaatttccatgccgtctacaggg

SEQ ID NO: 1160724 - DNA, 25 bp, Homo sapien
aaattgctagagaccgagtgtcctc

SEQ ID NO: 1160725 - DNA, 25 bp, Homo sapien
caggtagcatctgtagggatgtcga

SEQ ID NO: 1160726 - DNA, 25 bp, Homo sapien
ggcccctctcagagtagggtgactt

SEQ ID NO: 1160727 - DNA, 25 bp, Homo sapien
catctgtagggatgtcgagcctgaa

SEQ ID NO: 1160728 - DNA, 25 bp, Homo sapien
tctcagagtagggtgacttccacat

SEQ ID NO: 1160729 - DNA, 25 bp, Homo sapien
actggaaaagctgttggcttcggta

SEQ ID NO: 1160730 - DNA, 25 bp, Homo sapien
tgttggcttcggtatctacctatga

SEQ ID NO: 1160731 - DNA, 25 bp, Homo sapien
aaaagctgttggcttcggtatctac

SEQ ID NO: 1160732 - DNA, 25 bp, Homo sapien
agctgttggcttcggtatctaccta

SEQ ID NO: 1160733 - DNA, 25 bp, Homo sapien
aagcgctactcctttgctgtactgg

SEQ ID NO: 1160734 - DNA, 25 bp, Homo sapien
tattatcctgcttgaagtatttcca

SEQ ID NO: 1160735 - DNA, 25 bp, Homo sapien
tgtctaaaaccctgggtgcggccga

SEQ ID NO: 1160736 - DNA, 25 bp, Homo sapien
tgcttcagggccagtttcgggtaac

SEQ ID NO: 1160737 - DNA, 25 bp, Homo sapien
gttgtgagtcccacgtcgggcacca

SEQ ID NO: 1160738 - DNA, 25 bp, Homo sapien
tggttgtcgccggaggcagtaccac

SEQ ID NO: 1160739 - DNA, 25 bp, Homo sapien
cttcgtggttcccgcccttctgtag

SEQ ID NO: 1160740 - DNA, 25 bp, Homo sapien
ctcgccctggttgtcgccggaggca

SEQ ID NO: 1160741 - DNA, 25 bp, Homo sapien
tctctggactcgtgcagcagttggg

SEQ ID NO: 1160742 - DNA, 25 bp, Homo sapien
ccaggagccacggtgagagggacag

SEQ ID NO: 1160743 - DNA, 25 bp, Homo sapien
ctttcaataggccatagagcacttc

SEQ ID NO: 1160744 - DNA, 25 bp, Homo sapien
gcagagggagccacgggaatgttcc

SEQ ID NO: 1160745 - DNA, 25 bp, Homo sapien
cagaactgggaagtgtcacgagtag

SEQ ID NO: 1160746 - DNA, 25 bp, Homo sapien
aagtgtcacgagtagaaggatgagt

SEQ ID NO: 1160747 - DNA, 25 bp, Homo sapien
aactgggaagtgtcacgagtagaag

SEQ ID NO: 1160748 - DNA, 25 bp, Homo sapien
gaagtgtcacgagtagaaggatgag

SEQ ID NO: 1160749 - DNA, 25 bp, Homo sapien
taaagacaatcatttcttaccttag

SEQ ID NO: 1160750 - DNA, 25 bp, Homo sapien
tgaattaaggtctctatgtgggggt

SEQ ID NO: 1160751 - DNA, 25 bp, Homo sapien
taaaaacagccctaagatggagcag

SEQ ID NO: 1160752 - DNA, 25 bp, Homo sapien
gggtgttagaaggagggctgaggac

SEQ ID NO: 1160753 - DNA, 25 bp, Homo sapien
catcatcgtcagcaggcttggcttc

SEQ ID NO: 1160754 - DNA, 25 bp, Homo sapien
tatttgtgaaacatgtcgatcatgc

SEQ ID NO: 1160755 - DNA, 25 bp, Homo sapien
ggacctctcagcttgagtgttgctc

SEQ ID NO: 1160756 - DNA, 25 bp, Homo sapien
ggaagttctccttcatcatcgtcag

SEQ ID NO: 1160757 - DNA, 25 bp, Homo sapien
agacagtggcgaggtaatgtatgcc

SEQ ID NO: 1160758 - DNA, 25 bp, Homo sapien
cagtggcgaggtaatgtatgccctt

SEQ ID NO: 1160759 - DNA, 25 bp, Homo sapien
tggcgaggtaatgtatgcccttttt

SEQ ID NO: 1160760 - DNA, 25 bp, Homo sapien
gacagtggcgaggtaatgtatgccc

SEQ ID NO: 1160761 - DNA, 25 bp, Homo sapien
acacttttgggaccctggcatgacg

SEQ ID NO: 1160762 - DNA, 25 bp, Homo sapien
gactgtaggtctccgtgagttccaa

SEQ ID NO: 1160763 - DNA, 25 bp, Homo sapien
caattttctatctggtgactggagc

SEQ ID NO: 1160764 - DNA, 25 bp, Homo sapien
gaagaatactaagagcggctgcaca

SEQ ID NO: 1160765 - DNA, 25 bp, Homo sapien
cacattattagtgccagccccatgc

SEQ ID NO: 1160766 - DNA, 25 bp, Homo sapien
gggtactgagttggccacattatta

SEQ ID NO: 1160767 - DNA, 25 bp, Homo sapien
gagcattgagctctgaaaacggtct

SEQ ID NO: 1160768 - DNA, 25 bp, Homo sapien
tggccctgggcagtataaacactga

SEQ ID NO: 1160769 - DNA, 25 bp, Homo sapien
caggaaaggatgctggtcacctggc

SEQ ID NO: 1160770 - DNA, 25 bp, Homo sapien
tgtccagtaagctgcaggaaaggat

SEQ ID NO: 1160771 - DNA, 25 bp, Homo sapien
agctcccgtgtccagtaagctgcag

SEQ ID NO: 1160772 - DNA, 25 bp, Homo sapien
cctggcttgctttctaacgtctgag

SEQ ID NO: 1160773 - DNA, 25 bp, Homo sapien
cttggctttggcaggggaggtctgc

SEQ ID NO: 1160774 - DNA, 25 bp, Homo sapien
tggctttggcaggggaggtctgcat

SEQ ID NO: 1160775 - DNA, 25 bp, Homo sapien
ttggctttggcaggggaggtctgca

SEQ ID NO: 1160776 - DNA, 25 bp, Homo sapien
gagcccagaggttgtaggatgaggt

SEQ ID NO: 1160777 - DNA, 25 bp, Homo sapien
actggggtaatacctgccatgggtc

SEQ ID NO: 1160778 - DNA, 25 bp, Homo sapien
cgggccactggggtaatacctgcca

SEQ ID NO: 1160779 - DNA, 25 bp, Homo sapien
ggtgggcgtggggtgaggcacgggc

SEQ ID NO: 1160780 - DNA, 25 bp, Homo sapien
cctgtctgggagttggagctgggct

SEQ ID NO: 1160781 - DNA, 25 bp, Homo sapien
tcggatagatacacctgtctgggag

SEQ ID NO: 1160782 - DNA, 25 bp, Homo sapien
ctgggctggttacccccggaagcag

SEQ ID NO: 1160783 - DNA, 25 bp, Homo sapien
ttccctggtggcttcaccagtcgga

SEQ ID NO: 1160784 - DNA, 25 bp, Homo sapien
ggctgatccgatagccctgtccctt

SEQ ID NO: 1160785 - DNA, 25 bp, Homo sapien
gccctgtcccttgatgcctggcacc

SEQ ID NO: 1160786 - DNA, 25 bp, Homo sapien
ctgtcccttgatgcctggcaccctg

SEQ ID NO: 1160787 - DNA, 25 bp, Homo sapien
cacaggcccggctgatccgatagcc

SEQ ID NO: 1160788 - DNA, 25 bp, Homo sapien
aaaacaatagagtcgagccggctga

SEQ ID NO: 1160789 - DNA, 25 bp, Homo sapien
acaatagagtcgagccggctgagcc

SEQ ID NO: 1160790 - DNA, 25 bp, Homo sapien
aaacaatagagtcgagccggctgag

SEQ ID NO: 1160791 - DNA, 25 bp, Homo sapien
aacaatagagtcgagccggctgagc

SEQ ID NO: 1160792 - DNA, 25 bp, Homo sapien
cagagccccccgccaggaggctggt

SEQ ID NO: 1160793 - DNA, 25 bp, Homo sapien
aggtgaaggttgaacagaatggtga

SEQ ID NO: 1160794 - DNA, 25 bp, Homo sapien
ctaagccgtgaagtaggtgaaggtt

SEQ ID NO: 1160795 - DNA, 25 bp, Homo sapien
gcagagccccccgccaggaggctgg

SEQ ID NO: 1160796 - DNA, 25 bp, Homo sapien
ctagtccgagctgggcaagtttacc

SEQ ID NO: 1160797 - DNA, 25 bp, Homo sapien
catctggattagtgttttcaggcag

SEQ ID NO: 1160798 - DNA, 25 bp, Homo sapien
tgccacatcattcagcctctctagg

SEQ ID NO: 1160799 - DNA, 25 bp, Homo sapien
gactttagatggagaccacatcctt

SEQ ID NO: 1160800 - DNA, 25 bp, Homo sapien
ctgaaattgcaaggctgatggaaga

SEQ ID NO: 1160801 - DNA, 25 bp, Homo sapien
tgatggaagacttggaccggaacaa

SEQ ID NO: 1160802 - DNA, 25 bp, Homo sapien
cttccaggagtatgtcaccttcctg

SEQ ID NO: 1160803 - DNA, 25 bp, Homo sapien
gccctcaagggctgaaaataaatag

SEQ ID NO: 1160804 - DNA, 25 bp, Homo sapien
tctccaaatgaggaccagtaactga

SEQ ID NO: 1160805 - DNA, 25 bp, Homo sapien
gggatgcttccagccggatatccat

SEQ ID NO: 1160806 - DNA, 25 bp, Homo sapien
gagaagcaatgccaaagtgacatgg

SEQ ID NO: 1160807 - DNA, 25 bp, Homo sapien
tgaggccctggtccacatgtagacc

SEQ ID NO: 1160808 - DNA, 25 bp, Homo sapien
ccccaatgcgtctaaatatttatac

SEQ ID NO: 1160809 - DNA, 25 bp, Homo sapien
aaaatgaatgcctgctaggcctgcc

SEQ ID NO: 1160810 - DNA, 25 bp, Homo sapien
tcactattacgtgaccctgggcaag

SEQ ID NO: 1160811 - DNA, 25 bp, Homo sapien
tgtttatggctatacccccaatgcg

SEQ ID NO: 1160812 - DNA, 25 bp, Homo sapien
caagggagcttccagttagatggca

SEQ ID NO: 1160813 - DNA, 25 bp, Homo sapien
gggtctcaagactctgcctgggtca

SEQ ID NO: 1160814 - DNA, 25 bp, Homo sapien
ttcaggagtcccgagtctaaggagg

SEQ ID NO: 1160815 - DNA, 25 bp, Homo sapien
gaggaaacactcctgcccaagggag

SEQ ID NO: 1160816 - DNA, 25 bp, Homo sapien
gaataattggagcttctaggaaagg

SEQ ID NO: 1160817 - DNA, 25 bp, Homo sapien
gaaatgaaatgttagggctctcagg

SEQ ID NO: 1160818 - DNA, 25 bp, Homo sapien
tttgaaggcaagaggaaaagatgcc

SEQ ID NO: 1160819 - DNA, 25 bp, Homo sapien
aagatgggcttctggcgcctgctga

SEQ ID NO: 1160820 - DNA, 25 bp, Homo sapien
gagaggaccctcagtgagaaactta

SEQ ID NO: 1160821 - DNA, 25 bp, Homo sapien
ccatggggcctcactgagaggaccc

SEQ ID NO: 1160822 - DNA, 25 bp, Homo sapien
gctgtgctggttgagcccggtaagg

SEQ ID NO: 1160823 - DNA, 25 bp, Homo sapien
gatttcaatccaggactcttctctg

SEQ ID NO: 1160824 - DNA, 25 bp, Homo sapien
ggagacctgtcttcaacagtccctc

SEQ ID NO: 1160825 - DNA, 25 bp, Homo sapien
tggccaaggttgcaaatgtggctgc

SEQ ID NO: 1160826 - DNA, 25 bp, Homo sapien
gccaaggttgcaaatgtggctgctg

SEQ ID NO: 1160827 - DNA, 25 bp, Homo sapien
caggttctggacagatggccaaggt

SEQ ID NO: 1160828 - DNA, 25 bp, Homo sapien
caaggttgcaaatgtggctgctgga

SEQ ID NO: 1160829 - DNA, 25 bp, Homo sapien
aggaagctcatggtgggttccccac

SEQ ID NO: 1160830 - DNA, 25 bp, Homo sapien
ctctctccgaccttcagttcatttg

SEQ ID NO: 1160831 - DNA, 25 bp, Homo sapien
tgctccacagtgctatggtccccag

SEQ ID NO: 1160832 - DNA, 25 bp, Homo sapien
gccaggcggtcaggaagctcatggt

SEQ ID NO: 1160833 - DNA, 25 bp, Homo sapien
gccttggcagggacttgagggctcc

SEQ ID NO: 1160834 - DNA, 25 bp, Homo sapien
gacccttcccaacacctgggagaca

SEQ ID NO: 1160835 - DNA, 25 bp, Homo sapien
ggggccttggcagggacttgagggc

SEQ ID NO: 1160836 - DNA, 25 bp, Homo sapien
acccttcccaacacctgggagacag

SEQ ID NO: 1160837 - DNA, 25 bp, Homo sapien
tcaggtgtctcggatcagatgtccc

SEQ ID NO: 1160838 - DNA, 25 bp, Homo sapien
gaaaccccaagagacctaagtgcag

SEQ ID NO: 1160839 - DNA, 25 bp, Homo sapien
gagtcagtctggtaccctcggtcag

SEQ ID NO: 1160840 - DNA, 25 bp, Homo sapien
gacaatggcccctgatcgaatgaca

SEQ ID NO: 1160841 - DNA, 25 bp, Homo sapien
cgtggaacacgttgatgagggtctc

SEQ ID NO: 1160842 - DNA, 25 bp, Homo sapien
gcgtggaacacgttgatgagggtct

SEQ ID NO: 1160843 - DNA, 25 bp, Homo sapien
ggaacacgttgatgagggtctccat

SEQ ID NO: 1160844 - DNA, 25 bp, Homo sapien
tggaacacgttgatgagggtctcca

SEQ ID NO: 1160845 - DNA, 25 bp, Homo sapien
gtcttgagggcttctgttgcctaca

SEQ ID NO: 1160846 - DNA, 25 bp, Homo sapien
tgttgcctacagcataagctctttc

SEQ ID NO: 1160847 - DNA, 25 bp, Homo sapien
gaattatgggactcttctaggcctc

SEQ ID NO: 1160848 - DNA, 25 bp, Homo sapien
caaagatgagcgagaggaactgcat

SEQ ID NO: 1160849 - DNA, 25 bp, Homo sapien
gccacaagcaccacatactcctgga

SEQ ID NO: 1160850 - DNA, 25 bp, Homo sapien
cgtctccattctcgtctagctcctt

SEQ ID NO: 1160851 - DNA, 25 bp, Homo sapien
gcagccacaagcaccacatactcct

SEQ ID NO: 1160852 - DNA, 25 bp, Homo sapien
acctccccgtctccattctcgtcta

SEQ ID NO: 1160853 - DNA, 25 bp, Homo sapien
actgttctcccagaagaaattgtta

SEQ ID NO: 1160854 - DNA, 25 bp, Homo sapien
caactgttctcccagaagaaattgt

SEQ ID NO: 1160855 - DNA, 25 bp, Homo sapien
tcaactgttctcccagaagaaattg

SEQ ID NO: 1160856 - DNA, 25 bp, Homo sapien
ctgttctcccagaagaaattgttac

SEQ ID NO: 1160857 - DNA, 25 bp, Homo sapien
gaggaagggcgctgcccaatgtggc

SEQ ID NO: 1160858 - DNA, 25 bp, Homo sapien
gaccgctactcttgcgcccttggtg

SEQ ID NO: 1160859 - DNA, 25 bp, Homo sapien
gcctttaatgaaagatgagttgcag

SEQ ID NO: 1160860 - DNA, 25 bp, Homo sapien
ttgcaggcttggaccgctactcttg

SEQ ID NO: 1160861 - DNA, 25 bp, Homo sapien
cccagtctgagagttgtgaagtgcc

SEQ ID NO: 1160862 - DNA, 25 bp, Homo sapien
aagtgccgtaaatgctccagccaag

SEQ ID NO: 1160863 - DNA, 25 bp, Homo sapien
tcttcttccggacaattgggcctgg

SEQ ID NO: 1160864 - DNA, 25 bp, Homo sapien
gaggccagtattaggagcaaattcc

SEQ ID NO: 1160865 - DNA, 25 bp, Homo sapien
gtcagatccgcgcacgactagaggg

SEQ ID NO: 1160866 - DNA, 25 bp, Homo sapien
gcaattacgtcaggcgtcagatccg

SEQ ID NO: 1160867 - DNA, 25 bp, Homo sapien
taaaatggcgtctacgcaattacgt

SEQ ID NO: 1160868 - DNA, 25 bp, Homo sapien
gaaagatttgagctacgcctgcgca

SEQ ID NO: 1160869 - DNA, 25 bp, Homo sapien
aaaacaaaatggccgccacgtccag

SEQ ID NO: 1160870 - DNA, 25 bp, Homo sapien
tcctgctcggtgtccaaaacaaaat

SEQ ID NO: 1160871 - DNA, 25 bp, Homo sapien
ctgctcggtgtccaaaacaaaatgg

SEQ ID NO: 1160872 - DNA, 25 bp, Homo sapien
cctgctcggtgtccaaaacaaaatg

SEQ ID NO: 1160873 - DNA, 25 bp, Homo sapien
ctggttggctgtctagtcggccgat

SEQ ID NO: 1160874 - DNA, 25 bp, Homo sapien
tctagtcggccgatccgtctgctca

SEQ ID NO: 1160875 - DNA, 25 bp, Homo sapien
tatgcgagctcagttcgttgttgct

SEQ ID NO: 1160876 - DNA, 25 bp, Homo sapien
ttggttagatgcgtaagcggtagta

SEQ ID NO: 1160877 - DNA, 25 bp, Homo sapien
tgagttgacggtggaggggctcggg

SEQ ID NO: 1160878 - DNA, 25 bp, Homo sapien
ctgagttgacggtggaggggctcgg

SEQ ID NO: 1160879 - DNA, 25 bp, Homo sapien
gaaacagacgccagtgctcctcccg

SEQ ID NO: 1160880 - DNA, 25 bp, Homo sapien
aaacagacgccagtgctcctcccgg

SEQ ID NO: 1160881 - DNA, 25 bp, Homo sapien
ggaaacagacgccagtgctcctccc

SEQ ID NO: 1160882 - DNA, 25 bp, Homo sapien
aggaaacagacgccagtgctcctcc

SEQ ID NO: 1160883 - DNA, 25 bp, Homo sapien
caactttcggcgctgactgtgcagc

SEQ ID NO: 1160884 - DNA, 25 bp, Homo sapien
ttttagcacaactttcggcgctgac

SEQ ID NO: 1160885 - DNA, 25 bp, Homo sapien
actttcggcgctgactgtgcagcca

SEQ ID NO: 1160886 - DNA, 25 bp, Homo sapien
tagcacaactttcggcgctgactgt

SEQ ID NO: 1160887 - DNA, 25 bp, Homo sapien
agaagcacatatgcctcagaagagg

SEQ ID NO: 1160888 - DNA, 25 bp, Homo sapien
cttaatgaaatcactgatcaaaggc

SEQ ID NO: 1160889 - DNA, 25 bp, Homo sapien
aatttcagtggtcgaaagtcaactt

SEQ ID NO: 1160890 - DNA, 25 bp, Homo sapien
gacattaagtaaatttcagtggtcg

SEQ ID NO: 1160891 - DNA, 25 bp, Homo sapien
cttcaaggtcgaacaaaatggatgt

SEQ ID NO: 1160892 - DNA, 25 bp, Homo sapien
gctgcctggacagagggtctattct

SEQ ID NO: 1160893 - DNA, 25 bp, Homo sapien
cactggcgtcggctgtttgttcttc

SEQ ID NO: 1160894 - DNA, 25 bp, Homo sapien
gttgttgctgcatcgaagcccgaat

SEQ ID NO: 1160895 - DNA, 25 bp, Homo sapien
gacagagggtctattctccatctgc

SEQ ID NO: 1160896 - DNA, 25 bp, Homo sapien
gcaatcatccatcacgtcctgacag

SEQ ID NO: 1160897 - DNA, 25 bp, Homo sapien
caatcatccatcacgtcctgacagc

SEQ ID NO: 1160898 - DNA, 25 bp, Homo sapien
tttgcaatcatccatcacgtcctga

SEQ ID NO: 1160899 - DNA, 25 bp, Homo sapien
tgcaatcatccatcacgtcctgaca

SEQ ID NO: 1160900 - DNA, 25 bp, Homo sapien
gccacagcttggacatatccttcca

SEQ ID NO: 1160901 - DNA, 25 bp, Homo sapien
gcttggacatatccttccacagcca

SEQ ID NO: 1160902 - DNA, 25 bp, Homo sapien
cactgtccggacttgcatataaatt

SEQ ID NO: 1160903 - DNA, 25 bp, Homo sapien
cacagcttggacatatccttccaca

SEQ ID NO: 1160904 - DNA, 25 bp, Homo sapien
aagggtgttatatttaactgctgaa

SEQ ID NO: 1160905 - DNA, 25 bp, Homo sapien
tgtaagggtgttatatttaactgct

SEQ ID NO: 1160906 - DNA, 25 bp, Homo sapien
tgaatttatgcatagccatgcaatg

SEQ ID NO: 1160907 - DNA, 25 bp, Homo sapien
atagccatgcaatgctaccaaagcc

SEQ ID NO: 1160908 - DNA, 25 bp, Homo sapien
agctccttaattgcactagtcacat

SEQ ID NO: 1160909 - DNA, 25 bp, Homo sapien
gtggctactgtaccggagagcaaat

SEQ ID NO: 1160910 - DNA, 25 bp, Homo sapien
tactgtaccggagagcaaatacaga

SEQ ID NO: 1160911 - DNA, 25 bp, Homo sapien
gctactgtaccggagagcaaataca

SEQ ID NO: 1160912 - DNA, 25 bp, Homo sapien
caagctcctagtaagcctggctgtc

SEQ ID NO: 1160913 - DNA, 25 bp, Homo sapien
ggcctgtcctgttactcccgattaa

SEQ ID NO: 1160914 - DNA, 25 bp, Homo sapien
tagcataagtaggtgtaaccaaccg

SEQ ID NO: 1160915 - DNA, 25 bp, Homo sapien
tcaggttagaactgcattccacaag

SEQ ID NO: 1160916 - DNA, 25 bp, Homo sapien
cactctgggcaaaacttaaattaca

SEQ ID NO: 1160917 - DNA, 25 bp, Homo sapien
ggcttactcaaacaccataggaagt

SEQ ID NO: 1160918 - DNA, 25 bp, Homo sapien
tgatttctcaaaaaggcccgtgtgc

SEQ ID NO: 1160919 - DNA, 25 bp, Homo sapien
gaatctatttccagacggtccactt

SEQ ID NO: 1160920 - DNA, 25 bp, Homo sapien
cagcagaattttgatccagagcaga

SEQ ID NO: 1160921 - DNA, 25 bp, Homo sapien
tacagaagtcatacactgccagttg

SEQ ID NO: 1160922 - DNA, 25 bp, Homo sapien
caagaagctcaagtgtggtcccatg

SEQ ID NO: 1160923 - DNA, 25 bp, Homo sapien
ggtgtcaaaaggatcccaaaccaga

SEQ ID NO: 1160924 - DNA, 25 bp, Homo sapien
ctatgggtcggcctaaccgtgcctg

SEQ ID NO: 1160925 - DNA, 25 bp, Homo sapien
tagggttctggtggcacgtccccca

SEQ ID NO: 1160926 - DNA, 25 bp, Homo sapien
tcctctgggcaagcctctctggatt

SEQ ID NO: 1160927 - DNA, 25 bp, Homo sapien
tctctggattatgggtaggcctcgt

SEQ ID NO: 1160928 - DNA, 25 bp, Homo sapien
aaacaaacgtgtccataagcagccc

SEQ ID NO: 1160929 - DNA, 25 bp, Homo sapien
gaacagagtaatagtgccccaaatg

SEQ ID NO: 1160930 - DNA, 25 bp, Homo sapien
gagtagggcccgacaattatcaggg

SEQ ID NO: 1160931 - DNA, 25 bp, Homo sapien
gattctaaccaaaggaaggcggtga

SEQ ID NO: 1160932 - DNA, 25 bp, Homo sapien
tcttaagcccattcggggagctacg

SEQ ID NO: 1160933 - DNA, 25 bp, Homo sapien
accgattccgccacgacccatagct

SEQ ID NO: 1160934 - DNA, 25 bp, Homo sapien
gacctcgaacaccacctcttcttaa

SEQ ID NO: 1160935 - DNA, 25 bp, Homo sapien
gctcgtccacctcggagcaggtttt

SEQ ID NO: 1160936 - DNA, 25 bp, Homo sapien
tgagacttttgcactaccagcatgg

SEQ ID NO: 1160937 - DNA, 25 bp, Homo sapien
tggtttcagagccaatgcccagctc

SEQ ID NO: 1160938 - DNA, 25 bp, Homo sapien
ctctctgaagttggtagctgactaa

SEQ ID NO: 1160939 - DNA, 25 bp, Homo sapien
cctatgacttgaagctgtgcagaaa

SEQ ID NO: 1160940 - DNA, 25 bp, Homo sapien
cacaatgggtagaaagcaacacatg

SEQ ID NO: 1160941 - DNA, 25 bp, Homo sapien
taagtttattggagacccttctgga

SEQ ID NO: 1160942 - DNA, 25 bp, Homo sapien
aagtctaatgagctagctgacctca

SEQ ID NO: 1160943 - DNA, 25 bp, Homo sapien
taataggtgctgtagtaaatgcccc

SEQ ID NO: 1160944 - DNA, 25 bp, Homo sapien
tacagggcgagcaagggcacctctc

SEQ ID NO: 1160945 - DNA, 25 bp, Homo sapien
tctccctcgtccacggcctcggcct

SEQ ID NO: 1160946 - DNA, 25 bp, Homo sapien
aagggcacctctccctcgtccacgg

SEQ ID NO: 1160947 - DNA, 25 bp, Homo sapien
cttggtcaatacagggcgagcaagg

SEQ ID NO: 1160948 - DNA, 25 bp, Homo sapien
ggcatccaactcagcatccaggtgt

SEQ ID NO: 1160949 - DNA, 25 bp, Homo sapien
tttgttttcgacatatatgcatcca

SEQ ID NO: 1160950 - DNA, 25 bp, Homo sapien
tgcatccaattggttgtccagctgc

SEQ ID NO: 1160951 - DNA, 25 bp, Homo sapien
gtttcgggatctgtctgcgccatgt

SEQ ID NO: 1160952 - DNA, 25 bp, Homo sapien
gataggtccatccagcatcaatcag

SEQ ID NO: 1160953 - DNA, 25 bp, Homo sapien
tatcgaagaggatgtaacagaaccc

SEQ ID NO: 1160954 - DNA, 25 bp, Homo sapien
cactaaatgcacaagctggtggcaa

SEQ ID NO: 1160955 - DNA, 25 bp, Homo sapien
gaagaacgcatttttgagctccaga

SEQ ID NO: 1160956 - DNA, 25 bp, Homo sapien
gctgccaccattaagggtcccagag

SEQ ID NO: 1160957 - DNA, 25 bp, Homo sapien
tgcccctggtacaggtggtcagcca

SEQ ID NO: 1160958 - DNA, 25 bp, Homo sapien
tcactagccagggtgtgacgcaggt

SEQ ID NO: 1160959 - DNA, 25 bp, Homo sapien
gggtccccagcacgtctgactgggt

SEQ ID NO: 1160960 - DNA, 25 bp, Homo sapien
agttcaggttgtagaaaggaaccag

SEQ ID NO: 1160961 - DNA, 25 bp, Homo sapien
aaatggagtctagcgcgaaccgggc

SEQ ID NO: 1160962 - DNA, 25 bp, Homo sapien
gtcttgaaaatctccaaagttcagg

SEQ ID NO: 1160963 - DNA, 25 bp, Homo sapien
cacgaattgtcctgaagcccgaaac

SEQ ID NO: 1160964 - DNA, 25 bp, Homo sapien
agctgctgcacagcgggtcgcagga

SEQ ID NO: 1160965 - DNA, 25 bp, Homo sapien
ccttcggcgaaaaggtcgcggcctg

SEQ ID NO: 1160966 - DNA, 25 bp, Homo sapien
agcagcccttcggcgaaaaggtcgc

SEQ ID NO: 1160967 - DNA, 25 bp, Homo sapien
tgcacagcgggtcgcaggaactcca

SEQ ID NO: 1160968 - DNA, 25 bp, Homo sapien
tacaaggtcaggcagttaccggagc

SEQ ID NO: 1160969 - DNA, 25 bp, Homo sapien
taccaagtactgagagaagccggcc

SEQ ID NO: 1160970 - DNA, 25 bp, Homo sapien
tgcaaagaggtacaaggcctacaag

SEQ ID NO: 1160971 - DNA, 25 bp, Homo sapien
ggagctcaggaaacgaactccccta

SEQ ID NO: 1160972 - DNA, 25 bp, Homo sapien
ttgttcccggagctctacctggctc

SEQ ID NO: 1160973 - DNA, 25 bp, Homo sapien
cctaaggtcctgaaagtgggctgaa

SEQ ID NO: 1160974 - DNA, 25 bp, Homo sapien
taaggtgcagctaagatctaacggc

SEQ ID NO: 1160975 - DNA, 25 bp, Homo sapien
taatgggatggaaaacacttgcacc

SEQ ID NO: 1160976 - DNA, 25 bp, Homo sapien
aattccgggtacacagggatgctca

SEQ ID NO: 1160977 - DNA, 25 bp, Homo sapien
tgatcctcatttatgcggcacagtt

SEQ ID NO: 1160978 - DNA, 25 bp, Homo sapien
tgttaaccaagacaacgcgtcgccg

SEQ ID NO: 1160979 - DNA, 25 bp, Homo sapien
tctgtagaatgttgttaaccaagac

SEQ ID NO: 1160980 - DNA, 25 bp, Homo sapien
agtagcttcttaacataggggtcaa

SEQ ID NO: 1160981 - DNA, 25 bp, Homo sapien
cactgttggtaagatattcttttac

SEQ ID NO: 1160982 - DNA, 25 bp, Homo sapien
gaatcactgttggtaagatattctt

SEQ ID NO: 1160983 - DNA, 25 bp, Homo sapien
aagaatcactgttggtaagatattc

SEQ ID NO: 1160984 - DNA, 25 bp, Homo sapien
aaaaaagggcaaagaatcactgttg

SEQ ID NO: 1160985 - DNA, 25 bp, Homo sapien
tgctctcctgcgggctgtttccttg

SEQ ID NO: 1160986 - DNA, 25 bp, Homo sapien
tgtggtttagccgtctcagtcgttc

SEQ ID NO: 1160987 - DNA, 25 bp, Homo sapien
ttggcaacactgtggtttagccgtc

SEQ ID NO: 1160988 - DNA, 25 bp, Homo sapien
gggtaaattcccgaatccagcattg

SEQ ID NO: 1160989 - DNA, 25 bp, Homo sapien
taagtcctttgggaacctcattctg

SEQ ID NO: 1160990 - DNA, 25 bp, Homo sapien
gcccctctggttaactagtcctgaa

SEQ ID NO: 1160991 - DNA, 25 bp, Homo sapien
tccaggcccatgtaaccaggcatgt

SEQ ID NO: 1160992 - DNA, 25 bp, Homo sapien
gaaggtaagcctcacgtatgcagct

SEQ ID NO: 1160993 - DNA, 25 bp, Homo sapien
taggaagaaatgttggtatcctcca

SEQ ID NO: 1160994 - DNA, 25 bp, Homo sapien
cattatagatggatggcataggtca

SEQ ID NO: 1160995 - DNA, 25 bp, Homo sapien
tccttgaggtggttcttctgtattc

SEQ ID NO: 1160996 - DNA, 25 bp, Homo sapien
tatcccacggaaatgtctgtcacca

SEQ ID NO: 1160997 - DNA, 25 bp, Homo sapien
agcccagtagcaggcagcttaggct

SEQ ID NO: 1160998 - DNA, 25 bp, Homo sapien
cagctaagccaatatcaaaacccag

SEQ ID NO: 1160999 - DNA, 25 bp, Homo sapien
tgatattggcttagctgccagtctc

SEQ ID NO: 1161000 - DNA, 25 bp, Homo sapien
gaaaagtaaactccatagaagtgtc

SEQ ID NO: 1161001 - DNA, 25 bp, Homo sapien
tacatggtgacagacatttccgtgg

SEQ ID NO: 1161002 - DNA, 25 bp, Homo sapien
tttccgtgggatagggaagatagca

SEQ ID NO: 1161003 - DNA, 25 bp, Homo sapien
gaatacagaagaaccacctcaagga

SEQ ID NO: 1161004 - DNA, 25 bp, Homo sapien
gtgatagtaacaccttcagaaaagg

SEQ ID NO: 1161005 - DNA, 25 bp, Homo sapien
tatgcaacgtttagggccaaaggct

SEQ ID NO: 1161006 - DNA, 25 bp, Homo sapien
gactgtgtgtactctaaagttgcca

SEQ ID NO: 1161007 - DNA, 25 bp, Homo sapien
gtgatacccactgaacctggcagga

SEQ ID NO: 1161008 - DNA, 25 bp, Homo sapien
caaagcatgctgtacctgtatgcaa

SEQ ID NO: 1161009 - DNA, 25 bp, Homo sapien
tgttcatcacagcataatggccctg

SEQ ID NO: 1161010 - DNA, 25 bp, Homo sapien
tacctgctgttctagggtcatgact

SEQ ID NO: 1161011 - DNA, 25 bp, Homo sapien
cattatgctgtgatgaacaacccca

SEQ ID NO: 1161012 - DNA, 25 bp, Homo sapien
cagtcatgaccctagaacagcaggt

SEQ ID NO: 1161013 - DNA, 25 bp, Homo sapien
tatcactgacccctgtgagagtggc

SEQ ID NO: 1161014 - DNA, 25 bp, Homo sapien
ttggccctaaacgttgcatacaggt

SEQ ID NO: 1161015 - DNA, 25 bp, Homo sapien
tcctgccaggttcagtgggtatcac

SEQ ID NO: 1161016 - DNA, 25 bp, Homo sapien
catacaggtacagcatgctttgggt

SEQ ID NO: 1161017 - DNA, 25 bp, Homo sapien
tagttcactgtaaccgcgaactcct

SEQ ID NO: 1161018 - DNA, 25 bp, Homo sapien
aatcatagttcactgtaaccgcgaa

SEQ ID NO: 1161019 - DNA, 25 bp, Homo sapien
catagttcactgtaaccgcgaactc

SEQ ID NO: 1161020 - DNA, 25 bp, Homo sapien
tcatagttcactgtaaccgcgaact

SEQ ID NO: 1161021 - DNA, 25 bp, Homo sapien
agttcactgtaaccgcgaactcctg

SEQ ID NO: 1161022 - DNA, 25 bp, Homo sapien
gttcactgtaaccgcgaactcctgg

SEQ ID NO: 1161023 - DNA, 25 bp, Homo sapien
ccaggagttcgcggttacagtgaac

SEQ ID NO: 1161024 - DNA, 25 bp, Homo sapien
ttcgcggttacagtgaactatgatt

SEQ ID NO: 1161025 - DNA, 25 bp, Homo sapien
gagttcgcggttacagtgaactatg

SEQ ID NO: 1161026 - DNA, 25 bp, Homo sapien
caggagttcgcggttacagtgaact

SEQ ID NO: 1161027 - DNA, 25 bp, Homo sapien
aggagttcgcggttacagtgaacta

SEQ ID NO: 1161028 - DNA, 25 bp, Homo sapien
agttcgcggttacagtgaactatga

SEQ ID NO: 1161029 - DNA, 25 bp, Homo sapien
gctgctcactcatttctctctacta

SEQ ID NO: 1161030 - DNA, 25 bp, Homo sapien
tctctctactaccatgattaaatgg

SEQ ID NO: 1161031 - DNA, 25 bp, Homo sapien
actaaaaccttaaatgatcacgagg

SEQ ID NO: 1161032 - DNA, 25 bp, Homo sapien
ttaaatggtagcagtcatgagaaga

SEQ ID NO: 1161033 - DNA, 25 bp, Homo sapien
tggtcattaaggtctaagtctagcc

SEQ ID NO: 1161034 - DNA, 25 bp, Homo sapien
gatcacgaggaaaactggtcattaa

SEQ ID NO: 1161035 - DNA, 25 bp, Homo sapien
cctcgtgatcatttaaggttttagt

SEQ ID NO: 1161036 - DNA, 25 bp, Homo sapien
gctagacttagaccttaatgaccag

SEQ ID NO: 1161037 - DNA, 25 bp, Homo sapien
catttaatcatggtagtagagagaa

SEQ ID NO: 1161038 - DNA, 25 bp, Homo sapien
tcttctcatgactgctaccatttaa

SEQ ID NO: 1161039 - DNA, 25 bp, Homo sapien
tagtagagagaaatgagtgagcagc

SEQ ID NO: 1161040 - DNA, 25 bp, Homo sapien
taatgaccagttttcctcgtgatca

SEQ ID NO: 1161041 - DNA, 25 bp, Homo sapien
ctcagcccggatgacgggggcgggg

SEQ ID NO: 1161042 - DNA, 25 bp, Homo sapien
cattctcagcccggatgacgggggc

SEQ ID NO: 1161043 - DNA, 25 bp, Homo sapien
ttctcagcccggatgacgggggcgg

SEQ ID NO: 1161044 - DNA, 25 bp, Homo sapien
tctcagcccggatgacgggggcggg

SEQ ID NO: 1161045 - DNA, 25 bp, Homo sapien
attctcagcccggatgacgggggcg

SEQ ID NO: 1161046 - DNA, 25 bp, Homo sapien
ccgcccccgtcatccgggctgagaa

SEQ ID NO: 1161047 - DNA, 25 bp, Homo sapien
cgcccccgtcatccgggctgagaat

SEQ ID NO: 1161048 - DNA, 25 bp, Homo sapien
gcccccgtcatccgggctgagaatg

SEQ ID NO: 1161049 - DNA, 25 bp, Homo sapien
ccccgcccccgtcatccgggctgag

SEQ ID NO: 1161050 - DNA, 25 bp, Homo sapien
cccgcccccgtcatccgggctgaga

SEQ ID NO: 1161051 - DNA, 25 bp, Homo sapien
atgcggctcgctccagcattctcag

SEQ ID NO: 1161052 - DNA, 25 bp, Homo sapien
cattctcagcccggatgacgggggc

SEQ ID NO: 1161053 - DNA, 25 bp, Homo sapien
cagcattctcagcccggatgacggg

SEQ ID NO: 1161054 - DNA, 25 bp, Homo sapien
ccagcattctcagcccggatgacgg

SEQ ID NO: 1161055 - DNA, 25 bp, Homo sapien
tctcagcccggatgacgggggcggg

SEQ ID NO: 1161056 - DNA, 25 bp, Homo sapien
attctcagcccggatgacgggggcg

SEQ ID NO: 1161057 - DNA, 25 bp, Homo sapien
ccgcccccgtcatccgggctgagaa

SEQ ID NO: 1161058 - DNA, 25 bp, Homo sapien
ccccgtcatccgggctgagaatgct

SEQ ID NO: 1161059 - DNA, 25 bp, Homo sapien
ccgtcatccgggctgagaatgctgg

SEQ ID NO: 1161060 - DNA, 25 bp, Homo sapien
ctgagaatgctggagcgagccgcat

SEQ ID NO: 1161061 - DNA, 25 bp, Homo sapien
gcccccgtcatccgggctgagaatg

SEQ ID NO: 1161062 - DNA, 25 bp, Homo sapien
cccgtcatccgggctgagaatgctg

SEQ ID NO: 1161063 - DNA, 25 bp, Homo sapien
gggcccagcacgcttccgctgcgcc

SEQ ID NO: 1161064 - DNA, 25 bp, Homo sapien
tgggcccagcacgcttccgctgcgc

SEQ ID NO: 1161065 - DNA, 25 bp, Homo sapien
cccagcacgcttccgctgcgccact

SEQ ID NO: 1161066 - DNA, 25 bp, Homo sapien
ggcccagcacgcttccgctgcgcca

SEQ ID NO: 1161067 - DNA, 25 bp, Homo sapien
aaactgagtgagtgcgtggatgtgt

SEQ ID NO: 1161068 - DNA, 25 bp, Homo sapien
ggtgagcccagagtgcttgttaccc

SEQ ID NO: 1161069 - DNA, 25 bp, Homo sapien
tccgttaaagttgaaggtgagccca

SEQ ID NO: 1161070 - DNA, 25 bp, Homo sapien
tgagcccagagtgcttgttacccat

SEQ ID NO: 1161071 - DNA, 25 bp, Homo sapien
catcaggcgcgtccctatgggaagg

SEQ ID NO: 1161072 - DNA, 25 bp, Homo sapien
caagtctccggctatccggagggaa

SEQ ID NO: 1161073 - DNA, 25 bp, Homo sapien
tttgtagcgtgcgtgagcgcctgcc

SEQ ID NO: 1161074 - DNA, 25 bp, Homo sapien
cccgagtgtgaacaactgggagtgt

SEQ ID NO: 1161075 - DNA, 25 bp, Homo sapien
ctcagcgggcaccgcagcaggcgag

SEQ ID NO: 1161076 - DNA, 25 bp, Homo sapien
cagcgggcaccgcagcaggcgagcg

SEQ ID NO: 1161077 - DNA, 25 bp, Homo sapien
cctcagcgggcaccgcagcaggcga

SEQ ID NO: 1161078 - DNA, 25 bp, Homo sapien
ggcctcagcgggcaccgcagcaggc

SEQ ID NO: 1161079 - DNA, 25 bp, Homo sapien
gcaggcgcaggcgggagccagcggg

SEQ ID NO: 1161080 - DNA, 25 bp, Homo sapien
gcaggagcaggcgcaggcgggagcc

SEQ ID NO: 1161081 - DNA, 25 bp, Homo sapien
ggagcaggcgcaggcgggagccagc

SEQ ID NO: 1161082 - DNA, 25 bp, Homo sapien
aggcgcaggcgggagccagcggggc

SEQ ID NO: 1161083 - DNA, 25 bp, Homo sapien
cgaggtattggccagcggcagtacc

SEQ ID NO: 1161084 - DNA, 25 bp, Homo sapien
tggctgaggtcgtcctcggcgaact

SEQ ID NO: 1161085 - DNA, 25 bp, Homo sapien
ggtggtccaccgtaatattgaggcg

SEQ ID NO: 1161086 - DNA, 25 bp, Homo sapien
aagaagcagtgctcttcgtcacccg

SEQ ID NO: 1161087 - DNA, 25 bp, Homo sapien
gggccctgtccaccttgcaggcttt

SEQ ID NO: 1161088 - DNA, 25 bp, Homo sapien
ggagcatgagggttctgaaggcatc

SEQ ID NO: 1161089 - DNA, 25 bp, Homo sapien
cccaaagatatccaggtggaagaaa

SEQ ID NO: 1161090 - DNA, 25 bp, Homo sapien
caggagcatgagggttctgaaggca

SEQ ID NO: 1161091 - DNA, 25 bp, Homo sapien
tgcttcaggaattccaagtactcgg

SEQ ID NO: 1161092 - DNA, 25 bp, Homo sapien
caagtactcgggattatctgggtct

SEQ ID NO: 1161093 - DNA, 25 bp, Homo sapien
caggaattccaagtactcgggatta

SEQ ID NO: 1161094 - DNA, 25 bp, Homo sapien
atctgggtctttatatgtaatgatt

SEQ ID NO: 1161095 - DNA, 25 bp, Homo sapien
catgtgccagagtctccgtcactgc

SEQ ID NO: 1161096 - DNA, 25 bp, Homo sapien
cacatccgctgagtgatgttctccc

SEQ ID NO: 1161097 - DNA, 25 bp, Homo sapien
gaaagcttcggttccacatccgctg

SEQ ID NO: 1161098 - DNA, 25 bp, Homo sapien
atatagagcaggagcccgtcgtgga

SEQ ID NO: 1161099 - DNA, 25 bp, Homo sapien
tttcccgatcgccactgctatcaat

SEQ ID NO: 1161100 - DNA, 25 bp, Homo sapien
cgatcgccactgctatcaattttca

SEQ ID NO: 1161101 - DNA, 25 bp, Homo sapien
tctgtttcccgatcgccactgctat

SEQ ID NO: 1161102 - DNA, 25 bp, Homo sapien
agaagtctgtttcccgatcgccact

SEQ ID NO: 1161103 - DNA, 25 bp, Homo sapien
cttggttgcatgctgggtcttcgtt

SEQ ID NO: 1161104 - DNA, 25 bp, Homo sapien
gggccagttcagtttgcgccccgac

SEQ ID NO: 1161105 - DNA, 25 bp, Homo sapien
gaagtcccattgtagttcagtacaa

SEQ ID NO: 1161106 - DNA, 25 bp, Homo sapien
ggtcttcgttgtcaaagccacattt

SEQ ID NO: 1161107 - DNA, 25 bp, Homo sapien
cagcatctctgggatggaggcctgg

SEQ ID NO: 1161108 - DNA, 25 bp, Homo sapien
tgcttaggggaaggatgcagcatct

SEQ ID NO: 1161109 - DNA, 25 bp, Homo sapien
tcgactgtgcttaggggaaggatgc

SEQ ID NO: 1161110 - DNA, 25 bp, Homo sapien
aaggatgcagcatctctgggatgga

SEQ ID NO: 1161111 - DNA, 25 bp, Homo sapien
gacaatcagaatgccgagcaaggag

SEQ ID NO: 1161112 - DNA, 25 bp, Homo sapien
tcagaatgccgagcaaggagaggct

SEQ ID NO: 1161113 - DNA, 25 bp, Homo sapien
ctgtatatgaagaaggagacaatca

SEQ ID NO: 1161114 - DNA, 25 bp, Homo sapien
ggagacaatcagaatgccgagcaag

SEQ ID NO: 1161115 - DNA, 25 bp, Homo sapien
ctgggatacgaaggctgcatctgag

SEQ ID NO: 1161116 - DNA, 25 bp, Homo sapien
tgggatacgaaggctgcatctgagc

SEQ ID NO: 1161117 - DNA, 25 bp, Homo sapien
gggatacgaaggctgcatctgagcc

SEQ ID NO: 1161118 - DNA, 25 bp, Homo sapien
agcgcacccgccacagctccgaggc

SEQ ID NO: 1161119 - DNA, 25 bp, Homo sapien
ccgctcagggtcagccggctgcctg

SEQ ID NO: 1161120 - DNA, 25 bp, Homo sapien
gctgcctgcactccgcaggtgcctc

SEQ ID NO: 1161121 - DNA, 25 bp, Homo sapien
ggctcaacgtcctcccagcgcaccc

SEQ ID NO: 1161122 - DNA, 25 bp, Homo sapien
agacttggaactggccctctgtggt

SEQ ID NO: 1161123 - DNA, 25 bp, Homo sapien
gtggttagcagggagccgtaattgg

SEQ ID NO: 1161124 - DNA, 25 bp, Homo sapien
aaagacttggaactggccctctgtg

SEQ ID NO: 1161125 - DNA, 25 bp, Homo sapien
gcagggagccgtaattggagcctct

SEQ ID NO: 1161126 - DNA, 25 bp, Homo sapien
gcttcagttcaaacaggacttttcg

SEQ ID NO: 1161127 - DNA, 25 bp, Homo sapien
gctcaatgcgtttacggttcacacg

SEQ ID NO: 1161128 - DNA, 25 bp, Homo sapien
ggttcacacgtttcacagccacgag

SEQ ID NO: 1161129 - DNA, 25 bp, Homo sapien
caaacaggacttttcgtgtcagctc

SEQ ID NO: 1161130 - DNA, 25 bp, Homo sapien
tgaggatgcagatattgggggggtc

SEQ ID NO: 1161131 - DNA, 25 bp, Homo sapien
tggtcaggtgttcattctgcacatc

SEQ ID NO: 1161132 - DNA, 25 bp, Homo sapien
ggtgttcattctgcacatcccgcat

SEQ ID NO: 1161133 - DNA, 25 bp, Homo sapien
tcccacggggacagtactctgtgag

SEQ ID NO: 1161134 - DNA, 25 bp, Homo sapien
ggtgagtgagtaccggaacatccag

SEQ ID NO: 1161135 - DNA, 25 bp, Homo sapien
gacgatgtcattggtgagtgagtac

SEQ ID NO: 1161136 - DNA, 25 bp, Homo sapien
attggtgagtgagtaccggaacatc

SEQ ID NO: 1161137 - DNA, 25 bp, Homo sapien
tgtcattggtgagtgagtaccggaa

SEQ ID NO: 1161138 - DNA, 25 bp, Homo sapien
atcttgagcacaaagcgcccatcta

SEQ ID NO: 1161139 - DNA, 25 bp, Homo sapien
gcccatctaccacgcagttggatga

SEQ ID NO: 1161140 - DNA, 25 bp, Homo sapien
agctctccagcccatagtcggtgat

SEQ ID NO: 1161141 - DNA, 25 bp, Homo sapien
gttcccatgggaacagatagcccca

SEQ ID NO: 1161142 - DNA, 25 bp, Homo sapien
ccactcctcagggcaatctcctgaa

SEQ ID NO: 1161143 - DNA, 25 bp, Homo sapien
tgatcccaaagctgtatacgtcacc

SEQ ID NO: 1161144 - DNA, 25 bp, Homo sapien
tgaagccattcgcaggagctcaggg

SEQ ID NO: 1161145 - DNA, 25 bp, Homo sapien
atgatcccaaagctgtatacgtcac

SEQ ID NO: 1161146 - DNA, 25 bp, Homo sapien
tttgcgcaacgtcaggcggatctgc

SEQ ID NO: 1161147 - DNA, 25 bp, Homo sapien
caacgtcaggcggatctgctggaat

SEQ ID NO: 1161148 - DNA, 25 bp, Homo sapien
gttaaatttgcgcaacgtcaggcgg

SEQ ID NO: 1161149 - DNA, 25 bp, Homo sapien
caccccgagtcacccgctcgatgat

SEQ ID NO: 1161150 - DNA, 25 bp, Homo sapien
tctgccactgctgggataagccaga

SEQ ID NO: 1161151 - DNA, 25 bp, Homo sapien
taagccagagccagaagcattaggt

SEQ ID NO: 1161152 - DNA, 25 bp, Homo sapien
agctggagctgactatgtacaggga

SEQ ID NO: 1161153 - DNA, 25 bp, Homo sapien
ggaggtgagtggtctccctctgcca

SEQ ID NO: 1161154 - DNA, 25 bp, Homo sapien
tgggtccgctcctccaccagttcct

SEQ ID NO: 1161155 - DNA, 25 bp, Homo sapien
gcgtactgctccatgcgggacagca

SEQ ID NO: 1161156 - DNA, 25 bp, Homo sapien
tcctccaggtatgcctgggtccgct

SEQ ID NO: 1161157 - DNA, 25 bp, Homo sapien
gttcctccagattgttcgcgtactg

SEQ ID NO: 1161158 - DNA, 25 bp, Homo sapien
gtctccccacgcttcagctgctcag

SEQ ID NO: 1161159 - DNA, 25 bp, Homo sapien
cgacagcgctgtgaaacccacaatg

SEQ ID NO: 1161160 - DNA, 25 bp, Homo sapien
atgggtgtgctctccgccgacagcg

SEQ ID NO: 1161161 - DNA, 25 bp, Homo sapien
cactgtcaaaggcttcggcctgcac

SEQ ID NO: 1161162 - DNA, 25 bp, Homo sapien
tacaggtcattgagcagggtcacca

SEQ ID NO: 1161163 - DNA, 25 bp, Homo sapien
tgtacaggtcattgagcagggtcac

SEQ ID NO: 1161164 - DNA, 25 bp, Homo sapien
gcaagtgtacaggtcattgagcagg

SEQ ID NO: 1161165 - DNA, 25 bp, Homo sapien
agtgtacaggtcattgagcagggtc

SEQ ID NO: 1161166 - DNA, 25 bp, Homo sapien
gtagccgcccgttccgcacagggag

SEQ ID NO: 1161167 - DNA, 25 bp, Homo sapien
atgcgggctacctcgcaggcgtgta

SEQ ID NO: 1161168 - DNA, 25 bp, Homo sapien
tgtgtggatgccaatgcgcaagcgc

SEQ ID NO: 1161169 - DNA, 25 bp, Homo sapien
catgtaggcatcgccaattgtctcc

SEQ ID NO: 1161170 - DNA, 25 bp, Homo sapien
tgtatccccaaagagacagtaacgg

SEQ ID NO: 1161171 - DNA, 25 bp, Homo sapien
ccattcttgaggctgtgttgactgt

SEQ ID NO: 1161172 - DNA, 25 bp, Homo sapien
agactccattcttgaggctgtgttg

SEQ ID NO: 1161173 - DNA, 25 bp, Homo sapien
ctgtgttgactgtatccccaaagag

SEQ ID NO: 1161174 - DNA, 25 bp, Homo sapien
gcttcttgcaatcctgagatagaca

SEQ ID NO: 1161175 - DNA, 25 bp, Homo sapien
gattcacagcctcacttatgctggc

SEQ ID NO: 1161176 - DNA, 25 bp, Homo sapien
cagataatccgctaaggcttggaaa

SEQ ID NO: 1161177 - DNA, 25 bp, Homo sapien
gtaccagggtttgtgctaggcttct

SEQ ID NO: 1161178 - DNA, 25 bp, Homo sapien
ttctacatcccctcgaagctccagc

SEQ ID NO: 1161179 - DNA, 25 bp, Homo sapien
cttggtctcagaagacaagtggatc

SEQ ID NO: 1161180 - DNA, 25 bp, Homo sapien
ctcgaaaccaccaaactcctccagg

SEQ ID NO: 1161181 - DNA, 25 bp, Homo sapien
ggtctcagaagacaagtggatcttc

SEQ ID NO: 1161182 - DNA, 25 bp, Homo sapien
gagagccttagggatgggagtggca

SEQ ID NO: 1161183 - DNA, 25 bp, Homo sapien
ttgagaagggtaactccctctagga

SEQ ID NO: 1161184 - DNA, 25 bp, Homo sapien
gctgcttgagaagggtaactccctc

SEQ ID NO: 1161185 - DNA, 25 bp, Homo sapien
gatgggagtggcattggctgcttga

SEQ ID NO: 1161186 - DNA, 25 bp, Homo sapien
tcagcctcgggtgctactccccctc

SEQ ID NO: 1161187 - DNA, 25 bp, Homo sapien
agcctcgggtgctactccccctctc

SEQ ID NO: 1161188 - DNA, 25 bp, Homo sapien
gagccagtaggtccgaaccttgcct

SEQ ID NO: 1161189 - DNA, 25 bp, Homo sapien
cagtaggtccgaaccttgcctttgc

SEQ ID NO: 1161190 - DNA, 25 bp, Homo sapien
cagtaagtcacagggtagcaaggct

SEQ ID NO: 1161191 - DNA, 25 bp, Homo sapien
taattgtctctgctcatggtagaag

SEQ ID NO: 1161192 - DNA, 25 bp, Homo sapien
ggtcctatctggtgtcttcactggg

SEQ ID NO: 1161193 - DNA, 25 bp, Homo sapien
tcagcctgtaagctctgagatcccc

SEQ ID NO: 1161194 - DNA, 25 bp, Homo sapien
ttactgattagcatggaaatgttga

SEQ ID NO: 1161195 - DNA, 25 bp, Homo sapien
cataggctggatcccattactgatt

SEQ ID NO: 1161196 - DNA, 25 bp, Homo sapien
tactctgttttcgatgtgggccagt

SEQ ID NO: 1161197 - DNA, 25 bp, Homo sapien
accagatttatgcccaatgtggtgg

SEQ ID NO: 1161198 - DNA, 25 bp, Homo sapien
gtaggaagacctcggcggactggcc

SEQ ID NO: 1161199 - DNA, 25 bp, Homo sapien
taggaagacctcggcggactggcct

SEQ ID NO: 1161200 - DNA, 25 bp, Homo sapien
aggaagacctcggcggactggcctt

SEQ ID NO: 1161201 - DNA, 25 bp, Homo sapien
ggtaggaagacctcggcggactggc

SEQ ID NO: 1161202 - DNA, 25 bp, Homo sapien
tggcctccgccaatagctgcttccg

SEQ ID NO: 1161203 - DNA, 25 bp, Homo sapien
gaagcggccatagtggaagggcggg

SEQ ID NO: 1161204 - DNA, 25 bp, Homo sapien
gggagaaatcgtctaggcccgcgcc

SEQ ID NO: 1161205 - DNA, 25 bp, Homo sapien
ccggaagtgagcagtcgcggcccct

SEQ ID NO: 1161206 - DNA, 25 bp, Homo sapien
ctatgggaggacggggaggaccagc

SEQ ID NO: 1161207 - DNA, 25 bp, Homo sapien
tgggaggacggggaggaccagcgtc

SEQ ID NO: 1161208 - DNA, 25 bp, Homo sapien
gaggacggggaggaccagcgtctcc

SEQ ID NO: 1161209 - DNA, 25 bp, Homo sapien
ggaggaccagcgtctccccacacca

SEQ ID NO: 1161210 - DNA, 25 bp, Homo sapien
ggagtgcagcgcctttggatccggc

SEQ ID NO: 1161211 - DNA, 25 bp, Homo sapien
gcttggggagtgcagcgcctttgga

SEQ ID NO: 1161212 - DNA, 25 bp, Homo sapien
ttggggagtgcagcgcctttggatc

SEQ ID NO: 1161213 - DNA, 25 bp, Homo sapien
ggggagtgcagcgcctttggatccg

SEQ ID NO: 1161214 - DNA, 25 bp, Homo sapien
gaaaggcgttggctccgaagtacag

SEQ ID NO: 1161215 - DNA, 25 bp, Homo sapien
gagcgtctgaccctaagaaaggagg

SEQ ID NO: 1161216 - DNA, 25 bp, Homo sapien
tccaaaaggccgcgcctgcgttggg

SEQ ID NO: 1161217 - DNA, 25 bp, Homo sapien
agaggcttccgcccctgaagaagtg

SEQ ID NO: 1161218 - DNA, 25 bp, Homo sapien
ggatggatggacagtcctagatatc

SEQ ID NO: 1161219 - DNA, 25 bp, Homo sapien
gatatcgggatctctggattgccag

SEQ ID NO: 1161220 - DNA, 25 bp, Homo sapien
cagtcctagatatcgggatctctgg

SEQ ID NO: 1161221 - DNA, 25 bp, Homo sapien
tggacagtcctagatatcgggatct

SEQ ID NO: 1161222 - DNA, 25 bp, Homo sapien
ggcatccaaactggttgaaagtagc

SEQ ID NO: 1161223 - DNA, 25 bp, Homo sapien
aactggttgaaagtagcagcctccc

SEQ ID NO: 1161224 - DNA, 25 bp, Homo sapien
ctctaactcatccttggcatccaaa

SEQ ID NO: 1161225 - DNA, 25 bp, Homo sapien
taactcatccttggcatccaaactg

SEQ ID NO: 1161226 - DNA, 25 bp, Homo sapien
taggagtggaaaggtatacgtgatc

SEQ ID NO: 1161227 - DNA, 25 bp, Homo sapien
aggggcaactatcaggtcccctgaa

SEQ ID NO: 1161228 - DNA, 25 bp, Homo sapien
taagtacatattctcgtttgtagga

SEQ ID NO: 1161229 - DNA, 25 bp, Homo sapien
tacgtgatcaactctgagatggcag

SEQ ID NO: 1161230 - DNA, 25 bp, Homo sapien
tgaatgcccacagaattatgaggga

SEQ ID NO: 1161231 - DNA, 25 bp, Homo sapien
tgcccacagaattatgagggaaaag

SEQ ID NO: 1161232 - DNA, 25 bp, Homo sapien
ccacagaattatgagggaaaagcat

SEQ ID NO: 1161233 - DNA, 25 bp, Homo sapien
gaatgcccacagaattatgagggaa

SEQ ID NO: 1161234 - DNA, 25 bp, Homo sapien
gggaatacattgttcacattcataa

SEQ ID NO: 1161235 - DNA, 25 bp, Homo sapien
tacattgttcacattcataattata

SEQ ID NO: 1161236 - DNA, 25 bp, Homo sapien
gaatacattgttcacattcataatt

SEQ ID NO: 1161237 - DNA, 25 bp, Homo sapien
ttttgggaatacattgttcacattc

SEQ ID NO: 1161238 - DNA, 25 bp, Homo sapien
caagcagaggtcagtcgatcaacac

SEQ ID NO: 1161239 - DNA, 25 bp, Homo sapien
ggataaccgaaccacacacattggg

SEQ ID NO: 1161240 - DNA, 25 bp, Homo sapien
tctgtgatgggaaaataaccaagcc

SEQ ID NO: 1161241 - DNA, 25 bp, Homo sapien
gataagcttcgaaaggcagaccttg

SEQ ID NO: 1161242 - DNA, 25 bp, Homo sapien
tgagacctatccagcgcttaagagg

SEQ ID NO: 1161243 - DNA, 25 bp, Homo sapien
caagctgcgttcaaagtattccaca

SEQ ID NO: 1161244 - DNA, 25 bp, Homo sapien
aaactagaagtgactcaaagcccag

SEQ ID NO: 1161245 - DNA, 25 bp, Homo sapien
gtattccacaaccatgagtcactgg

SEQ ID NO: 1161246 - DNA, 25 bp, Homo sapien
acaatgctcatacacctttccaatc

SEQ ID NO: 1161247 - DNA, 25 bp, Homo sapien
gatgtcacaatgctcatacaccttt

SEQ ID NO: 1161248 - DNA, 25 bp, Homo sapien
gtcacaatgctcatacacctttcca

SEQ ID NO: 1161249 - DNA, 25 bp, Homo sapien
cgatgtcacaatgctcatacacctt

SEQ ID NO: 1161250 - DNA, 25 bp, Homo sapien
gagggcatcattggcttctctctcc

SEQ ID NO: 1161251 - DNA, 25 bp, Homo sapien
atacgcattgagggcatcattggct

SEQ ID NO: 1161252 - DNA, 25 bp, Homo sapien
ctctctccgagacaccagcagtcat

SEQ ID NO: 1161253 - DNA, 25 bp, Homo sapien
ttctctctccgagacaccagcagtc

SEQ ID NO: 1161254 - DNA, 25 bp, Homo sapien
ttcagtgaggatgagagtaaacagg

SEQ ID NO: 1161255 - DNA, 25 bp, Homo sapien
cagtgaggatgagagtaaacaggcc

SEQ ID NO: 1161256 - DNA, 25 bp, Homo sapien
gtgaggatgagagtaaacaggccca

SEQ ID NO: 1161257 - DNA, 25 bp, Homo sapien
caggttcagtgaggatgagagtaaa

SEQ ID NO: 1161258 - DNA, 25 bp, Homo sapien
ccatcacgactcaccagagctaagt

SEQ ID NO: 1161259 - DNA, 25 bp, Homo sapien
ctgagtacggcaggtatcctgcagc

SEQ ID NO: 1161260 - DNA, 25 bp, Homo sapien
agtacggcaggtatcctgcagcttc

SEQ ID NO: 1161261 - DNA, 25 bp, Homo sapien
tctccataagtatctggttgatttt

SEQ ID NO: 1161262 - DNA, 25 bp, Homo sapien
ggagcacattacaatttagacacac

SEQ ID NO: 1161263 - DNA, 25 bp, Homo sapien
taggggtgtgttagccctgattcct

SEQ ID NO: 1161264 - DNA, 25 bp, Homo sapien
tctttcccgttcctgacagagagaa

SEQ ID NO: 1161265 - DNA, 25 bp, Homo sapien
gagaagggagctaattcaattacaa

SEQ ID NO: 1161266 - DNA, 25 bp, Homo sapien
cactcttcaccagttcccgtaccaa

SEQ ID NO: 1161267 - DNA, 25 bp, Homo sapien
aacgtcatacaaacaccatcggctc

SEQ ID NO: 1161268 - DNA, 25 bp, Homo sapien
tgcttcataaacgtcatacaaacac

SEQ ID NO: 1161269 - DNA, 25 bp, Homo sapien
atacaaacaccatcggctcccagaa

SEQ ID NO: 1161270 - DNA, 25 bp, Homo sapien
cataccagtcttgggataagaagca

SEQ ID NO: 1161271 - DNA, 25 bp, Homo sapien
tatgcgatagctcagacagatgtca

SEQ ID NO: 1161272 - DNA, 25 bp, Homo sapien
cagatgtcaccgatgccaagatgag

SEQ ID NO: 1161273 - DNA, 25 bp, Homo sapien
gaatagctccgattagcaagtcagc

SEQ ID NO: 1161274 - DNA, 25 bp, Homo sapien
gtcaggatatccagaacactttctg

SEQ ID NO: 1161275 - DNA, 25 bp, Homo sapien
tccagaacactttctgccaaccaga

SEQ ID NO: 1161276 - DNA, 25 bp, Homo sapien
acactttctgccaaccagatatttt

SEQ ID NO: 1161277 - DNA, 25 bp, Homo sapien
ggatatccagaacactttctgccaa

SEQ ID NO: 1161278 - DNA, 25 bp, Homo sapien
tctaacttaaggtgttcttgggcca

SEQ ID NO: 1161279 - DNA, 25 bp, Homo sapien
ccaaggaggtctggatcaaaaataa

SEQ ID NO: 1161280 - DNA, 25 bp, Homo sapien
aaacccttatcagatgaagccagtt

SEQ ID NO: 1161281 - DNA, 25 bp, Homo sapien
gccagtttttctgggctatgcgata

SEQ ID NO: 1161282 - DNA, 25 bp, Homo sapien
aagtctacttccttctgtcgcaggg

SEQ ID NO: 1161283 - DNA, 25 bp, Homo sapien
cgttcccgaagcagtgagatgcaga

SEQ ID NO: 1161284 - DNA, 25 bp, Homo sapien
ggcagtcccatggtggtccacgatg

SEQ ID NO: 1161285 - DNA, 25 bp, Homo sapien
gaggtacgtgtaaacagccatggca

SEQ ID NO: 1161286 - DNA, 25 bp, Homo sapien
gaacaacatgttctagggagggaag

SEQ ID NO: 1161287 - DNA, 25 bp, Homo sapien
catggattgtttacctgctggaggg

SEQ ID NO: 1161288 - DNA, 25 bp, Homo sapien
aacatggattgtttacctgctggag

SEQ ID NO: 1161289 - DNA, 25 bp, Homo sapien
agggaggacaaaggaacaacatgtt

SEQ ID NO: 1161290 - DNA, 25 bp, Homo sapien
tagtcttacgagatcccgaccaatc

SEQ ID NO: 1161291 - DNA, 25 bp, Homo sapien
ctttccaaagcagttcaaattctgg

SEQ ID NO: 1161292 - DNA, 25 bp, Homo sapien
tcaaggcctgaggattatggataat

SEQ ID NO: 1161293 - DNA, 25 bp, Homo sapien
tcctagcaacattctgaagtagtct

SEQ ID NO: 1161294 - DNA, 25 bp, Homo sapien
ctgaatcaaatgtggaagggaagag

SEQ ID NO: 1161295 - DNA, 25 bp, Homo sapien
gggttagacgacatgctaggaattt

SEQ ID NO: 1161296 - DNA, 25 bp, Homo sapien
ttcgggatgttcttgactgaagaag

SEQ ID NO: 1161297 - DNA, 25 bp, Homo sapien
aggagtttagtctccatgtccgggg

SEQ ID NO: 1161298 - DNA, 25 bp, Homo sapien
catgctaggaattttcgggatgttc

SEQ ID NO: 1161299 - DNA, 25 bp, Homo sapien
tatctctcttattcgacagtgtacc

SEQ ID NO: 1161300 - DNA, 25 bp, Homo sapien
gtaacagctccacagaccgaagcaa

SEQ ID NO: 1161301 - DNA, 25 bp, Homo sapien
aagccagtagccaggtagatcaggt

SEQ ID NO: 1161302 - DNA, 25 bp, Homo sapien
tcaggtacgatcatttagccaccat

SEQ ID NO: 1161303 - DNA, 25 bp, Homo sapien
caatcaaattatctaggagagtggg

SEQ ID NO: 1161304 - DNA, 25 bp, Homo sapien
aagtaattctgccattattcagtca

SEQ ID NO: 1161305 - DNA, 25 bp, Homo sapien
tattcagtcaagtctggaaacatac

SEQ ID NO: 1161306 - DNA, 25 bp, Homo sapien
tccaggaagctgcatctttaacatg

SEQ ID NO: 1161307 - DNA, 25 bp, Homo sapien
tagaagggtggactaccccacagat

SEQ ID NO: 1161308 - DNA, 25 bp, Homo sapien
cccacagatgtagcgaatgaggtca

SEQ ID NO: 1161309 - DNA, 25 bp, Homo sapien
gaatgaggtcacagcgcagagactg

SEQ ID NO: 1161310 - DNA, 25 bp, Homo sapien
tactggcgctggaaccaatcttggt

SEQ ID NO: 1161311 - DNA, 25 bp, Homo sapien
acagtcagactagcaccccttggct

SEQ ID NO: 1161312 - DNA, 25 bp, Homo sapien
gttcatatctctgattcccataggg

SEQ ID NO: 1161313 - DNA, 25 bp, Homo sapien
gggacaatgcttggactcagaagtc

SEQ ID NO: 1161314 - DNA, 25 bp, Homo sapien
gctcggcaggcctgggttcttgata

SEQ ID NO: 1161315 - DNA, 25 bp, Homo sapien
tggcattggaggcagcgacatttga

SEQ ID NO: 1161316 - DNA, 25 bp, Homo sapien
ctaaagaacagccagtcataaaaca

SEQ ID NO: 1161317 - DNA, 25 bp, Homo sapien
ccagcttggcattggaggcagcgac

SEQ ID NO: 1161318 - DNA, 25 bp, Homo sapien
gctatccttgtctggactaaagaac

SEQ ID NO: 1161319 - DNA, 25 bp, Homo sapien
tccacggtgccctgagatttatgac

SEQ ID NO: 1161320 - DNA, 25 bp, Homo sapien
gcaattctctttctaggtcaaggga

SEQ ID NO: 1161321 - DNA, 25 bp, Homo sapien
ggatgtgaaattaaagagcccctca

SEQ ID NO: 1161322 - DNA, 25 bp, Homo sapien
gaccatgcatcctgaagactgtggg

SEQ ID NO: 1161323 - DNA, 25 bp, Homo sapien
tcatggagtggtgcatgaccaggat

SEQ ID NO: 1161324 - DNA, 25 bp, Homo sapien
gcttcatggagtggtgcatgaccag

SEQ ID NO: 1161325 - DNA, 25 bp, Homo sapien
ggcttcatggagtggtgcatgacca

SEQ ID NO: 1161326 - DNA, 25 bp, Homo sapien
tggtgcatgaccaggatggctggtt

SEQ ID NO: 1161327 - DNA, 25 bp, Homo sapien
gaggcttccgctgaattagatctga

SEQ ID NO: 1161328 - DNA, 25 bp, Homo sapien
ccatccttgtgattgagaaacccca

SEQ ID NO: 1161329 - DNA, 25 bp, Homo sapien
tgaattctgctcatccaggcatggg

SEQ ID NO: 1161330 - DNA, 25 bp, Homo sapien
gagaaattcttactggacctggctg

SEQ ID NO: 1161331 - DNA, 25 bp, Homo sapien
ttgagggaggaaaagacaccctgcc

SEQ ID NO: 1161332 - DNA, 25 bp, Homo sapien
cgcacgtggccctccaatggtggat

SEQ ID NO: 1161333 - DNA, 25 bp, Homo sapien
cctccaatggtggatagaagttggg

SEQ ID NO: 1161334 - DNA, 25 bp, Homo sapien
gccaagacccgtttctccacaatgt

SEQ ID NO: 1161335 - DNA, 25 bp, Homo sapien
tggcaacatttggatacacctggac

SEQ ID NO: 1161336 - DNA, 25 bp, Homo sapien
atacacctggacctaatgaaaaatg

SEQ ID NO: 1161337 - DNA, 25 bp, Homo sapien
acacctggacctaatgaaaaatggg

SEQ ID NO: 1161338 - DNA, 25 bp, Homo sapien
tacacctggacctaatgaaaaatgg

SEQ ID NO: 1161339 - DNA, 25 bp, Homo sapien
gacatatgcccagcagtctgaggta

SEQ ID NO: 1161340 - DNA, 25 bp, Homo sapien
aagagccaagaagacatatgcccag

SEQ ID NO: 1161341 - DNA, 25 bp, Homo sapien
aatacgatggcaggagagaaattcc

SEQ ID NO: 1161342 - DNA, 25 bp, Homo sapien
gaggtagagccaatactttttacac

SEQ ID NO: 1161343 - DNA, 25 bp, Homo sapien
tgaaggtcaatatcagagcttctct

SEQ ID NO: 1161344 - DNA, 25 bp, Homo sapien
gcacaatcagtctaactggaccata

SEQ ID NO: 1161345 - DNA, 25 bp, Homo sapien
caacatggagttgagataggtctaa

SEQ ID NO: 1161346 - DNA, 25 bp, Homo sapien
ggaccatactcagatccctgaaggg

SEQ ID NO: 1161347 - DNA, 25 bp, Homo sapien
ggtgagctgcagaactcaggaaact

SEQ ID NO: 1161348 - DNA, 25 bp, Homo sapien
aacttctctctcagcattgcccgca

SEQ ID NO: 1161349 - DNA, 25 bp, Homo sapien
gcccgcagctccttatccaacttag

SEQ ID NO: 1161350 - DNA, 25 bp, Homo sapien
ttatccaacttagggttgtcaaaca

SEQ ID NO: 1161351 - DNA, 25 bp, Homo sapien
cgacatatggttgtccatctccatg

SEQ ID NO: 1161352 - DNA, 25 bp, Homo sapien
ctcttcatcgtcactgaaggctgcc

SEQ ID NO: 1161353 - DNA, 25 bp, Homo sapien
gcattgtcatagcaactctcatcct

SEQ ID NO: 1161354 - DNA, 25 bp, Homo sapien
ctctcatccttatccgacatatggt

SEQ ID NO: 1161355 - DNA, 25 bp, Homo sapien
taaggggtgatatcaactggctcct

SEQ ID NO: 1161356 - DNA, 25 bp, Homo sapien
gatagggtggaagcgaaactccctc

SEQ ID NO: 1161357 - DNA, 25 bp, Homo sapien
tccccttctgtagctggagtacttt

SEQ ID NO: 1161358 - DNA, 25 bp, Homo sapien
tggagtactttgtccctcagggact

SEQ ID NO: 1161359 - DNA, 25 bp, Homo sapien
gacctcacactgggcctccgtatca

SEQ ID NO: 1161360 - DNA, 25 bp, Homo sapien
ggacctggtccacaatttcctgcat

SEQ ID NO: 1161361 - DNA, 25 bp, Homo sapien
ctccaggacctggtccacaatttcc

SEQ ID NO: 1161362 - DNA, 25 bp, Homo sapien
ccaggacctggtccacaatttcctg

SEQ ID NO: 1161363 - DNA, 25 bp, Homo sapien
aggacctggtccacaatttcctgca

SEQ ID NO: 1161364 - DNA, 25 bp, Homo sapien
gcaggacctcccctcgaaagtgggc

SEQ ID NO: 1161365 - DNA, 25 bp, Homo sapien
tgaagagctcctgtaggcaggaagc

SEQ ID NO: 1161366 - DNA, 25 bp, Homo sapien
acagacagctgctccgagtcaaagt

SEQ ID NO: 1161367 - DNA, 25 bp, Homo sapien
tcaggcaggacctcccctcgaaagt

SEQ ID NO: 1161368 - DNA, 25 bp, Homo sapien
aaatattaggtacagaggctttcct

SEQ ID NO: 1161369 - DNA, 25 bp, Homo sapien
tacagaggctttcctacagactcct

SEQ ID NO: 1161370 - DNA, 25 bp, Homo sapien
acagaggctttcctacagactcctc

SEQ ID NO: 1161371 - DNA, 25 bp, Homo sapien
ggtacagaggctttcctacagactc

SEQ ID NO: 1161372 - DNA, 25 bp, Homo sapien
tatagctcggagagaaggtctagaa

SEQ ID NO: 1161373 - DNA, 25 bp, Homo sapien
tgcttctgatatagctcggagagaa

SEQ ID NO: 1161374 - DNA, 25 bp, Homo sapien
gtagtagagcaggtggtagccaatc

SEQ ID NO: 1161375 - DNA, 25 bp, Homo sapien
caggtggtagccaatcttgggctgc

SEQ ID NO: 1161376 - DNA, 25 bp, Homo sapien
gaaggccctggtgatgacagtccag

SEQ ID NO: 1161377 - DNA, 25 bp, Homo sapien
cagtccagggttggggagtcagcgt

SEQ ID NO: 1161378 - DNA, 25 bp, Homo sapien
aagaaggccctggtgatgacagtcc

SEQ ID NO: 1161379 - DNA, 25 bp, Homo sapien
gttggggagtcagcgtgtggaagag

SEQ ID NO: 1161380 - DNA, 25 bp, Homo sapien
aagctactgccggatgagagtcagg

SEQ ID NO: 1161381 - DNA, 25 bp, Homo sapien
aagggctccaaccacgatcagtgag

SEQ ID NO: 1161382 - DNA, 25 bp, Homo sapien
tctgggctctaaccatgagggcagt

SEQ ID NO: 1161383 - DNA, 25 bp, Homo sapien
aggctcccgctctaaaactgctttg

SEQ ID NO: 1161384 - DNA, 25 bp, Homo sapien
catgtccatcatcaggcaggtgtgc

SEQ ID NO: 1161385 - DNA, 25 bp, Homo sapien
tacaggttcatcttccctgcggcgg

SEQ ID NO: 1161386 - DNA, 25 bp, Homo sapien
tgcagatcgcccagctgggtagcct

SEQ ID NO: 1161387 - DNA, 25 bp, Homo sapien
ctgggcaaatgactcgtacaggttc

SEQ ID NO: 1161388 - DNA, 25 bp, Homo sapien
gccacgatcatgttcagcagctctc

SEQ ID NO: 1161389 - DNA, 25 bp, Homo sapien
ttcagcagctctccgctcctcaagg

SEQ ID NO: 1161390 - DNA, 25 bp, Homo sapien
cgctcctcaaggtttcatctggaaa

SEQ ID NO: 1161391 - DNA, 25 bp, Homo sapien
agagtcaataacagccacgatcatg

SEQ ID NO: 1161392 - DNA, 25 bp, Homo sapien
ttacccatcatcacgtggcagacca

SEQ ID NO: 1161393 - DNA, 25 bp, Homo sapien
cataaccaggttacccatcatcacg

SEQ ID NO: 1161394 - DNA, 25 bp, Homo sapien
tgagtcttttcgaaacataaccagg

SEQ ID NO: 1161395 - DNA, 25 bp, Homo sapien
gaactgagtcttttcgaaacataac

SEQ ID NO: 1161396 - DNA, 25 bp, Homo sapien
ggggattatggtctccaggggaata

SEQ ID NO: 1161397 - DNA, 25 bp, Homo sapien
agctgccaggcacaatactgctcaa

SEQ ID NO: 1161398 - DNA, 25 bp, Homo sapien
agagctgccaggcacaatactgctc

SEQ ID NO: 1161399 - DNA, 25 bp, Homo sapien
ctccaggggaatattgtgggccaga

SEQ ID NO: 1161400 - DNA, 25 bp, Homo sapien
cggagttgaagcagtaggcaggaca

SEQ ID NO: 1161401 - DNA, 25 bp, Homo sapien
agggacttgatgtgctcggccagca

SEQ ID NO: 1161402 - DNA, 25 bp, Homo sapien
tctcttgcgaggcaggctgttgttc

SEQ ID NO: 1161403 - DNA, 25 bp, Homo sapien
tgaactggtcgtcaggatggcaggg

SEQ ID NO: 1161404 - DNA, 25 bp, Homo sapien
tgtttcatgcaccagtgccgcagga

SEQ ID NO: 1161405 - DNA, 25 bp, Homo sapien
tgagccgcagattgtccaagtgctc

SEQ ID NO: 1161406 - DNA, 25 bp, Homo sapien
ttctgcttggtgttggtcaggttga

SEQ ID NO: 1161407 - DNA, 25 bp, Homo sapien
caggttgagccgcagattgtccaag

SEQ ID NO: 1161408 - DNA, 25 bp, Homo sapien
agttctgcttggtgttggtcaggtt

SEQ ID NO: 1161409 - DNA, 25 bp, Homo sapien
tggccccgggtgtcctgcccctgcc

SEQ ID NO: 1161410 - DNA, 25 bp, Homo sapien
tgttttatcccgagtgtgggttgtg

SEQ ID NO: 1161411 - DNA, 25 bp, Homo sapien
tctacactggacgccgagggtggaa

SEQ ID NO: 1161412 - DNA, 25 bp, Homo sapien
ctacactggacgccgagggtggaag

SEQ ID NO: 1161413 - DNA, 25 bp, Homo sapien
tgggagcttattaaacagcacgcac

SEQ ID NO: 1161414 - DNA, 25 bp, Homo sapien
tctgggagcttattaaacagcacgc

SEQ ID NO: 1161415 - DNA, 25 bp, Homo sapien
tgtctgggagcttattaaacagcac

SEQ ID NO: 1161416 - DNA, 25 bp, Homo sapien
atgtctgggagcttattaaacagca

SEQ ID NO: 1161417 - DNA, 25 bp, Homo sapien
atcttgtgggcttcgtcacagctcg

SEQ ID NO: 1161418 - DNA, 25 bp, Homo sapien
gtgggcttcgtcacagctcgcttgg

SEQ ID NO: 1161419 - DNA, 25 bp, Homo sapien
cagcgcctggagaattggcgtctgg

SEQ ID NO: 1161420 - DNA, 25 bp, Homo sapien
cttgtgggcttcgtcacagctcgct

SEQ ID NO: 1161421 - DNA, 25 bp, Homo sapien
atattcctccgccagggagaagaga

SEQ ID NO: 1161422 - DNA, 25 bp, Homo sapien
gcttttcgccggctcttgggtggct

SEQ ID NO: 1161423 - DNA, 25 bp, Homo sapien
tgtgtggcattctttcgacttcgag

SEQ ID NO: 1161424 - DNA, 25 bp, Homo sapien
tggagcccgactcttcttcggcatt

SEQ ID NO: 1161425 - DNA, 25 bp, Homo sapien
ccgcttggtaggcttcggtttcgtg

SEQ ID NO: 1161426 - DNA, 25 bp, Homo sapien
tgcagaggacccttttcgtttccgc

SEQ ID NO: 1161427 - DNA, 25 bp, Homo sapien
ctgcagaggacccttttcgtttccg

SEQ ID NO: 1161428 - DNA, 25 bp, Homo sapien
gcttcggtttcgtgtcttcctcttc

SEQ ID NO: 1161429 - DNA, 25 bp, Homo sapien
ggagagggcagtccagccgggggtg

SEQ ID NO: 1161430 - DNA, 25 bp, Homo sapien
aggagagggcagtccagccgggggt

SEQ ID NO: 1161431 - DNA, 25 bp, Homo sapien
aaggagagggcagtccagccggggg

SEQ ID NO: 1161432 - DNA, 25 bp, Homo sapien
ttaggaatggacaccctgaccacgt

SEQ ID NO: 1161433 - DNA, 25 bp, Homo sapien
tgtgaaacttgcctctgggactccc

SEQ ID NO: 1161434 - DNA, 25 bp, Homo sapien
cacactggcatgtggatagtgacta

SEQ ID NO: 1161435 - DNA, 25 bp, Homo sapien
tctggtgtagattgaggtgccaacc

SEQ ID NO: 1161436 - DNA, 25 bp, Homo sapien
cttttaagacacgattatctctgcc

SEQ ID NO: 1161437 - DNA, 25 bp, Homo sapien
tttaagacacgattatctctgccaa

SEQ ID NO: 1161438 - DNA, 25 bp, Homo sapien
caacttttaagacacgattatctct

SEQ ID NO: 1161439 - DNA, 25 bp, Homo sapien
aacttttaagacacgattatctctg

SEQ ID NO: 1161440 - DNA, 25 bp, Homo sapien
tctgcatagacagatcagtgcctgg

SEQ ID NO: 1161441 - DNA, 25 bp, Homo sapien
cggccattcttggtaggcacacaga

SEQ ID NO: 1161442 - DNA, 25 bp, Homo sapien
cacagacttcaactggaggatgaca

SEQ ID NO: 1161443 - DNA, 25 bp, Homo sapien
tgagaaatgagtaaggacaggcctc

SEQ ID NO: 1161444 - DNA, 25 bp, Homo sapien
ctccatcctggttttaattgggaca

SEQ ID NO: 1161445 - DNA, 25 bp, Homo sapien
cagcgggggaacaacagcatagcca

SEQ ID NO: 1161446 - DNA, 25 bp, Homo sapien
agctctgtgcagttcgcccaaactt

SEQ ID NO: 1161447 - DNA, 25 bp, Homo sapien
caaattttcggggtgaagaggagca

SEQ ID NO: 1161448 - DNA, 25 bp, Homo sapien
gccagggcgtttggatcgcagtcca

SEQ ID NO: 1161449 - DNA, 25 bp, Homo sapien
caaaagaatgaacttggcccctggc

SEQ ID NO: 1161450 - DNA, 25 bp, Homo sapien
tctaagttgtttctcggcttgggcg

SEQ ID NO: 1161451 - DNA, 25 bp, Homo sapien
ggaaaggtggaaacccagactgcca

SEQ ID NO: 1161452 - DNA, 25 bp, Homo sapien
tagggccgctcgttctagctgagac

SEQ ID NO: 1161453 - DNA, 25 bp, Homo sapien
ctgatcctcccttccgaaaacctag

SEQ ID NO: 1161454 - DNA, 25 bp, Homo sapien
aacctagggccgctcgttctagctg

SEQ ID NO: 1161455 - DNA, 25 bp, Homo sapien
ccgctcgttctagctgagacttctc

SEQ ID NO: 1161456 - DNA, 25 bp, Homo sapien
tgcggccagaggtgtagcttcagca

SEQ ID NO: 1161457 - DNA, 25 bp, Homo sapien
cagcagcggtagcaacagcagcagg

SEQ ID NO: 1161458 - DNA, 25 bp, Homo sapien
cagcggtagcaacagcagcaggggc

SEQ ID NO: 1161459 - DNA, 25 bp, Homo sapien
ctgcggccagaggtgtagcttcagc

SEQ ID NO: 1161460 - DNA, 25 bp, Homo sapien
aaggcgcgtgcagccctgttactct

SEQ ID NO: 1161461 - DNA, 25 bp, Homo sapien
cctctgagtagctaaagcgccgcga

SEQ ID NO: 1161462 - DNA, 25 bp, Homo sapien
ctcgaagagcccttttgcagcacag

SEQ ID NO: 1161463 - DNA, 25 bp, Homo sapien
gagctcgcaccgcaaaggccaagtc

SEQ ID NO: 1161464 - DNA, 25 bp, Homo sapien
ctccggcaaactccgcgccgcttcc

SEQ ID NO: 1161465 - DNA, 25 bp, Homo sapien
tcctccacctctggcggcaccgtcc

SEQ ID NO: 1161466 - DNA, 25 bp, Homo sapien
tcccctccggcaaactccgcgccgc

SEQ ID NO: 1161467 - DNA, 25 bp, Homo sapien
ttctccagcgctcccctcgccgctg

SEQ ID NO: 1161468 - DNA, 25 bp, Homo sapien
gccacagttgctccaggtgacagag

SEQ ID NO: 1161469 - DNA, 25 bp, Homo sapien
cgccacagttgctccaggtgacaga

SEQ ID NO: 1161470 - DNA, 25 bp, Homo sapien
gaggagcagcgccacagttgctcca

SEQ ID NO: 1161471 - DNA, 25 bp, Homo sapien
agcagcgccacagttgctccaggtg

SEQ ID NO: 1161472 - DNA, 25 bp, Homo sapien
gtgggcacaaaggcagtgcgcaggc

SEQ ID NO: 1161473 - DNA, 25 bp, Homo sapien
tggccagcccgaaccagagccacag

SEQ ID NO: 1161474 - DNA, 25 bp, Homo sapien
gcacaaaggcagtgcgcaggccggc

SEQ ID NO: 1161475 - DNA, 25 bp, Homo sapien
ttggccagcccgaaccagagccaca

SEQ ID NO: 1161476 - DNA, 25 bp, Homo sapien
ccttagtcagttcggagctccagcc

SEQ ID NO: 1161477 - DNA, 25 bp, Homo sapien
tctacctagaagagcctatgaccca

SEQ ID NO: 1161478 - DNA, 25 bp, Homo sapien
tgaggcctggaactcgactccttgg

SEQ ID NO: 1161479 - DNA, 25 bp, Homo sapien
gggatgagaccaagcctttctgtgg

SEQ ID NO: 1161480 - DNA, 25 bp, Homo sapien
gaagagaggtatcctggcactggcc

SEQ ID NO: 1161481 - DNA, 25 bp, Homo sapien
gtgaagatgtacaggcacgtgtctg

SEQ ID NO: 1161482 - DNA, 25 bp, Homo sapien
ggcccatccacttcagcggacactt

SEQ ID NO: 1161483 - DNA, 25 bp, Homo sapien
aaatcgctaattccagcagggtggg

SEQ ID NO: 1161484 - DNA, 25 bp, Homo sapien
gatgactgatccgagcagccttggg

SEQ ID NO: 1161485 - DNA, 25 bp, Homo sapien
cacagctgatagaagccctggcatt

SEQ ID NO: 1161486 - DNA, 25 bp, Homo sapien
cccagcagggaaccggacatgtggt

SEQ ID NO: 1161487 - DNA, 25 bp, Homo sapien
gagggcgaggtagatcacatcttcc

SEQ ID NO: 1161488 - DNA, 25 bp, Homo sapien
tacagagctcctggtgagtagggct

SEQ ID NO: 1161489 - DNA, 25 bp, Homo sapien
cagccttagaagaggtgaatgccct

SEQ ID NO: 1161490 - DNA, 25 bp, Homo sapien
tctagattatctaccctggaggact

SEQ ID NO: 1161491 - DNA, 25 bp, Homo sapien
tgtgggagtcacaccgtcaggaagc

SEQ ID NO: 1161492 - DNA, 25 bp, Homo sapien
ttggatttcagcaccactgtggccc

SEQ ID NO: 1161493 - DNA, 25 bp, Homo sapien
cttggatttcagcaccactgtggcc

SEQ ID NO: 1161494 - DNA, 25 bp, Homo sapien
ggttgacaaggtatcggcacagctc

SEQ ID NO: 1161495 - DNA, 25 bp, Homo sapien
atcggcacagctccccaatgtactg

SEQ ID NO: 1161496 - DNA, 25 bp, Homo sapien
ggctggttgacaaggtatcggcaca

SEQ ID NO: 1161497 - DNA, 25 bp, Homo sapien
tccccaatgtactggaacaccgtca

SEQ ID NO: 1161498 - DNA, 25 bp, Homo sapien
ccttcagaggccgtaagcatcagat

SEQ ID NO: 1161499 - DNA, 25 bp, Homo sapien
atggcctaggccatctctggctcct

SEQ ID NO: 1161500 - DNA, 25 bp, Homo sapien
aagatgcccgctcccggaagtgaat

SEQ ID NO: 1161501 - DNA, 25 bp, Homo sapien
gccggagcttcagcatcaagatgcc

SEQ ID NO: 1161502 - DNA, 25 bp, Homo sapien
gcgccccgctgtcctgtgtagttga

SEQ ID NO: 1161503 - DNA, 25 bp, Homo sapien
tgccagccggaccttatggccacgt

SEQ ID NO: 1161504 - DNA, 25 bp, Homo sapien
gcacaaaacgctcccaggtatctgg

SEQ ID NO: 1161505 - DNA, 25 bp, Homo sapien
ttgtaaagccaggaagcacgcccca

SEQ ID NO: 1161506 - DNA, 25 bp, Homo sapien
aaagggagacctgggtactggatca

SEQ ID NO: 1161507 - DNA, 25 bp, Homo sapien
tctgctgttccacgggttttcagtt

SEQ ID NO: 1161508 - DNA, 25 bp, Homo sapien
cagccctctgctgttccacgggttt

SEQ ID NO: 1161509 - DNA, 25 bp, Homo sapien
tactggatcattgcagtcacatgag

SEQ ID NO: 1161510 - DNA, 25 bp, Homo sapien
ggtgacatcatagcgaatcaaggag

SEQ ID NO: 1161511 - DNA, 25 bp, Homo sapien
tggtgacatcatagcgaatcaagga

SEQ ID NO: 1161512 - DNA, 25 bp, Homo sapien
catcatagcgaatcaaggagaaggg

SEQ ID NO: 1161513 - DNA, 25 bp, Homo sapien
gacatcatagcgaatcaaggagaag

SEQ ID NO: 1161514 - DNA, 25 bp, Homo sapien
gagatgtggccatacagtgcccctg

SEQ ID NO: 1161515 - DNA, 25 bp, Homo sapien
gtggccatacagtgcccctgggggt

SEQ ID NO: 1161516 - DNA, 25 bp, Homo sapien
tggccatacagtgcccctgggggtc

SEQ ID NO: 1161517 - DNA, 25 bp, Homo sapien
ctggagatgtggccatacagtgccc

SEQ ID NO: 1161518 - DNA, 25 bp, Homo sapien
ccagtctccaattccagtcctcctg

SEQ ID NO: 1161519 - DNA, 25 bp, Homo sapien
cagggtcaggagtggtgtcaccttt

SEQ ID NO: 1161520 - DNA, 25 bp, Homo sapien
gagtggtgtcacctttcccagagcc

SEQ ID NO: 1161521 - DNA, 25 bp, Homo sapien
tgtgccagcttcagcaccccgccca

SEQ ID NO: 1161522 - DNA, 25 bp, Homo sapien
cttggtcatcgcagaccagcaggtc

SEQ ID NO: 1161523 - DNA, 25 bp, Homo sapien
cagtacgatcatggaagcggagaaa

SEQ ID NO: 1161524 - DNA, 25 bp, Homo sapien
aggtgtctccagtacgatcatggaa

SEQ ID NO: 1161525 - DNA, 25 bp, Homo sapien
tctccagtacgatcatggaagcgga

SEQ ID NO: 1161526 - DNA, 25 bp, Homo sapien
gtacgatcatggaagcggagaaaac

SEQ ID NO: 1161527 - DNA, 25 bp, Homo sapien
gaatgagagattagcttaggaccca

SEQ ID NO: 1161528 - DNA, 25 bp, Homo sapien
cagaggtcagtgtcacagggatgaa

SEQ ID NO: 1161529 - DNA, 25 bp, Homo sapien
tgtccaggatgaaaaaccagttatg

SEQ ID NO: 1161530 - DNA, 25 bp, Homo sapien
ttcagaagctttggatcacagagat

SEQ ID NO: 1161531 - DNA, 25 bp, Homo sapien
gacctctgccacctcggttgtggcc

SEQ ID NO: 1161532 - DNA, 25 bp, Homo sapien
tcctgaagaaaatctagggcctcga

SEQ ID NO: 1161533 - DNA, 25 bp, Homo sapien
gaagaaaatctagggcctcgaagac

SEQ ID NO: 1161534 - DNA, 25 bp, Homo sapien
gccacctcggttgtggccacattct

SEQ ID NO: 1161535 - DNA, 25 bp, Homo sapien
ctggcacagtgactccatagacgtt

SEQ ID NO: 1161536 - DNA, 25 bp, Homo sapien
ggcacagtgactccatagacgttca

SEQ ID NO: 1161537 - DNA, 25 bp, Homo sapien
tggcacagtgactccatagacgttc

SEQ ID NO: 1161538 - DNA, 25 bp, Homo sapien
gcacagtgactccatagacgttcac

SEQ ID NO: 1161539 - DNA, 25 bp, Homo sapien
ctcgtgctccctgcgcccaagtact

SEQ ID NO: 1161540 - DNA, 25 bp, Homo sapien
gcccctccatggctgaccaccacga

SEQ ID NO: 1161541 - DNA, 25 bp, Homo sapien
tgaccaccacgaaggcctcgtgctc

SEQ ID NO: 1161542 - DNA, 25 bp, Homo sapien
tgcgcccaagtactaccaattcggg

SEQ ID NO: 1161543 - DNA, 25 bp, Homo sapien
gcataaggtggcaagttctcagaca

SEQ ID NO: 1161544 - DNA, 25 bp, Homo sapien
gacgcagaactagggctgccattcc

SEQ ID NO: 1161545 - DNA, 25 bp, Homo sapien
agctgcataaggtccaaagcgtggg

SEQ ID NO: 1161546 - DNA, 25 bp, Homo sapien
tcagacacgtgggtgtagagctgca

SEQ ID NO: 1161547 - DNA, 25 bp, Homo sapien
tgtggagtttgggagccatcaaact

SEQ ID NO: 1161548 - DNA, 25 bp, Homo sapien
ttttgttaaggagcaagtcttggga

SEQ ID NO: 1161549 - DNA, 25 bp, Homo sapien
cccacgtggttcaggggagttgcct

SEQ ID NO: 1161550 - DNA, 25 bp, Homo sapien
tcttcacggagtgtattacgttggg

SEQ ID NO: 1161551 - DNA, 25 bp, Homo sapien
tccagaacgtacagtgggtcagaca

SEQ ID NO: 1161552 - DNA, 25 bp, Homo sapien
ctggtccagaacgtacagtgggtca

SEQ ID NO: 1161553 - DNA, 25 bp, Homo sapien
gtgctggggtcgaagccctcatttg

SEQ ID NO: 1161554 - DNA, 25 bp, Homo sapien
gaagccctcatttgccatccgaact

SEQ ID NO: 1161555 - DNA, 25 bp, Homo sapien
caggagggcgctgtaccgggcagtt

SEQ ID NO: 1161556 - DNA, 25 bp, Homo sapien
ccaggagggcgctgtaccgggcagt

SEQ ID NO: 1161557 - DNA, 25 bp, Homo sapien
ggagggcgctgtaccgggcagttgt

SEQ ID NO: 1161558 - DNA, 25 bp, Homo sapien
agggcgctgtaccgggcagttgtga

SEQ ID NO: 1161559 - DNA, 25 bp, Homo sapien
cagagacagctggatcagctccagc

SEQ ID NO: 1161560 - DNA, 25 bp, Homo sapien
tattacaaaatagtgaccgcagttc

SEQ ID NO: 1161561 - DNA, 25 bp, Homo sapien
tcaggtgcctcaggtgtggaagttc

SEQ ID NO: 1161562 - DNA, 25 bp, Homo sapien
gaaaagatccctgacagcccagtac

SEQ ID NO: 1161563 - DNA, 25 bp, Homo sapien
tttttaatccctgaataagattcca

SEQ ID NO: 1161564 - DNA, 25 bp, Homo sapien
tccatcttgtagcctgtctcagcac

SEQ ID NO: 1161565 - DNA, 25 bp, Homo sapien
atccatcttgtagcctgtctcagca

SEQ ID NO: 1161566 - DNA, 25 bp, Homo sapien
agtgtctggtgttgtggcagcccga

SEQ ID NO: 1161567 - DNA, 25 bp, Homo sapien
tgttgtttaagccatgtagtgtctg

SEQ ID NO: 1161568 - DNA, 25 bp, Homo sapien
tgtttaagccatgtagtgtctggtg

SEQ ID NO: 1161569 - DNA, 25 bp, Homo sapien
ccatgtagtgtctggtgttgtggca

SEQ ID NO: 1161570 - DNA, 25 bp, Homo sapien
cgcgtggtgactccacgggaactca

SEQ ID NO: 1161571 - DNA, 25 bp, Homo sapien
aaggaaaggcgcgtggtgactccac

SEQ ID NO: 1161572 - DNA, 25 bp, Homo sapien
cgggaacgggattggccagcacctt

SEQ ID NO: 1161573 - DNA, 25 bp, Homo sapien
caatcgccgggaacgggattggcca

SEQ ID NO: 1161574 - DNA, 25 bp, Homo sapien
gaccttataagagaaggagagatct

SEQ ID NO: 1161575 - DNA, 25 bp, Homo sapien
acgcccggctggattagtgacctta

SEQ ID NO: 1161576 - DNA, 25 bp, Homo sapien
gaaggagagatctctccacgtgcac

SEQ ID NO: 1161577 - DNA, 25 bp, Homo sapien
agaaggagagatctctccacgtgca

SEQ ID NO: 1161578 - DNA, 25 bp, Homo sapien
ccagcctgggagcagcagcagcagc

SEQ ID NO: 1161579 - DNA, 25 bp, Homo sapien
cccagcctgggagcagcagcagcag

SEQ ID NO: 1161580 - DNA, 25 bp, Homo sapien
cacagcctgaacacggcggccccct

SEQ ID NO: 1161581 - DNA, 25 bp, Homo sapien
gcctgaacacggcggccccctgagg

SEQ ID NO: 1161582 - DNA, 25 bp, Homo sapien
agcacagcctgaacacggcggcccc

SEQ ID NO: 1161583 - DNA, 25 bp, Homo sapien
acagcctgaacacggcggccccctg

SEQ ID NO: 1161584 - DNA, 25 bp, Homo sapien
ttgccagctgtacccgggcctgtcg

SEQ ID NO: 1161585 - DNA, 25 bp, Homo sapien
ccacgcagtggtactcgtgggcacg

SEQ ID NO: 1161586 - DNA, 25 bp, Homo sapien
accactctcattggctaaggccagc

SEQ ID NO: 1161587 - DNA, 25 bp, Homo sapien
catctggcatcagggtgacaccact

SEQ ID NO: 1161588 - DNA, 25 bp, Homo sapien
actctcagcgagtctgggccccatg

SEQ ID NO: 1161589 - DNA, 25 bp, Homo sapien
cactgtgtctaatggctgggctggc

SEQ ID NO: 1161590 - DNA, 25 bp, Homo sapien
ggtgccttctgtgggtgccccacca

SEQ ID NO: 1161591 - DNA, 25 bp, Homo sapien
cctaaaagaatcagaggctctacca

SEQ ID NO: 1161592 - DNA, 25 bp, Homo sapien
tggttggcagtattcagggctgtgc

SEQ ID NO: 1161593 - DNA, 25 bp, Homo sapien
atcaggcactggaagcgagcaactc

SEQ ID NO: 1161594 - DNA, 25 bp, Homo sapien
atggctcaggcaccccctggatcag

SEQ ID NO: 1161595 - DNA, 25 bp, Homo sapien
cacctcaatggattctggatgttgg

SEQ ID NO: 1161596 - DNA, 25 bp, Homo sapien
actcagggtcagctgggcatcctgg

SEQ ID NO: 1161597 - DNA, 25 bp, Homo sapien
tgtggcgggtactggccacattcca

SEQ ID NO: 1161598 - DNA, 25 bp, Homo sapien
ggttcccatgtcagtctggctcaca

SEQ ID NO: 1161599 - DNA, 25 bp, Homo sapien
cacgcagcggtaggttcccatgtca

SEQ ID NO: 1161600 - DNA, 25 bp, Homo sapien
cactgccgtctggtgcactgtgagg

SEQ ID NO: 1161601 - DNA, 25 bp, Homo sapien
tgtgagggtcaggttctgaggccca

SEQ ID NO: 1161602 - DNA, 25 bp, Homo sapien
gcggctccaggagacaagcggccaa

SEQ ID NO: 1161603 - DNA, 25 bp, Homo sapien
caagggtgactggtggcaatgcact

SEQ ID NO: 1161604 - DNA, 25 bp, Homo sapien
tgctggactgagacgtcggagatca

SEQ ID NO: 1161605 - DNA, 25 bp, Homo sapien
cggagatcatgagattccctgtgtc

SEQ ID NO: 1161606 - DNA, 25 bp, Homo sapien
tccagaacttggatgccctctacgc

SEQ ID NO: 1161607 - DNA, 25 bp, Homo sapien
cgattggcggcgcagacatagacac

SEQ ID NO: 1161608 - DNA, 25 bp, Homo sapien
gatccaggctcctgtcagggagctg

SEQ ID NO: 1161609 - DNA, 25 bp, Homo sapien
ctctccagatccaggctcctgtcag

SEQ ID NO: 1161610 - DNA, 25 bp, Homo sapien
caatagcatggaggaaggtgccgtg

SEQ ID NO: 1161611 - DNA, 25 bp, Homo sapien
gaggaaggtgccgtgagacccagcc

SEQ ID NO: 1161612 - DNA, 25 bp, Homo sapien
tgttattcccaggactcaacacctt

SEQ ID NO: 1161613 - DNA, 25 bp, Homo sapien
ctgcccggaggcttggacaaggact

SEQ ID NO: 1161614 - DNA, 25 bp, Homo sapien
actgtggccactggacaaactcggg

SEQ ID NO: 1161615 - DNA, 25 bp, Homo sapien
cagaccagacgggactcagggacgc

SEQ ID NO: 1161616 - DNA, 25 bp, Homo sapien
gtggggagtggtgagacacgagtac

SEQ ID NO: 1161617 - DNA, 25 bp, Homo sapien
gggcagtggggagtggtgagacacg

SEQ ID NO: 1161618 - DNA, 25 bp, Homo sapien
ggcagtggggagtggtgagacacga

SEQ ID NO: 1161619 - DNA, 25 bp, Homo sapien
cagtggggagtggtgagacacgagt

SEQ ID NO: 1161620 - DNA, 25 bp, Homo sapien
tctgccacgcattgatagatggcct

SEQ ID NO: 1161621 - DNA, 25 bp, Homo sapien
tagatggcctcatcctcaactgaaa

SEQ ID NO: 1161622 - DNA, 25 bp, Homo sapien
cagaagtagagagagccatggcatg

SEQ ID NO: 1161623 - DNA, 25 bp, Homo sapien
ggtgcagcacgtagccaatgatgtc

SEQ ID NO: 1161624 - DNA, 25 bp, Homo sapien
tggagaagacgtgctcagaagtgcc

SEQ ID NO: 1161625 - DNA, 25 bp, Homo sapien
cccgcaaatggatggtgtaggctgt

SEQ ID NO: 1161626 - DNA, 25 bp, Homo sapien
ctgctgagtaggcccgcaaatggat

SEQ ID NO: 1161627 - DNA, 25 bp, Homo sapien
ggcctcttggagctccgggccagat

SEQ ID NO: 1161628 - DNA, 25 bp, Homo sapien
gcttgcggtgaaagtttgaagcctt

SEQ ID NO: 1161629 - DNA, 25 bp, Homo sapien
aggtggcattcagcactttggtgga

SEQ ID NO: 1161630 - DNA, 25 bp, Homo sapien
aggcagcttgcggtgaaagtttgaa

SEQ ID NO: 1161631 - DNA, 25 bp, Homo sapien
agaggtggcattcagcactttggtg

SEQ ID NO: 1161632 - DNA, 25 bp, Homo sapien
ggcacaggaaggttcagagcctcac

SEQ ID NO: 1161633 - DNA, 25 bp, Homo sapien
gggcaagatcacactgagaaaggca

SEQ ID NO: 1161634 - DNA, 25 bp, Homo sapien
gccttgagtggcacaggaaggttca

SEQ ID NO: 1161635 - DNA, 25 bp, Homo sapien
ttgagtggcacaggaaggttcagag

SEQ ID NO: 1161636 - DNA, 25 bp, Homo sapien
cattgaacgcctgcagcttgatgtc

SEQ ID NO: 1161637 - DNA, 25 bp, Homo sapien
catcacacaatgagacacagcgggc

SEQ ID NO: 1161638 - DNA, 25 bp, Homo sapien
gcttgatgtcatagagagcagccgg

SEQ ID NO: 1161639 - DNA, 25 bp, Homo sapien
ccattgccattgaacgcctgcagct

SEQ ID NO: 1161640 - DNA, 25 bp, Homo sapien
gaggaccagggttggaggtgaagcc

SEQ ID NO: 1161641 - DNA, 25 bp, Homo sapien
accagggttggaggtgaagcccagc

SEQ ID NO: 1161642 - DNA, 25 bp, Homo sapien
ctgtcagagagaggaccagggttgg

SEQ ID NO: 1161643 - DNA, 25 bp, Homo sapien
gttggaggtgaagcccagccctctt

SEQ ID NO: 1161644 - DNA, 25 bp, Homo sapien
ggctgcaagagcacccagtcttgga

SEQ ID NO: 1161645 - DNA, 25 bp, Homo sapien
gctgcaagagcacccagtcttggac

SEQ ID NO: 1161646 - DNA, 25 bp, Homo sapien
gatgcccaccacaaccccaggcagt

SEQ ID NO: 1161647 - DNA, 25 bp, Homo sapien
atgcccaccacaaccccaggcagtg

SEQ ID NO: 1161648 - DNA, 25 bp, Homo sapien
accccaggcagtgggctgctctcac

SEQ ID NO: 1161649 - DNA, 25 bp, Homo sapien
gtggatgcccaccacaaccccaggc

SEQ ID NO: 1161650 - DNA, 25 bp, Homo sapien
ttagctatgtctccagcccaggaag

SEQ ID NO: 1161651 - DNA, 25 bp, Homo sapien
gaggcaaatgatgagggcagccagg

SEQ ID NO: 1161652 - DNA, 25 bp, Homo sapien
gaggaggcaaatgatgagggcagcc

SEQ ID NO: 1161653 - DNA, 25 bp, Homo sapien
gcagaggaggcaaatgatgagggca

SEQ ID NO: 1161654 - DNA, 25 bp, Homo sapien
cagttctgtccgaggcagtccgagg

SEQ ID NO: 1161655 - DNA, 25 bp, Homo sapien
tctgagtctggccttgatggccccc

SEQ ID NO: 1161656 - DNA, 25 bp, Homo sapien
gggtggtgagttcagtcttctcccc

SEQ ID NO: 1161657 - DNA, 25 bp, Homo sapien
agtccgaggcactgcccagcattcc

SEQ ID NO: 1161658 - DNA, 25 bp, Homo sapien
ctaggccaaggccagctgttccaca

SEQ ID NO: 1161659 - DNA, 25 bp, Homo sapien
gccaaggccagctgttccacagtca

SEQ ID NO: 1161660 - DNA, 25 bp, Homo sapien
ccaaggccagctgttccacagtcac

SEQ ID NO: 1161661 - DNA, 25 bp, Homo sapien
aggccaaggccagctgttccacagt

SEQ ID NO: 1161662 - DNA, 25 bp, Homo sapien
tgaaccccgctaaaggcagctgttt

SEQ ID NO: 1161663 - DNA, 25 bp, Homo sapien
agcctgggctgagtactcctactct

SEQ ID NO: 1161664 - DNA, 25 bp, Homo sapien
tctttaggttctgggctgataaagc

SEQ ID NO: 1161665 - DNA, 25 bp, Homo sapien
tgggctgagtactcctactctcttc

SEQ ID NO: 1161666 - DNA, 25 bp, Homo sapien
ccttaggctgcgtgaaccgaggtga

SEQ ID NO: 1161667 - DNA, 25 bp, Homo sapien
tgtgaaagccaagacctcctggtcc

SEQ ID NO: 1161668 - DNA, 25 bp, Homo sapien
gacaatgctcttggagaactgccag

SEQ ID NO: 1161669 - DNA, 25 bp, Homo sapien
gaacctagtcttatgggcctttgag

SEQ ID NO: 1161670 - DNA, 25 bp, Homo sapien
tccctatcccccagcattaggttga

SEQ ID NO: 1161671 - DNA, 25 bp, Homo sapien
cgggggcatcgaaaccaagtattat

SEQ ID NO: 1161672 - DNA, 25 bp, Homo sapien
cccagcattaggttgatactgtggg

SEQ ID NO: 1161673 - DNA, 25 bp, Homo sapien
tatcccccagcattaggttgatact

SEQ ID NO: 1161674 - DNA, 25 bp, Homo sapien
tagccatggatattgtgaaactgtg

SEQ ID NO: 1161675 - DNA, 25 bp, Homo sapien
gcccgtttgtgtatgatccgtgcaa

SEQ ID NO: 1161676 - DNA, 25 bp, Homo sapien
gtgtatgatccgtgcaaaagggttt

SEQ ID NO: 1161677 - DNA, 25 bp, Homo sapien
tgtaatgtgcccgtttgtgtatgat

SEQ ID NO: 1161678 - DNA, 25 bp, Homo sapien
ccccagaggcactaaaagcagtatt

SEQ ID NO: 1161679 - DNA, 25 bp, Homo sapien
gtgtcttactccctggaagcctgaa

SEQ ID NO: 1161680 - DNA, 25 bp, Homo sapien
tattagtagagtgaggatcccacca

SEQ ID NO: 1161681 - DNA, 25 bp, Homo sapien
gaaagaccctctgtttggagcatta

SEQ ID NO: 1161682 - DNA, 25 bp, Homo sapien
ccgtgtagacactaaacctcatgcc

SEQ ID NO: 1161683 - DNA, 25 bp, Homo sapien
tacttgttactatccatctccaggc

SEQ ID NO: 1161684 - DNA, 25 bp, Homo sapien
tctgggccgtgtagacactaaacct

SEQ ID NO: 1161685 - DNA, 25 bp, Homo sapien
aggctctgggccgtgtagacactaa

SEQ ID NO: 1161686 - DNA, 25 bp, Homo sapien
tcttcccagggattagtgatggagg

SEQ ID NO: 1161687 - DNA, 25 bp, Homo sapien
ggtgaggtctccctaatcatggtaa

SEQ ID NO: 1161688 - DNA, 25 bp, Homo sapien
cactgattgccttgtgtccctccaa

SEQ ID NO: 1161689 - DNA, 25 bp, Homo sapien
tcatggtaaagtgttaaccttccac

SEQ ID NO: 1161690 - DNA, 25 bp, Homo sapien
ggaaagcctatagtcgagtgcctgc

SEQ ID NO: 1161691 - DNA, 25 bp, Homo sapien
gaggtacgagatgcccaagtttgtc

SEQ ID NO: 1161692 - DNA, 25 bp, Homo sapien
gaatgtgcaataccgtctggctggg

SEQ ID NO: 1161693 - DNA, 25 bp, Homo sapien
tgtggcatgtctgtctagcctcttc

SEQ ID NO: 1161694 - DNA, 25 bp, Homo sapien
tgggtgactatactggccctacggg

SEQ ID NO: 1161695 - DNA, 25 bp, Homo sapien
cattgagcacttaaaggagcagaga

SEQ ID NO: 1161696 - DNA, 25 bp, Homo sapien
attttgcccttgaaagtcacctgag

SEQ ID NO: 1161697 - DNA, 25 bp, Homo sapien
gctaaaatcaggctcagttccccta

SEQ ID NO: 1161698 - DNA, 25 bp, Homo sapien
tgaattatgaagtagcccagtgaag

SEQ ID NO: 1161699 - DNA, 25 bp, Homo sapien
ttgagtagcatcatggactttttgg

SEQ ID NO: 1161700 - DNA, 25 bp, Homo sapien
ggttctagagtatgtgaacatctca

SEQ ID NO: 1161701 - DNA, 25 bp, Homo sapien
aaaccccatttatgctctaggactg

SEQ ID NO: 1161702 - DNA, 25 bp, Homo sapien
aattgatccctaaatgttgaggtgg

SEQ ID NO: 1161703 - DNA, 25 bp, Homo sapien
tagagctttatgcagttacttggac

SEQ ID NO: 1161704 - DNA, 25 bp, Homo sapien
gttgaatcatcttgaccagaagtgg

SEQ ID NO: 1161705 - DNA, 25 bp, Homo sapien
tattcctgctgtgggattctacaca

SEQ ID NO: 1161706 - DNA, 25 bp, Homo sapien
tattggacttggcaacatgaaggta

SEQ ID NO: 1161707 - DNA, 25 bp, Homo sapien
taggcaattgactacatgaagagag

SEQ ID NO: 1161708 - DNA, 25 bp, Homo sapien
gatcatgagtgtagaataagaccca

SEQ ID NO: 1161709 - DNA, 25 bp, Homo sapien
taagacaacacccaaatggagatgt

SEQ ID NO: 1161710 - DNA, 25 bp, Homo sapien
tgtcaccagtgaatgatgcggccag

SEQ ID NO: 1161711 - DNA, 25 bp, Homo sapien
catccaaggtcaggccaagcatatg

SEQ ID NO: 1161712 - DNA, 25 bp, Homo sapien
cagttaacacctttcgttatgttga

SEQ ID NO: 1161713 - DNA, 25 bp, Homo sapien
tgacttgatggatttcttgttaaca

SEQ ID NO: 1161714 - DNA, 25 bp, Homo sapien
gagccttaggcctgtatggaacaga

SEQ ID NO: 1161715 - DNA, 25 bp, Homo sapien
ttaatgtccatgagccttaggcctg

SEQ ID NO: 1161716 - DNA, 25 bp, Homo sapien
gccttaggcctgtatggaacagagt

SEQ ID NO: 1161717 - DNA, 25 bp, Homo sapien
agccttaggcctgtatggaacagag

SEQ ID NO: 1161718 - DNA, 25 bp, Homo sapien
tctcccataactcaccaggcagaag

SEQ ID NO: 1161719 - DNA, 25 bp, Homo sapien
aacattcttgttactgggcctcttc

SEQ ID NO: 1161720 - DNA, 25 bp, Homo sapien
ggaaggaaggatatcccgtcactct

SEQ ID NO: 1161721 - DNA, 25 bp, Homo sapien
tgagaccttgatcctattcttgaag

SEQ ID NO: 1161722 - DNA, 25 bp, Homo sapien
tactgttgcttgcacaggctaaatg

SEQ ID NO: 1161723 - DNA, 25 bp, Homo sapien
atggctcactacagactagatcccc

SEQ ID NO: 1161724 - DNA, 25 bp, Homo sapien
tccgtcttggatttagcacttcatc

SEQ ID NO: 1161725 - DNA, 25 bp, Homo sapien
agctcaatcatcctacatacctcgg

SEQ ID NO: 1161726 - DNA, 25 bp, Homo sapien
agtggagcaatctccacttactgcg

SEQ ID NO: 1161727 - DNA, 25 bp, Homo sapien
gagcaatctccacttactgcgacct

SEQ ID NO: 1161728 - DNA, 25 bp, Homo sapien
tggagcaatctccacttactgcgac

SEQ ID NO: 1161729 - DNA, 25 bp, Homo sapien
cacctcgcccagcctttgtttgttt

SEQ ID NO: 1161730 - DNA, 25 bp, Homo sapien
aaaaaatcaagagattattttgtga

SEQ ID NO: 1161731 - DNA, 25 bp, Homo sapien
ggagttcagtggcactatggcggct

SEQ ID NO: 1161732 - DNA, 25 bp, Homo sapien
aaaaatcaagagattattttgtgac

SEQ ID NO: 1161733 - DNA, 25 bp, Homo sapien
gttcagtggcactatggcggcttac

SEQ ID NO: 1161734 - DNA, 25 bp, Homo sapien
taatgagctgcctaaactgtgtcac

SEQ ID NO: 1161735 - DNA, 25 bp, Homo sapien
cacttggcccggaagttgtgcattt

SEQ ID NO: 1161736 - DNA, 25 bp, Homo sapien
ggaggacagtgagatttttacccat

SEQ ID NO: 1161737 - DNA, 25 bp, Homo sapien
taaaggatactgttatggtgcacgg

SEQ ID NO: 1161738 - DNA, 25 bp, Homo sapien
ccaagcggaggtacgatgaacacca

SEQ ID NO: 1161739 - DNA, 25 bp, Homo sapien
cacttaatgggctgtcgaagacccg

SEQ ID NO: 1161740 - DNA, 25 bp, Homo sapien
tagtcttctactggcatggccgaga

SEQ ID NO: 1161741 - DNA, 25 bp, Homo sapien
cagcctgaagcgattttttgacccc

SEQ ID NO: 1161742 - DNA, 25 bp, Homo sapien
ggtttaaaccactgcttagtcacta

SEQ ID NO: 1161743 - DNA, 25 bp, Homo sapien
aaatgcctgtggaaccagttgtttc

SEQ ID NO: 1161744 - DNA, 25 bp, Homo sapien
ctaactagcggtctgacctttggca

SEQ ID NO: 1161745 - DNA, 25 bp, Homo sapien
tctaccacttaacgtgtaactggac

SEQ ID NO: 1161746 - DNA, 25 bp, Homo sapien
agcatgttaggatgctttttcagtg

SEQ ID NO: 1161747 - DNA, 25 bp, Homo sapien
ggagagtgaggtactacttctggat

SEQ ID NO: 1161748 - DNA, 25 bp, Homo sapien
tcctatcctgtcttgagcatgttag

SEQ ID NO: 1161749 - DNA, 25 bp, Homo sapien
tgctgagtctttcaagccagaggac

SEQ ID NO: 1161750 - DNA, 25 bp, Homo sapien
tagaggagtctcaagctccccttag

SEQ ID NO: 1161751 - DNA, 25 bp, Homo sapien
cctgcgaagttttgttggatgtaaa

SEQ ID NO: 1161752 - DNA, 25 bp, Homo sapien
caggtcctgacctgtgcaataagga

SEQ ID NO: 1161753 - DNA, 25 bp, Homo sapien
gcaataaggattgttccctgcgaag

SEQ ID NO: 1161754 - DNA, 25 bp, Homo sapien
tacacttgactggtaacaaaaggga

SEQ ID NO: 1161755 - DNA, 25 bp, Homo sapien
gcagggaaaggcatagagagttggg

SEQ ID NO: 1161756 - DNA, 25 bp, Homo sapien
gcatagagagttggggctggtctaa

SEQ ID NO: 1161757 - DNA, 25 bp, Homo sapien
cacttgactggtaacaaaagggata

SEQ ID NO: 1161758 - DNA, 25 bp, Homo sapien
ttggaaagcaagtggccgtctggca

SEQ ID NO: 1161759 - DNA, 25 bp, Homo sapien
gccaagctccggaatgttgtcctgg

SEQ ID NO: 1161760 - DNA, 25 bp, Homo sapien
tatttctaagcagcaaggtctgggt

SEQ ID NO: 1161761 - DNA, 25 bp, Homo sapien
tcttctaggccccttgggaggcagc

SEQ ID NO: 1161762 - DNA, 25 bp, Homo sapien
gcacttgtaactttgaaccgtctgt

SEQ ID NO: 1161763 - DNA, 25 bp, Homo sapien
ggaactcaagggagggcctaaagca

SEQ ID NO: 1161764 - DNA, 25 bp, Homo sapien
aaccgtctgtctggaggtcagagcc

SEQ ID NO: 1161765 - DNA, 25 bp, Homo sapien
gaagcagggcttttccggatgccta

SEQ ID NO: 1161766 - DNA, 25 bp, Homo sapien
ggattcatctcggagcactcggcac

SEQ ID NO: 1161767 - DNA, 25 bp, Homo sapien
cactcggcaccatgggctggtggaa

SEQ ID NO: 1161768 - DNA, 25 bp, Homo sapien
aacgggtgcagcgagatcctcgaag

SEQ ID NO: 1161769 - DNA, 25 bp, Homo sapien
gatcctcgaagaatggtgtccccac

SEQ ID NO: 1161770 - DNA, 25 bp, Homo sapien
catgcccagatgataaacactgagc

SEQ ID NO: 1161771 - DNA, 25 bp, Homo sapien
tggtctctccctgccaattttggta

SEQ ID NO: 1161772 - DNA, 25 bp, Homo sapien
gggactggcgccaaatggtctctcc

SEQ ID NO: 1161773 - DNA, 25 bp, Homo sapien
taggaggaaggttgttgcagccatc

SEQ ID NO: 1161774 - DNA, 25 bp, Homo sapien
tatacataaggacaggctcacatgg

SEQ ID NO: 1161775 - DNA, 25 bp, Homo sapien
tcagtgtcctgttggtcctagccca

SEQ ID NO: 1161776 - DNA, 25 bp, Homo sapien
ggtcataaacctagagtcagtgtcc

SEQ ID NO: 1161777 - DNA, 25 bp, Homo sapien
ggaacaagagatggtcaagtcgcta

SEQ ID NO: 1161778 - DNA, 25 bp, Homo sapien
gtcattctgctcctagcaggctttg

SEQ ID NO: 1161779 - DNA, 25 bp, Homo sapien
caaggtcattctgctcctagcaggc

SEQ ID NO: 1161780 - DNA, 25 bp, Homo sapien
cctcaaggtcattctgctcctagca

SEQ ID NO: 1161781 - DNA, 25 bp, Homo sapien
ggtcattctgctcctagcaggcttt

SEQ ID NO: 1161782 - DNA, 25 bp, Homo sapien
tcagccttgcgtgcctgtgtactgg

SEQ ID NO: 1161783 - DNA, 25 bp, Homo sapien
cagctggcccagtctgtgctagagg

SEQ ID NO: 1161784 - DNA, 25 bp, Homo sapien
cagggccgtcacctctggaggaaac

SEQ ID NO: 1161785 - DNA, 25 bp, Homo sapien
catgacacctctaggcatcgggctg

SEQ ID NO: 1161786 - DNA, 25 bp, Homo sapien
taccgtcccttgaggctagaagagg

SEQ ID NO: 1161787 - DNA, 25 bp, Homo sapien
cactgagtgccataagtagtcgaga

SEQ ID NO: 1161788 - DNA, 25 bp, Homo sapien
cctgagctgaaacaactaccttggg

SEQ ID NO: 1161789 - DNA, 25 bp, Homo sapien
aaagcagtcaaggaagttggtccca

SEQ ID NO: 1161790 - DNA, 25 bp, Homo sapien
tctgtctttcccgctcatatctctc

SEQ ID NO: 1161791 - DNA, 25 bp, Homo sapien
ttatctgtctttcccgctcatatct

SEQ ID NO: 1161792 - DNA, 25 bp, Homo sapien
cttatctgtctttcccgctcatatc

SEQ ID NO: 1161793 - DNA, 25 bp, Homo sapien
gtctttcccgctcatatctctccat

SEQ ID NO: 1161794 - DNA, 25 bp, Homo sapien
gccttggtctaatgtctgatggtcc

SEQ ID NO: 1161795 - DNA, 25 bp, Homo sapien
tataattcttacagcagatggagct

SEQ ID NO: 1161796 - DNA, 25 bp, Homo sapien
aacgggaacagggtctagtcaggca

SEQ ID NO: 1161797 - DNA, 25 bp, Homo sapien
tatccttatgaagatttgaacgggc

SEQ ID NO: 1161798 - DNA, 25 bp, Homo sapien
gtgcgatcacggttccatgcagccc

SEQ ID NO: 1161799 - DNA, 25 bp, Homo sapien
gcgaatttactagggcatcccctcg

SEQ ID NO: 1161800 - DNA, 25 bp, Homo sapien
ggcaggacatcgagccaatggcaca

SEQ ID NO: 1161801 - DNA, 25 bp, Homo sapien
tccgtaactggtcggagacagtttg

SEQ ID NO: 1161802 - DNA, 25 bp, Homo sapien
ggactcctgaatgcctgttctgtag

SEQ ID NO: 1161803 - DNA, 25 bp, Homo sapien
taaacaaaggcggaaagagtcaaga

SEQ ID NO: 1161804 - DNA, 25 bp, Homo sapien
ctgtagccctcgcttttgcaagagg

SEQ ID NO: 1161805 - DNA, 25 bp, Homo sapien
cagaaaaggctgtgactggagcaca

SEQ ID NO: 1161806 - DNA, 25 bp, Homo sapien
ttagctatagtaaatcttcctgagg

SEQ ID NO: 1161807 - DNA, 25 bp, Homo sapien
agaagtaggtagccgcgccctttct

SEQ ID NO: 1161808 - DNA, 25 bp, Homo sapien
tagggccgctgtatctgggagtagg

SEQ ID NO: 1161809 - DNA, 25 bp, Homo sapien
aagagtctgagggtccacaaacgga

SEQ ID NO: 1161810 - DNA, 25 bp, Homo sapien
ttcttccaggatctcgtatcctgga

SEQ ID NO: 1161811 - DNA, 25 bp, Homo sapien
tctgaagagcccagccctgtcaagc

SEQ ID NO: 1161812 - DNA, 25 bp, Homo sapien
aggatctcgtatcctggacctgcca

SEQ ID NO: 1161813 - DNA, 25 bp, Homo sapien
gcatagcccgttgacctccccaaac

SEQ ID NO: 1161814 - DNA, 25 bp, Homo sapien
gacggatcctgtcgagaagatatcc

SEQ ID NO: 1161815 - DNA, 25 bp, Homo sapien
gatcctgtcgagaagatatcctctg

SEQ ID NO: 1161816 - DNA, 25 bp, Homo sapien
tccaggacggatcctgtcgagaaga

SEQ ID NO: 1161817 - DNA, 25 bp, Homo sapien
caggacggatcctgtcgagaagata

SEQ ID NO: 1161818 - DNA, 25 bp, Homo sapien
cagccttgcagtccctgttcctgta

SEQ ID NO: 1161819 - DNA, 25 bp, Homo sapien
agccttgcagtccctgttcctgtag

SEQ ID NO: 1161820 - DNA, 25 bp, Homo sapien
gtccccaccggacttccagccttgc

SEQ ID NO: 1161821 - DNA, 25 bp, Homo sapien
tccccaccggacttccagccttgca

SEQ ID NO: 1161822 - DNA, 25 bp, Homo sapien
tcacagagttgtgtctcaaccccac

SEQ ID NO: 1161823 - DNA, 25 bp, Homo sapien
ggttatatatatgtgcagggaagaa

SEQ ID NO: 1161824 - DNA, 25 bp, Homo sapien
gacctgtctccaagtgggagctgaa

SEQ ID NO: 1161825 - DNA, 25 bp, Homo sapien
tttcagtcctttcacttcttgggca

SEQ ID NO: 1161826 - DNA, 25 bp, Homo sapien
ctagctggatggagataaggcctac

SEQ ID NO: 1161827 - DNA, 25 bp, Homo sapien
gagcagtacacctcattgggatcaa

SEQ ID NO: 1161828 - DNA, 25 bp, Homo sapien
ctgtcactgccaggagatgcttctg

SEQ ID NO: 1161829 - DNA, 25 bp, Homo sapien
caacctcatagagcataggagaact

SEQ ID NO: 1161830 - DNA, 25 bp, Homo sapien
ggagacttaggaacaccctgacagc

SEQ ID NO: 1161831 - DNA, 25 bp, Homo sapien
gggcctgggtagtggcacaggttgg

SEQ ID NO: 1161832 - DNA, 25 bp, Homo sapien
tcaggcaccataaatgctgggctcc

SEQ ID NO: 1161833 - DNA, 25 bp, Homo sapien
gcaccataaatgctgggctccactg

SEQ ID NO: 1161834 - DNA, 25 bp, Homo sapien
gcactggggctacggtgcctgctct

SEQ ID NO: 1161835 - DNA, 25 bp, Homo sapien
ggaatcaggcaccataaatgctggg

SEQ ID NO: 1161836 - DNA, 25 bp, Homo sapien
agccgtgattgcaccactgcactcc

SEQ ID NO: 1161837 - DNA, 25 bp, Homo sapien
ccagcctggatgacagagtaagacc

SEQ ID NO: 1161838 - DNA, 25 bp, Homo sapien
tgcttgagcccaagatgttgaggat

SEQ ID NO: 1161839 - DNA, 25 bp, Homo sapien
agcccaagatgttgaggatgcagtg

SEQ ID NO: 1161840 - DNA, 25 bp, Homo sapien
gagtgtgttatccagttgcccgtca

SEQ ID NO: 1161841 - DNA, 25 bp, Homo sapien
tgtacggagagtggatggcccttct

SEQ ID NO: 1161842 - DNA, 25 bp, Homo sapien
tgaggaccttggcactctgagcaag

SEQ ID NO: 1161843 - DNA, 25 bp, Homo sapien
tacgtctcacagcaaatcacaggag

SEQ ID NO: 1161844 - DNA, 25 bp, Homo sapien
ttctcctcatcggtcaggaacaggg

SEQ ID NO: 1161845 - DNA, 25 bp, Homo sapien
cttctcctcatcggtcaggaacagg

SEQ ID NO: 1161846 - DNA, 25 bp, Homo sapien
ggcccaggatgtgtgagtcctgggt

SEQ ID NO: 1161847 - DNA, 25 bp, Homo sapien
ctccccaatgcttctcctgggatat

SEQ ID NO: 1161848 - DNA, 25 bp, Homo sapien
gatattggcccctcagaggtcatgg

SEQ ID NO: 1161849 - DNA, 25 bp, Homo sapien
tgggatacccttaggggaagcatgt

SEQ ID NO: 1161850 - DNA, 25 bp, Homo sapien
ttccgccgccgactgtcctgagctg

SEQ ID NO: 1161851 - DNA, 25 bp, Homo sapien
gcttgttacggattttcctcctgac

SEQ ID NO: 1161852 - DNA, 25 bp, Homo sapien
tgctctccagcccatcaatgtactc

SEQ ID NO: 1161853 - DNA, 25 bp, Homo sapien
tcctgaccttcttgaggaccctctc

SEQ ID NO: 1161854 - DNA, 25 bp, Homo sapien
gaagccagaaataacccaggcgtac

SEQ ID NO: 1161855 - DNA, 25 bp, Homo sapien
caagaagccagaaataacccaggcg

SEQ ID NO: 1161856 - DNA, 25 bp, Homo sapien
aagaagccagaaataacccaggcgt

SEQ ID NO: 1161857 - DNA, 25 bp, Homo sapien
agaagccagaaataacccaggcgta

SEQ ID NO: 1161858 - DNA, 25 bp, Homo sapien
ctgtaattcttggttctgtgcagaa

SEQ ID NO: 1161859 - DNA, 25 bp, Homo sapien
tgtaattcttggttctgtgcagaac

SEQ ID NO: 1161860 - DNA, 25 bp, Homo sapien
aattcttggttctgtgcagaacagg

SEQ ID NO: 1161861 - DNA, 25 bp, Homo sapien
ttctgtaattcttggttctgtgcag

SEQ ID NO: 1161862 - DNA, 25 bp, Homo sapien
gaagtttgagcaattagcgtctgca

SEQ ID NO: 1161863 - DNA, 25 bp, Homo sapien
caattagcgtctgcagctggcggag

SEQ ID NO: 1161864 - DNA, 25 bp, Homo sapien
ctgggcagctttgttggaagtttga

SEQ ID NO: 1161865 - DNA, 25 bp, Homo sapien
gcagctggcggagctgagctaccaa

SEQ ID NO: 1161866 - DNA, 25 bp, Homo sapien
tgaggctggtaatcctcagacccag

SEQ ID NO: 1161867 - DNA, 25 bp, Homo sapien
tcagacccagcttctggtcgactct

SEQ ID NO: 1161868 - DNA, 25 bp, Homo sapien
ctccgtgaggctggtaatcctcaga

SEQ ID NO: 1161869 - DNA, 25 bp, Homo sapien
ttctggtcgactctggaatggactg

SEQ ID NO: 1161870 - DNA, 25 bp, Homo sapien
ccttgtgggtcaggatatttctgga

SEQ ID NO: 1161871 - DNA, 25 bp, Homo sapien
accggatgcgcccactgggtcttgg

SEQ ID NO: 1161872 - DNA, 25 bp, Homo sapien
tcagtctggactctaccacttgggt

SEQ ID NO: 1161873 - DNA, 25 bp, Homo sapien
catctcatctgcatgcagcacggac

SEQ ID NO: 1161874 - DNA, 25 bp, Homo sapien
cacctaagtaggaatcccagtggga

SEQ ID NO: 1161875 - DNA, 25 bp, Homo sapien
tgaagtgatttggacccctgagggc

SEQ ID NO: 1161876 - DNA, 25 bp, Homo sapien
aaacaaatgcagactaggcctcagg

SEQ ID NO: 1161877 - DNA, 25 bp, Homo sapien
gtgggaagcaaagccataaggaagc

SEQ ID NO: 1161878 - DNA, 25 bp, Homo sapien
ggggattccaccacaaggctccaaa

SEQ ID NO: 1161879 - DNA, 25 bp, Homo sapien
tggaatgtagctatatggactcgat

SEQ ID NO: 1161880 - DNA, 25 bp, Homo sapien
aaatcagtccatttcactttcactg

SEQ ID NO: 1161881 - DNA, 25 bp, Homo sapien
tatggactcgatttgcttccggacc

SEQ ID NO: 1161882 - DNA, 25 bp, Homo sapien
aagagtgcaaatcagtccatttcac

SEQ ID NO: 1161883 - DNA, 25 bp, Homo sapien
cccaggatacaagggtggaatgtag

SEQ ID NO: 1161884 - DNA, 25 bp, Homo sapien
tttggagccttgtggtggaatcccc

SEQ ID NO: 1161885 - DNA, 25 bp, Homo sapien
gtgaaatggactgatttgcactctt

SEQ ID NO: 1161886 - DNA, 25 bp, Homo sapien
tcgagtccatatagctacattccac

SEQ ID NO: 1161887 - DNA, 25 bp, Homo sapien
tacattccacccttgtatcctgggt

SEQ ID NO: 1161888 - DNA, 25 bp, Homo sapien
cagtgaaagtgaaatggactgattt

SEQ ID NO: 1161889 - DNA, 25 bp, Homo sapien
ggtccggaagcaaatcgagtccata

SEQ ID NO: 1161890 - DNA, 25 bp, Homo sapien
aatcgatatgtttttgcgggctagg

SEQ ID NO: 1161891 - DNA, 25 bp, Homo sapien
aaggccggagttgcctattggagca

SEQ ID NO: 1161892 - DNA, 25 bp, Homo sapien
tccccgttgccacagcgagaaaaat

SEQ ID NO: 1161893 - DNA, 25 bp, Homo sapien
agcatggagcgccaagtgtcgcacc

SEQ ID NO: 1161894 - DNA, 25 bp, Homo sapien
cctgtcggaacagagggacctactc

SEQ ID NO: 1161895 - DNA, 25 bp, Homo sapien
gaggatctatcaggacgtccccgtt

SEQ ID NO: 1161896 - DNA, 25 bp, Homo sapien
gagtaggtccctctgttccgacagg

SEQ ID NO: 1161897 - DNA, 25 bp, Homo sapien
cacgaggcctgtggagtaggtccct

SEQ ID NO: 1161898 - DNA, 25 bp, Homo sapien
gacacttggcgctccatgcttgcgg

SEQ ID NO: 1161899 - DNA, 25 bp, Homo sapien
cgatttttctcgctgtggcaacggg

SEQ ID NO: 1161900 - DNA, 25 bp, Homo sapien
tgttccgacaggtgcgacacttggc

SEQ ID NO: 1161901 - DNA, 25 bp, Homo sapien
cctagcccgcaaaaacatatcgatt

SEQ ID NO: 1161902 - DNA, 25 bp, Homo sapien
tcctgagagggcgacgtattgtccc

SEQ ID NO: 1161903 - DNA, 25 bp, Homo sapien
gttatgcaaaggaccagctctgagg

SEQ ID NO: 1161904 - DNA, 25 bp, Homo sapien
gaagcttgacggtgaatcctcgggt

SEQ ID NO: 1161905 - DNA, 25 bp, Homo sapien
gtttctgcagggacgagaacgcgca

SEQ ID NO: 1161906 - DNA, 25 bp, Homo sapien
gaaaacttgtgacaagaagaacacc

SEQ ID NO: 1161907 - DNA, 25 bp, Homo sapien
tgaacctgagggagacaacggcaga

SEQ ID NO: 1161908 - DNA, 25 bp, Homo sapien
caccccggaagctgaacctgaggga

SEQ ID NO: 1161909 - DNA, 25 bp, Homo sapien
gaagctgaacctgagggagacaacg

SEQ ID NO: 1161910 - DNA, 25 bp, Homo sapien
tttcttgggccactaccatctctgg

SEQ ID NO: 1161911 - DNA, 25 bp, Homo sapien
tgttgccccaccatgttacaaaagc

SEQ ID NO: 1161912 - DNA, 25 bp, Homo sapien
gaattattccgttggagaattcttc

SEQ ID NO: 1161913 - DNA, 25 bp, Homo sapien
tcttgtgagagaggaagaattattc

SEQ ID NO: 1161914 - DNA, 25 bp, Homo sapien
tctcgtgtgcgtaggtcgtcaccgc

SEQ ID NO: 1161915 - DNA, 25 bp, Homo sapien
tgcgtaggtcgtcaccgccggaaag

SEQ ID NO: 1161916 - DNA, 25 bp, Homo sapien
tcgtgtgcgtaggtcgtcaccgccg

SEQ ID NO: 1161917 - DNA, 25 bp, Homo sapien
gttctcgtgtgcgtaggtcgtcacc

SEQ ID NO: 1161918 - DNA, 25 bp, Homo sapien
aagtgcagagggtaaatgaggaccc

SEQ ID NO: 1161919 - DNA, 25 bp, Homo sapien
tctacgatccgaaatcagcgtgagg

SEQ ID NO: 1161920 - DNA, 25 bp, Homo sapien
gagagttcggacagaacagcgagat

SEQ ID NO: 1161921 - DNA, 25 bp, Homo sapien
atctccgccgaaacctggaccaaag

SEQ ID NO: 1161922 - DNA, 25 bp, Homo sapien
ggcccgtgggccgctgcggtccctg

SEQ ID NO: 1161923 - DNA, 25 bp, Homo sapien
gcccgtgggccgctgcggtccctgg

SEQ ID NO: 1161924 - DNA, 25 bp, Homo sapien
cccgtgggccgctgcggtccctgga

SEQ ID NO: 1161925 - DNA, 25 bp, Homo sapien
cgccgcccctggtgtctgcgcagct

SEQ ID NO: 1161926 - DNA, 25 bp, Homo sapien
ctggtgtctgcgcagctgggccgcc

SEQ ID NO: 1161927 - DNA, 25 bp, Homo sapien
ctcgccgcccctggtgtctgcgcag

SEQ ID NO: 1161928 - DNA, 25 bp, Homo sapien
ccctcgccgcccctggtgtctgcgc

SEQ ID NO: 1161929 - DNA, 25 bp, Homo sapien
ttagaaaccaacagcgaaaatggga

SEQ ID NO: 1161930 - DNA, 25 bp, Homo sapien
ctaagagggacagaaatgcagagat

SEQ ID NO: 1161931 - DNA, 25 bp, Homo sapien
gaaaatgggatggtcgaaaatagcc

SEQ ID NO: 1161932 - DNA, 25 bp, Homo sapien
gaaatgcagagatttagaaaccaac

SEQ ID NO: 1161933 - DNA, 25 bp, Homo sapien
cctcttctggagagggatgaaggag

SEQ ID NO: 1161934 - DNA, 25 bp, Homo sapien
gagggatgaaggagatcctttgcga

SEQ ID NO: 1161935 - DNA, 25 bp, Homo sapien
agggatgaaggagatcctttgcgag

SEQ ID NO: 1161936 - DNA, 25 bp, Homo sapien
ggagagggatgaaggagatcctttg

SEQ ID NO: 1161937 - DNA, 25 bp, Homo sapien
ttggggctctgcaccaggcgtttct

SEQ ID NO: 1161938 - DNA, 25 bp, Homo sapien
ggcatttcacatccatgaagtagga

SEQ ID NO: 1161939 - DNA, 25 bp, Homo sapien
ggaattggggctctgcaccaggcgt

SEQ ID NO: 1161940 - DNA, 25 bp, Homo sapien
aattggggctctgcaccaggcgttt

SEQ ID NO: 1161941 - DNA, 25 bp, Homo sapien
ggatacgagacagctaacactacaa

SEQ ID NO: 1161942 - DNA, 25 bp, Homo sapien
tacacccgtctttcctgcacttatg

SEQ ID NO: 1161943 - DNA, 25 bp, Homo sapien
gctgcacagcttcaaggatacgaga

SEQ ID NO: 1161944 - DNA, 25 bp, Homo sapien
tgttgaggtccagtgctttccccac

SEQ ID NO: 1161945 - DNA, 25 bp, Homo sapien
actaccgtttgtgcatggctaaaga

SEQ ID NO: 1161946 - DNA, 25 bp, Homo sapien
acaaaactaccgtttgtgcatggct

SEQ ID NO: 1161947 - DNA, 25 bp, Homo sapien
gcagccaacacacaaaactaccgtt

SEQ ID NO: 1161948 - DNA, 25 bp, Homo sapien
atggctaaagaccgtggtgatttta

SEQ ID NO: 1161949 - DNA, 25 bp, Homo sapien
aaatcaaactcaaagccccaaatca

SEQ ID NO: 1161950 - DNA, 25 bp, Homo sapien
aatcaaactcaaagccccaaatcac

SEQ ID NO: 1161951 - DNA, 25 bp, Homo sapien
gctacctgcgcatttgtatcactgg

SEQ ID NO: 1161952 - DNA, 25 bp, Homo sapien
tgatgatccacccacagaaagctac

SEQ ID NO: 1161953 - DNA, 25 bp, Homo sapien
tgtcatcagtacaggtattctgccc

SEQ ID NO: 1161954 - DNA, 25 bp, Homo sapien
cccgctttagacagtagtgctttga

SEQ ID NO: 1161955 - DNA, 25 bp, Homo sapien
tgctgcttcctcctgaaggaacatc

SEQ ID NO: 1161956 - DNA, 25 bp, Homo sapien
tagtgctgcttcctcctgaaggaac

SEQ ID NO: 1161957 - DNA, 25 bp, Homo sapien
ttagtgctgcttcctcctgaaggaa

SEQ ID NO: 1161958 - DNA, 25 bp, Homo sapien
agtgctgcttcctcctgaaggaaca

SEQ ID NO: 1161959 - DNA, 25 bp, Homo sapien
ttcccactcatcttgactcagagtg

SEQ ID NO: 1161960 - DNA, 25 bp, Homo sapien
cccactcatcttgactcagagtgct

SEQ ID NO: 1161961 - DNA, 25 bp, Homo sapien
ccactcatcttgactcagagtgctt

SEQ ID NO: 1161962 - DNA, 25 bp, Homo sapien
tcccactcatcttgactcagagtgc

SEQ ID NO: 1161963 - DNA, 25 bp, Homo sapien
gatcctgctcttgaccctctttgca

SEQ ID NO: 1161964 - DNA, 25 bp, Homo sapien
ctttgcagtgctggcatcaacagct

SEQ ID NO: 1161965 - DNA, 25 bp, Homo sapien
cctgctcttgaccctctttgcagtg

SEQ ID NO: 1161966 - DNA, 25 bp, Homo sapien
agatcctgctcttgaccctctttgc

SEQ ID NO: 1161967 - DNA, 25 bp, Homo sapien
gttggtatgtcaaacgctggaccat

SEQ ID NO: 1161968 - DNA, 25 bp, Homo sapien
tttacggcacgaatcccttgaagtc

SEQ ID NO: 1161969 - DNA, 25 bp, Homo sapien
acggcacgaatcccttgaagtctgc

SEQ ID NO: 1161970 - DNA, 25 bp, Homo sapien
caggttttacggcacgaatcccttg

SEQ ID NO: 1161971 - DNA, 25 bp, Homo sapien
tacggcacgaatcccttgaagtctg

SEQ ID NO: 1161972 - DNA, 25 bp, Homo sapien
agcacacatggaacccgacatgttg

SEQ ID NO: 1161973 - DNA, 25 bp, Homo sapien
tggaacccgacatgttgttttggac

SEQ ID NO: 1161974 - DNA, 25 bp, Homo sapien
gataaggagagcacacttgatccag

SEQ ID NO: 1161975 - DNA, 25 bp, Homo sapien
cgataaggagagcacacttgatcca

SEQ ID NO: 1161976 - DNA, 25 bp, Homo sapien
gcaaaataaatatgtggggcatgga

SEQ ID NO: 1161977 - DNA, 25 bp, Homo sapien
taattgtatcacttttaactctgca

SEQ ID NO: 1161978 - DNA, 25 bp, Homo sapien
gggtgataggttgatctatgcagca

SEQ ID NO: 1161979 - DNA, 25 bp, Homo sapien
aatacctgggtgataggttgatcta

SEQ ID NO: 1161980 - DNA, 25 bp, Homo sapien
gataattgttagagcgattcctgga

SEQ ID NO: 1161981 - DNA, 25 bp, Homo sapien
tcctgctaattgcttgtatatagtt

SEQ ID NO: 1161982 - DNA, 25 bp, Homo sapien
cctggaacaggtttgtacttcctag

SEQ ID NO: 1161983 - DNA, 25 bp, Homo sapien
gatctttataattcctgctaattgc

SEQ ID NO: 1161984 - DNA, 25 bp, Homo sapien
ttggctgctgttctattcaactccc

SEQ ID NO: 1161985 - DNA, 25 bp, Homo sapien
atttctttggctgctgttctattca

SEQ ID NO: 1161986 - DNA, 25 bp, Homo sapien
ttctttggctgctgttctattcaac

SEQ ID NO: 1161987 - DNA, 25 bp, Homo sapien
ctttggctgctgttctattcaactc

SEQ ID NO: 1161988 - DNA, 25 bp, Homo sapien
tcccttgtaatgaactatagacatg

SEQ ID NO: 1161989 - DNA, 25 bp, Homo sapien
cccttgtaatgaactatagacatga

SEQ ID NO: 1161990 - DNA, 25 bp, Homo sapien
acttcccttgtaatgaactatagac

SEQ ID NO: 1161991 - DNA, 25 bp, Homo sapien
tacaagttcagagaaacttcccttg

SEQ ID NO: 1161992 - DNA, 25 bp, Homo sapien
gctgatcactactataaatgcgtgg

SEQ ID NO: 1161993 - DNA, 25 bp, Homo sapien
tgctgggccttttataggttaacac

SEQ ID NO: 1161994 - DNA, 25 bp, Homo sapien
cccagctggagcaacaggatttaat

SEQ ID NO: 1161995 - DNA, 25 bp, Homo sapien
gaaagaacacttaatgtgctgggcc

SEQ ID NO: 1161996 - DNA, 25 bp, Homo sapien
gctgtctctagaagtgccatctcaa

SEQ ID NO: 1161997 - DNA, 25 bp, Homo sapien
tgaggtgaccacttaattgctttcc

SEQ ID NO: 1161998 - DNA, 25 bp, Homo sapien
tgcttacagaatggatcatgtcccc

SEQ ID NO: 1161999 - DNA, 25 bp, Homo sapien
tccaggaggagttagccaaacaaca

SEQ ID NO: 1162000 - DNA, 25 bp, Homo sapien
ccagggagactccgctgtgggaaac

SEQ ID NO: 1162001 - DNA, 25 bp, Homo sapien
agggagactccgctgtgggaaacct

SEQ ID NO: 1162002 - DNA, 25 bp, Homo sapien
cagggagactccgctgtgggaaacc

SEQ ID NO: 1162003 - DNA, 25 bp, Homo sapien
gggagactccgctgtgggaaacctc

SEQ ID NO: 1162004 - DNA, 25 bp, Homo sapien
tttaagggaatgtgagcacaatgca

SEQ ID NO: 1162005 - DNA, 25 bp, Homo sapien
cctgaagcagcaatcgaatcccttt

SEQ ID NO: 1162006 - DNA, 25 bp, Homo sapien
tattcccctctccatagaggagagg

SEQ ID NO: 1162007 - DNA, 25 bp, Homo sapien
taaaaagcatgttgtgatgtacaca

SEQ ID NO: 1162008 - DNA, 25 bp, Homo sapien
tgatctttaactggaaggctgcttt

SEQ ID NO: 1162009 - DNA, 25 bp, Homo sapien
taactgagggctgatctttaactgg

SEQ ID NO: 1162010 - DNA, 25 bp, Homo sapien
ccctgtgtctttttcgccaaactgt

SEQ ID NO: 1162011 - DNA, 25 bp, Homo sapien
ctcttcccggagaatccagctgggc

SEQ ID NO: 1162012 - DNA, 25 bp, Homo sapien
aaactgggtgatgtaatagctcact

SEQ ID NO: 1162013 - DNA, 25 bp, Homo sapien
gcaagccaaaggccctacaaaactg

SEQ ID NO: 1162014 - DNA, 25 bp, Homo sapien
caaaggccctacaaaactgggtgat

SEQ ID NO: 1162015 - DNA, 25 bp, Homo sapien
ctgggtgatgtaatagctcacttct

SEQ ID NO: 1162016 - DNA, 25 bp, Homo sapien
cacccaggaagtgcagcaacaccta

SEQ ID NO: 1162017 - DNA, 25 bp, Homo sapien
tcacccaggaagtgcagcaacacct

SEQ ID NO: 1162018 - DNA, 25 bp, Homo sapien
acccaggaagtgcagcaacacctac

SEQ ID NO: 1162019 - DNA, 25 bp, Homo sapien
caagttgttgtaactgcttcatcgg

SEQ ID NO: 1162020 - DNA, 25 bp, Homo sapien
gatatgttcccttgcatggatgttt

SEQ ID NO: 1162021 - DNA, 25 bp, Homo sapien
tgcttcatcggcaggcccaggaatg

SEQ ID NO: 1162022 - DNA, 25 bp, Homo sapien
ggcactgactgtaggatatgttccc

SEQ ID NO: 1162023 - DNA, 25 bp, Homo sapien
gttctcagcctgtatagtgtttgtc

SEQ ID NO: 1162024 - DNA, 25 bp, Homo sapien
tgtttgtcaatggtgaacgtttgtc

SEQ ID NO: 1162025 - DNA, 25 bp, Homo sapien
gattaggcctatgaatagtcaccac

SEQ ID NO: 1162026 - DNA, 25 bp, Homo sapien
gctgttgtgcactatgattaggcct

SEQ ID NO: 1162027 - DNA, 25 bp, Homo sapien
gatgtgttagtgttttttcctaatc

SEQ ID NO: 1162028 - DNA, 25 bp, Homo sapien
ttgcagattagcaaagtgattcact

SEQ ID NO: 1162029 - DNA, 25 bp, Homo sapien
tgaataggatatgttgtgatctgaa

SEQ ID NO: 1162030 - DNA, 25 bp, Homo sapien
ttttccatattcattgctgcctaca

SEQ ID NO: 1162031 - DNA, 25 bp, Homo sapien
tacaagctatgcatagtggtgtgct

SEQ ID NO: 1162032 - DNA, 25 bp, Homo sapien
tggcaaaagctttggaggcatggcc

SEQ ID NO: 1162033 - DNA, 25 bp, Homo sapien
cagatgagctctatgcccagaaact

SEQ ID NO: 1162034 - DNA, 25 bp, Homo sapien
tgacctctatgtaactatctgacag

SEQ ID NO: 1162035 - DNA, 25 bp, Homo sapien
gagacacgcattccatatataatcc

SEQ ID NO: 1162036 - DNA, 25 bp, Homo sapien
cttgatgaaagactggagacacgca

SEQ ID NO: 1162037 - DNA, 25 bp, Homo sapien
aacctcaagtctcttgaggctcagg

SEQ ID NO: 1162038 - DNA, 25 bp, Homo sapien
ataatccagtgaggcgtgtcctctt

SEQ ID NO: 1162039 - DNA, 25 bp, Homo sapien
ctaacagccgttgccgagagatgga

SEQ ID NO: 1162040 - DNA, 25 bp, Homo sapien
gctgctgaagaaaaggtactaacca

SEQ ID NO: 1162041 - DNA, 25 bp, Homo sapien
gatgcttgctcaggttacttgggaa

SEQ ID NO: 1162042 - DNA, 25 bp, Homo sapien
cctgacacgttctatggtagaggga

SEQ ID NO: 1162043 - DNA, 25 bp, Homo sapien
ggtggtggaggagacggtgtctcac

SEQ ID NO: 1162044 - DNA, 25 bp, Homo sapien
accacgcccagctgtatatatccat

SEQ ID NO: 1162045 - DNA, 25 bp, Homo sapien
ttctcatgcttcagcttccctcaag

SEQ ID NO: 1162046 - DNA, 25 bp, Homo sapien
cacgcccagctgtatatatccatat

SEQ ID NO: 1162047 - DNA, 25 bp, Homo sapien
ggtactaactcactgggctgggcaa

SEQ ID NO: 1162048 - DNA, 25 bp, Homo sapien
cacttgaaaggttactgaggatgag

SEQ ID NO: 1162049 - DNA, 25 bp, Homo sapien
atgagacatgcctccaagccagagc

SEQ ID NO: 1162050 - DNA, 25 bp, Homo sapien
gctaagacaagttctaccctgcgag

SEQ ID NO: 1162051 - DNA, 25 bp, Homo sapien
ggtttcccctaacaagcccaatgca

SEQ ID NO: 1162052 - DNA, 25 bp, Homo sapien
gcccaatgcactggtctgactttat

SEQ ID NO: 1162053 - DNA, 25 bp, Homo sapien
gagcttgtgtctaaagggtaattcc

SEQ ID NO: 1162054 - DNA, 25 bp, Homo sapien
gcagctttcctgacatgcaaggatc

SEQ ID NO: 1162055 - DNA, 25 bp, Homo sapien
tagtaaccatgtctgaaacaaaggc

SEQ ID NO: 1162056 - DNA, 25 bp, Homo sapien
caatctagagtaaaaacttaggccg

SEQ ID NO: 1162057 - DNA, 25 bp, Homo sapien
catttgtgtcacaggagaggattca

SEQ ID NO: 1162058 - DNA, 25 bp, Homo sapien
caaaggccatcgctatagagtcagc

SEQ ID NO: 1162059 - DNA, 25 bp, Homo sapien
tactttgattgacgtggtggtgaag

SEQ ID NO: 1162060 - DNA, 25 bp, Homo sapien
atgccgttcacaagagaatatgtac

SEQ ID NO: 1162061 - DNA, 25 bp, Homo sapien
actgtaaaagagtacatcatgttgc

SEQ ID NO: 1162062 - DNA, 25 bp, Homo sapien
tcacaagagaatatgtaccatgtgc

SEQ ID NO: 1162063 - DNA, 25 bp, Homo sapien
tgctttgccccaagttttaccctga

SEQ ID NO: 1162064 - DNA, 25 bp, Homo sapien
ctttaacgctagagcacagacccca

SEQ ID NO: 1162065 - DNA, 25 bp, Homo sapien
gccgacccgccctcgttagtctaga

SEQ ID NO: 1162066 - DNA, 25 bp, Homo sapien
cgggctttgactccttattccagga

SEQ ID NO: 1162067 - DNA, 25 bp, Homo sapien
tgctgtcgcatcttacccagtagag

SEQ ID NO: 1162068 - DNA, 25 bp, Homo sapien
gaatgtcgtgctggtgatggcctac

SEQ ID NO: 1162069 - DNA, 25 bp, Homo sapien
taaacccgaacaattctgcgcgagg

SEQ ID NO: 1162070 - DNA, 25 bp, Homo sapien
cttttgagctgtaccccgtctgcat

SEQ ID NO: 1162071 - DNA, 25 bp, Homo sapien
cgcctcgccacgagacacctctttc

SEQ ID NO: 1162072 - DNA, 25 bp, Homo sapien
ccctcagcgcgtgacgctaaaaggg

SEQ ID NO: 1162073 - DNA, 25 bp, Homo sapien
gcacgcaagcgtgcgcgtgccgcct

SEQ ID NO: 1162074 - DNA, 25 bp, Homo sapien
ctaaaaggggcgcgcacgcaagcgt

SEQ ID NO: 1162075 - DNA, 25 bp, Homo sapien
ctcagtctcctccacactgacaccc

SEQ ID NO: 1162076 - DNA, 25 bp, Homo sapien
cctccacactgacaccccgggccgc

SEQ ID NO: 1162077 - DNA, 25 bp, Homo sapien
gtctcctccacactgacaccccggg

SEQ ID NO: 1162078 - DNA, 25 bp, Homo sapien
tctcctccacactgacaccccgggc

SEQ ID NO: 1162079 - DNA, 25 bp, Homo sapien
ccgccaacgccgctgcgctcccaac

SEQ ID NO: 1162080 - DNA, 25 bp, Homo sapien
aacgccgctgcgctcccaactttac

SEQ ID NO: 1162081 - DNA, 25 bp, Homo sapien
gccaacgccgctgcgctcccaactt

SEQ ID NO: 1162082 - DNA, 25 bp, Homo sapien
cgccgccaacgccgctgcgctccca

SEQ ID NO: 1162083 - DNA, 25 bp, Homo sapien
ggcaaggcccaggcctcgctcgctc

SEQ ID NO: 1162084 - DNA, 25 bp, Homo sapien
aggcaaggcccaggcctcgctcgct

SEQ ID NO: 1162085 - DNA, 25 bp, Homo sapien
aaggcccaggcctcgctcgctcgcg

SEQ ID NO: 1162086 - DNA, 25 bp, Homo sapien
ccaaaacaggatatgcggcggagga

SEQ ID NO: 1162087 - DNA, 25 bp, Homo sapien
tatgacttagtagctgccctcaggg

SEQ ID NO: 1162088 - DNA, 25 bp, Homo sapien
cagttaggacatagcaaggaggagc

SEQ ID NO: 1162089 - DNA, 25 bp, Homo sapien
gctttgttgaaatggcccctgcatc

SEQ ID NO: 1162090 - DNA, 25 bp, Homo sapien
caaataacagtatttacaaggtaga

SEQ ID NO: 1162091 - DNA, 25 bp, Homo sapien
ataacagtatttacaaggtagaata

SEQ ID NO: 1162092 - DNA, 25 bp, Homo sapien
aataacagtatttacaaggtagaat

SEQ ID NO: 1162093 - DNA, 25 bp, Homo sapien
ccgggctcggttagtgcccaccgat

SEQ ID NO: 1162094 - DNA, 25 bp, Homo sapien
ggctcggttagtgcccaccgatgtc

SEQ ID NO: 1162095 - DNA, 25 bp, Homo sapien
ctcggttagtgcccaccgatgtcat

SEQ ID NO: 1162096 - DNA, 25 bp, Homo sapien
cgggctcggttagtgcccaccgatg

SEQ ID NO: 1162097 - DNA, 25 bp, Homo sapien
ctgtgcaagtctaatttgttctgca

SEQ ID NO: 1162098 - DNA, 25 bp, Homo sapien
tgtgcaagtctaatttgttctgcag

SEQ ID NO: 1162099 - DNA, 25 bp, Homo sapien
cagcatcattatggtccgaaatcat

SEQ ID NO: 1162100 - DNA, 25 bp, Homo sapien
gtcagcatcattatggtccgaaatc

SEQ ID NO: 1162101 - DNA, 25 bp, Homo sapien
tcagcatcattatggtccgaaatca

SEQ ID NO: 1162102 - DNA, 25 bp, Homo sapien
aagtcagcatcattatggtccgaaa

SEQ ID NO: 1162103 - DNA, 25 bp, Homo sapien
tgttgacatctccattgcagtcatg

SEQ ID NO: 1162104 - DNA, 25 bp, Homo sapien
cagtcatgcaaagcaatcacacatt

SEQ ID NO: 1162105 - DNA, 25 bp, Homo sapien
ccttccagaagaacattgatagctc

SEQ ID NO: 1162106 - DNA, 25 bp, Homo sapien
gaagaacattgatagctctgttgac

SEQ ID NO: 1162107 - DNA, 25 bp, Homo sapien
tcttcccgaccatctcccaggaatg

SEQ ID NO: 1162108 - DNA, 25 bp, Homo sapien
ccttcttcttcccgaccatctccca

SEQ ID NO: 1162109 - DNA, 25 bp, Homo sapien
tctggcctgagactcccttcttctt

SEQ ID NO: 1162110 - DNA, 25 bp, Homo sapien
ccttctggcctgagactcccttctt

SEQ ID NO: 1162111 - DNA, 25 bp, Homo sapien
tatagtctctgtcccggtctcgatt

SEQ ID NO: 1162112 - DNA, 25 bp, Homo sapien
tgtcccggtctcgattttctttgcc

SEQ ID NO: 1162113 - DNA, 25 bp, Homo sapien
gtctctgtcccggtctcgattttct

SEQ ID NO: 1162114 - DNA, 25 bp, Homo sapien
actatagtctctgtcccggtctcga

SEQ ID NO: 1162115 - DNA, 25 bp, Homo sapien
ggttttgataaagccccatgcatac

SEQ ID NO: 1162116 - DNA, 25 bp, Homo sapien
tggttttgataaagccccatgcata

SEQ ID NO: 1162117 - DNA, 25 bp, Homo sapien
ccctccactcttggtgccatccaat

SEQ ID NO: 1162118 - DNA, 25 bp, Homo sapien
gaaggccctccactcttggtgccat

SEQ ID NO: 1162119 - DNA, 25 bp, Homo sapien
ggccctccactcttggtgccatcca

SEQ ID NO: 1162120 - DNA, 25 bp, Homo sapien
cagaaggccctccactcttggtgcc

SEQ ID NO: 1162121 - DNA, 25 bp, Homo sapien
tgagcagaaaaccttcctcctcgcc

SEQ ID NO: 1162122 - DNA, 25 bp, Homo sapien
gagcagaaaaccttcctcctcgcct

SEQ ID NO: 1162123 - DNA, 25 bp, Homo sapien
ctgctattgccatagttatcatcag

SEQ ID NO: 1162124 - DNA, 25 bp, Homo sapien
aaagtggccagtgttgttccacgta

SEQ ID NO: 1162125 - DNA, 25 bp, Homo sapien
tcaaagtggccagtgttgttccacg

SEQ ID NO: 1162126 - DNA, 25 bp, Homo sapien
gccagtgttgttccacgtattgccg

SEQ ID NO: 1162127 - DNA, 25 bp, Homo sapien
tggccagtgttgttccacgtattgc

SEQ ID NO: 1162128 - DNA, 25 bp, Homo sapien
catgcatgaaggtatgttcatatca

SEQ ID NO: 1162129 - DNA, 25 bp, Homo sapien
tgaaattaacaacgaccaggcgtgg

SEQ ID NO: 1162130 - DNA, 25 bp, Homo sapien
aaaagaaaccatgcatgaaggtatg

SEQ ID NO: 1162131 - DNA, 25 bp, Homo sapien
gggaattcatgaagctataaccaac

SEQ ID NO: 1162132 - DNA, 25 bp, Homo sapien
ctggatgtatcataccaggagcagt

SEQ ID NO: 1162133 - DNA, 25 bp, Homo sapien
ataatttgacccctcaaccccaatg

SEQ ID NO: 1162134 - DNA, 25 bp, Homo sapien
taatttgacccctcaaccccaatga

SEQ ID NO: 1162135 - DNA, 25 bp, Homo sapien
tgtatcataccaggagcagtctggg

SEQ ID NO: 1162136 - DNA, 25 bp, Homo sapien
tcattccaatcttcagtcccccact

SEQ ID NO: 1162137 - DNA, 25 bp, Homo sapien
cattccaatcttcagtcccccactc

SEQ ID NO: 1162138 - DNA, 25 bp, Homo sapien
tcagtcccccactcctctgttgcag

SEQ ID NO: 1162139 - DNA, 25 bp, Homo sapien
cagtcccccactcctctgttgcagt

SEQ ID NO: 1162140 - DNA, 25 bp, Homo sapien
tattggacttacacaagtgcacttg

SEQ ID NO: 1162141 - DNA, 25 bp, Homo sapien
taaatacaagggttccagagtcaac

SEQ ID NO: 1162142 - DNA, 25 bp, Homo sapien
gtagtcatgtaccaccagcagctgt

SEQ ID NO: 1162143 - DNA, 25 bp, Homo sapien
tgcacttgccctttccatagtgtgg

SEQ ID NO: 1162144 - DNA, 25 bp, Homo sapien
gagaaaactatctaccctgaggaat

SEQ ID NO: 1162145 - DNA, 25 bp, Homo sapien
gagtagaagcaaggaacccaataaa

SEQ ID NO: 1162146 - DNA, 25 bp, Homo sapien
cagtcagaaacttggcataggtaag

SEQ ID NO: 1162147 - DNA, 25 bp, Homo sapien
tagtggagtcacatgatcatatgca

SEQ ID NO: 1162148 - DNA, 25 bp, Homo sapien
tcacattctccgcaggcagaggcac

SEQ ID NO: 1162149 - DNA, 25 bp, Homo sapien
cagcagtgattgtcacattctccgc

SEQ ID NO: 1162150 - DNA, 25 bp, Homo sapien
cagtgattgtcacattctccgcagg

SEQ ID NO: 1162151 - DNA, 25 bp, Homo sapien
gattgtcacattctccgcaggcaga

SEQ ID NO: 1162152 - DNA, 25 bp, Homo sapien
tggtgtcttccccagcagaacagca

SEQ ID NO: 1162153 - DNA, 25 bp, Homo sapien
tgtagatggtgtcttccccagcaga

SEQ ID NO: 1162154 - DNA, 25 bp, Homo sapien
gtcttccccagcagaacagcaaggt

SEQ ID NO: 1162155 - DNA, 25 bp, Homo sapien
gtgtcttccccagcagaacagcaag

SEQ ID NO: 1162156 - DNA, 25 bp, Homo sapien
cctgaagcaggctgtgatatggcag

SEQ ID NO: 1162157 - DNA, 25 bp, Homo sapien
tatggcagtctgcttcgaattactg

SEQ ID NO: 1162158 - DNA, 25 bp, Homo sapien
agaaggagcctgagacggatccaga

SEQ ID NO: 1162159 - DNA, 25 bp, Homo sapien
aattactgaacaccagaggctgggc

SEQ ID NO: 1162160 - DNA, 25 bp, Homo sapien
taggataaaccacgtttcctactca

SEQ ID NO: 1162161 - DNA, 25 bp, Homo sapien
gtactgccgcctttagcttcaccga

SEQ ID NO: 1162162 - DNA, 25 bp, Homo sapien
acatcaccaaatcctttccctaaca

SEQ ID NO: 1162163 - DNA, 25 bp, Homo sapien
gcctgtagtactgccgcctttagct

SEQ ID NO: 1162164 - DNA, 25 bp, Homo sapien
attgtgtcgtcgagcccatgtccca

SEQ ID NO: 1162165 - DNA, 25 bp, Homo sapien
tgtctgaagatccaggcgacatctg

SEQ ID NO: 1162166 - DNA, 25 bp, Homo sapien
gctgtgcactgctgaatcacttggg

SEQ ID NO: 1162167 - DNA, 25 bp, Homo sapien
tctgtggagccgatgtggatttgct

SEQ ID NO: 1162168 - DNA, 25 bp, Homo sapien
aagatggggtaaaagcctggcgctt

SEQ ID NO: 1162169 - DNA, 25 bp, Homo sapien
agccctgagatatctgctgagccag

SEQ ID NO: 1162170 - DNA, 25 bp, Homo sapien
gaaaggacaggctctgacccaaact

SEQ ID NO: 1162171 - DNA, 25 bp, Homo sapien
ggtggactcataatcagaaaggaca

SEQ ID NO: 1162172 - DNA, 25 bp, Homo sapien
ctggccgtgctggtatacaggctac

SEQ ID NO: 1162173 - DNA, 25 bp, Homo sapien
atatttctacctgtttagttacaga

SEQ ID NO: 1162174 - DNA, 25 bp, Homo sapien
aatgctatgactgactactttcccc

SEQ ID NO: 1162175 - DNA, 25 bp, Homo sapien
tagttacagataaccctaataacaa

SEQ ID NO: 1162176 - DNA, 25 bp, Homo sapien
aaggttaataagagaggtcttatgg

SEQ ID NO: 1162177 - DNA, 25 bp, Homo sapien
aagagggccctgagcattattttgg

SEQ ID NO: 1162178 - DNA, 25 bp, Homo sapien
gaattgggccgctctgataaccaga

SEQ ID NO: 1162179 - DNA, 25 bp, Homo sapien
tataggttgtcgactgaattgggcc

SEQ ID NO: 1162180 - DNA, 25 bp, Homo sapien
taccgccgagtctgtgtggatctct

SEQ ID NO: 1162181 - DNA, 25 bp, Homo sapien
caaggtgaggtctactgacacgcac

SEQ ID NO: 1162182 - DNA, 25 bp, Homo sapien
ctgagatataccaacactgtgtgac

SEQ ID NO: 1162183 - DNA, 25 bp, Homo sapien
gaagggtaagtacaacagttcagcc

SEQ ID NO: 1162184 - DNA, 25 bp, Homo sapien
tgaggaaagttagcactgatgcagc

SEQ ID NO: 1162185 - DNA, 25 bp, Homo sapien
ctgtaactgcgtggcctgcacagaa

SEQ ID NO: 1162186 - DNA, 25 bp, Homo sapien
attgtgtggtctgtaactgcgtggc

SEQ ID NO: 1162187 - DNA, 25 bp, Homo sapien
tgtggtctgtaactgcgtggcctgc

SEQ ID NO: 1162188 - DNA, 25 bp, Homo sapien
tgcgtggcctgcacagaactgaagc

SEQ ID NO: 1162189 - DNA, 25 bp, Homo sapien
ggttgtcgtcagtaaggaagctgca

SEQ ID NO: 1162190 - DNA, 25 bp, Homo sapien
gccacccaaggaggatgaatgctga

SEQ ID NO: 1162191 - DNA, 25 bp, Homo sapien
tgcagataccgtttcattgagaggg

SEQ ID NO: 1162192 - DNA, 25 bp, Homo sapien
tgaatcagatttcactgcagagcct

SEQ ID NO: 1162193 - DNA, 25 bp, Homo sapien
gtggtggtagtatttggaatctcct

SEQ ID NO: 1162194 - DNA, 25 bp, Homo sapien
tggtggtagtatttggaatctcctc

SEQ ID NO: 1162195 - DNA, 25 bp, Homo sapien
ggtggtagtatttggaatctcctca

SEQ ID NO: 1162196 - DNA, 25 bp, Homo sapien
gtggtagtatttggaatctcctcac

SEQ ID NO: 1162197 - DNA, 25 bp, Homo sapien
aagtgcgcccagaagatgttgatga

SEQ ID NO: 1162198 - DNA, 25 bp, Homo sapien
tcgaagtgcgcccagaagatgttga

SEQ ID NO: 1162199 - DNA, 25 bp, Homo sapien
agtggatgtcgaagtgcgcccagaa

SEQ ID NO: 1162200 - DNA, 25 bp, Homo sapien
caaaagagtggatgtcgaagtgcgc

SEQ ID NO: 1162201 - DNA, 25 bp, Homo sapien
aggaagaatggagattcgcctcact

SEQ ID NO: 1162202 - DNA, 25 bp, Homo sapien
gaggaagaatggagattcgcctcac

SEQ ID NO: 1162203 - DNA, 25 bp, Homo sapien
aagaatggagattcgcctcactctc

SEQ ID NO: 1162204 - DNA, 25 bp, Homo sapien
acagtggagttgctgcctaggctga

SEQ ID NO: 1162205 - DNA, 25 bp, Homo sapien
ctgaggcccaggctactgccactat

SEQ ID NO: 1162206 - DNA, 25 bp, Homo sapien
ctgccactattgagactggaggaga

SEQ ID NO: 1162207 - DNA, 25 bp, Homo sapien
gagttgctgcctaggctgaggccca

SEQ ID NO: 1162208 - DNA, 25 bp, Homo sapien
gaagtcgtagcaactgagcttcgag

SEQ ID NO: 1162209 - DNA, 25 bp, Homo sapien
ctgaagtcgtagcaactgagcttcg

SEQ ID NO: 1162210 - DNA, 25 bp, Homo sapien
tcgtagcaactgagcttcgagtcga

SEQ ID NO: 1162211 - DNA, 25 bp, Homo sapien
gtagcaactgagcttcgagtcgagg

SEQ ID NO: 1162212 - DNA, 25 bp, Homo sapien
tcccagaggaatgccatctgcttat

SEQ ID NO: 1162213 - DNA, 25 bp, Homo sapien
ccatcccagaggaatgccatctgct

SEQ ID NO: 1162214 - DNA, 25 bp, Homo sapien
catcccagaggaatgccatctgctt

SEQ ID NO: 1162215 - DNA, 25 bp, Homo sapien
tccatcccagaggaatgccatctgc

SEQ ID NO: 1162216 - DNA, 25 bp, Homo sapien
cataatatacggattaggcaacaac

SEQ ID NO: 1162217 - DNA, 25 bp, Homo sapien
ggagccataatatacggattaggca

SEQ ID NO: 1162218 - DNA, 25 bp, Homo sapien
ctggagccataatatacggattagg

SEQ ID NO: 1162219 - DNA, 25 bp, Homo sapien
atacggattaggcaacaacggcggg

SEQ ID NO: 1162220 - DNA, 25 bp, Homo sapien
gaagaagatcctttagtcccactta

SEQ ID NO: 1162221 - DNA, 25 bp, Homo sapien
tttgaagaagatcctttagtcccac

SEQ ID NO: 1162222 - DNA, 25 bp, Homo sapien
tgaagaagatcctttagtcccactt

SEQ ID NO: 1162223 - DNA, 25 bp, Homo sapien
ttttgaagaagatcctttagtccca

SEQ ID NO: 1162224 - DNA, 25 bp, Homo sapien
aaaagagtagccacaacatcctcac

SEQ ID NO: 1162225 - DNA, 25 bp, Homo sapien
gacacacagatcaaaaatacggcca

SEQ ID NO: 1162226 - DNA, 25 bp, Homo sapien
gaactgcacgctgtttatatatgaa

SEQ ID NO: 1162227 - DNA, 25 bp, Homo sapien
aatacggccacatttacagaatgca

SEQ ID NO: 1162228 - DNA, 25 bp, Homo sapien
caggaacaggtatcttctaaaacgt

SEQ ID NO: 1162229 - DNA, 25 bp, Homo sapien
gaaggtcacagaagatacactaggg

SEQ ID NO: 1162230 - DNA, 25 bp, Homo sapien
taatgtcagccacttattctcaaag

SEQ ID NO: 1162231 - DNA, 25 bp, Homo sapien
gaccagcaaacacactcagagttag

SEQ ID NO: 1162232 - DNA, 25 bp, Homo sapien
tgggttagaacaggacacggattat

SEQ ID NO: 1162233 - DNA, 25 bp, Homo sapien
catacacgaacaaccagttttactc

SEQ ID NO: 1162234 - DNA, 25 bp, Homo sapien
ggctggcttcttgataccaatagag

SEQ ID NO: 1162235 - DNA, 25 bp, Homo sapien
ccttgagctaaatactactgattct

SEQ ID NO: 1162236 - DNA, 25 bp, Homo sapien
agacatatagcaataacaggaactg

SEQ ID NO: 1162237 - DNA, 25 bp, Homo sapien
gccaagagacaagctaattcaacag

SEQ ID NO: 1162238 - DNA, 25 bp, Homo sapien
catatagcaataacaggaactggtc

SEQ ID NO: 1162239 - DNA, 25 bp, Homo sapien
ggaactggtcatgatgttagcaaaa

SEQ ID NO: 1162240 - DNA, 25 bp, Homo sapien
agtcatcataaccatatacttgtgg

SEQ ID NO: 1162241 - DNA, 25 bp, Homo sapien
tatccagtcactaattaagctggct

SEQ ID NO: 1162242 - DNA, 25 bp, Homo sapien
ggctagagttagcacaaactccaca

SEQ ID NO: 1162243 - DNA, 25 bp, Homo sapien
aaactccacattactcttgcataca

SEQ ID NO: 1162244 - DNA, 25 bp, Homo sapien
gagagttgtgcaatttatccagtca

SEQ ID NO: 1162245 - DNA, 25 bp, Homo sapien
atgagtactatttccacggaggaaa

SEQ ID NO: 1162246 - DNA, 25 bp, Homo sapien
gcagagattcaatgtcactcattcc

SEQ ID NO: 1162247 - DNA, 25 bp, Homo sapien
cagcggagtagtgggtgtgggaaat

SEQ ID NO: 1162248 - DNA, 25 bp, Homo sapien
ggttgctggccaggctaccatccct

SEQ ID NO: 1162249 - DNA, 25 bp, Homo sapien
cagaataagggttgctggccaggct

SEQ ID NO: 1162250 - DNA, 25 bp, Homo sapien
atccctcccagtcagcggagtagtg

SEQ ID NO: 1162251 - DNA, 25 bp, Homo sapien
gattttgaatctaccaatcctgatt

SEQ ID NO: 1162252 - DNA, 25 bp, Homo sapien
catgacatgcccaactttagcagga

SEQ ID NO: 1162253 - DNA, 25 bp, Homo sapien
tcttgctaccaatcaggtgtctgcc

SEQ ID NO: 1162254 - DNA, 25 bp, Homo sapien
tgggatgaataggaaaagccatgac

SEQ ID NO: 1162255 - DNA, 25 bp, Homo sapien
gctcagcatacacttagcacagttg

SEQ ID NO: 1162256 - DNA, 25 bp, Homo sapien
tgtgcaatgctatggcaggaggctc

SEQ ID NO: 1162257 - DNA, 25 bp, Homo sapien
caggagatcctgttcaaagactatt

SEQ ID NO: 1162258 - DNA, 25 bp, Homo sapien
ggagaagctaaatgtacctgcctct

SEQ ID NO: 1162259 - DNA, 25 bp, Homo sapien
ggaggaggcatccccacggccgaac

SEQ ID NO: 1162260 - DNA, 25 bp, Homo sapien
gaggcatccccacggccgaactttg

SEQ ID NO: 1162261 - DNA, 25 bp, Homo sapien
gcatccccacggccgaactttgtga

SEQ ID NO: 1162262 - DNA, 25 bp, Homo sapien
atccccacggccgaactttgtgagg

SEQ ID NO: 1162263 - DNA, 25 bp, Homo sapien
cagcgccgggttcaggaatgtctgc

SEQ ID NO: 1162264 - DNA, 25 bp, Homo sapien
tatggtgagtctgcgtctggttctg

SEQ ID NO: 1162265 - DNA, 25 bp, Homo sapien
cccgggacccctgtatagtatggca

SEQ ID NO: 1162266 - DNA, 25 bp, Homo sapien
agcaggcccatactggaaggtgctg

SEQ ID NO: 1162267 - DNA, 25 bp, Homo sapien
tgtatccatgagacccatatccact

SEQ ID NO: 1162268 - DNA, 25 bp, Homo sapien
tcacactgacattcacaccatgctg

SEQ ID NO: 1162269 - DNA, 25 bp, Homo sapien
atccatgagacccatatccactcgg

SEQ ID NO: 1162270 - DNA, 25 bp, Homo sapien
cagtgttgtatccatgagacccata

SEQ ID NO: 1162271 - DNA, 25 bp, Homo sapien
ccaataacaccccacagataacacc

SEQ ID NO: 1162272 - DNA, 25 bp, Homo sapien
ccccacagataacaccgagccagag

SEQ ID NO: 1162273 - DNA, 25 bp, Homo sapien
ataacaccccacagataacaccgag

SEQ ID NO: 1162274 - DNA, 25 bp, Homo sapien
acagataacaccgagccagagacaa

SEQ ID NO: 1162275 - DNA, 25 bp, Homo sapien
taaatgaatggaatgacaaaagccc

SEQ ID NO: 1162276 - DNA, 25 bp, Homo sapien
ggttctcaagggctgatataatacg

SEQ ID NO: 1162277 - DNA, 25 bp, Homo sapien
tcttaaaattcgtgaacctggtcca

SEQ ID NO: 1162278 - DNA, 25 bp, Homo sapien
caagaaggtgggatttctagaatca

SEQ ID NO: 1162279 - DNA, 25 bp, Homo sapien
agccgtccagaaatgcttgtaaggg

SEQ ID NO: 1162280 - DNA, 25 bp, Homo sapien
tctcagccgtccagaaatgcttgta

SEQ ID NO: 1162281 - DNA, 25 bp, Homo sapien
tcagccgtccagaaatgcttgtaag

SEQ ID NO: 1162282 - DNA, 25 bp, Homo sapien
tagctctcagccgtccagaaatgct

SEQ ID NO: 1162283 - DNA, 25 bp, Homo sapien
tcagcaggctctcctcagtggtctg

SEQ ID NO: 1162284 - DNA, 25 bp, Homo sapien
tcaaaagcccagaaggtatccacca

SEQ ID NO: 1162285 - DNA, 25 bp, Homo sapien
gctgcaccgcttgaacttgaaatgg

SEQ ID NO: 1162286 - DNA, 25 bp, Homo sapien
tgatgcttcgaaggtgctgcaccgc

SEQ ID NO: 1162287 - DNA, 25 bp, Homo sapien
caactaatcaacaggtgggaaactg

SEQ ID NO: 1162288 - DNA, 25 bp, Homo sapien
cctttaccaactaatcaacaggtgg

SEQ ID NO: 1162289 - DNA, 25 bp, Homo sapien
agacatgcacggaaagaacgccaga

SEQ ID NO: 1162290 - DNA, 25 bp, Homo sapien
cattggttcctagtgtccacaaaga

SEQ ID NO: 1162291 - DNA, 25 bp, Homo sapien
tctggcacgcccgtgttactggagg

SEQ ID NO: 1162292 - DNA, 25 bp, Homo sapien
cgagatatctggcacgcccgtgtta

SEQ ID NO: 1162293 - DNA, 25 bp, Homo sapien
ggagtacacagaacccgagatatct

SEQ ID NO: 1162294 - DNA, 25 bp, Homo sapien
cagaacccgagatatctggcacgcc

SEQ ID NO: 1162295 - DNA, 25 bp, Homo sapien
tgtgaacctgggcatactactcaat

SEQ ID NO: 1162296 - DNA, 25 bp, Homo sapien
cacatattcaggtctcagtctcagc

SEQ ID NO: 1162297 - DNA, 25 bp, Homo sapien
cagaaggcacagtacacttgaagtc

SEQ ID NO: 1162298 - DNA, 25 bp, Homo sapien
tataaaacagggatgctacaaacct

SEQ ID NO: 1162299 - DNA, 25 bp, Homo sapien
gaagcagcaggagtaccggaatgaa

SEQ ID NO: 1162300 - DNA, 25 bp, Homo sapien
cacttcctagggctgaaggcaagtt

SEQ ID NO: 1162301 - DNA, 25 bp, Homo sapien
tgaaggcaagttgaaggaagcagca

SEQ ID NO: 1162302 - DNA, 25 bp, Homo sapien
tggtgaaggatctgagaatgcggct

SEQ ID NO: 1162303 - DNA, 25 bp, Homo sapien
ccggccgctcgtgttatgtgcgctt

SEQ ID NO: 1162304 - DNA, 25 bp, Homo sapien
cgctcgtgttatgtgcgcttgtgtc

SEQ ID NO: 1162305 - DNA, 25 bp, Homo sapien
tttgccggccgctcgtgttatgtgc

SEQ ID NO: 1162306 - DNA, 25 bp, Homo sapien
ttcctttgccggccgctcgtgttat

SEQ ID NO: 1162307 - DNA, 25 bp, Homo sapien
taaagggacaaactttgacaataga

SEQ ID NO: 1162308 - DNA, 25 bp, Homo sapien
tttgacaatagaactccaccattag

SEQ ID NO: 1162309 - DNA, 25 bp, Homo sapien
gggacaaactttgacaatagaactc

SEQ ID NO: 1162310 - DNA, 25 bp, Homo sapien
aactttgacaatagaactccaccat

SEQ ID NO: 1162311 - DNA, 25 bp, Homo sapien
ctgctggcgctggcaacagagaatc

SEQ ID NO: 1162312 - DNA, 25 bp, Homo sapien
gctggcgctggcaacagagaatcat

SEQ ID NO: 1162313 - DNA, 25 bp, Homo sapien
tgctggcgctggcaacagagaatca

SEQ ID NO: 1162314 - DNA, 25 bp, Homo sapien
gagcccatttcaggcaggtatgaga

SEQ ID NO: 1162315 - DNA, 25 bp, Homo sapien
ggagctctcaagaggccacttgcat

SEQ ID NO: 1162316 - DNA, 25 bp, Homo sapien
aggaaggaagcccttattctagctc

SEQ ID NO: 1162317 - DNA, 25 bp, Homo sapien
tgggtgatcacaaggcaatttcatt

SEQ ID NO: 1162318 - DNA, 25 bp, Homo sapien
tggtctggggcttctgcgggatgga

SEQ ID NO: 1162319 - DNA, 25 bp, Homo sapien
gatggagctggtctggctacgttgc

SEQ ID NO: 1162320 - DNA, 25 bp, Homo sapien
gccccccagctgtagctgttgtagg

SEQ ID NO: 1162321 - DNA, 25 bp, Homo sapien
agttggccccccagctgtagctgtt

SEQ ID NO: 1162322 - DNA, 25 bp, Homo sapien
ctagacggagcaagaataggcagag

SEQ ID NO: 1162323 - DNA, 25 bp, Homo sapien
aatgggacagacatgaagctgaggc

SEQ ID NO: 1162324 - DNA, 25 bp, Homo sapien
gccctctcagaagatgggaccggga

SEQ ID NO: 1162325 - DNA, 25 bp, Homo sapien
gcagggcccatagcaaagtttcata

SEQ ID NO: 1162326 - DNA, 25 bp, Homo sapien
ggtcatcgacgaaattgaggatgtc

SEQ ID NO: 1162327 - DNA, 25 bp, Homo sapien
aagctggtcatcgacgaaattgagg

SEQ ID NO: 1162328 - DNA, 25 bp, Homo sapien
caagctggtcatcgacgaaattgag

SEQ ID NO: 1162329 - DNA, 25 bp, Homo sapien
gctggtcatcgacgaaattgaggat

SEQ ID NO: 1162330 - DNA, 25 bp, Homo sapien
tgctagaggaggcccagttggtaca

SEQ ID NO: 1162331 - DNA, 25 bp, Homo sapien
ccagttggtacagtaatacttattc

SEQ ID NO: 1162332 - DNA, 25 bp, Homo sapien
cattttattccactgccttcagggg

SEQ ID NO: 1162333 - DNA, 25 bp, Homo sapien
ttattccactgccttcaggggcctg

SEQ ID NO: 1162334 - DNA, 25 bp, Homo sapien
cctgaaatcggctgtagatgtagca

SEQ ID NO: 1162335 - DNA, 25 bp, Homo sapien
agttctgccagacgatacatgttgc

SEQ ID NO: 1162336 - DNA, 25 bp, Homo sapien
gaaggaaatcccctcaaggacaaga

SEQ ID NO: 1162337 - DNA, 25 bp, Homo sapien
gatttctgcgactttagcgcaccca

SEQ ID NO: 1162338 - DNA, 25 bp, Homo sapien
cagagaccagtttccgtgacgggag

SEQ ID NO: 1162339 - DNA, 25 bp, Homo sapien
ctttcagagaccagtttccgtgacg

SEQ ID NO: 1162340 - DNA, 25 bp, Homo sapien
cgtgacgggagtgggcgtgacgcac

SEQ ID NO: 1162341 - DNA, 25 bp, Homo sapien
gagtgggcgtgacgcactttcagtt

SEQ ID NO: 1162342 - DNA, 25 bp, Homo sapien
gaggcgggaccgaaggtcttcctca

SEQ ID NO: 1162343 - DNA, 25 bp, Homo sapien
gctaccggaaagcaagcccgcgatc

SEQ ID NO: 1162344 - DNA, 25 bp, Homo sapien
gcccgcgatcctgacactgtcgtaa

SEQ ID NO: 1162345 - DNA, 25 bp, Homo sapien
ctgtgagaaattgagcgaggcgtca

SEQ ID NO: 1162346 - DNA, 25 bp, Homo sapien
acccctccagtggtccattcgcaga

SEQ ID NO: 1162347 - DNA, 25 bp, Homo sapien
gaacccctccagtggtccattcgca

SEQ ID NO: 1162348 - DNA, 25 bp, Homo sapien
tgaacccctccagtggtccattcgc

SEQ ID NO: 1162349 - DNA, 25 bp, Homo sapien
aacccctccagtggtccattcgcag

SEQ ID NO: 1162350 - DNA, 25 bp, Homo sapien
gccccggaagagatcaaagaggctc

SEQ ID NO: 1162351 - DNA, 25 bp, Homo sapien
cccggaagagatcaaagaggctcat

SEQ ID NO: 1162352 - DNA, 25 bp, Homo sapien
agccccggaagagatcaaagaggct

SEQ ID NO: 1162353 - DNA, 25 bp, Homo sapien
ccccggaagagatcaaagaggctca

SEQ ID NO: 1162354 - DNA, 25 bp, Homo sapien
taatgaccgccttggttactgtggc

SEQ ID NO: 1162355 - DNA, 25 bp, Homo sapien
tcaaagtcagacctcagctcgcagc

SEQ ID NO: 1162356 - DNA, 25 bp, Homo sapien
tccctgttgcatcaccccaggttgg

SEQ ID NO: 1162357 - DNA, 25 bp, Homo sapien
ggtgagtgttcaatgttgcgacttc

SEQ ID NO: 1162358 - DNA, 25 bp, Homo sapien
aagctagggagagggtcggaggact

SEQ ID NO: 1162359 - DNA, 25 bp, Homo sapien
tatttcagcactatttaagccatta

SEQ ID NO: 1162360 - DNA, 25 bp, Homo sapien
cagattggccaccaatatttcagca

SEQ ID NO: 1162361 - DNA, 25 bp, Homo sapien
aaatcaactcatgggtggcaaagtg

SEQ ID NO: 1162362 - DNA, 25 bp, Homo sapien
tcatctcgagtcatccctccaaaaa

SEQ ID NO: 1162363 - DNA, 25 bp, Homo sapien
catcatcttcatctcgagtcatccc

SEQ ID NO: 1162364 - DNA, 25 bp, Homo sapien
atcatcttcatctcgagtcatccct

SEQ ID NO: 1162365 - DNA, 25 bp, Homo sapien
tcttcatctcgagtcatccctccaa

SEQ ID NO: 1162366 - DNA, 25 bp, Homo sapien
catcaaagccgaagttatcgtggaa

SEQ ID NO: 1162367 - DNA, 25 bp, Homo sapien
ttatcgtggaaacgtatccctcctc

SEQ ID NO: 1162368 - DNA, 25 bp, Homo sapien
cgtggaaacgtatccctcctcctgg

SEQ ID NO: 1162369 - DNA, 25 bp, Homo sapien
gccgaagttatcgtggaaacgtatc

SEQ ID NO: 1162370 - DNA, 25 bp, Homo sapien
tgaagatgctattgaaatctcgtac

SEQ ID NO: 1162371 - DNA, 25 bp, Homo sapien
ccccatatcgctgaagatgctattg

SEQ ID NO: 1162372 - DNA, 25 bp, Homo sapien
ccaggcccccatatcgctgaagatg

SEQ ID NO: 1162373 - DNA, 25 bp, Homo sapien
tatcgctgaagatgctattgaaatc

SEQ ID NO: 1162374 - DNA, 25 bp, Homo sapien
gggctctattaatctctctgaaatc

SEQ ID NO: 1162375 - DNA, 25 bp, Homo sapien
ctgggatgggaaaggacttgggctc

SEQ ID NO: 1162376 - DNA, 25 bp, Homo sapien
aaaggacttgggctctattaatctc

SEQ ID NO: 1162377 - DNA, 25 bp, Homo sapien
gatgggaaaggacttgggctctatt

SEQ ID NO: 1162378 - DNA, 25 bp, Homo sapien
taagcattgagtcccgaagtgtctg

SEQ ID NO: 1162379 - DNA, 25 bp, Homo sapien
acttaagcattgagtcccgaagtgt

SEQ ID NO: 1162380 - DNA, 25 bp, Homo sapien
cttaagcattgagtcccgaagtgtc

SEQ ID NO: 1162381 - DNA, 25 bp, Homo sapien
aagcattgagtcccgaagtgtctgt

SEQ ID NO: 1162382 - DNA, 25 bp, Homo sapien
catagtaagtgaaaagactccttcc

SEQ ID NO: 1162383 - DNA, 25 bp, Homo sapien
tgcagaagaaaccatagtaagtgaa

SEQ ID NO: 1162384 - DNA, 25 bp, Homo sapien
aaccatagtaagtgaaaagactcct

SEQ ID NO: 1162385 - DNA, 25 bp, Homo sapien
gaagaaaccatagtaagtgaaaaga

SEQ ID NO: 1162386 - DNA, 25 bp, Homo sapien
ggtccataggccatacatcatcaaa

SEQ ID NO: 1162387 - DNA, 25 bp, Homo sapien
tctaggatgggggtccataggccat

SEQ ID NO: 1162388 - DNA, 25 bp, Homo sapien
tctggttctaggatgggggtccata

SEQ ID NO: 1162389 - DNA, 25 bp, Homo sapien
tgggggtccataggccatacatcat

SEQ ID NO: 1162390 - DNA, 25 bp, Homo sapien
gggagaacacacagaacttcagaag

SEQ ID NO: 1162391 - DNA, 25 bp, Homo sapien
ggagaacacacagaacttcagaaga

SEQ ID NO: 1162392 - DNA, 25 bp, Homo sapien
gagaacacacagaacttcagaagaa

SEQ ID NO: 1162393 - DNA, 25 bp, Homo sapien
gaacacacagaacttcagaagaata

SEQ ID NO: 1162394 - DNA, 25 bp, Homo sapien
aaggagacaagtgtacaggaagaaa

SEQ ID NO: 1162395 - DNA, 25 bp, Homo sapien
gaaaaaaggagacaagtgtacagga

SEQ ID NO: 1162396 - DNA, 25 bp, Homo sapien
cttgaaataggatttgggctggggc

SEQ ID NO: 1162397 - DNA, 25 bp, Homo sapien
tgaaataggatttgggctggggctg

SEQ ID NO: 1162398 - DNA, 25 bp, Homo sapien
ctcttgaaataggatttgggctggg

SEQ ID NO: 1162399 - DNA, 25 bp, Homo sapien
tgctcttgaaataggatttgggctg

SEQ ID NO: 1162400 - DNA, 25 bp, Homo sapien
catctggtttagtgatcttggtcac

SEQ ID NO: 1162401 - DNA, 25 bp, Homo sapien
ccatctggtttagtgatcttggtca

SEQ ID NO: 1162402 - DNA, 25 bp, Homo sapien
cccatctggtttagtgatcttggtc

SEQ ID NO: 1162403 - DNA, 25 bp, Homo sapien
gaagtccccaccatattccgaatgt

SEQ ID NO: 1162404 - DNA, 25 bp, Homo sapien
tttcagggcattcgttccctggcca

SEQ ID NO: 1162405 - DNA, 25 bp, Homo sapien
ctttacacagatccctgtttcaggg

SEQ ID NO: 1162406 - DNA, 25 bp, Homo sapien
tgttactaaaggttatgctcagcag

SEQ ID NO: 1162407 - DNA, 25 bp, Homo sapien
gcttcgtgtcgggttactgtagtct

SEQ ID NO: 1162408 - DNA, 25 bp, Homo sapien
ttcgtgtcgggttactgtagtctct

SEQ ID NO: 1162409 - DNA, 25 bp, Homo sapien
ctgcttcgtgtcgggttactgtagt

SEQ ID NO: 1162410 - DNA, 25 bp, Homo sapien
cttcgtgtcgggttactgtagtctc

SEQ ID NO: 1162411 - DNA, 25 bp, Homo sapien
aagtcatacacgtaaataggctaaa

SEQ ID NO: 1162412 - DNA, 25 bp, Homo sapien
ggaagaaagtcatacacgtaaatag

SEQ ID NO: 1162413 - DNA, 25 bp, Homo sapien
ggaatcttgagatgaacccctttgt

SEQ ID NO: 1162414 - DNA, 25 bp, Homo sapien
cccttccccaaggaatcttgagatg

SEQ ID NO: 1162415 - DNA, 25 bp, Homo sapien
ccaacgtcccaggaataagtccagg

SEQ ID NO: 1162416 - DNA, 25 bp, Homo sapien
accaacgtcccaggaataagtccag

SEQ ID NO: 1162417 - DNA, 25 bp, Homo sapien
tgaaggcctctgagggttaacaagg

SEQ ID NO: 1162418 - DNA, 25 bp, Homo sapien
acttgaaggcctctgagggttaaca

SEQ ID NO: 1162419 - DNA, 25 bp, Homo sapien
aaggacttgaaggcctctgagggtt

SEQ ID NO: 1162420 - DNA, 25 bp, Homo sapien
ggacttgaaggcctctgagggttaa

SEQ ID NO: 1162421 - DNA, 25 bp, Homo sapien
ggtcagtttgggtgagtgacaaact

SEQ ID NO: 1162422 - DNA, 25 bp, Homo sapien
tttattggtcagtttgggtgagtga

SEQ ID NO: 1162423 - DNA, 25 bp, Homo sapien
tggtcagtttgggtgagtgacaaac

SEQ ID NO: 1162424 - DNA, 25 bp, Homo sapien
tattggtcagtttgggtgagtgaca

SEQ ID NO: 1162425 - DNA, 25 bp, Homo sapien
ctctgaattgttcgaatttttgtac

SEQ ID NO: 1162426 - DNA, 25 bp, Homo sapien
tgaattgttcgaatttttgtacatg

SEQ ID NO: 1162427 - DNA, 25 bp, Homo sapien
ttatacgggagactggctaatcttc

SEQ ID NO: 1162428 - DNA, 25 bp, Homo sapien
tgcatgccattcttatacgggagac

SEQ ID NO: 1162429 - DNA, 25 bp, Homo sapien
gccattcttatacgggagactggct

SEQ ID NO: 1162430 - DNA, 25 bp, Homo sapien
ttcttatacgggagactggctaatc

SEQ ID NO: 1162431 - DNA, 25 bp, Homo sapien
cagccggggcctgagtgaagaccat

SEQ ID NO: 1162432 - DNA, 25 bp, Homo sapien
cggaggtggcccatgatttcagccg

SEQ ID NO: 1162433 - DNA, 25 bp, Homo sapien
aaacacacccagaaactctgccagg

SEQ ID NO: 1162434 - DNA, 25 bp, Homo sapien
tatccggaggtggcccatgatttca

SEQ ID NO: 1162435 - DNA, 25 bp, Homo sapien
taccacccacgtagatggctatcgt

SEQ ID NO: 1162436 - DNA, 25 bp, Homo sapien
cacgtagatggctatcgtaacggcc

SEQ ID NO: 1162437 - DNA, 25 bp, Homo sapien
ctgagacgttaccacccacgtagat

SEQ ID NO: 1162438 - DNA, 25 bp, Homo sapien
tggctatcgtaacggccagagagcc

SEQ ID NO: 1162439 - DNA, 25 bp, Homo sapien
ctgctctgatgaccagaccccaccc

SEQ ID NO: 1162440 - DNA, 25 bp, Homo sapien
ctgatgaccagaccccaccctcctc

SEQ ID NO: 1162441 - DNA, 25 bp, Homo sapien
gatgaccagaccccaccctcctcac

SEQ ID NO: 1162442 - DNA, 25 bp, Homo sapien
gctctgatgaccagaccccaccctc

SEQ ID NO: 1162443 - DNA, 25 bp, Homo sapien
tcacagaaggatttgcgtttccacc

SEQ ID NO: 1162444 - DNA, 25 bp, Homo sapien
atcgccagaccgacacgctcacatg

SEQ ID NO: 1162445 - DNA, 25 bp, Homo sapien
gatttgcgtttccaccatcgccaga

SEQ ID NO: 1162446 - DNA, 25 bp, Homo sapien
gaaggatttgcgtttccaccatcgc

SEQ ID NO: 1162447 - DNA, 25 bp, Homo sapien
tggaaacaccctattgctattcact

SEQ ID NO: 1162448 - DNA, 25 bp, Homo sapien
gaaacaccctattgctattcactgc

SEQ ID NO: 1162449 - DNA, 25 bp, Homo sapien
aacaccctattgctattcactgctc

SEQ ID NO: 1162450 - DNA, 25 bp, Homo sapien
cctattgctattcactgctccctct

SEQ ID NO: 1162451 - DNA, 25 bp, Homo sapien
tttcagccggggcctgagtgaagac

SEQ ID NO: 1162452 - DNA, 25 bp, Homo sapien
tcagccggggcctgagtgaagacca

SEQ ID NO: 1162453 - DNA, 25 bp, Homo sapien
cagccggggcctgagtgaagaccat

SEQ ID NO: 1162454 - DNA, 25 bp, Homo sapien
gatttcagccggggcctgagtgaag

SEQ ID NO: 1162455 - DNA, 25 bp, Homo sapien
aaacacacccagaaactctgccagg

SEQ ID NO: 1162456 - DNA, 25 bp, Homo sapien
cacgtagatggctatcgtaacggcc

SEQ ID NO: 1162457 - DNA, 25 bp, Homo sapien
ctgagacgttaccacccacgtagat

SEQ ID NO: 1162458 - DNA, 25 bp, Homo sapien
tggctatcgtaacggccagagagcc

SEQ ID NO: 1162459 - DNA, 25 bp, Homo sapien
taccacccacgtagatggctatcgt

SEQ ID NO: 1162460 - DNA, 25 bp, Homo sapien
acataggtggctcccgaagcacaga

SEQ ID NO: 1162461 - DNA, 25 bp, Homo sapien
ggaggcgtccaacgatgcacatggc

SEQ ID NO: 1162462 - DNA, 25 bp, Homo sapien
catggtagagaacataggtggctcc

SEQ ID NO: 1162463 - DNA, 25 bp, Homo sapien
gagaaggctggattcaggtgggccc

SEQ ID NO: 1162464 - DNA, 25 bp, Homo sapien
tcaggttcccacctgtatagttctg

SEQ ID NO: 1162465 - DNA, 25 bp, Homo sapien
tcccacctgtatagttctgtagggc

SEQ ID NO: 1162466 - DNA, 25 bp, Homo sapien
ataggtggcaaaaatggaggctgtc

SEQ ID NO: 1162467 - DNA, 25 bp, Homo sapien
gatagggggcaggataggtggcaaa

SEQ ID NO: 1162468 - DNA, 25 bp, Homo sapien
ctccacccagagactgaacaatagg

SEQ ID NO: 1162469 - DNA, 25 bp, Homo sapien
cactccacccagagactgaacaata

SEQ ID NO: 1162470 - DNA, 25 bp, Homo sapien
agtgccaagatagacccaacccaca

SEQ ID NO: 1162471 - DNA, 25 bp, Homo sapien
gtggggagtgccaagatagacccaa

SEQ ID NO: 1162472 - DNA, 25 bp, Homo sapien
atctgccctctctcatccaaatatt

SEQ ID NO: 1162473 - DNA, 25 bp, Homo sapien
cttggagtcaacagaggcagagggt

SEQ ID NO: 1162474 - DNA, 25 bp, Homo sapien
aggcagagggttccctgtcagctgc

SEQ ID NO: 1162475 - DNA, 25 bp, Homo sapien
ctgtcagctgccaggtgctccatct

SEQ ID NO: 1162476 - DNA, 25 bp, Homo sapien
gccagccacgtaggtgaagagacgt

SEQ ID NO: 1162477 - DNA, 25 bp, Homo sapien
gactcccttgttccgtctgtccagg

SEQ ID NO: 1162478 - DNA, 25 bp, Homo sapien
gttgagtggaatcccgcagttggca

SEQ ID NO: 1162479 - DNA, 25 bp, Homo sapien
gcagttggcacccatggataacccg

SEQ ID NO: 1162480 - DNA, 25 bp, Homo sapien
cagggacagagcccttagcagagga

SEQ ID NO: 1162481 - DNA, 25 bp, Homo sapien
agggacagagcccttagcagaggaa

SEQ ID NO: 1162482 - DNA, 25 bp, Homo sapien
ccttagcagaggaaggtgagtggag

SEQ ID NO: 1162483 - DNA, 25 bp, Homo sapien
gaaagaacactgtcctaagaagcca

SEQ ID NO: 1162484 - DNA, 25 bp, Homo sapien
tcccagggtggtagacaccaggaag

SEQ ID NO: 1162485 - DNA, 25 bp, Homo sapien
gagagtgccctaaagttgttcccag

SEQ ID NO: 1162486 - DNA, 25 bp, Homo sapien
caccaggaagaggattgccttgtca

SEQ ID NO: 1162487 - DNA, 25 bp, Homo sapien
gaggctttgtgttgagcagacacca

SEQ ID NO: 1162488 - DNA, 25 bp, Homo sapien
caactctgaggctttgtgttgagca

SEQ ID NO: 1162489 - DNA, 25 bp, Homo sapien
ctcagggtggtgcagagccaccaac

SEQ ID NO: 1162490 - DNA, 25 bp, Homo sapien
ccctcagggtggtgcagagccacca

SEQ ID NO: 1162491 - DNA, 25 bp, Homo sapien
gagcaactacattccgagaggccct

SEQ ID NO: 1162492 - DNA, 25 bp, Homo sapien
tgagggtcagaaaaccgctttgcgg

SEQ ID NO: 1162493 - DNA, 25 bp, Homo sapien
tccatgagtgaagtgagggttgtcc

SEQ ID NO: 1162494 - DNA, 25 bp, Homo sapien
tctagcggttacctcgagcaactac

SEQ ID NO: 1162495 - DNA, 25 bp, Homo sapien
taactaccctcttggggaggcatcc

SEQ ID NO: 1162496 - DNA, 25 bp, Homo sapien
gggaggcgccgaggcgatgagagct

SEQ ID NO: 1162497 - DNA, 25 bp, Homo sapien
gaggcatccccgagagggtgaaggt

SEQ ID NO: 1162498 - DNA, 25 bp, Homo sapien
gctaggagtcggcagtcgggacagg

SEQ ID NO: 1162499 - DNA, 25 bp, Homo sapien
tccttgaatgaacgacacagcaccg

SEQ ID NO: 1162500 - DNA, 25 bp, Homo sapien
taaccagaattttccctggcgccag

SEQ ID NO: 1162501 - DNA, 25 bp, Homo sapien
cacagcaccgagatgtctaggaacg

SEQ ID NO: 1162502 - DNA, 25 bp, Homo sapien
cactgtatctcaactctccttgaat

SEQ ID NO: 1162503 - DNA, 25 bp, Homo sapien
ggcggccccgtactgcccatgccgg

SEQ ID NO: 1162504 - DNA, 25 bp, Homo sapien
ccccggcggccccgtactgcccatg

SEQ ID NO: 1162505 - DNA, 25 bp, Homo sapien
aggagaagaggccagatattgaaaa

SEQ ID NO: 1162506 - DNA, 25 bp, Homo sapien
aaaggggaacagctctcaaggtatc

SEQ ID NO: 1162507 - DNA, 25 bp, Homo sapien
gagaagaggccagatattgaaaaaa

SEQ ID NO: 1162508 - DNA, 25 bp, Homo sapien
aagaggccagatattgaaaaaaggg

SEQ ID NO: 1162509 - DNA, 25 bp, Homo sapien
agatcccagcaatcccatgggagac

SEQ ID NO: 1162510 - DNA, 25 bp, Homo sapien
gcaagatcccagcaatcccatggga

SEQ ID NO: 1162511 - DNA, 25 bp, Homo sapien
ccagcaagatcccagcaatcccatg

SEQ ID NO: 1162512 - DNA, 25 bp, Homo sapien
agcaagatcccagcaatcccatggg

SEQ ID NO: 1162513 - DNA, 25 bp, Homo sapien
gggggcgcttttttgcacacactgc

SEQ ID NO: 1162514 - DNA, 25 bp, Homo sapien
gggcgcttttttgcacacactgcca

SEQ ID NO: 1162515 - DNA, 25 bp, Homo sapien
ctggggggcgcttttttgcacacac

SEQ ID NO: 1162516 - DNA, 25 bp, Homo sapien
ggcgcttttttgcacacactgccat

SEQ ID NO: 1162517 - DNA, 25 bp, Homo sapien
cgcagccgctcagaggggagcccca

SEQ ID NO: 1162518 - DNA, 25 bp, Homo sapien
cttagtggcatcgacggggcggctc

SEQ ID NO: 1162519 - DNA, 25 bp, Homo sapien
agccccagccgtcgggcgcgcgccc

SEQ ID NO: 1162520 - DNA, 25 bp, Homo sapien
cagcccaggccatcctcccggccgc

SEQ ID NO: 1162521 - DNA, 25 bp, Homo sapien
gggcagaccgtctatatgtccttgg

SEQ ID NO: 1162522 - DNA, 25 bp, Homo sapien
agtgggggagggcagaccgtctata

SEQ ID NO: 1162523 - DNA, 25 bp, Homo sapien
ggcagaccgtctatatgtccttggc

SEQ ID NO: 1162524 - DNA, 25 bp, Homo sapien
ggagggcagaccgtctatatgtcct

SEQ ID NO: 1162525 - DNA, 25 bp, Homo sapien
cccaagagggcttctttcggctcca

SEQ ID NO: 1162526 - DNA, 25 bp, Homo sapien
tgggcccgggcccacttctcgggca

SEQ ID NO: 1162527 - DNA, 25 bp, Homo sapien
tcgggcatctccttggggaccgtca

SEQ ID NO: 1162528 - DNA, 25 bp, Homo sapien
tttcggctccaagagggaggcgcct

SEQ ID NO: 1162529 - DNA, 25 bp, Homo sapien
ggatccttcggagccaggatctctg

SEQ ID NO: 1162530 - DNA, 25 bp, Homo sapien
aagtcccctgcgcaatcaccaaaga

SEQ ID NO: 1162531 - DNA, 25 bp, Homo sapien
caaagaccatgcaaacgaagaaggt

SEQ ID NO: 1162532 - DNA, 25 bp, Homo sapien
acgaagaaggtagggactggatcct

SEQ ID NO: 1162533 - DNA, 25 bp, Homo sapien
gtattctcggtcattagcccgcgcc

SEQ ID NO: 1162534 - DNA, 25 bp, Homo sapien
tctcattgtattctcggtcattagc

SEQ ID NO: 1162535 - DNA, 25 bp, Homo sapien
tcattgtattctcggtcattagccc

SEQ ID NO: 1162536 - DNA, 25 bp, Homo sapien
attgtattctcggtcattagcccgc

SEQ ID NO: 1162537 - DNA, 25 bp, Homo sapien
acttggaggtcttgatgcagttact

SEQ ID NO: 1162538 - DNA, 25 bp, Homo sapien
tacttggaggtcttgatgcagttac

SEQ ID NO: 1162539 - DNA, 25 bp, Homo sapien
gtacttggaggtcttgatgcagtta

SEQ ID NO: 1162540 - DNA, 25 bp, Homo sapien
tgtacttggaggtcttgatgcagtt

SEQ ID NO: 1162541 - DNA, 25 bp, Homo sapien
gcacaatggtggtgaaccaggacag

SEQ ID NO: 1162542 - DNA, 25 bp, Homo sapien
tattcacctggttatcgctcttgtg

SEQ ID NO: 1162543 - DNA, 25 bp, Homo sapien
cctggttatcgctcttgtggcggaa

SEQ ID NO: 1162544 - DNA, 25 bp, Homo sapien
tgagactggcggttattcacctggt

SEQ ID NO: 1162545 - DNA, 25 bp, Homo sapien
ttccattgatcagcacctgagactg

SEQ ID NO: 1162546 - DNA, 25 bp, Homo sapien
gataatatcaccaacacagacattc

SEQ ID NO: 1162547 - DNA, 25 bp, Homo sapien
tatcaccaacacagacattcatcca

SEQ ID NO: 1162548 - DNA, 25 bp, Homo sapien
taatatcaccaacacagacattcat

SEQ ID NO: 1162549 - DNA, 25 bp, Homo sapien
tgataatatcaccaacacagacatt

SEQ ID NO: 1162550 - DNA, 25 bp, Homo sapien
tgctgtctctatgtaacacagccca

SEQ ID NO: 1162551 - DNA, 25 bp, Homo sapien
tgtctctatgtaacacagcccatgg

SEQ ID NO: 1162552 - DNA, 25 bp, Homo sapien
ctgtctctatgtaacacagcccatg

SEQ ID NO: 1162553 - DNA, 25 bp, Homo sapien
gtctctatgtaacacagcccatggg

SEQ ID NO: 1162554 - DNA, 25 bp, Homo sapien
ggcaagcttactgatgtctcccaat

SEQ ID NO: 1162555 - DNA, 25 bp, Homo sapien
ggtgactggaatcgcctgacgtact

SEQ ID NO: 1162556 - DNA, 25 bp, Homo sapien
atcgcctgacgtactttcatgttgg

SEQ ID NO: 1162557 - DNA, 25 bp, Homo sapien
tctcccaattctgaggtgactggaa

SEQ ID NO: 1162558 - DNA, 25 bp, Homo sapien
gacaagaattccactgcttaaggtc

SEQ ID NO: 1162559 - DNA, 25 bp, Homo sapien
acaagaattccactgcttaaggtcc

SEQ ID NO: 1162560 - DNA, 25 bp, Homo sapien
aagaattccactgcttaaggtccag

SEQ ID NO: 1162561 - DNA, 25 bp, Homo sapien
caagaattccactgcttaaggtcca

SEQ ID NO: 1162562 - DNA, 25 bp, Homo sapien
gcatgttctggttgctcagagggaa

SEQ ID NO: 1162563 - DNA, 25 bp, Homo sapien
ctgcaaagatgaccagcccgaagca

SEQ ID NO: 1162564 - DNA, 25 bp, Homo sapien
ttgggaggttcacagatcacttcac

SEQ ID NO: 1162565 - DNA, 25 bp, Homo sapien
cactcggtgtttcgcagcacacagc

SEQ ID NO: 1162566 - DNA, 25 bp, Homo sapien
ctttctttggatgctaggaggctca

SEQ ID NO: 1162567 - DNA, 25 bp, Homo sapien
tttctttggatgctaggaggctcac

SEQ ID NO: 1162568 - DNA, 25 bp, Homo sapien
tattcattaggcgatcgatactcgt

SEQ ID NO: 1162569 - DNA, 25 bp, Homo sapien
tgttctgccgctgttttgcatcagc

SEQ ID NO: 1162570 - DNA, 25 bp, Homo sapien
cagagcaccagggtattcattaggc

SEQ ID NO: 1162571 - DNA, 25 bp, Homo sapien
ggcgatcgatactcgttcttttgaa

SEQ ID NO: 1162572 - DNA, 25 bp, Homo sapien
ggaggagagcccaacaaggagttca

SEQ ID NO: 1162573 - DNA, 25 bp, Homo sapien
ggcggaaacaagctcaccagaggct

SEQ ID NO: 1162574 - DNA, 25 bp, Homo sapien
cttatgtgatagacaacctcgccca

SEQ ID NO: 1162575 - DNA, 25 bp, Homo sapien
taggagattggtgcccaatggccac

SEQ ID NO: 1162576 - DNA, 25 bp, Homo sapien
ttatcttcataaacgtagatttctt

SEQ ID NO: 1162577 - DNA, 25 bp, Homo sapien
cttatcttcataaacgtagatttct

SEQ ID NO: 1162578 - DNA, 25 bp, Homo sapien
tatcttcataaacgtagatttcttt

SEQ ID NO: 1162579 - DNA, 25 bp, Homo sapien
atgatgatgtaggaccagaaggaga

SEQ ID NO: 1162580 - DNA, 25 bp, Homo sapien
tcatcccacggcaggtagacctgga

SEQ ID NO: 1162581 - DNA, 25 bp, Homo sapien
ggcattgccaatggccaggatcacc

SEQ ID NO: 1162582 - DNA, 25 bp, Homo sapien
agtgaaatgggcacaacggtgttga

SEQ ID NO: 1162583 - DNA, 25 bp, Homo sapien
ggaccgcctgactccctggagagac

SEQ ID NO: 1162584 - DNA, 25 bp, Homo sapien
aagaaaagttctatgggaccgcctg

SEQ ID NO: 1162585 - DNA, 25 bp, Homo sapien
gacttctcgttacttctcaaggact

SEQ ID NO: 1162586 - DNA, 25 bp, Homo sapien
gaagaggacttctcgttacttctca

SEQ ID NO: 1162587 - DNA, 25 bp, Homo sapien
ggcatgtaataaataggtgctgaat

SEQ ID NO: 1162588 - DNA, 25 bp, Homo sapien
ttttatttgtgatggcacctagcac

SEQ ID NO: 1162589 - DNA, 25 bp, Homo sapien
taatacagtcccaagtaccaggaaa

SEQ ID NO: 1162590 - DNA, 25 bp, Homo sapien
tttttctctaatacagtcccaagta

SEQ ID NO: 1162591 - DNA, 25 bp, Homo sapien
cattgatggagcacttgttgaaaac

SEQ ID NO: 1162592 - DNA, 25 bp, Homo sapien
ctggcccagctcctcgtttagggtg

SEQ ID NO: 1162593 - DNA, 25 bp, Homo sapien
ctgtggcccagacggatgacctcca

SEQ ID NO: 1162594 - DNA, 25 bp, Homo sapien
tgcaggcgtccgcttcttcatgcag

SEQ ID NO: 1162595 - DNA, 25 bp, Homo sapien
tgtgtgtggatttttctcgagagac

SEQ ID NO: 1162596 - DNA, 25 bp, Homo sapien
gatttttctcgagagacagggcctc

SEQ ID NO: 1162597 - DNA, 25 bp, Homo sapien
gtggatttttctcgagagacagggc

SEQ ID NO: 1162598 - DNA, 25 bp, Homo sapien
tgtgtggatttttctcgagagacag

SEQ ID NO: 1162599 - DNA, 25 bp, Homo sapien
tttgtgtcccaggacgtcaaacaca

SEQ ID NO: 1162600 - DNA, 25 bp, Homo sapien
tgtgtcccaggacgtcaaacacatc

SEQ ID NO: 1162601 - DNA, 25 bp, Homo sapien
tgtcccaggacgtcaaacacatcac

SEQ ID NO: 1162602 - DNA, 25 bp, Homo sapien
agctttgtgtcccaggacgtcaaac

SEQ ID NO: 1162603 - DNA, 25 bp, Homo sapien
aataagaacttcttgtcagccagag

SEQ ID NO: 1162604 - DNA, 25 bp, Homo sapien
aaggagaagtcaacaggttcaggcc

SEQ ID NO: 1162605 - DNA, 25 bp, Homo sapien
tgacatgacagtatgacacagggaa

SEQ ID NO: 1162606 - DNA, 25 bp, Homo sapien
gaggcggaagaactcatgcgtgtgg

SEQ ID NO: 1162607 - DNA, 25 bp, Homo sapien
aaccaaagttcctggctgcggtgac

SEQ ID NO: 1162608 - DNA, 25 bp, Homo sapien
tgtgcccatctcatggacggtgatt

SEQ ID NO: 1162609 - DNA, 25 bp, Homo sapien
gtgcgagagcggaaaacaaaaccaa

SEQ ID NO: 1162610 - DNA, 25 bp, Homo sapien
tccgcttgcggatgttgttgaagtc

SEQ ID NO: 1162611 - DNA, 25 bp, Homo sapien
tgtccagtaggatagtgtcagcccc

SEQ ID NO: 1162612 - DNA, 25 bp, Homo sapien
tttgcagtagagtcggatcttcccc

SEQ ID NO: 1162613 - DNA, 25 bp, Homo sapien
aaggtggtccatggtggtgttgagc

SEQ ID NO: 1162614 - DNA, 25 bp, Homo sapien
ttgagcagctcttgagtggagtggt

SEQ ID NO: 1162615 - DNA, 25 bp, Homo sapien
gttgttctcaacctcctcatagatg

SEQ ID NO: 1162616 - DNA, 25 bp, Homo sapien
atccttgtaggccagcaccagggtc

SEQ ID NO: 1162617 - DNA, 25 bp, Homo sapien
tggcctggaggcgtcgctcagccca

SEQ ID NO: 1162618 - DNA, 25 bp, Homo sapien
tcgtagtactcttcatccagatcct

SEQ ID NO: 1162619 - DNA, 25 bp, Homo sapien
tgaagtttgtcctcaatggccgttg

SEQ ID NO: 1162620 - DNA, 25 bp, Homo sapien
caatggtctctggaaccccttgctg

SEQ ID NO: 1162621 - DNA, 25 bp, Homo sapien
ccagtgtcaggagggcaatggtctc

SEQ ID NO: 1162622 - DNA, 25 bp, Homo sapien
gcttgtctccggttagcacccaaat

SEQ ID NO: 1162623 - DNA, 25 bp, Homo sapien
agttgcaactggctctgccctgctg

SEQ ID NO: 1162624 - DNA, 25 bp, Homo sapien
tgtcagttgcaactggctctgccct

SEQ ID NO: 1162625 - DNA, 25 bp, Homo sapien
tcagttgcaactggctctgccctgc

SEQ ID NO: 1162626 - DNA, 25 bp, Homo sapien
gttgcaactggctctgccctgctgg

SEQ ID NO: 1162627 - DNA, 25 bp, Homo sapien
tcatgtcatccgtcagcatcttgca

SEQ ID NO: 1162628 - DNA, 25 bp, Homo sapien
gcacctccaggacagtatggccagt

SEQ ID NO: 1162629 - DNA, 25 bp, Homo sapien
tcttgcaggaatagccgatgttcac

SEQ ID NO: 1162630 - DNA, 25 bp, Homo sapien
tatggccagtgactatgaaaacctc

SEQ ID NO: 1162631 - DNA, 25 bp, Homo sapien
ctgtcgaggtggaaatgatacggtt

SEQ ID NO: 1162632 - DNA, 25 bp, Homo sapien
tcgaggtggaaatgatacggttgtg

SEQ ID NO: 1162633 - DNA, 25 bp, Homo sapien
tgtcgaggtggaaatgatacggttg

SEQ ID NO: 1162634 - DNA, 25 bp, Homo sapien
gaggtggaaatgatacggttgtggt

SEQ ID NO: 1162635 - DNA, 25 bp, Homo sapien
ccaggacagaagttagcttggaaga

SEQ ID NO: 1162636 - DNA, 25 bp, Homo sapien
catttatgaccagggcgtactcccc

SEQ ID NO: 1162637 - DNA, 25 bp, Homo sapien
taggtgaagccgttgcctacggagc

SEQ ID NO: 1162638 - DNA, 25 bp, Homo sapien
cctacggagcgggatgagtccatca

SEQ ID NO: 1162639 - DNA, 25 bp, Homo sapien
aaagatactgcccaagctaaggata

SEQ ID NO: 1162640 - DNA, 25 bp, Homo sapien
tgcccaagctaaggatagcgatgcc

SEQ ID NO: 1162641 - DNA, 25 bp, Homo sapien
gatactgcccaagctaaggatagcg

SEQ ID NO: 1162642 - DNA, 25 bp, Homo sapien
ccaagctaaggatagcgatgcctac

SEQ ID NO: 1162643 - DNA, 25 bp, Homo sapien
aggcacacgctgtctccagaaactc

SEQ ID NO: 1162644 - DNA, 25 bp, Homo sapien
aatggcaagcgtcacagccttcttg

SEQ ID NO: 1162645 - DNA, 25 bp, Homo sapien
tgaccagttctaccacctgtgcctt

SEQ ID NO: 1162646 - DNA, 25 bp, Homo sapien
ggctccgtctccaatggcaagcgtc

SEQ ID NO: 1162647 - DNA, 25 bp, Homo sapien
aaaccagaagtggaccatggtgaaa

SEQ ID NO: 1162648 - DNA, 25 bp, Homo sapien
gaagtggaccatggtgaaagcaaag

SEQ ID NO: 1162649 - DNA, 25 bp, Homo sapien
agaaggagtaatcggaggccaagac

SEQ ID NO: 1162650 - DNA, 25 bp, Homo sapien
agaaacttgcacattcgcaggtagg

SEQ ID NO: 1162651 - DNA, 25 bp, Homo sapien
gttatacagggtgatgaaatactgg

SEQ ID NO: 1162652 - DNA, 25 bp, Homo sapien
gcagggaggtgtacacgatgttata

SEQ ID NO: 1162653 - DNA, 25 bp, Homo sapien
atcaaagacccccatagccaggact

SEQ ID NO: 1162654 - DNA, 25 bp, Homo sapien
cacgatgttatacagggtgatgaaa

SEQ ID NO: 1162655 - DNA, 25 bp, Homo sapien
cctgggcgatgcagatgaagaactc

SEQ ID NO: 1162656 - DNA, 25 bp, Homo sapien
gaagaactcccgcttgttgaagaga

SEQ ID NO: 1162657 - DNA, 25 bp, Homo sapien
catgagcacggaggtgtagatgccc

SEQ ID NO: 1162658 - DNA, 25 bp, Homo sapien
ttgaagagaaggttcagctggcccg

SEQ ID NO: 1162659 - DNA, 25 bp, Homo sapien
tggttgatggccgtccagtagcctg

SEQ ID NO: 1162660 - DNA, 25 bp, Homo sapien
ccggaactggttgggaaacatgtcg

SEQ ID NO: 1162661 - DNA, 25 bp, Homo sapien
gaaacatgtcgaagagcccattgct

SEQ ID NO: 1162662 - DNA, 25 bp, Homo sapien
gtccagtagcctgtgtcgagcccaa

SEQ ID NO: 1162663 - DNA, 25 bp, Homo sapien
ggaaggcaaccacgggcatgatgca

SEQ ID NO: 1162664 - DNA, 25 bp, Homo sapien
agcacaatggtcagccacaccgtgg

SEQ ID NO: 1162665 - DNA, 25 bp, Homo sapien
catgatgcagacgactgtggtgagc

SEQ ID NO: 1162666 - DNA, 25 bp, Homo sapien
cctgaggaatcggaaggcaaccacg

SEQ ID NO: 1162667 - DNA, 25 bp, Homo sapien
aacccgccgcatgcagcggtgctgg

SEQ ID NO: 1162668 - DNA, 25 bp, Homo sapien
agccagtgcggccaacccgccgcat

SEQ ID NO: 1162669 - DNA, 25 bp, Homo sapien
tcttcctcacgagctgtgtgtagcg

SEQ ID NO: 1162670 - DNA, 25 bp, Homo sapien
tcctcacgagctgtgtgtagcggac

SEQ ID NO: 1162671 - DNA, 25 bp, Homo sapien
agacatgatgagctccccgaagccc

SEQ ID NO: 1162672 - DNA, 25 bp, Homo sapien
ctgcgcaggctctcaatccagctgg

SEQ ID NO: 1162673 - DNA, 25 bp, Homo sapien
tggggctactggcactgtcactctt

SEQ ID NO: 1162674 - DNA, 25 bp, Homo sapien
gcgcgagagagctcagccgcatgtt

SEQ ID NO: 1162675 - DNA, 25 bp, Homo sapien
aatgaggaccagcagttccgagacg

SEQ ID NO: 1162676 - DNA, 25 bp, Homo sapien
tctactacccggcacaaggattcca

SEQ ID NO: 1162677 - DNA, 25 bp, Homo sapien
tgtaaactgtgtggccaaaagggat

SEQ ID NO: 1162678 - DNA, 25 bp, Homo sapien
gaagggcctacagctgggaacagat

SEQ ID NO: 1162679 - DNA, 25 bp, Homo sapien
gagtaaacctgggcatcctctcctc

SEQ ID NO: 1162680 - DNA, 25 bp, Homo sapien
ctttcctgggcccactttgcctttg

SEQ ID NO: 1162681 - DNA, 25 bp, Homo sapien
ctacaggtagaaattcagggtctct

SEQ ID NO: 1162682 - DNA, 25 bp, Homo sapien
taccatggtgtaatgcaaacaccca

SEQ ID NO: 1162683 - DNA, 25 bp, Homo sapien
gcccactttgcctttgggtaccatg

SEQ ID NO: 1162684 - DNA, 25 bp, Homo sapien
gtgcggttacgaaagccggagcgga

SEQ ID NO: 1162685 - DNA, 25 bp, Homo sapien
aaacatttgaggaactcgcgctgga

SEQ ID NO: 1162686 - DNA, 25 bp, Homo sapien
gaggaactcgcgctggagcgtctct

SEQ ID NO: 1162687 - DNA, 25 bp, Homo sapien
actcgcacatgactcagagcggcgg

SEQ ID NO: 1162688 - DNA, 25 bp, Homo sapien
cccgcagaggcggacaggctaatgg

SEQ ID NO: 1162689 - DNA, 25 bp, Homo sapien
ggctctctacacacactgcgagtcc

SEQ ID NO: 1162690 - DNA, 25 bp, Homo sapien
aggctaatgggaaccgggcggcagg

SEQ ID NO: 1162691 - DNA, 25 bp, Homo sapien
ctcctcggctaccactccatggtcc

SEQ ID NO: 1162692 - DNA, 25 bp, Homo sapien
agggcagccagcagcgcgcagccga

SEQ ID NO: 1162693 - DNA, 25 bp, Homo sapien
ctgcgcagggcagcgccttggggcc

SEQ ID NO: 1162694 - DNA, 25 bp, Homo sapien
agcgccgctcccggcgcggccagca

SEQ ID NO: 1162695 - DNA, 25 bp, Homo sapien
gcagcgcgcagccgacggccagcat

SEQ ID NO: 1162696 - DNA, 25 bp, Homo sapien
atccacacatgcacccgcgggggtg

SEQ ID NO: 1162697 - DNA, 25 bp, Homo sapien
caggcgggtacatcaccccgctggg

SEQ ID NO: 1162698 - DNA, 25 bp, Homo sapien
gggcgcgccctctcgggcagtctcc

SEQ ID NO: 1162699 - DNA, 25 bp, Homo sapien
ggcgctggtacaaaggactccccag

SEQ ID NO: 1162700 - DNA, 25 bp, Homo sapien
gagccagttgcccaactcttccaga

SEQ ID NO: 1162701 - DNA, 25 bp, Homo sapien
cctctggagagccagttgcccaact

SEQ ID NO: 1162702 - DNA, 25 bp, Homo sapien
tctggagagccagttgcccaactct

SEQ ID NO: 1162703 - DNA, 25 bp, Homo sapien
ggagagccagttgcccaactcttcc

SEQ ID NO: 1162704 - DNA, 25 bp, Homo sapien
cagcagtaacagtaacctccctggg

SEQ ID NO: 1162705 - DNA, 25 bp, Homo sapien
gcaacaggtggtggcaactacagca

SEQ ID NO: 1162706 - DNA, 25 bp, Homo sapien
gaaaactgactgtaactggctgccc

SEQ ID NO: 1162707 - DNA, 25 bp, Homo sapien
gggcctagcatccactcaggagcaa

SEQ ID NO: 1162708 - DNA, 25 bp, Homo sapien
gattcattgactggaaactcttttg

SEQ ID NO: 1162709 - DNA, 25 bp, Homo sapien
tgactggaaactcttttgcttgctg

SEQ ID NO: 1162710 - DNA, 25 bp, Homo sapien
gactagattcattgactggaaactc

SEQ ID NO: 1162711 - DNA, 25 bp, Homo sapien
tcaatccagactagattcattgact

SEQ ID NO: 1162712 - DNA, 25 bp, Homo sapien
gggagcatccatgtgtccccacaga

SEQ ID NO: 1162713 - DNA, 25 bp, Homo sapien
tatgacctggcatttagcacttccc

SEQ ID NO: 1162714 - DNA, 25 bp, Homo sapien
cagaacataacacaccctcaggtag

SEQ ID NO: 1162715 - DNA, 25 bp, Homo sapien
tgaggacttgttaccccagagatac

SEQ ID NO: 1162716 - DNA, 25 bp, Homo sapien
gaggtttccaaatcgcagggtattc

SEQ ID NO: 1162717 - DNA, 25 bp, Homo sapien
acaggaggtttccaaatcgcagggt

SEQ ID NO: 1162718 - DNA, 25 bp, Homo sapien
aggaggtttccaaatcgcagggtat

SEQ ID NO: 1162719 - DNA, 25 bp, Homo sapien
ggtttccaaatcgcagggtattcat

SEQ ID NO: 1162720 - DNA, 25 bp, Homo sapien
gccactgaagaagggggcttcgttc

SEQ ID NO: 1162721 - DNA, 25 bp, Homo sapien
ggagaagacacttggtgagcccaca

SEQ ID NO: 1162722 - DNA, 25 bp, Homo sapien
agccactgaagaagggggcttcgtt

SEQ ID NO: 1162723 - DNA, 25 bp, Homo sapien
gagggagaagacacttggtgagccc

SEQ ID NO: 1162724 - DNA, 25 bp, Homo sapien
tttccagagtcgtggagctgcaccg

SEQ ID NO: 1162725 - DNA, 25 bp, Homo sapien
gaacagtggcattgtcttccggctc

SEQ ID NO: 1162726 - DNA, 25 bp, Homo sapien
gtcagagtcacgctgtctcctggca

SEQ ID NO: 1162727 - DNA, 25 bp, Homo sapien
tcctgagcacccagtgaacagtggc

SEQ ID NO: 1162728 - DNA, 25 bp, Homo sapien
tccgaggaccccactcacaaacaac

SEQ ID NO: 1162729 - DNA, 25 bp, Homo sapien
agagcacagcctttgtcgtcaggga

SEQ ID NO: 1162730 - DNA, 25 bp, Homo sapien
cacagcctttgtcgtcagggatggg

SEQ ID NO: 1162731 - DNA, 25 bp, Homo sapien
ggctcttccggaagcaggagagctg

SEQ ID NO: 1162732 - DNA, 25 bp, Homo sapien
gctcagtcttgttggcccgcttcct

SEQ ID NO: 1162733 - DNA, 25 bp, Homo sapien
gagggccggggctcagtcttgttgg

SEQ ID NO: 1162734 - DNA, 25 bp, Homo sapien
gggctcagtcttgttggcccgcttc

SEQ ID NO: 1162735 - DNA, 25 bp, Homo sapien
ccggggctcagtcttgttggcccgc

SEQ ID NO: 1162736 - DNA, 25 bp, Homo sapien
ggaagtcttcggccggactgttctg

SEQ ID NO: 1162737 - DNA, 25 bp, Homo sapien
tggaagtcttcggccggactgttct

SEQ ID NO: 1162738 - DNA, 25 bp, Homo sapien
gaagtcttcggccggactgttctga

SEQ ID NO: 1162739 - DNA, 25 bp, Homo sapien
ccctccgggactgctaactggcagg

SEQ ID NO: 1162740 - DNA, 25 bp, Homo sapien
actgctaactggcaggagaacttct

SEQ ID NO: 1162741 - DNA, 25 bp, Homo sapien
catggacactatgtagaaagagctg

SEQ ID NO: 1162742 - DNA, 25 bp, Homo sapien
ctactggcgacgcacatggacacta

SEQ ID NO: 1162743 - DNA, 25 bp, Homo sapien
accctgaaaggtttgagttttgctg

SEQ ID NO: 1162744 - DNA, 25 bp, Homo sapien
ccctgaaaggtttgagttttgctga

SEQ ID NO: 1162745 - DNA, 25 bp, Homo sapien
gtgatgttggcaggcggatcaggct

SEQ ID NO: 1162746 - DNA, 25 bp, Homo sapien
gacactgagccagcgggggtttctg

SEQ ID NO: 1162747 - DNA, 25 bp, Homo sapien
ggtttctggccacggcagtgactgt

SEQ ID NO: 1162748 - DNA, 25 bp, Homo sapien
ctgagccagcgggggtttctggcca

SEQ ID NO: 1162749 - DNA, 25 bp, Homo sapien
tctttgaccgttcagcccgatatct

SEQ ID NO: 1162750 - DNA, 25 bp, Homo sapien
tgttgtgaatgtctttgaccgttca

SEQ ID NO: 1162751 - DNA, 25 bp, Homo sapien
gcccgatatctgagctcaaaccgta

SEQ ID NO: 1162752 - DNA, 25 bp, Homo sapien
ccgatatctgagctcaaaccgtagt

SEQ ID NO: 1162753 - DNA, 25 bp, Homo sapien
tgggcaggtagcaccccagtgggtt

SEQ ID NO: 1162754 - DNA, 25 bp, Homo sapien
gtgggttggtgccttggccagccct

SEQ ID NO: 1162755 - DNA, 25 bp, Homo sapien
gctgggcaggtagcaccccagtggg

SEQ ID NO: 1162756 - DNA, 25 bp, Homo sapien
ggtagcaccccagtgggttggtgcc

SEQ ID NO: 1162757 - DNA, 25 bp, Homo sapien
tcaggccgctccaggcgtcgtggat

SEQ ID NO: 1162758 - DNA, 25 bp, Homo sapien
ccaggcgtcgtggatgacacagtga

SEQ ID NO: 1162759 - DNA, 25 bp, Homo sapien
gctgcaccacgtgcctcaggccgct

SEQ ID NO: 1162760 - DNA, 25 bp, Homo sapien
gccgctccaggcgtcgtggatgaca

SEQ ID NO: 1162761 - DNA, 25 bp, Homo sapien
aatttaaagtttagtcaggtgcagt

SEQ ID NO: 1162762 - DNA, 25 bp, Homo sapien
tcctgggcaacgaggagaaagcctg

SEQ ID NO: 1162763 - DNA, 25 bp, Homo sapien
aaatttaaagtttagtcaggtgcag

SEQ ID NO: 1162764 - DNA, 25 bp, Homo sapien
tgtttagagttaaggagggcaccaa

SEQ ID NO: 1162765 - DNA, 25 bp, Homo sapien
caaagtgagccatgaagccattcta

SEQ ID NO: 1162766 - DNA, 25 bp, Homo sapien
taatttggttcaactacgccacagg

SEQ ID NO: 1162767 - DNA, 25 bp, Homo sapien
taacctttcatagcagggtgttgat

SEQ ID NO: 1162768 - DNA, 25 bp, Homo sapien
aatgccacccgggatggtctgtgga

SEQ ID NO: 1162769 - DNA, 25 bp, Homo sapien
cacccgggatggtctgtggagagaa

SEQ ID NO: 1162770 - DNA, 25 bp, Homo sapien
tgggtcccaaatgccacccgggatg

SEQ ID NO: 1162771 - DNA, 25 bp, Homo sapien
tcccaaatgccacccgggatggtct

SEQ ID NO: 1162772 - DNA, 25 bp, Homo sapien
tgggggtggacacctcgttctcagc

SEQ ID NO: 1162773 - DNA, 25 bp, Homo sapien
tgcatgggggtggacacctcgttct

SEQ ID NO: 1162774 - DNA, 25 bp, Homo sapien
ctgcatgggggtggacacctcgttc

SEQ ID NO: 1162775 - DNA, 25 bp, Homo sapien
catgggggtggacacctcgttctca

SEQ ID NO: 1162776 - DNA, 25 bp, Homo sapien
tatcatcgtctttattagtagtaag

SEQ ID NO: 1162777 - DNA, 25 bp, Homo sapien
ctgggaggcttgtcgcatttgcaga

SEQ ID NO: 1162778 - DNA, 25 bp, Homo sapien
ttgcagaatctctgaagagaatatt

SEQ ID NO: 1162779 - DNA, 25 bp, Homo sapien
agaatattatcatcgtctttattag

SEQ ID NO: 1162780 - DNA, 25 bp, Homo sapien
caatccactgctgacgaagaggctg

SEQ ID NO: 1162781 - DNA, 25 bp, Homo sapien
cagtcacagttgtatggacccagca

SEQ ID NO: 1162782 - DNA, 25 bp, Homo sapien
tacacagtgccgaatacaaagtagg

SEQ ID NO: 1162783 - DNA, 25 bp, Homo sapien
gcatgtcccatgtctcttgagagat

SEQ ID NO: 1162784 - DNA, 25 bp, Homo sapien
ctttgaggacaatgtcagagaggat

SEQ ID NO: 1162785 - DNA, 25 bp, Homo sapien
ttgaggacaatgtcagagaggattg

SEQ ID NO: 1162786 - DNA, 25 bp, Homo sapien
ggacaatgtcagagaggattggatg

SEQ ID NO: 1162787 - DNA, 25 bp, Homo sapien
gaggacaatgtcagagaggattgga

SEQ ID NO: 1162788 - DNA, 25 bp, Homo sapien
caaggcacaaagagggtacaacaaa

SEQ ID NO: 1162789 - DNA, 25 bp, Homo sapien
gcacaaagagggtacaacaaacgga

SEQ ID NO: 1162790 - DNA, 25 bp, Homo sapien
aggcacaaagagggtacaacaaacg

SEQ ID NO: 1162791 - DNA, 25 bp, Homo sapien
caatgcagaggagcgttccgaaggc

SEQ ID NO: 1162792 - DNA, 25 bp, Homo sapien
cagtggtactgaagaagaatcttgc

SEQ ID NO: 1162793 - DNA, 25 bp, Homo sapien
aatgtgggcagtggtactgaagaag

SEQ ID NO: 1162794 - DNA, 25 bp, Homo sapien
gagcgttccgaaggccaggctccct

SEQ ID NO: 1162795 - DNA, 25 bp, Homo sapien
cagagcccgcagcttccacgtcttc

SEQ ID NO: 1162796 - DNA, 25 bp, Homo sapien
gcccgcagcttccacgtcttcttga

SEQ ID NO: 1162797 - DNA, 25 bp, Homo sapien
agcccgcagcttccacgtcttcttg

SEQ ID NO: 1162798 - DNA, 25 bp, Homo sapien
ccgcagcttccacgtcttcttgaac

SEQ ID NO: 1162799 - DNA, 25 bp, Homo sapien
agtacggcggatgcatgcttgtctt

SEQ ID NO: 1162800 - DNA, 25 bp, Homo sapien
agctgccccaaagagtacggcggat

SEQ ID NO: 1162801 - DNA, 25 bp, Homo sapien
ggtcgaggcctctccgggaccagct

SEQ ID NO: 1162802 - DNA, 25 bp, Homo sapien
ccccaaagagtacggcggatgcatg

SEQ ID NO: 1162803 - DNA, 25 bp, Homo sapien
tcggttgtggctcgaggtattgtca

SEQ ID NO: 1162804 - DNA, 25 bp, Homo sapien
gctcgaggtattgtcagaccccagg

SEQ ID NO: 1162805 - DNA, 25 bp, Homo sapien
ctggggaagaagtagtctgtattgc

SEQ ID NO: 1162806 - DNA, 25 bp, Homo sapien
ccctggcatctggtcggttgtggct

SEQ ID NO: 1162807 - DNA, 25 bp, Homo sapien
ccctggcgtagaaccttccgcaagg

SEQ ID NO: 1162808 - DNA, 25 bp, Homo sapien
ttccgcaaggctcttccgtgaagcc

SEQ ID NO: 1162809 - DNA, 25 bp, Homo sapien
gcatcttttgctgagcccgtttgtg

SEQ ID NO: 1162810 - DNA, 25 bp, Homo sapien
cgcacacccctgagataagctggca

SEQ ID NO: 1162811 - DNA, 25 bp, Homo sapien
aacagaatttgctaaggcacttggg

SEQ ID NO: 1162812 - DNA, 25 bp, Homo sapien
gaagatgaaacgatgcagtgggcca

SEQ ID NO: 1162813 - DNA, 25 bp, Homo sapien
gcccagcttttgagtgtccgtgtga

SEQ ID NO: 1162814 - DNA, 25 bp, Homo sapien
tttggctggaaatccatcccacctg

SEQ ID NO: 1162815 - DNA, 25 bp, Homo sapien
tgttcactaccaggtgggcttccag

SEQ ID NO: 1162816 - DNA, 25 bp, Homo sapien
ggaataccctgataacttgagagct

SEQ ID NO: 1162817 - DNA, 25 bp, Homo sapien
tgcctcaaagggtcacaggttgccc

SEQ ID NO: 1162818 - DNA, 25 bp, Homo sapien
aagttacttctatgctgacacagcg

SEQ ID NO: 1162819 - DNA, 25 bp, Homo sapien
tgaggcatgaggttatcatttccag

SEQ ID NO: 1162820 - DNA, 25 bp, Homo sapien
cttgaggagattcagtgtgaggcat

SEQ ID NO: 1162821 - DNA, 25 bp, Homo sapien
ttccagaatccacaggtagcaccag

SEQ ID NO: 1162822 - DNA, 25 bp, Homo sapien
ccacaggtagcaccagaattacttc

SEQ ID NO: 1162823 - DNA, 25 bp, Homo sapien
ctccaccgctgaccctgtgtgaaga

SEQ ID NO: 1162824 - DNA, 25 bp, Homo sapien
cctccaccgctgaccctgtgtgaag

SEQ ID NO: 1162825 - DNA, 25 bp, Homo sapien
tccaccgctgaccctgtgtgaagag

SEQ ID NO: 1162826 - DNA, 25 bp, Homo sapien
tcacagatctctcgttcactagttg

SEQ ID NO: 1162827 - DNA, 25 bp, Homo sapien
tgcagtgatgtcgatttcatttccc

SEQ ID NO: 1162828 - DNA, 25 bp, Homo sapien
gaggcattcttcagttgcgggttaa

SEQ ID NO: 1162829 - DNA, 25 bp, Homo sapien
ggattgcactgaaacccttcacaga

SEQ ID NO: 1162830 - DNA, 25 bp, Homo sapien
aaatacttgcttgcgatgactggac

SEQ ID NO: 1162831 - DNA, 25 bp, Homo sapien
caagttcagttggttagtttcaggc

SEQ ID NO: 1162832 - DNA, 25 bp, Homo sapien
tggcttccttgttaaacctccatgg

SEQ ID NO: 1162833 - DNA, 25 bp, Homo sapien
tgaatttagcatccatagagctgtg

SEQ ID NO: 1162834 - DNA, 25 bp, Homo sapien
aggccgccgcgggcaagggccgcaa

SEQ ID NO: 1162835 - DNA, 25 bp, Homo sapien
gccgccgcgggcaagggccgcaaaa

SEQ ID NO: 1162836 - DNA, 25 bp, Homo sapien
tcaggccgccgcgggcaagggccgc

SEQ ID NO: 1162837 - DNA, 25 bp, Homo sapien
ggccgccgcgggcaagggccgcaaa

SEQ ID NO: 1162838 - DNA, 25 bp, Homo sapien
caggagctggcgaccgttgtccctg

SEQ ID NO: 1162839 - DNA, 25 bp, Homo sapien
taccgccaaaaataacgtctgcaga

SEQ ID NO: 1162840 - DNA, 25 bp, Homo sapien
gagtaacggaactagcgcaggagct

SEQ ID NO: 1162841 - DNA, 25 bp, Homo sapien
gaccgtgtgccaccgaagagtaacg

SEQ ID NO: 1162842 - DNA, 25 bp, Homo sapien
gtcagtatgagcacgcatttcttca

SEQ ID NO: 1162843 - DNA, 25 bp, Homo sapien
cattttcaagaacgtcagtatgagc

SEQ ID NO: 1162844 - DNA, 25 bp, Homo sapien
aaaaatgtcactacgcattttcaag

SEQ ID NO: 1162845 - DNA, 25 bp, Homo sapien
tgtcactacgcattttcaagaacgt

SEQ ID NO: 1162846 - DNA, 25 bp, Homo sapien
gaagggacttacatgctgcagttgc

SEQ ID NO: 1162847 - DNA, 25 bp, Homo sapien
caaccggccacagttagaggaatgc

SEQ ID NO: 1162848 - DNA, 25 bp, Homo sapien
ggaatgccaggatagttcaccatca

SEQ ID NO: 1162849 - DNA, 25 bp, Homo sapien
aaaggaaacgtgtcaggcataagca

SEQ ID NO: 1162850 - DNA, 25 bp, Homo sapien
ttatcagagagttgggggtgactaa

SEQ ID NO: 1162851 - DNA, 25 bp, Homo sapien
tcccaaacagtttatcagagagttg

SEQ ID NO: 1162852 - DNA, 25 bp, Homo sapien
gtttatcagagagttgggggtgact

SEQ ID NO: 1162853 - DNA, 25 bp, Homo sapien
ccaaacagtttatcagagagttggg

SEQ ID NO: 1162854 - DNA, 25 bp, Homo sapien
taagggtctgcatcgcagcagtggc

SEQ ID NO: 1162855 - DNA, 25 bp, Homo sapien
gactgggaaccattaactggaatcc

SEQ ID NO: 1162856 - DNA, 25 bp, Homo sapien
tccaagttgtaggatgagagtccca

SEQ ID NO: 1162857 - DNA, 25 bp, Homo sapien
ggcgccacatccactatgagacagg

SEQ ID NO: 1162858 - DNA, 25 bp, Homo sapien
cagtggaagattgccaacatacacc

SEQ ID NO: 1162859 - DNA, 25 bp, Homo sapien
tccagtggaagattgccaacataca

SEQ ID NO: 1162860 - DNA, 25 bp, Homo sapien
atccagtggaagattgccaacatac

SEQ ID NO: 1162861 - DNA, 25 bp, Homo sapien
ccagtggaagattgccaacatacac

SEQ ID NO: 1162862 - DNA, 25 bp, Homo sapien
cactgtcaagtaacaggttggacca

SEQ ID NO: 1162863 - DNA, 25 bp, Homo sapien
ctctgcccacttcactgtcaagtaa

SEQ ID NO: 1162864 - DNA, 25 bp, Homo sapien
cacttcactgtcaagtaacaggttg

SEQ ID NO: 1162865 - DNA, 25 bp, Homo sapien
tgcaggaaccacatgtagggctcct

SEQ ID NO: 1162866 - DNA, 25 bp, Homo sapien
cctatgaggctgagtttgagtcgaa

SEQ ID NO: 1162867 - DNA, 25 bp, Homo sapien
aggatgaaacgttcccttaccatgg

SEQ ID NO: 1162868 - DNA, 25 bp, Homo sapien
ggtggcagaactgctcagcatctta

SEQ ID NO: 1162869 - DNA, 25 bp, Homo sapien
tgtgggacagtatggccaagcaagc

SEQ ID NO: 1162870 - DNA, 25 bp, Homo sapien
caagagggttgaagtcctttagaag

SEQ ID NO: 1162871 - DNA, 25 bp, Homo sapien
gttgaagtcctttagaaggtacaga

SEQ ID NO: 1162872 - DNA, 25 bp, Homo sapien
acatcaagagggttgaagtccttta

SEQ ID NO: 1162873 - DNA, 25 bp, Homo sapien
tgaagtcctttagaaggtacagaat

SEQ ID NO: 1162874 - DNA, 25 bp, Homo sapien
tgcttgtattcacgaacagttttcg

SEQ ID NO: 1162875 - DNA, 25 bp, Homo sapien
gaagagtttaccattcagctcctgg

SEQ ID NO: 1162876 - DNA, 25 bp, Homo sapien
agtgtcactttctgcatggagccca

SEQ ID NO: 1162877 - DNA, 25 bp, Homo sapien
agctcctggattgcaagtgtcactt

SEQ ID NO: 1162878 - DNA, 25 bp, Homo sapien
agcggggcccgaggctgctggatca

SEQ ID NO: 1162879 - DNA, 25 bp, Homo sapien
gcggggcccgaggctgctggatcat

SEQ ID NO: 1162880 - DNA, 25 bp, Homo sapien
cagcggggcccgaggctgctggatc

SEQ ID NO: 1162881 - DNA, 25 bp, Homo sapien
ggaggatgaaagcactgaaagcaaa

SEQ ID NO: 1162882 - DNA, 25 bp, Homo sapien
aagcactgaaagcaaagtcagccac

SEQ ID NO: 1162883 - DNA, 25 bp, Homo sapien
ctggaggaggatgaaagcactgaaa

SEQ ID NO: 1162884 - DNA, 25 bp, Homo sapien
cactgaaagcaaagtcagccacgct

SEQ ID NO: 1162885 - DNA, 25 bp, Homo sapien
ctgacttcacccgagaccctgcctt

SEQ ID NO: 1162886 - DNA, 25 bp, Homo sapien
tcacccgagaccctgccttcttctc

SEQ ID NO: 1162887 - DNA, 25 bp, Homo sapien
ttccctgacttcacccgagaccctg

SEQ ID NO: 1162888 - DNA, 25 bp, Homo sapien
cgagaccctgccttcttctccacag

SEQ ID NO: 1162889 - DNA, 25 bp, Homo sapien
gctggcactacctgacaaacatttt

SEQ ID NO: 1162890 - DNA, 25 bp, Homo sapien
tgccaatgccaagacgacactggtg

SEQ ID NO: 1162891 - DNA, 25 bp, Homo sapien
gccaagacgacactggtgctggcac

SEQ ID NO: 1162892 - DNA, 25 bp, Homo sapien
actggtgctggcactacctgacaaa

SEQ ID NO: 1162893 - DNA, 25 bp, Homo sapien
ttgtacgaaaacagtgagcatctgg

SEQ ID NO: 1162894 - DNA, 25 bp, Homo sapien
ctttgtacgaaaacagtgagcatct

SEQ ID NO: 1162895 - DNA, 25 bp, Homo sapien
agtgagcatctggggcttccccact

SEQ ID NO: 1162896 - DNA, 25 bp, Homo sapien
tgtacgaaaacagtgagcatctggg

SEQ ID NO: 1162897 - DNA, 25 bp, Homo sapien
tgttgtgccacgtaagcttatcttc

SEQ ID NO: 1162898 - DNA, 25 bp, Homo sapien
cttgactgacttgtttgggcttgga

SEQ ID NO: 1162899 - DNA, 25 bp, Homo sapien
aactcacatccttcacccatgggaa

SEQ ID NO: 1162900 - DNA, 25 bp, Homo sapien
tgacctgaacactgcctggatgcgt

SEQ ID NO: 1162901 - DNA, 25 bp, Homo sapien
tacaaaggttggtggccagaaggct

SEQ ID NO: 1162902 - DNA, 25 bp, Homo sapien
cactcagcagggtacagcctcatga

SEQ ID NO: 1162903 - DNA, 25 bp, Homo sapien
ccacacaccagggagaagttcttgc

SEQ ID NO: 1162904 - DNA, 25 bp, Homo sapien
caagtgttctaagaggtgcgcctgc

SEQ ID NO: 1162905 - DNA, 25 bp, Homo sapien
ggtaaaacaattagagagtgagtcc

SEQ ID NO: 1162906 - DNA, 25 bp, Homo sapien
gagtgagtcctcagtgcaagttaac

SEQ ID NO: 1162907 - DNA, 25 bp, Homo sapien
gcaagttaactactgctgtcaatca

SEQ ID NO: 1162908 - DNA, 25 bp, Homo sapien
tgagacccaaattgaacctttcctc

SEQ ID NO: 1162909 - DNA, 25 bp, Homo sapien
aaagaagtagtagcggtcacctggt

SEQ ID NO: 1162910 - DNA, 25 bp, Homo sapien
aagtagtagcggtcacctggtgcag

SEQ ID NO: 1162911 - DNA, 25 bp, Homo sapien
gaggaaaagaagtagtagcggtcac

SEQ ID NO: 1162912 - DNA, 25 bp, Homo sapien
gaaaagaagtagtagcggtcacctg

SEQ ID NO: 1162913 - DNA, 25 bp, Homo sapien
ttagagctgacttttgagacatccg

SEQ ID NO: 1162914 - DNA, 25 bp, Homo sapien
gttctgactccgactttagagctga

SEQ ID NO: 1162915 - DNA, 25 bp, Homo sapien
caaagaaaagacgatcagaagcagg

SEQ ID NO: 1162916 - DNA, 25 bp, Homo sapien
cactcatctggagctacagtcacag

SEQ ID NO: 1162917 - DNA, 25 bp, Homo sapien
gaagaaaaatgaaaggtctcactca

SEQ ID NO: 1162918 - DNA, 25 bp, Homo sapien
agaaaaatgaaaggtctcactcagc

SEQ ID NO: 1162919 - DNA, 25 bp, Homo sapien
ctgggaagaaaaatgaaaggtctca

SEQ ID NO: 1162920 - DNA, 25 bp, Homo sapien
aaaaatgaaaggtctcactcagcca

SEQ ID NO: 1162921 - DNA, 25 bp, Homo sapien
ggcggttttgccaaatccttcacca

SEQ ID NO: 1162922 - DNA, 25 bp, Homo sapien
gttttgccaaatccttcaccagaag

SEQ ID NO: 1162923 - DNA, 25 bp, Homo sapien
cggttttgccaaatccttcaccaga

SEQ ID NO: 1162924 - DNA, 25 bp, Homo sapien
ttttgccaaatccttcaccagaagc

SEQ ID NO: 1162925 - DNA, 25 bp, Homo sapien
tgtctcacacaggtcaacaggagct

SEQ ID NO: 1162926 - DNA, 25 bp, Homo sapien
ttccaacgggactgcaaagaaggct

SEQ ID NO: 1162927 - DNA, 25 bp, Homo sapien
catttccaacgggactgcaaagaag

SEQ ID NO: 1162928 - DNA, 25 bp, Homo sapien
caggagctttaggagcgagctgtat

SEQ ID NO: 1162929 - DNA, 25 bp, Homo sapien
ctcagtgacgtgcatagcccagaaa

SEQ ID NO: 1162930 - DNA, 25 bp, Homo sapien
tccccacggacgctatggatgagtg

SEQ ID NO: 1162931 - DNA, 25 bp, Homo sapien
cagccagctcaggtctcggaagcat

SEQ ID NO: 1162932 - DNA, 25 bp, Homo sapien
gggtcttcgggacgatactcgtcac

SEQ ID NO: 1162933 - DNA, 25 bp, Homo sapien
cgagtcccgcgcataacggtggagc

SEQ ID NO: 1162934 - DNA, 25 bp, Homo sapien
ccagggtgctaaacagagcctgcat

SEQ ID NO: 1162935 - DNA, 25 bp, Homo sapien
ggtactctgccagacagcgagtccc

SEQ ID NO: 1162936 - DNA, 25 bp, Homo sapien
tgttccaggcgtgtccataatcccc

SEQ ID NO: 1162937 - DNA, 25 bp, Homo sapien
cgcagagactgcacagggatggtgg

SEQ ID NO: 1162938 - DNA, 25 bp, Homo sapien
ccaaaatcaatgaacatgaccacag

SEQ ID NO: 1162939 - DNA, 25 bp, Homo sapien
atcaatgaacatgaccacagcccag

SEQ ID NO: 1162940 - DNA, 25 bp, Homo sapien
tgcgcagagactgcacagggatggt

SEQ ID NO: 1162941 - DNA, 25 bp, Homo sapien
gggtgggatggtccagaagtcgtcg

SEQ ID NO: 1162942 - DNA, 25 bp, Homo sapien
caggggtgggatggtccagaagtcg

SEQ ID NO: 1162943 - DNA, 25 bp, Homo sapien
gtgggatggtccagaagtcgtcgct

SEQ ID NO: 1162944 - DNA, 25 bp, Homo sapien
gggatggtccagaagtcgtcgctgt

SEQ ID NO: 1162945 - DNA, 25 bp, Homo sapien
cctttgaggattcgatggacaacct

SEQ ID NO: 1162946 - DNA, 25 bp, Homo sapien
ttttccctttgaggattcgatggac

SEQ ID NO: 1162947 - DNA, 25 bp, Homo sapien
ggattcgatggacaacctcatacga

SEQ ID NO: 1162948 - DNA, 25 bp, Homo sapien
gacaacctcatacgaactcaaaatg

SEQ ID NO: 1162949 - DNA, 25 bp, Homo sapien
gacaacagccaagttagatgcagga

SEQ ID NO: 1162950 - DNA, 25 bp, Homo sapien
acagccaagttagatgcaggagcag

SEQ ID NO: 1162951 - DNA, 25 bp, Homo sapien
agggacaacagccaagttagatgca

SEQ ID NO: 1162952 - DNA, 25 bp, Homo sapien
caacagccaagttagatgcaggagc

SEQ ID NO: 1162953 - DNA, 25 bp, Homo sapien
gcccacccgagccagttcacccaac

SEQ ID NO: 1162954 - DNA, 25 bp, Homo sapien
taaccagttcgtttgatctaaaaga

SEQ ID NO: 1162955 - DNA, 25 bp, Homo sapien
cagttcacccaacccctcagataac

SEQ ID NO: 1162956 - DNA, 25 bp, Homo sapien
ctcagataaccagttcgtttgatct

SEQ ID NO: 1162957 - DNA, 25 bp, Homo sapien
gaagagacacaagaaagaccatccc

SEQ ID NO: 1162958 - DNA, 25 bp, Homo sapien
gttcaaatgttcatgccaagttggg

SEQ ID NO: 1162959 - DNA, 25 bp, Homo sapien
taggaccacttatatcatgctctgg

SEQ ID NO: 1162960 - DNA, 25 bp, Homo sapien
ggaactgaagacacatgacaaatga

SEQ ID NO: 1162961 - DNA, 25 bp, Homo sapien
gtgagctgtcttctgtataatgtat

SEQ ID NO: 1162962 - DNA, 25 bp, Homo sapien
cagccctggctggaatgtagattgt

SEQ ID NO: 1162963 - DNA, 25 bp, Homo sapien
catgctgaggttgagataaagacgg

SEQ ID NO: 1162964 - DNA, 25 bp, Homo sapien
gggaaaattcattccatagagctga

SEQ ID NO: 1162965 - DNA, 25 bp, Homo sapien
ttttcctggacgtgatagctctgcc

SEQ ID NO: 1162966 - DNA, 25 bp, Homo sapien
tagagcctccttacctatgctatgg

SEQ ID NO: 1162967 - DNA, 25 bp, Homo sapien
gctggaacccttgctagcaggcatt

SEQ ID NO: 1162968 - DNA, 25 bp, Homo sapien
gatggctattctaaacgctaaggaa

SEQ ID NO: 1162969 - DNA, 25 bp, Homo sapien
tgcatttgtagcgaggagaggagat

SEQ ID NO: 1162970 - DNA, 25 bp, Homo sapien
atgccttgcatttgtagcgaggaga

SEQ ID NO: 1162971 - DNA, 25 bp, Homo sapien
ccttgcatttgtagcgaggagagga

SEQ ID NO: 1162972 - DNA, 25 bp, Homo sapien
catttgtagcgaggagaggagatgt

SEQ ID NO: 1162973 - DNA, 25 bp, Homo sapien
ggctgcattctagcaagccactggg

SEQ ID NO: 1162974 - DNA, 25 bp, Homo sapien
cagtgcacacaggaagacgtgtctt

SEQ ID NO: 1162975 - DNA, 25 bp, Homo sapien
gactggcagcattacaggcaggcgc

SEQ ID NO: 1162976 - DNA, 25 bp, Homo sapien
cagtgataggcgaaaaataatgggc

SEQ ID NO: 1162977 - DNA, 25 bp, Homo sapien
catgatgcacatggaaatgggcgta

SEQ ID NO: 1162978 - DNA, 25 bp, Homo sapien
gtaaatctgcacgacttgttccggg

SEQ ID NO: 1162979 - DNA, 25 bp, Homo sapien
ccatgtccccaggtcgtggaattaa

SEQ ID NO: 1162980 - DNA, 25 bp, Homo sapien
gaatgtgtgtagtccctctgcttaa

SEQ ID NO: 1162981 - DNA, 25 bp, Homo sapien
cctatcctggtatgagcaggcggag

SEQ ID NO: 1162982 - DNA, 25 bp, Homo sapien
agccggctgcgaggagaaaccagct

SEQ ID NO: 1162983 - DNA, 25 bp, Homo sapien
ggcatagctcgctgcctcgcctaca

SEQ ID NO: 1162984 - DNA, 25 bp, Homo sapien
ccagggaatacaattgggacggtga

SEQ ID NO: 1162985 - DNA, 25 bp, Homo sapien
ggaggaggccgaagccaaggagcag

SEQ ID NO: 1162986 - DNA, 25 bp, Homo sapien
acagccggaggaggccgaagccaag

SEQ ID NO: 1162987 - DNA, 25 bp, Homo sapien
agccaaggagcagcgccacggggcc

SEQ ID NO: 1162988 - DNA, 25 bp, Homo sapien
gagcacagccggaggaggccgaagc

SEQ ID NO: 1162989 - DNA, 25 bp, Homo sapien
gcggataagcttgttgtagcgggaa

SEQ ID NO: 1162990 - DNA, 25 bp, Homo sapien
acaccataagctgtactgtcaccag

SEQ ID NO: 1162991 - DNA, 25 bp, Homo sapien
tcagagccattggtggctgggcgga

SEQ ID NO: 1162992 - DNA, 25 bp, Homo sapien
accagccgctcctctgtatccgtac

SEQ ID NO: 1162993 - DNA, 25 bp, Homo sapien
agacattggtggtcatgatctgctc

SEQ ID NO: 1162994 - DNA, 25 bp, Homo sapien
cagacattggtggtcatgatctgct

SEQ ID NO: 1162995 - DNA, 25 bp, Homo sapien
ccagacattggtggtcatgatctgc

SEQ ID NO: 1162996 - DNA, 25 bp, Homo sapien
aggtgaggcgataatcttcccactc

SEQ ID NO: 1162997 - DNA, 25 bp, Homo sapien
cttccaggtgaggcgataatcttcc

SEQ ID NO: 1162998 - DNA, 25 bp, Homo sapien
atgtgtttggaagggagccgaactt

SEQ ID NO: 1162999 - DNA, 25 bp, Homo sapien
agggagccgaactttcttcatgttg

SEQ ID NO: 1163000 - DNA, 25 bp, Homo sapien
taggtccacgaacggaacttcatgg

SEQ ID NO: 1163001 - DNA, 25 bp, Homo sapien
ccactaggtgtgaagtcgtccaggc

SEQ ID NO: 1163002 - DNA, 25 bp, Homo sapien
gatctctgtgcggtcgtaggtccac

SEQ ID NO: 1163003 - DNA, 25 bp, Homo sapien
cacggcattggaatagaaggacacc

SEQ ID NO: 1163004 - DNA, 25 bp, Homo sapien
ggcggtcgatcaccatggcgacgta

SEQ ID NO: 1163005 - DNA, 25 bp, Homo sapien
aggcggtcgatcaccatggcgacgt

SEQ ID NO: 1163006 - DNA, 25 bp, Homo sapien
caggaacatgccgatggtgccaaag

SEQ ID NO: 1163007 - DNA, 25 bp, Homo sapien
aacatgccgatggtgccaaagacac

SEQ ID NO: 1163008 - DNA, 25 bp, Homo sapien
gctaaaccctacttggcaggaatcg

SEQ ID NO: 1163009 - DNA, 25 bp, Homo sapien
tgtccactcaagcagcggcaggtgt

SEQ ID NO: 1163010 - DNA, 25 bp, Homo sapien
cagggcactcgacagatggatctca

SEQ ID NO: 1163011 - DNA, 25 bp, Homo sapien
ggaagagtcagacccacctgtgctt

SEQ ID NO: 1163012 - DNA, 25 bp, Homo sapien
aagacaacgcatgctgaggacctgg

SEQ ID NO: 1163013 - DNA, 25 bp, Homo sapien
catttctgttacgtaggtggaggcc

SEQ ID NO: 1163014 - DNA, 25 bp, Homo sapien
catgagttactagcagggccaggac

SEQ ID NO: 1163015 - DNA, 25 bp, Homo sapien
catcaagagaagaggacgacacacg

SEQ ID NO: 1163016 - DNA, 25 bp, Homo sapien
tgtgagaggaaacccccgccatccc

SEQ ID NO: 1163017 - DNA, 25 bp, Homo sapien
tgcaggtctggccttatgcaaactg

SEQ ID NO: 1163018 - DNA, 25 bp, Homo sapien
caggtctggccttatgcaaactgca

SEQ ID NO: 1163019 - DNA, 25 bp, Homo sapien
gctgtgagaggaaacccccgccatc

SEQ ID NO: 1163020 - DNA, 25 bp, Homo sapien
ttctcagacagctccggttccacat

SEQ ID NO: 1163021 - DNA, 25 bp, Homo sapien
gaaatgtagtgccaggtcttttgaa

SEQ ID NO: 1163022 - DNA, 25 bp, Homo sapien
tgtaccaggaaccttgagtgcctct

SEQ ID NO: 1163023 - DNA, 25 bp, Homo sapien
tgttctcagacagctccggttccac

SEQ ID NO: 1163024 - DNA, 25 bp, Homo sapien
tgggcatatttcttgaggaccagaa

SEQ ID NO: 1163025 - DNA, 25 bp, Homo sapien
tttctagaagactcatcctggaccc

SEQ ID NO: 1163026 - DNA, 25 bp, Homo sapien
gatctaaagtacctaacagtgaggc

SEQ ID NO: 1163027 - DNA, 25 bp, Homo sapien
gctagaagggccagtgacatgttgt

SEQ ID NO: 1163028 - DNA, 25 bp, Homo sapien
tcccacgggacttgagacgcaagat

SEQ ID NO: 1163029 - DNA, 25 bp, Homo sapien
cccttgagagaggatcacctattag

SEQ ID NO: 1163030 - DNA, 25 bp, Homo sapien
ccaggaccaggacaggcttggttgt

SEQ ID NO: 1163031 - DNA, 25 bp, Homo sapien
tgtgcatatttggagtaaagttgca

SEQ ID NO: 1163032 - DNA, 25 bp, Homo sapien
ttgtgggtaaatttgcgtctgggtg

SEQ ID NO: 1163033 - DNA, 25 bp, Homo sapien
gggttcatcaggcaccttttgatta

SEQ ID NO: 1163034 - DNA, 25 bp, Homo sapien
aggagccatttcaaagaacctccct

SEQ ID NO: 1163035 - DNA, 25 bp, Homo sapien
ttttgattacgtacccagcagggcc

SEQ ID NO: 1163036 - DNA, 25 bp, Homo sapien
ggccctggggtttctgataacagca

SEQ ID NO: 1163037 - DNA, 25 bp, Homo sapien
ggtttctgataacagcaccagtggc

SEQ ID NO: 1163038 - DNA, 25 bp, Homo sapien
tggggtttctgataacagcaccagt

SEQ ID NO: 1163039 - DNA, 25 bp, Homo sapien
tgtggccctggggtttctgataaca

SEQ ID NO: 1163040 - DNA, 25 bp, Homo sapien
tagactcgggtactgtgatgatggc

SEQ ID NO: 1163041 - DNA, 25 bp, Homo sapien
gaaacgagccgtgtcagatcgcaca

SEQ ID NO: 1163042 - DNA, 25 bp, Homo sapien
ttgtaggaagagagcgaggcatccc

SEQ ID NO: 1163043 - DNA, 25 bp, Homo sapien
gaacacaggctctcacaagatcaga

SEQ ID NO: 1163044 - DNA, 25 bp, Homo sapien
gattggagcctgcagataatgccca

SEQ ID NO: 1163045 - DNA, 25 bp, Homo sapien
cttcatctgggaacgtgctgagcca

SEQ ID NO: 1163046 - DNA, 25 bp, Homo sapien
aagcaatagcagaggtttcacccgg

SEQ ID NO: 1163047 - DNA, 25 bp, Homo sapien
catttgtggattacgcagacccctc

SEQ ID NO: 1163048 - DNA, 25 bp, Homo sapien
tgtgtgcctgaaacacttactccag

SEQ ID NO: 1163049 - DNA, 25 bp, Homo sapien
actggctctctgtcaggcgcctgaa

SEQ ID NO: 1163050 - DNA, 25 bp, Homo sapien
ggaattcttccgtatgtactggcta

SEQ ID NO: 1163051 - DNA, 25 bp, Homo sapien
agcaaaacctgctgtgatcacccgg

SEQ ID NO: 1163052 - DNA, 25 bp, Homo sapien
agacgtccatcagctgatggattca

SEQ ID NO: 1163053 - DNA, 25 bp, Homo sapien
gtccatcagctgatggattcataaa

SEQ ID NO: 1163054 - DNA, 25 bp, Homo sapien
aacccagacgtccatcagctgatgg

SEQ ID NO: 1163055 - DNA, 25 bp, Homo sapien
ccatcagctgatggattcataaata

SEQ ID NO: 1163056 - DNA, 25 bp, Homo sapien
tcctaggtatatgctgcagagagat

SEQ ID NO: 1163057 - DNA, 25 bp, Homo sapien
gagagatggagatctgtgtccacac

SEQ ID NO: 1163058 - DNA, 25 bp, Homo sapien
acagttaccatggagccggtgctcc

SEQ ID NO: 1163059 - DNA, 25 bp, Homo sapien
catggagccggtgctccactcctag

SEQ ID NO: 1163060 - DNA, 25 bp, Homo sapien
cggcacaaccaagccctgaggagtt

SEQ ID NO: 1163061 - DNA, 25 bp, Homo sapien
tgggagatccccaagtcaaatagga

SEQ ID NO: 1163062 - DNA, 25 bp, Homo sapien
tcctgtctagctggcagttgactct

SEQ ID NO: 1163063 - DNA, 25 bp, Homo sapien
cataggattacctcaagaaagcggg

SEQ ID NO: 1163064 - DNA, 25 bp, Homo sapien
tggagccccacgaaattgcagattt

SEQ ID NO: 1163065 - DNA, 25 bp, Homo sapien
caggctgttagaattgggtatccaa

SEQ ID NO: 1163066 - DNA, 25 bp, Homo sapien
tttgacaagtcctgcagcgaccgtg

SEQ ID NO: 1163067 - DNA, 25 bp, Homo sapien
cagtctcccatggtaggccttagaa

SEQ ID NO: 1163068 - DNA, 25 bp, Homo sapien
ttgaacctgccttcctaaccagact

SEQ ID NO: 1163069 - DNA, 25 bp, Homo sapien
acctgataaactgtgaaacgtctgc

SEQ ID NO: 1163070 - DNA, 25 bp, Homo sapien
ggatagtatatttgaacctgctaag

SEQ ID NO: 1163071 - DNA, 25 bp, Homo sapien
caactcccagactgcgaaggatagt

SEQ ID NO: 1163072 - DNA, 25 bp, Homo sapien
cctgtagtccttgaatcagtttgct

SEQ ID NO: 1163073 - DNA, 25 bp, Homo sapien
ttccatttccgtttgaggacctaca

SEQ ID NO: 1163074 - DNA, 25 bp, Homo sapien
tgaggacctacacaaccttgatgcc

SEQ ID NO: 1163075 - DNA, 25 bp, Homo sapien
gaccttttagtcctcagggccttga

SEQ ID NO: 1163076 - DNA, 25 bp, Homo sapien
ctcggcctgtttttaaatgctgtcc

SEQ ID NO: 1163077 - DNA, 25 bp, Homo sapien
ctgctcggcctgtttttaaatgctg

SEQ ID NO: 1163078 - DNA, 25 bp, Homo sapien
gctcggcctgtttttaaatgctgtc

SEQ ID NO: 1163079 - DNA, 25 bp, Homo sapien
cggcctgtttttaaatgctgtcctt

SEQ ID NO: 1163080 - DNA, 25 bp, Homo sapien
tgcagaaataatctcccggagaggc

SEQ ID NO: 1163081 - DNA, 25 bp, Homo sapien
taaacaccttcctagggaatcgctg

SEQ ID NO: 1163082 - DNA, 25 bp, Homo sapien
cagacagacgggtcatgatgtggca

SEQ ID NO: 1163083 - DNA, 25 bp, Homo sapien
cgctgtgtgaaaggagattctctca

SEQ ID NO: 1163084 - DNA, 25 bp, Homo sapien
aaattgctgcccctgagtgtgtagc

SEQ ID NO: 1163085 - DNA, 25 bp, Homo sapien
taagcacagtccttcagatgatagg

SEQ ID NO: 1163086 - DNA, 25 bp, Homo sapien
tgtgtagcagacatatagccatagc

SEQ ID NO: 1163087 - DNA, 25 bp, Homo sapien
gcccactgtttaagccatctggaaa

SEQ ID NO: 1163088 - DNA, 25 bp, Homo sapien
catagtggttttgcatcaagatggc

SEQ ID NO: 1163089 - DNA, 25 bp, Homo sapien
tcttgaaggatcgaaaaaactggca

SEQ ID NO: 1163090 - DNA, 25 bp, Homo sapien
ggttaaacatgcagctggtcacaca

SEQ ID NO: 1163091 - DNA, 25 bp, Homo sapien
tctctaaggtctatcacaaagtgga

SEQ ID NO: 1163092 - DNA, 25 bp, Homo sapien
gaaagaaatgattggtcttgggggc

SEQ ID NO: 1163093 - DNA, 25 bp, Homo sapien
aagaaatgattggtcttgggggccg

SEQ ID NO: 1163094 - DNA, 25 bp, Homo sapien
gccggggcggtggcttacgactgta

SEQ ID NO: 1163095 - DNA, 25 bp, Homo sapien
gaagcaccggtgattggaaagcaga

SEQ ID NO: 1163096 - DNA, 25 bp, Homo sapien
tggaaaatcgcggtctccactcagg

SEQ ID NO: 1163097 - DNA, 25 bp, Homo sapien
gagtttttagacatggccgagatca

SEQ ID NO: 1163098 - DNA, 25 bp, Homo sapien
taccaaggcccgagatataaatgct

SEQ ID NO: 1163099 - DNA, 25 bp, Homo sapien
actggagtggataaatgcacttaat

SEQ ID NO: 1163100 - DNA, 25 bp, Homo sapien
tactggagtggataaatgcacttaa

SEQ ID NO: 1163101 - DNA, 25 bp, Homo sapien
caaggctagcatcttcgaatcattc

SEQ ID NO: 1163102 - DNA, 25 bp, Homo sapien
ggctgcgtcgctctagtcttcaagg

SEQ ID NO: 1163103 - DNA, 25 bp, Homo sapien
ggctctctgtcaaattccaagaaaa

SEQ ID NO: 1163104 - DNA, 25 bp, Homo sapien
catcgcttgtgttgcggctgcgtcg

SEQ ID NO: 1163105 - DNA, 25 bp, Homo sapien
caggagcccgtcactacccccggct

SEQ ID NO: 1163106 - DNA, 25 bp, Homo sapien
gatggagtcttgctcgtcttgctct

SEQ ID NO: 1163107 - DNA, 25 bp, Homo sapien
aggattacaggagcccgtcactacc

SEQ ID NO: 1163108 - DNA, 25 bp, Homo sapien
atggagtcttgctcgtcttgctctg

SEQ ID NO: 1163109 - DNA, 25 bp, Homo sapien
taatttcctagagcgcaaacaaaag

SEQ ID NO: 1163110 - DNA, 25 bp, Homo sapien
tttcctagagcgcaaacaaaagagg

SEQ ID NO: 1163111 - DNA, 25 bp, Homo sapien
atttcctagagcgcaaacaaaagag

SEQ ID NO: 1163112 - DNA, 25 bp, Homo sapien
cttaatttcctagagcgcaaacaaa

SEQ ID NO: 1163113 - DNA, 25 bp, Homo sapien
gcttaaacccttagatgacatggaa

SEQ ID NO: 1163114 - DNA, 25 bp, Homo sapien
ttttattaaactgactcaaggagaa

SEQ ID NO: 1163115 - DNA, 25 bp, Homo sapien
aaaagggaatactccttatgtcact

SEQ ID NO: 1163116 - DNA, 25 bp, Homo sapien
tgaattctactgatgcttgaaagga

SEQ ID NO: 1163117 - DNA, 25 bp, Homo sapien
ccatgcctggcaagaacatatcttt

SEQ ID NO: 1163118 - DNA, 25 bp, Homo sapien
tgaaggaaatttactgccttaaatg

SEQ ID NO: 1163119 - DNA, 25 bp, Homo sapien
cagaataaactcgaagaaaatggaa

SEQ ID NO: 1163120 - DNA, 25 bp, Homo sapien
gcctggcaagaacatatcttttaaa

SEQ ID NO: 1163121 - DNA, 25 bp, Homo sapien
ggtccaggcaggtataaaggccata

SEQ ID NO: 1163122 - DNA, 25 bp, Homo sapien
tacaggatagcggagatgagcttgc

SEQ ID NO: 1163123 - DNA, 25 bp, Homo sapien
ccaggcccaaagaggggtccaggca

SEQ ID NO: 1163124 - DNA, 25 bp, Homo sapien
gtgctcgctacaggatagcggagat

SEQ ID NO: 1163125 - DNA, 25 bp, Homo sapien
atctgggttgccaaaacgtgtctgg

SEQ ID NO: 1163126 - DNA, 25 bp, Homo sapien
cacttggcgataggcgaaagtccca

SEQ ID NO: 1163127 - DNA, 25 bp, Homo sapien
tgctcagcaataggcgatggtctca

SEQ ID NO: 1163128 - DNA, 25 bp, Homo sapien
tcactgctcggcgattgtctcacca

SEQ ID NO: 1163129 - DNA, 25 bp, Homo sapien
gggaatttggccgatgaccactcta

SEQ ID NO: 1163130 - DNA, 25 bp, Homo sapien
gccagcacgctgtcatctctcaatc

SEQ ID NO: 1163131 - DNA, 25 bp, Homo sapien
aactctctaggccaggggaagtgcc

SEQ ID NO: 1163132 - DNA, 25 bp, Homo sapien
gatagaggcgaagaaggggccctgt

SEQ ID NO: 1163133 - DNA, 25 bp, Homo sapien
catttacaatcccaatgcgtttaca

SEQ ID NO: 1163134 - DNA, 25 bp, Homo sapien
caatcccaatgcgtttacaatccca

SEQ ID NO: 1163135 - DNA, 25 bp, Homo sapien
ttacaatcccaatgcgtttacaatc

SEQ ID NO: 1163136 - DNA, 25 bp, Homo sapien
tcccaatgcgtttacaatcccagag

SEQ ID NO: 1163137 - DNA, 25 bp, Homo sapien
gcttaagaacgccttcaagcatttt

SEQ ID NO: 1163138 - DNA, 25 bp, Homo sapien
agaacgccttcaagcattttccgcc

SEQ ID NO: 1163139 - DNA, 25 bp, Homo sapien
taagaacgccttcaagcattttccg

SEQ ID NO: 1163140 - DNA, 25 bp, Homo sapien
gccttcaagcattttccgccctggg

SEQ ID NO: 1163141 - DNA, 25 bp, Homo sapien
ctccatggaggcctctttaggtgca

SEQ ID NO: 1163142 - DNA, 25 bp, Homo sapien
gcccagcatgagcaagcctattcag

SEQ ID NO: 1163143 - DNA, 25 bp, Homo sapien
ggtgcatttgaaagcccagcatgag

SEQ ID NO: 1163144 - DNA, 25 bp, Homo sapien
tcagtttggaccaaccaggtgagac

SEQ ID NO: 1163145 - DNA, 25 bp, Homo sapien
agcagcaaccaaccccaatgaagac

SEQ ID NO: 1163146 - DNA, 25 bp, Homo sapien
caagtagctggcgaaggtagcagca

SEQ ID NO: 1163147 - DNA, 25 bp, Homo sapien
gagctgccacggagccaagtagctg

SEQ ID NO: 1163148 - DNA, 25 bp, Homo sapien
caatgaagacaaatcgttctctgga

SEQ ID NO: 1163149 - DNA, 25 bp, Homo sapien
agggcgatttcctcttcacctaggt

SEQ ID NO: 1163150 - DNA, 25 bp, Homo sapien
gagggcgatttcctcttcacctagg

SEQ ID NO: 1163151 - DNA, 25 bp, Homo sapien
ctgagggcgatttcctcttcaccta

SEQ ID NO: 1163152 - DNA, 25 bp, Homo sapien
ctgcttcctactttcaaacactggg

SEQ ID NO: 1163153 - DNA, 25 bp, Homo sapien
aggtgctggcactgtatgcggatgc

SEQ ID NO: 1163154 - DNA, 25 bp, Homo sapien
aaaggctcatctgtatggctgtcaa

SEQ ID NO: 1163155 - DNA, 25 bp, Homo sapien
gcggatgcagatgagaaggcaggcc

SEQ ID NO: 1163156 - DNA, 25 bp, Homo sapien
ggctcatctgtatggctgtcaaaaa

SEQ ID NO: 1163157 - DNA, 25 bp, Homo sapien
agtctgtctgggtgtaatgtctttc

SEQ ID NO: 1163158 - DNA, 25 bp, Homo sapien
cagtctgtctgggtgtaatgtcttt

SEQ ID NO: 1163159 - DNA, 25 bp, Homo sapien
cagaaattgttgtgtttctcgatcc

SEQ ID NO: 1163160 - DNA, 25 bp, Homo sapien
catagtacagaaattgttgtgtttc

SEQ ID NO: 1163161 - DNA, 25 bp, Homo sapien
ggaactcagcatctcaccagtaaga

SEQ ID NO: 1163162 - DNA, 25 bp, Homo sapien
gaggaactcagcatctcaccagtaa

SEQ ID NO: 1163163 - DNA, 25 bp, Homo sapien
tttccaaactacacaaggcccaaca

SEQ ID NO: 1163164 - DNA, 25 bp, Homo sapien
tttatcaaggacatggagcccagct

SEQ ID NO: 1163165 - DNA, 25 bp, Homo sapien
caaggcccaacaagagtccagtgtg

SEQ ID NO: 1163166 - DNA, 25 bp, Homo sapien
taaattggcaatacccttgagggag

SEQ ID NO: 1163167 - DNA, 25 bp, Homo sapien
gagctcaatgaaaaccacagacaga

SEQ ID NO: 1163168 - DNA, 25 bp, Homo sapien
gatgagaccaggtttaaacgtcact

SEQ ID NO: 1163169 - DNA, 25 bp, Homo sapien
tgtcgggaaaggctcaaccaggaga

SEQ ID NO: 1163170 - DNA, 25 bp, Homo sapien
cagagatagccccagaaataaaatg

SEQ ID NO: 1163171 - DNA, 25 bp, Homo sapien
ccctctcgatgcttctcctttgttc

SEQ ID NO: 1163172 - DNA, 25 bp, Homo sapien
tctatttaggcaccaagctctatgg

SEQ ID NO: 1163173 - DNA, 25 bp, Homo sapien
ccttcctgggcgctcttactaatga

SEQ ID NO: 1163174 - DNA, 25 bp, Homo sapien
ggacatttcctcgaagtaacacatg

SEQ ID NO: 1163175 - DNA, 25 bp, Homo sapien
tatggttcttattctgcggtgtcgc

SEQ ID NO: 1163176 - DNA, 25 bp, Homo sapien
ccatgcctggtgcttttgaagggtt

SEQ ID NO: 1163177 - DNA, 25 bp, Homo sapien
gagtaatacaatatggttgcttcta

SEQ ID NO: 1163178 - DNA, 25 bp, Homo sapien
taaataggagagtaatacaatatgg

SEQ ID NO: 1163179 - DNA, 25 bp, Homo sapien
ttggaggtggcaagaaaactactag

SEQ ID NO: 1163180 - DNA, 25 bp, Homo sapien
cgcggccgctttctcgttctgtgat

SEQ ID NO: 1163181 - DNA, 25 bp, Homo sapien
gccctttgacacttaaactgctcat

SEQ ID NO: 1163182 - DNA, 25 bp, Homo sapien
gtattcagccgttctttcctcttcc

SEQ ID NO: 1163183 - DNA, 25 bp, Homo sapien
ttctgtgatctcgtattcagccgtt

SEQ ID NO: 1163184 - DNA, 25 bp, Homo sapien
cgagtgggatcccattctgatttca

SEQ ID NO: 1163185 - DNA, 25 bp, Homo sapien
tgtctcgagtgggatcccattctga

SEQ ID NO: 1163186 - DNA, 25 bp, Homo sapien
ctcgagtgggatcccattctgattt

SEQ ID NO: 1163187 - DNA, 25 bp, Homo sapien
gagtgggatcccattctgatttcac

SEQ ID NO: 1163188 - DNA, 25 bp, Homo sapien
tcttcagtagcctcccgggcgtccc

SEQ ID NO: 1163189 - DNA, 25 bp, Homo sapien
gcgagtccgcgggtggttcccgcgc

SEQ ID NO: 1163190 - DNA, 25 bp, Homo sapien
gggagaggccgcgagtccgcgggtg

SEQ ID NO: 1163191 - DNA, 25 bp, Homo sapien
acgtgtgatcgaggcaggcgccact

SEQ ID NO: 1163192 - DNA, 25 bp, Homo sapien
taagatatgtcactctcagaaagag

SEQ ID NO: 1163193 - DNA, 25 bp, Homo sapien
ggcaaaagttgcacttgtttgaagt

SEQ ID NO: 1163194 - DNA, 25 bp, Homo sapien
gctagagatgccagctatggaaaca

SEQ ID NO: 1163195 - DNA, 25 bp, Homo sapien
ggcaggcaagcgcacttaaaaataa

SEQ ID NO: 1163196 - DNA, 25 bp, Homo sapien
tattcccttgctcttgtgggttggc

SEQ ID NO: 1163197 - DNA, 25 bp, Homo sapien
atcagactgctgagagcgttcctgg

SEQ ID NO: 1163198 - DNA, 25 bp, Homo sapien
tgacatcagcaaacagagccccgga

SEQ ID NO: 1163199 - DNA, 25 bp, Homo sapien
cagtgccccgcatgcagtaagtgct

SEQ ID NO: 1163200 - DNA, 25 bp, Homo sapien
gcttcggggttgccacctggtagcc

SEQ ID NO: 1163201 - DNA, 25 bp, Homo sapien
ctggcccccacgtgacaagaggcag

SEQ ID NO: 1163202 - DNA, 25 bp, Homo sapien
tgcttcggggttgccacctggtagc

SEQ ID NO: 1163203 - DNA, 25 bp, Homo sapien
tggcccccacgtgacaagaggcagc

SEQ ID NO: 1163204 - DNA, 25 bp, Homo sapien
gcattggacttcgttaagtgccgtc

SEQ ID NO: 1163205 - DNA, 25 bp, Homo sapien
cctgaaagtcccctgggtcattatt

SEQ ID NO: 1163206 - DNA, 25 bp, Homo sapien
gaattgtaactattgccaagtgcct

SEQ ID NO: 1163207 - DNA, 25 bp, Homo sapien
aaacgtctgtcttgctgaggcattg

SEQ ID NO: 1163208 - DNA, 25 bp, Homo sapien
ttcctgaagcctccccagaaactga

SEQ ID NO: 1163209 - DNA, 25 bp, Homo sapien
cttctgccatgattgtaagcttcct

SEQ ID NO: 1163210 - DNA, 25 bp, Homo sapien
ctgaagcctccccagaaactgagca

SEQ ID NO: 1163211 - DNA, 25 bp, Homo sapien
tatgacatgcctgttcctcctttgc

SEQ ID NO: 1163212 - DNA, 25 bp, Homo sapien
aatttggtacaaatcctgtattcac

SEQ ID NO: 1163213 - DNA, 25 bp, Homo sapien
tcccttttgaatggcttaggccatc

SEQ ID NO: 1163214 - DNA, 25 bp, Homo sapien
cctaatgactaatttggtacaaatc

SEQ ID NO: 1163215 - DNA, 25 bp, Homo sapien
ctgagtcataagtgagcttttgttc

SEQ ID NO: 1163216 - DNA, 25 bp, Homo sapien
gctgctgacatgctcacgatgatgg

SEQ ID NO: 1163217 - DNA, 25 bp, Homo sapien
tagcacagtgaccagcgtacagtag

SEQ ID NO: 1163218 - DNA, 25 bp, Homo sapien
ggattaatgaacttgtcagcagcac

SEQ ID NO: 1163219 - DNA, 25 bp, Homo sapien
tccgtgaatagtgagtctagctgct

SEQ ID NO: 1163220 - DNA, 25 bp, Homo sapien
cgcacccaggttgcggctcaccgca

SEQ ID NO: 1163221 - DNA, 25 bp, Homo sapien
agcgcacccaggttgcggctcaccg

SEQ ID NO: 1163222 - DNA, 25 bp, Homo sapien
aggctggagcgcacccaggttgcgg

SEQ ID NO: 1163223 - DNA, 25 bp, Homo sapien
tggagcgcacccaggttgcggctca

SEQ ID NO: 1163224 - DNA, 25 bp, Homo sapien
ccttctagggcgttgatgagtgcag

SEQ ID NO: 1163225 - DNA, 25 bp, Homo sapien
aaacaactcgacgtactcagctggg

SEQ ID NO: 1163226 - DNA, 25 bp, Homo sapien
gacttgctaagtgtccaagctggga

SEQ ID NO: 1163227 - DNA, 25 bp, Homo sapien
gaagtgggccttatcagtggtaaac

SEQ ID NO: 1163228 - DNA, 25 bp, Homo sapien
gatcccaataaagtgctgttgcagc

SEQ ID NO: 1163229 - DNA, 25 bp, Homo sapien
aaaccctaggcccttgagaagctga

SEQ ID NO: 1163230 - DNA, 25 bp, Homo sapien
tgactagagttgctggctcgaggcc

SEQ ID NO: 1163231 - DNA, 25 bp, Homo sapien
ctcaaaaaaggcgatggaagggctg

SEQ ID NO: 1163232 - DNA, 25 bp, Homo sapien
tctaactcctggagggtggactctg

SEQ ID NO: 1163233 - DNA, 25 bp, Homo sapien
agcccaagatcccagcgttatctaa

SEQ ID NO: 1163234 - DNA, 25 bp, Homo sapien
gatatctttcacacagtagagcaaa

SEQ ID NO: 1163235 - DNA, 25 bp, Homo sapien
gaagaaggacaagcactcacagagc

SEQ ID NO: 1163236 - DNA, 25 bp, Homo sapien
gcagagctgttgaggcccaagtacc

SEQ ID NO: 1163237 - DNA, 25 bp, Homo sapien
aaagcagaagcaacctcggtggagg

SEQ ID NO: 1163238 - DNA, 25 bp, Homo sapien
taagaacatacttggcacggctgcc

SEQ ID NO: 1163239 - DNA, 25 bp, Homo sapien
tggagcctttatcctgggagaccag

SEQ ID NO: 1163240 - DNA, 25 bp, Homo sapien
tgatgaggaccttagcgctgctcgt

SEQ ID NO: 1163241 - DNA, 25 bp, Homo sapien
ttcctggcatgaggagagaagaccc

SEQ ID NO: 1163242 - DNA, 25 bp, Homo sapien
tacagtggcaaagacctagtggtcc

SEQ ID NO: 1163243 - DNA, 25 bp, Homo sapien
tgtccctcacactaaaacggcgtag

SEQ ID NO: 1163244 - DNA, 25 bp, Homo sapien
tcttcataccaaagtcactggtcct

SEQ ID NO: 1163245 - DNA, 25 bp, Homo sapien
gcttcaagacagtaggtgagagatg

SEQ ID NO: 1163246 - DNA, 25 bp, Homo sapien
caggacgtatcttcttcataccaaa

SEQ ID NO: 1163247 - DNA, 25 bp, Homo sapien
gatgctgtcaggacgtatcttcttc

SEQ ID NO: 1163248 - DNA, 25 bp, Homo sapien
gcccccaccggacaagctggaggga

SEQ ID NO: 1163249 - DNA, 25 bp, Homo sapien
agggcaaggccggtgagcgcgctgc

SEQ ID NO: 1163250 - DNA, 25 bp, Homo sapien
caaggccggtgagcgcgctgcgagg

SEQ ID NO: 1163251 - DNA, 25 bp, Homo sapien
agcaccgggaggaagcagggcaagg

SEQ ID NO: 1163252 - DNA, 25 bp, Homo sapien
tgttttcaggcgtagcgtctcgtcc

SEQ ID NO: 1163253 - DNA, 25 bp, Homo sapien
gcttccctgtcgtcgcactttgtgg

SEQ ID NO: 1163254 - DNA, 25 bp, Homo sapien
gctagcggagacgaccctttccact

SEQ ID NO: 1163255 - DNA, 25 bp, Homo sapien
tttccactcgcgtggtgccgtggta

SEQ ID NO: 1163256 - DNA, 25 bp, Homo sapien
gaagtcagcccgaatgcctgtcagt

SEQ ID NO: 1163257 - DNA, 25 bp, Homo sapien
cctgtgaggtaactgggatcgcacc

SEQ ID NO: 1163258 - DNA, 25 bp, Homo sapien
tctcttaccgcgagactgagaggca

SEQ ID NO: 1163259 - DNA, 25 bp, Homo sapien
gcaccttttataccagagacctgag

SEQ ID NO: 1163260 - DNA, 25 bp, Homo sapien
ggaaactgtgatctgccctagcgct

SEQ ID NO: 1163261 - DNA, 25 bp, Homo sapien
tctgcgggcagcgaactgtgtctac

SEQ ID NO: 1163262 - DNA, 25 bp, Homo sapien
gatcaggattgacaggccacactct

SEQ ID NO: 1163263 - DNA, 25 bp, Homo sapien
tacagcaacctgtggagcggaaact

SEQ ID NO: 1163264 - DNA, 25 bp, Homo sapien
ccgcgccgccaacctccaagcaact

SEQ ID NO: 1163265 - DNA, 25 bp, Homo sapien
acagcacgcgctcccacccactttg

SEQ ID NO: 1163266 - DNA, 25 bp, Homo sapien
gatcgctcggtttgctagccttcag

SEQ ID NO: 1163267 - DNA, 25 bp, Homo sapien
aacctccaagcaactcccaacagca

SEQ ID NO: 1163268 - DNA, 25 bp, Homo sapien
aactcctcgtcgtcgtatttgtccg

SEQ ID NO: 1163269 - DNA, 25 bp, Homo sapien
cgtcgtcgtatttgtccgaatagta

SEQ ID NO: 1163270 - DNA, 25 bp, Homo sapien
cctcgtcgtcgtatttgtccgaata

SEQ ID NO: 1163271 - DNA, 25 bp, Homo sapien
cgatactcaaactcctcgtcgtcgt

SEQ ID NO: 1163272 - DNA, 25 bp, Homo sapien
caattctatcgcctcagttcctgtt

SEQ ID NO: 1163273 - DNA, 25 bp, Homo sapien
cctcgctattgctcccgcgccagca

SEQ ID NO: 1163274 - DNA, 25 bp, Homo sapien
ggccaaagctcacgaccctcgctat

SEQ ID NO: 1163275 - DNA, 25 bp, Homo sapien
tatcgcctcagttcctgttactaat

SEQ ID NO: 1163276 - DNA, 25 bp, Homo sapien
ccactggattcgacaagattactgt

SEQ ID NO: 1163277 - DNA, 25 bp, Homo sapien
tccagctccgcttttgctacgttct

SEQ ID NO: 1163278 - DNA, 25 bp, Homo sapien
ggattcgacaagattactgtgaaac

SEQ ID NO: 1163279 - DNA, 25 bp, Homo sapien
tgttagggacgccaggaaacttcca

SEQ ID NO: 1163280 - DNA, 25 bp, Homo sapien
ttccctctccttagcaagtcttgtg

SEQ ID NO: 1163281 - DNA, 25 bp, Homo sapien
cttcgggtcgccagttccctctcct

SEQ ID NO: 1163282 - DNA, 25 bp, Homo sapien
ggaagccgcagccttcgggtcgcca

SEQ ID NO: 1163283 - DNA, 25 bp, Homo sapien
ccctctccttagcaagtcttgtgtg

SEQ ID NO: 1163284 - DNA, 25 bp, Homo sapien
ggctctgccctctaggaagctttcc

SEQ ID NO: 1163285 - DNA, 25 bp, Homo sapien
caggctctgccctctaggaagcttt

SEQ ID NO: 1163286 - DNA, 25 bp, Homo sapien
tcctgactcgggggttcggtgtaca

SEQ ID NO: 1163287 - DNA, 25 bp, Homo sapien
ctcttccgtttttcctctcagtatt

SEQ ID NO: 1163288 - DNA, 25 bp, Homo sapien
agccccacggagcacacagtgttaa

SEQ ID NO: 1163289 - DNA, 25 bp, Homo sapien
gatacagtctcttagacaaatgcct

SEQ ID NO: 1163290 - DNA, 25 bp, Homo sapien
ttatctacaacataatgggagcccc

SEQ ID NO: 1163291 - DNA, 25 bp, Homo sapien
ggcacattttctccgccttcatgga

SEQ ID NO: 1163292 - DNA, 25 bp, Homo sapien
gactctgctgaacgccaagattcct

SEQ ID NO: 1163293 - DNA, 25 bp, Homo sapien
ttcagattcagacatcagatgggtt

SEQ ID NO: 1163294 - DNA, 25 bp, Homo sapien
tttagggaccagcttggctatgtcc

SEQ ID NO: 1163295 - DNA, 25 bp, Homo sapien
tataatggacccatccctgactctg

SEQ ID NO: 1163296 - DNA, 25 bp, Homo sapien
aaaagaataccctctgattgaatga

SEQ ID NO: 1163297 - DNA, 25 bp, Homo sapien
tcaggctatatgtggccttaaaaag

SEQ ID NO: 1163298 - DNA, 25 bp, Homo sapien
cagtgacaggttgtctctgaacttc

SEQ ID NO: 1163299 - DNA, 25 bp, Homo sapien
gaatgttttcgatggagaatgaggc

SEQ ID NO: 1163300 - DNA, 25 bp, Homo sapien
cgccggaacagcaagatgtgaggtt

SEQ ID NO: 1163301 - DNA, 25 bp, Homo sapien
gtagtgggcgccggaacagcaagat

SEQ ID NO: 1163302 - DNA, 25 bp, Homo sapien
agtgggcgccggaacagcaagatgt

SEQ ID NO: 1163303 - DNA, 25 bp, Homo sapien
gggcgccggaacagcaagatgtgag

SEQ ID NO: 1163304 - DNA, 25 bp, Homo sapien
gatacagagcacatcgtggcttctg

SEQ ID NO: 1163305 - DNA, 25 bp, Homo sapien
aacaagaaggcaacataataatgtt

SEQ ID NO: 1163306 - DNA, 25 bp, Homo sapien
acactcagcttaggctgtgggtcca

SEQ ID NO: 1163307 - DNA, 25 bp, Homo sapien
caagtgtgttctggatacagagcac

SEQ ID NO: 1163308 - DNA, 25 bp, Homo sapien
aatccgcaagtcaccacacatacaa

SEQ ID NO: 1163309 - DNA, 25 bp, Homo sapien
cactgaaacataaatccgcaagtca

SEQ ID NO: 1163310 - DNA, 25 bp, Homo sapien
aacataaatccgcaagtcaccacac

SEQ ID NO: 1163311 - DNA, 25 bp, Homo sapien
taaatccgcaagtcaccacacatac

SEQ ID NO: 1163312 - DNA, 25 bp, Homo sapien
cagcaccccgactgtaggaagcagt

SEQ ID NO: 1163313 - DNA, 25 bp, Homo sapien
tcctattaggaattgggacacacaa

SEQ ID NO: 1163314 - DNA, 25 bp, Homo sapien
tcagtacttgtaaagctccccaggt

SEQ ID NO: 1163315 - DNA, 25 bp, Homo sapien
tattgggactatgttaaaggcagca

SEQ ID NO: 1163316 - DNA, 25 bp, Homo sapien
ctctggatcctcacatcatccgagc

SEQ ID NO: 1163317 - DNA, 25 bp, Homo sapien
ggatcctcacatcatccgagcttac

SEQ ID NO: 1163318 - DNA, 25 bp, Homo sapien
tggatcctcacatcatccgagctta

SEQ ID NO: 1163319 - DNA, 25 bp, Homo sapien
tctggatcctcacatcatccgagct

SEQ ID NO: 1163320 - DNA, 25 bp, Homo sapien
gttctgccccttcaccggctctttc

SEQ ID NO: 1163321 - DNA, 25 bp, Homo sapien
tctgccccttcaccggctctttccc

SEQ ID NO: 1163322 - DNA, 25 bp, Homo sapien
ttctgccccttcaccggctctttcc

SEQ ID NO: 1163323 - DNA, 25 bp, Homo sapien
ctgccccttcaccggctctttccct

SEQ ID NO: 1163324 - DNA, 25 bp, Homo sapien
tcccaccaagcttcagattactgag

SEQ ID NO: 1163325 - DNA, 25 bp, Homo sapien
taagtgtcttccgtttgctgagctg

SEQ ID NO: 1163326 - DNA, 25 bp, Homo sapien
gggccttggcccttttcaatgcatt

SEQ ID NO: 1163327 - DNA, 25 bp, Homo sapien
gagctggtctcctcaagtgtctgct

SEQ ID NO: 1163328 - DNA, 25 bp, Homo sapien
gtcttgcttagctctagtcttaaaa

SEQ ID NO: 1163329 - DNA, 25 bp, Homo sapien
tttaaatgtcttgcttagctctagt

SEQ ID NO: 1163330 - DNA, 25 bp, Homo sapien
aatgtcttgcttagctctagtctta

SEQ ID NO: 1163331 - DNA, 25 bp, Homo sapien
tgcttagctctagtcttaaaaactt

SEQ ID NO: 1163332 - DNA, 25 bp, Homo sapien
tctaaccagatccttgacaagcgac

SEQ ID NO: 1163333 - DNA, 25 bp, Homo sapien
tctggaataaacgtgttcccaaatc

SEQ ID NO: 1163334 - DNA, 25 bp, Homo sapien
tccttcgaggaagaccctagtcttc

SEQ ID NO: 1163335 - DNA, 25 bp, Homo sapien
gcaggcgtgcgcgtgcttccttcga

SEQ ID NO: 1163336 - DNA, 25 bp, Homo sapien
gacccccaaataggggtcgcaagca

SEQ ID NO: 1163337 - DNA, 25 bp, Homo sapien
cgcaagcacggggggcctgccaggt

SEQ ID NO: 1163338 - DNA, 25 bp, Homo sapien
cagacccccaaataggggtcgcaag

SEQ ID NO: 1163339 - DNA, 25 bp, Homo sapien
cccaaataggggtcgcaagcacggg

SEQ ID NO: 1163340 - DNA, 25 bp, Homo sapien
tctccaacaatgatgatgccagccg

SEQ ID NO: 1163341 - DNA, 25 bp, Homo sapien
aatgatgatgccagccgtcacgctg

SEQ ID NO: 1163342 - DNA, 25 bp, Homo sapien
gctgcgccccggagaaagttcagag

SEQ ID NO: 1163343 - DNA, 25 bp, Homo sapien
agaaagttcagaggccctagatgtc

SEQ ID NO: 1163344 - DNA, 25 bp, Homo sapien
tccaggatcctactgcagcaaagag

SEQ ID NO: 1163345 - DNA, 25 bp, Homo sapien
ctccttccatggagggatgtgcagc

SEQ ID NO: 1163346 - DNA, 25 bp, Homo sapien
tgcagcaggcccttaaggacaggag

SEQ ID NO: 1163347 - DNA, 25 bp, Homo sapien
ccaatatgctggattcactccagga

SEQ ID NO: 1163348 - DNA, 25 bp, Homo sapien
taaccgttttaatgcgtcactgtga

SEQ ID NO: 1163349 - DNA, 25 bp, Homo sapien
ccacctgatgatgcagtgctctgct

SEQ ID NO: 1163350 - DNA, 25 bp, Homo sapien
gcacctttcacctggacaatggcga

SEQ ID NO: 1163351 - DNA, 25 bp, Homo sapien
gatgaggccatcagtactgtaggga

SEQ ID NO: 1163352 - DNA, 25 bp, Homo sapien
caaacgggcagtcaggtaggccaag

SEQ ID NO: 1163353 - DNA, 25 bp, Homo sapien
tacaactgagactcggcaaacctgg

SEQ ID NO: 1163354 - DNA, 25 bp, Homo sapien
tagacgtttcggacggagaccagag

SEQ ID NO: 1163355 - DNA, 25 bp, Homo sapien
tgtccggcacagaaagaaggtgttg

SEQ ID NO: 1163356 - DNA, 25 bp, Homo sapien
tggcctgctccacagcgttgggcat

SEQ ID NO: 1163357 - DNA, 25 bp, Homo sapien
tgctccacagcgttgggcatgtagg

SEQ ID NO: 1163358 - DNA, 25 bp, Homo sapien
gcctgctccacagcgttgggcatgt

SEQ ID NO: 1163359 - DNA, 25 bp, Homo sapien
ggcatgtaggggaccagcgatccct

SEQ ID NO: 1163360 - DNA, 25 bp, Homo sapien
ggaagcacccaacagcccctgcatt

SEQ ID NO: 1163361 - DNA, 25 bp, Homo sapien
taatgaattaacagaagctatcttc

SEQ ID NO: 1163362 - DNA, 25 bp, Homo sapien
ggaagaataatgaattaacagaagc

SEQ ID NO: 1163363 - DNA, 25 bp, Homo sapien
agcccctgcattactgagatctggg

SEQ ID NO: 1163364 - DNA, 25 bp, Homo sapien
agtgcagtctttgcccccgttgaag

SEQ ID NO: 1163365 - DNA, 25 bp, Homo sapien
ctctgcacagctgcatggaagaggt

SEQ ID NO: 1163366 - DNA, 25 bp, Homo sapien
gccagggaggtctcaatggtctgta

SEQ ID NO: 1163367 - DNA, 25 bp, Homo sapien
tgcacagctgcatggaagaggtgca

SEQ ID NO: 1163368 - DNA, 25 bp, Homo sapien
tggagggggtttggaacatcaggta

SEQ ID NO: 1163369 - DNA, 25 bp, Homo sapien
ctggagggggtttggaacatcaggt

SEQ ID NO: 1163370 - DNA, 25 bp, Homo sapien
aaaggggagatgctgcggatataca

SEQ ID NO: 1163371 - DNA, 25 bp, Homo sapien
ctcttgatagtgtcctgtagaaact

SEQ ID NO: 1163372 - DNA, 25 bp, Homo sapien
tgatagtgtcctgtagaaactgttc

SEQ ID NO: 1163373 - DNA, 25 bp, Homo sapien
tagaaactgttccagctcagggaaa

SEQ ID NO: 1163374 - DNA, 25 bp, Homo sapien
agcttctcttggagcccaaacctcc

SEQ ID NO: 1163375 - DNA, 25 bp, Homo sapien
tcgggcgtgggctctgtcaagcttc

SEQ ID NO: 1163376 - DNA, 25 bp, Homo sapien
cagaagtaggggtcgggcgtgggct

SEQ ID NO: 1163377 - DNA, 25 bp, Homo sapien
gggctctgtcaagcttctcttggag

SEQ ID NO: 1163378 - DNA, 25 bp, Homo sapien
cctgcttcatgctgccctcagcttc

SEQ ID NO: 1163379 - DNA, 25 bp, Homo sapien
agggcctgcttcatgctgccctcag

SEQ ID NO: 1163380 - DNA, 25 bp, Homo sapien
tgcagttcacccagggcctgcttca

SEQ ID NO: 1163381 - DNA, 25 bp, Homo sapien
tcatgctgccctcagcttccaacat

SEQ ID NO: 1163382 - DNA, 25 bp, Homo sapien
cagtgggttgatgcgcatgaatgcg

SEQ ID NO: 1163383 - DNA, 25 bp, Homo sapien
gatgcgcatgaatgcgggccagcct

SEQ ID NO: 1163384 - DNA, 25 bp, Homo sapien
gggtgcccataaggacagcctccag

SEQ ID NO: 1163385 - DNA, 25 bp, Homo sapien
ccggcgggtgcccataaggacagcc

SEQ ID NO: 1163386 - DNA, 25 bp, Homo sapien
gaacagatagcactgcctcccttgg

SEQ ID NO: 1163387 - DNA, 25 bp, Homo sapien
tatccacagtaggaagtgcaatgcc

SEQ ID NO: 1163388 - DNA, 25 bp, Homo sapien
cactactgcaggtgagctagggtgc

SEQ ID NO: 1163389 - DNA, 25 bp, Homo sapien
tcccttggatgatgaggccccttca

SEQ ID NO: 1163390 - DNA, 25 bp, Homo sapien
gctagtacaactgaataactgtatt

SEQ ID NO: 1163391 - DNA, 25 bp, Homo sapien
tctctactgtctaatatggtggtca

SEQ ID NO: 1163392 - DNA, 25 bp, Homo sapien
tctgtatctctactgtctaatatgg

SEQ ID NO: 1163393 - DNA, 25 bp, Homo sapien
aatgttctgtatctctactgtctaa

SEQ ID NO: 1163394 - DNA, 25 bp, Homo sapien
cctctgagggagggcttgctatctg

SEQ ID NO: 1163395 - DNA, 25 bp, Homo sapien
gggagggcttgctatctgattctct

SEQ ID NO: 1163396 - DNA, 25 bp, Homo sapien
tatctgattctctggtatagcttgc

SEQ ID NO: 1163397 - DNA, 25 bp, Homo sapien
tgagggagggcttgctatctgattc

SEQ ID NO: 1163398 - DNA, 25 bp, Homo sapien
ctgggaggtcagagtaatagaatag

SEQ ID NO: 1163399 - DNA, 25 bp, Homo sapien
gggaggtcagagtaatagaatagtc

SEQ ID NO: 1163400 - DNA, 25 bp, Homo sapien
aggtcagagtaatagaatagtcaca

SEQ ID NO: 1163401 - DNA, 25 bp, Homo sapien
gaggtcagagtaatagaatagtcac

SEQ ID NO: 1163402 - DNA, 25 bp, Homo sapien
aatcccagatgtctctgtaggtcca

SEQ ID NO: 1163403 - DNA, 25 bp, Homo sapien
cccagatgtctctgtaggtccagtc

SEQ ID NO: 1163404 - DNA, 25 bp, Homo sapien
aaacagctgacgcagaaaatcccag

SEQ ID NO: 1163405 - DNA, 25 bp, Homo sapien
catacaggatacagtatgggacaaa

SEQ ID NO: 1163406 - DNA, 25 bp, Homo sapien
gggcgatcctattggccctccctat

SEQ ID NO: 1163407 - DNA, 25 bp, Homo sapien
tagggtgggcgatcctattggccct

SEQ ID NO: 1163408 - DNA, 25 bp, Homo sapien
caagcatgtggtagggtgggcgatc

SEQ ID NO: 1163409 - DNA, 25 bp, Homo sapien
gggtgggcgatcctattggccctcc

SEQ ID NO: 1163410 - DNA, 25 bp, Homo sapien
tcatgtgcgggagttccgctcctct

SEQ ID NO: 1163411 - DNA, 25 bp, Homo sapien
tcttcgttctccagtagataggctg

SEQ ID NO: 1163412 - DNA, 25 bp, Homo sapien
tcaggcacttcagggccgggttccg

SEQ ID NO: 1163413 - DNA, 25 bp, Homo sapien
gttccgcacggtattctcccgactc

SEQ ID NO: 1163414 - DNA, 25 bp, Homo sapien
tgccaggttataccctaggacggtg

SEQ ID NO: 1163415 - DNA, 25 bp, Homo sapien
attgccaggttataccctaggacgg

SEQ ID NO: 1163416 - DNA, 25 bp, Homo sapien
ccccttagagtgagcacagccagtc

SEQ ID NO: 1163417 - DNA, 25 bp, Homo sapien
ggctgacattgagaaccatcagtga

SEQ ID NO: 1163418 - DNA, 25 bp, Homo sapien
tgggccccttagagtgagcacagcc

SEQ ID NO: 1163419 - DNA, 25 bp, Homo sapien
tggagcaggaagacacagctagagc

SEQ ID NO: 1163420 - DNA, 25 bp, Homo sapien
tgtgggagctgcctctagtgccttt

SEQ ID NO: 1163421 - DNA, 25 bp, Homo sapien
taggccaaggcagcttcccctcttc

SEQ ID NO: 1163422 - DNA, 25 bp, Homo sapien
cagttccgaggaagggtgtgggagc

SEQ ID NO: 1163423 - DNA, 25 bp, Homo sapien
tgagtcagcccctctagacagggat

SEQ ID NO: 1163424 - DNA, 25 bp, Homo sapien
cagaggaggatgtaggcgacttcct

SEQ ID NO: 1163425 - DNA, 25 bp, Homo sapien
tgcccatcttaatgacaggcacccg

SEQ ID NO: 1163426 - DNA, 25 bp, Homo sapien
tccagcagttccttgatacaccagc

SEQ ID NO: 1163427 - DNA, 25 bp, Homo sapien
gttccttgatacaccagcagcagag

SEQ ID NO: 1163428 - DNA, 25 bp, Homo sapien
ggtggggagaggaggcagttccctg

SEQ ID NO: 1163429 - DNA, 25 bp, Homo sapien
gggagaggaggcagttccctgctac

SEQ ID NO: 1163430 - DNA, 25 bp, Homo sapien
tggggagaggaggcagttccctgct

SEQ ID NO: 1163431 - DNA, 25 bp, Homo sapien
gagaggaggcagttccctgctacca

SEQ ID NO: 1163432 - DNA, 25 bp, Homo sapien
tatgcctcctgtttactctaccctg

SEQ ID NO: 1163433 - DNA, 25 bp, Homo sapien
agaatgagaagctaaggcaagctct

SEQ ID NO: 1163434 - DNA, 25 bp, Homo sapien
ctgcagctatgcctcctgtttactc

SEQ ID NO: 1163435 - DNA, 25 bp, Homo sapien
gagaatgagaagctaaggcaagctc

SEQ ID NO: 1163436 - DNA, 25 bp, Homo sapien
ggtcctagccagagcagtccaagct

SEQ ID NO: 1163437 - DNA, 25 bp, Homo sapien
tggtgggctcactgtgccaagcttg

SEQ ID NO: 1163438 - DNA, 25 bp, Homo sapien
ccaagcttggaggagtgccaggtct

SEQ ID NO: 1163439 - DNA, 25 bp, Homo sapien
ctatgagggtatggtaagatcaacc

SEQ ID NO: 1163440 - DNA, 25 bp, Homo sapien
aatgacggccaggtgcgcggactgg

SEQ ID NO: 1163441 - DNA, 25 bp, Homo sapien
gccgggccacgtgcgccgaagggta

SEQ ID NO: 1163442 - DNA, 25 bp, Homo sapien
catagaagttagatgcttgcagaac

SEQ ID NO: 1163443 - DNA, 25 bp, Homo sapien
gacagcgactcggaatgacggccag

SEQ ID NO: 1163444 - DNA, 25 bp, Homo sapien
cgcgaggctgatcactgctccgggt

SEQ ID NO: 1163445 - DNA, 25 bp, Homo sapien
gctgatcactgctccgggttttctt

SEQ ID NO: 1163446 - DNA, 25 bp, Homo sapien
gttttcttctcagccccgccggaca

SEQ ID NO: 1163447 - DNA, 25 bp, Homo sapien
tactccagccgtctgggtcgtgcag

SEQ ID NO: 1163448 - DNA, 25 bp, Homo sapien
cctctgtgctgtcgccagtgcccgc

SEQ ID NO: 1163449 - DNA, 25 bp, Homo sapien
tctgtgctgtcgccagtgcccgctg

SEQ ID NO: 1163450 - DNA, 25 bp, Homo sapien
agcctctgtgctgtcgccagtgccc

SEQ ID NO: 1163451 - DNA, 25 bp, Homo sapien
tgtgctgtcgccagtgcccgctgcg

SEQ ID NO: 1163452 - DNA, 25 bp, Homo sapien
tccagtaggtctcgccttgcgttcg

SEQ ID NO: 1163453 - DNA, 25 bp, Homo sapien
aggtctcgccttgcgttcgtccagg

SEQ ID NO: 1163454 - DNA, 25 bp, Homo sapien
ctcgccttgcgttcgtccagggagg

SEQ ID NO: 1163455 - DNA, 25 bp, Homo sapien
gctcatctccagtaggtctcgcctt

SEQ ID NO: 1163456 - DNA, 25 bp, Homo sapien
tcctgctgtctcacctgtcctccag

SEQ ID NO: 1163457 - DNA, 25 bp, Homo sapien
tgctgtctcacctgtcctccagctt

SEQ ID NO: 1163458 - DNA, 25 bp, Homo sapien
ctgtcctgctgtctcacctgtcctc

SEQ ID NO: 1163459 - DNA, 25 bp, Homo sapien
gctgtctcacctgtcctccagcttg

SEQ ID NO: 1163460 - DNA, 25 bp, Homo sapien
gtcagaaggccgcggtcagttgctc

SEQ ID NO: 1163461 - DNA, 25 bp, Homo sapien
tcggccgccaagagccgtacattca

SEQ ID NO: 1163462 - DNA, 25 bp, Homo sapien
aaggccgcggtcagttgctcgccgc

SEQ ID NO: 1163463 - DNA, 25 bp, Homo sapien
gcggtcagttgctcgccgctcgctg

SEQ ID NO: 1163464 - DNA, 25 bp, Homo sapien
gaagaagcgcgtcccccaccaggcc

SEQ ID NO: 1163465 - DNA, 25 bp, Homo sapien
tcagccgtcgggtccgctggctgga

SEQ ID NO: 1163466 - DNA, 25 bp, Homo sapien
cagccgtcgggtccgctggctggag

SEQ ID NO: 1163467 - DNA, 25 bp, Homo sapien
ctctcagccgtcgggtccgctggct

SEQ ID NO: 1163468 - DNA, 25 bp, Homo sapien
actgcagtagtctcgagcctagtga

SEQ ID NO: 1163469 - DNA, 25 bp, Homo sapien
gagcctagtgaaccccgagccagga

SEQ ID NO: 1163470 - DNA, 25 bp, Homo sapien
aggacactgcagtagtctcgagcct

SEQ ID NO: 1163471 - DNA, 25 bp, Homo sapien
gtagtctcgagcctagtgaaccccg

SEQ ID NO: 1163472 - DNA, 25 bp, Homo sapien
ggttctgtggtcatgagctggcgtg

SEQ ID NO: 1163473 - DNA, 25 bp, Homo sapien
cgtggaaaaggtagcggcgggactg

SEQ ID NO: 1163474 - DNA, 25 bp, Homo sapien
catgagctggcgtggaaaaggtagc

SEQ ID NO: 1163475 - DNA, 25 bp, Homo sapien
tggtcatgagctggcgtggaaaagg

SEQ ID NO: 1163476 - DNA, 25 bp, Homo sapien
gtttactcagcacaaggagggggaa

SEQ ID NO: 1163477 - DNA, 25 bp, Homo sapien
agtttactcagcacaaggaggggga

SEQ ID NO: 1163478 - DNA, 25 bp, Homo sapien
gagtttactcagcacaaggaggggg

SEQ ID NO: 1163479 - DNA, 25 bp, Homo sapien
ctggcacaggtatttgctgactggg

SEQ ID NO: 1163480 - DNA, 25 bp, Homo sapien
atctggcacaggtatttgctgactg

SEQ ID NO: 1163481 - DNA, 25 bp, Homo sapien
tctggcacaggtatttgctgactgg

SEQ ID NO: 1163482 - DNA, 25 bp, Homo sapien
ggcagatgacttggtcatgaatctc

SEQ ID NO: 1163483 - DNA, 25 bp, Homo sapien
gcagatgacttggtcatgaatctcc

SEQ ID NO: 1163484 - DNA, 25 bp, Homo sapien
aagggcagatgacttggtcatgaat

SEQ ID NO: 1163485 - DNA, 25 bp, Homo sapien
gggcagatgacttggtcatgaatct

SEQ ID NO: 1163486 - DNA, 25 bp, Homo sapien
agttgtagtcccccttgagaagctc

SEQ ID NO: 1163487 - DNA, 25 bp, Homo sapien
ggagttgtagtcccccttgagaagc

SEQ ID NO: 1163488 - DNA, 25 bp, Homo sapien
gagttgtagtcccccttgagaagct

SEQ ID NO: 1163489 - DNA, 25 bp, Homo sapien
taccacagttccttgcccgggtgcc

SEQ ID NO: 1163490 - DNA, 25 bp, Homo sapien
ccacagttccttgcccgggtgccaa

SEQ ID NO: 1163491 - DNA, 25 bp, Homo sapien
atagccagggggatcagggggaaca

SEQ ID NO: 1163492 - DNA, 25 bp, Homo sapien
gccagggggatcagggggaacagag

SEQ ID NO: 1163493 - DNA, 25 bp, Homo sapien
ggcctggcggcaactcctcctggcc

SEQ ID NO: 1163494 - DNA, 25 bp, Homo sapien
aggggcctggcggcaactcctcctg

SEQ ID NO: 1163495 - DNA, 25 bp, Homo sapien
gcctggcggcaactcctcctggccc

SEQ ID NO: 1163496 - DNA, 25 bp, Homo sapien
gggcctggcggcaactcctcctggc

SEQ ID NO: 1163497 - DNA, 25 bp, Homo sapien
ggttaagtctctgcccagctccaaa

SEQ ID NO: 1163498 - DNA, 25 bp, Homo sapien
aggcgaggggagttggctgcttccc

SEQ ID NO: 1163499 - DNA, 25 bp, Homo sapien
gagttggctgcttcccggtgctgtg

SEQ ID NO: 1163500 - DNA, 25 bp, Homo sapien
aagagagaccgcaagccacgaaggg

SEQ ID NO: 1163501 - DNA, 25 bp, Homo sapien
tggctttggcctgcgtctggaccag

SEQ ID NO: 1163502 - DNA, 25 bp, Homo sapien
gagctaagtttgcacgaagccatgg

SEQ ID NO: 1163503 - DNA, 25 bp, Homo sapien
tttggagctaagtttgcacgaagcc

SEQ ID NO: 1163504 - DNA, 25 bp, Homo sapien
atggctttggcctgcgtctggacca

SEQ ID NO: 1163505 - DNA, 25 bp, Homo sapien
ggatgaggaccaggctgtaacatct

SEQ ID NO: 1163506 - DNA, 25 bp, Homo sapien
gggaggatgaggaccaggctgtaac

SEQ ID NO: 1163507 - DNA, 25 bp, Homo sapien
gaggatgaggaccaggctgtaacat

SEQ ID NO: 1163508 - DNA, 25 bp, Homo sapien
atgaggaccaggctgtaacatcttc

SEQ ID NO: 1163509 - DNA, 25 bp, Homo sapien
gccacgaaggccaacactgctggct

SEQ ID NO: 1163510 - DNA, 25 bp, Homo sapien
cactgctggcttgagccagccgaag

SEQ ID NO: 1163511 - DNA, 25 bp, Homo sapien
acagggcagctgagtaaagctgacc

SEQ ID NO: 1163512 - DNA, 25 bp, Homo sapien
agggcagctgagtaaagctgacccc

SEQ ID NO: 1163513 - DNA, 25 bp, Homo sapien
ggccaagccggtgggcagctctctt

SEQ ID NO: 1163514 - DNA, 25 bp, Homo sapien
cagctctcttgaaactgggccctga

SEQ ID NO: 1163515 - DNA, 25 bp, Homo sapien
actgtcaggcctgctagaccggcca

SEQ ID NO: 1163516 - DNA, 25 bp, Homo sapien
aggcctgctagaccggccaagccgg

SEQ ID NO: 1163517 - DNA, 25 bp, Homo sapien
tgtgccagggaaccgggcaaggtct

SEQ ID NO: 1163518 - DNA, 25 bp, Homo sapien
ttgctaagaccttgtgggcatgggt

SEQ ID NO: 1163519 - DNA, 25 bp, Homo sapien
ctgacgccccatgaaggcggcccat

SEQ ID NO: 1163520 - DNA, 25 bp, Homo sapien
aaccgggcaaggtctgtttggtctg

SEQ ID NO: 1163521 - DNA, 25 bp, Homo sapien
taactcaagttatcgctctccaaag

SEQ ID NO: 1163522 - DNA, 25 bp, Homo sapien
tcaagttatcgctctccaaagcggt

SEQ ID NO: 1163523 - DNA, 25 bp, Homo sapien
tatcgctctccaaagcggttaggac

SEQ ID NO: 1163524 - DNA, 25 bp, Homo sapien
ggtgctttaactcaagttatcgctc

SEQ ID NO: 1163525 - DNA, 25 bp, Homo sapien
tagccaatacttattgagggatgac

SEQ ID NO: 1163526 - DNA, 25 bp, Homo sapien
gggagattaagagcgctcagcccac

SEQ ID NO: 1163527 - DNA, 25 bp, Homo sapien
tgcatgccagtcacccttctgagta

SEQ ID NO: 1163528 - DNA, 25 bp, Homo sapien
gaggaccaactttagccaatactta

SEQ ID NO: 1163529 - DNA, 25 bp, Homo sapien
caagcagcgatgacacacgggatct

SEQ ID NO: 1163530 - DNA, 25 bp, Homo sapien
tataggcaaattcaaggagggcgcc

SEQ ID NO: 1163531 - DNA, 25 bp, Homo sapien
taggtaggccatcaggtcaggatcg

SEQ ID NO: 1163532 - DNA, 25 bp, Homo sapien
cagccctgtgggtgcggtattcaag

SEQ ID NO: 1163533 - DNA, 25 bp, Homo sapien
cacaggtggcactcatagggccggt

SEQ ID NO: 1163534 - DNA, 25 bp, Homo sapien
tcccagaatcgagctagagagaggc

SEQ ID NO: 1163535 - DNA, 25 bp, Homo sapien
catgtggatcttcagcttgtcgttc

SEQ ID NO: 1163536 - DNA, 25 bp, Homo sapien
ttctggcctttgaggtggcgctgca

SEQ ID NO: 1163537 - DNA, 25 bp, Homo sapien
tgcgtgctcccactgcttggcatgg

SEQ ID NO: 1163538 - DNA, 25 bp, Homo sapien
cattattgcttctactccccaggag

SEQ ID NO: 1163539 - DNA, 25 bp, Homo sapien
tagaaacccgcatagccgaagtggg

SEQ ID NO: 1163540 - DNA, 25 bp, Homo sapien
cagggaccccacttttacaatacag

SEQ ID NO: 1163541 - DNA, 25 bp, Homo sapien
tcctttgccggccccctttgcataa

SEQ ID NO: 1163542 - DNA, 25 bp, Homo sapien
ctttgccggccccctttgcataatt

SEQ ID NO: 1163543 - DNA, 25 bp, Homo sapien
ttgccggccccctttgcataattca

SEQ ID NO: 1163544 - DNA, 25 bp, Homo sapien
cttcctttgccggccccctttgcat

SEQ ID NO: 1163545 - DNA, 25 bp, Homo sapien
caagacattccctgcccagggccgt

SEQ ID NO: 1163546 - DNA, 25 bp, Homo sapien
gggcaggcgagccaatcaggccacc

SEQ ID NO: 1163547 - DNA, 25 bp, Homo sapien
ccttctccacgaccccatgactcag

SEQ ID NO: 1163548 - DNA, 25 bp, Homo sapien
gatggctccttccttacaggcccag

SEQ ID NO: 1163549 - DNA, 25 bp, Homo sapien
cggctcgcccgctctccacaaggct

SEQ ID NO: 1163550 - DNA, 25 bp, Homo sapien
ctcgcccgctctccacaaggctctt

SEQ ID NO: 1163551 - DNA, 25 bp, Homo sapien
acacccttcgctgcgccagcccggg

SEQ ID NO: 1163552 - DNA, 25 bp, Homo sapien
cttaccctgtcccacacccttcgct

SEQ ID NO: 1163553 - DNA, 25 bp, Homo sapien
ttcctgtcgcttacacccgaggtgg

SEQ ID NO: 1163554 - DNA, 25 bp, Homo sapien
gaccaacagaagaggctatgtacag

SEQ ID NO: 1163555 - DNA, 25 bp, Homo sapien
cctgaaatgctaagatgaggcccag

SEQ ID NO: 1163556 - DNA, 25 bp, Homo sapien
taaatagataacagggactggtccc

SEQ ID NO: 1163557 - DNA, 25 bp, Homo sapien
gcttttaatctaatgagtgctgtag

SEQ ID NO: 1163558 - DNA, 25 bp, Homo sapien
ggagagtataggttcccctgagcag

SEQ ID NO: 1163559 - DNA, 25 bp, Homo sapien
accaggtggcctgcctgagaaagga

SEQ ID NO: 1163560 - DNA, 25 bp, Homo sapien
ttaggcagtgtaaaagcacgttggg

SEQ ID NO: 1163561 - DNA, 25 bp, Homo sapien
tagaagaggtgatacatgagctgga

SEQ ID NO: 1163562 - DNA, 25 bp, Homo sapien
gcacagaggacacaacagccaattt

SEQ ID NO: 1163563 - DNA, 25 bp, Homo sapien
tggacagcaccctgataaaggagtg

SEQ ID NO: 1163564 - DNA, 25 bp, Homo sapien
ggagtgaagtacactctggacagca

SEQ ID NO: 1163565 - DNA, 25 bp, Homo sapien
gaacaagattaaagctattgcccgg

SEQ ID NO: 1163566 - DNA, 25 bp, Homo sapien
ggagaagactccaaagtgcctctgt

SEQ ID NO: 1163567 - DNA, 25 bp, Homo sapien
tattgcccggaagaccaaagaggtg

SEQ ID NO: 1163568 - DNA, 25 bp, Homo sapien
aaaatgcacccagtcctggccgggt

SEQ ID NO: 1163569 - DNA, 25 bp, Homo sapien
ccctctccagtcctcggaactgggt

SEQ ID NO: 1163570 - DNA, 25 bp, Homo sapien
tcccctctccagtcctcggaactgg

SEQ ID NO: 1163571 - DNA, 25 bp, Homo sapien
ctatcccctctccagtcctcggaac

SEQ ID NO: 1163572 - DNA, 25 bp, Homo sapien
cctctccagtcctcggaactgggtc

SEQ ID NO: 1163573 - DNA, 25 bp, Homo sapien
tcttccgcttcatgggaagcctagg

SEQ ID NO: 1163574 - DNA, 25 bp, Homo sapien
cttccgcttcatgggaagcctaggc

SEQ ID NO: 1163575 - DNA, 25 bp, Homo sapien
tgtctcttccgcttcatgggaagcc

SEQ ID NO: 1163576 - DNA, 25 bp, Homo sapien
tctcttccgcttcatgggaagccta

SEQ ID NO: 1163577 - DNA, 25 bp, Homo sapien
ttttggggaagcaccactcatccca

SEQ ID NO: 1163578 - DNA, 25 bp, Homo sapien
gccctcttgtgccattctgatgatg

SEQ ID NO: 1163579 - DNA, 25 bp, Homo sapien
agcccccaggtcaggagcctctgca

SEQ ID NO: 1163580 - DNA, 25 bp, Homo sapien
ggcagcccccaggtcaggagcctct

SEQ ID NO: 1163581 - DNA, 25 bp, Homo sapien
ccccaggtcaggagcctctgcaccg

SEQ ID NO: 1163582 - DNA, 25 bp, Homo sapien
ctggcagcccccaggtcaggagcct

SEQ ID NO: 1163583 - DNA, 25 bp, Homo sapien
actcgcccggctggcgccacaggaa

SEQ ID NO: 1163584 - DNA, 25 bp, Homo sapien
tgacaggaaactcgcccggctggcg

SEQ ID NO: 1163585 - DNA, 25 bp, Homo sapien
agtgacaggaaactcgcccggctgg

SEQ ID NO: 1163586 - DNA, 25 bp, Homo sapien
aaactcgcccggctggcgccacagg

SEQ ID NO: 1163587 - DNA, 25 bp, Homo sapien
gctgtacaagaacataatcttctgt

SEQ ID NO: 1163588 - DNA, 25 bp, Homo sapien
tctgttcttcgtagatgttcatggg

SEQ ID NO: 1163589 - DNA, 25 bp, Homo sapien
tcatggggttcaccaggagctgaaa

SEQ ID NO: 1163590 - DNA, 25 bp, Homo sapien
gaacataatcttctgttcttcgtag

SEQ ID NO: 1163591 - DNA, 25 bp, Homo sapien
gatcagaaaacgaggtcagacaggt

SEQ ID NO: 1163592 - DNA, 25 bp, Homo sapien
ttccacaggccgcttgagtgttcct

SEQ ID NO: 1163593 - DNA, 25 bp, Homo sapien
tgcaggacggcgctgtgttccacag

SEQ ID NO: 1163594 - DNA, 25 bp, Homo sapien
gaatggagagactccctcagggcaa

SEQ ID NO: 1163595 - DNA, 25 bp, Homo sapien
ctgcaacacccccttctggaaccac

SEQ ID NO: 1163596 - DNA, 25 bp, Homo sapien
gcaacacccccttctggaaccacca

SEQ ID NO: 1163597 - DNA, 25 bp, Homo sapien
cacccccttctggaaccaccaccat

SEQ ID NO: 1163598 - DNA, 25 bp, Homo sapien
tgcaacacccccttctggaaccacc

SEQ ID NO: 1163599 - DNA, 25 bp, Homo sapien
taggaggctggcacagcggatgtga

SEQ ID NO: 1163600 - DNA, 25 bp, Homo sapien
cagcatcttgggtactagtaggagg

SEQ ID NO: 1163601 - DNA, 25 bp, Homo sapien
tagatggcagccaaggcgtatccca

SEQ ID NO: 1163602 - DNA, 25 bp, Homo sapien
catcttgggtactagtaggaggctg

SEQ ID NO: 1163603 - DNA, 25 bp, Homo sapien
ccagcgatgcgatcacgttgttgag

SEQ ID NO: 1163604 - DNA, 25 bp, Homo sapien
caagctgcgcgggtgttgttgatct

SEQ ID NO: 1163605 - DNA, 25 bp, Homo sapien
aggtccttgaacatggcccgtaagg

SEQ ID NO: 1163606 - DNA, 25 bp, Homo sapien
gagattgtgtcgcagattggctact

SEQ ID NO: 1163607 - DNA, 25 bp, Homo sapien
tcaaaagtggcggagatgttccgag

SEQ ID NO: 1163608 - DNA, 25 bp, Homo sapien
tggcggagatgttccgagtctctgc

SEQ ID NO: 1163609 - DNA, 25 bp, Homo sapien
gagatgttccgagtctctgctctca

SEQ ID NO: 1163610 - DNA, 25 bp, Homo sapien
caggtcctcaaaagtggcggagatg

SEQ ID NO: 1163611 - DNA, 25 bp, Homo sapien
ccctgagtccatggtatcctcaggc

SEQ ID NO: 1163612 - DNA, 25 bp, Homo sapien
tgagtccatggtatcctcaggcgtg

SEQ ID NO: 1163613 - DNA, 25 bp, Homo sapien
catggtatcctcaggcgtgtagccc

SEQ ID NO: 1163614 - DNA, 25 bp, Homo sapien
atcctcaggcgtgtagcccgtctca

SEQ ID NO: 1163615 - DNA, 25 bp, Homo sapien
gcagcttggtcttcagctcatacat

SEQ ID NO: 1163616 - DNA, 25 bp, Homo sapien
agcttggtcttcagctcatacatct

SEQ ID NO: 1163617 - DNA, 25 bp, Homo sapien
gagcaacgcagcttggtcttcagct

SEQ ID NO: 1163618 - DNA, 25 bp, Homo sapien
aggagcaacgcagcttggtcttcag

SEQ ID NO: 1163619 - DNA, 25 bp, Homo sapien
tccactccccagggatacccctcac

SEQ ID NO: 1163620 - DNA, 25 bp, Homo sapien
acatcttgatccacaatgctggccc

SEQ ID NO: 1163621 - DNA, 25 bp, Homo sapien
cccacatcttgatccacaatgctgg

SEQ ID NO: 1163622 - DNA, 25 bp, Homo sapien
cacatcttgatccacaatgctggcc

SEQ ID NO: 1163623 - DNA, 25 bp, Homo sapien
ttcccacatcttgatccacaatgct

SEQ ID NO: 1163624 - DNA, 25 bp, Homo sapien
cactgttcatgcttgcggtcaaacc

SEQ ID NO: 1163625 - DNA, 25 bp, Homo sapien
ggtcaaaccaacgacggcagctgag

SEQ ID NO: 1163626 - DNA, 25 bp, Homo sapien
cggcagctgagtatggcctggttca

SEQ ID NO: 1163627 - DNA, 25 bp, Homo sapien
gatgtgcttcatgcactgttcatgc

SEQ ID NO: 1163628 - DNA, 25 bp, Homo sapien
ggagtcgtaggtctgcccaaagttg

SEQ ID NO: 1163629 - DNA, 25 bp, Homo sapien
catccaggccacgaatagactggtt

SEQ ID NO: 1163630 - DNA, 25 bp, Homo sapien
gttgccttccactgggatgcgattg

SEQ ID NO: 1163631 - DNA, 25 bp, Homo sapien
ctgggatgcgattgcggcaccaaac

SEQ ID NO: 1163632 - DNA, 25 bp, Homo sapien
ctcggtgctcacgcgctcccagctt

SEQ ID NO: 1163633 - DNA, 25 bp, Homo sapien
cccagcttgtgttgagccccagcac

SEQ ID NO: 1163634 - DNA, 25 bp, Homo sapien
tgctcacgcgctcccagcttgtgtt

SEQ ID NO: 1163635 - DNA, 25 bp, Homo sapien
cagcttgtgttgagccccagcaccc

SEQ ID NO: 1163636 - DNA, 25 bp, Homo sapien
tcctggcggtacacgtagtcccgca

SEQ ID NO: 1163637 - DNA, 25 bp, Homo sapien
gcctcctggcggtacacgtagtccc

SEQ ID NO: 1163638 - DNA, 25 bp, Homo sapien
cctggcggtacacgtagtcccgcac

SEQ ID NO: 1163639 - DNA, 25 bp, Homo sapien
ctcctggcggtacacgtagtcccgc

SEQ ID NO: 1163640 - DNA, 25 bp, Homo sapien
caggaccagcaggaaagtgcaggag

SEQ ID NO: 1163641 - DNA, 25 bp, Homo sapien
gaccagcaggaaagtgcaggagagc

SEQ ID NO: 1163642 - DNA, 25 bp, Homo sapien
cagcaggaaagtgcaggagagcagc

SEQ ID NO: 1163643 - DNA, 25 bp, Homo sapien
gcatgcaggaccagcaggaaagtgc

SEQ ID NO: 1163644 - DNA, 25 bp, Homo sapien
gatgttgtcaaaacgaatgtcatgg

SEQ ID NO: 1163645 - DNA, 25 bp, Homo sapien
cagcttcttcctgcggtcatcgatc

SEQ ID NO: 1163646 - DNA, 25 bp, Homo sapien
ggttatagctgtccatgtaggagaa

SEQ ID NO: 1163647 - DNA, 25 bp, Homo sapien
cgatctggcagaagtaggtactgat

SEQ ID NO: 1163648 - DNA, 25 bp, Homo sapien
ctggatggtgggcttgcaagggaag

SEQ ID NO: 1163649 - DNA, 25 bp, Homo sapien
ctcagctttgcggagtggcagcaga

SEQ ID NO: 1163650 - DNA, 25 bp, Homo sapien
gaagatgacggttttctcctcagct

SEQ ID NO: 1163651 - DNA, 25 bp, Homo sapien
gcttgcaagggaagatgacggtttt

SEQ ID NO: 1163652 - DNA, 25 bp, Homo sapien
cttcaggcctgtctttgcacccagg

SEQ ID NO: 1163653 - DNA, 25 bp, Homo sapien
tttgcacccaggagtccgctcccca

SEQ ID NO: 1163654 - DNA, 25 bp, Homo sapien
tgcacccaggagtccgctccccatg

SEQ ID NO: 1163655 - DNA, 25 bp, Homo sapien
tcaggcctgtctttgcacccaggag

SEQ ID NO: 1163656 - DNA, 25 bp, Homo sapien
tggcggatggtgtcgaagatggagt

SEQ ID NO: 1163657 - DNA, 25 bp, Homo sapien
gagtggtggcggatggtgtcgaaga

SEQ ID NO: 1163658 - DNA, 25 bp, Homo sapien
cggatggtgtcgaagatggagtaga

SEQ ID NO: 1163659 - DNA, 25 bp, Homo sapien
agagagcccagtccaagccacacag

SEQ ID NO: 1163660 - DNA, 25 bp, Homo sapien
aagccgggctagcatggagtctccc

SEQ ID NO: 1163661 - DNA, 25 bp, Homo sapien
aggaggtgttcagggccccaatggt

SEQ ID NO: 1163662 - DNA, 25 bp, Homo sapien
aagaagccgggctagcatggagtct

SEQ ID NO: 1163663 - DNA, 25 bp, Homo sapien
gtttttcgaagaagccgggctagca

SEQ ID NO: 1163664 - DNA, 25 bp, Homo sapien
aatcggtactgcagctctccagtag

SEQ ID NO: 1163665 - DNA, 25 bp, Homo sapien
gagacacactaacaggccaatcggt

SEQ ID NO: 1163666 - DNA, 25 bp, Homo sapien
ctgtaacaggcagagacacactaac

SEQ ID NO: 1163667 - DNA, 25 bp, Homo sapien
taacaggccaatcggtactgcagct

SEQ ID NO: 1163668 - DNA, 25 bp, Homo sapien
tgaccctccggagtcggtagccaaa

SEQ ID NO: 1163669 - DNA, 25 bp, Homo sapien
aggctgcgatgaccctccggagtcg

SEQ ID NO: 1163670 - DNA, 25 bp, Homo sapien
gatgaccctccggagtcggtagcca

SEQ ID NO: 1163671 - DNA, 25 bp, Homo sapien
tgcgatgaccctccggagtcggtag

SEQ ID NO: 1163672 - DNA, 25 bp, Homo sapien
tagaggaacaggatccgcttcttct

SEQ ID NO: 1163673 - DNA, 25 bp, Homo sapien
cctcctgagtttggtgaaggctgct

SEQ ID NO: 1163674 - DNA, 25 bp, Homo sapien
ggatagcggccctcctgagtttggt

SEQ ID NO: 1163675 - DNA, 25 bp, Homo sapien
tcttttcttcaataggtcattgtag

SEQ ID NO: 1163676 - DNA, 25 bp, Homo sapien
gaccaccactctaggctgatctcca

SEQ ID NO: 1163677 - DNA, 25 bp, Homo sapien
acacctgaccaccactctaggctga

SEQ ID NO: 1163678 - DNA, 25 bp, Homo sapien
ctccagtgagcaggccttacagatc

SEQ ID NO: 1163679 - DNA, 25 bp, Homo sapien
taggccctctggcaccggagtccca

SEQ ID NO: 1163680 - DNA, 25 bp, Homo sapien
gtaatgagggaaggagccgggatac

SEQ ID NO: 1163681 - DNA, 25 bp, Homo sapien
caaccagatggagtagttaacccca

SEQ ID NO: 1163682 - DNA, 25 bp, Homo sapien
caaggtcacaccgttgtcatagtaa

SEQ ID NO: 1163683 - DNA, 25 bp, Homo sapien
tcatagtaatgagggaaggagccgg

SEQ ID NO: 1163684 - DNA, 25 bp, Homo sapien
ctgttgggaggtgggcgttagcgcc

SEQ ID NO: 1163685 - DNA, 25 bp, Homo sapien
tctgaagtcgccaggcctgacaatt

SEQ ID NO: 1163686 - DNA, 25 bp, Homo sapien
gaactggacagcgtttcctgtctga

SEQ ID NO: 1163687 - DNA, 25 bp, Homo sapien
ggcctgacaattcccgcgtgttgga

SEQ ID NO: 1163688 - DNA, 25 bp, Homo sapien
cccgcgtaggcagtgtcgtcgttgc

SEQ ID NO: 1163689 - DNA, 25 bp, Homo sapien
cagccgcggtgcaggatatccgcca

SEQ ID NO: 1163690 - DNA, 25 bp, Homo sapien
agcgtccggcacacgtaggactcgg

SEQ ID NO: 1163691 - DNA, 25 bp, Homo sapien
cactaaaggcggaggaagagagctc

SEQ ID NO: 1163692 - DNA, 25 bp, Homo sapien
gggaaggacggtgcggaagagcgag

SEQ ID NO: 1163693 - DNA, 25 bp, Homo sapien
gaaggacggtgcggaagagcgagca

SEQ ID NO: 1163694 - DNA, 25 bp, Homo sapien
aaggacggtgcggaagagcgagcag

SEQ ID NO: 1163695 - DNA, 25 bp, Homo sapien
ggaaggacggtgcggaagagcgagc

SEQ ID NO: 1163696 - DNA, 25 bp, Homo sapien
tcggagaacccagcagcgccgcgcg

SEQ ID NO: 1163697 - DNA, 25 bp, Homo sapien
ggagaacccagcagcgccgcgcggc

SEQ ID NO: 1163698 - DNA, 25 bp, Homo sapien
cggagaacccagcagcgccgcgcgg

SEQ ID NO: 1163699 - DNA, 25 bp, Homo sapien
ctcggagaacccagcagcgccgcgc

SEQ ID NO: 1163700 - DNA, 25 bp, Homo sapien
agcaagtgcggaacagcgcgcggag

SEQ ID NO: 1163701 - DNA, 25 bp, Homo sapien
cagcaagtgcggaacagcgcgcgga

SEQ ID NO: 1163702 - DNA, 25 bp, Homo sapien
ggcagcaagtgcggaacagcgcgcg

SEQ ID NO: 1163703 - DNA, 25 bp, Homo sapien
caagtgcggaacagcgcgcggagga

SEQ ID NO: 1163704 - DNA, 25 bp, Homo sapien
atttgggagcggccaggaaggcaga

SEQ ID NO: 1163705 - DNA, 25 bp, Homo sapien
gggcccagagcagcgccagccgcat

SEQ ID NO: 1163706 - DNA, 25 bp, Homo sapien
agggctgcccgcgcccaggagcccc

SEQ ID NO: 1163707 - DNA, 25 bp, Homo sapien
ctatatttgggagcggccaggaagg

SEQ ID NO: 1163708 - DNA, 25 bp, Homo sapien
tcggagatgccaggaacgcccattt

SEQ ID NO: 1163709 - DNA, 25 bp, Homo sapien
atcggagatgccaggaacgcccatt

SEQ ID NO: 1163710 - DNA, 25 bp, Homo sapien
gcaggtcccaggacaccccaagaca

SEQ ID NO: 1163711 - DNA, 25 bp, Homo sapien
aggtcccaggacaccccaagacagt

SEQ ID NO: 1163712 - DNA, 25 bp, Homo sapien
ggtcccaggacaccccaagacagta

SEQ ID NO: 1163713 - DNA, 25 bp, Homo sapien
ctgcaggtcccaggacaccccaaga

SEQ ID NO: 1163714 - DNA, 25 bp, Homo sapien
acctttttgaggctaattgggagat

SEQ ID NO: 1163715 - DNA, 25 bp, Homo sapien
tttgaggctaattgggagatcgtcc

SEQ ID NO: 1163716 - DNA, 25 bp, Homo sapien
aattgggagatcgtcctgaaggacc

SEQ ID NO: 1163717 - DNA, 25 bp, Homo sapien
gaggctaattgggagatcgtcctga

SEQ ID NO: 1163718 - DNA, 25 bp, Homo sapien
atatgactgtcaccgtccagctcca

SEQ ID NO: 1163719 - DNA, 25 bp, Homo sapien
ggatatgactgtcaccgtccagctc

SEQ ID NO: 1163720 - DNA, 25 bp, Homo sapien
actgtcaccgtccagctccaacttg

SEQ ID NO: 1163721 - DNA, 25 bp, Homo sapien
tgtagcagctccaggatatgactgt

SEQ ID NO: 1163722 - DNA, 25 bp, Homo sapien
cactgaccacccgagtgccatcggg

SEQ ID NO: 1163723 - DNA, 25 bp, Homo sapien
tgaccacccgagtgccatcgggctg

SEQ ID NO: 1163724 - DNA, 25 bp, Homo sapien
tgccatcgggctggtaccacaccag

SEQ ID NO: 1163725 - DNA, 25 bp, Homo sapien
cccgagtgccatcgggctggtacca

SEQ ID NO: 1163726 - DNA, 25 bp, Homo sapien
caacattagtgctgtctcagagagc

SEQ ID NO: 1163727 - DNA, 25 bp, Homo sapien
cctagcttgacggtaaaaatatgca

SEQ ID NO: 1163728 - DNA, 25 bp, Homo sapien
caccaggactggaactgaggagcct

SEQ ID NO: 1163729 - DNA, 25 bp, Homo sapien
tgggaacaacattagtgctgtctca

SEQ ID NO: 1163730 - DNA, 25 bp, Homo sapien
atatccccgcactcttccctggtag

SEQ ID NO: 1163731 - DNA, 25 bp, Homo sapien
tgcatatccccgcactcttccctgg

SEQ ID NO: 1163732 - DNA, 25 bp, Homo sapien
cacccaggagcctgcatatccccgc

SEQ ID NO: 1163733 - DNA, 25 bp, Homo sapien
ggagcctgcatatccccgcactctt

SEQ ID NO: 1163734 - DNA, 25 bp, Homo sapien
tcttggattcgcgaaataatgggag

SEQ ID NO: 1163735 - DNA, 25 bp, Homo sapien
cgaaataatgggaggaccctgaagg

SEQ ID NO: 1163736 - DNA, 25 bp, Homo sapien
tggagatcttggattcgcgaaataa

SEQ ID NO: 1163737 - DNA, 25 bp, Homo sapien
ttcgcgaaataatgggaggaccctg

SEQ ID NO: 1163738 - DNA, 25 bp, Homo sapien
ggcttctgagtgtgtacagattccc

SEQ ID NO: 1163739 - DNA, 25 bp, Homo sapien
gcttctgagtgtgtacagattcccg

SEQ ID NO: 1163740 - DNA, 25 bp, Homo sapien
ggatcagccctcaagacaaccaaag

SEQ ID NO: 1163741 - DNA, 25 bp, Homo sapien
gagctaatgttcacaaagtgcccag

SEQ ID NO: 1163742 - DNA, 25 bp, Homo sapien
tatgggaggagtacacgagctaatg

SEQ ID NO: 1163743 - DNA, 25 bp, Homo sapien
tcgcaggagctgttgttactgtgca

SEQ ID NO: 1163744 - DNA, 25 bp, Homo sapien
gcaactctatgcagcaagtagtttt

SEQ ID NO: 1163745 - DNA, 25 bp, Homo sapien
taggtctggcatagttttaagcact

SEQ ID NO: 1163746 - DNA, 25 bp, Homo sapien
ctatatggacttatttaatcttccc

SEQ ID NO: 1163747 - DNA, 25 bp, Homo sapien
cttgtcacttaccataggtctggca

SEQ ID NO: 1163748 - DNA, 25 bp, Homo sapien
aagaagaattatcaggcaaacctgc

SEQ ID NO: 1163749 - DNA, 25 bp, Homo sapien
aagaattatcaggcaaacctgccgc

SEQ ID NO: 1163750 - DNA, 25 bp, Homo sapien
agctgtgccgggctgaccaagaggc

SEQ ID NO: 1163751 - DNA, 25 bp, Homo sapien
gctgtgccgggctgaccaagaggca

SEQ ID NO: 1163752 - DNA, 25 bp, Homo sapien
acaatcaccaactccacagtcttgg

SEQ ID NO: 1163753 - DNA, 25 bp, Homo sapien
atcaccaactccacagtcttggtct

SEQ ID NO: 1163754 - DNA, 25 bp, Homo sapien
ctccgagtgatcagccacaatcacc

SEQ ID NO: 1163755 - DNA, 25 bp, Homo sapien
tccgagtgatcagccacaatcacca

SEQ ID NO: 1163756 - DNA, 25 bp, Homo sapien
aggtgctggaagtcccggtatttct

SEQ ID NO: 1163757 - DNA, 25 bp, Homo sapien
tccagtgtgcggtttagcaggtgct

SEQ ID NO: 1163758 - DNA, 25 bp, Homo sapien
ggtgctggaagtcccggtatttctg

SEQ ID NO: 1163759 - DNA, 25 bp, Homo sapien
cagcaagagggccacttccagtgtg

SEQ ID NO: 1163760 - DNA, 25 bp, Homo sapien
gaaagacagctggggctcagaagag

SEQ ID NO: 1163761 - DNA, 25 bp, Homo sapien
gggggttgccctgtccagcactcac

SEQ ID NO: 1163762 - DNA, 25 bp, Homo sapien
gtgggggttgccctgtccagcactc

SEQ ID NO: 1163763 - DNA, 25 bp, Homo sapien
ctcagaagaggggttgccatggtca

SEQ ID NO: 1163764 - DNA, 25 bp, Homo sapien
tcatggggcaatcgaggcagcaaat

SEQ ID NO: 1163765 - DNA, 25 bp, Homo sapien
gggtttgggctgatctccaccaggt

SEQ ID NO: 1163766 - DNA, 25 bp, Homo sapien
gcaaatgtgccctgcgccagtggag

SEQ ID NO: 1163767 - DNA, 25 bp, Homo sapien
actagtgccactcgtacattcaggg

SEQ ID NO: 1163768 - DNA, 25 bp, Homo sapien
cagatggagttctgaatggccatgc

SEQ ID NO: 1163769 - DNA, 25 bp, Homo sapien
ctgaatggccatgcccaccgtaggc

SEQ ID NO: 1163770 - DNA, 25 bp, Homo sapien
aacagatggagttctgaatggccat

SEQ ID NO: 1163771 - DNA, 25 bp, Homo sapien
atgcccaccgtaggcccagagaatg

SEQ ID NO: 1163772 - DNA, 25 bp, Homo sapien
ggctatggaggaggcgactcccagg

SEQ ID NO: 1163773 - DNA, 25 bp, Homo sapien
ggctgtggcccaactcatgggctat

SEQ ID NO: 1163774 - DNA, 25 bp, Homo sapien
ggcccaactcatgggctatggagga

SEQ ID NO: 1163775 - DNA, 25 bp, Homo sapien
tgtggcccaactcatgggctatgga

SEQ ID NO: 1163776 - DNA, 25 bp, Homo sapien
tggacctggacaggggcagctattc

SEQ ID NO: 1163777 - DNA, 25 bp, Homo sapien
tctgtggaggcctccatgatgcagg

SEQ ID NO: 1163778 - DNA, 25 bp, Homo sapien
ctggacctggacaggggcagctatt

SEQ ID NO: 1163779 - DNA, 25 bp, Homo sapien
cctccatgatgcaggtcttggctgg

SEQ ID NO: 1163780 - DNA, 25 bp, Homo sapien
ctctctccatcctgcagctacttac

SEQ ID NO: 1163781 - DNA, 25 bp, Homo sapien
gccccacaccctctctccatcctgc

SEQ ID NO: 1163782 - DNA, 25 bp, Homo sapien
ctggggagggtggcaaggaaggttg

SEQ ID NO: 1163783 - DNA, 25 bp, Homo sapien
agggtggcaaggaaggttggggctg

SEQ ID NO: 1163784 - DNA, 25 bp, Homo sapien
cgtcggctgcagttgctgaagttca

SEQ ID NO: 1163785 - DNA, 25 bp, Homo sapien
catatttccgcagaaagcagccata

SEQ ID NO: 1163786 - DNA, 25 bp, Homo sapien
tctccagggcccgtcggctgcagtt

SEQ ID NO: 1163787 - DNA, 25 bp, Homo sapien
taggcagccgttcgaagaggcagct

SEQ ID NO: 1163788 - DNA, 25 bp, Homo sapien
gctgggatagggctaatgagccagg

SEQ ID NO: 1163789 - DNA, 25 bp, Homo sapien
ggtgagggtacagaagtgagtgggg

SEQ ID NO: 1163790 - DNA, 25 bp, Homo sapien
gaggctgggatagggctaatgagcc

SEQ ID NO: 1163791 - DNA, 25 bp, Homo sapien
gatagggctaatgagccagggtgag

SEQ ID NO: 1163792 - DNA, 25 bp, Homo sapien
agaccagaagctacacagcaagcga

SEQ ID NO: 1163793 - DNA, 25 bp, Homo sapien
acaggccaagaccagaagctacaca

SEQ ID NO: 1163794 - DNA, 25 bp, Homo sapien
gcaggagcacgggggccgggcatca

SEQ ID NO: 1163795 - DNA, 25 bp, Homo sapien
aagctacacagcaagcgagggctag

SEQ ID NO: 1163796 - DNA, 25 bp, Homo sapien
ctggcaattttgacaacagggtccg

SEQ ID NO: 1163797 - DNA, 25 bp, Homo sapien
tcagctggcaggtcaaagaatcaca

SEQ ID NO: 1163798 - DNA, 25 bp, Homo sapien
gtgcacctggcctcagctggcaggt

SEQ ID NO: 1163799 - DNA, 25 bp, Homo sapien
aacagggtccgtcagatgcacactg

SEQ ID NO: 1163800 - DNA, 25 bp, Homo sapien
ataggaggcacaacgcccgtgcatg

SEQ ID NO: 1163801 - DNA, 25 bp, Homo sapien
gtgcatgcacacagcttgcccgcca

SEQ ID NO: 1163802 - DNA, 25 bp, Homo sapien
ctggaggcaaagtggcgcagcgggc

SEQ ID NO: 1163803 - DNA, 25 bp, Homo sapien
gcaagtcacaatcccctctggtagg

SEQ ID NO: 1163804 - DNA, 25 bp, Homo sapien
gcccacagctcccaaaagcatttcc

SEQ ID NO: 1163805 - DNA, 25 bp, Homo sapien
tgccactggggttgcgcccacagct

SEQ ID NO: 1163806 - DNA, 25 bp, Homo sapien
tgcaggacacataactgccactggg

SEQ ID NO: 1163807 - DNA, 25 bp, Homo sapien
ccaaaagcatttccccgagtattag

SEQ ID NO: 1163808 - DNA, 25 bp, Homo sapien
acagagttagtaggagcagggccaa

SEQ ID NO: 1163809 - DNA, 25 bp, Homo sapien
cacacagagttagtaggagcagggc

SEQ ID NO: 1163810 - DNA, 25 bp, Homo sapien
agggcacacagagttagtaggagca

SEQ ID NO: 1163811 - DNA, 25 bp, Homo sapien
gaagggcacacagagttagtaggag

SEQ ID NO: 1163812 - DNA, 25 bp, Homo sapien
gctgggtcctacctgtctggcactg

SEQ ID NO: 1163813 - DNA, 25 bp, Homo sapien
ccaggtgcacccagctgcagttcag

SEQ ID NO: 1163814 - DNA, 25 bp, Homo sapien
ccagcagaggctgggtcctacctgt

SEQ ID NO: 1163815 - DNA, 25 bp, Homo sapien
tattgtctcccagagtagatcccgg

SEQ ID NO: 1163816 - DNA, 25 bp, Homo sapien
gccaataaggttgaggccataccct

SEQ ID NO: 1163817 - DNA, 25 bp, Homo sapien
caaggcatagtgagttgataggact

SEQ ID NO: 1163818 - DNA, 25 bp, Homo sapien
gccataccctgcgtttacagatggg

SEQ ID NO: 1163819 - DNA, 25 bp, Homo sapien
ctccatctgaagtaagaaactgact

SEQ ID NO: 1163820 - DNA, 25 bp, Homo sapien
cacacgctggcatcgatggtctata

SEQ ID NO: 1163821 - DNA, 25 bp, Homo sapien
ccatgtccatggcatttgcttcgac

SEQ ID NO: 1163822 - DNA, 25 bp, Homo sapien
gctggcatcgatggtctatacacac

SEQ ID NO: 1163823 - DNA, 25 bp, Homo sapien
catttgcttcgacattcctgtgccc

SEQ ID NO: 1163824 - DNA, 25 bp, Homo sapien
gatgctttcatactcatctcatgta

SEQ ID NO: 1163825 - DNA, 25 bp, Homo sapien
ccttttcctctctagaggctctctg

SEQ ID NO: 1163826 - DNA, 25 bp, Homo sapien
gagctcagcaaagttagtaacctgc

SEQ ID NO: 1163827 - DNA, 25 bp, Homo sapien
taaaacccagatatgtctatttcca

SEQ ID NO: 1163828 - DNA, 25 bp, Homo sapien
tcctcacagtagcagtgcctgttgc

SEQ ID NO: 1163829 - DNA, 25 bp, Homo sapien
ctttgagctgagtggtgcagtcagg

SEQ ID NO: 1163830 - DNA, 25 bp, Homo sapien
tagcagtgcctgttgctgtcacaga

SEQ ID NO: 1163831 - DNA, 25 bp, Homo sapien
tttgagctgagtggtgcagtcaggg

SEQ ID NO: 1163832 - DNA, 25 bp, Homo sapien
gtcccttgagctggcagagtcgctg

SEQ ID NO: 1163833 - DNA, 25 bp, Homo sapien
cgggcacggtaccagtagctggcac

SEQ ID NO: 1163834 - DNA, 25 bp, Homo sapien
tggcaccaagcatcaccaggaccaa

SEQ ID NO: 1163835 - DNA, 25 bp, Homo sapien
gaccaataagaccaggaggctgagg

SEQ ID NO: 1163836 - DNA, 25 bp, Homo sapien
ggtagcagggaggtgatgctcatac

SEQ ID NO: 1163837 - DNA, 25 bp, Homo sapien
agttgaaggaagtggtagcagggag

SEQ ID NO: 1163838 - DNA, 25 bp, Homo sapien
gttgaaggaagtggtagcagggagg

SEQ ID NO: 1163839 - DNA, 25 bp, Homo sapien
tggtagcagggaggtgatgctcata

SEQ ID NO: 1163840 - DNA, 25 bp, Homo sapien
gagaaatggccctagcaatccagcc

SEQ ID NO: 1163841 - DNA, 25 bp, Homo sapien
gtatttattagcttgagggaagacc

SEQ ID NO: 1163842 - DNA, 25 bp, Homo sapien
gaagaccctacttatccagcacagg

SEQ ID NO: 1163843 - DNA, 25 bp, Homo sapien
ggttaaccctttgcaggcacttatg

SEQ ID NO: 1163844 - DNA, 25 bp, Homo sapien
tcctggccgttcagagggaccagat

SEQ ID NO: 1163845 - DNA, 25 bp, Homo sapien
cttagtgcctcgtgccagcagggcc

SEQ ID NO: 1163846 - DNA, 25 bp, Homo sapien
ttcagagggaccagattgggctgcc

SEQ ID NO: 1163847 - DNA, 25 bp, Homo sapien
agcagggccctctgcggaggtcctg

SEQ ID NO: 1163848 - DNA, 25 bp, Homo sapien
ggatagatccacctctcaaagccac

SEQ ID NO: 1163849 - DNA, 25 bp, Homo sapien
agtgctagcctttctctgagtctgg

SEQ ID NO: 1163850 - DNA, 25 bp, Homo sapien
aagccacctcttggccagcggacgg

SEQ ID NO: 1163851 - DNA, 25 bp, Homo sapien
gactccttcgactgactcttgggca

SEQ ID NO: 1163852 - DNA, 25 bp, Homo sapien
cggaaggccattctgagcaccactg

SEQ ID NO: 1163853 - DNA, 25 bp, Homo sapien
accactgcccttgtgccctcctggg

SEQ ID NO: 1163854 - DNA, 25 bp, Homo sapien
agcccttctaacatggtgacctggg

SEQ ID NO: 1163855 - DNA, 25 bp, Homo sapien
gacctgggcctacggaaggccattc

SEQ ID NO: 1163856 - DNA, 25 bp, Homo sapien
gcggcagcggcctggaagggggggc

SEQ ID NO: 1163857 - DNA, 25 bp, Homo sapien
agtctcttggacacagggtcaggcg

SEQ ID NO: 1163858 - DNA, 25 bp, Homo sapien
gggccgggaagctgagagcactagc

SEQ ID NO: 1163859 - DNA, 25 bp, Homo sapien
ctggagtctcttggacacagggtca

SEQ ID NO: 1163860 - DNA, 25 bp, Homo sapien
gagaactgcagttgggtaccaagcc

SEQ ID NO: 1163861 - DNA, 25 bp, Homo sapien
gatgagaactgcagttgggtaccaa

SEQ ID NO: 1163862 - DNA, 25 bp, Homo sapien
tgcagttgggtaccaagcctcccac

SEQ ID NO: 1163863 - DNA, 25 bp, Homo sapien
aactgcagttgggtaccaagcctcc

SEQ ID NO: 1163864 - DNA, 25 bp, Homo sapien
caccccgatcacctaatgaagagca

SEQ ID NO: 1163865 - DNA, 25 bp, Homo sapien
cccgatcacctaatgaagagcacca

SEQ ID NO: 1163866 - DNA, 25 bp, Homo sapien
ggcaccccgatcacctaatgaagag

SEQ ID NO: 1163867 - DNA, 25 bp, Homo sapien
gggcaccccgatcacctaatgaaga

SEQ ID NO: 1163868 - DNA, 25 bp, Homo sapien
ccagatggtggtagaaaccaaggca

SEQ ID NO: 1163869 - DNA, 25 bp, Homo sapien
tggccgactgcagtcccgccattga

SEQ ID NO: 1163870 - DNA, 25 bp, Homo sapien
gaaggtgtaggtcaaccgcagtccc

SEQ ID NO: 1163871 - DNA, 25 bp, Homo sapien
agaatgagggcatgcgcagagggct

SEQ ID NO: 1163872 - DNA, 25 bp, Homo sapien
tagggggattgggtcggtcagccag

SEQ ID NO: 1163873 - DNA, 25 bp, Homo sapien
gggattgggtcggtcagccagctca

SEQ ID NO: 1163874 - DNA, 25 bp, Homo sapien
gtagggggattgggtcggtcagcca

SEQ ID NO: 1163875 - DNA, 25 bp, Homo sapien
gggggattgggtcggtcagccagct

SEQ ID NO: 1163876 - DNA, 25 bp, Homo sapien
gggggagaggccgtgcccttctctc

SEQ ID NO: 1163877 - DNA, 25 bp, Homo sapien
ggagaggccgtgcccttctctcccc

SEQ ID NO: 1163878 - DNA, 25 bp, Homo sapien
tggggggagaggccgtgcccttctc

SEQ ID NO: 1163879 - DNA, 25 bp, Homo sapien
gggagaggccgtgcccttctctccc

SEQ ID NO: 1163880 - DNA, 25 bp, Homo sapien
aaggcaccaccgggatatgtgccct

SEQ ID NO: 1163881 - DNA, 25 bp, Homo sapien
ctcatgcactgagggggcatctcgc

SEQ ID NO: 1163882 - DNA, 25 bp, Homo sapien
ctgtcaccattaaaggcaccaccgg

SEQ ID NO: 1163883 - DNA, 25 bp, Homo sapien
gccaccaccgtcatggctaccagca

SEQ ID NO: 1163884 - DNA, 25 bp, Homo sapien
cagcaccagcggtcacccttgtctg

SEQ ID NO: 1163885 - DNA, 25 bp, Homo sapien
ggcagcaccagcggtcacccttgtc

SEQ ID NO: 1163886 - DNA, 25 bp, Homo sapien
gcagcaccagcggtcacccttgtct

SEQ ID NO: 1163887 - DNA, 25 bp, Homo sapien
agcaccagcggtcacccttgtctgc

SEQ ID NO: 1163888 - DNA, 25 bp, Homo sapien
tcacccgatgggcaccggccctggg

SEQ ID NO: 1163889 - DNA, 25 bp, Homo sapien
gtcggcaggcagtggcttccttggg

SEQ ID NO: 1163890 - DNA, 25 bp, Homo sapien
ctgggggtcggcaggcagtggcttc

SEQ ID NO: 1163891 - DNA, 25 bp, Homo sapien
gcaccggccctgggggtcggcaggc

SEQ ID NO: 1163892 - DNA, 25 bp, Homo sapien
tagagcgaggacactgtcggaggcg

SEQ ID NO: 1163893 - DNA, 25 bp, Homo sapien
agcgaggacactgtcggaggcggtg

SEQ ID NO: 1163894 - DNA, 25 bp, Homo sapien
tcagaggtagagcgaggacactgtc

SEQ ID NO: 1163895 - DNA, 25 bp, Homo sapien
gaggtagagcgaggacactgtcgga

SEQ ID NO: 1163896 - DNA, 25 bp, Homo sapien
tcttgaagccctaagtccggcttgg

SEQ ID NO: 1163897 - DNA, 25 bp, Homo sapien
gaagccctaagtccggcttggaggc

SEQ ID NO: 1163898 - DNA, 25 bp, Homo sapien
ccgcctcttgaagccctaagtccgg

SEQ ID NO: 1163899 - DNA, 25 bp, Homo sapien
ccctaagtccggcttggaggcagcg

SEQ ID NO: 1163900 - DNA, 25 bp, Homo sapien
tattgcaactgagcagagacaggct

SEQ ID NO: 1163901 - DNA, 25 bp, Homo sapien
ggagtcttaagacaccgccagtctc

SEQ ID NO: 1163902 - DNA, 25 bp, Homo sapien
tccgcagagtgttgcttgacagcgc

SEQ ID NO: 1163903 - DNA, 25 bp, Homo sapien
cgctcccaagatgtcacgtttattg

SEQ ID NO: 1163904 - DNA, 25 bp, Homo sapien
aaccgcagcaggagcgacccgggtt

SEQ ID NO: 1163905 - DNA, 25 bp, Homo sapien
tcttctggcggccaaacctggaacc

SEQ ID NO: 1163906 - DNA, 25 bp, Homo sapien
gccaaacctggaaccgcagcaggag

SEQ ID NO: 1163907 - DNA, 25 bp, Homo sapien
ctcgtctgaggcggcagcgtcttct

SEQ ID NO: 1163908 - DNA, 25 bp, Homo sapien
caagaaatttgtaactacctagtat

SEQ ID NO: 1163909 - DNA, 25 bp, Homo sapien
atactaggtagttacaaatttcttg

SEQ ID NO: 1163910 - DNA, 25 bp, Homo sapien
ggcgtctgtcccttgccgctccaca

SEQ ID NO: 1163911 - DNA, 25 bp, Homo sapien
gtcccttgccgctccacaccttcgt

SEQ ID NO: 1163912 - DNA, 25 bp, Homo sapien
ctccacaccttcgttccgggctggg

SEQ ID NO: 1163913 - DNA, 25 bp, Homo sapien
attggcgtctgtcccttgccgctcc

SEQ ID NO: 1163914 - DNA, 25 bp, Homo sapien
cttcacagtcgaggagagaaaggta

SEQ ID NO: 1163915 - DNA, 25 bp, Homo sapien
ccggcccgcttcacagtcgaggaga

SEQ ID NO: 1163916 - DNA, 25 bp, Homo sapien
cccgcttcacagtcgaggagagaaa

SEQ ID NO: 1163917 - DNA, 25 bp, Homo sapien
ggtcccggcccgcttcacagtcgag

SEQ ID NO: 1163918 - DNA, 25 bp, Homo sapien
ggagccgaggaacgcggcccagagg

SEQ ID NO: 1163919 - DNA, 25 bp, Homo sapien
ggctggagcccccgcgcagagggga

SEQ ID NO: 1163920 - DNA, 25 bp, Homo sapien
tccagtagactacgtggcggaggct

SEQ ID NO: 1163921 - DNA, 25 bp, Homo sapien
gagttccagtagactacgtggcgga

SEQ ID NO: 1163922 - DNA, 25 bp, Homo sapien
tgaagcgctgaatcttctctgagaa

SEQ ID NO: 1163923 - DNA, 25 bp, Homo sapien
gatgtagtagtaagtctctccaggt

SEQ ID NO: 1163924 - DNA, 25 bp, Homo sapien
aatgtctaggtaatcgttgaggccc

SEQ ID NO: 1163925 - DNA, 25 bp, Homo sapien
ccatgtacaaagcaaacgtctcggg

SEQ ID NO: 1163926 - DNA, 25 bp, Homo sapien
aggtgtccagtgtgcccttggccac

SEQ ID NO: 1163927 - DNA, 25 bp, Homo sapien
ttctggtacacaagaggtgtccagt

SEQ ID NO: 1163928 - DNA, 25 bp, Homo sapien
gtgtccagtgtgcccttggccactc

SEQ ID NO: 1163929 - DNA, 25 bp, Homo sapien
agaggtgtccagtgtgcccttggcc

SEQ ID NO: 1163930 - DNA, 25 bp, Homo sapien
caagcactggccagaactctctgga

SEQ ID NO: 1163931 - DNA, 25 bp, Homo sapien
gacacctggagcctcaagcactggc

SEQ ID NO: 1163932 - DNA, 25 bp, Homo sapien
agcagacagacacctggagcctcaa

SEQ ID NO: 1163933 - DNA, 25 bp, Homo sapien
tggccagaactctctggagtgggca

SEQ ID NO: 1163934 - DNA, 25 bp, Homo sapien
ttagccagtagggtccatgctccca

SEQ ID NO: 1163935 - DNA, 25 bp, Homo sapien
agccagtagggtccatgctcccaac

SEQ ID NO: 1163936 - DNA, 25 bp, Homo sapien
agggtccatgctcccaacccactta

SEQ ID NO: 1163937 - DNA, 25 bp, Homo sapien
gtagggtccatgctcccaacccact

SEQ ID NO: 1163938 - DNA, 25 bp, Homo sapien
cacagaattcgcagaagacgaagaa

SEQ ID NO: 1163939 - DNA, 25 bp, Homo sapien
gtgtccccccctcgccaccctgatg

SEQ ID NO: 1163940 - DNA, 25 bp, Homo sapien
agaattcgcagaagacgaagaatca

SEQ ID NO: 1163941 - DNA, 25 bp, Homo sapien
tcacagaattcgcagaagacgaaga

SEQ ID NO: 1163942 - DNA, 25 bp, Homo sapien
tcttgtcggtctgaattggcacccc

SEQ ID NO: 1163943 - DNA, 25 bp, Homo sapien
tgcaagagtcacctcagaccctctg

SEQ ID NO: 1163944 - DNA, 25 bp, Homo sapien
cccatcaatgctccatcttgtcggt

SEQ ID NO: 1163945 - DNA, 25 bp, Homo sapien
cctccaggggatcttgggaggactc

SEQ ID NO: 1163946 - DNA, 25 bp, Homo sapien
aattcaacctcatgaagagtccgtc

SEQ ID NO: 1163947 - DNA, 25 bp, Homo sapien
tacaaactggcatgaaattcaacct

SEQ ID NO: 1163948 - DNA, 25 bp, Homo sapien
gaagacaagtgagtgatcccctggg

SEQ ID NO: 1163949 - DNA, 25 bp, Homo sapien
gagcagcctgcaaagcgcctgtgtt

SEQ ID NO: 1163950 - DNA, 25 bp, Homo sapien
ggccttgtggggatcatagcctcgc

SEQ ID NO: 1163951 - DNA, 25 bp, Homo sapien
caggcaccacctaggataccattca

SEQ ID NO: 1163952 - DNA, 25 bp, Homo sapien
cacctaggataccattcagaaagag

SEQ ID NO: 1163953 - DNA, 25 bp, Homo sapien
gataccattcagaaagagggcccca

SEQ ID NO: 1163954 - DNA, 25 bp, Homo sapien
cccgtaaccatgttcacacgctgcc

SEQ ID NO: 1163955 - DNA, 25 bp, Homo sapien
ggccgagctaatcagcacaacatcc

SEQ ID NO: 1163956 - DNA, 25 bp, Homo sapien
gcagccgggccgagctaatcagcac

SEQ ID NO: 1163957 - DNA, 25 bp, Homo sapien
gtaaccatgttcacacgctgcctct

SEQ ID NO: 1163958 - DNA, 25 bp, Homo sapien
gccgccccccgactgagccccgcgc

SEQ ID NO: 1163959 - DNA, 25 bp, Homo sapien
ccggcttctccgcttcccagctccc

SEQ ID NO: 1163960 - DNA, 25 bp, Homo sapien
cccggcttctccgcttcccagctcc

SEQ ID NO: 1163961 - DNA, 25 bp, Homo sapien
cggcttctccgcttcccagctccct

SEQ ID NO: 1163962 - DNA, 25 bp, Homo sapien
ggagctgttccagtacaccgcatgc

SEQ ID NO: 1163963 - DNA, 25 bp, Homo sapien
gctggttggagctgttccagtacac

SEQ ID NO: 1163964 - DNA, 25 bp, Homo sapien
tgttccagtacaccgcatgccggtt

SEQ ID NO: 1163965 - DNA, 25 bp, Homo sapien
gttggagctgttccagtacaccgca

SEQ ID NO: 1163966 - DNA, 25 bp, Homo sapien
gggcgcgggagcctgtggctcggtc

SEQ ID NO: 1163967 - DNA, 25 bp, Homo sapien
cgcgggagcctgtggctcggtcggc

SEQ ID NO: 1163968 - DNA, 25 bp, Homo sapien
gggagcctgtggctcggtcggcccc

SEQ ID NO: 1163969 - DNA, 25 bp, Homo sapien
ggcgcgggagcctgtggctcggtcg

SEQ ID NO: 1163970 - DNA, 25 bp, Homo sapien
gggagggtggcagaggccggattca

SEQ ID NO: 1163971 - DNA, 25 bp, Homo sapien
caaggggagggtggcagaggccgga

SEQ ID NO: 1163972 - DNA, 25 bp, Homo sapien
gacaaggggagggtggcagaggccg

SEQ ID NO: 1163973 - DNA, 25 bp, Homo sapien
aggggagggtggcagaggccggatt

SEQ ID NO: 1163974 - DNA, 25 bp, Homo sapien
gggagaatcagcgcgcccgacacct

SEQ ID NO: 1163975 - DNA, 25 bp, Homo sapien
gcccgtcccagtctggacagcccag

SEQ ID NO: 1163976 - DNA, 25 bp, Homo sapien
cggcggcgaaggtttattgatctgc

SEQ ID NO: 1163977 - DNA, 25 bp, Homo sapien
tttattgatctgcagcggcggagag

SEQ ID NO: 1163978 - DNA, 25 bp, Homo sapien
gcaggccccagcgactctcagaccc

SEQ ID NO: 1163979 - DNA, 25 bp, Homo sapien
gctttggttgccacagaaacggcgc

SEQ ID NO: 1163980 - DNA, 25 bp, Homo sapien
ccaggcccggatttcctccgtccat

SEQ ID NO: 1163981 - DNA, 25 bp, Homo sapien
gttgccacagaaacggcgcaggccc

SEQ ID NO: 1163982 - DNA, 25 bp, Homo sapien
agaagaaaccccagagcaaagccgc

SEQ ID NO: 1163983 - DNA, 25 bp, Homo sapien
aaccccagagcaaagccgctttcca

SEQ ID NO: 1163984 - DNA, 25 bp, Homo sapien
aggaagcggctcagagagaagaaac

SEQ ID NO: 1163985 - DNA, 25 bp, Homo sapien
aagaaaccccagagcaaagccgctt

SEQ ID NO: 1163986 - DNA, 25 bp, Homo sapien
cgggcagtaaatatccagatagtcg

SEQ ID NO: 1163987 - DNA, 25 bp, Homo sapien
acgttcacctgcacggtgtagccct

SEQ ID NO: 1163988 - DNA, 25 bp, Homo sapien
tagtcgttcacgttcacctgcacgg

SEQ ID NO: 1163989 - DNA, 25 bp, Homo sapien
ccgagctgttgtagtgcgggcagta

SEQ ID NO: 1163990 - DNA, 25 bp, Homo sapien
cgtggaactcgtagcccagagagaa

SEQ ID NO: 1163991 - DNA, 25 bp, Homo sapien
ccagcgcttgaagccctggctggcg

SEQ ID NO: 1163992 - DNA, 25 bp, Homo sapien
gttgcggctcaccatgtacagcacg

SEQ ID NO: 1163993 - DNA, 25 bp, Homo sapien
tgtagtagtactcgtggccggcgtg

SEQ ID NO: 1163994 - DNA, 25 bp, Homo sapien
agaaacagcgattctccgcagccca

SEQ ID NO: 1163995 - DNA, 25 bp, Homo sapien
gcagacgaacaccttcatcctcaga

SEQ ID NO: 1163996 - DNA, 25 bp, Homo sapien
catcctcagacacttccagtgcagg

SEQ ID NO: 1163997 - DNA, 25 bp, Homo sapien
gaggcgcagcagacgaacaccttca

SEQ ID NO: 1163998 - DNA, 25 bp, Homo sapien
cagtgcaggttgtgagtgggcgtgg

SEQ ID NO: 1163999 - DNA, 25 bp, Homo sapien
ccagcacgttgatcttcacattggg

SEQ ID NO: 1164000 - DNA, 25 bp, Homo sapien
acgttgatcttcacattggggccca

SEQ ID NO: 1164001 - DNA, 25 bp, Homo sapien
cgttgatcttcacattggggcccat

SEQ ID NO: 1164002 - DNA, 25 bp, Homo sapien
tgatcttcacattggggcccatggt

SEQ ID NO: 1164003 - DNA, 25 bp, Homo sapien
tcttctcaagcttgggcacctgagg

SEQ ID NO: 1164004 - DNA, 25 bp, Homo sapien
agcttgggcacctgagggttctctc

SEQ ID NO: 1164005 - DNA, 25 bp, Homo sapien
tcccgctgatgctcttctcaagctt

SEQ ID NO: 1164006 - DNA, 25 bp, Homo sapien
ctgatgctcttctcaagcttgggca

SEQ ID NO: 1164007 - DNA, 25 bp, Homo sapien
ccaagaacgtcatgaggaagaaggc

SEQ ID NO: 1164008 - DNA, 25 bp, Homo sapien
aggaggccaagaacgtcatgaggaa

SEQ ID NO: 1164009 - DNA, 25 bp, Homo sapien
ggccaagaacgtcatgaggaagaag

SEQ ID NO: 1164010 - DNA, 25 bp, Homo sapien
gaggccaagaacgtcatgaggaaga

SEQ ID NO: 1164011 - DNA, 25 bp, Homo sapien
gcaggccccacttctagccatggga

SEQ ID NO: 1164012 - DNA, 25 bp, Homo sapien
cggacacagatgtatggtgcaggcc

SEQ ID NO: 1164013 - DNA, 25 bp, Homo sapien
gccccacttctagccatgggaggag

SEQ ID NO: 1164014 - DNA, 25 bp, Homo sapien
cagatgtatggtgcaggccccactt

SEQ ID NO: 1164015 - DNA, 25 bp, Homo sapien
caagtttggtaccaaacattaccag

SEQ ID NO: 1164016 - DNA, 25 bp, Homo sapien
caggagtcagggaaaggtaccaggg

SEQ ID NO: 1164017 - DNA, 25 bp, Homo sapien
tggctgtccccgtgcttggtccact

SEQ ID NO: 1164018 - DNA, 25 bp, Homo sapien
tccccgtgcttggtccactacagtg

SEQ ID NO: 1164019 - DNA, 25 bp, Homo sapien
ctgccccttgcccatctagtcccct

SEQ ID NO: 1164020 - DNA, 25 bp, Homo sapien
cctccccatgttctgcccctggagg

SEQ ID NO: 1164021 - DNA, 25 bp, Homo sapien
tctctgggggcatatgtctctctgg

SEQ ID NO: 1164022 - DNA, 25 bp, Homo sapien
gggtgcctcccacgcttcgatttgc

SEQ ID NO: 1164023 - DNA, 25 bp, Homo sapien
ccaggggtgtctacttgtaaacttg

SEQ ID NO: 1164024 - DNA, 25 bp, Homo sapien
tcaatccaaaccacaatcctggaag

SEQ ID NO: 1164025 - DNA, 25 bp, Homo sapien
tacttgtaaacttggtttcaatcca

SEQ ID NO: 1164026 - DNA, 25 bp, Homo sapien
atccaaaccacaatcctggaagtgg

SEQ ID NO: 1164027 - DNA, 25 bp, Homo sapien
agagatatagagtctgtacatgcct

SEQ ID NO: 1164028 - DNA, 25 bp, Homo sapien
tagagtctgtacatgcctgcctggc

SEQ ID NO: 1164029 - DNA, 25 bp, Homo sapien
gatatagagtctgtacatgcctgcc

SEQ ID NO: 1164030 - DNA, 25 bp, Homo sapien
gagtctgtacatgcctgcctggcac

SEQ ID NO: 1164031 - DNA, 25 bp, Homo sapien
caaagcacttgaaaaaggcccagga

SEQ ID NO: 1164032 - DNA, 25 bp, Homo sapien
tttttagactaagagcagagtatga

SEQ ID NO: 1164033 - DNA, 25 bp, Homo sapien
ccaggaggataggtgggaccacata

SEQ ID NO: 1164034 - DNA, 25 bp, Homo sapien
tccaaaagtgtctgtgcgttgcata

SEQ ID NO: 1164035 - DNA, 25 bp, Homo sapien
tcccacctggacccctcttgccagt

SEQ ID NO: 1164036 - DNA, 25 bp, Homo sapien
ccacctggacccctcttgccagtcc

SEQ ID NO: 1164037 - DNA, 25 bp, Homo sapien
cacctcccacctggacccctcttgc

SEQ ID NO: 1164038 - DNA, 25 bp, Homo sapien
acctggacccctcttgccagtccat

SEQ ID NO: 1164039 - DNA, 25 bp, Homo sapien
cccatccgcgtcacacttccccaga

SEQ ID NO: 1164040 - DNA, 25 bp, Homo sapien
tctgggctatcccatccgcgtcaca

SEQ ID NO: 1164041 - DNA, 25 bp, Homo sapien
cccagactgtcgtccacaggctgca

SEQ ID NO: 1164042 - DNA, 25 bp, Homo sapien
ccagactgtcgtccacaggctgcag

SEQ ID NO: 1164043 - DNA, 25 bp, Homo sapien
gctttttccactgtcagaccaggtc

SEQ ID NO: 1164044 - DNA, 25 bp, Homo sapien
ttttccactgtcagaccaggtcctg

SEQ ID NO: 1164045 - DNA, 25 bp, Homo sapien
gggggccgtattaggagggcactga

SEQ ID NO: 1164046 - DNA, 25 bp, Homo sapien
gggccgtattaggagggcactgaga

SEQ ID NO: 1164047 - DNA, 25 bp, Homo sapien
ttagcatgatgcctgctgtgtgctt

SEQ ID NO: 1164048 - DNA, 25 bp, Homo sapien
tagcatgatgcctgctgtgtgctta

SEQ ID NO: 1164049 - DNA, 25 bp, Homo sapien
gcatgatgcctgctgtgtgcttagc

SEQ ID NO: 1164050 - DNA, 25 bp, Homo sapien
agcatgatgcctgctgtgtgcttag

SEQ ID NO: 1164051 - DNA, 25 bp, Homo sapien
cagactcggggttgtatacccaggg

SEQ ID NO: 1164052 - DNA, 25 bp, Homo sapien
aactgccaatcatccctcaagcctc

SEQ ID NO: 1164053 - DNA, 25 bp, Homo sapien
actgccaatcatccctcaagcctct

SEQ ID NO: 1164054 - DNA, 25 bp, Homo sapien
ccagccaaatggccgccagactcgg

SEQ ID NO: 1164055 - DNA, 25 bp, Homo sapien
gaaaagagtagagcagggagttcaa

SEQ ID NO: 1164056 - DNA, 25 bp, Homo sapien
ggagaaaagagtagagcagggagtt

SEQ ID NO: 1164057 - DNA, 25 bp, Homo sapien
cagctgtgagaagggagaaaagagt

SEQ ID NO: 1164058 - DNA, 25 bp, Homo sapien
aaagcctagtcaaatgcagctgtga

SEQ ID NO: 1164059 - DNA, 25 bp, Homo sapien
tcacgagtgagcctggagtgggaga

SEQ ID NO: 1164060 - DNA, 25 bp, Homo sapien
ggcaggtgtttgattaggctcacga

SEQ ID NO: 1164061 - DNA, 25 bp, Homo sapien
cctggatctgctgccgtctggagag

SEQ ID NO: 1164062 - DNA, 25 bp, Homo sapien
ttggcgggcgggtgtcagctcctgg

SEQ ID NO: 1164063 - DNA, 25 bp, Homo sapien
tagcgactccgccttttgggccggc

SEQ ID NO: 1164064 - DNA, 25 bp, Homo sapien
agaagggaagaactcgcaagtgcga

SEQ ID NO: 1164065 - DNA, 25 bp, Homo sapien
ggtctcctatgggtctgggttccca

SEQ ID NO: 1164066 - DNA, 25 bp, Homo sapien
gcgaggttgttgacatgccccgcac

SEQ ID NO: 1164067 - DNA, 25 bp, Homo sapien
tgtggcgatcagcagcggccagact

SEQ ID NO: 1164068 - DNA, 25 bp, Homo sapien
aactgttccagaagacggtgtggcg

SEQ ID NO: 1164069 - DNA, 25 bp, Homo sapien
tggcgatcagcagcggccagactgc

SEQ ID NO: 1164070 - DNA, 25 bp, Homo sapien
ccagaagacggtgtggcgatcagca

SEQ ID NO: 1164071 - DNA, 25 bp, Homo sapien
ggcatgggcataaacagggactttg

SEQ ID NO: 1164072 - DNA, 25 bp, Homo sapien
tgggcataaacagggactttgctct

SEQ ID NO: 1164073 - DNA, 25 bp, Homo sapien
ctggcatgggcataaacagggactt

SEQ ID NO: 1164074 - DNA, 25 bp, Homo sapien
catgggcataaacagggactttgct

SEQ ID NO: 1164075 - DNA, 25 bp, Homo sapien
cttgtcaaatgtgcacagcccccag

SEQ ID NO: 1164076 - DNA, 25 bp, Homo sapien
gtcaaatgtgcacagcccccaggac

SEQ ID NO: 1164077 - DNA, 25 bp, Homo sapien
ttgtcaaatgtgcacagcccccagg

SEQ ID NO: 1164078 - DNA, 25 bp, Homo sapien
tgtcaaatgtgcacagcccccagga

SEQ ID NO: 1164079 - DNA, 25 bp, Homo sapien
ctctgaatgtttacatgacctctca

SEQ ID NO: 1164080 - DNA, 25 bp, Homo sapien
gtttacatgacctctcacatttcac

SEQ ID NO: 1164081 - DNA, 25 bp, Homo sapien
gggcctctgaatgtttacatgacct

SEQ ID NO: 1164082 - DNA, 25 bp, Homo sapien
tgaatgtttacatgacctctcacat

SEQ ID NO: 1164083 - DNA, 25 bp, Homo sapien
ttctcagacagcttctccgggccat

SEQ ID NO: 1164084 - DNA, 25 bp, Homo sapien
tatggtgtagtcctcattccggaac

SEQ ID NO: 1164085 - DNA, 25 bp, Homo sapien
ggttgcactgccagcggacttggtc

SEQ ID NO: 1164086 - DNA, 25 bp, Homo sapien
cagagtgatcttcatagtgcggaca

SEQ ID NO: 1164087 - DNA, 25 bp, Homo sapien
taaataagaaacctttgctggaaga

SEQ ID NO: 1164088 - DNA, 25 bp, Homo sapien
aagcagcggtcttcatgctggtgga

SEQ ID NO: 1164089 - DNA, 25 bp, Homo sapien
tcaacctcaagcagcggtcttcatg

SEQ ID NO: 1164090 - DNA, 25 bp, Homo sapien
cactgacagtcaccttcaacctcaa

SEQ ID NO: 1164091 - DNA, 25 bp, Homo sapien
accttcaacctcaagcagcggtctt

SEQ ID NO: 1164092 - DNA, 25 bp, Homo sapien
tataccatcctagatcactagaccg

SEQ ID NO: 1164093 - DNA, 25 bp, Homo sapien
ggctgggctgcaagacttctatacc

SEQ ID NO: 1164094 - DNA, 25 bp, Homo sapien
tgaaagacaagagtggtagtagatc

SEQ ID NO: 1164095 - DNA, 25 bp, Homo sapien
agatcaggtactgtatcaaagaggc

SEQ ID NO: 1164096 - DNA, 25 bp, Homo sapien
ctcctgtggattgtcatgggcctga

SEQ ID NO: 1164097 - DNA, 25 bp, Homo sapien
tcctgtggattgtcatgggcctgag

SEQ ID NO: 1164098 - DNA, 25 bp, Homo sapien
gtggattgtcatgggcctgaggact

SEQ ID NO: 1164099 - DNA, 25 bp, Homo sapien
ctgtggattgtcatgggcctgagga

SEQ ID NO: 1164100 - DNA, 25 bp, Homo sapien
taaaggagccacctcctgtacccaa

SEQ ID NO: 1164101 - DNA, 25 bp, Homo sapien
tatttgtactggctctcagcccaac

SEQ ID NO: 1164102 - DNA, 25 bp, Homo sapien
cctcagcctggtaaaggagccacct

SEQ ID NO: 1164103 - DNA, 25 bp, Homo sapien
aaggccaccagtgtgagtggctcca

SEQ ID NO: 1164104 - DNA, 25 bp, Homo sapien
tggggcagcactgtgaccgatgcta

SEQ ID NO: 1164105 - DNA, 25 bp, Homo sapien
tgctatgtagaacccgcacctctgg

SEQ ID NO: 1164106 - DNA, 25 bp, Homo sapien
gtgaccgatgctatgtagaacccgc

SEQ ID NO: 1164107 - DNA, 25 bp, Homo sapien
tgtagaacccgcacctctgggtcat

SEQ ID NO: 1164108 - DNA, 25 bp, Homo sapien
gcctgtccctctttaaggccaggtg

SEQ ID NO: 1164109 - DNA, 25 bp, Homo sapien
tgtggtgggagtggttcccagggct

SEQ ID NO: 1164110 - DNA, 25 bp, Homo sapien
caggtttggagtgcctgtccctctc

SEQ ID NO: 1164111 - DNA, 25 bp, Homo sapien
gggctctgaaagtggccccaagaca

SEQ ID NO: 1164112 - DNA, 25 bp, Homo sapien
taatactgacccgttttgaggctgc

SEQ ID NO: 1164113 - DNA, 25 bp, Homo sapien
ggatggcactgtcgggctggttggc

SEQ ID NO: 1164114 - DNA, 25 bp, Homo sapien
gaggctgctaggtgatagcttatgc

SEQ ID NO: 1164115 - DNA, 25 bp, Homo sapien
gcactgtcgggctggttggcctcct

SEQ ID NO: 1164116 - DNA, 25 bp, Homo sapien
ctgtgccttaagggaccatgcctgc

SEQ ID NO: 1164117 - DNA, 25 bp, Homo sapien
cccactgtgccttaagggaccatgc

SEQ ID NO: 1164118 - DNA, 25 bp, Homo sapien
actgtgccttaagggaccatgcctg

SEQ ID NO: 1164119 - DNA, 25 bp, Homo sapien
cactgtgccttaagggaccatgcct

SEQ ID NO: 1164120 - DNA, 25 bp, Homo sapien
gcatctttgacaagctttgcccatc

SEQ ID NO: 1164121 - DNA, 25 bp, Homo sapien
catctttgacaagctttgcccatcc

SEQ ID NO: 1164122 - DNA, 25 bp, Homo sapien
atgcagtacctggctacaaacttct

SEQ ID NO: 1164123 - DNA, 25 bp, Homo sapien
aatgcagtacctggctacaaacttc

SEQ ID NO: 1164124 - DNA, 25 bp, Homo sapien
gccctttaggctacactctaggcag

SEQ ID NO: 1164125 - DNA, 25 bp, Homo sapien
gtgggccctgccctttaggctacac

SEQ ID NO: 1164126 - DNA, 25 bp, Homo sapien
tgcccttacagctacactctaagaa

SEQ ID NO: 1164127 - DNA, 25 bp, Homo sapien
attttgagacaaagaacattgtata

SEQ ID NO: 1164128 - DNA, 25 bp, Homo sapien
gtcatatgttttaatatggagtggc

SEQ ID NO: 1164129 - DNA, 25 bp, Homo sapien
catatgttttaatatggagtggcag

SEQ ID NO: 1164130 - DNA, 25 bp, Homo sapien
tggtcatatgttttaatatggagtg

SEQ ID NO: 1164131 - DNA, 25 bp, Homo sapien
tatgttttaatatggagtggcagaa

SEQ ID NO: 1164132 - DNA, 25 bp, Homo sapien
acctgaatggtagtatgccaaagcc

SEQ ID NO: 1164133 - DNA, 25 bp, Homo sapien
cagcgtgagtacctgaatggtagta

SEQ ID NO: 1164134 - DNA, 25 bp, Homo sapien
gagtacctgaatggtagtatgccaa

SEQ ID NO: 1164135 - DNA, 25 bp, Homo sapien
cgaaacagcgtgagtacctgaatgg

SEQ ID NO: 1164136 - DNA, 25 bp, Homo sapien
gtctcaacgctcgtgttcccacagg

SEQ ID NO: 1164137 - DNA, 25 bp, Homo sapien
tagtttaacaagacttcagcacgct

SEQ ID NO: 1164138 - DNA, 25 bp, Homo sapien
ttttctggagtgtgctgccgaagct

SEQ ID NO: 1164139 - DNA, 25 bp, Homo sapien
cctcagttgcccagggtttgggaag

SEQ ID NO: 1164140 - DNA, 25 bp, Homo sapien
ggtgtgtccccgatacctgccgctg

SEQ ID NO: 1164141 - DNA, 25 bp, Homo sapien
ttccatgtcccggtcagtccccttc

SEQ ID NO: 1164142 - DNA, 25 bp, Homo sapien
cccttcctagggctccgcgggtgtg

SEQ ID NO: 1164143 - DNA, 25 bp, Homo sapien
ctgccgctgctcacactctgcctac

SEQ ID NO: 1164144 - DNA, 25 bp, Homo sapien
tacgactagagtcggatcccgcgcc

SEQ ID NO: 1164145 - DNA, 25 bp, Homo sapien
cgccgcgagcctgcggttgccggga

SEQ ID NO: 1164146 - DNA, 25 bp, Homo sapien
tgcggttgccgggacctactgcagc

SEQ ID NO: 1164147 - DNA, 25 bp, Homo sapien
gactagagtcggatcccgcgcccag

SEQ ID NO: 1164148 - DNA, 25 bp, Homo sapien
taaatgagcgagtccagaaagccgc

SEQ ID NO: 1164149 - DNA, 25 bp, Homo sapien
catgctccgtaaatgagcgagtcca

SEQ ID NO: 1164150 - DNA, 25 bp, Homo sapien
agggtgaagaccacgcatgctccgt

SEQ ID NO: 1164151 - DNA, 25 bp, Homo sapien
gaagaccacgcatgctccgtaaatg

SEQ ID NO: 1164152 - DNA, 25 bp, Homo sapien
ttcctgactgcctagtcctccccaa

SEQ ID NO: 1164153 - DNA, 25 bp, Homo sapien
cgacccgatcccactttgatcccgg

SEQ ID NO: 1164154 - DNA, 25 bp, Homo sapien
cccggttccggacgagccaggtgct

SEQ ID NO: 1164155 - DNA, 25 bp, Homo sapien
tctcctttcctgactgcctagtcct

SEQ ID NO: 1164156 - DNA, 25 bp, Homo sapien
aatgcctgtcatcctttccggacca

SEQ ID NO: 1164157 - DNA, 25 bp, Homo sapien
cccaatgcctgtcatcctttccgga

SEQ ID NO: 1164158 - DNA, 25 bp, Homo sapien
gggatgcccaatgcctgtcatcctt

SEQ ID NO: 1164159 - DNA, 25 bp, Homo sapien
gatgcccaatgcctgtcatcctttc

SEQ ID NO: 1164160 - DNA, 25 bp, Homo sapien
cgggtcattcgcatgtgcctgaggt

SEQ ID NO: 1164161 - DNA, 25 bp, Homo sapien
tccacactccgggtcattcgcatgt

SEQ ID NO: 1164162 - DNA, 25 bp, Homo sapien
actccgggtcattcgcatgtgcctg

SEQ ID NO: 1164163 - DNA, 25 bp, Homo sapien
cgttgtccacactccgggtcattcg

SEQ ID NO: 1164164 - DNA, 25 bp, Homo sapien
agtgtgagaggaggacccaaagggt

SEQ ID NO: 1164165 - DNA, 25 bp, Homo sapien
gtgtgagaggaggacccaaagggtc

SEQ ID NO: 1164166 - DNA, 25 bp, Homo sapien
cagtgtgagaggaggacccaaaggg

SEQ ID NO: 1164167 - DNA, 25 bp, Homo sapien
tcagtgtgagaggaggacccaaagg

SEQ ID NO: 1164168 - DNA, 25 bp, Homo sapien
gcacccactgtgttgacgacgatga

SEQ ID NO: 1164169 - DNA, 25 bp, Homo sapien
gatatacagggtctgaagcgcagca

SEQ ID NO: 1164170 - DNA, 25 bp, Homo sapien
gcagtaatgcagatatgccaagata

SEQ ID NO: 1164171 - DNA, 25 bp, Homo sapien
cttcaaagccccataactcagccag

SEQ ID NO: 1164172 - DNA, 25 bp, Homo sapien
tctaggaaatagtgtttgccctgcc

SEQ ID NO: 1164173 - DNA, 25 bp, Homo sapien
ggcagcataggcatctcaggctagg

SEQ ID NO: 1164174 - DNA, 25 bp, Homo sapien
tgtgatttagcagggacgcagagct

SEQ ID NO: 1164175 - DNA, 25 bp, Homo sapien
ccttagcttgttggctgaagcccag

SEQ ID NO: 1164176 - DNA, 25 bp, Homo sapien
gaaggacccctagcagggttgcagt

SEQ ID NO: 1164177 - DNA, 25 bp, Homo sapien
tcagggttgggtaccaggagccaaa

SEQ ID NO: 1164178 - DNA, 25 bp, Homo sapien
agaagaggcccaactgctgaagccg

SEQ ID NO: 1164179 - DNA, 25 bp, Homo sapien
gagccaaaagtagccataacccagg

SEQ ID NO: 1164180 - DNA, 25 bp, Homo sapien
catgatatagggatctctgagtcga

SEQ ID NO: 1164181 - DNA, 25 bp, Homo sapien
cagaggtgagaagggtagcaatggt

SEQ ID NO: 1164182 - DNA, 25 bp, Homo sapien
tctctgagtcgaaacccatagaggc

SEQ ID NO: 1164183 - DNA, 25 bp, Homo sapien
gagacattgggttgatttagtttga

SEQ ID NO: 1164184 - DNA, 25 bp, Homo sapien
ccagaaaagccagaagcggataaag

SEQ ID NO: 1164185 - DNA, 25 bp, Homo sapien
aaagctggtgacgattcctggaaag

SEQ ID NO: 1164186 - DNA, 25 bp, Homo sapien
agcggataaagctggtgacgattcc

SEQ ID NO: 1164187 - DNA, 25 bp, Homo sapien
cagaagcggataaagctggtgacga

SEQ ID NO: 1164188 - DNA, 25 bp, Homo sapien
ccaatcaatcatctaagtaaagctt

SEQ ID NO: 1164189 - DNA, 25 bp, Homo sapien
taaggtgcccagtggtcagatgagc

SEQ ID NO: 1164190 - DNA, 25 bp, Homo sapien
aggtctctttggttcaggttggcac

SEQ ID NO: 1164191 - DNA, 25 bp, Homo sapien
caaagtcatctcttgttcccacaac

SEQ ID NO: 1164192 - DNA, 25 bp, Homo sapien
cgcccggccttttaaggcatattct

SEQ ID NO: 1164193 - DNA, 25 bp, Homo sapien
gcccggccttttaaggcatattcta

SEQ ID NO: 1164194 - DNA, 25 bp, Homo sapien
aggcatattctaaagattgcacccc

SEQ ID NO: 1164195 - DNA, 25 bp, Homo sapien
catatcagcatataaggcatattca

SEQ ID NO: 1164196 - DNA, 25 bp, Homo sapien
ggcatattcatatcagcatataagg

SEQ ID NO: 1164197 - DNA, 25 bp, Homo sapien
ggcatattcatatcacaatggcacg

SEQ ID NO: 1164198 - DNA, 25 bp, Homo sapien
catattcatatcacaatggcacgat

SEQ ID NO: 1164199 - DNA, 25 bp, Homo sapien
acttttcatgactgcgaggacgccg

SEQ ID NO: 1164200 - DNA, 25 bp, Homo sapien
tgcagagccagatacaggaggcccg

SEQ ID NO: 1164201 - DNA, 25 bp, Homo sapien
gggctgcgcttctgacagcctaacc

SEQ ID NO: 1164202 - DNA, 25 bp, Homo sapien
gcctacttgctggtgtccgccggct

SEQ ID NO: 1164203 - DNA, 25 bp, Homo sapien
tcgcggatctcctttgtggttcgtc

SEQ ID NO: 1164204 - DNA, 25 bp, Homo sapien
ttcttctctttgagtaccttctctc

SEQ ID NO: 1164205 - DNA, 25 bp, Homo sapien
cccttcttctctttgagtaccttct

SEQ ID NO: 1164206 - DNA, 25 bp, Homo sapien
caacctcgcggatctcctttgtggt

SEQ ID NO: 1164207 - DNA, 25 bp, Homo sapien
gcacacacttcctctggcatctcca

SEQ ID NO: 1164208 - DNA, 25 bp, Homo sapien
tcaaaaatgcacacacttcctctgg

SEQ ID NO: 1164209 - DNA, 25 bp, Homo sapien
aaaaatgcacacacttcctctggca

SEQ ID NO: 1164210 - DNA, 25 bp, Homo sapien
aaatgcacacacttcctctggcatc

SEQ ID NO: 1164211 - DNA, 25 bp, Homo sapien
ctgtaaatgctatttggttgagttc

SEQ ID NO: 1164212 - DNA, 25 bp, Homo sapien
gttcccaaagccactcccgcacctc

SEQ ID NO: 1164213 - DNA, 25 bp, Homo sapien
tagaggttgctctgtaaatgctatt

SEQ ID NO: 1164214 - DNA, 25 bp, Homo sapien
tgccgagatcgggatcaggttccca

SEQ ID NO: 1164215 - DNA, 25 bp, Homo sapien
ggctcagttccaccccggaggaggc

SEQ ID NO: 1164216 - DNA, 25 bp, Homo sapien
gctcagttccaccccggaggaggcg

SEQ ID NO: 1164217 - DNA, 25 bp, Homo sapien
tgagggtgagaagggcaaaggtgct

SEQ ID NO: 1164218 - DNA, 25 bp, Homo sapien
aagtaagggggcgtgaggactccat

SEQ ID NO: 1164219 - DNA, 25 bp, Homo sapien
accatcattaagtaagggggcgtga

SEQ ID NO: 1164220 - DNA, 25 bp, Homo sapien
tcaccatcattaagtaagggggcgt

SEQ ID NO: 1164221 - DNA, 25 bp, Homo sapien
gtaagggggcgtgaggactccatgg

SEQ ID NO: 1164222 - DNA, 25 bp, Homo sapien
ccagtccaggtgagcacagacacag

SEQ ID NO: 1164223 - DNA, 25 bp, Homo sapien
tcaggtcccagtccaggtgagcaca

SEQ ID NO: 1164224 - DNA, 25 bp, Homo sapien
gtcccagtccaggtgagcacagaca

SEQ ID NO: 1164225 - DNA, 25 bp, Homo sapien
aggtcccagtccaggtgagcacaga

SEQ ID NO: 1164226 - DNA, 25 bp, Homo sapien
ctaacccgtgggagcactgggcaga

SEQ ID NO: 1164227 - DNA, 25 bp, Homo sapien
ccccgggcttaatgcaggagcccag

SEQ ID NO: 1164228 - DNA, 25 bp, Homo sapien
tgggtgcccgatcccggctgcggct

SEQ ID NO: 1164229 - DNA, 25 bp, Homo sapien
gcgaaccccgggcttaatgcaggag

SEQ ID NO: 1164230 - DNA, 25 bp, Homo sapien
tgcggctgcgaaccccgggcttaat

SEQ ID NO: 1164231 - DNA, 25 bp, Homo sapien
catgatggaagtgaaggtctgcata

SEQ ID NO: 1164232 - DNA, 25 bp, Homo sapien
actgatgcggaccagtgcgtccatg

SEQ ID NO: 1164233 - DNA, 25 bp, Homo sapien
ccagtgcgtccatgatggaagtgaa

SEQ ID NO: 1164234 - DNA, 25 bp, Homo sapien
tgaaggtctgcatatcctcaccctc

SEQ ID NO: 1164235 - DNA, 25 bp, Homo sapien
tcttctcataacagggcctttcccc

SEQ ID NO: 1164236 - DNA, 25 bp, Homo sapien
gctgctcctagctcctcctcacgct

SEQ ID NO: 1164237 - DNA, 25 bp, Homo sapien
agccccggtgcactgctggaggcca

SEQ ID NO: 1164238 - DNA, 25 bp, Homo sapien
ccagcccacccgctgcgtctgggct

SEQ ID NO: 1164239 - DNA, 25 bp, Homo sapien
tgacacaaaggagggaggaacaagg

SEQ ID NO: 1164240 - DNA, 25 bp, Homo sapien
cacaaaggagggaggaacaaggagg

SEQ ID NO: 1164241 - DNA, 25 bp, Homo sapien
ctgacacaaaggagggaggaacaag

SEQ ID NO: 1164242 - DNA, 25 bp, Homo sapien
acacaaaggagggaggaacaaggag

SEQ ID NO: 1164243 - DNA, 25 bp, Homo sapien
tcacttccccatcggtcttaccaac

SEQ ID NO: 1164244 - DNA, 25 bp, Homo sapien
aggcgaggttggcactccatcctgc

SEQ ID NO: 1164245 - DNA, 25 bp, Homo sapien
gtgattcctcccgatagccaggcga

SEQ ID NO: 1164246 - DNA, 25 bp, Homo sapien
atcctgctcgctccatacgtcctcc

SEQ ID NO: 1164247 - DNA, 25 bp, Homo sapien
gggctggttcacagaccttcccaga

SEQ ID NO: 1164248 - DNA, 25 bp, Homo sapien
cctgccttgggctggttcacagacc

SEQ ID NO: 1164249 - DNA, 25 bp, Homo sapien
agcttttccagagcacctgccttgg

SEQ ID NO: 1164250 - DNA, 25 bp, Homo sapien
ttgcttctctttccccgctgcagag

SEQ ID NO: 1164251 - DNA, 25 bp, Homo sapien
cacaggcctggcacacgttgtgggt

SEQ ID NO: 1164252 - DNA, 25 bp, Homo sapien
agtggctgcttgtacatctcttgac

SEQ ID NO: 1164253 - DNA, 25 bp, Homo sapien
catgtcctatgtagccctgctggcc

SEQ ID NO: 1164254 - DNA, 25 bp, Homo sapien
tgctggcccaagacctctcgggcac

SEQ ID NO: 1164255 - DNA, 25 bp, Homo sapien
tggcttggggagagttctgcgggag

SEQ ID NO: 1164256 - DNA, 25 bp, Homo sapien
gggagagttctgcgggagaggcggg

SEQ ID NO: 1164257 - DNA, 25 bp, Homo sapien
ttggggagagttctgcgggagaggc

SEQ ID NO: 1164258 - DNA, 25 bp, Homo sapien
ggcttggggagagttctgcgggaga

SEQ ID NO: 1164259 - DNA, 25 bp, Homo sapien
acttgggggtgcaaagcacctcgct

SEQ ID NO: 1164260 - DNA, 25 bp, Homo sapien
acatgatcacttgggggtgcaaagc

SEQ ID NO: 1164261 - DNA, 25 bp, Homo sapien
ggggtgcaaagcacctcgcttcctc

SEQ ID NO: 1164262 - DNA, 25 bp, Homo sapien
ctgggcacgggaacatgatcacttg

SEQ ID NO: 1164263 - DNA, 25 bp, Homo sapien
gcagggtgggctcatgctgggcctt

SEQ ID NO: 1164264 - DNA, 25 bp, Homo sapien
acactcacactctggcggtaccgct

SEQ ID NO: 1164265 - DNA, 25 bp, Homo sapien
gcccttggtggcctctagtggtggg

SEQ ID NO: 1164266 - DNA, 25 bp, Homo sapien
aaggtggcgcggcactctgtgcagc

SEQ ID NO: 1164267 - DNA, 25 bp, Homo sapien
tcacctcttccttgtggtctgggca

SEQ ID NO: 1164268 - DNA, 25 bp, Homo sapien
actggtgtgatcttgtgcccgctgt

SEQ ID NO: 1164269 - DNA, 25 bp, Homo sapien
caggcgttggcatgtcttgcagtag

SEQ ID NO: 1164270 - DNA, 25 bp, Homo sapien
cgccgcacccggcagagttgacata

SEQ ID NO: 1164271 - DNA, 25 bp, Homo sapien
ggtttcccaggatgtatgtcaggct

SEQ ID NO: 1164272 - DNA, 25 bp, Homo sapien
gtctgtaccgtgtcctggtttccca

SEQ ID NO: 1164273 - DNA, 25 bp, Homo sapien
tatgtcaggctctttgtcagcttgt

SEQ ID NO: 1164274 - DNA, 25 bp, Homo sapien
cccaggatgtatgtcaggctctttg

SEQ ID NO: 1164275 - DNA, 25 bp, Homo sapien
aagcaaggctggtctgtttccttaa

SEQ ID NO: 1164276 - DNA, 25 bp, Homo sapien
gcttggcggcttgcacaaagcaagg

SEQ ID NO: 1164277 - DNA, 25 bp, Homo sapien
tgaagcagtgatgcccgcttctcct

SEQ ID NO: 1164278 - DNA, 25 bp, Homo sapien
tggatctgggcgctgagacgggcca

SEQ ID NO: 1164279 - DNA, 25 bp, Homo sapien
gagctggcagctggccggaatgtct

SEQ ID NO: 1164280 - DNA, 25 bp, Homo sapien
agcttcatctcacgtcccacgtcga

SEQ ID NO: 1164281 - DNA, 25 bp, Homo sapien
ccacgtcgagctggcaatggcggaa

SEQ ID NO: 1164282 - DNA, 25 bp, Homo sapien
caggaagttaagctctgtcagcagc

SEQ ID NO: 1164283 - DNA, 25 bp, Homo sapien
gagaagcagcgctgagcgcggtagg

SEQ ID NO: 1164284 - DNA, 25 bp, Homo sapien
cgcggtaggacggtgtggcagggtg

SEQ ID NO: 1164285 - DNA, 25 bp, Homo sapien
ctgagcgcggtaggacggtgtggca

SEQ ID NO: 1164286 - DNA, 25 bp, Homo sapien
gcgctgagcgcggtaggacggtgtg

SEQ ID NO: 1164287 - DNA, 25 bp, Homo sapien
ctggggtgctccggagcagagtccg

SEQ ID NO: 1164288 - DNA, 25 bp, Homo sapien
ggggtgctccggagcagagtccgcg

SEQ ID NO: 1164289 - DNA, 25 bp, Homo sapien
tggggtgctccggagcagagtccgc

SEQ ID NO: 1164290 - DNA, 25 bp, Homo sapien
caaaggtgcgctgggtgtcaatgac

SEQ ID NO: 1164291 - DNA, 25 bp, Homo sapien
gcaggcacatccgtgcgccggaact

SEQ ID NO: 1164292 - DNA, 25 bp, Homo sapien
aactcaacggtatagtgccaggcag

SEQ ID NO: 1164293 - DNA, 25 bp, Homo sapien
tcataggcaaaggtgcgctgggtgt

SEQ ID NO: 1164294 - DNA, 25 bp, Homo sapien
gtgcacatcttcactgtattcgccg

SEQ ID NO: 1164295 - DNA, 25 bp, Homo sapien
tgtattcgccgtagccggccttgtt

SEQ ID NO: 1164296 - DNA, 25 bp, Homo sapien
ggccttgttgcagccgcggacacgc

SEQ ID NO: 1164297 - DNA, 25 bp, Homo sapien
tgtcggggttctcaagcagggcact

SEQ ID NO: 1164298 - DNA, 25 bp, Homo sapien
gctggaattgtaggcacgcaccacc

SEQ ID NO: 1164299 - DNA, 25 bp, Homo sapien
ccacgcctggctaagttttgtattc

SEQ ID NO: 1164300 - DNA, 25 bp, Homo sapien
ccgagtagctggaattgtaggcacg

SEQ ID NO: 1164301 - DNA, 25 bp, Homo sapien
accaccacgcctggctaagttttgt

SEQ ID NO: 1164302 - DNA, 25 bp, Homo sapien
ctgttgtccaggctggagtccagtg

SEQ ID NO: 1164303 - DNA, 25 bp, Homo sapien
caccttgcctggcctttatttattt

SEQ ID NO: 1164304 - DNA, 25 bp, Homo sapien
tttccgagacgtcggagtcttgctc

SEQ ID NO: 1164305 - DNA, 25 bp, Homo sapien
atttttccgagacgtcggagtcttg

SEQ ID NO: 1164306 - DNA, 25 bp, Homo sapien
ccccagcggctatcgaggaagaagt

SEQ ID NO: 1164307 - DNA, 25 bp, Homo sapien
tactgctcgctggtccttgctgata

SEQ ID NO: 1164308 - DNA, 25 bp, Homo sapien
caccttgaccaagtaggaggctggg

SEQ ID NO: 1164309 - DNA, 25 bp, Homo sapien
ttgctgatagccagccgctctcggc

SEQ ID NO: 1164310 - DNA, 25 bp, Homo sapien
tgaagaaataaggtgttgggggata

SEQ ID NO: 1164311 - DNA, 25 bp, Homo sapien
aggtatgcggggttggggacaatgg

SEQ ID NO: 1164312 - DNA, 25 bp, Homo sapien
tttgtgttggggagaaagcattttg

SEQ ID NO: 1164313 - DNA, 25 bp, Homo sapien
ggtggattggtgtcacaaatgaagg

SEQ ID NO: 1164314 - DNA, 25 bp, Homo sapien
cagaagcgggtgttggggacgagat

SEQ ID NO: 1164315 - DNA, 25 bp, Homo sapien
ggacgagattgttgagggatggagt

SEQ ID NO: 1164316 - DNA, 25 bp, Homo sapien
gatggagtgacggatgaggtaccag

SEQ ID NO: 1164317 - DNA, 25 bp, Homo sapien
gacggatgaggtaccagagggagac

SEQ ID NO: 1164318 - DNA, 25 bp, Homo sapien
aaagcgaagggtggcgacgcctcca

SEQ ID NO: 1164319 - DNA, 25 bp, Homo sapien
tgtcgtgcccgctgtccgggtcgta

SEQ ID NO: 1164320 - DNA, 25 bp, Homo sapien
catgccaatggttaggaaagcgaag

SEQ ID NO: 1164321 - DNA, 25 bp, Homo sapien
ctccaagagcccacggaaggaaaca

SEQ ID NO: 1164322 - DNA, 25 bp, Homo sapien
gatcatgcccagtgttccaggtgcc

SEQ ID NO: 1164323 - DNA, 25 bp, Homo sapien
aaggcaggtcatagggcagactcag

SEQ ID NO: 1164324 - DNA, 25 bp, Homo sapien
tagttcagcatcaacagggcaggga

SEQ ID NO: 1164325 - DNA, 25 bp, Homo sapien
gagcccctgggtcaagagaaaactg

SEQ ID NO: 1164326 - DNA, 25 bp, Homo sapien
gacaccaggccggccccgggctcca

SEQ ID NO: 1164327 - DNA, 25 bp, Homo sapien
cacggtgtcacctcggccccggaca

SEQ ID NO: 1164328 - DNA, 25 bp, Homo sapien
agcccacggtgtcacctcggccccg

SEQ ID NO: 1164329 - DNA, 25 bp, Homo sapien
tctttagctgggattcaccagtgac

SEQ ID NO: 1164330 - DNA, 25 bp, Homo sapien
tttagctgggattcaccagtgacct

SEQ ID NO: 1164331 - DNA, 25 bp, Homo sapien
cttctcaccacggacacaagcacct

SEQ ID NO: 1164332 - DNA, 25 bp, Homo sapien
cacggacacaagcacctatgagtga

SEQ ID NO: 1164333 - DNA, 25 bp, Homo sapien
agatggtattgttgcctaatggcag

SEQ ID NO: 1164334 - DNA, 25 bp, Homo sapien
tgcggacccagagcacgttagactg

SEQ ID NO: 1164335 - DNA, 25 bp, Homo sapien
gtcaggaatgcaggcccaacagatg

SEQ ID NO: 1164336 - DNA, 25 bp, Homo sapien
gagcacgttagactggtgttgcctt

SEQ ID NO: 1164337 - DNA, 25 bp, Homo sapien
ggcatcaggacaccaaggacaactg

SEQ ID NO: 1164338 - DNA, 25 bp, Homo sapien
tggtcccgataactgccgcctggta

SEQ ID NO: 1164339 - DNA, 25 bp, Homo sapien
gcctggtacccaatcccaatcagaa

SEQ ID NO: 1164340 - DNA, 25 bp, Homo sapien
gactctgataacgatggacttggag

SEQ ID NO: 1164341 - DNA, 25 bp, Homo sapien
gacctccacctccagggttcaagcg

SEQ ID NO: 1164342 - DNA, 25 bp, Homo sapien
cagtgatatcggctcactgcgacct

SEQ ID NO: 1164343 - DNA, 25 bp, Homo sapien
ccacctccagggttcaagcgatttt

SEQ ID NO: 1164344 - DNA, 25 bp, Homo sapien
tccacctccagggttcaagcgattt

SEQ ID NO: 1164345 - DNA, 25 bp, Homo sapien
gaatgtgaggtagggcgtagtgtta

SEQ ID NO: 1164346 - DNA, 25 bp, Homo sapien
gatgtcaataggaatgtgaggtagg

SEQ ID NO: 1164347 - DNA, 25 bp, Homo sapien
gtgtggactagagggtgagacaaga

SEQ ID NO: 1164348 - DNA, 25 bp, Homo sapien
cgtagtgttaggcagagtgtggact

SEQ ID NO: 1164349 - DNA, 25 bp, Homo sapien
attgccccaacgttcccaacaatga

SEQ ID NO: 1164350 - DNA, 25 bp, Homo sapien
cttgtggacgttggcctgggtgagg

SEQ ID NO: 1164351 - DNA, 25 bp, Homo sapien
aggagatgcctgtgacaacgacgtg

SEQ ID NO: 1164352 - DNA, 25 bp, Homo sapien
gtgatgcctgtgacaattgccccaa

SEQ ID NO: 1164353 - DNA, 25 bp, Homo sapien
ctgagcagtttgtccatcacaaggg

SEQ ID NO: 1164354 - DNA, 25 bp, Homo sapien
aaacctcgtgcccaggacaaggagg

SEQ ID NO: 1164355 - DNA, 25 bp, Homo sapien
ggaggcaaaaacctcgtgcccagga

SEQ ID NO: 1164356 - DNA, 25 bp, Homo sapien
aagggccaaatactccaaatcaggg

SEQ ID NO: 1164357 - DNA, 25 bp, Homo sapien
ctccccagggcactacacagattag

SEQ ID NO: 1164358 - DNA, 25 bp, Homo sapien
ggtttgcctcttgctagctctttag

SEQ ID NO: 1164359 - DNA, 25 bp, Homo sapien
cacagattaggtgttcacatggact

SEQ ID NO: 1164360 - DNA, 25 bp, Homo sapien
cttggtttggaatactggtttgcct

SEQ ID NO: 1164361 - DNA, 25 bp, Homo sapien
gctgtatctgaggagacccaccata

SEQ ID NO: 1164362 - DNA, 25 bp, Homo sapien
tatctgaggagacccaccataggtc

SEQ ID NO: 1164363 - DNA, 25 bp, Homo sapien
ggtctggttccacccaaagtctgcc

SEQ ID NO: 1164364 - DNA, 25 bp, Homo sapien
gagacccaccataggtctggttcca

SEQ ID NO: 1164365 - DNA, 25 bp, Homo sapien
tctggtccccagtgtgctcacgctg

SEQ ID NO: 1164366 - DNA, 25 bp, Homo sapien
ttctcatctggtccccagtgtgctc

SEQ ID NO: 1164367 - DNA, 25 bp, Homo sapien
tggtccccagtgtgctcacgctgac

SEQ ID NO: 1164368 - DNA, 25 bp, Homo sapien
tcatctggtccccagtgtgctcacg

SEQ ID NO: 1164369 - DNA, 25 bp, Homo sapien
gagctgcgggatgatatacgagacc

SEQ ID NO: 1164370 - DNA, 25 bp, Homo sapien
tcttcaaccagatcctggtggagct

SEQ ID NO: 1164371 - DNA, 25 bp, Homo sapien
tgtcaagtgctgactcctccccatc

SEQ ID NO: 1164372 - DNA, 25 bp, Homo sapien
tttgggtgggctggcgaagggtggc

SEQ ID NO: 1164373 - DNA, 25 bp, Homo sapien
ggaaatagagtttgcaccagctggg

SEQ ID NO: 1164374 - DNA, 25 bp, Homo sapien
cagtgcaggtaacacagagacttgt

SEQ ID NO: 1164375 - DNA, 25 bp, Homo sapien
tccatggcccgggtaggagccctga

SEQ ID NO: 1164376 - DNA, 25 bp, Homo sapien
tgtttgctgacattggaccacggat

SEQ ID NO: 1164377 - DNA, 25 bp, Homo sapien
taccagcgggaggatggcaaagtcc

SEQ ID NO: 1164378 - DNA, 25 bp, Homo sapien
gcagagttgatccaaggctcagctg

SEQ ID NO: 1164379 - DNA, 25 bp, Homo sapien
tacgtggactgcaaactgggtgacc

SEQ ID NO: 1164380 - DNA, 25 bp, Homo sapien
gacagaaggcgtatttgaggatgca

SEQ ID NO: 1164381 - DNA, 25 bp, Homo sapien
ccctaggagaggatacagtcatctg

SEQ ID NO: 1164382 - DNA, 25 bp, Homo sapien
gatccctggaacaggtcagtggcca

SEQ ID NO: 1164383 - DNA, 25 bp, Homo sapien
gaacaggtcagtggccacaaaacca

SEQ ID NO: 1164384 - DNA, 25 bp, Homo sapien
gcctcagcggtgatacagaaaggtc

SEQ ID NO: 1164385 - DNA, 25 bp, Homo sapien
tttccacagcgcgttatgtttggag

SEQ ID NO: 1164386 - DNA, 25 bp, Homo sapien
ccacagcgcgttatgtttggagcgg

SEQ ID NO: 1164387 - DNA, 25 bp, Homo sapien
gttttccacagcgcgttatgtttgg

SEQ ID NO: 1164388 - DNA, 25 bp, Homo sapien
cgttatgtttggagcgggccctgcg

SEQ ID NO: 1164389 - DNA, 25 bp, Homo sapien
tggcccgactggcagctgaactgcg

SEQ ID NO: 1164390 - DNA, 25 bp, Homo sapien
gtgtcacggcgcctcgtccaagtgg

SEQ ID NO: 1164391 - DNA, 25 bp, Homo sapien
caaactgcacgtggcctgtactgct

SEQ ID NO: 1164392 - DNA, 25 bp, Homo sapien
gaggcgaggcttcttctggcccgac

SEQ ID NO: 1164393 - DNA, 25 bp, Homo sapien
cccctgaccagcagaacagctccat

SEQ ID NO: 1164394 - DNA, 25 bp, Homo sapien
gtccaggtccactgacggcagcccc

SEQ ID NO: 1164395 - DNA, 25 bp, Homo sapien
tgtccaggtccactgacggcagccc

SEQ ID NO: 1164396 - DNA, 25 bp, Homo sapien
gggttgctgatcttgtgtaccttca

SEQ ID NO: 1164397 - DNA, 25 bp, Homo sapien
gtggagcaccagtaaatctggcata

SEQ ID NO: 1164398 - DNA, 25 bp, Homo sapien
gagcaccagtaaatctggcataggt

SEQ ID NO: 1164399 - DNA, 25 bp, Homo sapien
ccaggggttgctgatcttgtgtacc

SEQ ID NO: 1164400 - DNA, 25 bp, Homo sapien
ggtgatgatcttgtgtggaactgag

SEQ ID NO: 1164401 - DNA, 25 bp, Homo sapien
acctctccatgactggtccgaaggg

SEQ ID NO: 1164402 - DNA, 25 bp, Homo sapien
ctccatgactggtccgaagggcagg

SEQ ID NO: 1164403 - DNA, 25 bp, Homo sapien
gatgacctctccatgactggtccga

SEQ ID NO: 1164404 - DNA, 25 bp, Homo sapien
tcagatgcaggctaggactcggtcc

SEQ ID NO: 1164405 - DNA, 25 bp, Homo sapien
ggcctgcccgagatcacatagtcaa

SEQ ID NO: 1164406 - DNA, 25 bp, Homo sapien
tccatggcgtggacactagggagct

SEQ ID NO: 1164407 - DNA, 25 bp, Homo sapien
tgaccgtcaatgctagaagaaccct

SEQ ID NO: 1164408 - DNA, 25 bp, Homo sapien
gggtgtctgccccttgccgagctga

SEQ ID NO: 1164409 - DNA, 25 bp, Homo sapien
gcagctgtagccgttccatgtactg

SEQ ID NO: 1164410 - DNA, 25 bp, Homo sapien
tgtactgccgctgcatgcggccagg

SEQ ID NO: 1164411 - DNA, 25 bp, Homo sapien
ggggaaagggcatagcctctgcata

SEQ ID NO: 1164412 - DNA, 25 bp, Homo sapien
cttggtgtctatccaaaaagtatgt

SEQ ID NO: 1164413 - DNA, 25 bp, Homo sapien
gaacttttgagagcccaggcgctga

SEQ ID NO: 1164414 - DNA, 25 bp, Homo sapien
agaacttttgagagcccaggcgctg

SEQ ID NO: 1164415 - DNA, 25 bp, Homo sapien
gggtcagacactcccgagcctctcg

SEQ ID NO: 1164416 - DNA, 25 bp, Homo sapien
agggtcagacactcccgagcctctc

SEQ ID NO: 1164417 - DNA, 25 bp, Homo sapien
cactggggtagaaggggtaaagatg

SEQ ID NO: 1164418 - DNA, 25 bp, Homo sapien
ggtagaaggggtaaagatggagctg

SEQ ID NO: 1164419 - DNA, 25 bp, Homo sapien
gagactgagaatgtgggtacaatag

SEQ ID NO: 1164420 - DNA, 25 bp, Homo sapien
agctgaagacgaaggcgtccaagga

SEQ ID NO: 1164421 - DNA, 25 bp, Homo sapien
ggtacaataggcacagaggttgtgc

SEQ ID NO: 1164422 - DNA, 25 bp, Homo sapien
agcagggccaagtagctgaagacga

SEQ ID NO: 1164423 - DNA, 25 bp, Homo sapien
tgtctggcgttgcggtggtacctca

SEQ ID NO: 1164424 - DNA, 25 bp, Homo sapien
ataggatctggttccggcgccggta

SEQ ID NO: 1164425 - DNA, 25 bp, Homo sapien
gcgttgcccgctggatggagacaat

SEQ ID NO: 1164426 - DNA, 25 bp, Homo sapien
gagacaatgccgctgagcaaggcgt

SEQ ID NO: 1164427 - DNA, 25 bp, Homo sapien
gaaaaaccagtcttgggagcgtgag

SEQ ID NO: 1164428 - DNA, 25 bp, Homo sapien
ctggaatgcatgagagtagaaaaac

SEQ ID NO: 1164429 - DNA, 25 bp, Homo sapien
ggctgtaccaacaacgaggaggcac

SEQ ID NO: 1164430 - DNA, 25 bp, Homo sapien
ctgtaccaacaacgaggaggcacgg

SEQ ID NO: 1164431 - DNA, 25 bp, Homo sapien
ggctttattctgggtggcagcaccc

SEQ ID NO: 1164432 - DNA, 25 bp, Homo sapien
tttattctgggtggcagcaccccgt

SEQ ID NO: 1164433 - DNA, 25 bp, Homo sapien
gctttattctgggtggcagcacccc

SEQ ID NO: 1164434 - DNA, 25 bp, Homo sapien
attctgggtggcagcaccccgtgtc

SEQ ID NO: 1164435 - DNA, 25 bp, Homo sapien
cttaaagcagcagcgggtgtgccca

SEQ ID NO: 1164436 - DNA, 25 bp, Homo sapien
gatgattcctatggcaccagccagg

SEQ ID NO: 1164437 - DNA, 25 bp, Homo sapien
cctatggcaccagccaggaaaaatg

SEQ ID NO: 1164438 - DNA, 25 bp, Homo sapien
agcatcagggcggaagccttaaagc

SEQ ID NO: 1164439 - DNA, 25 bp, Homo sapien
catcggatggcttacatcactctac

SEQ ID NO: 1164440 - DNA, 25 bp, Homo sapien
gcctatcatctcctacatcggatgg

SEQ ID NO: 1164441 - DNA, 25 bp, Homo sapien
ataccaggcctatcatctcctacat

SEQ ID NO: 1164442 - DNA, 25 bp, Homo sapien
ctctacaccacgagggagcaggaag

SEQ ID NO: 1164443 - DNA, 25 bp, Homo sapien
tctcagcttcggtgggctggactca

SEQ ID NO: 1164444 - DNA, 25 bp, Homo sapien
gaggaaggttaggaatcctctcagc

SEQ ID NO: 1164445 - DNA, 25 bp, Homo sapien
gttaggaatcctctcagcttcggtg

SEQ ID NO: 1164446 - DNA, 25 bp, Homo sapien
ctcagcttcggtgggctggactcac

SEQ ID NO: 1164447 - DNA, 25 bp, Homo sapien
tcccacaatgttggatttacaggcg

SEQ ID NO: 1164448 - DNA, 25 bp, Homo sapien
actgcaaacttccatctcctgcgtt

SEQ ID NO: 1164449 - DNA, 25 bp, Homo sapien
gtgtctgccatcacgcctgactaag

SEQ ID NO: 1164450 - DNA, 25 bp, Homo sapien
gcaaacttccatctcctgcgttcaa

SEQ ID NO: 1164451 - DNA, 25 bp, Homo sapien
ggtgatgatcttgtgtggtactgag

SEQ ID NO: 1164452 - DNA, 25 bp, Homo sapien
tgggtgatgatcttgtgtggtactg

SEQ ID NO: 1164453 - DNA, 25 bp, Homo sapien
gtgggtgatgatcttgtgtggtact

SEQ ID NO: 1164454 - DNA, 25 bp, Homo sapien
gggtgatgatcttgtgtggtactga

SEQ ID NO: 1164455 - DNA, 25 bp, Homo sapien
aggcagaaggtaccgtgcctctgga

SEQ ID NO: 1164456 - DNA, 25 bp, Homo sapien
tctggatatccccacagtgccctga

SEQ ID NO: 1164457 - DNA, 25 bp, Homo sapien
agaaggtaccgtgcctctggatatc

SEQ ID NO: 1164458 - DNA, 25 bp, Homo sapien
gcagaaggtaccgtgcctctggata

SEQ ID NO: 1164459 - DNA, 25 bp, Homo sapien
ttcccaggctccagtccctgttcct

SEQ ID NO: 1164460 - DNA, 25 bp, Homo sapien
cttcccaggctccagtccctgttcc

SEQ ID NO: 1164461 - DNA, 25 bp, Homo sapien
ccaggctccagtccctgttcctcag

SEQ ID NO: 1164462 - DNA, 25 bp, Homo sapien
ggctccagtccctgttcctcagcat

SEQ ID NO: 1164463 - DNA, 25 bp, Homo sapien
tgagtgcagtggaggtacagcaagg

SEQ ID NO: 1164464 - DNA, 25 bp, Homo sapien
ctgagtgcagtggaggtacagcaag

SEQ ID NO: 1164465 - DNA, 25 bp, Homo sapien
gagtgcagtggaggtacagcaagga

SEQ ID NO: 1164466 - DNA, 25 bp, Homo sapien
agtgcagtggaggtacagcaaggaa

SEQ ID NO: 1164467 - DNA, 25 bp, Homo sapien
ctgtggaggaaatatccatggcgtg

SEQ ID NO: 1164468 - DNA, 25 bp, Homo sapien
aggaaatatccatggcgtggacgct

SEQ ID NO: 1164469 - DNA, 25 bp, Homo sapien
tggaggaaatatccatggcgtggac

SEQ ID NO: 1164470 - DNA, 25 bp, Homo sapien
gaggaaatatccatggcgtggacgc

SEQ ID NO: 1164471 - DNA, 25 bp, Homo sapien
ctccaggagagacatgaaggccagg

SEQ ID NO: 1164472 - DNA, 25 bp, Homo sapien
ttgctgagctgacagatcataatca

SEQ ID NO: 1164473 - DNA, 25 bp, Homo sapien
gccccttgctgagctgacagatcat

SEQ ID NO: 1164474 - DNA, 25 bp, Homo sapien
ccgggatcaacttctcctccaggag

SEQ ID NO: 1164475 - DNA, 25 bp, Homo sapien
cacttccgggtcacttctacgtagt

SEQ ID NO: 1164476 - DNA, 25 bp, Homo sapien
ccacttccgggtcacttctacgtag

SEQ ID NO: 1164477 - DNA, 25 bp, Homo sapien
gaacttttgagagcccaggcgctga

SEQ ID NO: 1164478 - DNA, 25 bp, Homo sapien
agaacttttgagagcccaggcgctg

SEQ ID NO: 1164479 - DNA, 25 bp, Homo sapien
agggtcagacactcccgagcctctc

SEQ ID NO: 1164480 - DNA, 25 bp, Homo sapien
gggtcagacactcccgagcctctcg

SEQ ID NO: 1164481 - DNA, 25 bp, Homo sapien
cactggggtagaaggggtaaagatg

SEQ ID NO: 1164482 - DNA, 25 bp, Homo sapien
ggtagaaggggtaaagatggagctg

SEQ ID NO: 1164483 - DNA, 25 bp, Homo sapien
gagactgagaatgtgggtacaatag

SEQ ID NO: 1164484 - DNA, 25 bp, Homo sapien
agctgaagacgaaggcgtccaagga

SEQ ID NO: 1164485 - DNA, 25 bp, Homo sapien
agcagggccaagtagctgaagacga

SEQ ID NO: 1164486 - DNA, 25 bp, Homo sapien
ggtacaataggcacagaggttgtgc

SEQ ID NO: 1164487 - DNA, 25 bp, Homo sapien
gcgttgcccgctggatggagacaat

SEQ ID NO: 1164488 - DNA, 25 bp, Homo sapien
ataggatctggttccggcgccggta

SEQ ID NO: 1164489 - DNA, 25 bp, Homo sapien
tgtctggcgttgcggtggtacctca

SEQ ID NO: 1164490 - DNA, 25 bp, Homo sapien
gagacaatgccgctgagcaaggcgt

SEQ ID NO: 1164491 - DNA, 25 bp, Homo sapien
gaaaaaccagtcttgggagcgtgag

SEQ ID NO: 1164492 - DNA, 25 bp, Homo sapien
ctggaatgcatgagagtagaaaaac

SEQ ID NO: 1164493 - DNA, 25 bp, Homo sapien
ggctgtaccaacaacgaggaggcac

SEQ ID NO: 1164494 - DNA, 25 bp, Homo sapien
ctgtaccaacaacgaggaggcacgg

SEQ ID NO: 1164495 - DNA, 25 bp, Homo sapien
ggctttattctgggtggcagcaccc

SEQ ID NO: 1164496 - DNA, 25 bp, Homo sapien
attctgggtggcagcaccccgtgtc

SEQ ID NO: 1164497 - DNA, 25 bp, Homo sapien
tttattctgggtggcagcaccccgt

SEQ ID NO: 1164498 - DNA, 25 bp, Homo sapien
gctttattctgggtggcagcacccc

SEQ ID NO: 1164499 - DNA, 25 bp, Homo sapien
gccagtgtgagcttacagcgacgta

SEQ ID NO: 1164500 - DNA, 25 bp, Homo sapien
cagatactcaaggaggcactgggct

SEQ ID NO: 1164501 - DNA, 25 bp, Homo sapien
tacaaacacaagatcagggctgagg

SEQ ID NO: 1164502 - DNA, 25 bp, Homo sapien
tgctgcttgctttggaaactgggcc

SEQ ID NO: 1164503 - DNA, 25 bp, Homo sapien
ataccaggcctatcatctcctacat

SEQ ID NO: 1164504 - DNA, 25 bp, Homo sapien
ctctacaccacgagggagcaggaag

SEQ ID NO: 1164505 - DNA, 25 bp, Homo sapien
gcctatcatctcctacatcggatgg

SEQ ID NO: 1164506 - DNA, 25 bp, Homo sapien
catcggatggcttacatcactctac

SEQ ID NO: 1164507 - DNA, 25 bp, Homo sapien
tgccacggctgttgcttcggttatt

SEQ ID NO: 1164508 - DNA, 25 bp, Homo sapien
tccctctgctgtgccacggctgttg

SEQ ID NO: 1164509 - DNA, 25 bp, Homo sapien
tcctatggccatgactgctgaacct

SEQ ID NO: 1164510 - DNA, 25 bp, Homo sapien
gggagttcactgtgacctagtcccc

SEQ ID NO: 1164511 - DNA, 25 bp, Homo sapien
ttttatacaagagaacgagccagag

SEQ ID NO: 1164512 - DNA, 25 bp, Homo sapien
tttatacaagagaacgagccagagt

SEQ ID NO: 1164513 - DNA, 25 bp, Homo sapien
ggcattccatttagacgtagagcag

SEQ ID NO: 1164514 - DNA, 25 bp, Homo sapien
aaggtaagatggatagggtctgccc

SEQ ID NO: 1164515 - DNA, 25 bp, Homo sapien
gagcttcttagaccaggcattccat

SEQ ID NO: 1164516 - DNA, 25 bp, Homo sapien
gattctggacctgtctcctcactgg

SEQ ID NO: 1164517 - DNA, 25 bp, Homo sapien
ccaagagtgtagaggacgacgctga

SEQ ID NO: 1164518 - DNA, 25 bp, Homo sapien
cctcatctaccacgtcggggactgg

SEQ ID NO: 1164519 - DNA, 25 bp, Homo sapien
ccggagagccaagagtgtagaggac

SEQ ID NO: 1164520 - DNA, 25 bp, Homo sapien
aggacgacgctgagggccacctcat

SEQ ID NO: 1164521 - DNA, 25 bp, Homo sapien
gggaccttgcttgtgaactgccttt

SEQ ID NO: 1164522 - DNA, 25 bp, Homo sapien
gaagctctccgactcttgaagggcc

SEQ ID NO: 1164523 - DNA, 25 bp, Homo sapien
gatgggcacggagcatttgtgaccc

SEQ ID NO: 1164524 - DNA, 25 bp, Homo sapien
ctgaggtgggcactgagtttgccta

SEQ ID NO: 1164525 - DNA, 25 bp, Homo sapien
ctctgtggccatcaggtacccgcaa

SEQ ID NO: 1164526 - DNA, 25 bp, Homo sapien
tccagagcaggagtcggcgcagccc

SEQ ID NO: 1164527 - DNA, 25 bp, Homo sapien
cgcttacacgctcggcctcctagag

SEQ ID NO: 1164528 - DNA, 25 bp, Homo sapien
agccccgcgggctctagcggaggcg

SEQ ID NO: 1164529 - DNA, 25 bp, Homo sapien
cctgctcgatttccactgctttgtg

SEQ ID NO: 1164530 - DNA, 25 bp, Homo sapien
aacttgttgaccgtaggctggagca

SEQ ID NO: 1164531 - DNA, 25 bp, Homo sapien
tttgtggctgccgaacacccgaagg

SEQ ID NO: 1164532 - DNA, 25 bp, Homo sapien
gctggagcagcgtcccaaggtgcct

SEQ ID NO: 1164533 - DNA, 25 bp, Homo sapien
tgccctccccgccaagcccccaata

SEQ ID NO: 1164534 - DNA, 25 bp, Homo sapien
ctgccctccccgccaagcccccaat

SEQ ID NO: 1164535 - DNA, 25 bp, Homo sapien
gcttgccccttctggtgcccccagc

SEQ ID NO: 1164536 - DNA, 25 bp, Homo sapien
ccaggtctctggagatcccctgatg

SEQ ID NO: 1164537 - DNA, 25 bp, Homo sapien
aggtctctggagatcccctgatgtc

SEQ ID NO: 1164538 - DNA, 25 bp, Homo sapien
gtctctggagatcccctgatgtctg

SEQ ID NO: 1164539 - DNA, 25 bp, Homo sapien
tgcccacaggcaggacgatgaggtt

SEQ ID NO: 1164540 - DNA, 25 bp, Homo sapien
gcccacaggcaggacgatgaggttc

SEQ ID NO: 1164541 - DNA, 25 bp, Homo sapien
tacgttgaagacgatccaaggcggg

SEQ ID NO: 1164542 - DNA, 25 bp, Homo sapien
tccaccactaggaagatgtaatcca

SEQ ID NO: 1164543 - DNA, 25 bp, Homo sapien
ccagatccagtaggaagaaagtatc

SEQ ID NO: 1164544 - DNA, 25 bp, Homo sapien
cccgttcggaagttgagcaccagat

SEQ ID NO: 1164545 - DNA, 25 bp, Homo sapien
ggtgaagcgaacgatgcgtagggcc

SEQ ID NO: 1164546 - DNA, 25 bp, Homo sapien
ctggtgtatgtagcggatgaggcgg

SEQ ID NO: 1164547 - DNA, 25 bp, Homo sapien
tatgtagcggatgaggcgggagagg

SEQ ID NO: 1164548 - DNA, 25 bp, Homo sapien
tgcgtagggcccgtgccgttttgta

SEQ ID NO: 1164549 - DNA, 25 bp, Homo sapien
gccaggtcataggtcatgtgaaaga

SEQ ID NO: 1164550 - DNA, 25 bp, Homo sapien
ccaggtcataggtcatgtgaaagat

SEQ ID NO: 1164551 - DNA, 25 bp, Homo sapien
ctggccaggtcataggtcatgtgaa

SEQ ID NO: 1164552 - DNA, 25 bp, Homo sapien
tggccaggtcataggtcatgtgaaa

SEQ ID NO: 1164553 - DNA, 25 bp, Homo sapien
tgaggttgaagatgcgaaccacagc

SEQ ID NO: 1164554 - DNA, 25 bp, Homo sapien
tgatggagacccagcagtcgggagg

SEQ ID NO: 1164555 - DNA, 25 bp, Homo sapien
gcagtcgggagggaagtcctgcagc

SEQ ID NO: 1164556 - DNA, 25 bp, Homo sapien
agacagccatcccagtgacatagca

SEQ ID NO: 1164557 - DNA, 25 bp, Homo sapien
cacgagcacttcttctgggtctcct

SEQ ID NO: 1164558 - DNA, 25 bp, Homo sapien
tattttctgttgtgatcatctccca

SEQ ID NO: 1164559 - DNA, 25 bp, Homo sapien
ggccctgaggcaaaagggtcctcta

SEQ ID NO: 1164560 - DNA, 25 bp, Homo sapien
cctggcaggcacttaagtttggttc

SEQ ID NO: 1164561 - DNA, 25 bp, Homo sapien
cagacgtcgggcatgcctacaggtg

SEQ ID NO: 1164562 - DNA, 25 bp, Homo sapien
tcgggcatgcctacaggtgcctgct

SEQ ID NO: 1164563 - DNA, 25 bp, Homo sapien
ggcatgggaatactggcggccccac

SEQ ID NO: 1164564 - DNA, 25 bp, Homo sapien
catggccttgaacagggcatgggaa

SEQ ID NO: 1164565 - DNA, 25 bp, Homo sapien
gatgagtgccgtggcatggccgatg

SEQ ID NO: 1164566 - DNA, 25 bp, Homo sapien
gactggatgagtgccgtggcatggc

SEQ ID NO: 1164567 - DNA, 25 bp, Homo sapien
cttctcctggtactgacgccgggaa

SEQ ID NO: 1164568 - DNA, 25 bp, Homo sapien
ctcctggtactgacgccgggaagag

SEQ ID NO: 1164569 - DNA, 25 bp, Homo sapien
catagtactcgtggatgcgctgccg

SEQ ID NO: 1164570 - DNA, 25 bp, Homo sapien
tagcggtgctcatagtactcgtgga

SEQ ID NO: 1164571 - DNA, 25 bp, Homo sapien
ctcgcgaagcggctcgctcagctcg

SEQ ID NO: 1164572 - DNA, 25 bp, Homo sapien
atgcgctgccgcgtgtctgctggca

SEQ ID NO: 1164573 - DNA, 25 bp, Homo sapien
ccaggccccgacaggtgaagttaat

SEQ ID NO: 1164574 - DNA, 25 bp, Homo sapien
tcaaagcgcagcttggtgagaactg

SEQ ID NO: 1164575 - DNA, 25 bp, Homo sapien
gatccatcggtgaggcgtgtgtccc

SEQ ID NO: 1164576 - DNA, 25 bp, Homo sapien
ggcaaacagcggcatgtgggccacc

SEQ ID NO: 1164577 - DNA, 25 bp, Homo sapien
cggcccctagttagcaggcagatct

SEQ ID NO: 1164578 - DNA, 25 bp, Homo sapien
gtgcgccggcccctagttagcaggc

SEQ ID NO: 1164579 - DNA, 25 bp, Homo sapien
tgagtgagtaaaggcggcagtaggt

SEQ ID NO: 1164580 - DNA, 25 bp, Homo sapien
agcccgaacactggctgtgcgccgg

SEQ ID NO: 1164581 - DNA, 25 bp, Homo sapien
agtctcaaaggcccggcgcatcatg

SEQ ID NO: 1164582 - DNA, 25 bp, Homo sapien
cgatgcggagcagccgatccatggc

SEQ ID NO: 1164583 - DNA, 25 bp, Homo sapien
tggggaactcctcaagcacagcatt

SEQ ID NO: 1164584 - DNA, 25 bp, Homo sapien
agcagccgatccatggccacagtct

SEQ ID NO: 1164585 - DNA, 25 bp, Homo sapien
tgtctctgtcatgttgcaccaagtg

SEQ ID NO: 1164586 - DNA, 25 bp, Homo sapien
caagtgctgctccatgatgccacca

SEQ ID NO: 1164587 - DNA, 25 bp, Homo sapien
ccgctgcagtatggaattcttcttg

SEQ ID NO: 1164588 - DNA, 25 bp, Homo sapien
cgctgatgagtcagggcaatggcca

SEQ ID NO: 1164589 - DNA, 25 bp, Homo sapien
tgcccgggataggctggcgtgcagg

SEQ ID NO: 1164590 - DNA, 25 bp, Homo sapien
ctgcccgggataggctggcgtgcag

SEQ ID NO: 1164591 - DNA, 25 bp, Homo sapien
agggggacccagcagggagacctgg

SEQ ID NO: 1164592 - DNA, 25 bp, Homo sapien
ctggagggggacccagcagggagac

SEQ ID NO: 1164593 - DNA, 25 bp, Homo sapien
ggacccagcagggagacctgggagc

SEQ ID NO: 1164594 - DNA, 25 bp, Homo sapien
ctcctcctggagggggacccagcag

SEQ ID NO: 1164595 - DNA, 25 bp, Homo sapien
cctgttgcccgctgaggcagagagg

SEQ ID NO: 1164596 - DNA, 25 bp, Homo sapien
tcctgatcccttacgcccaggagag

SEQ ID NO: 1164597 - DNA, 25 bp, Homo sapien
gctgtccttggaggtttggccagga

SEQ ID NO: 1164598 - DNA, 25 bp, Homo sapien
ttacgcccaggagagccatcgcctg

SEQ ID NO: 1164599 - DNA, 25 bp, Homo sapien
tccgcacagggtcgacatttccatg

SEQ ID NO: 1164600 - DNA, 25 bp, Homo sapien
tatgatgggacaagctacaggattc

SEQ ID NO: 1164601 - DNA, 25 bp, Homo sapien
tcatggcagtatgcggaatgtccgc

SEQ ID NO: 1164602 - DNA, 25 bp, Homo sapien
tactgcaccccaagaactaaggctg

SEQ ID NO: 1164603 - DNA, 25 bp, Homo sapien
cagagacatctagttacttggcagt

SEQ ID NO: 1164604 - DNA, 25 bp, Homo sapien
ccttgtcagagggttttgagtcact

SEQ ID NO: 1164605 - DNA, 25 bp, Homo sapien
aacaggaagataaccagaccgggca

SEQ ID NO: 1164606 - DNA, 25 bp, Homo sapien
tggcagtggagacatacagcgcctg

SEQ ID NO: 1164607 - DNA, 25 bp, Homo sapien
tcaggacccaagacatctgctgaca

SEQ ID NO: 1164608 - DNA, 25 bp, Homo sapien
actcaggacccaagacatctgctga

SEQ ID NO: 1164609 - DNA, 25 bp, Homo sapien
ctcaggacccaagacatctgctgac

SEQ ID NO: 1164610 - DNA, 25 bp, Homo sapien
aaagatggtctaccacaggacagag

SEQ ID NO: 1164611 - DNA, 25 bp, Homo sapien
ttagaagtatgttcccactcagagg

SEQ ID NO: 1164612 - DNA, 25 bp, Homo sapien
tattaataaggaggtgccaactacc

SEQ ID NO: 1164613 - DNA, 25 bp, Homo sapien
cagtgagcgggtaaaagtggatacc

SEQ ID NO: 1164614 - DNA, 25 bp, Homo sapien
gatgggtttgggcaaggaccacaga

SEQ ID NO: 1164615 - DNA, 25 bp, Homo sapien
tccccaggcttggataccttgggcc

SEQ ID NO: 1164616 - DNA, 25 bp, Homo sapien
cctacctgggagaaggttcaagtat

SEQ ID NO: 1164617 - DNA, 25 bp, Homo sapien
ttcccttattcctgcaccaacagca

SEQ ID NO: 1164618 - DNA, 25 bp, Homo sapien
cactcatgttgttcccacacacaaa

SEQ ID NO: 1164619 - DNA, 25 bp, Homo sapien
tatttaaacccagctgtttggaagc

SEQ ID NO: 1164620 - DNA, 25 bp, Homo sapien
cacacaaaccaagagccaaaaatga

SEQ ID NO: 1164621 - DNA, 25 bp, Homo sapien
caaaaatgagtgtgtctattttata

SEQ ID NO: 1164622 - DNA, 25 bp, Homo sapien
tgggcttgtagaccactgtcctggc

SEQ ID NO: 1164623 - DNA, 25 bp, Homo sapien
tgcctgataccctgcttggtcaaat

SEQ ID NO: 1164624 - DNA, 25 bp, Homo sapien
tgtcttcacaacctccgtgctgggc

SEQ ID NO: 1164625 - DNA, 25 bp, Homo sapien
tcatgcctgcctgataccctgcttg

SEQ ID NO: 1164626 - DNA, 25 bp, Homo sapien
caacggatagtgcattaccccagat

SEQ ID NO: 1164627 - DNA, 25 bp, Homo sapien
gaatggtccctagaatggcaactgg

SEQ ID NO: 1164628 - DNA, 25 bp, Homo sapien
tggagctccactatctgggcctgaa

SEQ ID NO: 1164629 - DNA, 25 bp, Homo sapien
tagtggttacagctcgggctctgga

SEQ ID NO: 1164630 - DNA, 25 bp, Homo sapien
tataaggtactgtcaccggtggagg

SEQ ID NO: 1164631 - DNA, 25 bp, Homo sapien
tagaatgcctaaaccaactggaaat

SEQ ID NO: 1164632 - DNA, 25 bp, Homo sapien
aattggacaaaacacggctgggtgc

SEQ ID NO: 1164633 - DNA, 25 bp, Homo sapien
ggttcacgcacctctgacaattatg

SEQ ID NO: 1164634 - DNA, 25 bp, Homo sapien
ctccgcgatcggctctgtgggtcga

SEQ ID NO: 1164635 - DNA, 25 bp, Homo sapien
tgtgggtcgagtagttcccgctctc

SEQ ID NO: 1164636 - DNA, 25 bp, Homo sapien
ctaaaagcagaatccgctccgcgat

SEQ ID NO: 1164637 - DNA, 25 bp, Homo sapien
tgttcccagatacggattcctgctc

SEQ ID NO: 1164638 - DNA, 25 bp, Homo sapien
agtatcgttacagaagtaaggcccg

SEQ ID NO: 1164639 - DNA, 25 bp, Homo sapien
gatgcctcacagtatcgttacagaa

SEQ ID NO: 1164640 - DNA, 25 bp, Homo sapien
aaaacggacacaacaggctggcctt

SEQ ID NO: 1164641 - DNA, 25 bp, Homo sapien
gctggccttccgatgcctcacagta

SEQ ID NO: 1164642 - DNA, 25 bp, Homo sapien
ataggctcggagcaactctggacgg

SEQ ID NO: 1164643 - DNA, 25 bp, Homo sapien
tgagttacgccccaaggaggaaaga

SEQ ID NO: 1164644 - DNA, 25 bp, Homo sapien
cattggagcgagaacccatgggtgc

SEQ ID NO: 1164645 - DNA, 25 bp, Homo sapien
tacaggaaggatacgcagggaacaa

SEQ ID NO: 1164646 - DNA, 25 bp, Homo sapien
ctgggagtggcatagggagggggca

SEQ ID NO: 1164647 - DNA, 25 bp, Homo sapien
atagggagggggcactaagcactcc

SEQ ID NO: 1164648 - DNA, 25 bp, Homo sapien
tgggagtggcatagggagggggcac

SEQ ID NO: 1164649 - DNA, 25 bp, Homo sapien
ggcatagggagggggcactaagcac

SEQ ID NO: 1164650 - DNA, 25 bp, Homo sapien
acagatctcaaccagcgggacaggg

SEQ ID NO: 1164651 - DNA, 25 bp, Homo sapien
gtccacgcttggcaccagcagcggg

SEQ ID NO: 1164652 - DNA, 25 bp, Homo sapien
gaggttcctctgtccacgcttggca

SEQ ID NO: 1164653 - DNA, 25 bp, Homo sapien
caggccaggactgggtacccgtgca

SEQ ID NO: 1164654 - DNA, 25 bp, Homo sapien
gtcagaaacctgatcagctgctccc

SEQ ID NO: 1164655 - DNA, 25 bp, Homo sapien
taaacatctgaattctggtctccgt

SEQ ID NO: 1164656 - DNA, 25 bp, Homo sapien
catctgaattctggtctccgttcat

SEQ ID NO: 1164657 - DNA, 25 bp, Homo sapien
gggcataaacatctgaattctggtc

SEQ ID NO: 1164658 - DNA, 25 bp, Homo sapien
aacatctgaattctggtctccgttc

SEQ ID NO: 1164659 - DNA, 25 bp, Homo sapien
cacaccatcgcactccagcccaggt

SEQ ID NO: 1164660 - DNA, 25 bp, Homo sapien
agatcacaccatcgcactccagccc

SEQ ID NO: 1164661 - DNA, 25 bp, Homo sapien
acaccatcgcactccagcccaggtg

SEQ ID NO: 1164662 - DNA, 25 bp, Homo sapien
atcacaccatcgcactccagcccag

SEQ ID NO: 1164663 - DNA, 25 bp, Homo sapien
ctccaatggcattgtactccaggac

SEQ ID NO: 1164664 - DNA, 25 bp, Homo sapien
gctcccggaatgctactaccaccgt

SEQ ID NO: 1164665 - DNA, 25 bp, Homo sapien
cagtccaggcccgctggagactatc

SEQ ID NO: 1164666 - DNA, 25 bp, Homo sapien
agcccacagtccaggcccgctggag

SEQ ID NO: 1164667 - DNA, 25 bp, Homo sapien
gtccaggcccgctggagactatcag

SEQ ID NO: 1164668 - DNA, 25 bp, Homo sapien
cacagtccaggcccgctggagacta

SEQ ID NO: 1164669 - DNA, 25 bp, Homo sapien
gaaataagtttcaggcccatccctc

SEQ ID NO: 1164670 - DNA, 25 bp, Homo sapien
aatttggccgtagcacactagagac

SEQ ID NO: 1164671 - DNA, 25 bp, Homo sapien
tacctaatgccaaaagaggctcccc

SEQ ID NO: 1164672 - DNA, 25 bp, Homo sapien
gagtgattcactctaaatttggccg

SEQ ID NO: 1164673 - DNA, 25 bp, Homo sapien
tacacttggcctagaagacatggtt

SEQ ID NO: 1164674 - DNA, 25 bp, Homo sapien
ggaaaggaccgttgcaatcactgct

SEQ ID NO: 1164675 - DNA, 25 bp, Homo sapien
tagtggatccacattgcaaaggaag

SEQ ID NO: 1164676 - DNA, 25 bp, Homo sapien
cccaagggtgactgcaaggacaatc

SEQ ID NO: 1164677 - DNA, 25 bp, Homo sapien
accaccaactgctaggccagctaat

SEQ ID NO: 1164678 - DNA, 25 bp, Homo sapien
caagacatggtttgggttgcttttt

SEQ ID NO: 1164679 - DNA, 25 bp, Homo sapien
tgagccatcgtgtctgaccattaaa

SEQ ID NO: 1164680 - DNA, 25 bp, Homo sapien
gaatctagggatataggcacacacc

SEQ ID NO: 1164681 - DNA, 25 bp, Homo sapien
gtggcgccatgtgggttcactgtaa

SEQ ID NO: 1164682 - DNA, 25 bp, Homo sapien
tgcagtggcgccatgtgggttcact

SEQ ID NO: 1164683 - DNA, 25 bp, Homo sapien
agtgcagtggcgccatgtgggttca

SEQ ID NO: 1164684 - DNA, 25 bp, Homo sapien
cagtggcgccatgtgggttcactgt

SEQ ID NO: 1164685 - DNA, 25 bp, Homo sapien
tagcacagcattaggcctggagtga

SEQ ID NO: 1164686 - DNA, 25 bp, Homo sapien
catctgaaggtacctgaacgtgtcg

SEQ ID NO: 1164687 - DNA, 25 bp, Homo sapien
cagtgcaggtctaataaggtggaac

SEQ ID NO: 1164688 - DNA, 25 bp, Homo sapien
tgtcgggtttcccactagaccatga

SEQ ID NO: 1164689 - DNA, 25 bp, Homo sapien
cagactccccgcctataaaatggaa

SEQ ID NO: 1164690 - DNA, 25 bp, Homo sapien
cataacatgtttggctcagactccc

SEQ ID NO: 1164691 - DNA, 25 bp, Homo sapien
gcctttgacagtccctatgagctgg

SEQ ID NO: 1164692 - DNA, 25 bp, Homo sapien
gacttctgtgctatggagacttgga

SEQ ID NO: 1164693 - DNA, 25 bp, Homo sapien
ctgccaccaggaagaaagcttgcag

SEQ ID NO: 1164694 - DNA, 25 bp, Homo sapien
cccggcgggtaagggatgaatccat

SEQ ID NO: 1164695 - DNA, 25 bp, Homo sapien
ggcgggtaagggatgaatccatgat

SEQ ID NO: 1164696 - DNA, 25 bp, Homo sapien
cagcagatctgtccccggcgggtaa

SEQ ID NO: 1164697 - DNA, 25 bp, Homo sapien
tctgtccccggcgggtaagggatga

SEQ ID NO: 1164698 - DNA, 25 bp, Homo sapien
tgcttccaggaggttagcatcattg

SEQ ID NO: 1164699 - DNA, 25 bp, Homo sapien
catgcttccaggaggttagcatcat

SEQ ID NO: 1164700 - DNA, 25 bp, Homo sapien
cttccaggaggttagcatcattgat

SEQ ID NO: 1164701 - DNA, 25 bp, Homo sapien
tccaggaggttagcatcattgatgg

SEQ ID NO: 1164702 - DNA, 25 bp, Homo sapien
tgaaaccagctagatgagcatgtcc

SEQ ID NO: 1164703 - DNA, 25 bp, Homo sapien
gctagatgagcatgtcctatagagg

SEQ ID NO: 1164704 - DNA, 25 bp, Homo sapien
gggcatcgggccctgtctgcaatac

SEQ ID NO: 1164705 - DNA, 25 bp, Homo sapien
agaggccaaggctaccatgggcacc

SEQ ID NO: 1164706 - DNA, 25 bp, Homo sapien
tatgcgaaaccctggtatcccaagc

SEQ ID NO: 1164707 - DNA, 25 bp, Homo sapien
aacttaaggcccatattcatacaca

SEQ ID NO: 1164708 - DNA, 25 bp, Homo sapien
acaaagacggtccatgagccaggct

SEQ ID NO: 1164709 - DNA, 25 bp, Homo sapien
ttccaggcacgctgcaatcctgtac

SEQ ID NO: 1164710 - DNA, 25 bp, Homo sapien
ctcttttcagtgaatctgacaagat

SEQ ID NO: 1164711 - DNA, 25 bp, Homo sapien
cttttcagtgaatctgacaagatcc

SEQ ID NO: 1164712 - DNA, 25 bp, Homo sapien
tcagtgaatctgacaagatccacat

SEQ ID NO: 1164713 - DNA, 25 bp, Homo sapien
tttcagtgaatctgacaagatccac

SEQ ID NO: 1164714 - DNA, 25 bp, Homo sapien
aactcctcaggagggcaatgcacat

SEQ ID NO: 1164715 - DNA, 25 bp, Homo sapien
tccagacatggttcgcgctgtccct

SEQ ID NO: 1164716 - DNA, 25 bp, Homo sapien
aagagaaactcctcaggagggcaat

SEQ ID NO: 1164717 - DNA, 25 bp, Homo sapien
tccctcgctgtccagacatggttcg

SEQ ID NO: 1164718 - DNA, 25 bp, Homo sapien
gctgcagctataggaaggtagaagg

SEQ ID NO: 1164719 - DNA, 25 bp, Homo sapien
tacatggctgcagctataggaaggt

SEQ ID NO: 1164720 - DNA, 25 bp, Homo sapien
gctgtcttgtacttgacaatagatt

SEQ ID NO: 1164721 - DNA, 25 bp, Homo sapien
tagaaggagtagaaagctgtcttgt

SEQ ID NO: 1164722 - DNA, 25 bp, Homo sapien
aatctgaaagaactcccccatctcc

SEQ ID NO: 1164723 - DNA, 25 bp, Homo sapien
ttggcattggcgtgctccttctcgc

SEQ ID NO: 1164724 - DNA, 25 bp, Homo sapien
tggcgtgctccttctcgccatcaat

SEQ ID NO: 1164725 - DNA, 25 bp, Homo sapien
tcttggcattggcgtgctccttctc

SEQ ID NO: 1164726 - DNA, 25 bp, Homo sapien
ggagtgaagctggtgcctgttctct

SEQ ID NO: 1164727 - DNA, 25 bp, Homo sapien
aggagtgaagctggtgcctgttctc

SEQ ID NO: 1164728 - DNA, 25 bp, Homo sapien
gctggtgcctgttctctgctactgc

SEQ ID NO: 1164729 - DNA, 25 bp, Homo sapien
ggtgcctgttctctgctactgcctc

SEQ ID NO: 1164730 - DNA, 25 bp, Homo sapien
gagggcagcaaaagaggaaggatga

SEQ ID NO: 1164731 - DNA, 25 bp, Homo sapien
ggagggggagggcagcaaaagagga

SEQ ID NO: 1164732 - DNA, 25 bp, Homo sapien
gggagggcagcaaaagaggaaggat

SEQ ID NO: 1164733 - DNA, 25 bp, Homo sapien
cagcaaaagaggaaggatgaggttc

SEQ ID NO: 1164734 - DNA, 25 bp, Homo sapien
caattttgccggtcacactggggtc

SEQ ID NO: 1164735 - DNA, 25 bp, Homo sapien
tcagtgccaattttgccggtcacac

SEQ ID NO: 1164736 - DNA, 25 bp, Homo sapien
tgccaattttgccggtcacactggg

SEQ ID NO: 1164737 - DNA, 25 bp, Homo sapien
ctggatgtcagtgccaattttgccg

SEQ ID NO: 1164738 - DNA, 25 bp, Homo sapien
atctggtactgttctggagtggccc

SEQ ID NO: 1164739 - DNA, 25 bp, Homo sapien
gtactgttctggagtggcccgttgc

SEQ ID NO: 1164740 - DNA, 25 bp, Homo sapien
actgttctggagtggcccgttgcag

SEQ ID NO: 1164741 - DNA, 25 bp, Homo sapien
tggtactgttctggagtggcccgtt

SEQ ID NO: 1164742 - DNA, 25 bp, Homo sapien
gtctctacgtagctaaaatcccaag

SEQ ID NO: 1164743 - DNA, 25 bp, Homo sapien
tgaaagacaggaaaacgggcttggc

SEQ ID NO: 1164744 - DNA, 25 bp, Homo sapien
ccctcgggaggaaaactgcctctag

SEQ ID NO: 1164745 - DNA, 25 bp, Homo sapien
taccaggcatcctctactccagggt

SEQ ID NO: 1164746 - DNA, 25 bp, Homo sapien
tcagcctccttctgcccgtaatttt

SEQ ID NO: 1164747 - DNA, 25 bp, Homo sapien
ttcctcatattgcaagaacactgct

SEQ ID NO: 1164748 - DNA, 25 bp, Homo sapien
tcaatgagagccataatgtggctgt

SEQ ID NO: 1164749 - DNA, 25 bp, Homo sapien
atatagcgccttcacccgggccact

SEQ ID NO: 1164750 - DNA, 25 bp, Homo sapien
cgcgcaagccccagaaagacggctg

SEQ ID NO: 1164751 - DNA, 25 bp, Homo sapien
tttctccgcttgtagattttgcgcg

SEQ ID NO: 1164752 - DNA, 25 bp, Homo sapien
tttgcgcgcaagccccagaaagacg

SEQ ID NO: 1164753 - DNA, 25 bp, Homo sapien
gcttgtagattttgcgcgcaagccc

SEQ ID NO: 1164754 - DNA, 25 bp, Homo sapien
ggttacacgattatttattgagagc

SEQ ID NO: 1164755 - DNA, 25 bp, Homo sapien
gttacacgattatttattgagagcc

SEQ ID NO: 1164756 - DNA, 25 bp, Homo sapien
ctcctggaaccgctccggccttggg

SEQ ID NO: 1164757 - DNA, 25 bp, Homo sapien
tggaaccgctccggccttgggcttg

SEQ ID NO: 1164758 - DNA, 25 bp, Homo sapien
cctggaaccgctccggccttgggct

SEQ ID NO: 1164759 - DNA, 25 bp, Homo sapien
tcctcctggaaccgctccggccttg

SEQ ID NO: 1164760 - DNA, 25 bp, Homo sapien
ctagagaaccagaagggtagggtct

SEQ ID NO: 1164761 - DNA, 25 bp, Homo sapien
tgggctccgttttcccagcgtcgat

SEQ ID NO: 1164762 - DNA, 25 bp, Homo sapien
gaggtcccgcaagtagactgagaca

SEQ ID NO: 1164763 - DNA, 25 bp, Homo sapien
ttgcagttcgagtccaggccaggat

SEQ ID NO: 1164764 - DNA, 25 bp, Homo sapien
tcctgtagctcaggacggcgggaca

SEQ ID NO: 1164765 - DNA, 25 bp, Homo sapien
gcatctgttttcgagccagaatcag

SEQ ID NO: 1164766 - DNA, 25 bp, Homo sapien
tccaaccagagtcgaatttttcagg

SEQ ID NO: 1164767 - DNA, 25 bp, Homo sapien
ccagaatcagttattcttgtgttgg

SEQ ID NO: 1164768 - DNA, 25 bp, Homo sapien
tgtgttggttttccaaccagagtcg

SEQ ID NO: 1164769 - DNA, 25 bp, Homo sapien
ttcccgaggaggtgccgaggagccg

SEQ ID NO: 1164770 - DNA, 25 bp, Homo sapien
tctttcttcgcctgcgggacaaggg

SEQ ID NO: 1164771 - DNA, 25 bp, Homo sapien
tcgtggaaggacgtgattgtccggt

SEQ ID NO: 1164772 - DNA, 25 bp, Homo sapien
tgtcgggcgagaagactatgagcca

SEQ ID NO: 1164773 - DNA, 25 bp, Homo sapien
ggctgcagtccaggtcggttcttct

SEQ ID NO: 1164774 - DNA, 25 bp, Homo sapien
ggcgggaccaaagcccagccaactg

SEQ ID NO: 1164775 - DNA, 25 bp, Homo sapien
tgcccctccgctatgggctgcagtc

SEQ ID NO: 1164776 - DNA, 25 bp, Homo sapien
tcggactgcccctccgctatgggct

SEQ ID NO: 1164777 - DNA, 25 bp, Homo sapien
aacagttagtcccataacccaatga

SEQ ID NO: 1164778 - DNA, 25 bp, Homo sapien
aagagggagcaaacagttagtccca

SEQ ID NO: 1164779 - DNA, 25 bp, Homo sapien
gttagtcccataacccaatgaccca

SEQ ID NO: 1164780 - DNA, 25 bp, Homo sapien
ggagcaaacagttagtcccataacc

SEQ ID NO: 1164781 - DNA, 25 bp, Homo sapien
cgagtcggaggcgaataggctccca

SEQ ID NO: 1164782 - DNA, 25 bp, Homo sapien
ctccccgagtcggaggcgaataggc

SEQ ID NO: 1164783 - DNA, 25 bp, Homo sapien
tcggaggcgaataggctcccaccgg

SEQ ID NO: 1164784 - DNA, 25 bp, Homo sapien
aataggctcccaccggggacaggcg

SEQ ID NO: 1164785 - DNA, 25 bp, Homo sapien
ggcggaggcgatgggctcctggtcc

SEQ ID NO: 1164786 - DNA, 25 bp, Homo sapien
gcggacgaggttgcggtggcagcgg

SEQ ID NO: 1164787 - DNA, 25 bp, Homo sapien
tagcctgggcggaggcgatgggctc

SEQ ID NO: 1164788 - DNA, 25 bp, Homo sapien
cagcgaggggccttcggcggacgag

SEQ ID NO: 1164789 - DNA, 25 bp, Homo sapien
ttcatcccgcgtgggactggactcg

SEQ ID NO: 1164790 - DNA, 25 bp, Homo sapien
aagcccctaacaacagactcgctgg

SEQ ID NO: 1164791 - DNA, 25 bp, Homo sapien
ggcggcatggaccaatggaaagaca

SEQ ID NO: 1164792 - DNA, 25 bp, Homo sapien
ggccagaacctctagtgccaatgag

SEQ ID NO: 1164793 - DNA, 25 bp, Homo sapien
ctccaggatcccggaactccgggag

SEQ ID NO: 1164794 - DNA, 25 bp, Homo sapien
ccaggatcccggaactccgggagcg

SEQ ID NO: 1164795 - DNA, 25 bp, Homo sapien
aactccgggagcgggatggccgcgc

SEQ ID NO: 1164796 - DNA, 25 bp, Homo sapien
cggaactccgggagcgggatggccg

SEQ ID NO: 1164797 - DNA, 25 bp, Homo sapien
gagccccggagtgaaatctcgcaca

SEQ ID NO: 1164798 - DNA, 25 bp, Homo sapien
cacaagttgtctccggcgggtctgc

SEQ ID NO: 1164799 - DNA, 25 bp, Homo sapien
tgttattccgaggactccgggctcc

SEQ ID NO: 1164800 - DNA, 25 bp, Homo sapien
gggtctgcagtgctgtgtccccgaa

SEQ ID NO: 1164801 - DNA, 25 bp, Homo sapien
ctggcgtaagggaagaagggcgcgg

SEQ ID NO: 1164802 - DNA, 25 bp, Homo sapien
ctgggctccggggacaccggcgaag

SEQ ID NO: 1164803 - DNA, 25 bp, Homo sapien
ccgctgggctccggggacaccggcg

SEQ ID NO: 1164804 - DNA, 25 bp, Homo sapien
ccacagccgctgggctccggggaca

SEQ ID NO: 1164805 - DNA, 25 bp, Homo sapien
acagccgctgggctccggggacacc

SEQ ID NO: 1164806 - DNA, 25 bp, Homo sapien
tcctgcagctgaccagtcccactct

SEQ ID NO: 1164807 - DNA, 25 bp, Homo sapien
ctgcagctgaccagtcccactctgg

SEQ ID NO: 1164808 - DNA, 25 bp, Homo sapien
tgaccagtcccactctgggcttctg

SEQ ID NO: 1164809 - DNA, 25 bp, Homo sapien
tgctcctgcagctgaccagtcccac

SEQ ID NO: 1164810 - DNA, 25 bp, Homo sapien
ggcggccccgaaatgcgagatgatt

SEQ ID NO: 1164811 - DNA, 25 bp, Homo sapien
cggagacgctgacggctatcagaag

SEQ ID NO: 1164812 - DNA, 25 bp, Homo sapien
tatcaacggagacgctgacggctat

SEQ ID NO: 1164813 - DNA, 25 bp, Homo sapien
gcgagatgattttatcaacggagac

SEQ ID NO: 1164814 - DNA, 25 bp, Homo sapien
ccccgcggagctccattactctcct

SEQ ID NO: 1164815 - DNA, 25 bp, Homo sapien
atggctccagagatccctccagaca

SEQ ID NO: 1164816 - DNA, 25 bp, Homo sapien
ggcgcgatgccgatggctccagaga

SEQ ID NO: 1164817 - DNA, 25 bp, Homo sapien
tggaggtggcgcgatgccgatggct

SEQ ID NO: 1164818 - DNA, 25 bp, Homo sapien
gggctcagccggctatcacccaact

SEQ ID NO: 1164819 - DNA, 25 bp, Homo sapien
tgctcctgcgctgcccggtgatgag

SEQ ID NO: 1164820 - DNA, 25 bp, Homo sapien
tggcttcaccgacgcctccaccacg

SEQ ID NO: 1164821 - DNA, 25 bp, Homo sapien
cggaaaggcttcagcccgtccgcca

SEQ ID NO: 1164822 - DNA, 25 bp, Homo sapien
ggggtgcagtcagccaagcccggcc

SEQ ID NO: 1164823 - DNA, 25 bp, Homo sapien
ggtgcagtcagccaagcccggccct

SEQ ID NO: 1164824 - DNA, 25 bp, Homo sapien
tgccgggtcccacgccctcctggct

SEQ ID NO: 1164825 - DNA, 25 bp, Homo sapien
ccctgccctgcgcactgccgggtcc

SEQ ID NO: 1164826 - DNA, 25 bp, Homo sapien
tacagggttccaagggagcgggtgc

SEQ ID NO: 1164827 - DNA, 25 bp, Homo sapien
atacagggttccaagggagcgggtg

SEQ ID NO: 1164828 - DNA, 25 bp, Homo sapien
ctatacagggttccaagggagcggg

SEQ ID NO: 1164829 - DNA, 25 bp, Homo sapien
cagggttccaagggagcgggtgctg

SEQ ID NO: 1164830 - DNA, 25 bp, Homo sapien
gataaaggcatggaagcggctacgg

SEQ ID NO: 1164831 - DNA, 25 bp, Homo sapien
taaaggcatggaagcggctacggct

SEQ ID NO: 1164832 - DNA, 25 bp, Homo sapien
ctcagcggggctagacggctgacct

SEQ ID NO: 1164833 - DNA, 25 bp, Homo sapien
tgctgctcagcggggctagacggct

SEQ ID NO: 1164834 - DNA, 25 bp, Homo sapien
gtgtcccacccatgacgctcctgca

SEQ ID NO: 1164835 - DNA, 25 bp, Homo sapien
tgaggcactactactgtgtcccacc

SEQ ID NO: 1164836 - DNA, 25 bp, Homo sapien
tcctgcagtcccaggtcgtgggaag

SEQ ID NO: 1164837 - DNA, 25 bp, Homo sapien
gggatgtgaggcactactactgtgt

SEQ ID NO: 1164838 - DNA, 25 bp, Homo sapien
cttcctggagactggaaaaccacag

SEQ ID NO: 1164839 - DNA, 25 bp, Homo sapien
tggtgacaagtaacagagacagtgc

SEQ ID NO: 1164840 - DNA, 25 bp, Homo sapien
tctttcatcctatgggcgatgggcc

SEQ ID NO: 1164841 - DNA, 25 bp, Homo sapien
gaagactgttggcaagaccctccaa

SEQ ID NO: 1164842 - DNA, 25 bp, Homo sapien
gacaggagagccatagaagcacata

SEQ ID NO: 1164843 - DNA, 25 bp, Homo sapien
gccaacatcagctcctgccctggac

SEQ ID NO: 1164844 - DNA, 25 bp, Homo sapien
caggccaacatcagctcctgccctg

SEQ ID NO: 1164845 - DNA, 25 bp, Homo sapien
tggaaaagagcaggccaacatcagc

SEQ ID NO: 1164846 - DNA, 25 bp, Homo sapien
ctggaaaagagcaggccaacatcag

SEQ ID NO: 1164847 - DNA, 25 bp, Homo sapien
ctgttggcaggtacaggagggagag

SEQ ID NO: 1164848 - DNA, 25 bp, Homo sapien
ggcaggtacaggagggagagcaggc

SEQ ID NO: 1164849 - DNA, 25 bp, Homo sapien
ttggcaggtacaggagggagagcag

SEQ ID NO: 1164850 - DNA, 25 bp, Homo sapien
tgttggcaggtacaggagggagagc

SEQ ID NO: 1164851 - DNA, 25 bp, Homo sapien
ggacaaccaccgcgggccagggaga

SEQ ID NO: 1164852 - DNA, 25 bp, Homo sapien
gtgagcaccgacaatggctgcagca

SEQ ID NO: 1164853 - DNA, 25 bp, Homo sapien
tccaggtggaaagtgagcaccgaca

SEQ ID NO: 1164854 - DNA, 25 bp, Homo sapien
ccaaagtgcagcatggcttgcatag

SEQ ID NO: 1164855 - DNA, 25 bp, Homo sapien
tggaagtcccccgaaggctctgggc

SEQ ID NO: 1164856 - DNA, 25 bp, Homo sapien
ccatcgggaaagaggaaagccctca

SEQ ID NO: 1164857 - DNA, 25 bp, Homo sapien
ttcttcagctgcagtcccatgacgc

SEQ ID NO: 1164858 - DNA, 25 bp, Homo sapien
atgacgccccggtgcccatcgggaa

SEQ ID NO: 1164859 - DNA, 25 bp, Homo sapien
acccgggaggcctgggtcaactgct

SEQ ID NO: 1164860 - DNA, 25 bp, Homo sapien
tgtcgggggcagccagctagatggt

SEQ ID NO: 1164861 - DNA, 25 bp, Homo sapien
gtcgggggcagccagctagatggtc

SEQ ID NO: 1164862 - DNA, 25 bp, Homo sapien
cgggggcagccagctagatggtctc

SEQ ID NO: 1164863 - DNA, 25 bp, Homo sapien
tcgggggcagccagctagatggtct

SEQ ID NO: 1164864 - DNA, 25 bp, Homo sapien
aaggcatctcgggaggtgccccccg

SEQ ID NO: 1164865 - DNA, 25 bp, Homo sapien
gtgccccccgcttcacaagagccaa

SEQ ID NO: 1164866 - DNA, 25 bp, Homo sapien
aggagaaggcatctcgggaggtgcc

SEQ ID NO: 1164867 - DNA, 25 bp, Homo sapien
cgcttcacaagagccaacacactca

SEQ ID NO: 1164868 - DNA, 25 bp, Homo sapien
tcctcgtgtcgcctatagtggtaaa

SEQ ID NO: 1164869 - DNA, 25 bp, Homo sapien
ctggaaggacttgagaaccattcat

SEQ ID NO: 1164870 - DNA, 25 bp, Homo sapien
ttggtttggctcagtggacattgac

SEQ ID NO: 1164871 - DNA, 25 bp, Homo sapien
gtcacctctagagtgcccttgttgg

SEQ ID NO: 1164872 - DNA, 25 bp, Homo sapien
gtgtgatcacagagagcccgcactg

SEQ ID NO: 1164873 - DNA, 25 bp, Homo sapien
gaagctcaactggtcaggtcttgca

SEQ ID NO: 1164874 - DNA, 25 bp, Homo sapien
tacagaacaagggaggtatacccca

SEQ ID NO: 1164875 - DNA, 25 bp, Homo sapien
tgtggtgatgacacgcagcacttcc

SEQ ID NO: 1164876 - DNA, 25 bp, Homo sapien
gacgtgggaagaaacgtcattttgc

SEQ ID NO: 1164877 - DNA, 25 bp, Homo sapien
tgttcactggccattccattcccag

SEQ ID NO: 1164878 - DNA, 25 bp, Homo sapien
gacacatacgcaggaaagggtccca

SEQ ID NO: 1164879 - DNA, 25 bp, Homo sapien
taaatattagcagaaacagacgtgg

SEQ ID NO: 1164880 - DNA, 25 bp, Homo sapien
ggaagacattcccttatatagacgg

SEQ ID NO: 1164881 - DNA, 25 bp, Homo sapien
ttcagcacctagtacagcatgagtg

SEQ ID NO: 1164882 - DNA, 25 bp, Homo sapien
tactggcacagtccacttatggatg

SEQ ID NO: 1164883 - DNA, 25 bp, Homo sapien
gaagagcagatttcaccttacaggt

SEQ ID NO: 1164884 - DNA, 25 bp, Homo sapien
actgtacattactaagagacctggg

SEQ ID NO: 1164885 - DNA, 25 bp, Homo sapien
gagacctgggtataagatactcaca

SEQ ID NO: 1164886 - DNA, 25 bp, Homo sapien
tgtccaagcccgtttgagtggtttc

SEQ ID NO: 1164887 - DNA, 25 bp, Homo sapien
tgtggagctggaaaaatcgcatgtc

SEQ ID NO: 1164888 - DNA, 25 bp, Homo sapien
cacctgctgtgtgattggtaagcaa

SEQ ID NO: 1164889 - DNA, 25 bp, Homo sapien
gatgttcttataagagaaaagatgg

SEQ ID NO: 1164890 - DNA, 25 bp, Homo sapien
tttctaatattggaccaatgctgtc

SEQ ID NO: 1164891 - DNA, 25 bp, Homo sapien
caatagtaaacatgtccccattact

SEQ ID NO: 1164892 - DNA, 25 bp, Homo sapien
gaatgagaacctcaagcatctggga

SEQ ID NO: 1164893 - DNA, 25 bp, Homo sapien
gaaggcgtactttgtttatcccaga

SEQ ID NO: 1164894 - DNA, 25 bp, Homo sapien
cattgatgtgacctacttgctggag

SEQ ID NO: 1164895 - DNA, 25 bp, Homo sapien
caggcaggaaactgcgaaggcgtac

SEQ ID NO: 1164896 - DNA, 25 bp, Homo sapien
tatggtagcaaatgagaagtggccc

SEQ ID NO: 1164897 - DNA, 25 bp, Homo sapien
tgcattctcaagtaggctcatctca

SEQ ID NO: 1164898 - DNA, 25 bp, Homo sapien
aacacgggctcttttactctgctag

SEQ ID NO: 1164899 - DNA, 25 bp, Homo sapien
tctcaccgaacatgaaactgcagta

SEQ ID NO: 1164900 - DNA, 25 bp, Homo sapien
tagtgagtagatgttgagcaagaaa

SEQ ID NO: 1164901 - DNA, 25 bp, Homo sapien
cagagagacatggtggaataaaagc

SEQ ID NO: 1164902 - DNA, 25 bp, Homo sapien
tgagatcgcattttaaactttagga

SEQ ID NO: 1164903 - DNA, 25 bp, Homo sapien
tatttatgaaatctcttgagatcgc

SEQ ID NO: 1164904 - DNA, 25 bp, Homo sapien
ggattccgtcatgtgtgtcttgact

SEQ ID NO: 1164905 - DNA, 25 bp, Homo sapien
taagatcattcacatcgtcaccaca

SEQ ID NO: 1164906 - DNA, 25 bp, Homo sapien
cctaggtgttagtcctaagagtctt

SEQ ID NO: 1164907 - DNA, 25 bp, Homo sapien
taagagtcttttagtggattccgtc

SEQ ID NO: 1164908 - DNA, 25 bp, Homo sapien
gctagaatttaaattgcatagccac

SEQ ID NO: 1164909 - DNA, 25 bp, Homo sapien
tttagccataagacaggttgcggaa

SEQ ID NO: 1164910 - DNA, 25 bp, Homo sapien
tcattactctaggtgttaatagctg

SEQ ID NO: 1164911 - DNA, 25 bp, Homo sapien
caaacccgcatttatataaattggc

SEQ ID NO: 1164912 - DNA, 25 bp, Homo sapien
tgcatatcattcttgcaccagggcc

SEQ ID NO: 1164913 - DNA, 25 bp, Homo sapien
gcatatcattcttgcaccagggcca

SEQ ID NO: 1164914 - DNA, 25 bp, Homo sapien
aggtccgaggatcaacccagcccgg

SEQ ID NO: 1164915 - DNA, 25 bp, Homo sapien
caggagggccttggaagcttagcca

SEQ ID NO: 1164916 - DNA, 25 bp, Homo sapien
ggaagcttagccaggtccgaggatc

SEQ ID NO: 1164917 - DNA, 25 bp, Homo sapien
tcccggcccgattcctggccctcca

SEQ ID NO: 1164918 - DNA, 25 bp, Homo sapien
cagggaggtgccatcggagttgctc

SEQ ID NO: 1164919 - DNA, 25 bp, Homo sapien
tccagggaggtgccatcggagttgc

SEQ ID NO: 1164920 - DNA, 25 bp, Homo sapien
ccagggaggtgccatcggagttgct

SEQ ID NO: 1164921 - DNA, 25 bp, Homo sapien
ctgcagaccctcaaagcggcagatg

SEQ ID NO: 1164922 - DNA, 25 bp, Homo sapien
gcagatggtcgtttggctgaacacc

SEQ ID NO: 1164923 - DNA, 25 bp, Homo sapien
ggtcgtttggctgaacaccttccca

SEQ ID NO: 1164924 - DNA, 25 bp, Homo sapien
cagaccctcaaagcggcagatggtc

SEQ ID NO: 1164925 - DNA, 25 bp, Homo sapien
tgctttgcatgtctcctgaagattt

SEQ ID NO: 1164926 - DNA, 25 bp, Homo sapien
tcggttctcgatactggttcgcttt

SEQ ID NO: 1164927 - DNA, 25 bp, Homo sapien
gctttctctttcgagcctgcaagag

SEQ ID NO: 1164928 - DNA, 25 bp, Homo sapien
tgcaagagggtttctgctttgcatg

SEQ ID NO: 1164929 - DNA, 25 bp, Homo sapien
ctgcaggaacaaattctccaggttg

SEQ ID NO: 1164930 - DNA, 25 bp, Homo sapien
acaaattctccaggttgcctctcac

SEQ ID NO: 1164931 - DNA, 25 bp, Homo sapien
aggaacaaattctccaggttgcctc

SEQ ID NO: 1164932 - DNA, 25 bp, Homo sapien
tgcaggaacaaattctccaggttgc

SEQ ID NO: 1164933 - DNA, 25 bp, Homo sapien
ccaagctgctgggcgatgtggctga

SEQ ID NO: 1164934 - DNA, 25 bp, Homo sapien
cccaagctgctgggcgatgtggctg

SEQ ID NO: 1164935 - DNA, 25 bp, Homo sapien
gattgcttgcctttctggcaccggt

SEQ ID NO: 1164936 - DNA, 25 bp, Homo sapien
ttgattgcttgcctttctggcaccg

SEQ ID NO: 1164937 - DNA, 25 bp, Homo sapien
tgcttgattgcttgcctttctggca

SEQ ID NO: 1164938 - DNA, 25 bp, Homo sapien
tgcttgcctttctggcaccggttac

SEQ ID NO: 1164939 - DNA, 25 bp, Homo sapien
agggctcccatagcctggggtacca

SEQ ID NO: 1164940 - DNA, 25 bp, Homo sapien
ctcccatagcctggggtaccaaaat

SEQ ID NO: 1164941 - DNA, 25 bp, Homo sapien
tgagggctcccatagcctggggtac

SEQ ID NO: 1164942 - DNA, 25 bp, Homo sapien
ggctcccatagcctggggtaccaaa

SEQ ID NO: 1164943 - DNA, 25 bp, Homo sapien
gcaatggtgaacagatacctcttcc

SEQ ID NO: 1164944 - DNA, 25 bp, Homo sapien
gaatgaaactttagtgacctgtggt

SEQ ID NO: 1164945 - DNA, 25 bp, Homo sapien
ctgtggtacaatatcaagagggcta

SEQ ID NO: 1164946 - DNA, 25 bp, Homo sapien
tacttgggttgctaccaaccttggc

SEQ ID NO: 1164947 - DNA, 25 bp, Homo sapien
aagtgtacagttaattcactagtgt

SEQ ID NO: 1164948 - DNA, 25 bp, Homo sapien
cagttaattcactagtgttaagtac

SEQ ID NO: 1164949 - DNA, 25 bp, Homo sapien
ccaatctccgtaacttttttcatct

SEQ ID NO: 1164950 - DNA, 25 bp, Homo sapien
ctggattccaagtacaagcgattct

SEQ ID NO: 1164951 - DNA, 25 bp, Homo sapien
aatgataaggcatggtgatatcatg

SEQ ID NO: 1164952 - DNA, 25 bp, Homo sapien
aaagaacagagtatgaagagggaaa

SEQ ID NO: 1164953 - DNA, 25 bp, Homo sapien
gtatgaagagggaaaagcagtaact

SEQ ID NO: 1164954 - DNA, 25 bp, Homo sapien
tatcatgtactctctgatagaatgt

SEQ ID NO: 1164955 - DNA, 25 bp, Homo sapien
gtcaatatctataaatccatgttga

SEQ ID NO: 1164956 - DNA, 25 bp, Homo sapien
ataatatatgtagaacacactttca

SEQ ID NO: 1164957 - DNA, 25 bp, Homo sapien
aagaagcaaatcttccttacagaaa

SEQ ID NO: 1164958 - DNA, 25 bp, Homo sapien
taaataaatacttggcagaaaagaa

SEQ ID NO: 1164959 - DNA, 25 bp, Homo sapien
gctttggcggttagtttgtcttgtg

SEQ ID NO: 1164960 - DNA, 25 bp, Homo sapien
tcttttgtagcacttctgactggtt

SEQ ID NO: 1164961 - DNA, 25 bp, Homo sapien
tctcaatctgtgatgtcaggttgct

SEQ ID NO: 1164962 - DNA, 25 bp, Homo sapien
aaaagagtgtcaagtgttatgggag

SEQ ID NO: 1164963 - DNA, 25 bp, Homo sapien
gaaacttcttcacagttggctccta

SEQ ID NO: 1164964 - DNA, 25 bp, Homo sapien
cataggtcagttggtcatagtataa

SEQ ID NO: 1164965 - DNA, 25 bp, Homo sapien
tttaaaactgggtgcagtatctgca

SEQ ID NO: 1164966 - DNA, 25 bp, Homo sapien
cacttgaacgttggtcataggtcag

SEQ ID NO: 1164967 - DNA, 25 bp, Homo sapien
caagcccggcctcaacactattttt

SEQ ID NO: 1164968 - DNA, 25 bp, Homo sapien
ccggccaccatgatacagttttaag

SEQ ID NO: 1164969 - DNA, 25 bp, Homo sapien
tgagaggctgctttgtcatacactg

SEQ ID NO: 1164970 - DNA, 25 bp, Homo sapien
cagcctggcaaatcattaggattac

SEQ ID NO: 1164971 - DNA, 25 bp, Homo sapien
aacatacgcttgtgatggaccctag

SEQ ID NO: 1164972 - DNA, 25 bp, Homo sapien
gagaactatgtatgtcgacctgcca

SEQ ID NO: 1164973 - DNA, 25 bp, Homo sapien
gaggaccttcgcaaacggaatcgag

SEQ ID NO: 1164974 - DNA, 25 bp, Homo sapien
taaaattgaaaattggcctccaggc

SEQ ID NO: 1164975 - DNA, 25 bp, Homo sapien
tcccggacctggatctctgagagag

SEQ ID NO: 1164976 - DNA, 25 bp, Homo sapien
cccggacctggatctctgagagagc

SEQ ID NO: 1164977 - DNA, 25 bp, Homo sapien
tctcccggacctggatctctgagag

SEQ ID NO: 1164978 - DNA, 25 bp, Homo sapien
ctcccggacctggatctctgagaga

SEQ ID NO: 1164979 - DNA, 25 bp, Homo sapien
tctcctctctcgcatttccgccagt

SEQ ID NO: 1164980 - DNA, 25 bp, Homo sapien
tgaaggtacgcgtgagggcctgcgc

SEQ ID NO: 1164981 - DNA, 25 bp, Homo sapien
cgtagacactcgtacgcgtgcgggc

SEQ ID NO: 1164982 - DNA, 25 bp, Homo sapien
gagcagccagcgacgagcccgtaga

SEQ ID NO: 1164983 - DNA, 25 bp, Homo sapien
ctggcaattccagtcaaacggcaag

SEQ ID NO: 1164984 - DNA, 25 bp, Homo sapien
ggcaattccagtcaaacggcaagcc

SEQ ID NO: 1164985 - DNA, 25 bp, Homo sapien
tggcaattccagtcaaacggcaagc

SEQ ID NO: 1164986 - DNA, 25 bp, Homo sapien
ctgcgaagtaggctcaggtcaaccg

SEQ ID NO: 1164987 - DNA, 25 bp, Homo sapien
gttgtcgtggggctcggtccgccat

SEQ ID NO: 1164988 - DNA, 25 bp, Homo sapien
taggcagtcctcgatccgctcgccg

SEQ ID NO: 1164989 - DNA, 25 bp, Homo sapien
gtaggctcaggtcaaccggcaggaa

SEQ ID NO: 1164990 - DNA, 25 bp, Homo sapien
gaccagctccacagcagcggtcctg

SEQ ID NO: 1164991 - DNA, 25 bp, Homo sapien
cagctccacagcagcggtcctgcta

SEQ ID NO: 1164992 - DNA, 25 bp, Homo sapien
tgcgaccagctccacagcagcggtc

SEQ ID NO: 1164993 - DNA, 25 bp, Homo sapien
cgcctgcgaccagctccacagcagc

SEQ ID NO: 1164994 - DNA, 25 bp, Homo sapien
ctagttctcctgactaggcgaccgg

SEQ ID NO: 1164995 - DNA, 25 bp, Homo sapien
agttctcctgactaggcgaccggca

SEQ ID NO: 1164996 - DNA, 25 bp, Homo sapien
ttctcctgactaggcgaccggcaca

SEQ ID NO: 1164997 - DNA, 25 bp, Homo sapien
tcctgactaggcgaccggcacacac

SEQ ID NO: 1164998 - DNA, 25 bp, Homo sapien
tccttggagggacagaacactacca

SEQ ID NO: 1164999 - DNA, 25 bp, Homo sapien
ctaacgaggctgaagaagtaccatc

SEQ ID NO: 1165000 - DNA, 25 bp, Homo sapien
tccatgagtaagtgcgtcaagggca

SEQ ID NO: 1165001 - DNA, 25 bp, Homo sapien
tttcacacattaaccctggaggcat

SEQ ID NO: 1165002 - DNA, 25 bp, Homo sapien
ccggccttgcatgggcttttgaaca

SEQ ID NO: 1165003 - DNA, 25 bp, Homo sapien
caagtagatccttccggtaatttat

SEQ ID NO: 1165004 - DNA, 25 bp, Homo sapien
tttaatcgtccgtatttctgctgca

SEQ ID NO: 1165005 - DNA, 25 bp, Homo sapien
aactactagatcaagtaaactttgg

SEQ ID NO: 1165006 - DNA, 25 bp, Homo sapien
aaactagagtctaaagattgttact

SEQ ID NO: 1165007 - DNA, 25 bp, Homo sapien
taagattatctacctcaaagtgttg

SEQ ID NO: 1165008 - DNA, 25 bp, Homo sapien
agtctaaagattgttactggacttc

SEQ ID NO: 1165009 - DNA, 25 bp, Homo sapien
taaaatgagggtaagattatctacc

SEQ ID NO: 1165010 - DNA, 25 bp, Homo sapien
tcaatgactgaccaatgggagcacg

SEQ ID NO: 1165011 - DNA, 25 bp, Homo sapien
gagtcatgctgatgtccacagatgg

SEQ ID NO: 1165012 - DNA, 25 bp, Homo sapien
aaactactatggaagggactatgac

SEQ ID NO: 1165013 - DNA, 25 bp, Homo sapien
tggatgtcaaaagccgatgatgtca

SEQ ID NO: 1165014 - DNA, 25 bp, Homo sapien
taaagcagacaacctagactaaatc

SEQ ID NO: 1165015 - DNA, 25 bp, Homo sapien
tctcaaaagtctcaccctaaagcag

SEQ ID NO: 1165016 - DNA, 25 bp, Homo sapien
aaagtctcaccctaaagcagacaac

SEQ ID NO: 1165017 - DNA, 25 bp, Homo sapien
tctcaccctaaagcagacaacctag

SEQ ID NO: 1165018 - DNA, 25 bp, Homo sapien
tagagataagccttcctatggtgcc

SEQ ID NO: 1165019 - DNA, 25 bp, Homo sapien
ccatgctctgcctcaagtttgttat

SEQ ID NO: 1165020 - DNA, 25 bp, Homo sapien
atgcccattgcctggttaattaaaa

SEQ ID NO: 1165021 - DNA, 25 bp, Homo sapien
agctgggaccatacatgcccattgc

SEQ ID NO: 1165022 - DNA, 25 bp, Homo sapien
acatggcaaagaccgagtgtttttc

SEQ ID NO: 1165023 - DNA, 25 bp, Homo sapien
atggcaaagaccgagtgtttttccg

SEQ ID NO: 1165024 - DNA, 25 bp, Homo sapien
tgaataacatggcaaagaccgagtg

SEQ ID NO: 1165025 - DNA, 25 bp, Homo sapien
taacatggcaaagaccgagtgtttt

SEQ ID NO: 1165026 - DNA, 25 bp, Homo sapien
gatcaaagcgctgtttgttgtagtt

SEQ ID NO: 1165027 - DNA, 25 bp, Homo sapien
ttggactgcagaacatcccggcaat

SEQ ID NO: 1165028 - DNA, 25 bp, Homo sapien
gtagttggactgcagaacatcccgg

SEQ ID NO: 1165029 - DNA, 25 bp, Homo sapien
tgatcaaagcgctgtttgttgtagt

SEQ ID NO: 1165030 - DNA, 25 bp, Homo sapien
tagcactcaaattctgggagtcttg

SEQ ID NO: 1165031 - DNA, 25 bp, Homo sapien
cagaatccatataaagactacctag

SEQ ID NO: 1165032 - DNA, 25 bp, Homo sapien
caggaagcactcatttgttgtttgt

SEQ ID NO: 1165033 - DNA, 25 bp, Homo sapien
ggcacaaggaggacagaatccatat

SEQ ID NO: 1165034 - DNA, 25 bp, Homo sapien
gctgctccacggggccgccgcgcct

SEQ ID NO: 1165035 - DNA, 25 bp, Homo sapien
actgcgctgctccacggggccgccg

SEQ ID NO: 1165036 - DNA, 25 bp, Homo sapien
gctccacggggccgccgcgcctcag

SEQ ID NO: 1165037 - DNA, 25 bp, Homo sapien
cgctgctccacggggccgccgcgcc

SEQ ID NO: 1165038 - DNA, 25 bp, Homo sapien
cgaaaccggcaaaatgtcccaactg

SEQ ID NO: 1165039 - DNA, 25 bp, Homo sapien
aactgcagtgtgagcacctcccggg

SEQ ID NO: 1165040 - DNA, 25 bp, Homo sapien
tgctggttccaccagtgcgcgccca

SEQ ID NO: 1165041 - DNA, 25 bp, Homo sapien
gtcccaactgcagtgtgagcacctc

SEQ ID NO: 1165042 - DNA, 25 bp, Homo sapien
gggactgtagatcccgaagggctcc

SEQ ID NO: 1165043 - DNA, 25 bp, Homo sapien
tcgggactgtagatcccgaagggct

SEQ ID NO: 1165044 - DNA, 25 bp, Homo sapien
gaacgtcgggactgtagatcccgaa

SEQ ID NO: 1165045 - DNA, 25 bp, Homo sapien
ctgaacgtcgggactgtagatcccg

SEQ ID NO: 1165046 - DNA, 25 bp, Homo sapien
gggaagcagagaggacgaggcaggc

SEQ ID NO: 1165047 - DNA, 25 bp, Homo sapien
ctggggaagcagagaggacgaggca

SEQ ID NO: 1165048 - DNA, 25 bp, Homo sapien
gaagcagagaggacgaggcaggccg

SEQ ID NO: 1165049 - DNA, 25 bp, Homo sapien
tggggaagcagagaggacgaggcag

SEQ ID NO: 1165050 - DNA, 25 bp, Homo sapien
atgagtcgcggcgtgtaggtctcct

SEQ ID NO: 1165051 - DNA, 25 bp, Homo sapien
ggctccttggaatcggtcgctcggc

SEQ ID NO: 1165052 - DNA, 25 bp, Homo sapien
ccatgaggatgagtcgcggcgtgta

SEQ ID NO: 1165053 - DNA, 25 bp, Homo sapien
cggcccgtacgatacaggacgtcgg

SEQ ID NO: 1165054 - DNA, 25 bp, Homo sapien
tcttgagcaactgtcgtgggcccct

SEQ ID NO: 1165055 - DNA, 25 bp, Homo sapien
gcctattcccgaaatggctcttgag

SEQ ID NO: 1165056 - DNA, 25 bp, Homo sapien
tgtctccagggcctagcagcctatt

SEQ ID NO: 1165057 - DNA, 25 bp, Homo sapien
cgagtgttggcatgttgtgctcagc

SEQ ID NO: 1165058 - DNA, 25 bp, Homo sapien
catctttcggttcccagcttagtca

SEQ ID NO: 1165059 - DNA, 25 bp, Homo sapien
cttagtcattagctgtgggacgcgg

SEQ ID NO: 1165060 - DNA, 25 bp, Homo sapien
ggcttaggagaatctagattccatc

SEQ ID NO: 1165061 - DNA, 25 bp, Homo sapien
gcttagtcattagctgtgggacgcg

SEQ ID NO: 1165062 - DNA, 25 bp, Homo sapien
ttcccctctagctaaccttcctctg

SEQ ID NO: 1165063 - DNA, 25 bp, Homo sapien
ctgggcacccttcccctctagctaa

SEQ ID NO: 1165064 - DNA, 25 bp, Homo sapien
ataacagagacaatgttaggtcaaa

SEQ ID NO: 1165065 - DNA, 25 bp, Homo sapien
cctctagctaaccttcctctgatca

SEQ ID NO: 1165066 - DNA, 25 bp, Homo sapien
tcctcttttagggagctcaaactac

SEQ ID NO: 1165067 - DNA, 25 bp, Homo sapien
tccaactgtttgtccctgtagagtc

SEQ ID NO: 1165068 - DNA, 25 bp, Homo sapien
caccttcctcttttagggagctcaa

SEQ ID NO: 1165069 - DNA, 25 bp, Homo sapien
catgctattgcagcatccaactgtt

SEQ ID NO: 1165070 - DNA, 25 bp, Homo sapien
tctgatcagagttatccagcgttct

SEQ ID NO: 1165071 - DNA, 25 bp, Homo sapien
gttctgcgtacatacacgatcccca

SEQ ID NO: 1165072 - DNA, 25 bp, Homo sapien
aaagagtttggagattgatcaaaga

SEQ ID NO: 1165073 - DNA, 25 bp, Homo sapien
cacccttatccatacatcagttaca

SEQ ID NO: 1165074 - DNA, 25 bp, Homo sapien
tttgtgtgtggtgagcttcccctgc

SEQ ID NO: 1165075 - DNA, 25 bp, Homo sapien
ctttgtgtgtggtgagcttcccctg

SEQ ID NO: 1165076 - DNA, 25 bp, Homo sapien
aaagtcttggagataagggttcttg

SEQ ID NO: 1165077 - DNA, 25 bp, Homo sapien
aagtcttggagataagggttcttgg

SEQ ID NO: 1165078 - DNA, 25 bp, Homo sapien
gataagggttcttgggatagagttc

SEQ ID NO: 1165079 - DNA, 25 bp, Homo sapien
ggagataagggttcttgggatagag

SEQ ID NO: 1165080 - DNA, 25 bp, Homo sapien
ctgcccctatggagaccctcgggtt

SEQ ID NO: 1165081 - DNA, 25 bp, Homo sapien
tatggagaccctcgggttgtggcac

SEQ ID NO: 1165082 - DNA, 25 bp, Homo sapien
taaaaagttcaggacagaggccctc

SEQ ID NO: 1165083 - DNA, 25 bp, Homo sapien
cccctatggagaccctcgggttgtg

SEQ ID NO: 1165084 - DNA, 25 bp, Homo sapien
ttcccaaaatatcattctaagacac

SEQ ID NO: 1165085 - DNA, 25 bp, Homo sapien
tccttgagttggctggccacaccgc

SEQ ID NO: 1165086 - DNA, 25 bp, Homo sapien
ggtcagaaaaatcgacatttagttc

SEQ ID NO: 1165087 - DNA, 25 bp, Homo sapien
aaaatcgacatttagttccaggcag

SEQ ID NO: 1165088 - DNA, 25 bp, Homo sapien
caggcagtttagaggcaaaggttgc

SEQ ID NO: 1165089 - DNA, 25 bp, Homo sapien
tttgccattgggaatggatttgacc

SEQ ID NO: 1165090 - DNA, 25 bp, Homo sapien
cattgggaatggatttgaccctcca

SEQ ID NO: 1165091 - DNA, 25 bp, Homo sapien
ttgggaatggatttgaccctccaga

SEQ ID NO: 1165092 - DNA, 25 bp, Homo sapien
tgccattgggaatggatttgaccct

SEQ ID NO: 1165093 - DNA, 25 bp, Homo sapien
ataagtggttttggagttgtagcgg

SEQ ID NO: 1165094 - DNA, 25 bp, Homo sapien
aagtggttttggagttgtagcggtg

SEQ ID NO: 1165095 - DNA, 25 bp, Homo sapien
agtggttttggagttgtagcggtgg

SEQ ID NO: 1165096 - DNA, 25 bp, Homo sapien
ggataagtggttttggagttgtagc

SEQ ID NO: 1165097 - DNA, 25 bp, Homo sapien
atggagatggactctgaggaagtct

SEQ ID NO: 1165098 - DNA, 25 bp, Homo sapien
tctgaccagaccctgatgctggcct

SEQ ID NO: 1165099 - DNA, 25 bp, Homo sapien
gactctgaggaagtctgaccagacc

SEQ ID NO: 1165100 - DNA, 25 bp, Homo sapien
cagatgctccggggatggagatgga

SEQ ID NO: 1165101 - DNA, 25 bp, Homo sapien
catcgtggttgtacttctgaatcat

SEQ ID NO: 1165102 - DNA, 25 bp, Homo sapien
ccatcgtggttgtacttctgaatca

SEQ ID NO: 1165103 - DNA, 25 bp, Homo sapien
ctcaaagcctctggggtccccatac

SEQ ID NO: 1165104 - DNA, 25 bp, Homo sapien
atctcttccctcaactcctcagcct

SEQ ID NO: 1165105 - DNA, 25 bp, Homo sapien
ctcttccctcaactcctcagcctct

SEQ ID NO: 1165106 - DNA, 25 bp, Homo sapien
tccctcaactcctcagcctcttgtc

SEQ ID NO: 1165107 - DNA, 25 bp, Homo sapien
cttccctcaactcctcagcctcttg

SEQ ID NO: 1165108 - DNA, 25 bp, Homo sapien
cattcctccacgtagaaatgcagcc

SEQ ID NO: 1165109 - DNA, 25 bp, Homo sapien
ttcctccacgtagaaatgcagcctg

SEQ ID NO: 1165110 - DNA, 25 bp, Homo sapien
gtcacattcctccacgtagaaatgc

SEQ ID NO: 1165111 - DNA, 25 bp, Homo sapien
cacattcctccacgtagaaatgcag

SEQ ID NO: 1165112 - DNA, 25 bp, Homo sapien
tggagtgcacattgccacgccacta

SEQ ID NO: 1165113 - DNA, 25 bp, Homo sapien
gaagagcttccaccctggagtgcac

SEQ ID NO: 1165114 - DNA, 25 bp, Homo sapien
ctggagtgcacattgccacgccact

SEQ ID NO: 1165115 - DNA, 25 bp, Homo sapien
ttccaccctggagtgcacattgcca

SEQ ID NO: 1165116 - DNA, 25 bp, Homo sapien
cccacgatggtagggaccaggtagc

SEQ ID NO: 1165117 - DNA, 25 bp, Homo sapien
ttgtagcagctctgccgccttcgcg

SEQ ID NO: 1165118 - DNA, 25 bp, Homo sapien
ttattccccgccctgaatattcatc

SEQ ID NO: 1165119 - DNA, 25 bp, Homo sapien
cgccttcgcgcctaccccagagaag

SEQ ID NO: 1165120 - DNA, 25 bp, Homo sapien
aaagctgtgtttaatagacgataga

SEQ ID NO: 1165121 - DNA, 25 bp, Homo sapien
agcagtcaggtgcacgagaccaaaa

SEQ ID NO: 1165122 - DNA, 25 bp, Homo sapien
aggtgcacgagaccaaaagctgtgt

SEQ ID NO: 1165123 - DNA, 25 bp, Homo sapien
gtgtttaatagacgatagatgtttc

SEQ ID NO: 1165124 - DNA, 25 bp, Homo sapien
cagtaacagacagcggctgactggg

SEQ ID NO: 1165125 - DNA, 25 bp, Homo sapien
agccagtaacagacagcggctgact

SEQ ID NO: 1165126 - DNA, 25 bp, Homo sapien
gtaacagacagcggctgactgggag

SEQ ID NO: 1165127 - DNA, 25 bp, Homo sapien
gccagtaacagacagcggctgactg

SEQ ID NO: 1165128 - DNA, 25 bp, Homo sapien
gaagacaccaagatgggcacttggc

SEQ ID NO: 1165129 - DNA, 25 bp, Homo sapien
agacaccaagatgggcacttggcct

SEQ ID NO: 1165130 - DNA, 25 bp, Homo sapien
taagaagacaccaagatgggcactt

SEQ ID NO: 1165131 - DNA, 25 bp, Homo sapien
tgtaagaagacaccaagatgggcac

SEQ ID NO: 1165132 - DNA, 25 bp, Homo sapien
gataaggaacagtgactgtgtccag

SEQ ID NO: 1165133 - DNA, 25 bp, Homo sapien
cacaggcgataaggaacagtgactg

SEQ ID NO: 1165134 - DNA, 25 bp, Homo sapien
caggcgataaggaacagtgactgtg

SEQ ID NO: 1165135 - DNA, 25 bp, Homo sapien
aggaacacaggcgataaggaacagt

SEQ ID NO: 1165136 - DNA, 25 bp, Homo sapien
ggaaagggatgattgctcctgctgt

SEQ ID NO: 1165137 - DNA, 25 bp, Homo sapien
tcctccaaactgcatcagggaatca

SEQ ID NO: 1165138 - DNA, 25 bp, Homo sapien
gcaaagcaacgtgttccagaaggct

SEQ ID NO: 1165139 - DNA, 25 bp, Homo sapien
cactgactgggcaaagcaacgtgtt

SEQ ID NO: 1165140 - DNA, 25 bp, Homo sapien
cttgtgtggcatgctctgtctatac

SEQ ID NO: 1165141 - DNA, 25 bp, Homo sapien
acaaagccaaaaccaccattagtct

SEQ ID NO: 1165142 - DNA, 25 bp, Homo sapien
tccccagtggtacatgcatgaaggg

SEQ ID NO: 1165143 - DNA, 25 bp, Homo sapien
ttccccagtggtacatgcatgaagg

SEQ ID NO: 1165144 - DNA, 25 bp, Homo sapien
ccccagtggtacatgcatgaagggc

SEQ ID NO: 1165145 - DNA, 25 bp, Homo sapien
aaatactgagccaagatttcttccc

SEQ ID NO: 1165146 - DNA, 25 bp, Homo sapien
cagggagtcagcagcagatgggaag

SEQ ID NO: 1165147 - DNA, 25 bp, Homo sapien
ctgcagggagtcagcagcagatggg

SEQ ID NO: 1165148 - DNA, 25 bp, Homo sapien
gcagggagtcagcagcagatgggaa

SEQ ID NO: 1165149 - DNA, 25 bp, Homo sapien
gggagtcagcagcagatgggaagaa

SEQ ID NO: 1165150 - DNA, 25 bp, Homo sapien
tgagaagaggtgggggtaaggagga

SEQ ID NO: 1165151 - DNA, 25 bp, Homo sapien
cttgagaagaggtgggggtaaggag

SEQ ID NO: 1165152 - DNA, 25 bp, Homo sapien
ttgggggaaccatccagaaccatac

SEQ ID NO: 1165153 - DNA, 25 bp, Homo sapien
ctgctcccttgggggaaccatccag

SEQ ID NO: 1165154 - DNA, 25 bp, Homo sapien
gctcccttgggggaaccatccagaa

SEQ ID NO: 1165155 - DNA, 25 bp, Homo sapien
ccttgggggaaccatccagaaccat

SEQ ID NO: 1165156 - DNA, 25 bp, Homo sapien
actctcccatacttgaaatctcagt

SEQ ID NO: 1165157 - DNA, 25 bp, Homo sapien
aaactctcccatacttgaaatctca

SEQ ID NO: 1165158 - DNA, 25 bp, Homo sapien
aactctcccatacttgaaatctcag

SEQ ID NO: 1165159 - DNA, 25 bp, Homo sapien
ctgtggagggagaggaaacagagac

SEQ ID NO: 1165160 - DNA, 25 bp, Homo sapien
aagaggaacacagtgccccaaacac

SEQ ID NO: 1165161 - DNA, 25 bp, Homo sapien
aagctggcccagcgccgcaagtcga

SEQ ID NO: 1165162 - DNA, 25 bp, Homo sapien
cagcgccgcaagtcgagtttggtga

SEQ ID NO: 1165163 - DNA, 25 bp, Homo sapien
gggtctggtgcagggacgaagagga

SEQ ID NO: 1165164 - DNA, 25 bp, Homo sapien
ctctgctacgtcatcgtgctccact

SEQ ID NO: 1165165 - DNA, 25 bp, Homo sapien
tgctacgtcatcgtgctccactcca

SEQ ID NO: 1165166 - DNA, 25 bp, Homo sapien
ttagtccacgaggctgtcaccaccc

SEQ ID NO: 1165167 - DNA, 25 bp, Homo sapien
tctgctacgtcatcgtgctccactc

SEQ ID NO: 1165168 - DNA, 25 bp, Homo sapien
tgtttttattgcaaactagctcctt

SEQ ID NO: 1165169 - DNA, 25 bp, Homo sapien
tttattgcaaactagctcctttctc

SEQ ID NO: 1165170 - DNA, 25 bp, Homo sapien
tttttattgcaaactagctcctttc

SEQ ID NO: 1165171 - DNA, 25 bp, Homo sapien
tattgcaaactagctcctttctccc

SEQ ID NO: 1165172 - DNA, 25 bp, Homo sapien
atgttggtgtagctagtcccgcgac

SEQ ID NO: 1165173 - DNA, 25 bp, Homo sapien
ggtgtagctagtcccgcgacattga

SEQ ID NO: 1165174 - DNA, 25 bp, Homo sapien
gctagtcccgcgacattgagctcct

SEQ ID NO: 1165175 - DNA, 25 bp, Homo sapien
aaaaagtgcatatgttggtgtagct

SEQ ID NO: 1165176 - DNA, 25 bp, Homo sapien
acatgttactaaggatcagtgaata

SEQ ID NO: 1165177 - DNA, 25 bp, Homo sapien
aatgttaacatgttactaaggatca

SEQ ID NO: 1165178 - DNA, 25 bp, Homo sapien
gttaacatgttactaaggatcagtg

SEQ ID NO: 1165179 - DNA, 25 bp, Homo sapien
taaatgttaacatgttactaaggat

SEQ ID NO: 1165180 - DNA, 25 bp, Homo sapien
tacaggtgcccaccacccagccaat

SEQ ID NO: 1165181 - DNA, 25 bp, Homo sapien
caggtgcccaccacccagccaattt

SEQ ID NO: 1165182 - DNA, 25 bp, Homo sapien
gattacaggtgcccaccacccagcc

SEQ ID NO: 1165183 - DNA, 25 bp, Homo sapien
attacaggtgcccaccacccagcca

SEQ ID NO: 1165184 - DNA, 25 bp, Homo sapien
tacctgggttacagggaagctgacc

SEQ ID NO: 1165185 - DNA, 25 bp, Homo sapien
gaagctgaccgtgtgatcctcacca

SEQ ID NO: 1165186 - DNA, 25 bp, Homo sapien
cagcagctgggaaataagacccctg

SEQ ID NO: 1165187 - DNA, 25 bp, Homo sapien
caaggtggccaactaagagacagaa

SEQ ID NO: 1165188 - DNA, 25 bp, Homo sapien
ggagtctgaggctatagtgtaccac

SEQ ID NO: 1165189 - DNA, 25 bp, Homo sapien
aaaatctttggagcagtagctaggc

SEQ ID NO: 1165190 - DNA, 25 bp, Homo sapien
tcaggaggctcacaccagaagatca

SEQ ID NO: 1165191 - DNA, 25 bp, Homo sapien
tacctgtgtaaacaggcactgcact

SEQ ID NO: 1165192 - DNA, 25 bp, Homo sapien
tattgtcaaccaatggatgccctgg

SEQ ID NO: 1165193 - DNA, 25 bp, Homo sapien
cagcagtagccctccagaattggaa

SEQ ID NO: 1165194 - DNA, 25 bp, Homo sapien
ttcgagaccagatacagtgccaggc

SEQ ID NO: 1165195 - DNA, 25 bp, Homo sapien
aatagtgcaggcttcaagagctcag

SEQ ID NO: 1165196 - DNA, 25 bp, Homo sapien
ttatagattgggcacctcgaggtca

SEQ ID NO: 1165197 - DNA, 25 bp, Homo sapien
tcctatttgcctagggagagcacca

SEQ ID NO: 1165198 - DNA, 25 bp, Homo sapien
aattgcagtctttctacccttggga

SEQ ID NO: 1165199 - DNA, 25 bp, Homo sapien
aaactcagtcgtgtccaagtgcaca

SEQ ID NO: 1165200 - DNA, 25 bp, Homo sapien
aactgacaatggaccaggatattgt

SEQ ID NO: 1165201 - DNA, 25 bp, Homo sapien
ttatattactcatattcgagcacac

SEQ ID NO: 1165202 - DNA, 25 bp, Homo sapien
caggatattgtagtaaagctttcca

SEQ ID NO: 1165203 - DNA, 25 bp, Homo sapien
tatattactcatattcgagcacaca

SEQ ID NO: 1165204 - DNA, 25 bp, Homo sapien
aaccccagtgtaaggaagttcatca

SEQ ID NO: 1165205 - DNA, 25 bp, Homo sapien
tcagaccctgattctggacccagca

SEQ ID NO: 1165206 - DNA, 25 bp, Homo sapien
tgaacaacatcagatagcgaaggaa

SEQ ID NO: 1165207 - DNA, 25 bp, Homo sapien
gaagaaaccttcagccaaacagcag

SEQ ID NO: 1165208 - DNA, 25 bp, Homo sapien
tagaatttaagttcaatgagattag

SEQ ID NO: 1165209 - DNA, 25 bp, Homo sapien
cattctctcatatatcccaagcatc

SEQ ID NO: 1165210 - DNA, 25 bp, Homo sapien
aatgaatgaaggatagctgggcgtg

SEQ ID NO: 1165211 - DNA, 25 bp, Homo sapien
atcatctagctcacattttctcctt

SEQ ID NO: 1165212 - DNA, 25 bp, Homo sapien
tccaatataggatcttttagtactg

SEQ ID NO: 1165213 - DNA, 25 bp, Homo sapien
ttagtactggtataggattcctgaa

SEQ ID NO: 1165214 - DNA, 25 bp, Homo sapien
ctatctcaggacttattaatttggg

SEQ ID NO: 1165215 - DNA, 25 bp, Homo sapien
tacagtgatggacaaaacaagatcc

SEQ ID NO: 1165216 - DNA, 25 bp, Homo sapien
tctcagcgattgaatcctgggcttt

SEQ ID NO: 1165217 - DNA, 25 bp, Homo sapien
taagcactctctcagcgattgaatc

SEQ ID NO: 1165218 - DNA, 25 bp, Homo sapien
cactctctcagcgattgaatcctgg

SEQ ID NO: 1165219 - DNA, 25 bp, Homo sapien
tctctcagcgattgaatcctgggct

SEQ ID NO: 1165220 - DNA, 25 bp, Homo sapien
ctcggcctccgacacggtgagtaga

SEQ ID NO: 1165221 - DNA, 25 bp, Homo sapien
cctccgacacggtgagtagaacgat

SEQ ID NO: 1165222 - DNA, 25 bp, Homo sapien
cacggtgagtagaacgatttgggcc

SEQ ID NO: 1165223 - DNA, 25 bp, Homo sapien
tgagtagaacgatttgggccggcat

SEQ ID NO: 1165224 - DNA, 25 bp, Homo sapien
gcctcctgacaagcgggagggatcc

SEQ ID NO: 1165225 - DNA, 25 bp, Homo sapien
tggacccagggaagcggaggagcct

SEQ ID NO: 1165226 - DNA, 25 bp, Homo sapien
gctggccgcctcctgacaagcggga

SEQ ID NO: 1165227 - DNA, 25 bp, Homo sapien
ccgcctcctgacaagcgggagggat

SEQ ID NO: 1165228 - DNA, 25 bp, Homo sapien
ggaagaacgcgaggagggaggagtg

SEQ ID NO: 1165229 - DNA, 25 bp, Homo sapien
cctcctctcagtttgcccctttagc

SEQ ID NO: 1165230 - DNA, 25 bp, Homo sapien
gggtgtcgctaggcgcccttagctc

SEQ ID NO: 1165231 - DNA, 25 bp, Homo sapien
ttcgctttgcgaggggaaacgatcc

SEQ ID NO: 1165232 - DNA, 25 bp, Homo sapien
agcgacgagcccgtagacactcgta

SEQ ID NO: 1165233 - DNA, 25 bp, Homo sapien
cgtagacactcgtacgcgtgcgggc

SEQ ID NO: 1165234 - DNA, 25 bp, Homo sapien
gagcccgtagacactcgtacgcgtg

SEQ ID NO: 1165235 - DNA, 25 bp, Homo sapien
gagcagccagcgacgagcccgtaga

SEQ ID NO: 1165236 - DNA, 25 bp, Homo sapien
ggcgaggaggttcccgtgggtgagc

SEQ ID NO: 1165237 - DNA, 25 bp, Homo sapien
gcgaggaggttcccgtgggtgagcg

SEQ ID NO: 1165238 - DNA, 25 bp, Homo sapien
ctgggcgaggaggttcccgtgggtg

SEQ ID NO: 1165239 - DNA, 25 bp, Homo sapien
tgggcgaggaggttcccgtgggtga

SEQ ID NO: 1165240 - DNA, 25 bp, Homo sapien
tgcgctggagccggcttgacagggt

SEQ ID NO: 1165241 - DNA, 25 bp, Homo sapien
gttgtcatgggactcggccggccac

SEQ ID NO: 1165242 - DNA, 25 bp, Homo sapien
cgcggcgacgaacccagggaggtag

SEQ ID NO: 1165243 - DNA, 25 bp, Homo sapien
gccggccaccctggcaattccagtc

SEQ ID NO: 1165244 - DNA, 25 bp, Homo sapien
gcaagccagactcgctttgccggtc

SEQ ID NO: 1165245 - DNA, 25 bp, Homo sapien
ggccggctccaaagcgcccgtcctg

SEQ ID NO: 1165246 - DNA, 25 bp, Homo sapien
cgcccgtcctgagactgcaaaaaag

SEQ ID NO: 1165247 - DNA, 25 bp, Homo sapien
aggcgaccgacacacgctgcctggg

SEQ ID NO: 1165248 - DNA, 25 bp, Homo sapien
cagactaggcgaccgacacacgctg

SEQ ID NO: 1165249 - DNA, 25 bp, Homo sapien
tcagcggtacaatacccgtgtcggt

SEQ ID NO: 1165250 - DNA, 25 bp, Homo sapien
tcctttccctcagcggtacaatacc

SEQ ID NO: 1165251 - DNA, 25 bp, Homo sapien
tacaatacccgtgtcggtccattcc

SEQ ID NO: 1165252 - DNA, 25 bp, Homo sapien
cctggaggtccggagtcccgctcct

SEQ ID NO: 1165253 - DNA, 25 bp, Homo sapien
tcgagaaatccgaggagggttaaca

SEQ ID NO: 1165254 - DNA, 25 bp, Homo sapien
gacagtggtgtgaaattcgagaaat

SEQ ID NO: 1165255 - DNA, 25 bp, Homo sapien
tgaaattcgagaaatccgaggaggg

SEQ ID NO: 1165256 - DNA, 25 bp, Homo sapien
ggtgtgaaattcgagaaatccgagg

SEQ ID NO: 1165257 - DNA, 25 bp, Homo sapien
tgagccaccgcgcccagccctatct

SEQ ID NO: 1165258 - DNA, 25 bp, Homo sapien
tgtcatccacctgcctcggcctccc

SEQ ID NO: 1165259 - DNA, 25 bp, Homo sapien
tgtctcgatctcttcaccttgtcat

SEQ ID NO: 1165260 - DNA, 25 bp, Homo sapien
attgtctcgatctcttcaccttgtc

SEQ ID NO: 1165261 - DNA, 25 bp, Homo sapien
acaggatccagtagaagattccaca

SEQ ID NO: 1165262 - DNA, 25 bp, Homo sapien
gattccacatctggagatcttttcc

SEQ ID NO: 1165263 - DNA, 25 bp, Homo sapien
gagttgcaaaggtagtacaaagtgc

SEQ ID NO: 1165264 - DNA, 25 bp, Homo sapien
ccagccttggcgacatagatcctat

SEQ ID NO: 1165265 - DNA, 25 bp, Homo sapien
gaccgttagagaatcaactatcgca

SEQ ID NO: 1165266 - DNA, 25 bp, Homo sapien
tacaatgctactgaacatcactggg

SEQ ID NO: 1165267 - DNA, 25 bp, Homo sapien
aaattgtggaattatcagacccgga

SEQ ID NO: 1165268 - DNA, 25 bp, Homo sapien
cagacccggatagaccaacaattgg

SEQ ID NO: 1165269 - DNA, 25 bp, Homo sapien
tcaaccaattttggtatagccggcc

SEQ ID NO: 1165270 - DNA, 25 bp, Homo sapien
gatacaagacaggactaaaacagga

SEQ ID NO: 1165271 - DNA, 25 bp, Homo sapien
gaaaaacatgcccagtttcccataa

SEQ ID NO: 1165272 - DNA, 25 bp, Homo sapien
gaattgtcactgattggtcccctaa

SEQ ID NO: 1165273 - DNA, 25 bp, Homo sapien
aacattactagtcattaagcgttgg

SEQ ID NO: 1165274 - DNA, 25 bp, Homo sapien
ttgagtaggcatttctccagagtag

SEQ ID NO: 1165275 - DNA, 25 bp, Homo sapien
gtaggcatttctccagagtagttat

SEQ ID NO: 1165276 - DNA, 25 bp, Homo sapien
tcattaagcgttgggaaaaaggctc

SEQ ID NO: 1165277 - DNA, 25 bp, Homo sapien
gatcaaccaggtacagaatcagttt

SEQ ID NO: 1165278 - DNA, 25 bp, Homo sapien
ttttctatcaaacagcctggcaggg

SEQ ID NO: 1165279 - DNA, 25 bp, Homo sapien
tttaaaagcactacgaaacctgctg

SEQ ID NO: 1165280 - DNA, 25 bp, Homo sapien
tacttccctccatgagttctgagac

SEQ ID NO: 1165281 - DNA, 25 bp, Homo sapien
ccatagagttgcaaccaattaaccc

SEQ ID NO: 1165282 - DNA, 25 bp, Homo sapien
tacagtcaagagaatcacataggct

SEQ ID NO: 1165283 - DNA, 25 bp, Homo sapien
gtccctgatcttatagtcaaggaat

SEQ ID NO: 1165284 - DNA, 25 bp, Homo sapien
gctctgtgaatggaatggtgaacaa

SEQ ID NO: 1165285 - DNA, 25 bp, Homo sapien
cttatggatcctagagataagcctt

SEQ ID NO: 1165286 - DNA, 25 bp, Homo sapien
ttatggatcctagagataagccttg

SEQ ID NO: 1165287 - DNA, 25 bp, Homo sapien
tatggatcctagagataagccttgt

SEQ ID NO: 1165288 - DNA, 25 bp, Homo sapien
tggatcctagagataagccttgtta

SEQ ID NO: 1165289 - DNA, 25 bp, Homo sapien
tatctaccggagagaaagcaccatg

SEQ ID NO: 1165290 - DNA, 25 bp, Homo sapien
tacaaggcttgttacttcagggtag

SEQ ID NO: 1165291 - DNA, 25 bp, Homo sapien
gttgcgatgtatcccaagaaggtaa

SEQ ID NO: 1165292 - DNA, 25 bp, Homo sapien
caaactattcaagggtcacaaggtg

SEQ ID NO: 1165293 - DNA, 25 bp, Homo sapien
tctcggactctcaactggaacctgg

SEQ ID NO: 1165294 - DNA, 25 bp, Homo sapien
cagcaatgctttggcgagcctgggt

SEQ ID NO: 1165295 - DNA, 25 bp, Homo sapien
tggaacctggttatctaggtgagca

SEQ ID NO: 1165296 - DNA, 25 bp, Homo sapien
tcattggtgcgggaaatagctctcg

SEQ ID NO: 1165297 - DNA, 25 bp, Homo sapien
acctggaccactcatctcttaaagc

SEQ ID NO: 1165298 - DNA, 25 bp, Homo sapien
gcacctggaccactcatctcttaaa

SEQ ID NO: 1165299 - DNA, 25 bp, Homo sapien
tgcacctggaccactcatctcttaa

SEQ ID NO: 1165300 - DNA, 25 bp, Homo sapien
actgcacctggaccactcatctctt

SEQ ID NO: 1165301 - DNA, 25 bp, Homo sapien
gggagatgttgtagtgctgaccctc

SEQ ID NO: 1165302 - DNA, 25 bp, Homo sapien
gtagtgctgaccctcgtgctgatcc

SEQ ID NO: 1165303 - DNA, 25 bp, Homo sapien
gatgttgtagtgctgaccctcgtgc

SEQ ID NO: 1165304 - DNA, 25 bp, Homo sapien
cctcgtgctgatccccatgcttggc

SEQ ID NO: 1165305 - DNA, 25 bp, Homo sapien
cagcagcttgtattctgggctccct

SEQ ID NO: 1165306 - DNA, 25 bp, Homo sapien
ccctttgctagcagcagcttgtatt

SEQ ID NO: 1165307 - DNA, 25 bp, Homo sapien
ctagcagcagcttgtattctgggct

SEQ ID NO: 1165308 - DNA, 25 bp, Homo sapien
cagcttgtattctgggctccctcca

SEQ ID NO: 1165309 - DNA, 25 bp, Homo sapien
aaaggtaatcaacacatgaatttct

SEQ ID NO: 1165310 - DNA, 25 bp, Homo sapien
gcttaaagtaattgtactagtcaca

SEQ ID NO: 1165311 - DNA, 25 bp, Homo sapien
tactggaatcttcttgggctataca

SEQ ID NO: 1165312 - DNA, 25 bp, Homo sapien
gctcaggagtgtactatgattttgc

SEQ ID NO: 1165313 - DNA, 25 bp, Homo sapien
ccttgcctggcctgttataccttat

SEQ ID NO: 1165314 - DNA, 25 bp, Homo sapien
tgcctggcctgttataccttatttt

SEQ ID NO: 1165315 - DNA, 25 bp, Homo sapien
tctaaataaagatacagtctcatta

SEQ ID NO: 1165316 - DNA, 25 bp, Homo sapien
ttctaaataaagatacagtctcatt

SEQ ID NO: 1165317 - DNA, 25 bp, Homo sapien
aggcaagcttcactgaatgtcttca

SEQ ID NO: 1165318 - DNA, 25 bp, Homo sapien
caggcaagcttcactgaatgtcttc

SEQ ID NO: 1165319 - DNA, 25 bp, Homo sapien
aatgcagaagttctagggctggttt

SEQ ID NO: 1165320 - DNA, 25 bp, Homo sapien
tagctggataagcaaaactggtgtt

SEQ ID NO: 1165321 - DNA, 25 bp, Homo sapien
acagaagatatcgtatagctggata

SEQ ID NO: 1165322 - DNA, 25 bp, Homo sapien
taatgcagaagttctagggctggtt

SEQ ID NO: 1165323 - DNA, 25 bp, Homo sapien
aagtatatgttgttaaagaaaacat

SEQ ID NO: 1165324 - DNA, 25 bp, Homo sapien
ataacatggcaaagacttagggttt

SEQ ID NO: 1165325 - DNA, 25 bp, Homo sapien
atgaataacatggcaaagacttagg

SEQ ID NO: 1165326 - DNA, 25 bp, Homo sapien
gaataacatggcaaagacttagggt

SEQ ID NO: 1165327 - DNA, 25 bp, Homo sapien
tgaataacatggcaaagacttaggg

SEQ ID NO: 1165328 - DNA, 25 bp, Homo sapien
ctggaatatgtagtatcagccagtc

SEQ ID NO: 1165329 - DNA, 25 bp, Homo sapien
tctggaatatgtagtatcagccagt

SEQ ID NO: 1165330 - DNA, 25 bp, Homo sapien
atctggaatatgtagtatcagccag

SEQ ID NO: 1165331 - DNA, 25 bp, Homo sapien
catctggaatatgtagtatcagcca

SEQ ID NO: 1165332 - DNA, 25 bp, Homo sapien
aaattaaagctgcaaggctaccaca

SEQ ID NO: 1165333 - DNA, 25 bp, Homo sapien
gctgcaaggctaccacagtaacagg

SEQ ID NO: 1165334 - DNA, 25 bp, Homo sapien
taccacagtaacaggataactaaac

SEQ ID NO: 1165335 - DNA, 25 bp, Homo sapien
ggctaccacagtaacaggataacta

SEQ ID NO: 1165336 - DNA, 25 bp, Homo sapien
cggtgacctgagattgcgcctctgc

SEQ ID NO: 1165337 - DNA, 25 bp, Homo sapien
ccagactggccgacaagagcgaaac

SEQ ID NO: 1165338 - DNA, 25 bp, Homo sapien
ctccagactggccgacaagagcgaa

SEQ ID NO: 1165339 - DNA, 25 bp, Homo sapien
ttgcggtgacctgagattgcgcctc

SEQ ID NO: 1165340 - DNA, 25 bp, Homo sapien
ttttcctttagctatcagatccctg

SEQ ID NO: 1165341 - DNA, 25 bp, Homo sapien
aagtaaagctgaggccgggtgcaat

SEQ ID NO: 1165342 - DNA, 25 bp, Homo sapien
cagatccctgttaggaaagtaaagc

SEQ ID NO: 1165343 - DNA, 25 bp, Homo sapien
tagctatcagatccctgttaggaaa

SEQ ID NO: 1165344 - DNA, 25 bp, Homo sapien
cttataatctgcttggcagtaatat

SEQ ID NO: 1165345 - DNA, 25 bp, Homo sapien
tggcagtaatatcacgaagaaatca

SEQ ID NO: 1165346 - DNA, 25 bp, Homo sapien
atcatgatggatgagctcagtctgc

SEQ ID NO: 1165347 - DNA, 25 bp, Homo sapien
tcatgatggatgagctcagtctgct

SEQ ID NO: 1165348 - DNA, 25 bp, Homo sapien
tactgacgactctagaatgctgata

SEQ ID NO: 1165349 - DNA, 25 bp, Homo sapien
gaaggactgcttagcatcaaaaggc

SEQ ID NO: 1165350 - DNA, 25 bp, Homo sapien
ggcgacctctaaggcagaagtttat

SEQ ID NO: 1165351 - DNA, 25 bp, Homo sapien
taaaaggctctatgggtactcagga

SEQ ID NO: 1165352 - DNA, 25 bp, Homo sapien
actgtattcaactcgaaatattcta

SEQ ID NO: 1165353 - DNA, 25 bp, Homo sapien
caactcgaaatattctatgcctctt

SEQ ID NO: 1165354 - DNA, 25 bp, Homo sapien
ctcttttaagttatgggaaatgact

SEQ ID NO: 1165355 - DNA, 25 bp, Homo sapien
cgaaatattctatgcctcttttaag

SEQ ID NO: 1165356 - DNA, 25 bp, Homo sapien
gttcaggaagcgctcatttgtagtt

SEQ ID NO: 1165357 - DNA, 25 bp, Homo sapien
gatcaaagcgctgtttgttgtagct

SEQ ID NO: 1165358 - DNA, 25 bp, Homo sapien
ctggttcaggaagcgctcatttgta

SEQ ID NO: 1165359 - DNA, 25 bp, Homo sapien
agctggactgcagaagatcccgaca

SEQ ID NO: 1165360 - DNA, 25 bp, Homo sapien
gtatctaagaatcaccagggtaaag

SEQ ID NO: 1165361 - DNA, 25 bp, Homo sapien
gctttatatccagagttgaaggccc

SEQ ID NO: 1165362 - DNA, 25 bp, Homo sapien
gtactcagggcacaaagaatccatg

SEQ ID NO: 1165363 - DNA, 25 bp, Homo sapien
gcttggagccttgaataaacataca

SEQ ID NO: 1165364 - DNA, 25 bp, Homo sapien
atttcaggcgtgtgtcaccacgcct

SEQ ID NO: 1165365 - DNA, 25 bp, Homo sapien
tcttattccagacatacttctcttg

SEQ ID NO: 1165366 - DNA, 25 bp, Homo sapien
tattccagacatacttctcttgaac

SEQ ID NO: 1165367 - DNA, 25 bp, Homo sapien
ctttctctcttattccagacatact

SEQ ID NO: 1165368 - DNA, 25 bp, Homo sapien
tctctcttattccagacatacttct

SEQ ID NO: 1165369 - DNA, 25 bp, Homo sapien
cttctcttttcagagtggttcttcc

SEQ ID NO: 1165370 - DNA, 25 bp, Homo sapien
gtgcatatgcatatacgaatatgta

SEQ ID NO: 1165371 - DNA, 25 bp, Homo sapien
agcaaatcacctcttggcctcctaa

SEQ ID NO: 1165372 - DNA, 25 bp, Homo sapien
ggtatattcgtatattatgaaaaca

SEQ ID NO: 1165373 - DNA, 25 bp, Homo sapien
catataggtatattcgtatattatg

SEQ ID NO: 1165374 - DNA, 25 bp, Homo sapien
tgtgaacaagtgctaattcctcggg

SEQ ID NO: 1165375 - DNA, 25 bp, Homo sapien
tttcctcaagttgtgaacaagtgct

SEQ ID NO: 1165376 - DNA, 25 bp, Homo sapien
caagttgtgaacaagtgctaattcc

SEQ ID NO: 1165377 - DNA, 25 bp, Homo sapien
agttgtgaacaagtgctaattcctc

SEQ ID NO: 1165378 - DNA, 25 bp, Homo sapien
taagacataataacttactgtccat

SEQ ID NO: 1165379 - DNA, 25 bp, Homo sapien
tcagactttatttctaacttggtac

SEQ ID NO: 1165380 - DNA, 25 bp, Homo sapien
cttggtacagatacaggaattaaat

SEQ ID NO: 1165381 - DNA, 25 bp, Homo sapien
tagagactgtaaagtattagcaatg

SEQ ID NO: 1165382 - DNA, 25 bp, Homo sapien
tttccaaagacggtaaggagataca

SEQ ID NO: 1165383 - DNA, 25 bp, Homo sapien
ttccaaagacggtaaggagatacaa

SEQ ID NO: 1165384 - DNA, 25 bp, Homo sapien
tccaaagacggtaaggagatacaaa

SEQ ID NO: 1165385 - DNA, 25 bp, Homo sapien
ggttattccagatttggctctgaca

SEQ ID NO: 1165386 - DNA, 25 bp, Homo sapien
gatttggctctgacaataaactgct

SEQ ID NO: 1165387 - DNA, 25 bp, Homo sapien
gtggtctagcacagttaaatggcaa

SEQ ID NO: 1165388 - DNA, 25 bp, Homo sapien
aatggcaactaaattggttattcca

SEQ ID NO: 1165389 - DNA, 25 bp, Homo sapien
aaagccgacacaatggcgcctccat

SEQ ID NO: 1165390 - DNA, 25 bp, Homo sapien
caaagccgacacaatggcgcctcca

SEQ ID NO: 1165391 - DNA, 25 bp, Homo sapien
aagccgacacaatggcgcctccatg

SEQ ID NO: 1165392 - DNA, 25 bp, Homo sapien
aatccaggggaagggcatacaggaa

SEQ ID NO: 1165393 - DNA, 25 bp, Homo sapien
gaagggcatacaggaatatgatttt

SEQ ID NO: 1165394 - DNA, 25 bp, Homo sapien
taaacaggataacaatctaagtaga

SEQ ID NO: 1165395 - DNA, 25 bp, Homo sapien
tttctttaaacaggataacaatcta

SEQ ID NO: 1165396 - DNA, 25 bp, Homo sapien
ggatgcactcactcagacatgtcat

SEQ ID NO: 1165397 - DNA, 25 bp, Homo sapien
aacatcacttctattcaggaggaaa

SEQ ID NO: 1165398 - DNA, 25 bp, Homo sapien
taacatcacttctattcaggaggaa

SEQ ID NO: 1165399 - DNA, 25 bp, Homo sapien
ctcctgataggatgcactcactcag

SEQ ID NO: 1165400 - DNA, 25 bp, Homo sapien
cagtagcagtgagtatacctaggac

SEQ ID NO: 1165401 - DNA, 25 bp, Homo sapien
gcatggaattggctactagtaggaa

SEQ ID NO: 1165402 - DNA, 25 bp, Homo sapien
gattagagaaacaaacgcagatgtg

SEQ ID NO: 1165403 - DNA, 25 bp, Homo sapien
taaatatactatggctactggcagc

SEQ ID NO: 1165404 - DNA, 25 bp, Homo sapien
tgctgcgtgcctctagccccaggta

SEQ ID NO: 1165405 - DNA, 25 bp, Homo sapien
catactgtcacagtatgggtgacag

SEQ ID NO: 1165406 - DNA, 25 bp, Homo sapien
ggtgctgcgtgcctctagccccagg

SEQ ID NO: 1165407 - DNA, 25 bp, Homo sapien
tgagctgcgattgctccactacaca

SEQ ID NO: 1165408 - DNA, 25 bp, Homo sapien
acgagcctgggccatgtggtaaaac

SEQ ID NO: 1165409 - DNA, 25 bp, Homo sapien
gagttccagacgagcctgggccatg

SEQ ID NO: 1165410 - DNA, 25 bp, Homo sapien
agttccagacgagcctgggccatgt

SEQ ID NO: 1165411 - DNA, 25 bp, Homo sapien
ccagacgagcctgggccatgtggta

SEQ ID NO: 1165412 - DNA, 25 bp, Homo sapien
tactcgtgctctacgtggccacaaa

SEQ ID NO: 1165413 - DNA, 25 bp, Homo sapien
gacagactctacttaagcactttga

SEQ ID NO: 1165414 - DNA, 25 bp, Homo sapien
tgcctgatacaggactccacatatg

SEQ ID NO: 1165415 - DNA, 25 bp, Homo sapien
catatggtggctggctactcgtgct

SEQ ID NO: 1165416 - DNA, 25 bp, Homo sapien
ggatgggaataaagggatccagggc

SEQ ID NO: 1165417 - DNA, 25 bp, Homo sapien
atgggaataaagggatccagggcat

SEQ ID NO: 1165418 - DNA, 25 bp, Homo sapien
gatgggaataaagggatccagggca

SEQ ID NO: 1165419 - DNA, 25 bp, Homo sapien
cagccagaaagaagtcaagataaag

SEQ ID NO: 1165420 - DNA, 25 bp, Homo sapien
ctgttgttaagggaagaagagatca

SEQ ID NO: 1165421 - DNA, 25 bp, Homo sapien
ctctgactgagtgggattctactgt

SEQ ID NO: 1165422 - DNA, 25 bp, Homo sapien
aggatgaagtacaaattagaggctg

SEQ ID NO: 1165423 - DNA, 25 bp, Homo sapien
tatctagtgatagagcagccttagc

SEQ ID NO: 1165424 - DNA, 25 bp, Homo sapien
caaagatttacttaggtgctggagt

SEQ ID NO: 1165425 - DNA, 25 bp, Homo sapien
tacatatactaggacaggtgtggca

SEQ ID NO: 1165426 - DNA, 25 bp, Homo sapien
tgcaccaggcctccgattactatta

SEQ ID NO: 1165427 - DNA, 25 bp, Homo sapien
gaaatctgtctattgtgcatcccaa

SEQ ID NO: 1165428 - DNA, 25 bp, Homo sapien
tccccagaatatcgtgtagtcagag

SEQ ID NO: 1165429 - DNA, 25 bp, Homo sapien
gaggtaattatcatctcccaagaga

SEQ ID NO: 1165430 - DNA, 25 bp, Homo sapien
tagtcagaggctaccatatccaaat

SEQ ID NO: 1165431 - DNA, 25 bp, Homo sapien
ttaggaacagcagctcttttttccc

SEQ ID NO: 1165432 - DNA, 25 bp, Homo sapien
ggaacagcagctcttttttcccttc

SEQ ID NO: 1165433 - DNA, 25 bp, Homo sapien
aggaacagcagctcttttttccctt

SEQ ID NO: 1165434 - DNA, 25 bp, Homo sapien
taggaacagcagctcttttttccct

SEQ ID NO: 1165435 - DNA, 25 bp, Homo sapien
ggtaggcacagtgccgctccagcag

SEQ ID NO: 1165436 - DNA, 25 bp, Homo sapien
ctccagcagcgaggggttcgcgtta

SEQ ID NO: 1165437 - DNA, 25 bp, Homo sapien
gccgctccagcagcgaggggttcgc

SEQ ID NO: 1165438 - DNA, 25 bp, Homo sapien
cgctccagcagcgaggggttcgcgt

SEQ ID NO: 1165439 - DNA, 25 bp, Homo sapien
tgggtccagcataaagcagatgtcc

SEQ ID NO: 1165440 - DNA, 25 bp, Homo sapien
ggtccagcataaagcagatgtccac

SEQ ID NO: 1165441 - DNA, 25 bp, Homo sapien
ataaagcagatgtccactgtcttcc

SEQ ID NO: 1165442 - DNA, 25 bp, Homo sapien
ccagcataaagcagatgtccactgt

SEQ ID NO: 1165443 - DNA, 25 bp, Homo sapien
ggaatatcttattgtcacgcattca

SEQ ID NO: 1165444 - DNA, 25 bp, Homo sapien
gagaaatgcaatttggccaatctaa

SEQ ID NO: 1165445 - DNA, 25 bp, Homo sapien
ctgcaacaagaggaatatcagagaa

SEQ ID NO: 1165446 - DNA, 25 bp, Homo sapien
gcaacaagaggaatatcagagaaat

SEQ ID NO: 1165447 - DNA, 25 bp, Homo sapien
atttggccaatctaaagactccttc

SEQ ID NO: 1165448 - DNA, 25 bp, Homo sapien
ataaagcctcaacagaaccactgga

SEQ ID NO: 1165449 - DNA, 25 bp, Homo sapien
attccataaagcctcaacagaacca

SEQ ID NO: 1165450 - DNA, 25 bp, Homo sapien
actggaaatttctgtagaattgatc

SEQ ID NO: 1165451 - DNA, 25 bp, Homo sapien
ggaaatttctgtagaattgatctct

SEQ ID NO: 1165452 - DNA, 25 bp, Homo sapien
tcctagccgattggcttggcaggcg

SEQ ID NO: 1165453 - DNA, 25 bp, Homo sapien
tatactggcgacttattggtccgca

SEQ ID NO: 1165454 - DNA, 25 bp, Homo sapien
tggctgatagctccccgggcaaaaa

SEQ ID NO: 1165455 - DNA, 25 bp, Homo sapien
tcttacagatctctccgctggctga

SEQ ID NO: 1165456 - DNA, 25 bp, Homo sapien
gtcccaactgcagtgtgagcacctc

SEQ ID NO: 1165457 - DNA, 25 bp, Homo sapien
aactgcagtgtgagcacctcccggg

SEQ ID NO: 1165458 - DNA, 25 bp, Homo sapien
cgaaaccggcaaaatgtcccaactg

SEQ ID NO: 1165459 - DNA, 25 bp, Homo sapien
tgctggttccaccagtgcgcgccca

SEQ ID NO: 1165460 - DNA, 25 bp, Homo sapien
ccggctgaacgtcgggactgtagat

SEQ ID NO: 1165461 - DNA, 25 bp, Homo sapien
gaggcaggccggctgaacgtcggga

SEQ ID NO: 1165462 - DNA, 25 bp, Homo sapien
gaacgtcgggactgtagatcccgaa

SEQ ID NO: 1165463 - DNA, 25 bp, Homo sapien
gggactgtagatcccgaagggctcc

SEQ ID NO: 1165464 - DNA, 25 bp, Homo sapien
atgagtcgcggcgtgtaggtctcct

SEQ ID NO: 1165465 - DNA, 25 bp, Homo sapien
cggcccgtacgatacaggacgtcgg

SEQ ID NO: 1165466 - DNA, 25 bp, Homo sapien
ggctccttggaatcggtcgctcggc

SEQ ID NO: 1165467 - DNA, 25 bp, Homo sapien
ccatgaggatgagtcgcggcgtgta

SEQ ID NO: 1165468 - DNA, 25 bp, Homo sapien
aataaggggcatcggctaactctgc

SEQ ID NO: 1165469 - DNA, 25 bp, Homo sapien
ggggcatcggctaactctgccacca

SEQ ID NO: 1165470 - DNA, 25 bp, Homo sapien
ggaaataaggggcatcggctaactc

SEQ ID NO: 1165471 - DNA, 25 bp, Homo sapien
ctaggcacgcggaagggaaataagg

SEQ ID NO: 1165472 - DNA, 25 bp, Homo sapien
cgagtgttggcatgttgtgctcagc

SEQ ID NO: 1165473 - DNA, 25 bp, Homo sapien
tcttgagcaactgtcgtgggcccct

SEQ ID NO: 1165474 - DNA, 25 bp, Homo sapien
gcctattcccgaaatggctcttgag

SEQ ID NO: 1165475 - DNA, 25 bp, Homo sapien
tgtctccagggcctagcagcctatt

SEQ ID NO: 1165476 - DNA, 25 bp, Homo sapien
tccaactgtttgtccctgtagagtc

SEQ ID NO: 1165477 - DNA, 25 bp, Homo sapien
tcctcttttagggagctcaaactac

SEQ ID NO: 1165478 - DNA, 25 bp, Homo sapien
catgctattgcagcatccaactgtt

SEQ ID NO: 1165479 - DNA, 25 bp, Homo sapien
caccttcctcttttagggagctcaa

SEQ ID NO: 1165480 - DNA, 25 bp, Homo sapien
agggttcttgggatagagttcctct

SEQ ID NO: 1165481 - DNA, 25 bp, Homo sapien
tcttgggatagagttcctctttgtg

SEQ ID NO: 1165482 - DNA, 25 bp, Homo sapien
agataagggttcttgggatagagtt

SEQ ID NO: 1165483 - DNA, 25 bp, Homo sapien
aaagtcttggagataagggttcttg

SEQ ID NO: 1165484 - DNA, 25 bp, Homo sapien
agaccctcaggttgtggcaccgggt

SEQ ID NO: 1165485 - DNA, 25 bp, Homo sapien
taaaaagttcaggacagaggccctc

SEQ ID NO: 1165486 - DNA, 25 bp, Homo sapien
aaaagttcaggacagaggccctcac

SEQ ID NO: 1165487 - DNA, 25 bp, Homo sapien
ctgcccctatggagaccctcaggtt

SEQ ID NO: 1165488 - DNA, 25 bp, Homo sapien
aaaatcgacatttagttccaggcag

SEQ ID NO: 1165489 - DNA, 25 bp, Homo sapien
caggcagtttagaggcaaaggttgc

SEQ ID NO: 1165490 - DNA, 25 bp, Homo sapien
ggtcagaaaaatcgacatttagttc

SEQ ID NO: 1165491 - DNA, 25 bp, Homo sapien
tccttgagttggctggccacaccgc

SEQ ID NO: 1165492 - DNA, 25 bp, Homo sapien
agacaccatcactactcagcactcc

SEQ ID NO: 1165493 - DNA, 25 bp, Homo sapien
ataagtggttttggagttgtagcgg

SEQ ID NO: 1165494 - DNA, 25 bp, Homo sapien
agtggttttggagttgtagcggtgg

SEQ ID NO: 1165495 - DNA, 25 bp, Homo sapien
aagtggttttggagttgtagcggtg

SEQ ID NO: 1165496 - DNA, 25 bp, Homo sapien
ggataagtggttttggagttgtagc

SEQ ID NO: 1165497 - DNA, 25 bp, Homo sapien
cttctgaatcatacagatgctccgg

SEQ ID NO: 1165498 - DNA, 25 bp, Homo sapien
ttctgaatcatacagatgctccggg

SEQ ID NO: 1165499 - DNA, 25 bp, Homo sapien
acttctgaatcatacagatgctccg

SEQ ID NO: 1165500 - DNA, 25 bp, Homo sapien
ctcaaagcctctggggtccccatac

SEQ ID NO: 1165501 - DNA, 25 bp, Homo sapien
tccctcaactcctcagcctcttgtc

SEQ ID NO: 1165502 - DNA, 25 bp, Homo sapien
atctcttccctcaactcctcagcct

SEQ ID NO: 1165503 - DNA, 25 bp, Homo sapien
cttccctcaactcctcagcctcttg

SEQ ID NO: 1165504 - DNA, 25 bp, Homo sapien
ctcttccctcaactcctcagcctct

SEQ ID NO: 1165505 - DNA, 25 bp, Homo sapien
cacaagtaaacacgatccaagactt

SEQ ID NO: 1165506 - DNA, 25 bp, Homo sapien
caagtaaacacgatccaagacttac

SEQ ID NO: 1165507 - DNA, 25 bp, Homo sapien
acaagtaaacacgatccaagactta

SEQ ID NO: 1165508 - DNA, 25 bp, Homo sapien
ccacaagtaaacacgatccaagact

SEQ ID NO: 1165509 - DNA, 25 bp, Homo sapien
ttcctccacgtagaaatgcagcctg

SEQ ID NO: 1165510 - DNA, 25 bp, Homo sapien
cattcctccacgtagaaatgcagcc

SEQ ID NO: 1165511 - DNA, 25 bp, Homo sapien
gtcacattcctccacgtagaaatgc

SEQ ID NO: 1165512 - DNA, 25 bp, Homo sapien
cacattcctccacgtagaaatgcag

SEQ ID NO: 1165513 - DNA, 25 bp, Homo sapien
ttccaccctggagtgcacattgcca

SEQ ID NO: 1165514 - DNA, 25 bp, Homo sapien
ctggagtgcacattgccacgccact

SEQ ID NO: 1165515 - DNA, 25 bp, Homo sapien
tggagtgcacattgccacgccacta

SEQ ID NO: 1165516 - DNA, 25 bp, Homo sapien
gaagagcttccaccctggagtgcac

SEQ ID NO: 1165517 - DNA, 25 bp, Homo sapien
cccacgatggtagggaccaggtagc

SEQ ID NO: 1165518 - DNA, 25 bp, Homo sapien
ttattccccgccctgaatattcatc

SEQ ID NO: 1165519 - DNA, 25 bp, Homo sapien
ttgtagcagctctgccgccttcgcg

SEQ ID NO: 1165520 - DNA, 25 bp, Homo sapien
cgccttcgcgcctaccccagagaag

SEQ ID NO: 1165521 - DNA, 25 bp, Homo sapien
aagccactctcccaatgggattcga

SEQ ID NO: 1165522 - DNA, 25 bp, Homo sapien
cccaatgggattcgaatgtttactc

SEQ ID NO: 1165523 - DNA, 25 bp, Homo sapien
gaatgtttactcctccaagttccac

SEQ ID NO: 1165524 - DNA, 25 bp, Homo sapien
aaaccagtttgcattaagccactct

SEQ ID NO: 1165525 - DNA, 25 bp, Homo sapien
agcagtcaggtgcacgagaccaaaa

SEQ ID NO: 1165526 - DNA, 25 bp, Homo sapien
aaagctgtgtttaatagacgataga

SEQ ID NO: 1165527 - DNA, 25 bp, Homo sapien
aggtgcacgagaccaaaagctgtgt

SEQ ID NO: 1165528 - DNA, 25 bp, Homo sapien
gtttaatagacgatagatgtttctc

SEQ ID NO: 1165529 - DNA, 25 bp, Homo sapien
cagagccagtacagacagcgactga

SEQ ID NO: 1165530 - DNA, 25 bp, Homo sapien
agtacagacagcgactgactgggag

SEQ ID NO: 1165531 - DNA, 25 bp, Homo sapien
ccagtacagacagcgactgactggg

SEQ ID NO: 1165532 - DNA, 25 bp, Homo sapien
gagccagtacagacagcgactgact

SEQ ID NO: 1165533 - DNA, 25 bp, Homo sapien
caggcgataaggaacagtgactgtg

SEQ ID NO: 1165534 - DNA, 25 bp, Homo sapien
aggaacacaggcgataaggaacagt

SEQ ID NO: 1165535 - DNA, 25 bp, Homo sapien
gataaggaacagtgactgtgtccag

SEQ ID NO: 1165536 - DNA, 25 bp, Homo sapien
cacaggcgataaggaacagtgactg

SEQ ID NO: 1165537 - DNA, 25 bp, Homo sapien
tggagccaaggggaaagggatgatt

SEQ ID NO: 1165538 - DNA, 25 bp, Homo sapien
gagccaaggggaaagggatgattgc

SEQ ID NO: 1165539 - DNA, 25 bp, Homo sapien
ctggagccaaggggaaagggatgat

SEQ ID NO: 1165540 - DNA, 25 bp, Homo sapien
gccaaggggaaagggatgattgctc

SEQ ID NO: 1165541 - DNA, 25 bp, Homo sapien
atcagggaatcaggaagggactggc

SEQ ID NO: 1165542 - DNA, 25 bp, Homo sapien
catcagggaatcaggaagggactgg

SEQ ID NO: 1165543 - DNA, 25 bp, Homo sapien
tgcatcagggaatcaggaagggact

SEQ ID NO: 1165544 - DNA, 25 bp, Homo sapien
ctgcatcagggaatcaggaagggac

SEQ ID NO: 1165545 - DNA, 25 bp, Homo sapien
tgggcaaagcaacgtgttccagaag

SEQ ID NO: 1165546 - DNA, 25 bp, Homo sapien
gcaaagcaacgtgttccagaaggct

SEQ ID NO: 1165547 - DNA, 25 bp, Homo sapien
gggcaaagcaacgtgttccagaagg

SEQ ID NO: 1165548 - DNA, 25 bp, Homo sapien
ggcaaagcaacgtgttccagaaggc

SEQ ID NO: 1165549 - DNA, 25 bp, Homo sapien
tgtgtggcatgctctgtctataccc

SEQ ID NO: 1165550 - DNA, 25 bp, Homo sapien
catgctctgtctataccctcagcac

SEQ ID NO: 1165551 - DNA, 25 bp, Homo sapien
cttgtgtggcatgctctgtctatac

SEQ ID NO: 1165552 - DNA, 25 bp, Homo sapien
gtggcatgctctgtctataccctca

SEQ ID NO: 1165553 - DNA, 25 bp, Homo sapien
ttccccagtggtacatgcatgaagg

SEQ ID NO: 1165554 - DNA, 25 bp, Homo sapien
ccccagtggtacatgcatgaagggc

SEQ ID NO: 1165555 - DNA, 25 bp, Homo sapien
tccccagtggtacatgcatgaaggg

SEQ ID NO: 1165556 - DNA, 25 bp, Homo sapien
aaatactgagccaagatttcttccc

SEQ ID NO: 1165557 - DNA, 25 bp, Homo sapien
catccagaaccatacccggtggact

SEQ ID NO: 1165558 - DNA, 25 bp, Homo sapien
gaaccatccagaaccatacccggtg

SEQ ID NO: 1165559 - DNA, 25 bp, Homo sapien
accatccagaaccatacccggtgga

SEQ ID NO: 1165560 - DNA, 25 bp, Homo sapien
aaccatccagaaccatacccggtgg

SEQ ID NO: 1165561 - DNA, 25 bp, Homo sapien
tgattgtaaactcaacaaatttggt

SEQ ID NO: 1165562 - DNA, 25 bp, Homo sapien
gataaggaagtccaaccttagtaga

SEQ ID NO: 1165563 - DNA, 25 bp, Homo sapien
tattgtccccttagtacaccagtac

SEQ ID NO: 1165564 - DNA, 25 bp, Homo sapien
tttggtgtattgtccccttagtaca

SEQ ID NO: 1165565 - DNA, 25 bp, Homo sapien
ctgtggagggagaggaaacagagac

SEQ ID NO: 1165566 - DNA, 25 bp, Homo sapien
gggtctggtgcagggacgaagagga

SEQ ID NO: 1165567 - DNA, 25 bp, Homo sapien
aagaggaacacagtgccccaaacac

SEQ ID NO: 1165568 - DNA, 25 bp, Homo sapien
cagcgccgcaagtcgagtttggtga

SEQ ID NO: 1165569 - DNA, 25 bp, Homo sapien
aagctggcccagcgccgcaagtcga

SEQ ID NO: 1165570 - DNA, 25 bp, Homo sapien
ctctgctacgtcatcgtgctccact

SEQ ID NO: 1165571 - DNA, 25 bp, Homo sapien
tgctacgtcatcgtgctccactcca

SEQ ID NO: 1165572 - DNA, 25 bp, Homo sapien
ttagtccacgaggctgtcaccaccc

SEQ ID NO: 1165573 - DNA, 25 bp, Homo sapien
tctgctacgtcatcgtgctccactc

SEQ ID NO: 1165574 - DNA, 25 bp, Homo sapien
tattgcaaactagctcctttctccc

SEQ ID NO: 1165575 - DNA, 25 bp, Homo sapien
tgtttttattgcaaactagctcctt

SEQ ID NO: 1165576 - DNA, 25 bp, Homo sapien
tttattgcaaactagctcctttctc

SEQ ID NO: 1165577 - DNA, 25 bp, Homo sapien
tttttattgcaaactagctcctttc

SEQ ID NO: 1165578 - DNA, 25 bp, Homo sapien
ggtgtagctagtcccgcgacattga

SEQ ID NO: 1165579 - DNA, 25 bp, Homo sapien
aaaaagtgcatatgttggtgtagct

SEQ ID NO: 1165580 - DNA, 25 bp, Homo sapien
atgttggtgtagctagtcccgcgac

SEQ ID NO: 1165581 - DNA, 25 bp, Homo sapien
gctagtcccgcgacattgagctcct

SEQ ID NO: 1165582 - DNA, 25 bp, Homo sapien
tcccaaccttgctgtgaggaataaa

SEQ ID NO: 1165583 - DNA, 25 bp, Homo sapien
aacattgttacaaagcatcagtgag

SEQ ID NO: 1165584 - DNA, 25 bp, Homo sapien
tgggaataggtgagatactgcgccc

SEQ ID NO: 1165585 - DNA, 25 bp, Homo sapien
gaataggtgagatactgcgcccggc

SEQ ID NO: 1165586 - DNA, 25 bp, Homo sapien
ataggtgagatactgcgcccggcca

SEQ ID NO: 1165587 - DNA, 25 bp, Homo sapien
ggaataggtgagatactgcgcccgg

SEQ ID NO: 1165588 - DNA, 25 bp, Homo sapien
gattggcagaaagatgataccacca

SEQ ID NO: 1165589 - DNA, 25 bp, Homo sapien
tggcaaaagatctctgtgacagaac

SEQ ID NO: 1165590 - DNA, 25 bp, Homo sapien
accatcatcagtgggaggttgtgac

SEQ ID NO: 1165591 - DNA, 25 bp, Homo sapien
ttactgggtgcgctgataaggacct

SEQ ID NO: 1165592 - DNA, 25 bp, Homo sapien
acacattaaattgaatcacctgacc

SEQ ID NO: 1165593 - DNA, 25 bp, Homo sapien
catgattgtggagttgaggtgaaat

SEQ ID NO: 1165594 - DNA, 25 bp, Homo sapien
tatattaaactcgtttacacattaa

SEQ ID NO: 1165595 - DNA, 25 bp, Homo sapien
ttattatattaaactcgtttacaca

SEQ ID NO: 1165596 - DNA, 25 bp, Homo sapien
cttaatctcctttcagcgtgtctgg

SEQ ID NO: 1165597 - DNA, 25 bp, Homo sapien
gtctcgaatttttggccttaggcat

SEQ ID NO: 1165598 - DNA, 25 bp, Homo sapien
tctcctcgctagtaattatgtcaca

SEQ ID NO: 1165599 - DNA, 25 bp, Homo sapien
attattcccaggtcaacagtaaagg

SEQ ID NO: 1165600 - DNA, 25 bp, Homo sapien
aatacctctgaacatccataacttt

SEQ ID NO: 1165601 - DNA, 25 bp, Homo sapien
atacctctgaacatccataactttc

SEQ ID NO: 1165602 - DNA, 25 bp, Homo sapien
tgtaaaactgctggatacatcaagt

SEQ ID NO: 1165603 - DNA, 25 bp, Homo sapien
ggcattcaccctcttaaacattctg

SEQ ID NO: 1165604 - DNA, 25 bp, Homo sapien
tgccatgaccgcaaaagcacatgaa

SEQ ID NO: 1165605 - DNA, 25 bp, Homo sapien
tatgtggtaccactcaactattctt

SEQ ID NO: 1165606 - DNA, 25 bp, Homo sapien
cctttggcttcatgtcactagtgac

SEQ ID NO: 1165607 - DNA, 25 bp, Homo sapien
catgatttcattgaaggcagtgtca

SEQ ID NO: 1165608 - DNA, 25 bp, Homo sapien
tagtgaccaatactgagttacggca

SEQ ID NO: 1165609 - DNA, 25 bp, Homo sapien
tgagttacggcagtatcttttcatg

SEQ ID NO: 1165610 - DNA, 25 bp, Homo sapien
actccaatttccttagcttcctctg

SEQ ID NO: 1165611 - DNA, 25 bp, Homo sapien
tgctcaaatgttttcaaggctgaag

SEQ ID NO: 1165612 - DNA, 25 bp, Homo sapien
gtttcactggtcacatgctcaaatg

SEQ ID NO: 1165613 - DNA, 25 bp, Homo sapien
tgtctttgatgtcttgtaacaagtg

SEQ ID NO: 1165614 - DNA, 25 bp, Homo sapien
tccaggtagcttctggtacccagaa

SEQ ID NO: 1165615 - DNA, 25 bp, Homo sapien
ggttggtggacagtttgcctgtggc

SEQ ID NO: 1165616 - DNA, 25 bp, Homo sapien
agacctgcagctgatagatgaattg

SEQ ID NO: 1165617 - DNA, 25 bp, Homo sapien
cagctgatagatgaattggtggttg

SEQ ID NO: 1165618 - DNA, 25 bp, Homo sapien
tttgaaaactgatggagtgcccaag

SEQ ID NO: 1165619 - DNA, 25 bp, Homo sapien
tcatcccttgtcatagcatgtggct

SEQ ID NO: 1165620 - DNA, 25 bp, Homo sapien
ggaaaagtgctctcctgtggaatca

SEQ ID NO: 1165621 - DNA, 25 bp, Homo sapien
ttggtcacgccctctctggcatgag

SEQ ID NO: 1165622 - DNA, 25 bp, Homo sapien
attctagaaggtgttgatgtggcca

SEQ ID NO: 1165623 - DNA, 25 bp, Homo sapien
ccagaacacaaatgtaccaattcta

SEQ ID NO: 1165624 - DNA, 25 bp, Homo sapien
cagaacacaaatgtaccaattctag

SEQ ID NO: 1165625 - DNA, 25 bp, Homo sapien
accaattctagaaggtgttgatgtg

SEQ ID NO: 1165626 - DNA, 25 bp, Homo sapien
tgggcgctgggtgcgtggcggaagt

SEQ ID NO: 1165627 - DNA, 25 bp, Homo sapien
aaggtcgggtctgagggtgggcgct

SEQ ID NO: 1165628 - DNA, 25 bp, Homo sapien
ggacgaacgatgtccaggttgagaa

SEQ ID NO: 1165629 - DNA, 25 bp, Homo sapien
aagttaagggcgtgaagtccagtgt

SEQ ID NO: 1165630 - DNA, 25 bp, Homo sapien
ccctagttgtcagctgcgctcagct

SEQ ID NO: 1165631 - DNA, 25 bp, Homo sapien
ggaaggtatccagcggacgcctcct

SEQ ID NO: 1165632 - DNA, 25 bp, Homo sapien
gcgctcagctcttaagatgctccgg

SEQ ID NO: 1165633 - DNA, 25 bp, Homo sapien
tcctgatgagaggtaggctccgcct

SEQ ID NO: 1165634 - DNA, 25 bp, Homo sapien
cgtttttgcaatggtgagacagctc

SEQ ID NO: 1165635 - DNA, 25 bp, Homo sapien
tctgggaaccctcggtcagtaccga

SEQ ID NO: 1165636 - DNA, 25 bp, Homo sapien
ggtcagtaccgaggcagcagctgta

SEQ ID NO: 1165637 - DNA, 25 bp, Homo sapien
gtcgtaatcagaggctgttgctata

SEQ ID NO: 1165638 - DNA, 25 bp, Homo sapien
aaagctaggtcggatattggtgatc

SEQ ID NO: 1165639 - DNA, 25 bp, Homo sapien
taggtcggatattggtgatctcagc

SEQ ID NO: 1165640 - DNA, 25 bp, Homo sapien
gctaggtcggatattggtgatctca

SEQ ID NO: 1165641 - DNA, 25 bp, Homo sapien
agctaggtcggatattggtgatctc

SEQ ID NO: 1165642 - DNA, 25 bp, Homo sapien
acacggcccacagtctccaagctgc

SEQ ID NO: 1165643 - DNA, 25 bp, Homo sapien
tccttctcaagcttgtctttgccac

SEQ ID NO: 1165644 - DNA, 25 bp, Homo sapien
ggttctttggcagcaactctcactg

SEQ ID NO: 1165645 - DNA, 25 bp, Homo sapien
gattgtctgagggatagaatccctg

SEQ ID NO: 1165646 - DNA, 25 bp, Homo sapien
aactggagtcccgatgctcaaacct

SEQ ID NO: 1165647 - DNA, 25 bp, Homo sapien
gggtctctgggtatatgctgatgcc

SEQ ID NO: 1165648 - DNA, 25 bp, Homo sapien
tctttgtctcggcttagcaggccag

SEQ ID NO: 1165649 - DNA, 25 bp, Homo sapien
agaggtggttttgctctccccaggg

SEQ ID NO: 1165650 - DNA, 25 bp, Homo sapien
tctatacaagatccagagctaggcc

SEQ ID NO: 1165651 - DNA, 25 bp, Homo sapien
gaaggtgagggatcctagcatgaca

SEQ ID NO: 1165652 - DNA, 25 bp, Homo sapien
tcacccgatgccgtttgtcaggaag

SEQ ID NO: 1165653 - DNA, 25 bp, Homo sapien
tcagttgtaccttgcctgtgctggg

SEQ ID NO: 1165654 - DNA, 25 bp, Homo sapien
catcatcccgagagaagcggtcaaa

SEQ ID NO: 1165655 - DNA, 25 bp, Homo sapien
gtctcagaggatgcgaaaacccctt

SEQ ID NO: 1165656 - DNA, 25 bp, Homo sapien
tatcctggcattgagaaccacaaga

SEQ ID NO: 1165657 - DNA, 25 bp, Homo sapien
aaataagtatgatctgcccacaggc

SEQ ID NO: 1165658 - DNA, 25 bp, Homo sapien
gattttctagccaaggagcccttgt

SEQ ID NO: 1165659 - DNA, 25 bp, Homo sapien
cctccttcaaggagaggtagacaag

SEQ ID NO: 1165660 - DNA, 25 bp, Homo sapien
tcacagggaagggtgtattggaaag

SEQ ID NO: 1165661 - DNA, 25 bp, Homo sapien
ctgtgaagggaatacggaaacagca

SEQ ID NO: 1165662 - DNA, 25 bp, Homo sapien
aaacagcagaatgggtcggcagagc

SEQ ID NO: 1165663 - DNA, 25 bp, Homo sapien
ccagctggttggtgactttaccaag

SEQ ID NO: 1165664 - DNA, 25 bp, Homo sapien
cagctggttggtgactttaccaagg

SEQ ID NO: 1165665 - DNA, 25 bp, Homo sapien
agctggttggtgactttaccaaggt

SEQ ID NO: 1165666 - DNA, 25 bp, Homo sapien
ctggttggtgactttaccaaggttg

SEQ ID NO: 1165667 - DNA, 25 bp, Homo sapien
tgtaatccagaccaggaaaaagccc

SEQ ID NO: 1165668 - DNA, 25 bp, Homo sapien
tgactagggagatgacagccatggc

SEQ ID NO: 1165669 - DNA, 25 bp, Homo sapien
tgcctacgggcactggttgggaaaa

SEQ ID NO: 1165670 - DNA, 25 bp, Homo sapien
aaaaagccctttacagccagtgtgg

SEQ ID NO: 1165671 - DNA, 25 bp, Homo sapien
cctgatctttgtttctccatcttta

SEQ ID NO: 1165672 - DNA, 25 bp, Homo sapien
ctttaaatgtgatgctaggctccat

SEQ ID NO: 1165673 - DNA, 25 bp, Homo sapien
catctttaaatgtgatgctaggctc

SEQ ID NO: 1165674 - DNA, 25 bp, Homo sapien
tctccatctttaaatgtgatgctag

SEQ ID NO: 1165675 - DNA, 25 bp, Homo sapien
tgcgcactatagaagtgcatcctct

SEQ ID NO: 1165676 - DNA, 25 bp, Homo sapien
gcccagttgctatttcttatctgtg

SEQ ID NO: 1165677 - DNA, 25 bp, Homo sapien
gcatcctctcatttggttcttatcc

SEQ ID NO: 1165678 - DNA, 25 bp, Homo sapien
ggttgtacctaccacatagcattat

SEQ ID NO: 1165679 - DNA, 25 bp, Homo sapien
ctgagagaccggtgatatccatctt

SEQ ID NO: 1165680 - DNA, 25 bp, Homo sapien
catcttcggcaagtgtctggctttg

SEQ ID NO: 1165681 - DNA, 25 bp, Homo sapien
tgtgccacaggctgatatgacagag

SEQ ID NO: 1165682 - DNA, 25 bp, Homo sapien
caccactgtcattctctgtgccaca

SEQ ID NO: 1165683 - DNA, 25 bp, Homo sapien
tatattaaagggcacagagacaaat

SEQ ID NO: 1165684 - DNA, 25 bp, Homo sapien
tattggacgtagatactcatcagga

SEQ ID NO: 1165685 - DNA, 25 bp, Homo sapien
cctagccagggaaatctattggacg

SEQ ID NO: 1165686 - DNA, 25 bp, Homo sapien
ggttaggtctgaagaaatcccatga

SEQ ID NO: 1165687 - DNA, 25 bp, Homo sapien
cctcattcttggtggtgcgatcgaa

SEQ ID NO: 1165688 - DNA, 25 bp, Homo sapien
cgaggaactcgatgctgatatcagg

SEQ ID NO: 1165689 - DNA, 25 bp, Homo sapien
tactcgctcagactgtgccacttgg

SEQ ID NO: 1165690 - DNA, 25 bp, Homo sapien
gcaatgcgctttctgccgtagtaga

SEQ ID NO: 1165691 - DNA, 25 bp, Homo sapien
aaataaaagattctagcgccttgca

SEQ ID NO: 1165692 - DNA, 25 bp, Homo sapien
gctaagaactgatctgcagctgtgg

SEQ ID NO: 1165693 - DNA, 25 bp, Homo sapien
gcagctgtggtcatatagggtgttc

SEQ ID NO: 1165694 - DNA, 25 bp, Homo sapien
agattctagcgccttgcaaagcaga

SEQ ID NO: 1165695 - DNA, 25 bp, Homo sapien
taaggagaacttctgagggcccctg

SEQ ID NO: 1165696 - DNA, 25 bp, Homo sapien
gagctgatagcaaaaataccccatt

SEQ ID NO: 1165697 - DNA, 25 bp, Homo sapien
gaatggctgtcgtcacttgtctcct

SEQ ID NO: 1165698 - DNA, 25 bp, Homo sapien
tctaaagcatctccatggtcggcat

SEQ ID NO: 1165699 - DNA, 25 bp, Homo sapien
ctgctgtaggagtaaagagacttga

SEQ ID NO: 1165700 - DNA, 25 bp, Homo sapien
gaattatgcagctcgttttgaggaa

SEQ ID NO: 1165701 - DNA, 25 bp, Homo sapien
caaagtctcaacgttggagacacag

SEQ ID NO: 1165702 - DNA, 25 bp, Homo sapien
tcaacctctattgcccattggtaga

SEQ ID NO: 1165703 - DNA, 25 bp, Homo sapien
cagacgtttgtcaggaggagctaca

SEQ ID NO: 1165704 - DNA, 25 bp, Homo sapien
aagtcaagggcacgatggatcaggc

SEQ ID NO: 1165705 - DNA, 25 bp, Homo sapien
tcacgccctggatcaagctgttaag

SEQ ID NO: 1165706 - DNA, 25 bp, Homo sapien
gagactagtggtatgaccccaactg

SEQ ID NO: 1165707 - DNA, 25 bp, Homo sapien
catttttacaagagaagacacaagg

SEQ ID NO: 1165708 - DNA, 25 bp, Homo sapien
ttacaagagaagacacaaggtaaag

SEQ ID NO: 1165709 - DNA, 25 bp, Homo sapien
tttttacaagagaagacacaaggta

SEQ ID NO: 1165710 - DNA, 25 bp, Homo sapien
ttttacaagagaagacacaaggtaa

SEQ ID NO: 1165711 - DNA, 25 bp, Homo sapien
tgtagattagcattacagcattatg

SEQ ID NO: 1165712 - DNA, 25 bp, Homo sapien
gcattacagcattatgcaatttcac

SEQ ID NO: 1165713 - DNA, 25 bp, Homo sapien
gtggtgcattaacaaattcaacata

SEQ ID NO: 1165714 - DNA, 25 bp, Homo sapien
ttgcacttgtgtggtgcattaacaa

SEQ ID NO: 1165715 - DNA, 25 bp, Homo sapien
tagtcaggcagtagaaacattgcca

SEQ ID NO: 1165716 - DNA, 25 bp, Homo sapien
gctaggtagcttgacaggtatgata

SEQ ID NO: 1165717 - DNA, 25 bp, Homo sapien
ccagaccggtaaattataagatcca

SEQ ID NO: 1165718 - DNA, 25 bp, Homo sapien
ggcccaagcaagaaattgacactat

SEQ ID NO: 1165719 - DNA, 25 bp, Homo sapien
ggtactcagccatccaaaagtgaaa

SEQ ID NO: 1165720 - DNA, 25 bp, Homo sapien
tgcaggacacaaatctcacaggaac

SEQ ID NO: 1165721 - DNA, 25 bp, Homo sapien
ctagcatttgattctgtgcaggaca

SEQ ID NO: 1165722 - DNA, 25 bp, Homo sapien
ggaactatagcactttggaaaagca

SEQ ID NO: 1165723 - DNA, 25 bp, Homo sapien
aatactcaggacattaggaatttcc

SEQ ID NO: 1165724 - DNA, 25 bp, Homo sapien
tacagtagttaggaatatgcatcca

SEQ ID NO: 1165725 - DNA, 25 bp, Homo sapien
ccaattagatttgcaatcccggtga

SEQ ID NO: 1165726 - DNA, 25 bp, Homo sapien
gtagcatttgtagaaccacttttgg

SEQ ID NO: 1165727 - DNA, 25 bp, Homo sapien
tgggagagggcacagaaagtcagct

SEQ ID NO: 1165728 - DNA, 25 bp, Homo sapien
taactcttgttgcagaacgctaata

SEQ ID NO: 1165729 - DNA, 25 bp, Homo sapien
taaggaagcaggtttgattctaagg

SEQ ID NO: 1165730 - DNA, 25 bp, Homo sapien
tgtgcctagccctccgatgtctttt

SEQ ID NO: 1165731 - DNA, 25 bp, Homo sapien
tctgcagtggcatagaatctgttaa

SEQ ID NO: 1165732 - DNA, 25 bp, Homo sapien
tatataactggttacaaacagagcc

SEQ ID NO: 1165733 - DNA, 25 bp, Homo sapien
aagcatcctaacagggtcgttccca

SEQ ID NO: 1165734 - DNA, 25 bp, Homo sapien
ccttttccaggtgaatagccccagt

SEQ ID NO: 1165735 - DNA, 25 bp, Homo sapien
cacgagctaaacaacagatgccatt

SEQ ID NO: 1165736 - DNA, 25 bp, Homo sapien
tggatggctccctaggaaacagtgg

SEQ ID NO: 1165737 - DNA, 25 bp, Homo sapien
ggaacagagttttgaccctcagtga

SEQ ID NO: 1165738 - DNA, 25 bp, Homo sapien
gcagaagttagagattcagtgcccc

SEQ ID NO: 1165739 - DNA, 25 bp, Homo sapien
cattgaccctgtgacctcaaaatgg

SEQ ID NO: 1165740 - DNA, 25 bp, Homo sapien
gctggtgctgtttttcgtgtgatct

SEQ ID NO: 1165741 - DNA, 25 bp, Homo sapien
tcgtgtgatcttcaacgtttttggg

SEQ ID NO: 1165742 - DNA, 25 bp, Homo sapien
cgtttttgggtgaccattgaccctg

SEQ ID NO: 1165743 - DNA, 25 bp, Homo sapien
taatggatttatggtgggtccttct

SEQ ID NO: 1165744 - DNA, 25 bp, Homo sapien
gacttaatgagagcatggtaatgga

SEQ ID NO: 1165745 - DNA, 25 bp, Homo sapien
tggcagcctcgaaccattgcccagt

SEQ ID NO: 1165746 - DNA, 25 bp, Homo sapien
tagtgtacccatgccatagcaaatg

SEQ ID NO: 1165747 - DNA, 25 bp, Homo sapien
cacgtagcactttttgtgaagagca

SEQ ID NO: 1165748 - DNA, 25 bp, Homo sapien
ccagacacgggaattagtggacagt

SEQ ID NO: 1165749 - DNA, 25 bp, Homo sapien
acagggctctgtatagcaagttggc

SEQ ID NO: 1165750 - DNA, 25 bp, Homo sapien
aaagtgtccctgatggctgttctaa

SEQ ID NO: 1165751 - DNA, 25 bp, Homo sapien
tggagaggcagaagtattgagtgtg

SEQ ID NO: 1165752 - DNA, 25 bp, Homo sapien
gagaggcagaagtattgagtgtggg

SEQ ID NO: 1165753 - DNA, 25 bp, Homo sapien
agcacactgcctccggaggcattgg

SEQ ID NO: 1165754 - DNA, 25 bp, Homo sapien
aggcagaagtattgagtgtgggcat

SEQ ID NO: 1165755 - DNA, 25 bp, Homo sapien
catagacgttgaggacagtggccgt

SEQ ID NO: 1165756 - DNA, 25 bp, Homo sapien
gctctccgggcacagttactcagta

SEQ ID NO: 1165757 - DNA, 25 bp, Homo sapien
caaatttcccagcaagccaatggcc

SEQ ID NO: 1165758 - DNA, 25 bp, Homo sapien
cgtcagaaccatcttgcagagggca

SEQ ID NO: 1165759 - DNA, 25 bp, Homo sapien
ttgcttgcgacccaccgcctgccta

SEQ ID NO: 1165760 - DNA, 25 bp, Homo sapien
cagggtagaagggcggctctcccgg

SEQ ID NO: 1165761 - DNA, 25 bp, Homo sapien
ccaggttggtgagcagggtagaagg

SEQ ID NO: 1165762 - DNA, 25 bp, Homo sapien
gctctcccgggggttgcttgcgacc

SEQ ID NO: 1165763 - DNA, 25 bp, Homo sapien
agaggagtgtgttcagcttgcgccc

SEQ ID NO: 1165764 - DNA, 25 bp, Homo sapien
atcctacacttggtggatctcagaa

SEQ ID NO: 1165765 - DNA, 25 bp, Homo sapien
cacttggtggatctcagaaagagga

SEQ ID NO: 1165766 - DNA, 25 bp, Homo sapien
gaggagtgtgttcagcttgcgccct

SEQ ID NO: 1165767 - DNA, 25 bp, Homo sapien
cccagaggagccaatatccggagcc

SEQ ID NO: 1165768 - DNA, 25 bp, Homo sapien
gggcccataaagcagagatgccccc

SEQ ID NO: 1165769 - DNA, 25 bp, Homo sapien
agccaatatccggagcccagcaaag

SEQ ID NO: 1165770 - DNA, 25 bp, Homo sapien
agaggagccaatatccggagcccag

SEQ ID NO: 1165771 - DNA, 25 bp, Homo sapien
ccactaggcccttgttgatctccat

SEQ ID NO: 1165772 - DNA, 25 bp, Homo sapien
ttgttgatctccatgatgtcgggcc

SEQ ID NO: 1165773 - DNA, 25 bp, Homo sapien
catcccccactaggcccttgttgat

SEQ ID NO: 1165774 - DNA, 25 bp, Homo sapien
tgtcagatccatcccccactaggcc

SEQ ID NO: 1165775 - DNA, 25 bp, Homo sapien
gaaccaagccatagggatcagaggg

SEQ ID NO: 1165776 - DNA, 25 bp, Homo sapien
tttgtaccaaagtcaactgcacgtg

SEQ ID NO: 1165777 - DNA, 25 bp, Homo sapien
tcgtaggcaattagagatcgaagcc

SEQ ID NO: 1165778 - DNA, 25 bp, Homo sapien
tgcaacatccgtcttggaggagagg

SEQ ID NO: 1165779 - DNA, 25 bp, Homo sapien
tcccgtgtactgaagatccagcgtt

SEQ ID NO: 1165780 - DNA, 25 bp, Homo sapien
tgcagttagacacatggaaggcctt

SEQ ID NO: 1165781 - DNA, 25 bp, Homo sapien
taacttgcaacagagagaactgcag

SEQ ID NO: 1165782 - DNA, 25 bp, Homo sapien
gagtgaatcctacccttcccgtgta

SEQ ID NO: 1165783 - DNA, 25 bp, Homo sapien
tcttcatagagtatcagggtttgca

SEQ ID NO: 1165784 - DNA, 25 bp, Homo sapien
taggcctcacatagctgacaggtgg

SEQ ID NO: 1165785 - DNA, 25 bp, Homo sapien
tcataattttatgggtgggtacagc

SEQ ID NO: 1165786 - DNA, 25 bp, Homo sapien
ggcagcggaaacctcaaccattgga

SEQ ID NO: 1165787 - DNA, 25 bp, Homo sapien
tctcctcatgtcttctttttctcta

SEQ ID NO: 1165788 - DNA, 25 bp, Homo sapien
cctcatgtcttctttttctctatgc

SEQ ID NO: 1165789 - DNA, 25 bp, Homo sapien
tccatctcctcatgtcttctttttc

SEQ ID NO: 1165790 - DNA, 25 bp, Homo sapien
ctccatctcctcatgtcttcttttt

SEQ ID NO: 1165791 - DNA, 25 bp, Homo sapien
gttcccatggctcctaaattcttca

SEQ ID NO: 1165792 - DNA, 25 bp, Homo sapien
cctcaagatggagtattgggagctc

SEQ ID NO: 1165793 - DNA, 25 bp, Homo sapien
ttgggaacctgatctaggtgaagcg

SEQ ID NO: 1165794 - DNA, 25 bp, Homo sapien
ggaatagcgtcacatgcacctgcag

SEQ ID NO: 1165795 - DNA, 25 bp, Homo sapien
tcttcacaattttatgttccaagat

SEQ ID NO: 1165796 - DNA, 25 bp, Homo sapien
aattttatgttccaagattgcagta

SEQ ID NO: 1165797 - DNA, 25 bp, Homo sapien
tcacaattttatgttccaagattgc

SEQ ID NO: 1165798 - DNA, 25 bp, Homo sapien
caattttatgttccaagattgcagt

SEQ ID NO: 1165799 - DNA, 25 bp, Homo sapien
tggctttctgctatataagtcctca

SEQ ID NO: 1165800 - DNA, 25 bp, Homo sapien
tagactctgattccttgaggatagg

SEQ ID NO: 1165801 - DNA, 25 bp, Homo sapien
gctatataagtcctcagtaaatgga

SEQ ID NO: 1165802 - DNA, 25 bp, Homo sapien
ctctgattccttgaggataggaaca

SEQ ID NO: 1165803 - DNA, 25 bp, Homo sapien
gctgcagtgaggcttgagggtgaca

SEQ ID NO: 1165804 - DNA, 25 bp, Homo sapien
tgcagtgaggcttgagggtgacaga

SEQ ID NO: 1165805 - DNA, 25 bp, Homo sapien
gaggctgcagtgaggcttgagggtg

SEQ ID NO: 1165806 - DNA, 25 bp, Homo sapien
aggctgcagtgaggcttgagggtga

SEQ ID NO: 1165807 - DNA, 25 bp, Homo sapien
caggacagatttgtcccagaggcta

SEQ ID NO: 1165808 - DNA, 25 bp, Homo sapien
tcatagttatgttagtgtcagccca

SEQ ID NO: 1165809 - DNA, 25 bp, Homo sapien
aggacaactttgtcagggctcatca

SEQ ID NO: 1165810 - DNA, 25 bp, Homo sapien
taagagaaaacagtaggtgaccatc

SEQ ID NO: 1165811 - DNA, 25 bp, Homo sapien
tttatctgaggcgaagagaagctct

SEQ ID NO: 1165812 - DNA, 25 bp, Homo sapien
gggcactgctggattaatggttcac

SEQ ID NO: 1165813 - DNA, 25 bp, Homo sapien
attgtggcaccactctctggcagtg

SEQ ID NO: 1165814 - DNA, 25 bp, Homo sapien
ccagcgttcagccaagtcaggcgga

SEQ ID NO: 1165815 - DNA, 25 bp, Homo sapien
gaagtcaccaactgacagcagaaac

SEQ ID NO: 1165816 - DNA, 25 bp, Homo sapien
aagtcaccaactgacagcagaaaca

SEQ ID NO: 1165817 - DNA, 25 bp, Homo sapien
caaagtgctggactgggttcttaaa

SEQ ID NO: 1165818 - DNA, 25 bp, Homo sapien
tgaggaccctgctgtgaagtaggtt

SEQ ID NO: 1165819 - DNA, 25 bp, Homo sapien
tcccagagatgtccgctttctcccc

SEQ ID NO: 1165820 - DNA, 25 bp, Homo sapien
gctgtgaagtaggtttccagctgca

SEQ ID NO: 1165821 - DNA, 25 bp, Homo sapien
gctgcagctgtttctttcccagaga

SEQ ID NO: 1165822 - DNA, 25 bp, Homo sapien
gaagtccgatgtccgccccagctgt

SEQ ID NO: 1165823 - DNA, 25 bp, Homo sapien
tccgatgtccgccccagctgtcttc

SEQ ID NO: 1165824 - DNA, 25 bp, Homo sapien
aggaagtccgatgtccgccccagct

SEQ ID NO: 1165825 - DNA, 25 bp, Homo sapien
tcaggaagtccgatgtccgccccag

SEQ ID NO: 1165826 - DNA, 25 bp, Homo sapien
aagggaactagtctgatatgcatca

SEQ ID NO: 1165827 - DNA, 25 bp, Homo sapien
cattttgcactccaggactatggag

SEQ ID NO: 1165828 - DNA, 25 bp, Homo sapien
gaggcttgggtttgagaacaggtgt

SEQ ID NO: 1165829 - DNA, 25 bp, Homo sapien
ggactatggagtgttagcctctgaa

SEQ ID NO: 1165830 - DNA, 25 bp, Homo sapien
tctcagccatagtgaaggaccagcc

SEQ ID NO: 1165831 - DNA, 25 bp, Homo sapien
ggttccatcgtgaagccataaacag

SEQ ID NO: 1165832 - DNA, 25 bp, Homo sapien
tatgacactcccaaaacgaagaaga

SEQ ID NO: 1165833 - DNA, 25 bp, Homo sapien
gactcttggaggatacccagtgtct

SEQ ID NO: 1165834 - DNA, 25 bp, Homo sapien
gtcgaggagacccctgtttctggcc

SEQ ID NO: 1165835 - DNA, 25 bp, Homo sapien
aggtcgaggagacccctgtttctgg

SEQ ID NO: 1165836 - DNA, 25 bp, Homo sapien
ggtcgaggagacccctgtttctggc

SEQ ID NO: 1165837 - DNA, 25 bp, Homo sapien
cacggaagtggttgtcatagcaaca

SEQ ID NO: 1165838 - DNA, 25 bp, Homo sapien
catagcaacaggagggtagggtcct

SEQ ID NO: 1165839 - DNA, 25 bp, Homo sapien
cattcacaattctttactcccggag

SEQ ID NO: 1165840 - DNA, 25 bp, Homo sapien
tactcccggagtcctcacggaagtg

SEQ ID NO: 1165841 - DNA, 25 bp, Homo sapien
tgttgatggatgtcaaggatacagc

SEQ ID NO: 1165842 - DNA, 25 bp, Homo sapien
tagcccaagtcatcaatgaagctgt

SEQ ID NO: 1165843 - DNA, 25 bp, Homo sapien
tcctgactcccttggtagcccaagt

SEQ ID NO: 1165844 - DNA, 25 bp, Homo sapien
caatgaagctgttgatggatgtcaa

SEQ ID NO: 1165845 - DNA, 25 bp, Homo sapien
aggggtgggagggatgcagggtggg

SEQ ID NO: 1165846 - DNA, 25 bp, Homo sapien
gagggatgcagggtggggcacttac

SEQ ID NO: 1165847 - DNA, 25 bp, Homo sapien
gtgggagggatgcagggtggggcac

SEQ ID NO: 1165848 - DNA, 25 bp, Homo sapien
ctgaggggtgggagggatgcagggt

SEQ ID NO: 1165849 - DNA, 25 bp, Homo sapien
tgatggtagaacaggggtgcaagac

SEQ ID NO: 1165850 - DNA, 25 bp, Homo sapien
caaatgatggtagaacaggggtgca

SEQ ID NO: 1165851 - DNA, 25 bp, Homo sapien
aatgatggtagaacaggggtgcaag

SEQ ID NO: 1165852 - DNA, 25 bp, Homo sapien
tcaaatgatggtagaacaggggtgc

SEQ ID NO: 1165853 - DNA, 25 bp, Homo sapien
ccagagtcggatgccttgttttcct

SEQ ID NO: 1165854 - DNA, 25 bp, Homo sapien
gctccagagtcggatgccttgtttt

SEQ ID NO: 1165855 - DNA, 25 bp, Homo sapien
cttgctccagagtcggatgccttgt

SEQ ID NO: 1165856 - DNA, 25 bp, Homo sapien
tccagagtcggatgccttgttttcc

SEQ ID NO: 1165857 - DNA, 25 bp, Homo sapien
ggaccgaccccatggctgagaatat

SEQ ID NO: 1165858 - DNA, 25 bp, Homo sapien
aaagggtcccaagcagtccagagaa

SEQ ID NO: 1165859 - DNA, 25 bp, Homo sapien
ctgagaatatgacggcaagaggaac

SEQ ID NO: 1165860 - DNA, 25 bp, Homo sapien
caagaggaacagagtttgctccaag

SEQ ID NO: 1165861 - DNA, 25 bp, Homo sapien
ggacatcaacgcagctatcgagaga

SEQ ID NO: 1165862 - DNA, 25 bp, Homo sapien
aatcgtgaggctaacctgcaggccc

SEQ ID NO: 1165863 - DNA, 25 bp, Homo sapien
gacctgctggtcttagaaaccctta

SEQ ID NO: 1165864 - DNA, 25 bp, Homo sapien
aacagcagggtgactttagaggcat

SEQ ID NO: 1165865 - DNA, 25 bp, Homo sapien
aatctcccggaggtttaaggctcag

SEQ ID NO: 1165866 - DNA, 25 bp, Homo sapien
acggaatcaaggacgggctcactgt

SEQ ID NO: 1165867 - DNA, 25 bp, Homo sapien
tcgcaggcaagatcctcaaggatgg

SEQ ID NO: 1165868 - DNA, 25 bp, Homo sapien
cacactgaaccagcacggaatcaag

SEQ ID NO: 1165869 - DNA, 25 bp, Homo sapien
tgcccgctgcttcccgtagtcccgt

SEQ ID NO: 1165870 - DNA, 25 bp, Homo sapien
agatctccgaggtgcctcccgcggg

SEQ ID NO: 1165871 - DNA, 25 bp, Homo sapien
cgtagtcccgttggcctgctccggg

SEQ ID NO: 1165872 - DNA, 25 bp, Homo sapien
ggcttttgcacccagatctccgagg

SEQ ID NO: 1165873 - DNA, 25 bp, Homo sapien
tgggtcaaagccttggggcgcagca

SEQ ID NO: 1165874 - DNA, 25 bp, Homo sapien
gggtcaaagccttggggcgcagcat

SEQ ID NO: 1165875 - DNA, 25 bp, Homo sapien
ctgggtcaaagccttggggcgcagc

SEQ ID NO: 1165876 - DNA, 25 bp, Homo sapien
ctccagtgttggcttggcttagcac

SEQ ID NO: 1165877 - DNA, 25 bp, Homo sapien
cctccagtgttggcttggcttagca

SEQ ID NO: 1165878 - DNA, 25 bp, Homo sapien
gtctgggtttccatcccaagtccca

SEQ ID NO: 1165879 - DNA, 25 bp, Homo sapien
gtgtcccggaacatgccctaagcac

SEQ ID NO: 1165880 - DNA, 25 bp, Homo sapien
caagggcacatccagcaaggctctg

SEQ ID NO: 1165881 - DNA, 25 bp, Homo sapien
gagggatagcgatgtgctcagagcg

SEQ ID NO: 1165882 - DNA, 25 bp, Homo sapien
taggccagcagtgatccctcgttat

SEQ ID NO: 1165883 - DNA, 25 bp, Homo sapien
tgacccgggcgtcagtgtccccgta

SEQ ID NO: 1165884 - DNA, 25 bp, Homo sapien
gtgtccccgtaaccagagtaggcca

SEQ ID NO: 1165885 - DNA, 25 bp, Homo sapien
gttactggctatggcagcggtgacc

SEQ ID NO: 1165886 - DNA, 25 bp, Homo sapien
ttgtcttcattaaacgcttggttcc

SEQ ID NO: 1165887 - DNA, 25 bp, Homo sapien
tgtcttcattaaacgcttggttccc

SEQ ID NO: 1165888 - DNA, 25 bp, Homo sapien
taatcttccggagatcctgtccctg

SEQ ID NO: 1165889 - DNA, 25 bp, Homo sapien
tgctgcagaccaactcttagtaatc

SEQ ID NO: 1165890 - DNA, 25 bp, Homo sapien
cacttgatgaatagggtcctgccta

SEQ ID NO: 1165891 - DNA, 25 bp, Homo sapien
tcctcaccaccacttgatgaatagg

SEQ ID NO: 1165892 - DNA, 25 bp, Homo sapien
cacaatctaatggtgacttcccctt

SEQ ID NO: 1165893 - DNA, 25 bp, Homo sapien
ccatggttctgtgagtcggtgaaac

SEQ ID NO: 1165894 - DNA, 25 bp, Homo sapien
agctgagagaggttaagcgacttac

SEQ ID NO: 1165895 - DNA, 25 bp, Homo sapien
tgtcgaccgaacagatactaagaag

SEQ ID NO: 1165896 - DNA, 25 bp, Homo sapien
gccactcgggtgatggctacacggc

SEQ ID NO: 1165897 - DNA, 25 bp, Homo sapien
ctcgggtgatggctacacggccctc

SEQ ID NO: 1165898 - DNA, 25 bp, Homo sapien
ttggccactcgggtgatggctacac

SEQ ID NO: 1165899 - DNA, 25 bp, Homo sapien
cactcgggtgatggctacacggccc

SEQ ID NO: 1165900 - DNA, 25 bp, Homo sapien
aacacagtgtagaagcacgaaggct

SEQ ID NO: 1165901 - DNA, 25 bp, Homo sapien
gactgagtagacatgagaactctag

SEQ ID NO: 1165902 - DNA, 25 bp, Homo sapien
tgctcccagtgccataggaagcaac

SEQ ID NO: 1165903 - DNA, 25 bp, Homo sapien
caccagaaatggactgagtagacat

SEQ ID NO: 1165904 - DNA, 25 bp, Homo sapien
gagggagaacagagatcagtcccgc

SEQ ID NO: 1165905 - DNA, 25 bp, Homo sapien
ggagaacagagatcagtcccgcaca

SEQ ID NO: 1165906 - DNA, 25 bp, Homo sapien
agaacagagatcagtcccgcacaca

SEQ ID NO: 1165907 - DNA, 25 bp, Homo sapien
aacagagatcagtcccgcacacagc

SEQ ID NO: 1165908 - DNA, 25 bp, Homo sapien
tcctccaggtactgcaccaaagcct

SEQ ID NO: 1165909 - DNA, 25 bp, Homo sapien
cctccaggtactgcaccaaagcctg

SEQ ID NO: 1165910 - DNA, 25 bp, Homo sapien
ctccaggtactgcaccaaagcctgg

SEQ ID NO: 1165911 - DNA, 25 bp, Homo sapien
ctcctccaggtactgcaccaaagcc

SEQ ID NO: 1165912 - DNA, 25 bp, Homo sapien
ctcttttctgaccccagcttccacc

SEQ ID NO: 1165913 - DNA, 25 bp, Homo sapien
ctgaccccagcttccaccaatgccg

SEQ ID NO: 1165914 - DNA, 25 bp, Homo sapien
ctccaaatggtcatttctcttttct

SEQ ID NO: 1165915 - DNA, 25 bp, Homo sapien
atttctcttttctgaccccagcttc

SEQ ID NO: 1165916 - DNA, 25 bp, Homo sapien
caaagtcccatcctccccccattgt

SEQ ID NO: 1165917 - DNA, 25 bp, Homo sapien
cattgtctaagaaggttcttctagg

SEQ ID NO: 1165918 - DNA, 25 bp, Homo sapien
tgtctaagaaggttcttctaggagg

SEQ ID NO: 1165919 - DNA, 25 bp, Homo sapien
ccccattgtctaagaaggttcttct

SEQ ID NO: 1165920 - DNA, 25 bp, Homo sapien
gacagaggcgacaaatctgtgtgtt

SEQ ID NO: 1165921 - DNA, 25 bp, Homo sapien
agctctcaaaagatctggtcctgcc

SEQ ID NO: 1165922 - DNA, 25 bp, Homo sapien
caactcaaggttaggcagggcctag

SEQ ID NO: 1165923 - DNA, 25 bp, Homo sapien
tgtgtgttggctcaatgccctcaac

SEQ ID NO: 1165924 - DNA, 25 bp, Homo sapien
aaagttataatcttcctcagttcca

SEQ ID NO: 1165925 - DNA, 25 bp, Homo sapien
ttgaagacaaagttataatcttcct

SEQ ID NO: 1165926 - DNA, 25 bp, Homo sapien
ccttgaagacaaagttataatcttc

SEQ ID NO: 1165927 - DNA, 25 bp, Homo sapien
gacaaagttataatcttcctcagtt

SEQ ID NO: 1165928 - DNA, 25 bp, Homo sapien
cactggctgacaccagggatttggg

SEQ ID NO: 1165929 - DNA, 25 bp, Homo sapien
gtgctgcactggctgacaccaggga

SEQ ID NO: 1165930 - DNA, 25 bp, Homo sapien
tctcttgtgctgcactggctgacac

SEQ ID NO: 1165931 - DNA, 25 bp, Homo sapien
ctccatctcttgtgctgcactggct

SEQ ID NO: 1165932 - DNA, 25 bp, Homo sapien
ataagggctgagcatggggtagagc

SEQ ID NO: 1165933 - DNA, 25 bp, Homo sapien
ctgaaggagtggagagataagggct

SEQ ID NO: 1165934 - DNA, 25 bp, Homo sapien
gagcatggggtagagcagctccaac

SEQ ID NO: 1165935 - DNA, 25 bp, Homo sapien
tggggtagagcagctccaaccccac

SEQ ID NO: 1165936 - DNA, 25 bp, Homo sapien
tgtcgtggctgaactcattgcgcgt

SEQ ID NO: 1165937 - DNA, 25 bp, Homo sapien
tcacagtgcgggtggagaactcaac

SEQ ID NO: 1165938 - DNA, 25 bp, Homo sapien
gagagtagattggtcttccccacac

SEQ ID NO: 1165939 - DNA, 25 bp, Homo sapien
aactcaaccccgatggtggtgcggc

SEQ ID NO: 1165940 - DNA, 25 bp, Homo sapien
agaagtgttcctcgacttccccaga

SEQ ID NO: 1165941 - DNA, 25 bp, Homo sapien
tcctccagaagtgttcctcgacttc

SEQ ID NO: 1165942 - DNA, 25 bp, Homo sapien
tccagaagtgttcctcgacttcccc

SEQ ID NO: 1165943 - DNA, 25 bp, Homo sapien
ctcctccagaagtgttcctcgactt

SEQ ID NO: 1165944 - DNA, 25 bp, Homo sapien
tcttgagacacagtatcgctttgtc

SEQ ID NO: 1165945 - DNA, 25 bp, Homo sapien
ttttcttgagacacagtatcgcttt

SEQ ID NO: 1165946 - DNA, 25 bp, Homo sapien
ccgcgcccagctgacacttttttct

SEQ ID NO: 1165947 - DNA, 25 bp, Homo sapien
cttttttcttgagacacagtatcgc

SEQ ID NO: 1165948 - DNA, 25 bp, Homo sapien
ggtgggaatgagaaggatggacaga

SEQ ID NO: 1165949 - DNA, 25 bp, Homo sapien
aatgagaaggatggacagagatacg

SEQ ID NO: 1165950 - DNA, 25 bp, Homo sapien
ctgggtgggaatgagaaggatggac

SEQ ID NO: 1165951 - DNA, 25 bp, Homo sapien
gaatgagaaggatggacagagatac

SEQ ID NO: 1165952 - DNA, 25 bp, Homo sapien
ttcagcatggtcatagagctccttc

SEQ ID NO: 1165953 - DNA, 25 bp, Homo sapien
tgttacccacgagcatgacgacgat

SEQ ID NO: 1165954 - DNA, 25 bp, Homo sapien
cacagcataggtctggtgcttggtt

SEQ ID NO: 1165955 - DNA, 25 bp, Homo sapien
gacgacgatcgtggcttcagcatgg

SEQ ID NO: 1165956 - DNA, 25 bp, Homo sapien
gacagtctcaaaggctagctcaaca

SEQ ID NO: 1165957 - DNA, 25 bp, Homo sapien
aacattggtagagtccagggctgag

SEQ ID NO: 1165958 - DNA, 25 bp, Homo sapien
tagctcaacattggtagagtccagg

SEQ ID NO: 1165959 - DNA, 25 bp, Homo sapien
agtctcaaaggctagctcaacattg

SEQ ID NO: 1165960 - DNA, 25 bp, Homo sapien
tcccttctacttacttgggtggaga

SEQ ID NO: 1165961 - DNA, 25 bp, Homo sapien
ggtgcagaataaaggtaggctctaa

SEQ ID NO: 1165962 - DNA, 25 bp, Homo sapien
ggtggccacacttgcaggaggtttt

SEQ ID NO: 1165963 - DNA, 25 bp, Homo sapien
ctactgctgcctgtagaagccacgg

SEQ ID NO: 1165964 - DNA, 25 bp, Homo sapien
tcagaggctgatgcaacaggccctc

SEQ ID NO: 1165965 - DNA, 25 bp, Homo sapien
cattggtccggatgctgttctgtct

SEQ ID NO: 1165966 - DNA, 25 bp, Homo sapien
tctgtctctgcttggacaccttcgc

SEQ ID NO: 1165967 - DNA, 25 bp, Homo sapien
tgcttggacaccttcgcaaagattt

SEQ ID NO: 1165968 - DNA, 25 bp, Homo sapien
tgtgaacagggaacagtctgatatc

SEQ ID NO: 1165969 - DNA, 25 bp, Homo sapien
tgatatctggaaccaaagggcaagg

SEQ ID NO: 1165970 - DNA, 25 bp, Homo sapien
gaagaccttaagaccctgagggtgc

SEQ ID NO: 1165971 - DNA, 25 bp, Homo sapien
taaaagaggtatttgtgatagggca

SEQ ID NO: 1165972 - DNA, 25 bp, Homo sapien
taatcaagtcaaagtgatgttgcac

SEQ ID NO: 1165973 - DNA, 25 bp, Homo sapien
gaagacacgtacaaatccaccaagg

SEQ ID NO: 1165974 - DNA, 25 bp, Homo sapien
gtggtcagacttaatttgaggcatc

SEQ ID NO: 1165975 - DNA, 25 bp, Homo sapien
aagtagagtaggattgtggtcagac

SEQ ID NO: 1165976 - DNA, 25 bp, Homo sapien
ccctgggtccagtagaatgtataaa

SEQ ID NO: 1165977 - DNA, 25 bp, Homo sapien
taaagtttagtagcattgagggccc

SEQ ID NO: 1165978 - DNA, 25 bp, Homo sapien
ggtcttggaaaggatgcacactgat

SEQ ID NO: 1165979 - DNA, 25 bp, Homo sapien
ccagggttggatcaggttgctagtt

SEQ ID NO: 1165980 - DNA, 25 bp, Homo sapien
tttggatggtccctccattcctctt

SEQ ID NO: 1165981 - DNA, 25 bp, Homo sapien
caccttcatcactatgggcattata

SEQ ID NO: 1165982 - DNA, 25 bp, Homo sapien
tagtgtgtctgctatttaaaggagc

SEQ ID NO: 1165983 - DNA, 25 bp, Homo sapien
ttgatggaatgtatccccattctca

SEQ ID NO: 1165984 - DNA, 25 bp, Homo sapien
gtcaccagtttccagcagtgtaagg

SEQ ID NO: 1165985 - DNA, 25 bp, Homo sapien
taagggagttggagtcctatcagaa

SEQ ID NO: 1165986 - DNA, 25 bp, Homo sapien
tctttgcaatccctaagccctctgg

SEQ ID NO: 1165987 - DNA, 25 bp, Homo sapien
gaagcatgtcaatcgtttctgtggc

SEQ ID NO: 1165988 - DNA, 25 bp, Homo sapien
cgacttccatcccactcctagcttg

SEQ ID NO: 1165989 - DNA, 25 bp, Homo sapien
ccactcctagcttgccccggagctg

SEQ ID NO: 1165990 - DNA, 25 bp, Homo sapien
ggaaagaccgaaggccacatcccta

SEQ ID NO: 1165991 - DNA, 25 bp, Homo sapien
cccggagctgcgaggaaagaccgaa

SEQ ID NO: 1165992 - DNA, 25 bp, Homo sapien
gaagcggagagtgagcgcggcaggg

SEQ ID NO: 1165993 - DNA, 25 bp, Homo sapien
agcggagagtgagcgcggcagggag

SEQ ID NO: 1165994 - DNA, 25 bp, Homo sapien
aagcggagagtgagcgcggcaggga

SEQ ID NO: 1165995 - DNA, 25 bp, Homo sapien
ccccatcgctgctgcgggctttgtc

SEQ ID NO: 1165996 - DNA, 25 bp, Homo sapien
ccatcctttgccagggggttccagc

SEQ ID NO: 1165997 - DNA, 25 bp, Homo sapien
cagtcggtgcctctgagatctccga

SEQ ID NO: 1165998 - DNA, 25 bp, Homo sapien
gggagatggcttgctgtttagggat

SEQ ID NO: 1165999 - DNA, 25 bp, Homo sapien
gaacctcaggtcccttcatgtgaag

SEQ ID NO: 1166000 - DNA, 25 bp, Homo sapien
acctcaggtcccttcatgtgaagca

SEQ ID NO: 1166001 - DNA, 25 bp, Homo sapien
ctcaggtcccttcatgtgaagcaga

SEQ ID NO: 1166002 - DNA, 25 bp, Homo sapien
tcaggtcccttcatgtgaagcagag

SEQ ID NO: 1166003 - DNA, 25 bp, Homo sapien
ccgagtcaggaaacgactggtagca

SEQ ID NO: 1166004 - DNA, 25 bp, Homo sapien
ccccatgtgttggatgccagaagcc

SEQ ID NO: 1166005 - DNA, 25 bp, Homo sapien
caggaaacgactggtagcatcatta

SEQ ID NO: 1166006 - DNA, 25 bp, Homo sapien
ctgggtgttcgtcccgagtcaggaa

SEQ ID NO: 1166007 - DNA, 25 bp, Homo sapien
cctggccatagatgaaatgttttaa

SEQ ID NO: 1166008 - DNA, 25 bp, Homo sapien
ttaaatccttacaaggtagatatta

SEQ ID NO: 1166009 - DNA, 25 bp, Homo sapien
cacctggccatagatgaaatgtttt

SEQ ID NO: 1166010 - DNA, 25 bp, Homo sapien
ccgcacctggccatagatgaaatgt

SEQ ID NO: 1166011 - DNA, 25 bp, Homo sapien
cctgggtgacagagccagaacctat

SEQ ID NO: 1166012 - DNA, 25 bp, Homo sapien
gagccaggaggcagagggtgcagta

SEQ ID NO: 1166013 - DNA, 25 bp, Homo sapien
agccaagatcgtgccactgcactct

SEQ ID NO: 1166014 - DNA, 25 bp, Homo sapien
ttgagccaggaggcagagggtgcag

SEQ ID NO: 1166015 - DNA, 25 bp, Homo sapien
taagggatatccagaagtgaccagg

SEQ ID NO: 1166016 - DNA, 25 bp, Homo sapien
gaaaaagtgacatgtagttggacgc

SEQ ID NO: 1166017 - DNA, 25 bp, Homo sapien
aattgtaagggatatccagaagtga

SEQ ID NO: 1166018 - DNA, 25 bp, Homo sapien
gacatgtagttggacgcagtggctc

SEQ ID NO: 1166019 - DNA, 25 bp, Homo sapien
tgagaatacaggagtagactagatc

SEQ ID NO: 1166020 - DNA, 25 bp, Homo sapien
ggagtagactagatccaatccctgt

SEQ ID NO: 1166021 - DNA, 25 bp, Homo sapien
tacaggagtagactagatccaatcc

SEQ ID NO: 1166022 - DNA, 25 bp, Homo sapien
tagactagatccaatccctgttctc

SEQ ID NO: 1166023 - DNA, 25 bp, Homo sapien
cagcgcctgggcatgagatgagcaa

SEQ ID NO: 1166024 - DNA, 25 bp, Homo sapien
taggctggacatcccctaggaaaac

SEQ ID NO: 1166025 - DNA, 25 bp, Homo sapien
tgtcctcaagagaatagcagcctca

SEQ ID NO: 1166026 - DNA, 25 bp, Homo sapien
ccttccctgccgtgttaggctggac

SEQ ID NO: 1166027 - DNA, 25 bp, Homo sapien
ggcaggaaggaggttcctagagccc

SEQ ID NO: 1166028 - DNA, 25 bp, Homo sapien
ccaggacttcctggtgcctatggag

SEQ ID NO: 1166029 - DNA, 25 bp, Homo sapien
cctggtgcctatggaggttctccag

SEQ ID NO: 1166030 - DNA, 25 bp, Homo sapien
cgggaaggactggtaggcaggacac

SEQ ID NO: 1166031 - DNA, 25 bp, Homo sapien
gagcttggtggagctaaggtttaga

SEQ ID NO: 1166032 - DNA, 25 bp, Homo sapien
gggctaactgagcaccgacgacgca

SEQ ID NO: 1166033 - DNA, 25 bp, Homo sapien
gagctaagggggcatctgtttcctc

SEQ ID NO: 1166034 - DNA, 25 bp, Homo sapien
aactggcatgctctcaggccctggc

SEQ ID NO: 1166035 - DNA, 25 bp, Homo sapien
tcagtgacaggtaatgagaaaacca

SEQ ID NO: 1166036 - DNA, 25 bp, Homo sapien
ttcatcctacctaaagtgcacacaa

SEQ ID NO: 1166037 - DNA, 25 bp, Homo sapien
ggccagataagggacttttaatgct

SEQ ID NO: 1166038 - DNA, 25 bp, Homo sapien
cacacaattttgtggggaggccctc

SEQ ID NO: 1166039 - DNA, 25 bp, Homo sapien
ccagataagggacttttaatgctaa

SEQ ID NO: 1166040 - DNA, 25 bp, Homo sapien
cagtcaaatagaaatcgggcagcag

SEQ ID NO: 1166041 - DNA, 25 bp, Homo sapien
cagactattgccagtcaaatagaaa

SEQ ID NO: 1166042 - DNA, 25 bp, Homo sapien
ttcagcagaaattcagcagtgacat

SEQ ID NO: 1166043 - DNA, 25 bp, Homo sapien
cagcagaaattcagcagtgacatct

SEQ ID NO: 1166044 - DNA, 25 bp, Homo sapien
aaccctggacaggtaggagtcagag

SEQ ID NO: 1166045 - DNA, 25 bp, Homo sapien
tcagagacaggcgactctttggagg

SEQ ID NO: 1166046 - DNA, 25 bp, Homo sapien
cttaccatcaggtggctagaaccct

SEQ ID NO: 1166047 - DNA, 25 bp, Homo sapien
gaggtgatgtacagattctgggaca

SEQ ID NO: 1166048 - DNA, 25 bp, Homo sapien
aatatcttcaggcattgcctaacat

SEQ ID NO: 1166049 - DNA, 25 bp, Homo sapien
taccccttattgagaatcacttgtc

SEQ ID NO: 1166050 - DNA, 25 bp, Homo sapien
cgactttaggccagtagcacttcca

SEQ ID NO: 1166051 - DNA, 25 bp, Homo sapien
tcaggcattgcctaacatcccctgg

SEQ ID NO: 1166052 - DNA, 25 bp, Homo sapien
ccgtaagtaacaggcccagtgcaga

SEQ ID NO: 1166053 - DNA, 25 bp, Homo sapien
gggtccatacaacaacctcatgggt

SEQ ID NO: 1166054 - DNA, 25 bp, Homo sapien
gaccaggcagtctggtccaaatcct

SEQ ID NO: 1166055 - DNA, 25 bp, Homo sapien
gaaaaagctgagtgtgctctgacct

SEQ ID NO: 1166056 - DNA, 25 bp, Homo sapien
tagcatcctagtgtttcctctgtga

SEQ ID NO: 1166057 - DNA, 25 bp, Homo sapien
tacagaactgccttatacacagaga

SEQ ID NO: 1166058 - DNA, 25 bp, Homo sapien
acagcaggcactcggtgtttctaat

SEQ ID NO: 1166059 - DNA, 25 bp, Homo sapien
gaacatctactatataccaggaact

SEQ ID NO: 1166060 - DNA, 25 bp, Homo sapien
ttatcctccgatgagcaaccaggga

SEQ ID NO: 1166061 - DNA, 25 bp, Homo sapien
tacagctccaagatatcagggcttc

SEQ ID NO: 1166062 - DNA, 25 bp, Homo sapien
tcagggcttccctcaaacacaagga

SEQ ID NO: 1166063 - DNA, 25 bp, Homo sapien
aggaaagttctcatctcagtgaggg

SEQ ID NO: 1166064 - DNA, 25 bp, Homo sapien
ccgacgccggggcaaaggctctaat

SEQ ID NO: 1166065 - DNA, 25 bp, Homo sapien
ggcaaaggctctaataggtcctcct

SEQ ID NO: 1166066 - DNA, 25 bp, Homo sapien
cggggcaaaggctctaataggtcct

SEQ ID NO: 1166067 - DNA, 25 bp, Homo sapien
ctgagtcaccgacgccggggcaaag

SEQ ID NO: 1166068 - DNA, 25 bp, Homo sapien
tggtgtaggtgcggcgctcccgcga

SEQ ID NO: 1166069 - DNA, 25 bp, Homo sapien
gctggtgtaggtgcggcgctcccgc

SEQ ID NO: 1166070 - DNA, 25 bp, Homo sapien
ggctggtgtaggtgcggcgctcccg

SEQ ID NO: 1166071 - DNA, 25 bp, Homo sapien
tgtaggtgcggcgctcccgcgaaca

SEQ ID NO: 1166072 - DNA, 25 bp, Homo sapien
ctcggagtcggagtgcgccggccgg

SEQ ID NO: 1166073 - DNA, 25 bp, Homo sapien
cctggcaggcgtggggatctgggcc

SEQ ID NO: 1166074 - DNA, 25 bp, Homo sapien
ttgctcctggcaggcgtggggatct

SEQ ID NO: 1166075 - DNA, 25 bp, Homo sapien
tcctggcaggcgtggggatctgggc

SEQ ID NO: 1166076 - DNA, 25 bp, Homo sapien
ggcaggttggcagcgctgcccgcgg

SEQ ID NO: 1166077 - DNA, 25 bp, Homo sapien
cggcaggttggcagcgctgcccgcg

SEQ ID NO: 1166078 - DNA, 25 bp, Homo sapien
gccggcaggttggcagcgctgcccg

SEQ ID NO: 1166079 - DNA, 25 bp, Homo sapien
ggccggcaggttggcagcgctgccc

SEQ ID NO: 1166080 - DNA, 25 bp, Homo sapien
gcgccccgctgcgggtggcgcgccg

SEQ ID NO: 1166081 - DNA, 25 bp, Homo sapien
tgcgccccgctgcgggtggcgcgcc

SEQ ID NO: 1166082 - DNA, 25 bp, Homo sapien
tgtagaccgccaagcgatcattgag

SEQ ID NO: 1166083 - DNA, 25 bp, Homo sapien
gagtcaagggtcttgcgggcatccc

SEQ ID NO: 1166084 - DNA, 25 bp, Homo sapien
tcagactcggtgatgcgaaggcgca

SEQ ID NO: 1166085 - DNA, 25 bp, Homo sapien
ggcgcgctccttggctactgagtca

SEQ ID NO: 1166086 - DNA, 25 bp, Homo sapien
ggtagatgagtggactagtttagaa

SEQ ID NO: 1166087 - DNA, 25 bp, Homo sapien
cagaggagacaaactggcgtggctg

SEQ ID NO: 1166088 - DNA, 25 bp, Homo sapien
tgagcaagagaatatcgaatccact

SEQ ID NO: 1166089 - DNA, 25 bp, Homo sapien
ctcaatctgtttctcgatcaaagtt

SEQ ID NO: 1166090 - DNA, 25 bp, Homo sapien
tggacagctgcactaggaggcagag

SEQ ID NO: 1166091 - DNA, 25 bp, Homo sapien
actttctatcagcttgggatccagg

SEQ ID NO: 1166092 - DNA, 25 bp, Homo sapien
gcagggagtaaccaatcctggctcc

SEQ ID NO: 1166093 - DNA, 25 bp, Homo sapien
cctactgtgggcatagaagaggaca

SEQ ID NO: 1166094 - DNA, 25 bp, Homo sapien
taaatataacaagtacacacaccac

SEQ ID NO: 1166095 - DNA, 25 bp, Homo sapien
tcagtacactgggaccccaaggagg

SEQ ID NO: 1166096 - DNA, 25 bp, Homo sapien
cagtacactgggaccccaaggaggt

SEQ ID NO: 1166097 - DNA, 25 bp, Homo sapien
gccctcagagttccccattgccagg

SEQ ID NO: 1166098 - DNA, 25 bp, Homo sapien
agccctcagagttccccattgccag

SEQ ID NO: 1166099 - DNA, 25 bp, Homo sapien
cctcagagttccccattgccaggca

SEQ ID NO: 1166100 - DNA, 25 bp, Homo sapien
ctcagagttccccattgccaggcag

SEQ ID NO: 1166101 - DNA, 25 bp, Homo sapien
ctggtgggacaaggaagtccggctc

SEQ ID NO: 1166102 - DNA, 25 bp, Homo sapien
tgtgccagcagagtgccagtccttt

SEQ ID NO: 1166103 - DNA, 25 bp, Homo sapien
ggcttcgcccgtgtcctgccccagg

SEQ ID NO: 1166104 - DNA, 25 bp, Homo sapien
ccagtggcctcttgaggcgagaagg

SEQ ID NO: 1166105 - DNA, 25 bp, Homo sapien
gagaccctggcttcgcccgtgtcct

SEQ ID NO: 1166106 - DNA, 25 bp, Homo sapien
ggtcgggaaatcctctagtgctcac

SEQ ID NO: 1166107 - DNA, 25 bp, Homo sapien
gggtcgggaaatcctctagtgctca

SEQ ID NO: 1166108 - DNA, 25 bp, Homo sapien
gttccagatgtggatcccaggcctc

SEQ ID NO: 1166109 - DNA, 25 bp, Homo sapien
tggttccagatgtggatcccaggcc

SEQ ID NO: 1166110 - DNA, 25 bp, Homo sapien
catctaccatagcctcagcatctgg

SEQ ID NO: 1166111 - DNA, 25 bp, Homo sapien
ccatctaccatagcctcagcatctg

SEQ ID NO: 1166112 - DNA, 25 bp, Homo sapien
gctcagtgcggcctccttggagttc

SEQ ID NO: 1166113 - DNA, 25 bp, Homo sapien
cacctggccccgcagatcatgcagc

SEQ ID NO: 1166114 - DNA, 25 bp, Homo sapien
gagcagctatcaggtcaccctcctt

SEQ ID NO: 1166115 - DNA, 25 bp, Homo sapien
tccagcgtgcgcttctcactgagag

SEQ ID NO: 1166116 - DNA, 25 bp, Homo sapien
ccacccgccgcagcatctcatcctg

SEQ ID NO: 1166117 - DNA, 25 bp, Homo sapien
gcttcttggcctcacctagggctgc

SEQ ID NO: 1166118 - DNA, 25 bp, Homo sapien
ttcttggcctcacctagggctgcct

SEQ ID NO: 1166119 - DNA, 25 bp, Homo sapien
cttggcctcacctagggctgcctca

SEQ ID NO: 1166120 - DNA, 25 bp, Homo sapien
tggaggaaggacacagaaaccaaaa

SEQ ID NO: 1166121 - DNA, 25 bp, Homo sapien
aggaaggacacagaaaccaaaatca

SEQ ID NO: 1166122 - DNA, 25 bp, Homo sapien
ctggaagggttggaggaaggacaca

SEQ ID NO: 1166123 - DNA, 25 bp, Homo sapien
aaggacacagaaaccaaaatcagaa

SEQ ID NO: 1166124 - DNA, 25 bp, Homo sapien
tgtcaatctccaccagtcgggtctc

SEQ ID NO: 1166125 - DNA, 25 bp, Homo sapien
tccttcttatactgctccacctggt

SEQ ID NO: 1166126 - DNA, 25 bp, Homo sapien
agccggctctcaaactcacgctgct

SEQ ID NO: 1166127 - DNA, 25 bp, Homo sapien
cttggcagaataagtcttctccagc

SEQ ID NO: 1166128 - DNA, 25 bp, Homo sapien
accaggttgctgttcctctcagcag

SEQ ID NO: 1166129 - DNA, 25 bp, Homo sapien
gcggatgcgcgactgctgcagctcc

SEQ ID NO: 1166130 - DNA, 25 bp, Homo sapien
agaggctgtcgatgcggatgcgcga

SEQ ID NO: 1166131 - DNA, 25 bp, Homo sapien
caggttgctgttcctctcagcagac

SEQ ID NO: 1166132 - DNA, 25 bp, Homo sapien
cttggctggcaactgggaagtcctt

SEQ ID NO: 1166133 - DNA, 25 bp, Homo sapien
catcacaagctctaaacatagtctt

SEQ ID NO: 1166134 - DNA, 25 bp, Homo sapien
tcggtgtaggagacacctggctact

SEQ ID NO: 1166135 - DNA, 25 bp, Homo sapien
tccaggatctgcaatcagagcttcc

SEQ ID NO: 1166136 - DNA, 25 bp, Homo sapien
tgggagggtttggtgagctcccaag

SEQ ID NO: 1166137 - DNA, 25 bp, Homo sapien
gtgggagggtttggtgagctcccaa

SEQ ID NO: 1166138 - DNA, 25 bp, Homo sapien
ggtgggagggtttggtgagctccca

SEQ ID NO: 1166139 - DNA, 25 bp, Homo sapien
gagggtttggtgagctcccaagggc

SEQ ID NO: 1166140 - DNA, 25 bp, Homo sapien
gtgtcccgctcacgggccagtgagt

SEQ ID NO: 1166141 - DNA, 25 bp, Homo sapien
atccttgcccgcatctcggccatct

SEQ ID NO: 1166142 - DNA, 25 bp, Homo sapien
gagtcctccaggtctcgaagcttcg

SEQ ID NO: 1166143 - DNA, 25 bp, Homo sapien
cctccaagagcttgcggtaggcgtg

SEQ ID NO: 1166144 - DNA, 25 bp, Homo sapien
ccaagtgggggtctagtcaaggcca

SEQ ID NO: 1166145 - DNA, 25 bp, Homo sapien
gagagggagaccaagtgggggtcta

SEQ ID NO: 1166146 - DNA, 25 bp, Homo sapien
tcaaggccagttgccggccagagga

SEQ ID NO: 1166147 - DNA, 25 bp, Homo sapien
tctagtcaaggccagttgccggcca

SEQ ID NO: 1166148 - DNA, 25 bp, Homo sapien
ttgcgctttttggtgacgctgcccc

SEQ ID NO: 1166149 - DNA, 25 bp, Homo sapien
acgcgcccgctagtgcgtgcgtgct

SEQ ID NO: 1166150 - DNA, 25 bp, Homo sapien
tcagtggactccagtttgcgctttt

SEQ ID NO: 1166151 - DNA, 25 bp, Homo sapien
aagctgctgcggctctcagtggact

SEQ ID NO: 1166152 - DNA, 25 bp, Homo sapien
ctcattggacttgttgcgcagccgg

SEQ ID NO: 1166153 - DNA, 25 bp, Homo sapien
attggacttgttgcgcagccggaca

SEQ ID NO: 1166154 - DNA, 25 bp, Homo sapien
gcgcagccggacaaacttgccctcc

SEQ ID NO: 1166155 - DNA, 25 bp, Homo sapien
tgcgcagccggacaaacttgccctc

SEQ ID NO: 1166156 - DNA, 25 bp, Homo sapien
ggtctcacagccaaagagtccagga

SEQ ID NO: 1166157 - DNA, 25 bp, Homo sapien
tgtatccccttagaccctgagcagg

SEQ ID NO: 1166158 - DNA, 25 bp, Homo sapien
tggaggagatatacaggctcaccct

SEQ ID NO: 1166159 - DNA, 25 bp, Homo sapien
ggtgtatcttgctcaaaggcccagc

SEQ ID NO: 1166160 - DNA, 25 bp, Homo sapien
tttggtgggaaccggtaagtcagca

SEQ ID NO: 1166161 - DNA, 25 bp, Homo sapien
gtaagtcagcaagggatcatctcca

SEQ ID NO: 1166162 - DNA, 25 bp, Homo sapien
tcatctccattctggcgcttgatct

SEQ ID NO: 1166163 - DNA, 25 bp, Homo sapien
gcttgatctgccaattgcccatgga

SEQ ID NO: 1166164 - DNA, 25 bp, Homo sapien
agaaaaggacacttaccccagcgct

SEQ ID NO: 1166165 - DNA, 25 bp, Homo sapien
aaggcctccccagagtcccaagcgc

SEQ ID NO: 1166166 - DNA, 25 bp, Homo sapien
gctcccatcgccacccaaggcctcc

SEQ ID NO: 1166167 - DNA, 25 bp, Homo sapien
ccagcgctcccatcgccacccaagg

SEQ ID NO: 1166168 - DNA, 25 bp, Homo sapien
gagccgtacgcaggctgttcccgca

SEQ ID NO: 1166169 - DNA, 25 bp, Homo sapien
tgccttccacaccaggtcggtaggg

SEQ ID NO: 1166170 - DNA, 25 bp, Homo sapien
tgtgccttccacaccaggtcggtag

SEQ ID NO: 1166171 - DNA, 25 bp, Homo sapien
ccccagtggagttgatgagagccgt

SEQ ID NO: 1166172 - DNA, 25 bp, Homo sapien
tttgtccggcctgctgcttactctg

SEQ ID NO: 1166173 - DNA, 25 bp, Homo sapien
tgatggagctaaggaactcatttcc

SEQ ID NO: 1166174 - DNA, 25 bp, Homo sapien
ccagggaagggttgtacagcatgtc

SEQ ID NO: 1166175 - DNA, 25 bp, Homo sapien
gggacactgtcaagctctccgggta

SEQ ID NO: 1166176 - DNA, 25 bp, Homo sapien
ctgagcgcaccagcttgcgcatggc

SEQ ID NO: 1166177 - DNA, 25 bp, Homo sapien
gcgcaccagcttgcgcatggccact

SEQ ID NO: 1166178 - DNA, 25 bp, Homo sapien
aaccacagtcactgagcgcaccagc

SEQ ID NO: 1166179 - DNA, 25 bp, Homo sapien
gagcgcaccagcttgcgcatggcca

SEQ ID NO: 1166180 - DNA, 25 bp, Homo sapien
gatggagcaggtcatctccatcctc

SEQ ID NO: 1166181 - DNA, 25 bp, Homo sapien
agatttttggcacggggaggctggg

SEQ ID NO: 1166182 - DNA, 25 bp, Homo sapien
atgaaaagatttttggcacggggag

SEQ ID NO: 1166183 - DNA, 25 bp, Homo sapien
ctttaatgaaaagatttttggcacg

SEQ ID NO: 1166184 - DNA, 25 bp, Homo sapien
tccaaaacattctttaatgaaaaga

SEQ ID NO: 1166185 - DNA, 25 bp, Homo sapien
ttctgtgcccaaggagccagcgggc

SEQ ID NO: 1166186 - DNA, 25 bp, Homo sapien
cttaccagagtagggcacccagaca

SEQ ID NO: 1166187 - DNA, 25 bp, Homo sapien
tattccatggcatcagaaagttccc

SEQ ID NO: 1166188 - DNA, 25 bp, Homo sapien
tagctactctgagcttaagaggaaa

SEQ ID NO: 1166189 - DNA, 25 bp, Homo sapien
gagacaaggctcaggcgggacggcg

SEQ ID NO: 1166190 - DNA, 25 bp, Homo sapien
ggagacaaggctcaggcgggacggc

SEQ ID NO: 1166191 - DNA, 25 bp, Homo sapien
gacaaggctcaggcgggacggcgag

SEQ ID NO: 1166192 - DNA, 25 bp, Homo sapien
agacaaggctcaggcgggacggcga

SEQ ID NO: 1166193 - DNA, 25 bp, Homo sapien
cgcacagcacggtgcgcgagcgcag

SEQ ID NO: 1166194 - DNA, 25 bp, Homo sapien
gcaggttgtactcagcggggtcccc

SEQ ID NO: 1166195 - DNA, 25 bp, Homo sapien
tgggctcctgagccgctggcagatg

SEQ ID NO: 1166196 - DNA, 25 bp, Homo sapien
tgccttgtcggcaggctgcccgcag

SEQ ID NO: 1166197 - DNA, 25 bp, Homo sapien
ggtgaccagattgtccccgaagctg

SEQ ID NO: 1166198 - DNA, 25 bp, Homo sapien
gctggagttgcccaggaggtaggag

SEQ ID NO: 1166199 - DNA, 25 bp, Homo sapien
tagctgcgagtgaccgtgacactgg

SEQ ID NO: 1166200 - DNA, 25 bp, Homo sapien
agccagaggagatgggtccgcccac

SEQ ID NO: 1166201 - DNA, 25 bp, Homo sapien
cccctagaagggaggtagcatctcc

SEQ ID NO: 1166202 - DNA, 25 bp, Homo sapien
gacccgcctgcaggatttggagaca

SEQ ID NO: 1166203 - DNA, 25 bp, Homo sapien
gtcctacccctcgatgaccagggac

SEQ ID NO: 1166204 - DNA, 25 bp, Homo sapien
ttggagacaaagcagagacaactca

SEQ ID NO: 1166205 - DNA, 25 bp, Homo sapien
tacatgatgctgcagttctgggggc

SEQ ID NO: 1166206 - DNA, 25 bp, Homo sapien
ttacatgatgctgcagttctggggg

SEQ ID NO: 1166207 - DNA, 25 bp, Homo sapien
acatgatgctgcagttctgggggct

SEQ ID NO: 1166208 - DNA, 25 bp, Homo sapien
tggtacctgggagaatggactcacc

SEQ ID NO: 1166209 - DNA, 25 bp, Homo sapien
caagggctctttagcgtttgccaaa

SEQ ID NO: 1166210 - DNA, 25 bp, Homo sapien
gaaaagcaagcgcagctggtacctg

SEQ ID NO: 1166211 - DNA, 25 bp, Homo sapien
ccagggtctaaagctagggaaggca

SEQ ID NO: 1166212 - DNA, 25 bp, Homo sapien
cccagcccagaagtggagaccctaa

SEQ ID NO: 1166213 - DNA, 25 bp, Homo sapien
gagaccctaacccaggcgtccaaga

SEQ ID NO: 1166214 - DNA, 25 bp, Homo sapien
ccccagcccagaagtggagacccta

SEQ ID NO: 1166215 - DNA, 25 bp, Homo sapien
cagcccagaagtggagaccctaacc

SEQ ID NO: 1166216 - DNA, 25 bp, Homo sapien
ctaagtgggagggactagaatctcc

SEQ ID NO: 1166217 - DNA, 25 bp, Homo sapien
atggcgaccgcatctctaagtggga

SEQ ID NO: 1166218 - DNA, 25 bp, Homo sapien
tcagcaggcaccaccgtgcacatgt

SEQ ID NO: 1166219 - DNA, 25 bp, Homo sapien
gaggtgaaaaggaggtacagtagcc

SEQ ID NO: 1166220 - DNA, 25 bp, Homo sapien
aatgccaggctttccggtctctcag

SEQ ID NO: 1166221 - DNA, 25 bp, Homo sapien
tggaatgccaggctttccggtctct

SEQ ID NO: 1166222 - DNA, 25 bp, Homo sapien
tggggatgccgctgcgtttccctcc

SEQ ID NO: 1166223 - DNA, 25 bp, Homo sapien
cctctggaatgccaggctttccggt

SEQ ID NO: 1166224 - DNA, 25 bp, Homo sapien
cccctcctccagtctgactagctct

SEQ ID NO: 1166225 - DNA, 25 bp, Homo sapien
aactcggtgtctggattctagggcg

SEQ ID NO: 1166226 - DNA, 25 bp, Homo sapien
agctctaggccagggaaaccggaat

SEQ ID NO: 1166227 - DNA, 25 bp, Homo sapien
ggctggaacgggagtgcggccctcc

SEQ ID NO: 1166228 - DNA, 25 bp, Homo sapien
catacccttgaaccagccacagtgg

SEQ ID NO: 1166229 - DNA, 25 bp, Homo sapien
cagaagcgtgtgtattggtggcagg

SEQ ID NO: 1166230 - DNA, 25 bp, Homo sapien
tctgggtgagcagttcttaccacat

SEQ ID NO: 1166231 - DNA, 25 bp, Homo sapien
gggcagagaaggttccctatctgga

SEQ ID NO: 1166232 - DNA, 25 bp, Homo sapien
ccgaggaccaataggagagccccag

SEQ ID NO: 1166233 - DNA, 25 bp, Homo sapien
cagccacagactgtcaccagggagc

SEQ ID NO: 1166234 - DNA, 25 bp, Homo sapien
tcagccacagactgtcaccagggag

SEQ ID NO: 1166235 - DNA, 25 bp, Homo sapien
agccacagactgtcaccagggagct

SEQ ID NO: 1166236 - DNA, 25 bp, Homo sapien
gctcagccacagactgtcaccaggg

SEQ ID NO: 1166237 - DNA, 25 bp, Homo sapien
cccgcggtcgtcgtcggcagcagca

SEQ ID NO: 1166238 - DNA, 25 bp, Homo sapien
ctgcatagtatctgaccctgggcat

SEQ ID NO: 1166239 - DNA, 25 bp, Homo sapien
gtgtctctctttctccgagatcctc

SEQ ID NO: 1166240 - DNA, 25 bp, Homo sapien
gtccctgtttctccatatccatttc

SEQ ID NO: 1166241 - DNA, 25 bp, Homo sapien
cacacttcctgctgtcggacactta

SEQ ID NO: 1166242 - DNA, 25 bp, Homo sapien
tggaagaagcgtgcccctggccccg

SEQ ID NO: 1166243 - DNA, 25 bp, Homo sapien
cttatccgtgtttgtgcgcccagca

SEQ ID NO: 1166244 - DNA, 25 bp, Homo sapien
caagagcgttgtgtgctgagcccgc

SEQ ID NO: 1166245 - DNA, 25 bp, Homo sapien
cagttaggagtttgaggtgcccagc

SEQ ID NO: 1166246 - DNA, 25 bp, Homo sapien
cagtagagtcaccacgaacagagag

SEQ ID NO: 1166247 - DNA, 25 bp, Homo sapien
aggagtaagacagagagagtgatga

SEQ ID NO: 1166248 - DNA, 25 bp, Homo sapien
gatgaggacttggtgggcaggcagc

SEQ ID NO: 1166249 - DNA, 25 bp, Homo sapien
taagacagagagagtgatgaggact

SEQ ID NO: 1166250 - DNA, 25 bp, Homo sapien
gacttggtgggcaggcagctgactc

SEQ ID NO: 1166251 - DNA, 25 bp, Homo sapien
tctggtggaagaagctaagtgccct

SEQ ID NO: 1166252 - DNA, 25 bp, Homo sapien
gagcagagtgtcaaaatcctggagg

SEQ ID NO: 1166253 - DNA, 25 bp, Homo sapien
gagtatttccatcaccactcaggag

SEQ ID NO: 1166254 - DNA, 25 bp, Homo sapien
ggatcctggatatccaaggccagaa

SEQ ID NO: 1166255 - DNA, 25 bp, Homo sapien
ttcttaaaggcacattcactctttt

SEQ ID NO: 1166256 - DNA, 25 bp, Homo sapien
ctcttcttcttaaaggcacattcac

SEQ ID NO: 1166257 - DNA, 25 bp, Homo sapien
ttctgtcactggctggccacggtat

SEQ ID NO: 1166258 - DNA, 25 bp, Homo sapien
cactcttttttctgtcactggctgg

SEQ ID NO: 1166259 - DNA, 25 bp, Homo sapien
aatgaaggtacaagcagggctgaag

SEQ ID NO: 1166260 - DNA, 25 bp, Homo sapien
ccgcaggtgtagagatgggtgacat

SEQ ID NO: 1166261 - DNA, 25 bp, Homo sapien
ccaggacacggatgaagttgaaaca

SEQ ID NO: 1166262 - DNA, 25 bp, Homo sapien
agggctgaaggcgaaggtgccgcag

SEQ ID NO: 1166263 - DNA, 25 bp, Homo sapien
ggacatagagggaaattggtctggg

SEQ ID NO: 1166264 - DNA, 25 bp, Homo sapien
agaacgccaaggtctcacatctggg

SEQ ID NO: 1166265 - DNA, 25 bp, Homo sapien
gggccagaacgccaaggtctcacat

SEQ ID NO: 1166266 - DNA, 25 bp, Homo sapien
ctggggggccagaacgccaaggtct

SEQ ID NO: 1166267 - DNA, 25 bp, Homo sapien
tgtcctccgagatgggcaacaggta

SEQ ID NO: 1166268 - DNA, 25 bp, Homo sapien
ccatgaccttgtcctccgagatggg

SEQ ID NO: 1166269 - DNA, 25 bp, Homo sapien
accaagacagccgtatgcttgtgag

SEQ ID NO: 1166270 - DNA, 25 bp, Homo sapien
aagacagccgtatgcttgtgagcgg

SEQ ID NO: 1166271 - DNA, 25 bp, Homo sapien
tccatatttcacagcgtgactggag

SEQ ID NO: 1166272 - DNA, 25 bp, Homo sapien
tcacagcgtgactggagaaagtaga

SEQ ID NO: 1166273 - DNA, 25 bp, Homo sapien
cctaaactcaagcatccttcaactt

SEQ ID NO: 1166274 - DNA, 25 bp, Homo sapien
taactgggaccatatgcacgcatca

SEQ ID NO: 1166275 - DNA, 25 bp, Homo sapien
tcaccgtagccttgaccatctcaag

SEQ ID NO: 1166276 - DNA, 25 bp, Homo sapien
ggatcacaggcgcttgtccggctaa

SEQ ID NO: 1166277 - DNA, 25 bp, Homo sapien
gtttataactcctatactacccagc

SEQ ID NO: 1166278 - DNA, 25 bp, Homo sapien
aactcctatactacccagcacagtg

SEQ ID NO: 1166279 - DNA, 25 bp, Homo sapien
tgcagccagcggaggaagttgtcgg

SEQ ID NO: 1166280 - DNA, 25 bp, Homo sapien
aagttgtcggtcttgaggacaggct

SEQ ID NO: 1166281 - DNA, 25 bp, Homo sapien
tgtgcgcatcaggatgggctcactg

SEQ ID NO: 1166282 - DNA, 25 bp, Homo sapien
catagtaccagaatagagcatccca

SEQ ID NO: 1166283 - DNA, 25 bp, Homo sapien
tcctcgaagaagaagtagacgacct

SEQ ID NO: 1166284 - DNA, 25 bp, Homo sapien
aaagaagtcaaactcgctggctgtc

SEQ ID NO: 1166285 - DNA, 25 bp, Homo sapien
tcgaagggatggctgccacaaagga

SEQ ID NO: 1166286 - DNA, 25 bp, Homo sapien
agactctagccacccgcgatgtgtg

SEQ ID NO: 1166287 - DNA, 25 bp, Homo sapien
cccgcagctcggcgtgtccccccag

SEQ ID NO: 1166288 - DNA, 25 bp, Homo sapien
ccgcagctcggcgtgtccccccagt

SEQ ID NO: 1166289 - DNA, 25 bp, Homo sapien
cgcagctcggcgtgtccccccagtc

SEQ ID NO: 1166290 - DNA, 25 bp, Homo sapien
ccccgcagctcggcgtgtcccccca

SEQ ID NO: 1166291 - DNA, 25 bp, Homo sapien
gcggatgacgttgaagggcagctgc

SEQ ID NO: 1166292 - DNA, 25 bp, Homo sapien
gaatcggcggggagcaggaccgcgt

SEQ ID NO: 1166293 - DNA, 25 bp, Homo sapien
gaggtgaagactgcgtagatgtggg

SEQ ID NO: 1166294 - DNA, 25 bp, Homo sapien
gcagcttttcgccgcccacgtcatt

SEQ ID NO: 1166295 - DNA, 25 bp, Homo sapien
agtaggtgctggctcatgtcaattc

SEQ ID NO: 1166296 - DNA, 25 bp, Homo sapien
gccttcctatgtgaaagtgctgagt

SEQ ID NO: 1166297 - DNA, 25 bp, Homo sapien
ttcctgagaggtggtgacgatttaa

SEQ ID NO: 1166298 - DNA, 25 bp, Homo sapien
gcctcactggcgtcaagtcccgtgt

SEQ ID NO: 1166299 - DNA, 25 bp, Homo sapien
gtagtccagcgtgaagtttctttgt

SEQ ID NO: 1166300 - DNA, 25 bp, Homo sapien
aagacacgttcaatgtccaagagag

SEQ ID NO: 1166301 - DNA, 25 bp, Homo sapien
tctcagggcccctataagtagtcca

SEQ ID NO: 1166302 - DNA, 25 bp, Homo sapien
agagaaggcacaaaccgcagagctc

SEQ ID NO: 1166303 - DNA, 25 bp, Homo sapien
ggcatttactatgccatgataggtg

SEQ ID NO: 1166304 - DNA, 25 bp, Homo sapien
tttattgggcatttactatgccatg

SEQ ID NO: 1166305 - DNA, 25 bp, Homo sapien
tgggcatttactatgccatgatagg

SEQ ID NO: 1166306 - DNA, 25 bp, Homo sapien
tattgggcatttactatgccatgat

SEQ ID NO: 1166307 - DNA, 25 bp, Homo sapien
taggcacatgtggaatataggcagc

SEQ ID NO: 1166308 - DNA, 25 bp, Homo sapien
gatggctccagcaactgctccgtgt

SEQ ID NO: 1166309 - DNA, 25 bp, Homo sapien
aactgctccgtgtataaaagggtgc

SEQ ID NO: 1166310 - DNA, 25 bp, Homo sapien
tataggcagctataccaggtgtacg

SEQ ID NO: 1166311 - DNA, 25 bp, Homo sapien
gctgtctccactgcaagccgtgtat

SEQ ID NO: 1166312 - DNA, 25 bp, Homo sapien
tggttcccaggtacatgacaagatg

SEQ ID NO: 1166313 - DNA, 25 bp, Homo sapien
gaaatggtccttcatgaaggtcagg

SEQ ID NO: 1166314 - DNA, 25 bp, Homo sapien
gtgtatactccacgccagatttcac

SEQ ID NO: 1166315 - DNA, 25 bp, Homo sapien
gtcagggaacagctgaatctcttcc

SEQ ID NO: 1166316 - DNA, 25 bp, Homo sapien
gggtcagggaacagctgaatctctt

SEQ ID NO: 1166317 - DNA, 25 bp, Homo sapien
cagctgcaggttgcgaacaggttca

SEQ ID NO: 1166318 - DNA, 25 bp, Homo sapien
aggttgcgaacaggttcagggtcag

SEQ ID NO: 1166319 - DNA, 25 bp, Homo sapien
tggaaggccatttgatggtcaggtc

SEQ ID NO: 1166320 - DNA, 25 bp, Homo sapien
aaggccatttgatggtcaggtccct

SEQ ID NO: 1166321 - DNA, 25 bp, Homo sapien
gaaggccatttgatggtcaggtccc

SEQ ID NO: 1166322 - DNA, 25 bp, Homo sapien
ggccatttgatggtcaggtcccttc

SEQ ID NO: 1166323 - DNA, 25 bp, Homo sapien
tcatagacactacagttggctcggg

SEQ ID NO: 1166324 - DNA, 25 bp, Homo sapien
caggaggcaacaggttcgggactca

SEQ ID NO: 1166325 - DNA, 25 bp, Homo sapien
gtccacacagctctcatagacacta

SEQ ID NO: 1166326 - DNA, 25 bp, Homo sapien
gggtcccgggcaaggacacagtcca

SEQ ID NO: 1166327 - DNA, 25 bp, Homo sapien
agtgcagtagggaagaaggtaggcc

SEQ ID NO: 1166328 - DNA, 25 bp, Homo sapien
agaggaacgcggaatggccagagca

SEQ ID NO: 1166329 - DNA, 25 bp, Homo sapien
aacgcggaatggccagagcagcttc

SEQ ID NO: 1166330 - DNA, 25 bp, Homo sapien
cctggaggaacccactgcaggatgg

SEQ ID NO: 1166331 - DNA, 25 bp, Homo sapien
atggggccactggcacatgcccact

SEQ ID NO: 1166332 - DNA, 25 bp, Homo sapien
ctgggttcccccgctccatgtcctg

SEQ ID NO: 1166333 - DNA, 25 bp, Homo sapien
ccactctgggttcccccgctccatg

SEQ ID NO: 1166334 - DNA, 25 bp, Homo sapien
ggggccactggcacatgcccactct

SEQ ID NO: 1166335 - DNA, 25 bp, Homo sapien
gcagttgttgtcagcgtccacatca

SEQ ID NO: 1166336 - DNA, 25 bp, Homo sapien
gctgctgggccatgactccaataat

SEQ ID NO: 1166337 - DNA, 25 bp, Homo sapien
gcactatcagcaagagggagccatt

SEQ ID NO: 1166338 - DNA, 25 bp, Homo sapien
tgtccacccagtaggagatcacagg

SEQ ID NO: 1166339 - DNA, 25 bp, Homo sapien
acttcctgggagtcagcggtgcacg

SEQ ID NO: 1166340 - DNA, 25 bp, Homo sapien
tgttcattaccatagggtcctggga

SEQ ID NO: 1166341 - DNA, 25 bp, Homo sapien
tcaatatcagtgtaggagcaggtct

SEQ ID NO: 1166342 - DNA, 25 bp, Homo sapien
tgaagaaggctcagattacccctgc

SEQ ID NO: 1166343 - DNA, 25 bp, Homo sapien
tagcaatgctcagagtggaggaaag

SEQ ID NO: 1166344 - DNA, 25 bp, Homo sapien
ccctctagcaatgctcagagtggag

SEQ ID NO: 1166345 - DNA, 25 bp, Homo sapien
gaggaaagtgctgtgggctggttct

SEQ ID NO: 1166346 - DNA, 25 bp, Homo sapien
gtttgcagcaccctctagcaatgct

SEQ ID NO: 1166347 - DNA, 25 bp, Homo sapien
gtttcggagagagccatttgagcag

SEQ ID NO: 1166348 - DNA, 25 bp, Homo sapien
caccaaggtcagatttggcattagg

SEQ ID NO: 1166349 - DNA, 25 bp, Homo sapien
ggactcactcccatgtttggtggta

SEQ ID NO: 1166350 - DNA, 25 bp, Homo sapien
gagaacgcctgaacacacctgtagg

SEQ ID NO: 1166351 - DNA, 25 bp, Homo sapien
tcttgcttttccccacagtgccact

SEQ ID NO: 1166352 - DNA, 25 bp, Homo sapien
ctctcttgcttttccccacagtgcc

SEQ ID NO: 1166353 - DNA, 25 bp, Homo sapien
acacacacacacagtggcgcaatct

SEQ ID NO: 1166354 - DNA, 25 bp, Homo sapien
tgcttttccccacagtgccactgca

SEQ ID NO: 1166355 - DNA, 25 bp, Homo sapien
agggggccctgccgccttccgcagt

SEQ ID NO: 1166356 - DNA, 25 bp, Homo sapien
ggggccctgccgccttccgcagtgt

SEQ ID NO: 1166357 - DNA, 25 bp, Homo sapien
gctttcctaggcagggggccctgcc

SEQ ID NO: 1166358 - DNA, 25 bp, Homo sapien
gcagggggccctgccgccttccgca

SEQ ID NO: 1166359 - DNA, 25 bp, Homo sapien
tgagctgtcggggattctgccaatg

SEQ ID NO: 1166360 - DNA, 25 bp, Homo sapien
ggaaccggaaattaggactctgtca

SEQ ID NO: 1166361 - DNA, 25 bp, Homo sapien
ccggaaattaggactctgtcattac

SEQ ID NO: 1166362 - DNA, 25 bp, Homo sapien
aattaggactctgtcattaccgccc

SEQ ID NO: 1166363 - DNA, 25 bp, Homo sapien
atccgtcgttcccagcgaatgccgt

SEQ ID NO: 1166364 - DNA, 25 bp, Homo sapien
tatccgtcgttcccagcgaatgccg

SEQ ID NO: 1166365 - DNA, 25 bp, Homo sapien
ctatccgtcgttcccagcgaatgcc

SEQ ID NO: 1166366 - DNA, 25 bp, Homo sapien
aaaactgcatggtaccgcagcctga

SEQ ID NO: 1166367 - DNA, 25 bp, Homo sapien
gggtcttcgaacatgccccttgccg

SEQ ID NO: 1166368 - DNA, 25 bp, Homo sapien
cgaatctcacgatcctctgccagga

SEQ ID NO: 1166369 - DNA, 25 bp, Homo sapien
tcagagaccttagttgtcagggacc

SEQ ID NO: 1166370 - DNA, 25 bp, Homo sapien
atccgtcgttcccagcgaatgccgt

SEQ ID NO: 1166371 - DNA, 25 bp, Homo sapien
tatccgtcgttcccagcgaatgccg

SEQ ID NO: 1166372 - DNA, 25 bp, Homo sapien
ctatccgtcgttcccagcgaatgcc

SEQ ID NO: 1166373 - DNA, 25 bp, Homo sapien
gaaacaccaagtatcagcatctcct

SEQ ID NO: 1166374 - DNA, 25 bp, Homo sapien
tcatgccttagagggataagccact

SEQ ID NO: 1166375 - DNA, 25 bp, Homo sapien
ggtaggatctcaacctgctctgtta

SEQ ID NO: 1166376 - DNA, 25 bp, Homo sapien
caggctgctcctaaaaggtaggatc

SEQ ID NO: 1166377 - DNA, 25 bp, Homo sapien
tatggacaaaccaactacctggcag

SEQ ID NO: 1166378 - DNA, 25 bp, Homo sapien
tacagagtacagaacacgttggacc

SEQ ID NO: 1166379 - DNA, 25 bp, Homo sapien
tgatgtgctccagtgtatcccaccg

SEQ ID NO: 1166380 - DNA, 25 bp, Homo sapien
aatggctggcagtcacgttgtcaac

SEQ ID NO: 1166381 - DNA, 25 bp, Homo sapien
gagcagtatggagggatgtgaagaa

SEQ ID NO: 1166382 - DNA, 25 bp, Homo sapien
cagtatggagggatgtgaagaagga

SEQ ID NO: 1166383 - DNA, 25 bp, Homo sapien
gatttgagcagtatggagggatgtg

SEQ ID NO: 1166384 - DNA, 25 bp, Homo sapien
ctgggatttgagcagtatggaggga

SEQ ID NO: 1166385 - DNA, 25 bp, Homo sapien
tgggagactacatcaatgggcactg

SEQ ID NO: 1166386 - DNA, 25 bp, Homo sapien
tagtcagctacaaacttccgggtga

SEQ ID NO: 1166387 - DNA, 25 bp, Homo sapien
tgaagccacatagcctcgatagaag

SEQ ID NO: 1166388 - DNA, 25 bp, Homo sapien
tcgaaggtcccatggtagaggctct

SEQ ID NO: 1166389 - DNA, 25 bp, Homo sapien
cagtaccctggagcagtatgagtaa

SEQ ID NO: 1166390 - DNA, 25 bp, Homo sapien
tatgagatccaagaggtaagtcact

SEQ ID NO: 1166391 - DNA, 25 bp, Homo sapien
cagtgcaagccacatggatctgtag

SEQ ID NO: 1166392 - DNA, 25 bp, Homo sapien
gcccattccaagaaggtgaagtctg

SEQ ID NO: 1166393 - DNA, 25 bp, Homo sapien
gaaagacaatgtgagggcactcctt

SEQ ID NO: 1166394 - DNA, 25 bp, Homo sapien
gggccccgagacagcttgaaagaca

SEQ ID NO: 1166395 - DNA, 25 bp, Homo sapien
cacgggttcgtatgacatccatggg

SEQ ID NO: 1166396 - DNA, 25 bp, Homo sapien
ggcactccttaggacacaggtagga

SEQ ID NO: 1166397 - DNA, 25 bp, Homo sapien
gtgcctggctgtgggctggcttctg

SEQ ID NO: 1166398 - DNA, 25 bp, Homo sapien
cctggctgtgggctggcttctgcag

SEQ ID NO: 1166399 - DNA, 25 bp, Homo sapien
ggctgtgggctggcttctgcagatg

SEQ ID NO: 1166400 - DNA, 25 bp, Homo sapien
ctggctgtgggctggcttctgcaga

SEQ ID NO: 1166401 - DNA, 25 bp, Homo sapien
ctgaaatcgatatttcttataacca

SEQ ID NO: 1166402 - DNA, 25 bp, Homo sapien
gaattaactgaaatcgatatttctt

SEQ ID NO: 1166403 - DNA, 25 bp, Homo sapien
cagacagacttatgaattaactgaa

SEQ ID NO: 1166404 - DNA, 25 bp, Homo sapien
gaaaaaccagacagacttatgaatt

SEQ ID NO: 1166405 - DNA, 25 bp, Homo sapien
caatactctctcatgtgaccgtctc

SEQ ID NO: 1166406 - DNA, 25 bp, Homo sapien
tctccaatactctctcatgtgaccg

SEQ ID NO: 1166407 - DNA, 25 bp, Homo sapien
tactctctcatgtgaccgtctctgc

SEQ ID NO: 1166408 - DNA, 25 bp, Homo sapien
tctctcatgtgaccgtctctgcttc

SEQ ID NO: 1166409 - DNA, 25 bp, Homo sapien
ggccgagaggcccttcatgaggccc

SEQ ID NO: 1166410 - DNA, 25 bp, Homo sapien
tccaccagctcaggtcggaggctga

SEQ ID NO: 1166411 - DNA, 25 bp, Homo sapien
tcatagcccaccacaatgacaatgg

SEQ ID NO: 1166412 - DNA, 25 bp, Homo sapien
tcaggtcggaggctgagtttcttga

SEQ ID NO: 1166413 - DNA, 25 bp, Homo sapien
tctcaaggtagtgctccaagtccag

SEQ ID NO: 1166414 - DNA, 25 bp, Homo sapien
tcaggtttccagtctcccagaggtt

SEQ ID NO: 1166415 - DNA, 25 bp, Homo sapien
tccaggtcacacgtctcaggtagaa

SEQ ID NO: 1166416 - DNA, 25 bp, Homo sapien
taccatgactgggatgactacgcat

SEQ ID NO: 1166417 - DNA, 25 bp, Homo sapien
cgaagacgacccctcatgccttttt

SEQ ID NO: 1166418 - DNA, 25 bp, Homo sapien
tcctcacagccgctgcctagattgg

SEQ ID NO: 1166419 - DNA, 25 bp, Homo sapien
tgccgggtggcacagattccgaaga

SEQ ID NO: 1166420 - DNA, 25 bp, Homo sapien
gtggcacagattccgaagacgaccc

SEQ ID NO: 1166421 - DNA, 25 bp, Homo sapien
ccggcggcgaccagcttctgaagaa

SEQ ID NO: 1166422 - DNA, 25 bp, Homo sapien
ctgccggcggcgaccagcttctgaa

SEQ ID NO: 1166423 - DNA, 25 bp, Homo sapien
cggcggcgaccagcttctgaagaaa

SEQ ID NO: 1166424 - DNA, 25 bp, Homo sapien
gccggcggcgaccagcttctgaaga

SEQ ID NO: 1166425 - DNA, 25 bp, Homo sapien
cgcgggatttgagcttcggtgccaa

SEQ ID NO: 1166426 - DNA, 25 bp, Homo sapien
ttgactgacaagaagccgacgaggg

SEQ ID NO: 1166427 - DNA, 25 bp, Homo sapien
taaaccctgatctgtagccgggcgc

SEQ ID NO: 1166428 - DNA, 25 bp, Homo sapien
tgctcacatagtggtgggccgcgac

SEQ ID NO: 1166429 - DNA, 25 bp, Homo sapien
gctgttataactcaccgaagcctca

SEQ ID NO: 1166430 - DNA, 25 bp, Homo sapien
tatgcgtaggaaaggtaaagtgctg

SEQ ID NO: 1166431 - DNA, 25 bp, Homo sapien
gatgatgttgttggcgtctctacgc

SEQ ID NO: 1166432 - DNA, 25 bp, Homo sapien
taatggccttactatcttaccagcc

SEQ ID NO: 1166433 - DNA, 25 bp, Homo sapien
ttattatggcaaactaggccctgca

SEQ ID NO: 1166434 - DNA, 25 bp, Homo sapien
taaggctgttacctgcctctccagc

SEQ ID NO: 1166435 - DNA, 25 bp, Homo sapien
gacgtgccatgattggttcataaaa

SEQ ID NO: 1166436 - DNA, 25 bp, Homo sapien
ccaggacatatgatgatgacgtgcc

SEQ ID NO: 1166437 - DNA, 25 bp, Homo sapien
tccagcgacaggtcgccagaggaca

SEQ ID NO: 1166438 - DNA, 25 bp, Homo sapien
ggacagcgtgtcagctgctctctat

SEQ ID NO: 1166439 - DNA, 25 bp, Homo sapien
ctcggacgcgcgagagatcagcagg

SEQ ID NO: 1166440 - DNA, 25 bp, Homo sapien
ggcaccgggagtcgggacgctcgga

SEQ ID NO: 1166441 - DNA, 25 bp, Homo sapien
acgccgcccaactgaaggcctgttt

SEQ ID NO: 1166442 - DNA, 25 bp, Homo sapien
gcacttccgtcccaatgaaggagtg

SEQ ID NO: 1166443 - DNA, 25 bp, Homo sapien
ctgtggtaacctgcacgccgcccaa

SEQ ID NO: 1166444 - DNA, 25 bp, Homo sapien
ggaccagcacttccgtcccaatgaa

SEQ ID NO: 1166445 - DNA, 25 bp, Homo sapien
agctgtcaggatttgtccccactag

SEQ ID NO: 1166446 - DNA, 25 bp, Homo sapien
aaggccaaattgtggcctcaaaaag

SEQ ID NO: 1166447 - DNA, 25 bp, Homo sapien
tgtcaggatttgtccccactagaga

SEQ ID NO: 1166448 - DNA, 25 bp, Homo sapien
ccaaattgtggcctcaaaaaggcta

SEQ ID NO: 1166449 - DNA, 25 bp, Homo sapien
caaccatgtcagatgcacagcagca

SEQ ID NO: 1166450 - DNA, 25 bp, Homo sapien
caaggatgccgtctgcaatgctgct

SEQ ID NO: 1166451 - DNA, 25 bp, Homo sapien
taagacgctctgtagactgggtgac

SEQ ID NO: 1166452 - DNA, 25 bp, Homo sapien
caggacctgaaaagcttgggaagag

SEQ ID NO: 1166453 - DNA, 25 bp, Homo sapien
taccaggaggaacgtggaggaacac

SEQ ID NO: 1166454 - DNA, 25 bp, Homo sapien
gagggtctgagctggacgcatctct

SEQ ID NO: 1166455 - DNA, 25 bp, Homo sapien
tttggcttagacatgggagatcctg

SEQ ID NO: 1166456 - DNA, 25 bp, Homo sapien
agcgctggctgtgacctgttctgag

SEQ ID NO: 1166457 - DNA, 25 bp, Homo sapien
tagggccctgatgcccaacacaaag

SEQ ID NO: 1166458 - DNA, 25 bp, Homo sapien
tagggctaacagtgtatcaacgatc

SEQ ID NO: 1166459 - DNA, 25 bp, Homo sapien
ttcgagtgacttgcagaaagcgcct

SEQ ID NO: 1166460 - DNA, 25 bp, Homo sapien
gctgtactgtaggtcaggatgctcc

SEQ ID NO: 1166461 - DNA, 25 bp, Homo sapien
tcctcttggacagacaaactcaagt

SEQ ID NO: 1166462 - DNA, 25 bp, Homo sapien
taaatcaggtctctgccactagcag

SEQ ID NO: 1166463 - DNA, 25 bp, Homo sapien
cccagccaagcctgattttaaatca

SEQ ID NO: 1166464 - DNA, 25 bp, Homo sapien
tgagagctcctcactgataaatcct

SEQ ID NO: 1166465 - DNA, 25 bp, Homo sapien
tatttttttgtagagtcgcggtctc

SEQ ID NO: 1166466 - DNA, 25 bp, Homo sapien
gccaccgtgcctgccatgaccagct

SEQ ID NO: 1166467 - DNA, 25 bp, Homo sapien
gagccaccgtgcctgccatgaccag

SEQ ID NO: 1166468 - DNA, 25 bp, Homo sapien
tgaccagctaattcttttattttta

SEQ ID NO: 1166469 - DNA, 25 bp, Homo sapien
gggtacctccgcttcgcattacagg

SEQ ID NO: 1166470 - DNA, 25 bp, Homo sapien
tctcatctaagcacgagtcaccgag

SEQ ID NO: 1166471 - DNA, 25 bp, Homo sapien
agtcaccgaggatggttcaacccca

SEQ ID NO: 1166472 - DNA, 25 bp, Homo sapien
taaagccagtggatgcaaatctctc

SEQ ID NO: 1166473 - DNA, 25 bp, Homo sapien
acttatagcagtcagtgaatctctg

SEQ ID NO: 1166474 - DNA, 25 bp, Homo sapien
ggtagaagcacttatagcagtcagt

SEQ ID NO: 1166475 - DNA, 25 bp, Homo sapien
aagcacttatagcagtcagtgaatc

SEQ ID NO: 1166476 - DNA, 25 bp, Homo sapien
caactggtagaagcacttatagcag

SEQ ID NO: 1166477 - DNA, 25 bp, Homo sapien
tttatccaaggcattcaagacagct

SEQ ID NO: 1166478 - DNA, 25 bp, Homo sapien
ctcctctttgatgtcagagatttcc

SEQ ID NO: 1166479 - DNA, 25 bp, Homo sapien
ggctggctctttgcggactttgcct

SEQ ID NO: 1166480 - DNA, 25 bp, Homo sapien
agcttctaggttcccctcctctttg

SEQ ID NO: 1166481 - DNA, 25 bp, Homo sapien
caccttgtcccaagttgggctggct

SEQ ID NO: 1166482 - DNA, 25 bp, Homo sapien
gaaggaggcggaaggcccttgtgga

SEQ ID NO: 1166483 - DNA, 25 bp, Homo sapien
ttccaagcccacactcggtgacatg

SEQ ID NO: 1166484 - DNA, 25 bp, Homo sapien
actcggtgacatgcccaccttgtcc

SEQ ID NO: 1166485 - DNA, 25 bp, Homo sapien
agggtgccataacactgtgcagatc

SEQ ID NO: 1166486 - DNA, 25 bp, Homo sapien
acactgtgcagatccttctctggga

SEQ ID NO: 1166487 - DNA, 25 bp, Homo sapien
ctgcaggaagtagggtgccataaca

SEQ ID NO: 1166488 - DNA, 25 bp, Homo sapien
gcagatccttctctgggatcccgct

SEQ ID NO: 1166489 - DNA, 25 bp, Homo sapien
ctcggcctcctgtttctgcacatgg

SEQ ID NO: 1166490 - DNA, 25 bp, Homo sapien
agctgctggttctcggcctcctgtt

SEQ ID NO: 1166491 - DNA, 25 bp, Homo sapien
tgtttctgcacatggcgccgcaggg

SEQ ID NO: 1166492 - DNA, 25 bp, Homo sapien
acatggcgccgcagggtgtcccgtt

SEQ ID NO: 1166493 - DNA, 25 bp, Homo sapien
cagagctttctagcgagaaactttc

SEQ ID NO: 1166494 - DNA, 25 bp, Homo sapien
tgaattaagtacactttcagttgag

SEQ ID NO: 1166495 - DNA, 25 bp, Homo sapien
tcagttgagttacagacatggaaat

SEQ ID NO: 1166496 - DNA, 25 bp, Homo sapien
gaaattgcccatgtcaaacaacgtg

SEQ ID NO: 1166497 - DNA, 25 bp, Homo sapien
tctgtggctaagtcatgggccctgc

SEQ ID NO: 1166498 - DNA, 25 bp, Homo sapien
caatgggagacaacagacaaactgg

SEQ ID NO: 1166499 - DNA, 25 bp, Homo sapien
tagcaagctgggttctgtgaccacc

SEQ ID NO: 1166500 - DNA, 25 bp, Homo sapien
caccattcggcaagtatttatagca

SEQ ID NO: 1166501 - DNA, 25 bp, Homo sapien
acagcaaccagctccctctgttctc

SEQ ID NO: 1166502 - DNA, 25 bp, Homo sapien
ggctccctcagcacagcaaccagct

SEQ ID NO: 1166503 - DNA, 25 bp, Homo sapien
aaccagctccctctgttctctgtgt

SEQ ID NO: 1166504 - DNA, 25 bp, Homo sapien
cagctccctctgttctctgtgtaga

SEQ ID NO: 1166505 - DNA, 25 bp, Homo sapien
gaacatggccaagaattatccaggt

SEQ ID NO: 1166506 - DNA, 25 bp, Homo sapien
tgaaaacagattctccaagccaggg

SEQ ID NO: 1166507 - DNA, 25 bp, Homo sapien
gagctgacctgaacctagagaagag

SEQ ID NO: 1166508 - DNA, 25 bp, Homo sapien
ggcaccatttcagccgttctcagag

SEQ ID NO: 1166509 - DNA, 25 bp, Homo sapien
atccgccccagctccgtaggccaaa

SEQ ID NO: 1166510 - DNA, 25 bp, Homo sapien
cagcactgtttataccctctgggct

SEQ ID NO: 1166511 - DNA, 25 bp, Homo sapien
ctagggggaatctgccagggctatt

SEQ ID NO: 1166512 - DNA, 25 bp, Homo sapien
gcatgcctgaccatggtgcgggcgg

SEQ ID NO: 1166513 - DNA, 25 bp, Homo sapien
caatagggcgaggagtgtgagggct

SEQ ID NO: 1166514 - DNA, 25 bp, Homo sapien
tgcctggccagcgatgcaaagtgcg

SEQ ID NO: 1166515 - DNA, 25 bp, Homo sapien
tggccagcgatgcaaagtgcggcca

SEQ ID NO: 1166516 - DNA, 25 bp, Homo sapien
tgcggccagggccaatagggcgagg

SEQ ID NO: 1166517 - DNA, 25 bp, Homo sapien
caacaaggtggttagactgcaaagg

SEQ ID NO: 1166518 - DNA, 25 bp, Homo sapien
gcaaatggattgagcctgcaacaag

SEQ ID NO: 1166519 - DNA, 25 bp, Homo sapien
tgcgtctcgggcagcttgctcttcc

SEQ ID NO: 1166520 - DNA, 25 bp, Homo sapien
tgagcctgcaacaaggtggttagac

SEQ ID NO: 1166521 - DNA, 25 bp, Homo sapien
ctggactctgcaccgctgggcttcg

SEQ ID NO: 1166522 - DNA, 25 bp, Homo sapien
gactctgcaccgctgggcttcgcac

SEQ ID NO: 1166523 - DNA, 25 bp, Homo sapien
tttgctggactctgcaccgctgggc

SEQ ID NO: 1166524 - DNA, 25 bp, Homo sapien
ttgctggactctgcaccgctgggct

SEQ ID NO: 1166525 - DNA, 25 bp, Homo sapien
cattgatacaggtagcgcctgggtc

SEQ ID NO: 1166526 - DNA, 25 bp, Homo sapien
ttgatacaggtagcgcctgggtctc

SEQ ID NO: 1166527 - DNA, 25 bp, Homo sapien
gtctcttcactacctcgctgccctc

SEQ ID NO: 1166528 - DNA, 25 bp, Homo sapien
cccagccattgatacaggtagcgcc

SEQ ID NO: 1166529 - DNA, 25 bp, Homo sapien
gtgcaaaatgcccatccctcctctc

SEQ ID NO: 1166530 - DNA, 25 bp, Homo sapien
accagggcaggctgcctgtaccccc

SEQ ID NO: 1166531 - DNA, 25 bp, Homo sapien
ccccgtgcaaaatgcccatccctcc

SEQ ID NO: 1166532 - DNA, 25 bp, Homo sapien
gaggcagggccttggcccagctctg

SEQ ID NO: 1166533 - DNA, 25 bp, Homo sapien
ctgggctccaggggatccgggtagg

SEQ ID NO: 1166534 - DNA, 25 bp, Homo sapien
cctcctgggctccaggggatccggg

SEQ ID NO: 1166535 - DNA, 25 bp, Homo sapien
tcctgggctccaggggatccgggta

SEQ ID NO: 1166536 - DNA, 25 bp, Homo sapien
tcacacacctccctcctgggctcca

SEQ ID NO: 1166537 - DNA, 25 bp, Homo sapien
ctgaaagccgatgtggtcagccaac

SEQ ID NO: 1166538 - DNA, 25 bp, Homo sapien
caactcgtcacagtccggattgagc

SEQ ID NO: 1166539 - DNA, 25 bp, Homo sapien
ccaactcgtcacagtccggattgag

SEQ ID NO: 1166540 - DNA, 25 bp, Homo sapien
ccgatgtggtcagccaactcgtcac

SEQ ID NO: 1166541 - DNA, 25 bp, Homo sapien
ggccgtagaagcgccgataggcctc

SEQ ID NO: 1166542 - DNA, 25 bp, Homo sapien
gggccgtagaagcgccgataggcct

SEQ ID NO: 1166543 - DNA, 25 bp, Homo sapien
ggatgatggggaccccacatccata

SEQ ID NO: 1166544 - DNA, 25 bp, Homo sapien
tgccggccaggccagcagagcgaca

SEQ ID NO: 1166545 - DNA, 25 bp, Homo sapien
gcagaactggggttgccggccaggc

SEQ ID NO: 1166546 - DNA, 25 bp, Homo sapien
gggatgatggggaccccacatccat

SEQ ID NO: 1166547 - DNA, 25 bp, Homo sapien
ggtgagtggagtcaccccactccca

SEQ ID NO: 1166548 - DNA, 25 bp, Homo sapien
ccagtactagcctagcttcccaagc

SEQ ID NO: 1166549 - DNA, 25 bp, Homo sapien
ctgtggcttagaggatagttggctt

SEQ ID NO: 1166550 - DNA, 25 bp, Homo sapien
aatagcaagtctgggaaatcctggg

SEQ ID NO: 1166551 - DNA, 25 bp, Homo sapien
ccttcctatctaagggagggctgaa

SEQ ID NO: 1166552 - DNA, 25 bp, Homo sapien
tccttttgccttccgcaggactgaa

SEQ ID NO: 1166553 - DNA, 25 bp, Homo sapien
cagagatcatgaatagctcagggca

SEQ ID NO: 1166554 - DNA, 25 bp, Homo sapien
tcagggcagtgaatggcgcaccaag

SEQ ID NO: 1166555 - DNA, 25 bp, Homo sapien
tcagccccctttatggggaccaggc

SEQ ID NO: 1166556 - DNA, 25 bp, Homo sapien
gaacagcaaaagaggcccttcttcc

SEQ ID NO: 1166557 - DNA, 25 bp, Homo sapien
tttgttgccaagacgttaggaaagc

SEQ ID NO: 1166558 - DNA, 25 bp, Homo sapien
ttaggagagtcttgtgggcccctgg

SEQ ID NO: 1166559 - DNA, 25 bp, Homo sapien
caggtggtaggcatgggtacctgca

SEQ ID NO: 1166560 - DNA, 25 bp, Homo sapien
gggcctctcgtcctgatagacagtg

SEQ ID NO: 1166561 - DNA, 25 bp, Homo sapien
taaatatcagaggtctttgcaagca

SEQ ID NO: 1166562 - DNA, 25 bp, Homo sapien
ctgacctgggtctactatccttgcc

SEQ ID NO: 1166563 - DNA, 25 bp, Homo sapien
aattagacatcaaggaggacttacc

SEQ ID NO: 1166564 - DNA, 25 bp, Homo sapien
tcctgtcctatgaatgaatctgcct

SEQ ID NO: 1166565 - DNA, 25 bp, Homo sapien
caaggtgccatcctaggttgagggc

SEQ ID NO: 1166566 - DNA, 25 bp, Homo sapien
tatttcttcataggtgcgggaaggc

SEQ ID NO: 1166567 - DNA, 25 bp, Homo sapien
gacaatgttccaagactggccctgg

SEQ ID NO: 1166568 - DNA, 25 bp, Homo sapien
agatggaggttgtgtccttgtcacc

SEQ ID NO: 1166569 - DNA, 25 bp, Homo sapien
ggcactggaaggtggtattaataca

SEQ ID NO: 1166570 - DNA, 25 bp, Homo sapien
cagctgaggtactggcagctataat

SEQ ID NO: 1166571 - DNA, 25 bp, Homo sapien
cttcatcaccaagacagacattctg

SEQ ID NO: 1166572 - DNA, 25 bp, Homo sapien
gcctcagtgggtacactgtccgttc

SEQ ID NO: 1166573 - DNA, 25 bp, Homo sapien
ttggagaagccggaaagacgccatg

SEQ ID NO: 1166574 - DNA, 25 bp, Homo sapien
cgttctctgatagctttgccaataa

SEQ ID NO: 1166575 - DNA, 25 bp, Homo sapien
ccagttaagctttggccgcctcagt

SEQ ID NO: 1166576 - DNA, 25 bp, Homo sapien
tccgtccgtccgggaaggagctgcc

SEQ ID NO: 1166577 - DNA, 25 bp, Homo sapien
gctgcccagctacctgctggctctg

SEQ ID NO: 1166578 - DNA, 25 bp, Homo sapien
tggagggtccccagcgtctgtccat

SEQ ID NO: 1166579 - DNA, 25 bp, Homo sapien
ccatccgtccgtccgggaaggagct

SEQ ID NO: 1166580 - DNA, 25 bp, Homo sapien
gagaccagtgatttgccaactgatc

SEQ ID NO: 1166581 - DNA, 25 bp, Homo sapien
tgacccaaagagctggcagttccag

SEQ ID NO: 1166582 - DNA, 25 bp, Homo sapien
gatctgacccaaagagctggcagtt

SEQ ID NO: 1166583 - DNA, 25 bp, Homo sapien
ggtcagttcccaaactcctcactag

SEQ ID NO: 1166584 - DNA, 25 bp, Homo sapien
tctgggatctaccacaaggtcatgt

SEQ ID NO: 1166585 - DNA, 25 bp, Homo sapien
gggatctaccacaaggtcatgtcat

SEQ ID NO: 1166586 - DNA, 25 bp, Homo sapien
ctgggatctaccacaaggtcatgtc

SEQ ID NO: 1166587 - DNA, 25 bp, Homo sapien
tgggatctaccacaaggtcatgtca

SEQ ID NO: 1166588 - DNA, 25 bp, Homo sapien
ttcacttccagtagggccagggtct

SEQ ID NO: 1166589 - DNA, 25 bp, Homo sapien
cacttccagtagggccagggtctcc

SEQ ID NO: 1166590 - DNA, 25 bp, Homo sapien
tcacttccagtagggccagggtctc

SEQ ID NO: 1166591 - DNA, 25 bp, Homo sapien
cttcacttccagtagggccagggtc

SEQ ID NO: 1166592 - DNA, 25 bp, Homo sapien
ctggggtgagctcttctctggggaa

SEQ ID NO: 1166593 - DNA, 25 bp, Homo sapien
tgagctcttctctggggaatcagac

SEQ ID NO: 1166594 - DNA, 25 bp, Homo sapien
cattgggaaccaaggcctggggtga

SEQ ID NO: 1166595 - DNA, 25 bp, Homo sapien
gggtgagctcttctctggggaatca

SEQ ID NO: 1166596 - DNA, 25 bp, Homo sapien
cacttactgtgctgtctagaccatc

SEQ ID NO: 1166597 - DNA, 25 bp, Homo sapien
atccgggaacggagcactgggctga

SEQ ID NO: 1166598 - DNA, 25 bp, Homo sapien
ctggttcaatgtcccgccagccagg

SEQ ID NO: 1166599 - DNA, 25 bp, Homo sapien
gagatccagctgaagaccccactct

SEQ ID NO: 1166600 - DNA, 25 bp, Homo sapien
tatgccccgtatagtaggcaaggga

SEQ ID NO: 1166601 - DNA, 25 bp, Homo sapien
tgggacatcaaacggcaggaaggca

SEQ ID NO: 1166602 - DNA, 25 bp, Homo sapien
taggtcaataggcacgaaggcacgg

SEQ ID NO: 1166603 - DNA, 25 bp, Homo sapien
ccccgcagcgcagtgtgtagatcag

SEQ ID NO: 1166604 - DNA, 25 bp, Homo sapien
ggcagtaagctgggggcagattcac

SEQ ID NO: 1166605 - DNA, 25 bp, Homo sapien
ggcccaggtcaagtgaagggaaatc

SEQ ID NO: 1166606 - DNA, 25 bp, Homo sapien
cctcctcaagtccacttcccgatgc

SEQ ID NO: 1166607 - DNA, 25 bp, Homo sapien
cccaggtcaagtgaagggaaatcct

SEQ ID NO: 1166608 - DNA, 25 bp, Homo sapien
cggccaggttgaagaagtagagaat

SEQ ID NO: 1166609 - DNA, 25 bp, Homo sapien
ataaagagctggaccgactgggcca

SEQ ID NO: 1166610 - DNA, 25 bp, Homo sapien
actgggccacatatcgccggtggat

SEQ ID NO: 1166611 - DNA, 25 bp, Homo sapien
gaaaagcataacaggctcagcccgt

SEQ ID NO: 1166612 - DNA, 25 bp, Homo sapien
ttgggactgtaggcgctcgccaccg

SEQ ID NO: 1166613 - DNA, 25 bp, Homo sapien
tatggcagcatactatatagactgt

SEQ ID NO: 1166614 - DNA, 25 bp, Homo sapien
gccagtgtgataatacattgagtga

SEQ ID NO: 1166615 - DNA, 25 bp, Homo sapien
ttttctgaagtatggcagcatacta

SEQ ID NO: 1166616 - DNA, 25 bp, Homo sapien
agagccagtgtgataatacattgag

SEQ ID NO: 1166617 - DNA, 25 bp, Homo sapien
gcagaaacgtcaggccgtagccgaa

SEQ ID NO: 1166618 - DNA, 25 bp, Homo sapien
gcatcgacagcagtggcagaaacgt

SEQ ID NO: 1166619 - DNA, 25 bp, Homo sapien
tggcagtgagcatgcgctccggctc

SEQ ID NO: 1166620 - DNA, 25 bp, Homo sapien
ggctccaccacgaacatgtagtaga

SEQ ID NO: 1166621 - DNA, 25 bp, Homo sapien
cgctaccccctactccgagggcgag

SEQ ID NO: 1166622 - DNA, 25 bp, Homo sapien
agatgtgtcagacccaagccgctac

SEQ ID NO: 1166623 - DNA, 25 bp, Homo sapien
gggcgaagtccaggcctggccacaa

SEQ ID NO: 1166624 - DNA, 25 bp, Homo sapien
ggccacaaggttcaaagatgtgtca

SEQ ID NO: 1166625 - DNA, 25 bp, Homo sapien
taaaaaggtaaaagagcagcagctc

SEQ ID NO: 1166626 - DNA, 25 bp, Homo sapien
gcagagaccagcattagggagcctt

SEQ ID NO: 1166627 - DNA, 25 bp, Homo sapien
cctgaggcgctctgcttagacaact

SEQ ID NO: 1166628 - DNA, 25 bp, Homo sapien
cagtaaataggccagtcatggaggg

SEQ ID NO: 1166629 - DNA, 25 bp, Homo sapien
gacactcgagactgggggacaaaca

SEQ ID NO: 1166630 - DNA, 25 bp, Homo sapien
agctgggaggtttctatcgtcatct

SEQ ID NO: 1166631 - DNA, 25 bp, Homo sapien
gctccagtctcttgatgtgtgagtg

SEQ ID NO: 1166632 - DNA, 25 bp, Homo sapien
agggctaagagatgggcttggaagg

SEQ ID NO: 1166633 - DNA, 25 bp, Homo sapien
aattaaggcccgctctctggaggga

SEQ ID NO: 1166634 - DNA, 25 bp, Homo sapien
tgctgctgcaccacaagaagtactc

SEQ ID NO: 1166635 - DNA, 25 bp, Homo sapien
ttggagcatcaagttccagccggcc

SEQ ID NO: 1166636 - DNA, 25 bp, Homo sapien
tcttgctgtgcctcgaaactctgga

SEQ ID NO: 1166637 - DNA, 25 bp, Homo sapien
tggtatctgggaacatgtctgctgt

SEQ ID NO: 1166638 - DNA, 25 bp, Homo sapien
ggtatctgggaacatgtctgctgtt

SEQ ID NO: 1166639 - DNA, 25 bp, Homo sapien
tgtttcctgctatcttgacatttta

SEQ ID NO: 1166640 - DNA, 25 bp, Homo sapien
tatctgggaacatgtctgctgtttc

SEQ ID NO: 1166641 - DNA, 25 bp, Homo sapien
actaataaagtacaaaagttagctg

SEQ ID NO: 1166642 - DNA, 25 bp, Homo sapien
gcctggccaaccaacatagtaaaac

SEQ ID NO: 1166643 - DNA, 25 bp, Homo sapien
ccagcctggccaaccaacatagtaa

SEQ ID NO: 1166644 - DNA, 25 bp, Homo sapien
ccgaggtgggaaaatcgcttgaatc

SEQ ID NO: 1166645 - DNA, 25 bp, Homo sapien
caggctggtctaaaaattccagagc

SEQ ID NO: 1166646 - DNA, 25 bp, Homo sapien
tggtctaaaaattccagagctcagg

SEQ ID NO: 1166647 - DNA, 25 bp, Homo sapien
gtctaaaaattccagagctcaggtg

SEQ ID NO: 1166648 - DNA, 25 bp, Homo sapien
gctggtctaaaaattccagagctca

SEQ ID NO: 1166649 - DNA, 25 bp, Homo sapien
gctgggactatagtcacgtgccacc

SEQ ID NO: 1166650 - DNA, 25 bp, Homo sapien
tggtggtgcgatcttggctcactgc

SEQ ID NO: 1166651 - DNA, 25 bp, Homo sapien
tgtcaccatgctggagtgtggtggt

SEQ ID NO: 1166652 - DNA, 25 bp, Homo sapien
gggactatagtcacgtgccaccacg

SEQ ID NO: 1166653 - DNA, 25 bp, Homo sapien
gttttcccagatttctcgactggtc

SEQ ID NO: 1166654 - DNA, 25 bp, Homo sapien
gatgtaatcgttccctccgtgtccc

SEQ ID NO: 1166655 - DNA, 25 bp, Homo sapien
tcactgatcttagatgtaatcgttc

SEQ ID NO: 1166656 - DNA, 25 bp, Homo sapien
gatttctcgactggtcaccttttcc

SEQ ID NO: 1166657 - DNA, 25 bp, Homo sapien
tatccttggtcactttacgttacat

SEQ ID NO: 1166658 - DNA, 25 bp, Homo sapien
tgcttaaagagggtctggtaaatag

SEQ ID NO: 1166659 - DNA, 25 bp, Homo sapien
gaggtaagtcggtagactgcttaaa

SEQ ID NO: 1166660 - DNA, 25 bp, Homo sapien
tattttcagtaacagtctcttgaac

SEQ ID NO: 1166661 - DNA, 25 bp, Homo sapien
caaactggccttattctcgccgagc

SEQ ID NO: 1166662 - DNA, 25 bp, Homo sapien
catgatgggccatcgtccagtgctc

SEQ ID NO: 1166663 - DNA, 25 bp, Homo sapien
tccagtgctcgtgctcagtgagttc

SEQ ID NO: 1166664 - DNA, 25 bp, Homo sapien
tggcccatcccttagtagcggtaat

SEQ ID NO: 1166665 - DNA, 25 bp, Homo sapien
ctgcggtgttaaccgaaagccgcaa

SEQ ID NO: 1166666 - DNA, 25 bp, Homo sapien
tgacacacatgcgtagtggtgtgct

SEQ ID NO: 1166667 - DNA, 25 bp, Homo sapien
agttgacacacatgcgtagtggtgt

SEQ ID NO: 1166668 - DNA, 25 bp, Homo sapien
gcaaccccagcacccaaccctagag

SEQ ID NO: 1166669 - DNA, 25 bp, Homo sapien
ggagccgagtcgcaatacacagttt

SEQ ID NO: 1166670 - DNA, 25 bp, Homo sapien
tagtccacctgttgctaaggctaga

SEQ ID NO: 1166671 - DNA, 25 bp, Homo sapien
tttcttagccttcacggtccgatag

SEQ ID NO: 1166672 - DNA, 25 bp, Homo sapien
gcaatacacagtttaacgacctcac

SEQ ID NO: 1166673 - DNA, 25 bp, Homo sapien
aaaggctgcgcagtccggcccggta

SEQ ID NO: 1166674 - DNA, 25 bp, Homo sapien
agccattagtccagaggcgataaac

SEQ ID NO: 1166675 - DNA, 25 bp, Homo sapien
ccagtgtgcccggaaaaaggctgcg

SEQ ID NO: 1166676 - DNA, 25 bp, Homo sapien
tccagaggcgataaaccacaactcc

SEQ ID NO: 1166677 - DNA, 25 bp, Homo sapien
catcaccctccggtactgctcacag

SEQ ID NO: 1166678 - DNA, 25 bp, Homo sapien
taggataacttaaggaaacgcaagc

SEQ ID NO: 1166679 - DNA, 25 bp, Homo sapien
ttaaggaaacgcaagccatcaccct

SEQ ID NO: 1166680 - DNA, 25 bp, Homo sapien
tagataggataacttaaggaaacgc

SEQ ID NO: 1166681 - DNA, 25 bp, Homo sapien
gaaagaatcatagcatcagatgatc

SEQ ID NO: 1166682 - DNA, 25 bp, Homo sapien
catagcatcagatgatcaacaatcc

SEQ ID NO: 1166683 - DNA, 25 bp, Homo sapien
cagatgatcaacaatccatgttagt

SEQ ID NO: 1166684 - DNA, 25 bp, Homo sapien
gcatcagatgatcaacaatccatgt

SEQ ID NO: 1166685 - DNA, 25 bp, Homo sapien
ttaggatgactagtgtgccgctcca

SEQ ID NO: 1166686 - DNA, 25 bp, Homo sapien
tgttaggatgactagtgtgccgctc

SEQ ID NO: 1166687 - DNA, 25 bp, Homo sapien
cttttctgttaggatgactagtgtg

SEQ ID NO: 1166688 - DNA, 25 bp, Homo sapien
ttctgttaggatgactagtgtgccg

SEQ ID NO: 1166689 - DNA, 25 bp, Homo sapien
taaatcagagataactaaatcagag

SEQ ID NO: 1166690 - DNA, 25 bp, Homo sapien
ctaaatcagagataactaaatcaga

SEQ ID NO: 1166691 - DNA, 25 bp, Homo sapien
ccgagggcagctttgttgtctggat

SEQ ID NO: 1166692 - DNA, 25 bp, Homo sapien
aacttgcttgaagattaatatagct

SEQ ID NO: 1166693 - DNA, 25 bp, Homo sapien
gggttttgctctacagagaggcaca

SEQ ID NO: 1166694 - DNA, 25 bp, Homo sapien
gggagggttttgctctacagagagg

SEQ ID NO: 1166695 - DNA, 25 bp, Homo sapien
tgttgttgggcgagctgggtctgaa

SEQ ID NO: 1166696 - DNA, 25 bp, Homo sapien
tacatacattccaggagtcctaggc

SEQ ID NO: 1166697 - DNA, 25 bp, Homo sapien
aaacagccatctgttgttgggcgag

SEQ ID NO: 1166698 - DNA, 25 bp, Homo sapien
ccaggagtcctaggcattccttggg

SEQ ID NO: 1166699 - DNA, 25 bp, Homo sapien
gagaagagttattgcttcccctccc

SEQ ID NO: 1166700 - DNA, 25 bp, Homo sapien
gggcaggtgatttaacaatggatta

SEQ ID NO: 1166701 - DNA, 25 bp, Homo sapien
acaatggattaggagataaggctgg

SEQ ID NO: 1166702 - DNA, 25 bp, Homo sapien
aagagttattgcttcccctcccagg

SEQ ID NO: 1166703 - DNA, 25 bp, Homo sapien
tttgtaatatgtaaccccaagtgcc

SEQ ID NO: 1166704 - DNA, 25 bp, Homo sapien
tacatatacccagattccaacaagg

SEQ ID NO: 1166705 - DNA, 25 bp, Homo sapien
gctttgttagacagtaatccctgca

SEQ ID NO: 1166706 - DNA, 25 bp, Homo sapien
ggtctttgtccaagcttcccaactg

SEQ ID NO: 1166707 - DNA, 25 bp, Homo sapien
cactgttacggtgccaggtccttgg

SEQ ID NO: 1166708 - DNA, 25 bp, Homo sapien
tggcgctgatcctggcactgttacg

SEQ ID NO: 1166709 - DNA, 25 bp, Homo sapien
ttggacgcgaccctggaaaggcgcc

SEQ ID NO: 1166710 - DNA, 25 bp, Homo sapien
aagggagtcgcacagtcctggcgct

SEQ ID NO: 1166711 - DNA, 25 bp, Homo sapien
ctgcgatctcggctggcgctcgcag

SEQ ID NO: 1166712 - DNA, 25 bp, Homo sapien
ggctttggcagacaattcccggcgg

SEQ ID NO: 1166713 - DNA, 25 bp, Homo sapien
atctcggctggcgctcgcaggcttt

SEQ ID NO: 1166714 - DNA, 25 bp, Homo sapien
caattcccggcggcagggcaggttt

SEQ ID NO: 1166715 - DNA, 25 bp, Homo sapien
gcggcgcggctaggagacccggcca

SEQ ID NO: 1166716 - DNA, 25 bp, Homo sapien
cccgcggcgcggctaggagacccgg

SEQ ID NO: 1166717 - DNA, 25 bp, Homo sapien
ggaagctgcagtcgccggcccgcgg

SEQ ID NO: 1166718 - DNA, 25 bp, Homo sapien
cggcgcggctaggagacccggccat

SEQ ID NO: 1166719 - DNA, 25 bp, Homo sapien
acagcaaagaggacggcagtggcgc

SEQ ID NO: 1166720 - DNA, 25 bp, Homo sapien
gcagcgtcggttttgtggttgtagc

SEQ ID NO: 1166721 - DNA, 25 bp, Homo sapien
tactgtggttgctccggtgccagag

SEQ ID NO: 1166722 - DNA, 25 bp, Homo sapien
tggttgtagcggacaaagacagcaa

SEQ ID NO: 1166723 - DNA, 25 bp, Homo sapien
ggagagcctaccattgcagcacagg

SEQ ID NO: 1166724 - DNA, 25 bp, Homo sapien
gctgtagccccttctgcctagggtg

SEQ ID NO: 1166725 - DNA, 25 bp, Homo sapien
ggtcagacccttacgcaacagctta

SEQ ID NO: 1166726 - DNA, 25 bp, Homo sapien
tgtcagactctggactgttccctcc

SEQ ID NO: 1166727 - DNA, 25 bp, Homo sapien
agctgccagccctagggttgggaca

SEQ ID NO: 1166728 - DNA, 25 bp, Homo sapien
tggatatgtactgaaattagaggtc

SEQ ID NO: 1166729 - DNA, 25 bp, Homo sapien
cagctgccagccctagggttgggac

SEQ ID NO: 1166730 - DNA, 25 bp, Homo sapien
cctggacaagggctggatatgtact

SEQ ID NO: 1166731 - DNA, 25 bp, Homo sapien
cgccaacatggatgtggccaccgtg

SEQ ID NO: 1166732 - DNA, 25 bp, Homo sapien
cacgctgctgaagccgtaacgctgc

SEQ ID NO: 1166733 - DNA, 25 bp, Homo sapien
ccacgctgctgaagccgtaacgctg

SEQ ID NO: 1166734 - DNA, 25 bp, Homo sapien
ctctccacgccaacatggatgtggc

SEQ ID NO: 1166735 - DNA, 25 bp, Homo sapien
cgcacaaaagtcagcattgatcatg

SEQ ID NO: 1166736 - DNA, 25 bp, Homo sapien
ggcaccaaaggagatgagcacggcc

SEQ ID NO: 1166737 - DNA, 25 bp, Homo sapien
tgggtaggcccggtcttgcccagga

SEQ ID NO: 1166738 - DNA, 25 bp, Homo sapien
atgagcagcagctgggtaggcccgg

SEQ ID NO: 1166739 - DNA, 25 bp, Homo sapien
acgctcctggctcagaggctgacct

SEQ ID NO: 1166740 - DNA, 25 bp, Homo sapien
ggctcagaggctgaccttgaccacc

SEQ ID NO: 1166741 - DNA, 25 bp, Homo sapien
gggtgagaggcagcaccccgccccc

SEQ ID NO: 1166742 - DNA, 25 bp, Homo sapien
cacccccgactccatccctccccag

SEQ ID NO: 1166743 - DNA, 25 bp, Homo sapien
tctgaatggtagacggagccctggc

SEQ ID NO: 1166744 - DNA, 25 bp, Homo sapien
gatagtcatggagcctccggcatct

SEQ ID NO: 1166745 - DNA, 25 bp, Homo sapien
ggcctgtacagaacccgcgaaagga

SEQ ID NO: 1166746 - DNA, 25 bp, Homo sapien
cccgaagtaggcaccaaaggtgtgg

SEQ ID NO: 1166747 - DNA, 25 bp, Homo sapien
tcctgcatgaggttcccaggtccat

SEQ ID NO: 1166748 - DNA, 25 bp, Homo sapien
cctgcatgaggttcccaggtccatc

SEQ ID NO: 1166749 - DNA, 25 bp, Homo sapien
gcattgaagctaggccagaagatcc

SEQ ID NO: 1166750 - DNA, 25 bp, Homo sapien
ctggcagccagggagtagtatgtgt

SEQ ID NO: 1166751 - DNA, 25 bp, Homo sapien
caaaggtgccaagggtgctggcagc

SEQ ID NO: 1166752 - DNA, 25 bp, Homo sapien
tgttgagggccgtccgatgctgccc

SEQ ID NO: 1166753 - DNA, 25 bp, Homo sapien
catgtcaagcctcccatcttcccct

SEQ ID NO: 1166754 - DNA, 25 bp, Homo sapien
tgtcaagcctcccatcttcccctac

SEQ ID NO: 1166755 - DNA, 25 bp, Homo sapien
atgtcaagcctcccatcttccccta

SEQ ID NO: 1166756 - DNA, 25 bp, Homo sapien
cgtgaagaacttgtaccccagcgtg

SEQ ID NO: 1166757 - DNA, 25 bp, Homo sapien
caaagggtgtcagcatcatttcact

SEQ ID NO: 1166758 - DNA, 25 bp, Homo sapien
ttgtaccccagcgtggagacagtcc

SEQ ID NO: 1166759 - DNA, 25 bp, Homo sapien
ggtgtcagcatcatttcacttgagg

SEQ ID NO: 1166760 - DNA, 25 bp, Homo sapien
actccacatgtgtcttggactttga

SEQ ID NO: 1166761 - DNA, 25 bp, Homo sapien
catctccgtaagcttcatgggtggc

SEQ ID NO: 1166762 - DNA, 25 bp, Homo sapien
ggtggcaagtccagccacaaggacc

SEQ ID NO: 1166763 - DNA, 25 bp, Homo sapien
gacccccggcatcccatggaggttg

SEQ ID NO: 1166764 - DNA, 25 bp, Homo sapien
gctgcacttgatagaggaccaggaa

SEQ ID NO: 1166765 - DNA, 25 bp, Homo sapien
ccttgtaggccagcagacacctagg

SEQ ID NO: 1166766 - DNA, 25 bp, Homo sapien
catttgcgggttgcttttgcccacc

SEQ ID NO: 1166767 - DNA, 25 bp, Homo sapien
cattccagatggatgacgactgcag

SEQ ID NO: 1166768 - DNA, 25 bp, Homo sapien
gctatgagtggaaacacactctcca

SEQ ID NO: 1166769 - DNA, 25 bp, Homo sapien
cacagaggcaaacatcagtgtgaca

SEQ ID NO: 1166770 - DNA, 25 bp, Homo sapien
cagcccgaagagctggtgcatggcc

SEQ ID NO: 1166771 - DNA, 25 bp, Homo sapien
actgcgctggccctcggctatgagt

SEQ ID NO: 1166772 - DNA, 25 bp, Homo sapien
ggtaggggaggatctgtgaggcttc

SEQ ID NO: 1166773 - DNA, 25 bp, Homo sapien
ttctctgccccccaccatggaggag

SEQ ID NO: 1166774 - DNA, 25 bp, Homo sapien
ggaggatctgtgaggcttctctgcc

SEQ ID NO: 1166775 - DNA, 25 bp, Homo sapien
gtgccacccagtgccacagggcaca

SEQ ID NO: 1166776 - DNA, 25 bp, Homo sapien
agtccagaaagggtagcttcagcag

SEQ ID NO: 1166777 - DNA, 25 bp, Homo sapien
gggagtccagaaagggtagcttcag

SEQ ID NO: 1166778 - DNA, 25 bp, Homo sapien
tccagaaagggtagcttcagcagga

SEQ ID NO: 1166779 - DNA, 25 bp, Homo sapien
agaaagggtagcttcagcaggagcc

SEQ ID NO: 1166780 - DNA, 25 bp, Homo sapien
aacttggtcctcgtagtgctgggag

SEQ ID NO: 1166781 - DNA, 25 bp, Homo sapien
tgaacttggtcctcgtagtgctggg

SEQ ID NO: 1166782 - DNA, 25 bp, Homo sapien
ctgccagtgaacttggtcctcgtag

SEQ ID NO: 1166783 - DNA, 25 bp, Homo sapien
cagtgaacttggtcctcgtagtgct

SEQ ID NO: 1166784 - DNA, 25 bp, Homo sapien
tccaccctcagaggtctctgggctt

SEQ ID NO: 1166785 - DNA, 25 bp, Homo sapien
taggcctgagtgtctgcctcctcca

SEQ ID NO: 1166786 - DNA, 25 bp, Homo sapien
ttaggcctgagtgtctgcctcctcc

SEQ ID NO: 1166787 - DNA, 25 bp, Homo sapien
gcctcctccaccctcagaggtctct

SEQ ID NO: 1166788 - DNA, 25 bp, Homo sapien
ccagtggatcacttgggtgcctcaa

SEQ ID NO: 1166789 - DNA, 25 bp, Homo sapien
gaacttcctagtagcagccagtcag

SEQ ID NO: 1166790 - DNA, 25 bp, Homo sapien
ggaatgggagctcaaaaagaacttc

SEQ ID NO: 1166791 - DNA, 25 bp, Homo sapien
gagacagtggcgtttatcaccctca

SEQ ID NO: 1166792 - DNA, 25 bp, Homo sapien
gagagaatgaactccctgtgcctgg

SEQ ID NO: 1166793 - DNA, 25 bp, Homo sapien
ggaatcaggaatttgtcagcactaa

SEQ ID NO: 1166794 - DNA, 25 bp, Homo sapien
gacatggcactccagagggacttct

SEQ ID NO: 1166795 - DNA, 25 bp, Homo sapien
tctccaggaggttctaccattgtga

SEQ ID NO: 1166796 - DNA, 25 bp, Homo sapien
caagttgaaggtcagagtagcagca

SEQ ID NO: 1166797 - DNA, 25 bp, Homo sapien
cagaggctgcccaagttgaaggtca

SEQ ID NO: 1166798 - DNA, 25 bp, Homo sapien
agttgaaggtcagagtagcagcagt

SEQ ID NO: 1166799 - DNA, 25 bp, Homo sapien
ctcagaggctgcccaagttgaaggt

SEQ ID NO: 1166800 - DNA, 25 bp, Homo sapien
tggttttaggggagagatagctgta

SEQ ID NO: 1166801 - DNA, 25 bp, Homo sapien
tcttggttttaggggagagatagct

SEQ ID NO: 1166802 - DNA, 25 bp, Homo sapien
tgattggtcttggttttaggggaga

SEQ ID NO: 1166803 - DNA, 25 bp, Homo sapien
tttaggggagagatagctgtagtca

SEQ ID NO: 1166804 - DNA, 25 bp, Homo sapien
caggaaatcctgctgtcgtccacac

SEQ ID NO: 1166805 - DNA, 25 bp, Homo sapien
gtcgtccacacgcacttgcgccaag

SEQ ID NO: 1166806 - DNA, 25 bp, Homo sapien
gctgcttccggagaaccttccctca

SEQ ID NO: 1166807 - DNA, 25 bp, Homo sapien
caagccagaacagcggctgcttccg

SEQ ID NO: 1166808 - DNA, 25 bp, Homo sapien
gggggctctggccacacagggcaga

SEQ ID NO: 1166809 - DNA, 25 bp, Homo sapien
gggctctggccacacagggcagaag

SEQ ID NO: 1166810 - DNA, 25 bp, Homo sapien
gctctggccacacagggcagaagca

SEQ ID NO: 1166811 - DNA, 25 bp, Homo sapien
ctctggccacacagggcagaagcac

SEQ ID NO: 1166812 - DNA, 25 bp, Homo sapien
tcgtgatgtgaatcccaatagcggg

SEQ ID NO: 1166813 - DNA, 25 bp, Homo sapien
ggagtgccgggtcctccagaggtca

SEQ ID NO: 1166814 - DNA, 25 bp, Homo sapien
ggccgccgcgtcgtgatgtgaatcc

SEQ ID NO: 1166815 - DNA, 25 bp, Homo sapien
gccgcgtcgtgatgtgaatcccaat

SEQ ID NO: 1166816 - DNA, 25 bp, Homo sapien
gccccaggtcagaatgctgtgcagg

SEQ ID NO: 1166817 - DNA, 25 bp, Homo sapien
gtcagaatgctgtgcagggattcca

SEQ ID NO: 1166818 - DNA, 25 bp, Homo sapien
gtgcagccccaggtcagaatgctgt

SEQ ID NO: 1166819 - DNA, 25 bp, Homo sapien
tttcagaggtggcttttggggtctc

SEQ ID NO: 1166820 - DNA, 25 bp, Homo sapien
cagccccgttggtgtgaacagataa

SEQ ID NO: 1166821 - DNA, 25 bp, Homo sapien
ggtcaaaggtcaatgtctgctccca

SEQ ID NO: 1166822 - DNA, 25 bp, Homo sapien
tctgacaaaaggacgcagcggctgt

SEQ ID NO: 1166823 - DNA, 25 bp, Homo sapien
cagggtgattatcgccagagaggcc

SEQ ID NO: 1166824 - DNA, 25 bp, Homo sapien
gagcacctggattctcactagttgt

SEQ ID NO: 1166825 - DNA, 25 bp, Homo sapien
ccccagttggtatcgtggacagagc

SEQ ID NO: 1166826 - DNA, 25 bp, Homo sapien
ggtgagacagtgatggccactcccc

SEQ ID NO: 1166827 - DNA, 25 bp, Homo sapien
cacatgagtaagtcactgaagcacc

SEQ ID NO: 1166828 - DNA, 25 bp, Homo sapien
aggagcctctcaggatgattccctt

SEQ ID NO: 1166829 - DNA, 25 bp, Homo sapien
aaaagaggaaccagtggcatttcag

SEQ ID NO: 1166830 - DNA, 25 bp, Homo sapien
gcctctcaggatgattcccttctca

SEQ ID NO: 1166831 - DNA, 25 bp, Homo sapien
agcataagagaacctctggctgggc

SEQ ID NO: 1166832 - DNA, 25 bp, Homo sapien
cacgtctgggcgctcatcagtgctt

SEQ ID NO: 1166833 - DNA, 25 bp, Homo sapien
gctaggctctagcaagttgaagtca

SEQ ID NO: 1166834 - DNA, 25 bp, Homo sapien
gagccatctgggataagactttgac

SEQ ID NO: 1166835 - DNA, 25 bp, Homo sapien
ttgggctggattccctctgataagc

SEQ ID NO: 1166836 - DNA, 25 bp, Homo sapien
gataagccttcccagttgactgaaa

SEQ ID NO: 1166837 - DNA, 25 bp, Homo sapien
ctgtcaagatccaggttggagagct

SEQ ID NO: 1166838 - DNA, 25 bp, Homo sapien
agagctggcaaaggtagggggagga

SEQ ID NO: 1166839 - DNA, 25 bp, Homo sapien
caggttggagagctggcaaaggtag

SEQ ID NO: 1166840 - DNA, 25 bp, Homo sapien
actgtcaagatccaggttggagagc

SEQ ID NO: 1166841 - DNA, 25 bp, Homo sapien
tatttagatccgtcagcccacggac

SEQ ID NO: 1166842 - DNA, 25 bp, Homo sapien
cagcatgatcaggagtgagcgtaat

SEQ ID NO: 1166843 - DNA, 25 bp, Homo sapien
caggagtgagcgtaattcagaccta

SEQ ID NO: 1166844 - DNA, 25 bp, Homo sapien
agtccccgatgtgatggctcctcag

SEQ ID NO: 1166845 - DNA, 25 bp, Homo sapien
gcctctgcgtcctgccactcaggac

SEQ ID NO: 1166846 - DNA, 25 bp, Homo sapien
gcacaagccattgtggaatctccac

SEQ ID NO: 1166847 - DNA, 25 bp, Homo sapien
aggtgtacagaacggtgcctctgcg

SEQ ID NO: 1166848 - DNA, 25 bp, Homo sapien
tgtggaatctccaccaggtgtacag

SEQ ID NO: 1166849 - DNA, 25 bp, Homo sapien
tgtggtcctgccatttgtccccaga

SEQ ID NO: 1166850 - DNA, 25 bp, Homo sapien
gcgccgggcctagtcttgacctctt

SEQ ID NO: 1166851 - DNA, 25 bp, Homo sapien
tgcctaggctctagctgcaaggaga

SEQ ID NO: 1166852 - DNA, 25 bp, Homo sapien
ggtacatctgcttgaccaagcctgg

SEQ ID NO: 1166853 - DNA, 25 bp, Homo sapien
cctggttggtggacatggaacagac

SEQ ID NO: 1166854 - DNA, 25 bp, Homo sapien
tgtgcactgaaagcctaccctggtt

SEQ ID NO: 1166855 - DNA, 25 bp, Homo sapien
ggtaactggcgcctgtaagatggct

SEQ ID NO: 1166856 - DNA, 25 bp, Homo sapien
ggaacagactgaggccataagaagg

SEQ ID NO: 1166857 - DNA, 25 bp, Homo sapien
gctgaggcttcagaaagaaagaggc

SEQ ID NO: 1166858 - DNA, 25 bp, Homo sapien
cttgttgggctgaggcttcagaaag

SEQ ID NO: 1166859 - DNA, 25 bp, Homo sapien
gcaaggctgtgggaacggaagcgga

SEQ ID NO: 1166860 - DNA, 25 bp, Homo sapien
ctgtgggaacggaagcggagggtga

SEQ ID NO: 1166861 - DNA, 25 bp, Homo sapien
gactcaaatgccaaagagagatgcc

SEQ ID NO: 1166862 - DNA, 25 bp, Homo sapien
caaagagagatgccaaggggccagc

SEQ ID NO: 1166863 - DNA, 25 bp, Homo sapien
tgtcttgcttcctccggccttggct

SEQ ID NO: 1166864 - DNA, 25 bp, Homo sapien
ttttgtcttgcttcctccggccttg

SEQ ID NO: 1166865 - DNA, 25 bp, Homo sapien
ccttagggtcattgcacccatttcc

SEQ ID NO: 1166866 - DNA, 25 bp, Homo sapien
ccccttagggtcattgcacccattt

SEQ ID NO: 1166867 - DNA, 25 bp, Homo sapien
gcagcacccccttagggtcattgca

SEQ ID NO: 1166868 - DNA, 25 bp, Homo sapien
ttagggtcattgcacccatttcctg

SEQ ID NO: 1166869 - DNA, 25 bp, Homo sapien
tctctgtcgtgtctgtatctccgtg

SEQ ID NO: 1166870 - DNA, 25 bp, Homo sapien
ctttccacgcctttttcggtctctg

SEQ ID NO: 1166871 - DNA, 25 bp, Homo sapien
cctttttcggtctctgtcgtgtctg

SEQ ID NO: 1166872 - DNA, 25 bp, Homo sapien
tctgtatctccgtgtctgaggtttt

SEQ ID NO: 1166873 - DNA, 25 bp, Homo sapien
ggtcaactccccgacttcgacgcca

SEQ ID NO: 1166874 - DNA, 25 bp, Homo sapien
cagaaactttttgggtctggatcgg

SEQ ID NO: 1166875 - DNA, 25 bp, Homo sapien
tctggatcggggtcaactccccgac

SEQ ID NO: 1166876 - DNA, 25 bp, Homo sapien
ccccgacttcgacgccacgggtcat

SEQ ID NO: 1166877 - DNA, 25 bp, Homo sapien
tgggaccagcggaactcctgctcct

SEQ ID NO: 1166878 - DNA, 25 bp, Homo sapien
tcctgctcctggcccgaatgggaga

SEQ ID NO: 1166879 - DNA, 25 bp, Homo sapien
cctggcccgaatgggagagcgggaa

SEQ ID NO: 1166880 - DNA, 25 bp, Homo sapien
ctgggaccagcggaactcctgctcc

SEQ ID NO: 1166881 - DNA, 25 bp, Homo sapien
tcggcctcttgaatccggctctttc

SEQ ID NO: 1166882 - DNA, 25 bp, Homo sapien
cctttctgagttggcgacgtggccg

SEQ ID NO: 1166883 - DNA, 25 bp, Homo sapien
gcttcgcttccaacgcctttctgag

SEQ ID NO: 1166884 - DNA, 25 bp, Homo sapien
ggctccgccgaaggcagggctctgg

SEQ ID NO: 1166885 - DNA, 25 bp, Homo sapien
ctgtaactttggtgctgcgaacaca

SEQ ID NO: 1166886 - DNA, 25 bp, Homo sapien
taactttggtgctgcgaacacattc

SEQ ID NO: 1166887 - DNA, 25 bp, Homo sapien
tgctgcgaacacattcaagagatat

SEQ ID NO: 1166888 - DNA, 25 bp, Homo sapien
ttggtgctgcgaacacattcaagag

SEQ ID NO: 1166889 - DNA, 25 bp, Homo sapien
gactttgtcgaaagcgggagtccga

SEQ ID NO: 1166890 - DNA, 25 bp, Homo sapien
ttttatctgtttccgatggattctc

SEQ ID NO: 1166891 - DNA, 25 bp, Homo sapien
ctgctgcggagctgagactttgtcg

SEQ ID NO: 1166892 - DNA, 25 bp, Homo sapien
ggtcctggttccacccggagctcag

SEQ ID NO: 1166893 - DNA, 25 bp, Homo sapien
taatgtgattccagaagcggccctg

SEQ ID NO: 1166894 - DNA, 25 bp, Homo sapien
ccaaggctctccgtttataaaggca

SEQ ID NO: 1166895 - DNA, 25 bp, Homo sapien
ggagtgactcctacgtcccattcat

SEQ ID NO: 1166896 - DNA, 25 bp, Homo sapien
tatcttgtttaggatgggcgagctc

SEQ ID NO: 1166897 - DNA, 25 bp, Homo sapien
ggtttccgctcctccattttgcctg

SEQ ID NO: 1166898 - DNA, 25 bp, Homo sapien
caccaagctgtctggcctttatgcc

SEQ ID NO: 1166899 - DNA, 25 bp, Homo sapien
tcagaaggaggtcggagagtttaat

SEQ ID NO: 1166900 - DNA, 25 bp, Homo sapien
cgctcctccattttgcctgttcaga

SEQ ID NO: 1166901 - DNA, 25 bp, Homo sapien
ccccacagcccaggcgcctccaggc

SEQ ID NO: 1166902 - DNA, 25 bp, Homo sapien
catcccccacagcccaggcgcctcc

SEQ ID NO: 1166903 - DNA, 25 bp, Homo sapien
gcgcctccaggcctcggatcccctc

SEQ ID NO: 1166904 - DNA, 25 bp, Homo sapien
tcccccacagcccaggcgcctccag

SEQ ID NO: 1166905 - DNA, 25 bp, Homo sapien
ttccacgaacctttggcggcttcag

SEQ ID NO: 1166906 - DNA, 25 bp, Homo sapien
tattccacgaacctttggcggcttc

SEQ ID NO: 1166907 - DNA, 25 bp, Homo sapien
tatattccacgaacctttggcggct

SEQ ID NO: 1166908 - DNA, 25 bp, Homo sapien
ttatattccacgaacctttggcggc

SEQ ID NO: 1166909 - DNA, 25 bp, Homo sapien
tctgccagtggcagacggaatcatc

SEQ ID NO: 1166910 - DNA, 25 bp, Homo sapien
atcagccaaccgcacccgggcagga

SEQ ID NO: 1166911 - DNA, 25 bp, Homo sapien
cagtggcagacggaatcatcagcca

SEQ ID NO: 1166912 - DNA, 25 bp, Homo sapien
tgccagtggcagacggaatcatcag

SEQ ID NO: 1166913 - DNA, 25 bp, Homo sapien
cttaaagcagttggtagaaggaatg

SEQ ID NO: 1166914 - DNA, 25 bp, Homo sapien
aggaatggtatttgtatggggggag

SEQ ID NO: 1166915 - DNA, 25 bp, Homo sapien
aaagtgtatctagaaatatctatat

SEQ ID NO: 1166916 - DNA, 25 bp, Homo sapien
tatttttaactgactctttggaatc

SEQ ID NO: 1166917 - DNA, 25 bp, Homo sapien
atatatttttaactgactctttgga

SEQ ID NO: 1166918 - DNA, 25 bp, Homo sapien
aagtgtatctagaaatatctatatc

SEQ ID NO: 1166919 - DNA, 25 bp, Homo sapien
gagcagaatacttaagcctggcccc

SEQ ID NO: 1166920 - DNA, 25 bp, Homo sapien
gatatacagtgcaatagctccccac

SEQ ID NO: 1166921 - DNA, 25 bp, Homo sapien
cacgttgtacacatatgctgcagga

SEQ ID NO: 1166922 - DNA, 25 bp, Homo sapien
ggacgtccttggtcttgcacgcaca

SEQ ID NO: 1166923 - DNA, 25 bp, Homo sapien
caggccttaactgagccagatctgg

SEQ ID NO: 1166924 - DNA, 25 bp, Homo sapien
gactttcaccaagcggaagtttggc

SEQ ID NO: 1166925 - DNA, 25 bp, Homo sapien
gctgggactcccaatcaggccttaa

SEQ ID NO: 1166926 - DNA, 25 bp, Homo sapien
tatgagctgagcgtgctatgtgact

SEQ ID NO: 1166927 - DNA, 25 bp, Homo sapien
tggccgttagatagcaggaaggact

SEQ ID NO: 1166928 - DNA, 25 bp, Homo sapien
gattggagaccactgctgggcttca

SEQ ID NO: 1166929 - DNA, 25 bp, Homo sapien
gagtccaaggactcagccctgagaa

SEQ ID NO: 1166930 - DNA, 25 bp, Homo sapien
tttgagccccagagactactttgag

SEQ ID NO: 1166931 - DNA, 25 bp, Homo sapien
cactgagaattccagcagatggctg

SEQ ID NO: 1166932 - DNA, 25 bp, Homo sapien
caacaggcttcttgagcgatgggta

SEQ ID NO: 1166933 - DNA, 25 bp, Homo sapien
ttttagcagacaggcaagtcctcga

SEQ ID NO: 1166934 - DNA, 25 bp, Homo sapien
caacttggcatcgttctcgtgggtc

SEQ ID NO: 1166935 - DNA, 25 bp, Homo sapien
aatttccatagatctgcagtcctgc

SEQ ID NO: 1166936 - DNA, 25 bp, Homo sapien
ggattctcatcccttacagctgact

SEQ ID NO: 1166937 - DNA, 25 bp, Homo sapien
tattcaaactaatacccatgccgtg

SEQ ID NO: 1166938 - DNA, 25 bp, Homo sapien
ccatgccgtgttttttaccttggat

SEQ ID NO: 1166939 - DNA, 25 bp, Homo sapien
tgagagaagcatatctcacacaaga

SEQ ID NO: 1166940 - DNA, 25 bp, Homo sapien
ttagctgggtaatgtgcccaggtca

SEQ ID NO: 1166941 - DNA, 25 bp, Homo sapien
caatcctcagcttatgacctacaaa

SEQ ID NO: 1166942 - DNA, 25 bp, Homo sapien
ccaggtcagaaggtttgagagaagc

SEQ ID NO: 1166943 - DNA, 25 bp, Homo sapien
ctccggggcacatcctcagggttgg

SEQ ID NO: 1166944 - DNA, 25 bp, Homo sapien
tcaggttctggcctccggggcacat

SEQ ID NO: 1166945 - DNA, 25 bp, Homo sapien
gagggcttggatgctggcttcttgc

SEQ ID NO: 1166946 - DNA, 25 bp, Homo sapien
tctttttcttattggagcttgaggg

SEQ ID NO: 1166947 - DNA, 25 bp, Homo sapien
tgaaacattggtcgccgtgtcgcct

SEQ ID NO: 1166948 - DNA, 25 bp, Homo sapien
gctcgcaggagtagctcaaggcctc

SEQ ID NO: 1166949 - DNA, 25 bp, Homo sapien
gaaggccctctggaagttgttcaag

SEQ ID NO: 1166950 - DNA, 25 bp, Homo sapien
tagcaggctcccatttttgcccagg

SEQ ID NO: 1166951 - DNA, 25 bp, Homo sapien
ttctggtgaaactcccgagcttcct

SEQ ID NO: 1166952 - DNA, 25 bp, Homo sapien
cttcctgatagttgccgagggcatt

SEQ ID NO: 1166953 - DNA, 25 bp, Homo sapien
tgggagtagcccaggcctagatcgt

SEQ ID NO: 1166954 - DNA, 25 bp, Homo sapien
caggcctagatcgttatagaggtgc

SEQ ID NO: 1166955 - DNA, 25 bp, Homo sapien
gcagggcatgcaggtagttgtctct

SEQ ID NO: 1166956 - DNA, 25 bp, Homo sapien
ggtcccccagctggctcaatgcaaa

SEQ ID NO: 1166957 - DNA, 25 bp, Homo sapien
gctggctcaatgcaaaggccaggct

SEQ ID NO: 1166958 - DNA, 25 bp, Homo sapien
aggctgccaaagctccggccctgct

SEQ ID NO: 1166959 - DNA, 25 bp, Homo sapien
cttatagtacttcaaggcctggtca

SEQ ID NO: 1166960 - DNA, 25 bp, Homo sapien
gtgcttccttatagtacttcaaggc

SEQ ID NO: 1166961 - DNA, 25 bp, Homo sapien
ccttatagtacttcaaggcctggtc

SEQ ID NO: 1166962 - DNA, 25 bp, Homo sapien
gggccagtgcttccttatagtactt

SEQ ID NO: 1166963 - DNA, 25 bp, Homo sapien
gtaatggggaatgcctggaccttat

SEQ ID NO: 1166964 - DNA, 25 bp, Homo sapien
tgggaagagggtggataatagggta

SEQ ID NO: 1166965 - DNA, 25 bp, Homo sapien
gggaatgcctggaccttatggtcct

SEQ ID NO: 1166966 - DNA, 25 bp, Homo sapien
tggggaatgcctggaccttatggtc

SEQ ID NO: 1166967 - DNA, 25 bp, Homo sapien
accagccgttctcgcacagaatctg

SEQ ID NO: 1166968 - DNA, 25 bp, Homo sapien
gttctcgcacagaatctggctcctt

SEQ ID NO: 1166969 - DNA, 25 bp, Homo sapien
tggccaccagccgttctcgcacaga

SEQ ID NO: 1166970 - DNA, 25 bp, Homo sapien
tgggccaagcgcgtcctcacggtgt

SEQ ID NO: 1166971 - DNA, 25 bp, Homo sapien
gggtgtgagtctggaccagccccac

SEQ ID NO: 1166972 - DNA, 25 bp, Homo sapien
agggtgtgagtctggaccagcccca

SEQ ID NO: 1166973 - DNA, 25 bp, Homo sapien
ttccttggagcacatctccatcctg

SEQ ID NO: 1166974 - DNA, 25 bp, Homo sapien
catttagggaactgcagtcaaggac

SEQ ID NO: 1166975 - DNA, 25 bp, Homo sapien
cctgtggccatttagggaactgcag

SEQ ID NO: 1166976 - DNA, 25 bp, Homo sapien
ttggagcacatctccatcctgtggc

SEQ ID NO: 1166977 - DNA, 25 bp, Homo sapien
gatttagggactagcagacctggcc

SEQ ID NO: 1166978 - DNA, 25 bp, Homo sapien
gggcctgataccgtaaagtcacaga

SEQ ID NO: 1166979 - DNA, 25 bp, Homo sapien
taggtctgagaaaaacggccatccc

SEQ ID NO: 1166980 - DNA, 25 bp, Homo sapien
gatagagacaattcgggctctgccg

SEQ ID NO: 1166981 - DNA, 25 bp, Homo sapien
gctggccccacctggagcctggagt

SEQ ID NO: 1166982 - DNA, 25 bp, Homo sapien
ctggagcctggagtcttcccggagc

SEQ ID NO: 1166983 - DNA, 25 bp, Homo sapien
ttcctgcctttgctggggtcccctc

SEQ ID NO: 1166984 - DNA, 25 bp, Homo sapien
gcctggagtcttcccggagccgaag

SEQ ID NO: 1166985 - DNA, 25 bp, Homo sapien
cggaacgtttgccgacctctcctct

SEQ ID NO: 1166986 - DNA, 25 bp, Homo sapien
tctggtcttcccggcccagccctca

SEQ ID NO: 1166987 - DNA, 25 bp, Homo sapien
ctctggtcttcccggcccagccctc

SEQ ID NO: 1166988 - DNA, 25 bp, Homo sapien
gctctggtcttcccggcccagccct

SEQ ID NO: 1166989 - DNA, 25 bp, Homo sapien
ctggtcttcccggcccagccctcac

SEQ ID NO: 1166990 - DNA, 25 bp, Homo sapien
tgccatatttgcagtaaggagaggc

SEQ ID NO: 1166991 - DNA, 25 bp, Homo sapien
ttgggcacagagtaggctttcagca

SEQ ID NO: 1166992 - DNA, 25 bp, Homo sapien
gaggcaccgccaggaatactctaca

SEQ ID NO: 1166993 - DNA, 25 bp, Homo sapien
gaggttgtgccaggcctcaaagaaa

SEQ ID NO: 1166994 - DNA, 25 bp, Homo sapien
taaacgtggggcaactagaagctag

SEQ ID NO: 1166995 - DNA, 25 bp, Homo sapien
gcagggcgtgtgcttggtaaacgtg

SEQ ID NO: 1166996 - DNA, 25 bp, Homo sapien
ggaggctttgccgaggactgtccct

SEQ ID NO: 1166997 - DNA, 25 bp, Homo sapien
gatggtgcgaatgattcactgtgcc

SEQ ID NO: 1166998 - DNA, 25 bp, Homo sapien
gagggcctggacctacaaatggaag

SEQ ID NO: 1166999 - DNA, 25 bp, Homo sapien
gacctacaaatggaagatgggccct

SEQ ID NO: 1167000 - DNA, 25 bp, Homo sapien
gatgctagggtactccgctctggga

SEQ ID NO: 1167001 - DNA, 25 bp, Homo sapien
ctattggcttgagggccattgggta

SEQ ID NO: 1167002 - DNA, 25 bp, Homo sapien
ttaggaagcagggcataccctgggc

SEQ ID NO: 1167003 - DNA, 25 bp, Homo sapien
ttccagagccgggtgagggttgttc

SEQ ID NO: 1167004 - DNA, 25 bp, Homo sapien
gcttccagagccgggtgagggttgt

SEQ ID NO: 1167005 - DNA, 25 bp, Homo sapien
ggaagcagggcataccctgggcttc

SEQ ID NO: 1167006 - DNA, 25 bp, Homo sapien
tgcaaaaatggacgtctggagacag

SEQ ID NO: 1167007 - DNA, 25 bp, Homo sapien
gccaggcccctagcaatcgtaagat

SEQ ID NO: 1167008 - DNA, 25 bp, Homo sapien
cacacaatagtgcagatgcccgact

SEQ ID NO: 1167009 - DNA, 25 bp, Homo sapien
catacaacgggcatagacacacttg

SEQ ID NO: 1167010 - DNA, 25 bp, Homo sapien
tcgcagagcgcgcgcccccggcccg

SEQ ID NO: 1167011 - DNA, 25 bp, Homo sapien
gctcgcagagcgcgcgcccccggcc

SEQ ID NO: 1167012 - DNA, 25 bp, Homo sapien
ctcgcagagcgcgcgcccccggccc

SEQ ID NO: 1167013 - DNA, 25 bp, Homo sapien
ggtctggcttttgatccgcggcacg

SEQ ID NO: 1167014 - DNA, 25 bp, Homo sapien
ttcaccaccgtgctcgccatgacct

SEQ ID NO: 1167015 - DNA, 25 bp, Homo sapien
aggtacttcaccaccgtgctcgcca

SEQ ID NO: 1167016 - DNA, 25 bp, Homo sapien
gcggcacgcgcgagcccgcaaccag

SEQ ID NO: 1167017 - DNA, 25 bp, Homo sapien
tcagcccggccagttccataagttg

SEQ ID NO: 1167018 - DNA, 25 bp, Homo sapien
ggtattcgttaaatagctcctggtc

SEQ ID NO: 1167019 - DNA, 25 bp, Homo sapien
cataagttggtccacgctgaactgg

SEQ ID NO: 1167020 - DNA, 25 bp, Homo sapien
tggctgtagcacagctcagcccggc

SEQ ID NO: 1167021 - DNA, 25 bp, Homo sapien
gggtttcaggcggtaatagaccata

SEQ ID NO: 1167022 - DNA, 25 bp, Homo sapien
tggctgctcccaaaggtcgagagtt

SEQ ID NO: 1167023 - DNA, 25 bp, Homo sapien
aaaggtcgagagttgtgccactgac

SEQ ID NO: 1167024 - DNA, 25 bp, Homo sapien
aaggcagagtcaagggtggttcggc

SEQ ID NO: 1167025 - DNA, 25 bp, Homo sapien
ttattccccgggccacagatgacca

SEQ ID NO: 1167026 - DNA, 25 bp, Homo sapien
attattccccgggccacagatgacc

SEQ ID NO: 1167027 - DNA, 25 bp, Homo sapien
ccattattccccgggccacagatga

SEQ ID NO: 1167028 - DNA, 25 bp, Homo sapien
cattattccccgggccacagatgac

SEQ ID NO: 1167029 - DNA, 25 bp, Homo sapien
tggtaattcaaccccagatcccaga

SEQ ID NO: 1167030 - DNA, 25 bp, Homo sapien
agtggtaattcaaccccagatccca

SEQ ID NO: 1167031 - DNA, 25 bp, Homo sapien
agaaagtggtaattcaaccccagat

SEQ ID NO: 1167032 - DNA, 25 bp, Homo sapien
tcccagagccctcacgccctcctcc

SEQ ID NO: 1167033 - DNA, 25 bp, Homo sapien
tctgcgggcatttccccaaggaaag

SEQ ID NO: 1167034 - DNA, 25 bp, Homo sapien
tgacactgggtcaccaatgcagtga

SEQ ID NO: 1167035 - DNA, 25 bp, Homo sapien
ggtaatagatggttggctcgtagcc

SEQ ID NO: 1167036 - DNA, 25 bp, Homo sapien
ggaaagggatgtccattttctgaca

SEQ ID NO: 1167037 - DNA, 25 bp, Homo sapien
gggtttcagatagggcagccactcc

SEQ ID NO: 1167038 - DNA, 25 bp, Homo sapien
cctgaggcctagagaaagtgtgagt

SEQ ID NO: 1167039 - DNA, 25 bp, Homo sapien
tattcgaataccatccgttaggcac

SEQ ID NO: 1167040 - DNA, 25 bp, Homo sapien
tccgtaccaggcactaaaatgagct

SEQ ID NO: 1167041 - DNA, 25 bp, Homo sapien
cagctcatacagttcatcaatcgtc

SEQ ID NO: 1167042 - DNA, 25 bp, Homo sapien
gctcatacagttcatcaatcgtcat

SEQ ID NO: 1167043 - DNA, 25 bp, Homo sapien
catacagttcatcaatcgtcatggg

SEQ ID NO: 1167044 - DNA, 25 bp, Homo sapien
caccagctcatacagttcatcaatc

SEQ ID NO: 1167045 - DNA, 25 bp, Homo sapien
tgggcacagtgagtcccttcaggac

SEQ ID NO: 1167046 - DNA, 25 bp, Homo sapien
ctgagggaatgtcgatgctggcaat

SEQ ID NO: 1167047 - DNA, 25 bp, Homo sapien
tgtcgatgctggcaatgggcacagt

SEQ ID NO: 1167048 - DNA, 25 bp, Homo sapien
cggttcccgaacatcgcccttgaag

SEQ ID NO: 1167049 - DNA, 25 bp, Homo sapien
agaggagtgggaagtcccctcagtt

SEQ ID NO: 1167050 - DNA, 25 bp, Homo sapien
gaagaggccagatgtctcgtcccct

SEQ ID NO: 1167051 - DNA, 25 bp, Homo sapien
tattttagacctggtgtgggcaaga

SEQ ID NO: 1167052 - DNA, 25 bp, Homo sapien
gagctccacgtacccttgggccgtg

SEQ ID NO: 1167053 - DNA, 25 bp, Homo sapien
gtagcgaccggtaaactgggttgca

SEQ ID NO: 1167054 - DNA, 25 bp, Homo sapien
agcgaccggtaaactgggttgcaga

SEQ ID NO: 1167055 - DNA, 25 bp, Homo sapien
tagcgaccggtaaactgggttgcag

SEQ ID NO: 1167056 - DNA, 25 bp, Homo sapien
cgaccggtaaactgggttgcagatt

SEQ ID NO: 1167057 - DNA, 25 bp, Homo sapien
actgcagacgatagacacactcggt

SEQ ID NO: 1167058 - DNA, 25 bp, Homo sapien
cactgcagacgatagacacactcgg

SEQ ID NO: 1167059 - DNA, 25 bp, Homo sapien
tcactgcagacgatagacacactcg

SEQ ID NO: 1167060 - DNA, 25 bp, Homo sapien
accattcactgacttttattgccag

SEQ ID NO: 1167061 - DNA, 25 bp, Homo sapien
ccattcactgacttttattgccaga

SEQ ID NO: 1167062 - DNA, 25 bp, Homo sapien
caccattcactgacttttattgcca

SEQ ID NO: 1167063 - DNA, 25 bp, Homo sapien
atggcacccaatccccagggttggt

SEQ ID NO: 1167064 - DNA, 25 bp, Homo sapien
tttgtgttacccctagagagatggc

SEQ ID NO: 1167065 - DNA, 25 bp, Homo sapien
tgtttccaaataccatagcaacctc

SEQ ID NO: 1167066 - DNA, 25 bp, Homo sapien
ctagagagatggcacccaatcccca

SEQ ID NO: 1167067 - DNA, 25 bp, Homo sapien
ggaatgcagataccctttgaaggag

SEQ ID NO: 1167068 - DNA, 25 bp, Homo sapien
aaaggaaactgatctctgggacgtc

SEQ ID NO: 1167069 - DNA, 25 bp, Homo sapien
ccacagttgccagtttctagcgcta

SEQ ID NO: 1167070 - DNA, 25 bp, Homo sapien
tgagaggagcaagcggtagtaccac

SEQ ID NO: 1167071 - DNA, 25 bp, Homo sapien
gagagcagagcacacactggctcaa

SEQ ID NO: 1167072 - DNA, 25 bp, Homo sapien
gagcaaaccaatcagtccctcagga

SEQ ID NO: 1167073 - DNA, 25 bp, Homo sapien
gcgacatcaagaaggaaaggtctca

SEQ ID NO: 1167074 - DNA, 25 bp, Homo sapien
tatgctgacccatgcagccgaagaa

SEQ ID NO: 1167075 - DNA, 25 bp, Homo sapien
tatgagctcttgatagatgggcaca

SEQ ID NO: 1167076 - DNA, 25 bp, Homo sapien
caggatggagtacagataaggagcc

SEQ ID NO: 1167077 - DNA, 25 bp, Homo sapien
caacttggtagtggaaactgggcag

SEQ ID NO: 1167078 - DNA, 25 bp, Homo sapien
tgagctcttcaacaagactgcggcc

SEQ ID NO: 1167079 - DNA, 25 bp, Homo sapien
gaggaaggttagcatgtgtgggaga

SEQ ID NO: 1167080 - DNA, 25 bp, Homo sapien
tgaggaaggttagcatgtgtgggag

SEQ ID NO: 1167081 - DNA, 25 bp, Homo sapien
gtacagagtataccccaatgtcagg

SEQ ID NO: 1167082 - DNA, 25 bp, Homo sapien
gagatatgggctctctaccaaaaga

SEQ ID NO: 1167083 - DNA, 25 bp, Homo sapien
ccccatgtagtccatttaattaaag

SEQ ID NO: 1167084 - DNA, 25 bp, Homo sapien
gaaagaagtgcgctaggaggtcttc

SEQ ID NO: 1167085 - DNA, 25 bp, Homo sapien
aagcagtcaggatggaactgatggc

SEQ ID NO: 1167086 - DNA, 25 bp, Homo sapien
gcacccaactagcagagaattctta

SEQ ID NO: 1167087 - DNA, 25 bp, Homo sapien
ctgcacccaactagcagagaattct

SEQ ID NO: 1167088 - DNA, 25 bp, Homo sapien
gaattcttaacaagcagtcaggatg

SEQ ID NO: 1167089 - DNA, 25 bp, Homo sapien
tagccagatagggagctccccaaag

SEQ ID NO: 1167090 - DNA, 25 bp, Homo sapien
taaagtcttagcacatcctggcatg

SEQ ID NO: 1167091 - DNA, 25 bp, Homo sapien
gggcttgaattctacatgttacctg

SEQ ID NO: 1167092 - DNA, 25 bp, Homo sapien
ccctgaatgggctgggaagattaaa

SEQ ID NO: 1167093 - DNA, 25 bp, Homo sapien
caaagacaggctgaggtaatcagat

SEQ ID NO: 1167094 - DNA, 25 bp, Homo sapien
aaattgggctcaactctcaatacag

SEQ ID NO: 1167095 - DNA, 25 bp, Homo sapien
taggtatagggaccatgacaatggg

SEQ ID NO: 1167096 - DNA, 25 bp, Homo sapien
taatcagatatcacctgatggatgg

SEQ ID NO: 1167097 - DNA, 25 bp, Homo sapien
tcaggtgggaactatccaggacttc

SEQ ID NO: 1167098 - DNA, 25 bp, Homo sapien
cctattgttgaataacagggcccct

SEQ ID NO: 1167099 - DNA, 25 bp, Homo sapien
gcctgagtgcgcattgcctttgcaa

SEQ ID NO: 1167100 - DNA, 25 bp, Homo sapien
tttgcaaacagactttcaggtggga

SEQ ID NO: 1167101 - DNA, 25 bp, Homo sapien
ctgttcaacacagttgctccttttg

SEQ ID NO: 1167102 - DNA, 25 bp, Homo sapien
aacacagttgctccttttgcacctt

SEQ ID NO: 1167103 - DNA, 25 bp, Homo sapien
tgcacctttgaggaaaagcttctgt

SEQ ID NO: 1167104 - DNA, 25 bp, Homo sapien
ttttgcacctttgaggaaaagcttc

SEQ ID NO: 1167105 - DNA, 25 bp, Homo sapien
ttctggatgaaggtttgccaggctc

SEQ ID NO: 1167106 - DNA, 25 bp, Homo sapien
tggtctcttcacagagacggaggga

SEQ ID NO: 1167107 - DNA, 25 bp, Homo sapien
agctggtctcttcacagagacggag

SEQ ID NO: 1167108 - DNA, 25 bp, Homo sapien
tgtcttgcttgaggaagaggttctg

SEQ ID NO: 1167109 - DNA, 25 bp, Homo sapien
gcagggcacaaagagtgggcagttc

SEQ ID NO: 1167110 - DNA, 25 bp, Homo sapien
cagggcacaaagagtgggcagttct

SEQ ID NO: 1167111 - DNA, 25 bp, Homo sapien
gggcacaaagagtgggcagttctta

SEQ ID NO: 1167112 - DNA, 25 bp, Homo sapien
cacaaagagtgggcagttcttagga

SEQ ID NO: 1167113 - DNA, 25 bp, Homo sapien
cccaaagaaggaagcggcagagtgt

SEQ ID NO: 1167114 - DNA, 25 bp, Homo sapien
ggcccaaagaaggaagcggcagagt

SEQ ID NO: 1167115 - DNA, 25 bp, Homo sapien
aaagaaggaagcggcagagtgtggg

SEQ ID NO: 1167116 - DNA, 25 bp, Homo sapien
ccaaagaaggaagcggcagagtgtg

SEQ ID NO: 1167117 - DNA, 25 bp, Homo sapien
gggtacctgcaacaactgccctttc

SEQ ID NO: 1167118 - DNA, 25 bp, Homo sapien
gcaatgactttcagtccctgggtac

SEQ ID NO: 1167119 - DNA, 25 bp, Homo sapien
ctgggtacctgcaacaactgccctt

SEQ ID NO: 1167120 - DNA, 25 bp, Homo sapien
acagtggcaggaacccccaatcctc

SEQ ID NO: 1167121 - DNA, 25 bp, Homo sapien
aagctcaaggtcagcgccacgctct

SEQ ID NO: 1167122 - DNA, 25 bp, Homo sapien
tgatgaggatcagcgtttcccggag

SEQ ID NO: 1167123 - DNA, 25 bp, Homo sapien
cctcgatgccgttgatgagctcgca

SEQ ID NO: 1167124 - DNA, 25 bp, Homo sapien
ccagggaggcgtctagtcgatgccc

SEQ ID NO: 1167125 - DNA, 25 bp, Homo sapien
ggagggccagcggatgggagcggag

SEQ ID NO: 1167126 - DNA, 25 bp, Homo sapien
ctgggagacccaggcgaggcggacc

SEQ ID NO: 1167127 - DNA, 25 bp, Homo sapien
ggacccgctgctacacaggaatggg

SEQ ID NO: 1167128 - DNA, 25 bp, Homo sapien
caggcgaggcggacccgctgctaca

SEQ ID NO: 1167129 - DNA, 25 bp, Homo sapien
gtagagctgggagtaggtggccagg

SEQ ID NO: 1167130 - DNA, 25 bp, Homo sapien
tcgtagtaattgaactggtaccggc

SEQ ID NO: 1167131 - DNA, 25 bp, Homo sapien
gcacgcctgcttcgcctcgtagtaa

SEQ ID NO: 1167132 - DNA, 25 bp, Homo sapien
aggtggccaggcgtccgtcctgctc

SEQ ID NO: 1167133 - DNA, 25 bp, Homo sapien
gggcgcgtgcggtgagcacagggta

SEQ ID NO: 1167134 - DNA, 25 bp, Homo sapien
cgtcgtagcggtcgcgcatccggtc

SEQ ID NO: 1167135 - DNA, 25 bp, Homo sapien
acagggtagcgcacggagccctcga

SEQ ID NO: 1167136 - DNA, 25 bp, Homo sapien
gggtccgtagctgcggatcccgggc

SEQ ID NO: 1167137 - DNA, 25 bp, Homo sapien
aattctcggcgtagcagtaggtccc

SEQ ID NO: 1167138 - DNA, 25 bp, Homo sapien
cgcgtgggcttcagacagcgtcagc

SEQ ID NO: 1167139 - DNA, 25 bp, Homo sapien
gtagaggtgcccaaccttggccacc

SEQ ID NO: 1167140 - DNA, 25 bp, Homo sapien
tggtgattgggaagcgcacactgcc

SEQ ID NO: 1167141 - DNA, 25 bp, Homo sapien
caagcttcttcgcgcgcgctggagg

SEQ ID NO: 1167142 - DNA, 25 bp, Homo sapien
gccacgactcccaagcttcttcgcg

SEQ ID NO: 1167143 - DNA, 25 bp, Homo sapien
gctctccggaaaggggtggcgagag

SEQ ID NO: 1167144 - DNA, 25 bp, Homo sapien
gggtggcgagagacccccgccacga

SEQ ID NO: 1167145 - DNA, 25 bp, Homo sapien
ccccggctgggaaggcaggtctgga

SEQ ID NO: 1167146 - DNA, 25 bp, Homo sapien
cggctgggaaggcaggtctggagag

SEQ ID NO: 1167147 - DNA, 25 bp, Homo sapien
agcccccggctgggaaggcaggtct

SEQ ID NO: 1167148 - DNA, 25 bp, Homo sapien
ggccagccggggtccgaggcccgca

SEQ ID NO: 1167149 - DNA, 25 bp, Homo sapien
tattttattgctgtactcagaggtc

SEQ ID NO: 1167150 - DNA, 25 bp, Homo sapien
tctgctagggttcgcgaacggcagc

SEQ ID NO: 1167151 - DNA, 25 bp, Homo sapien
tgtactcagaggtcagttaatgccc

SEQ ID NO: 1167152 - DNA, 25 bp, Homo sapien
gtccgagggtcacctctgcatctcg

SEQ ID NO: 1167153 - DNA, 25 bp, Homo sapien
cgcaaacgcttcagggaggtctgca

SEQ ID NO: 1167154 - DNA, 25 bp, Homo sapien
cattagcgtgttcgtgccctttgcc

SEQ ID NO: 1167155 - DNA, 25 bp, Homo sapien
ggcgcccctggcagatttgaactaa

SEQ ID NO: 1167156 - DNA, 25 bp, Homo sapien
tatctttaacagtagtccccgcaaa

SEQ ID NO: 1167157 - DNA, 25 bp, Homo sapien
catgcctgtagttctgacttcttga

SEQ ID NO: 1167158 - DNA, 25 bp, Homo sapien
aaggaaggaaagatcagctgggtat

SEQ ID NO: 1167159 - DNA, 25 bp, Homo sapien
aagatcagctgggtatggtgtcaca

SEQ ID NO: 1167160 - DNA, 25 bp, Homo sapien
cctgtagttctgacttcttgagaga

SEQ ID NO: 1167161 - DNA, 25 bp, Homo sapien
ggccctgcacgggcatctgggtctt

SEQ ID NO: 1167162 - DNA, 25 bp, Homo sapien
catctgggtcttgtgccataggcat

SEQ ID NO: 1167163 - DNA, 25 bp, Homo sapien
tctccgaggccctgcacgggcatct

SEQ ID NO: 1167164 - DNA, 25 bp, Homo sapien
ggcagctgagttcctctccgaggcc

SEQ ID NO: 1167165 - DNA, 25 bp, Homo sapien
cagacagtctgttccaaaaagcaga

SEQ ID NO: 1167166 - DNA, 25 bp, Homo sapien
gattggcactcacttcggtgccctg

SEQ ID NO: 1167167 - DNA, 25 bp, Homo sapien
gggaatccacccttgactgaggcca

SEQ ID NO: 1167168 - DNA, 25 bp, Homo sapien
gacaagggctggtaccagacagtct

SEQ ID NO: 1167169 - DNA, 25 bp, Homo sapien
cagtcatgcaaaccaatgtgcaaaa

SEQ ID NO: 1167170 - DNA, 25 bp, Homo sapien
gctatgattgggcattggctcctgt

SEQ ID NO: 1167171 - DNA, 25 bp, Homo sapien
ctcgggacggtcacgggacccgctg

SEQ ID NO: 1167172 - DNA, 25 bp, Homo sapien
aggctggggccgcaggacattcgga

SEQ ID NO: 1167173 - DNA, 25 bp, Homo sapien
gccctcccggcgcagcacaaaaccc

SEQ ID NO: 1167174 - DNA, 25 bp, Homo sapien
caggacattcggaagagggcgccgg

SEQ ID NO: 1167175 - DNA, 25 bp, Homo sapien
tgcgaagtttgtcgcctcctccggg

SEQ ID NO: 1167176 - DNA, 25 bp, Homo sapien
gttgggtcgcggcactgcgaagttt

SEQ ID NO: 1167177 - DNA, 25 bp, Homo sapien
ggtctcctccgggtgcacggctcag

SEQ ID NO: 1167178 - DNA, 25 bp, Homo sapien
ccgggtgcacggctcagtcctgcag

SEQ ID NO: 1167179 - DNA, 25 bp, Homo sapien
cagaccaggcaggcactcccttctc

SEQ ID NO: 1167180 - DNA, 25 bp, Homo sapien
agaccaggcaggcactcccttctcc

SEQ ID NO: 1167181 - DNA, 25 bp, Homo sapien
tcaggagtcgacgagttgggtgccc

SEQ ID NO: 1167182 - DNA, 25 bp, Homo sapien
agtcgacgagttgggtgccccagag

SEQ ID NO: 1167183 - DNA, 25 bp, Homo sapien
accccgctgcggtgtcaggagtcga

SEQ ID NO: 1167184 - DNA, 25 bp, Homo sapien
tgtccagcagcctaccccgctgcgg

SEQ ID NO: 1167185 - DNA, 25 bp, Homo sapien
cagggaagatgcgaggacccgaggg

SEQ ID NO: 1167186 - DNA, 25 bp, Homo sapien
cagcagggaagatgcgaggacccga

SEQ ID NO: 1167187 - DNA, 25 bp, Homo sapien
atgcgaggacccgaggggttgctga

SEQ ID NO: 1167188 - DNA, 25 bp, Homo sapien
gaagatgcgaggacccgaggggttg

SEQ ID NO: 1167189 - DNA, 25 bp, Homo sapien
tccttccagaacatctgctaaagct

SEQ ID NO: 1167190 - DNA, 25 bp, Homo sapien
gaacatctgctaaagctgcaggagc

SEQ ID NO: 1167191 - DNA, 25 bp, Homo sapien
tgagctgtctccttccagaacatct

SEQ ID NO: 1167192 - DNA, 25 bp, Homo sapien
gagctgtctccttccagaacatctg

SEQ ID NO: 1167193 - DNA, 25 bp, Homo sapien
acagctcagcccttatttccaagtg

SEQ ID NO: 1167194 - DNA, 25 bp, Homo sapien
gaagcagttggttagggctgaacaa

SEQ ID NO: 1167195 - DNA, 25 bp, Homo sapien
aagtgttccagcctggacgcttccc

SEQ ID NO: 1167196 - DNA, 25 bp, Homo sapien
aacccaccagatgctcacagctcag

SEQ ID NO: 1167197 - DNA, 25 bp, Homo sapien
acgctgggtacgcaggcagtgccac

SEQ ID NO: 1167198 - DNA, 25 bp, Homo sapien
cgatgcgcacgcgaaaagcgcggtc

SEQ ID NO: 1167199 - DNA, 25 bp, Homo sapien
gaaagtccacttgacccgcggagag

SEQ ID NO: 1167200 - DNA, 25 bp, Homo sapien
ggtaggcctcgttcaccttgacgcg

SEQ ID NO: 1167201 - DNA, 25 bp, Homo sapien
tcgctgctgtcatcgatgccgtgct

SEQ ID NO: 1167202 - DNA, 25 bp, Homo sapien
agcgtcgctgctgtcatcgatgccg

SEQ ID NO: 1167203 - DNA, 25 bp, Homo sapien
tccacagcgtcgctgctgtcatcga

SEQ ID NO: 1167204 - DNA, 25 bp, Homo sapien
tgctgtcatcgatgccgtgctggac

SEQ ID NO: 1167205 - DNA, 25 bp, Homo sapien
gacttaagttagattgtgggtagaa

SEQ ID NO: 1167206 - DNA, 25 bp, Homo sapien
acagcatgagggacttaagttagat

SEQ ID NO: 1167207 - DNA, 25 bp, Homo sapien
ttagattgtgggtagaatgtcctcc

SEQ ID NO: 1167208 - DNA, 25 bp, Homo sapien
catgagggacttaagttagattgtg

SEQ ID NO: 1167209 - DNA, 25 bp, Homo sapien
acggtctgatccgacagccagccag

SEQ ID NO: 1167210 - DNA, 25 bp, Homo sapien
tcatagcccccaaggtaggcggcat

SEQ ID NO: 1167211 - DNA, 25 bp, Homo sapien
cgatgtgggctccaatgcgggcaca

SEQ ID NO: 1167212 - DNA, 25 bp, Homo sapien
aagcatagcgggcagagccctctcg

SEQ ID NO: 1167213 - DNA, 25 bp, Homo sapien
aagccatccatgtctccgtaacagg

SEQ ID NO: 1167214 - DNA, 25 bp, Homo sapien
aggtcatccgggtccaccacaccat

SEQ ID NO: 1167215 - DNA, 25 bp, Homo sapien
gtctccgtaacaggcctctcgtggg

SEQ ID NO: 1167216 - DNA, 25 bp, Homo sapien
tccaccacaccatagttccggaccc

SEQ ID NO: 1167217 - DNA, 25 bp, Homo sapien
ctggagggtcacccaggaacagttc

SEQ ID NO: 1167218 - DNA, 25 bp, Homo sapien
catcccaggctgcatacagttggcc

SEQ ID NO: 1167219 - DNA, 25 bp, Homo sapien
aagagagtcttgacaccaggcaagc

SEQ ID NO: 1167220 - DNA, 25 bp, Homo sapien
acagttggcccgtggtggcaatctc

SEQ ID NO: 1167221 - DNA, 25 bp, Homo sapien
cagtagacgttgaagcggctgtgct

SEQ ID NO: 1167222 - DNA, 25 bp, Homo sapien
ggttggaggcctcagggatggcaga

SEQ ID NO: 1167223 - DNA, 25 bp, Homo sapien
ggctgggttggaggcctcagggatg

SEQ ID NO: 1167224 - DNA, 25 bp, Homo sapien
tgggttggaggcctcagggatggca

SEQ ID NO: 1167225 - DNA, 25 bp, Homo sapien
ctagtccatcagaggctgggttgga

SEQ ID NO: 1167226 - DNA, 25 bp, Homo sapien
tagatggccccacgggattcactct

SEQ ID NO: 1167227 - DNA, 25 bp, Homo sapien
gatggagtagatggccccacgggat

SEQ ID NO: 1167228 - DNA, 25 bp, Homo sapien
cctccatgatggggatggagtagat

SEQ ID NO: 1167229 - DNA, 25 bp, Homo sapien
atggccccacgggattcactctctg

SEQ ID NO: 1167230 - DNA, 25 bp, Homo sapien
ctaggcaaagcacaaacggttcagc

SEQ ID NO: 1167231 - DNA, 25 bp, Homo sapien
tgagaaccccgtgggcggtaccatg

SEQ ID NO: 1167232 - DNA, 25 bp, Homo sapien
tgggcggtaccatggattgtgtttc

SEQ ID NO: 1167233 - DNA, 25 bp, Homo sapien
cctcttctgagaaccccgtgggcgg

SEQ ID NO: 1167234 - DNA, 25 bp, Homo sapien
ccccgtgggcggtaccatggattgt

SEQ ID NO: 1167235 - DNA, 25 bp, Homo sapien
caggaagtggtgatgcaccaggctg

SEQ ID NO: 1167236 - DNA, 25 bp, Homo sapien
ggaagcttctgactctccatcagga

SEQ ID NO: 1167237 - DNA, 25 bp, Homo sapien
gtggtccatggacccttggaggcct

SEQ ID NO: 1167238 - DNA, 25 bp, Homo sapien
tgatggggatgctaggttcctctcc

SEQ ID NO: 1167239 - DNA, 25 bp, Homo sapien
ctcgctctctcctcgagggacccca

SEQ ID NO: 1167240 - DNA, 25 bp, Homo sapien
ctcgagggaccccagatagctcagg

SEQ ID NO: 1167241 - DNA, 25 bp, Homo sapien
gggaccccagatagctcaggaccac

SEQ ID NO: 1167242 - DNA, 25 bp, Homo sapien
tctcctcgagggaccccagatagct

SEQ ID NO: 1167243 - DNA, 25 bp, Homo sapien
tgggcctgcactgaggtccctgctg

SEQ ID NO: 1167244 - DNA, 25 bp, Homo sapien
gggcagttcttccagaattatcttc

SEQ ID NO: 1167245 - DNA, 25 bp, Homo sapien
aattatcttcagagggggcctccag

SEQ ID NO: 1167246 - DNA, 25 bp, Homo sapien
tccacctcggctggcgctgtcagtg

SEQ ID NO: 1167247 - DNA, 25 bp, Homo sapien
aaaaggagtaggatagagagggcag

SEQ ID NO: 1167248 - DNA, 25 bp, Homo sapien
atagagagggcagttgagccttggg

SEQ ID NO: 1167249 - DNA, 25 bp, Homo sapien
gaaaaggagtaggatagagagggca

SEQ ID NO: 1167250 - DNA, 25 bp, Homo sapien
aagaaaaggagtaggatagagaggg

SEQ ID NO: 1167251 - DNA, 25 bp, Homo sapien
tcacagggtaaagacgcggagagct

SEQ ID NO: 1167252 - DNA, 25 bp, Homo sapien
gagtagtggaaaataggccgagccc

SEQ ID NO: 1167253 - DNA, 25 bp, Homo sapien
tcacagaagtagttgcttaaggctc

SEQ ID NO: 1167254 - DNA, 25 bp, Homo sapien
tatccgagattggagacccataggt

SEQ ID NO: 1167255 - DNA, 25 bp, Homo sapien
gatgacctagctgttttgggtgaaa

SEQ ID NO: 1167256 - DNA, 25 bp, Homo sapien
atcttccctcctgccaatagtttct

SEQ ID NO: 1167257 - DNA, 25 bp, Homo sapien
tcttcccagcttgtggtgctgccca

SEQ ID NO: 1167258 - DNA, 25 bp, Homo sapien
agaagctggagtggattcaaagaat

SEQ ID NO: 1167259 - DNA, 25 bp, Homo sapien
catccacctctagaagccatggcca

SEQ ID NO: 1167260 - DNA, 25 bp, Homo sapien
aaggtccacagtgcttcccgctggc

SEQ ID NO: 1167261 - DNA, 25 bp, Homo sapien
atccacctctagaagccatggccaa

SEQ ID NO: 1167262 - DNA, 25 bp, Homo sapien
ggccaaggtccacagtgcttcccgc

SEQ ID NO: 1167263 - DNA, 25 bp, Homo sapien
ggccctcagccatggtaaggtcaag

SEQ ID NO: 1167264 - DNA, 25 bp, Homo sapien
ttctggttcagatgacccaaaggaa

SEQ ID NO: 1167265 - DNA, 25 bp, Homo sapien
catgagaggcaaaaccactccaggg

SEQ ID NO: 1167266 - DNA, 25 bp, Homo sapien
ggaagatggctccacagaccaactg

SEQ ID NO: 1167267 - DNA, 25 bp, Homo sapien
gtcctggaagctataacagcaccct

SEQ ID NO: 1167268 - DNA, 25 bp, Homo sapien
tggtcacaacccagccctgagttct

SEQ ID NO: 1167269 - DNA, 25 bp, Homo sapien
cctcttcccgctcccgacttcagca

SEQ ID NO: 1167270 - DNA, 25 bp, Homo sapien
ttccattgttatggccaccagtgtg

SEQ ID NO: 1167271 - DNA, 25 bp, Homo sapien
gcagacataggcagcggaccccttc

SEQ ID NO: 1167272 - DNA, 25 bp, Homo sapien
caggcagacataggcagcggacccc

SEQ ID NO: 1167273 - DNA, 25 bp, Homo sapien
tagccaggcagacataggcagcgga

SEQ ID NO: 1167274 - DNA, 25 bp, Homo sapien
cccatagccaggcagacataggcag

SEQ ID NO: 1167275 - DNA, 25 bp, Homo sapien
caaaagagctagtagagaatgaggg

SEQ ID NO: 1167276 - DNA, 25 bp, Homo sapien
cttccactaccgcaggccgagaggg

SEQ ID NO: 1167277 - DNA, 25 bp, Homo sapien
tccactaccgcaggccgagaggggc

SEQ ID NO: 1167278 - DNA, 25 bp, Homo sapien
cactaccgcaggccgagaggggcgg

SEQ ID NO: 1167279 - DNA, 25 bp, Homo sapien
cttcgtgtggaaaagtgcttgtagc

SEQ ID NO: 1167280 - DNA, 25 bp, Homo sapien
cctcccagctccttcgtgtggaaaa

SEQ ID NO: 1167281 - DNA, 25 bp, Homo sapien
gcgcgccgtacatccggcactgggt

SEQ ID NO: 1167282 - DNA, 25 bp, Homo sapien
gatgctggccagatgcgcgccgtac

SEQ ID NO: 1167283 - DNA, 25 bp, Homo sapien
gaataagtgcatgggttaatgagga

SEQ ID NO: 1167284 - DNA, 25 bp, Homo sapien
gaatgcacgcttgagaaaaccaagg

SEQ ID NO: 1167285 - DNA, 25 bp, Homo sapien
tcaacaagattggagttggagttgg

SEQ ID NO: 1167286 - DNA, 25 bp, Homo sapien
acacaggcgcactctactgcgcgaa

SEQ ID NO: 1167287 - DNA, 25 bp, Homo sapien
gggacgccatccgaccacaagaagt

SEQ ID NO: 1167288 - DNA, 25 bp, Homo sapien
caagaagtcgccttcgatggtcctg

SEQ ID NO: 1167289 - DNA, 25 bp, Homo sapien
gttgagtccgatccactggtactcc

SEQ ID NO: 1167290 - DNA, 25 bp, Homo sapien
gtcgttgagtccgatccactggtac

SEQ ID NO: 1167291 - DNA, 25 bp, Homo sapien
tgtaggacaggtggtagttgcaggg

SEQ ID NO: 1167292 - DNA, 25 bp, Homo sapien
gaccacgcagttctctccagacagg

SEQ ID NO: 1167293 - DNA, 25 bp, Homo sapien
gggcacgtcactccattgtccctga

SEQ ID NO: 1167294 - DNA, 25 bp, Homo sapien
ttgtccctgatcatgccacaccatg

SEQ ID NO: 1167295 - DNA, 25 bp, Homo sapien
agctccggtggcggcccacaggaca

SEQ ID NO: 1167296 - DNA, 25 bp, Homo sapien
agtgtccacctcatagcgcagccgt

SEQ ID NO: 1167297 - DNA, 25 bp, Homo sapien
cagccgtgggcggccgaacacttga

SEQ ID NO: 1167298 - DNA, 25 bp, Homo sapien
cgtgggcggccgaacacttgagcca

SEQ ID NO: 1167299 - DNA, 25 bp, Homo sapien
ccgttctcttggcatcggatcagcg

SEQ ID NO: 1167300 - DNA, 25 bp, Homo sapien
attgcgctgggccagtccttcccgg

SEQ ID NO: 1167301 - DNA, 25 bp, Homo sapien
tggcatcggatcagcggcagattgc

SEQ ID NO: 1167302 - DNA, 25 bp, Homo sapien
atcagcggcagattgcgctgggcca

SEQ ID NO: 1167303 - DNA, 25 bp, Homo sapien
ctggggaagacacacactcaccctc

SEQ ID NO: 1167304 - DNA, 25 bp, Homo sapien
tccaccctggctcttccttctcctc

SEQ ID NO: 1167305 - DNA, 25 bp, Homo sapien
cacacactcaccctccaccctggct

SEQ ID NO: 1167306 - DNA, 25 bp, Homo sapien
acactcaccctccaccctggctctt

SEQ ID NO: 1167307 - DNA, 25 bp, Homo sapien
acagcgccttccagcgtcccagtag

SEQ ID NO: 1167308 - DNA, 25 bp, Homo sapien
gaaggggggatcaacagcgccttcc

SEQ ID NO: 1167309 - DNA, 25 bp, Homo sapien
tagcctcccctgacgtccttctggg

SEQ ID NO: 1167310 - DNA, 25 bp, Homo sapien
cagtagcctcccctgacgtccttct

SEQ ID NO: 1167311 - DNA, 25 bp, Homo sapien
gagggaaaatttgggtgacagggca

SEQ ID NO: 1167312 - DNA, 25 bp, Homo sapien
gccggcagtgttcaaggccttgccc

SEQ ID NO: 1167313 - DNA, 25 bp, Homo sapien
gaaaatttgggtgacagggcagtgc

SEQ ID NO: 1167314 - DNA, 25 bp, Homo sapien
ctgtggccggcagtgttcaaggcct

SEQ ID NO: 1167315 - DNA, 25 bp, Homo sapien
agtaccacccctcgtcatgttgtca

SEQ ID NO: 1167316 - DNA, 25 bp, Homo sapien
gccccttcaggaactgtcacctgga

SEQ ID NO: 1167317 - DNA, 25 bp, Homo sapien
tactccggccctgatggaagatctg

SEQ ID NO: 1167318 - DNA, 25 bp, Homo sapien
gaggcacttagggatttactccggc

SEQ ID NO: 1167319 - DNA, 25 bp, Homo sapien
tgggctcatacacagttttatttcc

SEQ ID NO: 1167320 - DNA, 25 bp, Homo sapien
cctgcaagcccattcccttggaaaa

SEQ ID NO: 1167321 - DNA, 25 bp, Homo sapien
aaacccagaaagagtgggcacagtg

SEQ ID NO: 1167322 - DNA, 25 bp, Homo sapien
tgattttacagacactccatcctgc

SEQ ID NO: 1167323 - DNA, 25 bp, Homo sapien
aggcctggcccgctaaggtgaaaag

SEQ ID NO: 1167324 - DNA, 25 bp, Homo sapien
ggagcagcactcttaacttacgatc

SEQ ID NO: 1167325 - DNA, 25 bp, Homo sapien
gactaggaaaagaccatctgcccgg

SEQ ID NO: 1167326 - DNA, 25 bp, Homo sapien
acatatggtttctggctgagaggcc

SEQ ID NO: 1167327 - DNA, 25 bp, Homo sapien
gtctacgtccgagagtgagtggcca

SEQ ID NO: 1167328 - DNA, 25 bp, Homo sapien
tacaccaacaaagaggaatggctgc

SEQ ID NO: 1167329 - DNA, 25 bp, Homo sapien
acggcggatgacgttgtgtgcacca

SEQ ID NO: 1167330 - DNA, 25 bp, Homo sapien
cagcccagagcagggtctctctaaa

SEQ ID NO: 1167331 - DNA, 25 bp, Homo sapien
gaccagagaactgaccaacgatggg

SEQ ID NO: 1167332 - DNA, 25 bp, Homo sapien
taaaatggtctgtgagcagaagctc

SEQ ID NO: 1167333 - DNA, 25 bp, Homo sapien
tgggagagtgagaataaaatggtct

SEQ ID NO: 1167334 - DNA, 25 bp, Homo sapien
ccccaagacctcgtggaccagagaa

SEQ ID NO: 1167335 - DNA, 25 bp, Homo sapien
ttgaggagcagactgtggatgggag

SEQ ID NO: 1167336 - DNA, 25 bp, Homo sapien
gaggagcagactgtggatgggaggc

SEQ ID NO: 1167337 - DNA, 25 bp, Homo sapien
gactgtggatgggaggccctgtaag

SEQ ID NO: 1167338 - DNA, 25 bp, Homo sapien
cagactgtggatgggaggccctgta

SEQ ID NO: 1167339 - DNA, 25 bp, Homo sapien
gaaaactaagtcaatccagactgcc

SEQ ID NO: 1167340 - DNA, 25 bp, Homo sapien
tttcgtgtgaaaccccaatcccaca

SEQ ID NO: 1167341 - DNA, 25 bp, Homo sapien
ttctgtgtgccctctgggccaactg

SEQ ID NO: 1167342 - DNA, 25 bp, Homo sapien
tagatcggctgcagcccaattgggt

SEQ ID NO: 1167343 - DNA, 25 bp, Homo sapien
ggaggggcagcaggaatctggtttc

SEQ ID NO: 1167344 - DNA, 25 bp, Homo sapien
gcagcaggaatctggtttccaccat

SEQ ID NO: 1167345 - DNA, 25 bp, Homo sapien
gggcagcaggaatctggtttccacc

SEQ ID NO: 1167346 - DNA, 25 bp, Homo sapien
aggggcagcaggaatctggtttcca

SEQ ID NO: 1167347 - DNA, 25 bp, Homo sapien
tctgaaattcacaggccttagctca

SEQ ID NO: 1167348 - DNA, 25 bp, Homo sapien
tgccctttgggaatccgggcaggct

SEQ ID NO: 1167349 - DNA, 25 bp, Homo sapien
ccctttgggaatccgggcaggctgg

SEQ ID NO: 1167350 - DNA, 25 bp, Homo sapien
gaaggacgggatgtgggtccagagg

SEQ ID NO: 1167351 - DNA, 25 bp, Homo sapien
tgagtaagcattgaaggtgcattgg

SEQ ID NO: 1167352 - DNA, 25 bp, Homo sapien
gagacaaagtagttggcatccatgt

SEQ ID NO: 1167353 - DNA, 25 bp, Homo sapien
tacatggttgggctgtgtaggctac

SEQ ID NO: 1167354 - DNA, 25 bp, Homo sapien
ggaacacctggacttacaagcttct

SEQ ID NO: 1167355 - DNA, 25 bp, Homo sapien
taagagagagctacaagacaggtaa

SEQ ID NO: 1167356 - DNA, 25 bp, Homo sapien
aaggagatcagacttcatggagaag

SEQ ID NO: 1167357 - DNA, 25 bp, Homo sapien
cttctggaggtagagaggcctaaga

SEQ ID NO: 1167358 - DNA, 25 bp, Homo sapien
tgatgctggcaaccaaaaggaagct

SEQ ID NO: 1167359 - DNA, 25 bp, Homo sapien
tggaggcctcaatcaataaagcggg

SEQ ID NO: 1167360 - DNA, 25 bp, Homo sapien
cattgaaggatttcgagcagggcag

SEQ ID NO: 1167361 - DNA, 25 bp, Homo sapien
aaaagttgacttgagccgagcatgg

SEQ ID NO: 1167362 - DNA, 25 bp, Homo sapien
ggaatcactggcctcactacctggg

SEQ ID NO: 1167363 - DNA, 25 bp, Homo sapien
ggcgcgttctaacccgcgcgcctgc

SEQ ID NO: 1167364 - DNA, 25 bp, Homo sapien
gcgccgacctctggcgcgttctaac

SEQ ID NO: 1167365 - DNA, 25 bp, Homo sapien
ggtcggggcggtgcgggtgtgcgcg

SEQ ID NO: 1167366 - DNA, 25 bp, Homo sapien
tacggaagtgaagccggaggtgtcc

SEQ ID NO: 1167367 - DNA, 25 bp, Homo sapien
tcgcgttgtaccaccacggggctag

SEQ ID NO: 1167368 - DNA, 25 bp, Homo sapien
gctgcagttccggtttatcgcggcc

SEQ ID NO: 1167369 - DNA, 25 bp, Homo sapien
ggccttcccacaccttcgcgttgta

SEQ ID NO: 1167370 - DNA, 25 bp, Homo sapien
gatccagggtcagtactacgcgggt

SEQ ID NO: 1167371 - DNA, 25 bp, Homo sapien
caggtcgcgacgtttcacagtgaga

SEQ ID NO: 1167372 - DNA, 25 bp, Homo sapien
agagttttgggtccagtctccgacg

SEQ ID NO: 1167373 - DNA, 25 bp, Homo sapien
cgagaacgcagtgaacagggatcca

SEQ ID NO: 1167374 - DNA, 25 bp, Homo sapien
catccaagatggaacggtagagtgc

SEQ ID NO: 1167375 - DNA, 25 bp, Homo sapien
tcccctcatgagagaggcctcgggc

SEQ ID NO: 1167376 - DNA, 25 bp, Homo sapien
ggcctcgggcggagatgcccggcat

SEQ ID NO: 1167377 - DNA, 25 bp, Homo sapien
cgggtgaggttaacagctagctgct

SEQ ID NO: 1167378 - DNA, 25 bp, Homo sapien
gatgaataacgtgtgttcttggaac

SEQ ID NO: 1167379 - DNA, 25 bp, Homo sapien
tcaacatagttgcagcatggttcca

SEQ ID NO: 1167380 - DNA, 25 bp, Homo sapien
tgctccaagaagagttcaacatagt

SEQ ID NO: 1167381 - DNA, 25 bp, Homo sapien
gagatcagaggctaattctccagat

SEQ ID NO: 1167382 - DNA, 25 bp, Homo sapien
tatagctgaggaaacccggactagg

SEQ ID NO: 1167383 - DNA, 25 bp, Homo sapien
tgtggtctaaacaattcagtggatg

SEQ ID NO: 1167384 - DNA, 25 bp, Homo sapien
cagtggatggtggtgccatttacac

SEQ ID NO: 1167385 - DNA, 25 bp, Homo sapien
tagggaggcctaaggttaacatcat

SEQ ID NO: 1167386 - DNA, 25 bp, Homo sapien
taagccgagtcagttctctgaagcc

SEQ ID NO: 1167387 - DNA, 25 bp, Homo sapien
tcattcgtccaccacaaattctggg

SEQ ID NO: 1167388 - DNA, 25 bp, Homo sapien
catcaagctctattgtaggctcagg

SEQ ID NO: 1167389 - DNA, 25 bp, Homo sapien
ggtggcttaactctgtttccctgga

SEQ ID NO: 1167390 - DNA, 25 bp, Homo sapien
gcaagggagtgtgtcccataggttg

SEQ ID NO: 1167391 - DNA, 25 bp, Homo sapien
ggagtgtgtcccataggttgtctgt

SEQ ID NO: 1167392 - DNA, 25 bp, Homo sapien
aagggagtgtgtcccataggttgtc

SEQ ID NO: 1167393 - DNA, 25 bp, Homo sapien
agtgtgtcccataggttgtctgtga

SEQ ID NO: 1167394 - DNA, 25 bp, Homo sapien
ccagcagcattgtggccagctgtgg

SEQ ID NO: 1167395 - DNA, 25 bp, Homo sapien
cccagcagcattgtggccagctgtg

SEQ ID NO: 1167396 - DNA, 25 bp, Homo sapien
ctgagtgcagcagtttacaacccga

SEQ ID NO: 1167397 - DNA, 25 bp, Homo sapien
gaagaccttatgagactctctgagc

SEQ ID NO: 1167398 - DNA, 25 bp, Homo sapien
gtgcagcagtttacaacccgaggcc

SEQ ID NO: 1167399 - DNA, 25 bp, Homo sapien
gactctctgagcaatatgctcactg

SEQ ID NO: 1167400 - DNA, 25 bp, Homo sapien
ctgagatagtccagccgaggcctcc

SEQ ID NO: 1167401 - DNA, 25 bp, Homo sapien
gcctccagtgaatagtcccatcaca

SEQ ID NO: 1167402 - DNA, 25 bp, Homo sapien
cgaggcctccagtgaatagtcccat

SEQ ID NO: 1167403 - DNA, 25 bp, Homo sapien
gatagtccagccgaggcctccagtg

SEQ ID NO: 1167404 - DNA, 25 bp, Homo sapien
taaaggccagggcacacgccgtgga

SEQ ID NO: 1167405 - DNA, 25 bp, Homo sapien
gaaagccaggcatccgggtaaaggc

SEQ ID NO: 1167406 - DNA, 25 bp, Homo sapien
tgggcctgacatgtttccggaatgg

SEQ ID NO: 1167407 - DNA, 25 bp, Homo sapien
acgccgtggacttcagggccagcag

SEQ ID NO: 1167408 - DNA, 25 bp, Homo sapien
tggcctgagcccacgtctacaacct

SEQ ID NO: 1167409 - DNA, 25 bp, Homo sapien
ctgagcccacgtctacaacctgggt

SEQ ID NO: 1167410 - DNA, 25 bp, Homo sapien
cgtctacaacctgggtgcagcctgt

SEQ ID NO: 1167411 - DNA, 25 bp, Homo sapien
gcccacgtctacaacctgggtgcag

SEQ ID NO: 1167412 - DNA, 25 bp, Homo sapien
gatccccttcgatgctcttcaccat

SEQ ID NO: 1167413 - DNA, 25 bp, Homo sapien
ccaagagccatgaagcgggagagat

SEQ ID NO: 1167414 - DNA, 25 bp, Homo sapien
gtctctgatccccttcgatgctctt

SEQ ID NO: 1167415 - DNA, 25 bp, Homo sapien
tctgatccccttcgatgctcttcac

SEQ ID NO: 1167416 - DNA, 25 bp, Homo sapien
ccagcctctgtgctcaattccagcc

SEQ ID NO: 1167417 - DNA, 25 bp, Homo sapien
aacttgaaagatgtaatccagcctc

SEQ ID NO: 1167418 - DNA, 25 bp, Homo sapien
acttgaaagatgtaatccagcctct

SEQ ID NO: 1167419 - DNA, 25 bp, Homo sapien
gagtgacgagggctggtttggacca

SEQ ID NO: 1167420 - DNA, 25 bp, Homo sapien
ggagtgacgagggctggtttggacc

SEQ ID NO: 1167421 - DNA, 25 bp, Homo sapien
tagccgctcagcatattcctccagg

SEQ ID NO: 1167422 - DNA, 25 bp, Homo sapien
gatgactgtctccagtgctgcacgg

SEQ ID NO: 1167423 - DNA, 25 bp, Homo sapien
cacggtagcagtgagttcgaaggcc

SEQ ID NO: 1167424 - DNA, 25 bp, Homo sapien
cccgaagccggtagggcagttcata

SEQ ID NO: 1167425 - DNA, 25 bp, Homo sapien
ggttttaagaactgtcacctctcac

SEQ ID NO: 1167426 - DNA, 25 bp, Homo sapien
tgtcacctctcacttaaactttgct

SEQ ID NO: 1167427 - DNA, 25 bp, Homo sapien
ttaaactttgcttgttcctaattca

SEQ ID NO: 1167428 - DNA, 25 bp, Homo sapien
gtcacattcagcactcagtttggtt

SEQ ID NO: 1167429 - DNA, 25 bp, Homo sapien
gggatctagccccactcgctgtagc

SEQ ID NO: 1167430 - DNA, 25 bp, Homo sapien
ggcagctggggatctagccccactc

SEQ ID NO: 1167431 - DNA, 25 bp, Homo sapien
gctggggatctagccccactcgctg

SEQ ID NO: 1167432 - DNA, 25 bp, Homo sapien
gcagctggggatctagccccactcg

SEQ ID NO: 1167433 - DNA, 25 bp, Homo sapien
agaaggccaccacacggttctcctg

SEQ ID NO: 1167434 - DNA, 25 bp, Homo sapien
aaggccaccacacggttctcctggg

SEQ ID NO: 1167435 - DNA, 25 bp, Homo sapien
gccaccacacggttctcctgggcca

SEQ ID NO: 1167436 - DNA, 25 bp, Homo sapien
aagaaggccaccacacggttctcct

SEQ ID NO: 1167437 - DNA, 25 bp, Homo sapien
cggtccagtagaataagcgtctcca

SEQ ID NO: 1167438 - DNA, 25 bp, Homo sapien
gccggtccagtagaataagcgtctc

SEQ ID NO: 1167439 - DNA, 25 bp, Homo sapien
ggtccagtagaataagcgtctccac

SEQ ID NO: 1167440 - DNA, 25 bp, Homo sapien
cagccggtccagtagaataagcgtc

SEQ ID NO: 1167441 - DNA, 25 bp, Homo sapien
gacttggagaaggagccccagaacc

SEQ ID NO: 1167442 - DNA, 25 bp, Homo sapien
gtcactatagtccttgggtccctgc

SEQ ID NO: 1167443 - DNA, 25 bp, Homo sapien
ccccagaaccccagtcactatagtc

SEQ ID NO: 1167444 - DNA, 25 bp, Homo sapien
gaaccccagtcactatagtccttgg

SEQ ID NO: 1167445 - DNA, 25 bp, Homo sapien
cattgtaggttctcgatgcctggga

SEQ ID NO: 1167446 - DNA, 25 bp, Homo sapien
cttagagaggttcaccagaggctga

SEQ ID NO: 1167447 - DNA, 25 bp, Homo sapien
tctccataaggaacacgggttccca

SEQ ID NO: 1167448 - DNA, 25 bp, Homo sapien
gcttgcttaacatgcaccttagaga

SEQ ID NO: 1167449 - DNA, 25 bp, Homo sapien
taaggggaagaatgaaccaaactca

SEQ ID NO: 1167450 - DNA, 25 bp, Homo sapien
cataaggggaagaatgaaccaaact

SEQ ID NO: 1167451 - DNA, 25 bp, Homo sapien
atcataaggggaagaatgaaccaaa

SEQ ID NO: 1167452 - DNA, 25 bp, Homo sapien
cttaatcataaggggaagaatgaac

SEQ ID NO: 1167453 - DNA, 25 bp, Homo sapien
atgggcaggagctcagcatggaaac

SEQ ID NO: 1167454 - DNA, 25 bp, Homo sapien
agttcaggactgaagatgggcagga

SEQ ID NO: 1167455 - DNA, 25 bp, Homo sapien
agagagttcaggactgaagatgggc

SEQ ID NO: 1167456 - DNA, 25 bp, Homo sapien
ctgggagagagttcaggactgaaga

SEQ ID NO: 1167457 - DNA, 25 bp, Homo sapien
gcatcttggtggccaccagaaccag

SEQ ID NO: 1167458 - DNA, 25 bp, Homo sapien
ctgacccaggggcatcttggtggcc

SEQ ID NO: 1167459 - DNA, 25 bp, Homo sapien
tcttggtggccaccagaaccaggtt

SEQ ID NO: 1167460 - DNA, 25 bp, Homo sapien
cttggtggccaccagaaccaggttt

SEQ ID NO: 1167461 - DNA, 25 bp, Homo sapien
tcagctgtcttcagtctccagaaca

SEQ ID NO: 1167462 - DNA, 25 bp, Homo sapien
cagctgtcttcagtctccagaacag

SEQ ID NO: 1167463 - DNA, 25 bp, Homo sapien
tgtcttcagtctccagaacagaaag

SEQ ID NO: 1167464 - DNA, 25 bp, Homo sapien
gctgtcttcagtctccagaacagaa

SEQ ID NO: 1167465 - DNA, 25 bp, Homo sapien
ggatgcaggatgctgtttctctgga

SEQ ID NO: 1167466 - DNA, 25 bp, Homo sapien
gtctgagatgtttcctcaggctgca

SEQ ID NO: 1167467 - DNA, 25 bp, Homo sapien
gatgagatgtactctgccactgtgc

SEQ ID NO: 1167468 - DNA, 25 bp, Homo sapien
tattacataatccatggaaggagag

SEQ ID NO: 1167469 - DNA, 25 bp, Homo sapien
gaaagaacctatgtgccctgtctaa

SEQ ID NO: 1167470 - DNA, 25 bp, Homo sapien
caagaaggtctattggtattgagcc

SEQ ID NO: 1167471 - DNA, 25 bp, Homo sapien
gatggccccaaagacacatcagtgg

SEQ ID NO: 1167472 - DNA, 25 bp, Homo sapien
ttatgagtcctcctgtgtacagctg

SEQ ID NO: 1167473 - DNA, 25 bp, Homo sapien
cattaatgaaagttggcaagccctc

SEQ ID NO: 1167474 - DNA, 25 bp, Homo sapien
tcgtccctgaaacgtggattggtga

SEQ ID NO: 1167475 - DNA, 25 bp, Homo sapien
ccaggaaacccactgagatcgagtg

SEQ ID NO: 1167476 - DNA, 25 bp, Homo sapien
tccacacgatcagggagaattatcc

SEQ ID NO: 1167477 - DNA, 25 bp, Homo sapien
tggccatggcctgcaaactgggaac

SEQ ID NO: 1167478 - DNA, 25 bp, Homo sapien
caaataggatgcttgggaagactcc

SEQ ID NO: 1167479 - DNA, 25 bp, Homo sapien
tagccaccaatgtttcaagaggagc

SEQ ID NO: 1167480 - DNA, 25 bp, Homo sapien
tccctggaatgagttgaggccactg

SEQ ID NO: 1167481 - DNA, 25 bp, Homo sapien
tgaagaggaagaggctaccaaggaa

SEQ ID NO: 1167482 - DNA, 25 bp, Homo sapien
gatgaagaggaagaggctaccaagg

SEQ ID NO: 1167483 - DNA, 25 bp, Homo sapien
agaggaagaggctaccaaggaagat

SEQ ID NO: 1167484 - DNA, 25 bp, Homo sapien
aggatgaagaggaagaggctaccaa

SEQ ID NO: 1167485 - DNA, 25 bp, Homo sapien
ggaaattatccgtcagaacccatca

SEQ ID NO: 1167486 - DNA, 25 bp, Homo sapien
aattatccgtcagaacccatcagcc

SEQ ID NO: 1167487 - DNA, 25 bp, Homo sapien
gaaattatccgtcagaacccatcag

SEQ ID NO: 1167488 - DNA, 25 bp, Homo sapien
ttggaaattatccgtcagaacccat

SEQ ID NO: 1167489 - DNA, 25 bp, Homo sapien
ttagaaatgcacacactccgaacct

SEQ ID NO: 1167490 - DNA, 25 bp, Homo sapien
tgttgttttagacccttactactga

SEQ ID NO: 1167491 - DNA, 25 bp, Homo sapien
acagcaccttggagcgcattagaaa

SEQ ID NO: 1167492 - DNA, 25 bp, Homo sapien
tccgaacctcctgaattagaatcta

SEQ ID NO: 1167493 - DNA, 25 bp, Homo sapien
acaggcgtgatccctgcctgtattt

SEQ ID NO: 1167494 - DNA, 25 bp, Homo sapien
caggcgtgatccctgcctgtatttt

SEQ ID NO: 1167495 - DNA, 25 bp, Homo sapien
cctggcctcttgatataatcttatt

SEQ ID NO: 1167496 - DNA, 25 bp, Homo sapien
tacaggcgtgatccctgcctgtatt

SEQ ID NO: 1167497 - DNA, 25 bp, Homo sapien
caggaactacaacttccagagaaca

SEQ ID NO: 1167498 - DNA, 25 bp, Homo sapien
tacacacagctaatggccgccgagt

SEQ ID NO: 1167499 - DNA, 25 bp, Homo sapien
tcttcacttaagctcctagtcccgg

SEQ ID NO: 1167500 - DNA, 25 bp, Homo sapien
ccttgcctcaccaatacaggaacta

SEQ ID NO: 1167501 - DNA, 25 bp, Homo sapien
tactctagggctagccccggcagaa

SEQ ID NO: 1167502 - DNA, 25 bp, Homo sapien
ggctgatttccaccgaacaaggcgt

SEQ ID NO: 1167503 - DNA, 25 bp, Homo sapien
gcagaaactcatggctacggctgat

SEQ ID NO: 1167504 - DNA, 25 bp, Homo sapien
gcagatgaggcctacttgagaccgg

SEQ ID NO: 1167505 - DNA, 25 bp, Homo sapien
ggctcagcctcatccggctcgctct

SEQ ID NO: 1167506 - DNA, 25 bp, Homo sapien
agcctcatccggctcgctctcatcg

SEQ ID NO: 1167507 - DNA, 25 bp, Homo sapien
cgctctcatcgctgctggcgtaagc

SEQ ID NO: 1167508 - DNA, 25 bp, Homo sapien
tgctggcgtaagcaaccagcgacat

SEQ ID NO: 1167509 - DNA, 25 bp, Homo sapien
aagccccctaaagcgggcccagatg

SEQ ID NO: 1167510 - DNA, 25 bp, Homo sapien
ccccctaaagcgggcccagatgtag

SEQ ID NO: 1167511 - DNA, 25 bp, Homo sapien
ccctaaagcgggcccagatgtagga

SEQ ID NO: 1167512 - DNA, 25 bp, Homo sapien
ctaaagcgggcccagatgtaggagc

SEQ ID NO: 1167513 - DNA, 25 bp, Homo sapien
ccttgggcgcagggagagaagcgaa

SEQ ID NO: 1167514 - DNA, 25 bp, Homo sapien
cttgggcgcagggagagaagcgaac

SEQ ID NO: 1167515 - DNA, 25 bp, Homo sapien
aaaggctggcgccagcatctgaggg

SEQ ID NO: 1167516 - DNA, 25 bp, Homo sapien
caacagcggcgggggaaaggctggc

SEQ ID NO: 1167517 - DNA, 25 bp, Homo sapien
tgggggaagcaacagcggcggggga

SEQ ID NO: 1167518 - DNA, 25 bp, Homo sapien
gccagcatctgagggggcggaggca

SEQ ID NO: 1167519 - DNA, 25 bp, Homo sapien
aattggagggggcagattgaggcca

SEQ ID NO: 1167520 - DNA, 25 bp, Homo sapien
cggcgccgcgatcttcacgggctct

SEQ ID NO: 1167521 - DNA, 25 bp, Homo sapien
atctcccttatgcaactccggcgcc

SEQ ID NO: 1167522 - DNA, 25 bp, Homo sapien
aagcctcccaggccgaagggcaagg

SEQ ID NO: 1167523 - DNA, 25 bp, Homo sapien
cgatggacagtttgggggtgccttc

SEQ ID NO: 1167524 - DNA, 25 bp, Homo sapien
tgggggtgccttccccggatactca

SEQ ID NO: 1167525 - DNA, 25 bp, Homo sapien
gatggacagtttgggggtgccttcc

SEQ ID NO: 1167526 - DNA, 25 bp, Homo sapien
cccgatggacagtttgggggtgcct

SEQ ID NO: 1167527 - DNA, 25 bp, Homo sapien
tcagaagcactggtttgagtctcag

SEQ ID NO: 1167528 - DNA, 25 bp, Homo sapien
caagtgcttcctatgtatcaggcaa

SEQ ID NO: 1167529 - DNA, 25 bp, Homo sapien
ggaaaggacaaccatccaccaagtg

SEQ ID NO: 1167530 - DNA, 25 bp, Homo sapien
tttgcgggaacaccaaactgagctg

SEQ ID NO: 1167531 - DNA, 25 bp, Homo sapien
ctgaaggatagttttcttctttgtg

SEQ ID NO: 1167532 - DNA, 25 bp, Homo sapien
tcttctttgtgggttcatcttcctc

SEQ ID NO: 1167533 - DNA, 25 bp, Homo sapien
tctttgtgggttcatcttcctcaga

SEQ ID NO: 1167534 - DNA, 25 bp, Homo sapien
tttcttctttgtgggttcatcttcc

SEQ ID NO: 1167535 - DNA, 25 bp, Homo sapien
gggtaagggtatggctcaactccag

SEQ ID NO: 1167536 - DNA, 25 bp, Homo sapien
gtccccaggcttaggcatccaaggg

SEQ ID NO: 1167537 - DNA, 25 bp, Homo sapien
gattgtagctgtagtcgtccccagg

SEQ ID NO: 1167538 - DNA, 25 bp, Homo sapien
ggcattggctgcatcgtcctggaaa

SEQ ID NO: 1167539 - DNA, 25 bp, Homo sapien
ccttagaggcgagtggcccagatgt

SEQ ID NO: 1167540 - DNA, 25 bp, Homo sapien
cgtttaccagattttgagttcagga

SEQ ID NO: 1167541 - DNA, 25 bp, Homo sapien
gaacaaagcaggttcgtttaccaga

SEQ ID NO: 1167542 - DNA, 25 bp, Homo sapien
gaatctcatgattccccttagaggc

SEQ ID NO: 1167543 - DNA, 25 bp, Homo sapien
ggaccgacctacaactcaagaacag

SEQ ID NO: 1167544 - DNA, 25 bp, Homo sapien
ttaaaggcatagatcccaaggaccg

SEQ ID NO: 1167545 - DNA, 25 bp, Homo sapien
gaaggtatacgtcatgccattcctg

SEQ ID NO: 1167546 - DNA, 25 bp, Homo sapien
taagaccccaatgagctacgatgcg

SEQ ID NO: 1167547 - DNA, 25 bp, Homo sapien
gatagtagccaccactgtaataatc

SEQ ID NO: 1167548 - DNA, 25 bp, Homo sapien
ccagggccgggtcctgtgcaggata

SEQ ID NO: 1167549 - DNA, 25 bp, Homo sapien
tcctgtgcaggatagtagccaccac

SEQ ID NO: 1167550 - DNA, 25 bp, Homo sapien
tgtgcaggatagtagccaccactgt

SEQ ID NO: 1167551 - DNA, 25 bp, Homo sapien
cgtcatcgatgaaggaggcatctgg

SEQ ID NO: 1167552 - DNA, 25 bp, Homo sapien
tgcttcgtcatcgatgaaggaggca

SEQ ID NO: 1167553 - DNA, 25 bp, Homo sapien
cttcgtcatcgatgaaggaggcatc

SEQ ID NO: 1167554 - DNA, 25 bp, Homo sapien
tcgtcatcgatgaaggaggcatctg

SEQ ID NO: 1167555 - DNA, 25 bp, Homo sapien
atttcttctctccctcggttcctct

SEQ ID NO: 1167556 - DNA, 25 bp, Homo sapien
ttgatttcttctctccctcggttcc

SEQ ID NO: 1167557 - DNA, 25 bp, Homo sapien
tggtcatcacctttgatctccacaa

SEQ ID NO: 1167558 - DNA, 25 bp, Homo sapien
tgatttcttctctccctcggttcct

SEQ ID NO: 1167559 - DNA, 25 bp, Homo sapien
tcgacccacagttggtagagcatgc

SEQ ID NO: 1167560 - DNA, 25 bp, Homo sapien
tccccattctagtaagtgccagcag

SEQ ID NO: 1167561 - DNA, 25 bp, Homo sapien
ggcccacggtgagcattaacaacag

SEQ ID NO: 1167562 - DNA, 25 bp, Homo sapien
ccatctgtggccatagaacaaagca

SEQ ID NO: 1167563 - DNA, 25 bp, Homo sapien
gtgatctggtgtttccgccgctgct

SEQ ID NO: 1167564 - DNA, 25 bp, Homo sapien
aatgtgctctctcagttctcgtgtt

SEQ ID NO: 1167565 - DNA, 25 bp, Homo sapien
tccacgggagctgcttgtctctcta

SEQ ID NO: 1167566 - DNA, 25 bp, Homo sapien
tacctgcttaaaacaccacgtaatg

SEQ ID NO: 1167567 - DNA, 25 bp, Homo sapien
tctagtatgttgcatatcacagtaa

SEQ ID NO: 1167568 - DNA, 25 bp, Homo sapien
gcttgggtctgacggcggctgagct

SEQ ID NO: 1167569 - DNA, 25 bp, Homo sapien
tttggcttgggtctgacggcggctg

SEQ ID NO: 1167570 - DNA, 25 bp, Homo sapien
gtctgacggcggctgagcttgttct

SEQ ID NO: 1167571 - DNA, 25 bp, Homo sapien
ctgacggcggctgagcttgttctct

SEQ ID NO: 1167572 - DNA, 25 bp, Homo sapien
ggaaagagatcctgggcttagagca

SEQ ID NO: 1167573 - DNA, 25 bp, Homo sapien
gagatcctgggagcaatcagttcca

SEQ ID NO: 1167574 - DNA, 25 bp, Homo sapien
tcgcagaggcgagggctgggtcctt

SEQ ID NO: 1167575 - DNA, 25 bp, Homo sapien
gttcattctcgcagaggcgagggct

SEQ ID NO: 1167576 - DNA, 25 bp, Homo sapien
tggggagggttcaacattttatcac

SEQ ID NO: 1167577 - DNA, 25 bp, Homo sapien
cattttatcacacctgacagagagc

SEQ ID NO: 1167578 - DNA, 25 bp, Homo sapien
aactcagagccccttcggaggcatc

SEQ ID NO: 1167579 - DNA, 25 bp, Homo sapien
cacaagtctttgctagctccaggac

SEQ ID NO: 1167580 - DNA, 25 bp, Homo sapien
tggatctggacaactacagcctgag

SEQ ID NO: 1167581 - DNA, 25 bp, Homo sapien
tggctccagcccgaagtaggtcaga

SEQ ID NO: 1167582 - DNA, 25 bp, Homo sapien
tgaatcccaggagtgtggcgactcg

SEQ ID NO: 1167583 - DNA, 25 bp, Homo sapien
actgcctctgtgaatactgggagca

SEQ ID NO: 1167584 - DNA, 25 bp, Homo sapien
gacaaccgtatcatctctgtgaggg

SEQ ID NO: 1167585 - DNA, 25 bp, Homo sapien
ccagcagcgttgcagaggcactgaa

SEQ ID NO: 1167586 - DNA, 25 bp, Homo sapien
catacattggagcttcttggacagt

SEQ ID NO: 1167587 - DNA, 25 bp, Homo sapien
cacgcagcccagagtattccaacat

SEQ ID NO: 1167588 - DNA, 25 bp, Homo sapien
atgaccagggtgcagtgcattgagt

SEQ ID NO: 1167589 - DNA, 25 bp, Homo sapien
tttgcccagtgcattccacattccc

SEQ ID NO: 1167590 - DNA, 25 bp, Homo sapien
cttcatgcgccgagttgcccactca

SEQ ID NO: 1167591 - DNA, 25 bp, Homo sapien
ctcaggctgagtccgcagatgacca

SEQ ID NO: 1167592 - DNA, 25 bp, Homo sapien
tttccttagtgatgggctcttgctc

SEQ ID NO: 1167593 - DNA, 25 bp, Homo sapien
ctcatcatcctcgtccacgcgggtg

SEQ ID NO: 1167594 - DNA, 25 bp, Homo sapien
ctgaagggtaaaccacagctccttc

SEQ ID NO: 1167595 - DNA, 25 bp, Homo sapien
tcatcatcctcgtccacgcgggtgc

SEQ ID NO: 1167596 - DNA, 25 bp, Homo sapien
ctgccaacaagtttgtgcaccgaga

SEQ ID NO: 1167597 - DNA, 25 bp, Homo sapien
ttgtgcaccgagatctagcagcccg

SEQ ID NO: 1167598 - DNA, 25 bp, Homo sapien
tctagcagcccgcaactgcatggtg

SEQ ID NO: 1167599 - DNA, 25 bp, Homo sapien
tgtcccaggacttcaccgtcaagat

SEQ ID NO: 1167600 - DNA, 25 bp, Homo sapien
ggtccagatgcttgtggaacccaga

SEQ ID NO: 1167601 - DNA, 25 bp, Homo sapien
ccttgccaaggtctaacaggtggct

SEQ ID NO: 1167602 - DNA, 25 bp, Homo sapien
tattccctgctaaggatgaggagct

SEQ ID NO: 1167603 - DNA, 25 bp, Homo sapien
attccagaacgccacagagcacgtg

SEQ ID NO: 1167604 - DNA, 25 bp, Homo sapien
tgggcggtgttaaagacccagccgc

SEQ ID NO: 1167605 - DNA, 25 bp, Homo sapien
tgcgctgggcggtgttaaagaccca

SEQ ID NO: 1167606 - DNA, 25 bp, Homo sapien
ggggcagccgtctgtgcgctcccag

SEQ ID NO: 1167607 - DNA, 25 bp, Homo sapien
tcccccgacatgtgcgctgggcggt

SEQ ID NO: 1167608 - DNA, 25 bp, Homo sapien
gccccatcccgggtgcatcgcagtc

SEQ ID NO: 1167609 - DNA, 25 bp, Homo sapien
atcccgggtgcatcgcagtcccgag

SEQ ID NO: 1167610 - DNA, 25 bp, Homo sapien
caggtggtggaggctatccagggcc

SEQ ID NO: 1167611 - DNA, 25 bp, Homo sapien
atgccagtatcagccaagccagcag

SEQ ID NO: 1167612 - DNA, 25 bp, Homo sapien
cccaggcccctcagatcacggagct

SEQ ID NO: 1167613 - DNA, 25 bp, Homo sapien
cccctcagatcacggagctccagat

SEQ ID NO: 1167614 - DNA, 25 bp, Homo sapien
tgcagatgctgctggttctcgatgt

SEQ ID NO: 1167615 - DNA, 25 bp, Homo sapien
cagatgctgctggttctcgatgtag

SEQ ID NO: 1167616 - DNA, 25 bp, Homo sapien
agtgaaatggaaggcatctggcgcc

SEQ ID NO: 1167617 - DNA, 25 bp, Homo sapien
aaacggagaccactcttcacgatgg

SEQ ID NO: 1167618 - DNA, 25 bp, Homo sapien
cgactgagccgaggagtgaaatgga

SEQ ID NO: 1167619 - DNA, 25 bp, Homo sapien
atctggcgccacgaaacggagacca

SEQ ID NO: 1167620 - DNA, 25 bp, Homo sapien
gagagactccagagcgttgaaggag

SEQ ID NO: 1167621 - DNA, 25 bp, Homo sapien
actccagagcgttgaaggagagatt

SEQ ID NO: 1167622 - DNA, 25 bp, Homo sapien
gactccagagcgttgaaggagagat

SEQ ID NO: 1167623 - DNA, 25 bp, Homo sapien
ggagagagactccagagcgttgaag

SEQ ID NO: 1167624 - DNA, 25 bp, Homo sapien
ctccccaggatgagaaaccaggcaa

SEQ ID NO: 1167625 - DNA, 25 bp, Homo sapien
ccaggctccccaggatgagaaacca

SEQ ID NO: 1167626 - DNA, 25 bp, Homo sapien
aggctccccaggatgagaaaccagg

SEQ ID NO: 1167627 - DNA, 25 bp, Homo sapien
gaaaccaggcaagggctctcagcat

SEQ ID NO: 1167628 - DNA, 25 bp, Homo sapien
ccagcgcagggcacaagaacagtgc

SEQ ID NO: 1167629 - DNA, 25 bp, Homo sapien
cagcgcagggcacaagaacagtgca

SEQ ID NO: 1167630 - DNA, 25 bp, Homo sapien
agccagcgcagggcacaagaacagt

SEQ ID NO: 1167631 - DNA, 25 bp, Homo sapien
gtagccagcgcagggcacaagaaca

SEQ ID NO: 1167632 - DNA, 25 bp, Homo sapien
ggggcccttgcccatgacactgcag

SEQ ID NO: 1167633 - DNA, 25 bp, Homo sapien
cattgggcatgtgggccaggggccc

SEQ ID NO: 1167634 - DNA, 25 bp, Homo sapien
aggggcccttgcccatgacactgca

SEQ ID NO: 1167635 - DNA, 25 bp, Homo sapien
ctggcattgggcatgtgggccaggg

SEQ ID NO: 1167636 - DNA, 25 bp, Homo sapien
aggcattgggcacctggaccttcag

SEQ ID NO: 1167637 - DNA, 25 bp, Homo sapien
atcaccgtggctgactgctccagct

SEQ ID NO: 1167638 - DNA, 25 bp, Homo sapien
tccagctctgtgaggatccagccgg

SEQ ID NO: 1167639 - DNA, 25 bp, Homo sapien
tcccccacatccaccgaggcattgg

SEQ ID NO: 1167640 - DNA, 25 bp, Homo sapien
ccagggatggcagacccccagattt

SEQ ID NO: 1167641 - DNA, 25 bp, Homo sapien
cacgttcttcctgttgaggtcactg

SEQ ID NO: 1167642 - DNA, 25 bp, Homo sapien
gctggtctcattgagcacggagcca

SEQ ID NO: 1167643 - DNA, 25 bp, Homo sapien
cagcgtgtagttgccgttgttgacg

SEQ ID NO: 1167644 - DNA, 25 bp, Homo sapien
cgaaagggttgtccatgaaggcagc

SEQ ID NO: 1167645 - DNA, 25 bp, Homo sapien
agtggtgcatctccaccgccgtgtg

SEQ ID NO: 1167646 - DNA, 25 bp, Homo sapien
ttctccaccgggtctccagatgtgc

SEQ ID NO: 1167647 - DNA, 25 bp, Homo sapien
cttctccaccgggtctccagatgtg

SEQ ID NO: 1167648 - DNA, 25 bp, Homo sapien
tcttctccaccgggtctccagatgt

SEQ ID NO: 1167649 - DNA, 25 bp, Homo sapien
cacatttgttgagcacaaggagcag

SEQ ID NO: 1167650 - DNA, 25 bp, Homo sapien
catttgttgagcacaaggagcagcg

SEQ ID NO: 1167651 - DNA, 25 bp, Homo sapien
gcacaaggagcagcgtagaaaggaa

SEQ ID NO: 1167652 - DNA, 25 bp, Homo sapien
tgttgagcacaaggagcagcgtaga

SEQ ID NO: 1167653 - DNA, 25 bp, Homo sapien
aacttgcaggggagagactgagaag

SEQ ID NO: 1167654 - DNA, 25 bp, Homo sapien
taacttgcaggggagagactgagaa

SEQ ID NO: 1167655 - DNA, 25 bp, Homo sapien
tgtaacttgcaggggagagactgag

SEQ ID NO: 1167656 - DNA, 25 bp, Homo sapien
cttgtaacttgcaggggagagactg

SEQ ID NO: 1167657 - DNA, 25 bp, Homo sapien
atgtcatgaaatgcagggacatggc

SEQ ID NO: 1167658 - DNA, 25 bp, Homo sapien
gttctcgatgatgtggccttggagc

SEQ ID NO: 1167659 - DNA, 25 bp, Homo sapien
ctgaagtattgtgggttctcgatga

SEQ ID NO: 1167660 - DNA, 25 bp, Homo sapien
gtcatgaaatgcagggacatggcca

SEQ ID NO: 1167661 - DNA, 25 bp, Homo sapien
ttgcagggtcagacggtagccccag

SEQ ID NO: 1167662 - DNA, 25 bp, Homo sapien
cttgcagggtcagacggtagcccca

SEQ ID NO: 1167663 - DNA, 25 bp, Homo sapien
tgcagggtcagacggtagccccagt

SEQ ID NO: 1167664 - DNA, 25 bp, Homo sapien
acttgagcacgatgtcccggcgctt

SEQ ID NO: 1167665 - DNA, 25 bp, Homo sapien
gcaaggaagaccttcccaaaggcgc

SEQ ID NO: 1167666 - DNA, 25 bp, Homo sapien
tcccggcgcttgatgtggtgaacac

SEQ ID NO: 1167667 - DNA, 25 bp, Homo sapien
ccagctcccacttgagcacgatgtc

SEQ ID NO: 1167668 - DNA, 25 bp, Homo sapien
gaagtcctgccgagcactctcggac

SEQ ID NO: 1167669 - DNA, 25 bp, Homo sapien
ccgaagaagcgcacgatgtgctggt

SEQ ID NO: 1167670 - DNA, 25 bp, Homo sapien
cgtgccgcatatactcaaagaccat

SEQ ID NO: 1167671 - DNA, 25 bp, Homo sapien
aagcggttgaggtccccgtgccgca

SEQ ID NO: 1167672 - DNA, 25 bp, Homo sapien
tagacagttgcgtgtggccaggtcc

SEQ ID NO: 1167673 - DNA, 25 bp, Homo sapien
tagtcggtgctgtagatatccctgc

SEQ ID NO: 1167674 - DNA, 25 bp, Homo sapien
caggtcccggtgcacaaaatgcaga

SEQ ID NO: 1167675 - DNA, 25 bp, Homo sapien
caaaatcaccaatcttgaccaccag

SEQ ID NO: 1167676 - DNA, 25 bp, Homo sapien
cacgggcggacactgcatcaattcc

SEQ ID NO: 1167677 - DNA, 25 bp, Homo sapien
gcgcctgggacagcccgtcaaggca

SEQ ID NO: 1167678 - DNA, 25 bp, Homo sapien
ctgccacgggcggacactgcatcaa

SEQ ID NO: 1167679 - DNA, 25 bp, Homo sapien
ggacagcccgtcaaggcacagccta

SEQ ID NO: 1167680 - DNA, 25 bp, Homo sapien
cgtgttggagagctggtaccagggc

SEQ ID NO: 1167681 - DNA, 25 bp, Homo sapien
tccacacgtcgctctcggtggtgaa

SEQ ID NO: 1167682 - DNA, 25 bp, Homo sapien
tacaggatgctctcgggcggcatcc

SEQ ID NO: 1167683 - DNA, 25 bp, Homo sapien
gaacttacggtacaggatgctctcg

SEQ ID NO: 1167684 - DNA, 25 bp, Homo sapien
tctgggctccttgtacaaagcactt

SEQ ID NO: 1167685 - DNA, 25 bp, Homo sapien
tgggttcctcttcccgtgctggtcc

SEQ ID NO: 1167686 - DNA, 25 bp, Homo sapien
gcctgggcttaggacagtaggtgaa

SEQ ID NO: 1167687 - DNA, 25 bp, Homo sapien
gataattcctgcttaggtctataaa

SEQ ID NO: 1167688 - DNA, 25 bp, Homo sapien
caactcacgtccctgcgtgatgcag

SEQ ID NO: 1167689 - DNA, 25 bp, Homo sapien
catccttgatgctgtggcgttgctg

SEQ ID NO: 1167690 - DNA, 25 bp, Homo sapien
cgcatgatggcgtagacctctggtg

SEQ ID NO: 1167691 - DNA, 25 bp, Homo sapien
agccgggcgtgcacatccttgatgc

SEQ ID NO: 1167692 - DNA, 25 bp, Homo sapien
agggcaggccccagtattccggcta

SEQ ID NO: 1167693 - DNA, 25 bp, Homo sapien
tgacgggaccttgcctagagaagca

SEQ ID NO: 1167694 - DNA, 25 bp, Homo sapien
gaattagatactttgagatcaccct

SEQ ID NO: 1167695 - DNA, 25 bp, Homo sapien
tcccacatgctgagggtgaattaga

SEQ ID NO: 1167696 - DNA, 25 bp, Homo sapien
gctcccgctcccagatcaatgaaag

SEQ ID NO: 1167697 - DNA, 25 bp, Homo sapien
agacaaagcccaggtccagatcacc

SEQ ID NO: 1167698 - DNA, 25 bp, Homo sapien
ccgctcccagatcaatgaaagatat

SEQ ID NO: 1167699 - DNA, 25 bp, Homo sapien
atcacctgaagggattggagtgcca

SEQ ID NO: 1167700 - DNA, 25 bp, Homo sapien
gggccttctggatcagcgcagggac

SEQ ID NO: 1167701 - DNA, 25 bp, Homo sapien
ctacatcagggccttctggatcagc

SEQ ID NO: 1167702 - DNA, 25 bp, Homo sapien
catcagggccttctggatcagcgca

SEQ ID NO: 1167703 - DNA, 25 bp, Homo sapien
cagggccttctggatcagcgcaggg

SEQ ID NO: 1167704 - DNA, 25 bp, Homo sapien
ctgccttggggccccgtctcccctg

SEQ ID NO: 1167705 - DNA, 25 bp, Homo sapien
tgccttggggccccgtctcccctgc

SEQ ID NO: 1167706 - DNA, 25 bp, Homo sapien
gaggaggcatcagctggtcagccca

SEQ ID NO: 1167707 - DNA, 25 bp, Homo sapien
tagggccagagtgcggaggaggcat

SEQ ID NO: 1167708 - DNA, 25 bp, Homo sapien
gctgggaggttagctggctggaagg

SEQ ID NO: 1167709 - DNA, 25 bp, Homo sapien
agggtagggccagagtgcggaggag

SEQ ID NO: 1167710 - DNA, 25 bp, Homo sapien
cgcagagtgggcagtggcgctgcag

SEQ ID NO: 1167711 - DNA, 25 bp, Homo sapien
ctgcagcaagaccggcgcagagtgg

SEQ ID NO: 1167712 - DNA, 25 bp, Homo sapien
agagtgggcagtggcgctgcagcca

SEQ ID NO: 1167713 - DNA, 25 bp, Homo sapien
gcaagaccggcgcagagtgggcagt

SEQ ID NO: 1167714 - DNA, 25 bp, Homo sapien
agagttccagccagccgcaggccca

SEQ ID NO: 1167715 - DNA, 25 bp, Homo sapien
tgagagttccagccagccgcaggcc

SEQ ID NO: 1167716 - DNA, 25 bp, Homo sapien
gacacagaggcggtgacattgcaga

SEQ ID NO: 1167717 - DNA, 25 bp, Homo sapien
aagctgcaggtattgggatcactgg

SEQ ID NO: 1167718 - DNA, 25 bp, Homo sapien
tcccagggccgctcgcagggctctg

SEQ ID NO: 1167719 - DNA, 25 bp, Homo sapien
agggccgctcgcagggctctgaggg

SEQ ID NO: 1167720 - DNA, 25 bp, Homo sapien
cgggagtgggactccttggtggtgg

SEQ ID NO: 1167721 - DNA, 25 bp, Homo sapien
gagcaggctgaaggggcgggagtgg

SEQ ID NO: 1167722 - DNA, 25 bp, Homo sapien
tgacggtacacggtccggtatacaa

SEQ ID NO: 1167723 - DNA, 25 bp, Homo sapien
ttcaccacctgacggtacacggtcc

SEQ ID NO: 1167724 - DNA, 25 bp, Homo sapien
gcggtggtccgtcttcaccacctga

SEQ ID NO: 1167725 - DNA, 25 bp, Homo sapien
caggcgctggcggtggtccgtcttc

SEQ ID NO: 1167726 - DNA, 25 bp, Homo sapien
cattggcactgattgggtgccacac

SEQ ID NO: 1167727 - DNA, 25 bp, Homo sapien
ttgggtgccacacaacggccatgga

SEQ ID NO: 1167728 - DNA, 25 bp, Homo sapien
actggaacagtcgtcgccccgccag

SEQ ID NO: 1167729 - DNA, 25 bp, Homo sapien
cagcctggcacacattggcactgat

SEQ ID NO: 1167730 - DNA, 25 bp, Homo sapien
cccactcttgggatcacacgagctg

SEQ ID NO: 1167731 - DNA, 25 bp, Homo sapien
tcttgggatcacacgagctgttgtt

SEQ ID NO: 1167732 - DNA, 25 bp, Homo sapien
gatcacacgagctgttgttgccgca

SEQ ID NO: 1167733 - DNA, 25 bp, Homo sapien
cacacgagctgttgttgccgcagct

SEQ ID NO: 1167734 - DNA, 25 bp, Homo sapien
tgcagaccagaagggcaagaacata

SEQ ID NO: 1167735 - DNA, 25 bp, Homo sapien
ctgcagaccagaagggcaagaacat

SEQ ID NO: 1167736 - DNA, 25 bp, Homo sapien
gcagaccagaagggcaagaacatac

SEQ ID NO: 1167737 - DNA, 25 bp, Homo sapien
gcccagttctctctgcggggcagaa

SEQ ID NO: 1167738 - DNA, 25 bp, Homo sapien
gggcccagttctctctgcggggcag

SEQ ID NO: 1167739 - DNA, 25 bp, Homo sapien
ctgggcccagttctctctgcggggc

SEQ ID NO: 1167740 - DNA, 25 bp, Homo sapien
ccagttctctctgcggggcagaagc

SEQ ID NO: 1167741 - DNA, 25 bp, Homo sapien
cctcatttccccacatagatctgtg

SEQ ID NO: 1167742 - DNA, 25 bp, Homo sapien
atagatctgtgtggccttgtgtctg

SEQ ID NO: 1167743 - DNA, 25 bp, Homo sapien
cccacatagatctgtgtggccttgt

SEQ ID NO: 1167744 - DNA, 25 bp, Homo sapien
catttccccacatagatctgtgtgg

SEQ ID NO: 1167745 - DNA, 25 bp, Homo sapien
tttgctcaaggtcactccactcgtg

SEQ ID NO: 1167746 - DNA, 25 bp, Homo sapien
tccactcgtgaggaataggatccac

SEQ ID NO: 1167747 - DNA, 25 bp, Homo sapien
gaccaggatcttggcctccacatca

SEQ ID NO: 1167748 - DNA, 25 bp, Homo sapien
gaaacaagcccacaacgagtcaatg

SEQ ID NO: 1167749 - DNA, 25 bp, Homo sapien
ctggggcagaagaagccagaagtgc

SEQ ID NO: 1167750 - DNA, 25 bp, Homo sapien
tggggcagaagaagccagaagtgcc

SEQ ID NO: 1167751 - DNA, 25 bp, Homo sapien
gtttggaagacacctccattttggc

SEQ ID NO: 1167752 - DNA, 25 bp, Homo sapien
acacctccattttggcaagaatggg

SEQ ID NO: 1167753 - DNA, 25 bp, Homo sapien
tgtggggtttggaagacacctccat

SEQ ID NO: 1167754 - DNA, 25 bp, Homo sapien
gagccctgtggggtttggaagacac

SEQ ID NO: 1167755 - DNA, 25 bp, Homo sapien
gccctgcttagcaccacccacagaa

SEQ ID NO: 1167756 - DNA, 25 bp, Homo sapien
cttggagccctgcttagcaccaccc

SEQ ID NO: 1167757 - DNA, 25 bp, Homo sapien
ggagccctgcttagcaccacccaca

SEQ ID NO: 1167758 - DNA, 25 bp, Homo sapien
acccacagaattctccccagaccca

SEQ ID NO: 1167759 - DNA, 25 bp, Homo sapien
ataaccacagagctcacccccctca

SEQ ID NO: 1167760 - DNA, 25 bp, Homo sapien
cacaggaccccttgacacccccata

SEQ ID NO: 1167761 - DNA, 25 bp, Homo sapien
tgtggggataagaggtcaacagggc

SEQ ID NO: 1167762 - DNA, 25 bp, Homo sapien
gggataagaggtcaacagggcccca

SEQ ID NO: 1167763 - DNA, 25 bp, Homo sapien
aggccgccgttgtggcagcgacatt

SEQ ID NO: 1167764 - DNA, 25 bp, Homo sapien
tgggtccgtgaaagccctctgggca

SEQ ID NO: 1167765 - DNA, 25 bp, Homo sapien
atccccagtgtaacccggagcgcag

SEQ ID NO: 1167766 - DNA, 25 bp, Homo sapien
ccagtgaatcggtcacagaggccgc

SEQ ID NO: 1167767 - DNA, 25 bp, Homo sapien
ctggcggcgccccacctcctccctc

SEQ ID NO: 1167768 - DNA, 25 bp, Homo sapien
tggcggcgccccacctcctccctcc

SEQ ID NO: 1167769 - DNA, 25 bp, Homo sapien
ctcccgcccgccccacgccactcac

SEQ ID NO: 1167770 - DNA, 25 bp, Homo sapien
cgtctcccgcccgccccacgccact

SEQ ID NO: 1167771 - DNA, 25 bp, Homo sapien
ccaaagcggcccaccgggcactcct

SEQ ID NO: 1167772 - DNA, 25 bp, Homo sapien
gcccaaagcggcccaccgggcactc

SEQ ID NO: 1167773 - DNA, 25 bp, Homo sapien
ctgcccaaagcggcccaccgggcac

SEQ ID NO: 1167774 - DNA, 25 bp, Homo sapien
tgcccaaagcggcccaccgggcact

SEQ ID NO: 1167775 - DNA, 25 bp, Homo sapien
gcagctgagaccgtagaagccgtcg

SEQ ID NO: 1167776 - DNA, 25 bp, Homo sapien
gcgcagtcgcacgtctcagcacagt

SEQ ID NO: 1167777 - DNA, 25 bp, Homo sapien
acatgcgccgttggccgggaagcaa

SEQ ID NO: 1167778 - DNA, 25 bp, Homo sapien
tgaagccgtgttcgcacagacatgc

SEQ ID NO: 1167779 - DNA, 25 bp, Homo sapien
taacccggcgcgcactgacagaggc

SEQ ID NO: 1167780 - DNA, 25 bp, Homo sapien
ggagcactccccgttcatcgggtgg

SEQ ID NO: 1167781 - DNA, 25 bp, Homo sapien
agacgccaccgtgcaggcagagaca

SEQ ID NO: 1167782 - DNA, 25 bp, Homo sapien
gccgctggtagcctggcagacgcca

SEQ ID NO: 1167783 - DNA, 25 bp, Homo sapien
gacaaagactagcacagtgagggcc

SEQ ID NO: 1167784 - DNA, 25 bp, Homo sapien
gatggcattttcacatgagcagcgt

SEQ ID NO: 1167785 - DNA, 25 bp, Homo sapien
tgcagaacagttgacaccgtaggtg

SEQ ID NO: 1167786 - DNA, 25 bp, Homo sapien
acgcactcgccgtcgatgggtgagc

SEQ ID NO: 1167787 - DNA, 25 bp, Homo sapien
gtgcaggtacaggctccagtttggg

SEQ ID NO: 1167788 - DNA, 25 bp, Homo sapien
caggtacaggctccagtttgggggc

SEQ ID NO: 1167789 - DNA, 25 bp, Homo sapien
acagagcagttaccacgctgccaac

SEQ ID NO: 1167790 - DNA, 25 bp, Homo sapien
gcacagagcagttaccacgctgcca

SEQ ID NO: 1167791 - DNA, 25 bp, Homo sapien
tggagaaggagtggggagcaggtag

SEQ ID NO: 1167792 - DNA, 25 bp, Homo sapien
cttggagaaggagtggggagcaggt

SEQ ID NO: 1167793 - DNA, 25 bp, Homo sapien
gagaaggagtggggagcaggtaggc

SEQ ID NO: 1167794 - DNA, 25 bp, Homo sapien
ttggagaaggagtggggagcaggta

SEQ ID NO: 1167795 - DNA, 25 bp, Homo sapien
agtcacagcgactggcacaaccttc

SEQ ID NO: 1167796 - DNA, 25 bp, Homo sapien
acagcgtccatgaacagggtcacag

SEQ ID NO: 1167797 - DNA, 25 bp, Homo sapien
cagcctggcactgacagcgtccatg

SEQ ID NO: 1167798 - DNA, 25 bp, Homo sapien
cacaaccttctccaaactgcccctt

SEQ ID NO: 1167799 - DNA, 25 bp, Homo sapien
gggccccggaatccgggtgcacaca

SEQ ID NO: 1167800 - DNA, 25 bp, Homo sapien
aggtgcaggtgttgctacagttgac

SEQ ID NO: 1167801 - DNA, 25 bp, Homo sapien
ccattctcagggagacaggtgcccc

SEQ ID NO: 1167802 - DNA, 25 bp, Homo sapien
gtgcaggtgttgctacagttgactc

SEQ ID NO: 1167803 - DNA, 25 bp, Homo sapien
ctagtctgaagacgggtcagaggaa

SEQ ID NO: 1167804 - DNA, 25 bp, Homo sapien
ccactgcagtaactagtctgaagac

SEQ ID NO: 1167805 - DNA, 25 bp, Homo sapien
tgcagtaactagtctgaagacgggt

SEQ ID NO: 1167806 - DNA, 25 bp, Homo sapien
taactagtctgaagacgggtcagag

SEQ ID NO: 1167807 - DNA, 25 bp, Homo sapien
gttagcgcacttgcagggcacacag

SEQ ID NO: 1167808 - DNA, 25 bp, Homo sapien
cagaaggagtggttagcgcacttgc

SEQ ID NO: 1167809 - DNA, 25 bp, Homo sapien
agcgtttgccatagcggccaggctg

SEQ ID NO: 1167810 - DNA, 25 bp, Homo sapien
agccagccaggcagtagcaggtccc

SEQ ID NO: 1167811 - DNA, 25 bp, Homo sapien
cccaccatggtgacattggcaggtc

SEQ ID NO: 1167812 - DNA, 25 bp, Homo sapien
ggatggcaggtcccaccatggtgac

SEQ ID NO: 1167813 - DNA, 25 bp, Homo sapien
gggcagatacagctcccatcctggg

SEQ ID NO: 1167814 - DNA, 25 bp, Homo sapien
gggggcagatacagctcccatcctg

SEQ ID NO: 1167815 - DNA, 25 bp, Homo sapien
atggctgggagcagttagcaccaaa

SEQ ID NO: 1167816 - DNA, 25 bp, Homo sapien
ggaatggggtgctcactcagaatgg

SEQ ID NO: 1167817 - DNA, 25 bp, Homo sapien
gaatggggtgctcactcagaatggc

SEQ ID NO: 1167818 - DNA, 25 bp, Homo sapien
agggactgtatgaggggcctaggtc

SEQ ID NO: 1167819 - DNA, 25 bp, Homo sapien
tgctcaggagggaagtagggactgt

SEQ ID NO: 1167820 - DNA, 25 bp, Homo sapien
ctactggagtggtcggcatcacagt

SEQ ID NO: 1167821 - DNA, 25 bp, Homo sapien
gcatcacagtaaagggctcctggat

SEQ ID NO: 1167822 - DNA, 25 bp, Homo sapien
tggagtggtcggcatcacagtaaag

SEQ ID NO: 1167823 - DNA, 25 bp, Homo sapien
tggtcggcatcacagtaaagggctc

SEQ ID NO: 1167824 - DNA, 25 bp, Homo sapien
ctttttgccagtgccgatagccaat

SEQ ID NO: 1167825 - DNA, 25 bp, Homo sapien
tggcatgacatactcggagccgtcc

SEQ ID NO: 1167826 - DNA, 25 bp, Homo sapien
ggtggtgctccttgcctttttgcca

SEQ ID NO: 1167827 - DNA, 25 bp, Homo sapien
aatgaacagtgccaccagggctacc

SEQ ID NO: 1167828 - DNA, 25 bp, Homo sapien
gagatcagtactttggcctccctga

SEQ ID NO: 1167829 - DNA, 25 bp, Homo sapien
gcaggagtccaagagagctgttttg

SEQ ID NO: 1167830 - DNA, 25 bp, Homo sapien
aagcacagggtgagctcagcgatgg

SEQ ID NO: 1167831 - DNA, 25 bp, Homo sapien
catccactcttgtgcctatgagcca

SEQ ID NO: 1167832 - DNA, 25 bp, Homo sapien
gggagcactgcgacagggtgtggta

SEQ ID NO: 1167833 - DNA, 25 bp, Homo sapien
agcactgcgacagggtgtggtagct

SEQ ID NO: 1167834 - DNA, 25 bp, Homo sapien
gttggagtagtagtgactgtagctc

SEQ ID NO: 1167835 - DNA, 25 bp, Homo sapien
tagtgactgtagctcggagggacat

SEQ ID NO: 1167836 - DNA, 25 bp, Homo sapien
ttctgcaggctggcaaagagcgggc

SEQ ID NO: 1167837 - DNA, 25 bp, Homo sapien
agggttctgcaggctggcaaagagc

SEQ ID NO: 1167838 - DNA, 25 bp, Homo sapien
ctggccgctcagggttctgcaggct

SEQ ID NO: 1167839 - DNA, 25 bp, Homo sapien
ggttctgcaggctggcaaagagcgg

SEQ ID NO: 1167840 - DNA, 25 bp, Homo sapien
cagggtggtgtggttatcatgccct

SEQ ID NO: 1167841 - DNA, 25 bp, Homo sapien
gtgtggttatcatgcccttgggccc

SEQ ID NO: 1167842 - DNA, 25 bp, Homo sapien
cggcggtgcttccagtcagcaggca

SEQ ID NO: 1167843 - DNA, 25 bp, Homo sapien
gggctcccggcggtgcttccagtca

SEQ ID NO: 1167844 - DNA, 25 bp, Homo sapien
tagctatagctgtagcttcggtcca

SEQ ID NO: 1167845 - DNA, 25 bp, Homo sapien
gctgtagctatagctgtagcttcgg

SEQ ID NO: 1167846 - DNA, 25 bp, Homo sapien
gctatagctgtagcttcggtccagg

SEQ ID NO: 1167847 - DNA, 25 bp, Homo sapien
atagctgtagcttcggtccaggcgg

SEQ ID NO: 1167848 - DNA, 25 bp, Homo sapien
ctctggctgtcccagaactgaggag

SEQ ID NO: 1167849 - DNA, 25 bp, Homo sapien
catatgggttctcactgctcaggga

SEQ ID NO: 1167850 - DNA, 25 bp, Homo sapien
tctgtggctggggttgccgccgcct

SEQ ID NO: 1167851 - DNA, 25 bp, Homo sapien
ctgggctgctcgtaggtgccactgt

SEQ ID NO: 1167852 - DNA, 25 bp, Homo sapien
gttcttgggtgagtcatagtggccg

SEQ ID NO: 1167853 - DNA, 25 bp, Homo sapien
tcttgggtgagtcatagtggccggg

SEQ ID NO: 1167854 - DNA, 25 bp, Homo sapien
ggcaagtcataatgtccagggatgt

SEQ ID NO: 1167855 - DNA, 25 bp, Homo sapien
gtgagtcatagtggccggggggtag

SEQ ID NO: 1167856 - DNA, 25 bp, Homo sapien
aacggtcctggcgtcgaagtggagg

SEQ ID NO: 1167857 - DNA, 25 bp, Homo sapien
tcaacggtcctggcgtcgaagtgga

SEQ ID NO: 1167858 - DNA, 25 bp, Homo sapien
ctggcgtcgaagtggaggtgatggg

SEQ ID NO: 1167859 - DNA, 25 bp, Homo sapien
ggtcctggcgtcgaagtggaggtga

SEQ ID NO: 1167860 - DNA, 25 bp, Homo sapien
caggtacctggtgagtgaacacagc

SEQ ID NO: 1167861 - DNA, 25 bp, Homo sapien
aaaaggtaccccacacgcatgtctg

SEQ ID NO: 1167862 - DNA, 25 bp, Homo sapien
caccagtttatgtacacagggccct

SEQ ID NO: 1167863 - DNA, 25 bp, Homo sapien
tactaaatggtaagtgccctaggac

SEQ ID NO: 1167864 - DNA, 25 bp, Homo sapien
tgttccgcgtccagggaccggatcc

SEQ ID NO: 1167865 - DNA, 25 bp, Homo sapien
gcaggaaggtaagaacgcactctac

SEQ ID NO: 1167866 - DNA, 25 bp, Homo sapien
gggatctctgttccgcgtccaggga

SEQ ID NO: 1167867 - DNA, 25 bp, Homo sapien
cagcgtctctgggaccttcgtcggg

SEQ ID NO: 1167868 - DNA, 25 bp, Homo sapien
ccggcgcgctctgctcgctcgacat

SEQ ID NO: 1167869 - DNA, 25 bp, Homo sapien
ggcccccggcgcgctctgctcgctc

SEQ ID NO: 1167870 - DNA, 25 bp, Homo sapien
cccccggcgcgctctgctcgctcga

SEQ ID NO: 1167871 - DNA, 25 bp, Homo sapien
cccggcgcgctctgctcgctcgaca

SEQ ID NO: 1167872 - DNA, 25 bp, Homo sapien
cagaacggtcgctggcttctctttg

SEQ ID NO: 1167873 - DNA, 25 bp, Homo sapien
cctttttggtcaccgcgccagaaga

SEQ ID NO: 1167874 - DNA, 25 bp, Homo sapien
cacgggaggcagaacggtcgctggc

SEQ ID NO: 1167875 - DNA, 25 bp, Homo sapien
ccctttttggtcaccgcgccagaag

SEQ ID NO: 1167876 - DNA, 25 bp, Homo sapien
ttctccagctcctataattccttct

SEQ ID NO: 1167877 - DNA, 25 bp, Homo sapien
cttccagaagatgttgtttctccag

SEQ ID NO: 1167878 - DNA, 25 bp, Homo sapien
ctgtaggggattgtatactgtcttg

SEQ ID NO: 1167879 - DNA, 25 bp, Homo sapien
actgtcttgtcttcccttccagaag

SEQ ID NO: 1167880 - DNA, 25 bp, Homo sapien
gaagtccgtgtagccccaccgcgtg

SEQ ID NO: 1167881 - DNA, 25 bp, Homo sapien
tggccttttccgacaaagaggcgga

SEQ ID NO: 1167882 - DNA, 25 bp, Homo sapien
caccgcgtgcagagctcggcgaagt

SEQ ID NO: 1167883 - DNA, 25 bp, Homo sapien
tcggcgaagtcggtctcgaggaccc

SEQ ID NO: 1167884 - DNA, 25 bp, Homo sapien
caggaccccgacagccgcggatcgt

SEQ ID NO: 1167885 - DNA, 25 bp, Homo sapien
cacctggatggtgggccggaagaac

SEQ ID NO: 1167886 - DNA, 25 bp, Homo sapien
aagaacacgtatttgctctccaggc

SEQ ID NO: 1167887 - DNA, 25 bp, Homo sapien
tgggccggaagaacacgtatttgct

SEQ ID NO: 1167888 - DNA, 25 bp, Homo sapien
gagaagacacccagaatccgttcct

SEQ ID NO: 1167889 - DNA, 25 bp, Homo sapien
aagacacccagaatccgttcctcaa

SEQ ID NO: 1167890 - DNA, 25 bp, Homo sapien
ttgatggcctgtagctgggtaagcg

SEQ ID NO: 1167891 - DNA, 25 bp, Homo sapien
ggtaagcgggggcagacatttagag

SEQ ID NO: 1167892 - DNA, 25 bp, Homo sapien
ggtcagggtcttatcggtcagcccc

SEQ ID NO: 1167893 - DNA, 25 bp, Homo sapien
agggtcttatcggtcagccccacct

SEQ ID NO: 1167894 - DNA, 25 bp, Homo sapien
gtggtcagggtcttatcggtcagcc

SEQ ID NO: 1167895 - DNA, 25 bp, Homo sapien
aggtggtcagggtcttatcggtcag

SEQ ID NO: 1167896 - DNA, 25 bp, Homo sapien
gagcttgtgataggactgctccggc

SEQ ID NO: 1167897 - DNA, 25 bp, Homo sapien
ttgtgataggactgctccggcagtg

SEQ ID NO: 1167898 - DNA, 25 bp, Homo sapien
ggactgctccggcagtgggttcccc

SEQ ID NO: 1167899 - DNA, 25 bp, Homo sapien
gactgctccggcagtgggttcccct

SEQ ID NO: 1167900 - DNA, 25 bp, Homo sapien
gacttgagcgcttgagggggcggtc

SEQ ID NO: 1167901 - DNA, 25 bp, Homo sapien
tgggtcgctggaaaaggtacagggc

SEQ ID NO: 1167902 - DNA, 25 bp, Homo sapien
aggtacagggcgtccgccggaatat

SEQ ID NO: 1167903 - DNA, 25 bp, Homo sapien
gtccgccggaatatgggagacttga

SEQ ID NO: 1167904 - DNA, 25 bp, Homo sapien
gagggtccggttgcagctgtgcagc

SEQ ID NO: 1167905 - DNA, 25 bp, Homo sapien
tgaaacccaggttgagcgagacgag

SEQ ID NO: 1167906 - DNA, 25 bp, Homo sapien
tcgtcaccgatgtggttgaaaccca

SEQ ID NO: 1167907 - DNA, 25 bp, Homo sapien
tcgatgttattgttccgcagagaca

SEQ ID NO: 1167908 - DNA, 25 bp, Homo sapien
cgcccttgtcctggatgcggttgtg

SEQ ID NO: 1167909 - DNA, 25 bp, Homo sapien
acagccagagcagggaacggttcag

SEQ ID NO: 1167910 - DNA, 25 bp, Homo sapien
agccagagcagggaacggttcagcc

SEQ ID NO: 1167911 - DNA, 25 bp, Homo sapien
cagccagcttcagggcgcccttgtc

SEQ ID NO: 1167912 - DNA, 25 bp, Homo sapien
agcaggaggcgtcggcgctccacca

SEQ ID NO: 1167913 - DNA, 25 bp, Homo sapien
gatcgcgagcgctcctgtgtccctt

SEQ ID NO: 1167914 - DNA, 25 bp, Homo sapien
tccaccacttcggtgtgtgtcagct

SEQ ID NO: 1167915 - DNA, 25 bp, Homo sapien
ggtgtgtgtcagctcgaaggcgcgc

SEQ ID NO: 1167916 - DNA, 25 bp, Homo sapien
taactgcattgcaggaattgagtct

SEQ ID NO: 1167917 - DNA, 25 bp, Homo sapien
gagaagttaagtaacacaggccagg

SEQ ID NO: 1167918 - DNA, 25 bp, Homo sapien
tgaaataggtacaactatccccact

SEQ ID NO: 1167919 - DNA, 25 bp, Homo sapien
taaatcctctcgacagtcatgaaat

SEQ ID NO: 1167920 - DNA, 25 bp, Homo sapien
cattgtctgcgtcttgtctgtcttg

SEQ ID NO: 1167921 - DNA, 25 bp, Homo sapien
tgctgatccctaccatctgactctt

SEQ ID NO: 1167922 - DNA, 25 bp, Homo sapien
actcttctcacggtccgttttggag

SEQ ID NO: 1167923 - DNA, 25 bp, Homo sapien
tgtcttgtccaccaatgcactattg

SEQ ID NO: 1167924 - DNA, 25 bp, Homo sapien
taggggttccttgtgtgggtgactg

SEQ ID NO: 1167925 - DNA, 25 bp, Homo sapien
aggggttccttgtgtgggtgactgc

SEQ ID NO: 1167926 - DNA, 25 bp, Homo sapien
cttctctctgctcccgatcttgatc

SEQ ID NO: 1167927 - DNA, 25 bp, Homo sapien
tgctcccgatcttgatcccttttgc

SEQ ID NO: 1167928 - DNA, 25 bp, Homo sapien
cgatcttgatcccttttgccctgct

SEQ ID NO: 1167929 - DNA, 25 bp, Homo sapien
tctctgctcccgatcttgatccctt

SEQ ID NO: 1167930 - DNA, 25 bp, Homo sapien
aactttcccatctcggtgctccaca

SEQ ID NO: 1167931 - DNA, 25 bp, Homo sapien
gaggtgcaaaaggaccttgttccca

SEQ ID NO: 1167932 - DNA, 25 bp, Homo sapien
agggttgaccacctcagtagcctca

SEQ ID NO: 1167933 - DNA, 25 bp, Homo sapien
ccaggagagggttgaccacctcagt

SEQ ID NO: 1167934 - DNA, 25 bp, Homo sapien
cacacctttccctgacctagccctt

SEQ ID NO: 1167935 - DNA, 25 bp, Homo sapien
ctcactggcccaggcacacctttcc

SEQ ID NO: 1167936 - DNA, 25 bp, Homo sapien
cattactccaatcgcctgtcctcag

SEQ ID NO: 1167937 - DNA, 25 bp, Homo sapien
cattggcacctgacacaccagacat

SEQ ID NO: 1167938 - DNA, 25 bp, Homo sapien
ccactggacccttggatgcactctt

SEQ ID NO: 1167939 - DNA, 25 bp, Homo sapien
ccttggatgcactcttggccttgga

SEQ ID NO: 1167940 - DNA, 25 bp, Homo sapien
gagaactgcatctgatactgcaccg

SEQ ID NO: 1167941 - DNA, 25 bp, Homo sapien
atactgcaccgtggcgaggaagccc

SEQ ID NO: 1167942 - DNA, 25 bp, Homo sapien
taggggcaacgtctgcttcagcagg

SEQ ID NO: 1167943 - DNA, 25 bp, Homo sapien
gcagctgtctagtatgacagctgat

SEQ ID NO: 1167944 - DNA, 25 bp, Homo sapien
gctgataggggcaacgtctgcttca

SEQ ID NO: 1167945 - DNA, 25 bp, Homo sapien
ctgtctagtatgacagctgataggg

SEQ ID NO: 1167946 - DNA, 25 bp, Homo sapien
gggacatgcagaaaaagcagagtga

SEQ ID NO: 1167947 - DNA, 25 bp, Homo sapien
gaggaatgaagattagtcctctggc

SEQ ID NO: 1167948 - DNA, 25 bp, Homo sapien
gaagattagtcctctggcagaaaaa

SEQ ID NO: 1167949 - DNA, 25 bp, Homo sapien
ttaaaaagaagcagagaaactacag

SEQ ID NO: 1167950 - DNA, 25 bp, Homo sapien
ttatggcgtacgcaggacattgtgg

SEQ ID NO: 1167951 - DNA, 25 bp, Homo sapien
gcaggacattgtggggcgaagcaat

SEQ ID NO: 1167952 - DNA, 25 bp, Homo sapien
caggacattgtggggcgaagcaatt

SEQ ID NO: 1167953 - DNA, 25 bp, Homo sapien
gacattgtggggcgaagcaattttt

SEQ ID NO: 1167954 - DNA, 25 bp, Homo sapien
ctaggggaagaatgccatggcctca

SEQ ID NO: 1167955 - DNA, 25 bp, Homo sapien
ccttgatgggatcccttggcaacat

SEQ ID NO: 1167956 - DNA, 25 bp, Homo sapien
cctccctgagtttggccttgatggg

SEQ ID NO: 1167957 - DNA, 25 bp, Homo sapien
gggaagaatgccatggcctcatcct

SEQ ID NO: 1167958 - DNA, 25 bp, Homo sapien
tagcaacagactttgttattggtct

SEQ ID NO: 1167959 - DNA, 25 bp, Homo sapien
gaaagttttcagacgacctcaagga

SEQ ID NO: 1167960 - DNA, 25 bp, Homo sapien
caggaggtgcttctgtagccccgag

SEQ ID NO: 1167961 - DNA, 25 bp, Homo sapien
ccccgagtcttagaggcaagcaggt

SEQ ID NO: 1167962 - DNA, 25 bp, Homo sapien
tcaggcctggccagttcatcactgt

SEQ ID NO: 1167963 - DNA, 25 bp, Homo sapien
ccagagtcaagaggtctcatgagct

SEQ ID NO: 1167964 - DNA, 25 bp, Homo sapien
catgagctgccctcaatgagcttga

SEQ ID NO: 1167965 - DNA, 25 bp, Homo sapien
tgtgcactcactgaactagggactg

SEQ ID NO: 1167966 - DNA, 25 bp, Homo sapien
cgctgtgataaaaggtacggtgttt

SEQ ID NO: 1167967 - DNA, 25 bp, Homo sapien
aatcgctgtgataaaaggtacggtg

SEQ ID NO: 1167968 - DNA, 25 bp, Homo sapien
gtgtttcttggaatcgctgtgataa

SEQ ID NO: 1167969 - DNA, 25 bp, Homo sapien
tcttggaatcgctgtgataaaaggt

SEQ ID NO: 1167970 - DNA, 25 bp, Homo sapien
tgtatgtgcgctgccctcagacatg

SEQ ID NO: 1167971 - DNA, 25 bp, Homo sapien
gaattcacccaggaccatccaaggg

SEQ ID NO: 1167972 - DNA, 25 bp, Homo sapien
ttaacaacccagttccaggatcgag

SEQ ID NO: 1167973 - DNA, 25 bp, Homo sapien
tgtccctgtagaaaaccagtgaagc

SEQ ID NO: 1167974 - DNA, 25 bp, Homo sapien
ggagaagtctgccaactcgtgagga

SEQ ID NO: 1167975 - DNA, 25 bp, Homo sapien
atcactaagcagtgagagatggtgg

SEQ ID NO: 1167976 - DNA, 25 bp, Homo sapien
ctctcggttcctaccattgggggag

SEQ ID NO: 1167977 - DNA, 25 bp, Homo sapien
tctgccaactcgtgaggacacatca

SEQ ID NO: 1167978 - DNA, 25 bp, Homo sapien
tgcactctccatctgcgttgagggt

SEQ ID NO: 1167979 - DNA, 25 bp, Homo sapien
tggtcctgaagatccacatctgtct

SEQ ID NO: 1167980 - DNA, 25 bp, Homo sapien
tttcctcacacagataaacgggcct

SEQ ID NO: 1167981 - DNA, 25 bp, Homo sapien
tatgtaagtgggttccaagtggtcc

SEQ ID NO: 1167982 - DNA, 25 bp, Homo sapien
gaagcagagcaggatgtagattact

SEQ ID NO: 1167983 - DNA, 25 bp, Homo sapien
cctcctgtggtcctagaagcagagc

SEQ ID NO: 1167984 - DNA, 25 bp, Homo sapien
aataatatcagaaaaccagcccaac

SEQ ID NO: 1167985 - DNA, 25 bp, Homo sapien
gtcagaggtgccagctgtcttgggc

SEQ ID NO: 1167986 - DNA, 25 bp, Homo sapien
ccagctgctcgaagagtgggtcatg

SEQ ID NO: 1167987 - DNA, 25 bp, Homo sapien
caaccagcagtatgatgccccagaa

SEQ ID NO: 1167988 - DNA, 25 bp, Homo sapien
gaagctttcctgaggacctgctgga

SEQ ID NO: 1167989 - DNA, 25 bp, Homo sapien
gaagagcaagcagatccccgacttc

SEQ ID NO: 1167990 - DNA, 25 bp, Homo sapien
tgtcaggtagtagtgaagccccaga

SEQ ID NO: 1167991 - DNA, 25 bp, Homo sapien
gaagatatgtgaacagtgcccaaga

SEQ ID NO: 1167992 - DNA, 25 bp, Homo sapien
caggtatctgactttgcgctagaca

SEQ ID NO: 1167993 - DNA, 25 bp, Homo sapien
gatggtattatctgccaaggctaga

SEQ ID NO: 1167994 - DNA, 25 bp, Homo sapien
gaggcaaagccaggaggattgcctg

SEQ ID NO: 1167995 - DNA, 25 bp, Homo sapien
ttaaaactatcttgtgaggctgggc

SEQ ID NO: 1167996 - DNA, 25 bp, Homo sapien
gctgggcgaggtgacacatgcctat

SEQ ID NO: 1167997 - DNA, 25 bp, Homo sapien
aaactatcttgtgaggctgggcgag

SEQ ID NO: 1167998 - DNA, 25 bp, Homo sapien
tgtcttgtctggtttatgtcgtgtt

SEQ ID NO: 1167999 - DNA, 25 bp, Homo sapien
ttcctcctgtcctgcgttgctctct

SEQ ID NO: 1168000 - DNA, 25 bp, Homo sapien
cttcctcctgtcctgcgttgctctc

SEQ ID NO: 1168001 - DNA, 25 bp, Homo sapien
tgtctggtttatgtcgtgttttgtt

SEQ ID NO: 1168002 - DNA, 25 bp, Homo sapien
ctgggtcactcttggctctgttgtg

SEQ ID NO: 1168003 - DNA, 25 bp, Homo sapien
cttgtggccaggtgcctcccctggg

SEQ ID NO: 1168004 - DNA, 25 bp, Homo sapien
cactcttggctctgttgtggttttt

SEQ ID NO: 1168005 - DNA, 25 bp, Homo sapien
gtggccaggtgcctcccctgggtca

SEQ ID NO: 1168006 - DNA, 25 bp, Homo sapien
ggatagctctccttgatgagttcca

SEQ ID NO: 1168007 - DNA, 25 bp, Homo sapien
cttaggatagctctccttgatgagt

SEQ ID NO: 1168008 - DNA, 25 bp, Homo sapien
gatagctctccttgatgagttccat

SEQ ID NO: 1168009 - DNA, 25 bp, Homo sapien
taggatagctctccttgatgagttc

SEQ ID NO: 1168010 - DNA, 25 bp, Homo sapien
tcagtggacccataaatgtgatggc

SEQ ID NO: 1168011 - DNA, 25 bp, Homo sapien
tcaagactattatggccgttctggg

SEQ ID NO: 1168012 - DNA, 25 bp, Homo sapien
tgccagtactacactgaagcttggt

SEQ ID NO: 1168013 - DNA, 25 bp, Homo sapien
ccttccaacccataaacatggatgt

SEQ ID NO: 1168014 - DNA, 25 bp, Homo sapien
gataatggagacaagtagtacttgc

SEQ ID NO: 1168015 - DNA, 25 bp, Homo sapien
tagtacttgcctttagggaacctca

SEQ ID NO: 1168016 - DNA, 25 bp, Homo sapien
ggaaaggcacctgcaaaagacctaa

SEQ ID NO: 1168017 - DNA, 25 bp, Homo sapien
ttatttatcttcgacatgcatcggg

SEQ ID NO: 1168018 - DNA, 25 bp, Homo sapien
tgatcaagacaccaaagctacagga

SEQ ID NO: 1168019 - DNA, 25 bp, Homo sapien
tatcttcaagttgggaggccctcct

SEQ ID NO: 1168020 - DNA, 25 bp, Homo sapien
ctggaaccgtggagacaccgagaaa

SEQ ID NO: 1168021 - DNA, 25 bp, Homo sapien
taaccttgaagagattcgtggctgg

SEQ ID NO: 1168022 - DNA, 25 bp, Homo sapien
gagaaaatttcggagcctggatgtg

SEQ ID NO: 1168023 - DNA, 25 bp, Homo sapien
tgaggcaagagaaaatttcggagcc

SEQ ID NO: 1168024 - DNA, 25 bp, Homo sapien
agcctggatgtggaggagcccaaca

SEQ ID NO: 1168025 - DNA, 25 bp, Homo sapien
cagaaaaaggccgaacgtaggctgg

SEQ ID NO: 1168026 - DNA, 25 bp, Homo sapien
ctcgaactcaaatccacaataataa

SEQ ID NO: 1168027 - DNA, 25 bp, Homo sapien
taatccgaacgaataataagggagc

SEQ ID NO: 1168028 - DNA, 25 bp, Homo sapien
gggaggaagcgaaatctccgtttca

SEQ ID NO: 1168029 - DNA, 25 bp, Homo sapien
ataagggagccgtctttctggccgg

SEQ ID NO: 1168030 - DNA, 25 bp, Homo sapien
aggcactgcgggctcctgcctgcga

SEQ ID NO: 1168031 - DNA, 25 bp, Homo sapien
ctcctgcctgcgagattaggcgagg

SEQ ID NO: 1168032 - DNA, 25 bp, Homo sapien
gaggagacaggcgatcggattttcc

SEQ ID NO: 1168033 - DNA, 25 bp, Homo sapien
cgatcggattttccaggagtctggt

SEQ ID NO: 1168034 - DNA, 25 bp, Homo sapien
tgaaacaatggcactatgtctccag

SEQ ID NO: 1168035 - DNA, 25 bp, Homo sapien
tggcactatgtctccagtggtgatt

SEQ ID NO: 1168036 - DNA, 25 bp, Homo sapien
caatggcactatgtctccagtggtg

SEQ ID NO: 1168037 - DNA, 25 bp, Homo sapien
caatgaaacaatggcactatgtctc

SEQ ID NO: 1168038 - DNA, 25 bp, Homo sapien
cagaaaggatcttaagtaccaggcc

SEQ ID NO: 1168039 - DNA, 25 bp, Homo sapien
taaggagatatgagagggcacacag

SEQ ID NO: 1168040 - DNA, 25 bp, Homo sapien
cactgcagggacagatattaccgtc

SEQ ID NO: 1168041 - DNA, 25 bp, Homo sapien
cacagtaagggtgtcacgtgtctaa

SEQ ID NO: 1168042 - DNA, 25 bp, Homo sapien
aggcaggcgggccaaaccaggcgga

SEQ ID NO: 1168043 - DNA, 25 bp, Homo sapien
tggaggcaggcgggccaaaccaggc

SEQ ID NO: 1168044 - DNA, 25 bp, Homo sapien
ggagtggaggcaggcgggccaaacc

SEQ ID NO: 1168045 - DNA, 25 bp, Homo sapien
caggcgggccaaaccaggcggatat

SEQ ID NO: 1168046 - DNA, 25 bp, Homo sapien
caggttctggttgaccatgactgcg

SEQ ID NO: 1168047 - DNA, 25 bp, Homo sapien
gcactgggcccactcgagtaggagt

SEQ ID NO: 1168048 - DNA, 25 bp, Homo sapien
ttctggttgaccatgactgcggtga

SEQ ID NO: 1168049 - DNA, 25 bp, Homo sapien
cactgggcccactcgagtaggagtg

SEQ ID NO: 1168050 - DNA, 25 bp, Homo sapien
ggaagctgatctcttcagtaagccc

SEQ ID NO: 1168051 - DNA, 25 bp, Homo sapien
gaagctgatctcttcagtaagccct

SEQ ID NO: 1168052 - DNA, 25 bp, Homo sapien
gaggaagctgatctcttcagtaagc

SEQ ID NO: 1168053 - DNA, 25 bp, Homo sapien
cctgaggaagctgatctcttcagta

SEQ ID NO: 1168054 - DNA, 25 bp, Homo sapien
gctcttgcagctcctcattcttgat

SEQ ID NO: 1168055 - DNA, 25 bp, Homo sapien
ctggctgcggctggcggtcctcgta

SEQ ID NO: 1168056 - DNA, 25 bp, Homo sapien
ctcagtctttgtgcgccacaggtca

SEQ ID NO: 1168057 - DNA, 25 bp, Homo sapien
cccagccaggctcttgcagctcctc

SEQ ID NO: 1168058 - DNA, 25 bp, Homo sapien
gctgtgcatctgcaatggcggcctc

SEQ ID NO: 1168059 - DNA, 25 bp, Homo sapien
ctgctgtgcatctgcaatggcggcc

SEQ ID NO: 1168060 - DNA, 25 bp, Homo sapien
agccctctggcctttggggccctca

SEQ ID NO: 1168061 - DNA, 25 bp, Homo sapien
ccctctggcctttggggccctcaat

SEQ ID NO: 1168062 - DNA, 25 bp, Homo sapien
acgtctaggaccagcttgacgttca

SEQ ID NO: 1168063 - DNA, 25 bp, Homo sapien
catacttaatagtcagctctccgcg

SEQ ID NO: 1168064 - DNA, 25 bp, Homo sapien
tctcgacgtctaggaccagcttgac

SEQ ID NO: 1168065 - DNA, 25 bp, Homo sapien
cttggcgttggcatacttaatagtc

SEQ ID NO: 1168066 - DNA, 25 bp, Homo sapien
ttgggcaggagtcggaggactcgga

SEQ ID NO: 1168067 - DNA, 25 bp, Homo sapien
ggcaggagtcggaggactcggacac

SEQ ID NO: 1168068 - DNA, 25 bp, Homo sapien
agtgctaccctgcatagtggcctcc

SEQ ID NO: 1168069 - DNA, 25 bp, Homo sapien
tgttcccagtgctaccctgcatagt

SEQ ID NO: 1168070 - DNA, 25 bp, Homo sapien
accctgcatagtggcctccctccca

SEQ ID NO: 1168071 - DNA, 25 bp, Homo sapien
ccagtgctaccctgcatagtggcct

SEQ ID NO: 1168072 - DNA, 25 bp, Homo sapien
ttgacagagctagctgaggttttat

SEQ ID NO: 1168073 - DNA, 25 bp, Homo sapien
attgaattgttttgtagctggaggc

SEQ ID NO: 1168074 - DNA, 25 bp, Homo sapien
ttttgacagagctagctgaggtttt

SEQ ID NO: 1168075 - DNA, 25 bp, Homo sapien
caggtagtaaactcccccacaggtg

SEQ ID NO: 1168076 - DNA, 25 bp, Homo sapien
atccatactccatattgatcattta

SEQ ID NO: 1168077 - DNA, 25 bp, Homo sapien
caatccatactccatattgatcatt

SEQ ID NO: 1168078 - DNA, 25 bp, Homo sapien
tccaatccatactccatattgatca

SEQ ID NO: 1168079 - DNA, 25 bp, Homo sapien
ttccaatccatactccatattgatc

SEQ ID NO: 1168080 - DNA, 25 bp, Homo sapien
gagccagggatatcgtccagtccat

SEQ ID NO: 1168081 - DNA, 25 bp, Homo sapien
aaggcccctgaggagagttgttcca

SEQ ID NO: 1168082 - DNA, 25 bp, Homo sapien
taaatacctggagggttcagccaga

SEQ ID NO: 1168083 - DNA, 25 bp, Homo sapien
tcagataccatggaccactgccagg

SEQ ID NO: 1168084 - DNA, 25 bp, Homo sapien
tgatgccaacagcaaaagacaagtc

SEQ ID NO: 1168085 - DNA, 25 bp, Homo sapien
tcttcaaatagctggtgagggcaac

SEQ ID NO: 1168086 - DNA, 25 bp, Homo sapien
taagagtacggttatgtcatcactg

SEQ ID NO: 1168087 - DNA, 25 bp, Homo sapien
acagtctgtgctcaagtgccggcct

SEQ ID NO: 1168088 - DNA, 25 bp, Homo sapien
cactaacacagggaatgattgcacc

SEQ ID NO: 1168089 - DNA, 25 bp, Homo sapien
tgattgcaccctagtcctctgtggg

SEQ ID NO: 1168090 - DNA, 25 bp, Homo sapien
tctgtgggccaagaaactttcagaa

SEQ ID NO: 1168091 - DNA, 25 bp, Homo sapien
tcactagttacctgcttgagcagag

SEQ ID NO: 1168092 - DNA, 25 bp, Homo sapien
tgtgagcacgttcactgagaggcat

SEQ ID NO: 1168093 - DNA, 25 bp, Homo sapien
tttaagatgatacgggtctgtcacc

SEQ ID NO: 1168094 - DNA, 25 bp, Homo sapien
gacctctcagctgcatagttgggac

SEQ ID NO: 1168095 - DNA, 25 bp, Homo sapien
tagttgggacggcaaaccctgctgt

SEQ ID NO: 1168096 - DNA, 25 bp, Homo sapien
gccttaatgtcggcaaagatcattt

SEQ ID NO: 1168097 - DNA, 25 bp, Homo sapien
ctgccttaatgtcggcaaagatcat

SEQ ID NO: 1168098 - DNA, 25 bp, Homo sapien
ataaggcagtgtccaattattatcc

SEQ ID NO: 1168099 - DNA, 25 bp, Homo sapien
aaggcagtgtccaattattatccat

SEQ ID NO: 1168100 - DNA, 25 bp, Homo sapien
gaacccgaactcttggagtcagtga

SEQ ID NO: 1168101 - DNA, 25 bp, Homo sapien
ttctcccagacgtctaccttattag

SEQ ID NO: 1168102 - DNA, 25 bp, Homo sapien
tgccgggtagttgccatcctaaaca

SEQ ID NO: 1168103 - DNA, 25 bp, Homo sapien
accttattagttgctgacactgaac

SEQ ID NO: 1168104 - DNA, 25 bp, Homo sapien
caggtttctggtagagcatccattc

SEQ ID NO: 1168105 - DNA, 25 bp, Homo sapien
tctgcgtagcataagacaccaaatt

SEQ ID NO: 1168106 - DNA, 25 bp, Homo sapien
gactaacaaaacagattctgcgtag

SEQ ID NO: 1168107 - DNA, 25 bp, Homo sapien
accaactgatggattcccgtctcag

SEQ ID NO: 1168108 - DNA, 25 bp, Homo sapien
tctgggcaacatcagaggcctctgt

SEQ ID NO: 1168109 - DNA, 25 bp, Homo sapien
aaaaatattgccactagcctgcagg

SEQ ID NO: 1168110 - DNA, 25 bp, Homo sapien
gatgctaatcaatttcctggtcgtc

SEQ ID NO: 1168111 - DNA, 25 bp, Homo sapien
tagcagacctggagtcccctaatgc

SEQ ID NO: 1168112 - DNA, 25 bp, Homo sapien
ttttctttctgtccacggcacaggc

SEQ ID NO: 1168113 - DNA, 25 bp, Homo sapien
ttctttctgtccacggcacaggcgg

SEQ ID NO: 1168114 - DNA, 25 bp, Homo sapien
tttctttctgtccacggcacaggcg

SEQ ID NO: 1168115 - DNA, 25 bp, Homo sapien
cctgatgcttccctgggttcacagc

SEQ ID NO: 1168116 - DNA, 25 bp, Homo sapien
ctgatgcttccctgggttcacagct

SEQ ID NO: 1168117 - DNA, 25 bp, Homo sapien
aggagattgatgaatcccaggagcc

SEQ ID NO: 1168118 - DNA, 25 bp, Homo sapien
ggaggagattgatgaatcccaggag

SEQ ID NO: 1168119 - DNA, 25 bp, Homo sapien
gaggagattgatgaatcccaggagc

SEQ ID NO: 1168120 - DNA, 25 bp, Homo sapien
gggtctccaccccaactgccctctc

SEQ ID NO: 1168121 - DNA, 25 bp, Homo sapien
tcagctgcactgtcgtctgagccca

SEQ ID NO: 1168122 - DNA, 25 bp, Homo sapien
ggagctcagctgcactgtcgtctga

SEQ ID NO: 1168123 - DNA, 25 bp, Homo sapien
ccggagctcagctgcactgtcgtct

SEQ ID NO: 1168124 - DNA, 25 bp, Homo sapien
cagacaaatgtgagctccagaatcc

SEQ ID NO: 1168125 - DNA, 25 bp, Homo sapien
agctcggcgtctacatctactctga

SEQ ID NO: 1168126 - DNA, 25 bp, Homo sapien
ctcggatccccttcagacaaatgtg

SEQ ID NO: 1168127 - DNA, 25 bp, Homo sapien
ccttcagacaaatgtgagctccaga

SEQ ID NO: 1168128 - DNA, 25 bp, Homo sapien
ttcctcaaggccgacccaggttgga

SEQ ID NO: 1168129 - DNA, 25 bp, Homo sapien
tgaacttttcctcaaggccgaccca

SEQ ID NO: 1168130 - DNA, 25 bp, Homo sapien
tcctcaaggccgacccaggttggag

SEQ ID NO: 1168131 - DNA, 25 bp, Homo sapien
ctcaaggccgacccaggttggagag

SEQ ID NO: 1168132 - DNA, 25 bp, Homo sapien
ttaaatggatcatggccatgtactg

SEQ ID NO: 1168133 - DNA, 25 bp, Homo sapien
gaaaacctggccagataattgtccc

SEQ ID NO: 1168134 - DNA, 25 bp, Homo sapien
aattgtcccccagttaaatggatca

SEQ ID NO: 1168135 - DNA, 25 bp, Homo sapien
gttctcaatcctcagagacaacacg

SEQ ID NO: 1168136 - DNA, 25 bp, Homo sapien
tcctggagccctacaatccagggtg

SEQ ID NO: 1168137 - DNA, 25 bp, Homo sapien
gagattgctgttccgctggctcagg

SEQ ID NO: 1168138 - DNA, 25 bp, Homo sapien
caagcctggtatgatagacagtgac

SEQ ID NO: 1168139 - DNA, 25 bp, Homo sapien
tggccaggatctcaggatgaggcac

SEQ ID NO: 1168140 - DNA, 25 bp, Homo sapien
tctgggcctcgatggagaaatgcaa

SEQ ID NO: 1168141 - DNA, 25 bp, Homo sapien
catttcttccagaggtatagcccag

SEQ ID NO: 1168142 - DNA, 25 bp, Homo sapien
ccaagaatatctcgcgaaggagagc

SEQ ID NO: 1168143 - DNA, 25 bp, Homo sapien
gaaagagaacccagattctagtggg

SEQ ID NO: 1168144 - DNA, 25 bp, Homo sapien
tgtcagatactcaggcatgtccaga

SEQ ID NO: 1168145 - DNA, 25 bp, Homo sapien
tgagatagtcactgagcacggcctg

SEQ ID NO: 1168146 - DNA, 25 bp, Homo sapien
tcagatgagtgcagcgtgcgtgctc

SEQ ID NO: 1168147 - DNA, 25 bp, Homo sapien
tcttacccaggaatgttaggtccca

SEQ ID NO: 1168148 - DNA, 25 bp, Homo sapien
tggcagaggccgcttcggaccgccc

SEQ ID NO: 1168149 - DNA, 25 bp, Homo sapien
ctgggcgtccgcacccgaggaccca

SEQ ID NO: 1168150 - DNA, 25 bp, Homo sapien
gccctggcagaggccgcttcggacc

SEQ ID NO: 1168151 - DNA, 25 bp, Homo sapien
gggacccttcgcctgggcgtccgca

SEQ ID NO: 1168152 - DNA, 25 bp, Homo sapien
gtgacatcgccgcaagttcccactg

SEQ ID NO: 1168153 - DNA, 25 bp, Homo sapien
gctccccttcgtccagcttgagacc

SEQ ID NO: 1168154 - DNA, 25 bp, Homo sapien
gcagggcaggggtgacatcgccgca

SEQ ID NO: 1168155 - DNA, 25 bp, Homo sapien
gcaagttcccactgcggccccagcg

SEQ ID NO: 1168156 - DNA, 25 bp, Homo sapien
tgtaatgcactctcagagtggccat

SEQ ID NO: 1168157 - DNA, 25 bp, Homo sapien
cacatgtaatgcactctcagagtgg

SEQ ID NO: 1168158 - DNA, 25 bp, Homo sapien
cttctcacatgtaatgcactctcag

SEQ ID NO: 1168159 - DNA, 25 bp, Homo sapien
aatgcactctcagagtggccatttg

SEQ ID NO: 1168160 - DNA, 25 bp, Homo sapien
ttttctgctcctctctcctttccca

SEQ ID NO: 1168161 - DNA, 25 bp, Homo sapien
tttctgctcctctctcctttcccat

SEQ ID NO: 1168162 - DNA, 25 bp, Homo sapien
tgatgacgacaacgggatgagccag

SEQ ID NO: 1168163 - DNA, 25 bp, Homo sapien
gacgaactgcttgatgacgacaacg

SEQ ID NO: 1168164 - DNA, 25 bp, Homo sapien
gaactgcttgatgacgacaacggga

SEQ ID NO: 1168165 - DNA, 25 bp, Homo sapien
ccagaggacgaactgcttgatgacg

SEQ ID NO: 1168166 - DNA, 25 bp, Homo sapien
cgaaatagcctatggtaccagagta

SEQ ID NO: 1168167 - DNA, 25 bp, Homo sapien
tcgtccagatgcaagtacttaacag

SEQ ID NO: 1168168 - DNA, 25 bp, Homo sapien
attgcagtgccattgatgaacatat

SEQ ID NO: 1168169 - DNA, 25 bp, Homo sapien
aacatatttttcatcgtccagatgc

SEQ ID NO: 1168170 - DNA, 25 bp, Homo sapien
gctctctctcaggtcacatttaggt

SEQ ID NO: 1168171 - DNA, 25 bp, Homo sapien
ctgccctcttgggtaaattttcagc

SEQ ID NO: 1168172 - DNA, 25 bp, Homo sapien
tccagaactagaacctgcccttgct

SEQ ID NO: 1168173 - DNA, 25 bp, Homo sapien
tcgtggttgctgatcacacaggtca

SEQ ID NO: 1168174 - DNA, 25 bp, Homo sapien
ggaggctgaggggagagtctccaga

SEQ ID NO: 1168175 - DNA, 25 bp, Homo sapien
tgaggctgtagtgatccgtgatcat

SEQ ID NO: 1168176 - DNA, 25 bp, Homo sapien
tttgaggctgtagtgatccgtgatc

SEQ ID NO: 1168177 - DNA, 25 bp, Homo sapien
agagtctccagagcctgagagtttg

SEQ ID NO: 1168178 - DNA, 25 bp, Homo sapien
tgcagacgtcatcaagtttaagggt

SEQ ID NO: 1168179 - DNA, 25 bp, Homo sapien
aaaactgctcaggtccaggtcagca

SEQ ID NO: 1168180 - DNA, 25 bp, Homo sapien
gaatatcctcaggtttacacccaga

SEQ ID NO: 1168181 - DNA, 25 bp, Homo sapien
gtggctctgcactaattcctggacc

SEQ ID NO: 1168182 - DNA, 25 bp, Homo sapien
gtaaggacatagtgttccctgcttc

SEQ ID NO: 1168183 - DNA, 25 bp, Homo sapien
ctccttccattatgtaaggacatag

SEQ ID NO: 1168184 - DNA, 25 bp, Homo sapien
tgcttccactatgtaatgacagagt

SEQ ID NO: 1168185 - DNA, 25 bp, Homo sapien
ggacacagtgttcccactttccatc

SEQ ID NO: 1168186 - DNA, 25 bp, Homo sapien
gcaaagccttagatccaacactgga

SEQ ID NO: 1168187 - DNA, 25 bp, Homo sapien
cctgccttggatcatgtgaagacat

SEQ ID NO: 1168188 - DNA, 25 bp, Homo sapien
cataaaatggcttgaggacagtgtc

SEQ ID NO: 1168189 - DNA, 25 bp, Homo sapien
tcatgacaatggtcactgaagaccg

SEQ ID NO: 1168190 - DNA, 25 bp, Homo sapien
cttgtaaatgaccacctgctccctg

SEQ ID NO: 1168191 - DNA, 25 bp, Homo sapien
ttgtaaatgaccacctgctccctgg

SEQ ID NO: 1168192 - DNA, 25 bp, Homo sapien
tcctgaagctccacagttggatgca

SEQ ID NO: 1168193 - DNA, 25 bp, Homo sapien
cctgaagctccacagttggatgcat

SEQ ID NO: 1168194 - DNA, 25 bp, Homo sapien
tcctctgaggaatcctgaagctcca

SEQ ID NO: 1168195 - DNA, 25 bp, Homo sapien
aacaggccagcaggcaacctgccat

SEQ ID NO: 1168196 - DNA, 25 bp, Homo sapien
tgaacaggccagcaggcaacctgcc

SEQ ID NO: 1168197 - DNA, 25 bp, Homo sapien
aggccagcaggcaacctgccatggg

SEQ ID NO: 1168198 - DNA, 25 bp, Homo sapien
gctgaacaggccagcaggcaacctg

SEQ ID NO: 1168199 - DNA, 25 bp, Homo sapien
agaggcccctgagtgtctcactata

SEQ ID NO: 1168200 - DNA, 25 bp, Homo sapien
gaggcccctgagtgtctcactatac

SEQ ID NO: 1168201 - DNA, 25 bp, Homo sapien
ctgtgttaaggacagtgatgacatc

SEQ ID NO: 1168202 - DNA, 25 bp, Homo sapien
tgttaaggacagtgatgacatcact

SEQ ID NO: 1168203 - DNA, 25 bp, Homo sapien
tttcctgtctttggcacaggcagca

SEQ ID NO: 1168204 - DNA, 25 bp, Homo sapien
ctctccacagcccaattctgcagtg

SEQ ID NO: 1168205 - DNA, 25 bp, Homo sapien
tctccacagcccaattctgcagtgt

SEQ ID NO: 1168206 - DNA, 25 bp, Homo sapien
gcagtttcctgtctttggcacaggc

SEQ ID NO: 1168207 - DNA, 25 bp, Homo sapien
caggagcacagtcgcccagcagaag

SEQ ID NO: 1168208 - DNA, 25 bp, Homo sapien
ccatggcaggctgcttgatggcctg

SEQ ID NO: 1168209 - DNA, 25 bp, Homo sapien
gcaggctgcttgatggcctgttcag

SEQ ID NO: 1168210 - DNA, 25 bp, Homo sapien
cagaagaaccggttcttggagcagg

SEQ ID NO: 1168211 - DNA, 25 bp, Homo sapien
ccctgaggaggaggctgatgaatac

SEQ ID NO: 1168212 - DNA, 25 bp, Homo sapien
cactccctgaggaggaggctgatga

SEQ ID NO: 1168213 - DNA, 25 bp, Homo sapien
tccctgaggaggaggctgatgaata

SEQ ID NO: 1168214 - DNA, 25 bp, Homo sapien
cctgccactccctgaggaggaggct

SEQ ID NO: 1168215 - DNA, 25 bp, Homo sapien
ggaagatgaccatccaaggatcaaa

SEQ ID NO: 1168216 - DNA, 25 bp, Homo sapien
tgggtaggaagatgaccatccaagg

SEQ ID NO: 1168217 - DNA, 25 bp, Homo sapien
tggccatgatgttgaagcttctggg

SEQ ID NO: 1168218 - DNA, 25 bp, Homo sapien
ttctgaagggaggtgttggccatga

SEQ ID NO: 1168219 - DNA, 25 bp, Homo sapien
gtgaactgaacttgctcaagacctt

SEQ ID NO: 1168220 - DNA, 25 bp, Homo sapien
gcagagggccggagagcaagcaggt

SEQ ID NO: 1168221 - DNA, 25 bp, Homo sapien
gaactgaacttgctcaagaccttca

SEQ ID NO: 1168222 - DNA, 25 bp, Homo sapien
tgaactgaacttgctcaagaccttc

SEQ ID NO: 1168223 - DNA, 25 bp, Homo sapien
cggtcctcctcccacatctcacact

SEQ ID NO: 1168224 - DNA, 25 bp, Homo sapien
tcaagagggggcctatgctctccca

SEQ ID NO: 1168225 - DNA, 25 bp, Homo sapien
gggcctatgctctcccacagagcat

SEQ ID NO: 1168226 - DNA, 25 bp, Homo sapien
ctcctctgacacccagttcaagagg

SEQ ID NO: 1168227 - DNA, 25 bp, Homo sapien
tcctcggatgcccttcagatgaatg

SEQ ID NO: 1168228 - DNA, 25 bp, Homo sapien
ctcctcggatgcccttcagatgaat

SEQ ID NO: 1168229 - DNA, 25 bp, Homo sapien
cctgtggactcgcagcaaccatgta

SEQ ID NO: 1168230 - DNA, 25 bp, Homo sapien
ctcgcagcaaccatgtatgatttga

SEQ ID NO: 1168231 - DNA, 25 bp, Homo sapien
gcttcaccaggttggagagttggcc

SEQ ID NO: 1168232 - DNA, 25 bp, Homo sapien
ttcaccaggttggagagttggcccc

SEQ ID NO: 1168233 - DNA, 25 bp, Homo sapien
ctttcccaaggtctaaagtagcagc

SEQ ID NO: 1168234 - DNA, 25 bp, Homo sapien
ccacgtagttgagattgctgttcgg

SEQ ID NO: 1168235 - DNA, 25 bp, Homo sapien
tttcccaaggtctaaagtagcagct

SEQ ID NO: 1168236 - DNA, 25 bp, Homo sapien
ctggttgctgaccacgtagttgaga

SEQ ID NO: 1168237 - DNA, 25 bp, Homo sapien
cttgaatccgtgtcttgaaatcgtg

SEQ ID NO: 1168238 - DNA, 25 bp, Homo sapien
agagtccactccctgggagcaaaat

SEQ ID NO: 1168239 - DNA, 25 bp, Homo sapien
cactccctgggagcaaaattcagag

SEQ ID NO: 1168240 - DNA, 25 bp, Homo sapien
tgaaatcgtgtatgcctccccactg

SEQ ID NO: 1168241 - DNA, 25 bp, Homo sapien
agcgtttgaaagaggatgccaccat

SEQ ID NO: 1168242 - DNA, 25 bp, Homo sapien
gacacttgctggctgagcgtttgaa

SEQ ID NO: 1168243 - DNA, 25 bp, Homo sapien
tgtgacacttgctggctgagcgttt

SEQ ID NO: 1168244 - DNA, 25 bp, Homo sapien
tgagcgtttgaaagaggatgccacc

SEQ ID NO: 1168245 - DNA, 25 bp, Homo sapien
cagacaaggggaagcgggaactgaa

SEQ ID NO: 1168246 - DNA, 25 bp, Homo sapien
agcgggaactgaaccagagctggga

SEQ ID NO: 1168247 - DNA, 25 bp, Homo sapien
gggaagcgggaactgaaccagagct

SEQ ID NO: 1168248 - DNA, 25 bp, Homo sapien
gaagcgggaactgaaccagagctgg

SEQ ID NO: 1168249 - DNA, 25 bp, Homo sapien
cccaagtgtaaggacagcttgggga

SEQ ID NO: 1168250 - DNA, 25 bp, Homo sapien
ccatgtgtaccctgtagaaatgtgg

SEQ ID NO: 1168251 - DNA, 25 bp, Homo sapien
cacagagtacaaccaggccatgtgt

SEQ ID NO: 1168252 - DNA, 25 bp, Homo sapien
tacaaccaggccatgtgtaccctgt

SEQ ID NO: 1168253 - DNA, 25 bp, Homo sapien
ctgctcaatcagacaggctcctctt

SEQ ID NO: 1168254 - DNA, 25 bp, Homo sapien
cagaggtggtcggaattcaccacct

SEQ ID NO: 1168255 - DNA, 25 bp, Homo sapien
tcaggagacatctcagtgatggaga

SEQ ID NO: 1168256 - DNA, 25 bp, Homo sapien
gtggtcggaattcaccacctgctca

SEQ ID NO: 1168257 - DNA, 25 bp, Homo sapien
tcaaactcagcatccggaaaacaga

SEQ ID NO: 1168258 - DNA, 25 bp, Homo sapien
tttctaagacaatccccacctgtgg

SEQ ID NO: 1168259 - DNA, 25 bp, Homo sapien
taggctcagattagcacaggtgatg

SEQ ID NO: 1168260 - DNA, 25 bp, Homo sapien
tataatgtgcactagacagtcctcc

SEQ ID NO: 1168261 - DNA, 25 bp, Homo sapien
gaagcatggccaggtttacaataag

SEQ ID NO: 1168262 - DNA, 25 bp, Homo sapien
tacaataagaagctgataagggagt

SEQ ID NO: 1168263 - DNA, 25 bp, Homo sapien
gacttcaggacatgtatagtcgagg

SEQ ID NO: 1168264 - DNA, 25 bp, Homo sapien
ttcattgtgtccacccctgtttcca

SEQ ID NO: 1168265 - DNA, 25 bp, Homo sapien
taatggacactgatacgcagtcatg

SEQ ID NO: 1168266 - DNA, 25 bp, Homo sapien
agaagatttgcacaccctcagcttt

SEQ ID NO: 1168267 - DNA, 25 bp, Homo sapien
tgatacgcagtcatggccagtcacc

SEQ ID NO: 1168268 - DNA, 25 bp, Homo sapien
tgccccaggtctaatggacactgat

SEQ ID NO: 1168269 - DNA, 25 bp, Homo sapien
tgctctcccaggtcacattcaaatc

SEQ ID NO: 1168270 - DNA, 25 bp, Homo sapien
attcaaatcctttgcggtccctagg

SEQ ID NO: 1168271 - DNA, 25 bp, Homo sapien
ggtccaggggttggcggctgatctc

SEQ ID NO: 1168272 - DNA, 25 bp, Homo sapien
ggctgatctcgatatcccactctgc

SEQ ID NO: 1168273 - DNA, 25 bp, Homo sapien
cagactcctccaaaatctgaggtga

SEQ ID NO: 1168274 - DNA, 25 bp, Homo sapien
caacagactcctccaaaatctgagg

SEQ ID NO: 1168275 - DNA, 25 bp, Homo sapien
agactcctccaaaatctgaggtgac

SEQ ID NO: 1168276 - DNA, 25 bp, Homo sapien
agcccaacagactcctccaaaatct

SEQ ID NO: 1168277 - DNA, 25 bp, Homo sapien
gttgctgccattatgagttctatga

SEQ ID NO: 1168278 - DNA, 25 bp, Homo sapien
gctgccattatgagttctatgagtt

SEQ ID NO: 1168279 - DNA, 25 bp, Homo sapien
agttgctgccattatgagttctatg

SEQ ID NO: 1168280 - DNA, 25 bp, Homo sapien
tgctgccattatgagttctatgagt

SEQ ID NO: 1168281 - DNA, 25 bp, Homo sapien
agtccccacagttcctctgagccat

SEQ ID NO: 1168282 - DNA, 25 bp, Homo sapien
tgtagtccccacagttcctctgagc

SEQ ID NO: 1168283 - DNA, 25 bp, Homo sapien
tgtgtagtccccacagttcctctga

SEQ ID NO: 1168284 - DNA, 25 bp, Homo sapien
ctgtgtagtccccacagttcctctg

SEQ ID NO: 1168285 - DNA, 25 bp, Homo sapien
ccaatgaggattagggatattaggc

SEQ ID NO: 1168286 - DNA, 25 bp, Homo sapien
cccaaagtccagttcaatgtgcagg

SEQ ID NO: 1168287 - DNA, 25 bp, Homo sapien
ccacagtgagattcctgatgctcaa

SEQ ID NO: 1168288 - DNA, 25 bp, Homo sapien
gatattaggcttccaggacatcaga

SEQ ID NO: 1168289 - DNA, 25 bp, Homo sapien
acaccacagatgattgacaacttgc

SEQ ID NO: 1168290 - DNA, 25 bp, Homo sapien
ccagggcacctggttacaccacaga

SEQ ID NO: 1168291 - DNA, 25 bp, Homo sapien
accacagatgattgacaacttgctc

SEQ ID NO: 1168292 - DNA, 25 bp, Homo sapien
ggttacaccacagatgattgacaac

SEQ ID NO: 1168293 - DNA, 25 bp, Homo sapien
ccctggacctgagctgtttgtggca

SEQ ID NO: 1168294 - DNA, 25 bp, Homo sapien
tgcctgagagtgtgctgacttttga

SEQ ID NO: 1168295 - DNA, 25 bp, Homo sapien
cctgcctaaacttgacaagagtttc

SEQ ID NO: 1168296 - DNA, 25 bp, Homo sapien
gtgctgacttttgagccaatctggg

SEQ ID NO: 1168297 - DNA, 25 bp, Homo sapien
tttaatgtgaagctgcgtcagagcc

SEQ ID NO: 1168298 - DNA, 25 bp, Homo sapien
cttgttgcacattgaactcaagtgc

SEQ ID NO: 1168299 - DNA, 25 bp, Homo sapien
actcaagtgcagccacagttctaac

SEQ ID NO: 1168300 - DNA, 25 bp, Homo sapien
ctgactgttctgtctcttttggacc

SEQ ID NO: 1168301 - DNA, 25 bp, Homo sapien
tatccaccccttaattgatgggcat

SEQ ID NO: 1168302 - DNA, 25 bp, Homo sapien
acacacatgcgtatgtatcacattt

SEQ ID NO: 1168303 - DNA, 25 bp, Homo sapien
ctttatccaccccttaattgatggg

SEQ ID NO: 1168304 - DNA, 25 bp, Homo sapien
cacacacacatgcgtatgtatcaca

SEQ ID NO: 1168305 - DNA, 25 bp, Homo sapien
ggtgcactcgttgccagagcagtgt

SEQ ID NO: 1168306 - DNA, 25 bp, Homo sapien
gaaaagatctagaaagtgtcaccaa

SEQ ID NO: 1168307 - DNA, 25 bp, Homo sapien
gattttggtgcactcgttgccagag

SEQ ID NO: 1168308 - DNA, 25 bp, Homo sapien
gtgtcaccaaatactcaacagaagt

SEQ ID NO: 1168309 - DNA, 25 bp, Homo sapien
ccacctcagcctctcaaatagctgg

SEQ ID NO: 1168310 - DNA, 25 bp, Homo sapien
tctgggttcaagcgatcctcccacc

SEQ ID NO: 1168311 - DNA, 25 bp, Homo sapien
gagtggagttcagtggcgtgatctt

SEQ ID NO: 1168312 - DNA, 25 bp, Homo sapien
ggctcactgcagccttgaccttctg

SEQ ID NO: 1168313 - DNA, 25 bp, Homo sapien
gctcctcccagcccaccaaagggag

SEQ ID NO: 1168314 - DNA, 25 bp, Homo sapien
tgtatttctaagattcatccatatt

SEQ ID NO: 1168315 - DNA, 25 bp, Homo sapien
ccatattgttgcgtgttgctatagt

SEQ ID NO: 1168316 - DNA, 25 bp, Homo sapien
aatatctggcttaatgttttcctag

SEQ ID NO: 1168317 - DNA, 25 bp, Homo sapien
taagttaaagaccatattgttgtag

SEQ ID NO: 1168318 - DNA, 25 bp, Homo sapien
tattttcacagtggagacacgtggc

SEQ ID NO: 1168319 - DNA, 25 bp, Homo sapien
tccaagtgtgatcgaaagctgttaa

SEQ ID NO: 1168320 - DNA, 25 bp, Homo sapien
aatggtctagccagggttacaaggg

SEQ ID NO: 1168321 - DNA, 25 bp, Homo sapien
ggctgagcaaaaggtctgcaaatct

SEQ ID NO: 1168322 - DNA, 25 bp, Homo sapien
tttctaccaggaacttacagtcctc

SEQ ID NO: 1168323 - DNA, 25 bp, Homo sapien
tacccaacagctaattgtccaatga

SEQ ID NO: 1168324 - DNA, 25 bp, Homo sapien
cgttgtaagttggaatatattgccc

SEQ ID NO: 1168325 - DNA, 25 bp, Homo sapien
catgaggtgagtcacatttcttggc

SEQ ID NO: 1168326 - DNA, 25 bp, Homo sapien
tgtggccttagaatgccaatctcct

SEQ ID NO: 1168327 - DNA, 25 bp, Homo sapien
ggtctcttccaatttccctgtgcaa

SEQ ID NO: 1168328 - DNA, 25 bp, Homo sapien
atagaaggcattgcttattggctgc

SEQ ID NO: 1168329 - DNA, 25 bp, Homo sapien
taaattttctcaatgctccaatgca

SEQ ID NO: 1168330 - DNA, 25 bp, Homo sapien
tactggttttatcacgaggatgaca

SEQ ID NO: 1168331 - DNA, 25 bp, Homo sapien
aaggatagagacaggattgaagccc

SEQ ID NO: 1168332 - DNA, 25 bp, Homo sapien
tgttcccgcaactcaactatgctgc

SEQ ID NO: 1168333 - DNA, 25 bp, Homo sapien
gaaactactcatgtgaggctgacaa

SEQ ID NO: 1168334 - DNA, 25 bp, Homo sapien
agaggcaggctaccacgccctgcaa

SEQ ID NO: 1168335 - DNA, 25 bp, Homo sapien
ctaggattacagaggcaggctacca

SEQ ID NO: 1168336 - DNA, 25 bp, Homo sapien
agctaggattacagaggcaggctac

SEQ ID NO: 1168337 - DNA, 25 bp, Homo sapien
ttacagaggcaggctaccacgccct

SEQ ID NO: 1168338 - DNA, 25 bp, Homo sapien
gagtcaccgtgagaagtaagttccg

SEQ ID NO: 1168339 - DNA, 25 bp, Homo sapien
caggagtccctgtgtctaatgtgaa

SEQ ID NO: 1168340 - DNA, 25 bp, Homo sapien
tgtgaatctagagatccggcccacc

SEQ ID NO: 1168341 - DNA, 25 bp, Homo sapien
tatggagattatggacttggtgccc

SEQ ID NO: 1168342 - DNA, 25 bp, Homo sapien
cctgtcagtcagttgcaattccata

SEQ ID NO: 1168343 - DNA, 25 bp, Homo sapien
taaatggagagtaaagttgccttcc

SEQ ID NO: 1168344 - DNA, 25 bp, Homo sapien
ctgaatgtccaagctagtgctgcta

SEQ ID NO: 1168345 - DNA, 25 bp, Homo sapien
aatagatcccatccacggaggaaga

SEQ ID NO: 1168346 - DNA, 25 bp, Homo sapien
cgaagctatccatatcccactgaac

SEQ ID NO: 1168347 - DNA, 25 bp, Homo sapien
tctcgaagctatccatatcccactg

SEQ ID NO: 1168348 - DNA, 25 bp, Homo sapien
tgaatctcgaagctatccatatccc

SEQ ID NO: 1168349 - DNA, 25 bp, Homo sapien
gaatctcgaagctatccatatccca

SEQ ID NO: 1168350 - DNA, 25 bp, Homo sapien
gcttcgcagcaatcttgaaggccct

SEQ ID NO: 1168351 - DNA, 25 bp, Homo sapien
aagggcttcgcagcaatcttgaagg

SEQ ID NO: 1168352 - DNA, 25 bp, Homo sapien
gaaggccctcacaagtttcttgtgc

SEQ ID NO: 1168353 - DNA, 25 bp, Homo sapien
tcttgtgccttttgcttattgacat

SEQ ID NO: 1168354 - DNA, 25 bp, Homo sapien
tgcccatacgtaagcccttgccttg

SEQ ID NO: 1168355 - DNA, 25 bp, Homo sapien
gcccatacgtaagcccttgccttgt

SEQ ID NO: 1168356 - DNA, 25 bp, Homo sapien
ccttgccttgtctgtccctgcttac

SEQ ID NO: 1168357 - DNA, 25 bp, Homo sapien
agcccttgccttgtctgtccctgct

SEQ ID NO: 1168358 - DNA, 25 bp, Homo sapien
ttcgtgcaatgtctatgactttctt

SEQ ID NO: 1168359 - DNA, 25 bp, Homo sapien
cgtgcaatgtctatgactttctttc

SEQ ID NO: 1168360 - DNA, 25 bp, Homo sapien
gtgcaatgtctatgactttctttcg

SEQ ID NO: 1168361 - DNA, 25 bp, Homo sapien
gcaatgtctatgactttctttcgtc

SEQ ID NO: 1168362 - DNA, 25 bp, Homo sapien
cgtcgacgacttggagtatgactcc

SEQ ID NO: 1168363 - DNA, 25 bp, Homo sapien
gacgacttggagtatgactccgact

SEQ ID NO: 1168364 - DNA, 25 bp, Homo sapien
cttcgtcgacgacttggagtatgac

SEQ ID NO: 1168365 - DNA, 25 bp, Homo sapien
ctagaccttcgtcgacgacttggag

SEQ ID NO: 1168366 - DNA, 25 bp, Homo sapien
tgttagacgtttggatggtctgcct

SEQ ID NO: 1168367 - DNA, 25 bp, Homo sapien
aaatctgttagacgtttggatggtc

SEQ ID NO: 1168368 - DNA, 25 bp, Homo sapien
tccaaatctgttagacgtttggatg

SEQ ID NO: 1168369 - DNA, 25 bp, Homo sapien
gacgtttggatggtctgccttgttc

SEQ ID NO: 1168370 - DNA, 25 bp, Homo sapien
gagatgacgataaaaaggaggttct

SEQ ID NO: 1168371 - DNA, 25 bp, Homo sapien
tcatccaaaacatgaggtttattca

SEQ ID NO: 1168372 - DNA, 25 bp, Homo sapien
agtttaaagagatgacgataaaaag

SEQ ID NO: 1168373 - DNA, 25 bp, Homo sapien
aaacatgaggtttattcactactac

SEQ ID NO: 1168374 - DNA, 25 bp, Homo sapien
agcaatattcagattgaaaaaaatg

SEQ ID NO: 1168375 - DNA, 25 bp, Homo sapien
gcaatattcagattgaaaaaaatgg

SEQ ID NO: 1168376 - DNA, 25 bp, Homo sapien
atattcagattgaaaaaaatgggtt

SEQ ID NO: 1168377 - DNA, 25 bp, Homo sapien
caatattcagattgaaaaaaatggg

SEQ ID NO: 1168378 - DNA, 25 bp, Homo sapien
tggctttttggtgaagctggttttg

SEQ ID NO: 1168379 - DNA, 25 bp, Homo sapien
ctggctttttggtgaagctggtttt

SEQ ID NO: 1168380 - DNA, 25 bp, Homo sapien
ccataaacactatctgcttcttttt

SEQ ID NO: 1168381 - DNA, 25 bp, Homo sapien
tcattctccataaacactatctgct

SEQ ID NO: 1168382 - DNA, 25 bp, Homo sapien
tgatacagggaattcttttgttaag

SEQ ID NO: 1168383 - DNA, 25 bp, Homo sapien
tttttccaatgttgagatccagatg

SEQ ID NO: 1168384 - DNA, 25 bp, Homo sapien
ctgagggcaaatcgctgctgaaaac

SEQ ID NO: 1168385 - DNA, 25 bp, Homo sapien
ggcaaatcgctgctgaaaacattat

SEQ ID NO: 1168386 - DNA, 25 bp, Homo sapien
gagggcaaatcgctgctgaaaacat

SEQ ID NO: 1168387 - DNA, 25 bp, Homo sapien
tctgagggcaaatcgctgctgaaaa

SEQ ID NO: 1168388 - DNA, 25 bp, Homo sapien
cctgagctctatttaacatgctcat

SEQ ID NO: 1168389 - DNA, 25 bp, Homo sapien
tgtacttcctgtgaactggccagga

SEQ ID NO: 1168390 - DNA, 25 bp, Homo sapien
actggccaggaatagagttcagctg

SEQ ID NO: 1168391 - DNA, 25 bp, Homo sapien
tgcccgttcactcattgctgtagag

SEQ ID NO: 1168392 - DNA, 25 bp, Homo sapien
ttgggcaccagtattggccaactgt

SEQ ID NO: 1168393 - DNA, 25 bp, Homo sapien
gggcaccagtattggccaactgttc

SEQ ID NO: 1168394 - DNA, 25 bp, Homo sapien
tgggcaccagtattggccaactgtt

SEQ ID NO: 1168395 - DNA, 25 bp, Homo sapien
ggcaccagtattggccaactgttct

SEQ ID NO: 1168396 - DNA, 25 bp, Homo sapien
atcaactaggatgggttccttattg

SEQ ID NO: 1168397 - DNA, 25 bp, Homo sapien
tcggtctgtcttaaaatcaactagg

SEQ ID NO: 1168398 - DNA, 25 bp, Homo sapien
tttcggtctgtcttaaaatcaacta

SEQ ID NO: 1168399 - DNA, 25 bp, Homo sapien
aaatcaactaggatgggttccttat

SEQ ID NO: 1168400 - DNA, 25 bp, Homo sapien
tgtttgcctggcagatctttcattg

SEQ ID NO: 1168401 - DNA, 25 bp, Homo sapien
gtttgcctggcagatctttcattgc

SEQ ID NO: 1168402 - DNA, 25 bp, Homo sapien
atgtttgcctggcagatctttcatt

SEQ ID NO: 1168403 - DNA, 25 bp, Homo sapien
agggccactatcatggaccaataga

SEQ ID NO: 1168404 - DNA, 25 bp, Homo sapien
gggccactatcatggaccaatagaa

SEQ ID NO: 1168405 - DNA, 25 bp, Homo sapien
cagggccactatcatggaccaatag

SEQ ID NO: 1168406 - DNA, 25 bp, Homo sapien
cctttggtacaaggcccattgcttg

SEQ ID NO: 1168407 - DNA, 25 bp, Homo sapien
cccattgcttgaagaaccacagtag

SEQ ID NO: 1168408 - DNA, 25 bp, Homo sapien
tggcattagccatgaggtcctttgg

SEQ ID NO: 1168409 - DNA, 25 bp, Homo sapien
gcttgaagaaccacagtagctgctg

SEQ ID NO: 1168410 - DNA, 25 bp, Homo sapien
tgcacagcccttcactgattacagg

SEQ ID NO: 1168411 - DNA, 25 bp, Homo sapien
ttaacaggaatgcaggacttagtgc

SEQ ID NO: 1168412 - DNA, 25 bp, Homo sapien
tctatctaggtgtagctgaaattca

SEQ ID NO: 1168413 - DNA, 25 bp, Homo sapien
tactcccttcttatgacccaagtgg

SEQ ID NO: 1168414 - DNA, 25 bp, Homo sapien
ctatcagaccctaaaaattaacata

SEQ ID NO: 1168415 - DNA, 25 bp, Homo sapien
gcatatgaataccactgtaatacac

SEQ ID NO: 1168416 - DNA, 25 bp, Homo sapien
tactaattcaacttcagcgcttgat

SEQ ID NO: 1168417 - DNA, 25 bp, Homo sapien
ccatctggtctagggcttttgtgtt

SEQ ID NO: 1168418 - DNA, 25 bp, Homo sapien
caccaaagtatgcatatagttgcaa

SEQ ID NO: 1168419 - DNA, 25 bp, Homo sapien
gcatcgacttgagtgtaaacataac

SEQ ID NO: 1168420 - DNA, 25 bp, Homo sapien
taatgaccactagcttccaagcatt

SEQ ID NO: 1168421 - DNA, 25 bp, Homo sapien
aggtaatgaccactagcttccaagc

SEQ ID NO: 1168422 - DNA, 25 bp, Homo sapien
ggtaatgaccactagcttccaagca

SEQ ID NO: 1168423 - DNA, 25 bp, Homo sapien
gaggtaatgaccactagcttccaag

SEQ ID NO: 1168424 - DNA, 25 bp, Homo sapien
cattgataatggtgtgcaaggtggc

SEQ ID NO: 1168425 - DNA, 25 bp, Homo sapien
ataatggtgtgcaaggtggcatgca

SEQ ID NO: 1168426 - DNA, 25 bp, Homo sapien
gctgcattgataatggtgtgcaagg

SEQ ID NO: 1168427 - DNA, 25 bp, Homo sapien
gcatcctcattgctgcattgataat

SEQ ID NO: 1168428 - DNA, 25 bp, Homo sapien
ggctcaagcaatgtattgaatttta

SEQ ID NO: 1168429 - DNA, 25 bp, Homo sapien
tgctgaggtgtacaaacatcagtgg

SEQ ID NO: 1168430 - DNA, 25 bp, Homo sapien
aggtgtacaaacatcagtggctccc

SEQ ID NO: 1168431 - DNA, 25 bp, Homo sapien
ccaaaacatatcagggtgacagctg

SEQ ID NO: 1168432 - DNA, 25 bp, Homo sapien
tgacagctgctgaggtgtacaaaca

SEQ ID NO: 1168433 - DNA, 25 bp, Homo sapien
ggcttggatcttttgctgacctcaa

SEQ ID NO: 1168434 - DNA, 25 bp, Homo sapien
aactgcattcgggtatctaatagac

SEQ ID NO: 1168435 - DNA, 25 bp, Homo sapien
tgttggacatcctcaaagttgatac

SEQ ID NO: 1168436 - DNA, 25 bp, Homo sapien
taacatcaggtgtttaacaggcatc

SEQ ID NO: 1168437 - DNA, 25 bp, Homo sapien
cctgaagggctgtaaggacttctta

SEQ ID NO: 1168438 - DNA, 25 bp, Homo sapien
cccagggctacttttccattatcag

SEQ ID NO: 1168439 - DNA, 25 bp, Homo sapien
gctgccgaggctgttgctgttgatc

SEQ ID NO: 1168440 - DNA, 25 bp, Homo sapien
catgggatgcaatcatgcttgggct

SEQ ID NO: 1168441 - DNA, 25 bp, Homo sapien
tgctgcgcagcagtcctttagttta

SEQ ID NO: 1168442 - DNA, 25 bp, Homo sapien
aattctttgccaaggaggacggtat

SEQ ID NO: 1168443 - DNA, 25 bp, Homo sapien
attaggttccatttgccgatttttg

SEQ ID NO: 1168444 - DNA, 25 bp, Homo sapien
cctctgatatcttctagagatttta

SEQ ID NO: 1168445 - DNA, 25 bp, Homo sapien
ccatgttatagatctgccagcacct

SEQ ID NO: 1168446 - DNA, 25 bp, Homo sapien
tatagcttttcctctgtcgctggcg

SEQ ID NO: 1168447 - DNA, 25 bp, Homo sapien
ctgccagcaccttttatagcttttc

SEQ ID NO: 1168448 - DNA, 25 bp, Homo sapien
gtcgctggcggcatggcttttcatt

SEQ ID NO: 1168449 - DNA, 25 bp, Homo sapien
tccttcttgcaaacatgtgattgag

SEQ ID NO: 1168450 - DNA, 25 bp, Homo sapien
tctttcacttaataagagagggtcc

SEQ ID NO: 1168451 - DNA, 25 bp, Homo sapien
tcacttaataagagagggtccactg

SEQ ID NO: 1168452 - DNA, 25 bp, Homo sapien
ctatatgtggagtccttcttgcaaa

SEQ ID NO: 1168453 - DNA, 25 bp, Homo sapien
tcatcaatgtcagggaatcgcaagt

SEQ ID NO: 1168454 - DNA, 25 bp, Homo sapien
atcgcaagtgaaagatcccggtggg

SEQ ID NO: 1168455 - DNA, 25 bp, Homo sapien
taagtaagctggctatagcaggctt

SEQ ID NO: 1168456 - DNA, 25 bp, Homo sapien
gctggctatagcaggcttcatcaat

SEQ ID NO: 1168457 - DNA, 25 bp, Homo sapien
tactttagatccaacgagaaagggc

SEQ ID NO: 1168458 - DNA, 25 bp, Homo sapien
tccatattactttagatccaacgag

SEQ ID NO: 1168459 - DNA, 25 bp, Homo sapien
gatccaacgagaaagggcagtgtgt

SEQ ID NO: 1168460 - DNA, 25 bp, Homo sapien
tttagatccaacgagaaagggcagt

SEQ ID NO: 1168461 - DNA, 25 bp, Homo sapien
tagaccagcagaatgtaatgttgca

SEQ ID NO: 1168462 - DNA, 25 bp, Homo sapien
ggcatgggaatactaagaggtgtcc

SEQ ID NO: 1168463 - DNA, 25 bp, Homo sapien
gaggtgtcctgatggatctcctgta

SEQ ID NO: 1168464 - DNA, 25 bp, Homo sapien
gatgatctgggtcaataaccccagc

SEQ ID NO: 1168465 - DNA, 25 bp, Homo sapien
tacctattaggatagctattcccca

SEQ ID NO: 1168466 - DNA, 25 bp, Homo sapien
tgtaaattggttatagctattattg

SEQ ID NO: 1168467 - DNA, 25 bp, Homo sapien
tttcagtataaccaaacatcaggga

SEQ ID NO: 1168468 - DNA, 25 bp, Homo sapien
ggttatagctattattgaaaacagt

SEQ ID NO: 1168469 - DNA, 25 bp, Homo sapien
atctttcagtttgccgtaaagggat

SEQ ID NO: 1168470 - DNA, 25 bp, Homo sapien
tatctttcagtttgccgtaaaggga

SEQ ID NO: 1168471 - DNA, 25 bp, Homo sapien
gaaatcttggagtatctttcagttt

SEQ ID NO: 1168472 - DNA, 25 bp, Homo sapien
aatgaccagaagtagtgtccagagc

SEQ ID NO: 1168473 - DNA, 25 bp, Homo sapien
tgaccagaagtagtgtccagagcag

SEQ ID NO: 1168474 - DNA, 25 bp, Homo sapien
gaccagaagtagtgtccagagcagc

SEQ ID NO: 1168475 - DNA, 25 bp, Homo sapien
caatgaccagaagtagtgtccagag

SEQ ID NO: 1168476 - DNA, 25 bp, Homo sapien
cttttgccctctggaatgaccgcag

SEQ ID NO: 1168477 - DNA, 25 bp, Homo sapien
ggtctccaggagcaccccagacaca

SEQ ID NO: 1168478 - DNA, 25 bp, Homo sapien
gctgggtctccaggagcaccccaga

SEQ ID NO: 1168479 - DNA, 25 bp, Homo sapien
cttcaaccgcctggccccctgaggg

SEQ ID NO: 1168480 - DNA, 25 bp, Homo sapien
tccaggagcaccccagacacaggga

SEQ ID NO: 1168481 - DNA, 25 bp, Homo sapien
gtgtcctttcggtgccaggagaacg

SEQ ID NO: 1168482 - DNA, 25 bp, Homo sapien
cgtgtcctttcggtgccaggagaac

SEQ ID NO: 1168483 - DNA, 25 bp, Homo sapien
gggctccgactctgctcttggggaa

SEQ ID NO: 1168484 - DNA, 25 bp, Homo sapien
gggggctccgactctgctcttgggg

SEQ ID NO: 1168485 - DNA, 25 bp, Homo sapien
agggggctccgactctgctcttggg

SEQ ID NO: 1168486 - DNA, 25 bp, Homo sapien
ggggctccgactctgctcttgggga

SEQ ID NO: 1168487 - DNA, 25 bp, Homo sapien
acattcagcagcgtgctctgaacgg

SEQ ID NO: 1168488 - DNA, 25 bp, Homo sapien
tgacattcagcagcgtgctctgaac

SEQ ID NO: 1168489 - DNA, 25 bp, Homo sapien
agtgacattcagcagcgtgctctga

SEQ ID NO: 1168490 - DNA, 25 bp, Homo sapien
cattcagcagcgtgctctgaacggg

SEQ ID NO: 1168491 - DNA, 25 bp, Homo sapien
tgctggtctaaccctgcaggggtgc

SEQ ID NO: 1168492 - DNA, 25 bp, Homo sapien
gcacctgctggtctaaccctgcagg

SEQ ID NO: 1168493 - DNA, 25 bp, Homo sapien
tcgcacctgctggtctaaccctgca

SEQ ID NO: 1168494 - DNA, 25 bp, Homo sapien
cgcacctgctggtctaaccctgcag

SEQ ID NO: 1168495 - DNA, 25 bp, Homo sapien
ctgaggagaagacgcgacactggaa

SEQ ID NO: 1168496 - DNA, 25 bp, Homo sapien
cccagagtcacattttcatggtaac

SEQ ID NO: 1168497 - DNA, 25 bp, Homo sapien
gctgggatccccagccattgtcggc

SEQ ID NO: 1168498 - DNA, 25 bp, Homo sapien
caccaaaacagaatgggtgcagacg

SEQ ID NO: 1168499 - DNA, 25 bp, Homo sapien
tagttcccagaatgctctgcggcga

SEQ ID NO: 1168500 - DNA, 25 bp, Homo sapien
tgaggaccattaatcaaacggactt

SEQ ID NO: 1168501 - DNA, 25 bp, Homo sapien
aggaccattaatcaaacggactttg

SEQ ID NO: 1168502 - DNA, 25 bp, Homo sapien
tggtgaggaccattaatcaaacgga

SEQ ID NO: 1168503 - DNA, 25 bp, Homo sapien
tgcagtggtgaggaccattaatcaa

SEQ ID NO: 1168504 - DNA, 25 bp, Homo sapien
tgtgcttggctgctcaacagcccag

SEQ ID NO: 1168505 - DNA, 25 bp, Homo sapien
aatgaacacaggttgggcctcttct

SEQ ID NO: 1168506 - DNA, 25 bp, Homo sapien
gaacacaggttgggcctcttctgcc

SEQ ID NO: 1168507 - DNA, 25 bp, Homo sapien
ctgaatgaacacaggttgggcctct

SEQ ID NO: 1168508 - DNA, 25 bp, Homo sapien
tgaacacaggttgggcctcttctgc

SEQ ID NO: 1168509 - DNA, 25 bp, Homo sapien
cttctgtcctatggcacagggcaac

SEQ ID NO: 1168510 - DNA, 25 bp, Homo sapien
catgcccacagtcaaaggtctcaat

SEQ ID NO: 1168511 - DNA, 25 bp, Homo sapien
tcatgcccacagtcaaaggtctcaa

SEQ ID NO: 1168512 - DNA, 25 bp, Homo sapien
atgcccacagtcaaaggtctcaatt

SEQ ID NO: 1168513 - DNA, 25 bp, Homo sapien
aagtaatggtgttgcattgagcaca

SEQ ID NO: 1168514 - DNA, 25 bp, Homo sapien
gaagtaatggtgttgcattgagcac

SEQ ID NO: 1168515 - DNA, 25 bp, Homo sapien
cattgagcacatttttgcgtagagt

SEQ ID NO: 1168516 - DNA, 25 bp, Homo sapien
catttttgcgtagagtggttgagtg

SEQ ID NO: 1168517 - DNA, 25 bp, Homo sapien
taaagtccatctggggttgtggtgc

SEQ ID NO: 1168518 - DNA, 25 bp, Homo sapien
tgaggccagtgaggatatgggcctg

SEQ ID NO: 1168519 - DNA, 25 bp, Homo sapien
agatcttcaaagagtattaagcaag

SEQ ID NO: 1168520 - DNA, 25 bp, Homo sapien
atcttcaaagagtattaagcaagaa

SEQ ID NO: 1168521 - DNA, 25 bp, Homo sapien
ggcttctaccttcccttaagtctgc

SEQ ID NO: 1168522 - DNA, 25 bp, Homo sapien
gactcatagagtgtgttgcatcatg

SEQ ID NO: 1168523 - DNA, 25 bp, Homo sapien
tcaacatgtacctctgattaaacag

SEQ ID NO: 1168524 - DNA, 25 bp, Homo sapien
agtctgcactcccaaagctagtaaa

SEQ ID NO: 1168525 - DNA, 25 bp, Homo sapien
gaacagaggcctatgagatgcagac

SEQ ID NO: 1168526 - DNA, 25 bp, Homo sapien
ttgaggactgcacacagaagaccat

SEQ ID NO: 1168527 - DNA, 25 bp, Homo sapien
gagtttctgaaagtccatcgggcag

SEQ ID NO: 1168528 - DNA, 25 bp, Homo sapien
aaatccatccaccaaaggccagagg

SEQ ID NO: 1168529 - DNA, 25 bp, Homo sapien
catctataatgatagactgtacctc

SEQ ID NO: 1168530 - DNA, 25 bp, Homo sapien
tctataatgatagactgtacctcca

SEQ ID NO: 1168531 - DNA, 25 bp, Homo sapien
atctataatgatagactgtacctcc

SEQ ID NO: 1168532 - DNA, 25 bp, Homo sapien
ctataatgatagactgtacctccat

SEQ ID NO: 1168533 - DNA, 25 bp, Homo sapien
tggttcatagacaaccattttcttg

SEQ ID NO: 1168534 - DNA, 25 bp, Homo sapien
ttcatagacaaccattttcttgctg

SEQ ID NO: 1168535 - DNA, 25 bp, Homo sapien
ggttcatagacaaccattttcttgc

SEQ ID NO: 1168536 - DNA, 25 bp, Homo sapien
catagacaaccattttcttgctgtg

SEQ ID NO: 1168537 - DNA, 25 bp, Homo sapien
tttacaccagggatcgagacagcag

SEQ ID NO: 1168538 - DNA, 25 bp, Homo sapien
gcaactggacacagggctaaagggt

SEQ ID NO: 1168539 - DNA, 25 bp, Homo sapien
cagcaatagaaggtgaagccctccc

SEQ ID NO: 1168540 - DNA, 25 bp, Homo sapien
gctaaagggtgctcatcactcagtg

SEQ ID NO: 1168541 - DNA, 25 bp, Homo sapien
tagccctaaaggaaccattatcatt

SEQ ID NO: 1168542 - DNA, 25 bp, Homo sapien
taaaggaaccattatcattactgca

SEQ ID NO: 1168543 - DNA, 25 bp, Homo sapien
tcctccttgggtccagttctggaag

SEQ ID NO: 1168544 - DNA, 25 bp, Homo sapien
cagttctggaagtttagccctaaag

SEQ ID NO: 1168545 - DNA, 25 bp, Homo sapien
cttgggttgaatctcatcaaaacag

SEQ ID NO: 1168546 - DNA, 25 bp, Homo sapien
tcccacaacatccacttggctctcg

SEQ ID NO: 1168547 - DNA, 25 bp, Homo sapien
ttcttgggttgaatctcatcaaaac

SEQ ID NO: 1168548 - DNA, 25 bp, Homo sapien
caacatccacttggctctcgggaaa

SEQ ID NO: 1168549 - DNA, 25 bp, Homo sapien
gaaggtcactgacgtctgaggtttg

SEQ ID NO: 1168550 - DNA, 25 bp, Homo sapien
acgttgttttacttcttgctgtgga

SEQ ID NO: 1168551 - DNA, 25 bp, Homo sapien
tgtctcttctgacacattcttctgc

SEQ ID NO: 1168552 - DNA, 25 bp, Homo sapien
tgccggaatgccctgacattctgct

SEQ ID NO: 1168553 - DNA, 25 bp, Homo sapien
gggcgggggcagttctacactctcc

SEQ ID NO: 1168554 - DNA, 25 bp, Homo sapien
gttctacactctccttggagccaaa

SEQ ID NO: 1168555 - DNA, 25 bp, Homo sapien
cagttctacactctccttggagcca

SEQ ID NO: 1168556 - DNA, 25 bp, Homo sapien
gggcagttctacactctccttggag

SEQ ID NO: 1168557 - DNA, 25 bp, Homo sapien
tgacgtctactctccctccgacggc

SEQ ID NO: 1168558 - DNA, 25 bp, Homo sapien
cctgccctccgattctctttatctc

SEQ ID NO: 1168559 - DNA, 25 bp, Homo sapien
gttggcgagcgagccagaggagcgg

SEQ ID NO: 1168560 - DNA, 25 bp, Homo sapien
cactcacgcgcacaaactcatttcc

SEQ ID NO: 1168561 - DNA, 25 bp, Homo sapien
gagaaagtatcggagagagtgagga

SEQ ID NO: 1168562 - DNA, 25 bp, Homo sapien
ttgggagaaagtatcggagagagtg

SEQ ID NO: 1168563 - DNA, 25 bp, Homo sapien
ggagagagtgaggatccagacgagg

SEQ ID NO: 1168564 - DNA, 25 bp, Homo sapien
agagagtgaggatccagacgaggag

SEQ ID NO: 1168565 - DNA, 25 bp, Homo sapien
tgccaagtaaactggtccagaggcc

SEQ ID NO: 1168566 - DNA, 25 bp, Homo sapien
gtcaaagaaccctccaggagattgc

SEQ ID NO: 1168567 - DNA, 25 bp, Homo sapien
caggagattgccaagtaaactggtc

SEQ ID NO: 1168568 - DNA, 25 bp, Homo sapien
caaagaaccctccaggagattgcca

SEQ ID NO: 1168569 - DNA, 25 bp, Homo sapien
cagcaacatcttggttccggaagtc

SEQ ID NO: 1168570 - DNA, 25 bp, Homo sapien
tgcacactgctatcacggcaccaat

SEQ ID NO: 1168571 - DNA, 25 bp, Homo sapien
ccagcagtcttcatgtgtgtatatc

SEQ ID NO: 1168572 - DNA, 25 bp, Homo sapien
aagtctggcccatctggtaaggctc

SEQ ID NO: 1168573 - DNA, 25 bp, Homo sapien
tggtgaagggagacttcccagatgt

SEQ ID NO: 1168574 - DNA, 25 bp, Homo sapien
tcacttcgcccactgcctggtgaag

SEQ ID NO: 1168575 - DNA, 25 bp, Homo sapien
tatttggctcaaactgacattaaaa

SEQ ID NO: 1168576 - DNA, 25 bp, Homo sapien
ggcacgtcagtctgggatccaacat

SEQ ID NO: 1168577 - DNA, 25 bp, Homo sapien
taactgctggcctttgatctggcta

SEQ ID NO: 1168578 - DNA, 25 bp, Homo sapien
cccagaaggtttcggttgtcagtct

SEQ ID NO: 1168579 - DNA, 25 bp, Homo sapien
aaatcagtggctgggtgttactcgg

SEQ ID NO: 1168580 - DNA, 25 bp, Homo sapien
tgttactcgggtcaaggctcttcct

SEQ ID NO: 1168581 - DNA, 25 bp, Homo sapien
gcagtcaccctaactcctgacaatt

SEQ ID NO: 1168582 - DNA, 25 bp, Homo sapien
caggcctagggcttctttgcagtca

SEQ ID NO: 1168583 - DNA, 25 bp, Homo sapien
tctgggaagtattaggctgggacct

SEQ ID NO: 1168584 - DNA, 25 bp, Homo sapien
cctgacaattctgacccagggtgaa

SEQ ID NO: 1168585 - DNA, 25 bp, Homo sapien
tcccggggcttcaccagcttcacca

SEQ ID NO: 1168586 - DNA, 25 bp, Homo sapien
cccggggcttcaccagcttcaccat

SEQ ID NO: 1168587 - DNA, 25 bp, Homo sapien
aggtctctcccggggcttcaccagc

SEQ ID NO: 1168588 - DNA, 25 bp, Homo sapien
ctgcccacaggtctctcccggggct

SEQ ID NO: 1168589 - DNA, 25 bp, Homo sapien
taacatcacaggagcagagctatgc

SEQ ID NO: 1168590 - DNA, 25 bp, Homo sapien
ggtgttcccaagtcatccgaatgaa

SEQ ID NO: 1168591 - DNA, 25 bp, Homo sapien
tataggctgagggtcttagatctgc

SEQ ID NO: 1168592 - DNA, 25 bp, Homo sapien
cccaagttaagtgccctgagtgaaa

SEQ ID NO: 1168593 - DNA, 25 bp, Homo sapien
gggtgttatgcttggggcctctctc

SEQ ID NO: 1168594 - DNA, 25 bp, Homo sapien
gcctctctcatagccatcagcccct

SEQ ID NO: 1168595 - DNA, 25 bp, Homo sapien
tatgcttggggcctctctcatagcc

SEQ ID NO: 1168596 - DNA, 25 bp, Homo sapien
tggggcctctctcatagccatcagc

SEQ ID NO: 1168597 - DNA, 25 bp, Homo sapien
tgggattcccagacttgggactttc

SEQ ID NO: 1168598 - DNA, 25 bp, Homo sapien
tctctgggattcccagacttgggac

SEQ ID NO: 1168599 - DNA, 25 bp, Homo sapien
caattcaggactaatttctctggga

SEQ ID NO: 1168600 - DNA, 25 bp, Homo sapien
tcaattcaggactaatttctctggg

SEQ ID NO: 1168601 - DNA, 25 bp, Homo sapien
gagagagacctgactggtttcaccc

SEQ ID NO: 1168602 - DNA, 25 bp, Homo sapien
tgcaggagcttaacaacccactatg

SEQ ID NO: 1168603 - DNA, 25 bp, Homo sapien
ggaaaaatgcttatcccgggccaca

SEQ ID NO: 1168604 - DNA, 25 bp, Homo sapien
gggaacatcatcttcccggaggtga

SEQ ID NO: 1168605 - DNA, 25 bp, Homo sapien
ggacacaacttgcactttttgccct

SEQ ID NO: 1168606 - DNA, 25 bp, Homo sapien
ctagggacacaacttgcactttttg

SEQ ID NO: 1168607 - DNA, 25 bp, Homo sapien
aaggcataaccttccaggccatgac

SEQ ID NO: 1168608 - DNA, 25 bp, Homo sapien
ttgcatttgtttggcctgcttcatg

SEQ ID NO: 1168609 - DNA, 25 bp, Homo sapien
taacagggcctgtcattgctccact

SEQ ID NO: 1168610 - DNA, 25 bp, Homo sapien
tccagaatgtgagacccagtgacag

SEQ ID NO: 1168611 - DNA, 25 bp, Homo sapien
gaacttgaggaggacccatctgact

SEQ ID NO: 1168612 - DNA, 25 bp, Homo sapien
gaggcggctacaaaggaacaggctt

SEQ ID NO: 1168613 - DNA, 25 bp, Homo sapien
tgctcttggctgcatctcttcccgc

SEQ ID NO: 1168614 - DNA, 25 bp, Homo sapien
tgcttctcctcttcggtgctgctct

SEQ ID NO: 1168615 - DNA, 25 bp, Homo sapien
atctcttcccgcctggcctcgtctt

SEQ ID NO: 1168616 - DNA, 25 bp, Homo sapien
ctcgtcttgctctgtttatcttctc

SEQ ID NO: 1168617 - DNA, 25 bp, Homo sapien
cctatagagctaaaaccctggtgat

SEQ ID NO: 1168618 - DNA, 25 bp, Homo sapien
tgcgacggcctggagtagaacccag

SEQ ID NO: 1168619 - DNA, 25 bp, Homo sapien
gagcaggttcggtttgcaggtcact

SEQ ID NO: 1168620 - DNA, 25 bp, Homo sapien
cacaaagctaagatatgcgacggcc

SEQ ID NO: 1168621 - DNA, 25 bp, Homo sapien
tcttaacaatgggattatcgtccac

SEQ ID NO: 1168622 - DNA, 25 bp, Homo sapien
gatgttcagtgcaacatgagtcagc

SEQ ID NO: 1168623 - DNA, 25 bp, Homo sapien
gacagcctctaccacataggacagg

SEQ ID NO: 1168624 - DNA, 25 bp, Homo sapien
cactttggaccaggatgagcagatg

SEQ ID NO: 1168625 - DNA, 25 bp, Homo sapien
ttgtttcccattacagccttcaatt

SEQ ID NO: 1168626 - DNA, 25 bp, Homo sapien
gtttcccattacagccttcaattcc

SEQ ID NO: 1168627 - DNA, 25 bp, Homo sapien
cagccttcaattcccttttcgttcg

SEQ ID NO: 1168628 - DNA, 25 bp, Homo sapien
ccattacagccttcaattccctttt

SEQ ID NO: 1168629 - DNA, 25 bp, Homo sapien
gggactggaactgggctcttctgac

SEQ ID NO: 1168630 - DNA, 25 bp, Homo sapien
cacctgagaagtaccactgggcagt

SEQ ID NO: 1168631 - DNA, 25 bp, Homo sapien
gagtacctactgcatccctgtgaac

SEQ ID NO: 1168632 - DNA, 25 bp, Homo sapien
tccaagcctcatggcagtgcgtgtg

SEQ ID NO: 1168633 - DNA, 25 bp, Homo sapien
ttacaccgtgttagtccagatggtc

SEQ ID NO: 1168634 - DNA, 25 bp, Homo sapien
gttacaccgtgttagtccagatggt

SEQ ID NO: 1168635 - DNA, 25 bp, Homo sapien
ggaaaggtctagaagccctctcgaa

SEQ ID NO: 1168636 - DNA, 25 bp, Homo sapien
tgaaaaccataagcatcaggaggcc

SEQ ID NO: 1168637 - DNA, 25 bp, Homo sapien
caggaggcctcaggtataatccagc

SEQ ID NO: 1168638 - DNA, 25 bp, Homo sapien
gactgctttgagagaacttacacca

SEQ ID NO: 1168639 - DNA, 25 bp, Homo sapien
caacatctaggccatttggaaagaa

SEQ ID NO: 1168640 - DNA, 25 bp, Homo sapien
ggtagcaacatctaggccatttgga

SEQ ID NO: 1168641 - DNA, 25 bp, Homo sapien
cacaggtagcaacatctaggccatt

SEQ ID NO: 1168642 - DNA, 25 bp, Homo sapien
caacacaggtagcaacatctaggcc

SEQ ID NO: 1168643 - DNA, 25 bp, Homo sapien
cacctatgcggataaatgagtggcc

SEQ ID NO: 1168644 - DNA, 25 bp, Homo sapien
ttacgaagttgtctgtgagtggcac

SEQ ID NO: 1168645 - DNA, 25 bp, Homo sapien
cacgggagttgtgagatgtatgcac

SEQ ID NO: 1168646 - DNA, 25 bp, Homo sapien
ccaaggcctctacaggacctgttct

SEQ ID NO: 1168647 - DNA, 25 bp, Homo sapien
ggagacttgttcaccatcacgcaca

SEQ ID NO: 1168648 - DNA, 25 bp, Homo sapien
gttaatgtcctagcatcagcctagg

SEQ ID NO: 1168649 - DNA, 25 bp, Homo sapien
tcacgcacacagtaggtaagggagc

SEQ ID NO: 1168650 - DNA, 25 bp, Homo sapien
ttcagagggactgttatgagcctgg

SEQ ID NO: 1168651 - DNA, 25 bp, Homo sapien
ttgaacttctgaggtccaatttgtt

SEQ ID NO: 1168652 - DNA, 25 bp, Homo sapien
aacttctgaggtccaatttgttcct

SEQ ID NO: 1168653 - DNA, 25 bp, Homo sapien
caatgtaacagtgttctctgaacaa

SEQ ID NO: 1168654 - DNA, 25 bp, Homo sapien
gtaacagtgttctctgaacaagttc

SEQ ID NO: 1168655 - DNA, 25 bp, Homo sapien
ggtgcagcaggtggttaagagcaca

SEQ ID NO: 1168656 - DNA, 25 bp, Homo sapien
agtaataacatcacagagggtgcag

SEQ ID NO: 1168657 - DNA, 25 bp, Homo sapien
gaatagtcgtacctacctcaggttg

SEQ ID NO: 1168658 - DNA, 25 bp, Homo sapien
gagaacagccaatctgcatccattt

SEQ ID NO: 1168659 - DNA, 25 bp, Homo sapien
aactcccctgaactatcagtgttcc

SEQ ID NO: 1168660 - DNA, 25 bp, Homo sapien
aaactcccctgaactatcagtgttc

SEQ ID NO: 1168661 - DNA, 25 bp, Homo sapien
cttgattccttctgtcctgtggttc

SEQ ID NO: 1168662 - DNA, 25 bp, Homo sapien
caccactttcttgattccttctgtc

SEQ ID NO: 1168663 - DNA, 25 bp, Homo sapien
ctgtggttccagcaaaaactggaag

SEQ ID NO: 1168664 - DNA, 25 bp, Homo sapien
ccatccccaccactttcttgattcc

SEQ ID NO: 1168665 - DNA, 25 bp, Homo sapien
tcaattagggtggactcaaagttta

SEQ ID NO: 1168666 - DNA, 25 bp, Homo sapien
tttggacttacacccatcaaataat

SEQ ID NO: 1168667 - DNA, 25 bp, Homo sapien
aaataatcaatttgtaacaggtcaa

SEQ ID NO: 1168668 - DNA, 25 bp, Homo sapien
aggtcaattagggtggactcaaagt

SEQ ID NO: 1168669 - DNA, 25 bp, Homo sapien
acgtgactttgttccactctccctc

SEQ ID NO: 1168670 - DNA, 25 bp, Homo sapien
gaggccacgtgactttgttccactc

SEQ ID NO: 1168671 - DNA, 25 bp, Homo sapien
ggccacgtgactttgttccactctc

SEQ ID NO: 1168672 - DNA, 25 bp, Homo sapien
ccacgtgactttgttccactctccc

SEQ ID NO: 1168673 - DNA, 25 bp, Homo sapien
ctgggtaagatgagtaaggagaggg

SEQ ID NO: 1168674 - DNA, 25 bp, Homo sapien
gtaagatgagtaaggagaggggctc

SEQ ID NO: 1168675 - DNA, 25 bp, Homo sapien
ggtaagatgagtaaggagaggggct

SEQ ID NO: 1168676 - DNA, 25 bp, Homo sapien
gggtaagatgagtaaggagaggggc

SEQ ID NO: 1168677 - DNA, 25 bp, Homo sapien
accgtctggtcagctggctcctggc

SEQ ID NO: 1168678 - DNA, 25 bp, Homo sapien
tgtccagccaccaccgtctggtcag

SEQ ID NO: 1168679 - DNA, 25 bp, Homo sapien
cattgcacaattccagagtagttga

SEQ ID NO: 1168680 - DNA, 25 bp, Homo sapien
ccagagtagttgagcagcacacagg

SEQ ID NO: 1168681 - DNA, 25 bp, Homo sapien
gcgtcgtcagagagctcagcatctg

SEQ ID NO: 1168682 - DNA, 25 bp, Homo sapien
gcctggcactcgtaagaggcgtcgt

SEQ ID NO: 1168683 - DNA, 25 bp, Homo sapien
tccaggttgtactgcccagcgtctg

SEQ ID NO: 1168684 - DNA, 25 bp, Homo sapien
gttgtactgcccagcgtctgcggag

SEQ ID NO: 1168685 - DNA, 25 bp, Homo sapien
agagactgccaggatacagagagac

SEQ ID NO: 1168686 - DNA, 25 bp, Homo sapien
agggcctcgaagtactgaagggtat

SEQ ID NO: 1168687 - DNA, 25 bp, Homo sapien
gactgccaggatacagagagacagg

SEQ ID NO: 1168688 - DNA, 25 bp, Homo sapien
cctcgaagtactgaagggtattggg

SEQ ID NO: 1168689 - DNA, 25 bp, Homo sapien
tgcagtagaatcacagggcctccgt

SEQ ID NO: 1168690 - DNA, 25 bp, Homo sapien
tccgtcaatcctggtgtcctctggg

SEQ ID NO: 1168691 - DNA, 25 bp, Homo sapien
cttcgcattgaaggcccggcatgtg

SEQ ID NO: 1168692 - DNA, 25 bp, Homo sapien
cgtcccggaaccagatgatggtggc

SEQ ID NO: 1168693 - DNA, 25 bp, Homo sapien
gacacgccctatgtccaggtccgtg

SEQ ID NO: 1168694 - DNA, 25 bp, Homo sapien
gcttcggcaagtgaagacacgccct

SEQ ID NO: 1168695 - DNA, 25 bp, Homo sapien
gatggcttcgttcatgcttcggcaa

SEQ ID NO: 1168696 - DNA, 25 bp, Homo sapien
taagcagttggctcacggtggtctc

SEQ ID NO: 1168697 - DNA, 25 bp, Homo sapien
tcaatggacagggtcactgtaggag

SEQ ID NO: 1168698 - DNA, 25 bp, Homo sapien
ctgtagcccaagatctcggggttgg

SEQ ID NO: 1168699 - DNA, 25 bp, Homo sapien
aagatctcggggttggctgtggcct

SEQ ID NO: 1168700 - DNA, 25 bp, Homo sapien
tagcccaagatctcggggttggctg

SEQ ID NO: 1168701 - DNA, 25 bp, Homo sapien
tgggcgtcttcaatcaagaaacccc

SEQ ID NO: 1168702 - DNA, 25 bp, Homo sapien
taatccacatttgtctcatagcgac

SEQ ID NO: 1168703 - DNA, 25 bp, Homo sapien
tgtctcatagcgactctcgtgggcg

SEQ ID NO: 1168704 - DNA, 25 bp, Homo sapien
aagacacaggctccgtgaaaaagga

SEQ ID NO: 1168705 - DNA, 25 bp, Homo sapien
tgtgggtttggggtcaactacaatc

SEQ ID NO: 1168706 - DNA, 25 bp, Homo sapien
caacccagacacaggtaagggtcac

SEQ ID NO: 1168707 - DNA, 25 bp, Homo sapien
gggtcacatcagagccaatgtctgt

SEQ ID NO: 1168708 - DNA, 25 bp, Homo sapien
cacaggtaagggtcacatcagagcc

SEQ ID NO: 1168709 - DNA, 25 bp, Homo sapien
agagcagcctcgggtggggagccag

SEQ ID NO: 1168710 - DNA, 25 bp, Homo sapien
agagagagcagcctcgggtggggag

SEQ ID NO: 1168711 - DNA, 25 bp, Homo sapien
gagagagcagcctcgggtggggagc

SEQ ID NO: 1168712 - DNA, 25 bp, Homo sapien
agagagcagcctcgggtggggagcc

SEQ ID NO: 1168713 - DNA, 25 bp, Homo sapien
tcagccactccgattcgaggcacga

SEQ ID NO: 1168714 - DNA, 25 bp, Homo sapien
cgttcacatagagcggcacctcccg

SEQ ID NO: 1168715 - DNA, 25 bp, Homo sapien
gtgccagcgtctgcctgagtcaccg

SEQ ID NO: 1168716 - DNA, 25 bp, Homo sapien
cgattcgaggcacgatggcccggca

SEQ ID NO: 1168717 - DNA, 25 bp, Homo sapien
tcacccctcacagcatactgcactg

SEQ ID NO: 1168718 - DNA, 25 bp, Homo sapien
tactgcactgcctcactggagatga

SEQ ID NO: 1168719 - DNA, 25 bp, Homo sapien
gggtggtgtgctcccaatgaaacac

SEQ ID NO: 1168720 - DNA, 25 bp, Homo sapien
cttgccaccgtcacccctcacagca

SEQ ID NO: 1168721 - DNA, 25 bp, Homo sapien
actgtatagcgttccagggtcccca

SEQ ID NO: 1168722 - DNA, 25 bp, Homo sapien
cggtgcagttgtagtgagtctgaaa

SEQ ID NO: 1168723 - DNA, 25 bp, Homo sapien
tgagtctgaaagtcggcctccatga

SEQ ID NO: 1168724 - DNA, 25 bp, Homo sapien
gatggtgagcgtggatagcacccca

SEQ ID NO: 1168725 - DNA, 25 bp, Homo sapien
tgtgctccagctccatcagaatgga

SEQ ID NO: 1168726 - DNA, 25 bp, Homo sapien
ctgactatgatgcttggcccctcgc

SEQ ID NO: 1168727 - DNA, 25 bp, Homo sapien
taagctcagtgctggctaaaggcta

SEQ ID NO: 1168728 - DNA, 25 bp, Homo sapien
caaccttggcttgtgtacagggcta

SEQ ID NO: 1168729 - DNA, 25 bp, Homo sapien
cgccggtagaggaagaataccaagg

SEQ ID NO: 1168730 - DNA, 25 bp, Homo sapien
tgagcaggatgctcgcgccgatggt

SEQ ID NO: 1168731 - DNA, 25 bp, Homo sapien
ggaagaataccaaggcgatgaagaa

SEQ ID NO: 1168732 - DNA, 25 bp, Homo sapien
tgcctttgcggcgccggtagaggaa

SEQ ID NO: 1168733 - DNA, 25 bp, Homo sapien
tgggctgcacagggcccatactcac

SEQ ID NO: 1168734 - DNA, 25 bp, Homo sapien
gaatgcatcgtaagtggctctcggt

SEQ ID NO: 1168735 - DNA, 25 bp, Homo sapien
tcatcctcccggtcagaatgcatcg

SEQ ID NO: 1168736 - DNA, 25 bp, Homo sapien
ttcctcagggtcacgtctttgcgac

SEQ ID NO: 1168737 - DNA, 25 bp, Homo sapien
tggccttcatgacccgggttgctgt

SEQ ID NO: 1168738 - DNA, 25 bp, Homo sapien
gaatgaccgcggttattagagatct

SEQ ID NO: 1168739 - DNA, 25 bp, Homo sapien
ccgcggttattagagatctgggatg

SEQ ID NO: 1168740 - DNA, 25 bp, Homo sapien
caggaccagggaagaccgactgagg

SEQ ID NO: 1168741 - DNA, 25 bp, Homo sapien
tgaggaaggagagaatgaccgcggt

SEQ ID NO: 1168742 - DNA, 25 bp, Homo sapien
cgatggtgtcgcagcgcaggtcctg

SEQ ID NO: 1168743 - DNA, 25 bp, Homo sapien
gtcgatggtgtcgcagcgcaggtcc

SEQ ID NO: 1168744 - DNA, 25 bp, Homo sapien
tcgatggtgtcgcagcgcaggtcct

SEQ ID NO: 1168745 - DNA, 25 bp, Homo sapien
catgggcacgcacgttgtagtagcc

SEQ ID NO: 1168746 - DNA, 25 bp, Homo sapien
tacacgtgagtctgcatgcgctgct

SEQ ID NO: 1168747 - DNA, 25 bp, Homo sapien
atcgagtggctgtggcgtacttgcc

SEQ ID NO: 1168748 - DNA, 25 bp, Homo sapien
aatcgctggccgtagtccgagtgct

SEQ ID NO: 1168749 - DNA, 25 bp, Homo sapien
tgagaagaacaagctgtccctgggc

SEQ ID NO: 1168750 - DNA, 25 bp, Homo sapien
gcccacatagggtcggtcatccaaa

SEQ ID NO: 1168751 - DNA, 25 bp, Homo sapien
ttgtttgacacccaagaggctccag

SEQ ID NO: 1168752 - DNA, 25 bp, Homo sapien
caaagctctgtgatcaaggacgcct

SEQ ID NO: 1168753 - DNA, 25 bp, Homo sapien
gattccgttttatggagccctgtgg

SEQ ID NO: 1168754 - DNA, 25 bp, Homo sapien
cagaatttaggatatagggcgggtc

SEQ ID NO: 1168755 - DNA, 25 bp, Homo sapien
tgcttcatgcaaactctgtggctgg

SEQ ID NO: 1168756 - DNA, 25 bp, Homo sapien
cctgacaggttaacgagagggcacg

SEQ ID NO: 1168757 - DNA, 25 bp, Homo sapien
gcctggctcaggtcagacagcacta

SEQ ID NO: 1168758 - DNA, 25 bp, Homo sapien
cagggcctgaagctacctcacagtg

SEQ ID NO: 1168759 - DNA, 25 bp, Homo sapien
ggcaattctcaacatgcacagtggc

SEQ ID NO: 1168760 - DNA, 25 bp, Homo sapien
ttatggcctcgccagggtcaggagc

SEQ ID NO: 1168761 - DNA, 25 bp, Homo sapien
ccaagaatggctgggtagaaaatgt

SEQ ID NO: 1168762 - DNA, 25 bp, Homo sapien
tccccagagttagggtattctcagg

SEQ ID NO: 1168763 - DNA, 25 bp, Homo sapien
gacagcatctgaagagctccaaaag

SEQ ID NO: 1168764 - DNA, 25 bp, Homo sapien
tcagggcccatcgatactcaacaag

SEQ ID NO: 1168765 - DNA, 25 bp, Homo sapien
aacactataacccacgtcgtatagt

SEQ ID NO: 1168766 - DNA, 25 bp, Homo sapien
gtttaacaatttacagccaatcact

SEQ ID NO: 1168767 - DNA, 25 bp, Homo sapien
cactccctgtcagctttttttgcca

SEQ ID NO: 1168768 - DNA, 25 bp, Homo sapien
taaaagagatcacaatcatgcctca

SEQ ID NO: 1168769 - DNA, 25 bp, Homo sapien
aaataataaagaggcccgctcagcc

SEQ ID NO: 1168770 - DNA, 25 bp, Homo sapien
gggaactctccctcagactggtagg

SEQ ID NO: 1168771 - DNA, 25 bp, Homo sapien
gttcagagctcaccccgaagaaagg

SEQ ID NO: 1168772 - DNA, 25 bp, Homo sapien
cacattaagtcttgggataccccag

SEQ ID NO: 1168773 - DNA, 25 bp, Homo sapien
tacagtctcctcactttgaattcga

SEQ ID NO: 1168774 - DNA, 25 bp, Homo sapien
gaattcgaccatcagaagtaatcgc

SEQ ID NO: 1168775 - DNA, 25 bp, Homo sapien
tcatgagaaaaagccggctgccctt

SEQ ID NO: 1168776 - DNA, 25 bp, Homo sapien
tccttctcggaagttacagtctcct

SEQ ID NO: 1168777 - DNA, 25 bp, Homo sapien
cctcgtgcataataagccaggcgtg

SEQ ID NO: 1168778 - DNA, 25 bp, Homo sapien
taccttcttgtctccgagatgggtc

SEQ ID NO: 1168779 - DNA, 25 bp, Homo sapien
cgcgcaggtccggagaatctcaaaa

SEQ ID NO: 1168780 - DNA, 25 bp, Homo sapien
gaggaaggcaaattgcctgcctcgt

SEQ ID NO: 1168781 - DNA, 25 bp, Homo sapien
tggggactgccggcctttcagtgag

SEQ ID NO: 1168782 - DNA, 25 bp, Homo sapien
gactgccggcctttcagtgaggagc

SEQ ID NO: 1168783 - DNA, 25 bp, Homo sapien
gggactgccggcctttcagtgagga

SEQ ID NO: 1168784 - DNA, 25 bp, Homo sapien
ctggggactgccggcctttcagtga

SEQ ID NO: 1168785 - DNA, 25 bp, Homo sapien
tgccccggcacgggattctctgcag

SEQ ID NO: 1168786 - DNA, 25 bp, Homo sapien
gtgggaagccagaaccagaaacaga

SEQ ID NO: 1168787 - DNA, 25 bp, Homo sapien
tttgtgggaagccagaaccagaaac

SEQ ID NO: 1168788 - DNA, 25 bp, Homo sapien
gctgccccggcacgggattctctgc

SEQ ID NO: 1168789 - DNA, 25 bp, Homo sapien
agccaatttcctcggccgggaaatg

SEQ ID NO: 1168790 - DNA, 25 bp, Homo sapien
gggacgcatgcgcacatcgaggctc

SEQ ID NO: 1168791 - DNA, 25 bp, Homo sapien
atttggagcacatgcgcacttcccc

SEQ ID NO: 1168792 - DNA, 25 bp, Homo sapien
tggcctccaacttggaacgccggcg

SEQ ID NO: 1168793 - DNA, 25 bp, Homo sapien
tctctctttctatctgcccttcatc

SEQ ID NO: 1168794 - DNA, 25 bp, Homo sapien
ttcatctgcatctgtatccagccag

SEQ ID NO: 1168795 - DNA, 25 bp, Homo sapien
tctctttctatctgcccttcatctg

SEQ ID NO: 1168796 - DNA, 25 bp, Homo sapien
atctgcatctgtatccagccaggtc

SEQ ID NO: 1168797 - DNA, 25 bp, Homo sapien
tgctgccagttgaaaagggaagcat

SEQ ID NO: 1168798 - DNA, 25 bp, Homo sapien
tcaaagtgctgccagttgaaaaggg

SEQ ID NO: 1168799 - DNA, 25 bp, Homo sapien
aagtgctgccagttgaaaagggaag

SEQ ID NO: 1168800 - DNA, 25 bp, Homo sapien
tgccaaaattttggtagtgtcttta

SEQ ID NO: 1168801 - DNA, 25 bp, Homo sapien
taaccttttgactgatctcctgaag

SEQ ID NO: 1168802 - DNA, 25 bp, Homo sapien
tctttggcaactcagaacctgggct

SEQ ID NO: 1168803 - DNA, 25 bp, Homo sapien
ttctatatttccaccgtcaccatca

SEQ ID NO: 1168804 - DNA, 25 bp, Homo sapien
cctgaagtagcattcttgggtagaa

SEQ ID NO: 1168805 - DNA, 25 bp, Homo sapien
tgggacgctttacaaccattattta

SEQ ID NO: 1168806 - DNA, 25 bp, Homo sapien
gacataaggttgtgtctgtgttaca

SEQ ID NO: 1168807 - DNA, 25 bp, Homo sapien
ggagactttgggtcaacgtgtggga

SEQ ID NO: 1168808 - DNA, 25 bp, Homo sapien
aagcaggacataaggttgtgtctgt

SEQ ID NO: 1168809 - DNA, 25 bp, Homo sapien
gcttgccggcggtttgctgcttctg

SEQ ID NO: 1168810 - DNA, 25 bp, Homo sapien
gcgccgccgctcacttcagtaggtt

SEQ ID NO: 1168811 - DNA, 25 bp, Homo sapien
tagctgtgcgagctgcaaagaggtc

SEQ ID NO: 1168812 - DNA, 25 bp, Homo sapien
gaagggcgccctcgcccttagctgt

SEQ ID NO: 1168813 - DNA, 25 bp, Homo sapien
cagcgcttccccaagcctggaggag

SEQ ID NO: 1168814 - DNA, 25 bp, Homo sapien
tcggtgcgcgtccagctgctattgg

SEQ ID NO: 1168815 - DNA, 25 bp, Homo sapien
gccctgggaccaaggcttcagagag

SEQ ID NO: 1168816 - DNA, 25 bp, Homo sapien
gacggtgtccgagtcgttgctccag

SEQ ID NO: 1168817 - DNA, 25 bp, Homo sapien
tctcccactgctggtcgctgaacgt

SEQ ID NO: 1168818 - DNA, 25 bp, Homo sapien
aggataagcgtagcattttggcgaa

SEQ ID NO: 1168819 - DNA, 25 bp, Homo sapien
ccctggtgaagctgcttcgataaac

SEQ ID NO: 1168820 - DNA, 25 bp, Homo sapien
gcattttggcgaattccttcacgtc

SEQ ID NO: 1168821 - DNA, 25 bp, Homo sapien
aagcgtagcattttggcgaattcct

SEQ ID NO: 1168822 - DNA, 25 bp, Homo sapien
aagaagttatttgaggcgttcccag

SEQ ID NO: 1168823 - DNA, 25 bp, Homo sapien
tgaatggccaagtttacccaaagtg

SEQ ID NO: 1168824 - DNA, 25 bp, Homo sapien
caggtgccattaaggagccactgca

SEQ ID NO: 1168825 - DNA, 25 bp, Homo sapien
cagttccgacttccctgactcaagg

SEQ ID NO: 1168826 - DNA, 25 bp, Homo sapien
tggaaaagcccgtttggagccctga

SEQ ID NO: 1168827 - DNA, 25 bp, Homo sapien
tgaagtggaatgcagggagtaagga

SEQ ID NO: 1168828 - DNA, 25 bp, Homo sapien
aagcccgtttggagccctgaagtgg

SEQ ID NO: 1168829 - DNA, 25 bp, Homo sapien
ggaatgcagggagtaaggaaggcag

SEQ ID NO: 1168830 - DNA, 25 bp, Homo sapien
caagcattgcattaattaacatccc

SEQ ID NO: 1168831 - DNA, 25 bp, Homo sapien
ccccagttgttcattaattgaattc

SEQ ID NO: 1168832 - DNA, 25 bp, Homo sapien
gggatcctaactaactgcctgacac

SEQ ID NO: 1168833 - DNA, 25 bp, Homo sapien
tagaacccaagaggtgctcagttga

SEQ ID NO: 1168834 - DNA, 25 bp, Homo sapien
ctggggccacgggacagccaggcct

SEQ ID NO: 1168835 - DNA, 25 bp, Homo sapien
gggccacgggacagccaggccttgg

SEQ ID NO: 1168836 - DNA, 25 bp, Homo sapien
ccacgggacagccaggccttgggct

SEQ ID NO: 1168837 - DNA, 25 bp, Homo sapien
cacgggacagccaggccttgggctt

SEQ ID NO: 1168838 - DNA, 25 bp, Homo sapien
atggcacaccagcagcagacggcca

SEQ ID NO: 1168839 - DNA, 25 bp, Homo sapien
cacaccagcagcagacggccagggc

SEQ ID NO: 1168840 - DNA, 25 bp, Homo sapien
ggcacaccagcagcagacggccagg

SEQ ID NO: 1168841 - DNA, 25 bp, Homo sapien
ctgagacatggcacaccagcagcag

SEQ ID NO: 1168842 - DNA, 25 bp, Homo sapien
tcagcattgggcaggatgtcccctg

SEQ ID NO: 1168843 - DNA, 25 bp, Homo sapien
gagataccatgtctcgtcagcattg

SEQ ID NO: 1168844 - DNA, 25 bp, Homo sapien
cttcacccatacaggctttgggtag

SEQ ID NO: 1168845 - DNA, 25 bp, Homo sapien
accccgcatccacttcacccataca

SEQ ID NO: 1168846 - DNA, 25 bp, Homo sapien
tattcctcataagtttagattcccc

SEQ ID NO: 1168847 - DNA, 25 bp, Homo sapien
tctaggcatgtgtgagggtaccagg

SEQ ID NO: 1168848 - DNA, 25 bp, Homo sapien
ctgctctggaggaacataggctgtc

SEQ ID NO: 1168849 - DNA, 25 bp, Homo sapien
catatatccaatcccctggtctagg

SEQ ID NO: 1168850 - DNA, 25 bp, Homo sapien
cgggaggtaaagcccacaatgagga

SEQ ID NO: 1168851 - DNA, 25 bp, Homo sapien
accgggaggtaaagcccacaatgag

SEQ ID NO: 1168852 - DNA, 25 bp, Homo sapien
ggaacagcaagcacgccaggactgc

SEQ ID NO: 1168853 - DNA, 25 bp, Homo sapien
gaggaacagcaagcacgccaggact

SEQ ID NO: 1168854 - DNA, 25 bp, Homo sapien
aaagggtgtgatgaaagctgcctca

SEQ ID NO: 1168855 - DNA, 25 bp, Homo sapien
tagaaactgtgtcctccaactgcca

SEQ ID NO: 1168856 - DNA, 25 bp, Homo sapien
caactgccaatatgacatccagggc

SEQ ID NO: 1168857 - DNA, 25 bp, Homo sapien
gaaaatgtccttcttcagtcgtaaa

SEQ ID NO: 1168858 - DNA, 25 bp, Homo sapien
aagggatgccttcatgacaatcttc

SEQ ID NO: 1168859 - DNA, 25 bp, Homo sapien
caagagatttacctcccagctaggc

SEQ ID NO: 1168860 - DNA, 25 bp, Homo sapien
tgtcctctctaagataagaacacag

SEQ ID NO: 1168861 - DNA, 25 bp, Homo sapien
cagaaaggtctgctacccctgtaag

SEQ ID NO: 1168862 - DNA, 25 bp, Homo sapien
tgtttaaagatgagtcagagctacc

SEQ ID NO: 1168863 - DNA, 25 bp, Homo sapien
caaacttgacactgctagaggaacc

SEQ ID NO: 1168864 - DNA, 25 bp, Homo sapien
tagaggaacctaagctgaagagcgc

SEQ ID NO: 1168865 - DNA, 25 bp, Homo sapien
cagtagagactttaacacacgtgcc

SEQ ID NO: 1168866 - DNA, 25 bp, Homo sapien
catgctaagatgtaaccaattgtaa

SEQ ID NO: 1168867 - DNA, 25 bp, Homo sapien
cggaggtattatcagagtcatatgg

SEQ ID NO: 1168868 - DNA, 25 bp, Homo sapien
ggtatcatatttcatcatgctaaga

SEQ ID NO: 1168869 - DNA, 25 bp, Homo sapien
ttcccgcaacagataaccaagagta

SEQ ID NO: 1168870 - DNA, 25 bp, Homo sapien
tgaggtgataactatcgggggacct

SEQ ID NO: 1168871 - DNA, 25 bp, Homo sapien
cttttgaggtgataactatcggggg

SEQ ID NO: 1168872 - DNA, 25 bp, Homo sapien
tttgaggtgataactatcgggggac

SEQ ID NO: 1168873 - DNA, 25 bp, Homo sapien
ttgaggtgataactatcgggggacc

SEQ ID NO: 1168874 - DNA, 25 bp, Homo sapien
ccctgatgccgacaggaaggctgag

SEQ ID NO: 1168875 - DNA, 25 bp, Homo sapien
ggcagattgctgtgccccctgatgc

SEQ ID NO: 1168876 - DNA, 25 bp, Homo sapien
gctgggtcagagacggaattccagt

SEQ ID NO: 1168877 - DNA, 25 bp, Homo sapien
gagatacctacaggcagattgctgt

SEQ ID NO: 1168878 - DNA, 25 bp, Homo sapien
attaccttcatatgccccagagatt

SEQ ID NO: 1168879 - DNA, 25 bp, Homo sapien
cctacagccgccgagatattgatgc

SEQ ID NO: 1168880 - DNA, 25 bp, Homo sapien
cgtgattaccttcatatgccccaga

SEQ ID NO: 1168881 - DNA, 25 bp, Homo sapien
cgccgagatattgatgcctaagaag

SEQ ID NO: 1168882 - DNA, 25 bp, Homo sapien
ctcgccggaatcctctgatgagcaa

SEQ ID NO: 1168883 - DNA, 25 bp, Homo sapien
tcgccggaatcctctgatgagcaat

SEQ ID NO: 1168884 - DNA, 25 bp, Homo sapien
tcacaccactgcacagagcgagacc

SEQ ID NO: 1168885 - DNA, 25 bp, Homo sapien
atcacaccactgcacagagcgagac

SEQ ID NO: 1168886 - DNA, 25 bp, Homo sapien
tcaaaatcatggcagaatgcaagga

SEQ ID NO: 1168887 - DNA, 25 bp, Homo sapien
ggcctcaaaatcatggcagaatgca

SEQ ID NO: 1168888 - DNA, 25 bp, Homo sapien
cctcaaaatcatggcagaatgcaag

SEQ ID NO: 1168889 - DNA, 25 bp, Homo sapien
gaggcctcaaaatcatggcagaatg

SEQ ID NO: 1168890 - DNA, 25 bp, Homo sapien
tgatgtttgcccttcattctattga

SEQ ID NO: 1168891 - DNA, 25 bp, Homo sapien
ttattgtgttgaggtttgttgcttc

SEQ ID NO: 1168892 - DNA, 25 bp, Homo sapien
aatggatcaaatcaatttatttgca

SEQ ID NO: 1168893 - DNA, 25 bp, Homo sapien
tgaatgatcttttaacgagttgttg

SEQ ID NO: 1168894 - DNA, 25 bp, Homo sapien
acacagaccagcaaattgcaaattg

SEQ ID NO: 1168895 - DNA, 25 bp, Homo sapien
cagaccagcaaattgcaaattgcat

SEQ ID NO: 1168896 - DNA, 25 bp, Homo sapien
gaccagcaaattgcaaattgcataa

SEQ ID NO: 1168897 - DNA, 25 bp, Homo sapien
aagacacagaccagcaaattgcaaa

SEQ ID NO: 1168898 - DNA, 25 bp, Homo sapien
ctgttgctcctccaaacgcaaacat

SEQ ID NO: 1168899 - DNA, 25 bp, Homo sapien
aggccaaaagcatgttcctgttcac

SEQ ID NO: 1168900 - DNA, 25 bp, Homo sapien
tgttcaggccaaaagcatgttcctg

SEQ ID NO: 1168901 - DNA, 25 bp, Homo sapien
gaaccattggtgttcaggccaaaag

SEQ ID NO: 1168902 - DNA, 25 bp, Homo sapien
actttcttgaaccattggtgttcag

SEQ ID NO: 1168903 - DNA, 25 bp, Homo sapien
ctgccctcagggcatatgtgaaaac

SEQ ID NO: 1168904 - DNA, 25 bp, Homo sapien
gctgccctcagggcatatgtgaaaa

SEQ ID NO: 1168905 - DNA, 25 bp, Homo sapien
gccctcagggcatatgtgaaaaccc

SEQ ID NO: 1168906 - DNA, 25 bp, Homo sapien
tgccctcagggcatatgtgaaaacc

SEQ ID NO: 1168907 - DNA, 25 bp, Homo sapien
tcccctgactgcaacaaagaaaatc

SEQ ID NO: 1168908 - DNA, 25 bp, Homo sapien
caagtctgatgtggcattgaaaagc

SEQ ID NO: 1168909 - DNA, 25 bp, Homo sapien
ttttcagagtctcctacgactgccc

SEQ ID NO: 1168910 - DNA, 25 bp, Homo sapien
aaagtgaaatggctcccagtgtgct

SEQ ID NO: 1168911 - DNA, 25 bp, Homo sapien
ctaacaatggaagtagcaaaaacag

SEQ ID NO: 1168912 - DNA, 25 bp, Homo sapien
aacaatggaagtagcaaaaacagca

SEQ ID NO: 1168913 - DNA, 25 bp, Homo sapien
acaatggaagtagcaaaaacagcat

SEQ ID NO: 1168914 - DNA, 25 bp, Homo sapien
taacaatggaagtagcaaaaacagc

SEQ ID NO: 1168915 - DNA, 25 bp, Homo sapien
tccctcaaatgaccgaatggtgcgt

SEQ ID NO: 1168916 - DNA, 25 bp, Homo sapien
taaaaggatgcgatccaggtgacat

SEQ ID NO: 1168917 - DNA, 25 bp, Homo sapien
tcctcattgctgaagtttcccctgg

SEQ ID NO: 1168918 - DNA, 25 bp, Homo sapien
cgatggtgctggaattgctgtccca

SEQ ID NO: 1168919 - DNA, 25 bp, Homo sapien
ccaagatgaaacgtgggcaggtgtc

SEQ ID NO: 1168920 - DNA, 25 bp, Homo sapien
tttcctgcatcaagaagacccaaga

SEQ ID NO: 1168921 - DNA, 25 bp, Homo sapien
gaaatgcttggccatattcccagcc

SEQ ID NO: 1168922 - DNA, 25 bp, Homo sapien
tctgatccttgataagctaactgca

SEQ ID NO: 1168923 - DNA, 25 bp, Homo sapien
ggctttgggtagaatcctgagacat

SEQ ID NO: 1168924 - DNA, 25 bp, Homo sapien
atcagcactgggcaagatgtcccct

SEQ ID NO: 1168925 - DNA, 25 bp, Homo sapien
ctgggcaagatgtcccctcgctgag

SEQ ID NO: 1168926 - DNA, 25 bp, Homo sapien
cactgggcaagatgtcccctcgctg

SEQ ID NO: 1168927 - DNA, 25 bp, Homo sapien
agcactgggcaagatgtcccctcgc

SEQ ID NO: 1168928 - DNA, 25 bp, Homo sapien
agtaaaggcactatcaccgccaaga

SEQ ID NO: 1168929 - DNA, 25 bp, Homo sapien
gaaccaaagcgcaagacctatcaga

SEQ ID NO: 1168930 - DNA, 25 bp, Homo sapien
tatcaccgccaagatgatgaagccc

SEQ ID NO: 1168931 - DNA, 25 bp, Homo sapien
atgaagcccacggaactgtgatgct

SEQ ID NO: 1168932 - DNA, 25 bp, Homo sapien
caaagagagttgagaggacgtcatc

SEQ ID NO: 1168933 - DNA, 25 bp, Homo sapien
ccttcaccagggatgcatatattaa

SEQ ID NO: 1168934 - DNA, 25 bp, Homo sapien
tacggctaaaatgtggcgggagttc

SEQ ID NO: 1168935 - DNA, 25 bp, Homo sapien
ggaggttgctaggaccccattccat

SEQ ID NO: 1168936 - DNA, 25 bp, Homo sapien
gatcagtgccgttggcagctaaagc

SEQ ID NO: 1168937 - DNA, 25 bp, Homo sapien
acgttctgcaccaccgggatgaagg

SEQ ID NO: 1168938 - DNA, 25 bp, Homo sapien
ggcacctggcacacacgttctgcac

SEQ ID NO: 1168939 - DNA, 25 bp, Homo sapien
gagatcagtgccgttggcagctaaa

SEQ ID NO: 1168940 - DNA, 25 bp, Homo sapien
tggtaaggaggcagtcgcacagcat

SEQ ID NO: 1168941 - DNA, 25 bp, Homo sapien
cagtcgtattcaacgacataggcca

SEQ ID NO: 1168942 - DNA, 25 bp, Homo sapien
aaagccagtcgtattcaacgacata

SEQ ID NO: 1168943 - DNA, 25 bp, Homo sapien
gcacagcatataaaagccagtcgta

SEQ ID NO: 1168944 - DNA, 25 bp, Homo sapien
gcaaacttatccctctgtacctata

SEQ ID NO: 1168945 - DNA, 25 bp, Homo sapien
cacctgctctgaactaaagttattc

SEQ ID NO: 1168946 - DNA, 25 bp, Homo sapien
gcaactaagaagatctgcttccctc

SEQ ID NO: 1168947 - DNA, 25 bp, Homo sapien
catcagccgctgacagcaactaaga

SEQ ID NO: 1168948 - DNA, 25 bp, Homo sapien
ggagaagaagagctagcagcagaaa

SEQ ID NO: 1168949 - DNA, 25 bp, Homo sapien
gcagcagaaactgcagaaacagcat

SEQ ID NO: 1168950 - DNA, 25 bp, Homo sapien
agcagcagaaactgcagaaacagca

SEQ ID NO: 1168951 - DNA, 25 bp, Homo sapien
ctgggagaagaagagctagcagcag

SEQ ID NO: 1168952 - DNA, 25 bp, Homo sapien
tattgatccatctcgggaaagccca

SEQ ID NO: 1168953 - DNA, 25 bp, Homo sapien
caaaagagtaaactggacctggaga

SEQ ID NO: 1168954 - DNA, 25 bp, Homo sapien
ttgcagctgacagcgatgttcttac

SEQ ID NO: 1168955 - DNA, 25 bp, Homo sapien
agacaggtatgctcagatggcaagc

SEQ ID NO: 1168956 - DNA, 25 bp, Homo sapien
gatgacatggaaggagacgtgttcc

SEQ ID NO: 1168957 - DNA, 25 bp, Homo sapien
tgacatggaaggagacgtgttcctg

SEQ ID NO: 1168958 - DNA, 25 bp, Homo sapien
ggatgacatggaaggagacgtgttc

SEQ ID NO: 1168959 - DNA, 25 bp, Homo sapien
ctggatgacatggaaggagacgtgt

SEQ ID NO: 1168960 - DNA, 25 bp, Homo sapien
tgcatggtcttgaatctcccgagtt

SEQ ID NO: 1168961 - DNA, 25 bp, Homo sapien
gaagttgcccttggaccagttatgc

SEQ ID NO: 1168962 - DNA, 25 bp, Homo sapien
ctcgtgcccaggattggttgacaaa

SEQ ID NO: 1168963 - DNA, 25 bp, Homo sapien
cgaaataacaactctaggtctgaca

SEQ ID NO: 1168964 - DNA, 25 bp, Homo sapien
taatccgttgaaagctacctgaaag

SEQ ID NO: 1168965 - DNA, 25 bp, Homo sapien
gattatacactgtttctgtgacgcc

SEQ ID NO: 1168966 - DNA, 25 bp, Homo sapien
tagatgacagacactttgggccaaa

SEQ ID NO: 1168967 - DNA, 25 bp, Homo sapien
ggcacccatgttgtattctggaaac

SEQ ID NO: 1168968 - DNA, 25 bp, Homo sapien
caaacaggctttgggtagaagccgg

SEQ ID NO: 1168969 - DNA, 25 bp, Homo sapien
gaagccggaggcatgacaaaccagc

SEQ ID NO: 1168970 - DNA, 25 bp, Homo sapien
gacaaaccagcaacagctggccaga

SEQ ID NO: 1168971 - DNA, 25 bp, Homo sapien
ccatgtcacccaaacaggctttggg

SEQ ID NO: 1168972 - DNA, 25 bp, Homo sapien
tgtctcactcgacaagacaggccag

SEQ ID NO: 1168973 - DNA, 25 bp, Homo sapien
catgtcccatcagcattaggaagaa

SEQ ID NO: 1168974 - DNA, 25 bp, Homo sapien
cctccaggatcacctgaagatacca

SEQ ID NO: 1168975 - DNA, 25 bp, Homo sapien
accatgtttagtgcccagttgctcc

SEQ ID NO: 1168976 - DNA, 25 bp, Homo sapien
ctacacttccaacctccagtcttac

SEQ ID NO: 1168977 - DNA, 25 bp, Homo sapien
gcatcagttatcctatttcagtcac

SEQ ID NO: 1168978 - DNA, 25 bp, Homo sapien
ctgcacatattggaaagatacatgg

SEQ ID NO: 1168979 - DNA, 25 bp, Homo sapien
taaatctctagtatccatgtatccc

SEQ ID NO: 1168980 - DNA, 25 bp, Homo sapien
gtatcccttaggtcttactccacta

SEQ ID NO: 1168981 - DNA, 25 bp, Homo sapien
gtgcttcttaaaccataacacaagg

SEQ ID NO: 1168982 - DNA, 25 bp, Homo sapien
gactattagaatcaccaagggcact

SEQ ID NO: 1168983 - DNA, 25 bp, Homo sapien
taacacaaggactattagaatcacc

SEQ ID NO: 1168984 - DNA, 25 bp, Homo sapien
caagggcactatcactaccaaggca

SEQ ID NO: 1168985 - DNA, 25 bp, Homo sapien
gagtagtcaatagagaaaagctaag

SEQ ID NO: 1168986 - DNA, 25 bp, Homo sapien
taactgaggataaggtggagtagtc

SEQ ID NO: 1168987 - DNA, 25 bp, Homo sapien
gataaggtggagtagtcaatagaga

SEQ ID NO: 1168988 - DNA, 25 bp, Homo sapien
ggaggtggtaactgaggataaggtg

SEQ ID NO: 1168989 - DNA, 25 bp, Homo sapien
ttgtactaggctcctgggttgctgg

SEQ ID NO: 1168990 - DNA, 25 bp, Homo sapien
cgggatggcatcactatattgtact

SEQ ID NO: 1168991 - DNA, 25 bp, Homo sapien
caatttaaatggagagtcgacggga

SEQ ID NO: 1168992 - DNA, 25 bp, Homo sapien
ctgggttgctgggttcttaacacaa

SEQ ID NO: 1168993 - DNA, 25 bp, Homo sapien
gcttgactacaaacaggtatgaggg

SEQ ID NO: 1168994 - DNA, 25 bp, Homo sapien
tatccaccaccagtttagaagctgt

SEQ ID NO: 1168995 - DNA, 25 bp, Homo sapien
ccaggttgttggtgtgcttgactac

SEQ ID NO: 1168996 - DNA, 25 bp, Homo sapien
tatcagtagttgcaagaatgccagg

SEQ ID NO: 1168997 - DNA, 25 bp, Homo sapien
gtggcaataatcaataccttaccaa

SEQ ID NO: 1168998 - DNA, 25 bp, Homo sapien
taacaggatatgaaattgtggcaat

SEQ ID NO: 1168999 - DNA, 25 bp, Homo sapien
caataacaggatatgaaattgtggc

SEQ ID NO: 1169000 - DNA, 25 bp, Homo sapien
caataatcaataccttaccaacaaa

SEQ ID NO: 1169001 - DNA, 25 bp, Homo sapien
tgagactgtactaacagtgtgattc

SEQ ID NO: 1169002 - DNA, 25 bp, Homo sapien
gagactgtactaacagtgtgattca

SEQ ID NO: 1169003 - DNA, 25 bp, Homo sapien
ccatgagtgggcttgacctggaagt

SEQ ID NO: 1169004 - DNA, 25 bp, Homo sapien
gaagacactcagcatcctggatgta

SEQ ID NO: 1169005 - DNA, 25 bp, Homo sapien
gctagagggcaggtagatttcaccc

SEQ ID NO: 1169006 - DNA, 25 bp, Homo sapien
tacccaaacgaagaaagcatgtctg

SEQ ID NO: 1169007 - DNA, 25 bp, Homo sapien
tacagacagacaaacctctccctct

SEQ ID NO: 1169008 - DNA, 25 bp, Homo sapien
ggacacctgccctaataattcagat

SEQ ID NO: 1169009 - DNA, 25 bp, Homo sapien
ttaaaggagggattccttggcagga

SEQ ID NO: 1169010 - DNA, 25 bp, Homo sapien
ttgcactctcgtctgacttcccttg

SEQ ID NO: 1169011 - DNA, 25 bp, Homo sapien
agagaccctcgaagaggaggaacag

SEQ ID NO: 1169012 - DNA, 25 bp, Homo sapien
atgataggattgtagagcctgggga

SEQ ID NO: 1169013 - DNA, 25 bp, Homo sapien
tagatgataggattgtagagcctgg

SEQ ID NO: 1169014 - DNA, 25 bp, Homo sapien
agatgataggattgtagagcctggg

SEQ ID NO: 1169015 - DNA, 25 bp, Homo sapien
ctagatgataggattgtagagcctg

SEQ ID NO: 1169016 - DNA, 25 bp, Homo sapien
gcttgctgaagtttccatgggacca

SEQ ID NO: 1169017 - DNA, 25 bp, Homo sapien
agccatgagtctgcaggtcacccag

SEQ ID NO: 1169018 - DNA, 25 bp, Homo sapien
aaagcggatggtgcccaagacagtg

SEQ ID NO: 1169019 - DNA, 25 bp, Homo sapien
cagcagaagcttgcactatctggat

SEQ ID NO: 1169020 - DNA, 25 bp, Homo sapien
aagtggttaggtacaggccagtcca

SEQ ID NO: 1169021 - DNA, 25 bp, Homo sapien
catgtcaacactcaggcaaaggata

SEQ ID NO: 1169022 - DNA, 25 bp, Homo sapien
gaaaatagttggtgttcccaggcaa

SEQ ID NO: 1169023 - DNA, 25 bp, Homo sapien
tgttgagatatgtacatgcaggccc

SEQ ID NO: 1169024 - DNA, 25 bp, Homo sapien
gcattcattctacagccagctaata

SEQ ID NO: 1169025 - DNA, 25 bp, Homo sapien
taatatctaggtagcgattgagcac

SEQ ID NO: 1169026 - DNA, 25 bp, Homo sapien
ttacagatgttctgggcccggatcc

SEQ ID NO: 1169027 - DNA, 25 bp, Homo sapien
catgagccccgctagaaatcgaggg

SEQ ID NO: 1169028 - DNA, 25 bp, Homo sapien
cctgagacatggcacacaagctgca

SEQ ID NO: 1169029 - DNA, 25 bp, Homo sapien
cacgggctttgggtagaatcctgag

SEQ ID NO: 1169030 - DNA, 25 bp, Homo sapien
cacccacacgggctttgggtagaat

SEQ ID NO: 1169031 - DNA, 25 bp, Homo sapien
ggctttgggtagaatcctgagacat

SEQ ID NO: 1169032 - DNA, 25 bp, Homo sapien
cagcattaggcaggacgtcccctcg

SEQ ID NO: 1169033 - DNA, 25 bp, Homo sapien
tcagcattaggcaggacgtcccctc

SEQ ID NO: 1169034 - DNA, 25 bp, Homo sapien
agcattaggcaggacgtcccctcgc

SEQ ID NO: 1169035 - DNA, 25 bp, Homo sapien
ccacatccagggttgctcggagata

SEQ ID NO: 1169036 - DNA, 25 bp, Homo sapien
cacatccagggttgctcggagatac

SEQ ID NO: 1169037 - DNA, 25 bp, Homo sapien
gatcatggccccctagactgctgtg

SEQ ID NO: 1169038 - DNA, 25 bp, Homo sapien
catggccccctagactgctgtgttt

SEQ ID NO: 1169039 - DNA, 25 bp, Homo sapien
atgattagatcatggccccctagac

SEQ ID NO: 1169040 - DNA, 25 bp, Homo sapien
tgattagatcatggccccctagact

SEQ ID NO: 1169041 - DNA, 25 bp, Homo sapien
ttttcattatttcccagcagagcct

SEQ ID NO: 1169042 - DNA, 25 bp, Homo sapien
tttcctcagccccacactcaaaagc

SEQ ID NO: 1169043 - DNA, 25 bp, Homo sapien
cagccccacactcaaaagccccagg

SEQ ID NO: 1169044 - DNA, 25 bp, Homo sapien
ctattttcattatttcccagcagag

SEQ ID NO: 1169045 - DNA, 25 bp, Homo sapien
catttcacaagggtgggaccttcct

SEQ ID NO: 1169046 - DNA, 25 bp, Homo sapien
aaatactctattccaccaagctgag

SEQ ID NO: 1169047 - DNA, 25 bp, Homo sapien
acccttcttgtacctagcattccta

SEQ ID NO: 1169048 - DNA, 25 bp, Homo sapien
ggatagaataagaataccaacccta

SEQ ID NO: 1169049 - DNA, 25 bp, Homo sapien
tatgaccagggtaactatcacagtc

SEQ ID NO: 1169050 - DNA, 25 bp, Homo sapien
caactacaaccaatatgaccagggt

SEQ ID NO: 1169051 - DNA, 25 bp, Homo sapien
tttaaccgtgagtcaactacaacca

SEQ ID NO: 1169052 - DNA, 25 bp, Homo sapien
gggtaactatcacagtcaaacagat

SEQ ID NO: 1169053 - DNA, 25 bp, Homo sapien
tacaggctgaagaaacaaagaacaa

SEQ ID NO: 1169054 - DNA, 25 bp, Homo sapien
acaggctgaagaaacaaagaacaag

SEQ ID NO: 1169055 - DNA, 25 bp, Homo sapien
caggctgaagaaacaaagaacaaga

SEQ ID NO: 1169056 - DNA, 25 bp, Homo sapien
ttacaggctgaagaaacaaagaaca

SEQ ID NO: 1169057 - DNA, 25 bp, Homo sapien
gggagaaagaatgttcttatttgaa

SEQ ID NO: 1169058 - DNA, 25 bp, Homo sapien
tgtggggagaaagaatgttcttatt

SEQ ID NO: 1169059 - DNA, 25 bp, Homo sapien
tgtgtggggagaaagaatgttctta

SEQ ID NO: 1169060 - DNA, 25 bp, Homo sapien
tggggagaaagaatgttcttatttg

SEQ ID NO: 1169061 - DNA, 25 bp, Homo sapien
gatccacgatacttgtgccaagcag

SEQ ID NO: 1169062 - DNA, 25 bp, Homo sapien
catacgattccatgtgtctgcacag

SEQ ID NO: 1169063 - DNA, 25 bp, Homo sapien
caccagagttggtttaggcgtgtct

SEQ ID NO: 1169064 - DNA, 25 bp, Homo sapien
gcatgggttcttgcagagcatacga

SEQ ID NO: 1169065 - DNA, 25 bp, Homo sapien
tcatcttcttgccatgggcaccagc

SEQ ID NO: 1169066 - DNA, 25 bp, Homo sapien
catcttcttgccatgggcaccagca

SEQ ID NO: 1169067 - DNA, 25 bp, Homo sapien
atcatcttcttgccatgggcaccag

SEQ ID NO: 1169068 - DNA, 25 bp, Homo sapien
ggactggacagaagctttggagaaa

SEQ ID NO: 1169069 - DNA, 25 bp, Homo sapien
catcacagatagtatgggaaggtcc

SEQ ID NO: 1169070 - DNA, 25 bp, Homo sapien
gcgttacatgtgctcccctggatta

SEQ ID NO: 1169071 - DNA, 25 bp, Homo sapien
catttctgacacatcacagggttgc

SEQ ID NO: 1169072 - DNA, 25 bp, Homo sapien
caaacaaagctttgtacagctggac

SEQ ID NO: 1169073 - DNA, 25 bp, Homo sapien
caagccgtatcaggctgggacttca

SEQ ID NO: 1169074 - DNA, 25 bp, Homo sapien
aaaaagacttcttacatcatggcag

SEQ ID NO: 1169075 - DNA, 25 bp, Homo sapien
atgggaaagatccacccccgtgatc

SEQ ID NO: 1169076 - DNA, 25 bp, Homo sapien
ttcaaaatctcaaactcagtattcc

SEQ ID NO: 1169077 - DNA, 25 bp, Homo sapien
gcttctggtgatttgaaggtggttt

SEQ ID NO: 1169078 - DNA, 25 bp, Homo sapien
aattgcttctggtgatttgaaggtg

SEQ ID NO: 1169079 - DNA, 25 bp, Homo sapien
ttgcttctggtgatttgaaggtggt

SEQ ID NO: 1169080 - DNA, 25 bp, Homo sapien
aaattgcttctggtgatttgaaggt

SEQ ID NO: 1169081 - DNA, 25 bp, Homo sapien
atctaccaggatgttagagtcaaaa

SEQ ID NO: 1169082 - DNA, 25 bp, Homo sapien
tagcgacagacacttttgctatcta

SEQ ID NO: 1169083 - DNA, 25 bp, Homo sapien
aaatgaagtagcttacatgaaagca

SEQ ID NO: 1169084 - DNA, 25 bp, Homo sapien
ccgtgagatagcgacagacactttt

SEQ ID NO: 1169085 - DNA, 25 bp, Homo sapien
catgggttatgatcgttacatagcc

SEQ ID NO: 1169086 - DNA, 25 bp, Homo sapien
gggctgtgccatccaaatgttttcc

SEQ ID NO: 1169087 - DNA, 25 bp, Homo sapien
atttccaccattgtcctggacaggg

SEQ ID NO: 1169088 - DNA, 25 bp, Homo sapien
cactctgggcaccaatgcaatcatc

SEQ ID NO: 1169089 - DNA, 25 bp, Homo sapien
ccacaaaaggaggcccatcagaaaa

SEQ ID NO: 1169090 - DNA, 25 bp, Homo sapien
ttcataagcaaagtagaagtaaaag

SEQ ID NO: 1169091 - DNA, 25 bp, Homo sapien
cataagcaaagtagaagtaaaagcc

SEQ ID NO: 1169092 - DNA, 25 bp, Homo sapien
aaaggaggcccatcagaaaaacagc

SEQ ID NO: 1169093 - DNA, 25 bp, Homo sapien
tgtgagtgcagtttcagcagacaga

SEQ ID NO: 1169094 - DNA, 25 bp, Homo sapien
acagctctggctggtatttggtgtc

SEQ ID NO: 1169095 - DNA, 25 bp, Homo sapien
caacagagcccttgagctctgctaa

SEQ ID NO: 1169096 - DNA, 25 bp, Homo sapien
agccactggtaagttcgaactgggt

SEQ ID NO: 1169097 - DNA, 25 bp, Homo sapien
ttatcctgactgtgcaggaggacga

SEQ ID NO: 1169098 - DNA, 25 bp, Homo sapien
gactgtgcaggaggacgaatataga

SEQ ID NO: 1169099 - DNA, 25 bp, Homo sapien
ctgagcaaaagagggatatttggct

SEQ ID NO: 1169100 - DNA, 25 bp, Homo sapien
agcaaaagagggatatttggctttc

SEQ ID NO: 1169101 - DNA, 25 bp, Homo sapien
atctctcatgaaggacccgcagctc

SEQ ID NO: 1169102 - DNA, 25 bp, Homo sapien
tgcctccactctatatgctgggctc

SEQ ID NO: 1169103 - DNA, 25 bp, Homo sapien
tggatcaccaataatttgggctgtt

SEQ ID NO: 1169104 - DNA, 25 bp, Homo sapien
ctaacaacgcatggctcactctctt

SEQ ID NO: 1169105 - DNA, 25 bp, Homo sapien
tccactctatatgctgggctcttct

SEQ ID NO: 1169106 - DNA, 25 bp, Homo sapien
cactagggaatgggtgaggcttcct

SEQ ID NO: 1169107 - DNA, 25 bp, Homo sapien
actagggaatgggtgaggcttcctc

SEQ ID NO: 1169108 - DNA, 25 bp, Homo sapien
gacactagggaatgggtgaggcttc

SEQ ID NO: 1169109 - DNA, 25 bp, Homo sapien
acactagggaatgggtgaggcttcc

SEQ ID NO: 1169110 - DNA, 25 bp, Homo sapien
aagatggatgagaaagagaatcaca

SEQ ID NO: 1169111 - DNA, 25 bp, Homo sapien
aagagaatcacaaacattccctgaa

SEQ ID NO: 1169112 - DNA, 25 bp, Homo sapien
agagcctgcagcaaaaggttgaaga

SEQ ID NO: 1169113 - DNA, 25 bp, Homo sapien
aaagagcctgcagcaaaaggttgaa

SEQ ID NO: 1169114 - DNA, 25 bp, Homo sapien
ctagagaagggacatatgcaggaga

SEQ ID NO: 1169115 - DNA, 25 bp, Homo sapien
tagagaagggacatatgcaggagac

SEQ ID NO: 1169116 - DNA, 25 bp, Homo sapien
gaagggacatatgcaggagactaac

SEQ ID NO: 1169117 - DNA, 25 bp, Homo sapien
gagaagggacatatgcaggagacta

SEQ ID NO: 1169118 - DNA, 25 bp, Homo sapien
tgaaccaacgatattcaaagcagta

SEQ ID NO: 1169119 - DNA, 25 bp, Homo sapien
caattgctctctatgttagacaact

SEQ ID NO: 1169120 - DNA, 25 bp, Homo sapien
acaactggaagagatacgcttttcc

SEQ ID NO: 1169121 - DNA, 25 bp, Homo sapien
gcacaactggaagagatacgctttt

SEQ ID NO: 1169122 - DNA, 25 bp, Homo sapien
gaagagatacgcttttccaggggtc

SEQ ID NO: 1169123 - DNA, 25 bp, Homo sapien
gatacgcttttccaggggtctttgc

SEQ ID NO: 1169124 - DNA, 25 bp, Homo sapien
cagtttggcaagagacggatgaggt

SEQ ID NO: 1169125 - DNA, 25 bp, Homo sapien
tcagtttggcaagagacggatgagg

SEQ ID NO: 1169126 - DNA, 25 bp, Homo sapien
agtttggcaagagacggatgaggtg

SEQ ID NO: 1169127 - DNA, 25 bp, Homo sapien
cctttttagactcatggtgatgtta

SEQ ID NO: 1169128 - DNA, 25 bp, Homo sapien
ctttttagactcatggtgatgttaa

SEQ ID NO: 1169129 - DNA, 25 bp, Homo sapien
tttttagactcatggtgatgttaaa

SEQ ID NO: 1169130 - DNA, 25 bp, Homo sapien
tcctttttagactcatggtgatgtt

SEQ ID NO: 1169131 - DNA, 25 bp, Homo sapien
cagaaatgccatcactgatctccat

SEQ ID NO: 1169132 - DNA, 25 bp, Homo sapien
atgagaagccgaggacgacgaactc

SEQ ID NO: 1169133 - DNA, 25 bp, Homo sapien
tgacaaaggtatagcaaatctcaga

SEQ ID NO: 1169134 - DNA, 25 bp, Homo sapien
ccacagtcttattgacttgctccat

SEQ ID NO: 1169135 - DNA, 25 bp, Homo sapien
ggacgacgaactctctcaccacagt

SEQ ID NO: 1169136 - DNA, 25 bp, Homo sapien
gaatgaccaaggcaaatacaccaag

SEQ ID NO: 1169137 - DNA, 25 bp, Homo sapien
taggataagtagcagaggaatgacc

SEQ ID NO: 1169138 - DNA, 25 bp, Homo sapien
aaggtcttgtatcttccaacggagg

SEQ ID NO: 1169139 - DNA, 25 bp, Homo sapien
accagctgactgaagccggagtgct

SEQ ID NO: 1169140 - DNA, 25 bp, Homo sapien
taattagtcttgggccttaagtaga

SEQ ID NO: 1169141 - DNA, 25 bp, Homo sapien
agatattagggtgtcttggcttgaa

SEQ ID NO: 1169142 - DNA, 25 bp, Homo sapien
gggtgtcttggcttgaagtgtaatt

SEQ ID NO: 1169143 - DNA, 25 bp, Homo sapien
tattagggtgtcttggcttgaagtg

SEQ ID NO: 1169144 - DNA, 25 bp, Homo sapien
ctaagaggatagaaagtttggccga

SEQ ID NO: 1169145 - DNA, 25 bp, Homo sapien
ggccgattgttcttcgtagggctga

SEQ ID NO: 1169146 - DNA, 25 bp, Homo sapien
aagtttggccgattgttcttcgtag

SEQ ID NO: 1169147 - DNA, 25 bp, Homo sapien
tcttcgtagggctgatttgaattcc

SEQ ID NO: 1169148 - DNA, 25 bp, Homo sapien
tattcaggtatgtgaatataagaat

SEQ ID NO: 1169149 - DNA, 25 bp, Homo sapien
ttcaggtatgtgaatataagaattt

SEQ ID NO: 1169150 - DNA, 25 bp, Homo sapien
acatattcaggtatgtgaatataag

SEQ ID NO: 1169151 - DNA, 25 bp, Homo sapien
caggtatgtgaatataagaatttgg

SEQ ID NO: 1169152 - DNA, 25 bp, Homo sapien
gacattgccactaagaatgactaga

SEQ ID NO: 1169153 - DNA, 25 bp, Homo sapien
cattgccactaagaatgactagata

SEQ ID NO: 1169154 - DNA, 25 bp, Homo sapien
ttgccactaagaatgactagataca

SEQ ID NO: 1169155 - DNA, 25 bp, Homo sapien
ggtgacattgccactaagaatgact

SEQ ID NO: 1169156 - DNA, 25 bp, Homo sapien
cagttgaaggagattgtcctggcca

SEQ ID NO: 1169157 - DNA, 25 bp, Homo sapien
gcaggcagttggtaatggcaaaacc

SEQ ID NO: 1169158 - DNA, 25 bp, Homo sapien
gaatgacaaaggtgtagaaggtctc

SEQ ID NO: 1169159 - DNA, 25 bp, Homo sapien
gatgttgagagaatgccaaggaaga

SEQ ID NO: 1169160 - DNA, 25 bp, Homo sapien
tcaggatagtcctcagaatgcagag

SEQ ID NO: 1169161 - DNA, 25 bp, Homo sapien
taatgattgactttgttggcgctac

SEQ ID NO: 1169162 - DNA, 25 bp, Homo sapien
aagccaccaattgcacaggcagctg

SEQ ID NO: 1169163 - DNA, 25 bp, Homo sapien
ttactactgtaagagaggccaagaa

SEQ ID NO: 1169164 - DNA, 25 bp, Homo sapien
taatggagtgacaatcgtgtatgtc

SEQ ID NO: 1169165 - DNA, 25 bp, Homo sapien
cctgtctttgttggacacatagttt

SEQ ID NO: 1169166 - DNA, 25 bp, Homo sapien
gtgtatgtcaccgtcaccagcctgt

SEQ ID NO: 1169167 - DNA, 25 bp, Homo sapien
tagtttgctgtaggcctcaggtaga

SEQ ID NO: 1169168 - DNA, 25 bp, Homo sapien
tctgaatgtagaaatctgcagttac

SEQ ID NO: 1169169 - DNA, 25 bp, Homo sapien
gagaaatctgaatgtagaaatctgc

SEQ ID NO: 1169170 - DNA, 25 bp, Homo sapien
tgaatgtagaaatctgcagttactg

SEQ ID NO: 1169171 - DNA, 25 bp, Homo sapien
aatgtagaaatctgcagttactggc

SEQ ID NO: 1169172 - DNA, 25 bp, Homo sapien
gagaagcccagcactaagaactcag

SEQ ID NO: 1169173 - DNA, 25 bp, Homo sapien
gctgcaattccccaaggctagagaa

SEQ ID NO: 1169174 - DNA, 25 bp, Homo sapien
aagtcaatatgatcaggtccagaga

SEQ ID NO: 1169175 - DNA, 25 bp, Homo sapien
ggccatgaagagttgatcccacgga

SEQ ID NO: 1169176 - DNA, 25 bp, Homo sapien
tgggcagaataacagttgtgtagaa

SEQ ID NO: 1169177 - DNA, 25 bp, Homo sapien
gcagaataacagttgtgtagaagat

SEQ ID NO: 1169178 - DNA, 25 bp, Homo sapien
aagatttcagagatagaaagaatac

SEQ ID NO: 1169179 - DNA, 25 bp, Homo sapien
tgtgtagaagatttcagagatagaa

SEQ ID NO: 1169180 - DNA, 25 bp, Homo sapien
aatacagagaataagttgataagca

SEQ ID NO: 1169181 - DNA, 25 bp, Homo sapien
agaagaacatttgggtggcacaact

SEQ ID NO: 1169182 - DNA, 25 bp, Homo sapien
gtcctgaatacagagaataagttga

SEQ ID NO: 1169183 - DNA, 25 bp, Homo sapien
agaacatttgggtggcacaactcac

SEQ ID NO: 1169184 - DNA, 25 bp, Homo sapien
cagcgtattgcaaaggctgacagat

SEQ ID NO: 1169185 - DNA, 25 bp, Homo sapien
tgagaacagcgtattgcaaaggctg

SEQ ID NO: 1169186 - DNA, 25 bp, Homo sapien
gaacagcgtattgcaaaggctgaca

SEQ ID NO: 1169187 - DNA, 25 bp, Homo sapien
catgagaacagcgtattgcaaaggc

SEQ ID NO: 1169188 - DNA, 25 bp, Homo sapien
aatacaagttgctatcagttgtcca

SEQ ID NO: 1169189 - DNA, 25 bp, Homo sapien
tacaagttgctatcagttgtccaca

SEQ ID NO: 1169190 - DNA, 25 bp, Homo sapien
acaagttgctatcagttgtccacat

SEQ ID NO: 1169191 - DNA, 25 bp, Homo sapien
taatacaagttgctatcagttgtcc

SEQ ID NO: 1169192 - DNA, 25 bp, Homo sapien
cagaaagggaggctaaagacaaaag

SEQ ID NO: 1169193 - DNA, 25 bp, Homo sapien
ttggagccacagaaagggaggctaa

SEQ ID NO: 1169194 - DNA, 25 bp, Homo sapien
cttgttggagccacagaaagggagg

SEQ ID NO: 1169195 - DNA, 25 bp, Homo sapien
ccacagaaagggaggctaaagacaa

SEQ ID NO: 1169196 - DNA, 25 bp, Homo sapien
caggcgagacggataactggtgaaa

SEQ ID NO: 1169197 - DNA, 25 bp, Homo sapien
aactggtgaaatatcacaaaagtag

SEQ ID NO: 1169198 - DNA, 25 bp, Homo sapien
gacggataactggtgaaatatcaca

SEQ ID NO: 1169199 - DNA, 25 bp, Homo sapien
gctgtcagcacaggcgagacggata

SEQ ID NO: 1169200 - DNA, 25 bp, Homo sapien
gtttgccttcagctgatgggatctt

SEQ ID NO: 1169201 - DNA, 25 bp, Homo sapien
accaagaccccgaagatgaagatga

SEQ ID NO: 1169202 - DNA, 25 bp, Homo sapien
atcttcaggatggtgcggacaatga

SEQ ID NO: 1169203 - DNA, 25 bp, Homo sapien
tatcaagggcacaacaagcaccaag

SEQ ID NO: 1169204 - DNA, 25 bp, Homo sapien
ggtataggtcactgtcaccagccta

SEQ ID NO: 1169205 - DNA, 25 bp, Homo sapien
tcagtttccgaatagccatctgcac

SEQ ID NO: 1169206 - DNA, 25 bp, Homo sapien
catctgcacatcgttgttcctgagg

SEQ ID NO: 1169207 - DNA, 25 bp, Homo sapien
caccagcctatctttgcccgatgta

SEQ ID NO: 1169208 - DNA, 25 bp, Homo sapien
tatctgccagctcgtaaggacaggg

SEQ ID NO: 1169209 - DNA, 25 bp, Homo sapien
tcataaactgtcatgcccaggaaca

SEQ ID NO: 1169210 - DNA, 25 bp, Homo sapien
cactggagtggcagttaataaatga

SEQ ID NO: 1169211 - DNA, 25 bp, Homo sapien
cagatggcaacataggaatcataaa

SEQ ID NO: 1169212 - DNA, 25 bp, Homo sapien
cgtaagtgctagaattccaccaatg

SEQ ID NO: 1169213 - DNA, 25 bp, Homo sapien
caagctgaataagcagtgagatgtc

SEQ ID NO: 1169214 - DNA, 25 bp, Homo sapien
taaaatcagaggaaccgtaagtgct

SEQ ID NO: 1169215 - DNA, 25 bp, Homo sapien
caatgaagatgactagctccctgat

SEQ ID NO: 1169216 - DNA, 25 bp, Homo sapien
tccatcgatttgtcttgggtctcgg

SEQ ID NO: 1169217 - DNA, 25 bp, Homo sapien
tgcctgaaaggtgaatgtctcaacc

SEQ ID NO: 1169218 - DNA, 25 bp, Homo sapien
cctccatcgatttgtcttgggtctc

SEQ ID NO: 1169219 - DNA, 25 bp, Homo sapien
tcgatttgtcttgggtctcggtttc

SEQ ID NO: 1169220 - DNA, 25 bp, Homo sapien
agattttgtccaatgcatctgatga

SEQ ID NO: 1169221 - DNA, 25 bp, Homo sapien
aagatctctttcttcgagtagaaag

SEQ ID NO: 1169222 - DNA, 25 bp, Homo sapien
tgaaattagttctctcagaaagatc

SEQ ID NO: 1169223 - DNA, 25 bp, Homo sapien
gtagaaagtattgatgatcagtgac

SEQ ID NO: 1169224 - DNA, 25 bp, Homo sapien
tgtccacaatagtgagggtttgatt

SEQ ID NO: 1169225 - DNA, 25 bp, Homo sapien
ttggtacaaggttaatatgcagccc

SEQ ID NO: 1169226 - DNA, 25 bp, Homo sapien
aattctagtgtccacaatagtgagg

SEQ ID NO: 1169227 - DNA, 25 bp, Homo sapien
tctagtgtccacaatagtgagggtt

SEQ ID NO: 1169228 - DNA, 25 bp, Homo sapien
tgacagtaccgaggttattgatcaa

SEQ ID NO: 1169229 - DNA, 25 bp, Homo sapien
ggtgtactgctcatcattgttatgt

SEQ ID NO: 1169230 - DNA, 25 bp, Homo sapien
tcccaggtgtactgctcatcattgt

SEQ ID NO: 1169231 - DNA, 25 bp, Homo sapien
ttggtgacagtaccgaggttattga

SEQ ID NO: 1169232 - DNA, 25 bp, Homo sapien
acatcttcaatttcaggtttgtctt

SEQ ID NO: 1169233 - DNA, 25 bp, Homo sapien
tatccgtgatggaaactctgtgtac

SEQ ID NO: 1169234 - DNA, 25 bp, Homo sapien
tccgtgatggaaactctgtgtacat

SEQ ID NO: 1169235 - DNA, 25 bp, Homo sapien
atccgtgatggaaactctgtgtaca

SEQ ID NO: 1169236 - DNA, 25 bp, Homo sapien
tcttcatatatttcaagctttacgc

SEQ ID NO: 1169237 - DNA, 25 bp, Homo sapien
aacttcttccaatgttgagagtctt

SEQ ID NO: 1169238 - DNA, 25 bp, Homo sapien
tccaatgttgagagtcttcatatat

SEQ ID NO: 1169239 - DNA, 25 bp, Homo sapien
tatttcaagctttacgcttttagag

SEQ ID NO: 1169240 - DNA, 25 bp, Homo sapien
ctgacactaaagtcttcccctcaaa

SEQ ID NO: 1169241 - DNA, 25 bp, Homo sapien
aagttccaagccctctttggtgact

SEQ ID NO: 1169242 - DNA, 25 bp, Homo sapien
caagccctctttggtgactgacact

SEQ ID NO: 1169243 - DNA, 25 bp, Homo sapien
agccctctttggtgactgacactaa

SEQ ID NO: 1169244 - DNA, 25 bp, Homo sapien
agacttgtacttatctgcctctgcc

SEQ ID NO: 1169245 - DNA, 25 bp, Homo sapien
ccagatcctgcacagacttgtactt

SEQ ID NO: 1169246 - DNA, 25 bp, Homo sapien
gggatcttccagaccaaagccggaa

SEQ ID NO: 1169247 - DNA, 25 bp, Homo sapien
tgtaaagcaagacgaccagatcctg

SEQ ID NO: 1169248 - DNA, 25 bp, Homo sapien
tttaagcaaaatgtgactcgggcac

SEQ ID NO: 1169249 - DNA, 25 bp, Homo sapien
gcaaaatgtgactcgggcactacat

SEQ ID NO: 1169250 - DNA, 25 bp, Homo sapien
ttaagcaaaatgtgactcgggcact

SEQ ID NO: 1169251 - DNA, 25 bp, Homo sapien
aagcaaaatgtgactcgggcactac

SEQ ID NO: 1169252 - DNA, 25 bp, Homo sapien
atatccctgatagatttgttgattt

SEQ ID NO: 1169253 - DNA, 25 bp, Homo sapien
ggtatatccctgatagatttgttga

SEQ ID NO: 1169254 - DNA, 25 bp, Homo sapien
tatccctgatagatttgttgatttc

SEQ ID NO: 1169255 - DNA, 25 bp, Homo sapien
tccctgatagatttgttgatttctt

SEQ ID NO: 1169256 - DNA, 25 bp, Homo sapien
caggaggttacgttggtctgcccca

SEQ ID NO: 1169257 - DNA, 25 bp, Homo sapien
ccacataggagatagcctggtcccc

SEQ ID NO: 1169258 - DNA, 25 bp, Homo sapien
cagaaggaagcagttagtacaggcc

SEQ ID NO: 1169259 - DNA, 25 bp, Homo sapien
tagtgtcattcccagtccaaagagg

SEQ ID NO: 1169260 - DNA, 25 bp, Homo sapien
gggatcctcagtattgctgccaaga

SEQ ID NO: 1169261 - DNA, 25 bp, Homo sapien
tacagtataggtcatggcaataagc

SEQ ID NO: 1169262 - DNA, 25 bp, Homo sapien
cagagctgtctgtatagccctattc

SEQ ID NO: 1169263 - DNA, 25 bp, Homo sapien
ccaagaggaccaaaagactgaggat

SEQ ID NO: 1169264 - DNA, 25 bp, Homo sapien
gaagataaagatggcctcgtgtgtg

SEQ ID NO: 1169265 - DNA, 25 bp, Homo sapien
gcaaagagtacaggcaaatgtggaa

SEQ ID NO: 1169266 - DNA, 25 bp, Homo sapien
tcttagtgtcgtgggaaatttactg

SEQ ID NO: 1169267 - DNA, 25 bp, Homo sapien
tgcatattacatttattgtaggatc

SEQ ID NO: 1169268 - DNA, 25 bp, Homo sapien
tttatggcgtaatatgggaagcccc

SEQ ID NO: 1169269 - DNA, 25 bp, Homo sapien
tatgcagcaatatatggacccacgg

SEQ ID NO: 1169270 - DNA, 25 bp, Homo sapien
tagaaatagggcttgcgtcttccag

SEQ ID NO: 1169271 - DNA, 25 bp, Homo sapien
gctatgactacgttggcttcaccaa

SEQ ID NO: 1169272 - DNA, 25 bp, Homo sapien
gaaaatgccagaaccagggctcgta

SEQ ID NO: 1169273 - DNA, 25 bp, Homo sapien
ggtggccctgcagatatttaaagac

SEQ ID NO: 1169274 - DNA, 25 bp, Homo sapien
gttcaaccatcaaagtacacagtcc

SEQ ID NO: 1169275 - DNA, 25 bp, Homo sapien
gggctcgtaccgctaactcacatgt

SEQ ID NO: 1169276 - DNA, 25 bp, Homo sapien
gaacatatgctaacatgtataacac

SEQ ID NO: 1169277 - DNA, 25 bp, Homo sapien
tatcgctcccacatatggcccttct

SEQ ID NO: 1169278 - DNA, 25 bp, Homo sapien
gtaatgtagtcatgctacctctatc

SEQ ID NO: 1169279 - DNA, 25 bp, Homo sapien
gtagtcatgctacctctatcgctcc

SEQ ID NO: 1169280 - DNA, 25 bp, Homo sapien
tttcgtgagatggagacaatgtgcc

SEQ ID NO: 1169281 - DNA, 25 bp, Homo sapien
ggatactcccagacaactagcttca

SEQ ID NO: 1169282 - DNA, 25 bp, Homo sapien
tgaataacacttaggctgagggcag

SEQ ID NO: 1169283 - DNA, 25 bp, Homo sapien
taggccgagagttgtagaccaacct

SEQ ID NO: 1169284 - DNA, 25 bp, Homo sapien
caaatattggatagcacaatatcca

SEQ ID NO: 1169285 - DNA, 25 bp, Homo sapien
ggtttagataatattacactggaca

SEQ ID NO: 1169286 - DNA, 25 bp, Homo sapien
aaggcaggattaggaggtttagata

SEQ ID NO: 1169287 - DNA, 25 bp, Homo sapien
taatcttctgtaccaggctacacca

SEQ ID NO: 1169288 - DNA, 25 bp, Homo sapien
ccaagagatgattgagggtggtcac

SEQ ID NO: 1169289 - DNA, 25 bp, Homo sapien
gagttggcagttaataagacccagc

SEQ ID NO: 1169290 - DNA, 25 bp, Homo sapien
caatgtgaccactcgtctgagtgaa

SEQ ID NO: 1169291 - DNA, 25 bp, Homo sapien
tacagaacttgaagagcagggttca

SEQ ID NO: 1169292 - DNA, 25 bp, Homo sapien
gattttgaacctgtgctgcgcttgg

SEQ ID NO: 1169293 - DNA, 25 bp, Homo sapien
tgcgcttggcctgtacagacacgtc

SEQ ID NO: 1169294 - DNA, 25 bp, Homo sapien
gattccctctgttgaaggccgccag

SEQ ID NO: 1169295 - DNA, 25 bp, Homo sapien
gacacgtccatgattctgattgagg

SEQ ID NO: 1169296 - DNA, 25 bp, Homo sapien
tggaatgttgattacccactgaata

SEQ ID NO: 1169297 - DNA, 25 bp, Homo sapien
aaaggaaacaagagactcctataat

SEQ ID NO: 1169298 - DNA, 25 bp, Homo sapien
caagagactcctataattggaatgt

SEQ ID NO: 1169299 - DNA, 25 bp, Homo sapien
ggaatgttgattacccactgaatat

SEQ ID NO: 1169300 - DNA, 25 bp, Homo sapien
tcccactggccgtcaactgtgtcat

SEQ ID NO: 1169301 - DNA, 25 bp, Homo sapien
ctgattcccactggccgtcaactgt

SEQ ID NO: 1169302 - DNA, 25 bp, Homo sapien
gattcccactggccgtcaactgtgt

SEQ ID NO: 1169303 - DNA, 25 bp, Homo sapien
ttcccactggccgtcaactgtgtca

SEQ ID NO: 1169304 - DNA, 25 bp, Homo sapien
tgcaatctcaggaagcacaaggagg

SEQ ID NO: 1169305 - DNA, 25 bp, Homo sapien
tgcccacctggatgacaatgaacat

SEQ ID NO: 1169306 - DNA, 25 bp, Homo sapien
gatagctatgtacctgtcaatggcc

SEQ ID NO: 1169307 - DNA, 25 bp, Homo sapien
gctttctgtgataccaagtgagtgg

SEQ ID NO: 1169308 - DNA, 25 bp, Homo sapien
ccggatgtaggatagagcaatgacc

SEQ ID NO: 1169309 - DNA, 25 bp, Homo sapien
tacaatttccgctgcatggatggca

SEQ ID NO: 1169310 - DNA, 25 bp, Homo sapien
gctgtgtcccaaaacactgagtagg

SEQ ID NO: 1169311 - DNA, 25 bp, Homo sapien
gcaatgaccaggaaggaggctacaa

SEQ ID NO: 1169312 - DNA, 25 bp, Homo sapien
catccaggaagactagagcttgtaa

SEQ ID NO: 1169313 - DNA, 25 bp, Homo sapien
taatataaattgcagactgggtagt

SEQ ID NO: 1169314 - DNA, 25 bp, Homo sapien
gtcagtattggacacatgttcattg

SEQ ID NO: 1169315 - DNA, 25 bp, Homo sapien
tgaatgtgtgatagcaagagtgaac

SEQ ID NO: 1169316 - DNA, 25 bp, Homo sapien
actgaaaccttgaacattctggaac

SEQ ID NO: 1169317 - DNA, 25 bp, Homo sapien
gcctgataaaccctttgtactgcaa

SEQ ID NO: 1169318 - DNA, 25 bp, Homo sapien
gttggttcatatcatgactgaaacc

SEQ ID NO: 1169319 - DNA, 25 bp, Homo sapien
gcactgaaactctggaatgataggg

SEQ ID NO: 1169320 - DNA, 25 bp, Homo sapien
tggcacttgttagagccactctcaa

SEQ ID NO: 1169321 - DNA, 25 bp, Homo sapien
gagtcactgtcttgtttaggacaga

SEQ ID NO: 1169322 - DNA, 25 bp, Homo sapien
tcaatcttgattgtagatggccttc

SEQ ID NO: 1169323 - DNA, 25 bp, Homo sapien
gaatcactgtccgtaaagctttgga

SEQ ID NO: 1169324 - DNA, 25 bp, Homo sapien
tttcttcaaaggtgctatacaaatg

SEQ ID NO: 1169325 - DNA, 25 bp, Homo sapien
ttcttcaaaggtgctatacaaatgg

SEQ ID NO: 1169326 - DNA, 25 bp, Homo sapien
tctgtcagacaaccaagtaggtttc

SEQ ID NO: 1169327 - DNA, 25 bp, Homo sapien
ggtttctgtcagacaaccaagtagg

SEQ ID NO: 1169328 - DNA, 25 bp, Homo sapien
aggtttctgtcagacaaccaagtag

SEQ ID NO: 1169329 - DNA, 25 bp, Homo sapien
tttctgtcagacaaccaagtaggtt

SEQ ID NO: 1169330 - DNA, 25 bp, Homo sapien
tctagacaggcaacgccttggaact

SEQ ID NO: 1169331 - DNA, 25 bp, Homo sapien
tagttagtcctaaatcataggccag

SEQ ID NO: 1169332 - DNA, 25 bp, Homo sapien
taagtgatggcatatctttggcaag

SEQ ID NO: 1169333 - DNA, 25 bp, Homo sapien
cataggccagtaaggacttaattga

SEQ ID NO: 1169334 - DNA, 25 bp, Homo sapien
gcaggtgccgcaagacccacttctt

SEQ ID NO: 1169335 - DNA, 25 bp, Homo sapien
cttgcttccgatgtcagtttgtttc

SEQ ID NO: 1169336 - DNA, 25 bp, Homo sapien
ctccctcttgcttccgatgtcagtt

SEQ ID NO: 1169337 - DNA, 25 bp, Homo sapien
tgagctacaggaatcctccctcttg

SEQ ID NO: 1169338 - DNA, 25 bp, Homo sapien
ctcttgggacaccttattccttttg

SEQ ID NO: 1169339 - DNA, 25 bp, Homo sapien
cggagtaaacgaagtgttggatgga

SEQ ID NO: 1169340 - DNA, 25 bp, Homo sapien
gggtagtgggggatgatccacagct

SEQ ID NO: 1169341 - DNA, 25 bp, Homo sapien
gacctgggggcttactctgctcttg

SEQ ID NO: 1169342 - DNA, 25 bp, Homo sapien
taaatggcgctgttgctttcagtac

SEQ ID NO: 1169343 - DNA, 25 bp, Homo sapien
taaagtcagacacagatgatgcttc

SEQ ID NO: 1169344 - DNA, 25 bp, Homo sapien
caccactgtcactgggtcgttttgg

SEQ ID NO: 1169345 - DNA, 25 bp, Homo sapien
gaaatattgagtcttactggccact

SEQ ID NO: 1169346 - DNA, 25 bp, Homo sapien
gcaaaagaagattaacatcctgttt

SEQ ID NO: 1169347 - DNA, 25 bp, Homo sapien
tgcaaaagaagattaacatcctgtt

SEQ ID NO: 1169348 - DNA, 25 bp, Homo sapien
ctgcaaaagaagattaacatcctgt

SEQ ID NO: 1169349 - DNA, 25 bp, Homo sapien
catccatggatcctgtattatcctg

SEQ ID NO: 1169350 - DNA, 25 bp, Homo sapien
tgaaggcagaagagtcgaagtttat

SEQ ID NO: 1169351 - DNA, 25 bp, Homo sapien
cagtttcagcttgcggtcaactgtt

SEQ ID NO: 1169352 - DNA, 25 bp, Homo sapien
cacttgatattgtgccattttccac

SEQ ID NO: 1169353 - DNA, 25 bp, Homo sapien
cttgatgaagctgtgacttccacac

SEQ ID NO: 1169354 - DNA, 25 bp, Homo sapien
ttgatgaagctgtgacttccacaca

SEQ ID NO: 1169355 - DNA, 25 bp, Homo sapien
tgatgaagctgtgacttccacacac

SEQ ID NO: 1169356 - DNA, 25 bp, Homo sapien
aaatgcaagggcattgtttaggttc

SEQ ID NO: 1169357 - DNA, 25 bp, Homo sapien
aatgcaagggcattgtttaggttct

SEQ ID NO: 1169358 - DNA, 25 bp, Homo sapien
gttctccttccactcgctggactct

SEQ ID NO: 1169359 - DNA, 25 bp, Homo sapien
ttaggttctccttccactcgctgga

SEQ ID NO: 1169360 - DNA, 25 bp, Homo sapien
ttaacattcattggtccttccttgt

SEQ ID NO: 1169361 - DNA, 25 bp, Homo sapien
taacattcattggtccttccttgtt

SEQ ID NO: 1169362 - DNA, 25 bp, Homo sapien
aacattcattggtccttccttgttt

SEQ ID NO: 1169363 - DNA, 25 bp, Homo sapien
gttataaaagctcttaatatgctag

SEQ ID NO: 1169364 - DNA, 25 bp, Homo sapien
aaactaatctataactcagttataa

SEQ ID NO: 1169365 - DNA, 25 bp, Homo sapien
ttttaagcggaagttgtttgttgca

SEQ ID NO: 1169366 - DNA, 25 bp, Homo sapien
catcatttaaatgaattactgaaat

SEQ ID NO: 1169367 - DNA, 25 bp, Homo sapien
tgcctcgtgaatgtcataaaagcaa

SEQ ID NO: 1169368 - DNA, 25 bp, Homo sapien
tttgcctcgtgaatgtcataaaagc

SEQ ID NO: 1169369 - DNA, 25 bp, Homo sapien
attttttgcctcgtgaatgtcataa

SEQ ID NO: 1169370 - DNA, 25 bp, Homo sapien
ttttgcctcgtgaatgtcataaaag

SEQ ID NO: 1169371 - DNA, 25 bp, Homo sapien
ctggaggacacagttgcataaagga

SEQ ID NO: 1169372 - DNA, 25 bp, Homo sapien
ggaatcctttcctctagatctgcta

SEQ ID NO: 1169373 - DNA, 25 bp, Homo sapien
gaggacacagttgcataaaggaatc

SEQ ID NO: 1169374 - DNA, 25 bp, Homo sapien
gacacagttgcataaaggaatcctt

SEQ ID NO: 1169375 - DNA, 25 bp, Homo sapien
gttgttgtccccttcagagaaacca

SEQ ID NO: 1169376 - DNA, 25 bp, Homo sapien
gtcatattcgtctctccttgttgaa

SEQ ID NO: 1169377 - DNA, 25 bp, Homo sapien
ccattatctgtaggtgacgggtaga

SEQ ID NO: 1169378 - DNA, 25 bp, Homo sapien
gaacattgttcttgtatttactcac

SEQ ID NO: 1169379 - DNA, 25 bp, Homo sapien
gctgaagtgatagtcattgatggct

SEQ ID NO: 1169380 - DNA, 25 bp, Homo sapien
gaacttcttgtctgtggttgctaaa

SEQ ID NO: 1169381 - DNA, 25 bp, Homo sapien
gaggacatctaaacccagagcagat

SEQ ID NO: 1169382 - DNA, 25 bp, Homo sapien
tagttggacctacttttctctgctt

SEQ ID NO: 1169383 - DNA, 25 bp, Homo sapien
tcctcttctttgatgaggtttttcc

SEQ ID NO: 1169384 - DNA, 25 bp, Homo sapien
cagttgaggaagtgttgggtggagc

SEQ ID NO: 1169385 - DNA, 25 bp, Homo sapien
ctcagttgaggaagtgttgggtgga

SEQ ID NO: 1169386 - DNA, 25 bp, Homo sapien
tcagttgaggaagtgttgggtggag

SEQ ID NO: 1169387 - DNA, 25 bp, Homo sapien
tcctttgacgtattaccatcttttg

SEQ ID NO: 1169388 - DNA, 25 bp, Homo sapien
cctttgacgtattaccatcttttga

SEQ ID NO: 1169389 - DNA, 25 bp, Homo sapien
tcagcaatctcctttgacgtattac

SEQ ID NO: 1169390 - DNA, 25 bp, Homo sapien
caatctcctttgacgtattaccatc

SEQ ID NO: 1169391 - DNA, 25 bp, Homo sapien
agcagtctttgcttgtcagttcccc

SEQ ID NO: 1169392 - DNA, 25 bp, Homo sapien
gcagtctttgcttgtcagttcccca

SEQ ID NO: 1169393 - DNA, 25 bp, Homo sapien
ctttgcttgtcagttccccacagag

SEQ ID NO: 1169394 - DNA, 25 bp, Homo sapien
cagtctttgcttgtcagttccccac

SEQ ID NO: 1169395 - DNA, 25 bp, Homo sapien
ggttgctgcttatgtggactcatgg

SEQ ID NO: 1169396 - DNA, 25 bp, Homo sapien
aaagcaaggatgatatgggggtcca

SEQ ID NO: 1169397 - DNA, 25 bp, Homo sapien
cttgtgcggtagagaagatagctga

SEQ ID NO: 1169398 - DNA, 25 bp, Homo sapien
tgcttatgggctttaggttgctgct

SEQ ID NO: 1169399 - DNA, 25 bp, Homo sapien
aacccatttactgtctcctcccaga

SEQ ID NO: 1169400 - DNA, 25 bp, Homo sapien
gccaactatttcatgctgtgctgtg

SEQ ID NO: 1169401 - DNA, 25 bp, Homo sapien
agagaagcaattttgagactccttc

SEQ ID NO: 1169402 - DNA, 25 bp, Homo sapien
tgagactccttccataaattttcat

SEQ ID NO: 1169403 - DNA, 25 bp, Homo sapien
tttaatagcctggtaggacctctgg

SEQ ID NO: 1169404 - DNA, 25 bp, Homo sapien
tagtcgtgggctgctcactatgagg

SEQ ID NO: 1169405 - DNA, 25 bp, Homo sapien
gattgataatcttcaataattcctc

SEQ ID NO: 1169406 - DNA, 25 bp, Homo sapien
tctttaggaaaaattgcttgctctg

SEQ ID NO: 1169407 - DNA, 25 bp, Homo sapien
tctgacttctcatctatgtgaccca

SEQ ID NO: 1169408 - DNA, 25 bp, Homo sapien
gtatctgacttctcatctatgtgac

SEQ ID NO: 1169409 - DNA, 25 bp, Homo sapien
ctgtgagttgatcggacttaactgt

SEQ ID NO: 1169410 - DNA, 25 bp, Homo sapien
gagttgatcggacttaactgtatct

SEQ ID NO: 1169411 - DNA, 25 bp, Homo sapien
cactgaacttctggtagaccgagag

SEQ ID NO: 1169412 - DNA, 25 bp, Homo sapien
tgcactgaacttctggtagaccgag

SEQ ID NO: 1169413 - DNA, 25 bp, Homo sapien
tggtagaccgagagtcctgttaaac

SEQ ID NO: 1169414 - DNA, 25 bp, Homo sapien
gagtcctgttaaaccctttgctcag

SEQ ID NO: 1169415 - DNA, 25 bp, Homo sapien
gattacattcatgattcctcaggtt

SEQ ID NO: 1169416 - DNA, 25 bp, Homo sapien
aatgattacattcatgattcctcag

SEQ ID NO: 1169417 - DNA, 25 bp, Homo sapien
tgattacattcatgattcctcaggt

SEQ ID NO: 1169418 - DNA, 25 bp, Homo sapien
attacattcatgattcctcaggttt

SEQ ID NO: 1169419 - DNA, 25 bp, Homo sapien
tatgagagaagcaaggtggtttctt

SEQ ID NO: 1169420 - DNA, 25 bp, Homo sapien
gggagatcttggtaggagcatctat

SEQ ID NO: 1169421 - DNA, 25 bp, Homo sapien
cctcctttcctgtgcggttgcaggg

SEQ ID NO: 1169422 - DNA, 25 bp, Homo sapien
ctctattccgatgaatgattgtcaa

SEQ ID NO: 1169423 - DNA, 25 bp, Homo sapien
tgaaatacaggatgttataatctcc

SEQ ID NO: 1169424 - DNA, 25 bp, Homo sapien
aatcagtcagtaaagctctcagaaa

SEQ ID NO: 1169425 - DNA, 25 bp, Homo sapien
gtcacttgactagtgctggcttcct

SEQ ID NO: 1169426 - DNA, 25 bp, Homo sapien
aatgaggattgttttgaatagggaa

SEQ ID NO: 1169427 - DNA, 25 bp, Homo sapien
gaaagccagcttatctatgctagaa

SEQ ID NO: 1169428 - DNA, 25 bp, Homo sapien
ttgagaggagtacaagaaaataccg

SEQ ID NO: 1169429 - DNA, 25 bp, Homo sapien
gaaagtataccaacatggtggaggg

SEQ ID NO: 1169430 - DNA, 25 bp, Homo sapien
cattatacaactatgcatgtgagca

SEQ ID NO: 1169431 - DNA, 25 bp, Homo sapien
tgatgacctctaatcctttcagtag

SEQ ID NO: 1169432 - DNA, 25 bp, Homo sapien
tattagtttgcccaaaccggcatca

SEQ ID NO: 1169433 - DNA, 25 bp, Homo sapien
attagtttgcccaaaccggcatcac

SEQ ID NO: 1169434 - DNA, 25 bp, Homo sapien
cattgcagggagtgggtgttccctc

SEQ ID NO: 1169435 - DNA, 25 bp, Homo sapien
aagggtggggatcattgcagggagt

SEQ ID NO: 1169436 - DNA, 25 bp, Homo sapien
gggatcattgcagggagtgggtgtt

SEQ ID NO: 1169437 - DNA, 25 bp, Homo sapien
tgcagggagtgggtgttccctcttc

SEQ ID NO: 1169438 - DNA, 25 bp, Homo sapien
cagacgtgagcaacagcgccaggct

SEQ ID NO: 1169439 - DNA, 25 bp, Homo sapien
caataacatgacaagaggggaggtc

SEQ ID NO: 1169440 - DNA, 25 bp, Homo sapien
acgtgagcaacagcgccaggctgag

SEQ ID NO: 1169441 - DNA, 25 bp, Homo sapien
agcaacagcgccaggctgagtttgt

SEQ ID NO: 1169442 - DNA, 25 bp, Homo sapien
tggaatggattcaattttatttgca

SEQ ID NO: 1169443 - DNA, 25 bp, Homo sapien
ctggaatggattcaattttatttgc

SEQ ID NO: 1169444 - DNA, 25 bp, Homo sapien
ggaatggattcaattttatttgcaa

SEQ ID NO: 1169445 - DNA, 25 bp, Homo sapien
cctttagctgtgagacggttgcttg

SEQ ID NO: 1169446 - DNA, 25 bp, Homo sapien
tctgtttcgtctttttagatgggat

SEQ ID NO: 1169447 - DNA, 25 bp, Homo sapien
gtgcatgcaggtgtagcaggataca

SEQ ID NO: 1169448 - DNA, 25 bp, Homo sapien
tgtagcaggatacacttctttctgt

SEQ ID NO: 1169449 - DNA, 25 bp, Homo sapien
tgacttgcagttaagaaactaggct

SEQ ID NO: 1169450 - DNA, 25 bp, Homo sapien
gacagattgagtggaacagccacag

SEQ ID NO: 1169451 - DNA, 25 bp, Homo sapien
gaaacttaagtacatccccaggcca

SEQ ID NO: 1169452 - DNA, 25 bp, Homo sapien
aataactgcctgctggacagattga

SEQ ID NO: 1169453 - DNA, 25 bp, Homo sapien
ggaaggccgagtctgctctttggac

SEQ ID NO: 1169454 - DNA, 25 bp, Homo sapien
aaggccgagtctgctctttggacat

SEQ ID NO: 1169455 - DNA, 25 bp, Homo sapien
agcaggaaggccgagtctgctcttt

SEQ ID NO: 1169456 - DNA, 25 bp, Homo sapien
ggaacggcccatggctgtggacgtg

SEQ ID NO: 1169457 - DNA, 25 bp, Homo sapien
gattcctacattttgggttgaagaa

SEQ ID NO: 1169458 - DNA, 25 bp, Homo sapien
gatgaaatcagattcctacattttg

SEQ ID NO: 1169459 - DNA, 25 bp, Homo sapien
cagattcctacattttgggttgaag

SEQ ID NO: 1169460 - DNA, 25 bp, Homo sapien
aatcagattcctacattttgggttg

SEQ ID NO: 1169461 - DNA, 25 bp, Homo sapien
ggcagtagacagtgagtctgttgct

SEQ ID NO: 1169462 - DNA, 25 bp, Homo sapien
tgcagtcagagataatgtcaagttc

SEQ ID NO: 1169463 - DNA, 25 bp, Homo sapien
gctgaaagttccagattccgcagtt

SEQ ID NO: 1169464 - DNA, 25 bp, Homo sapien
tgagcaaagggaatgggtgtataat

SEQ ID NO: 1169465 - DNA, 25 bp, Homo sapien
tctaagtgaggattccctgaggata

SEQ ID NO: 1169466 - DNA, 25 bp, Homo sapien
tctcaatattgggatccagagggtg

SEQ ID NO: 1169467 - DNA, 25 bp, Homo sapien
cagacactgaactaggccctcgttt

SEQ ID NO: 1169468 - DNA, 25 bp, Homo sapien
ccctcgtttacagtggtccacagaa

SEQ ID NO: 1169469 - DNA, 25 bp, Homo sapien
tttgttgcatttagtaccatcgcga

SEQ ID NO: 1169470 - DNA, 25 bp, Homo sapien
tatttttactggcagttgcgtgacg

SEQ ID NO: 1169471 - DNA, 25 bp, Homo sapien
cgcgattattgggtcttctcggaaa

SEQ ID NO: 1169472 - DNA, 25 bp, Homo sapien
tgcgtgacggttggccaatggtttt

SEQ ID NO: 1169473 - DNA, 25 bp, Homo sapien
ccatacttcctgttttatcctgaat

SEQ ID NO: 1169474 - DNA, 25 bp, Homo sapien
tagattgtcgtcttcctatttacaa

SEQ ID NO: 1169475 - DNA, 25 bp, Homo sapien
tttctcagtcgaaagcagaagagtc

SEQ ID NO: 1169476 - DNA, 25 bp, Homo sapien
tccttttcctactacagccatactt

SEQ ID NO: 1169477 - DNA, 25 bp, Homo sapien
tagtgccatgctcctggagtcatgg

SEQ ID NO: 1169478 - DNA, 25 bp, Homo sapien
ccatgctcctggagtcatggcttct

SEQ ID NO: 1169479 - DNA, 25 bp, Homo sapien
tgctcctggagtcatggcttctctg

SEQ ID NO: 1169480 - DNA, 25 bp, Homo sapien
gggtagtgccatgctcctggagtca

SEQ ID NO: 1169481 - DNA, 25 bp, Homo sapien
ctgaaggttttggatgctgactctg

SEQ ID NO: 1169482 - DNA, 25 bp, Homo sapien
ggcctctgaaggttttggatgctga

SEQ ID NO: 1169483 - DNA, 25 bp, Homo sapien
gctggcctctgaaggttttggatgc

SEQ ID NO: 1169484 - DNA, 25 bp, Homo sapien
ctctgaaggttttggatgctgactc

SEQ ID NO: 1169485 - DNA, 25 bp, Homo sapien
gataagagtcatgggacccaggata

SEQ ID NO: 1169486 - DNA, 25 bp, Homo sapien
agtcatgggacccaggatattgtac

SEQ ID NO: 1169487 - DNA, 25 bp, Homo sapien
taagagtcatgggacccaggatatt

SEQ ID NO: 1169488 - DNA, 25 bp, Homo sapien
agagtcatgggacccaggatattgt

SEQ ID NO: 1169489 - DNA, 25 bp, Homo sapien
ttctgcatacacagaaaccggaatt

SEQ ID NO: 1169490 - DNA, 25 bp, Homo sapien
ccggaattacaaacttcactctgaa

SEQ ID NO: 1169491 - DNA, 25 bp, Homo sapien
tgtctgatgggtgtttattaactaa

SEQ ID NO: 1169492 - DNA, 25 bp, Homo sapien
ctctgaaaatgtctgatgggtgttt

SEQ ID NO: 1169493 - DNA, 25 bp, Homo sapien
cttcatttcactacgtatccagtag

SEQ ID NO: 1169494 - DNA, 25 bp, Homo sapien
tctgccttcatttcactacgtatcc

SEQ ID NO: 1169495 - DNA, 25 bp, Homo sapien
gccttcatttcactacgtatccagt

SEQ ID NO: 1169496 - DNA, 25 bp, Homo sapien
catttcactacgtatccagtagtca

SEQ ID NO: 1169497 - DNA, 25 bp, Homo sapien
caaccgtttcagatttcactagggc

SEQ ID NO: 1169498 - DNA, 25 bp, Homo sapien
tcactagggcattcccagaacatgt

SEQ ID NO: 1169499 - DNA, 25 bp, Homo sapien
cattttgctatcagcactctctgaa

SEQ ID NO: 1169500 - DNA, 25 bp, Homo sapien
ccagtgatttgcatcaggtatccaa

SEQ ID NO: 1169501 - DNA, 25 bp, Homo sapien
caggcgatgactgtgctcctgggtg

SEQ ID NO: 1169502 - DNA, 25 bp, Homo sapien
tttgcaggcgatgactgtgctcctg

SEQ ID NO: 1169503 - DNA, 25 bp, Homo sapien
ttgcaggcgatgactgtgctcctgg

SEQ ID NO: 1169504 - DNA, 25 bp, Homo sapien
tgcaggcgatgactgtgctcctggg

SEQ ID NO: 1169505 - DNA, 25 bp, Homo sapien
tagggacatccttggtaatttagga

SEQ ID NO: 1169506 - DNA, 25 bp, Homo sapien
ggactgttatgaggtatgttggcca

SEQ ID NO: 1169507 - DNA, 25 bp, Homo sapien
gttcattgtgtaccacaaataattg

SEQ ID NO: 1169508 - DNA, 25 bp, Homo sapien
tccctcttctgttcattgtgtacca

SEQ ID NO: 1169509 - DNA, 25 bp, Homo sapien
agataaaaataaacccgttgagatg

SEQ ID NO: 1169510 - DNA, 25 bp, Homo sapien
aataaacccgttgagatgcagggag

SEQ ID NO: 1169511 - DNA, 25 bp, Homo sapien
aaacccgttgagatgcagggagtca

SEQ ID NO: 1169512 - DNA, 25 bp, Homo sapien
aaaaataaacccgttgagatgcagg

SEQ ID NO: 1169513 - DNA, 25 bp, Homo sapien
ttatttgatatccttgtccttggtg

SEQ ID NO: 1169514 - DNA, 25 bp, Homo sapien
tatttgatatccttgtccttggtga

SEQ ID NO: 1169515 - DNA, 25 bp, Homo sapien
atttgatatccttgtccttggtgac

SEQ ID NO: 1169516 - DNA, 25 bp, Homo sapien
tctgtgctttgatcttatcttcata

SEQ ID NO: 1169517 - DNA, 25 bp, Homo sapien
aaacatcattaccaatggcatcagg

SEQ ID NO: 1169518 - DNA, 25 bp, Homo sapien
gtttttaggtggaggacttcaggca

SEQ ID NO: 1169519 - DNA, 25 bp, Homo sapien
caggcaaaatttccacacttgagta

SEQ ID NO: 1169520 - DNA, 25 bp, Homo sapien
aaaatgcacccttaatactccattt

SEQ ID NO: 1169521 - DNA, 25 bp, Homo sapien
aaatgcacccttaatactccatttc

SEQ ID NO: 1169522 - DNA, 25 bp, Homo sapien
taaaatgcacccttaatactccatt

SEQ ID NO: 1169523 - DNA, 25 bp, Homo sapien
ctacttgtggtcccaagtaggagct

SEQ ID NO: 1169524 - DNA, 25 bp, Homo sapien
taaacagcacgagtagccaacttga

SEQ ID NO: 1169525 - DNA, 25 bp, Homo sapien
gaggaagaccgtatttttcagaagc

SEQ ID NO: 1169526 - DNA, 25 bp, Homo sapien
taaaacgctggcatggtgtctgcag

SEQ ID NO: 1169527 - DNA, 25 bp, Homo sapien
ggtccgtttctcagtcaagacttgg

SEQ ID NO: 1169528 - DNA, 25 bp, Homo sapien
tattgccacaggcaaactgcatact

SEQ ID NO: 1169529 - DNA, 25 bp, Homo sapien
gtttaatattgccacaggcaaactg

SEQ ID NO: 1169530 - DNA, 25 bp, Homo sapien
gataacatcaccgatgaggaactgg

SEQ ID NO: 1169531 - DNA, 25 bp, Homo sapien
cagcctggataacatcaccgatgag

SEQ ID NO: 1169532 - DNA, 25 bp, Homo sapien
catagtttggatcccttataagctg

SEQ ID NO: 1169533 - DNA, 25 bp, Homo sapien
aatataaggagatactcttgctaac

SEQ ID NO: 1169534 - DNA, 25 bp, Homo sapien
tataagctgaaaagtcgtgagatgg

SEQ ID NO: 1169535 - DNA, 25 bp, Homo sapien
gaatgttgaatcacttttggtggta

SEQ ID NO: 1169536 - DNA, 25 bp, Homo sapien
gtgggaggatgttcctggaagcagc

SEQ ID NO: 1169537 - DNA, 25 bp, Homo sapien
taaggagtgggaggatgttcctgga

SEQ ID NO: 1169538 - DNA, 25 bp, Homo sapien
gattgtttgagcttccttcaatctg

SEQ ID NO: 1169539 - DNA, 25 bp, Homo sapien
ttcctgcttaaatggattgtttgag

SEQ ID NO: 1169540 - DNA, 25 bp, Homo sapien
gccttaggccatctggttgctctct

SEQ ID NO: 1169541 - DNA, 25 bp, Homo sapien
gatagtgccttaggccatctggttg

SEQ ID NO: 1169542 - DNA, 25 bp, Homo sapien
cgatagtgccttaggccatctggtt

SEQ ID NO: 1169543 - DNA, 25 bp, Homo sapien
agtgccttaggccatctggttgctc

SEQ ID NO: 1169544 - DNA, 25 bp, Homo sapien
aagagaagtcagatctccacctcgc

SEQ ID NO: 1169545 - DNA, 25 bp, Homo sapien
acaggaggcagtcttaagcgggaac

SEQ ID NO: 1169546 - DNA, 25 bp, Homo sapien
cttaagcgggaacaagagaagtcag

SEQ ID NO: 1169547 - DNA, 25 bp, Homo sapien
aacaagagaagtcagatctccacct

SEQ ID NO: 1169548 - DNA, 25 bp, Homo sapien
acatctctgggtgttcgtgataatc

SEQ ID NO: 1169549 - DNA, 25 bp, Homo sapien
gcaaagaggatctggaatgatggcc

SEQ ID NO: 1169550 - DNA, 25 bp, Homo sapien
ggtactctttacgtggatacattga

SEQ ID NO: 1169551 - DNA, 25 bp, Homo sapien
ccaaactagggccatgaagtgaata

SEQ ID NO: 1169552 - DNA, 25 bp, Homo sapien
aggacagtgggtgccctttagcgtg

SEQ ID NO: 1169553 - DNA, 25 bp, Homo sapien
ctgttaaggacagtgggtgcccttt

SEQ ID NO: 1169554 - DNA, 25 bp, Homo sapien
taaggacagtgggtgccctttagcg

SEQ ID NO: 1169555 - DNA, 25 bp, Homo sapien
tgttaaggacagtgggtgcccttta

SEQ ID NO: 1169556 - DNA, 25 bp, Homo sapien
cgtggatagtggactctcaacatga

SEQ ID NO: 1169557 - DNA, 25 bp, Homo sapien
tcctggataaacaaacgtggatagt

SEQ ID NO: 1169558 - DNA, 25 bp, Homo sapien
ggaaaatgcactgaacttccggtag

SEQ ID NO: 1169559 - DNA, 25 bp, Homo sapien
acatgacagcatcgaagacttgaaa

SEQ ID NO: 1169560 - DNA, 25 bp, Homo sapien
aaaaggccttggttgagtcacttag

SEQ ID NO: 1169561 - DNA, 25 bp, Homo sapien
ttgctcctattctgctattgcccca

SEQ ID NO: 1169562 - DNA, 25 bp, Homo sapien
gctgactagtgctggcttgctccta

SEQ ID NO: 1169563 - DNA, 25 bp, Homo sapien
cacttagttagctgactagtgctgg

SEQ ID NO: 1169564 - DNA, 25 bp, Homo sapien
gaaacggaaccgcaggatgttgtaa

SEQ ID NO: 1169565 - DNA, 25 bp, Homo sapien
ttgtaatctccagaaacgctaagaa

SEQ ID NO: 1169566 - DNA, 25 bp, Homo sapien
tcccagaaacggaaccgcaggatgt

SEQ ID NO: 1169567 - DNA, 25 bp, Homo sapien
gaaatgcaggaatcaatgcttattt

SEQ ID NO: 1169568 - DNA, 25 bp, Homo sapien
ctcagtaaggacttaaccattctaa

SEQ ID NO: 1169569 - DNA, 25 bp, Homo sapien
tgatgacctctaatccttttagtag

SEQ ID NO: 1169570 - DNA, 25 bp, Homo sapien
gatgacctctaatccttttagtaga

SEQ ID NO: 1169571 - DNA, 25 bp, Homo sapien
tcttcaagcgttggtatatcttcga

SEQ ID NO: 1169572 - DNA, 25 bp, Homo sapien
caagcgttggtatatcttcgaaaat

SEQ ID NO: 1169573 - DNA, 25 bp, Homo sapien
ccaggtcttcaagcgttggtatatc

SEQ ID NO: 1169574 - DNA, 25 bp, Homo sapien
agccaggtcttcaagcgttggtata

SEQ ID NO: 1169575 - DNA, 25 bp, Homo sapien
cagcctggccttaaggagaccagca

SEQ ID NO: 1169576 - DNA, 25 bp, Homo sapien
tctagctctactgcattagcccagc

SEQ ID NO: 1169577 - DNA, 25 bp, Homo sapien
tcagttcctgcttgagggttcagct

SEQ ID NO: 1169578 - DNA, 25 bp, Homo sapien
ctgaagcagtttcaatacaatttgc

SEQ ID NO: 1169579 - DNA, 25 bp, Homo sapien
aaggaagacatataaacgatctccg

SEQ ID NO: 1169580 - DNA, 25 bp, Homo sapien
ggaagacatataaacgatctccgac

SEQ ID NO: 1169581 - DNA, 25 bp, Homo sapien
gaagacatataaacgatctccgaca

SEQ ID NO: 1169582 - DNA, 25 bp, Homo sapien
aagacatataaacgatctccgacag

SEQ ID NO: 1169583 - DNA, 25 bp, Homo sapien
cagttttgacagtgctgcttgtgga

SEQ ID NO: 1169584 - DNA, 25 bp, Homo sapien
agttttgacagtgctgcttgtggag

SEQ ID NO: 1169585 - DNA, 25 bp, Homo sapien
tcagttttgacagtgctgcttgtgg

SEQ ID NO: 1169586 - DNA, 25 bp, Homo sapien
cttcagttttgacagtgctgcttgt

SEQ ID NO: 1169587 - DNA, 25 bp, Homo sapien
attctcacgttgacactccactcta

SEQ ID NO: 1169588 - DNA, 25 bp, Homo sapien
tgattctcacgttgacactccactc

SEQ ID NO: 1169589 - DNA, 25 bp, Homo sapien
gattctcacgttgacactccactct

SEQ ID NO: 1169590 - DNA, 25 bp, Homo sapien
ctgattctcacgttgacactccact

SEQ ID NO: 1169591 - DNA, 25 bp, Homo sapien
gctgagtctgttcctcggacacctt

SEQ ID NO: 1169592 - DNA, 25 bp, Homo sapien
tggacatgccggctcctgcaggaga

SEQ ID NO: 1169593 - DNA, 25 bp, Homo sapien
tgacaatgaggtcttgggagatggg

SEQ ID NO: 1169594 - DNA, 25 bp, Homo sapien
gaacggcccatggctgtggacatgc

SEQ ID NO: 1169595 - DNA, 25 bp, Homo sapien
tgagaacacaagtaggataaacccc

SEQ ID NO: 1169596 - DNA, 25 bp, Homo sapien
catagtgttcctacccaagattcag

SEQ ID NO: 1169597 - DNA, 25 bp, Homo sapien
tcagttatcaccagtgtagacaggg

SEQ ID NO: 1169598 - DNA, 25 bp, Homo sapien
tcagtttgcttacagcaggtgagaa

SEQ ID NO: 1169599 - DNA, 25 bp, Homo sapien
taatttcttatactatttctcttac

SEQ ID NO: 1169600 - DNA, 25 bp, Homo sapien
gaaataatttcttatactatttctc

SEQ ID NO: 1169601 - DNA, 25 bp, Homo sapien
gttgtactcagtaccttcactatca

SEQ ID NO: 1169602 - DNA, 25 bp, Homo sapien
tatcactgggcgtttttggagaaca

SEQ ID NO: 1169603 - DNA, 25 bp, Homo sapien
tgacatttggccactgttttcgggt

SEQ ID NO: 1169604 - DNA, 25 bp, Homo sapien
catttcttctgggagttacctgaca

SEQ ID NO: 1169605 - DNA, 25 bp, Homo sapien
tccaaataatctgatatgatgatga

SEQ ID NO: 1169606 - DNA, 25 bp, Homo sapien
cttatgtagcataaataccccatat

SEQ ID NO: 1169607 - DNA, 25 bp, Homo sapien
gacctctaggagactatcatattcc

SEQ ID NO: 1169608 - DNA, 25 bp, Homo sapien
ggaccagcttcagatacagtagatt

SEQ ID NO: 1169609 - DNA, 25 bp, Homo sapien
taggcaaagcttcatctcacacatc

SEQ ID NO: 1169610 - DNA, 25 bp, Homo sapien
catctcacacatcaagacttttaat

SEQ ID NO: 1169611 - DNA, 25 bp, Homo sapien
ttataggcaaagcttcatctcacac

SEQ ID NO: 1169612 - DNA, 25 bp, Homo sapien
tcatctcacacatcaagacttttaa

SEQ ID NO: 1169613 - DNA, 25 bp, Homo sapien
tgactgtcacaaccagaactcaagc

SEQ ID NO: 1169614 - DNA, 25 bp, Homo sapien
catttggtcagaacattgtcctacc

SEQ ID NO: 1169615 - DNA, 25 bp, Homo sapien
tcccagtcttatcttcagagaagtc

SEQ ID NO: 1169616 - DNA, 25 bp, Homo sapien
tatggatgtagacctcacaatgtcc

SEQ ID NO: 1169617 - DNA, 25 bp, Homo sapien
catatcttaggccacatctttgcag

SEQ ID NO: 1169618 - DNA, 25 bp, Homo sapien
tgcagaaagccgtccctcaatatcc

SEQ ID NO: 1169619 - DNA, 25 bp, Homo sapien
ccaaagcaccttgatacagaggaag

SEQ ID NO: 1169620 - DNA, 25 bp, Homo sapien
taacaaccacatataggctgaagtc

SEQ ID NO: 1169621 - DNA, 25 bp, Homo sapien
ctgtaacagaaaattaatattctgt

SEQ ID NO: 1169622 - DNA, 25 bp, Homo sapien
gtaacagaaaattaatattctgttc

SEQ ID NO: 1169623 - DNA, 25 bp, Homo sapien
tgtaacagaaaattaatattctgtt

SEQ ID NO: 1169624 - DNA, 25 bp, Homo sapien
ttctaagtcgaaagcagaaaagttg

SEQ ID NO: 1169625 - DNA, 25 bp, Homo sapien
catcctgaatttcgtagattgtggt

SEQ ID NO: 1169626 - DNA, 25 bp, Homo sapien
cagaaaagttggagcttatctcctt

SEQ ID NO: 1169627 - DNA, 25 bp, Homo sapien
caggggatattgtgacattgtcctg

SEQ ID NO: 1169628 - DNA, 25 bp, Homo sapien
aaaagtaaatgtgaatacaaggaga

SEQ ID NO: 1169629 - DNA, 25 bp, Homo sapien
aatgtgaatacaaggagaatatctg

SEQ ID NO: 1169630 - DNA, 25 bp, Homo sapien
gcctcccgctgaactctgtaaaaaa

SEQ ID NO: 1169631 - DNA, 25 bp, Homo sapien
tatcctatcacatcattccatccag

SEQ ID NO: 1169632 - DNA, 25 bp, Homo sapien
cagggaacaagcattgcacatacaa

SEQ ID NO: 1169633 - DNA, 25 bp, Homo sapien
aatggaaaccgaacgcagcaggagg

SEQ ID NO: 1169634 - DNA, 25 bp, Homo sapien
gagggtggccgcgtcagattataaa

SEQ ID NO: 1169635 - DNA, 25 bp, Homo sapien
gctatttatttatggcaccagggaa

SEQ ID NO: 1169636 - DNA, 25 bp, Homo sapien
tgtagaggacttttactagacactc

SEQ ID NO: 1169637 - DNA, 25 bp, Homo sapien
aggaaactcctcatgagtcctttaa

SEQ ID NO: 1169638 - DNA, 25 bp, Homo sapien
tccccaagcaaatgtatggtgatat

SEQ ID NO: 1169639 - DNA, 25 bp, Homo sapien
tacttatgctctaatccaactggct

SEQ ID NO: 1169640 - DNA, 25 bp, Homo sapien
caaatatttatgtcccggccctcta

SEQ ID NO: 1169641 - DNA, 25 bp, Homo sapien
ctcatcattgtgagcacctgcagcc

SEQ ID NO: 1169642 - DNA, 25 bp, Homo sapien
taattgacacaattacccgtagcac

SEQ ID NO: 1169643 - DNA, 25 bp, Homo sapien
aaaaaagattaacgacagctagcct

SEQ ID NO: 1169644 - DNA, 25 bp, Homo sapien
cagaactcactatgctgtttcacat

SEQ ID NO: 1169645 - DNA, 25 bp, Homo sapien
taatgtatccctccaggcaattgtc

SEQ ID NO: 1169646 - DNA, 25 bp, Homo sapien
ccaaacatggtctctctctaatgta

SEQ ID NO: 1169647 - DNA, 25 bp, Homo sapien
gaatgatcaagtactcttcttccta

SEQ ID NO: 1169648 - DNA, 25 bp, Homo sapien
tggcctctgaaggatatggaagctg

SEQ ID NO: 1169649 - DNA, 25 bp, Homo sapien
tatggaagctgacgctgttcctggg

SEQ ID NO: 1169650 - DNA, 25 bp, Homo sapien
tctgaaggatatggaagctgacgct

SEQ ID NO: 1169651 - DNA, 25 bp, Homo sapien
cctggggtagcttcatgctcttggg

SEQ ID NO: 1169652 - DNA, 25 bp, Homo sapien
tctcttccaggatgtgtacatggtg

SEQ ID NO: 1169653 - DNA, 25 bp, Homo sapien
ctatggagggaaatacagctttctg

SEQ ID NO: 1169654 - DNA, 25 bp, Homo sapien
gtatctgctgctgggtcagaataca

SEQ ID NO: 1169655 - DNA, 25 bp, Homo sapien
tacatggtggctggaggtatctgct

SEQ ID NO: 1169656 - DNA, 25 bp, Homo sapien
tctgttcttcaaataacacctgcat

SEQ ID NO: 1169657 - DNA, 25 bp, Homo sapien
gttcttcaaataacacctgcataaa

SEQ ID NO: 1169658 - DNA, 25 bp, Homo sapien
tgttcttcaaataacacctgcataa

SEQ ID NO: 1169659 - DNA, 25 bp, Homo sapien
ctgttcttcaaataacacctgcata

SEQ ID NO: 1169660 - DNA, 25 bp, Homo sapien
ggagatgccactttagtcactgaaa

SEQ ID NO: 1169661 - DNA, 25 bp, Homo sapien
ttgcaatgactgagcaagggctcct

SEQ ID NO: 1169662 - DNA, 25 bp, Homo sapien
aaaatggatcttaggttgcaatgac

SEQ ID NO: 1169663 - DNA, 25 bp, Homo sapien
aaagcatagttgtttggagatgcca

SEQ ID NO: 1169664 - DNA, 25 bp, Homo sapien
ctgtagcaagggttgtgattcatat

SEQ ID NO: 1169665 - DNA, 25 bp, Homo sapien
gtagcaagggttgtgattcatattt

SEQ ID NO: 1169666 - DNA, 25 bp, Homo sapien
tgtagcaagggttgtgattcatatt

SEQ ID NO: 1169667 - DNA, 25 bp, Homo sapien
ggccatgaaggcatataatcctcct

SEQ ID NO: 1169668 - DNA, 25 bp, Homo sapien
tacagacgatagtggacacccaaga

SEQ ID NO: 1169669 - DNA, 25 bp, Homo sapien
ctaggaaagtagttagacagacaac

SEQ ID NO: 1169670 - DNA, 25 bp, Homo sapien
cagggaagttcacatacagcacaat

SEQ ID NO: 1169671 - DNA, 25 bp, Homo sapien
cctttagggatctctgatcatagcc

SEQ ID NO: 1169672 - DNA, 25 bp, Homo sapien
cctatttggccaatgtggcacatta

SEQ ID NO: 1169673 - DNA, 25 bp, Homo sapien
tcatagccataataagaagattctc

SEQ ID NO: 1169674 - DNA, 25 bp, Homo sapien
ggaaggttctatgatcactacagta

SEQ ID NO: 1169675 - DNA, 25 bp, Homo sapien
gaaactgctgcttggtgttgatgga

SEQ ID NO: 1169676 - DNA, 25 bp, Homo sapien
aatgactcccttccttcagtatctg

SEQ ID NO: 1169677 - DNA, 25 bp, Homo sapien
tgaacggtcctggaaaatgactccc

SEQ ID NO: 1169678 - DNA, 25 bp, Homo sapien
tcagctgggcctatgctggtcatga

SEQ ID NO: 1169679 - DNA, 25 bp, Homo sapien
cgtcttgggtgtaggccccatagcg

SEQ ID NO: 1169680 - DNA, 25 bp, Homo sapien
cttccctgcccattcgtcttgggtg

SEQ ID NO: 1169681 - DNA, 25 bp, Homo sapien
cattcgtcttgggtgtaggccccat

SEQ ID NO: 1169682 - DNA, 25 bp, Homo sapien
tgcccattcgtcttgggtgtaggcc

SEQ ID NO: 1169683 - DNA, 25 bp, Homo sapien
gagaacagcttcttgattagaacag

SEQ ID NO: 1169684 - DNA, 25 bp, Homo sapien
gcttcttgattagaacagtctctga

SEQ ID NO: 1169685 - DNA, 25 bp, Homo sapien
tcttgattagaacagtctctgacca

SEQ ID NO: 1169686 - DNA, 25 bp, Homo sapien
gattagaacagtctctgaccaccac

SEQ ID NO: 1169687 - DNA, 25 bp, Homo sapien
cgtagccataacaggaagattctct

SEQ ID NO: 1169688 - DNA, 25 bp, Homo sapien
cctttagggatctctgatcgtagcc

SEQ ID NO: 1169689 - DNA, 25 bp, Homo sapien
ggaaggttctatgatcactacagtg

SEQ ID NO: 1169690 - DNA, 25 bp, Homo sapien
tttagctgtattcagaacaatttaa

SEQ ID NO: 1169691 - DNA, 25 bp, Homo sapien
gaaactgctgcttggtgttgatgga

SEQ ID NO: 1169692 - DNA, 25 bp, Homo sapien
tcagctgggcctatgctggtcatga

SEQ ID NO: 1169693 - DNA, 25 bp, Homo sapien
aatgactcccttccttcagtatctg

SEQ ID NO: 1169694 - DNA, 25 bp, Homo sapien
tgaacggtcctggaaaatgactccc

SEQ ID NO: 1169695 - DNA, 25 bp, Homo sapien
cacggttgtgttaatccttgtcatt

SEQ ID NO: 1169696 - DNA, 25 bp, Homo sapien
gtcattatatagtagcgaggggaat

SEQ ID NO: 1169697 - DNA, 25 bp, Homo sapien
attggtgaggtgctttcacggttgt

SEQ ID NO: 1169698 - DNA, 25 bp, Homo sapien
tgactgatttggttaaattaaagca

SEQ ID NO: 1169699 - DNA, 25 bp, Homo sapien
caaagctgccatgaagtgactccca

SEQ ID NO: 1169700 - DNA, 25 bp, Homo sapien
tcagcagcccctccaattcaaagtg

SEQ ID NO: 1169701 - DNA, 25 bp, Homo sapien
tcatattgagcactgctggtccgtg

SEQ ID NO: 1169702 - DNA, 25 bp, Homo sapien
gaaaaggcatatcccctatcaagag

SEQ ID NO: 1169703 - DNA, 25 bp, Homo sapien
ctgtcttctatggaaacttcttcag

SEQ ID NO: 1169704 - DNA, 25 bp, Homo sapien
ctcatatacaaatgattctgttgcg

SEQ ID NO: 1169705 - DNA, 25 bp, Homo sapien
actgtcttctatggaaacttcttca

SEQ ID NO: 1169706 - DNA, 25 bp, Homo sapien
tatacaaatgattctgttgcgttca

SEQ ID NO: 1169707 - DNA, 25 bp, Homo sapien
tcattctcagttgccactgtggcat

SEQ ID NO: 1169708 - DNA, 25 bp, Homo sapien
cttcactcggaagacttcattctca

SEQ ID NO: 1169709 - DNA, 25 bp, Homo sapien
tctcagttgccactgtggcatgaaa

SEQ ID NO: 1169710 - DNA, 25 bp, Homo sapien
cttcattctcagttgccactgtggc

SEQ ID NO: 1169711 - DNA, 25 bp, Homo sapien
cttcctttagtttgtgagcaaagct

SEQ ID NO: 1169712 - DNA, 25 bp, Homo sapien
tgattttaggagttacgctggcact

SEQ ID NO: 1169713 - DNA, 25 bp, Homo sapien
gcattcacatcagccacaagtgtga

SEQ ID NO: 1169714 - DNA, 25 bp, Homo sapien
ttgggatctccatgtttcggtcagc

SEQ ID NO: 1169715 - DNA, 25 bp, Homo sapien
ttataaaacaatggtgtgggcttac

SEQ ID NO: 1169716 - DNA, 25 bp, Homo sapien
tttataaaacaatggtgtgggctta

SEQ ID NO: 1169717 - DNA, 25 bp, Homo sapien
aaactccagttgacaagttaagact

SEQ ID NO: 1169718 - DNA, 25 bp, Homo sapien
taaggagcctggatacagaaaaatc

SEQ ID NO: 1169719 - DNA, 25 bp, Homo sapien
gaggcaagaaactttggagtccaaa

SEQ ID NO: 1169720 - DNA, 25 bp, Homo sapien
tttgagaaagaatgttgcacgtcct

SEQ ID NO: 1169721 - DNA, 25 bp, Homo sapien
taaactctgcactgtcctggacaag

SEQ ID NO: 1169722 - DNA, 25 bp, Homo sapien
tttcggtgccaattcaaagcaggtg

SEQ ID NO: 1169723 - DNA, 25 bp, Homo sapien
gaattacagatctcaactccccggt

SEQ ID NO: 1169724 - DNA, 25 bp, Homo sapien
agcaggtgagtttcagtttatctcc

SEQ ID NO: 1169725 - DNA, 25 bp, Homo sapien
gattgtggtcagtcgtccatgcacc

SEQ ID NO: 1169726 - DNA, 25 bp, Homo sapien
acttgctagactctctgtaatagta

SEQ ID NO: 1169727 - DNA, 25 bp, Homo sapien
aacaaaatgattcgccacttggaaa

SEQ ID NO: 1169728 - DNA, 25 bp, Homo sapien
tgtaatagtagcagtctagtcttct

SEQ ID NO: 1169729 - DNA, 25 bp, Homo sapien
cccagtaaagtgcaaggctttgttc

SEQ ID NO: 1169730 - DNA, 25 bp, Homo sapien
gaccagttgagatgctgatgatcct

SEQ ID NO: 1169731 - DNA, 25 bp, Homo sapien
tgagaactggagcaatctgagagca

SEQ ID NO: 1169732 - DNA, 25 bp, Homo sapien
gatattcactcctactcagcatgag

SEQ ID NO: 1169733 - DNA, 25 bp, Homo sapien
aaaggagctggtgcacccaatgaca

SEQ ID NO: 1169734 - DNA, 25 bp, Homo sapien
tcttgtttttcctggtcttgatgac

SEQ ID NO: 1169735 - DNA, 25 bp, Homo sapien
ttgaatcaggattgagtatgtcttt

SEQ ID NO: 1169736 - DNA, 25 bp, Homo sapien
gaaaaagtctggtgaagtttccata

SEQ ID NO: 1169737 - DNA, 25 bp, Homo sapien
gaagtttccatacttgaatcaggat

SEQ ID NO: 1169738 - DNA, 25 bp, Homo sapien
ggcacttagaccttatctccataaa

SEQ ID NO: 1169739 - DNA, 25 bp, Homo sapien
tttcaaccaggtatatgtacatttt

SEQ ID NO: 1169740 - DNA, 25 bp, Homo sapien
taaacattatcgtcaatgacatcca

SEQ ID NO: 1169741 - DNA, 25 bp, Homo sapien
cattccataggattaacagctagta

SEQ ID NO: 1169742 - DNA, 25 bp, Homo sapien
tttttcaaattatagaagttgtaga

SEQ ID NO: 1169743 - DNA, 25 bp, Homo sapien
aataattgccaagtaccaggtacca

SEQ ID NO: 1169744 - DNA, 25 bp, Homo sapien
gaggagaaaacaatcaaccttctag

SEQ ID NO: 1169745 - DNA, 25 bp, Homo sapien
aatgcagctcttcctagggcagctt

SEQ ID NO: 1169746 - DNA, 25 bp, Homo sapien
tcactatagtggattgcgagaacag

SEQ ID NO: 1169747 - DNA, 25 bp, Homo sapien
gcctctgagggactttgactgctgt

SEQ ID NO: 1169748 - DNA, 25 bp, Homo sapien
gactgctgttttgccgaaacagcac

SEQ ID NO: 1169749 - DNA, 25 bp, Homo sapien
tcatgcaactggagaggcggacaat

SEQ ID NO: 1169750 - DNA, 25 bp, Homo sapien
cagttaagatcggtctttgtcctta

SEQ ID NO: 1169751 - DNA, 25 bp, Homo sapien
cttatctgagactccttgtgaaaca

SEQ ID NO: 1169752 - DNA, 25 bp, Homo sapien
tgcccagcctaagaatgtcactttc

SEQ ID NO: 1169753 - DNA, 25 bp, Homo sapien
gaagagaatcactcaactcacaggc

SEQ ID NO: 1169754 - DNA, 25 bp, Homo sapien
gactccttgtgaaacagttccatca

SEQ ID NO: 1169755 - DNA, 25 bp, Homo sapien
catctgggttttaggcaatagcagc

SEQ ID NO: 1169756 - DNA, 25 bp, Homo sapien
ttagcaattgcagtgtagtcaggtc

SEQ ID NO: 1169757 - DNA, 25 bp, Homo sapien
gtcatcaacatgagaacctggctct

SEQ ID NO: 1169758 - DNA, 25 bp, Homo sapien
gcagcaattgcgaagtacatacgga

SEQ ID NO: 1169759 - DNA, 25 bp, Homo sapien
tgtgatgttgcaagagtcccacact

SEQ ID NO: 1169760 - DNA, 25 bp, Homo sapien
tactagattagaagaaagccatccc

SEQ ID NO: 1169761 - DNA, 25 bp, Homo sapien
taccctcacctagagcacattagcg

SEQ ID NO: 1169762 - DNA, 25 bp, Homo sapien
gaagggtttgatctcagttgtctgc

SEQ ID NO: 1169763 - DNA, 25 bp, Homo sapien
ttccaacagtcacgctgggctctag

SEQ ID NO: 1169764 - DNA, 25 bp, Homo sapien
tctagccttttctgtggagctgtaa

SEQ ID NO: 1169765 - DNA, 25 bp, Homo sapien
ggaacacagttgatcatgccttctg

SEQ ID NO: 1169766 - DNA, 25 bp, Homo sapien
tggatgtccataaccagcctttcct

SEQ ID NO: 1169767 - DNA, 25 bp, Homo sapien
tgtggctaagccaagaatggatgca

SEQ ID NO: 1169768 - DNA, 25 bp, Homo sapien
ggatgcagatacatttggtgttctc

SEQ ID NO: 1169769 - DNA, 25 bp, Homo sapien
ccttgtggaccgctgtgcctgtgtg

SEQ ID NO: 1169770 - DNA, 25 bp, Homo sapien
tgacatctgttgaggtttgccacca

SEQ ID NO: 1169771 - DNA, 25 bp, Homo sapien
agatcctgtgtaatctggcgtttcc

SEQ ID NO: 1169772 - DNA, 25 bp, Homo sapien
gtttgtaagatcctgtgtaatctgg

SEQ ID NO: 1169773 - DNA, 25 bp, Homo sapien
tccctatctctctaacctcatgtaa

SEQ ID NO: 1169774 - DNA, 25 bp, Homo sapien
aatctggcgtttccctatctctcta

SEQ ID NO: 1169775 - DNA, 25 bp, Homo sapien
tgctcactagcctgaggtcctccag

SEQ ID NO: 1169776 - DNA, 25 bp, Homo sapien
tgcgctcacccctcttaggcttggg

SEQ ID NO: 1169777 - DNA, 25 bp, Homo sapien
gtcggacagggccatgggccagctg

SEQ ID NO: 1169778 - DNA, 25 bp, Homo sapien
agccgggctcgggtgtggatcagag

SEQ ID NO: 1169779 - DNA, 25 bp, Homo sapien
aaatagggcgctcggagcaaaccat

SEQ ID NO: 1169780 - DNA, 25 bp, Homo sapien
ttaaatagggcgctcggagcaaacc

SEQ ID NO: 1169781 - DNA, 25 bp, Homo sapien
ggctggtcgcgggggggccaggctg

SEQ ID NO: 1169782 - DNA, 25 bp, Homo sapien
tagggcgctcggagcaaaccatttg

SEQ ID NO: 1169783 - DNA, 25 bp, Homo sapien
tggactacgatgttgaccgaaaggg

SEQ ID NO: 1169784 - DNA, 25 bp, Homo sapien
gggtggactacgatgttgaccgaaa

SEQ ID NO: 1169785 - DNA, 25 bp, Homo sapien
ctacgatgttgaccgaaagggcgcc

SEQ ID NO: 1169786 - DNA, 25 bp, Homo sapien
gactacgatgttgaccgaaagggcg

SEQ ID NO: 1169787 - DNA, 25 bp, Homo sapien
cttcccggccggctccctggctggg

SEQ ID NO: 1169788 - DNA, 25 bp, Homo sapien
cgcttcccggccggctccctggctg

SEQ ID NO: 1169789 - DNA, 25 bp, Homo sapien
gcttcccggccggctccctggctgg

SEQ ID NO: 1169790 - DNA, 25 bp, Homo sapien
ccagcagcaggcgaacagcaggagc

SEQ ID NO: 1169791 - DNA, 25 bp, Homo sapien
ggttggccccgccgggcgcccagca

SEQ ID NO: 1169792 - DNA, 25 bp, Homo sapien
gagcaggagcgaggcggctggggcc

SEQ ID NO: 1169793 - DNA, 25 bp, Homo sapien
ggagcaggagcgaggcggctggggc

SEQ ID NO: 1169794 - DNA, 25 bp, Homo sapien
aactcagcaggttaggaaggccagg

SEQ ID NO: 1169795 - DNA, 25 bp, Homo sapien
aaactcagcaggttaggaaggccag

SEQ ID NO: 1169796 - DNA, 25 bp, Homo sapien
atttgcctctcgtcataaaactcag

SEQ ID NO: 1169797 - DNA, 25 bp, Homo sapien
atcatatttgcctctcgtcataaaa

SEQ ID NO: 1169798 - DNA, 25 bp, Homo sapien
gacacattaagttcacaggacttat

SEQ ID NO: 1169799 - DNA, 25 bp, Homo sapien
cattaagttcacaggacttatgtcc

SEQ ID NO: 1169800 - DNA, 25 bp, Homo sapien
taagttcacaggacttatgtcctcc

SEQ ID NO: 1169801 - DNA, 25 bp, Homo sapien
gaggacacattaagttcacaggact

SEQ ID NO: 1169802 - DNA, 25 bp, Homo sapien
gttcaggacggtatggatgtacact

SEQ ID NO: 1169803 - DNA, 25 bp, Homo sapien
ccggtgcgttcaggacggtatggat

SEQ ID NO: 1169804 - DNA, 25 bp, Homo sapien
aagagccggtgcgttcaggacggta

SEQ ID NO: 1169805 - DNA, 25 bp, Homo sapien
gacaagagccggtgcgttcaggacg

SEQ ID NO: 1169806 - DNA, 25 bp, Homo sapien
ttgaggctcagtccatctgtcactg

SEQ ID NO: 1169807 - DNA, 25 bp, Homo sapien
ctccagggttgaggctcagtccatc

SEQ ID NO: 1169808 - DNA, 25 bp, Homo sapien
ccagggttgaggctcagtccatctg

SEQ ID NO: 1169809 - DNA, 25 bp, Homo sapien
gggttgaggctcagtccatctgtca

SEQ ID NO: 1169810 - DNA, 25 bp, Homo sapien
gatttgatcccgaaagagtctcttc

SEQ ID NO: 1169811 - DNA, 25 bp, Homo sapien
gctgtgtgctctagacaagcatcta

SEQ ID NO: 1169812 - DNA, 25 bp, Homo sapien
ttgccttagctgcttccttctggga

SEQ ID NO: 1169813 - DNA, 25 bp, Homo sapien
ccaatactgagttgtagcaaggaga

SEQ ID NO: 1169814 - DNA, 25 bp, Homo sapien
agtgcttgagtccagagtcccactt

SEQ ID NO: 1169815 - DNA, 25 bp, Homo sapien
cctgaataactgctgctggccttgc

SEQ ID NO: 1169816 - DNA, 25 bp, Homo sapien
tgcttgagtccagagtcccacttcc

SEQ ID NO: 1169817 - DNA, 25 bp, Homo sapien
ttgagtccagagtcccacttccctg

SEQ ID NO: 1169818 - DNA, 25 bp, Homo sapien
gcacctgtggtgttgacggtcctgt

SEQ ID NO: 1169819 - DNA, 25 bp, Homo sapien
gaaaacgacagtatagcaaattgga

SEQ ID NO: 1169820 - DNA, 25 bp, Homo sapien
tggtttgtacccattgaatgtacat

SEQ ID NO: 1169821 - DNA, 25 bp, Homo sapien
caaattggaaatgcgcacctgtggt

SEQ ID NO: 1169822 - DNA, 25 bp, Homo sapien
aaccggccttgcgaatcttttcagg

SEQ ID NO: 1169823 - DNA, 25 bp, Homo sapien
ttggagtcccgggtgaacttcgcca

SEQ ID NO: 1169824 - DNA, 25 bp, Homo sapien
ccgaagtagccaatcaagtgcgcaa

SEQ ID NO: 1169825 - DNA, 25 bp, Homo sapien
ccagagctgctacgtgtccgggctt

SEQ ID NO: 1169826 - DNA, 25 bp, Homo sapien
ggagctgatggcctcgtcgagtgga

SEQ ID NO: 1169827 - DNA, 25 bp, Homo sapien
gctgatggcctcgtcgagtggagcc

SEQ ID NO: 1169828 - DNA, 25 bp, Homo sapien
ctgatggcctcgtcgagtggagcca

SEQ ID NO: 1169829 - DNA, 25 bp, Homo sapien
ggcctcgtcgagtggagccagagtt

SEQ ID NO: 1169830 - DNA, 25 bp, Homo sapien
caagaaatagccaatgggtgctccc

SEQ ID NO: 1169831 - DNA, 25 bp, Homo sapien
cctttcttggttactggaattccat

SEQ ID NO: 1169832 - DNA, 25 bp, Homo sapien
gaaatagccaatgggtgctcccagc

SEQ ID NO: 1169833 - DNA, 25 bp, Homo sapien
gtctgcttattcctttcttggttac

SEQ ID NO: 1169834 - DNA, 25 bp, Homo sapien
ggctccatgacactattcctgttgt

SEQ ID NO: 1169835 - DNA, 25 bp, Homo sapien
ctcaggctccatgacactattcctg

SEQ ID NO: 1169836 - DNA, 25 bp, Homo sapien
atggattctgatttcctgtactgat

SEQ ID NO: 1169837 - DNA, 25 bp, Homo sapien
tgtgactcagtagcactgatcccca

SEQ ID NO: 1169838 - DNA, 25 bp, Homo sapien
tctgttgttctacgtttggccttcc

SEQ ID NO: 1169839 - DNA, 25 bp, Homo sapien
catatctgttgttctacgtttggcc

SEQ ID NO: 1169840 - DNA, 25 bp, Homo sapien
gttgttctacgtttggccttcctgc

SEQ ID NO: 1169841 - DNA, 25 bp, Homo sapien
cagacatatctgttgttctacgttt

SEQ ID NO: 1169842 - DNA, 25 bp, Homo sapien
tgctgagcagggttagaccattgca

SEQ ID NO: 1169843 - DNA, 25 bp, Homo sapien
tccccaaagtagagagtctgctgag

SEQ ID NO: 1169844 - DNA, 25 bp, Homo sapien
cattgcagggatgagtcctcgtgat

SEQ ID NO: 1169845 - DNA, 25 bp, Homo sapien
tcacttggcacttgagcaccacggt

SEQ ID NO: 1169846 - DNA, 25 bp, Homo sapien
taaccagctgaattcgattatctcg

SEQ ID NO: 1169847 - DNA, 25 bp, Homo sapien
gacttggcagttcgcacaggcatag

SEQ ID NO: 1169848 - DNA, 25 bp, Homo sapien
ctagcacagtgacgagggacttggc

SEQ ID NO: 1169849 - DNA, 25 bp, Homo sapien
catagtgaagattgagcaggtgtac

SEQ ID NO: 1169850 - DNA, 25 bp, Homo sapien
agttcttggtcaccctttctccagg

SEQ ID NO: 1169851 - DNA, 25 bp, Homo sapien
cccgtaatgaagatttataaccagt

SEQ ID NO: 1169852 - DNA, 25 bp, Homo sapien
tttctccaggtgagccgggctgcag

SEQ ID NO: 1169853 - DNA, 25 bp, Homo sapien
tggctgtgtctttttcccgtaatga

SEQ ID NO: 1169854 - DNA, 25 bp, Homo sapien
gatcttcctgtatgcgggttggttc

SEQ ID NO: 1169855 - DNA, 25 bp, Homo sapien
tcttcctgtatgcgggttggttctc

SEQ ID NO: 1169856 - DNA, 25 bp, Homo sapien
atcttcctgtatgcgggttggttct

SEQ ID NO: 1169857 - DNA, 25 bp, Homo sapien
gttcacagagcacacgatgctcgcc

SEQ ID NO: 1169858 - DNA, 25 bp, Homo sapien
ccctttagagattcatggttcacag

SEQ ID NO: 1169859 - DNA, 25 bp, Homo sapien
caatgcgttgagaggtggatctgtc

SEQ ID NO: 1169860 - DNA, 25 bp, Homo sapien
tcatcctcccgggtaacctggaatg

SEQ ID NO: 1169861 - DNA, 25 bp, Homo sapien
tgttgtttcatgcacagtcacctgc

SEQ ID NO: 1169862 - DNA, 25 bp, Homo sapien
cttaactgtgcgtgttgtttcatgc

SEQ ID NO: 1169863 - DNA, 25 bp, Homo sapien
tgtgcgtgttgtttcatgcacagtc

SEQ ID NO: 1169864 - DNA, 25 bp, Homo sapien
ttacctattcacttaactgtgcgtg

SEQ ID NO: 1169865 - DNA, 25 bp, Homo sapien
tatactggcctagaccacgggttgg

SEQ ID NO: 1169866 - DNA, 25 bp, Homo sapien
gataaaactgtagtgatccccacgc

SEQ ID NO: 1169867 - DNA, 25 bp, Homo sapien
tgactgcgtccctacaacaacggag

SEQ ID NO: 1169868 - DNA, 25 bp, Homo sapien
gaggctgagcttcccctaaggatag

SEQ ID NO: 1169869 - DNA, 25 bp, Homo sapien
cgcgaccctcacagtgtagcaacag

SEQ ID NO: 1169870 - DNA, 25 bp, Homo sapien
cttctggccctcacgaggatgggga

SEQ ID NO: 1169871 - DNA, 25 bp, Homo sapien
ctggattgccgcgaccctcacagtg

SEQ ID NO: 1169872 - DNA, 25 bp, Homo sapien
ggagggtctggcctaatcatcgcag

SEQ ID NO: 1169873 - DNA, 25 bp, Homo sapien
gctgtgcagccgtaggtgccactgt

SEQ ID NO: 1169874 - DNA, 25 bp, Homo sapien
ccctccttctcccataggtactgct

SEQ ID NO: 1169875 - DNA, 25 bp, Homo sapien
cattaacattgagggtgtagtaggc

SEQ ID NO: 1169876 - DNA, 25 bp, Homo sapien
taggtgccactgtcactcttgttga

SEQ ID NO: 1169877 - DNA, 25 bp, Homo sapien
cgatgatggcgtggtaggtgctgga

SEQ ID NO: 1169878 - DNA, 25 bp, Homo sapien
caagtagtggccaaggaagatgagc

SEQ ID NO: 1169879 - DNA, 25 bp, Homo sapien
ctttgtgccggatcaagtagtggcc

SEQ ID NO: 1169880 - DNA, 25 bp, Homo sapien
aagccacgatcccaccgatgatggc

SEQ ID NO: 1169881 - DNA, 25 bp, Homo sapien
tgcattgatgatggccgtgtccgcg

SEQ ID NO: 1169882 - DNA, 25 bp, Homo sapien
agcatcgtcggagccttttgcctca

SEQ ID NO: 1169883 - DNA, 25 bp, Homo sapien
gccgtgtccgcgtctggagcatcgt

SEQ ID NO: 1169884 - DNA, 25 bp, Homo sapien
cgtctggagcatcgtcggagccttt

SEQ ID NO: 1169885 - DNA, 25 bp, Homo sapien
ctagatgaaatattccttcttgtcg

SEQ ID NO: 1169886 - DNA, 25 bp, Homo sapien
gatgaaatattccttcttgtcgtcc

SEQ ID NO: 1169887 - DNA, 25 bp, Homo sapien
atattccttcttgtcgtcccctcct

SEQ ID NO: 1169888 - DNA, 25 bp, Homo sapien
tgaaatattccttcttgtcgtcccc

SEQ ID NO: 1169889 - DNA, 25 bp, Homo sapien
tggggggcgcaggaagtgggcaggc

SEQ ID NO: 1169890 - DNA, 25 bp, Homo sapien
gggcgcaggaagtgggcaggcgcct

SEQ ID NO: 1169891 - DNA, 25 bp, Homo sapien
gggggcgcaggaagtgggcaggcgc

SEQ ID NO: 1169892 - DNA, 25 bp, Homo sapien
ctggggggcgcaggaagtgggcagg

SEQ ID NO: 1169893 - DNA, 25 bp, Homo sapien
tgtacaagtccgggttggtgacggc

SEQ ID NO: 1169894 - DNA, 25 bp, Homo sapien
ctgtacaagtccgggttggtgacgg

SEQ ID NO: 1169895 - DNA, 25 bp, Homo sapien
gcagacattctgtacaggggggtgg

SEQ ID NO: 1169896 - DNA, 25 bp, Homo sapien
agcagacattctgtacaggggggtg

SEQ ID NO: 1169897 - DNA, 25 bp, Homo sapien
ataataataacccaaatgcagagaa

SEQ ID NO: 1169898 - DNA, 25 bp, Homo sapien
tgccgacaaccatcccgtttctggg

SEQ ID NO: 1169899 - DNA, 25 bp, Homo sapien
caaccatcccgtttctgggttcctg

SEQ ID NO: 1169900 - DNA, 25 bp, Homo sapien
agccactcccaacctttgccgacaa

SEQ ID NO: 1169901 - DNA, 25 bp, Homo sapien
caacctttgccgacaaccatcccgt

SEQ ID NO: 1169902 - DNA, 25 bp, Homo sapien
catcactttcccattgctatggaag

SEQ ID NO: 1169903 - DNA, 25 bp, Homo sapien
tgggtccctgcatggctgcatgttg

SEQ ID NO: 1169904 - DNA, 25 bp, Homo sapien
tcaggactcccgcactcatcacttt

SEQ ID NO: 1169905 - DNA, 25 bp, Homo sapien
cccaggttacagtcctgggtccctg

SEQ ID NO: 1169906 - DNA, 25 bp, Homo sapien
tatggaaagggcccggctttgttca

SEQ ID NO: 1169907 - DNA, 25 bp, Homo sapien
tctccaaatctactcttccttgcag

SEQ ID NO: 1169908 - DNA, 25 bp, Homo sapien
gtgagagtccacctccatccttcct

SEQ ID NO: 1169909 - DNA, 25 bp, Homo sapien
ccaaatctactcttccttgcaggga

SEQ ID NO: 1169910 - DNA, 25 bp, Homo sapien
tctttccagggtcaacgccaaggag

SEQ ID NO: 1169911 - DNA, 25 bp, Homo sapien
gatagaatggacagctgggcaaaca

SEQ ID NO: 1169912 - DNA, 25 bp, Homo sapien
tcaactcactgggtacagactatgg

SEQ ID NO: 1169913 - DNA, 25 bp, Homo sapien
cctgagaggtgcatagcaaaggctg

SEQ ID NO: 1169914 - DNA, 25 bp, Homo sapien
ggtgggagcgatgccaagggcatcc

SEQ ID NO: 1169915 - DNA, 25 bp, Homo sapien
tgcccattgtcagaccagggaggaa

SEQ ID NO: 1169916 - DNA, 25 bp, Homo sapien
cattgtcagaccagggaggaaaagc

SEQ ID NO: 1169917 - DNA, 25 bp, Homo sapien
ctgcccctttttgcatgcccattgt

SEQ ID NO: 1169918 - DNA, 25 bp, Homo sapien
accagcggctggaagattcacaact

SEQ ID NO: 1169919 - DNA, 25 bp, Homo sapien
cccaaaagcgggtgctgggagacaa

SEQ ID NO: 1169920 - DNA, 25 bp, Homo sapien
tgcctgtggtgcccaaggccctaac

SEQ ID NO: 1169921 - DNA, 25 bp, Homo sapien
ggagacaagaagctcaacaggcctg

SEQ ID NO: 1169922 - DNA, 25 bp, Homo sapien
gattataaagatacacggtcccctc

SEQ ID NO: 1169923 - DNA, 25 bp, Homo sapien
gcagctgaatgacacggataatcca

SEQ ID NO: 1169924 - DNA, 25 bp, Homo sapien
tagatattcttgagagtggcctggc

SEQ ID NO: 1169925 - DNA, 25 bp, Homo sapien
gacacaccaccttttgaggcaccag

SEQ ID NO: 1169926 - DNA, 25 bp, Homo sapien
atcgccgtcttaacattctccagca

SEQ ID NO: 1169927 - DNA, 25 bp, Homo sapien
ccatcgccgtcttaacattctccag

SEQ ID NO: 1169928 - DNA, 25 bp, Homo sapien
ctccatcgccgtcttaacattctcc

SEQ ID NO: 1169929 - DNA, 25 bp, Homo sapien
cgccgtcttaacattctccagcaat

SEQ ID NO: 1169930 - DNA, 25 bp, Homo sapien
ctggaaagtgaatttggtctggtgg

SEQ ID NO: 1169931 - DNA, 25 bp, Homo sapien
gggctggaaagtgaatttggtctgg

SEQ ID NO: 1169932 - DNA, 25 bp, Homo sapien
aaagtgaatttggtctggtggtgtc

SEQ ID NO: 1169933 - DNA, 25 bp, Homo sapien
agacactagctcaagtttcaggttc

SEQ ID NO: 1169934 - DNA, 25 bp, Homo sapien
gaaagggcatctaccctgcaggcag

SEQ ID NO: 1169935 - DNA, 25 bp, Homo sapien
catggtctgacaagttaaagtaggc

SEQ ID NO: 1169936 - DNA, 25 bp, Homo sapien
gctattgggtgtttgcctagccacc

SEQ ID NO: 1169937 - DNA, 25 bp, Homo sapien
gagccatggcgtgtccaagtcagaa

SEQ ID NO: 1169938 - DNA, 25 bp, Homo sapien
ttcagtgtgagagtgggagggttgg

SEQ ID NO: 1169939 - DNA, 25 bp, Homo sapien
ggttggggtggctgtcgaggctgca

SEQ ID NO: 1169940 - DNA, 25 bp, Homo sapien
tgggtgtttcagtgtgagagtggga

SEQ ID NO: 1169941 - DNA, 25 bp, Homo sapien
gtgtctagctatctctaggtctggg

SEQ ID NO: 1169942 - DNA, 25 bp, Homo sapien
cgtgagctctttgtgtgtactgaac

SEQ ID NO: 1169943 - DNA, 25 bp, Homo sapien
gctggttgggactacactcaggaaa

SEQ ID NO: 1169944 - DNA, 25 bp, Homo sapien
tggtcaactctgtcccaactgaggg

SEQ ID NO: 1169945 - DNA, 25 bp, Homo sapien
tccaaggaaaggcagttcaaaagcc

SEQ ID NO: 1169946 - DNA, 25 bp, Homo sapien
gagccaaggactaatgagggccatc

SEQ ID NO: 1169947 - DNA, 25 bp, Homo sapien
gccaaggactaatgagggccatcag

SEQ ID NO: 1169948 - DNA, 25 bp, Homo sapien
taagagccaaggactaatgagggcc

SEQ ID NO: 1169949 - DNA, 25 bp, Homo sapien
tccaagataagagccaaggactaat

SEQ ID NO: 1169950 - DNA, 25 bp, Homo sapien
cagaagggctgggacggctgtcagc

SEQ ID NO: 1169951 - DNA, 25 bp, Homo sapien
ttcaggcccgcagacagaagggctg

SEQ ID NO: 1169952 - DNA, 25 bp, Homo sapien
gctgggacggctgtcagcgcctgtg

SEQ ID NO: 1169953 - DNA, 25 bp, Homo sapien
ggcaccgtttggttcaggcccgcag

SEQ ID NO: 1169954 - DNA, 25 bp, Homo sapien
gagaccaggatggaactgactcaaa

SEQ ID NO: 1169955 - DNA, 25 bp, Homo sapien
ccaggatggaactgactcaaaggca

SEQ ID NO: 1169956 - DNA, 25 bp, Homo sapien
cacaagagggagctaggaggctagc

SEQ ID NO: 1169957 - DNA, 25 bp, Homo sapien
tggaactgactcaaaggcaaaggga

SEQ ID NO: 1169958 - DNA, 25 bp, Homo sapien
ctgaagagccggagcaggaacagtc

SEQ ID NO: 1169959 - DNA, 25 bp, Homo sapien
cagatgcagtgcggacagtggaaaa

SEQ ID NO: 1169960 - DNA, 25 bp, Homo sapien
gagtcagatgcagtgcggacagtgg

SEQ ID NO: 1169961 - DNA, 25 bp, Homo sapien
aggagtcagatgcagtgcggacagt

SEQ ID NO: 1169962 - DNA, 25 bp, Homo sapien
gatgcagtgcggacagtggaaaagg

SEQ ID NO: 1169963 - DNA, 25 bp, Homo sapien
tctcagttgagggggagagctccgc

SEQ ID NO: 1169964 - DNA, 25 bp, Homo sapien
gttctcagttgagggggagagctcc

SEQ ID NO: 1169965 - DNA, 25 bp, Homo sapien
ttctcagttgagggggagagctccg

SEQ ID NO: 1169966 - DNA, 25 bp, Homo sapien
cattcacaccataggaagaattcca

SEQ ID NO: 1169967 - DNA, 25 bp, Homo sapien
taggaagaattccatacatcttcga

SEQ ID NO: 1169968 - DNA, 25 bp, Homo sapien
gaagaattccatacatcttcgaagt

SEQ ID NO: 1169969 - DNA, 25 bp, Homo sapien
caccataggaagaattccatacatc

SEQ ID NO: 1169970 - DNA, 25 bp, Homo sapien
catgaagaggacagtgctgctagct

SEQ ID NO: 1169971 - DNA, 25 bp, Homo sapien
tgctagctaggatacccaggacact

SEQ ID NO: 1169972 - DNA, 25 bp, Homo sapien
ggcagtgcagagtcatccagcaggt

SEQ ID NO: 1169973 - DNA, 25 bp, Homo sapien
cacaatgctgaagagggcactgccc

SEQ ID NO: 1169974 - DNA, 25 bp, Homo sapien
caggcagtgtcagtagggcagccac

SEQ ID NO: 1169975 - DNA, 25 bp, Homo sapien
agggaggcatggcaccctagcagca

SEQ ID NO: 1169976 - DNA, 25 bp, Homo sapien
gggaggcatggcaccctagcagcaa

SEQ ID NO: 1169977 - DNA, 25 bp, Homo sapien
tgacaggcagtgtcagtagggcagc

SEQ ID NO: 1169978 - DNA, 25 bp, Homo sapien
tgcttccaagggtgtccagatgaga

SEQ ID NO: 1169979 - DNA, 25 bp, Homo sapien
tgctgggccagacatgttgacaaca

SEQ ID NO: 1169980 - DNA, 25 bp, Homo sapien
tgtatatcagggtgcagagtccacc

SEQ ID NO: 1169981 - DNA, 25 bp, Homo sapien
caaagatggcaagacaggctacagt

SEQ ID NO: 1169982 - DNA, 25 bp, Homo sapien
taattcaggttgacaggtgggaaga

SEQ ID NO: 1169983 - DNA, 25 bp, Homo sapien
tctccccagacaaaataagaaacca

SEQ ID NO: 1169984 - DNA, 25 bp, Homo sapien
tccttcttctccccagacaaaataa

SEQ ID NO: 1169985 - DNA, 25 bp, Homo sapien
tctccttcttctccccagacaaaat

SEQ ID NO: 1169986 - DNA, 25 bp, Homo sapien
cttcttctccccagacaaaataaga

SEQ ID NO: 1169987 - DNA, 25 bp, Homo sapien
ctcttagcagcttcgggcttctgca

SEQ ID NO: 1169988 - DNA, 25 bp, Homo sapien
tctgcagctgcctttcccttgtgaa

SEQ ID NO: 1169989 - DNA, 25 bp, Homo sapien
tcttagcagcttcgggcttctgcag

SEQ ID NO: 1169990 - DNA, 25 bp, Homo sapien
gctgcctttcccttgtgaaagccat

SEQ ID NO: 1169991 - DNA, 25 bp, Homo sapien
ttagcggttccatgattctctttgc

SEQ ID NO: 1169992 - DNA, 25 bp, Homo sapien
ccccagtgtctgcaaatcaattagt

SEQ ID NO: 1169993 - DNA, 25 bp, Homo sapien
tctttgaacctttgattacttgctc

SEQ ID NO: 1169994 - DNA, 25 bp, Homo sapien
ccagttgcctgtctcttagcggttc

SEQ ID NO: 1169995 - DNA, 25 bp, Homo sapien
ggattttggtgcaaccactatgggc

SEQ ID NO: 1169996 - DNA, 25 bp, Homo sapien
atggattttggtgcaaccactatgg

SEQ ID NO: 1169997 - DNA, 25 bp, Homo sapien
cttaatggattttggtgcaaccact

SEQ ID NO: 1169998 - DNA, 25 bp, Homo sapien
taatggattttggtgcaaccactat

SEQ ID NO: 1169999 - DNA, 25 bp, Homo sapien
cttcttatactgtgttgttacaggc

SEQ ID NO: 1170000 - DNA, 25 bp, Homo sapien
tggcttcttatactgtgttgttaca

SEQ ID NO: 1170001 - DNA, 25 bp, Homo sapien
tttggcttcttatactgtgttgtta

SEQ ID NO: 1170002 - DNA, 25 bp, Homo sapien
gcttcttatactgtgttgttacagg

SEQ ID NO: 1170003 - DNA, 25 bp, Homo sapien
tccatcacactctccatgggttttc

SEQ ID NO: 1170004 - DNA, 25 bp, Homo sapien
ctcactgtcacacctctcgagagag

SEQ ID NO: 1170005 - DNA, 25 bp, Homo sapien
tgaggagcaggatacccggaagatg

SEQ ID NO: 1170006 - DNA, 25 bp, Homo sapien
acacctctcgagagagtggtgagga

SEQ ID NO: 1170007 - DNA, 25 bp, Homo sapien
gatcagggacacatagactgtagct

SEQ ID NO: 1170008 - DNA, 25 bp, Homo sapien
ggggatcagggacacatagactgta

SEQ ID NO: 1170009 - DNA, 25 bp, Homo sapien
agggacacatagactgtagctgatt

SEQ ID NO: 1170010 - DNA, 25 bp, Homo sapien
ttggggatcagggacacatagactg

SEQ ID NO: 1170011 - DNA, 25 bp, Homo sapien
gaggctgccgctgtaacaggagtca

SEQ ID NO: 1170012 - DNA, 25 bp, Homo sapien
ccacaccttgggcttagttaccaca

SEQ ID NO: 1170013 - DNA, 25 bp, Homo sapien
tcataagtcagggtatgccgattca

SEQ ID NO: 1170014 - DNA, 25 bp, Homo sapien
cattgacatgggtcgaagcataagg

SEQ ID NO: 1170015 - DNA, 25 bp, Homo sapien
gctcggtggtagacaggtggaggat

SEQ ID NO: 1170016 - DNA, 25 bp, Homo sapien
cccatgctcggtggtagacaggtgg

SEQ ID NO: 1170017 - DNA, 25 bp, Homo sapien
tgctcggtggtagacaggtggagga

SEQ ID NO: 1170018 - DNA, 25 bp, Homo sapien
catgctcggtggtagacaggtggag

SEQ ID NO: 1170019 - DNA, 25 bp, Homo sapien
gatacagatgttaagtgagctgaca

SEQ ID NO: 1170020 - DNA, 25 bp, Homo sapien
cagatacagatgttaagtgagctga

SEQ ID NO: 1170021 - DNA, 25 bp, Homo sapien
cagatgttaagtgagctgacatttt

SEQ ID NO: 1170022 - DNA, 25 bp, Homo sapien
ccaacagatacagatgttaagtgag

SEQ ID NO: 1170023 - DNA, 25 bp, Homo sapien
tggagagatctaaggcttcaaatat

SEQ ID NO: 1170024 - DNA, 25 bp, Homo sapien
gagagatctaaggcttcaaatatag

SEQ ID NO: 1170025 - DNA, 25 bp, Homo sapien
ggagagatctaaggcttcaaatata

SEQ ID NO: 1170026 - DNA, 25 bp, Homo sapien
agagatctaaggcttcaaatatagg

SEQ ID NO: 1170027 - DNA, 25 bp, Homo sapien
taggggattccatggcaggagccat

SEQ ID NO: 1170028 - DNA, 25 bp, Homo sapien
gtaaggctacacacagtagagtagg

SEQ ID NO: 1170029 - DNA, 25 bp, Homo sapien
tacacacagtagagtaggggattcc

SEQ ID NO: 1170030 - DNA, 25 bp, Homo sapien
cacagtagagtaggggattccatgg

SEQ ID NO: 1170031 - DNA, 25 bp, Homo sapien
tcctccttaggtgttgctcagccca

SEQ ID NO: 1170032 - DNA, 25 bp, Homo sapien
tagcttggctccactacagagtccc

SEQ ID NO: 1170033 - DNA, 25 bp, Homo sapien
cagagaggatacattagtgtccagc

SEQ ID NO: 1170034 - DNA, 25 bp, Homo sapien
gaccaaccgtcttttcaggaatcag

SEQ ID NO: 1170035 - DNA, 25 bp, Homo sapien
caagggaacaagaacagaggactca

SEQ ID NO: 1170036 - DNA, 25 bp, Homo sapien
gagaaattagtattggtgccccagg

SEQ ID NO: 1170037 - DNA, 25 bp, Homo sapien
gaaagcaatgcccagacatgttgaa

SEQ ID NO: 1170038 - DNA, 25 bp, Homo sapien
tgagcgagatcatgccaaagtgtct

SEQ ID NO: 1170039 - DNA, 25 bp, Homo sapien
ccatggagggttcaaggagacctta

SEQ ID NO: 1170040 - DNA, 25 bp, Homo sapien
tcccattacatgtaagagtcacatt

SEQ ID NO: 1170041 - DNA, 25 bp, Homo sapien
tgttcccattacatgtaagagtcac

SEQ ID NO: 1170042 - DNA, 25 bp, Homo sapien
attctattccatggagggttcaagg

SEQ ID NO: 1170043 - DNA, 25 bp, Homo sapien
tgctgacatttgtattctccactgt

SEQ ID NO: 1170044 - DNA, 25 bp, Homo sapien
agacttccaggtacacaggttcact

SEQ ID NO: 1170045 - DNA, 25 bp, Homo sapien
cattgtggaaccatttggtggaact

SEQ ID NO: 1170046 - DNA, 25 bp, Homo sapien
tctcattaacttgttggtgctgaca

SEQ ID NO: 1170047 - DNA, 25 bp, Homo sapien
ccactctggtgtcctaacccttgga

SEQ ID NO: 1170048 - DNA, 25 bp, Homo sapien
ttcagatgagccatccctcacatga

SEQ ID NO: 1170049 - DNA, 25 bp, Homo sapien
gccaatgcaggggtcttaaaaatga

SEQ ID NO: 1170050 - DNA, 25 bp, Homo sapien
aaaatgagaggccttgaatcccact

SEQ ID NO: 1170051 - DNA, 25 bp, Homo sapien
cacactttgcccgtacagtagtagg

SEQ ID NO: 1170052 - DNA, 25 bp, Homo sapien
gtaggttccactgtcttcaactgtg

SEQ ID NO: 1170053 - DNA, 25 bp, Homo sapien
tagatcaccttgtacacatcccagt

SEQ ID NO: 1170054 - DNA, 25 bp, Homo sapien
ctccaaccatggcacctgaggaaga

SEQ ID NO: 1170055 - DNA, 25 bp, Homo sapien
ctcttaatcttcaagagaaatgtga

SEQ ID NO: 1170056 - DNA, 25 bp, Homo sapien
cagaatcaccaccaacaatgggata

SEQ ID NO: 1170057 - DNA, 25 bp, Homo sapien
taggatgtgggttcagaagtctgaa

SEQ ID NO: 1170058 - DNA, 25 bp, Homo sapien
tgctgctgagttgagataaataatc

SEQ ID NO: 1170059 - DNA, 25 bp, Homo sapien
cacagacgtttctatgtatattgca

SEQ ID NO: 1170060 - DNA, 25 bp, Homo sapien
ctcttttacaaatgctaataaatga

SEQ ID NO: 1170061 - DNA, 25 bp, Homo sapien
caagctgtgtttgacaattgagtag

SEQ ID NO: 1170062 - DNA, 25 bp, Homo sapien
tctataaatccttgagcacagacgt

SEQ ID NO: 1170063 - DNA, 25 bp, Homo sapien
tgtctgaaatagaggggtaaattgc

SEQ ID NO: 1170064 - DNA, 25 bp, Homo sapien
cctgaaatgctgatgtgctgtgaag

SEQ ID NO: 1170065 - DNA, 25 bp, Homo sapien
aatagaggggtaaattgctgtttag

SEQ ID NO: 1170066 - DNA, 25 bp, Homo sapien
tgaaatagaggggtaaattgctgtt

SEQ ID NO: 1170067 - DNA, 25 bp, Homo sapien
gcctgaagaacaaggaggtcaaaga

SEQ ID NO: 1170068 - DNA, 25 bp, Homo sapien
ctgaagaacaaggaggtcaaagatg

SEQ ID NO: 1170069 - DNA, 25 bp, Homo sapien
tacagcctgaagaacaaggaggtca

SEQ ID NO: 1170070 - DNA, 25 bp, Homo sapien
cagcctgaagaacaaggaggtcaaa

SEQ ID NO: 1170071 - DNA, 25 bp, Homo sapien
aactctcttaactctgtgtgattgg

SEQ ID NO: 1170072 - DNA, 25 bp, Homo sapien
aaactctcttaactctgtgtgattg

SEQ ID NO: 1170073 - DNA, 25 bp, Homo sapien
gtcaacatagattatggccagaatg

SEQ ID NO: 1170074 - DNA, 25 bp, Homo sapien
gagtatggaggtgatggtcaacata

SEQ ID NO: 1170075 - DNA, 25 bp, Homo sapien
gagttaggaatgtagagggcgagaa

SEQ ID NO: 1170076 - DNA, 25 bp, Homo sapien
tgtagagggcgagaaagaccacaaa

SEQ ID NO: 1170077 - DNA, 25 bp, Homo sapien
ggatagcacacttaaaaagaagtac

SEQ ID NO: 1170078 - DNA, 25 bp, Homo sapien
cgtgggataatgaccagggaataga

SEQ ID NO: 1170079 - DNA, 25 bp, Homo sapien
ccagggaatagaaagtctctgaagt

SEQ ID NO: 1170080 - DNA, 25 bp, Homo sapien
gtctctgaagtggatagcacactta

SEQ ID NO: 1170081 - DNA, 25 bp, Homo sapien
tccagggaaatggattggctcaggc

SEQ ID NO: 1170082 - DNA, 25 bp, Homo sapien
gcaaggaggctcataattaaggtca

SEQ ID NO: 1170083 - DNA, 25 bp, Homo sapien
ggccacagtctgaaccagtgagagt

SEQ ID NO: 1170084 - DNA, 25 bp, Homo sapien
caaaagagcaacctgaaaatggcca

SEQ ID NO: 1170085 - DNA, 25 bp, Homo sapien
tccaaattgggcttgaagtaggcaa

SEQ ID NO: 1170086 - DNA, 25 bp, Homo sapien
ttttcagagaagcctcttagaaaag

SEQ ID NO: 1170087 - DNA, 25 bp, Homo sapien
gacctcgttaagtgtgcggcacatt

SEQ ID NO: 1170088 - DNA, 25 bp, Homo sapien
gctttcaaggtttcagggtttctca

SEQ ID NO: 1170089 - DNA, 25 bp, Homo sapien
tgagagtcgccctttgactaagagg

SEQ ID NO: 1170090 - DNA, 25 bp, Homo sapien
gacttgaggcagttttcacagcaag

SEQ ID NO: 1170091 - DNA, 25 bp, Homo sapien
tctttctgcaaatctgtggctcaac

SEQ ID NO: 1170092 - DNA, 25 bp, Homo sapien
tctgtggctcaaccgaaaagttgag

SEQ ID NO: 1170093 - DNA, 25 bp, Homo sapien
ctctttctgcaaatctgtggctcaa

SEQ ID NO: 1170094 - DNA, 25 bp, Homo sapien
ccgaaaagttgaggtagaggtcaga

SEQ ID NO: 1170095 - DNA, 25 bp, Homo sapien
tgatttctgtcaaataataggctgg

SEQ ID NO: 1170096 - DNA, 25 bp, Homo sapien
aatgtaaggaacctagatggatgat

SEQ ID NO: 1170097 - DNA, 25 bp, Homo sapien
aataatgtaaggaacctagatggat

SEQ ID NO: 1170098 - DNA, 25 bp, Homo sapien
gtcaaataataggctgggaaaattc

SEQ ID NO: 1170099 - DNA, 25 bp, Homo sapien
ataaacacattcatcaaagagtgat

SEQ ID NO: 1170100 - DNA, 25 bp, Homo sapien
aaacacattcatcaaagagtgattc

SEQ ID NO: 1170101 - DNA, 25 bp, Homo sapien
taaacacattcatcaaagagtgatt

SEQ ID NO: 1170102 - DNA, 25 bp, Homo sapien
ttgtgctcacggaagctggagaaac

SEQ ID NO: 1170103 - DNA, 25 bp, Homo sapien
agcttgtgctcacggaagctggaga

SEQ ID NO: 1170104 - DNA, 25 bp, Homo sapien
ggtgagcttgtgctcacggaagctg

SEQ ID NO: 1170105 - DNA, 25 bp, Homo sapien
agagggtgagcttgtgctcacggaa

SEQ ID NO: 1170106 - DNA, 25 bp, Homo sapien
tgacagcatgctgacgaagaagtac

SEQ ID NO: 1170107 - DNA, 25 bp, Homo sapien
taatgacaagggtgtagacagtctc

SEQ ID NO: 1170108 - DNA, 25 bp, Homo sapien
tcaggcctatgaggttaaacagcat

SEQ ID NO: 1170109 - DNA, 25 bp, Homo sapien
ggtgtggaggtgacgatcaatacta

SEQ ID NO: 1170110 - DNA, 25 bp, Homo sapien
tgctcatgacgactgagtacctcaa

SEQ ID NO: 1170111 - DNA, 25 bp, Homo sapien
tctcttgctcatgacgactgagtac

SEQ ID NO: 1170112 - DNA, 25 bp, Homo sapien
tcttgctcatgacgactgagtacct

SEQ ID NO: 1170113 - DNA, 25 bp, Homo sapien
actctcttgctcatgacgactgagt

SEQ ID NO: 1170114 - DNA, 25 bp, Homo sapien
ggatgtcacagaagaagtgaggcac

SEQ ID NO: 1170115 - DNA, 25 bp, Homo sapien
tacaggtcggatgtcacagaagaag

SEQ ID NO: 1170116 - DNA, 25 bp, Homo sapien
tcggatgtcacagaagaagtgaggc

SEQ ID NO: 1170117 - DNA, 25 bp, Homo sapien
ggtcggatgtcacagaagaagtgag

SEQ ID NO: 1170118 - DNA, 25 bp, Homo sapien
gagatgaaaaccaagcccatgggaa

SEQ ID NO: 1170119 - DNA, 25 bp, Homo sapien
gaaaaccaagcccatgggaatgagg

SEQ ID NO: 1170120 - DNA, 25 bp, Homo sapien
tgaggatcaccagcacactgatgat

SEQ ID NO: 1170121 - DNA, 25 bp, Homo sapien
ccaagcccatgggaatgaggatcac

SEQ ID NO: 1170122 - DNA, 25 bp, Homo sapien
ttggaattgaagtaagcaatggagg

SEQ ID NO: 1170123 - DNA, 25 bp, Homo sapien
tggaattgaagtaagcaatggaggc

SEQ ID NO: 1170124 - DNA, 25 bp, Homo sapien
aaacctctcagctttggcttgtctg

SEQ ID NO: 1170125 - DNA, 25 bp, Homo sapien
cttacaggacagacctggtattaat

SEQ ID NO: 1170126 - DNA, 25 bp, Homo sapien
ataaaacctctcagctttggcttgt

SEQ ID NO: 1170127 - DNA, 25 bp, Homo sapien
acctctcagctttggcttgtctgga

SEQ ID NO: 1170128 - DNA, 25 bp, Homo sapien
ctctgtctttccgttgtccatttcc

SEQ ID NO: 1170129 - DNA, 25 bp, Homo sapien
gtctttccgttgtccatttccttca

SEQ ID NO: 1170130 - DNA, 25 bp, Homo sapien
acattcttcagtgccaaggtcaaag

SEQ ID NO: 1170131 - DNA, 25 bp, Homo sapien
gacattcttcagtgccaaggtcaaa

SEQ ID NO: 1170132 - DNA, 25 bp, Homo sapien
cttgatcagtagaggaacaaagata

SEQ ID NO: 1170133 - DNA, 25 bp, Homo sapien
gctgagctcttgatcagtagaggaa

SEQ ID NO: 1170134 - DNA, 25 bp, Homo sapien
ggaacaaagataacccctgtgcctg

SEQ ID NO: 1170135 - DNA, 25 bp, Homo sapien
caagagtgctgagctcttgatcagt

SEQ ID NO: 1170136 - DNA, 25 bp, Homo sapien
cttcagtttgaatgttgtgggaacc

SEQ ID NO: 1170137 - DNA, 25 bp, Homo sapien
gaggtctcttcagtttgaatgttgt

SEQ ID NO: 1170138 - DNA, 25 bp, Homo sapien
gtctcttcagtttgaatgttgtggg

SEQ ID NO: 1170139 - DNA, 25 bp, Homo sapien
tcagtttgaatgttgtgggaaccat

SEQ ID NO: 1170140 - DNA, 25 bp, Homo sapien
ctggtttaaatcaccaatggcacat

SEQ ID NO: 1170141 - DNA, 25 bp, Homo sapien
caatggcacattgctcgtcaaaggc

SEQ ID NO: 1170142 - DNA, 25 bp, Homo sapien
taaatcaccaatggcacattgctcg

SEQ ID NO: 1170143 - DNA, 25 bp, Homo sapien
gcacattgctcgtcaaaggccagtg

SEQ ID NO: 1170144 - DNA, 25 bp, Homo sapien
aaagagatgaagtgggaatgttgag

SEQ ID NO: 1170145 - DNA, 25 bp, Homo sapien
gagatgaagtgggaatgttgagcat

SEQ ID NO: 1170146 - DNA, 25 bp, Homo sapien
agatgaagtgggaatgttgagcatc

SEQ ID NO: 1170147 - DNA, 25 bp, Homo sapien
aagagatgaagtgggaatgttgagc

SEQ ID NO: 1170148 - DNA, 25 bp, Homo sapien
tatcaagatgatagcattgctggca

SEQ ID NO: 1170149 - DNA, 25 bp, Homo sapien
ctgtgatgccactcaaaaatggaga

SEQ ID NO: 1170150 - DNA, 25 bp, Homo sapien
tgctggcaagggtcaaaacgtacaa

SEQ ID NO: 1170151 - DNA, 25 bp, Homo sapien
gatggccacggtataataggtctca

SEQ ID NO: 1170152 - DNA, 25 bp, Homo sapien
aggccaatgttccaggatccactga

SEQ ID NO: 1170153 - DNA, 25 bp, Homo sapien
ctgtgctcaggccaatgttccagga

SEQ ID NO: 1170154 - DNA, 25 bp, Homo sapien
tgaatgatagctgtgctcaggccaa

SEQ ID NO: 1170155 - DNA, 25 bp, Homo sapien
tgctcaggccaatgttccaggatcc

SEQ ID NO: 1170156 - DNA, 25 bp, Homo sapien
agaagtgggagatgagattagcatc

SEQ ID NO: 1170157 - DNA, 25 bp, Homo sapien
atcacagaagggaaggctgaataca

SEQ ID NO: 1170158 - DNA, 25 bp, Homo sapien
aagtgggagatgagattagcatcac

SEQ ID NO: 1170159 - DNA, 25 bp, Homo sapien
gaagggaaggctgaatacagaagac

SEQ ID NO: 1170160 - DNA, 25 bp, Homo sapien
taataactccttgatagtagtgtct

SEQ ID NO: 1170161 - DNA, 25 bp, Homo sapien
aagtaataactccttgatagtagtg

SEQ ID NO: 1170162 - DNA, 25 bp, Homo sapien
aactccttgatagtagtgtctgcac

SEQ ID NO: 1170163 - DNA, 25 bp, Homo sapien
tccttgatagtagtgtctgcacagg

SEQ ID NO: 1170164 - DNA, 25 bp, Homo sapien
agtacggccatagtggacaatgacc

SEQ ID NO: 1170165 - DNA, 25 bp, Homo sapien
tgaggcacaagtagcaaaggccttt

SEQ ID NO: 1170166 - DNA, 25 bp, Homo sapien
cagagataagtctgtcctgcaggga

SEQ ID NO: 1170167 - DNA, 25 bp, Homo sapien
ttaggtagatgaaagaagtacggcc

SEQ ID NO: 1170168 - DNA, 25 bp, Homo sapien
agagaggctttctgcccaaagctct

SEQ ID NO: 1170169 - DNA, 25 bp, Homo sapien
aagctctgagcaaggcatccttgac

SEQ ID NO: 1170170 - DNA, 25 bp, Homo sapien
ccaaagctctgagcaaggcatcctt

SEQ ID NO: 1170171 - DNA, 25 bp, Homo sapien
gagagaggctttctgcccaaagctc

SEQ ID NO: 1170172 - DNA, 25 bp, Homo sapien
tcacatagtcccagtaaagcagtag

SEQ ID NO: 1170173 - DNA, 25 bp, Homo sapien
acatagtcccagtaaagcagtagaa

SEQ ID NO: 1170174 - DNA, 25 bp, Homo sapien
cccagtaaagcagtagaagcacatt

SEQ ID NO: 1170175 - DNA, 25 bp, Homo sapien
aaagtcacatagtcccagtaaagca

SEQ ID NO: 1170176 - DNA, 25 bp, Homo sapien
tgatgagagtaaagttctctctttt

SEQ ID NO: 1170177 - DNA, 25 bp, Homo sapien
agtgatgagagtaaagttctctctt

SEQ ID NO: 1170178 - DNA, 25 bp, Homo sapien
tcagtgatgagagtaaagttctctc

SEQ ID NO: 1170179 - DNA, 25 bp, Homo sapien
gtcagtgatgagagtaaagttctct

SEQ ID NO: 1170180 - DNA, 25 bp, Homo sapien
gctggctcatacctacgaggctgga

SEQ ID NO: 1170181 - DNA, 25 bp, Homo sapien
caggacaagttggatacgcagcctc

SEQ ID NO: 1170182 - DNA, 25 bp, Homo sapien
gatgtatagtgcaaggaacacgcca

SEQ ID NO: 1170183 - DNA, 25 bp, Homo sapien
ggcacaccctgccaatgatatgggc

SEQ ID NO: 1170184 - DNA, 25 bp, Homo sapien
ggcacagctgtagtggacaatgacc

SEQ ID NO: 1170185 - DNA, 25 bp, Homo sapien
gacagtgtaggtcaccgagatcagc

SEQ ID NO: 1170186 - DNA, 25 bp, Homo sapien
gacccataggtacaacaagcaccag

SEQ ID NO: 1170187 - DNA, 25 bp, Homo sapien
gaagcaatcttgaggattgtagaga

SEQ ID NO: 1170188 - DNA, 25 bp, Homo sapien
ttggagagggacagcgtatttcctg

SEQ ID NO: 1170189 - DNA, 25 bp, Homo sapien
ccacaggaatccatttgcacaaaat

SEQ ID NO: 1170190 - DNA, 25 bp, Homo sapien
cactgggattcagacttgtcagagt

SEQ ID NO: 1170191 - DNA, 25 bp, Homo sapien
ttgcatttccactgggattcagact

SEQ ID NO: 1170192 - DNA, 25 bp, Homo sapien
catgatccatactagatctgggaca

SEQ ID NO: 1170193 - DNA, 25 bp, Homo sapien
tctgggacaaatttctgatttagcc

SEQ ID NO: 1170194 - DNA, 25 bp, Homo sapien
tgtagtatgaggttctcagtttgag

SEQ ID NO: 1170195 - DNA, 25 bp, Homo sapien
tcctgctttcggcactcagaatggt

SEQ ID NO: 1170196 - DNA, 25 bp, Homo sapien
acagcaggttcatttatctgggtac

SEQ ID NO: 1170197 - DNA, 25 bp, Homo sapien
tcatttatctgggtacttgaacata

SEQ ID NO: 1170198 - DNA, 25 bp, Homo sapien
ttatctgggtacttgaacataatga

SEQ ID NO: 1170199 - DNA, 25 bp, Homo sapien
caggttcatttatctgggtacttga

SEQ ID NO: 1170200 - DNA, 25 bp, Homo sapien
cattccgttctaataacaaggcagg

SEQ ID NO: 1170201 - DNA, 25 bp, Homo sapien
tccgttctaataacaaggcaggttc

SEQ ID NO: 1170202 - DNA, 25 bp, Homo sapien
tgcacattccgttctaataacaagg

SEQ ID NO: 1170203 - DNA, 25 bp, Homo sapien
tgcagcttgcacattccgttctaat

SEQ ID NO: 1170204 - DNA, 25 bp, Homo sapien
gtttcaccgcaacccttgttcctga

SEQ ID NO: 1170205 - DNA, 25 bp, Homo sapien
tgtggtttcaccgcaacccttgttc

SEQ ID NO: 1170206 - DNA, 25 bp, Homo sapien
gtctgcatcaggacaggccgacagt

SEQ ID NO: 1170207 - DNA, 25 bp, Homo sapien
tctgcatcaggacaggccgacagtc

SEQ ID NO: 1170208 - DNA, 25 bp, Homo sapien
tgtctgcatcaggacaggccgacag

SEQ ID NO: 1170209 - DNA, 25 bp, Homo sapien
tattgggatgatgggcttatgcagc

SEQ ID NO: 1170210 - DNA, 25 bp, Homo sapien
aagactgttccatacttaggcctgg

SEQ ID NO: 1170211 - DNA, 25 bp, Homo sapien
tgtactcacgatgaaaaaggccaga

SEQ ID NO: 1170212 - DNA, 25 bp, Homo sapien
gaaagattcctgtagggtcaggctc

SEQ ID NO: 1170213 - DNA, 25 bp, Homo sapien
ttagttatataaacaacatccccag

SEQ ID NO: 1170214 - DNA, 25 bp, Homo sapien
ggttcatggattgtaactggtgctg

SEQ ID NO: 1170215 - DNA, 25 bp, Homo sapien
ctcttaacaggttgtgttagatgac

SEQ ID NO: 1170216 - DNA, 25 bp, Homo sapien
ctttgttgtgaacctacgactgttc

SEQ ID NO: 1170217 - DNA, 25 bp, Homo sapien
gactaagactaactatgtaatacac

SEQ ID NO: 1170218 - DNA, 25 bp, Homo sapien
tgagaggctactatctaaatgaact

SEQ ID NO: 1170219 - DNA, 25 bp, Homo sapien
gaaattactgcataggactaagact

SEQ ID NO: 1170220 - DNA, 25 bp, Homo sapien
ctggcaggaagcaatcagctataga

SEQ ID NO: 1170221 - DNA, 25 bp, Homo sapien
tctaaaggagctcatgaaggttaag

SEQ ID NO: 1170222 - DNA, 25 bp, Homo sapien
tgtggctttcagctacatgggttaa

SEQ ID NO: 1170223 - DNA, 25 bp, Homo sapien
ccatggtgacatatacatcagaagc

SEQ ID NO: 1170224 - DNA, 25 bp, Homo sapien
cttaagcaattgttaccatggtgac

SEQ ID NO: 1170225 - DNA, 25 bp, Homo sapien
aactgggggcttaggatagaataga

SEQ ID NO: 1170226 - DNA, 25 bp, Homo sapien
ttggacccacaatggccacacagag

SEQ ID NO: 1170227 - DNA, 25 bp, Homo sapien
tcactctcaattggcgttccgatag

SEQ ID NO: 1170228 - DNA, 25 bp, Homo sapien
atcattccagggacttggacccaca

SEQ ID NO: 1170229 - DNA, 25 bp, Homo sapien
gctggcagttttataacgtaactct

SEQ ID NO: 1170230 - DNA, 25 bp, Homo sapien
cattttccctattgaaggaagctgg

SEQ ID NO: 1170231 - DNA, 25 bp, Homo sapien
ttataacgtaactctcattacattc

SEQ ID NO: 1170232 - DNA, 25 bp, Homo sapien
aaagacacatgtcataaccattttc

SEQ ID NO: 1170233 - DNA, 25 bp, Homo sapien
cctctgcccctggaaaaaactctgg

SEQ ID NO: 1170234 - DNA, 25 bp, Homo sapien
gagaggacaaaacctgagagcatca

SEQ ID NO: 1170235 - DNA, 25 bp, Homo sapien
gagaagagataagctgtggcccaca

SEQ ID NO: 1170236 - DNA, 25 bp, Homo sapien
ctacaaagttcccaagagaggacaa

SEQ ID NO: 1170237 - DNA, 25 bp, Homo sapien
ggattagaggagacgatggctccat

SEQ ID NO: 1170238 - DNA, 25 bp, Homo sapien
taatggattagaggagacgatggct

SEQ ID NO: 1170239 - DNA, 25 bp, Homo sapien
ctataatggattagaggagacgatg

SEQ ID NO: 1170240 - DNA, 25 bp, Homo sapien
tggattagaggagacgatggctcca

SEQ ID NO: 1170241 - DNA, 25 bp, Homo sapien
tccttttacattcatcagttgtaac

SEQ ID NO: 1170242 - DNA, 25 bp, Homo sapien
gatatccttttacattcatcagttg

SEQ ID NO: 1170243 - DNA, 25 bp, Homo sapien
tatccttttacattcatcagttgta

SEQ ID NO: 1170244 - DNA, 25 bp, Homo sapien
ctgatatccttttacattcatcagt

SEQ ID NO: 1170245 - DNA, 25 bp, Homo sapien
aggatgagggaagatgataagggaa

SEQ ID NO: 1170246 - DNA, 25 bp, Homo sapien
tgcaaaggatgagggaagatgataa

SEQ ID NO: 1170247 - DNA, 25 bp, Homo sapien
agaagagtctgacagagacacacta

SEQ ID NO: 1170248 - DNA, 25 bp, Homo sapien
aagagtctgacagagacacactaac

SEQ ID NO: 1170249 - DNA, 25 bp, Homo sapien
attaactttttgtggcattgggtca

SEQ ID NO: 1170250 - DNA, 25 bp, Homo sapien
ttaactttttgtggcattgggtcat

SEQ ID NO: 1170251 - DNA, 25 bp, Homo sapien
ttttgtggcattgggtcatctggtg

SEQ ID NO: 1170252 - DNA, 25 bp, Homo sapien
actttttgtggcattgggtcatctg

SEQ ID NO: 1170253 - DNA, 25 bp, Homo sapien
cttgtcactttctcaaagcagttcc

SEQ ID NO: 1170254 - DNA, 25 bp, Homo sapien
tcactttctcaaagcagttccccat

SEQ ID NO: 1170255 - DNA, 25 bp, Homo sapien
gtcactttctcaaagcagttcccca

SEQ ID NO: 1170256 - DNA, 25 bp, Homo sapien
tgtcactttctcaaagcagttcccc

SEQ ID NO: 1170257 - DNA, 25 bp, Homo sapien
aaaataaacaccttcccaatcatgt

SEQ ID NO: 1170258 - DNA, 25 bp, Homo sapien
aaaaataaacaccttcccaatcatg

SEQ ID NO: 1170259 - DNA, 25 bp, Homo sapien
gcactattagattctttaggaaaaa

SEQ ID NO: 1170260 - DNA, 25 bp, Homo sapien
gtgagcactattagattctttagga

SEQ ID NO: 1170261 - DNA, 25 bp, Homo sapien
gtcggtataagcatgaagacacgca

SEQ ID NO: 1170262 - DNA, 25 bp, Homo sapien
gagaagaggcgatagccatgggaga

SEQ ID NO: 1170263 - DNA, 25 bp, Homo sapien
ccatgggagaggtcggtataagcat

SEQ ID NO: 1170264 - DNA, 25 bp, Homo sapien
agacacgcagtgaagttctgtagat

SEQ ID NO: 1170265 - DNA, 25 bp, Homo sapien
cagaccttgaagaaaaccttgtcac

SEQ ID NO: 1170266 - DNA, 25 bp, Homo sapien
aaaatgaccatctcattgctcttgg

SEQ ID NO: 1170267 - DNA, 25 bp, Homo sapien
cagctggcatagatgtgcaccaggg

SEQ ID NO: 1170268 - DNA, 25 bp, Homo sapien
taagattgtactccccaatttgaga

SEQ ID NO: 1170269 - DNA, 25 bp, Homo sapien
acaatggactggctcttaccaaact

SEQ ID NO: 1170270 - DNA, 25 bp, Homo sapien
gtagataccttgatacacaaaccag

SEQ ID NO: 1170271 - DNA, 25 bp, Homo sapien
tgtatagttcaatgcccgccagtcc

SEQ ID NO: 1170272 - DNA, 25 bp, Homo sapien
gaatattgggtttgatgtagatacc

SEQ ID NO: 1170273 - DNA, 25 bp, Homo sapien
ttatgggactgggtgaccacataac

SEQ ID NO: 1170274 - DNA, 25 bp, Homo sapien
tatttatgggactgggtgaccacat

SEQ ID NO: 1170275 - DNA, 25 bp, Homo sapien
atttatgggactgggtgaccacata

SEQ ID NO: 1170276 - DNA, 25 bp, Homo sapien
ctatttatgggactgggtgaccaca

SEQ ID NO: 1170277 - DNA, 25 bp, Homo sapien
gaaatagacataaggcatgaagtag

SEQ ID NO: 1170278 - DNA, 25 bp, Homo sapien
actttgtcctgttgaagcagaactt

SEQ ID NO: 1170279 - DNA, 25 bp, Homo sapien
taactttgtcctgttgaagcagaac

SEQ ID NO: 1170280 - DNA, 25 bp, Homo sapien
tcttcagagctggtctttcatgttg

SEQ ID NO: 1170281 - DNA, 25 bp, Homo sapien
cttggcccatatggtcccgatagtc

SEQ ID NO: 1170282 - DNA, 25 bp, Homo sapien
tacatgcatgtgttttactggaacg

SEQ ID NO: 1170283 - DNA, 25 bp, Homo sapien
catgcatgtgttttactggaacggg

SEQ ID NO: 1170284 - DNA, 25 bp, Homo sapien
atggtcccgatagtcctgctgccct

SEQ ID NO: 1170285 - DNA, 25 bp, Homo sapien
gggaacaatatatcacatatcttag

SEQ ID NO: 1170286 - DNA, 25 bp, Homo sapien
ctgggaacaatatatcacatatctt

SEQ ID NO: 1170287 - DNA, 25 bp, Homo sapien
tgggaacaatatatcacatatctta

SEQ ID NO: 1170288 - DNA, 25 bp, Homo sapien
gaacaatatatcacatatcttagtc

SEQ ID NO: 1170289 - DNA, 25 bp, Homo sapien
tgtgggtcccatataaaccctattg

SEQ ID NO: 1170290 - DNA, 25 bp, Homo sapien
ggtagtcttctggaataattgatca

SEQ ID NO: 1170291 - DNA, 25 bp, Homo sapien
gactttcataccacctgctttctga

SEQ ID NO: 1170292 - DNA, 25 bp, Homo sapien
aattgatcaatgtctgccacttcca

SEQ ID NO: 1170293 - DNA, 25 bp, Homo sapien
ctccacaaactgtattcactgaagg

SEQ ID NO: 1170294 - DNA, 25 bp, Homo sapien
cacaaactgtattcactgaaggtga

SEQ ID NO: 1170295 - DNA, 25 bp, Homo sapien
caaactgtattcactgaaggtgact

SEQ ID NO: 1170296 - DNA, 25 bp, Homo sapien
tccacaaactgtattcactgaaggt

SEQ ID NO: 1170297 - DNA, 25 bp, Homo sapien
agttgcagcaaaaatctttgtacaa

SEQ ID NO: 1170298 - DNA, 25 bp, Homo sapien
agcaaaaatctttgtacaactctcc

SEQ ID NO: 1170299 - DNA, 25 bp, Homo sapien
tgcagcaaaaatctttgtacaactc

SEQ ID NO: 1170300 - DNA, 25 bp, Homo sapien
gcagcaaaaatctttgtacaactct

SEQ ID NO: 1170301 - DNA, 25 bp, Homo sapien
cacacctttgtacccttcacattcc

SEQ ID NO: 1170302 - DNA, 25 bp, Homo sapien
cactcacacctttgtacccttcaca

SEQ ID NO: 1170303 - DNA, 25 bp, Homo sapien
catgaccactcacacctttgtaccc

SEQ ID NO: 1170304 - DNA, 25 bp, Homo sapien
tgaccactcacacctttgtaccctt

SEQ ID NO: 1170305 - DNA, 25 bp, Homo sapien
agtgtgtgtttaggtgaagtaccct

SEQ ID NO: 1170306 - DNA, 25 bp, Homo sapien
tccatgaatttgtccccactggcca

SEQ ID NO: 1170307 - DNA, 25 bp, Homo sapien
atagtgtgtgtttaggtgaagtacc

SEQ ID NO: 1170308 - DNA, 25 bp, Homo sapien
cccactggccacttaaatagtgtgt

SEQ ID NO: 1170309 - DNA, 25 bp, Homo sapien
ctggccatttggtgcttgacttttg

SEQ ID NO: 1170310 - DNA, 25 bp, Homo sapien
tcagctttatgacccttaattgaca

SEQ ID NO: 1170311 - DNA, 25 bp, Homo sapien
gacttcagttaaagaatcccaggga

SEQ ID NO: 1170312 - DNA, 25 bp, Homo sapien
gagactttctgcagctccgtgattt

SEQ ID NO: 1170313 - DNA, 25 bp, Homo sapien
gtggcggctcctgtctggatggcta

SEQ ID NO: 1170314 - DNA, 25 bp, Homo sapien
agtgagccaatcctcactgttgctg

SEQ ID NO: 1170315 - DNA, 25 bp, Homo sapien
agttcaggtcaaggtggcggctcct

SEQ ID NO: 1170316 - DNA, 25 bp, Homo sapien
ccaatcctcactgttgctggatcct

SEQ ID NO: 1170317 - DNA, 25 bp, Homo sapien
gtggctgtccccctagcgtctgata

SEQ ID NO: 1170318 - DNA, 25 bp, Homo sapien
attcctggcctagggctgttatagc

SEQ ID NO: 1170319 - DNA, 25 bp, Homo sapien
gctgttatagcagaagcagtgacca

SEQ ID NO: 1170320 - DNA, 25 bp, Homo sapien
ccaggatgagggtagcagacaacac

SEQ ID NO: 1170321 - DNA, 25 bp, Homo sapien
cagagatccaaagcagcggcttgtt

SEQ ID NO: 1170322 - DNA, 25 bp, Homo sapien
acagagatccaaagcagcggcttgt

SEQ ID NO: 1170323 - DNA, 25 bp, Homo sapien
gagatccaaagcagcggcttgttca

SEQ ID NO: 1170324 - DNA, 25 bp, Homo sapien
agatccaaagcagcggcttgttcat

SEQ ID NO: 1170325 - DNA, 25 bp, Homo sapien
tgtgtgagcaaaggcttccaggagg

SEQ ID NO: 1170326 - DNA, 25 bp, Homo sapien
ctgtgtgagcaaaggcttccaggag

SEQ ID NO: 1170327 - DNA, 25 bp, Homo sapien
tcactataggctcgaaaacacaagg

SEQ ID NO: 1170328 - DNA, 25 bp, Homo sapien
tctccagcggtgtgatcaagtttac

SEQ ID NO: 1170329 - DNA, 25 bp, Homo sapien
gatgtgcactggagccgggaacttt

SEQ ID NO: 1170330 - DNA, 25 bp, Homo sapien
aggctgtaggcacgagagagatcac

SEQ ID NO: 1170331 - DNA, 25 bp, Homo sapien
caccaaaggtgtcccattgatccaa

SEQ ID NO: 1170332 - DNA, 25 bp, Homo sapien
tgtcgcagaccctttttcaccaaag

SEQ ID NO: 1170333 - DNA, 25 bp, Homo sapien
tgggctgagcttctacaaagtaacc

SEQ ID NO: 1170334 - DNA, 25 bp, Homo sapien
ggactggctcctatcaaacttgccc

SEQ ID NO: 1170335 - DNA, 25 bp, Homo sapien
ccagtccaggatattggcagggaga

SEQ ID NO: 1170336 - DNA, 25 bp, Homo sapien
tttcatagttcagagcctgccagtc

SEQ ID NO: 1170337 - DNA, 25 bp, Homo sapien
caccaagggtttgatgatgacatat

SEQ ID NO: 1170338 - DNA, 25 bp, Homo sapien
taccctgataggcagacaggatatt

SEQ ID NO: 1170339 - DNA, 25 bp, Homo sapien
aagaaagagctgcagatgtaagatc

SEQ ID NO: 1170340 - DNA, 25 bp, Homo sapien
caagtgctctcgttgagtcaagacc

SEQ ID NO: 1170341 - DNA, 25 bp, Homo sapien
ttcattttcaagtgctctcgttgag

SEQ ID NO: 1170342 - DNA, 25 bp, Homo sapien
taagatctagtatccagttgctttg

SEQ ID NO: 1170343 - DNA, 25 bp, Homo sapien
gttgtctacctgatgcaacctcaga

SEQ ID NO: 1170344 - DNA, 25 bp, Homo sapien
aaagatatgggactatgacaagcac

SEQ ID NO: 1170345 - DNA, 25 bp, Homo sapien
gacccctttttgatcgatttgtagc

SEQ ID NO: 1170346 - DNA, 25 bp, Homo sapien
ccgtacttggcaattggagttttca

SEQ ID NO: 1170347 - DNA, 25 bp, Homo sapien
ttttcagtacctggcattgcctggc

SEQ ID NO: 1170348 - DNA, 25 bp, Homo sapien
caaaggcgaagtgaacatgtgcgaa

SEQ ID NO: 1170349 - DNA, 25 bp, Homo sapien
gagagatggattacagtacagcctg

SEQ ID NO: 1170350 - DNA, 25 bp, Homo sapien
aattgtcttgggttcctaggcaaag

SEQ ID NO: 1170351 - DNA, 25 bp, Homo sapien
taccttttggctagaacaaggtgcc

SEQ ID NO: 1170352 - DNA, 25 bp, Homo sapien
tctgtggaatcactgcggaagcttg

SEQ ID NO: 1170353 - DNA, 25 bp, Homo sapien
cggaagcttgaaatatccctcttgc

SEQ ID NO: 1170354 - DNA, 25 bp, Homo sapien
ttacccaacctcaagcctaatgtgg

SEQ ID NO: 1170355 - DNA, 25 bp, Homo sapien
actctgtgattaggaagagactctc

SEQ ID NO: 1170356 - DNA, 25 bp, Homo sapien
cacagggtgacattcacagagtccg

SEQ ID NO: 1170357 - DNA, 25 bp, Homo sapien
tggactctggctaaagcacagggtg

SEQ ID NO: 1170358 - DNA, 25 bp, Homo sapien
taagaaactgatgattacgagagct

SEQ ID NO: 1170359 - DNA, 25 bp, Homo sapien
tccctttcctgatgagcctattgca

SEQ ID NO: 1170360 - DNA, 25 bp, Homo sapien
taaggctatgttgagccaggaaaac

SEQ ID NO: 1170361 - DNA, 25 bp, Homo sapien
aagtgctgctttcaccccaaatcag

SEQ ID NO: 1170362 - DNA, 25 bp, Homo sapien
gaggctaccaatgaccttattgcca

SEQ ID NO: 1170363 - DNA, 25 bp, Homo sapien
tcaaagtgccatcataaatgtgctg

SEQ ID NO: 1170364 - DNA, 25 bp, Homo sapien
ggacttactgaattagaaccatagg

SEQ ID NO: 1170365 - DNA, 25 bp, Homo sapien
gggtcccattgcatgccatcctggg

SEQ ID NO: 1170366 - DNA, 25 bp, Homo sapien
gaggcaaaccgttggcaaaattgac

SEQ ID NO: 1170367 - DNA, 25 bp, Homo sapien
cagttaatgtgtacaggatgagaaa

SEQ ID NO: 1170368 - DNA, 25 bp, Homo sapien
gccacagttaatgtgtacaggatga

SEQ ID NO: 1170369 - DNA, 25 bp, Homo sapien
ctctgttacctctgtgaggttcttt

SEQ ID NO: 1170370 - DNA, 25 bp, Homo sapien
actctgttacctctgtgaggttctt

SEQ ID NO: 1170371 - DNA, 25 bp, Homo sapien
caagaagcaattgttgatggccaag

SEQ ID NO: 1170372 - DNA, 25 bp, Homo sapien
tacaacctgctagggagattggctg

SEQ ID NO: 1170373 - DNA, 25 bp, Homo sapien
gaagaaatgaccaaccaccgtgtga

SEQ ID NO: 1170374 - DNA, 25 bp, Homo sapien
tctgggttacgaagctggagagcat

SEQ ID NO: 1170375 - DNA, 25 bp, Homo sapien
tcacatccctagttgaaaatgcctg

SEQ ID NO: 1170376 - DNA, 25 bp, Homo sapien
aaagcaagacatgcacatcccattg

SEQ ID NO: 1170377 - DNA, 25 bp, Homo sapien
gcagcatagactgcatgggacagag

SEQ ID NO: 1170378 - DNA, 25 bp, Homo sapien
gacagagtcgtaaggttgtttaatg

SEQ ID NO: 1170379 - DNA, 25 bp, Homo sapien
cataacacgggcatctatttctggg

SEQ ID NO: 1170380 - DNA, 25 bp, Homo sapien
caagacacgctgagaagtccaagca

SEQ ID NO: 1170381 - DNA, 25 bp, Homo sapien
tcttggaagtagagactatgccctc

SEQ ID NO: 1170382 - DNA, 25 bp, Homo sapien
gaccccaggactgtaagctcgaaat

SEQ ID NO: 1170383 - DNA, 25 bp, Homo sapien
cagtgtggtgtttaagtcccccatt

SEQ ID NO: 1170384 - DNA, 25 bp, Homo sapien
tgttgacagtgtggtgtttaagtcc

SEQ ID NO: 1170385 - DNA, 25 bp, Homo sapien
gacagtgtggtgtttaagtccccca

SEQ ID NO: 1170386 - DNA, 25 bp, Homo sapien
gttgacagtgtggtgtttaagtccc

SEQ ID NO: 1170387 - DNA, 25 bp, Homo sapien
catttctgtgggattggtggtggta

SEQ ID NO: 1170388 - DNA, 25 bp, Homo sapien
ttggtggtggtatcccctttatcat

SEQ ID NO: 1170389 - DNA, 25 bp, Homo sapien
gattggtggtggtatcccctttatc

SEQ ID NO: 1170390 - DNA, 25 bp, Homo sapien
tgcatttctgtgggattggtggtgg

SEQ ID NO: 1170391 - DNA, 25 bp, Homo sapien
gtgaagtgaaacagtgcaatgacat

SEQ ID NO: 1170392 - DNA, 25 bp, Homo sapien
gtttccagtgaagtgaaacagtgca

SEQ ID NO: 1170393 - DNA, 25 bp, Homo sapien
cagtgtgtttccagtgaagtgaaac

SEQ ID NO: 1170394 - DNA, 25 bp, Homo sapien
tccagtgaagtgaaacagtgcaatg

SEQ ID NO: 1170395 - DNA, 25 bp, Homo sapien
ggtctttgataagaaccagtccttg

SEQ ID NO: 1170396 - DNA, 25 bp, Homo sapien
agattccttgcaggtggtctttgat

SEQ ID NO: 1170397 - DNA, 25 bp, Homo sapien
ccttgtgggagacattgaagtgaac

SEQ ID NO: 1170398 - DNA, 25 bp, Homo sapien
ctgtgggaacagagataagcattat

SEQ ID NO: 1170399 - DNA, 25 bp, Homo sapien
tttgctgcacatctgtgggttccag

SEQ ID NO: 1170400 - DNA, 25 bp, Homo sapien
ctctgggtcgatgggaagcctgtgg

SEQ ID NO: 1170401 - DNA, 25 bp, Homo sapien
tccacttcagggattactgagctct

SEQ ID NO: 1170402 - DNA, 25 bp, Homo sapien
ttactgagctctgggtcgatgggaa

SEQ ID NO: 1170403 - DNA, 25 bp, Homo sapien
tggcagcaatggctagaagtcatcg

SEQ ID NO: 1170404 - DNA, 25 bp, Homo sapien
tacttccttggagataggagtggct

SEQ ID NO: 1170405 - DNA, 25 bp, Homo sapien
ttgcagtttctgctgatttatttcc

SEQ ID NO: 1170406 - DNA, 25 bp, Homo sapien
tggccaattgataccgagtggaagt

SEQ ID NO: 1170407 - DNA, 25 bp, Homo sapien
caggcgatgccacacagagttgttg

SEQ ID NO: 1170408 - DNA, 25 bp, Homo sapien
tctttgctcttagagctttgattca

SEQ ID NO: 1170409 - DNA, 25 bp, Homo sapien
taacccatattgatctctcattttg

SEQ ID NO: 1170410 - DNA, 25 bp, Homo sapien
tcaccaggcgatgccacacagagtt

SEQ ID NO: 1170411 - DNA, 25 bp, Homo sapien
caagagtggacgtgaaccacagggt

SEQ ID NO: 1170412 - DNA, 25 bp, Homo sapien
gatagttacgtgttcctagcaggac

SEQ ID NO: 1170413 - DNA, 25 bp, Homo sapien
ccaatatacccaggccacaagagtg

SEQ ID NO: 1170414 - DNA, 25 bp, Homo sapien
tgaatcagccttgtctggaaccaga

SEQ ID NO: 1170415 - DNA, 25 bp, Homo sapien
ggaaaggccattagaattgccccag

SEQ ID NO: 1170416 - DNA, 25 bp, Homo sapien
gaaaggccattagaattgccccagc

SEQ ID NO: 1170417 - DNA, 25 bp, Homo sapien
aaaggccattagaattgccccagca

SEQ ID NO: 1170418 - DNA, 25 bp, Homo sapien
caggagggcattgcccacattcaca

SEQ ID NO: 1170419 - DNA, 25 bp, Homo sapien
ccagagtgctcatcatcatgtcata

SEQ ID NO: 1170420 - DNA, 25 bp, Homo sapien
catcatgtcatagaactgctgggcc

SEQ ID NO: 1170421 - DNA, 25 bp, Homo sapien
gtctcagaatcaggacactggccag

SEQ ID NO: 1170422 - DNA, 25 bp, Homo sapien
taactatgctgggaaacggtccaaa

SEQ ID NO: 1170423 - DNA, 25 bp, Homo sapien
taatgtcctgaactggcgggcactg

SEQ ID NO: 1170424 - DNA, 25 bp, Homo sapien
gattaacaccatctatcttggcggg

SEQ ID NO: 1170425 - DNA, 25 bp, Homo sapien
catttgtacaagctgggagtccgcc

SEQ ID NO: 1170426 - DNA, 25 bp, Homo sapien
cagatggtcagagacgaagaatatt

SEQ ID NO: 1170427 - DNA, 25 bp, Homo sapien
gtcagagacgaagaatattcggttc

SEQ ID NO: 1170428 - DNA, 25 bp, Homo sapien
gatggtcagagacgaagaatattcg

SEQ ID NO: 1170429 - DNA, 25 bp, Homo sapien
tggtcagagacgaagaatattcggt

SEQ ID NO: 1170430 - DNA, 25 bp, Homo sapien
tggagtttgttctcctttgccacca

SEQ ID NO: 1170431 - DNA, 25 bp, Homo sapien
taataatggcatcccctttagatat

SEQ ID NO: 1170432 - DNA, 25 bp, Homo sapien
caggaaccacagtaataatggcatc

SEQ ID NO: 1170433 - DNA, 25 bp, Homo sapien
tttgccaccaggaaccacagtaata

SEQ ID NO: 1170434 - DNA, 25 bp, Homo sapien
ttcccagtgtcggaatcttctccga

SEQ ID NO: 1170435 - DNA, 25 bp, Homo sapien
ccagtgtcggaatcttctccgatct

SEQ ID NO: 1170436 - DNA, 25 bp, Homo sapien
gcctttcccagtgtcggaatcttct

SEQ ID NO: 1170437 - DNA, 25 bp, Homo sapien
agtgtcggaatcttctccgatctca

SEQ ID NO: 1170438 - DNA, 25 bp, Homo sapien
gcattttttatgctccacttgcagc

SEQ ID NO: 1170439 - DNA, 25 bp, Homo sapien
agtagttaattccacaatgttgcat

SEQ ID NO: 1170440 - DNA, 25 bp, Homo sapien
gtgtggcccataagtagttaattcc

SEQ ID NO: 1170441 - DNA, 25 bp, Homo sapien
aggcaatttcaggtgtggcccataa

SEQ ID NO: 1170442 - DNA, 25 bp, Homo sapien
gcatccagagtagcatccggtgtag

SEQ ID NO: 1170443 - DNA, 25 bp, Homo sapien
gacttggtctttgacctctgggtgc

SEQ ID NO: 1170444 - DNA, 25 bp, Homo sapien
gggcattctaaggtgccatcatcaa

SEQ ID NO: 1170445 - DNA, 25 bp, Homo sapien
ccttgcaaggataacagtcaattcc

SEQ ID NO: 1170446 - DNA, 25 bp, Homo sapien
gctggcctctaggatagtttgtgat

SEQ ID NO: 1170447 - DNA, 25 bp, Homo sapien
tgtacattggggaaagcgttaatta

SEQ ID NO: 1170448 - DNA, 25 bp, Homo sapien
ttgaactatgctggcctctaggata

SEQ ID NO: 1170449 - DNA, 25 bp, Homo sapien
ctgtttgaactatgctggcctctag

SEQ ID NO: 1170450 - DNA, 25 bp, Homo sapien
taagaagccctggtgtaagacttgt

SEQ ID NO: 1170451 - DNA, 25 bp, Homo sapien
cacagaggtagtgagttgatctcca

SEQ ID NO: 1170452 - DNA, 25 bp, Homo sapien
taagacttgtttgtcctgcagctct

SEQ ID NO: 1170453 - DNA, 25 bp, Homo sapien
gtcatcggcagcatccagaaagtgg

SEQ ID NO: 1170454 - DNA, 25 bp, Homo sapien
tcttgttcatattgaggccccagtc

SEQ ID NO: 1170455 - DNA, 25 bp, Homo sapien
ttttccagctgataagaatgttttg

SEQ ID NO: 1170456 - DNA, 25 bp, Homo sapien
cagtcccctgtttggcttgatgcta

SEQ ID NO: 1170457 - DNA, 25 bp, Homo sapien
tccaccaatgcaaaggattgcttgg

SEQ ID NO: 1170458 - DNA, 25 bp, Homo sapien
tcctgtttgcactctcatttcctac

SEQ ID NO: 1170459 - DNA, 25 bp, Homo sapien
agcccttcctgtttgcactctcatt

SEQ ID NO: 1170460 - DNA, 25 bp, Homo sapien
cttcctgtttgcactctcatttcct

SEQ ID NO: 1170461 - DNA, 25 bp, Homo sapien
gcactctcatttcctacataaattc

SEQ ID NO: 1170462 - DNA, 25 bp, Homo sapien
ctccttccagacaatcacagccctc

SEQ ID NO: 1170463 - DNA, 25 bp, Homo sapien
ccttccagacaatcacagccctcat

SEQ ID NO: 1170464 - DNA, 25 bp, Homo sapien
tctccttccagacaatcacagccct

SEQ ID NO: 1170465 - DNA, 25 bp, Homo sapien
tccttccagacaatcacagccctca

SEQ ID NO: 1170466 - DNA, 25 bp, Homo sapien
ctatgacacacgtctgaccatttaa

SEQ ID NO: 1170467 - DNA, 25 bp, Homo sapien
gatggaaagcaatttgtcttctcct

SEQ ID NO: 1170468 - DNA, 25 bp, Homo sapien
aagatggaaagcaatttgtcttctc

SEQ ID NO: 1170469 - DNA, 25 bp, Homo sapien
gacacacgtctgaccatttaagcct

SEQ ID NO: 1170470 - DNA, 25 bp, Homo sapien
gccctcgggtcgctctgcccagccg

SEQ ID NO: 1170471 - DNA, 25 bp, Homo sapien
gcgcctcccgggccacgtggtctgc

SEQ ID NO: 1170472 - DNA, 25 bp, Homo sapien
gcctcccgggccacgtggtctgcag

SEQ ID NO: 1170473 - DNA, 25 bp, Homo sapien
agggcgccgccctcgggtcgctctg

SEQ ID NO: 1170474 - DNA, 25 bp, Homo sapien
aagggcacaggacagcgggtcatgg

SEQ ID NO: 1170475 - DNA, 25 bp, Homo sapien
ccgctccgcccacgcgtcccctcgc

SEQ ID NO: 1170476 - DNA, 25 bp, Homo sapien
cgctccgcccacgcgtcccctcgcc

SEQ ID NO: 1170477 - DNA, 25 bp, Homo sapien
cccgctccgcccacgcgtcccctcg

SEQ ID NO: 1170478 - DNA, 25 bp, Homo sapien
cgtgcgttggcctcgtccacgatct

SEQ ID NO: 1170479 - DNA, 25 bp, Homo sapien
ctgcacgaagcggtcgatctggtcg

SEQ ID NO: 1170480 - DNA, 25 bp, Homo sapien
tcgtccacgatctgcacgaagcggt

SEQ ID NO: 1170481 - DNA, 25 bp, Homo sapien
gccgcacgcccaggtccaacaggaa

SEQ ID NO: 1170482 - DNA, 25 bp, Homo sapien
cctccctgcgctgaccccgcccgct

SEQ ID NO: 1170483 - DNA, 25 bp, Homo sapien
ccctgcgctgaccccgcccgctgac

SEQ ID NO: 1170484 - DNA, 25 bp, Homo sapien
tccctgcgctgaccccgcccgctga

SEQ ID NO: 1170485 - DNA, 25 bp, Homo sapien
ctccctccctgcgctgaccccgccc

SEQ ID NO: 1170486 - DNA, 25 bp, Homo sapien
tggctactgtactcgaaatgtggct

SEQ ID NO: 1170487 - DNA, 25 bp, Homo sapien
gatgtagtgtgaaaaacgcaacagg

SEQ ID NO: 1170488 - DNA, 25 bp, Homo sapien
tgcactaggtggctaggaggcctct

SEQ ID NO: 1170489 - DNA, 25 bp, Homo sapien
cgcaacagggtatgaagaggtagta

SEQ ID NO: 1170490 - DNA, 25 bp, Homo sapien
ttatttcgttcgctggtagaactgg

SEQ ID NO: 1170491 - DNA, 25 bp, Homo sapien
ggtcgtagtcgtcggatttcagcaa

SEQ ID NO: 1170492 - DNA, 25 bp, Homo sapien
agcatggtgccagtgcggccaaagc

SEQ ID NO: 1170493 - DNA, 25 bp, Homo sapien
tcataggtctcgatggagccgggtc

SEQ ID NO: 1170494 - DNA, 25 bp, Homo sapien
tgagggcctggtagaagggtactaa

SEQ ID NO: 1170495 - DNA, 25 bp, Homo sapien
caatgggagctagagggtttaatac

SEQ ID NO: 1170496 - DNA, 25 bp, Homo sapien
tttattcaacaaagcagtacaagcc

SEQ ID NO: 1170497 - DNA, 25 bp, Homo sapien
aaagcagtacaagcctccccttcaa

SEQ ID NO: 1170498 - DNA, 25 bp, Homo sapien
cacatcaaatattgtcagggaacag

SEQ ID NO: 1170499 - DNA, 25 bp, Homo sapien
taaacaagggtgacacgtgtgcagc

SEQ ID NO: 1170500 - DNA, 25 bp, Homo sapien
gagagcccagatgagctgagcagca

SEQ ID NO: 1170501 - DNA, 25 bp, Homo sapien
tgcataactgcctagattggctctg

SEQ ID NO: 1170502 - DNA, 25 bp, Homo sapien
taggtcttggggataatgcggggca

SEQ ID NO: 1170503 - DNA, 25 bp, Homo sapien
cattgccccgggaagactaggtctt

SEQ ID NO: 1170504 - DNA, 25 bp, Homo sapien
attgccccgggaagactaggtcttg

SEQ ID NO: 1170505 - DNA, 25 bp, Homo sapien
gaagactaggtcttggggataatgc

SEQ ID NO: 1170506 - DNA, 25 bp, Homo sapien
taagtaagaaaagtacggtcatgac

SEQ ID NO: 1170507 - DNA, 25 bp, Homo sapien
gatttgaagcttggcacacgggtgc

SEQ ID NO: 1170508 - DNA, 25 bp, Homo sapien
tatggtttagatcaaatctctgccc

SEQ ID NO: 1170509 - DNA, 25 bp, Homo sapien
cacgggtgcagttcattctgggaaa

SEQ ID NO: 1170510 - DNA, 25 bp, Homo sapien
tgcctggcacgcattaagggctcaa

SEQ ID NO: 1170511 - DNA, 25 bp, Homo sapien
ttttgctcttaaatactcgggccac

SEQ ID NO: 1170512 - DNA, 25 bp, Homo sapien
tgggccacattttaaggagaagcac

SEQ ID NO: 1170513 - DNA, 25 bp, Homo sapien
tggatgtgagagaaccaccctgata

SEQ ID NO: 1170514 - DNA, 25 bp, Homo sapien
aagagcagcacagccgtccagagca

SEQ ID NO: 1170515 - DNA, 25 bp, Homo sapien
aaagagcagcacagccgtccagagc

SEQ ID NO: 1170516 - DNA, 25 bp, Homo sapien
gagcagcacagccgtccagagcagc

SEQ ID NO: 1170517 - DNA, 25 bp, Homo sapien
gcagcacagccgtccagagcagcat

SEQ ID NO: 1170518 - DNA, 25 bp, Homo sapien
tgccaagcttggcttaattgcattc

SEQ ID NO: 1170519 - DNA, 25 bp, Homo sapien
ccttgccaagcttggcttaattgca

SEQ ID NO: 1170520 - DNA, 25 bp, Homo sapien
tgccttgccaagcttggcttaattg

SEQ ID NO: 1170521 - DNA, 25 bp, Homo sapien
ccaagcttggcttaattgcattcat

SEQ ID NO: 1170522 - DNA, 25 bp, Homo sapien
gacagtggtgtattcttccatccct

SEQ ID NO: 1170523 - DNA, 25 bp, Homo sapien
ctgtagaacttcacctgagacagtg

SEQ ID NO: 1170524 - DNA, 25 bp, Homo sapien
ggtgtattcttccatccctgacatc

SEQ ID NO: 1170525 - DNA, 25 bp, Homo sapien
gacttgaaccatggcagtctctgaa

SEQ ID NO: 1170526 - DNA, 25 bp, Homo sapien
tctagaaacgggacccttgagcagc

SEQ ID NO: 1170527 - DNA, 25 bp, Homo sapien
ctctagaaacgggacccttgagcag

SEQ ID NO: 1170528 - DNA, 25 bp, Homo sapien
aggcccaggactcaggaggggagtc

SEQ ID NO: 1170529 - DNA, 25 bp, Homo sapien
atgcaggcccaggactcaggagggg

SEQ ID NO: 1170530 - DNA, 25 bp, Homo sapien
tgcaggcccaggactcaggagggga

SEQ ID NO: 1170531 - DNA, 25 bp, Homo sapien
ctggggagatgcaggcccaggactc

SEQ ID NO: 1170532 - DNA, 25 bp, Homo sapien
tcacaccagtaaagcccagagtctc

SEQ ID NO: 1170533 - DNA, 25 bp, Homo sapien
cctcacaccagtaaagcccagagtc

SEQ ID NO: 1170534 - DNA, 25 bp, Homo sapien
ctcacaccagtaaagcccagagtct

SEQ ID NO: 1170535 - DNA, 25 bp, Homo sapien
cctgggggcatctccactctctcgc

SEQ ID NO: 1170536 - DNA, 25 bp, Homo sapien
gggggcatctccactctctcgcgca

SEQ ID NO: 1170537 - DNA, 25 bp, Homo sapien
gcatctccactctctcgcgcactta

SEQ ID NO: 1170538 - DNA, 25 bp, Homo sapien
gggcatctccactctctcgcgcact

SEQ ID NO: 1170539 - DNA, 25 bp, Homo sapien
gaaggaatacaggatcggaggggag

SEQ ID NO: 1170540 - DNA, 25 bp, Homo sapien
aggagtagttcccagcatcctgttc

SEQ ID NO: 1170541 - DNA, 25 bp, Homo sapien
ggtagaaggaatacaggatcggagg

SEQ ID NO: 1170542 - DNA, 25 bp, Homo sapien
ggagtagttcccagcatcctgttct

SEQ ID NO: 1170543 - DNA, 25 bp, Homo sapien
aggatctcacataaaccagaagtgc

SEQ ID NO: 1170544 - DNA, 25 bp, Homo sapien
ccagttgctggcgggagtgaacaag

SEQ ID NO: 1170545 - DNA, 25 bp, Homo sapien
aagtgcagcagcaataaccatcagg

SEQ ID NO: 1170546 - DNA, 25 bp, Homo sapien
gcagcaataaccatcaggccaagca

SEQ ID NO: 1170547 - DNA, 25 bp, Homo sapien
cgttggcatatagtgggcactgctc

SEQ ID NO: 1170548 - DNA, 25 bp, Homo sapien
gctgtgggtggtatctgggatggaa

SEQ ID NO: 1170549 - DNA, 25 bp, Homo sapien
acctggagctgtgggtggtatctgg

SEQ ID NO: 1170550 - DNA, 25 bp, Homo sapien
atatagtgggcactgctctccacct

SEQ ID NO: 1170551 - DNA, 25 bp, Homo sapien
ggttctatgcaccacagagtagaca

SEQ ID NO: 1170552 - DNA, 25 bp, Homo sapien
tgcaccacagagtagacaacacctt

SEQ ID NO: 1170553 - DNA, 25 bp, Homo sapien
ttgaggttctatgcaccacagagta

SEQ ID NO: 1170554 - DNA, 25 bp, Homo sapien
cacagagtagacaacaccttcatct

SEQ ID NO: 1170555 - DNA, 25 bp, Homo sapien
ctccccacggtgaactcagcagacc

SEQ ID NO: 1170556 - DNA, 25 bp, Homo sapien
ttctccccacggtgaactcagcaga

SEQ ID NO: 1170557 - DNA, 25 bp, Homo sapien
ctttctccccacggtgaactcagca

SEQ ID NO: 1170558 - DNA, 25 bp, Homo sapien
ccccacggtgaactcagcagacctg

SEQ ID NO: 1170559 - DNA, 25 bp, Homo sapien
tcacctccgcacagatgatagaact

SEQ ID NO: 1170560 - DNA, 25 bp, Homo sapien
aggcatctcacctccgcacagatga

SEQ ID NO: 1170561 - DNA, 25 bp, Homo sapien
cacctccgcacagatgatagaactg

SEQ ID NO: 1170562 - DNA, 25 bp, Homo sapien
atctcacctccgcacagatgataga

SEQ ID NO: 1170563 - DNA, 25 bp, Homo sapien
ctcatattcacctccgtggatgaaa

SEQ ID NO: 1170564 - DNA, 25 bp, Homo sapien
tatttgtatatgactagcggcgctg

SEQ ID NO: 1170565 - DNA, 25 bp, Homo sapien
gaaagagttgaggaccccactgtct

SEQ ID NO: 1170566 - DNA, 25 bp, Homo sapien
taaggcaactatgatatcactaggc

SEQ ID NO: 1170567 - DNA, 25 bp, Homo sapien
ctgactgaaatgttgttatgcggca

SEQ ID NO: 1170568 - DNA, 25 bp, Homo sapien
tgagagaacaatgtttcggggtaaa

SEQ ID NO: 1170569 - DNA, 25 bp, Homo sapien
ggcataaccacttgacaacagtgat

SEQ ID NO: 1170570 - DNA, 25 bp, Homo sapien
gcataaccacttgacaacagtgatg

SEQ ID NO: 1170571 - DNA, 25 bp, Homo sapien
ataaccacttgacaacagtgatgct

SEQ ID NO: 1170572 - DNA, 25 bp, Homo sapien
ctgtctctggagaacggtggaagtc

SEQ ID NO: 1170573 - DNA, 25 bp, Homo sapien
tgtctctggagaacggtggaagtcc

SEQ ID NO: 1170574 - DNA, 25 bp, Homo sapien
cagtgtcctgcagagcagaagcagg

SEQ ID NO: 1170575 - DNA, 25 bp, Homo sapien
cattaaccctgagccgcttggtgtg

SEQ ID NO: 1170576 - DNA, 25 bp, Homo sapien
gtggaatttgggtgaagctttgtgc

SEQ ID NO: 1170577 - DNA, 25 bp, Homo sapien
cctgaactcgaccattaaccctgag

SEQ ID NO: 1170578 - DNA, 25 bp, Homo sapien
cacataagcttcctgaactcgacca

SEQ ID NO: 1170579 - DNA, 25 bp, Homo sapien
tggcagccggtgctgcgactccact

SEQ ID NO: 1170580 - DNA, 25 bp, Homo sapien
cgccgaggcaggcatagtagctcca

SEQ ID NO: 1170581 - DNA, 25 bp, Homo sapien
tgcatctgctgcgttggtcgccgag

SEQ ID NO: 1170582 - DNA, 25 bp, Homo sapien
cactccccacattccttaattaaga

SEQ ID NO: 1170583 - DNA, 25 bp, Homo sapien
gtccttctggaaagtcccatgttca

SEQ ID NO: 1170584 - DNA, 25 bp, Homo sapien
acctcccaggccgagtggatgcacg

SEQ ID NO: 1170585 - DNA, 25 bp, Homo sapien
aggagctgtggtccttctggaaagt

SEQ ID NO: 1170586 - DNA, 25 bp, Homo sapien
agaggcaggcaaactccctcgacag

SEQ ID NO: 1170587 - DNA, 25 bp, Homo sapien
agaagcagactccacaggggcctca

SEQ ID NO: 1170588 - DNA, 25 bp, Homo sapien
gcagactccacaggggcctcatgac

SEQ ID NO: 1170589 - DNA, 25 bp, Homo sapien
tcccagagaagcagactccacaggg

SEQ ID NO: 1170590 - DNA, 25 bp, Homo sapien
agagaagcagactccacaggggcct

SEQ ID NO: 1170591 - DNA, 25 bp, Homo sapien
ctgaaagaacagagcccctggtcac

SEQ ID NO: 1170592 - DNA, 25 bp, Homo sapien
tcggaaaaacgtggccaggagctct

SEQ ID NO: 1170593 - DNA, 25 bp, Homo sapien
gaagcgggaatggtacagagtctcc

SEQ ID NO: 1170594 - DNA, 25 bp, Homo sapien
agagatcgccagatagcctcacgga

SEQ ID NO: 1170595 - DNA, 25 bp, Homo sapien
catcaacacggagaagttgccgctg

SEQ ID NO: 1170596 - DNA, 25 bp, Homo sapien
tgggtccagggctggccccttgtgt

SEQ ID NO: 1170597 - DNA, 25 bp, Homo sapien
tccagggctggccccttgtgtccac

SEQ ID NO: 1170598 - DNA, 25 bp, Homo sapien
gtccagggctggccccttgtgtcca

SEQ ID NO: 1170599 - DNA, 25 bp, Homo sapien
cgtacaccttgagctggagggtctg

SEQ ID NO: 1170600 - DNA, 25 bp, Homo sapien
tataggttatttcgctgatgttggg

SEQ ID NO: 1170601 - DNA, 25 bp, Homo sapien
tggttgtctcccgtcgccagctata

SEQ ID NO: 1170602 - DNA, 25 bp, Homo sapien
tcttggagggctgagcatccctttc

SEQ ID NO: 1170603 - DNA, 25 bp, Homo sapien
aatgaacacttgtaccacgggcctg

SEQ ID NO: 1170604 - DNA, 25 bp, Homo sapien
ccgtctgtgaagaggctgtgtggtt

SEQ ID NO: 1170605 - DNA, 25 bp, Homo sapien
gtgaagaggctgtgtggttccatac

SEQ ID NO: 1170606 - DNA, 25 bp, Homo sapien
tgtccgtctgtgaagaggctgtgtg

SEQ ID NO: 1170607 - DNA, 25 bp, Homo sapien
ctgtccgtctgtgaagaggctgtgt

SEQ ID NO: 1170608 - DNA, 25 bp, Homo sapien
catgatgacagctatcccagggcgt

SEQ ID NO: 1170609 - DNA, 25 bp, Homo sapien
atcccagggcgtgactgtggccaag

SEQ ID NO: 1170610 - DNA, 25 bp, Homo sapien
gagacaatgcaggaataggccacat

SEQ ID NO: 1170611 - DNA, 25 bp, Homo sapien
ctggtcccagggaaatgctcagcac

SEQ ID NO: 1170612 - DNA, 25 bp, Homo sapien
atctttgtaggaggccttccctggt

SEQ ID NO: 1170613 - DNA, 25 bp, Homo sapien
gcagcacatctttgtaggaggcctt

SEQ ID NO: 1170614 - DNA, 25 bp, Homo sapien
gcacatctttgtaggaggccttccc

SEQ ID NO: 1170615 - DNA, 25 bp, Homo sapien
ccagcagcacatctttgtaggaggc

SEQ ID NO: 1170616 - DNA, 25 bp, Homo sapien
tggaaatgaccacggagccctggtc

SEQ ID NO: 1170617 - DNA, 25 bp, Homo sapien
gacagcctggcatggaaatgaccac

SEQ ID NO: 1170618 - DNA, 25 bp, Homo sapien
gccagctccgacagcctggcatgga

SEQ ID NO: 1170619 - DNA, 25 bp, Homo sapien
gagccctggtcagtcgggtagttct

SEQ ID NO: 1170620 - DNA, 25 bp, Homo sapien
tgtggtggacccagttaaatcactg

SEQ ID NO: 1170621 - DNA, 25 bp, Homo sapien
tcctagtatctaaccttggcctgca

SEQ ID NO: 1170622 - DNA, 25 bp, Homo sapien
tgtagaaggtatggaaagttaggac

SEQ ID NO: 1170623 - DNA, 25 bp, Homo sapien
gcatggagctttctactatcccagg

SEQ ID NO: 1170624 - DNA, 25 bp, Homo sapien
ggacccactctgtcagcatggacat

SEQ ID NO: 1170625 - DNA, 25 bp, Homo sapien
tctggacccactctgtcagcatgga

SEQ ID NO: 1170626 - DNA, 25 bp, Homo sapien
gatcctgcacaagggggttctctgt

SEQ ID NO: 1170627 - DNA, 25 bp, Homo sapien
tctgtctctggacccactctgtcag

SEQ ID NO: 1170628 - DNA, 25 bp, Homo sapien
gaggaccatggtgatttccaggcac

SEQ ID NO: 1170629 - DNA, 25 bp, Homo sapien
tccaggcaccagttatgtcccagag

SEQ ID NO: 1170630 - DNA, 25 bp, Homo sapien
attcccatgggagatatgaggacca

SEQ ID NO: 1170631 - DNA, 25 bp, Homo sapien
gactcaggctggaggcaattccttg

SEQ ID NO: 1170632 - DNA, 25 bp, Homo sapien
ggagattgaagccaccctgggaaaa

SEQ ID NO: 1170633 - DNA, 25 bp, Homo sapien
gaagttgtgcaagaacgtcctgttg

SEQ ID NO: 1170634 - DNA, 25 bp, Homo sapien
ggtgtttcctgcaaaacggtgccca

SEQ ID NO: 1170635 - DNA, 25 bp, Homo sapien
tatcaagactggattgaggccccag

SEQ ID NO: 1170636 - DNA, 25 bp, Homo sapien
aggatctgggaacaatcgagtggaa

SEQ ID NO: 1170637 - DNA, 25 bp, Homo sapien
aacaatcgagtggaagagtggtgat

SEQ ID NO: 1170638 - DNA, 25 bp, Homo sapien
gggaggatctgggaacaatcgagtg

SEQ ID NO: 1170639 - DNA, 25 bp, Homo sapien
tctgggaacaatcgagtggaagagt

SEQ ID NO: 1170640 - DNA, 25 bp, Homo sapien
tgagaatttgataaagccaggttac

SEQ ID NO: 1170641 - DNA, 25 bp, Homo sapien
gacaggttgagtggccatggaccct

SEQ ID NO: 1170642 - DNA, 25 bp, Homo sapien
tggaccctgttcaggtaatcttggg

SEQ ID NO: 1170643 - DNA, 25 bp, Homo sapien
tgcaagctgacaggttgagtggcca

SEQ ID NO: 1170644 - DNA, 25 bp, Homo sapien
ccaccagggctcattgtcagatcct

SEQ ID NO: 1170645 - DNA, 25 bp, Homo sapien
tttgcatgattcagtgaccaggcat

SEQ ID NO: 1170646 - DNA, 25 bp, Homo sapien
gaggccagttttgcatgattcagtg

SEQ ID NO: 1170647 - DNA, 25 bp, Homo sapien
caccagggctcattgtcagatcctg

SEQ ID NO: 1170648 - DNA, 25 bp, Homo sapien
gagagctgcaggtcccatctcatcc

SEQ ID NO: 1170649 - DNA, 25 bp, Homo sapien
agctgctttgatctgaggtggggcc

SEQ ID NO: 1170650 - DNA, 25 bp, Homo sapien
gcaggtcccatctcatccagagctg

SEQ ID NO: 1170651 - DNA, 25 bp, Homo sapien
agctgcaggtcccatctcatccaga

SEQ ID NO: 1170652 - DNA, 25 bp, Homo sapien
tggtgcaccacgctacaaaccactg

SEQ ID NO: 1170653 - DNA, 25 bp, Homo sapien
taaggatgggaactttattagagca

SEQ ID NO: 1170654 - DNA, 25 bp, Homo sapien
caaaccactgtcgaaatgaggttgc

SEQ ID NO: 1170655 - DNA, 25 bp, Homo sapien
tcgaaatgaggttgctaagagtcac

SEQ ID NO: 1170656 - DNA, 25 bp, Homo sapien
gcacaaaattggtctcacagaagca

SEQ ID NO: 1170657 - DNA, 25 bp, Homo sapien
tgactactgattcccaagtgccaag

SEQ ID NO: 1170658 - DNA, 25 bp, Homo sapien
tgccaagaaatgtacccagcacatg

SEQ ID NO: 1170659 - DNA, 25 bp, Homo sapien
aactctcaaaggcaagggtttcgct

SEQ ID NO: 1170660 - DNA, 25 bp, Homo sapien
ttagtccatcttcagaattcccatc

SEQ ID NO: 1170661 - DNA, 25 bp, Homo sapien
tcccatctgtatttctgaagtgtga

SEQ ID NO: 1170662 - DNA, 25 bp, Homo sapien
cccatctgtatttctgaagtgtgat

SEQ ID NO: 1170663 - DNA, 25 bp, Homo sapien
gtccatcttcagaattcccatctgt

SEQ ID NO: 1170664 - DNA, 25 bp, Homo sapien
gcagggacctggcttacttaccaag

SEQ ID NO: 1170665 - DNA, 25 bp, Homo sapien
catcttaccacattgcgggccagga

SEQ ID NO: 1170666 - DNA, 25 bp, Homo sapien
tcccaagaggttccgttctcaagga

SEQ ID NO: 1170667 - DNA, 25 bp, Homo sapien
tagttgcttaatccacccgatggcc

SEQ ID NO: 1170668 - DNA, 25 bp, Homo sapien
tcagattcgccctgatgcccagaag

SEQ ID NO: 1170669 - DNA, 25 bp, Homo sapien
gggaagtgcctgtcattatagaaac

SEQ ID NO: 1170670 - DNA, 25 bp, Homo sapien
ccaatgtgtggaccgagttctgctc

SEQ ID NO: 1170671 - DNA, 25 bp, Homo sapien
tcaactttatcccttgggctgggcc

SEQ ID NO: 1170672 - DNA, 25 bp, Homo sapien
tgatagtagtggcagactcagcagg

SEQ ID NO: 1170673 - DNA, 25 bp, Homo sapien
tgctttctgctgaggaggtttaagc

SEQ ID NO: 1170674 - DNA, 25 bp, Homo sapien
ccttctcatgctcaaaggtggagat

SEQ ID NO: 1170675 - DNA, 25 bp, Homo sapien
agcctgcagagtaaggctagggcct

SEQ ID NO: 1170676 - DNA, 25 bp, Homo sapien
ctatggcctatatgtggacttttgt

SEQ ID NO: 1170677 - DNA, 25 bp, Homo sapien
ctcctctatggcctatatgtggact

SEQ ID NO: 1170678 - DNA, 25 bp, Homo sapien
tctatggcctatatgtggacttttg

SEQ ID NO: 1170679 - DNA, 25 bp, Homo sapien
cctctatggcctatatgtggacttt

SEQ ID NO: 1170680 - DNA, 25 bp, Homo sapien
gttttccaccagtcagacctggtcc

SEQ ID NO: 1170681 - DNA, 25 bp, Homo sapien
tctaactgggaatgactctcttttt

SEQ ID NO: 1170682 - DNA, 25 bp, Homo sapien
tctcctggtctaactgggaatgact

SEQ ID NO: 1170683 - DNA, 25 bp, Homo sapien
gggctgttctcctggtctaactggg

SEQ ID NO: 1170684 - DNA, 25 bp, Homo sapien
aaggtaaaattctggtccattctgc

SEQ ID NO: 1170685 - DNA, 25 bp, Homo sapien
gccatggaggacattagcaattaac

SEQ ID NO: 1170686 - DNA, 25 bp, Homo sapien
tgagtcactggagcaggactttaag

SEQ ID NO: 1170687 - DNA, 25 bp, Homo sapien
gagctgtttgccgttcatttgacaa

SEQ ID NO: 1170688 - DNA, 25 bp, Homo sapien
tgatcgggttacagatgggcaccaa

SEQ ID NO: 1170689 - DNA, 25 bp, Homo sapien
tctcaggcaggcatgactggctacg

SEQ ID NO: 1170690 - DNA, 25 bp, Homo sapien
ccttctgatgctggactggccttgc

SEQ ID NO: 1170691 - DNA, 25 bp, Homo sapien
gctgcaagagggcaagaacgtgatc

SEQ ID NO: 1170692 - DNA, 25 bp, Homo sapien
aacgctaatatcgtgtgctgggaca

SEQ ID NO: 1170693 - DNA, 25 bp, Homo sapien
tatagaccagggaactcaagcatag

SEQ ID NO: 1170694 - DNA, 25 bp, Homo sapien
aatacaaagctctggaagcacgcct

SEQ ID NO: 1170695 - DNA, 25 bp, Homo sapien
tattgagtgcttacggaggccagct

SEQ ID NO: 1170696 - DNA, 25 bp, Homo sapien
gacagtcaattgtatgaagctgggg

SEQ ID NO: 1170697 - DNA, 25 bp, Homo sapien
acagtcaattgtatgaagctggggg

SEQ ID NO: 1170698 - DNA, 25 bp, Homo sapien
tgacagtcaattgtatgaagctggg

SEQ ID NO: 1170699 - DNA, 25 bp, Homo sapien
ctgacagtcaattgtatgaagctgg

SEQ ID NO: 1170700 - DNA, 25 bp, Homo sapien
acgagtgccgcgtgttcttcctgga

SEQ ID NO: 1170701 - DNA, 25 bp, Homo sapien
gcacatccctgaagacgattttgct

SEQ ID NO: 1170702 - DNA, 25 bp, Homo sapien
tctccagattgagggtctccgggtg

SEQ ID NO: 1170703 - DNA, 25 bp, Homo sapien
ttttgctaacggctcctgggtgcat

SEQ ID NO: 1170704 - DNA, 25 bp, Homo sapien
tggatgtgtggacgtgaacttgccc

SEQ ID NO: 1170705 - DNA, 25 bp, Homo sapien
tgccttccgagagcttaagagagca

SEQ ID NO: 1170706 - DNA, 25 bp, Homo sapien
gcttcatagtgcaatgtctgggcgc

SEQ ID NO: 1170707 - DNA, 25 bp, Homo sapien
tcacacgccgctgcatatgggaaga

SEQ ID NO: 1170708 - DNA, 25 bp, Homo sapien
tgttacatgagccaagccctcactg

SEQ ID NO: 1170709 - DNA, 25 bp, Homo sapien
agcttcctcgggtgttacatgagcc

SEQ ID NO: 1170710 - DNA, 25 bp, Homo sapien
ggagagcagcttcctcgggtgttac

SEQ ID NO: 1170711 - DNA, 25 bp, Homo sapien
atctggtggttctccggagagcagc

SEQ ID NO: 1170712 - DNA, 25 bp, Homo sapien
aagaaggacggcgtaccagtagcct

SEQ ID NO: 1170713 - DNA, 25 bp, Homo sapien
gcctttccacgcttggctgtgcaga

SEQ ID NO: 1170714 - DNA, 25 bp, Homo sapien
cgcttggctgtgcagaggtccacga

SEQ ID NO: 1170715 - DNA, 25 bp, Homo sapien
gggattggcggtctccagggcgacg

SEQ ID NO: 1170716 - DNA, 25 bp, Homo sapien
ggctgtgcacagcaagagtcctggc

SEQ ID NO: 1170717 - DNA, 25 bp, Homo sapien
tagctgcagcaccttcgggatctac

SEQ ID NO: 1170718 - DNA, 25 bp, Homo sapien
caagaagtgcagttaaccgacaggc

SEQ ID NO: 1170719 - DNA, 25 bp, Homo sapien
catactcactgtagcagcctcggct

SEQ ID NO: 1170720 - DNA, 25 bp, Homo sapien
taaaaccggtaatgggctcccatga

SEQ ID NO: 1170721 - DNA, 25 bp, Homo sapien
gccaggagtatggtgccatgttgta

SEQ ID NO: 1170722 - DNA, 25 bp, Homo sapien
tgtcatgggtagctaagggccaccc

SEQ ID NO: 1170723 - DNA, 25 bp, Homo sapien
tgccatgttgtagatcctaggatct

SEQ ID NO: 1170724 - DNA, 25 bp, Homo sapien
gagaaagttggagcaaaggtttggc

SEQ ID NO: 1170725 - DNA, 25 bp, Homo sapien
aggagaaagttggagcaaaggtttg

SEQ ID NO: 1170726 - DNA, 25 bp, Homo sapien
ggctctgccgtgtgggtccccagct

SEQ ID NO: 1170727 - DNA, 25 bp, Homo sapien
ctccagtaccatggctctgccgtgt

SEQ ID NO: 1170728 - DNA, 25 bp, Homo sapien
cagtaccatggctctgccgtgtggg

SEQ ID NO: 1170729 - DNA, 25 bp, Homo sapien
gttaatggctcctccagtaccatgg

SEQ ID NO: 1170730 - DNA, 25 bp, Homo sapien
tccatccaccttcatggttcaattg

SEQ ID NO: 1170731 - DNA, 25 bp, Homo sapien
ccaccttcatggttcaattgaataa

SEQ ID NO: 1170732 - DNA, 25 bp, Homo sapien
tggttcaattgaataatcacctttt

SEQ ID NO: 1170733 - DNA, 25 bp, Homo sapien
ttcatggttcaattgaataatcacc

SEQ ID NO: 1170734 - DNA, 25 bp, Homo sapien
tcatagaagtacacaccctggcagt

SEQ ID NO: 1170735 - DNA, 25 bp, Homo sapien
ggtgtgggcccattgcaaaaggaga

SEQ ID NO: 1170736 - DNA, 25 bp, Homo sapien
agtatccaggcaaccttacagaagg

SEQ ID NO: 1170737 - DNA, 25 bp, Homo sapien
cctggcagtgcctattcaagttctg

SEQ ID NO: 1170738 - DNA, 25 bp, Homo sapien
tgtacacatggcttcacatgttgct

SEQ ID NO: 1170739 - DNA, 25 bp, Homo sapien
tcttgggctcattccatacaggtat

SEQ ID NO: 1170740 - DNA, 25 bp, Homo sapien
catgagttggttacccagtcttccc

SEQ ID NO: 1170741 - DNA, 25 bp, Homo sapien
tacaaatggaggtgcactgtacaca

SEQ ID NO: 1170742 - DNA, 25 bp, Homo sapien
aagaaagagaggtttattgaaagct

SEQ ID NO: 1170743 - DNA, 25 bp, Homo sapien
caagaaagagaggtttattgaaagc

SEQ ID NO: 1170744 - DNA, 25 bp, Homo sapien
caggtaacttcaagaaagagaggtt

SEQ ID NO: 1170745 - DNA, 25 bp, Homo sapien
tctcaggtaacttcaagaaagagag

SEQ ID NO: 1170746 - DNA, 25 bp, Homo sapien
tactgagaaacccagttccttagaa

SEQ ID NO: 1170747 - DNA, 25 bp, Homo sapien
tcttcagttgcagggaatggatcca

SEQ ID NO: 1170748 - DNA, 25 bp, Homo sapien
atcttcagttgcagggaatggatcc

SEQ ID NO: 1170749 - DNA, 25 bp, Homo sapien
tgagaaacccagttccttagaatct

SEQ ID NO: 1170750 - DNA, 25 bp, Homo sapien
caggctgtggtgagattaggaaatc

SEQ ID NO: 1170751 - DNA, 25 bp, Homo sapien
caaggaatctgaatagttaggacta

SEQ ID NO: 1170752 - DNA, 25 bp, Homo sapien
gaaatcttcccggtcatgttgttca

SEQ ID NO: 1170753 - DNA, 25 bp, Homo sapien
gggctctggattcttgatactgtct

SEQ ID NO: 1170754 - DNA, 25 bp, Homo sapien
gaaatgtctgtctgaggggacagct

SEQ ID NO: 1170755 - DNA, 25 bp, Homo sapien
ggaaatgtctgtctgaggggacagc

SEQ ID NO: 1170756 - DNA, 25 bp, Homo sapien
tctggagtcctgtctaaagccacct

SEQ ID NO: 1170757 - DNA, 25 bp, Homo sapien
tcagatctggagtcctgtctaaagc

SEQ ID NO: 1170758 - DNA, 25 bp, Homo sapien
gatctggagtcctgtctaaagccac

SEQ ID NO: 1170759 - DNA, 25 bp, Homo sapien
aaagtcaaggtctcctttatgaagt

SEQ ID NO: 1170760 - DNA, 25 bp, Homo sapien
gatgtctaccatgctggactttgga

SEQ ID NO: 1170761 - DNA, 25 bp, Homo sapien
cagctggactgcatagacttgaggt

SEQ ID NO: 1170762 - DNA, 25 bp, Homo sapien
gcacaccttggtaccttcagtcaag

SEQ ID NO: 1170763 - DNA, 25 bp, Homo sapien
ggagaatccatccttcctgcaagag

SEQ ID NO: 1170764 - DNA, 25 bp, Homo sapien
ctaatttagtgcctcataaagaata

SEQ ID NO: 1170765 - DNA, 25 bp, Homo sapien
ttagtgcctcataaagaataaggat

SEQ ID NO: 1170766 - DNA, 25 bp, Homo sapien
aatttagtgcctcataaagaataag

SEQ ID NO: 1170767 - DNA, 25 bp, Homo sapien
aaagctaatttagtgcctcataaag

SEQ ID NO: 1170768 - DNA, 25 bp, Homo sapien
taatcagtgattgtgactccagtcc

SEQ ID NO: 1170769 - DNA, 25 bp, Homo sapien
agctgaagatctgcaaggagacctt

SEQ ID NO: 1170770 - DNA, 25 bp, Homo sapien
agactagccagaaccactgaccagg

SEQ ID NO: 1170771 - DNA, 25 bp, Homo sapien
gccttgccacgaggattaattgctc

SEQ ID NO: 1170772 - DNA, 25 bp, Homo sapien
tcttttgttcttcttccgccctggc

SEQ ID NO: 1170773 - DNA, 25 bp, Homo sapien
taataaaacatggacaggttccagg

SEQ ID NO: 1170774 - DNA, 25 bp, Homo sapien
gtattgaatcaagcaacactccaag

SEQ ID NO: 1170775 - DNA, 25 bp, Homo sapien
tctttaggaagccaatagcatagcg

SEQ ID NO: 1170776 - DNA, 25 bp, Homo sapien
tagcatagcgtcttctgtctccaac

SEQ ID NO: 1170777 - DNA, 25 bp, Homo sapien
ctttgttttgtactcagtatctgaa

SEQ ID NO: 1170778 - DNA, 25 bp, Homo sapien
gtgcagctctaagacatccaagggt

SEQ ID NO: 1170779 - DNA, 25 bp, Homo sapien
cacacctgtgtcgaatggtcacatg

SEQ ID NO: 1170780 - DNA, 25 bp, Homo sapien
gcatacctcaattcggaaaatccac

SEQ ID NO: 1170781 - DNA, 25 bp, Homo sapien
tcatggagtgtacgtacaggtgccc

SEQ ID NO: 1170782 - DNA, 25 bp, Homo sapien
gatagaagttcaagcaccatggcaa

SEQ ID NO: 1170783 - DNA, 25 bp, Homo sapien
cagctataaatcctgtgcacggtca

SEQ ID NO: 1170784 - DNA, 25 bp, Homo sapien
tgcacggtcaccagacagagttaaa

SEQ ID NO: 1170785 - DNA, 25 bp, Homo sapien
ctctcaagaataatggcagtggcca

SEQ ID NO: 1170786 - DNA, 25 bp, Homo sapien
gcatcttcacgcctacaaagtggag

SEQ ID NO: 1170787 - DNA, 25 bp, Homo sapien
gaaatgcacatcacgcagcctagag

SEQ ID NO: 1170788 - DNA, 25 bp, Homo sapien
gagtaagattctggagcccttgaag

SEQ ID NO: 1170789 - DNA, 25 bp, Homo sapien
gatctctgtagagtgggtgctgcct

SEQ ID NO: 1170790 - DNA, 25 bp, Homo sapien
ggagaaaagtccttagccactgagt

SEQ ID NO: 1170791 - DNA, 25 bp, Homo sapien
gaagtcagggttatcaggacctcca

SEQ ID NO: 1170792 - DNA, 25 bp, Homo sapien
cctattgccaggagtagccagctga

SEQ ID NO: 1170793 - DNA, 25 bp, Homo sapien
tagggattggaccagaccagttcag

SEQ ID NO: 1170794 - DNA, 25 bp, Homo sapien
tatatttgctagttagactataggg

SEQ ID NO: 1170795 - DNA, 25 bp, Homo sapien
ttcagagatgattcatgttgcttgg

SEQ ID NO: 1170796 - DNA, 25 bp, Homo sapien
ctagttagactatagggattggacc

SEQ ID NO: 1170797 - DNA, 25 bp, Homo sapien
tgcttgcagtaaaggcctctgtcat

SEQ ID NO: 1170798 - DNA, 25 bp, Homo sapien
cttgggtcaggagcctcattgttgt

SEQ ID NO: 1170799 - DNA, 25 bp, Homo sapien
tgtggcatgtggttactgtgcttgc

SEQ ID NO: 1170800 - DNA, 25 bp, Homo sapien
caggagcctcattgttgtggcatgt

SEQ ID NO: 1170801 - DNA, 25 bp, Homo sapien
tatgtttcaggctaagtagtagtgc

SEQ ID NO: 1170802 - DNA, 25 bp, Homo sapien
gctaagtagtagtgcgggtcgactt

SEQ ID NO: 1170803 - DNA, 25 bp, Homo sapien
ctctgagacttccaagcaggtatct

SEQ ID NO: 1170804 - DNA, 25 bp, Homo sapien
ctagggagagctatgtttcaggcta

SEQ ID NO: 1170805 - DNA, 25 bp, Homo sapien
ttgtgcaattgtccagaaagtccct

SEQ ID NO: 1170806 - DNA, 25 bp, Homo sapien
tgtgcaattgtccagaaagtccctg

SEQ ID NO: 1170807 - DNA, 25 bp, Homo sapien
cttgtgcaattgtccagaaagtccc

SEQ ID NO: 1170808 - DNA, 25 bp, Homo sapien
agtggagtgtttgtcctcttctttt

SEQ ID NO: 1170809 - DNA, 25 bp, Homo sapien
ccaaggagtggagtgtttgtcctct

SEQ ID NO: 1170810 - DNA, 25 bp, Homo sapien
caccaaggagtggagtgtttgtcct

SEQ ID NO: 1170811 - DNA, 25 bp, Homo sapien
ggagtggagtgtttgtcctcttctt

SEQ ID NO: 1170812 - DNA, 25 bp, Homo sapien
ggggcaggcagcagtacccctccag

SEQ ID NO: 1170813 - DNA, 25 bp, Homo sapien
cggggcaggcagcagtacccctcca

SEQ ID NO: 1170814 - DNA, 25 bp, Homo sapien
ggtgcggcctggaggtcccgatcaa

SEQ ID NO: 1170815 - DNA, 25 bp, Homo sapien
ctgcactgccctgctgacggtcagg

SEQ ID NO: 1170816 - DNA, 25 bp, Homo sapien
cctggaggtcccgatcaaggttgag

SEQ ID NO: 1170817 - DNA, 25 bp, Homo sapien
ccctgctgacggtcaggtgcggcct

SEQ ID NO: 1170818 - DNA, 25 bp, Homo sapien
aactctatagtagcccgatggcacc

SEQ ID NO: 1170819 - DNA, 25 bp, Homo sapien
cctgggtgacatttgctgaagtcga

SEQ ID NO: 1170820 - DNA, 25 bp, Homo sapien
catttgctgaagtcgatcctgtggt

SEQ ID NO: 1170821 - DNA, 25 bp, Homo sapien
gatgcatgccgccagcattgccacg

SEQ ID NO: 1170822 - DNA, 25 bp, Homo sapien
gccaccaggagaaagctccccccac

SEQ ID NO: 1170823 - DNA, 25 bp, Homo sapien
accaggagaaagctccccccactga

SEQ ID NO: 1170824 - DNA, 25 bp, Homo sapien
cctgttatgtgacttcaagccacca

SEQ ID NO: 1170825 - DNA, 25 bp, Homo sapien
tgttatgtgacttcaagccaccagg

SEQ ID NO: 1170826 - DNA, 25 bp, Homo sapien
gacaggctcctttgcacagtgtgaa

SEQ ID NO: 1170827 - DNA, 25 bp, Homo sapien
cattggtaagtactgggggctttct

SEQ ID NO: 1170828 - DNA, 25 bp, Homo sapien
gtgattgacaggctcctttgcacag

SEQ ID NO: 1170829 - DNA, 25 bp, Homo sapien
gattgacaggctcctttgcacagtg

SEQ ID NO: 1170830 - DNA, 25 bp, Homo sapien
tactgacttctcaccatctggactc

SEQ ID NO: 1170831 - DNA, 25 bp, Homo sapien
tcagttgttttctgcattaccaccc

SEQ ID NO: 1170832 - DNA, 25 bp, Homo sapien
cacccagtgctttgttccttcctgg

SEQ ID NO: 1170833 - DNA, 25 bp, Homo sapien
gacttgtggctgaatttactgttac

SEQ ID NO: 1170834 - DNA, 25 bp, Homo sapien
cccagtggtattagactgctatttg

SEQ ID NO: 1170835 - DNA, 25 bp, Homo sapien
tttatagcacttagtcccagtggta

SEQ ID NO: 1170836 - DNA, 25 bp, Homo sapien
taagtcaaccaagtgttatctatgt

SEQ ID NO: 1170837 - DNA, 25 bp, Homo sapien
gcctttaatgtttgtggtcctacac

SEQ ID NO: 1170838 - DNA, 25 bp, Homo sapien
tgaaagttcccatgttccaacagaa

SEQ ID NO: 1170839 - DNA, 25 bp, Homo sapien
gacacaataattgaggtccaccttc

SEQ ID NO: 1170840 - DNA, 25 bp, Homo sapien
tagagacatcaggtttaagccagta

SEQ ID NO: 1170841 - DNA, 25 bp, Homo sapien
taggactcgtttatttgggacatgg

SEQ ID NO: 1170842 - DNA, 25 bp, Homo sapien
ggcggcgggctgtcacttacaaaga

SEQ ID NO: 1170843 - DNA, 25 bp, Homo sapien
cctatggcagtatccagccgcggta

SEQ ID NO: 1170844 - DNA, 25 bp, Homo sapien
tgtcgcacggtcagatcatgggctc

SEQ ID NO: 1170845 - DNA, 25 bp, Homo sapien
taaagaaaagactcgtcgcgtgtgc

SEQ ID NO: 1170846 - DNA, 25 bp, Homo sapien
gcttaggctcgcaaacaagaagtgg

SEQ ID NO: 1170847 - DNA, 25 bp, Homo sapien
cagaagacgggcgaaacaactgatg

SEQ ID NO: 1170848 - DNA, 25 bp, Homo sapien
gctgagggacctagtgaaatcaatg

SEQ ID NO: 1170849 - DNA, 25 bp, Homo sapien
gagatttcggtaggcacaggtgtaa

SEQ ID NO: 1170850 - DNA, 25 bp, Homo sapien
tataccttcctatccattgccaagt

SEQ ID NO: 1170851 - DNA, 25 bp, Homo sapien
tgtagggacaagatgtactgctgtg

SEQ ID NO: 1170852 - DNA, 25 bp, Homo sapien
actgtcctattaatgcgatctggca

SEQ ID NO: 1170853 - DNA, 25 bp, Homo sapien
gccaagttaacctccatctggttta

SEQ ID NO: 1170854 - DNA, 25 bp, Homo sapien
agatttgaagttttccagggacaag

SEQ ID NO: 1170855 - DNA, 25 bp, Homo sapien
ctggttgggcatatggtcaggccca

SEQ ID NO: 1170856 - DNA, 25 bp, Homo sapien
tgggcatatggtcaggcccaaaaga

SEQ ID NO: 1170857 - DNA, 25 bp, Homo sapien
tggtcaggcccaaaagatttgaagt

SEQ ID NO: 1170858 - DNA, 25 bp, Homo sapien
caaacttcagagttgcagagcttcc

SEQ ID NO: 1170859 - DNA, 25 bp, Homo sapien
tcttcaaacttcagagttgcagagc

SEQ ID NO: 1170860 - DNA, 25 bp, Homo sapien
gaatgacatccaggtctggttgaac

SEQ ID NO: 1170861 - DNA, 25 bp, Homo sapien
cagtcttgcatgaacggaagttcca

SEQ ID NO: 1170862 - DNA, 25 bp, Homo sapien
cctgcagctggccatgaaggaatcc

SEQ ID NO: 1170863 - DNA, 25 bp, Homo sapien
ctggccacaaagcaggagggtgttg

SEQ ID NO: 1170864 - DNA, 25 bp, Homo sapien
tggccatgaaggaatccacaggggc

SEQ ID NO: 1170865 - DNA, 25 bp, Homo sapien
gggctggccacaaagcaggagggtg

SEQ ID NO: 1170866 - DNA, 25 bp, Homo sapien
gtttctttcttgcaggggacagaag

SEQ ID NO: 1170867 - DNA, 25 bp, Homo sapien
ctttcttgcaggggacagaaggcac

SEQ ID NO: 1170868 - DNA, 25 bp, Homo sapien
ttcttgcaggggacagaaggcaccg

SEQ ID NO: 1170869 - DNA, 25 bp, Homo sapien
ttctttcttgcaggggacagaaggc

SEQ ID NO: 1170870 - DNA, 25 bp, Homo sapien
gggtccccaagatgccatcctgtgg

SEQ ID NO: 1170871 - DNA, 25 bp, Homo sapien
tctccagccggcgaaacagggggtc

SEQ ID NO: 1170872 - DNA, 25 bp, Homo sapien
ccatcctgtgggcaggtctctacag

SEQ ID NO: 1170873 - DNA, 25 bp, Homo sapien
ctgtgggcaggtctctacagaacat

SEQ ID NO: 1170874 - DNA, 25 bp, Homo sapien
gagattttccctagtgtccttcgga

SEQ ID NO: 1170875 - DNA, 25 bp, Homo sapien
taacctagctcggatcctcttgaga

SEQ ID NO: 1170876 - DNA, 25 bp, Homo sapien
ttagcactgatactaattcttctgg

SEQ ID NO: 1170877 - DNA, 25 bp, Homo sapien
tcttagcggtaacaacaggaataac

SEQ ID NO: 1170878 - DNA, 25 bp, Homo sapien
gctattctggtccagagcatcttct

SEQ ID NO: 1170879 - DNA, 25 bp, Homo sapien
gagcatcttctagcagttgggagca

SEQ ID NO: 1170880 - DNA, 25 bp, Homo sapien
agcatcttctagcagttgggagcag

SEQ ID NO: 1170881 - DNA, 25 bp, Homo sapien
ccagagcatcttctagcagttggga

SEQ ID NO: 1170882 - DNA, 25 bp, Homo sapien
tcgccccagtgtccggagggcccag

SEQ ID NO: 1170883 - DNA, 25 bp, Homo sapien
ccccagtgtccggagggcccagaga

SEQ ID NO: 1170884 - DNA, 25 bp, Homo sapien
aatgtcctgcccattgtcaaagccc

SEQ ID NO: 1170885 - DNA, 25 bp, Homo sapien
agggagctccattgaggcggctccg

SEQ ID NO: 1170886 - DNA, 25 bp, Homo sapien
atttggaaagtcctttctggcgagt

SEQ ID NO: 1170887 - DNA, 25 bp, Homo sapien
ttggaggccctagtctagtctcctc

SEQ ID NO: 1170888 - DNA, 25 bp, Homo sapien
ttggaaagtcctttctggcgagtgg

SEQ ID NO: 1170889 - DNA, 25 bp, Homo sapien
tggcgagtggcaggtttggaggccc

SEQ ID NO: 1170890 - DNA, 25 bp, Homo sapien
acagtgggaagccttgagggcagac

SEQ ID NO: 1170891 - DNA, 25 bp, Homo sapien
cttctccacgtgtctaaacctcccg

SEQ ID NO: 1170892 - DNA, 25 bp, Homo sapien
tcccagttccaactggtagagccag

SEQ ID NO: 1170893 - DNA, 25 bp, Homo sapien
ctgatcccagttccaactggtagag

SEQ ID NO: 1170894 - DNA, 25 bp, Homo sapien
agagccaggcacactccttctccac

SEQ ID NO: 1170895 - DNA, 25 bp, Homo sapien
ctcccaagtggggtataggtctgac

SEQ ID NO: 1170896 - DNA, 25 bp, Homo sapien
caggggcttgcaaggtggcagacat

SEQ ID NO: 1170897 - DNA, 25 bp, Homo sapien
tgagcaggggcttgcaaggtggcag

SEQ ID NO: 1170898 - DNA, 25 bp, Homo sapien
agcaggggcttgcaaggtggcagac

SEQ ID NO: 1170899 - DNA, 25 bp, Homo sapien
ggggcttgcaaggtggcagacatgt

SEQ ID NO: 1170900 - DNA, 25 bp, Homo sapien
gcagtctgactccagcctgaggccg

SEQ ID NO: 1170901 - DNA, 25 bp, Homo sapien
aggccgggcttgtcagcagcatcgt

SEQ ID NO: 1170902 - DNA, 25 bp, Homo sapien
agtctgactccagcctgaggccggg

SEQ ID NO: 1170903 - DNA, 25 bp, Homo sapien
tgactccagcctgaggccgggcttg

SEQ ID NO: 1170904 - DNA, 25 bp, Homo sapien
gtatgtaggccccagagagcctttc

SEQ ID NO: 1170905 - DNA, 25 bp, Homo sapien
tgcaggtatgtaggccccagagagc

SEQ ID NO: 1170906 - DNA, 25 bp, Homo sapien
tatgtaggccccagagagcctttct

SEQ ID NO: 1170907 - DNA, 25 bp, Homo sapien
acaaatgcaggtatgtaggccccag

SEQ ID NO: 1170908 - DNA, 25 bp, Homo sapien
gcttggttggcttgagctacaagga

SEQ ID NO: 1170909 - DNA, 25 bp, Homo sapien
ctgcatcactgtgcataagctcatt

SEQ ID NO: 1170910 - DNA, 25 bp, Homo sapien
aagctcatttacagctccagcttgg

SEQ ID NO: 1170911 - DNA, 25 bp, Homo sapien
tggcttgagctacaaggaagtgact

SEQ ID NO: 1170912 - DNA, 25 bp, Homo sapien
tccgtgtgccccattgaaccacatt

SEQ ID NO: 1170913 - DNA, 25 bp, Homo sapien
tgtgccccattgaaccacattctag

SEQ ID NO: 1170914 - DNA, 25 bp, Homo sapien
tgccccattgaaccacattctagct

SEQ ID NO: 1170915 - DNA, 25 bp, Homo sapien
cgtgtgccccattgaaccacattct

SEQ ID NO: 1170916 - DNA, 25 bp, Homo sapien
ggcacctgtgttagggaacagatga

SEQ ID NO: 1170917 - DNA, 25 bp, Homo sapien
ctctcatcagaactaacccagggca

SEQ ID NO: 1170918 - DNA, 25 bp, Homo sapien
catcagaactaacccagggcacctg

SEQ ID NO: 1170919 - DNA, 25 bp, Homo sapien
cagggcacctgtgttagggaacaga

SEQ ID NO: 1170920 - DNA, 25 bp, Homo sapien
ccatgatcgctagttcccacatggg

SEQ ID NO: 1170921 - DNA, 25 bp, Homo sapien
cagctgtttcgcactgggatttcca

SEQ ID NO: 1170922 - DNA, 25 bp, Homo sapien
tcacatagtgacacccatgatcgct

SEQ ID NO: 1170923 - DNA, 25 bp, Homo sapien
cattttaagacatccctcctcatgg

SEQ ID NO: 1170924 - DNA, 25 bp, Homo sapien
atttggtgttgtcagccttagccta

SEQ ID NO: 1170925 - DNA, 25 bp, Homo sapien
gccttagcctagtgtgcctcagtaa

SEQ ID NO: 1170926 - DNA, 25 bp, Homo sapien
gcctagtgtgcctcagtaatgtaat

SEQ ID NO: 1170927 - DNA, 25 bp, Homo sapien
ttgtcagccttagcctagtgtgcct

SEQ ID NO: 1170928 - DNA, 25 bp, Homo sapien
ggatatgaacgagacacatgcctca

SEQ ID NO: 1170929 - DNA, 25 bp, Homo sapien
tccccatggcaactctataagacag

SEQ ID NO: 1170930 - DNA, 25 bp, Homo sapien
ggagctcattaacccaggagggata

SEQ ID NO: 1170931 - DNA, 25 bp, Homo sapien
gtattcactcggcaaacttctgcgg

SEQ ID NO: 1170932 - DNA, 25 bp, Homo sapien
catcatggtctagttttggagaggc

SEQ ID NO: 1170933 - DNA, 25 bp, Homo sapien
ctgaccatcatggtctagttttgga

SEQ ID NO: 1170934 - DNA, 25 bp, Homo sapien
gaccatcatggtctagttttggaga

SEQ ID NO: 1170935 - DNA, 25 bp, Homo sapien
tcatggtctagttttggagaggcca

SEQ ID NO: 1170936 - DNA, 25 bp, Homo sapien
tttctcctaaatgtagcggcagctc

SEQ ID NO: 1170937 - DNA, 25 bp, Homo sapien
gagagtagccggcagcagagacccc

SEQ ID NO: 1170938 - DNA, 25 bp, Homo sapien
ccgaagggtgggagccgcagacacc

SEQ ID NO: 1170939 - DNA, 25 bp, Homo sapien
cgcagacaccgctgtttctcctaaa

SEQ ID NO: 1170940 - DNA, 25 bp, Homo sapien
tcctctaggagatatggaccataca

SEQ ID NO: 1170941 - DNA, 25 bp, Homo sapien
agatatggaccatacagggaaaggt

SEQ ID NO: 1170942 - DNA, 25 bp, Homo sapien
agcacccagggtcctctaggagata

SEQ ID NO: 1170943 - DNA, 25 bp, Homo sapien
ccagggtcctctaggagatatggac

SEQ ID NO: 1170944 - DNA, 25 bp, Homo sapien
gcgcgtcgctgggcgcctaggcggc

SEQ ID NO: 1170945 - DNA, 25 bp, Homo sapien
ggcggccgcgtcagggcgagcgctg

SEQ ID NO: 1170946 - DNA, 25 bp, Homo sapien
ggcgcctggagtgcggcgggggccc

SEQ ID NO: 1170947 - DNA, 25 bp, Homo sapien
cgctgggcgcctaggcggcgtcggg

SEQ ID NO: 1170948 - DNA, 25 bp, Homo sapien
ctgcccgggcgagaaggccgcgttc

SEQ ID NO: 1170949 - DNA, 25 bp, Homo sapien
gcccgggcgagaaggccgcgttctc

SEQ ID NO: 1170950 - DNA, 25 bp, Homo sapien
tcctgcccgggcgagaaggccgcgt

SEQ ID NO: 1170951 - DNA, 25 bp, Homo sapien
ccgggcgagaaggccgcgttctcct

SEQ ID NO: 1170952 - DNA, 25 bp, Homo sapien
tatgtgtgaggagcgcaagtcgccc

SEQ ID NO: 1170953 - DNA, 25 bp, Homo sapien
gagatcttgacgaacatgcagccca

SEQ ID NO: 1170954 - DNA, 25 bp, Homo sapien
tgccctcgaggataacgacgatctc

SEQ ID NO: 1170955 - DNA, 25 bp, Homo sapien
gaagccgttgaggttgttgacgcac

SEQ ID NO: 1170956 - DNA, 25 bp, Homo sapien
ccgctcccctccccaggcctgctcg

SEQ ID NO: 1170957 - DNA, 25 bp, Homo sapien
ctcccctccccaggcctgctcgcac

SEQ ID NO: 1170958 - DNA, 25 bp, Homo sapien
tctgccaaccccgctcccctcccca

SEQ ID NO: 1170959 - DNA, 25 bp, Homo sapien
ctgccaaccccgctcccctccccag

SEQ ID NO: 1170960 - DNA, 25 bp, Homo sapien
cacgccagtgccatttcggagaatt

SEQ ID NO: 1170961 - DNA, 25 bp, Homo sapien
ttctgcggcgttgctcggttccact

SEQ ID NO: 1170962 - DNA, 25 bp, Homo sapien
gaattcctccaagctttctcttggc

SEQ ID NO: 1170963 - DNA, 25 bp, Homo sapien
ttccaagtgacacattcctctgggc

SEQ ID NO: 1170964 - DNA, 25 bp, Homo sapien
tctaaaaagtgagcacaataacaag

SEQ ID NO: 1170965 - DNA, 25 bp, Homo sapien
gttcttgttaggattaaatcgactc

SEQ ID NO: 1170966 - DNA, 25 bp, Homo sapien
cacttattggcttaggaaagtggac

SEQ ID NO: 1170967 - DNA, 25 bp, Homo sapien
cattggagcaatctcatctctaaaa

SEQ ID NO: 1170968 - DNA, 25 bp, Homo sapien
ctgggttggacttattgacatcaca

SEQ ID NO: 1170969 - DNA, 25 bp, Homo sapien
gggttggacttattgacatcacaga

SEQ ID NO: 1170970 - DNA, 25 bp, Homo sapien
tggacttattgacatcacagatgag

SEQ ID NO: 1170971 - DNA, 25 bp, Homo sapien
gacttattgacatcacagatgagtt

SEQ ID NO: 1170972 - DNA, 25 bp, Homo sapien
ctcccaaagccttcactgtgtaggt

SEQ ID NO: 1170973 - DNA, 25 bp, Homo sapien
gttggaatagaaagtatccagtggg

SEQ ID NO: 1170974 - DNA, 25 bp, Homo sapien
agaaaagagggccgggcagcaactt

SEQ ID NO: 1170975 - DNA, 25 bp, Homo sapien
aactcggaaagcctggcgctgagac

SEQ ID NO: 1170976 - DNA, 25 bp, Homo sapien
agacattggtattcctcggtgaagt

SEQ ID NO: 1170977 - DNA, 25 bp, Homo sapien
atctcggaacaaggggaaacagaag

SEQ ID NO: 1170978 - DNA, 25 bp, Homo sapien
catctcggaacaaggggaaacagaa

SEQ ID NO: 1170979 - DNA, 25 bp, Homo sapien
ccatctcggaacaaggggaaacaga

SEQ ID NO: 1170980 - DNA, 25 bp, Homo sapien
tcctttctgccacagggtcttgccc

SEQ ID NO: 1170981 - DNA, 25 bp, Homo sapien
ttgggctggtgcacccctcagggca

SEQ ID NO: 1170982 - DNA, 25 bp, Homo sapien
ttcctgttgggctggtgcacccctc

SEQ ID NO: 1170983 - DNA, 25 bp, Homo sapien
ctcagggcaggtcattctcctttct

SEQ ID NO: 1170984 - DNA, 25 bp, Homo sapien
gtctaccaggtaggagctccgagct

SEQ ID NO: 1170985 - DNA, 25 bp, Homo sapien
tcagcactgacgtgaagcggtggcc

SEQ ID NO: 1170986 - DNA, 25 bp, Homo sapien
aaaagtctcgtgaaagctggcatag

SEQ ID NO: 1170987 - DNA, 25 bp, Homo sapien
ctggcatagtccacttcgtagaagc

SEQ ID NO: 1170988 - DNA, 25 bp, Homo sapien
gccagctctcgagcactgcacgaag

SEQ ID NO: 1170989 - DNA, 25 bp, Homo sapien
agagatgggcatcaaggcgggcggc

SEQ ID NO: 1170990 - DNA, 25 bp, Homo sapien
gtagagatgggcatcaaggcgggcg

SEQ ID NO: 1170991 - DNA, 25 bp, Homo sapien
agatgggcatcaaggcgggcggcag

SEQ ID NO: 1170992 - DNA, 25 bp, Homo sapien
ttggactcactctctgggggtggca

SEQ ID NO: 1170993 - DNA, 25 bp, Homo sapien
ccaccttctcatccagccggctggg

SEQ ID NO: 1170994 - DNA, 25 bp, Homo sapien
tgctccttgtcagccccagcttccc

SEQ ID NO: 1170995 - DNA, 25 bp, Homo sapien
gggtggcaggcagccattctgctcc

SEQ ID NO: 1170996 - DNA, 25 bp, Homo sapien
ggtccatctatgtatctgtcagctg

SEQ ID NO: 1170997 - DNA, 25 bp, Homo sapien
cagcttggcctaccgtgtcattaga

SEQ ID NO: 1170998 - DNA, 25 bp, Homo sapien
tccatactggtttctagacttgagg

SEQ ID NO: 1170999 - DNA, 25 bp, Homo sapien
ttccaactttagcacatttccaggg

SEQ ID NO: 1171000 - DNA, 25 bp, Homo sapien
ttccctgaacttgcggactaaggtc

SEQ ID NO: 1171001 - DNA, 25 bp, Homo sapien
cctcgttcagtcaccacaggtagat

SEQ ID NO: 1171002 - DNA, 25 bp, Homo sapien
tccacgggactgcacaggttgtcag

SEQ ID NO: 1171003 - DNA, 25 bp, Homo sapien
actgtaagaaaatagctatccctgg

SEQ ID NO: 1171004 - DNA, 25 bp, Homo sapien
gctatgcccataggaccctggctgt

SEQ ID NO: 1171005 - DNA, 25 bp, Homo sapien
ggctgtgccccataggaccctatct

SEQ ID NO: 1171006 - DNA, 25 bp, Homo sapien
ggaatgcatggttttggtccccacc

SEQ ID NO: 1171007 - DNA, 25 bp, Homo sapien
gaagactggagtgctttccccaggg

SEQ ID NO: 1171008 - DNA, 25 bp, Homo sapien
cgtgtgtgtggataccaagtagccc

SEQ ID NO: 1171009 - DNA, 25 bp, Homo sapien
ttagcaagtgtcaggagtaggacct

SEQ ID NO: 1171010 - DNA, 25 bp, Homo sapien
gcccagatatgcgatttgcccagag

SEQ ID NO: 1171011 - DNA, 25 bp, Homo sapien
tcatctttgatgacagggccccagt

SEQ ID NO: 1171012 - DNA, 25 bp, Homo sapien
tactcgctgtacctgcatataccct

SEQ ID NO: 1171013 - DNA, 25 bp, Homo sapien
gcaccagcttctcccatgttaaagg

SEQ ID NO: 1171014 - DNA, 25 bp, Homo sapien
cacaactgatactcaggctgggaca

SEQ ID NO: 1171015 - DNA, 25 bp, Homo sapien
cattgcacccacatgtactcgctgt

SEQ ID NO: 1171016 - DNA, 25 bp, Homo sapien
catcggctgagactacacagcttgg

SEQ ID NO: 1171017 - DNA, 25 bp, Homo sapien
ggatgaaggcgtgtaccactgtgcc

SEQ ID NO: 1171018 - DNA, 25 bp, Homo sapien
gcgcctgggtgcagcatgccgacta

SEQ ID NO: 1171019 - DNA, 25 bp, Homo sapien
ggcctgttacagtctacccctacat

SEQ ID NO: 1171020 - DNA, 25 bp, Homo sapien
cctggcagtgtcctttgggcgatct

SEQ ID NO: 1171021 - DNA, 25 bp, Homo sapien
tgcagacgctgtgtaagtgccactt

SEQ ID NO: 1171022 - DNA, 25 bp, Homo sapien
gagataggctatacacaggaaacag

SEQ ID NO: 1171023 - DNA, 25 bp, Homo sapien
gaatccggtcagacttggccgtgga

SEQ ID NO: 1171024 - DNA, 25 bp, Homo sapien
ggcaccactgagttacagaagaaat

SEQ ID NO: 1171025 - DNA, 25 bp, Homo sapien
gtgctgtgcccagtactgcccttgg

SEQ ID NO: 1171026 - DNA, 25 bp, Homo sapien
gtgcccagtactgcccttggcacca

SEQ ID NO: 1171027 - DNA, 25 bp, Homo sapien
caccactgagttacagaagaaataa

SEQ ID NO: 1171028 - DNA, 25 bp, Homo sapien
cctgggttgcctagcacttggtgtg

SEQ ID NO: 1171029 - DNA, 25 bp, Homo sapien
ctgggccaatcttgcatggatgcat

SEQ ID NO: 1171030 - DNA, 25 bp, Homo sapien
tccacagtggcaccaagcaaagcct

SEQ ID NO: 1171031 - DNA, 25 bp, Homo sapien
ggaattgtttttggcctgaactgga

SEQ ID NO: 1171032 - DNA, 25 bp, Homo sapien
ttattgccctgttcatgggccagtg

SEQ ID NO: 1171033 - DNA, 25 bp, Homo sapien
gcttctactggcaaccccgtgagca

SEQ ID NO: 1171034 - DNA, 25 bp, Homo sapien
tcctcaatgtggcttctactggcaa

SEQ ID NO: 1171035 - DNA, 25 bp, Homo sapien
tccagggttcctcaatgtggcttct

SEQ ID NO: 1171036 - DNA, 25 bp, Homo sapien
ggagatccaagagggtaggttgtcc

SEQ ID NO: 1171037 - DNA, 25 bp, Homo sapien
aaccatcagttggagacctgggttc

SEQ ID NO: 1171038 - DNA, 25 bp, Homo sapien
agatccaagagggtaggttgtcctg

SEQ ID NO: 1171039 - DNA, 25 bp, Homo sapien
aaggagatccaagagggtaggttgt

SEQ ID NO: 1171040 - DNA, 25 bp, Homo sapien
gcagcgggaagtttggagatggagg

SEQ ID NO: 1171041 - DNA, 25 bp, Homo sapien
ggagtcaaaggtggctcgggaggca

SEQ ID NO: 1171042 - DNA, 25 bp, Homo sapien
tgccagatgtaacctctccaaagtt

SEQ ID NO: 1171043 - DNA, 25 bp, Homo sapien
atggaggcaagagggtgtccccaaa

SEQ ID NO: 1171044 - DNA, 25 bp, Homo sapien
agcccgtctgggacagtcggagacc

SEQ ID NO: 1171045 - DNA, 25 bp, Homo sapien
accttagcgggagaggtcaccagga

SEQ ID NO: 1171046 - DNA, 25 bp, Homo sapien
cagagtggctgagggaccttagcgg

SEQ ID NO: 1171047 - DNA, 25 bp, Homo sapien
cagcccgtctgggacagtcggagac

SEQ ID NO: 1171048 - DNA, 25 bp, Homo sapien
tcttttgccagtattccacaaaagg

SEQ ID NO: 1171049 - DNA, 25 bp, Homo sapien
tttgccagtattccacaaaaggaaa

SEQ ID NO: 1171050 - DNA, 25 bp, Homo sapien
catgtaaaaggattgggccactctt

SEQ ID NO: 1171051 - DNA, 25 bp, Homo sapien
gccaggcacagcatgtaaaaggatt

SEQ ID NO: 1171052 - DNA, 25 bp, Homo sapien
cctcttagtttaaacagcccagatc

SEQ ID NO: 1171053 - DNA, 25 bp, Homo sapien
tcttagtttaaacagcccagatctg

SEQ ID NO: 1171054 - DNA, 25 bp, Homo sapien
agcctcttagtttaaacagcccaga

SEQ ID NO: 1171055 - DNA, 25 bp, Homo sapien
gcctcttagtttaaacagcccagat

SEQ ID NO: 1171056 - DNA, 25 bp, Homo sapien
tgggaaatctttccttctaagagga

SEQ ID NO: 1171057 - DNA, 25 bp, Homo sapien
gccctcttggggtgatagaatagga

SEQ ID NO: 1171058 - DNA, 25 bp, Homo sapien
ccttctaagaggaggccctcttggg

SEQ ID NO: 1171059 - DNA, 25 bp, Homo sapien
atctttccttctaagaggaggccct

SEQ ID NO: 1171060 - DNA, 25 bp, Homo sapien
gtggcggcaggtgagtactcacggc

SEQ ID NO: 1171061 - DNA, 25 bp, Homo sapien
gcggcaggtgagtactcacggccag

SEQ ID NO: 1171062 - DNA, 25 bp, Homo sapien
tggcggcaggtgagtactcacggcc

SEQ ID NO: 1171063 - DNA, 25 bp, Homo sapien
ggcggcaggtgagtactcacggcca

SEQ ID NO: 1171064 - DNA, 25 bp, Homo sapien
ctaagatgcatatgagggtactgca

SEQ ID NO: 1171065 - DNA, 25 bp, Homo sapien
gcagcatgggggacacggagtttct

SEQ ID NO: 1171066 - DNA, 25 bp, Homo sapien
ggcacaggggtgagttgagcagcat

SEQ ID NO: 1171067 - DNA, 25 bp, Homo sapien
catatgagggtactgcagggcacag

SEQ ID NO: 1171068 - DNA, 25 bp, Homo sapien
ggtccacttggtatttgcggcccag

SEQ ID NO: 1171069 - DNA, 25 bp, Homo sapien
cacttggtatttgcggcccagctca

SEQ ID NO: 1171070 - DNA, 25 bp, Homo sapien
gacaggtccacttggtatttgcggc

SEQ ID NO: 1171071 - DNA, 25 bp, Homo sapien
cttggacaggtccacttggtatttg

SEQ ID NO: 1171072 - DNA, 25 bp, Homo sapien
gagagctttgggctaggatgcaggg

SEQ ID NO: 1171073 - DNA, 25 bp, Homo sapien
gatgcaggggatccaaattctagtt

SEQ ID NO: 1171074 - DNA, 25 bp, Homo sapien
tcatctgtaaagaaggctggattac

SEQ ID NO: 1171075 - DNA, 25 bp, Homo sapien
gattacagttttaaggctcctgcca

SEQ ID NO: 1171076 - DNA, 25 bp, Homo sapien
gaacttgacccactcaggggttgtg

SEQ ID NO: 1171077 - DNA, 25 bp, Homo sapien
ggcgttgggcccatctcgagccaga

SEQ ID NO: 1171078 - DNA, 25 bp, Homo sapien
agaacgtcctgagcccgctggttgg

SEQ ID NO: 1171079 - DNA, 25 bp, Homo sapien
gatggttcatcctccatggcagcct

SEQ ID NO: 1171080 - DNA, 25 bp, Homo sapien
agctgccagcaccacacccagatat

SEQ ID NO: 1171081 - DNA, 25 bp, Homo sapien
ctgccagcaccacacccagatatag

SEQ ID NO: 1171082 - DNA, 25 bp, Homo sapien
gctgccagcaccacacccagatata

SEQ ID NO: 1171083 - DNA, 25 bp, Homo sapien
aaggaatccatgatcttggagctct

SEQ ID NO: 1171084 - DNA, 25 bp, Homo sapien
agaagcagccagtgacaatgaccac

SEQ ID NO: 1171085 - DNA, 25 bp, Homo sapien
gtagtaggagaagcagccagtgaca

SEQ ID NO: 1171086 - DNA, 25 bp, Homo sapien
ctgaggtaccatgttcttgaaggaa

SEQ ID NO: 1171087 - DNA, 25 bp, Homo sapien
cagggacgcggtctccacccttcac

SEQ ID NO: 1171088 - DNA, 25 bp, Homo sapien
cagccatgagaagagatgatccgga

SEQ ID NO: 1171089 - DNA, 25 bp, Homo sapien
acttcctctgcgttgatctgcatct

SEQ ID NO: 1171090 - DNA, 25 bp, Homo sapien
tctccctcccggatcacaagggctt

SEQ ID NO: 1171091 - DNA, 25 bp, Homo sapien
gggctccgactctcctgttaaggat

SEQ ID NO: 1171092 - DNA, 25 bp, Homo sapien
ctcctgttaaggatgagttatccac

SEQ ID NO: 1171093 - DNA, 25 bp, Homo sapien
agaaacagatattgcgggtctccag

SEQ ID NO: 1171094 - DNA, 25 bp, Homo sapien
gggtctggggctccgactctcctgt

SEQ ID NO: 1171095 - DNA, 25 bp, Homo sapien
caattgccccaccaatggcagagct

SEQ ID NO: 1171096 - DNA, 25 bp, Homo sapien
gccaggtaagtactaccagagccct

SEQ ID NO: 1171097 - DNA, 25 bp, Homo sapien
gggtggacagaacagagatctccct

SEQ ID NO: 1171098 - DNA, 25 bp, Homo sapien
gctttgaaatccactcagtcttggg

SEQ ID NO: 1171099 - DNA, 25 bp, Homo sapien
attacattgcactcggtattataag

SEQ ID NO: 1171100 - DNA, 25 bp, Homo sapien
tggaattccaacttgtcgaagaagg

SEQ ID NO: 1171101 - DNA, 25 bp, Homo sapien
taaaaattacattgcactcggtatt

SEQ ID NO: 1171102 - DNA, 25 bp, Homo sapien
tatgcgatttcatatcagggccttt

SEQ ID NO: 1171103 - DNA, 25 bp, Homo sapien
gcaatcacaatgcccctggcagtgc

SEQ ID NO: 1171104 - DNA, 25 bp, Homo sapien
ctgtggcaatcacaatgcccctggc

SEQ ID NO: 1171105 - DNA, 25 bp, Homo sapien
tggcaatcacaatgcccctggcagt

SEQ ID NO: 1171106 - DNA, 25 bp, Homo sapien
tgtggcaatcacaatgcccctggca

SEQ ID NO: 1171107 - DNA, 25 bp, Homo sapien
ggcacgttggccactatgatgccga

SEQ ID NO: 1171108 - DNA, 25 bp, Homo sapien
cattgctatgggtgtccgcccaacc

SEQ ID NO: 1171109 - DNA, 25 bp, Homo sapien
ggcgagagtagctatgcggcccatc

SEQ ID NO: 1171110 - DNA, 25 bp, Homo sapien
agcgacccctgtgatcagctggatg

SEQ ID NO: 1171111 - DNA, 25 bp, Homo sapien
agcctcatggatttggttgtcgaac

SEQ ID NO: 1171112 - DNA, 25 bp, Homo sapien
cagcctcatggatttggttgtcgaa

SEQ ID NO: 1171113 - DNA, 25 bp, Homo sapien
ctcatggatttggttgtcgaaccac

SEQ ID NO: 1171114 - DNA, 25 bp, Homo sapien
gcctcatggatttggttgtcgaacc

SEQ ID NO: 1171115 - DNA, 25 bp, Homo sapien
gttgcagagaccagcaattcgagac

SEQ ID NO: 1171116 - DNA, 25 bp, Homo sapien
taggggatcgtttgtcaaaagtggc

SEQ ID NO: 1171117 - DNA, 25 bp, Homo sapien
cggcgcggttgcagagaccagcaat

SEQ ID NO: 1171118 - DNA, 25 bp, Homo sapien
tcctgtcctgccttgaagacggcgc

SEQ ID NO: 1171119 - DNA, 25 bp, Homo sapien
gccacaggagagctcaatgcacttg

SEQ ID NO: 1171120 - DNA, 25 bp, Homo sapien
caggagagctcaatgcacttgagca

SEQ ID NO: 1171121 - DNA, 25 bp, Homo sapien
gagagctcaatgcacttgagcagag

SEQ ID NO: 1171122 - DNA, 25 bp, Homo sapien
tgagccacaggagagctcaatgcac

SEQ ID NO: 1171123 - DNA, 25 bp, Homo sapien
tacttgttggtagagttgaaaggaa

SEQ ID NO: 1171124 - DNA, 25 bp, Homo sapien
acttgttggtagagttgaaaggaat

SEQ ID NO: 1171125 - DNA, 25 bp, Homo sapien
ctcttcctctgtcctggcaacccaa

SEQ ID NO: 1171126 - DNA, 25 bp, Homo sapien
caacaggtagttacagagagggcca

SEQ ID NO: 1171127 - DNA, 25 bp, Homo sapien
cttgtcttggtagcgcggcatagag

SEQ ID NO: 1171128 - DNA, 25 bp, Homo sapien
agagggccatacttgtcttggtagc

SEQ ID NO: 1171129 - DNA, 25 bp, Homo sapien
agagacaacaggtagttacagagag

SEQ ID NO: 1171130 - DNA, 25 bp, Homo sapien
cttgtcgagcgggatctccttgccc

SEQ ID NO: 1171131 - DNA, 25 bp, Homo sapien
ggagcaccggtccagaatgcgctct

SEQ ID NO: 1171132 - DNA, 25 bp, Homo sapien
gctgtcttctcgctcgtggatagac

SEQ ID NO: 1171133 - DNA, 25 bp, Homo sapien
catcttgcatctccttgtcgagcgg

SEQ ID NO: 1171134 - DNA, 25 bp, Homo sapien
gggagggtcaatcatagacatgagc

SEQ ID NO: 1171135 - DNA, 25 bp, Homo sapien
caaagcaaagcttctccgtgggaaa

SEQ ID NO: 1171136 - DNA, 25 bp, Homo sapien
gtgtcgaatttgaagccccgaggaa

SEQ ID NO: 1171137 - DNA, 25 bp, Homo sapien
gaaactttccagatggcagattcag

SEQ ID NO: 1171138 - DNA, 25 bp, Homo sapien
gcatgggacactggcctctctgagc

SEQ ID NO: 1171139 - DNA, 25 bp, Homo sapien
tctgagcaaaagggataagggtgag

SEQ ID NO: 1171140 - DNA, 25 bp, Homo sapien
aatcagaatggaagggtacacatgc

SEQ ID NO: 1171141 - DNA, 25 bp, Homo sapien
tgagcaaaagggataagggtgagtg

SEQ ID NO: 1171142 - DNA, 25 bp, Homo sapien
ccataatgttcattgctattgttgc

SEQ ID NO: 1171143 - DNA, 25 bp, Homo sapien
tattgttgcagagtgaatggagttg

SEQ ID NO: 1171144 - DNA, 25 bp, Homo sapien
taatgttcattgctattgttgcaga

SEQ ID NO: 1171145 - DNA, 25 bp, Homo sapien
cttcaccataatgttcattgctatt

SEQ ID NO: 1171146 - DNA, 25 bp, Homo sapien
ctctgatatgatgcccacgcctttg

SEQ ID NO: 1171147 - DNA, 25 bp, Homo sapien
tccacagtctcgttaccctctgata

SEQ ID NO: 1171148 - DNA, 25 bp, Homo sapien
gctgtgatagggtgatccccggtta

SEQ ID NO: 1171149 - DNA, 25 bp, Homo sapien
gttaccctctgatatgatgcccacg

SEQ ID NO: 1171150 - DNA, 25 bp, Homo sapien
gacgttcgagcaaagacgatctctg

SEQ ID NO: 1171151 - DNA, 25 bp, Homo sapien
tgaggatctcatcgagctgctccga

SEQ ID NO: 1171152 - DNA, 25 bp, Homo sapien
tgctccgatgtcatgtccttcaggt

SEQ ID NO: 1171153 - DNA, 25 bp, Homo sapien
acgatctctgtgtggttcttgagga

SEQ ID NO: 1171154 - DNA, 25 bp, Homo sapien
aatgtcagccttcttcaatgcaggg

SEQ ID NO: 1171155 - DNA, 25 bp, Homo sapien
gcaggggagtcgttcaccccgtcac

SEQ ID NO: 1171156 - DNA, 25 bp, Homo sapien
ggatcatgtcggctgcctgcttaga

SEQ ID NO: 1171157 - DNA, 25 bp, Homo sapien
ccccgtgacgatggaggcaaagttg

SEQ ID NO: 1171158 - DNA, 25 bp, Homo sapien
tcaatgcaaaggatggtcacagtgc

SEQ ID NO: 1171159 - DNA, 25 bp, Homo sapien
gcccaggtcaatgcaaaggatggtc

SEQ ID NO: 1171160 - DNA, 25 bp, Homo sapien
caggtcaatgcaaaggatggtcaca

SEQ ID NO: 1171161 - DNA, 25 bp, Homo sapien
ggtcaatgcaaaggatggtcacagt

SEQ ID NO: 1171162 - DNA, 25 bp, Homo sapien
tgcctcataggccaaggagatggca

SEQ ID NO: 1171163 - DNA, 25 bp, Homo sapien
cataggccaaggagatggcagggac

SEQ ID NO: 1171164 - DNA, 25 bp, Homo sapien
cctcataggccaaggagatggcagg

SEQ ID NO: 1171165 - DNA, 25 bp, Homo sapien
ctgcctcataggccaaggagatggc

SEQ ID NO: 1171166 - DNA, 25 bp, Homo sapien
tctgggagtttcgtggctgccgctt

SEQ ID NO: 1171167 - DNA, 25 bp, Homo sapien
tgggagtttcgtggctgccgcttca

SEQ ID NO: 1171168 - DNA, 25 bp, Homo sapien
tccgtctgggagtttcgtggctgcc

SEQ ID NO: 1171169 - DNA, 25 bp, Homo sapien
agcttgtccgtctgggagtttcgtg

SEQ ID NO: 1171170 - DNA, 25 bp, Homo sapien
ctcccgaggcccggggcttggcgca

SEQ ID NO: 1171171 - DNA, 25 bp, Homo sapien
tcccgaggcccggggcttggcgcac

SEQ ID NO: 1171172 - DNA, 25 bp, Homo sapien
ctgtgggtagagggccaaaggcagg

SEQ ID NO: 1171173 - DNA, 25 bp, Homo sapien
agagcaggaagcagaaggggcacag

SEQ ID NO: 1171174 - DNA, 25 bp, Homo sapien
tgggtagagggccaaaggcaggggc

SEQ ID NO: 1171175 - DNA, 25 bp, Homo sapien
caggggcagggtcagagcaggaagc

SEQ ID NO: 1171176 - DNA, 25 bp, Homo sapien
gtaggtgaagaagccacccagtgcc

SEQ ID NO: 1171177 - DNA, 25 bp, Homo sapien
tgccaggatcacaaagtaggtgaag

SEQ ID NO: 1171178 - DNA, 25 bp, Homo sapien
ctgccaggatcacaaagtaggtgaa

SEQ ID NO: 1171179 - DNA, 25 bp, Homo sapien
gaagccacccagtgcctggatcatc

SEQ ID NO: 1171180 - DNA, 25 bp, Homo sapien
ggattcccagtagccgtgatggcag

SEQ ID NO: 1171181 - DNA, 25 bp, Homo sapien
gatcattcatggtccggtcatccca

SEQ ID NO: 1171182 - DNA, 25 bp, Homo sapien
cggtcatcccagtcgaggcggattc

SEQ ID NO: 1171183 - DNA, 25 bp, Homo sapien
tcctccagatcattcatggtccggt

SEQ ID NO: 1171184 - DNA, 25 bp, Homo sapien
caccaccacgatgctggcaaagaat

SEQ ID NO: 1171185 - DNA, 25 bp, Homo sapien
gcaaagaatgccgtgtggcacgtga

SEQ ID NO: 1171186 - DNA, 25 bp, Homo sapien
gaagactgagttgcggcgggtcttg

SEQ ID NO: 1171187 - DNA, 25 bp, Homo sapien
ctgctggaagactgagttgcggcgg

SEQ ID NO: 1171188 - DNA, 25 bp, Homo sapien
cctatctatggatatacagatggaa

SEQ ID NO: 1171189 - DNA, 25 bp, Homo sapien
gctgagttggaagcttggcctgtgt

SEQ ID NO: 1171190 - DNA, 25 bp, Homo sapien
gaagattaaaatctgatgccctcct

SEQ ID NO: 1171191 - DNA, 25 bp, Homo sapien
tcttctatatgaaacctatctatgg

SEQ ID NO: 1171192 - DNA, 25 bp, Homo sapien
gaaactgtaacaacctcatgtgagg

SEQ ID NO: 1171193 - DNA, 25 bp, Homo sapien
tggtgaacccttaccatcttggtga

SEQ ID NO: 1171194 - DNA, 25 bp, Homo sapien
cacagaaatgttgggtagtagccag

SEQ ID NO: 1171195 - DNA, 25 bp, Homo sapien
tatggccatgttcccaccttcgtgt

SEQ ID NO: 1171196 - DNA, 25 bp, Homo sapien
ggtacatgcggagggctacacccat

SEQ ID NO: 1171197 - DNA, 25 bp, Homo sapien
aacgccgtctcctccaggagcccaa

SEQ ID NO: 1171198 - DNA, 25 bp, Homo sapien
ttgagcgggtacatgcggagggcta

SEQ ID NO: 1171199 - DNA, 25 bp, Homo sapien
cggagggctacacccatgcctgggc

SEQ ID NO: 1171200 - DNA, 25 bp, Homo sapien
aaagcaatggaggagagtgtcagca

SEQ ID NO: 1171201 - DNA, 25 bp, Homo sapien
ctgaaagcaatggaggagagtgtca

SEQ ID NO: 1171202 - DNA, 25 bp, Homo sapien
tgaaagcaatggaggagagtgtcag

SEQ ID NO: 1171203 - DNA, 25 bp, Homo sapien
gaaagcaatggaggagagtgtcagc

SEQ ID NO: 1171204 - DNA, 25 bp, Homo sapien
taggggaaggcgcagaaccaccagg

SEQ ID NO: 1171205 - DNA, 25 bp, Homo sapien
ggggaaggcgcagaaccaccaggtg

SEQ ID NO: 1171206 - DNA, 25 bp, Homo sapien
ctgtaggggaaggcgcagaaccacc

SEQ ID NO: 1171207 - DNA, 25 bp, Homo sapien
gaaggcgcagaaccaccaggtgact

SEQ ID NO: 1171208 - DNA, 25 bp, Homo sapien
cgccgcaggatgagctttcggacct

SEQ ID NO: 1171209 - DNA, 25 bp, Homo sapien
gagctttcggacctcatcatagatg

SEQ ID NO: 1171210 - DNA, 25 bp, Homo sapien
caccaggataccgccgcaggatgag

SEQ ID NO: 1171211 - DNA, 25 bp, Homo sapien
gatgagctttcggacctcatcatag

SEQ ID NO: 1171212 - DNA, 25 bp, Homo sapien
aacagaagcaggaaccagtagtggg

SEQ ID NO: 1171213 - DNA, 25 bp, Homo sapien
ctgagggtgttgaggaacagaagca

SEQ ID NO: 1171214 - DNA, 25 bp, Homo sapien
caacaggttcgaaagagtcagggct

SEQ ID NO: 1171215 - DNA, 25 bp, Homo sapien
gagtctgcgtgtggtcctggaggga

SEQ ID NO: 1171216 - DNA, 25 bp, Homo sapien
gtgaaaatgcaaacgcccacagggc

SEQ ID NO: 1171217 - DNA, 25 bp, Homo sapien
cagaataggtcgagggtgaaaatgc

SEQ ID NO: 1171218 - DNA, 25 bp, Homo sapien
cagggcctcttcaggtgacgaacga

SEQ ID NO: 1171219 - DNA, 25 bp, Homo sapien
gacttgtatttagcacattggaggc

SEQ ID NO: 1171220 - DNA, 25 bp, Homo sapien
gtagtatgtctccttctccacccag

SEQ ID NO: 1171221 - DNA, 25 bp, Homo sapien
tcagtagtatgtctccttctccacc

SEQ ID NO: 1171222 - DNA, 25 bp, Homo sapien
agtagtatgtctccttctccaccca

SEQ ID NO: 1171223 - DNA, 25 bp, Homo sapien
tagtatgtctccttctccacccagc

SEQ ID NO: 1171224 - DNA, 25 bp, Homo sapien
aaaatagacaacatagtggagtggg

SEQ ID NO: 1171225 - DNA, 25 bp, Homo sapien
ccttctggtttagatgggttcctgc

SEQ ID NO: 1171226 - DNA, 25 bp, Homo sapien
tataccccgcaacttagcctgctga

SEQ ID NO: 1171227 - DNA, 25 bp, Homo sapien
gattgttcacagttaggtctatggg

SEQ ID NO: 1171228 - DNA, 25 bp, Homo sapien
gggaagccagggatagagtcctgca

SEQ ID NO: 1171229 - DNA, 25 bp, Homo sapien
aagccagggatagagtcctgcagga

SEQ ID NO: 1171230 - DNA, 25 bp, Homo sapien
gccagggatagagtcctgcaggaag

SEQ ID NO: 1171231 - DNA, 25 bp, Homo sapien
aaggggaagccagggatagagtcct

SEQ ID NO: 1171232 - DNA, 25 bp, Homo sapien
cttgcactcaccagaagaacctttt

SEQ ID NO: 1171233 - DNA, 25 bp, Homo sapien
agcctcgactgggagacaagtccac

SEQ ID NO: 1171234 - DNA, 25 bp, Homo sapien
tttccagtctcaggctcttgcactc

SEQ ID NO: 1171235 - DNA, 25 bp, Homo sapien
tcaggctcttgcactcaccagaaga

SEQ ID NO: 1171236 - DNA, 25 bp, Homo sapien
taagtacatgagtgacatccggacc

SEQ ID NO: 1171237 - DNA, 25 bp, Homo sapien
caccctgattctagccaatggccag

SEQ ID NO: 1171238 - DNA, 25 bp, Homo sapien
aatggccagcgaactccttttccag

SEQ ID NO: 1171239 - DNA, 25 bp, Homo sapien
ctaaaatgtgggacgtagagctgga

SEQ ID NO: 1171240 - DNA, 25 bp, Homo sapien
taagtgggcacaatgatcgtcggtt

SEQ ID NO: 1171241 - DNA, 25 bp, Homo sapien
gataattagcccatgcactcgctgc

SEQ ID NO: 1171242 - DNA, 25 bp, Homo sapien
catgacctaagcttgtccctggaag

SEQ ID NO: 1171243 - DNA, 25 bp, Homo sapien
taagccaggcttagagaatgggcaa

SEQ ID NO: 1171244 - DNA, 25 bp, Homo sapien
catatttcaatatcacgatttagga

SEQ ID NO: 1171245 - DNA, 25 bp, Homo sapien
gtagaaatctgaattatggaagaga

SEQ ID NO: 1171246 - DNA, 25 bp, Homo sapien
caatatcacgatttaggagggaggc

SEQ ID NO: 1171247 - DNA, 25 bp, Homo sapien
ggagggaggcaagtataaagtgtag

SEQ ID NO: 1171248 - DNA, 25 bp, Homo sapien
catgatggtttctgatgtctactac

SEQ ID NO: 1171249 - DNA, 25 bp, Homo sapien
gaaatcctggcataggttgtaagag

SEQ ID NO: 1171250 - DNA, 25 bp, Homo sapien
catagttatggcacaaaatgagctg

SEQ ID NO: 1171251 - DNA, 25 bp, Homo sapien
tctgaccgttattctgaaatcctgg

SEQ ID NO: 1171252 - DNA, 25 bp, Homo sapien
tgagcttcaaggatctgggaacccc

SEQ ID NO: 1171253 - DNA, 25 bp, Homo sapien
gaaacaagaggtgaagcgtaaccag

SEQ ID NO: 1171254 - DNA, 25 bp, Homo sapien
aggagagactgagcggtcctccagc

SEQ ID NO: 1171255 - DNA, 25 bp, Homo sapien
agtgatgaagatgccgcaaggccca

SEQ ID NO: 1171256 - DNA, 25 bp, Homo sapien
tcttcgtcttggactctggtcatgg

SEQ ID NO: 1171257 - DNA, 25 bp, Homo sapien
taggtcttcgtcttggactctggtc

SEQ ID NO: 1171258 - DNA, 25 bp, Homo sapien
ttttaggtcttcgtcttggactctg

SEQ ID NO: 1171259 - DNA, 25 bp, Homo sapien
ggtcttcgtcttggactctggtcat

SEQ ID NO: 1171260 - DNA, 25 bp, Homo sapien
cctccatattgcgcttctgtttttc

SEQ ID NO: 1171261 - DNA, 25 bp, Homo sapien
tcagttcctccatattgcgcttctg

SEQ ID NO: 1171262 - DNA, 25 bp, Homo sapien
tccatattgcgcttctgtttttccc

SEQ ID NO: 1171263 - DNA, 25 bp, Homo sapien
cttcagttcctccatattgcgcttc

SEQ ID NO: 1171264 - DNA, 25 bp, Homo sapien
caggtccacggagtacttggtgctc

SEQ ID NO: 1171265 - DNA, 25 bp, Homo sapien
tcaggtccacggagtacttggtgct

SEQ ID NO: 1171266 - DNA, 25 bp, Homo sapien
ggtccacggagtacttggtgctcag

SEQ ID NO: 1171267 - DNA, 25 bp, Homo sapien
gtcaggtccacggagtacttggtgc

SEQ ID NO: 1171268 - DNA, 25 bp, Homo sapien
agaagaaatagggttggatagagag

SEQ ID NO: 1171269 - DNA, 25 bp, Homo sapien
gcagagaagaaatagggttggatag

SEQ ID NO: 1171270 - DNA, 25 bp, Homo sapien
agagaagaaatagggttggatagag

SEQ ID NO: 1171271 - DNA, 25 bp, Homo sapien
tgtgcagagaagaaatagggttgga

SEQ ID NO: 1171272 - DNA, 25 bp, Homo sapien
aatttgacccattctggagtggtgg

SEQ ID NO: 1171273 - DNA, 25 bp, Homo sapien
gtattgggtccacctcgagtcagga

SEQ ID NO: 1171274 - DNA, 25 bp, Homo sapien
acagttgcttacagaatttgaccca

SEQ ID NO: 1171275 - DNA, 25 bp, Homo sapien
gagggagaagcctccgaacagttgc

SEQ ID NO: 1171276 - DNA, 25 bp, Homo sapien
aggctcctcattgaaatatatctgg

SEQ ID NO: 1171277 - DNA, 25 bp, Homo sapien
gttgtctttggtaggctcctcattg

SEQ ID NO: 1171278 - DNA, 25 bp, Homo sapien
gctgtaggccacaaagcagagaatg

SEQ ID NO: 1171279 - DNA, 25 bp, Homo sapien
atgctgtaggccacaaagcagagaa

SEQ ID NO: 1171280 - DNA, 25 bp, Homo sapien
cggacagtacgatgctcaggtagag

SEQ ID NO: 1171281 - DNA, 25 bp, Homo sapien
agtgacgatgaccacgacggacagt

SEQ ID NO: 1171282 - DNA, 25 bp, Homo sapien
aagcagccagtgacgatgaccacga

SEQ ID NO: 1171283 - DNA, 25 bp, Homo sapien
cacgacggacagtacgatgctcagg

SEQ ID NO: 1171284 - DNA, 25 bp, Homo sapien
ggtctcccaacaccacctcttgtac

SEQ ID NO: 1171285 - DNA, 25 bp, Homo sapien
atccttgtgcagagataagccggag

SEQ ID NO: 1171286 - DNA, 25 bp, Homo sapien
tctctcctcctcgaattaccagagc

SEQ ID NO: 1171287 - DNA, 25 bp, Homo sapien
ccacctcttgtacattaatttgcat

SEQ ID NO: 1171288 - DNA, 25 bp, Homo sapien
agatgtttcgggtctccagagggtt

SEQ ID NO: 1171289 - DNA, 25 bp, Homo sapien
aagcagatgtttcgggtctccagag

SEQ ID NO: 1171290 - DNA, 25 bp, Homo sapien
ccccagtcaaggatgagttgtccac

SEQ ID NO: 1171291 - DNA, 25 bp, Homo sapien
tccccagtcaaggatgagttgtcca

SEQ ID NO: 1171292 - DNA, 25 bp, Homo sapien
ttgatgtcaacctcagggaaggctg

SEQ ID NO: 1171293 - DNA, 25 bp, Homo sapien
caccttccatgtattgccagagaaa

SEQ ID NO: 1171294 - DNA, 25 bp, Homo sapien
taatctcagtgtgtctagagatggg

SEQ ID NO: 1171295 - DNA, 25 bp, Homo sapien
tgcatgagaacccaaagagaagtct

SEQ ID NO: 1171296 - DNA, 25 bp, Homo sapien
catagcccaagagaagtgagagcgc

SEQ ID NO: 1171297 - DNA, 25 bp, Homo sapien
aaagtgacaccaaggaagacggcca

SEQ ID NO: 1171298 - DNA, 25 bp, Homo sapien
tgacgtcagggaggcaattctgccc

SEQ ID NO: 1171299 - DNA, 25 bp, Homo sapien
gatgaagtgttcgatctcagcagcg

SEQ ID NO: 1171300 - DNA, 25 bp, Homo sapien
tggtttgtgctttatggtaagagtt

SEQ ID NO: 1171301 - DNA, 25 bp, Homo sapien
tgttcccacctactctttacacatt

SEQ ID NO: 1171302 - DNA, 25 bp, Homo sapien
tttgttcccacctactctttacaca

SEQ ID NO: 1171303 - DNA, 25 bp, Homo sapien
tgtgctttatggtaagagtttcaaa

SEQ ID NO: 1171304 - DNA, 25 bp, Homo sapien
tcttcagtggtgtcggcctcataca

SEQ ID NO: 1171305 - DNA, 25 bp, Homo sapien
tgttcttcagtggtgtcggcctcat

SEQ ID NO: 1171306 - DNA, 25 bp, Homo sapien
cctcatacacggtcatatcaaacca

SEQ ID NO: 1171307 - DNA, 25 bp, Homo sapien
cacggtcatatcaaaccacatgtgg

SEQ ID NO: 1171308 - DNA, 25 bp, Homo sapien
ggcaggatctcctgattagccttaa

SEQ ID NO: 1171309 - DNA, 25 bp, Homo sapien
ttagccttaaagtcagcccggttgc

SEQ ID NO: 1171310 - DNA, 25 bp, Homo sapien
ttgcagaggccagcgattcgggcca

SEQ ID NO: 1171311 - DNA, 25 bp, Homo sapien
cataaaccaggtatcagagctcttg

SEQ ID NO: 1171312 - DNA, 25 bp, Homo sapien
tgccaggatggggtttgtatagtaa

SEQ ID NO: 1171313 - DNA, 25 bp, Homo sapien
ccaggggcatgctacctgggcatga

SEQ ID NO: 1171314 - DNA, 25 bp, Homo sapien
ccaggatggggtttgtatagtaagc

SEQ ID NO: 1171315 - DNA, 25 bp, Homo sapien
ctgccaggatggggtttgtatagta

SEQ ID NO: 1171316 - DNA, 25 bp, Homo sapien
gggctgactcggaagcatcacctgt

SEQ ID NO: 1171317 - DNA, 25 bp, Homo sapien
taagactgctcgatgaacttgagga

SEQ ID NO: 1171318 - DNA, 25 bp, Homo sapien
catctccgccacagagctgtaagac

SEQ ID NO: 1171319 - DNA, 25 bp, Homo sapien
gccacagagctgtaagactgctcga

SEQ ID NO: 1171320 - DNA, 25 bp, Homo sapien
caactggatggcgagagagcagaaa

SEQ ID NO: 1171321 - DNA, 25 bp, Homo sapien
tcctaaaagcgtgagaagtctcctg

SEQ ID NO: 1171322 - DNA, 25 bp, Homo sapien
gatggacaggaaatgcccgctaggt

SEQ ID NO: 1171323 - DNA, 25 bp, Homo sapien
aaaagtccaaagacctgtgttctgg

SEQ ID NO: 1171324 - DNA, 25 bp, Homo sapien
ggtagaacaaaactccaagatcctc

SEQ ID NO: 1171325 - DNA, 25 bp, Homo sapien
tcatcagtacgtgggtctgggagct

SEQ ID NO: 1171326 - DNA, 25 bp, Homo sapien
gacctcccagttctaagtaggcatt

SEQ ID NO: 1171327 - DNA, 25 bp, Homo sapien
ttgagtactcctgcccattcagaag

SEQ ID NO: 1171328 - DNA, 25 bp, Homo sapien
cagggataataaccattttgatgcc

SEQ ID NO: 1171329 - DNA, 25 bp, Homo sapien
gataataaccattttgatgccattc

SEQ ID NO: 1171330 - DNA, 25 bp, Homo sapien
gggataataaccattttgatgccat

SEQ ID NO: 1171331 - DNA, 25 bp, Homo sapien
cccagggataataaccattttgatg

SEQ ID NO: 1171332 - DNA, 25 bp, Homo sapien
tctgtattaaatgggaatcccttgg

SEQ ID NO: 1171333 - DNA, 25 bp, Homo sapien
ttaattcctgcactgcgacacttgc

SEQ ID NO: 1171334 - DNA, 25 bp, Homo sapien
ccacaaaacaaaggttgtccatggg

SEQ ID NO: 1171335 - DNA, 25 bp, Homo sapien
agctgctaggcagattcaagaagca

SEQ ID NO: 1171336 - DNA, 25 bp, Homo sapien
gtaatgggatgatctcctgttacca

SEQ ID NO: 1171337 - DNA, 25 bp, Homo sapien
ttaagccgggcagcgacttcctctg

SEQ ID NO: 1171338 - DNA, 25 bp, Homo sapien
tggccttagctgtaatgggatgatc

SEQ ID NO: 1171339 - DNA, 25 bp, Homo sapien
cttgctgatagggatcttaagccgg

SEQ ID NO: 1171340 - DNA, 25 bp, Homo sapien
gggaggtccgagcaaacacgatctc

SEQ ID NO: 1171341 - DNA, 25 bp, Homo sapien
agttctgcaccatgcaccacaatgg

SEQ ID NO: 1171342 - DNA, 25 bp, Homo sapien
tcaagctgcttggactgtatgtcct

SEQ ID NO: 1171343 - DNA, 25 bp, Homo sapien
gcaaacacgatctcagggtggttct

SEQ ID NO: 1171344 - DNA, 25 bp, Homo sapien
gcaggggagtcgttcaccccgtcac

SEQ ID NO: 1171345 - DNA, 25 bp, Homo sapien
ggggtataccgaggatgatgaacat

SEQ ID NO: 1171346 - DNA, 25 bp, Homo sapien
aatgcagaggatggttatggttccc

SEQ ID NO: 1171347 - DNA, 25 bp, Homo sapien
ccagaggcaggggtataccgaggat

SEQ ID NO: 1171348 - DNA, 25 bp, Homo sapien
cagaggatggttatggttcccagag

SEQ ID NO: 1171349 - DNA, 25 bp, Homo sapien
ttcagctgactcataagccaaggag

SEQ ID NO: 1171350 - DNA, 25 bp, Homo sapien
cgctttcagctgactcataagccaa

SEQ ID NO: 1171351 - DNA, 25 bp, Homo sapien
catgatgtcgctttcagctgactca

SEQ ID NO: 1171352 - DNA, 25 bp, Homo sapien
cagattatccgtctttgggttcctt

SEQ ID NO: 1171353 - DNA, 25 bp, Homo sapien
gccatgccaatgagacggtggttca

SEQ ID NO: 1171354 - DNA, 25 bp, Homo sapien
ggccatgccaatgagacggtggttc

SEQ ID NO: 1171355 - DNA, 25 bp, Homo sapien
ccatgccaatgagacggtggttcac

SEQ ID NO: 1171356 - DNA, 25 bp, Homo sapien
gcctggttcagagaagggccccaaa

SEQ ID NO: 1171357 - DNA, 25 bp, Homo sapien
cccagcagatcaacaggcctaaaac

SEQ ID NO: 1171358 - DNA, 25 bp, Homo sapien
ctcagccaggattacaaagtaggta

SEQ ID NO: 1171359 - DNA, 25 bp, Homo sapien
tacaaagtaggtaaagaatccagcc

SEQ ID NO: 1171360 - DNA, 25 bp, Homo sapien
cagcagatcaacaggcctaaaacca

SEQ ID NO: 1171361 - DNA, 25 bp, Homo sapien
tggagatgatgagatccgcccactg

SEQ ID NO: 1171362 - DNA, 25 bp, Homo sapien
gaaaagtgagttgcggcgagtcttg

SEQ ID NO: 1171363 - DNA, 25 bp, Homo sapien
ccacaacttttcgttgctcataggt

SEQ ID NO: 1171364 - DNA, 25 bp, Homo sapien
tggtgacaaaaaaggccgtttggca

SEQ ID NO: 1171365 - DNA, 25 bp, Homo sapien
tccatgcctggagtgtaggacagaa

SEQ ID NO: 1171366 - DNA, 25 bp, Homo sapien
tgcctggagtgtaggacagaaatgc

SEQ ID NO: 1171367 - DNA, 25 bp, Homo sapien
ccacgtccatgcctggagtgtagga

SEQ ID NO: 1171368 - DNA, 25 bp, Homo sapien
cctggagtgtaggacagaaatgcag

SEQ ID NO: 1171369 - DNA, 25 bp, Homo sapien
aacactctgcaaggtctatccctgg

SEQ ID NO: 1171370 - DNA, 25 bp, Homo sapien
tagtaacaaggcatctaccatgacc

SEQ ID NO: 1171371 - DNA, 25 bp, Homo sapien
gaatggttccatacttgtccaaggc

SEQ ID NO: 1171372 - DNA, 25 bp, Homo sapien
gattgtgagtgtctaaggccagtgc

SEQ ID NO: 1171373 - DNA, 25 bp, Homo sapien
tgctgacggatgaggagttttctga

SEQ ID NO: 1171374 - DNA, 25 bp, Homo sapien
gctgacggatgaggagttttctgat

SEQ ID NO: 1171375 - DNA, 25 bp, Homo sapien
atgagaatactgtagggaatggcac

SEQ ID NO: 1171376 - DNA, 25 bp, Homo sapien
tactgtagggaatggcacagagcca

SEQ ID NO: 1171377 - DNA, 25 bp, Homo sapien
agtcagagcggggcccaggggagcc

SEQ ID NO: 1171378 - DNA, 25 bp, Homo sapien
cactcagtcagagcggggcccaggg

SEQ ID NO: 1171379 - DNA, 25 bp, Homo sapien
tcagagcggggcccaggggagcctc

SEQ ID NO: 1171380 - DNA, 25 bp, Homo sapien
agagcggggcccaggggagcctcac

SEQ ID NO: 1171381 - DNA, 25 bp, Homo sapien
ggagggactaggtgggatgggagag

SEQ ID NO: 1171382 - DNA, 25 bp, Homo sapien
ggactaggtgggatgggagagctag

SEQ ID NO: 1171383 - DNA, 25 bp, Homo sapien
gagggactaggtgggatgggagagc

SEQ ID NO: 1171384 - DNA, 25 bp, Homo sapien
gggactaggtgggatgggagagcta

SEQ ID NO: 1171385 - DNA, 25 bp, Homo sapien
tagtacgtctccctttccacccagc

SEQ ID NO: 1171386 - DNA, 25 bp, Homo sapien
tcctagtgtctcagatgttgtgtca

SEQ ID NO: 1171387 - DNA, 25 bp, Homo sapien
atcctagtgtctcagatgttgtgtc

SEQ ID NO: 1171388 - DNA, 25 bp, Homo sapien
agatgttgtgtcaaacttataatct

SEQ ID NO: 1171389 - DNA, 25 bp, Homo sapien
gatgttgtgtcaaacttataatctc

SEQ ID NO: 1171390 - DNA, 25 bp, Homo sapien
tccagacatttactgtctagactgg

SEQ ID NO: 1171391 - DNA, 25 bp, Homo sapien
gcccatgattccctcaagccagccc

SEQ ID NO: 1171392 - DNA, 25 bp, Homo sapien
ctggctacgggattcagcaggacca

SEQ ID NO: 1171393 - DNA, 25 bp, Homo sapien
agccagcccaggattgcccatcttt

SEQ ID NO: 1171394 - DNA, 25 bp, Homo sapien
tcagccactggtatcaaatgaccgt

SEQ ID NO: 1171395 - DNA, 25 bp, Homo sapien
tgatatagcactgttcctaggagac

SEQ ID NO: 1171396 - DNA, 25 bp, Homo sapien
tggttcagcgatgtcagcaattggg

SEQ ID NO: 1171397 - DNA, 25 bp, Homo sapien
gaagctcctgctactgaaacctgag

SEQ ID NO: 1171398 - DNA, 25 bp, Homo sapien
ccacctggtcctgtctaaatatgtc

SEQ ID NO: 1171399 - DNA, 25 bp, Homo sapien
gagacggataaccttctgaggccag

SEQ ID NO: 1171400 - DNA, 25 bp, Homo sapien
aaatatgtctccatggttggcagga

SEQ ID NO: 1171401 - DNA, 25 bp, Homo sapien
tcctggagaaactgccgacagagcc

SEQ ID NO: 1171402 - DNA, 25 bp, Homo sapien
gctctcctggtccagaagaggttag

SEQ ID NO: 1171403 - DNA, 25 bp, Homo sapien
gggttggctctcctggtccagaaga

SEQ ID NO: 1171404 - DNA, 25 bp, Homo sapien
ggaggtagtgggatctgggttggct

SEQ ID NO: 1171405 - DNA, 25 bp, Homo sapien
gaggtagtgggatctgggttggctc

SEQ ID NO: 1171406 - DNA, 25 bp, Homo sapien
ggtccacaccatcgtactcagggaa

SEQ ID NO: 1171407 - DNA, 25 bp, Homo sapien
ttgtctttgtgaggccttgtcatcc

SEQ ID NO: 1171408 - DNA, 25 bp, Homo sapien
ttcatggtagaggagtgccagcacc

SEQ ID NO: 1171409 - DNA, 25 bp, Homo sapien
gcattgacattgatcacacggtcca

SEQ ID NO: 1171410 - DNA, 25 bp, Homo sapien
caagttgggtcagttgaggtgcggg

SEQ ID NO: 1171411 - DNA, 25 bp, Homo sapien
gtgcgggagatataagagttgacct

SEQ ID NO: 1171412 - DNA, 25 bp, Homo sapien
tattatcccctattctccctctcat

SEQ ID NO: 1171413 - DNA, 25 bp, Homo sapien
cttgaccctttgctaagatccagaa

SEQ ID NO: 1171414 - DNA, 25 bp, Homo sapien
aagccaacacccttgtcttctagga

SEQ ID NO: 1171415 - DNA, 25 bp, Homo sapien
agagtctaccagcccgaagccaaca

SEQ ID NO: 1171416 - DNA, 25 bp, Homo sapien
ttgtcttctaggacttgggctgcta

SEQ ID NO: 1171417 - DNA, 25 bp, Homo sapien
agcccgaagccaacacccttgtctt

SEQ ID NO: 1171418 - DNA, 25 bp, Homo sapien
gccatcgtactcaatgacttcatct

SEQ ID NO: 1171419 - DNA, 25 bp, Homo sapien
ggtgtcagcagaaaactcgccatcg

SEQ ID NO: 1171420 - DNA, 25 bp, Homo sapien
ttcatctcccttgaatacatacatg

SEQ ID NO: 1171421 - DNA, 25 bp, Homo sapien
gcagaaactccacgatggtgtcagc

SEQ ID NO: 1171422 - DNA, 25 bp, Homo sapien
gatctcatcctcaatattctcaaac

SEQ ID NO: 1171423 - DNA, 25 bp, Homo sapien
atcaattccacagggtcctctagga

SEQ ID NO: 1171424 - DNA, 25 bp, Homo sapien
tctcgttcaccttcaatcaattcca

SEQ ID NO: 1171425 - DNA, 25 bp, Homo sapien
ttctcaaacgcctgcagctctcgtt

SEQ ID NO: 1171426 - DNA, 25 bp, Homo sapien
ccccactatcgtccccaattctttg

SEQ ID NO: 1171427 - DNA, 25 bp, Homo sapien
gggtctgcccgggaatcatccccca

SEQ ID NO: 1171428 - DNA, 25 bp, Homo sapien
caggcagggttcattttgagaccca

SEQ ID NO: 1171429 - DNA, 25 bp, Homo sapien
gcagggttcattttgagacccaccc

SEQ ID NO: 1171430 - DNA, 25 bp, Homo sapien
ctggggggtggaatgcagagtcagt

SEQ ID NO: 1171431 - DNA, 25 bp, Homo sapien
ggggggtggaatgcagagtcagtct

SEQ ID NO: 1171432 - DNA, 25 bp, Homo sapien
tggggggtggaatgcagagtcagtc

SEQ ID NO: 1171433 - DNA, 25 bp, Homo sapien
gaaactcctcagctgcatcctcgaa

SEQ ID NO: 1171434 - DNA, 25 bp, Homo sapien
ctcagctgcatcctcgaaggctttg

SEQ ID NO: 1171435 - DNA, 25 bp, Homo sapien
cttgctgtcgaaggtggcgaagaag

SEQ ID NO: 1171436 - DNA, 25 bp, Homo sapien
aactcctcagctgcatcctcgaagg

SEQ ID NO: 1171437 - DNA, 25 bp, Homo sapien
gggaccaggtcagccatcgattctg

SEQ ID NO: 1171438 - DNA, 25 bp, Homo sapien
aggtcagccatcgattctgggagag

SEQ ID NO: 1171439 - DNA, 25 bp, Homo sapien
gaccaggtcagccatcgattctggg

SEQ ID NO: 1171440 - DNA, 25 bp, Homo sapien
cagaaccaatacagctgcggggagg

SEQ ID NO: 1171441 - DNA, 25 bp, Homo sapien
gacaatctcctcttcgctattgggc

SEQ ID NO: 1171442 - DNA, 25 bp, Homo sapien
tggtcacaggctcttccatgaaggc

SEQ ID NO: 1171443 - DNA, 25 bp, Homo sapien
gctcctccacgaagttgacaatctc

SEQ ID NO: 1171444 - DNA, 25 bp, Homo sapien
tgaaggcctcgtagaaatcaatctc

SEQ ID NO: 1171445 - DNA, 25 bp, Homo sapien
gtgggttagaaggatgccccctcca

SEQ ID NO: 1171446 - DNA, 25 bp, Homo sapien
tgtcattactcagtgggttagaagg

SEQ ID NO: 1171447 - DNA, 25 bp, Homo sapien
agacagacagagtgtcattactcag

SEQ ID NO: 1171448 - DNA, 25 bp, Homo sapien
gtagcaaaggctgcctctaggtcag

SEQ ID NO: 1171449 - DNA, 25 bp, Homo sapien
tctcatacatactctccggcttcag

SEQ ID NO: 1171450 - DNA, 25 bp, Homo sapien
catacatactctccggcttcagttt

SEQ ID NO: 1171451 - DNA, 25 bp, Homo sapien
aggtctcatacatactctccggctt

SEQ ID NO: 1171452 - DNA, 25 bp, Homo sapien
caggtctcatacatactctccggct

SEQ ID NO: 1171453 - DNA, 25 bp, Homo sapien
cacacattcttcagtgtagaaatct

SEQ ID NO: 1171454 - DNA, 25 bp, Homo sapien
taatccctttatccccaggcttgag

SEQ ID NO: 1171455 - DNA, 25 bp, Homo sapien
ctgataatccctttatccccaggct

SEQ ID NO: 1171456 - DNA, 25 bp, Homo sapien
tcagtgtagaaatctttcagttgct

SEQ ID NO: 1171457 - DNA, 25 bp, Homo sapien
cagcttcctctgcgaaggccacaat

SEQ ID NO: 1171458 - DNA, 25 bp, Homo sapien
gcttcctctgcgaaggccacaatgt

SEQ ID NO: 1171459 - DNA, 25 bp, Homo sapien
cttcctctgcgaaggccacaatgtg

SEQ ID NO: 1171460 - DNA, 25 bp, Homo sapien
ctgccttccctccagtccaacccgg

SEQ ID NO: 1171461 - DNA, 25 bp, Homo sapien
cctgccttccctccagtccaacccg

SEQ ID NO: 1171462 - DNA, 25 bp, Homo sapien
ctccccctgccttccctccagtcca

SEQ ID NO: 1171463 - DNA, 25 bp, Homo sapien
tccccctgccttccctccagtccaa

SEQ ID NO: 1171464 - DNA, 25 bp, Homo sapien
tccagatgatgctaagatctgggtt

SEQ ID NO: 1171465 - DNA, 25 bp, Homo sapien
agatgatgctaagatctgggttttc

SEQ ID NO: 1171466 - DNA, 25 bp, Homo sapien
gagagtctctaagaactcgaaacca

SEQ ID NO: 1171467 - DNA, 25 bp, Homo sapien
aatccagatgatgctaagatctggg

SEQ ID NO: 1171468 - DNA, 25 bp, Homo sapien
acgtcttctcccagtatgggaccag

SEQ ID NO: 1171469 - DNA, 25 bp, Homo sapien
gggctgacaagtcgatgtcaaacgt

SEQ ID NO: 1171470 - DNA, 25 bp, Homo sapien
atcagtaacattgacgactcctatt

SEQ ID NO: 1171471 - DNA, 25 bp, Homo sapien
aacattgacgactcctatttgtggg

SEQ ID NO: 1171472 - DNA, 25 bp, Homo sapien
ctatgctaggaagtagagtcggggg

SEQ ID NO: 1171473 - DNA, 25 bp, Homo sapien
gggtcaacccgggatgaggacagga

SEQ ID NO: 1171474 - DNA, 25 bp, Homo sapien
tgctaggaagtagagtcgggggtca

SEQ ID NO: 1171475 - DNA, 25 bp, Homo sapien
gctaggaagtagagtcgggggtcaa

SEQ ID NO: 1171476 - DNA, 25 bp, Homo sapien
tccatttccatccatacgctatccg

SEQ ID NO: 1171477 - DNA, 25 bp, Homo sapien
tcgtccatttccatccatacgctat

SEQ ID NO: 1171478 - DNA, 25 bp, Homo sapien
tcatcgtccatttccatccatacgc

SEQ ID NO: 1171479 - DNA, 25 bp, Homo sapien
cctcctcatcgtccatttccatcca

SEQ ID NO: 1171480 - DNA, 25 bp, Homo sapien
atcatcgtcatcgtcctctgtgttg

SEQ ID NO: 1171481 - DNA, 25 bp, Homo sapien
catcgtcatcgtcctctgtgttgat

SEQ ID NO: 1171482 - DNA, 25 bp, Homo sapien
gtcatcgtcctctgtgttgatctcg

SEQ ID NO: 1171483 - DNA, 25 bp, Homo sapien
tcgtcatcgtcctctgtgttgatct

SEQ ID NO: 1171484 - DNA, 25 bp, Homo sapien
gcacccagcatatagaccccagtta

SEQ ID NO: 1171485 - DNA, 25 bp, Homo sapien
ccatatatatggctagaggagaatc

SEQ ID NO: 1171486 - DNA, 25 bp, Homo sapien
cagatgtctttattgaggcctctca

SEQ ID NO: 1171487 - DNA, 25 bp, Homo sapien
tatggcagagaataacctagtctcc

SEQ ID NO: 1171488 - DNA, 25 bp, Homo sapien
gagtccccggttcctaagcagcgtc

SEQ ID NO: 1171489 - DNA, 25 bp, Homo sapien
aagcagcgtccggaacctcctcctc

SEQ ID NO: 1171490 - DNA, 25 bp, Homo sapien
agcgccgctcactccacccggctgg

SEQ ID NO: 1171491 - DNA, 25 bp, Homo sapien
gcactcctgagtccccggttcctaa

SEQ ID NO: 1171492 - DNA, 25 bp, Homo sapien
tcttggctgactcatacccattctt

SEQ ID NO: 1171493 - DNA, 25 bp, Homo sapien
ctctagacctctctggagatgtctg

SEQ ID NO: 1171494 - DNA, 25 bp, Homo sapien
ttggctgactcatacccattctttt

SEQ ID NO: 1171495 - DNA, 25 bp, Homo sapien
ctggttccctgactatctctagacc

SEQ ID NO: 1171496 - DNA, 25 bp, Homo sapien
tattcggagctgcaattaggaaggg

SEQ ID NO: 1171497 - DNA, 25 bp, Homo sapien
atctgtgcttcactgtccccatctg

SEQ ID NO: 1171498 - DNA, 25 bp, Homo sapien
gccatgaatacttaggactcctgag

SEQ ID NO: 1171499 - DNA, 25 bp, Homo sapien
tatccaacttagtggtagccatgaa

SEQ ID NO: 1171500 - DNA, 25 bp, Homo sapien
gccctgggagtgctttgagaagcct

SEQ ID NO: 1171501 - DNA, 25 bp, Homo sapien
caattgggataaccacctgtggagg

SEQ ID NO: 1171502 - DNA, 25 bp, Homo sapien
taagtcgtggtagattatcccttct

SEQ ID NO: 1171503 - DNA, 25 bp, Homo sapien
acaggtgggagctccatgggcactg

SEQ ID NO: 1171504 - DNA, 25 bp, Homo sapien
tcagggatcaccaggcagtctgggc

SEQ ID NO: 1171505 - DNA, 25 bp, Homo sapien
gggatcaccaggcagtctgggcgga

SEQ ID NO: 1171506 - DNA, 25 bp, Homo sapien
gatcaccaggcagtctgggcggagg

SEQ ID NO: 1171507 - DNA, 25 bp, Homo sapien
caccaggcagtctgggcggaggcca

SEQ ID NO: 1171508 - DNA, 25 bp, Homo sapien
cactttcctcaccagagattcagat

SEQ ID NO: 1171509 - DNA, 25 bp, Homo sapien
agatttccttagggctcgtggagaa

SEQ ID NO: 1171510 - DNA, 25 bp, Homo sapien
actttcctcaccagagattcagatt

SEQ ID NO: 1171511 - DNA, 25 bp, Homo sapien
tatagaaggctgtagcctcatctca

SEQ ID NO: 1171512 - DNA, 25 bp, Homo sapien
agtccacaactatagaaggctgtag

SEQ ID NO: 1171513 - DNA, 25 bp, Homo sapien
acccccagtcgttaggatgacacca

SEQ ID NO: 1171514 - DNA, 25 bp, Homo sapien
cacaactatagaaggctgtagcctc

SEQ ID NO: 1171515 - DNA, 25 bp, Homo sapien
gtgatgttgttggtcaggtcttgca

SEQ ID NO: 1171516 - DNA, 25 bp, Homo sapien
ttgcaggagggtcccgtactcagcc

SEQ ID NO: 1171517 - DNA, 25 bp, Homo sapien
gccgacttgagctgttctagatctt

SEQ ID NO: 1171518 - DNA, 25 bp, Homo sapien
gtcttccttgcaggccgacttgagc

SEQ ID NO: 1171519 - DNA, 25 bp, Homo sapien
aaccaggcactgccagtagtgatct

SEQ ID NO: 1171520 - DNA, 25 bp, Homo sapien
aaaccaggcactgccagtagtgatc

SEQ ID NO: 1171521 - DNA, 25 bp, Homo sapien
accaggcactgccagtagtgatctc

SEQ ID NO: 1171522 - DNA, 25 bp, Homo sapien
tcaggacggcgggagatctcaaaga

SEQ ID NO: 1171523 - DNA, 25 bp, Homo sapien
caaagatgtgctcaatgtaggagag

SEQ ID NO: 1171524 - DNA, 25 bp, Homo sapien
tcagcacacgggttctgtagtcaac

SEQ ID NO: 1171525 - DNA, 25 bp, Homo sapien
accatagtgagtaggtcaggacggc

SEQ ID NO: 1171526 - DNA, 25 bp, Homo sapien
tttgtacttcttggcactggggata

SEQ ID NO: 1171527 - DNA, 25 bp, Homo sapien
ttgtacttcttggcactggggatac

SEQ ID NO: 1171528 - DNA, 25 bp, Homo sapien
ctttgtacttcttggcactggggat

SEQ ID NO: 1171529 - DNA, 25 bp, Homo sapien
tcaggccttcttcggtgggggagcc

SEQ ID NO: 1171530 - DNA, 25 bp, Homo sapien
tggtctgatgaaggtccaaccttcc

SEQ ID NO: 1171531 - DNA, 25 bp, Homo sapien
gacatatagacaaacagccagagcg

SEQ ID NO: 1171532 - DNA, 25 bp, Homo sapien
taagtgggtagatggtgggttgccc

SEQ ID NO: 1171533 - DNA, 25 bp, Homo sapien
cacacacgcgcacagtaagggggtt

SEQ ID NO: 1171534 - DNA, 25 bp, Homo sapien
tacacacagttagcacggtcagggt

SEQ ID NO: 1171535 - DNA, 25 bp, Homo sapien
cagtggtacatgttcccagcacagt

SEQ ID NO: 1171536 - DNA, 25 bp, Homo sapien
tccctaggtttagagtgcaacagtc

SEQ ID NO: 1171537 - DNA, 25 bp, Homo sapien
aaaagggacctgctggtactcagga

SEQ ID NO: 1171538 - DNA, 25 bp, Homo sapien
tgtagcaatttgattctgccactcc

SEQ ID NO: 1171539 - DNA, 25 bp, Homo sapien
tcttttttgtttggactatgtagca

SEQ ID NO: 1171540 - DNA, 25 bp, Homo sapien
taaatagtctctgagactgcatgtg

SEQ ID NO: 1171541 - DNA, 25 bp, Homo sapien
gttaatgctagacaccacaaaaaag

SEQ ID NO: 1171542 - DNA, 25 bp, Homo sapien
gggttagaacaaggccgtgcacact

SEQ ID NO: 1171543 - DNA, 25 bp, Homo sapien
aggcaaaactgtggagtcctagagg

SEQ ID NO: 1171544 - DNA, 25 bp, Homo sapien
tgggctaggagttaagagtactgtc

SEQ ID NO: 1171545 - DNA, 25 bp, Homo sapien
gggcaatctcacagcaatataagga

SEQ ID NO: 1171546 - DNA, 25 bp, Homo sapien
ggtcactgagtctgaaagtcccagc

SEQ ID NO: 1171547 - DNA, 25 bp, Homo sapien
gctgtacttactccctgaggtaggg

SEQ ID NO: 1171548 - DNA, 25 bp, Homo sapien
gcttgggcacttgtcttatcactgg

SEQ ID NO: 1171549 - DNA, 25 bp, Homo sapien
ggtgatcgagtggtctgtgttccta

SEQ ID NO: 1171550 - DNA, 25 bp, Homo sapien
agtaatggtgtggaagtgacacctg

SEQ ID NO: 1171551 - DNA, 25 bp, Homo sapien
atgcaataaagggacttaagagtga

SEQ ID NO: 1171552 - DNA, 25 bp, Homo sapien
taaagggacttaagagtgaacaaga

SEQ ID NO: 1171553 - DNA, 25 bp, Homo sapien
agtgaacaagagtaatggtgtggaa

SEQ ID NO: 1171554 - DNA, 25 bp, Homo sapien
gtccctatcactgttagaggcctaa

SEQ ID NO: 1171555 - DNA, 25 bp, Homo sapien
tatcactgttagaggcctaatttta

SEQ ID NO: 1171556 - DNA, 25 bp, Homo sapien
cctatcactgttagaggcctaattt

SEQ ID NO: 1171557 - DNA, 25 bp, Homo sapien
ctgtccctatcactgttagaggcct

SEQ ID NO: 1171558 - DNA, 25 bp, Homo sapien
tacttaccacagtattttgcacttg

SEQ ID NO: 1171559 - DNA, 25 bp, Homo sapien
cccctaaataggtcaggtgagggag

SEQ ID NO: 1171560 - DNA, 25 bp, Homo sapien
gcacttgattacatatccttcactc

SEQ ID NO: 1171561 - DNA, 25 bp, Homo sapien
catcaccccctaaataggtcaggtg

SEQ ID NO: 1171562 - DNA, 25 bp, Homo sapien
cattgggtgcctttcggacagaagg

SEQ ID NO: 1171563 - DNA, 25 bp, Homo sapien
gctcatgtttccaagtcagacagca

SEQ ID NO: 1171564 - DNA, 25 bp, Homo sapien
gaagctgcctaagctagaaggcctg

SEQ ID NO: 1171565 - DNA, 25 bp, Homo sapien
tgagattgaggctttgggagcccca

SEQ ID NO: 1171566 - DNA, 25 bp, Homo sapien
gtaagatggaagtcaaagtaagtgg

SEQ ID NO: 1171567 - DNA, 25 bp, Homo sapien
agatggaagtcaaagtaagtgggaa

SEQ ID NO: 1171568 - DNA, 25 bp, Homo sapien
tggaagtcaaagtaagtgggaagtc

SEQ ID NO: 1171569 - DNA, 25 bp, Homo sapien
taagatggaagtcaaagtaagtggg

SEQ ID NO: 1171570 - DNA, 25 bp, Homo sapien
tctggttatccaaggcctctaagga

SEQ ID NO: 1171571 - DNA, 25 bp, Homo sapien
tacaaggtttttggaccacaggaga

SEQ ID NO: 1171572 - DNA, 25 bp, Homo sapien
aatggttctttgcaatcaggatccc

SEQ ID NO: 1171573 - DNA, 25 bp, Homo sapien
ggacctgggacctgcatagatctag

SEQ ID NO: 1171574 - DNA, 25 bp, Homo sapien
tgaaaaccattgtgggcagggcacg

SEQ ID NO: 1171575 - DNA, 25 bp, Homo sapien
tgttgaaaaccattgtgggcagggc

SEQ ID NO: 1171576 - DNA, 25 bp, Homo sapien
ttagctgttgaaaaccattgtgggc

SEQ ID NO: 1171577 - DNA, 25 bp, Homo sapien
tttttagctgttgaaaaccattgtg

SEQ ID NO: 1171578 - DNA, 25 bp, Homo sapien
ccagcacagaaagtcgaggcacaga

SEQ ID NO: 1171579 - DNA, 25 bp, Homo sapien
taaggactctgacagcatggaggac

SEQ ID NO: 1171580 - DNA, 25 bp, Homo sapien
tcatcagatgatgagcgggccctag

SEQ ID NO: 1171581 - DNA, 25 bp, Homo sapien
tgatgaaaatcgagtccatgaccgc

SEQ ID NO: 1171582 - DNA, 25 bp, Homo sapien
aacaccactgtgattggcgcatgga

SEQ ID NO: 1171583 - DNA, 25 bp, Homo sapien
aaggcatagttatgtaacaccactg

SEQ ID NO: 1171584 - DNA, 25 bp, Homo sapien
tcatgccctttcgtagtcagtttca

SEQ ID NO: 1171585 - DNA, 25 bp, Homo sapien
tgcattcgctctttttaggccacgt

SEQ ID NO: 1171586 - DNA, 25 bp, Homo sapien
accttcctaacatgtcggcttggat

SEQ ID NO: 1171587 - DNA, 25 bp, Homo sapien
tctgggcgccagactaagaacttgt

SEQ ID NO: 1171588 - DNA, 25 bp, Homo sapien
tcttctctaagggtaggtattcctc

SEQ ID NO: 1171589 - DNA, 25 bp, Homo sapien
taccagcgtcacttagacgtcagcc

SEQ ID NO: 1171590 - DNA, 25 bp, Homo sapien
tggctactatgtacaaacaggctct

SEQ ID NO: 1171591 - DNA, 25 bp, Homo sapien
cattgctgagtggtaaagaggtcca

SEQ ID NO: 1171592 - DNA, 25 bp, Homo sapien
aagaagatattaacggagctctctg

SEQ ID NO: 1171593 - DNA, 25 bp, Homo sapien
tcctgggtagattgtcttactgcag

SEQ ID NO: 1171594 - DNA, 25 bp, Homo sapien
tctctacctctgtaggacatagttc

SEQ ID NO: 1171595 - DNA, 25 bp, Homo sapien
gtcagaaaaggaggctacttgctct

SEQ ID NO: 1171596 - DNA, 25 bp, Homo sapien
gctgtttaccctcacctatttggaa

SEQ ID NO: 1171597 - DNA, 25 bp, Homo sapien
gccagtgagttttagattagcttta

SEQ ID NO: 1171598 - DNA, 25 bp, Homo sapien
ttccggagtcggttgttgtcttgtg

SEQ ID NO: 1171599 - DNA, 25 bp, Homo sapien
gatatcttagaacggtcccatttgg

SEQ ID NO: 1171600 - DNA, 25 bp, Homo sapien
gcggaggtccaagaattccggagtc

SEQ ID NO: 1171601 - DNA, 25 bp, Homo sapien
tccctgttagttggaaagcatctgg

SEQ ID NO: 1171602 - DNA, 25 bp, Homo sapien
cttagattgagggacacggctcgcc

SEQ ID NO: 1171603 - DNA, 25 bp, Homo sapien
tcatcgctgggagtactggttgccc

SEQ ID NO: 1171604 - DNA, 25 bp, Homo sapien
tgacccgtatcccaagctcttagcg

SEQ ID NO: 1171605 - DNA, 25 bp, Homo sapien
ccgctagcagaaggatgacccaaga

SEQ ID NO: 1171606 - DNA, 25 bp, Homo sapien
tatcacaagataagcaagcccgaag

SEQ ID NO: 1171607 - DNA, 25 bp, Homo sapien
caactttgcctcttcggtaatgcgc

SEQ ID NO: 1171608 - DNA, 25 bp, Homo sapien
tgggtagcccctaactcgcatttgt

SEQ ID NO: 1171609 - DNA, 25 bp, Homo sapien
tctcgagcacatcgtcgcaaacggg

SEQ ID NO: 1171610 - DNA, 25 bp, Homo sapien
caatcattgctcgttccagtgttca

SEQ ID NO: 1171611 - DNA, 25 bp, Homo sapien
aatgggcctcgatagtatagaaacc

SEQ ID NO: 1171612 - DNA, 25 bp, Homo sapien
taggtgtcataacgaaacagagtac

SEQ ID NO: 1171613 - DNA, 25 bp, Homo sapien
agcctggcagctgggagtaatcctc

SEQ ID NO: 1171614 - DNA, 25 bp, Homo sapien
gatcatgtagggtcctccttagagg

SEQ ID NO: 1171615 - DNA, 25 bp, Homo sapien
tagttacaatagtcaagagctgcct

SEQ ID NO: 1171616 - DNA, 25 bp, Homo sapien
tgtgctgtagccctcttctaggtgt

SEQ ID NO: 1171617 - DNA, 25 bp, Homo sapien
cctagggctgggacatgctttgact

SEQ ID NO: 1171618 - DNA, 25 bp, Homo sapien
tccatggcttcctagcattcttagg

SEQ ID NO: 1171619 - DNA, 25 bp, Homo sapien
gaataaccagagtgaacatcttcaa

SEQ ID NO: 1171620 - DNA, 25 bp, Homo sapien
cagagtacatcctgaatcctaccaa

SEQ ID NO: 1171621 - DNA, 25 bp, Homo sapien
taagtccgtaagtgatctggctccc

SEQ ID NO: 1171622 - DNA, 25 bp, Homo sapien
tatgcagaagtttttgacttgggaa

SEQ ID NO: 1171623 - DNA, 25 bp, Homo sapien
cagggtctgagttggcattgatacc

SEQ ID NO: 1171624 - DNA, 25 bp, Homo sapien
ttacagggtctgagttggcattgat

SEQ ID NO: 1171625 - DNA, 25 bp, Homo sapien
tgcagaagtttttgacttgggaaac

SEQ ID NO: 1171626 - DNA, 25 bp, Homo sapien
caaactatgtatggtaaaggaccag

SEQ ID NO: 1171627 - DNA, 25 bp, Homo sapien
ttatggtactctagggcagtctttc

SEQ ID NO: 1171628 - DNA, 25 bp, Homo sapien
tgcattcctattgcccatgacaggt

SEQ ID NO: 1171629 - DNA, 25 bp, Homo sapien
tgccgacccggcaagtttgacagca

SEQ ID NO: 1171630 - DNA, 25 bp, Homo sapien
gctcaagctgtgataaagaagggcc

SEQ ID NO: 1171631 - DNA, 25 bp, Homo sapien
tcagtctgcacctcagttggcaaag

SEQ ID NO: 1171632 - DNA, 25 bp, Homo sapien
cacaatattgtaatgctgggttcca

SEQ ID NO: 1171633 - DNA, 25 bp, Homo sapien
caatgctgtgtgatatgggtgaacc

SEQ ID NO: 1171634 - DNA, 25 bp, Homo sapien
ggtccggatggtggatgtttccgca

SEQ ID NO: 1171635 - DNA, 25 bp, Homo sapien
cggatggtggatgtttccgcaggac

SEQ ID NO: 1171636 - DNA, 25 bp, Homo sapien
tggtggatgtttccgcaggacggcg

SEQ ID NO: 1171637 - DNA, 25 bp, Homo sapien
ggatgtttccgcaggacggcgtttc

SEQ ID NO: 1171638 - DNA, 25 bp, Homo sapien
gggttaagtgaacctgagatattag

SEQ ID NO: 1171639 - DNA, 25 bp, Homo sapien
aacctgagatattagggacgggcag

SEQ ID NO: 1171640 - DNA, 25 bp, Homo sapien
taaatgggggcggagagtctgaccc

SEQ ID NO: 1171641 - DNA, 25 bp, Homo sapien
taagtgaacctgagatattagggac

SEQ ID NO: 1171642 - DNA, 25 bp, Homo sapien
gcccatagtgggaaaggcccgaaga

SEQ ID NO: 1171643 - DNA, 25 bp, Homo sapien
gcttctggaaagtaagagcccatag

SEQ ID NO: 1171644 - DNA, 25 bp, Homo sapien
tgtcggcaccgaggaggtcccgcct

SEQ ID NO: 1171645 - DNA, 25 bp, Homo sapien
tacggcaagtcggaggtagcaagat

SEQ ID NO: 1171646 - DNA, 25 bp, Homo sapien
tacattctgacatctgaatagaaca

SEQ ID NO: 1171647 - DNA, 25 bp, Homo sapien
aagggacgtctagagttacctctat

SEQ ID NO: 1171648 - DNA, 25 bp, Homo sapien
tctgagcattccccgtgttcactca

SEQ ID NO: 1171649 - DNA, 25 bp, Homo sapien
gtctagagttacctctatctgagca

SEQ ID NO: 1171650 - DNA, 25 bp, Homo sapien
tctttcctgtcaactagaaaggagc

SEQ ID NO: 1171651 - DNA, 25 bp, Homo sapien
aaatacattttggtgtgactaggcc

SEQ ID NO: 1171652 - DNA, 25 bp, Homo sapien
taaatttcaaggcaggtaccctctg

SEQ ID NO: 1171653 - DNA, 25 bp, Homo sapien
tagtaaatcccttcagtatttatcc

SEQ ID NO: 1171654 - DNA, 25 bp, Homo sapien
tgttcctacagacatacgcccgagg

SEQ ID NO: 1171655 - DNA, 25 bp, Homo sapien
tatggctatcctaatcgcaactggt

SEQ ID NO: 1171656 - DNA, 25 bp, Homo sapien
tagctttttatgcagcagggccaaa

SEQ ID NO: 1171657 - DNA, 25 bp, Homo sapien
cagagctagggtttcccagtagaaa

SEQ ID NO: 1171658 - DNA, 25 bp, Homo sapien
ttcccgtgagtaagagcctaaacag

SEQ ID NO: 1171659 - DNA, 25 bp, Homo sapien
taattccggtatgtgggtataggca

SEQ ID NO: 1171660 - DNA, 25 bp, Homo sapien
gcctgatgccctgtacacattgtag

SEQ ID NO: 1171661 - DNA, 25 bp, Homo sapien
tagcaaagcgctcaggaagaaattc

SEQ ID NO: 1171662 - DNA, 25 bp, Homo sapien
tgcagatatctgaagactcaccggg

SEQ ID NO: 1171663 - DNA, 25 bp, Homo sapien
caaggttctcagcacggatggatac

SEQ ID NO: 1171664 - DNA, 25 bp, Homo sapien
gcaagtgagcaaaagagggcacccc

SEQ ID NO: 1171665 - DNA, 25 bp, Homo sapien
ggtagctagtttcccttacagcaag

SEQ ID NO: 1171666 - DNA, 25 bp, Homo sapien
tgctatcagcgtaccaaaaactttg

SEQ ID NO: 1171667 - DNA, 25 bp, Homo sapien
cactggatgacaagaactgctggga

SEQ ID NO: 1171668 - DNA, 25 bp, Homo sapien
tctggaagcagccaaagcactggat

SEQ ID NO: 1171669 - DNA, 25 bp, Homo sapien
gatgatgaagattggtgaggccctc

SEQ ID NO: 1171670 - DNA, 25 bp, Homo sapien
aattaccctcatgagaggcttatca

SEQ ID NO: 1171671 - DNA, 25 bp, Homo sapien
tgcaagatctgtagtgatatcccct

SEQ ID NO: 1171672 - DNA, 25 bp, Homo sapien
cagtttctcctaatatatgcatgta

SEQ ID NO: 1171673 - DNA, 25 bp, Homo sapien
taaaggagttacctgtccataatca

SEQ ID NO: 1171674 - DNA, 25 bp, Homo sapien
tgacagccgtttgggtcgctcgaaa

SEQ ID NO: 1171675 - DNA, 25 bp, Homo sapien
taataggtccagcacaagataaagc

SEQ ID NO: 1171676 - DNA, 25 bp, Homo sapien
cccgggcagccgtgattctcatgta

SEQ ID NO: 1171677 - DNA, 25 bp, Homo sapien
gaagggaaacgatcctcaggcctga

SEQ ID NO: 1171678 - DNA, 25 bp, Homo sapien
taaaacagataaggcccctgtctga

SEQ ID NO: 1171679 - DNA, 25 bp, Homo sapien
tattttgaggagtatgaacatagaa

SEQ ID NO: 1171680 - DNA, 25 bp, Homo sapien
cctgtctgaaggagctcatatttgt

SEQ ID NO: 1171681 - DNA, 25 bp, Homo sapien
gctctggagatacagcggtgactaa

SEQ ID NO: 1171682 - DNA, 25 bp, Homo sapien
cagcttgcttctataccactgtttt

SEQ ID NO: 1171683 - DNA, 25 bp, Homo sapien
ccagcttgcttctataccactgttt

SEQ ID NO: 1171684 - DNA, 25 bp, Homo sapien
agcggcctcgggtaagcagaacctc

SEQ ID NO: 1171685 - DNA, 25 bp, Homo sapien
cagcggcctcgggtaagcagaacct

SEQ ID NO: 1171686 - DNA, 25 bp, Homo sapien
aatgaattcattggaacgccctgtc

SEQ ID NO: 1171687 - DNA, 25 bp, Homo sapien
gaatgaattcattggaacgccctgt

SEQ ID NO: 1171688 - DNA, 25 bp, Homo sapien
ccaattcgcaagttattatgaacgc

SEQ ID NO: 1171689 - DNA, 25 bp, Homo sapien
atttaagagtagcttgaagttaagg

SEQ ID NO: 1171690 - DNA, 25 bp, Homo sapien
cagttatcttgacttcaacccgata

SEQ ID NO: 1171691 - DNA, 25 bp, Homo sapien
tactctctccttatcagttatcttg

SEQ ID NO: 1171692 - DNA, 25 bp, Homo sapien
tgtaaattgcagttaggcctattag

SEQ ID NO: 1171693 - DNA, 25 bp, Homo sapien
gccattttcattcgtttcaagcaat

SEQ ID NO: 1171694 - DNA, 25 bp, Homo sapien
tatagtttattctggagagtgttcc

SEQ ID NO: 1171695 - DNA, 25 bp, Homo sapien
ttgtggcctaaagtatagtttattc

SEQ ID NO: 1171696 - DNA, 25 bp, Homo sapien
tgccaacaggaggagctagacacag

SEQ ID NO: 1171697 - DNA, 25 bp, Homo sapien
gatgggcttggatcccaattcatgc

SEQ ID NO: 1171698 - DNA, 25 bp, Homo sapien
tactctcccagtaaccttgctatgg

SEQ ID NO: 1171699 - DNA, 25 bp, Homo sapien
ttcatgctattccagctgatcaggg

SEQ ID NO: 1171700 - DNA, 25 bp, Homo sapien
gatgatcagaccatccgagtgtgga

SEQ ID NO: 1171701 - DNA, 25 bp, Homo sapien
tctcaaatggactatgtcggctgat

SEQ ID NO: 1171702 - DNA, 25 bp, Homo sapien
cctggattctgagtgcctccgatga

SEQ ID NO: 1171703 - DNA, 25 bp, Homo sapien
gcagagggctcgaaaagagtcttca

SEQ ID NO: 1171704 - DNA, 25 bp, Homo sapien
cgcagaacttaggtgatgggagtaa

SEQ ID NO: 1171705 - DNA, 25 bp, Homo sapien
ctagtttttaggcaccacatcctgg

SEQ ID NO: 1171706 - DNA, 25 bp, Homo sapien
tatatattgtgattataccgcagaa

SEQ ID NO: 1171707 - DNA, 25 bp, Homo sapien
cacctgacagatctcaaaagcccat

SEQ ID NO: 1171708 - DNA, 25 bp, Homo sapien
gagcctaagagaccggaagttcgtg

SEQ ID NO: 1171709 - DNA, 25 bp, Homo sapien
ctgtggcccggagcctaagagaccg

SEQ ID NO: 1171710 - DNA, 25 bp, Homo sapien
agagaccggaagttcgtgtttccag

SEQ ID NO: 1171711 - DNA, 25 bp, Homo sapien
tggcccggagcctaagagaccggaa

SEQ ID NO: 1171712 - DNA, 25 bp, Homo sapien
tctgctgagcggaagcccccgttcg

SEQ ID NO: 1171713 - DNA, 25 bp, Homo sapien
cccgttcggctcctgtctgttagcg

SEQ ID NO: 1171714 - DNA, 25 bp, Homo sapien
cgttcggctcctgtctgttagcggc

SEQ ID NO: 1171715 - DNA, 25 bp, Homo sapien
tcctgtctgttagcggcctctctag

SEQ ID NO: 1171716 - DNA, 25 bp, Homo sapien
cttcccgggtcagccccagagccac

SEQ ID NO: 1171717 - DNA, 25 bp, Homo sapien
gacttcccgggtcagccccagagcc

SEQ ID NO: 1171718 - DNA, 25 bp, Homo sapien
acttcccgggtcagccccagagcca

SEQ ID NO: 1171719 - DNA, 25 bp, Homo sapien
ctgctagtaggacgcagaaagacag

SEQ ID NO: 1171720 - DNA, 25 bp, Homo sapien
tagagaagggagtgaagcgacacga

SEQ ID NO: 1171721 - DNA, 25 bp, Homo sapien
gagagggtcaggctcgaagtccagg

SEQ ID NO: 1171722 - DNA, 25 bp, Homo sapien
ggttgtgggaaaaacgagacatctg

SEQ ID NO: 1171723 - DNA, 25 bp, Homo sapien
cgagacatctggacaaagtgggaga

SEQ ID NO: 1171724 - DNA, 25 bp, Homo sapien
ctcaaaaagtctaaacgcgaggaag

SEQ ID NO: 1171725 - DNA, 25 bp, Homo sapien
tctaaacgcgaggaagaaagctaac

SEQ ID NO: 1171726 - DNA, 25 bp, Homo sapien
ttttaagcgccgcacagcacccaca

SEQ ID NO: 1171727 - DNA, 25 bp, Homo sapien
aacaagattgctttcgtctcaaaaa

SEQ ID NO: 1171728 - DNA, 25 bp, Homo sapien
tgggcacacacttatcgtaacagat

SEQ ID NO: 1171729 - DNA, 25 bp, Homo sapien
caaagtccatgtagcgccattgaca

SEQ ID NO: 1171730 - DNA, 25 bp, Homo sapien
tatgtgcctcaaagggttattacaa

SEQ ID NO: 1171731 - DNA, 25 bp, Homo sapien
gatacatgttctacatggcacccag

SEQ ID NO: 1171732 - DNA, 25 bp, Homo sapien
tttctaaaatgagattaaagtccat

SEQ ID NO: 1171733 - DNA, 25 bp, Homo sapien
taaggggatatatatcttcctctcc

SEQ ID NO: 1171734 - DNA, 25 bp, Homo sapien
caatctgatgagtggcgttgagcag

SEQ ID NO: 1171735 - DNA, 25 bp, Homo sapien
cgttgagcaggcgaacacagggagc

SEQ ID NO: 1171736 - DNA, 25 bp, Homo sapien
cacagggagctgttttatttaaggg

SEQ ID NO: 1171737 - DNA, 25 bp, Homo sapien
gacagacggttatctgtaactgcct

SEQ ID NO: 1171738 - DNA, 25 bp, Homo sapien
ttatcttgcctagcttgacagacgg

SEQ ID NO: 1171739 - DNA, 25 bp, Homo sapien
tgttacttagtatctagggcacaga

SEQ ID NO: 1171740 - DNA, 25 bp, Homo sapien
gtctctcagcttagtgctcgggcca

SEQ ID NO: 1171741 - DNA, 25 bp, Homo sapien
tctgtcacctatactggagtatggt

SEQ ID NO: 1171742 - DNA, 25 bp, Homo sapien
ctctgtcacctatactggagtatgg

SEQ ID NO: 1171743 - DNA, 25 bp, Homo sapien
cactctgtcacctatactggagtat

SEQ ID NO: 1171744 - DNA, 25 bp, Homo sapien
gtcacctatactggagtatggtggc

SEQ ID NO: 1171745 - DNA, 25 bp, Homo sapien
attaaagctcccatagttaacaatt

SEQ ID NO: 1171746 - DNA, 25 bp, Homo sapien
tcctctttctctactacgtggataa

SEQ ID NO: 1171747 - DNA, 25 bp, Homo sapien
catcagtcaatacccactgtaggtc

SEQ ID NO: 1171748 - DNA, 25 bp, Homo sapien
gtggataacccctgtgtctccacta

SEQ ID NO: 1171749 - DNA, 25 bp, Homo sapien
cttgctctccagcagaaccatgtaa

SEQ ID NO: 1171750 - DNA, 25 bp, Homo sapien
aaggaattccatgaaggaacacagg

SEQ ID NO: 1171751 - DNA, 25 bp, Homo sapien
caggaaggtatcagacagcctgaca

SEQ ID NO: 1171752 - DNA, 25 bp, Homo sapien
aacacaggaaggtatcagacagcct

SEQ ID NO: 1171753 - DNA, 25 bp, Homo sapien
aggtatcagacagcctgacattctg

SEQ ID NO: 1171754 - DNA, 25 bp, Homo sapien
caggactgggcttggtcaaggacac

SEQ ID NO: 1171755 - DNA, 25 bp, Homo sapien
actgtacactaggagagaagcctga

SEQ ID NO: 1171756 - DNA, 25 bp, Homo sapien
ggacactgcaagaccagcaattcgg

SEQ ID NO: 1171757 - DNA, 25 bp, Homo sapien
caaacccatcatttgggcactgtac

SEQ ID NO: 1171758 - DNA, 25 bp, Homo sapien
ccaagtacttaggaaccaggtgacg

SEQ ID NO: 1171759 - DNA, 25 bp, Homo sapien
acaccaagtacttaggaaccaggtg

SEQ ID NO: 1171760 - DNA, 25 bp, Homo sapien
caccaagtacttaggaaccaggtga

SEQ ID NO: 1171761 - DNA, 25 bp, Homo sapien
actctggcccataggaattggagta

SEQ ID NO: 1171762 - DNA, 25 bp, Homo sapien
gtcttcataagccaaaccattgccc

SEQ ID NO: 1171763 - DNA, 25 bp, Homo sapien
gggaaactaaagtcttcataagcca

SEQ ID NO: 1171764 - DNA, 25 bp, Homo sapien
cattgcccagcgaattccactgtat

SEQ ID NO: 1171765 - DNA, 25 bp, Homo sapien
tttctaactggaattgctaggagct

SEQ ID NO: 1171766 - DNA, 25 bp, Homo sapien
taactggaattgctaggagctggca

SEQ ID NO: 1171767 - DNA, 25 bp, Homo sapien
taatcttctttctaactggaattgc

SEQ ID NO: 1171768 - DNA, 25 bp, Homo sapien
cttctttctaactggaattgctagg

SEQ ID NO: 1171769 - DNA, 25 bp, Homo sapien
cccttttcggagacatttatccctg

SEQ ID NO: 1171770 - DNA, 25 bp, Homo sapien
gccacacccttttcggagacattta

SEQ ID NO: 1171771 - DNA, 25 bp, Homo sapien
ttttcggagacatttatccctgagc

SEQ ID NO: 1171772 - DNA, 25 bp, Homo sapien
ggatggagccacacccttttcggag

SEQ ID NO: 1171773 - DNA, 25 bp, Homo sapien
tgactcaggttgtgatcttgatagc

SEQ ID NO: 1171774 - DNA, 25 bp, Homo sapien
ctgcatggcacatagtgggaaggtt

SEQ ID NO: 1171775 - DNA, 25 bp, Homo sapien
ggtgctgagccattctgactcaggt

SEQ ID NO: 1171776 - DNA, 25 bp, Homo sapien
tgagccattctgactcaggttgtga

SEQ ID NO: 1171777 - DNA, 25 bp, Homo sapien
gagctgcgccgcatgcaggtggcag

SEQ ID NO: 1171778 - DNA, 25 bp, Homo sapien
tgatgctgaaggtgctttggatgga

SEQ ID NO: 1171779 - DNA, 25 bp, Homo sapien
gctgatgacagcatgcatgtgtgaa

SEQ ID NO: 1171780 - DNA, 25 bp, Homo sapien
aaggtgctttggatggagctgcgcc

SEQ ID NO: 1171781 - DNA, 25 bp, Homo sapien
tgagagatcaacaaggctaaaggag

SEQ ID NO: 1171782 - DNA, 25 bp, Homo sapien
tcaacaaggctaaaggagaaggtag

SEQ ID NO: 1171783 - DNA, 25 bp, Homo sapien
caaacaatgagagatcaacaaggct

SEQ ID NO: 1171784 - DNA, 25 bp, Homo sapien
agcaggacacaaacaatgagagatc

SEQ ID NO: 1171785 - DNA, 25 bp, Homo sapien
caggctttaatgtcccagttgtatt

SEQ ID NO: 1171786 - DNA, 25 bp, Homo sapien
tataggctttagcatgctccacaca

SEQ ID NO: 1171787 - DNA, 25 bp, Homo sapien
cctgtcgtcaggctttaatgtccca

SEQ ID NO: 1171788 - DNA, 25 bp, Homo sapien
ctccacacattgtaatcagacaggg

SEQ ID NO: 1171789 - DNA, 25 bp, Homo sapien
ccactgcgctttcagcccctggggc

SEQ ID NO: 1171790 - DNA, 25 bp, Homo sapien
actgcgctttcagcccctggggcca

SEQ ID NO: 1171791 - DNA, 25 bp, Homo sapien
tgggtgacaaaggaagccactgcgc

SEQ ID NO: 1171792 - DNA, 25 bp, Homo sapien
caaacatgacattgcggggcagggt

SEQ ID NO: 1171793 - DNA, 25 bp, Homo sapien
taactgcacgggaaacttgcccttc

SEQ ID NO: 1171794 - DNA, 25 bp, Homo sapien
ttgcccttctccatatcgtagacca

SEQ ID NO: 1171795 - DNA, 25 bp, Homo sapien
gtagaccatcctcgagctgccaatg

SEQ ID NO: 1171796 - DNA, 25 bp, Homo sapien
gctccacaaatgagtcaacattctc

SEQ ID NO: 1171797 - DNA, 25 bp, Homo sapien
ctggttccgtacagactcatttttc

SEQ ID NO: 1171798 - DNA, 25 bp, Homo sapien
ggcaggggttggggtctggattctg

SEQ ID NO: 1171799 - DNA, 25 bp, Homo sapien
ctgggggttggtggaaacagggcag

SEQ ID NO: 1171800 - DNA, 25 bp, Homo sapien
caggggttggggtctggattctgag

SEQ ID NO: 1171801 - DNA, 25 bp, Homo sapien
acagggcaggggttggggtctggat

SEQ ID NO: 1171802 - DNA, 25 bp, Homo sapien
tgttcatcctttggccaacacccaa

SEQ ID NO: 1171803 - DNA, 25 bp, Homo sapien
ccagtccagggaaccaatggaatgt

SEQ ID NO: 1171804 - DNA, 25 bp, Homo sapien
tgatcagagaactacccagtccagg

SEQ ID NO: 1171805 - DNA, 25 bp, Homo sapien
cagtggtagtctgctaggcaacaaa

SEQ ID NO: 1171806 - DNA, 25 bp, Homo sapien
gcctgaaatgctctatacttcaagt

SEQ ID NO: 1171807 - DNA, 25 bp, Homo sapien
ctgaaatgctctatacttcaagttc

SEQ ID NO: 1171808 - DNA, 25 bp, Homo sapien
gaaatgctctatacttcaagttccc

SEQ ID NO: 1171809 - DNA, 25 bp, Homo sapien
atgctctatacttcaagttccctgc

SEQ ID NO: 1171810 - DNA, 25 bp, Homo sapien
ggtacgagggagattaactgatggg

SEQ ID NO: 1171811 - DNA, 25 bp, Homo sapien
ggggtacgagggagattaactgatg

SEQ ID NO: 1171812 - DNA, 25 bp, Homo sapien
acgagggagattaactgatgggagg

SEQ ID NO: 1171813 - DNA, 25 bp, Homo sapien
tacgagggagattaactgatgggag

SEQ ID NO: 1171814 - DNA, 25 bp, Homo sapien
caccagagtggtcagccagaacaac

SEQ ID NO: 1171815 - DNA, 25 bp, Homo sapien
tcagccagaacaacgccagagatgt

SEQ ID NO: 1171816 - DNA, 25 bp, Homo sapien
cgccagagatgtttcgagctcgaag

SEQ ID NO: 1171817 - DNA, 25 bp, Homo sapien
tcgaagaaatcgctgcagggaagat

SEQ ID NO: 1171818 - DNA, 25 bp, Homo sapien
tcccagactgcagaatagactctct

SEQ ID NO: 1171819 - DNA, 25 bp, Homo sapien
gcagaatagactctcttcaagaatg

SEQ ID NO: 1171820 - DNA, 25 bp, Homo sapien
gactgcagaatagactctcttcaag

SEQ ID NO: 1171821 - DNA, 25 bp, Homo sapien
gggtgcagggccaagtgattcttac

SEQ ID NO: 1171822 - DNA, 25 bp, Homo sapien
tgtctgttacaaagttcaggtcctc

SEQ ID NO: 1171823 - DNA, 25 bp, Homo sapien
tcagcagtgtcgtaaatactctggt

SEQ ID NO: 1171824 - DNA, 25 bp, Homo sapien
agggctcagccattcgggatagctc

SEQ ID NO: 1171825 - DNA, 25 bp, Homo sapien
gctcacattaatgttctcagcagtg

SEQ ID NO: 1171826 - DNA, 25 bp, Homo sapien
gaactgtgtcgctgaagttggttcc

SEQ ID NO: 1171827 - DNA, 25 bp, Homo sapien
gggatcagcctgaactgtgtcgctg

SEQ ID NO: 1171828 - DNA, 25 bp, Homo sapien
atacagagcacgtcccagcaccgtg

SEQ ID NO: 1171829 - DNA, 25 bp, Homo sapien
tcctcctgcaagctcatacagagca

SEQ ID NO: 1171830 - DNA, 25 bp, Homo sapien
ccaagtaggaccttaggtcctgcct

SEQ ID NO: 1171831 - DNA, 25 bp, Homo sapien
taatcaggaacccatagagcaggcg

SEQ ID NO: 1171832 - DNA, 25 bp, Homo sapien
gaggatagactggaaccatgagttg

SEQ ID NO: 1171833 - DNA, 25 bp, Homo sapien
tggaaccatgagttgttggctttaa

SEQ ID NO: 1171834 - DNA, 25 bp, Homo sapien
gatgtaatgttgaagaggcccgtca

SEQ ID NO: 1171835 - DNA, 25 bp, Homo sapien
ggcatactgtacaacataagtggtg

SEQ ID NO: 1171836 - DNA, 25 bp, Homo sapien
ggatcctggcactgctctcgggtga

SEQ ID NO: 1171837 - DNA, 25 bp, Homo sapien
ttcacttgggactttacttggatcc

SEQ ID NO: 1171838 - DNA, 25 bp, Homo sapien
cccaattgctgaggactgcatctct

SEQ ID NO: 1171839 - DNA, 25 bp, Homo sapien
cttttcaacacccaattgctgagga

SEQ ID NO: 1171840 - DNA, 25 bp, Homo sapien
taactaggtctagaagaacctccaa

SEQ ID NO: 1171841 - DNA, 25 bp, Homo sapien
atcccaatcccctgggtctaactag

SEQ ID NO: 1171842 - DNA, 25 bp, Homo sapien
ctatcagtgccatgctctaaccaat

SEQ ID NO: 1171843 - DNA, 25 bp, Homo sapien
taaccaattgagctaactggctgct

SEQ ID NO: 1171844 - DNA, 25 bp, Homo sapien
cacaacacacggctagggtgatcct

SEQ ID NO: 1171845 - DNA, 25 bp, Homo sapien
ctgcacagaagatgcgccacaacac

SEQ ID NO: 1171846 - DNA, 25 bp, Homo sapien
tgctggcgatgagaaatatccgggc

SEQ ID NO: 1171847 - DNA, 25 bp, Homo sapien
tccgggcacggatatctttccagcg

SEQ ID NO: 1171848 - DNA, 25 bp, Homo sapien
ttccagcggctctcagtccatgtag

SEQ ID NO: 1171849 - DNA, 25 bp, Homo sapien
caaggccctggctaatcgtgcagta

SEQ ID NO: 1171850 - DNA, 25 bp, Homo sapien
catgggaattcggatgctggctcta

SEQ ID NO: 1171851 - DNA, 25 bp, Homo sapien
gcattttgaaaggagggcccatggc

SEQ ID NO: 1171852 - DNA, 25 bp, Homo sapien
gctggctctaagcaccaactatgga

SEQ ID NO: 1171853 - DNA, 25 bp, Homo sapien
tgacttgtgacaggagctcggtaca

SEQ ID NO: 1171854 - DNA, 25 bp, Homo sapien
tggcattgatgcagtaggtgacgat

SEQ ID NO: 1171855 - DNA, 25 bp, Homo sapien
gctcccggggagcaatgaaaaggac

SEQ ID NO: 1171856 - DNA, 25 bp, Homo sapien
cgaagcccactgtcagggtgatcaa

SEQ ID NO: 1171857 - DNA, 25 bp, Homo sapien
gatgaggatgccgaagcccactgtc

SEQ ID NO: 1171858 - DNA, 25 bp, Homo sapien
gcccagggaggttccagtgacaaat

SEQ ID NO: 1171859 - DNA, 25 bp, Homo sapien
caaattagtggttgtgtcccagtgg

SEQ ID NO: 1171860 - DNA, 25 bp, Homo sapien
cccagtgggacagatgctctaggaa

SEQ ID NO: 1171861 - DNA, 25 bp, Homo sapien
tgttaatcccaatctgagacaggcc

SEQ ID NO: 1171862 - DNA, 25 bp, Homo sapien
ccagcaagctatggttaagtgccat

SEQ ID NO: 1171863 - DNA, 25 bp, Homo sapien
tagcgtggcatggctgtacaggctc

SEQ ID NO: 1171864 - DNA, 25 bp, Homo sapien
tgaccagctttctagactctcaggg

SEQ ID NO: 1171865 - DNA, 25 bp, Homo sapien
caaggctcatccgtctgcaaagtta

SEQ ID NO: 1171866 - DNA, 25 bp, Homo sapien
gggcagcgttgacagccccagtctc

SEQ ID NO: 1171867 - DNA, 25 bp, Homo sapien
tccagaacatataaataaatcctac

SEQ ID NO: 1171868 - DNA, 25 bp, Homo sapien
tgccctgtgagatcaggatcccctc

SEQ ID NO: 1171869 - DNA, 25 bp, Homo sapien
gccactgagctctagaagtcactgc

SEQ ID NO: 1171870 - DNA, 25 bp, Homo sapien
tgagctctagaagtcactgccactt

SEQ ID NO: 1171871 - DNA, 25 bp, Homo sapien
ctgccctgtgagatcaggatcccct

SEQ ID NO: 1171872 - DNA, 25 bp, Homo sapien
tcactgaagcccgactcagtctctg

SEQ ID NO: 1171873 - DNA, 25 bp, Homo sapien
cactgaagcccgactcagtctctga

SEQ ID NO: 1171874 - DNA, 25 bp, Homo sapien
actgaagcccgactcagtctctgag

SEQ ID NO: 1171875 - DNA, 25 bp, Homo sapien
agtcactgaagcccgactcagtctc

SEQ ID NO: 1171876 - DNA, 25 bp, Homo sapien
ctgcaggtctttccggccaggctct

SEQ ID NO: 1171877 - DNA, 25 bp, Homo sapien
agatgctgcaggtctttccggccag

SEQ ID NO: 1171878 - DNA, 25 bp, Homo sapien
gctcctcgcggctcagatgctgcag

SEQ ID NO: 1171879 - DNA, 25 bp, Homo sapien
tctcccggctctgggcctcgggcct

SEQ ID NO: 1171880 - DNA, 25 bp, Homo sapien
ttccacgcggatgcgttctcgcgtg

SEQ ID NO: 1171881 - DNA, 25 bp, Homo sapien
tgcgttctcgcgtggcgtgggccgt

SEQ ID NO: 1171882 - DNA, 25 bp, Homo sapien
tcaggtaggagatatagcagatggc

SEQ ID NO: 1171883 - DNA, 25 bp, Homo sapien
gggcagcgtaggcagcagcttgcgc

SEQ ID NO: 1171884 - DNA, 25 bp, Homo sapien
tgtaataagtaagtcctagggccag

SEQ ID NO: 1171885 - DNA, 25 bp, Homo sapien
ttcagagggcaacaattgggcatcc

SEQ ID NO: 1171886 - DNA, 25 bp, Homo sapien
gcctttctaagcagtgagcggtgga

SEQ ID NO: 1171887 - DNA, 25 bp, Homo sapien
tgggcctcagcaataaaccccggaa

SEQ ID NO: 1171888 - DNA, 25 bp, Homo sapien
tctctgacaagtagagaattccaga

SEQ ID NO: 1171889 - DNA, 25 bp, Homo sapien
ccccagtcaggtcatttcttctctt

SEQ ID NO: 1171890 - DNA, 25 bp, Homo sapien
ttgcagaattgcaattccttcgtcc

SEQ ID NO: 1171891 - DNA, 25 bp, Homo sapien
ttcgtcctttgtccccagtcaggtc

SEQ ID NO: 1171892 - DNA, 25 bp, Homo sapien
cagaacaatgtacacatgtacacac

SEQ ID NO: 1171893 - DNA, 25 bp, Homo sapien
tgtacacacacagaattcacatcca

SEQ ID NO: 1171894 - DNA, 25 bp, Homo sapien
gtacacacacagaattcacatccat

SEQ ID NO: 1171895 - DNA, 25 bp, Homo sapien
acatgtacacacacagaattcacat

SEQ ID NO: 1171896 - DNA, 25 bp, Homo sapien
ggtcagatcagaggcttcccaggag

SEQ ID NO: 1171897 - DNA, 25 bp, Homo sapien
gggctggtggggtcagatcagaggc

SEQ ID NO: 1171898 - DNA, 25 bp, Homo sapien
caggagccctgggagttggaccctc

SEQ ID NO: 1171899 - DNA, 25 bp, Homo sapien
cagctcactaggtggaggtggggct

SEQ ID NO: 1171900 - DNA, 25 bp, Homo sapien
gcagtgaccacgaccaggtgtatga

SEQ ID NO: 1171901 - DNA, 25 bp, Homo sapien
accacgaccaggtgtatgagggagt

SEQ ID NO: 1171902 - DNA, 25 bp, Homo sapien
tgaccacgaccaggtgtatgaggga

SEQ ID NO: 1171903 - DNA, 25 bp, Homo sapien
tggcagtgaccacgaccaggtgtat

SEQ ID NO: 1171904 - DNA, 25 bp, Homo sapien
cactcgggtcccgaacggtgggcag

SEQ ID NO: 1171905 - DNA, 25 bp, Homo sapien
ccttcagatgcccagcggccctccc

SEQ ID NO: 1171906 - DNA, 25 bp, Homo sapien
tccgcggtggggctgacactcgggt

SEQ ID NO: 1171907 - DNA, 25 bp, Homo sapien
aatgcctcgattcttggacttggcc

SEQ ID NO: 1171908 - DNA, 25 bp, Homo sapien
ctcccatggcgggaccaaggatcaa

SEQ ID NO: 1171909 - DNA, 25 bp, Homo sapien
tcaggctcccatggcgggaccaagg

SEQ ID NO: 1171910 - DNA, 25 bp, Homo sapien
cgggaccaaggatcaaggaatcaag

SEQ ID NO: 1171911 - DNA, 25 bp, Homo sapien
tggcgggaccaaggatcaaggaatc

SEQ ID NO: 1171912 - DNA, 25 bp, Homo sapien
ggttcttgagtctggtcaccccctg

SEQ ID NO: 1171913 - DNA, 25 bp, Homo sapien
ctccgtcccagaccgctgcctcttc

SEQ ID NO: 1171914 - DNA, 25 bp, Homo sapien
gcgcgcgcgatgggggatgttgagg

SEQ ID NO: 1171915 - DNA, 25 bp, Homo sapien
ctggacaggcagcgcgcgcgatggg

SEQ ID NO: 1171916 - DNA, 25 bp, Homo sapien
tttgtatccgcagcgctccgggtcg

SEQ ID NO: 1171917 - DNA, 25 bp, Homo sapien
gcccgtcgcctttgtatccgcagcg

SEQ ID NO: 1171918 - DNA, 25 bp, Homo sapien
ccgccgctgcgaactgccgggtggg

SEQ ID NO: 1171919 - DNA, 25 bp, Homo sapien
gccgctgcgaactgccgggtgggct

SEQ ID NO: 1171920 - DNA, 25 bp, Homo sapien
tagaatgtgagtaggacttagtccc

SEQ ID NO: 1171921 - DNA, 25 bp, Homo sapien
tctgctgccaaaatctcatcatgca

SEQ ID NO: 1171922 - DNA, 25 bp, Homo sapien
tatccagactacaacagagaaggtg

SEQ ID NO: 1171923 - DNA, 25 bp, Homo sapien
gccacatcaccaagagacaggataa

SEQ ID NO: 1171924 - DNA, 25 bp, Homo sapien
cctttagtgggtccacagcgaatcc

SEQ ID NO: 1171925 - DNA, 25 bp, Homo sapien
ttagtgggtccacagcgaatcccct

SEQ ID NO: 1171926 - DNA, 25 bp, Homo sapien
tttagtgggtccacagcgaatcccc

SEQ ID NO: 1171927 - DNA, 25 bp, Homo sapien
ctcctttagtgggtccacagcgaat

SEQ ID NO: 1171928 - DNA, 25 bp, Homo sapien
gccaaaaatgaacccgacttctgag

SEQ ID NO: 1171929 - DNA, 25 bp, Homo sapien
atgaacccgacttctgagacccttg

SEQ ID NO: 1171930 - DNA, 25 bp, Homo sapien
tgctgtgtcttcaagtacaccaggg

SEQ ID NO: 1171931 - DNA, 25 bp, Homo sapien
gggaactaatccaagcactgctgct

SEQ ID NO: 1171932 - DNA, 25 bp, Homo sapien
agaatgacccaaccccaagccctct

SEQ ID NO: 1171933 - DNA, 25 bp, Homo sapien
caaccccaagccctctggaagggag

SEQ ID NO: 1171934 - DNA, 25 bp, Homo sapien
ccagaatgacccaaccccaagccct

SEQ ID NO: 1171935 - DNA, 25 bp, Homo sapien
tgacccaaccccaagccctctggaa

SEQ ID NO: 1171936 - DNA, 25 bp, Homo sapien
cttgtctcagagaaaatccagcgac

SEQ ID NO: 1171937 - DNA, 25 bp, Homo sapien
tctcagagaaaatccagcgacgctc

SEQ ID NO: 1171938 - DNA, 25 bp, Homo sapien
tgtctcagagaaaatccagcgacgc

SEQ ID NO: 1171939 - DNA, 25 bp, Homo sapien
ttgtctcagagaaaatccagcgacg

SEQ ID NO: 1171940 - DNA, 25 bp, Homo sapien
ggcgtctgaacgccgcgccttgtag

SEQ ID NO: 1171941 - DNA, 25 bp, Homo sapien
caccttcaggaagtcaactgtcacc

SEQ ID NO: 1171942 - DNA, 25 bp, Homo sapien
aggaagtcaactgtcaccctgaggg

SEQ ID NO: 1171943 - DNA, 25 bp, Homo sapien
tctgaacgccgcgccttgtagcgct

SEQ ID NO: 1171944 - DNA, 25 bp, Homo sapien
gagtggcccgacttgtaggaatagc

SEQ ID NO: 1171945 - DNA, 25 bp, Homo sapien
ccgagtactgggactcggtgtccat

SEQ ID NO: 1171946 - DNA, 25 bp, Homo sapien
taggaatagcccgagtactgggact

SEQ ID NO: 1171947 - DNA, 25 bp, Homo sapien
gcccgacttgtaggaatagcccgag

SEQ ID NO: 1171948 - DNA, 25 bp, Homo sapien
tccccgggagcctggattgtcaccg

SEQ ID NO: 1171949 - DNA, 25 bp, Homo sapien
ctcttagagcggtgtcggtcccggc

SEQ ID NO: 1171950 - DNA, 25 bp, Homo sapien
gattgtcaccgacttgtcccctcgg

SEQ ID NO: 1171951 - DNA, 25 bp, Homo sapien
gctcatcccctcgtgtggactcatt

SEQ ID NO: 1171952 - DNA, 25 bp, Homo sapien
tgctcaggcagtgactgggatccaa

SEQ ID NO: 1171953 - DNA, 25 bp, Homo sapien
gggcaaactcgccaagcaaagcagg

SEQ ID NO: 1171954 - DNA, 25 bp, Homo sapien
cttccagaaaccgtgggacctgagc

SEQ ID NO: 1171955 - DNA, 25 bp, Homo sapien
tcaacaaatacgcaaccatcaaagt

SEQ ID NO: 1171956 - DNA, 25 bp, Homo sapien
caggatgcgcacaccatagaagagc

SEQ ID NO: 1171957 - DNA, 25 bp, Homo sapien
gaggtgcccgttactactgtcgtcg

SEQ ID NO: 1171958 - DNA, 25 bp, Homo sapien
tagtgcacgaaaagaagggcgtcca

SEQ ID NO: 1171959 - DNA, 25 bp, Homo sapien
tagaagagccagtaggagaccacga

SEQ ID NO: 1171960 - DNA, 25 bp, Homo sapien
agccaaagatcacctcatccccatt

SEQ ID NO: 1171961 - DNA, 25 bp, Homo sapien
caccatgccaaagcctagcagagaa

SEQ ID NO: 1171962 - DNA, 25 bp, Homo sapien
atgccaaagcctagcagagaaaggg

SEQ ID NO: 1171963 - DNA, 25 bp, Homo sapien
agagaaagggcattgggcctgggtc

SEQ ID NO: 1171964 - DNA, 25 bp, Homo sapien
ccaggacggacttgggcaggttgag

SEQ ID NO: 1171965 - DNA, 25 bp, Homo sapien
ggaatacaccttgaagccagacact

SEQ ID NO: 1171966 - DNA, 25 bp, Homo sapien
gatccacactgccacgcgctggatg

SEQ ID NO: 1171967 - DNA, 25 bp, Homo sapien
gaagtcatggtaatacttctccagg

SEQ ID NO: 1171968 - DNA, 25 bp, Homo sapien
cgctgcaatcacagcccgagactgg

SEQ ID NO: 1171969 - DNA, 25 bp, Homo sapien
ttgcgcacccttcgctcatgctcag

SEQ ID NO: 1171970 - DNA, 25 bp, Homo sapien
tcatagtagtactcattgtgactgt

SEQ ID NO: 1171971 - DNA, 25 bp, Homo sapien
ttgtgactgttgtcccgcctccgag

SEQ ID NO: 1171972 - DNA, 25 bp, Homo sapien
gcttggtggtccgaaggtacttctg

SEQ ID NO: 1171973 - DNA, 25 bp, Homo sapien
tggcacgggccatggatgcaaagat

SEQ ID NO: 1171974 - DNA, 25 bp, Homo sapien
cctgcagccgcttaatgtgagtgaa

SEQ ID NO: 1171975 - DNA, 25 bp, Homo sapien
ctctccatggtgtggtagggctgct

SEQ ID NO: 1171976 - DNA, 25 bp, Homo sapien
tactggatggtaggtccagccgcca

SEQ ID NO: 1171977 - DNA, 25 bp, Homo sapien
ggatccacaaattcctcggagagtt

SEQ ID NO: 1171978 - DNA, 25 bp, Homo sapien
gccgccaagtatcgctccaagaagg

SEQ ID NO: 1171979 - DNA, 25 bp, Homo sapien
gaaaacgatgccatccttgaggccg

SEQ ID NO: 1171980 - DNA, 25 bp, Homo sapien
gaccaatggaggagaagtacgaacc

SEQ ID NO: 1171981 - DNA, 25 bp, Homo sapien
tgagcagatccagcgcatgatggga

SEQ ID NO: 1171982 - DNA, 25 bp, Homo sapien
gacccctgaggcaaagaactggact

SEQ ID NO: 1171983 - DNA, 25 bp, Homo sapien
tcctctctagcatgcggtgggtaaa

SEQ ID NO: 1171984 - DNA, 25 bp, Homo sapien
tgcgcccagccatactcctaatttt

SEQ ID NO: 1171985 - DNA, 25 bp, Homo sapien
aaagtcattccccttacaggatatc

SEQ ID NO: 1171986 - DNA, 25 bp, Homo sapien
cattccccttacaggatatcagagt

SEQ ID NO: 1171987 - DNA, 25 bp, Homo sapien
tccccttacaggatatcagagtaca

SEQ ID NO: 1171988 - DNA, 25 bp, Homo sapien
tcctgggtcatgatgatcacggccc

SEQ ID NO: 1171989 - DNA, 25 bp, Homo sapien
tcacggcccagtattgcgtgaacat

SEQ ID NO: 1171990 - DNA, 25 bp, Homo sapien
atgatcacggcccagtattgcgtga

SEQ ID NO: 1171991 - DNA, 25 bp, Homo sapien
cctcctgggtcatgatgatcacggc

SEQ ID NO: 1171992 - DNA, 25 bp, Homo sapien
atccccaatagggattgcttggtca

SEQ ID NO: 1171993 - DNA, 25 bp, Homo sapien
caatccccaatagggattgcttggt

SEQ ID NO: 1171994 - DNA, 25 bp, Homo sapien
aatccccaatagggattgcttggtc

SEQ ID NO: 1171995 - DNA, 25 bp, Homo sapien
tcaatccccaatagggattgcttgg

SEQ ID NO: 1171996 - DNA, 25 bp, Homo sapien
cctggagtccttagcatagctctca

SEQ ID NO: 1171997 - DNA, 25 bp, Homo sapien
atctagcatatagcaagtgttcaaa

SEQ ID NO: 1171998 - DNA, 25 bp, Homo sapien
tgtttatcaccgtaaccctagcacc

SEQ ID NO: 1171999 - DNA, 25 bp, Homo sapien
cagcattgttggtataattactgat

SEQ ID NO: 1172000 - DNA, 25 bp, Homo sapien
gaactgcactgctacaccaggaacc

SEQ ID NO: 1172001 - DNA, 25 bp, Homo sapien
gctggaactgcactgctacaccagg

SEQ ID NO: 1172002 - DNA, 25 bp, Homo sapien
tggaactgcactgctacaccaggaa

SEQ ID NO: 1172003 - DNA, 25 bp, Homo sapien
ttgctggaactgcactgctacacca

SEQ ID NO: 1172004 - DNA, 25 bp, Homo sapien
aagcctgatcccaccagtaccacac

SEQ ID NO: 1172005 - DNA, 25 bp, Homo sapien
caccagtaccacactagcaagactt

SEQ ID NO: 1172006 - DNA, 25 bp, Homo sapien
tgatcccaccagtaccacactagca

SEQ ID NO: 1172007 - DNA, 25 bp, Homo sapien
taccacactagcaagacttctgaca

SEQ ID NO: 1172008 - DNA, 25 bp, Homo sapien
tacccatgtagaatttcggagtccc

SEQ ID NO: 1172009 - DNA, 25 bp, Homo sapien
gggttgaaattgactgctacccatg

SEQ ID NO: 1172010 - DNA, 25 bp, Homo sapien
gactgctacccatgtagaatttcgg

SEQ ID NO: 1172011 - DNA, 25 bp, Homo sapien
gaatttcggagtccctgtgtagaaa

SEQ ID NO: 1172012 - DNA, 25 bp, Homo sapien
ccgtattccagaagctaggtgtcat

SEQ ID NO: 1172013 - DNA, 25 bp, Homo sapien
gatatattatcccttctacaagtca

SEQ ID NO: 1172014 - DNA, 25 bp, Homo sapien
catggaaattatgctcactagtggc

SEQ ID NO: 1172015 - DNA, 25 bp, Homo sapien
tggcaaatgccactaaccgtattcc

SEQ ID NO: 1172016 - DNA, 25 bp, Homo sapien
cgtccaaagcgaaatatattgccct

SEQ ID NO: 1172017 - DNA, 25 bp, Homo sapien
gactgaatatccctcttgtgcggcc

SEQ ID NO: 1172018 - DNA, 25 bp, Homo sapien
cattgctttatcacgtgttacctgg

SEQ ID NO: 1172019 - DNA, 25 bp, Homo sapien
tctagtcagagaataggtcctgtca

SEQ ID NO: 1172020 - DNA, 25 bp, Homo sapien
caggaagctgaggcaacagaatcac

SEQ ID NO: 1172021 - DNA, 25 bp, Homo sapien
tcacttgaacctgggaggtggaggt

SEQ ID NO: 1172022 - DNA, 25 bp, Homo sapien
ggccaaggttgtgaaaccgcgtctc

SEQ ID NO: 1172023 - DNA, 25 bp, Homo sapien
agcctggccaaggttgtgaaaccgc

SEQ ID NO: 1172024 - DNA, 25 bp, Homo sapien
gagttggcagttcacagtcagtaga

SEQ ID NO: 1172025 - DNA, 25 bp, Homo sapien
cataccagaggtttaaggcaaggcc

SEQ ID NO: 1172026 - DNA, 25 bp, Homo sapien
gattgatgaccaccacacaatgtgg

SEQ ID NO: 1172027 - DNA, 25 bp, Homo sapien
taaatgtgagcactctcgcagggct

SEQ ID NO: 1172028 - DNA, 25 bp, Homo sapien
gattgctctagaagctcagttccca

SEQ ID NO: 1172029 - DNA, 25 bp, Homo sapien
tagctgaattctacctgaaggaagg

SEQ ID NO: 1172030 - DNA, 25 bp, Homo sapien
tctagagaagtcaggaggaacacac

SEQ ID NO: 1172031 - DNA, 25 bp, Homo sapien
tgttctgaagtacaactgggcacag

SEQ ID NO: 1172032 - DNA, 25 bp, Homo sapien
cataggacaaaggtagcagattgct

SEQ ID NO: 1172033 - DNA, 25 bp, Homo sapien
caggaccatggccaacttgtctctc

SEQ ID NO: 1172034 - DNA, 25 bp, Homo sapien
ggacaaaggtagcagattgctttca

SEQ ID NO: 1172035 - DNA, 25 bp, Homo sapien
cagatctagatggactggcagaagc

SEQ ID NO: 1172036 - DNA, 25 bp, Homo sapien
actcgctggcactcactcggtcagg

SEQ ID NO: 1172037 - DNA, 25 bp, Homo sapien
tttagccgttggcacagacttggtg

SEQ ID NO: 1172038 - DNA, 25 bp, Homo sapien
gaggtctcgtctgcccggttgcggt

SEQ ID NO: 1172039 - DNA, 25 bp, Homo sapien
gctcctttctactgactttagccgt

SEQ ID NO: 1172040 - DNA, 25 bp, Homo sapien
ctatgcactgctacacaggggtctg

SEQ ID NO: 1172041 - DNA, 25 bp, Homo sapien
tctcccacagaacttggtggtgttg

SEQ ID NO: 1172042 - DNA, 25 bp, Homo sapien
tatgcactgctacacaggggtctgg

SEQ ID NO: 1172043 - DNA, 25 bp, Homo sapien
tgcactgctacacaggggtctggca

SEQ ID NO: 1172044 - DNA, 25 bp, Homo sapien
gatacatcattggtgggagctgagt

SEQ ID NO: 1172045 - DNA, 25 bp, Homo sapien
tcagcacactactcagtggagagtt

SEQ ID NO: 1172046 - DNA, 25 bp, Homo sapien
accctgaaagccgttacacctgtgc

SEQ ID NO: 1172047 - DNA, 25 bp, Homo sapien
tgctgcaggcatagtcaggcttcac

SEQ ID NO: 1172048 - DNA, 25 bp, Homo sapien
tggtggcagacatgcagattacatg

SEQ ID NO: 1172049 - DNA, 25 bp, Homo sapien
catattttgggtaggtccgctggag

SEQ ID NO: 1172050 - DNA, 25 bp, Homo sapien
tctcacctgcatgcttaagcagaag

SEQ ID NO: 1172051 - DNA, 25 bp, Homo sapien
gctcatgggatatgaaaaagggtaa

SEQ ID NO: 1172052 - DNA, 25 bp, Homo sapien
ctgaattatcaacgaggattttcaa

SEQ ID NO: 1172053 - DNA, 25 bp, Homo sapien
tgagatgagctcttttaactcaagc

SEQ ID NO: 1172054 - DNA, 25 bp, Homo sapien
aactcaagcgaaacttcaaggccag

SEQ ID NO: 1172055 - DNA, 25 bp, Homo sapien
ggacagagactgtataggctgacca

SEQ ID NO: 1172056 - DNA, 25 bp, Homo sapien
cagagactgtataggctgaccagaa

SEQ ID NO: 1172057 - DNA, 25 bp, Homo sapien
cccaccattcttggcctgttactta

SEQ ID NO: 1172058 - DNA, 25 bp, Homo sapien
acggtgcccaccattcttggcctgt

SEQ ID NO: 1172059 - DNA, 25 bp, Homo sapien
agttggctagtggtcacggtgccca

SEQ ID NO: 1172060 - DNA, 25 bp, Homo sapien
cctttggagtagaatggattgcaag

SEQ ID NO: 1172061 - DNA, 25 bp, Homo sapien
tcccaaaggagctccagaacagtgt

SEQ ID NO: 1172062 - DNA, 25 bp, Homo sapien
tactccaggtgttatacttgccaag

SEQ ID NO: 1172063 - DNA, 25 bp, Homo sapien
tgtgagcagcaagaatggcacggtc

SEQ ID NO: 1172064 - DNA, 25 bp, Homo sapien
gaacagtgtgcttgaaaccaccctt

SEQ ID NO: 1172065 - DNA, 25 bp, Homo sapien
agaaggctggcacctgcactggatg

SEQ ID NO: 1172066 - DNA, 25 bp, Homo sapien
tgcaaaggactttgccacgcgcaga

SEQ ID NO: 1172067 - DNA, 25 bp, Homo sapien
ccatgtggcagggattgtgctagac

SEQ ID NO: 1172068 - DNA, 25 bp, Homo sapien
tatcacaattgatgcggctggaagt

SEQ ID NO: 1172069 - DNA, 25 bp, Homo sapien
cagccagacagtccctgatccaagc

SEQ ID NO: 1172070 - DNA, 25 bp, Homo sapien
ttccatgtcatatgggctgaaaatt

SEQ ID NO: 1172071 - DNA, 25 bp, Homo sapien
ttagagtcaaagtagataaggaaag

SEQ ID NO: 1172072 - DNA, 25 bp, Homo sapien
tcagattccccttctaactcttctt

SEQ ID NO: 1172073 - DNA, 25 bp, Homo sapien
tccaaatttaaaggcagggtcagac

SEQ ID NO: 1172074 - DNA, 25 bp, Homo sapien
ccagatggaccactgtagggcttcc

SEQ ID NO: 1172075 - DNA, 25 bp, Homo sapien
gatcctcagagtggcgcactgtaca

SEQ ID NO: 1172076 - DNA, 25 bp, Homo sapien
tatttgggagtgagcctaggtcaac

SEQ ID NO: 1172077 - DNA, 25 bp, Homo sapien
gcacctggttgcatccacctagaaa

SEQ ID NO: 1172078 - DNA, 25 bp, Homo sapien
tactttgcataggaggatcagctca

SEQ ID NO: 1172079 - DNA, 25 bp, Homo sapien
catgtctggactgcgagtatgggaa

SEQ ID NO: 1172080 - DNA, 25 bp, Homo sapien
tcttatcaggagaacgagaatcatc

SEQ ID NO: 1172081 - DNA, 25 bp, Homo sapien
ctttccccttagaattctcctgtgt

SEQ ID NO: 1172082 - DNA, 25 bp, Homo sapien
tcaattggtttctgagcagttgcaa

SEQ ID NO: 1172083 - DNA, 25 bp, Homo sapien
gagcagttgcaacttggatatgtgg

SEQ ID NO: 1172084 - DNA, 25 bp, Homo sapien
ctatgggggccgtccaacctggctt

SEQ ID NO: 1172085 - DNA, 25 bp, Homo sapien
cggcagcatatgacaccagagtgat

SEQ ID NO: 1172086 - DNA, 25 bp, Homo sapien
ccagagtgatataggacatatttcc

SEQ ID NO: 1172087 - DNA, 25 bp, Homo sapien
actgagtttttgtgcggcagcatat

SEQ ID NO: 1172088 - DNA, 25 bp, Homo sapien
tctccctccacaaaaaggaccaatg

SEQ ID NO: 1172089 - DNA, 25 bp, Homo sapien
tcttaggtattactcagacctcttc

SEQ ID NO: 1172090 - DNA, 25 bp, Homo sapien
atgaagccacttccctcttaggtat

SEQ ID NO: 1172091 - DNA, 25 bp, Homo sapien
acttccctcttaggtattactcaga

SEQ ID NO: 1172092 - DNA, 25 bp, Homo sapien
taggtattactcagacctcttcccc

SEQ ID NO: 1172093 - DNA, 25 bp, Homo sapien
gatgagggtgaggcatgttggggaa

SEQ ID NO: 1172094 - DNA, 25 bp, Homo sapien
aaaggatatagatgagggtgaggca

SEQ ID NO: 1172095 - DNA, 25 bp, Homo sapien
gggtgaggcatgttggggaaccagc

SEQ ID NO: 1172096 - DNA, 25 bp, Homo sapien
atagatgagggtgaggcatgttggg

SEQ ID NO: 1172097 - DNA, 25 bp, Homo sapien
gtggaagagaatccggccggactca

SEQ ID NO: 1172098 - DNA, 25 bp, Homo sapien
gagagtggaagagaatccggccgga

SEQ ID NO: 1172099 - DNA, 25 bp, Homo sapien
agtggaacaagaaacctggaactat

SEQ ID NO: 1172100 - DNA, 25 bp, Homo sapien
gagtggaagagaatccggccggact

SEQ ID NO: 1172101 - DNA, 25 bp, Homo sapien
cagaacctggattagaaaaatggtc

SEQ ID NO: 1172102 - DNA, 25 bp, Homo sapien
cttaaagttgccctcaaaaggagag

SEQ ID NO: 1172103 - DNA, 25 bp, Homo sapien
gctccttcatccctgggacagtcaa

SEQ ID NO: 1172104 - DNA, 25 bp, Homo sapien
ttatctaactcatggcagaacctgg

SEQ ID NO: 1172105 - DNA, 25 bp, Homo sapien
tggttagacccaggtacctctcaaa

SEQ ID NO: 1172106 - DNA, 25 bp, Homo sapien
tagggctcctgatcctttctgagag

SEQ ID NO: 1172107 - DNA, 25 bp, Homo sapien
gatgctgaccacttagcgatgcagg

SEQ ID NO: 1172108 - DNA, 25 bp, Homo sapien
tcttgggcagatcactccaggcagg

SEQ ID NO: 1172109 - DNA, 25 bp, Homo sapien
tgggagtcagggtccattctgggtc

SEQ ID NO: 1172110 - DNA, 25 bp, Homo sapien
gagtgatgagctgtatatccccaca

SEQ ID NO: 1172111 - DNA, 25 bp, Homo sapien
ctctttcacgggtccagaggctgct

SEQ ID NO: 1172112 - DNA, 25 bp, Homo sapien
gagcttcagggagtagcctccatct

SEQ ID NO: 1172113 - DNA, 25 bp, Homo sapien
tatccccacatagtagatccctgag

SEQ ID NO: 1172114 - DNA, 25 bp, Homo sapien
cagggccttccaggtataaatcaca

SEQ ID NO: 1172115 - DNA, 25 bp, Homo sapien
gacccatggtgactttaggctttga

SEQ ID NO: 1172116 - DNA, 25 bp, Homo sapien
ggtgccattcttattgctctgcaga

SEQ ID NO: 1172117 - DNA, 25 bp, Homo sapien
cagggttcctggcaacgcagatgaa

SEQ ID NO: 1172118 - DNA, 25 bp, Homo sapien
gggcagagtctcctgtggagagggg

SEQ ID NO: 1172119 - DNA, 25 bp, Homo sapien
agagtctcctgtggagaggggagag

SEQ ID NO: 1172120 - DNA, 25 bp, Homo sapien
ctgtggagaggggagaggcagtcac

SEQ ID NO: 1172121 - DNA, 25 bp, Homo sapien
cagagtctcctgtggagaggggaga

SEQ ID NO: 1172122 - DNA, 25 bp, Homo sapien
gaaatagccccagtacaaagagact

SEQ ID NO: 1172123 - DNA, 25 bp, Homo sapien
acacaggaggaccatggaggaatct

SEQ ID NO: 1172124 - DNA, 25 bp, Homo sapien
acaggaggaccatggaggaatctgg

SEQ ID NO: 1172125 - DNA, 25 bp, Homo sapien
gacacaggaggaccatggaggaatc

SEQ ID NO: 1172126 - DNA, 25 bp, Homo sapien
cagaactaaggagcacaggctgact

SEQ ID NO: 1172127 - DNA, 25 bp, Homo sapien
taaagcgaggtcttgggttgatcct

SEQ ID NO: 1172128 - DNA, 25 bp, Homo sapien
caagttgggagagaatcaaagccac

SEQ ID NO: 1172129 - DNA, 25 bp, Homo sapien
tgggagcccagaagaccaatcagca

SEQ ID NO: 1172130 - DNA, 25 bp, Homo sapien
tctctccagaatgggggcatatgtt

SEQ ID NO: 1172131 - DNA, 25 bp, Homo sapien
ggcatatgttaggagtttcccgaca

SEQ ID NO: 1172132 - DNA, 25 bp, Homo sapien
ggagtttcccgacaaatgtccactc

SEQ ID NO: 1172133 - DNA, 25 bp, Homo sapien
gattgtgtcgtactctgtgttctct

SEQ ID NO: 1172134 - DNA, 25 bp, Homo sapien
aaacctcacaaggagagcctcagag

SEQ ID NO: 1172135 - DNA, 25 bp, Homo sapien
gggagcaggtgatttcacagaccac

SEQ ID NO: 1172136 - DNA, 25 bp, Homo sapien
aaggaatctggccttttgtgtggcc

SEQ ID NO: 1172137 - DNA, 25 bp, Homo sapien
gagcattgtgagtcagaaccaggtg

SEQ ID NO: 1172138 - DNA, 25 bp, Homo sapien
atcacccacctcctgaatcacatag

SEQ ID NO: 1172139 - DNA, 25 bp, Homo sapien
ttttcaggaagccattacattattt

SEQ ID NO: 1172140 - DNA, 25 bp, Homo sapien
catagacaaggccagagagacattc

SEQ ID NO: 1172141 - DNA, 25 bp, Homo sapien
acttttttcaggaagccattacatt

SEQ ID NO: 1172142 - DNA, 25 bp, Homo sapien
cacagtggagtaaaccgtatttgct

SEQ ID NO: 1172143 - DNA, 25 bp, Homo sapien
atttccacagtggagtaaaccgtat

SEQ ID NO: 1172144 - DNA, 25 bp, Homo sapien
gctggatcttcctttaggattgttc

SEQ ID NO: 1172145 - DNA, 25 bp, Homo sapien
gtaaaccgtatttgctggatcttcc

SEQ ID NO: 1172146 - DNA, 25 bp, Homo sapien
gatgtaacatagctggaccatggga

SEQ ID NO: 1172147 - DNA, 25 bp, Homo sapien
gctgccaaccgtactctgtgaagga

SEQ ID NO: 1172148 - DNA, 25 bp, Homo sapien
tagagagtatgagatacctgggtcc

SEQ ID NO: 1172149 - DNA, 25 bp, Homo sapien
aacccaaatcggctggcatgctggc

SEQ ID NO: 1172150 - DNA, 25 bp, Homo sapien
cataggcaaatagccttggtgtgtc

SEQ ID NO: 1172151 - DNA, 25 bp, Homo sapien
ccttggtgtgtctggcatcgtgagc

SEQ ID NO: 1172152 - DNA, 25 bp, Homo sapien
ataggcaaatagccttggtgtgtct

SEQ ID NO: 1172153 - DNA, 25 bp, Homo sapien
tcataggcaaatagccttggtgtgt

SEQ ID NO: 1172154 - DNA, 25 bp, Homo sapien
tggcacagccttaaaacctagactt

SEQ ID NO: 1172155 - DNA, 25 bp, Homo sapien
catttggagccaatttcatgagggc

SEQ ID NO: 1172156 - DNA, 25 bp, Homo sapien
caagactcttggtataatcctgaca

SEQ ID NO: 1172157 - DNA, 25 bp, Homo sapien
tgtggtcaggcctgctacaactgct

SEQ ID NO: 1172158 - DNA, 25 bp, Homo sapien
ttcatcacttggtagggaggtctcc

SEQ ID NO: 1172159 - DNA, 25 bp, Homo sapien
tgtcagggaacatatcaaaagcagc

SEQ ID NO: 1172160 - DNA, 25 bp, Homo sapien
gggatgttcatcttacgtgccagac

SEQ ID NO: 1172161 - DNA, 25 bp, Homo sapien
gccgggccgcataggttcttaataa

SEQ ID NO: 1172162 - DNA, 25 bp, Homo sapien
tgttttattaagatagtaaagaaga

SEQ ID NO: 1172163 - DNA, 25 bp, Homo sapien
tttactacaatagggttttgcagta

SEQ ID NO: 1172164 - DNA, 25 bp, Homo sapien
tactacaatagggttttgcagtagg

SEQ ID NO: 1172165 - DNA, 25 bp, Homo sapien
atctgttttattaagatagtaaaga

SEQ ID NO: 1172166 - DNA, 25 bp, Homo sapien
tttcatgatgctgagtataacccat

SEQ ID NO: 1172167 - DNA, 25 bp, Homo sapien
tcagaagctacatgtgtaggttaca

SEQ ID NO: 1172168 - DNA, 25 bp, Homo sapien
catgatgctgagtataacccataat

SEQ ID NO: 1172169 - DNA, 25 bp, Homo sapien
agctacatgtgtaggttacacaggt

SEQ ID NO: 1172170 - DNA, 25 bp, Homo sapien
tttagcagcctgactcagcaaggct

SEQ ID NO: 1172171 - DNA, 25 bp, Homo sapien
acaggacagttgggcctgcagaacc

SEQ ID NO: 1172172 - DNA, 25 bp, Homo sapien
tagcagcctgactcagcaaggcttg

SEQ ID NO: 1172173 - DNA, 25 bp, Homo sapien
ccacaggacagttgggcctgcagaa

SEQ ID NO: 1172174 - DNA, 25 bp, Homo sapien
caggaggagacaggcagagttgtac

SEQ ID NO: 1172175 - DNA, 25 bp, Homo sapien
aaaaagccagggaagtgagtgtcta

SEQ ID NO: 1172176 - DNA, 25 bp, Homo sapien
tgtgaagtatgaactgtatgtatct

SEQ ID NO: 1172177 - DNA, 25 bp, Homo sapien
cagggaagtgagtgtctactggaaa

SEQ ID NO: 1172178 - DNA, 25 bp, Homo sapien
gaaattgttttaggtgtgaagtatg

SEQ ID NO: 1172179 - DNA, 25 bp, Homo sapien
agagaagtacgagatggcggccatc

SEQ ID NO: 1172180 - DNA, 25 bp, Homo sapien
aaccaagaagagaagtacgagatgg

SEQ ID NO: 1172181 - DNA, 25 bp, Homo sapien
ccaagaagagaagtacgagatggcg

SEQ ID NO: 1172182 - DNA, 25 bp, Homo sapien
gaagagaagtacgagatggcggcca

SEQ ID NO: 1172183 - DNA, 25 bp, Homo sapien
tcccttcttggttcagagatgctgt

SEQ ID NO: 1172184 - DNA, 25 bp, Homo sapien
ccttcttggttcagagatgctgtag

SEQ ID NO: 1172185 - DNA, 25 bp, Homo sapien
cttcttggttcagagatgctgtagg

SEQ ID NO: 1172186 - DNA, 25 bp, Homo sapien
aggagttgaacatctttgccagctc

SEQ ID NO: 1172187 - DNA, 25 bp, Homo sapien
tgtgtcctgtggagggtctgtcctc

SEQ ID NO: 1172188 - DNA, 25 bp, Homo sapien
ttgtgtcctgtggagggtctgtcct

SEQ ID NO: 1172189 - DNA, 25 bp, Homo sapien
ggcactaatgccgtgcattttctgt

SEQ ID NO: 1172190 - DNA, 25 bp, Homo sapien
tgatgcaaggtttgggcactaatgc

SEQ ID NO: 1172191 - DNA, 25 bp, Homo sapien
tctgtgtattcaaggtgatgcaagg

SEQ ID NO: 1172192 - DNA, 25 bp, Homo sapien
ctggaacagatgtgggcagatcctg

SEQ ID NO: 1172193 - DNA, 25 bp, Homo sapien
caatgtggacacctcgagcacttaa

SEQ ID NO: 1172194 - DNA, 25 bp, Homo sapien
gctgagtagcagagtagccttgttc

SEQ ID NO: 1172195 - DNA, 25 bp, Homo sapien
gaggctggtggacaaataatggcaa

SEQ ID NO: 1172196 - DNA, 25 bp, Homo sapien
ggcctgtgtggtcctactttgcaca

SEQ ID NO: 1172197 - DNA, 25 bp, Homo sapien
tgataggaaatcttcctattagacg

SEQ ID NO: 1172198 - DNA, 25 bp, Homo sapien
tcctattagacgaaggcactctttt

SEQ ID NO: 1172199 - DNA, 25 bp, Homo sapien
ggaaatcttcctattagacgaaggc

SEQ ID NO: 1172200 - DNA, 25 bp, Homo sapien
gacgaaggcactcttttagtggagt

SEQ ID NO: 1172201 - DNA, 25 bp, Homo sapien
gtggagcatgcatatcggtgttttc

SEQ ID NO: 1172202 - DNA, 25 bp, Homo sapien
gcatgcatatcggtgttttcctccc

SEQ ID NO: 1172203 - DNA, 25 bp, Homo sapien
ccactgtggagcatgcatatcggtg

SEQ ID NO: 1172204 - DNA, 25 bp, Homo sapien
tggtaatcactgagcacaggggcat

SEQ ID NO: 1172205 - DNA, 25 bp, Homo sapien
tctaagaacctgacagatgacaggg

SEQ ID NO: 1172206 - DNA, 25 bp, Homo sapien
taagaacctgacagatgacaggggg

SEQ ID NO: 1172207 - DNA, 25 bp, Homo sapien
gaacctgacagatgacagggggatg

SEQ ID NO: 1172208 - DNA, 25 bp, Homo sapien
ctctaagaacctgacagatgacagg

SEQ ID NO: 1172209 - DNA, 25 bp, Homo sapien
ctgggtacagaacatgagagcagga

SEQ ID NO: 1172210 - DNA, 25 bp, Homo sapien
tgggtacagaacatgagagcaggaa

SEQ ID NO: 1172211 - DNA, 25 bp, Homo sapien
ggtacagaacatgagagcaggaaca

SEQ ID NO: 1172212 - DNA, 25 bp, Homo sapien
tacagaacatgagagcaggaacagt

SEQ ID NO: 1172213 - DNA, 25 bp, Homo sapien
taaaggcaacaagaatccagtagga

SEQ ID NO: 1172214 - DNA, 25 bp, Homo sapien
aagacaggtgcggaagctattgaag

SEQ ID NO: 1172215 - DNA, 25 bp, Homo sapien
ataaagcatcctgttaccaagctaa

SEQ ID NO: 1172216 - DNA, 25 bp, Homo sapien
gaatgggtggaagggatgagcctgg

SEQ ID NO: 1172217 - DNA, 25 bp, Homo sapien
aggaggatgcacttaccacagcttc

SEQ ID NO: 1172218 - DNA, 25 bp, Homo sapien
ttccgcacgtgtcacagcttctgca

SEQ ID NO: 1172219 - DNA, 25 bp, Homo sapien
tcagaactgagactgaaggaggatg

SEQ ID NO: 1172220 - DNA, 25 bp, Homo sapien
acagcttccgcacgtgtcacagctt

SEQ ID NO: 1172221 - DNA, 25 bp, Homo sapien
ctctgtggcttactggagaaaggcc

SEQ ID NO: 1172222 - DNA, 25 bp, Homo sapien
agagaatatttgcagctgactcctc

SEQ ID NO: 1172223 - DNA, 25 bp, Homo sapien
ctgactcctctgtggcttactggag

SEQ ID NO: 1172224 - DNA, 25 bp, Homo sapien
ctgtggcttactggagaaaggccca

SEQ ID NO: 1172225 - DNA, 25 bp, Homo sapien
ccatgagcaggaagaggagagaggt

SEQ ID NO: 1172226 - DNA, 25 bp, Homo sapien
gggtactggattggctctatctgct

SEQ ID NO: 1172227 - DNA, 25 bp, Homo sapien
gggttccgggccatgcagcggagag

SEQ ID NO: 1172228 - DNA, 25 bp, Homo sapien
catgcagcggagagatgtttcccag

SEQ ID NO: 1172229 - DNA, 25 bp, Homo sapien
tggctgagatcctctctggggtact

SEQ ID NO: 1172230 - DNA, 25 bp, Homo sapien
ggtgaccctagcttggattcccaga

SEQ ID NO: 1172231 - DNA, 25 bp, Homo sapien
gcatctaggaagctggtatttggcc

SEQ ID NO: 1172232 - DNA, 25 bp, Homo sapien
gaaattctagaccaaaacagatggg

SEQ ID NO: 1172233 - DNA, 25 bp, Homo sapien
gctctggagagcacttttgaaattc

SEQ ID NO: 1172234 - DNA, 25 bp, Homo sapien
ggacttggaggagcagctagactcc

SEQ ID NO: 1172235 - DNA, 25 bp, Homo sapien
gaggagcagctagactccttgagct

SEQ ID NO: 1172236 - DNA, 25 bp, Homo sapien
gagcagctagactccttgagctagc

SEQ ID NO: 1172237 - DNA, 25 bp, Homo sapien
ctgcagagatagaagagggacttgg

SEQ ID NO: 1172238 - DNA, 25 bp, Homo sapien
catagacgaacagggtgaattcctc

SEQ ID NO: 1172239 - DNA, 25 bp, Homo sapien
cacttggtgatgtctagtcggccca

SEQ ID NO: 1172240 - DNA, 25 bp, Homo sapien
gggaccaatccagatgacgttctca

SEQ ID NO: 1172241 - DNA, 25 bp, Homo sapien
tttgggacgtgcgaaagcaagagca

SEQ ID NO: 1172242 - DNA, 25 bp, Homo sapien
acataccccataaatttgcacaaat

SEQ ID NO: 1172243 - DNA, 25 bp, Homo sapien
tgacgtggacggacaacttttcaat

SEQ ID NO: 1172244 - DNA, 25 bp, Homo sapien
atgacgtggacggacaacttttcaa

SEQ ID NO: 1172245 - DNA, 25 bp, Homo sapien
gatgacgtggacggacaacttttca

SEQ ID NO: 1172246 - DNA, 25 bp, Homo sapien
gacgtggacggacaacttttcaata

SEQ ID NO: 1172247 - DNA, 25 bp, Homo sapien
caagcggagaaagaccaagcacaaa

SEQ ID NO: 1172248 - DNA, 25 bp, Homo sapien
gcatgctgcccgaggagtctttgca

SEQ ID NO: 1172249 - DNA, 25 bp, Homo sapien
caaacactgagttggtgcctggcgc

SEQ ID NO: 1172250 - DNA, 25 bp, Homo sapien
gagtctccaagttggcggctccggt

SEQ ID NO: 1172251 - DNA, 25 bp, Homo sapien
cagacaatatagacagagggacacc

SEQ ID NO: 1172252 - DNA, 25 bp, Homo sapien
ataaataggtgaatggcccagcccc

SEQ ID NO: 1172253 - DNA, 25 bp, Homo sapien
cccacaggcagttcagaagtaggca

SEQ ID NO: 1172254 - DNA, 25 bp, Homo sapien
actacaagccgaagagagaggtccc

SEQ ID NO: 1172255 - DNA, 25 bp, Homo sapien
gggaagatgctcagatccttttgcc

SEQ ID NO: 1172256 - DNA, 25 bp, Homo sapien
gaagatgctcagatccttttgccag

SEQ ID NO: 1172257 - DNA, 25 bp, Homo sapien
agatgctcagatccttttgccagca

SEQ ID NO: 1172258 - DNA, 25 bp, Homo sapien
aagatgctcagatccttttgccagc

SEQ ID NO: 1172259 - DNA, 25 bp, Homo sapien
ccccttcacggagcacattagagtg

SEQ ID NO: 1172260 - DNA, 25 bp, Homo sapien
gaagttctcagacaccttcacagac

SEQ ID NO: 1172261 - DNA, 25 bp, Homo sapien
cagatgtatggcaggtctgggtcac

SEQ ID NO: 1172262 - DNA, 25 bp, Homo sapien
ggagcctccattggactcagaagca

SEQ ID NO: 1172263 - DNA, 25 bp, Homo sapien
gagtgcaagtggcagggtgactggc

SEQ ID NO: 1172264 - DNA, 25 bp, Homo sapien
cagtctcccccgttgttcctcctct

SEQ ID NO: 1172265 - DNA, 25 bp, Homo sapien
agtctcccccgttgttcctcctctg

SEQ ID NO: 1172266 - DNA, 25 bp, Homo sapien
cacagtctcccccgttgttcctcct

SEQ ID NO: 1172267 - DNA, 25 bp, Homo sapien
caccctgttcttgtaaggatccctg

SEQ ID NO: 1172268 - DNA, 25 bp, Homo sapien
tgagtggatctgccgttgctgcttc

SEQ ID NO: 1172269 - DNA, 25 bp, Homo sapien
cctgttcttgtaaggatccctggat

SEQ ID NO: 1172270 - DNA, 25 bp, Homo sapien
ttaaacaaccagacaaccttctctg

SEQ ID NO: 1172271 - DNA, 25 bp, Homo sapien
cggcgtcctctatcttcagctggct

SEQ ID NO: 1172272 - DNA, 25 bp, Homo sapien
taggggccggcgtcctctatcttca

SEQ ID NO: 1172273 - DNA, 25 bp, Homo sapien
ctctgagcacacgtaggcatggtag

SEQ ID NO: 1172274 - DNA, 25 bp, Homo sapien
catgtgtcatgctggtgacgctgga

SEQ ID NO: 1172275 - DNA, 25 bp, Homo sapien
gcactttggcgggtagacttgtcca

SEQ ID NO: 1172276 - DNA, 25 bp, Homo sapien
gcatttcagtatgagggaagaccct

SEQ ID NO: 1172277 - DNA, 25 bp, Homo sapien
aatcaactggtgtgaactgaacagc

SEQ ID NO: 1172278 - DNA, 25 bp, Homo sapien
ctgacactcagtgcagaaggaccgg

SEQ ID NO: 1172279 - DNA, 25 bp, Homo sapien
gctgaggaggtagaatgcaaattct

SEQ ID NO: 1172280 - DNA, 25 bp, Homo sapien
taaaccatgcaaattgccaagccaa

SEQ ID NO: 1172281 - DNA, 25 bp, Homo sapien
aactgagtggcccaccttcttggag

SEQ ID NO: 1172282 - DNA, 25 bp, Homo sapien
aacataaaccatgcaaattgccaag

SEQ ID NO: 1172283 - DNA, 25 bp, Homo sapien
cttctccatgagacattgaggtgtg

SEQ ID NO: 1172284 - DNA, 25 bp, Homo sapien
tccatgtgtacatgacagtgtttcc

SEQ ID NO: 1172285 - DNA, 25 bp, Homo sapien
gattccccttgggacacaacagctt

SEQ ID NO: 1172286 - DNA, 25 bp, Homo sapien
cctgaggctccacgtgattttgggc

SEQ ID NO: 1172287 - DNA, 25 bp, Homo sapien
cagatgttctcagaaagaaactggt

SEQ ID NO: 1172288 - DNA, 25 bp, Homo sapien
tcagaaagaaactggtgggaactcc

SEQ ID NO: 1172289 - DNA, 25 bp, Homo sapien
agaaagaaactggtgggaactcctg

SEQ ID NO: 1172290 - DNA, 25 bp, Homo sapien
agaaactggtgggaactcctgctga

SEQ ID NO: 1172291 - DNA, 25 bp, Homo sapien
tgagtaaatagagatggagagaaac

SEQ ID NO: 1172292 - DNA, 25 bp, Homo sapien
ctgagtaaatagagatggagagaaa

SEQ ID NO: 1172293 - DNA, 25 bp, Homo sapien
gtccttttcgcttccaaatgcacca

SEQ ID NO: 1172294 - DNA, 25 bp, Homo sapien
gctgaagatcccaacgcacagaagg

SEQ ID NO: 1172295 - DNA, 25 bp, Homo sapien
caaatgcaccagctgaagatcccaa

SEQ ID NO: 1172296 - DNA, 25 bp, Homo sapien
ggcaaaccatcaggaacaacccaat

SEQ ID NO: 1172297 - DNA, 25 bp, Homo sapien
ggtgtatccgctggggcctcagctt

SEQ ID NO: 1172298 - DNA, 25 bp, Homo sapien
tcagcttggctggaacagaaggctg

SEQ ID NO: 1172299 - DNA, 25 bp, Homo sapien
tggtgtatccgctggggcctcagct

SEQ ID NO: 1172300 - DNA, 25 bp, Homo sapien
tgtgagggccggtgtggcccactgg

SEQ ID NO: 1172301 - DNA, 25 bp, Homo sapien
ggtggatgcgctgtgagggccggtg

SEQ ID NO: 1172302 - DNA, 25 bp, Homo sapien
gatgcgctgtgagggccggtgtggc

SEQ ID NO: 1172303 - DNA, 25 bp, Homo sapien
ggtggatatgctgtgaacgctgtca

SEQ ID NO: 1172304 - DNA, 25 bp, Homo sapien
catgccaagcatcattgcaggtact

SEQ ID NO: 1172305 - DNA, 25 bp, Homo sapien
gacatgtgatagactttagcaactc

SEQ ID NO: 1172306 - DNA, 25 bp, Homo sapien
gccctgtgggataaaccatgccaag

SEQ ID NO: 1172307 - DNA, 25 bp, Homo sapien
caaaggtaaattagacctggccctg

SEQ ID NO: 1172308 - DNA, 25 bp, Homo sapien
ctctgatgcctgcattagatgaggc

SEQ ID NO: 1172309 - DNA, 25 bp, Homo sapien
ttgctttgctgcaaggccccagcct

SEQ ID NO: 1172310 - DNA, 25 bp, Homo sapien
tcttgctttgctgcaaggccccagc

SEQ ID NO: 1172311 - DNA, 25 bp, Homo sapien
tgctttgctgcaaggccccagcctg

SEQ ID NO: 1172312 - DNA, 25 bp, Homo sapien
ggaacacattgtgcagggctgataa

SEQ ID NO: 1172313 - DNA, 25 bp, Homo sapien
acacattgtgcagggctgataaaag

SEQ ID NO: 1172314 - DNA, 25 bp, Homo sapien
ctggaacacattgtgcagggctgat

SEQ ID NO: 1172315 - DNA, 25 bp, Homo sapien
ttgtgcagggctgataaaagtatgc

SEQ ID NO: 1172316 - DNA, 25 bp, Homo sapien
agagcacagagtatagcgtgtggcc

SEQ ID NO: 1172317 - DNA, 25 bp, Homo sapien
gcacagagtatagcgtgtggccagc

SEQ ID NO: 1172318 - DNA, 25 bp, Homo sapien
gggagagcacagagtatagcgtgtg

SEQ ID NO: 1172319 - DNA, 25 bp, Homo sapien
cagagtatagcgtgtggccagctgt

SEQ ID NO: 1172320 - DNA, 25 bp, Homo sapien
gcctgaggggagtgtccagcttctc

SEQ ID NO: 1172321 - DNA, 25 bp, Homo sapien
cctgaggggagtgtccagcttctca

SEQ ID NO: 1172322 - DNA, 25 bp, Homo sapien
aggggagtgtccagcttctcatatc

SEQ ID NO: 1172323 - DNA, 25 bp, Homo sapien
tgaggggagtgtccagcttctcata

SEQ ID NO: 1172324 - DNA, 25 bp, Homo sapien
gaggtgggtgtaggctgttgcctgg

SEQ ID NO: 1172325 - DNA, 25 bp, Homo sapien
ctgaggtgggtgtaggctgttgcct

SEQ ID NO: 1172326 - DNA, 25 bp, Homo sapien
ggtgggtgtaggctgttgcctggca

SEQ ID NO: 1172327 - DNA, 25 bp, Homo sapien
gtgggtgtaggctgttgcctggcag

SEQ ID NO: 1172328 - DNA, 25 bp, Homo sapien
ctcctcagttgtgaggttgctgtca

SEQ ID NO: 1172329 - DNA, 25 bp, Homo sapien
cagttgtgaggttgctgtcagagct

SEQ ID NO: 1172330 - DNA, 25 bp, Homo sapien
tcagttgtgaggttgctgtcagagc

SEQ ID NO: 1172331 - DNA, 25 bp, Homo sapien
cctcagttgtgaggttgctgtcaga

SEQ ID NO: 1172332 - DNA, 25 bp, Homo sapien
cagactcaacttccgtgacatatgg

SEQ ID NO: 1172333 - DNA, 25 bp, Homo sapien
gatcatagtctgcttggccctcagg

SEQ ID NO: 1172334 - DNA, 25 bp, Homo sapien
cgccctcctgagtgacctggtcaaa

SEQ ID NO: 1172335 - DNA, 25 bp, Homo sapien
tgcatacatggtgttctctccaacc

SEQ ID NO: 1172336 - DNA, 25 bp, Homo sapien
ttccgtatggagcagtagattgtgg

SEQ ID NO: 1172337 - DNA, 25 bp, Homo sapien
ctgaggtttccgtatggagcagtag

SEQ ID NO: 1172338 - DNA, 25 bp, Homo sapien
gaggtttccgtatggagcagtagat

SEQ ID NO: 1172339 - DNA, 25 bp, Homo sapien
ggtttccgtatggagcagtagattg

SEQ ID NO: 1172340 - DNA, 25 bp, Homo sapien
gggatacagagaatgtagttctcac

SEQ ID NO: 1172341 - DNA, 25 bp, Homo sapien
ccttgggatacagagaatgtagttc

SEQ ID NO: 1172342 - DNA, 25 bp, Homo sapien
gaatctcggattttcagttcaaagg

SEQ ID NO: 1172343 - DNA, 25 bp, Homo sapien
tctaaggaatagttcctcactctgt

SEQ ID NO: 1172344 - DNA, 25 bp, Homo sapien
tactgtaggtggtggtgtattttcc

SEQ ID NO: 1172345 - DNA, 25 bp, Homo sapien
ccttgtttgagtgtataagctgtca

SEQ ID NO: 1172346 - DNA, 25 bp, Homo sapien
tgttgaccatggaatgtatctgagg

SEQ ID NO: 1172347 - DNA, 25 bp, Homo sapien
ggaatatttgtttatgcatctctgt

SEQ ID NO: 1172348 - DNA, 25 bp, Homo sapien
aacccttaggaactgtgcatacaat

SEQ ID NO: 1172349 - DNA, 25 bp, Homo sapien
ctgaaaaacccttaggaactgtgca

SEQ ID NO: 1172350 - DNA, 25 bp, Homo sapien
ccttaggaactgtgcatacaattta

SEQ ID NO: 1172351 - DNA, 25 bp, Homo sapien
tacaatttattaagtagtcaagtaa

SEQ ID NO: 1172352 - DNA, 25 bp, Homo sapien
ggactttcaggaatctcaagatcat

SEQ ID NO: 1172353 - DNA, 25 bp, Homo sapien
gaatctcaagatcattctgttgtgg

SEQ ID NO: 1172354 - DNA, 25 bp, Homo sapien
agatcattctgttgtggtggtggca

SEQ ID NO: 1172355 - DNA, 25 bp, Homo sapien
aggtaggactttcaggaatctcaag

SEQ ID NO: 1172356 - DNA, 25 bp, Homo sapien
aacgctataagtgtgcgaggtgaca

SEQ ID NO: 1172357 - DNA, 25 bp, Homo sapien
ccaagaaggagcctgtgtctgaact

SEQ ID NO: 1172358 - DNA, 25 bp, Homo sapien
gaccagtcttggtagaatttcgagg

SEQ ID NO: 1172359 - DNA, 25 bp, Homo sapien
catgaggtccagctgactttccaac

SEQ ID NO: 1172360 - DNA, 25 bp, Homo sapien
catattagcacctattagtccttgc

SEQ ID NO: 1172361 - DNA, 25 bp, Homo sapien
cactccataatgtatcttagagccc

SEQ ID NO: 1172362 - DNA, 25 bp, Homo sapien
caatgcacatggtcctgaactttgt

SEQ ID NO: 1172363 - DNA, 25 bp, Homo sapien
cagggtttgccgttgcatgggtata

SEQ ID NO: 1172364 - DNA, 25 bp, Homo sapien
gggtcagggcttttgaggatgctgt

SEQ ID NO: 1172365 - DNA, 25 bp, Homo sapien
tcagggcttttgaggatgctgtatt

SEQ ID NO: 1172366 - DNA, 25 bp, Homo sapien
tggggtcagggcttttgaggatgct

SEQ ID NO: 1172367 - DNA, 25 bp, Homo sapien
ctatggggtcagggcttttgaggat

SEQ ID NO: 1172368 - DNA, 25 bp, Homo sapien
tctaataggagggacgtgaacttca

SEQ ID NO: 1172369 - DNA, 25 bp, Homo sapien
ctaataggagggacgtgaacttcat

SEQ ID NO: 1172370 - DNA, 25 bp, Homo sapien
aacttgccaaataccacacgcttgc

SEQ ID NO: 1172371 - DNA, 25 bp, Homo sapien
tccatccattcagtctcggcaatgt

SEQ ID NO: 1172372 - DNA, 25 bp, Homo sapien
tgtgtgatgtcaacatcctggcaca

SEQ ID NO: 1172373 - DNA, 25 bp, Homo sapien
cattatggtgtgtgatgtcaacatc

SEQ ID NO: 1172374 - DNA, 25 bp, Homo sapien
actggggggccgcgcggcgtgtcag

SEQ ID NO: 1172375 - DNA, 25 bp, Homo sapien
tgccatgcctgggggagcggccgcg

SEQ ID NO: 1172376 - DNA, 25 bp, Homo sapien
gagcggccgcgggagactggggggc

SEQ ID NO: 1172377 - DNA, 25 bp, Homo sapien
tgaggcgaggccctgtgccatgcct

SEQ ID NO: 1172378 - DNA, 25 bp, Homo sapien
catcataactctgaaggtccagcaa

SEQ ID NO: 1172379 - DNA, 25 bp, Homo sapien
aggtccagcaacaccaatccatgtg

SEQ ID NO: 1172380 - DNA, 25 bp, Homo sapien
cataactctgaaggtccagcaacac

SEQ ID NO: 1172381 - DNA, 25 bp, Homo sapien
tctgaaggtccagcaacaccaatcc

SEQ ID NO: 1172382 - DNA, 25 bp, Homo sapien
actttgttcaaaatactgtcgatct

SEQ ID NO: 1172383 - DNA, 25 bp, Homo sapien
tgttcaaaatactgtcgatctcttc

SEQ ID NO: 1172384 - DNA, 25 bp, Homo sapien
gatctcttctttgccttgcgcatca

SEQ ID NO: 1172385 - DNA, 25 bp, Homo sapien
tttgttcaaaatactgtcgatctct

SEQ ID NO: 1172386 - DNA, 25 bp, Homo sapien
caggcgcccatcggcggtgggccaa

SEQ ID NO: 1172387 - DNA, 25 bp, Homo sapien
ggcgcccatcggcggtgggccaata

SEQ ID NO: 1172388 - DNA, 25 bp, Homo sapien
aggcgcccatcggcggtgggccaat

SEQ ID NO: 1172389 - DNA, 25 bp, Homo sapien
gcgcccatcggcggtgggccaatat

SEQ ID NO: 1172390 - DNA, 25 bp, Homo sapien
ggtgaatcttcatcatataccactt

SEQ ID NO: 1172391 - DNA, 25 bp, Homo sapien
ttatattttgataaggtgaatcttc

SEQ ID NO: 1172392 - DNA, 25 bp, Homo sapien
tattttgataaggtgaatcttcatc

SEQ ID NO: 1172393 - DNA, 25 bp, Homo sapien
aggtgaatcttcatcatataccact

SEQ ID NO: 1172394 - DNA, 25 bp, Homo sapien
actgcccatgatggcccgggtatat

SEQ ID NO: 1172395 - DNA, 25 bp, Homo sapien
tggagattggaacagctgtcaaatc

SEQ ID NO: 1172396 - DNA, 25 bp, Homo sapien
gtggagattggaacagctgtcaaat

SEQ ID NO: 1172397 - DNA, 25 bp, Homo sapien
ggacaatacaggcgccccagctgtt

SEQ ID NO: 1172398 - DNA, 25 bp, Homo sapien
attccacaggacaatacaggcgccc

SEQ ID NO: 1172399 - DNA, 25 bp, Homo sapien
acaatacaggcgccccagctgttct

SEQ ID NO: 1172400 - DNA, 25 bp, Homo sapien
acaggacaatacaggcgccccagct

SEQ ID NO: 1172401 - DNA, 25 bp, Homo sapien
ttagctttcttccaaacagtgtaaa

SEQ ID NO: 1172402 - DNA, 25 bp, Homo sapien
tcagggtttagctttcttccaaaca

SEQ ID NO: 1172403 - DNA, 25 bp, Homo sapien
tcttccaaacagtgtaaaataccca

SEQ ID NO: 1172404 - DNA, 25 bp, Homo sapien
gctttcttccaaacagtgtaaaata

SEQ ID NO: 1172405 - DNA, 25 bp, Homo sapien
ttcacaatcaattgcctgactcatt

SEQ ID NO: 1172406 - DNA, 25 bp, Homo sapien
agcagtcttcgctgtgctgtctaac

SEQ ID NO: 1172407 - DNA, 25 bp, Homo sapien
ggggaaagaaacaccatcaagatct

SEQ ID NO: 1172408 - DNA, 25 bp, Homo sapien
tgtgctgtctaaccatccttcagct

SEQ ID NO: 1172409 - DNA, 25 bp, Homo sapien
atgtttaacctgccttgcatcccaa

SEQ ID NO: 1172410 - DNA, 25 bp, Homo sapien
catatgtttaacctgccttgcatcc

SEQ ID NO: 1172411 - DNA, 25 bp, Homo sapien
atatgtttaacctgccttgcatccc

SEQ ID NO: 1172412 - DNA, 25 bp, Homo sapien
tgtttaacctgccttgcatcccaag

SEQ ID NO: 1172413 - DNA, 25 bp, Homo sapien
tttctgctctttggtcaattcctga

SEQ ID NO: 1172414 - DNA, 25 bp, Homo sapien
tctgctctttggtcaattcctgacc

SEQ ID NO: 1172415 - DNA, 25 bp, Homo sapien
aaaatactttctgctctttggtcaa

SEQ ID NO: 1172416 - DNA, 25 bp, Homo sapien
gctctttggtcaattcctgacccat

SEQ ID NO: 1172417 - DNA, 25 bp, Homo sapien
tgatgcaaatcttcagactctaagg

SEQ ID NO: 1172418 - DNA, 25 bp, Homo sapien
gactctaaggtgcagtggatagcct

SEQ ID NO: 1172419 - DNA, 25 bp, Homo sapien
gtaaaatggccctgcctaaatcctg

SEQ ID NO: 1172420 - DNA, 25 bp, Homo sapien
gctgaataaaaagcataagctgatg

SEQ ID NO: 1172421 - DNA, 25 bp, Homo sapien
cgcaatctggcatataaagagggta

SEQ ID NO: 1172422 - DNA, 25 bp, Homo sapien
aaagagggtacaatgcagagcgtac

SEQ ID NO: 1172423 - DNA, 25 bp, Homo sapien
tctggcatataaagagggtacaatg

SEQ ID NO: 1172424 - DNA, 25 bp, Homo sapien
taaagagggtacaatgcagagcgta

SEQ ID NO: 1172425 - DNA, 25 bp, Homo sapien
cctgaacagggccaatagatgtgga

SEQ ID NO: 1172426 - DNA, 25 bp, Homo sapien
tatccaagaaccgtccatcccttgg

SEQ ID NO: 1172427 - DNA, 25 bp, Homo sapien
caagaaccgtccatcccttgggtgg

SEQ ID NO: 1172428 - DNA, 25 bp, Homo sapien
cactgacagggggtcttatccaaga

SEQ ID NO: 1172429 - DNA, 25 bp, Homo sapien
cataagaaaccaattctctgcaatt

SEQ ID NO: 1172430 - DNA, 25 bp, Homo sapien
tcaaaagctcccccaattactgcca

SEQ ID NO: 1172431 - DNA, 25 bp, Homo sapien
aattctctgcaattgcaggggctcc

SEQ ID NO: 1172432 - DNA, 25 bp, Homo sapien
agctcccccaattactgccagatac

SEQ ID NO: 1172433 - DNA, 25 bp, Homo sapien
gcttggcatcccttttgaggtgaca

SEQ ID NO: 1172434 - DNA, 25 bp, Homo sapien
gacagcatataagaagactaggcac

SEQ ID NO: 1172435 - DNA, 25 bp, Homo sapien
aaaggtcaagtttgcgggcttggca

SEQ ID NO: 1172436 - DNA, 25 bp, Homo sapien
tccagaggaataagagtaatgtgct

SEQ ID NO: 1172437 - DNA, 25 bp, Homo sapien
gcatgctggttatctaatgcaaggt

SEQ ID NO: 1172438 - DNA, 25 bp, Homo sapien
gtaagcttctatcgttctttcctga

SEQ ID NO: 1172439 - DNA, 25 bp, Homo sapien
tttcctgatcatagatgcgtgggcg

SEQ ID NO: 1172440 - DNA, 25 bp, Homo sapien
gcttgaatatgttgctgtgcacccc

SEQ ID NO: 1172441 - DNA, 25 bp, Homo sapien
gcaatcttatatggtatgctcaacc

SEQ ID NO: 1172442 - DNA, 25 bp, Homo sapien
gaaaattttcatcaaagcctagact

SEQ ID NO: 1172443 - DNA, 25 bp, Homo sapien
caaagcctagacttgccgtggaggc

SEQ ID NO: 1172444 - DNA, 25 bp, Homo sapien
tgctcaaccataaggtccacgtgga

SEQ ID NO: 1172445 - DNA, 25 bp, Homo sapien
tcacctctcagacagggtggcggcc

SEQ ID NO: 1172446 - DNA, 25 bp, Homo sapien
ggcaacactgagcactgagtgagcg

SEQ ID NO: 1172447 - DNA, 25 bp, Homo sapien
cctcacctctcagacagggtggcgg

SEQ ID NO: 1172448 - DNA, 25 bp, Homo sapien
caacactgagcactgagtgagcgag

SEQ ID NO: 1172449 - DNA, 25 bp, Homo sapien
cttgatgctccttagtcatacattt

SEQ ID NO: 1172450 - DNA, 25 bp, Homo sapien
gggtttggtagtcacttgatgctcc

SEQ ID NO: 1172451 - DNA, 25 bp, Homo sapien
gagtttgggtttggtagtcacttga

SEQ ID NO: 1172452 - DNA, 25 bp, Homo sapien
agtcatacatttagcctctccagca

SEQ ID NO: 1172453 - DNA, 25 bp, Homo sapien
ggtagctagccactgaatcatggac

SEQ ID NO: 1172454 - DNA, 25 bp, Homo sapien
tgtcgccgtcctgtggagcaacagc

SEQ ID NO: 1172455 - DNA, 25 bp, Homo sapien
tgttctactactggacctgtcgccg

SEQ ID NO: 1172456 - DNA, 25 bp, Homo sapien
catcagaatagcataagcagctgtc

SEQ ID NO: 1172457 - DNA, 25 bp, Homo sapien
aaggctgaatcttcagcagctgagg

SEQ ID NO: 1172458 - DNA, 25 bp, Homo sapien
cttcagcagctgaggcattggccac

SEQ ID NO: 1172459 - DNA, 25 bp, Homo sapien
ctctgaaaggctgaatcttcagcag

SEQ ID NO: 1172460 - DNA, 25 bp, Homo sapien
cagctgaggcattggccactcggac

SEQ ID NO: 1172461 - DNA, 25 bp, Homo sapien
cttgctgcaagtggcttaatatgcg

SEQ ID NO: 1172462 - DNA, 25 bp, Homo sapien
ctgtcttgctgcaagtggcttaata

SEQ ID NO: 1172463 - DNA, 25 bp, Homo sapien
gctgcaagtggcttaatatgcgaga

SEQ ID NO: 1172464 - DNA, 25 bp, Homo sapien
caagtggcttaatatgcgagatggg

SEQ ID NO: 1172465 - DNA, 25 bp, Homo sapien
ccatcaagattaagttggcattatc

SEQ ID NO: 1172466 - DNA, 25 bp, Homo sapien
caaaaaccttatccatcaagattaa

SEQ ID NO: 1172467 - DNA, 25 bp, Homo sapien
tatccatcaagattaagttggcatt

SEQ ID NO: 1172468 - DNA, 25 bp, Homo sapien
accttatccatcaagattaagttgg

SEQ ID NO: 1172469 - DNA, 25 bp, Homo sapien
acagcatatctctcagaagaaactc

SEQ ID NO: 1172470 - DNA, 25 bp, Homo sapien
taacagcatatctctcagaagaaac

SEQ ID NO: 1172471 - DNA, 25 bp, Homo sapien
gcatatctctcagaagaaactctat

SEQ ID NO: 1172472 - DNA, 25 bp, Homo sapien
cagcatatctctcagaagaaactct

SEQ ID NO: 1172473 - DNA, 25 bp, Homo sapien
cacagtggctaggaagaacccattg

SEQ ID NO: 1172474 - DNA, 25 bp, Homo sapien
tattctgggcttgcacagtggctag

SEQ ID NO: 1172475 - DNA, 25 bp, Homo sapien
cttgcacagtggctaggaagaaccc

SEQ ID NO: 1172476 - DNA, 25 bp, Homo sapien
tccacctcacatattctgggcttgc

SEQ ID NO: 1172477 - DNA, 25 bp, Homo sapien
tactcttgttctatagatgagacag

SEQ ID NO: 1172478 - DNA, 25 bp, Homo sapien
taacggaggcggctgtactcttgtt

SEQ ID NO: 1172479 - DNA, 25 bp, Homo sapien
agcagctgcagtcgggagataacgg

SEQ ID NO: 1172480 - DNA, 25 bp, Homo sapien
gatgagacagagctctgcggtgtca

SEQ ID NO: 1172481 - DNA, 25 bp, Homo sapien
tcttctgcttatccctgggcaatgg

SEQ ID NO: 1172482 - DNA, 25 bp, Homo sapien
tgtgcacgtcaaaagcacagcacct

SEQ ID NO: 1172483 - DNA, 25 bp, Homo sapien
gctttttaatgcaccgagatgttta

SEQ ID NO: 1172484 - DNA, 25 bp, Homo sapien
gaagttagaattgctgttatcccca

SEQ ID NO: 1172485 - DNA, 25 bp, Homo sapien
tattgcagtagggaagagggcccaa

SEQ ID NO: 1172486 - DNA, 25 bp, Homo sapien
cttacgtattcagaacttgttcatc

SEQ ID NO: 1172487 - DNA, 25 bp, Homo sapien
ttgaccaacactgtttttcctgtct

SEQ ID NO: 1172488 - DNA, 25 bp, Homo sapien
caggatctacagatcaaggacaggg

SEQ ID NO: 1172489 - DNA, 25 bp, Homo sapien
tcttgtaactgaaagcgtgtaccct

SEQ ID NO: 1172490 - DNA, 25 bp, Homo sapien
acaacatggtttgatatgcacatac

SEQ ID NO: 1172491 - DNA, 25 bp, Homo sapien
gattgccatggtcaattaacacatc

SEQ ID NO: 1172492 - DNA, 25 bp, Homo sapien
catgaactcagcataatctgggata

SEQ ID NO: 1172493 - DNA, 25 bp, Homo sapien
ttggtgtttcccctgagacatgaac

SEQ ID NO: 1172494 - DNA, 25 bp, Homo sapien
gccacttgtgaagaatatgagtcag

SEQ ID NO: 1172495 - DNA, 25 bp, Homo sapien
cgtgcctagccaaggatgagatttt

SEQ ID NO: 1172496 - DNA, 25 bp, Homo sapien
tacttctctagcttacaatggacct

SEQ ID NO: 1172497 - DNA, 25 bp, Homo sapien
gaatggttccttattgtctaggcca

SEQ ID NO: 1172498 - DNA, 25 bp, Homo sapien
gttcagccaggtgcattaacagacc

SEQ ID NO: 1172499 - DNA, 25 bp, Homo sapien
tcagtcaagggtcacatgccaataa

SEQ ID NO: 1172500 - DNA, 25 bp, Homo sapien
tgtaggaactactgtcccagagctg

SEQ ID NO: 1172501 - DNA, 25 bp, Homo sapien
tgaacaggaatgagccggacagcct

SEQ ID NO: 1172502 - DNA, 25 bp, Homo sapien
ttgtgtactgacgaccagggccagc

SEQ ID NO: 1172503 - DNA, 25 bp, Homo sapien
gctggcagggatctttgaataggta

SEQ ID NO: 1172504 - DNA, 25 bp, Homo sapien
ccagctgttctagagcgggaattag

SEQ ID NO: 1172505 - DNA, 25 bp, Homo sapien
cctcctgaatacaagctgactgaca

SEQ ID NO: 1172506 - DNA, 25 bp, Homo sapien
atttgtcttctacaccccacagggc

SEQ ID NO: 1172507 - DNA, 25 bp, Homo sapien
cttcccttctaagtagacagcaaaa

SEQ ID NO: 1172508 - DNA, 25 bp, Homo sapien
gaatcctgggtatgccattgacttc

SEQ ID NO: 1172509 - DNA, 25 bp, Homo sapien
ttactcaggtgctaccggactctgg

SEQ ID NO: 1172510 - DNA, 25 bp, Homo sapien
ctgggcccctgaagtaagtcctgcg

SEQ ID NO: 1172511 - DNA, 25 bp, Homo sapien
gtttctgtctaaagtccggctgcgt

SEQ ID NO: 1172512 - DNA, 25 bp, Homo sapien
aaggctcgaccttcccttgcactgg

SEQ ID NO: 1172513 - DNA, 25 bp, Homo sapien
tcatctgcctggactccctgataag

SEQ ID NO: 1172514 - DNA, 25 bp, Homo sapien
aacggtcttcgaagaaaatcaaatg

SEQ ID NO: 1172515 - DNA, 25 bp, Homo sapien
cagccgggagccttggctcctttaa

SEQ ID NO: 1172516 - DNA, 25 bp, Homo sapien
gaatctttgaattgcggcggttgct

SEQ ID NO: 1172517 - DNA, 25 bp, Homo sapien
ctgggaaaatgtctgggtgcacagt

SEQ ID NO: 1172518 - DNA, 25 bp, Homo sapien
ccagagtttcgggaggaatcggttg

SEQ ID NO: 1172519 - DNA, 25 bp, Homo sapien
aggaatcggttggtcgggtcagagg

SEQ ID NO: 1172520 - DNA, 25 bp, Homo sapien
ggaggaatcggttggtcgggtcaga

SEQ ID NO: 1172521 - DNA, 25 bp, Homo sapien
attggcgatcctgttgtgtaagttc

SEQ ID NO: 1172522 - DNA, 25 bp, Homo sapien
tccttcggcggctgttgtgtcggga

SEQ ID NO: 1172523 - DNA, 25 bp, Homo sapien
tgtgtcgggagcctgatcgcgatgg

SEQ ID NO: 1172524 - DNA, 25 bp, Homo sapien
caaaggcgcaagtcgagaggaaact

SEQ ID NO: 1172525 - DNA, 25 bp, Homo sapien
tgtagtcgcggagctgtgtctgttc

SEQ ID NO: 1172526 - DNA, 25 bp, Homo sapien
tcaggcgcggagggcggggccgggc

SEQ ID NO: 1172527 - DNA, 25 bp, Homo sapien
caggcgcggagggcggggccgggcg

SEQ ID NO: 1172528 - DNA, 25 bp, Homo sapien
gctgaaggtgcggaattcgtctcct

SEQ ID NO: 1172529 - DNA, 25 bp, Homo sapien
tacttcgggaacaccaaccaatcag

SEQ ID NO: 1172530 - DNA, 25 bp, Homo sapien
tctcctgacgcgacagtctcctggg

SEQ ID NO: 1172531 - DNA, 25 bp, Homo sapien
gaacccagccagtcaggaagtcgct

SEQ ID NO: 1172532 - DNA, 25 bp, Homo sapien
tttttaagaggcaggatctttcttg

SEQ ID NO: 1172533 - DNA, 25 bp, Homo sapien
aagaggcaggatctttcttgttcct

SEQ ID NO: 1172534 - DNA, 25 bp, Homo sapien
tttaagaggcaggatctttcttgtt

SEQ ID NO: 1172535 - DNA, 25 bp, Homo sapien
taagaggcaggatctttcttgttcc

SEQ ID NO: 1172536 - DNA, 25 bp, Homo sapien
ttctctcctctattacttgatacca

SEQ ID NO: 1172537 - DNA, 25 bp, Homo sapien
aaatctacaagctgtaccacatgct

SEQ ID NO: 1172538 - DNA, 25 bp, Homo sapien
gcttctctcgttgtggtggctagtt

SEQ ID NO: 1172539 - DNA, 25 bp, Homo sapien
cttgataccataactgttcttcccc

SEQ ID NO: 1172540 - DNA, 25 bp, Homo sapien
gcagagggtcctgctgccttctgca

SEQ ID NO: 1172541 - DNA, 25 bp, Homo sapien
gagggtcctgctgccttctgcagtg

SEQ ID NO: 1172542 - DNA, 25 bp, Homo sapien
taggcagagggtcctgctgccttct

SEQ ID NO: 1172543 - DNA, 25 bp, Homo sapien
ctgcagtgtttgtgtccttgggtag

SEQ ID NO: 1172544 - DNA, 25 bp, Homo sapien
aggattgcctgaggcaaatagttca

SEQ ID NO: 1172545 - DNA, 25 bp, Homo sapien
ggattgcctgaggcaaatagttcaa

SEQ ID NO: 1172546 - DNA, 25 bp, Homo sapien
ttgcctgaggcaaatagttcaagac

SEQ ID NO: 1172547 - DNA, 25 bp, Homo sapien
atcttttatcaccataaagtagttt

SEQ ID NO: 1172548 - DNA, 25 bp, Homo sapien
acagggctcgcaactacgctggagc

SEQ ID NO: 1172549 - DNA, 25 bp, Homo sapien
cagctggcccggagtcttggataca

SEQ ID NO: 1172550 - DNA, 25 bp, Homo sapien
cgctggagcctatagagaatggttg

SEQ ID NO: 1172551 - DNA, 25 bp, Homo sapien
ttcttctgtcagatgggcaagcggg

SEQ ID NO: 1172552 - DNA, 25 bp, Homo sapien
ccatcccaggggcgctcaacatccc

SEQ ID NO: 1172553 - DNA, 25 bp, Homo sapien
atcccaggggcgctcaacatcccgg

SEQ ID NO: 1172554 - DNA, 25 bp, Homo sapien
gggaccatcccaggggcgctcaaca

SEQ ID NO: 1172555 - DNA, 25 bp, Homo sapien
gaccatcccaggggcgctcaacatc

SEQ ID NO: 1172556 - DNA, 25 bp, Homo sapien
tcccgttcttgtcgaaagtggccag

SEQ ID NO: 1172557 - DNA, 25 bp, Homo sapien
gactgctgacgcgaataacaaggaa

SEQ ID NO: 1172558 - DNA, 25 bp, Homo sapien
tatgcatgccccgataggtcgtaat

SEQ ID NO: 1172559 - DNA, 25 bp, Homo sapien
cccttgttaaagatggcgcctccgt

SEQ ID NO: 1172560 - DNA, 25 bp, Homo sapien
gccgggcagagtggtgggtgcctgt

SEQ ID NO: 1172561 - DNA, 25 bp, Homo sapien
attagccgggcagagtggtgggtgc

SEQ ID NO: 1172562 - DNA, 25 bp, Homo sapien
aataaataaggggccgggtgcagtg

SEQ ID NO: 1172563 - DNA, 25 bp, Homo sapien
tagccgggcagagtggtgggtgcct

SEQ ID NO: 1172564 - DNA, 25 bp, Homo sapien
cagcctaggacttcgaatgtggagc

SEQ ID NO: 1172565 - DNA, 25 bp, Homo sapien
gatacactcagccagaatacctaga

SEQ ID NO: 1172566 - DNA, 25 bp, Homo sapien
tactgggattgcttaaagtgaggcc

SEQ ID NO: 1172567 - DNA, 25 bp, Homo sapien
caagggctcctgttcaatagtggtg

SEQ ID NO: 1172568 - DNA, 25 bp, Homo sapien
tccttttagtaggaacctgaggagc

SEQ ID NO: 1172569 - DNA, 25 bp, Homo sapien
cctggagccagagctggtttttctg

SEQ ID NO: 1172570 - DNA, 25 bp, Homo sapien
ccttaatggcaagttcccatcacct

SEQ ID NO: 1172571 - DNA, 25 bp, Homo sapien
tgctggggagtccttaatggcaagt

SEQ ID NO: 1172572 - DNA, 25 bp, Homo sapien
cacatactccagctctcggtggaga

SEQ ID NO: 1172573 - DNA, 25 bp, Homo sapien
agcttcggtgcgtccctcctaggtc

SEQ ID NO: 1172574 - DNA, 25 bp, Homo sapien
ctccagctctcggtggagattgttg

SEQ ID NO: 1172575 - DNA, 25 bp, Homo sapien
cctggatggtgagcttcggtgcgtc

SEQ ID NO: 1172576 - DNA, 25 bp, Homo sapien
taaccttgggcagcgatgaaaccag

SEQ ID NO: 1172577 - DNA, 25 bp, Homo sapien
tgagtgcacactgggtacaacctgg

SEQ ID NO: 1172578 - DNA, 25 bp, Homo sapien
tacaacctggatactagatgctgga

SEQ ID NO: 1172579 - DNA, 25 bp, Homo sapien
tcagtagaccgagagctaggaccag

SEQ ID NO: 1172580 - DNA, 25 bp, Homo sapien
gagcaggttcccaggtttctgccgt

SEQ ID NO: 1172581 - DNA, 25 bp, Homo sapien
tttctgccgtcgttgttggccacag

SEQ ID NO: 1172582 - DNA, 25 bp, Homo sapien
tggccacagcgtgggaagcagctct

SEQ ID NO: 1172583 - DNA, 25 bp, Homo sapien
gagctcccgatcacggcttcttggg

SEQ ID NO: 1172584 - DNA, 25 bp, Homo sapien
gcttcacgaagatgtggcatttgag

SEQ ID NO: 1172585 - DNA, 25 bp, Homo sapien
cacagcaggcctcaatcgatgtttt

SEQ ID NO: 1172586 - DNA, 25 bp, Homo sapien
tacaatttagttaaggagataagat

SEQ ID NO: 1172587 - DNA, 25 bp, Homo sapien
tgcacaaattatgagcacataagct

SEQ ID NO: 1172588 - DNA, 25 bp, Homo sapien
caagtcccggctttctctccgtggt

SEQ ID NO: 1172589 - DNA, 25 bp, Homo sapien
tggaacgagcccctacatggcaggc

SEQ ID NO: 1172590 - DNA, 25 bp, Homo sapien
ggtctgcggcttggaacgagcccct

SEQ ID NO: 1172591 - DNA, 25 bp, Homo sapien
tgcggcttggaacgagcccctacat

SEQ ID NO: 1172592 - DNA, 25 bp, Homo sapien
acgagcccctacatggcaggccagg

SEQ ID NO: 1172593 - DNA, 25 bp, Homo sapien
agctctagccaaaagcgcgtcccgc

SEQ ID NO: 1172594 - DNA, 25 bp, Homo sapien
ctacgagatagaaccgtccccgcag

SEQ ID NO: 1172595 - DNA, 25 bp, Homo sapien
cccgcagttcggtgcatgaatggaa

SEQ ID NO: 1172596 - DNA, 25 bp, Homo sapien
ggtgcatgaatggaaagctctagcc

SEQ ID NO: 1172597 - DNA, 25 bp, Homo sapien
catagcgtcgctgagtgtggatacc

SEQ ID NO: 1172598 - DNA, 25 bp, Homo sapien
gaaaaccaccgtatcgctgctgggc

SEQ ID NO: 1172599 - DNA, 25 bp, Homo sapien
gggtccagccttaatgtgtagatgc

SEQ ID NO: 1172600 - DNA, 25 bp, Homo sapien
tgcagctctcggtcagagattcggg

SEQ ID NO: 1172601 - DNA, 25 bp, Homo sapien
cccttgccaaggatggatggagaag

SEQ ID NO: 1172602 - DNA, 25 bp, Homo sapien
gctcagctagcttaaacatggtagg

SEQ ID NO: 1172603 - DNA, 25 bp, Homo sapien
acatggtaggttcccctggaaggag

SEQ ID NO: 1172604 - DNA, 25 bp, Homo sapien
gaaaatgtaagtgccaccgcccttg

SEQ ID NO: 1172605 - DNA, 25 bp, Homo sapien
agcagggccgcacagtgacctgagc

SEQ ID NO: 1172606 - DNA, 25 bp, Homo sapien
ccagctacttctggttcagctaagt

SEQ ID NO: 1172607 - DNA, 25 bp, Homo sapien
cacagtgacctgagcgtgaggctgt

SEQ ID NO: 1172608 - DNA, 25 bp, Homo sapien
ctccaaagagcaatagctgatgacc

SEQ ID NO: 1172609 - DNA, 25 bp, Homo sapien
cctcttcccatcctaaacaagatgt

SEQ ID NO: 1172610 - DNA, 25 bp, Homo sapien
cttcccatcctaaacaagatgtgtg

SEQ ID NO: 1172611 - DNA, 25 bp, Homo sapien
tcttcccatcctaaacaagatgtgt

SEQ ID NO: 1172612 - DNA, 25 bp, Homo sapien
ttcccatcctaaacaagatgtgtga

SEQ ID NO: 1172613 - DNA, 25 bp, Homo sapien
aaatgaggagcaacaggtggttcct

SEQ ID NO: 1172614 - DNA, 25 bp, Homo sapien
caaatgaggagcaacaggtggttcc

SEQ ID NO: 1172615 - DNA, 25 bp, Homo sapien
aatgaggagcaacaggtggttcctc

SEQ ID NO: 1172616 - DNA, 25 bp, Homo sapien
tcacaagccttgcaagctgttccat

SEQ ID NO: 1172617 - DNA, 25 bp, Homo sapien
gaacatgagtgatgccgtagtccat

SEQ ID NO: 1172618 - DNA, 25 bp, Homo sapien
agcaaagggcccgaccacagaacat

SEQ ID NO: 1172619 - DNA, 25 bp, Homo sapien
tgctcacaagccttgcaagctgttc

SEQ ID NO: 1172620 - DNA, 25 bp, Homo sapien
gatgtagagatcattgcagatggtg

SEQ ID NO: 1172621 - DNA, 25 bp, Homo sapien
cagtagcactttgtcattcacagaa

SEQ ID NO: 1172622 - DNA, 25 bp, Homo sapien
tgtaggcctcttcaaatgcttaata

SEQ ID NO: 1172623 - DNA, 25 bp, Homo sapien
gtactcctttaactcctgtcaacta

SEQ ID NO: 1172624 - DNA, 25 bp, Homo sapien
aattcaacatgaccaagggcttgcc

SEQ ID NO: 1172625 - DNA, 25 bp, Homo sapien
tggaaccacaaaggaggagatgtgc

SEQ ID NO: 1172626 - DNA, 25 bp, Homo sapien
atggcccatgcgtttcatcccacga

SEQ ID NO: 1172627 - DNA, 25 bp, Homo sapien
cattccaaaggcaggtgcgatggcc

SEQ ID NO: 1172628 - DNA, 25 bp, Homo sapien
tggcccatgcgtttcatcccacgat

SEQ ID NO: 1172629 - DNA, 25 bp, Homo sapien
tcattccaaaggcaggtgcgatggc

SEQ ID NO: 1172630 - DNA, 25 bp, Homo sapien
catcctcaccaaaacccccaaccag

SEQ ID NO: 1172631 - DNA, 25 bp, Homo sapien
cctgccatcctcaccaaaaccccca

SEQ ID NO: 1172632 - DNA, 25 bp, Homo sapien
tgtggactggctgtcctgccatcct

SEQ ID NO: 1172633 - DNA, 25 bp, Homo sapien
ctgtggactggctgtcctgccatcc

SEQ ID NO: 1172634 - DNA, 25 bp, Homo sapien
cgaggcttagtgatgtgtcttggca

SEQ ID NO: 1172635 - DNA, 25 bp, Homo sapien
gctttataggtttgcaacaaagcaa

SEQ ID NO: 1172636 - DNA, 25 bp, Homo sapien
tagctctggtgataacgctttatag

SEQ ID NO: 1172637 - DNA, 25 bp, Homo sapien
aacaaaacgaggcttagtgatgtgt

SEQ ID NO: 1172638 - DNA, 25 bp, Homo sapien
tttaataagcatttgaagtgaagca

SEQ ID NO: 1172639 - DNA, 25 bp, Homo sapien
gaaatttaataagcatttgaagtga

SEQ ID NO: 1172640 - DNA, 25 bp, Homo sapien
ctcagattgaaatttaataagcatt

SEQ ID NO: 1172641 - DNA, 25 bp, Homo sapien
aatttaataagcatttgaagtgaag

SEQ ID NO: 1172642 - DNA, 25 bp, Homo sapien
agaagcgccgcagcgagtgggcggt

SEQ ID NO: 1172643 - DNA, 25 bp, Homo sapien
ggtccgatccggagggcggtctgga

SEQ ID NO: 1172644 - DNA, 25 bp, Homo sapien
gccgcagcgagtgggcggtaactcg

SEQ ID NO: 1172645 - DNA, 25 bp, Homo sapien
aaaccattcgcagggtccgatccgg

SEQ ID NO: 1172646 - DNA, 25 bp, Homo sapien
cgcggccgacgggatagggagtagg

SEQ ID NO: 1172647 - DNA, 25 bp, Homo sapien
cgtttccgcagtccaaaagtcatct

SEQ ID NO: 1172648 - DNA, 25 bp, Homo sapien
ctttactgactcgaagcatatttcc

SEQ ID NO: 1172649 - DNA, 25 bp, Homo sapien
tccttgactgtgcacttgcgcagct

SEQ ID NO: 1172650 - DNA, 25 bp, Homo sapien
gtcatctccgggaactatccttggt

SEQ ID NO: 1172651 - DNA, 25 bp, Homo sapien
caataaatttctaggattctctgac

SEQ ID NO: 1172652 - DNA, 25 bp, Homo sapien
gctcgccgcctgaatagttcaactt

SEQ ID NO: 1172653 - DNA, 25 bp, Homo sapien
ctttatactgtgagcctgaatcagg

SEQ ID NO: 1172654 - DNA, 25 bp, Homo sapien
tataggctaagggacaagaccatac

SEQ ID NO: 1172655 - DNA, 25 bp, Homo sapien
tgagcacaaagtactgagagttgag

SEQ ID NO: 1172656 - DNA, 25 bp, Homo sapien
gggctgagcacaaagtactgagagt

SEQ ID NO: 1172657 - DNA, 25 bp, Homo sapien
gagagttgaggtatccggagtccag

SEQ ID NO: 1172658 - DNA, 25 bp, Homo sapien
agttgaggtatccggagtccaggac

SEQ ID NO: 1172659 - DNA, 25 bp, Homo sapien
ttaacaaactgagcatctaagtgcc

SEQ ID NO: 1172660 - DNA, 25 bp, Homo sapien
ttacagggcacgttgacccagggct

SEQ ID NO: 1172661 - DNA, 25 bp, Homo sapien
ggctagtagggctcaccaatcaaat

SEQ ID NO: 1172662 - DNA, 25 bp, Homo sapien
gattctcagatttcatagcacaggg

SEQ ID NO: 1172663 - DNA, 25 bp, Homo sapien
tgtctggcgtcgatgttacctggca

SEQ ID NO: 1172664 - DNA, 25 bp, Homo sapien
gaagaggagatagccatggctctgg

SEQ ID NO: 1172665 - DNA, 25 bp, Homo sapien
cgtcgatgttacctggcacacagcc

SEQ ID NO: 1172666 - DNA, 25 bp, Homo sapien
gttctgttgcttgtctggcgtcgat

SEQ ID NO: 1172667 - DNA, 25 bp, Homo sapien
gcagggtcccgtgcaatgaagtcaa

SEQ ID NO: 1172668 - DNA, 25 bp, Homo sapien
caggtgtagcgtctctgcagggtcc

SEQ ID NO: 1172669 - DNA, 25 bp, Homo sapien
gcaagctgggtgtattcttccaaaa

SEQ ID NO: 1172670 - DNA, 25 bp, Homo sapien
aatgaagtcaaatgcctcaggcagg

SEQ ID NO: 1172671 - DNA, 25 bp, Homo sapien
actgtccaacaaagattctacctct

SEQ ID NO: 1172672 - DNA, 25 bp, Homo sapien
ctctccctcgctatttccctgatac

SEQ ID NO: 1172673 - DNA, 25 bp, Homo sapien
tgtccaacaaagattctacctctcc

SEQ ID NO: 1172674 - DNA, 25 bp, Homo sapien
aagattctacctctccctcgctatt

SEQ ID NO: 1172675 - DNA, 25 bp, Homo sapien
tttctgagtctgctcccagtcttgg

SEQ ID NO: 1172676 - DNA, 25 bp, Homo sapien
gagtctgctcccagtcttggccacg

SEQ ID NO: 1172677 - DNA, 25 bp, Homo sapien
gctgttcagcagcacgtgacaattg

SEQ ID NO: 1172678 - DNA, 25 bp, Homo sapien
tgctgttcagcagcacgtgacaatt

SEQ ID NO: 1172679 - DNA, 25 bp, Homo sapien
taggctaggaactgaagtaggacca

SEQ ID NO: 1172680 - DNA, 25 bp, Homo sapien
ccaaggaggagatagtttataggct

SEQ ID NO: 1172681 - DNA, 25 bp, Homo sapien
gaatctaggtagaagagcatgggaa

SEQ ID NO: 1172682 - DNA, 25 bp, Homo sapien
gaagaggcaggctaaagggttataa

SEQ ID NO: 1172683 - DNA, 25 bp, Homo sapien
tggtgtgctgacaggtgactcaaga

SEQ ID NO: 1172684 - DNA, 25 bp, Homo sapien
tgccctggaatctctacgtcacaca

SEQ ID NO: 1172685 - DNA, 25 bp, Homo sapien
ggcatggtagagttgctttcacaca

SEQ ID NO: 1172686 - DNA, 25 bp, Homo sapien
ggtgactcaagactgggcccaggca

SEQ ID NO: 1172687 - DNA, 25 bp, Homo sapien
ggtaagtatctctgctccagcttga

SEQ ID NO: 1172688 - DNA, 25 bp, Homo sapien
gagttcagggaaccgcatgtcatag

SEQ ID NO: 1172689 - DNA, 25 bp, Homo sapien
ggctgggcctgtaatggatccaaaa

SEQ ID NO: 1172690 - DNA, 25 bp, Homo sapien
tccagcttgagccaatgccagagag

SEQ ID NO: 1172691 - DNA, 25 bp, Homo sapien
tggtaattgcctaggaatgatttac

SEQ ID NO: 1172692 - DNA, 25 bp, Homo sapien
tgacaggtgagggacattacagacc

SEQ ID NO: 1172693 - DNA, 25 bp, Homo sapien
tacagaccaatctacccattgtgac

SEQ ID NO: 1172694 - DNA, 25 bp, Homo sapien
ttaagtacatgtagcaaatagtggg

SEQ ID NO: 1172695 - DNA, 25 bp, Homo sapien
catagcactgggtttcgatagcacg

SEQ ID NO: 1172696 - DNA, 25 bp, Homo sapien
tgtgctgctgccactacatagcact

SEQ ID NO: 1172697 - DNA, 25 bp, Homo sapien
catgctgtggccataacttgctctc

SEQ ID NO: 1172698 - DNA, 25 bp, Homo sapien
tggtggcgtccacactgtgctgctg

SEQ ID NO: 1172699 - DNA, 25 bp, Homo sapien
tattcgggcaaggcagaggcctggc

SEQ ID NO: 1172700 - DNA, 25 bp, Homo sapien
tctattcgggcaaggcagaggcctg

SEQ ID NO: 1172701 - DNA, 25 bp, Homo sapien
gtctattcgggcaaggcagaggcct

SEQ ID NO: 1172702 - DNA, 25 bp, Homo sapien
ctattcgggcaaggcagaggcctgg

SEQ ID NO: 1172703 - DNA, 25 bp, Homo sapien
tcggcgcaactgtcgcagatagttg

SEQ ID NO: 1172704 - DNA, 25 bp, Homo sapien
tgtcggcgcaactgtcgcagatagt

SEQ ID NO: 1172705 - DNA, 25 bp, Homo sapien
gtgtcggcgcaactgtcgcagatag

SEQ ID NO: 1172706 - DNA, 25 bp, Homo sapien
ggcgcaactgtcgcagatagttgag

SEQ ID NO: 1172707 - DNA, 25 bp, Homo sapien
ttaagacagtgggtgacccagattg

SEQ ID NO: 1172708 - DNA, 25 bp, Homo sapien
tgggtgacccagattgccatagagg

SEQ ID NO: 1172709 - DNA, 25 bp, Homo sapien
gacagtgggtgacccagattgccat

SEQ ID NO: 1172710 - DNA, 25 bp, Homo sapien
acccagattgccatagaggtcaggc

SEQ ID NO: 1172711 - DNA, 25 bp, Homo sapien
gggcaggtctaaactcacagaagtc

SEQ ID NO: 1172712 - DNA, 25 bp, Homo sapien
ggaggggcaggtctaaactcacaga

SEQ ID NO: 1172713 - DNA, 25 bp, Homo sapien
gaggggcaggtctaaactcacagaa

SEQ ID NO: 1172714 - DNA, 25 bp, Homo sapien
caggtctaaactcacagaagtcaag

SEQ ID NO: 1172715 - DNA, 25 bp, Homo sapien
catgttgaatgagccaggaggtcta

SEQ ID NO: 1172716 - DNA, 25 bp, Homo sapien
gaggtctagaactggagcttagtcc

SEQ ID NO: 1172717 - DNA, 25 bp, Homo sapien
tctagttcccaaaggcgatgtccag

SEQ ID NO: 1172718 - DNA, 25 bp, Homo sapien
cacttttatttaggtagggaggcat

SEQ ID NO: 1172719 - DNA, 25 bp, Homo sapien
ctagtcatgcctcccaactgtggtg

SEQ ID NO: 1172720 - DNA, 25 bp, Homo sapien
caagcaagctgtgggccatgaagcc

SEQ ID NO: 1172721 - DNA, 25 bp, Homo sapien
gaacagataagactgggtcagccta

SEQ ID NO: 1172722 - DNA, 25 bp, Homo sapien
tctggcgtgactacatcaatggctc

SEQ ID NO: 1172723 - DNA, 25 bp, Homo sapien
taacaagcaggacccacttgagcgc

SEQ ID NO: 1172724 - DNA, 25 bp, Homo sapien
ccttattgtaggatgagccaagtcg

SEQ ID NO: 1172725 - DNA, 25 bp, Homo sapien
gaagctgtcaggtgatattccctac

SEQ ID NO: 1172726 - DNA, 25 bp, Homo sapien
cagacatcagactgcgggttcgggc

SEQ ID NO: 1172727 - DNA, 25 bp, Homo sapien
agccccacttcccaggtgcacgcca

SEQ ID NO: 1172728 - DNA, 25 bp, Homo sapien
gcaagccccacttcccaggtgcacg

SEQ ID NO: 1172729 - DNA, 25 bp, Homo sapien
cccacttcccaggtgcacgccattc

SEQ ID NO: 1172730 - DNA, 25 bp, Homo sapien
ccccacttcccaggtgcacgccatt

SEQ ID NO: 1172731 - DNA, 25 bp, Homo sapien
tgacttcttattggcactggagcgc

SEQ ID NO: 1172732 - DNA, 25 bp, Homo sapien
ccagggccgctgtgatgaaagtaac

SEQ ID NO: 1172733 - DNA, 25 bp, Homo sapien
tgtcattgatgaccacgagcgtgga

SEQ ID NO: 1172734 - DNA, 25 bp, Homo sapien
gaaagtaactttcgccaggtgctgc

SEQ ID NO: 1172735 - DNA, 25 bp, Homo sapien
cattggattcttaacaactctgagg

SEQ ID NO: 1172736 - DNA, 25 bp, Homo sapien
gaatgcatgagactagttcctgccc

SEQ ID NO: 1172737 - DNA, 25 bp, Homo sapien
gctacagtgcaggattatggctcac

SEQ ID NO: 1172738 - DNA, 25 bp, Homo sapien
agctgctgagcagggattctggaaa

SEQ ID NO: 1172739 - DNA, 25 bp, Homo sapien
ggctctgtccattactaggcactag

SEQ ID NO: 1172740 - DNA, 25 bp, Homo sapien
gaattgcttgaggtgatctcttgga

SEQ ID NO: 1172741 - DNA, 25 bp, Homo sapien
gggttgctcccactatatttgaggc

SEQ ID NO: 1172742 - DNA, 25 bp, Homo sapien
taagttcagttcaacagtgggttgc

SEQ ID NO: 1172743 - DNA, 25 bp, Homo sapien
tacacggatcagctaggcgacactt

SEQ ID NO: 1172744 - DNA, 25 bp, Homo sapien
ggtattccgcccttatgagtcatgg

SEQ ID NO: 1172745 - DNA, 25 bp, Homo sapien
tacaaggcttcgcataatctggtct

SEQ ID NO: 1172746 - DNA, 25 bp, Homo sapien
tgaattccgagacgggatctgggca

SEQ ID NO: 1172747 - DNA, 25 bp, Homo sapien
tatcccgcaaatgcaggtatcctct

SEQ ID NO: 1172748 - DNA, 25 bp, Homo sapien
gagttcccaacccacattagctaat

SEQ ID NO: 1172749 - DNA, 25 bp, Homo sapien
caacagctatctatatgcacacgca

SEQ ID NO: 1172750 - DNA, 25 bp, Homo sapien
cattattccccagttgtccaagtca

SEQ ID NO: 1172751 - DNA, 25 bp, Homo sapien
acaggttgaggcgacttgaacagca

SEQ ID NO: 1172752 - DNA, 25 bp, Homo sapien
gacttagagctaggttccaagctga

SEQ ID NO: 1172753 - DNA, 25 bp, Homo sapien
cagcaactgattgtggtccctactc

SEQ ID NO: 1172754 - DNA, 25 bp, Homo sapien
ttattcgggagccatagaagccaga

SEQ ID NO: 1172755 - DNA, 25 bp, Homo sapien
caaagcgcccggccttataaaggag

SEQ ID NO: 1172756 - DNA, 25 bp, Homo sapien
tgcttatatatagtcctgcctctag

SEQ ID NO: 1172757 - DNA, 25 bp, Homo sapien
gcgattcgtgtttcctcttcgaaga

SEQ ID NO: 1172758 - DNA, 25 bp, Homo sapien
taaaacgagcgattcgtgtttcctc

SEQ ID NO: 1172759 - DNA, 25 bp, Homo sapien
tagatgcagttatcctgtagaagga

SEQ ID NO: 1172760 - DNA, 25 bp, Homo sapien
tgtagcttacctcaaggcgccgtca

SEQ ID NO: 1172761 - DNA, 25 bp, Homo sapien
gaagtaatcgcagaaaacccggaca

SEQ ID NO: 1172762 - DNA, 25 bp, Homo sapien
tagttacccgcttgtgagtgcatcg

SEQ ID NO: 1172763 - DNA, 25 bp, Homo sapien
ggtgacttccgttcatgctcagaga

SEQ ID NO: 1172764 - DNA, 25 bp, Homo sapien
acaacacgtcgcgtggcttcatccg

SEQ ID NO: 1172765 - DNA, 25 bp, Homo sapien
gggtccggcgttagtcttcagcacc

SEQ ID NO: 1172766 - DNA, 25 bp, Homo sapien
ggatctcagacacaacacgtcgcgt

SEQ ID NO: 1172767 - DNA, 25 bp, Homo sapien
tagtcttcagcaccgggatctcaga

SEQ ID NO: 1172768 - DNA, 25 bp, Homo sapien
ccggataagggactgatattcctcc

SEQ ID NO: 1172769 - DNA, 25 bp, Homo sapien
ttcagtcgctgcacccacaactcac

SEQ ID NO: 1172770 - DNA, 25 bp, Homo sapien
cggataagggactgatattcctcct

SEQ ID NO: 1172771 - DNA, 25 bp, Homo sapien
gatattcctccttcagtcgctgcac

SEQ ID NO: 1172772 - DNA, 25 bp, Homo sapien
tctaactatgagctaaactccccaa

SEQ ID NO: 1172773 - DNA, 25 bp, Homo sapien
gcagaaactacaaggaagacaaact

SEQ ID NO: 1172774 - DNA, 25 bp, Homo sapien
gagataactgagaagacagcccgtt

SEQ ID NO: 1172775 - DNA, 25 bp, Homo sapien
ccctaatgtggcttgaaagagtgaa

SEQ ID NO: 1172776 - DNA, 25 bp, Homo sapien
gaaccaatcgttgtcagcattcttg

SEQ ID NO: 1172777 - DNA, 25 bp, Homo sapien
ggactccagtcggaaccaatcgttg

SEQ ID NO: 1172778 - DNA, 25 bp, Homo sapien
cagtcggaaccaatcgttgtcagca

SEQ ID NO: 1172779 - DNA, 25 bp, Homo sapien
cttgttggactccagtcggaaccaa

SEQ ID NO: 1172780 - DNA, 25 bp, Homo sapien
ctcaaatgatatcttggcttaggcc

SEQ ID NO: 1172781 - DNA, 25 bp, Homo sapien
tagtgggcgctaggataccaaattg

SEQ ID NO: 1172782 - DNA, 25 bp, Homo sapien
ccaaattgcctaactcatataagac

SEQ ID NO: 1172783 - DNA, 25 bp, Homo sapien
taacatgtgacagggcagctttggt

SEQ ID NO: 1172784 - DNA, 25 bp, Homo sapien
tcaggaggtcatggatataccagca

SEQ ID NO: 1172785 - DNA, 25 bp, Homo sapien
caaactcatatttcaggaggtcatg

SEQ ID NO: 1172786 - DNA, 25 bp, Homo sapien
ttcaggaggtcatggatataccagc

SEQ ID NO: 1172787 - DNA, 25 bp, Homo sapien
ttcatatttcccactctatcacact

SEQ ID NO: 1172788 - DNA, 25 bp, Homo sapien
catatttcccactctatcacactca

SEQ ID NO: 1172789 - DNA, 25 bp, Homo sapien
cttcatatttcccactctatcacac

SEQ ID NO: 1172790 - DNA, 25 bp, Homo sapien
atatttcccactctatcacactcac

SEQ ID NO: 1172791 - DNA, 25 bp, Homo sapien
ggatagcttgttacccatcatctaa

SEQ ID NO: 1172792 - DNA, 25 bp, Homo sapien
aaaggatagcttgttacccatcatc

SEQ ID NO: 1172793 - DNA, 25 bp, Homo sapien
tagcttgttacccatcatctaatcc

SEQ ID NO: 1172794 - DNA, 25 bp, Homo sapien
gcttgttacccatcatctaatccct

SEQ ID NO: 1172795 - DNA, 25 bp, Homo sapien
tctggggcagtagtaggatatgtga

SEQ ID NO: 1172796 - DNA, 25 bp, Homo sapien
gggcagtagtaggatatgtgatagg

SEQ ID NO: 1172797 - DNA, 25 bp, Homo sapien
cagctcaggaactgcaatttctggg

SEQ ID NO: 1172798 - DNA, 25 bp, Homo sapien
cagtagtaggatatgtgataggaat

SEQ ID NO: 1172799 - DNA, 25 bp, Homo sapien
cagacatcaagccaagcatccatta

SEQ ID NO: 1172800 - DNA, 25 bp, Homo sapien
ttgcttaggctcagcaaaggagggc

SEQ ID NO: 1172801 - DNA, 25 bp, Homo sapien
ggtgttgacatgcaaagtttaccat

SEQ ID NO: 1172802 - DNA, 25 bp, Homo sapien
gggcataggaagactactagtgatc

SEQ ID NO: 1172803 - DNA, 25 bp, Homo sapien
ttgaaatgatccgtcaggcatattt

SEQ ID NO: 1172804 - DNA, 25 bp, Homo sapien
aatgatccgtcaggcatattttgcc

SEQ ID NO: 1172805 - DNA, 25 bp, Homo sapien
ccaaatttgggcacattcctggccc

SEQ ID NO: 1172806 - DNA, 25 bp, Homo sapien
gagatgagctagtccaaatttgggc

SEQ ID NO: 1172807 - DNA, 25 bp, Homo sapien
gattactaccagtcaatgcttcttg

SEQ ID NO: 1172808 - DNA, 25 bp, Homo sapien
gaacatgcttaagggacatcactgt

SEQ ID NO: 1172809 - DNA, 25 bp, Homo sapien
tgctcagggcctaagtccctctttc

SEQ ID NO: 1172810 - DNA, 25 bp, Homo sapien
tgcaatacaaggaaaatcctgtgag

SEQ ID NO: 1172811 - DNA, 25 bp, Homo sapien
ttggatgacgcccttctgaatcaga

SEQ ID NO: 1172812 - DNA, 25 bp, Homo sapien
tttgtgttggatgacgcccttctga

SEQ ID NO: 1172813 - DNA, 25 bp, Homo sapien
tgtgttggatgacgcccttctgaat

SEQ ID NO: 1172814 - DNA, 25 bp, Homo sapien
ggatgacgcccttctgaatcagatc

SEQ ID NO: 1172815 - DNA, 25 bp, Homo sapien
tgcacaggaaaatagtatcgtagcc

SEQ ID NO: 1172816 - DNA, 25 bp, Homo sapien
cttagtaacaactagaggtggaggg

SEQ ID NO: 1172817 - DNA, 25 bp, Homo sapien
tacctctagattgtccaaagcccag

SEQ ID NO: 1172818 - DNA, 25 bp, Homo sapien
tatcgtagcctatcaaaggtccctc

SEQ ID NO: 1172819 - DNA, 25 bp, Homo sapien
gttacccccgtgcctccagaatcgc

SEQ ID NO: 1172820 - DNA, 25 bp, Homo sapien
agttacccccgtgcctccagaatcg

SEQ ID NO: 1172821 - DNA, 25 bp, Homo sapien
accagaaagactatatgtactcact

SEQ ID NO: 1172822 - DNA, 25 bp, Homo sapien
aaaccagaaagactatatgtactca

SEQ ID NO: 1172823 - DNA, 25 bp, Homo sapien
ccagaaagactatatgtactcactt

SEQ ID NO: 1172824 - DNA, 25 bp, Homo sapien
aaccagaaagactatatgtactcac

SEQ ID NO: 1172825 - DNA, 25 bp, Homo sapien
tagtatggccgcgaggcttacagca

SEQ ID NO: 1172826 - DNA, 25 bp, Homo sapien
caacccggcgtagctgttcatgtgc

SEQ ID NO: 1172827 - DNA, 25 bp, Homo sapien
ttcttgcaggctaacacggtagggc

SEQ ID NO: 1172828 - DNA, 25 bp, Homo sapien
tccaaagcaagtccctgaggtatag

SEQ ID NO: 1172829 - DNA, 25 bp, Homo sapien
accggccaccggcttcaccgtctct

SEQ ID NO: 1172830 - DNA, 25 bp, Homo sapien
ccggcttcaccgtctctcaaagcgc

SEQ ID NO: 1172831 - DNA, 25 bp, Homo sapien
ggccaccggcttcaccgtctctcaa

SEQ ID NO: 1172832 - DNA, 25 bp, Homo sapien
ccaccggcttcaccgtctctcaaag

SEQ ID NO: 1172833 - DNA, 25 bp, Homo sapien
ttagccgcagccgttgcccagatcg

SEQ ID NO: 1172834 - DNA, 25 bp, Homo sapien
agctttagccgcagccgttgcccag

SEQ ID NO: 1172835 - DNA, 25 bp, Homo sapien
cagatcgctcccgccgcaggggccg

SEQ ID NO: 1172836 - DNA, 25 bp, Homo sapien
ctttagccgcagccgttgcccagat

SEQ ID NO: 1172837 - DNA, 25 bp, Homo sapien
gtgaggcggcgggagaggccagcca

SEQ ID NO: 1172838 - DNA, 25 bp, Homo sapien
ctgtcccccagtgaggcggcgggag

SEQ ID NO: 1172839 - DNA, 25 bp, Homo sapien
agggccaggccccagttcagggcca

SEQ ID NO: 1172840 - DNA, 25 bp, Homo sapien
gccaggccccagttcagggccaccc

SEQ ID NO: 1172841 - DNA, 25 bp, Homo sapien
acagcagggctttagccgggtccgc

SEQ ID NO: 1172842 - DNA, 25 bp, Homo sapien
cccctcgagggcagaaaggccgaga

SEQ ID NO: 1172843 - DNA, 25 bp, Homo sapien
accgctgattggctacggaatccgg

SEQ ID NO: 1172844 - DNA, 25 bp, Homo sapien
cacgcgcctttgtggagagtgtcct

SEQ ID NO: 1172845 - DNA, 25 bp, Homo sapien
tggcatcgtgtttggtacaaagtaa

SEQ ID NO: 1172846 - DNA, 25 bp, Homo sapien
ggcatcgtgtttggtacaaagtaaa

SEQ ID NO: 1172847 - DNA, 25 bp, Homo sapien
catcgtgtttggtacaaagtaaata

SEQ ID NO: 1172848 - DNA, 25 bp, Homo sapien
ctggcatcgtgtttggtacaaagta

SEQ ID NO: 1172849 - DNA, 25 bp, Homo sapien
agcagtatacgcactgagggcagga

SEQ ID NO: 1172850 - DNA, 25 bp, Homo sapien
gagggcaggaaccagatctatcgaa

SEQ ID NO: 1172851 - DNA, 25 bp, Homo sapien
ccactaccacatcaacgaaagtggg

SEQ ID NO: 1172852 - DNA, 25 bp, Homo sapien
cattaggtggttggctcagtcatca

SEQ ID NO: 1172853 - DNA, 25 bp, Homo sapien
taacatggggtttggcccagaggct

SEQ ID NO: 1172854 - DNA, 25 bp, Homo sapien
gtggctctcgggtacggcccaggcg

SEQ ID NO: 1172855 - DNA, 25 bp, Homo sapien
aatggtagcttggatcccactcggg

SEQ ID NO: 1172856 - DNA, 25 bp, Homo sapien
gctggatattaacaggtggctctcg

SEQ ID NO: 1172857 - DNA, 25 bp, Homo sapien
gggaaccccatgatctgctcgaagg

SEQ ID NO: 1172858 - DNA, 25 bp, Homo sapien
tgggacgagggcctgaggtccgtcc

SEQ ID NO: 1172859 - DNA, 25 bp, Homo sapien
gtttcttgagccgttcatcaggcag

SEQ ID NO: 1172860 - DNA, 25 bp, Homo sapien
tggaacgggctaagttggtccgaga

SEQ ID NO: 1172861 - DNA, 25 bp, Homo sapien
caaggcaatccccattggacgcaag

SEQ ID NO: 1172862 - DNA, 25 bp, Homo sapien
gctacgtctcaaagtgggtggctca

SEQ ID NO: 1172863 - DNA, 25 bp, Homo sapien
tggctcaggccggagggccaagcgg

SEQ ID NO: 1172864 - DNA, 25 bp, Homo sapien
gcggagagaagtgctacgtctcaaa

SEQ ID NO: 1172865 - DNA, 25 bp, Homo sapien
cagggggctctgtccgtatgctgaa

SEQ ID NO: 1172866 - DNA, 25 bp, Homo sapien
gctctgtccgtatgctgaacagggt

SEQ ID NO: 1172867 - DNA, 25 bp, Homo sapien
ggctctgtccgtatgctgaacaggg

SEQ ID NO: 1172868 - DNA, 25 bp, Homo sapien
ctgtccgtatgctgaacagggtagg

SEQ ID NO: 1172869 - DNA, 25 bp, Homo sapien
agtagaaaggctcagaggaccgggc

SEQ ID NO: 1172870 - DNA, 25 bp, Homo sapien
gagtagaaaggctcagaggaccggg

SEQ ID NO: 1172871 - DNA, 25 bp, Homo sapien
gtagaaaggctcagaggaccgggcg

SEQ ID NO: 1172872 - DNA, 25 bp, Homo sapien
ttagctcagaaaatgtgcaaccacg

SEQ ID NO: 1172873 - DNA, 25 bp, Homo sapien
ttaattaggcctaggcagagtccca

SEQ ID NO: 1172874 - DNA, 25 bp, Homo sapien
gagaggcatgtccaaactgctgtaa

SEQ ID NO: 1172875 - DNA, 25 bp, Homo sapien
tgctaagatgttctgtgcctgcctc

SEQ ID NO: 1172876 - DNA, 25 bp, Homo sapien
ccagctgctcaccactcccaccttt

SEQ ID NO: 1172877 - DNA, 25 bp, Homo sapien
cccagctgctcaccactcccacctt

SEQ ID NO: 1172878 - DNA, 25 bp, Homo sapien
ggtcatgagcagtaagcccatcaca

SEQ ID NO: 1172879 - DNA, 25 bp, Homo sapien
gctcagctagctgacgttgcagctc

SEQ ID NO: 1172880 - DNA, 25 bp, Homo sapien
cacagctgaatgtaccacggactca

SEQ ID NO: 1172881 - DNA, 25 bp, Homo sapien
cctgttgcccacttactcctctgct

SEQ ID NO: 1172882 - DNA, 25 bp, Homo sapien
gaaggtcagagtacaatcggcaagt

SEQ ID NO: 1172883 - DNA, 25 bp, Homo sapien
taacctttcaacagcatgctgccca

SEQ ID NO: 1172884 - DNA, 25 bp, Homo sapien
tatatcctacctggcactttaacct

SEQ ID NO: 1172885 - DNA, 25 bp, Homo sapien
atcccatgcatgtttcatccccaaa

SEQ ID NO: 1172886 - DNA, 25 bp, Homo sapien
ttcccaggtttcgaaggccaacatg

SEQ ID NO: 1172887 - DNA, 25 bp, Homo sapien
cccaggtttcgaaggccaacatgac

SEQ ID NO: 1172888 - DNA, 25 bp, Homo sapien
tcccaggtttcgaaggccaacatga

SEQ ID NO: 1172889 - DNA, 25 bp, Homo sapien
tgcccaggaagccttagaagagctt

SEQ ID NO: 1172890 - DNA, 25 bp, Homo sapien
cactgcccaggaagccttagaagag

SEQ ID NO: 1172891 - DNA, 25 bp, Homo sapien
caggaagccttagaagagcttcaga

SEQ ID NO: 1172892 - DNA, 25 bp, Homo sapien
cagaccactgcccaggaagccttag

SEQ ID NO: 1172893 - DNA, 25 bp, Homo sapien
tcttgccggaagtcccttctcagac

SEQ ID NO: 1172894 - DNA, 25 bp, Homo sapien
gaagaggtcgagtgctgctcagaca

SEQ ID NO: 1172895 - DNA, 25 bp, Homo sapien
tcagacagaagtcccgaagaggtcg

SEQ ID NO: 1172896 - DNA, 25 bp, Homo sapien
caggcacctcttgccggaagtccct

SEQ ID NO: 1172897 - DNA, 25 bp, Homo sapien
tgggaaaagtagatacaactgccag

SEQ ID NO: 1172898 - DNA, 25 bp, Homo sapien
gggccaccaccagtggcagatggac

SEQ ID NO: 1172899 - DNA, 25 bp, Homo sapien
ataacctttaggaaagtaggcactg

SEQ ID NO: 1172900 - DNA, 25 bp, Homo sapien
tacaactgccagatttaagggttgg

SEQ ID NO: 1172901 - DNA, 25 bp, Homo sapien
gtgccagagggcaccaatcacatct

SEQ ID NO: 1172902 - DNA, 25 bp, Homo sapien
aggagggaacatatttctggaagac

SEQ ID NO: 1172903 - DNA, 25 bp, Homo sapien
gagtaggattcacagcttcgcagga

SEQ ID NO: 1172904 - DNA, 25 bp, Homo sapien
gaagacagctcggaatcgagtagga

SEQ ID NO: 1172905 - DNA, 25 bp, Homo sapien
tatgggcaactgactcctctcctag

SEQ ID NO: 1172906 - DNA, 25 bp, Homo sapien
tcctagtccacagacactattccct

SEQ ID NO: 1172907 - DNA, 25 bp, Homo sapien
cagacaaagagtatgggcaactgac

SEQ ID NO: 1172908 - DNA, 25 bp, Homo sapien
acactattccctgcccagatattgg

SEQ ID NO: 1172909 - DNA, 25 bp, Homo sapien
cattggcaagtatcggtggagcccg

SEQ ID NO: 1172910 - DNA, 25 bp, Homo sapien
tggaccattggcaagtatcggtgga

SEQ ID NO: 1172911 - DNA, 25 bp, Homo sapien
ccggcggcctcggcggttgatttca

SEQ ID NO: 1172912 - DNA, 25 bp, Homo sapien
agggaactggaccattggcaagtat

SEQ ID NO: 1172913 - DNA, 25 bp, Homo sapien
aatgatgctgataaactacggggaa

SEQ ID NO: 1172914 - DNA, 25 bp, Homo sapien
ggtttccctggaccctacatcttca

SEQ ID NO: 1172915 - DNA, 25 bp, Homo sapien
gtttagttctatgaagtgtgaatga

SEQ ID NO: 1172916 - DNA, 25 bp, Homo sapien
ctacatcttcaatctttactagttt

SEQ ID NO: 1172917 - DNA, 25 bp, Homo sapien
gtcctctcgctccaggtaacgtttc

SEQ ID NO: 1172918 - DNA, 25 bp, Homo sapien
cctctcgctccaggtaacgtttcca

SEQ ID NO: 1172919 - DNA, 25 bp, Homo sapien
ctcgctccaggtaacgtttccacat

SEQ ID NO: 1172920 - DNA, 25 bp, Homo sapien
tctcgctccaggtaacgtttccaca

SEQ ID NO: 1172921 - DNA, 25 bp, Homo sapien
tcctttcccactaccaacactccta

SEQ ID NO: 1172922 - DNA, 25 bp, Homo sapien
cattgttggatgttatgagatgatt

SEQ ID NO: 1172923 - DNA, 25 bp, Homo sapien
taccccttgatagtatcgatttttc

SEQ ID NO: 1172924 - DNA, 25 bp, Homo sapien
tgcatcatccagtcttgttcccata

SEQ ID NO: 1172925 - DNA, 25 bp, Homo sapien
ggcctggcacttgagacaacttttc

SEQ ID NO: 1172926 - DNA, 25 bp, Homo sapien
aacttttcaactggcccacaaacag

SEQ ID NO: 1172927 - DNA, 25 bp, Homo sapien
gacaacttttcaactggcccacaaa

SEQ ID NO: 1172928 - DNA, 25 bp, Homo sapien
gagacaacttttcaactggcccaca

SEQ ID NO: 1172929 - DNA, 25 bp, Homo sapien
acctcgaaggtcgtggagcgatacc

SEQ ID NO: 1172930 - DNA, 25 bp, Homo sapien
cctcgaaggtcgtggagcgataccc

SEQ ID NO: 1172931 - DNA, 25 bp, Homo sapien
tcgaaggtcgtggagcgatacccac

SEQ ID NO: 1172932 - DNA, 25 bp, Homo sapien
aaaacctcgaaggtcgtggagcgat

SEQ ID NO: 1172933 - DNA, 25 bp, Homo sapien
aatccaggcttcagttctgctccag

SEQ ID NO: 1172934 - DNA, 25 bp, Homo sapien
gggaagaaaggtcaacatgttctga

SEQ ID NO: 1172935 - DNA, 25 bp, Homo sapien
tgtccaccccggaatcctctggaat

SEQ ID NO: 1172936 - DNA, 25 bp, Homo sapien
ggtgggtaggcttgggtcacagagc

SEQ ID NO: 1172937 - DNA, 25 bp, Homo sapien
aaacaatcccgcagagacaccttgc

SEQ ID NO: 1172938 - DNA, 25 bp, Homo sapien
ttggcttttctgacaccccgatcca

SEQ ID NO: 1172939 - DNA, 25 bp, Homo sapien
cccctttgctctaggagtactagaa

SEQ ID NO: 1172940 - DNA, 25 bp, Homo sapien
taatatgctcctaacctcaattggc

SEQ ID NO: 1172941 - DNA, 25 bp, Homo sapien
tagaacagatctgagactccaacac

SEQ ID NO: 1172942 - DNA, 25 bp, Homo sapien
gagttttctgccgacatcggtcaca

SEQ ID NO: 1172943 - DNA, 25 bp, Homo sapien
gaggattcgagggaatctttgtact

SEQ ID NO: 1172944 - DNA, 25 bp, Homo sapien
ttggtacttcgagttttctgccgac

SEQ ID NO: 1172945 - DNA, 25 bp, Homo sapien
tactgtcaactttttggtacttcga

SEQ ID NO: 1172946 - DNA, 25 bp, Homo sapien
ggtatcctaagagaagtaagaatct

SEQ ID NO: 1172947 - DNA, 25 bp, Homo sapien
gaaagagaatgtatgggaggtatcc

SEQ ID NO: 1172948 - DNA, 25 bp, Homo sapien
gaagtaagaatctgaagattaggat

SEQ ID NO: 1172949 - DNA, 25 bp, Homo sapien
gaatgtatgggaggtatcctaagag

SEQ ID NO: 1172950 - DNA, 25 bp, Homo sapien
tctgaggggaacttcttctatcctg

SEQ ID NO: 1172951 - DNA, 25 bp, Homo sapien
ggcctctgaggggaacttcttctat

SEQ ID NO: 1172952 - DNA, 25 bp, Homo sapien
ggggaacttcttctatcctgaaagc

SEQ ID NO: 1172953 - DNA, 25 bp, Homo sapien
gaggggaacttcttctatcctgaaa

SEQ ID NO: 1172954 - DNA, 25 bp, Homo sapien
gtggaaagtctacacctactgaact

SEQ ID NO: 1172955 - DNA, 25 bp, Homo sapien
tttgtcactggcaaagtcccctagg

SEQ ID NO: 1172956 - DNA, 25 bp, Homo sapien
cctcgggaggcagaaaatcgattca

SEQ ID NO: 1172957 - DNA, 25 bp, Homo sapien
gtcccctaggctcagtcgctgcagt

SEQ ID NO: 1172958 - DNA, 25 bp, Homo sapien
tgcaaagggcatacagctggtatac

SEQ ID NO: 1172959 - DNA, 25 bp, Homo sapien
gcatacagctggtatacaggacttc

SEQ ID NO: 1172960 - DNA, 25 bp, Homo sapien
agtggttgcaaagggcatacagctg

SEQ ID NO: 1172961 - DNA, 25 bp, Homo sapien
agggcatacagctggtatacaggac

SEQ ID NO: 1172962 - DNA, 25 bp, Homo sapien
caaccagtctggcaccggcacaggg

SEQ ID NO: 1172963 - DNA, 25 bp, Homo sapien
ctgtgtagtggccatagtggacgct

SEQ ID NO: 1172964 - DNA, 25 bp, Homo sapien
acagggctgtgtagtggccatagtg

SEQ ID NO: 1172965 - DNA, 25 bp, Homo sapien
agtcattgtagacatgccaaccagt

SEQ ID NO: 1172966 - DNA, 25 bp, Homo sapien
agaccgaacctcagagcatccagga

SEQ ID NO: 1172967 - DNA, 25 bp, Homo sapien
ggcaggatgtaaataggaggctatt

SEQ ID NO: 1172968 - DNA, 25 bp, Homo sapien
agggttgtggtcattcctgtttact

SEQ ID NO: 1172969 - DNA, 25 bp, Homo sapien
caggaaatgatcaggcaagacctcc

SEQ ID NO: 1172970 - DNA, 25 bp, Homo sapien
gcatcagttggtagaacagcacgta

SEQ ID NO: 1172971 - DNA, 25 bp, Homo sapien
agttggtagaacagcacgtagccct

SEQ ID NO: 1172972 - DNA, 25 bp, Homo sapien
cctgcatcagttggtagaacagcac

SEQ ID NO: 1172973 - DNA, 25 bp, Homo sapien
ggtggctcctgcatcagttggtaga

SEQ ID NO: 1172974 - DNA, 25 bp, Homo sapien
gacacaaaaatagacgtctctgagg

SEQ ID NO: 1172975 - DNA, 25 bp, Homo sapien
cttggtgagctttgtacatggggct

SEQ ID NO: 1172976 - DNA, 25 bp, Homo sapien
aatagacgtctctgaggtaaacggg

SEQ ID NO: 1172977 - DNA, 25 bp, Homo sapien
aataatggagctacaaccaccccct

SEQ ID NO: 1172978 - DNA, 25 bp, Homo sapien
ggccaacaagtgcttcaaatccgct

SEQ ID NO: 1172979 - DNA, 25 bp, Homo sapien
ataagggccacaccctcgctatcgg

SEQ ID NO: 1172980 - DNA, 25 bp, Homo sapien
gcagtacgcctgagttctgaggtgc

SEQ ID NO: 1172981 - DNA, 25 bp, Homo sapien
cgccggcgctctgctgggtgcagat

SEQ ID NO: 1172982 - DNA, 25 bp, Homo sapien
ggagatcgaggtcctaagaccgtac

SEQ ID NO: 1172983 - DNA, 25 bp, Homo sapien
gagaaggagatcgaggtcctaagac

SEQ ID NO: 1172984 - DNA, 25 bp, Homo sapien
gaaggagatcgaggtcctaagaccg

SEQ ID NO: 1172985 - DNA, 25 bp, Homo sapien
aaggagatcgaggtcctaagaccgt

SEQ ID NO: 1172986 - DNA, 25 bp, Homo sapien
gttttgagttctatcccggccactc

SEQ ID NO: 1172987 - DNA, 25 bp, Homo sapien
tggtggaacagcgaggtccccgtcc

SEQ ID NO: 1172988 - DNA, 25 bp, Homo sapien
tatggacaggcagaccggggacaac

SEQ ID NO: 1172989 - DNA, 25 bp, Homo sapien
gaaactaagtgtgcacggatgggct

SEQ ID NO: 1172990 - DNA, 25 bp, Homo sapien
ctcaggtggtaactggcggccaagc

SEQ ID NO: 1172991 - DNA, 25 bp, Homo sapien
ccagcacgaccacggtccggcccat

SEQ ID NO: 1172992 - DNA, 25 bp, Homo sapien
ccgctgatgcctccgcccagcacga

SEQ ID NO: 1172993 - DNA, 25 bp, Homo sapien
taactggcggccaagccgctgatgc

SEQ ID NO: 1172994 - DNA, 25 bp, Homo sapien
aacggagcgaatccagcctcccaga

SEQ ID NO: 1172995 - DNA, 25 bp, Homo sapien
gctggcctaattccccgaggtccaa

SEQ ID NO: 1172996 - DNA, 25 bp, Homo sapien
ttagggcctcgaacggagcgaatcc

SEQ ID NO: 1172997 - DNA, 25 bp, Homo sapien
tcaaagatagcaccattagggcctc

SEQ ID NO: 1172998 - DNA, 25 bp, Homo sapien
ctaaactctattccccaatggaagc

SEQ ID NO: 1172999 - DNA, 25 bp, Homo sapien
catacttcctcccctaaactctatt

SEQ ID NO: 1173000 - DNA, 25 bp, Homo sapien
tggtctccccggacaggcagcactt

SEQ ID NO: 1173001 - DNA, 25 bp, Homo sapien
cagtgggtagggcatgcagggcacc

SEQ ID NO: 1173002 - DNA, 25 bp, Homo sapien
gcatgcagggcaccgcccacgtaga

SEQ ID NO: 1173003 - DNA, 25 bp, Homo sapien
cacgtagaggaacctgttctgggca

SEQ ID NO: 1173004 - DNA, 25 bp, Homo sapien
tgaacccgaaaggcggaagttgcag

SEQ ID NO: 1173005 - DNA, 25 bp, Homo sapien
caagatcgcgccattgcactccatc

SEQ ID NO: 1173006 - DNA, 25 bp, Homo sapien
atcgcttgaacccgaaaggcggaag

SEQ ID NO: 1173007 - DNA, 25 bp, Homo sapien
tgagccaagatcgcgccattgcact

SEQ ID NO: 1173008 - DNA, 25 bp, Homo sapien
tccaaggcggcgctgggcaaaactg

SEQ ID NO: 1173009 - DNA, 25 bp, Homo sapien
aaaactgtgcacagtctcatcaggc

SEQ ID NO: 1173010 - DNA, 25 bp, Homo sapien
gtctcatcaggctctttgccccggg

SEQ ID NO: 1173011 - DNA, 25 bp, Homo sapien
agcccaaaacagaggtttggagaag

SEQ ID NO: 1173012 - DNA, 25 bp, Homo sapien
aaatgatacagaagagcccctaggt

SEQ ID NO: 1173013 - DNA, 25 bp, Homo sapien
gaaggccttcactcccaataatgag

SEQ ID NO: 1173014 - DNA, 25 bp, Homo sapien
gcccctaggtggtagatttgaacag

SEQ ID NO: 1173015 - DNA, 25 bp, Homo sapien
ggacattcccactgtgacggatgga

SEQ ID NO: 1173016 - DNA, 25 bp, Homo sapien
gcagcaggcccagtaatatggaacg

SEQ ID NO: 1173017 - DNA, 25 bp, Homo sapien
gaacgatgggtttgctcagcttgga

SEQ ID NO: 1173018 - DNA, 25 bp, Homo sapien
tgcaaacactccacggcagagactg

SEQ ID NO: 1173019 - DNA, 25 bp, Homo sapien
gcaggacctgatgctgagctcacgg

SEQ ID NO: 1173020 - DNA, 25 bp, Homo sapien
actccctcactttggcagtacttaa

SEQ ID NO: 1173021 - DNA, 25 bp, Homo sapien
ctcactttggcagtacttaatattt

SEQ ID NO: 1173022 - DNA, 25 bp, Homo sapien
ccctcactttggcagtacttaatat

SEQ ID NO: 1173023 - DNA, 25 bp, Homo sapien
ctccctcactttggcagtacttaat

SEQ ID NO: 1173024 - DNA, 25 bp, Homo sapien
ccaaggcctggcgaatgagtgctga

SEQ ID NO: 1173025 - DNA, 25 bp, Homo sapien
acatctctagacctccacgaagtga

SEQ ID NO: 1173026 - DNA, 25 bp, Homo sapien
gaagtgaccactggctccagcgctc

SEQ ID NO: 1173027 - DNA, 25 bp, Homo sapien
tagtcaggtgggtttcaagggcctg

SEQ ID NO: 1173028 - DNA, 25 bp, Homo sapien
aggctgagcccacagaccggctggc

SEQ ID NO: 1173029 - DNA, 25 bp, Homo sapien
cttccagcgcccttctgcctggagg

SEQ ID NO: 1173030 - DNA, 25 bp, Homo sapien
tggaggctgagcccacagaccggct

SEQ ID NO: 1173031 - DNA, 25 bp, Homo sapien
cctggaggctgagcccacagaccgg

SEQ ID NO: 1173032 - DNA, 25 bp, Homo sapien
gggagactgtgtactgacccaggat

SEQ ID NO: 1173033 - DNA, 25 bp, Homo sapien
cttctaaggcacaaaaacaatgagg

SEQ ID NO: 1173034 - DNA, 25 bp, Homo sapien
gggtagcccatgtctaagtagcttc

SEQ ID NO: 1173035 - DNA, 25 bp, Homo sapien
tgaggaaggttcacaaatagggcct

SEQ ID NO: 1173036 - DNA, 25 bp, Homo sapien
tccagactgctgtcccttagagata

SEQ ID NO: 1173037 - DNA, 25 bp, Homo sapien
ccagactgctgtcccttagagatac

SEQ ID NO: 1173038 - DNA, 25 bp, Homo sapien
ctccagactgctgtcccttagagat

SEQ ID NO: 1173039 - DNA, 25 bp, Homo sapien
gaatggcactaataacgtggtcagc

SEQ ID NO: 1173040 - DNA, 25 bp, Homo sapien
gattagactcccatagagatgacca

SEQ ID NO: 1173041 - DNA, 25 bp, Homo sapien
tcctgctgacccaggaaggtatagc

SEQ ID NO: 1173042 - DNA, 25 bp, Homo sapien
gaggcctgactcagaaggcattccc

SEQ ID NO: 1173043 - DNA, 25 bp, Homo sapien
aaggcattcccattacagttgtcag

SEQ ID NO: 1173044 - DNA, 25 bp, Homo sapien
gacactgcagtgatggcactcaggg

SEQ ID NO: 1173045 - DNA, 25 bp, Homo sapien
cttggtactgcagattcaccacagc

SEQ ID NO: 1173046 - DNA, 25 bp, Homo sapien
gatgggctccttggtactgcagatt

SEQ ID NO: 1173047 - DNA, 25 bp, Homo sapien
cactgcagtgatggcactcagggca

SEQ ID NO: 1173048 - DNA, 25 bp, Homo sapien
cgtcagaaggaaagggctctagctg

SEQ ID NO: 1173049 - DNA, 25 bp, Homo sapien
gagagaaggacattcatgcgtcaga

SEQ ID NO: 1173050 - DNA, 25 bp, Homo sapien
cattcatgcgtcagaaggaaagggc

SEQ ID NO: 1173051 - DNA, 25 bp, Homo sapien
gaaggacattcatgcgtcagaagga

SEQ ID NO: 1173052 - DNA, 25 bp, Homo sapien
tgagtcatacacgattcccaggact

SEQ ID NO: 1173053 - DNA, 25 bp, Homo sapien
agcaactgagtcatacacgattccc

SEQ ID NO: 1173054 - DNA, 25 bp, Homo sapien
tacacgattcccaggactcctggat

SEQ ID NO: 1173055 - DNA, 25 bp, Homo sapien
tcatacacgattcccaggactcctg

SEQ ID NO: 1173056 - DNA, 25 bp, Homo sapien
cagtctggccttgcctacaatggag

SEQ ID NO: 1173057 - DNA, 25 bp, Homo sapien
cttgcctacaatggagcacagagga

SEQ ID NO: 1173058 - DNA, 25 bp, Homo sapien
tctggaaatgccactaggcaaagtt

SEQ ID NO: 1173059 - DNA, 25 bp, Homo sapien
ggaatatagcactgatcagtctggc

SEQ ID NO: 1173060 - DNA, 25 bp, Homo sapien
tggaccaagcagtggctcggcatct

SEQ ID NO: 1173061 - DNA, 25 bp, Homo sapien
cgctgttgaaacagctcctgagata

SEQ ID NO: 1173062 - DNA, 25 bp, Homo sapien
gtgtctgtaaccaggaacctcccag

SEQ ID NO: 1173063 - DNA, 25 bp, Homo sapien
tcagtcctaattgtgtagcagctgc

SEQ ID NO: 1173064 - DNA, 25 bp, Homo sapien
cctagtgtatactggggaatgcagt

SEQ ID NO: 1173065 - DNA, 25 bp, Homo sapien
ccagtgacctagtgtatactgggga

SEQ ID NO: 1173066 - DNA, 25 bp, Homo sapien
tgacctagtgtatactggggaatgc

SEQ ID NO: 1173067 - DNA, 25 bp, Homo sapien
cagtgacctagtgtatactggggaa

SEQ ID NO: 1173068 - DNA, 25 bp, Homo sapien
tgggggtctgatgtccttggccctc

SEQ ID NO: 1173069 - DNA, 25 bp, Homo sapien
gaaaggatgaaaggaatgttttagc

SEQ ID NO: 1173070 - DNA, 25 bp, Homo sapien
tcagcccagctgttttcccaactta

SEQ ID NO: 1173071 - DNA, 25 bp, Homo sapien
ggatgaaaggaatgttttagctggg

SEQ ID NO: 1173072 - DNA, 25 bp, Homo sapien
gtgagcagtcaggaattgcctagct

SEQ ID NO: 1173073 - DNA, 25 bp, Homo sapien
tgtgagcagtcaggaattgcctagc

SEQ ID NO: 1173074 - DNA, 25 bp, Homo sapien
tgagcagtcaggaattgcctagctg

SEQ ID NO: 1173075 - DNA, 25 bp, Homo sapien
gagcagtcaggaattgcctagctga

SEQ ID NO: 1173076 - DNA, 25 bp, Homo sapien
tctatacagtcattaacagcaactc

SEQ ID NO: 1173077 - DNA, 25 bp, Homo sapien
gcctggcgcccactctctatacagt

SEQ ID NO: 1173078 - DNA, 25 bp, Homo sapien
gacactgactgctgcctggcgccca

SEQ ID NO: 1173079 - DNA, 25 bp, Homo sapien
gcaactccctcataggaggctccag

SEQ ID NO: 1173080 - DNA, 25 bp, Homo sapien
caatttttattttcatgaatgagag

SEQ ID NO: 1173081 - DNA, 25 bp, Homo sapien
tattttcatgaatgagagttgggga

SEQ ID NO: 1173082 - DNA, 25 bp, Homo sapien
tttttattttcatgaatgagagttg

SEQ ID NO: 1173083 - DNA, 25 bp, Homo sapien
tttattttcatgaatgagagttggg

SEQ ID NO: 1173084 - DNA, 25 bp, Homo sapien
cctggacgcaagatgggatgaactc

SEQ ID NO: 1173085 - DNA, 25 bp, Homo sapien
gcagacattgggactgaccctcggg

SEQ ID NO: 1173086 - DNA, 25 bp, Homo sapien
cctgtagggcttatgactgtgaatc

SEQ ID NO: 1173087 - DNA, 25 bp, Homo sapien
tgtgacgattcctaggagtccctgc

SEQ ID NO: 1173088 - DNA, 25 bp, Homo sapien
tctgtaggacactataagatggtga

SEQ ID NO: 1173089 - DNA, 25 bp, Homo sapien
tctctactctggatcccccatgata

SEQ ID NO: 1173090 - DNA, 25 bp, Homo sapien
cttttcccatagggtgcgcctggct

SEQ ID NO: 1173091 - DNA, 25 bp, Homo sapien
gaagcaccgaggagataagggcaat

SEQ ID NO: 1173092 - DNA, 25 bp, Homo sapien
catgatccctaagaagacagcttga

SEQ ID NO: 1173093 - DNA, 25 bp, Homo sapien
gcggtgcaggtagctagttatcctt

SEQ ID NO: 1173094 - DNA, 25 bp, Homo sapien
agctggtcccagattcgctgctgga

SEQ ID NO: 1173095 - DNA, 25 bp, Homo sapien
tgatcctgatctctggcggtgcagg

SEQ ID NO: 1173096 - DNA, 25 bp, Homo sapien
ttaggccactccacggtcctgtcat

SEQ ID NO: 1173097 - DNA, 25 bp, Homo sapien
tgactctgtcgccacttcaactggt

SEQ ID NO: 1173098 - DNA, 25 bp, Homo sapien
gcacatgaagaatagaaggagcctg

SEQ ID NO: 1173099 - DNA, 25 bp, Homo sapien
ctgcacctgaggagttggcacccag

SEQ ID NO: 1173100 - DNA, 25 bp, Homo sapien
agtgagaagttttgggtaacgcctg

SEQ ID NO: 1173101 - DNA, 25 bp, Homo sapien
gataggatgggcgtgctccgaaaga

SEQ ID NO: 1173102 - DNA, 25 bp, Homo sapien
taaaggtttgggcattcgagagagt

SEQ ID NO: 1173103 - DNA, 25 bp, Homo sapien
gctcacgttgctagtaggtagggca

SEQ ID NO: 1173104 - DNA, 25 bp, Homo sapien
gcctgcgggatacaacgggaataca

SEQ ID NO: 1173105 - DNA, 25 bp, Homo sapien
gaaatgaaatcccactagcagtctg

SEQ ID NO: 1173106 - DNA, 25 bp, Homo sapien
cagtctgcgtagtggagttgaaccc

SEQ ID NO: 1173107 - DNA, 25 bp, Homo sapien
caaaaatgcgctagagcggtccgca

SEQ ID NO: 1173108 - DNA, 25 bp, Homo sapien
gtgagactcgtctcgatacaaaaac

SEQ ID NO: 1173109 - DNA, 25 bp, Homo sapien
ccctctgggcaaggcgcctttgctt

SEQ ID NO: 1173110 - DNA, 25 bp, Homo sapien
caaaaacaggatatggtttggcagg

SEQ ID NO: 1173111 - DNA, 25 bp, Homo sapien
cagaatacctgatgcctgaggagag

SEQ ID NO: 1173112 - DNA, 25 bp, Homo sapien
taagcatccaataaactatagctgc

SEQ ID NO: 1173113 - DNA, 25 bp, Homo sapien
ctttaagcaggtgtagatgtgtgac

SEQ ID NO: 1173114 - DNA, 25 bp, Homo sapien
tagtgctggtcaagcatttagccaa

SEQ ID NO: 1173115 - DNA, 25 bp, Homo sapien
tcagataagtataatagcggtacct

SEQ ID NO: 1173116 - DNA, 25 bp, Homo sapien
ggtcaatccccttcacacactgtgg

SEQ ID NO: 1173117 - DNA, 25 bp, Homo sapien
ttcacacactgtggccggactgcga

SEQ ID NO: 1173118 - DNA, 25 bp, Homo sapien
ccttctggtcaatccccttcacaca

SEQ ID NO: 1173119 - DNA, 25 bp, Homo sapien
acactgtggccggactgcgaggctg

SEQ ID NO: 1173120 - DNA, 25 bp, Homo sapien
gaattctcccaggaccgtgatccta

SEQ ID NO: 1173121 - DNA, 25 bp, Homo sapien
aaccagccactagggccaaagggca

SEQ ID NO: 1173122 - DNA, 25 bp, Homo sapien
gatcctatctgtgcatgccggccag

SEQ ID NO: 1173123 - DNA, 25 bp, Homo sapien
gaagccatggtaggttagactataa

SEQ ID NO: 1173124 - DNA, 25 bp, Homo sapien
taggcaccagggcaggtattaccga

SEQ ID NO: 1173125 - DNA, 25 bp, Homo sapien
tgatccaggaagtgataggcaccag

SEQ ID NO: 1173126 - DNA, 25 bp, Homo sapien
ggcttagaaccagggtcaggcaagt

SEQ ID NO: 1173127 - DNA, 25 bp, Homo sapien
tttgtccgactcctctagtcccagc

SEQ ID NO: 1173128 - DNA, 25 bp, Homo sapien
cagacagaccaggaagcagagatgg

SEQ ID NO: 1173129 - DNA, 25 bp, Homo sapien
ccgtagagtttgtacaactctccaa

SEQ ID NO: 1173130 - DNA, 25 bp, Homo sapien
gatatcccctagacaggatcccagg

SEQ ID NO: 1173131 - DNA, 25 bp, Homo sapien
tctgagcctggaaagaggccttccc

SEQ ID NO: 1173132 - DNA, 25 bp, Homo sapien
caagggaaaattgccgttcctgcgt

SEQ ID NO: 1173133 - DNA, 25 bp, Homo sapien
gatacttcgtgctctctcgccgagc

SEQ ID NO: 1173134 - DNA, 25 bp, Homo sapien
ctgcgtggggcagatacttcgtgct

SEQ ID NO: 1173135 - DNA, 25 bp, Homo sapien
gagcaagggaaaattgccgttcctg

SEQ ID NO: 1173136 - DNA, 25 bp, Homo sapien
gtgaagccgccctcttggaagctgg

SEQ ID NO: 1173137 - DNA, 25 bp, Homo sapien
cgtttagataacagtgaccgcggtc

SEQ ID NO: 1173138 - DNA, 25 bp, Homo sapien
taccgtcgaactgacaacatccggg

SEQ ID NO: 1173139 - DNA, 25 bp, Homo sapien
gctggcagggtcgtttaccgtcgaa

SEQ ID NO: 1173140 - DNA, 25 bp, Homo sapien
gaagtaactccagcgcgcctccttc

SEQ ID NO: 1173141 - DNA, 25 bp, Homo sapien
ggaagtaactccagcgcgcctcctt

SEQ ID NO: 1173142 - DNA, 25 bp, Homo sapien
ctgaatcggcaatcggactccagcc

SEQ ID NO: 1173143 - DNA, 25 bp, Homo sapien
gcgacgccccggaagccgcacaaag

SEQ ID NO: 1173144 - DNA, 25 bp, Homo sapien
gggctgaatcggcaatcggactcca

SEQ ID NO: 1173145 - DNA, 25 bp, Homo sapien
ctgctgggctgaatcggcaatcgga

SEQ ID NO: 1173146 - DNA, 25 bp, Homo sapien
caaccaggtgaatatgaacgtgaga

SEQ ID NO: 1173147 - DNA, 25 bp, Homo sapien
tcaaggtcaacgacagagagacagc

SEQ ID NO: 1173148 - DNA, 25 bp, Homo sapien
gctgatttcacctcggcacgaacga

SEQ ID NO: 1173149 - DNA, 25 bp, Homo sapien
taaaaagcagagtctcccactccgc

SEQ ID NO: 1173150 - DNA, 25 bp, Homo sapien
gtttctttgcttgggtacataacag

SEQ ID NO: 1173151 - DNA, 25 bp, Homo sapien
ggctgtttctttgcttgggtacata

SEQ ID NO: 1173152 - DNA, 25 bp, Homo sapien
ttgcttgggtacataacagctcccc

SEQ ID NO: 1173153 - DNA, 25 bp, Homo sapien
agtgggctgtttctttgcttgggta

SEQ ID NO: 1173154 - DNA, 25 bp, Homo sapien
tgggacagcaactctggtcactcac

SEQ ID NO: 1173155 - DNA, 25 bp, Homo sapien
gctgagacagaaggttgccttgagc

SEQ ID NO: 1173156 - DNA, 25 bp, Homo sapien
tgggttgggacagcaactctggtca

SEQ ID NO: 1173157 - DNA, 25 bp, Homo sapien
tggcacaggcctgttgttgcggctt

SEQ ID NO: 1173158 - DNA, 25 bp, Homo sapien
gttcagggtaatgttcttcacaatt

SEQ ID NO: 1173159 - DNA, 25 bp, Homo sapien
aaagttcagggtaatgttcttcaca

SEQ ID NO: 1173160 - DNA, 25 bp, Homo sapien
aagttcagggtaatgttcttcacaa

SEQ ID NO: 1173161 - DNA, 25 bp, Homo sapien
agttcagggtaatgttcttcacaat

SEQ ID NO: 1173162 - DNA, 25 bp, Homo sapien
tgcaggagcccgatgtgaggatcac

SEQ ID NO: 1173163 - DNA, 25 bp, Homo sapien
gtcttgtattcaatgagcttctcag

SEQ ID NO: 1173164 - DNA, 25 bp, Homo sapien
tgaggatcacacttccgcaccatct

SEQ ID NO: 1173165 - DNA, 25 bp, Homo sapien
tcactagtcgcaggacaccatgcgc

SEQ ID NO: 1173166 - DNA, 25 bp, Homo sapien
tctccacagctagagaataggcctg

SEQ ID NO: 1173167 - DNA, 25 bp, Homo sapien
ggaggccggatgtttagcaacttct

SEQ ID NO: 1173168 - DNA, 25 bp, Homo sapien
tcatggacacatagtctagccggtc

SEQ ID NO: 1173169 - DNA, 25 bp, Homo sapien
ctcggatccactgtgcccgaggagg

SEQ ID NO: 1173170 - DNA, 25 bp, Homo sapien
acaaacgtgtgatttctccaaacag

SEQ ID NO: 1173171 - DNA, 25 bp, Homo sapien
ccatgatgtggttcaacaaacgtgt

SEQ ID NO: 1173172 - DNA, 25 bp, Homo sapien
ccccaaggtccagggcatgtgtggt

SEQ ID NO: 1173173 - DNA, 25 bp, Homo sapien
ggtcatggccccaaggtccagggca

SEQ ID NO: 1173174 - DNA, 25 bp, Homo sapien
aatctcctgtctcctttataccttc

SEQ ID NO: 1173175 - DNA, 25 bp, Homo sapien
cctctaaatgttctcccatgttctc

SEQ ID NO: 1173176 - DNA, 25 bp, Homo sapien
cctgcacttccttccctattcctat

SEQ ID NO: 1173177 - DNA, 25 bp, Homo sapien
tattcctatcctttcctcccactct

SEQ ID NO: 1173178 - DNA, 25 bp, Homo sapien
ctccagacactcgctcgtagaactc

SEQ ID NO: 1173179 - DNA, 25 bp, Homo sapien
tcctcctggccggatataagcagca

SEQ ID NO: 1173180 - DNA, 25 bp, Homo sapien
cggatataagcagcatgcattcggg

SEQ ID NO: 1173181 - DNA, 25 bp, Homo sapien
tcctggccggatataagcagcatgc

SEQ ID NO: 1173182 - DNA, 25 bp, Homo sapien
ccaactcatcaagccgaagagagaa

SEQ ID NO: 1173183 - DNA, 25 bp, Homo sapien
taaatgtcatccataagcccaaggg

SEQ ID NO: 1173184 - DNA, 25 bp, Homo sapien
tgataaatgtcatccataagcccaa

SEQ ID NO: 1173185 - DNA, 25 bp, Homo sapien
ctccaactcatcaagccgaagagag

SEQ ID NO: 1173186 - DNA, 25 bp, Homo sapien
ggtgtgttaatactcttcctcacac

SEQ ID NO: 1173187 - DNA, 25 bp, Homo sapien
ctattgatcaagaaaactggtgtgt

SEQ ID NO: 1173188 - DNA, 25 bp, Homo sapien
tgtatttctctagcccttcttgtgg

SEQ ID NO: 1173189 - DNA, 25 bp, Homo sapien
gatcaagaaaactggtgtgttaata

SEQ ID NO: 1173190 - DNA, 25 bp, Homo sapien
tctgctgttacaaccccaatgtcaa

SEQ ID NO: 1173191 - DNA, 25 bp, Homo sapien
tcaattgtccgatttcgccagatcc

SEQ ID NO: 1173192 - DNA, 25 bp, Homo sapien
tcgccagatcctattgttggtcagc

SEQ ID NO: 1173193 - DNA, 25 bp, Homo sapien
tacaaccccaatgtcaattgtccga

SEQ ID NO: 1173194 - DNA, 25 bp, Homo sapien
ttcagggtatgactaggaggatgcc

SEQ ID NO: 1173195 - DNA, 25 bp, Homo sapien
ggaggatgccaacaagtcttcaaag

SEQ ID NO: 1173196 - DNA, 25 bp, Homo sapien
cataatgggaataagggccactctc

SEQ ID NO: 1173197 - DNA, 25 bp, Homo sapien
gacaagatattaggctggaactccc

SEQ ID NO: 1173198 - DNA, 25 bp, Homo sapien
actggatgcctgagccccgaagcat

SEQ ID NO: 1173199 - DNA, 25 bp, Homo sapien
caaactcaacctggtcgtaaacatc

SEQ ID NO: 1173200 - DNA, 25 bp, Homo sapien
aaccaacaggaacatcaaactcaac

SEQ ID NO: 1173201 - DNA, 25 bp, Homo sapien
tcgtaaacatcatagggctgggtct

SEQ ID NO: 1173202 - DNA, 25 bp, Homo sapien
aaggatgccctttggccaacctcaa

SEQ ID NO: 1173203 - DNA, 25 bp, Homo sapien
ggatgccctttggccaacctcaaaa

SEQ ID NO: 1173204 - DNA, 25 bp, Homo sapien
gtatggggctaggaaggatgccctt

SEQ ID NO: 1173205 - DNA, 25 bp, Homo sapien
gaaggatgccctttggccaacctca

SEQ ID NO: 1173206 - DNA, 25 bp, Homo sapien
catctctgctcgcttaggtggagac

SEQ ID NO: 1173207 - DNA, 25 bp, Homo sapien
gacactgtgcgataattctcaggga

SEQ ID NO: 1173208 - DNA, 25 bp, Homo sapien
aggaggcatcttgtttagacactgt

SEQ ID NO: 1173209 - DNA, 25 bp, Homo sapien
tttggcatcatcaaccttgatctcc

SEQ ID NO: 1173210 - DNA, 25 bp, Homo sapien
accaaaagataggatttaatccaag

SEQ ID NO: 1173211 - DNA, 25 bp, Homo sapien
ccaaaagataggatttaatccaagg

SEQ ID NO: 1173212 - DNA, 25 bp, Homo sapien
caaaagataggatttaatccaagga

SEQ ID NO: 1173213 - DNA, 25 bp, Homo sapien
aaagataggatttaatccaaggata

SEQ ID NO: 1173214 - DNA, 25 bp, Homo sapien
cagtctgggcaataagagtaaaact

SEQ ID NO: 1173215 - DNA, 25 bp, Homo sapien
gcagttagccgagattgcactccag

SEQ ID NO: 1173216 - DNA, 25 bp, Homo sapien
gttagccgagattgcactccagtct

SEQ ID NO: 1173217 - DNA, 25 bp, Homo sapien
ccagtctgggcaataagagtaaaac

SEQ ID NO: 1173218 - DNA, 25 bp, Homo sapien
ttgggaggccaaggatcacctgagg

SEQ ID NO: 1173219 - DNA, 25 bp, Homo sapien
aatacaaaaaattagctgggcgtag

SEQ ID NO: 1173220 - DNA, 25 bp, Homo sapien
atatggtgaaaccctgtctctactg

SEQ ID NO: 1173221 - DNA, 25 bp, Homo sapien
caggagttcgagaccaccctgacca

SEQ ID NO: 1173222 - DNA, 25 bp, Homo sapien
tgggcagatcaagaggtcaggtgtt

SEQ ID NO: 1173223 - DNA, 25 bp, Homo sapien
accagcctggccaacagagtgaaac

SEQ ID NO: 1173224 - DNA, 25 bp, Homo sapien
ctggccaacagagtgaaaccccgtc

SEQ ID NO: 1173225 - DNA, 25 bp, Homo sapien
cagatcaagaggtcaggtgttcaag

SEQ ID NO: 1173226 - DNA, 25 bp, Homo sapien
gagagctatgggagattaagaatct

SEQ ID NO: 1173227 - DNA, 25 bp, Homo sapien
taccctcagggagactaaagccaca

SEQ ID NO: 1173228 - DNA, 25 bp, Homo sapien
ggaaacagggagcatcaataaacca

SEQ ID NO: 1173229 - DNA, 25 bp, Homo sapien
ttaagaatctcttatatggccgggt

SEQ ID NO: 1173230 - DNA, 25 bp, Homo sapien
caatggcagtatatgtggctcctgg

SEQ ID NO: 1173231 - DNA, 25 bp, Homo sapien
cctggaggaacttggtagccctcag

SEQ ID NO: 1173232 - DNA, 25 bp, Homo sapien
gatgaatcagtgactccatggaagt

SEQ ID NO: 1173233 - DNA, 25 bp, Homo sapien
gccctcagtatacaacttaaagtga

SEQ ID NO: 1173234 - DNA, 25 bp, Homo sapien
ccttgatcttgcatcgataagggcg

SEQ ID NO: 1173235 - DNA, 25 bp, Homo sapien
tgctgccatcagacaccaggtacac

SEQ ID NO: 1173236 - DNA, 25 bp, Homo sapien
aaaaccaggagccttgatcttgcat

SEQ ID NO: 1173237 - DNA, 25 bp, Homo sapien
ttgcatcgataagggcggctgctgc

SEQ ID NO: 1173238 - DNA, 25 bp, Homo sapien
caacaatgttagttaagacttgcaa

SEQ ID NO: 1173239 - DNA, 25 bp, Homo sapien
caaggtcaggtttaattcattggag

SEQ ID NO: 1173240 - DNA, 25 bp, Homo sapien
tcataaaaacctcaaccaaggtcag

SEQ ID NO: 1173241 - DNA, 25 bp, Homo sapien
tatagttactgggattgattcttac

SEQ ID NO: 1173242 - DNA, 25 bp, Homo sapien
gatggcaacgacatctgccaacatg

SEQ ID NO: 1173243 - DNA, 25 bp, Homo sapien
atggcaacgacatctgccaacatgt

SEQ ID NO: 1173244 - DNA, 25 bp, Homo sapien
catgtgtcccttagacatcttgtcc

SEQ ID NO: 1173245 - DNA, 25 bp, Homo sapien
tggcaacgacatctgccaacatgtg

SEQ ID NO: 1173246 - DNA, 25 bp, Homo sapien
gaacccattactgtgctcaaaagat

SEQ ID NO: 1173247 - DNA, 25 bp, Homo sapien
tatcttcctgttgtgaggcaaaaca

SEQ ID NO: 1173248 - DNA, 25 bp, Homo sapien
aggacccgagtccatgccatggcct

SEQ ID NO: 1173249 - DNA, 25 bp, Homo sapien
aaagtggtgttacccaagatccaga

SEQ ID NO: 1173250 - DNA, 25 bp, Homo sapien
tctacttctccaaatacaatatctt

SEQ ID NO: 1173251 - DNA, 25 bp, Homo sapien
acttctccaaatacaatatcttggg

SEQ ID NO: 1173252 - DNA, 25 bp, Homo sapien
tctccaaatacaatatcttgggtac

SEQ ID NO: 1173253 - DNA, 25 bp, Homo sapien
cgatctacttctccaaatacaatat

SEQ ID NO: 1173254 - DNA, 25 bp, Homo sapien
acacagaggccaatttccagtgagg

SEQ ID NO: 1173255 - DNA, 25 bp, Homo sapien
tccagtgaggaacaggctccacaga

SEQ ID NO: 1173256 - DNA, 25 bp, Homo sapien
gcaggggggatcaaacgctgctccc

SEQ ID NO: 1173257 - DNA, 25 bp, Homo sapien
gccgcaagacggctaatttattata

SEQ ID NO: 1173258 - DNA, 25 bp, Homo sapien
cagctgtgctcagcgagcagttccc

SEQ ID NO: 1173259 - DNA, 25 bp, Homo sapien
cttgggctggagatcggccgttctg

SEQ ID NO: 1173260 - DNA, 25 bp, Homo sapien
tggagatcggccgttctgacagcac

SEQ ID NO: 1173261 - DNA, 25 bp, Homo sapien
tctgacagcactgtgcagctgtgct

SEQ ID NO: 1173262 - DNA, 25 bp, Homo sapien
caaccaaaaggagtaagagcaagac

SEQ ID NO: 1173263 - DNA, 25 bp, Homo sapien
gagtaagagcaagaccactgctgga

SEQ ID NO: 1173264 - DNA, 25 bp, Homo sapien
taagagcaagaccactgctggaatc

SEQ ID NO: 1173265 - DNA, 25 bp, Homo sapien
tgcttgttcaaccaaaaggagtaag

SEQ ID NO: 1173266 - DNA, 25 bp, Homo sapien
gaaaggagggaactatgagtctagt

SEQ ID NO: 1173267 - DNA, 25 bp, Homo sapien
aataataatacggagaaaagtctgg

SEQ ID NO: 1173268 - DNA, 25 bp, Homo sapien
tctggaatgaagtaagaaggcaaca

SEQ ID NO: 1173269 - DNA, 25 bp, Homo sapien
ctatgagtctagtgccctgggtcgg

SEQ ID NO: 1173270 - DNA, 25 bp, Homo sapien
gaggatgcccatggggtcgggggta

SEQ ID NO: 1173271 - DNA, 25 bp, Homo sapien
gatgcccatggggtcgggggtatca

SEQ ID NO: 1173272 - DNA, 25 bp, Homo sapien
ctgaggggatagaggatgcccatgg

SEQ ID NO: 1173273 - DNA, 25 bp, Homo sapien
tgcccatggggtcgggggtatcagg

SEQ ID NO: 1173274 - DNA, 25 bp, Homo sapien
cttcagtcgacagtagaggagggtg

SEQ ID NO: 1173275 - DNA, 25 bp, Homo sapien
ttcagtcgacagtagaggagggtga

SEQ ID NO: 1173276 - DNA, 25 bp, Homo sapien
ttccatacagaaacaggatggcatc

SEQ ID NO: 1173277 - DNA, 25 bp, Homo sapien
ccatacagaaacaggatggcatcca

SEQ ID NO: 1173278 - DNA, 25 bp, Homo sapien
gctggttatagctgcctttcgcact

SEQ ID NO: 1173279 - DNA, 25 bp, Homo sapien
catagctggttatagctgcctttcg

SEQ ID NO: 1173280 - DNA, 25 bp, Homo sapien
ttatagctgcctttcgcacttggat

SEQ ID NO: 1173281 - DNA, 25 bp, Homo sapien
ctcatagctggttatagctgccttt

SEQ ID NO: 1173282 - DNA, 25 bp, Homo sapien
tggagatgggagtcaaagggcgatc

SEQ ID NO: 1173283 - DNA, 25 bp, Homo sapien
gagatgggagtcaaagggcgatcag

SEQ ID NO: 1173284 - DNA, 25 bp, Homo sapien
ctggagatgggagtcaaagggcgat

SEQ ID NO: 1173285 - DNA, 25 bp, Homo sapien
gatgggagtcaaagggcgatcagga

SEQ ID NO: 1173286 - DNA, 25 bp, Homo sapien
agagtctcgtaagtctcctggttcc

SEQ ID NO: 1173287 - DNA, 25 bp, Homo sapien
catgcttcagagtctcgtaagtctc

SEQ ID NO: 1173288 - DNA, 25 bp, Homo sapien
ttcagagtctcgtaagtctcctggt

SEQ ID NO: 1173289 - DNA, 25 bp, Homo sapien
ttctcatgcttcagagtctcgtaag

SEQ ID NO: 1173290 - DNA, 25 bp, Homo sapien
atgtgatgccaaccatgagggctgg

SEQ ID NO: 1173291 - DNA, 25 bp, Homo sapien
taaatatccgtaaacagcatctgag

SEQ ID NO: 1173292 - DNA, 25 bp, Homo sapien
gagcattagtctttaacagggagga

SEQ ID NO: 1173293 - DNA, 25 bp, Homo sapien
cagctggtgttaatggcatgcaggc

SEQ ID NO: 1173294 - DNA, 25 bp, Homo sapien
tttcaggcaaatattcctcgtagct

SEQ ID NO: 1173295 - DNA, 25 bp, Homo sapien
tcgggagggtgaagcacgagaatct

SEQ ID NO: 1173296 - DNA, 25 bp, Homo sapien
gtgagcccagatcatgccactgcac

SEQ ID NO: 1173297 - DNA, 25 bp, Homo sapien
ttgaacccaggaggcagaggttgca

SEQ ID NO: 1173298 - DNA, 25 bp, Homo sapien
gcctggtgatagagggagactccat

SEQ ID NO: 1173299 - DNA, 25 bp, Homo sapien
taaaagagttacttccaggtcaggc

SEQ ID NO: 1173300 - DNA, 25 bp, Homo sapien
aaaagagttacttccaggtcaggct

SEQ ID NO: 1173301 - DNA, 25 bp, Homo sapien
aaagagttacttccaggtcaggctc

SEQ ID NO: 1173302 - DNA, 25 bp, Homo sapien
cagaccattgtcttccaaccccagc

SEQ ID NO: 1173303 - DNA, 25 bp, Homo sapien
taacttcttgagctatttcgtggaa

SEQ ID NO: 1173304 - DNA, 25 bp, Homo sapien
atttcgtggaacttggaacacagcc

SEQ ID NO: 1173305 - DNA, 25 bp, Homo sapien
tgccacccagtgaagtgtccagacc

SEQ ID NO: 1173306 - DNA, 25 bp, Homo sapien
aaaggagccatgtgtggagagcctg

SEQ ID NO: 1173307 - DNA, 25 bp, Homo sapien
ccagaccgtgactgactatggcaag

SEQ ID NO: 1173308 - DNA, 25 bp, Homo sapien
tctcagtacttccagaccgtgactg

SEQ ID NO: 1173309 - DNA, 25 bp, Homo sapien
gactgactatggcaaggacctgatg

SEQ ID NO: 1173310 - DNA, 25 bp, Homo sapien
ccactgttaccaacatgaagctgct

SEQ ID NO: 1173311 - DNA, 25 bp, Homo sapien
tgctactcctcaccatctgcagcct

SEQ ID NO: 1173312 - DNA, 25 bp, Homo sapien
cactgttaccaacatgaagctgctc

SEQ ID NO: 1173313 - DNA, 25 bp, Homo sapien
gctgctcgcagcaactgtgctactc

SEQ ID NO: 1173314 - DNA, 25 bp, Homo sapien
gcattcttagcgtggccgtaagcgc

SEQ ID NO: 1173315 - DNA, 25 bp, Homo sapien
cattcttagcgtggccgtaagcgcc

SEQ ID NO: 1173316 - DNA, 25 bp, Homo sapien
tgcattcttagcgtggccgtaagcg

SEQ ID NO: 1173317 - DNA, 25 bp, Homo sapien
gctgcattcttagcgtggccgtaag

SEQ ID NO: 1173318 - DNA, 25 bp, Homo sapien
ggcacaccccggtcatcttgatggg

SEQ ID NO: 1173319 - DNA, 25 bp, Homo sapien
cccggtcatcttgatgggggcagcc

SEQ ID NO: 1173320 - DNA, 25 bp, Homo sapien
ggtcatcttgatgggggcagccatc

SEQ ID NO: 1173321 - DNA, 25 bp, Homo sapien
cccggcacaccccggtcatcttgat

SEQ ID NO: 1173322 - DNA, 25 bp, Homo sapien
tagggaaggagagcactcatggaga

SEQ ID NO: 1173323 - DNA, 25 bp, Homo sapien
ggaagagtagggaaggagagcactc

SEQ ID NO: 1173324 - DNA, 25 bp, Homo sapien
aagagtagggaaggagagcactcat

SEQ ID NO: 1173325 - DNA, 25 bp, Homo sapien
tggaacaggaagagtagggaaggag

SEQ ID NO: 1173326 - DNA, 25 bp, Homo sapien
gaagagccgaggttagcctgtgaaa

SEQ ID NO: 1173327 - DNA, 25 bp, Homo sapien
tgaaaggacgctattgcccctttac

SEQ ID NO: 1173328 - DNA, 25 bp, Homo sapien
gcctcagaaacttccacatggtccg

SEQ ID NO: 1173329 - DNA, 25 bp, Homo sapien
gaaacttccacatggtccgacgcta

SEQ ID NO: 1173330 - DNA, 25 bp, Homo sapien
tggtgccaggcccaatgtgttcccc

SEQ ID NO: 1173331 - DNA, 25 bp, Homo sapien
gtgccaggcccaatgtgttccccat

SEQ ID NO: 1173332 - DNA, 25 bp, Homo sapien
ggtgccaggcccaatgtgttcccca

SEQ ID NO: 1173333 - DNA, 25 bp, Homo sapien
gcagctcatcgaagctcccagggtt

SEQ ID NO: 1173334 - DNA, 25 bp, Homo sapien
gacggtgcagctcatcgaagctccc

SEQ ID NO: 1173335 - DNA, 25 bp, Homo sapien
ctttgcatagacggtgcagctcatc

SEQ ID NO: 1173336 - DNA, 25 bp, Homo sapien
tttgcatagacggtgcagctcatcg

SEQ ID NO: 1173337 - DNA, 25 bp, Homo sapien
tcagaaccttgttgacaacgagctt

SEQ ID NO: 1173338 - DNA, 25 bp, Homo sapien
ccttgttgacaacgagcttcactcc

SEQ ID NO: 1173339 - DNA, 25 bp, Homo sapien
tgctcagaaccttgttgacaacgag

SEQ ID NO: 1173340 - DNA, 25 bp, Homo sapien
tgttgacaacgagcttcactccctc

SEQ ID NO: 1173341 - DNA, 25 bp, Homo sapien
agcccagggcactcatgtgtatagt

SEQ ID NO: 1173342 - DNA, 25 bp, Homo sapien
catggaggtgatatcccggcaagcc

SEQ ID NO: 1173343 - DNA, 25 bp, Homo sapien
atcccctgcataggccgcatggagg

SEQ ID NO: 1173344 - DNA, 25 bp, Homo sapien
tcagtgggactgagctgccaatccc

SEQ ID NO: 1173345 - DNA, 25 bp, Homo sapien
tatcccctaccacagtggggaacac

SEQ ID NO: 1173346 - DNA, 25 bp, Homo sapien
agacctgggcgttcaggctgccact

SEQ ID NO: 1173347 - DNA, 25 bp, Homo sapien
agacagccttagctcggagccgctc

SEQ ID NO: 1173348 - DNA, 25 bp, Homo sapien
tagctcggagccgctctgccaagag

SEQ ID NO: 1173349 - DNA, 25 bp, Homo sapien
gtgtagtcatctccccgatactcgc

SEQ ID NO: 1173350 - DNA, 25 bp, Homo sapien
caggtcaggatttcctagggtcaga

SEQ ID NO: 1173351 - DNA, 25 bp, Homo sapien
gatactcgccatcaaactgccatgt

SEQ ID NO: 1173352 - DNA, 25 bp, Homo sapien
gctgtgtagtcatctccccgatact

SEQ ID NO: 1173353 - DNA, 25 bp, Homo sapien
tcccagccagtgtcaagatggcccc

SEQ ID NO: 1173354 - DNA, 25 bp, Homo sapien
ctcccagcaccagccgatgagtgag

SEQ ID NO: 1173355 - DNA, 25 bp, Homo sapien
gcctggccgccggtgataaactagc

SEQ ID NO: 1173356 - DNA, 25 bp, Homo sapien
cggtgataaactagctctcctccca

SEQ ID NO: 1173357 - DNA, 25 bp, Homo sapien
ccaccactacttcacttcgccccat

SEQ ID NO: 1173358 - DNA, 25 bp, Homo sapien
caccaccactacttcacttcgcccc

SEQ ID NO: 1173359 - DNA, 25 bp, Homo sapien
caccactacttcacttcgccccata

SEQ ID NO: 1173360 - DNA, 25 bp, Homo sapien
accactacttcacttcgccccatac

SEQ ID NO: 1173361 - DNA, 25 bp, Homo sapien
ccgcctgatcccacattcaatgtag

SEQ ID NO: 1173362 - DNA, 25 bp, Homo sapien
agtaacttgcatgggccccgcctga

SEQ ID NO: 1173363 - DNA, 25 bp, Homo sapien
ttcaatgtagctacccagtgtacag

SEQ ID NO: 1173364 - DNA, 25 bp, Homo sapien
catttgccctgtggtagtaacttgc

SEQ ID NO: 1173365 - DNA, 25 bp, Homo sapien
aaatatatacacagcgtggtaggaa

SEQ ID NO: 1173366 - DNA, 25 bp, Homo sapien
cgatagaggtccagatgaacagaag

SEQ ID NO: 1173367 - DNA, 25 bp, Homo sapien
aaaataggtcagcagggcgatagag

SEQ ID NO: 1173368 - DNA, 25 bp, Homo sapien
tatacacagcgtggtaggaagaaaa

SEQ ID NO: 1173369 - DNA, 25 bp, Homo sapien
gcagagtcaggtggtaaccaaagga

SEQ ID NO: 1173370 - DNA, 25 bp, Homo sapien
taaccaaaggagaatgttgtgtctt

SEQ ID NO: 1173371 - DNA, 25 bp, Homo sapien
gtgtcttgtagccttgtgtttgcct

SEQ ID NO: 1173372 - DNA, 25 bp, Homo sapien
caggtggtaaccaaaggagaatgtt

SEQ ID NO: 1173373 - DNA, 25 bp, Homo sapien
ctccaagggctagggtgacaggcag

SEQ ID NO: 1173374 - DNA, 25 bp, Homo sapien
gatgctgaagccacaatggaatctg

SEQ ID NO: 1173375 - DNA, 25 bp, Homo sapien
tctgttgcgccagtgattgaggaag

SEQ ID NO: 1173376 - DNA, 25 bp, Homo sapien
tacacaccagttactatccaccaag

SEQ ID NO: 1173377 - DNA, 25 bp, Homo sapien
tcagggctaagaggtaaagaagctc

SEQ ID NO: 1173378 - DNA, 25 bp, Homo sapien
cattaatgaggcctacgggtaccaa

SEQ ID NO: 1173379 - DNA, 25 bp, Homo sapien
tccacatggttggagttctggccaa

SEQ ID NO: 1173380 - DNA, 25 bp, Homo sapien
gatggtcagctaatcccatgcagga

SEQ ID NO: 1173381 - DNA, 25 bp, Homo sapien
agaggctctgggtaatagcattcct

SEQ ID NO: 1173382 - DNA, 25 bp, Homo sapien
atagcattcctgagattgatgacat

SEQ ID NO: 1173383 - DNA, 25 bp, Homo sapien
cattcctgagattgatgacatccat

SEQ ID NO: 1173384 - DNA, 25 bp, Homo sapien
gaggctctgggtaatagcattcctg

SEQ ID NO: 1173385 - DNA, 25 bp, Homo sapien
ccttagggaattcaggtatcgtggg

SEQ ID NO: 1173386 - DNA, 25 bp, Homo sapien
ggccatccctgtctcacatcgtttc

SEQ ID NO: 1173387 - DNA, 25 bp, Homo sapien
gtctcacatcgtttcagcatccaaa

SEQ ID NO: 1173388 - DNA, 25 bp, Homo sapien
ttccttagggaattcaggtatcgtg

SEQ ID NO: 1173389 - DNA, 25 bp, Homo sapien
cagactaggtctatcccagcctcag

SEQ ID NO: 1173390 - DNA, 25 bp, Homo sapien
tctgcccaaatactcagctccttga

SEQ ID NO: 1173391 - DNA, 25 bp, Homo sapien
agctccttgagtccatccacccagg

SEQ ID NO: 1173392 - DNA, 25 bp, Homo sapien
ccaggccttctagcctagctatcaa

SEQ ID NO: 1173393 - DNA, 25 bp, Homo sapien
cgggcctcttcgctacacaattgaa

SEQ ID NO: 1173394 - DNA, 25 bp, Homo sapien
taatcctagtatctcccacagtggg

SEQ ID NO: 1173395 - DNA, 25 bp, Homo sapien
cacaattgaagatggagcccgtggt

SEQ ID NO: 1173396 - DNA, 25 bp, Homo sapien
ggtcaggtgacctagaggctcctaa

SEQ ID NO: 1173397 - DNA, 25 bp, Homo sapien
tttcatggtactgcaagtcatcaag

SEQ ID NO: 1173398 - DNA, 25 bp, Homo sapien
cgcagacatcaacactttcatggta

SEQ ID NO: 1173399 - DNA, 25 bp, Homo sapien
taatgttctgatcattgcagcctcc

SEQ ID NO: 1173400 - DNA, 25 bp, Homo sapien
catctttcaggaggcaaacacttca

SEQ ID NO: 1173401 - DNA, 25 bp, Homo sapien
tcttccaagataaggctggcgaggc

SEQ ID NO: 1173402 - DNA, 25 bp, Homo sapien
tgttctaggtatgaagacccctccc

SEQ ID NO: 1173403 - DNA, 25 bp, Homo sapien
gcaagaagagctgatccggacactc

SEQ ID NO: 1173404 - DNA, 25 bp, Homo sapien
tatgccatgcactgatactgagaac

SEQ ID NO: 1173405 - DNA, 25 bp, Homo sapien
gatgagggcctaaactcagctaaga

SEQ ID NO: 1173406 - DNA, 25 bp, Homo sapien
tgatctgctctacccaggcctgaag

SEQ ID NO: 1173407 - DNA, 25 bp, Homo sapien
tgtgtgacgtgattccaaccagagg

SEQ ID NO: 1173408 - DNA, 25 bp, Homo sapien
gaaaggagactaggtgactcaccag

SEQ ID NO: 1173409 - DNA, 25 bp, Homo sapien
aaattgtcaatatctgcctcaggcg

SEQ ID NO: 1173410 - DNA, 25 bp, Homo sapien
aaatagttactatgctgtgggccag

SEQ ID NO: 1173411 - DNA, 25 bp, Homo sapien
gcttgaaggaggacatagacggcca

SEQ ID NO: 1173412 - DNA, 25 bp, Homo sapien
taaatgcccaagtatgctccaacag

SEQ ID NO: 1173413 - DNA, 25 bp, Homo sapien
cagtggtagtatcctccagagggaa

SEQ ID NO: 1173414 - DNA, 25 bp, Homo sapien
aatgctggcaggtttagaggtctgc

SEQ ID NO: 1173415 - DNA, 25 bp, Homo sapien
ctggcaggtttagaggtctgctgca

SEQ ID NO: 1173416 - DNA, 25 bp, Homo sapien
cgtagaatgacagcctcttgcatcc

SEQ ID NO: 1173417 - DNA, 25 bp, Homo sapien
atgacagcctcttgcatccaatgct

SEQ ID NO: 1173418 - DNA, 25 bp, Homo sapien
cgctgcacgcacaggtgaggcgagt

SEQ ID NO: 1173419 - DNA, 25 bp, Homo sapien
gagttagtgcggagagccgctgctc

SEQ ID NO: 1173420 - DNA, 25 bp, Homo sapien
cagctgaaagttgccgggctctgcg

SEQ ID NO: 1173421 - DNA, 25 bp, Homo sapien
gctggcacccgggattctcggagcc

SEQ ID NO: 1173422 - DNA, 25 bp, Homo sapien
ctgagcctgatgtgtaccagtgttc

SEQ ID NO: 1173423 - DNA, 25 bp, Homo sapien
gagcctgatgtgtaccagtgttcca

SEQ ID NO: 1173424 - DNA, 25 bp, Homo sapien
tgagcctgatgtgtaccagtgttcc

SEQ ID NO: 1173425 - DNA, 25 bp, Homo sapien
gcctgatgtgtaccagtgttccatt

SEQ ID NO: 1173426 - DNA, 25 bp, Homo sapien
gttgctggggatgttttggtattaa

SEQ ID NO: 1173427 - DNA, 25 bp, Homo sapien
ggttgctggggatgttttggtatta

SEQ ID NO: 1173428 - DNA, 25 bp, Homo sapien
ttggttgctggggatgttttggtat

SEQ ID NO: 1173429 - DNA, 25 bp, Homo sapien
ttgctggggatgttttggtattaag

SEQ ID NO: 1173430 - DNA, 25 bp, Homo sapien
ctgaaatcgccggaacttgccctga

SEQ ID NO: 1173431 - DNA, 25 bp, Homo sapien
ccttttctgaaatcgccggaacttg

SEQ ID NO: 1173432 - DNA, 25 bp, Homo sapien
tcgccggaacttgccctgaatagca

SEQ ID NO: 1173433 - DNA, 25 bp, Homo sapien
tgccctgaatagcaagggcagcctt

SEQ ID NO: 1173434 - DNA, 25 bp, Homo sapien
tagcggtgagcaggttagcaaagcc

SEQ ID NO: 1173435 - DNA, 25 bp, Homo sapien
ccactgtggcttagatcctgggagg

SEQ ID NO: 1173436 - DNA, 25 bp, Homo sapien
gaagcctcttgtttagccctacagg

SEQ ID NO: 1173437 - DNA, 25 bp, Homo sapien
ggcaaatgggaactacaggagtcac

SEQ ID NO: 1173438 - DNA, 25 bp, Homo sapien
ttagcaccagccacaaaagttcact

SEQ ID NO: 1173439 - DNA, 25 bp, Homo sapien
gggaatactccagctttatcagaca

SEQ ID NO: 1173440 - DNA, 25 bp, Homo sapien
catcttatgtccatggaacaaggga

SEQ ID NO: 1173441 - DNA, 25 bp, Homo sapien
ttcaccaaaaagaggaagcccctgc

SEQ ID NO: 1173442 - DNA, 25 bp, Homo sapien
gggtgtcatgtgacgagagtctctt

SEQ ID NO: 1173443 - DNA, 25 bp, Homo sapien
tgtgacgagagtctctttaaaaggc

SEQ ID NO: 1173444 - DNA, 25 bp, Homo sapien
ggacggaagtgacgccaggcggccc

SEQ ID NO: 1173445 - DNA, 25 bp, Homo sapien
tgggttccggtctggacggaagtga

SEQ ID NO: 1173446 - DNA, 25 bp, Homo sapien
gccagttcagatctccggagggccg

SEQ ID NO: 1173447 - DNA, 25 bp, Homo sapien
tgcccaggcacaggataaacagtta

SEQ ID NO: 1173448 - DNA, 25 bp, Homo sapien
gggtctctaggatccccgagcgctt

SEQ ID NO: 1173449 - DNA, 25 bp, Homo sapien
aacagttatcagcaaaacgtgaggg

SEQ ID NO: 1173450 - DNA, 25 bp, Homo sapien
tctcgaaatcgtaggacccatgggt

SEQ ID NO: 1173451 - DNA, 25 bp, Homo sapien
gagggcccctcgatacgaagtcagt

SEQ ID NO: 1173452 - DNA, 25 bp, Homo sapien
caggcccgagagcaatttgcgttag

SEQ ID NO: 1173453 - DNA, 25 bp, Homo sapien
gaagatctctctctccgaagctaaa

SEQ ID NO: 1173454 - DNA, 25 bp, Homo sapien
ttgctatatctgccttgctctcaca

SEQ ID NO: 1173455 - DNA, 25 bp, Homo sapien
tgctatatctgccttgctctcacac

SEQ ID NO: 1173456 - DNA, 25 bp, Homo sapien
gctatatctgccttgctctcacact

SEQ ID NO: 1173457 - DNA, 25 bp, Homo sapien
tgatccaaagtttacacggtacagg

SEQ ID NO: 1173458 - DNA, 25 bp, Homo sapien
gtcaaaaactaagatgtgcctaggc

SEQ ID NO: 1173459 - DNA, 25 bp, Homo sapien
tactgaccccatgaaagttttctac

SEQ ID NO: 1173460 - DNA, 25 bp, Homo sapien
ggttgagcacccctactgtggaaaa

SEQ ID NO: 1173461 - DNA, 25 bp, Homo sapien
tgatacagagctgagggctaaagtg

SEQ ID NO: 1173462 - DNA, 25 bp, Homo sapien
tttctgatacagagctgagggctaa

SEQ ID NO: 1173463 - DNA, 25 bp, Homo sapien
ctaaagtgggctcggaggcaatgac

SEQ ID NO: 1173464 - DNA, 25 bp, Homo sapien
tcggaggcaatgacgaccaacgtgt

SEQ ID NO: 1173465 - DNA, 25 bp, Homo sapien
caaaggcaattgttgacatcaacag

SEQ ID NO: 1173466 - DNA, 25 bp, Homo sapien
tatacaccatgaaagtccaggtgca

SEQ ID NO: 1173467 - DNA, 25 bp, Homo sapien
ggaagctgaggctacggcaagccct

SEQ ID NO: 1173468 - DNA, 25 bp, Homo sapien
gtcaactgtctacaactgcccactg

SEQ ID NO: 1173469 - DNA, 25 bp, Homo sapien
ttaaatatgtattcggctgaactac

SEQ ID NO: 1173470 - DNA, 25 bp, Homo sapien
tcggctgaactacactaaatcatta

SEQ ID NO: 1173471 - DNA, 25 bp, Homo sapien
tgatgttcacaatttacccttaaag

SEQ ID NO: 1173472 - DNA, 25 bp, Homo sapien
gaaagatatgtagaacttcatccta

SEQ ID NO: 1173473 - DNA, 25 bp, Homo sapien
ccagcctggtcgacagaacgagact

SEQ ID NO: 1173474 - DNA, 25 bp, Homo sapien
taatcacttgaactcaggacgtgga

SEQ ID NO: 1173475 - DNA, 25 bp, Homo sapien
actacactccagcctggtcgacaga

SEQ ID NO: 1173476 - DNA, 25 bp, Homo sapien
ggttgcagtgagcccagatcacgcc

SEQ ID NO: 1173477 - DNA, 25 bp, Homo sapien
agaggacggtttgaacctatattct

SEQ ID NO: 1173478 - DNA, 25 bp, Homo sapien
acagaggacggtttgaacctatatt

SEQ ID NO: 1173479 - DNA, 25 bp, Homo sapien
cagaggacggtttgaacctatattc

SEQ ID NO: 1173480 - DNA, 25 bp, Homo sapien
gaagcagggtcagcatgatgtgact

SEQ ID NO: 1173481 - DNA, 25 bp, Homo sapien
tagattattaggacgggcccagtgt

SEQ ID NO: 1173482 - DNA, 25 bp, Homo sapien
caatgtagcattgctggttctgaag

SEQ ID NO: 1173483 - DNA, 25 bp, Homo sapien
agccatgatcatgccccacaagttt

SEQ ID NO: 1173484 - DNA, 25 bp, Homo sapien
cgtcaaggtcataacaaataaggaa

SEQ ID NO: 1173485 - DNA, 25 bp, Homo sapien
tcattagcacatgcctcctgataca

SEQ ID NO: 1173486 - DNA, 25 bp, Homo sapien
gaacattctaaaaacgtcaaggtca

SEQ ID NO: 1173487 - DNA, 25 bp, Homo sapien
caatgtactgacagaagtatagcat

SEQ ID NO: 1173488 - DNA, 25 bp, Homo sapien
tttaccagactgcatcactgatagg

SEQ ID NO: 1173489 - DNA, 25 bp, Homo sapien
ttaccagactgcatcactgataggg

SEQ ID NO: 1173490 - DNA, 25 bp, Homo sapien
ctttaccagactgcatcactgatag

SEQ ID NO: 1173491 - DNA, 25 bp, Homo sapien
aataccagtgccacggtggcagatg

SEQ ID NO: 1173492 - DNA, 25 bp, Homo sapien
ctgcactcaaagcaataccagtgcc

SEQ ID NO: 1173493 - DNA, 25 bp, Homo sapien
aagcaataccagtgccacggtggca

SEQ ID NO: 1173494 - DNA, 25 bp, Homo sapien
actcaaagcaataccagtgccacgg

SEQ ID NO: 1173495 - DNA, 25 bp, Homo sapien
atttctctgctctctataatttcaa

SEQ ID NO: 1173496 - DNA, 25 bp, Homo sapien
gtttcatcaatgatcagtcagccag

SEQ ID NO: 1173497 - DNA, 25 bp, Homo sapien
taaacatgatatcaggaagtgctag

SEQ ID NO: 1173498 - DNA, 25 bp, Homo sapien
caatgatcagtcagccagcccatct

SEQ ID NO: 1173499 - DNA, 25 bp, Homo sapien
ctgggcaatcctccctacatcagcc

SEQ ID NO: 1173500 - DNA, 25 bp, Homo sapien
tgaattcctgggcaatcctccctac

SEQ ID NO: 1173501 - DNA, 25 bp, Homo sapien
tcctgggcaatcctccctacatcag

SEQ ID NO: 1173502 - DNA, 25 bp, Homo sapien
attcctgggcaatcctccctacatc

SEQ ID NO: 1173503 - DNA, 25 bp, Homo sapien
ttaatctaagtgctaaagtgaacac

SEQ ID NO: 1173504 - DNA, 25 bp, Homo sapien
aattttgcctgttccaatgagttca

SEQ ID NO: 1173505 - DNA, 25 bp, Homo sapien
aatttctcttgccattcggtccagg

SEQ ID NO: 1173506 - DNA, 25 bp, Homo sapien
aaagaccacagttgctggaactgac

SEQ ID NO: 1173507 - DNA, 25 bp, Homo sapien
gactcaaagttcccagggagtaaca

SEQ ID NO: 1173508 - DNA, 25 bp, Homo sapien
agctgtgtggatcagtgctggcccc

SEQ ID NO: 1173509 - DNA, 25 bp, Homo sapien
caggacaaccactccagactggtat

SEQ ID NO: 1173510 - DNA, 25 bp, Homo sapien
gaatcttcaggccttttcctaggtc

SEQ ID NO: 1173511 - DNA, 25 bp, Homo sapien
acagtaagaaccaggacaaccactc

SEQ ID NO: 1173512 - DNA, 25 bp, Homo sapien
ccagccccatagaggacaacacagt

SEQ ID NO: 1173513 - DNA, 25 bp, Homo sapien
gaagagaattgtcctttaagccagc

SEQ ID NO: 1173514 - DNA, 25 bp, Homo sapien
aatggcctgggctctcaccaatgaa

SEQ ID NO: 1173515 - DNA, 25 bp, Homo sapien
tctaggccgagagtaggcaagctgt

SEQ ID NO: 1173516 - DNA, 25 bp, Homo sapien
ggtactctactgctccaaggagatc

SEQ ID NO: 1173517 - DNA, 25 bp, Homo sapien
aaaactatcaaaacagcatgcctgc

SEQ ID NO: 1173518 - DNA, 25 bp, Homo sapien
ccaatgatgagatgtaggagaactg

SEQ ID NO: 1173519 - DNA, 25 bp, Homo sapien
gatgtaaatgcctgagacccgaggg

SEQ ID NO: 1173520 - DNA, 25 bp, Homo sapien
tggctggccaacaactcgaagtgac

SEQ ID NO: 1173521 - DNA, 25 bp, Homo sapien
ccacgtatgctagaactctgggcag

SEQ ID NO: 1173522 - DNA, 25 bp, Homo sapien
catacagtggtttgggtggaacaca

SEQ ID NO: 1173523 - DNA, 25 bp, Homo sapien
gaaaaacccgtatagcgactcagtg

SEQ ID NO: 1173524 - DNA, 25 bp, Homo sapien
cagggcctaatctagctgaggtcca

SEQ ID NO: 1173525 - DNA, 25 bp, Homo sapien
gggcctgaccagagacatgactatc

SEQ ID NO: 1173526 - DNA, 25 bp, Homo sapien
tgaaacttgatctactgcccatggt

SEQ ID NO: 1173527 - DNA, 25 bp, Homo sapien
cattaggaatgatccgggcctgacc

SEQ ID NO: 1173528 - DNA, 25 bp, Homo sapien
tatgccaccactatcccagcatggg

SEQ ID NO: 1173529 - DNA, 25 bp, Homo sapien
agtgctgcccaacaaaaagagtgcg

SEQ ID NO: 1173530 - DNA, 25 bp, Homo sapien
tgtgccccgttccaaggtgagatac

SEQ ID NO: 1173531 - DNA, 25 bp, Homo sapien
tgttcagtgcacctacaagatagcc

SEQ ID NO: 1173532 - DNA, 25 bp, Homo sapien
tgtaatgtgagagcccctgaacttc

SEQ ID NO: 1173533 - DNA, 25 bp, Homo sapien
ttgccaagcaacgagtgtaaacagc

SEQ ID NO: 1173534 - DNA, 25 bp, Homo sapien
tacagtgccaaccaggtaagttccc

SEQ ID NO: 1173535 - DNA, 25 bp, Homo sapien
taaacagcacaagatcatggccact

SEQ ID NO: 1173536 - DNA, 25 bp, Homo sapien
cattggtagtcccaggaggtcggcc

SEQ ID NO: 1173537 - DNA, 25 bp, Homo sapien
tattccagtcaacactaaacgcctg

SEQ ID NO: 1173538 - DNA, 25 bp, Homo sapien
tagtgggccttataaacaggatctc

SEQ ID NO: 1173539 - DNA, 25 bp, Homo sapien
cctgataagacaaagtagtgggcct

SEQ ID NO: 1173540 - DNA, 25 bp, Homo sapien
aaagcaggctctattatccccacaa

SEQ ID NO: 1173541 - DNA, 25 bp, Homo sapien
gaaccacagggactaagctcatgag

SEQ ID NO: 1173542 - DNA, 25 bp, Homo sapien
tctctagagagtgataagaaccaca

SEQ ID NO: 1173543 - DNA, 25 bp, Homo sapien
catctgcagaagcataggagtgctc

SEQ ID NO: 1173544 - DNA, 25 bp, Homo sapien
gagtaacagcagttgccctgaggag

SEQ ID NO: 1173545 - DNA, 25 bp, Homo sapien
aatgtctttcagtggtaatttgaca

SEQ ID NO: 1173546 - DNA, 25 bp, Homo sapien
caatgtctttcagtggtaatttgac

SEQ ID NO: 1173547 - DNA, 25 bp, Homo sapien
ctttcagtggtaatttgacattatc

SEQ ID NO: 1173548 - DNA, 25 bp, Homo sapien
gtctttcagtggtaatttgacatta

SEQ ID NO: 1173549 - DNA, 25 bp, Homo sapien
taaaactgctggctctagagtcaga

SEQ ID NO: 1173550 - DNA, 25 bp, Homo sapien
gacctcaggatattgatggaaccac

SEQ ID NO: 1173551 - DNA, 25 bp, Homo sapien
tcaacacttccagaggtcgaagaat

SEQ ID NO: 1173552 - DNA, 25 bp, Homo sapien
aagtcaacagcccaatagtaagtgg

SEQ ID NO: 1173553 - DNA, 25 bp, Homo sapien
tgaaagtaagtgacaaattggaggg

SEQ ID NO: 1173554 - DNA, 25 bp, Homo sapien
tgatgccaaggcaactagttaaggc

SEQ ID NO: 1173555 - DNA, 25 bp, Homo sapien
taaggcaactgaagcataaccttgt

SEQ ID NO: 1173556 - DNA, 25 bp, Homo sapien
ccttaatatatggagttcaaacaga

SEQ ID NO: 1173557 - DNA, 25 bp, Homo sapien
taatctaaaacgatcacctttctct

SEQ ID NO: 1173558 - DNA, 25 bp, Homo sapien
tagaacagtgggttagaggatccag

SEQ ID NO: 1173559 - DNA, 25 bp, Homo sapien
cctttctctctagaacagtgggtta

SEQ ID NO: 1173560 - DNA, 25 bp, Homo sapien
tgtgcccagcgtgtaccttggattt

SEQ ID NO: 1173561 - DNA, 25 bp, Homo sapien
gttaaagcacatagccaagatatcc

SEQ ID NO: 1173562 - DNA, 25 bp, Homo sapien
ccactagtgagagatactgatgtct

SEQ ID NO: 1173563 - DNA, 25 bp, Homo sapien
caagatatcctatactggtgccatt

SEQ ID NO: 1173564 - DNA, 25 bp, Homo sapien
ggtcaacctgtatattgttaaagca

SEQ ID NO: 1173565 - DNA, 25 bp, Homo sapien
cgcggttccgccctgtcagtttttg

SEQ ID NO: 1173566 - DNA, 25 bp, Homo sapien
tccggagccgtgagaccttttgata

SEQ ID NO: 1173567 - DNA, 25 bp, Homo sapien
cggctctcgacaacgggctcggagc

SEQ ID NO: 1173568 - DNA, 25 bp, Homo sapien
gatatcatcaggcaccgtgtcgcgg

SEQ ID NO: 1173569 - DNA, 25 bp, Homo sapien
ggaatactcttcacggtctctttcc

SEQ ID NO: 1173570 - DNA, 25 bp, Homo sapien
tgtttcctccgacaataataaggtg

SEQ ID NO: 1173571 - DNA, 25 bp, Homo sapien
tcatttgtttcctccgacaataata

SEQ ID NO: 1173572 - DNA, 25 bp, Homo sapien
cctccaggaatactcttcacggtct

SEQ ID NO: 1173573 - DNA, 25 bp, Homo sapien
gttcatgaatttgtacatcagcctt

SEQ ID NO: 1173574 - DNA, 25 bp, Homo sapien
aaaggaacagttcatgaatttgtac

SEQ ID NO: 1173575 - DNA, 25 bp, Homo sapien
cagttcatgaatttgtacatcagcc

SEQ ID NO: 1173576 - DNA, 25 bp, Homo sapien
gaatttgtacatcagccttgcacag

SEQ ID NO: 1173577 - DNA, 25 bp, Homo sapien
tggccgcgaccccggttctggatgc

SEQ ID NO: 1173578 - DNA, 25 bp, Homo sapien
ggccgcgaccccggttctggatgcc

SEQ ID NO: 1173579 - DNA, 25 bp, Homo sapien
cagggacttgatcttcatgtccttg

SEQ ID NO: 1173580 - DNA, 25 bp, Homo sapien
tcctccagggacttgatcttcatgt

SEQ ID NO: 1173581 - DNA, 25 bp, Homo sapien
ggagaagacatagatctcctccagg

SEQ ID NO: 1173582 - DNA, 25 bp, Homo sapien
ttgcttaatgggcagggagaagaca

SEQ ID NO: 1173583 - DNA, 25 bp, Homo sapien
atttctgcatctcaatcgtttcttc

SEQ ID NO: 1173584 - DNA, 25 bp, Homo sapien
tttctgcatctcaatcgtttcttca

SEQ ID NO: 1173585 - DNA, 25 bp, Homo sapien
ttctgcatctcaatcgtttcttcat

SEQ ID NO: 1173586 - DNA, 25 bp, Homo sapien
cctggtgcgctggccgacacgggtc

SEQ ID NO: 1173587 - DNA, 25 bp, Homo sapien
tgcgctggccgacacgggtctgctt

SEQ ID NO: 1173588 - DNA, 25 bp, Homo sapien
tggtgcgctggccgacacgggtctg

SEQ ID NO: 1173589 - DNA, 25 bp, Homo sapien
gtgcgctggccgacacgggtctgct

SEQ ID NO: 1173590 - DNA, 25 bp, Homo sapien
tggagcacttaacacccagaccaac

SEQ ID NO: 1173591 - DNA, 25 bp, Homo sapien
ttggagcacttaacacccagaccaa

SEQ ID NO: 1173592 - DNA, 25 bp, Homo sapien
cttggagcacttaacacccagacca

SEQ ID NO: 1173593 - DNA, 25 bp, Homo sapien
ggcataaggtgcaccagcacggagc

SEQ ID NO: 1173594 - DNA, 25 bp, Homo sapien
cataaggtgcaccagcacggagccg

SEQ ID NO: 1173595 - DNA, 25 bp, Homo sapien
tgcaggcataaggtgcaccagcacg

SEQ ID NO: 1173596 - DNA, 25 bp, Homo sapien
aaggtgcaccagcacggagccgctg

SEQ ID NO: 1173597 - DNA, 25 bp, Homo sapien
taaaagtaagagcagcttcgccagc

SEQ ID NO: 1173598 - DNA, 25 bp, Homo sapien
taaactggaaacaccctgaacctgc

SEQ ID NO: 1173599 - DNA, 25 bp, Homo sapien
caagatagtcaagtgggccgtctca

SEQ ID NO: 1173600 - DNA, 25 bp, Homo sapien
aatgagattcaggagctaacaggcc

SEQ ID NO: 1173601 - DNA, 25 bp, Homo sapien
ggtttcaaacacctgagttctgaag

SEQ ID NO: 1173602 - DNA, 25 bp, Homo sapien
acagaggacccgcactggcactggt

SEQ ID NO: 1173603 - DNA, 25 bp, Homo sapien
ttctgaagggggctagcccctccac

SEQ ID NO: 1173604 - DNA, 25 bp, Homo sapien
tttcaaacacctgagttctgaaggg

SEQ ID NO: 1173605 - DNA, 25 bp, Homo sapien
gttcttgcctgtgaacttaaacaat

SEQ ID NO: 1173606 - DNA, 25 bp, Homo sapien
taaagttcttgcctgtgaacttaaa

SEQ ID NO: 1173607 - DNA, 25 bp, Homo sapien
tcttgcctgtgaacttaaacaattg

SEQ ID NO: 1173608 - DNA, 25 bp, Homo sapien
ttgcctgtgaacttaaacaattggc

SEQ ID NO: 1173609 - DNA, 25 bp, Homo sapien
ggcgctggcagttaaagcactagaa

SEQ ID NO: 1173610 - DNA, 25 bp, Homo sapien
cctgggcgctggcagttaaagcact

SEQ ID NO: 1173611 - DNA, 25 bp, Homo sapien
taaagcactagaatcctagccacta

SEQ ID NO: 1173612 - DNA, 25 bp, Homo sapien
ggcagttaaagcactagaatcctag

SEQ ID NO: 1173613 - DNA, 25 bp, Homo sapien
atcccggcacctcaggatgccgagg

SEQ ID NO: 1173614 - DNA, 25 bp, Homo sapien
aatcccggcacctcaggatgccgag

SEQ ID NO: 1173615 - DNA, 25 bp, Homo sapien
tgcaatcccggcacctcaggatgcc

SEQ ID NO: 1173616 - DNA, 25 bp, Homo sapien
gcaatcccggcacctcaggatgccg

SEQ ID NO: 1173617 - DNA, 25 bp, Homo sapien
aggtaggcaagtctcccaggctctg

SEQ ID NO: 1173618 - DNA, 25 bp, Homo sapien
gaaatgaagtacatactatgacatg

SEQ ID NO: 1173619 - DNA, 25 bp, Homo sapien
ggaaactatataagtgaaggagatg

SEQ ID NO: 1173620 - DNA, 25 bp, Homo sapien
ccagacaaaatgtgacacattatgt

SEQ ID NO: 1173621 - DNA, 25 bp, Homo sapien
atggaagtagaagtggcacaactca

SEQ ID NO: 1173622 - DNA, 25 bp, Homo sapien
aaagccatgtatgctctaaatcagc

SEQ ID NO: 1173623 - DNA, 25 bp, Homo sapien
ccatagtgttccacaagcaaaattt

SEQ ID NO: 1173624 - DNA, 25 bp, Homo sapien
taaaccggaagctgagattgccacc

SEQ ID NO: 1173625 - DNA, 25 bp, Homo sapien
ctggaatagacacttacttgggata

SEQ ID NO: 1173626 - DNA, 25 bp, Homo sapien
gaccaacgcattcactttatggcaa

SEQ ID NO: 1173627 - DNA, 25 bp, Homo sapien
cagtgtggcagtggtctcgtgccca

SEQ ID NO: 1173628 - DNA, 25 bp, Homo sapien
aacagcattgcctctgaccaacgca

SEQ ID NO: 1173629 - DNA, 25 bp, Homo sapien
gatgaacctctctgcgtggtcaaaa

SEQ ID NO: 1173630 - DNA, 25 bp, Homo sapien
tttgtattccatgtaggtgcccacc

SEQ ID NO: 1173631 - DNA, 25 bp, Homo sapien
gatgacccgatctatggacaccact

SEQ ID NO: 1173632 - DNA, 25 bp, Homo sapien
gaaaggtcaacaacaaacgtgagca

SEQ ID NO: 1173633 - DNA, 25 bp, Homo sapien
cgacctgaacgcagcgccttagacc

SEQ ID NO: 1173634 - DNA, 25 bp, Homo sapien
gacctgaacgcagcgccttagaccg

SEQ ID NO: 1173635 - DNA, 25 bp, Homo sapien
cgaacccgggcctcccgcgtggcag

SEQ ID NO: 1173636 - DNA, 25 bp, Homo sapien
tcgaacccgggcctcccgcgtggca

SEQ ID NO: 1173637 - DNA, 25 bp, Homo sapien
attctaccactgaaccacccatgca

SEQ ID NO: 1173638 - DNA, 25 bp, Homo sapien
cgcgtggcaggcgagaattctacca

SEQ ID NO: 1173639 - DNA, 25 bp, Homo sapien
cctcccgcgtggcaggcgagaattc

SEQ ID NO: 1173640 - DNA, 25 bp, Homo sapien
tgcatgggccgggaatcgaacccgg

SEQ ID NO: 1173641 - DNA, 25 bp, Homo sapien
tcgaacccgggcctcccgcgtggca

SEQ ID NO: 1173642 - DNA, 25 bp, Homo sapien
ggcctcccgcgtggcaggcgagaat

SEQ ID NO: 1173643 - DNA, 25 bp, Homo sapien
tctccaaatgtcaaggaacatgtgg

SEQ ID NO: 1173644 - DNA, 25 bp, Homo sapien
cattgaagcgtggagatgcagcagt

SEQ ID NO: 1173645 - DNA, 25 bp, Homo sapien
gggttcctgacagacttctagccga

SEQ ID NO: 1173646 - DNA, 25 bp, Homo sapien
caggctgaccaaagcgcatgtgcgg

SEQ ID NO: 1173647 - DNA, 25 bp, Homo sapien
gtcgacaggtttgagattctcgcct

SEQ ID NO: 1173648 - DNA, 25 bp, Homo sapien
gacaggtttgagattctcgcctatt

SEQ ID NO: 1173649 - DNA, 25 bp, Homo sapien
cgtcgacaggtttgagattctcgcc

SEQ ID NO: 1173650 - DNA, 25 bp, Homo sapien
tcgacaggtttgagattctcgccta

SEQ ID NO: 1173651 - DNA, 25 bp, Homo sapien
tgtcagcaagcgcactggctttccc

SEQ ID NO: 1173652 - DNA, 25 bp, Homo sapien
cgtgggatccgtgattgggctccac

SEQ ID NO: 1173653 - DNA, 25 bp, Homo sapien
ctttggtagtaatggcagcggaact

SEQ ID NO: 1173654 - DNA, 25 bp, Homo sapien
tccacgggtgtcagcggctttggta

SEQ ID NO: 1173655 - DNA, 25 bp, Homo sapien
ctttgtcagcggcaaagcccactgg

SEQ ID NO: 1173656 - DNA, 25 bp, Homo sapien
gcttcacagcccttccttgtcaggt

SEQ ID NO: 1173657 - DNA, 25 bp, Homo sapien
tcgcactctcggctggccacgggat

SEQ ID NO: 1173658 - DNA, 25 bp, Homo sapien
ccaggactctcgagcggagcggctt

SEQ ID NO: 1173659 - DNA, 25 bp, Homo sapien
ggcaggccggttgccgccggcgtcg

SEQ ID NO: 1173660 - DNA, 25 bp, Homo sapien
gagctgctcgtgagggcaggccggt

SEQ ID NO: 1173661 - DNA, 25 bp, Homo sapien
gacaggcgccaaggtagcgcccagt

SEQ ID NO: 1173662 - DNA, 25 bp, Homo sapien
ttttaaagcgaagcaggggacaggc

SEQ ID NO: 1173663 - DNA, 25 bp, Homo sapien
gaggcgcgcggtgtttggagggtgt

SEQ ID NO: 1173664 - DNA, 25 bp, Homo sapien
gcggaggtccccgtcgcggagctcg

SEQ ID NO: 1173665 - DNA, 25 bp, Homo sapien
ctgcgtgcctgtgcgccggggaagg

SEQ ID NO: 1173666 - DNA, 25 bp, Homo sapien
gagctcgcgtcgcagcttggcctgt

SEQ ID NO: 1173667 - DNA, 25 bp, Homo sapien
gacctgaacgcagcgccttagaccg

SEQ ID NO: 1173668 - DNA, 25 bp, Homo sapien
cgacctgaacgcagcgccttagacc

SEQ ID NO: 1173669 - DNA, 25 bp, Homo sapien
ctagggcttccgctcgtgattcctc

SEQ ID NO: 1173670 - DNA, 25 bp, Homo sapien
gcttccgctcgtgattcctcttggg

SEQ ID NO: 1173671 - DNA, 25 bp, Homo sapien
gctgtctttccgggtttggactcgc

SEQ ID NO: 1173672 - DNA, 25 bp, Homo sapien
gtttggactcgcctgcccggctgtg

SEQ ID NO: 1173673 - DNA, 25 bp, Homo sapien
ctcagaaacgcagaccaggtccgtg

SEQ ID NO: 1173674 - DNA, 25 bp, Homo sapien
tctcgcagccgtggcgtgcggctca

SEQ ID NO: 1173675 - DNA, 25 bp, Homo sapien
aggcgggatgggtgtgtcagcgagc

SEQ ID NO: 1173676 - DNA, 25 bp, Homo sapien
gcgcctcgctcctgcgctctgaccc

SEQ ID NO: 1173677 - DNA, 25 bp, Homo sapien
tcgaacccgggcctcccgcgtggca

SEQ ID NO: 1173678 - DNA, 25 bp, Homo sapien
cgaacccgggcctcccgcgtggcag

SEQ ID NO: 1173679 - DNA, 25 bp, Homo sapien
cgcgtggcaggcgagaattctacca

SEQ ID NO: 1173680 - DNA, 25 bp, Homo sapien
attctaccactgaaccacccatgca

SEQ ID NO: 1173681 - DNA, 25 bp, Homo sapien
ggagtcgcgacttccttcctactgg

SEQ ID NO: 1173682 - DNA, 25 bp, Homo sapien
gtgcacatgccacgcgtacactcgt

SEQ ID NO: 1173683 - DNA, 25 bp, Homo sapien
cacggtgaatatagacggtgcacat

SEQ ID NO: 1173684 - DNA, 25 bp, Homo sapien
gtacactcgtgtggtcgcgttaagg

SEQ ID NO: 1173685 - DNA, 25 bp, Homo sapien
ccagcgtgttgtgggtggatgtcag

SEQ ID NO: 1173686 - DNA, 25 bp, Homo sapien
acagcgacggacgaaggtgtccgat

SEQ ID NO: 1173687 - DNA, 25 bp, Homo sapien
tgtccgatcccgtggctggcgtcca

SEQ ID NO: 1173688 - DNA, 25 bp, Homo sapien
tcagtgggtgacagcgacggacgaa

SEQ ID NO: 1173689 - DNA, 25 bp, Homo sapien
cattgaagcgtggagatgcagcagt

SEQ ID NO: 1173690 - DNA, 25 bp, Homo sapien
caggctgaccaaagcgcatgtgcgg

SEQ ID NO: 1173691 - DNA, 25 bp, Homo sapien
tctccaaatgtcaaggaacatgtgg

SEQ ID NO: 1173692 - DNA, 25 bp, Homo sapien
gggttcctgacagacttctagccga

SEQ ID NO: 1173693 - DNA, 25 bp, Homo sapien
tcgacaggtttgagattctcgccta

SEQ ID NO: 1173694 - DNA, 25 bp, Homo sapien
cgtcgacaggtttgagattctcgcc

SEQ ID NO: 1173695 - DNA, 25 bp, Homo sapien
gtcgacaggtttgagattctcgcct

SEQ ID NO: 1173696 - DNA, 25 bp, Homo sapien
gacaggtttgagattctcgcctatt

SEQ ID NO: 1173697 - DNA, 25 bp, Homo sapien
ctttggtagtaatggcagcggaact

SEQ ID NO: 1173698 - DNA, 25 bp, Homo sapien
tggctttcccaaggcgtgggatccg

SEQ ID NO: 1173699 - DNA, 25 bp, Homo sapien
acttgaggagccgagaccacgggcc

SEQ ID NO: 1173700 - DNA, 25 bp, Homo sapien
tccacgggtgtcagcggctttggta

SEQ ID NO: 1173701 - DNA, 25 bp, Homo sapien
ctttgtcagcggcaaagcccactgg

SEQ ID NO: 1173702 - DNA, 25 bp, Homo sapien
ccaggactctcgagcggagcggctt

SEQ ID NO: 1173703 - DNA, 25 bp, Homo sapien
gcttcacagcccttccttgtcaggt

SEQ ID NO: 1173704 - DNA, 25 bp, Homo sapien
tcgcactctcggctggccacgggat

SEQ ID NO: 1173705 - DNA, 25 bp, Homo sapien
gagctcgcgtcgcagcttggcctgt

SEQ ID NO: 1173706 - DNA, 25 bp, Homo sapien
gcggaggtccccgtcgcggagctcg

SEQ ID NO: 1173707 - DNA, 25 bp, Homo sapien
gaggcgcgcggtgtttggagggtgt

SEQ ID NO: 1173708 - DNA, 25 bp, Homo sapien
ctgcgtgcctgtgcgccggggaagg

SEQ ID NO: 1173709 - DNA, 25 bp, Homo sapien
cgacctgaacgcagcgccttagacc

SEQ ID NO: 1173710 - DNA, 25 bp, Homo sapien
gacctgaacgcagcgccttagaccg

SEQ ID NO: 1173711 - DNA, 25 bp, Homo sapien
ctcagaaacgcagaccaggtccgtg

SEQ ID NO: 1173712 - DNA, 25 bp, Homo sapien
tctcgcagccgtggcgtgcggctca

SEQ ID NO: 1173713 - DNA, 25 bp, Homo sapien
gcgcctcgctcctgcgctctgaccc

SEQ ID NO: 1173714 - DNA, 25 bp, Homo sapien
aggcgggatgggtgtgtcagcgagc

SEQ ID NO: 1173715 - DNA, 25 bp, Homo sapien
tcgaacccgggcctcccgcgtggca

SEQ ID NO: 1173716 - DNA, 25 bp, Homo sapien
attctaccactgaaccacccatgca

SEQ ID NO: 1173717 - DNA, 25 bp, Homo sapien
cgaacccgggcctcccgcgtggcag

SEQ ID NO: 1173718 - DNA, 25 bp, Homo sapien
cgcgtggcaggcgagaattctacca

SEQ ID NO: 1173719 - DNA, 25 bp, Homo sapien
acagcgacggacgaaggtgtccgat

SEQ ID NO: 1173720 - DNA, 25 bp, Homo sapien
tgtccgatcccgtggctggcgtcca

SEQ ID NO: 1173721 - DNA, 25 bp, Homo sapien
tcagtgggtgacagcgacggacgaa

SEQ ID NO: 1173722 - DNA, 25 bp, Homo sapien
ccagcgtgttgtgggtggatgtcag

SEQ ID NO: 1173723 - DNA, 25 bp, Homo sapien
ctgacagacttctagcccaagtttg

SEQ ID NO: 1173724 - DNA, 25 bp, Homo sapien
gttcctgacagacttctagcccaag

SEQ ID NO: 1173725 - DNA, 25 bp, Homo sapien
gggttcctgacagacttctagccca

SEQ ID NO: 1173726 - DNA, 25 bp, Homo sapien
tcctgacagacttctagcccaagtt

SEQ ID NO: 1173727 - DNA, 25 bp, Homo sapien
cgtcgacaggtttgagattctcgcc

SEQ ID NO: 1173728 - DNA, 25 bp, Homo sapien
tcgacaggtttgagattctcgccta

SEQ ID NO: 1173729 - DNA, 25 bp, Homo sapien
gacaggtttgagattctcgcctatt

SEQ ID NO: 1173730 - DNA, 25 bp, Homo sapien
gtcgacaggtttgagattctcgcct

SEQ ID NO: 1173731 - DNA, 25 bp, Homo sapien
tgtcagcaagcgcactggctttccc

SEQ ID NO: 1173732 - DNA, 25 bp, Homo sapien
ctttggtagtaatggcagcggaact

SEQ ID NO: 1173733 - DNA, 25 bp, Homo sapien
cgtgggatccgtgattgggctccac

SEQ ID NO: 1173734 - DNA, 25 bp, Homo sapien
tccacgggtgtcagcggctttggta

SEQ ID NO: 1173735 - DNA, 25 bp, Homo sapien
tcgcactctcggctggccacgggat

SEQ ID NO: 1173736 - DNA, 25 bp, Homo sapien
ccaggactctcgagcggagcggctt

SEQ ID NO: 1173737 - DNA, 25 bp, Homo sapien
gcttcacagcccttccttgtcaggt

SEQ ID NO: 1173738 - DNA, 25 bp, Homo sapien
ctttgtcagcggcaaagcccactgg

SEQ ID NO: 1173739 - DNA, 25 bp, Homo sapien
ggcaggccggttgccgccggcgtcg

SEQ ID NO: 1173740 - DNA, 25 bp, Homo sapien
gacaggcgccaaggtagcgcccagt

SEQ ID NO: 1173741 - DNA, 25 bp, Homo sapien
ttttaaagcgaagcaggggacaggc

SEQ ID NO: 1173742 - DNA, 25 bp, Homo sapien
gagctgctcgtgagggcaggccggt

SEQ ID NO: 1173743 - DNA, 25 bp, Homo sapien
gagctcgcgtcgcagcttggcctgt

SEQ ID NO: 1173744 - DNA, 25 bp, Homo sapien
gcggaggtccccgtcgcggagctcg

SEQ ID NO: 1173745 - DNA, 25 bp, Homo sapien
gaggcgcgcggtgtttggagggtgt

SEQ ID NO: 1173746 - DNA, 25 bp, Homo sapien
ctgcgtgcctgtgcgccggggaagg

SEQ ID NO: 1173747 - DNA, 25 bp, Homo sapien
cgacctgaacgcagcgccttagacc

SEQ ID NO: 1173748 - DNA, 25 bp, Homo sapien
gacctgaacgcagcgccttagaccg

SEQ ID NO: 1173749 - DNA, 25 bp, Homo sapien
gcgcctcgctcctgcgctctgaccc

SEQ ID NO: 1173750 - DNA, 25 bp, Homo sapien
ctcagaaacgcagaccaggtccgtg

SEQ ID NO: 1173751 - DNA, 25 bp, Homo sapien
tctcgcagccgtggcgtgcggctca

SEQ ID NO: 1173752 - DNA, 25 bp, Homo sapien
aggcgggatgggtgtgtcagcgagc

SEQ ID NO: 1173753 - DNA, 25 bp, Homo sapien
attctaccactgaaccacccatgca

SEQ ID NO: 1173754 - DNA, 25 bp, Homo sapien
cgaacccgggcctcccgcgtggcag

SEQ ID NO: 1173755 - DNA, 25 bp, Homo sapien
cgcgtggcaggcgagaattctacca

SEQ ID NO: 1173756 - DNA, 25 bp, Homo sapien
tcgaacccgggcctcccgcgtggca

SEQ ID NO: 1173757 - DNA, 25 bp, Homo sapien
ccagcgtgttgtgggtggatgtcag

SEQ ID NO: 1173758 - DNA, 25 bp, Homo sapien
tgtccgatcccgtggctggcgtcca

SEQ ID NO: 1173759 - DNA, 25 bp, Homo sapien
tcagtgggtgacagcgacggacgaa

SEQ ID NO: 1173760 - DNA, 25 bp, Homo sapien
acagcgacggacgaaggtgtccgat

SEQ ID NO: 1173761 - DNA, 25 bp, Homo sapien
agcgccaagattcgctgtgggactt

SEQ ID NO: 1173762 - DNA, 25 bp, Homo sapien
ccaggtcaatggcagaagtcagtcg

SEQ ID NO: 1173763 - DNA, 25 bp, Homo sapien
tatccccagcgccaagattcgctgt

SEQ ID NO: 1173764 - DNA, 25 bp, Homo sapien
tattcaacccgtactgatcttattg

SEQ ID NO: 1173765 - DNA, 25 bp, Homo sapien
cttctagccgaagtttgcttcccat

SEQ ID NO: 1173766 - DNA, 25 bp, Homo sapien
tctccaaatgtcaaggaacatgtgg

SEQ ID NO: 1173767 - DNA, 25 bp, Homo sapien
attgcctgacctacgctctctatcg

SEQ ID NO: 1173768 - DNA, 25 bp, Homo sapien
gggttcctgacagacttctagccga

SEQ ID NO: 1173769 - DNA, 25 bp, Homo sapien
atgcagcagttcgtggggaaaaccc

SEQ ID NO: 1173770 - DNA, 25 bp, Homo sapien
tggccacgggcattgaagcgtggag

SEQ ID NO: 1173771 - DNA, 25 bp, Homo sapien
tgcagcagttcgtggggaaaaccca

SEQ ID NO: 1173772 - DNA, 25 bp, Homo sapien
cattgaagcgtggagatgcagcagt

SEQ ID NO: 1173773 - DNA, 25 bp, Homo sapien
aaatgaatcttgagaggtcccatta

SEQ ID NO: 1173774 - DNA, 25 bp, Homo sapien
aaaatgaatcttgagaggtcccatt

SEQ ID NO: 1173775 - DNA, 25 bp, Homo sapien
cgtcgacaggtttgagattctcgcc

SEQ ID NO: 1173776 - DNA, 25 bp, Homo sapien
gacaggtttgagattctcgcctatt

SEQ ID NO: 1173777 - DNA, 25 bp, Homo sapien
tcgacaggtttgagattctcgccta

SEQ ID NO: 1173778 - DNA, 25 bp, Homo sapien
gtcgacaggtttgagattctcgcct

SEQ ID NO: 1173779 - DNA, 25 bp, Homo sapien
atgtgcgtacacatgctcccgctca

SEQ ID NO: 1173780 - DNA, 25 bp, Homo sapien
gggaactgatgaatgtccgtattga

SEQ ID NO: 1173781 - DNA, 25 bp, Homo sapien
caatttacgtgcctcggccgcagct

SEQ ID NO: 1173782 - DNA, 25 bp, Homo sapien
tgacttcccgcaacgtacacgtgca

SEQ ID NO: 1173783 - DNA, 25 bp, Homo sapien
tgtcagcaagcgcactggctttccc

SEQ ID NO: 1173784 - DNA, 25 bp, Homo sapien
ctttggtagtaatggcagcggaact

SEQ ID NO: 1173785 - DNA, 25 bp, Homo sapien
cgtgggatccgtgattgggctccac

SEQ ID NO: 1173786 - DNA, 25 bp, Homo sapien
tccacgggtgtcagcggctttggta

SEQ ID NO: 1173787 - DNA, 25 bp, Homo sapien
ccaggactctcgagcggagcggctt

SEQ ID NO: 1173788 - DNA, 25 bp, Homo sapien
ctttgtcagcggcaaagcccactgg

SEQ ID NO: 1173789 - DNA, 25 bp, Homo sapien
gcttcacagcccttccttgtcaggt

SEQ ID NO: 1173790 - DNA, 25 bp, Homo sapien
tcgcactctcggctggccacgggat

SEQ ID NO: 1173791 - DNA, 25 bp, Homo sapien
ctgcgtgcctgtgcgccggggaagg

SEQ ID NO: 1173792 - DNA, 25 bp, Homo sapien
gaggcgcgcggtgtttggagggtgt

SEQ ID NO: 1173793 - DNA, 25 bp, Homo sapien
gagctcgcgtcgcagcttggcctgt

SEQ ID NO: 1173794 - DNA, 25 bp, Homo sapien
gcggaggtccccgtcgcggagctcg

SEQ ID NO: 1173795 - DNA, 25 bp, Homo sapien
gacctgaacgcagcgccttagaccg

SEQ ID NO: 1173796 - DNA, 25 bp, Homo sapien
cgacctgaacgcagcgccttagacc

SEQ ID NO: 1173797 - DNA, 25 bp, Homo sapien
aaacgcagaccaggtccgtggtcgc

SEQ ID NO: 1173798 - DNA, 25 bp, Homo sapien
cagaaacgcagaccaggtccgtggt

SEQ ID NO: 1173799 - DNA, 25 bp, Homo sapien
acgcagaccaggtccgtggtcgcct

SEQ ID NO: 1173800 - DNA, 25 bp, Homo sapien
gaaacgcagaccaggtccgtggtcg

SEQ ID NO: 1173801 - DNA, 25 bp, Homo sapien
ccaggaatcaaacctgggcctcctg

SEQ ID NO: 1173802 - DNA, 25 bp, Homo sapien
tgcatgggccaggaatcaaacctgg

SEQ ID NO: 1173803 - DNA, 25 bp, Homo sapien
catgggccaggaatcaaacctgggc

SEQ ID NO: 1173804 - DNA, 25 bp, Homo sapien
tgggccaggaatcaaacctgggcct

SEQ ID NO: 1173805 - DNA, 25 bp, Homo sapien
actccccagagtcgcgtcttccttg

SEQ ID NO: 1173806 - DNA, 25 bp, Homo sapien
ccccagagtcgcgtcttccttgcta

SEQ ID NO: 1173807 - DNA, 25 bp, Homo sapien
agagtcgcgtcttccttgctactgg

SEQ ID NO: 1173808 - DNA, 25 bp, Homo sapien
ttactccccagagtcgcgtcttcct

SEQ ID NO: 1173809 - DNA, 25 bp, Homo sapien
tgtgcggtatgagggatgccagctg

SEQ ID NO: 1173810 - DNA, 25 bp, Homo sapien
cattgactgcaagagggagagttgc

SEQ ID NO: 1173811 - DNA, 25 bp, Homo sapien
gtcattgactgcaagagggagagtt

SEQ ID NO: 1173812 - DNA, 25 bp, Homo sapien
tggtgacacaacctgaagcagccca

SEQ ID NO: 1173813 - DNA, 25 bp, Homo sapien
gagaccagacccgatcagggataga

SEQ ID NO: 1173814 - DNA, 25 bp, Homo sapien
acagttggatcacccgcagagacca

SEQ ID NO: 1173815 - DNA, 25 bp, Homo sapien
ccgtgtcattcgtgggatcttggca

SEQ ID NO: 1173816 - DNA, 25 bp, Homo sapien
tctttagggtcaaagtagacgccca

SEQ ID NO: 1173817 - DNA, 25 bp, Homo sapien
caacggattttgaagcacggagata

SEQ ID NO: 1173818 - DNA, 25 bp, Homo sapien
ttgaagcacggagatacaggagctc

SEQ ID NO: 1173819 - DNA, 25 bp, Homo sapien
ttttgaagcacggagatacaggagc

SEQ ID NO: 1173820 - DNA, 25 bp, Homo sapien
ctggcaacggattttgaagcacgga

SEQ ID NO: 1173821 - DNA, 25 bp, Homo sapien
ttcactttatccacaggctgtccac

SEQ ID NO: 1173822 - DNA, 25 bp, Homo sapien
cttcactttatccacaggctgtcca

SEQ ID NO: 1173823 - DNA, 25 bp, Homo sapien
cactttatccacaggctgtccacca

SEQ ID NO: 1173824 - DNA, 25 bp, Homo sapien
ctttatccacaggctgtccaccaag

SEQ ID NO: 1173825 - DNA, 25 bp, Homo sapien
gcaggtcagccaaattgatatggtt

SEQ ID NO: 1173826 - DNA, 25 bp, Homo sapien
gaacaatatagcttgtgtttagttc

SEQ ID NO: 1173827 - DNA, 25 bp, Homo sapien
catggctcatagaacaatgtttacg

SEQ ID NO: 1173828 - DNA, 25 bp, Homo sapien
aatgtttacgttcccattgattgac

SEQ ID NO: 1173829 - DNA, 25 bp, Homo sapien
ctgtgccaacgtccagtgggtttta

SEQ ID NO: 1173830 - DNA, 25 bp, Homo sapien
cgtccagtgggttttaagagacaag

SEQ ID NO: 1173831 - DNA, 25 bp, Homo sapien
tgtgccaacgtccagtgggttttaa

SEQ ID NO: 1173832 - DNA, 25 bp, Homo sapien
tgccaacgtccagtgggttttaaga

SEQ ID NO: 1173833 - DNA, 25 bp, Homo sapien
aaactgtcaatggttgaagcagcca

SEQ ID NO: 1173834 - DNA, 25 bp, Homo sapien
aactgtcaatggttgaagcagccac

SEQ ID NO: 1173835 - DNA, 25 bp, Homo sapien
cccatttcagaatgaccctcactca

SEQ ID NO: 1173836 - DNA, 25 bp, Homo sapien
ccatttcagaatgaccctcactcac

SEQ ID NO: 1173837 - DNA, 25 bp, Homo sapien
tacctggagtccaggcagtaggagt

SEQ ID NO: 1173838 - DNA, 25 bp, Homo sapien
cacactggtacctggagtccaggca

SEQ ID NO: 1173839 - DNA, 25 bp, Homo sapien
cctggagtccaggcagtaggagtgt

SEQ ID NO: 1173840 - DNA, 25 bp, Homo sapien
ggtacctggagtccaggcagtagga

SEQ ID NO: 1173841 - DNA, 25 bp, Homo sapien
gatcaacgtcgagcaggagaacacg

SEQ ID NO: 1173842 - DNA, 25 bp, Homo sapien
gagttctgaccttaggaaccattgg

SEQ ID NO: 1173843 - DNA, 25 bp, Homo sapien
catgaatgtttggtgcagaatggac

SEQ ID NO: 1173844 - DNA, 25 bp, Homo sapien
tccagggactatgaaactacctctg

SEQ ID NO: 1173845 - DNA, 25 bp, Homo sapien
gcagagtggaaaggggtgtggaata

SEQ ID NO: 1173846 - DNA, 25 bp, Homo sapien
ctgaggggcagagtggaaaggggtg

SEQ ID NO: 1173847 - DNA, 25 bp, Homo sapien
gggcagagtggaaaggggtgtggaa

SEQ ID NO: 1173848 - DNA, 25 bp, Homo sapien
tgtggaataaataaccctgaaggga

SEQ ID NO: 1173849 - DNA, 25 bp, Homo sapien
ccttgaacctgtagctgggctgcgt

SEQ ID NO: 1173850 - DNA, 25 bp, Homo sapien
tgtggaaccactgaatggagtcgct

SEQ ID NO: 1173851 - DNA, 25 bp, Homo sapien
gcatgtcagagtcacagagtcctcc

SEQ ID NO: 1173852 - DNA, 25 bp, Homo sapien
tactccccgctgtcattgttgttgg

SEQ ID NO: 1173853 - DNA, 25 bp, Homo sapien
tcatccgtcctggccctcccaggtc

SEQ ID NO: 1173854 - DNA, 25 bp, Homo sapien
ccaccctggggccttcctccactga

SEQ ID NO: 1173855 - DNA, 25 bp, Homo sapien
ctggccctcccaggtccaccctggg

SEQ ID NO: 1173856 - DNA, 25 bp, Homo sapien
tccgtcctggccctcccaggtccac

SEQ ID NO: 1173857 - DNA, 25 bp, Homo sapien
aacagtgcttcccagtaagcagtcc

SEQ ID NO: 1173858 - DNA, 25 bp, Homo sapien
gtgcttcccagtaagcagtccacgc

SEQ ID NO: 1173859 - DNA, 25 bp, Homo sapien
cttcccagtaagcagtccacgccca

SEQ ID NO: 1173860 - DNA, 25 bp, Homo sapien
cagtgcttcccagtaagcagtccac

SEQ ID NO: 1173861 - DNA, 25 bp, Homo sapien
gatcacgtgactcctttaattaaag

SEQ ID NO: 1173862 - DNA, 25 bp, Homo sapien
aaatagttgcaacagcctatcagcc

SEQ ID NO: 1173863 - DNA, 25 bp, Homo sapien
gggtttatgcaccaagagtgcagct

SEQ ID NO: 1173864 - DNA, 25 bp, Homo sapien
gagtgcagctcaagtaaacaacaat

SEQ ID NO: 1173865 - DNA, 25 bp, Homo sapien
agtaaagcaccatcaacagaaagcg

SEQ ID NO: 1173866 - DNA, 25 bp, Homo sapien
aaatcaccctttcagtgttgaacag

SEQ ID NO: 1173867 - DNA, 25 bp, Homo sapien
ggcagcttttgaggtcaactcaata

SEQ ID NO: 1173868 - DNA, 25 bp, Homo sapien
aagcgactccacagccaggatctct

SEQ ID NO: 1173869 - DNA, 25 bp, Homo sapien
atccaaatgggagaatttctgggat

SEQ ID NO: 1173870 - DNA, 25 bp, Homo sapien
tccaaatgggagaatttctgggatt

SEQ ID NO: 1173871 - DNA, 25 bp, Homo sapien
gactacctattacctgggacgtgag

SEQ ID NO: 1173872 - DNA, 25 bp, Homo sapien
gctctggcccctacttgttggtcaa

SEQ ID NO: 1173873 - DNA, 25 bp, Homo sapien
ggctttctcagacctccatgtaggc

SEQ ID NO: 1173874 - DNA, 25 bp, Homo sapien
tggtcaatacttagccaggcttcca

SEQ ID NO: 1173875 - DNA, 25 bp, Homo sapien
gcccaggagcttagggaacctctgc

SEQ ID NO: 1173876 - DNA, 25 bp, Homo sapien
acctccaatgctatgtcccagtgct

SEQ ID NO: 1173877 - DNA, 25 bp, Homo sapien
tctgagtcactcaccaatgcaagat

SEQ ID NO: 1173878 - DNA, 25 bp, Homo sapien
tgcttgtcacctgaagctcttctgt

SEQ ID NO: 1173879 - DNA, 25 bp, Homo sapien
caacgtttgtattctccctgtccca

SEQ ID NO: 1173880 - DNA, 25 bp, Homo sapien
tacagcagtcgcaatgaccacagcc

SEQ ID NO: 1173881 - DNA, 25 bp, Homo sapien
tgctacagcagtcgcaatgaccaca

SEQ ID NO: 1173882 - DNA, 25 bp, Homo sapien
caatggctgctacagcagtcgcaat

SEQ ID NO: 1173883 - DNA, 25 bp, Homo sapien
gcaacaatggctgctacagcagtcg

SEQ ID NO: 1173884 - DNA, 25 bp, Homo sapien
tcccatttccctgcactcagggtct

SEQ ID NO: 1173885 - DNA, 25 bp, Homo sapien
atttccctgcactcagggtctcctg

SEQ ID NO: 1173886 - DNA, 25 bp, Homo sapien
gtttctcagggagggtctctcccat

SEQ ID NO: 1173887 - DNA, 25 bp, Homo sapien
ctggtttctcagggagggtctctcc

SEQ ID NO: 1173888 - DNA, 25 bp, Homo sapien
atccctgagacaactctgtattcac

SEQ ID NO: 1173889 - DNA, 25 bp, Homo sapien
aatccctgagacaactctgtattca

SEQ ID NO: 1173890 - DNA, 25 bp, Homo sapien
tgtttttgtcataaactgacttggc

SEQ ID NO: 1173891 - DNA, 25 bp, Homo sapien
caaaacacacctaattgcctcatgt

SEQ ID NO: 1173892 - DNA, 25 bp, Homo sapien
gagaaagtaacatgagagagaaaaa

SEQ ID NO: 1173893 - DNA, 25 bp, Homo sapien
aaggactttctctggttagtgtcca

SEQ ID NO: 1173894 - DNA, 25 bp, Homo sapien
agtgaagtaaagtccagatttttgc

SEQ ID NO: 1173895 - DNA, 25 bp, Homo sapien
tgaagtaaagtccagatttttgctg

SEQ ID NO: 1173896 - DNA, 25 bp, Homo sapien
cagagtgaagtaaagtccagatttt

SEQ ID NO: 1173897 - DNA, 25 bp, Homo sapien
gagtgaagtaaagtccagatttttg

SEQ ID NO: 1173898 - DNA, 25 bp, Homo sapien
gcagccttcacaggatcagtggaat

SEQ ID NO: 1173899 - DNA, 25 bp, Homo sapien
ggcagccttcacaggatcagtggaa

SEQ ID NO: 1173900 - DNA, 25 bp, Homo sapien
cagccttcacaggatcagtggaatt

SEQ ID NO: 1173901 - DNA, 25 bp, Homo sapien
gccttcacaggatcagtggaattgg

SEQ ID NO: 1173902 - DNA, 25 bp, Homo sapien
gcagtttaagcaatgataaggctat

SEQ ID NO: 1173903 - DNA, 25 bp, Homo sapien
ggctatttctaaggcctgggtggct

SEQ ID NO: 1173904 - DNA, 25 bp, Homo sapien
caatccaacttgagtttcacttatg

SEQ ID NO: 1173905 - DNA, 25 bp, Homo sapien
tgtttgctcaggagttttcaggccc

SEQ ID NO: 1173906 - DNA, 25 bp, Homo sapien
gcagcaggcattaagattggcatta

SEQ ID NO: 1173907 - DNA, 25 bp, Homo sapien
gagggcagctaggtgaaacaatttc

SEQ ID NO: 1173908 - DNA, 25 bp, Homo sapien
tagccacagctttggtgatatccaa

SEQ ID NO: 1173909 - DNA, 25 bp, Homo sapien
tagaatcaccataaagccagctgag

SEQ ID NO: 1173910 - DNA, 25 bp, Homo sapien
gggagccaagacttaaccaatcaaa

SEQ ID NO: 1173911 - DNA, 25 bp, Homo sapien
gctattgttttgcactaagctcctg

SEQ ID NO: 1173912 - DNA, 25 bp, Homo sapien
ccataggataattcaatacaccggg

SEQ ID NO: 1173913 - DNA, 25 bp, Homo sapien
ttcaattggcatccttacaaaagag

SEQ ID NO: 1173914 - DNA, 25 bp, Homo sapien
tcaagttgtctctttctgatggcaa

SEQ ID NO: 1173915 - DNA, 25 bp, Homo sapien
tttttatcatcgtcagtaggtgccc

SEQ ID NO: 1173916 - DNA, 25 bp, Homo sapien
gggttcagagtcatgtagccgccgt

SEQ ID NO: 1173917 - DNA, 25 bp, Homo sapien
tagccgccgtcagctgtttcatagt

SEQ ID NO: 1173918 - DNA, 25 bp, Homo sapien
gacatggtcgttgggaggaagagtc

SEQ ID NO: 1173919 - DNA, 25 bp, Homo sapien
caagctgagagtatgaccacatggc

SEQ ID NO: 1173920 - DNA, 25 bp, Homo sapien
tagtatgaccccgtgaagttttgct

SEQ ID NO: 1173921 - DNA, 25 bp, Homo sapien
ggcaatcggttggttttcaattaca

SEQ ID NO: 1173922 - DNA, 25 bp, Homo sapien
agttaaagctatttctaagggccag

SEQ ID NO: 1173923 - DNA, 25 bp, Homo sapien
aaatctgaggcgcaattcatgaagt

SEQ ID NO: 1173924 - DNA, 25 bp, Homo sapien
tcatgaagtttagtgttccagtggc

SEQ ID NO: 1173925 - DNA, 25 bp, Homo sapien
cttaatgtggttctggtaattgggc

SEQ ID NO: 1173926 - DNA, 25 bp, Homo sapien
tggagcttccgactgcataagcagt

SEQ ID NO: 1173927 - DNA, 25 bp, Homo sapien
cagtcagtcatttgggaccatattg

SEQ ID NO: 1173928 - DNA, 25 bp, Homo sapien
tgaggcacagaaggtgcagtcagtc

SEQ ID NO: 1173929 - DNA, 25 bp, Homo sapien
gcacagaaggtgcagtcagtcattt

SEQ ID NO: 1173930 - DNA, 25 bp, Homo sapien
gcagtcagtcatttgggaccatatt

SEQ ID NO: 1173931 - DNA, 25 bp, Homo sapien
gcgtttctcatgttgctacatctgt

SEQ ID NO: 1173932 - DNA, 25 bp, Homo sapien
catgttgctacatctgttaataaca

SEQ ID NO: 1173933 - DNA, 25 bp, Homo sapien
taacataagcgtttctcatgttgct

SEQ ID NO: 1173934 - DNA, 25 bp, Homo sapien
cataagcgtttctcatgttgctaca

SEQ ID NO: 1173935 - DNA, 25 bp, Homo sapien
taacatttctgaagtcatatagact

SEQ ID NO: 1173936 - DNA, 25 bp, Homo sapien
tgttagaggttagtctattttaaca

SEQ ID NO: 1173937 - DNA, 25 bp, Homo sapien
aatttgttgttagaggttagtctat

SEQ ID NO: 1173938 - DNA, 25 bp, Homo sapien
ccttgaaacaatcacttttaatttg

SEQ ID NO: 1173939 - DNA, 25 bp, Homo sapien
attacaaaggtaatatatgatcatt

SEQ ID NO: 1173940 - DNA, 25 bp, Homo sapien
aataaaataggtcatcaataattgc

SEQ ID NO: 1173941 - DNA, 25 bp, Homo sapien
ataaaataggtcatcaataattgca

SEQ ID NO: 1173942 - DNA, 25 bp, Homo sapien
caaaggtaatatatgatcattatag

SEQ ID NO: 1173943 - DNA, 25 bp, Homo sapien
ggatagttcagtctacaccccaatc

SEQ ID NO: 1173944 - DNA, 25 bp, Homo sapien
tagttcagtctacaccccaatcaat

SEQ ID NO: 1173945 - DNA, 25 bp, Homo sapien
aagaaacagaccccggatagttcag

SEQ ID NO: 1173946 - DNA, 25 bp, Homo sapien
tttcatcaccgaaaagaaacagacc

SEQ ID NO: 1173947 - DNA, 25 bp, Homo sapien
ctacactccaaatctccctctctcc

SEQ ID NO: 1173948 - DNA, 25 bp, Homo sapien
ctccctcacatcttatccattacta

SEQ ID NO: 1173949 - DNA, 25 bp, Homo sapien
cctacactccaaatctccctctctc

SEQ ID NO: 1173950 - DNA, 25 bp, Homo sapien
tctcctctccctcacatcttatcca

SEQ ID NO: 1173951 - DNA, 25 bp, Homo sapien
aagttcattagaagaagagtattca

SEQ ID NO: 1173952 - DNA, 25 bp, Homo sapien
tagaagaagagtattcagttctaag

SEQ ID NO: 1173953 - DNA, 25 bp, Homo sapien
ttccaaaacaaagtgaatgctttat

SEQ ID NO: 1173954 - DNA, 25 bp, Homo sapien
ccaaaacaaagtgaatgctttattt

SEQ ID NO: 1173955 - DNA, 25 bp, Homo sapien
tccaaaacaaagtgaatgctttatt

SEQ ID NO: 1173956 - DNA, 25 bp, Homo sapien
caaaacaaagtgaatgctttatttg

SEQ ID NO: 1173957 - DNA, 25 bp, Homo sapien
ctgacaattcacctgaagtttgcct

SEQ ID NO: 1173958 - DNA, 25 bp, Homo sapien
aatgacttctctgagaaggtcacat

SEQ ID NO: 1173959 - DNA, 25 bp, Homo sapien
tcaaggagactgtgggtcatgtttc

SEQ ID NO: 1173960 - DNA, 25 bp, Homo sapien
tgacttctctgagaaggtcacatcc

SEQ ID NO: 1173961 - DNA, 25 bp, Homo sapien
ctgtgggtcatgtttctaatctgcc

SEQ ID NO: 1173962 - DNA, 25 bp, Homo sapien
taactgggtcatggcgacggtttcc

SEQ ID NO: 1173963 - DNA, 25 bp, Homo sapien
gcactcactctgtcctgccatcatg

SEQ ID NO: 1173964 - DNA, 25 bp, Homo sapien
gtgagtctcacgagagcttagggtt

SEQ ID NO: 1173965 - DNA, 25 bp, Homo sapien
gagtctcacgagagcttagggtttt

SEQ ID NO: 1173966 - DNA, 25 bp, Homo sapien
gctgggttccttggttaatcgtctc

SEQ ID NO: 1173967 - DNA, 25 bp, Homo sapien
cgtctctccgagagcaccagtgaca

SEQ ID NO: 1173968 - DNA, 25 bp, Homo sapien
gacagctggtagagtttgctgcttg

SEQ ID NO: 1173969 - DNA, 25 bp, Homo sapien
taaaaacccttactccatagatggc

SEQ ID NO: 1173970 - DNA, 25 bp, Homo sapien
ggaatcgaccccctctctcacgcat

SEQ ID NO: 1173971 - DNA, 25 bp, Homo sapien
gaccccctctctcacgcatgacagg

SEQ ID NO: 1173972 - DNA, 25 bp, Homo sapien
tctctcacgcatgacaggcagagat

SEQ ID NO: 1173973 - DNA, 25 bp, Homo sapien
ccctctctcacgcatgacaggcaga

SEQ ID NO: 1173974 - DNA, 25 bp, Homo sapien
aaacaaggagacatttctgagactt

SEQ ID NO: 1173975 - DNA, 25 bp, Homo sapien
aaaacaaggagacatttctgagact

SEQ ID NO: 1173976 - DNA, 25 bp, Homo sapien
aaagccaaaacaaggagacatttct

SEQ ID NO: 1173977 - DNA, 25 bp, Homo sapien
ctgaaagccaaaacaaggagacatt

SEQ ID NO: 1173978 - DNA, 25 bp, Homo sapien
agatctgctggcgttcggatttccg

SEQ ID NO: 1173979 - DNA, 25 bp, Homo sapien
tggtttttatcaggttgtgactttg

SEQ ID NO: 1173980 - DNA, 25 bp, Homo sapien
tcagatctgctggcgttcggatttc

SEQ ID NO: 1173981 - DNA, 25 bp, Homo sapien
tttatcaggttgtgactttgtgaat

SEQ ID NO: 1173982 - DNA, 25 bp, Homo sapien
gaacgcaacacctgggaaaggagga

SEQ ID NO: 1173983 - DNA, 25 bp, Homo sapien
cccactgtttgtatccccgaggagc

SEQ ID NO: 1173984 - DNA, 25 bp, Homo sapien
tctttatggcctaagtgggttccca

SEQ ID NO: 1173985 - DNA, 25 bp, Homo sapien
gaaggccgaagatatgttaccatgc

SEQ ID NO: 1173986 - DNA, 25 bp, Homo sapien
tgctgaaacacgcccacgcacgagt

SEQ ID NO: 1173987 - DNA, 25 bp, Homo sapien
ccacgcggccctgctgaaacacgcc

SEQ ID NO: 1173988 - DNA, 25 bp, Homo sapien
gaaacacgcccacgcacgagtaggt

SEQ ID NO: 1173989 - DNA, 25 bp, Homo sapien
acgcggccctgctgaaacacgccca

SEQ ID NO: 1173990 - DNA, 25 bp, Homo sapien
gtgtccgcgaacttgcgcccgatca

SEQ ID NO: 1173991 - DNA, 25 bp, Homo sapien
cgaccagccgctcggtgtcggtgaa

SEQ ID NO: 1173992 - DNA, 25 bp, Homo sapien
tgtccgactgcaccgtggtgtccgc

SEQ ID NO: 1173993 - DNA, 25 bp, Homo sapien
tcagccgcttggcatcgaacacggt

SEQ ID NO: 1173994 - DNA, 25 bp, Homo sapien
cgccctcgctcaccacccggaaggg

SEQ ID NO: 1173995 - DNA, 25 bp, Homo sapien
cttgggcttgccgccctcgctcacc

SEQ ID NO: 1173996 - DNA, 25 bp, Homo sapien
ttgccgccctcgctcaccacccgga

SEQ ID NO: 1173997 - DNA, 25 bp, Homo sapien
ccgccctcgctcaccacccggaagg

SEQ ID NO: 1173998 - DNA, 25 bp, Homo sapien
cacggtgatcactgcgtgcttcacg

SEQ ID NO: 1173999 - DNA, 25 bp, Homo sapien
aaagacaccagcgtcaatggagaga

SEQ ID NO: 1174000 - DNA, 25 bp, Homo sapien
tgcttcacgggctggcccaggtacg

SEQ ID NO: 1174001 - DNA, 25 bp, Homo sapien
gagaaccgacacatcgaaggtgccc

SEQ ID NO: 1174002 - DNA, 25 bp, Homo sapien
gacgacgtcatgaatctgggccttg

SEQ ID NO: 1174003 - DNA, 25 bp, Homo sapien
tccatgaagtggttcacgagccggt

SEQ ID NO: 1174004 - DNA, 25 bp, Homo sapien
tcccaggtgggtatctccagcagtg

SEQ ID NO: 1174005 - DNA, 25 bp, Homo sapien
cagttcctcaaagcgggcacgagtg

SEQ ID NO: 1174006 - DNA, 25 bp, Homo sapien
tgttcagctccttgccgttgaagaa

SEQ ID NO: 1174007 - DNA, 25 bp, Homo sapien
aagaccccaggctggttgtccgagt

SEQ ID NO: 1174008 - DNA, 25 bp, Homo sapien
ggatagtggcgttcctctggatcag

SEQ ID NO: 1174009 - DNA, 25 bp, Homo sapien
tggatcagcgtggtcatcaccccac

SEQ ID NO: 1174010 - DNA, 25 bp, Homo sapien
tggtggggatagtggcgttcctctg

SEQ ID NO: 1174011 - DNA, 25 bp, Homo sapien
gccactgagttcaaaacgccccagc

SEQ ID NO: 1174012 - DNA, 25 bp, Homo sapien
gggatgccactgagttcaaaacgcc

SEQ ID NO: 1174013 - DNA, 25 bp, Homo sapien
tgccactgagttcaaaacgccccag

SEQ ID NO: 1174014 - DNA, 25 bp, Homo sapien
gatgccactgagttcaaaacgcccc

SEQ ID NO: 1174015 - DNA, 25 bp, Homo sapien
gctcaggatgccattagcatcaatg

SEQ ID NO: 1174016 - DNA, 25 bp, Homo sapien
ggctgtcacgctcaggatgccatta

SEQ ID NO: 1174017 - DNA, 25 bp, Homo sapien
tcagtggctgtcacgctcaggatgc

SEQ ID NO: 1174018 - DNA, 25 bp, Homo sapien
tgtcacgctcaggatgccattagca

SEQ ID NO: 1174019 - DNA, 25 bp, Homo sapien
cttgtactgctcggcttcatgaacc

SEQ ID NO: 1174020 - DNA, 25 bp, Homo sapien
gtactgctcggcttcatgaaccatc

SEQ ID NO: 1174021 - DNA, 25 bp, Homo sapien
tgtactgctcggcttcatgaaccat

SEQ ID NO: 1174022 - DNA, 25 bp, Homo sapien
tactgctcggcttcatgaaccatcc

SEQ ID NO: 1174023 - DNA, 25 bp, Homo sapien
cctggcgggcttgagtgccacaact

SEQ ID NO: 1174024 - DNA, 25 bp, Homo sapien
gggcgacagatttgctccagctccc

SEQ ID NO: 1174025 - DNA, 25 bp, Homo sapien
gaagacatgggcctccagcgagttt

SEQ ID NO: 1174026 - DNA, 25 bp, Homo sapien
aggacttcccgacacttgtcttgca

SEQ ID NO: 1174027 - DNA, 25 bp, Homo sapien
tctagaaggcccatagcatagccct

SEQ ID NO: 1174028 - DNA, 25 bp, Homo sapien
cagctgacttatcacgaagggccat

SEQ ID NO: 1174029 - DNA, 25 bp, Homo sapien
caaaagacttcagttatcctgggaa

SEQ ID NO: 1174030 - DNA, 25 bp, Homo sapien
gaagggcaggatcatagaagacagt

SEQ ID NO: 1174031 - DNA, 25 bp, Homo sapien
aattcatacatgcaagtaacaaagt

SEQ ID NO: 1174032 - DNA, 25 bp, Homo sapien
ttcatacatgcaagtaacaaagtac

SEQ ID NO: 1174033 - DNA, 25 bp, Homo sapien
tttaggtctataactatattttaca

SEQ ID NO: 1174034 - DNA, 25 bp, Homo sapien
tcatacatgcaagtaacaaagtaca

SEQ ID NO: 1174035 - DNA, 25 bp, Homo sapien
tggattgactgggaactaacacaag

SEQ ID NO: 1174036 - DNA, 25 bp, Homo sapien
taatgtagcattgttctagccaagc

SEQ ID NO: 1174037 - DNA, 25 bp, Homo sapien
taaatctcccaatgcccatagggca

SEQ ID NO: 1174038 - DNA, 25 bp, Homo sapien
tgaagccaggctgcgtaagacttgg

SEQ ID NO: 1174039 - DNA, 25 bp, Homo sapien
gaatcgaacccgggtcaactgcttg

SEQ ID NO: 1174040 - DNA, 25 bp, Homo sapien
atcgaacccgggtcaactgcttgga

SEQ ID NO: 1174041 - DNA, 25 bp, Homo sapien
tgctcaccactataccaccaacgcg

SEQ ID NO: 1174042 - DNA, 25 bp, Homo sapien
gcttggaaggcagctatgctcacca

SEQ ID NO: 1174043 - DNA, 25 bp, Homo sapien
gtcgggagagcgaaccccgctctcc

SEQ ID NO: 1174044 - DNA, 25 bp, Homo sapien
ccgtcgggagagcgaaccccgctct

SEQ ID NO: 1174045 - DNA, 25 bp, Homo sapien
ggagagcgaaccccgctctcccgcg

SEQ ID NO: 1174046 - DNA, 25 bp, Homo sapien
agagcgaaccccgctctcccgcgtg

SEQ ID NO: 1174047 - DNA, 25 bp, Homo sapien
cctgggactaattagaaagcttggc

SEQ ID NO: 1174048 - DNA, 25 bp, Homo sapien
cgaatgggttgcttactatgaggcc

SEQ ID NO: 1174049 - DNA, 25 bp, Homo sapien
catccagcctgaatggttagggtca

SEQ ID NO: 1174050 - DNA, 25 bp, Homo sapien
ttcaaccggtgacaaagaactcagt

SEQ ID NO: 1174051 - DNA, 25 bp, Homo sapien
ggaagctccattgtcaccgacagga

SEQ ID NO: 1174052 - DNA, 25 bp, Homo sapien
cattcgggcacagtcctgaagacca

SEQ ID NO: 1174053 - DNA, 25 bp, Homo sapien
gcaatatgggcaagtgtcatggact

SEQ ID NO: 1174054 - DNA, 25 bp, Homo sapien
tggtacaagaaagcccattcgggca

SEQ ID NO: 1174055 - DNA, 25 bp, Homo sapien
aagagaatgcaggaacgaagggtct

SEQ ID NO: 1174056 - DNA, 25 bp, Homo sapien
agaatgcaggaacgaagggtcttcg

SEQ ID NO: 1174057 - DNA, 25 bp, Homo sapien
tcttcggggaatccaaaatggatgc

SEQ ID NO: 1174058 - DNA, 25 bp, Homo sapien
aaatggatgctctctgtgggttcgg

SEQ ID NO: 1174059 - DNA, 25 bp, Homo sapien
ctgggtgggatcgaaccaccaacct

SEQ ID NO: 1174060 - DNA, 25 bp, Homo sapien
tttcggttaacagccgaacgcgcta

SEQ ID NO: 1174061 - DNA, 25 bp, Homo sapien
gctaaccgattgcgccacagagacg

SEQ ID NO: 1174062 - DNA, 25 bp, Homo sapien
gtccctgggtgggatcgaaccacca

SEQ ID NO: 1174063 - DNA, 25 bp, Homo sapien
tcacccatgtactaagcctagttac

SEQ ID NO: 1174064 - DNA, 25 bp, Homo sapien
gactagagcccacctaatgatttta

SEQ ID NO: 1174065 - DNA, 25 bp, Homo sapien
ctaagcctagttactcaatagttat

SEQ ID NO: 1174066 - DNA, 25 bp, Homo sapien
ttagatttaggggtatgcgtgcagg

SEQ ID NO: 1174067 - DNA, 25 bp, Homo sapien
ttaagccacttggtctgctcttctg

SEQ ID NO: 1174068 - DNA, 25 bp, Homo sapien
cttaagccacttggtctgctcttct

SEQ ID NO: 1174069 - DNA, 25 bp, Homo sapien
attgaatgtctcttgacctcagcat

SEQ ID NO: 1174070 - DNA, 25 bp, Homo sapien
ctcttctgattgaatgtctcttgac

SEQ ID NO: 1174071 - DNA, 25 bp, Homo sapien
ccctctgatgactcccgttactctc

SEQ ID NO: 1174072 - DNA, 25 bp, Homo sapien
gatgactcccgttactctccctgaa

SEQ ID NO: 1174073 - DNA, 25 bp, Homo sapien
tcttcacctgtccattaaatattgg

SEQ ID NO: 1174074 - DNA, 25 bp, Homo sapien
tgtcttcacctgtccattaaatatt

SEQ ID NO: 1174075 - DNA, 25 bp, Homo sapien
cagggcacaggaaaagagcccatta

SEQ ID NO: 1174076 - DNA, 25 bp, Homo sapien
ggcacaggaaaagagcccattacac

SEQ ID NO: 1174077 - DNA, 25 bp, Homo sapien
gggcacaggaaaagagcccattaca

SEQ ID NO: 1174078 - DNA, 25 bp, Homo sapien
ccagggcacaggaaaagagcccatt

SEQ ID NO: 1174079 - DNA, 25 bp, Homo sapien
ctaggtaatggagcagccatcattc

SEQ ID NO: 1174080 - DNA, 25 bp, Homo sapien
attctgggaaaggcatgaagcccac

SEQ ID NO: 1174081 - DNA, 25 bp, Homo sapien
taggtaatggagcagccatcattct

SEQ ID NO: 1174082 - DNA, 25 bp, Homo sapien
ccatcattctgggaaaggcatgaag

SEQ ID NO: 1174083 - DNA, 25 bp, Homo sapien
ttttcagtatgagggtgcccagtct

SEQ ID NO: 1174084 - DNA, 25 bp, Homo sapien
tgattttcagtatgagggtgcccag

SEQ ID NO: 1174085 - DNA, 25 bp, Homo sapien
atgagggtgcccagtctgccacaac

SEQ ID NO: 1174086 - DNA, 25 bp, Homo sapien
cagtatgagggtgcccagtctgcca

SEQ ID NO: 1174087 - DNA, 25 bp, Homo sapien
tctctattgtcataatcccagactc

SEQ ID NO: 1174088 - DNA, 25 bp, Homo sapien
ggtatgtcaggatggcaatagaatg

SEQ ID NO: 1174089 - DNA, 25 bp, Homo sapien
gatggcaatagaatgaccacactca

SEQ ID NO: 1174090 - DNA, 25 bp, Homo sapien
gactcactgctgagttgtggaacaa

SEQ ID NO: 1174091 - DNA, 25 bp, Homo sapien
atggtcaccaaaactcagctcagaa

SEQ ID NO: 1174092 - DNA, 25 bp, Homo sapien
tcagctcagaacctcctgtttcagt

SEQ ID NO: 1174093 - DNA, 25 bp, Homo sapien
ctgggagaaagagggaaatggtcac

SEQ ID NO: 1174094 - DNA, 25 bp, Homo sapien
ggagaaagagggaaatggtcaccaa

SEQ ID NO: 1174095 - DNA, 25 bp, Homo sapien
tcacagaaattttagaaactaggga

SEQ ID NO: 1174096 - DNA, 25 bp, Homo sapien
gttcaaattcacagaaattttagaa

SEQ ID NO: 1174097 - DNA, 25 bp, Homo sapien
ttcttcctctgaggccacagctggc

SEQ ID NO: 1174098 - DNA, 25 bp, Homo sapien
caaattcacagaaattttagaaact

SEQ ID NO: 1174099 - DNA, 25 bp, Homo sapien
cctcctagaagattcagagcttccc

SEQ ID NO: 1174100 - DNA, 25 bp, Homo sapien
ctcctagaagattcagagcttccca

SEQ ID NO: 1174101 - DNA, 25 bp, Homo sapien
ccagaataaatctggtgtagcccat

SEQ ID NO: 1174102 - DNA, 25 bp, Homo sapien
tccctcctagaagattcagagcttc

SEQ ID NO: 1174103 - DNA, 25 bp, Homo sapien
ccttctctcaaagcttggcggattc

SEQ ID NO: 1174104 - DNA, 25 bp, Homo sapien
agcagtcacagccttctctcaaagc

SEQ ID NO: 1174105 - DNA, 25 bp, Homo sapien
ctctcaaagcttggcggattctacc

SEQ ID NO: 1174106 - DNA, 25 bp, Homo sapien
cacagccttctctcaaagcttggcg

SEQ ID NO: 1174107 - DNA, 25 bp, Homo sapien
gggggacttgcagtcagcccagtca

SEQ ID NO: 1174108 - DNA, 25 bp, Homo sapien
gacaggtaagaatgacaggattccc

SEQ ID NO: 1174109 - DNA, 25 bp, Homo sapien
gcccagtcactctcagtggcaagga

SEQ ID NO: 1174110 - DNA, 25 bp, Homo sapien
tggcaaggacaggtaagaatgacag

SEQ ID NO: 1174111 - DNA, 25 bp, Homo sapien
aggaatagcacagctgtccacagaa

SEQ ID NO: 1174112 - DNA, 25 bp, Homo sapien
atagcacagctgtccacagaagcat

SEQ ID NO: 1174113 - DNA, 25 bp, Homo sapien
gaatagcacagctgtccacagaagc

SEQ ID NO: 1174114 - DNA, 25 bp, Homo sapien
ccaggaatagcacagctgtccacag

SEQ ID NO: 1174115 - DNA, 25 bp, Homo sapien
ctctttctcctgtagcccagtatca

SEQ ID NO: 1174116 - DNA, 25 bp, Homo sapien
tctttctcctgtagcccagtatcat

SEQ ID NO: 1174117 - DNA, 25 bp, Homo sapien
ccaagggaaggaaaggctgtgggtg

SEQ ID NO: 1174118 - DNA, 25 bp, Homo sapien
aaggaaaggctgtgggtggagtact

SEQ ID NO: 1174119 - DNA, 25 bp, Homo sapien
ggaaggaaaggctgtgggtggagta

SEQ ID NO: 1174120 - DNA, 25 bp, Homo sapien
gaaaggctgtgggtggagtacttac

SEQ ID NO: 1174121 - DNA, 25 bp, Homo sapien
ccctgacttggtactgggctcagtt

SEQ ID NO: 1174122 - DNA, 25 bp, Homo sapien
ctggccctgacttggtactgggctc

SEQ ID NO: 1174123 - DNA, 25 bp, Homo sapien
gggctcagttgctggtgcatttaga

SEQ ID NO: 1174124 - DNA, 25 bp, Homo sapien
cttggtactgggctcagttgctggt

SEQ ID NO: 1174125 - DNA, 25 bp, Homo sapien
gagaggggatctttcgggagcaatt

SEQ ID NO: 1174126 - DNA, 25 bp, Homo sapien
gaggggatctttcgggagcaattac

SEQ ID NO: 1174127 - DNA, 25 bp, Homo sapien
agaggggatctttcgggagcaatta

SEQ ID NO: 1174128 - DNA, 25 bp, Homo sapien
gagaggaggtagcatgaagaagagg

SEQ ID NO: 1174129 - DNA, 25 bp, Homo sapien
gagagaggaggtagcatgaagaaga

SEQ ID NO: 1174130 - DNA, 25 bp, Homo sapien
gcagagagaggaggtagcatgaaga

SEQ ID NO: 1174131 - DNA, 25 bp, Homo sapien
cagagagaggaggtagcatgaagaa

SEQ ID NO: 1174132 - DNA, 25 bp, Homo sapien
ccttgaacctgtagctgggctgcgt

SEQ ID NO: 1174133 - DNA, 25 bp, Homo sapien
tgtggaaccactgaatggagtcgct

SEQ ID NO: 1174134 - DNA, 25 bp, Homo sapien
gcatgtcagagtcacagagtcctcc

SEQ ID NO: 1174135 - DNA, 25 bp, Homo sapien
tactccccgctgtcattgttgttgg

SEQ ID NO: 1174136 - DNA, 25 bp, Homo sapien
tctgcctgaaagcagatttcatccg

SEQ ID NO: 1174137 - DNA, 25 bp, Homo sapien
agcgatacttcccagtaagcaggcc

SEQ ID NO: 1174138 - DNA, 25 bp, Homo sapien
aagcagatttcatccgtcctggccc

SEQ ID NO: 1174139 - DNA, 25 bp, Homo sapien
gatacttcccagtaagcaggccacc

SEQ ID NO: 1174140 - DNA, 25 bp, Homo sapien
ccttactggtgggacacgatgtgca

SEQ ID NO: 1174141 - DNA, 25 bp, Homo sapien
gatgccatctcttccatgtcgagga

SEQ ID NO: 1174142 - DNA, 25 bp, Homo sapien
aatccagtgtgaccgaggagtccgc

SEQ ID NO: 1174143 - DNA, 25 bp, Homo sapien
tacagagagccacctttcaatggga

SEQ ID NO: 1174144 - DNA, 25 bp, Homo sapien
gtggcacctcagcacgatggtttct

SEQ ID NO: 1174145 - DNA, 25 bp, Homo sapien
ggcacctcagcacgatggtttctcc

SEQ ID NO: 1174146 - DNA, 25 bp, Homo sapien
tgaggggtctggagcaccagccact

SEQ ID NO: 1174147 - DNA, 25 bp, Homo sapien
ctgtggcacctcagcacgatggttt

SEQ ID NO: 1174148 - DNA, 25 bp, Homo sapien
tgaccttgaccagaggcttgtcctt

SEQ ID NO: 1174149 - DNA, 25 bp, Homo sapien
tctggaagaatgtgaccttgaccag

SEQ ID NO: 1174150 - DNA, 25 bp, Homo sapien
gcgtgtagcctatgtttcctgtgca

SEQ ID NO: 1174151 - DNA, 25 bp, Homo sapien
tggtaatcaccactgtgactgtggt

SEQ ID NO: 1174152 - DNA, 25 bp, Homo sapien
agggagctctgcttcgctgccgtcc

SEQ ID NO: 1174153 - DNA, 25 bp, Homo sapien
gcttcgctgccgtccttagtctggg

SEQ ID NO: 1174154 - DNA, 25 bp, Homo sapien
gctctgcttcgctgccgtccttagt

SEQ ID NO: 1174155 - DNA, 25 bp, Homo sapien
gggagctctgcttcgctgccgtcct

SEQ ID NO: 1174156 - DNA, 25 bp, Homo sapien
ctcagttcttaggaatgcccaggag

SEQ ID NO: 1174157 - DNA, 25 bp, Homo sapien
tcagttcttaggaatgcccaggagc

SEQ ID NO: 1174158 - DNA, 25 bp, Homo sapien
acaatggccgctacagcaatcccag

SEQ ID NO: 1174159 - DNA, 25 bp, Homo sapien
tggccgctacagcaatcccagtgac

SEQ ID NO: 1174160 - DNA, 25 bp, Homo sapien
gctacagcaatcccagtgaccacag

SEQ ID NO: 1174161 - DNA, 25 bp, Homo sapien
aatggccgctacagcaatcccagtg

SEQ ID NO: 1174162 - DNA, 25 bp, Homo sapien
tccagggttggatgggaccagctca

SEQ ID NO: 1174163 - DNA, 25 bp, Homo sapien
tgtcagaaagtccacgccatggcat

SEQ ID NO: 1174164 - DNA, 25 bp, Homo sapien
taactgaggtgttggctatgaacca

SEQ ID NO: 1174165 - DNA, 25 bp, Homo sapien
catggcatctgtctgaggcttgctc

SEQ ID NO: 1174166 - DNA, 25 bp, Homo sapien
cctgcactcagggtatcctgggaga

SEQ ID NO: 1174167 - DNA, 25 bp, Homo sapien
tccctgcactcagggtatcctggga

SEQ ID NO: 1174168 - DNA, 25 bp, Homo sapien
catttccctgcactcagggtatcct

SEQ ID NO: 1174169 - DNA, 25 bp, Homo sapien
gtttctcagggagggtctctcccat

SEQ ID NO: 1174170 - DNA, 25 bp, Homo sapien
atcactgaatccctgagacaacctg

SEQ ID NO: 1174171 - DNA, 25 bp, Homo sapien
aatccctgagacaacctgtactcac

SEQ ID NO: 1174172 - DNA, 25 bp, Homo sapien
gcagccctggtgagccatcactgaa

SEQ ID NO: 1174173 - DNA, 25 bp, Homo sapien
agccggcagccctggtgagccatca

SEQ ID NO: 1174174 - DNA, 25 bp, Homo sapien
ttcagtcaaccttgagtgcatgggc

SEQ ID NO: 1174175 - DNA, 25 bp, Homo sapien
gactttaactacagtctggaagttg

SEQ ID NO: 1174176 - DNA, 25 bp, Homo sapien
tccactgtgtgatgagggcagaacc

SEQ ID NO: 1174177 - DNA, 25 bp, Homo sapien
agaagacctgagaggtcaccctggc

SEQ ID NO: 1174178 - DNA, 25 bp, Homo sapien
tgcagacagaaccacacaacaagat

SEQ ID NO: 1174179 - DNA, 25 bp, Homo sapien
tgccttgtgaaatgtgcttatgcca

SEQ ID NO: 1174180 - DNA, 25 bp, Homo sapien
gcctggctgcaaaagtgccttgtga

SEQ ID NO: 1174181 - DNA, 25 bp, Homo sapien
tgtctgaaacacactgaattccctc

SEQ ID NO: 1174182 - DNA, 25 bp, Homo sapien
caagcactgggtaaatatgacctca

SEQ ID NO: 1174183 - DNA, 25 bp, Homo sapien
gaattgctgagctttcctagaagca

SEQ ID NO: 1174184 - DNA, 25 bp, Homo sapien
cagccttccgcaaaggccaaggtga

SEQ ID NO: 1174185 - DNA, 25 bp, Homo sapien
tgatcgatgcatagggtagcccagc

SEQ ID NO: 1174186 - DNA, 25 bp, Homo sapien
accaacgcccaaactagagccaaag

SEQ ID NO: 1174187 - DNA, 25 bp, Homo sapien
aatatcagccagagcactgctggag

SEQ ID NO: 1174188 - DNA, 25 bp, Homo sapien
gcccaaactagagccaaagcaagca

SEQ ID NO: 1174189 - DNA, 25 bp, Homo sapien
agaagaaatatcagccagagcactg

SEQ ID NO: 1174190 - DNA, 25 bp, Homo sapien
gcctcatcaggattagtgggattgg

SEQ ID NO: 1174191 - DNA, 25 bp, Homo sapien
cccaactttgtcagcctcatcagga

SEQ ID NO: 1174192 - DNA, 25 bp, Homo sapien
gtcagcctcatcaggattagtggga

SEQ ID NO: 1174193 - DNA, 25 bp, Homo sapien
cagcctcatcaggattagtgggatt

SEQ ID NO: 1174194 - DNA, 25 bp, Homo sapien
gagggcctaggaaagaaggcaacag

SEQ ID NO: 1174195 - DNA, 25 bp, Homo sapien
agggcctaggaaagaaggcaacaga

SEQ ID NO: 1174196 - DNA, 25 bp, Homo sapien
agagggcctaggaaagaaggcaaca

SEQ ID NO: 1174197 - DNA, 25 bp, Homo sapien
agcatccgggtgcatgagaagtgaa

SEQ ID NO: 1174198 - DNA, 25 bp, Homo sapien
cggttctggtcatcaggctcttcca

SEQ ID NO: 1174199 - DNA, 25 bp, Homo sapien
taaatacggttctggtcatcaggct

SEQ ID NO: 1174200 - DNA, 25 bp, Homo sapien
tcaggctcttccagagcatccgggt

SEQ ID NO: 1174201 - DNA, 25 bp, Homo sapien
taatgtgctggtagaggttagtcta

SEQ ID NO: 1174202 - DNA, 25 bp, Homo sapien
aagcatttcccaagttgctattatc

SEQ ID NO: 1174203 - DNA, 25 bp, Homo sapien
gaagagccttgatgtcaagaagagc

SEQ ID NO: 1174204 - DNA, 25 bp, Homo sapien
caagaagagctgaagcacagaaggt

SEQ ID NO: 1174205 - DNA, 25 bp, Homo sapien
aaagtaatatatgatctttatagaa

SEQ ID NO: 1174206 - DNA, 25 bp, Homo sapien
taatatatgatctttatagaaaaat

SEQ ID NO: 1174207 - DNA, 25 bp, Homo sapien
tatgatctttatagaaaaataaaga

SEQ ID NO: 1174208 - DNA, 25 bp, Homo sapien
agtaatatatgatctttatagaaaa

SEQ ID NO: 1174209 - DNA, 25 bp, Homo sapien
tacactccaaccaatacagccttga

SEQ ID NO: 1174210 - DNA, 25 bp, Homo sapien
tacaaacctaaatggtgtggcctac

SEQ ID NO: 1174211 - DNA, 25 bp, Homo sapien
gaccccaggcagttcagtctacact

SEQ ID NO: 1174212 - DNA, 25 bp, Homo sapien
tcctaagagtctcatcactgaagag

SEQ ID NO: 1174213 - DNA, 25 bp, Homo sapien
gttaatggtcatgatcaattagttg

SEQ ID NO: 1174214 - DNA, 25 bp, Homo sapien
ctattaaaatggagctgtgggagtg

SEQ ID NO: 1174215 - DNA, 25 bp, Homo sapien
aaagaaatctgttaatggtcatgat

SEQ ID NO: 1174216 - DNA, 25 bp, Homo sapien
aaaggctattaaaatggagctgtgg

SEQ ID NO: 1174217 - DNA, 25 bp, Homo sapien
tgtcattgtctgatagccagctggc

SEQ ID NO: 1174218 - DNA, 25 bp, Homo sapien
ggtagcactctcagctgttcaagaa

SEQ ID NO: 1174219 - DNA, 25 bp, Homo sapien
cccttagggctatgacaaaatggta

SEQ ID NO: 1174220 - DNA, 25 bp, Homo sapien
gggcctgtcaaagcatgtcattgtc

SEQ ID NO: 1174221 - DNA, 25 bp, Homo sapien
ctgcaaccccaacactgattttctt

SEQ ID NO: 1174222 - DNA, 25 bp, Homo sapien
gcaaccccaacactgattttcttca

SEQ ID NO: 1174223 - DNA, 25 bp, Homo sapien
caaccccaacactgattttcttcaa

SEQ ID NO: 1174224 - DNA, 25 bp, Homo sapien
tgcaaccccaacactgattttcttc

SEQ ID NO: 1174225 - DNA, 25 bp, Homo sapien
cacccagagcacaccaagggaaagg

SEQ ID NO: 1174226 - DNA, 25 bp, Homo sapien
ccagtagcatctgggccacccagag

SEQ ID NO: 1174227 - DNA, 25 bp, Homo sapien
agagcacaccaagggaaaggtagag

SEQ ID NO: 1174228 - DNA, 25 bp, Homo sapien
gaaaggtagagggcccaggccatga

SEQ ID NO: 1174229 - DNA, 25 bp, Homo sapien
tctaatgttcactgggtgccagacc

SEQ ID NO: 1174230 - DNA, 25 bp, Homo sapien
gacatcagattctaatgttcactgg

SEQ ID NO: 1174231 - DNA, 25 bp, Homo sapien
tgtgcagtatctaacttcatcctca

SEQ ID NO: 1174232 - DNA, 25 bp, Homo sapien
gccagaccctgctagcacttgtgtg

SEQ ID NO: 1174233 - DNA, 25 bp, Homo sapien
tacgggaaaccaggagcaaagacaa

SEQ ID NO: 1174234 - DNA, 25 bp, Homo sapien
gggaaaccaggagcaaagacaatgg

SEQ ID NO: 1174235 - DNA, 25 bp, Homo sapien
gtacgggaaaccaggagcaaagaca

SEQ ID NO: 1174236 - DNA, 25 bp, Homo sapien
ctggtacgggaaaccaggagcaaag

SEQ ID NO: 1174237 - DNA, 25 bp, Homo sapien
gagagtgtctcagggggatagtttt

SEQ ID NO: 1174238 - DNA, 25 bp, Homo sapien
tctcagggggatagttttgaccttg

SEQ ID NO: 1174239 - DNA, 25 bp, Homo sapien
agttttgaccttgattcactggcgt

SEQ ID NO: 1174240 - DNA, 25 bp, Homo sapien
agcaaatgcactgtggtttggagaa

SEQ ID NO: 1174241 - DNA, 25 bp, Homo sapien
ggagaaagaggacagggttcctcca

SEQ ID NO: 1174242 - DNA, 25 bp, Homo sapien
ccagaaaatgatgatgcaacttgga

SEQ ID NO: 1174243 - DNA, 25 bp, Homo sapien
aaatgatgatgcaacttggagaaag

SEQ ID NO: 1174244 - DNA, 25 bp, Homo sapien
agggcatggcccagggagaaccaga

SEQ ID NO: 1174245 - DNA, 25 bp, Homo sapien
gtcaagtcatcctccgtgtggcagc

SEQ ID NO: 1174246 - DNA, 25 bp, Homo sapien
cttgcatcagtcaagtcatcctccg

SEQ ID NO: 1174247 - DNA, 25 bp, Homo sapien
cactgcagcgtctcaaaactggcag

SEQ ID NO: 1174248 - DNA, 25 bp, Homo sapien
tcacactgcagcgtctcaaaactgg

SEQ ID NO: 1174249 - DNA, 25 bp, Homo sapien
ataggacacaatcaggtggaagggt

SEQ ID NO: 1174250 - DNA, 25 bp, Homo sapien
gacacaatcaggtggaagggttcac

SEQ ID NO: 1174251 - DNA, 25 bp, Homo sapien
tcaggtggaagggttcactgaaagt

SEQ ID NO: 1174252 - DNA, 25 bp, Homo sapien
caatcaggtggaagggttcactgaa

SEQ ID NO: 1174253 - DNA, 25 bp, Homo sapien
tgatggagaattccctgttaggccc

SEQ ID NO: 1174254 - DNA, 25 bp, Homo sapien
gccatctcggtagaaggtcacctga

SEQ ID NO: 1174255 - DNA, 25 bp, Homo sapien
gccttttgtaccacggtgatggaga

SEQ ID NO: 1174256 - DNA, 25 bp, Homo sapien
cagcaggtccccttcaaaaactggc

SEQ ID NO: 1174257 - DNA, 25 bp, Homo sapien
gatgatcttgctacctccaggctaa

SEQ ID NO: 1174258 - DNA, 25 bp, Homo sapien
gaggtctcgtccctttcgaagccca

SEQ ID NO: 1174259 - DNA, 25 bp, Homo sapien
cagtgagcactaggaagcatagatc

SEQ ID NO: 1174260 - DNA, 25 bp, Homo sapien
gagctcagccatcttatatacaggt

SEQ ID NO: 1174261 - DNA, 25 bp, Homo sapien
ccttccatccttgtagaaggagaag

SEQ ID NO: 1174262 - DNA, 25 bp, Homo sapien
gggtacagctctgagaattggcgct

SEQ ID NO: 1174263 - DNA, 25 bp, Homo sapien
cctcacaccagtatgacccggagtg

SEQ ID NO: 1174264 - DNA, 25 bp, Homo sapien
gacccggagtgatcttctgaagctg

SEQ ID NO: 1174265 - DNA, 25 bp, Homo sapien
gattcaatgtgggaggtgcagcaga

SEQ ID NO: 1174266 - DNA, 25 bp, Homo sapien
tggatcctcagaagatggggttggc

SEQ ID NO: 1174267 - DNA, 25 bp, Homo sapien
atttctgaggagctggattcaatgt

SEQ ID NO: 1174268 - DNA, 25 bp, Homo sapien
gagctggattcaatgtgggaggtgc

SEQ ID NO: 1174269 - DNA, 25 bp, Homo sapien
gcttccggtggccagataattccct

SEQ ID NO: 1174270 - DNA, 25 bp, Homo sapien
taattccctcaactccatgagcagg

SEQ ID NO: 1174271 - DNA, 25 bp, Homo sapien
tcagcagtagcctttgtggtcccag

SEQ ID NO: 1174272 - DNA, 25 bp, Homo sapien
tgcatgtgtttgagaagaaggccca

SEQ ID NO: 1174273 - DNA, 25 bp, Homo sapien
gttaagtgagatcatggatgaactg

SEQ ID NO: 1174274 - DNA, 25 bp, Homo sapien
gggtggttaagtgagatcatggatg

SEQ ID NO: 1174275 - DNA, 25 bp, Homo sapien
tggttaagtgagatcatggatgaac

SEQ ID NO: 1174276 - DNA, 25 bp, Homo sapien
gaatcagatttattggggtggttaa

SEQ ID NO: 1174277 - DNA, 25 bp, Homo sapien
taaaagtacttatgcatatgtgcag

SEQ ID NO: 1174278 - DNA, 25 bp, Homo sapien
ggacaacttgtaaaagtacttatgc

SEQ ID NO: 1174279 - DNA, 25 bp, Homo sapien
tatttacactcacctaactacatta

SEQ ID NO: 1174280 - DNA, 25 bp, Homo sapien
tatgcatatgtgcaggacaggaaga

SEQ ID NO: 1174281 - DNA, 25 bp, Homo sapien
cacaacattctggtcgatataacag

SEQ ID NO: 1174282 - DNA, 25 bp, Homo sapien
gagactgctgtattcaatccacttc

SEQ ID NO: 1174283 - DNA, 25 bp, Homo sapien
cacccctggcttctatttactggat

SEQ ID NO: 1174284 - DNA, 25 bp, Homo sapien
cattccagagcccaacacctagggt

SEQ ID NO: 1174285 - DNA, 25 bp, Homo sapien
tcaagatcaaggcaacgacagagtc

SEQ ID NO: 1174286 - DNA, 25 bp, Homo sapien
tgtcatcttcttgccacgtcctcat

SEQ ID NO: 1174287 - DNA, 25 bp, Homo sapien
tgtttggcgacagctgttttttggt

SEQ ID NO: 1174288 - DNA, 25 bp, Homo sapien
acagagtcggtgtttggcgacagct

SEQ ID NO: 1174289 - DNA, 25 bp, Homo sapien
ggtatgtctagaatgatcatgtgca

SEQ ID NO: 1174290 - DNA, 25 bp, Homo sapien
tctttgtggtatgtctagaatgatc

SEQ ID NO: 1174291 - DNA, 25 bp, Homo sapien
tgtttctttgtggtatgtctagaat

SEQ ID NO: 1174292 - DNA, 25 bp, Homo sapien
tgtggtatgtctagaatgatcatgt

SEQ ID NO: 1174293 - DNA, 25 bp, Homo sapien
cacctgaacactccagtccccagtg

SEQ ID NO: 1174294 - DNA, 25 bp, Homo sapien
cagtgagcgatctattccctgagtt

SEQ ID NO: 1174295 - DNA, 25 bp, Homo sapien
cagtccccagtgagcgatctattcc

SEQ ID NO: 1174296 - DNA, 25 bp, Homo sapien
tccccagtgagcgatctattccctg

SEQ ID NO: 1174297 - DNA, 25 bp, Homo sapien
gatctgtcatgtttttcaaggcccc

SEQ ID NO: 1174298 - DNA, 25 bp, Homo sapien
cttgcttacatcatcccactctgga

SEQ ID NO: 1174299 - DNA, 25 bp, Homo sapien
taagagcctctgtagtctatttact

SEQ ID NO: 1174300 - DNA, 25 bp, Homo sapien
tattatttccttccgctgaactctg

SEQ ID NO: 1174301 - DNA, 25 bp, Homo sapien
tggagatgcactggcatgagatggg

SEQ ID NO: 1174302 - DNA, 25 bp, Homo sapien
aaggatggagatgcactggcatgag

SEQ ID NO: 1174303 - DNA, 25 bp, Homo sapien
gatgccactgagtactaggagacat

SEQ ID NO: 1174304 - DNA, 25 bp, Homo sapien
acagagagaaagaatgtggccagtg

SEQ ID NO: 1174305 - DNA, 25 bp, Homo sapien
ccaggagcagaagggctgtcagtgg

SEQ ID NO: 1174306 - DNA, 25 bp, Homo sapien
ggagcagaagggctgtcagtggcca

SEQ ID NO: 1174307 - DNA, 25 bp, Homo sapien
agcagaagggctgtcagtggccaca

SEQ ID NO: 1174308 - DNA, 25 bp, Homo sapien
gcagaagggctgtcagtggccacat

SEQ ID NO: 1174309 - DNA, 25 bp, Homo sapien
agtaggtggcccaaataccagagag

SEQ ID NO: 1174310 - DNA, 25 bp, Homo sapien
ggtggtatccatcacacttcaaagt

SEQ ID NO: 1174311 - DNA, 25 bp, Homo sapien
tctggcatcgatacacccctggtgt

SEQ ID NO: 1174312 - DNA, 25 bp, Homo sapien
gtagagacaatatgggcttctccag

SEQ ID NO: 1174313 - DNA, 25 bp, Homo sapien
tgcaggtccctacctgctccagaga

SEQ ID NO: 1174314 - DNA, 25 bp, Homo sapien
gcatctctcgcatagtgccgtgcag

SEQ ID NO: 1174315 - DNA, 25 bp, Homo sapien
tgtttcctgcaccttgggattggcc

SEQ ID NO: 1174316 - DNA, 25 bp, Homo sapien
tccagagacttaagataggccccag

SEQ ID NO: 1174317 - DNA, 25 bp, Homo sapien
taacacagtgtagttggcgctggag

SEQ ID NO: 1174318 - DNA, 25 bp, Homo sapien
gaagcttgtagaccaccttgtcgta

SEQ ID NO: 1174319 - DNA, 25 bp, Homo sapien
ctgtcacagccaccttagcggagaa

SEQ ID NO: 1174320 - DNA, 25 bp, Homo sapien
cactggcgcatagggcacttgcaga

SEQ ID NO: 1174321 - DNA, 25 bp, Homo sapien
ttcacggcaaaggagaggagacagc

SEQ ID NO: 1174322 - DNA, 25 bp, Homo sapien
ccttgcaggacgctagggagtcgct

SEQ ID NO: 1174323 - DNA, 25 bp, Homo sapien
tagtctaagagaaaccctccaagtg

SEQ ID NO: 1174324 - DNA, 25 bp, Homo sapien
gcctagaataggagacgctgcgcct

SEQ ID NO: 1174325 - DNA, 25 bp, Homo sapien
ttgtccaccgctccgcgaccccgct

SEQ ID NO: 1174326 - DNA, 25 bp, Homo sapien
gaggaggccgtgtgtccacgtggag

SEQ ID NO: 1174327 - DNA, 25 bp, Homo sapien
ggagcaacggcgccggcttgtccac

SEQ ID NO: 1174328 - DNA, 25 bp, Homo sapien
tgcttcccgcgagggctccttgcag

SEQ ID NO: 1174329 - DNA, 25 bp, Homo sapien
gtgcaggcgcgtgtcgcagcgcagc

SEQ ID NO: 1174330 - DNA, 25 bp, Homo sapien
atcaccctcagcaccggcgcccgga

SEQ ID NO: 1174331 - DNA, 25 bp, Homo sapien
aggcgcgtgtcgcagcgcagcacca

SEQ ID NO: 1174332 - DNA, 25 bp, Homo sapien
ctcagcaccggcgcccggaacagct

SEQ ID NO: 1174333 - DNA, 25 bp, Homo sapien
gagctgcagccacggactgcgtttc

SEQ ID NO: 1174334 - DNA, 25 bp, Homo sapien
actgcgtttccggacactgcgggtg

SEQ ID NO: 1174335 - DNA, 25 bp, Homo sapien
gcaccagtacgattcgagctcctcg

SEQ ID NO: 1174336 - DNA, 25 bp, Homo sapien
cgcaccgcgcggctgtacttgtaaa

SEQ ID NO: 1174337 - DNA, 25 bp, Homo sapien
tggtggaggccgggtccaggggaga

SEQ ID NO: 1174338 - DNA, 25 bp, Homo sapien
ggagccaaggctgcggcccatggag

SEQ ID NO: 1174339 - DNA, 25 bp, Homo sapien
caggagccaaggctgcggcccatgg

SEQ ID NO: 1174340 - DNA, 25 bp, Homo sapien
accaggagccaaggctgcggcccat

SEQ ID NO: 1174341 - DNA, 25 bp, Homo sapien
ttaccaggagccaaggctgcggccc

SEQ ID NO: 1174342 - DNA, 25 bp, Homo sapien
aactgcagcccggtggaggtggtgt

SEQ ID NO: 1174343 - DNA, 25 bp, Homo sapien
gagcagaaggtccacgtcgggtttc

SEQ ID NO: 1174344 - DNA, 25 bp, Homo sapien
cggaggtgaccaacgggaccgatct

SEQ ID NO: 1174345 - DNA, 25 bp, Homo sapien
tccagccgattgttccaagggcgtc

SEQ ID NO: 1174346 - DNA, 25 bp, Homo sapien
gctctccacaggagtggtctctggg

SEQ ID NO: 1174347 - DNA, 25 bp, Homo sapien
agctctccacaggagtggtctctgg

SEQ ID NO: 1174348 - DNA, 25 bp, Homo sapien
ctctccacaggagtggtctctgggg

SEQ ID NO: 1174349 - DNA, 25 bp, Homo sapien
tctccacaggagtggtctctggggt

SEQ ID NO: 1174350 - DNA, 25 bp, Homo sapien
actacacttcgtgggcgctccttta

SEQ ID NO: 1174351 - DNA, 25 bp, Homo sapien
tgaggttgaaatcgtcagccactac

SEQ ID NO: 1174352 - DNA, 25 bp, Homo sapien
cctgtgctgaaatatgtactggcta

SEQ ID NO: 1174353 - DNA, 25 bp, Homo sapien
gaatgcttgcggttacaaactgctg

SEQ ID NO: 1174354 - DNA, 25 bp, Homo sapien
taaatagaacccaggatttatttga

SEQ ID NO: 1174355 - DNA, 25 bp, Homo sapien
tagaacccaggatttatttgaagat

SEQ ID NO: 1174356 - DNA, 25 bp, Homo sapien
gaacccaggatttatttgaagatgt

SEQ ID NO: 1174357 - DNA, 25 bp, Homo sapien
ttatttgaagatgtaaactcatcag

SEQ ID NO: 1174358 - DNA, 25 bp, Homo sapien
aatgggaggcccacacaaacaactt

SEQ ID NO: 1174359 - DNA, 25 bp, Homo sapien
ggaatgggaggcccacacaaacaac

SEQ ID NO: 1174360 - DNA, 25 bp, Homo sapien
gaatgggaggcccacacaaacaact

SEQ ID NO: 1174361 - DNA, 25 bp, Homo sapien
agggaatgggaggcccacacaaaca

SEQ ID NO: 1174362 - DNA, 25 bp, Homo sapien
tgtaggtgaaacctccagacttcag

SEQ ID NO: 1174363 - DNA, 25 bp, Homo sapien
tacagcctcagggattcctcagaac

SEQ ID NO: 1174364 - DNA, 25 bp, Homo sapien
gcaggacatctcaaagtcgggttga

SEQ ID NO: 1174365 - DNA, 25 bp, Homo sapien
caaggttaagtaccatagcccgtga

SEQ ID NO: 1174366 - DNA, 25 bp, Homo sapien
tctcgcgaaggactacaatgatcta

SEQ ID NO: 1174367 - DNA, 25 bp, Homo sapien
tacaacttaacatgatgcactaggg

SEQ ID NO: 1174368 - DNA, 25 bp, Homo sapien
tgagactgacgcctttgaactgaaa

SEQ ID NO: 1174369 - DNA, 25 bp, Homo sapien
gctctaatggacagaaaacgggtat

SEQ ID NO: 1174370 - DNA, 25 bp, Homo sapien
tctcaagcctaagtcaggcccagtt

SEQ ID NO: 1174371 - DNA, 25 bp, Homo sapien
ctcctggatcttttgtagggctggc

SEQ ID NO: 1174372 - DNA, 25 bp, Homo sapien
actttctcaagcctaagtcaggccc

SEQ ID NO: 1174373 - DNA, 25 bp, Homo sapien
ggctaatcctaaaataggctcttct

SEQ ID NO: 1174374 - DNA, 25 bp, Homo sapien
taggcaatctagagatcccctgctc

SEQ ID NO: 1174375 - DNA, 25 bp, Homo sapien
gatgccgaacttagtatgaataccc

SEQ ID NO: 1174376 - DNA, 25 bp, Homo sapien
ttagtatgaatacccaatgggcata

SEQ ID NO: 1174377 - DNA, 25 bp, Homo sapien
tatctcactattagtcagcacagag

SEQ ID NO: 1174378 - DNA, 25 bp, Homo sapien
caagtgcctttctgaactgcagagc

SEQ ID NO: 1174379 - DNA, 25 bp, Homo sapien
tcaagtgcctttctgaactgcagag

SEQ ID NO: 1174380 - DNA, 25 bp, Homo sapien
ttcctgccctaccatcgagtagact

SEQ ID NO: 1174381 - DNA, 25 bp, Homo sapien
gccgcgcccagagacaaggcggctt

SEQ ID NO: 1174382 - DNA, 25 bp, Homo sapien
gcccagagacaaggcggcttcctgc

SEQ ID NO: 1174383 - DNA, 25 bp, Homo sapien
gagacaaggcggcttcctgccctac

SEQ ID NO: 1174384 - DNA, 25 bp, Homo sapien
tggctgcacttccagcatctgcccg

SEQ ID NO: 1174385 - DNA, 25 bp, Homo sapien
gttagcacggccgtgatgcccgctt

SEQ ID NO: 1174386 - DNA, 25 bp, Homo sapien
tcgcagccatcactcgggcccggag

SEQ ID NO: 1174387 - DNA, 25 bp, Homo sapien
caccgaaatacaatcctggctgcac

SEQ ID NO: 1174388 - DNA, 25 bp, Homo sapien
gaagaggcgccatagatcctcgacc

SEQ ID NO: 1174389 - DNA, 25 bp, Homo sapien
ctcgggtttgtccagcgctggcacg

SEQ ID NO: 1174390 - DNA, 25 bp, Homo sapien
gctggcacgaagaggcgccatagat

SEQ ID NO: 1174391 - DNA, 25 bp, Homo sapien
caggccccgccttgaagctgggctc

SEQ ID NO: 1174392 - DNA, 25 bp, Homo sapien
ggtccagatggctgagtaggtccgt

SEQ ID NO: 1174393 - DNA, 25 bp, Homo sapien
cggtccagatggctgagtaggtccg

SEQ ID NO: 1174394 - DNA, 25 bp, Homo sapien
agtgcaccaacaccgcacggccctc

SEQ ID NO: 1174395 - DNA, 25 bp, Homo sapien
gggcctgaccgatgaaggccacgca

SEQ ID NO: 1174396 - DNA, 25 bp, Homo sapien
ctcagcgcgggcctgaccgatgaag

SEQ ID NO: 1174397 - DNA, 25 bp, Homo sapien
gcgcgggcctgaccgatgaaggcca

SEQ ID NO: 1174398 - DNA, 25 bp, Homo sapien
cctcctcctctcttggaaacacgcc

SEQ ID NO: 1174399 - DNA, 25 bp, Homo sapien
accctcctcctctcttggaaacacg

SEQ ID NO: 1174400 - DNA, 25 bp, Homo sapien
ggcccgcctcaaccctcctcctctc

SEQ ID NO: 1174401 - DNA, 25 bp, Homo sapien
tcctcctctcttggaaacacgcctc

SEQ ID NO: 1174402 - DNA, 25 bp, Homo sapien
attacgctactacactgtagcctgg

SEQ ID NO: 1174403 - DNA, 25 bp, Homo sapien
cagtgagccgtaattacgctactac

SEQ ID NO: 1174404 - DNA, 25 bp, Homo sapien
gccgtaattacgctactacactgta

SEQ ID NO: 1174405 - DNA, 25 bp, Homo sapien
gagccgtaattacgctactacactg

SEQ ID NO: 1174406 - DNA, 25 bp, Homo sapien
agaatctggagcttttcataggctt

SEQ ID NO: 1174407 - DNA, 25 bp, Homo sapien
atggccacacttcgactgactcctg

SEQ ID NO: 1174408 - DNA, 25 bp, Homo sapien
agttggtcagtcttcatgagaaaag

SEQ ID NO: 1174409 - DNA, 25 bp, Homo sapien
gagaaaagcagttattatggccaca

SEQ ID NO: 1174410 - DNA, 25 bp, Homo sapien
tgtaaccttttgtaaacgatattgc

SEQ ID NO: 1174411 - DNA, 25 bp, Homo sapien
tcccattgcctggtataatttcagt

SEQ ID NO: 1174412 - DNA, 25 bp, Homo sapien
gcttataaattgcactagaggtatc

SEQ ID NO: 1174413 - DNA, 25 bp, Homo sapien
tagaggtatccacttcgtatcccat

SEQ ID NO: 1174414 - DNA, 25 bp, Homo sapien
gaacctcatctttcaatccttgtga

SEQ ID NO: 1174415 - DNA, 25 bp, Homo sapien
ctgcactttctacacttgtagagaa

SEQ ID NO: 1174416 - DNA, 25 bp, Homo sapien
cggtagttgggtcaacagcaaagag

SEQ ID NO: 1174417 - DNA, 25 bp, Homo sapien
gagttcttgaggtaaattctgcaat

SEQ ID NO: 1174418 - DNA, 25 bp, Homo sapien
tgcctccctgtggtaagcatggaag

SEQ ID NO: 1174419 - DNA, 25 bp, Homo sapien
ccttcacggtgatccagaatactag

SEQ ID NO: 1174420 - DNA, 25 bp, Homo sapien
gcagattccatccactgtacaggtt

SEQ ID NO: 1174421 - DNA, 25 bp, Homo sapien
tgggcaaaggctataggtccacttc

SEQ ID NO: 1174422 - DNA, 25 bp, Homo sapien
ttagaccagggctctcaaccagaag

SEQ ID NO: 1174423 - DNA, 25 bp, Homo sapien
cactagaaagatataatcttcagaa

SEQ ID NO: 1174424 - DNA, 25 bp, Homo sapien
tgatagtcttatctacactagaaag

SEQ ID NO: 1174425 - DNA, 25 bp, Homo sapien
aagtagttcactatgttggatcagc

SEQ ID NO: 1174426 - DNA, 25 bp, Homo sapien
gaatgtgaattgtgatgtgatacgg

SEQ ID NO: 1174427 - DNA, 25 bp, Homo sapien
taatccccaagtgtggaagaagaga

SEQ ID NO: 1174428 - DNA, 25 bp, Homo sapien
gctacaaataataccatcaagaatg

SEQ ID NO: 1174429 - DNA, 25 bp, Homo sapien
tcaagaatgggaattgcagctgggc

SEQ ID NO: 1174430 - DNA, 25 bp, Homo sapien
gaaggtttcatggatgtggcatata

SEQ ID NO: 1174431 - DNA, 25 bp, Homo sapien
gactacaattatctcataggaagaa

SEQ ID NO: 1174432 - DNA, 25 bp, Homo sapien
tactaactgtgtgtattgacagcat

SEQ ID NO: 1174433 - DNA, 25 bp, Homo sapien
aacaagacacgatccccacgttgag

SEQ ID NO: 1174434 - DNA, 25 bp, Homo sapien
tatccacctaccacaagagcactgt

SEQ ID NO: 1174435 - DNA, 25 bp, Homo sapien
tatttgaaaagcaggtgttatccac

SEQ ID NO: 1174436 - DNA, 25 bp, Homo sapien
tgtttgtgatcccaaaacaggcaat

SEQ ID NO: 1174437 - DNA, 25 bp, Homo sapien
agagcactgttcaccataccagttg

SEQ ID NO: 1174438 - DNA, 25 bp, Homo sapien
gcacaaacaatctgccatgaatgat

SEQ ID NO: 1174439 - DNA, 25 bp, Homo sapien
caaaaggctttgattgccatgtaaa

SEQ ID NO: 1174440 - DNA, 25 bp, Homo sapien
taaagcatagtttccaggttacatc

SEQ ID NO: 1174441 - DNA, 25 bp, Homo sapien
gaatgataagaagcaaaggcagcac

SEQ ID NO: 1174442 - DNA, 25 bp, Homo sapien
ggacaaaatactccgtaacgctgac

SEQ ID NO: 1174443 - DNA, 25 bp, Homo sapien
cggcggcaggcggacaaaatactcc

SEQ ID NO: 1174444 - DNA, 25 bp, Homo sapien
cgtaacgctgacgagacggtggcct

SEQ ID NO: 1174445 - DNA, 25 bp, Homo sapien
aatactccgtaacgctgacgagacg

SEQ ID NO: 1174446 - DNA, 25 bp, Homo sapien
tctccctggaactccgtgattaata

SEQ ID NO: 1174447 - DNA, 25 bp, Homo sapien
ttctccctggaactccgtgattaat

SEQ ID NO: 1174448 - DNA, 25 bp, Homo sapien
ctccctggaactccgtgattaatat

SEQ ID NO: 1174449 - DNA, 25 bp, Homo sapien
ggtgccggcaaccccagccggctcc

SEQ ID NO: 1174450 - DNA, 25 bp, Homo sapien
gtgccggcaaccccagccggctccc

SEQ ID NO: 1174451 - DNA, 25 bp, Homo sapien
ctgtgaaagagtcccgggctaaaag

SEQ ID NO: 1174452 - DNA, 25 bp, Homo sapien
cttctgattcaaaggatgggagaga

SEQ ID NO: 1174453 - DNA, 25 bp, Homo sapien
caacatgttcatttactgacagaga

SEQ ID NO: 1174454 - DNA, 25 bp, Homo sapien
caggaagaatctaaagcacatatgg

SEQ ID NO: 1174455 - DNA, 25 bp, Homo sapien
tctagctaggagcaagaagccactc

SEQ ID NO: 1174456 - DNA, 25 bp, Homo sapien
aaataaccgagttcagcaaagagag

SEQ ID NO: 1174457 - DNA, 25 bp, Homo sapien
tgtgaaataaccgagttcagcaaag

SEQ ID NO: 1174458 - DNA, 25 bp, Homo sapien
gtctcatttgctgcttccaattgca

SEQ ID NO: 1174459 - DNA, 25 bp, Homo sapien
tctcatttgctgcttccaattgcag

SEQ ID NO: 1174460 - DNA, 25 bp, Homo sapien
ttcaaaatgactactatatggttca

SEQ ID NO: 1174461 - DNA, 25 bp, Homo sapien
tctagtaattggtaacgaccatttg

SEQ ID NO: 1174462 - DNA, 25 bp, Homo sapien
tcaaaatgactactatatggttcat

SEQ ID NO: 1174463 - DNA, 25 bp, Homo sapien
agtaaaaatgtatctagtaattggt

SEQ ID NO: 1174464 - DNA, 25 bp, Homo sapien
cttcttaaagcctgcattaagttct

SEQ ID NO: 1174465 - DNA, 25 bp, Homo sapien
gtacagatttggttgttgatgtccc

SEQ ID NO: 1174466 - DNA, 25 bp, Homo sapien
tacagatttggttgttgatgtccca

SEQ ID NO: 1174467 - DNA, 25 bp, Homo sapien
acagatttggttgttgatgtcccaa

SEQ ID NO: 1174468 - DNA, 25 bp, Homo sapien
cagatttggttgttgatgtcccaaa

SEQ ID NO: 1174469 - DNA, 25 bp, Homo sapien
taagagtccactgaccgaggagacg

SEQ ID NO: 1174470 - DNA, 25 bp, Homo sapien
aagaataagagtccactgaccgagg

SEQ ID NO: 1174471 - DNA, 25 bp, Homo sapien
tccactgaccgaggagacgagactg

SEQ ID NO: 1174472 - DNA, 25 bp, Homo sapien
ccgaggagacgagactgaataactt

SEQ ID NO: 1174473 - DNA, 25 bp, Homo sapien
catcttacattcttctatgtccata

SEQ ID NO: 1174474 - DNA, 25 bp, Homo sapien
tcttacattcttctatgtccatata

SEQ ID NO: 1174475 - DNA, 25 bp, Homo sapien
tacattcttctatgtccatatataa

SEQ ID NO: 1174476 - DNA, 25 bp, Homo sapien
cttacattcttctatgtccatatat

SEQ ID NO: 1174477 - DNA, 25 bp, Homo sapien
tccttcagtggctccgctgaagaga

SEQ ID NO: 1174478 - DNA, 25 bp, Homo sapien
aaaggggagacatctgagaactaga

SEQ ID NO: 1174479 - DNA, 25 bp, Homo sapien
taggaccagtgacaggcttatcttc

SEQ ID NO: 1174480 - DNA, 25 bp, Homo sapien
cgctgaagagagactattagagttt

SEQ ID NO: 1174481 - DNA, 25 bp, Homo sapien
caaaccacaagtcaatgtgaaagca

SEQ ID NO: 1174482 - DNA, 25 bp, Homo sapien
acaagtcaatgtgaaagcaattacg

SEQ ID NO: 1174483 - DNA, 25 bp, Homo sapien
aagtcaatgtgaaagcaattacgca

SEQ ID NO: 1174484 - DNA, 25 bp, Homo sapien
ccacaagtcaatgtgaaagcaatta

SEQ ID NO: 1174485 - DNA, 25 bp, Homo sapien
ggcataagcgttggtactgtctgaa

SEQ ID NO: 1174486 - DNA, 25 bp, Homo sapien
tggtttttgctggaacactggagtt

SEQ ID NO: 1174487 - DNA, 25 bp, Homo sapien
caataaaggcttgggctgaattgaa

SEQ ID NO: 1174488 - DNA, 25 bp, Homo sapien
ctttagtgggtgcaggttgtaaact

SEQ ID NO: 1174489 - DNA, 25 bp, Homo sapien
tgtaggacaggtttagtcacggaaa

SEQ ID NO: 1174490 - DNA, 25 bp, Homo sapien
tcactgggctattcgctgaaggggc

SEQ ID NO: 1174491 - DNA, 25 bp, Homo sapien
tctgaaccgacatttctcatggtac

SEQ ID NO: 1174492 - DNA, 25 bp, Homo sapien
ttcaccacgtgattagggagctgtg

SEQ ID NO: 1174493 - DNA, 25 bp, Homo sapien
tgctgctaggacagactaatgcttc

SEQ ID NO: 1174494 - DNA, 25 bp, Homo sapien
cgtctcgatgtgctggccaagtaaa

SEQ ID NO: 1174495 - DNA, 25 bp, Homo sapien
tactaacacagaaggctatacaagc

SEQ ID NO: 1174496 - DNA, 25 bp, Homo sapien
gaaaggcttggctcacgtctcgatg

SEQ ID NO: 1174497 - DNA, 25 bp, Homo sapien
gcaaagaatgcaaggtccggaccac

SEQ ID NO: 1174498 - DNA, 25 bp, Homo sapien
tctcaaggttcagtttccaacaagc

SEQ ID NO: 1174499 - DNA, 25 bp, Homo sapien
tacacgtcttattgggtatgcaaag

SEQ ID NO: 1174500 - DNA, 25 bp, Homo sapien
tgtgtgcagggcatccatctaggcc

SEQ ID NO: 1174501 - DNA, 25 bp, Homo sapien
tcctccaatcttatcatttaaggct

SEQ ID NO: 1174502 - DNA, 25 bp, Homo sapien
tcttatcatttaaggctacttcata

SEQ ID NO: 1174503 - DNA, 25 bp, Homo sapien
tatcatttaaggctacttcataatc

SEQ ID NO: 1174504 - DNA, 25 bp, Homo sapien
tccaatcttatcatttaaggctact

SEQ ID NO: 1174505 - DNA, 25 bp, Homo sapien
tcttcttcttgcgagactgacaagc

SEQ ID NO: 1174506 - DNA, 25 bp, Homo sapien
tgagagggcagcctttaatctcgcc

SEQ ID NO: 1174507 - DNA, 25 bp, Homo sapien
caagcggattctcgattttttatca

SEQ ID NO: 1174508 - DNA, 25 bp, Homo sapien
cagttgctcgttttctgagagggca

SEQ ID NO: 1174509 - DNA, 25 bp, Homo sapien
gatactttagcccatctcgactcag

SEQ ID NO: 1174510 - DNA, 25 bp, Homo sapien
gcaaatttcccgaatagaactgagg

SEQ ID NO: 1174511 - DNA, 25 bp, Homo sapien
catctatatggttcagcactgcagt

SEQ ID NO: 1174512 - DNA, 25 bp, Homo sapien
tatggcagggcactttagaagcctc

SEQ ID NO: 1174513 - DNA, 25 bp, Homo sapien
tataaatgccaatactatcatcaca

SEQ ID NO: 1174514 - DNA, 25 bp, Homo sapien
tcttcgctttggactagggacttta

SEQ ID NO: 1174515 - DNA, 25 bp, Homo sapien
tatcatcacacagacaactcttcgc

SEQ ID NO: 1174516 - DNA, 25 bp, Homo sapien
ctcataggtccatagttcagtatta

SEQ ID NO: 1174517 - DNA, 25 bp, Homo sapien
caaaagctacatcagagaggtaccc

SEQ ID NO: 1174518 - DNA, 25 bp, Homo sapien
agctagggatgcctcattgtacaca

SEQ ID NO: 1174519 - DNA, 25 bp, Homo sapien
agaggtaccctaagattgctcatcc

SEQ ID NO: 1174520 - DNA, 25 bp, Homo sapien
taaccatatatctagcctcaggcac

SEQ ID NO: 1174521 - DNA, 25 bp, Homo sapien
agttctgcccctaatatgctgtgag

SEQ ID NO: 1174522 - DNA, 25 bp, Homo sapien
tatgtttgcttcctccgatgacagc

SEQ ID NO: 1174523 - DNA, 25 bp, Homo sapien
ccattcggtccctcaaggtagaaat

SEQ ID NO: 1174524 - DNA, 25 bp, Homo sapien
cagcatgtgataccactgcccaaga

SEQ ID NO: 1174525 - DNA, 25 bp, Homo sapien
gaccatgaagtgctagcaggcttag

SEQ ID NO: 1174526 - DNA, 25 bp, Homo sapien
taccctagctgcctatcaaaagatg

SEQ ID NO: 1174527 - DNA, 25 bp, Homo sapien
cacaggccaatgtgacaggctaaca

SEQ ID NO: 1174528 - DNA, 25 bp, Homo sapien
taaattacggcagcagttgggcaag

SEQ ID NO: 1174529 - DNA, 25 bp, Homo sapien
tgtcagaagtgtgtaaacaaaaagt

SEQ ID NO: 1174530 - DNA, 25 bp, Homo sapien
gagtcaaattgtaggacatccagtt

SEQ ID NO: 1174531 - DNA, 25 bp, Homo sapien
taacctgtgggagcctgtgctagct

SEQ ID NO: 1174532 - DNA, 25 bp, Homo sapien
cagtctttggatactcagcccttaa

SEQ ID NO: 1174533 - DNA, 25 bp, Homo sapien
cagcagctgtgaagatcattaattc

SEQ ID NO: 1174534 - DNA, 25 bp, Homo sapien
caatcaatctaccatggaaatgaga

SEQ ID NO: 1174535 - DNA, 25 bp, Homo sapien
catccccacctttacttcagcagct

SEQ ID NO: 1174536 - DNA, 25 bp, Homo sapien
cttcttgataaaatagggaccatca

SEQ ID NO: 1174537 - DNA, 25 bp, Homo sapien
tctgagactgctcacttgagtatgt

SEQ ID NO: 1174538 - DNA, 25 bp, Homo sapien
tctgggttcaagatgttactctgag

SEQ ID NO: 1174539 - DNA, 25 bp, Homo sapien
ggatacttggtcaacttctctaagc

SEQ ID NO: 1174540 - DNA, 25 bp, Homo sapien
gtttataaagcccaaagatgacaca

SEQ ID NO: 1174541 - DNA, 25 bp, Homo sapien
ggtaagaaccatactgcttcttatc

SEQ ID NO: 1174542 - DNA, 25 bp, Homo sapien
gaaccatactgcttcttatccttaa

SEQ ID NO: 1174543 - DNA, 25 bp, Homo sapien
aggtaagaaccatactgcttcttat

SEQ ID NO: 1174544 - DNA, 25 bp, Homo sapien
taagaaccatactgcttcttatcct

SEQ ID NO: 1174545 - DNA, 25 bp, Homo sapien
taagaaaagtcaccctgatgagtat

SEQ ID NO: 1174546 - DNA, 25 bp, Homo sapien
ttgccacaaatgaggtaagagacct

SEQ ID NO: 1174547 - DNA, 25 bp, Homo sapien
gacctagtggaatgtctgtctaaac

SEQ ID NO: 1174548 - DNA, 25 bp, Homo sapien
gtttacctgagcagtcacacatcaa

SEQ ID NO: 1174549 - DNA, 25 bp, Homo sapien
tcttcaaaggtgtaccaccaattaa

SEQ ID NO: 1174550 - DNA, 25 bp, Homo sapien
aactcttcaaaggtgtaccaccaat

SEQ ID NO: 1174551 - DNA, 25 bp, Homo sapien
cacttgggcatactgcaaactcttc

SEQ ID NO: 1174552 - DNA, 25 bp, Homo sapien
tggtatgctttagcacttgggcata

SEQ ID NO: 1174553 - DNA, 25 bp, Homo sapien
taggaacttggctcatcaataagac

SEQ ID NO: 1174554 - DNA, 25 bp, Homo sapien
tatgatgcaacccacacaatttaca

SEQ ID NO: 1174555 - DNA, 25 bp, Homo sapien
caaagggaatctccctagagaagca

SEQ ID NO: 1174556 - DNA, 25 bp, Homo sapien
cattaatagtgcttaggaacttggc

SEQ ID NO: 1174557 - DNA, 25 bp, Homo sapien
ttagcagaaaatcctagaaggtgcc

SEQ ID NO: 1174558 - DNA, 25 bp, Homo sapien
aaggtgcctcctttgatttgcaggg

SEQ ID NO: 1174559 - DNA, 25 bp, Homo sapien
tttgcagggctcacactagggttca

SEQ ID NO: 1174560 - DNA, 25 bp, Homo sapien
tctggataataccatctgatgtgtc

SEQ ID NO: 1174561 - DNA, 25 bp, Homo sapien
ggccaaaagatagatgcatgccatc

SEQ ID NO: 1174562 - DNA, 25 bp, Homo sapien
aatgcacacaaactgagattttaag

SEQ ID NO: 1174563 - DNA, 25 bp, Homo sapien
gtaatttatgtgttctactactcaa

SEQ ID NO: 1174564 - DNA, 25 bp, Homo sapien
tacacgaacaatttagatgcaatgt

SEQ ID NO: 1174565 - DNA, 25 bp, Homo sapien
tctcaactctcgtaaatccaaaggc

SEQ ID NO: 1174566 - DNA, 25 bp, Homo sapien
ggaaaaaatagcttgcatcccatgt

SEQ ID NO: 1174567 - DNA, 25 bp, Homo sapien
tgatcagactactatgctttctggg

SEQ ID NO: 1174568 - DNA, 25 bp, Homo sapien
tatcttatgctaatgtggaaggctt

SEQ ID NO: 1174569 - DNA, 25 bp, Homo sapien
gaaacatggatgcacaaaatttgtt

SEQ ID NO: 1174570 - DNA, 25 bp, Homo sapien
tgaaacatggatgcacaaaatttgt

SEQ ID NO: 1174571 - DNA, 25 bp, Homo sapien
ctgaaacatggatgcacaaaatttg

SEQ ID NO: 1174572 - DNA, 25 bp, Homo sapien
tctgttgtgttaattaggggctgac

SEQ ID NO: 1174573 - DNA, 25 bp, Homo sapien
ttcttcagttagcaccatcagggct

SEQ ID NO: 1174574 - DNA, 25 bp, Homo sapien
agactctgttgtgttaattaggggc

SEQ ID NO: 1174575 - DNA, 25 bp, Homo sapien
tggttcttcagttagcaccatcagg

SEQ ID NO: 1174576 - DNA, 25 bp, Homo sapien
ccatcctcgaagttcatgatttaac

SEQ ID NO: 1174577 - DNA, 25 bp, Homo sapien
tgaacccatcctcgaagttcatgat

SEQ ID NO: 1174578 - DNA, 25 bp, Homo sapien
ctatgaacccatcctcgaagttcat

SEQ ID NO: 1174579 - DNA, 25 bp, Homo sapien
gaacccatcctcgaagttcatgatt

SEQ ID NO: 1174580 - DNA, 25 bp, Homo sapien
tgacttggtcctttctacttcatgt

SEQ ID NO: 1174581 - DNA, 25 bp, Homo sapien
tgattatttgtcattcttcttgact

SEQ ID NO: 1174582 - DNA, 25 bp, Homo sapien
ttctgttgattatttgtcattcttc

SEQ ID NO: 1174583 - DNA, 25 bp, Homo sapien
tgaagaatacgggttttctgttgat

SEQ ID NO: 1174584 - DNA, 25 bp, Homo sapien
taacatctcaagcaagaagcaaaga

SEQ ID NO: 1174585 - DNA, 25 bp, Homo sapien
tggctaaaagccaggcctgattctt

SEQ ID NO: 1174586 - DNA, 25 bp, Homo sapien
tgcctatggcaaaagcaatgttctc

SEQ ID NO: 1174587 - DNA, 25 bp, Homo sapien
gcaaagtgacagagttttagccaac

SEQ ID NO: 1174588 - DNA, 25 bp, Homo sapien
actcaaagtctaggaagagggtaga

SEQ ID NO: 1174589 - DNA, 25 bp, Homo sapien
ctcaaagtctaggaagagggtagaa

SEQ ID NO: 1174590 - DNA, 25 bp, Homo sapien
aactcaaagtctaggaagagggtag

SEQ ID NO: 1174591 - DNA, 25 bp, Homo sapien
ctgatactactagtggtttctgtgt

SEQ ID NO: 1174592 - DNA, 25 bp, Homo sapien
agaatttgagccctgttccagagca

SEQ ID NO: 1174593 - DNA, 25 bp, Homo sapien
tctgtgtattgaacagccatcagct

SEQ ID NO: 1174594 - DNA, 25 bp, Homo sapien
agctgagaatttgagccctgttcca

SEQ ID NO: 1174595 - DNA, 25 bp, Homo sapien
ataaaatgtgtctccccttctgcgg

SEQ ID NO: 1174596 - DNA, 25 bp, Homo sapien
aatacacttgtagctcactccctga

SEQ ID NO: 1174597 - DNA, 25 bp, Homo sapien
cttctgggtgaagcataatacactt

SEQ ID NO: 1174598 - DNA, 25 bp, Homo sapien
aaaaagtcttgataacttctgggtg

SEQ ID NO: 1174599 - DNA, 25 bp, Homo sapien
aataatttctgccaataaaattaag

SEQ ID NO: 1174600 - DNA, 25 bp, Homo sapien
tccaatgtagtatcaattataataa

SEQ ID NO: 1174601 - DNA, 25 bp, Homo sapien
ctaagccgaaacctggggctctgga

SEQ ID NO: 1174602 - DNA, 25 bp, Homo sapien
ctgaatttccaatgtagtatcaatt

SEQ ID NO: 1174603 - DNA, 25 bp, Homo sapien
gccgactagcaaaagagatgggact

SEQ ID NO: 1174604 - DNA, 25 bp, Homo sapien
aaatctaacaggaatcttctgggct

SEQ ID NO: 1174605 - DNA, 25 bp, Homo sapien
tctgggctttatacaggaaaggtag

SEQ ID NO: 1174606 - DNA, 25 bp, Homo sapien
tacgcagtactacatgtttgtgcaa

SEQ ID NO: 1174607 - DNA, 25 bp, Homo sapien
tcatagacgtcagcaatcagcagtt

SEQ ID NO: 1174608 - DNA, 25 bp, Homo sapien
taaaactctgatgctctgatgggtg

SEQ ID NO: 1174609 - DNA, 25 bp, Homo sapien
cataaaatgcttcaggccgagtgca

SEQ ID NO: 1174610 - DNA, 25 bp, Homo sapien
gatcttacattacctagcccaaggg

SEQ ID NO: 1174611 - DNA, 25 bp, Homo sapien
gcatcgaggaccacatgttagcaga

SEQ ID NO: 1174612 - DNA, 25 bp, Homo sapien
ttatgtcatagggtcccagaagccc

SEQ ID NO: 1174613 - DNA, 25 bp, Homo sapien
caaggcggcatacttacatgggagc

SEQ ID NO: 1174614 - DNA, 25 bp, Homo sapien
tgttagcagagaaccagccggatct

SEQ ID NO: 1174615 - DNA, 25 bp, Homo sapien
tcgagctttggggtggacacgaccc

SEQ ID NO: 1174616 - DNA, 25 bp, Homo sapien
tctagaggcgtcgagctttggggtg

SEQ ID NO: 1174617 - DNA, 25 bp, Homo sapien
gcgtcgagctttggggtggacacga

SEQ ID NO: 1174618 - DNA, 25 bp, Homo sapien
gaggcgtcgagctttggggtggaca

SEQ ID NO: 1174619 - DNA, 25 bp, Homo sapien
caccgaatggattctggacaggtct

SEQ ID NO: 1174620 - DNA, 25 bp, Homo sapien
gaaggtggacacgagatcctcggcc

SEQ ID NO: 1174621 - DNA, 25 bp, Homo sapien
gcatgtccggctctagcttcagcag

SEQ ID NO: 1174622 - DNA, 25 bp, Homo sapien
gatacgggctcgaaacaaatctact

SEQ ID NO: 1174623 - DNA, 25 bp, Homo sapien
actgtgttgcatttctctctcagca

SEQ ID NO: 1174624 - DNA, 25 bp, Homo sapien
tctctctcagcagcttgatctcagg

SEQ ID NO: 1174625 - DNA, 25 bp, Homo sapien
atgtgcactgtgttgcatttctctc

SEQ ID NO: 1174626 - DNA, 25 bp, Homo sapien
tcagcagcttgatctcaggtttcac

SEQ ID NO: 1174627 - DNA, 25 bp, Homo sapien
aggaggccgctgtgctatccacggt

SEQ ID NO: 1174628 - DNA, 25 bp, Homo sapien
ggataccaacttggcctgggtgttg

SEQ ID NO: 1174629 - DNA, 25 bp, Homo sapien
gggtacttcactatcttggatacca

SEQ ID NO: 1174630 - DNA, 25 bp, Homo sapien
tgctacagtgcagcgataatcttcc

SEQ ID NO: 1174631 - DNA, 25 bp, Homo sapien
aggtggcatactcgttccgtaggtg

SEQ ID NO: 1174632 - DNA, 25 bp, Homo sapien
tactcgttccgtaggtgcagcagga

SEQ ID NO: 1174633 - DNA, 25 bp, Homo sapien
cactcaggtactcgttttcgtcgac

SEQ ID NO: 1174634 - DNA, 25 bp, Homo sapien
caggatctggcgcacactcaggtac

SEQ ID NO: 1174635 - DNA, 25 bp, Homo sapien
cacggttggtgctccgagggatctt

SEQ ID NO: 1174636 - DNA, 25 bp, Homo sapien
ttatcacggttggtgctccgaggga

SEQ ID NO: 1174637 - DNA, 25 bp, Homo sapien
gtgctccgagggatcttgatcttct

SEQ ID NO: 1174638 - DNA, 25 bp, Homo sapien
tcagtataggttatcacggttggtg

SEQ ID NO: 1174639 - DNA, 25 bp, Homo sapien
taaccagccttctaggtgcctaaac

SEQ ID NO: 1174640 - DNA, 25 bp, Homo sapien
taaactggaggcatacaatgaccta

SEQ ID NO: 1174641 - DNA, 25 bp, Homo sapien
aaaccattcaatgtcgctaaggcca

SEQ ID NO: 1174642 - DNA, 25 bp, Homo sapien
caacggatagcagaactttaggaaa

SEQ ID NO: 1174643 - DNA, 25 bp, Homo sapien
ggagcaatgtctactcaagggttga

SEQ ID NO: 1174644 - DNA, 25 bp, Homo sapien
tgggtactatactcattattgggtg

SEQ ID NO: 1174645 - DNA, 25 bp, Homo sapien
tcagcatcacccaatatgccaatgt

SEQ ID NO: 1174646 - DNA, 25 bp, Homo sapien
gcttaatacgacagaagaatgtgta

SEQ ID NO: 1174647 - DNA, 25 bp, Homo sapien
ttgtggtcttgttatgggtggtagc

SEQ ID NO: 1174648 - DNA, 25 bp, Homo sapien
tgtggtcttgttatgggtggtagct

SEQ ID NO: 1174649 - DNA, 25 bp, Homo sapien
tggtcttgttatgggtggtagctgg

SEQ ID NO: 1174650 - DNA, 25 bp, Homo sapien
tcttgtggtcttgttatgggtggta

SEQ ID NO: 1174651 - DNA, 25 bp, Homo sapien
cacaggaaactgctttgagttccaa

SEQ ID NO: 1174652 - DNA, 25 bp, Homo sapien
catttatgactagaagggtcgcaga

SEQ ID NO: 1174653 - DNA, 25 bp, Homo sapien
tgcaagtctgtagagcagtcaagat

SEQ ID NO: 1174654 - DNA, 25 bp, Homo sapien
tggcatggtctaggatgatatcaac

SEQ ID NO: 1174655 - DNA, 25 bp, Homo sapien
caacacagcaactggttcatcactg

SEQ ID NO: 1174656 - DNA, 25 bp, Homo sapien
ttgctgtggacttctcaatataata

SEQ ID NO: 1174657 - DNA, 25 bp, Homo sapien
gccttagctgctcttaagttgttga

SEQ ID NO: 1174658 - DNA, 25 bp, Homo sapien
catatgatggagtgctgcagcaagc

SEQ ID NO: 1174659 - DNA, 25 bp, Homo sapien
tcatcttggcagcagtatgcagggt

SEQ ID NO: 1174660 - DNA, 25 bp, Homo sapien
gctacagtaaagtacaaatcatggg

SEQ ID NO: 1174661 - DNA, 25 bp, Homo sapien
cagcattaggcataaaggagaatca

SEQ ID NO: 1174662 - DNA, 25 bp, Homo sapien
aatccaccgctggttctcaagaagg

SEQ ID NO: 1174663 - DNA, 25 bp, Homo sapien
cggcatcacaaatccgagggaagac

SEQ ID NO: 1174664 - DNA, 25 bp, Homo sapien
gcatcacaaatccgagggaagacct

SEQ ID NO: 1174665 - DNA, 25 bp, Homo sapien
catcacaaatccgagggaagacctg

SEQ ID NO: 1174666 - DNA, 25 bp, Homo sapien
ggcatcacaaatccgagggaagacc

SEQ ID NO: 1174667 - DNA, 25 bp, Homo sapien
atgctatccctcaccttgtccccca

SEQ ID NO: 1174668 - DNA, 25 bp, Homo sapien
ctaatgctatccctcaccttgtccc

SEQ ID NO: 1174669 - DNA, 25 bp, Homo sapien
taatgctatccctcaccttgtcccc

SEQ ID NO: 1174670 - DNA, 25 bp, Homo sapien
gctatccctcaccttgtcccccacc

SEQ ID NO: 1174671 - DNA, 25 bp, Homo sapien
gctatagctctgtaggtaagaagcc

SEQ ID NO: 1174672 - DNA, 25 bp, Homo sapien
catataccgagtgaattctggtgct

SEQ ID NO: 1174673 - DNA, 25 bp, Homo sapien
aatgctctgatgaataaatgtcata

SEQ ID NO: 1174674 - DNA, 25 bp, Homo sapien
taaccataaaatgctctgatgaata

SEQ ID NO: 1174675 - DNA, 25 bp, Homo sapien
tctgagccataaaaacgaattcttt

SEQ ID NO: 1174676 - DNA, 25 bp, Homo sapien
tggacatagacaagtcatctcttgc

SEQ ID NO: 1174677 - DNA, 25 bp, Homo sapien
gacaaagactctcattaaactaact

SEQ ID NO: 1174678 - DNA, 25 bp, Homo sapien
ctgtccttacagaatccagtttgag

SEQ ID NO: 1174679 - DNA, 25 bp, Homo sapien
cacaggtaataaagcctgttggagg

SEQ ID NO: 1174680 - DNA, 25 bp, Homo sapien
ctgcacaggtaataaagcctgttgg

SEQ ID NO: 1174681 - DNA, 25 bp, Homo sapien
ttggaggacaaagaaacaggttgga

SEQ ID NO: 1174682 - DNA, 25 bp, Homo sapien
gaggacaaagaaacaggttggacac

SEQ ID NO: 1174683 - DNA, 25 bp, Homo sapien
tgtatatgtgcctgaatcccctggg

SEQ ID NO: 1174684 - DNA, 25 bp, Homo sapien
tggcctgccaagagactgttagctg

SEQ ID NO: 1174685 - DNA, 25 bp, Homo sapien
tcatggaccacgagagacctcttca

SEQ ID NO: 1174686 - DNA, 25 bp, Homo sapien
tctctgtgtaaactaggctggtgac

SEQ ID NO: 1174687 - DNA, 25 bp, Homo sapien
cctgatttgtaattctgggtggtca

SEQ ID NO: 1174688 - DNA, 25 bp, Homo sapien
ctgatttgtaattctgggtggtcat

SEQ ID NO: 1174689 - DNA, 25 bp, Homo sapien
ccctgatttgtaattctgggtggtc

SEQ ID NO: 1174690 - DNA, 25 bp, Homo sapien
aatattcaacagaatgtgcatctct

SEQ ID NO: 1174691 - DNA, 25 bp, Homo sapien
tattcaacagaatgtgcatctctgc

SEQ ID NO: 1174692 - DNA, 25 bp, Homo sapien
aaatattcaacagaatgtgcatctc

SEQ ID NO: 1174693 - DNA, 25 bp, Homo sapien
atattcaacagaatgtgcatctctg

SEQ ID NO: 1174694 - DNA, 25 bp, Homo sapien
ctgatctcggaggtaaggaggaact

SEQ ID NO: 1174695 - DNA, 25 bp, Homo sapien
caatctgcatcatcacttcgtagtc

SEQ ID NO: 1174696 - DNA, 25 bp, Homo sapien
ggaactgacgaacttttgatatgga

SEQ ID NO: 1174697 - DNA, 25 bp, Homo sapien
tcctggtgtccatcacctgacagtc

SEQ ID NO: 1174698 - DNA, 25 bp, Homo sapien
ctattgtaatgactcagggatggtg

SEQ ID NO: 1174699 - DNA, 25 bp, Homo sapien
ttgtaatgactcagggatggtgctg

SEQ ID NO: 1174700 - DNA, 25 bp, Homo sapien
tattgtaatgactcagggatggtgc

SEQ ID NO: 1174701 - DNA, 25 bp, Homo sapien
gtaatgactcagggatggtgctgac

SEQ ID NO: 1174702 - DNA, 25 bp, Homo sapien
tagaacattagagaggacatcgctg

SEQ ID NO: 1174703 - DNA, 25 bp, Homo sapien
ctaatacttggtggcctagagtccc

SEQ ID NO: 1174704 - DNA, 25 bp, Homo sapien
ggttcttgtctgaaaatcacccagg

SEQ ID NO: 1174705 - DNA, 25 bp, Homo sapien
gaaatatcccatgataagactgccc

SEQ ID NO: 1174706 - DNA, 25 bp, Homo sapien
atcttggggatgactatgttgccac

SEQ ID NO: 1174707 - DNA, 25 bp, Homo sapien
gttccagcagaagattagcatcttg

SEQ ID NO: 1174708 - DNA, 25 bp, Homo sapien
tatgttgccactgtctactagccat

SEQ ID NO: 1174709 - DNA, 25 bp, Homo sapien
tatgacagttccagcagaagattag

SEQ ID NO: 1174710 - DNA, 25 bp, Homo sapien
gaggagggaaactctatttataatc

SEQ ID NO: 1174711 - DNA, 25 bp, Homo sapien
gaaggccacgagatgggtccttctc

SEQ ID NO: 1174712 - DNA, 25 bp, Homo sapien
gggactaacgttggtgagtatgaca

SEQ ID NO: 1174713 - DNA, 25 bp, Homo sapien
ccaaagtcttgcatctgaggagttg

SEQ ID NO: 1174714 - DNA, 25 bp, Homo sapien
aagcgctaagaacaagaaggccacg

SEQ ID NO: 1174715 - DNA, 25 bp, Homo sapien
tggagactccctcccaaccgctacc

SEQ ID NO: 1174716 - DNA, 25 bp, Homo sapien
aggcacccctagctctgtggcagag

SEQ ID NO: 1174717 - DNA, 25 bp, Homo sapien
ggcacccctagctctgtggcagagc

SEQ ID NO: 1174718 - DNA, 25 bp, Homo sapien
cagtggagactccctcccaaccgct

SEQ ID NO: 1174719 - DNA, 25 bp, Homo sapien
taacgatgctaaatgccaccacggc

SEQ ID NO: 1174720 - DNA, 25 bp, Homo sapien
tgagtcagcccatcagtatgcagtg

SEQ ID NO: 1174721 - DNA, 25 bp, Homo sapien
aaatttgggacttgcaaccaggcag

SEQ ID NO: 1174722 - DNA, 25 bp, Homo sapien
caagagtgtattattgtcagcccca

SEQ ID NO: 1174723 - DNA, 25 bp, Homo sapien
ccaatatgttgagaatggcacccac

SEQ ID NO: 1174724 - DNA, 25 bp, Homo sapien
tagaccatccatacttgccaaagtg

SEQ ID NO: 1174725 - DNA, 25 bp, Homo sapien
caattggcatgggtacaacctgagc

SEQ ID NO: 1174726 - DNA, 25 bp, Homo sapien
gatgaagccctactggacttagacc

SEQ ID NO: 1174727 - DNA, 25 bp, Homo sapien
gagccctgctgccttgtaccagatg

SEQ ID NO: 1174728 - DNA, 25 bp, Homo sapien
gcaatgtgcttctagttgtgctccc

SEQ ID NO: 1174729 - DNA, 25 bp, Homo sapien
ccttccttggactatttgagccctg

SEQ ID NO: 1174730 - DNA, 25 bp, Homo sapien
tacaagatgctgctatggcaacaaa

SEQ ID NO: 1174731 - DNA, 25 bp, Homo sapien
tgagaaccaccaagctagggctgaa

SEQ ID NO: 1174732 - DNA, 25 bp, Homo sapien
cacaccttgccttcagagctgcgaa

SEQ ID NO: 1174733 - DNA, 25 bp, Homo sapien
aagacagcgtccattggttcccaag

SEQ ID NO: 1174734 - DNA, 25 bp, Homo sapien
taccaattcagtcagaatgtctggg

SEQ ID NO: 1174735 - DNA, 25 bp, Homo sapien
gggcaccgccccttggctgccatgg

SEQ ID NO: 1174736 - DNA, 25 bp, Homo sapien
gggagggtctggctttctagccaca

SEQ ID NO: 1174737 - DNA, 25 bp, Homo sapien
tggctttctagccacagacccagag

SEQ ID NO: 1174738 - DNA, 25 bp, Homo sapien
ctgccatggcagcacaagccggctc

SEQ ID NO: 1174739 - DNA, 25 bp, Homo sapien
gagaggacagtctgagggagaggac

SEQ ID NO: 1174740 - DNA, 25 bp, Homo sapien
agaggacagtctgagggagaggaca

SEQ ID NO: 1174741 - DNA, 25 bp, Homo sapien
gaggacagtctgagggagaggacag

SEQ ID NO: 1174742 - DNA, 25 bp, Homo sapien
cagtccagtgtaagaggacagtccg

SEQ ID NO: 1174743 - DNA, 25 bp, Homo sapien
cagagcacctcaaacctagctggca

SEQ ID NO: 1174744 - DNA, 25 bp, Homo sapien
agtccagtgtaggaggacattccag

SEQ ID NO: 1174745 - DNA, 25 bp, Homo sapien
gggcacaaaccactgtcctgtgaat

SEQ ID NO: 1174746 - DNA, 25 bp, Homo sapien
tccagctcaagtaaagtcttgtccg

SEQ ID NO: 1174747 - DNA, 25 bp, Homo sapien
gcggtctggcccatcctttggaatg

SEQ ID NO: 1174748 - DNA, 25 bp, Homo sapien
tgcccttcttgacaccttagactgt

SEQ ID NO: 1174749 - DNA, 25 bp, Homo sapien
tcttgtccgattccttaactggagc

SEQ ID NO: 1174750 - DNA, 25 bp, Homo sapien
aggcaagaaagaagtgctatgtggc

SEQ ID NO: 1174751 - DNA, 25 bp, Homo sapien
agaagtgctatgtggcgagaaaaaa

SEQ ID NO: 1174752 - DNA, 25 bp, Homo sapien
agatctcgaccattgaaaaggtttc

SEQ ID NO: 1174753 - DNA, 25 bp, Homo sapien
ctcagatctcgaccattgaaaaggt

SEQ ID NO: 1174754 - DNA, 25 bp, Homo sapien
cagtgttggttgaatgaaatgtagc

SEQ ID NO: 1174755 - DNA, 25 bp, Homo sapien
ctggtatgaaccaggtctggaacat

SEQ ID NO: 1174756 - DNA, 25 bp, Homo sapien
atgaaatgtagccttgatcttctct

SEQ ID NO: 1174757 - DNA, 25 bp, Homo sapien
atcttctctggtatgaaccaggtct

SEQ ID NO: 1174758 - DNA, 25 bp, Homo sapien
ctcttgtttattcaggcggctggca

SEQ ID NO: 1174759 - DNA, 25 bp, Homo sapien
caccgccagcctcttgtttattcag

SEQ ID NO: 1174760 - DNA, 25 bp, Homo sapien
cagcctcttgtttattcaggcggct

SEQ ID NO: 1174761 - DNA, 25 bp, Homo sapien
gccagcctcttgtttattcaggcgg

SEQ ID NO: 1174762 - DNA, 25 bp, Homo sapien
ttggtgtgagaagcgcagagtccca

SEQ ID NO: 1174763 - DNA, 25 bp, Homo sapien
gcctttggtgtgagaagcgcagagt

SEQ ID NO: 1174764 - DNA, 25 bp, Homo sapien
tttggtgtgagaagcgcagagtccc

SEQ ID NO: 1174765 - DNA, 25 bp, Homo sapien
ggtgtgagaagcgcagagtcccagg

SEQ ID NO: 1174766 - DNA, 25 bp, Homo sapien
agttagcagtggacacctgttccca

SEQ ID NO: 1174767 - DNA, 25 bp, Homo sapien
gctgactgatggctgtacccctaac

SEQ ID NO: 1174768 - DNA, 25 bp, Homo sapien
tctggttgtgctggccctacatggc

SEQ ID NO: 1174769 - DNA, 25 bp, Homo sapien
cacgcacacgtgtctaagagctgga

SEQ ID NO: 1174770 - DNA, 25 bp, Homo sapien
tactggcacaggcattgctgagggc

SEQ ID NO: 1174771 - DNA, 25 bp, Homo sapien
tccacgatggatttaccagacccag

SEQ ID NO: 1174772 - DNA, 25 bp, Homo sapien
cccacacctaaagctttggtggctt

SEQ ID NO: 1174773 - DNA, 25 bp, Homo sapien
gcctccgaggaagatttaagtccac

SEQ ID NO: 1174774 - DNA, 25 bp, Homo sapien
gagagaacatagctggaaagcacag

SEQ ID NO: 1174775 - DNA, 25 bp, Homo sapien
ctggctgccaaaactaaggtaatct

SEQ ID NO: 1174776 - DNA, 25 bp, Homo sapien
tggaccaaaatcatcacactgttac

SEQ ID NO: 1174777 - DNA, 25 bp, Homo sapien
aaatcagtgtgagtcgttggtgcaa

SEQ ID NO: 1174778 - DNA, 25 bp, Homo sapien
cagagcaccctgacaccactctcct

SEQ ID NO: 1174779 - DNA, 25 bp, Homo sapien
gacagttggattgggtggccattac

SEQ ID NO: 1174780 - DNA, 25 bp, Homo sapien
tagacagttggattgggtggccatt

SEQ ID NO: 1174781 - DNA, 25 bp, Homo sapien
cccagagcaccctgacaccactctc

SEQ ID NO: 1174782 - DNA, 25 bp, Homo sapien
cctttgttaagccttctgtgatctt

SEQ ID NO: 1174783 - DNA, 25 bp, Homo sapien
ctttgttaagccttctgtgatcttt

SEQ ID NO: 1174784 - DNA, 25 bp, Homo sapien
ttcagccttccaattgagggttggg

SEQ ID NO: 1174785 - DNA, 25 bp, Homo sapien
ttgttaagccttctgtgatctttac

SEQ ID NO: 1174786 - DNA, 25 bp, Homo sapien
gcatctgtgattggttggttaaagc

SEQ ID NO: 1174787 - DNA, 25 bp, Homo sapien
aaagctgttcgttccactttgcatg

SEQ ID NO: 1174788 - DNA, 25 bp, Homo sapien
ggttggagagccttaagcatggaat

SEQ ID NO: 1174789 - DNA, 25 bp, Homo sapien
cactttgcatgtaagtggttggaga

SEQ ID NO: 1174790 - DNA, 25 bp, Homo sapien
gcctggagcatgattggagagcaca

SEQ ID NO: 1174791 - DNA, 25 bp, Homo sapien
ctctccacttctcttatgggctctt

SEQ ID NO: 1174792 - DNA, 25 bp, Homo sapien
tctcttcataaccaaaactcttgaa

SEQ ID NO: 1174793 - DNA, 25 bp, Homo sapien
aagaatggtccatgcagatggaagc

SEQ ID NO: 1174794 - DNA, 25 bp, Homo sapien
atcatgctcaaatcacatctgtcta

SEQ ID NO: 1174795 - DNA, 25 bp, Homo sapien
tctgcctctaatcatgctcaaatca

SEQ ID NO: 1174796 - DNA, 25 bp, Homo sapien
aatctctgcctctaatcatgctcaa

SEQ ID NO: 1174797 - DNA, 25 bp, Homo sapien
tctaatcatgctcaaatcacatctg

SEQ ID NO: 1174798 - DNA, 25 bp, Homo sapien
catccctatgttggtaagaagcaca

SEQ ID NO: 1174799 - DNA, 25 bp, Homo sapien
gagactcttcagacagcactaccat

SEQ ID NO: 1174800 - DNA, 25 bp, Homo sapien
cagtgacatactccagagactcttc

SEQ ID NO: 1174801 - DNA, 25 bp, Homo sapien
catttcaggcccactttagtcaagg

SEQ ID NO: 1174802 - DNA, 25 bp, Homo sapien
aagtcttctgttcatgctgtggcac

SEQ ID NO: 1174803 - DNA, 25 bp, Homo sapien
tcctcaatgactgttgacttctgtg

SEQ ID NO: 1174804 - DNA, 25 bp, Homo sapien
cagagattaggatttggttatcttt

SEQ ID NO: 1174805 - DNA, 25 bp, Homo sapien
tgctccatgtctacatgcatctcct

SEQ ID NO: 1174806 - DNA, 25 bp, Homo sapien
ggttaccacgatgaggtagaagtag

SEQ ID NO: 1174807 - DNA, 25 bp, Homo sapien
ctagctgtcatgtaagttgtaggtt

SEQ ID NO: 1174808 - DNA, 25 bp, Homo sapien
taagttgtaggttaccacgatgagg

SEQ ID NO: 1174809 - DNA, 25 bp, Homo sapien
tcatgtaagttgtaggttaccacga

SEQ ID NO: 1174810 - DNA, 25 bp, Homo sapien
tgcaatttcttggcacaccagggag

SEQ ID NO: 1174811 - DNA, 25 bp, Homo sapien
atgcaatttcttggcacaccaggga

SEQ ID NO: 1174812 - DNA, 25 bp, Homo sapien
tatgcaatttcttggcacaccaggg

SEQ ID NO: 1174813 - DNA, 25 bp, Homo sapien
atatgcaatttcttggcacaccagg

SEQ ID NO: 1174814 - DNA, 25 bp, Homo sapien
cagtccttcccgagttacctccagg

SEQ ID NO: 1174815 - DNA, 25 bp, Homo sapien
actgagctctgcagtccttcccgag

SEQ ID NO: 1174816 - DNA, 25 bp, Homo sapien
gagctctgcagtccttcccgagtta

SEQ ID NO: 1174817 - DNA, 25 bp, Homo sapien
agtcctgctccgttgtccactgagc

SEQ ID NO: 1174818 - DNA, 25 bp, Homo sapien
gacgctggatcagccgccagcgagc

SEQ ID NO: 1174819 - DNA, 25 bp, Homo sapien
cagagcagtggaacgcaccgcccgg

SEQ ID NO: 1174820 - DNA, 25 bp, Homo sapien
gcccgaagcgggactgggcgcggcg

SEQ ID NO: 1174821 - DNA, 25 bp, Homo sapien
ggcttgcggcccgaagcgggactgg

SEQ ID NO: 1174822 - DNA, 25 bp, Homo sapien
cggagcggtgccgagggccgagcgg

SEQ ID NO: 1174823 - DNA, 25 bp, Homo sapien
cgggcgacgcgagcggcgctgtggt

SEQ ID NO: 1174824 - DNA, 25 bp, Homo sapien
ggagactggagctgggcgcggcgac

SEQ ID NO: 1174825 - DNA, 25 bp, Homo sapien
gctgtggtcgcgcaattcctgccgg

SEQ ID NO: 1174826 - DNA, 25 bp, Homo sapien
gcggacccgctccttcggaggcggc

SEQ ID NO: 1174827 - DNA, 25 bp, Homo sapien
ccgcggcggacccgctccttcggag

SEQ ID NO: 1174828 - DNA, 25 bp, Homo sapien
gacccgctccttcggaggcggcggc

SEQ ID NO: 1174829 - DNA, 25 bp, Homo sapien
cggcggacccgctccttcggaggcg

SEQ ID NO: 1174830 - DNA, 25 bp, Homo sapien
catcgtccacaaggttgtacttggt

SEQ ID NO: 1174831 - DNA, 25 bp, Homo sapien
tcctcgttgtgcaaggggatccgca

SEQ ID NO: 1174832 - DNA, 25 bp, Homo sapien
gggatccgcaggtcgtgcccatcgt

SEQ ID NO: 1174833 - DNA, 25 bp, Homo sapien
tgcccatcgtccacaaggttgtact

SEQ ID NO: 1174834 - DNA, 25 bp, Homo sapien
caatccagtcctaggcgggtaagga

SEQ ID NO: 1174835 - DNA, 25 bp, Homo sapien
tcaatccagtcctaggcgggtaagg

SEQ ID NO: 1174836 - DNA, 25 bp, Homo sapien
gggaggtgaggcaataccgctcaaa

SEQ ID NO: 1174837 - DNA, 25 bp, Homo sapien
ggcaataccgctcaaactttgcagt

SEQ ID NO: 1174838 - DNA, 25 bp, Homo sapien
caggaagctgcgcataaagatgtgg

SEQ ID NO: 1174839 - DNA, 25 bp, Homo sapien
cgcataaagatgtggagtctggact

SEQ ID NO: 1174840 - DNA, 25 bp, Homo sapien
aagctgcgcataaagatgtggagtc

SEQ ID NO: 1174841 - DNA, 25 bp, Homo sapien
cataaagatgtggagtctggactga

SEQ ID NO: 1174842 - DNA, 25 bp, Homo sapien
tatgctctacagaaagctcagtgga

SEQ ID NO: 1174843 - DNA, 25 bp, Homo sapien
gctgcatgtgaaaagcaagacctca

SEQ ID NO: 1174844 - DNA, 25 bp, Homo sapien
taaaacaccaagcagaatgcccagc

SEQ ID NO: 1174845 - DNA, 25 bp, Homo sapien
tgatttgacagaccctcagtagcag

SEQ ID NO: 1174846 - DNA, 25 bp, Homo sapien
tatcatgacaatcactctattactg

SEQ ID NO: 1174847 - DNA, 25 bp, Homo sapien
tcatagttttccaccctatggaagc

SEQ ID NO: 1174848 - DNA, 25 bp, Homo sapien
agtgtgccaatgaatagtaaaacgc

SEQ ID NO: 1174849 - DNA, 25 bp, Homo sapien
gctgacccaactgtcctctaatgaa

SEQ ID NO: 1174850 - DNA, 25 bp, Homo sapien
tgtgatatgtttcaatccagtgctg

SEQ ID NO: 1174851 - DNA, 25 bp, Homo sapien
ccttctacaacatgaccctgggagt

SEQ ID NO: 1174852 - DNA, 25 bp, Homo sapien
tcctagcatcctgcaaaagtgactg

SEQ ID NO: 1174853 - DNA, 25 bp, Homo sapien
gaccagtaggaacctcttcacgttg

SEQ ID NO: 1174854 - DNA, 25 bp, Homo sapien
agcagaaaggagaactaaaaggcac

SEQ ID NO: 1174855 - DNA, 25 bp, Homo sapien
taaaaggcactttagctacagcctg

SEQ ID NO: 1174856 - DNA, 25 bp, Homo sapien
tttatttcagggagcacaatgatac

SEQ ID NO: 1174857 - DNA, 25 bp, Homo sapien
catttgttcaccaatgtgctcagtg

SEQ ID NO: 1174858 - DNA, 25 bp, Homo sapien
tgtcccaaatgctaaccctgaatct

SEQ ID NO: 1174859 - DNA, 25 bp, Homo sapien
tctgttggccatggtatagagaaac

SEQ ID NO: 1174860 - DNA, 25 bp, Homo sapien
gcattaggaaggatatggcatcatt

SEQ ID NO: 1174861 - DNA, 25 bp, Homo sapien
aaagcataccttaaccaaactgtga

SEQ ID NO: 1174862 - DNA, 25 bp, Homo sapien
caagtaccaagttgacgaggatctc

SEQ ID NO: 1174863 - DNA, 25 bp, Homo sapien
tattcaccccagaaaagctaggagg

SEQ ID NO: 1174864 - DNA, 25 bp, Homo sapien
gaatcttcatgagcaagtccgaggt

SEQ ID NO: 1174865 - DNA, 25 bp, Homo sapien
ggtacttctgtatgctccaaggcaa

SEQ ID NO: 1174866 - DNA, 25 bp, Homo sapien
caaagcagcattaactgcagcagca

SEQ ID NO: 1174867 - DNA, 25 bp, Homo sapien
cacagctgagcgtcctgctgagcgg

SEQ ID NO: 1174868 - DNA, 25 bp, Homo sapien
tgctgagcgggattatgaatgtgac

SEQ ID NO: 1174869 - DNA, 25 bp, Homo sapien
gggtgaaagttctcgcctcatttag

SEQ ID NO: 1174870 - DNA, 25 bp, Homo sapien
gattcaccccaagtgcccatgggag

SEQ ID NO: 1174871 - DNA, 25 bp, Homo sapien
ccaagtgcccatgggagaatctctc

SEQ ID NO: 1174872 - DNA, 25 bp, Homo sapien
atttgactgagtggaatcctccaaa

SEQ ID NO: 1174873 - DNA, 25 bp, Homo sapien
acagattcaccccaagtgcccatgg

SEQ ID NO: 1174874 - DNA, 25 bp, Homo sapien
cgtatccggcgcatggcagccacga

SEQ ID NO: 1174875 - DNA, 25 bp, Homo sapien
gttgggccttggcacgtccaggctt

SEQ ID NO: 1174876 - DNA, 25 bp, Homo sapien
ttggcacgtccaggcttcctacgta

SEQ ID NO: 1174877 - DNA, 25 bp, Homo sapien
tatccggcgcatggcagccacgatc

SEQ ID NO: 1174878 - DNA, 25 bp, Homo sapien
ctagaagggccagcagctaaggcac

SEQ ID NO: 1174879 - DNA, 25 bp, Homo sapien
gggccagcagctaaggcacttgact

SEQ ID NO: 1174880 - DNA, 25 bp, Homo sapien
agcagctaaggcacttgactccccg

SEQ ID NO: 1174881 - DNA, 25 bp, Homo sapien
gaagggccagcagctaaggcacttg

SEQ ID NO: 1174882 - DNA, 25 bp, Homo sapien
gactgaaccatgtataccagcgaga

SEQ ID NO: 1174883 - DNA, 25 bp, Homo sapien
cagcttcatgtaccacagagtcaga

SEQ ID NO: 1174884 - DNA, 25 bp, Homo sapien
aattccttcacaggtatcagaagag

SEQ ID NO: 1174885 - DNA, 25 bp, Homo sapien
agaaaatgcgcttacactcccggag

SEQ ID NO: 1174886 - DNA, 25 bp, Homo sapien
taactcatgactgtgcaaagtgcag

SEQ ID NO: 1174887 - DNA, 25 bp, Homo sapien
tggcaacacacgtagaaacaagtag

SEQ ID NO: 1174888 - DNA, 25 bp, Homo sapien
cagaagaactatttgatggcaacac

SEQ ID NO: 1174889 - DNA, 25 bp, Homo sapien
gccctagaggcaactgaattcatgt

SEQ ID NO: 1174890 - DNA, 25 bp, Homo sapien
actgatacatgtcccaatatggatg

SEQ ID NO: 1174891 - DNA, 25 bp, Homo sapien
tggcaaacaccccgtgtttaaatga

SEQ ID NO: 1174892 - DNA, 25 bp, Homo sapien
atatgtggtatagccatgctatgga

SEQ ID NO: 1174893 - DNA, 25 bp, Homo sapien
aaataatatgtggtatagccatgct

SEQ ID NO: 1174894 - DNA, 25 bp, Homo sapien
tgatgagaatacctcgccccctaag

SEQ ID NO: 1174895 - DNA, 25 bp, Homo sapien
ctcgccccctaagaaagcattgatt

SEQ ID NO: 1174896 - DNA, 25 bp, Homo sapien
atgagaatacctcgccccctaagaa

SEQ ID NO: 1174897 - DNA, 25 bp, Homo sapien
atacctcgccccctaagaaagcatt

SEQ ID NO: 1174898 - DNA, 25 bp, Homo sapien
gaatcaaagaggtttgcgctcccag

SEQ ID NO: 1174899 - DNA, 25 bp, Homo sapien
catgtgctgagtaccaaaaggtcac

SEQ ID NO: 1174900 - DNA, 25 bp, Homo sapien
cttcgtaagtgagaaatcagggcct

SEQ ID NO: 1174901 - DNA, 25 bp, Homo sapien
gatccgatcatcagtgtgtgctgcc

SEQ ID NO: 1174902 - DNA, 25 bp, Homo sapien
tatccaaatgggagtgtcacacaga

SEQ ID NO: 1174903 - DNA, 25 bp, Homo sapien
gaaaggcacaatcagggacacagac

SEQ ID NO: 1174904 - DNA, 25 bp, Homo sapien
gacagtcggcatgttcttgtaggat

SEQ ID NO: 1174905 - DNA, 25 bp, Homo sapien
ggagtcttgccttggttccatacca

SEQ ID NO: 1174906 - DNA, 25 bp, Homo sapien
caggataaacaaagacccacttggg

SEQ ID NO: 1174907 - DNA, 25 bp, Homo sapien
taacaagtaacatatgcccggagca

SEQ ID NO: 1174908 - DNA, 25 bp, Homo sapien
cagaggatgggatgattgtcaacaa

SEQ ID NO: 1174909 - DNA, 25 bp, Homo sapien
gactatgtcttagcggctcgggaga

SEQ ID NO: 1174910 - DNA, 25 bp, Homo sapien
tgagcagactggctcaaccagaagt

SEQ ID NO: 1174911 - DNA, 25 bp, Homo sapien
ccagaagtccagaaaagtgtggacc

SEQ ID NO: 1174912 - DNA, 25 bp, Homo sapien
tgtggaccagcttcaacaggacagc

SEQ ID NO: 1174913 - DNA, 25 bp, Homo sapien
tcgtttggaagttcgtatctgagca

SEQ ID NO: 1174914 - DNA, 25 bp, Homo sapien
tagcagctgatgtcacaaagcctgg

SEQ ID NO: 1174915 - DNA, 25 bp, Homo sapien
cagctgtagcagctgatgtcacaaa

SEQ ID NO: 1174916 - DNA, 25 bp, Homo sapien
tgtagcagctgatgtcacaaagcct

SEQ ID NO: 1174917 - DNA, 25 bp, Homo sapien
gagcaggcaacccttgccagggacc

SEQ ID NO: 1174918 - DNA, 25 bp, Homo sapien
gcaggcaacccttgccagggaccct

SEQ ID NO: 1174919 - DNA, 25 bp, Homo sapien
gtgagcaggcaacccttgccaggga

SEQ ID NO: 1174920 - DNA, 25 bp, Homo sapien
caggcaacccttgccagggacccta

SEQ ID NO: 1174921 - DNA, 25 bp, Homo sapien
tctctgagggagacggaatccttgg

SEQ ID NO: 1174922 - DNA, 25 bp, Homo sapien
cacggagggcgctcatctggaaatg

SEQ ID NO: 1174923 - DNA, 25 bp, Homo sapien
cccgccaagggtgcaagactcttta

SEQ ID NO: 1174924 - DNA, 25 bp, Homo sapien
gaatccttggatgtctcctcatgcc

SEQ ID NO: 1174925 - DNA, 25 bp, Homo sapien
tgagagggcctagatgcaaacacat

SEQ ID NO: 1174926 - DNA, 25 bp, Homo sapien
tatggatcagaattgcagacatcac

SEQ ID NO: 1174927 - DNA, 25 bp, Homo sapien
tattaaagaggtagcatacacacgt

SEQ ID NO: 1174928 - DNA, 25 bp, Homo sapien
tagctaggtttctaactgcttgcgg

SEQ ID NO: 1174929 - DNA, 25 bp, Homo sapien
aggtcaaagctttttagcaggcaag

SEQ ID NO: 1174930 - DNA, 25 bp, Homo sapien
cagcgccttcatgatcttattgcct

SEQ ID NO: 1174931 - DNA, 25 bp, Homo sapien
ccttcatgatcttattgcctgagaa

SEQ ID NO: 1174932 - DNA, 25 bp, Homo sapien
tagcaggcaagtcagcgccttcatg

SEQ ID NO: 1174933 - DNA, 25 bp, Homo sapien
gattgtttttctcaccaattatgag

SEQ ID NO: 1174934 - DNA, 25 bp, Homo sapien
gcattaattcttaggctagactgag

SEQ ID NO: 1174935 - DNA, 25 bp, Homo sapien
tacataataacatgacatcctttac

SEQ ID NO: 1174936 - DNA, 25 bp, Homo sapien
ctttcatgacattactatacagagc

SEQ ID NO: 1174937 - DNA, 25 bp, Homo sapien
gccatcaggaagcatccactccagt

SEQ ID NO: 1174938 - DNA, 25 bp, Homo sapien
cactccagtgagcagttcatgtcaa

SEQ ID NO: 1174939 - DNA, 25 bp, Homo sapien
caaaaggcccttgataactgttatc

SEQ ID NO: 1174940 - DNA, 25 bp, Homo sapien
tacaaaggaagtgcccaaatcaatc

SEQ ID NO: 1174941 - DNA, 25 bp, Homo sapien
tacagaaagagcgtggtatcaacca

SEQ ID NO: 1174942 - DNA, 25 bp, Homo sapien
aacccactaaatggtgagccccaat

SEQ ID NO: 1174943 - DNA, 25 bp, Homo sapien
cgtcatcaagtatgttgccttccaa

SEQ ID NO: 1174944 - DNA, 25 bp, Homo sapien
cccagaagcagttgacagatttcca

SEQ ID NO: 1174945 - DNA, 25 bp, Homo sapien
catagcagccagtacatcccggctg

SEQ ID NO: 1174946 - DNA, 25 bp, Homo sapien
taagatccagcacgctagacaacat

SEQ ID NO: 1174947 - DNA, 25 bp, Homo sapien
gagactccgatctgaaagctcccag

SEQ ID NO: 1174948 - DNA, 25 bp, Homo sapien
atcccggctgccaagaacctctgtt

SEQ ID NO: 1174949 - DNA, 25 bp, Homo sapien
agagccctgaacagcaggccagcgg

SEQ ID NO: 1174950 - DNA, 25 bp, Homo sapien
acagagccctgaacagcaggccagc

SEQ ID NO: 1174951 - DNA, 25 bp, Homo sapien
caggccagcggggaacaccagttaa

SEQ ID NO: 1174952 - DNA, 25 bp, Homo sapien
tgaacagcaggccagcggggaacac

SEQ ID NO: 1174953 - DNA, 25 bp, Homo sapien
agcatcaccatcacaacgatcagaa

SEQ ID NO: 1174954 - DNA, 25 bp, Homo sapien
cagcacctccaattcgtatgcagat

SEQ ID NO: 1174955 - DNA, 25 bp, Homo sapien
cgatcagaaagtttaaacctcagca

SEQ ID NO: 1174956 - DNA, 25 bp, Homo sapien
ccaattcgtatgcagatggctttga

SEQ ID NO: 1174957 - DNA, 25 bp, Homo sapien
gacaagatcacaaaaagtcagactg

SEQ ID NO: 1174958 - DNA, 25 bp, Homo sapien
tacaaccagtggatcctgccctctt

SEQ ID NO: 1174959 - DNA, 25 bp, Homo sapien
ctcttcacccaggacaagatcacaa

SEQ ID NO: 1174960 - DNA, 25 bp, Homo sapien
tcacccaggacaagatcacaaaaag

SEQ ID NO: 1174961 - DNA, 25 bp, Homo sapien
tccaatagtgatgacaccggaatac

SEQ ID NO: 1174962 - DNA, 25 bp, Homo sapien
aaaagatccaatagtgatgacaccg

SEQ ID NO: 1174963 - DNA, 25 bp, Homo sapien
tccttagtaaaaagatccaatagtg

SEQ ID NO: 1174964 - DNA, 25 bp, Homo sapien
gatgacaccggaatactccccggaa

SEQ ID NO: 1174965 - DNA, 25 bp, Homo sapien
cacaaatgggtgctggttaattcct

SEQ ID NO: 1174966 - DNA, 25 bp, Homo sapien
tatgtgataaaaatcccactggcga

SEQ ID NO: 1174967 - DNA, 25 bp, Homo sapien
tttacaaggcacgtatctgcagcag

SEQ ID NO: 1174968 - DNA, 25 bp, Homo sapien
gagcagcacattaccactatccaaa

SEQ ID NO: 1174969 - DNA, 25 bp, Homo sapien
gagaggtaggagactctccacagcc

SEQ ID NO: 1174970 - DNA, 25 bp, Homo sapien
tgatactttctaggcctgcatccac

SEQ ID NO: 1174971 - DNA, 25 bp, Homo sapien
gttcagaagctacacggcagcagcc

SEQ ID NO: 1174972 - DNA, 25 bp, Homo sapien
gcagcagccaaagttcacagggtgt

SEQ ID NO: 1174973 - DNA, 25 bp, Homo sapien
caccgtgcatactcacttccccctt

SEQ ID NO: 1174974 - DNA, 25 bp, Homo sapien
tgagggccatgctgatatcacctct

SEQ ID NO: 1174975 - DNA, 25 bp, Homo sapien
cgtgcatactcacttccccctttcc

SEQ ID NO: 1174976 - DNA, 25 bp, Homo sapien
aaccagactgtgagcctgctgaggg

SEQ ID NO: 1174977 - DNA, 25 bp, Homo sapien
gcataaaagccctatcacggtgggt

SEQ ID NO: 1174978 - DNA, 25 bp, Homo sapien
gaagcttcgcggagaatgcagcata

SEQ ID NO: 1174979 - DNA, 25 bp, Homo sapien
gcatgctcaagaaatcttggagaag

SEQ ID NO: 1174980 - DNA, 25 bp, Homo sapien
gtggccttgaggacccgtgagatcc

SEQ ID NO: 1174981 - DNA, 25 bp, Homo sapien
gggccccgaggctaggggtgctcag

SEQ ID NO: 1174982 - DNA, 25 bp, Homo sapien
gtgctcagggcaggcatcaccacac

SEQ ID NO: 1174983 - DNA, 25 bp, Homo sapien
gcaggcatcaccacacacaggagac

SEQ ID NO: 1174984 - DNA, 25 bp, Homo sapien
acaggagacagggaatcctaggcat

SEQ ID NO: 1174985 - DNA, 25 bp, Homo sapien
tcacaacatccacagacaaatgaca

SEQ ID NO: 1174986 - DNA, 25 bp, Homo sapien
gccctgaagacattctcacaacatc

SEQ ID NO: 1174987 - DNA, 25 bp, Homo sapien
caaacgacatgtgtgatcatctccc

SEQ ID NO: 1174988 - DNA, 25 bp, Homo sapien
catgaggcctctaatcagccctgaa

SEQ ID NO: 1174989 - DNA, 25 bp, Homo sapien
agcagggtggaagccgtagtaccca

SEQ ID NO: 1174990 - DNA, 25 bp, Homo sapien
agccgtagtacccagagttgcatct

SEQ ID NO: 1174991 - DNA, 25 bp, Homo sapien
gtacccagagttgcatctgtcctct

SEQ ID NO: 1174992 - DNA, 25 bp, Homo sapien
gtggaagccgtagtacccagagttg

SEQ ID NO: 1174993 - DNA, 25 bp, Homo sapien
caagctatcaacaaatcttctggtg

SEQ ID NO: 1174994 - DNA, 25 bp, Homo sapien
tatcaacaaatcttctggtgatatc

SEQ ID NO: 1174995 - DNA, 25 bp, Homo sapien
ttaggccaagctatcaacaaatctt

SEQ ID NO: 1174996 - DNA, 25 bp, Homo sapien
ggccaagctatcaacaaatcttctg

SEQ ID NO: 1174997 - DNA, 25 bp, Homo sapien
cccaaagattccaagagcgtatgca

SEQ ID NO: 1174998 - DNA, 25 bp, Homo sapien
acccagggatcaaacaaacagcagc

SEQ ID NO: 1174999 - DNA, 25 bp, Homo sapien
tgcgtgaaatgtcagggagcccttg

SEQ ID NO: 1175000 - DNA, 25 bp, Homo sapien
gaagacctgataaagcatccatctg

SEQ ID NO: 1175001 - DNA, 25 bp, Homo sapien
ggtctctgaaacaactgcctgtgct

SEQ ID NO: 1175002 - DNA, 25 bp, Homo sapien
tatactgccatgctcaataacgtgg

SEQ ID NO: 1175003 - DNA, 25 bp, Homo sapien
tattacctaacgaaattggcaccac

SEQ ID NO: 1175004 - DNA, 25 bp, Homo sapien
tattgctgcaggaagtaaggcttgg

SEQ ID NO: 1175005 - DNA, 25 bp, Homo sapien
tgagagctacccaaaactcgtgaat

SEQ ID NO: 1175006 - DNA, 25 bp, Homo sapien
gattgtttatgaggcacctgcaggc

SEQ ID NO: 1175007 - DNA, 25 bp, Homo sapien
taccctaggaggactctgctcagac

SEQ ID NO: 1175008 - DNA, 25 bp, Homo sapien
tattgtacccatcttacaggcagga

SEQ ID NO: 1175009 - DNA, 25 bp, Homo sapien
tgtctcctcagttctgagagactgt

SEQ ID NO: 1175010 - DNA, 25 bp, Homo sapien
tctgggggtccaaactgaaagccta

SEQ ID NO: 1175011 - DNA, 25 bp, Homo sapien
ctcctccttggcgagtcttgaactc

SEQ ID NO: 1175012 - DNA, 25 bp, Homo sapien
gactgttgaaagctctggcacctaa

SEQ ID NO: 1175013 - DNA, 25 bp, Homo sapien
tgttgaccatgctccaagagcctga

SEQ ID NO: 1175014 - DNA, 25 bp, Homo sapien
actgcatcattctggccactgaagc

SEQ ID NO: 1175015 - DNA, 25 bp, Homo sapien
catgcagcatgtttccgcactgttg

SEQ ID NO: 1175016 - DNA, 25 bp, Homo sapien
cagcaagagcctttgacaagtcagc

SEQ ID NO: 1175017 - DNA, 25 bp, Homo sapien
tcaagtaactagcaatttagctagg

SEQ ID NO: 1175018 - DNA, 25 bp, Homo sapien
gtaactagcaatttagctaggagag

SEQ ID NO: 1175019 - DNA, 25 bp, Homo sapien
taactagcaatttagctaggagagg

SEQ ID NO: 1175020 - DNA, 25 bp, Homo sapien
aagtaactagcaatttagctaggag

SEQ ID NO: 1175021 - DNA, 25 bp, Homo sapien
cacatctaacacccccttgtcccct

SEQ ID NO: 1175022 - DNA, 25 bp, Homo sapien
tacacatctaacacccccttgtccc

SEQ ID NO: 1175023 - DNA, 25 bp, Homo sapien
ccccttgtcccctctcggctacaat

SEQ ID NO: 1175024 - DNA, 25 bp, Homo sapien
cttgtcccctctcggctacaataac

SEQ ID NO: 1175025 - DNA, 25 bp, Homo sapien
gggaccttgagaagcatgctttcct

SEQ ID NO: 1175026 - DNA, 25 bp, Homo sapien
cttctctctcatctagccagtgctt

SEQ ID NO: 1175027 - DNA, 25 bp, Homo sapien
ttctctctcatctagccagtgcttg

SEQ ID NO: 1175028 - DNA, 25 bp, Homo sapien
agtgcttgatgggaccttgagaagc

SEQ ID NO: 1175029 - DNA, 25 bp, Homo sapien
gaatcctaatcagttcctgccactc

SEQ ID NO: 1175030 - DNA, 25 bp, Homo sapien
gcaataccaacgctgaatcctaatc

SEQ ID NO: 1175031 - DNA, 25 bp, Homo sapien
acaggccacaggcaataccaacgct

SEQ ID NO: 1175032 - DNA, 25 bp, Homo sapien
aacgctgaatcctaatcagttcctg

SEQ ID NO: 1175033 - DNA, 25 bp, Homo sapien
tctgtactgtccctgcacattgtct

SEQ ID NO: 1175034 - DNA, 25 bp, Homo sapien
tgtactgtccctgcacattgtcttt

SEQ ID NO: 1175035 - DNA, 25 bp, Homo sapien
tactgtccctgcacattgtctttct

SEQ ID NO: 1175036 - DNA, 25 bp, Homo sapien
cactctgtactgtccctgcacattg

SEQ ID NO: 1175037 - DNA, 25 bp, Homo sapien
taaggatctagcctgcatgctctgc

SEQ ID NO: 1175038 - DNA, 25 bp, Homo sapien
tggccacatccaccatgttgttcat

SEQ ID NO: 1175039 - DNA, 25 bp, Homo sapien
tggcagcatccaatggccacatcca

SEQ ID NO: 1175040 - DNA, 25 bp, Homo sapien
ctcactcttcattaaggatctagcc

SEQ ID NO: 1175041 - DNA, 25 bp, Homo sapien
ggtggaggagccagcttgccagctt

SEQ ID NO: 1175042 - DNA, 25 bp, Homo sapien
ggaggagccagcttgccagctttag

SEQ ID NO: 1175043 - DNA, 25 bp, Homo sapien
tggaggagccagcttgccagcttta

SEQ ID NO: 1175044 - DNA, 25 bp, Homo sapien
atgtttgccagcaaagtggtggagg

SEQ ID NO: 1175045 - DNA, 25 bp, Homo sapien
cttgggccaactgtctgggtctcct

SEQ ID NO: 1175046 - DNA, 25 bp, Homo sapien
gggccaactgtctgggtctcctgac

SEQ ID NO: 1175047 - DNA, 25 bp, Homo sapien
ttgggccaactgtctgggtctcctg

SEQ ID NO: 1175048 - DNA, 25 bp, Homo sapien
tgggccaactgtctgggtctcctga

SEQ ID NO: 1175049 - DNA, 25 bp, Homo sapien
gatttaggttcaactcatagctcag

SEQ ID NO: 1175050 - DNA, 25 bp, Homo sapien
gcctaacagtaatatagtcacacag

SEQ ID NO: 1175051 - DNA, 25 bp, Homo sapien
ggttttattgttcctcacagctgag

SEQ ID NO: 1175052 - DNA, 25 bp, Homo sapien
tctcaagcaaatcaactgccccagt

SEQ ID NO: 1175053 - DNA, 25 bp, Homo sapien
tctctttgtcatagtggttattcca

SEQ ID NO: 1175054 - DNA, 25 bp, Homo sapien
taaatgcacatcacggatccaccag

SEQ ID NO: 1175055 - DNA, 25 bp, Homo sapien
ttgtcatagtggttattccagtggg

SEQ ID NO: 1175056 - DNA, 25 bp, Homo sapien
cggatccaccaggtttaacaaccat

SEQ ID NO: 1175057 - DNA, 25 bp, Homo sapien
tctgaccaggagcatgctgacaggt

SEQ ID NO: 1175058 - DNA, 25 bp, Homo sapien
caggtcacgggtagctgaacaacaa

SEQ ID NO: 1175059 - DNA, 25 bp, Homo sapien
caagtggcggttgctccctgtagag

SEQ ID NO: 1175060 - DNA, 25 bp, Homo sapien
caagcaatctcggactgtgtactca

SEQ ID NO: 1175061 - DNA, 25 bp, Homo sapien
cttcataggaagcaggtctccctca

SEQ ID NO: 1175062 - DNA, 25 bp, Homo sapien
gcttcataggaagcaggtctccctc

SEQ ID NO: 1175063 - DNA, 25 bp, Homo sapien
cataggaagcaggtctccctcattc

SEQ ID NO: 1175064 - DNA, 25 bp, Homo sapien
ctgcttcataggaagcaggtctccc

SEQ ID NO: 1175065 - DNA, 25 bp, Homo sapien
tctgtggctcagaccagcctcccac

SEQ ID NO: 1175066 - DNA, 25 bp, Homo sapien
gaagaacaaacaagactgctggtgc

SEQ ID NO: 1175067 - DNA, 25 bp, Homo sapien
caccgtctgtggctcagaccagcct

SEQ ID NO: 1175068 - DNA, 25 bp, Homo sapien
caagactgctggtgccaccgtctgt

SEQ ID NO: 1175069 - DNA, 25 bp, Homo sapien
agcatctgtgttccacaggacagga

SEQ ID NO: 1175070 - DNA, 25 bp, Homo sapien
tgctccaaggtggagcactgcctgg

SEQ ID NO: 1175071 - DNA, 25 bp, Homo sapien
tgagctctggaggaagcatctgtgt

SEQ ID NO: 1175072 - DNA, 25 bp, Homo sapien
gaatccaatctgctcaggctttgcc

SEQ ID NO: 1175073 - DNA, 25 bp, Homo sapien
ggtggaatgctctggagtccttcaa

SEQ ID NO: 1175074 - DNA, 25 bp, Homo sapien
aatagctggtggaatgctctggagt

SEQ ID NO: 1175075 - DNA, 25 bp, Homo sapien
gctggtggaatgctctggagtcctt

SEQ ID NO: 1175076 - DNA, 25 bp, Homo sapien
aatgctctggagtccttcaaaatga

SEQ ID NO: 1175077 - DNA, 25 bp, Homo sapien
taactgaggtaagagatccttcttc

SEQ ID NO: 1175078 - DNA, 25 bp, Homo sapien
tgatttgagtgtcctggtgacagca

SEQ ID NO: 1175079 - DNA, 25 bp, Homo sapien
tggtcacagctgatttgagtgtcct

SEQ ID NO: 1175080 - DNA, 25 bp, Homo sapien
ttcacgttgtcattgcaggctctgg

SEQ ID NO: 1175081 - DNA, 25 bp, Homo sapien
cagaatcactttcactccatccact

SEQ ID NO: 1175082 - DNA, 25 bp, Homo sapien
cagattctggttcagagccacttac

SEQ ID NO: 1175083 - DNA, 25 bp, Homo sapien
tcctcttcacctcagattctggttc

SEQ ID NO: 1175084 - DNA, 25 bp, Homo sapien
tgctttcctcttcacctcagattct

SEQ ID NO: 1175085 - DNA, 25 bp, Homo sapien
cttcacctcagattctggttcagag

SEQ ID NO: 1175086 - DNA, 25 bp, Homo sapien
tgactaggcctttggcctcgcctcg

SEQ ID NO: 1175087 - DNA, 25 bp, Homo sapien
aggactgactgagccaactggtgac

SEQ ID NO: 1175088 - DNA, 25 bp, Homo sapien
cttgccagataagggagggattctc

SEQ ID NO: 1175089 - DNA, 25 bp, Homo sapien
cagcaccattgctgctcaaagcaga

SEQ ID NO: 1175090 - DNA, 25 bp, Homo sapien
tggtccctgccccctaaagctaaca

SEQ ID NO: 1175091 - DNA, 25 bp, Homo sapien
tccctctggtcttctacttttccaa

SEQ ID NO: 1175092 - DNA, 25 bp, Homo sapien
aagatttgagggaagacatggtccc

SEQ ID NO: 1175093 - DNA, 25 bp, Homo sapien
ccaaacagatgaaataagatttgag

SEQ ID NO: 1175094 - DNA, 25 bp, Homo sapien
gctttttaacccaatctcctcacag

SEQ ID NO: 1175095 - DNA, 25 bp, Homo sapien
cctcacagcctgaatgatagtccaa

SEQ ID NO: 1175096 - DNA, 25 bp, Homo sapien
tggagctttttaacccaatctcctc

SEQ ID NO: 1175097 - DNA, 25 bp, Homo sapien
gaatgatagtccaagaactttagaa

SEQ ID NO: 1175098 - DNA, 25 bp, Homo sapien
caaagagggtctgaacgagggtgat

SEQ ID NO: 1175099 - DNA, 25 bp, Homo sapien
tgctgcatgcatctgaggaagccaa

SEQ ID NO: 1175100 - DNA, 25 bp, Homo sapien
gccaactgtgctaatctgcccatga

SEQ ID NO: 1175101 - DNA, 25 bp, Homo sapien
tgatttggtttatgctgcatgcatc

SEQ ID NO: 1175102 - DNA, 25 bp, Homo sapien
atcaggacagtctgctcccaacagt

SEQ ID NO: 1175103 - DNA, 25 bp, Homo sapien
aagtgactgagaggagccaatgacc

SEQ ID NO: 1175104 - DNA, 25 bp, Homo sapien
atgacccaatacatcaaagaggctg

SEQ ID NO: 1175105 - DNA, 25 bp, Homo sapien
aagaggctgtgaaaccccaaccagc

SEQ ID NO: 1175106 - DNA, 25 bp, Homo sapien
tcttgctctcatcccacgtccattc

SEQ ID NO: 1175107 - DNA, 25 bp, Homo sapien
ggtcctgcatcaccagcatcttgct

SEQ ID NO: 1175108 - DNA, 25 bp, Homo sapien
agcatcttgctctcatcccacgtcc

SEQ ID NO: 1175109 - DNA, 25 bp, Homo sapien
gctctcatcccacgtccattccttt

SEQ ID NO: 1175110 - DNA, 25 bp, Homo sapien
tggacggctgctccgactctggaag

SEQ ID NO: 1175111 - DNA, 25 bp, Homo sapien
gacggctgctccgactctggaagga

SEQ ID NO: 1175112 - DNA, 25 bp, Homo sapien
cggctgctccgactctggaaggaaa

SEQ ID NO: 1175113 - DNA, 25 bp, Homo sapien
ctggacggctgctccgactctggaa

SEQ ID NO: 1175114 - DNA, 25 bp, Homo sapien
tacagacagggtgtggcaagtgcgg

SEQ ID NO: 1175115 - DNA, 25 bp, Homo sapien
ggcttctccaagatacagagctgag

SEQ ID NO: 1175116 - DNA, 25 bp, Homo sapien
aatggagccagtgaaacgcggagga

SEQ ID NO: 1175117 - DNA, 25 bp, Homo sapien
tggccccatattggcttctccaaga

SEQ ID NO: 1175118 - DNA, 25 bp, Homo sapien
ccaggacctgccacgcaattctctc

SEQ ID NO: 1175119 - DNA, 25 bp, Homo sapien
gctgactttaggactgcagaggctg

SEQ ID NO: 1175120 - DNA, 25 bp, Homo sapien
gagtctacatccatgttcctcgcct

SEQ ID NO: 1175121 - DNA, 25 bp, Homo sapien
gctgtgaaaggtctccagtcacctg

SEQ ID NO: 1175122 - DNA, 25 bp, Homo sapien
agtctgagttgctgaataccctggg

SEQ ID NO: 1175123 - DNA, 25 bp, Homo sapien
gagtcctgacctacacaggcctgca

SEQ ID NO: 1175124 - DNA, 25 bp, Homo sapien
gccaagacttggttcagagcagcct

SEQ ID NO: 1175125 - DNA, 25 bp, Homo sapien
tctgcaactgctgtgaacacctttg

SEQ ID NO: 1175126 - DNA, 25 bp, Homo sapien
gatttaaagacgttacacctgaaga

SEQ ID NO: 1175127 - DNA, 25 bp, Homo sapien
caagtcttgggaatcatgagagaca

SEQ ID NO: 1175128 - DNA, 25 bp, Homo sapien
tattgctggcaccatctcgagcgat

SEQ ID NO: 1175129 - DNA, 25 bp, Homo sapien
tagctgaagatcttcaagtcttggg

SEQ ID NO: 1175130 - DNA, 25 bp, Homo sapien
cagagatcagaattcgctgtaagag

SEQ ID NO: 1175131 - DNA, 25 bp, Homo sapien
tgaaagcggtataggaaacaggaaa

SEQ ID NO: 1175132 - DNA, 25 bp, Homo sapien
gccagagatcagaattcgctgtaag

SEQ ID NO: 1175133 - DNA, 25 bp, Homo sapien
agtaggtgaggatgaaagcggtata

SEQ ID NO: 1175134 - DNA, 25 bp, Homo sapien
acacagcaatgtttcttcaaaccac

SEQ ID NO: 1175135 - DNA, 25 bp, Homo sapien
cagcaatgtttcttcaaaccaccca

SEQ ID NO: 1175136 - DNA, 25 bp, Homo sapien
cttatacacacagcaatgtttcttc

SEQ ID NO: 1175137 - DNA, 25 bp, Homo sapien
agcaatgtttcttcaaaccacccat

SEQ ID NO: 1175138 - DNA, 25 bp, Homo sapien
gcaggaggagatgggtaacttctgt

SEQ ID NO: 1175139 - DNA, 25 bp, Homo sapien
tgggtaacttctgtggggtccacca

SEQ ID NO: 1175140 - DNA, 25 bp, Homo sapien
agaaccttaagcgaagcaggaggag

SEQ ID NO: 1175141 - DNA, 25 bp, Homo sapien
ttctgggagataagaaccttaagcg

SEQ ID NO: 1175142 - DNA, 25 bp, Homo sapien
tccgaacgattctcatagcttggct

SEQ ID NO: 1175143 - DNA, 25 bp, Homo sapien
gccccaccgtccgaacgattctcat

SEQ ID NO: 1175144 - DNA, 25 bp, Homo sapien
cgtccgaacgattctcatagcttgg

SEQ ID NO: 1175145 - DNA, 25 bp, Homo sapien
caccgtccgaacgattctcatagct

SEQ ID NO: 1175146 - DNA, 25 bp, Homo sapien
tgggtctcctgagctgttgctgttc

SEQ ID NO: 1175147 - DNA, 25 bp, Homo sapien
gggtctcctgagctgttgctgttcc

SEQ ID NO: 1175148 - DNA, 25 bp, Homo sapien
tatctctctgttttatctctaagcc

SEQ ID NO: 1175149 - DNA, 25 bp, Homo sapien
ctatctctctgttttatctctaagc

SEQ ID NO: 1175150 - DNA, 25 bp, Homo sapien
gaactaagcgtttggttctccatgc

SEQ ID NO: 1175151 - DNA, 25 bp, Homo sapien
cttgatggctgggtgcttagcctga

SEQ ID NO: 1175152 - DNA, 25 bp, Homo sapien
tggagggtcggtaggtgggtggtgc

SEQ ID NO: 1175153 - DNA, 25 bp, Homo sapien
gtgctgggaactaagcgtttggttc

SEQ ID NO: 1175154 - DNA, 25 bp, Homo sapien
gatggggtggctgcttttccatgct

SEQ ID NO: 1175155 - DNA, 25 bp, Homo sapien
cctttccactgaagacaatggccat

SEQ ID NO: 1175156 - DNA, 25 bp, Homo sapien
tcttcctttccactgaagacaatgg

SEQ ID NO: 1175157 - DNA, 25 bp, Homo sapien
ggctgcttttccatgcttccttatc

SEQ ID NO: 1175158 - DNA, 25 bp, Homo sapien
ccctacagcatctagatcagtcaca

SEQ ID NO: 1175159 - DNA, 25 bp, Homo sapien
ggacctccaccgcatcgatgtcagt

SEQ ID NO: 1175160 - DNA, 25 bp, Homo sapien
gtcacacctcggctgaattccagga

SEQ ID NO: 1175161 - DNA, 25 bp, Homo sapien
tggaggccctctcggctccagtgag

SEQ ID NO: 1175162 - DNA, 25 bp, Homo sapien
tgggctgataccacacagtcagaaa

SEQ ID NO: 1175163 - DNA, 25 bp, Homo sapien
caatggaaatgggagtagaggccca

SEQ ID NO: 1175164 - DNA, 25 bp, Homo sapien
taactgaccccgatgggagactgat

SEQ ID NO: 1175165 - DNA, 25 bp, Homo sapien
aaatggtgtagctgcctgggctgat

SEQ ID NO: 1175166 - DNA, 25 bp, Homo sapien
ggtgagtggacagcggtgtctctgt

SEQ ID NO: 1175167 - DNA, 25 bp, Homo sapien
tggtgagtggacagcggtgtctctg

SEQ ID NO: 1175168 - DNA, 25 bp, Homo sapien
gtgagtggacagcggtgtctctgtg

SEQ ID NO: 1175169 - DNA, 25 bp, Homo sapien
tgagtggacagcggtgtctctgtgc

SEQ ID NO: 1175170 - DNA, 25 bp, Homo sapien
tgagagtggagcctgcgaagtaggg

SEQ ID NO: 1175171 - DNA, 25 bp, Homo sapien
gcctgcgaagtagggaggaggctga

SEQ ID NO: 1175172 - DNA, 25 bp, Homo sapien
agagtggagcctgcgaagtagggag

SEQ ID NO: 1175173 - DNA, 25 bp, Homo sapien
ggagcctgcgaagtagggaggaggc

SEQ ID NO: 1175174 - DNA, 25 bp, Homo sapien
tgagcccctcgctagggaaggtgca

SEQ ID NO: 1175175 - DNA, 25 bp, Homo sapien
atagcatgagcgattccttatgact

SEQ ID NO: 1175176 - DNA, 25 bp, Homo sapien
actccccaacaagcaatgatccaat

SEQ ID NO: 1175177 - DNA, 25 bp, Homo sapien
gagcgattccttatgactccctaga

SEQ ID NO: 1175178 - DNA, 25 bp, Homo sapien
cagttctgagactatgtcggcccag

SEQ ID NO: 1175179 - DNA, 25 bp, Homo sapien
caaactgtgaatagacctggcctac

SEQ ID NO: 1175180 - DNA, 25 bp, Homo sapien
caagaaagatgtggactacagcgcc

SEQ ID NO: 1175181 - DNA, 25 bp, Homo sapien
taagagctgacctcgtgctggaaac

SEQ ID NO: 1175182 - DNA, 25 bp, Homo sapien
ggccaggctgaagttagggagtagc

SEQ ID NO: 1175183 - DNA, 25 bp, Homo sapien
gagagaaccagagcaatttgcccca

SEQ ID NO: 1175184 - DNA, 25 bp, Homo sapien
tgaagttagggagtagcaggcacat

SEQ ID NO: 1175185 - DNA, 25 bp, Homo sapien
gtggagagaaccagagcaatttgcc

SEQ ID NO: 1175186 - DNA, 25 bp, Homo sapien
catttgaatgcaccagaccaggagc

SEQ ID NO: 1175187 - DNA, 25 bp, Homo sapien
gaaaccttggtttgggcagtctgct

SEQ ID NO: 1175188 - DNA, 25 bp, Homo sapien
tgtgaatatgtgagcacccactgct

SEQ ID NO: 1175189 - DNA, 25 bp, Homo sapien
catctgtcaaccgagaggactggct

SEQ ID NO: 1175190 - DNA, 25 bp, Homo sapien
agcatgtccttgttctgcagcaaaa

SEQ ID NO: 1175191 - DNA, 25 bp, Homo sapien
gcctcagcagccaactggtccttca

SEQ ID NO: 1175192 - DNA, 25 bp, Homo sapien
aaagctgatgcacgcgagcctgggc

SEQ ID NO: 1175193 - DNA, 25 bp, Homo sapien
cagggagatgtgctggagcatgtcc

SEQ ID NO: 1175194 - DNA, 25 bp, Homo sapien
aaagtcagccaagcccgcgcccagc

SEQ ID NO: 1175195 - DNA, 25 bp, Homo sapien
gggctgcccgcagggtgggcaaagt

SEQ ID NO: 1175196 - DNA, 25 bp, Homo sapien
tgcccgcagggtgggcaaagtcagc

SEQ ID NO: 1175197 - DNA, 25 bp, Homo sapien
cccgcagggtgggcaaagtcagcca

SEQ ID NO: 1175198 - DNA, 25 bp, Homo sapien
ggaacttgatgagctccagaccgcc

SEQ ID NO: 1175199 - DNA, 25 bp, Homo sapien
gaggcgatgcctgactctcggaact

SEQ ID NO: 1175200 - DNA, 25 bp, Homo sapien
ggcgatctcatcatccaggccgtcg

SEQ ID NO: 1175201 - DNA, 25 bp, Homo sapien
tcgggcggaagaaagcgaaagcact

SEQ ID NO: 1175202 - DNA, 25 bp, Homo sapien
aatctctacaatctcagcaagggcc

SEQ ID NO: 1175203 - DNA, 25 bp, Homo sapien
gcaacattcaatgtccggctggaga

SEQ ID NO: 1175204 - DNA, 25 bp, Homo sapien
ggttaggcaactcgcagcatcgtga

SEQ ID NO: 1175205 - DNA, 25 bp, Homo sapien
ggcttttgcggtccagagcactcaa

SEQ ID NO: 1175206 - DNA, 25 bp, Homo sapien
tccccgaacatatgactctagcagg

SEQ ID NO: 1175207 - DNA, 25 bp, Homo sapien
ccaaggaaggctaacataaaactga

SEQ ID NO: 1175208 - DNA, 25 bp, Homo sapien
tggccattagaagaggactgcactt

SEQ ID NO: 1175209 - DNA, 25 bp, Homo sapien
aaaggaaagctagggtcgatgaact

SEQ ID NO: 1175210 - DNA, 25 bp, Homo sapien
caagtatgcgctggtttgggtccac

SEQ ID NO: 1175211 - DNA, 25 bp, Homo sapien
tgacatcgtcgggaaatcaggtctg

SEQ ID NO: 1175212 - DNA, 25 bp, Homo sapien
tacacaaactagtcctccagggagg

SEQ ID NO: 1175213 - DNA, 25 bp, Homo sapien
caataaggttagcacccctggtgtc

SEQ ID NO: 1175214 - DNA, 25 bp, Homo sapien
cagagagagcattgatataagcagg

SEQ ID NO: 1175215 - DNA, 25 bp, Homo sapien
acatccagggagtaagtgcacttac

SEQ ID NO: 1175216 - DNA, 25 bp, Homo sapien
gacacaacagctttaggaagtagag

SEQ ID NO: 1175217 - DNA, 25 bp, Homo sapien
ggtttatttagcaaaagccactaga

SEQ ID NO: 1175218 - DNA, 25 bp, Homo sapien
tagcttggaccacagccactcacca

SEQ ID NO: 1175219 - DNA, 25 bp, Homo sapien
cacagccactcaccaccatgcgtgg

SEQ ID NO: 1175220 - DNA, 25 bp, Homo sapien
tagtaacggtctttccccatgttgc

SEQ ID NO: 1175221 - DNA, 25 bp, Homo sapien
tatcatcaaggctggagcgtgcagt

SEQ ID NO: 1175222 - DNA, 25 bp, Homo sapien
aatctcttcctccgccctgagtgct

SEQ ID NO: 1175223 - DNA, 25 bp, Homo sapien
caatctcttcctccgccctgagtgc

SEQ ID NO: 1175224 - DNA, 25 bp, Homo sapien
tctcttcctccgccctgagtgcttt

SEQ ID NO: 1175225 - DNA, 25 bp, Homo sapien
atctcttcctccgccctgagtgctt

SEQ ID NO: 1175226 - DNA, 25 bp, Homo sapien
tagtgaccagtcactttgagagtgt

SEQ ID NO: 1175227 - DNA, 25 bp, Homo sapien
acattttacgtagtgaccagtcact

SEQ ID NO: 1175228 - DNA, 25 bp, Homo sapien
aaagacacattttacgtagtgacca

SEQ ID NO: 1175229 - DNA, 25 bp, Homo sapien
ccagtcactttgagagtgtcacctc

SEQ ID NO: 1175230 - DNA, 25 bp, Homo sapien
ggtacctgtgctctatcattcagtt

SEQ ID NO: 1175231 - DNA, 25 bp, Homo sapien
ctatgaacaaagaggcgacagagag

SEQ ID NO: 1175232 - DNA, 25 bp, Homo sapien
gggagcggtacctgtgctctatcat

SEQ ID NO: 1175233 - DNA, 25 bp, Homo sapien
caaagaggcgacagagaggcatgat

SEQ ID NO: 1175234 - DNA, 25 bp, Homo sapien
ggccagctgtgctcctgcagtcttg

SEQ ID NO: 1175235 - DNA, 25 bp, Homo sapien
gccaagcctctggagccgcgtcagt

SEQ ID NO: 1175236 - DNA, 25 bp, Homo sapien
tcattcactttggcccccatggctt

SEQ ID NO: 1175237 - DNA, 25 bp, Homo sapien
tcatcctctagccaagcctctggag

SEQ ID NO: 1175238 - DNA, 25 bp, Homo sapien
cgctttctggttatgggaggtggag

SEQ ID NO: 1175239 - DNA, 25 bp, Homo sapien
gaggatccagccgaggaaatgtttc

SEQ ID NO: 1175240 - DNA, 25 bp, Homo sapien
gacaggctgtgatgaaatcagcatg

SEQ ID NO: 1175241 - DNA, 25 bp, Homo sapien
ccgaggggttcgctttctggttatg

SEQ ID NO: 1175242 - DNA, 25 bp, Homo sapien
ccttgtggattaggtcaggtactga

SEQ ID NO: 1175243 - DNA, 25 bp, Homo sapien
cctcattgtcgaggctggaggtccg

SEQ ID NO: 1175244 - DNA, 25 bp, Homo sapien
tgcactcagtcatctttagcttgga

SEQ ID NO: 1175245 - DNA, 25 bp, Homo sapien
gacagggaaacctctccattgggca

SEQ ID NO: 1175246 - DNA, 25 bp, Homo sapien
tgtgtgataccccaaaccattctgg

SEQ ID NO: 1175247 - DNA, 25 bp, Homo sapien
ccaaatcagagtgtgctaggccgca

SEQ ID NO: 1175248 - DNA, 25 bp, Homo sapien
tgaactctcaaggtctcaggcctgg

SEQ ID NO: 1175249 - DNA, 25 bp, Homo sapien
gcagttagattggagcagggtccca

SEQ ID NO: 1175250 - DNA, 25 bp, Homo sapien
ataatctaccaggatacagctgtgt

SEQ ID NO: 1175251 - DNA, 25 bp, Homo sapien
ttataatctaccaggatacagctgt

SEQ ID NO: 1175252 - DNA, 25 bp, Homo sapien
cttataatctaccaggatacagctg

SEQ ID NO: 1175253 - DNA, 25 bp, Homo sapien
tataatctaccaggatacagctgtg

SEQ ID NO: 1175254 - DNA, 25 bp, Homo sapien
tattgtgcaatttccttctaccaga

SEQ ID NO: 1175255 - DNA, 25 bp, Homo sapien
cttctttaaacgctgatggattgca

SEQ ID NO: 1175256 - DNA, 25 bp, Homo sapien
gccacatacacaacattcagataca

SEQ ID NO: 1175257 - DNA, 25 bp, Homo sapien
caaaccaaatcattttattgtgcaa

SEQ ID NO: 1175258 - DNA, 25 bp, Homo sapien
gaatgtgaagcttcatccctttctt

SEQ ID NO: 1175259 - DNA, 25 bp, Homo sapien
atgaatgtgaagcttcatccctttc

SEQ ID NO: 1175260 - DNA, 25 bp, Homo sapien
gagtgtcctagaggatgatccaaag

SEQ ID NO: 1175261 - DNA, 25 bp, Homo sapien
ccaggtaaagaatgagtgtcctaga

SEQ ID NO: 1175262 - DNA, 25 bp, Homo sapien
tccgcaggtgagcaataagaatgtc

SEQ ID NO: 1175263 - DNA, 25 bp, Homo sapien
tctccgcaggtgagcaataagaatg

SEQ ID NO: 1175264 - DNA, 25 bp, Homo sapien
ttctctccgcaggtgagcaataaga

SEQ ID NO: 1175265 - DNA, 25 bp, Homo sapien
tctctccgcaggtgagcaataagaa

SEQ ID NO: 1175266 - DNA, 25 bp, Homo sapien
tgagacgcctctgacatggagccag

SEQ ID NO: 1175267 - DNA, 25 bp, Homo sapien
tctgtgaacagactgaacgcccctt

SEQ ID NO: 1175268 - DNA, 25 bp, Homo sapien
cccctgcatgcggaactgtggaatc

SEQ ID NO: 1175269 - DNA, 25 bp, Homo sapien
tgtggaatccaaccccaggcatagt

SEQ ID NO: 1175270 - DNA, 25 bp, Homo sapien
gacaccacactgtccagtttctacg

SEQ ID NO: 1175271 - DNA, 25 bp, Homo sapien
tcaggcatcttttaacaagcacaac

SEQ ID NO: 1175272 - DNA, 25 bp, Homo sapien
gaatgaagtgggaggtcctacactg

SEQ ID NO: 1175273 - DNA, 25 bp, Homo sapien
gctgtggtcagtgatgatcttgtga

SEQ ID NO: 1175274 - DNA, 25 bp, Homo sapien
tttctgaaactggaggagaaagagg

SEQ ID NO: 1175275 - DNA, 25 bp, Homo sapien
ggagaagctgagcaagaggtttcat

SEQ ID NO: 1175276 - DNA, 25 bp, Homo sapien
gaaagaggagaagctgagcaagagg

SEQ ID NO: 1175277 - DNA, 25 bp, Homo sapien
ctttctgaaactggaggagaaagag

SEQ ID NO: 1175278 - DNA, 25 bp, Homo sapien
gctatctgggcactgtaaaagccta

SEQ ID NO: 1175279 - DNA, 25 bp, Homo sapien
caagtgatgaactggatcctctctc

SEQ ID NO: 1175280 - DNA, 25 bp, Homo sapien
gctcagtcgcttttgccatttcgga

SEQ ID NO: 1175281 - DNA, 25 bp, Homo sapien
ccttcatagggttctaggaaggcaa

SEQ ID NO: 1175282 - DNA, 25 bp, Homo sapien
cactctaacttgaggccttggcagc

SEQ ID NO: 1175283 - DNA, 25 bp, Homo sapien
ttttcagagatgatagaatccactc

SEQ ID NO: 1175284 - DNA, 25 bp, Homo sapien
tccacagaacacctcaagatggcat

SEQ ID NO: 1175285 - DNA, 25 bp, Homo sapien
ggcattacagatcccattttcagag

SEQ ID NO: 1175286 - DNA, 25 bp, Homo sapien
taacaggattcagagctgtgcaagt

SEQ ID NO: 1175287 - DNA, 25 bp, Homo sapien
cagcaagggtaagagtagagttgct

SEQ ID NO: 1175288 - DNA, 25 bp, Homo sapien
tgcaagtgtagatccaatccaggtc

SEQ ID NO: 1175289 - DNA, 25 bp, Homo sapien
taagagtagagttgctgtagctaac

SEQ ID NO: 1175290 - DNA, 25 bp, Homo sapien
gagaagaagcctgttccccaggaaa

SEQ ID NO: 1175291 - DNA, 25 bp, Homo sapien
cacctgtgcctgaatatgccaagtt

SEQ ID NO: 1175292 - DNA, 25 bp, Homo sapien
catttcactgggcaataggtgcctt

SEQ ID NO: 1175293 - DNA, 25 bp, Homo sapien
tatgccaagttcgtaggacaccaag

SEQ ID NO: 1175294 - DNA, 25 bp, Homo sapien
taagcctgataatgacaagatctgg

SEQ ID NO: 1175295 - DNA, 25 bp, Homo sapien
acctaagcctgataatgacaagatc

SEQ ID NO: 1175296 - DNA, 25 bp, Homo sapien
caagatctgggcaccaacaaagtag

SEQ ID NO: 1175297 - DNA, 25 bp, Homo sapien
tgggcaccaacaaagtagcactggg

SEQ ID NO: 1175298 - DNA, 25 bp, Homo sapien
cctctaaggcaataagtacagccat

SEQ ID NO: 1175299 - DNA, 25 bp, Homo sapien
tcctctaaggcaataagtacagcca

SEQ ID NO: 1175300 - DNA, 25 bp, Homo sapien
ctcctctaaggcaataagtacagcc

SEQ ID NO: 1175301 - DNA, 25 bp, Homo sapien
aggtttttgtgatgttgcagccaca

SEQ ID NO: 1175302 - DNA, 25 bp, Homo sapien
agaccttcggtctggtaagaaacat

SEQ ID NO: 1175303 - DNA, 25 bp, Homo sapien
ggtcaacacagaccttcggtctggt

SEQ ID NO: 1175304 - DNA, 25 bp, Homo sapien
tctccggttaaggtcaacacagacc

SEQ ID NO: 1175305 - DNA, 25 bp, Homo sapien
ctctccggttaaggtcaacacagac

SEQ ID NO: 1175306 - DNA, 25 bp, Homo sapien
acacgggagctgacgcgacgcctga

SEQ ID NO: 1175307 - DNA, 25 bp, Homo sapien
cgagtcccagaagccggaaatggag

SEQ ID NO: 1175308 - DNA, 25 bp, Homo sapien
gggacttcaagcagccatgacaccg

SEQ ID NO: 1175309 - DNA, 25 bp, Homo sapien
catgacaccggaagccgtggtgcac

SEQ ID NO: 1175310 - DNA, 25 bp, Homo sapien
cgcccgaaggcctccagaaaacgcg

SEQ ID NO: 1175311 - DNA, 25 bp, Homo sapien
ccgaaggcctccagaaaacgcggcg

SEQ ID NO: 1175312 - DNA, 25 bp, Homo sapien
aaggcctccagaaaacgcggcggct

SEQ ID NO: 1175313 - DNA, 25 bp, Homo sapien
aggcctccagaaaacgcggcggctc

SEQ ID NO: 1175314 - DNA, 25 bp, Homo sapien
ccggtggttcctggcggcaagaact

SEQ ID NO: 1175315 - DNA, 25 bp, Homo sapien
gggttgccgcagcagcgaacccgat

SEQ ID NO: 1175316 - DNA, 25 bp, Homo sapien
gatgtttctgtgaccctgcaactgt

SEQ ID NO: 1175317 - DNA, 25 bp, Homo sapien
tctttgcggaaaccatactcggcgg

SEQ ID NO: 1175318 - DNA, 25 bp, Homo sapien
tacgagttactagcattgatgtcac

SEQ ID NO: 1175319 - DNA, 25 bp, Homo sapien
taaaggctcccatggaatagtgcat

SEQ ID NO: 1175320 - DNA, 25 bp, Homo sapien
ttgatgtcacaaggcccagacgtag

SEQ ID NO: 1175321 - DNA, 25 bp, Homo sapien
gacaatctagcaaagacatgcctcc

SEQ ID NO: 1175322 - DNA, 25 bp, Homo sapien
tccaggagttcaagcaacagacagc

SEQ ID NO: 1175323 - DNA, 25 bp, Homo sapien
cagcgtgatggcacatttggagaaa

SEQ ID NO: 1175324 - DNA, 25 bp, Homo sapien
ttggagaaaagtggattgtaaacac

SEQ ID NO: 1175325 - DNA, 25 bp, Homo sapien
agcaattccgaaacactgacatcca

SEQ ID NO: 1175326 - DNA, 25 bp, Homo sapien
agcaagggcctccaaaacatctcgg

SEQ ID NO: 1175327 - DNA, 25 bp, Homo sapien
tatgttacgtggtttgaggtccgca

SEQ ID NO: 1175328 - DNA, 25 bp, Homo sapien
acatctcgggcacaatgctgtatca

SEQ ID NO: 1175329 - DNA, 25 bp, Homo sapien
tggacatagccctcatgatgaagaa

SEQ ID NO: 1175330 - DNA, 25 bp, Homo sapien
gagatacagccccaacactgaagag

SEQ ID NO: 1175331 - DNA, 25 bp, Homo sapien
tccatatagcgctcataaagaagtc

SEQ ID NO: 1175332 - DNA, 25 bp, Homo sapien
gtaactcagcaattagccaaacacg

SEQ ID NO: 1175333 - DNA, 25 bp, Homo sapien
cttccctaagagtgcagtaaaccca

SEQ ID NO: 1175334 - DNA, 25 bp, Homo sapien
tggagcccgatacccgtctgtctga

SEQ ID NO: 1175335 - DNA, 25 bp, Homo sapien
catttccagtaaaatgattcctagg

SEQ ID NO: 1175336 - DNA, 25 bp, Homo sapien
taggctccacagatcaacagctgag

SEQ ID NO: 1175337 - DNA, 25 bp, Homo sapien
caacagctgaggtacattctgtatc

SEQ ID NO: 1175338 - DNA, 25 bp, Homo sapien
gtctcttaggtgataggctggaatt

SEQ ID NO: 1175339 - DNA, 25 bp, Homo sapien
cactgctttactggcaaatatgtga

SEQ ID NO: 1175340 - DNA, 25 bp, Homo sapien
ctggcaaatatgtgatcaataatag

SEQ ID NO: 1175341 - DNA, 25 bp, Homo sapien
ggaattgcggcattcaccactgctt

SEQ ID NO: 1175342 - DNA, 25 bp, Homo sapien
gaattcttctgcttggatcatcatg

SEQ ID NO: 1175343 - DNA, 25 bp, Homo sapien
tctgcttggatcatcatgaagcatg

SEQ ID NO: 1175344 - DNA, 25 bp, Homo sapien
atgggctgcacaatgccatttcagc

SEQ ID NO: 1175345 - DNA, 25 bp, Homo sapien
caatgccatttcagcaggaattctt

SEQ ID NO: 1175346 - DNA, 25 bp, Homo sapien
ctggagtgggaagcatgaccagatc

SEQ ID NO: 1175347 - DNA, 25 bp, Homo sapien
agcatgaccagatcttcaatatgag

SEQ ID NO: 1175348 - DNA, 25 bp, Homo sapien
gaagcatgaccagatcttcaatatg

SEQ ID NO: 1175349 - DNA, 25 bp, Homo sapien
tgggaagcatgaccagatcttcaat

SEQ ID NO: 1175350 - DNA, 25 bp, Homo sapien
cattctcaagataatcatcatccag

SEQ ID NO: 1175351 - DNA, 25 bp, Homo sapien
tcatcatccagcacattcagcagtc

SEQ ID NO: 1175352 - DNA, 25 bp, Homo sapien
cctcttcattctcaagataatcatc

SEQ ID NO: 1175353 - DNA, 25 bp, Homo sapien
tccagcacattcagcagtcttagca

SEQ ID NO: 1175354 - DNA, 25 bp, Homo sapien
gataccactggtccatatttttgac

SEQ ID NO: 1175355 - DNA, 25 bp, Homo sapien
tcctttggaacaagtagagatacca

SEQ ID NO: 1175356 - DNA, 25 bp, Homo sapien
ctttggaacaagtagagataccact

SEQ ID NO: 1175357 - DNA, 25 bp, Homo sapien
agataccactggtccatatttttga

SEQ ID NO: 1175358 - DNA, 25 bp, Homo sapien
tcagcgggtagaatgtagccacaac

SEQ ID NO: 1175359 - DNA, 25 bp, Homo sapien
tgatacagatatcccctcttgtagg

SEQ ID NO: 1175360 - DNA, 25 bp, Homo sapien
ccatcaaacatccttccagtcagta

SEQ ID NO: 1175361 - DNA, 25 bp, Homo sapien
tcagtaatttctgcgcagctttgga

SEQ ID NO: 1175362 - DNA, 25 bp, Homo sapien
taggtcttcacaatacgggttctgc

SEQ ID NO: 1175363 - DNA, 25 bp, Homo sapien
tgctctcccgcacaaaaaagggttg

SEQ ID NO: 1175364 - DNA, 25 bp, Homo sapien
tctgagggaggtggctacaataacg

SEQ ID NO: 1175365 - DNA, 25 bp, Homo sapien
caatgtttctatgctagcggtacca

SEQ ID NO: 1175366 - DNA, 25 bp, Homo sapien
tttctaaggctgatcaacagatagc

SEQ ID NO: 1175367 - DNA, 25 bp, Homo sapien
gatagggcagctttacagtctgcaa

SEQ ID NO: 1175368 - DNA, 25 bp, Homo sapien
tattcacaaccaactactccagctg

SEQ ID NO: 1175369 - DNA, 25 bp, Homo sapien
gattactccttgtaactggctttgg

SEQ ID NO: 1175370 - DNA, 25 bp, Homo sapien
ctgaatatttatactaagtatagaa

SEQ ID NO: 1175371 - DNA, 25 bp, Homo sapien
tatttacctgttatctgaatattta

SEQ ID NO: 1175372 - DNA, 25 bp, Homo sapien
tattggcagcttttagttaaaatta

SEQ ID NO: 1175373 - DNA, 25 bp, Homo sapien
aaatatatttacctgttatctgaat

SEQ ID NO: 1175374 - DNA, 25 bp, Homo sapien
caaagtcagatgcttaggcctttga

SEQ ID NO: 1175375 - DNA, 25 bp, Homo sapien
taggcctttgatgaatgtgcagcaa

SEQ ID NO: 1175376 - DNA, 25 bp, Homo sapien
gggccatagctgcatatgttattta

SEQ ID NO: 1175377 - DNA, 25 bp, Homo sapien
tgttatttatcatcagacccaacct

SEQ ID NO: 1175378 - DNA, 25 bp, Homo sapien
atggtagaatttcagtttgccaaaa

SEQ ID NO: 1175379 - DNA, 25 bp, Homo sapien
tggtagaatttcagtttgccaaaac

SEQ ID NO: 1175380 - DNA, 25 bp, Homo sapien
gccctctcctgtacgtgagctttga

SEQ ID NO: 1175381 - DNA, 25 bp, Homo sapien
tgccctctcctgtacgtgagctttg

SEQ ID NO: 1175382 - DNA, 25 bp, Homo sapien
acccgactccctcataatcttctct

SEQ ID NO: 1175383 - DNA, 25 bp, Homo sapien
tgccccacccgactccctcataatc

SEQ ID NO: 1175384 - DNA, 25 bp, Homo sapien
ccccacccgactccctcataatctt

SEQ ID NO: 1175385 - DNA, 25 bp, Homo sapien
ccacccgactccctcataatcttct

SEQ ID NO: 1175386 - DNA, 25 bp, Homo sapien
caatgatgagtaaactgaattgcaa

SEQ ID NO: 1175387 - DNA, 25 bp, Homo sapien
aatgatgagtaaactgaattgcaaa

SEQ ID NO: 1175388 - DNA, 25 bp, Homo sapien
tcaatgatgagtaaactgaattgca

SEQ ID NO: 1175389 - DNA, 25 bp, Homo sapien
cggcagagagcggctcgtgggtccc

SEQ ID NO: 1175390 - DNA, 25 bp, Homo sapien
ccggcagagagcggctcgtgggtcc

SEQ ID NO: 1175391 - DNA, 25 bp, Homo sapien
ggcagagagcggctcgtgggtccca

SEQ ID NO: 1175392 - DNA, 25 bp, Homo sapien
gccggccggcagagagcggctcgtg

SEQ ID NO: 1175393 - DNA, 25 bp, Homo sapien
gtccctcctgcgcactaactgaggg

SEQ ID NO: 1175394 - DNA, 25 bp, Homo sapien
cactcattctctggcccaatgggaa

SEQ ID NO: 1175395 - DNA, 25 bp, Homo sapien
ctcctgcgcactaactgagggtgaa

SEQ ID NO: 1175396 - DNA, 25 bp, Homo sapien
gaatagttctggagcgcagtcggct

SEQ ID NO: 1175397 - DNA, 25 bp, Homo sapien
tgccgacgcctgaaggagtggaagc

SEQ ID NO: 1175398 - DNA, 25 bp, Homo sapien
cgcccagacacgtcagcgccgggag

SEQ ID NO: 1175399 - DNA, 25 bp, Homo sapien
ccgggagcacagacgacgacgcgga

SEQ ID NO: 1175400 - DNA, 25 bp, Homo sapien
tgaaggagtggaagccgaccgccca

SEQ ID NO: 1175401 - DNA, 25 bp, Homo sapien
ccccgcccctctcgccacgactagt

SEQ ID NO: 1175402 - DNA, 25 bp, Homo sapien
gctcgctccgaatatataccctcat

SEQ ID NO: 1175403 - DNA, 25 bp, Homo sapien
gtcccgcgctcgctccgaatatata

SEQ ID NO: 1175404 - DNA, 25 bp, Homo sapien
tatataccctcatccggggggccgc

SEQ ID NO: 1175405 - DNA, 25 bp, Homo sapien
accgtctccagctccttccgcgcgg

SEQ ID NO: 1175406 - DNA, 25 bp, Homo sapien
acgaccgtctccagctccttccgcg

SEQ ID NO: 1175407 - DNA, 25 bp, Homo sapien
gaccgtctccagctccttccgcgcg

SEQ ID NO: 1175408 - DNA, 25 bp, Homo sapien
ctacgaccgtctccagctccttccg

SEQ ID NO: 1175409 - DNA, 25 bp, Homo sapien
gggtgtaatgtatgtacctgtaaac

SEQ ID NO: 1175410 - DNA, 25 bp, Homo sapien
ctaatagccaagctttgtagaaata

SEQ ID NO: 1175411 - DNA, 25 bp, Homo sapien
gaaataggggtgtaatgtatgtacc

SEQ ID NO: 1175412 - DNA, 25 bp, Homo sapien
taatagccaagctttgtagaaatag

SEQ ID NO: 1175413 - DNA, 25 bp, Homo sapien
gacaacgtgagtttgaggtcattaa

SEQ ID NO: 1175414 - DNA, 25 bp, Homo sapien
cgtgagtttgaggtcattaatgttc

SEQ ID NO: 1175415 - DNA, 25 bp, Homo sapien
caacgtgagtttgaggtcattaatg

SEQ ID NO: 1175416 - DNA, 25 bp, Homo sapien
aacgtgagtttgaggtcattaatgt

SEQ ID NO: 1175417 - DNA, 25 bp, Homo sapien
aagttcagctcctcaaagttcatgg

SEQ ID NO: 1175418 - DNA, 25 bp, Homo sapien
tagcactgcctaatacctctcgagg

SEQ ID NO: 1175419 - DNA, 25 bp, Homo sapien
gatcttgatcccttgtagcactgcc

SEQ ID NO: 1175420 - DNA, 25 bp, Homo sapien
gcctggagctctgcataaagttcta

SEQ ID NO: 1175421 - DNA, 25 bp, Homo sapien
aaaggaagtttgcaccgtgttatgc

SEQ ID NO: 1175422 - DNA, 25 bp, Homo sapien
tagctccacatagtccaacaaaaag

SEQ ID NO: 1175423 - DNA, 25 bp, Homo sapien
gaatttgcagacacacggtagtttc

SEQ ID NO: 1175424 - DNA, 25 bp, Homo sapien
aactgtccctgatacaattaccagg

SEQ ID NO: 1175425 - DNA, 25 bp, Homo sapien
gtagagaagcaccattatgattaat

SEQ ID NO: 1175426 - DNA, 25 bp, Homo sapien
aggaaaatgtctcataggcaaaaaa

SEQ ID NO: 1175427 - DNA, 25 bp, Homo sapien
gatctgtgttcaaataagcatgcat

SEQ ID NO: 1175428 - DNA, 25 bp, Homo sapien
ctatagtgctatatggtagagaagc

SEQ ID NO: 1175429 - DNA, 25 bp, Homo sapien
tcagcaacctgctgtagcttcagga

SEQ ID NO: 1175430 - DNA, 25 bp, Homo sapien
tccccttaggatatgcaacgccgag

SEQ ID NO: 1175431 - DNA, 25 bp, Homo sapien
cccaccagctagaagaagaactgct

SEQ ID NO: 1175432 - DNA, 25 bp, Homo sapien
atgcaacgccgagtcttgtcccctg

SEQ ID NO: 1175433 - DNA, 25 bp, Homo sapien
tagaacacagatgttcctccaaatt

SEQ ID NO: 1175434 - DNA, 25 bp, Homo sapien
tcaagatgaacaaaacagttcacag

SEQ ID NO: 1175435 - DNA, 25 bp, Homo sapien
ttcacagcaggccagtactcgtggt

SEQ ID NO: 1175436 - DNA, 25 bp, Homo sapien
caggccagtactcgtggtgagaaga

SEQ ID NO: 1175437 - DNA, 25 bp, Homo sapien
tttgtagattccattgttctgccac

SEQ ID NO: 1175438 - DNA, 25 bp, Homo sapien
gggagcattccttgctgaaaaaaga

SEQ ID NO: 1175439 - DNA, 25 bp, Homo sapien
cattccttgctgaaaaaagattaca

SEQ ID NO: 1175440 - DNA, 25 bp, Homo sapien
gcggggagcattccttgctgaaaaa

SEQ ID NO: 1175441 - DNA, 25 bp, Homo sapien
tcttccaaaataattttcccatcaa

SEQ ID NO: 1175442 - DNA, 25 bp, Homo sapien
gagccatagaaactttgttcttctc

SEQ ID NO: 1175443 - DNA, 25 bp, Homo sapien
aaataattttcccatcaaaactcat

SEQ ID NO: 1175444 - DNA, 25 bp, Homo sapien
ctggagccatagaaactttgttctt

SEQ ID NO: 1175445 - DNA, 25 bp, Homo sapien
tgggctgcaagtgcccgataaagac

SEQ ID NO: 1175446 - DNA, 25 bp, Homo sapien
actaatatgttgtcaacacaataga

SEQ ID NO: 1175447 - DNA, 25 bp, Homo sapien
caagtgcccgataaagaccaccatt

SEQ ID NO: 1175448 - DNA, 25 bp, Homo sapien
ccacttttactaatatgttgtcaac

SEQ ID NO: 1175449 - DNA, 25 bp, Homo sapien
ttctggaatgcgtatatgacagagc

SEQ ID NO: 1175450 - DNA, 25 bp, Homo sapien
gacttctggaatgcgtatatgacag

SEQ ID NO: 1175451 - DNA, 25 bp, Homo sapien
ctggaatgcgtatatgacagagcaa

SEQ ID NO: 1175452 - DNA, 25 bp, Homo sapien
ggtttgacttctggaatgcgtatat

SEQ ID NO: 1175453 - DNA, 25 bp, Homo sapien
gaagctcgtaacagtacaattttaa

SEQ ID NO: 1175454 - DNA, 25 bp, Homo sapien
gaactcaggattctcatttctgaga

SEQ ID NO: 1175455 - DNA, 25 bp, Homo sapien
ttggttctgaagctcgtaacagtac

SEQ ID NO: 1175456 - DNA, 25 bp, Homo sapien
caaaggggttgaccagatgatctct

SEQ ID NO: 1175457 - DNA, 25 bp, Homo sapien
gcctcccactccaactttaattaga

SEQ ID NO: 1175458 - DNA, 25 bp, Homo sapien
tctattgcccgatatttcatttgaa

SEQ ID NO: 1175459 - DNA, 25 bp, Homo sapien
gaaataagtgattctatacttcaaa

SEQ ID NO: 1175460 - DNA, 25 bp, Homo sapien
ccttgtgtttcagggacctgagtag

SEQ ID NO: 1175461 - DNA, 25 bp, Homo sapien
gatttgccattgtcaaagatgacat

SEQ ID NO: 1175462 - DNA, 25 bp, Homo sapien
ggagatttgccattgtcaaagatga

SEQ ID NO: 1175463 - DNA, 25 bp, Homo sapien
atttgccattgtcaaagatgacatt

SEQ ID NO: 1175464 - DNA, 25 bp, Homo sapien
gagatttgccattgtcaaagatgac

SEQ ID NO: 1175465 - DNA, 25 bp, Homo sapien
tgaacagcagtcgtccgtctgagct

SEQ ID NO: 1175466 - DNA, 25 bp, Homo sapien
aaatggttggcaatgttccccgcat

SEQ ID NO: 1175467 - DNA, 25 bp, Homo sapien
gccagggaaatctcactatattcta

SEQ ID NO: 1175468 - DNA, 25 bp, Homo sapien
ctctcagaaatggtacagtgaagaa

SEQ ID NO: 1175469 - DNA, 25 bp, Homo sapien
gctccgatgattcccaccttacaat

SEQ ID NO: 1175470 - DNA, 25 bp, Homo sapien
gggtgtctgcatccctctcaagtgt

SEQ ID NO: 1175471 - DNA, 25 bp, Homo sapien
ccatttgataagtgatcctcaggaa

SEQ ID NO: 1175472 - DNA, 25 bp, Homo sapien
ctcacagctgtggtaaagaaagttt

SEQ ID NO: 1175473 - DNA, 25 bp, Homo sapien
tgtgtcaacaaccaatactaagatt

SEQ ID NO: 1175474 - DNA, 25 bp, Homo sapien
gaaaatcttacaacattcaggagca

SEQ ID NO: 1175475 - DNA, 25 bp, Homo sapien
gctacaaatggcatagaatgggaaa

SEQ ID NO: 1175476 - DNA, 25 bp, Homo sapien
agtctccactaaaactgtgtacgtg

SEQ ID NO: 1175477 - DNA, 25 bp, Homo sapien
tctggcttaattaactgtccttggg

SEQ ID NO: 1175478 - DNA, 25 bp, Homo sapien
taaggaatcttcttttgagccacat

SEQ ID NO: 1175479 - DNA, 25 bp, Homo sapien
ccttgggtatccacataaggaatct

SEQ ID NO: 1175480 - DNA, 25 bp, Homo sapien
tgagccacatggtgctgcaactgag

SEQ ID NO: 1175481 - DNA, 25 bp, Homo sapien
gaattgctggaaggcgagagccatt

SEQ ID NO: 1175482 - DNA, 25 bp, Homo sapien
gccttgcagtagtagggttgtcttt

SEQ ID NO: 1175483 - DNA, 25 bp, Homo sapien
caatgatgaagggacatcaaagcat

SEQ ID NO: 1175484 - DNA, 25 bp, Homo sapien
gtctttcccattctgactatcagca

SEQ ID NO: 1175485 - DNA, 25 bp, Homo sapien
ggagctatgagtgggtctcacagac

SEQ ID NO: 1175486 - DNA, 25 bp, Homo sapien
ttaacagtagtgaggtcagccgggc

SEQ ID NO: 1175487 - DNA, 25 bp, Homo sapien
gaaagtgctacagtgaaaactgcca

SEQ ID NO: 1175488 - DNA, 25 bp, Homo sapien
gactacaatttgtaggtagcctggg

SEQ ID NO: 1175489 - DNA, 25 bp, Homo sapien
tgtaaaaccagttatgtaccagtaa

SEQ ID NO: 1175490 - DNA, 25 bp, Homo sapien
acagagcccaaaagtggccttggac

SEQ ID NO: 1175491 - DNA, 25 bp, Homo sapien
gctgcttcttgtaaaaccagttatg

SEQ ID NO: 1175492 - DNA, 25 bp, Homo sapien
gagcccaaaagtggccttggactgg

SEQ ID NO: 1175493 - DNA, 25 bp, Homo sapien
catcagctgtgatggtctctgactt

SEQ ID NO: 1175494 - DNA, 25 bp, Homo sapien
atcagctgtgatggtctctgacttc

SEQ ID NO: 1175495 - DNA, 25 bp, Homo sapien
tttagaagcaagaaagtaactgact

SEQ ID NO: 1175496 - DNA, 25 bp, Homo sapien
tattaagggccatcaaatatgacag

SEQ ID NO: 1175497 - DNA, 25 bp, Homo sapien
caaactctgtcagtacccagatggg

SEQ ID NO: 1175498 - DNA, 25 bp, Homo sapien
tactgagagcatacacccaattcca

SEQ ID NO: 1175499 - DNA, 25 bp, Homo sapien
caacagtcatctatggcagcggtcc

SEQ ID NO: 1175500 - DNA, 25 bp, Homo sapien
gtgctaaggattacgcaggaactct

SEQ ID NO: 1175501 - DNA, 25 bp, Homo sapien
taaaagctatggttcaatgacaaag

SEQ ID NO: 1175502 - DNA, 25 bp, Homo sapien
agtgataaagggctctgcatcccag

SEQ ID NO: 1175503 - DNA, 25 bp, Homo sapien
taaacaaatggaatagatgctaccc

SEQ ID NO: 1175504 - DNA, 25 bp, Homo sapien
gggcaagtgccaataattactggta

SEQ ID NO: 1175505 - DNA, 25 bp, Homo sapien
tactggtagctctttacagcacttc

SEQ ID NO: 1175506 - DNA, 25 bp, Homo sapien
tatgccaagcccaatgctaggtgct

SEQ ID NO: 1175507 - DNA, 25 bp, Homo sapien
tctccagcataggagataagaggag

SEQ ID NO: 1175508 - DNA, 25 bp, Homo sapien
ctccagcataggagataagaggaga

SEQ ID NO: 1175509 - DNA, 25 bp, Homo sapien
tccagcataggagataagaggagag

SEQ ID NO: 1175510 - DNA, 25 bp, Homo sapien
gtgatgattcaatgcatatatacac

SEQ ID NO: 1175511 - DNA, 25 bp, Homo sapien
gattcaatgcatatatacactgtcg

SEQ ID NO: 1175512 - DNA, 25 bp, Homo sapien
gcatatatacactgtcgaataatca

SEQ ID NO: 1175513 - DNA, 25 bp, Homo sapien
cactgtcgaataatcaaataaagcc

SEQ ID NO: 1175514 - DNA, 25 bp, Homo sapien
tgaactccattctcatcgatgatta

SEQ ID NO: 1175515 - DNA, 25 bp, Homo sapien
catgaactccattctcatcgatgat

SEQ ID NO: 1175516 - DNA, 25 bp, Homo sapien
cagctcatgaactccattctcatcg

SEQ ID NO: 1175517 - DNA, 25 bp, Homo sapien
gctcatgaactccattctcatcgat

SEQ ID NO: 1175518 - DNA, 25 bp, Homo sapien
gctattcctatcgtggcaaacaaaa

SEQ ID NO: 1175519 - DNA, 25 bp, Homo sapien
gaacatcctgcctatatttcagctg

SEQ ID NO: 1175520 - DNA, 25 bp, Homo sapien
taaataagaccttcaatgagttggg

SEQ ID NO: 1175521 - DNA, 25 bp, Homo sapien
tccagctgcaagtaaactgatgttg

SEQ ID NO: 1175522 - DNA, 25 bp, Homo sapien
ctcccaagtttcatattttctcaat

SEQ ID NO: 1175523 - DNA, 25 bp, Homo sapien
caatgaaataatttcttcaagtaca

SEQ ID NO: 1175524 - DNA, 25 bp, Homo sapien
cccaagtttcatattttctcaatga

SEQ ID NO: 1175525 - DNA, 25 bp, Homo sapien
ttctcaatgaaataatttcttcaag

SEQ ID NO: 1175526 - DNA, 25 bp, Homo sapien
aactctttgtcgtaggagaccatcc

SEQ ID NO: 1175527 - DNA, 25 bp, Homo sapien
caaatgcccctttgggtggaggaca

SEQ ID NO: 1175528 - DNA, 25 bp, Homo sapien
taatttgaaacaaggcttctcgacc

SEQ ID NO: 1175529 - DNA, 25 bp, Homo sapien
tccctattagatgccagtggtacca

SEQ ID NO: 1175530 - DNA, 25 bp, Homo sapien
tgagaaggctggaaatgtcagcgtc

SEQ ID NO: 1175531 - DNA, 25 bp, Homo sapien
ctgagaaggctggaaatgtcagcgt

SEQ ID NO: 1175532 - DNA, 25 bp, Homo sapien
agattatgccaatacacctcctcag

SEQ ID NO: 1175533 - DNA, 25 bp, Homo sapien
ttactgacctctggcacagattgcc

SEQ ID NO: 1175534 - DNA, 25 bp, Homo sapien
ctttcagttgccgtacctggtacag

SEQ ID NO: 1175535 - DNA, 25 bp, Homo sapien
tatagccctattcaggcagctccaa

SEQ ID NO: 1175536 - DNA, 25 bp, Homo sapien
cttcttgtaaagagacctcctttct

SEQ ID NO: 1175537 - DNA, 25 bp, Homo sapien
gctctcccccgaaagatttgattta

SEQ ID NO: 1175538 - DNA, 25 bp, Homo sapien
gagctctcccccgaaagatttgatt

SEQ ID NO: 1175539 - DNA, 25 bp, Homo sapien
gcctagagctgagctctcccccgaa

SEQ ID NO: 1175540 - DNA, 25 bp, Homo sapien
gagctgagctctcccccgaaagatt

SEQ ID NO: 1175541 - DNA, 25 bp, Homo sapien
gagttttccaattgaagcttccagg

SEQ ID NO: 1175542 - DNA, 25 bp, Homo sapien
ttgagctgaagctataagcaaaact

SEQ ID NO: 1175543 - DNA, 25 bp, Homo sapien
gagctgaagctataagcaaaactta

SEQ ID NO: 1175544 - DNA, 25 bp, Homo sapien
tccaggacagttggggcacacacgc

SEQ ID NO: 1175545 - DNA, 25 bp, Homo sapien
gagaaacctcacattctgaggattc

SEQ ID NO: 1175546 - DNA, 25 bp, Homo sapien
caggctgatgcaagatgcctttgag

SEQ ID NO: 1175547 - DNA, 25 bp, Homo sapien
aaggagcccggtggtaggcatacat

SEQ ID NO: 1175548 - DNA, 25 bp, Homo sapien
ggcatacatccacaggctgatgcaa

SEQ ID NO: 1175549 - DNA, 25 bp, Homo sapien
catccaggggtgcacagttttggaa

SEQ ID NO: 1175550 - DNA, 25 bp, Homo sapien
tgttgtgaaacgcttctttttccac

SEQ ID NO: 1175551 - DNA, 25 bp, Homo sapien
gctataatccactgcgtttccccaa

SEQ ID NO: 1175552 - DNA, 25 bp, Homo sapien
aaagaagaatttgttgtgaaacgct

SEQ ID NO: 1175553 - DNA, 25 bp, Homo sapien
tctgtggtgcctcattacgttccct

SEQ ID NO: 1175554 - DNA, 25 bp, Homo sapien
gaaactaactctgcaatcggcctgt

SEQ ID NO: 1175555 - DNA, 25 bp, Homo sapien
catgggatctgatttctcgagtctg

SEQ ID NO: 1175556 - DNA, 25 bp, Homo sapien
tgtctgacttaaaacgcccttctgt

SEQ ID NO: 1175557 - DNA, 25 bp, Homo sapien
ggcaagaggtataaagagtccagtg

SEQ ID NO: 1175558 - DNA, 25 bp, Homo sapien
ggtcaccatttatgtgagctggcac

SEQ ID NO: 1175559 - DNA, 25 bp, Homo sapien
tctgtgttgcggacaggtcaccatt

SEQ ID NO: 1175560 - DNA, 25 bp, Homo sapien
tgtggaggtccacttttagacgtgt

SEQ ID NO: 1175561 - DNA, 25 bp, Homo sapien
tgaagtccagctaatcagggatttc

SEQ ID NO: 1175562 - DNA, 25 bp, Homo sapien
tggtgctgtaactaaaaagtcatca

SEQ ID NO: 1175563 - DNA, 25 bp, Homo sapien
taagttgaaccgttttaagtcagca

SEQ ID NO: 1175564 - DNA, 25 bp, Homo sapien
cgttttaagtcagcaccatctgtat

SEQ ID NO: 1175565 - DNA, 25 bp, Homo sapien
gataggtcaacaccagacattctga

SEQ ID NO: 1175566 - DNA, 25 bp, Homo sapien
gatgttggcaactcaatccattgaa

SEQ ID NO: 1175567 - DNA, 25 bp, Homo sapien
tagatgttggcaactcaatccattg

SEQ ID NO: 1175568 - DNA, 25 bp, Homo sapien
ctgtatagataggtcaacaccagac

SEQ ID NO: 1175569 - DNA, 25 bp, Homo sapien
acagtgttcaggcgggctgctgaat

SEQ ID NO: 1175570 - DNA, 25 bp, Homo sapien
gttcaggcgggctgctgaatggccc

SEQ ID NO: 1175571 - DNA, 25 bp, Homo sapien
ttgtgtccctctgaatggatataac

SEQ ID NO: 1175572 - DNA, 25 bp, Homo sapien
ccacagtgttcaggcgggctgctga

SEQ ID NO: 1175573 - DNA, 25 bp, Homo sapien
gttggggacagttccacgtctgcat

SEQ ID NO: 1175574 - DNA, 25 bp, Homo sapien
tggggacagttccacgtctgcatac

SEQ ID NO: 1175575 - DNA, 25 bp, Homo sapien
gggacagttccacgtctgcatacat

SEQ ID NO: 1175576 - DNA, 25 bp, Homo sapien
tgttggggacagttccacgtctgca

SEQ ID NO: 1175577 - DNA, 25 bp, Homo sapien
ggatcctcaaaaacagctggcctct

SEQ ID NO: 1175578 - DNA, 25 bp, Homo sapien
caacttgcaggtctcccttgatgga

SEQ ID NO: 1175579 - DNA, 25 bp, Homo sapien
agccacaaaccttggaactttctag

SEQ ID NO: 1175580 - DNA, 25 bp, Homo sapien
tcaattatttcagcttctttagaat

SEQ ID NO: 1175581 - DNA, 25 bp, Homo sapien
accaattctgtatatgtaagagaga

SEQ ID NO: 1175582 - DNA, 25 bp, Homo sapien
tactccatatgttcgagcagagctc

SEQ ID NO: 1175583 - DNA, 25 bp, Homo sapien
agctcaaatagcaaacttaccattt

SEQ ID NO: 1175584 - DNA, 25 bp, Homo sapien
tccccaggaacaagactaacatatg

SEQ ID NO: 1175585 - DNA, 25 bp, Homo sapien
tctctgcctggttgtaaaggtttcc

SEQ ID NO: 1175586 - DNA, 25 bp, Homo sapien
tgggtctctggccaagccagttgcc

SEQ ID NO: 1175587 - DNA, 25 bp, Homo sapien
cctttcttcttgtggtggttatgag

SEQ ID NO: 1175588 - DNA, 25 bp, Homo sapien
ggtctgccatagtctatctgtgtgg

SEQ ID NO: 1175589 - DNA, 25 bp, Homo sapien
tgggattcgggtaggcctgagtggc

SEQ ID NO: 1175590 - DNA, 25 bp, Homo sapien
ttgggattcgggtaggcctgagtgg

SEQ ID NO: 1175591 - DNA, 25 bp, Homo sapien
cttgggattcgggtaggcctgagtg

SEQ ID NO: 1175592 - DNA, 25 bp, Homo sapien
gtctcttgggattcgggtaggcctg

SEQ ID NO: 1175593 - DNA, 25 bp, Homo sapien
tggaagaactcacttgtgcaaggcc

SEQ ID NO: 1175594 - DNA, 25 bp, Homo sapien
ggtttgtagaattccttatgcttaa

SEQ ID NO: 1175595 - DNA, 25 bp, Homo sapien
taagtgatttagacccagaaaatca

SEQ ID NO: 1175596 - DNA, 25 bp, Homo sapien
tttatcatccttgtcaaatagaggc

SEQ ID NO: 1175597 - DNA, 25 bp, Homo sapien
aaccatcacctcacacaatagacat

SEQ ID NO: 1175598 - DNA, 25 bp, Homo sapien
tcttggaaacacaggtattaaccat

SEQ ID NO: 1175599 - DNA, 25 bp, Homo sapien
tgtgtttccataacttcagctgcat

SEQ ID NO: 1175600 - DNA, 25 bp, Homo sapien
cattcatgtgacatcatgtgtttcc

SEQ ID NO: 1175601 - DNA, 25 bp, Homo sapien
gcagttacaagcataaagtgaggaa

SEQ ID NO: 1175602 - DNA, 25 bp, Homo sapien
caaaggccacaaatgataagacagg

SEQ ID NO: 1175603 - DNA, 25 bp, Homo sapien
tcaggacgtgctcaatacacaaagg

SEQ ID NO: 1175604 - DNA, 25 bp, Homo sapien
tatttagaaagtgcccagctctcag

SEQ ID NO: 1175605 - DNA, 25 bp, Homo sapien
tagactgcacgggaccttaaggcag

SEQ ID NO: 1175606 - DNA, 25 bp, Homo sapien
caaatcctcgattggtcataagtgt

SEQ ID NO: 1175607 - DNA, 25 bp, Homo sapien
tctcaagactgaaaacactgggctg

SEQ ID NO: 1175608 - DNA, 25 bp, Homo sapien
caggtaaggtgaggctagactgcac

SEQ ID NO: 1175609 - DNA, 25 bp, Homo sapien
caatagcataatagcaggctcttca

SEQ ID NO: 1175610 - DNA, 25 bp, Homo sapien
gatgagaacaatagcataatagcag

SEQ ID NO: 1175611 - DNA, 25 bp, Homo sapien
cttctgatgagaacaatagcataat

SEQ ID NO: 1175612 - DNA, 25 bp, Homo sapien
ccctcttctgatgagaacaatagca

SEQ ID NO: 1175613 - DNA, 25 bp, Homo sapien
tgaataaggttcatgcacactctct

SEQ ID NO: 1175614 - DNA, 25 bp, Homo sapien
ccctttacaactctcaggctgttag

SEQ ID NO: 1175615 - DNA, 25 bp, Homo sapien
tggacaatgaataaggttcatgcac

SEQ ID NO: 1175616 - DNA, 25 bp, Homo sapien
caactctcaggctgttagactccat

SEQ ID NO: 1175617 - DNA, 25 bp, Homo sapien
aaatgaggctacagtctccctctgg

SEQ ID NO: 1175618 - DNA, 25 bp, Homo sapien
tgggagagccaggagagtccagcca

SEQ ID NO: 1175619 - DNA, 25 bp, Homo sapien
ccacagaaatgaggctacagtctcc

SEQ ID NO: 1175620 - DNA, 25 bp, Homo sapien
ggagagccaggagagtccagccaaa

SEQ ID NO: 1175621 - DNA, 25 bp, Homo sapien
caatggcaggggctgttaagacgca

SEQ ID NO: 1175622 - DNA, 25 bp, Homo sapien
tgaggctacaggaaccacggtctct

SEQ ID NO: 1175623 - DNA, 25 bp, Homo sapien
gctgtagtgagattggatatctgga

SEQ ID NO: 1175624 - DNA, 25 bp, Homo sapien
gacagcccacaaggtcacactggga

SEQ ID NO: 1175625 - DNA, 25 bp, Homo sapien
ccattggctcgtagctggaatgaaa

SEQ ID NO: 1175626 - DNA, 25 bp, Homo sapien
gatccattggctcgtagctggaatg

SEQ ID NO: 1175627 - DNA, 25 bp, Homo sapien
tcagggatccattggctcgtagctg

SEQ ID NO: 1175628 - DNA, 25 bp, Homo sapien
gggatccattggctcgtagctggaa

SEQ ID NO: 1175629 - DNA, 25 bp, Homo sapien
ggaatatgtgggcatcctagatcag

SEQ ID NO: 1175630 - DNA, 25 bp, Homo sapien
gaaccttgggagataagtgctgaaa

SEQ ID NO: 1175631 - DNA, 25 bp, Homo sapien
ttcacactagtgctcagataggatg

SEQ ID NO: 1175632 - DNA, 25 bp, Homo sapien
agatcagctcttggttgtacacaca

SEQ ID NO: 1175633 - DNA, 25 bp, Homo sapien
ctcagaagatggtgttggaactgga

SEQ ID NO: 1175634 - DNA, 25 bp, Homo sapien
tcagaagatggtgttggaactggag

SEQ ID NO: 1175635 - DNA, 25 bp, Homo sapien
cagaagatggtgttggaactggagt

SEQ ID NO: 1175636 - DNA, 25 bp, Homo sapien
caccaagagcattctgggaatcagg

SEQ ID NO: 1175637 - DNA, 25 bp, Homo sapien
acagcaccaagagcattctgggaat

SEQ ID NO: 1175638 - DNA, 25 bp, Homo sapien
agagcattctgggaatcaggatcat

SEQ ID NO: 1175639 - DNA, 25 bp, Homo sapien
caagagcattctgggaatcaggatc

SEQ ID NO: 1175640 - DNA, 25 bp, Homo sapien
acattgatgggtttaaacattctgc

SEQ ID NO: 1175641 - DNA, 25 bp, Homo sapien
gaacattgatgggtttaaacattct

SEQ ID NO: 1175642 - DNA, 25 bp, Homo sapien
ctgctggtcttctagcatatagctg

SEQ ID NO: 1175643 - DNA, 25 bp, Homo sapien
tctagcatatagctgagtaatagcc

SEQ ID NO: 1175644 - DNA, 25 bp, Homo sapien
ttagactcaaggagactaggtctcc

SEQ ID NO: 1175645 - DNA, 25 bp, Homo sapien
gccccaaagtttagactcaaggaga

SEQ ID NO: 1175646 - DNA, 25 bp, Homo sapien
aaagtttagactcaaggagactagg

SEQ ID NO: 1175647 - DNA, 25 bp, Homo sapien
gactcaaggagactaggtctccctg

SEQ ID NO: 1175648 - DNA, 25 bp, Homo sapien
tggttgtgaaaactgagaggtccag

SEQ ID NO: 1175649 - DNA, 25 bp, Homo sapien
gggactttgtgtgaagctcttcctg

SEQ ID NO: 1175650 - DNA, 25 bp, Homo sapien
tgagaggtccagaaaagggactttg

SEQ ID NO: 1175651 - DNA, 25 bp, Homo sapien
gctcttcctggagtcccatgatcat

SEQ ID NO: 1175652 - DNA, 25 bp, Homo sapien
cagggtccctgtctccttgtctgct

SEQ ID NO: 1175653 - DNA, 25 bp, Homo sapien
cagtttccatggtaagcagggtccc

SEQ ID NO: 1175654 - DNA, 25 bp, Homo sapien
agtctttccacacgagagccctgag

SEQ ID NO: 1175655 - DNA, 25 bp, Homo sapien
gtctgctcctgccaacactgttgtt

SEQ ID NO: 1175656 - DNA, 25 bp, Homo sapien
ggccgactccgggtttggcactagc

SEQ ID NO: 1175657 - DNA, 25 bp, Homo sapien
tccgggtttggcactagcagacggt

SEQ ID NO: 1175658 - DNA, 25 bp, Homo sapien
gactccgggtttggcactagcagac

SEQ ID NO: 1175659 - DNA, 25 bp, Homo sapien
cgggtttggcactagcagacggtct

SEQ ID NO: 1175660 - DNA, 25 bp, Homo sapien
ctttaatgcatctctaaacactagg

SEQ ID NO: 1175661 - DNA, 25 bp, Homo sapien
ttaatgcatctctaaacactaggcc

SEQ ID NO: 1175662 - DNA, 25 bp, Homo sapien
tttaatgcatctctaaacactaggc

SEQ ID NO: 1175663 - DNA, 25 bp, Homo sapien
ctgagagaagattctactggctacc

SEQ ID NO: 1175664 - DNA, 25 bp, Homo sapien
cattctttcaacgactcaagccaaa

SEQ ID NO: 1175665 - DNA, 25 bp, Homo sapien
tcaacgactcaagccaaaaatcttg

SEQ ID NO: 1175666 - DNA, 25 bp, Homo sapien
gattctactggctaccctaaaaata

SEQ ID NO: 1175667 - DNA, 25 bp, Homo sapien
ctggggagaagatctagctgtccaa

SEQ ID NO: 1175668 - DNA, 25 bp, Homo sapien
tggggagaagatctagctgtccaag

SEQ ID NO: 1175669 - DNA, 25 bp, Homo sapien
ggcattcctggatcttttgactgta

SEQ ID NO: 1175670 - DNA, 25 bp, Homo sapien
aggcaggcattcctggatcttttga

SEQ ID NO: 1175671 - DNA, 25 bp, Homo sapien
cctttgtgactgtcacctgtgtgta

SEQ ID NO: 1175672 - DNA, 25 bp, Homo sapien
tcacctgtgtgtatgtctccctcag

SEQ ID NO: 1175673 - DNA, 25 bp, Homo sapien
cctgtgtgtatgtctccctcaggca

SEQ ID NO: 1175674 - DNA, 25 bp, Homo sapien
ctttgtgactgtcacctgtgtgtat

SEQ ID NO: 1175675 - DNA, 25 bp, Homo sapien
tgtgatgggtaccacccagttcgac

SEQ ID NO: 1175676 - DNA, 25 bp, Homo sapien
cctggttgagctgtgatgggtacca

SEQ ID NO: 1175677 - DNA, 25 bp, Homo sapien
gtagttcgatctcggactggtgtgc

SEQ ID NO: 1175678 - DNA, 25 bp, Homo sapien
accttgtagttcgatctcggactgg

SEQ ID NO: 1175679 - DNA, 25 bp, Homo sapien
acatgcccagaggatagcggcatat

SEQ ID NO: 1175680 - DNA, 25 bp, Homo sapien
catgcccagaggatagcggcatata

SEQ ID NO: 1175681 - DNA, 25 bp, Homo sapien
atgcccagaggatagcggcatatag

SEQ ID NO: 1175682 - DNA, 25 bp, Homo sapien
gggtccccaccagagtgataaaatg

SEQ ID NO: 1175683 - DNA, 25 bp, Homo sapien
tgtttcccatgacggttccgccaag

SEQ ID NO: 1175684 - DNA, 25 bp, Homo sapien
tcaggttccactggaatctcagggc

SEQ ID NO: 1175685 - DNA, 25 bp, Homo sapien
gagggtgtgcaagtcaatctgcaga

SEQ ID NO: 1175686 - DNA, 25 bp, Homo sapien
aaatctggctacaatgggcggctcc

SEQ ID NO: 1175687 - DNA, 25 bp, Homo sapien
cacattcatggagtggtcggtgact

SEQ ID NO: 1175688 - DNA, 25 bp, Homo sapien
tggaatgaaccggacaaatctggct

SEQ ID NO: 1175689 - DNA, 25 bp, Homo sapien
agacacagccgtaaagctccactct

SEQ ID NO: 1175690 - DNA, 25 bp, Homo sapien
gatggaacctccagggagtacaaac

SEQ ID NO: 1175691 - DNA, 25 bp, Homo sapien
ggagcattgtaagacaccaagccat

SEQ ID NO: 1175692 - DNA, 25 bp, Homo sapien
cattcagataaatgatggaacctcc

SEQ ID NO: 1175693 - DNA, 25 bp, Homo sapien
cccagctggagcattgtaagacacc

SEQ ID NO: 1175694 - DNA, 25 bp, Homo sapien
gacacaccatcggtcaattggccta

SEQ ID NO: 1175695 - DNA, 25 bp, Homo sapien
tagtgaaattcctgatgcggtcaaa

SEQ ID NO: 1175696 - DNA, 25 bp, Homo sapien
tgggtgaaatcgtccaggccagaca

SEQ ID NO: 1175697 - DNA, 25 bp, Homo sapien
tagccgggccacacgtggtattcat

SEQ ID NO: 1175698 - DNA, 25 bp, Homo sapien
tggagaggcaccgtgacaaaccgag

SEQ ID NO: 1175699 - DNA, 25 bp, Homo sapien
cactgaacatcatccaggtatctgc

SEQ ID NO: 1175700 - DNA, 25 bp, Homo sapien
gaaatggcattaggttcccactcac

SEQ ID NO: 1175701 - DNA, 25 bp, Homo sapien
gaagtagcactgtacctccttaaag

SEQ ID NO: 1175702 - DNA, 25 bp, Homo sapien
agaagttctgggcatgtgcattcct

SEQ ID NO: 1175703 - DNA, 25 bp, Homo sapien
tgagaagctgcctgtacaatcccac

SEQ ID NO: 1175704 - DNA, 25 bp, Homo sapien
cgtatccgtcaatgagaagctgcct

SEQ ID NO: 1175705 - DNA, 25 bp, Homo sapien
ctcccacttcccaaagaggacctga

SEQ ID NO: 1175706 - DNA, 25 bp, Homo sapien
ggaagataagtcacgtatgctgctc

SEQ ID NO: 1175707 - DNA, 25 bp, Homo sapien
gaggatctagcattacatccccatg

SEQ ID NO: 1175708 - DNA, 25 bp, Homo sapien
gaaaatcgtcatttagcaaccctag

SEQ ID NO: 1175709 - DNA, 25 bp, Homo sapien
aattaacctgtagatgtaagcacca

SEQ ID NO: 1175710 - DNA, 25 bp, Homo sapien
gatttggcacagtttctggctgtag

SEQ ID NO: 1175711 - DNA, 25 bp, Homo sapien
tgaacctaactgtatatcacattgg

SEQ ID NO: 1175712 - DNA, 25 bp, Homo sapien
gctgcagttactgttcaatcaaaag

SEQ ID NO: 1175713 - DNA, 25 bp, Homo sapien
ccctaactgtataccacactggtga

SEQ ID NO: 1175714 - DNA, 25 bp, Homo sapien
gggcagggcttcagagttgttgtac

SEQ ID NO: 1175715 - DNA, 25 bp, Homo sapien
gttgtgggtgccataggagaggtgg

SEQ ID NO: 1175716 - DNA, 25 bp, Homo sapien
agggcttcagagttgttgtacattg

SEQ ID NO: 1175717 - DNA, 25 bp, Homo sapien
cataggttgtgggtgccataggaga

SEQ ID NO: 1175718 - DNA, 25 bp, Homo sapien
gtgttgctgtcatcaactttaagca

SEQ ID NO: 1175719 - DNA, 25 bp, Homo sapien
gctgtcatcaactttaagcattgga

SEQ ID NO: 1175720 - DNA, 25 bp, Homo sapien
caccaagcagccaatcaggatccga

SEQ ID NO: 1175721 - DNA, 25 bp, Homo sapien
caatcaggatccgagtgttgctgtc

SEQ ID NO: 1175722 - DNA, 25 bp, Homo sapien
tcactaggtgatgaggagcggttat

SEQ ID NO: 1175723 - DNA, 25 bp, Homo sapien
tgcgatcgtaagtcgagttggaccc

SEQ ID NO: 1175724 - DNA, 25 bp, Homo sapien
ggagttttcgtatcagcctggatgg

SEQ ID NO: 1175725 - DNA, 25 bp, Homo sapien
catgctagaatcacttggcagggaa

SEQ ID NO: 1175726 - DNA, 25 bp, Homo sapien
ttgctgaggtttctcccttgacacc

SEQ ID NO: 1175727 - DNA, 25 bp, Homo sapien
gagttgctcaaattaggccaggagc

SEQ ID NO: 1175728 - DNA, 25 bp, Homo sapien
ctgggagcaggcgtgtcatacctac

SEQ ID NO: 1175729 - DNA, 25 bp, Homo sapien
aatagatgcaatgaactgggagcag

SEQ ID NO: 1175730 - DNA, 25 bp, Homo sapien
aggagcagcggcagaccaaatctag

SEQ ID NO: 1175731 - DNA, 25 bp, Homo sapien
ctctttgaaagttaggagtttcctg

SEQ ID NO: 1175732 - DNA, 25 bp, Homo sapien
tccttggaggttcactatgtcagcc

SEQ ID NO: 1175733 - DNA, 25 bp, Homo sapien
gtgttgcctcctgtcactccttgga

SEQ ID NO: 1175734 - DNA, 25 bp, Homo sapien
caggcactgagtatgtgttgcctcc

SEQ ID NO: 1175735 - DNA, 25 bp, Homo sapien
caatgcaaggagagacaaatggaag

SEQ ID NO: 1175736 - DNA, 25 bp, Homo sapien
ccttcttcgagctataagggaatca

SEQ ID NO: 1175737 - DNA, 25 bp, Homo sapien
gagacattctgttgtgaatccacct

SEQ ID NO: 1175738 - DNA, 25 bp, Homo sapien
ggttgacccaatactgaaatccaga

SEQ ID NO: 1175739 - DNA, 25 bp, Homo sapien
tggcactgacatctagggcaaaatc

SEQ ID NO: 1175740 - DNA, 25 bp, Homo sapien
ttggcatctgctcggagcattttca

SEQ ID NO: 1175741 - DNA, 25 bp, Homo sapien
gcatctgctcggagcattttcacag

SEQ ID NO: 1175742 - DNA, 25 bp, Homo sapien
cactgacatctagggcaaaatcttt

SEQ ID NO: 1175743 - DNA, 25 bp, Homo sapien
gagtattcctggtcctaaagatgaa

SEQ ID NO: 1175744 - DNA, 25 bp, Homo sapien
caagaggaggtaatgacatgcagga

SEQ ID NO: 1175745 - DNA, 25 bp, Homo sapien
gactgccgaccccatcggaataaga

SEQ ID NO: 1175746 - DNA, 25 bp, Homo sapien
cagtggaaatgggaggcagctcact

SEQ ID NO: 1175747 - DNA, 25 bp, Homo sapien
gctcgtggcgggaaagaaactgatt

SEQ ID NO: 1175748 - DNA, 25 bp, Homo sapien
tccttgagccgagacatgatcttta

SEQ ID NO: 1175749 - DNA, 25 bp, Homo sapien
catacagagagggtcatcagtgata

SEQ ID NO: 1175750 - DNA, 25 bp, Homo sapien
gacagtgcgtacatcgctggaggaa

SEQ ID NO: 1175751 - DNA, 25 bp, Homo sapien
catgccagaggcaatttgggtagcc

SEQ ID NO: 1175752 - DNA, 25 bp, Homo sapien
ggatccggtaatagtcaccactgta

SEQ ID NO: 1175753 - DNA, 25 bp, Homo sapien
ttcgtgtggccagatctcggtgaac

SEQ ID NO: 1175754 - DNA, 25 bp, Homo sapien
gacatccagcggatagggagcactg

SEQ ID NO: 1175755 - DNA, 25 bp, Homo sapien
acagggctttaaaatgctgagaact

SEQ ID NO: 1175756 - DNA, 25 bp, Homo sapien
gggctttaaaatgctgagaacttac

SEQ ID NO: 1175757 - DNA, 25 bp, Homo sapien
agccagttgttagacagggctttaa

SEQ ID NO: 1175758 - DNA, 25 bp, Homo sapien
aagccagttgttagacagggcttta

SEQ ID NO: 1175759 - DNA, 25 bp, Homo sapien
acacccaattgtcatagcgcagcgc

SEQ ID NO: 1175760 - DNA, 25 bp, Homo sapien
atagcgcagcgcagcccagattttc

SEQ ID NO: 1175761 - DNA, 25 bp, Homo sapien
agtgcaatggccagtcacacgtttg

SEQ ID NO: 1175762 - DNA, 25 bp, Homo sapien
gtcacacgtttgatctcattactga

SEQ ID NO: 1175763 - DNA, 25 bp, Homo sapien
gaactctccagtattctcaataacc

SEQ ID NO: 1175764 - DNA, 25 bp, Homo sapien
tctcaataacctgttcatctgacag

SEQ ID NO: 1175765 - DNA, 25 bp, Homo sapien
ctgggaatagggctgttcttgacaa

SEQ ID NO: 1175766 - DNA, 25 bp, Homo sapien
tgcctcccttggtctcggaagaact

SEQ ID NO: 1175767 - DNA, 25 bp, Homo sapien
atttcttggaatgagggacggttct

SEQ ID NO: 1175768 - DNA, 25 bp, Homo sapien
gagggacggttcttcgtatctcttc

SEQ ID NO: 1175769 - DNA, 25 bp, Homo sapien
tgtccagatggagtggcataggcat

SEQ ID NO: 1175770 - DNA, 25 bp, Homo sapien
gacctgagccgtaggaacatggcca

SEQ ID NO: 1175771 - DNA, 25 bp, Homo sapien
agtttcattaaatgtccagatggag

SEQ ID NO: 1175772 - DNA, 25 bp, Homo sapien
tcttgtagggaggacctgagccgta

SEQ ID NO: 1175773 - DNA, 25 bp, Homo sapien
caaggactctcggagttagaaggac

SEQ ID NO: 1175774 - DNA, 25 bp, Homo sapien
cgccatctcagaggcaagagtgtgt

SEQ ID NO: 1175775 - DNA, 25 bp, Homo sapien
gagacatgtccagaggccaaattag

SEQ ID NO: 1175776 - DNA, 25 bp, Homo sapien
aaaccacctgtgattagttgctgaa

SEQ ID NO: 1175777 - DNA, 25 bp, Homo sapien
tactgcaaaggtaataaggccccac

SEQ ID NO: 1175778 - DNA, 25 bp, Homo sapien
tattacttctgtgactcaaggccag

SEQ ID NO: 1175779 - DNA, 25 bp, Homo sapien
gaaaaggtcattccccgatggttgc

SEQ ID NO: 1175780 - DNA, 25 bp, Homo sapien
gatgacctgcaaaatggagcctgtg

SEQ ID NO: 1175781 - DNA, 25 bp, Homo sapien
cgtctatgatagttttaagcagaaa

SEQ ID NO: 1175782 - DNA, 25 bp, Homo sapien
ttgccctttaccccttgacaagaca

SEQ ID NO: 1175783 - DNA, 25 bp, Homo sapien
ttacatattctatttggaacgtcta

SEQ ID NO: 1175784 - DNA, 25 bp, Homo sapien
ttaccccttgacaagacacatcatc

SEQ ID NO: 1175785 - DNA, 25 bp, Homo sapien
caaaggttacaaagcccagaactgg

SEQ ID NO: 1175786 - DNA, 25 bp, Homo sapien
tctgtaaccataacgataagggatc

SEQ ID NO: 1175787 - DNA, 25 bp, Homo sapien
gttaattctagactggattccccag

SEQ ID NO: 1175788 - DNA, 25 bp, Homo sapien
tgtgaggacgtaaaatcccagtgtc

SEQ ID NO: 1175789 - DNA, 25 bp, Homo sapien
gtggaactcagctcctacgcttatc

SEQ ID NO: 1175790 - DNA, 25 bp, Homo sapien
ttctttatcatgggggtggaactca

SEQ ID NO: 1175791 - DNA, 25 bp, Homo sapien
tggaactcagctcctacgcttatcc

SEQ ID NO: 1175792 - DNA, 25 bp, Homo sapien
ggaactcagctcctacgcttatccc

SEQ ID NO: 1175793 - DNA, 25 bp, Homo sapien
ccgctgctttcggaagtcctacgat

SEQ ID NO: 1175794 - DNA, 25 bp, Homo sapien
tgctttcggaagtcctacgatttcg

SEQ ID NO: 1175795 - DNA, 25 bp, Homo sapien
cgccgctgctttcggaagtcctacg

SEQ ID NO: 1175796 - DNA, 25 bp, Homo sapien
gctgctttcggaagtcctacgattt

SEQ ID NO: 1175797 - DNA, 25 bp, Homo sapien
ccggtgatcaaaaccacctttcgca

SEQ ID NO: 1175798 - DNA, 25 bp, Homo sapien
ctagccccggtgatcaaaaccacct

SEQ ID NO: 1175799 - DNA, 25 bp, Homo sapien
cggtgatcaaaaccacctttcgcat

SEQ ID NO: 1175800 - DNA, 25 bp, Homo sapien
ctgctagccccggtgatcaaaacca

SEQ ID NO: 1175801 - DNA, 25 bp, Homo sapien
tgggaggacaattcagacacaagat

SEQ ID NO: 1175802 - DNA, 25 bp, Homo sapien
tggcatcaggtacaggcatttctct

SEQ ID NO: 1175803 - DNA, 25 bp, Homo sapien
atgtgggttatctgggatggcatca

SEQ ID NO: 1175804 - DNA, 25 bp, Homo sapien
caggtacaggcatttctctctggtt

SEQ ID NO: 1175805 - DNA, 25 bp, Homo sapien
cctgcacgccaaacacagatgaagc

SEQ ID NO: 1175806 - DNA, 25 bp, Homo sapien
gatcgatcacatatcaggatgtact

SEQ ID NO: 1175807 - DNA, 25 bp, Homo sapien
taatcccagcaccaactgatcgatc

SEQ ID NO: 1175808 - DNA, 25 bp, Homo sapien
cgtggtactgagacacaatgggtca

SEQ ID NO: 1175809 - DNA, 25 bp, Homo sapien
tgttatgctgcacaatcacatgaga

SEQ ID NO: 1175810 - DNA, 25 bp, Homo sapien
ctgtccaaggaaacaaggtagttct

SEQ ID NO: 1175811 - DNA, 25 bp, Homo sapien
taattattccagatagccctagggc

SEQ ID NO: 1175812 - DNA, 25 bp, Homo sapien
cacatttacaaaggactaaggccac

SEQ ID NO: 1175813 - DNA, 25 bp, Homo sapien
ccctagggcagcatagactagtgca

SEQ ID NO: 1175814 - DNA, 25 bp, Homo sapien
cttcaacacagatcacatacaacca

SEQ ID NO: 1175815 - DNA, 25 bp, Homo sapien
aacacagatcacatacaaccatttc

SEQ ID NO: 1175816 - DNA, 25 bp, Homo sapien
ggtcttcaacacagatcacatacaa

SEQ ID NO: 1175817 - DNA, 25 bp, Homo sapien
tggtcttcaacacagatcacataca

SEQ ID NO: 1175818 - DNA, 25 bp, Homo sapien
cctgaatacttgtcacggaagggat

SEQ ID NO: 1175819 - DNA, 25 bp, Homo sapien
tcaataaggaattgcagcaaccctc

SEQ ID NO: 1175820 - DNA, 25 bp, Homo sapien
tttcagtgttcatggacaagtccta

SEQ ID NO: 1175821 - DNA, 25 bp, Homo sapien
gaatctgtggagtcatcgtgggctt

SEQ ID NO: 1175822 - DNA, 25 bp, Homo sapien
atatttagttgtggattaggcatga

SEQ ID NO: 1175823 - DNA, 25 bp, Homo sapien
tagttgtggattaggcatgatccca

SEQ ID NO: 1175824 - DNA, 25 bp, Homo sapien
ttagttgtggattaggcatgatccc

SEQ ID NO: 1175825 - DNA, 25 bp, Homo sapien
atttagttgtggattaggcatgatc

SEQ ID NO: 1175826 - DNA, 25 bp, Homo sapien
tcccaatcaggttacaggtaaactg

SEQ ID NO: 1175827 - DNA, 25 bp, Homo sapien
caaaagcattggtatagtaagcagc

SEQ ID NO: 1175828 - DNA, 25 bp, Homo sapien
tatagctcacgctaccaataggaac

SEQ ID NO: 1175829 - DNA, 25 bp, Homo sapien
ggaacttgagtctctcaaaaacctg

SEQ ID NO: 1175830 - DNA, 25 bp, Homo sapien
ctatttctcagactgggttattgta

SEQ ID NO: 1175831 - DNA, 25 bp, Homo sapien
cataaactacacctcccttgattct

SEQ ID NO: 1175832 - DNA, 25 bp, Homo sapien
cctcccttgattctataatgacagg

SEQ ID NO: 1175833 - DNA, 25 bp, Homo sapien
cagcagaagataattgcatgacttt

SEQ ID NO: 1175834 - DNA, 25 bp, Homo sapien
ctgtggagaacatatgaatcacttt

SEQ ID NO: 1175835 - DNA, 25 bp, Homo sapien
tgtggagaacatatgaatcactttt

SEQ ID NO: 1175836 - DNA, 25 bp, Homo sapien
atggccaaagacattggtctcaaac

SEQ ID NO: 1175837 - DNA, 25 bp, Homo sapien
gtctcaaacacctcctgaagtccat

SEQ ID NO: 1175838 - DNA, 25 bp, Homo sapien
cagcagtgatcttatcaccctgggt

SEQ ID NO: 1175839 - DNA, 25 bp, Homo sapien
ggataaaatggccaaagacattggt

SEQ ID NO: 1175840 - DNA, 25 bp, Homo sapien
tatcaacactgagaagtcatactga

SEQ ID NO: 1175841 - DNA, 25 bp, Homo sapien
tggaaaaacctgacaaacatgacct

SEQ ID NO: 1175842 - DNA, 25 bp, Homo sapien
gagagagtctacaaaacacctaagc

SEQ ID NO: 1175843 - DNA, 25 bp, Homo sapien
gtcatactgatagcatacacccttg

SEQ ID NO: 1175844 - DNA, 25 bp, Homo sapien
catacatgagttagtatgtacatat

SEQ ID NO: 1175845 - DNA, 25 bp, Homo sapien
tacatatatatctcttagtctatca

SEQ ID NO: 1175846 - DNA, 25 bp, Homo sapien
gacatcagtattaactagttatcta

SEQ ID NO: 1175847 - DNA, 25 bp, Homo sapien
accactgtactgtatggtaagagat

SEQ ID NO: 1175848 - DNA, 25 bp, Homo sapien
tgtgctggaagtcctcgaggctgaa

SEQ ID NO: 1175849 - DNA, 25 bp, Homo sapien
agtcctcgaggctgaaattagattt

SEQ ID NO: 1175850 - DNA, 25 bp, Homo sapien
ccttgcctttgctgtgctggaagtc

SEQ ID NO: 1175851 - DNA, 25 bp, Homo sapien
tgcgagatgatgtccagatgagctg

SEQ ID NO: 1175852 - DNA, 25 bp, Homo sapien
tgtattaagagaacccactgtgaga

SEQ ID NO: 1175853 - DNA, 25 bp, Homo sapien
gaggtatgtacatgagccagaagtc

SEQ ID NO: 1175854 - DNA, 25 bp, Homo sapien
tgagaggcacccaggatgcaaaaat

SEQ ID NO: 1175855 - DNA, 25 bp, Homo sapien
ttgactcagtccagctacatgctag

SEQ ID NO: 1175856 - DNA, 25 bp, Homo sapien
aaattggtcaatgctgtacctggac

SEQ ID NO: 1175857 - DNA, 25 bp, Homo sapien
tccatataaacggaggcagaattcc

SEQ ID NO: 1175858 - DNA, 25 bp, Homo sapien
cggaggcagaattccatatgtcaaa

SEQ ID NO: 1175859 - DNA, 25 bp, Homo sapien
gacaggccacattggaatagagacc

SEQ ID NO: 1175860 - DNA, 25 bp, Homo sapien
tatggtgtcaaagtgaatgcatttg

SEQ ID NO: 1175861 - DNA, 25 bp, Homo sapien
tgaatgcatttgcaaaaaagcgaag

SEQ ID NO: 1175862 - DNA, 25 bp, Homo sapien
tctgttccattatatggtgtcaaag

SEQ ID NO: 1175863 - DNA, 25 bp, Homo sapien
tccattatatggtgtcaaagtgaat

SEQ ID NO: 1175864 - DNA, 25 bp, Homo sapien
atcagaggattgagagattcaggct

SEQ ID NO: 1175865 - DNA, 25 bp, Homo sapien
gagagattcaggcttttggtggaaa

SEQ ID NO: 1175866 - DNA, 25 bp, Homo sapien
tctgggtcataatgtaatttcttcc

SEQ ID NO: 1175867 - DNA, 25 bp, Homo sapien
gcactcagatatttgatcagaggat

SEQ ID NO: 1175868 - DNA, 25 bp, Homo sapien
cggtctacagggtcactaaaggcta

SEQ ID NO: 1175869 - DNA, 25 bp, Homo sapien
ccatgtgtaaggcagcctgctagga

SEQ ID NO: 1175870 - DNA, 25 bp, Homo sapien
gggtatgaccctcctcctcaaagag

SEQ ID NO: 1175871 - DNA, 25 bp, Homo sapien
caagcatgatctgcaacaggtacga

SEQ ID NO: 1175872 - DNA, 25 bp, Homo sapien
ttcatcaagccaacacagagcctaa

SEQ ID NO: 1175873 - DNA, 25 bp, Homo sapien
gcaagaaatttaagattctatctag

SEQ ID NO: 1175874 - DNA, 25 bp, Homo sapien
cagagcctaaacttcaagaacagcc

SEQ ID NO: 1175875 - DNA, 25 bp, Homo sapien
acagtatgtacaggcaaactttcag

SEQ ID NO: 1175876 - DNA, 25 bp, Homo sapien
ggcagacacgtggaagaagctgaga

SEQ ID NO: 1175877 - DNA, 25 bp, Homo sapien
ccatggtggcagacacgtggaagaa

SEQ ID NO: 1175878 - DNA, 25 bp, Homo sapien
agacacgtggaagaagctgagagcc

SEQ ID NO: 1175879 - DNA, 25 bp, Homo sapien
ggccatggtggcagacacgtggaag

SEQ ID NO: 1175880 - DNA, 25 bp, Homo sapien
ttccagttccagtaacttttgataa

SEQ ID NO: 1175881 - DNA, 25 bp, Homo sapien
ctaatgtgcttttccagttccagta

SEQ ID NO: 1175882 - DNA, 25 bp, Homo sapien
tttttcagcagtgtcttcatctagg

SEQ ID NO: 1175883 - DNA, 25 bp, Homo sapien
tgtgcttttccagttccagtaactt

SEQ ID NO: 1175884 - DNA, 25 bp, Homo sapien
ccactgagcctggcctgattatctg

SEQ ID NO: 1175885 - DNA, 25 bp, Homo sapien
actgagcctggcctgattatctgtt

SEQ ID NO: 1175886 - DNA, 25 bp, Homo sapien
ctgagcctggcctgattatctgttt

SEQ ID NO: 1175887 - DNA, 25 bp, Homo sapien
gagcctggcctgattatctgttttt

SEQ ID NO: 1175888 - DNA, 25 bp, Homo sapien
ccagagtgtcattgtcagctctggt

SEQ ID NO: 1175889 - DNA, 25 bp, Homo sapien
tacagaaggtatgcaatgttccaga

SEQ ID NO: 1175890 - DNA, 25 bp, Homo sapien
agtagaaatccatgtaccccagaat

SEQ ID NO: 1175891 - DNA, 25 bp, Homo sapien
ttatccaactcagtagaaatccatg

SEQ ID NO: 1175892 - DNA, 25 bp, Homo sapien
cacagtcttggagatcattccaaaa

SEQ ID NO: 1175893 - DNA, 25 bp, Homo sapien
tacacatacacagtcttggagatca

SEQ ID NO: 1175894 - DNA, 25 bp, Homo sapien
ccaatctttttctcatatgcataca

SEQ ID NO: 1175895 - DNA, 25 bp, Homo sapien
acatacacagtcttggagatcattc

SEQ ID NO: 1175896 - DNA, 25 bp, Homo sapien
aataattttgatgtgataccactct

SEQ ID NO: 1175897 - DNA, 25 bp, Homo sapien
ccactctagagaataactaattaat

SEQ ID NO: 1175898 - DNA, 25 bp, Homo sapien
ttttgatgtgataccactctagaga

SEQ ID NO: 1175899 - DNA, 25 bp, Homo sapien
tgtgataccactctagagaataact

SEQ ID NO: 1175900 - DNA, 25 bp, Homo sapien
taggccccagttggcagaataatat

SEQ ID NO: 1175901 - DNA, 25 bp, Homo sapien
cttaggccccagttggcagaataat

SEQ ID NO: 1175902 - DNA, 25 bp, Homo sapien
ggccccagttggcagaataatataa

SEQ ID NO: 1175903 - DNA, 25 bp, Homo sapien
agcttaggccccagttggcagaata

SEQ ID NO: 1175904 - DNA, 25 bp, Homo sapien
taaagcaacaaagttccgactgcca

SEQ ID NO: 1175905 - DNA, 25 bp, Homo sapien
cactcagatagtgggcagtacttcc

SEQ ID NO: 1175906 - DNA, 25 bp, Homo sapien
ggcacccacatgaggattgttagga

SEQ ID NO: 1175907 - DNA, 25 bp, Homo sapien
gccaaagaaaggagcagtgcgtgcc

SEQ ID NO: 1175908 - DNA, 25 bp, Homo sapien
ggctggtcactaataaatttgcaaa

SEQ ID NO: 1175909 - DNA, 25 bp, Homo sapien
aaaatgggctggtcactaataaatt

SEQ ID NO: 1175910 - DNA, 25 bp, Homo sapien
tgggctggtcactaataaatttgca

SEQ ID NO: 1175911 - DNA, 25 bp, Homo sapien
aatgggctggtcactaataaatttg

SEQ ID NO: 1175912 - DNA, 25 bp, Homo sapien
cctgagattcacaacagataatgtg

SEQ ID NO: 1175913 - DNA, 25 bp, Homo sapien
tgactttagatttcaggcattacat

SEQ ID NO: 1175914 - DNA, 25 bp, Homo sapien
tacatatgaggaacctgagattcac

SEQ ID NO: 1175915 - DNA, 25 bp, Homo sapien
ccaaagacggtggacacagtggtgt

SEQ ID NO: 1175916 - DNA, 25 bp, Homo sapien
ccagaatatagaaggtgagagaaca

SEQ ID NO: 1175917 - DNA, 25 bp, Homo sapien
attttatgaggttgctattgccaaa

SEQ ID NO: 1175918 - DNA, 25 bp, Homo sapien
tctttcatgaacctagacacataaa

SEQ ID NO: 1175919 - DNA, 25 bp, Homo sapien
tatcatcattaacaattacatgcat

SEQ ID NO: 1175920 - DNA, 25 bp, Homo sapien
tttctatccgagactgacccagcgg

SEQ ID NO: 1175921 - DNA, 25 bp, Homo sapien
aaaccgagcacgcaagcaacagaga

SEQ ID NO: 1175922 - DNA, 25 bp, Homo sapien
gcagtttcccagtttatttctatcc

SEQ ID NO: 1175923 - DNA, 25 bp, Homo sapien
tcatcatcagcgtgataagcacgaa

SEQ ID NO: 1175924 - DNA, 25 bp, Homo sapien
ctgcatggcaaacacaggtgaagct

SEQ ID NO: 1175925 - DNA, 25 bp, Homo sapien
tgcatggcaaacacaggtgaagctc

SEQ ID NO: 1175926 - DNA, 25 bp, Homo sapien
tggcaaacacaggtgaagctcatca

SEQ ID NO: 1175927 - DNA, 25 bp, Homo sapien
catggcaaacacaggtgaagctcat

SEQ ID NO: 1175928 - DNA, 25 bp, Homo sapien
ggacagcttctgtattgctcatgtt

SEQ ID NO: 1175929 - DNA, 25 bp, Homo sapien
tggtgaccttgaccgtatggtgaga

SEQ ID NO: 1175930 - DNA, 25 bp, Homo sapien
ggttgccatccacctgcatcgtggt

SEQ ID NO: 1175931 - DNA, 25 bp, Homo sapien
gcactgactgcaggttgccatccac

SEQ ID NO: 1175932 - DNA, 25 bp, Homo sapien
catttcatgaggactgtccaggcat

SEQ ID NO: 1175933 - DNA, 25 bp, Homo sapien
tttcatgaggactgtccaggcatac

SEQ ID NO: 1175934 - DNA, 25 bp, Homo sapien
atttcatgaggactgtccaggcata

SEQ ID NO: 1175935 - DNA, 25 bp, Homo sapien
ggtcagcggttcttcagctatggag

SEQ ID NO: 1175936 - DNA, 25 bp, Homo sapien
tctgggtcagcggttcttcagctat

SEQ ID NO: 1175937 - DNA, 25 bp, Homo sapien
gtcagcggttcttcagctatggaga

SEQ ID NO: 1175938 - DNA, 25 bp, Homo sapien
ctgggtcagcggttcttcagctatg

SEQ ID NO: 1175939 - DNA, 25 bp, Homo sapien
caccaccggtgggaaggtagtcatc

SEQ ID NO: 1175940 - DNA, 25 bp, Homo sapien
cattcagtgaggtaggctccaccac

SEQ ID NO: 1175941 - DNA, 25 bp, Homo sapien
tcttataggcgagattaagcaaagg

SEQ ID NO: 1175942 - DNA, 25 bp, Homo sapien
aagtgatttatcttataggcgagat

SEQ ID NO: 1175943 - DNA, 25 bp, Homo sapien
cagtccagtgtagcagtgagattct

SEQ ID NO: 1175944 - DNA, 25 bp, Homo sapien
gagtcgttggggcacatcagccaca

SEQ ID NO: 1175945 - DNA, 25 bp, Homo sapien
caaacgtgtcactagacagtccagt

SEQ ID NO: 1175946 - DNA, 25 bp, Homo sapien
aaggagaggctacaaggtgagtcgt

SEQ ID NO: 1175947 - DNA, 25 bp, Homo sapien
gttcaggtatatgctgaagatgatt

SEQ ID NO: 1175948 - DNA, 25 bp, Homo sapien
attactaacagcagtttcagttcag

SEQ ID NO: 1175949 - DNA, 25 bp, Homo sapien
ctaacagcagtttcagttcaggtat

SEQ ID NO: 1175950 - DNA, 25 bp, Homo sapien
gggtcccttgcagccagactctgga

SEQ ID NO: 1175951 - DNA, 25 bp, Homo sapien
caataatatgatgggcaccagcagc

SEQ ID NO: 1175952 - DNA, 25 bp, Homo sapien
ttcatatgtaaggttggccaccact

SEQ ID NO: 1175953 - DNA, 25 bp, Homo sapien
atttcatatgtaaggttggccacca

SEQ ID NO: 1175954 - DNA, 25 bp, Homo sapien
tttcatatgtaaggttggccaccac

SEQ ID NO: 1175955 - DNA, 25 bp, Homo sapien
cattgtaaggtgttgctgtgaaaga

SEQ ID NO: 1175956 - DNA, 25 bp, Homo sapien
tctgctccattgtaaggtgttgctg

SEQ ID NO: 1175957 - DNA, 25 bp, Homo sapien
gctccattgtaaggtgttgctgtga

SEQ ID NO: 1175958 - DNA, 25 bp, Homo sapien
ttctgctccattgtaaggtgttgct

SEQ ID NO: 1175959 - DNA, 25 bp, Homo sapien
tggcacgtctgagctttgctgcccc

SEQ ID NO: 1175960 - DNA, 25 bp, Homo sapien
tgtagcagaagcactaacaactggt

SEQ ID NO: 1175961 - DNA, 25 bp, Homo sapien
cagaaaagctggcacgtctgagctt

SEQ ID NO: 1175962 - DNA, 25 bp, Homo sapien
caagtgggacttctcttaaacagaa

SEQ ID NO: 1175963 - DNA, 25 bp, Homo sapien
ctgccaaaccaagtgaccgatccag

SEQ ID NO: 1175964 - DNA, 25 bp, Homo sapien
caagagctaggactgccaaaccaag

SEQ ID NO: 1175965 - DNA, 25 bp, Homo sapien
ctaaaggacaagagctaggactgcc

SEQ ID NO: 1175966 - DNA, 25 bp, Homo sapien
aggacaagagctaggactgccaaac

SEQ ID NO: 1175967 - DNA, 25 bp, Homo sapien
agacagaataagggagagcgggcag

SEQ ID NO: 1175968 - DNA, 25 bp, Homo sapien
tttttaccatgaacactggagggac

SEQ ID NO: 1175969 - DNA, 25 bp, Homo sapien
ctgaagggtgtcacaatcctcagtg

SEQ ID NO: 1175970 - DNA, 25 bp, Homo sapien
ttttaccatgaacactggagggacc

SEQ ID NO: 1175971 - DNA, 25 bp, Homo sapien
gcaccctgaagggtgtcacaatcct

SEQ ID NO: 1175972 - DNA, 25 bp, Homo sapien
tttgatagtaggtggcgaccaaatt

SEQ ID NO: 1175973 - DNA, 25 bp, Homo sapien
gatagtaggtggcgaccaaatttaa

SEQ ID NO: 1175974 - DNA, 25 bp, Homo sapien
ctttgatagtaggtggcgaccaaat

SEQ ID NO: 1175975 - DNA, 25 bp, Homo sapien
ttgatagtaggtggcgaccaaattt

SEQ ID NO: 1175976 - DNA, 25 bp, Homo sapien
aaggccagatgcagccacataggag

SEQ ID NO: 1175977 - DNA, 25 bp, Homo sapien
catccactgctctggatggcgcagc

SEQ ID NO: 1175978 - DNA, 25 bp, Homo sapien
gatggcgcagcgtccacatgcacgt

SEQ ID NO: 1175979 - DNA, 25 bp, Homo sapien
cctttccaatgaggagccagggtct

SEQ ID NO: 1175980 - DNA, 25 bp, Homo sapien
ccctgtgagtacactgattgtcaga

SEQ ID NO: 1175981 - DNA, 25 bp, Homo sapien
tcaatatctccgtggtcaacgggaa

SEQ ID NO: 1175982 - DNA, 25 bp, Homo sapien
tgttggaccaaaggccatccctgtg

SEQ ID NO: 1175983 - DNA, 25 bp, Homo sapien
gcatgtggctcgatgacttccaaga

SEQ ID NO: 1175984 - DNA, 25 bp, Homo sapien
tcagtagaggctgcattgatcaaaa

SEQ ID NO: 1175985 - DNA, 25 bp, Homo sapien
ttgaactcttgatgggtaacagccc

SEQ ID NO: 1175986 - DNA, 25 bp, Homo sapien
ctacaaatccctatcagtagaggct

SEQ ID NO: 1175987 - DNA, 25 bp, Homo sapien
caaaatggtcagcttggccaagctg

SEQ ID NO: 1175988 - DNA, 25 bp, Homo sapien
aacctcagaggtcagtattctcccg

SEQ ID NO: 1175989 - DNA, 25 bp, Homo sapien
tgttcattgtctaggcaccaagcta

SEQ ID NO: 1175990 - DNA, 25 bp, Homo sapien
taacaattgtagtaccagggagcat

SEQ ID NO: 1175991 - DNA, 25 bp, Homo sapien
ggtaatgttacaagagccctcccta

SEQ ID NO: 1175992 - DNA, 25 bp, Homo sapien
gtggccgctgtttacatactgacca

SEQ ID NO: 1175993 - DNA, 25 bp, Homo sapien
tacctgcgcaactcctctagaaata

SEQ ID NO: 1175994 - DNA, 25 bp, Homo sapien
tactgaccactctgcatatttgaag

SEQ ID NO: 1175995 - DNA, 25 bp, Homo sapien
catatttgaagatacctacctgcgc

SEQ ID NO: 1175996 - DNA, 25 bp, Homo sapien
ggtgctccaattcaccaacatagtg

SEQ ID NO: 1175997 - DNA, 25 bp, Homo sapien
tttccatgcgagagtcttgtttcac

SEQ ID NO: 1175998 - DNA, 25 bp, Homo sapien
caacatagtgacctttcgagcttcc

SEQ ID NO: 1175999 - DNA, 25 bp, Homo sapien
ttcactggcctccattcaagaatgg

SEQ ID NO: 1176000 - DNA, 25 bp, Homo sapien
ttctccatccacgatccttggtgac

SEQ ID NO: 1176001 - DNA, 25 bp, Homo sapien
ctttggtttagtgcaggtccctgct

SEQ ID NO: 1176002 - DNA, 25 bp, Homo sapien
cccgctctggagtgaatgtgctgtt

SEQ ID NO: 1176003 - DNA, 25 bp, Homo sapien
gggccctctcagataatcccagtgt

SEQ ID NO: 1176004 - DNA, 25 bp, Homo sapien
aagaagccttctatacggagccaac

SEQ ID NO: 1176005 - DNA, 25 bp, Homo sapien
tgcttttggtcctcctgggcgttgt

SEQ ID NO: 1176006 - DNA, 25 bp, Homo sapien
taattctatcagctttggcagtaag

SEQ ID NO: 1176007 - DNA, 25 bp, Homo sapien
gcgttgtttctgctaatcgtagaca

SEQ ID NO: 1176008 - DNA, 25 bp, Homo sapien
ccatgttcacgggagcctttgcaga

SEQ ID NO: 1176009 - DNA, 25 bp, Homo sapien
cagagagaaaaatccgcatatgggc

SEQ ID NO: 1176010 - DNA, 25 bp, Homo sapien
ctacagtagaacaagagccgtgcca

SEQ ID NO: 1176011 - DNA, 25 bp, Homo sapien
gcagatggtctgtccgtatgctaca

SEQ ID NO: 1176012 - DNA, 25 bp, Homo sapien
cacctaaggctactagtgactgagt

SEQ ID NO: 1176013 - DNA, 25 bp, Homo sapien
tgagttcataagcactgaaatggct

SEQ ID NO: 1176014 - DNA, 25 bp, Homo sapien
cgaagacccactgatatgccaacca

SEQ ID NO: 1176015 - DNA, 25 bp, Homo sapien
ccaaatgtgactgctatatatgcga

SEQ ID NO: 1176016 - DNA, 25 bp, Homo sapien
gagaagttccaacactgatcaccag

SEQ ID NO: 1176017 - DNA, 25 bp, Homo sapien
tgaggagctagccaaaagacagctg

SEQ ID NO: 1176018 - DNA, 25 bp, Homo sapien
tttcagcagttgtgtgaggttgaga

SEQ ID NO: 1176019 - DNA, 25 bp, Homo sapien
gctcattgagataagctcaactttc

SEQ ID NO: 1176020 - DNA, 25 bp, Homo sapien
agcccctttgcgtagaggaaagcca

SEQ ID NO: 1176021 - DNA, 25 bp, Homo sapien
gtagaggaaagccatcaggtgtctg

SEQ ID NO: 1176022 - DNA, 25 bp, Homo sapien
tgtctgctgattgaagcgaactaga

SEQ ID NO: 1176023 - DNA, 25 bp, Homo sapien
agacttgaagttgcgggcagcagct

SEQ ID NO: 1176024 - DNA, 25 bp, Homo sapien
tgttattgaatcacagtagattttc

SEQ ID NO: 1176025 - DNA, 25 bp, Homo sapien
atattcactgttatctctggataag

SEQ ID NO: 1176026 - DNA, 25 bp, Homo sapien
tgtgcactgttattgaatcacagta

SEQ ID NO: 1176027 - DNA, 25 bp, Homo sapien
ctaatgtgcactgttattgaatcac

SEQ ID NO: 1176028 - DNA, 25 bp, Homo sapien
ctgcttaatgagacccctaatacct

SEQ ID NO: 1176029 - DNA, 25 bp, Homo sapien
agtcttctcgccacagcacgcacat

SEQ ID NO: 1176030 - DNA, 25 bp, Homo sapien
gagacccctaatacctcatagagat

SEQ ID NO: 1176031 - DNA, 25 bp, Homo sapien
tacctcatagagattccagtcttct

SEQ ID NO: 1176032 - DNA, 25 bp, Homo sapien
atactggggcctatgactcctctgc

SEQ ID NO: 1176033 - DNA, 25 bp, Homo sapien
catttgtagtaatcttacctccttc

SEQ ID NO: 1176034 - DNA, 25 bp, Homo sapien
actatttgccaaacaccatactggg

SEQ ID NO: 1176035 - DNA, 25 bp, Homo sapien
cagttaaactagtaggcaaaggaca

SEQ ID NO: 1176036 - DNA, 25 bp, Homo sapien
tttatccaaaggcaagtattcacat

SEQ ID NO: 1176037 - DNA, 25 bp, Homo sapien
tcgtacttccattacgttgttggaa

SEQ ID NO: 1176038 - DNA, 25 bp, Homo sapien
gtattcacatcgtacttccattacg

SEQ ID NO: 1176039 - DNA, 25 bp, Homo sapien
ccaaaggcaagtattcacatcgtac

SEQ ID NO: 1176040 - DNA, 25 bp, Homo sapien
gattgtgtttgaggaggcgaggact

SEQ ID NO: 1176041 - DNA, 25 bp, Homo sapien
agattgtgtttgaggaggcgaggac

SEQ ID NO: 1176042 - DNA, 25 bp, Homo sapien
cacgcagtgatttgcggaagttgcc

SEQ ID NO: 1176043 - DNA, 25 bp, Homo sapien
caggatcatcgtctccacgcagtga

SEQ ID NO: 1176044 - DNA, 25 bp, Homo sapien
gatcctcacgatttccaaaagggag

SEQ ID NO: 1176045 - DNA, 25 bp, Homo sapien
tacatggtccaagatctgatcctca

SEQ ID NO: 1176046 - DNA, 25 bp, Homo sapien
tccttctgaaaagtagggatatggg

SEQ ID NO: 1176047 - DNA, 25 bp, Homo sapien
taagtgaacgagcagagaaaatcct

SEQ ID NO: 1176048 - DNA, 25 bp, Homo sapien
tccaccaatgtcagaggtttagaat

SEQ ID NO: 1176049 - DNA, 25 bp, Homo sapien
gactgacgcatcagcaatgttaagt

SEQ ID NO: 1176050 - DNA, 25 bp, Homo sapien
aatcctctgagcgtcttcctgctaa

SEQ ID NO: 1176051 - DNA, 25 bp, Homo sapien
tcggctttgagcgtactttgcctct

SEQ ID NO: 1176052 - DNA, 25 bp, Homo sapien
taacagcttggaattcgcaagcagg

SEQ ID NO: 1176053 - DNA, 25 bp, Homo sapien
tacgaccgtccagccaatcagacga

SEQ ID NO: 1176054 - DNA, 25 bp, Homo sapien
ctcctcaagcaagaagccggcagac

SEQ ID NO: 1176055 - DNA, 25 bp, Homo sapien
aagaagccggcagacctgcaagccc

SEQ ID NO: 1176056 - DNA, 25 bp, Homo sapien
ggcagacctgcaagccctttgcaca

SEQ ID NO: 1176057 - DNA, 25 bp, Homo sapien
ctcaagcaagaagccggcagacctg

SEQ ID NO: 1176058 - DNA, 25 bp, Homo sapien
caaccgaatatctttggtatcttca

SEQ ID NO: 1176059 - DNA, 25 bp, Homo sapien
tatatgcccgtcattttgaccaacc

SEQ ID NO: 1176060 - DNA, 25 bp, Homo sapien
gagaagcctttatatgcccgtcatt

SEQ ID NO: 1176061 - DNA, 25 bp, Homo sapien
cattttgaccaaccgaatatctttg

SEQ ID NO: 1176062 - DNA, 25 bp, Homo sapien
tgtgttcacaggaatcagatttttg

SEQ ID NO: 1176063 - DNA, 25 bp, Homo sapien
cctagccgatgtttcatatcttttg

SEQ ID NO: 1176064 - DNA, 25 bp, Homo sapien
aagaattgtgttcacaggaatcaga

SEQ ID NO: 1176065 - DNA, 25 bp, Homo sapien
tttttgcagcaggaaacctagccga

SEQ ID NO: 1176066 - DNA, 25 bp, Homo sapien
gggcaagaaatctaagatcctgaat

SEQ ID NO: 1176067 - DNA, 25 bp, Homo sapien
aatctggcttaactaggagcacaag

SEQ ID NO: 1176068 - DNA, 25 bp, Homo sapien
cagaataattggaatgccatggtaa

SEQ ID NO: 1176069 - DNA, 25 bp, Homo sapien
tatgatctccatgaaaatggaggct

SEQ ID NO: 1176070 - DNA, 25 bp, Homo sapien
tcatgactaatcaggttttccagtg

SEQ ID NO: 1176071 - DNA, 25 bp, Homo sapien
ttttccagtgattcagcccatttct

SEQ ID NO: 1176072 - DNA, 25 bp, Homo sapien
tcaggttttccagtgattcagccca

SEQ ID NO: 1176073 - DNA, 25 bp, Homo sapien
ggttttccagtgattcagcccattt

SEQ ID NO: 1176074 - DNA, 25 bp, Homo sapien
cactatattcagacttcaagaaagc

SEQ ID NO: 1176075 - DNA, 25 bp, Homo sapien
cagctgatccagaagtcaatattct

SEQ ID NO: 1176076 - DNA, 25 bp, Homo sapien
ggttgcctggactgagatgaattca

SEQ ID NO: 1176077 - DNA, 25 bp, Homo sapien
ggacttagtttagatggtgatttga

SEQ ID NO: 1176078 - DNA, 25 bp, Homo sapien
cctccttggcacatgtgagagagta

SEQ ID NO: 1176079 - DNA, 25 bp, Homo sapien
cttcactaagatccagagagttctc

SEQ ID NO: 1176080 - DNA, 25 bp, Homo sapien
catgcagggaggttatggtaagcca

SEQ ID NO: 1176081 - DNA, 25 bp, Homo sapien
gagatatgtatatagcaattgccct

SEQ ID NO: 1176082 - DNA, 25 bp, Homo sapien
tgctttgtagtgacttgtaagtggc

SEQ ID NO: 1176083 - DNA, 25 bp, Homo sapien
ctgttgaggatgcaagcctgtatgc

SEQ ID NO: 1176084 - DNA, 25 bp, Homo sapien
ttgaggatgcaagcctgtatgcttt

SEQ ID NO: 1176085 - DNA, 25 bp, Homo sapien
tgacttgtaagtggcagtgcaccct

SEQ ID NO: 1176086 - DNA, 25 bp, Homo sapien
ggccaaggcttcattagacctatat

SEQ ID NO: 1176087 - DNA, 25 bp, Homo sapien
ccaaggcttcattagacctatatcc

SEQ ID NO: 1176088 - DNA, 25 bp, Homo sapien
aaaggccaaggcttcattagaccta

SEQ ID NO: 1176089 - DNA, 25 bp, Homo sapien
caaaggccaaggcttcattagacct

SEQ ID NO: 1176090 - DNA, 25 bp, Homo sapien
tagaatcgagacttgaggaagcggc

SEQ ID NO: 1176091 - DNA, 25 bp, Homo sapien
aaagcaggttattgtaggctctagc

SEQ ID NO: 1176092 - DNA, 25 bp, Homo sapien
ttttctgccccacagctggacgggt

SEQ ID NO: 1176093 - DNA, 25 bp, Homo sapien
gaagcggcggtaggaatccttctcc

SEQ ID NO: 1176094 - DNA, 25 bp, Homo sapien
ggaggaaactgccaacaatctttga

SEQ ID NO: 1176095 - DNA, 25 bp, Homo sapien
gaactccagggatattaagggcaag

SEQ ID NO: 1176096 - DNA, 25 bp, Homo sapien
aacttacggcaggtgttgctggcaa

SEQ ID NO: 1176097 - DNA, 25 bp, Homo sapien
ggaggctgtcagtggtcaaatcaag

SEQ ID NO: 1176098 - DNA, 25 bp, Homo sapien
agtgagtatagtaaatcctttctct

SEQ ID NO: 1176099 - DNA, 25 bp, Homo sapien
actgactgaacatatatcatttgga

SEQ ID NO: 1176100 - DNA, 25 bp, Homo sapien
catttggatcctgcaacattcagtg

SEQ ID NO: 1176101 - DNA, 25 bp, Homo sapien
gccatcactgttagaaactgactga

SEQ ID NO: 1176102 - DNA, 25 bp, Homo sapien
gcaactagcaactcatcttcggaag

SEQ ID NO: 1176103 - DNA, 25 bp, Homo sapien
actatgtgactcatgcttctggata

SEQ ID NO: 1176104 - DNA, 25 bp, Homo sapien
taacatatttgggtccaacttcaat

SEQ ID NO: 1176105 - DNA, 25 bp, Homo sapien
gctaaggcatagacaaaacaaagag

SEQ ID NO: 1176106 - DNA, 25 bp, Homo sapien
gcagagagtcacaggccacggcaac

SEQ ID NO: 1176107 - DNA, 25 bp, Homo sapien
agcagagagtcacaggccacggcaa

SEQ ID NO: 1176108 - DNA, 25 bp, Homo sapien
gagcagctcagcttggttgaaactg

SEQ ID NO: 1176109 - DNA, 25 bp, Homo sapien
tgttctccctagcaggccattttcc

SEQ ID NO: 1176110 - DNA, 25 bp, Homo sapien
tgatgtgtgctctgtacacaagcca

SEQ ID NO: 1176111 - DNA, 25 bp, Homo sapien
gacctatgaacgtaatccctttgct

SEQ ID NO: 1176112 - DNA, 25 bp, Homo sapien
gtactcaaattctctactgtatgaa

SEQ ID NO: 1176113 - DNA, 25 bp, Homo sapien
tctccataccccgtgtactcaaatt

SEQ ID NO: 1176114 - DNA, 25 bp, Homo sapien
gtgccctactctccataccccgtgt

SEQ ID NO: 1176115 - DNA, 25 bp, Homo sapien
taccccgtgtactcaaattctctac

SEQ ID NO: 1176116 - DNA, 25 bp, Homo sapien
ttacatcaggacaaagagacagact

SEQ ID NO: 1176117 - DNA, 25 bp, Homo sapien
tgtgaaaacgtaactactgttggga

SEQ ID NO: 1176118 - DNA, 25 bp, Homo sapien
gagacagactattaactccacagtt

SEQ ID NO: 1176119 - DNA, 25 bp, Homo sapien
aaagcagtgtgaatagccttcaagc

SEQ ID NO: 1176120 - DNA, 25 bp, Homo sapien
gcaagaaccctgttgtactggcgtt

SEQ ID NO: 1176121 - DNA, 25 bp, Homo sapien
ctctccacgttcccttgagtaaatg

SEQ ID NO: 1176122 - DNA, 25 bp, Homo sapien
gtaaatgtctgggaaagcatgaagc

SEQ ID NO: 1176123 - DNA, 25 bp, Homo sapien
ttgatgcaagaaccctgttgtactg

SEQ ID NO: 1176124 - DNA, 25 bp, Homo sapien
agaagggcttttacctacagggcag

SEQ ID NO: 1176125 - DNA, 25 bp, Homo sapien
tcatcaagcagtccagagctaggcc

SEQ ID NO: 1176126 - DNA, 25 bp, Homo sapien
gctattacagatctcacctagaggg

SEQ ID NO: 1176127 - DNA, 25 bp, Homo sapien
gaaagtgggtagacctctcagcgga

SEQ ID NO: 1176128 - DNA, 25 bp, Homo sapien
tagaggccttctaggtgagacactt

SEQ ID NO: 1176129 - DNA, 25 bp, Homo sapien
tatttatgctgctagactgtgggtc

SEQ ID NO: 1176130 - DNA, 25 bp, Homo sapien
ttggaccaccttcatgttagttggg

SEQ ID NO: 1176131 - DNA, 25 bp, Homo sapien
ttgctccattggagtagtctcccac

SEQ ID NO: 1176132 - DNA, 25 bp, Homo sapien
gagggaatgtgaacataaggtgttc

SEQ ID NO: 1176133 - DNA, 25 bp, Homo sapien
ttatccagttcacaagaaaaggagg

SEQ ID NO: 1176134 - DNA, 25 bp, Homo sapien
ggtctgtggcactatgagggaatgt

SEQ ID NO: 1176135 - DNA, 25 bp, Homo sapien
tttgaaggtgatatcaataagggaa

SEQ ID NO: 1176136 - DNA, 25 bp, Homo sapien
agctgggtgagccgaagagtgtgca

SEQ ID NO: 1176137 - DNA, 25 bp, Homo sapien
ttttcccggacaatatcagctccac

SEQ ID NO: 1176138 - DNA, 25 bp, Homo sapien
cggacaatatcagctccacttgaca

SEQ ID NO: 1176139 - DNA, 25 bp, Homo sapien
taatgcaagagttcgagctgggtga

SEQ ID NO: 1176140 - DNA, 25 bp, Homo sapien
gcaagtcctgcatatggttctctgg

SEQ ID NO: 1176141 - DNA, 25 bp, Homo sapien
tctctgggaacttctccagtgctca

SEQ ID NO: 1176142 - DNA, 25 bp, Homo sapien
gcatatggttctctgggaacttctc

SEQ ID NO: 1176143 - DNA, 25 bp, Homo sapien
cctgggcagcaagtcctgcatatgg

SEQ ID NO: 1176144 - DNA, 25 bp, Homo sapien
ccagcaggttcggtgtctgatgaga

SEQ ID NO: 1176145 - DNA, 25 bp, Homo sapien
agttttgcaagctgagaagttcaag

SEQ ID NO: 1176146 - DNA, 25 bp, Homo sapien
tatttctggcagttttgcaagctga

SEQ ID NO: 1176147 - DNA, 25 bp, Homo sapien
tcggtgtctgatgagagctgctctc

SEQ ID NO: 1176148 - DNA, 25 bp, Homo sapien
tacaaatggagttctgcacccacaa

SEQ ID NO: 1176149 - DNA, 25 bp, Homo sapien
gcatagccaacgtagagacctgact

SEQ ID NO: 1176150 - DNA, 25 bp, Homo sapien
catgcagtttgccttgggagaaaac

SEQ ID NO: 1176151 - DNA, 25 bp, Homo sapien
tgtatacagtagagccaggcatagc

SEQ ID NO: 1176152 - DNA, 25 bp, Homo sapien
cttaatacgttttcttagaatcatc

SEQ ID NO: 1176153 - DNA, 25 bp, Homo sapien
ctcacattttgttcccttaatacgt

SEQ ID NO: 1176154 - DNA, 25 bp, Homo sapien
ccttaatacgttttcttagaatcat

SEQ ID NO: 1176155 - DNA, 25 bp, Homo sapien
gcccccagactcctcacattttgtt

SEQ ID NO: 1176156 - DNA, 25 bp, Homo sapien
gtttagatacagtgaggccatcccc

SEQ ID NO: 1176157 - DNA, 25 bp, Homo sapien
aagacacagatataggagggccagt

SEQ ID NO: 1176158 - DNA, 25 bp, Homo sapien
tgtaatcacccagactcaaagagcc

SEQ ID NO: 1176159 - DNA, 25 bp, Homo sapien
taatggccactactgaccttgagga

SEQ ID NO: 1176160 - DNA, 25 bp, Homo sapien
agagtaaaggccagattgttttggt

SEQ ID NO: 1176161 - DNA, 25 bp, Homo sapien
ccagagtaaaggccagattgttttg

SEQ ID NO: 1176162 - DNA, 25 bp, Homo sapien
acccagagtaaaggccagattgttt

SEQ ID NO: 1176163 - DNA, 25 bp, Homo sapien
aaacccagagtaaaggccagattgt

SEQ ID NO: 1176164 - DNA, 25 bp, Homo sapien
tcagggaccgttcttcaacaatcag

SEQ ID NO: 1176165 - DNA, 25 bp, Homo sapien
gtctttcagggaccgttcttcaaca

SEQ ID NO: 1176166 - DNA, 25 bp, Homo sapien
ggaccgttcttcaacaatcagtgtt

SEQ ID NO: 1176167 - DNA, 25 bp, Homo sapien
atgtctttcagggaccgttcttcaa

SEQ ID NO: 1176168 - DNA, 25 bp, Homo sapien
caacatcaatctgtagtgtaataat

SEQ ID NO: 1176169 - DNA, 25 bp, Homo sapien
cgtcttcatctgagtaggagtggca

SEQ ID NO: 1176170 - DNA, 25 bp, Homo sapien
tcctggttgactgagacatcgtctt

SEQ ID NO: 1176171 - DNA, 25 bp, Homo sapien
gcaaaatctacgtttccaggcttta

SEQ ID NO: 1176172 - DNA, 25 bp, Homo sapien
gaatgcgtatctgccaaatgattaa

SEQ ID NO: 1176173 - DNA, 25 bp, Homo sapien
acaggcgtattcatcagcttcttcc

SEQ ID NO: 1176174 - DNA, 25 bp, Homo sapien
tggatgaatgcgtatctgccaaatg

SEQ ID NO: 1176175 - DNA, 25 bp, Homo sapien
ttaataaatcatcacaggcgtattc

SEQ ID NO: 1176176 - DNA, 25 bp, Homo sapien
tacagtcagtatgttacctcagtac

SEQ ID NO: 1176177 - DNA, 25 bp, Homo sapien
gtcagtatgttacctcagtacctca

SEQ ID NO: 1176178 - DNA, 25 bp, Homo sapien
aggatacagtcagtatgttacctca

SEQ ID NO: 1176179 - DNA, 25 bp, Homo sapien
cagtcagtatgttacctcagtacct

SEQ ID NO: 1176180 - DNA, 25 bp, Homo sapien
ttctccagctcttacttctgaacct

SEQ ID NO: 1176181 - DNA, 25 bp, Homo sapien
gctcttacttctgaaccttgccttc

SEQ ID NO: 1176182 - DNA, 25 bp, Homo sapien
tgcatgtggccctctttctccagct

SEQ ID NO: 1176183 - DNA, 25 bp, Homo sapien
cagggttctattttggaatttgcat

SEQ ID NO: 1176184 - DNA, 25 bp, Homo sapien
aattctatatccctgtattacatac

SEQ ID NO: 1176185 - DNA, 25 bp, Homo sapien
gtattacatacaacactggaaatgg

SEQ ID NO: 1176186 - DNA, 25 bp, Homo sapien
tcattgcttatgatcataggggagc

SEQ ID NO: 1176187 - DNA, 25 bp, Homo sapien
catgcagtgttatggcatcatgaga

SEQ ID NO: 1176188 - DNA, 25 bp, Homo sapien
gaagtcatactctttaaagcactgg

SEQ ID NO: 1176189 - DNA, 25 bp, Homo sapien
gcactggcgataatttcaataaact

SEQ ID NO: 1176190 - DNA, 25 bp, Homo sapien
cccctgctgagtctgtaaagtcctt

SEQ ID NO: 1176191 - DNA, 25 bp, Homo sapien
gaccttgggttagagtgtgcgctaa

SEQ ID NO: 1176192 - DNA, 25 bp, Homo sapien
tagtgcacccattacattatggtaa

SEQ ID NO: 1176193 - DNA, 25 bp, Homo sapien
acatgaatacattatatagtggtga

SEQ ID NO: 1176194 - DNA, 25 bp, Homo sapien
ttacatgaatacattatatagtggt

SEQ ID NO: 1176195 - DNA, 25 bp, Homo sapien
gtgcacccattacattatggtaatg

SEQ ID NO: 1176196 - DNA, 25 bp, Homo sapien
ttggatctaaatttgtaggttctac

SEQ ID NO: 1176197 - DNA, 25 bp, Homo sapien
aaatttgtaggttctacagtatcca

SEQ ID NO: 1176198 - DNA, 25 bp, Homo sapien
cagtacttttttggatctaaatttg

SEQ ID NO: 1176199 - DNA, 25 bp, Homo sapien
ttgtaggttctacagtatccattac

SEQ ID NO: 1176200 - DNA, 25 bp, Homo sapien
tgaactcccttaagtggctgaagat

SEQ ID NO: 1176201 - DNA, 25 bp, Homo sapien
ttgtcataggtatcctccctgggaa

SEQ ID NO: 1176202 - DNA, 25 bp, Homo sapien
ccctgggaatctcatcagtgaagga

SEQ ID NO: 1176203 - DNA, 25 bp, Homo sapien
tatttcaaactgagggcacttggga

SEQ ID NO: 1176204 - DNA, 25 bp, Homo sapien
tcaaaaatcagcaaacgtcaaccgt

SEQ ID NO: 1176205 - DNA, 25 bp, Homo sapien
ttcaaacttgccgcctcctactgga

SEQ ID NO: 1176206 - DNA, 25 bp, Homo sapien
acagtgccggccgccgacaggaaga

SEQ ID NO: 1176207 - DNA, 25 bp, Homo sapien
gggagcagctacaagcaaagtcaaa

SEQ ID NO: 1176208 - DNA, 25 bp, Homo sapien
tccttcctccgtcctctcgcgctca

SEQ ID NO: 1176209 - DNA, 25 bp, Homo sapien
tgagcacgacgaaaacaccgccagg

SEQ ID NO: 1176210 - DNA, 25 bp, Homo sapien
ccaggcccagcgtcccggcacctgc

SEQ ID NO: 1176211 - DNA, 25 bp, Homo sapien
ctcccaccgctgagcacgacgaaaa

SEQ ID NO: 1176212 - DNA, 25 bp, Homo sapien
ttaacgagagatgaagacactttcc

SEQ ID NO: 1176213 - DNA, 25 bp, Homo sapien
caaatttttctgctaggcttctaaa

SEQ ID NO: 1176214 - DNA, 25 bp, Homo sapien
gaaatttctgctccaagttagtctc

SEQ ID NO: 1176215 - DNA, 25 bp, Homo sapien
gacactttccaactacatagtttga

SEQ ID NO: 1176216 - DNA, 25 bp, Homo sapien
gatttggataaagatcattcttggt

SEQ ID NO: 1176217 - DNA, 25 bp, Homo sapien
tatgaatcacaatctcagctacatt

SEQ ID NO: 1176218 - DNA, 25 bp, Homo sapien
gataaagatcattcttggtgaggtt

SEQ ID NO: 1176219 - DNA, 25 bp, Homo sapien
cagctcctgttaagatcttattgcg

SEQ ID NO: 1176220 - DNA, 25 bp, Homo sapien
cacatgcaaacgtaaccacctttta

SEQ ID NO: 1176221 - DNA, 25 bp, Homo sapien
ccattatccacatgcaaacgtaacc

SEQ ID NO: 1176222 - DNA, 25 bp, Homo sapien
cattatccacatgcaaacgtaacca

SEQ ID NO: 1176223 - DNA, 25 bp, Homo sapien
aaaatgttccagtcgaattccatat

SEQ ID NO: 1176224 - DNA, 25 bp, Homo sapien
catatactatttgtaaggctctcat

SEQ ID NO: 1176225 - DNA, 25 bp, Homo sapien
ccagtcgaattccatatactatttg

SEQ ID NO: 1176226 - DNA, 25 bp, Homo sapien
ttgtaaggctctcatgtagatcatg

SEQ ID NO: 1176227 - DNA, 25 bp, Homo sapien
aattgctgaatggtaagaagccttc

SEQ ID NO: 1176228 - DNA, 25 bp, Homo sapien
tgtggatacatgacttcagagttca

SEQ ID NO: 1176229 - DNA, 25 bp, Homo sapien
atgtggatacatgacttcagagttc

SEQ ID NO: 1176230 - DNA, 25 bp, Homo sapien
agatgagtaactaaattgctgaatg

SEQ ID NO: 1176231 - DNA, 25 bp, Homo sapien
tccttaccaaagaaaaccatgtcat

SEQ ID NO: 1176232 - DNA, 25 bp, Homo sapien
ggacgaagccagaattctactataa

SEQ ID NO: 1176233 - DNA, 25 bp, Homo sapien
tttcttaaggtcagtggacgaagcc

SEQ ID NO: 1176234 - DNA, 25 bp, Homo sapien
gaggcagttctgtttgatgacagtc

SEQ ID NO: 1176235 - DNA, 25 bp, Homo sapien
agtctcaaagtcattcacccggcag

SEQ ID NO: 1176236 - DNA, 25 bp, Homo sapien
caaagtcattcacccggcagatagg

SEQ ID NO: 1176237 - DNA, 25 bp, Homo sapien
tcagcagtctcaaagtcattcaccc

SEQ ID NO: 1176238 - DNA, 25 bp, Homo sapien
ttggacatagaatatcagcagtctc

SEQ ID NO: 1176239 - DNA, 25 bp, Homo sapien
ctgatggaaaggtgaaatggtagat

SEQ ID NO: 1176240 - DNA, 25 bp, Homo sapien
atggaaaggtgaaatggtagatcga

SEQ ID NO: 1176241 - DNA, 25 bp, Homo sapien
aaggtgaaatggtagatcgaagcca

SEQ ID NO: 1176242 - DNA, 25 bp, Homo sapien
gaaaggtgaaatggtagatcgaagc

SEQ ID NO: 1176243 - DNA, 25 bp, Homo sapien
agtgaataaagttgataatgccact

SEQ ID NO: 1176244 - DNA, 25 bp, Homo sapien
aataaagttgataatgccacttaaa

SEQ ID NO: 1176245 - DNA, 25 bp, Homo sapien
gaagtgaataaagttgataatgcca

SEQ ID NO: 1176246 - DNA, 25 bp, Homo sapien
tgaataaagttgataatgccactta

SEQ ID NO: 1176247 - DNA, 25 bp, Homo sapien
atattgccaaagaaattccatatac

SEQ ID NO: 1176248 - DNA, 25 bp, Homo sapien
cattaatgcctcctggtgtgcggcg

SEQ ID NO: 1176249 - DNA, 25 bp, Homo sapien
actgttgcattttgtccgcagagga

SEQ ID NO: 1176250 - DNA, 25 bp, Homo sapien
ccagtttcattaatgcctcctggtg

SEQ ID NO: 1176251 - DNA, 25 bp, Homo sapien
ctggtgtgcggcgtttaactgttgc

SEQ ID NO: 1176252 - DNA, 25 bp, Homo sapien
aggctaaaatgaaatacctgtcctc

SEQ ID NO: 1176253 - DNA, 25 bp, Homo sapien
aaggctaaaatgaaatacctgtcct

SEQ ID NO: 1176254 - DNA, 25 bp, Homo sapien
ggctaaaatgaaatacctgtcctca

SEQ ID NO: 1176255 - DNA, 25 bp, Homo sapien
tttagtgattgttgtagctcctgaa

SEQ ID NO: 1176256 - DNA, 25 bp, Homo sapien
ttagtgattgttgtagctcctgaat

SEQ ID NO: 1176257 - DNA, 25 bp, Homo sapien
ttaaatgtgttagatcagatattct

SEQ ID NO: 1176258 - DNA, 25 bp, Homo sapien
catttagatttagccactcactgct

SEQ ID NO: 1176259 - DNA, 25 bp, Homo sapien
aaaacatttagatttagccactcac

SEQ ID NO: 1176260 - DNA, 25 bp, Homo sapien
taagaaaggagttaaatgtgttaga

SEQ ID NO: 1176261 - DNA, 25 bp, Homo sapien
tgaaatatttgacttcttttgggaa

SEQ ID NO: 1176262 - DNA, 25 bp, Homo sapien
ttttgggaatttccctcttgcagca

SEQ ID NO: 1176263 - DNA, 25 bp, Homo sapien
caaacgcttggttttctctgaaata

SEQ ID NO: 1176264 - DNA, 25 bp, Homo sapien
ttcttttgggaatttccctcttgca

SEQ ID NO: 1176265 - DNA, 25 bp, Homo sapien
aggaccgtcctttctatgtacacaa

SEQ ID NO: 1176266 - DNA, 25 bp, Homo sapien
aaccataaaggccgtatctataaat

SEQ ID NO: 1176267 - DNA, 25 bp, Homo sapien
gagctaaaatccctaattcatggag

SEQ ID NO: 1176268 - DNA, 25 bp, Homo sapien
aaaaataatctgacgaataggaccg

SEQ ID NO: 1176269 - DNA, 25 bp, Homo sapien
tttaagcttctggaccgtatctttc

SEQ ID NO: 1176270 - DNA, 25 bp, Homo sapien
gcttctggaccgtatctttcatttt

SEQ ID NO: 1176271 - DNA, 25 bp, Homo sapien
ttaagcttctggaccgtatctttca

SEQ ID NO: 1176272 - DNA, 25 bp, Homo sapien
taagcttctggaccgtatctttcat

SEQ ID NO: 1176273 - DNA, 25 bp, Homo sapien
aagctacagattagaaataaggtca

SEQ ID NO: 1176274 - DNA, 25 bp, Homo sapien
aaaagcctcgaaaaattgttgcata

SEQ ID NO: 1176275 - DNA, 25 bp, Homo sapien
aagtaattaaatctcaccacccagc

SEQ ID NO: 1176276 - DNA, 25 bp, Homo sapien
tattttccccatattcactctagag

SEQ ID NO: 1176277 - DNA, 25 bp, Homo sapien
ctcctttaagatactggctaatttt

SEQ ID NO: 1176278 - DNA, 25 bp, Homo sapien
tgcacttccaactgacatgaaggca

SEQ ID NO: 1176279 - DNA, 25 bp, Homo sapien
ggcagtcaactgagtctccatagat

SEQ ID NO: 1176280 - DNA, 25 bp, Homo sapien
ccaactgacatgaaggcaggcagtc

SEQ ID NO: 1176281 - DNA, 25 bp, Homo sapien
caattactgtgcgtttgtattgctt

SEQ ID NO: 1176282 - DNA, 25 bp, Homo sapien
tcttcacaatcatcagtcttttgaa

SEQ ID NO: 1176283 - DNA, 25 bp, Homo sapien
ttactgtgcgtttgtattgcttaac

SEQ ID NO: 1176284 - DNA, 25 bp, Homo sapien
ttcacaatcatcagtcttttgaacg

SEQ ID NO: 1176285 - DNA, 25 bp, Homo sapien
tcttgattaattgtggttactcgtt

SEQ ID NO: 1176286 - DNA, 25 bp, Homo sapien
gattaattgtggttactcgttcata

SEQ ID NO: 1176287 - DNA, 25 bp, Homo sapien
attgtggttactcgttcatagacag

SEQ ID NO: 1176288 - DNA, 25 bp, Homo sapien
tcgttcatagacagcacctcttttt

SEQ ID NO: 1176289 - DNA, 25 bp, Homo sapien
cttgtagagttgtttgaataaactg

SEQ ID NO: 1176290 - DNA, 25 bp, Homo sapien
tgtagagttgtttgaataaactgat

SEQ ID NO: 1176291 - DNA, 25 bp, Homo sapien
gtagagttgtttgaataaactgatc

SEQ ID NO: 1176292 - DNA, 25 bp, Homo sapien
ttgtagagttgtttgaataaactga

SEQ ID NO: 1176293 - DNA, 25 bp, Homo sapien
tcttagcataggagtcctctgctgc

SEQ ID NO: 1176294 - DNA, 25 bp, Homo sapien
cagttcagctgtcttctcatctatc

SEQ ID NO: 1176295 - DNA, 25 bp, Homo sapien
tgctgccttttcaataccgtcgtgg

SEQ ID NO: 1176296 - DNA, 25 bp, Homo sapien
cgtggtatttctccaaagcagtttt

SEQ ID NO: 1176297 - DNA, 25 bp, Homo sapien
gacatgaatagctgcacaagttatt

SEQ ID NO: 1176298 - DNA, 25 bp, Homo sapien
gatacttccattcgcttcaactttt

SEQ ID NO: 1176299 - DNA, 25 bp, Homo sapien
taaaaactgatgaagccaacattat

SEQ ID NO: 1176300 - DNA, 25 bp, Homo sapien
caacattatttggtacttctgatac

SEQ ID NO: 1176301 - DNA, 25 bp, Homo sapien
cctgtgtgtagtgcactcttagtaa

SEQ ID NO: 1176302 - DNA, 25 bp, Homo sapien
gagagagtcattaagagttgacatt

SEQ ID NO: 1176303 - DNA, 25 bp, Homo sapien
gttgacattgtccatggatacttct

SEQ ID NO: 1176304 - DNA, 25 bp, Homo sapien
ttcttccaacccactcggattgggc

SEQ ID NO: 1176305 - DNA, 25 bp, Homo sapien
caaacgatgctatatatgggtagag

SEQ ID NO: 1176306 - DNA, 25 bp, Homo sapien
tactggttacctgagagcagtgaag

SEQ ID NO: 1176307 - DNA, 25 bp, Homo sapien
gtagaaagggcttcgattgcattgc

SEQ ID NO: 1176308 - DNA, 25 bp, Homo sapien
tctttaagtgaggtaatagcacaca

SEQ ID NO: 1176309 - DNA, 25 bp, Homo sapien
tcccaccaccgtataaatctctgtt

SEQ ID NO: 1176310 - DNA, 25 bp, Homo sapien
tgttgccaagtaatgccaatgaact

SEQ ID NO: 1176311 - DNA, 25 bp, Homo sapien
taaatctctgttgccaagtaatgcc

SEQ ID NO: 1176312 - DNA, 25 bp, Homo sapien
gaaggctggtgggatccctcccacc

SEQ ID NO: 1176313 - DNA, 25 bp, Homo sapien
gctcagatgcggtatgagaactgca

SEQ ID NO: 1176314 - DNA, 25 bp, Homo sapien
ctgagctcagatgcggtatgagaac

SEQ ID NO: 1176315 - DNA, 25 bp, Homo sapien
ctctgagctcagatgcggtatgaga

SEQ ID NO: 1176316 - DNA, 25 bp, Homo sapien
gagctcagatgcggtatgagaactg

SEQ ID NO: 1176317 - DNA, 25 bp, Homo sapien
attcttccccactggatctatacgc

SEQ ID NO: 1176318 - DNA, 25 bp, Homo sapien
actggatctatacgccagggtgaga

SEQ ID NO: 1176319 - DNA, 25 bp, Homo sapien
ttccccactggatctatacgccagg

SEQ ID NO: 1176320 - DNA, 25 bp, Homo sapien
ccactggatctatacgccagggtga

SEQ ID NO: 1176321 - DNA, 25 bp, Homo sapien
agagaaaaggaagtctcagtaatta

SEQ ID NO: 1176322 - DNA, 25 bp, Homo sapien
gagaaaaggaagtctcagtaattaa

SEQ ID NO: 1176323 - DNA, 25 bp, Homo sapien
aggaagagaaaaggaagtctcagta

SEQ ID NO: 1176324 - DNA, 25 bp, Homo sapien
gaagagaaaaggaagtctcagtaat

SEQ ID NO: 1176325 - DNA, 25 bp, Homo sapien
caaggttatagatgaaagataagga

SEQ ID NO: 1176326 - DNA, 25 bp, Homo sapien
aaggttatagatgaaagataaggaa

SEQ ID NO: 1176327 - DNA, 25 bp, Homo sapien
cctgggcttgtcaaaatgcttccaa

SEQ ID NO: 1176328 - DNA, 25 bp, Homo sapien
tgcttccaacgacaaaggatatatg

SEQ ID NO: 1176329 - DNA, 25 bp, Homo sapien
tatgatgaagtgtgataaactctat

SEQ ID NO: 1176330 - DNA, 25 bp, Homo sapien
taaactctattaacagaggctgact

SEQ ID NO: 1176331 - DNA, 25 bp, Homo sapien
ccactgagacaatgtgttccaggca

SEQ ID NO: 1176332 - DNA, 25 bp, Homo sapien
cactgagacaatgtgttccaggcat

SEQ ID NO: 1176333 - DNA, 25 bp, Homo sapien
gtcataaaggtattcagcttcaaaa

SEQ ID NO: 1176334 - DNA, 25 bp, Homo sapien
tacaatctccccttaacggcttaca

SEQ ID NO: 1176335 - DNA, 25 bp, Homo sapien
agaaaagtcataaaggtattcagct

SEQ ID NO: 1176336 - DNA, 25 bp, Homo sapien
tgtttgtacgtctttacaatctccc

SEQ ID NO: 1176337 - DNA, 25 bp, Homo sapien
ggttttcagaagtaaatgtgtcatc

SEQ ID NO: 1176338 - DNA, 25 bp, Homo sapien
ctctgacctcaatgacccaattgga

SEQ ID NO: 1176339 - DNA, 25 bp, Homo sapien
ctgacctcaatgacccaattggagt

SEQ ID NO: 1176340 - DNA, 25 bp, Homo sapien
tttttgtctaggaactctgacctca

SEQ ID NO: 1176341 - DNA, 25 bp, Homo sapien
aatggttgaaattatgtgttctttc

SEQ ID NO: 1176342 - DNA, 25 bp, Homo sapien
ccaaaacagaagcgtttttatagag

SEQ ID NO: 1176343 - DNA, 25 bp, Homo sapien
aaaccatgggagcttcttttactct

SEQ ID NO: 1176344 - DNA, 25 bp, Homo sapien
gaagcgtttttatagagccaacaaa

SEQ ID NO: 1176345 - DNA, 25 bp, Homo sapien
aagccccatggcttgaatccaccaa

SEQ ID NO: 1176346 - DNA, 25 bp, Homo sapien
cagggagtacctgactgcaggctgg

SEQ ID NO: 1176347 - DNA, 25 bp, Homo sapien
aactccctgcgatctccgacagcag

SEQ ID NO: 1176348 - DNA, 25 bp, Homo sapien
aaagaagccccatggcttgaatcca

SEQ ID NO: 1176349 - DNA, 25 bp, Homo sapien
ccaagcccttggaaatgagtaggcc

SEQ ID NO: 1176350 - DNA, 25 bp, Homo sapien
aactcaggctggctttagggaggac

SEQ ID NO: 1176351 - DNA, 25 bp, Homo sapien
aattggtttgggtaccatctggtgc

SEQ ID NO: 1176352 - DNA, 25 bp, Homo sapien
taacactgatgttagaccaagccct

SEQ ID NO: 1176353 - DNA, 25 bp, Homo sapien
tcctttatgtcactctggagagcaa

SEQ ID NO: 1176354 - DNA, 25 bp, Homo sapien
tgaatagccacagaatactcccaga

SEQ ID NO: 1176355 - DNA, 25 bp, Homo sapien
gttgtgcccatagttttgccctgga

SEQ ID NO: 1176356 - DNA, 25 bp, Homo sapien
taggtgcagaagtagctctcctgag

SEQ ID NO: 1176357 - DNA, 25 bp, Homo sapien
aaactgcctgacagactaggatgcg

SEQ ID NO: 1176358 - DNA, 25 bp, Homo sapien
gccacagtaggaaagattaaaccag

SEQ ID NO: 1176359 - DNA, 25 bp, Homo sapien
cgtgaaatgtcctgatcatggaagg

SEQ ID NO: 1176360 - DNA, 25 bp, Homo sapien
aatggatggtccaagaggaagagcc

SEQ ID NO: 1176361 - DNA, 25 bp, Homo sapien
catgtaacctgttggcagtactcat

SEQ ID NO: 1176362 - DNA, 25 bp, Homo sapien
tggtactccggtcatgtaacctgtt

SEQ ID NO: 1176363 - DNA, 25 bp, Homo sapien
ctctggtactccggtcatgtaacct

SEQ ID NO: 1176364 - DNA, 25 bp, Homo sapien
tcatgtaacctgttggcagtactca

SEQ ID NO: 1176365 - DNA, 25 bp, Homo sapien
ggtggttatttttcattgtctcatc

SEQ ID NO: 1176366 - DNA, 25 bp, Homo sapien
tggtggttatttttcattgtctcat

SEQ ID NO: 1176367 - DNA, 25 bp, Homo sapien
ttgtctcatcaagacaaagcatcat

SEQ ID NO: 1176368 - DNA, 25 bp, Homo sapien
gtggtggttatttttcattgtctca

SEQ ID NO: 1176369 - DNA, 25 bp, Homo sapien
taaaagtcagcagtgtgtgaaatgg

SEQ ID NO: 1176370 - DNA, 25 bp, Homo sapien
tgtttctgtcactattcaatctcac

SEQ ID NO: 1176371 - DNA, 25 bp, Homo sapien
taaaataaatgaaacccgctcgcag

SEQ ID NO: 1176372 - DNA, 25 bp, Homo sapien
gagctgcggaggaatattgcaatgc

SEQ ID NO: 1176373 - DNA, 25 bp, Homo sapien
ctgtctcgagttccagcagcataag

SEQ ID NO: 1176374 - DNA, 25 bp, Homo sapien
gagttccagcagcataagcatgtac

SEQ ID NO: 1176375 - DNA, 25 bp, Homo sapien
tcgagttccagcagcataagcatgt

SEQ ID NO: 1176376 - DNA, 25 bp, Homo sapien
gtctcgagttccagcagcataagca

SEQ ID NO: 1176377 - DNA, 25 bp, Homo sapien
tttgaacgtgggtaacagcatcccc

SEQ ID NO: 1176378 - DNA, 25 bp, Homo sapien
gcttctgaggtttgtgaaaggcact

SEQ ID NO: 1176379 - DNA, 25 bp, Homo sapien
tatgggcctcgataaacaacaatga

SEQ ID NO: 1176380 - DNA, 25 bp, Homo sapien
taaactcttgcttctgagatgcctc

SEQ ID NO: 1176381 - DNA, 25 bp, Homo sapien
tgcagcaagggcagccatgtttcac

SEQ ID NO: 1176382 - DNA, 25 bp, Homo sapien
ttacaaaagagatgagtcctgcagc

SEQ ID NO: 1176383 - DNA, 25 bp, Homo sapien
cctgcagcaagggcagccatgtttc

SEQ ID NO: 1176384 - DNA, 25 bp, Homo sapien
acaaaagagatgagtcctgcagcaa

SEQ ID NO: 1176385 - DNA, 25 bp, Homo sapien
tcagatgagattggtcacgttcatg

SEQ ID NO: 1176386 - DNA, 25 bp, Homo sapien
gttcatggtggtatggccacacact

SEQ ID NO: 1176387 - DNA, 25 bp, Homo sapien
cgttcatggtggtatggccacacac

SEQ ID NO: 1176388 - DNA, 25 bp, Homo sapien
gagattggtcacgttcatggtggta

SEQ ID NO: 1176389 - DNA, 25 bp, Homo sapien
ttcacttccagatgttgcgctgatt

SEQ ID NO: 1176390 - DNA, 25 bp, Homo sapien
ggaaggcgattaatccaggtctcca

SEQ ID NO: 1176391 - DNA, 25 bp, Homo sapien
gcagggctgttttattgcctgaagt

SEQ ID NO: 1176392 - DNA, 25 bp, Homo sapien
gctgatttgaatcgtgggtgtccaa

SEQ ID NO: 1176393 - DNA, 25 bp, Homo sapien
gggatcactgacaaccaacaaaggg

SEQ ID NO: 1176394 - DNA, 25 bp, Homo sapien
gtccttataccagagaagtgaagcc

SEQ ID NO: 1176395 - DNA, 25 bp, Homo sapien
ccatatctgacaatatcagcccggg

SEQ ID NO: 1176396 - DNA, 25 bp, Homo sapien
tgtgcttgtactccccccagtagga

SEQ ID NO: 1176397 - DNA, 25 bp, Homo sapien
ttccatgagccccaaccaataactc

SEQ ID NO: 1176398 - DNA, 25 bp, Homo sapien
tccatgagccccaaccaataactca

SEQ ID NO: 1176399 - DNA, 25 bp, Homo sapien
tcagggaactctgcagcgggagcct

SEQ ID NO: 1176400 - DNA, 25 bp, Homo sapien
gggaactctgcagcgggagcctcct

SEQ ID NO: 1176401 - DNA, 25 bp, Homo sapien
ggctaaatcctgtgtcctccgcata

SEQ ID NO: 1176402 - DNA, 25 bp, Homo sapien
gcaaacattaccaacgtacaaggct

SEQ ID NO: 1176403 - DNA, 25 bp, Homo sapien
acataatgtgtaactgttcgtgttc

SEQ ID NO: 1176404 - DNA, 25 bp, Homo sapien
gttcgtgttctcattgctgtagcca

SEQ ID NO: 1176405 - DNA, 25 bp, Homo sapien
taatgaaaatgcaacgtgctgatat

SEQ ID NO: 1176406 - DNA, 25 bp, Homo sapien
tctcctgcagagttccatttacata

SEQ ID NO: 1176407 - DNA, 25 bp, Homo sapien
gacatctgagacagatccatagtaa

SEQ ID NO: 1176408 - DNA, 25 bp, Homo sapien
tgcaacgtgctgatattttatacaa

SEQ ID NO: 1176409 - DNA, 25 bp, Homo sapien
aagcaaaggtaaacctgcttgtcat

SEQ ID NO: 1176410 - DNA, 25 bp, Homo sapien
gcccaacatgcacaataggcaaatt

SEQ ID NO: 1176411 - DNA, 25 bp, Homo sapien
tcttgttgctgacgcccaacatgca

SEQ ID NO: 1176412 - DNA, 25 bp, Homo sapien
aattcttgttgctgacgcccaacat

SEQ ID NO: 1176413 - DNA, 25 bp, Homo sapien
gaagcgatttgttggctggcaagca

SEQ ID NO: 1176414 - DNA, 25 bp, Homo sapien
taagcaggccaaacatatttgggcc

SEQ ID NO: 1176415 - DNA, 25 bp, Homo sapien
tatttgggcctctcctacacattgc

SEQ ID NO: 1176416 - DNA, 25 bp, Homo sapien
cagaaagcatgtgtttaagcaggcc

SEQ ID NO: 1176417 - DNA, 25 bp, Homo sapien
aagtcatcatactcgaaaagtttag

SEQ ID NO: 1176418 - DNA, 25 bp, Homo sapien
cgttgggtctgtaaataagtcatca

SEQ ID NO: 1176419 - DNA, 25 bp, Homo sapien
ttagaaccattgatgtagagttgat

SEQ ID NO: 1176420 - DNA, 25 bp, Homo sapien
ggatgagcacatccgttgggtctgt

SEQ ID NO: 1176421 - DNA, 25 bp, Homo sapien
tgattcaaaatgacgtaaccgattg

SEQ ID NO: 1176422 - DNA, 25 bp, Homo sapien
cgtaaccgattgcttctatgtagaa

SEQ ID NO: 1176423 - DNA, 25 bp, Homo sapien
gaaagtgatatcatatgattgattc

SEQ ID NO: 1176424 - DNA, 25 bp, Homo sapien
cctgtttgctcaagaaagtgatatc

SEQ ID NO: 1176425 - DNA, 25 bp, Homo sapien
gagcagcatgatctgggaattcagc

SEQ ID NO: 1176426 - DNA, 25 bp, Homo sapien
tgggcatagtataaggttgagcagc

SEQ ID NO: 1176427 - DNA, 25 bp, Homo sapien
ttccttcttgggcatagtataaggt

SEQ ID NO: 1176428 - DNA, 25 bp, Homo sapien
ttttccatcagccttggaactttcc

SEQ ID NO: 1176429 - DNA, 25 bp, Homo sapien
tttagcaatctggatgggggtgaat

SEQ ID NO: 1176430 - DNA, 25 bp, Homo sapien
tgggggtgaatgcagtacagtatgg

SEQ ID NO: 1176431 - DNA, 25 bp, Homo sapien
tctggatgggggtgaatgcagtaca

SEQ ID NO: 1176432 - DNA, 25 bp, Homo sapien
attttagcaatctggatgggggtga

SEQ ID NO: 1176433 - DNA, 25 bp, Homo sapien
ctattcgggacacttgtaactttag

SEQ ID NO: 1176434 - DNA, 25 bp, Homo sapien
taaagtaatgggactctatggccat

SEQ ID NO: 1176435 - DNA, 25 bp, Homo sapien
tagcttctaagggaactattcggga

SEQ ID NO: 1176436 - DNA, 25 bp, Homo sapien
tattaaatgacacaagctgctgatg

SEQ ID NO: 1176437 - DNA, 25 bp, Homo sapien
ctgtccaggtggaagcactgaagag

SEQ ID NO: 1176438 - DNA, 25 bp, Homo sapien
tccaggtggaagcactgaagagcca

SEQ ID NO: 1176439 - DNA, 25 bp, Homo sapien
tgtccaggtggaagcactgaagagc

SEQ ID NO: 1176440 - DNA, 25 bp, Homo sapien
ccaggtggaagcactgaagagccat

SEQ ID NO: 1176441 - DNA, 25 bp, Homo sapien
aaaagctttcgaccctggaccatag

SEQ ID NO: 1176442 - DNA, 25 bp, Homo sapien
cagtgtcacaccaaaaagctttcga

SEQ ID NO: 1176443 - DNA, 25 bp, Homo sapien
gaaagcaaatttgcagtctagtggg

SEQ ID NO: 1176444 - DNA, 25 bp, Homo sapien
tagtgggtccaagaaattcagtgtc

SEQ ID NO: 1176445 - DNA, 25 bp, Homo sapien
aaattgcactgggactgcttgcact

SEQ ID NO: 1176446 - DNA, 25 bp, Homo sapien
gttcactgcagctattcccactgca

SEQ ID NO: 1176447 - DNA, 25 bp, Homo sapien
tgactttgacatgctttttataggg

SEQ ID NO: 1176448 - DNA, 25 bp, Homo sapien
gactgcttgcacttttgactttgac

SEQ ID NO: 1176449 - DNA, 25 bp, Homo sapien
gaatcaaatgccttaagtaggccat

SEQ ID NO: 1176450 - DNA, 25 bp, Homo sapien
ggtgaatcaaatgccttaagtaggc

SEQ ID NO: 1176451 - DNA, 25 bp, Homo sapien
taacataggtgaatcaaatgcctta

SEQ ID NO: 1176452 - DNA, 25 bp, Homo sapien
aatgccttaagtaggccattgcagg

SEQ ID NO: 1176453 - DNA, 25 bp, Homo sapien
cattgtgctagaggagttagttgag

SEQ ID NO: 1176454 - DNA, 25 bp, Homo sapien
ggctccagcattgtgctagaggagt

SEQ ID NO: 1176455 - DNA, 25 bp, Homo sapien
ggagttagttgagaaaggatcaagt

SEQ ID NO: 1176456 - DNA, 25 bp, Homo sapien
agttagttgagaaaggatcaagtgg

SEQ ID NO: 1176457 - DNA, 25 bp, Homo sapien
tataaataacgatagtggcatactg

SEQ ID NO: 1176458 - DNA, 25 bp, Homo sapien
caccctgtacaaggagaaggctgac

SEQ ID NO: 1176459 - DNA, 25 bp, Homo sapien
cagatttaaacgctgcagcacagca

SEQ ID NO: 1176460 - DNA, 25 bp, Homo sapien
ttaatacgggtctcctctataaata

SEQ ID NO: 1176461 - DNA, 25 bp, Homo sapien
atggctccgcgacacaaagccagag

SEQ ID NO: 1176462 - DNA, 25 bp, Homo sapien
ctcgacaagcttttagtagcatggc

SEQ ID NO: 1176463 - DNA, 25 bp, Homo sapien
attacattaacatgaggcagctggg

SEQ ID NO: 1176464 - DNA, 25 bp, Homo sapien
tggcatccattctcgacaagctttt

SEQ ID NO: 1176465 - DNA, 25 bp, Homo sapien
taacttgttagcaatatgtgccagg

SEQ ID NO: 1176466 - DNA, 25 bp, Homo sapien
tcaacaaagtggatgccgatgttcc

SEQ ID NO: 1176467 - DNA, 25 bp, Homo sapien
gttagcaatatgtgccaggtcatgc

SEQ ID NO: 1176468 - DNA, 25 bp, Homo sapien
gtggatgccgatgttccagagaaat

SEQ ID NO: 1176469 - DNA, 25 bp, Homo sapien
ggaaggcactttgtcccatggcaaa

SEQ ID NO: 1176470 - DNA, 25 bp, Homo sapien
ccttaggccaatcctggtgtcaata

SEQ ID NO: 1176471 - DNA, 25 bp, Homo sapien
caaaagatagagacgtacaagcccc

SEQ ID NO: 1176472 - DNA, 25 bp, Homo sapien
ttgaccaacacaagtccttaggcca

SEQ ID NO: 1176473 - DNA, 25 bp, Homo sapien
gaatgtctgataccattccaaactt

SEQ ID NO: 1176474 - DNA, 25 bp, Homo sapien
ctgaagtatagcgatatcttgaaga

SEQ ID NO: 1176475 - DNA, 25 bp, Homo sapien
tttgaattcgcttttggttctatat

SEQ ID NO: 1176476 - DNA, 25 bp, Homo sapien
tgaagtatagcgatatcttgaagag

SEQ ID NO: 1176477 - DNA, 25 bp, Homo sapien
ttcaatactgacatagtgagagtgg

SEQ ID NO: 1176478 - DNA, 25 bp, Homo sapien
tttatatcttggtccctttgtctat

SEQ ID NO: 1176479 - DNA, 25 bp, Homo sapien
tagtgagagtggaatgttaagtgct

SEQ ID NO: 1176480 - DNA, 25 bp, Homo sapien
tatcttggtccctttgtctattacc

SEQ ID NO: 1176481 - DNA, 25 bp, Homo sapien
ttgcatctctttggtcttatctctg

SEQ ID NO: 1176482 - DNA, 25 bp, Homo sapien
gatgccccaccttgcatctctttgg

SEQ ID NO: 1176483 - DNA, 25 bp, Homo sapien
cccaccttgcatctctttggtctta

SEQ ID NO: 1176484 - DNA, 25 bp, Homo sapien
tgatgccccaccttgcatctctttg

SEQ ID NO: 1176485 - DNA, 25 bp, Homo sapien
tgaagtagcaggcagtaggagcaga

SEQ ID NO: 1176486 - DNA, 25 bp, Homo sapien
tagcaggcagtaggagcagaaaaca

SEQ ID NO: 1176487 - DNA, 25 bp, Homo sapien
agtaggagcagaaaacaaattagat

SEQ ID NO: 1176488 - DNA, 25 bp, Homo sapien
gtaggagcagaaaacaaattagatt

SEQ ID NO: 1176489 - DNA, 25 bp, Homo sapien
ggttgcatgcagacaccctagagta

SEQ ID NO: 1176490 - DNA, 25 bp, Homo sapien
cagacaccctagagtaaccccaggt

SEQ ID NO: 1176491 - DNA, 25 bp, Homo sapien
tggctctccaacaggaggaccttcc

SEQ ID NO: 1176492 - DNA, 25 bp, Homo sapien
tgatgttatgctctgctggttgcat

SEQ ID NO: 1176493 - DNA, 25 bp, Homo sapien
agtactgtttcaggccaggtagacc

SEQ ID NO: 1176494 - DNA, 25 bp, Homo sapien
gctgctgcttgggagtactgtttca

SEQ ID NO: 1176495 - DNA, 25 bp, Homo sapien
gaatgatgatgccatgggtcttccc

SEQ ID NO: 1176496 - DNA, 25 bp, Homo sapien
ccacatgtttcaccaaagagccaga

SEQ ID NO: 1176497 - DNA, 25 bp, Homo sapien
tctgtggatttactgggctaagctg

SEQ ID NO: 1176498 - DNA, 25 bp, Homo sapien
tcaaagcatacgctccaagagcaag

SEQ ID NO: 1176499 - DNA, 25 bp, Homo sapien
caggcagttactgacagatggcaac

SEQ ID NO: 1176500 - DNA, 25 bp, Homo sapien
gataggtggtctcaggcatctcata

SEQ ID NO: 1176501 - DNA, 25 bp, Homo sapien
ccagaagaatggtacttggaatgta

SEQ ID NO: 1176502 - DNA, 25 bp, Homo sapien
ggtacttggaatgtaagtttgtcga

SEQ ID NO: 1176503 - DNA, 25 bp, Homo sapien
aaagggccagaagaatggtacttgg

SEQ ID NO: 1176504 - DNA, 25 bp, Homo sapien
gaatgtaagtttgtcgatcaggcat

SEQ ID NO: 1176505 - DNA, 25 bp, Homo sapien
actcaacctgttaagagctgctggc

SEQ ID NO: 1176506 - DNA, 25 bp, Homo sapien
gcaggaagtggtctcgatgggagag

SEQ ID NO: 1176507 - DNA, 25 bp, Homo sapien
caggaagtggtctcgatgggagaga

SEQ ID NO: 1176508 - DNA, 25 bp, Homo sapien
tcaacctgttaagagctgctggccc

SEQ ID NO: 1176509 - DNA, 25 bp, Homo sapien
aggaagcagggctgacccatgtaat

SEQ ID NO: 1176510 - DNA, 25 bp, Homo sapien
catgtaatttggctttcgggcccag

SEQ ID NO: 1176511 - DNA, 25 bp, Homo sapien
aagttctggatggcctcatcttcca

SEQ ID NO: 1176512 - DNA, 25 bp, Homo sapien
agaattagcatctgactgtccaaga

SEQ ID NO: 1176513 - DNA, 25 bp, Homo sapien
taggatagctcagtttaccagagac

SEQ ID NO: 1176514 - DNA, 25 bp, Homo sapien
ttgcctgagacgctaacattttggc

SEQ ID NO: 1176515 - DNA, 25 bp, Homo sapien
gcactttaagatgtcgcctattaca

SEQ ID NO: 1176516 - DNA, 25 bp, Homo sapien
aaggctttgacttgcttaggatagc

SEQ ID NO: 1176517 - DNA, 25 bp, Homo sapien
tttataaggcggtaacagctggatt

SEQ ID NO: 1176518 - DNA, 25 bp, Homo sapien
agtactgtttataaggcggtaacag

SEQ ID NO: 1176519 - DNA, 25 bp, Homo sapien
catgggagctaatgtgaagcaatac

SEQ ID NO: 1176520 - DNA, 25 bp, Homo sapien
catgagataactggttggctttgct

SEQ ID NO: 1176521 - DNA, 25 bp, Homo sapien
tgtccaggtcactatgtactctcca

SEQ ID NO: 1176522 - DNA, 25 bp, Homo sapien
tactttttgagtacctgccttgtcc

SEQ ID NO: 1176523 - DNA, 25 bp, Homo sapien
ccagcccatgcgtacatcttatgaa

SEQ ID NO: 1176524 - DNA, 25 bp, Homo sapien
ctatctgaatccctcactgcacagt

SEQ ID NO: 1176525 - DNA, 25 bp, Homo sapien
cacctcaagtagagtcagtgtggac

SEQ ID NO: 1176526 - DNA, 25 bp, Homo sapien
taaggtgccgcttcatcagaagtct

SEQ ID NO: 1176527 - DNA, 25 bp, Homo sapien
tacaggcctagggaacacttgcatg

SEQ ID NO: 1176528 - DNA, 25 bp, Homo sapien
taaggtgatgacgataggtctctcc

SEQ ID NO: 1176529 - DNA, 25 bp, Homo sapien
cagatattaatgacctggccagaac

SEQ ID NO: 1176530 - DNA, 25 bp, Homo sapien
tggccagaactataaatttacccca

SEQ ID NO: 1176531 - DNA, 25 bp, Homo sapien
actttttgacaaccagatattaatg

SEQ ID NO: 1176532 - DNA, 25 bp, Homo sapien
atcagatatatttctgcaggggaca

SEQ ID NO: 1176533 - DNA, 25 bp, Homo sapien
tctcagtaagagacagatcatccag

SEQ ID NO: 1176534 - DNA, 25 bp, Homo sapien
ttggtccaactgacatttacagagc

SEQ ID NO: 1176535 - DNA, 25 bp, Homo sapien
gagcattttacccatctgctacaga

SEQ ID NO: 1176536 - DNA, 25 bp, Homo sapien
accagagctcccaagtattaaagca

SEQ ID NO: 1176537 - DNA, 25 bp, Homo sapien
gcaaaccagtgccaagagccagctt

SEQ ID NO: 1176538 - DNA, 25 bp, Homo sapien
acttctcgcataatgatccctgaaa

SEQ ID NO: 1176539 - DNA, 25 bp, Homo sapien
aaaaacttctcgcataatgatccct

SEQ ID NO: 1176540 - DNA, 25 bp, Homo sapien
atcactcagattgcattctcttccc

SEQ ID NO: 1176541 - DNA, 25 bp, Homo sapien
taacagagggatgctttattgcatt

SEQ ID NO: 1176542 - DNA, 25 bp, Homo sapien
gtttacgataacagagggatgcttt

SEQ ID NO: 1176543 - DNA, 25 bp, Homo sapien
tgtgtttacgataacagagggatgc

SEQ ID NO: 1176544 - DNA, 25 bp, Homo sapien
tcccttttgtgtttacgataacaga

SEQ ID NO: 1176545 - DNA, 25 bp, Homo sapien
gctcactgaggtaaaggcagccaac

SEQ ID NO: 1176546 - DNA, 25 bp, Homo sapien
gccaacaaaaattgctgtggttcca

SEQ ID NO: 1176547 - DNA, 25 bp, Homo sapien
tccatccgattgcactcaccatggg

SEQ ID NO: 1176548 - DNA, 25 bp, Homo sapien
gattgcactcaccatgggtggacag

SEQ ID NO: 1176549 - DNA, 25 bp, Homo sapien
tcgtcgtttgccaaatatgccattc

SEQ ID NO: 1176550 - DNA, 25 bp, Homo sapien
ttttccaaatttccagtcactctgc

SEQ ID NO: 1176551 - DNA, 25 bp, Homo sapien
cagtcactctgcctgcatactgtgt

SEQ ID NO: 1176552 - DNA, 25 bp, Homo sapien
atcttttattcgtcgtttgccaaat

SEQ ID NO: 1176553 - DNA, 25 bp, Homo sapien
tacatcatgctttgaaagcttttct

SEQ ID NO: 1176554 - DNA, 25 bp, Homo sapien
tctgatattcacatctggcagcatt

SEQ ID NO: 1176555 - DNA, 25 bp, Homo sapien
agcattataaagtgacaggtctttc

SEQ ID NO: 1176556 - DNA, 25 bp, Homo sapien
taatcataagtgatgaactttgtgt

SEQ ID NO: 1176557 - DNA, 25 bp, Homo sapien
gaattctctctggtaatgttaatca

SEQ ID NO: 1176558 - DNA, 25 bp, Homo sapien
ccagtatacctgaggcaccggctgt

SEQ ID NO: 1176559 - DNA, 25 bp, Homo sapien
caccggctgtgctttatgaagtcta

SEQ ID NO: 1176560 - DNA, 25 bp, Homo sapien
agtctaaaattttcggctggttgtg

SEQ ID NO: 1176561 - DNA, 25 bp, Homo sapien
ccctcctttcatgtctggctccaga

SEQ ID NO: 1176562 - DNA, 25 bp, Homo sapien
tcacttcactatttctcttctccat

SEQ ID NO: 1176563 - DNA, 25 bp, Homo sapien
cccctcacttcactatttctcttct

SEQ ID NO: 1176564 - DNA, 25 bp, Homo sapien
cctcacttcactatttctcttctcc

SEQ ID NO: 1176565 - DNA, 25 bp, Homo sapien
ctcccctcacttcactatttctctt

SEQ ID NO: 1176566 - DNA, 25 bp, Homo sapien
cttttctagaaggacgagactatta

SEQ ID NO: 1176567 - DNA, 25 bp, Homo sapien
caatatcggctatcactttcttttc

SEQ ID NO: 1176568 - DNA, 25 bp, Homo sapien
gacgagactattatccagcttatta

SEQ ID NO: 1176569 - DNA, 25 bp, Homo sapien
tatttcgatttggattcactcccaa

SEQ ID NO: 1176570 - DNA, 25 bp, Homo sapien
gtaaatcaagtaatccgtaattctc

SEQ ID NO: 1176571 - DNA, 25 bp, Homo sapien
caacacccactaaatcccgtgtggg

SEQ ID NO: 1176572 - DNA, 25 bp, Homo sapien
aatcaagtaatccgtaattctctac

SEQ ID NO: 1176573 - DNA, 25 bp, Homo sapien
cactaaatcccgtgtgggttttgca

SEQ ID NO: 1176574 - DNA, 25 bp, Homo sapien
tcaaccgagtagagcagccatatca

SEQ ID NO: 1176575 - DNA, 25 bp, Homo sapien
gtttatcaaacagcagtctatctgg

SEQ ID NO: 1176576 - DNA, 25 bp, Homo sapien
ggttaaaatatgactggcatttcat

SEQ ID NO: 1176577 - DNA, 25 bp, Homo sapien
gccatatcaataagctctactgttt

SEQ ID NO: 1176578 - DNA, 25 bp, Homo sapien
gtcaagggcagccagtcatttatct

SEQ ID NO: 1176579 - DNA, 25 bp, Homo sapien
tgtctgtaaagacagcatttccttc

SEQ ID NO: 1176580 - DNA, 25 bp, Homo sapien
taaagacagggtcagtcaagggcag

SEQ ID NO: 1176581 - DNA, 25 bp, Homo sapien
tcagagtttttcaggatacattcct

SEQ ID NO: 1176582 - DNA, 25 bp, Homo sapien
tgtaatttccatgacagtgtcgtcc

SEQ ID NO: 1176583 - DNA, 25 bp, Homo sapien
tgacagtgtcgtccatctcatttct

SEQ ID NO: 1176584 - DNA, 25 bp, Homo sapien
aatatgccgtgccatttcagacaga

SEQ ID NO: 1176585 - DNA, 25 bp, Homo sapien
gaactgtctccaaatcgctgagact

SEQ ID NO: 1176586 - DNA, 25 bp, Homo sapien
ctgccatgtaagtgcatgcctgaac

SEQ ID NO: 1176587 - DNA, 25 bp, Homo sapien
ccatgtaagtgcatgcctgaactaa

SEQ ID NO: 1176588 - DNA, 25 bp, Homo sapien
gcctgaactaatgcctgcagtctca

SEQ ID NO: 1176589 - DNA, 25 bp, Homo sapien
atgtaagtgcatgcctgaactaatg

SEQ ID NO: 1176590 - DNA, 25 bp, Homo sapien
tactttctgatgctaagtatttgcc

SEQ ID NO: 1176591 - DNA, 25 bp, Homo sapien
tgctgagatactttctgatgctaag

SEQ ID NO: 1176592 - DNA, 25 bp, Homo sapien
gctgagatactttctgatgctaagt

SEQ ID NO: 1176593 - DNA, 25 bp, Homo sapien
tgatgctaagtatttgcctgctgtc

SEQ ID NO: 1176594 - DNA, 25 bp, Homo sapien
ttccacctttcctagactatccgat

SEQ ID NO: 1176595 - DNA, 25 bp, Homo sapien
tcattccacctttcctagactatcc

SEQ ID NO: 1176596 - DNA, 25 bp, Homo sapien
attccacctttcctagactatccga

SEQ ID NO: 1176597 - DNA, 25 bp, Homo sapien
tccacctttcctagactatccgatt

SEQ ID NO: 1176598 - DNA, 25 bp, Homo sapien
tcactcagagattgacgcataacag

SEQ ID NO: 1176599 - DNA, 25 bp, Homo sapien
agttgaagaactaggagtggactgt

SEQ ID NO: 1176600 - DNA, 25 bp, Homo sapien
aaccaaccaaagcagttgaagaact

SEQ ID NO: 1176601 - DNA, 25 bp, Homo sapien
ctaacaatagggaatttgaggacca

SEQ ID NO: 1176602 - DNA, 25 bp, Homo sapien
tacctcagagttaattcagcaagat

SEQ ID NO: 1176603 - DNA, 25 bp, Homo sapien
ttacctcagagttaattcagcaaga

SEQ ID NO: 1176604 - DNA, 25 bp, Homo sapien
acctcagagttaattcagcaagatc

SEQ ID NO: 1176605 - DNA, 25 bp, Homo sapien
taatacagccttgcaatgaaacaca

SEQ ID NO: 1176606 - DNA, 25 bp, Homo sapien
cactaatacagccttgcaatgaaac

SEQ ID NO: 1176607 - DNA, 25 bp, Homo sapien
cttcactaatacagccttgcaatga

SEQ ID NO: 1176608 - DNA, 25 bp, Homo sapien
ggggcttcactaatacagccttgca

SEQ ID NO: 1176609 - DNA, 25 bp, Homo sapien
attcaaacataacaatatttacctt

SEQ ID NO: 1176610 - DNA, 25 bp, Homo sapien
aattcaaacataacaatatttacct

SEQ ID NO: 1176611 - DNA, 25 bp, Homo sapien
ggtgatattgacagactaaaggatt

SEQ ID NO: 1176612 - DNA, 25 bp, Homo sapien
tgatattgacagactaaaggattgc

SEQ ID NO: 1176613 - DNA, 25 bp, Homo sapien
gatattgacagactaaaggattgct

SEQ ID NO: 1176614 - DNA, 25 bp, Homo sapien
tattgacagactaaaggattgctca

SEQ ID NO: 1176615 - DNA, 25 bp, Homo sapien
tcagactctcaggatgcagagagtc

SEQ ID NO: 1176616 - DNA, 25 bp, Homo sapien
ggataactggataaagggctcagac

SEQ ID NO: 1176617 - DNA, 25 bp, Homo sapien
cagactctcaggatgcagagagtcc

SEQ ID NO: 1176618 - DNA, 25 bp, Homo sapien
taactggataaagggctcagactct

SEQ ID NO: 1176619 - DNA, 25 bp, Homo sapien
tttgtgtgtgaactcgcgtgggcct

SEQ ID NO: 1176620 - DNA, 25 bp, Homo sapien
cacttaagatagtttgggtctgaag

SEQ ID NO: 1176621 - DNA, 25 bp, Homo sapien
cattattgctatcaccactgtgata

SEQ ID NO: 1176622 - DNA, 25 bp, Homo sapien
gataaaatggagcaataatgacggg

SEQ ID NO: 1176623 - DNA, 25 bp, Homo sapien
caatttgcgctgctcagttttgaca

SEQ ID NO: 1176624 - DNA, 25 bp, Homo sapien
tcttctttcagcgtctcgcctctga

SEQ ID NO: 1176625 - DNA, 25 bp, Homo sapien
tcagagtcttcctcagatcatcggg

SEQ ID NO: 1176626 - DNA, 25 bp, Homo sapien
ttaagtgatcttttcataccgcctg

SEQ ID NO: 1176627 - DNA, 25 bp, Homo sapien
tgctgatagattctgcccttcagaa

SEQ ID NO: 1176628 - DNA, 25 bp, Homo sapien
atttgctgatagattctgcccttca

SEQ ID NO: 1176629 - DNA, 25 bp, Homo sapien
ggcaaaagtttccattctagctgaa

SEQ ID NO: 1176630 - DNA, 25 bp, Homo sapien
tgcagttatctgcaattcttaaatg

SEQ ID NO: 1176631 - DNA, 25 bp, Homo sapien
agatggaccaaacagttcttgtctc

SEQ ID NO: 1176632 - DNA, 25 bp, Homo sapien
taagatggaccaaacagttcttgtc

SEQ ID NO: 1176633 - DNA, 25 bp, Homo sapien
gatggaccaaacagttcttgtctcc

SEQ ID NO: 1176634 - DNA, 25 bp, Homo sapien
atggaccaaacagttcttgtctccc

SEQ ID NO: 1176635 - DNA, 25 bp, Homo sapien
tccagcctggcgattgggaagcaaa

SEQ ID NO: 1176636 - DNA, 25 bp, Homo sapien
tcaataccggttggcaggtgatcaa

SEQ ID NO: 1176637 - DNA, 25 bp, Homo sapien
agcaaaaatcaataccggttggcag

SEQ ID NO: 1176638 - DNA, 25 bp, Homo sapien
gttggcaggtgatcaagctgcttca

SEQ ID NO: 1176639 - DNA, 25 bp, Homo sapien
gacaccagccactggacaaggtgtt

SEQ ID NO: 1176640 - DNA, 25 bp, Homo sapien
caccagccactggacaaggtgtttc

SEQ ID NO: 1176641 - DNA, 25 bp, Homo sapien
cagccactggacaaggtgtttccat

SEQ ID NO: 1176642 - DNA, 25 bp, Homo sapien
ccagccactggacaaggtgtttcca

SEQ ID NO: 1176643 - DNA, 25 bp, Homo sapien
ctttctccttcagtaatgccaaact

SEQ ID NO: 1176644 - DNA, 25 bp, Homo sapien
gttacacaagcatgaagaagtgagg

SEQ ID NO: 1176645 - DNA, 25 bp, Homo sapien
cacgctctttctggacggttacaca

SEQ ID NO: 1176646 - DNA, 25 bp, Homo sapien
taatgacatcctacatggtcacgct

SEQ ID NO: 1176647 - DNA, 25 bp, Homo sapien
cctacatggtcacgctctttctgga

SEQ ID NO: 1176648 - DNA, 25 bp, Homo sapien
acccaccgcagtctcagtcctctgt

SEQ ID NO: 1176649 - DNA, 25 bp, Homo sapien
ttgacccaccgcagtctcagtcctc

SEQ ID NO: 1176650 - DNA, 25 bp, Homo sapien
cctttttgacccaccgcagtctcag

SEQ ID NO: 1176651 - DNA, 25 bp, Homo sapien
ctttttgacccaccgcagtctcagt

SEQ ID NO: 1176652 - DNA, 25 bp, Homo sapien
tgcagggggatccaagctgccactt

SEQ ID NO: 1176653 - DNA, 25 bp, Homo sapien
acttcttcgccattactccatgtca

SEQ ID NO: 1176654 - DNA, 25 bp, Homo sapien
ttgcagggggatccaagctgccact

SEQ ID NO: 1176655 - DNA, 25 bp, Homo sapien
aaaacttcttcgccattactccatg

SEQ ID NO: 1176656 - DNA, 25 bp, Homo sapien
aatcctggatttctgtgaggttcct

SEQ ID NO: 1176657 - DNA, 25 bp, Homo sapien
ttcccatgaggctgtatggcaaaat

SEQ ID NO: 1176658 - DNA, 25 bp, Homo sapien
catgaggctgtatggcaaaatcctg

SEQ ID NO: 1176659 - DNA, 25 bp, Homo sapien
aaggcttcccagcttcccgttgtgg

SEQ ID NO: 1176660 - DNA, 25 bp, Homo sapien
tcagaaaagtatattccgcaaaaat

SEQ ID NO: 1176661 - DNA, 25 bp, Homo sapien
cagaaaagtatattccgcaaaaatt

SEQ ID NO: 1176662 - DNA, 25 bp, Homo sapien
ctctgtgcgtgtgtgtataattttt

SEQ ID NO: 1176663 - DNA, 25 bp, Homo sapien
tctgtgcgtgtgtgtataatttttt

SEQ ID NO: 1176664 - DNA, 25 bp, Homo sapien
tgcgtgtgtgtataatttttttctt

SEQ ID NO: 1176665 - DNA, 25 bp, Homo sapien
tgtgcgtgtgtgtataatttttttc

SEQ ID NO: 1176666 - DNA, 25 bp, Homo sapien
ttattttgcgctttctgcttctttt

SEQ ID NO: 1176667 - DNA, 25 bp, Homo sapien
attttgcgctttctgcttcttttgg

SEQ ID NO: 1176668 - DNA, 25 bp, Homo sapien
ttgcgctttctgcttcttttggtgg

SEQ ID NO: 1176669 - DNA, 25 bp, Homo sapien
tttgcgctttctgcttcttttggtg

SEQ ID NO: 1176670 - DNA, 25 bp, Homo sapien
tgactgatgttagagctactttctg

SEQ ID NO: 1176671 - DNA, 25 bp, Homo sapien
tactttctggacaatggtcattact

SEQ ID NO: 1176672 - DNA, 25 bp, Homo sapien
aagtaggatgctcttatgactgatg

SEQ ID NO: 1176673 - DNA, 25 bp, Homo sapien
tatccacgtgttgatagagatcaca

SEQ ID NO: 1176674 - DNA, 25 bp, Homo sapien
agaagctgggtgattgtgtttacaa

SEQ ID NO: 1176675 - DNA, 25 bp, Homo sapien
tttaatgtgatttccatccgaagcc

SEQ ID NO: 1176676 - DNA, 25 bp, Homo sapien
taactttgcaatttgaggtacaaca

SEQ ID NO: 1176677 - DNA, 25 bp, Homo sapien
cagtgtagaactgaactcaattgcc

SEQ ID NO: 1176678 - DNA, 25 bp, Homo sapien
gggtagtatgaatacttaaacaata

SEQ ID NO: 1176679 - DNA, 25 bp, Homo sapien
taatagtcacccacgaagttttgga

SEQ ID NO: 1176680 - DNA, 25 bp, Homo sapien
tatgaattctgactcattatcacag

SEQ ID NO: 1176681 - DNA, 25 bp, Homo sapien
aaacatttgctaatagtcacccacg

SEQ ID NO: 1176682 - DNA, 25 bp, Homo sapien
tgagattgcttgatcatttggtagc

SEQ ID NO: 1176683 - DNA, 25 bp, Homo sapien
gaacatgagaggacagatatctctc

SEQ ID NO: 1176684 - DNA, 25 bp, Homo sapien
cacttagtataatgccctcgaggtt

SEQ ID NO: 1176685 - DNA, 25 bp, Homo sapien
tcctttagatatataaccagatgtg

SEQ ID NO: 1176686 - DNA, 25 bp, Homo sapien
gaagagcggacagcgtacaaatgat

SEQ ID NO: 1176687 - DNA, 25 bp, Homo sapien
ttttgtagacaattgagagatgtgc

SEQ ID NO: 1176688 - DNA, 25 bp, Homo sapien
tacttgcctaactggctgatttgag

SEQ ID NO: 1176689 - DNA, 25 bp, Homo sapien
ttgacagatgcaagttcagaggaag

SEQ ID NO: 1176690 - DNA, 25 bp, Homo sapien
gtgaacatatggtacagccaaacag

SEQ ID NO: 1176691 - DNA, 25 bp, Homo sapien
agtggaggtgaacatatggtacagc

SEQ ID NO: 1176692 - DNA, 25 bp, Homo sapien
tataaggtgagtggaggtgaacata

SEQ ID NO: 1176693 - DNA, 25 bp, Homo sapien
aattgtaaggtataaggtgagtgga

SEQ ID NO: 1176694 - DNA, 25 bp, Homo sapien
gttctgcctctactcgaaagtcttg

SEQ ID NO: 1176695 - DNA, 25 bp, Homo sapien
gcctctactcgaaagtcttgagatc

SEQ ID NO: 1176696 - DNA, 25 bp, Homo sapien
ctactcgaaagtcttgagatcttac

SEQ ID NO: 1176697 - DNA, 25 bp, Homo sapien
ctgtgttctgcctctactcgaaagt

SEQ ID NO: 1176698 - DNA, 25 bp, Homo sapien
gttggcaagacatttggagtttttc

SEQ ID NO: 1176699 - DNA, 25 bp, Homo sapien
tcagtggcagtactgaagaatggct

SEQ ID NO: 1176700 - DNA, 25 bp, Homo sapien
tctctggtctgggttggcaagacat

SEQ ID NO: 1176701 - DNA, 25 bp, Homo sapien
cattctttgtaagacccccatctga

SEQ ID NO: 1176702 - DNA, 25 bp, Homo sapien
tgacatgaggttgtatcatcaacag

SEQ ID NO: 1176703 - DNA, 25 bp, Homo sapien
tgactaatgacatgaggttgtatca

SEQ ID NO: 1176704 - DNA, 25 bp, Homo sapien
atgaggttgtatcatcaacagatgc

SEQ ID NO: 1176705 - DNA, 25 bp, Homo sapien
ttattgactaatgacatgaggttgt

SEQ ID NO: 1176706 - DNA, 25 bp, Homo sapien
agggataaattgagcaccaagaaat

SEQ ID NO: 1176707 - DNA, 25 bp, Homo sapien
tttcctttcgattgtgtcttgagat

SEQ ID NO: 1176708 - DNA, 25 bp, Homo sapien
cttctctctagttgagatcttttcc

SEQ ID NO: 1176709 - DNA, 25 bp, Homo sapien
tgagcaccaagaaattcaagctttc

SEQ ID NO: 1176710 - DNA, 25 bp, Homo sapien
acataaaaatgccactagcaggtgg

SEQ ID NO: 1176711 - DNA, 25 bp, Homo sapien
gaagaccaggttcttacacataaaa

SEQ ID NO: 1176712 - DNA, 25 bp, Homo sapien
gcaagaagaccaggttcttacacat

SEQ ID NO: 1176713 - DNA, 25 bp, Homo sapien
ctttagcgtcaacagcaagaagacc

SEQ ID NO: 1176714 - DNA, 25 bp, Homo sapien
ctcgacaggcgggcttcattttcaa

SEQ ID NO: 1176715 - DNA, 25 bp, Homo sapien
ttttcctttcattacgagcggagcc

SEQ ID NO: 1176716 - DNA, 25 bp, Homo sapien
gaacagtttgcatgaattccacctg

SEQ ID NO: 1176717 - DNA, 25 bp, Homo sapien
gcctgtttgacagttccagtgacag

SEQ ID NO: 1176718 - DNA, 25 bp, Homo sapien
tacagggataagaacaccacagcgg

SEQ ID NO: 1176719 - DNA, 25 bp, Homo sapien
ggcgatccactaggaagagctctgg

SEQ ID NO: 1176720 - DNA, 25 bp, Homo sapien
gagccgacaagacaaatgaatcccg

SEQ ID NO: 1176721 - DNA, 25 bp, Homo sapien
ggagaatccaactgtcagagccgac

SEQ ID NO: 1176722 - DNA, 25 bp, Homo sapien
ccaagggcctttgggtcggattatg

SEQ ID NO: 1176723 - DNA, 25 bp, Homo sapien
tttgggtcggattatgtgggcagca

SEQ ID NO: 1176724 - DNA, 25 bp, Homo sapien
cgccctgcgcagctctcaggtggag

SEQ ID NO: 1176725 - DNA, 25 bp, Homo sapien
cagctccgggatttgcattgaagcc

SEQ ID NO: 1176726 - DNA, 25 bp, Homo sapien
gtccattctcctggtattgccaaca

SEQ ID NO: 1176727 - DNA, 25 bp, Homo sapien
tctcctggtattgccaacaggagag

SEQ ID NO: 1176728 - DNA, 25 bp, Homo sapien
tcctggtattgccaacaggagagat

SEQ ID NO: 1176729 - DNA, 25 bp, Homo sapien
atgagtccattctcctggtattgcc

SEQ ID NO: 1176730 - DNA, 25 bp, Homo sapien
tactaactcccatctgttcctcttc

SEQ ID NO: 1176731 - DNA, 25 bp, Homo sapien
tcaagcaggacttcaaaacatttct

SEQ ID NO: 1176732 - DNA, 25 bp, Homo sapien
gctcaagcaggacttcaaaacattt

SEQ ID NO: 1176733 - DNA, 25 bp, Homo sapien
gccctgctcaagcaggacttcaaaa

SEQ ID NO: 1176734 - DNA, 25 bp, Homo sapien
tgttcttctctacttgtctgcacaa

SEQ ID NO: 1176735 - DNA, 25 bp, Homo sapien
cagagcacttcttggaaaattccac

SEQ ID NO: 1176736 - DNA, 25 bp, Homo sapien
ttctctacttgtctgcacaaagaag

SEQ ID NO: 1176737 - DNA, 25 bp, Homo sapien
cttatgttcttctctacttgtctgc

SEQ ID NO: 1176738 - DNA, 25 bp, Homo sapien
ttcatcaaatttagatttctgtttc

SEQ ID NO: 1176739 - DNA, 25 bp, Homo sapien
atcaaatttagatttctgtttcccg

SEQ ID NO: 1176740 - DNA, 25 bp, Homo sapien
ttatctgcctttgccatttcatcaa

SEQ ID NO: 1176741 - DNA, 25 bp, Homo sapien
atttagatttctgtttcccggacat

SEQ ID NO: 1176742 - DNA, 25 bp, Homo sapien
ccttagctggtccataatccttcat

SEQ ID NO: 1176743 - DNA, 25 bp, Homo sapien
cttttgggagcattgggatccttct

SEQ ID NO: 1176744 - DNA, 25 bp, Homo sapien
aatccttcatttcccgatcatagcg

SEQ ID NO: 1176745 - DNA, 25 bp, Homo sapien
gggagcattgggatccttcttcttc

SEQ ID NO: 1176746 - DNA, 25 bp, Homo sapien
tattccacatctcactcaggttttt

SEQ ID NO: 1176747 - DNA, 25 bp, Homo sapien
atctcactcaggttttttgccacgt

SEQ ID NO: 1176748 - DNA, 25 bp, Homo sapien
ctcactcaggttttttgccacgtct

SEQ ID NO: 1176749 - DNA, 25 bp, Homo sapien
attttggggtggaattctgaacaga

SEQ ID NO: 1176750 - DNA, 25 bp, Homo sapien
catcaaactttcctttcgacttata

SEQ ID NO: 1176751 - DNA, 25 bp, Homo sapien
atcaaactttcctttcgacttatag

SEQ ID NO: 1176752 - DNA, 25 bp, Homo sapien
tttcctttcgacttatagtcagcaa

SEQ ID NO: 1176753 - DNA, 25 bp, Homo sapien
aactttcctttcgacttatagtcag

SEQ ID NO: 1176754 - DNA, 25 bp, Homo sapien
ttattcctccttctcctcatcctcc

SEQ ID NO: 1176755 - DNA, 25 bp, Homo sapien
ctcttcctcttcctcttccaccttt

SEQ ID NO: 1176756 - DNA, 25 bp, Homo sapien
tctcttcctcttcctcttccacctt

SEQ ID NO: 1176757 - DNA, 25 bp, Homo sapien
ccctgctctaagtattcacaaggag

SEQ ID NO: 1176758 - DNA, 25 bp, Homo sapien
taagagatgtgtcaattacggcgct

SEQ ID NO: 1176759 - DNA, 25 bp, Homo sapien
ctaatgagggcaacagacacttctc

SEQ ID NO: 1176760 - DNA, 25 bp, Homo sapien
tcacaaggagacgataaacagtttc

SEQ ID NO: 1176761 - DNA, 25 bp, Homo sapien
acaatgtgaccgtgatcaaattttg

SEQ ID NO: 1176762 - DNA, 25 bp, Homo sapien
ttgagagactacaatgtgaccgtga

SEQ ID NO: 1176763 - DNA, 25 bp, Homo sapien
gcactttgagagactacaatgtgac

SEQ ID NO: 1176764 - DNA, 25 bp, Homo sapien
gactacaatgtgaccgtgatcaaat

SEQ ID NO: 1176765 - DNA, 25 bp, Homo sapien
ttctcttcactgtaaaggagttctc

SEQ ID NO: 1176766 - DNA, 25 bp, Homo sapien
taggcctatggctagctctagacat

SEQ ID NO: 1176767 - DNA, 25 bp, Homo sapien
aggaatgtttcattaggcctatggc

SEQ ID NO: 1176768 - DNA, 25 bp, Homo sapien
ctctgttgtggcataggaatgtttc

SEQ ID NO: 1176769 - DNA, 25 bp, Homo sapien
ttacagctcggatgactgccactga

SEQ ID NO: 1176770 - DNA, 25 bp, Homo sapien
atctgtaatacctaacaagggtact

SEQ ID NO: 1176771 - DNA, 25 bp, Homo sapien
tcaaagttgtactgtatcaatgaca

SEQ ID NO: 1176772 - DNA, 25 bp, Homo sapien
gccatcgtgtgcctatgattgttct

SEQ ID NO: 1176773 - DNA, 25 bp, Homo sapien
tcaggcctgagtaggctctgtatgc

SEQ ID NO: 1176774 - DNA, 25 bp, Homo sapien
tacttcacattcagtgtaaggccca

SEQ ID NO: 1176775 - DNA, 25 bp, Homo sapien
tttagaggaattgctttgctctcag

SEQ ID NO: 1176776 - DNA, 25 bp, Homo sapien
tcagtgtaaggcccagagattttag

SEQ ID NO: 1176777 - DNA, 25 bp, Homo sapien
gagaagtgcacctttttaaataatc

SEQ ID NO: 1176778 - DNA, 25 bp, Homo sapien
catggaattcagtctgagtggagta

SEQ ID NO: 1176779 - DNA, 25 bp, Homo sapien
aataatccatggaattcagtctgag

SEQ ID NO: 1176780 - DNA, 25 bp, Homo sapien
gcaaggagaagtgcacctttttaaa

SEQ ID NO: 1176781 - DNA, 25 bp, Homo sapien
ctctttgatgtagcttttcacaagg

SEQ ID NO: 1176782 - DNA, 25 bp, Homo sapien
ttgatgtagcttttcacaagggctg

SEQ ID NO: 1176783 - DNA, 25 bp, Homo sapien
ctttgatgtagcttttcacaagggc

SEQ ID NO: 1176784 - DNA, 25 bp, Homo sapien
tttgatgtagcttttcacaagggct

SEQ ID NO: 1176785 - DNA, 25 bp, Homo sapien
ttgcaattggaattctcccttgcct

SEQ ID NO: 1176786 - DNA, 25 bp, Homo sapien
tttgcaattggaattctcccttgcc

SEQ ID NO: 1176787 - DNA, 25 bp, Homo sapien
ctttgcaattggaattctcccttgc

SEQ ID NO: 1176788 - DNA, 25 bp, Homo sapien
tatcgccaggaatagcatcatcact

SEQ ID NO: 1176789 - DNA, 25 bp, Homo sapien
agtttctaagcctcttatcgccagg

SEQ ID NO: 1176790 - DNA, 25 bp, Homo sapien
aggcctgccgtgtcgtcactcagaa

SEQ ID NO: 1176791 - DNA, 25 bp, Homo sapien
gacagcctcgcctcacagtttctaa

SEQ ID NO: 1176792 - DNA, 25 bp, Homo sapien
atgtttggtaaattccccattgaag

SEQ ID NO: 1176793 - DNA, 25 bp, Homo sapien
ggcatactgttattcacagtatttc

SEQ ID NO: 1176794 - DNA, 25 bp, Homo sapien
actgttcccttcgaatgagttagga

SEQ ID NO: 1176795 - DNA, 25 bp, Homo sapien
tcttaaatcagtttggtagcttgtt

SEQ ID NO: 1176796 - DNA, 25 bp, Homo sapien
agcaacttggcgtctctagtttctt

SEQ ID NO: 1176797 - DNA, 25 bp, Homo sapien
cttggcgtctctagtttctttcttc

SEQ ID NO: 1176798 - DNA, 25 bp, Homo sapien
aacttggcgtctctagtttctttct

SEQ ID NO: 1176799 - DNA, 25 bp, Homo sapien
caacttggcgtctctagtttctttc

SEQ ID NO: 1176800 - DNA, 25 bp, Homo sapien
ttgataggccttgccgaggtttttc

SEQ ID NO: 1176801 - DNA, 25 bp, Homo sapien
gattgtgtctactagccgttctttc

SEQ ID NO: 1176802 - DNA, 25 bp, Homo sapien
ataggccttgccgaggtttttctgg

SEQ ID NO: 1176803 - DNA, 25 bp, Homo sapien
attcagaaaggtgactgtgatttgc

SEQ ID NO: 1176804 - DNA, 25 bp, Homo sapien
caaggtcgctaagagtaagaagctg

SEQ ID NO: 1176805 - DNA, 25 bp, Homo sapien
aagctggagcccgtccaatccactg

SEQ ID NO: 1176806 - DNA, 25 bp, Homo sapien
gagtaagaagctggagcccgtccaa

SEQ ID NO: 1176807 - DNA, 25 bp, Homo sapien
tggcagaacaaggtcgctaagagta

SEQ ID NO: 1176808 - DNA, 25 bp, Homo sapien
ggagtcaacagtcaagtcaaagaaa

SEQ ID NO: 1176809 - DNA, 25 bp, Homo sapien
tggagtcaacagtcaagtcaaagaa

SEQ ID NO: 1176810 - DNA, 25 bp, Homo sapien
gaattatgtcaaaatctaaagatga

SEQ ID NO: 1176811 - DNA, 25 bp, Homo sapien
cattttggtgacaaacgtgtgaagt

SEQ ID NO: 1176812 - DNA, 25 bp, Homo sapien
atttgacagaaggtgccactgcagg

SEQ ID NO: 1176813 - DNA, 25 bp, Homo sapien
tgccactgcaggttgaagaggcttc

SEQ ID NO: 1176814 - DNA, 25 bp, Homo sapien
aataccttgctgtgtgagatgtcgg

SEQ ID NO: 1176815 - DNA, 25 bp, Homo sapien
gaataccttgctgtgtgagatgtcg

SEQ ID NO: 1176816 - DNA, 25 bp, Homo sapien
gttggaataccttgctgtgtgagat

SEQ ID NO: 1176817 - DNA, 25 bp, Homo sapien
accttgctgtgtgagatgtcggtgt

SEQ ID NO: 1176818 - DNA, 25 bp, Homo sapien
tttgcccttaaggccctcagttcca

SEQ ID NO: 1176819 - DNA, 25 bp, Homo sapien
ccttaaggccctcagttccacaggg

SEQ ID NO: 1176820 - DNA, 25 bp, Homo sapien
cttcctgacaagagtaacggctctt

SEQ ID NO: 1176821 - DNA, 25 bp, Homo sapien
caagagtaacggctcttttgccctt

SEQ ID NO: 1176822 - DNA, 25 bp, Homo sapien
caactgccatggaaggagaaacttc

SEQ ID NO: 1176823 - DNA, 25 bp, Homo sapien
cttctggaacatagaaagcttagaa

SEQ ID NO: 1176824 - DNA, 25 bp, Homo sapien
catggaaggagaaacttctggaaca

SEQ ID NO: 1176825 - DNA, 25 bp, Homo sapien
gcttagaatgctctcatcaagattg

SEQ ID NO: 1176826 - DNA, 25 bp, Homo sapien
gacacagatagtatgtctgttggat

SEQ ID NO: 1176827 - DNA, 25 bp, Homo sapien
tatgtctgttggattgggctggcca

SEQ ID NO: 1176828 - DNA, 25 bp, Homo sapien
ttggattgggctggccaacctccac

SEQ ID NO: 1176829 - DNA, 25 bp, Homo sapien
gatagtatgtctgttggattgggct

SEQ ID NO: 1176830 - DNA, 25 bp, Homo sapien
tagatggctacatctgggtttattg

SEQ ID NO: 1176831 - DNA, 25 bp, Homo sapien
cccaagggctggagtaaccagcacc

SEQ ID NO: 1176832 - DNA, 25 bp, Homo sapien
tggagtaaccagcaccattttcagg

SEQ ID NO: 1176833 - DNA, 25 bp, Homo sapien
agatggctacatctgggtttattgc

SEQ ID NO: 1176834 - DNA, 25 bp, Homo sapien
ctgtctcatagctttgccctcggtc

SEQ ID NO: 1176835 - DNA, 25 bp, Homo sapien
tctcctggtcttgggcaatagggtt

SEQ ID NO: 1176836 - DNA, 25 bp, Homo sapien
gctttgccctcggtctcctggtctt

SEQ ID NO: 1176837 - DNA, 25 bp, Homo sapien
gtctcctggtcttgggcaatagggt

SEQ ID NO: 1176838 - DNA, 25 bp, Homo sapien
ttcatggctctgagtattccctctc

SEQ ID NO: 1176839 - DNA, 25 bp, Homo sapien
atggctctgagtattccctctctcc

SEQ ID NO: 1176840 - DNA, 25 bp, Homo sapien
aatgatttcatggctctgagtattc

SEQ ID NO: 1176841 - DNA, 25 bp, Homo sapien
agggaattggttttaatgatttcat

SEQ ID NO: 1176842 - DNA, 25 bp, Homo sapien
tctggatcaataccatcggatggct

SEQ ID NO: 1176843 - DNA, 25 bp, Homo sapien
catcggatggctctgtagctgcaaa

SEQ ID NO: 1176844 - DNA, 25 bp, Homo sapien
gctgcaaagattgtttcacacgcac

SEQ ID NO: 1176845 - DNA, 25 bp, Homo sapien
taccaatttccacatctggatcaat

SEQ ID NO: 1176846 - DNA, 25 bp, Homo sapien
gaccatgctggtgaagtatcaccca

SEQ ID NO: 1176847 - DNA, 25 bp, Homo sapien
cactgttcccgttgccaagaccatg

SEQ ID NO: 1176848 - DNA, 25 bp, Homo sapien
ccgttgccaagaccatgctggtgaa

SEQ ID NO: 1176849 - DNA, 25 bp, Homo sapien
ttgaccttgggccttgttctttcta

SEQ ID NO: 1176850 - DNA, 25 bp, Homo sapien
ttgtctgtggctacatgccacatac

SEQ ID NO: 1176851 - DNA, 25 bp, Homo sapien
tcattgtctgtggctacatgccaca

SEQ ID NO: 1176852 - DNA, 25 bp, Homo sapien
cattgtctgtggctacatgccacat

SEQ ID NO: 1176853 - DNA, 25 bp, Homo sapien
attgtctgtggctacatgccacata

SEQ ID NO: 1176854 - DNA, 25 bp, Homo sapien
ttaaacaaactttgacaggtgacat

SEQ ID NO: 1176855 - DNA, 25 bp, Homo sapien
taagctagcttcaggtggttgctgt

SEQ ID NO: 1176856 - DNA, 25 bp, Homo sapien
ggtgacatcaaagatcaagactgaa

SEQ ID NO: 1176857 - DNA, 25 bp, Homo sapien
tgaatagatcattctgagctgaagg

SEQ ID NO: 1176858 - DNA, 25 bp, Homo sapien
tgccattttaatgtgagcgtcatgt

SEQ ID NO: 1176859 - DNA, 25 bp, Homo sapien
atgtcctgccattttaatgtgagcg

SEQ ID NO: 1176860 - DNA, 25 bp, Homo sapien
tggctgcccgcagtatcattttctc

SEQ ID NO: 1176861 - DNA, 25 bp, Homo sapien
tgagcgtcatgtggatagcatatcc

SEQ ID NO: 1176862 - DNA, 25 bp, Homo sapien
cctgacagttggctagctatgcgtt

SEQ ID NO: 1176863 - DNA, 25 bp, Homo sapien
acagttggctagctatgcgttagtc

SEQ ID NO: 1176864 - DNA, 25 bp, Homo sapien
atgcctgacagttggctagctatgc

SEQ ID NO: 1176865 - DNA, 25 bp, Homo sapien
tgacagttggctagctatgcgttag

SEQ ID NO: 1176866 - DNA, 25 bp, Homo sapien
tgaaatagaatcttcaggccaggcg

SEQ ID NO: 1176867 - DNA, 25 bp, Homo sapien
cataggtgaaatagaatcttcaggc

SEQ ID NO: 1176868 - DNA, 25 bp, Homo sapien
taggtgaaatagaatcttcaggcca

SEQ ID NO: 1176869 - DNA, 25 bp, Homo sapien
ggtgaaatagaatcttcaggccagg

SEQ ID NO: 1176870 - DNA, 25 bp, Homo sapien
caaatatgcattgatcgggagaaag

SEQ ID NO: 1176871 - DNA, 25 bp, Homo sapien
ggctcccggcgcttaaatctgtggc

SEQ ID NO: 1176872 - DNA, 25 bp, Homo sapien
cccacttggcgaaaagaaatcagag

SEQ ID NO: 1176873 - DNA, 25 bp, Homo sapien
tccgggccagagtgatctcaaaggg

SEQ ID NO: 1176874 - DNA, 25 bp, Homo sapien
gaagggtgttgactccaaaaagcaa

SEQ ID NO: 1176875 - DNA, 25 bp, Homo sapien
aaatccctttgcctctttagaggat

SEQ ID NO: 1176876 - DNA, 25 bp, Homo sapien
tgagggtggggataagggctggtgg

SEQ ID NO: 1176877 - DNA, 25 bp, Homo sapien
tttgcctctttagaggatggtggga

SEQ ID NO: 1176878 - DNA, 25 bp, Homo sapien
gaagcaccaaggctttttatccttc

SEQ ID NO: 1176879 - DNA, 25 bp, Homo sapien
aaggctacggcagcccccggctctt

SEQ ID NO: 1176880 - DNA, 25 bp, Homo sapien
tcctcggctcggctcctgggaagca

SEQ ID NO: 1176881 - DNA, 25 bp, Homo sapien
ttctgctcctcggctcggctcctgg

SEQ ID NO: 1176882 - DNA, 25 bp, Homo sapien
gcatcagcctgggctgctcgtccat

SEQ ID NO: 1176883 - DNA, 25 bp, Homo sapien
cccgaccccagcatgggaatgcatc

SEQ ID NO: 1176884 - DNA, 25 bp, Homo sapien
cccagcatgggaatgcatcagcctg

SEQ ID NO: 1176885 - DNA, 25 bp, Homo sapien
accccagcatgggaatgcatcagcc

SEQ ID NO: 1176886 - DNA, 25 bp, Homo sapien
gcctcatccaaactctggtctgtga

SEQ ID NO: 1176887 - DNA, 25 bp, Homo sapien
cctgcgcctcatccaaactctggtc

SEQ ID NO: 1176888 - DNA, 25 bp, Homo sapien
catccaaactctggtctgtgatggt

SEQ ID NO: 1176889 - DNA, 25 bp, Homo sapien
tgcgcctcatccaaactctggtctg

SEQ ID NO: 1176890 - DNA, 25 bp, Homo sapien
aaaaaagcgctgtggtgattcggtt

SEQ ID NO: 1176891 - DNA, 25 bp, Homo sapien
tggtgattcggttcccattgtttcc

SEQ ID NO: 1176892 - DNA, 25 bp, Homo sapien
tttttcaaaaaaagcgctgtggtga

SEQ ID NO: 1176893 - DNA, 25 bp, Homo sapien
cgctgtggtgattcggttcccattg

SEQ ID NO: 1176894 - DNA, 25 bp, Homo sapien
aaattttactcctccgccatgtagt

SEQ ID NO: 1176895 - DNA, 25 bp, Homo sapien
actttcgataacaacgctccttcaa

SEQ ID NO: 1176896 - DNA, 25 bp, Homo sapien
tcaaattttactcctccgccatgta

SEQ ID NO: 1176897 - DNA, 25 bp, Homo sapien
gataacaacgctccttcaaatttta

SEQ ID NO: 1176898 - DNA, 25 bp, Homo sapien
tacacagccacatctcggcatgggc

SEQ ID NO: 1176899 - DNA, 25 bp, Homo sapien
taaagcagtaaaaagtgccgagggc

SEQ ID NO: 1176900 - DNA, 25 bp, Homo sapien
gccgagggccgcttttggatcagtt

SEQ ID NO: 1176901 - DNA, 25 bp, Homo sapien
tacagagtcccctcaacaagaaggc

SEQ ID NO: 1176902 - DNA, 25 bp, Homo sapien
cattctgtggcagtttaaagcatgt

SEQ ID NO: 1176903 - DNA, 25 bp, Homo sapien
gcttcattctgtggcagtttaaagc

SEQ ID NO: 1176904 - DNA, 25 bp, Homo sapien
aggcttcattctgtggcagtttaaa

SEQ ID NO: 1176905 - DNA, 25 bp, Homo sapien
ttcattctgtggcagtttaaagcat

SEQ ID NO: 1176906 - DNA, 25 bp, Homo sapien
gatttaattggccaaagaaaatgct

SEQ ID NO: 1176907 - DNA, 25 bp, Homo sapien
agtgatttaattggccaaagaaaat

SEQ ID NO: 1176908 - DNA, 25 bp, Homo sapien
taagtgatttaattggccaaagaaa

SEQ ID NO: 1176909 - DNA, 25 bp, Homo sapien
ttaagtgatttaattggccaaagaa

SEQ ID NO: 1176910 - DNA, 25 bp, Homo sapien
tttttgccccaaagatacatcagtc

SEQ ID NO: 1176911 - DNA, 25 bp, Homo sapien
tagcgcattccacaaaggtatttga

SEQ ID NO: 1176912 - DNA, 25 bp, Homo sapien
tatctcatggcgttatactctccta

SEQ ID NO: 1176913 - DNA, 25 bp, Homo sapien
tgttgagaacctctagtctgctgct

SEQ ID NO: 1176914 - DNA, 25 bp, Homo sapien
cctcctgggatgtgttataagtgtg

SEQ ID NO: 1176915 - DNA, 25 bp, Homo sapien
aaatttaaatgccctcctgggatgt

SEQ ID NO: 1176916 - DNA, 25 bp, Homo sapien
aaatgccctcctgggatgtgttata

SEQ ID NO: 1176917 - DNA, 25 bp, Homo sapien
tttaaatgccctcctgggatgtgtt

SEQ ID NO: 1176918 - DNA, 25 bp, Homo sapien
gatgtcgctaaatgtccttcccaga

SEQ ID NO: 1176919 - DNA, 25 bp, Homo sapien
cattcaacaaaggagctgcgtacta

SEQ ID NO: 1176920 - DNA, 25 bp, Homo sapien
taagctttggcaaggcaacctggaa

SEQ ID NO: 1176921 - DNA, 25 bp, Homo sapien
tgtacatttaagtgccctgacaggc

SEQ ID NO: 1176922 - DNA, 25 bp, Homo sapien
gaaaaggtcaggttgtcttctatca

SEQ ID NO: 1176923 - DNA, 25 bp, Homo sapien
tcttctatcaaacagtgggtgaagg

SEQ ID NO: 1176924 - DNA, 25 bp, Homo sapien
tcaaggctgtccttatgacaaagat

SEQ ID NO: 1176925 - DNA, 25 bp, Homo sapien
aaatctactatgaatcaaggctgtc

SEQ ID NO: 1176926 - DNA, 25 bp, Homo sapien
gtgcctactgcagccactctgtaaa

SEQ ID NO: 1176927 - DNA, 25 bp, Homo sapien
ttctcaaaatctaaacatagagtta

SEQ ID NO: 1176928 - DNA, 25 bp, Homo sapien
atgtgcctactgcagccactctgta

SEQ ID NO: 1176929 - DNA, 25 bp, Homo sapien
acatagagttatcacgagccagcaa

SEQ ID NO: 1176930 - DNA, 25 bp, Homo sapien
tgctgaagacaaaacttagtgccat

SEQ ID NO: 1176931 - DNA, 25 bp, Homo sapien
catagagaggagacatcattgaatg

SEQ ID NO: 1176932 - DNA, 25 bp, Homo sapien
cacagtagagtcctaaacatagaga

SEQ ID NO: 1176933 - DNA, 25 bp, Homo sapien
cctgatcatgcatacttcaagtcaa

SEQ ID NO: 1176934 - DNA, 25 bp, Homo sapien
aacattaccatttcaaggccttagc

SEQ ID NO: 1176935 - DNA, 25 bp, Homo sapien
catttcaaggccttagcacaaaaaa

SEQ ID NO: 1176936 - DNA, 25 bp, Homo sapien
tctccacagaactctagaagtaggg

SEQ ID NO: 1176937 - DNA, 25 bp, Homo sapien
tttgctgcgttttgcccgagacttt

SEQ ID NO: 1176938 - DNA, 25 bp, Homo sapien
gatccttcccaggaacagaccctag

SEQ ID NO: 1176939 - DNA, 25 bp, Homo sapien
gctctgaatgtgactccaagcccac

SEQ ID NO: 1176940 - DNA, 25 bp, Homo sapien
tttaataaaggaagtatggctccca

SEQ ID NO: 1176941 - DNA, 25 bp, Homo sapien
caagcccacattgagaggtgtttaa

SEQ ID NO: 1176942 - DNA, 25 bp, Homo sapien
cacacgcggccttctgaatttcact

SEQ ID NO: 1176943 - DNA, 25 bp, Homo sapien
gtgctcacacgcggccttctgaatt

SEQ ID NO: 1176944 - DNA, 25 bp, Homo sapien
cacgtgctcacacgcggccttctga

SEQ ID NO: 1176945 - DNA, 25 bp, Homo sapien
accaccgaggtctgcacagcaccgg

SEQ ID NO: 1176946 - DNA, 25 bp, Homo sapien
gaaagacatcacacggaatatcaca

SEQ ID NO: 1176947 - DNA, 25 bp, Homo sapien
gagaaagacatcacacggaatatca

SEQ ID NO: 1176948 - DNA, 25 bp, Homo sapien
acagtgagaaagacatcacacggaa

SEQ ID NO: 1176949 - DNA, 25 bp, Homo sapien
gtgagaaagacatcacacggaatat

SEQ ID NO: 1176950 - DNA, 25 bp, Homo sapien
tcaggaaataagctcaaggcgagtt

SEQ ID NO: 1176951 - DNA, 25 bp, Homo sapien
acttgttttgcagccagccacagtc

SEQ ID NO: 1176952 - DNA, 25 bp, Homo sapien
caaggcgagttttgaacttatcctc

SEQ ID NO: 1176953 - DNA, 25 bp, Homo sapien
cagccacagtcatgagataattaaa

SEQ ID NO: 1176954 - DNA, 25 bp, Homo sapien
aattttttatcatgtcgttgagggc

SEQ ID NO: 1176955 - DNA, 25 bp, Homo sapien
gcaattatccagctagagtacaata

SEQ ID NO: 1176956 - DNA, 25 bp, Homo sapien
tgggctgagcatacaaatcctgttc

SEQ ID NO: 1176957 - DNA, 25 bp, Homo sapien
tattaactgaatatgtactatgggc

SEQ ID NO: 1176958 - DNA, 25 bp, Homo sapien
taagccagtcacaagaatcacaatg

SEQ ID NO: 1176959 - DNA, 25 bp, Homo sapien
gccttcttaggaaccatgtttcttc

SEQ ID NO: 1176960 - DNA, 25 bp, Homo sapien
gaaaaatggaacagtgtctcccagc

SEQ ID NO: 1176961 - DNA, 25 bp, Homo sapien
ttttacacgtatgtctcagggactg

SEQ ID NO: 1176962 - DNA, 25 bp, Homo sapien
tgctagaagcatagacctgaaaggg

SEQ ID NO: 1176963 - DNA, 25 bp, Homo sapien
gatcatcagctaacaacaaagaggc

SEQ ID NO: 1176964 - DNA, 25 bp, Homo sapien
ctttgaataagagtgcatgacatcc

SEQ ID NO: 1176965 - DNA, 25 bp, Homo sapien
tgcctcatccgcacaaaacgatgtg

SEQ ID NO: 1176966 - DNA, 25 bp, Homo sapien
gcgggtgtatctcactcactcatca

SEQ ID NO: 1176967 - DNA, 25 bp, Homo sapien
catatactggctggcaacttttacc

SEQ ID NO: 1176968 - DNA, 25 bp, Homo sapien
ggctggcaacttttaccgtgtgatt

SEQ ID NO: 1176969 - DNA, 25 bp, Homo sapien
tttttctattgtgctctacaggcgg

SEQ ID NO: 1176970 - DNA, 25 bp, Homo sapien
gcggccagccaagagctagttttgt

SEQ ID NO: 1176971 - DNA, 25 bp, Homo sapien
cagcagacttgtagagagcaaggga

SEQ ID NO: 1176972 - DNA, 25 bp, Homo sapien
caaacaaggctgttgggcccatgct

SEQ ID NO: 1176973 - DNA, 25 bp, Homo sapien
ggaattcctaataaagccacagcag

SEQ ID NO: 1176974 - DNA, 25 bp, Homo sapien
gttctcgccgctggagcctcaaaaa

SEQ ID NO: 1176975 - DNA, 25 bp, Homo sapien
agaggccggcaaggagaaatccgct

SEQ ID NO: 1176976 - DNA, 25 bp, Homo sapien
gcgccactttgttcagagtctggat

SEQ ID NO: 1176977 - DNA, 25 bp, Homo sapien
tctggattcgaactttggatgaacc

SEQ ID NO: 1176978 - DNA, 25 bp, Homo sapien
tggatgagcaggcattacagccaat

SEQ ID NO: 1176979 - DNA, 25 bp, Homo sapien
ggcattacagccaatattctactct

SEQ ID NO: 1176980 - DNA, 25 bp, Homo sapien
taatttgctctatggttctctggtg

SEQ ID NO: 1176981 - DNA, 25 bp, Homo sapien
ggatcatttagcactctggaagaag

SEQ ID NO: 1176982 - DNA, 25 bp, Homo sapien
tgagctaggcgctgacaatgagcaa

SEQ ID NO: 1176983 - DNA, 25 bp, Homo sapien
ccaagtccatagagttgtaccaggg

SEQ ID NO: 1176984 - DNA, 25 bp, Homo sapien
cgtgggaccactactgaaaactgct

SEQ ID NO: 1176985 - DNA, 25 bp, Homo sapien
tctgtgctgtctagtaaggttgcca

SEQ ID NO: 1176986 - DNA, 25 bp, Homo sapien
cctgttgttgattaacactaaataa

SEQ ID NO: 1176987 - DNA, 25 bp, Homo sapien
gttctttagagcacctttcatcctg

SEQ ID NO: 1176988 - DNA, 25 bp, Homo sapien
taatggctgtcaataatcataacca

SEQ ID NO: 1176989 - DNA, 25 bp, Homo sapien
tccataaataagatttcccactggt

SEQ ID NO: 1176990 - DNA, 25 bp, Homo sapien
tatgacaaaccagtaatgtccccag

SEQ ID NO: 1176991 - DNA, 25 bp, Homo sapien
ccatgtaggaaatgaggcccgattt

SEQ ID NO: 1176992 - DNA, 25 bp, Homo sapien
gagaccctaatgcacttgaaggtaa

SEQ ID NO: 1176993 - DNA, 25 bp, Homo sapien
gatgaactagaaagctcatgcacca

SEQ ID NO: 1176994 - DNA, 25 bp, Homo sapien
tttataaaatgcaagccattcctca

SEQ ID NO: 1176995 - DNA, 25 bp, Homo sapien
tgaagatgacaacctctggcccatt

SEQ ID NO: 1176996 - DNA, 25 bp, Homo sapien
taaaatgcaagccattcctcaggta

SEQ ID NO: 1176997 - DNA, 25 bp, Homo sapien
cattcctcaggtatgaagatgacaa

SEQ ID NO: 1176998 - DNA, 25 bp, Homo sapien
catggttgtaactagccagggccca

SEQ ID NO: 1176999 - DNA, 25 bp, Homo sapien
gggccctcccatagcaatttcagca

SEQ ID NO: 1177000 - DNA, 25 bp, Homo sapien
gaatcagtctcagccaaaacacagg

SEQ ID NO: 1177001 - DNA, 25 bp, Homo sapien
gaatgtcgcataaccaagctgcaga

SEQ ID NO: 1177002 - DNA, 25 bp, Homo sapien
ccagagactttgtgttaaccagtac

SEQ ID NO: 1177003 - DNA, 25 bp, Homo sapien
tgacctgaggcacacaacactgaaa

SEQ ID NO: 1177004 - DNA, 25 bp, Homo sapien
tccttctaaaggatgttgcgagcct

SEQ ID NO: 1177005 - DNA, 25 bp, Homo sapien
taaccagtacactccgcataggtgg

SEQ ID NO: 1177006 - DNA, 25 bp, Homo sapien
gaagatgcccatgagttttccaact

SEQ ID NO: 1177007 - DNA, 25 bp, Homo sapien
tgtaagccaggtaagaatagtctct

SEQ ID NO: 1177008 - DNA, 25 bp, Homo sapien
gactacttctgttatgacgccagga

SEQ ID NO: 1177009 - DNA, 25 bp, Homo sapien
cgccaggaagccttttgctaagaca

SEQ ID NO: 1177010 - DNA, 25 bp, Homo sapien
tacagaaccgatcgcttgtagctct

SEQ ID NO: 1177011 - DNA, 25 bp, Homo sapien
tgtgatcatttaggacaacaggcct

SEQ ID NO: 1177012 - DNA, 25 bp, Homo sapien
gcctaaggtccttggtgaaccagag

SEQ ID NO: 1177013 - DNA, 25 bp, Homo sapien
gggagcatgcaaatgtaccatccat

SEQ ID NO: 1177014 - DNA, 25 bp, Homo sapien
acacaagcatcattatttgaaacac

SEQ ID NO: 1177015 - DNA, 25 bp, Homo sapien
cagaaatgtgaaaaaggcccaaagt

SEQ ID NO: 1177016 - DNA, 25 bp, Homo sapien
atgtatacacaagcatcattatttg

SEQ ID NO: 1177017 - DNA, 25 bp, Homo sapien
ctgagccccagtgattatgtataca

SEQ ID NO: 1177018 - DNA, 25 bp, Homo sapien
ggtgggagccccatcatattctgca

SEQ ID NO: 1177019 - DNA, 25 bp, Homo sapien
tctcatacagtgatccctgggtgcc

SEQ ID NO: 1177020 - DNA, 25 bp, Homo sapien
tcataacaggatggaaagccaagct

SEQ ID NO: 1177021 - DNA, 25 bp, Homo sapien
tcacttgtccaaggttaatctgcca

SEQ ID NO: 1177022 - DNA, 25 bp, Homo sapien
gaacctatcttctatgtgtacctct

SEQ ID NO: 1177023 - DNA, 25 bp, Homo sapien
tttttggcacaagaacctatcttct

SEQ ID NO: 1177024 - DNA, 25 bp, Homo sapien
ggcacaagaacctatcttctatgtg

SEQ ID NO: 1177025 - DNA, 25 bp, Homo sapien
tatcttctatgtgtacctctcccat

SEQ ID NO: 1177026 - DNA, 25 bp, Homo sapien
gaatcctgggttcatacacaatctt

SEQ ID NO: 1177027 - DNA, 25 bp, Homo sapien
gaaacaaacatcagacgtaataaca

SEQ ID NO: 1177028 - DNA, 25 bp, Homo sapien
gtctttctgcgtacaataaaaatgt

SEQ ID NO: 1177029 - DNA, 25 bp, Homo sapien
acatcagacgtaataacagaatcct

SEQ ID NO: 1177030 - DNA, 25 bp, Homo sapien
aacgactcagtgagaaagacactga

SEQ ID NO: 1177031 - DNA, 25 bp, Homo sapien
ttccaatttcaaacgactcagtgag

SEQ ID NO: 1177032 - DNA, 25 bp, Homo sapien
aagacactgataatgaatgtgcttt

SEQ ID NO: 1177033 - DNA, 25 bp, Homo sapien
tttcaaacgactcagtgagaaagac

SEQ ID NO: 1177034 - DNA, 25 bp, Homo sapien
gaatctccacttagtattaacacac

SEQ ID NO: 1177035 - DNA, 25 bp, Homo sapien
ttataatttcattattagcagaaaa

SEQ ID NO: 1177036 - DNA, 25 bp, Homo sapien
agaatctccacttagtattaacaca

SEQ ID NO: 1177037 - DNA, 25 bp, Homo sapien
aatctccacttagtattaacacaca

SEQ ID NO: 1177038 - DNA, 25 bp, Homo sapien
aactggggtggtggtgtgtgggctg

SEQ ID NO: 1177039 - DNA, 25 bp, Homo sapien
actggggtggtggtgtgtgggctgg

SEQ ID NO: 1177040 - DNA, 25 bp, Homo sapien
ctctgctttgatctttgatctatga

SEQ ID NO: 1177041 - DNA, 25 bp, Homo sapien
caggtactcataaacccaagggatt

SEQ ID NO: 1177042 - DNA, 25 bp, Homo sapien
tatacggtcatagcagagaaccagc

SEQ ID NO: 1177043 - DNA, 25 bp, Homo sapien
tggataaagttctccaagcccactg

SEQ ID NO: 1177044 - DNA, 25 bp, Homo sapien
attatttctactgagccacttctga

SEQ ID NO: 1177045 - DNA, 25 bp, Homo sapien
tgacagttgggctaagctgcactga

SEQ ID NO: 1177046 - DNA, 25 bp, Homo sapien
cgacaaacgcctgtcgagtgacagt

SEQ ID NO: 1177047 - DNA, 25 bp, Homo sapien
tagtgttgattttgtccgacaaacg

SEQ ID NO: 1177048 - DNA, 25 bp, Homo sapien
aagagaaccattaatcttggtctgg

SEQ ID NO: 1177049 - DNA, 25 bp, Homo sapien
gtcaaggcccatttacccagaccag

SEQ ID NO: 1177050 - DNA, 25 bp, Homo sapien
gctgggctcatgcaccttgttccaa

SEQ ID NO: 1177051 - DNA, 25 bp, Homo sapien
gggagcttgcaacgcccattgttgg

SEQ ID NO: 1177052 - DNA, 25 bp, Homo sapien
tggaggccaccagatttgtcaaggc

SEQ ID NO: 1177053 - DNA, 25 bp, Homo sapien
ggatcttggaattaatggtctccag

SEQ ID NO: 1177054 - DNA, 25 bp, Homo sapien
cctaactgattctgtatggattaag

SEQ ID NO: 1177055 - DNA, 25 bp, Homo sapien
agatgggagcaaaccatcctaactg

SEQ ID NO: 1177056 - DNA, 25 bp, Homo sapien
tcaattaataccatccaggcaccca

SEQ ID NO: 1177057 - DNA, 25 bp, Homo sapien
ataaataaggaacacttcaccactt

SEQ ID NO: 1177058 - DNA, 25 bp, Homo sapien
aggaacacttcaccacttcgcatgt

SEQ ID NO: 1177059 - DNA, 25 bp, Homo sapien
tgcctaggggccacaccaatcttct

SEQ ID NO: 1177060 - DNA, 25 bp, Homo sapien
aataaggaacacttcaccacttcgc

SEQ ID NO: 1177061 - DNA, 25 bp, Homo sapien
agctgggtacagtgccttatatctg

SEQ ID NO: 1177062 - DNA, 25 bp, Homo sapien
ctgggtacagtgccttatatctgta

SEQ ID NO: 1177063 - DNA, 25 bp, Homo sapien
gctgggtacagtgccttatatctgt

SEQ ID NO: 1177064 - DNA, 25 bp, Homo sapien
gatgaaaggccagtttagaacccaa

SEQ ID NO: 1177065 - DNA, 25 bp, Homo sapien
gagctcttagcaggacttggatgaa

SEQ ID NO: 1177066 - DNA, 25 bp, Homo sapien
gagcaatctgctgagtggagcactt

SEQ ID NO: 1177067 - DNA, 25 bp, Homo sapien
tgtgtgttgcaccaggagcaatctg

SEQ ID NO: 1177068 - DNA, 25 bp, Homo sapien
catggccatggaatgtgaccgtcag

SEQ ID NO: 1177069 - DNA, 25 bp, Homo sapien
gatgaaaccccgtggaactagggca

SEQ ID NO: 1177070 - DNA, 25 bp, Homo sapien
tgctgggcccctaatgacaagagag

SEQ ID NO: 1177071 - DNA, 25 bp, Homo sapien
tctgtcatgggaaggatgcaaatcc

SEQ ID NO: 1177072 - DNA, 25 bp, Homo sapien
ctaagtccttgctgatattaaagga

SEQ ID NO: 1177073 - DNA, 25 bp, Homo sapien
catgttcactaagtccttgctgata

SEQ ID NO: 1177074 - DNA, 25 bp, Homo sapien
taccatctaccacagatttcatggg

SEQ ID NO: 1177075 - DNA, 25 bp, Homo sapien
caaagagcacatgttcactaagtcc

SEQ ID NO: 1177076 - DNA, 25 bp, Homo sapien
ctccttgaaggcaaatagtttttgt

SEQ ID NO: 1177077 - DNA, 25 bp, Homo sapien
tgctgcagactgacatggtaacaaa

SEQ ID NO: 1177078 - DNA, 25 bp, Homo sapien
ggttaaaccagcctcaagcttcgcc

SEQ ID NO: 1177079 - DNA, 25 bp, Homo sapien
tatctggttcttgtgtggactggct

SEQ ID NO: 1177080 - DNA, 25 bp, Homo sapien
aaatgttgccctatctgcagtatgc

SEQ ID NO: 1177081 - DNA, 25 bp, Homo sapien
cagggattctcagctataacctaca

SEQ ID NO: 1177082 - DNA, 25 bp, Homo sapien
taaatatgtgagtcaagctgctccc

SEQ ID NO: 1177083 - DNA, 25 bp, Homo sapien
tcaggtagacatgagtttaaacccc

SEQ ID NO: 1177084 - DNA, 25 bp, Homo sapien
tagggacatcatcgacatttaggag

SEQ ID NO: 1177085 - DNA, 25 bp, Homo sapien
gaaagagacagatctgccagacgga

SEQ ID NO: 1177086 - DNA, 25 bp, Homo sapien
gacggagagcccaactgattccact

SEQ ID NO: 1177087 - DNA, 25 bp, Homo sapien
taataacagtctggagtccccaaag

SEQ ID NO: 1177088 - DNA, 25 bp, Homo sapien
acatcctggacgttgaagcctttgg

SEQ ID NO: 1177089 - DNA, 25 bp, Homo sapien
gaagagttcattcagtgccttgagc

SEQ ID NO: 1177090 - DNA, 25 bp, Homo sapien
taggcattggtctattctctgcacc

SEQ ID NO: 1177091 - DNA, 25 bp, Homo sapien
gggaaggtgccatgaaaatcttaat

SEQ ID NO: 1177092 - DNA, 25 bp, Homo sapien
gggaagcctgcagtctttacgattt

SEQ ID NO: 1177093 - DNA, 25 bp, Homo sapien
tgaacacaaagtaaccccacagagg

SEQ ID NO: 1177094 - DNA, 25 bp, Homo sapien
gaaaattatgtagcctctctgggcc

SEQ ID NO: 1177095 - DNA, 25 bp, Homo sapien
tgcagtacattctagcatggacccc

SEQ ID NO: 1177096 - DNA, 25 bp, Homo sapien
tcaacaagtccagggtcattctaag

SEQ ID NO: 1177097 - DNA, 25 bp, Homo sapien
taatgtgcacacctagaggagcaag

SEQ ID NO: 1177098 - DNA, 25 bp, Homo sapien
caagcagcatgtactagacggcaga

SEQ ID NO: 1177099 - DNA, 25 bp, Homo sapien
tgtcctgctgggttaactggcaagg

SEQ ID NO: 1177100 - DNA, 25 bp, Homo sapien
cctggtactaaagggaatgctgcaa

SEQ ID NO: 1177101 - DNA, 25 bp, Homo sapien
tagaaagtacagatatcaccaggga

SEQ ID NO: 1177102 - DNA, 25 bp, Homo sapien
aatgacaaaggccatcagcgatgag

SEQ ID NO: 1177103 - DNA, 25 bp, Homo sapien
caaatgtgttcaacccagctgaagc

SEQ ID NO: 1177104 - DNA, 25 bp, Homo sapien
tagaactactgatgtgatgccacca

SEQ ID NO: 1177105 - DNA, 25 bp, Homo sapien
tcttcccctgagttatccaatccag

SEQ ID NO: 1177106 - DNA, 25 bp, Homo sapien
atccaatccagcgtgccatccttga

SEQ ID NO: 1177107 - DNA, 25 bp, Homo sapien
tgagttatccaatccagcgtgccat

SEQ ID NO: 1177108 - DNA, 25 bp, Homo sapien
atgaataactcctttggataatttc

SEQ ID NO: 1177109 - DNA, 25 bp, Homo sapien
taggaggccatacccaaagctacta

SEQ ID NO: 1177110 - DNA, 25 bp, Homo sapien
catgggcttaaactgtagtggtcaa

SEQ ID NO: 1177111 - DNA, 25 bp, Homo sapien
cagaatctgcctgacagtgggacac

SEQ ID NO: 1177112 - DNA, 25 bp, Homo sapien
taacaatgaagctgctaggaggcca

SEQ ID NO: 1177113 - DNA, 25 bp, Homo sapien
ttattttatgttaagtagccagact

SEQ ID NO: 1177114 - DNA, 25 bp, Homo sapien
tattttatgttaagtagccagactg

SEQ ID NO: 1177115 - DNA, 25 bp, Homo sapien
acacccacatctgctagaagaatgt

SEQ ID NO: 1177116 - DNA, 25 bp, Homo sapien
cacatctgctagaagaatgtgcccc

SEQ ID NO: 1177117 - DNA, 25 bp, Homo sapien
cccacatctgctagaagaatgtgcc

SEQ ID NO: 1177118 - DNA, 25 bp, Homo sapien
cacccacatctgctagaagaatgtg

SEQ ID NO: 1177119 - DNA, 25 bp, Homo sapien
gacattagcatggacctcacatccc

SEQ ID NO: 1177120 - DNA, 25 bp, Homo sapien
cattttgtgagtggagacattagca

SEQ ID NO: 1177121 - DNA, 25 bp, Homo sapien
gacctcacatcccataaggagcacc

SEQ ID NO: 1177122 - DNA, 25 bp, Homo sapien
atcattaaatgtcttgggctggtgc

SEQ ID NO: 1177123 - DNA, 25 bp, Homo sapien
gagatctaagtacactgcggtccct

SEQ ID NO: 1177124 - DNA, 25 bp, Homo sapien
taaacacatgcagtggccctctctg

SEQ ID NO: 1177125 - DNA, 25 bp, Homo sapien
tatcagcataacagtcacgtctcag

SEQ ID NO: 1177126 - DNA, 25 bp, Homo sapien
gattactgggatcaagtcccctgag

SEQ ID NO: 1177127 - DNA, 25 bp, Homo sapien
tatagttttctcaggactccttggc

SEQ ID NO: 1177128 - DNA, 25 bp, Homo sapien
cactgggtggtttctaaactctggc

SEQ ID NO: 1177129 - DNA, 25 bp, Homo sapien
tgtctccattaggacagggtcagtg

SEQ ID NO: 1177130 - DNA, 25 bp, Homo sapien
tcccctgaagctatggcacactggg

SEQ ID NO: 1177131 - DNA, 25 bp, Homo sapien
agccataaaggcagtaaagtgcatg

SEQ ID NO: 1177132 - DNA, 25 bp, Homo sapien
ctggtaaaaggatcttgtagccata

SEQ ID NO: 1177133 - DNA, 25 bp, Homo sapien
ggatcttgtagccataaaggcagta

SEQ ID NO: 1177134 - DNA, 25 bp, Homo sapien
taaaaggatcttgtagccataaagg

SEQ ID NO: 1177135 - DNA, 25 bp, Homo sapien
gccctaacagcaaggcatgatggga

SEQ ID NO: 1177136 - DNA, 25 bp, Homo sapien
cgcgttcataccaaatataaagggc

SEQ ID NO: 1177137 - DNA, 25 bp, Homo sapien
aagggcatagccctaacagcaaggc

SEQ ID NO: 1177138 - DNA, 25 bp, Homo sapien
ctgcaaactgcacgcgttcatacca

SEQ ID NO: 1177139 - DNA, 25 bp, Homo sapien
gacgctttggccctcctggatttgg

SEQ ID NO: 1177140 - DNA, 25 bp, Homo sapien
tccttttaggtagttgggtagcaca

SEQ ID NO: 1177141 - DNA, 25 bp, Homo sapien
tgtctgtgcccaaaaagctgttgac

SEQ ID NO: 1177142 - DNA, 25 bp, Homo sapien
gaggctctcctcttaaacgcttcaa

SEQ ID NO: 1177143 - DNA, 25 bp, Homo sapien
tcttaaggatcccacagcaccttca

SEQ ID NO: 1177144 - DNA, 25 bp, Homo sapien
taaatggtgcaaatgatggcgtttt

SEQ ID NO: 1177145 - DNA, 25 bp, Homo sapien
ccttcaaaattgtaaatggtgcaaa

SEQ ID NO: 1177146 - DNA, 25 bp, Homo sapien
ggatcccacagcaccttcaaaattg

SEQ ID NO: 1177147 - DNA, 25 bp, Homo sapien
caccacgtacgtgatttttctggag

SEQ ID NO: 1177148 - DNA, 25 bp, Homo sapien
tatttattggcaaactcatttctga

SEQ ID NO: 1177149 - DNA, 25 bp, Homo sapien
cactggtcttgatacaagaagatac

SEQ ID NO: 1177150 - DNA, 25 bp, Homo sapien
atgtgaggataatttccacaccacg

SEQ ID NO: 1177151 - DNA, 25 bp, Homo sapien
ccagtagactgctcccactgtgatg

SEQ ID NO: 1177152 - DNA, 25 bp, Homo sapien
gcagccgatggtctcagtaactgtc

SEQ ID NO: 1177153 - DNA, 25 bp, Homo sapien
tccacagcagccgatggtctcagta

SEQ ID NO: 1177154 - DNA, 25 bp, Homo sapien
gatggtctcagtaactgtctcactg

SEQ ID NO: 1177155 - DNA, 25 bp, Homo sapien
caagacctgacagcacccctcccac

SEQ ID NO: 1177156 - DNA, 25 bp, Homo sapien
tccccaagacctgacagcacccctc

SEQ ID NO: 1177157 - DNA, 25 bp, Homo sapien
ccaagacctgacagcacccctccca

SEQ ID NO: 1177158 - DNA, 25 bp, Homo sapien
actaaggtccccaagacctgacagc

SEQ ID NO: 1177159 - DNA, 25 bp, Homo sapien
tacaggccggatttccacatggaat

SEQ ID NO: 1177160 - DNA, 25 bp, Homo sapien
tagcagccctgtagcagtcattgta

SEQ ID NO: 1177161 - DNA, 25 bp, Homo sapien
catggtcttactctcgctaggaagg

SEQ ID NO: 1177162 - DNA, 25 bp, Homo sapien
tatacgaatatacaactacaggccg

SEQ ID NO: 1177163 - DNA, 25 bp, Homo sapien
ttcgtttcgttcagcctagggaaga

SEQ ID NO: 1177164 - DNA, 25 bp, Homo sapien
aaatgccaggctcacacatagtagg

SEQ ID NO: 1177165 - DNA, 25 bp, Homo sapien
gaactgagagttttcgtttcgttca

SEQ ID NO: 1177166 - DNA, 25 bp, Homo sapien
aggtgttctgtaagtgtctatagag

SEQ ID NO: 1177167 - DNA, 25 bp, Homo sapien
tctagttcttaggttgagtttgtat

SEQ ID NO: 1177168 - DNA, 25 bp, Homo sapien
atctagttcttaggttgagtttgta

SEQ ID NO: 1177169 - DNA, 25 bp, Homo sapien
cttttatctagttcttaggttgagt

SEQ ID NO: 1177170 - DNA, 25 bp, Homo sapien
gaacagttgtatctctaagaggagg

SEQ ID NO: 1177171 - DNA, 25 bp, Homo sapien
taagaggaggctataattaaccttg

SEQ ID NO: 1177172 - DNA, 25 bp, Homo sapien
agctgtgatgatgtatctttgaaca

SEQ ID NO: 1177173 - DNA, 25 bp, Homo sapien
catctaggcctgacaatcagctgtg

SEQ ID NO: 1177174 - DNA, 25 bp, Homo sapien
ggcctgtctgaattagtaatgcatt

SEQ ID NO: 1177175 - DNA, 25 bp, Homo sapien
taaaacattattggtagatcacatc

SEQ ID NO: 1177176 - DNA, 25 bp, Homo sapien
tctctccaattcagaacaaccagaa

SEQ ID NO: 1177177 - DNA, 25 bp, Homo sapien
gattccaaatccaactgaagtgtct

SEQ ID NO: 1177178 - DNA, 25 bp, Homo sapien
caggttttatgtccccgagcacagt

SEQ ID NO: 1177179 - DNA, 25 bp, Homo sapien
tgtctcaggacataccacttgggat

SEQ ID NO: 1177180 - DNA, 25 bp, Homo sapien
aaaagggcctgacaactctaagagc

SEQ ID NO: 1177181 - DNA, 25 bp, Homo sapien
ggcacaagttgtttcccagggacga

SEQ ID NO: 1177182 - DNA, 25 bp, Homo sapien
gcttgtacagggaggcttccagtga

SEQ ID NO: 1177183 - DNA, 25 bp, Homo sapien
gcacttagcctttggagtcatacag

SEQ ID NO: 1177184 - DNA, 25 bp, Homo sapien
caggcacctaatgttctccagcaga

SEQ ID NO: 1177185 - DNA, 25 bp, Homo sapien
ggcggcctgtgtgtatagaatgcac

SEQ ID NO: 1177186 - DNA, 25 bp, Homo sapien
ggctgttgtccaccctgacttgctg

SEQ ID NO: 1177187 - DNA, 25 bp, Homo sapien
tacaaaaggtagtcttgaggaccat

SEQ ID NO: 1177188 - DNA, 25 bp, Homo sapien
gaattacgaaaggtcaatgcatcac

SEQ ID NO: 1177189 - DNA, 25 bp, Homo sapien
tgaggaccatgctccagaactatgg

SEQ ID NO: 1177190 - DNA, 25 bp, Homo sapien
tctcaaataggtctccactgcaggg

SEQ ID NO: 1177191 - DNA, 25 bp, Homo sapien
tccctgtagccacataagctgggct

SEQ ID NO: 1177192 - DNA, 25 bp, Homo sapien
gatgtgcaacgagaatccctgtagc

SEQ ID NO: 1177193 - DNA, 25 bp, Homo sapien
ttactaactgtatggctggtccacc

SEQ ID NO: 1177194 - DNA, 25 bp, Homo sapien
gagcttgctaccaaatactttaccg

SEQ ID NO: 1177195 - DNA, 25 bp, Homo sapien
tcacatgagcaaatgcggaagtaag

SEQ ID NO: 1177196 - DNA, 25 bp, Homo sapien
aaaagttcttcagcaatgcaccaac

SEQ ID NO: 1177197 - DNA, 25 bp, Homo sapien
aactctctctacttataggagcttg

SEQ ID NO: 1177198 - DNA, 25 bp, Homo sapien
ccagctcgataggagccctggagga

SEQ ID NO: 1177199 - DNA, 25 bp, Homo sapien
tattgtcagcgtacccagcaatgag

SEQ ID NO: 1177200 - DNA, 25 bp, Homo sapien
tgtttaaacactttggcgagtccca

SEQ ID NO: 1177201 - DNA, 25 bp, Homo sapien
tcactttgggaaggtgtttgccgta

SEQ ID NO: 1177202 - DNA, 25 bp, Homo sapien
cactgcgcccgaacaatgtattctt

SEQ ID NO: 1177203 - DNA, 25 bp, Homo sapien
gccgttgcttcacaactctagagag

SEQ ID NO: 1177204 - DNA, 25 bp, Homo sapien
tgactaatcacatgcagccgttgct

SEQ ID NO: 1177205 - DNA, 25 bp, Homo sapien
tctgatccgctttctttcccagaga

SEQ ID NO: 1177206 - DNA, 25 bp, Homo sapien
gctgctcacaggcaagaagtcttat

SEQ ID NO: 1177207 - DNA, 25 bp, Homo sapien
caaatatgcctgctaacttgagctg

SEQ ID NO: 1177208 - DNA, 25 bp, Homo sapien
tttatggtgacgcaacatcagttgg

SEQ ID NO: 1177209 - DNA, 25 bp, Homo sapien
catcagttgggtgatctcagaccca

SEQ ID NO: 1177210 - DNA, 25 bp, Homo sapien
gatctagcatgtctgatacctggag

SEQ ID NO: 1177211 - DNA, 25 bp, Homo sapien
tcctgatacgtctcttcttgtctag

SEQ ID NO: 1177212 - DNA, 25 bp, Homo sapien
caaacaatctaaaccactgaggcaa

SEQ ID NO: 1177213 - DNA, 25 bp, Homo sapien
tgaagaccacaatcaggctaagtga

SEQ ID NO: 1177214 - DNA, 25 bp, Homo sapien
ccagggccttgtatgagacaggatt

SEQ ID NO: 1177215 - DNA, 25 bp, Homo sapien
tgcattcccgagacaagctcttaag

SEQ ID NO: 1177216 - DNA, 25 bp, Homo sapien
tacagtggttttagcaccagggcct

SEQ ID NO: 1177217 - DNA, 25 bp, Homo sapien
ttggcttggcgactcttaaacccag

SEQ ID NO: 1177218 - DNA, 25 bp, Homo sapien
caaatggagccttgagagtagcaga

SEQ ID NO: 1177219 - DNA, 25 bp, Homo sapien
tagcagatagacaaaagtgaccaac

SEQ ID NO: 1177220 - DNA, 25 bp, Homo sapien
gaacaagactagaggatttcctgaa

SEQ ID NO: 1177221 - DNA, 25 bp, Homo sapien
caacaaagttaggtgtgctgcagcc

SEQ ID NO: 1177222 - DNA, 25 bp, Homo sapien
gacggcaggctttcagcacacgatg

SEQ ID NO: 1177223 - DNA, 25 bp, Homo sapien
ccacatttcagtgtccggcagacgg

SEQ ID NO: 1177224 - DNA, 25 bp, Homo sapien
tctgggtggcataatgaagtggccc

SEQ ID NO: 1177225 - DNA, 25 bp, Homo sapien
gcttcttaaagaccctcggcctgtg

SEQ ID NO: 1177226 - DNA, 25 bp, Homo sapien
tagtcttcagagtgggttcttccag

SEQ ID NO: 1177227 - DNA, 25 bp, Homo sapien
tggtggtcagaactaaagaactcag

SEQ ID NO: 1177228 - DNA, 25 bp, Homo sapien
ggagtcatcacttgcaaagcccaat

SEQ ID NO: 1177229 - DNA, 25 bp, Homo sapien
gaaggtagaatatcctagctccagt

SEQ ID NO: 1177230 - DNA, 25 bp, Homo sapien
gtttatcccggcttagacttctgag

SEQ ID NO: 1177231 - DNA, 25 bp, Homo sapien
aatacaaatggtcctggccagtgcg

SEQ ID NO: 1177232 - DNA, 25 bp, Homo sapien
ggccagtgcgagttatagacccaaa

SEQ ID NO: 1177233 - DNA, 25 bp, Homo sapien
tctaagcactagacaacaacaggag

SEQ ID NO: 1177234 - DNA, 25 bp, Homo sapien
ctttccagtttccatgtgaggctgg

SEQ ID NO: 1177235 - DNA, 25 bp, Homo sapien
ctggacattttgcattcgatacaaa

SEQ ID NO: 1177236 - DNA, 25 bp, Homo sapien
cagttttggacctgtctggacaagg

SEQ ID NO: 1177237 - DNA, 25 bp, Homo sapien
aaattagttcctcaaaatcagaatc

SEQ ID NO: 1177238 - DNA, 25 bp, Homo sapien
cactggttcaagtaaacagaacatg

SEQ ID NO: 1177239 - DNA, 25 bp, Homo sapien
aagtaaacagaacatgatgcctacc

SEQ ID NO: 1177240 - DNA, 25 bp, Homo sapien
ccatcttctcactggttcaagtaaa

SEQ ID NO: 1177241 - DNA, 25 bp, Homo sapien
catgatgcctaccaaagatatcctg

SEQ ID NO: 1177242 - DNA, 25 bp, Homo sapien
aaaggttggaatttagacattccat

SEQ ID NO: 1177243 - DNA, 25 bp, Homo sapien
gcatgcagagtcttctgtggattaa

SEQ ID NO: 1177244 - DNA, 25 bp, Homo sapien
aggttggaatttagacattccattt

SEQ ID NO: 1177245 - DNA, 25 bp, Homo sapien
aaggttggaatttagacattccatt

SEQ ID NO: 1177246 - DNA, 25 bp, Homo sapien
ggcagtgcagggctctgccgcctgg

SEQ ID NO: 1177247 - DNA, 25 bp, Homo sapien
aagcttccggcgcatagcaacagag

SEQ ID NO: 1177248 - DNA, 25 bp, Homo sapien
aataaaattaagcttccggcgcata

SEQ ID NO: 1177249 - DNA, 25 bp, Homo sapien
gcgcatagcaacagagtcttcctca

SEQ ID NO: 1177250 - DNA, 25 bp, Homo sapien
cgatggcgaagagcctcatagcaga

SEQ ID NO: 1177251 - DNA, 25 bp, Homo sapien
gcagccaacgatggcgaagagcctc

SEQ ID NO: 1177252 - DNA, 25 bp, Homo sapien
ggcgaagagcctcatagcagatgtg

SEQ ID NO: 1177253 - DNA, 25 bp, Homo sapien
caaatttccagcagccaacgatggc

SEQ ID NO: 1177254 - DNA, 25 bp, Homo sapien
cacaagtacttcctacaggttggga

SEQ ID NO: 1177255 - DNA, 25 bp, Homo sapien
tctgcagatgacgaagggagcacac

SEQ ID NO: 1177256 - DNA, 25 bp, Homo sapien
cagaccagggatagataacttttca

SEQ ID NO: 1177257 - DNA, 25 bp, Homo sapien
gagtactgactgctgatctggaggc

SEQ ID NO: 1177258 - DNA, 25 bp, Homo sapien
cacttggcgtatcaaattcctcctg

SEQ ID NO: 1177259 - DNA, 25 bp, Homo sapien
ttataatgagctggcccacttggcg

SEQ ID NO: 1177260 - DNA, 25 bp, Homo sapien
ggttttgtagttctcacccatgcag

SEQ ID NO: 1177261 - DNA, 25 bp, Homo sapien
gcagtaaccctacaattatcttgtg

SEQ ID NO: 1177262 - DNA, 25 bp, Homo sapien
gcaatcgcaaaaaacactggagtcc

SEQ ID NO: 1177263 - DNA, 25 bp, Homo sapien
cctagagcctacagagagggagtcc

SEQ ID NO: 1177264 - DNA, 25 bp, Homo sapien
catcctcttatggagaagtccctag

SEQ ID NO: 1177265 - DNA, 25 bp, Homo sapien
gaatcttggaggttgccctgtcaga

SEQ ID NO: 1177266 - DNA, 25 bp, Homo sapien
cagcagggtggttgggtttgcccgg

SEQ ID NO: 1177267 - DNA, 25 bp, Homo sapien
ccagcagggtggttgggtttgcccg

SEQ ID NO: 1177268 - DNA, 25 bp, Homo sapien
tccagcagggtggttgggtttgccc

SEQ ID NO: 1177269 - DNA, 25 bp, Homo sapien
atccagcagggtggttgggtttgcc

SEQ ID NO: 1177270 - DNA, 25 bp, Homo sapien
aaataccagttaggcagccctgctg

SEQ ID NO: 1177271 - DNA, 25 bp, Homo sapien
cattcacagtgtggacctcttggtc

SEQ ID NO: 1177272 - DNA, 25 bp, Homo sapien
ctggcagcctcatttgcatgttgtt

SEQ ID NO: 1177273 - DNA, 25 bp, Homo sapien
tgcatttcccagtaaccctttcaac

SEQ ID NO: 1177274 - DNA, 25 bp, Homo sapien
ttctgtggcagacttcataaggctc

SEQ ID NO: 1177275 - DNA, 25 bp, Homo sapien
gacttcataaggctctgctctttga

SEQ ID NO: 1177276 - DNA, 25 bp, Homo sapien
tggcagacttcataaggctctgctc

SEQ ID NO: 1177277 - DNA, 25 bp, Homo sapien
tcacttctgtggcagacttcataag

SEQ ID NO: 1177278 - DNA, 25 bp, Homo sapien
caggcgatacatagagacctgcaga

SEQ ID NO: 1177279 - DNA, 25 bp, Homo sapien
ggcccaggcgatacatagagacctg

SEQ ID NO: 1177280 - DNA, 25 bp, Homo sapien
cgatacatagagacctgcagagctc

SEQ ID NO: 1177281 - DNA, 25 bp, Homo sapien
aaggtcaggaagcttcgtggcagca

SEQ ID NO: 1177282 - DNA, 25 bp, Homo sapien
tggtagttgacgcactatgagggcc

SEQ ID NO: 1177283 - DNA, 25 bp, Homo sapien
ctggtagttgacgcactatgagggc

SEQ ID NO: 1177284 - DNA, 25 bp, Homo sapien
ggtagttgacgcactatgagggcct

SEQ ID NO: 1177285 - DNA, 25 bp, Homo sapien
tcactagctcacaaagccaacagtg

SEQ ID NO: 1177286 - DNA, 25 bp, Homo sapien
actgtccaggttgtccgggccctct

SEQ ID NO: 1177287 - DNA, 25 bp, Homo sapien
tggtgaacatctcccatacctcagc

SEQ ID NO: 1177288 - DNA, 25 bp, Homo sapien
gaaaggctggtgcttcgtgcatcac

SEQ ID NO: 1177289 - DNA, 25 bp, Homo sapien
caggcagctagcgatctgtatagaa

SEQ ID NO: 1177290 - DNA, 25 bp, Homo sapien
tatagagcactatagcttacgcagt

SEQ ID NO: 1177291 - DNA, 25 bp, Homo sapien
tggagcacatacatgtaggcacaga

SEQ ID NO: 1177292 - DNA, 25 bp, Homo sapien
ccctgattctgtactcatggagcac

SEQ ID NO: 1177293 - DNA, 25 bp, Homo sapien
cattgaaggataccccggaatgttg

SEQ ID NO: 1177294 - DNA, 25 bp, Homo sapien
gataatactgtcttaagagccttgg

SEQ ID NO: 1177295 - DNA, 25 bp, Homo sapien
tctgccattgaaggataccccggaa

SEQ ID NO: 1177296 - DNA, 25 bp, Homo sapien
cttggccagaatccaattactgctg

SEQ ID NO: 1177297 - DNA, 25 bp, Homo sapien
gaaggcagattgtaatgaagtagtc

SEQ ID NO: 1177298 - DNA, 25 bp, Homo sapien
atcttttgagcccaacgttttgact

SEQ ID NO: 1177299 - DNA, 25 bp, Homo sapien
acgttttgacttgcaggatattcag

SEQ ID NO: 1177300 - DNA, 25 bp, Homo sapien
tctagtcaagtgcaaccaggatggc

SEQ ID NO: 1177301 - DNA, 25 bp, Homo sapien
tgagtggagctgacagccgtcgcat

SEQ ID NO: 1177302 - DNA, 25 bp, Homo sapien
gaggcttaagcagggcaattccggc

SEQ ID NO: 1177303 - DNA, 25 bp, Homo sapien
cccgcagctatttctaataatggta

SEQ ID NO: 1177304 - DNA, 25 bp, Homo sapien
tgtggttcccccgagctcaaaaaga

SEQ ID NO: 1177305 - DNA, 25 bp, Homo sapien
tgctgggtctaagaataggatgctc

SEQ ID NO: 1177306 - DNA, 25 bp, Homo sapien
tcccagaaaaagagacggcactgtg

SEQ ID NO: 1177307 - DNA, 25 bp, Homo sapien
tgagagagaaccaagccctgtgtag

SEQ ID NO: 1177308 - DNA, 25 bp, Homo sapien
ttagggaagccgctcaatagcaggt

SEQ ID NO: 1177309 - DNA, 25 bp, Homo sapien
tagcattttcaagcagcaagctggc

SEQ ID NO: 1177310 - DNA, 25 bp, Homo sapien
tgctgtttgtcaggaactgacccca

SEQ ID NO: 1177311 - DNA, 25 bp, Homo sapien
caagctggccaggactattaacctc

SEQ ID NO: 1177312 - DNA, 25 bp, Homo sapien
tgtatgcaaagccatgacatctctg

SEQ ID NO: 1177313 - DNA, 25 bp, Homo sapien
aaacgtgaggcgaggaaagtcagtc

SEQ ID NO: 1177314 - DNA, 25 bp, Homo sapien
taattatctcttggcctctgatcca

SEQ ID NO: 1177315 - DNA, 25 bp, Homo sapien
tcaatgaactggctctccacgtacc

SEQ ID NO: 1177316 - DNA, 25 bp, Homo sapien
gatccacatgactgcttctagaagc

SEQ ID NO: 1177317 - DNA, 25 bp, Homo sapien
catgcggttagggtgatatgttcca

SEQ ID NO: 1177318 - DNA, 25 bp, Homo sapien
gaatgtcatggccatatgcttccca

SEQ ID NO: 1177319 - DNA, 25 bp, Homo sapien
caaccaggagtgaggtctagctatc

SEQ ID NO: 1177320 - DNA, 25 bp, Homo sapien
tctagctatcaatgtcaaggtggaa

SEQ ID NO: 1177321 - DNA, 25 bp, Homo sapien
tcactattatattgctgatgagtgg

SEQ ID NO: 1177322 - DNA, 25 bp, Homo sapien
tccaggactggctatactaaatgct

SEQ ID NO: 1177323 - DNA, 25 bp, Homo sapien
tgtatatttgaagggcagggctatc

SEQ ID NO: 1177324 - DNA, 25 bp, Homo sapien
tcacctatttgtagggtaataatac

SEQ ID NO: 1177325 - DNA, 25 bp, Homo sapien
gctggtaatcaccatcagacagggt

SEQ ID NO: 1177326 - DNA, 25 bp, Homo sapien
agggtggatcatctatacgggcctg

SEQ ID NO: 1177327 - DNA, 25 bp, Homo sapien
tcagatgctggtaatcaccatcaga

SEQ ID NO: 1177328 - DNA, 25 bp, Homo sapien
ggatcatctatacgggcctgcttgg

SEQ ID NO: 1177329 - DNA, 25 bp, Homo sapien
accttcagaggtgaggcaactgctc

SEQ ID NO: 1177330 - DNA, 25 bp, Homo sapien
gggactaatgtaccaacagcaatag

SEQ ID NO: 1177331 - DNA, 25 bp, Homo sapien
catacgaggagtaacagagcaatcc

SEQ ID NO: 1177332 - DNA, 25 bp, Homo sapien
tggccgacctgcacgaagtcaagtg

SEQ ID NO: 1177333 - DNA, 25 bp, Homo sapien
ccgacagagtgttatgttcaagcca

SEQ ID NO: 1177334 - DNA, 25 bp, Homo sapien
catgatgggcgattgaaaggactgc

SEQ ID NO: 1177335 - DNA, 25 bp, Homo sapien
tcaagctaatagtcccatgatgggc

SEQ ID NO: 1177336 - DNA, 25 bp, Homo sapien
gaacctagaggcattctggcactga

SEQ ID NO: 1177337 - DNA, 25 bp, Homo sapien
aatgaatgttaacttgcaccaggag

SEQ ID NO: 1177338 - DNA, 25 bp, Homo sapien
atgttaacttgcaccaggaggctac

SEQ ID NO: 1177339 - DNA, 25 bp, Homo sapien
tacaatgaatgttaacttgcaccag

SEQ ID NO: 1177340 - DNA, 25 bp, Homo sapien
gaatgttaacttgcaccaggaggct

SEQ ID NO: 1177341 - DNA, 25 bp, Homo sapien
taaaacctgcctcttcagagtcggc

SEQ ID NO: 1177342 - DNA, 25 bp, Homo sapien
aagtgctgtagaaatatgaggcggc

SEQ ID NO: 1177343 - DNA, 25 bp, Homo sapien
gaaaagtctaatcacctccaatgcc

SEQ ID NO: 1177344 - DNA, 25 bp, Homo sapien
acaacgttccgctcacagatctgtg

SEQ ID NO: 1177345 - DNA, 25 bp, Homo sapien
tgtagctaaacccaagtgcagtgac

SEQ ID NO: 1177346 - DNA, 25 bp, Homo sapien
tatatgtggccgctgacagaagcaa

SEQ ID NO: 1177347 - DNA, 25 bp, Homo sapien
tagcagtcaacttagatcacgagga

SEQ ID NO: 1177348 - DNA, 25 bp, Homo sapien
gataacactgactcttgctgggcag

SEQ ID NO: 1177349 - DNA, 25 bp, Homo sapien
tgaggatagtgcataaagccaccag

SEQ ID NO: 1177350 - DNA, 25 bp, Homo sapien
tgagagttacccatccaagggcagg

SEQ ID NO: 1177351 - DNA, 25 bp, Homo sapien
tcaaacaaggttagcagagtcagtg

SEQ ID NO: 1177352 - DNA, 25 bp, Homo sapien
tttcacaccctgacagaatgagagt

SEQ ID NO: 1177353 - DNA, 25 bp, Homo sapien
ttcaccctagcatatactaatctcc

SEQ ID NO: 1177354 - DNA, 25 bp, Homo sapien
tacaatcactgctcagtccagctgt

SEQ ID NO: 1177355 - DNA, 25 bp, Homo sapien
tttgtgcttgaatgatgtcatacag

SEQ ID NO: 1177356 - DNA, 25 bp, Homo sapien
cttccatgcagccacatttaaactg

SEQ ID NO: 1177357 - DNA, 25 bp, Homo sapien
ctggaagccattgataaggaatata

SEQ ID NO: 1177358 - DNA, 25 bp, Homo sapien
gatggtacttgattggtgttcctca

SEQ ID NO: 1177359 - DNA, 25 bp, Homo sapien
tcaggagcccttcctagggcacaat

SEQ ID NO: 1177360 - DNA, 25 bp, Homo sapien
cacaatatgtgtaagggatggtact

SEQ ID NO: 1177361 - DNA, 25 bp, Homo sapien
ccttggaatctagctttatgacact

SEQ ID NO: 1177362 - DNA, 25 bp, Homo sapien
gcaataggtccaaatggaccttgga

SEQ ID NO: 1177363 - DNA, 25 bp, Homo sapien
gaataagcaggtcacagttaaggca

SEQ ID NO: 1177364 - DNA, 25 bp, Homo sapien
cctgaaaatgtgttataggttgcaa

SEQ ID NO: 1177365 - DNA, 25 bp, Homo sapien
aaattatatagtctgccctgcctca

SEQ ID NO: 1177366 - DNA, 25 bp, Homo sapien
aattatatagtctgccctgcctcag

SEQ ID NO: 1177367 - DNA, 25 bp, Homo sapien
ctgccctgcctcagaatgtattgtt

SEQ ID NO: 1177368 - DNA, 25 bp, Homo sapien
cactttaccctgcaggaccacaaag

SEQ ID NO: 1177369 - DNA, 25 bp, Homo sapien
aaaggaaatgtgtcttctgctcacc

SEQ ID NO: 1177370 - DNA, 25 bp, Homo sapien
agggagtcaaaccacatcacatgtg

SEQ ID NO: 1177371 - DNA, 25 bp, Homo sapien
ggccagagtctcatttgacccctgt

SEQ ID NO: 1177372 - DNA, 25 bp, Homo sapien
caaggaaattctctgagccgccagt

SEQ ID NO: 1177373 - DNA, 25 bp, Homo sapien
caaacagttagagacggtgatgcac

SEQ ID NO: 1177374 - DNA, 25 bp, Homo sapien
gaagatttcccaacaaagagctggc

SEQ ID NO: 1177375 - DNA, 25 bp, Homo sapien
gaagtgttcacccaagcgtgaggct

SEQ ID NO: 1177376 - DNA, 25 bp, Homo sapien
caataaacactgaaatcccctggcg

SEQ ID NO: 1177377 - DNA, 25 bp, Homo sapien
atagtacctggtcggaactgttcca

SEQ ID NO: 1177378 - DNA, 25 bp, Homo sapien
gattgtcaagtgcaaggagttctgc

SEQ ID NO: 1177379 - DNA, 25 bp, Homo sapien
tgtggcttggaacttcaattctggc

SEQ ID NO: 1177380 - DNA, 25 bp, Homo sapien
cccacacttgaattcagctctatct

SEQ ID NO: 1177381 - DNA, 25 bp, Homo sapien
acaaagatctcggtttctacattcc

SEQ ID NO: 1177382 - DNA, 25 bp, Homo sapien
tcccttacaaagatctcggtttcta

SEQ ID NO: 1177383 - DNA, 25 bp, Homo sapien
agatctcggtttctacattccattc

SEQ ID NO: 1177384 - DNA, 25 bp, Homo sapien
tctggggatgcggattctctgcttc

SEQ ID NO: 1177385 - DNA, 25 bp, Homo sapien
ttctgttctgcctttagctggccat

SEQ ID NO: 1177386 - DNA, 25 bp, Homo sapien
ggccatgccctttacacctaaggaa

SEQ ID NO: 1177387 - DNA, 25 bp, Homo sapien
acctaaggaacacccatgtttctgg

SEQ ID NO: 1177388 - DNA, 25 bp, Homo sapien
atagcaagcaaaggcggtgccctga

SEQ ID NO: 1177389 - DNA, 25 bp, Homo sapien
gggttgaaccccaagtagcagctgg

SEQ ID NO: 1177390 - DNA, 25 bp, Homo sapien
cctccaattgtagcaaggttgatag

SEQ ID NO: 1177391 - DNA, 25 bp, Homo sapien
agctggcagagtttcacgggatgaa

SEQ ID NO: 1177392 - DNA, 25 bp, Homo sapien
tgccaacattgctactccaacaagg

SEQ ID NO: 1177393 - DNA, 25 bp, Homo sapien
tatactgaggatctactctttgaca

SEQ ID NO: 1177394 - DNA, 25 bp, Homo sapien
ggtctctcggtcagttgttcattca

SEQ ID NO: 1177395 - DNA, 25 bp, Homo sapien
tcaacccgcacaaagtgtgactggg

SEQ ID NO: 1177396 - DNA, 25 bp, Homo sapien
gaggaacgctcagtgcaatcaaaca

SEQ ID NO: 1177397 - DNA, 25 bp, Homo sapien
aattactgctcaagtacctccaagg

SEQ ID NO: 1177398 - DNA, 25 bp, Homo sapien
gatatgggctccgacttcaagaagc

SEQ ID NO: 1177399 - DNA, 25 bp, Homo sapien
gaagaagcactctgtgagggctgac

SEQ ID NO: 1177400 - DNA, 25 bp, Homo sapien
atcctccaagatccaatttcaacca

SEQ ID NO: 1177401 - DNA, 25 bp, Homo sapien
caagatccaatttcaaccagcggag

SEQ ID NO: 1177402 - DNA, 25 bp, Homo sapien
ctccaagatccaatttcaaccagcg

SEQ ID NO: 1177403 - DNA, 25 bp, Homo sapien
tccaagatccaatttcaaccagcgg

SEQ ID NO: 1177404 - DNA, 25 bp, Homo sapien
cagagcacagtcaagagctgttttc

SEQ ID NO: 1177405 - DNA, 25 bp, Homo sapien
tgagctcaatgagggtatgtctaga

SEQ ID NO: 1177406 - DNA, 25 bp, Homo sapien
aaagcagggcttcgggttgtaacag

SEQ ID NO: 1177407 - DNA, 25 bp, Homo sapien
tctagatgtttgagcgtcatcacat

SEQ ID NO: 1177408 - DNA, 25 bp, Homo sapien
gaacgaaatcttcagacctttcctg

SEQ ID NO: 1177409 - DNA, 25 bp, Homo sapien
tacatgtggaacgaaatcttcagac

SEQ ID NO: 1177410 - DNA, 25 bp, Homo sapien
gaagtacacaaatccagtacatgtg

SEQ ID NO: 1177411 - DNA, 25 bp, Homo sapien
cacaaatccagtacatgtggaacga

SEQ ID NO: 1177412 - DNA, 25 bp, Homo sapien
cacgccttccgctaacagcatgttg

SEQ ID NO: 1177413 - DNA, 25 bp, Homo sapien
tcctgggctcctcggatactcaaaa

SEQ ID NO: 1177414 - DNA, 25 bp, Homo sapien
gccccgccacgccttccgctaacag

SEQ ID NO: 1177415 - DNA, 25 bp, Homo sapien
ctcctgggctcctcggatactcaaa

SEQ ID NO: 1177416 - DNA, 25 bp, Homo sapien
cgccgctgccgccgctgccgccgac

SEQ ID NO: 1177417 - DNA, 25 bp, Homo sapien
tgcccctccagaagccgccgccgct

SEQ ID NO: 1177418 - DNA, 25 bp, Homo sapien
ccgccgctgccgccgctgccgccga

SEQ ID NO: 1177419 - DNA, 25 bp, Homo sapien
ctgcccctccagaagccgccgccgc

SEQ ID NO: 1177420 - DNA, 25 bp, Homo sapien
tctgaatgctccactgagttgtctg

SEQ ID NO: 1177421 - DNA, 25 bp, Homo sapien
ctgtaatctgaatgctccactgagt

SEQ ID NO: 1177422 - DNA, 25 bp, Homo sapien
gtaatctgaatgctccactgagttg

SEQ ID NO: 1177423 - DNA, 25 bp, Homo sapien
gaatgctccactgagttgtctgaac

SEQ ID NO: 1177424 - DNA, 25 bp, Homo sapien
ctgctcgtatttctccagctccgta

SEQ ID NO: 1177425 - DNA, 25 bp, Homo sapien
cagctccgtatggtagatttgtctg

SEQ ID NO: 1177426 - DNA, 25 bp, Homo sapien
ctccgtatggtagatttgtctgatc

SEQ ID NO: 1177427 - DNA, 25 bp, Homo sapien
tatttctccagctccgtatggtaga

SEQ ID NO: 1177428 - DNA, 25 bp, Homo sapien
aaggtgagccgctcctctctgcaag

SEQ ID NO: 1177429 - DNA, 25 bp, Homo sapien
acctgggaaaggtgagccgctcctc

SEQ ID NO: 1177430 - DNA, 25 bp, Homo sapien
tcctaaagggcctgggtgccgagcc

SEQ ID NO: 1177431 - DNA, 25 bp, Homo sapien
gaaatcatttacagcgtcacacatt

SEQ ID NO: 1177432 - DNA, 25 bp, Homo sapien
cagacacacgttctggagtccaggt

SEQ ID NO: 1177433 - DNA, 25 bp, Homo sapien
tccaggtatggagtgttccttctat

SEQ ID NO: 1177434 - DNA, 25 bp, Homo sapien
tcttgcaggttagctggtgactctg

SEQ ID NO: 1177435 - DNA, 25 bp, Homo sapien
tgatcacctatagcgcccggatgag

SEQ ID NO: 1177436 - DNA, 25 bp, Homo sapien
taggcctcctgataaataaggaaaa

SEQ ID NO: 1177437 - DNA, 25 bp, Homo sapien
cagaaaaagtataggcctcctgata

SEQ ID NO: 1177438 - DNA, 25 bp, Homo sapien
tcccataggatactatgagcaccca

SEQ ID NO: 1177439 - DNA, 25 bp, Homo sapien
tgagcacccagaaaaagtataggcc

SEQ ID NO: 1177440 - DNA, 25 bp, Homo sapien
taaccagaggaactagcattgctat

SEQ ID NO: 1177441 - DNA, 25 bp, Homo sapien
gtagcatgcttacactaaccagagg

SEQ ID NO: 1177442 - DNA, 25 bp, Homo sapien
tgaaaggctgctgttaaaggactcc

SEQ ID NO: 1177443 - DNA, 25 bp, Homo sapien
tcgggagaccctacatgtactgctt

SEQ ID NO: 1177444 - DNA, 25 bp, Homo sapien
caacagagagcaaagttccaagggc

SEQ ID NO: 1177445 - DNA, 25 bp, Homo sapien
ggacagagcataatgatccagattt

SEQ ID NO: 1177446 - DNA, 25 bp, Homo sapien
tggacagagcataatgatccagatt

SEQ ID NO: 1177447 - DNA, 25 bp, Homo sapien
caaaggtacataggcaggtgcatcc

SEQ ID NO: 1177448 - DNA, 25 bp, Homo sapien
cataatctggtttccttagctgagc

SEQ ID NO: 1177449 - DNA, 25 bp, Homo sapien
tctacactggtgaatgggaggcctg

SEQ ID NO: 1177450 - DNA, 25 bp, Homo sapien
gcatccactgggctgtgtctacact

SEQ ID NO: 1177451 - DNA, 25 bp, Homo sapien
gaatggcaggacaatcaacaccgtc

SEQ ID NO: 1177452 - DNA, 25 bp, Homo sapien
atggcaggacaatcaacaccgtcat

SEQ ID NO: 1177453 - DNA, 25 bp, Homo sapien
tggaatggcaggacaatcaacaccg

SEQ ID NO: 1177454 - DNA, 25 bp, Homo sapien
ctggaatggcaggacaatcaacacc

SEQ ID NO: 1177455 - DNA, 25 bp, Homo sapien
tcacgtgggtggtgaactcgttgca

SEQ ID NO: 1177456 - DNA, 25 bp, Homo sapien
tgaccatccgctcaatctcctttgg

SEQ ID NO: 1177457 - DNA, 25 bp, Homo sapien
tggtccggctttgctctcgcaggag

SEQ ID NO: 1177458 - DNA, 25 bp, Homo sapien
aaatcgggaacgcaggatcatcacc

SEQ ID NO: 1177459 - DNA, 25 bp, Homo sapien
tgcctgattttaccggaagaacacc

SEQ ID NO: 1177460 - DNA, 25 bp, Homo sapien
gaagtgcctgattttaccggaagaa

SEQ ID NO: 1177461 - DNA, 25 bp, Homo sapien
aatgaagtgcctgattttaccggaa

SEQ ID NO: 1177462 - DNA, 25 bp, Homo sapien
agtgcctgattttaccggaagaaca

SEQ ID NO: 1177463 - DNA, 25 bp, Homo sapien
caaaattcgggccatcttggtttgt

SEQ ID NO: 1177464 - DNA, 25 bp, Homo sapien
tgtgtaccatctgggcaccgaacag

SEQ ID NO: 1177465 - DNA, 25 bp, Homo sapien
tggttttgaatcctcggtcaattga

SEQ ID NO: 1177466 - DNA, 25 bp, Homo sapien
tgcagagtagtgaggagtataaagt

SEQ ID NO: 1177467 - DNA, 25 bp, Homo sapien
tgtaaagagaaaggaaataataaca

SEQ ID NO: 1177468 - DNA, 25 bp, Homo sapien
ggatttctgtcgcttgcttgttgaa

SEQ ID NO: 1177469 - DNA, 25 bp, Homo sapien
ctgtcgcttgcttgttgaaattccg

SEQ ID NO: 1177470 - DNA, 25 bp, Homo sapien
ggtaagggttgctgagatgggaata

SEQ ID NO: 1177471 - DNA, 25 bp, Homo sapien
ttcaggatttctgtcgcttgcttgt

SEQ ID NO: 1177472 - DNA, 25 bp, Homo sapien
gtgacagctgttttggcagcataaa

SEQ ID NO: 1177473 - DNA, 25 bp, Homo sapien
gttcttcttgtaccggattcgctta

SEQ ID NO: 1177474 - DNA, 25 bp, Homo sapien
tgagggcgagttagcttggcttcca

SEQ ID NO: 1177475 - DNA, 25 bp, Homo sapien
ggcttccatgggctgacacattggt

SEQ ID NO: 1177476 - DNA, 25 bp, Homo sapien
tgtctctaaatgcttgctaatcccc

SEQ ID NO: 1177477 - DNA, 25 bp, Homo sapien
taagaatgcattactctaggccact

SEQ ID NO: 1177478 - DNA, 25 bp, Homo sapien
tttaaccagtgcttcaactggcccc

SEQ ID NO: 1177479 - DNA, 25 bp, Homo sapien
cagaagaattatagaccccaggttt

SEQ ID NO: 1177480 - DNA, 25 bp, Homo sapien
aaaacaagtgtaagatctggccagg

SEQ ID NO: 1177481 - DNA, 25 bp, Homo sapien
gaagtcatcgtgcagctcagcgcat

SEQ ID NO: 1177482 - DNA, 25 bp, Homo sapien
taataagtgggcctcaagaagggcc

SEQ ID NO: 1177483 - DNA, 25 bp, Homo sapien
tttcctgccccacatgaagaggtgc

SEQ ID NO: 1177484 - DNA, 25 bp, Homo sapien
tgactgcacgctcatgaacaaatct

SEQ ID NO: 1177485 - DNA, 25 bp, Homo sapien
atgaacaaatctccagagtttgaca

SEQ ID NO: 1177486 - DNA, 25 bp, Homo sapien
cattgagtgactgcacgctcatgaa

SEQ ID NO: 1177487 - DNA, 25 bp, Homo sapien
gtaagaatccccattgagtgactgc

SEQ ID NO: 1177488 - DNA, 25 bp, Homo sapien
ctggtgacatattggctgggtccct

SEQ ID NO: 1177489 - DNA, 25 bp, Homo sapien
tggtgacatattggctgggtcccta

SEQ ID NO: 1177490 - DNA, 25 bp, Homo sapien
ggtgacatattggctgggtccctac

SEQ ID NO: 1177491 - DNA, 25 bp, Homo sapien
caaagtgtggacgagattccccatg

SEQ ID NO: 1177492 - DNA, 25 bp, Homo sapien
cctgccttccaagtacaactgaaaa

SEQ ID NO: 1177493 - DNA, 25 bp, Homo sapien
cccatgacaatggttgtcttgattt

SEQ ID NO: 1177494 - DNA, 25 bp, Homo sapien
gcattcacaaagtgtggacgagatt

SEQ ID NO: 1177495 - DNA, 25 bp, Homo sapien
tgatgccctgcggactgtacatctg

SEQ ID NO: 1177496 - DNA, 25 bp, Homo sapien
tggctgataacatggcgaagggtat

SEQ ID NO: 1177497 - DNA, 25 bp, Homo sapien
tcctgtctggctgataacatggcga

SEQ ID NO: 1177498 - DNA, 25 bp, Homo sapien
tggctgcgagtccatcactgtatcc

SEQ ID NO: 1177499 - DNA, 25 bp, Homo sapien
tggcatgaccgatacagaaacaaga

SEQ ID NO: 1177500 - DNA, 25 bp, Homo sapien
ctgccgatggcatgaccgatacaga

SEQ ID NO: 1177501 - DNA, 25 bp, Homo sapien
ccgatggcatgaccgatacagaaac

SEQ ID NO: 1177502 - DNA, 25 bp, Homo sapien
gatggcatgaccgatacagaaacaa

SEQ ID NO: 1177503 - DNA, 25 bp, Homo sapien
gaagcctgcccaatcgccacttttt

SEQ ID NO: 1177504 - DNA, 25 bp, Homo sapien
atgtggccgcaggtgccatgcaaac

SEQ ID NO: 1177505 - DNA, 25 bp, Homo sapien
caaacactgattgcgtctgacagcc

SEQ ID NO: 1177506 - DNA, 25 bp, Homo sapien
tcctctagctgaacgcatgtggccg

SEQ ID NO: 1177507 - DNA, 25 bp, Homo sapien
gccccagcttgtggtcacatttcct

SEQ ID NO: 1177508 - DNA, 25 bp, Homo sapien
cccagcttgtggtcacatttcctac

SEQ ID NO: 1177509 - DNA, 25 bp, Homo sapien
tcccaggccccagcttgtggtcaca

SEQ ID NO: 1177510 - DNA, 25 bp, Homo sapien
ccaggccccagcttgtggtcacatt

SEQ ID NO: 1177511 - DNA, 25 bp, Homo sapien
tcactctgtgcgacatagcttgtcg

SEQ ID NO: 1177512 - DNA, 25 bp, Homo sapien
gttggattgctgtcccaaatctaca

SEQ ID NO: 1177513 - DNA, 25 bp, Homo sapien
ggttctccttgtgtctgtctgatcg

SEQ ID NO: 1177514 - DNA, 25 bp, Homo sapien
tgtctgatcgatttcactctgtgcg

SEQ ID NO: 1177515 - DNA, 25 bp, Homo sapien
cacaagatgggaagaatctctctgt

SEQ ID NO: 1177516 - DNA, 25 bp, Homo sapien
tccaagcagtcttcccagtaagtca

SEQ ID NO: 1177517 - DNA, 25 bp, Homo sapien
ggagaatacactttcccacaatggc

SEQ ID NO: 1177518 - DNA, 25 bp, Homo sapien
cagtaagtcagccatcaatgcagta

SEQ ID NO: 1177519 - DNA, 25 bp, Homo sapien
taggctatagagttggtcagttccc

SEQ ID NO: 1177520 - DNA, 25 bp, Homo sapien
gagggaccatgccactttcaggagc

SEQ ID NO: 1177521 - DNA, 25 bp, Homo sapien
tatttgctgacatctagagggacca

SEQ ID NO: 1177522 - DNA, 25 bp, Homo sapien
gaaaggaacatagcatacgctgtca

SEQ ID NO: 1177523 - DNA, 25 bp, Homo sapien
gtcatatcttgtatgttaacggtac

SEQ ID NO: 1177524 - DNA, 25 bp, Homo sapien
tctcttttggacctcatgcccaata

SEQ ID NO: 1177525 - DNA, 25 bp, Homo sapien
tcttcgtatctagcagctaatcagt

SEQ ID NO: 1177526 - DNA, 25 bp, Homo sapien
tgctgaggataacgagctagccata

SEQ ID NO: 1177527 - DNA, 25 bp, Homo sapien
tacacttaggacattaatagcaatt

SEQ ID NO: 1177528 - DNA, 25 bp, Homo sapien
tacgtgccatcactgagacaaagcc

SEQ ID NO: 1177529 - DNA, 25 bp, Homo sapien
aagccacaaaggctccgttggcagc

SEQ ID NO: 1177530 - DNA, 25 bp, Homo sapien
gctccgttggcagcctcttattttg

SEQ ID NO: 1177531 - DNA, 25 bp, Homo sapien
tcagaccaacaatgacatgccgtgt

SEQ ID NO: 1177532 - DNA, 25 bp, Homo sapien
gagacagcaattaccccagattatc

SEQ ID NO: 1177533 - DNA, 25 bp, Homo sapien
catgccgtgtaaagagagacactga

SEQ ID NO: 1177534 - DNA, 25 bp, Homo sapien
tttctgaccatccaagagacagcaa

SEQ ID NO: 1177535 - DNA, 25 bp, Homo sapien
tatctgattggctgaacctatacag

SEQ ID NO: 1177536 - DNA, 25 bp, Homo sapien
catcttaacggtgaacggtggctac

SEQ ID NO: 1177537 - DNA, 25 bp, Homo sapien
gccagtatgtgtgaacctgccctcg

SEQ ID NO: 1177538 - DNA, 25 bp, Homo sapien
tactaagggtacacacagagattgt

SEQ ID NO: 1177539 - DNA, 25 bp, Homo sapien
gatggtgtgcatttccaggttttgg

SEQ ID NO: 1177540 - DNA, 25 bp, Homo sapien
tgtcttacagacttaaggtccttag

SEQ ID NO: 1177541 - DNA, 25 bp, Homo sapien
aataggacagttacacataacgtgt

SEQ ID NO: 1177542 - DNA, 25 bp, Homo sapien
cataacgtgttcatgtcttacagac

SEQ ID NO: 1177543 - DNA, 25 bp, Homo sapien
tcatataggaacttctttcttgtgg

SEQ ID NO: 1177544 - DNA, 25 bp, Homo sapien
tgcatcagtgtcttcatataggaac

SEQ ID NO: 1177545 - DNA, 25 bp, Homo sapien
aacttctttcttgtggttgagacca

SEQ ID NO: 1177546 - DNA, 25 bp, Homo sapien
tcagtgtcttcatataggaacttct

SEQ ID NO: 1177547 - DNA, 25 bp, Homo sapien
taggtaactcagaatcaattttgcc

SEQ ID NO: 1177548 - DNA, 25 bp, Homo sapien
gtaactcagaatcaattttgccact

SEQ ID NO: 1177549 - DNA, 25 bp, Homo sapien
ggtaactcagaatcaattttgccac

SEQ ID NO: 1177550 - DNA, 25 bp, Homo sapien
cataggtaactcagaatcaattttg

SEQ ID NO: 1177551 - DNA, 25 bp, Homo sapien
tatgggccagatgccattactagag

SEQ ID NO: 1177552 - DNA, 25 bp, Homo sapien
gtggagctagatctgcatatgggcc

SEQ ID NO: 1177553 - DNA, 25 bp, Homo sapien
tactagagatgccttcagcgtgggt

SEQ ID NO: 1177554 - DNA, 25 bp, Homo sapien
cacagagccactatatatcagggag

SEQ ID NO: 1177555 - DNA, 25 bp, Homo sapien
cacacggttgatgcagagaattcat

SEQ ID NO: 1177556 - DNA, 25 bp, Homo sapien
gcaagcctggcactaagaaactctc

SEQ ID NO: 1177557 - DNA, 25 bp, Homo sapien
catttgcaacccagaaatacgctga

SEQ ID NO: 1177558 - DNA, 25 bp, Homo sapien
cacctgatgtgacagcccaagcaag

SEQ ID NO: 1177559 - DNA, 25 bp, Homo sapien
aaacccacgtggtttctcctgacag

SEQ ID NO: 1177560 - DNA, 25 bp, Homo sapien
gacacgtgacacagaattgcaacca

SEQ ID NO: 1177561 - DNA, 25 bp, Homo sapien
ctccctgttgtggatccagtgctgc

SEQ ID NO: 1177562 - DNA, 25 bp, Homo sapien
tagagggagctagctcttgagccaa

SEQ ID NO: 1177563 - DNA, 25 bp, Homo sapien
cctgggacgtgtgacccaatgtaac

SEQ ID NO: 1177564 - DNA, 25 bp, Homo sapien
aatacagcaggttcccaagataaga

SEQ ID NO: 1177565 - DNA, 25 bp, Homo sapien
aacctggagctcaccaagagagaag

SEQ ID NO: 1177566 - DNA, 25 bp, Homo sapien
tgtggcctgtgatgcaacacctggg

SEQ ID NO: 1177567 - DNA, 25 bp, Homo sapien
gtcctctgagattgggtggctgttt

SEQ ID NO: 1177568 - DNA, 25 bp, Homo sapien
cagacaatgacaatgaggcatcttg

SEQ ID NO: 1177569 - DNA, 25 bp, Homo sapien
tcatcaaatgggcaactattactgt

SEQ ID NO: 1177570 - DNA, 25 bp, Homo sapien
catcttgtgtaaaggacctagcata

SEQ ID NO: 1177571 - DNA, 25 bp, Homo sapien
gtagcatcctgccaacctccattag

SEQ ID NO: 1177572 - DNA, 25 bp, Homo sapien
gggtagtagcatcctgccaacctcc

SEQ ID NO: 1177573 - DNA, 25 bp, Homo sapien
actgatgaaggggtagtagcatcct

SEQ ID NO: 1177574 - DNA, 25 bp, Homo sapien
ctgtaggggaggtcactgatgaagg

SEQ ID NO: 1177575 - DNA, 25 bp, Homo sapien
cagttggaggtatcagagtgaacac

SEQ ID NO: 1177576 - DNA, 25 bp, Homo sapien
agttggaggtatcagagtgaacact

SEQ ID NO: 1177577 - DNA, 25 bp, Homo sapien
cttcagcgttgggagagaaaccctc

SEQ ID NO: 1177578 - DNA, 25 bp, Homo sapien
gagtataaagaagtgtccagattgg

SEQ ID NO: 1177579 - DNA, 25 bp, Homo sapien
tccagattggctgaaatagcatccc

SEQ ID NO: 1177580 - DNA, 25 bp, Homo sapien
tgattgcttcgacctccagtctgac

SEQ ID NO: 1177581 - DNA, 25 bp, Homo sapien
gaagatgacgaaaaccaggctgaca

SEQ ID NO: 1177582 - DNA, 25 bp, Homo sapien
ccgggagtctaggacagaggcacag

SEQ ID NO: 1177583 - DNA, 25 bp, Homo sapien
aatatccttcagtgatatgagagag

SEQ ID NO: 1177584 - DNA, 25 bp, Homo sapien
cctctttaaattcctctaattgttg

SEQ ID NO: 1177585 - DNA, 25 bp, Homo sapien
tctcgggctcaaaaggcatagtgct

SEQ ID NO: 1177586 - DNA, 25 bp, Homo sapien
tatgacagtccccagtgaatagctg

SEQ ID NO: 1177587 - DNA, 25 bp, Homo sapien
ttgtccctagatggcatgaacccgt

SEQ ID NO: 1177588 - DNA, 25 bp, Homo sapien
tctggtaagtgcacgctagtgggcc

SEQ ID NO: 1177589 - DNA, 25 bp, Homo sapien
acttggcaaatgtactgcacgggcg

SEQ ID NO: 1177590 - DNA, 25 bp, Homo sapien
gaagcctcccaagcagtcaatgtga

SEQ ID NO: 1177591 - DNA, 25 bp, Homo sapien
tacggcccggagagaaactgcctgt

SEQ ID NO: 1177592 - DNA, 25 bp, Homo sapien
gcacgggcgtcaattccatgccaga

SEQ ID NO: 1177593 - DNA, 25 bp, Homo sapien
gtacctattatgctcactattccaa

SEQ ID NO: 1177594 - DNA, 25 bp, Homo sapien
tatgctcactattccaacctttttt

SEQ ID NO: 1177595 - DNA, 25 bp, Homo sapien
ggttgtacctattatgctcactatt

SEQ ID NO: 1177596 - DNA, 25 bp, Homo sapien
atgtgttaggttgtacctattatgc

SEQ ID NO: 1177597 - DNA, 25 bp, Homo sapien
tgtagtttacttaaccaatggtgcc

SEQ ID NO: 1177598 - DNA, 25 bp, Homo sapien
ctttgagctagggattgaaaccata

SEQ ID NO: 1177599 - DNA, 25 bp, Homo sapien
tgagcaacgagacatcaacatgggc

SEQ ID NO: 1177600 - DNA, 25 bp, Homo sapien
tctcagggactgcatgagtgtcaca

SEQ ID NO: 1177601 - DNA, 25 bp, Homo sapien
catgtcagtgtgacccgaagatggc

SEQ ID NO: 1177602 - DNA, 25 bp, Homo sapien
ttccagctagcagtaaacatgtcag

SEQ ID NO: 1177603 - DNA, 25 bp, Homo sapien
aaggtggccctaacgtactgcagct

SEQ ID NO: 1177604 - DNA, 25 bp, Homo sapien
tgccagacttgattcttccagctag

SEQ ID NO: 1177605 - DNA, 25 bp, Homo sapien
aggcttatcaaagtaagcagtggga

SEQ ID NO: 1177606 - DNA, 25 bp, Homo sapien
ccttagctctcaacactgtagcatc

SEQ ID NO: 1177607 - DNA, 25 bp, Homo sapien
tgtagcatctattggcaatggtgtt

SEQ ID NO: 1177608 - DNA, 25 bp, Homo sapien
ggcaatggtgttggctggaccgagt

SEQ ID NO: 1177609 - DNA, 25 bp, Homo sapien
gctctcaacactgtagcatctattg

SEQ ID NO: 1177610 - DNA, 25 bp, Homo sapien
tccctgcttcctggaatcttccaca

SEQ ID NO: 1177611 - DNA, 25 bp, Homo sapien
ttaatcatcttgcactccctgcttc

SEQ ID NO: 1177612 - DNA, 25 bp, Homo sapien
ctgcttcctggaatcttccacaggg

SEQ ID NO: 1177613 - DNA, 25 bp, Homo sapien
ttcctggaatcttccacagggtctc

SEQ ID NO: 1177614 - DNA, 25 bp, Homo sapien
cataacttgataatatcacttaggg

SEQ ID NO: 1177615 - DNA, 25 bp, Homo sapien
acttgataatatcacttagggtcat

SEQ ID NO: 1177616 - DNA, 25 bp, Homo sapien
tgcccgtggcaattaaacataactt

SEQ ID NO: 1177617 - DNA, 25 bp, Homo sapien
caccctgcccgtggcaattaaacat

SEQ ID NO: 1177618 - DNA, 25 bp, Homo sapien
ctgttactgtatgaccacaaggaga

SEQ ID NO: 1177619 - DNA, 25 bp, Homo sapien
cccacaggcaagtttagtagcctgt

SEQ ID NO: 1177620 - DNA, 25 bp, Homo sapien
tatgaccacaaggagaaacaactct

SEQ ID NO: 1177621 - DNA, 25 bp, Homo sapien
tagtagcctgttactgtatgaccac

SEQ ID NO: 1177622 - DNA, 25 bp, Homo sapien
atgtctgctattacccctttcccca

SEQ ID NO: 1177623 - DNA, 25 bp, Homo sapien
aagatgtctgctattacccctttcc

SEQ ID NO: 1177624 - DNA, 25 bp, Homo sapien
cagcaaagatgtctgctattacccc

SEQ ID NO: 1177625 - DNA, 25 bp, Homo sapien
tccccatcatttcctgagcctccat

SEQ ID NO: 1177626 - DNA, 25 bp, Homo sapien
aataccttgaggcactttgtcccca

SEQ ID NO: 1177627 - DNA, 25 bp, Homo sapien
tacagactggataggcccactctgg

SEQ ID NO: 1177628 - DNA, 25 bp, Homo sapien
tctgagctgtagtctgcgtagccca

SEQ ID NO: 1177629 - DNA, 25 bp, Homo sapien
caaatggtggctttctcctcaatac

SEQ ID NO: 1177630 - DNA, 25 bp, Homo sapien
gggccgcgctgatattgcagtgtta

SEQ ID NO: 1177631 - DNA, 25 bp, Homo sapien
atatttagacgggtattaggaggag

SEQ ID NO: 1177632 - DNA, 25 bp, Homo sapien
tactgaagggatttcttgggtctcc

SEQ ID NO: 1177633 - DNA, 25 bp, Homo sapien
ttttctgtaaaccagtctgggctgt

SEQ ID NO: 1177634 - DNA, 25 bp, Homo sapien
aacagcagatatcttgagaactcca

SEQ ID NO: 1177635 - DNA, 25 bp, Homo sapien
aatggtgtgcagtagagcagcaaga

SEQ ID NO: 1177636 - DNA, 25 bp, Homo sapien
gagagcggtccattcttcctgagag

SEQ ID NO: 1177637 - DNA, 25 bp, Homo sapien
gaaatgctaatctccagacctgacg

SEQ ID NO: 1177638 - DNA, 25 bp, Homo sapien
gaacacatgctatctgctagtaggg

SEQ ID NO: 1177639 - DNA, 25 bp, Homo sapien
ggttaagatgaactgagctcgagta

SEQ ID NO: 1177640 - DNA, 25 bp, Homo sapien
tcagatcctttatgggacctgaaat

SEQ ID NO: 1177641 - DNA, 25 bp, Homo sapien
gagaaggtccatagcctttttcaga

SEQ ID NO: 1177642 - DNA, 25 bp, Homo sapien
gaacacgtgtggataatggctgagc

SEQ ID NO: 1177643 - DNA, 25 bp, Homo sapien
tgcttgaagacggagccaggattca

SEQ ID NO: 1177644 - DNA, 25 bp, Homo sapien
cccagcgacgtagtgtgagtgacat

SEQ ID NO: 1177645 - DNA, 25 bp, Homo sapien
gatgatgacacaaagcctagaagca

SEQ ID NO: 1177646 - DNA, 25 bp, Homo sapien
tgtgtaccgggtcttgtgcaaagga

SEQ ID NO: 1177647 - DNA, 25 bp, Homo sapien
ttagttacctagcttctgggagacc

SEQ ID NO: 1177648 - DNA, 25 bp, Homo sapien
gagaacacatgtgccccactgagat

SEQ ID NO: 1177649 - DNA, 25 bp, Homo sapien
gagacctctagaaatgagcaacctg

SEQ ID NO: 1177650 - DNA, 25 bp, Homo sapien
taagtgcgtgatctccttagttgca

SEQ ID NO: 1177651 - DNA, 25 bp, Homo sapien
cgtctccataagtgcgtgatctcct

SEQ ID NO: 1177652 - DNA, 25 bp, Homo sapien
tctccttagttgcactccaaccttg

SEQ ID NO: 1177653 - DNA, 25 bp, Homo sapien
gatctccttagttgcactccaacct

SEQ ID NO: 1177654 - DNA, 25 bp, Homo sapien
gtttataggttgaacaatactctta

SEQ ID NO: 1177655 - DNA, 25 bp, Homo sapien
tccatttatcttgtccctagaaatg

SEQ ID NO: 1177656 - DNA, 25 bp, Homo sapien
cctagaaatgccatattttgcttac

SEQ ID NO: 1177657 - DNA, 25 bp, Homo sapien
ctatccttgatttcttcgagtttat

SEQ ID NO: 1177658 - DNA, 25 bp, Homo sapien
tttaaaatattgcaggtatcaacag

SEQ ID NO: 1177659 - DNA, 25 bp, Homo sapien
ctgctgaagatgcaagagtgaagtt

SEQ ID NO: 1177660 - DNA, 25 bp, Homo sapien
tattgcaggtatcaacaggaaatct

SEQ ID NO: 1177661 - DNA, 25 bp, Homo sapien
agtttaatagggtctgttctgtgct

SEQ ID NO: 1177662 - DNA, 25 bp, Homo sapien
catgcacgcatgtgaaggatgaggc

SEQ ID NO: 1177663 - DNA, 25 bp, Homo sapien
tgaggcagtgggatgtcttcgtttc

SEQ ID NO: 1177664 - DNA, 25 bp, Homo sapien
gatgtcttcgtttctccctccattg

SEQ ID NO: 1177665 - DNA, 25 bp, Homo sapien
tcatgcacgcatgtgaaggatgagg

SEQ ID NO: 1177666 - DNA, 25 bp, Homo sapien
ctgctcttccggcaaagctcctctc

SEQ ID NO: 1177667 - DNA, 25 bp, Homo sapien
ctaactgctcttccggcaaagctcc

SEQ ID NO: 1177668 - DNA, 25 bp, Homo sapien
actgctcttccggcaaagctcctct

SEQ ID NO: 1177669 - DNA, 25 bp, Homo sapien
taactgctcttccggcaaagctcct

SEQ ID NO: 1177670 - DNA, 25 bp, Homo sapien
catctcctgagcgtggatagaggta

SEQ ID NO: 1177671 - DNA, 25 bp, Homo sapien
caagtctggactcggctatcccagg

SEQ ID NO: 1177672 - DNA, 25 bp, Homo sapien
tatcccaggtgtttcaaggagctgc

SEQ ID NO: 1177673 - DNA, 25 bp, Homo sapien
tagagggagaccaatcaagtctgga

SEQ ID NO: 1177674 - DNA, 25 bp, Homo sapien
ggtagagaaaataccaggtggcatt

SEQ ID NO: 1177675 - DNA, 25 bp, Homo sapien
agagaaaataccaggtggcattcta

SEQ ID NO: 1177676 - DNA, 25 bp, Homo sapien
agaaaataccaggtggcattctaag

SEQ ID NO: 1177677 - DNA, 25 bp, Homo sapien
ctaacaggtagagaaaataccaggt

SEQ ID NO: 1177678 - DNA, 25 bp, Homo sapien
tcacggtgggggatctgcaaaagct

SEQ ID NO: 1177679 - DNA, 25 bp, Homo sapien
ccccggagatagaatttgatgtgga

SEQ ID NO: 1177680 - DNA, 25 bp, Homo sapien
gatgtggaccttagcagatgaataa

SEQ ID NO: 1177681 - DNA, 25 bp, Homo sapien
ctgcaaaagcttccccccggagata

SEQ ID NO: 1177682 - DNA, 25 bp, Homo sapien
gagggactagagaactactggcaaa

SEQ ID NO: 1177683 - DNA, 25 bp, Homo sapien
ttcttactgctacttgatcaggaac

SEQ ID NO: 1177684 - DNA, 25 bp, Homo sapien
ggagggactagagaactactggcaa

SEQ ID NO: 1177685 - DNA, 25 bp, Homo sapien
tgctacttgatcaggaacaggccag

SEQ ID NO: 1177686 - DNA, 25 bp, Homo sapien
tcagtccttgctggatgctaccatc

SEQ ID NO: 1177687 - DNA, 25 bp, Homo sapien
gcatccaggagtaaatccccagctg

SEQ ID NO: 1177688 - DNA, 25 bp, Homo sapien
tgccatgtggagttcctgggtaccg

SEQ ID NO: 1177689 - DNA, 25 bp, Homo sapien
tggcgctagcgccatcaccaataag

SEQ ID NO: 1177690 - DNA, 25 bp, Homo sapien
catacacatatttctggccgcccac

SEQ ID NO: 1177691 - DNA, 25 bp, Homo sapien
catgcatacacatatttctggccgc

SEQ ID NO: 1177692 - DNA, 25 bp, Homo sapien
gcatacacatatttctggccgccca

SEQ ID NO: 1177693 - DNA, 25 bp, Homo sapien
tgcatacacatatttctggccgccc

SEQ ID NO: 1177694 - DNA, 25 bp, Homo sapien
cctcttgacagctggtgtcgtttct

SEQ ID NO: 1177695 - DNA, 25 bp, Homo sapien
ttgtgccttttagaacaactgcctc

SEQ ID NO: 1177696 - DNA, 25 bp, Homo sapien
tcttgacagctggtgtcgtttctac

SEQ ID NO: 1177697 - DNA, 25 bp, Homo sapien
tgtgccttttagaacaactgcctct

SEQ ID NO: 1177698 - DNA, 25 bp, Homo sapien
agaaggcagcgtctttgttcacttt

SEQ ID NO: 1177699 - DNA, 25 bp, Homo sapien
gttgatttctccttggtaatcttcg

SEQ ID NO: 1177700 - DNA, 25 bp, Homo sapien
tctccttggtaatcttcgaagaagg

SEQ ID NO: 1177701 - DNA, 25 bp, Homo sapien
cgaagaaggcagcgtctttgttcac

SEQ ID NO: 1177702 - DNA, 25 bp, Homo sapien
agatacagtcttgggttgaattgct

SEQ ID NO: 1177703 - DNA, 25 bp, Homo sapien
tgtctctggcatagatacagtcttg

SEQ ID NO: 1177704 - DNA, 25 bp, Homo sapien
tctggcatagatacagtcttgggtt

SEQ ID NO: 1177705 - DNA, 25 bp, Homo sapien
ggcatagatacagtcttgggttgaa

SEQ ID NO: 1177706 - DNA, 25 bp, Homo sapien
tccaccaacaggaaccaatctccca

SEQ ID NO: 1177707 - DNA, 25 bp, Homo sapien
cctccaccaacaggaaccaatctcc

SEQ ID NO: 1177708 - DNA, 25 bp, Homo sapien
ctccaccaacaggaaccaatctccc

SEQ ID NO: 1177709 - DNA, 25 bp, Homo sapien
ctgctgccagtacttaaagctgtct

SEQ ID NO: 1177710 - DNA, 25 bp, Homo sapien
ccactcacggtcaaatcatccatag

SEQ ID NO: 1177711 - DNA, 25 bp, Homo sapien
cattggttcatctttcatcaatcca

SEQ ID NO: 1177712 - DNA, 25 bp, Homo sapien
cactggagcaaataaccagcctctc

SEQ ID NO: 1177713 - DNA, 25 bp, Homo sapien
ttctcaggggaaagaatcccattgg

SEQ ID NO: 1177714 - DNA, 25 bp, Homo sapien
tagtccaagagttgcctgcattctt

SEQ ID NO: 1177715 - DNA, 25 bp, Homo sapien
caagaagaggtgagatccattagtc

SEQ ID NO: 1177716 - DNA, 25 bp, Homo sapien
gaggacgtgagaaattcttcccaac

SEQ ID NO: 1177717 - DNA, 25 bp, Homo sapien
atcttctttgctccgaatgaggacg

SEQ ID NO: 1177718 - DNA, 25 bp, Homo sapien
tccagtctaagagtcagggcaccag

SEQ ID NO: 1177719 - DNA, 25 bp, Homo sapien
ccagacctattttcagacactgttg

SEQ ID NO: 1177720 - DNA, 25 bp, Homo sapien
tctccgcattcttccagtctaagag

SEQ ID NO: 1177721 - DNA, 25 bp, Homo sapien
taagagtcagggcaccagacctatt

SEQ ID NO: 1177722 - DNA, 25 bp, Homo sapien
aatgagtccaagtcctggtagggtt

SEQ ID NO: 1177723 - DNA, 25 bp, Homo sapien
tgagtccaagtcctggtagggttgt

SEQ ID NO: 1177724 - DNA, 25 bp, Homo sapien
taatgagtccaagtcctggtagggt

SEQ ID NO: 1177725 - DNA, 25 bp, Homo sapien
atgagtccaagtcctggtagggttg

SEQ ID NO: 1177726 - DNA, 25 bp, Homo sapien
acatcttgatctgtgtatgctttga

SEQ ID NO: 1177727 - DNA, 25 bp, Homo sapien
ttcaagcatcagttgaaaaacaaca

SEQ ID NO: 1177728 - DNA, 25 bp, Homo sapien
gctttgacgatgcaggaatttacag

SEQ ID NO: 1177729 - DNA, 25 bp, Homo sapien
gatctgtgtatgctttgacgatgca

SEQ ID NO: 1177730 - DNA, 25 bp, Homo sapien
gaagaaggcaagccaaggctgtggg

SEQ ID NO: 1177731 - DNA, 25 bp, Homo sapien
agggtcgtggccagtcctctgttct

SEQ ID NO: 1177732 - DNA, 25 bp, Homo sapien
cagggtcgtggccagtcctctgttc

SEQ ID NO: 1177733 - DNA, 25 bp, Homo sapien
gagcctttgaggtggatcttgacca

SEQ ID NO: 1177734 - DNA, 25 bp, Homo sapien
caggcacacgactgcctgaggcggt

SEQ ID NO: 1177735 - DNA, 25 bp, Homo sapien
catagagacatagatgacttgggaa

SEQ ID NO: 1177736 - DNA, 25 bp, Homo sapien
gacctggaggactgggttgcttaaa

SEQ ID NO: 1177737 - DNA, 25 bp, Homo sapien
aaactaccatcagagaatactataa

SEQ ID NO: 1177738 - DNA, 25 bp, Homo sapien
tgcaataaaacatcataaaggggat

SEQ ID NO: 1177739 - DNA, 25 bp, Homo sapien
gaatagaccaataataggttgtgaa

SEQ ID NO: 1177740 - DNA, 25 bp, Homo sapien
atcaccaccgattccacagaaatac

SEQ ID NO: 1177741 - DNA, 25 bp, Homo sapien
caaacagtctcttagaacacaatgc

SEQ ID NO: 1177742 - DNA, 25 bp, Homo sapien
gaactaaaggattatgaaactcact

SEQ ID NO: 1177743 - DNA, 25 bp, Homo sapien
ttagaactaaaggattatgaaactc

SEQ ID NO: 1177744 - DNA, 25 bp, Homo sapien
aaacagtctcttagaacacaatgca

SEQ ID NO: 1177745 - DNA, 25 bp, Homo sapien
tgcagccgcggccttttcctctttg

SEQ ID NO: 1177746 - DNA, 25 bp, Homo sapien
caaagctggcgaaatatctgtcatt

SEQ ID NO: 1177747 - DNA, 25 bp, Homo sapien
tgccaccaaagctggcgaaatatct

SEQ ID NO: 1177748 - DNA, 25 bp, Homo sapien
aagattccttgcactctgccaccaa

SEQ ID NO: 1177749 - DNA, 25 bp, Homo sapien
aacgtgtgaggctaggcaagttgcc

SEQ ID NO: 1177750 - DNA, 25 bp, Homo sapien
cgtgtgaggctaggcaagttgccta

SEQ ID NO: 1177751 - DNA, 25 bp, Homo sapien
ctgcaggcaaacgtgtgaggctagg

SEQ ID NO: 1177752 - DNA, 25 bp, Homo sapien
caggcaaacgtgtgaggctaggcaa

SEQ ID NO: 1177753 - DNA, 25 bp, Homo sapien
gctggagagagcggctcataccagt

SEQ ID NO: 1177754 - DNA, 25 bp, Homo sapien
gagagagcggctcataccagttaat

SEQ ID NO: 1177755 - DNA, 25 bp, Homo sapien
gagcggctcataccagttaattgca

SEQ ID NO: 1177756 - DNA, 25 bp, Homo sapien
gagagcggctcataccagttaattg

SEQ ID NO: 1177757 - DNA, 25 bp, Homo sapien
tcggccaccgagtcgtgacagcgct

SEQ ID NO: 1177758 - DNA, 25 bp, Homo sapien
cgagtcgtgacagcgctttgcgctc

SEQ ID NO: 1177759 - DNA, 25 bp, Homo sapien
ctttgcgctccgcgaggcgcactcg

SEQ ID NO: 1177760 - DNA, 25 bp, Homo sapien
caccgagtcgtgacagcgctttgcg

SEQ ID NO: 1177761 - DNA, 25 bp, Homo sapien
gttttgcatagcatttagggtcttc

SEQ ID NO: 1177762 - DNA, 25 bp, Homo sapien
gcatagcatttagggtcttcgttga

SEQ ID NO: 1177763 - DNA, 25 bp, Homo sapien
tagcatttagggtcttcgttgaaga

SEQ ID NO: 1177764 - DNA, 25 bp, Homo sapien
tgaaaagcaagactggaaagtgaga

SEQ ID NO: 1177765 - DNA, 25 bp, Homo sapien
tgcaccaagcaaggccaaatctgtc

SEQ ID NO: 1177766 - DNA, 25 bp, Homo sapien
ccagtaccctttcgtactggaccat

SEQ ID NO: 1177767 - DNA, 25 bp, Homo sapien
aaatctgtcactgtgggattgccca

SEQ ID NO: 1177768 - DNA, 25 bp, Homo sapien
cctgaagtacgtgcaccaagcaagg

SEQ ID NO: 1177769 - DNA, 25 bp, Homo sapien
caccagctccggcttacttgcatga

SEQ ID NO: 1177770 - DNA, 25 bp, Homo sapien
ttccacaccagctccggcttacttg

SEQ ID NO: 1177771 - DNA, 25 bp, Homo sapien
cacaccagctccggcttacttgcat

SEQ ID NO: 1177772 - DNA, 25 bp, Homo sapien
tccacaccagctccggcttacttgc

SEQ ID NO: 1177773 - DNA, 25 bp, Homo sapien
gtgattattaatggggcaccagctg

SEQ ID NO: 1177774 - DNA, 25 bp, Homo sapien
aaattccctggagcctgtgattatt

SEQ ID NO: 1177775 - DNA, 25 bp, Homo sapien
ttgtcctcatctttagggggacaaa

SEQ ID NO: 1177776 - DNA, 25 bp, Homo sapien
cctggagcctgtgattattaatggg

SEQ ID NO: 1177777 - DNA, 25 bp, Homo sapien
gatcactcatggctatcactccttc

SEQ ID NO: 1177778 - DNA, 25 bp, Homo sapien
taacgctgatcactcatggctatca

SEQ ID NO: 1177779 - DNA, 25 bp, Homo sapien
ttagtaacgctgatcactcatggct

SEQ ID NO: 1177780 - DNA, 25 bp, Homo sapien
tctggtttgtagtgtgacttttgta

SEQ ID NO: 1177781 - DNA, 25 bp, Homo sapien
tgacttgtaggcagactcaatggct

SEQ ID NO: 1177782 - DNA, 25 bp, Homo sapien
gatacaagcttgggtctttacactg

SEQ ID NO: 1177783 - DNA, 25 bp, Homo sapien
tatggtggcctgagttgacttgtag

SEQ ID NO: 1177784 - DNA, 25 bp, Homo sapien
ggaccatatggtggcctgagttgac

SEQ ID NO: 1177785 - DNA, 25 bp, Homo sapien
ttgactgtagatccatggaaaggcc

SEQ ID NO: 1177786 - DNA, 25 bp, Homo sapien
ggccttcatgtttcgtagactcgga

SEQ ID NO: 1177787 - DNA, 25 bp, Homo sapien
ctaggaccaagaagactcgggcagc

SEQ ID NO: 1177788 - DNA, 25 bp, Homo sapien
tcgggcagcccgaatgctcttggtg

SEQ ID NO: 1177789 - DNA, 25 bp, Homo sapien
gaaagtattttctacaggggtctgc

SEQ ID NO: 1177790 - DNA, 25 bp, Homo sapien
tctacaggggtctgcaataaactac

SEQ ID NO: 1177791 - DNA, 25 bp, Homo sapien
tgcaataaactacccagggacaact

SEQ ID NO: 1177792 - DNA, 25 bp, Homo sapien
ccagggacaactgggcaatggagcc

SEQ ID NO: 1177793 - DNA, 25 bp, Homo sapien
ccacttaattcagagtcccaggcca

SEQ ID NO: 1177794 - DNA, 25 bp, Homo sapien
tagcgggtgctaaagccacataacc

SEQ ID NO: 1177795 - DNA, 25 bp, Homo sapien
ggaaacttgtttatagcgggtgcta

SEQ ID NO: 1177796 - DNA, 25 bp, Homo sapien
cagatcttcttaggtggaattccac

SEQ ID NO: 1177797 - DNA, 25 bp, Homo sapien
aagctgtcggcaagagctttggaaa

SEQ ID NO: 1177798 - DNA, 25 bp, Homo sapien
gagctttggaaaacgggagcaaaca

SEQ ID NO: 1177799 - DNA, 25 bp, Homo sapien
gctgtcggcaagagctttggaaaac

SEQ ID NO: 1177800 - DNA, 25 bp, Homo sapien
cagccattaagctgtcggcaagagc

SEQ ID NO: 1177801 - DNA, 25 bp, Homo sapien
tgtatgtcagcatttccgaaagtga

SEQ ID NO: 1177802 - DNA, 25 bp, Homo sapien
tgccaaatctaattctgtatgtcag

SEQ ID NO: 1177803 - DNA, 25 bp, Homo sapien
tttccgaaagtgaattccttggcat

SEQ ID NO: 1177804 - DNA, 25 bp, Homo sapien
gtgtgccaaatctaattctgtatgt

SEQ ID NO: 1177805 - DNA, 25 bp, Homo sapien
ctatttggagttgcttgggggcttg

SEQ ID NO: 1177806 - DNA, 25 bp, Homo sapien
tctccaagtggtcaccaactccaaa

SEQ ID NO: 1177807 - DNA, 25 bp, Homo sapien
cttgggggcttgcacgcaaccacca

SEQ ID NO: 1177808 - DNA, 25 bp, Homo sapien
ttgggggcttgcacgcaaccaccac

SEQ ID NO: 1177809 - DNA, 25 bp, Homo sapien
gccaagaaagcaatgaagacaaagg

SEQ ID NO: 1177810 - DNA, 25 bp, Homo sapien
aaagcaatgaagacaaaggaggaat

SEQ ID NO: 1177811 - DNA, 25 bp, Homo sapien
ctgccaagaaagcaatgaagacaaa

SEQ ID NO: 1177812 - DNA, 25 bp, Homo sapien
agcaatgaagacaaaggaggaatac

SEQ ID NO: 1177813 - DNA, 25 bp, Homo sapien
tatccaggtggtctcatatttctcc

SEQ ID NO: 1177814 - DNA, 25 bp, Homo sapien
tccggtctgtacagaacagctgaag

SEQ ID NO: 1177815 - DNA, 25 bp, Homo sapien
ctgagccaagacagccatttgaggc

SEQ ID NO: 1177816 - DNA, 25 bp, Homo sapien
gccatccagcactgacttcgccctt

SEQ ID NO: 1177817 - DNA, 25 bp, Homo sapien
aacactgagagttggggatggaaga

SEQ ID NO: 1177818 - DNA, 25 bp, Homo sapien
ccatacttggcagagtctagggtgg

SEQ ID NO: 1177819 - DNA, 25 bp, Homo sapien
aaaacactgagagttggggatggaa

SEQ ID NO: 1177820 - DNA, 25 bp, Homo sapien
ctccatacttggcagagtctagggt

SEQ ID NO: 1177821 - DNA, 25 bp, Homo sapien
tcacagctgcccacgagcagatgca

SEQ ID NO: 1177822 - DNA, 25 bp, Homo sapien
atcacagctgcccacgagcagatgc

SEQ ID NO: 1177823 - DNA, 25 bp, Homo sapien
aatgccatcaatgtctttctacata

SEQ ID NO: 1177824 - DNA, 25 bp, Homo sapien
tttcaccacagtcaatgccatcaat

SEQ ID NO: 1177825 - DNA, 25 bp, Homo sapien
gaatcataacttgacaccctgtttc

SEQ ID NO: 1177826 - DNA, 25 bp, Homo sapien
tgaatcataacttgacaccctgttt

SEQ ID NO: 1177827 - DNA, 25 bp, Homo sapien
aatcataacttgacaccctgtttcc

SEQ ID NO: 1177828 - DNA, 25 bp, Homo sapien
cacatgttagaagctggctcttcct

SEQ ID NO: 1177829 - DNA, 25 bp, Homo sapien
gctggctcttcctcttgctgagggc

SEQ ID NO: 1177830 - DNA, 25 bp, Homo sapien
agaagctggctcttcctcttgctga

SEQ ID NO: 1177831 - DNA, 25 bp, Homo sapien
aagctggctcttcctcttgctgagg

SEQ ID NO: 1177832 - DNA, 25 bp, Homo sapien
gacatcattggagacttgaacacag

SEQ ID NO: 1177833 - DNA, 25 bp, Homo sapien
ggacatcattggagacttgaacaca

SEQ ID NO: 1177834 - DNA, 25 bp, Homo sapien
ggggacatcattggagacttgaaca

SEQ ID NO: 1177835 - DNA, 25 bp, Homo sapien
aacacagagacacgtccctatcact

SEQ ID NO: 1177836 - DNA, 25 bp, Homo sapien
cctgggaacccagaatgagttggtg

SEQ ID NO: 1177837 - DNA, 25 bp, Homo sapien
tattgttctgtgctaggaagtctcc

SEQ ID NO: 1177838 - DNA, 25 bp, Homo sapien
ccctggtctccagttgcggtgctag

SEQ ID NO: 1177839 - DNA, 25 bp, Homo sapien
tctgatcctcggcacagaagaccca

SEQ ID NO: 1177840 - DNA, 25 bp, Homo sapien
ggagggtacatagggttgcagagca

SEQ ID NO: 1177841 - DNA, 25 bp, Homo sapien
aaaggagggtacatagggttgcaga

SEQ ID NO: 1177842 - DNA, 25 bp, Homo sapien
gcaaaggagggtacatagggttgca

SEQ ID NO: 1177843 - DNA, 25 bp, Homo sapien
aggagggtacatagggttgcagagc

SEQ ID NO: 1177844 - DNA, 25 bp, Homo sapien
tttcagagtgtctttcagatctgga

SEQ ID NO: 1177845 - DNA, 25 bp, Homo sapien
ctctttggggttgaatcactgggca

SEQ ID NO: 1177846 - DNA, 25 bp, Homo sapien
gggtgggacagaataatctctgatc

SEQ ID NO: 1177847 - DNA, 25 bp, Homo sapien
cagagtgtctttcagatctggaaag

SEQ ID NO: 1177848 - DNA, 25 bp, Homo sapien
cgtgtcgtccaggtgtggttccaaa

SEQ ID NO: 1177849 - DNA, 25 bp, Homo sapien
acagggctgagtgtccgtgtcgtcc

SEQ ID NO: 1177850 - DNA, 25 bp, Homo sapien
gagatgttctacctcctaccctgag

SEQ ID NO: 1177851 - DNA, 25 bp, Homo sapien
caaaaccagagagcgaaggtaacct

SEQ ID NO: 1177852 - DNA, 25 bp, Homo sapien
gtagcagtcactatggatattcatg

SEQ ID NO: 1177853 - DNA, 25 bp, Homo sapien
tggctctgccgggttccagatggct

SEQ ID NO: 1177854 - DNA, 25 bp, Homo sapien
cagggctcacttggggtagcagtca

SEQ ID NO: 1177855 - DNA, 25 bp, Homo sapien
cacttggggtagcagtcactatgga

SEQ ID NO: 1177856 - DNA, 25 bp, Homo sapien
tgtgtccaagcgactgctccagttg

SEQ ID NO: 1177857 - DNA, 25 bp, Homo sapien
gcaagcgccctgctttttaaggatg

SEQ ID NO: 1177858 - DNA, 25 bp, Homo sapien
gccagaatgtagtcctgtggccaca

SEQ ID NO: 1177859 - DNA, 25 bp, Homo sapien
cagtcaccaggtagagaaagaggaa

SEQ ID NO: 1177860 - DNA, 25 bp, Homo sapien
gagtagccaccccttgtcatgagga

SEQ ID NO: 1177861 - DNA, 25 bp, Homo sapien
gaaaacagcaacctcaagacttgaa

SEQ ID NO: 1177862 - DNA, 25 bp, Homo sapien
tatttgtactattgagaggggtgag

SEQ ID NO: 1177863 - DNA, 25 bp, Homo sapien
tgaggattcttgctttaactctctt

SEQ ID NO: 1177864 - DNA, 25 bp, Homo sapien
ggtctggattcctgttggcagctgg

SEQ ID NO: 1177865 - DNA, 25 bp, Homo sapien
gatggttagccagggtctggattcc

SEQ ID NO: 1177866 - DNA, 25 bp, Homo sapien
tgggtgatggttagccagggtctgg

SEQ ID NO: 1177867 - DNA, 25 bp, Homo sapien
gaagctgggtgatggttagccaggg

SEQ ID NO: 1177868 - DNA, 25 bp, Homo sapien
taaattatgagggatcgctccagcc

SEQ ID NO: 1177869 - DNA, 25 bp, Homo sapien
agagcagcgagtggtgttcctttca

SEQ ID NO: 1177870 - DNA, 25 bp, Homo sapien
gatatccaagtcaggcaggtctgcc

SEQ ID NO: 1177871 - DNA, 25 bp, Homo sapien
tttgtgtctaaacggcctccaggga

SEQ ID NO: 1177872 - DNA, 25 bp, Homo sapien
tgtgtaatacgtctctttctcctct

SEQ ID NO: 1177873 - DNA, 25 bp, Homo sapien
gctctccactgctcgtatttagaca

SEQ ID NO: 1177874 - DNA, 25 bp, Homo sapien
cctcctaattttctgtgggatatag

SEQ ID NO: 1177875 - DNA, 25 bp, Homo sapien
tggaagatccaaatgcctcgcttgc

SEQ ID NO: 1177876 - DNA, 25 bp, Homo sapien
cacaagtagtaggttgtcagctata

SEQ ID NO: 1177877 - DNA, 25 bp, Homo sapien
caccccgcttaagaggccaatcaat

SEQ ID NO: 1177878 - DNA, 25 bp, Homo sapien
aaattgcggatcctaggacctcatc

SEQ ID NO: 1177879 - DNA, 25 bp, Homo sapien
tatttctaactcactggctataaat

SEQ ID NO: 1177880 - DNA, 25 bp, Homo sapien
tatgagagtcacacccaaggttgcc

SEQ ID NO: 1177881 - DNA, 25 bp, Homo sapien
gacacgttcacagctacatgggata

SEQ ID NO: 1177882 - DNA, 25 bp, Homo sapien
taaggccaaggaacatatgagagtc

SEQ ID NO: 1177883 - DNA, 25 bp, Homo sapien
caaggttgccgacccatgtactggg

SEQ ID NO: 1177884 - DNA, 25 bp, Homo sapien
tgtctgcgagcgacagcttcagaag

SEQ ID NO: 1177885 - DNA, 25 bp, Homo sapien
gcccagaagagtgtataccacctga

SEQ ID NO: 1177886 - DNA, 25 bp, Homo sapien
aatgagtttgttatgcgggcccaga

SEQ ID NO: 1177887 - DNA, 25 bp, Homo sapien
gaggccatcgctcccaatgagtttg

SEQ ID NO: 1177888 - DNA, 25 bp, Homo sapien
aggatttgagcccagacaactcccg

SEQ ID NO: 1177889 - DNA, 25 bp, Homo sapien
acgaagttgatctggtttgaaccca

SEQ ID NO: 1177890 - DNA, 25 bp, Homo sapien
acttcctctagcgactcctgagtca

SEQ ID NO: 1177891 - DNA, 25 bp, Homo sapien
taacaggagtcaaggtagtaagacg

SEQ ID NO: 1177892 - DNA, 25 bp, Homo sapien
gtctccttggttcatcttctgggtc

SEQ ID NO: 1177893 - DNA, 25 bp, Homo sapien
ctccttggttcatcttctgggtcag

SEQ ID NO: 1177894 - DNA, 25 bp, Homo sapien
tctccttggttcatcttctgggtca

SEQ ID NO: 1177895 - DNA, 25 bp, Homo sapien
cttcgatccgatttggtggagagag

SEQ ID NO: 1177896 - DNA, 25 bp, Homo sapien
gagagacgcccacggcttggtgtaa

SEQ ID NO: 1177897 - DNA, 25 bp, Homo sapien
gcccacggcttggtgtaaggagcat

SEQ ID NO: 1177898 - DNA, 25 bp, Homo sapien
aagaaatactgcttcgatccgattt

SEQ ID NO: 1177899 - DNA, 25 bp, Homo sapien
ccagcagcagattttccggcagaca

SEQ ID NO: 1177900 - DNA, 25 bp, Homo sapien
tgaatgaatgctgctatgctgcccc

SEQ ID NO: 1177901 - DNA, 25 bp, Homo sapien
taccaagtcaacatggcactgaatg

SEQ ID NO: 1177902 - DNA, 25 bp, Homo sapien
ggcttatggccaatccctgtctctg

SEQ ID NO: 1177903 - DNA, 25 bp, Homo sapien
tcccactcgttcatcccattgtatg

SEQ ID NO: 1177904 - DNA, 25 bp, Homo sapien
gcagacatcatacttagcagttctc

SEQ ID NO: 1177905 - DNA, 25 bp, Homo sapien
ccttgcggagcctctgggacgtgca

SEQ ID NO: 1177906 - DNA, 25 bp, Homo sapien
tgcctttcttggtgaggccagtgcc

SEQ ID NO: 1177907 - DNA, 25 bp, Homo sapien
tataagatctgagagtgcactgccg

SEQ ID NO: 1177908 - DNA, 25 bp, Homo sapien
caaaggtcgtgctgtcttgaagact

SEQ ID NO: 1177909 - DNA, 25 bp, Homo sapien
aaatgcagacatccctcaaaggtcg

SEQ ID NO: 1177910 - DNA, 25 bp, Homo sapien
gaagacttcttctggttgaggacac

SEQ ID NO: 1177911 - DNA, 25 bp, Homo sapien
gtgaaacaggaaatccatctctggg

SEQ ID NO: 1177912 - DNA, 25 bp, Homo sapien
tccatctctgggtagctcttggtga

SEQ ID NO: 1177913 - DNA, 25 bp, Homo sapien
gatgggagtaagtggtgaaacagga

SEQ ID NO: 1177914 - DNA, 25 bp, Homo sapien
cttggtgaggtgatgggagtaagtg

SEQ ID NO: 1177915 - DNA, 25 bp, Homo sapien
cccagagcctccaagggactgaaat

SEQ ID NO: 1177916 - DNA, 25 bp, Homo sapien
ttgtcccagagcctccaagggactg

SEQ ID NO: 1177917 - DNA, 25 bp, Homo sapien
agagcctccaagggactgaaatgtt

SEQ ID NO: 1177918 - DNA, 25 bp, Homo sapien
gtcccagagcctccaagggactgaa

SEQ ID NO: 1177919 - DNA, 25 bp, Homo sapien
tgtggttgaaattctggtatctttt

SEQ ID NO: 1177920 - DNA, 25 bp, Homo sapien
tttgctgaactcttatccgcaatgt

SEQ ID NO: 1177921 - DNA, 25 bp, Homo sapien
gtgtggttgaaattctggtatcttt

SEQ ID NO: 1177922 - DNA, 25 bp, Homo sapien
caagacctgtgctcttggtccactg

SEQ ID NO: 1177923 - DNA, 25 bp, Homo sapien
aggtatttctacctgcccagcagca

SEQ ID NO: 1177924 - DNA, 25 bp, Homo sapien
agccctcaagagtcagctcttctgg

SEQ ID NO: 1177925 - DNA, 25 bp, Homo sapien
gactgttgcttctcggtcttggcca

SEQ ID NO: 1177926 - DNA, 25 bp, Homo sapien
ggcatggctctgtcctgtccaccaa

SEQ ID NO: 1177927 - DNA, 25 bp, Homo sapien
tggcatggctctgtcctgtccacca

SEQ ID NO: 1177928 - DNA, 25 bp, Homo sapien
ctggcatggctctgtcctgtccacc

SEQ ID NO: 1177929 - DNA, 25 bp, Homo sapien
gcatggctctgtcctgtccaccaac

SEQ ID NO: 1177930 - DNA, 25 bp, Homo sapien
cacttgtttggacccagtggaggtg

SEQ ID NO: 1177931 - DNA, 25 bp, Homo sapien
ccaaatcgccactatggtcattgtt

SEQ ID NO: 1177932 - DNA, 25 bp, Homo sapien
tctgtgttgatagaggggtgcacac

SEQ ID NO: 1177933 - DNA, 25 bp, Homo sapien
ctggcctggaatgtgcacttgtttg

SEQ ID NO: 1177934 - DNA, 25 bp, Homo sapien
tggccaaggaaggccatagttggac

SEQ ID NO: 1177935 - DNA, 25 bp, Homo sapien
tgggggtggccaaggaaggccatag

SEQ ID NO: 1177936 - DNA, 25 bp, Homo sapien
gggtggccaaggaaggccatagttg

SEQ ID NO: 1177937 - DNA, 25 bp, Homo sapien
tattggcaatggatgggggtggcca

SEQ ID NO: 1177938 - DNA, 25 bp, Homo sapien
cttcatggcacgttacatccgtgac

SEQ ID NO: 1177939 - DNA, 25 bp, Homo sapien
ggcacgttacatccgtgaccgccat

SEQ ID NO: 1177940 - DNA, 25 bp, Homo sapien
tcatggcacgttacatccgtgaccg

SEQ ID NO: 1177941 - DNA, 25 bp, Homo sapien
catggcacgttacatccgtgaccgc

SEQ ID NO: 1177942 - DNA, 25 bp, Homo sapien
atgtagcttctaccgctcagttgtt

SEQ ID NO: 1177943 - DNA, 25 bp, Homo sapien
tgcatgtagcttctaccgctcagtt

SEQ ID NO: 1177944 - DNA, 25 bp, Homo sapien
tagcttctaccgctcagttgttcct

SEQ ID NO: 1177945 - DNA, 25 bp, Homo sapien
gcttctaccgctcagttgttccttg

SEQ ID NO: 1177946 - DNA, 25 bp, Homo sapien
cttggttgctaagcctccctgagtc

SEQ ID NO: 1177947 - DNA, 25 bp, Homo sapien
ttttctgtacaagaggactttactg

SEQ ID NO: 1177948 - DNA, 25 bp, Homo sapien
acaagaggactttactgccagacaa

SEQ ID NO: 1177949 - DNA, 25 bp, Homo sapien
tgtacaagaggactttactgccaga

SEQ ID NO: 1177950 - DNA, 25 bp, Homo sapien
tgccagacaacgcagagacacagaa

SEQ ID NO: 1177951 - DNA, 25 bp, Homo sapien
cgagaggtgtagtccgagctccaat

SEQ ID NO: 1177952 - DNA, 25 bp, Homo sapien
tagtccgagaggtgtagtccgagct

SEQ ID NO: 1177953 - DNA, 25 bp, Homo sapien
aggtgtagtccgagctccaatttac

SEQ ID NO: 1177954 - DNA, 25 bp, Homo sapien
cttttaggagaggtgtagtccgaga

SEQ ID NO: 1177955 - DNA, 25 bp, Homo sapien
tgaataactggagcataccagtgct

SEQ ID NO: 1177956 - DNA, 25 bp, Homo sapien
agatgaataactggagcataccagt

SEQ ID NO: 1177957 - DNA, 25 bp, Homo sapien
gatgaataactggagcataccagtg

SEQ ID NO: 1177958 - DNA, 25 bp, Homo sapien
atgaataactggagcataccagtgc

SEQ ID NO: 1177959 - DNA, 25 bp, Homo sapien
ttggctgcttgcaggaccggcccag

SEQ ID NO: 1177960 - DNA, 25 bp, Homo sapien
gggtttttctagcacaggcttcacg

SEQ ID NO: 1177961 - DNA, 25 bp, Homo sapien
gttgccttgtagttcccggtggcag

SEQ ID NO: 1177962 - DNA, 25 bp, Homo sapien
gcctgctgttcgctcacacataaat

SEQ ID NO: 1177963 - DNA, 25 bp, Homo sapien
gacacagtcaacgtgatacctgaac

SEQ ID NO: 1177964 - DNA, 25 bp, Homo sapien
tgttgaaactcaagccagggccctt

SEQ ID NO: 1177965 - DNA, 25 bp, Homo sapien
gccacatgcaattgggcacacagaa

SEQ ID NO: 1177966 - DNA, 25 bp, Homo sapien
cactttgcagggtatgatggtgcct

SEQ ID NO: 1177967 - DNA, 25 bp, Homo sapien
ccatccggagtgtggaggccatata

SEQ ID NO: 1177968 - DNA, 25 bp, Homo sapien
gttacgctgactccaaagcttggca

SEQ ID NO: 1177969 - DNA, 25 bp, Homo sapien
tgcaaactgaggacagccagagact

SEQ ID NO: 1177970 - DNA, 25 bp, Homo sapien
tcagtagagtgagccttcttctccc

SEQ ID NO: 1177971 - DNA, 25 bp, Homo sapien
ggctgccgaagccaagtccgtgacc

SEQ ID NO: 1177972 - DNA, 25 bp, Homo sapien
tctgagtgaaggataactgactgca

SEQ ID NO: 1177973 - DNA, 25 bp, Homo sapien
tccgtgaccagcacaatcccaggag

SEQ ID NO: 1177974 - DNA, 25 bp, Homo sapien
ggcgtaggcgatgtctggaggaaca

SEQ ID NO: 1177975 - DNA, 25 bp, Homo sapien
tggctatccagaatgcttgtggaat

SEQ ID NO: 1177976 - DNA, 25 bp, Homo sapien
ttggctatccagaatgcttgtggaa

SEQ ID NO: 1177977 - DNA, 25 bp, Homo sapien
ggctatccagaatgcttgtggaatg

SEQ ID NO: 1177978 - DNA, 25 bp, Homo sapien
gggttagttgcaaactcacatggat

SEQ ID NO: 1177979 - DNA, 25 bp, Homo sapien
tgtggtccaggctcctatggatgaa

SEQ ID NO: 1177980 - DNA, 25 bp, Homo sapien
tgggtaggggttagttgcaaactca

SEQ ID NO: 1177981 - DNA, 25 bp, Homo sapien
ccctggaggtatgtgcagaatgcca

SEQ ID NO: 1177982 - DNA, 25 bp, Homo sapien
aggtgttatcggctctcctccctgg

SEQ ID NO: 1177983 - DNA, 25 bp, Homo sapien
caaagcttgtatggaaggtgttatc

SEQ ID NO: 1177984 - DNA, 25 bp, Homo sapien
gaacctgagtaaggctggtgtgact

SEQ ID NO: 1177985 - DNA, 25 bp, Homo sapien
tctcagagggctaactgtggttcct

SEQ ID NO: 1177986 - DNA, 25 bp, Homo sapien
aggtgggtggttcactggtcttctt

SEQ ID NO: 1177987 - DNA, 25 bp, Homo sapien
catccagcaacgtctggtcccagtg

SEQ ID NO: 1177988 - DNA, 25 bp, Homo sapien
ggttcactggtcttcttgagcatcc

SEQ ID NO: 1177989 - DNA, 25 bp, Homo sapien
cttgagcatccagcaacgtctggtc

SEQ ID NO: 1177990 - DNA, 25 bp, Homo sapien
tctcaagtccttgtccgcatcgcat

SEQ ID NO: 1177991 - DNA, 25 bp, Homo sapien
caacatactttctcaagtccttgtc

SEQ ID NO: 1177992 - DNA, 25 bp, Homo sapien
gcatcgcattccctctgtattgcaa

SEQ ID NO: 1177993 - DNA, 25 bp, Homo sapien
ttatccaagattattccgggaatca

SEQ ID NO: 1177994 - DNA, 25 bp, Homo sapien
ctatattgtttccaattggcataag

SEQ ID NO: 1177995 - DNA, 25 bp, Homo sapien
ccaattggcataagttgagcatgac

SEQ ID NO: 1177996 - DNA, 25 bp, Homo sapien
gcataagttgagcatgactaaacct

SEQ ID NO: 1177997 - DNA, 25 bp, Homo sapien
gtttccaattggcataagttgagca

SEQ ID NO: 1177998 - DNA, 25 bp, Homo sapien
aatgtcagccaaggggttcctcctg

SEQ ID NO: 1177999 - DNA, 25 bp, Homo sapien
gaaatgtcagccaaggggttcctcc

SEQ ID NO: 1178000 - DNA, 25 bp, Homo sapien
tcagctaccgagctcagccctgatt

SEQ ID NO: 1178001 - DNA, 25 bp, Homo sapien
agctaccgagctcagccctgatttc

SEQ ID NO: 1178002 - DNA, 25 bp, Homo sapien
aggaagtagggcttttcctgaatat

SEQ ID NO: 1178003 - DNA, 25 bp, Homo sapien
gttgtgacttactagaaagactttc

SEQ ID NO: 1178004 - DNA, 25 bp, Homo sapien
tctttcgttagtgtggatgttggga

SEQ ID NO: 1178005 - DNA, 25 bp, Homo sapien
aagttcctgtgctgatgtgctgggc

SEQ ID NO: 1178006 - DNA, 25 bp, Homo sapien
cattaatgtagcgttgaccctgaac

SEQ ID NO: 1178007 - DNA, 25 bp, Homo sapien
tacgcagaggataaatggtgggtca

SEQ ID NO: 1178008 - DNA, 25 bp, Homo sapien
gaccctgaacccagaggatgacgtg

SEQ ID NO: 1178009 - DNA, 25 bp, Homo sapien
tgccagggaatgaattacgcagagg

SEQ ID NO: 1178010 - DNA, 25 bp, Homo sapien
taagtcaggcttggctttgttggga

SEQ ID NO: 1178011 - DNA, 25 bp, Homo sapien
tgtattgcaaaggtagagttagccc

SEQ ID NO: 1178012 - DNA, 25 bp, Homo sapien
tgggtgtccatgtctactgcagtag

SEQ ID NO: 1178013 - DNA, 25 bp, Homo sapien
gggtgacttctggatctcaaaccta

SEQ ID NO: 1178014 - DNA, 25 bp, Homo sapien
tccatggcaagagacaatgcacctc

SEQ ID NO: 1178015 - DNA, 25 bp, Homo sapien
aagtctccatggcaagagacaatgc

SEQ ID NO: 1178016 - DNA, 25 bp, Homo sapien
gtctccatggcaagagacaatgcac

SEQ ID NO: 1178017 - DNA, 25 bp, Homo sapien
tctccatggcaagagacaatgcacc

SEQ ID NO: 1178018 - DNA, 25 bp, Homo sapien
ctgtaatgtggtaaggcccaccatc

SEQ ID NO: 1178019 - DNA, 25 bp, Homo sapien
gtaatgtggtaaggcccaccatcaa

SEQ ID NO: 1178020 - DNA, 25 bp, Homo sapien
caccatcaataaagtcacatgctgt

SEQ ID NO: 1178021 - DNA, 25 bp, Homo sapien
tgtggtaaggcccaccatcaataaa

SEQ ID NO: 1178022 - DNA, 25 bp, Homo sapien
ctggtaatgacagccaccgtcttca

SEQ ID NO: 1178023 - DNA, 25 bp, Homo sapien
ttgtggcaggaattcctactgtgca

SEQ ID NO: 1178024 - DNA, 25 bp, Homo sapien
cagggatgcaggcatagctcttcag

SEQ ID NO: 1178025 - DNA, 25 bp, Homo sapien
acagccaccgtcttcacagggatgc

SEQ ID NO: 1178026 - DNA, 25 bp, Homo sapien
agcctgagtcggagctgatgccagc

SEQ ID NO: 1178027 - DNA, 25 bp, Homo sapien
aataccaaaatgttgggctcctggg

SEQ ID NO: 1178028 - DNA, 25 bp, Homo sapien
tctgcaggagggtccgaatatgtct

SEQ ID NO: 1178029 - DNA, 25 bp, Homo sapien
gaatatgtctttgtttgagcacccg

SEQ ID NO: 1178030 - DNA, 25 bp, Homo sapien
gactttctccccggatgcctttgct

SEQ ID NO: 1178031 - DNA, 25 bp, Homo sapien
ctttctccccggatgcctttgctga

SEQ ID NO: 1178032 - DNA, 25 bp, Homo sapien
actttctccccggatgcctttgctg

SEQ ID NO: 1178033 - DNA, 25 bp, Homo sapien
tggctgagccctggcgaagctttgg

SEQ ID NO: 1178034 - DNA, 25 bp, Homo sapien
tcactacccactttttagctgctgc

SEQ ID NO: 1178035 - DNA, 25 bp, Homo sapien
atggcaggccgcagtgttttcacta

SEQ ID NO: 1178036 - DNA, 25 bp, Homo sapien
gccgcagtgttttcactacccactt

SEQ ID NO: 1178037 - DNA, 25 bp, Homo sapien
gaactccaagaatgagtagctgaga

SEQ ID NO: 1178038 - DNA, 25 bp, Homo sapien
atgaggaatctctcagcattggttc

SEQ ID NO: 1178039 - DNA, 25 bp, Homo sapien
gaccttctgatgcaaatgaggaatc

SEQ ID NO: 1178040 - DNA, 25 bp, Homo sapien
tcatggtggcgatgcttttcttcaa

SEQ ID NO: 1178041 - DNA, 25 bp, Homo sapien
ggatagaaaaaccagaaagaagatg

SEQ ID NO: 1178042 - DNA, 25 bp, Homo sapien
accagaaagaagatggagatgagga

SEQ ID NO: 1178043 - DNA, 25 bp, Homo sapien
tagaaaaaccagaaagaagatggag

SEQ ID NO: 1178044 - DNA, 25 bp, Homo sapien
aaaccagaaagaagatggagatgag

SEQ ID NO: 1178045 - DNA, 25 bp, Homo sapien
tgctcgtggtcgtttgaggagccaa

SEQ ID NO: 1178046 - DNA, 25 bp, Homo sapien
taatccaagagctgctcgtggtcgt

SEQ ID NO: 1178047 - DNA, 25 bp, Homo sapien
attgtccataatccaagagctgctc

SEQ ID NO: 1178048 - DNA, 25 bp, Homo sapien
ggttgggttaagcagatagtcttga

SEQ ID NO: 1178049 - DNA, 25 bp, Homo sapien
gagaactatttgcatcccctcgaaa

SEQ ID NO: 1178050 - DNA, 25 bp, Homo sapien
gggtgcttgagaactatttgcatcc

SEQ ID NO: 1178051 - DNA, 25 bp, Homo sapien
cactggcactgtgcacttgacagct

SEQ ID NO: 1178052 - DNA, 25 bp, Homo sapien
tgcacttgacagctcgagtggagag

SEQ ID NO: 1178053 - DNA, 25 bp, Homo sapien
tctgcctcaaggcggaagtgctgct

SEQ ID NO: 1178054 - DNA, 25 bp, Homo sapien
ggccacagcctcagttagaaaaaca

SEQ ID NO: 1178055 - DNA, 25 bp, Homo sapien
gcttccgtgaggtactttggggcca

SEQ ID NO: 1178056 - DNA, 25 bp, Homo sapien
gtgtgagtgagaggcttggcttccg

SEQ ID NO: 1178057 - DNA, 25 bp, Homo sapien
caaaaagtaccagagaccattgatt

SEQ ID NO: 1178058 - DNA, 25 bp, Homo sapien
gccacaaaaagtaccagagaccatt

SEQ ID NO: 1178059 - DNA, 25 bp, Homo sapien
gggccacaaaaagtaccagagacca

SEQ ID NO: 1178060 - DNA, 25 bp, Homo sapien
tggggccacaaaaagtaccagagac

SEQ ID NO: 1178061 - DNA, 25 bp, Homo sapien
gctggcactaagcaatcttgcaccc

SEQ ID NO: 1178062 - DNA, 25 bp, Homo sapien
gcactaagcaatcttgcacccagtg

SEQ ID NO: 1178063 - DNA, 25 bp, Homo sapien
tggcactaagcaatcttgcacccag

SEQ ID NO: 1178064 - DNA, 25 bp, Homo sapien
taagcaatcttgcacccagtgcatt

SEQ ID NO: 1178065 - DNA, 25 bp, Homo sapien
tctccaagagagctctggcggcggt

SEQ ID NO: 1178066 - DNA, 25 bp, Homo sapien
ccaaggtgacttgccagattctccc

SEQ ID NO: 1178067 - DNA, 25 bp, Homo sapien
taggcgctcatcacacgctcggcgt

SEQ ID NO: 1178068 - DNA, 25 bp, Homo sapien
ttgaacttcgctctcttccttgctc

SEQ ID NO: 1178069 - DNA, 25 bp, Homo sapien
cagctctgtagaaaccactcaggca

SEQ ID NO: 1178070 - DNA, 25 bp, Homo sapien
tggcttttgggggtgccccagctct

SEQ ID NO: 1178071 - DNA, 25 bp, Homo sapien
cactcaggcactaagtccacggaaa

SEQ ID NO: 1178072 - DNA, 25 bp, Homo sapien
tccctgagcagtcatttgcaaagag

SEQ ID NO: 1178073 - DNA, 25 bp, Homo sapien
attgttaggcatgggcgccctctgc

SEQ ID NO: 1178074 - DNA, 25 bp, Homo sapien
caggggcatcacatcccggagaaag

SEQ ID NO: 1178075 - DNA, 25 bp, Homo sapien
aagattgttaggcatgggcgccctc

SEQ ID NO: 1178076 - DNA, 25 bp, Homo sapien
ctctgctgtccgctcaggggcatca

SEQ ID NO: 1178077 - DNA, 25 bp, Homo sapien
ctgttgatacttgccacatggaagg

SEQ ID NO: 1178078 - DNA, 25 bp, Homo sapien
cgtacttaagagcacttctctctct

SEQ ID NO: 1178079 - DNA, 25 bp, Homo sapien
cttgccacatggaaggcatcaacag

SEQ ID NO: 1178080 - DNA, 25 bp, Homo sapien
tcaacagcaccacgtacttaagagc

SEQ ID NO: 1178081 - DNA, 25 bp, Homo sapien
gagcaaaagctttcctcattccaca

SEQ ID NO: 1178082 - DNA, 25 bp, Homo sapien
cgctgaagagcaaaagctttcctca

SEQ ID NO: 1178083 - DNA, 25 bp, Homo sapien
aagagcaaaagctttcctcattcca

SEQ ID NO: 1178084 - DNA, 25 bp, Homo sapien
tgaagagcaaaagctttcctcattc

SEQ ID NO: 1178085 - DNA, 25 bp, Homo sapien
ttcctgaaggcccggctccacagaa

SEQ ID NO: 1178086 - DNA, 25 bp, Homo sapien
gccatgacaagcttctagggcccca

SEQ ID NO: 1178087 - DNA, 25 bp, Homo sapien
ctggattgaggttcaccttcctgaa

SEQ ID NO: 1178088 - DNA, 25 bp, Homo sapien
tggattgaggttcaccttcctgaag

SEQ ID NO: 1178089 - DNA, 25 bp, Homo sapien
gctgggctgtcttcattgcatgggc

SEQ ID NO: 1178090 - DNA, 25 bp, Homo sapien
cgatgtctcccgaactgctgctagg

SEQ ID NO: 1178091 - DNA, 25 bp, Homo sapien
cagggtgctgcacatccatcaggtg

SEQ ID NO: 1178092 - DNA, 25 bp, Homo sapien
gctggtcccatgagattcagagcct

SEQ ID NO: 1178093 - DNA, 25 bp, Homo sapien
ggataagaatgttcagagctcccat

SEQ ID NO: 1178094 - DNA, 25 bp, Homo sapien
gatgtctttggaagctctcttcatc

SEQ ID NO: 1178095 - DNA, 25 bp, Homo sapien
ctgtcaaggagaagtctcctccgtc

SEQ ID NO: 1178096 - DNA, 25 bp, Homo sapien
gaggcctgccaatgatctggaccac

SEQ ID NO: 1178097 - DNA, 25 bp, Homo sapien
aagtctcctccgtcaccattgcagt

SEQ ID NO: 1178098 - DNA, 25 bp, Homo sapien
gtgccaccagctgcaagtcgaagtg

SEQ ID NO: 1178099 - DNA, 25 bp, Homo sapien
cgaagtgctgttcggttgtttcaga

SEQ ID NO: 1178100 - DNA, 25 bp, Homo sapien
gctgttcggttgtttcagaagcagg

SEQ ID NO: 1178101 - DNA, 25 bp, Homo sapien
acatgtcttttcaaggaggttttca

SEQ ID NO: 1178102 - DNA, 25 bp, Homo sapien
tggagatttcccagacatcattaga

SEQ ID NO: 1178103 - DNA, 25 bp, Homo sapien
ttggagatttcccagacatcattag

SEQ ID NO: 1178104 - DNA, 25 bp, Homo sapien
ggagatttcccagacatcattagac

SEQ ID NO: 1178105 - DNA, 25 bp, Homo sapien
gagatttcccagacatcattagact

SEQ ID NO: 1178106 - DNA, 25 bp, Homo sapien
aggttccatggaagaggcgtacaca

SEQ ID NO: 1178107 - DNA, 25 bp, Homo sapien
tccagcaaagtcagaggttccatgg

SEQ ID NO: 1178108 - DNA, 25 bp, Homo sapien
ccagcaaagtcagaggttccatgga

SEQ ID NO: 1178109 - DNA, 25 bp, Homo sapien
gaagaggcgtacacagcatgcagca

SEQ ID NO: 1178110 - DNA, 25 bp, Homo sapien
gtgatagaggttattgacaatatga

SEQ ID NO: 1178111 - DNA, 25 bp, Homo sapien
gctaacattgagaaccatggatcta

SEQ ID NO: 1178112 - DNA, 25 bp, Homo sapien
tactataaaagtacatcaggcttaa

SEQ ID NO: 1178113 - DNA, 25 bp, Homo sapien
gatgtaattgaaaacacctcctgga

SEQ ID NO: 1178114 - DNA, 25 bp, Homo sapien
ccgctgtcattaggcggcgaacact

SEQ ID NO: 1178115 - DNA, 25 bp, Homo sapien
atttgggtaccgctgtcattaggcg

SEQ ID NO: 1178116 - DNA, 25 bp, Homo sapien
tgtactgtgtttgctgtagggattt

SEQ ID NO: 1178117 - DNA, 25 bp, Homo sapien
ctgtagggatttgggtaccgctgtc

SEQ ID NO: 1178118 - DNA, 25 bp, Homo sapien
cctagtcgtgatcacgttggttttg

SEQ ID NO: 1178119 - DNA, 25 bp, Homo sapien
tgaattgggtgagaccaaattgctg

SEQ ID NO: 1178120 - DNA, 25 bp, Homo sapien
tgggtctttggccttctctgcagct

SEQ ID NO: 1178121 - DNA, 25 bp, Homo sapien
atgtattcaaaacccttcctagtcg

SEQ ID NO: 1178122 - DNA, 25 bp, Homo sapien
gacttggagttgaagggttgtataa

SEQ ID NO: 1178123 - DNA, 25 bp, Homo sapien
ggaatcttttgaagacttggagttg

SEQ ID NO: 1178124 - DNA, 25 bp, Homo sapien
agccagaatgcagagctcctgttga

SEQ ID NO: 1178125 - DNA, 25 bp, Homo sapien
cgatctttgatagcaggtgtctctg

SEQ ID NO: 1178126 - DNA, 25 bp, Homo sapien
tgccatttgaactctttaccacagg

SEQ ID NO: 1178127 - DNA, 25 bp, Homo sapien
ttccattacaggagaactgaacaga

SEQ ID NO: 1178128 - DNA, 25 bp, Homo sapien
ttggtggctctgtcgctcgctccca

SEQ ID NO: 1178129 - DNA, 25 bp, Homo sapien
gaactgtaacactttagctttgtgc

SEQ ID NO: 1178130 - DNA, 25 bp, Homo sapien
aacagaaattgaaacgcgaggctca

SEQ ID NO: 1178131 - DNA, 25 bp, Homo sapien
ctgcgggctctgtcctctgatccga

SEQ ID NO: 1178132 - DNA, 25 bp, Homo sapien
ttcctgcgggctctgtcctctgatc

SEQ ID NO: 1178133 - DNA, 25 bp, Homo sapien
cttcctgcgggctctgtcctctgat

SEQ ID NO: 1178134 - DNA, 25 bp, Homo sapien
cgggctctgtcctctgatccgaagg

SEQ ID NO: 1178135 - DNA, 25 bp, Homo sapien
agaagccacaaccaccctcctttca

SEQ ID NO: 1178136 - DNA, 25 bp, Homo sapien
gaagccacaaccaccctcctttcac

SEQ ID NO: 1178137 - DNA, 25 bp, Homo sapien
agtaagaagccacaaccaccctcct

SEQ ID NO: 1178138 - DNA, 25 bp, Homo sapien
tagtgattctgttctcgttcaggaa

SEQ ID NO: 1178139 - DNA, 25 bp, Homo sapien
tggcaaactagtgattctgttctcg

SEQ ID NO: 1178140 - DNA, 25 bp, Homo sapien
ctccgggtgttcaggggtatgtcaa

SEQ ID NO: 1178141 - DNA, 25 bp, Homo sapien
ttctgttctcgttcaggaacagcct

SEQ ID NO: 1178142 - DNA, 25 bp, Homo sapien
caaggtagatgagtttgaagacccc

SEQ ID NO: 1178143 - DNA, 25 bp, Homo sapien
gaatccggttgttctgacagtccaa

SEQ ID NO: 1178144 - DNA, 25 bp, Homo sapien
tcagaaacagggtctccagagtagt

SEQ ID NO: 1178145 - DNA, 25 bp, Homo sapien
gcaagccggtatttctgaggtccag

SEQ ID NO: 1178146 - DNA, 25 bp, Homo sapien
tctggagccacttcaatcacatcct

SEQ ID NO: 1178147 - DNA, 25 bp, Homo sapien
cttccccacacccaatcaagccctc

SEQ ID NO: 1178148 - DNA, 25 bp, Homo sapien
cttttctggagccacttcaatcaca

SEQ ID NO: 1178149 - DNA, 25 bp, Homo sapien
ggagccacttcaatcacatcctctt

SEQ ID NO: 1178150 - DNA, 25 bp, Homo sapien
cagcttcacccaactttttctccca

SEQ ID NO: 1178151 - DNA, 25 bp, Homo sapien
ggtgggccctgcagagtaataagaa

SEQ ID NO: 1178152 - DNA, 25 bp, Homo sapien
ccctgcagagtaataagaatgcatt

SEQ ID NO: 1178153 - DNA, 25 bp, Homo sapien
agaatgcattcaatcagcttcaccc

SEQ ID NO: 1178154 - DNA, 25 bp, Homo sapien
ttctcatttttctgaagctctgact

SEQ ID NO: 1178155 - DNA, 25 bp, Homo sapien
atttctcatttttctgaagctctga

SEQ ID NO: 1178156 - DNA, 25 bp, Homo sapien
tcatttttctgaagctctgactttc

SEQ ID NO: 1178157 - DNA, 25 bp, Homo sapien
ttatttctcatttttctgaagctct

SEQ ID NO: 1178158 - DNA, 25 bp, Homo sapien
tcagtctgtattggtcagggctcaa

SEQ ID NO: 1178159 - DNA, 25 bp, Homo sapien
gctcaatagagcaccctagcaaggg

SEQ ID NO: 1178160 - DNA, 25 bp, Homo sapien
atatcctgggaagaactcaatgacc

SEQ ID NO: 1178161 - DNA, 25 bp, Homo sapien
tggtgccagatctcgccaacttgag

SEQ ID NO: 1178162 - DNA, 25 bp, Homo sapien
acattgctttacccgtcctctgcat

SEQ ID NO: 1178163 - DNA, 25 bp, Homo sapien
gctgagtccaacctggcatcactag

SEQ ID NO: 1178164 - DNA, 25 bp, Homo sapien
agtagctgagtccaacctggcatca

SEQ ID NO: 1178165 - DNA, 25 bp, Homo sapien
tgagtccaacctggcatcactagca

SEQ ID NO: 1178166 - DNA, 25 bp, Homo sapien
gcagtagctgagtccaacctggcat

SEQ ID NO: 1178167 - DNA, 25 bp, Homo sapien
gggtgctgaaacagcgtgactccca

SEQ ID NO: 1178168 - DNA, 25 bp, Homo sapien
ggtgctgaaacagcgtgactcccag

SEQ ID NO: 1178169 - DNA, 25 bp, Homo sapien
tggaccgagctcgtctgggtttgaa

SEQ ID NO: 1178170 - DNA, 25 bp, Homo sapien
tgggtttgaaaaatccgccggctga

SEQ ID NO: 1178171 - DNA, 25 bp, Homo sapien
tcttcttcactcgacttgtggcggg

SEQ ID NO: 1178172 - DNA, 25 bp, Homo sapien
cacatgtatcggagtgggttcccca

SEQ ID NO: 1178173 - DNA, 25 bp, Homo sapien
atctctatgacagctccaaggtggt

SEQ ID NO: 1178174 - DNA, 25 bp, Homo sapien
agaaggtttcaatctctatgacagc

SEQ ID NO: 1178175 - DNA, 25 bp, Homo sapien
tattttactagaaggtttcaatctc

SEQ ID NO: 1178176 - DNA, 25 bp, Homo sapien
aggcacataagatagtggtctctgg

SEQ ID NO: 1178177 - DNA, 25 bp, Homo sapien
agagaccctgggtctgataaccatt

SEQ ID NO: 1178178 - DNA, 25 bp, Homo sapien
gctagctctggacccaagagaccct

SEQ ID NO: 1178179 - DNA, 25 bp, Homo sapien
ttcctcctcccattcgcactgccat

SEQ ID NO: 1178180 - DNA, 25 bp, Homo sapien
cccaagagaccctgggtctgataac

SEQ ID NO: 1178181 - DNA, 25 bp, Homo sapien
gggagacagttcttagtgtggagag

SEQ ID NO: 1178182 - DNA, 25 bp, Homo sapien
gctaagtctctaggcagagaagtcc

SEQ ID NO: 1178183 - DNA, 25 bp, Homo sapien
agacagttcttagtgtggagaggta

SEQ ID NO: 1178184 - DNA, 25 bp, Homo sapien
gcctgaattggggccgctaagtctc

SEQ ID NO: 1178185 - DNA, 25 bp, Homo sapien
catgggtttgaattctgcttgctga

SEQ ID NO: 1178186 - DNA, 25 bp, Homo sapien
tacctggagtacagtaaatggctat

SEQ ID NO: 1178187 - DNA, 25 bp, Homo sapien
caccacggcaattttttaaagcgct

SEQ ID NO: 1178188 - DNA, 25 bp, Homo sapien
gatgctcgaaatgagagaatacctg

SEQ ID NO: 1178189 - DNA, 25 bp, Homo sapien
ccccccgcaacccaatgccggctgc

SEQ ID NO: 1178190 - DNA, 25 bp, Homo sapien
cccgcaacccaatgccggctgcgcc

SEQ ID NO: 1178191 - DNA, 25 bp, Homo sapien
ccaatgccggctgcgccggcgtcat

SEQ ID NO: 1178192 - DNA, 25 bp, Homo sapien
tgccggctgcgccggcgtcatccgc

SEQ ID NO: 1178193 - DNA, 25 bp, Homo sapien
cctggtccacggcagtgaccccggc

SEQ ID NO: 1178194 - DNA, 25 bp, Homo sapien
cgcgagctccgtggcttcggcccca

SEQ ID NO: 1178195 - DNA, 25 bp, Homo sapien
cagcctggtccacggcagtgacccc

SEQ ID NO: 1178196 - DNA, 25 bp, Homo sapien
ctggtccacggcagtgaccccggcc

SEQ ID NO: 1178197 - DNA, 25 bp, Homo sapien
cttcaaaacctaggcctcgagagag

SEQ ID NO: 1178198 - DNA, 25 bp, Homo sapien
aggcctcgagagaggccccccagga

SEQ ID NO: 1178199 - DNA, 25 bp, Homo sapien
taggcctcgagagaggccccccagg

SEQ ID NO: 1178200 - DNA, 25 bp, Homo sapien
caaaacctaggcctcgagagaggcc

SEQ ID NO: 1178201 - DNA, 25 bp, Homo sapien
ctggttcgctggccggctccggtct

SEQ ID NO: 1178202 - DNA, 25 bp, Homo sapien
tcgctggccggctccggtctgcttc

SEQ ID NO: 1178203 - DNA, 25 bp, Homo sapien
gttcgctggccggctccggtctgct

SEQ ID NO: 1178204 - DNA, 25 bp, Homo sapien
tggttcgctggccggctccggtctg

SEQ ID NO: 1178205 - DNA, 25 bp, Homo sapien
tgaccgttgtagcccgcaatggcca

SEQ ID NO: 1178206 - DNA, 25 bp, Homo sapien
gtgaccgttgtagcccgcaatggcc

SEQ ID NO: 1178207 - DNA, 25 bp, Homo sapien
gaccgttgtagcccgcaatggccac

SEQ ID NO: 1178208 - DNA, 25 bp, Homo sapien
tagtaacctctgcgcatggggacaa

SEQ ID NO: 1178209 - DNA, 25 bp, Homo sapien
ctagtaacctctgcgcatggggaca

SEQ ID NO: 1178210 - DNA, 25 bp, Homo sapien
aacggatggtgtagggcttgccgat

SEQ ID NO: 1178211 - DNA, 25 bp, Homo sapien
tgcaacggatggtgtagggcttgcc

SEQ ID NO: 1178212 - DNA, 25 bp, Homo sapien
caacggatggtgtagggcttgccga

SEQ ID NO: 1178213 - DNA, 25 bp, Homo sapien
cttgcaacggatggtgtagggcttg

SEQ ID NO: 1178214 - DNA, 25 bp, Homo sapien
cgcacgagcacggagccgcagcagc

SEQ ID NO: 1178215 - DNA, 25 bp, Homo sapien
ctgggcacgcggatgaggcgcacga

SEQ ID NO: 1178216 - DNA, 25 bp, Homo sapien
gcacgcggatgaggcgcacgagcac

SEQ ID NO: 1178217 - DNA, 25 bp, Homo sapien
ggcgcacgagcacggagccgcagca

SEQ ID NO: 1178218 - DNA, 25 bp, Homo sapien
ttggtgaatacagccgtcctccaga

SEQ ID NO: 1178219 - DNA, 25 bp, Homo sapien
acaggcgccgagacgataccggtgc

SEQ ID NO: 1178220 - DNA, 25 bp, Homo sapien
cttggtgaatacagccgtcctccag

SEQ ID NO: 1178221 - DNA, 25 bp, Homo sapien
tccctctactcagtgatgggttagc

SEQ ID NO: 1178222 - DNA, 25 bp, Homo sapien
tcagtgatgggttagccaagaggca

SEQ ID NO: 1178223 - DNA, 25 bp, Homo sapien
catcaaaaggtgaagcacagcccat

SEQ ID NO: 1178224 - DNA, 25 bp, Homo sapien
cagctgtgaaccaaggtaaatgcca

SEQ ID NO: 1178225 - DNA, 25 bp, Homo sapien
ctttgaaacatagccagctgctggg

SEQ ID NO: 1178226 - DNA, 25 bp, Homo sapien
ccagctgctgggaactcaatgtgta

SEQ ID NO: 1178227 - DNA, 25 bp, Homo sapien
ggaactcaatgtgtattctttccat

SEQ ID NO: 1178228 - DNA, 25 bp, Homo sapien
gacaagttggaggttactgactttg

SEQ ID NO: 1178229 - DNA, 25 bp, Homo sapien
tgctctaccaactgatctagctaga

SEQ ID NO: 1178230 - DNA, 25 bp, Homo sapien
ctctaccaactgatctagctagaca

SEQ ID NO: 1178231 - DNA, 25 bp, Homo sapien
gctctaccaactgatctagctagac

SEQ ID NO: 1178232 - DNA, 25 bp, Homo sapien
cagggtacccgcagggtgtgatctc

SEQ ID NO: 1178233 - DNA, 25 bp, Homo sapien
agcaaactctggagtcgagatccag

SEQ ID NO: 1178234 - DNA, 25 bp, Homo sapien
tctgaaaccatccttttggccccac

SEQ ID NO: 1178235 - DNA, 25 bp, Homo sapien
ttcagcacacgacggcagggtaccc

SEQ ID NO: 1178236 - DNA, 25 bp, Homo sapien
ttgccgagtacaggaccaacaagca

SEQ ID NO: 1178237 - DNA, 25 bp, Homo sapien
ggaggaattgccgagtacaggacca

SEQ ID NO: 1178238 - DNA, 25 bp, Homo sapien
cgagtacaggaccaacaagcagggt

SEQ ID NO: 1178239 - DNA, 25 bp, Homo sapien
ttctgaaggaggaattgccgagtac

SEQ ID NO: 1178240 - DNA, 25 bp, Homo sapien
agagttcaggaacttaaatcaagac

SEQ ID NO: 1178241 - DNA, 25 bp, Homo sapien
cagagttcaggaacttaaatcaaga

SEQ ID NO: 1178242 - DNA, 25 bp, Homo sapien
cttgccaagaagtcatggctgctgg

SEQ ID NO: 1178243 - DNA, 25 bp, Homo sapien
tagattttatatccttcttggtaag

SEQ ID NO: 1178244 - DNA, 25 bp, Homo sapien
tgatctttagattttatatccttct

SEQ ID NO: 1178245 - DNA, 25 bp, Homo sapien
tatatccttcttggtaaggttttca

SEQ ID NO: 1178246 - DNA, 25 bp, Homo sapien
tttatgatctttagattttatatcc

SEQ ID NO: 1178247 - DNA, 25 bp, Homo sapien
cacaggcaaaggtgtctccagttgg

SEQ ID NO: 1178248 - DNA, 25 bp, Homo sapien
gggtgcctcgaaagaacttctcgaa

SEQ ID NO: 1178249 - DNA, 25 bp, Homo sapien
tgcatagcggggtgcctcgaaagaa

SEQ ID NO: 1178250 - DNA, 25 bp, Homo sapien
ttctcgaagtacttcagcagagaat

SEQ ID NO: 1178251 - DNA, 25 bp, Homo sapien
tcttggataaaccagcattattggt

SEQ ID NO: 1178252 - DNA, 25 bp, Homo sapien
gccctgtgtcttgggaatccccttc

SEQ ID NO: 1178253 - DNA, 25 bp, Homo sapien
ggtcaccctgtaagtctagcctttc

SEQ ID NO: 1178254 - DNA, 25 bp, Homo sapien
ctgacagccctgtgtcttgggaatc

SEQ ID NO: 1178255 - DNA, 25 bp, Homo sapien
ttctacaaagtgagtaacctgctct

SEQ ID NO: 1178256 - DNA, 25 bp, Homo sapien
gataggatgccattagaacatagca

SEQ ID NO: 1178257 - DNA, 25 bp, Homo sapien
tacacattatgtatgatcctgaacc

SEQ ID NO: 1178258 - DNA, 25 bp, Homo sapien
taattttacaatagaggagtcagac

SEQ ID NO: 1178259 - DNA, 25 bp, Homo sapien
taagccggcttcaggctggtccaca

SEQ ID NO: 1178260 - DNA, 25 bp, Homo sapien
caggccacctggacgctatagtgaa

SEQ ID NO: 1178261 - DNA, 25 bp, Homo sapien
gctgtctttgttctgggcccggtct

SEQ ID NO: 1178262 - DNA, 25 bp, Homo sapien
gtcatggaataagccgtgctaggca

SEQ ID NO: 1178263 - DNA, 25 bp, Homo sapien
cagaacaaaactgcgcagcgcggtg

SEQ ID NO: 1178264 - DNA, 25 bp, Homo sapien
tggatcaccttcgaacagctggagc

SEQ ID NO: 1178265 - DNA, 25 bp, Homo sapien
cgtgaataatttgtccccagcagag

SEQ ID NO: 1178266 - DNA, 25 bp, Homo sapien
tcccggattgggtttgcagaacagt

SEQ ID NO: 1178267 - DNA, 25 bp, Homo sapien
ggaatgactcactaaggagtctcca

SEQ ID NO: 1178268 - DNA, 25 bp, Homo sapien
gaagccacaacttcggggaatgact

SEQ ID NO: 1178269 - DNA, 25 bp, Homo sapien
ccccgacgctattatgtagcttgta

SEQ ID NO: 1178270 - DNA, 25 bp, Homo sapien
actcgtgactctcaaggaaagtatc

SEQ ID NO: 1178271 - DNA, 25 bp, Homo sapien
agccggaagcgccttcccctccagg

SEQ ID NO: 1178272 - DNA, 25 bp, Homo sapien
agagccggaagcgccttcccctcca

SEQ ID NO: 1178273 - DNA, 25 bp, Homo sapien
ctgcagagccggaagcgccttcccc

SEQ ID NO: 1178274 - DNA, 25 bp, Homo sapien
gcagagccggaagcgccttcccctc

SEQ ID NO: 1178275 - DNA, 25 bp, Homo sapien
tgttaggaggatggaagatctgtcc

SEQ ID NO: 1178276 - DNA, 25 bp, Homo sapien
cacagtccatagtcttcaatattca

SEQ ID NO: 1178277 - DNA, 25 bp, Homo sapien
ggagagtggaagctaactatatgtt

SEQ ID NO: 1178278 - DNA, 25 bp, Homo sapien
gaatatttggagagtggaagctaac

SEQ ID NO: 1178279 - DNA, 25 bp, Homo sapien
cacaaggatagtcacataaagggct

SEQ ID NO: 1178280 - DNA, 25 bp, Homo sapien
taaaatccttattcggctgcctgtg

SEQ ID NO: 1178281 - DNA, 25 bp, Homo sapien
gacggtagcttagaacactctgagg

SEQ ID NO: 1178282 - DNA, 25 bp, Homo sapien
gatgtttccacgaaggaacaagcct

SEQ ID NO: 1178283 - DNA, 25 bp, Homo sapien
caatgcaatgttgaataccagtggc

SEQ ID NO: 1178284 - DNA, 25 bp, Homo sapien
gagagacagatccacgatcgttgga

SEQ ID NO: 1178285 - DNA, 25 bp, Homo sapien
ttttgctactaacacactactgggt

SEQ ID NO: 1178286 - DNA, 25 bp, Homo sapien
taccagtggcaagtgccgacatcct

SEQ ID NO: 1178287 - DNA, 25 bp, Homo sapien
aatgaatcagtaggacttccagcca

SEQ ID NO: 1178288 - DNA, 25 bp, Homo sapien
tttcccatagtcaaatgagtcagag

SEQ ID NO: 1178289 - DNA, 25 bp, Homo sapien
gacctggtcccatagagtgcttctt

SEQ ID NO: 1178290 - DNA, 25 bp, Homo sapien
tggatcaggcatacctcaacttctg

SEQ ID NO: 1178291 - DNA, 25 bp, Homo sapien
tgttaaaacatacctcagtcccaga

SEQ ID NO: 1178292 - DNA, 25 bp, Homo sapien
ctgttgcatcaggatcccggctggg

SEQ ID NO: 1178293 - DNA, 25 bp, Homo sapien
tgctgatgatgttggtcaaggacca

SEQ ID NO: 1178294 - DNA, 25 bp, Homo sapien
ctttgaggacagagagcgtgtctcc

SEQ ID NO: 1178295 - DNA, 25 bp, Homo sapien
tagcactgactatggacatccggaa

SEQ ID NO: 1178296 - DNA, 25 bp, Homo sapien
tgtattcatacatagcccctgcaag

SEQ ID NO: 1178297 - DNA, 25 bp, Homo sapien
cactgggctagtgctggagacgaac

SEQ ID NO: 1178298 - DNA, 25 bp, Homo sapien
aggccctgaccttcgaatgatgaca

SEQ ID NO: 1178299 - DNA, 25 bp, Homo sapien
cagttcacgagacagctttgcagtt

SEQ ID NO: 1178300 - DNA, 25 bp, Homo sapien
ggcttgagtaccaccacttatctgc

SEQ ID NO: 1178301 - DNA, 25 bp, Homo sapien
tggaaccgaaagatcagacctgact

SEQ ID NO: 1178302 - DNA, 25 bp, Homo sapien
catatttcctagttgagtgtccttg

SEQ ID NO: 1178303 - DNA, 25 bp, Homo sapien
tacatatgtccaataatagagggcc

SEQ ID NO: 1178304 - DNA, 25 bp, Homo sapien
tctatcctgaggtaacaatcagaaa

SEQ ID NO: 1178305 - DNA, 25 bp, Homo sapien
ctttggctcattaatcctactagaa

SEQ ID NO: 1178306 - DNA, 25 bp, Homo sapien
ttaaaacaggctcaatatacagcag

SEQ ID NO: 1178307 - DNA, 25 bp, Homo sapien
tggcctcaactgatacggctgcctc

SEQ ID NO: 1178308 - DNA, 25 bp, Homo sapien
tctgaactgaatggtgttgcttctt

SEQ ID NO: 1178309 - DNA, 25 bp, Homo sapien
tgaccctgtataggcctaggataag

SEQ ID NO: 1178310 - DNA, 25 bp, Homo sapien
gcagaagacggatactgatgatcct

SEQ ID NO: 1178311 - DNA, 25 bp, Homo sapien
ttagaaacctacaaaggccatcagc

SEQ ID NO: 1178312 - DNA, 25 bp, Homo sapien
tgagcactcatttgaaccgcagacc

SEQ ID NO: 1178313 - DNA, 25 bp, Homo sapien
tccaaggcgaagagatagatattcc

SEQ ID NO: 1178314 - DNA, 25 bp, Homo sapien
gaagaactgatagctggcacccaac

SEQ ID NO: 1178315 - DNA, 25 bp, Homo sapien
tagcagatagcttccagggacaggg

SEQ ID NO: 1178316 - DNA, 25 bp, Homo sapien
aaagtatgcatctaaccaattcagg

SEQ ID NO: 1178317 - DNA, 25 bp, Homo sapien
gcatctaaccaattcaggtttccgt

SEQ ID NO: 1178318 - DNA, 25 bp, Homo sapien
tgcatctaaccaattcaggtttccg

SEQ ID NO: 1178319 - DNA, 25 bp, Homo sapien
gtatgcatctaaccaattcaggttt

SEQ ID NO: 1178320 - DNA, 25 bp, Homo sapien
tgtgcacgctcatagatacttacgg

SEQ ID NO: 1178321 - DNA, 25 bp, Homo sapien
gcaatgcctgaaaagctgcctgcga

SEQ ID NO: 1178322 - DNA, 25 bp, Homo sapien
catactcagtcatagggacagtgca

SEQ ID NO: 1178323 - DNA, 25 bp, Homo sapien
tacccagagtctgatgctacagcag

SEQ ID NO: 1178324 - DNA, 25 bp, Homo sapien
gaaggcccaggttgagtactctgaa

SEQ ID NO: 1178325 - DNA, 25 bp, Homo sapien
cctaggagagttaccctgatctgga

SEQ ID NO: 1178326 - DNA, 25 bp, Homo sapien
gagaaagcaagaaagcgagcatcca

SEQ ID NO: 1178327 - DNA, 25 bp, Homo sapien
catccctggtaattgcctggcttca

SEQ ID NO: 1178328 - DNA, 25 bp, Homo sapien
actgtggctatttcatggtgtgaag

SEQ ID NO: 1178329 - DNA, 25 bp, Homo sapien
gaacacgttgggacggcccccagca

SEQ ID NO: 1178330 - DNA, 25 bp, Homo sapien
tgtggctatttcatggtgtgaagcc

SEQ ID NO: 1178331 - DNA, 25 bp, Homo sapien
ctgtggctatttcatggtgtgaagc

SEQ ID NO: 1178332 - DNA, 25 bp, Homo sapien
aacattgatggctaggtgggccacc

SEQ ID NO: 1178333 - DNA, 25 bp, Homo sapien
cagttagaagcacaaaaccatattc

SEQ ID NO: 1178334 - DNA, 25 bp, Homo sapien
ttcttgcgggccttggaaacattga

SEQ ID NO: 1178335 - DNA, 25 bp, Homo sapien
gccaccattataaagctggcagcac

SEQ ID NO: 1178336 - DNA, 25 bp, Homo sapien
agaagtgtactattggaatcccagc

SEQ ID NO: 1178337 - DNA, 25 bp, Homo sapien
tagcaaatagctccaagcagaagtg

SEQ ID NO: 1178338 - DNA, 25 bp, Homo sapien
gatggaaactactccctagcagggc

SEQ ID NO: 1178339 - DNA, 25 bp, Homo sapien
gaagcagaatcgctaacacagtcct

SEQ ID NO: 1178340 - DNA, 25 bp, Homo sapien
tactgatcagatggtcaagaggagc

SEQ ID NO: 1178341 - DNA, 25 bp, Homo sapien
gacaagggtctcaattctcagaagc

SEQ ID NO: 1178342 - DNA, 25 bp, Homo sapien
tactgtagggaaatagagccttcct

SEQ ID NO: 1178343 - DNA, 25 bp, Homo sapien
gaaagaggcagctttgcgccaaact

SEQ ID NO: 1178344 - DNA, 25 bp, Homo sapien
gaatgcagttgaagatgtgcccatt

SEQ ID NO: 1178345 - DNA, 25 bp, Homo sapien
tgttctggtgggctcgctgaatgca

SEQ ID NO: 1178346 - DNA, 25 bp, Homo sapien
ttttcagggtccgtgctgtacatga

SEQ ID NO: 1178347 - DNA, 25 bp, Homo sapien
ggtccgtgctgtacatgataggata

SEQ ID NO: 1178348 - DNA, 25 bp, Homo sapien
tgcagatgtctttggtgcccggcag

SEQ ID NO: 1178349 - DNA, 25 bp, Homo sapien
aaaataaacattcaccgcagggaga

SEQ ID NO: 1178350 - DNA, 25 bp, Homo sapien
tcagcaaatacagcgcactaagggc

SEQ ID NO: 1178351 - DNA, 25 bp, Homo sapien
gcctgggagagtcaacatcggttta

SEQ ID NO: 1178352 - DNA, 25 bp, Homo sapien
taagaagggaggatacacttccaac

SEQ ID NO: 1178353 - DNA, 25 bp, Homo sapien
ccagatggttaggaaaggcttagaa

SEQ ID NO: 1178354 - DNA, 25 bp, Homo sapien
tagaaccagaagtctgaagggccac

SEQ ID NO: 1178355 - DNA, 25 bp, Homo sapien
aagggccactctggtcagaacttgg

SEQ ID NO: 1178356 - DNA, 25 bp, Homo sapien
tatctatactgcagaggcctgcaag

SEQ ID NO: 1178357 - DNA, 25 bp, Homo sapien
gaaaaaaatgcaggccttcaaggtc

SEQ ID NO: 1178358 - DNA, 25 bp, Homo sapien
aatgcaggccttcaaggtcataagc

SEQ ID NO: 1178359 - DNA, 25 bp, Homo sapien
gccttcaaggtcataagcagtagat

SEQ ID NO: 1178360 - DNA, 25 bp, Homo sapien
tctttgaaaaaaatgcaggccttca

SEQ ID NO: 1178361 - DNA, 25 bp, Homo sapien
tcaagtcacgatatagcagctctag

SEQ ID NO: 1178362 - DNA, 25 bp, Homo sapien
cattaaatgtcaacaggagggtgaa

SEQ ID NO: 1178363 - DNA, 25 bp, Homo sapien
caattgttaggtgcttgtccccaaa

SEQ ID NO: 1178364 - DNA, 25 bp, Homo sapien
tgaggactaatctagagacctgagc

SEQ ID NO: 1178365 - DNA, 25 bp, Homo sapien
ggccttctcctagacaggtgggata

SEQ ID NO: 1178366 - DNA, 25 bp, Homo sapien
catggtcttcgagggaaaagtctcc

SEQ ID NO: 1178367 - DNA, 25 bp, Homo sapien
gaaatgccgttttctcaaatgggcc

SEQ ID NO: 1178368 - DNA, 25 bp, Homo sapien
ggtgtagctccactagaaagaaggg

SEQ ID NO: 1178369 - DNA, 25 bp, Homo sapien
aactcgtccaacaatccaggccaag

SEQ ID NO: 1178370 - DNA, 25 bp, Homo sapien
gcataaagaactcgtccaacaatcc

SEQ ID NO: 1178371 - DNA, 25 bp, Homo sapien
agaactcgtccaacaatccaggcca

SEQ ID NO: 1178372 - DNA, 25 bp, Homo sapien
aaagaactcgtccaacaatccaggc

SEQ ID NO: 1178373 - DNA, 25 bp, Homo sapien
taacgtgccacagtagtattgcttg

SEQ ID NO: 1178374 - DNA, 25 bp, Homo sapien
caactttgctctaggacctttggaa

SEQ ID NO: 1178375 - DNA, 25 bp, Homo sapien
gataccacatgccaagtaacgtgcc

SEQ ID NO: 1178376 - DNA, 25 bp, Homo sapien
cattagacaaactggccttaggagg

SEQ ID NO: 1178377 - DNA, 25 bp, Homo sapien
agggctcctcgactacgcttgctgg

SEQ ID NO: 1178378 - DNA, 25 bp, Homo sapien
ggctcctcgactacgcttgctgggt

SEQ ID NO: 1178379 - DNA, 25 bp, Homo sapien
cccagggctcctcgactacgcttgc

SEQ ID NO: 1178380 - DNA, 25 bp, Homo sapien
gctcctcgactacgcttgctgggtt

SEQ ID NO: 1178381 - DNA, 25 bp, Homo sapien
agcatttgggtccactgcccaagcc

SEQ ID NO: 1178382 - DNA, 25 bp, Homo sapien
ggcagcatttgggtccactgcccaa

SEQ ID NO: 1178383 - DNA, 25 bp, Homo sapien
gcagcatttgggtccactgcccaag

SEQ ID NO: 1178384 - DNA, 25 bp, Homo sapien
tggcagcatttgggtccactgccca

SEQ ID NO: 1178385 - DNA, 25 bp, Homo sapien
tatgaggctgatgccaggtaagttt

SEQ ID NO: 1178386 - DNA, 25 bp, Homo sapien
aggctgatgccaggtaagtttttat

SEQ ID NO: 1178387 - DNA, 25 bp, Homo sapien
tgtaactggaaataaaggtaagtca

SEQ ID NO: 1178388 - DNA, 25 bp, Homo sapien
aggtaagtcatttaaaatgaatgag

SEQ ID NO: 1178389 - DNA, 25 bp, Homo sapien
tctcatctagtaggactaggctact

SEQ ID NO: 1178390 - DNA, 25 bp, Homo sapien
tcaacctcacatactacagaagcat

SEQ ID NO: 1178391 - DNA, 25 bp, Homo sapien
tgtggcatgactatacctacatcac

SEQ ID NO: 1178392 - DNA, 25 bp, Homo sapien
tcagatacagactcaaacggaaatg

SEQ ID NO: 1178393 - DNA, 25 bp, Homo sapien
gagtatctgtagcaagtgataatgc

SEQ ID NO: 1178394 - DNA, 25 bp, Homo sapien
tggccttggagtatctgtagcaagt

SEQ ID NO: 1178395 - DNA, 25 bp, Homo sapien
cttggagtatctgtagcaagtgata

SEQ ID NO: 1178396 - DNA, 25 bp, Homo sapien
ctgtagcaagtgataatgcatatcc

SEQ ID NO: 1178397 - DNA, 25 bp, Homo sapien
gagtgtgtgctaaactggtccagcc

SEQ ID NO: 1178398 - DNA, 25 bp, Homo sapien
aattgggcagcgcaggtctagacac

SEQ ID NO: 1178399 - DNA, 25 bp, Homo sapien
gaaacctcggcaagttctctggcct

SEQ ID NO: 1178400 - DNA, 25 bp, Homo sapien
ctctgcagtgagaaaggaaacctcg

SEQ ID NO: 1178401 - DNA, 25 bp, Homo sapien
agtttctctcttttccctcttgttg

SEQ ID NO: 1178402 - DNA, 25 bp, Homo sapien
ggagtgcaatggcacattggcggct

SEQ ID NO: 1178403 - DNA, 25 bp, Homo sapien
tggagtttctctcttttccctcttg

SEQ ID NO: 1178404 - DNA, 25 bp, Homo sapien
caatggcacattggcggctcactgc

SEQ ID NO: 1178405 - DNA, 25 bp, Homo sapien
gaattggccctgtttacagaggcag

SEQ ID NO: 1178406 - DNA, 25 bp, Homo sapien
tcactactgcgatagaggaaatcta

SEQ ID NO: 1178407 - DNA, 25 bp, Homo sapien
gaaacctattgacatggccacgctg

SEQ ID NO: 1178408 - DNA, 25 bp, Homo sapien
tgggtccttgaactacagcctgctg

SEQ ID NO: 1178409 - DNA, 25 bp, Homo sapien
tactttgccaccctcgtacagacaa

SEQ ID NO: 1178410 - DNA, 25 bp, Homo sapien
gcccaagtctcacttgaggacctga

SEQ ID NO: 1178411 - DNA, 25 bp, Homo sapien
gaggacctgatgtaattgcttctct

SEQ ID NO: 1178412 - DNA, 25 bp, Homo sapien
caaaggcgggtaactccaatgtgct

SEQ ID NO: 1178413 - DNA, 25 bp, Homo sapien
ggttctcacacagtgggattccctg

SEQ ID NO: 1178414 - DNA, 25 bp, Homo sapien
tgcttcagctgaaaccaggtacctt

SEQ ID NO: 1178415 - DNA, 25 bp, Homo sapien
agtaggctggtgcttcagctgaaac

SEQ ID NO: 1178416 - DNA, 25 bp, Homo sapien
ggattccctgggtggagtaggctgg

SEQ ID NO: 1178417 - DNA, 25 bp, Homo sapien
acacttgcaaagtgctacgcaaata

SEQ ID NO: 1178418 - DNA, 25 bp, Homo sapien
aagaaggaagtcctcttcccgcctg

SEQ ID NO: 1178419 - DNA, 25 bp, Homo sapien
ttgatcacgaagaaggaagtcctct

SEQ ID NO: 1178420 - DNA, 25 bp, Homo sapien
gctacgcaaatattgatcacgaaga

SEQ ID NO: 1178421 - DNA, 25 bp, Homo sapien
tgctccttgtggcatctttgtccct

SEQ ID NO: 1178422 - DNA, 25 bp, Homo sapien
gctccttgtggcatctttgtccctt

SEQ ID NO: 1178423 - DNA, 25 bp, Homo sapien
ctgctccttgtggcatctttgtccc

SEQ ID NO: 1178424 - DNA, 25 bp, Homo sapien
tcctttaggagacctggaggtggca

SEQ ID NO: 1178425 - DNA, 25 bp, Homo sapien
ctggatcacacagtatgggttccca

SEQ ID NO: 1178426 - DNA, 25 bp, Homo sapien
aggtggcagaaggggatccagttgc

SEQ ID NO: 1178427 - DNA, 25 bp, Homo sapien
cctggatcacacagtatgggttccc

SEQ ID NO: 1178428 - DNA, 25 bp, Homo sapien
tactgctaatggtgaaactaagcca

SEQ ID NO: 1178429 - DNA, 25 bp, Homo sapien
ctaagccaaagcaacaaattgacaa

SEQ ID NO: 1178430 - DNA, 25 bp, Homo sapien
caagaagagtactgctaatggtgaa

SEQ ID NO: 1178431 - DNA, 25 bp, Homo sapien
tctggaggttgtgtccaagaagagt

SEQ ID NO: 1178432 - DNA, 25 bp, Homo sapien
tgtgggcactcatatgtccagtgtt

SEQ ID NO: 1178433 - DNA, 25 bp, Homo sapien
actcagggtaaaaggctggccacag

SEQ ID NO: 1178434 - DNA, 25 bp, Homo sapien
tctgtccggatatcgaagggggact

SEQ ID NO: 1178435 - DNA, 25 bp, Homo sapien
ctggccacagtggtcctgactatgt

SEQ ID NO: 1178436 - DNA, 25 bp, Homo sapien
ctcagtgccaggccggtcatatcca

SEQ ID NO: 1178437 - DNA, 25 bp, Homo sapien
ctgtgtagctattcttgtgcaggtc

SEQ ID NO: 1178438 - DNA, 25 bp, Homo sapien
agtgccaggccggtcatatccatgg

SEQ ID NO: 1178439 - DNA, 25 bp, Homo sapien
agggcagagacagttgtactgtgta

SEQ ID NO: 1178440 - DNA, 25 bp, Homo sapien
gtagctgggtagctacatattttct

SEQ ID NO: 1178441 - DNA, 25 bp, Homo sapien
tagctgggtagctacatattttctg

SEQ ID NO: 1178442 - DNA, 25 bp, Homo sapien
gctgggtagctacatattttctgga

SEQ ID NO: 1178443 - DNA, 25 bp, Homo sapien
tatgatgtggagctcggcaactgtg

SEQ ID NO: 1178444 - DNA, 25 bp, Homo sapien
cagccataacgtatgatgtggagct

SEQ ID NO: 1178445 - DNA, 25 bp, Homo sapien
ggaatcacagccataacgtatgatg

SEQ ID NO: 1178446 - DNA, 25 bp, Homo sapien
atcacaggaatcacagccataacgt

SEQ ID NO: 1178447 - DNA, 25 bp, Homo sapien
ctcaattaggatgcccaggacagtc

SEQ ID NO: 1178448 - DNA, 25 bp, Homo sapien
ttaggatgcccaggacagtcaggcc

SEQ ID NO: 1178449 - DNA, 25 bp, Homo sapien
tcaattaggatgcccaggacagtca

SEQ ID NO: 1178450 - DNA, 25 bp, Homo sapien
aattaggatgcccaggacagtcagg

SEQ ID NO: 1178451 - DNA, 25 bp, Homo sapien
tccatatccaaggtatctaagaggg

SEQ ID NO: 1178452 - DNA, 25 bp, Homo sapien
gagtttatgcctcagtggtggctca

SEQ ID NO: 1178453 - DNA, 25 bp, Homo sapien
tcatgctgaggtgatgaccacgctc

SEQ ID NO: 1178454 - DNA, 25 bp, Homo sapien
gatgtccagaggagaagcgcctact

SEQ ID NO: 1178455 - DNA, 25 bp, Homo sapien
tcacgctgaatgctctcaaccatgc

SEQ ID NO: 1178456 - DNA, 25 bp, Homo sapien
catgcttgtgcacaactcttgccag

SEQ ID NO: 1178457 - DNA, 25 bp, Homo sapien
gttccctgtgaaaagcttgatgacc

SEQ ID NO: 1178458 - DNA, 25 bp, Homo sapien
taagcttcaatagcctcgtctggaa

SEQ ID NO: 1178459 - DNA, 25 bp, Homo sapien
gacaattccttaatataatgtgttg

SEQ ID NO: 1178460 - DNA, 25 bp, Homo sapien
tcaggaaccaagtaaggtactgaat

SEQ ID NO: 1178461 - DNA, 25 bp, Homo sapien
attatcagctcctagctaatttgtg

SEQ ID NO: 1178462 - DNA, 25 bp, Homo sapien
atcctccaccttcgacaattatcag

SEQ ID NO: 1178463 - DNA, 25 bp, Homo sapien
gattagagtgaaaatggcagccagc

SEQ ID NO: 1178464 - DNA, 25 bp, Homo sapien
tataagttttagcatgggccaggaa

SEQ ID NO: 1178465 - DNA, 25 bp, Homo sapien
caaggcactgtgtatgccctgcaag

SEQ ID NO: 1178466 - DNA, 25 bp, Homo sapien
tattttctgtgggaccgactctcaa

SEQ ID NO: 1178467 - DNA, 25 bp, Homo sapien
caattctcgcgagattcggcctgac

SEQ ID NO: 1178468 - DNA, 25 bp, Homo sapien
taaaacccttatcagagcgtatgca

SEQ ID NO: 1178469 - DNA, 25 bp, Homo sapien
tattacgaccacagaagttgggctg

SEQ ID NO: 1178470 - DNA, 25 bp, Homo sapien
cagtcgttcagtacctttgcggaag

SEQ ID NO: 1178471 - DNA, 25 bp, Homo sapien
tctcgccagtctaggcatctgggtt

SEQ ID NO: 1178472 - DNA, 25 bp, Homo sapien
gaattttcaggcatccgtgctttga

SEQ ID NO: 1178473 - DNA, 25 bp, Homo sapien
catctcagaaactgggtgctcattc

SEQ ID NO: 1178474 - DNA, 25 bp, Homo sapien
aaccgtgtcacgcagcactgtggta

SEQ ID NO: 1178475 - DNA, 25 bp, Homo sapien
agaccttatgatcttctcagtgccc

SEQ ID NO: 1178476 - DNA, 25 bp, Homo sapien
catctagtcctgctagcccagtagg

SEQ ID NO: 1178477 - DNA, 25 bp, Homo sapien
gcacagactcgagggaaaacatttg

SEQ ID NO: 1178478 - DNA, 25 bp, Homo sapien
actactgcctaaatgagaagaatgg

SEQ ID NO: 1178479 - DNA, 25 bp, Homo sapien
taaaattcaaccatgaggctgggtg

SEQ ID NO: 1178480 - DNA, 25 bp, Homo sapien
tatcaggaggagatgtacggctctc

SEQ ID NO: 1178481 - DNA, 25 bp, Homo sapien
tgtcctagacgatgttccaaaagct

SEQ ID NO: 1178482 - DNA, 25 bp, Homo sapien
cagtcccactggtttgagaggtcaa

SEQ ID NO: 1178483 - DNA, 25 bp, Homo sapien
ttaaaaagagtgctcacatgaacac

SEQ ID NO: 1178484 - DNA, 25 bp, Homo sapien
gcatgacctgatactcgttaaaaag

SEQ ID NO: 1178485 - DNA, 25 bp, Homo sapien
cagcttggacaagatagttgatatg

SEQ ID NO: 1178486 - DNA, 25 bp, Homo sapien
taatttgtctattcccttgcctgtt

SEQ ID NO: 1178487 - DNA, 25 bp, Homo sapien
aaatgccttttgctatttttgattt

SEQ ID NO: 1178488 - DNA, 25 bp, Homo sapien
gaaatgccttttgctatttttgatt

SEQ ID NO: 1178489 - DNA, 25 bp, Homo sapien
ttctggggtgaatgcctgtgtggac

SEQ ID NO: 1178490 - DNA, 25 bp, Homo sapien
ctttctggggtgaatgcctgtgtgg

SEQ ID NO: 1178491 - DNA, 25 bp, Homo sapien
gccacctttctggggtgaatgcctg

SEQ ID NO: 1178492 - DNA, 25 bp, Homo sapien
acctttctggggtgaatgcctgtgt

SEQ ID NO: 1178493 - DNA, 25 bp, Homo sapien
atttttgcatcttctcaattgtttc

SEQ ID NO: 1178494 - DNA, 25 bp, Homo sapien
tttttgcatcttctcaattgtttct

SEQ ID NO: 1178495 - DNA, 25 bp, Homo sapien
ttatttttgcatcttctcaattgtt

SEQ ID NO: 1178496 - DNA, 25 bp, Homo sapien
tttgcatcttctcaattgtttcttc

SEQ ID NO: 1178497 - DNA, 25 bp, Homo sapien
tgttgtttgtttcaagttttaatca

SEQ ID NO: 1178498 - DNA, 25 bp, Homo sapien
agttttaatcaaagcttgtacataa

SEQ ID NO: 1178499 - DNA, 25 bp, Homo sapien
caagttttaatcaaagcttgtacat

SEQ ID NO: 1178500 - DNA, 25 bp, Homo sapien
ttcaagttttaatcaaagcttgtac

SEQ ID NO: 1178501 - DNA, 25 bp, Homo sapien
gagccgctcggagcccggtgacggg

SEQ ID NO: 1178502 - DNA, 25 bp, Homo sapien
atgctgctgctccaatccgggcggg

SEQ ID NO: 1178503 - DNA, 25 bp, Homo sapien
ccgcagcggctggtccggtttacat

SEQ ID NO: 1178504 - DNA, 25 bp, Homo sapien
tgggtttcccgaaggagccaagagc

SEQ ID NO: 1178505 - DNA, 25 bp, Homo sapien
ttcgcgccgcccctcctcccgctgc

SEQ ID NO: 1178506 - DNA, 25 bp, Homo sapien
gttcgcgccgcccctcctcccgctg

SEQ ID NO: 1178507 - DNA, 25 bp, Homo sapien
ggctcgccgccgttgggctgctggt

SEQ ID NO: 1178508 - DNA, 25 bp, Homo sapien
ccccgctgacgcctataaggaaggg

SEQ ID NO: 1178509 - DNA, 25 bp, Homo sapien
ctgcagggtctgctcgctgtccccg

SEQ ID NO: 1178510 - DNA, 25 bp, Homo sapien
aggaagggctcgccgccgttgggct

SEQ ID NO: 1178511 - DNA, 25 bp, Homo sapien
acaactttctcattgaagccgacca

SEQ ID NO: 1178512 - DNA, 25 bp, Homo sapien
aactttctcattgaagccgaccacg

SEQ ID NO: 1178513 - DNA, 25 bp, Homo sapien
cattgaagccgaccacgtttcctct

SEQ ID NO: 1178514 - DNA, 25 bp, Homo sapien
tttctcattgaagccgaccacgttt

SEQ ID NO: 1178515 - DNA, 25 bp, Homo sapien
tccgtggatccaagacgcgtacgtc

SEQ ID NO: 1178516 - DNA, 25 bp, Homo sapien
cttgccttgcggataaaacaaagga

SEQ ID NO: 1178517 - DNA, 25 bp, Homo sapien
gaaacaggctcctaagagggtcaga

SEQ ID NO: 1178518 - DNA, 25 bp, Homo sapien
gagggtcagacacccatacgatgac

SEQ ID NO: 1178519 - DNA, 25 bp, Homo sapien
gtagccacatcttaaaggctgttag

SEQ ID NO: 1178520 - DNA, 25 bp, Homo sapien
tcttaaaggctgttaggggagcaaa

SEQ ID NO: 1178521 - DNA, 25 bp, Homo sapien
agccacatcttaaaggctgttaggg

SEQ ID NO: 1178522 - DNA, 25 bp, Homo sapien
taaaggctgttaggggagcaaagaa

SEQ ID NO: 1178523 - DNA, 25 bp, Homo sapien
acttcatcaataaagaagtccagca

SEQ ID NO: 1178524 - DNA, 25 bp, Homo sapien
cgggagctacggacgagatcaactt

SEQ ID NO: 1178525 - DNA, 25 bp, Homo sapien
ccagcagcgccagccgccgtgtctg

SEQ ID NO: 1178526 - DNA, 25 bp, Homo sapien
cggacgagatcaacttcatcaataa

SEQ ID NO: 1178527 - DNA, 25 bp, Homo sapien
ggatactcaaggctagttacagaac

SEQ ID NO: 1178528 - DNA, 25 bp, Homo sapien
tactttgtgtgaccagtggtaacaa

SEQ ID NO: 1178529 - DNA, 25 bp, Homo sapien
ttcaagaagtactttgtgtgaccag

SEQ ID NO: 1178530 - DNA, 25 bp, Homo sapien
gtggtaacaattacaggatactcaa

SEQ ID NO: 1178531 - DNA, 25 bp, Homo sapien
ctgctgttccaagccctccgatttt

SEQ ID NO: 1178532 - DNA, 25 bp, Homo sapien
actgctgttccaagccctccgattt

SEQ ID NO: 1178533 - DNA, 25 bp, Homo sapien
acacactgctgttccaagccctccg

SEQ ID NO: 1178534 - DNA, 25 bp, Homo sapien
acactgctgttccaagccctccgat

SEQ ID NO: 1178535 - DNA, 25 bp, Homo sapien
cccagggcagtagtgacagacccac

SEQ ID NO: 1178536 - DNA, 25 bp, Homo sapien
ctaatgtaggcaaggctcccaaggg

SEQ ID NO: 1178537 - DNA, 25 bp, Homo sapien
tgtcagcaaatcgagctaatgtagg

SEQ ID NO: 1178538 - DNA, 25 bp, Homo sapien
caaatcgagctaatgtaggcaaggc

SEQ ID NO: 1178539 - DNA, 25 bp, Homo sapien
tgtcatcagagtgcttggctggtga

SEQ ID NO: 1178540 - DNA, 25 bp, Homo sapien
tctgtcatcagagtgcttggctggt

SEQ ID NO: 1178541 - DNA, 25 bp, Homo sapien
ctctgtcatcagagtgcttggctgg

SEQ ID NO: 1178542 - DNA, 25 bp, Homo sapien
catcagagtgcttggctggtgatcg

SEQ ID NO: 1178543 - DNA, 25 bp, Homo sapien
gcaagcatgcgaggaaaaggaattc

SEQ ID NO: 1178544 - DNA, 25 bp, Homo sapien
ggaatgtgaacttgtatagccactg

SEQ ID NO: 1178545 - DNA, 25 bp, Homo sapien
ccagcaataccatttgtggggatgt

SEQ ID NO: 1178546 - DNA, 25 bp, Homo sapien
tgtagaaaacagtataggaactcct

SEQ ID NO: 1178547 - DNA, 25 bp, Homo sapien
ccttccacgtcacttgaaatggttc

SEQ ID NO: 1178548 - DNA, 25 bp, Homo sapien
cacttgaaatggttcctacagattt

SEQ ID NO: 1178549 - DNA, 25 bp, Homo sapien
cgtcacttgaaatggttcctacaga

SEQ ID NO: 1178550 - DNA, 25 bp, Homo sapien
tccacgtcacttgaaatggttccta

SEQ ID NO: 1178551 - DNA, 25 bp, Homo sapien
cagcagcaagtctggagtacaaccc

SEQ ID NO: 1178552 - DNA, 25 bp, Homo sapien
tgcacacatgctaagggatcaggcc

SEQ ID NO: 1178553 - DNA, 25 bp, Homo sapien
tgggtacaataagcaaacgcacacg

SEQ ID NO: 1178554 - DNA, 25 bp, Homo sapien
gagcgttacaaaagacctgcagctg

SEQ ID NO: 1178555 - DNA, 25 bp, Homo sapien
accacaagagggcaccaatccagca

SEQ ID NO: 1178556 - DNA, 25 bp, Homo sapien
cacaagagggcaccaatccagcagc

SEQ ID NO: 1178557 - DNA, 25 bp, Homo sapien
aagagggcaccaatccagcagctcc

SEQ ID NO: 1178558 - DNA, 25 bp, Homo sapien
acaagagggcaccaatccagcagct

SEQ ID NO: 1178559 - DNA, 25 bp, Homo sapien
tgttatcttctcaacttcatgtctt

SEQ ID NO: 1178560 - DNA, 25 bp, Homo sapien
cttctcaacttcatgtcttccttac

SEQ ID NO: 1178561 - DNA, 25 bp, Homo sapien
tatcttctcaacttcatgtcttcct

SEQ ID NO: 1178562 - DNA, 25 bp, Homo sapien
tctgttatcttctcaacttcatgtc

SEQ ID NO: 1178563 - DNA, 25 bp, Homo sapien
tgtaacactccgaatgagctgcttc

SEQ ID NO: 1178564 - DNA, 25 bp, Homo sapien
gtctgttgtaacactccgaatgagc

SEQ ID NO: 1178565 - DNA, 25 bp, Homo sapien
tgttgtaacactccgaatgagctgc

SEQ ID NO: 1178566 - DNA, 25 bp, Homo sapien
tctgttgtaacactccgaatgagct

SEQ ID NO: 1178567 - DNA, 25 bp, Homo sapien
cactgataaaggtagggctacctga

SEQ ID NO: 1178568 - DNA, 25 bp, Homo sapien
ggtagggctacctgatcctgtctgc

SEQ ID NO: 1178569 - DNA, 25 bp, Homo sapien
taaaggtagggctacctgatcctgt

SEQ ID NO: 1178570 - DNA, 25 bp, Homo sapien
ctacctgatcctgtctgcttgtgcc

SEQ ID NO: 1178571 - DNA, 25 bp, Homo sapien
gaaggaagaatccaaaggcagctat

SEQ ID NO: 1178572 - DNA, 25 bp, Homo sapien
gaagaatccaaaggcagctatcgtg

SEQ ID NO: 1178573 - DNA, 25 bp, Homo sapien
ctggaaggaagaatccaaaggcagc

SEQ ID NO: 1178574 - DNA, 25 bp, Homo sapien
gaatccaaaggcagctatcgtgcat

SEQ ID NO: 1178575 - DNA, 25 bp, Homo sapien
gcacgtgtggtacagaggaagtccc

SEQ ID NO: 1178576 - DNA, 25 bp, Homo sapien
gtcccgagagtaaccaagctgatgc

SEQ ID NO: 1178577 - DNA, 25 bp, Homo sapien
acgtgtggtacagaggaagtcccga

SEQ ID NO: 1178578 - DNA, 25 bp, Homo sapien
tacagaggaagtcccgagagtaacc

SEQ ID NO: 1178579 - DNA, 25 bp, Homo sapien
tctgctccgaggtaaggacacggta

SEQ ID NO: 1178580 - DNA, 25 bp, Homo sapien
ggacacggtagaagctatcctggct

SEQ ID NO: 1178581 - DNA, 25 bp, Homo sapien
gctgcacgatcttagcacacacgga

SEQ ID NO: 1178582 - DNA, 25 bp, Homo sapien
tgcttctggcgatagtccacctcat

SEQ ID NO: 1178583 - DNA, 25 bp, Homo sapien
gacaaagtcatacacggggatctgg

SEQ ID NO: 1178584 - DNA, 25 bp, Homo sapien
atacacggggatctggactgttttc

SEQ ID NO: 1178585 - DNA, 25 bp, Homo sapien
gaatgggagacaaagtcatacacgg

SEQ ID NO: 1178586 - DNA, 25 bp, Homo sapien
caaagtcatacacggggatctggac

SEQ ID NO: 1178587 - DNA, 25 bp, Homo sapien
tgcaggcccttgccttagccatcat

SEQ ID NO: 1178588 - DNA, 25 bp, Homo sapien
ctgcaggcccttgccttagccatca

SEQ ID NO: 1178589 - DNA, 25 bp, Homo sapien
actactagcccagaatgtgcaagga

SEQ ID NO: 1178590 - DNA, 25 bp, Homo sapien
catttcccaagtccaaacgcaggtc

SEQ ID NO: 1178591 - DNA, 25 bp, Homo sapien
taacatgcagccagggtagagaagc

SEQ ID NO: 1178592 - DNA, 25 bp, Homo sapien
gaaatagtgagccactctctaggca

SEQ ID NO: 1178593 - DNA, 25 bp, Homo sapien
gaatcccgacgtctgtctggtctgg

SEQ ID NO: 1178594 - DNA, 25 bp, Homo sapien
tacagaatcccgacgtctgtctggt

SEQ ID NO: 1178595 - DNA, 25 bp, Homo sapien
tttgtgaggaagtacagaatcccga

SEQ ID NO: 1178596 - DNA, 25 bp, Homo sapien
tgaggaagtacagaatcccgacgtc

SEQ ID NO: 1178597 - DNA, 25 bp, Homo sapien
catggcctggcatttatggaaccta

SEQ ID NO: 1178598 - DNA, 25 bp, Homo sapien
ctgaaggcgtctccaggaatgctct

SEQ ID NO: 1178599 - DNA, 25 bp, Homo sapien
cagagcagataatgggccaagccag

SEQ ID NO: 1178600 - DNA, 25 bp, Homo sapien
tgaaacagaaatacacggcagacat

SEQ ID NO: 1178601 - DNA, 25 bp, Homo sapien
tggaacaggtctcgtacctcctggg

SEQ ID NO: 1178602 - DNA, 25 bp, Homo sapien
caggatcccttcaaagagcaccacg

SEQ ID NO: 1178603 - DNA, 25 bp, Homo sapien
tctgcgggatagacagtaactgtct

SEQ ID NO: 1178604 - DNA, 25 bp, Homo sapien
caggtctcgtacctcctgggagtag

SEQ ID NO: 1178605 - DNA, 25 bp, Homo sapien
agagccgggtgtccgcatctgtatc

SEQ ID NO: 1178606 - DNA, 25 bp, Homo sapien
tgagagccgggtgtccgcatctgta

SEQ ID NO: 1178607 - DNA, 25 bp, Homo sapien
ccgggtgtccgcatctgtatccaca

SEQ ID NO: 1178608 - DNA, 25 bp, Homo sapien
ctctgcgtgagagccgggtgtccgc

SEQ ID NO: 1178609 - DNA, 25 bp, Homo sapien
gcaggcccacacttagtagggcctg

SEQ ID NO: 1178610 - DNA, 25 bp, Homo sapien
aagagtgataatgcctccataaagc

SEQ ID NO: 1178611 - DNA, 25 bp, Homo sapien
gcccacacttagtagggcctgcgga

SEQ ID NO: 1178612 - DNA, 25 bp, Homo sapien
ctcctgagctgactggaaagagtga

SEQ ID NO: 1178613 - DNA, 25 bp, Homo sapien
tcagttcacaggctgggctcctcta

SEQ ID NO: 1178614 - DNA, 25 bp, Homo sapien
cagttcacaggctgggctcctctac

SEQ ID NO: 1178615 - DNA, 25 bp, Homo sapien
gatctgtttcatgaaccgaaaagag

SEQ ID NO: 1178616 - DNA, 25 bp, Homo sapien
caggacttgtttctgtaggttctac

SEQ ID NO: 1178617 - DNA, 25 bp, Homo sapien
cttacaattacggtgctaaatggga

SEQ ID NO: 1178618 - DNA, 25 bp, Homo sapien
attacccagactttgaagtcagagg

SEQ ID NO: 1178619 - DNA, 25 bp, Homo sapien
aaattcagaaaacgaacagcaccga

SEQ ID NO: 1178620 - DNA, 25 bp, Homo sapien
ttcagaaaacgaacagcaccgaccc

SEQ ID NO: 1178621 - DNA, 25 bp, Homo sapien
aattcagaaaacgaacagcaccgac

SEQ ID NO: 1178622 - DNA, 25 bp, Homo sapien
cagaaaacgaacagcaccgacccct

SEQ ID NO: 1178623 - DNA, 25 bp, Homo sapien
tgaccggagcagatccccttggagg

SEQ ID NO: 1178624 - DNA, 25 bp, Homo sapien
acatgaccggagcagatccccttgg

SEQ ID NO: 1178625 - DNA, 25 bp, Homo sapien
ggacatgaccggagcagatcccctt

SEQ ID NO: 1178626 - DNA, 25 bp, Homo sapien
atgaccggagcagatccccttggag

SEQ ID NO: 1178627 - DNA, 25 bp, Homo sapien
acttggttctaatctcctgtgctgg

SEQ ID NO: 1178628 - DNA, 25 bp, Homo sapien
cactgctggactagtgatggcatca

SEQ ID NO: 1178629 - DNA, 25 bp, Homo sapien
tgcatccctgagactgagtaccact

SEQ ID NO: 1178630 - DNA, 25 bp, Homo sapien
tggttcctgcactccctgctgcgag

SEQ ID NO: 1178631 - DNA, 25 bp, Homo sapien
tcacataagaatcccatgcaagaaa

SEQ ID NO: 1178632 - DNA, 25 bp, Homo sapien
accacaccgtgatgatctgtttgaa

SEQ ID NO: 1178633 - DNA, 25 bp, Homo sapien
gaattagacactaggatgcacttta

SEQ ID NO: 1178634 - DNA, 25 bp, Homo sapien
aatgttctgttgaaaccacaccgtg

SEQ ID NO: 1178635 - DNA, 25 bp, Homo sapien
ccgagaagatcaagggtttccatca

SEQ ID NO: 1178636 - DNA, 25 bp, Homo sapien
tctcccacatgagggtcaactcaga

SEQ ID NO: 1178637 - DNA, 25 bp, Homo sapien
gaggctagaaaccaatcccgagaag

SEQ ID NO: 1178638 - DNA, 25 bp, Homo sapien
ccagtgcagccctaattctatgaga

SEQ ID NO: 1178639 - DNA, 25 bp, Homo sapien
gagactcgctaagaaggagccctaa

SEQ ID NO: 1178640 - DNA, 25 bp, Homo sapien
cattctgccgctgtacatgagcctt

SEQ ID NO: 1178641 - DNA, 25 bp, Homo sapien
cagtgaagctgctctgtagcccaaa

SEQ ID NO: 1178642 - DNA, 25 bp, Homo sapien
caaacacacccgtgcttgggcagct

SEQ ID NO: 1178643 - DNA, 25 bp, Homo sapien
ctgcgttcagaagtccagcgaccca

SEQ ID NO: 1178644 - DNA, 25 bp, Homo sapien
gttcagaagtccagcgacccactga

SEQ ID NO: 1178645 - DNA, 25 bp, Homo sapien
gtccagcgacccactgatcaggcat

SEQ ID NO: 1178646 - DNA, 25 bp, Homo sapien
gacccactgatcaggcatcagctca

SEQ ID NO: 1178647 - DNA, 25 bp, Homo sapien
tcagcagcggcttcggaaaagacaa

SEQ ID NO: 1178648 - DNA, 25 bp, Homo sapien
aatcctgagaggcttgaccaagagc

SEQ ID NO: 1178649 - DNA, 25 bp, Homo sapien
tcttacaatggtcaaacttggcaat

SEQ ID NO: 1178650 - DNA, 25 bp, Homo sapien
tcaaaaaacggtgtaggagccagca

SEQ ID NO: 1178651 - DNA, 25 bp, Homo sapien
gcttgacgaacgtaatgtactgaga

SEQ ID NO: 1178652 - DNA, 25 bp, Homo sapien
taaaatctgctcaagatccctgcct

SEQ ID NO: 1178653 - DNA, 25 bp, Homo sapien
tgtactgagataaaatctgctcaag

SEQ ID NO: 1178654 - DNA, 25 bp, Homo sapien
ctcaaaggcaggcttgacgaacgta

SEQ ID NO: 1178655 - DNA, 25 bp, Homo sapien
caggttaagtcccaagctcttcctt

SEQ ID NO: 1178656 - DNA, 25 bp, Homo sapien
tctcaaccaagaccaggttaagtcc

SEQ ID NO: 1178657 - DNA, 25 bp, Homo sapien
agccttcccagtgtatctcaaccaa

SEQ ID NO: 1178658 - DNA, 25 bp, Homo sapien
cagtgtatctcaaccaagaccaggt

SEQ ID NO: 1178659 - DNA, 25 bp, Homo sapien
ttatctgcacctctagggatgatca

SEQ ID NO: 1178660 - DNA, 25 bp, Homo sapien
tatctgcacctctagggatgatcac

SEQ ID NO: 1178661 - DNA, 25 bp, Homo sapien
agattatctgcacctctagggatga

SEQ ID NO: 1178662 - DNA, 25 bp, Homo sapien
gattatctgcacctctagggatgat

SEQ ID NO: 1178663 - DNA, 25 bp, Homo sapien
ggactccgatgcctgcctcttgcgt

SEQ ID NO: 1178664 - DNA, 25 bp, Homo sapien
cgatgcctgcctcttgcgtgaaggg

SEQ ID NO: 1178665 - DNA, 25 bp, Homo sapien
gtctgccgtttggagggccctccat

SEQ ID NO: 1178666 - DNA, 25 bp, Homo sapien
ttgagacagccattggtctgccgtt

SEQ ID NO: 1178667 - DNA, 25 bp, Homo sapien
gagtcagatcagttacgcccctggg

SEQ ID NO: 1178668 - DNA, 25 bp, Homo sapien
gacgctgctagtgagaatccctgac

SEQ ID NO: 1178669 - DNA, 25 bp, Homo sapien
taacaggcacataggagattccagg

SEQ ID NO: 1178670 - DNA, 25 bp, Homo sapien
tatgtacagatgagcagtgcctcct

SEQ ID NO: 1178671 - DNA, 25 bp, Homo sapien
gtggtcactttgtaaccactaacaa

SEQ ID NO: 1178672 - DNA, 25 bp, Homo sapien
gcaaagtacataatatgtggtcact

SEQ ID NO: 1178673 - DNA, 25 bp, Homo sapien
cactttgtaaccactaacaataaag

SEQ ID NO: 1178674 - DNA, 25 bp, Homo sapien
gagcaagcatcttaaaaggggggaa

SEQ ID NO: 1178675 - DNA, 25 bp, Homo sapien
agtaataggtggatggctgtctgca

SEQ ID NO: 1178676 - DNA, 25 bp, Homo sapien
gccaggatctgtagtaggcacagta

SEQ ID NO: 1178677 - DNA, 25 bp, Homo sapien
gtatcacaaagagaacacacccagt

SEQ ID NO: 1178678 - DNA, 25 bp, Homo sapien
gcaaatcctaagtgtacatctcgag

SEQ ID NO: 1178679 - DNA, 25 bp, Homo sapien
ttcacctacatcctcaacactagta

SEQ ID NO: 1178680 - DNA, 25 bp, Homo sapien
tcacctacatcctcaacactagtaa

SEQ ID NO: 1178681 - DNA, 25 bp, Homo sapien
tttcacctacatcctcaacactagt

SEQ ID NO: 1178682 - DNA, 25 bp, Homo sapien
gtctctgctagacgtaaactccttg

SEQ ID NO: 1178683 - DNA, 25 bp, Homo sapien
tatgatagccctttaagcatcccag

SEQ ID NO: 1178684 - DNA, 25 bp, Homo sapien
taccatgtgccagccatatccagac

SEQ ID NO: 1178685 - DNA, 25 bp, Homo sapien
tatccagaccatctaacaagcagac

SEQ ID NO: 1178686 - DNA, 25 bp, Homo sapien
ccctgccatcttccctctcatccat

SEQ ID NO: 1178687 - DNA, 25 bp, Homo sapien
cctttcatcccttccctgccatctt

SEQ ID NO: 1178688 - DNA, 25 bp, Homo sapien
ccttccctgccatcttccctctcat

SEQ ID NO: 1178689 - DNA, 25 bp, Homo sapien
tcatcccttccctgccatcttccct

SEQ ID NO: 1178690 - DNA, 25 bp, Homo sapien
aagtcctacagttgcttcccctgag

SEQ ID NO: 1178691 - DNA, 25 bp, Homo sapien
aagtaggtgtctgacttcccacggg

SEQ ID NO: 1178692 - DNA, 25 bp, Homo sapien
gccccatgaagtaggtgtctgactt

SEQ ID NO: 1178693 - DNA, 25 bp, Homo sapien
ctcacatctatactggaagcttttc

SEQ ID NO: 1178694 - DNA, 25 bp, Homo sapien
gggtagccaacaggtattcctagga

SEQ ID NO: 1178695 - DNA, 25 bp, Homo sapien
tcaggaacagggtagccaacaggta

SEQ ID NO: 1178696 - DNA, 25 bp, Homo sapien
ggtcttcaggaacagggtagccaac

SEQ ID NO: 1178697 - DNA, 25 bp, Homo sapien
gtattcctaggaccacgtcggccat

SEQ ID NO: 1178698 - DNA, 25 bp, Homo sapien
atctttagtaagatgctggttctta

SEQ ID NO: 1178699 - DNA, 25 bp, Homo sapien
gccatctttagtaagatgctggttc

SEQ ID NO: 1178700 - DNA, 25 bp, Homo sapien
tgccatctttagtaagatgctggtt

SEQ ID NO: 1178701 - DNA, 25 bp, Homo sapien
gatgctggttcttaccaaccaccat

SEQ ID NO: 1178702 - DNA, 25 bp, Homo sapien
cagattaaagaagtagccatcatta

SEQ ID NO: 1178703 - DNA, 25 bp, Homo sapien
gccatcattagtcttgacatcgaca

SEQ ID NO: 1178704 - DNA, 25 bp, Homo sapien
agtagccatcattagtcttgacatc

SEQ ID NO: 1178705 - DNA, 25 bp, Homo sapien
acagaacagattaaagaagtagcca

SEQ ID NO: 1178706 - DNA, 25 bp, Homo sapien
tgttgaacataagtggttttccata

SEQ ID NO: 1178707 - DNA, 25 bp, Homo sapien
cctgttggtgttgaacataagtggt

SEQ ID NO: 1178708 - DNA, 25 bp, Homo sapien
cttcttctggatttatcggacctgt

SEQ ID NO: 1178709 - DNA, 25 bp, Homo sapien
ttctggatttatcggacctgttggt

SEQ ID NO: 1178710 - DNA, 25 bp, Homo sapien
attgaatcaatttattgaccacttc

SEQ ID NO: 1178711 - DNA, 25 bp, Homo sapien
acttctttcatgttatttgtctgca

SEQ ID NO: 1178712 - DNA, 25 bp, Homo sapien
cacttctttcatgttatttgtctgc

SEQ ID NO: 1178713 - DNA, 25 bp, Homo sapien
aatttattgaccacttctttcatgt

SEQ ID NO: 1178714 - DNA, 25 bp, Homo sapien
ttccccatgaaactccatgagtctt

SEQ ID NO: 1178715 - DNA, 25 bp, Homo sapien
tcaaactcaggcttcttgagcaatt

SEQ ID NO: 1178716 - DNA, 25 bp, Homo sapien
gagtcttctcaattcaaactcaggc

SEQ ID NO: 1178717 - DNA, 25 bp, Homo sapien
tgagcaattttactcccctaacaaa

SEQ ID NO: 1178718 - DNA, 25 bp, Homo sapien
tttgccacgtccaccctcaaaatcc

SEQ ID NO: 1178719 - DNA, 25 bp, Homo sapien
cacttttgccacgtccaccctcaaa

SEQ ID NO: 1178720 - DNA, 25 bp, Homo sapien
cccacttttgccacgtccaccctca

SEQ ID NO: 1178721 - DNA, 25 bp, Homo sapien
cagcccccacttttgccacgtccac

SEQ ID NO: 1178722 - DNA, 25 bp, Homo sapien
catcaacagttggagtgcaggttct

SEQ ID NO: 1178723 - DNA, 25 bp, Homo sapien
tctataaacctctgagaagcattgg

SEQ ID NO: 1178724 - DNA, 25 bp, Homo sapien
ctttttggttctataaacctctgag

SEQ ID NO: 1178725 - DNA, 25 bp, Homo sapien
gaaggacacttcatcggtatcatca

SEQ ID NO: 1178726 - DNA, 25 bp, Homo sapien
caagccaatcctgggaatataaatg

SEQ ID NO: 1178727 - DNA, 25 bp, Homo sapien
ggaaaacaggcaagatacttggaag

SEQ ID NO: 1178728 - DNA, 25 bp, Homo sapien
gggaaaacaggcaagatacttggaa

SEQ ID NO: 1178729 - DNA, 25 bp, Homo sapien
tggggcacataagggaaaacaggca

SEQ ID NO: 1178730 - DNA, 25 bp, Homo sapien
agggaaaacaggcaagatacttgga

SEQ ID NO: 1178731 - DNA, 25 bp, Homo sapien
cctgactggcactctggagctcttt

SEQ ID NO: 1178732 - DNA, 25 bp, Homo sapien
acgtctctttctagcaggccctggg

SEQ ID NO: 1178733 - DNA, 25 bp, Homo sapien
ctctaacgtagaaggaagaagcacg

SEQ ID NO: 1178734 - DNA, 25 bp, Homo sapien
caaggtactcctgattgtcatgagt

SEQ ID NO: 1178735 - DNA, 25 bp, Homo sapien
tagcgtagttggtaaggcttctcag

SEQ ID NO: 1178736 - DNA, 25 bp, Homo sapien
ttagcgtagttggtaaggcttctca

SEQ ID NO: 1178737 - DNA, 25 bp, Homo sapien
agcgtagttggtaaggcttctcaga

SEQ ID NO: 1178738 - DNA, 25 bp, Homo sapien
cgtagttggtaaggcttctcagatg

SEQ ID NO: 1178739 - DNA, 25 bp, Homo sapien
tggcccaggaacagtgcctacaaac

SEQ ID NO: 1178740 - DNA, 25 bp, Homo sapien
ctggcccaggaacagtgcctacaaa

SEQ ID NO: 1178741 - DNA, 25 bp, Homo sapien
cctggcccaggaacagtgcctacaa

SEQ ID NO: 1178742 - DNA, 25 bp, Homo sapien
tgtactaaccacacctgactgctta

SEQ ID NO: 1178743 - DNA, 25 bp, Homo sapien
ctaaccacacctgactgcttagctt

SEQ ID NO: 1178744 - DNA, 25 bp, Homo sapien
aaccacacctgactgcttagcttct

SEQ ID NO: 1178745 - DNA, 25 bp, Homo sapien
tactaaccacacctgactgcttagc

SEQ ID NO: 1178746 - DNA, 25 bp, Homo sapien
tcagccccacttctattggaaagcg

SEQ ID NO: 1178747 - DNA, 25 bp, Homo sapien
ttgaaaagctccccatagccctcag

SEQ ID NO: 1178748 - DNA, 25 bp, Homo sapien
ttctattggaaagcgtctctctggc

SEQ ID NO: 1178749 - DNA, 25 bp, Homo sapien
aggaaccaggcccatgcattttgaa

SEQ ID NO: 1178750 - DNA, 25 bp, Homo sapien
tcatagctaaagatcactggagtga

SEQ ID NO: 1178751 - DNA, 25 bp, Homo sapien
cattttcatagctaaagatcactgg

SEQ ID NO: 1178752 - DNA, 25 bp, Homo sapien
tacattttcatagctaaagatcact

SEQ ID NO: 1178753 - DNA, 25 bp, Homo sapien
ttttcatagctaaagatcactggag

SEQ ID NO: 1178754 - DNA, 25 bp, Homo sapien
gttccagcttctaatgaacttttcc

SEQ ID NO: 1178755 - DNA, 25 bp, Homo sapien
tctaatgaacttttccacgtcctcc

SEQ ID NO: 1178756 - DNA, 25 bp, Homo sapien
gttccttgccttgcagaaagttcca

SEQ ID NO: 1178757 - DNA, 25 bp, Homo sapien
cttgccttgcagaaagttccagctt

SEQ ID NO: 1178758 - DNA, 25 bp, Homo sapien
agcacatgctcaactctggagcaag

SEQ ID NO: 1178759 - DNA, 25 bp, Homo sapien
cagcacatgctcaactctggagcaa

SEQ ID NO: 1178760 - DNA, 25 bp, Homo sapien
tccttggaattgtgctgtgtttcgt

SEQ ID NO: 1178761 - DNA, 25 bp, Homo sapien
tggaattgtgctgtgtttcgttgtc

SEQ ID NO: 1178762 - DNA, 25 bp, Homo sapien
ttcctccttggaattgtgctgtgtt

SEQ ID NO: 1178763 - DNA, 25 bp, Homo sapien
cttggaattgtgctgtgtttcgttg

SEQ ID NO: 1178764 - DNA, 25 bp, Homo sapien
cctgctcccctacaccatgtatttc

SEQ ID NO: 1178765 - DNA, 25 bp, Homo sapien
tcgagtgttacccttcccaggtgac

SEQ ID NO: 1178766 - DNA, 25 bp, Homo sapien
cagtcagtgggtgctaaagagtcga

SEQ ID NO: 1178767 - DNA, 25 bp, Homo sapien
tatcaggagggcattttagagcccc

SEQ ID NO: 1178768 - DNA, 25 bp, Homo sapien
taatgccttaatcagaaagagtggc

SEQ ID NO: 1178769 - DNA, 25 bp, Homo sapien
atgtaagtcttataacccaagcctt

SEQ ID NO: 1178770 - DNA, 25 bp, Homo sapien
aaagggcactttggcgacatttctg

SEQ ID NO: 1178771 - DNA, 25 bp, Homo sapien
agtcttataacccaagccttggcca

SEQ ID NO: 1178772 - DNA, 25 bp, Homo sapien
agggcactttggcgacatttctgtc

SEQ ID NO: 1178773 - DNA, 25 bp, Homo sapien
caccctcaaagtttttaggcttgtg

SEQ ID NO: 1178774 - DNA, 25 bp, Homo sapien
taggcttgtgagagcacatttgatg

SEQ ID NO: 1178775 - DNA, 25 bp, Homo sapien
tgtgagagcacatttgatggagagc

SEQ ID NO: 1178776 - DNA, 25 bp, Homo sapien
tttttaggcttgtgagagcacattt

SEQ ID NO: 1178777 - DNA, 25 bp, Homo sapien
acccctgaggcctgattttggcttg

SEQ ID NO: 1178778 - DNA, 25 bp, Homo sapien
tttggcttgatggtggtctgatgca

SEQ ID NO: 1178779 - DNA, 25 bp, Homo sapien
ttggcttgatggtggtctgatgcag

SEQ ID NO: 1178780 - DNA, 25 bp, Homo sapien
tggcttgatggtggtctgatgcagg

SEQ ID NO: 1178781 - DNA, 25 bp, Homo sapien
gagggagaaagcctccttggaactg

SEQ ID NO: 1178782 - DNA, 25 bp, Homo sapien
taatcagatcaacacactcaatgga

SEQ ID NO: 1178783 - DNA, 25 bp, Homo sapien
tctgttcccatgattagccctaaat

SEQ ID NO: 1178784 - DNA, 25 bp, Homo sapien
caaggtgctgatgtgaactaacgga

SEQ ID NO: 1178785 - DNA, 25 bp, Homo sapien
caaagtttcacgacctggctggtgg

SEQ ID NO: 1178786 - DNA, 25 bp, Homo sapien
aagtggaccctcttcagctcttggg

SEQ ID NO: 1178787 - DNA, 25 bp, Homo sapien
gtacgggaacaccacagaaactgtg

SEQ ID NO: 1178788 - DNA, 25 bp, Homo sapien
gaatgacaacttctaccccagtgtg

SEQ ID NO: 1178789 - DNA, 25 bp, Homo sapien
gccagcagtgtcttcactcttccca

SEQ ID NO: 1178790 - DNA, 25 bp, Homo sapien
ccagcagtgtcttcactcttcccag

SEQ ID NO: 1178791 - DNA, 25 bp, Homo sapien
cagcagtgtcttcactcttcccagt

SEQ ID NO: 1178792 - DNA, 25 bp, Homo sapien
tgaacgttgccataatcaatgtttt

SEQ ID NO: 1178793 - DNA, 25 bp, Homo sapien
tcttctaaaaatgggatgcagaaag

SEQ ID NO: 1178794 - DNA, 25 bp, Homo sapien
atgttttcattattaggcccattgg

SEQ ID NO: 1178795 - DNA, 25 bp, Homo sapien
gagctttgggtcaatagctgattgt

SEQ ID NO: 1178796 - DNA, 25 bp, Homo sapien
cataagcagggccttactcctgtgg

SEQ ID NO: 1178797 - DNA, 25 bp, Homo sapien
ggtgggctgtgaccttcgggatgga

SEQ ID NO: 1178798 - DNA, 25 bp, Homo sapien
tgtgggaaggcatctgacctgccac

SEQ ID NO: 1178799 - DNA, 25 bp, Homo sapien
tcgggatggagaacaaatgccactg

SEQ ID NO: 1178800 - DNA, 25 bp, Homo sapien
taacatggtgcctgaagtacgctag

SEQ ID NO: 1178801 - DNA, 25 bp, Homo sapien
taaagagcgtgaggttccagaggcc

SEQ ID NO: 1178802 - DNA, 25 bp, Homo sapien
taccagtactgggaagcctctcaag

SEQ ID NO: 1178803 - DNA, 25 bp, Homo sapien
gagacctagtttcgttcagcgtggg

SEQ ID NO: 1178804 - DNA, 25 bp, Homo sapien
cattcactcttcatacacgctgatg

SEQ ID NO: 1178805 - DNA, 25 bp, Homo sapien
tgatggaataccactatatccgagg

SEQ ID NO: 1178806 - DNA, 25 bp, Homo sapien
cccttgtcgctacctgtttcatgta

SEQ ID NO: 1178807 - DNA, 25 bp, Homo sapien
tcttgccccttgtcgctacctgttt

SEQ ID NO: 1178808 - DNA, 25 bp, Homo sapien
tcctactgagtccaagggatactgg

SEQ ID NO: 1178809 - DNA, 25 bp, Homo sapien
cataacacagggacataggcaccat

SEQ ID NO: 1178810 - DNA, 25 bp, Homo sapien
tataactgacctgggtaggaacctc

SEQ ID NO: 1178811 - DNA, 25 bp, Homo sapien
tctggatgccctaactgtacaaaac

SEQ ID NO: 1178812 - DNA, 25 bp, Homo sapien
tattactgactttgattgggactgc

SEQ ID NO: 1178813 - DNA, 25 bp, Homo sapien
tgtgaagtgccatgagcaatacctg

SEQ ID NO: 1178814 - DNA, 25 bp, Homo sapien
catgagtcttgttgtcgcctgcacc

SEQ ID NO: 1178815 - DNA, 25 bp, Homo sapien
gacagtaccaagcacatggcaggtg

SEQ ID NO: 1178816 - DNA, 25 bp, Homo sapien
cctttctgccgaatatctgttctgg

SEQ ID NO: 1178817 - DNA, 25 bp, Homo sapien
tcctgctgattacaaccattgttca

SEQ ID NO: 1178818 - DNA, 25 bp, Homo sapien
ttcacacctggaatgtagacatgac

SEQ ID NO: 1178819 - DNA, 25 bp, Homo sapien
tgttctggaccatttctcacaaact

SEQ ID NO: 1178820 - DNA, 25 bp, Homo sapien
gggctgctgcatcgagtatgccatg

SEQ ID NO: 1178821 - DNA, 25 bp, Homo sapien
gcagacttgcttctgcaaggatggt

SEQ ID NO: 1178822 - DNA, 25 bp, Homo sapien
ccatgatagctttgcactcttctgc

SEQ ID NO: 1178823 - DNA, 25 bp, Homo sapien
gaagggagcccactccgcacacagg

SEQ ID NO: 1178824 - DNA, 25 bp, Homo sapien
aacagcagaggttcgtgggacgact

SEQ ID NO: 1178825 - DNA, 25 bp, Homo sapien
cgtgggacgactggcaatttgagtt

SEQ ID NO: 1178826 - DNA, 25 bp, Homo sapien
ttcgtgggacgactggcaatttgag

SEQ ID NO: 1178827 - DNA, 25 bp, Homo sapien
aggttcgtgggacgactggcaattt

SEQ ID NO: 1178828 - DNA, 25 bp, Homo sapien
tgttttgtgtctgtcaatccaagga

SEQ ID NO: 1178829 - DNA, 25 bp, Homo sapien
gtgtctgtcaatccaaggaccaggg

SEQ ID NO: 1178830 - DNA, 25 bp, Homo sapien
gaccagggttgtgagcacaattata

SEQ ID NO: 1178831 - DNA, 25 bp, Homo sapien
aatgtggtaaataagtaagaaggct

SEQ ID NO: 1178832 - DNA, 25 bp, Homo sapien
gggccattgagcatctttcgactga

SEQ ID NO: 1178833 - DNA, 25 bp, Homo sapien
gcatctttcgactgagtgaccatca

SEQ ID NO: 1178834 - DNA, 25 bp, Homo sapien
ggtctggggccattgagcatctttc

SEQ ID NO: 1178835 - DNA, 25 bp, Homo sapien
tcgactgagtgaccatcagacagca

SEQ ID NO: 1178836 - DNA, 25 bp, Homo sapien
tcaactgatactctcctggacaaat

SEQ ID NO: 1178837 - DNA, 25 bp, Homo sapien
atctcccacacagaaagcggaggcc

SEQ ID NO: 1178838 - DNA, 25 bp, Homo sapien
aatgtagagcatgctaatgggctga

SEQ ID NO: 1178839 - DNA, 25 bp, Homo sapien
ccaagagagatgtgtaatagaagtg

SEQ ID NO: 1178840 - DNA, 25 bp, Homo sapien
tattcttttgaccacttatgttaga

SEQ ID NO: 1178841 - DNA, 25 bp, Homo sapien
taatctcttggatgaatattcattc

SEQ ID NO: 1178842 - DNA, 25 bp, Homo sapien
gatgcgctttaatctcttggatgaa

SEQ ID NO: 1178843 - DNA, 25 bp, Homo sapien
tgttagaactgctgatgcgctttaa

SEQ ID NO: 1178844 - DNA, 25 bp, Homo sapien
tttcaacatgatatacagcacactg

SEQ ID NO: 1178845 - DNA, 25 bp, Homo sapien
catgctctcgtttcaacatgatata

SEQ ID NO: 1178846 - DNA, 25 bp, Homo sapien
gatatacagcacactgaatgcacct

SEQ ID NO: 1178847 - DNA, 25 bp, Homo sapien
atgcacctgagcctcgacccatgtt

SEQ ID NO: 1178848 - DNA, 25 bp, Homo sapien
tgatggtgtccacaccgatgtgtgt

SEQ ID NO: 1178849 - DNA, 25 bp, Homo sapien
tggccccttgtggaccttgatggtg

SEQ ID NO: 1178850 - DNA, 25 bp, Homo sapien
gaagtccccaggaccatatgcatgt

SEQ ID NO: 1178851 - DNA, 25 bp, Homo sapien
ccaggaccatatgcatgtggcccct

SEQ ID NO: 1178852 - DNA, 25 bp, Homo sapien
aggaggttccgttcagttctgtcag

SEQ ID NO: 1178853 - DNA, 25 bp, Homo sapien
ccacagccctctatgatcccgcttc

SEQ ID NO: 1178854 - DNA, 25 bp, Homo sapien
gatggctgtcacagtatctgccctg

SEQ ID NO: 1178855 - DNA, 25 bp, Homo sapien
tgatcccgcttccaagggcccaagt

SEQ ID NO: 1178856 - DNA, 25 bp, Homo sapien
gaataggaaacaagttggagagaga

SEQ ID NO: 1178857 - DNA, 25 bp, Homo sapien
cataggagaagccaaatttgcttaa

SEQ ID NO: 1178858 - DNA, 25 bp, Homo sapien
aagtatagctgagttgggaagagac

SEQ ID NO: 1178859 - DNA, 25 bp, Homo sapien
gttgaccataggagaagccaaattt

SEQ ID NO: 1178860 - DNA, 25 bp, Homo sapien
gcctggtgtactgggatgggcctta

SEQ ID NO: 1178861 - DNA, 25 bp, Homo sapien
tctggagcagttttgcctggtgtac

SEQ ID NO: 1178862 - DNA, 25 bp, Homo sapien
gaacagtggagttgctttaactctg

SEQ ID NO: 1178863 - DNA, 25 bp, Homo sapien
cgtggaacagtggagttgctttaac

SEQ ID NO: 1178864 - DNA, 25 bp, Homo sapien
actactgtgaggtagtttgctctcc

SEQ ID NO: 1178865 - DNA, 25 bp, Homo sapien
tgcttggtctcagtaaagtcactgt

SEQ ID NO: 1178866 - DNA, 25 bp, Homo sapien
ctcagtaaagtcactgtctgttgga

SEQ ID NO: 1178867 - DNA, 25 bp, Homo sapien
gagggttcagctgcccactactgtg

SEQ ID NO: 1178868 - DNA, 25 bp, Homo sapien
tgctgcttatgcttttcagtgtttc

SEQ ID NO: 1178869 - DNA, 25 bp, Homo sapien
gaagcagagtctagatagagcccag

SEQ ID NO: 1178870 - DNA, 25 bp, Homo sapien
caggtatggagcaattgaagcagag

SEQ ID NO: 1178871 - DNA, 25 bp, Homo sapien
ttacttcccatagtactattctgca

SEQ ID NO: 1178872 - DNA, 25 bp, Homo sapien
ctctgttctgagacatgcctgagac

SEQ ID NO: 1178873 - DNA, 25 bp, Homo sapien
gctctgttctgagacatgcctgaga

SEQ ID NO: 1178874 - DNA, 25 bp, Homo sapien
tgctctgttctgagacatgcctgag

SEQ ID NO: 1178875 - DNA, 25 bp, Homo sapien
acagacctggttgatcgtgtccaca

SEQ ID NO: 1178876 - DNA, 25 bp, Homo sapien
agcaggacagccaaacttggatttt

SEQ ID NO: 1178877 - DNA, 25 bp, Homo sapien
catgaggaagcaactcttatgagct

SEQ ID NO: 1178878 - DNA, 25 bp, Homo sapien
tctggttaaaagaccatactgtgct

SEQ ID NO: 1178879 - DNA, 25 bp, Homo sapien
cctgcgtggcctttgtcacatcctt

SEQ ID NO: 1178880 - DNA, 25 bp, Homo sapien
ctgccacctggctttgcatgtggga

SEQ ID NO: 1178881 - DNA, 25 bp, Homo sapien
tagtagggaggctgccacctggctt

SEQ ID NO: 1178882 - DNA, 25 bp, Homo sapien
atcctgcgtggcctttgtcacatcc

SEQ ID NO: 1178883 - DNA, 25 bp, Homo sapien
gccagtctgatcattgaggagctgt

SEQ ID NO: 1178884 - DNA, 25 bp, Homo sapien
cagtctgatcattgaggagctgtgc

SEQ ID NO: 1178885 - DNA, 25 bp, Homo sapien
ccagtctgatcattgaggagctgtg

SEQ ID NO: 1178886 - DNA, 25 bp, Homo sapien
gaactaagaaaccatgtgctgctca

SEQ ID NO: 1178887 - DNA, 25 bp, Homo sapien
gtaccattgaccaaaccatggccct

SEQ ID NO: 1178888 - DNA, 25 bp, Homo sapien
tactgtaccattgaccaaaccatgg

SEQ ID NO: 1178889 - DNA, 25 bp, Homo sapien
tctctggactgagctccctgaacta

SEQ ID NO: 1178890 - DNA, 25 bp, Homo sapien
tgatggcacctggtgccaacctaca

SEQ ID NO: 1178891 - DNA, 25 bp, Homo sapien
tgcactagcatttggcttctggcag

SEQ ID NO: 1178892 - DNA, 25 bp, Homo sapien
tcactttgcactagcatttggcttc

SEQ ID NO: 1178893 - DNA, 25 bp, Homo sapien
gcaggcaggaagcttgttgctttct

SEQ ID NO: 1178894 - DNA, 25 bp, Homo sapien
catttggcttctggcaggcaggaag

SEQ ID NO: 1178895 - DNA, 25 bp, Homo sapien
cgccagcgtggaactgaaaggcccg

SEQ ID NO: 1178896 - DNA, 25 bp, Homo sapien
gcccgggcaaggttagcagctgctc

SEQ ID NO: 1178897 - DNA, 25 bp, Homo sapien
atccctgacacctgagaacaacaac

SEQ ID NO: 1178898 - DNA, 25 bp, Homo sapien
tggggtaacatctccagctggatgg

SEQ ID NO: 1178899 - DNA, 25 bp, Homo sapien
tgcagggctttagccagatgccctt

SEQ ID NO: 1178900 - DNA, 25 bp, Homo sapien
attgactccctgacttgtgctcccc

SEQ ID NO: 1178901 - DNA, 25 bp, Homo sapien
ggatagtcactctttcaagctgcag

SEQ ID NO: 1178902 - DNA, 25 bp, Homo sapien
cctctgcttgtcttgggatagtcac

SEQ ID NO: 1178903 - DNA, 25 bp, Homo sapien
cccctgttttttcatcactgcctgc

SEQ ID NO: 1178904 - DNA, 25 bp, Homo sapien
ttgctgagggtccaggtcttcaggc

SEQ ID NO: 1178905 - DNA, 25 bp, Homo sapien
tgttttttcatcactgcctgcccct

SEQ ID NO: 1178906 - DNA, 25 bp, Homo sapien
ctgccccccagccaggtttgctgag

SEQ ID NO: 1178907 - DNA, 25 bp, Homo sapien
gctggctggtgggcctgtgtccggc

SEQ ID NO: 1178908 - DNA, 25 bp, Homo sapien
caggctctcagaggctgttagaggc

SEQ ID NO: 1178909 - DNA, 25 bp, Homo sapien
gctctcagaggctgttagaggcctg

SEQ ID NO: 1178910 - DNA, 25 bp, Homo sapien
ctgtgtccggcacaggctctcagag

SEQ ID NO: 1178911 - DNA, 25 bp, Homo sapien
gggtacatgccagttggaactgttc

SEQ ID NO: 1178912 - DNA, 25 bp, Homo sapien
ggctcccaagaattcctgcactgtt

SEQ ID NO: 1178913 - DNA, 25 bp, Homo sapien
cctgcactgttccttttctcgaggc

SEQ ID NO: 1178914 - DNA, 25 bp, Homo sapien
tttctcgaggcccatgtggaccctg

SEQ ID NO: 1178915 - DNA, 25 bp, Homo sapien
tctggctcccaagaattcctgcact

SEQ ID NO: 1178916 - DNA, 25 bp, Homo sapien
gtgtgcctgtgccaggagagttgtc

SEQ ID NO: 1178917 - DNA, 25 bp, Homo sapien
agagttgtccagatcgaggaacgtc

SEQ ID NO: 1178918 - DNA, 25 bp, Homo sapien
ccagatcgaggaacgtctggagatg

SEQ ID NO: 1178919 - DNA, 25 bp, Homo sapien
tggtatttaaggatggttctagagt

SEQ ID NO: 1178920 - DNA, 25 bp, Homo sapien
agaagcagagtcctcgtggtgctga

SEQ ID NO: 1178921 - DNA, 25 bp, Homo sapien
ggtgctgagggtccgtggaagggat

SEQ ID NO: 1178922 - DNA, 25 bp, Homo sapien
gagggtccgtggaagggattggtgc

SEQ ID NO: 1178923 - DNA, 25 bp, Homo sapien
gtccgtggaagggattggtgcctgc

SEQ ID NO: 1178924 - DNA, 25 bp, Homo sapien
ggaaataaccagaactgcttctcag

SEQ ID NO: 1178925 - DNA, 25 bp, Homo sapien
ccagaactgcttctcagcagaaaca

SEQ ID NO: 1178926 - DNA, 25 bp, Homo sapien
ctggaaataaccagaactgcttctc

SEQ ID NO: 1178927 - DNA, 25 bp, Homo sapien
aaataaccagaactgcttctcagca

SEQ ID NO: 1178928 - DNA, 25 bp, Homo sapien
tcattccaatcaggaggctcacggt

SEQ ID NO: 1178929 - DNA, 25 bp, Homo sapien
aggccacttgaccaatacccattct

SEQ ID NO: 1178930 - DNA, 25 bp, Homo sapien
tttgctctcgaggaccagatcagcc

SEQ ID NO: 1178931 - DNA, 25 bp, Homo sapien
catagagatggtcacacagttgggc

SEQ ID NO: 1178932 - DNA, 25 bp, Homo sapien
gcaggtggcaacgacaatagctaaa

SEQ ID NO: 1178933 - DNA, 25 bp, Homo sapien
caactttcagcagcgccggttggtg

SEQ ID NO: 1178934 - DNA, 25 bp, Homo sapien
cctttcagaactagactctgagcag

SEQ ID NO: 1178935 - DNA, 25 bp, Homo sapien
gctgctgcggtgaagaccaaggatc

SEQ ID NO: 1178936 - DNA, 25 bp, Homo sapien
tgggctggattcaggcgtgcaatca

SEQ ID NO: 1178937 - DNA, 25 bp, Homo sapien
ctgggcatgtaagcgactcgccgcg

SEQ ID NO: 1178938 - DNA, 25 bp, Homo sapien
gatggagttcttcaacacctacagc

SEQ ID NO: 1178939 - DNA, 25 bp, Homo sapien
tcaggcgtgcaatcagatggagttc

SEQ ID NO: 1178940 - DNA, 25 bp, Homo sapien
cttgagaacttctttagaatcccct

SEQ ID NO: 1178941 - DNA, 25 bp, Homo sapien
ggagcccacattaatcacacatcag

SEQ ID NO: 1178942 - DNA, 25 bp, Homo sapien
cgttggcagaaacaaaccgcattct

SEQ ID NO: 1178943 - DNA, 25 bp, Homo sapien
cacacatcagttaggcctcagtggt

SEQ ID NO: 1178944 - DNA, 25 bp, Homo sapien
caaagaggactgatgcaagtataac

SEQ ID NO: 1178945 - DNA, 25 bp, Homo sapien
gaatatggccagattgtccctgctg

SEQ ID NO: 1178946 - DNA, 25 bp, Homo sapien
tgctgtatacagcatggccccaggg

SEQ ID NO: 1178947 - DNA, 25 bp, Homo sapien
agagacaatcggaaccacttctggg

SEQ ID NO: 1178948 - DNA, 25 bp, Homo sapien
caaatctaatagagaccagcggtca

SEQ ID NO: 1178949 - DNA, 25 bp, Homo sapien
tgcaggagcatgaacctggcttact

SEQ ID NO: 1178950 - DNA, 25 bp, Homo sapien
tggcttactgcaagttcaatctcct

SEQ ID NO: 1178951 - DNA, 25 bp, Homo sapien
gaacctggcttactgcaagttcaat

SEQ ID NO: 1178952 - DNA, 25 bp, Homo sapien
ggttggagtgcaggagcatgaacct

SEQ ID NO: 1178953 - DNA, 25 bp, Homo sapien
ctggtggacccatggatgaaggacc

SEQ ID NO: 1178954 - DNA, 25 bp, Homo sapien
caaacttgatcctacagccaagctc

SEQ ID NO: 1178955 - DNA, 25 bp, Homo sapien
cagcagagtagctatggtcaacaaa

SEQ ID NO: 1178956 - DNA, 25 bp, Homo sapien
gaaaccgagcagctatggacagcag

SEQ ID NO: 1178957 - DNA, 25 bp, Homo sapien
gcagaacacctatgggaaaccgagc

SEQ ID NO: 1178958 - DNA, 25 bp, Homo sapien
tatgggcaacaaagctatggaacct

SEQ ID NO: 1178959 - DNA, 25 bp, Homo sapien
tacctatagccaagctgcagcgcag

SEQ ID NO: 1178960 - DNA, 25 bp, Homo sapien
ttatccagcttatgggcagcagcca

SEQ ID NO: 1178961 - DNA, 25 bp, Homo sapien
caagactgcagaatggaaacaagcc

SEQ ID NO: 1178962 - DNA, 25 bp, Homo sapien
caattctagttcaccccattcggtt

SEQ ID NO: 1178963 - DNA, 25 bp, Homo sapien
tcttcctaaaatctcacagtaccac

SEQ ID NO: 1178964 - DNA, 25 bp, Homo sapien
acagtaccacgaagatccccaatct

SEQ ID NO: 1178965 - DNA, 25 bp, Homo sapien
gttcaccccattcggttctcttctg

SEQ ID NO: 1178966 - DNA, 25 bp, Homo sapien
tgcttcacacttggcatgtttctgt

SEQ ID NO: 1178967 - DNA, 25 bp, Homo sapien
ttcacacttggcatgtttctgttcc

SEQ ID NO: 1178968 - DNA, 25 bp, Homo sapien
ctgttcctttagattcctcttagct

SEQ ID NO: 1178969 - DNA, 25 bp, Homo sapien
gtgcctgtgcttcacacttggcatg

SEQ ID NO: 1178970 - DNA, 25 bp, Homo sapien
agtagacccgtgagactgcccctgc

SEQ ID NO: 1178971 - DNA, 25 bp, Homo sapien
tctcagtagacccgtgagactgccc

SEQ ID NO: 1178972 - DNA, 25 bp, Homo sapien
tcagtagacccgtgagactgcccct

SEQ ID NO: 1178973 - DNA, 25 bp, Homo sapien
ctctcagtagacccgtgagactgcc

SEQ ID NO: 1178974 - DNA, 25 bp, Homo sapien
tcagttcatctcgattcttcaatcc

SEQ ID NO: 1178975 - DNA, 25 bp, Homo sapien
gcagactttaggagatgtgcagacc

SEQ ID NO: 1178976 - DNA, 25 bp, Homo sapien
tggcgttctccacaaatacatatac

SEQ ID NO: 1178977 - DNA, 25 bp, Homo sapien
gtttcctaatctgagctaatagcag

SEQ ID NO: 1178978 - DNA, 25 bp, Homo sapien
cttttcaagtgacgagggatgcagg

SEQ ID NO: 1178979 - DNA, 25 bp, Homo sapien
gaccaaactccaggcgctgcttttc

SEQ ID NO: 1178980 - DNA, 25 bp, Homo sapien
gggtgtggtctcacaagcaaaggcc

SEQ ID NO: 1178981 - DNA, 25 bp, Homo sapien
aagaccaaactccaggcgctgcttt

SEQ ID NO: 1178982 - DNA, 25 bp, Homo sapien
ttcatggctctgggttgacggctct

SEQ ID NO: 1178983 - DNA, 25 bp, Homo sapien
gcttatggctgtgggacaccaggat

SEQ ID NO: 1178984 - DNA, 25 bp, Homo sapien
gctctggcttatggctgtgggacac

SEQ ID NO: 1178985 - DNA, 25 bp, Homo sapien
gctctgggttgacggctctggtttc

SEQ ID NO: 1178986 - DNA, 25 bp, Homo sapien
agtgcttctactgcttgctgagtct

SEQ ID NO: 1178987 - DNA, 25 bp, Homo sapien
gtctcttagaagctgacctcctctg

SEQ ID NO: 1178988 - DNA, 25 bp, Homo sapien
tgcttctactgcttgctgagtctcc

SEQ ID NO: 1178989 - DNA, 25 bp, Homo sapien
agtctccttgatttgtctcttagaa

SEQ ID NO: 1178990 - DNA, 25 bp, Homo sapien
gaggtttgcaccaaactgtcaggct

SEQ ID NO: 1178991 - DNA, 25 bp, Homo sapien
tgttctactgaagtggtgagccctc

SEQ ID NO: 1178992 - DNA, 25 bp, Homo sapien
ggtgagccctcggaggtttgcacca

SEQ ID NO: 1178993 - DNA, 25 bp, Homo sapien
tttgcaccaaactgtcaggcttcag

SEQ ID NO: 1178994 - DNA, 25 bp, Homo sapien
tggagcgggatccaagaaagggtct

SEQ ID NO: 1178995 - DNA, 25 bp, Homo sapien
ctccgaggtgatcataaacctcctg

SEQ ID NO: 1178996 - DNA, 25 bp, Homo sapien
tgttagtgttgttcctgtaaaacca

SEQ ID NO: 1178997 - DNA, 25 bp, Homo sapien
aggcaagtgtctcattgctgaacaa

SEQ ID NO: 1178998 - DNA, 25 bp, Homo sapien
gcagggtggtcctctgtagttagcc

SEQ ID NO: 1178999 - DNA, 25 bp, Homo sapien
tatgcaagcaggtcactaacggagc

SEQ ID NO: 1179000 - DNA, 25 bp, Homo sapien
aacggagccatctgcgagtcctacg

SEQ ID NO: 1179001 - DNA, 25 bp, Homo sapien
cacgcgcaaggatggagatgagtct

SEQ ID NO: 1179002 - DNA, 25 bp, Homo sapien
caggacctcccgagaggaaagtaag

SEQ ID NO: 1179003 - DNA, 25 bp, Homo sapien
tcaggggaccaaccggcctatacca

SEQ ID NO: 1179004 - DNA, 25 bp, Homo sapien
caaccggcctataccaagtgtacca

SEQ ID NO: 1179005 - DNA, 25 bp, Homo sapien
gaccaaccggcctataccaagtgta

SEQ ID NO: 1179006 - DNA, 25 bp, Homo sapien
gaaccttatactagcaattgccttt

SEQ ID NO: 1179007 - DNA, 25 bp, Homo sapien
gcaaacatgtcaatgatgtacacct

SEQ ID NO: 1179008 - DNA, 25 bp, Homo sapien
tgcaagaatgagagaccgtcctacc

SEQ ID NO: 1179009 - DNA, 25 bp, Homo sapien
tgagtatcaggacacacaagaacct

SEQ ID NO: 1179010 - DNA, 25 bp, Homo sapien
gatatcagtagtgccttccagctct

SEQ ID NO: 1179011 - DNA, 25 bp, Homo sapien
tctgccaagggagtagaacacaggt

SEQ ID NO: 1179012 - DNA, 25 bp, Homo sapien
tctagggacaattggccaggatcca

SEQ ID NO: 1179013 - DNA, 25 bp, Homo sapien
tttccccatgtcaagaaaggccgct

SEQ ID NO: 1179014 - DNA, 25 bp, Homo sapien
agggaagaatgcagaaggcctcctc

SEQ ID NO: 1179015 - DNA, 25 bp, Homo sapien
acagagccatcatggtttccatgaa

SEQ ID NO: 1179016 - DNA, 25 bp, Homo sapien
ggtttccatgaagggaagaatgcag

SEQ ID NO: 1179017 - DNA, 25 bp, Homo sapien
gaagaatgcagaaggcctcctcatg

SEQ ID NO: 1179018 - DNA, 25 bp, Homo sapien
tgtcacattctcacatctacttaac

SEQ ID NO: 1179019 - DNA, 25 bp, Homo sapien
tgcccattatacttcttcatatccc

SEQ ID NO: 1179020 - DNA, 25 bp, Homo sapien
ccagaagacaatgtcccagaattcc

SEQ ID NO: 1179021 - DNA, 25 bp, Homo sapien
agaagatccagaagacaatgtccca

SEQ ID NO: 1179022 - DNA, 25 bp, Homo sapien
caggagaccagttccaagctccact

SEQ ID NO: 1179023 - DNA, 25 bp, Homo sapien
catcctggagacttgagaaagcagc

SEQ ID NO: 1179024 - DNA, 25 bp, Homo sapien
ggagaccagttccaagctccactct

SEQ ID NO: 1179025 - DNA, 25 bp, Homo sapien
cgtggtaacgtgacacaagggtcag

SEQ ID NO: 1179026 - DNA, 25 bp, Homo sapien
taaacaagagggttcagcatcaaat

SEQ ID NO: 1179027 - DNA, 25 bp, Homo sapien
ctgagtaaacaagagggttcagcat

SEQ ID NO: 1179028 - DNA, 25 bp, Homo sapien
gtaaacaagagggttcagcatcaaa

SEQ ID NO: 1179029 - DNA, 25 bp, Homo sapien
gagtaaacaagagggttcagcatca

SEQ ID NO: 1179030 - DNA, 25 bp, Homo sapien
tgatttgggaaagtcaatgtcactc

SEQ ID NO: 1179031 - DNA, 25 bp, Homo sapien
ccctgagattagctataggggctgc

SEQ ID NO: 1179032 - DNA, 25 bp, Homo sapien
ctgctgatttgggaaagtcaatgtc

SEQ ID NO: 1179033 - DNA, 25 bp, Homo sapien
gagattagctataggggctgctgat

SEQ ID NO: 1179034 - DNA, 25 bp, Homo sapien
gatgttcaggctatgagctctgtct

SEQ ID NO: 1179035 - DNA, 25 bp, Homo sapien
gacacgatgttcaggctatgagctc

SEQ ID NO: 1179036 - DNA, 25 bp, Homo sapien
ctagacacgatgttcaggctatgag

SEQ ID NO: 1179037 - DNA, 25 bp, Homo sapien
gttcaggctatgagctctgtcttgc

SEQ ID NO: 1179038 - DNA, 25 bp, Homo sapien
gggaacacaaatagactcccttgac

SEQ ID NO: 1179039 - DNA, 25 bp, Homo sapien
caaagtcttcctcatcagaagctgc

SEQ ID NO: 1179040 - DNA, 25 bp, Homo sapien
cagaggcccagccaaacccaggtct

SEQ ID NO: 1179041 - DNA, 25 bp, Homo sapien
caggtctccagtggggaacacaaat

SEQ ID NO: 1179042 - DNA, 25 bp, Homo sapien
taactgatcgaaggcatccccagag

SEQ ID NO: 1179043 - DNA, 25 bp, Homo sapien
cagcgtctgtgcttttggagtatga

SEQ ID NO: 1179044 - DNA, 25 bp, Homo sapien
ttaaaatggaccatctactgccaga

SEQ ID NO: 1179045 - DNA, 25 bp, Homo sapien
ggagtatgaggaattttctggcagc

SEQ ID NO: 1179046 - DNA, 25 bp, Homo sapien
caccccaactgagagggctgggctg

SEQ ID NO: 1179047 - DNA, 25 bp, Homo sapien
gtcagcatatccttcacaggctgac

SEQ ID NO: 1179048 - DNA, 25 bp, Homo sapien
catccactgtagtctattccttgta

SEQ ID NO: 1179049 - DNA, 25 bp, Homo sapien
tatatgactatatggcatccactgt

SEQ ID NO: 1179050 - DNA, 25 bp, Homo sapien
gtatatgactatatggcatccactg

SEQ ID NO: 1179051 - DNA, 25 bp, Homo sapien
tggcatccactgtagtctattcctt

SEQ ID NO: 1179052 - DNA, 25 bp, Homo sapien
tgaccacgtgggtatggtggacctt

SEQ ID NO: 1179053 - DNA, 25 bp, Homo sapien
taatcaaatcggaaagagtcagata

SEQ ID NO: 1179054 - DNA, 25 bp, Homo sapien
ttcttctagtgaccacgtgggtatg

SEQ ID NO: 1179055 - DNA, 25 bp, Homo sapien
tctcatgaattcctctgccactttc

SEQ ID NO: 1179056 - DNA, 25 bp, Homo sapien
agtcacatgttgaggccttgtagcc

SEQ ID NO: 1179057 - DNA, 25 bp, Homo sapien
catgttgaggccttgtagcctaatt

SEQ ID NO: 1179058 - DNA, 25 bp, Homo sapien
acatgttgaggccttgtagcctaat

SEQ ID NO: 1179059 - DNA, 25 bp, Homo sapien
taaagtcacatgttgaggccttgta

SEQ ID NO: 1179060 - DNA, 25 bp, Homo sapien
cacaaggaaattgcaggtacagaag

SEQ ID NO: 1179061 - DNA, 25 bp, Homo sapien
ttctggtgatttacataacacaagg

SEQ ID NO: 1179062 - DNA, 25 bp, Homo sapien
tatatgcctgtttatccataagccc

SEQ ID NO: 1179063 - DNA, 25 bp, Homo sapien
gtttatccataagcccaggaacagc

SEQ ID NO: 1179064 - DNA, 25 bp, Homo sapien
aggccctgctgcaaaggaaaccctc

SEQ ID NO: 1179065 - DNA, 25 bp, Homo sapien
ctttccggttcttattgtccacatg

SEQ ID NO: 1179066 - DNA, 25 bp, Homo sapien
catctttccggttcttattgtccac

SEQ ID NO: 1179067 - DNA, 25 bp, Homo sapien
ttcatctttccggttcttattgtcc

SEQ ID NO: 1179068 - DNA, 25 bp, Homo sapien
ttcttcatctttccggttcttattg

SEQ ID NO: 1179069 - DNA, 25 bp, Homo sapien
ggtaattctttcctctggccaacaa

SEQ ID NO: 1179070 - DNA, 25 bp, Homo sapien
gccaacaactttctcagttttaatg

SEQ ID NO: 1179071 - DNA, 25 bp, Homo sapien
agcaggtaattctttcctctggcca

SEQ ID NO: 1179072 - DNA, 25 bp, Homo sapien
tgctctgggctctgaaactcagcat

SEQ ID NO: 1179073 - DNA, 25 bp, Homo sapien
tgttccattggccagtgcaagagaa

SEQ ID NO: 1179074 - DNA, 25 bp, Homo sapien
aatgttccattggccagtgcaagag

SEQ ID NO: 1179075 - DNA, 25 bp, Homo sapien
cacaatgttccattggccagtgcaa

SEQ ID NO: 1179076 - DNA, 25 bp, Homo sapien
caatgttccattggccagtgcaaga

SEQ ID NO: 1179077 - DNA, 25 bp, Homo sapien
gagggtcagtctgatgaccactgca

SEQ ID NO: 1179078 - DNA, 25 bp, Homo sapien
ctgatgaccactgcagcccataact

SEQ ID NO: 1179079 - DNA, 25 bp, Homo sapien
cagtctgatgaccactgcagcccat

SEQ ID NO: 1179080 - DNA, 25 bp, Homo sapien
gggtcagtctgatgaccactgcagc

SEQ ID NO: 1179081 - DNA, 25 bp, Homo sapien
gctcccgatggctgcattaacaaca

SEQ ID NO: 1179082 - DNA, 25 bp, Homo sapien
taacactcaggtggcccagagagtt

SEQ ID NO: 1179083 - DNA, 25 bp, Homo sapien
tttccttgttggcattacagctccc

SEQ ID NO: 1179084 - DNA, 25 bp, Homo sapien
tggcccagagagtttggaatttcct

SEQ ID NO: 1179085 - DNA, 25 bp, Homo sapien
ctccatggaggaccggactgtgttc

SEQ ID NO: 1179086 - DNA, 25 bp, Homo sapien
cctctccatggaggaccggactgtg

SEQ ID NO: 1179087 - DNA, 25 bp, Homo sapien
catggaggaccggactgtgttcagt

SEQ ID NO: 1179088 - DNA, 25 bp, Homo sapien
atggaggaccggactgtgttcagtc

SEQ ID NO: 1179089 - DNA, 25 bp, Homo sapien
tccctgtggcctctattctctggac

SEQ ID NO: 1179090 - DNA, 25 bp, Homo sapien
cctgtggcctctattctctggacca

SEQ ID NO: 1179091 - DNA, 25 bp, Homo sapien
tgtggcctctattctctggaccatg

SEQ ID NO: 1179092 - DNA, 25 bp, Homo sapien
ttccctgtggcctctattctctgga

SEQ ID NO: 1179093 - DNA, 25 bp, Homo sapien
taattgcctgtggtgaaggacccta

SEQ ID NO: 1179094 - DNA, 25 bp, Homo sapien
ctaagcccataaattcagtaattgc

SEQ ID NO: 1179095 - DNA, 25 bp, Homo sapien
aattgcctgtggtgaaggaccctac

SEQ ID NO: 1179096 - DNA, 25 bp, Homo sapien
taagcccataaattcagtaattgcc

SEQ ID NO: 1179097 - DNA, 25 bp, Homo sapien
gaggccagagccttgagtgtatgtt

SEQ ID NO: 1179098 - DNA, 25 bp, Homo sapien
ccagagccttgagtgtatgttgggt

SEQ ID NO: 1179099 - DNA, 25 bp, Homo sapien
tgttgggtgccggtgggagatggtg

SEQ ID NO: 1179100 - DNA, 25 bp, Homo sapien
tgtatgttgggtgccggtgggagat

SEQ ID NO: 1179101 - DNA, 25 bp, Homo sapien
tggaaaggaaattcatcattgcagg

SEQ ID NO: 1179102 - DNA, 25 bp, Homo sapien
cttataagggctgaatgggaattga

SEQ ID NO: 1179103 - DNA, 25 bp, Homo sapien
tataagggctgaatgggaattgatg

SEQ ID NO: 1179104 - DNA, 25 bp, Homo sapien
gaaaggaaattcatcattgcaggtt

SEQ ID NO: 1179105 - DNA, 25 bp, Homo sapien
gagttgaacatagacctttgtaaac

SEQ ID NO: 1179106 - DNA, 25 bp, Homo sapien
ccatgggctgctttagagttgaaca

SEQ ID NO: 1179107 - DNA, 25 bp, Homo sapien
tctttcggtgttgtaataccttcaa

SEQ ID NO: 1179108 - DNA, 25 bp, Homo sapien
ctagtgatatgggtttgaaagtcca

SEQ ID NO: 1179109 - DNA, 25 bp, Homo sapien
gccaatcactgcaattctttttcct

SEQ ID NO: 1179110 - DNA, 25 bp, Homo sapien
tcttccagacagctcttaatagcgt

SEQ ID NO: 1179111 - DNA, 25 bp, Homo sapien
tagcgtttaatccactgacttcagc

SEQ ID NO: 1179112 - DNA, 25 bp, Homo sapien
tgacttcagcgccaatcactgcaat

SEQ ID NO: 1179113 - DNA, 25 bp, Homo sapien
tgaagtattgctggtgacacattta

SEQ ID NO: 1179114 - DNA, 25 bp, Homo sapien
atttatagatgattgccctgccacc

SEQ ID NO: 1179115 - DNA, 25 bp, Homo sapien
ttatagatgattgccctgccacctt

SEQ ID NO: 1179116 - DNA, 25 bp, Homo sapien
agtattgctggtgacacatttatag

SEQ ID NO: 1179117 - DNA, 25 bp, Homo sapien
tctgaggtactccatcaatttggaa

SEQ ID NO: 1179118 - DNA, 25 bp, Homo sapien
ttggaattgtgcaaatagttgggaa

SEQ ID NO: 1179119 - DNA, 25 bp, Homo sapien
ggtaatcactataggctgatatttc

SEQ ID NO: 1179120 - DNA, 25 bp, Homo sapien
agggaaagggtaatcactataggct

SEQ ID NO: 1179121 - DNA, 25 bp, Homo sapien
aaactcagactcataaccactcctc

SEQ ID NO: 1179122 - DNA, 25 bp, Homo sapien
ctcagactcataaccactcctccca

SEQ ID NO: 1179123 - DNA, 25 bp, Homo sapien
actcagactcataaccactcctccc

SEQ ID NO: 1179124 - DNA, 25 bp, Homo sapien
aactcagactcataaccactcctcc

SEQ ID NO: 1179125 - DNA, 25 bp, Homo sapien
aagtcctggagtggtaatacgggat

SEQ ID NO: 1179126 - DNA, 25 bp, Homo sapien
gtgcatgagaagttgcagcacttct

SEQ ID NO: 1179127 - DNA, 25 bp, Homo sapien
aatacgggatggctatgaaggccac

SEQ ID NO: 1179128 - DNA, 25 bp, Homo sapien
tgaaggccactacacaccataatcc

SEQ ID NO: 1179129 - DNA, 25 bp, Homo sapien
ctattgcataggaacggtataagga

SEQ ID NO: 1179130 - DNA, 25 bp, Homo sapien
ggaacggtataaggatcccttgata

SEQ ID NO: 1179131 - DNA, 25 bp, Homo sapien
tgcataggaacggtataaggatccc

SEQ ID NO: 1179132 - DNA, 25 bp, Homo sapien
cggtataaggatcccttgatatgct

SEQ ID NO: 1179133 - DNA, 25 bp, Homo sapien
ctgtgcagctacatggctgagctca

SEQ ID NO: 1179134 - DNA, 25 bp, Homo sapien
tcttctcccgaaatttatctggcct

SEQ ID NO: 1179135 - DNA, 25 bp, Homo sapien
catggctgagctcaatggccaaatc

SEQ ID NO: 1179136 - DNA, 25 bp, Homo sapien
tggccaaatcagctctggaatttcc

SEQ ID NO: 1179137 - DNA, 25 bp, Homo sapien
caggttgcgttgaggggcagagaat

SEQ ID NO: 1179138 - DNA, 25 bp, Homo sapien
gttgcgttgaggggcagagaatttt

SEQ ID NO: 1179139 - DNA, 25 bp, Homo sapien
agagaagtgggcaggttgcgttgag

SEQ ID NO: 1179140 - DNA, 25 bp, Homo sapien
agaagtgggcaggttgcgttgaggg

SEQ ID NO: 1179141 - DNA, 25 bp, Homo sapien
tggaagatggtgtcaaatgacaggt

SEQ ID NO: 1179142 - DNA, 25 bp, Homo sapien
ccaccataatcctggaacacgatat

SEQ ID NO: 1179143 - DNA, 25 bp, Homo sapien
cagagttggaagatggtgtcaaatg

SEQ ID NO: 1179144 - DNA, 25 bp, Homo sapien
gttggaagatggtgtcaaatgacag

SEQ ID NO: 1179145 - DNA, 25 bp, Homo sapien
tctgagaagatttttctagctccat

SEQ ID NO: 1179146 - DNA, 25 bp, Homo sapien
cattgtctttctgagaagatttttc

SEQ ID NO: 1179147 - DNA, 25 bp, Homo sapien
cattttcattgtctttctgagaaga

SEQ ID NO: 1179148 - DNA, 25 bp, Homo sapien
ttctgagaagatttttctagctcca

SEQ ID NO: 1179149 - DNA, 25 bp, Homo sapien
agatttctactgtcatcatgcggca

SEQ ID NO: 1179150 - DNA, 25 bp, Homo sapien
gatttctactgtcatcatgcggcag

SEQ ID NO: 1179151 - DNA, 25 bp, Homo sapien
ctactgtcatcatgcggcagaccat

SEQ ID NO: 1179152 - DNA, 25 bp, Homo sapien
tttctactgtcatcatgcggcagac

SEQ ID NO: 1179153 - DNA, 25 bp, Homo sapien
aacacagctgtccaggattgatgag

SEQ ID NO: 1179154 - DNA, 25 bp, Homo sapien
cacagctgtccaggattgatgagtc

SEQ ID NO: 1179155 - DNA, 25 bp, Homo sapien
ggaacacagctgtccaggattgatg

SEQ ID NO: 1179156 - DNA, 25 bp, Homo sapien
cagctgtccaggattgatgagtctt

SEQ ID NO: 1179157 - DNA, 25 bp, Homo sapien
gaggagggaacacatgtttaaacat

SEQ ID NO: 1179158 - DNA, 25 bp, Homo sapien
ctgaggagggaacacatgtttaaac

SEQ ID NO: 1179159 - DNA, 25 bp, Homo sapien
tgaggagggaacacatgtttaaaca

SEQ ID NO: 1179160 - DNA, 25 bp, Homo sapien
ggctcccactgttcgaaggatgcca

SEQ ID NO: 1179161 - DNA, 25 bp, Homo sapien
tggtggctcccactgttcgaaggat

SEQ ID NO: 1179162 - DNA, 25 bp, Homo sapien
gtggctcccactgttcgaaggatgc

SEQ ID NO: 1179163 - DNA, 25 bp, Homo sapien
atggtggctcccactgttcgaagga

SEQ ID NO: 1179164 - DNA, 25 bp, Homo sapien
aattttcgcttattccagaatgacc

SEQ ID NO: 1179165 - DNA, 25 bp, Homo sapien
ttaattttcgcttattccagaatga

SEQ ID NO: 1179166 - DNA, 25 bp, Homo sapien
ctttaattttcgcttattccagaat

SEQ ID NO: 1179167 - DNA, 25 bp, Homo sapien
ttctttaattttcgcttattccaga

SEQ ID NO: 1179168 - DNA, 25 bp, Homo sapien
tgacaccaaaaaggaaaaaatcaga

SEQ ID NO: 1179169 - DNA, 25 bp, Homo sapien
ctgacaccaaaaaggaaaaaatcag

SEQ ID NO: 1179170 - DNA, 25 bp, Homo sapien
agaaaacttccatagctagctttgg

SEQ ID NO: 1179171 - DNA, 25 bp, Homo sapien
ggtttcgctccaatttcagaggcag

SEQ ID NO: 1179172 - DNA, 25 bp, Homo sapien
taatctacatagtacactccgtgtg

SEQ ID NO: 1179173 - DNA, 25 bp, Homo sapien
tctgaaggcagtactggtaaggtgt

SEQ ID NO: 1179174 - DNA, 25 bp, Homo sapien
tggtcacgagtaaggatacgagtcc

SEQ ID NO: 1179175 - DNA, 25 bp, Homo sapien
aatgaaggctggtcacgagtaagga

SEQ ID NO: 1179176 - DNA, 25 bp, Homo sapien
cgagtaaggatacgagtcctcaggg

SEQ ID NO: 1179177 - DNA, 25 bp, Homo sapien
ccaaaataacagagaatgaaggctg

SEQ ID NO: 1179178 - DNA, 25 bp, Homo sapien
tcctaattcattgatcagtctcaac

SEQ ID NO: 1179179 - DNA, 25 bp, Homo sapien
gctttttggctggtatacatgagac

SEQ ID NO: 1179180 - DNA, 25 bp, Homo sapien
taattcattgatcagtctcaactgc

SEQ ID NO: 1179181 - DNA, 25 bp, Homo sapien
ggctggtatacatgagaccaaacca

SEQ ID NO: 1179182 - DNA, 25 bp, Homo sapien
tttgaattcactttgtgcgctcata

SEQ ID NO: 1179183 - DNA, 25 bp, Homo sapien
tgtgcgctcatattttcatgtttgt

SEQ ID NO: 1179184 - DNA, 25 bp, Homo sapien
cacttctgaatccagaaatttcctg

SEQ ID NO: 1179185 - DNA, 25 bp, Homo sapien
gtttgtttgtagtggaaagaggtga

SEQ ID NO: 1179186 - DNA, 25 bp, Homo sapien
caaaaagatccatggagcaaactct

SEQ ID NO: 1179187 - DNA, 25 bp, Homo sapien
ccttccaaaaagatccatggagcaa

SEQ ID NO: 1179188 - DNA, 25 bp, Homo sapien
aagatccatggagcaaactctctct

SEQ ID NO: 1179189 - DNA, 25 bp, Homo sapien
gatccatggagcaaactctctcttc

SEQ ID NO: 1179190 - DNA, 25 bp, Homo sapien
tacaatagtccttgttctgtgcttc

SEQ ID NO: 1179191 - DNA, 25 bp, Homo sapien
acacctgcttctcttatatacaata

SEQ ID NO: 1179192 - DNA, 25 bp, Homo sapien
caatagtccttgttctgtgcttcta

SEQ ID NO: 1179193 - DNA, 25 bp, Homo sapien
tatatacaatagtccttgttctgtg

SEQ ID NO: 1179194 - DNA, 25 bp, Homo sapien
agtagatatattggctccttctctc

SEQ ID NO: 1179195 - DNA, 25 bp, Homo sapien
tcttcttgaaaacagtcattccaca

SEQ ID NO: 1179196 - DNA, 25 bp, Homo sapien
tgaaagtagatatattggctccttc

SEQ ID NO: 1179197 - DNA, 25 bp, Homo sapien
tcttgaaaacagtcattccacagca

SEQ ID NO: 1179198 - DNA, 25 bp, Homo sapien
ggaccaggtactgtgcttgttgctg

SEQ ID NO: 1179199 - DNA, 25 bp, Homo sapien
tattgactcctaacagtggaccagg

SEQ ID NO: 1179200 - DNA, 25 bp, Homo sapien
cagagaagaatatgacacggttcta

SEQ ID NO: 1179201 - DNA, 25 bp, Homo sapien
acggttctagacctcaaggcctcaa

SEQ ID NO: 1179202 - DNA, 25 bp, Homo sapien
tcacagcaatcgctttttggccatt

SEQ ID NO: 1179203 - DNA, 25 bp, Homo sapien
cacagcaatcgctttttggccattg

SEQ ID NO: 1179204 - DNA, 25 bp, Homo sapien
caatcacagcaatcgctttttggcc

SEQ ID NO: 1179205 - DNA, 25 bp, Homo sapien
ctccaatcacagcaatcgctttttg

SEQ ID NO: 1179206 - DNA, 25 bp, Homo sapien
agatcttcatccaggcagcacttga

SEQ ID NO: 1179207 - DNA, 25 bp, Homo sapien
aatttccagagatgtccaatatcat

SEQ ID NO: 1179208 - DNA, 25 bp, Homo sapien
ttgatggcccccagtccgctaattc

SEQ ID NO: 1179209 - DNA, 25 bp, Homo sapien
cagagatgtccaatatcatcatttc

SEQ ID NO: 1179210 - DNA, 25 bp, Homo sapien
gagggtctatctgaatgctgcttgg

SEQ ID NO: 1179211 - DNA, 25 bp, Homo sapien
caggttggagggtctatctgaatgc

SEQ ID NO: 1179212 - DNA, 25 bp, Homo sapien
gctctagtggcacctgaggaaagtc

SEQ ID NO: 1179213 - DNA, 25 bp, Homo sapien
ttgctctagtggcacctgaggaaag

SEQ ID NO: 1179214 - DNA, 25 bp, Homo sapien
taaaacgaatgtaattcaggaggcc

SEQ ID NO: 1179215 - DNA, 25 bp, Homo sapien
catcccgaagtagtccatgagtttg

SEQ ID NO: 1179216 - DNA, 25 bp, Homo sapien
aaagtgtgtggcatacatcccgaag

SEQ ID NO: 1179217 - DNA, 25 bp, Homo sapien
tccttggaagtattgatggtcacag

SEQ ID NO: 1179218 - DNA, 25 bp, Homo sapien
acagtcctcaggtttaatccctcct

SEQ ID NO: 1179219 - DNA, 25 bp, Homo sapien
tgatacactatcacagtcctcaggt

SEQ ID NO: 1179220 - DNA, 25 bp, Homo sapien
gatgatacactatcacagtcctcag

SEQ ID NO: 1179221 - DNA, 25 bp, Homo sapien
caagatgatacactatcacagtcct

SEQ ID NO: 1179222 - DNA, 25 bp, Homo sapien
tagggatctgtgtggtgtccactgc

SEQ ID NO: 1179223 - DNA, 25 bp, Homo sapien
actgaagtggtaagtagggatctgt

SEQ ID NO: 1179224 - DNA, 25 bp, Homo sapien
catcaaagaccaaagtctcttgttt

SEQ ID NO: 1179225 - DNA, 25 bp, Homo sapien
actgcaaactaagaccccatcaaag

SEQ ID NO: 1179226 - DNA, 25 bp, Homo sapien
tctaccaaacagattcttagcgaca

SEQ ID NO: 1179227 - DNA, 25 bp, Homo sapien
accaaacagattcttagcgacatac

SEQ ID NO: 1179228 - DNA, 25 bp, Homo sapien
taccaaacagattcttagcgacata

SEQ ID NO: 1179229 - DNA, 25 bp, Homo sapien
ttctaccaaacagattcttagcgac

SEQ ID NO: 1179230 - DNA, 25 bp, Homo sapien
gtggaagaacatttcttattattag

SEQ ID NO: 1179231 - DNA, 25 bp, Homo sapien
tggaagaacatttcttattattagg

SEQ ID NO: 1179232 - DNA, 25 bp, Homo sapien
ggacttttgtattcccgactatgga

SEQ ID NO: 1179233 - DNA, 25 bp, Homo sapien
tttgctacacgactgagctccaccg

SEQ ID NO: 1179234 - DNA, 25 bp, Homo sapien
gccgatcactatgattcttttccct

SEQ ID NO: 1179235 - DNA, 25 bp, Homo sapien
tccagaatttccaatgccgatcact

SEQ ID NO: 1179236 - DNA, 25 bp, Homo sapien
ttgaattctatttcaggactaaggc

SEQ ID NO: 1179237 - DNA, 25 bp, Homo sapien
gaattctatttcaggactaaggcac

SEQ ID NO: 1179238 - DNA, 25 bp, Homo sapien
attctatttcaggactaaggcactg

SEQ ID NO: 1179239 - DNA, 25 bp, Homo sapien
ctatttgaattctatttcaggacta

SEQ ID NO: 1179240 - DNA, 25 bp, Homo sapien
gataaaggctgcatctatgacaaca

SEQ ID NO: 1179241 - DNA, 25 bp, Homo sapien
tccctggacattgacatagctatgc

SEQ ID NO: 1179242 - DNA, 25 bp, Homo sapien
gcttgaccagagctgcccactgatt

SEQ ID NO: 1179243 - DNA, 25 bp, Homo sapien
cagtggtcgccatgctgtgcttgac

SEQ ID NO: 1179244 - DNA, 25 bp, Homo sapien
gatacccattatcccaaacacggtg

SEQ ID NO: 1179245 - DNA, 25 bp, Homo sapien
tgtaaaatccatgatccacgtctag

SEQ ID NO: 1179246 - DNA, 25 bp, Homo sapien
ctattgaaccgagtgaaaaatgaac

SEQ ID NO: 1179247 - DNA, 25 bp, Homo sapien
ggccacagtgcgcatgattaaatct

SEQ ID NO: 1179248 - DNA, 25 bp, Homo sapien
cttggaggttcctgaagctgttctc

SEQ ID NO: 1179249 - DNA, 25 bp, Homo sapien
ggttcctgaagctgttctccagaca

SEQ ID NO: 1179250 - DNA, 25 bp, Homo sapien
ttggaggttcctgaagctgttctcc

SEQ ID NO: 1179251 - DNA, 25 bp, Homo sapien
ctgaagctgttctccagacacttgt

SEQ ID NO: 1179252 - DNA, 25 bp, Homo sapien
agttctttccaagatctgccactct

SEQ ID NO: 1179253 - DNA, 25 bp, Homo sapien
agatctgccactctcccattctcat

SEQ ID NO: 1179254 - DNA, 25 bp, Homo sapien
agtcttacattgtcttgaaaacttg

SEQ ID NO: 1179255 - DNA, 25 bp, Homo sapien
tgaaaacttgtgtatattttgattc

SEQ ID NO: 1179256 - DNA, 25 bp, Homo sapien
ctagtcttacattgtcttgaaaact

SEQ ID NO: 1179257 - DNA, 25 bp, Homo sapien
tagtcttacattgtcttgaaaactt

SEQ ID NO: 1179258 - DNA, 25 bp, Homo sapien
tcgtgtagcccaacgagattggagc

SEQ ID NO: 1179259 - DNA, 25 bp, Homo sapien
gatgcccagtggttggataagaccg

SEQ ID NO: 1179260 - DNA, 25 bp, Homo sapien
tccaggtcaggagggaacataagct

SEQ ID NO: 1179261 - DNA, 25 bp, Homo sapien
gataagaccgatgacagccaaggtt

SEQ ID NO: 1179262 - DNA, 25 bp, Homo sapien
ttcctctgggcaatatctgccatca

SEQ ID NO: 1179263 - DNA, 25 bp, Homo sapien
gcaatatctgccatcatgttctccg

SEQ ID NO: 1179264 - DNA, 25 bp, Homo sapien
ccatcatgttctccgctgagggtaa

SEQ ID NO: 1179265 - DNA, 25 bp, Homo sapien
tccgctgagggtaatttgatcagcc

SEQ ID NO: 1179266 - DNA, 25 bp, Homo sapien
ctgaaacaaaagggaagaatgtaga

SEQ ID NO: 1179267 - DNA, 25 bp, Homo sapien
tgaaacaaaagggaagaatgtagaa

SEQ ID NO: 1179268 - DNA, 25 bp, Homo sapien
catgtactcaatgtgatccacttgg

SEQ ID NO: 1179269 - DNA, 25 bp, Homo sapien
caggttgggtttcacccctgctggc

SEQ ID NO: 1179270 - DNA, 25 bp, Homo sapien
ggcatggcaatctcatccatgtact

SEQ ID NO: 1179271 - DNA, 25 bp, Homo sapien
cacttggattgtgtggcggggtgtc

SEQ ID NO: 1179272 - DNA, 25 bp, Homo sapien
catggaggtggtactggtatggggt

SEQ ID NO: 1179273 - DNA, 25 bp, Homo sapien
tcccatttctcgggcccatggaggt

SEQ ID NO: 1179274 - DNA, 25 bp, Homo sapien
gtcaggttagctctccgggccccat

SEQ ID NO: 1179275 - DNA, 25 bp, Homo sapien
aatgcgagtcctcaggggcttgatg

SEQ ID NO: 1179276 - DNA, 25 bp, Homo sapien
ccatttaccgtaaggagtatatcga

SEQ ID NO: 1179277 - DNA, 25 bp, Homo sapien
ccttatggcagttatagtagtacta

SEQ ID NO: 1179278 - DNA, 25 bp, Homo sapien
tatatcgaaagtatgccaagccagc

SEQ ID NO: 1179279 - DNA, 25 bp, Homo sapien
gatataacgatcaggatgagtagaa

SEQ ID NO: 1179280 - DNA, 25 bp, Homo sapien
ggaggatttcacatagtcagtcggg

SEQ ID NO: 1179281 - DNA, 25 bp, Homo sapien
tagggacaggatcacctcaaaagcc

SEQ ID NO: 1179282 - DNA, 25 bp, Homo sapien
aagccaggcaaagttaccatgtcag

SEQ ID NO: 1179283 - DNA, 25 bp, Homo sapien
gccagcatgccgttgagtttgttac

SEQ ID NO: 1179284 - DNA, 25 bp, Homo sapien
tctcgaagggtactgtctgtcctgg

SEQ ID NO: 1179285 - DNA, 25 bp, Homo sapien
gaagtgtcggtgcagggaaattctc

SEQ ID NO: 1179286 - DNA, 25 bp, Homo sapien
gaaattctcgaagggtactgtctgt

SEQ ID NO: 1179287 - DNA, 25 bp, Homo sapien
tgcagggaaattctcgaagggtact

SEQ ID NO: 1179288 - DNA, 25 bp, Homo sapien
gatgagttattcttgtacatgaaaa

SEQ ID NO: 1179289 - DNA, 25 bp, Homo sapien
gaatcctggacagttttcaactgta

SEQ ID NO: 1179290 - DNA, 25 bp, Homo sapien
ctgaaacaatggtctccttgatgag

SEQ ID NO: 1179291 - DNA, 25 bp, Homo sapien
ataagtccaaccacatgaatcctgg

SEQ ID NO: 1179292 - DNA, 25 bp, Homo sapien
actgtgaccaccagtagacagggtg

SEQ ID NO: 1179293 - DNA, 25 bp, Homo sapien
ctgtgaccaccagtagacagggtgc

SEQ ID NO: 1179294 - DNA, 25 bp, Homo sapien
tactgaaatttcaggatatattgtt

SEQ ID NO: 1179295 - DNA, 25 bp, Homo sapien
tttactgaaatttcaggatatattg

SEQ ID NO: 1179296 - DNA, 25 bp, Homo sapien
tcccaaagcttttactgaaatttca

SEQ ID NO: 1179297 - DNA, 25 bp, Homo sapien
cttttactgaaatttcaggatatat

SEQ ID NO: 1179298 - DNA, 25 bp, Homo sapien
gtgaagtatacttgtggtcctccat

SEQ ID NO: 1179299 - DNA, 25 bp, Homo sapien
gtgtgaagtatacttgtggtcctcc

SEQ ID NO: 1179300 - DNA, 25 bp, Homo sapien
gggtgtgaagtatacttgtggtcct

SEQ ID NO: 1179301 - DNA, 25 bp, Homo sapien
tgtgaagtatacttgtggtcctcca

SEQ ID NO: 1179302 - DNA, 25 bp, Homo sapien
tgcatttttttttctcatgcaaggt

SEQ ID NO: 1179303 - DNA, 25 bp, Homo sapien
ctgcatttttttttctcatgcaagg

SEQ ID NO: 1179304 - DNA, 25 bp, Homo sapien
cctccaagcagctcttaatggcatc

SEQ ID NO: 1179305 - DNA, 25 bp, Homo sapien
taatggcatctaatccgctgacccc

SEQ ID NO: 1179306 - DNA, 25 bp, Homo sapien
tcgtatctccacagtcctccaatct

SEQ ID NO: 1179307 - DNA, 25 bp, Homo sapien
tcaaaacatacaggctcgagtccct

SEQ ID NO: 1179308 - DNA, 25 bp, Homo sapien
catagatttgtatatcccaggcctt

SEQ ID NO: 1179309 - DNA, 25 bp, Homo sapien
tgtcgtctcctttgaagcgttgaag

SEQ ID NO: 1179310 - DNA, 25 bp, Homo sapien
gtagtcgctgaaggctgtcgtctcc

SEQ ID NO: 1179311 - DNA, 25 bp, Homo sapien
gaaagtgcctggtgtacatcctgag

SEQ ID NO: 1179312 - DNA, 25 bp, Homo sapien
caagctttgccttcaacaatctgta

SEQ ID NO: 1179313 - DNA, 25 bp, Homo sapien
cttcaacaatctgtaggtgatgagc

SEQ ID NO: 1179314 - DNA, 25 bp, Homo sapien
aacaatctgtaggtgatgagcatac

SEQ ID NO: 1179315 - DNA, 25 bp, Homo sapien
tgccttcaacaatctgtaggtgatg

SEQ ID NO: 1179316 - DNA, 25 bp, Homo sapien
aatgcaaattgaaaatacgccttag

SEQ ID NO: 1179317 - DNA, 25 bp, Homo sapien
gaaaatacgccttagctttctctgg

SEQ ID NO: 1179318 - DNA, 25 bp, Homo sapien
gaattgtaatggaaaatgcaaattg

SEQ ID NO: 1179319 - DNA, 25 bp, Homo sapien
tacgccttagctttctctggcttac

SEQ ID NO: 1179320 - DNA, 25 bp, Homo sapien
ggtttctaccacaacatcccactgg

SEQ ID NO: 1179321 - DNA, 25 bp, Homo sapien
tgcaagtcatgatcccatcaaagac

SEQ ID NO: 1179322 - DNA, 25 bp, Homo sapien
gcttcctcactctgcacacctttga

SEQ ID NO: 1179323 - DNA, 25 bp, Homo sapien
atcccactggccagaggatgaaaaa

SEQ ID NO: 1179324 - DNA, 25 bp, Homo sapien
tccccacaaaatagtcgagatgctt

SEQ ID NO: 1179325 - DNA, 25 bp, Homo sapien
caaaatagtcgagatgcttgtatgc

SEQ ID NO: 1179326 - DNA, 25 bp, Homo sapien
cccacaaaatagtcgagatgcttgt

SEQ ID NO: 1179327 - DNA, 25 bp, Homo sapien
cttccccacaaaatagtcgagatgc

SEQ ID NO: 1179328 - DNA, 25 bp, Homo sapien
gctccagaatcctcaatgctgacca

SEQ ID NO: 1179329 - DNA, 25 bp, Homo sapien
aacatgactgatctcgccagccaca

SEQ ID NO: 1179330 - DNA, 25 bp, Homo sapien
cagcaacatgactgatctcgccagc

SEQ ID NO: 1179331 - DNA, 25 bp, Homo sapien
agaatcctcaatgctgaccacaacc

SEQ ID NO: 1179332 - DNA, 25 bp, Homo sapien
catgcaccttgtcttgtactgagga

SEQ ID NO: 1179333 - DNA, 25 bp, Homo sapien
tacccatctgttgatcatgaatgtg

SEQ ID NO: 1179334 - DNA, 25 bp, Homo sapien
tataatgagtgaagagtgtgatatc

SEQ ID NO: 1179335 - DNA, 25 bp, Homo sapien
tcccaaacccggttccatatccatg

SEQ ID NO: 1179336 - DNA, 25 bp, Homo sapien
gcaaagagtgtaacatcaagaaggg

SEQ ID NO: 1179337 - DNA, 25 bp, Homo sapien
caaagagtgtaacatcaagaaggga

SEQ ID NO: 1179338 - DNA, 25 bp, Homo sapien
taacatcaagaagggagtataaatt

SEQ ID NO: 1179339 - DNA, 25 bp, Homo sapien
gagtgtaacatcaagaagggagtat

SEQ ID NO: 1179340 - DNA, 25 bp, Homo sapien
gtctggtttcatcaggactcttcca

SEQ ID NO: 1179341 - DNA, 25 bp, Homo sapien
tggttaggcagatcatcattcacag

SEQ ID NO: 1179342 - DNA, 25 bp, Homo sapien
tgtggttaggcagatcatcattcac

SEQ ID NO: 1179343 - DNA, 25 bp, Homo sapien
tggtttcatcaggactcttccagaa

SEQ ID NO: 1179344 - DNA, 25 bp, Homo sapien
taggttagtgttggcttctccagct

SEQ ID NO: 1179345 - DNA, 25 bp, Homo sapien
gctgatgttgtggtgaactctctca

SEQ ID NO: 1179346 - DNA, 25 bp, Homo sapien
tcatcctccaagaaagggaaagaca

SEQ ID NO: 1179347 - DNA, 25 bp, Homo sapien
taaacacggagtactggctgtccag

SEQ ID NO: 1179348 - DNA, 25 bp, Homo sapien
tcggctctggagttctgaaatggga

SEQ ID NO: 1179349 - DNA, 25 bp, Homo sapien
cctcgaatacttgcacagcgcatcg

SEQ ID NO: 1179350 - DNA, 25 bp, Homo sapien
gaatacttgcacagcgcatcggctc

SEQ ID NO: 1179351 - DNA, 25 bp, Homo sapien
tgcacagcgcatcggctctggagtt

SEQ ID NO: 1179352 - DNA, 25 bp, Homo sapien
ggcacttgatgtgtatctcttgggc

SEQ ID NO: 1179353 - DNA, 25 bp, Homo sapien
atggcacttgatgtgtatctcttgg

SEQ ID NO: 1179354 - DNA, 25 bp, Homo sapien
tggcacttgatgtgtatctcttggg

SEQ ID NO: 1179355 - DNA, 25 bp, Homo sapien
gcacttgatgtgtatctcttgggct

SEQ ID NO: 1179356 - DNA, 25 bp, Homo sapien
ttgactctaattcagatgcaatttc

SEQ ID NO: 1179357 - DNA, 25 bp, Homo sapien
ctttgtgtagatagctttgtcttgc

SEQ ID NO: 1179358 - DNA, 25 bp, Homo sapien
agtttagagtcctgactcttgagat

SEQ ID NO: 1179359 - DNA, 25 bp, Homo sapien
gagatatctgtactatgacctggct

SEQ ID NO: 1179360 - DNA, 25 bp, Homo sapien
tgacctggctttgtgtagatagctt

SEQ ID NO: 1179361 - DNA, 25 bp, Homo sapien
tacagccacatagacgtatttcctg

SEQ ID NO: 1179362 - DNA, 25 bp, Homo sapien
gcattacagccacatagacgtattt

SEQ ID NO: 1179363 - DNA, 25 bp, Homo sapien
tgcagcattacagccacatagacgt

SEQ ID NO: 1179364 - DNA, 25 bp, Homo sapien
ccacatagacgtatttcctgattga

SEQ ID NO: 1179365 - DNA, 25 bp, Homo sapien
tgtatggtgaacagtgaacagtgca

SEQ ID NO: 1179366 - DNA, 25 bp, Homo sapien
gtatggtgaacagtgaacagtgcag

SEQ ID NO: 1179367 - DNA, 25 bp, Homo sapien
ttactcttatcctgagttgtgtggg

SEQ ID NO: 1179368 - DNA, 25 bp, Homo sapien
caatgactggctgttgttgttactc

SEQ ID NO: 1179369 - DNA, 25 bp, Homo sapien
ggtcgaagccactccaacggttgtc

SEQ ID NO: 1179370 - DNA, 25 bp, Homo sapien
tgcagagatgcaagggcaccccttg

SEQ ID NO: 1179371 - DNA, 25 bp, Homo sapien
gaagaagttatgtcatttactttat

SEQ ID NO: 1179372 - DNA, 25 bp, Homo sapien
tcatttactttatgtagaagccaca

SEQ ID NO: 1179373 - DNA, 25 bp, Homo sapien
catttactttatgtagaagccacat

SEQ ID NO: 1179374 - DNA, 25 bp, Homo sapien
cttgaagaagttatgtcatttactt

SEQ ID NO: 1179375 - DNA, 25 bp, Homo sapien
ttcacaactttaccctcctctgaaa

SEQ ID NO: 1179376 - DNA, 25 bp, Homo sapien
caatagcactgccaatgtggaaaat

SEQ ID NO: 1179377 - DNA, 25 bp, Homo sapien
tgataggactgtgatgcaatttgtt

SEQ ID NO: 1179378 - DNA, 25 bp, Homo sapien
aaggattttgataggactgtgatgc

SEQ ID NO: 1179379 - DNA, 25 bp, Homo sapien
actcagcactggtctgacgacctgc

SEQ ID NO: 1179380 - DNA, 25 bp, Homo sapien
tggccagaacggtgagtcccaccac

SEQ ID NO: 1179381 - DNA, 25 bp, Homo sapien
aactctgggaatgtgagccacagct

SEQ ID NO: 1179382 - DNA, 25 bp, Homo sapien
taattcactgacaacgtagggctgt

SEQ ID NO: 1179383 - DNA, 25 bp, Homo sapien
gtgttcactctgtgatgccaatggc

SEQ ID NO: 1179384 - DNA, 25 bp, Homo sapien
gggcccctgcactggatacagtgac

SEQ ID NO: 1179385 - DNA, 25 bp, Homo sapien
cgatttctcattttgctgttgccag

SEQ ID NO: 1179386 - DNA, 25 bp, Homo sapien
tgttgccagctctcatttgctgaga

SEQ ID NO: 1179387 - DNA, 25 bp, Homo sapien
gagcaagcttcaaaatgttcagttt

SEQ ID NO: 1179388 - DNA, 25 bp, Homo sapien
ggagcaagcttcaaaatgttcagtt

SEQ ID NO: 1179389 - DNA, 25 bp, Homo sapien
gcaagcttcaaaatgttcagtttgc

SEQ ID NO: 1179390 - DNA, 25 bp, Homo sapien
caggagcaagcttcaaaatgttcag

SEQ ID NO: 1179391 - DNA, 25 bp, Homo sapien
atgcagaaatgtcccacatgcccac

SEQ ID NO: 1179392 - DNA, 25 bp, Homo sapien
ccaaatgcagaaatgtcccacatgc

SEQ ID NO: 1179393 - DNA, 25 bp, Homo sapien
aaatgcagaaatgtcccacatgccc

SEQ ID NO: 1179394 - DNA, 25 bp, Homo sapien
aatgcagaaatgtcccacatgccca

SEQ ID NO: 1179395 - DNA, 25 bp, Homo sapien
gggaagcagctttatgccaagtgct

SEQ ID NO: 1179396 - DNA, 25 bp, Homo sapien
gccaagtgctatacaattcatctaa

SEQ ID NO: 1179397 - DNA, 25 bp, Homo sapien
gcagctttatgccaagtgctataca

SEQ ID NO: 1179398 - DNA, 25 bp, Homo sapien
ctaaagatctgtattgaacatcttg

SEQ ID NO: 1179399 - DNA, 25 bp, Homo sapien
tgaagaatggtgttctgacgcgtgc

SEQ ID NO: 1179400 - DNA, 25 bp, Homo sapien
tctgacgcgtgcatggtctttgcat

SEQ ID NO: 1179401 - DNA, 25 bp, Homo sapien
ctctgcaatgaatctttttgcatgg

SEQ ID NO: 1179402 - DNA, 25 bp, Homo sapien
gcaatgaatctttttgcatggtgct

SEQ ID NO: 1179403 - DNA, 25 bp, Homo sapien
tcttttgtttcagaagatcaattgc

SEQ ID NO: 1179404 - DNA, 25 bp, Homo sapien
cttttgtttcagaagatcaattgct

SEQ ID NO: 1179405 - DNA, 25 bp, Homo sapien
ggtcttttgtttcagaagatcaatt

SEQ ID NO: 1179406 - DNA, 25 bp, Homo sapien
ttttgtttcagaagatcaattgctc

SEQ ID NO: 1179407 - DNA, 25 bp, Homo sapien
ccagacagcgcttagtggcagccag

SEQ ID NO: 1179408 - DNA, 25 bp, Homo sapien
gacagcgcttagtggcagccagtcc

SEQ ID NO: 1179409 - DNA, 25 bp, Homo sapien
gaccccaactccaatctctgcaatg

SEQ ID NO: 1179410 - DNA, 25 bp, Homo sapien
ttcagattcctccaatgctactttt

SEQ ID NO: 1179411 - DNA, 25 bp, Homo sapien
catatccatgcactctaccttgtgc

SEQ ID NO: 1179412 - DNA, 25 bp, Homo sapien
tccatgcactctaccttgtgctaag

SEQ ID NO: 1179413 - DNA, 25 bp, Homo sapien
catgcactctaccttgtgctaagga

SEQ ID NO: 1179414 - DNA, 25 bp, Homo sapien
tccatatccatgcactctaccttgt

SEQ ID NO: 1179415 - DNA, 25 bp, Homo sapien
taacagtaacctgatgggtgagaaa

SEQ ID NO: 1179416 - DNA, 25 bp, Homo sapien
tcatcactaacagtaacctgatggg

SEQ ID NO: 1179417 - DNA, 25 bp, Homo sapien
acattcagttttaccggcactcttc

SEQ ID NO: 1179418 - DNA, 25 bp, Homo sapien
ggcactcttctagaaattatgtggt

SEQ ID NO: 1179419 - DNA, 25 bp, Homo sapien
taaatacaggtacagcccattggtt

SEQ ID NO: 1179420 - DNA, 25 bp, Homo sapien
tttaaatacaggtacagcccattgg

SEQ ID NO: 1179421 - DNA, 25 bp, Homo sapien
caggtacagcccattggttctgaag

SEQ ID NO: 1179422 - DNA, 25 bp, Homo sapien
aatacaggtacagcccattggttct

SEQ ID NO: 1179423 - DNA, 25 bp, Homo sapien
tcctccaagtcagagggaatgaggg

SEQ ID NO: 1179424 - DNA, 25 bp, Homo sapien
ctccaagtcagagggaatgagggtt

SEQ ID NO: 1179425 - DNA, 25 bp, Homo sapien
tccaagtcagagggaatgagggttg

SEQ ID NO: 1179426 - DNA, 25 bp, Homo sapien
ttcctccaagtcagagggaatgagg

SEQ ID NO: 1179427 - DNA, 25 bp, Homo sapien
agagaacaggttgggcttcactcct

SEQ ID NO: 1179428 - DNA, 25 bp, Homo sapien
caggttgggcttcactcctattgca

SEQ ID NO: 1179429 - DNA, 25 bp, Homo sapien
tcctattgcagaggcaatttcatcc

SEQ ID NO: 1179430 - DNA, 25 bp, Homo sapien
cactcctattgcagaggcaatttca

SEQ ID NO: 1179431 - DNA, 25 bp, Homo sapien
agtactgatatggggagcatgaacc

SEQ ID NO: 1179432 - DNA, 25 bp, Homo sapien
gggagcatgaaccaaagacaacctc

SEQ ID NO: 1179433 - DNA, 25 bp, Homo sapien
actgatatggggagcatgaaccaaa

SEQ ID NO: 1179434 - DNA, 25 bp, Homo sapien
tggggagcatgaaccaaagacaacc

SEQ ID NO: 1179435 - DNA, 25 bp, Homo sapien
ttcaggatggctttcctggctccat

SEQ ID NO: 1179436 - DNA, 25 bp, Homo sapien
tcaggatggctttcctggctccatc

SEQ ID NO: 1179437 - DNA, 25 bp, Homo sapien
caatctataccacttttggcctata

SEQ ID NO: 1179438 - DNA, 25 bp, Homo sapien
ctttaaccaatctataccacttttg

SEQ ID NO: 1179439 - DNA, 25 bp, Homo sapien
ttggcctatattgtcgagaattatc

SEQ ID NO: 1179440 - DNA, 25 bp, Homo sapien
acttttggcctatattgtcgagaat

SEQ ID NO: 1179441 - DNA, 25 bp, Homo sapien
gccagttctgcatgagccgttgatc

SEQ ID NO: 1179442 - DNA, 25 bp, Homo sapien
tgagggtcgcatttgaacaggagct

SEQ ID NO: 1179443 - DNA, 25 bp, Homo sapien
gggttcatgtcgtatccaaccatgg

SEQ ID NO: 1179444 - DNA, 25 bp, Homo sapien
tcttgatctcggcaaaaagctggta

SEQ ID NO: 1179445 - DNA, 25 bp, Homo sapien
tccgagtatttgaccccgacgtcca

SEQ ID NO: 1179446 - DNA, 25 bp, Homo sapien
gttgtcgcgcccgactggcaggcac

SEQ ID NO: 1179447 - DNA, 25 bp, Homo sapien
ctaagttgtcgcgcccgactggcag

SEQ ID NO: 1179448 - DNA, 25 bp, Homo sapien
tctccgagtatttgaccccgacgtc

SEQ ID NO: 1179449 - DNA, 25 bp, Homo sapien
cctggctggagcgtttgtttgcacc

SEQ ID NO: 1179450 - DNA, 25 bp, Homo sapien
gctggagcgtttgtttgcacccatc

SEQ ID NO: 1179451 - DNA, 25 bp, Homo sapien
gccccctggctggagcgtttgtttg

SEQ ID NO: 1179452 - DNA, 25 bp, Homo sapien
tggctggagcgtttgtttgcaccca

SEQ ID NO: 1179453 - DNA, 25 bp, Homo sapien
ccttgagggcagtacttgggatagt

SEQ ID NO: 1179454 - DNA, 25 bp, Homo sapien
tgtggttggcactctgcgtgtcacc

SEQ ID NO: 1179455 - DNA, 25 bp, Homo sapien
ggctcccagtttggtgttgtagatg

SEQ ID NO: 1179456 - DNA, 25 bp, Homo sapien
ggccaaagccctggacgctgtggtt

SEQ ID NO: 1179457 - DNA, 25 bp, Homo sapien
gcaacgacccccacttcacattcat

SEQ ID NO: 1179458 - DNA, 25 bp, Homo sapien
cagcctgaatgtgccctggcaacga

SEQ ID NO: 1179459 - DNA, 25 bp, Homo sapien
tcctcccaagcccggtgtctcagtc

SEQ ID NO: 1179460 - DNA, 25 bp, Homo sapien
tcacattcatccagatacagccttg

SEQ ID NO: 1179461 - DNA, 25 bp, Homo sapien
aatttagtcccaggttgtcttgttg

SEQ ID NO: 1179462 - DNA, 25 bp, Homo sapien
tcccaggttgtcttgttgtcttccc

SEQ ID NO: 1179463 - DNA, 25 bp, Homo sapien
ttagtcccaggttgtcttgttgtct

SEQ ID NO: 1179464 - DNA, 25 bp, Homo sapien
agtcccaggttgtcttgttgtcttc

SEQ ID NO: 1179465 - DNA, 25 bp, Homo sapien
caggccttatgcaacacaggtagtt

SEQ ID NO: 1179466 - DNA, 25 bp, Homo sapien
gcaacacaggtagttttacagtcaa

SEQ ID NO: 1179467 - DNA, 25 bp, Homo sapien
tatccaggccttatgcaacacaggt

SEQ ID NO: 1179468 - DNA, 25 bp, Homo sapien
cttccatgcctatccaggccttatg

SEQ ID NO: 1179469 - DNA, 25 bp, Homo sapien
ttccatgggagatgaagaagcctct

SEQ ID NO: 1179470 - DNA, 25 bp, Homo sapien
gaactgctttgtgcaccgctgacca

SEQ ID NO: 1179471 - DNA, 25 bp, Homo sapien
gccagtgcacttgcttccatgggag

SEQ ID NO: 1179472 - DNA, 25 bp, Homo sapien
tcagctctgttatgtttgccctgat

SEQ ID NO: 1179473 - DNA, 25 bp, Homo sapien
aatcaatccgtgaaccaagcctgag

SEQ ID NO: 1179474 - DNA, 25 bp, Homo sapien
tggttgattatagggcccctgagga

SEQ ID NO: 1179475 - DNA, 25 bp, Homo sapien
tcagcttgtaccaacatatcaaggc

SEQ ID NO: 1179476 - DNA, 25 bp, Homo sapien
tctccattggttgattatagggccc

SEQ ID NO: 1179477 - DNA, 25 bp, Homo sapien
tctctggagcgtctcttcaatcttt

SEQ ID NO: 1179478 - DNA, 25 bp, Homo sapien
tctctctggagcgtctcttcaatct

SEQ ID NO: 1179479 - DNA, 25 bp, Homo sapien
acagcaagcctgagtgacgatggca

SEQ ID NO: 1179480 - DNA, 25 bp, Homo sapien
cctgagtgacgatggcacgttctct

SEQ ID NO: 1179481 - DNA, 25 bp, Homo sapien
cactgttgtttttcattcgtgctat

SEQ ID NO: 1179482 - DNA, 25 bp, Homo sapien
tagccacactgttgtttttcattcg

SEQ ID NO: 1179483 - DNA, 25 bp, Homo sapien
gttgtttttcattcgtgctatttac

SEQ ID NO: 1179484 - DNA, 25 bp, Homo sapien
gccacactgttgtttttcattcgtg

SEQ ID NO: 1179485 - DNA, 25 bp, Homo sapien
gggcccacatacgtctgttcctcgg

SEQ ID NO: 1179486 - DNA, 25 bp, Homo sapien
ggtcaatatagccacgggcccacat

SEQ ID NO: 1179487 - DNA, 25 bp, Homo sapien
gggaccgctgtagactgaagtaata

SEQ ID NO: 1179488 - DNA, 25 bp, Homo sapien
tctaactgtagtgttccctggtgaa

SEQ ID NO: 1179489 - DNA, 25 bp, Homo sapien
aacccaagaccgtagaagatctaat

SEQ ID NO: 1179490 - DNA, 25 bp, Homo sapien
tgcaatcacggtgacaacccaagac

SEQ ID NO: 1179491 - DNA, 25 bp, Homo sapien
gtgacaacccaagaccgtagaagat

SEQ ID NO: 1179492 - DNA, 25 bp, Homo sapien
ttggaagtgcaatcacggtgacaac

SEQ ID NO: 1179493 - DNA, 25 bp, Homo sapien
ggtcactgtgcactgtgctcttaac

SEQ ID NO: 1179494 - DNA, 25 bp, Homo sapien
tcttaacacgtaaaatgtagcatga

SEQ ID NO: 1179495 - DNA, 25 bp, Homo sapien
ttaacacgtaaaatgtagcatgaca

SEQ ID NO: 1179496 - DNA, 25 bp, Homo sapien
gaggtcactgtgcactgtgctctta

SEQ ID NO: 1179497 - DNA, 25 bp, Homo sapien
ccagaacttcgtcatatacatggag

SEQ ID NO: 1179498 - DNA, 25 bp, Homo sapien
catgtaattccttggatgaagtggg

SEQ ID NO: 1179499 - DNA, 25 bp, Homo sapien
tccaaaggagttgtttactctcagc

SEQ ID NO: 1179500 - DNA, 25 bp, Homo sapien
tgtagctgttgcttaatatcccaag

SEQ ID NO: 1179501 - DNA, 25 bp, Homo sapien
gagtattcgtattctggcagcgggc

SEQ ID NO: 1179502 - DNA, 25 bp, Homo sapien
caatgaaaggctagaccggcaagag

SEQ ID NO: 1179503 - DNA, 25 bp, Homo sapien
tctcgccgtgcttcaggcaatgaaa

SEQ ID NO: 1179504 - DNA, 25 bp, Homo sapien
cagcgggttgcacttgcttggacga

SEQ ID NO: 1179505 - DNA, 25 bp, Homo sapien
taaccgagcgtagcgtgggcgcaca

SEQ ID NO: 1179506 - DNA, 25 bp, Homo sapien
agcgtagcgtgggcgcacagttcca

SEQ ID NO: 1179507 - DNA, 25 bp, Homo sapien
ttaaccgagcgtagcgtgggcgcac

SEQ ID NO: 1179508 - DNA, 25 bp, Homo sapien
tagcgtgggcgcacagttccatgtg

SEQ ID NO: 1179509 - DNA, 25 bp, Homo sapien
ctcgggagggagcggggaggacacg

SEQ ID NO: 1179510 - DNA, 25 bp, Homo sapien
agcgccatcctttccgcctctccgt

SEQ ID NO: 1179511 - DNA, 25 bp, Homo sapien
tcacagcgccatcctttccgcctct

SEQ ID NO: 1179512 - DNA, 25 bp, Homo sapien
ctccgtcctcccgtgcgcgcggccc

SEQ ID NO: 1179513 - DNA, 25 bp, Homo sapien
cggctgtcacagcgccatcctttcc

SEQ ID NO: 1179514 - DNA, 25 bp, Homo sapien
cggcgggcccgcaacaaaggcggcg

SEQ ID NO: 1179515 - DNA, 25 bp, Homo sapien
tcctgccctctatgggcgcgggcaa

SEQ ID NO: 1179516 - DNA, 25 bp, Homo sapien
gggctgcaaattctctattcgctga

SEQ ID NO: 1179517 - DNA, 25 bp, Homo sapien
tccctctggagttcaaagtcggttc

SEQ ID NO: 1179518 - DNA, 25 bp, Homo sapien
tattcgctgactcttggccagtaca

SEQ ID NO: 1179519 - DNA, 25 bp, Homo sapien
gggactttgcaaacgcaggagtcag

SEQ ID NO: 1179520 - DNA, 25 bp, Homo sapien
gtccacgagctggttcagaaaatag

SEQ ID NO: 1179521 - DNA, 25 bp, Homo sapien
cgcaggagtcagtgaaacatagtga

SEQ ID NO: 1179522 - DNA, 25 bp, Homo sapien
gtcattctaccttaagggactttgc

SEQ ID NO: 1179523 - DNA, 25 bp, Homo sapien
cgtcctctagttcccggctctgaat

SEQ ID NO: 1179524 - DNA, 25 bp, Homo sapien
ccctcagagcagattcgtactttct

SEQ ID NO: 1179525 - DNA, 25 bp, Homo sapien
tactttctgcatgtctgccgggccg

SEQ ID NO: 1179526 - DNA, 25 bp, Homo sapien
caggctcaaattgagagggtaggct

SEQ ID NO: 1179527 - DNA, 25 bp, Homo sapien
tgttcatgtgtaaccttagggcaag

SEQ ID NO: 1179528 - DNA, 25 bp, Homo sapien
agctctcctgtgtcaactgtggtaa

SEQ ID NO: 1179529 - DNA, 25 bp, Homo sapien
catgcctaattaccacgaagtccag

SEQ ID NO: 1179530 - DNA, 25 bp, Homo sapien
tctcctctggtagggaacaatttag

SEQ ID NO: 1179531 - DNA, 25 bp, Homo sapien
ttgactgccttgagttcttgttcca

SEQ ID NO: 1179532 - DNA, 25 bp, Homo sapien
tccaaggctctccatttagatgttc

SEQ ID NO: 1179533 - DNA, 25 bp, Homo sapien
gccctgagttttgactgccttgagt

SEQ ID NO: 1179534 - DNA, 25 bp, Homo sapien
gggttgaccaatctagcctcaaagc

SEQ ID NO: 1179535 - DNA, 25 bp, Homo sapien
ctaagcatggttggtcttcatcttg

SEQ ID NO: 1179536 - DNA, 25 bp, Homo sapien
ttggtcttcatcttgctccttcctc

SEQ ID NO: 1179537 - DNA, 25 bp, Homo sapien
tggttggtcttcatcttgctccttc

SEQ ID NO: 1179538 - DNA, 25 bp, Homo sapien
taagcatggttggtcttcatcttgc

SEQ ID NO: 1179539 - DNA, 25 bp, Homo sapien
agctttcactgatcaccctaacata

SEQ ID NO: 1179540 - DNA, 25 bp, Homo sapien
acattttgggccagttacctctttg

SEQ ID NO: 1179541 - DNA, 25 bp, Homo sapien
ccctaacataattctctataaccaa

SEQ ID NO: 1179542 - DNA, 25 bp, Homo sapien
tcaattctatggaattttatcctaa

SEQ ID NO: 1179543 - DNA, 25 bp, Homo sapien
tttgcttccctaagccgaggacact

SEQ ID NO: 1179544 - DNA, 25 bp, Homo sapien
aaggatccagcaataccgagcacag

SEQ ID NO: 1179545 - DNA, 25 bp, Homo sapien
ggacacttcctgtagctagtagtca

SEQ ID NO: 1179546 - DNA, 25 bp, Homo sapien
ggattcgtcttcaggctttcctcag

SEQ ID NO: 1179547 - DNA, 25 bp, Homo sapien
tatatggccacctcatcaaataggg

SEQ ID NO: 1179548 - DNA, 25 bp, Homo sapien
aattcatcctcatgacttcccggta

SEQ ID NO: 1179549 - DNA, 25 bp, Homo sapien
catgacttcccggtagagggccttt

SEQ ID NO: 1179550 - DNA, 25 bp, Homo sapien
gagggccttttgttgctccgtcaaa

SEQ ID NO: 1179551 - DNA, 25 bp, Homo sapien
ggagacaaaggaaaacacagcttta

SEQ ID NO: 1179552 - DNA, 25 bp, Homo sapien
tcagagcttccaggagacaaaggaa

SEQ ID NO: 1179553 - DNA, 25 bp, Homo sapien
gagacaaaggaaaacacagctttac

SEQ ID NO: 1179554 - DNA, 25 bp, Homo sapien
agcttccaggagacaaaggaaaaca

SEQ ID NO: 1179555 - DNA, 25 bp, Homo sapien
gctgccactcgtcagaattctgaga

SEQ ID NO: 1179556 - DNA, 25 bp, Homo sapien
ccttggagctgccactcgtcagaat

SEQ ID NO: 1179557 - DNA, 25 bp, Homo sapien
catgtctggcttagggaatgggaat

SEQ ID NO: 1179558 - DNA, 25 bp, Homo sapien
ctccccttccaaacgggtgatcatg

SEQ ID NO: 1179559 - DNA, 25 bp, Homo sapien
ccacaatgttcccagctggatggac

SEQ ID NO: 1179560 - DNA, 25 bp, Homo sapien
actgaaaatcccactccacaatgtt

SEQ ID NO: 1179561 - DNA, 25 bp, Homo sapien
ggacgctgaactgctttacttgtag

SEQ ID NO: 1179562 - DNA, 25 bp, Homo sapien
tcccagctggatggacgctgaactg

SEQ ID NO: 1179563 - DNA, 25 bp, Homo sapien
tctcagtcaggtcttccggcaggtg

SEQ ID NO: 1179564 - DNA, 25 bp, Homo sapien
gatggcacctctaaacaaatgggcg

SEQ ID NO: 1179565 - DNA, 25 bp, Homo sapien
tatctgacatattcggccacacgct

SEQ ID NO: 1179566 - DNA, 25 bp, Homo sapien
tgtcatcagccgagaggtcataccc

SEQ ID NO: 1179567 - DNA, 25 bp, Homo sapien
acttccaaccagtcctgcatcaagt

SEQ ID NO: 1179568 - DNA, 25 bp, Homo sapien
ttccaaccagtcctgcatcaagtct

SEQ ID NO: 1179569 - DNA, 25 bp, Homo sapien
ccaaccagtcctgcatcaagtcttc

SEQ ID NO: 1179570 - DNA, 25 bp, Homo sapien
cacttccaaccagtcctgcatcaag

SEQ ID NO: 1179571 - DNA, 25 bp, Homo sapien
gaatctgtggcatggccccggaagc

SEQ ID NO: 1179572 - DNA, 25 bp, Homo sapien
agatcagcatccctcgctgcttggg

SEQ ID NO: 1179573 - DNA, 25 bp, Homo sapien
cccggaagccattcaagatcagcat

SEQ ID NO: 1179574 - DNA, 25 bp, Homo sapien
agcatccctcgctgcttgggcactg

SEQ ID NO: 1179575 - DNA, 25 bp, Homo sapien
catgtcagtgttcatgctttccatg

SEQ ID NO: 1179576 - DNA, 25 bp, Homo sapien
tgttcatgctttccatggagttctt

SEQ ID NO: 1179577 - DNA, 25 bp, Homo sapien
agtgttcatgctttccatggagttc

SEQ ID NO: 1179578 - DNA, 25 bp, Homo sapien
tcatgctttccatggagttcttcac

SEQ ID NO: 1179579 - DNA, 25 bp, Homo sapien
tgaggtcagaccccctgggatgatc

SEQ ID NO: 1179580 - DNA, 25 bp, Homo sapien
ctgtgaggtcagaccccctgggatg

SEQ ID NO: 1179581 - DNA, 25 bp, Homo sapien
aggtcagaccccctgggatgatcac

SEQ ID NO: 1179582 - DNA, 25 bp, Homo sapien
tgtgaggtcagaccccctgggatga

SEQ ID NO: 1179583 - DNA, 25 bp, Homo sapien
tggcttcttagcattcccggttggg

SEQ ID NO: 1179584 - DNA, 25 bp, Homo sapien
ccagttggagtactgggcccgcaca

SEQ ID NO: 1179585 - DNA, 25 bp, Homo sapien
tcttgaacccttggacgatggactc

SEQ ID NO: 1179586 - DNA, 25 bp, Homo sapien
gagatgctattccacgcgaccatga

SEQ ID NO: 1179587 - DNA, 25 bp, Homo sapien
cggtgtcacaatcttttggtggttc

SEQ ID NO: 1179588 - DNA, 25 bp, Homo sapien
ggtgtcacaatcttttggtggttct

SEQ ID NO: 1179589 - DNA, 25 bp, Homo sapien
tactgtagatagctccaggactgag

SEQ ID NO: 1179590 - DNA, 25 bp, Homo sapien
tactgcactgtaggctctaagggaa

SEQ ID NO: 1179591 - DNA, 25 bp, Homo sapien
gaggcccggaggacacacttagtgt

SEQ ID NO: 1179592 - DNA, 25 bp, Homo sapien
acaagtgtttctgggtccaagccac

SEQ ID NO: 1179593 - DNA, 25 bp, Homo sapien
cagacatctgctgactacaggaaat

SEQ ID NO: 1179594 - DNA, 25 bp, Homo sapien
tctgctgactacaggaaattattgt

SEQ ID NO: 1179595 - DNA, 25 bp, Homo sapien
taatgagactaagatgacgttttaa

SEQ ID NO: 1179596 - DNA, 25 bp, Homo sapien
gtcatagcccatgtgaaggtcataa

SEQ ID NO: 1179597 - DNA, 25 bp, Homo sapien
caatgcaggcaatataagggtcagc

SEQ ID NO: 1179598 - DNA, 25 bp, Homo sapien
tccagggatcccagaattacaatgg

SEQ ID NO: 1179599 - DNA, 25 bp, Homo sapien
tagtgttgtctcagttaggcctcca

SEQ ID NO: 1179600 - DNA, 25 bp, Homo sapien
taattagggagatgagaacgaacag

SEQ ID NO: 1179601 - DNA, 25 bp, Homo sapien
agcgcatccacactttcaggaataa

SEQ ID NO: 1179602 - DNA, 25 bp, Homo sapien
tttcctgatgttccctgcgcatcca

SEQ ID NO: 1179603 - DNA, 25 bp, Homo sapien
gcgcatccagcgcatccacactttc

SEQ ID NO: 1179604 - DNA, 25 bp, Homo sapien
tgtcctgggatggatgtacaggctg

SEQ ID NO: 1179605 - DNA, 25 bp, Homo sapien
gagtccctcgttggtgttgaataaa

SEQ ID NO: 1179606 - DNA, 25 bp, Homo sapien
ttgatggacagatggagtaatctcc

SEQ ID NO: 1179607 - DNA, 25 bp, Homo sapien
tggcaccaggccagtatgtcttaat

SEQ ID NO: 1179608 - DNA, 25 bp, Homo sapien
ggacaccagagttgtgcccatatga

SEQ ID NO: 1179609 - DNA, 25 bp, Homo sapien
tgagaccctaaaaaagtctagctgc

SEQ ID NO: 1179610 - DNA, 25 bp, Homo sapien
cagggccattaaatgagaccctaaa

SEQ ID NO: 1179611 - DNA, 25 bp, Homo sapien
aaacagggccattaaatgagaccct

SEQ ID NO: 1179612 - DNA, 25 bp, Homo sapien
agaccctaaaaaagtctagctgcca

SEQ ID NO: 1179613 - DNA, 25 bp, Homo sapien
acagataatttatagcgacttcttc

SEQ ID NO: 1179614 - DNA, 25 bp, Homo sapien
gaaacaagagcttgcatacgaaatc

SEQ ID NO: 1179615 - DNA, 25 bp, Homo sapien
aagagcttgcatacgaaatcctgcc

SEQ ID NO: 1179616 - DNA, 25 bp, Homo sapien
tatagcgacttcttctgcaggcagc

SEQ ID NO: 1179617 - DNA, 25 bp, Homo sapien
cttcttggcagggtaactatggctc

SEQ ID NO: 1179618 - DNA, 25 bp, Homo sapien
caagcatcagatgagtcaatgggcc

SEQ ID NO: 1179619 - DNA, 25 bp, Homo sapien
caaagtagctgggtttagacgccat

SEQ ID NO: 1179620 - DNA, 25 bp, Homo sapien
gaaagttccagtgctatgcaacctg

SEQ ID NO: 1179621 - DNA, 25 bp, Homo sapien
ccaaaggctggttccatctgtaaca

SEQ ID NO: 1179622 - DNA, 25 bp, Homo sapien
gacttgcgggttcatcatactttca

SEQ ID NO: 1179623 - DNA, 25 bp, Homo sapien
cctggtgggaccatagaatgctgga

SEQ ID NO: 1179624 - DNA, 25 bp, Homo sapien
tattggtaccaaaccggatggagaa

SEQ ID NO: 1179625 - DNA, 25 bp, Homo sapien
taatagcgataggtagcccctgaga

SEQ ID NO: 1179626 - DNA, 25 bp, Homo sapien
aaagttcaccgccagcgcttggcag

SEQ ID NO: 1179627 - DNA, 25 bp, Homo sapien
gaaaggatcatcacgaaactctggc

SEQ ID NO: 1179628 - DNA, 25 bp, Homo sapien
ggtgtgggaccctcaccgaattcat

SEQ ID NO: 1179629 - DNA, 25 bp, Homo sapien
tcaaatttcatgtatagcaagcccc

SEQ ID NO: 1179630 - DNA, 25 bp, Homo sapien
gaaggaaagcttatcggttacgaga

SEQ ID NO: 1179631 - DNA, 25 bp, Homo sapien
cgtcagttgtgtcaagaaggaaagc

SEQ ID NO: 1179632 - DNA, 25 bp, Homo sapien
gctccgtggctcttcatgtgaacat

SEQ ID NO: 1179633 - DNA, 25 bp, Homo sapien
tttcaaacagggacaaaccatcttc

SEQ ID NO: 1179634 - DNA, 25 bp, Homo sapien
tctctagagagacatgtctgattta

SEQ ID NO: 1179635 - DNA, 25 bp, Homo sapien
tgtagaggccattgggatctctaga

SEQ ID NO: 1179636 - DNA, 25 bp, Homo sapien
ttatatcagtaagaatgtagaggcc

SEQ ID NO: 1179637 - DNA, 25 bp, Homo sapien
tagtggcatgttgggactagcttta

SEQ ID NO: 1179638 - DNA, 25 bp, Homo sapien
gatggtgctggatctttgccttggc

SEQ ID NO: 1179639 - DNA, 25 bp, Homo sapien
tatttctgtctcctagatggtgctg

SEQ ID NO: 1179640 - DNA, 25 bp, Homo sapien
gataatgactgattgaagtagtggc

SEQ ID NO: 1179641 - DNA, 25 bp, Homo sapien
aactgcctggagactttgctttaga

SEQ ID NO: 1179642 - DNA, 25 bp, Homo sapien
aaacacgaggcccagcactttgatt

SEQ ID NO: 1179643 - DNA, 25 bp, Homo sapien
taccagctaccttagtaaatcccag

SEQ ID NO: 1179644 - DNA, 25 bp, Homo sapien
tgctgtagggtaccaacatccatac

SEQ ID NO: 1179645 - DNA, 25 bp, Homo sapien
gaacattttactatgattatgggtg

SEQ ID NO: 1179646 - DNA, 25 bp, Homo sapien
gtaggaacattttactatgattatg

SEQ ID NO: 1179647 - DNA, 25 bp, Homo sapien
cattttactatgattatgggtgatt

SEQ ID NO: 1179648 - DNA, 25 bp, Homo sapien
aaaatatcaaaattgtaggaacatt

SEQ ID NO: 1179649 - DNA, 25 bp, Homo sapien
attgtacaacaccaacacttcctct

SEQ ID NO: 1179650 - DNA, 25 bp, Homo sapien
ttgaattgtacaacaccaacacttc

SEQ ID NO: 1179651 - DNA, 25 bp, Homo sapien
gaattgtacaacaccaacacttcct

SEQ ID NO: 1179652 - DNA, 25 bp, Homo sapien
aaattgaattgtacaacaccaacac

SEQ ID NO: 1179653 - DNA, 25 bp, Homo sapien
cactatgcattgtacaaatattgct

SEQ ID NO: 1179654 - DNA, 25 bp, Homo sapien
ctatgcattgtacaaatattgctat

SEQ ID NO: 1179655 - DNA, 25 bp, Homo sapien
tgcactatgcattgtacaaatattg

SEQ ID NO: 1179656 - DNA, 25 bp, Homo sapien
attacaagtggttttaatattcatt

SEQ ID NO: 1179657 - DNA, 25 bp, Homo sapien
gctgcagagacatttcgctcgcgcc

SEQ ID NO: 1179658 - DNA, 25 bp, Homo sapien
tcctctagcgaaggcaagcggtgct

SEQ ID NO: 1179659 - DNA, 25 bp, Homo sapien
tctcgcttcgtttctcggacaacag

SEQ ID NO: 1179660 - DNA, 25 bp, Homo sapien
gctttagtgctaagagcagcaccgt

SEQ ID NO: 1179661 - DNA, 25 bp, Homo sapien
gataccaaattcgtgccccaactag

SEQ ID NO: 1179662 - DNA, 25 bp, Homo sapien
gagttctgggagctactttgggcca

SEQ ID NO: 1179663 - DNA, 25 bp, Homo sapien
gcagaagctacattacacaccaggt

SEQ ID NO: 1179664 - DNA, 25 bp, Homo sapien
gagtgtgccctccttatccagaaga

SEQ ID NO: 1179665 - DNA, 25 bp, Homo sapien
tcaaaagctgttcatagttggccat

SEQ ID NO: 1179666 - DNA, 25 bp, Homo sapien
ttcttgcttgtcattctatgaataa

SEQ ID NO: 1179667 - DNA, 25 bp, Homo sapien
tctctggttggggggctttcttgct

SEQ ID NO: 1179668 - DNA, 25 bp, Homo sapien
cttgcttgtcattctatgaataagg

SEQ ID NO: 1179669 - DNA, 25 bp, Homo sapien
tatatgacacccaggcaaattcagg

SEQ ID NO: 1179670 - DNA, 25 bp, Homo sapien
atgaataaggaataggcctggagtt

SEQ ID NO: 1179671 - DNA, 25 bp, Homo sapien
catagctgttgcatagagggcagta

SEQ ID NO: 1179672 - DNA, 25 bp, Homo sapien
cttggagttactgccctctgattgg

SEQ ID NO: 1179673 - DNA, 25 bp, Homo sapien
tggcaagactgaagtctgactttgc

SEQ ID NO: 1179674 - DNA, 25 bp, Homo sapien
gactttgccactttctgcttaaaac

SEQ ID NO: 1179675 - DNA, 25 bp, Homo sapien
gactgaagtctgactttgccacttt

SEQ ID NO: 1179676 - DNA, 25 bp, Homo sapien
gaagtctgactttgccactttctgc

SEQ ID NO: 1179677 - DNA, 25 bp, Homo sapien
ctactgcatccgaaaagattcttta

SEQ ID NO: 1179678 - DNA, 25 bp, Homo sapien
tcacacgtattattccaacccaagg

SEQ ID NO: 1179679 - DNA, 25 bp, Homo sapien
caattccctcacacgtattattcca

SEQ ID NO: 1179680 - DNA, 25 bp, Homo sapien
cagcctttccggcttccttttgttg

SEQ ID NO: 1179681 - DNA, 25 bp, Homo sapien
gacaattcttaagtggctaggacaa

SEQ ID NO: 1179682 - DNA, 25 bp, Homo sapien
tatcggagtcttagacattaagggc

SEQ ID NO: 1179683 - DNA, 25 bp, Homo sapien
aaaagctgtctaagtggtatttcct

SEQ ID NO: 1179684 - DNA, 25 bp, Homo sapien
tctgctgcacatgtcaatatcggag

SEQ ID NO: 1179685 - DNA, 25 bp, Homo sapien
aactatagcgtttatcctgcccagc

SEQ ID NO: 1179686 - DNA, 25 bp, Homo sapien
taactagtttgagaagcttaccaag

SEQ ID NO: 1179687 - DNA, 25 bp, Homo sapien
gtgagaacattcctacatacagagt

SEQ ID NO: 1179688 - DNA, 25 bp, Homo sapien
ttaacagaaccaggactccatttgc

SEQ ID NO: 1179689 - DNA, 25 bp, Homo sapien
tttagcatcagggatctcgggagcc

SEQ ID NO: 1179690 - DNA, 25 bp, Homo sapien
tccttggaggagtactacggtcagc

SEQ ID NO: 1179691 - DNA, 25 bp, Homo sapien
tgctaaggcacttacccaggtgatg

SEQ ID NO: 1179692 - DNA, 25 bp, Homo sapien
tttccatggacgagctggcggcctt

SEQ ID NO: 1179693 - DNA, 25 bp, Homo sapien
cctctacaaaatcccacccatcatc

SEQ ID NO: 1179694 - DNA, 25 bp, Homo sapien
caggatattgaacatctcacatttg

SEQ ID NO: 1179695 - DNA, 25 bp, Homo sapien
tagaagtaattattcaagacctttg

SEQ ID NO: 1179696 - DNA, 25 bp, Homo sapien
aggatattgaacatctcacatttgt

SEQ ID NO: 1179697 - DNA, 25 bp, Homo sapien
ggaagatgccatccagtagcatctc

SEQ ID NO: 1179698 - DNA, 25 bp, Homo sapien
gaagatgccatccagtagcatctct

SEQ ID NO: 1179699 - DNA, 25 bp, Homo sapien
ggaaagcctgccttaggtgcaacaa

SEQ ID NO: 1179700 - DNA, 25 bp, Homo sapien
ccatcagatgagaagcaagcagttc

SEQ ID NO: 1179701 - DNA, 25 bp, Homo sapien
gggtctcagcccttaacaggattct

SEQ ID NO: 1179702 - DNA, 25 bp, Homo sapien
taacaaagaggatcgagagagcttc

SEQ ID NO: 1179703 - DNA, 25 bp, Homo sapien
gaaggtccatcttaggactgggcca

SEQ ID NO: 1179704 - DNA, 25 bp, Homo sapien
tgtctaggatcaacacagctcatca

SEQ ID NO: 1179705 - DNA, 25 bp, Homo sapien
gccagaatgcagtgcctctacagca

SEQ ID NO: 1179706 - DNA, 25 bp, Homo sapien
agcatatggcagtactggctctgaa

SEQ ID NO: 1179707 - DNA, 25 bp, Homo sapien
aagaggtctgcccaagtgctggaag

SEQ ID NO: 1179708 - DNA, 25 bp, Homo sapien
ttagaaagctgtgactagatacccc

SEQ ID NO: 1179709 - DNA, 25 bp, Homo sapien
ccagagtataagtagaggcccacag

SEQ ID NO: 1179710 - DNA, 25 bp, Homo sapien
tgctacttgagcaggatcttccagg

SEQ ID NO: 1179711 - DNA, 25 bp, Homo sapien
tgttctagaggtatatgtcaggtac

SEQ ID NO: 1179712 - DNA, 25 bp, Homo sapien
taaaacggactaatctgctccctta

SEQ ID NO: 1179713 - DNA, 25 bp, Homo sapien
tgcgtgtttaggtgctacagtgact

SEQ ID NO: 1179714 - DNA, 25 bp, Homo sapien
ggcagaagttcataacaggacttca

SEQ ID NO: 1179715 - DNA, 25 bp, Homo sapien
cgttccatgacatcccacgctcctc

SEQ ID NO: 1179716 - DNA, 25 bp, Homo sapien
ctccacggcattttaaagtcaatct

SEQ ID NO: 1179717 - DNA, 25 bp, Homo sapien
tttccccgttccatgacatcccacg

SEQ ID NO: 1179718 - DNA, 25 bp, Homo sapien
acatcccacgctcctccacggcatt

SEQ ID NO: 1179719 - DNA, 25 bp, Homo sapien
ttgcttcacttgttgctcatcactg

SEQ ID NO: 1179720 - DNA, 25 bp, Homo sapien
tcatcactgtgggaggaaactcggc

SEQ ID NO: 1179721 - DNA, 25 bp, Homo sapien
gcgcattcctggcggcccgcggtta

SEQ ID NO: 1179722 - DNA, 25 bp, Homo sapien
tcggccttcaattagcgcgcattcc

SEQ ID NO: 1179723 - DNA, 25 bp, Homo sapien
agatttacaaacagaggaagaggga

SEQ ID NO: 1179724 - DNA, 25 bp, Homo sapien
gaagagggaaaaagaatgagggaga

SEQ ID NO: 1179725 - DNA, 25 bp, Homo sapien
agagggaaaaagaatgagggagaag

SEQ ID NO: 1179726 - DNA, 25 bp, Homo sapien
ctaagatttacaaacagaggaagag

SEQ ID NO: 1179727 - DNA, 25 bp, Homo sapien
gcctgctaaaactttgatctctgag

SEQ ID NO: 1179728 - DNA, 25 bp, Homo sapien
ctttgatctctgagagtggctgctg

SEQ ID NO: 1179729 - DNA, 25 bp, Homo sapien
tttgatctctgagagtggctgctgc

SEQ ID NO: 1179730 - DNA, 25 bp, Homo sapien
tgttgcctgctaaaactttgatctc

SEQ ID NO: 1179731 - DNA, 25 bp, Homo sapien
actcaatccctagggagaaagtggc

SEQ ID NO: 1179732 - DNA, 25 bp, Homo sapien
tggattaaggtgataatggtctgcc

SEQ ID NO: 1179733 - DNA, 25 bp, Homo sapien
gaaaccaggtgatagcaatttggag

SEQ ID NO: 1179734 - DNA, 25 bp, Homo sapien
tagttcaggatatacacctaaagcc

SEQ ID NO: 1179735 - DNA, 25 bp, Homo sapien
tctttcgtcactttagcacagctct

SEQ ID NO: 1179736 - DNA, 25 bp, Homo sapien
tttcgtcactttagcacagctctcc

SEQ ID NO: 1179737 - DNA, 25 bp, Homo sapien
catcttctttcgtcactttagcaca

SEQ ID NO: 1179738 - DNA, 25 bp, Homo sapien
tcttctttcgtcactttagcacagc

SEQ ID NO: 1179739 - DNA, 25 bp, Homo sapien
tcctgggatcccattgatcatcctc

SEQ ID NO: 1179740 - DNA, 25 bp, Homo sapien
ggatcccattgatcatcctctgctc

SEQ ID NO: 1179741 - DNA, 25 bp, Homo sapien
tgggatcccattgatcatcctctgc

SEQ ID NO: 1179742 - DNA, 25 bp, Homo sapien
gggatcccattgatcatcctctgct

SEQ ID NO: 1179743 - DNA, 25 bp, Homo sapien
gagtcctagagaggcaatatgcaca

SEQ ID NO: 1179744 - DNA, 25 bp, Homo sapien
tgcttggaatcaggcaacaggttag

SEQ ID NO: 1179745 - DNA, 25 bp, Homo sapien
ggttagttatcaggaccagctcagc

SEQ ID NO: 1179746 - DNA, 25 bp, Homo sapien
tcactggagggtactacaggaactg

SEQ ID NO: 1179747 - DNA, 25 bp, Homo sapien
tgaggttgttctttcgaatgcattt

SEQ ID NO: 1179748 - DNA, 25 bp, Homo sapien
gttgttctttcgaatgcatttcccc

SEQ ID NO: 1179749 - DNA, 25 bp, Homo sapien
acggttctccttcggtcttatcctg

SEQ ID NO: 1179750 - DNA, 25 bp, Homo sapien
cctgagtttgtaatgctgtgagtct

SEQ ID NO: 1179751 - DNA, 25 bp, Homo sapien
gggccagcacgtgaccgagaaactt

SEQ ID NO: 1179752 - DNA, 25 bp, Homo sapien
cacgtgaccgagaaactttggcagt

SEQ ID NO: 1179753 - DNA, 25 bp, Homo sapien
aactttggcagtcgcggcagcgggc

SEQ ID NO: 1179754 - DNA, 25 bp, Homo sapien
cagcacgtgaccgagaaactttggc

SEQ ID NO: 1179755 - DNA, 25 bp, Homo sapien
gaccactagtataagaattgctctg

SEQ ID NO: 1179756 - DNA, 25 bp, Homo sapien
gggctgtcaatgctcttctggtctc

SEQ ID NO: 1179757 - DNA, 25 bp, Homo sapien
gctcctaaaagagcagtaaccttca

SEQ ID NO: 1179758 - DNA, 25 bp, Homo sapien
catcgtgtaaactgtagggcagcca

SEQ ID NO: 1179759 - DNA, 25 bp, Homo sapien
tgttcccttgtttctggtactctgc

SEQ ID NO: 1179760 - DNA, 25 bp, Homo sapien
ggtactctgccctgcaaactctatc

SEQ ID NO: 1179761 - DNA, 25 bp, Homo sapien
tctatccactgtggcgcaccttgac

SEQ ID NO: 1179762 - DNA, 25 bp, Homo sapien
ttttggtgattgtgctgttcccttg

SEQ ID NO: 1179763 - DNA, 25 bp, Homo sapien
gatggttacttgtaatcctttcagg

SEQ ID NO: 1179764 - DNA, 25 bp, Homo sapien
ttctagtcctatgtgaattccaagg

SEQ ID NO: 1179765 - DNA, 25 bp, Homo sapien
tataacatctttctgagtactgtac

SEQ ID NO: 1179766 - DNA, 25 bp, Homo sapien
ctctagaagttgattgggtcgtttt

SEQ ID NO: 1179767 - DNA, 25 bp, Homo sapien
caaacagcctgagactggaagattc

SEQ ID NO: 1179768 - DNA, 25 bp, Homo sapien
taagtaacagaggtaggcgcctgcg

SEQ ID NO: 1179769 - DNA, 25 bp, Homo sapien
gaagcgacgcgcagtcgcattgccc

SEQ ID NO: 1179770 - DNA, 25 bp, Homo sapien
ggccaatcaggaagcgacgcgcagt

SEQ ID NO: 1179771 - DNA, 25 bp, Homo sapien
ggcagcgcggtcaaacttcctggcc

SEQ ID NO: 1179772 - DNA, 25 bp, Homo sapien
agacagaacaaagcaccggcgccct

SEQ ID NO: 1179773 - DNA, 25 bp, Homo sapien
ctcagacagaacaaagcaccggcgc

SEQ ID NO: 1179774 - DNA, 25 bp, Homo sapien
cagaacaaagcaccggcgccctcgc

SEQ ID NO: 1179775 - DNA, 25 bp, Homo sapien
tccggctggccttacggttcggcat

SEQ ID NO: 1179776 - DNA, 25 bp, Homo sapien
ctgcacgaagaaatagtaagcattc

SEQ ID NO: 1179777 - DNA, 25 bp, Homo sapien
gaaatagtaagcattccggctggcc

SEQ ID NO: 1179778 - DNA, 25 bp, Homo sapien
taagcattccggctggccttacggt

SEQ ID NO: 1179779 - DNA, 25 bp, Homo sapien
atcagcaacgcgagccacaggcagg

SEQ ID NO: 1179780 - DNA, 25 bp, Homo sapien
aggcaggcctcgtcgccgtagttcg

SEQ ID NO: 1179781 - DNA, 25 bp, Homo sapien
cacaggcaggcctcgtcgccgtagt

SEQ ID NO: 1179782 - DNA, 25 bp, Homo sapien
gagcagtaagggatggcatcagcaa

SEQ ID NO: 1179783 - DNA, 25 bp, Homo sapien
gaaacagccgtgaggatcccgtgct

SEQ ID NO: 1179784 - DNA, 25 bp, Homo sapien
gccctccattctcgagccatttctg

SEQ ID NO: 1179785 - DNA, 25 bp, Homo sapien
ctccattctcgagccatttctgcgt

SEQ ID NO: 1179786 - DNA, 25 bp, Homo sapien
cggccctccattctcgagccatttc

SEQ ID NO: 1179787 - DNA, 25 bp, Homo sapien
cattctcgagccatttctgcgtatt

SEQ ID NO: 1179788 - DNA, 25 bp, Homo sapien
tcccattagcgatcaaagtgtattg

SEQ ID NO: 1179789 - DNA, 25 bp, Homo sapien
cgccaaggctcattaatcacagaag

SEQ ID NO: 1179790 - DNA, 25 bp, Homo sapien
gaacgtcgtcttcgcactaaccgaa

SEQ ID NO: 1179791 - DNA, 25 bp, Homo sapien
tacaccaatgtgtgcatgccctagt

SEQ ID NO: 1179792 - DNA, 25 bp, Homo sapien
aagacaaagctgacatatctggagg

SEQ ID NO: 1179793 - DNA, 25 bp, Homo sapien
gctgacatatctggaggtgaaacat

SEQ ID NO: 1179794 - DNA, 25 bp, Homo sapien
catatctggaggtgaaacattctgc

SEQ ID NO: 1179795 - DNA, 25 bp, Homo sapien
gaaacattctgctttggtacaagca

SEQ ID NO: 1179796 - DNA, 25 bp, Homo sapien
gaggtagctcgccatggctaaaaat

SEQ ID NO: 1179797 - DNA, 25 bp, Homo sapien
ccaatttcacaagggaggaagcgct

SEQ ID NO: 1179798 - DNA, 25 bp, Homo sapien
gaagcgctgttcacaatgaggaggt

SEQ ID NO: 1179799 - DNA, 25 bp, Homo sapien
gaaatctgccataataccttcttgg

SEQ ID NO: 1179800 - DNA, 25 bp, Homo sapien
gtgagtaggatgattagcttttctg

SEQ ID NO: 1179801 - DNA, 25 bp, Homo sapien
gtaggatgattagcttttctgtcat

SEQ ID NO: 1179802 - DNA, 25 bp, Homo sapien
agtgtgagtaggatgattagctttt

SEQ ID NO: 1179803 - DNA, 25 bp, Homo sapien
gagtaggatgattagcttttctgtc

SEQ ID NO: 1179804 - DNA, 25 bp, Homo sapien
tgaaatcgaaatcctcgtggaattt

SEQ ID NO: 1179805 - DNA, 25 bp, Homo sapien
gaaatcgaaatcctcgtggaatttc

SEQ ID NO: 1179806 - DNA, 25 bp, Homo sapien
ataggaatcttgtgactagaatcac

SEQ ID NO: 1179807 - DNA, 25 bp, Homo sapien
ctgggttgggatgaataaatctata

SEQ ID NO: 1179808 - DNA, 25 bp, Homo sapien
acacagttgcttggttatgcccacg

SEQ ID NO: 1179809 - DNA, 25 bp, Homo sapien
tatgcccacgttcaaaatttgaaat

SEQ ID NO: 1179810 - DNA, 25 bp, Homo sapien
agttgactctggttctatcatcaga

SEQ ID NO: 1179811 - DNA, 25 bp, Homo sapien
ttgccatatgcttcaaacaccagtt

SEQ ID NO: 1179812 - DNA, 25 bp, Homo sapien
caaacaccagttgactctggttcta

SEQ ID NO: 1179813 - DNA, 25 bp, Homo sapien
cctttgccatatgcttcaaacacca

SEQ ID NO: 1179814 - DNA, 25 bp, Homo sapien
agtgagaagttgtagatcttgcctg

SEQ ID NO: 1179815 - DNA, 25 bp, Homo sapien
gagaagttgtagatcttgcctgatt

SEQ ID NO: 1179816 - DNA, 25 bp, Homo sapien
tacagtgagaagttgtagatcttgc

SEQ ID NO: 1179817 - DNA, 25 bp, Homo sapien
ctacagtgagaagttgtagatcttg

SEQ ID NO: 1179818 - DNA, 25 bp, Homo sapien
ttggtagatccccactacaaggtcc

SEQ ID NO: 1179819 - DNA, 25 bp, Homo sapien
tgctagaataatcccacatggccac

SEQ ID NO: 1179820 - DNA, 25 bp, Homo sapien
gaatccaagtcttagagggctcctt

SEQ ID NO: 1179821 - DNA, 25 bp, Homo sapien
catggccacatctaggaggcttcga

SEQ ID NO: 1179822 - DNA, 25 bp, Homo sapien
ttgtttttagtgatacacaagtaac

SEQ ID NO: 1179823 - DNA, 25 bp, Homo sapien
caatatatcttactatcaatgaaat

SEQ ID NO: 1179824 - DNA, 25 bp, Homo sapien
aacaatatatcttactatcaatgaa

SEQ ID NO: 1179825 - DNA, 25 bp, Homo sapien
tcagggaaatacaatgattccaagc

SEQ ID NO: 1179826 - DNA, 25 bp, Homo sapien
aggccaatccctgcttagcttgtga

SEQ ID NO: 1179827 - DNA, 25 bp, Homo sapien
caatccctgcttagcttgtgagatc

SEQ ID NO: 1179828 - DNA, 25 bp, Homo sapien
ggcagtctctcatctaagtactaac

SEQ ID NO: 1179829 - DNA, 25 bp, Homo sapien
gccaatccctgcttagcttgtgaga

SEQ ID NO: 1179830 - DNA, 25 bp, Homo sapien
gaaaaataactaggtacgcatggtg

SEQ ID NO: 1179831 - DNA, 25 bp, Homo sapien
caaatgaaaaataactaggtacgca

SEQ ID NO: 1179832 - DNA, 25 bp, Homo sapien
tctgtctccacgacaaatgaaaaat

SEQ ID NO: 1179833 - DNA, 25 bp, Homo sapien
ctctgtctccacgacaaatgaaaaa

SEQ ID NO: 1179834 - DNA, 25 bp, Homo sapien
ttagtccaagaagaattatgacaag

SEQ ID NO: 1179835 - DNA, 25 bp, Homo sapien
tagtcagctgatcatagacagtgaa

SEQ ID NO: 1179836 - DNA, 25 bp, Homo sapien
aaaggctgccatgtttagtcagctg

SEQ ID NO: 1179837 - DNA, 25 bp, Homo sapien
agaattatgacaagaagcatcagga

SEQ ID NO: 1179838 - DNA, 25 bp, Homo sapien
atcattttcttcatgccacttgcac

SEQ ID NO: 1179839 - DNA, 25 bp, Homo sapien
aatatcattttcttcatgccacttg

SEQ ID NO: 1179840 - DNA, 25 bp, Homo sapien
ctaaagcacagaagagaatatcatt

SEQ ID NO: 1179841 - DNA, 25 bp, Homo sapien
taaagcacagaagagaatatcattt

SEQ ID NO: 1179842 - DNA, 25 bp, Homo sapien
tatgtgttagagtaccccaataagg

SEQ ID NO: 1179843 - DNA, 25 bp, Homo sapien
gagggcagcggcagaaataacacta

SEQ ID NO: 1179844 - DNA, 25 bp, Homo sapien
ccaggattcccaaatgtttaaggca

SEQ ID NO: 1179845 - DNA, 25 bp, Homo sapien
tgaactaatatcacccactgggcta

SEQ ID NO: 1179846 - DNA, 25 bp, Homo sapien
gagagtggccagagaattactgatg

SEQ ID NO: 1179847 - DNA, 25 bp, Homo sapien
catccaatacaaccattttgggtgt

SEQ ID NO: 1179848 - DNA, 25 bp, Homo sapien
tgtagtggtacatgagcctctgtga

SEQ ID NO: 1179849 - DNA, 25 bp, Homo sapien
actattgctggcctcataatcttgt

SEQ ID NO: 1179850 - DNA, 25 bp, Homo sapien
cattagaagagttgaaatgagagaa

SEQ ID NO: 1179851 - DNA, 25 bp, Homo sapien
gtgtttgatctttgttcctcattag

SEQ ID NO: 1179852 - DNA, 25 bp, Homo sapien
cctcattagaagagttgaaatgaga

SEQ ID NO: 1179853 - DNA, 25 bp, Homo sapien
ttgttcctcattagaagagttgaaa

SEQ ID NO: 1179854 - DNA, 25 bp, Homo sapien
cccgaacgctgctgttttggccaga

SEQ ID NO: 1179855 - DNA, 25 bp, Homo sapien
ccagaaatttttgccctagatgggt

SEQ ID NO: 1179856 - DNA, 25 bp, Homo sapien
catgtaaggtgagagtgaagtgtca

SEQ ID NO: 1179857 - DNA, 25 bp, Homo sapien
gaaatgctctctagtaagcgggtaa

SEQ ID NO: 1179858 - DNA, 25 bp, Homo sapien
tttaatatgactgtagtaagaagga

SEQ ID NO: 1179859 - DNA, 25 bp, Homo sapien
tgatatacccatcatacagccagga

SEQ ID NO: 1179860 - DNA, 25 bp, Homo sapien
gaagcagaacaatccctcaagaaaa

SEQ ID NO: 1179861 - DNA, 25 bp, Homo sapien
gaagttgggcctgttactgttttca

SEQ ID NO: 1179862 - DNA, 25 bp, Homo sapien
ggagaaagaatgatcaatctataac

SEQ ID NO: 1179863 - DNA, 25 bp, Homo sapien
agaatgatcaatctataacattccc

SEQ ID NO: 1179864 - DNA, 25 bp, Homo sapien
acctttattatcaggagaaagaatg

SEQ ID NO: 1179865 - DNA, 25 bp, Homo sapien
atacctttattatcaggagaaagaa

SEQ ID NO: 1179866 - DNA, 25 bp, Homo sapien
gcccatgctataataaggttcgagg

SEQ ID NO: 1179867 - DNA, 25 bp, Homo sapien
gtgcccatgctataataaggttcga

SEQ ID NO: 1179868 - DNA, 25 bp, Homo sapien
acatgcacatacaaactcaatcatc

SEQ ID NO: 1179869 - DNA, 25 bp, Homo sapien
catgctataataaggttcgagggtg

SEQ ID NO: 1179870 - DNA, 25 bp, Homo sapien
gaaggttcacctgccttagctccag

SEQ ID NO: 1179871 - DNA, 25 bp, Homo sapien
tctgcccctcaaaggactctgaagg

SEQ ID NO: 1179872 - DNA, 25 bp, Homo sapien
cacggaagcagaggcggccaccttc

SEQ ID NO: 1179873 - DNA, 25 bp, Homo sapien
gcatgttcttgagggagccacggaa

SEQ ID NO: 1179874 - DNA, 25 bp, Homo sapien
caggcagtgcctctagtggttgctg

SEQ ID NO: 1179875 - DNA, 25 bp, Homo sapien
ggaggtgagacaaggtaacagattt

SEQ ID NO: 1179876 - DNA, 25 bp, Homo sapien
tattccaggagtctgcagtgtcagg

SEQ ID NO: 1179877 - DNA, 25 bp, Homo sapien
gcctgctggtggaggtatattccag

SEQ ID NO: 1179878 - DNA, 25 bp, Homo sapien
tggatgagattaaaaccccttgcca

SEQ ID NO: 1179879 - DNA, 25 bp, Homo sapien
ggaccctcctcatctcgtttatagc

SEQ ID NO: 1179880 - DNA, 25 bp, Homo sapien
ttgccataagctcagatagtacctc

SEQ ID NO: 1179881 - DNA, 25 bp, Homo sapien
gctgtgatcagcagctaaagatttt

SEQ ID NO: 1179882 - DNA, 25 bp, Homo sapien
tcatgactgtctggtgtggctaagg

SEQ ID NO: 1179883 - DNA, 25 bp, Homo sapien
cctcaaggatgaggaggcttggcat

SEQ ID NO: 1179884 - DNA, 25 bp, Homo sapien
cacgggtaccttctgaggagcctca

SEQ ID NO: 1179885 - DNA, 25 bp, Homo sapien
gaggttcgtctttgccctgtaagcc

SEQ ID NO: 1179886 - DNA, 25 bp, Homo sapien
ctgggatacatctgcccgaagtggc

SEQ ID NO: 1179887 - DNA, 25 bp, Homo sapien
ggcttccaagatggcgtgtgaacac

SEQ ID NO: 1179888 - DNA, 25 bp, Homo sapien
gggcttccaagatggcgtgtgaaca

SEQ ID NO: 1179889 - DNA, 25 bp, Homo sapien
tgcccgaagtggctcgggaaagcca

SEQ ID NO: 1179890 - DNA, 25 bp, Homo sapien
taaagccggcaagtggtggatataa

SEQ ID NO: 1179891 - DNA, 25 bp, Homo sapien
cactcaatcaacaaggccttattag

SEQ ID NO: 1179892 - DNA, 25 bp, Homo sapien
gtggatataagagaagcctgagact

SEQ ID NO: 1179893 - DNA, 25 bp, Homo sapien
gaagcctgagactcagacgctgccc

SEQ ID NO: 1179894 - DNA, 25 bp, Homo sapien
ctttaacacttaattgggctctatt

SEQ ID NO: 1179895 - DNA, 25 bp, Homo sapien
ggctctattaggatgctggctgaca

SEQ ID NO: 1179896 - DNA, 25 bp, Homo sapien
ctattaggatgctggctgacagtaa

SEQ ID NO: 1179897 - DNA, 25 bp, Homo sapien
taacacttaattgggctctattagg

SEQ ID NO: 1179898 - DNA, 25 bp, Homo sapien
ggaacaggtgacacttgccgtgagc

SEQ ID NO: 1179899 - DNA, 25 bp, Homo sapien
ggctttccaactgtgccctggccct

SEQ ID NO: 1179900 - DNA, 25 bp, Homo sapien
cttgccgtgagcaaagctggctttc

SEQ ID NO: 1179901 - DNA, 25 bp, Homo sapien
gccctgcacgtgtccaccaatgtat

SEQ ID NO: 1179902 - DNA, 25 bp, Homo sapien
gtggccgtaactctgaattgcctgg

SEQ ID NO: 1179903 - DNA, 25 bp, Homo sapien
gaaaagtggccgtaactctgaattg

SEQ ID NO: 1179904 - DNA, 25 bp, Homo sapien
gagggaaaagtggccgtaactctga

SEQ ID NO: 1179905 - DNA, 25 bp, Homo sapien
ccgtaactctgaattgcctggagca

SEQ ID NO: 1179906 - DNA, 25 bp, Homo sapien
gagctataccaggaaactcaggagc

SEQ ID NO: 1179907 - DNA, 25 bp, Homo sapien
tcagacactgttgagggcttccagg

SEQ ID NO: 1179908 - DNA, 25 bp, Homo sapien
attcagacactgttgagggcttcca

SEQ ID NO: 1179909 - DNA, 25 bp, Homo sapien
caacggggaggagaagagctatacc

SEQ ID NO: 1179910 - DNA, 25 bp, Homo sapien
tgaagctccggccagtgagacagga

SEQ ID NO: 1179911 - DNA, 25 bp, Homo sapien
ggctgagggacccagatgaaatgac

SEQ ID NO: 1179912 - DNA, 25 bp, Homo sapien
actgaagctgaagctccggccagtg

SEQ ID NO: 1179913 - DNA, 25 bp, Homo sapien
gctgagggacccagatgaaatgact

SEQ ID NO: 1179914 - DNA, 25 bp, Homo sapien
caggattgacaaggggagaagcaca

SEQ ID NO: 1179915 - DNA, 25 bp, Homo sapien
agccgctgccccttgtattgtaagt

SEQ ID NO: 1179916 - DNA, 25 bp, Homo sapien
ctgggctcaccaggattgacaaggg

SEQ ID NO: 1179917 - DNA, 25 bp, Homo sapien
ccccttgtattgtaagtcctgggct

SEQ ID NO: 1179918 - DNA, 25 bp, Homo sapien
aaaggacatgaaggataccagcagc

SEQ ID NO: 1179919 - DNA, 25 bp, Homo sapien
taaaggacatgaaggataccagcag

SEQ ID NO: 1179920 - DNA, 25 bp, Homo sapien
aaggacatgaaggataccagcagct

SEQ ID NO: 1179921 - DNA, 25 bp, Homo sapien
ggacatgaaggataccagcagctgg

SEQ ID NO: 1179922 - DNA, 25 bp, Homo sapien
gaagacacagctggccttcggtgtc

SEQ ID NO: 1179923 - DNA, 25 bp, Homo sapien
cggtgtctctaaccaaggccacagg

SEQ ID NO: 1179924 - DNA, 25 bp, Homo sapien
tttggctcaggcgtcatcctggagc

SEQ ID NO: 1179925 - DNA, 25 bp, Homo sapien
gccttcggtgtctctaaccaaggcc

SEQ ID NO: 1179926 - DNA, 25 bp, Homo sapien
tgaagaacaatgacttccctggacc

SEQ ID NO: 1179927 - DNA, 25 bp, Homo sapien
tcagttgaaattataggatgtgcat

SEQ ID NO: 1179928 - DNA, 25 bp, Homo sapien
gacttccctggaccagcaagatttt

SEQ ID NO: 1179929 - DNA, 25 bp, Homo sapien
gagccagcaggttacctgatctcag

SEQ ID NO: 1179930 - DNA, 25 bp, Homo sapien
gaggtagtgggcctgcaccgccctc

SEQ ID NO: 1179931 - DNA, 25 bp, Homo sapien
tcgcttgggactacctgctcctcct

SEQ ID NO: 1179932 - DNA, 25 bp, Homo sapien
tcgtcctcctcgcttgggactacct

SEQ ID NO: 1179933 - DNA, 25 bp, Homo sapien
tgcaccgccctcacgttggcttcgt

SEQ ID NO: 1179934 - DNA, 25 bp, Homo sapien
tatcattaaacggagacaaaaaggc

SEQ ID NO: 1179935 - DNA, 25 bp, Homo sapien
tgcatggcataaaccttaaaacagt

SEQ ID NO: 1179936 - DNA, 25 bp, Homo sapien
gttagctatacactccactgcaaaa

SEQ ID NO: 1179937 - DNA, 25 bp, Homo sapien
tccacccttcatgagcttgttagct

SEQ ID NO: 1179938 - DNA, 25 bp, Homo sapien
ttctgcatctgagaccatcgaatac

SEQ ID NO: 1179939 - DNA, 25 bp, Homo sapien
aggagaggtgaatgggttccatgaa

SEQ ID NO: 1179940 - DNA, 25 bp, Homo sapien
aggtgaatgggttccatgaaaatgc

SEQ ID NO: 1179941 - DNA, 25 bp, Homo sapien
tgatgatctgtttggctgcaatggc

SEQ ID NO: 1179942 - DNA, 25 bp, Homo sapien
gcttccacccagcttttgattgcat

SEQ ID NO: 1179943 - DNA, 25 bp, Homo sapien
gagaggcacattgacgtcttccaat

SEQ ID NO: 1179944 - DNA, 25 bp, Homo sapien
ccctctaagggtctccagatgacca

SEQ ID NO: 1179945 - DNA, 25 bp, Homo sapien
gatgaccactggactttgcttccac

SEQ ID NO: 1179946 - DNA, 25 bp, Homo sapien
tgacgcggttgtacaggtcctccac

SEQ ID NO: 1179947 - DNA, 25 bp, Homo sapien
taggtccaggacacagggcgtatta

SEQ ID NO: 1179948 - DNA, 25 bp, Homo sapien
tcttggcgatcctgaaccagggccc

SEQ ID NO: 1179949 - DNA, 25 bp, Homo sapien
tcagctatgaagacattgggccaga

SEQ ID NO: 1179950 - DNA, 25 bp, Homo sapien
aatgctgggaaatgtccacctcagg

SEQ ID NO: 1179951 - DNA, 25 bp, Homo sapien
ggtgccatgcgcagcattcagaatg

SEQ ID NO: 1179952 - DNA, 25 bp, Homo sapien
gggccagtgtaaacgccggtgccat

SEQ ID NO: 1179953 - DNA, 25 bp, Homo sapien
gaactcagacgccttccggaaatgc

SEQ ID NO: 1179954 - DNA, 25 bp, Homo sapien
agcctggagcggcagatccctctca

SEQ ID NO: 1179955 - DNA, 25 bp, Homo sapien
ctcgaggtctgccggtgcgctccag

SEQ ID NO: 1179956 - DNA, 25 bp, Homo sapien
aggtgggacacactccttacgccgc

SEQ ID NO: 1179957 - DNA, 25 bp, Homo sapien
aggcgaccgacagacccattcaatc

SEQ ID NO: 1179958 - DNA, 25 bp, Homo sapien
gctccaggacctgcgagcgaggtgg

SEQ ID NO: 1179959 - DNA, 25 bp, Homo sapien
tatcgcttctgggatgcgttccaca

SEQ ID NO: 1179960 - DNA, 25 bp, Homo sapien
cacgcctggagctattgcgagcgta

SEQ ID NO: 1179961 - DNA, 25 bp, Homo sapien
gggaccgccggctcgtggccgtgtc

SEQ ID NO: 1179962 - DNA, 25 bp, Homo sapien
tgtccacacgcctggagctattgcg

SEQ ID NO: 1179963 - DNA, 25 bp, Homo sapien
cacaggagggctgagcatcactgac

SEQ ID NO: 1179964 - DNA, 25 bp, Homo sapien
cagatgggagacatcacaatcccca

SEQ ID NO: 1179965 - DNA, 25 bp, Homo sapien
agttcatccgggctcaagacacagg

SEQ ID NO: 1179966 - DNA, 25 bp, Homo sapien
aaatgatgtaatgacagtggcttcc

SEQ ID NO: 1179967 - DNA, 25 bp, Homo sapien
gaagatcatcaggtaggcgaccacc

SEQ ID NO: 1179968 - DNA, 25 bp, Homo sapien
actcaggtggctggcgctgtcgtcc

SEQ ID NO: 1179969 - DNA, 25 bp, Homo sapien
tcctcctcgtctatgagggtgaggg

SEQ ID NO: 1179970 - DNA, 25 bp, Homo sapien
tcttacgcacggtcatcaaagcctc

SEQ ID NO: 1179971 - DNA, 25 bp, Homo sapien
ctctcgtttcggctctgccactcct

SEQ ID NO: 1179972 - DNA, 25 bp, Homo sapien
tggatgatcctctccacgtcctcgt

SEQ ID NO: 1179973 - DNA, 25 bp, Homo sapien
tttcggctctgccactcctggatga

SEQ ID NO: 1179974 - DNA, 25 bp, Homo sapien
cactcctggatgatcctctccacgt

SEQ ID NO: 1179975 - DNA, 25 bp, Homo sapien
gatgtcgtggctgctcacgctctcc

SEQ ID NO: 1179976 - DNA, 25 bp, Homo sapien
ctcctgccgtggtccgggcggttca

SEQ ID NO: 1179977 - DNA, 25 bp, Homo sapien
tggtccgggcggttcagctccagct

SEQ ID NO: 1179978 - DNA, 25 bp, Homo sapien
caggacccagatgtcgtggctgctc

SEQ ID NO: 1179979 - DNA, 25 bp, Homo sapien
gaagctccctatggcactgtcagtg

SEQ ID NO: 1179980 - DNA, 25 bp, Homo sapien
taagcatggagacttggtcatcccc

SEQ ID NO: 1179981 - DNA, 25 bp, Homo sapien
tgtagaaggaactggcctcagagcc

SEQ ID NO: 1179982 - DNA, 25 bp, Homo sapien
tcatgcttgcaacagacggtgagcg

SEQ ID NO: 1179983 - DNA, 25 bp, Homo sapien
gccctgagccctatgctaacgtgag

SEQ ID NO: 1179984 - DNA, 25 bp, Homo sapien
gtggtggcaacgtgtgccctgagcc

SEQ ID NO: 1179985 - DNA, 25 bp, Homo sapien
tgtatcctcatcctgcgatgagtgg

SEQ ID NO: 1179986 - DNA, 25 bp, Homo sapien
tggaagatcctctctgtatcctcat

SEQ ID NO: 1179987 - DNA, 25 bp, Homo sapien
tagcctgtgatgaacactgccaaat

SEQ ID NO: 1179988 - DNA, 25 bp, Homo sapien
cagaaaatggtatcagttggtccgc

SEQ ID NO: 1179989 - DNA, 25 bp, Homo sapien
agaagcgtgtcctatgttcatggcc

SEQ ID NO: 1179990 - DNA, 25 bp, Homo sapien
cttagagggcgctgagcaacagaaa

SEQ ID NO: 1179991 - DNA, 25 bp, Homo sapien
tgatatcatatatgaaacggacaaa

SEQ ID NO: 1179992 - DNA, 25 bp, Homo sapien
aaaattgatatcatatatgaaacgg

SEQ ID NO: 1179993 - DNA, 25 bp, Homo sapien
atcatatatgaaacggacaaattcc

SEQ ID NO: 1179994 - DNA, 25 bp, Homo sapien
aattgatatcatatatgaaacggac

SEQ ID NO: 1179995 - DNA, 25 bp, Homo sapien
gagcaaaggcataccttacatggtg

SEQ ID NO: 1179996 - DNA, 25 bp, Homo sapien
catgactcaattaccccctactagg

SEQ ID NO: 1179997 - DNA, 25 bp, Homo sapien
aagagcaagtgcaggggaattgccc

SEQ ID NO: 1179998 - DNA, 25 bp, Homo sapien
atgagatatggatggggacatggcc

SEQ ID NO: 1179999 - DNA, 25 bp, Homo sapien
tgtgggcttgtgcatcagctctcca

SEQ ID NO: 1180000 - DNA, 25 bp, Homo sapien
ctgtgggcttgtgcatcagctctcc

SEQ ID NO: 1180001 - DNA, 25 bp, Homo sapien
gtgggcttgtgcatcagctctccac

SEQ ID NO: 1180002 - DNA, 25 bp, Homo sapien
actgtgggcttgtgcatcagctctc

SEQ ID NO: 1180003 - DNA, 25 bp, Homo sapien
tcttccccaggtctgacctcagttg

SEQ ID NO: 1180004 - DNA, 25 bp, Homo sapien
gccccttgatatgatgaatcctggg

SEQ ID NO: 1180005 - DNA, 25 bp, Homo sapien
tgccccttgatatgatgaatcctgg

SEQ ID NO: 1180006 - DNA, 25 bp, Homo sapien
ccccttgatatgatgaatcctgggg

SEQ ID NO: 1180007 - DNA, 25 bp, Homo sapien
atgggcattgtcagattcaggctcc

SEQ ID NO: 1180008 - DNA, 25 bp, Homo sapien
gcattcaggtaccttgagagagggc

SEQ ID NO: 1180009 - DNA, 25 bp, Homo sapien
agctgatttgtgaggtgcaatgggc

SEQ ID NO: 1180010 - DNA, 25 bp, Homo sapien
tcaagctgatttgtgaggtgcaatg

SEQ ID NO: 1180011 - DNA, 25 bp, Homo sapien
tgccgccgcggctgaactctcatct

SEQ ID NO: 1180012 - DNA, 25 bp, Homo sapien
gccgccgcggctgaactctcatctt

SEQ ID NO: 1180013 - DNA, 25 bp, Homo sapien
ggaaagccaggcggccatttcaata

SEQ ID NO: 1180014 - DNA, 25 bp, Homo sapien
aaagccaggcggccatttcaataat

SEQ ID NO: 1180015 - DNA, 25 bp, Homo sapien
ctaaacatgagaggcggggaaagcc

SEQ ID NO: 1180016 - DNA, 25 bp, Homo sapien
aaacatgagaggcggggaaagccag

SEQ ID NO: 1180017 - DNA, 25 bp, Homo sapien
gagccctgcggattgccaaggaaaa

SEQ ID NO: 1180018 - DNA, 25 bp, Homo sapien
tataaacacggcgttgggctgtgag

SEQ ID NO: 1180019 - DNA, 25 bp, Homo sapien
aacatgaggcctaggcaactgctag

SEQ ID NO: 1180020 - DNA, 25 bp, Homo sapien
agagagtttgttttgcccgcagagg

SEQ ID NO: 1180021 - DNA, 25 bp, Homo sapien
gccaactgtcctaagtctagataaa

SEQ ID NO: 1180022 - DNA, 25 bp, Homo sapien
caattctgacaacttaaagaggagg

SEQ ID NO: 1180023 - DNA, 25 bp, Homo sapien
tccaagatcagggtaaacgcaatgc

SEQ ID NO: 1180024 - DNA, 25 bp, Homo sapien
aagatgtcagaaaggtagcaccaca

SEQ ID NO: 1180025 - DNA, 25 bp, Homo sapien
aacatccaccagtgacaggcaacac

SEQ ID NO: 1180026 - DNA, 25 bp, Homo sapien
cagggcctgcctactgtgagtgaaa

SEQ ID NO: 1180027 - DNA, 25 bp, Homo sapien
gattctaaggcaaatggtctctcca

SEQ ID NO: 1180028 - DNA, 25 bp, Homo sapien
taaatggtttccctatgagaaggct

SEQ ID NO: 1180029 - DNA, 25 bp, Homo sapien
ccacatcttgggaatcgggtgcaaa

SEQ ID NO: 1180030 - DNA, 25 bp, Homo sapien
gacagtgacaatggatttcctagaa

SEQ ID NO: 1180031 - DNA, 25 bp, Homo sapien
gaaatacgcaggaaactacttgaca

SEQ ID NO: 1180032 - DNA, 25 bp, Homo sapien
tcatgtgggttcaaaagtaacctaa

SEQ ID NO: 1180033 - DNA, 25 bp, Homo sapien
ggagacaggcaggttataaactcat

SEQ ID NO: 1180034 - DNA, 25 bp, Homo sapien
tccactaaccagatgaatggcagat

SEQ ID NO: 1180035 - DNA, 25 bp, Homo sapien
gagcaacgtaacattttgagccctg

SEQ ID NO: 1180036 - DNA, 25 bp, Homo sapien
taaaatatggcagaacactacacct

SEQ ID NO: 1180037 - DNA, 25 bp, Homo sapien
gacaattacttcaaactaggcagca

SEQ ID NO: 1180038 - DNA, 25 bp, Homo sapien
gtgacttggtctgttccctaaacgc

SEQ ID NO: 1180039 - DNA, 25 bp, Homo sapien
tggtctgttccctaaacgcaaatta

SEQ ID NO: 1180040 - DNA, 25 bp, Homo sapien
cctgaatagttctaaattcaaatgc

SEQ ID NO: 1180041 - DNA, 25 bp, Homo sapien
taaacgcaaattacctgaatagttc

SEQ ID NO: 1180042 - DNA, 25 bp, Homo sapien
catgcactgtatgcaaggagcatct

SEQ ID NO: 1180043 - DNA, 25 bp, Homo sapien
tcaagtaagtcaggcaatagctcta

SEQ ID NO: 1180044 - DNA, 25 bp, Homo sapien
caaaaatgtccagcgaaagatgcat

SEQ ID NO: 1180045 - DNA, 25 bp, Homo sapien
aagagctcatcacctgtttagaaca

SEQ ID NO: 1180046 - DNA, 25 bp, Homo sapien
tataatgtatcctctccggataaat

SEQ ID NO: 1180047 - DNA, 25 bp, Homo sapien
tatcctctccggataaatgtccagg

SEQ ID NO: 1180048 - DNA, 25 bp, Homo sapien
ccaggagttccagcagtttaaaaga

SEQ ID NO: 1180049 - DNA, 25 bp, Homo sapien
caggagttccagcagtttaaaagaa

SEQ ID NO: 1180050 - DNA, 25 bp, Homo sapien
tcagtccctatttcaaaatcctcca

SEQ ID NO: 1180051 - DNA, 25 bp, Homo sapien
cagtccctatttcaaaatcctccaa

SEQ ID NO: 1180052 - DNA, 25 bp, Homo sapien
caagcccttgtgtaggaaatagacc

SEQ ID NO: 1180053 - DNA, 25 bp, Homo sapien
gcaggcacacgtcgaaagagaatat

SEQ ID NO: 1180054 - DNA, 25 bp, Homo sapien
taacaggtagactgatccaagctcc

SEQ ID NO: 1180055 - DNA, 25 bp, Homo sapien
ttaataagaagatgtcggccgggcg

SEQ ID NO: 1180056 - DNA, 25 bp, Homo sapien
ttcaaattctcgaaacagcatcact

SEQ ID NO: 1180057 - DNA, 25 bp, Homo sapien
tggcatcactgtttacagcccagta

SEQ ID NO: 1180058 - DNA, 25 bp, Homo sapien
tccaacaaatcgtgctgtcaacttc

SEQ ID NO: 1180059 - DNA, 25 bp, Homo sapien
cagctgaagtaacattttgctggca

SEQ ID NO: 1180060 - DNA, 25 bp, Homo sapien
gcacagtctactctcggtccattat

SEQ ID NO: 1180061 - DNA, 25 bp, Homo sapien
gaaggaccttttgctatctcaggtg

SEQ ID NO: 1180062 - DNA, 25 bp, Homo sapien
tcagagtatgggcagacacagcaca

SEQ ID NO: 1180063 - DNA, 25 bp, Homo sapien
cgctccagccatttgactctgtaag

SEQ ID NO: 1180064 - DNA, 25 bp, Homo sapien
tgtactcccaattccaaagttcctg

SEQ ID NO: 1180065 - DNA, 25 bp, Homo sapien
atgtactcccaattccaaagttcct

SEQ ID NO: 1180066 - DNA, 25 bp, Homo sapien
gtactcccaattccaaagttcctga

SEQ ID NO: 1180067 - DNA, 25 bp, Homo sapien
tgaactcctgctatttgtacccttg

SEQ ID NO: 1180068 - DNA, 25 bp, Homo sapien
tcagggctcctgtatgctcttaaag

SEQ ID NO: 1180069 - DNA, 25 bp, Homo sapien
agtttcactgaagggcacggatttt

SEQ ID NO: 1180070 - DNA, 25 bp, Homo sapien
tatacaggcttccaaggcccaagat

SEQ ID NO: 1180071 - DNA, 25 bp, Homo sapien
cagcggtgacacacatgacaatcac

SEQ ID NO: 1180072 - DNA, 25 bp, Homo sapien
cctatgtttacatctcagcggtgac

SEQ ID NO: 1180073 - DNA, 25 bp, Homo sapien
taaaaacatctacctctagcctgga

SEQ ID NO: 1180074 - DNA, 25 bp, Homo sapien
cagcttagctttggaaccttgggca

SEQ ID NO: 1180075 - DNA, 25 bp, Homo sapien
caatataactagaggtaagagcata

SEQ ID NO: 1180076 - DNA, 25 bp, Homo sapien
tatggagatgctcacaagctataag

SEQ ID NO: 1180077 - DNA, 25 bp, Homo sapien
gctcacaagctataagaaacagtag

SEQ ID NO: 1180078 - DNA, 25 bp, Homo sapien
gtgtctttcagtcactccctccaaa

SEQ ID NO: 1180079 - DNA, 25 bp, Homo sapien
ccaaaatatggagatgctcacaagc

SEQ ID NO: 1180080 - DNA, 25 bp, Homo sapien
gagactgtccctatttgagaaccac

SEQ ID NO: 1180081 - DNA, 25 bp, Homo sapien
tgagaaccacaaccctaagagtact

SEQ ID NO: 1180082 - DNA, 25 bp, Homo sapien
taatcactagatgccatgagcacca

SEQ ID NO: 1180083 - DNA, 25 bp, Homo sapien
gaagaaacgctaaacttgtgaggca

SEQ ID NO: 1180084 - DNA, 25 bp, Homo sapien
atggcatctgagctgctcttgaact

SEQ ID NO: 1180085 - DNA, 25 bp, Homo sapien
tttgtgctccacttaattcatggca

SEQ ID NO: 1180086 - DNA, 25 bp, Homo sapien
gtgctccacttaattcatggcatct

SEQ ID NO: 1180087 - DNA, 25 bp, Homo sapien
ctgagctgctcttgaacttgacaga

SEQ ID NO: 1180088 - DNA, 25 bp, Homo sapien
tgtgcagggcatgtggacaacaata

SEQ ID NO: 1180089 - DNA, 25 bp, Homo sapien
caatagaaaccatgtagggtgcact

SEQ ID NO: 1180090 - DNA, 25 bp, Homo sapien
catgtagggtgcacttttggtcaaa

SEQ ID NO: 1180091 - DNA, 25 bp, Homo sapien
gcatgtggacaacaatagaaaccat

SEQ ID NO: 1180092 - DNA, 25 bp, Homo sapien
gagccaacatccaataagtaggagc

SEQ ID NO: 1180093 - DNA, 25 bp, Homo sapien
tcttgttacacggacaaagggagga

SEQ ID NO: 1180094 - DNA, 25 bp, Homo sapien
gatcattacatgaactgctctcagc

SEQ ID NO: 1180095 - DNA, 25 bp, Homo sapien
tcaacggttaacagtaggcaaatac

SEQ ID NO: 1180096 - DNA, 25 bp, Homo sapien
agtcaccgcgcccaacccaactctt

SEQ ID NO: 1180097 - DNA, 25 bp, Homo sapien
aagaaatactattccttctcctcct

SEQ ID NO: 1180098 - DNA, 25 bp, Homo sapien
caactcttgctctttaccatattaa

SEQ ID NO: 1180099 - DNA, 25 bp, Homo sapien
agacatccttcaactctaccacaaa

SEQ ID NO: 1180100 - DNA, 25 bp, Homo sapien
ggttgagagtgtcaaacaccactga

SEQ ID NO: 1180101 - DNA, 25 bp, Homo sapien
tagacaaagcaggagttaccagaga

SEQ ID NO: 1180102 - DNA, 25 bp, Homo sapien
gcacgacctcacagctttcagggaa

SEQ ID NO: 1180103 - DNA, 25 bp, Homo sapien
gaactattccatggcttagactggc

SEQ ID NO: 1180104 - DNA, 25 bp, Homo sapien
tttttgagatggagtctcgctctga

SEQ ID NO: 1180105 - DNA, 25 bp, Homo sapien
ttattccctctggaacatatggttt

SEQ ID NO: 1180106 - DNA, 25 bp, Homo sapien
atatttattccctctggaacatatg

SEQ ID NO: 1180107 - DNA, 25 bp, Homo sapien
tatttattccctctggaacatatgg

SEQ ID NO: 1180108 - DNA, 25 bp, Homo sapien
ttctcagatgtcaggcaaccctcat

SEQ ID NO: 1180109 - DNA, 25 bp, Homo sapien
tgagcctactatggctgggaggcct

SEQ ID NO: 1180110 - DNA, 25 bp, Homo sapien
gaggcctgcccgattggcaaaccgt

SEQ ID NO: 1180111 - DNA, 25 bp, Homo sapien
ggcaaaccgtcagttgctgaattaa

SEQ ID NO: 1180112 - DNA, 25 bp, Homo sapien
ggctggaaagatagacaaggaccac

SEQ ID NO: 1180113 - DNA, 25 bp, Homo sapien
tgagtggttttaggagttttaagca

SEQ ID NO: 1180114 - DNA, 25 bp, Homo sapien
caagagggatgtaatagaaatttaa

SEQ ID NO: 1180115 - DNA, 25 bp, Homo sapien
tgaaggtcctcatatttaagtttca

SEQ ID NO: 1180116 - DNA, 25 bp, Homo sapien
gaatttttacctatctcgcttggag

SEQ ID NO: 1180117 - DNA, 25 bp, Homo sapien
gccttgtatcaaatctcagccagta

SEQ ID NO: 1180118 - DNA, 25 bp, Homo sapien
ctgggtttcccagaccacacaggtg

SEQ ID NO: 1180119 - DNA, 25 bp, Homo sapien
cacgataatgtgtctaggtgcagaa

SEQ ID NO: 1180120 - DNA, 25 bp, Homo sapien
gagacaaaagagagcacctacagtg

SEQ ID NO: 1180121 - DNA, 25 bp, Homo sapien
tggtgtcctgcagagtaaacctggt

SEQ ID NO: 1180122 - DNA, 25 bp, Homo sapien
aacagccatgccagatctcaggagc

SEQ ID NO: 1180123 - DNA, 25 bp, Homo sapien
taatcagctgtgcaaaccaccactg

SEQ ID NO: 1180124 - DNA, 25 bp, Homo sapien
ctcaatcttttggaattggtaccaa

SEQ ID NO: 1180125 - DNA, 25 bp, Homo sapien
tctcaatcttttggaattggtacca

SEQ ID NO: 1180126 - DNA, 25 bp, Homo sapien
caatcttttggaattggtaccaatt

SEQ ID NO: 1180127 - DNA, 25 bp, Homo sapien
tttctcaatcttttggaattggtac

SEQ ID NO: 1180128 - DNA, 25 bp, Homo sapien
tatcttctagttccagttttgagtc

SEQ ID NO: 1180129 - DNA, 25 bp, Homo sapien
tgagccaccatagtcatgaattctt

SEQ ID NO: 1180130 - DNA, 25 bp, Homo sapien
tcaggttggttatacatatttggct

SEQ ID NO: 1180131 - DNA, 25 bp, Homo sapien
aggccaatgtcagaagaggttttcc

SEQ ID NO: 1180132 - DNA, 25 bp, Homo sapien
ttttttcatgttcaaagtcactcat

SEQ ID NO: 1180133 - DNA, 25 bp, Homo sapien
tttttcatgttcaaagtcactcatc

SEQ ID NO: 1180134 - DNA, 25 bp, Homo sapien
gctccataacacatctattcacaga

SEQ ID NO: 1180135 - DNA, 25 bp, Homo sapien
tccataacacatctattcacagact

SEQ ID NO: 1180136 - DNA, 25 bp, Homo sapien
agctccataacacatctattcacag

SEQ ID NO: 1180137 - DNA, 25 bp, Homo sapien
cataacacatctattcacagactct

SEQ ID NO: 1180138 - DNA, 25 bp, Homo sapien
tgttcacaagttagagttaccagag

SEQ ID NO: 1180139 - DNA, 25 bp, Homo sapien
tcagtgttctgtgaagacatgtggc

SEQ ID NO: 1180140 - DNA, 25 bp, Homo sapien
gattagccacgcaaactcctttgta

SEQ ID NO: 1180141 - DNA, 25 bp, Homo sapien
agccctgccctattgtccttgaagc

SEQ ID NO: 1180142 - DNA, 25 bp, Homo sapien
taacctaacacttaaagagagaaca

SEQ ID NO: 1180143 - DNA, 25 bp, Homo sapien
cagtgggggacaccagactatccat

SEQ ID NO: 1180144 - DNA, 25 bp, Homo sapien
aaactgagtaagctgtataaaataa

SEQ ID NO: 1180145 - DNA, 25 bp, Homo sapien
tccatcaggacacatttagattagc

SEQ ID NO: 1180146 - DNA, 25 bp, Homo sapien
gattcattgaaaactgagagtagtt

SEQ ID NO: 1180147 - DNA, 25 bp, Homo sapien
cattgaaaactgagagtagtttggt

SEQ ID NO: 1180148 - DNA, 25 bp, Homo sapien
gaactgattcattgaaaactgagag

SEQ ID NO: 1180149 - DNA, 25 bp, Homo sapien
ttgaactgattcattgaaaactgag

SEQ ID NO: 1180150 - DNA, 25 bp, Homo sapien
aatgttagttgttccagccctgccc

SEQ ID NO: 1180151 - DNA, 25 bp, Homo sapien
taagatctccacaccgtaccaggaa

SEQ ID NO: 1180152 - DNA, 25 bp, Homo sapien
tacgaccttagtgagaaatagggcc

SEQ ID NO: 1180153 - DNA, 25 bp, Homo sapien
taagatctggtcattaggactgggc

SEQ ID NO: 1180154 - DNA, 25 bp, Homo sapien
cagatcaagaagctgtcacagatga

SEQ ID NO: 1180155 - DNA, 25 bp, Homo sapien
agaagctgtcacagatgatggaaga

SEQ ID NO: 1180156 - DNA, 25 bp, Homo sapien
gatcaagaagctgtcacagatgatg

SEQ ID NO: 1180157 - DNA, 25 bp, Homo sapien
gggacagatcaagaagctgtcacag

SEQ ID NO: 1180158 - DNA, 25 bp, Homo sapien
tctcaacagtacaccaatatccttt

SEQ ID NO: 1180159 - DNA, 25 bp, Homo sapien
cagccaatctcaacagtacaccaat

SEQ ID NO: 1180160 - DNA, 25 bp, Homo sapien
atggggggtgtctgcatcttttagc

SEQ ID NO: 1180161 - DNA, 25 bp, Homo sapien
tcctttctatatcatggggggtgtc

SEQ ID NO: 1180162 - DNA, 25 bp, Homo sapien
ttttatattcatgatcttatgggcc

SEQ ID NO: 1180163 - DNA, 25 bp, Homo sapien
tcatgatcttatgggccagtgtagg

SEQ ID NO: 1180164 - DNA, 25 bp, Homo sapien
tgcccagccgacactactagtatta

SEQ ID NO: 1180165 - DNA, 25 bp, Homo sapien
gccagtgtaggtatcattagaaatg

SEQ ID NO: 1180166 - DNA, 25 bp, Homo sapien
ggatttgcaaaaagctttctacaca

SEQ ID NO: 1180167 - DNA, 25 bp, Homo sapien
ctacacaatccaaataatcccaagg

SEQ ID NO: 1180168 - DNA, 25 bp, Homo sapien
gctggcaacaatgacttcagtaata

SEQ ID NO: 1180169 - DNA, 25 bp, Homo sapien
gacttcagtaataagaggatttgca

SEQ ID NO: 1180170 - DNA, 25 bp, Homo sapien
ttgcgtagggtggaaagtggattaa

SEQ ID NO: 1180171 - DNA, 25 bp, Homo sapien
aaagcaaaatacaacttctgttaca

SEQ ID NO: 1180172 - DNA, 25 bp, Homo sapien
gttgcgtagggtggaaagtggatta

SEQ ID NO: 1180173 - DNA, 25 bp, Homo sapien
gcaaaatacaacttctgttacacca

SEQ ID NO: 1180174 - DNA, 25 bp, Homo sapien
ggtactactatttctaacaaatcta

SEQ ID NO: 1180175 - DNA, 25 bp, Homo sapien
ggagcagagagtccaaacaaggaag

SEQ ID NO: 1180176 - DNA, 25 bp, Homo sapien
atttctaacaaatctacagtatgtt

SEQ ID NO: 1180177 - DNA, 25 bp, Homo sapien
aagaaacaggtagcagtttggggtg

SEQ ID NO: 1180178 - DNA, 25 bp, Homo sapien
ctagaacatagtcactgcagtccag

SEQ ID NO: 1180179 - DNA, 25 bp, Homo sapien
tgttgcagcaaccagtacaattacc

SEQ ID NO: 1180180 - DNA, 25 bp, Homo sapien
caaatttaagctggacatcttccac

SEQ ID NO: 1180181 - DNA, 25 bp, Homo sapien
ctaaaatctggaaatcgatcaacag

SEQ ID NO: 1180182 - DNA, 25 bp, Homo sapien
gaggactaatcctagcaaaaatttg

SEQ ID NO: 1180183 - DNA, 25 bp, Homo sapien
atagatggtttactggtttctgacg

SEQ ID NO: 1180184 - DNA, 25 bp, Homo sapien
tggtttactggtttctgacggattg

SEQ ID NO: 1180185 - DNA, 25 bp, Homo sapien
gatggtttactggtttctgacggat

SEQ ID NO: 1180186 - DNA, 25 bp, Homo sapien
tactggtttctgacggattgttcat

SEQ ID NO: 1180187 - DNA, 25 bp, Homo sapien
gaagtaacaaaaaggagactggctg

SEQ ID NO: 1180188 - DNA, 25 bp, Homo sapien
cttggctagcctcagtaagagtact

SEQ ID NO: 1180189 - DNA, 25 bp, Homo sapien
gagatactacagaagtctacttggc

SEQ ID NO: 1180190 - DNA, 25 bp, Homo sapien
attcagacagaatacaatgctgccc

SEQ ID NO: 1180191 - DNA, 25 bp, Homo sapien
atttcccacacctaagctaggtggc

SEQ ID NO: 1180192 - DNA, 25 bp, Homo sapien
taagctaggtggctgaagcaccggc

SEQ ID NO: 1180193 - DNA, 25 bp, Homo sapien
agcaccggcactggcataggaacca

SEQ ID NO: 1180194 - DNA, 25 bp, Homo sapien
gtggctgaagcaccggcactggcat

SEQ ID NO: 1180195 - DNA, 25 bp, Homo sapien
caccctctagtctcttaaggggatc

SEQ ID NO: 1180196 - DNA, 25 bp, Homo sapien
cctctagtctcttaaggggatcagc

SEQ ID NO: 1180197 - DNA, 25 bp, Homo sapien
ctagtctcttaaggggatcagctgc

SEQ ID NO: 1180198 - DNA, 25 bp, Homo sapien
tgccccaccctctagtctcttaagg

SEQ ID NO: 1180199 - DNA, 25 bp, Homo sapien
tggatggcaactataactgcagacc

SEQ ID NO: 1180200 - DNA, 25 bp, Homo sapien
caccaccagtggtacttcgtatagg

SEQ ID NO: 1180201 - DNA, 25 bp, Homo sapien
ccatgtatgtgatcgagtgtgtgcg

SEQ ID NO: 1180202 - DNA, 25 bp, Homo sapien
tataacattatgacttgcctctgct

SEQ ID NO: 1180203 - DNA, 25 bp, Homo sapien
tccagctatggtgcggttacaggtg

SEQ ID NO: 1180204 - DNA, 25 bp, Homo sapien
tcacattagagtccaaaggtatgtc

SEQ ID NO: 1180205 - DNA, 25 bp, Homo sapien
gctgtcgtataacaactgtgcttcc

SEQ ID NO: 1180206 - DNA, 25 bp, Homo sapien
gctgcttcttccgttatcctgacat

SEQ ID NO: 1180207 - DNA, 25 bp, Homo sapien
ggaaatacactgtaatttctgactt

SEQ ID NO: 1180208 - DNA, 25 bp, Homo sapien
gtcttgctgactcagaaatggcaga

SEQ ID NO: 1180209 - DNA, 25 bp, Homo sapien
tcatccttgtcttcatgctgagtag

SEQ ID NO: 1180210 - DNA, 25 bp, Homo sapien
gaacaggaggggtcttgctgactca

SEQ ID NO: 1180211 - DNA, 25 bp, Homo sapien
accacaaggcaccccaagtacaaca

SEQ ID NO: 1180212 - DNA, 25 bp, Homo sapien
ccacaaggcaccccaagtacaacat

SEQ ID NO: 1180213 - DNA, 25 bp, Homo sapien
tctgatgtcagccttcctaacttgg

SEQ ID NO: 1180214 - DNA, 25 bp, Homo sapien
catctttccctgtaggatgtgagcc

SEQ ID NO: 1180215 - DNA, 25 bp, Homo sapien
tgacactttgctacaaatcctgctg

SEQ ID NO: 1180216 - DNA, 25 bp, Homo sapien
gccagttaaacggtagcagcttcct

SEQ ID NO: 1180217 - DNA, 25 bp, Homo sapien
aaataagtgtcttatgacttaccag

SEQ ID NO: 1180218 - DNA, 25 bp, Homo sapien
tgttggtggagaaaattaccaaaca

SEQ ID NO: 1180219 - DNA, 25 bp, Homo sapien
taccagctgttgagacttttcaaat

SEQ ID NO: 1180220 - DNA, 25 bp, Homo sapien
ggtggagaaaattaccaaacattga

SEQ ID NO: 1180221 - DNA, 25 bp, Homo sapien
cacagttaggtttgggtggcagaca

SEQ ID NO: 1180222 - DNA, 25 bp, Homo sapien
tagaagacaccgtggccacgttaaa

SEQ ID NO: 1180223 - DNA, 25 bp, Homo sapien
tcatattcccatactacaaggagct

SEQ ID NO: 1180224 - DNA, 25 bp, Homo sapien
taggtcctagggttacaaagtcata

SEQ ID NO: 1180225 - DNA, 25 bp, Homo sapien
tagtcccagcaacttgggctgagag

SEQ ID NO: 1180226 - DNA, 25 bp, Homo sapien
cagcaacttgggctgagaggggaag

SEQ ID NO: 1180227 - DNA, 25 bp, Homo sapien
agtcccagcaacttgggctgagagg

SEQ ID NO: 1180228 - DNA, 25 bp, Homo sapien
tcccagcaacttgggctgagagggg

SEQ ID NO: 1180229 - DNA, 25 bp, Homo sapien
tccaaggaaagcctgcgcctgggct

SEQ ID NO: 1180230 - DNA, 25 bp, Homo sapien
tggagatgtccaaggaaagcctgcg

SEQ ID NO: 1180231 - DNA, 25 bp, Homo sapien
agattgctcctcctacaggcacagg

SEQ ID NO: 1180232 - DNA, 25 bp, Homo sapien
gagattgctcctcctacaggcacag

SEQ ID NO: 1180233 - DNA, 25 bp, Homo sapien
ctgtacatttaaagactgagcagca

SEQ ID NO: 1180234 - DNA, 25 bp, Homo sapien
gtacatttaaagactgagcagcagc

SEQ ID NO: 1180235 - DNA, 25 bp, Homo sapien
agcagcctgtaaacttgttccagcg

SEQ ID NO: 1180236 - DNA, 25 bp, Homo sapien
tgtacatttaaagactgagcagcag

SEQ ID NO: 1180237 - DNA, 25 bp, Homo sapien
atctgtcctccagctagcataagct

SEQ ID NO: 1180238 - DNA, 25 bp, Homo sapien
gtcctccagctagcataagctgggt

SEQ ID NO: 1180239 - DNA, 25 bp, Homo sapien
gaatcccccgattcttcattagatt

SEQ ID NO: 1180240 - DNA, 25 bp, Homo sapien
tgcgaatcccccgattcttcattag

SEQ ID NO: 1180241 - DNA, 25 bp, Homo sapien
tgtgcctgctggagtagtaactgtt

SEQ ID NO: 1180242 - DNA, 25 bp, Homo sapien
gtaactgttgctgggcaggcgtcaa

SEQ ID NO: 1180243 - DNA, 25 bp, Homo sapien
tgttgctgggcaggcgtcaaagtaa

SEQ ID NO: 1180244 - DNA, 25 bp, Homo sapien
ctgctggagtagtaactgttgctgg

SEQ ID NO: 1180245 - DNA, 25 bp, Homo sapien
gctggcggagtgctgctgcactgca

SEQ ID NO: 1180246 - DNA, 25 bp, Homo sapien
agacagggggatctgcgtcatgggc

SEQ ID NO: 1180247 - DNA, 25 bp, Homo sapien
cgtcatgggcgtggcagcagaggcg

SEQ ID NO: 1180248 - DNA, 25 bp, Homo sapien
tgtgcgatctgtatgggctgagaca

SEQ ID NO: 1180249 - DNA, 25 bp, Homo sapien
gataaactgcgctggctgcaaattg

SEQ ID NO: 1180250 - DNA, 25 bp, Homo sapien
caccaacacaaactgttgcaggttg

SEQ ID NO: 1180251 - DNA, 25 bp, Homo sapien
ccctggggcgtctgtgagatgataa

SEQ ID NO: 1180252 - DNA, 25 bp, Homo sapien
ctgcaaattggtggttggatgcacc

SEQ ID NO: 1180253 - DNA, 25 bp, Homo sapien
tgtagtttctattatagcagtcttc

SEQ ID NO: 1180254 - DNA, 25 bp, Homo sapien
ttgtagtttctattatagcagtctt

SEQ ID NO: 1180255 - DNA, 25 bp, Homo sapien
gtagtttctattatagcagtcttcc

SEQ ID NO: 1180256 - DNA, 25 bp, Homo sapien
tagtttctattatagcagtcttccc

SEQ ID NO: 1180257 - DNA, 25 bp, Homo sapien
aaaaccaatgcttggccaggcgcca

SEQ ID NO: 1180258 - DNA, 25 bp, Homo sapien
taacgaatgattgcaactcagcagc

SEQ ID NO: 1180259 - DNA, 25 bp, Homo sapien
tctaagtgagtccagatacagtggc

SEQ ID NO: 1180260 - DNA, 25 bp, Homo sapien
gaaggctaatctcatgctggaaaca

SEQ ID NO: 1180261 - DNA, 25 bp, Homo sapien
ttcctggatcaggtcaagctgttcc

SEQ ID NO: 1180262 - DNA, 25 bp, Homo sapien
tatgatccgctacctgactagtact

SEQ ID NO: 1180263 - DNA, 25 bp, Homo sapien
tactgaagggtagtctagaggaaca

SEQ ID NO: 1180264 - DNA, 25 bp, Homo sapien
gattctaggtgtggtaacctctccc

SEQ ID NO: 1180265 - DNA, 25 bp, Homo sapien
gctgtcatggccttatattagaatt

SEQ ID NO: 1180266 - DNA, 25 bp, Homo sapien
tctccatataatagttagggtgatc

SEQ ID NO: 1180267 - DNA, 25 bp, Homo sapien
tatgcagccctaggtatctggccct

SEQ ID NO: 1180268 - DNA, 25 bp, Homo sapien
ccaagtgtctccctatagttcaatc

SEQ ID NO: 1180269 - DNA, 25 bp, Homo sapien
aagctctgtgataggtcaatccttt

SEQ ID NO: 1180270 - DNA, 25 bp, Homo sapien
gatttcttcgaacacatggcaaaag

SEQ ID NO: 1180271 - DNA, 25 bp, Homo sapien
caacttggaagagaagatatacaac

SEQ ID NO: 1180272 - DNA, 25 bp, Homo sapien
ggtagtcttactggtatcaaaactc

SEQ ID NO: 1180273 - DNA, 25 bp, Homo sapien
cttggctttgctgaggtagttgcgt

SEQ ID NO: 1180274 - DNA, 25 bp, Homo sapien
tgatgcttggctgcgactgtaggag

SEQ ID NO: 1180275 - DNA, 25 bp, Homo sapien
cgactgtaggaggttggcttggctt

SEQ ID NO: 1180276 - DNA, 25 bp, Homo sapien
cgttagaagattttgcgcttgcagg

SEQ ID NO: 1180277 - DNA, 25 bp, Homo sapien
tctagtagaaatgagctaaagcacc

SEQ ID NO: 1180278 - DNA, 25 bp, Homo sapien
ctagataagaagtggaatcaggtct

SEQ ID NO: 1180279 - DNA, 25 bp, Homo sapien
taagtgataacttccatactgcaga

SEQ ID NO: 1180280 - DNA, 25 bp, Homo sapien
aatacatgctctttaccaggttaag

SEQ ID NO: 1180281 - DNA, 25 bp, Homo sapien
aacctcaggctggactgggccagat

SEQ ID NO: 1180282 - DNA, 25 bp, Homo sapien
cagctccagaaacctcaggctggac

SEQ ID NO: 1180283 - DNA, 25 bp, Homo sapien
gaaacctcaggctggactgggccag

SEQ ID NO: 1180284 - DNA, 25 bp, Homo sapien
cccagctccagaaacctcaggctgg

SEQ ID NO: 1180285 - DNA, 25 bp, Homo sapien
agtcaaggcttcctccaaaggaact

SEQ ID NO: 1180286 - DNA, 25 bp, Homo sapien
tatgagtcaaggcttcctccaaagg

SEQ ID NO: 1180287 - DNA, 25 bp, Homo sapien
cttatgagtcaaggcttcctccaaa

SEQ ID NO: 1180288 - DNA, 25 bp, Homo sapien
tcaaggcttcctccaaaggaactaa

SEQ ID NO: 1180289 - DNA, 25 bp, Homo sapien
ccaggtgagcgattataaaccagaa

SEQ ID NO: 1180290 - DNA, 25 bp, Homo sapien
aaatttagatgagttatataagcct

SEQ ID NO: 1180291 - DNA, 25 bp, Homo sapien
tgaagagtagcccaggtgagcgatt

SEQ ID NO: 1180292 - DNA, 25 bp, Homo sapien
tttagatgagttatataagcctgac

SEQ ID NO: 1180293 - DNA, 25 bp, Homo sapien
tgcctgactgcatcttagttgctca

SEQ ID NO: 1180294 - DNA, 25 bp, Homo sapien
atcttagttgctcagttgactcctc

SEQ ID NO: 1180295 - DNA, 25 bp, Homo sapien
tgactgcatcttagttgctcagttg

SEQ ID NO: 1180296 - DNA, 25 bp, Homo sapien
ggcactgcctgactgcatcttagtt

SEQ ID NO: 1180297 - DNA, 25 bp, Homo sapien
ttctattcacaagccctgagtggaa

SEQ ID NO: 1180298 - DNA, 25 bp, Homo sapien
tattttgggacatgagggtatagtc

SEQ ID NO: 1180299 - DNA, 25 bp, Homo sapien
tctgttctattcacaagccctgagt

SEQ ID NO: 1180300 - DNA, 25 bp, Homo sapien
caaacttaaggttattctgttctat

SEQ ID NO: 1180301 - DNA, 25 bp, Homo sapien
tgagtgaatccaagtttgattcgtc

SEQ ID NO: 1180302 - DNA, 25 bp, Homo sapien
tccaagctgggagtatcaattcgct

SEQ ID NO: 1180303 - DNA, 25 bp, Homo sapien
tgactggctctgtggaagtgtctga

SEQ ID NO: 1180304 - DNA, 25 bp, Homo sapien
aattcgctttggtgttgactggctc

SEQ ID NO: 1180305 - DNA, 25 bp, Homo sapien
gctcaatagccataagtagacagtg

SEQ ID NO: 1180306 - DNA, 25 bp, Homo sapien
aagaatcagaatcagtggtgagcag

SEQ ID NO: 1180307 - DNA, 25 bp, Homo sapien
catgtccaatgtacagaacacccca

SEQ ID NO: 1180308 - DNA, 25 bp, Homo sapien
tgagcagggcataaatgctatccat

SEQ ID NO: 1180309 - DNA, 25 bp, Homo sapien
aattcacagtagagaggtttgaccc

SEQ ID NO: 1180310 - DNA, 25 bp, Homo sapien
tagcaatagaacaatgatgccctga

SEQ ID NO: 1180311 - DNA, 25 bp, Homo sapien
tcaagtatttctggacgcagtgaaa

SEQ ID NO: 1180312 - DNA, 25 bp, Homo sapien
tagtcaaaccttcatgggcaatgga

SEQ ID NO: 1180313 - DNA, 25 bp, Homo sapien
aagtggcttcaacttgcacatgttc

SEQ ID NO: 1180314 - DNA, 25 bp, Homo sapien
tggtagtttggctgaagtcatttcc

SEQ ID NO: 1180315 - DNA, 25 bp, Homo sapien
gaggttcaaggcttcaaatcgagag

SEQ ID NO: 1180316 - DNA, 25 bp, Homo sapien
ctgcatcatttagccacttctctaa

SEQ ID NO: 1180317 - DNA, 25 bp, Homo sapien
gcgtttcttcctcctacggctcaag

SEQ ID NO: 1180318 - DNA, 25 bp, Homo sapien
ggtctctatgctggtgcgtttcttc

SEQ ID NO: 1180319 - DNA, 25 bp, Homo sapien
cttctctaaggccacacggatgttg

SEQ ID NO: 1180320 - DNA, 25 bp, Homo sapien
ggctcaagccctcaattcctggaga

SEQ ID NO: 1180321 - DNA, 25 bp, Homo sapien
gctttaataggtgagctgctggtcc

SEQ ID NO: 1180322 - DNA, 25 bp, Homo sapien
ctggcggcggttacagaaccaaaca

SEQ ID NO: 1180323 - DNA, 25 bp, Homo sapien
caccactgcttggtgggttgattct

SEQ ID NO: 1180324 - DNA, 25 bp, Homo sapien
gatctcttccgaggtaggcttttga

SEQ ID NO: 1180325 - DNA, 25 bp, Homo sapien
cacagcagcactggtcagagggagg

SEQ ID NO: 1180326 - DNA, 25 bp, Homo sapien
tgtaactgaaagattcgtcacagca

SEQ ID NO: 1180327 - DNA, 25 bp, Homo sapien
ctgactgtgagggtagttgctgcac

SEQ ID NO: 1180328 - DNA, 25 bp, Homo sapien
tgcactgctagtcacaaggcttggt

SEQ ID NO: 1180329 - DNA, 25 bp, Homo sapien
tgtaggtatccacaaatagccttgg

SEQ ID NO: 1180330 - DNA, 25 bp, Homo sapien
gagtatgtcatgcactgagctaggc

SEQ ID NO: 1180331 - DNA, 25 bp, Homo sapien
taaaaaggtccaacatccagaagag

SEQ ID NO: 1180332 - DNA, 25 bp, Homo sapien
tacatcatgggtaggtcatagagcc

SEQ ID NO: 1180333 - DNA, 25 bp, Homo sapien
catataccctttttcgctttaatct

SEQ ID NO: 1180334 - DNA, 25 bp, Homo sapien
ttcgctttaatcttctcttaagaca

SEQ ID NO: 1180335 - DNA, 25 bp, Homo sapien
ggcagattcatataccctttttcgc

SEQ ID NO: 1180336 - DNA, 25 bp, Homo sapien
ctgtgttaggcagattcatataccc

SEQ ID NO: 1180337 - DNA, 25 bp, Homo sapien
aggcgctgtggaaatcacggttgct

SEQ ID NO: 1180338 - DNA, 25 bp, Homo sapien
gctgtggaaatcacggttgctgtgt

SEQ ID NO: 1180339 - DNA, 25 bp, Homo sapien
tctgtgttgtgctggtctcactggc

SEQ ID NO: 1180340 - DNA, 25 bp, Homo sapien
ggacaaaggagtggaggtggtctgt

SEQ ID NO: 1180341 - DNA, 25 bp, Homo sapien
tggaggtggtctgtgttgtgctggt

SEQ ID NO: 1180342 - DNA, 25 bp, Homo sapien
ggcactggatgcctcggaggtggag

SEQ ID NO: 1180343 - DNA, 25 bp, Homo sapien
caaactgtgagggtgccatcaggct

SEQ ID NO: 1180344 - DNA, 25 bp, Homo sapien
catcaggcttgggtttagtcctgca

SEQ ID NO: 1180345 - DNA, 25 bp, Homo sapien
ggtgccatcaggcttgggtttagtc

SEQ ID NO: 1180346 - DNA, 25 bp, Homo sapien
ggcttgggtttagtcctgcagcagc

SEQ ID NO: 1180347 - DNA, 25 bp, Homo sapien
tgaatgagatgagaaagcgccttac

SEQ ID NO: 1180348 - DNA, 25 bp, Homo sapien
gtgaatgagatgagaaagcgcctta

SEQ ID NO: 1180349 - DNA, 25 bp, Homo sapien
gtaattccagggatgacctccacct

SEQ ID NO: 1180350 - DNA, 25 bp, Homo sapien
tcagtgatgtaaagtctcccctgtg

SEQ ID NO: 1180351 - DNA, 25 bp, Homo sapien
ttccagggatgacctccacctcaga

SEQ ID NO: 1180352 - DNA, 25 bp, Homo sapien
cccatctaagtcagtgatgtaaagt

SEQ ID NO: 1180353 - DNA, 25 bp, Homo sapien
acctggtattttgggtcttcatctg

SEQ ID NO: 1180354 - DNA, 25 bp, Homo sapien
aaggtatgactactgcccttcccag

SEQ ID NO: 1180355 - DNA, 25 bp, Homo sapien
aacaaaggtatgactactgcccttc

SEQ ID NO: 1180356 - DNA, 25 bp, Homo sapien
cagggtgttaagaaacataaactca

SEQ ID NO: 1180357 - DNA, 25 bp, Homo sapien
tattaccatgcagacgcaggtctca

SEQ ID NO: 1180358 - DNA, 25 bp, Homo sapien
aagtccaaaagaggagtcactttat

SEQ ID NO: 1180359 - DNA, 25 bp, Homo sapien
tcactttattaccatgcagacgcag

SEQ ID NO: 1180360 - DNA, 25 bp, Homo sapien
aggagtcactttattaccatgcaga

SEQ ID NO: 1180361 - DNA, 25 bp, Homo sapien
tgttgctcattagagctgggctgag

SEQ ID NO: 1180362 - DNA, 25 bp, Homo sapien
tgggctgagagcaccgctcagggtc

SEQ ID NO: 1180363 - DNA, 25 bp, Homo sapien
tggattcagactgagtaaggcacct

SEQ ID NO: 1180364 - DNA, 25 bp, Homo sapien
tgccagtgtactgttgctcattaga

SEQ ID NO: 1180365 - DNA, 25 bp, Homo sapien
catactaacacctatacttttctta

SEQ ID NO: 1180366 - DNA, 25 bp, Homo sapien
gttctcaagaacaagttagtcagca

SEQ ID NO: 1180367 - DNA, 25 bp, Homo sapien
tcctgcttttactcacatactaaca

SEQ ID NO: 1180368 - DNA, 25 bp, Homo sapien
cacttttacctctagcaaagcagac

SEQ ID NO: 1180369 - DNA, 25 bp, Homo sapien
gggctcctcccgcattggcaaatac

SEQ ID NO: 1180370 - DNA, 25 bp, Homo sapien
gctggctacaggtgcagagttccct

SEQ ID NO: 1180371 - DNA, 25 bp, Homo sapien
cggcagagaccaagctaacagggtt

SEQ ID NO: 1180372 - DNA, 25 bp, Homo sapien
gagagagttctggatggactcagca

SEQ ID NO: 1180373 - DNA, 25 bp, Homo sapien
ctttgccctcacaacacggcgagag

SEQ ID NO: 1180374 - DNA, 25 bp, Homo sapien
agtccaatcacactgcagagtgaaa

SEQ ID NO: 1180375 - DNA, 25 bp, Homo sapien
acaacacggcgagaggaagccaatc

SEQ ID NO: 1180376 - DNA, 25 bp, Homo sapien
caaaattaggcaaatgttccgtctc

SEQ ID NO: 1180377 - DNA, 25 bp, Homo sapien
aaagttctccaatccatgaagcaat

SEQ ID NO: 1180378 - DNA, 25 bp, Homo sapien
gaaagttctccaatccatgaagcaa

SEQ ID NO: 1180379 - DNA, 25 bp, Homo sapien
aagttctccaatccatgaagcaatc

SEQ ID NO: 1180380 - DNA, 25 bp, Homo sapien
tacaggcctgcctaaattgtaccag

SEQ ID NO: 1180381 - DNA, 25 bp, Homo sapien
cagtagtctttgctcttgggaacca

SEQ ID NO: 1180382 - DNA, 25 bp, Homo sapien
tgtgggagctcactgaaataggatc

SEQ ID NO: 1180383 - DNA, 25 bp, Homo sapien
tgttgcaccacaggaactgggcctc

SEQ ID NO: 1180384 - DNA, 25 bp, Homo sapien
gggaccaccagagatttaagcaagc

SEQ ID NO: 1180385 - DNA, 25 bp, Homo sapien
tatctcctcgatgtgtctgaactgc

SEQ ID NO: 1180386 - DNA, 25 bp, Homo sapien
tttactgccttactggacaatggga

SEQ ID NO: 1180387 - DNA, 25 bp, Homo sapien
tccttagggaggacccattaccatg

SEQ ID NO: 1180388 - DNA, 25 bp, Homo sapien
cagagagttctataagccaagcgtt

SEQ ID NO: 1180389 - DNA, 25 bp, Homo sapien
tcaagaatgtttcgtgaggatgacc

SEQ ID NO: 1180390 - DNA, 25 bp, Homo sapien
agccaggactatgaacagcatcaca

SEQ ID NO: 1180391 - DNA, 25 bp, Homo sapien
aaaactgggtacaaactggatgctc

SEQ ID NO: 1180392 - DNA, 25 bp, Homo sapien
taagagacctgtgaagaccccttgc

SEQ ID NO: 1180393 - DNA, 25 bp, Homo sapien
gacgtgtggccagctgtcagaaaca

SEQ ID NO: 1180394 - DNA, 25 bp, Homo sapien
gactcacgcaggaatggaaccaagg

SEQ ID NO: 1180395 - DNA, 25 bp, Homo sapien
ggtcccatgatgctataggccagag

SEQ ID NO: 1180396 - DNA, 25 bp, Homo sapien
ccaagaaaacgtgtgtctcccaggg

SEQ ID NO: 1180397 - DNA, 25 bp, Homo sapien
aatatttggctaacaggcactctgg

SEQ ID NO: 1180398 - DNA, 25 bp, Homo sapien
caatctaaattgacacctggtggga

SEQ ID NO: 1180399 - DNA, 25 bp, Homo sapien
tagccacccagagtgcagagttatc

SEQ ID NO: 1180400 - DNA, 25 bp, Homo sapien
aatttgggattccaacaggagccac

SEQ ID NO: 1180401 - DNA, 25 bp, Homo sapien
atttgggattccaacaggagccacg

SEQ ID NO: 1180402 - DNA, 25 bp, Homo sapien
acaggagccacgcacatcatcacta

SEQ ID NO: 1180403 - DNA, 25 bp, Homo sapien
gagccacgcacatcatcactaggca

SEQ ID NO: 1180404 - DNA, 25 bp, Homo sapien
agatgctagcacatgccctaatgtc

SEQ ID NO: 1180405 - DNA, 25 bp, Homo sapien
ccttcacctcctttcaaggtaactg

SEQ ID NO: 1180406 - DNA, 25 bp, Homo sapien
agaaagcgcagatgctagcacatgc

SEQ ID NO: 1180407 - DNA, 25 bp, Homo sapien
gttgttgagtctgttttgtaaagtc

SEQ ID NO: 1180408 - DNA, 25 bp, Homo sapien
tggcggttcctcgttctccctggga

SEQ ID NO: 1180409 - DNA, 25 bp, Homo sapien
gtctcctggcggttcctcgttctcc

SEQ ID NO: 1180410 - DNA, 25 bp, Homo sapien
gtggtgcaggtagacctgtctcctg

SEQ ID NO: 1180411 - DNA, 25 bp, Homo sapien
tctggtttgccggtggtgcaggtag

SEQ ID NO: 1180412 - DNA, 25 bp, Homo sapien
cattccagcaggtttggggccagcc

SEQ ID NO: 1180413 - DNA, 25 bp, Homo sapien
cttgtgggcctgttcgtgaccaaga

SEQ ID NO: 1180414 - DNA, 25 bp, Homo sapien
tgttcgtgaccaagaaaacactaga

SEQ ID NO: 1180415 - DNA, 25 bp, Homo sapien
caagaaaacactagaatcaccgggc

SEQ ID NO: 1180416 - DNA, 25 bp, Homo sapien
actcccaaacaaccagcgccggagg

SEQ ID NO: 1180417 - DNA, 25 bp, Homo sapien
cacgatggcctttaccaggtaggag

SEQ ID NO: 1180418 - DNA, 25 bp, Homo sapien
gatcaaggcccccacattttgcctg

SEQ ID NO: 1180419 - DNA, 25 bp, Homo sapien
tgccggcgtcccttcagtggaaggg

SEQ ID NO: 1180420 - DNA, 25 bp, Homo sapien
tctgcattagttggtaaaaatcagt

SEQ ID NO: 1180421 - DNA, 25 bp, Homo sapien
agccttgattgtgggagccctccct

SEQ ID NO: 1180422 - DNA, 25 bp, Homo sapien
gatcaagaagcttcctgttgtaggg

SEQ ID NO: 1180423 - DNA, 25 bp, Homo sapien
tgtgcataaggtttggagccttgat

SEQ ID NO: 1180424 - DNA, 25 bp, Homo sapien
actcacacgtgtggttcctggccca

SEQ ID NO: 1180425 - DNA, 25 bp, Homo sapien
gcctatatcttttctgctgcagtga

SEQ ID NO: 1180426 - DNA, 25 bp, Homo sapien
gaacaaatcttcaaccagtggttat

SEQ ID NO: 1180427 - DNA, 25 bp, Homo sapien
ttattcgatgaaagggagcaaccca

SEQ ID NO: 1180428 - DNA, 25 bp, Homo sapien
aggatcagcaagtctttgaaggtca

SEQ ID NO: 1180429 - DNA, 25 bp, Homo sapien
gaggatcagcaagtctttgaaggtc

SEQ ID NO: 1180430 - DNA, 25 bp, Homo sapien
tgaggatcagcaagtctttgaaggt

SEQ ID NO: 1180431 - DNA, 25 bp, Homo sapien
gtaaattagctggagtcgttctgca

SEQ ID NO: 1180432 - DNA, 25 bp, Homo sapien
tcagggtgattgaggtatctccagt

SEQ ID NO: 1180433 - DNA, 25 bp, Homo sapien
ggcctcacatttggtagcaggcctt

SEQ ID NO: 1180434 - DNA, 25 bp, Homo sapien
cattgctataagcactgggcagtgt

SEQ ID NO: 1180435 - DNA, 25 bp, Homo sapien
aaagcgctacccctaagaaatcata

SEQ ID NO: 1180436 - DNA, 25 bp, Homo sapien
gaaacatttgctcataaagcgctac

SEQ ID NO: 1180437 - DNA, 25 bp, Homo sapien
ccttggaacccttatctatgggaat

SEQ ID NO: 1180438 - DNA, 25 bp, Homo sapien
cactgaggagagaattaaggaggct

SEQ ID NO: 1180439 - DNA, 25 bp, Homo sapien
aaagtggtattatgggcaattctga

SEQ ID NO: 1180440 - DNA, 25 bp, Homo sapien
atctgccatcatattaataatggct

SEQ ID NO: 1180441 - DNA, 25 bp, Homo sapien
aaagactttggtcagccatctgcca

SEQ ID NO: 1180442 - DNA, 25 bp, Homo sapien
tgccatcatattaataatggctgtg

SEQ ID NO: 1180443 - DNA, 25 bp, Homo sapien
caccagaaatgtactgagccagggc

SEQ ID NO: 1180444 - DNA, 25 bp, Homo sapien
cctccgaaaaactcggtgcagtggg

SEQ ID NO: 1180445 - DNA, 25 bp, Homo sapien
gaaaagcgctttcatctcactcggc

SEQ ID NO: 1180446 - DNA, 25 bp, Homo sapien
tgattcggtggatcggaaaagcgct

SEQ ID NO: 1180447 - DNA, 25 bp, Homo sapien
ggtgaaagcatctcgtccttacagc

SEQ ID NO: 1180448 - DNA, 25 bp, Homo sapien
tgcacccggcgtagctttgacccgg

SEQ ID NO: 1180449 - DNA, 25 bp, Homo sapien
cagatgggagatcacgcgcgataac

SEQ ID NO: 1180450 - DNA, 25 bp, Homo sapien
gcaggctgaagctcgtctctttaaa

SEQ ID NO: 1180451 - DNA, 25 bp, Homo sapien
tcgacaggaaacctcgagcgaggag

SEQ ID NO: 1180452 - DNA, 25 bp, Homo sapien
gcaggtgatatggttccttctccat

SEQ ID NO: 1180453 - DNA, 25 bp, Homo sapien
ctccagtgaaggatggacagaggca

SEQ ID NO: 1180454 - DNA, 25 bp, Homo sapien
tctccatccaggataactccagtga

SEQ ID NO: 1180455 - DNA, 25 bp, Homo sapien
tccaggataactccagtgaaggatg

SEQ ID NO: 1180456 - DNA, 25 bp, Homo sapien
cattttgctgaaagtagcgcagttt

SEQ ID NO: 1180457 - DNA, 25 bp, Homo sapien
tcattgtgagccgttggctggcccc

SEQ ID NO: 1180458 - DNA, 25 bp, Homo sapien
gaaataacatttgagccgagccttg

SEQ ID NO: 1180459 - DNA, 25 bp, Homo sapien
cgtaagatgagtcgaacacagggtc

SEQ ID NO: 1180460 - DNA, 25 bp, Homo sapien
ttctgtgtcgaggagagccatagga

SEQ ID NO: 1180461 - DNA, 25 bp, Homo sapien
ttgtgacttctgtgtcgaggagagc

SEQ ID NO: 1180462 - DNA, 25 bp, Homo sapien
cgaggagagccataggaggcacagc

SEQ ID NO: 1180463 - DNA, 25 bp, Homo sapien
gacttctgtgtcgaggagagccata

SEQ ID NO: 1180464 - DNA, 25 bp, Homo sapien
tggcagcctaggctagataaataat

SEQ ID NO: 1180465 - DNA, 25 bp, Homo sapien
acaagaaactagagcaacactacag

SEQ ID NO: 1180466 - DNA, 25 bp, Homo sapien
gtctggcagcctaggctagataaat

SEQ ID NO: 1180467 - DNA, 25 bp, Homo sapien
gcccagttgctgagctacaagaaac

SEQ ID NO: 1180468 - DNA, 25 bp, Homo sapien
tacaaacacatttggccataggcat

SEQ ID NO: 1180469 - DNA, 25 bp, Homo sapien
tataccataggaaaaggatgaatcc

SEQ ID NO: 1180470 - DNA, 25 bp, Homo sapien
taattctgccaacctgaactgcagc

SEQ ID NO: 1180471 - DNA, 25 bp, Homo sapien
tagacttgctttcccgcatgtgcac

SEQ ID NO: 1180472 - DNA, 25 bp, Homo sapien
caaggcattgttggttttagcagtt

SEQ ID NO: 1180473 - DNA, 25 bp, Homo sapien
gatgtcaaggcattgttggttttag

SEQ ID NO: 1180474 - DNA, 25 bp, Homo sapien
cattgttggttttagcagttgatct

SEQ ID NO: 1180475 - DNA, 25 bp, Homo sapien
tcctgagggacctgagcattccaaa

SEQ ID NO: 1180476 - DNA, 25 bp, Homo sapien
gaggacagccgtaaaccatagaaag

SEQ ID NO: 1180477 - DNA, 25 bp, Homo sapien
tagaaagcaaccacttgactctggg

SEQ ID NO: 1180478 - DNA, 25 bp, Homo sapien
gtgtccctggtttgcaagtgcctct

SEQ ID NO: 1180479 - DNA, 25 bp, Homo sapien
aagtgcctcttgtgtccgccatctg

SEQ ID NO: 1180480 - DNA, 25 bp, Homo sapien
ctccacatacagtggtctgaagtgg

SEQ ID NO: 1180481 - DNA, 25 bp, Homo sapien
ccacatacagtggtctgaagtggca

SEQ ID NO: 1180482 - DNA, 25 bp, Homo sapien
cacatacagtggtctgaagtggcat

SEQ ID NO: 1180483 - DNA, 25 bp, Homo sapien
acatacagtggtctgaagtggcata

SEQ ID NO: 1180484 - DNA, 25 bp, Homo sapien
ccagcttctgcaggccaagtggcca

SEQ ID NO: 1180485 - DNA, 25 bp, Homo sapien
cttggtctccctccactccagcttc

SEQ ID NO: 1180486 - DNA, 25 bp, Homo sapien
ttggtctccctccactccagcttct

SEQ ID NO: 1180487 - DNA, 25 bp, Homo sapien
actccagcttctgcaggccaagtgg

SEQ ID NO: 1180488 - DNA, 25 bp, Homo sapien
gtagagtccttcaaacccatggtct

SEQ ID NO: 1180489 - DNA, 25 bp, Homo sapien
tgtagagtccttcaaacccatggtc

SEQ ID NO: 1180490 - DNA, 25 bp, Homo sapien
ctgtagagtccttcaaacccatggt

SEQ ID NO: 1180491 - DNA, 25 bp, Homo sapien
caaataattgtatccaccatcgctc

SEQ ID NO: 1180492 - DNA, 25 bp, Homo sapien
tattaaacatagaggcttcaaaaga

SEQ ID NO: 1180493 - DNA, 25 bp, Homo sapien
agattgagctacaaaaggttggcaa

SEQ ID NO: 1180494 - DNA, 25 bp, Homo sapien
tctttgggtttcattgggaacaata

SEQ ID NO: 1180495 - DNA, 25 bp, Homo sapien
catcacgtgaaaagcctgagcccaa

SEQ ID NO: 1180496 - DNA, 25 bp, Homo sapien
tacccataggctctggtggttgcag

SEQ ID NO: 1180497 - DNA, 25 bp, Homo sapien
ggtgttggcaatgtgcacgccagca

SEQ ID NO: 1180498 - DNA, 25 bp, Homo sapien
tgttcccctgggtttactggcctga

SEQ ID NO: 1180499 - DNA, 25 bp, Homo sapien
tgcatgaagcattaaacagctggag

SEQ ID NO: 1180500 - DNA, 25 bp, Homo sapien
tatctgagactcttagtgggccacc

SEQ ID NO: 1180501 - DNA, 25 bp, Homo sapien
aaacagctggagatgtgaatatctg

SEQ ID NO: 1180502 - DNA, 25 bp, Homo sapien
ggctcggtgcaggtagtgcaaatcc

SEQ ID NO: 1180503 - DNA, 25 bp, Homo sapien
cacaattatttacgtcatattttag

SEQ ID NO: 1180504 - DNA, 25 bp, Homo sapien
cgtcatattttagcctggggttcac

SEQ ID NO: 1180505 - DNA, 25 bp, Homo sapien
ttatttacgtcatattttagcctgg

SEQ ID NO: 1180506 - DNA, 25 bp, Homo sapien
ctattcacaattatttacgtcatat

SEQ ID NO: 1180507 - DNA, 25 bp, Homo sapien
gcaaggacttcggttggtgagaaca

SEQ ID NO: 1180508 - DNA, 25 bp, Homo sapien
gtccatcccttctgcttgtgcgtcg

SEQ ID NO: 1180509 - DNA, 25 bp, Homo sapien
tgtgcgtcggctgcagatttattgg

SEQ ID NO: 1180510 - DNA, 25 bp, Homo sapien
aaggacttcggttggtgagaacaga

SEQ ID NO: 1180511 - DNA, 25 bp, Homo sapien
gctgcaagcctttagcttccaccat

SEQ ID NO: 1180512 - DNA, 25 bp, Homo sapien
gcccagctttgctgcaagcctttag

SEQ ID NO: 1180513 - DNA, 25 bp, Homo sapien
gatcagcctcgtggcatcttcctga

SEQ ID NO: 1180514 - DNA, 25 bp, Homo sapien
tgttttctagcccaggtaatgagga

SEQ ID NO: 1180515 - DNA, 25 bp, Homo sapien
gtagaagatatccttcctctgcacc

SEQ ID NO: 1180516 - DNA, 25 bp, Homo sapien
ctgggttgtgatttgtagcccacag

SEQ ID NO: 1180517 - DNA, 25 bp, Homo sapien
ctctctaggctcgggcagaccagct

SEQ ID NO: 1180518 - DNA, 25 bp, Homo sapien
ggttgtgatttgtagcccacagttt

SEQ ID NO: 1180519 - DNA, 25 bp, Homo sapien
tcttctggcttagcggccatgggta

SEQ ID NO: 1180520 - DNA, 25 bp, Homo sapien
tttgtcttctggcttagcggccatg

SEQ ID NO: 1180521 - DNA, 25 bp, Homo sapien
gcggccatgggtatttcagtgatgt

SEQ ID NO: 1180522 - DNA, 25 bp, Homo sapien
cggccatgggtatttcagtgatgta

SEQ ID NO: 1180523 - DNA, 25 bp, Homo sapien
gcttccgaagtctcccaagtggcac

SEQ ID NO: 1180524 - DNA, 25 bp, Homo sapien
agcttccgaagtctcccaagtggca

SEQ ID NO: 1180525 - DNA, 25 bp, Homo sapien
cttccgaagtctcccaagtggcaca

SEQ ID NO: 1180526 - DNA, 25 bp, Homo sapien
tttggttgggtgtaatatgggtggc

SEQ ID NO: 1180527 - DNA, 25 bp, Homo sapien
gagaagacatatttgtccaggttgg

SEQ ID NO: 1180528 - DNA, 25 bp, Homo sapien
ggtttgagtcctgggttgttctgga

SEQ ID NO: 1180529 - DNA, 25 bp, Homo sapien
tgggtggcactcaacctcgttgctg

SEQ ID NO: 1180530 - DNA, 25 bp, Homo sapien
ggcttcaatgtccttgattcagtga

SEQ ID NO: 1180531 - DNA, 25 bp, Homo sapien
tattgcacctttttagaagtgcatc

SEQ ID NO: 1180532 - DNA, 25 bp, Homo sapien
tgaagcggacattttcactccaggc

SEQ ID NO: 1180533 - DNA, 25 bp, Homo sapien
gaaacgcaaaataacttgagctgtg

SEQ ID NO: 1180534 - DNA, 25 bp, Homo sapien
ctatgactggggaaacctcgggttg

SEQ ID NO: 1180535 - DNA, 25 bp, Homo sapien
cactttgtgagggaatagcctgtgt

SEQ ID NO: 1180536 - DNA, 25 bp, Homo sapien
gagacaaggctccaccgaggtgttt

SEQ ID NO: 1180537 - DNA, 25 bp, Homo sapien
acctcgggttgaggctgaagagaca

SEQ ID NO: 1180538 - DNA, 25 bp, Homo sapien
ccaagacagtgaccccattccccat

SEQ ID NO: 1180539 - DNA, 25 bp, Homo sapien
caccaagacagtgaccccattcccc

SEQ ID NO: 1180540 - DNA, 25 bp, Homo sapien
ccataggagggcttgtccacaccac

SEQ ID NO: 1180541 - DNA, 25 bp, Homo sapien
accaagacagtgaccccattcccca

SEQ ID NO: 1180542 - DNA, 25 bp, Homo sapien
tagctggtccttcagatgccccagg

SEQ ID NO: 1180543 - DNA, 25 bp, Homo sapien
ttagcacatggttattagctggtcc

SEQ ID NO: 1180544 - DNA, 25 bp, Homo sapien
gaagcttgctcattccacaggataa

SEQ ID NO: 1180545 - DNA, 25 bp, Homo sapien
cagggtctcagcgttcgaagcttgc

SEQ ID NO: 1180546 - DNA, 25 bp, Homo sapien
cagaccctcatagggaaggaaccct

SEQ ID NO: 1180547 - DNA, 25 bp, Homo sapien
gaagtcagggtgtcttggcagaccc

SEQ ID NO: 1180548 - DNA, 25 bp, Homo sapien
tcactgcatgcctgggatgtggccc

SEQ ID NO: 1180549 - DNA, 25 bp, Homo sapien
tgggccatcactgcatgcctgggat

SEQ ID NO: 1180550 - DNA, 25 bp, Homo sapien
agaatccggtgacccctcaactgct

SEQ ID NO: 1180551 - DNA, 25 bp, Homo sapien
tcaactgctggtggcacatgggtcc

SEQ ID NO: 1180552 - DNA, 25 bp, Homo sapien
tctcacttgttttagaggtgcatcg

SEQ ID NO: 1180553 - DNA, 25 bp, Homo sapien
catcgtatagaattggcaagtgcca

SEQ ID NO: 1180554 - DNA, 25 bp, Homo sapien
ccaaagcctgatgtatagacgctgc

SEQ ID NO: 1180555 - DNA, 25 bp, Homo sapien
acgcttttgagcatggaatgagggc

SEQ ID NO: 1180556 - DNA, 25 bp, Homo sapien
gagcagcttaaccaagacacagtct

SEQ ID NO: 1180557 - DNA, 25 bp, Homo sapien
tagacgctgctcaaatacgcttttg

SEQ ID NO: 1180558 - DNA, 25 bp, Homo sapien
tgttaattcaacatagggtgaaact

SEQ ID NO: 1180559 - DNA, 25 bp, Homo sapien
ggtgaaactatttctgataaagaac

SEQ ID NO: 1180560 - DNA, 25 bp, Homo sapien
gatttatgtctcacaatcctgggta

SEQ ID NO: 1180561 - DNA, 25 bp, Homo sapien
ggagcttcctactcacgttgattta

SEQ ID NO: 1180562 - DNA, 25 bp, Homo sapien
cccattggcatttgaaggtagttga

SEQ ID NO: 1180563 - DNA, 25 bp, Homo sapien
gtgctcttgaagaggaatgagtacc

SEQ ID NO: 1180564 - DNA, 25 bp, Homo sapien
tgagtaccagttttaaattgcccat

SEQ ID NO: 1180565 - DNA, 25 bp, Homo sapien
gccactgtgcttggtagagtgcatc

SEQ ID NO: 1180566 - DNA, 25 bp, Homo sapien
caccagagctgtttaatagtccggg

SEQ ID NO: 1180567 - DNA, 25 bp, Homo sapien
tacagtgatatctgtgaggaccagg

SEQ ID NO: 1180568 - DNA, 25 bp, Homo sapien
cttggcttgcccagatcggttttgg

SEQ ID NO: 1180569 - DNA, 25 bp, Homo sapien
atcttcttggagaaccacccacagg

SEQ ID NO: 1180570 - DNA, 25 bp, Homo sapien
tgtgcatgcaggagaggcacgggcc

SEQ ID NO: 1180571 - DNA, 25 bp, Homo sapien
tcccacagtcctggcgcttgttttg

SEQ ID NO: 1180572 - DNA, 25 bp, Homo sapien
acgggccactggtcgtcttctgggc

SEQ ID NO: 1180573 - DNA, 25 bp, Homo sapien
tgttggaataaagaatcccacagtc

SEQ ID NO: 1180574 - DNA, 25 bp, Homo sapien
attccctatctcctgacgcctccct

SEQ ID NO: 1180575 - DNA, 25 bp, Homo sapien
gcattccctatctcctgacgcctcc

SEQ ID NO: 1180576 - DNA, 25 bp, Homo sapien
tccctatctcctgacgcctccctgc

SEQ ID NO: 1180577 - DNA, 25 bp, Homo sapien
agcattccctatctcctgacgcctc

SEQ ID NO: 1180578 - DNA, 25 bp, Homo sapien
aacattcatagttctgcagtgaaac

SEQ ID NO: 1180579 - DNA, 25 bp, Homo sapien
tggtgttccggttgcttttcctcca

SEQ ID NO: 1180580 - DNA, 25 bp, Homo sapien
ctccacaacattcatagttctgcag

SEQ ID NO: 1180581 - DNA, 25 bp, Homo sapien
cggtcatggtgttccggttgctttt

SEQ ID NO: 1180582 - DNA, 25 bp, Homo sapien
cagatggcacttccggcagacatcc

SEQ ID NO: 1180583 - DNA, 25 bp, Homo sapien
aagcagatggcacttccggcagaca

SEQ ID NO: 1180584 - DNA, 25 bp, Homo sapien
ggcacttccggcagacatcccccag

SEQ ID NO: 1180585 - DNA, 25 bp, Homo sapien
gcacttccggcagacatcccccaga

SEQ ID NO: 1180586 - DNA, 25 bp, Homo sapien
ctcccggagtggatttgggtggagg

SEQ ID NO: 1180587 - DNA, 25 bp, Homo sapien
tcctcccggagtggatttgggtgga

SEQ ID NO: 1180588 - DNA, 25 bp, Homo sapien
cctcccggagtggatttgggtggag

SEQ ID NO: 1180589 - DNA, 25 bp, Homo sapien
gccttagggccgataagtccttgga

SEQ ID NO: 1180590 - DNA, 25 bp, Homo sapien
gggtctttactgtactcatgtgaca

SEQ ID NO: 1180591 - DNA, 25 bp, Homo sapien
ttttccttggtgggccggtgagaca

SEQ ID NO: 1180592 - DNA, 25 bp, Homo sapien
ggccggtgagacaagagacgatggg

SEQ ID NO: 1180593 - DNA, 25 bp, Homo sapien
ggagactggagccaccagaactgtg

SEQ ID NO: 1180594 - DNA, 25 bp, Homo sapien
tctcctgatacttggtagcagttca

SEQ ID NO: 1180595 - DNA, 25 bp, Homo sapien
cagcagaaagattttcccaggtttc

SEQ ID NO: 1180596 - DNA, 25 bp, Homo sapien
tgaacttgaaccaaccagccagtct

SEQ ID NO: 1180597 - DNA, 25 bp, Homo sapien
gaaacaggaaaatgccttgagagac

SEQ ID NO: 1180598 - DNA, 25 bp, Homo sapien
agcagagaccgcatgggagggattc

SEQ ID NO: 1180599 - DNA, 25 bp, Homo sapien
ccttcagacccttcggcagagagaa

SEQ ID NO: 1180600 - DNA, 25 bp, Homo sapien
ctttagggccatcccggctgggcag

SEQ ID NO: 1180601 - DNA, 25 bp, Homo sapien
gctttgactgatgcattcggttttg

SEQ ID NO: 1180602 - DNA, 25 bp, Homo sapien
aagctgcttgctaaagggcctcgtc

SEQ ID NO: 1180603 - DNA, 25 bp, Homo sapien
gatgcattcggttttgtgggaattt

SEQ ID NO: 1180604 - DNA, 25 bp, Homo sapien
gctgcttgctaaagggcctcgtctc

SEQ ID NO: 1180605 - DNA, 25 bp, Homo sapien
cgcaaatctaaacagatactgtccc

SEQ ID NO: 1180606 - DNA, 25 bp, Homo sapien
gacgcaaatctaaacagatactgtc

SEQ ID NO: 1180607 - DNA, 25 bp, Homo sapien
taaatttagacgcaaatctaaacag

SEQ ID NO: 1180608 - DNA, 25 bp, Homo sapien
tagacgcaaatctaaacagatactg

SEQ ID NO: 1180609 - DNA, 25 bp, Homo sapien
gcgagagaacgaggaaggaggagga

SEQ ID NO: 1180610 - DNA, 25 bp, Homo sapien
cgcgagagaacgaggaaggaggagg

SEQ ID NO: 1180611 - DNA, 25 bp, Homo sapien
gcgcgagagaacgaggaaggaggag

SEQ ID NO: 1180612 - DNA, 25 bp, Homo sapien
ctgcgctcggctgcgggactgcccc

SEQ ID NO: 1180613 - DNA, 25 bp, Homo sapien
gcacagggcgagtgggcggtggcgc

SEQ ID NO: 1180614 - DNA, 25 bp, Homo sapien
cgagtgggcggtggcgcgcgcccgg

SEQ ID NO: 1180615 - DNA, 25 bp, Homo sapien
ggctgcgctcggctgcgggactgcc

SEQ ID NO: 1180616 - DNA, 25 bp, Homo sapien
ggccggagctcacgatccccgctgt

SEQ ID NO: 1180617 - DNA, 25 bp, Homo sapien
cgctcccggccgtggccagtttcgg

SEQ ID NO: 1180618 - DNA, 25 bp, Homo sapien
gtgccgactctgcggcagacgcacc

SEQ ID NO: 1180619 - DNA, 25 bp, Homo sapien
tgcggcagacgcacccgctcgcccg

SEQ ID NO: 1180620 - DNA, 25 bp, Homo sapien
gctcagccccgcgtctccctccggg

SEQ ID NO: 1180621 - DNA, 25 bp, Homo sapien
cgctcagccccgcgtctccctccgg

SEQ ID NO: 1180622 - DNA, 25 bp, Homo sapien
ctcagccccgcgtctccctccgggg

SEQ ID NO: 1180623 - DNA, 25 bp, Homo sapien
tctagttggcagcagcgatgagccg

SEQ ID NO: 1180624 - DNA, 25 bp, Homo sapien
tgagatctttccttaccaaccccag

SEQ ID NO: 1180625 - DNA, 25 bp, Homo sapien
gatgagccgcgtgctccatgctcag

SEQ ID NO: 1180626 - DNA, 25 bp, Homo sapien
gaccagggacgatccttcggagttg

SEQ ID NO: 1180627 - DNA, 25 bp, Homo sapien
gatgcctgaatatagctccctgact

SEQ ID NO: 1180628 - DNA, 25 bp, Homo sapien
ggatgtgtgcacaccacctgctgag

SEQ ID NO: 1180629 - DNA, 25 bp, Homo sapien
tttgccggcaagcacagagtctagc

SEQ ID NO: 1180630 - DNA, 25 bp, Homo sapien
acatcatagtgaatctgcagcctgg

SEQ ID NO: 1180631 - DNA, 25 bp, Homo sapien
caaagttgacacttgcatttggccc

SEQ ID NO: 1180632 - DNA, 25 bp, Homo sapien
gggcctctgccatacactattcctt

SEQ ID NO: 1180633 - DNA, 25 bp, Homo sapien
gcagcaacctgcttgaagtctaaga

SEQ ID NO: 1180634 - DNA, 25 bp, Homo sapien
gacacttgcatttggccctccagca

SEQ ID NO: 1180635 - DNA, 25 bp, Homo sapien
tctcaataagggagggccttctctt

SEQ ID NO: 1180636 - DNA, 25 bp, Homo sapien
tcccaaaccctagcacgggagtgat

SEQ ID NO: 1180637 - DNA, 25 bp, Homo sapien
cctgcataagttactacacatctca

SEQ ID NO: 1180638 - DNA, 25 bp, Homo sapien
ccctagcacgggagtgattttggta

SEQ ID NO: 1180639 - DNA, 25 bp, Homo sapien
ttcaaaagcagccactgtccaacca

SEQ ID NO: 1180640 - DNA, 25 bp, Homo sapien
gaaacttcaaaagcagccactgtcc

SEQ ID NO: 1180641 - DNA, 25 bp, Homo sapien
ccactgtccaaccagcaaattgatg

SEQ ID NO: 1180642 - DNA, 25 bp, Homo sapien
tccaggcatttggacaaagaaactt

SEQ ID NO: 1180643 - DNA, 25 bp, Homo sapien
ggagcagaatccagggccatacaac

SEQ ID NO: 1180644 - DNA, 25 bp, Homo sapien
agagtttcctactgtccatggagca

SEQ ID NO: 1180645 - DNA, 25 bp, Homo sapien
tatcatcccggctacatcactgctg

SEQ ID NO: 1180646 - DNA, 25 bp, Homo sapien
ctggccttcaagagttgcagatggc

SEQ ID NO: 1180647 - DNA, 25 bp, Homo sapien
tctgggttcctatccacaatagcat

SEQ ID NO: 1180648 - DNA, 25 bp, Homo sapien
agtgccctcaggctattggcagtgc

SEQ ID NO: 1180649 - DNA, 25 bp, Homo sapien
cttagggagtggtggacattctgct

SEQ ID NO: 1180650 - DNA, 25 bp, Homo sapien
caaacaaaggatttagtcagcgaaa

SEQ ID NO: 1180651 - DNA, 25 bp, Homo sapien
acactgacatcggtgtggctgctca

SEQ ID NO: 1180652 - DNA, 25 bp, Homo sapien
catgacaacaagctttaggtctctc

SEQ ID NO: 1180653 - DNA, 25 bp, Homo sapien
tcccacactgacatcggtgtggctg

SEQ ID NO: 1180654 - DNA, 25 bp, Homo sapien
aacaagctttaggtctctcccacac

SEQ ID NO: 1180655 - DNA, 25 bp, Homo sapien
ccctgggcacatcatttaagcatct

SEQ ID NO: 1180656 - DNA, 25 bp, Homo sapien
ctagaccctgggcacatcatttaag

SEQ ID NO: 1180657 - DNA, 25 bp, Homo sapien
cttctagaccctgggcacatcattt

SEQ ID NO: 1180658 - DNA, 25 bp, Homo sapien
gggcacatcatttaagcatctcaaa

SEQ ID NO: 1180659 - DNA, 25 bp, Homo sapien
ctggattatcaacgtaggtcctgat

SEQ ID NO: 1180660 - DNA, 25 bp, Homo sapien
tcatcctggattatcaacgtaggtc

SEQ ID NO: 1180661 - DNA, 25 bp, Homo sapien
catcctggattatcaacgtaggtcc

SEQ ID NO: 1180662 - DNA, 25 bp, Homo sapien
tcctggattatcaacgtaggtcctg

SEQ ID NO: 1180663 - DNA, 25 bp, Homo sapien
aggctgcagtgagccatgattgtgc

SEQ ID NO: 1180664 - DNA, 25 bp, Homo sapien
cctgggcaacagagcaagaccctgt

SEQ ID NO: 1180665 - DNA, 25 bp, Homo sapien
ggatcacttaagccctggaaggttg

SEQ ID NO: 1180666 - DNA, 25 bp, Homo sapien
cactgcattccagcctgggcaacag

SEQ ID NO: 1180667 - DNA, 25 bp, Homo sapien
gccatgtggatagttaggaaccttc

SEQ ID NO: 1180668 - DNA, 25 bp, Homo sapien
cagagggaggacaagaaatgagcca

SEQ ID NO: 1180669 - DNA, 25 bp, Homo sapien
catgagaggatggtacttcctgccc

SEQ ID NO: 1180670 - DNA, 25 bp, Homo sapien
catttaatggccagcgtgagtcttc

SEQ ID NO: 1180671 - DNA, 25 bp, Homo sapien
aactgaccgggatcctgaggctggt

SEQ ID NO: 1180672 - DNA, 25 bp, Homo sapien
ttttacagagcacggaactgaccgg

SEQ ID NO: 1180673 - DNA, 25 bp, Homo sapien
cacctaggctataagttgcaactcc

SEQ ID NO: 1180674 - DNA, 25 bp, Homo sapien
tcaaaaggcgtagacaattccatgc

SEQ ID NO: 1180675 - DNA, 25 bp, Homo sapien
tgtgaaataattgaacgcttcaagg

SEQ ID NO: 1180676 - DNA, 25 bp, Homo sapien
caccaccaccatgcatttgtgaaat

SEQ ID NO: 1180677 - DNA, 25 bp, Homo sapien
tgcatttgtgaaataattgaacgct

SEQ ID NO: 1180678 - DNA, 25 bp, Homo sapien
aaatactaataacaccaccaccatg

SEQ ID NO: 1180679 - DNA, 25 bp, Homo sapien
cggcttctagattaattaatggccc

SEQ ID NO: 1180680 - DNA, 25 bp, Homo sapien
catcccttccatcccgtgagcccca

SEQ ID NO: 1180681 - DNA, 25 bp, Homo sapien
tctcaactggtatttcggcttctag

SEQ ID NO: 1180682 - DNA, 25 bp, Homo sapien
caactggtatttcggcttctagatt

SEQ ID NO: 1180683 - DNA, 25 bp, Homo sapien
ctggctaacactaccccaggttttg

SEQ ID NO: 1180684 - DNA, 25 bp, Homo sapien
tactccctgagcttgagaaagagct

SEQ ID NO: 1180685 - DNA, 25 bp, Homo sapien
cgaggatcctatttctcttgaggca

SEQ ID NO: 1180686 - DNA, 25 bp, Homo sapien
caggttttgggcgatgccccagaag

SEQ ID NO: 1180687 - DNA, 25 bp, Homo sapien
gctgattatgtgacgagctctgtcc

SEQ ID NO: 1180688 - DNA, 25 bp, Homo sapien
tagcagggagactttttgataatct

SEQ ID NO: 1180689 - DNA, 25 bp, Homo sapien
gtttgggatggcacacgcaggtcat

SEQ ID NO: 1180690 - DNA, 25 bp, Homo sapien
cagcaacaccataggaaacacctgt

SEQ ID NO: 1180691 - DNA, 25 bp, Homo sapien
ttatgcagcagtggtgtgttccctt

SEQ ID NO: 1180692 - DNA, 25 bp, Homo sapien
cagctggtattaagagagagccctg

SEQ ID NO: 1180693 - DNA, 25 bp, Homo sapien
ctcttatcagctggtattaagagag

SEQ ID NO: 1180694 - DNA, 25 bp, Homo sapien
acagagcaggttatgcagcagtggt

SEQ ID NO: 1180695 - DNA, 25 bp, Homo sapien
gaaaagcactgctgcataaacccag

SEQ ID NO: 1180696 - DNA, 25 bp, Homo sapien
gtgtgtctcataccatctcagttat

SEQ ID NO: 1180697 - DNA, 25 bp, Homo sapien
tatgtgaatgtaaagtatcctacag

SEQ ID NO: 1180698 - DNA, 25 bp, Homo sapien
ccagaaaacttaccccttgtgtgtg

SEQ ID NO: 1180699 - DNA, 25 bp, Homo sapien
acgtgggcagccctcacagtgatgc

SEQ ID NO: 1180700 - DNA, 25 bp, Homo sapien
tgcagacatccttttggagagagcg

SEQ ID NO: 1180701 - DNA, 25 bp, Homo sapien
ttggagagagcgttcaatgtccagg

SEQ ID NO: 1180702 - DNA, 25 bp, Homo sapien
gattgcaaaaaagaggcacgtgggc

SEQ ID NO: 1180703 - DNA, 25 bp, Homo sapien
ggccaatctgctccttgtgtagtta

SEQ ID NO: 1180704 - DNA, 25 bp, Homo sapien
gtgtagttatttgggcagatgactc

SEQ ID NO: 1180705 - DNA, 25 bp, Homo sapien
aatctctttttggatactggccaat

SEQ ID NO: 1180706 - DNA, 25 bp, Homo sapien
ttatatatattaatcgacagcggaa

SEQ ID NO: 1180707 - DNA, 25 bp, Homo sapien
tcagcccaagaagcaatgaatgcaa

SEQ ID NO: 1180708 - DNA, 25 bp, Homo sapien
caagaagggtcctccttatagtgag

SEQ ID NO: 1180709 - DNA, 25 bp, Homo sapien
cagaaatataatggcccctcagccc

SEQ ID NO: 1180710 - DNA, 25 bp, Homo sapien
tctgtactatcctccaccaaaggca

SEQ ID NO: 1180711 - DNA, 25 bp, Homo sapien
gggtagggtaatgggtcaggatcag

SEQ ID NO: 1180712 - DNA, 25 bp, Homo sapien
ggtaatgggtcaggatcagccttca

SEQ ID NO: 1180713 - DNA, 25 bp, Homo sapien
tagggtaatgggtcaggatcagcct

SEQ ID NO: 1180714 - DNA, 25 bp, Homo sapien
tcagccttcagagggaagactgctt

SEQ ID NO: 1180715 - DNA, 25 bp, Homo sapien
catgtcggaggaatttacaaatggg

SEQ ID NO: 1180716 - DNA, 25 bp, Homo sapien
gccagtttggccctgaagaattcta

SEQ ID NO: 1180717 - DNA, 25 bp, Homo sapien
aaatgggagtctttggaaccacaag

SEQ ID NO: 1180718 - DNA, 25 bp, Homo sapien
gctggcattgcatcttcatgtcgga

SEQ ID NO: 1180719 - DNA, 25 bp, Homo sapien
tacaaaagttgaggtgcactcaggc

SEQ ID NO: 1180720 - DNA, 25 bp, Homo sapien
tagacagtttgggttcacatccaga

SEQ ID NO: 1180721 - DNA, 25 bp, Homo sapien
gagatattgcatataaagccccagc

SEQ ID NO: 1180722 - DNA, 25 bp, Homo sapien
gatcatggtctacatctcgtggtgg

SEQ ID NO: 1180723 - DNA, 25 bp, Homo sapien
ccagggctgacggaaagcattccag

SEQ ID NO: 1180724 - DNA, 25 bp, Homo sapien
agcattccagggctttccgtcatgg

SEQ ID NO: 1180725 - DNA, 25 bp, Homo sapien
ggcaagtcccctctgtaactagcat

SEQ ID NO: 1180726 - DNA, 25 bp, Homo sapien
aactagcatcatccgcatactcagg

SEQ ID NO: 1180727 - DNA, 25 bp, Homo sapien
aagtgatccaggcaaagtgtgaggt

SEQ ID NO: 1180728 - DNA, 25 bp, Homo sapien
gaaaatctgacccaaagatgtgaca

SEQ ID NO: 1180729 - DNA, 25 bp, Homo sapien
cagttggtgctcagggtttaggaat

SEQ ID NO: 1180730 - DNA, 25 bp, Homo sapien
aactgaggtcagtagaagtgatcca

SEQ ID NO: 1180731 - DNA, 25 bp, Homo sapien
gcaagggctatgctggagaccaaaa

SEQ ID NO: 1180732 - DNA, 25 bp, Homo sapien
tcaggagtgagcattagcaggacat

SEQ ID NO: 1180733 - DNA, 25 bp, Homo sapien
ggatccaggtcacacgcagaagaaa

SEQ ID NO: 1180734 - DNA, 25 bp, Homo sapien
ggtcaggcaggttcaagcaagccca

SEQ ID NO: 1180735 - DNA, 25 bp, Homo sapien
ggcagagctgccgatcaaactcaac

SEQ ID NO: 1180736 - DNA, 25 bp, Homo sapien
gctcaaattacaaggtgatggcaga

SEQ ID NO: 1180737 - DNA, 25 bp, Homo sapien
tgctcagaaagggtgagttgccaga

SEQ ID NO: 1180738 - DNA, 25 bp, Homo sapien
caaacctgagggtgaatcttggctc

SEQ ID NO: 1180739 - DNA, 25 bp, Homo sapien
caaaagcaatttaggaggaaggact

SEQ ID NO: 1180740 - DNA, 25 bp, Homo sapien
aatttaggaggaaggactgaccaga

SEQ ID NO: 1180741 - DNA, 25 bp, Homo sapien
aagcaatttaggaggaaggactgac

SEQ ID NO: 1180742 - DNA, 25 bp, Homo sapien
cagggtggagtcaagatgatgccca

SEQ ID NO: 1180743 - DNA, 25 bp, Homo sapien
ctgcagacacatctgagcagtctct

SEQ ID NO: 1180744 - DNA, 25 bp, Homo sapien
acacatctgagcagtctcttccaac

SEQ ID NO: 1180745 - DNA, 25 bp, Homo sapien
ttccatgttcgtgactttccttccc

SEQ ID NO: 1180746 - DNA, 25 bp, Homo sapien
agacacatctgagcagtctcttcca

SEQ ID NO: 1180747 - DNA, 25 bp, Homo sapien
agccagtctgttggattgtgggtag

SEQ ID NO: 1180748 - DNA, 25 bp, Homo sapien
tgttggattgtgggtaggaggggcc

SEQ ID NO: 1180749 - DNA, 25 bp, Homo sapien
tctgttggattgtgggtaggagggg

SEQ ID NO: 1180750 - DNA, 25 bp, Homo sapien
gccagtctgttggattgtgggtagg

SEQ ID NO: 1180751 - DNA, 25 bp, Homo sapien
caaggagtgaacagcctttttcagg

SEQ ID NO: 1180752 - DNA, 25 bp, Homo sapien
tgtagacactgtagaatgcattggg

SEQ ID NO: 1180753 - DNA, 25 bp, Homo sapien
ctgagcatctgtagacactgtagaa

SEQ ID NO: 1180754 - DNA, 25 bp, Homo sapien
tgcattggggtaaccgtgacggccc

SEQ ID NO: 1180755 - DNA, 25 bp, Homo sapien
taatcagcaaatgggtaccagatgc

SEQ ID NO: 1180756 - DNA, 25 bp, Homo sapien
gaagaagaaacagttaatcagcaaa

SEQ ID NO: 1180757 - DNA, 25 bp, Homo sapien
catgcaaggcacctgttttgtggct

SEQ ID NO: 1180758 - DNA, 25 bp, Homo sapien
tgggtaccagatgccatgcaaggca

SEQ ID NO: 1180759 - DNA, 25 bp, Homo sapien
ctgctccctaaaccgcccggccagc

SEQ ID NO: 1180760 - DNA, 25 bp, Homo sapien
gacgccgagttgtccacattggcat

SEQ ID NO: 1180761 - DNA, 25 bp, Homo sapien
agggggacgccgagttgtccacatt

SEQ ID NO: 1180762 - DNA, 25 bp, Homo sapien
tggcattggtctctgccggtctttc

SEQ ID NO: 1180763 - DNA, 25 bp, Homo sapien
cttcgggttggtttactggctggtg

SEQ ID NO: 1180764 - DNA, 25 bp, Homo sapien
tcctcaccattctggcccaggtcta

SEQ ID NO: 1180765 - DNA, 25 bp, Homo sapien
ctcctcaccattctggcccaggtct

SEQ ID NO: 1180766 - DNA, 25 bp, Homo sapien
cctcaccattctggcccaggtctac

SEQ ID NO: 1180767 - DNA, 25 bp, Homo sapien
cgaaaagtcattgatccctggaggt

SEQ ID NO: 1180768 - DNA, 25 bp, Homo sapien
tgtcctttcaatgtgcgagcagcct

SEQ ID NO: 1180769 - DNA, 25 bp, Homo sapien
gagtggccataacctcaacccattg

SEQ ID NO: 1180770 - DNA, 25 bp, Homo sapien
gggcagtctcacattaagctctgag

SEQ ID NO: 1180771 - DNA, 25 bp, Homo sapien
gcttgttcctcaatctggagtgcaa

SEQ ID NO: 1180772 - DNA, 25 bp, Homo sapien
cctgcttgttcctcaatctggagtg

SEQ ID NO: 1180773 - DNA, 25 bp, Homo sapien
acagagtcctgcttgttcctcaatc

SEQ ID NO: 1180774 - DNA, 25 bp, Homo sapien
gacagagtcctgcttgttcctcaat

SEQ ID NO: 1180775 - DNA, 25 bp, Homo sapien
gagggtggctcgcattgggtggtga

SEQ ID NO: 1180776 - DNA, 25 bp, Homo sapien
tgaatttaggagggtggctcgcatt

SEQ ID NO: 1180777 - DNA, 25 bp, Homo sapien
ggtggctcgcattgggtggtgattt

SEQ ID NO: 1180778 - DNA, 25 bp, Homo sapien
ttaggagggtggctcgcattgggtg

SEQ ID NO: 1180779 - DNA, 25 bp, Homo sapien
ctgggcctagatcgcacaccagggc

SEQ ID NO: 1180780 - DNA, 25 bp, Homo sapien
tcgctgggcctagatcgcacaccag

SEQ ID NO: 1180781 - DNA, 25 bp, Homo sapien
gagtccaggactcttgggtgaggcc

SEQ ID NO: 1180782 - DNA, 25 bp, Homo sapien
gtgaaatggcgacaccatagccttg

SEQ ID NO: 1180783 - DNA, 25 bp, Homo sapien
tctccacaaaggagagagcacgcca

SEQ ID NO: 1180784 - DNA, 25 bp, Homo sapien
tacagcaaggggagatgagccagtc

SEQ ID NO: 1180785 - DNA, 25 bp, Homo sapien
tcttggggttgaatggcacagttac

SEQ ID NO: 1180786 - DNA, 25 bp, Homo sapien
tgagccagtcagtcgaggaaaaagg

SEQ ID NO: 1180787 - DNA, 25 bp, Homo sapien
tccacactgggacacttagggctat

SEQ ID NO: 1180788 - DNA, 25 bp, Homo sapien
gaactatgcagctgggatcaatcct

SEQ ID NO: 1180789 - DNA, 25 bp, Homo sapien
ccagacaggacgttttggagttcta

SEQ ID NO: 1180790 - DNA, 25 bp, Homo sapien
tagggctattcacaccaggccagac

SEQ ID NO: 1180791 - DNA, 25 bp, Homo sapien
gaggatcagggttgcatctgtagaa

SEQ ID NO: 1180792 - DNA, 25 bp, Homo sapien
cagggcgagggatgtgatgaaagct

SEQ ID NO: 1180793 - DNA, 25 bp, Homo sapien
tagaaatgcaccctgccatgtcatt

SEQ ID NO: 1180794 - DNA, 25 bp, Homo sapien
tgaaagctcacacagaggatcaggg

SEQ ID NO: 1180795 - DNA, 25 bp, Homo sapien
tcctagaatggcctagaagatctca

SEQ ID NO: 1180796 - DNA, 25 bp, Homo sapien
catttagcattctctggcaccagac

SEQ ID NO: 1180797 - DNA, 25 bp, Homo sapien
ggcaccagaccccaagaagtcttgg

SEQ ID NO: 1180798 - DNA, 25 bp, Homo sapien
taattttaagccacacccatttagc

SEQ ID NO: 1180799 - DNA, 25 bp, Homo sapien
ccaagccctttcttgagaccatgat

SEQ ID NO: 1180800 - DNA, 25 bp, Homo sapien
ctctggaaggtatcaaggccccagc

SEQ ID NO: 1180801 - DNA, 25 bp, Homo sapien
gccctttcttgagaccatgattggg

SEQ ID NO: 1180802 - DNA, 25 bp, Homo sapien
gaatgaatacttggtttatcagggc

SEQ ID NO: 1180803 - DNA, 25 bp, Homo sapien
gagggagggcgcctttttattgagc

SEQ ID NO: 1180804 - DNA, 25 bp, Homo sapien
cagtctgactgtgaccttcggaatc

SEQ ID NO: 1180805 - DNA, 25 bp, Homo sapien
tcttccttagcaccgttctgctgag

SEQ ID NO: 1180806 - DNA, 25 bp, Homo sapien
tctccaagttctccacagtctgact

SEQ ID NO: 1180807 - DNA, 25 bp, Homo sapien
ctgagatgactccaccgccctgaaa

SEQ ID NO: 1180808 - DNA, 25 bp, Homo sapien
gaggaggcttttcagcaggtcccag

SEQ ID NO: 1180809 - DNA, 25 bp, Homo sapien
cgcctggccttttcaccgttcttgg

SEQ ID NO: 1180810 - DNA, 25 bp, Homo sapien
gcgattccgggacctcctcttgggc

SEQ ID NO: 1180811 - DNA, 25 bp, Homo sapien
tcttgggccgggtgctggccgtcca

SEQ ID NO: 1180812 - DNA, 25 bp, Homo sapien
gcctttttcctgcttggggacatct

SEQ ID NO: 1180813 - DNA, 25 bp, Homo sapien
tgcttggggacatctccgcccttca

SEQ ID NO: 1180814 - DNA, 25 bp, Homo sapien
ctgcttggggacatctccgcccttc

SEQ ID NO: 1180815 - DNA, 25 bp, Homo sapien
tttttcctgcttggggacatctccg

SEQ ID NO: 1180816 - DNA, 25 bp, Homo sapien
gatttatgaagggactgtacggaac

SEQ ID NO: 1180817 - DNA, 25 bp, Homo sapien
cggaacaggacatgtgacagaggca

SEQ ID NO: 1180818 - DNA, 25 bp, Homo sapien
tttgtttctgcatgtcgagctgatt

SEQ ID NO: 1180819 - DNA, 25 bp, Homo sapien
ttctgcatgtgaacgagccaggcca

SEQ ID NO: 1180820 - DNA, 25 bp, Homo sapien
tttctccaacaagttggcacgaggc

SEQ ID NO: 1180821 - DNA, 25 bp, Homo sapien
ctccaacaagttggcacgaggcagg

SEQ ID NO: 1180822 - DNA, 25 bp, Homo sapien
agcctcagcgacagcctttctccaa

SEQ ID NO: 1180823 - DNA, 25 bp, Homo sapien
gcgagaagttggcaagagcagaaga

SEQ ID NO: 1180824 - DNA, 25 bp, Homo sapien
gatagtcataagaatgctatgtgcc

SEQ ID NO: 1180825 - DNA, 25 bp, Homo sapien
tggtgaggaaatcctgacactcagc

SEQ ID NO: 1180826 - DNA, 25 bp, Homo sapien
gatggatctggcaataatagtaaca

SEQ ID NO: 1180827 - DNA, 25 bp, Homo sapien
cagagaggttatttcccctaggtca

SEQ ID NO: 1180828 - DNA, 25 bp, Homo sapien
tagtgtcctggacaggagtgtcatc

SEQ ID NO: 1180829 - DNA, 25 bp, Homo sapien
ttttagtgtcctggacaggagtgtc

SEQ ID NO: 1180830 - DNA, 25 bp, Homo sapien
tcacattttagtgtcctggacagga

SEQ ID NO: 1180831 - DNA, 25 bp, Homo sapien
cattttagtgtcctggacaggagtg

SEQ ID NO: 1180832 - DNA, 25 bp, Homo sapien
gagatgtgtccagcaacttcatcac

SEQ ID NO: 1180833 - DNA, 25 bp, Homo sapien
atgtgtccagcaacttcatcactgg

SEQ ID NO: 1180834 - DNA, 25 bp, Homo sapien
gatgtgtccagcaacttcatcactg

SEQ ID NO: 1180835 - DNA, 25 bp, Homo sapien
agatgtgtccagcaacttcatcact

SEQ ID NO: 1180836 - DNA, 25 bp, Homo sapien
ctgcaatggcttcgtctgctgctgc

SEQ ID NO: 1180837 - DNA, 25 bp, Homo sapien
tctgcaatggcttcgtctgctgctg

SEQ ID NO: 1180838 - DNA, 25 bp, Homo sapien
gcctctgcaatggcttcgtctgctg

SEQ ID NO: 1180839 - DNA, 25 bp, Homo sapien
cctctgcaatggcttcgtctgctgc

SEQ ID NO: 1180840 - DNA, 25 bp, Homo sapien
gatgcaacgcgggacatgaaacctc

SEQ ID NO: 1180841 - DNA, 25 bp, Homo sapien
tcaaatcagaataaggaccgaccct

SEQ ID NO: 1180842 - DNA, 25 bp, Homo sapien
tcacaggatcaatcggagagccagc

SEQ ID NO: 1180843 - DNA, 25 bp, Homo sapien
gacaatatcagtcccaaccaggtta

SEQ ID NO: 1180844 - DNA, 25 bp, Homo sapien
gctagactacaaagatcgtggaaga

SEQ ID NO: 1180845 - DNA, 25 bp, Homo sapien
aattcaagctagactacaaagatcg

SEQ ID NO: 1180846 - DNA, 25 bp, Homo sapien
ctttaactctgttgctgtagaagaa

SEQ ID NO: 1180847 - DNA, 25 bp, Homo sapien
aacccattatggaagcctgaaagaa

SEQ ID NO: 1180848 - DNA, 25 bp, Homo sapien
aaaacctgcatgaaaaactgggcat

SEQ ID NO: 1180849 - DNA, 25 bp, Homo sapien
taactggtcataggacaaaacctgc

SEQ ID NO: 1180850 - DNA, 25 bp, Homo sapien
aatagtggcagatcccttcaaagca

SEQ ID NO: 1180851 - DNA, 25 bp, Homo sapien
gaagcttacctagttccacatgcag

SEQ ID NO: 1180852 - DNA, 25 bp, Homo sapien
gaaagtgcaggattgactcacctag

SEQ ID NO: 1180853 - DNA, 25 bp, Homo sapien
tcacgtggtccatcgagcaaaaact

SEQ ID NO: 1180854 - DNA, 25 bp, Homo sapien
tatagacacgtgagtcacacagggc

SEQ ID NO: 1180855 - DNA, 25 bp, Homo sapien
caaacacattgtactcccctagagc

SEQ ID NO: 1180856 - DNA, 25 bp, Homo sapien
gaggtggacacttctatctttgctg

SEQ ID NO: 1180857 - DNA, 25 bp, Homo sapien
agtatacactctcaagggttttttg

SEQ ID NO: 1180858 - DNA, 25 bp, Homo sapien
tgctgagtatacactctcaagggtt

SEQ ID NO: 1180859 - DNA, 25 bp, Homo sapien
catgtgtgtggaacatgatagaggt

SEQ ID NO: 1180860 - DNA, 25 bp, Homo sapien
tgcgacccttatactgcgtgtcctc

SEQ ID NO: 1180861 - DNA, 25 bp, Homo sapien
gcgtgtcctctgattccctaagcct

SEQ ID NO: 1180862 - DNA, 25 bp, Homo sapien
tactgccccacagcgtggaggagca

SEQ ID NO: 1180863 - DNA, 25 bp, Homo sapien
gcctcgggtccggagcgcttactgc

SEQ ID NO: 1180864 - DNA, 25 bp, Homo sapien
tgaacccgggacctctcgcacccga

SEQ ID NO: 1180865 - DNA, 25 bp, Homo sapien
ggacctctcgcacccgaagcgagaa

SEQ ID NO: 1180866 - DNA, 25 bp, Homo sapien
cccgggacctctcgcacccgaagcg

SEQ ID NO: 1180867 - DNA, 25 bp, Homo sapien
ctcgcacccgaagcgagaatcatac

SEQ ID NO: 1180868 - DNA, 25 bp, Homo sapien
tgacgccccctgctcgtttggagga

SEQ ID NO: 1180869 - DNA, 25 bp, Homo sapien
cacaggattccgcactaggcgtctg

SEQ ID NO: 1180870 - DNA, 25 bp, Homo sapien
gttttacatggtacaaagcaatttg

SEQ ID NO: 1180871 - DNA, 25 bp, Homo sapien
ggcgtctgtttttcaagagtgtgtg

SEQ ID NO: 1180872 - DNA, 25 bp, Homo sapien
caagtgtgagaaacattaggtgaat

SEQ ID NO: 1180873 - DNA, 25 bp, Homo sapien
ggaggctgcggtcatattttgaaga

SEQ ID NO: 1180874 - DNA, 25 bp, Homo sapien
caggaaaggaggctgcggtcatatt

SEQ ID NO: 1180875 - DNA, 25 bp, Homo sapien
aggtgaatcctttgtggtttgcaac

SEQ ID NO: 1180876 - DNA, 25 bp, Homo sapien
gccctgctcaacttggttgccttgg

SEQ ID NO: 1180877 - DNA, 25 bp, Homo sapien
ttcccgacactgattgctggccctg

SEQ ID NO: 1180878 - DNA, 25 bp, Homo sapien
ttgctttcgcatatctgtgttcctg

SEQ ID NO: 1180879 - DNA, 25 bp, Homo sapien
agcagaagttcccaacactgattct

SEQ ID NO: 1180880 - DNA, 25 bp, Homo sapien
ctaacgaaaaagaagcaattcattt

SEQ ID NO: 1180881 - DNA, 25 bp, Homo sapien
taacgaaaaagaagcaattcattta

SEQ ID NO: 1180882 - DNA, 25 bp, Homo sapien
ctcgcctccgtttcagctcttcttg

SEQ ID NO: 1180883 - DNA, 25 bp, Homo sapien
tccgtttcagctcttcttgttctct

SEQ ID NO: 1180884 - DNA, 25 bp, Homo sapien
tcgcctccgtttcagctcttcttgt

SEQ ID NO: 1180885 - DNA, 25 bp, Homo sapien
gcctccgtttcagctcttcttgttc

SEQ ID NO: 1180886 - DNA, 25 bp, Homo sapien
acccgcgccgggtggcacctccacg

SEQ ID NO: 1180887 - DNA, 25 bp, Homo sapien
aagaggcttctgatctctccgccac

SEQ ID NO: 1180888 - DNA, 25 bp, Homo sapien
gcttggggaagaggcttctgatctc

SEQ ID NO: 1180889 - DNA, 25 bp, Homo sapien
actccggtcccagccgcggctctcc

SEQ ID NO: 1180890 - DNA, 25 bp, Homo sapien
ctgagcccgggtccccgctgaggtt

SEQ ID NO: 1180891 - DNA, 25 bp, Homo sapien
tccctgagcccgggtccccgctgag

SEQ ID NO: 1180892 - DNA, 25 bp, Homo sapien
tgagcccgggtccccgctgaggttg

SEQ ID NO: 1180893 - DNA, 25 bp, Homo sapien
cctgagcccgggtccccgctgaggt

SEQ ID NO: 1180894 - DNA, 25 bp, Homo sapien
gccgccagcaccgaccacagccagc

SEQ ID NO: 1180895 - DNA, 25 bp, Homo sapien
cgccggctgtctggggctgcaatca

SEQ ID NO: 1180896 - DNA, 25 bp, Homo sapien
gggctgcaatcaccgccccggctcc

SEQ ID NO: 1180897 - DNA, 25 bp, Homo sapien
ccccggctccggcggacgctgccat

SEQ ID NO: 1180898 - DNA, 25 bp, Homo sapien
gatttatcaatgaaatcatcttgga

SEQ ID NO: 1180899 - DNA, 25 bp, Homo sapien
tttatcaatgaaatcatcttggata

SEQ ID NO: 1180900 - DNA, 25 bp, Homo sapien
ggaggatttatcaatgaaatcatct

SEQ ID NO: 1180901 - DNA, 25 bp, Homo sapien
ggatttatcaatgaaatcatcttgg

SEQ ID NO: 1180902 - DNA, 25 bp, Homo sapien
taaaccaccaggcccagccagagga

SEQ ID NO: 1180903 - DNA, 25 bp, Homo sapien
gcataaaccaccaggcccagccaga

SEQ ID NO: 1180904 - DNA, 25 bp, Homo sapien
accaccaggcccagccagaggacac

SEQ ID NO: 1180905 - DNA, 25 bp, Homo sapien
ataaaccaccaggcccagccagagg

SEQ ID NO: 1180906 - DNA, 25 bp, Homo sapien
tgtagaggaagatgagagccaagcc

SEQ ID NO: 1180907 - DNA, 25 bp, Homo sapien
gagaccttgagacctctaaatggag

SEQ ID NO: 1180908 - DNA, 25 bp, Homo sapien
caggtaaccggatatgcaggtctga

SEQ ID NO: 1180909 - DNA, 25 bp, Homo sapien
tggaagttaccagcatacaggcagt

SEQ ID NO: 1180910 - DNA, 25 bp, Homo sapien
cgcgcccggcgcatacatttaattt

SEQ ID NO: 1180911 - DNA, 25 bp, Homo sapien
ccgcgcccggcgcatacatttaatt

SEQ ID NO: 1180912 - DNA, 25 bp, Homo sapien
ttaatttctgatagtaagtaattct

SEQ ID NO: 1180913 - DNA, 25 bp, Homo sapien
aagtaattctacatgattatatctg

SEQ ID NO: 1180914 - DNA, 25 bp, Homo sapien
tcacggaggattcttaagcaggctt

SEQ ID NO: 1180915 - DNA, 25 bp, Homo sapien
gatgagctggaacttgatcctgtag

SEQ ID NO: 1180916 - DNA, 25 bp, Homo sapien
tcctgtaggaagtgggcatcacgga

SEQ ID NO: 1180917 - DNA, 25 bp, Homo sapien
caggcttgatatagtaacagtggac

SEQ ID NO: 1180918 - DNA, 25 bp, Homo sapien
ccctgttagactcacaactccttga

SEQ ID NO: 1180919 - DNA, 25 bp, Homo sapien
gttagactcacaactccttgagcca

SEQ ID NO: 1180920 - DNA, 25 bp, Homo sapien
ctcccttgcaattaacttcagctcc

SEQ ID NO: 1180921 - DNA, 25 bp, Homo sapien
ttcagctcccctgttagactcacaa

SEQ ID NO: 1180922 - DNA, 25 bp, Homo sapien
tcctcccgcgaatcagggctgctat

SEQ ID NO: 1180923 - DNA, 25 bp, Homo sapien
gtgtgctggtggagataacacaggc

SEQ ID NO: 1180924 - DNA, 25 bp, Homo sapien
gggctctttcctcccgcgaatcagg

SEQ ID NO: 1180925 - DNA, 25 bp, Homo sapien
agtgggctctttcctcccgcgaatc

SEQ ID NO: 1180926 - DNA, 25 bp, Homo sapien
atttatttaaacagcgttctgacct

SEQ ID NO: 1180927 - DNA, 25 bp, Homo sapien
cctgcttaaaagagtacaatcaagc

SEQ ID NO: 1180928 - DNA, 25 bp, Homo sapien
ctcttgttctttgttggtacacagc

SEQ ID NO: 1180929 - DNA, 25 bp, Homo sapien
aaacagcgttctgacctatctcttg

SEQ ID NO: 1180930 - DNA, 25 bp, Homo sapien
gttctataaggagtaccgaatcctg

SEQ ID NO: 1180931 - DNA, 25 bp, Homo sapien
taaggagtaccgaatcctgctgagt

SEQ ID NO: 1180932 - DNA, 25 bp, Homo sapien
tttctctctggggaacggttctata

SEQ ID NO: 1180933 - DNA, 25 bp, Homo sapien
ggagtaccgaatcctgctgagttat

SEQ ID NO: 1180934 - DNA, 25 bp, Homo sapien
caactacggtgagcacgaatggcat

SEQ ID NO: 1180935 - DNA, 25 bp, Homo sapien
caccaatttattcctgccgtccttc

SEQ ID NO: 1180936 - DNA, 25 bp, Homo sapien
acaccaatttattcctgccgtcctt

SEQ ID NO: 1180937 - DNA, 25 bp, Homo sapien
tacaccaatttattcctgccgtcct

SEQ ID NO: 1180938 - DNA, 25 bp, Homo sapien
acagaataattgctgacagtttagg

SEQ ID NO: 1180939 - DNA, 25 bp, Homo sapien
cattgttaaccacagtccatagttt

SEQ ID NO: 1180940 - DNA, 25 bp, Homo sapien
ggcagaatattctacagctaagttc

SEQ ID NO: 1180941 - DNA, 25 bp, Homo sapien
gctaagttcaatcagaatagcacta

SEQ ID NO: 1180942 - DNA, 25 bp, Homo sapien
gtagttgaaagtaggacttaacatg

SEQ ID NO: 1180943 - DNA, 25 bp, Homo sapien
gttgaaagtaggacttaacatgaat

SEQ ID NO: 1180944 - DNA, 25 bp, Homo sapien
tgaaagtaggacttaacatgaatac

SEQ ID NO: 1180945 - DNA, 25 bp, Homo sapien
tagttgaaagtaggacttaacatga

SEQ ID NO: 1180946 - DNA, 25 bp, Homo sapien
ttggcgtatatacttccaaggctga

SEQ ID NO: 1180947 - DNA, 25 bp, Homo sapien
atttcttttggcgtatatacttcca

SEQ ID NO: 1180948 - DNA, 25 bp, Homo sapien
gaagatttcttttggcgtatatact

SEQ ID NO: 1180949 - DNA, 25 bp, Homo sapien
cgacacagtagtgtcggccccctct

SEQ ID NO: 1180950 - DNA, 25 bp, Homo sapien
tccagcccagctgattctgtcttta

SEQ ID NO: 1180951 - DNA, 25 bp, Homo sapien
ctgtctttaaatggtggataattcc

SEQ ID NO: 1180952 - DNA, 25 bp, Homo sapien
ttctgtctttaaatggtggataatt

SEQ ID NO: 1180953 - DNA, 25 bp, Homo sapien
tgattctgtctttaaatggtggata

SEQ ID NO: 1180954 - DNA, 25 bp, Homo sapien
gatataggtgccattgtgtataaac

SEQ ID NO: 1180955 - DNA, 25 bp, Homo sapien
taggtgccattgtgtataaactgca

SEQ ID NO: 1180956 - DNA, 25 bp, Homo sapien
cagatataggtgccattgtgtataa

SEQ ID NO: 1180957 - DNA, 25 bp, Homo sapien
tataggtgccattgtgtataaactg

SEQ ID NO: 1180958 - DNA, 25 bp, Homo sapien
ggagactgcattattactgccaaaa

SEQ ID NO: 1180959 - DNA, 25 bp, Homo sapien
actgccaaaatactcaaggaagtac

SEQ ID NO: 1180960 - DNA, 25 bp, Homo sapien
tccaaccaaacatgagataaaggag

SEQ ID NO: 1180961 - DNA, 25 bp, Homo sapien
tttccaaccaaacatgagataaagg

SEQ ID NO: 1180962 - DNA, 25 bp, Homo sapien
ttttccttctatagaggacagccag

SEQ ID NO: 1180963 - DNA, 25 bp, Homo sapien
taggctagattcaaacgcctcggct

SEQ ID NO: 1180964 - DNA, 25 bp, Homo sapien
ggagactgcctgattctgacatgaa

SEQ ID NO: 1180965 - DNA, 25 bp, Homo sapien
tgttagaacacctcctaaggagact

SEQ ID NO: 1180966 - DNA, 25 bp, Homo sapien
tccacatttaatagcaggcccactg

SEQ ID NO: 1180967 - DNA, 25 bp, Homo sapien
gagttctacatagcttatatgggtt

SEQ ID NO: 1180968 - DNA, 25 bp, Homo sapien
cacatgagttctacatagcttatat

SEQ ID NO: 1180969 - DNA, 25 bp, Homo sapien
catgagttctacatagcttatatgg

SEQ ID NO: 1180970 - DNA, 25 bp, Homo sapien
tctacatagcttatatgggttagct

SEQ ID NO: 1180971 - DNA, 25 bp, Homo sapien
gaaattagggaatgccaggtcacac

SEQ ID NO: 1180972 - DNA, 25 bp, Homo sapien
tgtgaaatgggaggctacatgctct

SEQ ID NO: 1180973 - DNA, 25 bp, Homo sapien
ggctgaaccttttcacggtgacagt

SEQ ID NO: 1180974 - DNA, 25 bp, Homo sapien
tactaagaccaaagcataccatgca

SEQ ID NO: 1180975 - DNA, 25 bp, Homo sapien
gatatatatccaggcaagtcttggc

SEQ ID NO: 1180976 - DNA, 25 bp, Homo sapien
tttacaagaccctcagtgtcggagg

SEQ ID NO: 1180977 - DNA, 25 bp, Homo sapien
actctttacaagaccctcagtgtcg

SEQ ID NO: 1180978 - DNA, 25 bp, Homo sapien
cttccgaggagcctgcttaactggt

SEQ ID NO: 1180979 - DNA, 25 bp, Homo sapien
tccgaggagcctgcttaactggtga

SEQ ID NO: 1180980 - DNA, 25 bp, Homo sapien
ggacaaagctataactggccaaatt

SEQ ID NO: 1180981 - DNA, 25 bp, Homo sapien
caaggaagctacatggttagtaaac

SEQ ID NO: 1180982 - DNA, 25 bp, Homo sapien
tcctaattctgcttgaggcaaggaa

SEQ ID NO: 1180983 - DNA, 25 bp, Homo sapien
ttcttttccacacccaaggaagtga

SEQ ID NO: 1180984 - DNA, 25 bp, Homo sapien
tccttctttccacccatctatttat

SEQ ID NO: 1180985 - DNA, 25 bp, Homo sapien
ggtacacaccactatatctggctta

SEQ ID NO: 1180986 - DNA, 25 bp, Homo sapien
tctttttatgcctgatagttgtttt

SEQ ID NO: 1180987 - DNA, 25 bp, Homo sapien
caccactatatctggcttatgtgtt

SEQ ID NO: 1180988 - DNA, 25 bp, Homo sapien
gctcaatagccaaaagcacgtggtt

SEQ ID NO: 1180989 - DNA, 25 bp, Homo sapien
cactcgaggactagagccatttgaa

SEQ ID NO: 1180990 - DNA, 25 bp, Homo sapien
caacctgtgtccttagtgtgtaacc

SEQ ID NO: 1180991 - DNA, 25 bp, Homo sapien
tacaatggtgcatctaaaagcggag

SEQ ID NO: 1180992 - DNA, 25 bp, Homo sapien
gatttaatattacccaatgtcaact

SEQ ID NO: 1180993 - DNA, 25 bp, Homo sapien
ttcatgactctttcagtctagactc

SEQ ID NO: 1180994 - DNA, 25 bp, Homo sapien
ggtcagataggtggctgcatttcat

SEQ ID NO: 1180995 - DNA, 25 bp, Homo sapien
cagtctagactcttaaaattgtaaa

SEQ ID NO: 1180996 - DNA, 25 bp, Homo sapien
ggatgatacatccaggactgacttt

SEQ ID NO: 1180997 - DNA, 25 bp, Homo sapien
aaaacgctggcggttccttcagcta

SEQ ID NO: 1180998 - DNA, 25 bp, Homo sapien
aatgattaacgtgatcacatcaggg

SEQ ID NO: 1180999 - DNA, 25 bp, Homo sapien
ttcagctacaggcatagaagcaatg

SEQ ID NO: 1181000 - DNA, 25 bp, Homo sapien
ctaactgtgcatatatgactgggcc

SEQ ID NO: 1181001 - DNA, 25 bp, Homo sapien
ttaattctttcggatatccgcatac

SEQ ID NO: 1181002 - DNA, 25 bp, Homo sapien
aattctttcggatatccgcatacac

SEQ ID NO: 1181003 - DNA, 25 bp, Homo sapien
ttctttcggatatccgcatacacca

SEQ ID NO: 1181004 - DNA, 25 bp, Homo sapien
tctttcggatatccgcatacaccac

SEQ ID NO: 1181005 - DNA, 25 bp, Homo sapien
tcttgctggaagcatgactgacgct

SEQ ID NO: 1181006 - DNA, 25 bp, Homo sapien
gatactgtgctaaaggccaccctgg

SEQ ID NO: 1181007 - DNA, 25 bp, Homo sapien
gctacattttctgcacgagagtcca

SEQ ID NO: 1181008 - DNA, 25 bp, Homo sapien
tggagagcggcaacataatgatacc

SEQ ID NO: 1181009 - DNA, 25 bp, Homo sapien
gctgggcctatgaacatggaaggca

SEQ ID NO: 1181010 - DNA, 25 bp, Homo sapien
agcagggcaggcgtttttttctcca

SEQ ID NO: 1181011 - DNA, 25 bp, Homo sapien
gggccagcactgtgtgtcactctct

SEQ ID NO: 1181012 - DNA, 25 bp, Homo sapien
tcagacatgtgtggtgaccaaacct

SEQ ID NO: 1181013 - DNA, 25 bp, Homo sapien
ctcagcttgaaggatggtgacaatc

SEQ ID NO: 1181014 - DNA, 25 bp, Homo sapien
ctgtaaggaaacatgacacaggcct

SEQ ID NO: 1181015 - DNA, 25 bp, Homo sapien
aatgtgtgtcctctgtacctcaagc

SEQ ID NO: 1181016 - DNA, 25 bp, Homo sapien
caaaaagttttaggatgcaaggcag

SEQ ID NO: 1181017 - DNA, 25 bp, Homo sapien
gtcccggcaccgcaagaagaagtga

SEQ ID NO: 1181018 - DNA, 25 bp, Homo sapien
acatggtcccggcaccgcaagaaga

SEQ ID NO: 1181019 - DNA, 25 bp, Homo sapien
gcttcaccaacacatggtcccggca

SEQ ID NO: 1181020 - DNA, 25 bp, Homo sapien
ccggcaccgcaagaagaagtgaagg

SEQ ID NO: 1181021 - DNA, 25 bp, Homo sapien
gattctctgccagaatgccagggca

SEQ ID NO: 1181022 - DNA, 25 bp, Homo sapien
attttaagacgaccctgtttgccag

SEQ ID NO: 1181023 - DNA, 25 bp, Homo sapien
ttatctgcaaccaggaaaggagtgc

SEQ ID NO: 1181024 - DNA, 25 bp, Homo sapien
tgtttgccaggacgaagacatggag

SEQ ID NO: 1181025 - DNA, 25 bp, Homo sapien
tggcagaaggcatgcttcaggccca

SEQ ID NO: 1181026 - DNA, 25 bp, Homo sapien
caggtgtagctggaatgatatgagt

SEQ ID NO: 1181027 - DNA, 25 bp, Homo sapien
gaaatagagtaactagagcagaact

SEQ ID NO: 1181028 - DNA, 25 bp, Homo sapien
cacacggacggcatttttgaagaaa

SEQ ID NO: 1181029 - DNA, 25 bp, Homo sapien
tctctaaccagctcctaagggactg

SEQ ID NO: 1181030 - DNA, 25 bp, Homo sapien
caaggctgtggatcaaacagcggcc

SEQ ID NO: 1181031 - DNA, 25 bp, Homo sapien
gtacttccttttggtgtgagaggcc

SEQ ID NO: 1181032 - DNA, 25 bp, Homo sapien
ccacagggcatagtggttaggaaca

SEQ ID NO: 1181033 - DNA, 25 bp, Homo sapien
taccaataccacagatgccactttc

SEQ ID NO: 1181034 - DNA, 25 bp, Homo sapien
aaagtgcaggggagaacccgccata

SEQ ID NO: 1181035 - DNA, 25 bp, Homo sapien
aacccgccataaaagcagatggttg

SEQ ID NO: 1181036 - DNA, 25 bp, Homo sapien
ttggctcctaccaccagctctacca

SEQ ID NO: 1181037 - DNA, 25 bp, Homo sapien
caagaagggacaatagcttcacatc

SEQ ID NO: 1181038 - DNA, 25 bp, Homo sapien
tgagaaacctcaggccttaagatgg

SEQ ID NO: 1181039 - DNA, 25 bp, Homo sapien
tcttcacagaggtagggagatttta

SEQ ID NO: 1181040 - DNA, 25 bp, Homo sapien
ccttggagtccttatcacagaatga

SEQ ID NO: 1181041 - DNA, 25 bp, Homo sapien
tcttgggacccaggtacttgatcaa

SEQ ID NO: 1181042 - DNA, 25 bp, Homo sapien
tccacagatgcttgacattcttggg

SEQ ID NO: 1181043 - DNA, 25 bp, Homo sapien
atcttcctgtaaccccatgagctca

SEQ ID NO: 1181044 - DNA, 25 bp, Homo sapien
gaaagttttcccctgctgaggcaac

SEQ ID NO: 1181045 - DNA, 25 bp, Homo sapien
gactgagtagctaggttaaacatta

SEQ ID NO: 1181046 - DNA, 25 bp, Homo sapien
cagctctgactgagtagctaggtta

SEQ ID NO: 1181047 - DNA, 25 bp, Homo sapien
tctgactgagtagctaggttaaaca

SEQ ID NO: 1181048 - DNA, 25 bp, Homo sapien
gagtagctaggttaaacattaaagc

SEQ ID NO: 1181049 - DNA, 25 bp, Homo sapien
tcaaggatgagtaacgaaagaggct

SEQ ID NO: 1181050 - DNA, 25 bp, Homo sapien
tattagaaaatcatgccgggcgcgg

SEQ ID NO: 1181051 - DNA, 25 bp, Homo sapien
ccaaaaagctgagtcatggtccaaa

SEQ ID NO: 1181052 - DNA, 25 bp, Homo sapien
gaaacgttgatgtcaggacaaccat

SEQ ID NO: 1181053 - DNA, 25 bp, Homo sapien
caatgctgctcagactttagtgggc

SEQ ID NO: 1181054 - DNA, 25 bp, Homo sapien
caatgtgagttaaaggttaaggaat

SEQ ID NO: 1181055 - DNA, 25 bp, Homo sapien
aaacagctgtgtcctaggccaatgc

SEQ ID NO: 1181056 - DNA, 25 bp, Homo sapien
tttttcttgtctatctcagcaggag

SEQ ID NO: 1181057 - DNA, 25 bp, Homo sapien
tctaaaatgggtcagaacagaacat

SEQ ID NO: 1181058 - DNA, 25 bp, Homo sapien
tatgcaaccgtatggtctatcagag

SEQ ID NO: 1181059 - DNA, 25 bp, Homo sapien
tgactatccccaagactgaaaatcg

SEQ ID NO: 1181060 - DNA, 25 bp, Homo sapien
tcccgtggtgcgatcgcggatcact

SEQ ID NO: 1181061 - DNA, 25 bp, Homo sapien
tatatcttcacgaaagcgggcttcg

SEQ ID NO: 1181062 - DNA, 25 bp, Homo sapien
taggtctactcacatggaggcaggc

SEQ ID NO: 1181063 - DNA, 25 bp, Homo sapien
gctttgcaccaaatagaggcccctt

SEQ ID NO: 1181064 - DNA, 25 bp, Homo sapien
cacggactgagttatacttgcccaa

SEQ ID NO: 1181065 - DNA, 25 bp, Homo sapien
tgaagacatctgacgaagacattat

SEQ ID NO: 1181066 - DNA, 25 bp, Homo sapien
atttctgcatatggacagtcctgaa

SEQ ID NO: 1181067 - DNA, 25 bp, Homo sapien
cagtgtgaagaaatcctagagattg

SEQ ID NO: 1181068 - DNA, 25 bp, Homo sapien
gacattatccctctggaatcttgcc

SEQ ID NO: 1181069 - DNA, 25 bp, Homo sapien
cacaggagagagtaggccgaagcat

SEQ ID NO: 1181070 - DNA, 25 bp, Homo sapien
caaaaacatctcagcaggtctacag

SEQ ID NO: 1181071 - DNA, 25 bp, Homo sapien
tttcagagagataaacggaagttcc

SEQ ID NO: 1181072 - DNA, 25 bp, Homo sapien
gagcactttgcagcatggaccttgg

SEQ ID NO: 1181073 - DNA, 25 bp, Homo sapien
ttcttggtttatctttcgggcctca

SEQ ID NO: 1181074 - DNA, 25 bp, Homo sapien
tccgcattcaggaatccttcttggt

SEQ ID NO: 1181075 - DNA, 25 bp, Homo sapien
tcgcctgcttgccttttgactcagg

SEQ ID NO: 1181076 - DNA, 25 bp, Homo sapien
tatctttcgggcctcattcgcctgc

SEQ ID NO: 1181077 - DNA, 25 bp, Homo sapien
gattagagagcttgacataggccac

SEQ ID NO: 1181078 - DNA, 25 bp, Homo sapien
catggcctaccattgaggagaaaag

SEQ ID NO: 1181079 - DNA, 25 bp, Homo sapien
taaatgtttgtgacctttggctccg

SEQ ID NO: 1181080 - DNA, 25 bp, Homo sapien
gagactgagcatacattactccacg

SEQ ID NO: 1181081 - DNA, 25 bp, Homo sapien
agctaactgtgtgtttagaaggcac

SEQ ID NO: 1181082 - DNA, 25 bp, Homo sapien
gatgtggacaaaaccattgggacct

SEQ ID NO: 1181083 - DNA, 25 bp, Homo sapien
gtctctctacatgacttaaggaact

SEQ ID NO: 1181084 - DNA, 25 bp, Homo sapien
ggcactgtaactggtagctagttct

SEQ ID NO: 1181085 - DNA, 25 bp, Homo sapien
atacttttgcacaggaaactatatg

SEQ ID NO: 1181086 - DNA, 25 bp, Homo sapien
tatgttcacaagtttgtcacgttct

SEQ ID NO: 1181087 - DNA, 25 bp, Homo sapien
tgttcacaagtttgtcacgttcttg

SEQ ID NO: 1181088 - DNA, 25 bp, Homo sapien
aaataatacttttgcacaggaaact

SEQ ID NO: 1181089 - DNA, 25 bp, Homo sapien
gaaagactatggctctgtggttact

SEQ ID NO: 1181090 - DNA, 25 bp, Homo sapien
tccattccattataagctaggagga

SEQ ID NO: 1181091 - DNA, 25 bp, Homo sapien
gaattgaggaaatggtccttagcgt

SEQ ID NO: 1181092 - DNA, 25 bp, Homo sapien
taaatgaagcccaaggtatggtaga

SEQ ID NO: 1181093 - DNA, 25 bp, Homo sapien
tagctccccttcgttgtcagccagg

SEQ ID NO: 1181094 - DNA, 25 bp, Homo sapien
cgtggcaggaaaagtgactagctcc

SEQ ID NO: 1181095 - DNA, 25 bp, Homo sapien
tgccaacgatccctcggcggcgatg

SEQ ID NO: 1181096 - DNA, 25 bp, Homo sapien
cttttcggttcacagcgggcaggga

SEQ ID NO: 1181097 - DNA, 25 bp, Homo sapien
caattctgtagtctctcgctcacga

SEQ ID NO: 1181098 - DNA, 25 bp, Homo sapien
taaccagatccttaagtcgctaggg

SEQ ID NO: 1181099 - DNA, 25 bp, Homo sapien
aattgtgcggcatcatctttaggca

SEQ ID NO: 1181100 - DNA, 25 bp, Homo sapien
taactacgggcctgcttaatcaaag

SEQ ID NO: 1181101 - DNA, 25 bp, Homo sapien
gcggaggcgatggcgactcctccct

SEQ ID NO: 1181102 - DNA, 25 bp, Homo sapien
cctccagggcgcagcgttagatggc

SEQ ID NO: 1181103 - DNA, 25 bp, Homo sapien
ttagactaaccagaacatccaaaga

SEQ ID NO: 1181104 - DNA, 25 bp, Homo sapien
gcctcatactctccttcttagacta

SEQ ID NO: 1181105 - DNA, 25 bp, Homo sapien
cacccgtttcaacacccgagccgca

SEQ ID NO: 1181106 - DNA, 25 bp, Homo sapien
tatcgactccgcagccgggacgggt

SEQ ID NO: 1181107 - DNA, 25 bp, Homo sapien
ctcacgtcccacaacaggtgtgggt

SEQ ID NO: 1181108 - DNA, 25 bp, Homo sapien
ccaggtatcgactccgcagccggga

SEQ ID NO: 1181109 - DNA, 25 bp, Homo sapien
gtgggtaggagccaccccgagacat

SEQ ID NO: 1181110 - DNA, 25 bp, Homo sapien
gaggcaccggcacggaattcggcaa

SEQ ID NO: 1181111 - DNA, 25 bp, Homo sapien
gcaccggcacggaattcggcaacca

SEQ ID NO: 1181112 - DNA, 25 bp, Homo sapien
cggcacggaattcggcaaccaaggc

SEQ ID NO: 1181113 - DNA, 25 bp, Homo sapien
gggaggcaccggcacggaattcggc

SEQ ID NO: 1181114 - DNA, 25 bp, Homo sapien
ggaaagcgcgctggaaaagagcaaa

SEQ ID NO: 1181115 - DNA, 25 bp, Homo sapien
caacttaggttcttcggctgagcgg

SEQ ID NO: 1181116 - DNA, 25 bp, Homo sapien
ggaggttccgcaagtctcccgagtc

SEQ ID NO: 1181117 - DNA, 25 bp, Homo sapien
taacttttgctctaaacgcggcagc

SEQ ID NO: 1181118 - DNA, 25 bp, Homo sapien
aagtccctgagggtggtcaacgcgt

SEQ ID NO: 1181119 - DNA, 25 bp, Homo sapien
gtggtcaacgcgtcgcagccgacac

SEQ ID NO: 1181120 - DNA, 25 bp, Homo sapien
tctgtctggagcgtgaagtccctga

SEQ ID NO: 1181121 - DNA, 25 bp, Homo sapien
ggattctgtctggagcgtgaagtcc

SEQ ID NO: 1181122 - DNA, 25 bp, Homo sapien
taggttttggctcagcgccgcaaaa

SEQ ID NO: 1181123 - DNA, 25 bp, Homo sapien
tcagctatcacttttaggttttggc

SEQ ID NO: 1181124 - DNA, 25 bp, Homo sapien
ggttttggctcagcgccgcaaaaac

SEQ ID NO: 1181125 - DNA, 25 bp, Homo sapien
gctatcacttttaggttttggctca

SEQ ID NO: 1181126 - DNA, 25 bp, Homo sapien
tggaatactgttcccccaagtactg

SEQ ID NO: 1181127 - DNA, 25 bp, Homo sapien
actcgggcgtgacctagaatcctca

SEQ ID NO: 1181128 - DNA, 25 bp, Homo sapien
tacgaaactgtaaatgccaagtgtg

SEQ ID NO: 1181129 - DNA, 25 bp, Homo sapien
tagaaagcttaactacgaaactgta

SEQ ID NO: 1181130 - DNA, 25 bp, Homo sapien
cctatctcctttactagactagttg

SEQ ID NO: 1181131 - DNA, 25 bp, Homo sapien
tgacttgaacatactacacttaggt

SEQ ID NO: 1181132 - DNA, 25 bp, Homo sapien
ggattaggtttaaatatctgacttg

SEQ ID NO: 1181133 - DNA, 25 bp, Homo sapien
ctcagagccttagttcttacttggg

SEQ ID NO: 1181134 - DNA, 25 bp, Homo sapien
tgcttcaagttttaatctttggata

SEQ ID NO: 1181135 - DNA, 25 bp, Homo sapien
cacattaagggttgcttcaagtttt

SEQ ID NO: 1181136 - DNA, 25 bp, Homo sapien
tttggtgtcatctgagccagataaa

SEQ ID NO: 1181137 - DNA, 25 bp, Homo sapien
tatattctccagtgtcattccaaca

SEQ ID NO: 1181138 - DNA, 25 bp, Homo sapien
aaaatatattctccagtgtcattcc

SEQ ID NO: 1181139 - DNA, 25 bp, Homo sapien
taatttggtgtcatctgagccagat

SEQ ID NO: 1181140 - DNA, 25 bp, Homo sapien
ctctgatgagaaacctctccttaaa

SEQ ID NO: 1181141 - DNA, 25 bp, Homo sapien
tccttaaaaagtatttctcagtgct

SEQ ID NO: 1181142 - DNA, 25 bp, Homo sapien
cctctccttaaaaagtatttctcag

SEQ ID NO: 1181143 - DNA, 25 bp, Homo sapien
tctccttaaaaagtatttctcagtg

SEQ ID NO: 1181144 - DNA, 25 bp, Homo sapien
agatccagcttcaaacagccagcca

SEQ ID NO: 1181145 - DNA, 25 bp, Homo sapien
ccaggcccattcaaacatcactata

SEQ ID NO: 1181146 - DNA, 25 bp, Homo sapien
ctgtaagatccagcttcaaacagcc

SEQ ID NO: 1181147 - DNA, 25 bp, Homo sapien
ggcccattcaaacatcactatataa

SEQ ID NO: 1181148 - DNA, 25 bp, Homo sapien
atgtttaaaaccctacagtgactgt

SEQ ID NO: 1181149 - DNA, 25 bp, Homo sapien
ggattatttcaatggcctcctatct

SEQ ID NO: 1181150 - DNA, 25 bp, Homo sapien
gttcaaactctaccctccaaaagca

SEQ ID NO: 1181151 - DNA, 25 bp, Homo sapien
gtcattatctgtgcctgagtcatct

SEQ ID NO: 1181152 - DNA, 25 bp, Homo sapien
aatatgtttgctcggtgccctgaac

SEQ ID NO: 1181153 - DNA, 25 bp, Homo sapien
aaatatgtttgctcggtgccctgaa

SEQ ID NO: 1181154 - DNA, 25 bp, Homo sapien
taaatatgtttgctcggtgccctga

SEQ ID NO: 1181155 - DNA, 25 bp, Homo sapien
ctaaatatgtttgctcggtgccctg

SEQ ID NO: 1181156 - DNA, 25 bp, Homo sapien
aaggagaggagggttaatggagatt

SEQ ID NO: 1181157 - DNA, 25 bp, Homo sapien
gaggagggttaatggagattggaaa

SEQ ID NO: 1181158 - DNA, 25 bp, Homo sapien
cgtctggcctccaaaggtggacttt

SEQ ID NO: 1181159 - DNA, 25 bp, Homo sapien
atatcagaactcacaataaatgtaa

SEQ ID NO: 1181160 - DNA, 25 bp, Homo sapien
aagggtcattgggtacagtcataat

SEQ ID NO: 1181161 - DNA, 25 bp, Homo sapien
cttcttttgtgcagctagttttgat

SEQ ID NO: 1181162 - DNA, 25 bp, Homo sapien
caagagagaaaagtgtaagggtcat

SEQ ID NO: 1181163 - DNA, 25 bp, Homo sapien
tttgatgcgtgtatcaaaccaccta

SEQ ID NO: 1181164 - DNA, 25 bp, Homo sapien
tagaaaatgtaagagctagtacccc

SEQ ID NO: 1181165 - DNA, 25 bp, Homo sapien
ggtactctgttgattccatactgct

SEQ ID NO: 1181166 - DNA, 25 bp, Homo sapien
tactgctttgtctaatgactctcac

SEQ ID NO: 1181167 - DNA, 25 bp, Homo sapien
caaacatatcctgaaggtactctgt

SEQ ID NO: 1181168 - DNA, 25 bp, Homo sapien
ctgagctgtcagaacaaccaacagc

SEQ ID NO: 1181169 - DNA, 25 bp, Homo sapien
tcatatattcgtactgagctgtcag

SEQ ID NO: 1181170 - DNA, 25 bp, Homo sapien
gctgtcagaacaaccaacagcaagg

SEQ ID NO: 1181171 - DNA, 25 bp, Homo sapien
ccgatcatatattcgtactgagctg

SEQ ID NO: 1181172 - DNA, 25 bp, Homo sapien
ctatagtgagtgaagggaaagagca

SEQ ID NO: 1181173 - DNA, 25 bp, Homo sapien
taaaagctatcacagttccgaaaag

SEQ ID NO: 1181174 - DNA, 25 bp, Homo sapien
ttaacagcactttaaggtaagcagg

SEQ ID NO: 1181175 - DNA, 25 bp, Homo sapien
tacatatccaaatagactggactcc

SEQ ID NO: 1181176 - DNA, 25 bp, Homo sapien
ggcaaccattccagtagtccctcga

SEQ ID NO: 1181177 - DNA, 25 bp, Homo sapien
tctcttccgcagaaggagttttaag

SEQ ID NO: 1181178 - DNA, 25 bp, Homo sapien
tctcgtgctgtatcatctttcgggt

SEQ ID NO: 1181179 - DNA, 25 bp, Homo sapien
gagaatctcttgaccatcttcactg

SEQ ID NO: 1181180 - DNA, 25 bp, Homo sapien
cgcccggccaaaggacatggttttg

SEQ ID NO: 1181181 - DNA, 25 bp, Homo sapien
gccaaaggacatggttttgagtaaa

SEQ ID NO: 1181182 - DNA, 25 bp, Homo sapien
cgcgcccggccaaaggacatggttt

SEQ ID NO: 1181183 - DNA, 25 bp, Homo sapien
cccggccaaaggacatggttttgag

SEQ ID NO: 1181184 - DNA, 25 bp, Homo sapien
gcgatggcgtgatttcggctcacca

SEQ ID NO: 1181185 - DNA, 25 bp, Homo sapien
gtgcgatggcgtgatttcggctcac

SEQ ID NO: 1181186 - DNA, 25 bp, Homo sapien
tgcgatggcgtgatttcggctcacc

SEQ ID NO: 1181187 - DNA, 25 bp, Homo sapien
ttagaatgttgatgagaagagcggc

SEQ ID NO: 1181188 - DNA, 25 bp, Homo sapien
gtccgacagggagccacttagaatg

SEQ ID NO: 1181189 - DNA, 25 bp, Homo sapien
tcggatcagggtggtaatgcagcaa

SEQ ID NO: 1181190 - DNA, 25 bp, Homo sapien
catgccagagatgctgatagctcgg

SEQ ID NO: 1181191 - DNA, 25 bp, Homo sapien
taaccagaacaaagcttaatgtggc

SEQ ID NO: 1181192 - DNA, 25 bp, Homo sapien
cgtaagtgtgtgacagggaataacc

SEQ ID NO: 1181193 - DNA, 25 bp, Homo sapien
agagggcttcatccttcatacgaac

SEQ ID NO: 1181194 - DNA, 25 bp, Homo sapien
tccctgaggactaataacgttgagt

SEQ ID NO: 1181195 - DNA, 25 bp, Homo sapien
cagagctaataagatctccagccac

SEQ ID NO: 1181196 - DNA, 25 bp, Homo sapien
gtggtgtatattcataaagaggtac

SEQ ID NO: 1181197 - DNA, 25 bp, Homo sapien
caccacatctgatccattttaaaca

SEQ ID NO: 1181198 - DNA, 25 bp, Homo sapien
taaagaggtacaaccgtcatcatta

SEQ ID NO: 1181199 - DNA, 25 bp, Homo sapien
cagtatctgaccaatcaccacgaag

SEQ ID NO: 1181200 - DNA, 25 bp, Homo sapien
tcaaacgcttaactggtggttgtcg

SEQ ID NO: 1181201 - DNA, 25 bp, Homo sapien
gggtccagtatctgaccaatcacca

SEQ ID NO: 1181202 - DNA, 25 bp, Homo sapien
ctcaaacgcttaactggtggttgtc

SEQ ID NO: 1181203 - DNA, 25 bp, Homo sapien
caatgacacattgggactctgctct

SEQ ID NO: 1181204 - DNA, 25 bp, Homo sapien
tctctgcatcaatgacacattggga

SEQ ID NO: 1181205 - DNA, 25 bp, Homo sapien
atcagacattctctgcatcaatgac

SEQ ID NO: 1181206 - DNA, 25 bp, Homo sapien
gcatcaatgacacattgggactctg

SEQ ID NO: 1181207 - DNA, 25 bp, Homo sapien
cttcttcaaaccatcttgataacat

SEQ ID NO: 1181208 - DNA, 25 bp, Homo sapien
gcttcttcaaaccatcttgataaca

SEQ ID NO: 1181209 - DNA, 25 bp, Homo sapien
tgcttcttcaaaccatcttgataac

SEQ ID NO: 1181210 - DNA, 25 bp, Homo sapien
ttgcttcttcaaaccatcttgataa

SEQ ID NO: 1181211 - DNA, 25 bp, Homo sapien
cctcgtcctctattgctttgtgcaa

SEQ ID NO: 1181212 - DNA, 25 bp, Homo sapien
cttcctcgtcctctattgctttgtg

SEQ ID NO: 1181213 - DNA, 25 bp, Homo sapien
tgggtcgagatcttcctcgtcctct

SEQ ID NO: 1181214 - DNA, 25 bp, Homo sapien
ctctgggtcgagatcttcctcgtcc

SEQ ID NO: 1181215 - DNA, 25 bp, Homo sapien
ttccaaatcaggacttgatgggacc

SEQ ID NO: 1181216 - DNA, 25 bp, Homo sapien
tgggaccgtaggaagagttgaaata

SEQ ID NO: 1181217 - DNA, 25 bp, Homo sapien
gaccgtaggaagagttgaaatatct

SEQ ID NO: 1181218 - DNA, 25 bp, Homo sapien
tcaggacttgatgggaccgtaggaa

SEQ ID NO: 1181219 - DNA, 25 bp, Homo sapien
tagaggatgtagaaggctgaagaaa

SEQ ID NO: 1181220 - DNA, 25 bp, Homo sapien
gagatgatgtcgaatgagcctgagc

SEQ ID NO: 1181221 - DNA, 25 bp, Homo sapien
tagaatgagggctttctgtgggaga

SEQ ID NO: 1181222 - DNA, 25 bp, Homo sapien
tgttcagctggagtatctacttcca

SEQ ID NO: 1181223 - DNA, 25 bp, Homo sapien
cagatgcctcaacagactgcctttg

SEQ ID NO: 1181224 - DNA, 25 bp, Homo sapien
gatgcctcaacagactgcctttgtt

SEQ ID NO: 1181225 - DNA, 25 bp, Homo sapien
tgcctcaacagactgcctttgttca

SEQ ID NO: 1181226 - DNA, 25 bp, Homo sapien
cctcaacagactgcctttgttcact

SEQ ID NO: 1181227 - DNA, 25 bp, Homo sapien
atcaaaaatcattagatgaaccaca

SEQ ID NO: 1181228 - DNA, 25 bp, Homo sapien
tgaaccacagcatacttatcctcac

SEQ ID NO: 1181229 - DNA, 25 bp, Homo sapien
tgaagattcctgctatttgttaaaa

SEQ ID NO: 1181230 - DNA, 25 bp, Homo sapien
taagtcaggcacattaaactatgtc

SEQ ID NO: 1181231 - DNA, 25 bp, Homo sapien
aaagcggaaaaccacaggaatgatg

SEQ ID NO: 1181232 - DNA, 25 bp, Homo sapien
taagttccagtgtatcagaggagga

SEQ ID NO: 1181233 - DNA, 25 bp, Homo sapien
gatgtccctgagtaaactaaaggag

SEQ ID NO: 1181234 - DNA, 25 bp, Homo sapien
tcagaaatcaataacgccaggtact

SEQ ID NO: 1181235 - DNA, 25 bp, Homo sapien
ctgggtatgtgcagctagctcttgc

SEQ ID NO: 1181236 - DNA, 25 bp, Homo sapien
tcagccttcttaagcctcagttgtt

SEQ ID NO: 1181237 - DNA, 25 bp, Homo sapien
tgtgaagagccctcatgagaagact

SEQ ID NO: 1181238 - DNA, 25 bp, Homo sapien
ctcagttgttgcaggcgcttacgaa

SEQ ID NO: 1181239 - DNA, 25 bp, Homo sapien
tcttacatatgagaaacgcacattc

SEQ ID NO: 1181240 - DNA, 25 bp, Homo sapien
gaaagacagcatcttacttcacaga

SEQ ID NO: 1181241 - DNA, 25 bp, Homo sapien
tttgagcccactaaaaatgtaggtg

SEQ ID NO: 1181242 - DNA, 25 bp, Homo sapien
tgggattatcctaaaccagcatcag

SEQ ID NO: 1181243 - DNA, 25 bp, Homo sapien
taggtcagtaccagcagactccaca

SEQ ID NO: 1181244 - DNA, 25 bp, Homo sapien
tgtggtggttaggtcagtaccagca

SEQ ID NO: 1181245 - DNA, 25 bp, Homo sapien
gctctgtggtggttaggtcagtacc

SEQ ID NO: 1181246 - DNA, 25 bp, Homo sapien
gagcaggagccagcaacccatgact

SEQ ID NO: 1181247 - DNA, 25 bp, Homo sapien
gcctgcttgcacaggatcgggtaag

SEQ ID NO: 1181248 - DNA, 25 bp, Homo sapien
tccaatgcatccatctgagaagtgc

SEQ ID NO: 1181249 - DNA, 25 bp, Homo sapien
gagaagtgctgccatgtgactgtca

SEQ ID NO: 1181250 - DNA, 25 bp, Homo sapien
tatggacactgtgggaaatctggtg

SEQ ID NO: 1181251 - DNA, 25 bp, Homo sapien
cagtaatattgtaaccctgggcaag

SEQ ID NO: 1181252 - DNA, 25 bp, Homo sapien
aattatagtctaacaggtaaatcac

SEQ ID NO: 1181253 - DNA, 25 bp, Homo sapien
gcatgtctcatggtcaattactgtg

SEQ ID NO: 1181254 - DNA, 25 bp, Homo sapien
tagccccttgacaccagaattatct

SEQ ID NO: 1181255 - DNA, 25 bp, Homo sapien
catagacattgtgtatttctgaggc

SEQ ID NO: 1181256 - DNA, 25 bp, Homo sapien
tgggaacacacaactcctttgggaa

SEQ ID NO: 1181257 - DNA, 25 bp, Homo sapien
aaaataccatgaaatgtacaaatct

SEQ ID NO: 1181258 - DNA, 25 bp, Homo sapien
aaactctccaagaaatcttatcttc

SEQ ID NO: 1181259 - DNA, 25 bp, Homo sapien
cctgttgctcgtcaagtgacatgga

SEQ ID NO: 1181260 - DNA, 25 bp, Homo sapien
catggatccgagctgtttgttaacc

SEQ ID NO: 1181261 - DNA, 25 bp, Homo sapien
ggatccgagctgtttgttaaccaca

SEQ ID NO: 1181262 - DNA, 25 bp, Homo sapien
tcaagtgacatggatccgagctgtt

SEQ ID NO: 1181263 - DNA, 25 bp, Homo sapien
taccagataagtgagacataaaacc

SEQ ID NO: 1181264 - DNA, 25 bp, Homo sapien
gatggatgggcatagcgcatctcct

SEQ ID NO: 1181265 - DNA, 25 bp, Homo sapien
gggccaaagtgagaaatgagcttac

SEQ ID NO: 1181266 - DNA, 25 bp, Homo sapien
cataagcaacgaggtagtattaacc

SEQ ID NO: 1181267 - DNA, 25 bp, Homo sapien
ctctgggttcgtaactatagtcttt

SEQ ID NO: 1181268 - DNA, 25 bp, Homo sapien
ctgggttcgtaactatagtctttag

SEQ ID NO: 1181269 - DNA, 25 bp, Homo sapien
tctgggttcgtaactatagtcttta

SEQ ID NO: 1181270 - DNA, 25 bp, Homo sapien
ggaagtgggagcttctgactgacag

SEQ ID NO: 1181271 - DNA, 25 bp, Homo sapien
tttgatcgctagtaataaagcctga

SEQ ID NO: 1181272 - DNA, 25 bp, Homo sapien
tcaggctctattcaaggcttggaga

SEQ ID NO: 1181273 - DNA, 25 bp, Homo sapien
aagtaacgcgttcatttcatcaggc

SEQ ID NO: 1181274 - DNA, 25 bp, Homo sapien
cagccttttcagatgtcccttcatg

SEQ ID NO: 1181275 - DNA, 25 bp, Homo sapien
gaggttctcctagtcatcctgtatg

SEQ ID NO: 1181276 - DNA, 25 bp, Homo sapien
tccattcagagtatcaggccatagc

SEQ ID NO: 1181277 - DNA, 25 bp, Homo sapien
agtcactttgtcctgcatactgagg

SEQ ID NO: 1181278 - DNA, 25 bp, Homo sapien
cagggatgccttatttggccctcaa

SEQ ID NO: 1181279 - DNA, 25 bp, Homo sapien
caacacaatgaagaacctggtttct

SEQ ID NO: 1181280 - DNA, 25 bp, Homo sapien
catgaactcttctgttagtcacaaa

SEQ ID NO: 1181281 - DNA, 25 bp, Homo sapien
tcatcagccttgtgtaaaactagcc

SEQ ID NO: 1181282 - DNA, 25 bp, Homo sapien
tcaggtccctgagtgtagttatttc

SEQ ID NO: 1181283 - DNA, 25 bp, Homo sapien
gaaaagtattccacaagagtcaagc

SEQ ID NO: 1181284 - DNA, 25 bp, Homo sapien
tgttggagcacacattaagagaatc

SEQ ID NO: 1181285 - DNA, 25 bp, Homo sapien
cgagtcgagtctgggtgagacctca

SEQ ID NO: 1181286 - DNA, 25 bp, Homo sapien
gctcagtggtgggaggaacccttaa

SEQ ID NO: 1181287 - DNA, 25 bp, Homo sapien
ctgtgctgtagtgcaaacttaaaac

SEQ ID NO: 1181288 - DNA, 25 bp, Homo sapien
tgcaaacttaaaactggttcacctg

SEQ ID NO: 1181289 - DNA, 25 bp, Homo sapien
actggttcacctgtccctggtttgg

SEQ ID NO: 1181290 - DNA, 25 bp, Homo sapien
cttaaaactggttcacctgtccctg

SEQ ID NO: 1181291 - DNA, 25 bp, Homo sapien
ctgtagctaacaatcaatgagggcc

SEQ ID NO: 1181292 - DNA, 25 bp, Homo sapien
tataaagtcctactggctgcacctt

SEQ ID NO: 1181293 - DNA, 25 bp, Homo sapien
tctcaggtgccaatcaatgtgctag

SEQ ID NO: 1181294 - DNA, 25 bp, Homo sapien
caaggctttcctatgcatgctatca

SEQ ID NO: 1181295 - DNA, 25 bp, Homo sapien
aaatataaagggactgcttcttcac

SEQ ID NO: 1181296 - DNA, 25 bp, Homo sapien
ggatcctttcattatctagtatgta

SEQ ID NO: 1181297 - DNA, 25 bp, Homo sapien
gatgactatcataacacactttact

SEQ ID NO: 1181298 - DNA, 25 bp, Homo sapien
caaaacaagataagtgattccacca

SEQ ID NO: 1181299 - DNA, 25 bp, Homo sapien
tgagctctgtgggacgaaagattcc

SEQ ID NO: 1181300 - DNA, 25 bp, Homo sapien
tctagaacttgatgctatactgctc

SEQ ID NO: 1181301 - DNA, 25 bp, Homo sapien
cctgaccctcagatttgcaatggct

SEQ ID NO: 1181302 - DNA, 25 bp, Homo sapien
cttctggtggttgcactgagctctg

SEQ ID NO: 1181303 - DNA, 25 bp, Homo sapien
cgaaatctaaacttaaaactgagca

SEQ ID NO: 1181304 - DNA, 25 bp, Homo sapien
gaaatctaaacttaaaactgagcat

SEQ ID NO: 1181305 - DNA, 25 bp, Homo sapien
ggttctcaactgggttttctgcaga

SEQ ID NO: 1181306 - DNA, 25 bp, Homo sapien
ttatattgatatggttctcaactgg

SEQ ID NO: 1181307 - DNA, 25 bp, Homo sapien
ctcaactgggttttctgcagatact

SEQ ID NO: 1181308 - DNA, 25 bp, Homo sapien
tctcaactgggttttctgcagatac

SEQ ID NO: 1181309 - DNA, 25 bp, Homo sapien
aatggcttggctgtgaacttatctg

SEQ ID NO: 1181310 - DNA, 25 bp, Homo sapien
agttggaatccaatggcttggctgt

SEQ ID NO: 1181311 - DNA, 25 bp, Homo sapien
ttggctgtgaacttatctgattgtg

SEQ ID NO: 1181312 - DNA, 25 bp, Homo sapien
ctgagttggaatccaatggcttggc

SEQ ID NO: 1181313 - DNA, 25 bp, Homo sapien
gcactctcagtgctagtctgatctg

SEQ ID NO: 1181314 - DNA, 25 bp, Homo sapien
ggtgttattttcattggtagcactc

SEQ ID NO: 1181315 - DNA, 25 bp, Homo sapien
gcagattcttctggaaccccacaag

SEQ ID NO: 1181316 - DNA, 25 bp, Homo sapien
ggctttttcagatgaagcagattct

SEQ ID NO: 1181317 - DNA, 25 bp, Homo sapien
tcaccaggtcctgctcgataccttg

SEQ ID NO: 1181318 - DNA, 25 bp, Homo sapien
ctatcaccaggtcctgctcgatacc

SEQ ID NO: 1181319 - DNA, 25 bp, Homo sapien
accaggtcctgctcgataccttgca

SEQ ID NO: 1181320 - DNA, 25 bp, Homo sapien
tatcaccaggtcctgctcgatacct

SEQ ID NO: 1181321 - DNA, 25 bp, Homo sapien
ccttgacttcataaataacctgtgg

SEQ ID NO: 1181322 - DNA, 25 bp, Homo sapien
taaaggcctggatatctacaagata

SEQ ID NO: 1181323 - DNA, 25 bp, Homo sapien
tttccctattaatgcacagtgctca

SEQ ID NO: 1181324 - DNA, 25 bp, Homo sapien
cagaagcaagcctcagtgctagaga

SEQ ID NO: 1181325 - DNA, 25 bp, Homo sapien
acaaaagaaaatatatccttgtgat

SEQ ID NO: 1181326 - DNA, 25 bp, Homo sapien
gaaaatatatccttgtgatcacata

SEQ ID NO: 1181327 - DNA, 25 bp, Homo sapien
aagaaaatatatccttgtgatcaca

SEQ ID NO: 1181328 - DNA, 25 bp, Homo sapien
aaagaaaatatatccttgtgatcac

SEQ ID NO: 1181329 - DNA, 25 bp, Homo sapien
atcacctattgttgttcctctgata

SEQ ID NO: 1181330 - DNA, 25 bp, Homo sapien
acctattgttgttcctctgatatta

SEQ ID NO: 1181331 - DNA, 25 bp, Homo sapien
ctcattattctatcacctattgttg

SEQ ID NO: 1181332 - DNA, 25 bp, Homo sapien
ctattgttgttcctctgatattaaa

SEQ ID NO: 1181333 - DNA, 25 bp, Homo sapien
cgggcagtagatataaacatctgtg

SEQ ID NO: 1181334 - DNA, 25 bp, Homo sapien
cataacgggcagtagatataaacat

SEQ ID NO: 1181335 - DNA, 25 bp, Homo sapien
ctagtcataacgggcagtagatata

SEQ ID NO: 1181336 - DNA, 25 bp, Homo sapien
taacgggcagtagatataaacatct

SEQ ID NO: 1181337 - DNA, 25 bp, Homo sapien
taaaggtaagggatagcaggtctga

SEQ ID NO: 1181338 - DNA, 25 bp, Homo sapien
gggccagcttgcgtaaactgcaaaa

SEQ ID NO: 1181339 - DNA, 25 bp, Homo sapien
ctttagaagggtctgcttatgaggc

SEQ ID NO: 1181340 - DNA, 25 bp, Homo sapien
taacatgatttgtggtgaacaccta

SEQ ID NO: 1181341 - DNA, 25 bp, Homo sapien
gaatcttcttatatgcaatctgtga

SEQ ID NO: 1181342 - DNA, 25 bp, Homo sapien
tctgtgattattcagacagggtgaa

SEQ ID NO: 1181343 - DNA, 25 bp, Homo sapien
ttagcttagtagttcttagaaaaga

SEQ ID NO: 1181344 - DNA, 25 bp, Homo sapien
tgtttgcagtccaattgaatcctat

SEQ ID NO: 1181345 - DNA, 25 bp, Homo sapien
gatgaggaacaccactatcttaatt

SEQ ID NO: 1181346 - DNA, 25 bp, Homo sapien
ggttttgttgcttgtacagtgtcag

SEQ ID NO: 1181347 - DNA, 25 bp, Homo sapien
gaagtgaagaggttttgttgcttgt

SEQ ID NO: 1181348 - DNA, 25 bp, Homo sapien
cttgtacagtgtcagatgaggaaca

SEQ ID NO: 1181349 - DNA, 25 bp, Homo sapien
tcttttctccgtctgaagaactcct

SEQ ID NO: 1181350 - DNA, 25 bp, Homo sapien
actagcggccttctaatgttcaaag

SEQ ID NO: 1181351 - DNA, 25 bp, Homo sapien
cattgtcctggagttgcgatggcct

SEQ ID NO: 1181352 - DNA, 25 bp, Homo sapien
ctgaatacgggcaacagcagagcgt

SEQ ID NO: 1181353 - DNA, 25 bp, Homo sapien
tctttcacaatatattatagggcta

SEQ ID NO: 1181354 - DNA, 25 bp, Homo sapien
gataactgaagatttaataatgtaa

SEQ ID NO: 1181355 - DNA, 25 bp, Homo sapien
atgtaatactgaaatcccattggca

SEQ ID NO: 1181356 - DNA, 25 bp, Homo sapien
cattatggaaaaacactcagagcat

SEQ ID NO: 1181357 - DNA, 25 bp, Homo sapien
tggtacttgggatacaataggtgct

SEQ ID NO: 1181358 - DNA, 25 bp, Homo sapien
ttatgataggcattcatcagcaagg

SEQ ID NO: 1181359 - DNA, 25 bp, Homo sapien
tcagcaagggtaagatggcagtaag

SEQ ID NO: 1181360 - DNA, 25 bp, Homo sapien
caatactatatttacagcacctgaa

SEQ ID NO: 1181361 - DNA, 25 bp, Homo sapien
gttagcaccccagaaattggcttct

SEQ ID NO: 1181362 - DNA, 25 bp, Homo sapien
aagttagcaccccagaaattggctt

SEQ ID NO: 1181363 - DNA, 25 bp, Homo sapien
ttagcaccccagaaattggcttctt

SEQ ID NO: 1181364 - DNA, 25 bp, Homo sapien
agttagcaccccagaaattggcttc

SEQ ID NO: 1181365 - DNA, 25 bp, Homo sapien
tgtgccgatcccagatgaaaatgtg

SEQ ID NO: 1181366 - DNA, 25 bp, Homo sapien
tccagaagcatcaaatgctcagcag

SEQ ID NO: 1181367 - DNA, 25 bp, Homo sapien
atgctcagcagtgtgccgatcccag

SEQ ID NO: 1181368 - DNA, 25 bp, Homo sapien
agaagcatcaaatgctcagcagtgt

SEQ ID NO: 1181369 - DNA, 25 bp, Homo sapien
ttgggtcaaacggatgtggctgcag

SEQ ID NO: 1181370 - DNA, 25 bp, Homo sapien
acggatgtggctgcaggcagtttac

SEQ ID NO: 1181371 - DNA, 25 bp, Homo sapien
gggtcaaacggatgtggctgcaggc

SEQ ID NO: 1181372 - DNA, 25 bp, Homo sapien
gtcaaacggatgtggctgcaggcag

SEQ ID NO: 1181373 - DNA, 25 bp, Homo sapien
ttcatcagcaagttttcggttaaaa

SEQ ID NO: 1181374 - DNA, 25 bp, Homo sapien
catcagcaagttttcggttaaaaat

SEQ ID NO: 1181375 - DNA, 25 bp, Homo sapien
tcatcagcaagttttcggttaaaaa

SEQ ID NO: 1181376 - DNA, 25 bp, Homo sapien
gcaaaccgtaaacaatcagccagta

SEQ ID NO: 1181377 - DNA, 25 bp, Homo sapien
ggcaagttaaaaatcgtatcaaaga

SEQ ID NO: 1181378 - DNA, 25 bp, Homo sapien
tctgccttaagtctattcaatgcca

SEQ ID NO: 1181379 - DNA, 25 bp, Homo sapien
agtaccaggaggaattacttcattc

SEQ ID NO: 1181380 - DNA, 25 bp, Homo sapien
ttcttccagcatgagttcgtttcga

SEQ ID NO: 1181381 - DNA, 25 bp, Homo sapien
tcggatatgattaagtgaagccaac

SEQ ID NO: 1181382 - DNA, 25 bp, Homo sapien
gaagccaacatcctcaacatgaaag

SEQ ID NO: 1181383 - DNA, 25 bp, Homo sapien
catgaaagaggctggaactgtaatg

SEQ ID NO: 1181384 - DNA, 25 bp, Homo sapien
tagtttgagattagatcatccagag

SEQ ID NO: 1181385 - DNA, 25 bp, Homo sapien
tgatagctaataccaaacgtatggg

SEQ ID NO: 1181386 - DNA, 25 bp, Homo sapien
ggacagcacgattataaaaaccctg

SEQ ID NO: 1181387 - DNA, 25 bp, Homo sapien
gaaaaacgctatacgctgtctactt

SEQ ID NO: 1181388 - DNA, 25 bp, Homo sapien
caggctttgcaaacccatgacagag

SEQ ID NO: 1181389 - DNA, 25 bp, Homo sapien
caagagaagtagaagcagggagatc

SEQ ID NO: 1181390 - DNA, 25 bp, Homo sapien
tgatctcaataggataacaggcttt

SEQ ID NO: 1181391 - DNA, 25 bp, Homo sapien
tactgagggagtcaatctgtgaacg

SEQ ID NO: 1181392 - DNA, 25 bp, Homo sapien
ggtgatattggagctaagacctcaa

SEQ ID NO: 1181393 - DNA, 25 bp, Homo sapien
tttctaaggaggtgatattggagct

SEQ ID NO: 1181394 - DNA, 25 bp, Homo sapien
agccaccgcactaccagggaagact

SEQ ID NO: 1181395 - DNA, 25 bp, Homo sapien
caccgcactaccagggaagactttt

SEQ ID NO: 1181396 - DNA, 25 bp, Homo sapien
ccaagagtcttacgataggtcacag

SEQ ID NO: 1181397 - DNA, 25 bp, Homo sapien
ggttagacttttacactcagaggca

SEQ ID NO: 1181398 - DNA, 25 bp, Homo sapien
taacggcctatctcaaagttggcag

SEQ ID NO: 1181399 - DNA, 25 bp, Homo sapien
tactgaagtagtaaggctgcaaagc

SEQ ID NO: 1181400 - DNA, 25 bp, Homo sapien
cagataagagaatcgcaaagagaaa

SEQ ID NO: 1181401 - DNA, 25 bp, Homo sapien
acagataagagaatcgcaaagagaa

SEQ ID NO: 1181402 - DNA, 25 bp, Homo sapien
acacagataagagaatcgcaaagag

SEQ ID NO: 1181403 - DNA, 25 bp, Homo sapien
cacagataagagaatcgcaaagaga

SEQ ID NO: 1181404 - DNA, 25 bp, Homo sapien
agagccttctgatctgtcaccctcc

SEQ ID NO: 1181405 - DNA, 25 bp, Homo sapien
gccttctgatctgtcaccctccaac

SEQ ID NO: 1181406 - DNA, 25 bp, Homo sapien
gagccttctgatctgtcaccctcca

SEQ ID NO: 1181407 - DNA, 25 bp, Homo sapien
ttctgatctgtcaccctccaaccgg

SEQ ID NO: 1181408 - DNA, 25 bp, Homo sapien
ttttctagcactcctcatacacggc

SEQ ID NO: 1181409 - DNA, 25 bp, Homo sapien
caagctcccacatttgaaggttagg

SEQ ID NO: 1181410 - DNA, 25 bp, Homo sapien
tcttcaacattgatccaagctccca

SEQ ID NO: 1181411 - DNA, 25 bp, Homo sapien
ggttagggaaaatattgcactttgc

SEQ ID NO: 1181412 - DNA, 25 bp, Homo sapien
ctttaattagaaagcaacaaacatg

SEQ ID NO: 1181413 - DNA, 25 bp, Homo sapien
ttctttaattagaaagcaacaaaca

SEQ ID NO: 1181414 - DNA, 25 bp, Homo sapien
cagtttctttaattagaaagcaaca

SEQ ID NO: 1181415 - DNA, 25 bp, Homo sapien
tctttaattagaaagcaacaaacat

SEQ ID NO: 1181416 - DNA, 25 bp, Homo sapien
gtgccaatgttccttgattcttatt

SEQ ID NO: 1181417 - DNA, 25 bp, Homo sapien
ttgaggagtgtaagacaagggccat

SEQ ID NO: 1181418 - DNA, 25 bp, Homo sapien
tatttgaggagctactatgtggtct

SEQ ID NO: 1181419 - DNA, 25 bp, Homo sapien
gagtgtaagacaagggccatctagt

SEQ ID NO: 1181420 - DNA, 25 bp, Homo sapien
tcgtgtagtccacggccttggtgac

SEQ ID NO: 1181421 - DNA, 25 bp, Homo sapien
aattcctttgcccttatcgtgtagt

SEQ ID NO: 1181422 - DNA, 25 bp, Homo sapien
ggcactcttgttttgaattcctttg

SEQ ID NO: 1181423 - DNA, 25 bp, Homo sapien
tggctagcctgcttacatgcatgac

SEQ ID NO: 1181424 - DNA, 25 bp, Homo sapien
gcactatgctagatgtttacatgtc

SEQ ID NO: 1181425 - DNA, 25 bp, Homo sapien
ccacaactccgtgaggtagactgaa

SEQ ID NO: 1181426 - DNA, 25 bp, Homo sapien
cccaggtttacagacgtggaaagat

SEQ ID NO: 1181427 - DNA, 25 bp, Homo sapien
gatgtttacatgtctcaactcaaaa

SEQ ID NO: 1181428 - DNA, 25 bp, Homo sapien
gagtgagttctaactcttagttccc

SEQ ID NO: 1181429 - DNA, 25 bp, Homo sapien
cttcagggtagatgcttagatatgg

SEQ ID NO: 1181430 - DNA, 25 bp, Homo sapien
tagttcccactagaatgggttgttg

SEQ ID NO: 1181431 - DNA, 25 bp, Homo sapien
tatgtgatctgcatacactggctcc

SEQ ID NO: 1181432 - DNA, 25 bp, Homo sapien
gatttctttagaagagggcagctgg

SEQ ID NO: 1181433 - DNA, 25 bp, Homo sapien
cgtaagaattgatagtgggattcac

SEQ ID NO: 1181434 - DNA, 25 bp, Homo sapien
tagtgggattcacagagtggacaat

SEQ ID NO: 1181435 - DNA, 25 bp, Homo sapien
ggctggtcagctcttcgtaagaatt

SEQ ID NO: 1181436 - DNA, 25 bp, Homo sapien
aagacattcctagatttgtggtgcc

SEQ ID NO: 1181437 - DNA, 25 bp, Homo sapien
gctcagacctgctgcacttgttaaa

SEQ ID NO: 1181438 - DNA, 25 bp, Homo sapien
tcccattggcgaattcagaattcag

SEQ ID NO: 1181439 - DNA, 25 bp, Homo sapien
tctcccaagcagatcagagctcaga

SEQ ID NO: 1181440 - DNA, 25 bp, Homo sapien
taaccaagtcttaaggatgagctct

SEQ ID NO: 1181441 - DNA, 25 bp, Homo sapien
gaagagacagcattatgggcagtga

SEQ ID NO: 1181442 - DNA, 25 bp, Homo sapien
tgataacagtgtacagagccacaga

SEQ ID NO: 1181443 - DNA, 25 bp, Homo sapien
tgaataaattctgcaggtggcaggg

SEQ ID NO: 1181444 - DNA, 25 bp, Homo sapien
ccgcactgcgccttgctttggagag

SEQ ID NO: 1181445 - DNA, 25 bp, Homo sapien
cggatggagccaggctaaactcatt

SEQ ID NO: 1181446 - DNA, 25 bp, Homo sapien
taaactcattgtgcgaggctgaggg

SEQ ID NO: 1181447 - DNA, 25 bp, Homo sapien
gaagcccctaaacagtccgctggat

SEQ ID NO: 1181448 - DNA, 25 bp, Homo sapien
tctcagaggactccgtgaccgtcca

SEQ ID NO: 1181449 - DNA, 25 bp, Homo sapien
tggagtatctgacccttaatccgca

SEQ ID NO: 1181450 - DNA, 25 bp, Homo sapien
caaagggaagatctcccaggcttcc

SEQ ID NO: 1181451 - DNA, 25 bp, Homo sapien
ccatccactggtccaaagggaagat

SEQ ID NO: 1181452 - DNA, 25 bp, Homo sapien
gcagttccaccattggccactaggg

SEQ ID NO: 1181453 - DNA, 25 bp, Homo sapien
gctgctgcagttccaccattggcca

SEQ ID NO: 1181454 - DNA, 25 bp, Homo sapien
tgcagttccaccattggccactagg

SEQ ID NO: 1181455 - DNA, 25 bp, Homo sapien
gctgcagttccaccattggccacta

SEQ ID NO: 1181456 - DNA, 25 bp, Homo sapien
ctaggcttccgagccgttaccatgc

SEQ ID NO: 1181457 - DNA, 25 bp, Homo sapien
cctaggcttccgagccgttaccatg

SEQ ID NO: 1181458 - DNA, 25 bp, Homo sapien
ggcttccgagccgttaccatgcccg

SEQ ID NO: 1181459 - DNA, 25 bp, Homo sapien
taggcttccgagccgttaccatgcc

SEQ ID NO: 1181460 - DNA, 25 bp, Homo sapien
cgaagcagaaatcccggtggctgct

SEQ ID NO: 1181461 - DNA, 25 bp, Homo sapien
acatccgccgacttcatgatgtggg

SEQ ID NO: 1181462 - DNA, 25 bp, Homo sapien
ggcccgaagcagaaatcccggtggc

SEQ ID NO: 1181463 - DNA, 25 bp, Homo sapien
tgtgggtcttggacgccgtcagctt

SEQ ID NO: 1181464 - DNA, 25 bp, Homo sapien
gggaaagtccaccagaacagtcaca

SEQ ID NO: 1181465 - DNA, 25 bp, Homo sapien
ttgacagttgacgaaagcagcgcct

SEQ ID NO: 1181466 - DNA, 25 bp, Homo sapien
acatttcctatctcaagcgccgggc

SEQ ID NO: 1181467 - DNA, 25 bp, Homo sapien
tgtcaatcaaaggtccggtccggag

SEQ ID NO: 1181468 - DNA, 25 bp, Homo sapien
cagcctcaacatggcctccagagaa

SEQ ID NO: 1181469 - DNA, 25 bp, Homo sapien
gagaaatctttcagagcgtacatct

SEQ ID NO: 1181470 - DNA, 25 bp, Homo sapien
catctgataatgcagctcctttgga

SEQ ID NO: 1181471 - DNA, 25 bp, Homo sapien
tatggtacctcacgctccaatcaca

SEQ ID NO: 1181472 - DNA, 25 bp, Homo sapien
gcattccttggtagttgtttacaca

SEQ ID NO: 1181473 - DNA, 25 bp, Homo sapien
cactcttcagcacaggccactttaa

SEQ ID NO: 1181474 - DNA, 25 bp, Homo sapien
cgttgtctccaaacatcatttcagg

SEQ ID NO: 1181475 - DNA, 25 bp, Homo sapien
tcttaacgcatctgtagcattgaac

SEQ ID NO: 1181476 - DNA, 25 bp, Homo sapien
tataatctgttgtataggtccaatc

SEQ ID NO: 1181477 - DNA, 25 bp, Homo sapien
ggtccaatcatatggtttaataacc

SEQ ID NO: 1181478 - DNA, 25 bp, Homo sapien
taagagattctccaagtaaggttcc

SEQ ID NO: 1181479 - DNA, 25 bp, Homo sapien
ctctttggagtgttcaccctccgtc

SEQ ID NO: 1181480 - DNA, 25 bp, Homo sapien
cttaatctgttctctggctttcaat

SEQ ID NO: 1181481 - DNA, 25 bp, Homo sapien
ttttctgtatctatatgatctgttg

SEQ ID NO: 1181482 - DNA, 25 bp, Homo sapien
taatctgttctctggctttcaattt

SEQ ID NO: 1181483 - DNA, 25 bp, Homo sapien
ctatatgatctgttgtaggtacaac

SEQ ID NO: 1181484 - DNA, 25 bp, Homo sapien
ttgtctgatgttaagaatgcaagaa

SEQ ID NO: 1181485 - DNA, 25 bp, Homo sapien
gagtcatatttttgtctgatgttaa

SEQ ID NO: 1181486 - DNA, 25 bp, Homo sapien
tcggtctcctgacctggcgatccag

SEQ ID NO: 1181487 - DNA, 25 bp, Homo sapien
cccggccaggctcagtgttattcaa

SEQ ID NO: 1181488 - DNA, 25 bp, Homo sapien
gcctcttgggttcacgctactctcc

SEQ ID NO: 1181489 - DNA, 25 bp, Homo sapien
cgcctcttgggttcacgctactctc

SEQ ID NO: 1181490 - DNA, 25 bp, Homo sapien
ccgcctcttgggttcacgctactct

SEQ ID NO: 1181491 - DNA, 25 bp, Homo sapien
caatgtttgatgttagggtctctgt

SEQ ID NO: 1181492 - DNA, 25 bp, Homo sapien
ctgtctttgacagatctcatgacaa

SEQ ID NO: 1181493 - DNA, 25 bp, Homo sapien
tccacaatcattatgccccaagaac

SEQ ID NO: 1181494 - DNA, 25 bp, Homo sapien
gacaaatgctataattgagaggttt

SEQ ID NO: 1181495 - DNA, 25 bp, Homo sapien
gataagcaccccatcaattctcaag

SEQ ID NO: 1181496 - DNA, 25 bp, Homo sapien
ttcattctgataagcaccccatcaa

SEQ ID NO: 1181497 - DNA, 25 bp, Homo sapien
ctcatggtaaagtctcgtgtcattc

SEQ ID NO: 1181498 - DNA, 25 bp, Homo sapien
aattctcaagaaaaaccgcaacagc

SEQ ID NO: 1181499 - DNA, 25 bp, Homo sapien
ggataggttgtcaaaacagcatgca

SEQ ID NO: 1181500 - DNA, 25 bp, Homo sapien
cagcatgcagtctaaagagaacatc

SEQ ID NO: 1181501 - DNA, 25 bp, Homo sapien
aattaccatgtaagagaaacatagc

SEQ ID NO: 1181502 - DNA, 25 bp, Homo sapien
tcttgttctacactgagataactcc

SEQ ID NO: 1181503 - DNA, 25 bp, Homo sapien
tctcgtgacgtatattctcgtaaca

SEQ ID NO: 1181504 - DNA, 25 bp, Homo sapien
gacgtatattctcgtaacatgtagg

SEQ ID NO: 1181505 - DNA, 25 bp, Homo sapien
aattttgctttctcgtgacgtatat

SEQ ID NO: 1181506 - DNA, 25 bp, Homo sapien
atattctcgtaacatgtaggtcttg

SEQ ID NO: 1181507 - DNA, 25 bp, Homo sapien
taaggtcagaaaagttatgctccca

SEQ ID NO: 1181508 - DNA, 25 bp, Homo sapien
gaggcttaagtacctagcagctcta

SEQ ID NO: 1181509 - DNA, 25 bp, Homo sapien
cactagtcttcggttagagcacagc

SEQ ID NO: 1181510 - DNA, 25 bp, Homo sapien
tagagccccattaggtgaatgaatg

SEQ ID NO: 1181511 - DNA, 25 bp, Homo sapien
cctttattggtaaatactgggatat

SEQ ID NO: 1181512 - DNA, 25 bp, Homo sapien
tattagcttctcacaaactgcttcc

SEQ ID NO: 1181513 - DNA, 25 bp, Homo sapien
tgtacttttttgtgagtctgctggg

SEQ ID NO: 1181514 - DNA, 25 bp, Homo sapien
tgggttaggatcaattctttctgga

SEQ ID NO: 1181515 - DNA, 25 bp, Homo sapien
tagccaaggtgtccagtcagattcc

SEQ ID NO: 1181516 - DNA, 25 bp, Homo sapien
tgaagagccagtacatcaacatgca

SEQ ID NO: 1181517 - DNA, 25 bp, Homo sapien
tgagtgaaacctgcctgtaacgatc

SEQ ID NO: 1181518 - DNA, 25 bp, Homo sapien
tgaagacagacagtacaaacagcag

SEQ ID NO: 1181519 - DNA, 25 bp, Homo sapien
gagtttgagcaatgacggataccca

SEQ ID NO: 1181520 - DNA, 25 bp, Homo sapien
ttggctccagcaatacactatagag

SEQ ID NO: 1181521 - DNA, 25 bp, Homo sapien
tgcccagaagctccaattaatgaag

SEQ ID NO: 1181522 - DNA, 25 bp, Homo sapien
aatataccctgcctattggctccag

SEQ ID NO: 1181523 - DNA, 25 bp, Homo sapien
aatctaggactattcagggaccaag

SEQ ID NO: 1181524 - DNA, 25 bp, Homo sapien
tctacccatctcttaccctctaaaa

SEQ ID NO: 1181525 - DNA, 25 bp, Homo sapien
gaggcatactcttctacccatctct

SEQ ID NO: 1181526 - DNA, 25 bp, Homo sapien
cattttcttggtattctccacaaga

SEQ ID NO: 1181527 - DNA, 25 bp, Homo sapien
tcttgtcatgtgacacatcagctcc

SEQ ID NO: 1181528 - DNA, 25 bp, Homo sapien
tggactaacacagagaccattagtt

SEQ ID NO: 1181529 - DNA, 25 bp, Homo sapien
ttctgccgcaagtaaaagcttcctg

SEQ ID NO: 1181530 - DNA, 25 bp, Homo sapien
tcttgtataatctgcagaaccatga

SEQ ID NO: 1181531 - DNA, 25 bp, Homo sapien
aagcctacgatggtatatcaaatgc

SEQ ID NO: 1181532 - DNA, 25 bp, Homo sapien
ttctgagtgcctgtaaacaacatca

SEQ ID NO: 1181533 - DNA, 25 bp, Homo sapien
gaaagcctacgatggtatatcaaat

SEQ ID NO: 1181534 - DNA, 25 bp, Homo sapien
gcctacgatggtatatcaaatgctg

SEQ ID NO: 1181535 - DNA, 25 bp, Homo sapien
tagcacaaatggaaccaccatattc

SEQ ID NO: 1181536 - DNA, 25 bp, Homo sapien
acaaatggaaccaccatattccctg

SEQ ID NO: 1181537 - DNA, 25 bp, Homo sapien
gcacaaatggaaccaccatattccc

SEQ ID NO: 1181538 - DNA, 25 bp, Homo sapien
aaatggaaccaccatattccctgct

SEQ ID NO: 1181539 - DNA, 25 bp, Homo sapien
taagttgacggctcttccgggtgct

SEQ ID NO: 1181540 - DNA, 25 bp, Homo sapien
agcggcagcctgttgcgctcgctaa

SEQ ID NO: 1181541 - DNA, 25 bp, Homo sapien
ttccgggtgctaggcagccgcccag

SEQ ID NO: 1181542 - DNA, 25 bp, Homo sapien
tgttgcgctcgctaagttgacggct

SEQ ID NO: 1181543 - DNA, 25 bp, Homo sapien
ccgtgtcctgcccgctcagcacctt

SEQ ID NO: 1181544 - DNA, 25 bp, Homo sapien
cactcgcagctcagtccggggattt

SEQ ID NO: 1181545 - DNA, 25 bp, Homo sapien
ggcagaaaaggacgccgcggccact

SEQ ID NO: 1181546 - DNA, 25 bp, Homo sapien
cgccgcccccttgtcagggaggatg

SEQ ID NO: 1181547 - DNA, 25 bp, Homo sapien
ggccactgccccgtgtagtgccaga

SEQ ID NO: 1181548 - DNA, 25 bp, Homo sapien
cctggcttgttcgtaggaagaagag

SEQ ID NO: 1181549 - DNA, 25 bp, Homo sapien
agaactagctgcaggtgggaagaaa

SEQ ID NO: 1181550 - DNA, 25 bp, Homo sapien
tgccaaggtgcgaaaagaactagct

SEQ ID NO: 1181551 - DNA, 25 bp, Homo sapien
taggattggactggcttgtcagcag

SEQ ID NO: 1181552 - DNA, 25 bp, Homo sapien
agtctgtccacctgatgcaagtggg

SEQ ID NO: 1181553 - DNA, 25 bp, Homo sapien
gttgttccaagctggacaaagacag

SEQ ID NO: 1181554 - DNA, 25 bp, Homo sapien
caagtgggaacagttgttccaagct

SEQ ID NO: 1181555 - DNA, 25 bp, Homo sapien
tccacctgatgcaagtgggaacagt

SEQ ID NO: 1181556 - DNA, 25 bp, Homo sapien
tggtactccagcttaatgaagatgc

SEQ ID NO: 1181557 - DNA, 25 bp, Homo sapien
ctggtactccagcttaatgaagatg

SEQ ID NO: 1181558 - DNA, 25 bp, Homo sapien
gagcagagaattcctatagcaaaac

SEQ ID NO: 1181559 - DNA, 25 bp, Homo sapien
cagtgagcagagaattcctatagca

SEQ ID NO: 1181560 - DNA, 25 bp, Homo sapien
gcagagaattcctatagcaaaacac

SEQ ID NO: 1181561 - DNA, 25 bp, Homo sapien
cagcagtgagcagagaattcctata

SEQ ID NO: 1181562 - DNA, 25 bp, Homo sapien
ctcccaattgatgcgatattaccaa

SEQ ID NO: 1181563 - DNA, 25 bp, Homo sapien
ctgggcacccacagcagaacagtac

SEQ ID NO: 1181564 - DNA, 25 bp, Homo sapien
ttaccaaaggtataaaacactgcga

SEQ ID NO: 1181565 - DNA, 25 bp, Homo sapien
cactgcgaagaggtgtagtcccttc

SEQ ID NO: 1181566 - DNA, 25 bp, Homo sapien
tacagatagggcagcattccaggca

SEQ ID NO: 1181567 - DNA, 25 bp, Homo sapien
gcagggctataaacgaatggctcta

SEQ ID NO: 1181568 - DNA, 25 bp, Homo sapien
tgagcaagtatctaccaaaccaggg

SEQ ID NO: 1181569 - DNA, 25 bp, Homo sapien
tctacagctcagtggaaaatggcct

SEQ ID NO: 1181570 - DNA, 25 bp, Homo sapien
acaagccgttcagaacagaactgca

SEQ ID NO: 1181571 - DNA, 25 bp, Homo sapien
acactgagtcgcctccccaagattt

SEQ ID NO: 1181572 - DNA, 25 bp, Homo sapien
cagaactgcactaggcacactgagt

SEQ ID NO: 1181573 - DNA, 25 bp, Homo sapien
acacgcacacaagccgttcagaaca

SEQ ID NO: 1181574 - DNA, 25 bp, Homo sapien
tagttgcaatcaaacgagtaggctc

SEQ ID NO: 1181575 - DNA, 25 bp, Homo sapien
cagcaccatgatagttgcaatcaaa

SEQ ID NO: 1181576 - DNA, 25 bp, Homo sapien
tcaaacattcgcttcagctgtttca

SEQ ID NO: 1181577 - DNA, 25 bp, Homo sapien
caaacgagtaggctcaaacattcgc

SEQ ID NO: 1181578 - DNA, 25 bp, Homo sapien
ccaaaaggcagaacacagggtaagt

SEQ ID NO: 1181579 - DNA, 25 bp, Homo sapien
aaaggcagaacacagggtaagtgca

SEQ ID NO: 1181580 - DNA, 25 bp, Homo sapien
caaaaggcagaacacagggtaagtg

SEQ ID NO: 1181581 - DNA, 25 bp, Homo sapien
aggcagaacacagggtaagtgcaaa

SEQ ID NO: 1181582 - DNA, 25 bp, Homo sapien
gaagataagtgcaagtcccttgtta

SEQ ID NO: 1181583 - DNA, 25 bp, Homo sapien
tgcagaagataagtgcaagtccctt

SEQ ID NO: 1181584 - DNA, 25 bp, Homo sapien
ataagtgcaagtcccttgttatgcc

SEQ ID NO: 1181585 - DNA, 25 bp, Homo sapien
aaatgcagaagataagtgcaagtcc

SEQ ID NO: 1181586 - DNA, 25 bp, Homo sapien
ggaaaccatatacaaggaacaggct

SEQ ID NO: 1181587 - DNA, 25 bp, Homo sapien
ggaacaggctccataatgctaaaga

SEQ ID NO: 1181588 - DNA, 25 bp, Homo sapien
tggtaaattccagttagctcagccc

SEQ ID NO: 1181589 - DNA, 25 bp, Homo sapien
tcaagtctaggaagctcaagcaatc

SEQ ID NO: 1181590 - DNA, 25 bp, Homo sapien
caaatggtatgaaggaaaggctgta

SEQ ID NO: 1181591 - DNA, 25 bp, Homo sapien
cttgcaaatggtatgaaggaaaggc

SEQ ID NO: 1181592 - DNA, 25 bp, Homo sapien
aaatggtatgaaggaaaggctgtac

SEQ ID NO: 1181593 - DNA, 25 bp, Homo sapien
tgcaaatggtatgaaggaaaggctg

SEQ ID NO: 1181594 - DNA, 25 bp, Homo sapien
ttatgcaagacacacggcaaaacac

SEQ ID NO: 1181595 - DNA, 25 bp, Homo sapien
agactcactctatgcaggaccacgg

SEQ ID NO: 1181596 - DNA, 25 bp, Homo sapien
catgggaattcagtgggacaacatc

SEQ ID NO: 1181597 - DNA, 25 bp, Homo sapien
tccatgctgagggacaagtggaccc

SEQ ID NO: 1181598 - DNA, 25 bp, Homo sapien
aatacattccacagtcaggcgcaga

SEQ ID NO: 1181599 - DNA, 25 bp, Homo sapien
taaagatgcccttcgacaggttgag

SEQ ID NO: 1181600 - DNA, 25 bp, Homo sapien
gccaagcctcgtatcagttctaaag

SEQ ID NO: 1181601 - DNA, 25 bp, Homo sapien
aagaaaaggaaccatgagccctcct

SEQ ID NO: 1181602 - DNA, 25 bp, Homo sapien
taaaacatgattgcagtggctagaa

SEQ ID NO: 1181603 - DNA, 25 bp, Homo sapien
gaggttcccaacctacaggccatgg

SEQ ID NO: 1181604 - DNA, 25 bp, Homo sapien
cattgcgtcactgcgtccattgaga

SEQ ID NO: 1181605 - DNA, 25 bp, Homo sapien
aacagggtgacgtcctaaacaatca

SEQ ID NO: 1181606 - DNA, 25 bp, Homo sapien
aaatgtactaaggagacgcaaggcc

SEQ ID NO: 1181607 - DNA, 25 bp, Homo sapien
cgatagcccattatagtggacagct

SEQ ID NO: 1181608 - DNA, 25 bp, Homo sapien
tccagggcacagtagataaattgcg

SEQ ID NO: 1181609 - DNA, 25 bp, Homo sapien
taaagctgagagtaagtccaggtgc

SEQ ID NO: 1181610 - DNA, 25 bp, Homo sapien
caaagagagctaaaccaaacggtgt

SEQ ID NO: 1181611 - DNA, 25 bp, Homo sapien
tgagttagtacacagcacgcccaat

SEQ ID NO: 1181612 - DNA, 25 bp, Homo sapien
tgacatcttgcaatgacccagcagg

SEQ ID NO: 1181613 - DNA, 25 bp, Homo sapien
taaagcctggcgtagacagtcccat

SEQ ID NO: 1181614 - DNA, 25 bp, Homo sapien
gaaaatagaatccatagccactggg

SEQ ID NO: 1181615 - DNA, 25 bp, Homo sapien
ggaaccctgctgaaatgattcggag

SEQ ID NO: 1181616 - DNA, 25 bp, Homo sapien
cataagttctatctcacaggctcag

SEQ ID NO: 1181617 - DNA, 25 bp, Homo sapien
cacagactggctataaacacacccg

SEQ ID NO: 1181618 - DNA, 25 bp, Homo sapien
cagctgccctgtagctagttgttga

SEQ ID NO: 1181619 - DNA, 25 bp, Homo sapien
gtatttagaaggcagaatccatagg

SEQ ID NO: 1181620 - DNA, 25 bp, Homo sapien
taggaattggccatcactggatatg

SEQ ID NO: 1181621 - DNA, 25 bp, Homo sapien
agcaccacgcaaggaacaggcaggt

SEQ ID NO: 1181622 - DNA, 25 bp, Homo sapien
taagggagaaggtatccaggatgat

SEQ ID NO: 1181623 - DNA, 25 bp, Homo sapien
ttgagatagtccaaatgtgaaaaca

SEQ ID NO: 1181624 - DNA, 25 bp, Homo sapien
agactctgggaatgttgcacttcca

SEQ ID NO: 1181625 - DNA, 25 bp, Homo sapien
aaattatacatctttgctgtatttg

SEQ ID NO: 1181626 - DNA, 25 bp, Homo sapien
tcaaatgttacatgcctcttctcag

SEQ ID NO: 1181627 - DNA, 25 bp, Homo sapien
tcgaactttgccgagagccgttacc

SEQ ID NO: 1181628 - DNA, 25 bp, Homo sapien
ggatgacaccccttaaaagtctcca

SEQ ID NO: 1181629 - DNA, 25 bp, Homo sapien
ttatgccaccaacctgttaagcttt

SEQ ID NO: 1181630 - DNA, 25 bp, Homo sapien
tttcaaacccacttgaacagtgctt

SEQ ID NO: 1181631 - DNA, 25 bp, Homo sapien
tccctgcctgaagctcactctccac

SEQ ID NO: 1181632 - DNA, 25 bp, Homo sapien
tccaggatgatctgaagttgcttct

SEQ ID NO: 1181633 - DNA, 25 bp, Homo sapien
attcttggtcacaatcatctcatta

SEQ ID NO: 1181634 - DNA, 25 bp, Homo sapien
catctcattagtgacttccttgaat

SEQ ID NO: 1181635 - DNA, 25 bp, Homo sapien
tgatgtggagggcaaggatttgaag

SEQ ID NO: 1181636 - DNA, 25 bp, Homo sapien
tgcaccaggtgcgggagttgatgtg

SEQ ID NO: 1181637 - DNA, 25 bp, Homo sapien
gagttgatgtggagggcaaggattt

SEQ ID NO: 1181638 - DNA, 25 bp, Homo sapien
agttgatgtggagggcaaggatttg

SEQ ID NO: 1181639 - DNA, 25 bp, Homo sapien
caggaacattcttctccacagggaa

SEQ ID NO: 1181640 - DNA, 25 bp, Homo sapien
gctgccatgctagcaagcaatttaa

SEQ ID NO: 1181641 - DNA, 25 bp, Homo sapien
gagaggccaacatcaggatcccagt

SEQ ID NO: 1181642 - DNA, 25 bp, Homo sapien
tgactcaaatgagctctaaggaggt

SEQ ID NO: 1181643 - DNA, 25 bp, Homo sapien
ggaatactggctggatacactagag

SEQ ID NO: 1181644 - DNA, 25 bp, Homo sapien
tcaaagctaacatggttgagccaca

SEQ ID NO: 1181645 - DNA, 25 bp, Homo sapien
cccaaatcttaatacctacttagag

SEQ ID NO: 1181646 - DNA, 25 bp, Homo sapien
ttcttaacatgtaagatcatttggg

SEQ ID NO: 1181647 - DNA, 25 bp, Homo sapien
gaactgttctaggtgggaattcaat

SEQ ID NO: 1181648 - DNA, 25 bp, Homo sapien
taatacggccaacacttacagagca

SEQ ID NO: 1181649 - DNA, 25 bp, Homo sapien
ttttggagccaaagcaaggccaggc

SEQ ID NO: 1181650 - DNA, 25 bp, Homo sapien
gcttgggtgtaatggtaatacggcc

SEQ ID NO: 1181651 - DNA, 25 bp, Homo sapien
aaatgatacacctcctctagggcgg

SEQ ID NO: 1181652 - DNA, 25 bp, Homo sapien
caatactgagaccttccacggaatg

SEQ ID NO: 1181653 - DNA, 25 bp, Homo sapien
tcaatactgagaccttccacggaat

SEQ ID NO: 1181654 - DNA, 25 bp, Homo sapien
atactgagaccttccacggaatgcc

SEQ ID NO: 1181655 - DNA, 25 bp, Homo sapien
ctcaatactgagaccttccacggaa

SEQ ID NO: 1181656 - DNA, 25 bp, Homo sapien
ctgtggctggagacctctggcttgc

SEQ ID NO: 1181657 - DNA, 25 bp, Homo sapien
tctggcttgccagcgggcacccatt

SEQ ID NO: 1181658 - DNA, 25 bp, Homo sapien
tccgggtgaatgtagacgcagctgt

SEQ ID NO: 1181659 - DNA, 25 bp, Homo sapien
actgtccgtagggacaaagtccagc

SEQ ID NO: 1181660 - DNA, 25 bp, Homo sapien
tggtgttgtggggaggccggagcgg

SEQ ID NO: 1181661 - DNA, 25 bp, Homo sapien
tggggaggccggagcgggtggccag

SEQ ID NO: 1181662 - DNA, 25 bp, Homo sapien
gatatttcttgattggtgttgtggg

SEQ ID NO: 1181663 - DNA, 25 bp, Homo sapien
ccaggcctgcccgcctcattcgtac

SEQ ID NO: 1181664 - DNA, 25 bp, Homo sapien
tcataatgcccaagtggaggtagta

SEQ ID NO: 1181665 - DNA, 25 bp, Homo sapien
gtctattgccagcatgccacttata

SEQ ID NO: 1181666 - DNA, 25 bp, Homo sapien
tttatgaaggtatttgtctattgcc

SEQ ID NO: 1181667 - DNA, 25 bp, Homo sapien
ccaagtggaggtagtaattatttca

SEQ ID NO: 1181668 - DNA, 25 bp, Homo sapien
gatgggcacttccaacacgcactat

SEQ ID NO: 1181669 - DNA, 25 bp, Homo sapien
gaacctggggttcatatttatgcag

SEQ ID NO: 1181670 - DNA, 25 bp, Homo sapien
tcctcattctgataggcagtcacgg

SEQ ID NO: 1181671 - DNA, 25 bp, Homo sapien
tcagggaaggagcagtttgttacca

SEQ ID NO: 1181672 - DNA, 25 bp, Homo sapien
tgtacttgattttgagagccgttat

SEQ ID NO: 1181673 - DNA, 25 bp, Homo sapien
ttggcaaaaggattgtacttgattt

SEQ ID NO: 1181674 - DNA, 25 bp, Homo sapien
ttgtacttgattttgagagccgtta

SEQ ID NO: 1181675 - DNA, 25 bp, Homo sapien
attgtacttgattttgagagccgtt

SEQ ID NO: 1181676 - DNA, 25 bp, Homo sapien
ctccggtacgtctcttaggtgattt

SEQ ID NO: 1181677 - DNA, 25 bp, Homo sapien
gatagcctccggtacgtctcttagg

SEQ ID NO: 1181678 - DNA, 25 bp, Homo sapien
agtgagaataggtcacatgctggct

SEQ ID NO: 1181679 - DNA, 25 bp, Homo sapien
tgctggctctcagagatagcctccg

SEQ ID NO: 1181680 - DNA, 25 bp, Homo sapien
ctcccgcctcatgtacacccaactc

SEQ ID NO: 1181681 - DNA, 25 bp, Homo sapien
cccgcctcatgtacacccaactcac

SEQ ID NO: 1181682 - DNA, 25 bp, Homo sapien
tcccgcctcatgtacacccaactca

SEQ ID NO: 1181683 - DNA, 25 bp, Homo sapien
ctggcaaactgcataagggatcttt

SEQ ID NO: 1181684 - DNA, 25 bp, Homo sapien
tccaaattaaagagggtttcagaca

SEQ ID NO: 1181685 - DNA, 25 bp, Homo sapien
tatactcccaggtctgttatggaag

SEQ ID NO: 1181686 - DNA, 25 bp, Homo sapien
gggttaactttcctactctgatgtc

SEQ ID NO: 1181687 - DNA, 25 bp, Homo sapien
caatcagcagctcatgttacagtag

SEQ ID NO: 1181688 - DNA, 25 bp, Homo sapien
caaaatttatcagacccagagggat

SEQ ID NO: 1181689 - DNA, 25 bp, Homo sapien
tctgagttatgtgaggcatgcaaaa

SEQ ID NO: 1181690 - DNA, 25 bp, Homo sapien
tgtagtcctcaaacttgacccaaat

SEQ ID NO: 1181691 - DNA, 25 bp, Homo sapien
taaggattgtcacctgggcttcggc

SEQ ID NO: 1181692 - DNA, 25 bp, Homo sapien
gagcttgatattagaacccaccgcc

SEQ ID NO: 1181693 - DNA, 25 bp, Homo sapien
catgcctcagctaagggatcagtgg

SEQ ID NO: 1181694 - DNA, 25 bp, Homo sapien
agacttagtactgcaggccccaaaa

SEQ ID NO: 1181695 - DNA, 25 bp, Homo sapien
aattggagtttcctgctgtgcacac

SEQ ID NO: 1181696 - DNA, 25 bp, Homo sapien
catctggattggaaaagatccagcc

SEQ ID NO: 1181697 - DNA, 25 bp, Homo sapien
ggattggaaaagatccagcctccca

SEQ ID NO: 1181698 - DNA, 25 bp, Homo sapien
tctggattggaaaagatccagcctc

SEQ ID NO: 1181699 - DNA, 25 bp, Homo sapien
agcaggcagaggcagaggagcggca

SEQ ID NO: 1181700 - DNA, 25 bp, Homo sapien
gggtgtggggagcaggcagaggcag

SEQ ID NO: 1181701 - DNA, 25 bp, Homo sapien
gcaggcagaggcagaggagcggcat

SEQ ID NO: 1181702 - DNA, 25 bp, Homo sapien
ggtgggtgtggggagcaggcagagg

SEQ ID NO: 1181703 - DNA, 25 bp, Homo sapien
gagacccgaatagtgctcacagcca

SEQ ID NO: 1181704 - DNA, 25 bp, Homo sapien
gtgtcctcggagacccgaatagtgc

SEQ ID NO: 1181705 - DNA, 25 bp, Homo sapien
agggtagggagcctgccggtgtcct

SEQ ID NO: 1181706 - DNA, 25 bp, Homo sapien
tgtgcatgtacgcagaagggtaggg

SEQ ID NO: 1181707 - DNA, 25 bp, Homo sapien
ggtagctggtgaccaggaggaccct

SEQ ID NO: 1181708 - DNA, 25 bp, Homo sapien
ggacaggtagctggtgaccaggagg

SEQ ID NO: 1181709 - DNA, 25 bp, Homo sapien
cacagggacaggtagctggtgacca

SEQ ID NO: 1181710 - DNA, 25 bp, Homo sapien
ctaagggacacagggacaggtagct

SEQ ID NO: 1181711 - DNA, 25 bp, Homo sapien
ggcagcaactgttgaggttgccaag

SEQ ID NO: 1181712 - DNA, 25 bp, Homo sapien
cagcaactgttgaggttgccaagaa

SEQ ID NO: 1181713 - DNA, 25 bp, Homo sapien
aactgttgaggttgccaagaatagc

SEQ ID NO: 1181714 - DNA, 25 bp, Homo sapien
tgttgaggttgccaagaatagcagg

SEQ ID NO: 1181715 - DNA, 25 bp, Homo sapien
gaccagtgacattatcctagggcaa

SEQ ID NO: 1181716 - DNA, 25 bp, Homo sapien
catcttatagatacgcctcagggtg

SEQ ID NO: 1181717 - DNA, 25 bp, Homo sapien
tataaccatggcttgcactacaggc

SEQ ID NO: 1181718 - DNA, 25 bp, Homo sapien
caagctaagcctaagggccaccagt

SEQ ID NO: 1181719 - DNA, 25 bp, Homo sapien
tggaggataaggaagtccagctgtc

SEQ ID NO: 1181720 - DNA, 25 bp, Homo sapien
tgggccctggattgattggtccgtt

SEQ ID NO: 1181721 - DNA, 25 bp, Homo sapien
gtccagctgtcaggtcccgagaaaa

SEQ ID NO: 1181722 - DNA, 25 bp, Homo sapien
aaaacttgcagattattgcttgagc

SEQ ID NO: 1181723 - DNA, 25 bp, Homo sapien
gaatgaacttgagtccccagtgcta

SEQ ID NO: 1181724 - DNA, 25 bp, Homo sapien
tcaagacaataggttagaccaagcc

SEQ ID NO: 1181725 - DNA, 25 bp, Homo sapien
gacgaccaatgagcgagttgatggt

SEQ ID NO: 1181726 - DNA, 25 bp, Homo sapien
caagccaccctaggaaaaagaatga

SEQ ID NO: 1181727 - DNA, 25 bp, Homo sapien
ctgggtttccgaggagaaatgctcc

SEQ ID NO: 1181728 - DNA, 25 bp, Homo sapien
cattgctgatggtccacaggcacgg

SEQ ID NO: 1181729 - DNA, 25 bp, Homo sapien
tccacaccagccgaagtgggtgctt

SEQ ID NO: 1181730 - DNA, 25 bp, Homo sapien
gcaatgctggttagcgagggctccc

SEQ ID NO: 1181731 - DNA, 25 bp, Homo sapien
catccagtgaggaaggagaatggtg

SEQ ID NO: 1181732 - DNA, 25 bp, Homo sapien
ccagtgaggaaggagaatggtgccc

SEQ ID NO: 1181733 - DNA, 25 bp, Homo sapien
agtgaggaaggagaatggtgcccac

SEQ ID NO: 1181734 - DNA, 25 bp, Homo sapien
tccagtgaggaaggagaatggtgcc

SEQ ID NO: 1181735 - DNA, 25 bp, Homo sapien
ctacacatggaaggatcgctgtgca

SEQ ID NO: 1181736 - DNA, 25 bp, Homo sapien
tgtgcaaagaggctcctaggatcct

SEQ ID NO: 1181737 - DNA, 25 bp, Homo sapien
cacatggaaggatcgctgtgcaaag

SEQ ID NO: 1181738 - DNA, 25 bp, Homo sapien
tgcaaagaggctcctaggatcctgc

SEQ ID NO: 1181739 - DNA, 25 bp, Homo sapien
aagggagattccacagtctgactca

SEQ ID NO: 1181740 - DNA, 25 bp, Homo sapien
tcaggccagatggtgtgatcgctcg

SEQ ID NO: 1181741 - DNA, 25 bp, Homo sapien
tactttccaggcttcacaaagcagg

SEQ ID NO: 1181742 - DNA, 25 bp, Homo sapien
caaaaacaacgggagaacagcgagc

SEQ ID NO: 1181743 - DNA, 25 bp, Homo sapien
cagggagtgacgtttcagccaggct

SEQ ID NO: 1181744 - DNA, 25 bp, Homo sapien
ataatggaggctacgagcttctttc

SEQ ID NO: 1181745 - DNA, 25 bp, Homo sapien
aaatataatggaggctacgagcttc

SEQ ID NO: 1181746 - DNA, 25 bp, Homo sapien
aatgaaaatataatggaggctacga

SEQ ID NO: 1181747 - DNA, 25 bp, Homo sapien
gaaaatataatggaggctacgagct

SEQ ID NO: 1181748 - DNA, 25 bp, Homo sapien
tcacagcaggttccaagctgagtat

SEQ ID NO: 1181749 - DNA, 25 bp, Homo sapien
cacagcaggttccaagctgagtatc

SEQ ID NO: 1181750 - DNA, 25 bp, Homo sapien
agggaatcagcagtttcccataagc

SEQ ID NO: 1181751 - DNA, 25 bp, Homo sapien
gggtgtccaccaagtgacacgaagg

SEQ ID NO: 1181752 - DNA, 25 bp, Homo sapien
tttttcttaataacttaggtgatga

SEQ ID NO: 1181753 - DNA, 25 bp, Homo sapien
ccaagtgacacgaagggaatcagca

SEQ ID NO: 1181754 - DNA, 25 bp, Homo sapien
caggaaattcagactttcaccagaa

SEQ ID NO: 1181755 - DNA, 25 bp, Homo sapien
gccctagagatgctatccagtcctt

SEQ ID NO: 1181756 - DNA, 25 bp, Homo sapien
gatgctatccagtccttggaagacc

SEQ ID NO: 1181757 - DNA, 25 bp, Homo sapien
tatccagtccttggaagaccagcaa

SEQ ID NO: 1181758 - DNA, 25 bp, Homo sapien
actcagaccttagggcaggcctgtg

SEQ ID NO: 1181759 - DNA, 25 bp, Homo sapien
tgtctcaactcagaccttagggcag

SEQ ID NO: 1181760 - DNA, 25 bp, Homo sapien
gctcttgtctcaactcagaccttag

SEQ ID NO: 1181761 - DNA, 25 bp, Homo sapien
tcaactcagaccttagggcaggcct

SEQ ID NO: 1181762 - DNA, 25 bp, Homo sapien
caactcatgagttgggcagcactca

SEQ ID NO: 1181763 - DNA, 25 bp, Homo sapien
gagtctttaccagtcagcaaccaca

SEQ ID NO: 1181764 - DNA, 25 bp, Homo sapien
tctgactgataaaggcgctagtttc

SEQ ID NO: 1181765 - DNA, 25 bp, Homo sapien
tgcttagtgggaacttaaagcccag

SEQ ID NO: 1181766 - DNA, 25 bp, Homo sapien
ccaccccatcaccaggacgaaaggg

SEQ ID NO: 1181767 - DNA, 25 bp, Homo sapien
ggcagaaaaacggaggctggcgcct

SEQ ID NO: 1181768 - DNA, 25 bp, Homo sapien
tgggaccagcactccccatttccac

SEQ ID NO: 1181769 - DNA, 25 bp, Homo sapien
ggtgacttttcctgcgctcctcccc

SEQ ID NO: 1181770 - DNA, 25 bp, Homo sapien
taaagacttgcaagctctagagcct

SEQ ID NO: 1181771 - DNA, 25 bp, Homo sapien
gatgacgcagttccctagataaaga

SEQ ID NO: 1181772 - DNA, 25 bp, Homo sapien
agagttctgggtcacgcgcttggct

SEQ ID NO: 1181773 - DNA, 25 bp, Homo sapien
taagttctgcgtcagaagacggcct

SEQ ID NO: 1181774 - DNA, 25 bp, Homo sapien
ctcccaacacctggagctcaatggg

SEQ ID NO: 1181775 - DNA, 25 bp, Homo sapien
gggactgagcgcaaatccacagtat

SEQ ID NO: 1181776 - DNA, 25 bp, Homo sapien
tatgagccagatctgcagggcaagc

SEQ ID NO: 1181777 - DNA, 25 bp, Homo sapien
gaagaactagcaaaaagagaagctg

SEQ ID NO: 1181778 - DNA, 25 bp, Homo sapien
aaccaagacaagcaagacaggggaa

SEQ ID NO: 1181779 - DNA, 25 bp, Homo sapien
ccaagacaagcaagacaggggaaag

SEQ ID NO: 1181780 - DNA, 25 bp, Homo sapien
aaaaaccaagacaagcaagacaggg

SEQ ID NO: 1181781 - DNA, 25 bp, Homo sapien
agaaaaaccaagacaagcaagacag

SEQ ID NO: 1181782 - DNA, 25 bp, Homo sapien
ccaggggataaggtggggaatattg

SEQ ID NO: 1181783 - DNA, 25 bp, Homo sapien
caggggataaggtggggaatattgt

SEQ ID NO: 1181784 - DNA, 25 bp, Homo sapien
ctgggcaaaattccaggggataagg

SEQ ID NO: 1181785 - DNA, 25 bp, Homo sapien
ccacgccagacctggcttttctaaa

SEQ ID NO: 1181786 - DNA, 25 bp, Homo sapien
aatttcaccctcagatatagaactt

SEQ ID NO: 1181787 - DNA, 25 bp, Homo sapien
tctaaaatgactcccaggatttttg

SEQ ID NO: 1181788 - DNA, 25 bp, Homo sapien
ttgatcctgactataccagttgcct

SEQ ID NO: 1181789 - DNA, 25 bp, Homo sapien
ctaacagtgctagccacagctgaca

SEQ ID NO: 1181790 - DNA, 25 bp, Homo sapien
aagaatctgacgctcccctctttcc

SEQ ID NO: 1181791 - DNA, 25 bp, Homo sapien
gcccttatctatttcaccctgctcc

SEQ ID NO: 1181792 - DNA, 25 bp, Homo sapien
gcccaagctttccatctggcatcat

SEQ ID NO: 1181793 - DNA, 25 bp, Homo sapien
cagatgccgtcttgatatactcaga

SEQ ID NO: 1181794 - DNA, 25 bp, Homo sapien
agatgccgtcttgatatactcagac

SEQ ID NO: 1181795 - DNA, 25 bp, Homo sapien
gatgccgtcttgatatactcagact

SEQ ID NO: 1181796 - DNA, 25 bp, Homo sapien
ggtcttgcgattgagaagtatgttc

SEQ ID NO: 1181797 - DNA, 25 bp, Homo sapien
tgcgattgagaagtatgttctggct

SEQ ID NO: 1181798 - DNA, 25 bp, Homo sapien
acatggtcttgcgattgagaagtat

SEQ ID NO: 1181799 - DNA, 25 bp, Homo sapien
tcttgcgattgagaagtatgttctg

SEQ ID NO: 1181800 - DNA, 25 bp, Homo sapien
gtctttcaacaaacaccggcaccca

SEQ ID NO: 1181801 - DNA, 25 bp, Homo sapien
caagaaccaatctgagctgcgttga

SEQ ID NO: 1181802 - DNA, 25 bp, Homo sapien
tgccaacatgaatgcaagaaccaat

SEQ ID NO: 1181803 - DNA, 25 bp, Homo sapien
ccaatcacgcagttcttgccaacat

SEQ ID NO: 1181804 - DNA, 25 bp, Homo sapien
gaggtgctcggcatgggcagtgtat

SEQ ID NO: 1181805 - DNA, 25 bp, Homo sapien
gcagtgtatggctgtgagcagctca

SEQ ID NO: 1181806 - DNA, 25 bp, Homo sapien
tgggatccagccatgcacaagacca

SEQ ID NO: 1181807 - DNA, 25 bp, Homo sapien
tgctgctgtgcaggcccgtttccgg

SEQ ID NO: 1181808 - DNA, 25 bp, Homo sapien
ccaggagcatcctcagaaggcacct

SEQ ID NO: 1181809 - DNA, 25 bp, Homo sapien
ggagcatcctcagaaggcaccttcc

SEQ ID NO: 1181810 - DNA, 25 bp, Homo sapien
gaaggcaccttcccaagaccaggag

SEQ ID NO: 1181811 - DNA, 25 bp, Homo sapien
tcaggtacccgtgccaggagcatcc

SEQ ID NO: 1181812 - DNA, 25 bp, Homo sapien
ccctcactgtggccagagtggtcat

SEQ ID NO: 1181813 - DNA, 25 bp, Homo sapien
cttccctcactgtggccagagtggt

SEQ ID NO: 1181814 - DNA, 25 bp, Homo sapien
tggcccaggtcttccctcactgtgg

SEQ ID NO: 1181815 - DNA, 25 bp, Homo sapien
ctggcccaggtcttccctcactgtg

SEQ ID NO: 1181816 - DNA, 25 bp, Homo sapien
gctaagcattagatccctaggtgat

SEQ ID NO: 1181817 - DNA, 25 bp, Homo sapien
cacaatctgtctgtctagaagggaa

SEQ ID NO: 1181818 - DNA, 25 bp, Homo sapien
agctttgggctctgcatcgcgactc

SEQ ID NO: 1181819 - DNA, 25 bp, Homo sapien
catctgacgttaggaggtgccacac

SEQ ID NO: 1181820 - DNA, 25 bp, Homo sapien
gtggctctgctgctcaggagtgaag

SEQ ID NO: 1181821 - DNA, 25 bp, Homo sapien
tggctctgctgctcaggagtgaagc

SEQ ID NO: 1181822 - DNA, 25 bp, Homo sapien
tctcaatgcagatcacgtctgctgc

SEQ ID NO: 1181823 - DNA, 25 bp, Homo sapien
tcaatgcagatcacgtctgctgctc

SEQ ID NO: 1181824 - DNA, 25 bp, Homo sapien
gcagatcacgtctgctgctccacat

SEQ ID NO: 1181825 - DNA, 25 bp, Homo sapien
aatgcagatcacgtctgctgctcca

SEQ ID NO: 1181826 - DNA, 25 bp, Homo sapien
gatgagtcatccactggttgcctag

SEQ ID NO: 1181827 - DNA, 25 bp, Homo sapien
taggcaacgactattttcctcctgc

SEQ ID NO: 1181828 - DNA, 25 bp, Homo sapien
tggctgcttcaaagcctggatgagt

SEQ ID NO: 1181829 - DNA, 25 bp, Homo sapien
gcacaaatgtcccatgaaactgtga

SEQ ID NO: 1181830 - DNA, 25 bp, Homo sapien
catcatccaacacccacttctcttc

SEQ ID NO: 1181831 - DNA, 25 bp, Homo sapien
tatctaccaccagacctctgtgctt

SEQ ID NO: 1181832 - DNA, 25 bp, Homo sapien
ctctatctaccaccagacctctgtg

SEQ ID NO: 1181833 - DNA, 25 bp, Homo sapien
ttctttcatcatccaacacccactt

SEQ ID NO: 1181834 - DNA, 25 bp, Homo sapien
ttagcagaagggcaactcataggga

SEQ ID NO: 1181835 - DNA, 25 bp, Homo sapien
aattggatctcgcagtttccggcag

SEQ ID NO: 1181836 - DNA, 25 bp, Homo sapien
tgaacttattctcctctcttaatct

SEQ ID NO: 1181837 - DNA, 25 bp, Homo sapien
gtttccggcagccttgccatgctca

SEQ ID NO: 1181838 - DNA, 25 bp, Homo sapien
gccatgggtacgcaccttgcaaacc

SEQ ID NO: 1181839 - DNA, 25 bp, Homo sapien
cacctatctgcggtctagtaagaca

SEQ ID NO: 1181840 - DNA, 25 bp, Homo sapien
cacctactgaggtgaagattcacac

SEQ ID NO: 1181841 - DNA, 25 bp, Homo sapien
cctttgaggtcacgtctactagaga

SEQ ID NO: 1181842 - DNA, 25 bp, Homo sapien
tagccttcggaggtcatataaagga

SEQ ID NO: 1181843 - DNA, 25 bp, Homo sapien
taaagatggagtctaatggtgaagg

SEQ ID NO: 1181844 - DNA, 25 bp, Homo sapien
ctagttagtgtcttaggaggaggct

SEQ ID NO: 1181845 - DNA, 25 bp, Homo sapien
gctgcgaagaatgaagcgcggtaaa

SEQ ID NO: 1181846 - DNA, 25 bp, Homo sapien
gctctaagtcgcacagtacccttca

SEQ ID NO: 1181847 - DNA, 25 bp, Homo sapien
tcattcttgcaccaagaataaacat

SEQ ID NO: 1181848 - DNA, 25 bp, Homo sapien
ctcgagtctgctctaagtcgcacag

SEQ ID NO: 1181849 - DNA, 25 bp, Homo sapien
agtcgcacagtacccttcattcttg

SEQ ID NO: 1181850 - DNA, 25 bp, Homo sapien
tcctttaaggcatgactcctttggc

SEQ ID NO: 1181851 - DNA, 25 bp, Homo sapien
tcccctaactgatctctgaaattcc

SEQ ID NO: 1181852 - DNA, 25 bp, Homo sapien
aagggtgagtaagcaattatctggg

SEQ ID NO: 1181853 - DNA, 25 bp, Homo sapien
cctttggcttaaggctcgggtctct

SEQ ID NO: 1181854 - DNA, 25 bp, Homo sapien
gttgaatcagacaccttttcagcca

SEQ ID NO: 1181855 - DNA, 25 bp, Homo sapien
ttcaaagctaaagaggcctttacat

SEQ ID NO: 1181856 - DNA, 25 bp, Homo sapien
ctttacataatcaagaagctctgag

SEQ ID NO: 1181857 - DNA, 25 bp, Homo sapien
taaagaggcctttacataatcaaga

SEQ ID NO: 1181858 - DNA, 25 bp, Homo sapien
gcagatgggtggaagtgcctgttcc

SEQ ID NO: 1181859 - DNA, 25 bp, Homo sapien
gcatctgtctctggcagatcttggc

SEQ ID NO: 1181860 - DNA, 25 bp, Homo sapien
gcccctgagggatgttcagagacct

SEQ ID NO: 1181861 - DNA, 25 bp, Homo sapien
gggacacttggctgcagtgccctca

SEQ ID NO: 1181862 - DNA, 25 bp, Homo sapien
ggtgaaaagctaagtccctgccact

SEQ ID NO: 1181863 - DNA, 25 bp, Homo sapien
gcttgggcaacaatcctgctttggg

SEQ ID NO: 1181864 - DNA, 25 bp, Homo sapien
caatgcaagtgttcagtggccacaa

SEQ ID NO: 1181865 - DNA, 25 bp, Homo sapien
tgtattggaacccatagctccagac

SEQ ID NO: 1181866 - DNA, 25 bp, Homo sapien
ttgaggacgtccattcgccaggcag

SEQ ID NO: 1181867 - DNA, 25 bp, Homo sapien
attgaggacgtccattcgccaggca

SEQ ID NO: 1181868 - DNA, 25 bp, Homo sapien
ggctcagtgcctaaagagatccgct

SEQ ID NO: 1181869 - DNA, 25 bp, Homo sapien
tgtgaaccagtgactctcccaggaa

SEQ ID NO: 1181870 - DNA, 25 bp, Homo sapien
tagaacagatggaagccttagaggc

SEQ ID NO: 1181871 - DNA, 25 bp, Homo sapien
taaagagacatgctcaaggtcacac

SEQ ID NO: 1181872 - DNA, 25 bp, Homo sapien
gccttcagactgcagagatcttatt

SEQ ID NO: 1181873 - DNA, 25 bp, Homo sapien
attcagtttgcatcccccgcacagt

SEQ ID NO: 1181874 - DNA, 25 bp, Homo sapien
tcagactgcagagatcttattcagt

SEQ ID NO: 1181875 - DNA, 25 bp, Homo sapien
tttgcccaggtctccttggatgcct

SEQ ID NO: 1181876 - DNA, 25 bp, Homo sapien
tacttggcaggcagtcctgaccagc

SEQ ID NO: 1181877 - DNA, 25 bp, Homo sapien
cacagctggcgcctctagggcgcat

SEQ ID NO: 1181878 - DNA, 25 bp, Homo sapien
aagtgagggaatagttatacttggc

SEQ ID NO: 1181879 - DNA, 25 bp, Homo sapien
tctagggcgcattcaagtgagggaa

SEQ ID NO: 1181880 - DNA, 25 bp, Homo sapien
taaaattgtggaaaggaggctgtgt

SEQ ID NO: 1181881 - DNA, 25 bp, Homo sapien
tacttatcatacaaaagagatggag

SEQ ID NO: 1181882 - DNA, 25 bp, Homo sapien
caccttcccatgtaataagtgataa

SEQ ID NO: 1181883 - DNA, 25 bp, Homo sapien
tatcacaatctaaagcccagacaga

SEQ ID NO: 1181884 - DNA, 25 bp, Homo sapien
gaggaaaaaccggtatcagccattg

SEQ ID NO: 1181885 - DNA, 25 bp, Homo sapien
tgaagaatttcattaccaccaggcc

SEQ ID NO: 1181886 - DNA, 25 bp, Homo sapien
tcaaccccaagaaacgtaattatca

SEQ ID NO: 1181887 - DNA, 25 bp, Homo sapien
gagatgaggtgaatggaaacaagct

SEQ ID NO: 1181888 - DNA, 25 bp, Homo sapien
gaacatctcttttccgggactgctg

SEQ ID NO: 1181889 - DNA, 25 bp, Homo sapien
tcttttccgggactgctgacatatc

SEQ ID NO: 1181890 - DNA, 25 bp, Homo sapien
ccagctctgaccaccacctgttcaa

SEQ ID NO: 1181891 - DNA, 25 bp, Homo sapien
ggactgctgacatatcctgggcttt

SEQ ID NO: 1181892 - DNA, 25 bp, Homo sapien
gccggatccgcaggcacttttaatg

SEQ ID NO: 1181893 - DNA, 25 bp, Homo sapien
ccaagatagggttcagatgaggccc

SEQ ID NO: 1181894 - DNA, 25 bp, Homo sapien
gagtgactcatgctcgccacggttg

SEQ ID NO: 1181895 - DNA, 25 bp, Homo sapien
tctgaaccattatacagcactgcct

SEQ ID NO: 1181896 - DNA, 25 bp, Homo sapien
tggagcatgagttaaagctttcata

SEQ ID NO: 1181897 - DNA, 25 bp, Homo sapien
gaaaatggagcatgagttaaagctt

SEQ ID NO: 1181898 - DNA, 25 bp, Homo sapien
tggagaaaatttagggcttgagagt

SEQ ID NO: 1181899 - DNA, 25 bp, Homo sapien
tgagagttgtacctgccagttctct

SEQ ID NO: 1181900 - DNA, 25 bp, Homo sapien
tatatacatatgtatatatgcgtgt

SEQ ID NO: 1181901 - DNA, 25 bp, Homo sapien
tacatatgtatatatgcgtgtgtgt

SEQ ID NO: 1181902 - DNA, 25 bp, Homo sapien
acatatgtatatatgcgtgtgtgtg

SEQ ID NO: 1181903 - DNA, 25 bp, Homo sapien
tatacatatgtatatatgcgtgtgt

SEQ ID NO: 1181904 - DNA, 25 bp, Homo sapien
cctgcttccccagccagatcctatg

SEQ ID NO: 1181905 - DNA, 25 bp, Homo sapien
gcttccccagccagatcctatgcat

SEQ ID NO: 1181906 - DNA, 25 bp, Homo sapien
ttcctgcttccccagccagatccta

SEQ ID NO: 1181907 - DNA, 25 bp, Homo sapien
tgcttccccagccagatcctatgca

SEQ ID NO: 1181908 - DNA, 25 bp, Homo sapien
ggagtacatgaaaaacagaagtttg

SEQ ID NO: 1181909 - DNA, 25 bp, Homo sapien
atggagtacatgaaaaacagaagtt

SEQ ID NO: 1181910 - DNA, 25 bp, Homo sapien
agctttgctgctgccccacaggctg

SEQ ID NO: 1181911 - DNA, 25 bp, Homo sapien
ccatctcctctccccaaatgcccca

SEQ ID NO: 1181912 - DNA, 25 bp, Homo sapien
tcactgaagcccaaatcattgcttc

SEQ ID NO: 1181913 - DNA, 25 bp, Homo sapien
gcttccttagaactccatagtttgg

SEQ ID NO: 1181914 - DNA, 25 bp, Homo sapien
catagtttggagtcagactatcact

SEQ ID NO: 1181915 - DNA, 25 bp, Homo sapien
ggagtcagactatcactgaagccca

SEQ ID NO: 1181916 - DNA, 25 bp, Homo sapien
tgccgttagccccaataaatccaca

SEQ ID NO: 1181917 - DNA, 25 bp, Homo sapien
aacctagtgaattggctttacttgg

SEQ ID NO: 1181918 - DNA, 25 bp, Homo sapien
ggaattatgtttaagtattctctca

SEQ ID NO: 1181919 - DNA, 25 bp, Homo sapien
taaatccacaacctagtgaattggc

SEQ ID NO: 1181920 - DNA, 25 bp, Homo sapien
agagagtctggcccatccaacatcc

SEQ ID NO: 1181921 - DNA, 25 bp, Homo sapien
agagtctggcccatccaacatccga

SEQ ID NO: 1181922 - DNA, 25 bp, Homo sapien
atccaacatccgactctgcccacaa

SEQ ID NO: 1181923 - DNA, 25 bp, Homo sapien
ccaacatccgactctgcccacaatt

SEQ ID NO: 1181924 - DNA, 25 bp, Homo sapien
gttaaagcctcaaattccacagcct

SEQ ID NO: 1181925 - DNA, 25 bp, Homo sapien
tctgcaaattcctccctagtttctg

SEQ ID NO: 1181926 - DNA, 25 bp, Homo sapien
ccatatctgtgctgacaagacacac

SEQ ID NO: 1181927 - DNA, 25 bp, Homo sapien
aactctggtttctgcaactctctag

SEQ ID NO: 1181928 - DNA, 25 bp, Homo sapien
cattggaggcataaaagagatcctc

SEQ ID NO: 1181929 - DNA, 25 bp, Homo sapien
cagcgggacctcagccatgagactt

SEQ ID NO: 1181930 - DNA, 25 bp, Homo sapien
tcaaagagcccgatcctcactctcc

SEQ ID NO: 1181931 - DNA, 25 bp, Homo sapien
tgcactgaccattggaggcataaaa

SEQ ID NO: 1181932 - DNA, 25 bp, Homo sapien
gttgtggaagcctcatgtcacactg

SEQ ID NO: 1181933 - DNA, 25 bp, Homo sapien
tgtcacactggatgtcacatgaggt

SEQ ID NO: 1181934 - DNA, 25 bp, Homo sapien
ggatcgagaagctcagtgtggcagc

SEQ ID NO: 1181935 - DNA, 25 bp, Homo sapien
tcccctcctgagagagtcaaagggt

SEQ ID NO: 1181936 - DNA, 25 bp, Homo sapien
ttctttggacactcatgaagcatgg

SEQ ID NO: 1181937 - DNA, 25 bp, Homo sapien
tattttctatttcaaggctccgctt

SEQ ID NO: 1181938 - DNA, 25 bp, Homo sapien
tatttcaaggctccgcttcttcttt

SEQ ID NO: 1181939 - DNA, 25 bp, Homo sapien
tccgcttcttctttggacactcatg

SEQ ID NO: 1181940 - DNA, 25 bp, Homo sapien
tatctcaaattcaagcttgtgcctc

SEQ ID NO: 1181941 - DNA, 25 bp, Homo sapien
gagtatgacccatgcagtatctcaa

SEQ ID NO: 1181942 - DNA, 25 bp, Homo sapien
gacccatgcagtatctcaaattcaa

SEQ ID NO: 1181943 - DNA, 25 bp, Homo sapien
ctagtgagtatgacccatgcagtat

SEQ ID NO: 1181944 - DNA, 25 bp, Homo sapien
aattcaggcttgcacccgagtcctc

SEQ ID NO: 1181945 - DNA, 25 bp, Homo sapien
tcatgtggtgaattcaggcttgcac

SEQ ID NO: 1181946 - DNA, 25 bp, Homo sapien
gtgaattcaggcttgcacccgagtc

SEQ ID NO: 1181947 - DNA, 25 bp, Homo sapien
tctgcacctcagtgcatttggccag

SEQ ID NO: 1181948 - DNA, 25 bp, Homo sapien
gcattcattgttgagggaagaagac

SEQ ID NO: 1181949 - DNA, 25 bp, Homo sapien
cctgcaaactctagtgctctggaat

SEQ ID NO: 1181950 - DNA, 25 bp, Homo sapien
ggaatattgacactgctcatgcatg

SEQ ID NO: 1181951 - DNA, 25 bp, Homo sapien
cacacagtggaatgggaaaatccat

SEQ ID NO: 1181952 - DNA, 25 bp, Homo sapien
actgtgttccatcccacctcatgtg

SEQ ID NO: 1181953 - DNA, 25 bp, Homo sapien
tgccacactgagcttctcgatcctt

SEQ ID NO: 1181954 - DNA, 25 bp, Homo sapien
ttgactctctcaggaggggaagaga

SEQ ID NO: 1181955 - DNA, 25 bp, Homo sapien
tgagcttctcgatcctttgctttct

SEQ ID NO: 1181956 - DNA, 25 bp, Homo sapien
tgtaggatcatggaaagtctttgca

SEQ ID NO: 1181957 - DNA, 25 bp, Homo sapien
ggctttcgaggtgggtgtaggatca

SEQ ID NO: 1181958 - DNA, 25 bp, Homo sapien
tgggtgtaggatcatggaaagtctt

SEQ ID NO: 1181959 - DNA, 25 bp, Homo sapien
cgaggtgggtgtaggatcatggaaa

SEQ ID NO: 1181960 - DNA, 25 bp, Homo sapien
aggacctcttttatgcctccagtgg

SEQ ID NO: 1181961 - DNA, 25 bp, Homo sapien
ggagagtgaggatcgggctctttga

SEQ ID NO: 1181962 - DNA, 25 bp, Homo sapien
ttgaggacctcttttatgcctccag

SEQ ID NO: 1181963 - DNA, 25 bp, Homo sapien
tgaggatcgggctctttgaggacct

SEQ ID NO: 1181964 - DNA, 25 bp, Homo sapien
cacaatgtatgcagtgagagagcag

SEQ ID NO: 1181965 - DNA, 25 bp, Homo sapien
atgtatgcagtgagagagcagatgc

SEQ ID NO: 1181966 - DNA, 25 bp, Homo sapien
gtatgcagtgagagagcagatgcca

SEQ ID NO: 1181967 - DNA, 25 bp, Homo sapien
caatgtatgcagtgagagagcagat

SEQ ID NO: 1181968 - DNA, 25 bp, Homo sapien
caatgtcccgagtccaaaatctgtg

SEQ ID NO: 1181969 - DNA, 25 bp, Homo sapien
tgtggctcacaatgccaagctggaa

SEQ ID NO: 1181970 - DNA, 25 bp, Homo sapien
caggacaaattacaatgacggatat

SEQ ID NO: 1181971 - DNA, 25 bp, Homo sapien
tgatgagatctgcaatgtcccgagt

SEQ ID NO: 1181972 - DNA, 25 bp, Homo sapien
tgagcaggggttaacactatcacca

SEQ ID NO: 1181973 - DNA, 25 bp, Homo sapien
tttgagcaggggttaacactatcac

SEQ ID NO: 1181974 - DNA, 25 bp, Homo sapien
ctgttctttgagcaggggttaacac

SEQ ID NO: 1181975 - DNA, 25 bp, Homo sapien
gttctttgagcaggggttaacacta

SEQ ID NO: 1181976 - DNA, 25 bp, Homo sapien
gttccagctgcaaagagctatcctc

SEQ ID NO: 1181977 - DNA, 25 bp, Homo sapien
tccagctgcaaagagctatcctcta

SEQ ID NO: 1181978 - DNA, 25 bp, Homo sapien
tgcaaagagctatcctctataagca

SEQ ID NO: 1181979 - DNA, 25 bp, Homo sapien
gctgcaaagagctatcctctataag

SEQ ID NO: 1181980 - DNA, 25 bp, Homo sapien
gctcacacaggtcctcttatctgag

SEQ ID NO: 1181981 - DNA, 25 bp, Homo sapien
caggtcctcttatctgagacttcac

SEQ ID NO: 1181982 - DNA, 25 bp, Homo sapien
cacacaggtcctcttatctgagact

SEQ ID NO: 1181983 - DNA, 25 bp, Homo sapien
ggtcctcttatctgagacttcactc

SEQ ID NO: 1181984 - DNA, 25 bp, Homo sapien
tctcaaggagccttccgtgatggtg

SEQ ID NO: 1181985 - DNA, 25 bp, Homo sapien
gagccttccgtgatggtgtaggtct

SEQ ID NO: 1181986 - DNA, 25 bp, Homo sapien
tcaaggagccttccgtgatggtgta

SEQ ID NO: 1181987 - DNA, 25 bp, Homo sapien
tgctctcaaggagccttccgtgatg

SEQ ID NO: 1181988 - DNA, 25 bp, Homo sapien
ggaaaagacagacgaagttagccac

SEQ ID NO: 1181989 - DNA, 25 bp, Homo sapien
ttaagatcagggcagacatgaagag

SEQ ID NO: 1181990 - DNA, 25 bp, Homo sapien
gaaatagtctttcagagccatgaga

SEQ ID NO: 1181991 - DNA, 25 bp, Homo sapien
taaatgagtacccttcttctgccat

SEQ ID NO: 1181992 - DNA, 25 bp, Homo sapien
gcacagacttttaggccacgtttgg

SEQ ID NO: 1181993 - DNA, 25 bp, Homo sapien
cacagacttttaggccacgtttggt

SEQ ID NO: 1181994 - DNA, 25 bp, Homo sapien
gatcagcacagacttttaggccacg

SEQ ID NO: 1181995 - DNA, 25 bp, Homo sapien
tcagcacagacttttaggccacgtt

SEQ ID NO: 1181996 - DNA, 25 bp, Homo sapien
tatttctggtgttggatttcctgtc

SEQ ID NO: 1181997 - DNA, 25 bp, Homo sapien
gtcacagctgtattggtcgattgct

SEQ ID NO: 1181998 - DNA, 25 bp, Homo sapien
tattggtcgattgctgggttcctgt

SEQ ID NO: 1181999 - DNA, 25 bp, Homo sapien
tcctgttggcttggtctggatcatg

SEQ ID NO: 1182000 - DNA, 25 bp, Homo sapien
acatataagtgaatacagaagacat

SEQ ID NO: 1182001 - DNA, 25 bp, Homo sapien
cattacaagctggactctaagagag

SEQ ID NO: 1182002 - DNA, 25 bp, Homo sapien
ggtcagcatttggagcattaaaagc

SEQ ID NO: 1182003 - DNA, 25 bp, Homo sapien
tagtggaccctcagaatgggaaccc

SEQ ID NO: 1182004 - DNA, 25 bp, Homo sapien
ccatcaaagagaggtacaaggtcag

SEQ ID NO: 1182005 - DNA, 25 bp, Homo sapien
tcatcaaactccacctttcagtcat

SEQ ID NO: 1182006 - DNA, 25 bp, Homo sapien
ccctcatcaaactccacctttcagt

SEQ ID NO: 1182007 - DNA, 25 bp, Homo sapien
ttccctcatcaaactccacctttca

SEQ ID NO: 1182008 - DNA, 25 bp, Homo sapien
ctcatcaaactccacctttcagtca

SEQ ID NO: 1182009 - DNA, 25 bp, Homo sapien
gaggcaccgaagatgctcagtctca

SEQ ID NO: 1182010 - DNA, 25 bp, Homo sapien
tgagcagctccagcaatttgtctgg

SEQ ID NO: 1182011 - DNA, 25 bp, Homo sapien
aaaaggcctgcttgtctgtaacatg

SEQ ID NO: 1182012 - DNA, 25 bp, Homo sapien
cccaaagtataagctgccctggtgg

SEQ ID NO: 1182013 - DNA, 25 bp, Homo sapien
tccactgttcgatgcagccagggat

SEQ ID NO: 1182014 - DNA, 25 bp, Homo sapien
gtctccactgttcgatgcagccagg

SEQ ID NO: 1182015 - DNA, 25 bp, Homo sapien
tctccactgttcgatgcagccaggg

SEQ ID NO: 1182016 - DNA, 25 bp, Homo sapien
ctccactgttcgatgcagccaggga

SEQ ID NO: 1182017 - DNA, 25 bp, Homo sapien
ctgatccacaacagtgccagtgagg

SEQ ID NO: 1182018 - DNA, 25 bp, Homo sapien
taagcatctacttctatcccctgat

SEQ ID NO: 1182019 - DNA, 25 bp, Homo sapien
ccctgatccacaacagtgccagtga

SEQ ID NO: 1182020 - DNA, 25 bp, Homo sapien
ttctatcccctgatccacaacagtg

SEQ ID NO: 1182021 - DNA, 25 bp, Homo sapien
cctcctgaaccagatgaacaatttt

SEQ ID NO: 1182022 - DNA, 25 bp, Homo sapien
ctgaaccagatgaacaatttttcct

SEQ ID NO: 1182023 - DNA, 25 bp, Homo sapien
ctcctgaaccagatgaacaattttt

SEQ ID NO: 1182024 - DNA, 25 bp, Homo sapien
cctgaaccagatgaacaatttttcc

SEQ ID NO: 1182025 - DNA, 25 bp, Homo sapien
acatgacttagggatgtcccagtga

SEQ ID NO: 1182026 - DNA, 25 bp, Homo sapien
cagtgatgacccgtgtggaacagtg

SEQ ID NO: 1182027 - DNA, 25 bp, Homo sapien
taactccatagcttggaaatagagg

SEQ ID NO: 1182028 - DNA, 25 bp, Homo sapien
aattctggaactcctaatggggcac

SEQ ID NO: 1182029 - DNA, 25 bp, Homo sapien
tctgggtatcagcaaatggctgatg

SEQ ID NO: 1182030 - DNA, 25 bp, Homo sapien
cgcgtctgggtatcagcaaatggct

SEQ ID NO: 1182031 - DNA, 25 bp, Homo sapien
ctaggcacgcgtctgggtatcagca

SEQ ID NO: 1182032 - DNA, 25 bp, Homo sapien
gcacgcgtctgggtatcagcaaatg

SEQ ID NO: 1182033 - DNA, 25 bp, Homo sapien
tcagcacagacggatgatgtgcctt

SEQ ID NO: 1182034 - DNA, 25 bp, Homo sapien
tgggttcagcacagacggatgatgt

SEQ ID NO: 1182035 - DNA, 25 bp, Homo sapien
gatgtgccttggcaacctgagggtc

SEQ ID NO: 1182036 - DNA, 25 bp, Homo sapien
gcacagacggatgatgtgccttggc

SEQ ID NO: 1182037 - DNA, 25 bp, Homo sapien
ttagcatcttactcattccctaatt

SEQ ID NO: 1182038 - DNA, 25 bp, Homo sapien
cgtcatttatctttttagcaaattc

SEQ ID NO: 1182039 - DNA, 25 bp, Homo sapien
aactcgtcatttatctttttagcaa

SEQ ID NO: 1182040 - DNA, 25 bp, Homo sapien
tttagcatcttactcattccctaat

SEQ ID NO: 1182041 - DNA, 25 bp, Homo sapien
acacgatcagccctgtccacttccc

SEQ ID NO: 1182042 - DNA, 25 bp, Homo sapien
gaacacgatcagccctgtccacttc

SEQ ID NO: 1182043 - DNA, 25 bp, Homo sapien
ctgaacacgatcagccctgtccact

SEQ ID NO: 1182044 - DNA, 25 bp, Homo sapien
cacgatcagccctgtccacttcccc

SEQ ID NO: 1182045 - DNA, 25 bp, Homo sapien
gatgacgtatttataacatttctgg

SEQ ID NO: 1182046 - DNA, 25 bp, Homo sapien
ttcttgtatcgagggcagatgacgt

SEQ ID NO: 1182047 - DNA, 25 bp, Homo sapien
gagggcagatgacgtatttataaca

SEQ ID NO: 1182048 - DNA, 25 bp, Homo sapien
tgttcttcttgtatcgagggcagat

SEQ ID NO: 1182049 - DNA, 25 bp, Homo sapien
aagctgactcaatgtctagtgacat

SEQ ID NO: 1182050 - DNA, 25 bp, Homo sapien
ctgactcaatgtctagtgacatatt

SEQ ID NO: 1182051 - DNA, 25 bp, Homo sapien
gctgactcaatgtctagtgacatat

SEQ ID NO: 1182052 - DNA, 25 bp, Homo sapien
aaagctgactcaatgtctagtgaca

SEQ ID NO: 1182053 - DNA, 25 bp, Homo sapien
agccttttgtcttcatctttgggct

SEQ ID NO: 1182054 - DNA, 25 bp, Homo sapien
ccttttgtcttcatctttgggcttt

SEQ ID NO: 1182055 - DNA, 25 bp, Homo sapien
ttttgtcttcatctttgggctttac

SEQ ID NO: 1182056 - DNA, 25 bp, Homo sapien
gccttttgtcttcatctttgggctt

SEQ ID NO: 1182057 - DNA, 25 bp, Homo sapien
gcaggaaggacagggtttctcttaa

SEQ ID NO: 1182058 - DNA, 25 bp, Homo sapien
gaaactagctgaagaatgaaatgcc

SEQ ID NO: 1182059 - DNA, 25 bp, Homo sapien
tccttattcgtgtggtacaagcaca

SEQ ID NO: 1182060 - DNA, 25 bp, Homo sapien
tacaagcacaggtcatagagtcagc

SEQ ID NO: 1182061 - DNA, 25 bp, Homo sapien
caaactttaggcccaattcaggcat

SEQ ID NO: 1182062 - DNA, 25 bp, Homo sapien
tcaaactttaggcccaattcaggca

SEQ ID NO: 1182063 - DNA, 25 bp, Homo sapien
ttcaaactttaggcccaattcaggc

SEQ ID NO: 1182064 - DNA, 25 bp, Homo sapien
ggagcgtcactagcatagagggtaa

SEQ ID NO: 1182065 - DNA, 25 bp, Homo sapien
cccaagtgaggatatggagtctgag

SEQ ID NO: 1182066 - DNA, 25 bp, Homo sapien
gttggaagagctcccgataacctcc

SEQ ID NO: 1182067 - DNA, 25 bp, Homo sapien
tgaggaacaggcaggacatagacct

SEQ ID NO: 1182068 - DNA, 25 bp, Homo sapien
tacaggctccattaacttgagcagc

SEQ ID NO: 1182069 - DNA, 25 bp, Homo sapien
gctggtcactctggatatttttccc

SEQ ID NO: 1182070 - DNA, 25 bp, Homo sapien
cagcctcttcttcccgaaagttgtg

SEQ ID NO: 1182071 - DNA, 25 bp, Homo sapien
cccgaaagttgtgtacaggctccat

SEQ ID NO: 1182072 - DNA, 25 bp, Homo sapien
tgaccaccagtgatgaacagaggcc

SEQ ID NO: 1182073 - DNA, 25 bp, Homo sapien
cttgaggtactttctggaggcagca

SEQ ID NO: 1182074 - DNA, 25 bp, Homo sapien
agctgttaacccacaggtccttgag

SEQ ID NO: 1182075 - DNA, 25 bp, Homo sapien
tcaagggtgacctgaactcacagat

SEQ ID NO: 1182076 - DNA, 25 bp, Homo sapien
tctgcctttagtgctcagccctgtt

SEQ ID NO: 1182077 - DNA, 25 bp, Homo sapien
ctttagtgctcagccctgttatcct

SEQ ID NO: 1182078 - DNA, 25 bp, Homo sapien
tgcctttagtgctcagccctgttat

SEQ ID NO: 1182079 - DNA, 25 bp, Homo sapien
tctcaggaacctctgcgattgacat

SEQ ID NO: 1182080 - DNA, 25 bp, Homo sapien
tcttggttaaagagcaagccgagct

SEQ ID NO: 1182081 - DNA, 25 bp, Homo sapien
caatgccgaaaagaggtgccaatct

SEQ ID NO: 1182082 - DNA, 25 bp, Homo sapien
gaatgggagcaagaatgcgtgaatc

SEQ ID NO: 1182083 - DNA, 25 bp, Homo sapien
cacagaaaacgcactggaggacggc

SEQ ID NO: 1182084 - DNA, 25 bp, Homo sapien
cagcagctgctcagatatactgggg

SEQ ID NO: 1182085 - DNA, 25 bp, Homo sapien
cagctgctcagatatactggggtca

SEQ ID NO: 1182086 - DNA, 25 bp, Homo sapien
gcagctgctcagatatactggggtc

SEQ ID NO: 1182087 - DNA, 25 bp, Homo sapien
aacagcagctgctcagatatactgg

SEQ ID NO: 1182088 - DNA, 25 bp, Homo sapien
tctaaatcatcattcttaggccagc

SEQ ID NO: 1182089 - DNA, 25 bp, Homo sapien
ttctaaatcatcattcttaggccag

SEQ ID NO: 1182090 - DNA, 25 bp, Homo sapien
ggacttccaggaacataagaattag

SEQ ID NO: 1182091 - DNA, 25 bp, Homo sapien
gcaacttgcctgacatcctccatga

SEQ ID NO: 1182092 - DNA, 25 bp, Homo sapien
taagaattagaaccattcccaccaa

SEQ ID NO: 1182093 - DNA, 25 bp, Homo sapien
cctccatgagcgcagcagatcctgg

SEQ ID NO: 1182094 - DNA, 25 bp, Homo sapien
gtcatctcattgtaccaattgggaa

SEQ ID NO: 1182095 - DNA, 25 bp, Homo sapien
catctcattgtaccaattgggaaac

SEQ ID NO: 1182096 - DNA, 25 bp, Homo sapien
agtcatctcattgtaccaattggga

SEQ ID NO: 1182097 - DNA, 25 bp, Homo sapien
cagtcatctcattgtaccaattggg

SEQ ID NO: 1182098 - DNA, 25 bp, Homo sapien
ctctgagatcacctccttgtatttt

SEQ ID NO: 1182099 - DNA, 25 bp, Homo sapien
tgagatcacctccttgtattttgcc

SEQ ID NO: 1182100 - DNA, 25 bp, Homo sapien
gatcacctccttgtattttgcctga

SEQ ID NO: 1182101 - DNA, 25 bp, Homo sapien
tcacctccttgtattttgcctgatg

SEQ ID NO: 1182102 - DNA, 25 bp, Homo sapien
caagcaggagggttttgtagagtcc

SEQ ID NO: 1182103 - DNA, 25 bp, Homo sapien
ctgtaacaagcaggagggttttgta

SEQ ID NO: 1182104 - DNA, 25 bp, Homo sapien
caggagggttttgtagagtcccata

SEQ ID NO: 1182105 - DNA, 25 bp, Homo sapien
taacaagcaggagggttttgtagag

SEQ ID NO: 1182106 - DNA, 25 bp, Homo sapien
tggggagccctacgcctctcagaaa

SEQ ID NO: 1182107 - DNA, 25 bp, Homo sapien
ctggggagccctacgcctctcagaa

SEQ ID NO: 1182108 - DNA, 25 bp, Homo sapien
cagctgacacaagccagacttttcc

SEQ ID NO: 1182109 - DNA, 25 bp, Homo sapien
gccacagctgacacaagccagactt

SEQ ID NO: 1182110 - DNA, 25 bp, Homo sapien
cacagctgacacaagccagactttt

SEQ ID NO: 1182111 - DNA, 25 bp, Homo sapien
ccacagctgacacaagccagacttt

SEQ ID NO: 1182112 - DNA, 25 bp, Homo sapien
gtggccaggactactcccggagcgt

SEQ ID NO: 1182113 - DNA, 25 bp, Homo sapien
ggactactcccggagcgtgattcat

SEQ ID NO: 1182114 - DNA, 25 bp, Homo sapien
ctgggtggccaggactactcccgga

SEQ ID NO: 1182115 - DNA, 25 bp, Homo sapien
gccaggactactcccggagcgtgat

SEQ ID NO: 1182116 - DNA, 25 bp, Homo sapien
tcttgcaccacagtctccctgtggg

SEQ ID NO: 1182117 - DNA, 25 bp, Homo sapien
gcttggagtgcggagagctggatct

SEQ ID NO: 1182118 - DNA, 25 bp, Homo sapien
gcggagagctggatcttgcaccaca

SEQ ID NO: 1182119 - DNA, 25 bp, Homo sapien
tccctgtgggctcttgagtaagtgc

SEQ ID NO: 1182120 - DNA, 25 bp, Homo sapien
ttctgccaatagttatcccagactc

SEQ ID NO: 1182121 - DNA, 25 bp, Homo sapien
tggtttccctcttgagcattatctg

SEQ ID NO: 1182122 - DNA, 25 bp, Homo sapien
gacctctgatccattctgccaatag

SEQ ID NO: 1182123 - DNA, 25 bp, Homo sapien
attatctgctcagtgatgacctctg

SEQ ID NO: 1182124 - DNA, 25 bp, Homo sapien
ccctggattaactgctggctgatac

SEQ ID NO: 1182125 - DNA, 25 bp, Homo sapien
gtatttgaactctgactctatcgca

SEQ ID NO: 1182126 - DNA, 25 bp, Homo sapien
gactctatcgcagtaaatccctgga

SEQ ID NO: 1182127 - DNA, 25 bp, Homo sapien
tgtaacagctgacatcccattaagc

SEQ ID NO: 1182128 - DNA, 25 bp, Homo sapien
tctctcaggaggttatgcttgctta

SEQ ID NO: 1182129 - DNA, 25 bp, Homo sapien
ccaagtcttcctcgtttgtcagaga

SEQ ID NO: 1182130 - DNA, 25 bp, Homo sapien
tgctggaagatagcccaaagatggg

SEQ ID NO: 1182131 - DNA, 25 bp, Homo sapien
gacaactattcaggctcttgctgga

SEQ ID NO: 1182132 - DNA, 25 bp, Homo sapien
tggcatcttctcttagggtgactct

SEQ ID NO: 1182133 - DNA, 25 bp, Homo sapien
ggctgccgtagcctaagcatcacat

SEQ ID NO: 1182134 - DNA, 25 bp, Homo sapien
gcagctcagcaatgtcatccaggcc

SEQ ID NO: 1182135 - DNA, 25 bp, Homo sapien
tcatccaggccctggattttttctc

SEQ ID NO: 1182136 - DNA, 25 bp, Homo sapien
tcatgccagttggttgctgcggaaa

SEQ ID NO: 1182137 - DNA, 25 bp, Homo sapien
tggttgctgcggaaatactctgaga

SEQ ID NO: 1182138 - DNA, 25 bp, Homo sapien
gcttttgaaccccatgtttcagcaa

SEQ ID NO: 1182139 - DNA, 25 bp, Homo sapien
cctgtgttactcctgcaagagagat

SEQ ID NO: 1182140 - DNA, 25 bp, Homo sapien
catagagaccgaattagtcacatgg

SEQ ID NO: 1182141 - DNA, 25 bp, Homo sapien
cttcagaggtctgaaagagagctgt

SEQ ID NO: 1182142 - DNA, 25 bp, Homo sapien
caagaggaaatgttgactagaccac

SEQ ID NO: 1182143 - DNA, 25 bp, Homo sapien
gtcgggtcaaccagtcattctttct

SEQ ID NO: 1182144 - DNA, 25 bp, Homo sapien
ggaacaagaacggtcacttggtcca

SEQ ID NO: 1182145 - DNA, 25 bp, Homo sapien
gaacaagaacggtcacttggtccat

SEQ ID NO: 1182146 - DNA, 25 bp, Homo sapien
ctgggaacaagaacggtcacttggt

SEQ ID NO: 1182147 - DNA, 25 bp, Homo sapien
tgggaacaagaacggtcacttggtc

SEQ ID NO: 1182148 - DNA, 25 bp, Homo sapien
gagttgggccctttcgctctgcgtt

SEQ ID NO: 1182149 - DNA, 25 bp, Homo sapien
tatcttcccctcctggtagagttgg

SEQ ID NO: 1182150 - DNA, 25 bp, Homo sapien
tgcgttcccatcattctgtgcccat

SEQ ID NO: 1182151 - DNA, 25 bp, Homo sapien
cccatctcttcttagcccacaacac

SEQ ID NO: 1182152 - DNA, 25 bp, Homo sapien
aagccaaaataggatgacactctag

SEQ ID NO: 1182153 - DNA, 25 bp, Homo sapien
tcaagacttgtagcagagggactga

SEQ ID NO: 1182154 - DNA, 25 bp, Homo sapien
ttagtgctcttaagtgaccaatggc

SEQ ID NO: 1182155 - DNA, 25 bp, Homo sapien
ggaggagtctaagctggaatatcag

SEQ ID NO: 1182156 - DNA, 25 bp, Homo sapien
ggccactggcaatcttatgactgct

SEQ ID NO: 1182157 - DNA, 25 bp, Homo sapien
gaagcagcgctttgatgtttgcaca

SEQ ID NO: 1182158 - DNA, 25 bp, Homo sapien
acaaggcgtgctcttctctcctagg

SEQ ID NO: 1182159 - DNA, 25 bp, Homo sapien
gactgcttacacagacatccaggtg

SEQ ID NO: 1182160 - DNA, 25 bp, Homo sapien
caactaccccaagtggtcagcctga

SEQ ID NO: 1182161 - DNA, 25 bp, Homo sapien
aagcaactaccccaagtggtcagcc

SEQ ID NO: 1182162 - DNA, 25 bp, Homo sapien
tgaaagcaactaccccaagtggtca

SEQ ID NO: 1182163 - DNA, 25 bp, Homo sapien
ctgaaagcaactaccccaagtggtc

SEQ ID NO: 1182164 - DNA, 25 bp, Homo sapien
tggatagctgccctgtcacaccaaa

SEQ ID NO: 1182165 - DNA, 25 bp, Homo sapien
tccattgttttcagctctggatagc

SEQ ID NO: 1182166 - DNA, 25 bp, Homo sapien
agcggttagctcttgtcacagtggc

SEQ ID NO: 1182167 - DNA, 25 bp, Homo sapien
acacaaaaccacagcggttagctct

SEQ ID NO: 1182168 - DNA, 25 bp, Homo sapien
ttagaatctattcttttaaagtcag

SEQ ID NO: 1182169 - DNA, 25 bp, Homo sapien
tagaatctattcttttaaagtcaga

SEQ ID NO: 1182170 - DNA, 25 bp, Homo sapien
ggacagtgtcacatctacagttatg

SEQ ID NO: 1182171 - DNA, 25 bp, Homo sapien
catacaactgcctattgctgctgca

SEQ ID NO: 1182172 - DNA, 25 bp, Homo sapien
ttcttagctgctacaacaccaaggg

SEQ ID NO: 1182173 - DNA, 25 bp, Homo sapien
cattgttgaaacataactcgggctg

SEQ ID NO: 1182174 - DNA, 25 bp, Homo sapien
tcaaagaatactaccactgacattc

SEQ ID NO: 1182175 - DNA, 25 bp, Homo sapien
aagaatactaccactgacattctgg

SEQ ID NO: 1182176 - DNA, 25 bp, Homo sapien
aaagaatactaccactgacattctg

SEQ ID NO: 1182177 - DNA, 25 bp, Homo sapien
caaagaatactaccactgacattct

SEQ ID NO: 1182178 - DNA, 25 bp, Homo sapien
ctagtgtattgttcagaccacatga

SEQ ID NO: 1182179 - DNA, 25 bp, Homo sapien
tgttcagaccacatgagagaaattg

SEQ ID NO: 1182180 - DNA, 25 bp, Homo sapien
tttaggggttcccacagtagtcaca

SEQ ID NO: 1182181 - DNA, 25 bp, Homo sapien
caaatttctagtgtattgttcagac

SEQ ID NO: 1182182 - DNA, 25 bp, Homo sapien
cacatgatagatggctgacctgtaa

SEQ ID NO: 1182183 - DNA, 25 bp, Homo sapien
catgttcccaggaggtatgcactgt

SEQ ID NO: 1182184 - DNA, 25 bp, Homo sapien
tcctgaatcatgataagcctggatg

SEQ ID NO: 1182185 - DNA, 25 bp, Homo sapien
cagattcacaggacactcgatgttc

SEQ ID NO: 1182186 - DNA, 25 bp, Homo sapien
cttgccactcaacaacaccccccat

SEQ ID NO: 1182187 - DNA, 25 bp, Homo sapien
gccttcagacacatttagcattctt

SEQ ID NO: 1182188 - DNA, 25 bp, Homo sapien
ccttcagacacatttagcattcttg

SEQ ID NO: 1182189 - DNA, 25 bp, Homo sapien
cttcagacacatttagcattcttga

SEQ ID NO: 1182190 - DNA, 25 bp, Homo sapien
accagggcctagtacataatgggca

SEQ ID NO: 1182191 - DNA, 25 bp, Homo sapien
taagactaagagaagcacaacctga

SEQ ID NO: 1182192 - DNA, 25 bp, Homo sapien
tcaaaaagcgtgaaaaggcctcaac

SEQ ID NO: 1182193 - DNA, 25 bp, Homo sapien
tatagcaaggcagggttgaaggccc

SEQ ID NO: 1182194 - DNA, 25 bp, Homo sapien
tccaaatactcatcaacaatatgca

SEQ ID NO: 1182195 - DNA, 25 bp, Homo sapien
catctctctgtttatctgatcattg

SEQ ID NO: 1182196 - DNA, 25 bp, Homo sapien
aagggaacattaagtccagcagaga

SEQ ID NO: 1182197 - DNA, 25 bp, Homo sapien
gatcattgcttgtaacggtgaaaga

SEQ ID NO: 1182198 - DNA, 25 bp, Homo sapien
gacctggataggattaagctggcag

SEQ ID NO: 1182199 - DNA, 25 bp, Homo sapien
ccagttcttttatagtatgagtagc

SEQ ID NO: 1182200 - DNA, 25 bp, Homo sapien
tatgagtagcagcaattctctgatc

SEQ ID NO: 1182201 - DNA, 25 bp, Homo sapien
tagtatgagtagcagcaattctctg

SEQ ID NO: 1182202 - DNA, 25 bp, Homo sapien
tcttttatagtatgagtagcagcaa

SEQ ID NO: 1182203 - DNA, 25 bp, Homo sapien
ctgtcaaacgagtttggattttatt

SEQ ID NO: 1182204 - DNA, 25 bp, Homo sapien
ttattattcaatgttaaaattctag

SEQ ID NO: 1182205 - DNA, 25 bp, Homo sapien
gtttggattttattattcaatgtta

SEQ ID NO: 1182206 - DNA, 25 bp, Homo sapien
tattcaatgttaaaattctagccat

SEQ ID NO: 1182207 - DNA, 25 bp, Homo sapien
ggcaaagatggcatgtggaactttc

SEQ ID NO: 1182208 - DNA, 25 bp, Homo sapien
catagaatatgaagactaagtggag

SEQ ID NO: 1182209 - DNA, 25 bp, Homo sapien
ctaagtggagagatataattgggaa

SEQ ID NO: 1182210 - DNA, 25 bp, Homo sapien
aattgggaaagttgacaaagagctc

SEQ ID NO: 1182211 - DNA, 25 bp, Homo sapien
caggattcctttatgctctttgtca

SEQ ID NO: 1182212 - DNA, 25 bp, Homo sapien
tcctttatgctctttgtcaagaact

SEQ ID NO: 1182213 - DNA, 25 bp, Homo sapien
attcctttatgctctttgtcaagaa

SEQ ID NO: 1182214 - DNA, 25 bp, Homo sapien
ggattcctttatgctctttgtcaag

SEQ ID NO: 1182215 - DNA, 25 bp, Homo sapien
aaggttcgtaactcatcttctcaca

SEQ ID NO: 1182216 - DNA, 25 bp, Homo sapien
cattgctgcttgtgttgaccttggc

SEQ ID NO: 1182217 - DNA, 25 bp, Homo sapien
aaaaggttcgtaactcatcttctca

SEQ ID NO: 1182218 - DNA, 25 bp, Homo sapien
ctcacattgctgcttgtgttgacct

SEQ ID NO: 1182219 - DNA, 25 bp, Homo sapien
ttcatgcctccagattcggcaaact

SEQ ID NO: 1182220 - DNA, 25 bp, Homo sapien
gacatgtggtcagacattgttgaga

SEQ ID NO: 1182221 - DNA, 25 bp, Homo sapien
tggtcagacattgttgagagaagaa

SEQ ID NO: 1182222 - DNA, 25 bp, Homo sapien
ctgtagcctaaaaattcatgcctcc

SEQ ID NO: 1182223 - DNA, 25 bp, Homo sapien
ttggccttgtctgcactgtaacacc

SEQ ID NO: 1182224 - DNA, 25 bp, Homo sapien
tcccaaagcacctggaaccagaaga

SEQ ID NO: 1182225 - DNA, 25 bp, Homo sapien
actgtaagcttctgagggaaaagcc

SEQ ID NO: 1182226 - DNA, 25 bp, Homo sapien
actgtaacacccagctcccaaagca

SEQ ID NO: 1182227 - DNA, 25 bp, Homo sapien
gttgcacttcttggcaaagcccatg

SEQ ID NO: 1182228 - DNA, 25 bp, Homo sapien
gcacttcttggcaaagcccatgttc

SEQ ID NO: 1182229 - DNA, 25 bp, Homo sapien
cttgttgcacttcttggcaaagccc

SEQ ID NO: 1182230 - DNA, 25 bp, Homo sapien
agagattcatatctttgcaatcggg

SEQ ID NO: 1182231 - DNA, 25 bp, Homo sapien
taatgtaggcaaattgattgagctt

SEQ ID NO: 1182232 - DNA, 25 bp, Homo sapien
tgggtaatgtaggcaaattgattga

SEQ ID NO: 1182233 - DNA, 25 bp, Homo sapien
tggggtgggtaatgtaggcaaattg

SEQ ID NO: 1182234 - DNA, 25 bp, Homo sapien
ggtaatgtaggcaaattgattgagc

SEQ ID NO: 1182235 - DNA, 25 bp, Homo sapien
cacacaacctgagacccttggcaat

SEQ ID NO: 1182236 - DNA, 25 bp, Homo sapien
tggcccacacaacctgagacccttg

SEQ ID NO: 1182237 - DNA, 25 bp, Homo sapien
acacaacctgagacccttggcaatg

SEQ ID NO: 1182238 - DNA, 25 bp, Homo sapien
cccacacaacctgagacccttggca

SEQ ID NO: 1182239 - DNA, 25 bp, Homo sapien
tgctggtacgctatctttaagagta

SEQ ID NO: 1182240 - DNA, 25 bp, Homo sapien
atctgaggctaatctgagggaggct

SEQ ID NO: 1182241 - DNA, 25 bp, Homo sapien
gattcagtgtgcagctgagtaccta

SEQ ID NO: 1182242 - DNA, 25 bp, Homo sapien
ttccattcgctgtaagatctgaggc

SEQ ID NO: 1182243 - DNA, 25 bp, Homo sapien
tgggagatgcttcttctgcttagac

SEQ ID NO: 1182244 - DNA, 25 bp, Homo sapien
caaaccattaggacattattctcag

SEQ ID NO: 1182245 - DNA, 25 bp, Homo sapien
cacaaaccattaggacattattctc

SEQ ID NO: 1182246 - DNA, 25 bp, Homo sapien
gcttcttctgcttagactcacaaac

SEQ ID NO: 1182247 - DNA, 25 bp, Homo sapien
aatgctccgatgtggttagtttctg

SEQ ID NO: 1182248 - DNA, 25 bp, Homo sapien
gctccgatgtggttagtttctggaa

SEQ ID NO: 1182249 - DNA, 25 bp, Homo sapien
ctggaatgctccgatgtggttagtt

SEQ ID NO: 1182250 - DNA, 25 bp, Homo sapien
cacctggaatgctccgatgtggtta

SEQ ID NO: 1182251 - DNA, 25 bp, Homo sapien
tcaggccagtccctcagtgaagtgt

SEQ ID NO: 1182252 - DNA, 25 bp, Homo sapien
aagttttgcaagtttctcaaccata

SEQ ID NO: 1182253 - DNA, 25 bp, Homo sapien
aaccatatcattgctggctcttaag

SEQ ID NO: 1182254 - DNA, 25 bp, Homo sapien
aggccagtccctcagtgaagtgtgc

SEQ ID NO: 1182255 - DNA, 25 bp, Homo sapien
gagaacaatgatcccatagtctgga

SEQ ID NO: 1182256 - DNA, 25 bp, Homo sapien
taaacactgtctactagagaacaat

SEQ ID NO: 1182257 - DNA, 25 bp, Homo sapien
agcaagtgcctccatttttgataaa

SEQ ID NO: 1182258 - DNA, 25 bp, Homo sapien
gcaagtgcctccatttttgataaac

SEQ ID NO: 1182259 - DNA, 25 bp, Homo sapien
tccagtgtggtcattctggactctg

SEQ ID NO: 1182260 - DNA, 25 bp, Homo sapien
cagtgtggtcattctggactctggt

SEQ ID NO: 1182261 - DNA, 25 bp, Homo sapien
ccagtgtggtcattctggactctgg

SEQ ID NO: 1182262 - DNA, 25 bp, Homo sapien
attccagtgtggtcattctggactc

SEQ ID NO: 1182263 - DNA, 25 bp, Homo sapien
tgaaggtccatttcacaccttgctc

SEQ ID NO: 1182264 - DNA, 25 bp, Homo sapien
catgtactacgatgggctccaataa

SEQ ID NO: 1182265 - DNA, 25 bp, Homo sapien
cattgacatgtactacgatgggctc

SEQ ID NO: 1182266 - DNA, 25 bp, Homo sapien
accttgctcccattgacatgtacta

SEQ ID NO: 1182267 - DNA, 25 bp, Homo sapien
tttttgctgcttgggtctcgtttgc

SEQ ID NO: 1182268 - DNA, 25 bp, Homo sapien
tgatgagtatgtatttgtcacactg

SEQ ID NO: 1182269 - DNA, 25 bp, Homo sapien
gcttgggtctcgtttgctgcttgac

SEQ ID NO: 1182270 - DNA, 25 bp, Homo sapien
ttgacctagtttgccagtgatgagt

SEQ ID NO: 1182271 - DNA, 25 bp, Homo sapien
gagaagaatgaagactcagtcctga

SEQ ID NO: 1182272 - DNA, 25 bp, Homo sapien
gactcagtcctgaaagaacttggaa

SEQ ID NO: 1182273 - DNA, 25 bp, Homo sapien
tggcaggccccatgtgagaaaccct

SEQ ID NO: 1182274 - DNA, 25 bp, Homo sapien
aaggtttctgctctcatcaagtctt

SEQ ID NO: 1182275 - DNA, 25 bp, Homo sapien
gaaagtaaaatgttgcatccctcga

SEQ ID NO: 1182276 - DNA, 25 bp, Homo sapien
aatgttgcatccctcgatgacccca

SEQ ID NO: 1182277 - DNA, 25 bp, Homo sapien
taaaatgttgcatccctcgatgacc

SEQ ID NO: 1182278 - DNA, 25 bp, Homo sapien
gttgcatccctcgatgaccccagtt

SEQ ID NO: 1182279 - DNA, 25 bp, Homo sapien
ccaagcagaaagaacctgcctgtct

SEQ ID NO: 1182280 - DNA, 25 bp, Homo sapien
caagcagaaagaacctgcctgtctt

SEQ ID NO: 1182281 - DNA, 25 bp, Homo sapien
tccacttgaaatattcttgttcact

SEQ ID NO: 1182282 - DNA, 25 bp, Homo sapien
ccacttgaaatattcttgttcactt

SEQ ID NO: 1182283 - DNA, 25 bp, Homo sapien
ctccacttgaaatattcttgttcac

SEQ ID NO: 1182284 - DNA, 25 bp, Homo sapien
ttcccagtattcccctcaccccaga

SEQ ID NO: 1182285 - DNA, 25 bp, Homo sapien
attcccagtattcccctcaccccag

SEQ ID NO: 1182286 - DNA, 25 bp, Homo sapien
tcagtggatgggtgtcatggcacct

SEQ ID NO: 1182287 - DNA, 25 bp, Homo sapien
ggtgtcatggcacctgaggcctgaa

SEQ ID NO: 1182288 - DNA, 25 bp, Homo sapien
tgagaaggtgcatcagtggatgggt

SEQ ID NO: 1182289 - DNA, 25 bp, Homo sapien
catggcacctgaggcctgaacttgg

SEQ ID NO: 1182290 - DNA, 25 bp, Homo sapien
tgggagagctcctgaagggtcctca

SEQ ID NO: 1182291 - DNA, 25 bp, Homo sapien
tgggagctctcatttgcccggtact

SEQ ID NO: 1182292 - DNA, 25 bp, Homo sapien
tgtggcacatttcataagctccagg

SEQ ID NO: 1182293 - DNA, 25 bp, Homo sapien
gagagcacagatgccaccctgttgg

SEQ ID NO: 1182294 - DNA, 25 bp, Homo sapien
caggaagactgaatctgatgacgag

SEQ ID NO: 1182295 - DNA, 25 bp, Homo sapien
ggacacctgtcaactcaaagtgggg

SEQ ID NO: 1182296 - DNA, 25 bp, Homo sapien
tgatgacgagattttcctcagtccc

SEQ ID NO: 1182297 - DNA, 25 bp, Homo sapien
ttcctgtttaatcacccagcaaagt

SEQ ID NO: 1182298 - DNA, 25 bp, Homo sapien
cttgctgatggtgaggagcctcatt

SEQ ID NO: 1182299 - DNA, 25 bp, Homo sapien
gagaattgctggaaggctaggctca

SEQ ID NO: 1182300 - DNA, 25 bp, Homo sapien
tagttagaacctttacatggcagcc

SEQ ID NO: 1182301 - DNA, 25 bp, Homo sapien
cagaaatgccctacagagtgcttgt

SEQ ID NO: 1182302 - DNA, 25 bp, Homo sapien
gagtgcttgtatgcagctcatccag

SEQ ID NO: 1182303 - DNA, 25 bp, Homo sapien
gccatcacaggtaaatgaagttagt

SEQ ID NO: 1182304 - DNA, 25 bp, Homo sapien
tttgccatcacaggtaaatgaagtt

SEQ ID NO: 1182305 - DNA, 25 bp, Homo sapien
catcacaggtaaatgaagttagttt

SEQ ID NO: 1182306 - DNA, 25 bp, Homo sapien
catttgccatcacaggtaaatgaag

SEQ ID NO: 1182307 - DNA, 25 bp, Homo sapien
accattgattgtttaacagccagca

SEQ ID NO: 1182308 - DNA, 25 bp, Homo sapien
agaaggccagaattatgctcagcaa

SEQ ID NO: 1182309 - DNA, 25 bp, Homo sapien
cattgattgtttaacagccagcagg

SEQ ID NO: 1182310 - DNA, 25 bp, Homo sapien
aggccagaattatgctcagcaaatg

SEQ ID NO: 1182311 - DNA, 25 bp, Homo sapien
cttcaaggtcctcaacttttcaggg

SEQ ID NO: 1182312 - DNA, 25 bp, Homo sapien
cacttgagaccttacacttcaaggt

SEQ ID NO: 1182313 - DNA, 25 bp, Homo sapien
gttggcaagaggtataaactgttcc

SEQ ID NO: 1182314 - DNA, 25 bp, Homo sapien
tcccatcacagcacttgagacctta

SEQ ID NO: 1182315 - DNA, 25 bp, Homo sapien
cttacagtgataccaccaaggacac

SEQ ID NO: 1182316 - DNA, 25 bp, Homo sapien
cagttacatagcatgacacgtccca

SEQ ID NO: 1182317 - DNA, 25 bp, Homo sapien
aggacactgcccacataaataagtg

SEQ ID NO: 1182318 - DNA, 25 bp, Homo sapien
gaaaagaccagtatgattgagccct

SEQ ID NO: 1182319 - DNA, 25 bp, Homo sapien
ccaggcaaagggaatcggattggca

SEQ ID NO: 1182320 - DNA, 25 bp, Homo sapien
aggcaaagggaatcggattggcaca

SEQ ID NO: 1182321 - DNA, 25 bp, Homo sapien
caggcaaagggaatcggattggcac

SEQ ID NO: 1182322 - DNA, 25 bp, Homo sapien
tccaggcaaagggaatcggattggc

SEQ ID NO: 1182323 - DNA, 25 bp, Homo sapien
tccctgatatagtgagaatactggg

SEQ ID NO: 1182324 - DNA, 25 bp, Homo sapien
tgagaggacgtccagaaagcatccc

SEQ ID NO: 1182325 - DNA, 25 bp, Homo sapien
tggctcccaggccttgactagcaga

SEQ ID NO: 1182326 - DNA, 25 bp, Homo sapien
caggccttgactagcagactcccag

SEQ ID NO: 1182327 - DNA, 25 bp, Homo sapien
catcacagaaggatgccggattgct

SEQ ID NO: 1182328 - DNA, 25 bp, Homo sapien
tcacagaaggatgccggattgctcc

SEQ ID NO: 1182329 - DNA, 25 bp, Homo sapien
gaaggatgccggattgctccggggc

SEQ ID NO: 1182330 - DNA, 25 bp, Homo sapien
aggatgccggattgctccggggctt

SEQ ID NO: 1182331 - DNA, 25 bp, Homo sapien
caatgcgtatggaaacccagtgttt

SEQ ID NO: 1182332 - DNA, 25 bp, Homo sapien
tcagtcaatgcgtatggaaacccag

SEQ ID NO: 1182333 - DNA, 25 bp, Homo sapien
gtcaatgcgtatggaaacccagtgt

SEQ ID NO: 1182334 - DNA, 25 bp, Homo sapien
cagtcaatgcgtatggaaacccagt

SEQ ID NO: 1182335 - DNA, 25 bp, Homo sapien
ttgctttccagtgcgcttcctgctg

SEQ ID NO: 1182336 - DNA, 25 bp, Homo sapien
gagctgggcttttgttccaaggccc

SEQ ID NO: 1182337 - DNA, 25 bp, Homo sapien
cctcctccaactcaagtaatgaata

SEQ ID NO: 1182338 - DNA, 25 bp, Homo sapien
tcaagtactttatgtcccgttgggc

SEQ ID NO: 1182339 - DNA, 25 bp, Homo sapien
aatgcagcagctcatcctaagccag

SEQ ID NO: 1182340 - DNA, 25 bp, Homo sapien
gtagcaaacacccagtagactgatg

SEQ ID NO: 1182341 - DNA, 25 bp, Homo sapien
gattgctgctggaaaacatgatctc

SEQ ID NO: 1182342 - DNA, 25 bp, Homo sapien
tgatctcagccctataggaaccaga

SEQ ID NO: 1182343 - DNA, 25 bp, Homo sapien
gttgttgagtgtccattactgtaac

SEQ ID NO: 1182344 - DNA, 25 bp, Homo sapien
ttgagtgtccattactgtaacagga

SEQ ID NO: 1182345 - DNA, 25 bp, Homo sapien
cttatcgagtagttttccagcagga

SEQ ID NO: 1182346 - DNA, 25 bp, Homo sapien
tatcgagtagttttccagcaggaca

SEQ ID NO: 1182347 - DNA, 25 bp, Homo sapien
ccccagcttggtagtatgagagctg

SEQ ID NO: 1182348 - DNA, 25 bp, Homo sapien
aagatgctgcacttgcgggtatgat

SEQ ID NO: 1182349 - DNA, 25 bp, Homo sapien
ccagcttggtagtatgagagctgca

SEQ ID NO: 1182350 - DNA, 25 bp, Homo sapien
cttgcgggtatgatgaccctggtcc

SEQ ID NO: 1182351 - DNA, 25 bp, Homo sapien
acctcgagcaggacaattgccaaac

SEQ ID NO: 1182352 - DNA, 25 bp, Homo sapien
ttgtgggcggcctgaaccacctcga

SEQ ID NO: 1182353 - DNA, 25 bp, Homo sapien
ggtagcccgcagtgagttgtcccgt

SEQ ID NO: 1182354 - DNA, 25 bp, Homo sapien
gttgtcccgtagaaaccaattgaga

SEQ ID NO: 1182355 - DNA, 25 bp, Homo sapien
tttggtccgccgagcgctcctctag

SEQ ID NO: 1182356 - DNA, 25 bp, Homo sapien
tccgagccccgcacctattggtggg

SEQ ID NO: 1182357 - DNA, 25 bp, Homo sapien
agggaaggacggacaagcggactgc

SEQ ID NO: 1182358 - DNA, 25 bp, Homo sapien
gccgctcgcgggctttctttggtcc

SEQ ID NO: 1182359 - DNA, 25 bp, Homo sapien
ccgctcggcttctccggcctggctc

SEQ ID NO: 1182360 - DNA, 25 bp, Homo sapien
cggcgcgcgccctggcgtcctctgc

SEQ ID NO: 1182361 - DNA, 25 bp, Homo sapien
tgccgcggtccggagggtgggtggc

SEQ ID NO: 1182362 - DNA, 25 bp, Homo sapien
ctggcgtcctctgcgccgctcggct

SEQ ID NO: 1182363 - DNA, 25 bp, Homo sapien
ccaccggtcctgcccagaaactcct

SEQ ID NO: 1182364 - DNA, 25 bp, Homo sapien
ccggtcctgcccagaaactccttct

SEQ ID NO: 1182365 - DNA, 25 bp, Homo sapien
caccggtcctgcccagaaactcctt

SEQ ID NO: 1182366 - DNA, 25 bp, Homo sapien
aagcaggaacaccaatcggcctctg

SEQ ID NO: 1182367 - DNA, 25 bp, Homo sapien
ttcaaaatgtcagctaagcactatt

SEQ ID NO: 1182368 - DNA, 25 bp, Homo sapien
taagcactatttccctgactcattc

SEQ ID NO: 1182369 - DNA, 25 bp, Homo sapien
tgaagtgtgatgcattattaaccct

SEQ ID NO: 1182370 - DNA, 25 bp, Homo sapien
agaagcatgaaactggaatgagcaa

SEQ ID NO: 1182371 - DNA, 25 bp, Homo sapien
gaagcatgaaactggaatgagcaaa

SEQ ID NO: 1182372 - DNA, 25 bp, Homo sapien
gcatgaaactggaatgagcaaagat

SEQ ID NO: 1182373 - DNA, 25 bp, Homo sapien
aagcatgaaactggaatgagcaaag

SEQ ID NO: 1182374 - DNA, 25 bp, Homo sapien
caaacagtgtgtacccttcaaaagg

SEQ ID NO: 1182375 - DNA, 25 bp, Homo sapien
gagtctcctgcgtccatcttggtga

SEQ ID NO: 1182376 - DNA, 25 bp, Homo sapien
ggcaggcatccaggcctagctgtaa

SEQ ID NO: 1182377 - DNA, 25 bp, Homo sapien
taagcaaaatcgagccaagggcatc

SEQ ID NO: 1182378 - DNA, 25 bp, Homo sapien
cagtaggcaaatggcaacgctgtga

SEQ ID NO: 1182379 - DNA, 25 bp, Homo sapien
tcagcaaggcagctatcgtagccct

SEQ ID NO: 1182380 - DNA, 25 bp, Homo sapien
tccagtgaatgctcctaagaggtgc

SEQ ID NO: 1182381 - DNA, 25 bp, Homo sapien
acgctgtgacgtcaagagatctgga

SEQ ID NO: 1182382 - DNA, 25 bp, Homo sapien
aaatactacaatccaagctctgctg

SEQ ID NO: 1182383 - DNA, 25 bp, Homo sapien
tgaatcctgagaaacccagtgatga

SEQ ID NO: 1182384 - DNA, 25 bp, Homo sapien
ttaagggtaggaggaatgttcagct

SEQ ID NO: 1182385 - DNA, 25 bp, Homo sapien
tgttcagctagaactaggatcctta

SEQ ID NO: 1182386 - DNA, 25 bp, Homo sapien
tcttccttgtccaacgtcaagagtg

SEQ ID NO: 1182387 - DNA, 25 bp, Homo sapien
aaagctgtgatgcagtcatatgctc

SEQ ID NO: 1182388 - DNA, 25 bp, Homo sapien
tgtccaacgtcaagagtgcacctca

SEQ ID NO: 1182389 - DNA, 25 bp, Homo sapien
gaaagtttaatcttcccacggatga

SEQ ID NO: 1182390 - DNA, 25 bp, Homo sapien
actcggtcctgatatgtgggcttaa

SEQ ID NO: 1182391 - DNA, 25 bp, Homo sapien
cggggccactcggtcctgatatgtg

SEQ ID NO: 1182392 - DNA, 25 bp, Homo sapien
gcatcacttggatggttccgatgaa

SEQ ID NO: 1182393 - DNA, 25 bp, Homo sapien
catcacttggatggttccgatgaag

SEQ ID NO: 1182394 - DNA, 25 bp, Homo sapien
gaaatgaagctattcatgtggattt

SEQ ID NO: 1182395 - DNA, 25 bp, Homo sapien
ggaaatgaagctattcatgtggatt

SEQ ID NO: 1182396 - DNA, 25 bp, Homo sapien
tgagagcccggaagttatgcaacac

SEQ ID NO: 1182397 - DNA, 25 bp, Homo sapien
tgctcagggccacgtagatcatctg

SEQ ID NO: 1182398 - DNA, 25 bp, Homo sapien
ccacattcaaggaggtacgcaggaa

SEQ ID NO: 1182399 - DNA, 25 bp, Homo sapien
gccatgggcctttcacgactggtgt

SEQ ID NO: 1182400 - DNA, 25 bp, Homo sapien
tgactttgtagtcgtatttggcttt

SEQ ID NO: 1182401 - DNA, 25 bp, Homo sapien
gaattataaaacagcagcaggccag

SEQ ID NO: 1182402 - DNA, 25 bp, Homo sapien
tatttgactttgtagtcgtatttgg

SEQ ID NO: 1182403 - DNA, 25 bp, Homo sapien
ttaatctaggaaatttcctgaagaa

SEQ ID NO: 1182404 - DNA, 25 bp, Homo sapien
cctctggagaaaagcttggcaggcg

SEQ ID NO: 1182405 - DNA, 25 bp, Homo sapien
tgagaagcgatgctgcagagcagca

SEQ ID NO: 1182406 - DNA, 25 bp, Homo sapien
ccagatccaactgcatcaacagatg

SEQ ID NO: 1182407 - DNA, 25 bp, Homo sapien
aaaagcttggcaggcgctaacccaa

SEQ ID NO: 1182408 - DNA, 25 bp, Homo sapien
ctgcctaccaggaagcaagccagct

SEQ ID NO: 1182409 - DNA, 25 bp, Homo sapien
ggaatctcccggacccaccgattga

SEQ ID NO: 1182410 - DNA, 25 bp, Homo sapien
ggaagcaagccagctgggaatctcc

SEQ ID NO: 1182411 - DNA, 25 bp, Homo sapien
aagccagctgggaatctcccggacc

SEQ ID NO: 1182412 - DNA, 25 bp, Homo sapien
agaaataaggaagatcctccatgtt

SEQ ID NO: 1182413 - DNA, 25 bp, Homo sapien
agctttagtaagtgttgatagcaca

SEQ ID NO: 1182414 - DNA, 25 bp, Homo sapien
ttagtaagtgttgatagcacaaggg

SEQ ID NO: 1182415 - DNA, 25 bp, Homo sapien
taaggaagatcctccatgtttagct

SEQ ID NO: 1182416 - DNA, 25 bp, Homo sapien
ccccgggtctgttctgttctggata

SEQ ID NO: 1182417 - DNA, 25 bp, Homo sapien
gcaactagatactcacaagagaaag

SEQ ID NO: 1182418 - DNA, 25 bp, Homo sapien
gacctttgaaaggatgtccaaatcc

SEQ ID NO: 1182419 - DNA, 25 bp, Homo sapien
ctggaaattaccacagatcagcccc

SEQ ID NO: 1182420 - DNA, 25 bp, Homo sapien
ctcttttctttatccgaagcctgat

SEQ ID NO: 1182421 - DNA, 25 bp, Homo sapien
cttttctttatccgaagcctgatgg

SEQ ID NO: 1182422 - DNA, 25 bp, Homo sapien
ttctttatccgaagcctgatggcct

SEQ ID NO: 1182423 - DNA, 25 bp, Homo sapien
tttctttatccgaagcctgatggcc

SEQ ID NO: 1182424 - DNA, 25 bp, Homo sapien
aaggtcaggggaagacccacagcca

SEQ ID NO: 1182425 - DNA, 25 bp, Homo sapien
gggacattggtgtgataaacaacaa

SEQ ID NO: 1182426 - DNA, 25 bp, Homo sapien
agccaaaatataaacaagcctgata

SEQ ID NO: 1182427 - DNA, 25 bp, Homo sapien
aacaacaattatgcaagctgtggtc

SEQ ID NO: 1182428 - DNA, 25 bp, Homo sapien
cccataaggaggcacatcatcacta

SEQ ID NO: 1182429 - DNA, 25 bp, Homo sapien
cactatccttgataagtgactctac

SEQ ID NO: 1182430 - DNA, 25 bp, Homo sapien
tgataagtgactctaccctggcttc

SEQ ID NO: 1182431 - DNA, 25 bp, Homo sapien
ttcaaacttaagtgggcaccctgta

SEQ ID NO: 1182432 - DNA, 25 bp, Homo sapien
cagtacatatgcctcatagctcttg

SEQ ID NO: 1182433 - DNA, 25 bp, Homo sapien
tacatatgcctcatagctcttggga

SEQ ID NO: 1182434 - DNA, 25 bp, Homo sapien
ttcagtacatatgcctcatagctct

SEQ ID NO: 1182435 - DNA, 25 bp, Homo sapien
catatgcctcatagctcttgggatc

SEQ ID NO: 1182436 - DNA, 25 bp, Homo sapien
catgaatgccagtgcagtgatagct

SEQ ID NO: 1182437 - DNA, 25 bp, Homo sapien
tctttctgatgagagaaggccctgt

SEQ ID NO: 1182438 - DNA, 25 bp, Homo sapien
aaggccctgtgcactcttctatagg

SEQ ID NO: 1182439 - DNA, 25 bp, Homo sapien
gaaaaccggaattgctgtcttggct

SEQ ID NO: 1182440 - DNA, 25 bp, Homo sapien
tgattcaccctgattatccctcagg

SEQ ID NO: 1182441 - DNA, 25 bp, Homo sapien
aattcaatcctcatataaaagccag

SEQ ID NO: 1182442 - DNA, 25 bp, Homo sapien
taaaatggcaattcgccccatactc

SEQ ID NO: 1182443 - DNA, 25 bp, Homo sapien
gcatttgctggactgagaaatttta

SEQ ID NO: 1182444 - DNA, 25 bp, Homo sapien
ctcctcgttcatgattaaagtctcc

SEQ ID NO: 1182445 - DNA, 25 bp, Homo sapien
tcctcgttcatgattaaagtctcct

SEQ ID NO: 1182446 - DNA, 25 bp, Homo sapien
gccattcaagcttgaatctgcagac

SEQ ID NO: 1182447 - DNA, 25 bp, Homo sapien
tcggttgagctttataataatgcac

SEQ ID NO: 1182448 - DNA, 25 bp, Homo sapien
aatgcacggtttgccctctttgtag

SEQ ID NO: 1182449 - DNA, 25 bp, Homo sapien
gctttataataatgcacggtttgcc

SEQ ID NO: 1182450 - DNA, 25 bp, Homo sapien
tgtggcttccagaggaccaaaactg

SEQ ID NO: 1182451 - DNA, 25 bp, Homo sapien
tgtcctaactacaagaattgcaggg

SEQ ID NO: 1182452 - DNA, 25 bp, Homo sapien
agggccacagactcacttcagaatg

SEQ ID NO: 1182453 - DNA, 25 bp, Homo sapien
aaactggactatacatgcaagtggg

SEQ ID NO: 1182454 - DNA, 25 bp, Homo sapien
gattgatctcagtgaagtattcccc

SEQ ID NO: 1182455 - DNA, 25 bp, Homo sapien
cattttggcataatggttctcaccg

SEQ ID NO: 1182456 - DNA, 25 bp, Homo sapien
tctgccagcagtccatcaaactagc

SEQ ID NO: 1182457 - DNA, 25 bp, Homo sapien
tgagaggtacattaatttctgccag

SEQ ID NO: 1182458 - DNA, 25 bp, Homo sapien
gggagactgccatttaaggagcgtt

SEQ ID NO: 1182459 - DNA, 25 bp, Homo sapien
tgtgatgcaaaccagtactaaatgg

SEQ ID NO: 1182460 - DNA, 25 bp, Homo sapien
tgatgaacatacttcgctggaagac

SEQ ID NO: 1182461 - DNA, 25 bp, Homo sapien
gaagacagtcacttgcttactcaga

SEQ ID NO: 1182462 - DNA, 25 bp, Homo sapien
aagtctccaaggactcattcttggg

SEQ ID NO: 1182463 - DNA, 25 bp, Homo sapien
tctccaaggactcattcttgggagg

SEQ ID NO: 1182464 - DNA, 25 bp, Homo sapien
cactgggtaagtctccaaggactca

SEQ ID NO: 1182465 - DNA, 25 bp, Homo sapien
actgggtaagtctccaaggactcat

SEQ ID NO: 1182466 - DNA, 25 bp, Homo sapien
cagtgcactgaacgggaaggacatt

SEQ ID NO: 1182467 - DNA, 25 bp, Homo sapien
tgccagtgcactgaacgggaaggac

SEQ ID NO: 1182468 - DNA, 25 bp, Homo sapien
cttgccagtgcactgaacgggaagg

SEQ ID NO: 1182469 - DNA, 25 bp, Homo sapien
ccagtgcactgaacgggaaggacat

SEQ ID NO: 1182470 - DNA, 25 bp, Homo sapien
ttgaaaggcagaaacaccttgctgt

SEQ ID NO: 1182471 - DNA, 25 bp, Homo sapien
gctagcactgtctgggaactccctt

SEQ ID NO: 1182472 - DNA, 25 bp, Homo sapien
tattctcaatgtgcaaatggatggg

SEQ ID NO: 1182473 - DNA, 25 bp, Homo sapien
cattgcagccttgagaaatggtcat

SEQ ID NO: 1182474 - DNA, 25 bp, Homo sapien
tacactctatgcgaatttcagtgtc

SEQ ID NO: 1182475 - DNA, 25 bp, Homo sapien
cgtacgccttacactctatgcgaat

SEQ ID NO: 1182476 - DNA, 25 bp, Homo sapien
gattggtgaactgtacggccagcag

SEQ ID NO: 1182477 - DNA, 25 bp, Homo sapien
tggtaagattggtgaactgtacggc

SEQ ID NO: 1182478 - DNA, 25 bp, Homo sapien
tttctcactgtacccaatgttctca

SEQ ID NO: 1182479 - DNA, 25 bp, Homo sapien
tccctgaaaacggtctttctcactg

SEQ ID NO: 1182480 - DNA, 25 bp, Homo sapien
tgaaaacggtctttctcactgtacc

SEQ ID NO: 1182481 - DNA, 25 bp, Homo sapien
acggtctttctcactgtacccaatg

SEQ ID NO: 1182482 - DNA, 25 bp, Homo sapien
tttacaccttggacagcaaaccttg

SEQ ID NO: 1182483 - DNA, 25 bp, Homo sapien
ttacagtaaaaatgggcacgtccca

SEQ ID NO: 1182484 - DNA, 25 bp, Homo sapien
agcatatagattaagtgtaggtccc

SEQ ID NO: 1182485 - DNA, 25 bp, Homo sapien
aaatgaccagagtatgcacctgtag

SEQ ID NO: 1182486 - DNA, 25 bp, Homo sapien
tgttaaaaatgctcatcgatgggcc

SEQ ID NO: 1182487 - DNA, 25 bp, Homo sapien
catcgatgggccattacctttgaaa

SEQ ID NO: 1182488 - DNA, 25 bp, Homo sapien
agactatggagtatgttaaaaatgc

SEQ ID NO: 1182489 - DNA, 25 bp, Homo sapien
aaatgctcatcgatgggccattacc

SEQ ID NO: 1182490 - DNA, 25 bp, Homo sapien
caaggcaagagatgtcaagacagca

SEQ ID NO: 1182491 - DNA, 25 bp, Homo sapien
cagacacagctttagaacataccgg

SEQ ID NO: 1182492 - DNA, 25 bp, Homo sapien
gcaaattaattagccctgtcactag

SEQ ID NO: 1182493 - DNA, 25 bp, Homo sapien
tagccaaagtgatgggcagatccag

SEQ ID NO: 1182494 - DNA, 25 bp, Homo sapien
gtctatggggtactgcattgctttt

SEQ ID NO: 1182495 - DNA, 25 bp, Homo sapien
acaacatttaacaccagtctatggg

SEQ ID NO: 1182496 - DNA, 25 bp, Homo sapien
gcactgtagacaacatttaacacca

SEQ ID NO: 1182497 - DNA, 25 bp, Homo sapien
tgtagacaacatttaacaccagtct

SEQ ID NO: 1182498 - DNA, 25 bp, Homo sapien
aactggagcttcatcgattctctgc

SEQ ID NO: 1182499 - DNA, 25 bp, Homo sapien
gacaagagtgaatcacacacgagga

SEQ ID NO: 1182500 - DNA, 25 bp, Homo sapien
tatgtctagtgaagcaatagcagga

SEQ ID NO: 1182501 - DNA, 25 bp, Homo sapien
tctgaagtcctgaccaacctcttgg

SEQ ID NO: 1182502 - DNA, 25 bp, Homo sapien
gggttgaggacatactaactcggta

SEQ ID NO: 1182503 - DNA, 25 bp, Homo sapien
cctagctaggtaacatcttatggca

SEQ ID NO: 1182504 - DNA, 25 bp, Homo sapien
caccccaagggagatagatggcact

SEQ ID NO: 1182505 - DNA, 25 bp, Homo sapien
ttgacaggacttgtgtgaaaaccca

SEQ ID NO: 1182506 - DNA, 25 bp, Homo sapien
actgtagctgatttgtagcagagcc

SEQ ID NO: 1182507 - DNA, 25 bp, Homo sapien
tactagtttcagagtgggaacatgg

SEQ ID NO: 1182508 - DNA, 25 bp, Homo sapien
gcttgcttggcattcataactgaga

SEQ ID NO: 1182509 - DNA, 25 bp, Homo sapien
tgcccactaaatccaatgaggtagg

SEQ ID NO: 1182510 - DNA, 25 bp, Homo sapien
tatcagcattgatggcctcgtagac

SEQ ID NO: 1182511 - DNA, 25 bp, Homo sapien
cagggaatgacgaggacatactcca

SEQ ID NO: 1182512 - DNA, 25 bp, Homo sapien
tgaggacactcagcatatcagcatt

SEQ ID NO: 1182513 - DNA, 25 bp, Homo sapien
gcctcgtagacagcagtcttggccc

SEQ ID NO: 1182514 - DNA, 25 bp, Homo sapien
cctgggtcaccgagggccaccctgg

SEQ ID NO: 1182515 - DNA, 25 bp, Homo sapien
ggtcaccgagggccaccctggattc

SEQ ID NO: 1182516 - DNA, 25 bp, Homo sapien
cctgccctcaaccaagtccagctct

SEQ ID NO: 1182517 - DNA, 25 bp, Homo sapien
tcaccgagggccaccctggattcat

SEQ ID NO: 1182518 - DNA, 25 bp, Homo sapien
acccactctggcagtcagtgggtct

SEQ ID NO: 1182519 - DNA, 25 bp, Homo sapien
cccactctggcagtcagtgggtctg

SEQ ID NO: 1182520 - DNA, 25 bp, Homo sapien
cctgggggggactagcggaggtcat

SEQ ID NO: 1182521 - DNA, 25 bp, Homo sapien
gcctgggggggactagcggaggtca

SEQ ID NO: 1182522 - DNA, 25 bp, Homo sapien
tttaaaaatacggattgctgggctg

SEQ ID NO: 1182523 - DNA, 25 bp, Homo sapien
gatttgacatttcacagacctggaa

SEQ ID NO: 1182524 - DNA, 25 bp, Homo sapien
tttagagtaccacacttggagagcc

SEQ ID NO: 1182525 - DNA, 25 bp, Homo sapien
caagttcccagttagtgctgatgct

SEQ ID NO: 1182526 - DNA, 25 bp, Homo sapien
taattgtagccaagggttgttacac

SEQ ID NO: 1182527 - DNA, 25 bp, Homo sapien
ggatcaatagcctctctagatggat

SEQ ID NO: 1182528 - DNA, 25 bp, Homo sapien
ctctgaatgggggaatctgtggctt

SEQ ID NO: 1182529 - DNA, 25 bp, Homo sapien
cagcagcagcctcttaactttgaaa

SEQ ID NO: 1182530 - DNA, 25 bp, Homo sapien
taaaacagtttactggaactgagta

SEQ ID NO: 1182531 - DNA, 25 bp, Homo sapien
ggtcctactctgtctgacaacccag

SEQ ID NO: 1182532 - DNA, 25 bp, Homo sapien
gagcctggccatcaaacaaaatttg

SEQ ID NO: 1182533 - DNA, 25 bp, Homo sapien
cccactatataagcagagtaaggct

SEQ ID NO: 1182534 - DNA, 25 bp, Homo sapien
tccttacaggaatttacaggagata

SEQ ID NO: 1182535 - DNA, 25 bp, Homo sapien
actgtttcactgtgtgttgttttaa

SEQ ID NO: 1182536 - DNA, 25 bp, Homo sapien
tttaaagagtaaatctccagtgatg

SEQ ID NO: 1182537 - DNA, 25 bp, Homo sapien
gaatttacaggagatactgtttcac

SEQ ID NO: 1182538 - DNA, 25 bp, Homo sapien
gtggttggatctttggatatactct

SEQ ID NO: 1182539 - DNA, 25 bp, Homo sapien
ggaggtctgagactgtccgtagaac

SEQ ID NO: 1182540 - DNA, 25 bp, Homo sapien
cttcattgctggataggaggtctga

SEQ ID NO: 1182541 - DNA, 25 bp, Homo sapien
tgtccgtagaaccaagttacccata

SEQ ID NO: 1182542 - DNA, 25 bp, Homo sapien
gtgaagttggacaatatgattcctc

SEQ ID NO: 1182543 - DNA, 25 bp, Homo sapien
tagccttgtactacagtgtgaagtt

SEQ ID NO: 1182544 - DNA, 25 bp, Homo sapien
tagtcttctgtatatagctagcccg

SEQ ID NO: 1182545 - DNA, 25 bp, Homo sapien
agcccgttatcccagaatcatttat

SEQ ID NO: 1182546 - DNA, 25 bp, Homo sapien
ataggcataggcgacgacttcatgt

SEQ ID NO: 1182547 - DNA, 25 bp, Homo sapien
caggacataggcataggcgacgact

SEQ ID NO: 1182548 - DNA, 25 bp, Homo sapien
taggcataggcgacgacttcatgtc

SEQ ID NO: 1182549 - DNA, 25 bp, Homo sapien
gcataggcgacgacttcatgtctaa

SEQ ID NO: 1182550 - DNA, 25 bp, Homo sapien
ttagtaaaatgaggacactcaggtg

SEQ ID NO: 1182551 - DNA, 25 bp, Homo sapien
cttggtaggcctagtttcatcatta

SEQ ID NO: 1182552 - DNA, 25 bp, Homo sapien
tgaggacactcaggtgatcttcatc

SEQ ID NO: 1182553 - DNA, 25 bp, Homo sapien
ggtaggcctagtttcatcattagta

SEQ ID NO: 1182554 - DNA, 25 bp, Homo sapien
taaacctctaattaatatgctggca

SEQ ID NO: 1182555 - DNA, 25 bp, Homo sapien
agtaaatccaacaaccatttgggtg

SEQ ID NO: 1182556 - DNA, 25 bp, Homo sapien
tgtgtgtatgtctatcagcgttcca

SEQ ID NO: 1182557 - DNA, 25 bp, Homo sapien
aattgcatatgggttagtaaatcca

SEQ ID NO: 1182558 - DNA, 25 bp, Homo sapien
atggtgcctccacatgtgtccctgt

SEQ ID NO: 1182559 - DNA, 25 bp, Homo sapien
tttatgtcatcgaaatgtctggagg

SEQ ID NO: 1182560 - DNA, 25 bp, Homo sapien
gaggtacggtatgtctaaaggaaga

SEQ ID NO: 1182561 - DNA, 25 bp, Homo sapien
tgtggctctttctgtgagagaaact

SEQ ID NO: 1182562 - DNA, 25 bp, Homo sapien
gtgatgatcccatttacatgtgatg

SEQ ID NO: 1182563 - DNA, 25 bp, Homo sapien
gatgatcccatttacatgtgatgtg

SEQ ID NO: 1182564 - DNA, 25 bp, Homo sapien
gatcccatttacatgtgatgtgcat

SEQ ID NO: 1182565 - DNA, 25 bp, Homo sapien
tcagtgtgatgatcccatttacatg

SEQ ID NO: 1182566 - DNA, 25 bp, Homo sapien
gatgctgctatagcatatgattgaa

SEQ ID NO: 1182567 - DNA, 25 bp, Homo sapien
cttgatgctgctatagcatatgatt

SEQ ID NO: 1182568 - DNA, 25 bp, Homo sapien
tgattgaagtatcttactttccaga

SEQ ID NO: 1182569 - DNA, 25 bp, Homo sapien
ctttcttgatgctgctatagcatat

SEQ ID NO: 1182570 - DNA, 25 bp, Homo sapien
ccttcccacgggctgttcctgcagt

SEQ ID NO: 1182571 - DNA, 25 bp, Homo sapien
tcttacagcaccctgaattccacta

SEQ ID NO: 1182572 - DNA, 25 bp, Homo sapien
gtctcctcgctctccgtatttctta

SEQ ID NO: 1182573 - DNA, 25 bp, Homo sapien
gaattccactaatgttactaagtct

SEQ ID NO: 1182574 - DNA, 25 bp, Homo sapien
tattcacttaaacttccgggccagc

SEQ ID NO: 1182575 - DNA, 25 bp, Homo sapien
gaataatggcgtctcgtagccccag

SEQ ID NO: 1182576 - DNA, 25 bp, Homo sapien
tgaacgcagctgagattactcccag

SEQ ID NO: 1182577 - DNA, 25 bp, Homo sapien
cgggtctgtcgattggatgaacgca

SEQ ID NO: 1182578 - DNA, 25 bp, Homo sapien
ccgtaagtgaaaagcggacagattt

SEQ ID NO: 1182579 - DNA, 25 bp, Homo sapien
cacacactgtaaggcctccgtaagt

SEQ ID NO: 1182580 - DNA, 25 bp, Homo sapien
tgcagtgcgtataaactcaagtaac

SEQ ID NO: 1182581 - DNA, 25 bp, Homo sapien
gattactcagggtttcgcttccgga

SEQ ID NO: 1182582 - DNA, 25 bp, Homo sapien
gcttcacttgataggctcttcggat

SEQ ID NO: 1182583 - DNA, 25 bp, Homo sapien
tcacttgataggctcttcggatcgg

SEQ ID NO: 1182584 - DNA, 25 bp, Homo sapien
agattcttattctccgtatttcagg

SEQ ID NO: 1182585 - DNA, 25 bp, Homo sapien
tgataggctcttcggatcggtatca

SEQ ID NO: 1182586 - DNA, 25 bp, Homo sapien
cgataggccgggaagcgacaagcct

SEQ ID NO: 1182587 - DNA, 25 bp, Homo sapien
cacagcgagtgcctgctggcaaatg

SEQ ID NO: 1182588 - DNA, 25 bp, Homo sapien
tggcaaatgccaaatgaagcggagg

SEQ ID NO: 1182589 - DNA, 25 bp, Homo sapien
tgagcaggtatgaaagcgataggcc

SEQ ID NO: 1182590 - DNA, 25 bp, Homo sapien
cccttcgtaagagtaacgatccctg

SEQ ID NO: 1182591 - DNA, 25 bp, Homo sapien
gagtaacgatccctgaaactgccct

SEQ ID NO: 1182592 - DNA, 25 bp, Homo sapien
tcgtaagagtaacgatccctgaaac

SEQ ID NO: 1182593 - DNA, 25 bp, Homo sapien
ctactgctccgaaaagaggtatcca

SEQ ID NO: 1182594 - DNA, 25 bp, Homo sapien
ttttcaccttaaccactgaaaatgc

SEQ ID NO: 1182595 - DNA, 25 bp, Homo sapien
ttaaccactgaaaatgcactccaag

SEQ ID NO: 1182596 - DNA, 25 bp, Homo sapien
ctgaaaatgcactccaagacttctg

SEQ ID NO: 1182597 - DNA, 25 bp, Homo sapien
accactgaaaatgcactccaagact

SEQ ID NO: 1182598 - DNA, 25 bp, Homo sapien
cggagataagggtggtacgtctaca

SEQ ID NO: 1182599 - DNA, 25 bp, Homo sapien
tacgtctacaagacaaggagcacca

SEQ ID NO: 1182600 - DNA, 25 bp, Homo sapien
gagtgtctctaatgccttccgaagg

SEQ ID NO: 1182601 - DNA, 25 bp, Homo sapien
gagatctttgatacaccctagttgc

SEQ ID NO: 1182602 - DNA, 25 bp, Homo sapien
tcaggagaagttcactatgggacat

SEQ ID NO: 1182603 - DNA, 25 bp, Homo sapien
tggccagtaggcagtagtctataag

SEQ ID NO: 1182604 - DNA, 25 bp, Homo sapien
gatacagctacagcagggctgtcca

SEQ ID NO: 1182605 - DNA, 25 bp, Homo sapien
ctttaactgatggttctagcatgca

SEQ ID NO: 1182606 - DNA, 25 bp, Homo sapien
tctatggatagagatccctggtcaa

SEQ ID NO: 1182607 - DNA, 25 bp, Homo sapien
cctggtcaaataagtgtgggcaatg

SEQ ID NO: 1182608 - DNA, 25 bp, Homo sapien
tcttcttaccacaggctctatggat

SEQ ID NO: 1182609 - DNA, 25 bp, Homo sapien
caatggacttaagagtaacatcgag

SEQ ID NO: 1182610 - DNA, 25 bp, Homo sapien
ttcgtaattcgatttttccttgtga

SEQ ID NO: 1182611 - DNA, 25 bp, Homo sapien
tcgtaattcgatttttccttgtgac

SEQ ID NO: 1182612 - DNA, 25 bp, Homo sapien
tctgtctgtacacggagctggtttg

SEQ ID NO: 1182613 - DNA, 25 bp, Homo sapien
ggttctataactccctctgactgac

SEQ ID NO: 1182614 - DNA, 25 bp, Homo sapien
catgagttatagcagctttgggaac

SEQ ID NO: 1182615 - DNA, 25 bp, Homo sapien
tgctttctagattggactccggagg

SEQ ID NO: 1182616 - DNA, 25 bp, Homo sapien
aggtccagacgtaaagagtagtact

SEQ ID NO: 1182617 - DNA, 25 bp, Homo sapien
tccagacgtaaagagtagtactcat

SEQ ID NO: 1182618 - DNA, 25 bp, Homo sapien
gagtagtactcattttatcgattaa

SEQ ID NO: 1182619 - DNA, 25 bp, Homo sapien
tactcattttatcgattaaggctct

SEQ ID NO: 1182620 - DNA, 25 bp, Homo sapien
gacttggtcaatctttggtctggca

SEQ ID NO: 1182621 - DNA, 25 bp, Homo sapien
caagtatcccgtatacacaagcaaa

SEQ ID NO: 1182622 - DNA, 25 bp, Homo sapien
caacttattggtggtcttgtccaaa

SEQ ID NO: 1182623 - DNA, 25 bp, Homo sapien
caaggactgctggtcaattactatg

SEQ ID NO: 1182624 - DNA, 25 bp, Homo sapien
cgggctagacgttcaaagtgatact

SEQ ID NO: 1182625 - DNA, 25 bp, Homo sapien
ttctaactgttcagaaagctgagct

SEQ ID NO: 1182626 - DNA, 25 bp, Homo sapien
attgacatacgttctaactgttcag

SEQ ID NO: 1182627 - DNA, 25 bp, Homo sapien
gcaaggaatttacttcgccatacat

SEQ ID NO: 1182628 - DNA, 25 bp, Homo sapien
gaacaatgagaaaagcgcatttaga

SEQ ID NO: 1182629 - DNA, 25 bp, Homo sapien
actatacagtaaactagaactcagg

SEQ ID NO: 1182630 - DNA, 25 bp, Homo sapien
gactgtgtgactatccagaggagag

SEQ ID NO: 1182631 - DNA, 25 bp, Homo sapien
tatcacttcttcatttagggagact

SEQ ID NO: 1182632 - DNA, 25 bp, Homo sapien
caaaatcaatggttcctcaaataca

SEQ ID NO: 1182633 - DNA, 25 bp, Homo sapien
gagtgaactactactacaaagtgtc

SEQ ID NO: 1182634 - DNA, 25 bp, Homo sapien
caaaagactgttaaagagagtgaac

SEQ ID NO: 1182635 - DNA, 25 bp, Homo sapien
cataatgaactagcacaattaggag

SEQ ID NO: 1182636 - DNA, 25 bp, Homo sapien
catcacggttttgacgctgtaaagc

SEQ ID NO: 1182637 - DNA, 25 bp, Homo sapien
tcatttcttgacgaaactgttcccg

SEQ ID NO: 1182638 - DNA, 25 bp, Homo sapien
gagatcttgtatagccccgtgtgca

SEQ ID NO: 1182639 - DNA, 25 bp, Homo sapien
gacgctgtaaagctgctcttgagtt

SEQ ID NO: 1182640 - DNA, 25 bp, Homo sapien
tggcttctaccgaaaactgtacgac

SEQ ID NO: 1182641 - DNA, 25 bp, Homo sapien
tgtacgactacaactattaccagca

SEQ ID NO: 1182642 - DNA, 25 bp, Homo sapien
gaaaacaagctctaatactgtagga

SEQ ID NO: 1182643 - DNA, 25 bp, Homo sapien
aaaaagatctctttccacaggagag

SEQ ID NO: 1182644 - DNA, 25 bp, Homo sapien
tgttaatgccaacatttcccagaag

SEQ ID NO: 1182645 - DNA, 25 bp, Homo sapien
gtaagtttgctctcttccccattgc

SEQ ID NO: 1182646 - DNA, 25 bp, Homo sapien
ggaaactaagagctcctccaataat

SEQ ID NO: 1182647 - DNA, 25 bp, Homo sapien
tgtacactaggggagtaagtttgct

SEQ ID NO: 1182648 - DNA, 25 bp, Homo sapien
caatagcatgagtggtttagatccc

SEQ ID NO: 1182649 - DNA, 25 bp, Homo sapien
taatagctaaaacataggacctctt

SEQ ID NO: 1182650 - DNA, 25 bp, Homo sapien
tagaaaatattaaagcgcagaagag

SEQ ID NO: 1182651 - DNA, 25 bp, Homo sapien
tccaagataacacactcaatagcat

SEQ ID NO: 1182652 - DNA, 25 bp, Homo sapien
catgagagttgtaacgaaggtgaac

SEQ ID NO: 1182653 - DNA, 25 bp, Homo sapien
aaagttgagatcacagatcacagag

SEQ ID NO: 1182654 - DNA, 25 bp, Homo sapien
agttatggcgacaggcagggaccca

SEQ ID NO: 1182655 - DNA, 25 bp, Homo sapien
tttgacaagccagctgcatggaccc

SEQ ID NO: 1182656 - DNA, 25 bp, Homo sapien
ggtttgcagcatactcggagaggaa

SEQ ID NO: 1182657 - DNA, 25 bp, Homo sapien
gctgccatacagataggcttctaga

SEQ ID NO: 1182658 - DNA, 25 bp, Homo sapien
gattaggaaggaaagtcatctgctg

SEQ ID NO: 1182659 - DNA, 25 bp, Homo sapien
acagctgaactgacacaggactggg

SEQ ID NO: 1182660 - DNA, 25 bp, Homo sapien
gggaagcagtatgcataagcagaca

SEQ ID NO: 1182661 - DNA, 25 bp, Homo sapien
tctagctaagaaatgatggcacctt

SEQ ID NO: 1182662 - DNA, 25 bp, Homo sapien
aatcaagccctgaggatacctaaca

SEQ ID NO: 1182663 - DNA, 25 bp, Homo sapien
ggagcaggagactgacccactaata

SEQ ID NO: 1182664 - DNA, 25 bp, Homo sapien
taaaagcctaagatttcattgatgt

SEQ ID NO: 1182665 - DNA, 25 bp, Homo sapien
tagatggtaaaagcctaagatttca

SEQ ID NO: 1182666 - DNA, 25 bp, Homo sapien
gatttcattgatgtatacctaccta

SEQ ID NO: 1182667 - DNA, 25 bp, Homo sapien
aatatagatggtaaaagcctaagat

SEQ ID NO: 1182668 - DNA, 25 bp, Homo sapien
taaagggcaatcagttctccccggc

SEQ ID NO: 1182669 - DNA, 25 bp, Homo sapien
attatcaggtgaactctctttgcag

SEQ ID NO: 1182670 - DNA, 25 bp, Homo sapien
ccccggcagtgattgcagcaattga

SEQ ID NO: 1182671 - DNA, 25 bp, Homo sapien
tctagtatagggatgaaatcgtcca

SEQ ID NO: 1182672 - DNA, 25 bp, Homo sapien
ttagcatgcctccaacatattgact

SEQ ID NO: 1182673 - DNA, 25 bp, Homo sapien
cttagcatgcctccaacatattgac

SEQ ID NO: 1182674 - DNA, 25 bp, Homo sapien
tagcatgcctccaacatattgactg

SEQ ID NO: 1182675 - DNA, 25 bp, Homo sapien
gtaatctggagtctagtacataaaa

SEQ ID NO: 1182676 - DNA, 25 bp, Homo sapien
ggtaatctggagtctagtacataaa

SEQ ID NO: 1182677 - DNA, 25 bp, Homo sapien
gggtaatctggagtctagtacataa

SEQ ID NO: 1182678 - DNA, 25 bp, Homo sapien
acaatagcacatgaatgggtgtggc

SEQ ID NO: 1182679 - DNA, 25 bp, Homo sapien
atttggtgctaaaagagagttacag

SEQ ID NO: 1182680 - DNA, 25 bp, Homo sapien
tatgtcggattgtatccatttggaa

SEQ ID NO: 1182681 - DNA, 25 bp, Homo sapien
gtgcaaaaccagcttagacaatagc

SEQ ID NO: 1182682 - DNA, 25 bp, Homo sapien
ttaagctagacaaagacctaaacca

SEQ ID NO: 1182683 - DNA, 25 bp, Homo sapien
gaagtagttaagctagacaaagacc

SEQ ID NO: 1182684 - DNA, 25 bp, Homo sapien
ctagacaaagacctaaaccaaagca

SEQ ID NO: 1182685 - DNA, 25 bp, Homo sapien
gtagttaagctagacaaagacctaa

SEQ ID NO: 1182686 - DNA, 25 bp, Homo sapien
gtcacgaagctttccccttatgctt

SEQ ID NO: 1182687 - DNA, 25 bp, Homo sapien
cgaagctttccccttatgctttctt

SEQ ID NO: 1182688 - DNA, 25 bp, Homo sapien
cacgaagctttccccttatgctttc

SEQ ID NO: 1182689 - DNA, 25 bp, Homo sapien
tcacgaagctttccccttatgcttt

SEQ ID NO: 1182690 - DNA, 25 bp, Homo sapien
catacaaagatactcacagcttggg

SEQ ID NO: 1182691 - DNA, 25 bp, Homo sapien
cacggcgtttacaattccatatgag

SEQ ID NO: 1182692 - DNA, 25 bp, Homo sapien
aggagacaagggtaactgccccagc

SEQ ID NO: 1182693 - DNA, 25 bp, Homo sapien
taacgactgtttcactactgactga

SEQ ID NO: 1182694 - DNA, 25 bp, Homo sapien
gagtgactccttaaacaagcctggt

SEQ ID NO: 1182695 - DNA, 25 bp, Homo sapien
caagctaagcaatagggtaggccta

SEQ ID NO: 1182696 - DNA, 25 bp, Homo sapien
tgatgggaccaatcatacccggacc

SEQ ID NO: 1182697 - DNA, 25 bp, Homo sapien
ttcataaggctgaaggagtgactcc

SEQ ID NO: 1182698 - DNA, 25 bp, Homo sapien
gctccgactagaagctaagcgttct

SEQ ID NO: 1182699 - DNA, 25 bp, Homo sapien
ctaacggtcctttcttgtatgagcc

SEQ ID NO: 1182700 - DNA, 25 bp, Homo sapien
gcaccacctatatatgtcagaagcc

SEQ ID NO: 1182701 - DNA, 25 bp, Homo sapien
gagagagaactagacagctccgact

SEQ ID NO: 1182702 - DNA, 25 bp, Homo sapien
gatattaccgaatatccagcccata

SEQ ID NO: 1182703 - DNA, 25 bp, Homo sapien
taaactagtagccaattcaggacca

SEQ ID NO: 1182704 - DNA, 25 bp, Homo sapien
cagaaattgtgactgttaacaccag

SEQ ID NO: 1182705 - DNA, 25 bp, Homo sapien
ggagcggtttcaagttacattttca

SEQ ID NO: 1182706 - DNA, 25 bp, Homo sapien
gactgaaaatccttatggccaccct

SEQ ID NO: 1182707 - DNA, 25 bp, Homo sapien
gccaggaatccacatgaggtgacac

SEQ ID NO: 1182708 - DNA, 25 bp, Homo sapien
ttgagggaccacgaaataagccact

SEQ ID NO: 1182709 - DNA, 25 bp, Homo sapien
cagttttgaaaaatgggcttagcca

SEQ ID NO: 1182710 - DNA, 25 bp, Homo sapien
gattgataccccatcattatataat

SEQ ID NO: 1182711 - DNA, 25 bp, Homo sapien
gctcttctcattggattgatacccc

SEQ ID NO: 1182712 - DNA, 25 bp, Homo sapien
ttcgctcttctcattggattgatac

SEQ ID NO: 1182713 - DNA, 25 bp, Homo sapien
agttcgctcttctcattggattgat

SEQ ID NO: 1182714 - DNA, 25 bp, Homo sapien
gagagccgctggcttatatcgctca

SEQ ID NO: 1182715 - DNA, 25 bp, Homo sapien
cagtctgcacatatctcaccagtga

SEQ ID NO: 1182716 - DNA, 25 bp, Homo sapien
tcagtggcaccaagaaagaagattc

SEQ ID NO: 1182717 - DNA, 25 bp, Homo sapien
tgtcaactcagatcgaagtaaaggg

SEQ ID NO: 1182718 - DNA, 25 bp, Homo sapien
cactgctgtacaaacgagaatgaat

SEQ ID NO: 1182719 - DNA, 25 bp, Homo sapien
atttgtcaactgcaatcccatatgc

SEQ ID NO: 1182720 - DNA, 25 bp, Homo sapien
ataggacgtttggtggactattact

SEQ ID NO: 1182721 - DNA, 25 bp, Homo sapien
tagagtataagaagttaataggacg

SEQ ID NO: 1182722 - DNA, 25 bp, Homo sapien
tcaagattgcaaagtcgacatactc

SEQ ID NO: 1182723 - DNA, 25 bp, Homo sapien
taggaattgcattagtccaaggcct

SEQ ID NO: 1182724 - DNA, 25 bp, Homo sapien
catttggtttaagcaggaatcctag

SEQ ID NO: 1182725 - DNA, 25 bp, Homo sapien
ctccgaaacaagtagaaaagtgctg

SEQ ID NO: 1182726 - DNA, 25 bp, Homo sapien
gccagtggtgcagtcagtgttatga

SEQ ID NO: 1182727 - DNA, 25 bp, Homo sapien
tcatcgctgtggttttcctggccag

SEQ ID NO: 1182728 - DNA, 25 bp, Homo sapien
caagttctcaagtaaccacttcata

SEQ ID NO: 1182729 - DNA, 25 bp, Homo sapien
ggaagatccacaatcaagttctcaa

SEQ ID NO: 1182730 - DNA, 25 bp, Homo sapien
cgctatgccctagtatttggtgtaa

SEQ ID NO: 1182731 - DNA, 25 bp, Homo sapien
aacctcagcatggaacgctatgccc

SEQ ID NO: 1182732 - DNA, 25 bp, Homo sapien
cactgcagacgctgctcactctaat

SEQ ID NO: 1182733 - DNA, 25 bp, Homo sapien
agttttcaaattgctgcaaacctca

SEQ ID NO: 1182734 - DNA, 25 bp, Homo sapien
cctgaggaagcatttaggcaagttt

SEQ ID NO: 1182735 - DNA, 25 bp, Homo sapien
tatgttcctactgttttcagatgtt

SEQ ID NO: 1182736 - DNA, 25 bp, Homo sapien
gtttattcccatgtttgtatgttcc

SEQ ID NO: 1182737 - DNA, 25 bp, Homo sapien
tttgtatgttcctactgttttcaga

SEQ ID NO: 1182738 - DNA, 25 bp, Homo sapien
taacatttgggtgtgctatgcatcc

SEQ ID NO: 1182739 - DNA, 25 bp, Homo sapien
gttgtcttcagaatcatctacatgt

SEQ ID NO: 1182740 - DNA, 25 bp, Homo sapien
ttttggctcatagaagccttaggaa

SEQ ID NO: 1182741 - DNA, 25 bp, Homo sapien
tgttactcatcacgatagcaacgta

SEQ ID NO: 1182742 - DNA, 25 bp, Homo sapien
tacagtgggctctgtcctagggcaa

SEQ ID NO: 1182743 - DNA, 25 bp, Homo sapien
ggtttttacctatgccacagaagag

SEQ ID NO: 1182744 - DNA, 25 bp, Homo sapien
ggactgctggccattcaatttctag

SEQ ID NO: 1182745 - DNA, 25 bp, Homo sapien
gtttatgctgctctatgcccaggga

SEQ ID NO: 1182746 - DNA, 25 bp, Homo sapien
gatgcatatagatcagtattaggag

SEQ ID NO: 1182747 - DNA, 25 bp, Homo sapien
tattaggagagtttgaggctaggcc

SEQ ID NO: 1182748 - DNA, 25 bp, Homo sapien
taaagcttcttaggagatgcagcca

SEQ ID NO: 1182749 - DNA, 25 bp, Homo sapien
gaggctaggccagatggctcacatg

SEQ ID NO: 1182750 - DNA, 25 bp, Homo sapien
agtggagcttgctaactgatttacc

SEQ ID NO: 1182751 - DNA, 25 bp, Homo sapien
gaaggtgaggccattaaacagatca

SEQ ID NO: 1182752 - DNA, 25 bp, Homo sapien
tatagctatgctctgcactggcaag

SEQ ID NO: 1182753 - DNA, 25 bp, Homo sapien
gggattaggttgcttcatcacaaag

SEQ ID NO: 1182754 - DNA, 25 bp, Homo sapien
tttaaaacacgaaagctgctggagg

SEQ ID NO: 1182755 - DNA, 25 bp, Homo sapien
ttaagatggtgacccggctgggctc

SEQ ID NO: 1182756 - DNA, 25 bp, Homo sapien
ttatacaagggcaagcgtcactggg

SEQ ID NO: 1182757 - DNA, 25 bp, Homo sapien
gaacagcgcgtttcttccagcggag

SEQ ID NO: 1182758 - DNA, 25 bp, Homo sapien
accttggcctcccagaatgctggga

SEQ ID NO: 1182759 - DNA, 25 bp, Homo sapien
caccttggcctcccagaatgctggg

SEQ ID NO: 1182760 - DNA, 25 bp, Homo sapien
tggagtgcagtcgcgtcgatctctg

SEQ ID NO: 1182761 - DNA, 25 bp, Homo sapien
tgcagtcgcgtcgatctctgctcac

SEQ ID NO: 1182762 - DNA, 25 bp, Homo sapien
tcccaaagggtatgtggtaccatgc

SEQ ID NO: 1182763 - DNA, 25 bp, Homo sapien
tttactggatggcacagcaagtcat

SEQ ID NO: 1182764 - DNA, 25 bp, Homo sapien
tgatgactacatgcaaaattctggg

SEQ ID NO: 1182765 - DNA, 25 bp, Homo sapien
tgagctgaactagcattttactgga

SEQ ID NO: 1182766 - DNA, 25 bp, Homo sapien
ccaatgcagcctcctgaagatggga

SEQ ID NO: 1182767 - DNA, 25 bp, Homo sapien
taaatgccacatatagtaccaatgc

SEQ ID NO: 1182768 - DNA, 25 bp, Homo sapien
catcctcgaatctgcagagtggctg

SEQ ID NO: 1182769 - DNA, 25 bp, Homo sapien
taatgagggctcaaacatgtccatc

SEQ ID NO: 1182770 - DNA, 25 bp, Homo sapien
tgttagccaggatgcttgtttttaa

SEQ ID NO: 1182771 - DNA, 25 bp, Homo sapien
gttagccaggatgcttgtttttaaa

SEQ ID NO: 1182772 - DNA, 25 bp, Homo sapien
gatacccggacactcctaaatctgg

SEQ ID NO: 1182773 - DNA, 25 bp, Homo sapien
gctaggattgcctaacttttttaga

SEQ ID NO: 1182774 - DNA, 25 bp, Homo sapien
gaagaacagctattctatagacaga

SEQ ID NO: 1182775 - DNA, 25 bp, Homo sapien
taaccataaacatctaagagctagg

SEQ ID NO: 1182776 - DNA, 25 bp, Homo sapien
tagataataagtcctatggcaaaaa

SEQ ID NO: 1182777 - DNA, 25 bp, Homo sapien
gaagtaaataccacagacatatagg

SEQ ID NO: 1182778 - DNA, 25 bp, Homo sapien
aatcaatagcaggagctgaatattt

SEQ ID NO: 1182779 - DNA, 25 bp, Homo sapien
ccctagcttgatgtttgagcaaaga

SEQ ID NO: 1182780 - DNA, 25 bp, Homo sapien
tagactcctgactacaacacaggtc

SEQ ID NO: 1182781 - DNA, 25 bp, Homo sapien
gcctagtagctgaggcccatgccta

SEQ ID NO: 1182782 - DNA, 25 bp, Homo sapien
ggagcccagattagcaagattaaac

SEQ ID NO: 1182783 - DNA, 25 bp, Homo sapien
gagtttaggttactgggagcccaga

SEQ ID NO: 1182784 - DNA, 25 bp, Homo sapien
tagtgggcctcagtaaagatggtac

SEQ ID NO: 1182785 - DNA, 25 bp, Homo sapien
gcagtgaagatgactatgctgaaat

SEQ ID NO: 1182786 - DNA, 25 bp, Homo sapien
cttctgaatctagtcagtcattgct

SEQ ID NO: 1182787 - DNA, 25 bp, Homo sapien
gatggtacagattacattgagatca

SEQ ID NO: 1182788 - DNA, 25 bp, Homo sapien
gaaattggacccagattatggccca

SEQ ID NO: 1182789 - DNA, 25 bp, Homo sapien
tcagctgccatagcgaaatgagatt

SEQ ID NO: 1182790 - DNA, 25 bp, Homo sapien
tagagacctgcaatagggagacaga

SEQ ID NO: 1182791 - DNA, 25 bp, Homo sapien
ctgccgaaggcaagtctagagtgtg

SEQ ID NO: 1182792 - DNA, 25 bp, Homo sapien
ggcagagacagtaagacagctatca

SEQ ID NO: 1182793 - DNA, 25 bp, Homo sapien
tactcagggccggtaatcgtttatg

SEQ ID NO: 1182794 - DNA, 25 bp, Homo sapien
tgaatactgatctgcacatacatgt

SEQ ID NO: 1182795 - DNA, 25 bp, Homo sapien
gaaagacctcctaataaatgagcac

SEQ ID NO: 1182796 - DNA, 25 bp, Homo sapien
gaagaagtgtccgttgtttataagc

SEQ ID NO: 1182797 - DNA, 25 bp, Homo sapien
tgttaacagcaacccaaactaagaa

SEQ ID NO: 1182798 - DNA, 25 bp, Homo sapien
ttataaaagggaccctctcactcac

SEQ ID NO: 1182799 - DNA, 25 bp, Homo sapien
tttataagccactcaatccagggta

SEQ ID NO: 1182800 - DNA, 25 bp, Homo sapien
acatttgtactctggcatttagcac

SEQ ID NO: 1182801 - DNA, 25 bp, Homo sapien
gaggtcaaacctatcacaattaggg

SEQ ID NO: 1182802 - DNA, 25 bp, Homo sapien
tagagttaactaggcagagcccctc

SEQ ID NO: 1182803 - DNA, 25 bp, Homo sapien
taactgacaggcgaatgtgaaattc

SEQ ID NO: 1182804 - DNA, 25 bp, Homo sapien
gcaagtcctgtgcaatgaaatcagc

SEQ ID NO: 1182805 - DNA, 25 bp, Homo sapien
ggccttatgtagagacttccttgag

SEQ ID NO: 1182806 - DNA, 25 bp, Homo sapien
gattcgcccattgcctacattatag

SEQ ID NO: 1182807 - DNA, 25 bp, Homo sapien
tatagccatctgctggtaagccagc

SEQ ID NO: 1182808 - DNA, 25 bp, Homo sapien
cggtgattcttctacatggatattc

SEQ ID NO: 1182809 - DNA, 25 bp, Homo sapien
cattgtgttgttccaaattctttaa

SEQ ID NO: 1182810 - DNA, 25 bp, Homo sapien
ggtgattcttctacatggatattct

SEQ ID NO: 1182811 - DNA, 25 bp, Homo sapien
tctttaacaggctcttgagccccat

SEQ ID NO: 1182812 - DNA, 25 bp, Homo sapien
tgaagaagaaagcacgagatgcact

SEQ ID NO: 1182813 - DNA, 25 bp, Homo sapien
gaggctgacctcacctagacttgtg

SEQ ID NO: 1182814 - DNA, 25 bp, Homo sapien
tctctgaactctggtggctctcacc

SEQ ID NO: 1182815 - DNA, 25 bp, Homo sapien
gaaatagtacaattggctgtctagg

SEQ ID NO: 1182816 - DNA, 25 bp, Homo sapien
tttggatgtgttcggccttctggtg

SEQ ID NO: 1182817 - DNA, 25 bp, Homo sapien
agtgacaggcaatggtctcactgct

SEQ ID NO: 1182818 - DNA, 25 bp, Homo sapien
tgcttggcgatagcctcaccgcttg

SEQ ID NO: 1182819 - DNA, 25 bp, Homo sapien
tgcttggcgataagcaattgtctcg

SEQ ID NO: 1182820 - DNA, 25 bp, Homo sapien
gaggttccccgatctgagttacggc

SEQ ID NO: 1182821 - DNA, 25 bp, Homo sapien
gttccccgatctgagttacggcacc

SEQ ID NO: 1182822 - DNA, 25 bp, Homo sapien
caagggaggttccccgatctgagtt

SEQ ID NO: 1182823 - DNA, 25 bp, Homo sapien
tctgagttacggcaccaaatgtcac

SEQ ID NO: 1182824 - DNA, 25 bp, Homo sapien
agggaagactgtctttccaagtcca

SEQ ID NO: 1182825 - DNA, 25 bp, Homo sapien
ggttcacagatagaacacgtttcct

SEQ ID NO: 1182826 - DNA, 25 bp, Homo sapien
cagatagaacacgtttcctctgtct

SEQ ID NO: 1182827 - DNA, 25 bp, Homo sapien
ttgggttcacagatagaacacgttt

SEQ ID NO: 1182828 - DNA, 25 bp, Homo sapien
tgtagcctcgccgtctgtgaattgg

SEQ ID NO: 1182829 - DNA, 25 bp, Homo sapien
gaaagttcaaaaagtctacgctctc

SEQ ID NO: 1182830 - DNA, 25 bp, Homo sapien
aaagagtcctatttgcactgtagcc

SEQ ID NO: 1182831 - DNA, 25 bp, Homo sapien
gagaagagagaaatagcctgcgctg

SEQ ID NO: 1182832 - DNA, 25 bp, Homo sapien
aatcctagtccaatatgtcaaagtg

SEQ ID NO: 1182833 - DNA, 25 bp, Homo sapien
gagcctctatcagcaccagatttgg

SEQ ID NO: 1182834 - DNA, 25 bp, Homo sapien
gaaatcttaacgatggagctgatgg

SEQ ID NO: 1182835 - DNA, 25 bp, Homo sapien
tgtgaatcatctggaatctggtcaa

SEQ ID NO: 1182836 - DNA, 25 bp, Homo sapien
aagttctggctgaacactggcaaca

SEQ ID NO: 1182837 - DNA, 25 bp, Homo sapien
agagagaacaactactgtgatcagg

SEQ ID NO: 1182838 - DNA, 25 bp, Homo sapien
gctgctctagccttgaggagtgtga

SEQ ID NO: 1182839 - DNA, 25 bp, Homo sapien
gaaattagctgtgtgaaataccagt

SEQ ID NO: 1182840 - DNA, 25 bp, Homo sapien
cagggcctctccacgagaggaaagc

SEQ ID NO: 1182841 - DNA, 25 bp, Homo sapien
cctgatttgcagtgacaacctcggg

SEQ ID NO: 1182842 - DNA, 25 bp, Homo sapien
gaagctatagtctggttgtaatccc

SEQ ID NO: 1182843 - DNA, 25 bp, Homo sapien
aaagctgggtctgtctatggcccct

SEQ ID NO: 1182844 - DNA, 25 bp, Homo sapien
ccggcaatccggtaacagctagcta

SEQ ID NO: 1182845 - DNA, 25 bp, Homo sapien
ccggtaacagctagctacatcttca

SEQ ID NO: 1182846 - DNA, 25 bp, Homo sapien
cgaggcttgaaaaccggcaatccgg

SEQ ID NO: 1182847 - DNA, 25 bp, Homo sapien
tccatgtgaggcgaggcttgaaaac

SEQ ID NO: 1182848 - DNA, 25 bp, Homo sapien
tagcggatgcttcccccatgcgaga

SEQ ID NO: 1182849 - DNA, 25 bp, Homo sapien
gggtgtgcctgagtttgcaccgtct

SEQ ID NO: 1182850 - DNA, 25 bp, Homo sapien
acaccggggtgtgcctgagtttgca

SEQ ID NO: 1182851 - DNA, 25 bp, Homo sapien
attcccatctatgtagcggatgctt

SEQ ID NO: 1182852 - DNA, 25 bp, Homo sapien
ggctttcaaaactaagcactcaggg

SEQ ID NO: 1182853 - DNA, 25 bp, Homo sapien
ggtaaaataagccttcgcagaggta

SEQ ID NO: 1182854 - DNA, 25 bp, Homo sapien
gatagatgcttttgccacgtgtggt

SEQ ID NO: 1182855 - DNA, 25 bp, Homo sapien
cagaggtaagggaacagagtgcctc

SEQ ID NO: 1182856 - DNA, 25 bp, Homo sapien
cttgagaatgggagtttgtcatcta

SEQ ID NO: 1182857 - DNA, 25 bp, Homo sapien
aattggtcaaaaatccttgttcttg

SEQ ID NO: 1182858 - DNA, 25 bp, Homo sapien
agccagacatctgattaaattaaat

SEQ ID NO: 1182859 - DNA, 25 bp, Homo sapien
taggtcaaagccagacatctgatta

SEQ ID NO: 1182860 - DNA, 25 bp, Homo sapien
gaaagttcagaggtctccttgtctt

SEQ ID NO: 1182861 - DNA, 25 bp, Homo sapien
aaatgttggtgtttttgactgagac

SEQ ID NO: 1182862 - DNA, 25 bp, Homo sapien
tcatttagaaagttcagaggtctcc

SEQ ID NO: 1182863 - DNA, 25 bp, Homo sapien
ggatattcccataattgtcaatacc

SEQ ID NO: 1182864 - DNA, 25 bp, Homo sapien
ctgaaatgaagtcgagagcctgctg

SEQ ID NO: 1182865 - DNA, 25 bp, Homo sapien
tgaaatgaagtcgagagcctgctgt

SEQ ID NO: 1182866 - DNA, 25 bp, Homo sapien
gtctgaaatgaagtcgagagcctgc

SEQ ID NO: 1182867 - DNA, 25 bp, Homo sapien
gacacttgacggtaacacttggtag

SEQ ID NO: 1182868 - DNA, 25 bp, Homo sapien
cgctggggccttgagctgccaacag

SEQ ID NO: 1182869 - DNA, 25 bp, Homo sapien
tccctagtgcaagggaacaacgctg

SEQ ID NO: 1182870 - DNA, 25 bp, Homo sapien
cctagtgcaagggaacaacgctggg

SEQ ID NO: 1182871 - DNA, 25 bp, Homo sapien
ttgagcctggaagttcaaacctgca

SEQ ID NO: 1182872 - DNA, 25 bp, Homo sapien
aaacctgcagtgaaccgtggtcatg

SEQ ID NO: 1182873 - DNA, 25 bp, Homo sapien
ccagccagggtgagacagcgagaac

SEQ ID NO: 1182874 - DNA, 25 bp, Homo sapien
tccagccagggtgagacagcgagaa

SEQ ID NO: 1182875 - DNA, 25 bp, Homo sapien
gtagagaaggtaatttccattttca

SEQ ID NO: 1182876 - DNA, 25 bp, Homo sapien
agagaaggtaatttccattttcaat

SEQ ID NO: 1182877 - DNA, 25 bp, Homo sapien
tatgagtagagaaggtaatttccat

SEQ ID NO: 1182878 - DNA, 25 bp, Homo sapien
tgagtagagaaggtaatttccattt

SEQ ID NO: 1182879 - DNA, 25 bp, Homo sapien
tgatggccagtgacacatctgctat

SEQ ID NO: 1182880 - DNA, 25 bp, Homo sapien
tggccagtgacacatctgctatagg

SEQ ID NO: 1182881 - DNA, 25 bp, Homo sapien
ctgctatagggtctgtggggtggat

SEQ ID NO: 1182882 - DNA, 25 bp, Homo sapien
gggtggataagtgtcagcgtttcat

SEQ ID NO: 1182883 - DNA, 25 bp, Homo sapien
gctttttcagaagcgcgatcccagg

SEQ ID NO: 1182884 - DNA, 25 bp, Homo sapien
ccccaggtctggatcactgtaaaca

SEQ ID NO: 1182885 - DNA, 25 bp, Homo sapien
aggcgttgtgaggtgagctttttca

SEQ ID NO: 1182886 - DNA, 25 bp, Homo sapien
cgatcccaggacacgtcgggaagca

SEQ ID NO: 1182887 - DNA, 25 bp, Homo sapien
ctgagacatactttcgtcaaacagg

SEQ ID NO: 1182888 - DNA, 25 bp, Homo sapien
gagcttcaaaccagacccgccaaag

SEQ ID NO: 1182889 - DNA, 25 bp, Homo sapien
caggagagcttcaaaccagacccgc

SEQ ID NO: 1182890 - DNA, 25 bp, Homo sapien
tactttcgtcaaacaggagagcttc

SEQ ID NO: 1182891 - DNA, 25 bp, Homo sapien
agttcccggcggcatagctcctctg

SEQ ID NO: 1182892 - DNA, 25 bp, Homo sapien
gacggcagttcccggcggcatagct

SEQ ID NO: 1182893 - DNA, 25 bp, Homo sapien
ggaaccgcgctagctgggaccgcac

SEQ ID NO: 1182894 - DNA, 25 bp, Homo sapien
cagctacttaattcttccaggggaa

SEQ ID NO: 1182895 - DNA, 25 bp, Homo sapien
ggaagaaaacgccacatccactgct

SEQ ID NO: 1182896 - DNA, 25 bp, Homo sapien
gagccagagctatcgtcataccgca

SEQ ID NO: 1182897 - DNA, 25 bp, Homo sapien
tgctaaaaccttgggtcagaacacg

SEQ ID NO: 1182898 - DNA, 25 bp, Homo sapien
tcataccgcaggtctcagtccttgc

SEQ ID NO: 1182899 - DNA, 25 bp, Homo sapien
gacaaaagctcagagtatctcgctt

SEQ ID NO: 1182900 - DNA, 25 bp, Homo sapien
aagatttcacaccacagaactatgc

SEQ ID NO: 1182901 - DNA, 25 bp, Homo sapien
gaaagcccttattcatattcaccac

SEQ ID NO: 1182902 - DNA, 25 bp, Homo sapien
ctatgccctttaattcttataacgc

SEQ ID NO: 1182903 - DNA, 25 bp, Homo sapien
gattccaggcacatttacaaccaca

SEQ ID NO: 1182904 - DNA, 25 bp, Homo sapien
gctaagcgcctcaaatccaacagtt

SEQ ID NO: 1182905 - DNA, 25 bp, Homo sapien
ggcatgagaccaatcaagaatgtgc

SEQ ID NO: 1182906 - DNA, 25 bp, Homo sapien
aagaatgtgctgcacccggacgaag

SEQ ID NO: 1182907 - DNA, 25 bp, Homo sapien
atcatagtaatagggtattcattac

SEQ ID NO: 1182908 - DNA, 25 bp, Homo sapien
taggataattaaggaagatactagt

SEQ ID NO: 1182909 - DNA, 25 bp, Homo sapien
agggtattcattactcagaacaaac

SEQ ID NO: 1182910 - DNA, 25 bp, Homo sapien
agtatcatagtaatagggtattcat

SEQ ID NO: 1182911 - DNA, 25 bp, Homo sapien
tgctcaatccaactgtcagaatgtt

SEQ ID NO: 1182912 - DNA, 25 bp, Homo sapien
tatgctcaatccaactgtcagaatg

SEQ ID NO: 1182913 - DNA, 25 bp, Homo sapien
gaatatgctcaatccaactgtcaga

SEQ ID NO: 1182914 - DNA, 25 bp, Homo sapien
aatatgctcaatccaactgtcagaa

SEQ ID NO: 1182915 - DNA, 25 bp, Homo sapien
caatgtcaggtggttcatatgaggt

SEQ ID NO: 1182916 - DNA, 25 bp, Homo sapien
tccaatgtcaggtggttcatatgag

SEQ ID NO: 1182917 - DNA, 25 bp, Homo sapien
tgtcaggtggttcatatgaggtaaa

SEQ ID NO: 1182918 - DNA, 25 bp, Homo sapien
tgttccaatgtcaggtggttcatat

SEQ ID NO: 1182919 - DNA, 25 bp, Homo sapien
taataaacaggaataagagaaatca

SEQ ID NO: 1182920 - DNA, 25 bp, Homo sapien
caaatcaagtaataaacaggaataa

SEQ ID NO: 1182921 - DNA, 25 bp, Homo sapien
aatcaagtaataaacaggaataaga

SEQ ID NO: 1182922 - DNA, 25 bp, Homo sapien
aacaaatcaagtaataaacaggaat

SEQ ID NO: 1182923 - DNA, 25 bp, Homo sapien
tctggcttgactggttaattcatac

SEQ ID NO: 1182924 - DNA, 25 bp, Homo sapien
aatattccttagagtggtctggatt

SEQ ID NO: 1182925 - DNA, 25 bp, Homo sapien
attccttagagtggtctggatttcc

SEQ ID NO: 1182926 - DNA, 25 bp, Homo sapien
tccaaattttggcttgacagtcctc

SEQ ID NO: 1182927 - DNA, 25 bp, Homo sapien
tgtgagagctcctaagagctgcacc

SEQ ID NO: 1182928 - DNA, 25 bp, Homo sapien
gtgagagctcctaagagctgcacca

SEQ ID NO: 1182929 - DNA, 25 bp, Homo sapien
tgagagctcctaagagctgcaccat

SEQ ID NO: 1182930 - DNA, 25 bp, Homo sapien
gcacaaatgtgcttttaattatatg

SEQ ID NO: 1182931 - DNA, 25 bp, Homo sapien
gtggcacagatatgctgaacacatc

SEQ ID NO: 1182932 - DNA, 25 bp, Homo sapien
tgtgtggcacagatatgctgaacac

SEQ ID NO: 1182933 - DNA, 25 bp, Homo sapien
cttacaatgcacaaatgtgctttta

SEQ ID NO: 1182934 - DNA, 25 bp, Homo sapien
aggtgtaaacacccagaatacacag

SEQ ID NO: 1182935 - DNA, 25 bp, Homo sapien
ctaggtgtaaacacccagaatacac

SEQ ID NO: 1182936 - DNA, 25 bp, Homo sapien
taggtgtaaacacccagaatacaca

SEQ ID NO: 1182937 - DNA, 25 bp, Homo sapien
tcatctactaaagggtccatgcaaa

SEQ ID NO: 1182938 - DNA, 25 bp, Homo sapien
aagagaataggcctccttgaaaaga

SEQ ID NO: 1182939 - DNA, 25 bp, Homo sapien
taaagggtccatgcaaaccatgtcc

SEQ ID NO: 1182940 - DNA, 25 bp, Homo sapien
agagaataggcctccttgaaaagag

SEQ ID NO: 1182941 - DNA, 25 bp, Homo sapien
tatagtcaccatatactaagcagaa

SEQ ID NO: 1182942 - DNA, 25 bp, Homo sapien
ttatagtcaccatatactaagcaga

SEQ ID NO: 1182943 - DNA, 25 bp, Homo sapien
gtgaatgaagtcactgaagtcacat

SEQ ID NO: 1182944 - DNA, 25 bp, Homo sapien
tatctgagatagggtgaacctgctg

SEQ ID NO: 1182945 - DNA, 25 bp, Homo sapien
agatagggtgaacctgctggatgat

SEQ ID NO: 1182946 - DNA, 25 bp, Homo sapien
ctgagatagggtgaacctgctggat

SEQ ID NO: 1182947 - DNA, 25 bp, Homo sapien
cctgctggatgatgcacatggcttt

SEQ ID NO: 1182948 - DNA, 25 bp, Homo sapien
tataaacttccaagtattggcatga

SEQ ID NO: 1182949 - DNA, 25 bp, Homo sapien
tggtccatactggaaataacagagc

SEQ ID NO: 1182950 - DNA, 25 bp, Homo sapien
taattataaacttccaagtattggc

SEQ ID NO: 1182951 - DNA, 25 bp, Homo sapien
gcatgaaatgcatggtccatactgg

SEQ ID NO: 1182952 - DNA, 25 bp, Homo sapien
gaatgtcttcacacaagctagtaat

SEQ ID NO: 1182953 - DNA, 25 bp, Homo sapien
catctgactgtgtcatctgctcagc

SEQ ID NO: 1182954 - DNA, 25 bp, Homo sapien
tttcaactggctttttattatggac

SEQ ID NO: 1182955 - DNA, 25 bp, Homo sapien
cacaagctagtaattatatctttgt

SEQ ID NO: 1182956 - DNA, 25 bp, Homo sapien
ccagccaatacccagtcctccaaag

SEQ ID NO: 1182957 - DNA, 25 bp, Homo sapien
agccaatacccagtcctccaaagat

SEQ ID NO: 1182958 - DNA, 25 bp, Homo sapien
caatacccagtcctccaaagatcat

SEQ ID NO: 1182959 - DNA, 25 bp, Homo sapien
agccagccaatacccagtcctccaa

SEQ ID NO: 1182960 - DNA, 25 bp, Homo sapien
cactgggtacctatcttgtactccc

SEQ ID NO: 1182961 - DNA, 25 bp, Homo sapien
actgggtacctatcttgtactccca

SEQ ID NO: 1182962 - DNA, 25 bp, Homo sapien
ctgggtacctatcttgtactcccat

SEQ ID NO: 1182963 - DNA, 25 bp, Homo sapien
gacgtcatcatatcaccataagaaa

SEQ ID NO: 1182964 - DNA, 25 bp, Homo sapien
gtcatcatatcaccataagaaacct

SEQ ID NO: 1182965 - DNA, 25 bp, Homo sapien
catatcaccataagaaacctttcct

SEQ ID NO: 1182966 - DNA, 25 bp, Homo sapien
tagacgtcatcatatcaccataaga

SEQ ID NO: 1182967 - DNA, 25 bp, Homo sapien
tcagtcttatcatgatttgccttta

SEQ ID NO: 1182968 - DNA, 25 bp, Homo sapien
gagatggtaatgtgaaaatctggat

SEQ ID NO: 1182969 - DNA, 25 bp, Homo sapien
tggaatcagcttggtttccaacagt

SEQ ID NO: 1182970 - DNA, 25 bp, Homo sapien
tacagataatcagaccaagtataaa

SEQ ID NO: 1182971 - DNA, 25 bp, Homo sapien
cttgtttatgcagtccctgtacagg

SEQ ID NO: 1182972 - DNA, 25 bp, Homo sapien
ctttgagctgtttaacaattgagta

SEQ ID NO: 1182973 - DNA, 25 bp, Homo sapien
tcataccttgtttatgcagtccctg

SEQ ID NO: 1182974 - DNA, 25 bp, Homo sapien
ttgacttataaagccaataaaggcc

SEQ ID NO: 1182975 - DNA, 25 bp, Homo sapien
ttctgaaataatctgtagtcagcat

SEQ ID NO: 1182976 - DNA, 25 bp, Homo sapien
gaaataatctgtagtcagcattatc

SEQ ID NO: 1182977 - DNA, 25 bp, Homo sapien
gttttctgaaataatctgtagtcag

SEQ ID NO: 1182978 - DNA, 25 bp, Homo sapien
ctgaaataatctgtagtcagcatta

SEQ ID NO: 1182979 - DNA, 25 bp, Homo sapien
tagcgtagtgcaaaagggagttggc

SEQ ID NO: 1182980 - DNA, 25 bp, Homo sapien
cgtagtgcaaaagggagttggcaaa

SEQ ID NO: 1182981 - DNA, 25 bp, Homo sapien
cttagcgtagtgcaaaagggagttg

SEQ ID NO: 1182982 - DNA, 25 bp, Homo sapien
tagtgcaaaagggagttggcaaaaa

SEQ ID NO: 1182983 - DNA, 25 bp, Homo sapien
gaagatacagttggtgcaaagtaca

SEQ ID NO: 1182984 - DNA, 25 bp, Homo sapien
cagttggtgcaaagtacagcaagaa

SEQ ID NO: 1182985 - DNA, 25 bp, Homo sapien
gatacagttggtgcaaagtacagca

SEQ ID NO: 1182986 - DNA, 25 bp, Homo sapien
tacagttggtgcaaagtacagcaag

SEQ ID NO: 1182987 - DNA, 25 bp, Homo sapien
gtagcataaaggcttggaggaaact

SEQ ID NO: 1182988 - DNA, 25 bp, Homo sapien
ggtgtgctttagaaatcctggtagc

SEQ ID NO: 1182989 - DNA, 25 bp, Homo sapien
gataagtggatccagtgtcactagg

SEQ ID NO: 1182990 - DNA, 25 bp, Homo sapien
gctatttcctcttggtgtgctttag

SEQ ID NO: 1182991 - DNA, 25 bp, Homo sapien
gggtttgcacttccttaggctgaga

SEQ ID NO: 1182992 - DNA, 25 bp, Homo sapien
ggttgtcgtttctgagacctggctg

SEQ ID NO: 1182993 - DNA, 25 bp, Homo sapien
gagatggcagcttatccatgacaac

SEQ ID NO: 1182994 - DNA, 25 bp, Homo sapien
gtctgtgcaccacagggtttgcact

SEQ ID NO: 1182995 - DNA, 25 bp, Homo sapien
tcaaaactgtagaaaacggctttga

SEQ ID NO: 1182996 - DNA, 25 bp, Homo sapien
caaaactgtagaaaacggctttgag

SEQ ID NO: 1182997 - DNA, 25 bp, Homo sapien
ctcaaaactgtagaaaacggctttg

SEQ ID NO: 1182998 - DNA, 25 bp, Homo sapien
taaatgaacaggtagagagagttca

SEQ ID NO: 1182999 - DNA, 25 bp, Homo sapien
aaatgaacaggtagagagagttcac

SEQ ID NO: 1183000 - DNA, 25 bp, Homo sapien
ctgtaaatgaacaggtagagagagt

SEQ ID NO: 1183001 - DNA, 25 bp, Homo sapien
tgtaaatgaacaggtagagagagtt

SEQ ID NO: 1183002 - DNA, 25 bp, Homo sapien
agtgagggatgaaaggaagtaataa

SEQ ID NO: 1183003 - DNA, 25 bp, Homo sapien
gcaccatgcatccatagctaacaaa

SEQ ID NO: 1183004 - DNA, 25 bp, Homo sapien
atccatagctaacaaagaggtgatc

SEQ ID NO: 1183005 - DNA, 25 bp, Homo sapien
ccatgcatccatagctaacaaagag

SEQ ID NO: 1183006 - DNA, 25 bp, Homo sapien
tgcatccatagctaacaaagaggtg

SEQ ID NO: 1183007 - DNA, 25 bp, Homo sapien
cagatgagccactatggtgacatgg

SEQ ID NO: 1183008 - DNA, 25 bp, Homo sapien
aagagacgcttcaacagtattgata

SEQ ID NO: 1183009 - DNA, 25 bp, Homo sapien
aaaagagacgcttcaacagtattga

SEQ ID NO: 1183010 - DNA, 25 bp, Homo sapien
gaaaaagagacgcttcaacagtatt

SEQ ID NO: 1183011 - DNA, 25 bp, Homo sapien
tgaagaaaaagagacgcttcaacag

SEQ ID NO: 1183012 - DNA, 25 bp, Homo sapien
tcaaaggagtctgaatccaactctg

SEQ ID NO: 1183013 - DNA, 25 bp, Homo sapien
caaaggagtctgaatccaactctga

SEQ ID NO: 1183014 - DNA, 25 bp, Homo sapien
tagtcccaccaccttccacattcat

SEQ ID NO: 1183015 - DNA, 25 bp, Homo sapien
ctttgcttctctagtcccaccacct

SEQ ID NO: 1183016 - DNA, 25 bp, Homo sapien
gcttctctagtcccaccaccttcca

SEQ ID NO: 1183017 - DNA, 25 bp, Homo sapien
ctctagtcccaccaccttccacatt

SEQ ID NO: 1183018 - DNA, 25 bp, Homo sapien
gacaagtcagaggaatggatacaca

SEQ ID NO: 1183019 - DNA, 25 bp, Homo sapien
tcgagaaagctttataatggtacgg

SEQ ID NO: 1183020 - DNA, 25 bp, Homo sapien
taatatctacattccagaccaaggt

SEQ ID NO: 1183021 - DNA, 25 bp, Homo sapien
caaaaacacagcttaagtggagcac

SEQ ID NO: 1183022 - DNA, 25 bp, Homo sapien
gaaggaaatatgttgccacagaggc

SEQ ID NO: 1183023 - DNA, 25 bp, Homo sapien
cctcatggacagtttgttccctaag

SEQ ID NO: 1183024 - DNA, 25 bp, Homo sapien
gattctagttctcccaaagtacgac

SEQ ID NO: 1183025 - DNA, 25 bp, Homo sapien
gttctcccaaagtacgactcctgct

SEQ ID NO: 1183026 - DNA, 25 bp, Homo sapien
cagagattctagttctcccaaagta

SEQ ID NO: 1183027 - DNA, 25 bp, Homo sapien
caaagtacgactcctgctcagccat

SEQ ID NO: 1183028 - DNA, 25 bp, Homo sapien
cagaattacatactgcaagcaaagc

SEQ ID NO: 1183029 - DNA, 25 bp, Homo sapien
cttcaccagcagaattacatactgc

SEQ ID NO: 1183030 - DNA, 25 bp, Homo sapien
cttcgataattgcagtttgttttcc

SEQ ID NO: 1183031 - DNA, 25 bp, Homo sapien
ttacatactgcaagcaaagcagaca

SEQ ID NO: 1183032 - DNA, 25 bp, Homo sapien
tttaaaaaagcccaaagctgactca

SEQ ID NO: 1183033 - DNA, 25 bp, Homo sapien
ttaaaaaagcccaaagctgactcac

SEQ ID NO: 1183034 - DNA, 25 bp, Homo sapien
ctgttgaacataaggttgatctgct

SEQ ID NO: 1183035 - DNA, 25 bp, Homo sapien
tgttgaacataaggttgatctgcta

SEQ ID NO: 1183036 - DNA, 25 bp, Homo sapien
gttgaacataaggttgatctgctac

SEQ ID NO: 1183037 - DNA, 25 bp, Homo sapien
ctgaagtatcagtttaggatctaga

SEQ ID NO: 1183038 - DNA, 25 bp, Homo sapien
gaagtatcagtttaggatctagagt

SEQ ID NO: 1183039 - DNA, 25 bp, Homo sapien
atcccaacagtggaagtaaaaggct

SEQ ID NO: 1183040 - DNA, 25 bp, Homo sapien
ccaacagtggaagtaaaaggctgaa

SEQ ID NO: 1183041 - DNA, 25 bp, Homo sapien
caaacgaacatagtcaggaagctct

SEQ ID NO: 1183042 - DNA, 25 bp, Homo sapien
tcaggaagctctaatttaagtagcg

SEQ ID NO: 1183043 - DNA, 25 bp, Homo sapien
tacaaaatccaacattgccaaacga

SEQ ID NO: 1183044 - DNA, 25 bp, Homo sapien
gtagcgaggtctgcaaagttactgc

SEQ ID NO: 1183045 - DNA, 25 bp, Homo sapien
ggcaaacatacaggacaggttgggc

SEQ ID NO: 1183046 - DNA, 25 bp, Homo sapien
caactcctgtcagctagcagtaagg

SEQ ID NO: 1183047 - DNA, 25 bp, Homo sapien
caaggtatgttgttctagcagccaa

SEQ ID NO: 1183048 - DNA, 25 bp, Homo sapien
cagcgaactgagtaaacgcctccaa

SEQ ID NO: 1183049 - DNA, 25 bp, Homo sapien
gagacactgtggaactatctcttca

SEQ ID NO: 1183050 - DNA, 25 bp, Homo sapien
actgtggaactatctcttcatgatt

SEQ ID NO: 1183051 - DNA, 25 bp, Homo sapien
acactgtggaactatctcttcatga

SEQ ID NO: 1183052 - DNA, 25 bp, Homo sapien
gacactgtggaactatctcttcatg

SEQ ID NO: 1183053 - DNA, 25 bp, Homo sapien
caattgcttagtaaaagtcgtcagc

SEQ ID NO: 1183054 - DNA, 25 bp, Homo sapien
ggcctcaattgcttagtaaaagtcg

SEQ ID NO: 1183055 - DNA, 25 bp, Homo sapien
ttctgtggcctcaattgcttagtaa

SEQ ID NO: 1183056 - DNA, 25 bp, Homo sapien
tagtaaaagtcgtcagcactgtgct

SEQ ID NO: 1183057 - DNA, 25 bp, Homo sapien
acacgttccactttggcagcttcag

SEQ ID NO: 1183058 - DNA, 25 bp, Homo sapien
gcttcagtttcatctacaaacccag

SEQ ID NO: 1183059 - DNA, 25 bp, Homo sapien
tcacacgttccactttggcagcttc

SEQ ID NO: 1183060 - DNA, 25 bp, Homo sapien
acgttccactttggcagcttcagtt

SEQ ID NO: 1183061 - DNA, 25 bp, Homo sapien
ctgtaaagatgacctctttgcttct

SEQ ID NO: 1183062 - DNA, 25 bp, Homo sapien
tacagtcacattagcaaagggttcc

SEQ ID NO: 1183063 - DNA, 25 bp, Homo sapien
cattagcaaagggttcccagaaaat

SEQ ID NO: 1183064 - DNA, 25 bp, Homo sapien
tcttctacagtcacattagcaaagg

SEQ ID NO: 1183065 - DNA, 25 bp, Homo sapien
taaagtttggcccctattgaaatca

SEQ ID NO: 1183066 - DNA, 25 bp, Homo sapien
ggcccctattgaaatcagcccatac

SEQ ID NO: 1183067 - DNA, 25 bp, Homo sapien
aaagtttggcccctattgaaatcag

SEQ ID NO: 1183068 - DNA, 25 bp, Homo sapien
caattcagagtgctactaccagtgt

SEQ ID NO: 1183069 - DNA, 25 bp, Homo sapien
taccagtgtcttagtttgtatgtgg

SEQ ID NO: 1183070 - DNA, 25 bp, Homo sapien
tggtttatcatagcaattcagagtg

SEQ ID NO: 1183071 - DNA, 25 bp, Homo sapien
catagcaattcagagtgctactacc

SEQ ID NO: 1183072 - DNA, 25 bp, Homo sapien
tattctagtcattggatcacaaggg

SEQ ID NO: 1183073 - DNA, 25 bp, Homo sapien
ttttggactggagtaaagcttacat

SEQ ID NO: 1183074 - DNA, 25 bp, Homo sapien
taaagcttacatgcaaattttattc

SEQ ID NO: 1183075 - DNA, 25 bp, Homo sapien
taagtaatatcacaatatccattct

SEQ ID NO: 1183076 - DNA, 25 bp, Homo sapien
gaactcctgacgagctctttttgca

SEQ ID NO: 1183077 - DNA, 25 bp, Homo sapien
tatgcagcgctgacctgtactcttc

SEQ ID NO: 1183078 - DNA, 25 bp, Homo sapien
tcaccctagagtatgtatgtaacgt

SEQ ID NO: 1183079 - DNA, 25 bp, Homo sapien
caggacccttttggagtagtgactc

SEQ ID NO: 1183080 - DNA, 25 bp, Homo sapien
tcctgactgttccacatgtagtaca

SEQ ID NO: 1183081 - DNA, 25 bp, Homo sapien
taaatggttctttgtggacctaggc

SEQ ID NO: 1183082 - DNA, 25 bp, Homo sapien
tcagttgacaaagcatcaaacccag

SEQ ID NO: 1183083 - DNA, 25 bp, Homo sapien
aagaatattccccacaatcctgttc

SEQ ID NO: 1183084 - DNA, 25 bp, Homo sapien
gccaactgaagtaggagactgactg

SEQ ID NO: 1183085 - DNA, 25 bp, Homo sapien
cctttgtgcatttgactgaggccag

SEQ ID NO: 1183086 - DNA, 25 bp, Homo sapien
gactgtgagtgctggctaaaagccc

SEQ ID NO: 1183087 - DNA, 25 bp, Homo sapien
caagtagctgaggagaggtcgaatt

SEQ ID NO: 1183088 - DNA, 25 bp, Homo sapien
ttaaaataaggatttggtgtcatcc

SEQ ID NO: 1183089 - DNA, 25 bp, Homo sapien
gctattttccagtgccatggttttg

SEQ ID NO: 1183090 - DNA, 25 bp, Homo sapien
gataataactggtgacaatagatgt

SEQ ID NO: 1183091 - DNA, 25 bp, Homo sapien
agtacgaggtagtgtttctggcatc

SEQ ID NO: 1183092 - DNA, 25 bp, Homo sapien
tccccagtgatgcagttttcctcaa

SEQ ID NO: 1183093 - DNA, 25 bp, Homo sapien
ccaaaaaaggatgatgtctccccag

SEQ ID NO: 1183094 - DNA, 25 bp, Homo sapien
cccagtgatgcagttttcctcaaaa

SEQ ID NO: 1183095 - DNA, 25 bp, Homo sapien
aaaaggatgatgtctccccagtgat

SEQ ID NO: 1183096 - DNA, 25 bp, Homo sapien
tcgccaatcttggagaaccccttct

SEQ ID NO: 1183097 - DNA, 25 bp, Homo sapien
tcttttctggcagcacgcccatcaa

SEQ ID NO: 1183098 - DNA, 25 bp, Homo sapien
gcaagaagcacatacagcgagatta

SEQ ID NO: 1183099 - DNA, 25 bp, Homo sapien
gattctcctatgtgtgtcgtctgca

SEQ ID NO: 1183100 - DNA, 25 bp, Homo sapien
tgactgactgtctataccatgatgg

SEQ ID NO: 1183101 - DNA, 25 bp, Homo sapien
gaccttccagcggaataagctgtgg

SEQ ID NO: 1183102 - DNA, 25 bp, Homo sapien
caagtaacaacatatcagggacctg

SEQ ID NO: 1183103 - DNA, 25 bp, Homo sapien
gttatcagaggacatgacagctccc

SEQ ID NO: 1183104 - DNA, 25 bp, Homo sapien
gctcgggctacaggcacttgtccct

SEQ ID NO: 1183105 - DNA, 25 bp, Homo sapien
cgggctacaggcacttgtccctgcc

SEQ ID NO: 1183106 - DNA, 25 bp, Homo sapien
tcgggctacaggcacttgtccctgc

SEQ ID NO: 1183107 - DNA, 25 bp, Homo sapien
agctcgggctacaggcacttgtccc

SEQ ID NO: 1183108 - DNA, 25 bp, Homo sapien
catccgttgccatgtaagtacccca

SEQ ID NO: 1183109 - DNA, 25 bp, Homo sapien
gcccgacaagggttgacacatccaa

SEQ ID NO: 1183110 - DNA, 25 bp, Homo sapien
ccacatgatttctctagcaaggcag

SEQ ID NO: 1183111 - DNA, 25 bp, Homo sapien
ttcaaggagctcataagtgggacat

SEQ ID NO: 1183112 - DNA, 25 bp, Homo sapien
agccctgttccagtcacgggtgatc

SEQ ID NO: 1183113 - DNA, 25 bp, Homo sapien
cgggtgatccccgtgcttctccagt

SEQ ID NO: 1183114 - DNA, 25 bp, Homo sapien
tccagtcacgggtgatccccgtgct

SEQ ID NO: 1183115 - DNA, 25 bp, Homo sapien
tgcttctccagttgtttgaagttca

SEQ ID NO: 1183116 - DNA, 25 bp, Homo sapien
taaggtaaggcatgcatcttcaaag

SEQ ID NO: 1183117 - DNA, 25 bp, Homo sapien
tcatgaatcatttaggcctgtgcct

SEQ ID NO: 1183118 - DNA, 25 bp, Homo sapien
gaagcatcttcctagagagtccaat

SEQ ID NO: 1183119 - DNA, 25 bp, Homo sapien
tagcactagagatggtaacaacaga

SEQ ID NO: 1183120 - DNA, 25 bp, Homo sapien
tgggggcaccgacctcacatttcct

SEQ ID NO: 1183121 - DNA, 25 bp, Homo sapien
tggctagagcggctgagatgcaggg

SEQ ID NO: 1183122 - DNA, 25 bp, Homo sapien
cccctttctgccatggctagagcgg

SEQ ID NO: 1183123 - DNA, 25 bp, Homo sapien
ttctgccatggctagagcggctgag

SEQ ID NO: 1183124 - DNA, 25 bp, Homo sapien
aactgaatgcaattagggaccccac

SEQ ID NO: 1183125 - DNA, 25 bp, Homo sapien
acttgatgcagtatggaagtgcctc

SEQ ID NO: 1183126 - DNA, 25 bp, Homo sapien
cattgagtcccatcagctagaggaa

SEQ ID NO: 1183127 - DNA, 25 bp, Homo sapien
ggcctctagtcctgcaaaataagtg

SEQ ID NO: 1183128 - DNA, 25 bp, Homo sapien
caaaactgaatgctgaaaagctact

SEQ ID NO: 1183129 - DNA, 25 bp, Homo sapien
gaaaagctactagactggaaaacaa

SEQ ID NO: 1183130 - DNA, 25 bp, Homo sapien
caaaccacatcttgatgctaagtaa

SEQ ID NO: 1183131 - DNA, 25 bp, Homo sapien
ttcccatgagccacaaaactgaatg

SEQ ID NO: 1183132 - DNA, 25 bp, Homo sapien
caggaagtagccagagggtttattt

SEQ ID NO: 1183133 - DNA, 25 bp, Homo sapien
tgaattttccttgcaggaagtagcc

SEQ ID NO: 1183134 - DNA, 25 bp, Homo sapien
gaattttccttgcaggaagtagcca

SEQ ID NO: 1183135 - DNA, 25 bp, Homo sapien
agtgaattttccttgcaggaagtag

SEQ ID NO: 1183136 - DNA, 25 bp, Homo sapien
tagcaatcaaattaaagacatactc

SEQ ID NO: 1183137 - DNA, 25 bp, Homo sapien
tcaaattaaagacatactctttcat

SEQ ID NO: 1183138 - DNA, 25 bp, Homo sapien
gcaatcaaattaaagacatactctt

SEQ ID NO: 1183139 - DNA, 25 bp, Homo sapien
catagcaatcaaattaaagacatac

SEQ ID NO: 1183140 - DNA, 25 bp, Homo sapien
tccgattccatttagagtcagaact

SEQ ID NO: 1183141 - DNA, 25 bp, Homo sapien
ctttgcagtttcaaagggtgttcct

SEQ ID NO: 1183142 - DNA, 25 bp, Homo sapien
ttttccgattccatttagagtcaga

SEQ ID NO: 1183143 - DNA, 25 bp, Homo sapien
tgttccttttccgattccatttaga

SEQ ID NO: 1183144 - DNA, 25 bp, Homo sapien
agagtaaatcgctctattttccttg

SEQ ID NO: 1183145 - DNA, 25 bp, Homo sapien
agaagagtaaatcgctctattttcc

SEQ ID NO: 1183146 - DNA, 25 bp, Homo sapien
aagagtaaatcgctctattttcctt

SEQ ID NO: 1183147 - DNA, 25 bp, Homo sapien
gagaagagtaaatcgctctattttc

SEQ ID NO: 1183148 - DNA, 25 bp, Homo sapien
tctttcgtctgcttgatagcccatc

SEQ ID NO: 1183149 - DNA, 25 bp, Homo sapien
atgactgttccccactttaagagtg

SEQ ID NO: 1183150 - DNA, 25 bp, Homo sapien
gtctgcttgatagcccatcatctcc

SEQ ID NO: 1183151 - DNA, 25 bp, Homo sapien
catcatctccatgactgttccccac

SEQ ID NO: 1183152 - DNA, 25 bp, Homo sapien
cttgggatttatcttctcgaggagt

SEQ ID NO: 1183153 - DNA, 25 bp, Homo sapien
ctgccgccatgcaaggggaggacgc

SEQ ID NO: 1183154 - DNA, 25 bp, Homo sapien
ccgctgccgccatgcaaggggagga

SEQ ID NO: 1183155 - DNA, 25 bp, Homo sapien
gccatgcaaggggaggacgccagat

SEQ ID NO: 1183156 - DNA, 25 bp, Homo sapien
catgcaaggggaggacgccagatac

SEQ ID NO: 1183157 - DNA, 25 bp, Homo sapien
cagagcaagcgcatgcgtcgtgacg

SEQ ID NO: 1183158 - DNA, 25 bp, Homo sapien
gagctggaggcttcaccgtggtaac

SEQ ID NO: 1183159 - DNA, 25 bp, Homo sapien
tgagcctgcgcatacaagaggtgca

SEQ ID NO: 1183160 - DNA, 25 bp, Homo sapien
gtgacggcccggcttaggcgactct

SEQ ID NO: 1183161 - DNA, 25 bp, Homo sapien
agaagatgcttgtcaacagacagag

SEQ ID NO: 1183162 - DNA, 25 bp, Homo sapien
gccaagtttgcgttgtagaaagaaa

SEQ ID NO: 1183163 - DNA, 25 bp, Homo sapien
ttctgaaacaggagtgtaatagcca

SEQ ID NO: 1183164 - DNA, 25 bp, Homo sapien
ctgtaggtaacaggaatccattaag

SEQ ID NO: 1183165 - DNA, 25 bp, Homo sapien
gagacaggcctattccctggctgtg

SEQ ID NO: 1183166 - DNA, 25 bp, Homo sapien
ggcacagcgacatgcctgagacagg

SEQ ID NO: 1183167 - DNA, 25 bp, Homo sapien
acagcagcaacagcataggaggcac

SEQ ID NO: 1183168 - DNA, 25 bp, Homo sapien
cagcataggaggcacagcgacatgc

SEQ ID NO: 1183169 - DNA, 25 bp, Homo sapien
ctggcttcccatgctctagggcctt

SEQ ID NO: 1183170 - DNA, 25 bp, Homo sapien
actgccgtatcctccatctgcacat

SEQ ID NO: 1183171 - DNA, 25 bp, Homo sapien
gcttcccatgctctagggccttggg

SEQ ID NO: 1183172 - DNA, 25 bp, Homo sapien
acccgaaagaagtacactgccgtat

SEQ ID NO: 1183173 - DNA, 25 bp, Homo sapien
ttatcatgtatccaacacttagaca

SEQ ID NO: 1183174 - DNA, 25 bp, Homo sapien
aagacatgctatgtctacagagttc

SEQ ID NO: 1183175 - DNA, 25 bp, Homo sapien
gttcatcgtcggtcttctgccagcg

SEQ ID NO: 1183176 - DNA, 25 bp, Homo sapien
gaaagaagtcattgcgaatggcttt

SEQ ID NO: 1183177 - DNA, 25 bp, Homo sapien
tctgccagcgggatctaaaggcaaa

SEQ ID NO: 1183178 - DNA, 25 bp, Homo sapien
gaacatttggcttctgccattagag

SEQ ID NO: 1183179 - DNA, 25 bp, Homo sapien
ctgaacatttggcttctgccattag

SEQ ID NO: 1183180 - DNA, 25 bp, Homo sapien
aacatttggcttctgccattagagg

SEQ ID NO: 1183181 - DNA, 25 bp, Homo sapien
tgaacatttggcttctgccattaga

SEQ ID NO: 1183182 - DNA, 25 bp, Homo sapien
tgggattattggcaagccatagccc

SEQ ID NO: 1183183 - DNA, 25 bp, Homo sapien
ctgcccagggttggatgctactctg

SEQ ID NO: 1183184 - DNA, 25 bp, Homo sapien
ttggcaagccatagcccagggctct

SEQ ID NO: 1183185 - DNA, 25 bp, Homo sapien
tggatgctactctgggattattggc

SEQ ID NO: 1183186 - DNA, 25 bp, Homo sapien
tggcttgttaaagcgtacaatttca

SEQ ID NO: 1183187 - DNA, 25 bp, Homo sapien
aaagtttagctctggcatagaactg

SEQ ID NO: 1183188 - DNA, 25 bp, Homo sapien
caccattgatgacttggcttgttaa

SEQ ID NO: 1183189 - DNA, 25 bp, Homo sapien
tagaactgcatctcaccattgatga

SEQ ID NO: 1183190 - DNA, 25 bp, Homo sapien
gatgtctgggctggacagttcaatg

SEQ ID NO: 1183191 - DNA, 25 bp, Homo sapien
gctggacagttcaatgaaatttccc

SEQ ID NO: 1183192 - DNA, 25 bp, Homo sapien
aatttcctaagaaatttctgagagg

SEQ ID NO: 1183193 - DNA, 25 bp, Homo sapien
gacagttcaatgaaatttcccatca

SEQ ID NO: 1183194 - DNA, 25 bp, Homo sapien
tgctctcattagtgtagtaagtggt

SEQ ID NO: 1183195 - DNA, 25 bp, Homo sapien
aaagcctctattggtcatgctgctc

SEQ ID NO: 1183196 - DNA, 25 bp, Homo sapien
aaaagcctctattggtcatgctgct

SEQ ID NO: 1183197 - DNA, 25 bp, Homo sapien
tgtagtaagtggtttcagaagtaga

SEQ ID NO: 1183198 - DNA, 25 bp, Homo sapien
tttgctgacccttcctatcccggag

SEQ ID NO: 1183199 - DNA, 25 bp, Homo sapien
cttcaaggagaaaggattccatcat

SEQ ID NO: 1183200 - DNA, 25 bp, Homo sapien
cctgcaggtagttctgggcttcaag

SEQ ID NO: 1183201 - DNA, 25 bp, Homo sapien
ctgttgaaaacaggcaataagacgt

SEQ ID NO: 1183202 - DNA, 25 bp, Homo sapien
catcatatctcctgaaggggggtgt

SEQ ID NO: 1183203 - DNA, 25 bp, Homo sapien
aaggggggtgtgaattcctgcaggc

SEQ ID NO: 1183204 - DNA, 25 bp, Homo sapien
ctgtagcagtggtagctttctactt

SEQ ID NO: 1183205 - DNA, 25 bp, Homo sapien
cagtggtagctttctactttgtcac

SEQ ID NO: 1183206 - DNA, 25 bp, Homo sapien
gaggatgtccatgtcccgagtcaca

SEQ ID NO: 1183207 - DNA, 25 bp, Homo sapien
tctcggcaccgggaaagaaatgcaa

SEQ ID NO: 1183208 - DNA, 25 bp, Homo sapien
ccttattaggctccggaggatgtcc

SEQ ID NO: 1183209 - DNA, 25 bp, Homo sapien
agagatcaaggatacagccctcccg

SEQ ID NO: 1183210 - DNA, 25 bp, Homo sapien
ccacacggggatgcactgctctggg

SEQ ID NO: 1183211 - DNA, 25 bp, Homo sapien
cggggatgcactgctctgggaagcc

SEQ ID NO: 1183212 - DNA, 25 bp, Homo sapien
acacggggatgcactgctctgggaa

SEQ ID NO: 1183213 - DNA, 25 bp, Homo sapien
gggatgcactgctctgggaagccat

SEQ ID NO: 1183214 - DNA, 25 bp, Homo sapien
gagtgtctgtcgctgtgcagtgcga

SEQ ID NO: 1183215 - DNA, 25 bp, Homo sapien
gtctgtcgctgtgcagtgcgaacat

SEQ ID NO: 1183216 - DNA, 25 bp, Homo sapien
tcaggagtgtctgtcgctgtgcagt

SEQ ID NO: 1183217 - DNA, 25 bp, Homo sapien
tgtctgtcgctgtgcagtgcgaaca

SEQ ID NO: 1183218 - DNA, 25 bp, Homo sapien
tatcagcaaagcttttgagttcctg

SEQ ID NO: 1183219 - DNA, 25 bp, Homo sapien
tatatcagcaaagcttttgagttcc

SEQ ID NO: 1183220 - DNA, 25 bp, Homo sapien
aagcttttgagttcctgaagtgtac

SEQ ID NO: 1183221 - DNA, 25 bp, Homo sapien
gcaaagcttttgagttcctgaagtg

SEQ ID NO: 1183222 - DNA, 25 bp, Homo sapien
gattcttgccgcttgcattgtactg

SEQ ID NO: 1183223 - DNA, 25 bp, Homo sapien
gatgcttgcctgatcccagtgtgca

SEQ ID NO: 1183224 - DNA, 25 bp, Homo sapien
taattcccgtttgatgccttcagaa

SEQ ID NO: 1183225 - DNA, 25 bp, Homo sapien
ttgcaaaccgtagttctcatggaac

SEQ ID NO: 1183226 - DNA, 25 bp, Homo sapien
aactgtggacttcagattgctcata

SEQ ID NO: 1183227 - DNA, 25 bp, Homo sapien
gacttcagattgctcatatcctcgg

SEQ ID NO: 1183228 - DNA, 25 bp, Homo sapien
tgctcatatcctcggattgtctcct

SEQ ID NO: 1183229 - DNA, 25 bp, Homo sapien
cagattgctcatatcctcggattgt

SEQ ID NO: 1183230 - DNA, 25 bp, Homo sapien
gaccagggcctatgttcagggtgct

SEQ ID NO: 1183231 - DNA, 25 bp, Homo sapien
caagccccagaccagggcctatgtt

SEQ ID NO: 1183232 - DNA, 25 bp, Homo sapien
ccagaccagggcctatgttcagggt

SEQ ID NO: 1183233 - DNA, 25 bp, Homo sapien
cagggcctatgttcagggtgctcat

SEQ ID NO: 1183234 - DNA, 25 bp, Homo sapien
gcattcttgaagcagctgtcaacta

SEQ ID NO: 1183235 - DNA, 25 bp, Homo sapien
ccctgtcaggagatagccagcaact

SEQ ID NO: 1183236 - DNA, 25 bp, Homo sapien
gaatgtgaggtttctttcagggacc

SEQ ID NO: 1183237 - DNA, 25 bp, Homo sapien
caactagcctatgtttcgttttccg

SEQ ID NO: 1183238 - DNA, 25 bp, Homo sapien
tgagagtagttgctgtggccataca

SEQ ID NO: 1183239 - DNA, 25 bp, Homo sapien
gagtagttgctgtggccatacaagt

SEQ ID NO: 1183240 - DNA, 25 bp, Homo sapien
aaaaccttcatgagagtagttgctg

SEQ ID NO: 1183241 - DNA, 25 bp, Homo sapien
ccttcatgagagtagttgctgtggc

SEQ ID NO: 1183242 - DNA, 25 bp, Homo sapien
cactctgacagcctgtgacctcagg

SEQ ID NO: 1183243 - DNA, 25 bp, Homo sapien
cagtttgtggaagattcactctgac

SEQ ID NO: 1183244 - DNA, 25 bp, Homo sapien
ttcagagcctgatggatcacatggg

SEQ ID NO: 1183245 - DNA, 25 bp, Homo sapien
tgacctcagggtagagaagtggttc

SEQ ID NO: 1183246 - DNA, 25 bp, Homo sapien
ctgccttgatttgctcccatggttt

SEQ ID NO: 1183247 - DNA, 25 bp, Homo sapien
gccttgatttgctcccatggttttc

SEQ ID NO: 1183248 - DNA, 25 bp, Homo sapien
ttcctgccttgatttgctcccatgg

SEQ ID NO: 1183249 - DNA, 25 bp, Homo sapien
ttccacctatcttttggatttctcc

SEQ ID NO: 1183250 - DNA, 25 bp, Homo sapien
ccttcttggcctagtaagttccagg

SEQ ID NO: 1183251 - DNA, 25 bp, Homo sapien
tggcctagtaagttccaggtatagt

SEQ ID NO: 1183252 - DNA, 25 bp, Homo sapien
ttcttggcctagtaagttccaggta

SEQ ID NO: 1183253 - DNA, 25 bp, Homo sapien
tgccttcttggcctagtaagttcca

SEQ ID NO: 1183254 - DNA, 25 bp, Homo sapien
ggtgatcaacgcagagtgaatgtct

SEQ ID NO: 1183255 - DNA, 25 bp, Homo sapien
ccataggtgatcaacgcagagtgaa

SEQ ID NO: 1183256 - DNA, 25 bp, Homo sapien
tgaaatttgatcactccataggtga

SEQ ID NO: 1183257 - DNA, 25 bp, Homo sapien
gatcaacgcagagtgaatgtcttca

SEQ ID NO: 1183258 - DNA, 25 bp, Homo sapien
ggactatatctacaagacagtgctg

SEQ ID NO: 1183259 - DNA, 25 bp, Homo sapien
aaacagcctttgaattcagagtgcc

SEQ ID NO: 1183260 - DNA, 25 bp, Homo sapien
gacagtgctgaagcagtcagttcat

SEQ ID NO: 1183261 - DNA, 25 bp, Homo sapien
taatacatgtcttaacgtgctaaca

SEQ ID NO: 1183262 - DNA, 25 bp, Homo sapien
tgtgttccacccactagacccaagc

SEQ ID NO: 1183263 - DNA, 25 bp, Homo sapien
ctttatttccgccatttccaatgta

SEQ ID NO: 1183264 - DNA, 25 bp, Homo sapien
catttccaatgtaagaggaaacatc

SEQ ID NO: 1183265 - DNA, 25 bp, Homo sapien
gcgaactttatttccgccatttcca

SEQ ID NO: 1183266 - DNA, 25 bp, Homo sapien
tccgccatttccaatgtaagaggaa

SEQ ID NO: 1183267 - DNA, 25 bp, Homo sapien
tattaaagcttcactgtcaatgatg

SEQ ID NO: 1183268 - DNA, 25 bp, Homo sapien
ctattaaagcttcactgtcaatgat

SEQ ID NO: 1183269 - DNA, 25 bp, Homo sapien
cctattaaagcttcactgtcaatga

SEQ ID NO: 1183270 - DNA, 25 bp, Homo sapien
tcctattaaagcttcactgtcaatg

SEQ ID NO: 1183271 - DNA, 25 bp, Homo sapien
agatgtaataagtatcttctctctg

SEQ ID NO: 1183272 - DNA, 25 bp, Homo sapien
aagatgtaataagtatcttctctct

SEQ ID NO: 1183273 - DNA, 25 bp, Homo sapien
taaagatgtaataagtatcttctct

SEQ ID NO: 1183274 - DNA, 25 bp, Homo sapien
aaagatgtaataagtatcttctctc

SEQ ID NO: 1183275 - DNA, 25 bp, Homo sapien
cttttaaagagaggacatgaatatt

SEQ ID NO: 1183276 - DNA, 25 bp, Homo sapien
ttttaaagagaggacatgaatattt

SEQ ID NO: 1183277 - DNA, 25 bp, Homo sapien
tttgaggatggccaaagactcactc

SEQ ID NO: 1183278 - DNA, 25 bp, Homo sapien
ctgaaacagagcaataacgtggagt

SEQ ID NO: 1183279 - DNA, 25 bp, Homo sapien
ttggcacacttgagaccctgggagg

SEQ ID NO: 1183280 - DNA, 25 bp, Homo sapien
ggcttttatcaagcagacactgtgg

SEQ ID NO: 1183281 - DNA, 25 bp, Homo sapien
cttggtcattaccgaccttagcgtt

SEQ ID NO: 1183282 - DNA, 25 bp, Homo sapien
cgaccttagcgttttctctggcaat

SEQ ID NO: 1183283 - DNA, 25 bp, Homo sapien
tcattaccgaccttagcgttttctc

SEQ ID NO: 1183284 - DNA, 25 bp, Homo sapien
accgaccttagcgttttctctggca

SEQ ID NO: 1183285 - DNA, 25 bp, Homo sapien
aaaaataagcaatgcctccactctg

SEQ ID NO: 1183286 - DNA, 25 bp, Homo sapien
cgtgcagggagcgatatttccttac

SEQ ID NO: 1183287 - DNA, 25 bp, Homo sapien
ggagcctttctgagtatgcaatata

SEQ ID NO: 1183288 - DNA, 25 bp, Homo sapien
atataaatggtataccgtgcaggga

SEQ ID NO: 1183289 - DNA, 25 bp, Homo sapien
cagctctgagtcaggggtgtttcat

SEQ ID NO: 1183290 - DNA, 25 bp, Homo sapien
ctgagtcaggggtgtttcatcaata

SEQ ID NO: 1183291 - DNA, 25 bp, Homo sapien
ggtcagtgaccttttcatctcctaa

SEQ ID NO: 1183292 - DNA, 25 bp, Homo sapien
aggtcagggtcagtgaccttttcat

SEQ ID NO: 1183293 - DNA, 25 bp, Homo sapien
tcggcctattccgtgaaaatctggg

SEQ ID NO: 1183294 - DNA, 25 bp, Homo sapien
tcatcaacacaagaagcccccaaat

SEQ ID NO: 1183295 - DNA, 25 bp, Homo sapien
ggtcattcacaggtagtctctccaa

SEQ ID NO: 1183296 - DNA, 25 bp, Homo sapien
aaatctggggtcctgaaactctgag

SEQ ID NO: 1183297 - DNA, 25 bp, Homo sapien
cagtcggcgtcagaatgttatgtcg

SEQ ID NO: 1183298 - DNA, 25 bp, Homo sapien
gactgttggagtgtttgatattttc

SEQ ID NO: 1183299 - DNA, 25 bp, Homo sapien
ttccactctgcgtgtcaagggcatt

SEQ ID NO: 1183300 - DNA, 25 bp, Homo sapien
caagggcatttacagtcggcgtcag

SEQ ID NO: 1183301 - DNA, 25 bp, Homo sapien
cagcttggtgcacctgcttgtaatg

SEQ ID NO: 1183302 - DNA, 25 bp, Homo sapien
tcccagcttggtgcacctgcttgta

SEQ ID NO: 1183303 - DNA, 25 bp, Homo sapien
gcttggtgcacctgcttgtaatgaa

SEQ ID NO: 1183304 - DNA, 25 bp, Homo sapien
cccagcttggtgcacctgcttgtaa

SEQ ID NO: 1183305 - DNA, 25 bp, Homo sapien
tgacatgtttattagcaatggataa

SEQ ID NO: 1183306 - DNA, 25 bp, Homo sapien
ccagatgcaaacctctagagtctgc

SEQ ID NO: 1183307 - DNA, 25 bp, Homo sapien
gtttattagcaatggataaactgaa

SEQ ID NO: 1183308 - DNA, 25 bp, Homo sapien
aacctctagagtctgcaaaataaaa

SEQ ID NO: 1183309 - DNA, 25 bp, Homo sapien
cattccaattgcaatgtcttgatga

SEQ ID NO: 1183310 - DNA, 25 bp, Homo sapien
cactcattccaattgcaatgtcttg

SEQ ID NO: 1183311 - DNA, 25 bp, Homo sapien
actcattccaattgcaatgtcttga

SEQ ID NO: 1183312 - DNA, 25 bp, Homo sapien
ccaattgcaatgtcttgatgaattt

SEQ ID NO: 1183313 - DNA, 25 bp, Homo sapien
tggaagttagaactgcaaacaactt

SEQ ID NO: 1183314 - DNA, 25 bp, Homo sapien
ggaagttagaactgcaaacaacttg

SEQ ID NO: 1183315 - DNA, 25 bp, Homo sapien
gaagttagaactgcaaacaacttga

SEQ ID NO: 1183316 - DNA, 25 bp, Homo sapien
gaatagcagctagacagaactgttc

SEQ ID NO: 1183317 - DNA, 25 bp, Homo sapien
aatatttgattgtaaagctctaagg

SEQ ID NO: 1183318 - DNA, 25 bp, Homo sapien
tgctctgggactctctttatgaacc

SEQ ID NO: 1183319 - DNA, 25 bp, Homo sapien
ccaatcgggtcactgaattgtgaac

SEQ ID NO: 1183320 - DNA, 25 bp, Homo sapien
ttttgtctgtagcaggcacctcctg

SEQ ID NO: 1183321 - DNA, 25 bp, Homo sapien
tgtactgacgcacaaccaggaaacc

SEQ ID NO: 1183322 - DNA, 25 bp, Homo sapien
ctgagtcaactctctgaacagatgc

SEQ ID NO: 1183323 - DNA, 25 bp, Homo sapien
ttctgctcctggctggaaccctgag

SEQ ID NO: 1183324 - DNA, 25 bp, Homo sapien
gaacagatgctgtcacccaaggaac

SEQ ID NO: 1183325 - DNA, 25 bp, Homo sapien
caccagatgtgttacaaacaaacat

SEQ ID NO: 1183326 - DNA, 25 bp, Homo sapien
aacaaacattaattctcctccggca

SEQ ID NO: 1183327 - DNA, 25 bp, Homo sapien
aagctgccgacaccagatgtgttac

SEQ ID NO: 1183328 - DNA, 25 bp, Homo sapien
catctggatcgtatgtacaataagg

SEQ ID NO: 1183329 - DNA, 25 bp, Homo sapien
tgatgttcttggacctagactgtcc

SEQ ID NO: 1183330 - DNA, 25 bp, Homo sapien
tccaaaagaagttaccgccttctca

SEQ ID NO: 1183331 - DNA, 25 bp, Homo sapien
gttaccgccttctcagtaaggatgg

SEQ ID NO: 1183332 - DNA, 25 bp, Homo sapien
gggccttggtgatagccagacttca

SEQ ID NO: 1183333 - DNA, 25 bp, Homo sapien
gtcacaagatatggggatgatgacc

SEQ ID NO: 1183334 - DNA, 25 bp, Homo sapien
gaacaacctagagagagcattgctg

SEQ ID NO: 1183335 - DNA, 25 bp, Homo sapien
tgagaacaacctagagagagcattg

SEQ ID NO: 1183336 - DNA, 25 bp, Homo sapien
tgggtgagaacaacctagagagagc

SEQ ID NO: 1183337 - DNA, 25 bp, Homo sapien
tgccaatgaattcagcatctcaaca

SEQ ID NO: 1183338 - DNA, 25 bp, Homo sapien
tgtctagtcatgagctgttcacggg

SEQ ID NO: 1183339 - DNA, 25 bp, Homo sapien
cttctgagtttgatgtagggacctg

SEQ ID NO: 1183340 - DNA, 25 bp, Homo sapien
caacagttaagtacacctcatgcag

SEQ ID NO: 1183341 - DNA, 25 bp, Homo sapien
tcagtgcactttcatgcgtgccaaa

SEQ ID NO: 1183342 - DNA, 25 bp, Homo sapien
tgccaaagtttgctggcatggctca

SEQ ID NO: 1183343 - DNA, 25 bp, Homo sapien
gagaacatctgggcgactgctgctg

SEQ ID NO: 1183344 - DNA, 25 bp, Homo sapien
tcatgcgtgccaaagtttgctggca

SEQ ID NO: 1183345 - DNA, 25 bp, Homo sapien
tcgcggcactatagattcaggttta

SEQ ID NO: 1183346 - DNA, 25 bp, Homo sapien
tgaagtagaacaccaaatcgcggca

SEQ ID NO: 1183347 - DNA, 25 bp, Homo sapien
gctatagtgaaagcttaaactggct

SEQ ID NO: 1183348 - DNA, 25 bp, Homo sapien
taaggctgacctggcagtacacaac

SEQ ID NO: 1183349 - DNA, 25 bp, Homo sapien
tcagagaatcctgcccaaccttgcg

SEQ ID NO: 1183350 - DNA, 25 bp, Homo sapien
ctttagtctgctttagtctcctcag

SEQ ID NO: 1183351 - DNA, 25 bp, Homo sapien
aaccttgcgccatcggcccgggcca

SEQ ID NO: 1183352 - DNA, 25 bp, Homo sapien
tgctttagtctcctcagttcctcct

SEQ ID NO: 1183353 - DNA, 25 bp, Homo sapien
attaaaccactgtaaacccatcttg

SEQ ID NO: 1183354 - DNA, 25 bp, Homo sapien
taacacaaacgtagccgcttccacg

SEQ ID NO: 1183355 - DNA, 25 bp, Homo sapien
taaaccactgtaaacccatcttgta

SEQ ID NO: 1183356 - DNA, 25 bp, Homo sapien
ttacagcgccttccgctaacacaaa

SEQ ID NO: 1183357 - DNA, 25 bp, Homo sapien
ggaaaatgcgcctctgctaacacac

SEQ ID NO: 1183358 - DNA, 25 bp, Homo sapien
tcatgagtctactggagtcagacca

SEQ ID NO: 1183359 - DNA, 25 bp, Homo sapien
cataactttgtggtttgtctcctca

SEQ ID NO: 1183360 - DNA, 25 bp, Homo sapien
tccaatccccggcagagtgaggttc

SEQ ID NO: 1183361 - DNA, 25 bp, Homo sapien
gatttgtaattctctgctccttggt

SEQ ID NO: 1183362 - DNA, 25 bp, Homo sapien
acattaaacgttgataattctagtg

SEQ ID NO: 1183363 - DNA, 25 bp, Homo sapien
taacattaaacgttgataattctag

SEQ ID NO: 1183364 - DNA, 25 bp, Homo sapien
attaacattaaacgttgataattct

SEQ ID NO: 1183365 - DNA, 25 bp, Homo sapien
aacattaaacgttgataattctagt

SEQ ID NO: 1183366 - DNA, 25 bp, Homo sapien
cgcggggagacgtcgctgtggttca

SEQ ID NO: 1183367 - DNA, 25 bp, Homo sapien
gggagacgtcgctgtggttcaaatg

SEQ ID NO: 1183368 - DNA, 25 bp, Homo sapien
agacgtcgctgtggttcaaatggat

SEQ ID NO: 1183369 - DNA, 25 bp, Homo sapien
cttcgcggggagacgtcgctgtggt

SEQ ID NO: 1183370 - DNA, 25 bp, Homo sapien
ttctcgctgaagttgttgtcgactt

SEQ ID NO: 1183371 - DNA, 25 bp, Homo sapien
gctgctctggaagtaatgaggttga

SEQ ID NO: 1183372 - DNA, 25 bp, Homo sapien
tttggctttgctctacaagggcttt

SEQ ID NO: 1183373 - DNA, 25 bp, Homo sapien
aatgaggttgatccatcttgaagcc

SEQ ID NO: 1183374 - DNA, 25 bp, Homo sapien
tagaatctcaacattgttgtgacca

SEQ ID NO: 1183375 - DNA, 25 bp, Homo sapien
ttggctgactttcaatgccctgtgg

SEQ ID NO: 1183376 - DNA, 25 bp, Homo sapien
cctgtggttgtccatcaccaacggg

SEQ ID NO: 1183377 - DNA, 25 bp, Homo sapien
gaccatcatgggaattctcaagtcc

SEQ ID NO: 1183378 - DNA, 25 bp, Homo sapien
gaaaagtctcatggacttttcacat

SEQ ID NO: 1183379 - DNA, 25 bp, Homo sapien
agtctcatggacttttcacatagac

SEQ ID NO: 1183380 - DNA, 25 bp, Homo sapien
aacgggttaaatgaaaagtctcatg

SEQ ID NO: 1183381 - DNA, 25 bp, Homo sapien
ctcatggacttttcacatagactta

SEQ ID NO: 1183382 - DNA, 25 bp, Homo sapien
gcagaggcactatgcatataagaac

SEQ ID NO: 1183383 - DNA, 25 bp, Homo sapien
aaaggggtcaatttgggcagaggca

SEQ ID NO: 1183384 - DNA, 25 bp, Homo sapien
aggcactatgcatataagaactgct

SEQ ID NO: 1183385 - DNA, 25 bp, Homo sapien
gaggcactatgcatataagaactgc

SEQ ID NO: 1183386 - DNA, 25 bp, Homo sapien
caatttctgggccaatggaaatagt

SEQ ID NO: 1183387 - DNA, 25 bp, Homo sapien
tccacaagttccaatttctgggcca

SEQ ID NO: 1183388 - DNA, 25 bp, Homo sapien
caagttccaatttctgggccaatgg

SEQ ID NO: 1183389 - DNA, 25 bp, Homo sapien
ctctccacaagttccaatttctggg

SEQ ID NO: 1183390 - DNA, 25 bp, Homo sapien
agttatatcattagtcccctaaatt

SEQ ID NO: 1183391 - DNA, 25 bp, Homo sapien
tcttccacaagaacagtgtagctaa

SEQ ID NO: 1183392 - DNA, 25 bp, Homo sapien
aaatggcatcttccacaagaacagt

SEQ ID NO: 1183393 - DNA, 25 bp, Homo sapien
tctaatgatgaactgagttatatca

SEQ ID NO: 1183394 - DNA, 25 bp, Homo sapien
gtcgctatattacccagtcaggtct

SEQ ID NO: 1183395 - DNA, 25 bp, Homo sapien
acagggtgtcgctatattacccagt

SEQ ID NO: 1183396 - DNA, 25 bp, Homo sapien
gtgtcgctatattacccagtcaggt

SEQ ID NO: 1183397 - DNA, 25 bp, Homo sapien
gggtgtcgctatattacccagtcag

SEQ ID NO: 1183398 - DNA, 25 bp, Homo sapien
tctcttccattagccgttgttcttg

SEQ ID NO: 1183399 - DNA, 25 bp, Homo sapien
cattagccgttgttcttgttggagg

SEQ ID NO: 1183400 - DNA, 25 bp, Homo sapien
ttcttgttggaggacttcccaacga

SEQ ID NO: 1183401 - DNA, 25 bp, Homo sapien
tgttggaggacttcccaacgagatt

SEQ ID NO: 1183402 - DNA, 25 bp, Homo sapien
gaaaatcaggtatgtgagtgggaaa

SEQ ID NO: 1183403 - DNA, 25 bp, Homo sapien
aaaatcaggtatgtgagtgggaaaa

SEQ ID NO: 1183404 - DNA, 25 bp, Homo sapien
ctagaaaatcaggtatgtgagtggg

SEQ ID NO: 1183405 - DNA, 25 bp, Homo sapien
tagaaaatcaggtatgtgagtggga

SEQ ID NO: 1183406 - DNA, 25 bp, Homo sapien
gatcaatccggttcctgagaattcc

SEQ ID NO: 1183407 - DNA, 25 bp, Homo sapien
gcgtatgaatagtctaagctggcct

SEQ ID NO: 1183408 - DNA, 25 bp, Homo sapien
tgagaattccaatgtcagctgacac

SEQ ID NO: 1183409 - DNA, 25 bp, Homo sapien
catctaaagcctgcaactccttctg

SEQ ID NO: 1183410 - DNA, 25 bp, Homo sapien
tgtggtttaccctggcctaatgagg

SEQ ID NO: 1183411 - DNA, 25 bp, Homo sapien
gctctaatggcacacgaacaaggtt

SEQ ID NO: 1183412 - DNA, 25 bp, Homo sapien
cataaaagcccctggaacagctggc

SEQ ID NO: 1183413 - DNA, 25 bp, Homo sapien
gcaatgttgaaagggctgaaaaccc

SEQ ID NO: 1183414 - DNA, 25 bp, Homo sapien
gcacacagctggttaaatttatgag

SEQ ID NO: 1183415 - DNA, 25 bp, Homo sapien
gcaaaatgatactgggtgagggcaa

SEQ ID NO: 1183416 - DNA, 25 bp, Homo sapien
gccaccaacgtgatattactgaatg

SEQ ID NO: 1183417 - DNA, 25 bp, Homo sapien
gaaccagggtaagctagcttcagca

SEQ ID NO: 1183418 - DNA, 25 bp, Homo sapien
actctcctccgcaggctgaaatggc

SEQ ID NO: 1183419 - DNA, 25 bp, Homo sapien
tcttgttcgtgtagcaatctctcga

SEQ ID NO: 1183420 - DNA, 25 bp, Homo sapien
tacaaaggtgttcagtgagttgctc

SEQ ID NO: 1183421 - DNA, 25 bp, Homo sapien
tggcctctctaaacgaaccactggt

SEQ ID NO: 1183422 - DNA, 25 bp, Homo sapien
tccacactggtcatctacctttggg

SEQ ID NO: 1183423 - DNA, 25 bp, Homo sapien
tcatctacctttggggaaacagctt

SEQ ID NO: 1183424 - DNA, 25 bp, Homo sapien
ggaatttccacactggtcatctacc

SEQ ID NO: 1183425 - DNA, 25 bp, Homo sapien
atttgggcagtttggactaagaaag

SEQ ID NO: 1183426 - DNA, 25 bp, Homo sapien
tcatgtggccaaagcagctgaaatg

SEQ ID NO: 1183427 - DNA, 25 bp, Homo sapien
tgtggccaaagcagctgaaatgtca

SEQ ID NO: 1183428 - DNA, 25 bp, Homo sapien
gccaaagcagctgaaatgtcattac

SEQ ID NO: 1183429 - DNA, 25 bp, Homo sapien
tggccaaagcagctgaaatgtcatt

SEQ ID NO: 1183430 - DNA, 25 bp, Homo sapien
gcatgatctactgcaaaaagtatac

SEQ ID NO: 1183431 - DNA, 25 bp, Homo sapien
tatactttactcaataccatattag

SEQ ID NO: 1183432 - DNA, 25 bp, Homo sapien
aggtttttattggaggtcagggcat

SEQ ID NO: 1183433 - DNA, 25 bp, Homo sapien
ctcaataccatattagctcaaaaga

SEQ ID NO: 1183434 - DNA, 25 bp, Homo sapien
cagtcttaatacgtctcccaggaga

SEQ ID NO: 1183435 - DNA, 25 bp, Homo sapien
caatttaaacgcttcatgacagggt

SEQ ID NO: 1183436 - DNA, 25 bp, Homo sapien
tcactggaaggcaaattgaagacaa

SEQ ID NO: 1183437 - DNA, 25 bp, Homo sapien
tattggtcaagtactagtaacaggc

SEQ ID NO: 1183438 - DNA, 25 bp, Homo sapien
gaagtgtgttagacaatgaaactgt

SEQ ID NO: 1183439 - DNA, 25 bp, Homo sapien
tatggatacaatcttatacttgtgc

SEQ ID NO: 1183440 - DNA, 25 bp, Homo sapien
caggatgtccctaagtttttcagaa

SEQ ID NO: 1183441 - DNA, 25 bp, Homo sapien
tattaccagaagataataccctcaa

SEQ ID NO: 1183442 - DNA, 25 bp, Homo sapien
taaagttgctgagtaaatttgttga

SEQ ID NO: 1183443 - DNA, 25 bp, Homo sapien
ttattctggtggggtaaagttgctg

SEQ ID NO: 1183444 - DNA, 25 bp, Homo sapien
tattaaagtcacactaacattgaaa

SEQ ID NO: 1183445 - DNA, 25 bp, Homo sapien
taacattgaaaaaagaaggtcctga

SEQ ID NO: 1183446 - DNA, 25 bp, Homo sapien
gggatttcagactcctctgaggctg

SEQ ID NO: 1183447 - DNA, 25 bp, Homo sapien
aacatgacatgcaacctgaggcaac

SEQ ID NO: 1183448 - DNA, 25 bp, Homo sapien
gaggcttggcatagtctctgagaga

SEQ ID NO: 1183449 - DNA, 25 bp, Homo sapien
tgagccagaatggtcacgagaggcc

SEQ ID NO: 1183450 - DNA, 25 bp, Homo sapien
ctcaacggagcattagaaatccata

SEQ ID NO: 1183451 - DNA, 25 bp, Homo sapien
ttagaaatccataatggtacaggac

SEQ ID NO: 1183452 - DNA, 25 bp, Homo sapien
aaatccataatggtacaggacacat

SEQ ID NO: 1183453 - DNA, 25 bp, Homo sapien
agaaatccataatggtacaggacac

SEQ ID NO: 1183454 - DNA, 25 bp, Homo sapien
tctgtaactcacacattgcccaagg

SEQ ID NO: 1183455 - DNA, 25 bp, Homo sapien
catagagctgtgtagtctttcaccc

SEQ ID NO: 1183456 - DNA, 25 bp, Homo sapien
tgcccaaggcaaggatttaaagtga

SEQ ID NO: 1183457 - DNA, 25 bp, Homo sapien
taaagtgagagtcaagtgtgcagtc

SEQ ID NO: 1183458 - DNA, 25 bp, Homo sapien
ccagagggaccattgggtggcaaca

SEQ ID NO: 1183459 - DNA, 25 bp, Homo sapien
caacctcagtggctgcaataaagaa

SEQ ID NO: 1183460 - DNA, 25 bp, Homo sapien
ttcctcagagcagtgcagctcctct

SEQ ID NO: 1183461 - DNA, 25 bp, Homo sapien
ccagcagcaggaagtagtccaacct

SEQ ID NO: 1183462 - DNA, 25 bp, Homo sapien
aatggtcaaggcttgttcctcattc

SEQ ID NO: 1183463 - DNA, 25 bp, Homo sapien
tggtcaaggcttgttcctcattctt

SEQ ID NO: 1183464 - DNA, 25 bp, Homo sapien
aaatggtcaaggcttgttcctcatt

SEQ ID NO: 1183465 - DNA, 25 bp, Homo sapien
tcaaatggtcaaggcttgttcctca

SEQ ID NO: 1183466 - DNA, 25 bp, Homo sapien
gcatttcaaaagtcctcagtggagc

SEQ ID NO: 1183467 - DNA, 25 bp, Homo sapien
ggtagccaaaccaagtcattccagt

SEQ ID NO: 1183468 - DNA, 25 bp, Homo sapien
gacatttttccttacaggtagccaa

SEQ ID NO: 1183469 - DNA, 25 bp, Homo sapien
ttgaaaatcatcgaggcacaggcct

SEQ ID NO: 1183470 - DNA, 25 bp, Homo sapien
tagtctaagtccttgaacgagatgg

SEQ ID NO: 1183471 - DNA, 25 bp, Homo sapien
catgctgctgttggaaggctcggta

SEQ ID NO: 1183472 - DNA, 25 bp, Homo sapien
tagctctgcgaagagcccctttaaa

SEQ ID NO: 1183473 - DNA, 25 bp, Homo sapien
gaaaggtatagaatgtagctctgcg

SEQ ID NO: 1183474 - DNA, 25 bp, Homo sapien
ttagccttagctttctataatcttt

SEQ ID NO: 1183475 - DNA, 25 bp, Homo sapien
aattagccttagctttctataatct

SEQ ID NO: 1183476 - DNA, 25 bp, Homo sapien
attagccttagctttctataatctt

SEQ ID NO: 1183477 - DNA, 25 bp, Homo sapien
aaattagccttagctttctataatc

SEQ ID NO: 1183478 - DNA, 25 bp, Homo sapien
catatttggatgtggaggttgaagt

SEQ ID NO: 1183479 - DNA, 25 bp, Homo sapien
gctgaccaatgccagagtcacagga

SEQ ID NO: 1183480 - DNA, 25 bp, Homo sapien
gaagtattgctgaccaatgccagag

SEQ ID NO: 1183481 - DNA, 25 bp, Homo sapien
tgtggaggttgaagtattgctgacc

SEQ ID NO: 1183482 - DNA, 25 bp, Homo sapien
ctgtgtttccatagggtagcggcat

SEQ ID NO: 1183483 - DNA, 25 bp, Homo sapien
tctgctgtgtttccatagggtagcg

SEQ ID NO: 1183484 - DNA, 25 bp, Homo sapien
tgctgtgtttccatagggtagcggc

SEQ ID NO: 1183485 - DNA, 25 bp, Homo sapien
tgaagggtaaggagcgtgtgttgtt

SEQ ID NO: 1183486 - DNA, 25 bp, Homo sapien
tttctcaatcctccccgtgattggt

SEQ ID NO: 1183487 - DNA, 25 bp, Homo sapien
ttagctacagactgcagattggtgc

SEQ ID NO: 1183488 - DNA, 25 bp, Homo sapien
tcagttgaacctggtgtgtctggag

SEQ ID NO: 1183489 - DNA, 25 bp, Homo sapien
tagctacagaacactggtgcgtttt

SEQ ID NO: 1183490 - DNA, 25 bp, Homo sapien
gtctagtgcctaccaattctgaggg

SEQ ID NO: 1183491 - DNA, 25 bp, Homo sapien
aacagttgtgtctcactggtcccag

SEQ ID NO: 1183492 - DNA, 25 bp, Homo sapien
tggcatcgtagtacagcaggtcttc

SEQ ID NO: 1183493 - DNA, 25 bp, Homo sapien
tgaatgaccctgagatggaatggcg

SEQ ID NO: 1183494 - DNA, 25 bp, Homo sapien
ctttcctctttcctgatttgttctt

SEQ ID NO: 1183495 - DNA, 25 bp, Homo sapien
tcctctttcctgatttgttcttttg

SEQ ID NO: 1183496 - DNA, 25 bp, Homo sapien
tttcctgatttgttcttttgagcat

SEQ ID NO: 1183497 - DNA, 25 bp, Homo sapien
ctctttcctgatttgttcttttgag

SEQ ID NO: 1183498 - DNA, 25 bp, Homo sapien
gcaccctgagaatttgaacgaccat

SEQ ID NO: 1183499 - DNA, 25 bp, Homo sapien
cttggctcacgttgtaggaaccaga

SEQ ID NO: 1183500 - DNA, 25 bp, Homo sapien
tgggcttggctcacgttgtaggaac

SEQ ID NO: 1183501 - DNA, 25 bp, Homo sapien
aagcaccctgagaatttgaacgacc

SEQ ID NO: 1183502 - DNA, 25 bp, Homo sapien
caaaaggagtgcttgagctggagaa

SEQ ID NO: 1183503 - DNA, 25 bp, Homo sapien
tcccagagcgccataggtcgctgct

SEQ ID NO: 1183504 - DNA, 25 bp, Homo sapien
agctccttcccagagcgccataggt

SEQ ID NO: 1183505 - DNA, 25 bp, Homo sapien
acccataggcaagccgggagctcct

SEQ ID NO: 1183506 - DNA, 25 bp, Homo sapien
gagactgtctttgagtcctcggagc

SEQ ID NO: 1183507 - DNA, 25 bp, Homo sapien
tctttgaagagtgaggaacggagac

SEQ ID NO: 1183508 - DNA, 25 bp, Homo sapien
agtgaggaacggagactgtctttga

SEQ ID NO: 1183509 - DNA, 25 bp, Homo sapien
gctggaactcgggagcagagtccca

SEQ ID NO: 1183510 - DNA, 25 bp, Homo sapien
ttgtcagacctgtgcagcgccgctc

SEQ ID NO: 1183511 - DNA, 25 bp, Homo sapien
ggcttgtcagacctgtgcagcgccg

SEQ ID NO: 1183512 - DNA, 25 bp, Homo sapien
gctgggcttgtcagacctgtgcagc

SEQ ID NO: 1183513 - DNA, 25 bp, Homo sapien
tctagaagcgcaaggtcggggagcc

SEQ ID NO: 1183514 - DNA, 25 bp, Homo sapien
ttctatgttctatgaattttcccca

SEQ ID NO: 1183515 - DNA, 25 bp, Homo sapien
atttctatgttctatgaattttccc

SEQ ID NO: 1183516 - DNA, 25 bp, Homo sapien
tctatgttctatgaattttccccaa

SEQ ID NO: 1183517 - DNA, 25 bp, Homo sapien
ctatgttctatgaattttccccaaa

SEQ ID NO: 1183518 - DNA, 25 bp, Homo sapien
gcgccgcactgtgcgccgcgcaagt

SEQ ID NO: 1183519 - DNA, 25 bp, Homo sapien
cagcggtaccggctctaagcagtaa

SEQ ID NO: 1183520 - DNA, 25 bp, Homo sapien
ccggctctaagcagtaaacatctgt

SEQ ID NO: 1183521 - DNA, 25 bp, Homo sapien
aagtcgctcgatctccccagcggta

SEQ ID NO: 1183522 - DNA, 25 bp, Homo sapien
cttctacggtaaggccaaagttgct

SEQ ID NO: 1183523 - DNA, 25 bp, Homo sapien
gcgaggacgctaaacccagagggtc

SEQ ID NO: 1183524 - DNA, 25 bp, Homo sapien
cagattccttgaagcaggcaggagc

SEQ ID NO: 1183525 - DNA, 25 bp, Homo sapien
ggcttccgtgcggttctgcgtccag

SEQ ID NO: 1183526 - DNA, 25 bp, Homo sapien
tccggcgcggtccaaagagataatc

SEQ ID NO: 1183527 - DNA, 25 bp, Homo sapien
gagttcaagcaccaacagaagaagg

SEQ ID NO: 1183528 - DNA, 25 bp, Homo sapien
aaaggcttcaagagtccgacggagg

SEQ ID NO: 1183529 - DNA, 25 bp, Homo sapien
tctgtagagcagagcgttgtgcacc

SEQ ID NO: 1183530 - DNA, 25 bp, Homo sapien
ttcccgctcgaatcaacaccaaacg

SEQ ID NO: 1183531 - DNA, 25 bp, Homo sapien
tcttcccgctcgaatcaacaccaaa

SEQ ID NO: 1183532 - DNA, 25 bp, Homo sapien
ccctcttcccgctcgaatcaacacc

SEQ ID NO: 1183533 - DNA, 25 bp, Homo sapien
ctcttcccgctcgaatcaacaccaa

SEQ ID NO: 1183534 - DNA, 25 bp, Homo sapien
ctgccgctggtgagtcccggcgact

SEQ ID NO: 1183535 - DNA, 25 bp, Homo sapien
gagaagttctttttcgcctgcaggg

SEQ ID NO: 1183536 - DNA, 25 bp, Homo sapien
cgctccagaacgtgcccgtagctgg

SEQ ID NO: 1183537 - DNA, 25 bp, Homo sapien
tccaggtctagcaggtgactgacgg

SEQ ID NO: 1183538 - DNA, 25 bp, Homo sapien
ggtgcccgcgtggagagtgcagcct

SEQ ID NO: 1183539 - DNA, 25 bp, Homo sapien
ccgtcatacgctgcccgagagaagc

SEQ ID NO: 1183540 - DNA, 25 bp, Homo sapien
agagaagcccttccaacccgactca

SEQ ID NO: 1183541 - DNA, 25 bp, Homo sapien
agcctgagcagcgccaagtcctgct

SEQ ID NO: 1183542 - DNA, 25 bp, Homo sapien
agctaagttcagactcttgcaacct

SEQ ID NO: 1183543 - DNA, 25 bp, Homo sapien
gaagagggagtatctgtacatatct

SEQ ID NO: 1183544 - DNA, 25 bp, Homo sapien
tctgtacatatctggccacatgtca

SEQ ID NO: 1183545 - DNA, 25 bp, Homo sapien
tcttgcaacctcgaggagaagaggg

SEQ ID NO: 1183546 - DNA, 25 bp, Homo sapien
cggcttgctgtagcgtggcccgcgg

SEQ ID NO: 1183547 - DNA, 25 bp, Homo sapien
ccaattgtttctatgtgcagtttga

SEQ ID NO: 1183548 - DNA, 25 bp, Homo sapien
tttccaattgtttctatgtgcagtt

SEQ ID NO: 1183549 - DNA, 25 bp, Homo sapien
ctgcggcttgctgtagcgtggcccg

SEQ ID NO: 1183550 - DNA, 25 bp, Homo sapien
tggccgaggccgctggccttggccc

SEQ ID NO: 1183551 - DNA, 25 bp, Homo sapien
ggccgaggccgctggccttggccct

SEQ ID NO: 1183552 - DNA, 25 bp, Homo sapien
ctggccgaggccgctggccttggcc

SEQ ID NO: 1183553 - DNA, 25 bp, Homo sapien
tgagggccaccacggctggcttgtt

SEQ ID NO: 1183554 - DNA, 25 bp, Homo sapien
caccacggctggcttgttccctagg

SEQ ID NO: 1183555 - DNA, 25 bp, Homo sapien
ctgagggccaccacggctggcttgt

SEQ ID NO: 1183556 - DNA, 25 bp, Homo sapien
ggccaccacggctggcttgttccct

SEQ ID NO: 1183557 - DNA, 25 bp, Homo sapien
actctaaggccacgacgaatcccga

SEQ ID NO: 1183558 - DNA, 25 bp, Homo sapien
tcagagccaaacaaccggtacaatt

SEQ ID NO: 1183559 - DNA, 25 bp, Homo sapien
ccttcttgggagtggcgtccactca

SEQ ID NO: 1183560 - DNA, 25 bp, Homo sapien
caaccggtacaattttcatccctct

SEQ ID NO: 1183561 - DNA, 25 bp, Homo sapien
tgagatgagcccgagtatcacgtgg

SEQ ID NO: 1183562 - DNA, 25 bp, Homo sapien
cgtgggcgagtttctagagtcttct

SEQ ID NO: 1183563 - DNA, 25 bp, Homo sapien
gatgctgagcttgtcctcgagcgct

SEQ ID NO: 1183564 - DNA, 25 bp, Homo sapien
tagtcattgtaactctgagatgagc

SEQ ID NO: 1183565 - DNA, 25 bp, Homo sapien
tctcttgatcatgcttccgcagagc

SEQ ID NO: 1183566 - DNA, 25 bp, Homo sapien
ggcctcctccggaagctgtctcttg

SEQ ID NO: 1183567 - DNA, 25 bp, Homo sapien
ctgtctcttgatcatgcttccgcag

SEQ ID NO: 1183568 - DNA, 25 bp, Homo sapien
ttgatcatgcttccgcagagcatcc

SEQ ID NO: 1183569 - DNA, 25 bp, Homo sapien
gaattccaacttgggagcgccctag

SEQ ID NO: 1183570 - DNA, 25 bp, Homo sapien
caaatttagactgccagtgggcccc

SEQ ID NO: 1183571 - DNA, 25 bp, Homo sapien
cttccagcgggatacaaagagcgcc

SEQ ID NO: 1183572 - DNA, 25 bp, Homo sapien
gttttgtatttgcatcccgccgcgg

SEQ ID NO: 1183573 - DNA, 25 bp, Homo sapien
gaactataaggacccgtgtgaccca

SEQ ID NO: 1183574 - DNA, 25 bp, Homo sapien
caaaagtgggtaggagtcactggac

SEQ ID NO: 1183575 - DNA, 25 bp, Homo sapien
aatgcaggactgcacgacgtctaac

SEQ ID NO: 1183576 - DNA, 25 bp, Homo sapien
cgtctaacacatgggagagatgctc

SEQ ID NO: 1183577 - DNA, 25 bp, Homo sapien
tacagaattcgacaaagggctccca

SEQ ID NO: 1183578 - DNA, 25 bp, Homo sapien
tgcaacaatccggtacctgagggcc

SEQ ID NO: 1183579 - DNA, 25 bp, Homo sapien
ggctcccaataagattacaacggtg

SEQ ID NO: 1183580 - DNA, 25 bp, Homo sapien
tgaaagtgagctcggccttggaact

SEQ ID NO: 1183581 - DNA, 25 bp, Homo sapien
tggaacccaggcgtcagtcctagca

SEQ ID NO: 1183582 - DNA, 25 bp, Homo sapien
agtcctagcacccaccaattccatc

SEQ ID NO: 1183583 - DNA, 25 bp, Homo sapien
ttcaacatctcactaataccagcca

SEQ ID NO: 1183584 - DNA, 25 bp, Homo sapien
agcacccaccaattccatccacggt

SEQ ID NO: 1183585 - DNA, 25 bp, Homo sapien
caggctgctagagcagggatgggaa

SEQ ID NO: 1183586 - DNA, 25 bp, Homo sapien
gaccagagcacatgaaaggagacta

SEQ ID NO: 1183587 - DNA, 25 bp, Homo sapien
gctagcatactagggaacaatagga

SEQ ID NO: 1183588 - DNA, 25 bp, Homo sapien
cacagggagttagtatactagccta

SEQ ID NO: 1183589 - DNA, 25 bp, Homo sapien
gacacttcacatcagaagtcagaga

SEQ ID NO: 1183590 - DNA, 25 bp, Homo sapien
gcagcggtgttgtacactgcagaat

SEQ ID NO: 1183591 - DNA, 25 bp, Homo sapien
taaagtagtcagagaaggtttcgca

SEQ ID NO: 1183592 - DNA, 25 bp, Homo sapien
gttatttcccatagtaagtcttgag

SEQ ID NO: 1183593 - DNA, 25 bp, Homo sapien
tgagcactacttgtggagccactga

SEQ ID NO: 1183594 - DNA, 25 bp, Homo sapien
caagattcagggaccaagagtagta

SEQ ID NO: 1183595 - DNA, 25 bp, Homo sapien
gaaaaattggtgtcttgatagtccc

SEQ ID NO: 1183596 - DNA, 25 bp, Homo sapien
gaacatcctttaggtattacgcagg

SEQ ID NO: 1183597 - DNA, 25 bp, Homo sapien
tgtgctcatatctagggaagtttcc

SEQ ID NO: 1183598 - DNA, 25 bp, Homo sapien
tctgttctacgggattttatatcac

SEQ ID NO: 1183599 - DNA, 25 bp, Homo sapien
tcctctgtcaaaccacactatcatg

SEQ ID NO: 1183600 - DNA, 25 bp, Homo sapien
aaaagctgaaatgctgtagatgctc

SEQ ID NO: 1183601 - DNA, 25 bp, Homo sapien
tcatgtctgggtaaatgcactatct

SEQ ID NO: 1183602 - DNA, 25 bp, Homo sapien
tatgttgaaatttcgtacacaacct

SEQ ID NO: 1183603 - DNA, 25 bp, Homo sapien
tagcatatgtcaaaactactagtgg

SEQ ID NO: 1183604 - DNA, 25 bp, Homo sapien
gacaagagccctgaaacgtacctta

SEQ ID NO: 1183605 - DNA, 25 bp, Homo sapien
taaaacttggctttatcagaccata

SEQ ID NO: 1183606 - DNA, 25 bp, Homo sapien
gggagcacacagaaggaacattgaa

SEQ ID NO: 1183607 - DNA, 25 bp, Homo sapien
tatcaagggtgactgagaacatggg

SEQ ID NO: 1183608 - DNA, 25 bp, Homo sapien
gaacattgaattcagaccttagagg

SEQ ID NO: 1183609 - DNA, 25 bp, Homo sapien
tgaacctgtcccctttttgtcagtg

SEQ ID NO: 1183610 - DNA, 25 bp, Homo sapien
gaatgtcctaggtcagtcctccagg

SEQ ID NO: 1183611 - DNA, 25 bp, Homo sapien
tgtaggagtcacactctgggtgccg

SEQ ID NO: 1183612 - DNA, 25 bp, Homo sapien
tctagggagcccaccatggtaaggc

SEQ ID NO: 1183613 - DNA, 25 bp, Homo sapien
catttgctaaactccgctggctccg

SEQ ID NO: 1183614 - DNA, 25 bp, Homo sapien
ctgagagcacgagggaccattgagt

SEQ ID NO: 1183615 - DNA, 25 bp, Homo sapien
gaacaggatctatgaccccaggagc

SEQ ID NO: 1183616 - DNA, 25 bp, Homo sapien
cccaggagcagatatgttaaaatca

SEQ ID NO: 1183617 - DNA, 25 bp, Homo sapien
catctcgccagctggatgattggca

SEQ ID NO: 1183618 - DNA, 25 bp, Homo sapien
cactttgtacttggagtgttagttt

SEQ ID NO: 1183619 - DNA, 25 bp, Homo sapien
ccactttgtacttggagtgttagtt

SEQ ID NO: 1183620 - DNA, 25 bp, Homo sapien
tatcgccacctggtgcccaaaagca

SEQ ID NO: 1183621 - DNA, 25 bp, Homo sapien
catatcgccacctggtgcccaaaag

SEQ ID NO: 1183622 - DNA, 25 bp, Homo sapien
tccatatcgccacctggtgcccaaa

SEQ ID NO: 1183623 - DNA, 25 bp, Homo sapien
tcgccacctggtgcccaaaagcaag

SEQ ID NO: 1183624 - DNA, 25 bp, Homo sapien
gagtgtctacaaccataatgcagct

SEQ ID NO: 1183625 - DNA, 25 bp, Homo sapien
catcactgaggagatagactcttcc

SEQ ID NO: 1183626 - DNA, 25 bp, Homo sapien
cagtaagagatttggaagggcaccc

SEQ ID NO: 1183627 - DNA, 25 bp, Homo sapien
tatcttgcaaatcaggccttcacgg

SEQ ID NO: 1183628 - DNA, 25 bp, Homo sapien
ctggacatctggatgatcctagaaa

SEQ ID NO: 1183629 - DNA, 25 bp, Homo sapien
catctggatgatcctagaaaagtca

SEQ ID NO: 1183630 - DNA, 25 bp, Homo sapien
gacatctggatgatcctagaaaagt

SEQ ID NO: 1183631 - DNA, 25 bp, Homo sapien
attttatttctccacactggacatc

SEQ ID NO: 1183632 - DNA, 25 bp, Homo sapien
ttgcaccttgaatgagtgaccagtg

SEQ ID NO: 1183633 - DNA, 25 bp, Homo sapien
tttttctgtactggtctttggacat

SEQ ID NO: 1183634 - DNA, 25 bp, Homo sapien
cttgcaccttgaatgagtgaccagt

SEQ ID NO: 1183635 - DNA, 25 bp, Homo sapien
cctccagggtaggacagtcagtaac

SEQ ID NO: 1183636 - DNA, 25 bp, Homo sapien
gcatcctggtaacttggagtttggt

SEQ ID NO: 1183637 - DNA, 25 bp, Homo sapien
tctccaggtagcatcctggtaactt

SEQ ID NO: 1183638 - DNA, 25 bp, Homo sapien
agtaacgggttttcagcagcaaagt

SEQ ID NO: 1183639 - DNA, 25 bp, Homo sapien
ggtcaccaagtgatacgaatatagg

SEQ ID NO: 1183640 - DNA, 25 bp, Homo sapien
gtcttcccaagaccaaatggcacta

SEQ ID NO: 1183641 - DNA, 25 bp, Homo sapien
taacttcttgacctgagagaaccca

SEQ ID NO: 1183642 - DNA, 25 bp, Homo sapien
tggtttgagcaccagtctcaggtct

SEQ ID NO: 1183643 - DNA, 25 bp, Homo sapien
caagaggtggattttacttctacca

SEQ ID NO: 1183644 - DNA, 25 bp, Homo sapien
taaaatgggagtaggatcacctgca

SEQ ID NO: 1183645 - DNA, 25 bp, Homo sapien
ttcattgcaggatgccaaaaaaggg

SEQ ID NO: 1183646 - DNA, 25 bp, Homo sapien
taaatgcataaaaggcacataggct

SEQ ID NO: 1183647 - DNA, 25 bp, Homo sapien
actttgtatggtcgtctttactgtc

SEQ ID NO: 1183648 - DNA, 25 bp, Homo sapien
aaactttgtatggtcgtctttactg

SEQ ID NO: 1183649 - DNA, 25 bp, Homo sapien
tttgtatggtcgtctttactgtcat

SEQ ID NO: 1183650 - DNA, 25 bp, Homo sapien
cactaaagcccctaaactttgtatg

SEQ ID NO: 1183651 - DNA, 25 bp, Homo sapien
tagtatgaagttcactctggactcc

SEQ ID NO: 1183652 - DNA, 25 bp, Homo sapien
cactctggactcctcatgtggctgc

SEQ ID NO: 1183653 - DNA, 25 bp, Homo sapien
ctctggactcctcatgtggctgctg

SEQ ID NO: 1183654 - DNA, 25 bp, Homo sapien
ctcggctctagtatgaagttcactc

SEQ ID NO: 1183655 - DNA, 25 bp, Homo sapien
cccctgaaggtagcgtggtgagata

SEQ ID NO: 1183656 - DNA, 25 bp, Homo sapien
gcagtcagagtgtagtatgctcctc

SEQ ID NO: 1183657 - DNA, 25 bp, Homo sapien
ggtgagataattgtccaggttgtcc

SEQ ID NO: 1183658 - DNA, 25 bp, Homo sapien
tttctctgagttcccctgaaggtag

SEQ ID NO: 1183659 - DNA, 25 bp, Homo sapien
ggcgggcaaggtcttctcgcacaaa

SEQ ID NO: 1183660 - DNA, 25 bp, Homo sapien
gtccgctcaaagacacgctccaaag

SEQ ID NO: 1183661 - DNA, 25 bp, Homo sapien
gcatcaggatagtgtgtccgctcaa

SEQ ID NO: 1183662 - DNA, 25 bp, Homo sapien
ctggctgctattgaaggttgtccta

SEQ ID NO: 1183663 - DNA, 25 bp, Homo sapien
tactcagatggacaatgtatatcac

SEQ ID NO: 1183664 - DNA, 25 bp, Homo sapien
tttaaccacttcgagatcagattga

SEQ ID NO: 1183665 - DNA, 25 bp, Homo sapien
catcagtgctcatactcatgtgtac

SEQ ID NO: 1183666 - DNA, 25 bp, Homo sapien
tctaagggtgcagagtaaaatactc

SEQ ID NO: 1183667 - DNA, 25 bp, Homo sapien
tgatgttgtgcaaaatactttgacc

SEQ ID NO: 1183668 - DNA, 25 bp, Homo sapien
tgtgatgttgtgcaaaatactttga

SEQ ID NO: 1183669 - DNA, 25 bp, Homo sapien
atgtgatgttgtgcaaaatactttg

SEQ ID NO: 1183670 - DNA, 25 bp, Homo sapien
gtgatgttgtgcaaaatactttgac

SEQ ID NO: 1183671 - DNA, 25 bp, Homo sapien
tgctactggcaatatggaagacaag

SEQ ID NO: 1183672 - DNA, 25 bp, Homo sapien
taatcgatgggctaggaatctaccc

SEQ ID NO: 1183673 - DNA, 25 bp, Homo sapien
gacaagacagattggacctacccac

SEQ ID NO: 1183674 - DNA, 25 bp, Homo sapien
caagttctggctgttcaagagggtt

SEQ ID NO: 1183675 - DNA, 25 bp, Homo sapien
aggatagttttgagaattggcccag

SEQ ID NO: 1183676 - DNA, 25 bp, Homo sapien
gatagttttgagaattggcccagaa

SEQ ID NO: 1183677 - DNA, 25 bp, Homo sapien
gttttgagaattggcccagaattag

SEQ ID NO: 1183678 - DNA, 25 bp, Homo sapien
tagttttgagaattggcccagaatt

SEQ ID NO: 1183679 - DNA, 25 bp, Homo sapien
acgaggtacgatgggctgctccaca

SEQ ID NO: 1183680 - DNA, 25 bp, Homo sapien
ccaggagagataatcggtgggtctc

SEQ ID NO: 1183681 - DNA, 25 bp, Homo sapien
cgtttttattggctagcatggctct

SEQ ID NO: 1183682 - DNA, 25 bp, Homo sapien
cacgtctcctgagtaggatttgagg

SEQ ID NO: 1183683 - DNA, 25 bp, Homo sapien
aagtggagcaagggagagtgggcca

SEQ ID NO: 1183684 - DNA, 25 bp, Homo sapien
cagtgtgtgctgtgtgacgcctctc

SEQ ID NO: 1183685 - DNA, 25 bp, Homo sapien
aagcagcttgaaacatgaccgaccg

SEQ ID NO: 1183686 - DNA, 25 bp, Homo sapien
gaaccttggccatgaaagtgatcag

SEQ ID NO: 1183687 - DNA, 25 bp, Homo sapien
tgcaatagggcccagaataagactt

SEQ ID NO: 1183688 - DNA, 25 bp, Homo sapien
aactaacttgacataatagtaccaa

SEQ ID NO: 1183689 - DNA, 25 bp, Homo sapien
ttaatgagtgtcacatgtgagataa

SEQ ID NO: 1183690 - DNA, 25 bp, Homo sapien
gacataatagtaccaacaagaacag

SEQ ID NO: 1183691 - DNA, 25 bp, Homo sapien
tgccttttaatgagtgtcacatgtg

SEQ ID NO: 1183692 - DNA, 25 bp, Homo sapien
gctgtggacaaggatagctgacctc

SEQ ID NO: 1183693 - DNA, 25 bp, Homo sapien
tggttgatcactgctacccacgaag

SEQ ID NO: 1183694 - DNA, 25 bp, Homo sapien
cacggatgtaaagaaggcacctgcc

SEQ ID NO: 1183695 - DNA, 25 bp, Homo sapien
tatcagtccaatgggatgaggtccc

SEQ ID NO: 1183696 - DNA, 25 bp, Homo sapien
tcgtgtaaacaacatcttgggaggg

SEQ ID NO: 1183697 - DNA, 25 bp, Homo sapien
acaacatcttgggagggacgaggat

SEQ ID NO: 1183698 - DNA, 25 bp, Homo sapien
ttagaatccgttatgaagcccctcg

SEQ ID NO: 1183699 - DNA, 25 bp, Homo sapien
ttatgaagcccctcgtgtaaacaac

SEQ ID NO: 1183700 - DNA, 25 bp, Homo sapien
cacttgaggacttcactgctgaaat

SEQ ID NO: 1183701 - DNA, 25 bp, Homo sapien
tcacgcgatcccagatgtttcctgt

SEQ ID NO: 1183702 - DNA, 25 bp, Homo sapien
catttagtggacatgctttcttgca

SEQ ID NO: 1183703 - DNA, 25 bp, Homo sapien
tcagagtttgcacagtcacgcgatc

SEQ ID NO: 1183704 - DNA, 25 bp, Homo sapien
gaagcgcacactgcttatcgatagg

SEQ ID NO: 1183705 - DNA, 25 bp, Homo sapien
gcaatgatctgactggcctgaggag

SEQ ID NO: 1183706 - DNA, 25 bp, Homo sapien
tatcgataggttccaaacacccctg

SEQ ID NO: 1183707 - DNA, 25 bp, Homo sapien
tcagtgcaagaacaacggaggcata

SEQ ID NO: 1183708 - DNA, 25 bp, Homo sapien
tggttcctctgtaaactatattcct

SEQ ID NO: 1183709 - DNA, 25 bp, Homo sapien
tgcagggctattgttggcacatgtg

SEQ ID NO: 1183710 - DNA, 25 bp, Homo sapien
tgtggcagaataagtagccatggcg

SEQ ID NO: 1183711 - DNA, 25 bp, Homo sapien
tgttggccatgttgatgccctgtgc

SEQ ID NO: 1183712 - DNA, 25 bp, Homo sapien
gaaataacagagcaggataggtgtc

SEQ ID NO: 1183713 - DNA, 25 bp, Homo sapien
gtcaatgaggacagtagaggcaatc

SEQ ID NO: 1183714 - DNA, 25 bp, Homo sapien
gacagggtaaggcactaaggttcaa

SEQ ID NO: 1183715 - DNA, 25 bp, Homo sapien
tgggtgggctgaacctatctgaaga

SEQ ID NO: 1183716 - DNA, 25 bp, Homo sapien
gactttggcttttcgaaagctccta

SEQ ID NO: 1183717 - DNA, 25 bp, Homo sapien
gaccaacaaagatggagacaatgag

SEQ ID NO: 1183718 - DNA, 25 bp, Homo sapien
aaagggaattatgtctgtccagcac

SEQ ID NO: 1183719 - DNA, 25 bp, Homo sapien
gctcctagagcttctataaagagaa

SEQ ID NO: 1183720 - DNA, 25 bp, Homo sapien
tagccagacgcagccaattacattg

SEQ ID NO: 1183721 - DNA, 25 bp, Homo sapien
cctggcaagttacaaaagcatggct

SEQ ID NO: 1183722 - DNA, 25 bp, Homo sapien
tgtcttgacatttgcagccctgagg

SEQ ID NO: 1183723 - DNA, 25 bp, Homo sapien
cctaatgtgaaaatgggacctgttc

SEQ ID NO: 1183724 - DNA, 25 bp, Homo sapien
gatgcagcctaagccccccaaaaag

SEQ ID NO: 1183725 - DNA, 25 bp, Homo sapien
gagttggaagtaatggctgatatgc

SEQ ID NO: 1183726 - DNA, 25 bp, Homo sapien
taacaacagatctccactacccagt

SEQ ID NO: 1183727 - DNA, 25 bp, Homo sapien
tgcaggaagtttacttggaaaatga

SEQ ID NO: 1183728 - DNA, 25 bp, Homo sapien
atgttccacttttaaccgtgcgtgt

SEQ ID NO: 1183729 - DNA, 25 bp, Homo sapien
aatgttccacttttaaccgtgcgtg

SEQ ID NO: 1183730 - DNA, 25 bp, Homo sapien
gccttaaatcggcttaggtcagcaa

SEQ ID NO: 1183731 - DNA, 25 bp, Homo sapien
gaaacgggatatactaggcccctgc

SEQ ID NO: 1183732 - DNA, 25 bp, Homo sapien
tgcagtggtccatttccaagacaaa

SEQ ID NO: 1183733 - DNA, 25 bp, Homo sapien
tattcatctatctgacatctgaggg

SEQ ID NO: 1183734 - DNA, 25 bp, Homo sapien
gcaattcacaaatggctctccttgg

SEQ ID NO: 1183735 - DNA, 25 bp, Homo sapien
caaggtggctgtagtcataaagccg

SEQ ID NO: 1183736 - DNA, 25 bp, Homo sapien
cataaagccgtcatatgagctggtc

SEQ ID NO: 1183737 - DNA, 25 bp, Homo sapien
tattgtccagtcaagataattggcc

SEQ ID NO: 1183738 - DNA, 25 bp, Homo sapien
tgaaccttgtgcaacaaccccagga

SEQ ID NO: 1183739 - DNA, 25 bp, Homo sapien
actctggatgaccttttagggctca

SEQ ID NO: 1183740 - DNA, 25 bp, Homo sapien
ggtctgtaatctctactacatgatg

SEQ ID NO: 1183741 - DNA, 25 bp, Homo sapien
aatgtcttcactgacttatccctag

SEQ ID NO: 1183742 - DNA, 25 bp, Homo sapien
gagctgttggagactcagcttgact

SEQ ID NO: 1183743 - DNA, 25 bp, Homo sapien
atcaatctcagagccaccaggtacc

SEQ ID NO: 1183744 - DNA, 25 bp, Homo sapien
agaccttgccctctagccaccacat

SEQ ID NO: 1183745 - DNA, 25 bp, Homo sapien
taagttaggcaaactccaattctgt

SEQ ID NO: 1183746 - DNA, 25 bp, Homo sapien
tagatgaccgccactgccacgggat

SEQ ID NO: 1183747 - DNA, 25 bp, Homo sapien
agatgaccgccactgccacgggatc

SEQ ID NO: 1183748 - DNA, 25 bp, Homo sapien
atgaccgccactgccacgggatcca

SEQ ID NO: 1183749 - DNA, 25 bp, Homo sapien
agtagatgaccgccactgccacggg

SEQ ID NO: 1183750 - DNA, 25 bp, Homo sapien
gaagaaaggaatgcgaatgattacc

SEQ ID NO: 1183751 - DNA, 25 bp, Homo sapien
gagaagggcgcctcattcctgtgag

SEQ ID NO: 1183752 - DNA, 25 bp, Homo sapien
gaatgattaccaatcctgctgcaag

SEQ ID NO: 1183753 - DNA, 25 bp, Homo sapien
tagtccatgttaagcaaaaccattt

SEQ ID NO: 1183754 - DNA, 25 bp, Homo sapien
agtggactggcatttggctcatacc

SEQ ID NO: 1183755 - DNA, 25 bp, Homo sapien
ctgagagatctataaggcaagagac

SEQ ID NO: 1183756 - DNA, 25 bp, Homo sapien
gcccaggatatctagtggactggca

SEQ ID NO: 1183757 - DNA, 25 bp, Homo sapien
tggcatttggctcatacctgagaga

SEQ ID NO: 1183758 - DNA, 25 bp, Homo sapien
agatggcaatattcactctctgaca

SEQ ID NO: 1183759 - DNA, 25 bp, Homo sapien
gatggcaatattcactctctgacat

SEQ ID NO: 1183760 - DNA, 25 bp, Homo sapien
tccttcttctgtcgctaatattcca

SEQ ID NO: 1183761 - DNA, 25 bp, Homo sapien
cttgtatacgtggctgccttttctg

SEQ ID NO: 1183762 - DNA, 25 bp, Homo sapien
ccaaattcttgttctctatcagaca

SEQ ID NO: 1183763 - DNA, 25 bp, Homo sapien
tatcttatctacatttggtgccaca

SEQ ID NO: 1183764 - DNA, 25 bp, Homo sapien
ggcactgaggtgtccctagctttat

SEQ ID NO: 1183765 - DNA, 25 bp, Homo sapien
gatataaattcacagtcagccacct

SEQ ID NO: 1183766 - DNA, 25 bp, Homo sapien
tccttagcatcctgtggcactgagg

SEQ ID NO: 1183767 - DNA, 25 bp, Homo sapien
caatgttcttggctaaaggcttaga

SEQ ID NO: 1183768 - DNA, 25 bp, Homo sapien
ccagcgtgggcccagtgtgaacttc

SEQ ID NO: 1183769 - DNA, 25 bp, Homo sapien
tatttccctggtaccttgttagcaa

SEQ ID NO: 1183770 - DNA, 25 bp, Homo sapien
tgttcattccagtacactgccagcg

SEQ ID NO: 1183771 - DNA, 25 bp, Homo sapien
gattcaatttctgggattccatgca

SEQ ID NO: 1183772 - DNA, 25 bp, Homo sapien
gacgtacacctgaactgctttatgg

SEQ ID NO: 1183773 - DNA, 25 bp, Homo sapien
tctgtaaccatcctctgttctcagc

SEQ ID NO: 1183774 - DNA, 25 bp, Homo sapien
gaaaacctctatatctctgtaacca

SEQ ID NO: 1183775 - DNA, 25 bp, Homo sapien
ttgggcagaattcctaaacttccca

SEQ ID NO: 1183776 - DNA, 25 bp, Homo sapien
agaaagaagaggcttgattttcttg

SEQ ID NO: 1183777 - DNA, 25 bp, Homo sapien
gaaatgcttcatggccaaaaaagca

SEQ ID NO: 1183778 - DNA, 25 bp, Homo sapien
gcttgattttcttgtagagccctga

SEQ ID NO: 1183779 - DNA, 25 bp, Homo sapien
gagccctgaaatgcttcatggccaa

SEQ ID NO: 1183780 - DNA, 25 bp, Homo sapien
gttgtccagtagtcgaaaataggct

SEQ ID NO: 1183781 - DNA, 25 bp, Homo sapien
ttattggcccacatgcttggcagcg

SEQ ID NO: 1183782 - DNA, 25 bp, Homo sapien
gaattcattgatccagcagtttagt

SEQ ID NO: 1183783 - DNA, 25 bp, Homo sapien
gcttcatcttgtaggtaagttgtcc

SEQ ID NO: 1183784 - DNA, 25 bp, Homo sapien
tgagtggctgccgtaaacacagcac

SEQ ID NO: 1183785 - DNA, 25 bp, Homo sapien
agtggctgccgtaaacacagcactt

SEQ ID NO: 1183786 - DNA, 25 bp, Homo sapien
aaaatacatgatgtgaacccactga

SEQ ID NO: 1183787 - DNA, 25 bp, Homo sapien
ccactgagtggctgccgtaaacaca

SEQ ID NO: 1183788 - DNA, 25 bp, Homo sapien
gatttctcaagatcaatcacttgat

SEQ ID NO: 1183789 - DNA, 25 bp, Homo sapien
gtcctcagatttctcaagatcaatc

SEQ ID NO: 1183790 - DNA, 25 bp, Homo sapien
tcagtcctcagatttctcaagatca

SEQ ID NO: 1183791 - DNA, 25 bp, Homo sapien
cagatttctcaagatcaatcacttg

SEQ ID NO: 1183792 - DNA, 25 bp, Homo sapien
aattggatctattgcccatggctga

SEQ ID NO: 1183793 - DNA, 25 bp, Homo sapien
tgctttctgcatagtaaattggatc

SEQ ID NO: 1183794 - DNA, 25 bp, Homo sapien
tagtaaattggatctattgcccatg

SEQ ID NO: 1183795 - DNA, 25 bp, Homo sapien
gatctattgcccatggctgatttct

SEQ ID NO: 1183796 - DNA, 25 bp, Homo sapien
agtatattacctcttagccaaaggt

SEQ ID NO: 1183797 - DNA, 25 bp, Homo sapien
acttctctgtaatcacggtgagaca

SEQ ID NO: 1183798 - DNA, 25 bp, Homo sapien
gacaaagtagtgaagagaaactcta

SEQ ID NO: 1183799 - DNA, 25 bp, Homo sapien
atactctaggtagttatcaaccaag

SEQ ID NO: 1183800 - DNA, 25 bp, Homo sapien
gacagaggtgtattaaagtcttcta

SEQ ID NO: 1183801 - DNA, 25 bp, Homo sapien
cagaggtgtattaaagtcttctact

SEQ ID NO: 1183802 - DNA, 25 bp, Homo sapien
gctgacagaggtgtattaaagtctt

SEQ ID NO: 1183803 - DNA, 25 bp, Homo sapien
gaggtgtattaaagtcttctactag

SEQ ID NO: 1183804 - DNA, 25 bp, Homo sapien
ttgtttttggattccttgtcaacat

SEQ ID NO: 1183805 - DNA, 25 bp, Homo sapien
tctctattgtgtcctaaagccttac

SEQ ID NO: 1183806 - DNA, 25 bp, Homo sapien
catctctattgtgtcctaaagcctt

SEQ ID NO: 1183807 - DNA, 25 bp, Homo sapien
ccatctctattgtgtcctaaagcct

SEQ ID NO: 1183808 - DNA, 25 bp, Homo sapien
atctctattgtgtcctaaagcctta

SEQ ID NO: 1183809 - DNA, 25 bp, Homo sapien
tttcacactgtcttgcagaatctgg

SEQ ID NO: 1183810 - DNA, 25 bp, Homo sapien
atttcacactgtcttgcagaatctg

SEQ ID NO: 1183811 - DNA, 25 bp, Homo sapien
catttcacactgtcttgcagaatct

SEQ ID NO: 1183812 - DNA, 25 bp, Homo sapien
gccatttcacactgtcttgcagaat

SEQ ID NO: 1183813 - DNA, 25 bp, Homo sapien
tgcctctgccatctgtcaaaggcat

SEQ ID NO: 1183814 - DNA, 25 bp, Homo sapien
tgttgaagtcaaaagctgctgcttg

SEQ ID NO: 1183815 - DNA, 25 bp, Homo sapien
ctctgttgaagtcaaaagctgctgc

SEQ ID NO: 1183816 - DNA, 25 bp, Homo sapien
gaagtcaaaagctgctgcttgctgc

SEQ ID NO: 1183817 - DNA, 25 bp, Homo sapien
tacttaacaggcctgagtatgcatc

SEQ ID NO: 1183818 - DNA, 25 bp, Homo sapien
ggattcattacttaacaggcctgag

SEQ ID NO: 1183819 - DNA, 25 bp, Homo sapien
tcatggattcattacttaacaggcc

SEQ ID NO: 1183820 - DNA, 25 bp, Homo sapien
gcctgagtatgcatccaataggctg

SEQ ID NO: 1183821 - DNA, 25 bp, Homo sapien
aaactgcagtaagggatccacaaag

SEQ ID NO: 1183822 - DNA, 25 bp, Homo sapien
agacttggcatgacaactagcattc

SEQ ID NO: 1183823 - DNA, 25 bp, Homo sapien
tcctcaatgtactcataactgctcc

SEQ ID NO: 1183824 - DNA, 25 bp, Homo sapien
gcatgacaactagcattccaaagga

SEQ ID NO: 1183825 - DNA, 25 bp, Homo sapien
cgtaagaatgttctcatatatattt

SEQ ID NO: 1183826 - DNA, 25 bp, Homo sapien
gtctttagacaccaagctcgtaaga

SEQ ID NO: 1183827 - DNA, 25 bp, Homo sapien
gacaccaagctcgtaagaatgttct

SEQ ID NO: 1183828 - DNA, 25 bp, Homo sapien
tttagacaccaagctcgtaagaatg

SEQ ID NO: 1183829 - DNA, 25 bp, Homo sapien
tgatcaccattattctctcttgcag

SEQ ID NO: 1183830 - DNA, 25 bp, Homo sapien
gacttttgtgactgtaaatcttaac

SEQ ID NO: 1183831 - DNA, 25 bp, Homo sapien
ctttactcatccacacgagcatttc

SEQ ID NO: 1183832 - DNA, 25 bp, Homo sapien
tcttgcagatatgagctatctttac

SEQ ID NO: 1183833 - DNA, 25 bp, Homo sapien
gagaagagtagtacttctcacagct

SEQ ID NO: 1183834 - DNA, 25 bp, Homo sapien
tttctctctctactgggtatgagag

SEQ ID NO: 1183835 - DNA, 25 bp, Homo sapien
ttcccactcgatggcaagatcttaa

SEQ ID NO: 1183836 - DNA, 25 bp, Homo sapien
tatgggcatgagaaaaaggatcaag

SEQ ID NO: 1183837 - DNA, 25 bp, Homo sapien
ttccccttataggagctctgtggct

SEQ ID NO: 1183838 - DNA, 25 bp, Homo sapien
tcatctaggtcatgggcgaaggcca

SEQ ID NO: 1183839 - DNA, 25 bp, Homo sapien
tgatgatctcagtaggagaagagag

SEQ ID NO: 1183840 - DNA, 25 bp, Homo sapien
cacccgtacaaagagtggcctggtc

SEQ ID NO: 1183841 - DNA, 25 bp, Homo sapien
ggaggtgacacattcccaatgatgc

SEQ ID NO: 1183842 - DNA, 25 bp, Homo sapien
tctgacaccgtgcaatgtagaggag

SEQ ID NO: 1183843 - DNA, 25 bp, Homo sapien
ggaacacaaaagagacagctctgct

SEQ ID NO: 1183844 - DNA, 25 bp, Homo sapien
cgagggatcttcatgggaacacaaa

SEQ ID NO: 1183845 - DNA, 25 bp, Homo sapien
agaaaagatggtgaactgttcttac

SEQ ID NO: 1183846 - DNA, 25 bp, Homo sapien
ggacatattcttagtaatcctgaga

SEQ ID NO: 1183847 - DNA, 25 bp, Homo sapien
ctataagttgaataacgagggacat

SEQ ID NO: 1183848 - DNA, 25 bp, Homo sapien
tagtaatcctgagaaaagatggtga

SEQ ID NO: 1183849 - DNA, 25 bp, Homo sapien
tatagccatgactcttggggcagga

SEQ ID NO: 1183850 - DNA, 25 bp, Homo sapien
gggcaggatttagaaattaacagac

SEQ ID NO: 1183851 - DNA, 25 bp, Homo sapien
tttagaaattaacagacgtagagcc

SEQ ID NO: 1183852 - DNA, 25 bp, Homo sapien
ttaacagacgtagagccttcccagg

SEQ ID NO: 1183853 - DNA, 25 bp, Homo sapien
gaagaaccaaccacactattaccaa

SEQ ID NO: 1183854 - DNA, 25 bp, Homo sapien
aatcttgaagaaccaaccacactat

SEQ ID NO: 1183855 - DNA, 25 bp, Homo sapien
accacactattaccaaaatttcttg

SEQ ID NO: 1183856 - DNA, 25 bp, Homo sapien
cacactattaccaaaatttcttgac

SEQ ID NO: 1183857 - DNA, 25 bp, Homo sapien
ctatgacttttaccgtttgtaggct

SEQ ID NO: 1183858 - DNA, 25 bp, Homo sapien
cgtttgtaggcttatttgttccaat

SEQ ID NO: 1183859 - DNA, 25 bp, Homo sapien
gaggctatgacttttaccgtttgta

SEQ ID NO: 1183860 - DNA, 25 bp, Homo sapien
tgaaactccttgggtagaaattcta

SEQ ID NO: 1183861 - DNA, 25 bp, Homo sapien
caagggaggcagtaaggtttgccct

SEQ ID NO: 1183862 - DNA, 25 bp, Homo sapien
ctgcacaaagtcagtcagcaaggga

SEQ ID NO: 1183863 - DNA, 25 bp, Homo sapien
acaaagtcagtcagcaagggaggca

SEQ ID NO: 1183864 - DNA, 25 bp, Homo sapien
gaggcagtaaggtttgccctactct

SEQ ID NO: 1183865 - DNA, 25 bp, Homo sapien
ggtgaagagagtttcatcaggagac

SEQ ID NO: 1183866 - DNA, 25 bp, Homo sapien
gagtaaatatcagtatggatgctgc

SEQ ID NO: 1183867 - DNA, 25 bp, Homo sapien
gaccttctcggcatgaaattccaga

SEQ ID NO: 1183868 - DNA, 25 bp, Homo sapien
tgcgattttatcatcaggtgaagag

SEQ ID NO: 1183869 - DNA, 25 bp, Homo sapien
ttccctgtggttgtgtttgccctac

SEQ ID NO: 1183870 - DNA, 25 bp, Homo sapien
tattttgtaagatgactcttgccct

SEQ ID NO: 1183871 - DNA, 25 bp, Homo sapien
gaagagaactctattttgtaagatg

SEQ ID NO: 1183872 - DNA, 25 bp, Homo sapien
tcccacttcactagaagagaactct

SEQ ID NO: 1183873 - DNA, 25 bp, Homo sapien
taaatagcatccacgatcttagaca

SEQ ID NO: 1183874 - DNA, 25 bp, Homo sapien
gtaaatagcatccacgatcttagac

SEQ ID NO: 1183875 - DNA, 25 bp, Homo sapien
aaatagcatccacgatcttagacac

SEQ ID NO: 1183876 - DNA, 25 bp, Homo sapien
tcaacaaagtgataacctgcaacat

SEQ ID NO: 1183877 - DNA, 25 bp, Homo sapien
agttgaaagatgaccttcttgggtg

SEQ ID NO: 1183878 - DNA, 25 bp, Homo sapien
catgtcaacaaagtgataacctgca

SEQ ID NO: 1183879 - DNA, 25 bp, Homo sapien
ataagttgaaagatgaccttcttgg

SEQ ID NO: 1183880 - DNA, 25 bp, Homo sapien
aacatgccgccttccacatctgtat

SEQ ID NO: 1183881 - DNA, 25 bp, Homo sapien
aggggccacgctcgcctgagaacat

SEQ ID NO: 1183882 - DNA, 25 bp, Homo sapien
ttgtcttcagcacgtgaggggccac

SEQ ID NO: 1183883 - DNA, 25 bp, Homo sapien
cagtatcaataagattgtcttcagc

SEQ ID NO: 1183884 - DNA, 25 bp, Homo sapien
tcactgttgtagaagacttggaaca

SEQ ID NO: 1183885 - DNA, 25 bp, Homo sapien
gaacataagagtcgtcaagagctgg

SEQ ID NO: 1183886 - DNA, 25 bp, Homo sapien
tttcctgtaggaaccaagaggcaga

SEQ ID NO: 1183887 - DNA, 25 bp, Homo sapien
aatactgggccaccgctttcctgta

SEQ ID NO: 1183888 - DNA, 25 bp, Homo sapien
tcattagagtaatatccacctgttg

SEQ ID NO: 1183889 - DNA, 25 bp, Homo sapien
gatcttcagataactggtcccagaa

SEQ ID NO: 1183890 - DNA, 25 bp, Homo sapien
aatatccacctgttgcagtccagaa

SEQ ID NO: 1183891 - DNA, 25 bp, Homo sapien
cacagatcttcagataactggtccc

SEQ ID NO: 1183892 - DNA, 25 bp, Homo sapien
ctttgaatgatgtaacgccgatgag

SEQ ID NO: 1183893 - DNA, 25 bp, Homo sapien
tgaatgatgtaacgccgatgagagt

SEQ ID NO: 1183894 - DNA, 25 bp, Homo sapien
tgtaacgccgatgagagtttgggac

SEQ ID NO: 1183895 - DNA, 25 bp, Homo sapien
acgccgatgagagtttgggaccgcc

SEQ ID NO: 1183896 - DNA, 25 bp, Homo sapien
aaactgtggaaagttatattcactg

SEQ ID NO: 1183897 - DNA, 25 bp, Homo sapien
gaaactgtggaaagttatattcact

SEQ ID NO: 1183898 - DNA, 25 bp, Homo sapien
ctgtggaaagttatattcactgaga

SEQ ID NO: 1183899 - DNA, 25 bp, Homo sapien
aactgtggaaagttatattcactga

SEQ ID NO: 1183900 - DNA, 25 bp, Homo sapien
ctactgagagcttatagagataact

SEQ ID NO: 1183901 - DNA, 25 bp, Homo sapien
tcttctgaccttctaggaccttcta

SEQ ID NO: 1183902 - DNA, 25 bp, Homo sapien
cagtgaggaatattaatacgatgac

SEQ ID NO: 1183903 - DNA, 25 bp, Homo sapien
aatacgatgacagtgtcttctgacc

SEQ ID NO: 1183904 - DNA, 25 bp, Homo sapien
tctccctctagatggtcagaagtac

SEQ ID NO: 1183905 - DNA, 25 bp, Homo sapien
gaagtactgcctagatcccagatgt

SEQ ID NO: 1183906 - DNA, 25 bp, Homo sapien
tacaaattcacacccctagaaacag

SEQ ID NO: 1183907 - DNA, 25 bp, Homo sapien
ccaacattcagagggagagatacga

SEQ ID NO: 1183908 - DNA, 25 bp, Homo sapien
ccagtttatgaagaggaccaaaaat

SEQ ID NO: 1183909 - DNA, 25 bp, Homo sapien
tctgctaactacaggattggaatca

SEQ ID NO: 1183910 - DNA, 25 bp, Homo sapien
ggattggaatcattgatccagttta

SEQ ID NO: 1183911 - DNA, 25 bp, Homo sapien
aggatcagtctgctaactacaggat

SEQ ID NO: 1183912 - DNA, 25 bp, Homo sapien
ttgcaagatactttggagtgtagaa

SEQ ID NO: 1183913 - DNA, 25 bp, Homo sapien
tggaacgtgcttaaattcagtcgac

SEQ ID NO: 1183914 - DNA, 25 bp, Homo sapien
gatactttggagtgtagaattacag

SEQ ID NO: 1183915 - DNA, 25 bp, Homo sapien
agaattacagaaaatggaacgtgct

SEQ ID NO: 1183916 - DNA, 25 bp, Homo sapien
ctggtacccaaagagtaggtcactt

SEQ ID NO: 1183917 - DNA, 25 bp, Homo sapien
tgatccatcagagtacagtagctgg

SEQ ID NO: 1183918 - DNA, 25 bp, Homo sapien
ccttctaagggtgagcaaggcctga

SEQ ID NO: 1183919 - DNA, 25 bp, Homo sapien
caaggcctgaagtacaacattatcg

SEQ ID NO: 1183920 - DNA, 25 bp, Homo sapien
tatccctaactaattgaccaaagtg

SEQ ID NO: 1183921 - DNA, 25 bp, Homo sapien
gaattgccatacttcgaatgcctcc

SEQ ID NO: 1183922 - DNA, 25 bp, Homo sapien
gggcaccaagccttctagaaccaca

SEQ ID NO: 1183923 - DNA, 25 bp, Homo sapien
catgtgtactgtctcatatccctaa

SEQ ID NO: 1183924 - DNA, 25 bp, Homo sapien
catctttgagcaaacgtgatgttga

SEQ ID NO: 1183925 - DNA, 25 bp, Homo sapien
ttgttacagatattgagcaccacca

SEQ ID NO: 1183926 - DNA, 25 bp, Homo sapien
gcaaacgtgatgttgaccactttaa

SEQ ID NO: 1183927 - DNA, 25 bp, Homo sapien
aagattgttacagatattgagcacc

SEQ ID NO: 1183928 - DNA, 25 bp, Homo sapien
aatacccacccatagctcaaaatgg

SEQ ID NO: 1183929 - DNA, 25 bp, Homo sapien
tacccacccatagctcaaaatgggt

SEQ ID NO: 1183930 - DNA, 25 bp, Homo sapien
taatacccacccatagctcaaaatg

SEQ ID NO: 1183931 - DNA, 25 bp, Homo sapien
cttaatacccacccatagctcaaaa

SEQ ID NO: 1183932 - DNA, 25 bp, Homo sapien
gatgtcaaatctgtaatgtagttcc

SEQ ID NO: 1183933 - DNA, 25 bp, Homo sapien
gaatcgtaaggtatcagatgtcaaa

SEQ ID NO: 1183934 - DNA, 25 bp, Homo sapien
gatgccctcttaagatatgttctgg

SEQ ID NO: 1183935 - DNA, 25 bp, Homo sapien
ggctccacaggaatcgtaaggtatc

SEQ ID NO: 1183936 - DNA, 25 bp, Homo sapien
ttactccatgatgctaactggggtc

SEQ ID NO: 1183937 - DNA, 25 bp, Homo sapien
catgatgctaactggggtcaaggga

SEQ ID NO: 1183938 - DNA, 25 bp, Homo sapien
gggaagatccgactgccaagttgga

SEQ ID NO: 1183939 - DNA, 25 bp, Homo sapien
taactggggtcaagggaagatccga

SEQ ID NO: 1183940 - DNA, 25 bp, Homo sapien
gacttcgatttcatctctaagcagt

SEQ ID NO: 1183941 - DNA, 25 bp, Homo sapien
taagcagtaaatgaccacctgattt

SEQ ID NO: 1183942 - DNA, 25 bp, Homo sapien
gtaaatgaccacctgattttgccaa

SEQ ID NO: 1183943 - DNA, 25 bp, Homo sapien
tctctaagcagtaaatgaccacctg

SEQ ID NO: 1183944 - DNA, 25 bp, Homo sapien
atagggtcttcatctcggagcagtc

SEQ ID NO: 1183945 - DNA, 25 bp, Homo sapien
gatcatagggtcttcatctcggagc

SEQ ID NO: 1183946 - DNA, 25 bp, Homo sapien
tcatagggtcttcatctcggagcag

SEQ ID NO: 1183947 - DNA, 25 bp, Homo sapien
tgatcatagggtcttcatctcggag

SEQ ID NO: 1183948 - DNA, 25 bp, Homo sapien
aatatcataggttatttcagccaac

SEQ ID NO: 1183949 - DNA, 25 bp, Homo sapien
ccattgggtgagttataattgtaaa

SEQ ID NO: 1183950 - DNA, 25 bp, Homo sapien
gaggtgcagaggtcagtttatgggc

SEQ ID NO: 1183951 - DNA, 25 bp, Homo sapien
tgtctgtaggactgtctatctggcc

SEQ ID NO: 1183952 - DNA, 25 bp, Homo sapien
taaggccttatcattcttgacatct

SEQ ID NO: 1183953 - DNA, 25 bp, Homo sapien
ctataaggccttatcattcttgaca

SEQ ID NO: 1183954 - DNA, 25 bp, Homo sapien
gccttatcattcttgacatctttac

SEQ ID NO: 1183955 - DNA, 25 bp, Homo sapien
aaggccttatcattcttgacatctt

SEQ ID NO: 1183956 - DNA, 25 bp, Homo sapien
tggacttcccattgtttatgaatga

SEQ ID NO: 1183957 - DNA, 25 bp, Homo sapien
gctccaagacattgttggacttccc

SEQ ID NO: 1183958 - DNA, 25 bp, Homo sapien
cttcttctaaggtcagctccaagac

SEQ ID NO: 1183959 - DNA, 25 bp, Homo sapien
caaacagactcaagttgtcaggagg

SEQ ID NO: 1183960 - DNA, 25 bp, Homo sapien
gaaagaattactttgctagcttctt

SEQ ID NO: 1183961 - DNA, 25 bp, Homo sapien
cagaaagaattactttgctagcttc

SEQ ID NO: 1183962 - DNA, 25 bp, Homo sapien
aaagaattactttgctagcttcttc

SEQ ID NO: 1183963 - DNA, 25 bp, Homo sapien
agaattactttgctagcttcttctt

SEQ ID NO: 1183964 - DNA, 25 bp, Homo sapien
taaaccaacactggcaacaacaagc

SEQ ID NO: 1183965 - DNA, 25 bp, Homo sapien
aaccaacactggcaacaacaagcct

SEQ ID NO: 1183966 - DNA, 25 bp, Homo sapien
caacactggcaacaacaagcctctc

SEQ ID NO: 1183967 - DNA, 25 bp, Homo sapien
ctaaaccaacactggcaacaacaag

SEQ ID NO: 1183968 - DNA, 25 bp, Homo sapien
agttggtttctactcacaccattac

SEQ ID NO: 1183969 - DNA, 25 bp, Homo sapien
agagcatccaccagtccacatttct

SEQ ID NO: 1183970 - DNA, 25 bp, Homo sapien
tttctttcccattgagagtaacata

SEQ ID NO: 1183971 - DNA, 25 bp, Homo sapien
tatgaggactagtggtaaggcttga

SEQ ID NO: 1183972 - DNA, 25 bp, Homo sapien
tcttctactactatgaggactagtg

SEQ ID NO: 1183973 - DNA, 25 bp, Homo sapien
atctttcaaatgagtagggcttgta

SEQ ID NO: 1183974 - DNA, 25 bp, Homo sapien
gacccctaggcaaatgcttatcttt

SEQ ID NO: 1183975 - DNA, 25 bp, Homo sapien
cacaaacatcaagaagacccctagg

SEQ ID NO: 1183976 - DNA, 25 bp, Homo sapien
aacatcaagaagacccctaggcaaa

SEQ ID NO: 1183977 - DNA, 25 bp, Homo sapien
tcaagaagacccctaggcaaatgct

SEQ ID NO: 1183978 - DNA, 25 bp, Homo sapien
tcacaagccaaagggtaacccatgg

SEQ ID NO: 1183979 - DNA, 25 bp, Homo sapien
tcatcaccagccaactcaaacaagg

SEQ ID NO: 1183980 - DNA, 25 bp, Homo sapien
caaaataactggcactgtgatacca

SEQ ID NO: 1183981 - DNA, 25 bp, Homo sapien
aacccatgggcccaaaggtatctag

SEQ ID NO: 1183982 - DNA, 25 bp, Homo sapien
gttttgactctgatcacaaccaatc

SEQ ID NO: 1183983 - DNA, 25 bp, Homo sapien
gatgtgtggccaagctgtatatctc

SEQ ID NO: 1183984 - DNA, 25 bp, Homo sapien
accaatcacatctaactccttattg

SEQ ID NO: 1183985 - DNA, 25 bp, Homo sapien
gtatcagccactattaagccacttg

SEQ ID NO: 1183986 - DNA, 25 bp, Homo sapien
tttcttctgtgtgtctacgtcctgt

SEQ ID NO: 1183987 - DNA, 25 bp, Homo sapien
tgtgtgtctacgtcctgtccaaccg

SEQ ID NO: 1183988 - DNA, 25 bp, Homo sapien
gtctacgtcctgtccaaccgtctgg

SEQ ID NO: 1183989 - DNA, 25 bp, Homo sapien
ctgtccaaccgtctgggcagtttga

SEQ ID NO: 1183990 - DNA, 25 bp, Homo sapien
caatgatggccactttcttccccat

SEQ ID NO: 1183991 - DNA, 25 bp, Homo sapien
agctccaatgatggccactttcttc

SEQ ID NO: 1183992 - DNA, 25 bp, Homo sapien
cagctccaatgatggccactttctt

SEQ ID NO: 1183993 - DNA, 25 bp, Homo sapien
tccaatgatggccactttcttcccc

SEQ ID NO: 1183994 - DNA, 25 bp, Homo sapien
gctcctgatggaggccaagccactc

SEQ ID NO: 1183995 - DNA, 25 bp, Homo sapien
aatttccacaggcccccaatgtcat

SEQ ID NO: 1183996 - DNA, 25 bp, Homo sapien
ctgatggaggccaagccactcacac

SEQ ID NO: 1183997 - DNA, 25 bp, Homo sapien
ccccaatgtcattgctcttctcaaa

SEQ ID NO: 1183998 - DNA, 25 bp, Homo sapien
tctggccatcatcaaagatagagca

SEQ ID NO: 1183999 - DNA, 25 bp, Homo sapien
tttttcagtggcaagacccctcttg

SEQ ID NO: 1184000 - DNA, 25 bp, Homo sapien
cgatgcattcattatagcgtttggg

SEQ ID NO: 1184001 - DNA, 25 bp, Homo sapien
tgttcagcctattacaggccatcct

SEQ ID NO: 1184002 - DNA, 25 bp, Homo sapien
acacatctgttacagctgtgagctc

SEQ ID NO: 1184003 - DNA, 25 bp, Homo sapien
cacatctgttacagctgtgagctct

SEQ ID NO: 1184004 - DNA, 25 bp, Homo sapien
taggtcccactctcagagaatttga

SEQ ID NO: 1184005 - DNA, 25 bp, Homo sapien
aaaacacactgagcattaggtccca

SEQ ID NO: 1184006 - DNA, 25 bp, Homo sapien
tcatgagcacaagcatctaatggtc

SEQ ID NO: 1184007 - DNA, 25 bp, Homo sapien
cacacactgaaataaactgggagct

SEQ ID NO: 1184008 - DNA, 25 bp, Homo sapien
gatttgtaaatgctagccctgccct

SEQ ID NO: 1184009 - DNA, 25 bp, Homo sapien
atttgtaaatgctagccctgccctc

SEQ ID NO: 1184010 - DNA, 25 bp, Homo sapien
cttaaattgtatgtacttcaggagg

SEQ ID NO: 1184011 - DNA, 25 bp, Homo sapien
cataaagttggggaagtcatcggga

SEQ ID NO: 1184012 - DNA, 25 bp, Homo sapien
ctgttgtgcataaagttggggaagt

SEQ ID NO: 1184013 - DNA, 25 bp, Homo sapien
aaattgtatgtacttcaggaggttc

SEQ ID NO: 1184014 - DNA, 25 bp, Homo sapien
gccagtagttgcaaaatcaggatgt

SEQ ID NO: 1184015 - DNA, 25 bp, Homo sapien
gacagccgattcttttttaccatcc

SEQ ID NO: 1184016 - DNA, 25 bp, Homo sapien
tcttttggtaggttgggatacacat

SEQ ID NO: 1184017 - DNA, 25 bp, Homo sapien
tacacatgatgtccggaacaaacca

SEQ ID NO: 1184018 - DNA, 25 bp, Homo sapien
ggttctttatagtccctgctgtgga

SEQ ID NO: 1184019 - DNA, 25 bp, Homo sapien
ctgtgcggctgagttctgtggcaat

SEQ ID NO: 1184020 - DNA, 25 bp, Homo sapien
cacgctttccattgaatacacctgg

SEQ ID NO: 1184021 - DNA, 25 bp, Homo sapien
aggccaaccaccaggacacgctttc

SEQ ID NO: 1184022 - DNA, 25 bp, Homo sapien
tcagtaacgagagtcacccgagtac

SEQ ID NO: 1184023 - DNA, 25 bp, Homo sapien
taaaaaacaccaattcaaccatgaa

SEQ ID NO: 1184024 - DNA, 25 bp, Homo sapien
aacaccaattcaaccatgaaattag

SEQ ID NO: 1184025 - DNA, 25 bp, Homo sapien
aattcaaccatgaaattagtgacca

SEQ ID NO: 1184026 - DNA, 25 bp, Homo sapien
ccaattcaaccatgaaattagtgac

SEQ ID NO: 1184027 - DNA, 25 bp, Homo sapien
gataaccattgtcccagacccggct

SEQ ID NO: 1184028 - DNA, 25 bp, Homo sapien
taaattgttcttgaggaaggttcca

SEQ ID NO: 1184029 - DNA, 25 bp, Homo sapien
ttccaaatcgagtgacgagcagcat

SEQ ID NO: 1184030 - DNA, 25 bp, Homo sapien
tgcttcacgtacaaccagtcagaga

SEQ ID NO: 1184031 - DNA, 25 bp, Homo sapien
catagttttcatgcttgaatcttgc

SEQ ID NO: 1184032 - DNA, 25 bp, Homo sapien
taatatatgccagagccttagcaga

SEQ ID NO: 1184033 - DNA, 25 bp, Homo sapien
gacaggtagtagagcaagtggccaa

SEQ ID NO: 1184034 - DNA, 25 bp, Homo sapien
tgatgaaaacagctcgtaacttggg

SEQ ID NO: 1184035 - DNA, 25 bp, Homo sapien
tactcccgggactaattcctgaggc

SEQ ID NO: 1184036 - DNA, 25 bp, Homo sapien
attattggaagtgtaatatttccct

SEQ ID NO: 1184037 - DNA, 25 bp, Homo sapien
gagacaattattggaagtgtaatat

SEQ ID NO: 1184038 - DNA, 25 bp, Homo sapien
aaaacagagacaattattggaagtg

SEQ ID NO: 1184039 - DNA, 25 bp, Homo sapien
cagagacaattattggaagtgtaat

SEQ ID NO: 1184040 - DNA, 25 bp, Homo sapien
cacacagaatgcttgctgggagctc

SEQ ID NO: 1184041 - DNA, 25 bp, Homo sapien
tattacttgtgctgcccagcgggac

SEQ ID NO: 1184042 - DNA, 25 bp, Homo sapien
tgggagctcatcgttaaatacaggc

SEQ ID NO: 1184043 - DNA, 25 bp, Homo sapien
tcacgttaggctttacggacacaat

SEQ ID NO: 1184044 - DNA, 25 bp, Homo sapien
atcttcgcaatccatgagcctcttt

SEQ ID NO: 1184045 - DNA, 25 bp, Homo sapien
ctggcattcatcttcgcaatccatg

SEQ ID NO: 1184046 - DNA, 25 bp, Homo sapien
tcactggcattcatcttcgcaatcc

SEQ ID NO: 1184047 - DNA, 25 bp, Homo sapien
cattcatcttcgcaatccatgagcc

SEQ ID NO: 1184048 - DNA, 25 bp, Homo sapien
tggctacctggtcgtgtgatctgca

SEQ ID NO: 1184049 - DNA, 25 bp, Homo sapien
ctggctacctggtcgtgtgatctgc

SEQ ID NO: 1184050 - DNA, 25 bp, Homo sapien
ggctacctggtcgtgtgatctgcat

SEQ ID NO: 1184051 - DNA, 25 bp, Homo sapien
ttccatagaaggcaaagtacaagtt

SEQ ID NO: 1184052 - DNA, 25 bp, Homo sapien
tcttccatagaaggcaaagtacaag

SEQ ID NO: 1184053 - DNA, 25 bp, Homo sapien
gtcttccatagaaggcaaagtacaa

SEQ ID NO: 1184054 - DNA, 25 bp, Homo sapien
tccatagaaggcaaagtacaagttc

SEQ ID NO: 1184055 - DNA, 25 bp, Homo sapien
tccattttctcattaatatcattca

SEQ ID NO: 1184056 - DNA, 25 bp, Homo sapien
attttctcattaatatcattcatca

SEQ ID NO: 1184057 - DNA, 25 bp, Homo sapien
catttgcgctttttctccattttct

SEQ ID NO: 1184058 - DNA, 25 bp, Homo sapien
ctccattttctcattaatatcattc

SEQ ID NO: 1184059 - DNA, 25 bp, Homo sapien
cagagaaaatggctcgcaactttat

SEQ ID NO: 1184060 - DNA, 25 bp, Homo sapien
aatggctcgcaactttatatcagtg

SEQ ID NO: 1184061 - DNA, 25 bp, Homo sapien
aaaatggctcgcaactttatatcag

SEQ ID NO: 1184062 - DNA, 25 bp, Homo sapien
ccactgtggatacccaaactctgtg

SEQ ID NO: 1184063 - DNA, 25 bp, Homo sapien
cccaatgaaggaggagagttcatcc

SEQ ID NO: 1184064 - DNA, 25 bp, Homo sapien
aatctgtctgtatggtctcgctttt

SEQ ID NO: 1184065 - DNA, 25 bp, Homo sapien
tgggatgttgggctttgccccaatg

SEQ ID NO: 1184066 - DNA, 25 bp, Homo sapien
tctgtatggtctcgcttttgccaaa

SEQ ID NO: 1184067 - DNA, 25 bp, Homo sapien
tctgcatgggtttcaacgaccggtc

SEQ ID NO: 1184068 - DNA, 25 bp, Homo sapien
gcatgggtttcaacgaccggtccca

SEQ ID NO: 1184069 - DNA, 25 bp, Homo sapien
accggtcccactgggtcagtatggc

SEQ ID NO: 1184070 - DNA, 25 bp, Homo sapien
tcaacgaccggtcccactgggtcag

SEQ ID NO: 1184071 - DNA, 25 bp, Homo sapien
gagcttcagccaatggaaaaagaag

SEQ ID NO: 1184072 - DNA, 25 bp, Homo sapien
ataggaattgcaaagagcttcagcc

SEQ ID NO: 1184073 - DNA, 25 bp, Homo sapien
aaggaaaacagcgattaacagaata

SEQ ID NO: 1184074 - DNA, 25 bp, Homo sapien
cagcgattaacagaataggaattgc

SEQ ID NO: 1184075 - DNA, 25 bp, Homo sapien
taaagtggctatttcagagcctaga

SEQ ID NO: 1184076 - DNA, 25 bp, Homo sapien
gactaatgtctacagagtactgcaa

SEQ ID NO: 1184077 - DNA, 25 bp, Homo sapien
tcaaacagaaatgattagtgctctc

SEQ ID NO: 1184078 - DNA, 25 bp, Homo sapien
aaagcccctgtctgggtattgtcag

SEQ ID NO: 1184079 - DNA, 25 bp, Homo sapien
ccaagtattcccaaatgaagcaaaa

SEQ ID NO: 1184080 - DNA, 25 bp, Homo sapien
caagtattcccaaatgaagcaaaac

SEQ ID NO: 1184081 - DNA, 25 bp, Homo sapien
aggcacaggtttttcaactctcggc

SEQ ID NO: 1184082 - DNA, 25 bp, Homo sapien
tctcggctcaagtcatgccagacag

SEQ ID NO: 1184083 - DNA, 25 bp, Homo sapien
caactctcggctcaagtcatgccag

SEQ ID NO: 1184084 - DNA, 25 bp, Homo sapien
gtttttcaactctcggctcaagtca

SEQ ID NO: 1184085 - DNA, 25 bp, Homo sapien
taatgaccacaagatcaagggtagg

SEQ ID NO: 1184086 - DNA, 25 bp, Homo sapien
caataatgaccacaagatcaagggt

SEQ ID NO: 1184087 - DNA, 25 bp, Homo sapien
ccacaagatcaagggtagggatggt

SEQ ID NO: 1184088 - DNA, 25 bp, Homo sapien
tgaccacaagatcaagggtagggat

SEQ ID NO: 1184089 - DNA, 25 bp, Homo sapien
caggtctgatgcctaggttcacaaa

SEQ ID NO: 1184090 - DNA, 25 bp, Homo sapien
gcagtctgacatgcaaggtccatga

SEQ ID NO: 1184091 - DNA, 25 bp, Homo sapien
ggagatccctttacagtcagactgg

SEQ ID NO: 1184092 - DNA, 25 bp, Homo sapien
taggtccatgggaaagacttggagc

SEQ ID NO: 1184093 - DNA, 25 bp, Homo sapien
gacgctttggtatgctgagactaga

SEQ ID NO: 1184094 - DNA, 25 bp, Homo sapien
ggatcctcactcaaacataagaaga

SEQ ID NO: 1184095 - DNA, 25 bp, Homo sapien
cagccaaggtttatgtatcaggatc

SEQ ID NO: 1184096 - DNA, 25 bp, Homo sapien
gctctcaattgcagatgacgctttg

SEQ ID NO: 1184097 - DNA, 25 bp, Homo sapien
tcctccagacagcaccatatggcag

SEQ ID NO: 1184098 - DNA, 25 bp, Homo sapien
tgagaatttccacaggcctccaaca

SEQ ID NO: 1184099 - DNA, 25 bp, Homo sapien
caacatcatcgctcctttcaaagca

SEQ ID NO: 1184100 - DNA, 25 bp, Homo sapien
agctccgatgatgccaaccctcttg

SEQ ID NO: 1184101 - DNA, 25 bp, Homo sapien
ggtgttctaatgatgtgccactcac

SEQ ID NO: 1184102 - DNA, 25 bp, Homo sapien
cttccactggtgttctaatgatgtg

SEQ ID NO: 1184103 - DNA, 25 bp, Homo sapien
ctccttccactggtgttctaatgat

SEQ ID NO: 1184104 - DNA, 25 bp, Homo sapien
cactggtgttctaatgatgtgccac

SEQ ID NO: 1184105 - DNA, 25 bp, Homo sapien
gccctttacagcttggagatctgga

SEQ ID NO: 1184106 - DNA, 25 bp, Homo sapien
tgtgatctgccttctaaatctgaat

SEQ ID NO: 1184107 - DNA, 25 bp, Homo sapien
gggaagcccatggtatatttttgac

SEQ ID NO: 1184108 - DNA, 25 bp, Homo sapien
tccttttcaggacaaattttgctgg

SEQ ID NO: 1184109 - DNA, 25 bp, Homo sapien
ctttatatattcctggagcttgctg

SEQ ID NO: 1184110 - DNA, 25 bp, Homo sapien
tatatagtttgggtaatcatccgga

SEQ ID NO: 1184111 - DNA, 25 bp, Homo sapien
gataagggaagtctggaaagcacat

SEQ ID NO: 1184112 - DNA, 25 bp, Homo sapien
tacagactggtaaatgctggctctg

SEQ ID NO: 1184113 - DNA, 25 bp, Homo sapien
ccatttataattctacatgtgaaag

SEQ ID NO: 1184114 - DNA, 25 bp, Homo sapien
tttccatttataattctacatgtga

SEQ ID NO: 1184115 - DNA, 25 bp, Homo sapien
atttttccatttataattctacatg

SEQ ID NO: 1184116 - DNA, 25 bp, Homo sapien
tccatttataattctacatgtgaaa

SEQ ID NO: 1184117 - DNA, 25 bp, Homo sapien
tttcagtaacaacaacccattggcc

SEQ ID NO: 1184118 - DNA, 25 bp, Homo sapien
cttttcagtaacaacaacccattgg

SEQ ID NO: 1184119 - DNA, 25 bp, Homo sapien
gcccgtgactaagaagctgggacat

SEQ ID NO: 1184120 - DNA, 25 bp, Homo sapien
acccattggcccgtgactaagaagc

SEQ ID NO: 1184121 - DNA, 25 bp, Homo sapien
aaatagtagattcctgtttcccatc

SEQ ID NO: 1184122 - DNA, 25 bp, Homo sapien
tcaaaaatagtagattcctgtttcc

SEQ ID NO: 1184123 - DNA, 25 bp, Homo sapien
aaaatagtagattcctgtttcccat

SEQ ID NO: 1184124 - DNA, 25 bp, Homo sapien
tccgttggcagattggggtatacgt

SEQ ID NO: 1184125 - DNA, 25 bp, Homo sapien
gaatccgttggcagattggggtata

SEQ ID NO: 1184126 - DNA, 25 bp, Homo sapien
caggaaaggaatccgttggcagatt

SEQ ID NO: 1184127 - DNA, 25 bp, Homo sapien
gaaaggaatccgttggcagattggg

SEQ ID NO: 1184128 - DNA, 25 bp, Homo sapien
taagtggaacatggcaagttgtttg

SEQ ID NO: 1184129 - DNA, 25 bp, Homo sapien
ctaagtggaacatggcaagttgttt

SEQ ID NO: 1184130 - DNA, 25 bp, Homo sapien
gaacatggcaagttgtttgaactga

SEQ ID NO: 1184131 - DNA, 25 bp, Homo sapien
gtggaacatggcaagttgtttgaac

SEQ ID NO: 1184132 - DNA, 25 bp, Homo sapien
gtagttgcctcgaaactggtccagg

SEQ ID NO: 1184133 - DNA, 25 bp, Homo sapien
ggcttctggattcttataatcccgg

SEQ ID NO: 1184134 - DNA, 25 bp, Homo sapien
cggctgagctcaacagcaatgtcag

SEQ ID NO: 1184135 - DNA, 25 bp, Homo sapien
aatcccggctatggaggtagttgcc

SEQ ID NO: 1184136 - DNA, 25 bp, Homo sapien
ggtggggaaaagcaacacagatttc

SEQ ID NO: 1184137 - DNA, 25 bp, Homo sapien
aaagcaacacagatttcagcattac

SEQ ID NO: 1184138 - DNA, 25 bp, Homo sapien
gaaaagcaacacagatttcagcatt

SEQ ID NO: 1184139 - DNA, 25 bp, Homo sapien
gggaaaagcaacacagatttcagca

SEQ ID NO: 1184140 - DNA, 25 bp, Homo sapien
catcttctggacatataaccagtca

SEQ ID NO: 1184141 - DNA, 25 bp, Homo sapien
taaccagtcagagatgaatgaagga

SEQ ID NO: 1184142 - DNA, 25 bp, Homo sapien
gatgcaaagcgggtaacatacatca

SEQ ID NO: 1184143 - DNA, 25 bp, Homo sapien
tgaaggaaggacattccggagaaag

SEQ ID NO: 1184144 - DNA, 25 bp, Homo sapien
catcaggccatagttctcatgctta

SEQ ID NO: 1184145 - DNA, 25 bp, Homo sapien
ttaaaggcatcaggccatagttctc

SEQ ID NO: 1184146 - DNA, 25 bp, Homo sapien
tcaggccatagttctcatgcttaaa

SEQ ID NO: 1184147 - DNA, 25 bp, Homo sapien
ccatttaaaggcatcaggccatagt

SEQ ID NO: 1184148 - DNA, 25 bp, Homo sapien
cttacaaggtagcaaaacatagacc

SEQ ID NO: 1184149 - DNA, 25 bp, Homo sapien
aacatagaccacaatgaaacctgtt

SEQ ID NO: 1184150 - DNA, 25 bp, Homo sapien
catagaccacaatgaaacctgtttt

SEQ ID NO: 1184151 - DNA, 25 bp, Homo sapien
caaggtagcaaaacatagaccacaa

SEQ ID NO: 1184152 - DNA, 25 bp, Homo sapien
acagcaatgagaggcaaacaccctt

SEQ ID NO: 1184153 - DNA, 25 bp, Homo sapien
gctgtaaatagctcatttccaagaa

SEQ ID NO: 1184154 - DNA, 25 bp, Homo sapien
gcaatgagaggcaaacacccttgct

SEQ ID NO: 1184155 - DNA, 25 bp, Homo sapien
tgtaaatagctcatttccaagaaat

SEQ ID NO: 1184156 - DNA, 25 bp, Homo sapien
gcaaatactttagcagcccaccagg

SEQ ID NO: 1184157 - DNA, 25 bp, Homo sapien
tccaagggactgaaccaagccaatc

SEQ ID NO: 1184158 - DNA, 25 bp, Homo sapien
gagtcgatagcctcaaacatggtcc

SEQ ID NO: 1184159 - DNA, 25 bp, Homo sapien
tgggagctcatcattgaacacaggc

SEQ ID NO: 1184160 - DNA, 25 bp, Homo sapien
tccccattttctcatcagtgtcatc

SEQ ID NO: 1184161 - DNA, 25 bp, Homo sapien
atccatcatttcattcgtggttggc

SEQ ID NO: 1184162 - DNA, 25 bp, Homo sapien
tcattcgtggttggcagggtacatg

SEQ ID NO: 1184163 - DNA, 25 bp, Homo sapien
catttcattcgtggttggcagggta

SEQ ID NO: 1184164 - DNA, 25 bp, Homo sapien
ccaaacatgaagaaagaagagaaca

SEQ ID NO: 1184165 - DNA, 25 bp, Homo sapien
ggccaaacatgaagaaagaagagaa

SEQ ID NO: 1184166 - DNA, 25 bp, Homo sapien
ctggccaaacatgaagaaagaagag

SEQ ID NO: 1184167 - DNA, 25 bp, Homo sapien
aaacatgaagaaagaagagaacata

SEQ ID NO: 1184168 - DNA, 25 bp, Homo sapien
aggaagagccatggtatgttaggct

SEQ ID NO: 1184169 - DNA, 25 bp, Homo sapien
gctcatccacatatgtgatgtaatc

SEQ ID NO: 1184170 - DNA, 25 bp, Homo sapien
catggtatgttaggcttggccccta

SEQ ID NO: 1184171 - DNA, 25 bp, Homo sapien
gcccctatgaaagagcccagctcat

SEQ ID NO: 1184172 - DNA, 25 bp, Homo sapien
ctgcaagggccaaagtacacctcca

SEQ ID NO: 1184173 - DNA, 25 bp, Homo sapien
cctggtcccatcagtcgaaactggt

SEQ ID NO: 1184174 - DNA, 25 bp, Homo sapien
tcccatcagtcgaaactggtatggg

SEQ ID NO: 1184175 - DNA, 25 bp, Homo sapien
tccctggtcccatcagtcgaaactg

SEQ ID NO: 1184176 - DNA, 25 bp, Homo sapien
ggtcccatcagtcgaaactggtatg

SEQ ID NO: 1184177 - DNA, 25 bp, Homo sapien
aatgtaagtgtaacagccagaagga

SEQ ID NO: 1184178 - DNA, 25 bp, Homo sapien
cagaaggagtaatgggaatgaaagc

SEQ ID NO: 1184179 - DNA, 25 bp, Homo sapien
aagggatggggtcgctgaacttcac

SEQ ID NO: 1184180 - DNA, 25 bp, Homo sapien
ggagtaatgggaatgaaagcatttt

SEQ ID NO: 1184181 - DNA, 25 bp, Homo sapien
caaatgggccaagactgattttcat

SEQ ID NO: 1184182 - DNA, 25 bp, Homo sapien
ttcaaatgggccaagactgattttc

SEQ ID NO: 1184183 - DNA, 25 bp, Homo sapien
gtgttgtattgtgtgattacacttc

SEQ ID NO: 1184184 - DNA, 25 bp, Homo sapien
tgtgtgattacacttctatgctgaa

SEQ ID NO: 1184185 - DNA, 25 bp, Homo sapien
cactacagtctttgttgaggagaac

SEQ ID NO: 1184186 - DNA, 25 bp, Homo sapien
gaatgagattctcacaccctgaaac

SEQ ID NO: 1184187 - DNA, 25 bp, Homo sapien
caaataaactaagtctgaagggctc

SEQ ID NO: 1184188 - DNA, 25 bp, Homo sapien
ggagaacatccctctagtactaggt

SEQ ID NO: 1184189 - DNA, 25 bp, Homo sapien
ccatttatgagagaatcacttccca

SEQ ID NO: 1184190 - DNA, 25 bp, Homo sapien
gaaagggagcacgagaattgaagca

SEQ ID NO: 1184191 - DNA, 25 bp, Homo sapien
tcattctgcagacagtacaagaagc

SEQ ID NO: 1184192 - DNA, 25 bp, Homo sapien
ggtgaggcctcaagatgcttgcaat

SEQ ID NO: 1184193 - DNA, 25 bp, Homo sapien
tccctttctcatgtacagggcaaag

SEQ ID NO: 1184194 - DNA, 25 bp, Homo sapien
ctttgaactccctttgaactttgag

SEQ ID NO: 1184195 - DNA, 25 bp, Homo sapien
aaagcggctgagatctttgaactcc

SEQ ID NO: 1184196 - DNA, 25 bp, Homo sapien
gggacttttgcgattccattattct

SEQ ID NO: 1184197 - DNA, 25 bp, Homo sapien
tctattcccatagatgtgtctattt

SEQ ID NO: 1184198 - DNA, 25 bp, Homo sapien
gaattcaggaagactatagatatct

SEQ ID NO: 1184199 - DNA, 25 bp, Homo sapien
cagatcttggtgacctaataactac

SEQ ID NO: 1184200 - DNA, 25 bp, Homo sapien
tatcttgtggtttgaccttgcctct

SEQ ID NO: 1184201 - DNA, 25 bp, Homo sapien
catgtccacgagtgcgtgtgcgtac

SEQ ID NO: 1184202 - DNA, 25 bp, Homo sapien
tcatgtgcatgtccacgagtgcgtg

SEQ ID NO: 1184203 - DNA, 25 bp, Homo sapien
tgtgcatgtccacgagtgcgtgtgc

SEQ ID NO: 1184204 - DNA, 25 bp, Homo sapien
tgagtgtgtgtgtacgttcatgtgc

SEQ ID NO: 1184205 - DNA, 25 bp, Homo sapien
caagaacaggttgtcaacaggagta

SEQ ID NO: 1184206 - DNA, 25 bp, Homo sapien
aagtgggaacaagaacaggttgtca

SEQ ID NO: 1184207 - DNA, 25 bp, Homo sapien
gaacaagaacaggttgtcaacagga

SEQ ID NO: 1184208 - DNA, 25 bp, Homo sapien
caggttgtcaacaggagtaacttat

SEQ ID NO: 1184209 - DNA, 25 bp, Homo sapien
caaagggaagatatgcccaaaaggc

SEQ ID NO: 1184210 - DNA, 25 bp, Homo sapien
taccccagccaggagttaaagctca

SEQ ID NO: 1184211 - DNA, 25 bp, Homo sapien
gatcaataaagcatcgacatttggg

SEQ ID NO: 1184212 - DNA, 25 bp, Homo sapien
gcaaatcacagttccccactcagga

SEQ ID NO: 1184213 - DNA, 25 bp, Homo sapien
ccgtctctttgacagaatagttttc

SEQ ID NO: 1184214 - DNA, 25 bp, Homo sapien
gaggcagttggaagcgtttttaaga

SEQ ID NO: 1184215 - DNA, 25 bp, Homo sapien
tttctcccttggttgtgtgctggga

SEQ ID NO: 1184216 - DNA, 25 bp, Homo sapien
ccttttggcaccgtctctttgacag

SEQ ID NO: 1184217 - DNA, 25 bp, Homo sapien
ctgtcaaggagttgatcaatcaaca

SEQ ID NO: 1184218 - DNA, 25 bp, Homo sapien
caacattacttaactgggacaaccg

SEQ ID NO: 1184219 - DNA, 25 bp, Homo sapien
gatcaatcaacattacttaactggg

SEQ ID NO: 1184220 - DNA, 25 bp, Homo sapien
ctgggacaaccggtaagagaatcct

SEQ ID NO: 1184221 - DNA, 25 bp, Homo sapien
tcagagaaattaggccactgacccc

SEQ ID NO: 1184222 - DNA, 25 bp, Homo sapien
gctccaatcacagctaccttctttg

SEQ ID NO: 1184223 - DNA, 25 bp, Homo sapien
caagtgggctcaagtccctcatcca

SEQ ID NO: 1184224 - DNA, 25 bp, Homo sapien
tcttcagttctctcaaagcaagtgg

SEQ ID NO: 1184225 - DNA, 25 bp, Homo sapien
gagatcttttacatgcctgggtcag

SEQ ID NO: 1184226 - DNA, 25 bp, Homo sapien
caatatgacccatcagtaactgtga

SEQ ID NO: 1184227 - DNA, 25 bp, Homo sapien
tatgggctgtaagacaattgctgaa

SEQ ID NO: 1184228 - DNA, 25 bp, Homo sapien
gagatgccagcctatgacttcagtt

SEQ ID NO: 1184229 - DNA, 25 bp, Homo sapien
tctgttattattggccactagcgtt

SEQ ID NO: 1184230 - DNA, 25 bp, Homo sapien
tagcgttaaatttactaagccagcc

SEQ ID NO: 1184231 - DNA, 25 bp, Homo sapien
ggattgatatcctaattctgccacc

SEQ ID NO: 1184232 - DNA, 25 bp, Homo sapien
taagccagccatagttttgaatcag

SEQ ID NO: 1184233 - DNA, 25 bp, Homo sapien
gattgatagatacttgctcggccat

SEQ ID NO: 1184234 - DNA, 25 bp, Homo sapien
tggaaaatcttcaggcattggaaag

SEQ ID NO: 1184235 - DNA, 25 bp, Homo sapien
ccagaagtttagaattatgcaggaa

SEQ ID NO: 1184236 - DNA, 25 bp, Homo sapien
tctttgctggtgttggtaacgacag

SEQ ID NO: 1184237 - DNA, 25 bp, Homo sapien
taaatatgagctgaactaatgcaga

SEQ ID NO: 1184238 - DNA, 25 bp, Homo sapien
ctaaatatgagctgaactaatgcag

SEQ ID NO: 1184239 - DNA, 25 bp, Homo sapien
aaatatgagctgaactaatgcagag

SEQ ID NO: 1184240 - DNA, 25 bp, Homo sapien
atatgagctgaactaatgcagagaa

SEQ ID NO: 1184241 - DNA, 25 bp, Homo sapien
ctttaggttgtaagagattgcattc

SEQ ID NO: 1184242 - DNA, 25 bp, Homo sapien
gaagcacaggaaaaggtaattccaa

SEQ ID NO: 1184243 - DNA, 25 bp, Homo sapien
aaatgatctggccatctttaggttg

SEQ ID NO: 1184244 - DNA, 25 bp, Homo sapien
tcccacagccttctagtatgaacag

SEQ ID NO: 1184245 - DNA, 25 bp, Homo sapien
gcctcactaacagttatttatccag

SEQ ID NO: 1184246 - DNA, 25 bp, Homo sapien
cctcactaacagttatttatccaga

SEQ ID NO: 1184247 - DNA, 25 bp, Homo sapien
ctcactaacagttatttatccagaa

SEQ ID NO: 1184248 - DNA, 25 bp, Homo sapien
agcctcactaacagttatttatcca

SEQ ID NO: 1184249 - DNA, 25 bp, Homo sapien
ttgaagaaacacagagaaggcatca

SEQ ID NO: 1184250 - DNA, 25 bp, Homo sapien
tgaagaaacacagagaaggcatcat

SEQ ID NO: 1184251 - DNA, 25 bp, Homo sapien
cttgaagaaacacagagaaggcatc

SEQ ID NO: 1184252 - DNA, 25 bp, Homo sapien
gccactgcaaaccataactgcgtca

SEQ ID NO: 1184253 - DNA, 25 bp, Homo sapien
taactgcgtcaaagacagcactctg

SEQ ID NO: 1184254 - DNA, 25 bp, Homo sapien
tccattggccagaggatgagaaatc

SEQ ID NO: 1184255 - DNA, 25 bp, Homo sapien
tgctccttgccgttgctctgagtga

SEQ ID NO: 1184256 - DNA, 25 bp, Homo sapien
ccatctggatgcttgtattggcggc

SEQ ID NO: 1184257 - DNA, 25 bp, Homo sapien
agtttcccattccaatcaccaggat

SEQ ID NO: 1184258 - DNA, 25 bp, Homo sapien
cgttttccctcaaatccatctggat

SEQ ID NO: 1184259 - DNA, 25 bp, Homo sapien
cttactcagctcaacagcaatatct

SEQ ID NO: 1184260 - DNA, 25 bp, Homo sapien
ctacagcagggtggtctaacctgcc

SEQ ID NO: 1184261 - DNA, 25 bp, Homo sapien
ggtggtctaacctgccttaatgaca

SEQ ID NO: 1184262 - DNA, 25 bp, Homo sapien
gaaacatgaggatttaggctcaggc

SEQ ID NO: 1184263 - DNA, 25 bp, Homo sapien
tctctgagacgcatgttttaggtca

SEQ ID NO: 1184264 - DNA, 25 bp, Homo sapien
ttctttctcaggagcaaaccatgtt

SEQ ID NO: 1184265 - DNA, 25 bp, Homo sapien
tatgctctgcccgtttgattcactc

SEQ ID NO: 1184266 - DNA, 25 bp, Homo sapien
tgtttcaaatggtatgctctgcccg

SEQ ID NO: 1184267 - DNA, 25 bp, Homo sapien
caggagcaaaccatgtttcaaatgg

SEQ ID NO: 1184268 - DNA, 25 bp, Homo sapien
taaagtacttgaaatattgcctggc

SEQ ID NO: 1184269 - DNA, 25 bp, Homo sapien
cttgagaggtttggatacagactgc

SEQ ID NO: 1184270 - DNA, 25 bp, Homo sapien
cccttataggctgacttggcaatac

SEQ ID NO: 1184271 - DNA, 25 bp, Homo sapien
cattcctagcttgtgaagtagcacc

SEQ ID NO: 1184272 - DNA, 25 bp, Homo sapien
ttgcggagcatagaacgaaaccggg

SEQ ID NO: 1184273 - DNA, 25 bp, Homo sapien
tgttcgtggcagtacattgcggagc

SEQ ID NO: 1184274 - DNA, 25 bp, Homo sapien
tcagagatacggctcatgacccagg

SEQ ID NO: 1184275 - DNA, 25 bp, Homo sapien
cactgagtcccaaggatagccatct

SEQ ID NO: 1184276 - DNA, 25 bp, Homo sapien
cgtggcacttatgtcagatcttaga

SEQ ID NO: 1184277 - DNA, 25 bp, Homo sapien
ggcaggtcgtaatctcttgaaacag

SEQ ID NO: 1184278 - DNA, 25 bp, Homo sapien
gaatatggtagttgcacggcaggca

SEQ ID NO: 1184279 - DNA, 25 bp, Homo sapien
gggaagaaccttcatgctatagggt

SEQ ID NO: 1184280 - DNA, 25 bp, Homo sapien
tgcacgcgagggttgacttgtccag

SEQ ID NO: 1184281 - DNA, 25 bp, Homo sapien
gctggatgagaccaatgcacgcgag

SEQ ID NO: 1184282 - DNA, 25 bp, Homo sapien
tcttgtcacccaacgagcttgaagt

SEQ ID NO: 1184283 - DNA, 25 bp, Homo sapien
gagtagacgacttgggacatcatca

SEQ ID NO: 1184284 - DNA, 25 bp, Homo sapien
gagaaatgcagttatccaggacgtt

SEQ ID NO: 1184285 - DNA, 25 bp, Homo sapien
tcttctccaagagtaatggctcatc

SEQ ID NO: 1184286 - DNA, 25 bp, Homo sapien
gggtccctaaggatccatcagatga

SEQ ID NO: 1184287 - DNA, 25 bp, Homo sapien
caatgtcaaatagcatgtgcccttc

SEQ ID NO: 1184288 - DNA, 25 bp, Homo sapien
gaaccatgtcataccagtcagggct

SEQ ID NO: 1184289 - DNA, 25 bp, Homo sapien
catggactacaagtggagagggcca

SEQ ID NO: 1184290 - DNA, 25 bp, Homo sapien
tccagggtgcacagtctacggcatg

SEQ ID NO: 1184291 - DNA, 25 bp, Homo sapien
gaatagtaagtttgagtcaatatca

SEQ ID NO: 1184292 - DNA, 25 bp, Homo sapien
tccttttgataatgtccatcatcat

SEQ ID NO: 1184293 - DNA, 25 bp, Homo sapien
ccttttgataatgtccatcatcata

SEQ ID NO: 1184294 - DNA, 25 bp, Homo sapien
ttccttttgataatgtccatcatca

SEQ ID NO: 1184295 - DNA, 25 bp, Homo sapien
tggttcttgtaagtagttagatcac

SEQ ID NO: 1184296 - DNA, 25 bp, Homo sapien
ttatcaggcagctaggtggttcttg

SEQ ID NO: 1184297 - DNA, 25 bp, Homo sapien
taagtagttagatcactgtactttg

SEQ ID NO: 1184298 - DNA, 25 bp, Homo sapien
ggcagctaggtggttcttgtaagta

SEQ ID NO: 1184299 - DNA, 25 bp, Homo sapien
taaagtacctggcagtctggatggc

SEQ ID NO: 1184300 - DNA, 25 bp, Homo sapien
tttaagcggtggcaaatctccaggc

SEQ ID NO: 1184301 - DNA, 25 bp, Homo sapien
caagggtactcgatcactgttgaac

SEQ ID NO: 1184302 - DNA, 25 bp, Homo sapien
caagtacatgctagccagggcggct

SEQ ID NO: 1184303 - DNA, 25 bp, Homo sapien
taaaaagggaatgttcacagaatgt

SEQ ID NO: 1184304 - DNA, 25 bp, Homo sapien
aaagggaatgttcacagaatgttct

SEQ ID NO: 1184305 - DNA, 25 bp, Homo sapien
agtaaaaagggaatgttcacagaat

SEQ ID NO: 1184306 - DNA, 25 bp, Homo sapien
agggaatgttcacagaatgttctaa

SEQ ID NO: 1184307 - DNA, 25 bp, Homo sapien
tatctctaaggcgagctcgtccaag

SEQ ID NO: 1184308 - DNA, 25 bp, Homo sapien
gccagtttaggatctttgaacaaga

SEQ ID NO: 1184309 - DNA, 25 bp, Homo sapien
gcagaaatctggcttcgcacctatc

SEQ ID NO: 1184310 - DNA, 25 bp, Homo sapien
cataattggtctgcaacgtctggct

SEQ ID NO: 1184311 - DNA, 25 bp, Homo sapien
ctaataggagttgcagggtccgaaa

SEQ ID NO: 1184312 - DNA, 25 bp, Homo sapien
taataggagttgcagggtccgaaat

SEQ ID NO: 1184313 - DNA, 25 bp, Homo sapien
tgcagggtccgaaatagagtctcac

SEQ ID NO: 1184314 - DNA, 25 bp, Homo sapien
gagttgcagggtccgaaatagagtc

SEQ ID NO: 1184315 - DNA, 25 bp, Homo sapien
agcaagaaggcccaggattttcaac

SEQ ID NO: 1184316 - DNA, 25 bp, Homo sapien
ttagatgaatccttcagggcccgag

SEQ ID NO: 1184317 - DNA, 25 bp, Homo sapien
tcttgagtggcttcagtattctttg

SEQ ID NO: 1184318 - DNA, 25 bp, Homo sapien
tgaagttggcaaaaaaaggccacaa

SEQ ID NO: 1184319 - DNA, 25 bp, Homo sapien
caagtagggtggatagaagaccatc

SEQ ID NO: 1184320 - DNA, 25 bp, Homo sapien
tttggactcaggacagagcttatct

SEQ ID NO: 1184321 - DNA, 25 bp, Homo sapien
gatatgcacatagcacaatgtctgg

SEQ ID NO: 1184322 - DNA, 25 bp, Homo sapien
gtgatccccgactgagcaaatgaaa

SEQ ID NO: 1184323 - DNA, 25 bp, Homo sapien
tgacattccattgttctacgtccct

SEQ ID NO: 1184324 - DNA, 25 bp, Homo sapien
aaagttttaactacagagactgact

SEQ ID NO: 1184325 - DNA, 25 bp, Homo sapien
agttttaactacagagactgactga

SEQ ID NO: 1184326 - DNA, 25 bp, Homo sapien
attccattgttctacgtccctgagg

SEQ ID NO: 1184327 - DNA, 25 bp, Homo sapien
aaagttttaactacagagactgact

SEQ ID NO: 1184328 - DNA, 25 bp, Homo sapien
agttttaactacagagactgactga

SEQ ID NO: 1184329 - DNA, 25 bp, Homo sapien
attccattgttctacgtccctgagg

SEQ ID NO: 1184330 - DNA, 25 bp, Homo sapien
tgacattccattgttctacgtccct

SEQ ID NO: 1184331 - DNA, 25 bp, Homo sapien
attccattgttctacgtccctgagg

SEQ ID NO: 1184332 - DNA, 25 bp, Homo sapien
tgacattccattgttctacgtccct

SEQ ID NO: 1184333 - DNA, 25 bp, Homo sapien
aaagttttaactacagagactgact

SEQ ID NO: 1184334 - DNA, 25 bp, Homo sapien
agttttaactacagagactgactga

SEQ ID NO: 1184335 - DNA, 25 bp, Homo sapien
aaccaagaactaagtatatacctca

SEQ ID NO: 1184336 - DNA, 25 bp, Homo sapien
taaccaagaactaagtatatacctc

SEQ ID NO: 1184337 - DNA, 25 bp, Homo sapien
accaagaactaagtatatacctcat

SEQ ID NO: 1184338 - DNA, 25 bp, Homo sapien
atcttgcctgtaaattctggtgtaa

SEQ ID NO: 1184339 - DNA, 25 bp, Homo sapien
cagtggtaattcactgacccttgct

SEQ ID NO: 1184340 - DNA, 25 bp, Homo sapien
acagatagtgagctagatttggccc

SEQ ID NO: 1184341 - DNA, 25 bp, Homo sapien
tgtagaggctaggaaattcaagacc

SEQ ID NO: 1184342 - DNA, 25 bp, Homo sapien
gggaaatttcatgggctactctctg

SEQ ID NO: 1184343 - DNA, 25 bp, Homo sapien
tcagcagagatttccattcagtagg

SEQ ID NO: 1184344 - DNA, 25 bp, Homo sapien
cagagattctgttgcgactacccaa

SEQ ID NO: 1184345 - DNA, 25 bp, Homo sapien
gaaactatcataaagggaatagcta

SEQ ID NO: 1184346 - DNA, 25 bp, Homo sapien
tattacataccatggccctagtatt

SEQ ID NO: 1184347 - DNA, 25 bp, Homo sapien
ggttagtaaagggagccatcacaag

SEQ ID NO: 1184348 - DNA, 25 bp, Homo sapien
aagggagccatcacaaggagagatt

SEQ ID NO: 1184349 - DNA, 25 bp, Homo sapien
atgaatcagtatgagccagtgctgg

SEQ ID NO: 1184350 - DNA, 25 bp, Homo sapien
tgaatcagtatgagccagtgctggc

SEQ ID NO: 1184351 - DNA, 25 bp, Homo sapien
aatgaatcagtatgagccagtgctg

SEQ ID NO: 1184352 - DNA, 25 bp, Homo sapien
atttctggtgccaatggctctgcca

SEQ ID NO: 1184353 - DNA, 25 bp, Homo sapien
aatttctggtgccaatggctctgcc

SEQ ID NO: 1184354 - DNA, 25 bp, Homo sapien
ttgtaatttctggtgccaatggctc

SEQ ID NO: 1184355 - DNA, 25 bp, Homo sapien
gtaatttctggtgccaatggctctg

SEQ ID NO: 1184356 - DNA, 25 bp, Homo sapien
aatcagagattatatctggttactt

SEQ ID NO: 1184357 - DNA, 25 bp, Homo sapien
aaatcagagattatatctggttact

SEQ ID NO: 1184358 - DNA, 25 bp, Homo sapien
tcagagattatatctggttacttac

SEQ ID NO: 1184359 - DNA, 25 bp, Homo sapien
gaaatcagagattatatctggttac

SEQ ID NO: 1184360 - DNA, 25 bp, Homo sapien
cctccagggttggacagagaaagct

SEQ ID NO: 1184361 - DNA, 25 bp, Homo sapien
aggagtagctttatagctcctccag

SEQ ID NO: 1184362 - DNA, 25 bp, Homo sapien
tcctccagggttggacagagaaagc

SEQ ID NO: 1184363 - DNA, 25 bp, Homo sapien
aaggagtagctttatagctcctcca

SEQ ID NO: 1184364 - DNA, 25 bp, Homo sapien
aggtaagtatactgctgggtagatt

SEQ ID NO: 1184365 - DNA, 25 bp, Homo sapien
tgtcccattataagtatccaaacat

SEQ ID NO: 1184366 - DNA, 25 bp, Homo sapien
ctgctgggtagattattaagtggtt

SEQ ID NO: 1184367 - DNA, 25 bp, Homo sapien
ttgaatcaatgatattgtcccatta

SEQ ID NO: 1184368 - DNA, 25 bp, Homo sapien
gaccttttactggataaagtcttgc

SEQ ID NO: 1184369 - DNA, 25 bp, Homo sapien
aaggctgtagcttctggcagagctg

SEQ ID NO: 1184370 - DNA, 25 bp, Homo sapien
aagtcttgcacttcagactgagctg

SEQ ID NO: 1184371 - DNA, 25 bp, Homo sapien
tactggataaagtcttgcacttcag

SEQ ID NO: 1184372 - DNA, 25 bp, Homo sapien
gattaggcgatttgctcagtttgaa

SEQ ID NO: 1184373 - DNA, 25 bp, Homo sapien
agaatttggaagattaggcgatttg

SEQ ID NO: 1184374 - DNA, 25 bp, Homo sapien
tttggaagattaggcgatttgctca

SEQ ID NO: 1184375 - DNA, 25 bp, Homo sapien
tttttattcacaagctccaccccac

SEQ ID NO: 1184376 - DNA, 25 bp, Homo sapien
aggccaggccgctgaccccagctcc

SEQ ID NO: 1184377 - DNA, 25 bp, Homo sapien
aaggtcatcgctcctctcaaagcag

SEQ ID NO: 1184378 - DNA, 25 bp, Homo sapien
ccacaatggcaactcgcttggccat

SEQ ID NO: 1184379 - DNA, 25 bp, Homo sapien
gctcccacaatggcaactcgcttgg

SEQ ID NO: 1184380 - DNA, 25 bp, Homo sapien
gccattctccaatagacagataaag

SEQ ID NO: 1184381 - DNA, 25 bp, Homo sapien
tgccaagccattctccaatagacag

SEQ ID NO: 1184382 - DNA, 25 bp, Homo sapien
tcctcaaggccaccaacccttgtga

SEQ ID NO: 1184383 - DNA, 25 bp, Homo sapien
tctccaatagacagataaagttgtt

SEQ ID NO: 1184384 - DNA, 25 bp, Homo sapien
tccagtgttcgcctcactgtgcaat

SEQ ID NO: 1184385 - DNA, 25 bp, Homo sapien
ggtccaccagttgccttgaactccg

SEQ ID NO: 1184386 - DNA, 25 bp, Homo sapien
tcccacccgtgctgcagacactctg

SEQ ID NO: 1184387 - DNA, 25 bp, Homo sapien
aactccgagtgtggaagcacgtgcc

SEQ ID NO: 1184388 - DNA, 25 bp, Homo sapien
tgtgtttcagaaggtcaaagtggtt

SEQ ID NO: 1184389 - DNA, 25 bp, Homo sapien
ctgggaatggaaagtctgagtaaca

SEQ ID NO: 1184390 - DNA, 25 bp, Homo sapien
gagtaacaagacatctccttgcagc

SEQ ID NO: 1184391 - DNA, 25 bp, Homo sapien
ggaaaccacagacttgtagagactg

SEQ ID NO: 1184392 - DNA, 25 bp, Homo sapien
tatgggccactgcacgtgtccattc

SEQ ID NO: 1184393 - DNA, 25 bp, Homo sapien
caaggttctcttgtgtatgggccac

SEQ ID NO: 1184394 - DNA, 25 bp, Homo sapien
tcacatagcaaggttctcttgtgta

SEQ ID NO: 1184395 - DNA, 25 bp, Homo sapien
tagcaaggttctcttgtgtatgggc

SEQ ID NO: 1184396 - DNA, 25 bp, Homo sapien
catcatccttacctctgacagggga

SEQ ID NO: 1184397 - DNA, 25 bp, Homo sapien
cctggtgcagtatgcgggttgtaaa

SEQ ID NO: 1184398 - DNA, 25 bp, Homo sapien
gcttataggaaataattgttgttct

SEQ ID NO: 1184399 - DNA, 25 bp, Homo sapien
aaaagttgcagctgttttgtttaca

SEQ ID NO: 1184400 - DNA, 25 bp, Homo sapien
gaataccactctgtaattgcaaaaa

SEQ ID NO: 1184401 - DNA, 25 bp, Homo sapien
ataaagttaacacactaccgaatgt

SEQ ID NO: 1184402 - DNA, 25 bp, Homo sapien
ccgaatgtgtctttagatagccctc

SEQ ID NO: 1184403 - DNA, 25 bp, Homo sapien
tataaagttaacacactaccgaatg

SEQ ID NO: 1184404 - DNA, 25 bp, Homo sapien
ctcctggtggtgttttcaatagcca

SEQ ID NO: 1184405 - DNA, 25 bp, Homo sapien
aaacattggcaaaggagattctaag

SEQ ID NO: 1184406 - DNA, 25 bp, Homo sapien
cttgtcgggaagagcataagaagca

SEQ ID NO: 1184407 - DNA, 25 bp, Homo sapien
ctaaacattggcaaaggagattcta

SEQ ID NO: 1184408 - DNA, 25 bp, Homo sapien
ttggcaaaggagattctaagaagcc

SEQ ID NO: 1184409 - DNA, 25 bp, Homo sapien
tactgtgtccattgcaaaataagga

SEQ ID NO: 1184410 - DNA, 25 bp, Homo sapien
tggatgatgtcaggcaaaaagagag

SEQ ID NO: 1184411 - DNA, 25 bp, Homo sapien
tacatggatgatgtcaggcaaaaag

SEQ ID NO: 1184412 - DNA, 25 bp, Homo sapien
gacaaaccatattactctacccctg

SEQ ID NO: 1184413 - DNA, 25 bp, Homo sapien
attttgttacactgcagactttggt

SEQ ID NO: 1184414 - DNA, 25 bp, Homo sapien
cattttgttacactgcagactttgg

SEQ ID NO: 1184415 - DNA, 25 bp, Homo sapien
gaatccagtggcaaataaggattag

SEQ ID NO: 1184416 - DNA, 25 bp, Homo sapien
ctggaaaggaatccagtggcaaata

SEQ ID NO: 1184417 - DNA, 25 bp, Homo sapien
tgcagaccatgacagcatcaaagat

SEQ ID NO: 1184418 - DNA, 25 bp, Homo sapien
ccagtggcaaataaggattagtaag

SEQ ID NO: 1184419 - DNA, 25 bp, Homo sapien
aagttagttacagaaaatgctgtac

SEQ ID NO: 1184420 - DNA, 25 bp, Homo sapien
ttaaagttagttacagaaaatgctg

SEQ ID NO: 1184421 - DNA, 25 bp, Homo sapien
cttaaagttagttacagaaaatgct

SEQ ID NO: 1184422 - DNA, 25 bp, Homo sapien
taaagttagttacagaaaatgctgt

SEQ ID NO: 1184423 - DNA, 25 bp, Homo sapien
tatgaaagtactggcctttaaaggc

SEQ ID NO: 1184424 - DNA, 25 bp, Homo sapien
tatatctggatgcttatattgccgg

SEQ ID NO: 1184425 - DNA, 25 bp, Homo sapien
ttcccattccaatcacaaggactct

SEQ ID NO: 1184426 - DNA, 25 bp, Homo sapien
caatgtctgtgccagaatttcccat

SEQ ID NO: 1184427 - DNA, 25 bp, Homo sapien
tctcaacatgttctgaaagcgtgtc

SEQ ID NO: 1184428 - DNA, 25 bp, Homo sapien
gagtcaaagattcggctgatcaccc

SEQ ID NO: 1184429 - DNA, 25 bp, Homo sapien
catgtcccatgggtagcccgagtca

SEQ ID NO: 1184430 - DNA, 25 bp, Homo sapien
cagttgtttatctttcgctccatca

SEQ ID NO: 1184431 - DNA, 25 bp, Homo sapien
cccagtgatgatgcgtcctgggagc

SEQ ID NO: 1184432 - DNA, 25 bp, Homo sapien
tgaacactttcccagtgatgatgcg

SEQ ID NO: 1184433 - DNA, 25 bp, Homo sapien
tcttttatgcttggcctgatgaaca

SEQ ID NO: 1184434 - DNA, 25 bp, Homo sapien
tgggagctcatcatttagcacaaac

SEQ ID NO: 1184435 - DNA, 25 bp, Homo sapien
gaaagcaaatgtgtatccagtggca

SEQ ID NO: 1184436 - DNA, 25 bp, Homo sapien
cccaagggtttgatgaggccaataa

SEQ ID NO: 1184437 - DNA, 25 bp, Homo sapien
tatacttgtacagtgaggcctggcc

SEQ ID NO: 1184438 - DNA, 25 bp, Homo sapien
tcgaacagcccaccgagcttgtgtt

SEQ ID NO: 1184439 - DNA, 25 bp, Homo sapien
cctggtaataatgccgtcagctgaa

SEQ ID NO: 1184440 - DNA, 25 bp, Homo sapien
tgcacactagtctggacgagatagt

SEQ ID NO: 1184441 - DNA, 25 bp, Homo sapien
cagctgaaaagataagcatctggtc

SEQ ID NO: 1184442 - DNA, 25 bp, Homo sapien
gatccttctggcaaaaatgttagca

SEQ ID NO: 1184443 - DNA, 25 bp, Homo sapien
catgacacttggtggtggtaactta

SEQ ID NO: 1184444 - DNA, 25 bp, Homo sapien
aatttcctctatcatgacacttggt

SEQ ID NO: 1184445 - DNA, 25 bp, Homo sapien
tcctctatcatgacacttggtggtg

SEQ ID NO: 1184446 - DNA, 25 bp, Homo sapien
tatcatgacacttggtggtggtaac

SEQ ID NO: 1184447 - DNA, 25 bp, Homo sapien
tcctggcttaggaataggtgggact

SEQ ID NO: 1184448 - DNA, 25 bp, Homo sapien
cccctaaaattgtttgctgacatgc

SEQ ID NO: 1184449 - DNA, 25 bp, Homo sapien
acctggcccctaaaattgtttgctg

SEQ ID NO: 1184450 - DNA, 25 bp, Homo sapien
cctggcttaggaataggtgggacta

SEQ ID NO: 1184451 - DNA, 25 bp, Homo sapien
ctacctatctaacggtctccttctg

SEQ ID NO: 1184452 - DNA, 25 bp, Homo sapien
cctatctaacggtctccttctgttt

SEQ ID NO: 1184453 - DNA, 25 bp, Homo sapien
tagaacaagtacaagtgcccaaagc

SEQ ID NO: 1184454 - DNA, 25 bp, Homo sapien
aaaaaactgataatcttagaacaag

SEQ ID NO: 1184455 - DNA, 25 bp, Homo sapien
ccaaagaagacggtcagagccagat

SEQ ID NO: 1184456 - DNA, 25 bp, Homo sapien
ttcctgggccagtcaagcggaactg

SEQ ID NO: 1184457 - DNA, 25 bp, Homo sapien
cttgaatgttcggtcccactgggtc

SEQ ID NO: 1184458 - DNA, 25 bp, Homo sapien
ccagatgtggatccgttaggagcat

SEQ ID NO: 1184459 - DNA, 25 bp, Homo sapien
ttataggaaaatcagaaaaatagcc

SEQ ID NO: 1184460 - DNA, 25 bp, Homo sapien
tataggaaaatcagaaaaatagcca

SEQ ID NO: 1184461 - DNA, 25 bp, Homo sapien
ataggaaaatcagaaaaatagccac

SEQ ID NO: 1184462 - DNA, 25 bp, Homo sapien
gatggctcagagtgctgtcaagaac

SEQ ID NO: 1184463 - DNA, 25 bp, Homo sapien
taataagccagtactataagagcac

SEQ ID NO: 1184464 - DNA, 25 bp, Homo sapien
gtaaatctactctgtgcatcttcca

SEQ ID NO: 1184465 - DNA, 25 bp, Homo sapien
tatcattctctagcattagaagtgg

SEQ ID NO: 1184466 - DNA, 25 bp, Homo sapien
gaggccagctggagtaacagctttg

SEQ ID NO: 1184467 - DNA, 25 bp, Homo sapien
ccaggcaggtacagtcctttgggaa

SEQ ID NO: 1184468 - DNA, 25 bp, Homo sapien
ctcattgactctttaaaaggaggca

SEQ ID NO: 1184469 - DNA, 25 bp, Homo sapien
ggatctaagcaggtaggctttttcc

SEQ ID NO: 1184470 - DNA, 25 bp, Homo sapien
catggcgggagtgtctaataaaaca

SEQ ID NO: 1184471 - DNA, 25 bp, Homo sapien
tatgtttcttacatgccctgggtcc

SEQ ID NO: 1184472 - DNA, 25 bp, Homo sapien
ttttagaattggagccagggtacca

SEQ ID NO: 1184473 - DNA, 25 bp, Homo sapien
taagtgtgacatgctcagtaggtcc

SEQ ID NO: 1184474 - DNA, 25 bp, Homo sapien
cgtcttttctgttatgctagtgaca

SEQ ID NO: 1184475 - DNA, 25 bp, Homo sapien
aaacaaaagccattcgtcttttctg

SEQ ID NO: 1184476 - DNA, 25 bp, Homo sapien
ttatgctagtgacagcagaaagtat

SEQ ID NO: 1184477 - DNA, 25 bp, Homo sapien
aagccattcgtcttttctgttatgc

SEQ ID NO: 1184478 - DNA, 25 bp, Homo sapien
gaatttccaggccactaggtagagg

SEQ ID NO: 1184479 - DNA, 25 bp, Homo sapien
tggcctccaccaataagaatacttg

SEQ ID NO: 1184480 - DNA, 25 bp, Homo sapien
gctggcagatctttgctgtgctcta

SEQ ID NO: 1184481 - DNA, 25 bp, Homo sapien
ttctaatcagaaacaaatggcctcc

SEQ ID NO: 1184482 - DNA, 25 bp, Homo sapien
ttagaggaaagtcaagcagaacttc

SEQ ID NO: 1184483 - DNA, 25 bp, Homo sapien
ggaaagtcaagcagaacttctttat

SEQ ID NO: 1184484 - DNA, 25 bp, Homo sapien
tagaggaaagtcaagcagaacttct

SEQ ID NO: 1184485 - DNA, 25 bp, Homo sapien
gaggaaagtcaagcagaacttcttt

SEQ ID NO: 1184486 - DNA, 25 bp, Homo sapien
ctcacaccagctccaatcactgcaa

SEQ ID NO: 1184487 - DNA, 25 bp, Homo sapien
cactcacaccagctccaatcactgc

SEQ ID NO: 1184488 - DNA, 25 bp, Homo sapien
actcacaccagctccaatcactgca

SEQ ID NO: 1184489 - DNA, 25 bp, Homo sapien
gccactcacaccagctccaatcact

SEQ ID NO: 1184490 - DNA, 25 bp, Homo sapien
agcaaatggccagatcatgactgat

SEQ ID NO: 1184491 - DNA, 25 bp, Homo sapien
atgactgatagagatgaaccacgta

SEQ ID NO: 1184492 - DNA, 25 bp, Homo sapien
aaagcaaatggccagatcatgactg

SEQ ID NO: 1184493 - DNA, 25 bp, Homo sapien
aagcaaatggccagatcatgactga

SEQ ID NO: 1184494 - DNA, 25 bp, Homo sapien
tgctattcagtttgcctgatgttac

SEQ ID NO: 1184495 - DNA, 25 bp, Homo sapien
cagtttgcctgatgttacactctgc

SEQ ID NO: 1184496 - DNA, 25 bp, Homo sapien
gccagttctgttcctaaagacctga

SEQ ID NO: 1184497 - DNA, 25 bp, Homo sapien
caatgtctgggggttgtggttccac

SEQ ID NO: 1184498 - DNA, 25 bp, Homo sapien
tccatcagagatctattaatagcaa

SEQ ID NO: 1184499 - DNA, 25 bp, Homo sapien
tccacattaacatttggtggcttga

SEQ ID NO: 1184500 - DNA, 25 bp, Homo sapien
gggtcaaatagcagaagctacataa

SEQ ID NO: 1184501 - DNA, 25 bp, Homo sapien
tcctagggttatggttactcctgct

SEQ ID NO: 1184502 - DNA, 25 bp, Homo sapien
catagaagaatcatttactgcagcc

SEQ ID NO: 1184503 - DNA, 25 bp, Homo sapien
ccaaattaaatagggctctccaaga

SEQ ID NO: 1184504 - DNA, 25 bp, Homo sapien
gaaacccagcattaggtctctaagc

SEQ ID NO: 1184505 - DNA, 25 bp, Homo sapien
tttcattggcatggctactccctcc

SEQ ID NO: 1184506 - DNA, 25 bp, Homo sapien
tggaaagggaagtcactgtaacatg

SEQ ID NO: 1184507 - DNA, 25 bp, Homo sapien
tgtatttcaggaggtcaaagtgctc

SEQ ID NO: 1184508 - DNA, 25 bp, Homo sapien
gtcactaatgacttatagaccctgg

SEQ ID NO: 1184509 - DNA, 25 bp, Homo sapien
ttaggataatcttcgtggaaaggga

SEQ ID NO: 1184510 - DNA, 25 bp, Homo sapien
cccactgaccagtttcggagaagtc

SEQ ID NO: 1184511 - DNA, 25 bp, Homo sapien
aaagacagctctattttgcttgccc

SEQ ID NO: 1184512 - DNA, 25 bp, Homo sapien
ggacgcttcgttatgctgcacacag

SEQ ID NO: 1184513 - DNA, 25 bp, Homo sapien
tcaggaaatgtccagtgcaaaccat

SEQ ID NO: 1184514 - DNA, 25 bp, Homo sapien
gccagtctgacaccagcgtaaggga

SEQ ID NO: 1184515 - DNA, 25 bp, Homo sapien
gcaatttgaacacacgatgaggccc

SEQ ID NO: 1184516 - DNA, 25 bp, Homo sapien
cagatagtctgtgtggcgatgacct

SEQ ID NO: 1184517 - DNA, 25 bp, Homo sapien
gatgaggccctaacagatagtctgt

SEQ ID NO: 1184518 - DNA, 25 bp, Homo sapien
acagcaactggtgcttgtaaggccg

SEQ ID NO: 1184519 - DNA, 25 bp, Homo sapien
ggagaccactctgagcgagaccttc

SEQ ID NO: 1184520 - DNA, 25 bp, Homo sapien
tgacagtctaaaatggttgaggttg

SEQ ID NO: 1184521 - DNA, 25 bp, Homo sapien
tcccactgttgacaatacaagatct

SEQ ID NO: 1184522 - DNA, 25 bp, Homo sapien
tgtggatttagtacaaactgccttg

SEQ ID NO: 1184523 - DNA, 25 bp, Homo sapien
gaaaaagcatataacctccctctcc

SEQ ID NO: 1184524 - DNA, 25 bp, Homo sapien
aagggaagtcccacaactatggcag

SEQ ID NO: 1184525 - DNA, 25 bp, Homo sapien
tcactacgcagggatagggtctgtg

SEQ ID NO: 1184526 - DNA, 25 bp, Homo sapien
tgagctgccgttcgactgagttcca

SEQ ID NO: 1184527 - DNA, 25 bp, Homo sapien
ccaagaccaatcaccaagacgcgtt

SEQ ID NO: 1184528 - DNA, 25 bp, Homo sapien
accaagacgcgtttgccctgaaagc

SEQ ID NO: 1184529 - DNA, 25 bp, Homo sapien
aatgtctcctccagtgttcccaaga

SEQ ID NO: 1184530 - DNA, 25 bp, Homo sapien
taatttagcaattggccaatgtact

SEQ ID NO: 1184531 - DNA, 25 bp, Homo sapien
ataatttagcaattggccaatgtac

SEQ ID NO: 1184532 - DNA, 25 bp, Homo sapien
cccaatctgaagagcgcccaagaac

SEQ ID NO: 1184533 - DNA, 25 bp, Homo sapien
tattataaggatagccccaatctga

SEQ ID NO: 1184534 - DNA, 25 bp, Homo sapien
cagaacttgtgcaataaaactacag

SEQ ID NO: 1184535 - DNA, 25 bp, Homo sapien
ttagaaaacgtgaaggcagaacttg

SEQ ID NO: 1184536 - DNA, 25 bp, Homo sapien
agtgaagatcacaacatcaatgttt

SEQ ID NO: 1184537 - DNA, 25 bp, Homo sapien
gatacagtttggcagctcatcattc

SEQ ID NO: 1184538 - DNA, 25 bp, Homo sapien
gaggtttctgtaaattcaatcacgc

SEQ ID NO: 1184539 - DNA, 25 bp, Homo sapien
tagtgattgccccacagaggataca

SEQ ID NO: 1184540 - DNA, 25 bp, Homo sapien
gctctgtgcctgataagatggatcc

SEQ ID NO: 1184541 - DNA, 25 bp, Homo sapien
taaggccgatgatggctaatgtcgc

SEQ ID NO: 1184542 - DNA, 25 bp, Homo sapien
tgaatactcttgtgacccatcgtgc

SEQ ID NO: 1184543 - DNA, 25 bp, Homo sapien
cgctctctctaggtttaagggaaag

SEQ ID NO: 1184544 - DNA, 25 bp, Homo sapien
gggcaccaattttacgatccaaaga

SEQ ID NO: 1184545 - DNA, 25 bp, Homo sapien
tttacgatccaaagagaggactttc

SEQ ID NO: 1184546 - DNA, 25 bp, Homo sapien
ttagctaaatggcagggcaccaatt

SEQ ID NO: 1184547 - DNA, 25 bp, Homo sapien
caaagagaggactttcagtagagtc

SEQ ID NO: 1184548 - DNA, 25 bp, Homo sapien
cttttcagtagcctccatcatcaat

SEQ ID NO: 1184549 - DNA, 25 bp, Homo sapien
atcaatttttgggatggaggtatct

SEQ ID NO: 1184550 - DNA, 25 bp, Homo sapien
tgggatggaggtatcttacagagtc

SEQ ID NO: 1184551 - DNA, 25 bp, Homo sapien
ccatcatcaatttttgggatggagg

SEQ ID NO: 1184552 - DNA, 25 bp, Homo sapien
tgtaggttcttaaaaactcgagaga

SEQ ID NO: 1184553 - DNA, 25 bp, Homo sapien
gctgctgctgtagcgtgatggaggc

SEQ ID NO: 1184554 - DNA, 25 bp, Homo sapien
gctgctgtagcgtgatggaggcatt

SEQ ID NO: 1184555 - DNA, 25 bp, Homo sapien
tagcgtgatggaggcattgtatgta

SEQ ID NO: 1184556 - DNA, 25 bp, Homo sapien
ctgtagcgtgatggaggcattgtat

SEQ ID NO: 1184557 - DNA, 25 bp, Homo sapien
ggtggtgccctctgatggttacaaa

SEQ ID NO: 1184558 - DNA, 25 bp, Homo sapien
caaagaattgcaacagctcgattgg

SEQ ID NO: 1184559 - DNA, 25 bp, Homo sapien
cttagtttgcaagttcatcatagac

SEQ ID NO: 1184560 - DNA, 25 bp, Homo sapien
ttggcacggttataagaaaggatct

SEQ ID NO: 1184561 - DNA, 25 bp, Homo sapien
tcttcatctttgcatctttcatgac

SEQ ID NO: 1184562 - DNA, 25 bp, Homo sapien
ccttcttcatctttgcatctttcat

SEQ ID NO: 1184563 - DNA, 25 bp, Homo sapien
taccttcttcatctttgcatctttc

SEQ ID NO: 1184564 - DNA, 25 bp, Homo sapien
ctactaccttcttcatctttgcatc

SEQ ID NO: 1184565 - DNA, 25 bp, Homo sapien
aggcacagtgatcctagcatccaga

SEQ ID NO: 1184566 - DNA, 25 bp, Homo sapien
ggcacagtgatcctagcatccagat

SEQ ID NO: 1184567 - DNA, 25 bp, Homo sapien
cacagtgatcctagcatccagataa

SEQ ID NO: 1184568 - DNA, 25 bp, Homo sapien
cagtgatcctagcatccagataatt

SEQ ID NO: 1184569 - DNA, 25 bp, Homo sapien
aatcttctcaattgggacaccccac

SEQ ID NO: 1184570 - DNA, 25 bp, Homo sapien
tgtaaatcttctcaattgggacacc

SEQ ID NO: 1184571 - DNA, 25 bp, Homo sapien
aaatcttctcaattgggacacccca

SEQ ID NO: 1184572 - DNA, 25 bp, Homo sapien
taaatcttctcaattgggacacccc

SEQ ID NO: 1184573 - DNA, 25 bp, Homo sapien
tgtgggaaatggactctgcacacac

SEQ ID NO: 1184574 - DNA, 25 bp, Homo sapien
cacactaaactaacaatgcctctaa

SEQ ID NO: 1184575 - DNA, 25 bp, Homo sapien
cacacactaaactaacaatgcctct

SEQ ID NO: 1184576 - DNA, 25 bp, Homo sapien
agatgtgggaaatggactctgcaca

SEQ ID NO: 1184577 - DNA, 25 bp, Homo sapien
tttgctggtgtctttaaacactccc

SEQ ID NO: 1184578 - DNA, 25 bp, Homo sapien
ctttgctggtgtctttaaacactcc

SEQ ID NO: 1184579 - DNA, 25 bp, Homo sapien
cctatgcaggcagcgatatcatcca

SEQ ID NO: 1184580 - DNA, 25 bp, Homo sapien
tttgtgcctatgcaggcagcgatat

SEQ ID NO: 1184581 - DNA, 25 bp, Homo sapien
tgcctatgcaggcagcgatatcatc

SEQ ID NO: 1184582 - DNA, 25 bp, Homo sapien
tgtgcctatgcaggcagcgatatca

SEQ ID NO: 1184583 - DNA, 25 bp, Homo sapien
tagtctgggatccttgaggaacaga

SEQ ID NO: 1184584 - DNA, 25 bp, Homo sapien
atttacagataagtagaagagaggc

SEQ ID NO: 1184585 - DNA, 25 bp, Homo sapien
ccagggcccatgaggcggtactgat

SEQ ID NO: 1184586 - DNA, 25 bp, Homo sapien
ggcttggaggaatcagggacaattc

SEQ ID NO: 1184587 - DNA, 25 bp, Homo sapien
acattctgtcctgtagtttatctct

SEQ ID NO: 1184588 - DNA, 25 bp, Homo sapien
cattctgtcctgtagtttatctctc

SEQ ID NO: 1184589 - DNA, 25 bp, Homo sapien
gacattctgtcctgtagtttatctc

SEQ ID NO: 1184590 - DNA, 25 bp, Homo sapien
attctgtcctgtagtttatctctca

SEQ ID NO: 1184591 - DNA, 25 bp, Homo sapien
ttagcatgactttgtgtaacccttg

SEQ ID NO: 1184592 - DNA, 25 bp, Homo sapien
tggctaatagcagttatgatggaga

SEQ ID NO: 1184593 - DNA, 25 bp, Homo sapien
cagaggagggatgcacaagatactt

SEQ ID NO: 1184594 - DNA, 25 bp, Homo sapien
tacttggagatagaattagcatgac

SEQ ID NO: 1184595 - DNA, 25 bp, Homo sapien
tcactgaggtagcagggtagaagat

SEQ ID NO: 1184596 - DNA, 25 bp, Homo sapien
aataattcagataggagatgactgg

SEQ ID NO: 1184597 - DNA, 25 bp, Homo sapien
gtggcaagaaagagggtactgaaaa

SEQ ID NO: 1184598 - DNA, 25 bp, Homo sapien
ataatcactgaggtagcagggtaga

SEQ ID NO: 1184599 - DNA, 25 bp, Homo sapien
cccagccaaggactattatctctaa

SEQ ID NO: 1184600 - DNA, 25 bp, Homo sapien
gactattatctctaatcaagataga

SEQ ID NO: 1184601 - DNA, 25 bp, Homo sapien
aatgaaggattttatatgggagggt

SEQ ID NO: 1184602 - DNA, 25 bp, Homo sapien
cagccaaggactattatctctaatc

SEQ ID NO: 1184603 - DNA, 25 bp, Homo sapien
tatcaggcagtgtgtccgatgaaca

SEQ ID NO: 1184604 - DNA, 25 bp, Homo sapien
gaccactgttttccggatgaggaca

SEQ ID NO: 1184605 - DNA, 25 bp, Homo sapien
taatgttcacagtaaggtaggccct

SEQ ID NO: 1184606 - DNA, 25 bp, Homo sapien
gcaaggccactgtcgattcatcaaa

SEQ ID NO: 1184607 - DNA, 25 bp, Homo sapien
taagttccggatggcttattcaaac

SEQ ID NO: 1184608 - DNA, 25 bp, Homo sapien
gaagtgaataagttccggatggctt

SEQ ID NO: 1184609 - DNA, 25 bp, Homo sapien
aataagttccggatggcttattcaa

SEQ ID NO: 1184610 - DNA, 25 bp, Homo sapien
ctccaaagaagtgaataagttccgg

SEQ ID NO: 1184611 - DNA, 25 bp, Homo sapien
agaactgaggttgaaccaaacccat

SEQ ID NO: 1184612 - DNA, 25 bp, Homo sapien
agtgaaaggttctgttgcgggcttt

SEQ ID NO: 1184613 - DNA, 25 bp, Homo sapien
agcggacttttcctggtaccatttg

SEQ ID NO: 1184614 - DNA, 25 bp, Homo sapien
tttgagtcttcagacaggtgtctgt

SEQ ID NO: 1184615 - DNA, 25 bp, Homo sapien
tgatgttttgattctcagttaaaat

SEQ ID NO: 1184616 - DNA, 25 bp, Homo sapien
tgattctcagttaaaatgggttcac

SEQ ID NO: 1184617 - DNA, 25 bp, Homo sapien
actatttactatgatgttttgattc

SEQ ID NO: 1184618 - DNA, 25 bp, Homo sapien
ttttccatactatttactatgatgt

SEQ ID NO: 1184619 - DNA, 25 bp, Homo sapien
tggaacattcaattcactgatggaa

SEQ ID NO: 1184620 - DNA, 25 bp, Homo sapien
gcagtggctggcactggaacattca

SEQ ID NO: 1184621 - DNA, 25 bp, Homo sapien
ttcaactgaggcagtggctggcact

SEQ ID NO: 1184622 - DNA, 25 bp, Homo sapien
cattcaattcactgatggaaatcag

SEQ ID NO: 1184623 - DNA, 25 bp, Homo sapien
cttttgaactgttgctcacaggtag

SEQ ID NO: 1184624 - DNA, 25 bp, Homo sapien
tgtctattactgcatttgccacagt

SEQ ID NO: 1184625 - DNA, 25 bp, Homo sapien
ggaaagctactaatctggttcaggt

SEQ ID NO: 1184626 - DNA, 25 bp, Homo sapien
agggaaagctactaatctggttcag

SEQ ID NO: 1184627 - DNA, 25 bp, Homo sapien
ttgtcccagttatcccagggaaagc

SEQ ID NO: 1184628 - DNA, 25 bp, Homo sapien
gaaagctactaatctggttcaggtg

SEQ ID NO: 1184629 - DNA, 25 bp, Homo sapien
ccagagacaggcttttgatcaccac

SEQ ID NO: 1184630 - DNA, 25 bp, Homo sapien
gatcacgttcccaggaacgacgttg

SEQ ID NO: 1184631 - DNA, 25 bp, Homo sapien
caggaacgacgttggggtcagcttc

SEQ ID NO: 1184632 - DNA, 25 bp, Homo sapien
cccaggaacgacgttggggtcagct

SEQ ID NO: 1184633 - DNA, 25 bp, Homo sapien
gatttgagggggacactggttcttg

SEQ ID NO: 1184634 - DNA, 25 bp, Homo sapien
ttgagggggacactggttcttgtcc

SEQ ID NO: 1184635 - DNA, 25 bp, Homo sapien
tttgagggggacactggttcttgtc

SEQ ID NO: 1184636 - DNA, 25 bp, Homo sapien
atttgagggggacactggttcttgt

SEQ ID NO: 1184637 - DNA, 25 bp, Homo sapien
atgagatcttgacccagaagccaga

SEQ ID NO: 1184638 - DNA, 25 bp, Homo sapien
tgttccatgcatgagatcttgaccc

SEQ ID NO: 1184639 - DNA, 25 bp, Homo sapien
gctccccagggggaatgaaaatatc

SEQ ID NO: 1184640 - DNA, 25 bp, Homo sapien
tgcatgagatcttgacccagaagcc

SEQ ID NO: 1184641 - DNA, 25 bp, Homo sapien
ctctcaatgcggtagtttctggtgc

SEQ ID NO: 1184642 - DNA, 25 bp, Homo sapien
gctttcctccgctgctcaggatgct

SEQ ID NO: 1184643 - DNA, 25 bp, Homo sapien
aatcttgaggcagctcagacgcttt

SEQ ID NO: 1184644 - DNA, 25 bp, Homo sapien
tgggagagacagcaatcttgaggca

SEQ ID NO: 1184645 - DNA, 25 bp, Homo sapien
caggatacactgtaccccagtatta

SEQ ID NO: 1184646 - DNA, 25 bp, Homo sapien
ctccaggatacactgtaccccagta

SEQ ID NO: 1184647 - DNA, 25 bp, Homo sapien
ggatacactgtaccccagtattaat

SEQ ID NO: 1184648 - DNA, 25 bp, Homo sapien
tccaggatacactgtaccccagtat

SEQ ID NO: 1184649 - DNA, 25 bp, Homo sapien
cagtgaactgatatcgtgtgactgc

SEQ ID NO: 1184650 - DNA, 25 bp, Homo sapien
gtgaactgatatcgtgtgactgcac

SEQ ID NO: 1184651 - DNA, 25 bp, Homo sapien
aattagttgccaatcttttaaaatg

SEQ ID NO: 1184652 - DNA, 25 bp, Homo sapien
ttgcagtgaactgatatcgtgtgac

SEQ ID NO: 1184653 - DNA, 25 bp, Homo sapien
ttgtggagggagaagtggtgccaca

SEQ ID NO: 1184654 - DNA, 25 bp, Homo sapien
cttgtggagggagaagtggtgccac

SEQ ID NO: 1184655 - DNA, 25 bp, Homo sapien
tggagggagaagtggtgccacagga

SEQ ID NO: 1184656 - DNA, 25 bp, Homo sapien
tgtggagggagaagtggtgccacag

SEQ ID NO: 1184657 - DNA, 25 bp, Homo sapien
taagatcagacacgatggatttggc

SEQ ID NO: 1184658 - DNA, 25 bp, Homo sapien
tctccttaagatcagacacgatgga

SEQ ID NO: 1184659 - DNA, 25 bp, Homo sapien
ccttaagatcagacacgatggattt

SEQ ID NO: 1184660 - DNA, 25 bp, Homo sapien
cttctccttaagatcagacacgatg

SEQ ID NO: 1184661 - DNA, 25 bp, Homo sapien
gtggcggacaaatccaggcagcctg

SEQ ID NO: 1184662 - DNA, 25 bp, Homo sapien
caccctacagagctccaagactggg

SEQ ID NO: 1184663 - DNA, 25 bp, Homo sapien
tcatggcataacagggtggcggaca

SEQ ID NO: 1184664 - DNA, 25 bp, Homo sapien
tgaccttgagtccaccttatcttcc

SEQ ID NO: 1184665 - DNA, 25 bp, Homo sapien
atatgtcattcaggtccatttggtc

SEQ ID NO: 1184666 - DNA, 25 bp, Homo sapien
tgttataaatattgccactcctgct

SEQ ID NO: 1184667 - DNA, 25 bp, Homo sapien
catttggtctaaaacaagcttgtcc

SEQ ID NO: 1184668 - DNA, 25 bp, Homo sapien
tgtggcctaacatatctattctgga

SEQ ID NO: 1184669 - DNA, 25 bp, Homo sapien
ggattaccagtaggagccactgtgg

SEQ ID NO: 1184670 - DNA, 25 bp, Homo sapien
tattgtagtgaggtacattcctttt

SEQ ID NO: 1184671 - DNA, 25 bp, Homo sapien
ttttcatcattgagtatgatggctt

SEQ ID NO: 1184672 - DNA, 25 bp, Homo sapien
tggaaagtgtggatatccttgtctt

SEQ ID NO: 1184673 - DNA, 25 bp, Homo sapien
tgtgatctgcgttccccaagtctga

SEQ ID NO: 1184674 - DNA, 25 bp, Homo sapien
ttgaggcggtgtgatctgcgttccc

SEQ ID NO: 1184675 - DNA, 25 bp, Homo sapien
tgttttgtgagttgaggcggtgtga

SEQ ID NO: 1184676 - DNA, 25 bp, Homo sapien
tctgcgttccccaagtctgaatcat

SEQ ID NO: 1184677 - DNA, 25 bp, Homo sapien
cagctgcccctgtaagcagaacagg

SEQ ID NO: 1184678 - DNA, 25 bp, Homo sapien
agctttgctctataggactgtgttc

SEQ ID NO: 1184679 - DNA, 25 bp, Homo sapien
aggaggtgcctctttctactttgca

SEQ ID NO: 1184680 - DNA, 25 bp, Homo sapien
acagagaggctgagtaagttccagc

SEQ ID NO: 1184681 - DNA, 25 bp, Homo sapien
gctgtctgcattaaatactgcaatt

SEQ ID NO: 1184682 - DNA, 25 bp, Homo sapien
ttcatacagttttgtgagaacttct

SEQ ID NO: 1184683 - DNA, 25 bp, Homo sapien
attccatgagcacttcaaatgtagc

SEQ ID NO: 1184684 - DNA, 25 bp, Homo sapien
gatgatggcatgattgctgtctgca

SEQ ID NO: 1184685 - DNA, 25 bp, Homo sapien
gaggcaatttgttagtgaacttctg

SEQ ID NO: 1184686 - DNA, 25 bp, Homo sapien
tgtagccatgggaatattttgaggc

SEQ ID NO: 1184687 - DNA, 25 bp, Homo sapien
ttcatgacacaagccaactgtagcc

SEQ ID NO: 1184688 - DNA, 25 bp, Homo sapien
tacccaaggaataactttcatgaca

SEQ ID NO: 1184689 - DNA, 25 bp, Homo sapien
caaatgagtagcgataaaaggcact

SEQ ID NO: 1184690 - DNA, 25 bp, Homo sapien
tcagcaaatgagtagcgataaaagg

SEQ ID NO: 1184691 - DNA, 25 bp, Homo sapien
agcaaatgagtagcgataaaaggca

SEQ ID NO: 1184692 - DNA, 25 bp, Homo sapien
aatgagtagcgataaaaggcactga

SEQ ID NO: 1184693 - DNA, 25 bp, Homo sapien
tacagctatggattccaagtcaaga

SEQ ID NO: 1184694 - DNA, 25 bp, Homo sapien
gtcaagagggtgctgtgttgttaat

SEQ ID NO: 1184695 - DNA, 25 bp, Homo sapien
ctaagttcttacagctatggattcc

SEQ ID NO: 1184696 - DNA, 25 bp, Homo sapien
ttccaagtcaagagggtgctgtgtt

SEQ ID NO: 1184697 - DNA, 25 bp, Homo sapien
gcatctcatagattcatgtgaacac

SEQ ID NO: 1184698 - DNA, 25 bp, Homo sapien
aaggtttgaggttggcgcatctcat

SEQ ID NO: 1184699 - DNA, 25 bp, Homo sapien
tcagatgggtaatggaccacgtcat

SEQ ID NO: 1184700 - DNA, 25 bp, Homo sapien
gtaatggaccacgtcataacaaggt

SEQ ID NO: 1184701 - DNA, 25 bp, Homo sapien
gaaaagccgaagctgcggatggaca

SEQ ID NO: 1184702 - DNA, 25 bp, Homo sapien
agtttgcgcacttcgagggtctccg

SEQ ID NO: 1184703 - DNA, 25 bp, Homo sapien
tcagggtgagtgtcaagtttgcgca

SEQ ID NO: 1184704 - DNA, 25 bp, Homo sapien
aagcactttcgcagctttccgaggg

SEQ ID NO: 1184705 - DNA, 25 bp, Homo sapien
agctatgaacaagatactcatccca

SEQ ID NO: 1184706 - DNA, 25 bp, Homo sapien
aatgagccagaacttctgcattttc

SEQ ID NO: 1184707 - DNA, 25 bp, Homo sapien
attttcagctatgaacaagatactc

SEQ ID NO: 1184708 - DNA, 25 bp, Homo sapien
ggaatgagccagaacttctgcattt

SEQ ID NO: 1184709 - DNA, 25 bp, Homo sapien
cagacagggatataatataatcttc

SEQ ID NO: 1184710 - DNA, 25 bp, Homo sapien
cgatttaccgaaatgaaagtgtgtc

SEQ ID NO: 1184711 - DNA, 25 bp, Homo sapien
cataaatagcatccaaaacacaagt

SEQ ID NO: 1184712 - DNA, 25 bp, Homo sapien
aaggtgacaaaatcacgatttaccg

SEQ ID NO: 1184713 - DNA, 25 bp, Homo sapien
gctctggatcaataattcaaatgcc

SEQ ID NO: 1184714 - DNA, 25 bp, Homo sapien
cttaaaagctaagtaactttgagca

SEQ ID NO: 1184715 - DNA, 25 bp, Homo sapien
ttggaaaatactggccactaggaaa

SEQ ID NO: 1184716 - DNA, 25 bp, Homo sapien
ctcttccttttaggctttctgcaat

SEQ ID NO: 1184717 - DNA, 25 bp, Homo sapien
gcataaccatatatagcagccctgt

SEQ ID NO: 1184718 - DNA, 25 bp, Homo sapien
tctgtaagcagaacacaggctgact

SEQ ID NO: 1184719 - DNA, 25 bp, Homo sapien
cagattgttcactggcaaacaggga

SEQ ID NO: 1184720 - DNA, 25 bp, Homo sapien
ttccctctgcgaggcctaagctggg

SEQ ID NO: 1184721 - DNA, 25 bp, Homo sapien
cccaggacaccctattgatgctgaa

SEQ ID NO: 1184722 - DNA, 25 bp, Homo sapien
gacactcagtccatatgtagaacac

SEQ ID NO: 1184723 - DNA, 25 bp, Homo sapien
aacagggtcaccttaatgttgtcca

SEQ ID NO: 1184724 - DNA, 25 bp, Homo sapien
tgtagaacacagtgcgctaccctcc

SEQ ID NO: 1184725 - DNA, 25 bp, Homo sapien
gtccttaaaaagtacagctgttctg

SEQ ID NO: 1184726 - DNA, 25 bp, Homo sapien
ccgattacttaatgaggtgattgcc

SEQ ID NO: 1184727 - DNA, 25 bp, Homo sapien
aatatttagtagctaggtgaccaca

SEQ ID NO: 1184728 - DNA, 25 bp, Homo sapien
cactttgcaaccctgaacttgagct

SEQ ID NO: 1184729 - DNA, 25 bp, Homo sapien
caagctacaatctttagatacacag

SEQ ID NO: 1184730 - DNA, 25 bp, Homo sapien
caaatatttacccagtgtctaccat

SEQ ID NO: 1184731 - DNA, 25 bp, Homo sapien
agttcccctattcactcgtacaaat

SEQ ID NO: 1184732 - DNA, 25 bp, Homo sapien
tctcctttggccatctcatctgctg

SEQ ID NO: 1184733 - DNA, 25 bp, Homo sapien
ggacagcctcagcagaagttcaggg

SEQ ID NO: 1184734 - DNA, 25 bp, Homo sapien
tggcgtgtaccggtagttcaagcta

SEQ ID NO: 1184735 - DNA, 25 bp, Homo sapien
ctgaacagtgataacaaaaggacgt

SEQ ID NO: 1184736 - DNA, 25 bp, Homo sapien
gctatcctagattgaaactctctgg

SEQ ID NO: 1184737 - DNA, 25 bp, Homo sapien
ggttctatgactgactgagcaatgc

SEQ ID NO: 1184738 - DNA, 25 bp, Homo sapien
tcattgtaattagatgtatcaaaac

SEQ ID NO: 1184739 - DNA, 25 bp, Homo sapien
tatcaaaacaggtacacctcagctg

SEQ ID NO: 1184740 - DNA, 25 bp, Homo sapien
tgagcaatgctggtaagaaactagc

SEQ ID NO: 1184741 - DNA, 25 bp, Homo sapien
catgtaaaatgccacccaacgtttg

SEQ ID NO: 1184742 - DNA, 25 bp, Homo sapien
tccttgagacaaccgacaacctgaa

SEQ ID NO: 1184743 - DNA, 25 bp, Homo sapien
tcaagcagcactcttggtgaagacc

SEQ ID NO: 1184744 - DNA, 25 bp, Homo sapien
ttttaccccaagaccgctaatgatg

SEQ ID NO: 1184745 - DNA, 25 bp, Homo sapien
aactcatcgagtccaaaacctcctg

SEQ ID NO: 1184746 - DNA, 25 bp, Homo sapien
tggaaactcatcgagtccaaaacct

SEQ ID NO: 1184747 - DNA, 25 bp, Homo sapien
ggtggaaactcatcgagtccaaaac

SEQ ID NO: 1184748 - DNA, 25 bp, Homo sapien
ttcggtggaaactcatcgagtccaa

SEQ ID NO: 1184749 - DNA, 25 bp, Homo sapien
taatgatttccccttgtaagtatta

SEQ ID NO: 1184750 - DNA, 25 bp, Homo sapien
ttctaatgatttccccttgtaagta

SEQ ID NO: 1184751 - DNA, 25 bp, Homo sapien
aactgagtgttgcatactttttccc

SEQ ID NO: 1184752 - DNA, 25 bp, Homo sapien
attaaataaactgagtgttgcatac

SEQ ID NO: 1184753 - DNA, 25 bp, Homo sapien
ggtacatcctagcttctcatagcag

SEQ ID NO: 1184754 - DNA, 25 bp, Homo sapien
aaatgtgtgcatgcataaaaacgca

SEQ ID NO: 1184755 - DNA, 25 bp, Homo sapien
catagcagcaggtgtatcacttata

SEQ ID NO: 1184756 - DNA, 25 bp, Homo sapien
cattgactgagtttcccctttagag

SEQ ID NO: 1184757 - DNA, 25 bp, Homo sapien
ggcatacgccgtgaaataccgactt

SEQ ID NO: 1184758 - DNA, 25 bp, Homo sapien
tcttgttttgatgcccaccctgtgc

SEQ ID NO: 1184759 - DNA, 25 bp, Homo sapien
caccctgtgccatctttaggtacaa

SEQ ID NO: 1184760 - DNA, 25 bp, Homo sapien
cattaggatcattgcctttgttttc

SEQ ID NO: 1184761 - DNA, 25 bp, Homo sapien
gacagacatccttagtatcatggaa

SEQ ID NO: 1184762 - DNA, 25 bp, Homo sapien
tgagcacctatgaaacatcaggcag

SEQ ID NO: 1184763 - DNA, 25 bp, Homo sapien
cattcaattagctaagagtctggca

SEQ ID NO: 1184764 - DNA, 25 bp, Homo sapien
catggaatttaggtatcggagtcaa

SEQ ID NO: 1184765 - DNA, 25 bp, Homo sapien
tacctttgaataacccaatgagatg

SEQ ID NO: 1184766 - DNA, 25 bp, Homo sapien
gagggctaaagctaagcaaactccc

SEQ ID NO: 1184767 - DNA, 25 bp, Homo sapien
actggtgaaattagttgagggctaa

SEQ ID NO: 1184768 - DNA, 25 bp, Homo sapien
cacctggcagtcaacaggatcacca

SEQ ID NO: 1184769 - DNA, 25 bp, Homo sapien
tactggcccatgatttgggagcagg

SEQ ID NO: 1184770 - DNA, 25 bp, Homo sapien
tgatttgggagcaggtgctacttct

SEQ ID NO: 1184771 - DNA, 25 bp, Homo sapien
ctgcaaccccaggttttggctgtgc

SEQ ID NO: 1184772 - DNA, 25 bp, Homo sapien
cttgcttgttactggcccatgattt

SEQ ID NO: 1184773 - DNA, 25 bp, Homo sapien
tttgatgaataaagaccccaagatc

SEQ ID NO: 1184774 - DNA, 25 bp, Homo sapien
tctaagacagtaatctaccagtacc

SEQ ID NO: 1184775 - DNA, 25 bp, Homo sapien
taagatgaccatgcaagtgaagagc

SEQ ID NO: 1184776 - DNA, 25 bp, Homo sapien
aagctaatgatcagccatgaggaga

SEQ ID NO: 1184777 - DNA, 25 bp, Homo sapien
aaactgggtccaggtccatagttgt

SEQ ID NO: 1184778 - DNA, 25 bp, Homo sapien
tgtggaggaccacaagctatcctct

SEQ ID NO: 1184779 - DNA, 25 bp, Homo sapien
ccattcagtttagcctgtggaggac

SEQ ID NO: 1184780 - DNA, 25 bp, Homo sapien
gaggcatcatagctctatactggga

SEQ ID NO: 1184781 - DNA, 25 bp, Homo sapien
gatcagatgacgaaggtgagccagc

SEQ ID NO: 1184782 - DNA, 25 bp, Homo sapien
ccatgtagaggaggatatgtcatcc

SEQ ID NO: 1184783 - DNA, 25 bp, Homo sapien
tttgtttcagataaagaaggtggga

SEQ ID NO: 1184784 - DNA, 25 bp, Homo sapien
gaatctcatgggaccatgtagagga

SEQ ID NO: 1184785 - DNA, 25 bp, Homo sapien
tcatcctcggatactgttggaacat

SEQ ID NO: 1184786 - DNA, 25 bp, Homo sapien
aattatttactaatgacaactgtac

SEQ ID NO: 1184787 - DNA, 25 bp, Homo sapien
ctgtcttataagagttagccaatta

SEQ ID NO: 1184788 - DNA, 25 bp, Homo sapien
tctgttctgtcttataagagttagc

SEQ ID NO: 1184789 - DNA, 25 bp, Homo sapien
aaacgatcaattacacaactcagaa

SEQ ID NO: 1184790 - DNA, 25 bp, Homo sapien
caagctccttcagttctgatgcact

SEQ ID NO: 1184791 - DNA, 25 bp, Homo sapien
ggatgggcgttcaggctcagaggcc

SEQ ID NO: 1184792 - DNA, 25 bp, Homo sapien
gcactaagaatggatgggcgttcag

SEQ ID NO: 1184793 - DNA, 25 bp, Homo sapien
ccttcagttctgatgcactaagaat

SEQ ID NO: 1184794 - DNA, 25 bp, Homo sapien
gaaattcagttgctctgtataatct

SEQ ID NO: 1184795 - DNA, 25 bp, Homo sapien
tgctctgtataatctacttccatct

SEQ ID NO: 1184796 - DNA, 25 bp, Homo sapien
cagttgctctgtataatctacttcc

SEQ ID NO: 1184797 - DNA, 25 bp, Homo sapien
tttaggactgttacttccttgttca

SEQ ID NO: 1184798 - DNA, 25 bp, Homo sapien
gaaataaagtggaccaactgtatca

SEQ ID NO: 1184799 - DNA, 25 bp, Homo sapien
aaaatgcagaagaaataaagtggac

SEQ ID NO: 1184800 - DNA, 25 bp, Homo sapien
actgtatcataagtacacacattat

SEQ ID NO: 1184801 - DNA, 25 bp, Homo sapien
gaccaactgtatcataagtacacac

SEQ ID NO: 1184802 - DNA, 25 bp, Homo sapien
tttgggaagatgatttagtgttgga

SEQ ID NO: 1184803 - DNA, 25 bp, Homo sapien
ttcccatagggaacttttgctactg

SEQ ID NO: 1184804 - DNA, 25 bp, Homo sapien
gctactgatggttgggcaggtattt

SEQ ID NO: 1184805 - DNA, 25 bp, Homo sapien
cttttgctactgatggttgggcagg

SEQ ID NO: 1184806 - DNA, 25 bp, Homo sapien
ctgctgtgcaagcaactttggaggt

SEQ ID NO: 1184807 - DNA, 25 bp, Homo sapien
gcagatgtgaagatgttccacgttc

SEQ ID NO: 1184808 - DNA, 25 bp, Homo sapien
gtggcagatgtgaagatgttccacg

SEQ ID NO: 1184809 - DNA, 25 bp, Homo sapien
ctgtgcaagcaactttggaggtggt

SEQ ID NO: 1184810 - DNA, 25 bp, Homo sapien
gattgttgtcttcgtctttgcttcc

SEQ ID NO: 1184811 - DNA, 25 bp, Homo sapien
gatgccaagcttctcatccaatcgt

SEQ ID NO: 1184812 - DNA, 25 bp, Homo sapien
tcttcacgccgtttacgagcacgtt

SEQ ID NO: 1184813 - DNA, 25 bp, Homo sapien
tcagtttctccgcacaagctgcctt

SEQ ID NO: 1184814 - DNA, 25 bp, Homo sapien
ctctaaattaggttctctgggttca

SEQ ID NO: 1184815 - DNA, 25 bp, Homo sapien
gctctaaattaggttctctgggttc

SEQ ID NO: 1184816 - DNA, 25 bp, Homo sapien
tgggctctaaattaggttctctggg

SEQ ID NO: 1184817 - DNA, 25 bp, Homo sapien
catgggctctaaattaggttctctg

SEQ ID NO: 1184818 - DNA, 25 bp, Homo sapien
gggtacatctcactgataaacaagc

SEQ ID NO: 1184819 - DNA, 25 bp, Homo sapien
taaaatcacgtgtgtcttgagaaca

SEQ ID NO: 1184820 - DNA, 25 bp, Homo sapien
gagccaagtttgaaggtaaccctgc

SEQ ID NO: 1184821 - DNA, 25 bp, Homo sapien
tagaaaagagcatgagacgtcaggt

SEQ ID NO: 1184822 - DNA, 25 bp, Homo sapien
tgaaatagccagataatacagccgg

SEQ ID NO: 1184823 - DNA, 25 bp, Homo sapien
tggttctgtttcatgcaccactggt

SEQ ID NO: 1184824 - DNA, 25 bp, Homo sapien
gccggccgaggttgagaccctgatt

SEQ ID NO: 1184825 - DNA, 25 bp, Homo sapien
ctgccgctggaatcgtggaggtaaa

SEQ ID NO: 1184826 - DNA, 25 bp, Homo sapien
actcaagcactgtatgatctatctc

SEQ ID NO: 1184827 - DNA, 25 bp, Homo sapien
tactcaagcactgtatgatctatct

SEQ ID NO: 1184828 - DNA, 25 bp, Homo sapien
tatactcaagcactgtatgatctat

SEQ ID NO: 1184829 - DNA, 25 bp, Homo sapien
cttatactcaagcactgtatgatct

SEQ ID NO: 1184830 - DNA, 25 bp, Homo sapien
tgtggaagtacaccttgctgttgct

SEQ ID NO: 1184831 - DNA, 25 bp, Homo sapien
gtggaagtacaccttgctgttgctg

SEQ ID NO: 1184832 - DNA, 25 bp, Homo sapien
tggaagtacaccttgctgttgctgc

SEQ ID NO: 1184833 - DNA, 25 bp, Homo sapien
ctgtggaagtacaccttgctgttgc

SEQ ID NO: 1184834 - DNA, 25 bp, Homo sapien
cataggctgataaagaggtctgtgt

SEQ ID NO: 1184835 - DNA, 25 bp, Homo sapien
ctactggacggttgtgaaggaacag

SEQ ID NO: 1184836 - DNA, 25 bp, Homo sapien
aggatgaggctgcataggctgataa

SEQ ID NO: 1184837 - DNA, 25 bp, Homo sapien
agggacagtactactggacggttgt

SEQ ID NO: 1184838 - DNA, 25 bp, Homo sapien
catcattcgaggatccatgtaggac

SEQ ID NO: 1184839 - DNA, 25 bp, Homo sapien
gaatatccatagcaggtcttcctga

SEQ ID NO: 1184840 - DNA, 25 bp, Homo sapien
gatcaaaacccatagaagccaaatg

SEQ ID NO: 1184841 - DNA, 25 bp, Homo sapien
tcatgagccaccttggatcaaaacc

SEQ ID NO: 1184842 - DNA, 25 bp, Homo sapien
cagcatgaggatagggatctgaccc

SEQ ID NO: 1184843 - DNA, 25 bp, Homo sapien
actgttcggtgacccttccatctgg

SEQ ID NO: 1184844 - DNA, 25 bp, Homo sapien
gagtagttgcttgttgaggctcagc

SEQ ID NO: 1184845 - DNA, 25 bp, Homo sapien
tgctcaaatgactcagaactgttcg

SEQ ID NO: 1184846 - DNA, 25 bp, Homo sapien
gcaggaagttccaactgtatggcta

SEQ ID NO: 1184847 - DNA, 25 bp, Homo sapien
tgagtaagcttatctgtcccagtta

SEQ ID NO: 1184848 - DNA, 25 bp, Homo sapien
caataaagacatcccaagtggctgc

SEQ ID NO: 1184849 - DNA, 25 bp, Homo sapien
tatataagcattgtagatacaccta

SEQ ID NO: 1184850 - DNA, 25 bp, Homo sapien
gcagcagtaatctgttcctggtcca

SEQ ID NO: 1184851 - DNA, 25 bp, Homo sapien
gtctgcctttgggtgagcctctaat

SEQ ID NO: 1184852 - DNA, 25 bp, Homo sapien
taaggtcttttgatcaggtgcttca

SEQ ID NO: 1184853 - DNA, 25 bp, Homo sapien
ggtgaggtctaacatcttccacaga

SEQ ID NO: 1184854 - DNA, 25 bp, Homo sapien
gataatctcgagtgtgtcccctacc

SEQ ID NO: 1184855 - DNA, 25 bp, Homo sapien
gtcttgaatctggtcgaggcctctc

SEQ ID NO: 1184856 - DNA, 25 bp, Homo sapien
ggagtaatattcacctcggcctcga

SEQ ID NO: 1184857 - DNA, 25 bp, Homo sapien
tgttagagcttggtcgtgggcccca

SEQ ID NO: 1184858 - DNA, 25 bp, Homo sapien
gatcaaactgtgatagagcatccac

SEQ ID NO: 1184859 - DNA, 25 bp, Homo sapien
gtcaaccccagttgtgcctgcaggc

SEQ ID NO: 1184860 - DNA, 25 bp, Homo sapien
gctgccattgatgaggtcaacccca

SEQ ID NO: 1184861 - DNA, 25 bp, Homo sapien
ttcccagtagaatctttggagttct

SEQ ID NO: 1184862 - DNA, 25 bp, Homo sapien
tgtgtgtgtaaagcctatcttatta

SEQ ID NO: 1184863 - DNA, 25 bp, Homo sapien
catttccatgaaaggtctaagtcaa

SEQ ID NO: 1184864 - DNA, 25 bp, Homo sapien
cttcagactgatggaaagacctcat

SEQ ID NO: 1184865 - DNA, 25 bp, Homo sapien
tcaaaggatgtcatgcacacattac

SEQ ID NO: 1184866 - DNA, 25 bp, Homo sapien
aatttgactggggatcttcaattac

SEQ ID NO: 1184867 - DNA, 25 bp, Homo sapien
ttgactggggatcttcaattactgt

SEQ ID NO: 1184868 - DNA, 25 bp, Homo sapien
tcaaatttgactggggatcttcaat

SEQ ID NO: 1184869 - DNA, 25 bp, Homo sapien
tttgactggggatcttcaattactg

SEQ ID NO: 1184870 - DNA, 25 bp, Homo sapien
ttctttcggcgttcttcatcctgta

SEQ ID NO: 1184871 - DNA, 25 bp, Homo sapien
cttccttctttcggcgttcttcatc

SEQ ID NO: 1184872 - DNA, 25 bp, Homo sapien
ccttctttcggcgttcttcatcctg

SEQ ID NO: 1184873 - DNA, 25 bp, Homo sapien
tctttcggcgttcttcatcctgtaa

SEQ ID NO: 1184874 - DNA, 25 bp, Homo sapien
ccgaagctagaggtggaactgaggc

SEQ ID NO: 1184875 - DNA, 25 bp, Homo sapien
agactgtgcttgctggatccctgta

SEQ ID NO: 1184876 - DNA, 25 bp, Homo sapien
ttggcaaatcttggaggaagcttag

SEQ ID NO: 1184877 - DNA, 25 bp, Homo sapien
ggaagtggagccgaagctagaggtg

SEQ ID NO: 1184878 - DNA, 25 bp, Homo sapien
ttaaggttgccggaagtggagctga

SEQ ID NO: 1184879 - DNA, 25 bp, Homo sapien
tggagttaaggttgccggaagtgga

SEQ ID NO: 1184880 - DNA, 25 bp, Homo sapien
ggttgccggaagtggagctgaggtt

SEQ ID NO: 1184881 - DNA, 25 bp, Homo sapien
ctggagttaaggttgccggaagtgg

SEQ ID NO: 1184882 - DNA, 25 bp, Homo sapien
aaagttgaggctggaaccggagctg

SEQ ID NO: 1184883 - DNA, 25 bp, Homo sapien
ccagaactggagctaaagttgaggc

SEQ ID NO: 1184884 - DNA, 25 bp, Homo sapien
tggagctaaagttgaggctggaacc

SEQ ID NO: 1184885 - DNA, 25 bp, Homo sapien
gttgaggccagaactggagctaaag

SEQ ID NO: 1184886 - DNA, 25 bp, Homo sapien
ggctgaggctgggatagttggtgct

SEQ ID NO: 1184887 - DNA, 25 bp, Homo sapien
tgatgctagggctgaagcaagaatg

SEQ ID NO: 1184888 - DNA, 25 bp, Homo sapien
tgaggcaagaatggtgacagaagct

SEQ ID NO: 1184889 - DNA, 25 bp, Homo sapien
agctgaagaagaggttatagctgca

SEQ ID NO: 1184890 - DNA, 25 bp, Homo sapien
tctggactggtttgtgggtctgtgc

SEQ ID NO: 1184891 - DNA, 25 bp, Homo sapien
tggattctggactggtttgtgggtc

SEQ ID NO: 1184892 - DNA, 25 bp, Homo sapien
attctggactggtttgtgggtctgt

SEQ ID NO: 1184893 - DNA, 25 bp, Homo sapien
gtagtggattctggactggtttgtg

SEQ ID NO: 1184894 - DNA, 25 bp, Homo sapien
ctgtcagagtgccatgtgactgtgg

SEQ ID NO: 1184895 - DNA, 25 bp, Homo sapien
ctacataatctgtgccattaggtgt

SEQ ID NO: 1184896 - DNA, 25 bp, Homo sapien
gggccaccttgttatcccataattc

SEQ ID NO: 1184897 - DNA, 25 bp, Homo sapien
gccattaggtgtttgagctgaaggc

SEQ ID NO: 1184898 - DNA, 25 bp, Homo sapien
taatcaaatgagatatgcatgtaca

SEQ ID NO: 1184899 - DNA, 25 bp, Homo sapien
gaaagttgagaggattactattact

SEQ ID NO: 1184900 - DNA, 25 bp, Homo sapien
gaaacctcagtattcctatgccatt

SEQ ID NO: 1184901 - DNA, 25 bp, Homo sapien
gcagtgtccacaaactgtaatcaaa

SEQ ID NO: 1184902 - DNA, 25 bp, Homo sapien
ggagctgatccaaacgatgttaagg

SEQ ID NO: 1184903 - DNA, 25 bp, Homo sapien
tgaaggagctgatccaaacgatgtt

SEQ ID NO: 1184904 - DNA, 25 bp, Homo sapien
ggtggctgtggtggactaatgggac

SEQ ID NO: 1184905 - DNA, 25 bp, Homo sapien
caaacgatgttaagggcttattcca

SEQ ID NO: 1184906 - DNA, 25 bp, Homo sapien
ggctggagcaccaaactgaattgtg

SEQ ID NO: 1184907 - DNA, 25 bp, Homo sapien
ctttgataggtcctgctcgtggctg

SEQ ID NO: 1184908 - DNA, 25 bp, Homo sapien
tgtgtcagttccaatttcgagtcca

SEQ ID NO: 1184909 - DNA, 25 bp, Homo sapien
ttgtcagcagatttttccgaaagca

SEQ ID NO: 1184910 - DNA, 25 bp, Homo sapien
tatctggattataaagtatatttac

SEQ ID NO: 1184911 - DNA, 25 bp, Homo sapien
tgcttctgactgtagctgggcttgg

SEQ ID NO: 1184912 - DNA, 25 bp, Homo sapien
tttctactggactcaaatctggaag

SEQ ID NO: 1184913 - DNA, 25 bp, Homo sapien
tagtctcctttgtcgtgacaggatc

SEQ ID NO: 1184914 - DNA, 25 bp, Homo sapien
catattctgcagatgataccgagat

SEQ ID NO: 1184915 - DNA, 25 bp, Homo sapien
aagaagagggtgtagtatagtctgt

SEQ ID NO: 1184916 - DNA, 25 bp, Homo sapien
tgtattattagtagccacggtgtta

SEQ ID NO: 1184917 - DNA, 25 bp, Homo sapien
attattagtagccacggtgttaggc

SEQ ID NO: 1184918 - DNA, 25 bp, Homo sapien
gggtgtagtatagtctgttacagac

SEQ ID NO: 1184919 - DNA, 25 bp, Homo sapien
tgtatagtctccctcttagggaggg

SEQ ID NO: 1184920 - DNA, 25 bp, Homo sapien
tatagtctccctcttagggagggga

SEQ ID NO: 1184921 - DNA, 25 bp, Homo sapien
gttgtatagtctccctcttagggag

SEQ ID NO: 1184922 - DNA, 25 bp, Homo sapien
tgttgtatagtctccctcttaggga

SEQ ID NO: 1184923 - DNA, 25 bp, Homo sapien
gcttggtccactggcactactgctg

SEQ ID NO: 1184924 - DNA, 25 bp, Homo sapien
aattctcccatgctttgcgtgcaga

SEQ ID NO: 1184925 - DNA, 25 bp, Homo sapien
atggatgcacttgagaacgaattgt

SEQ ID NO: 1184926 - DNA, 25 bp, Homo sapien
tgtaattagcagtgcttggtccact

SEQ ID NO: 1184927 - DNA, 25 bp, Homo sapien
cagactgagacacataaacttgcgg

SEQ ID NO: 1184928 - DNA, 25 bp, Homo sapien
gctgggcaataagggaaggcataca

SEQ ID NO: 1184929 - DNA, 25 bp, Homo sapien
aaacttgcggattctgttgctgctg

SEQ ID NO: 1184930 - DNA, 25 bp, Homo sapien
caaatatttggagggtccgatgtgg

SEQ ID NO: 1184931 - DNA, 25 bp, Homo sapien
gaccatcaggataaacaagcagtag

SEQ ID NO: 1184932 - DNA, 25 bp, Homo sapien
ccatcaggataaacaagcagtagta

SEQ ID NO: 1184933 - DNA, 25 bp, Homo sapien
tcaggataaacaagcagtagtaagt

SEQ ID NO: 1184934 - DNA, 25 bp, Homo sapien
ggataaacaagcagtagtaagtgtc

SEQ ID NO: 1184935 - DNA, 25 bp, Homo sapien
gacttgtgtccatatagaaggctgg

SEQ ID NO: 1184936 - DNA, 25 bp, Homo sapien
aatgacttgtgtccatatagaaggc

SEQ ID NO: 1184937 - DNA, 25 bp, Homo sapien
cttgtgtccatatagaaggctggga

SEQ ID NO: 1184938 - DNA, 25 bp, Homo sapien
aataaatgacttgtgtccatataga

SEQ ID NO: 1184939 - DNA, 25 bp, Homo sapien
ttggaaaccctgttgttgagccaag

SEQ ID NO: 1184940 - DNA, 25 bp, Homo sapien
tgttgagccaaggatggcggagcca

SEQ ID NO: 1184941 - DNA, 25 bp, Homo sapien
ggttggaaaccctgttgttgagcca

SEQ ID NO: 1184942 - DNA, 25 bp, Homo sapien
tgagagagacctggttggaaaccct

SEQ ID NO: 1184943 - DNA, 25 bp, Homo sapien
gctgaacaattcctgagcctgggaa

SEQ ID NO: 1184944 - DNA, 25 bp, Homo sapien
agggattggaatctgctgaactgaa

SEQ ID NO: 1184945 - DNA, 25 bp, Homo sapien
ccaaactcagttgggcttgatgctg

SEQ ID NO: 1184946 - DNA, 25 bp, Homo sapien
tgatgctgcccttgcagtggtgcat

SEQ ID NO: 1184947 - DNA, 25 bp, Homo sapien
tcactgatacttggatgcactctaa

SEQ ID NO: 1184948 - DNA, 25 bp, Homo sapien
tatagctgcaggctatgccacctag

SEQ ID NO: 1184949 - DNA, 25 bp, Homo sapien
tacccacagtgtagtatagagtcca

SEQ ID NO: 1184950 - DNA, 25 bp, Homo sapien
taaaatgctgcacgggtttatagcc

SEQ ID NO: 1184951 - DNA, 25 bp, Homo sapien
tgtgtcaatcagctgggaacctcct

SEQ ID NO: 1184952 - DNA, 25 bp, Homo sapien
ccacagatggctgggataaactgct

SEQ ID NO: 1184953 - DNA, 25 bp, Homo sapien
caagaccggattgtgccttggcaag

SEQ ID NO: 1184954 - DNA, 25 bp, Homo sapien
tgaatagcagtaccagaaaggacca

SEQ ID NO: 1184955 - DNA, 25 bp, Homo sapien
aatttgtctgaccaggctgttgtac

SEQ ID NO: 1184956 - DNA, 25 bp, Homo sapien
gtgactgggcagtgttataaaaatt

SEQ ID NO: 1184957 - DNA, 25 bp, Homo sapien
tgtccagaataaagatttgaggcct

SEQ ID NO: 1184958 - DNA, 25 bp, Homo sapien
agcacttggtgactgggcagtgtta

SEQ ID NO: 1184959 - DNA, 25 bp, Homo sapien
tagaggttgccctgtagatccaaaa

SEQ ID NO: 1184960 - DNA, 25 bp, Homo sapien
gcttacttgtgcaggacgactcaga

SEQ ID NO: 1184961 - DNA, 25 bp, Homo sapien
gcaatcatgctatgctgtgttccag

SEQ ID NO: 1184962 - DNA, 25 bp, Homo sapien
aaagctgcgatgctggtaaaggtac

SEQ ID NO: 1184963 - DNA, 25 bp, Homo sapien
ttttatatcaatgccacttccaaag

SEQ ID NO: 1184964 - DNA, 25 bp, Homo sapien
cgattggaggtgtgcctggttttat

SEQ ID NO: 1184965 - DNA, 25 bp, Homo sapien
cagcgattggaggtgtgcctggttt

SEQ ID NO: 1184966 - DNA, 25 bp, Homo sapien
gcctggttttatatcaatgccactt

SEQ ID NO: 1184967 - DNA, 25 bp, Homo sapien
gactagatgttggtgtggtgcttct

SEQ ID NO: 1184968 - DNA, 25 bp, Homo sapien
ctagatgttggtgtggtgcttctac

SEQ ID NO: 1184969 - DNA, 25 bp, Homo sapien
actagatgttggtgtggtgcttcta

SEQ ID NO: 1184970 - DNA, 25 bp, Homo sapien
aggactagatgttggtgtggtgctt

SEQ ID NO: 1184971 - DNA, 25 bp, Homo sapien
ttactatgatgattaccaaaacatt

SEQ ID NO: 1184972 - DNA, 25 bp, Homo sapien
aatttactatgatgattaccaaaac

SEQ ID NO: 1184973 - DNA, 25 bp, Homo sapien
aaaaatttactatgatgattaccaa

SEQ ID NO: 1184974 - DNA, 25 bp, Homo sapien
tttactatgatgattaccaaaacat

SEQ ID NO: 1184975 - DNA, 25 bp, Homo sapien
gcaaacaccgttcttggtattttca

SEQ ID NO: 1184976 - DNA, 25 bp, Homo sapien
tgcaaacaccgttcttggtattttc

SEQ ID NO: 1184977 - DNA, 25 bp, Homo sapien
ctggctgttcggacttgtagaagta

SEQ ID NO: 1184978 - DNA, 25 bp, Homo sapien
ggctgttcggacttgtagaagtagc

SEQ ID NO: 1184979 - DNA, 25 bp, Homo sapien
tggctgttcggacttgtagaagtag

SEQ ID NO: 1184980 - DNA, 25 bp, Homo sapien
tggaactgcttctggtagacaatgc

SEQ ID NO: 1184981 - DNA, 25 bp, Homo sapien
aactgcttctggtagacaatgctgt

SEQ ID NO: 1184982 - DNA, 25 bp, Homo sapien
ctggaactgcttctggtagacaatg

SEQ ID NO: 1184983 - DNA, 25 bp, Homo sapien
gaactgcttctggtagacaatgctg

SEQ ID NO: 1184984 - DNA, 25 bp, Homo sapien
gggctcttaccaatggagggaccag

SEQ ID NO: 1184985 - DNA, 25 bp, Homo sapien
gtggggctcttaccaatggagggac

SEQ ID NO: 1184986 - DNA, 25 bp, Homo sapien
gaaggtgttagtatgtggggctctt

SEQ ID NO: 1184987 - DNA, 25 bp, Homo sapien
gggaaggtgttagtatgtggggctc

SEQ ID NO: 1184988 - DNA, 25 bp, Homo sapien
cacaaggacccctggctacatgtgg

SEQ ID NO: 1184989 - DNA, 25 bp, Homo sapien
ttgttcagccttcaacgcagcctgg

SEQ ID NO: 1184990 - DNA, 25 bp, Homo sapien
tacatgtggcaaacgagcatggctc

SEQ ID NO: 1184991 - DNA, 25 bp, Homo sapien
tgactccagatagtgatccacaagg

SEQ ID NO: 1184992 - DNA, 25 bp, Homo sapien
tagggatgtcgacccaaaaagacac

SEQ ID NO: 1184993 - DNA, 25 bp, Homo sapien
caggatcagaaacactagggatgtc

SEQ ID NO: 1184994 - DNA, 25 bp, Homo sapien
gatggaaatcctaggcatacagcct

SEQ ID NO: 1184995 - DNA, 25 bp, Homo sapien
ccaacatgggaatatgcgaaaatca

SEQ ID NO: 1184996 - DNA, 25 bp, Homo sapien
ctaggaccaaatgtcttgtggctga

SEQ ID NO: 1184997 - DNA, 25 bp, Homo sapien
cctaggaccaaatgtcttgtggctg

SEQ ID NO: 1184998 - DNA, 25 bp, Homo sapien
acctaggaccaaatgtcttgtggct

SEQ ID NO: 1184999 - DNA, 25 bp, Homo sapien
aaaacttctagttatcaatatgtgg

SEQ ID NO: 1185000 - DNA, 25 bp, Homo sapien
tacatgtaacacttaaaacttctag

SEQ ID NO: 1185001 - DNA, 25 bp, Homo sapien
agttatcaatatgtggtctacaata

SEQ ID NO: 1185002 - DNA, 25 bp, Homo sapien
ttctagttatcaatatgtggtctac

SEQ ID NO: 1185003 - DNA, 25 bp, Homo sapien
gcctgtcaaatcaatcttggttcaa

SEQ ID NO: 1185004 - DNA, 25 bp, Homo sapien
tactgcagcattaccaaagcctgtc

SEQ ID NO: 1185005 - DNA, 25 bp, Homo sapien
tgaaaatactgcagcattaccaaag

SEQ ID NO: 1185006 - DNA, 25 bp, Homo sapien
caaattcttttaccaatcacaaatc

SEQ ID NO: 1185007 - DNA, 25 bp, Homo sapien
cccaggagggtcggtcagtgtttca

SEQ ID NO: 1185008 - DNA, 25 bp, Homo sapien
ttgctgttcagagaagaaccgttgc

SEQ ID NO: 1185009 - DNA, 25 bp, Homo sapien
agaaccgttgcgtggactgaagaac

SEQ ID NO: 1185010 - DNA, 25 bp, Homo sapien
tcggtcagtgtttcaggaggtttac

SEQ ID NO: 1185011 - DNA, 25 bp, Homo sapien
taacgtttctagaccaatatggctg

SEQ ID NO: 1185012 - DNA, 25 bp, Homo sapien
tagctgggaccatcacactgttcag

SEQ ID NO: 1185013 - DNA, 25 bp, Homo sapien
tctgaacaggataatgtcacaggcc

SEQ ID NO: 1185014 - DNA, 25 bp, Homo sapien
caaagcctcgttttcactggtacag

SEQ ID NO: 1185015 - DNA, 25 bp, Homo sapien
cacgtggactttttgggtgtccagt

SEQ ID NO: 1185016 - DNA, 25 bp, Homo sapien
ggtttgcttatagactaccacagta

SEQ ID NO: 1185017 - DNA, 25 bp, Homo sapien
tgcttatagactaccacagtaaaat

SEQ ID NO: 1185018 - DNA, 25 bp, Homo sapien
cacagtaaaataagtcacgtggact

SEQ ID NO: 1185019 - DNA, 25 bp, Homo sapien
attgagcaatctaggggatacgtga

SEQ ID NO: 1185020 - DNA, 25 bp, Homo sapien
tgattgattgagcaatctaggggat

SEQ ID NO: 1185021 - DNA, 25 bp, Homo sapien
tgattgagcaatctaggggatacgt

SEQ ID NO: 1185022 - DNA, 25 bp, Homo sapien
attgattgagcaatctaggggatac

SEQ ID NO: 1185023 - DNA, 25 bp, Homo sapien
ccaaaatcacgaaattcaaaatccg

SEQ ID NO: 1185024 - DNA, 25 bp, Homo sapien
tttctctcttccctcatttcctcct

SEQ ID NO: 1185025 - DNA, 25 bp, Homo sapien
gtttctctcttccctcatttcctcc

SEQ ID NO: 1185026 - DNA, 25 bp, Homo sapien
tgagaaggtttctctcttccctcat

SEQ ID NO: 1185027 - DNA, 25 bp, Homo sapien
ctctcttccctcatttcctcctttt

SEQ ID NO: 1185028 - DNA, 25 bp, Homo sapien
tgctttccaagttttcattaatcca

SEQ ID NO: 1185029 - DNA, 25 bp, Homo sapien
tgacatcaagctctccaagatgtga

SEQ ID NO: 1185030 - DNA, 25 bp, Homo sapien
gatgtgaaaagcctccaagctgtac

SEQ ID NO: 1185031 - DNA, 25 bp, Homo sapien
agcctccaagctgtacaggcaatgg

SEQ ID NO: 1185032 - DNA, 25 bp, Homo sapien
tccatggccatctaccagttagtgg

SEQ ID NO: 1185033 - DNA, 25 bp, Homo sapien
cctaatgagcatccggtaccgctgg

SEQ ID NO: 1185034 - DNA, 25 bp, Homo sapien
ttagtggcaaagctcgaattctggc

SEQ ID NO: 1185035 - DNA, 25 bp, Homo sapien
tatattgaacaccaaacatggaagt

SEQ ID NO: 1185036 - DNA, 25 bp, Homo sapien
gccacaatgcttcaggaaagctcaa

SEQ ID NO: 1185037 - DNA, 25 bp, Homo sapien
ggaaagctcaatgaacccaacagcc

SEQ ID NO: 1185038 - DNA, 25 bp, Homo sapien
tgatcacgtcagactccaggaccga

SEQ ID NO: 1185039 - DNA, 25 bp, Homo sapien
acgtcagactccaggaccgagagcc

SEQ ID NO: 1185040 - DNA, 25 bp, Homo sapien
gggaaagctttcataacagtgatta

SEQ ID NO: 1185041 - DNA, 25 bp, Homo sapien
taacagtgattaggcagttgaccat

SEQ ID NO: 1185042 - DNA, 25 bp, Homo sapien
tcaaaattccgcaaatgcaggagga

SEQ ID NO: 1185043 - DNA, 25 bp, Homo sapien
aaaatcaaaattccgcaaatgcagg

SEQ ID NO: 1185044 - DNA, 25 bp, Homo sapien
taaacatagtgaggaacagattact

SEQ ID NO: 1185045 - DNA, 25 bp, Homo sapien
ggcactgaactacaattgctgatta

SEQ ID NO: 1185046 - DNA, 25 bp, Homo sapien
gctgattatcctttgcctacccaca

SEQ ID NO: 1185047 - DNA, 25 bp, Homo sapien
tctttgcccatagatctttctgctc

SEQ ID NO: 1185048 - DNA, 25 bp, Homo sapien
ttcagtcttgctggtgctaatagca

SEQ ID NO: 1185049 - DNA, 25 bp, Homo sapien
agctcggtagggagctagctggacc

SEQ ID NO: 1185050 - DNA, 25 bp, Homo sapien
agcacaggctggctagattctggga

SEQ ID NO: 1185051 - DNA, 25 bp, Homo sapien
ctagattctgggagacgaggagctc

SEQ ID NO: 1185052 - DNA, 25 bp, Homo sapien
tgacaagacgctagtcctgctgatg

SEQ ID NO: 1185053 - DNA, 25 bp, Homo sapien
ctgacaagacgctagtcctgctgat

SEQ ID NO: 1185054 - DNA, 25 bp, Homo sapien
caagacgctagtcctgctgatgggc

SEQ ID NO: 1185055 - DNA, 25 bp, Homo sapien
gacaagacgctagtcctgctgatgg

SEQ ID NO: 1185056 - DNA, 25 bp, Homo sapien
accttcaatgtcactgtcaccaaga

SEQ ID NO: 1185057 - DNA, 25 bp, Homo sapien
gtggagcccccaccttcaatgtcac

SEQ ID NO: 1185058 - DNA, 25 bp, Homo sapien
ccaccttcaatgtcactgtcaccaa

SEQ ID NO: 1185059 - DNA, 25 bp, Homo sapien
cggtggagcccccaccttcaatgtc

SEQ ID NO: 1185060 - DNA, 25 bp, Homo sapien
aattttgcatggatcttcgtatacc

SEQ ID NO: 1185061 - DNA, 25 bp, Homo sapien
ggaattttgcatggatcttcgtata

SEQ ID NO: 1185062 - DNA, 25 bp, Homo sapien
tttgcatggatcttcgtataccaag

SEQ ID NO: 1185063 - DNA, 25 bp, Homo sapien
ttttgcatggatcttcgtataccaa

SEQ ID NO: 1185064 - DNA, 25 bp, Homo sapien
tgccaagtgagaatcagaattagct

SEQ ID NO: 1185065 - DNA, 25 bp, Homo sapien
ggtgccaagtgagaatcagaattag

SEQ ID NO: 1185066 - DNA, 25 bp, Homo sapien
gtgccaagtgagaatcagaattagc

SEQ ID NO: 1185067 - DNA, 25 bp, Homo sapien
gccaagtgagaatcagaattagctg

SEQ ID NO: 1185068 - DNA, 25 bp, Homo sapien
taagcgagcagcagggtgttactga

SEQ ID NO: 1185069 - DNA, 25 bp, Homo sapien
tcagcagcataagcgagcagcaggg

SEQ ID NO: 1185070 - DNA, 25 bp, Homo sapien
tggtggaatgccatccacaacaacg

SEQ ID NO: 1185071 - DNA, 25 bp, Homo sapien
acgtctttaactctggctcccttca

SEQ ID NO: 1185072 - DNA, 25 bp, Homo sapien
acagtaggcttctattgacacccct

SEQ ID NO: 1185073 - DNA, 25 bp, Homo sapien
tcacatatacccactggctgatatc

SEQ ID NO: 1185074 - DNA, 25 bp, Homo sapien
tatcaggcgggcactacagtaggct

SEQ ID NO: 1185075 - DNA, 25 bp, Homo sapien
ggcttctattgacacccctgagggt

SEQ ID NO: 1185076 - DNA, 25 bp, Homo sapien
gttatgggactcaccattctggcca

SEQ ID NO: 1185077 - DNA, 25 bp, Homo sapien
ttgtggaggccgaatgttggcacca

SEQ ID NO: 1185078 - DNA, 25 bp, Homo sapien
gccgttaggatcatagagtgaacac

SEQ ID NO: 1185079 - DNA, 25 bp, Homo sapien
caaccaaaacctgatgccgttagga

SEQ ID NO: 1185080 - DNA, 25 bp, Homo sapien
cagccctcattgctatacatttttg

SEQ ID NO: 1185081 - DNA, 25 bp, Homo sapien
aggtcttgctccgtcatgtaagctg

SEQ ID NO: 1185082 - DNA, 25 bp, Homo sapien
ccctcattgctatacatttttgata

SEQ ID NO: 1185083 - DNA, 25 bp, Homo sapien
ggtcttgctccgtcatgtaagctgg

SEQ ID NO: 1185084 - DNA, 25 bp, Homo sapien
ttgaatgaatgtgcctatgaagcca

SEQ ID NO: 1185085 - DNA, 25 bp, Homo sapien
aaagcatgaccaacccaattacagg

SEQ ID NO: 1185086 - DNA, 25 bp, Homo sapien
tgtgaaccttggcagatgctagata

SEQ ID NO: 1185087 - DNA, 25 bp, Homo sapien
taagcttgttaaagtaagcaccaca

SEQ ID NO: 1185088 - DNA, 25 bp, Homo sapien
cagttaatcatacccctgaaatccg

SEQ ID NO: 1185089 - DNA, 25 bp, Homo sapien
gctacgttacataacttccgcggta

SEQ ID NO: 1185090 - DNA, 25 bp, Homo sapien
tcaaggataccagtaatccccaggt

SEQ ID NO: 1185091 - DNA, 25 bp, Homo sapien
agtcaccccacttacacagaaggag

SEQ ID NO: 1185092 - DNA, 25 bp, Homo sapien
agagacaggcccgaagctgctgaag

SEQ ID NO: 1185093 - DNA, 25 bp, Homo sapien
cctcagagacaggcccgaagctgct

SEQ ID NO: 1185094 - DNA, 25 bp, Homo sapien
tcagagacaggcccgaagctgctga

SEQ ID NO: 1185095 - DNA, 25 bp, Homo sapien
agacaggcccgaagctgctgaagtc

SEQ ID NO: 1185096 - DNA, 25 bp, Homo sapien
gatccacgcggatctggtgaccatc

SEQ ID NO: 1185097 - DNA, 25 bp, Homo sapien
catggctctcatggcgtctgggttg

SEQ ID NO: 1185098 - DNA, 25 bp, Homo sapien
cacgcggatctggtgaccatccagg

SEQ ID NO: 1185099 - DNA, 25 bp, Homo sapien
gcatgatccacgcggatctggtgac

SEQ ID NO: 1185100 - DNA, 25 bp, Homo sapien
ccatgggccccaaagtcacctcctc

SEQ ID NO: 1185101 - DNA, 25 bp, Homo sapien
tgccactcccatagtcctggttccc

SEQ ID NO: 1185102 - DNA, 25 bp, Homo sapien
agtagctgtgaccacgcccatgggc

SEQ ID NO: 1185103 - DNA, 25 bp, Homo sapien
aaagtcacctcctctggttccccag

SEQ ID NO: 1185104 - DNA, 25 bp, Homo sapien
tataccctccaggtcaactgtcata

SEQ ID NO: 1185105 - DNA, 25 bp, Homo sapien
ctataccctccaggtcaactgtcat

SEQ ID NO: 1185106 - DNA, 25 bp, Homo sapien
ataccctccaggtcaactgtcatac

SEQ ID NO: 1185107 - DNA, 25 bp, Homo sapien
taccctggcttctgacattatagtc

SEQ ID NO: 1185108 - DNA, 25 bp, Homo sapien
ttccttctgagtagcagtcataact

SEQ ID NO: 1185109 - DNA, 25 bp, Homo sapien
gcagtcataactaccctggcttctg

SEQ ID NO: 1185110 - DNA, 25 bp, Homo sapien
tccttctgagtagcagtcataacta

SEQ ID NO: 1185111 - DNA, 25 bp, Homo sapien
tctaaagtagtcaaatgatagaagc

SEQ ID NO: 1185112 - DNA, 25 bp, Homo sapien
tatctaaagtagtcaaatgatagaa

SEQ ID NO: 1185113 - DNA, 25 bp, Homo sapien
taaagtagtcaaatgatagaagcag

SEQ ID NO: 1185114 - DNA, 25 bp, Homo sapien
aaagtagtcaaatgatagaagcaga

SEQ ID NO: 1185115 - DNA, 25 bp, Homo sapien
ccatctgtgcctgcctcccttctgt

SEQ ID NO: 1185116 - DNA, 25 bp, Homo sapien
atctgtgcctgcctcccttctgtga

SEQ ID NO: 1185117 - DNA, 25 bp, Homo sapien
ctgtgcctgcctcccttctgtgagc

SEQ ID NO: 1185118 - DNA, 25 bp, Homo sapien
ttttccatctgtgcctgcctccctt

SEQ ID NO: 1185119 - DNA, 25 bp, Homo sapien
gcgtactggtagaggaggacgaaaa

SEQ ID NO: 1185120 - DNA, 25 bp, Homo sapien
gagcgtactggtagaggaggacgaa

SEQ ID NO: 1185121 - DNA, 25 bp, Homo sapien
gcaggcgggagcgtactggtagagg

SEQ ID NO: 1185122 - DNA, 25 bp, Homo sapien
cgggagcgtactggtagaggaggac

SEQ ID NO: 1185123 - DNA, 25 bp, Homo sapien
tgcgaagcctcgtgattcgtcggcc

SEQ ID NO: 1185124 - DNA, 25 bp, Homo sapien
cgaactagatttccgagcccataac

SEQ ID NO: 1185125 - DNA, 25 bp, Homo sapien
tgcgtttctatcacctcattggctg

SEQ ID NO: 1185126 - DNA, 25 bp, Homo sapien
ccataaccatatccgggtgcgaagc

SEQ ID NO: 1185127 - DNA, 25 bp, Homo sapien
gagataccatttgaggagcttgccc

SEQ ID NO: 1185128 - DNA, 25 bp, Homo sapien
caggctccgggacactgcagtggga

SEQ ID NO: 1185129 - DNA, 25 bp, Homo sapien
aaacagccacattgatttgttcccc

SEQ ID NO: 1185130 - DNA, 25 bp, Homo sapien
tcccctattccctgtgagataccat

SEQ ID NO: 1185131 - DNA, 25 bp, Homo sapien
aagaacttctcccaatagtcaacgg

SEQ ID NO: 1185132 - DNA, 25 bp, Homo sapien
gtaggttccataccactcgaaagct

SEQ ID NO: 1185133 - DNA, 25 bp, Homo sapien
cccgcacagttccaggtaggttcca

SEQ ID NO: 1185134 - DNA, 25 bp, Homo sapien
atatttatgtagcaccccgcacagt

SEQ ID NO: 1185135 - DNA, 25 bp, Homo sapien
agattcctgttaccagttcccacct

SEQ ID NO: 1185136 - DNA, 25 bp, Homo sapien
ggaaatgctgaaatatgcgtccaac

SEQ ID NO: 1185137 - DNA, 25 bp, Homo sapien
aatatgcgtccaactagggtcctcc

SEQ ID NO: 1185138 - DNA, 25 bp, Homo sapien
ggagcacgtacgaagggctaccaac

SEQ ID NO: 1185139 - DNA, 25 bp, Homo sapien
ttgatgacaacctcactgatgtcga

SEQ ID NO: 1185140 - DNA, 25 bp, Homo sapien
gatgtcgatgttcactatatcccga

SEQ ID NO: 1185141 - DNA, 25 bp, Homo sapien
catcatacagttgctcactcagttc

SEQ ID NO: 1185142 - DNA, 25 bp, Homo sapien
tatatcccgatagcccacatcatac

SEQ ID NO: 1185143 - DNA, 25 bp, Homo sapien
ttgtccaacaccacctggaacgagg

SEQ ID NO: 1185144 - DNA, 25 bp, Homo sapien
gcatcctgtccacctgttgtaaggt

SEQ ID NO: 1185145 - DNA, 25 bp, Homo sapien
gcatcaggaaactccatctgcgtca

SEQ ID NO: 1185146 - DNA, 25 bp, Homo sapien
cgtcgggtggcattacattccttca

SEQ ID NO: 1185147 - DNA, 25 bp, Homo sapien
acaggcttgcgctgctcctgagcac

SEQ ID NO: 1185148 - DNA, 25 bp, Homo sapien
tggctgttggccacttggtgcaccc

SEQ ID NO: 1185149 - DNA, 25 bp, Homo sapien
ggagatgcagagatagcgaccgccc

SEQ ID NO: 1185150 - DNA, 25 bp, Homo sapien
gctgcacagccaggcatactgctgt

SEQ ID NO: 1185151 - DNA, 25 bp, Homo sapien
gcaaaatgattgtcccgcgatggtt

SEQ ID NO: 1185152 - DNA, 25 bp, Homo sapien
gaaaatcgcaaaatgattgtcccgc

SEQ ID NO: 1185153 - DNA, 25 bp, Homo sapien
ttgtcccgcgatggtttcacagtgg

SEQ ID NO: 1185154 - DNA, 25 bp, Homo sapien
tgatgaaaatcgcaaaatgattgtc

SEQ ID NO: 1185155 - DNA, 25 bp, Homo sapien
gactctagccgacagctcagcttgg

SEQ ID NO: 1185156 - DNA, 25 bp, Homo sapien
cagcttggatgtggtccatgctttc

SEQ ID NO: 1185157 - DNA, 25 bp, Homo sapien
ggccactgtaatcaacctcctgaag

SEQ ID NO: 1185158 - DNA, 25 bp, Homo sapien
tgacctcggtgaagggccactgtaa

SEQ ID NO: 1185159 - DNA, 25 bp, Homo sapien
caatgacatagtcaccgctcaaggg

SEQ ID NO: 1185160 - DNA, 25 bp, Homo sapien
cagtcttggtgctgaacggtccgga

SEQ ID NO: 1185161 - DNA, 25 bp, Homo sapien
gtgagacacatccttcagcaacctg

SEQ ID NO: 1185162 - DNA, 25 bp, Homo sapien
gaagatcagtcgacggaagtatcgc

SEQ ID NO: 1185163 - DNA, 25 bp, Homo sapien
cagggtatcatactaaacggatggc

SEQ ID NO: 1185164 - DNA, 25 bp, Homo sapien
tgcattccccagcagtaaaaagtgc

SEQ ID NO: 1185165 - DNA, 25 bp, Homo sapien
tcttggcacatgaacacactaagcc

SEQ ID NO: 1185166 - DNA, 25 bp, Homo sapien
gtcttcatagggatcagctgcattc

SEQ ID NO: 1185167 - DNA, 25 bp, Homo sapien
gttgatagcttgaaactggccgtag

SEQ ID NO: 1185168 - DNA, 25 bp, Homo sapien
tgctatgtgatgtacctggtctccc

SEQ ID NO: 1185169 - DNA, 25 bp, Homo sapien
tatgcttagtacactagtcctcagg

SEQ ID NO: 1185170 - DNA, 25 bp, Homo sapien
gggtgccttccccatggtattgagt

SEQ ID NO: 1185171 - DNA, 25 bp, Homo sapien
caaggccagcgatcatggctttgtg

SEQ ID NO: 1185172 - DNA, 25 bp, Homo sapien
ctttgtggtgttcacaacacaggta

SEQ ID NO: 1185173 - DNA, 25 bp, Homo sapien
actcttatcaatggactgccccggg

SEQ ID NO: 1185174 - DNA, 25 bp, Homo sapien
tccgcatcagcaggccgctgcttct

SEQ ID NO: 1185175 - DNA, 25 bp, Homo sapien
ttatgctcccttctgtggaaggcag

SEQ ID NO: 1185176 - DNA, 25 bp, Homo sapien
tcttcaactacaatgcaagtgacac

SEQ ID NO: 1185177 - DNA, 25 bp, Homo sapien
ttaggtctgtaatctttatgctccc

SEQ ID NO: 1185178 - DNA, 25 bp, Homo sapien
caagtgacaccaattgtttaggtct

SEQ ID NO: 1185179 - DNA, 25 bp, Homo sapien
tttggaaaatgatcgtggacaaaga

SEQ ID NO: 1185180 - DNA, 25 bp, Homo sapien
ttggaaaatgatcgtggacaaagag

SEQ ID NO: 1185181 - DNA, 25 bp, Homo sapien
cttcattcggtcactctgggagaag

SEQ ID NO: 1185182 - DNA, 25 bp, Homo sapien
ttccaacatggagggatcgatctcc

SEQ ID NO: 1185183 - DNA, 25 bp, Homo sapien
ggccacttccaacatggagggatcg

SEQ ID NO: 1185184 - DNA, 25 bp, Homo sapien
acatggagggatcgatctccacagc

SEQ ID NO: 1185185 - DNA, 25 bp, Homo sapien
agctggcgatatagtccaggccatc

SEQ ID NO: 1185186 - DNA, 25 bp, Homo sapien
tgccaagctggcgatatagtccagg

SEQ ID NO: 1185187 - DNA, 25 bp, Homo sapien
ctggcgatatagtccaggccatctg

SEQ ID NO: 1185188 - DNA, 25 bp, Homo sapien
caagctggcgatatagtccaggcca

SEQ ID NO: 1185189 - DNA, 25 bp, Homo sapien
taattctagttgcagaaggcctatc

SEQ ID NO: 1185190 - DNA, 25 bp, Homo sapien
ccccaccccgatttgtgacaatgaa

SEQ ID NO: 1185191 - DNA, 25 bp, Homo sapien
gaccctgaggttgtataccactgat

SEQ ID NO: 1185192 - DNA, 25 bp, Homo sapien
agtgcccgtcctgaacattgtaaga

SEQ ID NO: 1185193 - DNA, 25 bp, Homo sapien
aaaagattgctccacaaatgctggg

SEQ ID NO: 1185194 - DNA, 25 bp, Homo sapien
tgcttttaaccttctgtagaaaaga

SEQ ID NO: 1185195 - DNA, 25 bp, Homo sapien
gggcggacaactcattcccagtgtt

SEQ ID NO: 1185196 - DNA, 25 bp, Homo sapien
gtgttgggtccttactgtcaacatc

SEQ ID NO: 1185197 - DNA, 25 bp, Homo sapien
gggaacattccaacattccatatga

SEQ ID NO: 1185198 - DNA, 25 bp, Homo sapien
aaagggaacattccaacattccata

SEQ ID NO: 1185199 - DNA, 25 bp, Homo sapien
aaaagggaacattccaacattccat

SEQ ID NO: 1185200 - DNA, 25 bp, Homo sapien
agggaacattccaacattccatatg

SEQ ID NO: 1185201 - DNA, 25 bp, Homo sapien
taagcgaattgtgttaagttacatg

SEQ ID NO: 1185202 - DNA, 25 bp, Homo sapien
tactagaatgttaatggcagcacca

SEQ ID NO: 1185203 - DNA, 25 bp, Homo sapien
ggcagcaccacttataatagaccca

SEQ ID NO: 1185204 - DNA, 25 bp, Homo sapien
aaagagtacattcagccaagttcag

SEQ ID NO: 1185205 - DNA, 25 bp, Homo sapien
agacatatgaaagacaaggatcggc

SEQ ID NO: 1185206 - DNA, 25 bp, Homo sapien
ggatcggctttgaggaaaataccaa

SEQ ID NO: 1185207 - DNA, 25 bp, Homo sapien
gtcagaatgacctcacatcaggaga

SEQ ID NO: 1185208 - DNA, 25 bp, Homo sapien
aaataccaattcctgtcccagggag

SEQ ID NO: 1185209 - DNA, 25 bp, Homo sapien
tcaattcgccggacatataggaggg

SEQ ID NO: 1185210 - DNA, 25 bp, Homo sapien
tctaggagctctggtgtggcaagtt

SEQ ID NO: 1185211 - DNA, 25 bp, Homo sapien
ccaagtctcggcacacaaggttgag

SEQ ID NO: 1185212 - DNA, 25 bp, Homo sapien
agcactgagtcttttagccccaagt

SEQ ID NO: 1185213 - DNA, 25 bp, Homo sapien
ttttcaccgtcttgagcatatctga

SEQ ID NO: 1185214 - DNA, 25 bp, Homo sapien
caattttcaccgtcttgagcatatc

SEQ ID NO: 1185215 - DNA, 25 bp, Homo sapien
tcacacaattttcaccgtcttgagc

SEQ ID NO: 1185216 - DNA, 25 bp, Homo sapien
tcaccgtcttgagcatatctgacaa

SEQ ID NO: 1185217 - DNA, 25 bp, Homo sapien
tgtgaaaccaagaaaaatacgaagc

SEQ ID NO: 1185218 - DNA, 25 bp, Homo sapien
tacgaagcttcaaaagtactgtgcg

SEQ ID NO: 1185219 - DNA, 25 bp, Homo sapien
ttcaggcaacctcaccaagctggag

SEQ ID NO: 1185220 - DNA, 25 bp, Homo sapien
caagctggaggtcacatgtagctga

SEQ ID NO: 1185221 - DNA, 25 bp, Homo sapien
tgtaaaccacttagaagaatgcctg

SEQ ID NO: 1185222 - DNA, 25 bp, Homo sapien
tagtctgccaggtctctaacatgca

SEQ ID NO: 1185223 - DNA, 25 bp, Homo sapien
gcagggaactccactcaaggacgtg

SEQ ID NO: 1185224 - DNA, 25 bp, Homo sapien
taggctacaaggtttgggtcaccaa

SEQ ID NO: 1185225 - DNA, 25 bp, Homo sapien
agacataccagctcaggcccagatg

SEQ ID NO: 1185226 - DNA, 25 bp, Homo sapien
acataccagctcaggcccagatgca

SEQ ID NO: 1185227 - DNA, 25 bp, Homo sapien
aagacataccagctcaggcccagat

SEQ ID NO: 1185228 - DNA, 25 bp, Homo sapien
tgaagacataccagctcaggcccag

SEQ ID NO: 1185229 - DNA, 25 bp, Homo sapien
ttttaaaacaacatgcctcaaagat

SEQ ID NO: 1185230 - DNA, 25 bp, Homo sapien
tttttaaaacaacatgcctcaaaga

SEQ ID NO: 1185231 - DNA, 25 bp, Homo sapien
ttttctgctccacttctgccatctt

SEQ ID NO: 1185232 - DNA, 25 bp, Homo sapien
ctgctttgctgctttttctgctcca

SEQ ID NO: 1185233 - DNA, 25 bp, Homo sapien
tgctgctttttctgctccacttctg

SEQ ID NO: 1185234 - DNA, 25 bp, Homo sapien
ttctgctccacttctgccatcttga

SEQ ID NO: 1185235 - DNA, 25 bp, Homo sapien
gcttcattcgctgctcgcatgacaa

SEQ ID NO: 1185236 - DNA, 25 bp, Homo sapien
gctgctcgcatgacaagtccagcag

SEQ ID NO: 1185237 - DNA, 25 bp, Homo sapien
ggtgcacgccacaggaggtgaactt

SEQ ID NO: 1185238 - DNA, 25 bp, Homo sapien
acggtgcagcttcattcgctgctcg

SEQ ID NO: 1185239 - DNA, 25 bp, Homo sapien
cccaccatgctacccaccgtcttgt

SEQ ID NO: 1185240 - DNA, 25 bp, Homo sapien
ccatgctacccaccgtcttgtctcc

SEQ ID NO: 1185241 - DNA, 25 bp, Homo sapien
caccatgctacccaccgtcttgtct

SEQ ID NO: 1185242 - DNA, 25 bp, Homo sapien
tgctacccaccgtcttgtctcccat

SEQ ID NO: 1185243 - DNA, 25 bp, Homo sapien
taggtgatcgaggtaatggccaatc

SEQ ID NO: 1185244 - DNA, 25 bp, Homo sapien
ggctctgatgcctggccgggcagtg

SEQ ID NO: 1185245 - DNA, 25 bp, Homo sapien
ccgggcagtgcttcacgagcttgta

SEQ ID NO: 1185246 - DNA, 25 bp, Homo sapien
taatggccaatcctctcgggcttgc

SEQ ID NO: 1185247 - DNA, 25 bp, Homo sapien
atttttgaaaggctgaacggcttgg

SEQ ID NO: 1185248 - DNA, 25 bp, Homo sapien
ttgaaaggctgaacggcttggtcat

SEQ ID NO: 1185249 - DNA, 25 bp, Homo sapien
ttttgaaaggctgaacggcttggtc

SEQ ID NO: 1185250 - DNA, 25 bp, Homo sapien
tttgaaaggctgaacggcttggtca

SEQ ID NO: 1185251 - DNA, 25 bp, Homo sapien
ctgcaggaggaggaggatctggtga

SEQ ID NO: 1185252 - DNA, 25 bp, Homo sapien
tgcaggaggaggaggatctggtgac

SEQ ID NO: 1185253 - DNA, 25 bp, Homo sapien
gcaggaggaggaggatctggtgacc

SEQ ID NO: 1185254 - DNA, 25 bp, Homo sapien
caatctcaatagagagcagtagtag

SEQ ID NO: 1185255 - DNA, 25 bp, Homo sapien
ctcaatagagagcagtagtaggact

SEQ ID NO: 1185256 - DNA, 25 bp, Homo sapien
gtaggactgaagagtcttgcagaac

SEQ ID NO: 1185257 - DNA, 25 bp, Homo sapien
atccaatctcaatagagagcagtag

SEQ ID NO: 1185258 - DNA, 25 bp, Homo sapien
tagttcattattaccacaggggtgg

SEQ ID NO: 1185259 - DNA, 25 bp, Homo sapien
agttcattattaccacaggggtggt

SEQ ID NO: 1185260 - DNA, 25 bp, Homo sapien
gtagttcattattaccacaggggtg

SEQ ID NO: 1185261 - DNA, 25 bp, Homo sapien
agtagttcattattaccacaggggt

SEQ ID NO: 1185262 - DNA, 25 bp, Homo sapien
tctgttactggttgtgatcgattgg

SEQ ID NO: 1185263 - DNA, 25 bp, Homo sapien
cgattggttgtaaacaccaccgcat

SEQ ID NO: 1185264 - DNA, 25 bp, Homo sapien
ggaacagagcaggaacaaaggaaca

SEQ ID NO: 1185265 - DNA, 25 bp, Homo sapien
aatgaagcagtgggaacagagcagg

SEQ ID NO: 1185266 - DNA, 25 bp, Homo sapien
tgcctgttacccgtgaggaccttcc

SEQ ID NO: 1185267 - DNA, 25 bp, Homo sapien
tcatcagagaagctacagtcacttg

SEQ ID NO: 1185268 - DNA, 25 bp, Homo sapien
gtctgtacctgcagacagctgtagc

SEQ ID NO: 1185269 - DNA, 25 bp, Homo sapien
agtaaacaaattggccccagccacg

SEQ ID NO: 1185270 - DNA, 25 bp, Homo sapien
tggctctgacagctaacgacccgca

SEQ ID NO: 1185271 - DNA, 25 bp, Homo sapien
tgacagctaacgacccgcagcgcgc

SEQ ID NO: 1185272 - DNA, 25 bp, Homo sapien
cagacgtcggagcccgccgccagcc

SEQ ID NO: 1185273 - DNA, 25 bp, Homo sapien
tctgacagctaacgacccgcagcgc

SEQ ID NO: 1185274 - DNA, 25 bp, Homo sapien
tgctcgcctctacgacctgacaggg

SEQ ID NO: 1185275 - DNA, 25 bp, Homo sapien
ctctacgacctgacagggagtaggg

SEQ ID NO: 1185276 - DNA, 25 bp, Homo sapien
agctggtccctgctcgcctctacga

SEQ ID NO: 1185277 - DNA, 25 bp, Homo sapien
ggccggcgaccagctggtccctgct

SEQ ID NO: 1185278 - DNA, 25 bp, Homo sapien
gcgtcctgcagacggttcaccagcg

SEQ ID NO: 1185279 - DNA, 25 bp, Homo sapien
gaaaacgcgtcctgcagacggttca

SEQ ID NO: 1185280 - DNA, 25 bp, Homo sapien
cagacggttcaccagcgggatcagc

SEQ ID NO: 1185281 - DNA, 25 bp, Homo sapien
cagcgccgaaaacgcgtcctgcaga

SEQ ID NO: 1185282 - DNA, 25 bp, Homo sapien
gggcactgggaagctttcggcgcgc

SEQ ID NO: 1185283 - DNA, 25 bp, Homo sapien
cacggagggcgacaggaaaaggagg

SEQ ID NO: 1185284 - DNA, 25 bp, Homo sapien
ctgggaagctttcggcgcgctacgc

SEQ ID NO: 1185285 - DNA, 25 bp, Homo sapien
tttcggcgcgctacgcagggaggct

SEQ ID NO: 1185286 - DNA, 25 bp, Homo sapien
gcttcaccacaacaaacgacgtctt

SEQ ID NO: 1185287 - DNA, 25 bp, Homo sapien
gggaagcgtctctggataaagcttc

SEQ ID NO: 1185288 - DNA, 25 bp, Homo sapien
ttattcttcgactctccgggaggag

SEQ ID NO: 1185289 - DNA, 25 bp, Homo sapien
ctgtgaataggtgcacacgcaaaca

SEQ ID NO: 1185290 - DNA, 25 bp, Homo sapien
tgtgcctcgggctctctcacaattg

SEQ ID NO: 1185291 - DNA, 25 bp, Homo sapien
ctgccaagtctgtgcctcgggctct

SEQ ID NO: 1185292 - DNA, 25 bp, Homo sapien
ctcgggctctctcacaattgcctga

SEQ ID NO: 1185293 - DNA, 25 bp, Homo sapien
aagtctgtgcctcgggctctctcac

SEQ ID NO: 1185294 - DNA, 25 bp, Homo sapien
gttccgagatgatgcaggaatgaca

SEQ ID NO: 1185295 - DNA, 25 bp, Homo sapien
tccgagatgatgcaggaatgacatg

SEQ ID NO: 1185296 - DNA, 25 bp, Homo sapien
tcagttccgagatgatgcaggaatg

SEQ ID NO: 1185297 - DNA, 25 bp, Homo sapien
cagttccgagatgatgcaggaatga

SEQ ID NO: 1185298 - DNA, 25 bp, Homo sapien
ggcgcagagagagtgcgagaaagat

SEQ ID NO: 1185299 - DNA, 25 bp, Homo sapien
cgcagagagagtgcgagaaagatgc

SEQ ID NO: 1185300 - DNA, 25 bp, Homo sapien
gagggggcgcagagagagtgcgaga

SEQ ID NO: 1185301 - DNA, 25 bp, Homo sapien
ggggcgcagagagagtgcgagaaag

SEQ ID NO: 1185302 - DNA, 25 bp, Homo sapien
ttcgtatgtccctacaatctggtgg

SEQ ID NO: 1185303 - DNA, 25 bp, Homo sapien
ctacaatctggtggacactcacaaa

SEQ ID NO: 1185304 - DNA, 25 bp, Homo sapien
aatctggtggacactcacaaaagca

SEQ ID NO: 1185305 - DNA, 25 bp, Homo sapien
cagtcttttctcttcgtatgtccct

SEQ ID NO: 1185306 - DNA, 25 bp, Homo sapien
ctgtggcacactttgaacaaatatg

SEQ ID NO: 1185307 - DNA, 25 bp, Homo sapien
tggcacactttgaacaaatatgcag

SEQ ID NO: 1185308 - DNA, 25 bp, Homo sapien
ctttgaacaaatatgcagggaccac

SEQ ID NO: 1185309 - DNA, 25 bp, Homo sapien
cactttgaacaaatatgcagggacc

SEQ ID NO: 1185310 - DNA, 25 bp, Homo sapien
aatttgtcttaaatggtatgccaag

SEQ ID NO: 1185311 - DNA, 25 bp, Homo sapien
aacaggcttcagttataggtttttg

SEQ ID NO: 1185312 - DNA, 25 bp, Homo sapien
tgtaatttgtcttaaatggtatgcc

SEQ ID NO: 1185313 - DNA, 25 bp, Homo sapien
ttgtcttaaatggtatgccaagaaa

SEQ ID NO: 1185314 - DNA, 25 bp, Homo sapien
cagtttgtcctctaggctggcaagc

SEQ ID NO: 1185315 - DNA, 25 bp, Homo sapien
aagtcctgtctgttctatagacaac

SEQ ID NO: 1185316 - DNA, 25 bp, Homo sapien
tttataaactatgatctctttgtgc

SEQ ID NO: 1185317 - DNA, 25 bp, Homo sapien
cacagctccttaatgttcaggcagc

SEQ ID NO: 1185318 - DNA, 25 bp, Homo sapien
ttagctctgcaattgtagtttaaga

SEQ ID NO: 1185319 - DNA, 25 bp, Homo sapien
taagaaattgtacaagccaggcaca

SEQ ID NO: 1185320 - DNA, 25 bp, Homo sapien
ccaaccacatgatgtttaggtacac

SEQ ID NO: 1185321 - DNA, 25 bp, Homo sapien
cataccttaattcagagtggaaagc

SEQ ID NO: 1185322 - DNA, 25 bp, Homo sapien
tgatgggttatcagctagctctgtg

SEQ ID NO: 1185323 - DNA, 25 bp, Homo sapien
ttcctgatgggttatcagctagctc

SEQ ID NO: 1185324 - DNA, 25 bp, Homo sapien
ggttatcagctagctctgtgagctc

SEQ ID NO: 1185325 - DNA, 25 bp, Homo sapien
gctagctctgtgagctcaatggcca

SEQ ID NO: 1185326 - DNA, 25 bp, Homo sapien
gaaaaagcaagagtatcttgtccaa

SEQ ID NO: 1185327 - DNA, 25 bp, Homo sapien
ttgctcttcaactgactcgaaaaag

SEQ ID NO: 1185328 - DNA, 25 bp, Homo sapien
gactcgaaaaagcaagagtatcttg

SEQ ID NO: 1185329 - DNA, 25 bp, Homo sapien
tcaactgactcgaaaaagcaagagt

SEQ ID NO: 1185330 - DNA, 25 bp, Homo sapien
tcaacagatttgaggttttccaaat

SEQ ID NO: 1185331 - DNA, 25 bp, Homo sapien
caacagatttgaggttttccaaatt

SEQ ID NO: 1185332 - DNA, 25 bp, Homo sapien
aatcctgttcctctgctaacagaca

SEQ ID NO: 1185333 - DNA, 25 bp, Homo sapien
gcatatctatactgtaccgagaggt

SEQ ID NO: 1185334 - DNA, 25 bp, Homo sapien
gttcctctgctaacagacatctttg

SEQ ID NO: 1185335 - DNA, 25 bp, Homo sapien
gtcagacactctgggtgttagcatt

SEQ ID NO: 1185336 - DNA, 25 bp, Homo sapien
cttgtgccaagcaacatgataggat

SEQ ID NO: 1185337 - DNA, 25 bp, Homo sapien
gatgtccatgtaagcatgtcagcta

SEQ ID NO: 1185338 - DNA, 25 bp, Homo sapien
tggttcggagaataaaggcggatat

SEQ ID NO: 1185339 - DNA, 25 bp, Homo sapien
gctacaacacacctagatgtccatg

SEQ ID NO: 1185340 - DNA, 25 bp, Homo sapien
gaagcttaaactcaaatcaggacag

SEQ ID NO: 1185341 - DNA, 25 bp, Homo sapien
ttccttatataggagactgtattgg

SEQ ID NO: 1185342 - DNA, 25 bp, Homo sapien
tgcagccccatctctaatgccgtaa

SEQ ID NO: 1185343 - DNA, 25 bp, Homo sapien
cttatataggagactgtattggtca

SEQ ID NO: 1185344 - DNA, 25 bp, Homo sapien
aatgccgtaatttgcatcacctgcc

SEQ ID NO: 1185345 - DNA, 25 bp, Homo sapien
cacaagttgtgagcttttattggca

SEQ ID NO: 1185346 - DNA, 25 bp, Homo sapien
catattgactaccacttctcccggg

SEQ ID NO: 1185347 - DNA, 25 bp, Homo sapien
ccctccttcgttatcagcatattga

SEQ ID NO: 1185348 - DNA, 25 bp, Homo sapien
ggtctggtaaccctgcacaagttgt

SEQ ID NO: 1185349 - DNA, 25 bp, Homo sapien
tgacacgacagtgactagaaaagtt

SEQ ID NO: 1185350 - DNA, 25 bp, Homo sapien
ttttctttgacacgacagtgactag

SEQ ID NO: 1185351 - DNA, 25 bp, Homo sapien
tctttgacacgacagtgactagaaa

SEQ ID NO: 1185352 - DNA, 25 bp, Homo sapien
acacgacagtgactagaaaagtttg

SEQ ID NO: 1185353 - DNA, 25 bp, Homo sapien
gtcttgttacaatgcccgaccctcg

SEQ ID NO: 1185354 - DNA, 25 bp, Homo sapien
tgcccgaccctcgagggagaaagtc

SEQ ID NO: 1185355 - DNA, 25 bp, Homo sapien
ctgcagcacaagaggtcgtcttgtt

SEQ ID NO: 1185356 - DNA, 25 bp, Homo sapien
caagaggtcgtcttgttacaatgcc

SEQ ID NO: 1185357 - DNA, 25 bp, Homo sapien
atcctctgcttctacggtcaacttc

SEQ ID NO: 1185358 - DNA, 25 bp, Homo sapien
tgcttctacggtcaacttcctccat

SEQ ID NO: 1185359 - DNA, 25 bp, Homo sapien
ctgttcatcctctgcttctacggtc

SEQ ID NO: 1185360 - DNA, 25 bp, Homo sapien
ttcatcctctgcttctacggtcaac

SEQ ID NO: 1185361 - DNA, 25 bp, Homo sapien
taggaagatatgaaagtccaggcgc

SEQ ID NO: 1185362 - DNA, 25 bp, Homo sapien
tcagttacttgtatctgagtgtaaa

SEQ ID NO: 1185363 - DNA, 25 bp, Homo sapien
caaaggctttcaaggtgctaggaag

SEQ ID NO: 1185364 - DNA, 25 bp, Homo sapien
aatgaacttatcagatgctcttgca

SEQ ID NO: 1185365 - DNA, 25 bp, Homo sapien
ggtgctaaccctgggtagaagcaga

SEQ ID NO: 1185366 - DNA, 25 bp, Homo sapien
acataggtggtgtaattttaagagc

SEQ ID NO: 1185367 - DNA, 25 bp, Homo sapien
cattaggtgctaaccctgggtagaa

SEQ ID NO: 1185368 - DNA, 25 bp, Homo sapien
agagctgtagccacataggtggtgt

SEQ ID NO: 1185369 - DNA, 25 bp, Homo sapien
cctagtcaaattgcacagaagtgtg

SEQ ID NO: 1185370 - DNA, 25 bp, Homo sapien
gtttccctgaaatacatgagctgtt

SEQ ID NO: 1185371 - DNA, 25 bp, Homo sapien
gggactgagacatcaacctgtggag

SEQ ID NO: 1185372 - DNA, 25 bp, Homo sapien
ggcatttgaactcgggacagtcttg

SEQ ID NO: 1185373 - DNA, 25 bp, Homo sapien
gcttcaaagtattccatcgataaaa

SEQ ID NO: 1185374 - DNA, 25 bp, Homo sapien
caagatataatgatttttcgtgctt

SEQ ID NO: 1185375 - DNA, 25 bp, Homo sapien
ttttcgtgcttcaaagtattccatc

SEQ ID NO: 1185376 - DNA, 25 bp, Homo sapien
agatataatgatttttcgtgcttca

SEQ ID NO: 1185377 - DNA, 25 bp, Homo sapien
gaagatagagcctttattttattac

SEQ ID NO: 1185378 - DNA, 25 bp, Homo sapien
agaagatagagcctttattttatta

SEQ ID NO: 1185379 - DNA, 25 bp, Homo sapien
ctctgagttctgttagcattcccct

SEQ ID NO: 1185380 - DNA, 25 bp, Homo sapien
tctgagttctgttagcattcccctc

SEQ ID NO: 1185381 - DNA, 25 bp, Homo sapien
agttctgttagcattcccctcttca

SEQ ID NO: 1185382 - DNA, 25 bp, Homo sapien
tctgttagcattcccctcttcagta

SEQ ID NO: 1185383 - DNA, 25 bp, Homo sapien
caaaatgacacaacttaaattcatg

SEQ ID NO: 1185384 - DNA, 25 bp, Homo sapien
aaaatgacacaacttaaattcatgc

SEQ ID NO: 1185385 - DNA, 25 bp, Homo sapien
aatgacacaacttaaattcatgcat

SEQ ID NO: 1185386 - DNA, 25 bp, Homo sapien
accaaaatgacacaacttaaattca

SEQ ID NO: 1185387 - DNA, 25 bp, Homo sapien
caatctcaaggcgaacttcatcaaa

SEQ ID NO: 1185388 - DNA, 25 bp, Homo sapien
agtcacgcgatctgtttctgcttca

SEQ ID NO: 1185389 - DNA, 25 bp, Homo sapien
tagactcgtaaattaatgggtatgg

SEQ ID NO: 1185390 - DNA, 25 bp, Homo sapien
ttcctttgcaatgtagaaactcggc

SEQ ID NO: 1185391 - DNA, 25 bp, Homo sapien
gaaaggataaaggagtcttacatac

SEQ ID NO: 1185392 - DNA, 25 bp, Homo sapien
ctgtgtggaaaggataaaggagtct

SEQ ID NO: 1185393 - DNA, 25 bp, Homo sapien
tgtggaaaggataaaggagtcttac

SEQ ID NO: 1185394 - DNA, 25 bp, Homo sapien
ggataaaggagtcttacatacacct

SEQ ID NO: 1185395 - DNA, 25 bp, Homo sapien
gatactcgatatctggtggctgatc

SEQ ID NO: 1185396 - DNA, 25 bp, Homo sapien
ttccaggtagatcaataagggttag

SEQ ID NO: 1185397 - DNA, 25 bp, Homo sapien
tagcttcagcgcatctgagtttgca

SEQ ID NO: 1185398 - DNA, 25 bp, Homo sapien
ttctccctcgtgatgaactgcataa

SEQ ID NO: 1185399 - DNA, 25 bp, Homo sapien
ccttctcatcttagtagtcacacac

SEQ ID NO: 1185400 - DNA, 25 bp, Homo sapien
attccttctcatcttagtagtcaca

SEQ ID NO: 1185401 - DNA, 25 bp, Homo sapien
ttaattccttctcatcttagtagtc

SEQ ID NO: 1185402 - DNA, 25 bp, Homo sapien
ttctcatcttagtagtcacacactc

SEQ ID NO: 1185403 - DNA, 25 bp, Homo sapien
ggtcataaatgaatcttcttctgaa

SEQ ID NO: 1185404 - DNA, 25 bp, Homo sapien
cataaatgaatcttcttctgaaaag

SEQ ID NO: 1185405 - DNA, 25 bp, Homo sapien
ttaggtcataaatgaatcttcttct

SEQ ID NO: 1185406 - DNA, 25 bp, Homo sapien
taggtcataaatgaatcttcttctg

SEQ ID NO: 1185407 - DNA, 25 bp, Homo sapien
acggttcagccagggtatagcaata

SEQ ID NO: 1185408 - DNA, 25 bp, Homo sapien
gtgaacggttcagccagggtatagc

SEQ ID NO: 1185409 - DNA, 25 bp, Homo sapien
gtgaatgtctctcaagggtgaacgg

SEQ ID NO: 1185410 - DNA, 25 bp, Homo sapien
tctcaagggtgaacggttcagccag

SEQ ID NO: 1185411 - DNA, 25 bp, Homo sapien
caatgtgcaaggagccttagacgag

SEQ ID NO: 1185412 - DNA, 25 bp, Homo sapien
cccatcaatgtgcaaggagccttag

SEQ ID NO: 1185413 - DNA, 25 bp, Homo sapien
tagacgagtgatagtgtcggcagcc

SEQ ID NO: 1185414 - DNA, 25 bp, Homo sapien
caaggagccttagacgagtgatagt

SEQ ID NO: 1185415 - DNA, 25 bp, Homo sapien
tggcatccgttccttcatccataag

SEQ ID NO: 1185416 - DNA, 25 bp, Homo sapien
cctgcgaagaggcaacagtttgttc

SEQ ID NO: 1185417 - DNA, 25 bp, Homo sapien
gtccagtttggtgataactccaatg

SEQ ID NO: 1185418 - DNA, 25 bp, Homo sapien
tctctagaacatccctggcatccgt

SEQ ID NO: 1185419 - DNA, 25 bp, Homo sapien
atatgtctgtaagccgggtgggaaa

SEQ ID NO: 1185420 - DNA, 25 bp, Homo sapien
ttcccatctatgtccttctggcttc

SEQ ID NO: 1185421 - DNA, 25 bp, Homo sapien
ggttcccattcggtcagcgatatgt

SEQ ID NO: 1185422 - DNA, 25 bp, Homo sapien
gccagcatggctgcctttatgtcct

SEQ ID NO: 1185423 - DNA, 25 bp, Homo sapien
tatttcataattgttcttgttgctt

SEQ ID NO: 1185424 - DNA, 25 bp, Homo sapien
tgttcttgttgcttgaaagaacatt

SEQ ID NO: 1185425 - DNA, 25 bp, Homo sapien
atatttcataattgttcttgttgct

SEQ ID NO: 1185426 - DNA, 25 bp, Homo sapien
tcttgttgcttgaaagaacattttt

SEQ ID NO: 1185427 - DNA, 25 bp, Homo sapien
gctatctctttaaatccaggaagac

SEQ ID NO: 1185428 - DNA, 25 bp, Homo sapien
ttgagctatctctttaaatccagga

SEQ ID NO: 1185429 - DNA, 25 bp, Homo sapien
gagctatctctttaaatccaggaag

SEQ ID NO: 1185430 - DNA, 25 bp, Homo sapien
ctatctctttaaatccaggaagacc

SEQ ID NO: 1185431 - DNA, 25 bp, Homo sapien
ttggtcttccttgttgggtcttctg

SEQ ID NO: 1185432 - DNA, 25 bp, Homo sapien
aatttttgtaggcttctacttcatg

SEQ ID NO: 1185433 - DNA, 25 bp, Homo sapien
gttctatggagagcaactgtccctg

SEQ ID NO: 1185434 - DNA, 25 bp, Homo sapien
tatcccgaatgtggttggtaagttg

SEQ ID NO: 1185435 - DNA, 25 bp, Homo sapien
aaagttacaagcctttgcactcttc

SEQ ID NO: 1185436 - DNA, 25 bp, Homo sapien
tcaaagttacaagcctttgcactct

SEQ ID NO: 1185437 - DNA, 25 bp, Homo sapien
agttacaagcctttgcactcttcat

SEQ ID NO: 1185438 - DNA, 25 bp, Homo sapien
agtcaaagttacaagcctttgcact

SEQ ID NO: 1185439 - DNA, 25 bp, Homo sapien
tgattttagcaccacctgagagttc

SEQ ID NO: 1185440 - DNA, 25 bp, Homo sapien
ggaaagcgttcatgaaaaatacgat

SEQ ID NO: 1185441 - DNA, 25 bp, Homo sapien
ttactatctcaaaaggaaagcgttc

SEQ ID NO: 1185442 - DNA, 25 bp, Homo sapien
agttccagggtatctacttgatccc

SEQ ID NO: 1185443 - DNA, 25 bp, Homo sapien
agaatatggaagtgaagtgaaacta

SEQ ID NO: 1185444 - DNA, 25 bp, Homo sapien
cttatttctcttcgcaattctttct

SEQ ID NO: 1185445 - DNA, 25 bp, Homo sapien
tttttgattgcatagcttatttctc

SEQ ID NO: 1185446 - DNA, 25 bp, Homo sapien
tgtttttgattgcatagcttatttc

SEQ ID NO: 1185447 - DNA, 25 bp, Homo sapien
tatttctcttcgcaattctttctca

SEQ ID NO: 1185448 - DNA, 25 bp, Homo sapien
acaaatgacaacaggcaggggccac

SEQ ID NO: 1185449 - DNA, 25 bp, Homo sapien
aggggccacctccttcgtatgaggc

SEQ ID NO: 1185450 - DNA, 25 bp, Homo sapien
ggccacctccttcgtatgaggcaat

SEQ ID NO: 1185451 - DNA, 25 bp, Homo sapien
gggccacctccttcgtatgaggcaa

SEQ ID NO: 1185452 - DNA, 25 bp, Homo sapien
caagctttgccttctcagggcctgt

SEQ ID NO: 1185453 - DNA, 25 bp, Homo sapien
caaactcagtgtcaagctttgcctt

SEQ ID NO: 1185454 - DNA, 25 bp, Homo sapien
gcacagtctcaacttggccctttgg

SEQ ID NO: 1185455 - DNA, 25 bp, Homo sapien
cagcacagtctcaacttggcccttt

SEQ ID NO: 1185456 - DNA, 25 bp, Homo sapien
aagcaagcagcccatgagatttttt

SEQ ID NO: 1185457 - DNA, 25 bp, Homo sapien
aaggtaagaaagcaagcagcccatg

SEQ ID NO: 1185458 - DNA, 25 bp, Homo sapien
ctgaaggtaagaaagcaagcagccc

SEQ ID NO: 1185459 - DNA, 25 bp, Homo sapien
aaagcaagcagcccatgagattttt

SEQ ID NO: 1185460 - DNA, 25 bp, Homo sapien
tgttgattaattcttgtattaccag

SEQ ID NO: 1185461 - DNA, 25 bp, Homo sapien
tctgtttcttgactatcgcttcaaa

SEQ ID NO: 1185462 - DNA, 25 bp, Homo sapien
tttcttgactatcgcttcaaatgcc

SEQ ID NO: 1185463 - DNA, 25 bp, Homo sapien
tcttgtattaccagatccacactct

SEQ ID NO: 1185464 - DNA, 25 bp, Homo sapien
ctggtttttcagaaaggtaactgct

SEQ ID NO: 1185465 - DNA, 25 bp, Homo sapien
atcctttccgtttcctcgcagagtc

SEQ ID NO: 1185466 - DNA, 25 bp, Homo sapien
cttctcgctcacgaatgtggttagc

SEQ ID NO: 1185467 - DNA, 25 bp, Homo sapien
gctcacgaatgtggttagcaacaat

SEQ ID NO: 1185468 - DNA, 25 bp, Homo sapien
tttccgtttcctcgcagagtctggg

SEQ ID NO: 1185469 - DNA, 25 bp, Homo sapien
ggctctaggcttgatttcactgact

SEQ ID NO: 1185470 - DNA, 25 bp, Homo sapien
tcctcttttggctattgcagctatc

SEQ ID NO: 1185471 - DNA, 25 bp, Homo sapien
gttaatactgatttgttcatctcaa

SEQ ID NO: 1185472 - DNA, 25 bp, Homo sapien
cactgactcaggagttaatactgat

SEQ ID NO: 1185473 - DNA, 25 bp, Homo sapien
aaggtagcatttgaacgcatcagag

SEQ ID NO: 1185474 - DNA, 25 bp, Homo sapien
gcatttgaacgcatcagagtcctca

SEQ ID NO: 1185475 - DNA, 25 bp, Homo sapien
aatatctccagagctctgctcttca

SEQ ID NO: 1185476 - DNA, 25 bp, Homo sapien
actattgtgagtatttgtttgctgc

SEQ ID NO: 1185477 - DNA, 25 bp, Homo sapien
cccaactgaatcctgtctctttcca

SEQ ID NO: 1185478 - DNA, 25 bp, Homo sapien
ccttgtgttctcccaactgaatcct

SEQ ID NO: 1185479 - DNA, 25 bp, Homo sapien
ccaactgaatcctgtctctttccag

SEQ ID NO: 1185480 - DNA, 25 bp, Homo sapien
tgtaagagacttgaatgtcaatcaa

SEQ ID NO: 1185481 - DNA, 25 bp, Homo sapien
cttcatggttggtgttgatgtaaga

SEQ ID NO: 1185482 - DNA, 25 bp, Homo sapien
catggttggtgttgatgtaagagac

SEQ ID NO: 1185483 - DNA, 25 bp, Homo sapien
aagagacttgaatgtcaatcaatag

SEQ ID NO: 1185484 - DNA, 25 bp, Homo sapien
gacttcctaagtaggcacactgaga

SEQ ID NO: 1185485 - DNA, 25 bp, Homo sapien
tgtattctcaaaggtggtgaaactg

SEQ ID NO: 1185486 - DNA, 25 bp, Homo sapien
cactgagagttaatcctggcacaga

SEQ ID NO: 1185487 - DNA, 25 bp, Homo sapien
aatcaacaggaggaatgcatgtggc

SEQ ID NO: 1185488 - DNA, 25 bp, Homo sapien
tactgagagaatagtaaatatccct

SEQ ID NO: 1185489 - DNA, 25 bp, Homo sapien
ctgagagaatagtaaatatccctgc

SEQ ID NO: 1185490 - DNA, 25 bp, Homo sapien
agaatagtaaatatccctgccctac

SEQ ID NO: 1185491 - DNA, 25 bp, Homo sapien
gagagaatagtaaatatccctgccc

SEQ ID NO: 1185492 - DNA, 25 bp, Homo sapien
ctgagaaaagcaaaggaaagcagca

SEQ ID NO: 1185493 - DNA, 25 bp, Homo sapien
ctgatttccaactgtggttttcttg

SEQ ID NO: 1185494 - DNA, 25 bp, Homo sapien
gtgaacctgactgctcctctgctga

SEQ ID NO: 1185495 - DNA, 25 bp, Homo sapien
tgtggttttcttgtgaacctgactg

SEQ ID NO: 1185496 - DNA, 25 bp, Homo sapien
ttcttgtgaacctgactgctcctct

SEQ ID NO: 1185497 - DNA, 25 bp, Homo sapien
caatttgccttgaaggcggaagatt

SEQ ID NO: 1185498 - DNA, 25 bp, Homo sapien
gaacttagctcgtacaatttgcctt

SEQ ID NO: 1185499 - DNA, 25 bp, Homo sapien
tagctcgtacaatttgccttgaagg

SEQ ID NO: 1185500 - DNA, 25 bp, Homo sapien
cgtacaatttgccttgaaggcggaa

SEQ ID NO: 1185501 - DNA, 25 bp, Homo sapien
agttaaagacaaactgtgcccttgg

SEQ ID NO: 1185502 - DNA, 25 bp, Homo sapien
gatagggtgttacggacaagacaac

SEQ ID NO: 1185503 - DNA, 25 bp, Homo sapien
gcagtgaagggatgaaccctcttaa

SEQ ID NO: 1185504 - DNA, 25 bp, Homo sapien
tagcaagcgctagttgagttaatca

SEQ ID NO: 1185505 - DNA, 25 bp, Homo sapien
gcactcgccaccatgcctggctaat

SEQ ID NO: 1185506 - DNA, 25 bp, Homo sapien
cttgaccttgtgatccacccacctc

SEQ ID NO: 1185507 - DNA, 25 bp, Homo sapien
ccagagaagcttggattacaggcac

SEQ ID NO: 1185508 - DNA, 25 bp, Homo sapien
agagaagcttggattacaggcactc

SEQ ID NO: 1185509 - DNA, 25 bp, Homo sapien
taagaagacaattccctggagactg

SEQ ID NO: 1185510 - DNA, 25 bp, Homo sapien
agaggcagcccatgtgttctggtga

SEQ ID NO: 1185511 - DNA, 25 bp, Homo sapien
gaaataagcacatgatccacgccag

SEQ ID NO: 1185512 - DNA, 25 bp, Homo sapien
gaggaacatcccttgtcccatatga

SEQ ID NO: 1185513 - DNA, 25 bp, Homo sapien
cagaaactgaaatttgccttggtca

SEQ ID NO: 1185514 - DNA, 25 bp, Homo sapien
cagagtcctgagtgagaatggagac

SEQ ID NO: 1185515 - DNA, 25 bp, Homo sapien
gacaccgagacttaagatacagcag

SEQ ID NO: 1185516 - DNA, 25 bp, Homo sapien
atggagaccagaaggttaaccaccg

SEQ ID NO: 1185517 - DNA, 25 bp, Homo sapien
gaaatgctgcaagtggatgtaccaa

SEQ ID NO: 1185518 - DNA, 25 bp, Homo sapien
gatcctgcgaccaggcatttgaaaa

SEQ ID NO: 1185519 - DNA, 25 bp, Homo sapien
tccactttttacagcaggtcaacag

SEQ ID NO: 1185520 - DNA, 25 bp, Homo sapien
caagaggaagtcatttatagatagt

SEQ ID NO: 1185521 - DNA, 25 bp, Homo sapien
gaattactcgccactgtgtttgctg

SEQ ID NO: 1185522 - DNA, 25 bp, Homo sapien
tgttttgaattactcgccactgtgt

SEQ ID NO: 1185523 - DNA, 25 bp, Homo sapien
ttttgaattactcgccactgtgttt

SEQ ID NO: 1185524 - DNA, 25 bp, Homo sapien
tactcgccactgtgtttgctgtgct

SEQ ID NO: 1185525 - DNA, 25 bp, Homo sapien
tcccgaggagtggcttaccaactcc

SEQ ID NO: 1185526 - DNA, 25 bp, Homo sapien
cttgaggtcccgaggagtggcttac

SEQ ID NO: 1185527 - DNA, 25 bp, Homo sapien
gaggtcccgaggagtggcttaccaa

SEQ ID NO: 1185528 - DNA, 25 bp, Homo sapien
gtcccgaggagtggcttaccaactc

SEQ ID NO: 1185529 - DNA, 25 bp, Homo sapien
tttggttagccctgtgcactttagt

SEQ ID NO: 1185530 - DNA, 25 bp, Homo sapien
ctgtcagtttggttagccctgtgca

SEQ ID NO: 1185531 - DNA, 25 bp, Homo sapien
gtcagtttggttagccctgtgcact

SEQ ID NO: 1185532 - DNA, 25 bp, Homo sapien
agtttggttagccctgtgcacttta

SEQ ID NO: 1185533 - DNA, 25 bp, Homo sapien
taagcacatagctgtgggtaactgg

SEQ ID NO: 1185534 - DNA, 25 bp, Homo sapien
tcaccttgtgcaaaccacaaacata

SEQ ID NO: 1185535 - DNA, 25 bp, Homo sapien
tgaggatatagacaccattaagcac

SEQ ID NO: 1185536 - DNA, 25 bp, Homo sapien
ggcagtgcaggatgtgaggatatag

SEQ ID NO: 1185537 - DNA, 25 bp, Homo sapien
ggcttccgcactatcttgattctta

SEQ ID NO: 1185538 - DNA, 25 bp, Homo sapien
taggcttccgcactatcttgattct

SEQ ID NO: 1185539 - DNA, 25 bp, Homo sapien
gaatttgctcaaatgcctgcatatg

SEQ ID NO: 1185540 - DNA, 25 bp, Homo sapien
tctcttcttattgcttcccagaatt

SEQ ID NO: 1185541 - DNA, 25 bp, Homo sapien
caataccgctgagggttgaggaatg

SEQ ID NO: 1185542 - DNA, 25 bp, Homo sapien
gagaggcactcttgttgtttcctca

SEQ ID NO: 1185543 - DNA, 25 bp, Homo sapien
tggccaccagaataaggattaaact

SEQ ID NO: 1185544 - DNA, 25 bp, Homo sapien
ccaggaggagtaaagtgacttctca

SEQ ID NO: 1185545 - DNA, 25 bp, Homo sapien
taaatgggaattgatccagggttct

SEQ ID NO: 1185546 - DNA, 25 bp, Homo sapien
tttcagggacacaatcagcgtaatt

SEQ ID NO: 1185547 - DNA, 25 bp, Homo sapien
caatcagcgtaattgtgttctcttt

SEQ ID NO: 1185548 - DNA, 25 bp, Homo sapien
cacacgtgatgtagaaaataagatg

SEQ ID NO: 1185549 - DNA, 25 bp, Homo sapien
catcatctttataccaggacaagct

SEQ ID NO: 1185550 - DNA, 25 bp, Homo sapien
gtatcccttcgagccgcctttcatg

SEQ ID NO: 1185551 - DNA, 25 bp, Homo sapien
caagctttccgcagtaaggacgaac

SEQ ID NO: 1185552 - DNA, 25 bp, Homo sapien
gatggtgagccaccccttgcgaatc

SEQ ID NO: 1185553 - DNA, 25 bp, Homo sapien
tcaatgctgagatgcctggaattca

SEQ ID NO: 1185554 - DNA, 25 bp, Homo sapien
taacacccaggaacatgtcaatgct

SEQ ID NO: 1185555 - DNA, 25 bp, Homo sapien
gagagcatcctataccttccaatgg

SEQ ID NO: 1185556 - DNA, 25 bp, Homo sapien
ggtaagttggttatcctcgccaaga

SEQ ID NO: 1185557 - DNA, 25 bp, Homo sapien
gaaggtgcttatgctacagttctag

SEQ ID NO: 1185558 - DNA, 25 bp, Homo sapien
caagtgctttgagttaactctgcca

SEQ ID NO: 1185559 - DNA, 25 bp, Homo sapien
tttttgatacttccacgcgtcatgg

SEQ ID NO: 1185560 - DNA, 25 bp, Homo sapien
tctaggagtagaatttacaaggcca

SEQ ID NO: 1185561 - DNA, 25 bp, Homo sapien
ctgttggtttaatacttaactcatg

SEQ ID NO: 1185562 - DNA, 25 bp, Homo sapien
gtgagtggtgcctatgaaatataat

SEQ ID NO: 1185563 - DNA, 25 bp, Homo sapien
gtaaagtgagtggtgcctatgaaat

SEQ ID NO: 1185564 - DNA, 25 bp, Homo sapien
gttggtttaatacttaactcatgta

SEQ ID NO: 1185565 - DNA, 25 bp, Homo sapien
gcatctacaccaagagctacaacca

SEQ ID NO: 1185566 - DNA, 25 bp, Homo sapien
gcagccctcacaccatagcatctac

SEQ ID NO: 1185567 - DNA, 25 bp, Homo sapien
caccaagagctacaaccaaaatgag

SEQ ID NO: 1185568 - DNA, 25 bp, Homo sapien
cacaccatagcatctacaccaagag

SEQ ID NO: 1185569 - DNA, 25 bp, Homo sapien
gcacagacaggcagtcacatgacaa

SEQ ID NO: 1185570 - DNA, 25 bp, Homo sapien
ggcacagacaggcagtcacatgaca

SEQ ID NO: 1185571 - DNA, 25 bp, Homo sapien
tgtgtctgcctgtctacacttgctg

SEQ ID NO: 1185572 - DNA, 25 bp, Homo sapien
aaaacaggctgattgtatctgtcta

SEQ ID NO: 1185573 - DNA, 25 bp, Homo sapien
tctgaataaagtcaaaagtctaact

SEQ ID NO: 1185574 - DNA, 25 bp, Homo sapien
tactctccaaaatcaccaaatctgg

SEQ ID NO: 1185575 - DNA, 25 bp, Homo sapien
cactgtgagtaacagccttccagtt

SEQ ID NO: 1185576 - DNA, 25 bp, Homo sapien
cagcatggccctatagttaattaag

SEQ ID NO: 1185577 - DNA, 25 bp, Homo sapien
tggataacttaagctcacaactgcc

SEQ ID NO: 1185578 - DNA, 25 bp, Homo sapien
tgtacccttttgattcacagcatgg

SEQ ID NO: 1185579 - DNA, 25 bp, Homo sapien
tggccgaaacagaatcggaaatttg

SEQ ID NO: 1185580 - DNA, 25 bp, Homo sapien
gttcctttactcgaaagtgatggcc

SEQ ID NO: 1185581 - DNA, 25 bp, Homo sapien
tacacagaaaatggcacttattagc

SEQ ID NO: 1185582 - DNA, 25 bp, Homo sapien
cattaccttacctaatcactgcata

SEQ ID NO: 1185583 - DNA, 25 bp, Homo sapien
tactttctgttgcactgaatgcagc

SEQ ID NO: 1185584 - DNA, 25 bp, Homo sapien
gcatcattcctttaattgagcagag

SEQ ID NO: 1185585 - DNA, 25 bp, Homo sapien
gagcagagttaactggatcaaatta

SEQ ID NO: 1185586 - DNA, 25 bp, Homo sapien
cacaatagtattttaaggcactggt

SEQ ID NO: 1185587 - DNA, 25 bp, Homo sapien
ttttctccctcaggatgacttttag

SEQ ID NO: 1185588 - DNA, 25 bp, Homo sapien
tttctccctcaggatgacttttagt

SEQ ID NO: 1185589 - DNA, 25 bp, Homo sapien
tattttctccctcaggatgactttt

SEQ ID NO: 1185590 - DNA, 25 bp, Homo sapien
ctattttctccctcaggatgacttt

SEQ ID NO: 1185591 - DNA, 25 bp, Homo sapien
ggcactttgtctagaaacccactga

SEQ ID NO: 1185592 - DNA, 25 bp, Homo sapien
gagtcagcaactgagtaaatcaggg

SEQ ID NO: 1185593 - DNA, 25 bp, Homo sapien
gcagatgggatttgcccagagaaga

SEQ ID NO: 1185594 - DNA, 25 bp, Homo sapien
gagcaccgacccacaacttattgag

SEQ ID NO: 1185595 - DNA, 25 bp, Homo sapien
gaccagcgggtaaggccttcttgac

SEQ ID NO: 1185596 - DNA, 25 bp, Homo sapien
tcacaggttttgcacactagggacc

SEQ ID NO: 1185597 - DNA, 25 bp, Homo sapien
cactgctgagaaaagactgccgaag

SEQ ID NO: 1185598 - DNA, 25 bp, Homo sapien
ttcttgactgctcacctggtctgtg

SEQ ID NO: 1185599 - DNA, 25 bp, Homo sapien
gggtgacatcatcccatatatggac

SEQ ID NO: 1185600 - DNA, 25 bp, Homo sapien
gccagttccccagtctgcagcaaat

SEQ ID NO: 1185601 - DNA, 25 bp, Homo sapien
gcaaatgtgccacgtcaagactgga

SEQ ID NO: 1185602 - DNA, 25 bp, Homo sapien
tgagtgtgtctcagtcagcgcagca

SEQ ID NO: 1185603 - DNA, 25 bp, Homo sapien
aagctcttgtttgaggcgactctag

SEQ ID NO: 1185604 - DNA, 25 bp, Homo sapien
ttcagaagggcaattaatcaagctc

SEQ ID NO: 1185605 - DNA, 25 bp, Homo sapien
gaggcgactctagctttgatcagaa

SEQ ID NO: 1185606 - DNA, 25 bp, Homo sapien
attttgatcttcagaagggcaatta

SEQ ID NO: 1185607 - DNA, 25 bp, Homo sapien
cactggacactatgctgaaagcttc

SEQ ID NO: 1185608 - DNA, 25 bp, Homo sapien
ggcacctagtaagtccacagtctgt

SEQ ID NO: 1185609 - DNA, 25 bp, Homo sapien
cagttcttactggttgatgccccta

SEQ ID NO: 1185610 - DNA, 25 bp, Homo sapien
gttagtactacagagcctggtccag

SEQ ID NO: 1185611 - DNA, 25 bp, Homo sapien
gacactcaagaaactcaacaacaga

SEQ ID NO: 1185612 - DNA, 25 bp, Homo sapien
aaaatctattgtggccattagctga

SEQ ID NO: 1185613 - DNA, 25 bp, Homo sapien
gggagcacacacattgccaaattcc

SEQ ID NO: 1185614 - DNA, 25 bp, Homo sapien
ctttgttaggcacgtttagatacac

SEQ ID NO: 1185615 - DNA, 25 bp, Homo sapien
gcaggaaaactgacgattggggtcc

SEQ ID NO: 1185616 - DNA, 25 bp, Homo sapien
attctcatattgaagtcaccaattg

SEQ ID NO: 1185617 - DNA, 25 bp, Homo sapien
tgacgattggggtccttaagccttc

SEQ ID NO: 1185618 - DNA, 25 bp, Homo sapien
attgcaggaaaactgacgattgggg

SEQ ID NO: 1185619 - DNA, 25 bp, Homo sapien
ctgattttagaagtagatccttaca

SEQ ID NO: 1185620 - DNA, 25 bp, Homo sapien
tcagtcaaaattctcacttgggttt

SEQ ID NO: 1185621 - DNA, 25 bp, Homo sapien
tcttctaaatcttgcggaaaaactg

SEQ ID NO: 1185622 - DNA, 25 bp, Homo sapien
ttgaccaaatttctgggtatagtgg

SEQ ID NO: 1185623 - DNA, 25 bp, Homo sapien
gaagtgccctgtaatgtatggctca

SEQ ID NO: 1185624 - DNA, 25 bp, Homo sapien
cactggttatatgtgcttacaagcc

SEQ ID NO: 1185625 - DNA, 25 bp, Homo sapien
cagcatggaccaaggtaggagcacc

SEQ ID NO: 1185626 - DNA, 25 bp, Homo sapien
taggagcaccgtcagacacagaagt

SEQ ID NO: 1185627 - DNA, 25 bp, Homo sapien
cccttcttgctctttaggcatctta

SEQ ID NO: 1185628 - DNA, 25 bp, Homo sapien
taggcatcttaagttccagctcagc

SEQ ID NO: 1185629 - DNA, 25 bp, Homo sapien
tcttgtactggcttaataatccctt

SEQ ID NO: 1185630 - DNA, 25 bp, Homo sapien
ccatacagctcctggtgttagaaac

SEQ ID NO: 1185631 - DNA, 25 bp, Homo sapien
tatagaggagtaaagcaagatcagc

SEQ ID NO: 1185632 - DNA, 25 bp, Homo sapien
tcaggtaaggcgagagtacatcagt

SEQ ID NO: 1185633 - DNA, 25 bp, Homo sapien
gatttcacaccaaaagactcaggta

SEQ ID NO: 1185634 - DNA, 25 bp, Homo sapien
caagtagctctttgacctgggcaac

SEQ ID NO: 1185635 - DNA, 25 bp, Homo sapien
cttaattgttctgtaagctttgttt

SEQ ID NO: 1185636 - DNA, 25 bp, Homo sapien
actatgcccggccaccaataggctt

SEQ ID NO: 1185637 - DNA, 25 bp, Homo sapien
tcttaattgttctgtaagctttgtt

SEQ ID NO: 1185638 - DNA, 25 bp, Homo sapien
atgcccggccaccaataggcttttt

SEQ ID NO: 1185639 - DNA, 25 bp, Homo sapien
tctgatcaatatgccctccactggc

SEQ ID NO: 1185640 - DNA, 25 bp, Homo sapien
gtctatttggtcctttctctgatca

SEQ ID NO: 1185641 - DNA, 25 bp, Homo sapien
ggtcctttctctgatcaatatgccc

SEQ ID NO: 1185642 - DNA, 25 bp, Homo sapien
tctgcatttttgtctatttggtcct

SEQ ID NO: 1185643 - DNA, 25 bp, Homo sapien
gaacacaattggttggcaggcccca

SEQ ID NO: 1185644 - DNA, 25 bp, Homo sapien
cccagccataccaatacatggcttt

SEQ ID NO: 1185645 - DNA, 25 bp, Homo sapien
taaatatctctgagagtaaaggact

SEQ ID NO: 1185646 - DNA, 25 bp, Homo sapien
caaaaggagccagtaggagatttta

SEQ ID NO: 1185647 - DNA, 25 bp, Homo sapien
taatgcatgcacatgataacagttc

SEQ ID NO: 1185648 - DNA, 25 bp, Homo sapien
tattaaagaggaggttatagctcac

SEQ ID NO: 1185649 - DNA, 25 bp, Homo sapien
atgagaagcaagtctcccgctccaa

SEQ ID NO: 1185650 - DNA, 25 bp, Homo sapien
actttagacaacagttactgactct

SEQ ID NO: 1185651 - DNA, 25 bp, Homo sapien
aatgggtatggaagcaaacaaccct

SEQ ID NO: 1185652 - DNA, 25 bp, Homo sapien
ctcttcaatgacatcatcatatttg

SEQ ID NO: 1185653 - DNA, 25 bp, Homo sapien
tcaatgacatcatcatatttgttca

SEQ ID NO: 1185654 - DNA, 25 bp, Homo sapien
tatggaagcaaacaaccctttctct

SEQ ID NO: 1185655 - DNA, 25 bp, Homo sapien
ttttctttgaatactgcgtctgagt

SEQ ID NO: 1185656 - DNA, 25 bp, Homo sapien
tgaatactgcgtctgagttcccata

SEQ ID NO: 1185657 - DNA, 25 bp, Homo sapien
tctttgaatactgcgtctgagttcc

SEQ ID NO: 1185658 - DNA, 25 bp, Homo sapien
tactgcgtctgagttcccatacctc

SEQ ID NO: 1185659 - DNA, 25 bp, Homo sapien
ttataataataatgtgaccaagttt

SEQ ID NO: 1185660 - DNA, 25 bp, Homo sapien
tataataataatgtgaccaagtttc

SEQ ID NO: 1185661 - DNA, 25 bp, Homo sapien
cgtccatagccatatagagagaggg

SEQ ID NO: 1185662 - DNA, 25 bp, Homo sapien
tgtgaagcagcgaaacaatagtgag

SEQ ID NO: 1185663 - DNA, 25 bp, Homo sapien
taaaggcagacatgcaagaaatcca

SEQ ID NO: 1185664 - DNA, 25 bp, Homo sapien
ccagaattctgggactgcgtccata

SEQ ID NO: 1185665 - DNA, 25 bp, Homo sapien
gcatggcaagggcctcctccaccat

SEQ ID NO: 1185666 - DNA, 25 bp, Homo sapien
catggccagcatggcaagggcctcc

SEQ ID NO: 1185667 - DNA, 25 bp, Homo sapien
ccagcatggcaagggcctcctccac

SEQ ID NO: 1185668 - DNA, 25 bp, Homo sapien
atggccagcatggcaagggcctcct

SEQ ID NO: 1185669 - DNA, 25 bp, Homo sapien
ctgtttctgctatcaggtttatcct

SEQ ID NO: 1185670 - DNA, 25 bp, Homo sapien
ttctgctatcaggtttatccttcat

SEQ ID NO: 1185671 - DNA, 25 bp, Homo sapien
ctccctgtttctgctatcaggttta

SEQ ID NO: 1185672 - DNA, 25 bp, Homo sapien
gtttctgctatcaggtttatccttc

SEQ ID NO: 1185673 - DNA, 25 bp, Homo sapien
cttttgaaatgatagatttgccttt

SEQ ID NO: 1185674 - DNA, 25 bp, Homo sapien
aagtaggctctcttttatactgcat

SEQ ID NO: 1185675 - DNA, 25 bp, Homo sapien
cttggcttgttttctatagaagtag

SEQ ID NO: 1185676 - DNA, 25 bp, Homo sapien
gtaaagatggaacacaatgtccttg

SEQ ID NO: 1185677 - DNA, 25 bp, Homo sapien
aagagagcagggctaaagtccagag

SEQ ID NO: 1185678 - DNA, 25 bp, Homo sapien
taaccatggtcctctgtatggtccc

SEQ ID NO: 1185679 - DNA, 25 bp, Homo sapien
atctctggtgttacccgtgaaagag

SEQ ID NO: 1185680 - DNA, 25 bp, Homo sapien
tggtcccaggttacatctctggtgt

SEQ ID NO: 1185681 - DNA, 25 bp, Homo sapien
gagtgcaaagatgtgcttgctagac

SEQ ID NO: 1185682 - DNA, 25 bp, Homo sapien
catcccgaactttcaggttgtccaa

SEQ ID NO: 1185683 - DNA, 25 bp, Homo sapien
ctttgctctgtattaaagagtgcaa

SEQ ID NO: 1185684 - DNA, 25 bp, Homo sapien
ttgtccaagggaagcatgtacttct

SEQ ID NO: 1185685 - DNA, 25 bp, Homo sapien
tagcatgaccttaaaactgaacgcc

SEQ ID NO: 1185686 - DNA, 25 bp, Homo sapien
cttgaaccaaatgggccttagcatg

SEQ ID NO: 1185687 - DNA, 25 bp, Homo sapien
caaatgggccttagcatgaccttaa

SEQ ID NO: 1185688 - DNA, 25 bp, Homo sapien
ggccttagcatgaccttaaaactga

SEQ ID NO: 1185689 - DNA, 25 bp, Homo sapien
tattcctatccagccccttaacagg

SEQ ID NO: 1185690 - DNA, 25 bp, Homo sapien
tctgtctgagccctgtgaacttaat

SEQ ID NO: 1185691 - DNA, 25 bp, Homo sapien
taacagggaaagcacagggtttatc

SEQ ID NO: 1185692 - DNA, 25 bp, Homo sapien
aactgtaagagtcctcaagtctctg

SEQ ID NO: 1185693 - DNA, 25 bp, Homo sapien
ttagatgcgagctctaagagcctgg

SEQ ID NO: 1185694 - DNA, 25 bp, Homo sapien
cgagctctaagagcctgggactgcg

SEQ ID NO: 1185695 - DNA, 25 bp, Homo sapien
ctctaagagcctgggactgcgttgg

SEQ ID NO: 1185696 - DNA, 25 bp, Homo sapien
gggctgtctgtgttagtttatcaac

SEQ ID NO: 1185697 - DNA, 25 bp, Homo sapien
cttacagataatattgctgatttca

SEQ ID NO: 1185698 - DNA, 25 bp, Homo sapien
tacagataatattgctgatttcaca

SEQ ID NO: 1185699 - DNA, 25 bp, Homo sapien
agataatattgctgatttcacatat

SEQ ID NO: 1185700 - DNA, 25 bp, Homo sapien
cagataatattgctgatttcacata

SEQ ID NO: 1185701 - DNA, 25 bp, Homo sapien
tgctgtagctgtatagataacccac

SEQ ID NO: 1185702 - DNA, 25 bp, Homo sapien
cacatgctgtagctgtatagataac

SEQ ID NO: 1185703 - DNA, 25 bp, Homo sapien
gtatagataacccacagcaatttgt

SEQ ID NO: 1185704 - DNA, 25 bp, Homo sapien
gtagctgtatagataacccacagca

SEQ ID NO: 1185705 - DNA, 25 bp, Homo sapien
ttatctggttgaaacattagaagag

SEQ ID NO: 1185706 - DNA, 25 bp, Homo sapien
ttttacccattttcgaagcctcatc

SEQ ID NO: 1185707 - DNA, 25 bp, Homo sapien
gatagccaaattcttgagagggaaa

SEQ ID NO: 1185708 - DNA, 25 bp, Homo sapien
cattagaagagggtcaaaggcttct

SEQ ID NO: 1185709 - DNA, 25 bp, Homo sapien
gccgggactacagccttgcagtccc

SEQ ID NO: 1185710 - DNA, 25 bp, Homo sapien
gggactacagccttgcagtcccagc

SEQ ID NO: 1185711 - DNA, 25 bp, Homo sapien
tagccgggactacagccttgcagtc

SEQ ID NO: 1185712 - DNA, 25 bp, Homo sapien
cgggactacagccttgcagtcccag

SEQ ID NO: 1185713 - DNA, 25 bp, Homo sapien
gaagaaacatagaggcttctttggg

SEQ ID NO: 1185714 - DNA, 25 bp, Homo sapien
ttctggttgtcacagtgcccacgtt

SEQ ID NO: 1185715 - DNA, 25 bp, Homo sapien
ttctcaagttgatgtagtgaagaaa

SEQ ID NO: 1185716 - DNA, 25 bp, Homo sapien
gccttatagttcaaagttgcctctc

SEQ ID NO: 1185717 - DNA, 25 bp, Homo sapien
ttttatgttgctgtagacgatgatg

SEQ ID NO: 1185718 - DNA, 25 bp, Homo sapien
gatgtaagtgacaatccaaatggac

SEQ ID NO: 1185719 - DNA, 25 bp, Homo sapien
atgatgtaagtgacaatccaaatgg

SEQ ID NO: 1185720 - DNA, 25 bp, Homo sapien
tgctgtagacgatgatgatgtaagt

SEQ ID NO: 1185721 - DNA, 25 bp, Homo sapien
tagtagagatgccttccagctgtcg

SEQ ID NO: 1185722 - DNA, 25 bp, Homo sapien
tgggaatcacatgccagctcaagga

SEQ ID NO: 1185723 - DNA, 25 bp, Homo sapien
agctgtcgacatcctcctgggaatc

SEQ ID NO: 1185724 - DNA, 25 bp, Homo sapien
tacagatttgtcaggatagacccca

SEQ ID NO: 1185725 - DNA, 25 bp, Homo sapien
tgtgaaaaggctaggtaacctgccc

SEQ ID NO: 1185726 - DNA, 25 bp, Homo sapien
gaaacctagtagtggcttccatctc

SEQ ID NO: 1185727 - DNA, 25 bp, Homo sapien
tggtgtgacacaacagccctgcttg

SEQ ID NO: 1185728 - DNA, 25 bp, Homo sapien
tcacagcttggaagtaagcacctgg

SEQ ID NO: 1185729 - DNA, 25 bp, Homo sapien
gccgggaacagatctgaactcttct

SEQ ID NO: 1185730 - DNA, 25 bp, Homo sapien
ccagaaggaatttctcgctgagaca

SEQ ID NO: 1185731 - DNA, 25 bp, Homo sapien
ctgagacacagggtggaagagagct

SEQ ID NO: 1185732 - DNA, 25 bp, Homo sapien
gacgtgatgggatatgggccgggaa

SEQ ID NO: 1185733 - DNA, 25 bp, Homo sapien
ataagacggtgattcattactcccg

SEQ ID NO: 1185734 - DNA, 25 bp, Homo sapien
aagacggtgattcattactcccggg

SEQ ID NO: 1185735 - DNA, 25 bp, Homo sapien
aaaaataagacggtgattcattact

SEQ ID NO: 1185736 - DNA, 25 bp, Homo sapien
aaataagacggtgattcattactcc

SEQ ID NO: 1185737 - DNA, 25 bp, Homo sapien
ctgatctagttcagtttcgtcaaca

SEQ ID NO: 1185738 - DNA, 25 bp, Homo sapien
ttcagtttcgtcaacaaagccagcc

SEQ ID NO: 1185739 - DNA, 25 bp, Homo sapien
tctagttcagtttcgtcaacaaagc

SEQ ID NO: 1185740 - DNA, 25 bp, Homo sapien
agttcagtttcgtcaacaaagccag

SEQ ID NO: 1185741 - DNA, 25 bp, Homo sapien
agctggaagacatcaagggcacaga

SEQ ID NO: 1185742 - DNA, 25 bp, Homo sapien
tcacaaagctatcatacacattttg

SEQ ID NO: 1185743 - DNA, 25 bp, Homo sapien
gctatcatacacattttggccaccc

SEQ ID NO: 1185744 - DNA, 25 bp, Homo sapien
aagctatcatacacattttggccac

SEQ ID NO: 1185745 - DNA, 25 bp, Homo sapien
caaagctatcatacacattttggcc

SEQ ID NO: 1185746 - DNA, 25 bp, Homo sapien
agctggtttgaatatgccggccaac

SEQ ID NO: 1185747 - DNA, 25 bp, Homo sapien
attgtattcaatgaggcccgtttta

SEQ ID NO: 1185748 - DNA, 25 bp, Homo sapien
tcaatgaggcccgttttaagtgggc

SEQ ID NO: 1185749 - DNA, 25 bp, Homo sapien
gccggccaactcttatataacagat

SEQ ID NO: 1185750 - DNA, 25 bp, Homo sapien
ctctctaagcaatacagtcagcctt

SEQ ID NO: 1185751 - DNA, 25 bp, Homo sapien
tctaagcaatacagtcagccttaaa

SEQ ID NO: 1185752 - DNA, 25 bp, Homo sapien
tctctaagcaatacagtcagcctta

SEQ ID NO: 1185753 - DNA, 25 bp, Homo sapien
ctaagcaatacagtcagccttaaat

SEQ ID NO: 1185754 - DNA, 25 bp, Homo sapien
tcacacgaccttctttctcatatct

SEQ ID NO: 1185755 - DNA, 25 bp, Homo sapien
tacacaaggaggacggcttcctcgt

SEQ ID NO: 1185756 - DNA, 25 bp, Homo sapien
aacatgtgtggtacacaaggaggac

SEQ ID NO: 1185757 - DNA, 25 bp, Homo sapien
tacatgcagagtcggcaacatgtgt

SEQ ID NO: 1185758 - DNA, 25 bp, Homo sapien
gtgttaaagctgtgaacagaatcca

SEQ ID NO: 1185759 - DNA, 25 bp, Homo sapien
ttccagcctggggattgccaacagt

SEQ ID NO: 1185760 - DNA, 25 bp, Homo sapien
atgaggaaatggaatgactccccac

SEQ ID NO: 1185761 - DNA, 25 bp, Homo sapien
ttgccaacagtcgttttcaatgagg

SEQ ID NO: 1185762 - DNA, 25 bp, Homo sapien
tgaaagaaggggcccaatttcaatc

SEQ ID NO: 1185763 - DNA, 25 bp, Homo sapien
gcgtcttcgtcaggaaatatttgca

SEQ ID NO: 1185764 - DNA, 25 bp, Homo sapien
ttccccaatgcttttatcagctttg

SEQ ID NO: 1185765 - DNA, 25 bp, Homo sapien
tggtgaaagaaggggcccaatttca

SEQ ID NO: 1185766 - DNA, 25 bp, Homo sapien
gaagactgcgttccaaattgaccag

SEQ ID NO: 1185767 - DNA, 25 bp, Homo sapien
cctggccgggctgttgatttttcaa

SEQ ID NO: 1185768 - DNA, 25 bp, Homo sapien
ttggctacattcgagctgctcaatt

SEQ ID NO: 1185769 - DNA, 25 bp, Homo sapien
tgagaggcattttttgccaacgcaa

SEQ ID NO: 1185770 - DNA, 25 bp, Homo sapien
ctcaatttggctgtagacgtgatca

SEQ ID NO: 1185771 - DNA, 25 bp, Homo sapien
agaagagtaatctcagaggtcctcc

SEQ ID NO: 1185772 - DNA, 25 bp, Homo sapien
gtggcggaagtgtgaggagaatacc

SEQ ID NO: 1185773 - DNA, 25 bp, Homo sapien
gaataccttgaggtggggatttgaa

SEQ ID NO: 1185774 - DNA, 25 bp, Homo sapien
tcaggggtgtatgtgggtggcggaa

SEQ ID NO: 1185775 - DNA, 25 bp, Homo sapien
agcacagtaggaaccttgtgcttca

SEQ ID NO: 1185776 - DNA, 25 bp, Homo sapien
gtttccttcctgttcagcattgcac

SEQ ID NO: 1185777 - DNA, 25 bp, Homo sapien
aggaaccttgtgcttcagactcaaa

SEQ ID NO: 1185778 - DNA, 25 bp, Homo sapien
gtaggaaccttgtgcttcagactca

SEQ ID NO: 1185779 - DNA, 25 bp, Homo sapien
cttttgggactaatgagttccacaa

SEQ ID NO: 1185780 - DNA, 25 bp, Homo sapien
acttactgcactctgttttaaagag

SEQ ID NO: 1185781 - DNA, 25 bp, Homo sapien
tccacaagtttataacctgctatgt

SEQ ID NO: 1185782 - DNA, 25 bp, Homo sapien
ctttcatttgccctaaacttactgc

SEQ ID NO: 1185783 - DNA, 25 bp, Homo sapien
tgcaggggctgtgttaatcttttct

SEQ ID NO: 1185784 - DNA, 25 bp, Homo sapien
gggctgtgttaatcttttctatatc

SEQ ID NO: 1185785 - DNA, 25 bp, Homo sapien
aatacaaaatgcttcctgaatttgc

SEQ ID NO: 1185786 - DNA, 25 bp, Homo sapien
tacaaaatgcttcctgaatttgcat

SEQ ID NO: 1185787 - DNA, 25 bp, Homo sapien
caaagttggggagctacttccaaag

SEQ ID NO: 1185788 - DNA, 25 bp, Homo sapien
agttggggagctacttccaaagttg

SEQ ID NO: 1185789 - DNA, 25 bp, Homo sapien
tgtcccaaagttggggagctacttc

SEQ ID NO: 1185790 - DNA, 25 bp, Homo sapien
tggggagctacttccaaagttgcca

SEQ ID NO: 1185791 - DNA, 25 bp, Homo sapien
tgagtaattgcagagagcaacactt

SEQ ID NO: 1185792 - DNA, 25 bp, Homo sapien
gagtaattgcagagagcaacacttc

SEQ ID NO: 1185793 - DNA, 25 bp, Homo sapien
gtgagtaattgcagagagcaacact

SEQ ID NO: 1185794 - DNA, 25 bp, Homo sapien
agtaattgcagagagcaacacttcc

SEQ ID NO: 1185795 - DNA, 25 bp, Homo sapien
ttgctggaatttgttacgtaaattc

SEQ ID NO: 1185796 - DNA, 25 bp, Homo sapien
gaatttgttacgtaaattcatgctt

SEQ ID NO: 1185797 - DNA, 25 bp, Homo sapien
gctggaatttgttacgtaaattcat

SEQ ID NO: 1185798 - DNA, 25 bp, Homo sapien
tggaatttgttacgtaaattcatgc

SEQ ID NO: 1185799 - DNA, 25 bp, Homo sapien
aaagaattgaatccaaacatatgat

SEQ ID NO: 1185800 - DNA, 25 bp, Homo sapien
catatgatgcaaatgtaaacctctg

SEQ ID NO: 1185801 - DNA, 25 bp, Homo sapien
ctccagagaacaatctaatcttaag

SEQ ID NO: 1185802 - DNA, 25 bp, Homo sapien
agagaacaatctaatcttaagccat

SEQ ID NO: 1185803 - DNA, 25 bp, Homo sapien
tcggatacatttgttgataatggac

SEQ ID NO: 1185804 - DNA, 25 bp, Homo sapien
tgtaggagtctacgaggttgcgaat

SEQ ID NO: 1185805 - DNA, 25 bp, Homo sapien
attgtttttggaattagatctcgga

SEQ ID NO: 1185806 - DNA, 25 bp, Homo sapien
tgtgggtccatggaaaagttttctg

SEQ ID NO: 1185807 - DNA, 25 bp, Homo sapien
tgaagaatacaactgtgctaggagc

SEQ ID NO: 1185808 - DNA, 25 bp, Homo sapien
gagtgctgtatccaggagtcatcca

SEQ ID NO: 1185809 - DNA, 25 bp, Homo sapien
ggctgtgctgatgtccccaattatc

SEQ ID NO: 1185810 - DNA, 25 bp, Homo sapien
tacattcgaagcatctcatcccggc

SEQ ID NO: 1185811 - DNA, 25 bp, Homo sapien
cgtaggcctagatggaacttgtgga

SEQ ID NO: 1185812 - DNA, 25 bp, Homo sapien
gaggtaatgggcctggacggaatgg

SEQ ID NO: 1185813 - DNA, 25 bp, Homo sapien
ccttgcgaggggagcacttagtgtt

SEQ ID NO: 1185814 - DNA, 25 bp, Homo sapien
tcggccggatgtgggccttgcgagg

SEQ ID NO: 1185815 - DNA, 25 bp, Homo sapien
gaagagaaccaaggcgcactacccc

SEQ ID NO: 1185816 - DNA, 25 bp, Homo sapien
gagaagagaaccaaggcgcactacc

SEQ ID NO: 1185817 - DNA, 25 bp, Homo sapien
agaagagaaccaaggcgcactaccc

SEQ ID NO: 1185818 - DNA, 25 bp, Homo sapien
gggttggcaattttcctatagtctc

SEQ ID NO: 1185819 - DNA, 25 bp, Homo sapien
gcataacagggttggcaattttcct

SEQ ID NO: 1185820 - DNA, 25 bp, Homo sapien
aaactgcaaacacgtacgataagat

SEQ ID NO: 1185821 - DNA, 25 bp, Homo sapien
aacacgtacgataagatctttgcaa

SEQ ID NO: 1185822 - DNA, 25 bp, Homo sapien
tagaacacacagcttgctacaatcc

SEQ ID NO: 1185823 - DNA, 25 bp, Homo sapien
tcattcattgggacggagtgttctt

SEQ ID NO: 1185824 - DNA, 25 bp, Homo sapien
tctcccaatagctgccaaaatgtca

SEQ ID NO: 1185825 - DNA, 25 bp, Homo sapien
tagtctgtgccaattgataaatgag

SEQ ID NO: 1185826 - DNA, 25 bp, Homo sapien
aaagttaatgtctgatgaagatcag

SEQ ID NO: 1185827 - DNA, 25 bp, Homo sapien
aagttaatgtctgatgaagatcagg

SEQ ID NO: 1185828 - DNA, 25 bp, Homo sapien
taattgtccgtgtacccttagccca

SEQ ID NO: 1185829 - DNA, 25 bp, Homo sapien
gggaatcagacacaggctagtcact

SEQ ID NO: 1185830 - DNA, 25 bp, Homo sapien
tcctggctgacatcagaggtcacaa

SEQ ID NO: 1185831 - DNA, 25 bp, Homo sapien
aagaagtcagacttttagagggctg

SEQ ID NO: 1185832 - DNA, 25 bp, Homo sapien
tactgaccatggaggctgtacgtaa

SEQ ID NO: 1185833 - DNA, 25 bp, Homo sapien
aataatgttgtacgtggatgaggcc

SEQ ID NO: 1185834 - DNA, 25 bp, Homo sapien
tataattgggcgtagggatcatctg

SEQ ID NO: 1185835 - DNA, 25 bp, Homo sapien
cattactgaaaggatgggccaagca

SEQ ID NO: 1185836 - DNA, 25 bp, Homo sapien
ggaggattctagtgggcggattata

SEQ ID NO: 1185837 - DNA, 25 bp, Homo sapien
tgggcggattatagtgggacgagtt

SEQ ID NO: 1185838 - DNA, 25 bp, Homo sapien
tatagtgggacgagttggtgatggg

SEQ ID NO: 1185839 - DNA, 25 bp, Homo sapien
taacagggaggattctagtgggcgg

SEQ ID NO: 1185840 - DNA, 25 bp, Homo sapien
ggttacttgcctactgatgtccaca

SEQ ID NO: 1185841 - DNA, 25 bp, Homo sapien
tacctgaaaaagtggatgacctacc

SEQ ID NO: 1185842 - DNA, 25 bp, Homo sapien
gggctgctatacaaacctaccttgg

SEQ ID NO: 1185843 - DNA, 25 bp, Homo sapien
tatctgctctgggtgtaaactacac

SEQ ID NO: 1185844 - DNA, 25 bp, Homo sapien
tgtgcctcaggacactagatctgtg

SEQ ID NO: 1185845 - DNA, 25 bp, Homo sapien
agatctgtgagatgttctatggtca

SEQ ID NO: 1185846 - DNA, 25 bp, Homo sapien
tgtagacattactcatctcttggag

SEQ ID NO: 1185847 - DNA, 25 bp, Homo sapien
gaagcagtttcctaaggcatgtgcc

SEQ ID NO: 1185848 - DNA, 25 bp, Homo sapien
taggaatagtcttcaacattcttct

SEQ ID NO: 1185849 - DNA, 25 bp, Homo sapien
ccttcataagtctcattaagactca

SEQ ID NO: 1185850 - DNA, 25 bp, Homo sapien
taatcttagatcaacctggatgcct

SEQ ID NO: 1185851 - DNA, 25 bp, Homo sapien
aagttaataacccagagcagtgagt

SEQ ID NO: 1185852 - DNA, 25 bp, Homo sapien
gctgaaatttggtcttatggtgaca

SEQ ID NO: 1185853 - DNA, 25 bp, Homo sapien
tgacattcctctggccagatctctg

SEQ ID NO: 1185854 - DNA, 25 bp, Homo sapien
cattcttttggctctatgtcaacgc

SEQ ID NO: 1185855 - DNA, 25 bp, Homo sapien
tctatgtcaacgctgaaatttggtc

SEQ ID NO: 1185856 - DNA, 25 bp, Homo sapien
aaattggaatactgagttgctaaca

SEQ ID NO: 1185857 - DNA, 25 bp, Homo sapien
tcaggtaaaggagattggaaagctg

SEQ ID NO: 1185858 - DNA, 25 bp, Homo sapien
aaagcagcatgttttggccaaatca

SEQ ID NO: 1185859 - DNA, 25 bp, Homo sapien
taagctcaccatcctagtattcaac

SEQ ID NO: 1185860 - DNA, 25 bp, Homo sapien
ttacacagtgccgaaatgcttaaag

SEQ ID NO: 1185861 - DNA, 25 bp, Homo sapien
gtatctacccttcctgtcattgctg

SEQ ID NO: 1185862 - DNA, 25 bp, Homo sapien
gcttaaaggcaagtgctgcaaatat

SEQ ID NO: 1185863 - DNA, 25 bp, Homo sapien
ggaatatattccactgacagctaga

SEQ ID NO: 1185864 - DNA, 25 bp, Homo sapien
gaggcaaggtctggtccatggcaac

SEQ ID NO: 1185865 - DNA, 25 bp, Homo sapien
gatttgttctgaagtgggcccaagg

SEQ ID NO: 1185866 - DNA, 25 bp, Homo sapien
tttgtaagtaggaaaacagcaggcc

SEQ ID NO: 1185867 - DNA, 25 bp, Homo sapien
tagctaagttagcagttcccaggac

SEQ ID NO: 1185868 - DNA, 25 bp, Homo sapien
taaataccatggatagacatgttgt

SEQ ID NO: 1185869 - DNA, 25 bp, Homo sapien
tttatgtacatacgacatatagtgc

SEQ ID NO: 1185870 - DNA, 25 bp, Homo sapien
ggatagacatgttgttggaaacaaa

SEQ ID NO: 1185871 - DNA, 25 bp, Homo sapien
cgacatatagtgcaaatgaaaagct

SEQ ID NO: 1185872 - DNA, 25 bp, Homo sapien
gttaggagacgaagtaaacaggcca

SEQ ID NO: 1185873 - DNA, 25 bp, Homo sapien
ttttctctaccaacatctgtgtgat

SEQ ID NO: 1185874 - DNA, 25 bp, Homo sapien
gccagtttacagtttcaataccagt

SEQ ID NO: 1185875 - DNA, 25 bp, Homo sapien
tggagactggggaaacctagctccc

SEQ ID NO: 1185876 - DNA, 25 bp, Homo sapien
aatgttggtgtaacttgacgaacaa

SEQ ID NO: 1185877 - DNA, 25 bp, Homo sapien
caatgttggtgtaacttgacgaaca

SEQ ID NO: 1185878 - DNA, 25 bp, Homo sapien
tcaatgttggtgtaacttgacgaac

SEQ ID NO: 1185879 - DNA, 25 bp, Homo sapien
catcaatgttggtgtaacttgacga

SEQ ID NO: 1185880 - DNA, 25 bp, Homo sapien
tgatcagagcttaggtgagagccag

SEQ ID NO: 1185881 - DNA, 25 bp, Homo sapien
ttgggcctgataaggcatactcctt

SEQ ID NO: 1185882 - DNA, 25 bp, Homo sapien
gattttgggcaaagtgatcagagct

SEQ ID NO: 1185883 - DNA, 25 bp, Homo sapien
gagccagggtttgaccaacattctg

SEQ ID NO: 1185884 - DNA, 25 bp, Homo sapien
tgtatgacaaatactgttctgtgtg

SEQ ID NO: 1185885 - DNA, 25 bp, Homo sapien
actgttctgtgtgcttggaatatat

SEQ ID NO: 1185886 - DNA, 25 bp, Homo sapien
tatgacaaatactgttctgtgtgct

SEQ ID NO: 1185887 - DNA, 25 bp, Homo sapien
aatactgttctgtgtgcttggaata

SEQ ID NO: 1185888 - DNA, 25 bp, Homo sapien
tgtggcatgcctctttgtgggctgc

SEQ ID NO: 1185889 - DNA, 25 bp, Homo sapien
ctgtggcatgcctctttgtgggctg

SEQ ID NO: 1185890 - DNA, 25 bp, Homo sapien
tggcatgcctctttgtgggctgctg

SEQ ID NO: 1185891 - DNA, 25 bp, Homo sapien
ggcatgcctctttgtgggctgctgg

SEQ ID NO: 1185892 - DNA, 25 bp, Homo sapien
cttcatttgaacagttaaaagccat

SEQ ID NO: 1185893 - DNA, 25 bp, Homo sapien
catttgaacagttaaaagccattgc

SEQ ID NO: 1185894 - DNA, 25 bp, Homo sapien
agcctgtctcggcttttgatatgcc

SEQ ID NO: 1185895 - DNA, 25 bp, Homo sapien
tttgaacagttaaaagccattgcag

SEQ ID NO: 1185896 - DNA, 25 bp, Homo sapien
cagcagtcacgtcgcgatggttcca

SEQ ID NO: 1185897 - DNA, 25 bp, Homo sapien
cagagcattcgggtttgggccagtc

SEQ ID NO: 1185898 - DNA, 25 bp, Homo sapien
ttgccttacccagtccttcagatgg

SEQ ID NO: 1185899 - DNA, 25 bp, Homo sapien
agaccggaggtccttcgagcagcca

SEQ ID NO: 1185900 - DNA, 25 bp, Homo sapien
tcccaggtgcctgtctttggacaaa

SEQ ID NO: 1185901 - DNA, 25 bp, Homo sapien
aacgcatggatgcacgggaagtccc

SEQ ID NO: 1185902 - DNA, 25 bp, Homo sapien
tcattcacggctgtatcatgagcac

SEQ ID NO: 1185903 - DNA, 25 bp, Homo sapien
caagcatggcttgttacatgcaggc

SEQ ID NO: 1185904 - DNA, 25 bp, Homo sapien
gagcactaatggcttgtttacaagg

SEQ ID NO: 1185905 - DNA, 25 bp, Homo sapien
gcactaatggcttgtttacaaggct

SEQ ID NO: 1185906 - DNA, 25 bp, Homo sapien
gctgagcactaatggcttgtttaca

SEQ ID NO: 1185907 - DNA, 25 bp, Homo sapien
aaggctgagcactaatggcttgttt

SEQ ID NO: 1185908 - DNA, 25 bp, Homo sapien
gaaaagtcgcagaggtatgaggata

SEQ ID NO: 1185909 - DNA, 25 bp, Homo sapien
agtcagaaaagtcgcagaggtatga

SEQ ID NO: 1185910 - DNA, 25 bp, Homo sapien
cagaaaagtcgcagaggtatgagga

SEQ ID NO: 1185911 - DNA, 25 bp, Homo sapien
tgaagtcagaaaagtcgcagaggta

SEQ ID NO: 1185912 - DNA, 25 bp, Homo sapien
acagtgacaccgagggtcacctggc

SEQ ID NO: 1185913 - DNA, 25 bp, Homo sapien
tgtagcctgtgtgcttgctccacag

SEQ ID NO: 1185914 - DNA, 25 bp, Homo sapien
tgactacccaagcactgtagcctgt

SEQ ID NO: 1185915 - DNA, 25 bp, Homo sapien
cacctcagggaggttctgactaccc

SEQ ID NO: 1185916 - DNA, 25 bp, Homo sapien
gacgctgcttcaggcactgcctatg

SEQ ID NO: 1185917 - DNA, 25 bp, Homo sapien
ggcaccgtgtcgagtgccttaggac

SEQ ID NO: 1185918 - DNA, 25 bp, Homo sapien
cgagtgccttaggacgctgcttcag

SEQ ID NO: 1185919 - DNA, 25 bp, Homo sapien
cgtgtcgagtgccttaggacgctgc

SEQ ID NO: 1185920 - DNA, 25 bp, Homo sapien
agggctcctaataattgtggctcac

SEQ ID NO: 1185921 - DNA, 25 bp, Homo sapien
cagggctcctaataattgtggctca

SEQ ID NO: 1185922 - DNA, 25 bp, Homo sapien
tgtcctagtgcccaggttgccacag

SEQ ID NO: 1185923 - DNA, 25 bp, Homo sapien
tactggtcgttagcattggctttcc

SEQ ID NO: 1185924 - DNA, 25 bp, Homo sapien
tgctggagaatggcctctcactcct

SEQ ID NO: 1185925 - DNA, 25 bp, Homo sapien
cacagtacagagacccagaacaaac

SEQ ID NO: 1185926 - DNA, 25 bp, Homo sapien
ccttcatacacgcagtagactctgg

SEQ ID NO: 1185927 - DNA, 25 bp, Homo sapien
ctgggagccagattcaaatttgagg

SEQ ID NO: 1185928 - DNA, 25 bp, Homo sapien
gtgcaggccttcatacacgcagtag

SEQ ID NO: 1185929 - DNA, 25 bp, Homo sapien
gcaggccttcatacacgcagtagac

SEQ ID NO: 1185930 - DNA, 25 bp, Homo sapien
tgaaggaagagatcctgtccacagt

SEQ ID NO: 1185931 - DNA, 25 bp, Homo sapien
gatcctgtccacagtacattctact

SEQ ID NO: 1185932 - DNA, 25 bp, Homo sapien
ggaagagatcctgtccacagtacat

SEQ ID NO: 1185933 - DNA, 25 bp, Homo sapien
gaatgaaggaagagatcctgtccac

SEQ ID NO: 1185934 - DNA, 25 bp, Homo sapien
cctccggattgccagcagcttcttg

SEQ ID NO: 1185935 - DNA, 25 bp, Homo sapien
ctgtgacggtgaagaggaacgcagc

SEQ ID NO: 1185936 - DNA, 25 bp, Homo sapien
tccagttggcctccggattgccagc

SEQ ID NO: 1185937 - DNA, 25 bp, Homo sapien
gggtctccagttggcctccggattg

SEQ ID NO: 1185938 - DNA, 25 bp, Homo sapien
ccttggatcactgagtcagtcacct

SEQ ID NO: 1185939 - DNA, 25 bp, Homo sapien
ctgttcctttgccttggatcactga

SEQ ID NO: 1185940 - DNA, 25 bp, Homo sapien
tgagtcagtcaccttttggcccagt

SEQ ID NO: 1185941 - DNA, 25 bp, Homo sapien
gatcactgagtcagtcaccttttgg

SEQ ID NO: 1185942 - DNA, 25 bp, Homo sapien
cagtacaatgctctggttttatcag

SEQ ID NO: 1185943 - DNA, 25 bp, Homo sapien
tcacagtacaatgctctggttttat

SEQ ID NO: 1185944 - DNA, 25 bp, Homo sapien
gagagggaattgtccacattcacag

SEQ ID NO: 1185945 - DNA, 25 bp, Homo sapien
cactggaatgttaatggggccctca

SEQ ID NO: 1185946 - DNA, 25 bp, Homo sapien
aaacatttgagacgccatgtcctgc

SEQ ID NO: 1185947 - DNA, 25 bp, Homo sapien
ttgagacgccatgtcctgcaggcct

SEQ ID NO: 1185948 - DNA, 25 bp, Homo sapien
taaaggcgacgcaaacatttgagac

SEQ ID NO: 1185949 - DNA, 25 bp, Homo sapien
gacgcaaacatttgagacgccatgt

SEQ ID NO: 1185950 - DNA, 25 bp, Homo sapien
tgaagagtcgtggaaggcagctgtg

SEQ ID NO: 1185951 - DNA, 25 bp, Homo sapien
ctcagacttgctatcagctgaagcc

SEQ ID NO: 1185952 - DNA, 25 bp, Homo sapien
agacttgctatcagctgaagcctgg

SEQ ID NO: 1185953 - DNA, 25 bp, Homo sapien
tcagacttgctatcagctgaagcct

SEQ ID NO: 1185954 - DNA, 25 bp, Homo sapien
cagacttgctatcagctgaagcctg

SEQ ID NO: 1185955 - DNA, 25 bp, Homo sapien
attttcatttcttgacatgtggagc

SEQ ID NO: 1185956 - DNA, 25 bp, Homo sapien
gctgttggtttctgagcagcatgga

SEQ ID NO: 1185957 - DNA, 25 bp, Homo sapien
cagcatggagtcacactggttcctc

SEQ ID NO: 1185958 - DNA, 25 bp, Homo sapien
tttcttgacatgtggagcacagctg

SEQ ID NO: 1185959 - DNA, 25 bp, Homo sapien
gcaacgggccccgtcactatctctc

SEQ ID NO: 1185960 - DNA, 25 bp, Homo sapien
aggaccaacagttcctccttggcag

SEQ ID NO: 1185961 - DNA, 25 bp, Homo sapien
gaagggcagtgctgcaccctgagat

SEQ ID NO: 1185962 - DNA, 25 bp, Homo sapien
tccttggcagcctttatctaggccc

SEQ ID NO: 1185963 - DNA, 25 bp, Homo sapien
ttggatcatctgggattttcattgt

SEQ ID NO: 1185964 - DNA, 25 bp, Homo sapien
ctataactcatacaattctcaaagg

SEQ ID NO: 1185965 - DNA, 25 bp, Homo sapien
ggatcatctgggattttcattgttc

SEQ ID NO: 1185966 - DNA, 25 bp, Homo sapien
tcatctgggattttcattgttcttg

SEQ ID NO: 1185967 - DNA, 25 bp, Homo sapien
ggaaaggctcaggtgtagtctggaa

SEQ ID NO: 1185968 - DNA, 25 bp, Homo sapien
gaaaggctcaggtgtagtctggaat

SEQ ID NO: 1185969 - DNA, 25 bp, Homo sapien
aggctcaggtgtagtctggaatttg

SEQ ID NO: 1185970 - DNA, 25 bp, Homo sapien
tggaaaggctcaggtgtagtctgga

SEQ ID NO: 1185971 - DNA, 25 bp, Homo sapien
ttcagccatatgttgtggacagatc

SEQ ID NO: 1185972 - DNA, 25 bp, Homo sapien
aaagtcttcagccatatgttgtgga

SEQ ID NO: 1185973 - DNA, 25 bp, Homo sapien
aagtcttcagccatatgttgtggac

SEQ ID NO: 1185974 - DNA, 25 bp, Homo sapien
tcttcagccatatgttgtggacaga

SEQ ID NO: 1185975 - DNA, 25 bp, Homo sapien
ctaaagctgagacttaggtcaatgc

SEQ ID NO: 1185976 - DNA, 25 bp, Homo sapien
gccgctctgagggtatagagatgca

SEQ ID NO: 1185977 - DNA, 25 bp, Homo sapien
tcccattttgattgataccatcagg

SEQ ID NO: 1185978 - DNA, 25 bp, Homo sapien
tgtttctatcaacagcaagtgaaga

SEQ ID NO: 1185979 - DNA, 25 bp, Homo sapien
gaagaacgttgtctctcttttagag

SEQ ID NO: 1185980 - DNA, 25 bp, Homo sapien
tttgtaggcctctgtcagtaatccg

SEQ ID NO: 1185981 - DNA, 25 bp, Homo sapien
tcagtaatccgtggaagacagctgt

SEQ ID NO: 1185982 - DNA, 25 bp, Homo sapien
gtcttgcctattggttcctttctgg

SEQ ID NO: 1185983 - DNA, 25 bp, Homo sapien
tagaggtaagagctagaataccagc

SEQ ID NO: 1185984 - DNA, 25 bp, Homo sapien
taccagcaatcttaggaaggcaaaa

SEQ ID NO: 1185985 - DNA, 25 bp, Homo sapien
agaaaattgtgaggagaaggtgcca

SEQ ID NO: 1185986 - DNA, 25 bp, Homo sapien
ccagtgtcaaagattggcttggcga

SEQ ID NO: 1185987 - DNA, 25 bp, Homo sapien
ctgtgcccagccccacatctttgtt

SEQ ID NO: 1185988 - DNA, 25 bp, Homo sapien
cccagccccacatctttgttctttt

SEQ ID NO: 1185989 - DNA, 25 bp, Homo sapien
tgtgcccagccccacatctttgttc

SEQ ID NO: 1185990 - DNA, 25 bp, Homo sapien
tgcccagccccacatctttgttctt

SEQ ID NO: 1185991 - DNA, 25 bp, Homo sapien
catgtgggtgaatatggctatttcc

SEQ ID NO: 1185992 - DNA, 25 bp, Homo sapien
tcactggccagacagttaaatgtct

SEQ ID NO: 1185993 - DNA, 25 bp, Homo sapien
caagcgataacttcccatgtgggtg

SEQ ID NO: 1185994 - DNA, 25 bp, Homo sapien
tcttgagatgttgacacaactgcct

SEQ ID NO: 1185995 - DNA, 25 bp, Homo sapien
gtggaggacaatcccaagaggttta

SEQ ID NO: 1185996 - DNA, 25 bp, Homo sapien
aggatgatccccactacacagactg

SEQ ID NO: 1185997 - DNA, 25 bp, Homo sapien
cacagactgagtggaggacaatccc

SEQ ID NO: 1185998 - DNA, 25 bp, Homo sapien
ggatgatccccactacacagactga

SEQ ID NO: 1185999 - DNA, 25 bp, Homo sapien
cttgttttacaataggtttcatatt

SEQ ID NO: 1186000 - DNA, 25 bp, Homo sapien
tttcccttcaatacctttaccagca

SEQ ID NO: 1186001 - DNA, 25 bp, Homo sapien
ttcccttcaatacctttaccagcat

SEQ ID NO: 1186002 - DNA, 25 bp, Homo sapien
caataggtttcatatttcccttcaa

SEQ ID NO: 1186003 - DNA, 25 bp, Homo sapien
tggtagggcacactttcaagttggg

SEQ ID NO: 1186004 - DNA, 25 bp, Homo sapien
gagatcacaagcagccaaaaactgt

SEQ ID NO: 1186005 - DNA, 25 bp, Homo sapien
tatgaggaaatagtctgcaatagga

SEQ ID NO: 1186006 - DNA, 25 bp, Homo sapien
cttagaagatgtccatagtctcatt

SEQ ID NO: 1186007 - DNA, 25 bp, Homo sapien
ctaaatataccattgcattcaaact

SEQ ID NO: 1186008 - DNA, 25 bp, Homo sapien
catttttgtgtagtgcaccagttga

SEQ ID NO: 1186009 - DNA, 25 bp, Homo sapien
ggacatcattgacagcatttttgtg

SEQ ID NO: 1186010 - DNA, 25 bp, Homo sapien
tagtgcaccagttgatgacaccttg

SEQ ID NO: 1186011 - DNA, 25 bp, Homo sapien
tatcagaagagtatcgatatggcat

SEQ ID NO: 1186012 - DNA, 25 bp, Homo sapien
ctgttcgaaatcttctagatttaga

SEQ ID NO: 1186013 - DNA, 25 bp, Homo sapien
gctgaaccctaatctatcagaagag

SEQ ID NO: 1186014 - DNA, 25 bp, Homo sapien
gatttagaatctagaagatagctga

SEQ ID NO: 1186015 - DNA, 25 bp, Homo sapien
gtcttgtgtggtgcccaaagatgca

SEQ ID NO: 1186016 - DNA, 25 bp, Homo sapien
cattgagtcgttggatccagaaccc

SEQ ID NO: 1186017 - DNA, 25 bp, Homo sapien
tccagaacccaagtgctaatgaagt

SEQ ID NO: 1186018 - DNA, 25 bp, Homo sapien
tattgtgcagggaaaggtttggacc

SEQ ID NO: 1186019 - DNA, 25 bp, Homo sapien
ttccaagtgtttacgccgctgaggg

SEQ ID NO: 1186020 - DNA, 25 bp, Homo sapien
acggaggctgcaatggtctgtgcct

SEQ ID NO: 1186021 - DNA, 25 bp, Homo sapien
tgcaatggtctgtgccttggaacat

SEQ ID NO: 1186022 - DNA, 25 bp, Homo sapien
aatactaagtaacggggcagcatgc

SEQ ID NO: 1186023 - DNA, 25 bp, Homo sapien
tggagtcggaagggaggagttgtcc

SEQ ID NO: 1186024 - DNA, 25 bp, Homo sapien
tgccgggttcctcactttaagtgtg

SEQ ID NO: 1186025 - DNA, 25 bp, Homo sapien
tgattggttgcagcggaaaaccttt

SEQ ID NO: 1186026 - DNA, 25 bp, Homo sapien
tttaagtgtgcttcgttgcttttcg

SEQ ID NO: 1186027 - DNA, 25 bp, Homo sapien
tctcttcagcaagaatttcgccgct

SEQ ID NO: 1186028 - DNA, 25 bp, Homo sapien
tagaaaggggcgtgccaagaatcct

SEQ ID NO: 1186029 - DNA, 25 bp, Homo sapien
gactgccccattgagctagatgttg

SEQ ID NO: 1186030 - DNA, 25 bp, Homo sapien
cattgagctagatgttgattggtag

SEQ ID NO: 1186031 - DNA, 25 bp, Homo sapien
tgtgttgtgagggaagctgcaccaa

SEQ ID NO: 1186032 - DNA, 25 bp, Homo sapien
ttggaactgttgcactgttttcctc

SEQ ID NO: 1186033 - DNA, 25 bp, Homo sapien
tcctcttttgagcacagttcgtgga

SEQ ID NO: 1186034 - DNA, 25 bp, Homo sapien
ttttgagcacagttcgtggaatggc

SEQ ID NO: 1186035 - DNA, 25 bp, Homo sapien
tcagctttggaactgttgcactgtt

SEQ ID NO: 1186036 - DNA, 25 bp, Homo sapien
gaatccatggttttgttagagaagt

SEQ ID NO: 1186037 - DNA, 25 bp, Homo sapien
ttgccttccagaattcgtttttctc

SEQ ID NO: 1186038 - DNA, 25 bp, Homo sapien
agaagtctatagtttcgctgctcac

SEQ ID NO: 1186039 - DNA, 25 bp, Homo sapien
tgagtccgcgcaagggcctttggga

SEQ ID NO: 1186040 - DNA, 25 bp, Homo sapien
ggccgccgcgtactcgcctctcaac

SEQ ID NO: 1186041 - DNA, 25 bp, Homo sapien
ctccgtgaggccagcgaccaacggc

SEQ ID NO: 1186042 - DNA, 25 bp, Homo sapien
tctcaacagccaatcgccggcgggg

SEQ ID NO: 1186043 - DNA, 25 bp, Homo sapien
cgtgaggccagcgaccaacggccgc

SEQ ID NO: 1186044 - DNA, 25 bp, Homo sapien
gaatgtgaccgatagtcctaagggc

SEQ ID NO: 1186045 - DNA, 25 bp, Homo sapien
ggacaggggcgcttcacaggactcc

SEQ ID NO: 1186046 - DNA, 25 bp, Homo sapien
caggagcgcgagaatgtgaccgata

SEQ ID NO: 1186047 - DNA, 25 bp, Homo sapien
tcctaagggctatggcgctggctga

SEQ ID NO: 1186048 - DNA, 25 bp, Homo sapien
aaggcggcacatcctcccggcagcc

SEQ ID NO: 1186049 - DNA, 25 bp, Homo sapien
agaccagggccaaggcccgccggtg

SEQ ID NO: 1186050 - DNA, 25 bp, Homo sapien
ccaaggcccgccggtgcttcttcat

SEQ ID NO: 1186051 - DNA, 25 bp, Homo sapien
cagaccagagagcacagaaagaggc

SEQ ID NO: 1186052 - DNA, 25 bp, Homo sapien
aggagaccagggccaaggcccgccg

SEQ ID NO: 1186053 - DNA, 25 bp, Homo sapien
cacgggaactcccttgtcgtcgcgg

SEQ ID NO: 1186054 - DNA, 25 bp, Homo sapien
gaactcccttgtcgtcgcggctact

SEQ ID NO: 1186055 - DNA, 25 bp, Homo sapien
cctcacgggaactcccttgtcgtcg

SEQ ID NO: 1186056 - DNA, 25 bp, Homo sapien
gggaactcccttgtcgtcgcggcta

SEQ ID NO: 1186057 - DNA, 25 bp, Homo sapien
gagtcgagaagtaatcggtttgtcc

SEQ ID NO: 1186058 - DNA, 25 bp, Homo sapien
tacaccatgaaaatctccgcacaga

SEQ ID NO: 1186059 - DNA, 25 bp, Homo sapien
tcagatggagagtcgagaagtaatc

SEQ ID NO: 1186060 - DNA, 25 bp, Homo sapien
cagagcactaccagaccagtcagat

SEQ ID NO: 1186061 - DNA, 25 bp, Homo sapien
acaaaggcacttggtggttccctct

SEQ ID NO: 1186062 - DNA, 25 bp, Homo sapien
caaaggcacttggtggttccctcta

SEQ ID NO: 1186063 - DNA, 25 bp, Homo sapien
tcaatctgaacacccaccccaaacc

SEQ ID NO: 1186064 - DNA, 25 bp, Homo sapien
catcaatctgaacacccaccccaaa

SEQ ID NO: 1186065 - DNA, 25 bp, Homo sapien
cagcagtccctcgacttacaagctt

SEQ ID NO: 1186066 - DNA, 25 bp, Homo sapien
agtccctcgacttacaagctttctc

SEQ ID NO: 1186067 - DNA, 25 bp, Homo sapien
tgacagcagtccctcgacttacaag

SEQ ID NO: 1186068 - DNA, 25 bp, Homo sapien
gcagtccctcgacttacaagctttc

SEQ ID NO: 1186069 - DNA, 25 bp, Homo sapien
catgtggtacctctgactgctgttt

SEQ ID NO: 1186070 - DNA, 25 bp, Homo sapien
tctatttagtcctcagcctgctgaa

SEQ ID NO: 1186071 - DNA, 25 bp, Homo sapien
cattgtaccactgagactagtatgg

SEQ ID NO: 1186072 - DNA, 25 bp, Homo sapien
tctacataggagacttacgtactct

SEQ ID NO: 1186073 - DNA, 25 bp, Homo sapien
catgtaagaagctcaaagatacaga

SEQ ID NO: 1186074 - DNA, 25 bp, Homo sapien
cattcttctcaaggacacgtggaac

SEQ ID NO: 1186075 - DNA, 25 bp, Homo sapien
tacccagtaagtaccaattattatg

SEQ ID NO: 1186076 - DNA, 25 bp, Homo sapien
gaaaatatactacaaccactggcaa

SEQ ID NO: 1186077 - DNA, 25 bp, Homo sapien
aataaagaatatactaatatgcaaa

SEQ ID NO: 1186078 - DNA, 25 bp, Homo sapien
tgtgcaataaagaatatactaatat

SEQ ID NO: 1186079 - DNA, 25 bp, Homo sapien
gcaataaagaatatactaatatgca

SEQ ID NO: 1186080 - DNA, 25 bp, Homo sapien
taaagaatatactaatatgcaaatg

SEQ ID NO: 1186081 - DNA, 25 bp, Homo sapien
ttcattttctagtgcgcagttgtca

SEQ ID NO: 1186082 - DNA, 25 bp, Homo sapien
gaactctctttacaacatacacgcc

SEQ ID NO: 1186083 - DNA, 25 bp, Homo sapien
tcttgagagtaatatgatgacgctg

SEQ ID NO: 1186084 - DNA, 25 bp, Homo sapien
ctttacaacatacacgccagctggg

SEQ ID NO: 1186085 - DNA, 25 bp, Homo sapien
tctttgtttacctgagcctatctag

SEQ ID NO: 1186086 - DNA, 25 bp, Homo sapien
cattttagtcttaccatccagcacc

SEQ ID NO: 1186087 - DNA, 25 bp, Homo sapien
taatacctttatgccttctagagtg

SEQ ID NO: 1186088 - DNA, 25 bp, Homo sapien
gcaccgttgtaagcacctagtaaaa

SEQ ID NO: 1186089 - DNA, 25 bp, Homo sapien
ttcccaatgattcggcattgatagg

SEQ ID NO: 1186090 - DNA, 25 bp, Homo sapien
acctgattttcccaatgattcggca

SEQ ID NO: 1186091 - DNA, 25 bp, Homo sapien
ggcattgataggtccctctctttca

SEQ ID NO: 1186092 - DNA, 25 bp, Homo sapien
tgtacatccacaatagaatcatctt

SEQ ID NO: 1186093 - DNA, 25 bp, Homo sapien
tagtcatacaattgtaagggctaca

SEQ ID NO: 1186094 - DNA, 25 bp, Homo sapien
taagcactcggaagtatttgagcac

SEQ ID NO: 1186095 - DNA, 25 bp, Homo sapien
acggtaggagtgttcaggatagtca

SEQ ID NO: 1186096 - DNA, 25 bp, Homo sapien
ggtatacaagacatggtaagcactc

SEQ ID NO: 1186097 - DNA, 25 bp, Homo sapien
aaatcaactgtagggagtgtctcca

SEQ ID NO: 1186098 - DNA, 25 bp, Homo sapien
ctcttcatgcaaatcaactgtaggg

SEQ ID NO: 1186099 - DNA, 25 bp, Homo sapien
tcactgtccacaactgcattggaag

SEQ ID NO: 1186100 - DNA, 25 bp, Homo sapien
agtgtctccaccaccggtggactta

SEQ ID NO: 1186101 - DNA, 25 bp, Homo sapien
aatagtaccagatttttctatttca

SEQ ID NO: 1186102 - DNA, 25 bp, Homo sapien
cggaatagtaccagatttttctatt

SEQ ID NO: 1186103 - DNA, 25 bp, Homo sapien
ctatcggaatagtaccagatttttc

SEQ ID NO: 1186104 - DNA, 25 bp, Homo sapien
atcggaatagtaccagatttttcta

SEQ ID NO: 1186105 - DNA, 25 bp, Homo sapien
tcagactgctcagtttcacttggtt

SEQ ID NO: 1186106 - DNA, 25 bp, Homo sapien
tcaggtggactgacaaaggaaggtt

SEQ ID NO: 1186107 - DNA, 25 bp, Homo sapien
tcaccaacatcacaatcagtttcag

SEQ ID NO: 1186108 - DNA, 25 bp, Homo sapien
ggagcactagcatcaagggcctcac

SEQ ID NO: 1186109 - DNA, 25 bp, Homo sapien
taccatgtgaagatgatacattttc

SEQ ID NO: 1186110 - DNA, 25 bp, Homo sapien
gattttggatcaccaccgccctgtt

SEQ ID NO: 1186111 - DNA, 25 bp, Homo sapien
tgttatctttcctttaccatgtgaa

SEQ ID NO: 1186112 - DNA, 25 bp, Homo sapien
agattttggatcaccaccgccctgt

SEQ ID NO: 1186113 - DNA, 25 bp, Homo sapien
ttgggacttgctactgatgtagggt

SEQ ID NO: 1186114 - DNA, 25 bp, Homo sapien
gtcaatgtctcctggttttgtataa

SEQ ID NO: 1186115 - DNA, 25 bp, Homo sapien
gacttgctactgatgtagggtcaat

SEQ ID NO: 1186116 - DNA, 25 bp, Homo sapien
gctactgatgtagggtcaatgtctc

SEQ ID NO: 1186117 - DNA, 25 bp, Homo sapien
tctactgaggcataattatttcgat

SEQ ID NO: 1186118 - DNA, 25 bp, Homo sapien
gctgctagaattttggcaccacatt

SEQ ID NO: 1186119 - DNA, 25 bp, Homo sapien
gaacctccattagaagatgcatgca

SEQ ID NO: 1186120 - DNA, 25 bp, Homo sapien
cctttttggtggcatgtgaacctcc

SEQ ID NO: 1186121 - DNA, 25 bp, Homo sapien
tgctgcaaggattcaacatgtaaag

SEQ ID NO: 1186122 - DNA, 25 bp, Homo sapien
tgcaaggattcaacatgtaaagatc

SEQ ID NO: 1186123 - DNA, 25 bp, Homo sapien
tttagtgctgcaaggattcaacatg

SEQ ID NO: 1186124 - DNA, 25 bp, Homo sapien
caaattttagtgctgcaaggattca

SEQ ID NO: 1186125 - DNA, 25 bp, Homo sapien
aaccaccattgtcatcatggtccgt

SEQ ID NO: 1186126 - DNA, 25 bp, Homo sapien
tcccgtgtctacctctttccacaca

SEQ ID NO: 1186127 - DNA, 25 bp, Homo sapien
aaaccaccattgtcatcatggtccg

SEQ ID NO: 1186128 - DNA, 25 bp, Homo sapien
gtctcccgtgtctacctctttccac

SEQ ID NO: 1186129 - DNA, 25 bp, Homo sapien
tatagataaacgaatgctccaggct

SEQ ID NO: 1186130 - DNA, 25 bp, Homo sapien
taacactctgggtatacacagcact

SEQ ID NO: 1186131 - DNA, 25 bp, Homo sapien
tggcattggcggaaaataaataccc

SEQ ID NO: 1186132 - DNA, 25 bp, Homo sapien
aaactgcatatagcatggcattggc

SEQ ID NO: 1186133 - DNA, 25 bp, Homo sapien
taattcataatttgcaatatcaagc

SEQ ID NO: 1186134 - DNA, 25 bp, Homo sapien
gaattggttcacaaagttcaataac

SEQ ID NO: 1186135 - DNA, 25 bp, Homo sapien
tgttttacttgaattggttcacaaa

SEQ ID NO: 1186136 - DNA, 25 bp, Homo sapien
atttgcaatatcaagctgttttact

SEQ ID NO: 1186137 - DNA, 25 bp, Homo sapien
ccagcttaatccacttatttgttgg

SEQ ID NO: 1186138 - DNA, 25 bp, Homo sapien
catacatctgttcatctaaagggaa

SEQ ID NO: 1186139 - DNA, 25 bp, Homo sapien
tccgctcatctctaccatgaaaagt

SEQ ID NO: 1186140 - DNA, 25 bp, Homo sapien
gggaaactctgtacattccgctcat

SEQ ID NO: 1186141 - DNA, 25 bp, Homo sapien
tgtaatgcattaatacgccatgccc

SEQ ID NO: 1186142 - DNA, 25 bp, Homo sapien
ccagcagagagcatgtaagattatc

SEQ ID NO: 1186143 - DNA, 25 bp, Homo sapien
ttatttaatagtgcaaaagagaagg

SEQ ID NO: 1186144 - DNA, 25 bp, Homo sapien
taagattatctaacaatatactcag

SEQ ID NO: 1186145 - DNA, 25 bp, Homo sapien
taaggcttaatggacaaaagtgctc

SEQ ID NO: 1186146 - DNA, 25 bp, Homo sapien
ggcttaatggacaaaagtgctctga

SEQ ID NO: 1186147 - DNA, 25 bp, Homo sapien
tataaggcttaatggacaaaagtgc

SEQ ID NO: 1186148 - DNA, 25 bp, Homo sapien
cttataaggcttaatggacaaaagt

SEQ ID NO: 1186149 - DNA, 25 bp, Homo sapien
tatggtattaactcacgtaagagaa

SEQ ID NO: 1186150 - DNA, 25 bp, Homo sapien
tcatcatagcaaaatagcaagcaag

SEQ ID NO: 1186151 - DNA, 25 bp, Homo sapien
aatggctgctccttacatttaagtc

SEQ ID NO: 1186152 - DNA, 25 bp, Homo sapien
gagggccactggcttttggactcaa

SEQ ID NO: 1186153 - DNA, 25 bp, Homo sapien
tcaaatagttcctggcgttctgagt

SEQ ID NO: 1186154 - DNA, 25 bp, Homo sapien
tagttcctggcgttctgagtgatac

SEQ ID NO: 1186155 - DNA, 25 bp, Homo sapien
gcgttctgagtgatactgggaatca

SEQ ID NO: 1186156 - DNA, 25 bp, Homo sapien
agtgatactgggaatcagcaatttc

SEQ ID NO: 1186157 - DNA, 25 bp, Homo sapien
caaaatgtgcttgctcttaggctca

SEQ ID NO: 1186158 - DNA, 25 bp, Homo sapien
gctcaaattatgtcctgtcaaagtc

SEQ ID NO: 1186159 - DNA, 25 bp, Homo sapien
aactctttagagtcacaggatttct

SEQ ID NO: 1186160 - DNA, 25 bp, Homo sapien
taggctcatgggaaatcacaggcat

SEQ ID NO: 1186161 - DNA, 25 bp, Homo sapien
ggatttatcctctccagtattataa

SEQ ID NO: 1186162 - DNA, 25 bp, Homo sapien
atttatcctctccagtattataatc

SEQ ID NO: 1186163 - DNA, 25 bp, Homo sapien
gaggatttatcctctccagtattat

SEQ ID NO: 1186164 - DNA, 25 bp, Homo sapien
tgaggatttatcctctccagtatta

SEQ ID NO: 1186165 - DNA, 25 bp, Homo sapien
ttaactgtggtatgactgttttaat

SEQ ID NO: 1186166 - DNA, 25 bp, Homo sapien
taactgtggtatgactgttttaata

SEQ ID NO: 1186167 - DNA, 25 bp, Homo sapien
ccatagattaactgtggtatgactg

SEQ ID NO: 1186168 - DNA, 25 bp, Homo sapien
aactgtggtatgactgttttaataa

SEQ ID NO: 1186169 - DNA, 25 bp, Homo sapien
aaaaaatgtgatgaccaaaattctt

SEQ ID NO: 1186170 - DNA, 25 bp, Homo sapien
gattagcctatcatatctatggtaa

SEQ ID NO: 1186171 - DNA, 25 bp, Homo sapien
tattgcatagaatcaaatctctttg

SEQ ID NO: 1186172 - DNA, 25 bp, Homo sapien
aactcaacatacagtctgtactggg

SEQ ID NO: 1186173 - DNA, 25 bp, Homo sapien
atattcaccatatttagaatggcat

SEQ ID NO: 1186174 - DNA, 25 bp, Homo sapien
gcagtggcattctcagatatacttt

SEQ ID NO: 1186175 - DNA, 25 bp, Homo sapien
gttgaaacaggagttgattcaggca

SEQ ID NO: 1186176 - DNA, 25 bp, Homo sapien
aggcattttaggtgcagctgtggca

SEQ ID NO: 1186177 - DNA, 25 bp, Homo sapien
gtggcagtggcattctcagatatac

SEQ ID NO: 1186178 - DNA, 25 bp, Homo sapien
ccatgtcatgtgtgtgtacttcagt

SEQ ID NO: 1186179 - DNA, 25 bp, Homo sapien
gaactaactgtacaatgggactctc

SEQ ID NO: 1186180 - DNA, 25 bp, Homo sapien
tatctggtgttgacggctccatgtc

SEQ ID NO: 1186181 - DNA, 25 bp, Homo sapien
caacaaattgtggtcagttcactgc

SEQ ID NO: 1186182 - DNA, 25 bp, Homo sapien
tactcaaagcagttcggctgcgctg

SEQ ID NO: 1186183 - DNA, 25 bp, Homo sapien
catcttcattgtcgggtacagtggc

SEQ ID NO: 1186184 - DNA, 25 bp, Homo sapien
tctccactcagaggttgcaatactg

SEQ ID NO: 1186185 - DNA, 25 bp, Homo sapien
gctgcgctgccgataaagagcaact

SEQ ID NO: 1186186 - DNA, 25 bp, Homo sapien
gtagctgtcctctgtaaccctctca

SEQ ID NO: 1186187 - DNA, 25 bp, Homo sapien
gacatgttaacttctaaggctttaa

SEQ ID NO: 1186188 - DNA, 25 bp, Homo sapien
ggtttgatccatgtacaagatttcc

SEQ ID NO: 1186189 - DNA, 25 bp, Homo sapien
tagcgaccactgagagacatgttaa

SEQ ID NO: 1186190 - DNA, 25 bp, Homo sapien
gctattcttgaagtattctgaagtt

SEQ ID NO: 1186191 - DNA, 25 bp, Homo sapien
aagtattctgaagtttcacgattgt

SEQ ID NO: 1186192 - DNA, 25 bp, Homo sapien
ctgctattcttgaagtattctgaag

SEQ ID NO: 1186193 - DNA, 25 bp, Homo sapien
gaagtttcacgattgttttattgaa

SEQ ID NO: 1186194 - DNA, 25 bp, Homo sapien
cctgtattagggagactttaactga

SEQ ID NO: 1186195 - DNA, 25 bp, Homo sapien
taggcagcactgaattttagaaact

SEQ ID NO: 1186196 - DNA, 25 bp, Homo sapien
gccaggatggtcgaaaatttgaact

SEQ ID NO: 1186197 - DNA, 25 bp, Homo sapien
gtttttaaagcaaagcagttggcgc

SEQ ID NO: 1186198 - DNA, 25 bp, Homo sapien
cgtttcaattctgctactgttgctg

SEQ ID NO: 1186199 - DNA, 25 bp, Homo sapien
aaacaagctgtgtcatgttggtcag

SEQ ID NO: 1186200 - DNA, 25 bp, Homo sapien
gcctgtagcaactggatggcttcag

SEQ ID NO: 1186201 - DNA, 25 bp, Homo sapien
tctgctactgttgctgataaatttg

SEQ ID NO: 1186202 - DNA, 25 bp, Homo sapien
cctgcaattacctcttaattggttt

SEQ ID NO: 1186203 - DNA, 25 bp, Homo sapien
tctcaaagtgctaagcattaatgac

SEQ ID NO: 1186204 - DNA, 25 bp, Homo sapien
tcaaagtgctaagcattaatgacat

SEQ ID NO: 1186205 - DNA, 25 bp, Homo sapien
ctgcaattacctcttaattggtttc

SEQ ID NO: 1186206 - DNA, 25 bp, Homo sapien
gcatcagtcccaagacaacacaaag

SEQ ID NO: 1186207 - DNA, 25 bp, Homo sapien
ttgagaagtatttcgacaacgctgc

SEQ ID NO: 1186208 - DNA, 25 bp, Homo sapien
aagatatgacaagatagctttgtcg

SEQ ID NO: 1186209 - DNA, 25 bp, Homo sapien
cttttagggcttggatactgattac

SEQ ID NO: 1186210 - DNA, 25 bp, Homo sapien
ttctttgccagttaactgtagagac

SEQ ID NO: 1186211 - DNA, 25 bp, Homo sapien
tctcatgagtgggaatgaagttctt

SEQ ID NO: 1186212 - DNA, 25 bp, Homo sapien
tgtagagacttggatctcatgagtg

SEQ ID NO: 1186213 - DNA, 25 bp, Homo sapien
tgccagttaactgtagagacttgga

SEQ ID NO: 1186214 - DNA, 25 bp, Homo sapien
taaacaggagcatgtgcaaacaaag

SEQ ID NO: 1186215 - DNA, 25 bp, Homo sapien
taaagtggcttgacacagcacaaag

SEQ ID NO: 1186216 - DNA, 25 bp, Homo sapien
ggtcatgaacacaacactgacatta

SEQ ID NO: 1186217 - DNA, 25 bp, Homo sapien
cattttttgttgcagatggtcatga

SEQ ID NO: 1186218 - DNA, 25 bp, Homo sapien
gctatgggagcacattcaggttttc

SEQ ID NO: 1186219 - DNA, 25 bp, Homo sapien
agcacaggatgctatgggagcacat

SEQ ID NO: 1186220 - DNA, 25 bp, Homo sapien
tcaggttttccatatctgttgaact

SEQ ID NO: 1186221 - DNA, 25 bp, Homo sapien
cattcaggttttccatatctgttga

SEQ ID NO: 1186222 - DNA, 25 bp, Homo sapien
atagtcctaaactagagacaaaagg

SEQ ID NO: 1186223 - DNA, 25 bp, Homo sapien
tcatagtcctaaactagagacaaaa

SEQ ID NO: 1186224 - DNA, 25 bp, Homo sapien
catagtcctaaactagagacaaaag

SEQ ID NO: 1186225 - DNA, 25 bp, Homo sapien
caaagtttagtgtaataagatacca

SEQ ID NO: 1186226 - DNA, 25 bp, Homo sapien
taagataccatctccctgtgtacag

SEQ ID NO: 1186227 - DNA, 25 bp, Homo sapien
tctgatggtatcataagggaatgga

SEQ ID NO: 1186228 - DNA, 25 bp, Homo sapien
gactccaaaggactatattctcagg

SEQ ID NO: 1186229 - DNA, 25 bp, Homo sapien
catagtaaattcactacagaagctc

SEQ ID NO: 1186230 - DNA, 25 bp, Homo sapien
aggtctgacagagacaaaagcttac

SEQ ID NO: 1186231 - DNA, 25 bp, Homo sapien
gaatgaacacttctggcatagtgag

SEQ ID NO: 1186232 - DNA, 25 bp, Homo sapien
tctaagcagcttcaagatatatccc

SEQ ID NO: 1186233 - DNA, 25 bp, Homo sapien
acttgaggggttctacaatgtacaa

SEQ ID NO: 1186234 - DNA, 25 bp, Homo sapien
aacttgaggggttctacaatgtaca

SEQ ID NO: 1186235 - DNA, 25 bp, Homo sapien
ttatgtcatgcaggctcggcaatga

SEQ ID NO: 1186236 - DNA, 25 bp, Homo sapien
ggcaatgatcccgacttagtctgta

SEQ ID NO: 1186237 - DNA, 25 bp, Homo sapien
gatatgtcccgagactgctgtaaca

SEQ ID NO: 1186238 - DNA, 25 bp, Homo sapien
aaatctctctggttcgtaaagggct

SEQ ID NO: 1186239 - DNA, 25 bp, Homo sapien
cacctaaggaactgggcttccaaat

SEQ ID NO: 1186240 - DNA, 25 bp, Homo sapien
tcatgagacttgtactaattggcca

SEQ ID NO: 1186241 - DNA, 25 bp, Homo sapien
tgtctaccattgtccttataggaag

SEQ ID NO: 1186242 - DNA, 25 bp, Homo sapien
gacagagacatcgacatcacatatg

SEQ ID NO: 1186243 - DNA, 25 bp, Homo sapien
caccactacatattctctcttgcta

SEQ ID NO: 1186244 - DNA, 25 bp, Homo sapien
agtttccatcatgtatgatggacat

SEQ ID NO: 1186245 - DNA, 25 bp, Homo sapien
ccactacatattctctcttgctaaa

SEQ ID NO: 1186246 - DNA, 25 bp, Homo sapien
ctcttgctaaaacccaagtttccat

SEQ ID NO: 1186247 - DNA, 25 bp, Homo sapien
tcctccgactcccacaattctttcc

SEQ ID NO: 1186248 - DNA, 25 bp, Homo sapien
gtgtgagaatatgaaactgcttttg

SEQ ID NO: 1186249 - DNA, 25 bp, Homo sapien
actgcttttgttgaggtttcacctc

SEQ ID NO: 1186250 - DNA, 25 bp, Homo sapien
tagaggtacccctaaatgcctgaaa

SEQ ID NO: 1186251 - DNA, 25 bp, Homo sapien
gaggttaacctttgcatcttgccat

SEQ ID NO: 1186252 - DNA, 25 bp, Homo sapien
tgccatccacctctgatctgccctt

SEQ ID NO: 1186253 - DNA, 25 bp, Homo sapien
tctttgccggctttagaaactcgcc

SEQ ID NO: 1186254 - DNA, 25 bp, Homo sapien
ccccatcagcactgcggaggttaac

SEQ ID NO: 1186255 - DNA, 25 bp, Homo sapien
aagcatatgggctctgtgtctgagg

SEQ ID NO: 1186256 - DNA, 25 bp, Homo sapien
taagcatatgggctctgtgtctgag

SEQ ID NO: 1186257 - DNA, 25 bp, Homo sapien
ttaagcatatgggctctgtgtctga

SEQ ID NO: 1186258 - DNA, 25 bp, Homo sapien
gcatatgggctctgtgtctgaggtg

SEQ ID NO: 1186259 - DNA, 25 bp, Homo sapien
gggatcctgcagagcaggtcagcat

SEQ ID NO: 1186260 - DNA, 25 bp, Homo sapien
tgggatcctgcagagcaggtcagca

SEQ ID NO: 1186261 - DNA, 25 bp, Homo sapien
tcctgggatcctgcagagcaggtca

SEQ ID NO: 1186262 - DNA, 25 bp, Homo sapien
cttcctgggatcctgcagagcaggt

SEQ ID NO: 1186263 - DNA, 25 bp, Homo sapien
tgcttctcaaagaaacacccactca

SEQ ID NO: 1186264 - DNA, 25 bp, Homo sapien
tgactgctcaagaggaggcaagctg

SEQ ID NO: 1186265 - DNA, 25 bp, Homo sapien
tcaaggacgggaccctgttgctgac

SEQ ID NO: 1186266 - DNA, 25 bp, Homo sapien
tcagtcctgtagaggctgaggtgtc

SEQ ID NO: 1186267 - DNA, 25 bp, Homo sapien
agctggtgagtcaggccagccccag

SEQ ID NO: 1186268 - DNA, 25 bp, Homo sapien
gggatatgggtaattgaagggctgc

SEQ ID NO: 1186269 - DNA, 25 bp, Homo sapien
gatatgggtaattgaagggctgctg

SEQ ID NO: 1186270 - DNA, 25 bp, Homo sapien
agatctggggatatgggtaattgaa

SEQ ID NO: 1186271 - DNA, 25 bp, Homo sapien
ccagtagatctggggatatgggtaa

SEQ ID NO: 1186272 - DNA, 25 bp, Homo sapien
ggttggacagggaagaactgtgcct

SEQ ID NO: 1186273 - DNA, 25 bp, Homo sapien
agggagagctggcactgctgtccac

SEQ ID NO: 1186274 - DNA, 25 bp, Homo sapien
gaggggcccagggagagctggcact

SEQ ID NO: 1186275 - DNA, 25 bp, Homo sapien
ggcacagaggttggacagggaagaa

SEQ ID NO: 1186276 - DNA, 25 bp, Homo sapien
cctgtgctgtggttccctctcttct

SEQ ID NO: 1186277 - DNA, 25 bp, Homo sapien
gagacacaggcctgtgctgtggttc

SEQ ID NO: 1186278 - DNA, 25 bp, Homo sapien
gcagcggtagtggaggcagtggtgg

SEQ ID NO: 1186279 - DNA, 25 bp, Homo sapien
tcttcttcaggggtggcagcggtag

SEQ ID NO: 1186280 - DNA, 25 bp, Homo sapien
taggtggaagagctgaaacatcccc

SEQ ID NO: 1186281 - DNA, 25 bp, Homo sapien
ctgtaggtggaagagctgaaacatc

SEQ ID NO: 1186282 - DNA, 25 bp, Homo sapien
ggtggaagagctgaaacatccccag

SEQ ID NO: 1186283 - DNA, 25 bp, Homo sapien
tggaagagctgaaacatccccaggc

SEQ ID NO: 1186284 - DNA, 25 bp, Homo sapien
aaagatgatgctgtgtgcatctggc

SEQ ID NO: 1186285 - DNA, 25 bp, Homo sapien
tatttgcttctccaaagatgatgct

SEQ ID NO: 1186286 - DNA, 25 bp, Homo sapien
tctccaaagatgatgctgtgtgcat

SEQ ID NO: 1186287 - DNA, 25 bp, Homo sapien
ctatttgcttctccaaagatgatgc

SEQ ID NO: 1186288 - DNA, 25 bp, Homo sapien
ttacagccactggcgtgtgtgccag

SEQ ID NO: 1186289 - DNA, 25 bp, Homo sapien
tacagccactggcgtgtgtgccagg

SEQ ID NO: 1186290 - DNA, 25 bp, Homo sapien
gttacagccactggcgtgtgtgcca

SEQ ID NO: 1186291 - DNA, 25 bp, Homo sapien
tactgatctgtctgcgtgtcaccag

SEQ ID NO: 1186292 - DNA, 25 bp, Homo sapien
gaagactactgatctgtctgcgtgt

SEQ ID NO: 1186293 - DNA, 25 bp, Homo sapien
tgtctgcgtgtcaccagatcttccc

SEQ ID NO: 1186294 - DNA, 25 bp, Homo sapien
tgaagaagactactgatctgtctgc

SEQ ID NO: 1186295 - DNA, 25 bp, Homo sapien
tcatgtcataatcagctccaggtct

SEQ ID NO: 1186296 - DNA, 25 bp, Homo sapien
ctcttggatctgtgcccccaatccc

SEQ ID NO: 1186297 - DNA, 25 bp, Homo sapien
cccccaagggactttggaatgactg

SEQ ID NO: 1186298 - DNA, 25 bp, Homo sapien
tgaaaagaatgagcttcttatgggc

SEQ ID NO: 1186299 - DNA, 25 bp, Homo sapien
cccgtaatccattgcagtaagaaat

SEQ ID NO: 1186300 - DNA, 25 bp, Homo sapien
tcttcagaactagcaccaaatctgc

SEQ ID NO: 1186301 - DNA, 25 bp, Homo sapien
gggtcagaacttgatccatcacaga

SEQ ID NO: 1186302 - DNA, 25 bp, Homo sapien
tctgctaggctttgaagtcctttcc

SEQ ID NO: 1186303 - DNA, 25 bp, Homo sapien
taagccgaaaaacgtctgagattcc

SEQ ID NO: 1186304 - DNA, 25 bp, Homo sapien
tgttgcaagattgaccccggaagta

SEQ ID NO: 1186305 - DNA, 25 bp, Homo sapien
tcctcatgtagaccttgtggctcag

SEQ ID NO: 1186306 - DNA, 25 bp, Homo sapien
cactggtaagattgaacactgcccc

SEQ ID NO: 1186307 - DNA, 25 bp, Homo sapien
tttcaccgatggctcaggatatgca

SEQ ID NO: 1186308 - DNA, 25 bp, Homo sapien
aatgcatgtaagaagaccctcactg

SEQ ID NO: 1186309 - DNA, 25 bp, Homo sapien
caaccatgtatctgaaagacagtcc

SEQ ID NO: 1186310 - DNA, 25 bp, Homo sapien
tctcggtgcctgtaacaaagaatca

SEQ ID NO: 1186311 - DNA, 25 bp, Homo sapien
tagtacagctcagacttaggaagat

SEQ ID NO: 1186312 - DNA, 25 bp, Homo sapien
tagtatcactaccagccgatggcat

SEQ ID NO: 1186313 - DNA, 25 bp, Homo sapien
agtcccagaggcgtcctagtacagc

SEQ ID NO: 1186314 - DNA, 25 bp, Homo sapien
cttaggaagatgaaagtgccagtag

SEQ ID NO: 1186315 - DNA, 25 bp, Homo sapien
ttctgtctttttgcaagcacacctc

SEQ ID NO: 1186316 - DNA, 25 bp, Homo sapien
ctttttgcaagcacacctcctcctc

SEQ ID NO: 1186317 - DNA, 25 bp, Homo sapien
tctgtctttttgcaagcacacctcc

SEQ ID NO: 1186318 - DNA, 25 bp, Homo sapien
ctccttcctgagtcgacattctgta

SEQ ID NO: 1186319 - DNA, 25 bp, Homo sapien
cagaagaggcctgtccactaggatt

SEQ ID NO: 1186320 - DNA, 25 bp, Homo sapien
ccagttttttgctaagagttcacat

SEQ ID NO: 1186321 - DNA, 25 bp, Homo sapien
gatgtcagtccataaacaccttgta

SEQ ID NO: 1186322 - DNA, 25 bp, Homo sapien
ctctctgaaggaaatagctgattga

SEQ ID NO: 1186323 - DNA, 25 bp, Homo sapien
cctgacaccaacactaagaaaacag

SEQ ID NO: 1186324 - DNA, 25 bp, Homo sapien
ctgacaccaacactaagaaaacaga

SEQ ID NO: 1186325 - DNA, 25 bp, Homo sapien
accatgtccacataagcagtgctgc

SEQ ID NO: 1186326 - DNA, 25 bp, Homo sapien
gaaagtacaccatgtccacataagc

SEQ ID NO: 1186327 - DNA, 25 bp, Homo sapien
gcttactgtataaccgcaaaaccac

SEQ ID NO: 1186328 - DNA, 25 bp, Homo sapien
aagcagtgctgcttactgtataacc

SEQ ID NO: 1186329 - DNA, 25 bp, Homo sapien
tattcgcgctttcttggacccagag

SEQ ID NO: 1186330 - DNA, 25 bp, Homo sapien
ggctcagtgatatagaatttgacaa

SEQ ID NO: 1186331 - DNA, 25 bp, Homo sapien
ccttgattggaggacagcggcactc

SEQ ID NO: 1186332 - DNA, 25 bp, Homo sapien
ggacccagagggatttaattattga

SEQ ID NO: 1186333 - DNA, 25 bp, Homo sapien
ttggggttgcagcagtgacgaatgt

SEQ ID NO: 1186334 - DNA, 25 bp, Homo sapien
gttgcagcagtgacgaatgtgagtt

SEQ ID NO: 1186335 - DNA, 25 bp, Homo sapien
agtgacgaatgtgagttctgaatca

SEQ ID NO: 1186336 - DNA, 25 bp, Homo sapien
gcagtgacgaatgtgagttctgaat

SEQ ID NO: 1186337 - DNA, 25 bp, Homo sapien
tggtggtgcctcatgttttcttcat

SEQ ID NO: 1186338 - DNA, 25 bp, Homo sapien
gtggtgcctcatgttttcttcatac

SEQ ID NO: 1186339 - DNA, 25 bp, Homo sapien
ggtggtgcctcatgttttcttcata

SEQ ID NO: 1186340 - DNA, 25 bp, Homo sapien
ctggtggtgcctcatgttttcttca

SEQ ID NO: 1186341 - DNA, 25 bp, Homo sapien
tttgcaggcgtgttttaaggagatc

SEQ ID NO: 1186342 - DNA, 25 bp, Homo sapien
ttgcaggcgtgttttaaggagatcc

SEQ ID NO: 1186343 - DNA, 25 bp, Homo sapien
gagtgccaaagtagattccaacgcc

SEQ ID NO: 1186344 - DNA, 25 bp, Homo sapien
caaagtagattccaacgccagggac

SEQ ID NO: 1186345 - DNA, 25 bp, Homo sapien
gattccaacgccagggacacatctc

SEQ ID NO: 1186346 - DNA, 25 bp, Homo sapien
tagagagtgccaaagtagattccaa

SEQ ID NO: 1186347 - DNA, 25 bp, Homo sapien
ctcgcaagaaataccgcttcaaaga

SEQ ID NO: 1186348 - DNA, 25 bp, Homo sapien
gggatggcctcgcaagaaataccgc

SEQ ID NO: 1186349 - DNA, 25 bp, Homo sapien
tggcctcgcaagaaataccgcttca

SEQ ID NO: 1186350 - DNA, 25 bp, Homo sapien
gatggcctcgcaagaaataccgctt

SEQ ID NO: 1186351 - DNA, 25 bp, Homo sapien
catcttgattacagtgatgggtaac

SEQ ID NO: 1186352 - DNA, 25 bp, Homo sapien
tgattacagtgatgggtaacataca

SEQ ID NO: 1186353 - DNA, 25 bp, Homo sapien
tagcacatcttgattacagtgatgg

SEQ ID NO: 1186354 - DNA, 25 bp, Homo sapien
ctcatagcacatcttgattacagtg

SEQ ID NO: 1186355 - DNA, 25 bp, Homo sapien
ctgaaaagggcatatctcgaaggag

SEQ ID NO: 1186356 - DNA, 25 bp, Homo sapien
tcctgaaaagggcatatctcgaagg

SEQ ID NO: 1186357 - DNA, 25 bp, Homo sapien
gaaaagggcatatctcgaaggagag

SEQ ID NO: 1186358 - DNA, 25 bp, Homo sapien
cctggtcatggggcactatgttttt

SEQ ID NO: 1186359 - DNA, 25 bp, Homo sapien
tcactgcttggccaatccattgaaa

SEQ ID NO: 1186360 - DNA, 25 bp, Homo sapien
caccttggaagaagccacgtagtcc

SEQ ID NO: 1186361 - DNA, 25 bp, Homo sapien
gagttttgataacatccgcaggttg

SEQ ID NO: 1186362 - DNA, 25 bp, Homo sapien
tgataacatccgcaggttgagttac

SEQ ID NO: 1186363 - DNA, 25 bp, Homo sapien
taaagaatggcatctattcctcctc

SEQ ID NO: 1186364 - DNA, 25 bp, Homo sapien
aaatgccagaatttagaggtgaaac

SEQ ID NO: 1186365 - DNA, 25 bp, Homo sapien
gagaagttgactgagaaccaattaa

SEQ ID NO: 1186366 - DNA, 25 bp, Homo sapien
gtaaagcactttaattgcagggaaa

SEQ ID NO: 1186367 - DNA, 25 bp, Homo sapien
taaaggtcagagtcaaaaccaaaga

SEQ ID NO: 1186368 - DNA, 25 bp, Homo sapien
aaaggtcagagtcaaaaccaaagag

SEQ ID NO: 1186369 - DNA, 25 bp, Homo sapien
cattaggctcctcacaatgttctgc

SEQ ID NO: 1186370 - DNA, 25 bp, Homo sapien
tagatcaaacttcctacataaacag

SEQ ID NO: 1186371 - DNA, 25 bp, Homo sapien
aacaggatctacatgtgagaacact

SEQ ID NO: 1186372 - DNA, 25 bp, Homo sapien
catgggactgaaactgacgttctga

SEQ ID NO: 1186373 - DNA, 25 bp, Homo sapien
gtatgttaaccaaaagtgctttctg

SEQ ID NO: 1186374 - DNA, 25 bp, Homo sapien
gccatatccatacggactgagtgta

SEQ ID NO: 1186375 - DNA, 25 bp, Homo sapien
tccatacggactgagtgtagccact

SEQ ID NO: 1186376 - DNA, 25 bp, Homo sapien
ctcagtattggtgagcttgtgcctc

SEQ ID NO: 1186377 - DNA, 25 bp, Homo sapien
taatctgcttgaagcataagcgacc

SEQ ID NO: 1186378 - DNA, 25 bp, Homo sapien
gcagcaataaacatccatggactgt

SEQ ID NO: 1186379 - DNA, 25 bp, Homo sapien
gcgacctgggcctattttgttcatc

SEQ ID NO: 1186380 - DNA, 25 bp, Homo sapien
gtggcacagggcctcataatctgct

SEQ ID NO: 1186381 - DNA, 25 bp, Homo sapien
aggaaagagagtgtgaagtctgttc

SEQ ID NO: 1186382 - DNA, 25 bp, Homo sapien
ttaaagcaaaccataccttctagga

SEQ ID NO: 1186383 - DNA, 25 bp, Homo sapien
taccttctaggacactggactcaac

SEQ ID NO: 1186384 - DNA, 25 bp, Homo sapien
ataccttctaggacactggactcaa

SEQ ID NO: 1186385 - DNA, 25 bp, Homo sapien
actccatagggcatccagaaactga

SEQ ID NO: 1186386 - DNA, 25 bp, Homo sapien
gaaactgatatagccctgctcccca

SEQ ID NO: 1186387 - DNA, 25 bp, Homo sapien
aagccccatgggatgacatacttga

SEQ ID NO: 1186388 - DNA, 25 bp, Homo sapien
tggtacggattcactctctgctcaa

SEQ ID NO: 1186389 - DNA, 25 bp, Homo sapien
gccagatgcccctgcgtcactggat

SEQ ID NO: 1186390 - DNA, 25 bp, Homo sapien
aagtgggtgccaagtgacctattat

SEQ ID NO: 1186391 - DNA, 25 bp, Homo sapien
gatgcccctgcgtcactggattctg

SEQ ID NO: 1186392 - DNA, 25 bp, Homo sapien
agaagtgggtgccaagtgacctatt

SEQ ID NO: 1186393 - DNA, 25 bp, Homo sapien
gagtgagcatgtgctaggtcagtat

SEQ ID NO: 1186394 - DNA, 25 bp, Homo sapien
aagagtgagcatgtgctaggtcagt

SEQ ID NO: 1186395 - DNA, 25 bp, Homo sapien
gagcatgtgctaggtcagtatttgg

SEQ ID NO: 1186396 - DNA, 25 bp, Homo sapien
catgtgctaggtcagtatttggtcc

SEQ ID NO: 1186397 - DNA, 25 bp, Homo sapien
acaagaatatataggcagtttgggc

SEQ ID NO: 1186398 - DNA, 25 bp, Homo sapien
aaacaagaatatataggcagtttgg

SEQ ID NO: 1186399 - DNA, 25 bp, Homo sapien
caagaatatataggcagtttgggcc

SEQ ID NO: 1186400 - DNA, 25 bp, Homo sapien
aagaatatataggcagtttgggcca

SEQ ID NO: 1186401 - DNA, 25 bp, Homo sapien
gcgtccccaggctcactctcccaaa

SEQ ID NO: 1186402 - DNA, 25 bp, Homo sapien
gaaatctctgctgatgcgtccccag

SEQ ID NO: 1186403 - DNA, 25 bp, Homo sapien
tttgaatctagcagctttcctctga

SEQ ID NO: 1186404 - DNA, 25 bp, Homo sapien
tagcagctttcctctgaacctcctt

SEQ ID NO: 1186405 - DNA, 25 bp, Homo sapien
tgaaagggccagcaggtcagtccag

SEQ ID NO: 1186406 - DNA, 25 bp, Homo sapien
gaattgggcgatgactactgtagct

SEQ ID NO: 1186407 - DNA, 25 bp, Homo sapien
gctggcttgagaggccagcttttac

SEQ ID NO: 1186408 - DNA, 25 bp, Homo sapien
tgagaggccagcttttactccctta

SEQ ID NO: 1186409 - DNA, 25 bp, Homo sapien
aaatgtccaaccactatagactgga

SEQ ID NO: 1186410 - DNA, 25 bp, Homo sapien
tccaaccactatagactggattaag

SEQ ID NO: 1186411 - DNA, 25 bp, Homo sapien
agggataacattgggagatatactt

SEQ ID NO: 1186412 - DNA, 25 bp, Homo sapien
acccaaatgtccaaccactatagac

SEQ ID NO: 1186413 - DNA, 25 bp, Homo sapien
ctgctccttgctgcatgagtgacaa

SEQ ID NO: 1186414 - DNA, 25 bp, Homo sapien
tgctccttgctgcatgagtgacaag

SEQ ID NO: 1186415 - DNA, 25 bp, Homo sapien
ctccttgctgcatgagtgacaagga

SEQ ID NO: 1186416 - DNA, 25 bp, Homo sapien
cttgctgcatgagtgacaaggactc

SEQ ID NO: 1186417 - DNA, 25 bp, Homo sapien
tcccacatttgttaaaggaatcctg

SEQ ID NO: 1186418 - DNA, 25 bp, Homo sapien
ggaatctgcactgaagcagttccca

SEQ ID NO: 1186419 - DNA, 25 bp, Homo sapien
gttaaaggaatcctgtttggcagaa

SEQ ID NO: 1186420 - DNA, 25 bp, Homo sapien
tctgtgtatttccaagaggggaatc

SEQ ID NO: 1186421 - DNA, 25 bp, Homo sapien
ccactctggagagctatctggcagt

SEQ ID NO: 1186422 - DNA, 25 bp, Homo sapien
cctggtattccctagagcttctgtc

SEQ ID NO: 1186423 - DNA, 25 bp, Homo sapien
aaacttgaacaagctccagagaact

SEQ ID NO: 1186424 - DNA, 25 bp, Homo sapien
cagagaactagcaatttccatggct

SEQ ID NO: 1186425 - DNA, 25 bp, Homo sapien
ttcgtccaagtaagaagaagctcag

SEQ ID NO: 1186426 - DNA, 25 bp, Homo sapien
cgtgactgacatgatcattggctaa

SEQ ID NO: 1186427 - DNA, 25 bp, Homo sapien
ggcacataataagggaacgtgactg

SEQ ID NO: 1186428 - DNA, 25 bp, Homo sapien
taaacgtagtgacaaaacatgtggg

SEQ ID NO: 1186429 - DNA, 25 bp, Homo sapien
tgtagatttagaaaaccgcatcgtt

SEQ ID NO: 1186430 - DNA, 25 bp, Homo sapien
gaaacttgtaatggccactgcaaaa

SEQ ID NO: 1186431 - DNA, 25 bp, Homo sapien
aaacttgtaatggccactgcaaaaa

SEQ ID NO: 1186432 - DNA, 25 bp, Homo sapien
gatttagaaaaccgcatcgtttcag

SEQ ID NO: 1186433 - DNA, 25 bp, Homo sapien
tttttggctagtaggacaatgaaga

SEQ ID NO: 1186434 - DNA, 25 bp, Homo sapien
tttggctagtaggacaatgaagaca

SEQ ID NO: 1186435 - DNA, 25 bp, Homo sapien
atcttccccagaagttggcccattc

SEQ ID NO: 1186436 - DNA, 25 bp, Homo sapien
tccccagaagttggcccattcttgc

SEQ ID NO: 1186437 - DNA, 25 bp, Homo sapien
cagcaattcataggcactggctctg

SEQ ID NO: 1186438 - DNA, 25 bp, Homo sapien
aggcacagcaattcataggcactgg

SEQ ID NO: 1186439 - DNA, 25 bp, Homo sapien
cacagcaattcataggcactggctc

SEQ ID NO: 1186440 - DNA, 25 bp, Homo sapien
ggcacagcaattcataggcactggc

SEQ ID NO: 1186441 - DNA, 25 bp, Homo sapien
cggagtgacagagtgttgtcaatac

SEQ ID NO: 1186442 - DNA, 25 bp, Homo sapien
agtgttgtcaatactctgtaactgg

SEQ ID NO: 1186443 - DNA, 25 bp, Homo sapien
ctggagttgagtctgccttttcgga

SEQ ID NO: 1186444 - DNA, 25 bp, Homo sapien
tccttcctggtattttgtgcctcca

SEQ ID NO: 1186445 - DNA, 25 bp, Homo sapien
gctcattcagggcatacccaggaat

SEQ ID NO: 1186446 - DNA, 25 bp, Homo sapien
ggaagatgtgttcccctgagaagct

SEQ ID NO: 1186447 - DNA, 25 bp, Homo sapien
taagaaccacagacagtctgtgtct

SEQ ID NO: 1186448 - DNA, 25 bp, Homo sapien
attcagggcatacccaggaatggca

SEQ ID NO: 1186449 - DNA, 25 bp, Homo sapien
atcttacaagttaggcattttatca

SEQ ID NO: 1186450 - DNA, 25 bp, Homo sapien
actgacttgtcgtggcaatcttaca

SEQ ID NO: 1186451 - DNA, 25 bp, Homo sapien
cacctttccatttgatagaggaaga

SEQ ID NO: 1186452 - DNA, 25 bp, Homo sapien
tgcaaagcatcttactgacttgtcg

SEQ ID NO: 1186453 - DNA, 25 bp, Homo sapien
gataacgaatgaaccttagccacaa

SEQ ID NO: 1186454 - DNA, 25 bp, Homo sapien
cacctgcggtgtgtggttctaagaa

SEQ ID NO: 1186455 - DNA, 25 bp, Homo sapien
ttaagggagcaacattggaggcagt

SEQ ID NO: 1186456 - DNA, 25 bp, Homo sapien
tccattaaatggtgcggccaacttc

SEQ ID NO: 1186457 - DNA, 25 bp, Homo sapien
gcaccacctttttcagctctaaata

SEQ ID NO: 1186458 - DNA, 25 bp, Homo sapien
agtcacagtggagccattttcatac

SEQ ID NO: 1186459 - DNA, 25 bp, Homo sapien
tcagttcccaccagatgaaagccaa

SEQ ID NO: 1186460 - DNA, 25 bp, Homo sapien
tgatttaaaagcctcggtcctgtag

SEQ ID NO: 1186461 - DNA, 25 bp, Homo sapien
gaacagcatggttctgaagacactg

SEQ ID NO: 1186462 - DNA, 25 bp, Homo sapien
gaaagccaagctgtaagtcctgcat

SEQ ID NO: 1186463 - DNA, 25 bp, Homo sapien
tttattgtgatagctgcagaaggca

SEQ ID NO: 1186464 - DNA, 25 bp, Homo sapien
ggaagtttcacatcttctgggacag

SEQ ID NO: 1186465 - DNA, 25 bp, Homo sapien
aagctgtatctttgcctcaatgaga

SEQ ID NO: 1186466 - DNA, 25 bp, Homo sapien
caagagattcaccaatgtgttaaaa

SEQ ID NO: 1186467 - DNA, 25 bp, Homo sapien
aaaagtagcattgatttccaagaga

SEQ ID NO: 1186468 - DNA, 25 bp, Homo sapien
aagcagtgcttttatgtgatcaggg

SEQ ID NO: 1186469 - DNA, 25 bp, Homo sapien
ccaaatgtgaatgggtagaatattc

SEQ ID NO: 1186470 - DNA, 25 bp, Homo sapien
gggtagaatattctgctaaggccat

SEQ ID NO: 1186471 - DNA, 25 bp, Homo sapien
catgaacaagtttattaccttccaa

SEQ ID NO: 1186472 - DNA, 25 bp, Homo sapien
gaccatatacctcttaagacatgaa

SEQ ID NO: 1186473 - DNA, 25 bp, Homo sapien
tcaaacacgtgatgtaactaactgc

SEQ ID NO: 1186474 - DNA, 25 bp, Homo sapien
gatgtaactaactgctcctccaatt

SEQ ID NO: 1186475 - DNA, 25 bp, Homo sapien
ctggttagtcaaacacgtgatgtaa

SEQ ID NO: 1186476 - DNA, 25 bp, Homo sapien
tcactggttagtcaaacacgtgatg

SEQ ID NO: 1186477 - DNA, 25 bp, Homo sapien
gaggcagtggaaatgattcatgcta

SEQ ID NO: 1186478 - DNA, 25 bp, Homo sapien
cttccactccgtcaggtgggaggca

SEQ ID NO: 1186479 - DNA, 25 bp, Homo sapien
gaacacctttgggtaacagctgcat

SEQ ID NO: 1186480 - DNA, 25 bp, Homo sapien
cctttgggtaacagctgcatggaca

SEQ ID NO: 1186481 - DNA, 25 bp, Homo sapien
cctgggcaggaagtgtggacaaacc

SEQ ID NO: 1186482 - DNA, 25 bp, Homo sapien
cagatgggtaaatcataggctctac

SEQ ID NO: 1186483 - DNA, 25 bp, Homo sapien
tttgggcacataggacatagtctgg

SEQ ID NO: 1186484 - DNA, 25 bp, Homo sapien
caaagccctgaactaggtggaggtc

SEQ ID NO: 1186485 - DNA, 25 bp, Homo sapien
ttggagaaagtaagcgaaaagaaca

SEQ ID NO: 1186486 - DNA, 25 bp, Homo sapien
tctctcctggtaacccagataatta

SEQ ID NO: 1186487 - DNA, 25 bp, Homo sapien
aagctactcgctgtctttctcccaa

SEQ ID NO: 1186488 - DNA, 25 bp, Homo sapien
ccaaaatatagggattctgaccagt

SEQ ID NO: 1186489 - DNA, 25 bp, Homo sapien
tgatacactgttgccatgtcaggaa

SEQ ID NO: 1186490 - DNA, 25 bp, Homo sapien
gttgattgaattctgactggttttc

SEQ ID NO: 1186491 - DNA, 25 bp, Homo sapien
tcaataggccaggaagtgttacagt

SEQ ID NO: 1186492 - DNA, 25 bp, Homo sapien
tggtttcctcatgctctgagtcaat

SEQ ID NO: 1186493 - DNA, 25 bp, Homo sapien
tacagtgttgggtgaggcgattgat

SEQ ID NO: 1186494 - DNA, 25 bp, Homo sapien
tcatgctctgagtcaataggccagg

SEQ ID NO: 1186495 - DNA, 25 bp, Homo sapien
ctccaccctgcccacattcaccatc

SEQ ID NO: 1186496 - DNA, 25 bp, Homo sapien
tccaccctgcccacattcaccatca

SEQ ID NO: 1186497 - DNA, 25 bp, Homo sapien
aagccattgtcaacccttctcacac

SEQ ID NO: 1186498 - DNA, 25 bp, Homo sapien
cattgtcaacccttctcacactgtt

SEQ ID NO: 1186499 - DNA, 25 bp, Homo sapien
catttccgatgagttagtcaacagt

SEQ ID NO: 1186500 - DNA, 25 bp, Homo sapien
tttccgatgagttagtcaacagttt

SEQ ID NO: 1186501 - DNA, 25 bp, Homo sapien
tccgatgagttagtcaacagtttca

SEQ ID NO: 1186502 - DNA, 25 bp, Homo sapien
ttccgatgagttagtcaacagtttc

SEQ ID NO: 1186503 - DNA, 25 bp, Homo sapien
gaagtgagagctggatgcaactgac

SEQ ID NO: 1186504 - DNA, 25 bp, Homo sapien
gcagaagtgagagctggatgcaact

SEQ ID NO: 1186505 - DNA, 25 bp, Homo sapien
ttaggcagaagtgagagctggatgc

SEQ ID NO: 1186506 - DNA, 25 bp, Homo sapien
taggcagaagtgagagctggatgca

SEQ ID NO: 1186507 - DNA, 25 bp, Homo sapien
ccgatatcaaatagttgtcctgtag

SEQ ID NO: 1186508 - DNA, 25 bp, Homo sapien
gggtccgatatcaaatagttgtcct

SEQ ID NO: 1186509 - DNA, 25 bp, Homo sapien
cctgtaggtatagattaggtaatgg

SEQ ID NO: 1186510 - DNA, 25 bp, Homo sapien
tagttgtcctgtaggtatagattag

SEQ ID NO: 1186511 - DNA, 25 bp, Homo sapien
tggccagggcagctcttacttttta

SEQ ID NO: 1186512 - DNA, 25 bp, Homo sapien
ttacttcatgtttctgtggtggaac

SEQ ID NO: 1186513 - DNA, 25 bp, Homo sapien
accaggacctggatttttctattct

SEQ ID NO: 1186514 - DNA, 25 bp, Homo sapien
tctgtggtggaaccaggacctggat

SEQ ID NO: 1186515 - DNA, 25 bp, Homo sapien
gacctggatttttctattctgccat

SEQ ID NO: 1186516 - DNA, 25 bp, Homo sapien
caagtctaatctcatgtcaacagag

SEQ ID NO: 1186517 - DNA, 25 bp, Homo sapien
cagccagtcaaatatgttccctgga

SEQ ID NO: 1186518 - DNA, 25 bp, Homo sapien
gttccctggactattgacgatcaag

SEQ ID NO: 1186519 - DNA, 25 bp, Homo sapien
gaatgactccgtctcttttgggtaa

SEQ ID NO: 1186520 - DNA, 25 bp, Homo sapien
taactcctgtgaaagaactaggtgg

SEQ ID NO: 1186521 - DNA, 25 bp, Homo sapien
aaataggcagagcataactcctgtg

SEQ ID NO: 1186522 - DNA, 25 bp, Homo sapien
tgtctgggagcctttgtcaatatgc

SEQ ID NO: 1186523 - DNA, 25 bp, Homo sapien
tagcagccttccacttttgtctggg

SEQ ID NO: 1186524 - DNA, 25 bp, Homo sapien
accccaggcactgatgccgctgctg

SEQ ID NO: 1186525 - DNA, 25 bp, Homo sapien
ctgctgcctctgaccccaaagccat

SEQ ID NO: 1186526 - DNA, 25 bp, Homo sapien
cgatacagcagcaagagctcctgca

SEQ ID NO: 1186527 - DNA, 25 bp, Homo sapien
gcaccccaggcactgatgccgctgc

SEQ ID NO: 1186528 - DNA, 25 bp, Homo sapien
ccagtggcatgctctgcagagggca

SEQ ID NO: 1186529 - DNA, 25 bp, Homo sapien
tttgccattgaggtaactaatagca

SEQ ID NO: 1186530 - DNA, 25 bp, Homo sapien
gtggtccccagtggcatgctctgca

SEQ ID NO: 1186531 - DNA, 25 bp, Homo sapien
ccattgaggtaactaatagcaatca

SEQ ID NO: 1186532 - DNA, 25 bp, Homo sapien
tatggttggtctaaagcactcaaga

SEQ ID NO: 1186533 - DNA, 25 bp, Homo sapien
aattgtaggtctactgatcactgcc

SEQ ID NO: 1186534 - DNA, 25 bp, Homo sapien
tctgagagaaatagaaagacactag

SEQ ID NO: 1186535 - DNA, 25 bp, Homo sapien
tatcagctgtatcctctggttttac

SEQ ID NO: 1186536 - DNA, 25 bp, Homo sapien
cccagaattgttgtagcctgcatat

SEQ ID NO: 1186537 - DNA, 25 bp, Homo sapien
aatcccagaattgttgtagcctgca

SEQ ID NO: 1186538 - DNA, 25 bp, Homo sapien
cagaattgttgtagcctgcatatta

SEQ ID NO: 1186539 - DNA, 25 bp, Homo sapien
tcccagaattgttgtagcctgcata

SEQ ID NO: 1186540 - DNA, 25 bp, Homo sapien
caaggaatggcaaggccggtatagt

SEQ ID NO: 1186541 - DNA, 25 bp, Homo sapien
cattgtggccttgtaccaagcaagg

SEQ ID NO: 1186542 - DNA, 25 bp, Homo sapien
agatgtgtttccctctactagccca

SEQ ID NO: 1186543 - DNA, 25 bp, Homo sapien
cacttcctggtttcatgcttggtga

SEQ ID NO: 1186544 - DNA, 25 bp, Homo sapien
cccaggattaactgtcccacgttct

SEQ ID NO: 1186545 - DNA, 25 bp, Homo sapien
tgctttcggccaccacccattcttt

SEQ ID NO: 1186546 - DNA, 25 bp, Homo sapien
ccaggattaactgtcccacgttctg

SEQ ID NO: 1186547 - DNA, 25 bp, Homo sapien
ccacgttctgctttcggccaccacc

SEQ ID NO: 1186548 - DNA, 25 bp, Homo sapien
aactcgtcatttagcattacctata

SEQ ID NO: 1186549 - DNA, 25 bp, Homo sapien
actcgtcatttagcattacctatat

SEQ ID NO: 1186550 - DNA, 25 bp, Homo sapien
tcgtcatttagcattacctatatct

SEQ ID NO: 1186551 - DNA, 25 bp, Homo sapien
taactcgtcatttagcattacctat

SEQ ID NO: 1186552 - DNA, 25 bp, Homo sapien
tcagtctatagcagagtctggaaac

SEQ ID NO: 1186553 - DNA, 25 bp, Homo sapien
cacattatgggctagggcttcagca

SEQ ID NO: 1186554 - DNA, 25 bp, Homo sapien
ggaaaaaccgatgtctcaacgtgaa

SEQ ID NO: 1186555 - DNA, 25 bp, Homo sapien
ccttctgacttgcaagagggtcagc

SEQ ID NO: 1186556 - DNA, 25 bp, Homo sapien
gaaagtctgagaacagggttcctga

SEQ ID NO: 1186557 - DNA, 25 bp, Homo sapien
tggccagcagacttaagacacagga

SEQ ID NO: 1186558 - DNA, 25 bp, Homo sapien
gagtctatcttagtcagcgcatgct

SEQ ID NO: 1186559 - DNA, 25 bp, Homo sapien
ggtgagttagcaagctgaagaccct

SEQ ID NO: 1186560 - DNA, 25 bp, Homo sapien
ggtggcccactgactccctttgtca

SEQ ID NO: 1186561 - DNA, 25 bp, Homo sapien
cagtgggattgcaccgagtcttcct

SEQ ID NO: 1186562 - DNA, 25 bp, Homo sapien
cctttgtcaggggtgccccaggaat

SEQ ID NO: 1186563 - DNA, 25 bp, Homo sapien
gggattgcaccgagtcttcctccat

SEQ ID NO: 1186564 - DNA, 25 bp, Homo sapien
gtgtcctcgtactcgtacaacctga

SEQ ID NO: 1186565 - DNA, 25 bp, Homo sapien
tgtcctcgtactcgtacaacctgaa

SEQ ID NO: 1186566 - DNA, 25 bp, Homo sapien
atagtgtcctcgtactcgtacaacc

SEQ ID NO: 1186567 - DNA, 25 bp, Homo sapien
acttcattatcctttcggttaggca

SEQ ID NO: 1186568 - DNA, 25 bp, Homo sapien
tggtagttggttagtttacctctgc

SEQ ID NO: 1186569 - DNA, 25 bp, Homo sapien
tggttagtttacctctgccaactca

SEQ ID NO: 1186570 - DNA, 25 bp, Homo sapien
ctaaaacataatggtagttggttag

SEQ ID NO: 1186571 - DNA, 25 bp, Homo sapien
tatcccttagtactaaaacataatg

SEQ ID NO: 1186572 - DNA, 25 bp, Homo sapien
gattagcagtatggctgctggcctg

SEQ ID NO: 1186573 - DNA, 25 bp, Homo sapien
gagtctgtgttatcagccggctagt

SEQ ID NO: 1186574 - DNA, 25 bp, Homo sapien
tctccaagggtagaatctgaactga

SEQ ID NO: 1186575 - DNA, 25 bp, Homo sapien
gaagccaaggatattgattagcagt

SEQ ID NO: 1186576 - DNA, 25 bp, Homo sapien
tagtgtgagaatcggaggcattagt

SEQ ID NO: 1186577 - DNA, 25 bp, Homo sapien
caacttagtgtgagaatcggaggca

SEQ ID NO: 1186578 - DNA, 25 bp, Homo sapien
gaatcggaggcattagtgggaagga

SEQ ID NO: 1186579 - DNA, 25 bp, Homo sapien
gacaacttagtgtgagaatcggagg

SEQ ID NO: 1186580 - DNA, 25 bp, Homo sapien
tgatctacgacactccccaaataag

SEQ ID NO: 1186581 - DNA, 25 bp, Homo sapien
tctccaaatgtagtacatccatccg

SEQ ID NO: 1186582 - DNA, 25 bp, Homo sapien
tccgataagcctttccttaagagtg

SEQ ID NO: 1186583 - DNA, 25 bp, Homo sapien
ccttaagagtgatctacgacactcc

SEQ ID NO: 1186584 - DNA, 25 bp, Homo sapien
cagaaaatggggggtaaagaagatg

SEQ ID NO: 1186585 - DNA, 25 bp, Homo sapien
taaagaagatgatgatggtcatcat

SEQ ID NO: 1186586 - DNA, 25 bp, Homo sapien
aaatggggggtaaagaagatgatga

SEQ ID NO: 1186587 - DNA, 25 bp, Homo sapien
ggtaaagaagatgatgatggtcatc

SEQ ID NO: 1186588 - DNA, 25 bp, Homo sapien
gtcaagcggccaaagcggaccagtg

SEQ ID NO: 1186589 - DNA, 25 bp, Homo sapien
ccaaagcggaccagtgtcagcaggg

SEQ ID NO: 1186590 - DNA, 25 bp, Homo sapien
gagacttcaggaagcccacacacgt

SEQ ID NO: 1186591 - DNA, 25 bp, Homo sapien
gcaaagtgatatgccctggtccgca

SEQ ID NO: 1186592 - DNA, 25 bp, Homo sapien
tacctaatgaggaagtcagggcccc

SEQ ID NO: 1186593 - DNA, 25 bp, Homo sapien
gccgtgggcagctcagtaacaatag

SEQ ID NO: 1186594 - DNA, 25 bp, Homo sapien
tgcacacccatactatagggcaggg

SEQ ID NO: 1186595 - DNA, 25 bp, Homo sapien
catagatccattggtgccgtgggca

SEQ ID NO: 1186596 - DNA, 25 bp, Homo sapien
tggaagcccggtcttggagtccctc

SEQ ID NO: 1186597 - DNA, 25 bp, Homo sapien
catctgtgagtcagtgtagggtcct

SEQ ID NO: 1186598 - DNA, 25 bp, Homo sapien
gccatgaccattacacatctgtgag

SEQ ID NO: 1186599 - DNA, 25 bp, Homo sapien
ctctgtttacatgtaaggctcgcca

SEQ ID NO: 1186600 - DNA, 25 bp, Homo sapien
tggcatctgcccaggcttccacagc

SEQ ID NO: 1186601 - DNA, 25 bp, Homo sapien
cctggcatctgcccaggcttccaca

SEQ ID NO: 1186602 - DNA, 25 bp, Homo sapien
tagaatactgcctggcatctgccca

SEQ ID NO: 1186603 - DNA, 25 bp, Homo sapien
cttagaatactgcctggcatctgcc

SEQ ID NO: 1186604 - DNA, 25 bp, Homo sapien
cgcttgggttactctaactcttctt

SEQ ID NO: 1186605 - DNA, 25 bp, Homo sapien
ggcttgtccgcttgggttactctaa

SEQ ID NO: 1186606 - DNA, 25 bp, Homo sapien
agcaggcttgtccgcttgggttact

SEQ ID NO: 1186607 - DNA, 25 bp, Homo sapien
tgtccgcttgggttactctaactct

SEQ ID NO: 1186608 - DNA, 25 bp, Homo sapien
gacataaagcagtcctagcctcctg

SEQ ID NO: 1186609 - DNA, 25 bp, Homo sapien
ttcatctcaagtgcagggacaaggc

SEQ ID NO: 1186610 - DNA, 25 bp, Homo sapien
attccatttggaccgcagcctctca

SEQ ID NO: 1186611 - DNA, 25 bp, Homo sapien
tcagagtggctagaaaatccgtggt

SEQ ID NO: 1186612 - DNA, 25 bp, Homo sapien
ttagcagctggctacgagaggtgga

SEQ ID NO: 1186613 - DNA, 25 bp, Homo sapien
tagcagctggctacgagaggtggag

SEQ ID NO: 1186614 - DNA, 25 bp, Homo sapien
gcagctggctacgagaggtggagga

SEQ ID NO: 1186615 - DNA, 25 bp, Homo sapien
agctggctacgagaggtggaggaga

SEQ ID NO: 1186616 - DNA, 25 bp, Homo sapien
cacgacatcaactctctcatctggt

SEQ ID NO: 1186617 - DNA, 25 bp, Homo sapien
cttactcctgttggttgaagatgga

SEQ ID NO: 1186618 - DNA, 25 bp, Homo sapien
tactcctgttggttgaagatggaag

SEQ ID NO: 1186619 - DNA, 25 bp, Homo sapien
tcatctggtggtgtccaccgtctta

SEQ ID NO: 1186620 - DNA, 25 bp, Homo sapien
catcaagctgttattgcatacttgg

SEQ ID NO: 1186621 - DNA, 25 bp, Homo sapien
atcaccagtcatcaagctgttattg

SEQ ID NO: 1186622 - DNA, 25 bp, Homo sapien
tattgcatacttggtatatgaaagg

SEQ ID NO: 1186623 - DNA, 25 bp, Homo sapien
tatatgaaaggctctatgtcatgtg

SEQ ID NO: 1186624 - DNA, 25 bp, Homo sapien
ccagtggtcacaaggcatccacaca

SEQ ID NO: 1186625 - DNA, 25 bp, Homo sapien
caaggcatccacacaggctgacagt

SEQ ID NO: 1186626 - DNA, 25 bp, Homo sapien
gtcacaaggcatccacacaggctga

SEQ ID NO: 1186627 - DNA, 25 bp, Homo sapien
ggcatccacacaggctgacagttgc

SEQ ID NO: 1186628 - DNA, 25 bp, Homo sapien
gctcttcttccccatatcactagtt

SEQ ID NO: 1186629 - DNA, 25 bp, Homo sapien
caaacagattcattgactttgcttc

SEQ ID NO: 1186630 - DNA, 25 bp, Homo sapien
tttttatgattgctggctcctccag

SEQ ID NO: 1186631 - DNA, 25 bp, Homo sapien
catatcactagttatgttaatggct

SEQ ID NO: 1186632 - DNA, 25 bp, Homo sapien
ttcaaatgttgagtgagccttgcat

SEQ ID NO: 1186633 - DNA, 25 bp, Homo sapien
gccttgcattctggggataagcccc

SEQ ID NO: 1186634 - DNA, 25 bp, Homo sapien
tccaataagatattcatgtgattat

SEQ ID NO: 1186635 - DNA, 25 bp, Homo sapien
tagactgttgacgtggtgaattaca

SEQ ID NO: 1186636 - DNA, 25 bp, Homo sapien
agtattccttgtggtggtgaattgt

SEQ ID NO: 1186637 - DNA, 25 bp, Homo sapien
gtattccttgtggtggtgaattgtt

SEQ ID NO: 1186638 - DNA, 25 bp, Homo sapien
tattccttgtggtggtgaattgttc

SEQ ID NO: 1186639 - DNA, 25 bp, Homo sapien
ctggccccggcagtattccttgtgg

SEQ ID NO: 1186640 - DNA, 25 bp, Homo sapien
ttgaggatgcgccaggtttgactct

SEQ ID NO: 1186641 - DNA, 25 bp, Homo sapien
agccccaaggtggagaatcgcctgg

SEQ ID NO: 1186642 - DNA, 25 bp, Homo sapien
aaggcgagccccaaggtggagaatc

SEQ ID NO: 1186643 - DNA, 25 bp, Homo sapien
actctgcagggcgtacgcgctttag

SEQ ID NO: 1186644 - DNA, 25 bp, Homo sapien
tgtcccagcgcgcggaggaataaac

SEQ ID NO: 1186645 - DNA, 25 bp, Homo sapien
ctgtcccagcgcgcggaggaataaa

SEQ ID NO: 1186646 - DNA, 25 bp, Homo sapien
agcaaccggttggttctggcgaaga

SEQ ID NO: 1186647 - DNA, 25 bp, Homo sapien
caagcaaccggttggttctggcgaa

SEQ ID NO: 1186648 - DNA, 25 bp, Homo sapien
gacagcaagcaaccggttggttctg

SEQ ID NO: 1186649 - DNA, 25 bp, Homo sapien
agcaagcaaccggttggttctggcg

SEQ ID NO: 1186650 - DNA, 25 bp, Homo sapien
tggcctcaaagttgggagccacgtc

SEQ ID NO: 1186651 - DNA, 25 bp, Homo sapien
ggcctcaaagttgggagccacgtcc

SEQ ID NO: 1186652 - DNA, 25 bp, Homo sapien
ttggcctcaaagttgggagccacgt

SEQ ID NO: 1186653 - DNA, 25 bp, Homo sapien
tgcaccctcagatgatacgttggcc

SEQ ID NO: 1186654 - DNA, 25 bp, Homo sapien
ggaggcggctctggacaaaaagtct

SEQ ID NO: 1186655 - DNA, 25 bp, Homo sapien
catatcttggccattggaggcggct

SEQ ID NO: 1186656 - DNA, 25 bp, Homo sapien
tctgaaggcacacctacgcagagtg

SEQ ID NO: 1186657 - DNA, 25 bp, Homo sapien
gtgtcctggagcctggaacggccat

SEQ ID NO: 1186658 - DNA, 25 bp, Homo sapien
tggagcctggaacggccatcactag

SEQ ID NO: 1186659 - DNA, 25 bp, Homo sapien
gagtacacgtgtcctggagcctgga

SEQ ID NO: 1186660 - DNA, 25 bp, Homo sapien
agtgaggggcaagccactggaaaac

SEQ ID NO: 1186661 - DNA, 25 bp, Homo sapien
gaaacagcgataaggtaaactcacc

SEQ ID NO: 1186662 - DNA, 25 bp, Homo sapien
gaatactatacctgatcctaggcag

SEQ ID NO: 1186663 - DNA, 25 bp, Homo sapien
gaactgttgtcaagccttggagccc

SEQ ID NO: 1186664 - DNA, 25 bp, Homo sapien
tataactagacatgcctggaatgct

SEQ ID NO: 1186665 - DNA, 25 bp, Homo sapien
ggctgccactcaactcccaaggttt

SEQ ID NO: 1186666 - DNA, 25 bp, Homo sapien
gaaactccagtttacctcatggcta

SEQ ID NO: 1186667 - DNA, 25 bp, Homo sapien
gaacaagcaaagacaagggcacctc

SEQ ID NO: 1186668 - DNA, 25 bp, Homo sapien
caaaaaggatggagggccctatggc

SEQ ID NO: 1186669 - DNA, 25 bp, Homo sapien
gactaatgttaaggtgttgcctcct

SEQ ID NO: 1186670 - DNA, 25 bp, Homo sapien
cagagaagcctatgcttatagccca

SEQ ID NO: 1186671 - DNA, 25 bp, Homo sapien
cacaacttctggatcaaaaacaggc

SEQ ID NO: 1186672 - DNA, 25 bp, Homo sapien
gagttatcaccaacatcacagagaa

SEQ ID NO: 1186673 - DNA, 25 bp, Homo sapien
tggtcctcaacactgtctattgaaa

SEQ ID NO: 1186674 - DNA, 25 bp, Homo sapien
atggtcctcaacactgtctattgaa

SEQ ID NO: 1186675 - DNA, 25 bp, Homo sapien
gatggtcctcaacactgtctattga

SEQ ID NO: 1186676 - DNA, 25 bp, Homo sapien
gaatgaggcctagttagacatgcta

SEQ ID NO: 1186677 - DNA, 25 bp, Homo sapien
ggagggctgagaattgactgaccaa

SEQ ID NO: 1186678 - DNA, 25 bp, Homo sapien
tttgagatgactggacatcccagga

SEQ ID NO: 1186679 - DNA, 25 bp, Homo sapien
caggaacagctagaatgtggtgtcc

SEQ ID NO: 1186680 - DNA, 25 bp, Homo sapien
gggctataaccgcttcctttggcaa

SEQ ID NO: 1186681 - DNA, 25 bp, Homo sapien
gagtatgcgtctgtcctttaaaagg

SEQ ID NO: 1186682 - DNA, 25 bp, Homo sapien
ggctcccggatgataacaaattgta

SEQ ID NO: 1186683 - DNA, 25 bp, Homo sapien
tgtttgtcaaagttgcggcactgct

SEQ ID NO: 1186684 - DNA, 25 bp, Homo sapien
ggttgtaatcatggaccaaagctgt

SEQ ID NO: 1186685 - DNA, 25 bp, Homo sapien
gagaaaatagcagcaacccctttaa

SEQ ID NO: 1186686 - DNA, 25 bp, Homo sapien
ggaataacagcagagtacagtactt

SEQ ID NO: 1186687 - DNA, 25 bp, Homo sapien
tcatcagttaacagccatcaccttg

SEQ ID NO: 1186688 - DNA, 25 bp, Homo sapien
ggctcttcacaattgtaagcattga

SEQ ID NO: 1186689 - DNA, 25 bp, Homo sapien
tctgtgggctcttcacaattgtaag

SEQ ID NO: 1186690 - DNA, 25 bp, Homo sapien
ctatcatcgatgatgggaaaaggta

SEQ ID NO: 1186691 - DNA, 25 bp, Homo sapien
tggcaagctcccgattcctatcatc

SEQ ID NO: 1186692 - DNA, 25 bp, Homo sapien
accctgagaatctcatcaaagttcc

SEQ ID NO: 1186693 - DNA, 25 bp, Homo sapien
ctaccctgagaatctcatcaaagtt

SEQ ID NO: 1186694 - DNA, 25 bp, Homo sapien
taccctgagaatctcatcaaagttc

SEQ ID NO: 1186695 - DNA, 25 bp, Homo sapien
actaccctgagaatctcatcaaagt

SEQ ID NO: 1186696 - DNA, 25 bp, Homo sapien
ttttaaacccagtaacagctggcca

SEQ ID NO: 1186697 - DNA, 25 bp, Homo sapien
tcaatctcatagtgaagcttcaagg

SEQ ID NO: 1186698 - DNA, 25 bp, Homo sapien
tctgagtatcatggcctgcaagccc

SEQ ID NO: 1186699 - DNA, 25 bp, Homo sapien
gatctttggcacttttggcaggaaa

SEQ ID NO: 1186700 - DNA, 25 bp, Homo sapien
tatttcttgccagatgggagctctt

SEQ ID NO: 1186701 - DNA, 25 bp, Homo sapien
tctttggtgaagactcctttcggga

SEQ ID NO: 1186702 - DNA, 25 bp, Homo sapien
gatggttggaaggaccatcacacta

SEQ ID NO: 1186703 - DNA, 25 bp, Homo sapien
tgtgtagcggaggtatttcttgcca

SEQ ID NO: 1186704 - DNA, 25 bp, Homo sapien
tgtttatggaattgctgcaggaaaa

SEQ ID NO: 1186705 - DNA, 25 bp, Homo sapien
gtttatggaattgctgcaggaaaac

SEQ ID NO: 1186706 - DNA, 25 bp, Homo sapien
gtgtttatggaattgctgcaggaaa

SEQ ID NO: 1186707 - DNA, 25 bp, Homo sapien
ccctgtgtgaaaggcacatggcact

SEQ ID NO: 1186708 - DNA, 25 bp, Homo sapien
gccctgcagagatccaacaagattt

SEQ ID NO: 1186709 - DNA, 25 bp, Homo sapien
gacttcattggtcacaagccctgca

SEQ ID NO: 1186710 - DNA, 25 bp, Homo sapien
tagcaacccactgcaagaagagttc

SEQ ID NO: 1186711 - DNA, 25 bp, Homo sapien
gctgcagtagccacacattaattca

SEQ ID NO: 1186712 - DNA, 25 bp, Homo sapien
aattcaatttgagggtacatgaccc

SEQ ID NO: 1186713 - DNA, 25 bp, Homo sapien
tcatgcgtcacgtaacagtgcttca

SEQ ID NO: 1186714 - DNA, 25 bp, Homo sapien
ggtcccataaggctttaacggagca

SEQ ID NO: 1186715 - DNA, 25 bp, Homo sapien
gcccatgttttatcctgaagtaccc

SEQ ID NO: 1186716 - DNA, 25 bp, Homo sapien
gaccaaaagaatgtaccgccacgtg

SEQ ID NO: 1186717 - DNA, 25 bp, Homo sapien
aaagcaggcttacaggtgttctaag

SEQ ID NO: 1186718 - DNA, 25 bp, Homo sapien
tttagggacctgcagccaagtttgc

SEQ ID NO: 1186719 - DNA, 25 bp, Homo sapien
tgtctgtggctgacaaaatgtttta

SEQ ID NO: 1186720 - DNA, 25 bp, Homo sapien
gccataagttaggaatacttgcaac

SEQ ID NO: 1186721 - DNA, 25 bp, Homo sapien
agcaaagttaaaaagattagttcag

SEQ ID NO: 1186722 - DNA, 25 bp, Homo sapien
gctaacagctgtaaatagaaaaact

SEQ ID NO: 1186723 - DNA, 25 bp, Homo sapien
catgaattgggcaaccgttggagct

SEQ ID NO: 1186724 - DNA, 25 bp, Homo sapien
cagttggttgtaatgtgcccagaat

SEQ ID NO: 1186725 - DNA, 25 bp, Homo sapien
gattttcacattacccgtcctcttg

SEQ ID NO: 1186726 - DNA, 25 bp, Homo sapien
gaaacagagacaactaatgagacta

SEQ ID NO: 1186727 - DNA, 25 bp, Homo sapien
cacaactgtaataccaacattttgg

SEQ ID NO: 1186728 - DNA, 25 bp, Homo sapien
tattgaattttgacaaaaggtgata

SEQ ID NO: 1186729 - DNA, 25 bp, Homo sapien
aagaaaacatttagggccaggcgtg

SEQ ID NO: 1186730 - DNA, 25 bp, Homo sapien
tctggaagatttataagtgtttaat

SEQ ID NO: 1186731 - DNA, 25 bp, Homo sapien
gggatgacgatccatcttctgtagc

SEQ ID NO: 1186732 - DNA, 25 bp, Homo sapien
gctgacttcatgacttagattgctt

SEQ ID NO: 1186733 - DNA, 25 bp, Homo sapien
tagattgctttatccgtctgggaat

SEQ ID NO: 1186734 - DNA, 25 bp, Homo sapien
aaagaatccttaatcctgagggttg

SEQ ID NO: 1186735 - DNA, 25 bp, Homo sapien
gcaaatgctggtggcaggcacacat

SEQ ID NO: 1186736 - DNA, 25 bp, Homo sapien
gagcctctggtacagccgtagcaaa

SEQ ID NO: 1186737 - DNA, 25 bp, Homo sapien
gtggcccacggtcaccaccgcctgt

SEQ ID NO: 1186738 - DNA, 25 bp, Homo sapien
aggcacacatccctctgtggcccac

SEQ ID NO: 1186739 - DNA, 25 bp, Homo sapien
tcaaagagcccagtgcatctgctgg

SEQ ID NO: 1186740 - DNA, 25 bp, Homo sapien
catttgtgacagcactatgagctag

SEQ ID NO: 1186741 - DNA, 25 bp, Homo sapien
cccagtgcatctgctggccgtgcac

SEQ ID NO: 1186742 - DNA, 25 bp, Homo sapien
tggccgtgcaccttgtcatttgtga

SEQ ID NO: 1186743 - DNA, 25 bp, Homo sapien
ctaagggtagaacagagacactgtc

SEQ ID NO: 1186744 - DNA, 25 bp, Homo sapien
gagacactgtctcctattaactctt

SEQ ID NO: 1186745 - DNA, 25 bp, Homo sapien
agacactgtctcctattaactcttt

SEQ ID NO: 1186746 - DNA, 25 bp, Homo sapien
acagagacactgtctcctattaact

SEQ ID NO: 1186747 - DNA, 25 bp, Homo sapien
ggaccccacatttctctgacaagct

SEQ ID NO: 1186748 - DNA, 25 bp, Homo sapien
ttccccccagtgtgaagagctggaa

SEQ ID NO: 1186749 - DNA, 25 bp, Homo sapien
cctgagagattgtcagacttcccat

SEQ ID NO: 1186750 - DNA, 25 bp, Homo sapien
ccattcatcagcaggaccccacatt

SEQ ID NO: 1186751 - DNA, 25 bp, Homo sapien
gtatgtgttgcctttcgtggtggcc

SEQ ID NO: 1186752 - DNA, 25 bp, Homo sapien
tccaaccagcagtacatgaagattc

SEQ ID NO: 1186753 - DNA, 25 bp, Homo sapien
gacaggatgatcacccgaatccggg

SEQ ID NO: 1186754 - DNA, 25 bp, Homo sapien
ttaggagcactagaccgcacttcag

SEQ ID NO: 1186755 - DNA, 25 bp, Homo sapien
gcagaaaataccaggagctattagt

SEQ ID NO: 1186756 - DNA, 25 bp, Homo sapien
gctattagttaaaatggtgcttcaa

SEQ ID NO: 1186757 - DNA, 25 bp, Homo sapien
taccaggagctattagttaaaatgg

SEQ ID NO: 1186758 - DNA, 25 bp, Homo sapien
caggagctattagttaaaatggtgc

SEQ ID NO: 1186759 - DNA, 25 bp, Homo sapien
ccagacagttccatcacaaatgcag

SEQ ID NO: 1186760 - DNA, 25 bp, Homo sapien
tatatccatgttagcaaagtcgcag

SEQ ID NO: 1186761 - DNA, 25 bp, Homo sapien
taaatgagatataaacaaccctgaa

SEQ ID NO: 1186762 - DNA, 25 bp, Homo sapien
caaataagacgaagaagacagcttg

SEQ ID NO: 1186763 - DNA, 25 bp, Homo sapien
caatgttgttgatcaatgggctttc

SEQ ID NO: 1186764 - DNA, 25 bp, Homo sapien
gatcttgtatatcactgatgctgtg

SEQ ID NO: 1186765 - DNA, 25 bp, Homo sapien
gggctttctagatcattaccaggtt

SEQ ID NO: 1186766 - DNA, 25 bp, Homo sapien
tgggaagtaacatttcaacccaggc

SEQ ID NO: 1186767 - DNA, 25 bp, Homo sapien
tccccatgagagaggaccaaagact

SEQ ID NO: 1186768 - DNA, 25 bp, Homo sapien
tgctccgggtaggtcctggctgtcc

SEQ ID NO: 1186769 - DNA, 25 bp, Homo sapien
tgtggtcctgcaagcctctctcttt

SEQ ID NO: 1186770 - DNA, 25 bp, Homo sapien
gctgagaatccaactatattccttg

SEQ ID NO: 1186771 - DNA, 25 bp, Homo sapien
gactcaatcctggtacagcaaccca

SEQ ID NO: 1186772 - DNA, 25 bp, Homo sapien
acttcaacttggtaggactcaatcc

SEQ ID NO: 1186773 - DNA, 25 bp, Homo sapien
tcggtggttaacagcaccagatagg

SEQ ID NO: 1186774 - DNA, 25 bp, Homo sapien
ccctttgatgagaaggtggtccctg

SEQ ID NO: 1186775 - DNA, 25 bp, Homo sapien
catacccttaaatgccaggctaagg

SEQ ID NO: 1186776 - DNA, 25 bp, Homo sapien
accatacccttaaatgccaggctaa

SEQ ID NO: 1186777 - DNA, 25 bp, Homo sapien
acccttaaatgccaggctaaggtgt

SEQ ID NO: 1186778 - DNA, 25 bp, Homo sapien
atacccttaaatgccaggctaaggt

SEQ ID NO: 1186779 - DNA, 25 bp, Homo sapien
tcagacagtctatgctggcatccat

SEQ ID NO: 1186780 - DNA, 25 bp, Homo sapien
taggtgactgctagggagattgcca

SEQ ID NO: 1186781 - DNA, 25 bp, Homo sapien
ccagttgcgttcagaataggtgact

SEQ ID NO: 1186782 - DNA, 25 bp, Homo sapien
gagattgccatcttcctcccatgat

SEQ ID NO: 1186783 - DNA, 25 bp, Homo sapien
tgagaatcctcatcatgaacaggcc

SEQ ID NO: 1186784 - DNA, 25 bp, Homo sapien
gagaaatttgttgtatgcagcttgc

SEQ ID NO: 1186785 - DNA, 25 bp, Homo sapien
tccagagtcagagagttcagaattt

SEQ ID NO: 1186786 - DNA, 25 bp, Homo sapien
agtgacgtgattagagctttggcaa

SEQ ID NO: 1186787 - DNA, 25 bp, Homo sapien
cctgtggccttcatagtctttgtca

SEQ ID NO: 1186788 - DNA, 25 bp, Homo sapien
ctgcagagttgagtcgttagaatag

SEQ ID NO: 1186789 - DNA, 25 bp, Homo sapien
tatggcctgtggaccaccacctgtt

SEQ ID NO: 1186790 - DNA, 25 bp, Homo sapien
tgtaactactttcaagcaacaactg

SEQ ID NO: 1186791 - DNA, 25 bp, Homo sapien
gcaggtttcctagcaggggatctaa

SEQ ID NO: 1186792 - DNA, 25 bp, Homo sapien
gtttcctcccaggtgattgagggaa

SEQ ID NO: 1186793 - DNA, 25 bp, Homo sapien
taattactacacaaaggtccgacca

SEQ ID NO: 1186794 - DNA, 25 bp, Homo sapien
caataacccgtagatggcccaaata

SEQ ID NO: 1186795 - DNA, 25 bp, Homo sapien
ggcaggatgccgctcgtagagctat

SEQ ID NO: 1186796 - DNA, 25 bp, Homo sapien
gatgccgctcgtagagctatttcct

SEQ ID NO: 1186797 - DNA, 25 bp, Homo sapien
ccgctcgtagagctatttcctttcc

SEQ ID NO: 1186798 - DNA, 25 bp, Homo sapien
caggatgccgctcgtagagctattt

SEQ ID NO: 1186799 - DNA, 25 bp, Homo sapien
cctccgtctactccgccctccactc

SEQ ID NO: 1186800 - DNA, 25 bp, Homo sapien
ctcctccgtctactccgccctccac

SEQ ID NO: 1186801 - DNA, 25 bp, Homo sapien
cgtctactccgccctccactcctct

SEQ ID NO: 1186802 - DNA, 25 bp, Homo sapien
agcagcctcctccgtctactccgcc

SEQ ID NO: 1186803 - DNA, 25 bp, Homo sapien
tgtccaggatgcgaaaccccagcac

SEQ ID NO: 1186804 - DNA, 25 bp, Homo sapien
caaacactgtctggggaagctgtcc

SEQ ID NO: 1186805 - DNA, 25 bp, Homo sapien
tcagccagcgagagcgcactctggc

SEQ ID NO: 1186806 - DNA, 25 bp, Homo sapien
cagcgccccaacagtctcttctcgg

SEQ ID NO: 1186807 - DNA, 25 bp, Homo sapien
gtagcaggatttcgccaggtcccga

SEQ ID NO: 1186808 - DNA, 25 bp, Homo sapien
cgtagcaggatttcgccaggtcccg

SEQ ID NO: 1186809 - DNA, 25 bp, Homo sapien
agcaggatttcgccaggtcccgagg

SEQ ID NO: 1186810 - DNA, 25 bp, Homo sapien
acgtagcaggatttcgccaggtccc

SEQ ID NO: 1186811 - DNA, 25 bp, Homo sapien
tcagtccccgatacaatgttcacta

SEQ ID NO: 1186812 - DNA, 25 bp, Homo sapien
cagtccccgatacaatgttcactac

SEQ ID NO: 1186813 - DNA, 25 bp, Homo sapien
cagggaaagtatggctccagactaa

SEQ ID NO: 1186814 - DNA, 25 bp, Homo sapien
cagggcagggaaagtatggctccag

SEQ ID NO: 1186815 - DNA, 25 bp, Homo sapien
gaaagtatggctccagactaacact

SEQ ID NO: 1186816 - DNA, 25 bp, Homo sapien
ggctccagactaacactctttacaa

SEQ ID NO: 1186817 - DNA, 25 bp, Homo sapien
tgatagatcacatagggtacacgag

SEQ ID NO: 1186818 - DNA, 25 bp, Homo sapien
ttacaaacaactccgcttccgacag

SEQ ID NO: 1186819 - DNA, 25 bp, Homo sapien
cacgaggctttaataacgaatctga

SEQ ID NO: 1186820 - DNA, 25 bp, Homo sapien
gattgttaacttgtcccgaagtgac

SEQ ID NO: 1186821 - DNA, 25 bp, Homo sapien
aagtacccttcaccacactctaaag

SEQ ID NO: 1186822 - DNA, 25 bp, Homo sapien
caagactcattagttccaagcagaa

SEQ ID NO: 1186823 - DNA, 25 bp, Homo sapien
ccataattaggcatgcagtacagta

SEQ ID NO: 1186824 - DNA, 25 bp, Homo sapien
tacaatcttccctacaatgcagcta

SEQ ID NO: 1186825 - DNA, 25 bp, Homo sapien
gtttagcactacatacaatccacag

SEQ ID NO: 1186826 - DNA, 25 bp, Homo sapien
tctcaaatgggactggttaactaag

SEQ ID NO: 1186827 - DNA, 25 bp, Homo sapien
gtcactgtaccacgccaatactgta

SEQ ID NO: 1186828 - DNA, 25 bp, Homo sapien
gacggattcttatgctttcatcagg

SEQ ID NO: 1186829 - DNA, 25 bp, Homo sapien
tattctatacttacacatctgggca

SEQ ID NO: 1186830 - DNA, 25 bp, Homo sapien
taatcttatcatggcggcatctggt

SEQ ID NO: 1186831 - DNA, 25 bp, Homo sapien
aatcacatgctggatatctccacct

SEQ ID NO: 1186832 - DNA, 25 bp, Homo sapien
aatccatcccctatgtgcctagaaa

SEQ ID NO: 1186833 - DNA, 25 bp, Homo sapien
tgccatagatatacttcaggttctc

SEQ ID NO: 1186834 - DNA, 25 bp, Homo sapien
catttcatatttaagggaatgagca

SEQ ID NO: 1186835 - DNA, 25 bp, Homo sapien
gggatggtctaagaaattttcagaa

SEQ ID NO: 1186836 - DNA, 25 bp, Homo sapien
tcaccagtgaaatatcaagaagaag

SEQ ID NO: 1186837 - DNA, 25 bp, Homo sapien
gaagaagagtcaaataacttggtaa

SEQ ID NO: 1186838 - DNA, 25 bp, Homo sapien
tctgcctacatttcgttatgctcag

SEQ ID NO: 1186839 - DNA, 25 bp, Homo sapien
ctgcctacatttcgttatgctcagt

SEQ ID NO: 1186840 - DNA, 25 bp, Homo sapien
tgcctacatttcgttatgctcagta

SEQ ID NO: 1186841 - DNA, 25 bp, Homo sapien
cagtctctcctggtcgaatgttggt

SEQ ID NO: 1186842 - DNA, 25 bp, Homo sapien
gtctctcctggtcgaatgttggtac

SEQ ID NO: 1186843 - DNA, 25 bp, Homo sapien
agtctctcctggtcgaatgttggta

SEQ ID NO: 1186844 - DNA, 25 bp, Homo sapien
ctctcctggtcgaatgttggtacac

SEQ ID NO: 1186845 - DNA, 25 bp, Homo sapien
gactacaggctgacaaaatgactcg

SEQ ID NO: 1186846 - DNA, 25 bp, Homo sapien
catagctcggaagtagggactacag

SEQ ID NO: 1186847 - DNA, 25 bp, Homo sapien
tagctcccggtgctttctcagaagg

SEQ ID NO: 1186848 - DNA, 25 bp, Homo sapien
ctgggaggtatacgcaaagtcaatc

SEQ ID NO: 1186849 - DNA, 25 bp, Homo sapien
ttagcagaatgtgaacccatattgc

SEQ ID NO: 1186850 - DNA, 25 bp, Homo sapien
cattggaacaccaagtgcaactcac

SEQ ID NO: 1186851 - DNA, 25 bp, Homo sapien
tcagcaggaaatacccaggcaagtg

SEQ ID NO: 1186852 - DNA, 25 bp, Homo sapien
tgctctccaacaaatgggtgcattg

SEQ ID NO: 1186853 - DNA, 25 bp, Homo sapien
cttatttatttgctattatgagtta

SEQ ID NO: 1186854 - DNA, 25 bp, Homo sapien
taacttatttatttgctattatgag

SEQ ID NO: 1186855 - DNA, 25 bp, Homo sapien
ataacttatttatttgctattatga

SEQ ID NO: 1186856 - DNA, 25 bp, Homo sapien
atttatttgctattatgagttagaa

SEQ ID NO: 1186857 - DNA, 25 bp, Homo sapien
ggtagaacacaaaattgccctctaa

SEQ ID NO: 1186858 - DNA, 25 bp, Homo sapien
tgaatacagttagggagaataaatc

SEQ ID NO: 1186859 - DNA, 25 bp, Homo sapien
aatccctaaatcttaacttgctggt

SEQ ID NO: 1186860 - DNA, 25 bp, Homo sapien
tcttaacttgctggtagaacacaaa

SEQ ID NO: 1186861 - DNA, 25 bp, Homo sapien
gggctctgaaccaggcatttcttct

SEQ ID NO: 1186862 - DNA, 25 bp, Homo sapien
aaggagatcctttgcaagaggcatg

SEQ ID NO: 1186863 - DNA, 25 bp, Homo sapien
ttggggctctgaaccaggcatttct

SEQ ID NO: 1186864 - DNA, 25 bp, Homo sapien
ggagatcctttgcaagaggcatgtt

SEQ ID NO: 1186865 - DNA, 25 bp, Homo sapien
cttttagtgctgctttcatctgaag

SEQ ID NO: 1186866 - DNA, 25 bp, Homo sapien
tagtgctgctttcatctgaaggaac

SEQ ID NO: 1186867 - DNA, 25 bp, Homo sapien
ctgctttcatctgaaggaacatcct

SEQ ID NO: 1186868 - DNA, 25 bp, Homo sapien
gctgctttcatctgaaggaacatcc

SEQ ID NO: 1186869 - DNA, 25 bp, Homo sapien
taaagatgctatctgaaatcagtgg

SEQ ID NO: 1186870 - DNA, 25 bp, Homo sapien
cagtatcatactggtatatggccta

SEQ ID NO: 1186871 - DNA, 25 bp, Homo sapien
gggtttactagtcctaccgcataca

SEQ ID NO: 1186872 - DNA, 25 bp, Homo sapien
gtatttagactagatggccatttgg

SEQ ID NO: 1186873 - DNA, 25 bp, Homo sapien
tgtctattagtgcaggcagtacctc

SEQ ID NO: 1186874 - DNA, 25 bp, Homo sapien
tattaccttgttgtacaggccagcc

SEQ ID NO: 1186875 - DNA, 25 bp, Homo sapien
tacccaaggctaggcaactgtcaga

SEQ ID NO: 1186876 - DNA, 25 bp, Homo sapien
tagagtaaaagggacagggtgcaac

SEQ ID NO: 1186877 - DNA, 25 bp, Homo sapien
ttcttcactgcgaacgtttagctca

SEQ ID NO: 1186878 - DNA, 25 bp, Homo sapien
tgtatttgacccaggccatcactgc

SEQ ID NO: 1186879 - DNA, 25 bp, Homo sapien
tgaggacgtctttcctgaatactgt

SEQ ID NO: 1186880 - DNA, 25 bp, Homo sapien
cgaacgtttagctcatcactggata

SEQ ID NO: 1186881 - DNA, 25 bp, Homo sapien
gggatcagagcctactgtgccgacc

SEQ ID NO: 1186882 - DNA, 25 bp, Homo sapien
ccgaccaggaacttgggactaagca

SEQ ID NO: 1186883 - DNA, 25 bp, Homo sapien
atcagagcctactgtgccgaccagg

SEQ ID NO: 1186884 - DNA, 25 bp, Homo sapien
aaggcaaacgaacatgctgcagcac

SEQ ID NO: 1186885 - DNA, 25 bp, Homo sapien
ccggcctgtctgtgttttaaatata

SEQ ID NO: 1186886 - DNA, 25 bp, Homo sapien
atacaaaaatctagtttaactctag

SEQ ID NO: 1186887 - DNA, 25 bp, Homo sapien
aaatatagaatacaaaaatctagtt

SEQ ID NO: 1186888 - DNA, 25 bp, Homo sapien
ctgcgcccggcctgtctgtgtttta

SEQ ID NO: 1186889 - DNA, 25 bp, Homo sapien
catcggataggtttccgtggtctcg

SEQ ID NO: 1186890 - DNA, 25 bp, Homo sapien
tgcaaagagtacttccccacatcgg

SEQ ID NO: 1186891 - DNA, 25 bp, Homo sapien
cgtggtctcgtccttggtccttgca

SEQ ID NO: 1186892 - DNA, 25 bp, Homo sapien
gcattagtggtcgttcttgcggcaa

SEQ ID NO: 1186893 - DNA, 25 bp, Homo sapien
tgagataagaggatccatcatggcc

SEQ ID NO: 1186894 - DNA, 25 bp, Homo sapien
atggcctcctactgcatataacaga

SEQ ID NO: 1186895 - DNA, 25 bp, Homo sapien
catatcgttcaacactggaaatggc

SEQ ID NO: 1186896 - DNA, 25 bp, Homo sapien
cattcattggtctgtggatcatatc

SEQ ID NO: 1186897 - DNA, 25 bp, Homo sapien
gctaacatttgcaatcaagcctccg

SEQ ID NO: 1186898 - DNA, 25 bp, Homo sapien
atcaagcctccgcatgttgcccggt

SEQ ID NO: 1186899 - DNA, 25 bp, Homo sapien
gtgggtcctcttgagattgctgatt

SEQ ID NO: 1186900 - DNA, 25 bp, Homo sapien
gctgcaggagcagtccgctttcttc

SEQ ID NO: 1186901 - DNA, 25 bp, Homo sapien
tggccacccacagcataaagaaagc

SEQ ID NO: 1186902 - DNA, 25 bp, Homo sapien
tacaccaacacttgtcctgcaggtg

SEQ ID NO: 1186903 - DNA, 25 bp, Homo sapien
gaaagcctccaagtactgctacacc

SEQ ID NO: 1186904 - DNA, 25 bp, Homo sapien
cctgcaggtgcttgtaggggccaca

SEQ ID NO: 1186905 - DNA, 25 bp, Homo sapien
aagagctctatgttctttaaaataa

SEQ ID NO: 1186906 - DNA, 25 bp, Homo sapien
ttcttttaaagagctctatgttctt

SEQ ID NO: 1186907 - DNA, 25 bp, Homo sapien
ttttcttttaaagagctctatgttc

SEQ ID NO: 1186908 - DNA, 25 bp, Homo sapien
cttttaaagagctctatgttcttta

SEQ ID NO: 1186909 - DNA, 25 bp, Homo sapien
ggaaacccctgcataccattgatga

SEQ ID NO: 1186910 - DNA, 25 bp, Homo sapien
gagtgggagaacatatctgcaagcc

SEQ ID NO: 1186911 - DNA, 25 bp, Homo sapien
taagtacactccaggtagattcagg

SEQ ID NO: 1186912 - DNA, 25 bp, Homo sapien
caatgttaggtacaatcagtgtgac

SEQ ID NO: 1186913 - DNA, 25 bp, Homo sapien
ggttgtcacaaccaggcacatgctt

SEQ ID NO: 1186914 - DNA, 25 bp, Homo sapien
tgtctgacccaaaacgccagtagtg

SEQ ID NO: 1186915 - DNA, 25 bp, Homo sapien
gccacagcgcctagtccagagattt

SEQ ID NO: 1186916 - DNA, 25 bp, Homo sapien
ttttcaaggaaaacaagggcatctg

SEQ ID NO: 1186917 - DNA, 25 bp, Homo sapien
tgagaggagatgtcccgtcagagcc

SEQ ID NO: 1186918 - DNA, 25 bp, Homo sapien
tagaagctacccgagtccacttgtt

SEQ ID NO: 1186919 - DNA, 25 bp, Homo sapien
cacctagtcttctggtactcataga

SEQ ID NO: 1186920 - DNA, 25 bp, Homo sapien
gtcagagccacctacagcatataag

SEQ ID NO: 1186921 - DNA, 25 bp, Homo sapien
gggttgtatctctcagcactgctca

SEQ ID NO: 1186922 - DNA, 25 bp, Homo sapien
gcacagcctaggtgtttcctccggg

SEQ ID NO: 1186923 - DNA, 25 bp, Homo sapien
ccaccactggagaccactggttggt

SEQ ID NO: 1186924 - DNA, 25 bp, Homo sapien
ccactacggcgtgatgtcatggcca

SEQ ID NO: 1186925 - DNA, 25 bp, Homo sapien
tttatggccttacattctggtttac

SEQ ID NO: 1186926 - DNA, 25 bp, Homo sapien
gaagaaactagacaatcgtaaggaa

SEQ ID NO: 1186927 - DNA, 25 bp, Homo sapien
tacagtaagctgctgaagaaactag

SEQ ID NO: 1186928 - DNA, 25 bp, Homo sapien
tatagactggtttctagataaatct

SEQ ID NO: 1186929 - DNA, 25 bp, Homo sapien
caaaacctcctactgccatgagctg

SEQ ID NO: 1186930 - DNA, 25 bp, Homo sapien
tgtccattgaccactgccaggccaa

SEQ ID NO: 1186931 - DNA, 25 bp, Homo sapien
atcaaaaacttctatggtcttcaag

SEQ ID NO: 1186932 - DNA, 25 bp, Homo sapien
ggtcttcaagtatgttgtgccatca

SEQ ID NO: 1186933 - DNA, 25 bp, Homo sapien
cctcagctgaacatgatgggactag

SEQ ID NO: 1186934 - DNA, 25 bp, Homo sapien
aaatggcatggacagatttggagcc

SEQ ID NO: 1186935 - DNA, 25 bp, Homo sapien
tgtcactaactcacttaggcaggtc

SEQ ID NO: 1186936 - DNA, 25 bp, Homo sapien
tgtaatatatcagccactttagagc

SEQ ID NO: 1186937 - DNA, 25 bp, Homo sapien
gacccttatcagctatgaggtagag

SEQ ID NO: 1186938 - DNA, 25 bp, Homo sapien
caattgagcactgttgagtagcagg

SEQ ID NO: 1186939 - DNA, 25 bp, Homo sapien
cagagattgactgacatgctctcac

SEQ ID NO: 1186940 - DNA, 25 bp, Homo sapien
tatgtactctgtaagcctcttcaag

SEQ ID NO: 1186941 - DNA, 25 bp, Homo sapien
ccctagccgacggtaattcatcccg

SEQ ID NO: 1186942 - DNA, 25 bp, Homo sapien
caaatatgggattcacaatgtgtca

SEQ ID NO: 1186943 - DNA, 25 bp, Homo sapien
gacggtaattcatcccgccatataa

SEQ ID NO: 1186944 - DNA, 25 bp, Homo sapien
caccaaatatgggattcacaatgtg

SEQ ID NO: 1186945 - DNA, 25 bp, Homo sapien
caagctgtacaaagctccaaggtca

SEQ ID NO: 1186946 - DNA, 25 bp, Homo sapien
aaggtcaaagctccccagaatacag

SEQ ID NO: 1186947 - DNA, 25 bp, Homo sapien
taagcctcagcttaaccaggcctga

SEQ ID NO: 1186948 - DNA, 25 bp, Homo sapien
gcataacagaattcactgctgggag

SEQ ID NO: 1186949 - DNA, 25 bp, Homo sapien
gcacttgtaactttacatacagata

SEQ ID NO: 1186950 - DNA, 25 bp, Homo sapien
ttattcaagttgaaagcacttgtaa

SEQ ID NO: 1186951 - DNA, 25 bp, Homo sapien
tatagaaacagaaattccaaattaa

SEQ ID NO: 1186952 - DNA, 25 bp, Homo sapien
ctagctggcaatccttttattcaag

SEQ ID NO: 1186953 - DNA, 25 bp, Homo sapien
agcttgacttcaaagaaccctacgt

SEQ ID NO: 1186954 - DNA, 25 bp, Homo sapien
tgacttcaaagaaccctacgttctc

SEQ ID NO: 1186955 - DNA, 25 bp, Homo sapien
tggaagcttgacttcaaagaaccct

SEQ ID NO: 1186956 - DNA, 25 bp, Homo sapien
tcaaagaaccctacgttctcttaca

SEQ ID NO: 1186957 - DNA, 25 bp, Homo sapien
tgcatgactttaaggtgatggctgg

SEQ ID NO: 1186958 - DNA, 25 bp, Homo sapien
ggtgatggctgggatctgctttaaa

SEQ ID NO: 1186959 - DNA, 25 bp, Homo sapien
agtgcatgactttaaggtgatggct

SEQ ID NO: 1186960 - DNA, 25 bp, Homo sapien
gatggctgggatctgctttaaaata

SEQ ID NO: 1186961 - DNA, 25 bp, Homo sapien
tattatttcggcctatttataatat

SEQ ID NO: 1186962 - DNA, 25 bp, Homo sapien
ttattatttcggcctatttataata

SEQ ID NO: 1186963 - DNA, 25 bp, Homo sapien
aatatggtaacgtgtgtaagaattc

SEQ ID NO: 1186964 - DNA, 25 bp, Homo sapien
atggtaacgtgtgtaagaattcaga

SEQ ID NO: 1186965 - DNA, 25 bp, Homo sapien
gtattttggttgtatattctagcag

SEQ ID NO: 1186966 - DNA, 25 bp, Homo sapien
tattttggttgtatattctagcagg

SEQ ID NO: 1186967 - DNA, 25 bp, Homo sapien
ggtattttggttgtatattctagca

SEQ ID NO: 1186968 - DNA, 25 bp, Homo sapien
attttggttgtatattctagcaggc

SEQ ID NO: 1186969 - DNA, 25 bp, Homo sapien
cagggagttggaaacaaggagtttg

SEQ ID NO: 1186970 - DNA, 25 bp, Homo sapien
tagaacagggagttggaaacaagga

SEQ ID NO: 1186971 - DNA, 25 bp, Homo sapien
agaacagggagttggaaacaaggag

SEQ ID NO: 1186972 - DNA, 25 bp, Homo sapien
tcactgatacggaatcggcgaggcg

SEQ ID NO: 1186973 - DNA, 25 bp, Homo sapien
tgaatccggaatgggtgacagcgtc

SEQ ID NO: 1186974 - DNA, 25 bp, Homo sapien
aacgaatcagtggtgaggtgccgcc

SEQ ID NO: 1186975 - DNA, 25 bp, Homo sapien
gaattgtcaagagaactagccctgc

SEQ ID NO: 1186976 - DNA, 25 bp, Homo sapien
gaaatcccacgctgccggtagttaa

SEQ ID NO: 1186977 - DNA, 25 bp, Homo sapien
gagccacacgatggcgaaaaacaat

SEQ ID NO: 1186978 - DNA, 25 bp, Homo sapien
cacgatggcgaaaaacaatcacgaa

SEQ ID NO: 1186979 - DNA, 25 bp, Homo sapien
atcacgaaatcccacgctgccggta

SEQ ID NO: 1186980 - DNA, 25 bp, Homo sapien
cccctgtacagctgacttaaccaag

SEQ ID NO: 1186981 - DNA, 25 bp, Homo sapien
tagagagaaccccagatcggttggg

SEQ ID NO: 1186982 - DNA, 25 bp, Homo sapien
ccttctgatgggtctggataaaccc

SEQ ID NO: 1186983 - DNA, 25 bp, Homo sapien
ttctcctctgtgaactctgcaacag

SEQ ID NO: 1186984 - DNA, 25 bp, Homo sapien
gccgtagataacaggctgaagtact

SEQ ID NO: 1186985 - DNA, 25 bp, Homo sapien
gttcataggatagatctcttcgcta

SEQ ID NO: 1186986 - DNA, 25 bp, Homo sapien
ctgaagtactgttcataggatagat

SEQ ID NO: 1186987 - DNA, 25 bp, Homo sapien
ggatagatctcttcgctattttcac

SEQ ID NO: 1186988 - DNA, 25 bp, Homo sapien
gaatataatgagagtgaatttcgct

SEQ ID NO: 1186989 - DNA, 25 bp, Homo sapien
taaggctatccagttaagaacaggg

SEQ ID NO: 1186990 - DNA, 25 bp, Homo sapien
ggcatcaaccaaaagcagagtattc

SEQ ID NO: 1186991 - DNA, 25 bp, Homo sapien
gaatttcgcttctacacataaggct

SEQ ID NO: 1186992 - DNA, 25 bp, Homo sapien
ctagtgtttaacagccacttgtaca

SEQ ID NO: 1186993 - DNA, 25 bp, Homo sapien
gccacttgtacactagaaaacacta

SEQ ID NO: 1186994 - DNA, 25 bp, Homo sapien
gtaggaactatttagctttagtatg

SEQ ID NO: 1186995 - DNA, 25 bp, Homo sapien
tagctttagtatgaatctagtgttt

SEQ ID NO: 1186996 - DNA, 25 bp, Homo sapien
atttctgtcttgtgttaggaaatca

SEQ ID NO: 1186997 - DNA, 25 bp, Homo sapien
tgtgtcaaaagccaagtgaataact

SEQ ID NO: 1186998 - DNA, 25 bp, Homo sapien
ctgaatgtaaatttctgtcttgtgt

SEQ ID NO: 1186999 - DNA, 25 bp, Homo sapien
tgtaaatttctgtcttgtgttagga

SEQ ID NO: 1187000 - DNA, 25 bp, Homo sapien
gtcagggctacaggggaaatttata

SEQ ID NO: 1187001 - DNA, 25 bp, Homo sapien
aatatatcttaggtatgtcagggct

SEQ ID NO: 1187002 - DNA, 25 bp, Homo sapien
aataagtcagagtatgtaatttaat

SEQ ID NO: 1187003 - DNA, 25 bp, Homo sapien
aaaaatacatcacttgcaggttgct

SEQ ID NO: 1187004 - DNA, 25 bp, Homo sapien
tcggtactgaatccatccacacaag

SEQ ID NO: 1187005 - DNA, 25 bp, Homo sapien
ggtccggacaacaaagctactgaat

SEQ ID NO: 1187006 - DNA, 25 bp, Homo sapien
cacatgtgttggtccggacaacaaa

SEQ ID NO: 1187007 - DNA, 25 bp, Homo sapien
tgagacgaacgcaactctccacatg

SEQ ID NO: 1187008 - DNA, 25 bp, Homo sapien
tctacctacatggaataagatgagc

SEQ ID NO: 1187009 - DNA, 25 bp, Homo sapien
ttacaggcttacacgccaggctggg

SEQ ID NO: 1187010 - DNA, 25 bp, Homo sapien
aatgggctctgatcttaaggaatca

SEQ ID NO: 1187011 - DNA, 25 bp, Homo sapien
ccaggctgggacatattctttaaga

SEQ ID NO: 1187012 - DNA, 25 bp, Homo sapien
tggggaatgataacttgaacaagcc

SEQ ID NO: 1187013 - DNA, 25 bp, Homo sapien
ggggaatgataacttgaacaagccc

SEQ ID NO: 1187014 - DNA, 25 bp, Homo sapien
cctggggaatgataacttgaacaag

SEQ ID NO: 1187015 - DNA, 25 bp, Homo sapien
atcctggggaatgataacttgaaca

SEQ ID NO: 1187016 - DNA, 25 bp, Homo sapien
aagaagcttttagataataacagga

SEQ ID NO: 1187017 - DNA, 25 bp, Homo sapien
gcatcaaagaagcttttagataata

SEQ ID NO: 1187018 - DNA, 25 bp, Homo sapien
tcaaagaagcttttagataataaca

SEQ ID NO: 1187019 - DNA, 25 bp, Homo sapien
cccagcaatagcatcaaagaagctt

SEQ ID NO: 1187020 - DNA, 25 bp, Homo sapien
agacacttgcaccacagattccaca

SEQ ID NO: 1187021 - DNA, 25 bp, Homo sapien
tgtaccagacacttgcaccacagat

SEQ ID NO: 1187022 - DNA, 25 bp, Homo sapien
ggacgggaaatgactgtaccagaca

SEQ ID NO: 1187023 - DNA, 25 bp, Homo sapien
tcttgtcctgcaggacgggaaatga

SEQ ID NO: 1187024 - DNA, 25 bp, Homo sapien
gatttcaatctcacctgttggcatt

SEQ ID NO: 1187025 - DNA, 25 bp, Homo sapien
ctttgatttcaatctcacctgttgg

SEQ ID NO: 1187026 - DNA, 25 bp, Homo sapien
ttgatttcaatctcacctgttggca

SEQ ID NO: 1187027 - DNA, 25 bp, Homo sapien
ttaactttgatttcaatctcacctg

SEQ ID NO: 1187028 - DNA, 25 bp, Homo sapien
gaaactacgcaagtctaagtagcga

SEQ ID NO: 1187029 - DNA, 25 bp, Homo sapien
catctgggacctcagtcgcaggtta

SEQ ID NO: 1187030 - DNA, 25 bp, Homo sapien
gatactgcaaccgaagagcctctgt

SEQ ID NO: 1187031 - DNA, 25 bp, Homo sapien
gcagattacagagatattcccgcat

SEQ ID NO: 1187032 - DNA, 25 bp, Homo sapien
ccctggggtcctcttaaacaatgtg

SEQ ID NO: 1187033 - DNA, 25 bp, Homo sapien
cctggggtcctcttaaacaatgtgg

SEQ ID NO: 1187034 - DNA, 25 bp, Homo sapien
tgtgggggtttctatatccacaaac

SEQ ID NO: 1187035 - DNA, 25 bp, Homo sapien
ctggggtcctcttaaacaatgtggg

SEQ ID NO: 1187036 - DNA, 25 bp, Homo sapien
aaaccgccaaccatcagaagttgct

SEQ ID NO: 1187037 - DNA, 25 bp, Homo sapien
tgtctaaaccgccaaccatcagaag

SEQ ID NO: 1187038 - DNA, 25 bp, Homo sapien
taaaccgccaaccatcagaagttgc

SEQ ID NO: 1187039 - DNA, 25 bp, Homo sapien
tctaaaccgccaaccatcagaagtt

SEQ ID NO: 1187040 - DNA, 25 bp, Homo sapien
cttcatctcgataacatcgggcaac

SEQ ID NO: 1187041 - DNA, 25 bp, Homo sapien
aaccttcatctcgataacatcgggc

SEQ ID NO: 1187042 - DNA, 25 bp, Homo sapien
accttcatctcgataacatcgggca

SEQ ID NO: 1187043 - DNA, 25 bp, Homo sapien
gaaccttcatctcgataacatcggg

SEQ ID NO: 1187044 - DNA, 25 bp, Homo sapien
caggatctttgtcattgggccagga

SEQ ID NO: 1187045 - DNA, 25 bp, Homo sapien
gtttatcagttccataggtggccag

SEQ ID NO: 1187046 - DNA, 25 bp, Homo sapien
gatcccagtctggtctacaaatgac

SEQ ID NO: 1187047 - DNA, 25 bp, Homo sapien
caaagcgagtgtcaggtttatcagt

SEQ ID NO: 1187048 - DNA, 25 bp, Homo sapien
aatccaatctctgtgtttctaaaca

SEQ ID NO: 1187049 - DNA, 25 bp, Homo sapien
cagttccatggggcttactaagtgc

SEQ ID NO: 1187050 - DNA, 25 bp, Homo sapien
tcacagttccatggggcttactaag

SEQ ID NO: 1187051 - DNA, 25 bp, Homo sapien
aaatccaatctctgtgtttctaaac

SEQ ID NO: 1187052 - DNA, 25 bp, Homo sapien
tggtcagctgcaaagtttctaatgg

SEQ ID NO: 1187053 - DNA, 25 bp, Homo sapien
caaagtttctaatggattcaatgtc

SEQ ID NO: 1187054 - DNA, 25 bp, Homo sapien
tgattaaaatggtcagctgcaaagt

SEQ ID NO: 1187055 - DNA, 25 bp, Homo sapien
tctaatggattcaatgtctttcctt

SEQ ID NO: 1187056 - DNA, 25 bp, Homo sapien
ttaaaatgcccctttcttgaatatg

SEQ ID NO: 1187057 - DNA, 25 bp, Homo sapien
tgcacccggccccaaccagctttta

SEQ ID NO: 1187058 - DNA, 25 bp, Homo sapien
taaaatgcccctttcttgaatatgt

SEQ ID NO: 1187059 - DNA, 25 bp, Homo sapien
aaatgcccctttcttgaatatgtac

SEQ ID NO: 1187060 - DNA, 25 bp, Homo sapien
tattgtgctctccagcagttagtag

SEQ ID NO: 1187061 - DNA, 25 bp, Homo sapien
gactccattatgaaattagcaactg

SEQ ID NO: 1187062 - DNA, 25 bp, Homo sapien
tattggcgttaaggaatacaggtaa

SEQ ID NO: 1187063 - DNA, 25 bp, Homo sapien
cctcttgggtctccattagtctgat

SEQ ID NO: 1187064 - DNA, 25 bp, Homo sapien
caaagatccctaaagctaattcagt

SEQ ID NO: 1187065 - DNA, 25 bp, Homo sapien
gatggcactcatcacctacagctgc

SEQ ID NO: 1187066 - DNA, 25 bp, Homo sapien
tatcatgcttgatctttacagtaca

SEQ ID NO: 1187067 - DNA, 25 bp, Homo sapien
tatcccctgaagaatcatgactcag

SEQ ID NO: 1187068 - DNA, 25 bp, Homo sapien
tgtttagttcataccaagagaaggt

SEQ ID NO: 1187069 - DNA, 25 bp, Homo sapien
tagttcataccaagagaaggtttaa

SEQ ID NO: 1187070 - DNA, 25 bp, Homo sapien
ttaatagccaaattagttaggaaca

SEQ ID NO: 1187071 - DNA, 25 bp, Homo sapien
attagttaggaacaaaatcccatgt

SEQ ID NO: 1187072 - DNA, 25 bp, Homo sapien
gaacagtgacatatgcctagagaca

SEQ ID NO: 1187073 - DNA, 25 bp, Homo sapien
gcttagaacgggcttggcaaatact

SEQ ID NO: 1187074 - DNA, 25 bp, Homo sapien
gctacctatggtatgcaggacttcc

SEQ ID NO: 1187075 - DNA, 25 bp, Homo sapien
catgggttagaaatccggctcctcc

SEQ ID NO: 1187076 - DNA, 25 bp, Homo sapien
caggaagagtgggaaatctaccacc

SEQ ID NO: 1187077 - DNA, 25 bp, Homo sapien
cagtaaatgggtggtgggccgattc

SEQ ID NO: 1187078 - DNA, 25 bp, Homo sapien
gtcagcacattccagtcgtaatttt

SEQ ID NO: 1187079 - DNA, 25 bp, Homo sapien
ggtggtgggccgattccagctctct

SEQ ID NO: 1187080 - DNA, 25 bp, Homo sapien
tctttgcctttatatacacatttcc

SEQ ID NO: 1187081 - DNA, 25 bp, Homo sapien
tgatttggaagtatagatacggtac

SEQ ID NO: 1187082 - DNA, 25 bp, Homo sapien
ccttttgatttggaagtatagatac

SEQ ID NO: 1187083 - DNA, 25 bp, Homo sapien
gaagtctgaagttctttgcctttat

SEQ ID NO: 1187084 - DNA, 25 bp, Homo sapien
gattcacagatactttatgttagag

SEQ ID NO: 1187085 - DNA, 25 bp, Homo sapien
tactactaactcaaactccacaatt

SEQ ID NO: 1187086 - DNA, 25 bp, Homo sapien
atgttagagaaaatgtctggttttc

SEQ ID NO: 1187087 - DNA, 25 bp, Homo sapien
tctgttctacgggttgaagaccctg

SEQ ID NO: 1187088 - DNA, 25 bp, Homo sapien
tgtgaattcgaattgaaccacctcc

SEQ ID NO: 1187089 - DNA, 25 bp, Homo sapien
taaggttgccaggatataacgctgc

SEQ ID NO: 1187090 - DNA, 25 bp, Homo sapien
ccaagtcatagtgttggctacgggc

SEQ ID NO: 1187091 - DNA, 25 bp, Homo sapien
gaaccacctcctatttcattgccat

SEQ ID NO: 1187092 - DNA, 25 bp, Homo sapien
gagcagatgggagagcattttcaca

SEQ ID NO: 1187093 - DNA, 25 bp, Homo sapien
tggagcagatgggagagcattttca

SEQ ID NO: 1187094 - DNA, 25 bp, Homo sapien
agcagatgggagagcattttcacat

SEQ ID NO: 1187095 - DNA, 25 bp, Homo sapien
cagatgggagagcattttcacatcc

SEQ ID NO: 1187096 - DNA, 25 bp, Homo sapien
attcctccatgagggggtgccccat

SEQ ID NO: 1187097 - DNA, 25 bp, Homo sapien
gacatctctgatgcttggagatcca

SEQ ID NO: 1187098 - DNA, 25 bp, Homo sapien
tggagatccagtgacaaggcatatc

SEQ ID NO: 1187099 - DNA, 25 bp, Homo sapien
gatatgatagggcttcagttcctca

SEQ ID NO: 1187100 - DNA, 25 bp, Homo sapien
catgaggtcatgtccccggaaggac

SEQ ID NO: 1187101 - DNA, 25 bp, Homo sapien
ctgctttggagtctgttggcttgga

SEQ ID NO: 1187102 - DNA, 25 bp, Homo sapien
ttctgctttggagtctgttggcttg

SEQ ID NO: 1187103 - DNA, 25 bp, Homo sapien
tctgctttggagtctgttggcttgg

SEQ ID NO: 1187104 - DNA, 25 bp, Homo sapien
ctctagatctgactttagccttggg

SEQ ID NO: 1187105 - DNA, 25 bp, Homo sapien
tgattccagcaataacagcccggtg

SEQ ID NO: 1187106 - DNA, 25 bp, Homo sapien
ggtagccagggcaagtatgtatttt

SEQ ID NO: 1187107 - DNA, 25 bp, Homo sapien
gacttgattgttagacctgtggcag

SEQ ID NO: 1187108 - DNA, 25 bp, Homo sapien
tcgcacatttgaggttaatctaagg

SEQ ID NO: 1187109 - DNA, 25 bp, Homo sapien
cactcccggccaataatatctttaa

SEQ ID NO: 1187110 - DNA, 25 bp, Homo sapien
ttttggtgttcactttttcgcacat

SEQ ID NO: 1187111 - DNA, 25 bp, Homo sapien
tacctatttatggatggataatacc

SEQ ID NO: 1187112 - DNA, 25 bp, Homo sapien
ggaagatttgcataactcagtgaac

SEQ ID NO: 1187113 - DNA, 25 bp, Homo sapien
tacaccaatggactttagaaaagct

SEQ ID NO: 1187114 - DNA, 25 bp, Homo sapien
tgtgcccttatagcttcctcagact

SEQ ID NO: 1187115 - DNA, 25 bp, Homo sapien
taacaacagataggatacagaagca

SEQ ID NO: 1187116 - DNA, 25 bp, Homo sapien
gatcaccttattcagcattctgttg

SEQ ID NO: 1187117 - DNA, 25 bp, Homo sapien
attggatcaccttattcagcattct

SEQ ID NO: 1187118 - DNA, 25 bp, Homo sapien
tggatcaccttattcagcattctgt

SEQ ID NO: 1187119 - DNA, 25 bp, Homo sapien
ttggatcaccttattcagcattctg

SEQ ID NO: 1187120 - DNA, 25 bp, Homo sapien
ttttatatataagtgccatttgctg

SEQ ID NO: 1187121 - DNA, 25 bp, Homo sapien
tttatatataagtgccatttgctga

SEQ ID NO: 1187122 - DNA, 25 bp, Homo sapien
ttatatataagtgccatttgctgaa

SEQ ID NO: 1187123 - DNA, 25 bp, Homo sapien
tcatgtgaccaccatgacctattat

SEQ ID NO: 1187124 - DNA, 25 bp, Homo sapien
tacttttcatgtgaccaccatgacc

SEQ ID NO: 1187125 - DNA, 25 bp, Homo sapien
gaccaccatgacctattatgtgttt

SEQ ID NO: 1187126 - DNA, 25 bp, Homo sapien
tgtgaccaccatgacctattatgtg

SEQ ID NO: 1187127 - DNA, 25 bp, Homo sapien
tagaaatgcccaactagtgataggc

SEQ ID NO: 1187128 - DNA, 25 bp, Homo sapien
caaattgtcaggtttcataggcccc

SEQ ID NO: 1187129 - DNA, 25 bp, Homo sapien
ggtttaaggcaatctgtcccaggga

SEQ ID NO: 1187130 - DNA, 25 bp, Homo sapien
gaaaatctacaatccatagccatgg

SEQ ID NO: 1187131 - DNA, 25 bp, Homo sapien
cagtggcctttgaagcttactacag

SEQ ID NO: 1187132 - DNA, 25 bp, Homo sapien
gatattctgcattcccatgtagcat

SEQ ID NO: 1187133 - DNA, 25 bp, Homo sapien
gatggagtctcatggcacaagaaga

SEQ ID NO: 1187134 - DNA, 25 bp, Homo sapien
tctttgtagactgcctgatggagtc

SEQ ID NO: 1187135 - DNA, 25 bp, Homo sapien
cagcttttggtacatgtgatgattt

SEQ ID NO: 1187136 - DNA, 25 bp, Homo sapien
taatgatatcactgtaaaaccgttc

SEQ ID NO: 1187137 - DNA, 25 bp, Homo sapien
aactaggtgagtcagcttttggtac

SEQ ID NO: 1187138 - DNA, 25 bp, Homo sapien
ccaatgatgtaatgattctgccaaa

SEQ ID NO: 1187139 - DNA, 25 bp, Homo sapien
agtctagctcttgcccagaatggag

SEQ ID NO: 1187140 - DNA, 25 bp, Homo sapien
gagtctagctcttgcccagaatgga

SEQ ID NO: 1187141 - DNA, 25 bp, Homo sapien
ggagtgcagcggcactatcagttca

SEQ ID NO: 1187142 - DNA, 25 bp, Homo sapien
tgcagcggcactatcagttcactgc

SEQ ID NO: 1187143 - DNA, 25 bp, Homo sapien
tactgactgtattttccttgagcat

SEQ ID NO: 1187144 - DNA, 25 bp, Homo sapien
tgaatactgactgtattttccttga

SEQ ID NO: 1187145 - DNA, 25 bp, Homo sapien
gctaatggcttaaggcttggctgat

SEQ ID NO: 1187146 - DNA, 25 bp, Homo sapien
tgagctaatggcttaaggcttggct

SEQ ID NO: 1187147 - DNA, 25 bp, Homo sapien
agctattgttaagggccgtgacccg

SEQ ID NO: 1187148 - DNA, 25 bp, Homo sapien
tgttaagggccgtgacccgagcctc

SEQ ID NO: 1187149 - DNA, 25 bp, Homo sapien
ccgagtaagctattgttaagggccg

SEQ ID NO: 1187150 - DNA, 25 bp, Homo sapien
taagctattgttaagggccgtgacc

SEQ ID NO: 1187151 - DNA, 25 bp, Homo sapien
acgtggacggtcatgtctctgccca

SEQ ID NO: 1187152 - DNA, 25 bp, Homo sapien
tgccgggagcgtgcgtcgtgacgtc

SEQ ID NO: 1187153 - DNA, 25 bp, Homo sapien
tctgcccacaatggcgaggaagggc

SEQ ID NO: 1187154 - DNA, 25 bp, Homo sapien
tgatactggatgagaggaagattga

SEQ ID NO: 1187155 - DNA, 25 bp, Homo sapien
tcccccatccccagagctttccttg

SEQ ID NO: 1187156 - DNA, 25 bp, Homo sapien
cttcccccatccccagagctttcct

SEQ ID NO: 1187157 - DNA, 25 bp, Homo sapien
cccccatccccagagctttccttgc

SEQ ID NO: 1187158 - DNA, 25 bp, Homo sapien
tggaaatgggccggaatgggccgga

SEQ ID NO: 1187159 - DNA, 25 bp, Homo sapien
gcagctttcttctgcgttaggaagc

SEQ ID NO: 1187160 - DNA, 25 bp, Homo sapien
aaagggagaattgggaacggcatgg

SEQ ID NO: 1187161 - DNA, 25 bp, Homo sapien
gaacggcatggggttggccactcca

SEQ ID NO: 1187162 - DNA, 25 bp, Homo sapien
gagcagctttcttctgcgttaggaa

SEQ ID NO: 1187163 - DNA, 25 bp, Homo sapien
caccagcgccttttttgtttgctct

SEQ ID NO: 1187164 - DNA, 25 bp, Homo sapien
gctctttccggcaattccccagtga

SEQ ID NO: 1187165 - DNA, 25 bp, Homo sapien
acaccagcgccttttttgtttgctc

SEQ ID NO: 1187166 - DNA, 25 bp, Homo sapien
ttgtttgctctttccggcaattccc

SEQ ID NO: 1187167 - DNA, 25 bp, Homo sapien
atgccatcatgaattcagatgtgtt

SEQ ID NO: 1187168 - DNA, 25 bp, Homo sapien
tcaacaatcaactttagccaatctg

SEQ ID NO: 1187169 - DNA, 25 bp, Homo sapien
aacaatcaactttagccaatctgac

SEQ ID NO: 1187170 - DNA, 25 bp, Homo sapien
caacaatcaactttagccaatctga

SEQ ID NO: 1187171 - DNA, 25 bp, Homo sapien
agtactgccccgcattaacaacaca

SEQ ID NO: 1187172 - DNA, 25 bp, Homo sapien
ggttgatccgaagaatgggctcccg

SEQ ID NO: 1187173 - DNA, 25 bp, Homo sapien
tgtgagcccgaaaagcttgtccttg

SEQ ID NO: 1187174 - DNA, 25 bp, Homo sapien
acttcactgcttgttggccgagcca

SEQ ID NO: 1187175 - DNA, 25 bp, Homo sapien
acaatatcacagagacggccctgca

SEQ ID NO: 1187176 - DNA, 25 bp, Homo sapien
tgtctctctgtcaagggaacaacac

SEQ ID NO: 1187177 - DNA, 25 bp, Homo sapien
aacaacactgccggaggggctaaat

SEQ ID NO: 1187178 - DNA, 25 bp, Homo sapien
gggaacaacactgccggaggggcta

SEQ ID NO: 1187179 - DNA, 25 bp, Homo sapien
gtctctctgtcaagggaacaacact

SEQ ID NO: 1187180 - DNA, 25 bp, Homo sapien
cagttctaaatccacaactccatac

SEQ ID NO: 1187181 - DNA, 25 bp, Homo sapien
ccaaccaccaaagcagttctaaatc

SEQ ID NO: 1187182 - DNA, 25 bp, Homo sapien
tccaaccaccaaagcagttctaaat

SEQ ID NO: 1187183 - DNA, 25 bp, Homo sapien
tctgttcttttcctggtctcttccc

SEQ ID NO: 1187184 - DNA, 25 bp, Homo sapien
atctgttcttttcctggtctcttcc

SEQ ID NO: 1187185 - DNA, 25 bp, Homo sapien
ctatctgttcttttcctggtctctt

SEQ ID NO: 1187186 - DNA, 25 bp, Homo sapien
tatctgttcttttcctggtctcttc

SEQ ID NO: 1187187 - DNA, 25 bp, Homo sapien
tgcggcagacgaatggtgtgatccc

SEQ ID NO: 1187188 - DNA, 25 bp, Homo sapien
gtgtgatccccatgtgtaggcgcat

SEQ ID NO: 1187189 - DNA, 25 bp, Homo sapien
tgagacgagggttgtaccggaacca

SEQ ID NO: 1187190 - DNA, 25 bp, Homo sapien
gatactccagctgatctttccgggt

SEQ ID NO: 1187191 - DNA, 25 bp, Homo sapien
tcgagatgtgacagttgtttcaggg

SEQ ID NO: 1187192 - DNA, 25 bp, Homo sapien
tatacagccagggtggtttttgcga

SEQ ID NO: 1187193 - DNA, 25 bp, Homo sapien
tgcgaaagtgctgattcaagatggc

SEQ ID NO: 1187194 - DNA, 25 bp, Homo sapien
ttcctcagcttgtcctcgagatgtg

SEQ ID NO: 1187195 - DNA, 25 bp, Homo sapien
cagtcaggaagttgcagaacggctc

SEQ ID NO: 1187196 - DNA, 25 bp, Homo sapien
tgaactagagccattacccaaggat

SEQ ID NO: 1187197 - DNA, 25 bp, Homo sapien
gaatctaagtatcagcccatggctc

SEQ ID NO: 1187198 - DNA, 25 bp, Homo sapien
gaattactaggtttgcagacccgag

SEQ ID NO: 1187199 - DNA, 25 bp, Homo sapien
taaagcggaggatgcaccagtctat

SEQ ID NO: 1187200 - DNA, 25 bp, Homo sapien
tctcttgtgagagggtgcagcttta

SEQ ID NO: 1187201 - DNA, 25 bp, Homo sapien
caacaactagtgctccgtcaacaga

SEQ ID NO: 1187202 - DNA, 25 bp, Homo sapien
tataagcatctatttgccggcatcc

SEQ ID NO: 1187203 - DNA, 25 bp, Homo sapien
tctttacacaagcaagtagcctcag

SEQ ID NO: 1187204 - DNA, 25 bp, Homo sapien
cctaaacaagtaagtgtggccctat

SEQ ID NO: 1187205 - DNA, 25 bp, Homo sapien
tgaggacatcttctcaaacctaggg

SEQ ID NO: 1187206 - DNA, 25 bp, Homo sapien
tagcctcagcatttggcctggaaac

SEQ ID NO: 1187207 - DNA, 25 bp, Homo sapien
tacctagtgaagagagtccctatta

SEQ ID NO: 1187208 - DNA, 25 bp, Homo sapien
tttgtctatgttgacagcgctcaca

SEQ ID NO: 1187209 - DNA, 25 bp, Homo sapien
taacctaggcaaatattctggaact

SEQ ID NO: 1187210 - DNA, 25 bp, Homo sapien
cctatactgtatcagcatggcctag

SEQ ID NO: 1187211 - DNA, 25 bp, Homo sapien
ctatctttagtatacccactctggg

SEQ ID NO: 1187212 - DNA, 25 bp, Homo sapien
ccactctgggttcaatgcacatgca

SEQ ID NO: 1187213 - DNA, 25 bp, Homo sapien
tactttataggaaactcagtggatc

SEQ ID NO: 1187214 - DNA, 25 bp, Homo sapien
tctagagacggacttcagtcacact

SEQ ID NO: 1187215 - DNA, 25 bp, Homo sapien
tggctcagtgcactagtgccccaaa

SEQ ID NO: 1187216 - DNA, 25 bp, Homo sapien
taggatatcaaaggaccaacagttc

SEQ ID NO: 1187217 - DNA, 25 bp, Homo sapien
taaccagagaatccctgtttagaca

SEQ ID NO: 1187218 - DNA, 25 bp, Homo sapien
gacacctacaacattcaggtgagga

SEQ ID NO: 1187219 - DNA, 25 bp, Homo sapien
cataaggccggtgttcatccaagct

SEQ ID NO: 1187220 - DNA, 25 bp, Homo sapien
taaagcccaggttgcacaacagacc

SEQ ID NO: 1187221 - DNA, 25 bp, Homo sapien
gacaggcctaggacaaaactctggg

SEQ ID NO: 1187222 - DNA, 25 bp, Homo sapien
tgaagaactgggtcaactagtcctg

SEQ ID NO: 1187223 - DNA, 25 bp, Homo sapien
caaattttctaaggcataggaggca

SEQ ID NO: 1187224 - DNA, 25 bp, Homo sapien
gaccaaacttcacagtgctgacagg

SEQ ID NO: 1187225 - DNA, 25 bp, Homo sapien
caacccattaggcagaacttgacca

SEQ ID NO: 1187226 - DNA, 25 bp, Homo sapien
ggcattttcttggacactgcagcat

SEQ ID NO: 1187227 - DNA, 25 bp, Homo sapien
gagcagagcgggtcccattcagaaa

SEQ ID NO: 1187228 - DNA, 25 bp, Homo sapien
gaaataagatgcacaaagccagtct

SEQ ID NO: 1187229 - DNA, 25 bp, Homo sapien
caaatcaggatcgtgtcttagagtc

SEQ ID NO: 1187230 - DNA, 25 bp, Homo sapien
gaggagagactgagaacacctgtca

SEQ ID NO: 1187231 - DNA, 25 bp, Homo sapien
atgaagaaggcagtgaagcagctgc

SEQ ID NO: 1187232 - DNA, 25 bp, Homo sapien
cagtgaagcagctgcaagtaccgct

SEQ ID NO: 1187233 - DNA, 25 bp, Homo sapien
gaaggcagtgaagcagctgcaagta

SEQ ID NO: 1187234 - DNA, 25 bp, Homo sapien
aggcagtgaagcagctgcaagtacc

SEQ ID NO: 1187235 - DNA, 25 bp, Homo sapien
cattccataaggcatttcttgaggt

SEQ ID NO: 1187236 - DNA, 25 bp, Homo sapien
tgcattccataaggcatttcttgag

SEQ ID NO: 1187237 - DNA, 25 bp, Homo sapien
ttccataaggcatttcttgaggtga

SEQ ID NO: 1187238 - DNA, 25 bp, Homo sapien
cagatgcattccataaggcatttct

SEQ ID NO: 1187239 - DNA, 25 bp, Homo sapien
acatgccccgcttccgcattgagga

SEQ ID NO: 1187240 - DNA, 25 bp, Homo sapien
ggtagagaaggaactcaccccagag

SEQ ID NO: 1187241 - DNA, 25 bp, Homo sapien
ggagcagctgcaagacatgggcctt

SEQ ID NO: 1187242 - DNA, 25 bp, Homo sapien
catgggccttgtcgatctgttcagc

SEQ ID NO: 1187243 - DNA, 25 bp, Homo sapien
gactgccgaaagctacacaggtaca

SEQ ID NO: 1187244 - DNA, 25 bp, Homo sapien
ctacacaggtacaggtcagcagggc

SEQ ID NO: 1187245 - DNA, 25 bp, Homo sapien
gggcaaatggactgccgaaagctac

SEQ ID NO: 1187246 - DNA, 25 bp, Homo sapien
cagcagggcaggtcaatctattatt

SEQ ID NO: 1187247 - DNA, 25 bp, Homo sapien
accgatgtcattccctcggaagcca

SEQ ID NO: 1187248 - DNA, 25 bp, Homo sapien
cgaatcaccgatgtcattccctcgg

SEQ ID NO: 1187249 - DNA, 25 bp, Homo sapien
attccctcggaagccatcaatgagc

SEQ ID NO: 1187250 - DNA, 25 bp, Homo sapien
gatgtcattccctcggaagccatca

SEQ ID NO: 1187251 - DNA, 25 bp, Homo sapien
tttgccaaactgaactgccgactct

SEQ ID NO: 1187252 - DNA, 25 bp, Homo sapien
tccaagttagtatcagccaatcgcc

SEQ ID NO: 1187253 - DNA, 25 bp, Homo sapien
catcagtgagttggtatatggagcc

SEQ ID NO: 1187254 - DNA, 25 bp, Homo sapien
tgccgactctatcgaaaagccaaca

SEQ ID NO: 1187255 - DNA, 25 bp, Homo sapien
tgagggctcagaacagaagatcccg

SEQ ID NO: 1187256 - DNA, 25 bp, Homo sapien
gaatcccatgtgcatttaccgctcc

SEQ ID NO: 1187257 - DNA, 25 bp, Homo sapien
ccaaccggcgtgtctgggaactgtc

SEQ ID NO: 1187258 - DNA, 25 bp, Homo sapien
tatctccacggcttttgctatgacc

SEQ ID NO: 1187259 - DNA, 25 bp, Homo sapien
gccctgtggaagattagcggccatg

SEQ ID NO: 1187260 - DNA, 25 bp, Homo sapien
tgtgataggaactgtaacctctgga

SEQ ID NO: 1187261 - DNA, 25 bp, Homo sapien
gattagcggccatgtattccaatgt

SEQ ID NO: 1187262 - DNA, 25 bp, Homo sapien
tgtattccaatgtgataggaactgt

SEQ ID NO: 1187263 - DNA, 25 bp, Homo sapien
aattgagccttaaagtgacagctga

SEQ ID NO: 1187264 - DNA, 25 bp, Homo sapien
taaaggagcccatgagatttgagtc

SEQ ID NO: 1187265 - DNA, 25 bp, Homo sapien
attccttaggatctggcaaaccgtg

SEQ ID NO: 1187266 - DNA, 25 bp, Homo sapien
cctgcagaggtatatttaacaagac

SEQ ID NO: 1187267 - DNA, 25 bp, Homo sapien
gagtaagactatcaccaccaggaat

SEQ ID NO: 1187268 - DNA, 25 bp, Homo sapien
tttcagagcctctggattttcagcc

SEQ ID NO: 1187269 - DNA, 25 bp, Homo sapien
caatactgcactgaacaaagtgggt

SEQ ID NO: 1187270 - DNA, 25 bp, Homo sapien
taaagggacttacctcaccactgga

SEQ ID NO: 1187271 - DNA, 25 bp, Homo sapien
caagcaagcagtctactactgtcat

SEQ ID NO: 1187272 - DNA, 25 bp, Homo sapien
cattttacctgagtgcccattttgc

SEQ ID NO: 1187273 - DNA, 25 bp, Homo sapien
tgcttcagctcaggtttatgaaatt

SEQ ID NO: 1187274 - DNA, 25 bp, Homo sapien
cctgctgaaatgacttattgggagt

SEQ ID NO: 1187275 - DNA, 25 bp, Homo sapien
cctaataagagtctaagtgtgttaa

SEQ ID NO: 1187276 - DNA, 25 bp, Homo sapien
cccctaataagagtctaagtgtgtt

SEQ ID NO: 1187277 - DNA, 25 bp, Homo sapien
tttaactgatgatatggttacagtg

SEQ ID NO: 1187278 - DNA, 25 bp, Homo sapien
ggttacagtgttgcaaggtgatctc

SEQ ID NO: 1187279 - DNA, 25 bp, Homo sapien
taagcagatttggactgatcttctc

SEQ ID NO: 1187280 - DNA, 25 bp, Homo sapien
ggatatcagttgaaaccccttagta

SEQ ID NO: 1187281 - DNA, 25 bp, Homo sapien
ggagcagggattaatttatacagta

SEQ ID NO: 1187282 - DNA, 25 bp, Homo sapien
tctcctttgggtatgtcagatcatc

SEQ ID NO: 1187283 - DNA, 25 bp, Homo sapien
tgggaagggtaatacagtcctgcca

SEQ ID NO: 1187284 - DNA, 25 bp, Homo sapien
gactgtttgatatagttgccctctc

SEQ ID NO: 1187285 - DNA, 25 bp, Homo sapien
taatttgcccagtcaaggcaccgtg

SEQ ID NO: 1187286 - DNA, 25 bp, Homo sapien
tcctgccattgcctaccagtaggag

SEQ ID NO: 1187287 - DNA, 25 bp, Homo sapien
gacttgaaggtagctgggaaataca

SEQ ID NO: 1187288 - DNA, 25 bp, Homo sapien
cattggaaccaaagatgcaaaaccc

SEQ ID NO: 1187289 - DNA, 25 bp, Homo sapien
gacaccatcggctcctacattggaa

SEQ ID NO: 1187290 - DNA, 25 bp, Homo sapien
tgattatagccaatactctccctgg

SEQ ID NO: 1187291 - DNA, 25 bp, Homo sapien
aaaagttgtggaataagactggact

SEQ ID NO: 1187292 - DNA, 25 bp, Homo sapien
ggattacagtgatacaaatgtggta

SEQ ID NO: 1187293 - DNA, 25 bp, Homo sapien
caggttatatttcacactatgtgct

SEQ ID NO: 1187294 - DNA, 25 bp, Homo sapien
tggaataagactggacttgtggttc

SEQ ID NO: 1187295 - DNA, 25 bp, Homo sapien
tagataaacttaagagactagggtc

SEQ ID NO: 1187296 - DNA, 25 bp, Homo sapien
gagactagggtcctggatggaactt

SEQ ID NO: 1187297 - DNA, 25 bp, Homo sapien
aacttaagagactagggtcctggat

SEQ ID NO: 1187298 - DNA, 25 bp, Homo sapien
gacttagataaacttaagagactag

SEQ ID NO: 1187299 - DNA, 25 bp, Homo sapien
tgttccccagagtggagtgcaatgg

SEQ ID NO: 1187300 - DNA, 25 bp, Homo sapien
ttccccagagtggagtgcaatggcg

SEQ ID NO: 1187301 - DNA, 25 bp, Homo sapien
cttgttccccagagtggagtgcaat

SEQ ID NO: 1187302 - DNA, 25 bp, Homo sapien
ctcttgttccccagagtggagtgca

SEQ ID NO: 1187303 - DNA, 25 bp, Homo sapien
gatactgtatatagagcactgaaag

SEQ ID NO: 1187304 - DNA, 25 bp, Homo sapien
catttgaatttaacagctaagggag

SEQ ID NO: 1187305 - DNA, 25 bp, Homo sapien
catcgatgctcacaatatgtagtta

SEQ ID NO: 1187306 - DNA, 25 bp, Homo sapien
caaagctgttctacgtctttccaga

SEQ ID NO: 1187307 - DNA, 25 bp, Homo sapien
tctctaagtacagtagacatgctgc

SEQ ID NO: 1187308 - DNA, 25 bp, Homo sapien
ctaatccctagcaaacgccattctg

SEQ ID NO: 1187309 - DNA, 25 bp, Homo sapien
gccagggactctttatggaagaaaa

SEQ ID NO: 1187310 - DNA, 25 bp, Homo sapien
tgagccaacatcgaggaagagtact

SEQ ID NO: 1187311 - DNA, 25 bp, Homo sapien
aatctcaccgtgttatgtcaagggc

SEQ ID NO: 1187312 - DNA, 25 bp, Homo sapien
ggtaatttgtacacaacgcctttca

SEQ ID NO: 1187313 - DNA, 25 bp, Homo sapien
gccactaccacatgtgtcacagtta

SEQ ID NO: 1187314 - DNA, 25 bp, Homo sapien
agtctgggtccgtatttctgttcaa

SEQ ID NO: 1187315 - DNA, 25 bp, Homo sapien
agtggccggcgtcctttaggcctca

SEQ ID NO: 1187316 - DNA, 25 bp, Homo sapien
cctcagtcgggaacaataggcagct

SEQ ID NO: 1187317 - DNA, 25 bp, Homo sapien
tcaggcctctgcatgccgcctgtag

SEQ ID NO: 1187318 - DNA, 25 bp, Homo sapien
aatcagagtcaacggtggcctcggc

SEQ ID NO: 1187319 - DNA, 25 bp, Homo sapien
ctcagggcgtgtgagactttcggtc

SEQ ID NO: 1187320 - DNA, 25 bp, Homo sapien
gccggtgcgggagggcagaccggac

SEQ ID NO: 1187321 - DNA, 25 bp, Homo sapien
gctgagcccaaaggcgccggtgcgg

SEQ ID NO: 1187322 - DNA, 25 bp, Homo sapien
cggaccgagggaccggttcatctgc

SEQ ID NO: 1187323 - DNA, 25 bp, Homo sapien
tttcaggagcccttctatgggccat

SEQ ID NO: 1187324 - DNA, 25 bp, Homo sapien
acagcccaggagagacgttttggag

SEQ ID NO: 1187325 - DNA, 25 bp, Homo sapien
tccgggccttttgggctgtttcaca

SEQ ID NO: 1187326 - DNA, 25 bp, Homo sapien
gtgacgaggacaaagctgatgagat

SEQ ID NO: 1187327 - DNA, 25 bp, Homo sapien
caccaggcagtggtgatcttgccaa

SEQ ID NO: 1187328 - DNA, 25 bp, Homo sapien
cacatctgggtaatggagaaaatcc

SEQ ID NO: 1187329 - DNA, 25 bp, Homo sapien
tggtcagtgcgaattgccttcaaga

SEQ ID NO: 1187330 - DNA, 25 bp, Homo sapien
gccaagtattctgctaaggagagcc

SEQ ID NO: 1187331 - DNA, 25 bp, Homo sapien
gacaacaactccttcaggcgcccgc

SEQ ID NO: 1187332 - DNA, 25 bp, Homo sapien
gttcgctccgccaccgctggagccc

SEQ ID NO: 1187333 - DNA, 25 bp, Homo sapien
ggtggcggcgggtcggaagcgcgct

SEQ ID NO: 1187334 - DNA, 25 bp, Homo sapien
tcgcgctctgaagccgggccggtcc

SEQ ID NO: 1187335 - DNA, 25 bp, Homo sapien
cagaactggtgggtcaaagagaagc

SEQ ID NO: 1187336 - DNA, 25 bp, Homo sapien
tacctgggcaacactctaagaaggc

SEQ ID NO: 1187337 - DNA, 25 bp, Homo sapien
aactatccagaagtagcccagcttt

SEQ ID NO: 1187338 - DNA, 25 bp, Homo sapien
gaaaagcttgagaactgccaccagt

SEQ ID NO: 1187339 - DNA, 25 bp, Homo sapien
aatgatccctaaccggtagattttg

SEQ ID NO: 1187340 - DNA, 25 bp, Homo sapien
ttttgaagttattaacggcaatcat

SEQ ID NO: 1187341 - DNA, 25 bp, Homo sapien
gtagattttgaagttattaacggca

SEQ ID NO: 1187342 - DNA, 25 bp, Homo sapien
tgaatgatccctaaccggtagattt

SEQ ID NO: 1187343 - DNA, 25 bp, Homo sapien
taccagtaatgaagctcaatacttt

SEQ ID NO: 1187344 - DNA, 25 bp, Homo sapien
ccagtaatgaagctcaatactttat

SEQ ID NO: 1187345 - DNA, 25 bp, Homo sapien
ctttaccagtaatgaagctcaatac

SEQ ID NO: 1187346 - DNA, 25 bp, Homo sapien
tttaccagtaatgaagctcaatact

SEQ ID NO: 1187347 - DNA, 25 bp, Homo sapien
tacagttgacccctattaatactcc

SEQ ID NO: 1187348 - DNA, 25 bp, Homo sapien
gagttaccataagtgcttagaacag

SEQ ID NO: 1187349 - DNA, 25 bp, Homo sapien
tataagggcatatcagcataaaggc

SEQ ID NO: 1187350 - DNA, 25 bp, Homo sapien
tgacaggtattcactaatgtacagt

SEQ ID NO: 1187351 - DNA, 25 bp, Homo sapien
tctgcaaagtcattgtgaggctggt

SEQ ID NO: 1187352 - DNA, 25 bp, Homo sapien
ctgctgctgatcagaaaatctcatt

SEQ ID NO: 1187353 - DNA, 25 bp, Homo sapien
ttccccaatacagtgcaatgcatgc

SEQ ID NO: 1187354 - DNA, 25 bp, Homo sapien
caatgcaccctgttgctatcagaaa

SEQ ID NO: 1187355 - DNA, 25 bp, Homo sapien
catgtaaaacgacggccctggtggt

SEQ ID NO: 1187356 - DNA, 25 bp, Homo sapien
acatgtaaaacgacggccctggtgg

SEQ ID NO: 1187357 - DNA, 25 bp, Homo sapien
tgacatgtaaaacgacggccctggt

SEQ ID NO: 1187358 - DNA, 25 bp, Homo sapien
gacatgtaaaacgacggccctggtg

SEQ ID NO: 1187359 - DNA, 25 bp, Homo sapien
atagtgatgggataaactggctagc

SEQ ID NO: 1187360 - DNA, 25 bp, Homo sapien
ggtggaccatttccttacatcataa

SEQ ID NO: 1187361 - DNA, 25 bp, Homo sapien
aaggtggaccatttccttacatcat

SEQ ID NO: 1187362 - DNA, 25 bp, Homo sapien
aatagtgatgggataaactggctag

SEQ ID NO: 1187363 - DNA, 25 bp, Homo sapien
ctggaatataatggcgcaacattgg

SEQ ID NO: 1187364 - DNA, 25 bp, Homo sapien
actgcacccaatctaaattagattt

SEQ ID NO: 1187365 - DNA, 25 bp, Homo sapien
ggctggaatataatggcgcaacatt

SEQ ID NO: 1187366 - DNA, 25 bp, Homo sapien
atataatggcgcaacattggctcac

SEQ ID NO: 1187367 - DNA, 25 bp, Homo sapien
cttttcattatagcctataagtata

SEQ ID NO: 1187368 - DNA, 25 bp, Homo sapien
cattatagcctataagtatagctgc

SEQ ID NO: 1187369 - DNA, 25 bp, Homo sapien
tttcattatagcctataagtatagc

SEQ ID NO: 1187370 - DNA, 25 bp, Homo sapien
tcattatagcctataagtatagctg

SEQ ID NO: 1187371 - DNA, 25 bp, Homo sapien
tgcaaacttctcttcccacaaccac

SEQ ID NO: 1187372 - DNA, 25 bp, Homo sapien
ttcagttctgcaaacttctcttccc

SEQ ID NO: 1187373 - DNA, 25 bp, Homo sapien
gttctgcaaacttctcttcccacaa

SEQ ID NO: 1187374 - DNA, 25 bp, Homo sapien
tctgcaaacttctcttcccacaacc

SEQ ID NO: 1187375 - DNA, 25 bp, Homo sapien
tctgtaatgaagctctgacctccat

SEQ ID NO: 1187376 - DNA, 25 bp, Homo sapien
cttctgtaatgaagctctgacctcc

SEQ ID NO: 1187377 - DNA, 25 bp, Homo sapien
ttctgtaatgaagctctgacctcca

SEQ ID NO: 1187378 - DNA, 25 bp, Homo sapien
tcttcactgttcattgtagccacag

SEQ ID NO: 1187379 - DNA, 25 bp, Homo sapien
ttgtagccacagaatcagatgatcc

SEQ ID NO: 1187380 - DNA, 25 bp, Homo sapien
catgttttgtagaattatcatctgc

SEQ ID NO: 1187381 - DNA, 25 bp, Homo sapien
attatcatctgcatactgaggaacc

SEQ ID NO: 1187382 - DNA, 25 bp, Homo sapien
atatagttactaaaatactaagaag

SEQ ID NO: 1187383 - DNA, 25 bp, Homo sapien
aactaaattagaggaagattattag

SEQ ID NO: 1187384 - DNA, 25 bp, Homo sapien
gttgtttcacatatataatacatta

SEQ ID NO: 1187385 - DNA, 25 bp, Homo sapien
agaggaagattattagtttcacaaa

SEQ ID NO: 1187386 - DNA, 25 bp, Homo sapien
caaacgaatggtctgaaatctcact

SEQ ID NO: 1187387 - DNA, 25 bp, Homo sapien
tgttagacggatccaaaattaactg

SEQ ID NO: 1187388 - DNA, 25 bp, Homo sapien
ggccttttctcggaatctctcaaaa

SEQ ID NO: 1187389 - DNA, 25 bp, Homo sapien
tctcactggaactttgacaatcaac

SEQ ID NO: 1187390 - DNA, 25 bp, Homo sapien
ggtgatagctatcatgccctaactg

SEQ ID NO: 1187391 - DNA, 25 bp, Homo sapien
ggctggattctttagtacaacgtca

SEQ ID NO: 1187392 - DNA, 25 bp, Homo sapien
taatgcttaatcatccttgccatgg

SEQ ID NO: 1187393 - DNA, 25 bp, Homo sapien
gcatcacagccctattgtgtaacag

SEQ ID NO: 1187394 - DNA, 25 bp, Homo sapien
ggtagtccacctggagaagatggtc

SEQ ID NO: 1187395 - DNA, 25 bp, Homo sapien
taaagcctctacttcattacgtggg

SEQ ID NO: 1187396 - DNA, 25 bp, Homo sapien
ggaagaaaccttcatacatcctaag

SEQ ID NO: 1187397 - DNA, 25 bp, Homo sapien
catggttgccattgcccgtaaagcc

SEQ ID NO: 1187398 - DNA, 25 bp, Homo sapien
gccactgaagctacagcagggaaaa

SEQ ID NO: 1187399 - DNA, 25 bp, Homo sapien
taagtcctataagaatgaatacaga

SEQ ID NO: 1187400 - DNA, 25 bp, Homo sapien
catgatataaccaaggaaggcttct

SEQ ID NO: 1187401 - DNA, 25 bp, Homo sapien
tgaatcacttacttccctagccact

SEQ ID NO: 1187402 - DNA, 25 bp, Homo sapien
aagatgctatctccacattgctgga

SEQ ID NO: 1187403 - DNA, 25 bp, Homo sapien
cgtcatgtccacgtgcacagaataa

SEQ ID NO: 1187404 - DNA, 25 bp, Homo sapien
tatctgaaattcttccgaaccatgg

SEQ ID NO: 1187405 - DNA, 25 bp, Homo sapien
tttcacaggagaaaacatgtatctg

SEQ ID NO: 1187406 - DNA, 25 bp, Homo sapien
aaatgtgtcctaacccttctgtggg

SEQ ID NO: 1187407 - DNA, 25 bp, Homo sapien
cattgttgatgcctgcagtttgagg

SEQ ID NO: 1187408 - DNA, 25 bp, Homo sapien
tgtgtcacaggtgttcaagagggcc

SEQ ID NO: 1187409 - DNA, 25 bp, Homo sapien
caagtgttgcaagtcaaatgtgtcc

SEQ ID NO: 1187410 - DNA, 25 bp, Homo sapien
cagggaggagagcacatgtagatat

SEQ ID NO: 1187411 - DNA, 25 bp, Homo sapien
tactggtgaaagataactcactctt

SEQ ID NO: 1187412 - DNA, 25 bp, Homo sapien
taactgcggcggaattttaagcacc

SEQ ID NO: 1187413 - DNA, 25 bp, Homo sapien
catagctagtttctccaagatgaag

SEQ ID NO: 1187414 - DNA, 25 bp, Homo sapien
tgaaggtaaacacatcactgtcggg

SEQ ID NO: 1187415 - DNA, 25 bp, Homo sapien
gagtctttaacatcagacacttgtc

SEQ ID NO: 1187416 - DNA, 25 bp, Homo sapien
cactgtcgggggtaggaataactga

SEQ ID NO: 1187417 - DNA, 25 bp, Homo sapien
agacacttgtctggaagaacgtttg

SEQ ID NO: 1187418 - DNA, 25 bp, Homo sapien
tgaaatattcaaaaggaataggaat

SEQ ID NO: 1187419 - DNA, 25 bp, Homo sapien
tcaaaaggaataggaattaccaata

SEQ ID NO: 1187420 - DNA, 25 bp, Homo sapien
ctgaaatattcaaaaggaataggaa

SEQ ID NO: 1187421 - DNA, 25 bp, Homo sapien
tattcaaaaggaataggaattacca

SEQ ID NO: 1187422 - DNA, 25 bp, Homo sapien
tagaaagttgctgcactgtaatcac

SEQ ID NO: 1187423 - DNA, 25 bp, Homo sapien
gttagaaagttgctgcactgtaatc

SEQ ID NO: 1187424 - DNA, 25 bp, Homo sapien
ttagaaagttgctgcactgtaatca

SEQ ID NO: 1187425 - DNA, 25 bp, Homo sapien
gaacttagctacagtcagattttaa

SEQ ID NO: 1187426 - DNA, 25 bp, Homo sapien
tacaaaatgagaacttagctacagt

SEQ ID NO: 1187427 - DNA, 25 bp, Homo sapien
gacatggtttaatccctgcttaaaa

SEQ ID NO: 1187428 - DNA, 25 bp, Homo sapien
caaagtctgacatggtttaatccct

SEQ ID NO: 1187429 - DNA, 25 bp, Homo sapien
gtatgcattatgtagagataaagtc

SEQ ID NO: 1187430 - DNA, 25 bp, Homo sapien
cattgtactgcaaaaggagccttag

SEQ ID NO: 1187431 - DNA, 25 bp, Homo sapien
tgcactaatcttttcctggcctgga

SEQ ID NO: 1187432 - DNA, 25 bp, Homo sapien
ttcttaagtagcaatactcatcacc

SEQ ID NO: 1187433 - DNA, 25 bp, Homo sapien
tgttcttcacgtttcgacctgggct

SEQ ID NO: 1187434 - DNA, 25 bp, Homo sapien
aaatgcatgtcactgttcttcacgt

SEQ ID NO: 1187435 - DNA, 25 bp, Homo sapien
tttcgacctgggcttaataacattc

SEQ ID NO: 1187436 - DNA, 25 bp, Homo sapien
tcacgtttcgacctgggcttaataa

SEQ ID NO: 1187437 - DNA, 25 bp, Homo sapien
aagactttaccaagccagctcttga

SEQ ID NO: 1187438 - DNA, 25 bp, Homo sapien
tttaagactttaccaagccagctct

SEQ ID NO: 1187439 - DNA, 25 bp, Homo sapien
cattctttaagactttaccaagcca

SEQ ID NO: 1187440 - DNA, 25 bp, Homo sapien
ttctccattctttaagactttacca

SEQ ID NO: 1187441 - DNA, 25 bp, Homo sapien
tgccagtgatgacataagctctccc

SEQ ID NO: 1187442 - DNA, 25 bp, Homo sapien
tggggtttcctcgttaagtgccaga

SEQ ID NO: 1187443 - DNA, 25 bp, Homo sapien
gatgacataagctctcccatcatag

SEQ ID NO: 1187444 - DNA, 25 bp, Homo sapien
gttaagtgccagaaatactggtgca

SEQ ID NO: 1187445 - DNA, 25 bp, Homo sapien
tgctgaaataccaaaatcgctcatt

SEQ ID NO: 1187446 - DNA, 25 bp, Homo sapien
catgaagaaagtctctgtgaaagtc

SEQ ID NO: 1187447 - DNA, 25 bp, Homo sapien
cacacggactactgtctccaggaga

SEQ ID NO: 1187448 - DNA, 25 bp, Homo sapien
ggagaaagcgaacaggctccaccac

SEQ ID NO: 1187449 - DNA, 25 bp, Homo sapien
tccagcatgtacaacagtgagactt

SEQ ID NO: 1187450 - DNA, 25 bp, Homo sapien
tgcagttagctatgactgcgccaca

SEQ ID NO: 1187451 - DNA, 25 bp, Homo sapien
ccagcaacttgggaagctaggcaga

SEQ ID NO: 1187452 - DNA, 25 bp, Homo sapien
ttagctatgactgcgccacaccact

SEQ ID NO: 1187453 - DNA, 25 bp, Homo sapien
gactggttcctccttgtcagactct

SEQ ID NO: 1187454 - DNA, 25 bp, Homo sapien
tccactagtaggagtgactggttcc

SEQ ID NO: 1187455 - DNA, 25 bp, Homo sapien
tccagcattggtatggccttttccc

SEQ ID NO: 1187456 - DNA, 25 bp, Homo sapien
tcagactctcgctgtagactcacca

SEQ ID NO: 1187457 - DNA, 25 bp, Homo sapien
taagtaaagcagctatacagacaga

SEQ ID NO: 1187458 - DNA, 25 bp, Homo sapien
taaagcagctatacagacagaataa

SEQ ID NO: 1187459 - DNA, 25 bp, Homo sapien
cagacagaataaactgagtaagtcc

SEQ ID NO: 1187460 - DNA, 25 bp, Homo sapien
attgtaagtaaagcagctatacaga

SEQ ID NO: 1187461 - DNA, 25 bp, Homo sapien
gtcttggctctcatattgtcatcat

SEQ ID NO: 1187462 - DNA, 25 bp, Homo sapien
tatttgacaacaccgaatatcactt

SEQ ID NO: 1187463 - DNA, 25 bp, Homo sapien
ccatttcagtgttccacagtgaact

SEQ ID NO: 1187464 - DNA, 25 bp, Homo sapien
gtcaatcctcaatgcactacaatga

SEQ ID NO: 1187465 - DNA, 25 bp, Homo sapien
tgtggacatgcatctctgtctactc

SEQ ID NO: 1187466 - DNA, 25 bp, Homo sapien
cagttgttaggaccttgctttgtcc

SEQ ID NO: 1187467 - DNA, 25 bp, Homo sapien
tgtagtctaggtttgtttgtgatca

SEQ ID NO: 1187468 - DNA, 25 bp, Homo sapien
gatcattcatctacatggtttagga

SEQ ID NO: 1187469 - DNA, 25 bp, Homo sapien
tagagtatgttgaatttgcctggac

SEQ ID NO: 1187470 - DNA, 25 bp, Homo sapien
tcagtctacacatgttcttaagggt

SEQ ID NO: 1187471 - DNA, 25 bp, Homo sapien
gcagatctggttacagggaattccc

SEQ ID NO: 1187472 - DNA, 25 bp, Homo sapien
tgcttccaggagtatggaaattccc

SEQ ID NO: 1187473 - DNA, 25 bp, Homo sapien
ggtatagagtacagtttaaattcag

SEQ ID NO: 1187474 - DNA, 25 bp, Homo sapien
tgttgaaagtgaggtgaaattccct

SEQ ID NO: 1187475 - DNA, 25 bp, Homo sapien
ggtgaaattccctactattactgta

SEQ ID NO: 1187476 - DNA, 25 bp, Homo sapien
tgttaggtccattgggtatagagta

SEQ ID NO: 1187477 - DNA, 25 bp, Homo sapien
tctttacattcctgggttgaatcct

SEQ ID NO: 1187478 - DNA, 25 bp, Homo sapien
tactgatttgcttatgttaaaccat

SEQ ID NO: 1187479 - DNA, 25 bp, Homo sapien
ccttctagataatggtgaattacct

SEQ ID NO: 1187480 - DNA, 25 bp, Homo sapien
caattgaaatgaccacatagtttta

SEQ ID NO: 1187481 - DNA, 25 bp, Homo sapien
gaaacatagggttgttccacgctct

SEQ ID NO: 1187482 - DNA, 25 bp, Homo sapien
tccacgctctgctccagatcaagtg

SEQ ID NO: 1187483 - DNA, 25 bp, Homo sapien
tctaacaatactgtggaaacatagg

SEQ ID NO: 1187484 - DNA, 25 bp, Homo sapien
caacagcaaagctactggtttccac

SEQ ID NO: 1187485 - DNA, 25 bp, Homo sapien
cagctctaacttttgatgtttgcgt

SEQ ID NO: 1187486 - DNA, 25 bp, Homo sapien
taataaagtgtattgaaaatgtatg

SEQ ID NO: 1187487 - DNA, 25 bp, Homo sapien
taacttttgatgtttgcgttgacaa

SEQ ID NO: 1187488 - DNA, 25 bp, Homo sapien
gatgtttgcgttgacaaaatgtcaa

SEQ ID NO: 1187489 - DNA, 25 bp, Homo sapien
ttctgtaatgatttaaactgtttat

SEQ ID NO: 1187490 - DNA, 25 bp, Homo sapien
taacttctgtaatgatttaaactgt

SEQ ID NO: 1187491 - DNA, 25 bp, Homo sapien
ttaacttctgtaatgatttaaactg

SEQ ID NO: 1187492 - DNA, 25 bp, Homo sapien
acttctgtaatgatttaaactgttt

SEQ ID NO: 1187493 - DNA, 25 bp, Homo sapien
tcacaaatttcctttcatagagatt

SEQ ID NO: 1187494 - DNA, 25 bp, Homo sapien
cacaaatttcctttcatagagattt

SEQ ID NO: 1187495 - DNA, 25 bp, Homo sapien
ttcacaaatttcctttcatagagat

SEQ ID NO: 1187496 - DNA, 25 bp, Homo sapien
acaaatttcctttcatagagatttt

SEQ ID NO: 1187497 - DNA, 25 bp, Homo sapien
tgccctgtcacagcggaggatagag

SEQ ID NO: 1187498 - DNA, 25 bp, Homo sapien
ccaccgtgtggtgcagaaaggcaat

SEQ ID NO: 1187499 - DNA, 25 bp, Homo sapien
ggtgagcaatcacagcgcatggttt

SEQ ID NO: 1187500 - DNA, 25 bp, Homo sapien
gtcatgagttgctgataccacccca

SEQ ID NO: 1187501 - DNA, 25 bp, Homo sapien
tggccttccgcactgactgttctag

SEQ ID NO: 1187502 - DNA, 25 bp, Homo sapien
ccggcagtctgcttgcgtgtgtgca

SEQ ID NO: 1187503 - DNA, 25 bp, Homo sapien
catgagagatggcaggcctccaact

SEQ ID NO: 1187504 - DNA, 25 bp, Homo sapien
cagccatgaaccagtttggtaccca

SEQ ID NO: 1187505 - DNA, 25 bp, Homo sapien
tctcaggacaatccttagacacatc

SEQ ID NO: 1187506 - DNA, 25 bp, Homo sapien
cacctgttccacttgagagttcatt

SEQ ID NO: 1187507 - DNA, 25 bp, Homo sapien
acctgttccacttgagagttcatta

SEQ ID NO: 1187508 - DNA, 25 bp, Homo sapien
aatccttagacacatcacctgttcc

SEQ ID NO: 1187509 - DNA, 25 bp, Homo sapien
tgagtctggtataaatatcatcaac

SEQ ID NO: 1187510 - DNA, 25 bp, Homo sapien
tcaatgttcttcctactccaatatt

SEQ ID NO: 1187511 - DNA, 25 bp, Homo sapien
ggagcctcatctctgtacatagggt

SEQ ID NO: 1187512 - DNA, 25 bp, Homo sapien
tctgtacatagggtcagtgagtctg

SEQ ID NO: 1187513 - DNA, 25 bp, Homo sapien
cctttacaactcctgaactgctgtt

SEQ ID NO: 1187514 - DNA, 25 bp, Homo sapien
ttacaactcctgaactgctgttgcc

SEQ ID NO: 1187515 - DNA, 25 bp, Homo sapien
tttacaactcctgaactgctgttgc

SEQ ID NO: 1187516 - DNA, 25 bp, Homo sapien
ctttacaactcctgaactgctgttg

SEQ ID NO: 1187517 - DNA, 25 bp, Homo sapien
tcggtcgtgcaccaaggttactgtg

SEQ ID NO: 1187518 - DNA, 25 bp, Homo sapien
tacctctgccctcaatgcttcaggg

SEQ ID NO: 1187519 - DNA, 25 bp, Homo sapien
gagtagacagccctttcggtcgtgc

SEQ ID NO: 1187520 - DNA, 25 bp, Homo sapien
gataagaattcggtatctatccagc

SEQ ID NO: 1187521 - DNA, 25 bp, Homo sapien
caatgttcatagatgactaagtgca

SEQ ID NO: 1187522 - DNA, 25 bp, Homo sapien
acaagagtaactatgtatgattata

SEQ ID NO: 1187523 - DNA, 25 bp, Homo sapien
tccaatttggtaaatagctattata

SEQ ID NO: 1187524 - DNA, 25 bp, Homo sapien
cattgtttaccactacaagtgttca

SEQ ID NO: 1187525 - DNA, 25 bp, Homo sapien
caccagcttctagatattcatatga

SEQ ID NO: 1187526 - DNA, 25 bp, Homo sapien
ccaggtttttaagtgtgaagatgta

SEQ ID NO: 1187527 - DNA, 25 bp, Homo sapien
tcagaaggtgttgtgtttatatgct

SEQ ID NO: 1187528 - DNA, 25 bp, Homo sapien
aaccgccatatgtttcaaaatgtcc

SEQ ID NO: 1187529 - DNA, 25 bp, Homo sapien
tactccatcgataaaaacttctagg

SEQ ID NO: 1187530 - DNA, 25 bp, Homo sapien
ggtatggcagttacctcctacccca

SEQ ID NO: 1187531 - DNA, 25 bp, Homo sapien
ccagccctatctcttgatcttaaag

SEQ ID NO: 1187532 - DNA, 25 bp, Homo sapien
tgatacccagagttatgatctctga

SEQ ID NO: 1187533 - DNA, 25 bp, Homo sapien
caaggtcaccaaccagtaagtagca

SEQ ID NO: 1187534 - DNA, 25 bp, Homo sapien
actgaagatagttaaggagcttgcc

SEQ ID NO: 1187535 - DNA, 25 bp, Homo sapien
ttgaaacctgcacggacctcaagag

SEQ ID NO: 1187536 - DNA, 25 bp, Homo sapien
ccatcacgggtgagtgcttatcatg

SEQ ID NO: 1187537 - DNA, 25 bp, Homo sapien
taaaagccatctgctacaattatac

SEQ ID NO: 1187538 - DNA, 25 bp, Homo sapien
aaaagccatctgctacaattataca

SEQ ID NO: 1187539 - DNA, 25 bp, Homo sapien
ttaaaagccatctgctacaattata

SEQ ID NO: 1187540 - DNA, 25 bp, Homo sapien
aaagtgactgaattttcctgacttt

SEQ ID NO: 1187541 - DNA, 25 bp, Homo sapien
caaaagtgactgaattttcctgact

SEQ ID NO: 1187542 - DNA, 25 bp, Homo sapien
ctttagtaacaattaaagctctctc

SEQ ID NO: 1187543 - DNA, 25 bp, Homo sapien
actttagtaacaattaaagctctct

SEQ ID NO: 1187544 - DNA, 25 bp, Homo sapien
aagatggagtccaagtagccaggtc

SEQ ID NO: 1187545 - DNA, 25 bp, Homo sapien
gatggagtccaagtagccaggtcta

SEQ ID NO: 1187546 - DNA, 25 bp, Homo sapien
tctttctgtggaatagcccaagcag

SEQ ID NO: 1187547 - DNA, 25 bp, Homo sapien
acaagatggagtccaagtagccagg

SEQ ID NO: 1187548 - DNA, 25 bp, Homo sapien
cagaccagggatgtattcactagaa

SEQ ID NO: 1187549 - DNA, 25 bp, Homo sapien
taaccaacacaggtctgagtgtgct

SEQ ID NO: 1187550 - DNA, 25 bp, Homo sapien
tcttcactaggcagtggagctcctc

SEQ ID NO: 1187551 - DNA, 25 bp, Homo sapien
gaagatcaaaaagaccgtactgcag

SEQ ID NO: 1187552 - DNA, 25 bp, Homo sapien
gtgcccggccctccattggtttatc

SEQ ID NO: 1187553 - DNA, 25 bp, Homo sapien
cagccctgtgaagggtttaagctaa

SEQ ID NO: 1187554 - DNA, 25 bp, Homo sapien
gtgcgatcttgcctcctccgggctc

SEQ ID NO: 1187555 - DNA, 25 bp, Homo sapien
taagctaagaagtagcccaaattaa

SEQ ID NO: 1187556 - DNA, 25 bp, Homo sapien
cgatcttgcctcctccgggctcaag

SEQ ID NO: 1187557 - DNA, 25 bp, Homo sapien
ggtcattaggtatcttattattgcc

SEQ ID NO: 1187558 - DNA, 25 bp, Homo sapien
taattcgcttcattttcggggtcat

SEQ ID NO: 1187559 - DNA, 25 bp, Homo sapien
tctaggaggaatcattatatggaat

SEQ ID NO: 1187560 - DNA, 25 bp, Homo sapien
tgctttcaactgatgaatgctaatc

SEQ ID NO: 1187561 - DNA, 25 bp, Homo sapien
gagtttcgatcttgttgaccaggca

SEQ ID NO: 1187562 - DNA, 25 bp, Homo sapien
gtttcgatcttgttgaccaggcagg

SEQ ID NO: 1187563 - DNA, 25 bp, Homo sapien
tctcaaactcctgacttcaagtaat

SEQ ID NO: 1187564 - DNA, 25 bp, Homo sapien
accaggcaggagtgcaatagcatga

SEQ ID NO: 1187565 - DNA, 25 bp, Homo sapien
cagactccagattgccctataactc

SEQ ID NO: 1187566 - DNA, 25 bp, Homo sapien
aagagtgtctttgggcttagttcag

SEQ ID NO: 1187567 - DNA, 25 bp, Homo sapien
tacagttactggtggtactaacagc

SEQ ID NO: 1187568 - DNA, 25 bp, Homo sapien
gattcatctctacatgggcagaata

SEQ ID NO: 1187569 - DNA, 25 bp, Homo sapien
tgacagagtaggaaccaagcagcta

SEQ ID NO: 1187570 - DNA, 25 bp, Homo sapien
caggagtgacgctcggacacattca

SEQ ID NO: 1187571 - DNA, 25 bp, Homo sapien
tgtagtggccaaatccaagtgggca

SEQ ID NO: 1187572 - DNA, 25 bp, Homo sapien
tcaatgactcgtggacacctgtgga

SEQ ID NO: 1187573 - DNA, 25 bp, Homo sapien
ctcatgactagggaatcgggctctt

SEQ ID NO: 1187574 - DNA, 25 bp, Homo sapien
gtgtgctgacggcaaattttgaaaa

SEQ ID NO: 1187575 - DNA, 25 bp, Homo sapien
aagtaagtgaagcagacaacaaagg

SEQ ID NO: 1187576 - DNA, 25 bp, Homo sapien
tcggtcatttatctctttggtgtgc

SEQ ID NO: 1187577 - DNA, 25 bp, Homo sapien
gaggcctagccggaaaacgctgttg

SEQ ID NO: 1187578 - DNA, 25 bp, Homo sapien
ttggattgtccaagacccgggagct

SEQ ID NO: 1187579 - DNA, 25 bp, Homo sapien
tctcagacagtcttcggaggcctag

SEQ ID NO: 1187580 - DNA, 25 bp, Homo sapien
tcaaatggagcaagaattagcccgt

SEQ ID NO: 1187581 - DNA, 25 bp, Homo sapien
tcaaacgacatgatcttgttagggt

SEQ ID NO: 1187582 - DNA, 25 bp, Homo sapien
tattattgtcacacaagacacgtcg

SEQ ID NO: 1187583 - DNA, 25 bp, Homo sapien
cacgtcgtcagtagtatctttgtca

SEQ ID NO: 1187584 - DNA, 25 bp, Homo sapien
ctttatcacaggcaatattattgtc

SEQ ID NO: 1187585 - DNA, 25 bp, Homo sapien
ttctcaaacgcaatatctaggtggc

SEQ ID NO: 1187586 - DNA, 25 bp, Homo sapien
gcagcagtagcacagagtaaattgt

SEQ ID NO: 1187587 - DNA, 25 bp, Homo sapien
gagtaaattgtgagataacaatagt

SEQ ID NO: 1187588 - DNA, 25 bp, Homo sapien
acaatagtgagaagattatctgagc

SEQ ID NO: 1187589 - DNA, 25 bp, Homo sapien
cttgaaaggccagtagagattatca

SEQ ID NO: 1187590 - DNA, 25 bp, Homo sapien
gaagagacccaagaactactgttaa

SEQ ID NO: 1187591 - DNA, 25 bp, Homo sapien
cctaagtatcaataccaggcctggg

SEQ ID NO: 1187592 - DNA, 25 bp, Homo sapien
gcttgttagacaatcacaccaggtg

SEQ ID NO: 1187593 - DNA, 25 bp, Homo sapien
gaaacagtacagacctgcaagcatg

SEQ ID NO: 1187594 - DNA, 25 bp, Homo sapien
gacccctgaaaagatgataaatgac

SEQ ID NO: 1187595 - DNA, 25 bp, Homo sapien
tctttgagaaactgtagacccctga

SEQ ID NO: 1187596 - DNA, 25 bp, Homo sapien
taaatggcagaaaactagctgtgta

SEQ ID NO: 1187597 - DNA, 25 bp, Homo sapien
caaagtagctactagaagatctggt

SEQ ID NO: 1187598 - DNA, 25 bp, Homo sapien
attagagtactagggcatcacttac

SEQ ID NO: 1187599 - DNA, 25 bp, Homo sapien
tcagtataagccataacaatccctc

SEQ ID NO: 1187600 - DNA, 25 bp, Homo sapien
gaaatcagcctatgtgtatacacgt

SEQ ID NO: 1187601 - DNA, 25 bp, Homo sapien
tatctgcccacgctgtcatatggaa

SEQ ID NO: 1187602 - DNA, 25 bp, Homo sapien
gcactcttactagctgacatcagga

SEQ ID NO: 1187603 - DNA, 25 bp, Homo sapien
cgaaagtgcaattgaacaggctccc

SEQ ID NO: 1187604 - DNA, 25 bp, Homo sapien
tcagacctactaaacccgaaagtgc

SEQ ID NO: 1187605 - DNA, 25 bp, Homo sapien
gaatactccagtgcctgctacacca

SEQ ID NO: 1187606 - DNA, 25 bp, Homo sapien
ttggctgacattaaacagtttgctg

SEQ ID NO: 1187607 - DNA, 25 bp, Homo sapien
gaaccaagtattctaaatggcactg

SEQ ID NO: 1187608 - DNA, 25 bp, Homo sapien
cactagttatccgaattcccttcaa

SEQ ID NO: 1187609 - DNA, 25 bp, Homo sapien
tgtggaacaggctattcttgtgaca

SEQ ID NO: 1187610 - DNA, 25 bp, Homo sapien
tactatggactataaggcacagttc

SEQ ID NO: 1187611 - DNA, 25 bp, Homo sapien
gttatatgttaattgccccgatggc

SEQ ID NO: 1187612 - DNA, 25 bp, Homo sapien
gaggtatgaatactatggactataa

SEQ ID NO: 1187613 - DNA, 25 bp, Homo sapien
ttctcacccgtggaagggttatatg

SEQ ID NO: 1187614 - DNA, 25 bp, Homo sapien
taaagggaagatggcctatgaacca

SEQ ID NO: 1187615 - DNA, 25 bp, Homo sapien
ccactgaggtagcatgagaagcact

SEQ ID NO: 1187616 - DNA, 25 bp, Homo sapien
taagcatagtcaagtgctggtagca

SEQ ID NO: 1187617 - DNA, 25 bp, Homo sapien
cagcatgagctgagaacttcaagca

SEQ ID NO: 1187618 - DNA, 25 bp, Homo sapien
cagtagaacctccaccttatgaatt

SEQ ID NO: 1187619 - DNA, 25 bp, Homo sapien
aaatagccaagatttgaaagcaact

SEQ ID NO: 1187620 - DNA, 25 bp, Homo sapien
caacatggatgaaacgtgaagtcac

SEQ ID NO: 1187621 - DNA, 25 bp, Homo sapien
gattacaggagtaaaatagccaaga

SEQ ID NO: 1187622 - DNA, 25 bp, Homo sapien
tagaacaaatgaacctactagatat

SEQ ID NO: 1187623 - DNA, 25 bp, Homo sapien
gatcaatttcaaggacagatcatat

SEQ ID NO: 1187624 - DNA, 25 bp, Homo sapien
tcaacagttgaagaatacaccttct

SEQ ID NO: 1187625 - DNA, 25 bp, Homo sapien
catcagttaaatctgcactatagaa

SEQ ID NO: 1187626 - DNA, 25 bp, Homo sapien
aagagacatagtccctaacctcatg

SEQ ID NO: 1187627 - DNA, 25 bp, Homo sapien
tacctgcttatacatatggaagagg

SEQ ID NO: 1187628 - DNA, 25 bp, Homo sapien
ccaagcctgggaatgcaacaatgat

SEQ ID NO: 1187629 - DNA, 25 bp, Homo sapien
gctgcaatgtattaaggctacggtg

SEQ ID NO: 1187630 - DNA, 25 bp, Homo sapien
caaaggtgtcttccctgccctgtag

SEQ ID NO: 1187631 - DNA, 25 bp, Homo sapien
gtcttccctgccctgtagaaactga

SEQ ID NO: 1187632 - DNA, 25 bp, Homo sapien
tccctgccctgtagaaactgagcat

SEQ ID NO: 1187633 - DNA, 25 bp, Homo sapien
aaaggtgtcttccctgccctgtaga

SEQ ID NO: 1187634 - DNA, 25 bp, Homo sapien
aatccctaaagattactcacatccc

SEQ ID NO: 1187635 - DNA, 25 bp, Homo sapien
tttaataatccctaaagattactca

SEQ ID NO: 1187636 - DNA, 25 bp, Homo sapien
taataatccctaaagattactcaca

SEQ ID NO: 1187637 - DNA, 25 bp, Homo sapien
ctaaagattactcacatccccatag

SEQ ID NO: 1187638 - DNA, 25 bp, Homo sapien
gcagatgattccataggtgaatggg

SEQ ID NO: 1187639 - DNA, 25 bp, Homo sapien
cagatgattccataggtgaatgggg

SEQ ID NO: 1187640 - DNA, 25 bp, Homo sapien
ctgaaataatgaatgcagatgattc

SEQ ID NO: 1187641 - DNA, 25 bp, Homo sapien
cctgaaataatgaatgcagatgatt

SEQ ID NO: 1187642 - DNA, 25 bp, Homo sapien
tactgtttgtgtatacagaactgaa

SEQ ID NO: 1187643 - DNA, 25 bp, Homo sapien
gtctcagagctgagcaattactcct

SEQ ID NO: 1187644 - DNA, 25 bp, Homo sapien
ttatgtacaattagatccttttgga

SEQ ID NO: 1187645 - DNA, 25 bp, Homo sapien
gcaattactcctacattttagactg

SEQ ID NO: 1187646 - DNA, 25 bp, Homo sapien
tacggctcttcttctcaacactgga

SEQ ID NO: 1187647 - DNA, 25 bp, Homo sapien
gaataaagacactgacctacggctc

SEQ ID NO: 1187648 - DNA, 25 bp, Homo sapien
aggattttccttctaatgtggcaaa

SEQ ID NO: 1187649 - DNA, 25 bp, Homo sapien
cttcttctcaacactggaaaggatt

SEQ ID NO: 1187650 - DNA, 25 bp, Homo sapien
cccttagagggtcgtctttctcaga

SEQ ID NO: 1187651 - DNA, 25 bp, Homo sapien
taggctttggccagtctaccagtgc

SEQ ID NO: 1187652 - DNA, 25 bp, Homo sapien
gttttaaggtccaagtattctgcag

SEQ ID NO: 1187653 - DNA, 25 bp, Homo sapien
ggtcttcttggcaaccactactgat

SEQ ID NO: 1187654 - DNA, 25 bp, Homo sapien
cacagtgctggatacataataaaca

SEQ ID NO: 1187655 - DNA, 25 bp, Homo sapien
taacttgcagtttcctcatatacag

SEQ ID NO: 1187656 - DNA, 25 bp, Homo sapien
caaggcagtggaaggcaatatagct

SEQ ID NO: 1187657 - DNA, 25 bp, Homo sapien
caaagtatacatggaagttccttaa

SEQ ID NO: 1187658 - DNA, 25 bp, Homo sapien
tcacgtatggttaatatttatggaa

SEQ ID NO: 1187659 - DNA, 25 bp, Homo sapien
tgaatatactcttctcaattatcat

SEQ ID NO: 1187660 - DNA, 25 bp, Homo sapien
ctaaggtaatgcactttcagggatt

SEQ ID NO: 1187661 - DNA, 25 bp, Homo sapien
caaacataatcacgtatggttaata

SEQ ID NO: 1187662 - DNA, 25 bp, Homo sapien
cccgtaaacctaggtcagctctatt

SEQ ID NO: 1187663 - DNA, 25 bp, Homo sapien
caggtatcctaagaatcccagaagg

SEQ ID NO: 1187664 - DNA, 25 bp, Homo sapien
tggaaccaagagcaatcaagtgttt

SEQ ID NO: 1187665 - DNA, 25 bp, Homo sapien
ctagaaagagagcatatatgccata

SEQ ID NO: 1187666 - DNA, 25 bp, Homo sapien
caaggcaatcatttgtacgccggaa

SEQ ID NO: 1187667 - DNA, 25 bp, Homo sapien
tacgccggaagtgaagaaggctact

SEQ ID NO: 1187668 - DNA, 25 bp, Homo sapien
ccattcattcctgaaggaagtgcca

SEQ ID NO: 1187669 - DNA, 25 bp, Homo sapien
tatacaactagcagccaacttccag

SEQ ID NO: 1187670 - DNA, 25 bp, Homo sapien
gagtgtgaacatgactggattgaag

SEQ ID NO: 1187671 - DNA, 25 bp, Homo sapien
agtgtgaacatgactggattgaagg

SEQ ID NO: 1187672 - DNA, 25 bp, Homo sapien
tactgctagccagaagccttggtga

SEQ ID NO: 1187673 - DNA, 25 bp, Homo sapien
caaaaacacgtatttcgtatgttat

SEQ ID NO: 1187674 - DNA, 25 bp, Homo sapien
actactagtagcctactgctagcca

SEQ ID NO: 1187675 - DNA, 25 bp, Homo sapien
cattgtcacacaaagtaagctagag

SEQ ID NO: 1187676 - DNA, 25 bp, Homo sapien
ggatgggaaaatacagaccagactt

SEQ ID NO: 1187677 - DNA, 25 bp, Homo sapien
tgtagaggatgggaaaatacagacc

SEQ ID NO: 1187678 - DNA, 25 bp, Homo sapien
ggaaaataggttcttagtagcagta

SEQ ID NO: 1187679 - DNA, 25 bp, Homo sapien
ggataagggttacaggcttcactga

SEQ ID NO: 1187680 - DNA, 25 bp, Homo sapien
atctcacaggcagggaaacacatag

SEQ ID NO: 1187681 - DNA, 25 bp, Homo sapien
gagatgaaggaagatctgccaagca

SEQ ID NO: 1187682 - DNA, 25 bp, Homo sapien
ataaagagatgaaggaagatctgcc

SEQ ID NO: 1187683 - DNA, 25 bp, Homo sapien
cacaggcagggaaacacataggctc

SEQ ID NO: 1187684 - DNA, 25 bp, Homo sapien
tcaggcagcaacatttgccattctg

SEQ ID NO: 1187685 - DNA, 25 bp, Homo sapien
ggcagcaacatttgccattctgcaa

SEQ ID NO: 1187686 - DNA, 25 bp, Homo sapien
gcagcaacatttgccattctgcaat

SEQ ID NO: 1187687 - DNA, 25 bp, Homo sapien
attctgcaatatttgctgttctgca

SEQ ID NO: 1187688 - DNA, 25 bp, Homo sapien
caaaattacataggcagcaacagga

SEQ ID NO: 1187689 - DNA, 25 bp, Homo sapien
ctcaggtttgaaccgaggttccaag

SEQ ID NO: 1187690 - DNA, 25 bp, Homo sapien
caacaggaagagtgagtattacaac

SEQ ID NO: 1187691 - DNA, 25 bp, Homo sapien
gatcaagccgcaagtgtcagcaagg

SEQ ID NO: 1187692 - DNA, 25 bp, Homo sapien
tctcggtgtaagactaaatttcatc

SEQ ID NO: 1187693 - DNA, 25 bp, Homo sapien
taactaggtgaatagtctgtctcgg

SEQ ID NO: 1187694 - DNA, 25 bp, Homo sapien
tcaaattgcagctggttacagggtg

SEQ ID NO: 1187695 - DNA, 25 bp, Homo sapien
taagtaatcagaacatcaagtctaa

SEQ ID NO: 1187696 - DNA, 25 bp, Homo sapien
taagctgccaagagcactgacgcat

SEQ ID NO: 1187697 - DNA, 25 bp, Homo sapien
gcaacctcccatgcaaagaaagcac

SEQ ID NO: 1187698 - DNA, 25 bp, Homo sapien
ttcaccctgagagattatgcacaca

SEQ ID NO: 1187699 - DNA, 25 bp, Homo sapien
tgaacatatgtaacatcaacctggg

SEQ ID NO: 1187700 - DNA, 25 bp, Homo sapien
aggctggaccttttgaatgaaaaag

SEQ ID NO: 1187701 - DNA, 25 bp, Homo sapien
ccaggctggaccttttgaatgaaaa

SEQ ID NO: 1187702 - DNA, 25 bp, Homo sapien
caggctggaccttttgaatgaaaaa

SEQ ID NO: 1187703 - DNA, 25 bp, Homo sapien
cgctaatttatttagtccttgcaag

SEQ ID NO: 1187704 - DNA, 25 bp, Homo sapien
acccttcggttatcacagtaataat

SEQ ID NO: 1187705 - DNA, 25 bp, Homo sapien
cattttctacatgctttgcatacgc

SEQ ID NO: 1187706 - DNA, 25 bp, Homo sapien
ccttgcaagttttaatattatcctc

SEQ ID NO: 1187707 - DNA, 25 bp, Homo sapien
gatataaagctctgtggtcactcaa

SEQ ID NO: 1187708 - DNA, 25 bp, Homo sapien
tctctttaaccactagtcactaaga

SEQ ID NO: 1187709 - DNA, 25 bp, Homo sapien
taatcccatcctctaggtagtaagc

SEQ ID NO: 1187710 - DNA, 25 bp, Homo sapien
gttcgtgtgtatcaaatgtttagct

SEQ ID NO: 1187711 - DNA, 25 bp, Homo sapien
tgtaaatcccctgcatttcagtttg

SEQ ID NO: 1187712 - DNA, 25 bp, Homo sapien
gacagtccatgctctattacaccaa

SEQ ID NO: 1187713 - DNA, 25 bp, Homo sapien
caccaaacgatctcaaatgtccatg

SEQ ID NO: 1187714 - DNA, 25 bp, Homo sapien
ggtcttactccgtagtccatgtgaa

SEQ ID NO: 1187715 - DNA, 25 bp, Homo sapien
ctccacactttcaagggaaatctta

SEQ ID NO: 1187716 - DNA, 25 bp, Homo sapien
caatactcctgtggtcacatttgga

SEQ ID NO: 1187717 - DNA, 25 bp, Homo sapien
gatatgccttcgttctcagggttgc

SEQ ID NO: 1187718 - DNA, 25 bp, Homo sapien
caggcaataatgaaacctgcaactc

SEQ ID NO: 1187719 - DNA, 25 bp, Homo sapien
gactgttcattgtcccaactgggga

SEQ ID NO: 1187720 - DNA, 25 bp, Homo sapien
aaatgaatgcagcattgaagtgtca

SEQ ID NO: 1187721 - DNA, 25 bp, Homo sapien
ttaggaagacagctttgtatgacca

SEQ ID NO: 1187722 - DNA, 25 bp, Homo sapien
gcagcattgaagtgtcaacaagcat

SEQ ID NO: 1187723 - DNA, 25 bp, Homo sapien
tgtatgaccacagcctattattttt

SEQ ID NO: 1187724 - DNA, 25 bp, Homo sapien
tctaaatttgccagagcagtcacca

SEQ ID NO: 1187725 - DNA, 25 bp, Homo sapien
gctttgcatgtaacccacacaataa

SEQ ID NO: 1187726 - DNA, 25 bp, Homo sapien
gaaagatgtacacaaatatgtccag

SEQ ID NO: 1187727 - DNA, 25 bp, Homo sapien
ttatcaactaatacacactctggcc

SEQ ID NO: 1187728 - DNA, 25 bp, Homo sapien
ggctacttatagcaacactgatggt

SEQ ID NO: 1187729 - DNA, 25 bp, Homo sapien
gatagctgcgaagtatacaagaagg

SEQ ID NO: 1187730 - DNA, 25 bp, Homo sapien
gattagctctaaggtaagccactac

SEQ ID NO: 1187731 - DNA, 25 bp, Homo sapien
catgctgggtggtaattagatctta

SEQ ID NO: 1187732 - DNA, 25 bp, Homo sapien
ctttaaagtaatcatgtgcgggaaa

SEQ ID NO: 1187733 - DNA, 25 bp, Homo sapien
gaatatctcgagtaataacactctc

SEQ ID NO: 1187734 - DNA, 25 bp, Homo sapien
tatagagcgattcttgaccatctcc

SEQ ID NO: 1187735 - DNA, 25 bp, Homo sapien
ggaaatgtacgatgaatatctcgag

SEQ ID NO: 1187736 - DNA, 25 bp, Homo sapien
tcactgctcattagaatgtgctggc

SEQ ID NO: 1187737 - DNA, 25 bp, Homo sapien
cactgctcattagaatgtgctggca

SEQ ID NO: 1187738 - DNA, 25 bp, Homo sapien
tataatcaaacccttaggcgtcaca

SEQ ID NO: 1187739 - DNA, 25 bp, Homo sapien
ggactctagcttcacaaaccctgac

SEQ ID NO: 1187740 - DNA, 25 bp, Homo sapien
cagttgaaagactacaggcttcaca

SEQ ID NO: 1187741 - DNA, 25 bp, Homo sapien
tatttcaaggaaagctcttagggac

SEQ ID NO: 1187742 - DNA, 25 bp, Homo sapien
tgggtacgggggcaacctgaagcag

SEQ ID NO: 1187743 - DNA, 25 bp, Homo sapien
tctggcccagatatgacacttttcc

SEQ ID NO: 1187744 - DNA, 25 bp, Homo sapien
acaatgcaatctggcccagatatga

SEQ ID NO: 1187745 - DNA, 25 bp, Homo sapien
cacctggaatgccagaaccatacac

SEQ ID NO: 1187746 - DNA, 25 bp, Homo sapien
taaggagggtatttgcacacaagag

SEQ ID NO: 1187747 - DNA, 25 bp, Homo sapien
tatcttcatcggtaacacacaggta

SEQ ID NO: 1187748 - DNA, 25 bp, Homo sapien
ttaggcagagcaagatagaacattc

SEQ ID NO: 1187749 - DNA, 25 bp, Homo sapien
tgacaagataaggaggagttcacct

SEQ ID NO: 1187750 - DNA, 25 bp, Homo sapien
aatactgtacgcttaggctacaata

SEQ ID NO: 1187751 - DNA, 25 bp, Homo sapien
tatagggcacttactgagaatgcag

SEQ ID NO: 1187752 - DNA, 25 bp, Homo sapien
tactgggctgctacaagaaaccatg

SEQ ID NO: 1187753 - DNA, 25 bp, Homo sapien
tactgtacactaatgcagcctttat

SEQ ID NO: 1187754 - DNA, 25 bp, Homo sapien
ggtgagtgactataaaacctaacta

SEQ ID NO: 1187755 - DNA, 25 bp, Homo sapien
caggcaggcagactaaggcactaaa

SEQ ID NO: 1187756 - DNA, 25 bp, Homo sapien
tccagttagaatgcagcagagctag

SEQ ID NO: 1187757 - DNA, 25 bp, Homo sapien
ccactgtcactatttggtctctgga

SEQ ID NO: 1187758 - DNA, 25 bp, Homo sapien
agagtgcaacaatgggtcaaacttc

SEQ ID NO: 1187759 - DNA, 25 bp, Homo sapien
agggaaatcaaaggatgttctctaa

SEQ ID NO: 1187760 - DNA, 25 bp, Homo sapien
aaagaggctgccatgtgagagtgca

SEQ ID NO: 1187761 - DNA, 25 bp, Homo sapien
gaggctgccatgtgagagtgcaaca

SEQ ID NO: 1187762 - DNA, 25 bp, Homo sapien
ctgggttgctataagaaatacagga

SEQ ID NO: 1187763 - DNA, 25 bp, Homo sapien
tgggttgctataagaaatacaggat

SEQ ID NO: 1187764 - DNA, 25 bp, Homo sapien
ggttgctataagaaatacaggatgg

SEQ ID NO: 1187765 - DNA, 25 bp, Homo sapien
tgctataagaaatacaggatggtat

SEQ ID NO: 1187766 - DNA, 25 bp, Homo sapien
tgaaatacacaatgactactactgc

SEQ ID NO: 1187767 - DNA, 25 bp, Homo sapien
actgctcttgacctaccttaaaatt

SEQ ID NO: 1187768 - DNA, 25 bp, Homo sapien
tagttttccaactagattataccca

SEQ ID NO: 1187769 - DNA, 25 bp, Homo sapien
tttctccaaaatgctccctcacaca

SEQ ID NO: 1187770 - DNA, 25 bp, Homo sapien
taatggcaatgcagtctttcagcta

SEQ ID NO: 1187771 - DNA, 25 bp, Homo sapien
tccatgacatctaagaaccaggtaa

SEQ ID NO: 1187772 - DNA, 25 bp, Homo sapien
tctaagaaccaggtaatggcaatgc

SEQ ID NO: 1187773 - DNA, 25 bp, Homo sapien
tgaatcacatagattccatgacatc

SEQ ID NO: 1187774 - DNA, 25 bp, Homo sapien
tgtgtaagtacctgcttcaaagctg

SEQ ID NO: 1187775 - DNA, 25 bp, Homo sapien
ttcaggctgcagtcactactcccag

SEQ ID NO: 1187776 - DNA, 25 bp, Homo sapien
tatcaccactgtgctagcaaggttt

SEQ ID NO: 1187777 - DNA, 25 bp, Homo sapien
caggccatccattacagatatgtgg

SEQ ID NO: 1187778 - DNA, 25 bp, Homo sapien
gccacttccctgatacttatgccgt

SEQ ID NO: 1187779 - DNA, 25 bp, Homo sapien
cttatgccgtaagtgggacaaatgt

SEQ ID NO: 1187780 - DNA, 25 bp, Homo sapien
cataaaccatctacagatgactcct

SEQ ID NO: 1187781 - DNA, 25 bp, Homo sapien
aaatcagattagtatagataccacc

SEQ ID NO: 1187782 - DNA, 25 bp, Homo sapien
aatctataccactggggcaaaccag

SEQ ID NO: 1187783 - DNA, 25 bp, Homo sapien
caatctataccactggggcaaacca

SEQ ID NO: 1187784 - DNA, 25 bp, Homo sapien
tccaatctataccactggggcaaac

SEQ ID NO: 1187785 - DNA, 25 bp, Homo sapien
ttctccaatctataccactggggca

SEQ ID NO: 1187786 - DNA, 25 bp, Homo sapien
gactgcccttgacagtacccaatgt

SEQ ID NO: 1187787 - DNA, 25 bp, Homo sapien
agactgcccttgacagtacccaatg

SEQ ID NO: 1187788 - DNA, 25 bp, Homo sapien
cccttgacagtacccaatgtcttca

SEQ ID NO: 1187789 - DNA, 25 bp, Homo sapien
tgcccttgacagtacccaatgtctt

SEQ ID NO: 1187790 - DNA, 25 bp, Homo sapien
gaagagtttacagcagcggatctga

SEQ ID NO: 1187791 - DNA, 25 bp, Homo sapien
taacaattggccgtcaaaagctggt

SEQ ID NO: 1187792 - DNA, 25 bp, Homo sapien
gctggtatgacctggctgtagcaca

SEQ ID NO: 1187793 - DNA, 25 bp, Homo sapien
tttttagtaaggtcacgcagctgct

SEQ ID NO: 1187794 - DNA, 25 bp, Homo sapien
gtagaggtctctcaaaccatagtcg

SEQ ID NO: 1187795 - DNA, 25 bp, Homo sapien
ttttcaccaaaacacagaatgcttg

SEQ ID NO: 1187796 - DNA, 25 bp, Homo sapien
tgcattagtctctccaactggtaga

SEQ ID NO: 1187797 - DNA, 25 bp, Homo sapien
accatagtcgtacatgattttcacc

SEQ ID NO: 1187798 - DNA, 25 bp, Homo sapien
gcaaattcatcctctactgccctgt

SEQ ID NO: 1187799 - DNA, 25 bp, Homo sapien
ggcaaaaagcgagtaatcccaaata

SEQ ID NO: 1187800 - DNA, 25 bp, Homo sapien
tatggctcgttttacatccctgcct

SEQ ID NO: 1187801 - DNA, 25 bp, Homo sapien
taaagtcttctaccctcctacattc

SEQ ID NO: 1187802 - DNA, 25 bp, Homo sapien
agccatttcttgaactacatgctct

SEQ ID NO: 1187803 - DNA, 25 bp, Homo sapien
aagccatttcttgaactacatgctc

SEQ ID NO: 1187804 - DNA, 25 bp, Homo sapien
gccatttcttgaactacatgctctc

SEQ ID NO: 1187805 - DNA, 25 bp, Homo sapien
ccatttcttgaactacatgctctct

SEQ ID NO: 1187806 - DNA, 25 bp, Homo sapien
gaaaaatggctatgcaggtccggta

SEQ ID NO: 1187807 - DNA, 25 bp, Homo sapien
gagcttccaggttcagatcagaaaa

SEQ ID NO: 1187808 - DNA, 25 bp, Homo sapien
gaacaccatgcagagtgggaacttg

SEQ ID NO: 1187809 - DNA, 25 bp, Homo sapien
accactgggatgcatacatatgagc

SEQ ID NO: 1187810 - DNA, 25 bp, Homo sapien
ggcaagtactaactaaagccactga

SEQ ID NO: 1187811 - DNA, 25 bp, Homo sapien
tgaccttcaggtattaggcaagtac

SEQ ID NO: 1187812 - DNA, 25 bp, Homo sapien
tacatgcttacaaatgccctgtgac

SEQ ID NO: 1187813 - DNA, 25 bp, Homo sapien
gattctctagctgttatattcagga

SEQ ID NO: 1187814 - DNA, 25 bp, Homo sapien
tctacaatgaacactatagaaccaa

SEQ ID NO: 1187815 - DNA, 25 bp, Homo sapien
tatagaaccaatctagtatgaaatt

SEQ ID NO: 1187816 - DNA, 25 bp, Homo sapien
gaaatcacatttagttggttatgat

SEQ ID NO: 1187817 - DNA, 25 bp, Homo sapien
tgaacactatagaaccaatctagta

SEQ ID NO: 1187818 - DNA, 25 bp, Homo sapien
gacaagtgacgggaaggctaataaa

SEQ ID NO: 1187819 - DNA, 25 bp, Homo sapien
ggacaatgttccgatgccacgggtg

SEQ ID NO: 1187820 - DNA, 25 bp, Homo sapien
cacgggtgccaacattcgggcagac

SEQ ID NO: 1187821 - DNA, 25 bp, Homo sapien
gaaagtcaccatcccagtgaactga

SEQ ID NO: 1187822 - DNA, 25 bp, Homo sapien
tctcccatgaactcagaataagaac

SEQ ID NO: 1187823 - DNA, 25 bp, Homo sapien
gaagcttactatcacagtggaagga

SEQ ID NO: 1187824 - DNA, 25 bp, Homo sapien
acagtgagagagtaaacgagagcag

SEQ ID NO: 1187825 - DNA, 25 bp, Homo sapien
acaagggcgagccagcacatcatac

SEQ ID NO: 1187826 - DNA, 25 bp, Homo sapien
atattattgcttacaatgtgatgtt

SEQ ID NO: 1187827 - DNA, 25 bp, Homo sapien
tgttaaaatcaggctaatcagcata

SEQ ID NO: 1187828 - DNA, 25 bp, Homo sapien
tattattgcttacaatgtgatgttt

SEQ ID NO: 1187829 - DNA, 25 bp, Homo sapien
tcgccaagctctttccatagtggct

SEQ ID NO: 1187830 - DNA, 25 bp, Homo sapien
taatagccatgttgatgggtgtgag

SEQ ID NO: 1187831 - DNA, 25 bp, Homo sapien
tgttgatgggtgtgagatggtctca

SEQ ID NO: 1187832 - DNA, 25 bp, Homo sapien
ttgagaaatcgccaagctctttcca

SEQ ID NO: 1187833 - DNA, 25 bp, Homo sapien
ttgctgtcctgagaacttgctcaaa

SEQ ID NO: 1187834 - DNA, 25 bp, Homo sapien
gctgtcctgagaacttgctcaaatc

SEQ ID NO: 1187835 - DNA, 25 bp, Homo sapien
tgctgtcctgagaacttgctcaaat

SEQ ID NO: 1187836 - DNA, 25 bp, Homo sapien
gcatgacgaagtagctttttaactg

SEQ ID NO: 1187837 - DNA, 25 bp, Homo sapien
taatgacaacagattgagatcagcc

SEQ ID NO: 1187838 - DNA, 25 bp, Homo sapien
ttggatactgctatttcaaaattca

SEQ ID NO: 1187839 - DNA, 25 bp, Homo sapien
gactgcttgcagtatatgaggcaac

SEQ ID NO: 1187840 - DNA, 25 bp, Homo sapien
ctacatgaaagattatgttcaaacc

SEQ ID NO: 1187841 - DNA, 25 bp, Homo sapien
caaagctacatgaaagattatgttc

SEQ ID NO: 1187842 - DNA, 25 bp, Homo sapien
ggagagccaaagctacatgaaagat

SEQ ID NO: 1187843 - DNA, 25 bp, Homo sapien
gagccaaagctacatgaaagattat

SEQ ID NO: 1187844 - DNA, 25 bp, Homo sapien
tggtgaagttatggacaagaagctg

SEQ ID NO: 1187845 - DNA, 25 bp, Homo sapien
caccgagactttgtggcagagtccg

SEQ ID NO: 1187846 - DNA, 25 bp, Homo sapien
gcctggccgggattggtgaagttat

SEQ ID NO: 1187847 - DNA, 25 bp, Homo sapien
ggaaaagccagtagggagcctggcc

SEQ ID NO: 1187848 - DNA, 25 bp, Homo sapien
tgtgatatacagctccccttgcttt

SEQ ID NO: 1187849 - DNA, 25 bp, Homo sapien
ctatgtttcgtatataacctgttga

SEQ ID NO: 1187850 - DNA, 25 bp, Homo sapien
ttgtcatgtgatatacagctcccct

SEQ ID NO: 1187851 - DNA, 25 bp, Homo sapien
aagcagatatcagtactatgtttcg

SEQ ID NO: 1187852 - DNA, 25 bp, Homo sapien
caactcttacagataaaaagggtca

SEQ ID NO: 1187853 - DNA, 25 bp, Homo sapien
tatcaaactatcaacactgtaatgg

SEQ ID NO: 1187854 - DNA, 25 bp, Homo sapien
gacaagtctcttgataatagctcct

SEQ ID NO: 1187855 - DNA, 25 bp, Homo sapien
aagatcaattgattcccacagtgag

SEQ ID NO: 1187856 - DNA, 25 bp, Homo sapien
caatggtgtgatcaccggagtgcaa

SEQ ID NO: 1187857 - DNA, 25 bp, Homo sapien
ggagtgcaatgccaggccactatgc

SEQ ID NO: 1187858 - DNA, 25 bp, Homo sapien
tcttaatcaagcttacgtatgacac

SEQ ID NO: 1187859 - DNA, 25 bp, Homo sapien
gaggtactgtccctgcctatggttt

SEQ ID NO: 1187860 - DNA, 25 bp, Homo sapien
tcctccgaattgaaagatgtgtctg

SEQ ID NO: 1187861 - DNA, 25 bp, Homo sapien
gatgtatgcaacttcctcactattt

SEQ ID NO: 1187862 - DNA, 25 bp, Homo sapien
gatgtgtctgactttaaccatgtac

SEQ ID NO: 1187863 - DNA, 25 bp, Homo sapien
ccatgtacatgaggacaacatccta

SEQ ID NO: 1187864 - DNA, 25 bp, Homo sapien
tcttggaaattcctacggactgact

SEQ ID NO: 1187865 - DNA, 25 bp, Homo sapien
aactttagatatggccatggaggac

SEQ ID NO: 1187866 - DNA, 25 bp, Homo sapien
tctactgaaatagcaagaatcttgg

SEQ ID NO: 1187867 - DNA, 25 bp, Homo sapien
gggacagctacacaggctaaccaag

SEQ ID NO: 1187868 - DNA, 25 bp, Homo sapien
tctagagtgatttcgaatgattgat

SEQ ID NO: 1187869 - DNA, 25 bp, Homo sapien
tgacgatgagatcctaggcaactat

SEQ ID NO: 1187870 - DNA, 25 bp, Homo sapien
gatcctaggcaactataaagcaatg

SEQ ID NO: 1187871 - DNA, 25 bp, Homo sapien
ttttgtctgccaattataaaatcta

SEQ ID NO: 1187872 - DNA, 25 bp, Homo sapien
accacaatataggagggattgcaca

SEQ ID NO: 1187873 - DNA, 25 bp, Homo sapien
caccacaatataggagggattgcac

SEQ ID NO: 1187874 - DNA, 25 bp, Homo sapien
ctcccaccacaatataggagggatt

SEQ ID NO: 1187875 - DNA, 25 bp, Homo sapien
cccaccacaatataggagggattgc

SEQ ID NO: 1187876 - DNA, 25 bp, Homo sapien
tacacacattagtcaaataactgag

SEQ ID NO: 1187877 - DNA, 25 bp, Homo sapien
caagtaaatgcataaggtgtttgaa

SEQ ID NO: 1187878 - DNA, 25 bp, Homo sapien
gaagataaaaactacaagtaaatgc

SEQ ID NO: 1187879 - DNA, 25 bp, Homo sapien
gggcagatacttagaatttaccagt

SEQ ID NO: 1187880 - DNA, 25 bp, Homo sapien
agtcatccctgtcattacttccctc

SEQ ID NO: 1187881 - DNA, 25 bp, Homo sapien
atctctggtcaaattaatccttccc

SEQ ID NO: 1187882 - DNA, 25 bp, Homo sapien
aatgaccaaatcaccatagggacag

SEQ ID NO: 1187883 - DNA, 25 bp, Homo sapien
gaataaataatcagttgtagccaaa

SEQ ID NO: 1187884 - DNA, 25 bp, Homo sapien
cctaacacgtattaagagtatacat

SEQ ID NO: 1187885 - DNA, 25 bp, Homo sapien
gctgcaaggagaaaacgatgagctc

SEQ ID NO: 1187886 - DNA, 25 bp, Homo sapien
tcgtgacaagcagcgctgttgttgc

SEQ ID NO: 1187887 - DNA, 25 bp, Homo sapien
cgatgagctcattgcaatcctcgat

SEQ ID NO: 1187888 - DNA, 25 bp, Homo sapien
gaagctgcaaggagaaaacgatgag

SEQ ID NO: 1187889 - DNA, 25 bp, Homo sapien
ggaattgtcagctaatgtctccaca

SEQ ID NO: 1187890 - DNA, 25 bp, Homo sapien
catgtgtaaaaacggacaagctgct

SEQ ID NO: 1187891 - DNA, 25 bp, Homo sapien
tgggaggacgtacaagccagtctgt

SEQ ID NO: 1187892 - DNA, 25 bp, Homo sapien
gaaaatggccaagagtgatgcagga

SEQ ID NO: 1187893 - DNA, 25 bp, Homo sapien
tgcggtgggaggggagccaggttta

SEQ ID NO: 1187894 - DNA, 25 bp, Homo sapien
ctgcggtgggaggggagccaggttt

SEQ ID NO: 1187895 - DNA, 25 bp, Homo sapien
gcactaagtaggtatccagaatgag

SEQ ID NO: 1187896 - DNA, 25 bp, Homo sapien
ggatctcttatccacaatattaaga

SEQ ID NO: 1187897 - DNA, 25 bp, Homo sapien
tggatctcttatccacaatattaag

SEQ ID NO: 1187898 - DNA, 25 bp, Homo sapien
gagcactaagtaggtatccagaatg

SEQ ID NO: 1187899 - DNA, 25 bp, Homo sapien
aggtgtgagcttagcagctggggct

SEQ ID NO: 1187900 - DNA, 25 bp, Homo sapien
gactttttgacaggaggtgtgagct

SEQ ID NO: 1187901 - DNA, 25 bp, Homo sapien
gctgggcagggcaccccttcttcca

SEQ ID NO: 1187902 - DNA, 25 bp, Homo sapien
ctgggcagggcaccccttcttccat

SEQ ID NO: 1187903 - DNA, 25 bp, Homo sapien
gaggcacaaacagacgatgccccat

SEQ ID NO: 1187904 - DNA, 25 bp, Homo sapien
cagaagttccagcactcgacacgca

SEQ ID NO: 1187905 - DNA, 25 bp, Homo sapien
agaagccgaggcacaaacagacgat

SEQ ID NO: 1187906 - DNA, 25 bp, Homo sapien
agttccagcactcgacacgcatact

SEQ ID NO: 1187907 - DNA, 25 bp, Homo sapien
aaatgaagttcaatgaaaaacaatc

SEQ ID NO: 1187908 - DNA, 25 bp, Homo sapien
ctacaaatgaagttcaatgaaaaac

SEQ ID NO: 1187909 - DNA, 25 bp, Homo sapien
atgaagttcaatgaaaaacaatctc

SEQ ID NO: 1187910 - DNA, 25 bp, Homo sapien
acaaatgaagttcaatgaaaaacaa

SEQ ID NO: 1187911 - DNA, 25 bp, Homo sapien
tttacagtcagtacttaatagtcaa

SEQ ID NO: 1187912 - DNA, 25 bp, Homo sapien
gcaaacactgtgatacatattatag

SEQ ID NO: 1187913 - DNA, 25 bp, Homo sapien
taggaagatgagtacacagaagcca

SEQ ID NO: 1187914 - DNA, 25 bp, Homo sapien
tactttctgtataacgcttttataa

SEQ ID NO: 1187915 - DNA, 25 bp, Homo sapien
ctctgccctgtatctctttggaagc

SEQ ID NO: 1187916 - DNA, 25 bp, Homo sapien
ttcctctgccctgtatctctttgga

SEQ ID NO: 1187917 - DNA, 25 bp, Homo sapien
aatattgcaagcctgctccatcagt

SEQ ID NO: 1187918 - DNA, 25 bp, Homo sapien
tttaatattgcaagcctgctccatc

SEQ ID NO: 1187919 - DNA, 25 bp, Homo sapien
caaatttctggtaattcagagtctc

SEQ ID NO: 1187920 - DNA, 25 bp, Homo sapien
tctggtaattcagagtctctgaagc

SEQ ID NO: 1187921 - DNA, 25 bp, Homo sapien
ggtaattcagagtctctgaagccaa

SEQ ID NO: 1187922 - DNA, 25 bp, Homo sapien
caagtttaagaagctctgcaatggc

SEQ ID NO: 1187923 - DNA, 25 bp, Homo sapien
accatgctcagtccaattaccggct

SEQ ID NO: 1187924 - DNA, 25 bp, Homo sapien
atttctctatttactcacctgctat

SEQ ID NO: 1187925 - DNA, 25 bp, Homo sapien
gatgtcttttcgttaaatattgcac

SEQ ID NO: 1187926 - DNA, 25 bp, Homo sapien
tttcattaagaccattaaggatgtc

SEQ ID NO: 1187927 - DNA, 25 bp, Homo sapien
aaccttccacttcagccaatcaagt

SEQ ID NO: 1187928 - DNA, 25 bp, Homo sapien
agccaaccttccacttcagccaatc

SEQ ID NO: 1187929 - DNA, 25 bp, Homo sapien
ccttccacttcagccaatcaagtag

SEQ ID NO: 1187930 - DNA, 25 bp, Homo sapien
gaatgcaatgacacagtcatagctc

SEQ ID NO: 1187931 - DNA, 25 bp, Homo sapien
cgagcccagggcaatattactttct

SEQ ID NO: 1187932 - DNA, 25 bp, Homo sapien
tcttccgccattcttcctgagtcca

SEQ ID NO: 1187933 - DNA, 25 bp, Homo sapien
tcaaccctgtggtgtaccagtgtca

SEQ ID NO: 1187934 - DNA, 25 bp, Homo sapien
cccaataagggaattaatctcctct

SEQ ID NO: 1187935 - DNA, 25 bp, Homo sapien
ggacctcagtgctaattcaaagaaa

SEQ ID NO: 1187936 - DNA, 25 bp, Homo sapien
ccagttatgaatatggaggtcttcg

SEQ ID NO: 1187937 - DNA, 25 bp, Homo sapien
tacattcttgttcacgtacagcaac

SEQ ID NO: 1187938 - DNA, 25 bp, Homo sapien
gataaaggaatctaccactgtctca

SEQ ID NO: 1187939 - DNA, 25 bp, Homo sapien
gtgcactggatcttgccttcttgag

SEQ ID NO: 1187940 - DNA, 25 bp, Homo sapien
cttcttgagaacatggatcacagta

SEQ ID NO: 1187941 - DNA, 25 bp, Homo sapien
gaaacagcttgataaagtgtttgtg

SEQ ID NO: 1187942 - DNA, 25 bp, Homo sapien
catggatcacagtattgtgaagatg

SEQ ID NO: 1187943 - DNA, 25 bp, Homo sapien
tatttcacgtttgacaattcagaac

SEQ ID NO: 1187944 - DNA, 25 bp, Homo sapien
tcacgtttgacaattcagaactgat

SEQ ID NO: 1187945 - DNA, 25 bp, Homo sapien
cagtcacatgcctatactaataaaa

SEQ ID NO: 1187946 - DNA, 25 bp, Homo sapien
tcagtcacatgcctatactaataaa

SEQ ID NO: 1187947 - DNA, 25 bp, Homo sapien
tataccctaggaaggccaagaaagc

SEQ ID NO: 1187948 - DNA, 25 bp, Homo sapien
caagaaagctcctgctgctagtaca

SEQ ID NO: 1187949 - DNA, 25 bp, Homo sapien
tgccagctttgtgtgagatctgcag

SEQ ID NO: 1187950 - DNA, 25 bp, Homo sapien
gaagatagggttcatgtttctacca

SEQ ID NO: 1187951 - DNA, 25 bp, Homo sapien
caggatacaaagcttgacaatctca

SEQ ID NO: 1187952 - DNA, 25 bp, Homo sapien
caatgagatcacagaatgctgtata

SEQ ID NO: 1187953 - DNA, 25 bp, Homo sapien
gacattcttagttttcaggatacaa

SEQ ID NO: 1187954 - DNA, 25 bp, Homo sapien
tgttgtccacttgatctcttatgaa

SEQ ID NO: 1187955 - DNA, 25 bp, Homo sapien
taaattcgtcatatggccccttggg

SEQ ID NO: 1187956 - DNA, 25 bp, Homo sapien
cagaaagatgcgaattcagaagtcg

SEQ ID NO: 1187957 - DNA, 25 bp, Homo sapien
catgaactgctgagaaaatagccca

SEQ ID NO: 1187958 - DNA, 25 bp, Homo sapien
cagaagtcgaaatctcctgaagaca

SEQ ID NO: 1187959 - DNA, 25 bp, Homo sapien
tctactcagaatgtgaagtgatggg

SEQ ID NO: 1187960 - DNA, 25 bp, Homo sapien
caacaagtccctgaagtcatctaag

SEQ ID NO: 1187961 - DNA, 25 bp, Homo sapien
gacctcagcaggcttacaacaagtc

SEQ ID NO: 1187962 - DNA, 25 bp, Homo sapien
gatggatgctatggactcctgatgc

SEQ ID NO: 1187963 - DNA, 25 bp, Homo sapien
aaagctagcctttgaaatgagacct

SEQ ID NO: 1187964 - DNA, 25 bp, Homo sapien
cacacagctcacttatgagttatat

SEQ ID NO: 1187965 - DNA, 25 bp, Homo sapien
tatatataactctgaaacctaagcc

SEQ ID NO: 1187966 - DNA, 25 bp, Homo sapien
gagacctaggtttaaggaactcagc

SEQ ID NO: 1187967 - DNA, 25 bp, Homo sapien
gcaaactacagtgtgctgatgctgg

SEQ ID NO: 1187968 - DNA, 25 bp, Homo sapien
cctgcttgcttaggcccttaagggt

SEQ ID NO: 1187969 - DNA, 25 bp, Homo sapien
gttttatgaataagggcacgcctct

SEQ ID NO: 1187970 - DNA, 25 bp, Homo sapien
taaggcctggaagtgtattacctgc

SEQ ID NO: 1187971 - DNA, 25 bp, Homo sapien
taagtcattgcatgaacaccaagcc

SEQ ID NO: 1187972 - DNA, 25 bp, Homo sapien
gacttatgtaagagctggacaggcc

SEQ ID NO: 1187973 - DNA, 25 bp, Homo sapien
gaaaaagctacgctctgccagtaca

SEQ ID NO: 1187974 - DNA, 25 bp, Homo sapien
gcaaaggccctcatggaaactaaaa

SEQ ID NO: 1187975 - DNA, 25 bp, Homo sapien
agaacacacagtattcggtgttagt

SEQ ID NO: 1187976 - DNA, 25 bp, Homo sapien
tgaccatcatttagcacccacttgt

SEQ ID NO: 1187977 - DNA, 25 bp, Homo sapien
gtagtccccggtgtgtgttgctccc

SEQ ID NO: 1187978 - DNA, 25 bp, Homo sapien
cacagtattcggtgttagtttgtta

SEQ ID NO: 1187979 - DNA, 25 bp, Homo sapien
gaagagtatcaaaacaggcaacaga

SEQ ID NO: 1187980 - DNA, 25 bp, Homo sapien
tatcaaaacaggcaacagaaaccag

SEQ ID NO: 1187981 - DNA, 25 bp, Homo sapien
gagtatcaaaacaggcaacagaaac

SEQ ID NO: 1187982 - DNA, 25 bp, Homo sapien
caggagaagagtatcaaaacaggca

SEQ ID NO: 1187983 - DNA, 25 bp, Homo sapien
atcttgcaacattttctagatgtga

SEQ ID NO: 1187984 - DNA, 25 bp, Homo sapien
cttgcaacattttctagatgtgaaa

SEQ ID NO: 1187985 - DNA, 25 bp, Homo sapien
ccagcaccagaagatttcagattat

SEQ ID NO: 1187986 - DNA, 25 bp, Homo sapien
caccagaagatttcagattatcttg

SEQ ID NO: 1187987 - DNA, 25 bp, Homo sapien
tctgcatttataacagagaagctgg

SEQ ID NO: 1187988 - DNA, 25 bp, Homo sapien
aaaaaagcggctgctatcacaggct

SEQ ID NO: 1187989 - DNA, 25 bp, Homo sapien
aaagaggtttcttatctatgcagga

SEQ ID NO: 1187990 - DNA, 25 bp, Homo sapien
tacaagtgatctcctgaagtctgaa

SEQ ID NO: 1187991 - DNA, 25 bp, Homo sapien
gaaaaatcctactgcagctcagtgc

SEQ ID NO: 1187992 - DNA, 25 bp, Homo sapien
ctatccaaggaaaaatcctactgca

SEQ ID NO: 1187993 - DNA, 25 bp, Homo sapien
gcagctcagtgccagtgtacacacc

SEQ ID NO: 1187994 - DNA, 25 bp, Homo sapien
tgcagctcagtgccagtgtacacac

SEQ ID NO: 1187995 - DNA, 25 bp, Homo sapien
agcagctgctgtcccagctccagac

SEQ ID NO: 1187996 - DNA, 25 bp, Homo sapien
cagctgctgtcccagctccagacca

SEQ ID NO: 1187997 - DNA, 25 bp, Homo sapien
cttgccagctggcctttccacagca

SEQ ID NO: 1187998 - DNA, 25 bp, Homo sapien
agcagcagctgctgtcccagctcca

SEQ ID NO: 1187999 - DNA, 25 bp, Homo sapien
acatgggcgtcataggctaccataa

SEQ ID NO: 1188000 - DNA, 25 bp, Homo sapien
cagctggctgaaaacatgggcgtca

SEQ ID NO: 1188001 - DNA, 25 bp, Homo sapien
tgaggaagtcttcatcgtgcagctg

SEQ ID NO: 1188002 - DNA, 25 bp, Homo sapien
tagtgaggaagtcttcatcgtgcag

SEQ ID NO: 1188003 - DNA, 25 bp, Homo sapien
ttggcaagagatttctgtttcttaa

SEQ ID NO: 1188004 - DNA, 25 bp, Homo sapien
ggcaagagatttctgtttcttaatt

SEQ ID NO: 1188005 - DNA, 25 bp, Homo sapien
caagagatttctgtttcttaattac

SEQ ID NO: 1188006 - DNA, 25 bp, Homo sapien
cctagaaacattggcaagagatttc

SEQ ID NO: 1188007 - DNA, 25 bp, Homo sapien
gcccaacccgagtgctggagctggc

SEQ ID NO: 1188008 - DNA, 25 bp, Homo sapien
ctccagctaccgctgcggccaccat

SEQ ID NO: 1188009 - DNA, 25 bp, Homo sapien
gccagagccaccacgcgagatgctt

SEQ ID NO: 1188010 - DNA, 25 bp, Homo sapien
caccacgcgagatgcttgcaggagc

SEQ ID NO: 1188011 - DNA, 25 bp, Homo sapien
atgtacaggccaagaacaccaacca

SEQ ID NO: 1188012 - DNA, 25 bp, Homo sapien
caccaaccaccaaagaatggcatgt

SEQ ID NO: 1188013 - DNA, 25 bp, Homo sapien
gaatggcatgtaaataccacccttg

SEQ ID NO: 1188014 - DNA, 25 bp, Homo sapien
gatcagctttagcagcctcatcaaa

SEQ ID NO: 1188015 - DNA, 25 bp, Homo sapien
gatcagaggtaagtgaatatttcag

SEQ ID NO: 1188016 - DNA, 25 bp, Homo sapien
tgatttcatacgattttcacacgtt

SEQ ID NO: 1188017 - DNA, 25 bp, Homo sapien
tagagtaggctcgtcttagcccaaa

SEQ ID NO: 1188018 - DNA, 25 bp, Homo sapien
tagcttggcttaaatagatcagagg

SEQ ID NO: 1188019 - DNA, 25 bp, Homo sapien
ggcacctgcaaccaaactggctaat

SEQ ID NO: 1188020 - DNA, 25 bp, Homo sapien
attacaggcacctgcaaccaaactg

SEQ ID NO: 1188021 - DNA, 25 bp, Homo sapien
tcaacttcccgggttcgagattctc

SEQ ID NO: 1188022 - DNA, 25 bp, Homo sapien
ctcaacttcccgggttcgagattct

SEQ ID NO: 1188023 - DNA, 25 bp, Homo sapien
taattattaagagcacagccctaga

SEQ ID NO: 1188024 - DNA, 25 bp, Homo sapien
tcagatttaccacctgtaagacagg

SEQ ID NO: 1188025 - DNA, 25 bp, Homo sapien
taagggagtacaaagcacaaacgcc

SEQ ID NO: 1188026 - DNA, 25 bp, Homo sapien
gaaacctaggctaccatactgcaag

SEQ ID NO: 1188027 - DNA, 25 bp, Homo sapien
atcacattccactcataatctgaag

SEQ ID NO: 1188028 - DNA, 25 bp, Homo sapien
atttcataaacccagagttgtaatg

SEQ ID NO: 1188029 - DNA, 25 bp, Homo sapien
gaagacaaaggctcatgtatttcac

SEQ ID NO: 1188030 - DNA, 25 bp, Homo sapien
tgaagacaaaggctcatgtatttca

SEQ ID NO: 1188031 - DNA, 25 bp, Homo sapien
ttacaggcgttagtaccgcactcag

SEQ ID NO: 1188032 - DNA, 25 bp, Homo sapien
cttcttaaccacctatatccagtgt

SEQ ID NO: 1188033 - DNA, 25 bp, Homo sapien
tattcaaatcctaatgctatactgc

SEQ ID NO: 1188034 - DNA, 25 bp, Homo sapien
tattttcccatatgcactgtcatac

SEQ ID NO: 1188035 - DNA, 25 bp, Homo sapien
cacttaaggctagtgactgaattgt

SEQ ID NO: 1188036 - DNA, 25 bp, Homo sapien
ttatgatggtgatcactgagtttcc

SEQ ID NO: 1188037 - DNA, 25 bp, Homo sapien
ttttgaatgctaggtcacagatctt

SEQ ID NO: 1188038 - DNA, 25 bp, Homo sapien
ctactgttgagagcctttaatgaag

SEQ ID NO: 1188039 - DNA, 25 bp, Homo sapien
tgttctgcttagctccctcttgaac

SEQ ID NO: 1188040 - DNA, 25 bp, Homo sapien
ttgttctgcttagctccctcttgaa

SEQ ID NO: 1188041 - DNA, 25 bp, Homo sapien
ccttgggatatcttatttgggttga

SEQ ID NO: 1188042 - DNA, 25 bp, Homo sapien
ttgagagtttactatatcccttggg

SEQ ID NO: 1188043 - DNA, 25 bp, Homo sapien
ctttgagagtttactatatcccttg

SEQ ID NO: 1188044 - DNA, 25 bp, Homo sapien
gagagtttactatatcccttgggat

SEQ ID NO: 1188045 - DNA, 25 bp, Homo sapien
tccgagttgactaagacacctgctt

SEQ ID NO: 1188046 - DNA, 25 bp, Homo sapien
tccttcaaaggacgagatatgctct

SEQ ID NO: 1188047 - DNA, 25 bp, Homo sapien
cacggccttcagctaaagattatgc

SEQ ID NO: 1188048 - DNA, 25 bp, Homo sapien
taagtcttagttgggcacacggcct

SEQ ID NO: 1188049 - DNA, 25 bp, Homo sapien
ctgggatcacgggtaatcgccagca

SEQ ID NO: 1188050 - DNA, 25 bp, Homo sapien
gggatcacgggtaatcgccagcatg

SEQ ID NO: 1188051 - DNA, 25 bp, Homo sapien
ggatcacgggtaatcgccagcatgc

SEQ ID NO: 1188052 - DNA, 25 bp, Homo sapien
atcacgggtaatcgccagcatgcct

SEQ ID NO: 1188053 - DNA, 25 bp, Homo sapien
aattatggaggtgaatctttcctgc

SEQ ID NO: 1188054 - DNA, 25 bp, Homo sapien
gatgcggtaaagacaattcaactcg

SEQ ID NO: 1188055 - DNA, 25 bp, Homo sapien
gttgtaactcccacttgaattgtaa

SEQ ID NO: 1188056 - DNA, 25 bp, Homo sapien
gactaatacagtagttaggccacta

SEQ ID NO: 1188057 - DNA, 25 bp, Homo sapien
gttactgtgtgagtggtgccaccca

SEQ ID NO: 1188058 - DNA, 25 bp, Homo sapien
ccatttttaggcctccgggtgctgc

SEQ ID NO: 1188059 - DNA, 25 bp, Homo sapien
cataaactgcgcctgatgcgtgccc

SEQ ID NO: 1188060 - DNA, 25 bp, Homo sapien
tgaagctgggaatgactaaacaccc

SEQ ID NO: 1188061 - DNA, 25 bp, Homo sapien
cctggcccaagcatcgtaataaggg

SEQ ID NO: 1188062 - DNA, 25 bp, Homo sapien
taccaagaccttgacaaccagggag

SEQ ID NO: 1188063 - DNA, 25 bp, Homo sapien
gcatccatggaagggtgcaatctgg

SEQ ID NO: 1188064 - DNA, 25 bp, Homo sapien
tatgaagagtggcagcctgacacag

SEQ ID NO: 1188065 - DNA, 25 bp, Homo sapien
gcattaggctacctggcttgccaga

SEQ ID NO: 1188066 - DNA, 25 bp, Homo sapien
tacagtagttatctcctcattaggg

SEQ ID NO: 1188067 - DNA, 25 bp, Homo sapien
taggtgatagtcaacaggcccgaac

SEQ ID NO: 1188068 - DNA, 25 bp, Homo sapien
tgagcaattcatgtgccagaggaac

SEQ ID NO: 1188069 - DNA, 25 bp, Homo sapien
cagtctgggtttaatatccttgctt

SEQ ID NO: 1188070 - DNA, 25 bp, Homo sapien
cactgagtgctatatgctttacatg

SEQ ID NO: 1188071 - DNA, 25 bp, Homo sapien
cctcacatctctgaagtaggtgctg

SEQ ID NO: 1188072 - DNA, 25 bp, Homo sapien
ggaacagcaaacacatccagcactt

SEQ ID NO: 1188073 - DNA, 25 bp, Homo sapien
ctgtatttacaaagtaagttaagtg

SEQ ID NO: 1188074 - DNA, 25 bp, Homo sapien
tgtatttacaaagtaagttaagtgc

SEQ ID NO: 1188075 - DNA, 25 bp, Homo sapien
tatttacaaagtaagttaagtgctc

SEQ ID NO: 1188076 - DNA, 25 bp, Homo sapien
tttacaaagtaagttaagtgctctg

SEQ ID NO: 1188077 - DNA, 25 bp, Homo sapien
ctgaagtgcagtgccgctcactgta

SEQ ID NO: 1188078 - DNA, 25 bp, Homo sapien
ctcaagtgatagtcccacctcttag

SEQ ID NO: 1188079 - DNA, 25 bp, Homo sapien
tgatagtcccacctcttagcctgta

SEQ ID NO: 1188080 - DNA, 25 bp, Homo sapien
agtcccacctcttagcctgtagctg

SEQ ID NO: 1188081 - DNA, 25 bp, Homo sapien
agcaaaagaagtcactttgactcct

SEQ ID NO: 1188082 - DNA, 25 bp, Homo sapien
gcaaaagaagtcactttgactcctt

SEQ ID NO: 1188083 - DNA, 25 bp, Homo sapien
caaaagaagtcactttgactccttt

SEQ ID NO: 1188084 - DNA, 25 bp, Homo sapien
gagtgttaaacagtgaccttcaata

SEQ ID NO: 1188085 - DNA, 25 bp, Homo sapien
gagtgggtccttgtcagctgttatc

SEQ ID NO: 1188086 - DNA, 25 bp, Homo sapien
atgctggcctcagacggagatatgg

SEQ ID NO: 1188087 - DNA, 25 bp, Homo sapien
tctttctcaatattagccatgctgg

SEQ ID NO: 1188088 - DNA, 25 bp, Homo sapien
gttgctaggaaaccttccaagctta

SEQ ID NO: 1188089 - DNA, 25 bp, Homo sapien
ggcaataacactctcaataagctaa

SEQ ID NO: 1188090 - DNA, 25 bp, Homo sapien
gcaggttcccagaacaatatgttgc

SEQ ID NO: 1188091 - DNA, 25 bp, Homo sapien
gacaggagagctgatatgaaactct

SEQ ID NO: 1188092 - DNA, 25 bp, Homo sapien
actctctcgcattgtctgatattct

SEQ ID NO: 1188093 - DNA, 25 bp, Homo sapien
cttgtatctatccattgggtcttcc

SEQ ID NO: 1188094 - DNA, 25 bp, Homo sapien
tctctcgcattgtctgatattcttt

SEQ ID NO: 1188095 - DNA, 25 bp, Homo sapien
gactctctcgcattgtctgatattc

SEQ ID NO: 1188096 - DNA, 25 bp, Homo sapien
ggaattgaacttgccacaactgctg

SEQ ID NO: 1188097 - DNA, 25 bp, Homo sapien
gctatttgggagtctcctgaaatga

SEQ ID NO: 1188098 - DNA, 25 bp, Homo sapien
aagaaggtactttgataggtgcaac

SEQ ID NO: 1188099 - DNA, 25 bp, Homo sapien
gacagttagcatgatcagagagcat

SEQ ID NO: 1188100 - DNA, 25 bp, Homo sapien
catgcacagctaaaacagtactttg

SEQ ID NO: 1188101 - DNA, 25 bp, Homo sapien
cagtataaatgcaacagctggagtt

SEQ ID NO: 1188102 - DNA, 25 bp, Homo sapien
tctacagacagaggcaagtttgaaa

SEQ ID NO: 1188103 - DNA, 25 bp, Homo sapien
tctttgtggatatgacatgcacagc

SEQ ID NO: 1188104 - DNA, 25 bp, Homo sapien
caagaagtttaatcctactttgatc

SEQ ID NO: 1188105 - DNA, 25 bp, Homo sapien
gacacaataacaagttcaattccag

SEQ ID NO: 1188106 - DNA, 25 bp, Homo sapien
tacctgctttggcacaaaaaaggat

SEQ ID NO: 1188107 - DNA, 25 bp, Homo sapien
gaccttcattttggatgcttaataa

SEQ ID NO: 1188108 - DNA, 25 bp, Homo sapien
gaatgtactgacaagttatcacaat

SEQ ID NO: 1188109 - DNA, 25 bp, Homo sapien
gaaatagcaatagagggtatccgat

SEQ ID NO: 1188110 - DNA, 25 bp, Homo sapien
caagtgtattaccaggacaaatgcc

SEQ ID NO: 1188111 - DNA, 25 bp, Homo sapien
gactgccaccttgaagatgtaatta

SEQ ID NO: 1188112 - DNA, 25 bp, Homo sapien
gaagtatgactgttgagagctacct

SEQ ID NO: 1188113 - DNA, 25 bp, Homo sapien
taacctaaccatgaagatatctgca

SEQ ID NO: 1188114 - DNA, 25 bp, Homo sapien
gatagcccttttacatatgccacca

SEQ ID NO: 1188115 - DNA, 25 bp, Homo sapien
gagctacctcacattgctggatctg

SEQ ID NO: 1188116 - DNA, 25 bp, Homo sapien
gatgaaggctacagatctccaaaaa

SEQ ID NO: 1188117 - DNA, 25 bp, Homo sapien
tctccaaaaagtaccagcaactgat

SEQ ID NO: 1188118 - DNA, 25 bp, Homo sapien
gaaaagcatatcgttctccaaaggt

SEQ ID NO: 1188119 - DNA, 25 bp, Homo sapien
gatgccaagaccaggtagcacaggc

SEQ ID NO: 1188120 - DNA, 25 bp, Homo sapien
caactactgttttcaatcataggta

SEQ ID NO: 1188121 - DNA, 25 bp, Homo sapien
atgaaattgaacacctactaaaata

SEQ ID NO: 1188122 - DNA, 25 bp, Homo sapien
tcaaaagtcatagaccaactactgt

SEQ ID NO: 1188123 - DNA, 25 bp, Homo sapien
catataactctaagttctctctgtg

SEQ ID NO: 1188124 - DNA, 25 bp, Homo sapien
attagctgggtacagctgggcacag

SEQ ID NO: 1188125 - DNA, 25 bp, Homo sapien
catggtaagggcaaagtctgaggct

SEQ ID NO: 1188126 - DNA, 25 bp, Homo sapien
ccttgattataccagccaccagggc

SEQ ID NO: 1188127 - DNA, 25 bp, Homo sapien
agggaaggctgtcagagaagttaaa

SEQ ID NO: 1188128 - DNA, 25 bp, Homo sapien
ggcctcctgtaatcttcggttctcc

SEQ ID NO: 1188129 - DNA, 25 bp, Homo sapien
ttttgcttgttactagttcatgggc

SEQ ID NO: 1188130 - DNA, 25 bp, Homo sapien
tagttcatgggcaaggtcatcattc

SEQ ID NO: 1188131 - DNA, 25 bp, Homo sapien
tgatccaagtcattccgtagagcaa

SEQ ID NO: 1188132 - DNA, 25 bp, Homo sapien
aggatgacccaatgccagccagtag

SEQ ID NO: 1188133 - DNA, 25 bp, Homo sapien
cagccagtagcccttgaaatttaga

SEQ ID NO: 1188134 - DNA, 25 bp, Homo sapien
tatcacccagagatacctagcagta

SEQ ID NO: 1188135 - DNA, 25 bp, Homo sapien
tctaggtatactatggtccccttcc

SEQ ID NO: 1188136 - DNA, 25 bp, Homo sapien
ttctaatcactgagaaatctttatt

SEQ ID NO: 1188137 - DNA, 25 bp, Homo sapien
tgagaaatctttatttaaggaatcc

SEQ ID NO: 1188138 - DNA, 25 bp, Homo sapien
tatttaaggaatccgagagagggcg

SEQ ID NO: 1188139 - DNA, 25 bp, Homo sapien
gaatccgagagagggcgagttctca

SEQ ID NO: 1188140 - DNA, 25 bp, Homo sapien
ctgcaaatcatggtgcatcacagtc

SEQ ID NO: 1188141 - DNA, 25 bp, Homo sapien
caaatcatggtgcatcacagtcata

SEQ ID NO: 1188142 - DNA, 25 bp, Homo sapien
aaatcatggtgcatcacagtcatac

SEQ ID NO: 1188143 - DNA, 25 bp, Homo sapien
gcaaatcatggtgcatcacagtcat

SEQ ID NO: 1188144 - DNA, 25 bp, Homo sapien
agcctctgtttggtcaaaaggagct

SEQ ID NO: 1188145 - DNA, 25 bp, Homo sapien
ctgtttggtcaaaaggagctcttta

SEQ ID NO: 1188146 - DNA, 25 bp, Homo sapien
aaaggagctctttattcaacacatc

SEQ ID NO: 1188147 - DNA, 25 bp, Homo sapien
tattcaacacatctgccttgtcttc

SEQ ID NO: 1188148 - DNA, 25 bp, Homo sapien
ctgtttatactcagcaatgatagct

SEQ ID NO: 1188149 - DNA, 25 bp, Homo sapien
gtttatactcagcaatgatagctgt

SEQ ID NO: 1188150 - DNA, 25 bp, Homo sapien
tatactcagcaatgatagctgtagt

SEQ ID NO: 1188151 - DNA, 25 bp, Homo sapien
gcaatgatagctgtagtcttcttta

SEQ ID NO: 1188152 - DNA, 25 bp, Homo sapien
aatgattagctagaaagactgaggg

SEQ ID NO: 1188153 - DNA, 25 bp, Homo sapien
tcaaagtattaagcctcacagagag

SEQ ID NO: 1188154 - DNA, 25 bp, Homo sapien
tatcaatcgtccgtgaatatgcgga

SEQ ID NO: 1188155 - DNA, 25 bp, Homo sapien
tatgtgaagtagaagaccccaggga

SEQ ID NO: 1188156 - DNA, 25 bp, Homo sapien
catctgatcctagaaggaattttac

SEQ ID NO: 1188157 - DNA, 25 bp, Homo sapien
tcaattcatgtgttatgctagcaca

SEQ ID NO: 1188158 - DNA, 25 bp, Homo sapien
agcacatctgatcctagaaggaatt

SEQ ID NO: 1188159 - DNA, 25 bp, Homo sapien
tcttgcagcatgtacacataactac

SEQ ID NO: 1188160 - DNA, 25 bp, Homo sapien
gctgtttctccagcctggtactcaa

SEQ ID NO: 1188161 - DNA, 25 bp, Homo sapien
tgctgtttctccagcctggtactca

SEQ ID NO: 1188162 - DNA, 25 bp, Homo sapien
cctccttgctggctgcttgctgttt

SEQ ID NO: 1188163 - DNA, 25 bp, Homo sapien
ccttgctggctgcttgctgtttctc

SEQ ID NO: 1188164 - DNA, 25 bp, Homo sapien
aattttatcacagcacgatttcact

SEQ ID NO: 1188165 - DNA, 25 bp, Homo sapien
tatcacagcacgatttcactcctta

SEQ ID NO: 1188166 - DNA, 25 bp, Homo sapien
tccataattcctattaataaatcct

SEQ ID NO: 1188167 - DNA, 25 bp, Homo sapien
tcagaagagaggtatcctagtctcc

SEQ ID NO: 1188168 - DNA, 25 bp, Homo sapien
gatttatgggagcatcataaccttt

SEQ ID NO: 1188169 - DNA, 25 bp, Homo sapien
ttatgggagcatcataacctttcac

SEQ ID NO: 1188170 - DNA, 25 bp, Homo sapien
tttatgggagcatcataacctttca

SEQ ID NO: 1188171 - DNA, 25 bp, Homo sapien
atttatgggagcatcataacctttc

SEQ ID NO: 1188172 - DNA, 25 bp, Homo sapien
catcaaattttagcacatcagagag

SEQ ID NO: 1188173 - DNA, 25 bp, Homo sapien
tttgaggcaggtaatgttatctcca

SEQ ID NO: 1188174 - DNA, 25 bp, Homo sapien
cagtatgcctataatgtacaaagag

SEQ ID NO: 1188175 - DNA, 25 bp, Homo sapien
catcagagagggagaacaccaaacc

SEQ ID NO: 1188176 - DNA, 25 bp, Homo sapien
tgtcatagatgcaggcccatttctg

SEQ ID NO: 1188177 - DNA, 25 bp, Homo sapien
cctgaagtatctctagaaataccct

SEQ ID NO: 1188178 - DNA, 25 bp, Homo sapien
tcaaaatcattagcccgaacccaac

SEQ ID NO: 1188179 - DNA, 25 bp, Homo sapien
caactatccaagacgggtgctcctt

SEQ ID NO: 1188180 - DNA, 25 bp, Homo sapien
gcttcttaagtgagtccttctcatc

SEQ ID NO: 1188181 - DNA, 25 bp, Homo sapien
catcatctgtttcaattccctggtc

SEQ ID NO: 1188182 - DNA, 25 bp, Homo sapien
ttcttaagtgagtccttctcatcat

SEQ ID NO: 1188183 - DNA, 25 bp, Homo sapien
ctgcttcttaagtgagtccttctca

SEQ ID NO: 1188184 - DNA, 25 bp, Homo sapien
cttgttcttttatcaaatcaccaac

SEQ ID NO: 1188185 - DNA, 25 bp, Homo sapien
ttcttgttcttttatcaaatcacca

SEQ ID NO: 1188186 - DNA, 25 bp, Homo sapien
attgtttattctttcttcttgttct

SEQ ID NO: 1188187 - DNA, 25 bp, Homo sapien
tcttcttgttcttttatcaaatcac

SEQ ID NO: 1188188 - DNA, 25 bp, Homo sapien
aaccaagagtttttcgcagcttgga

SEQ ID NO: 1188189 - DNA, 25 bp, Homo sapien
cccgtggccgttttgatagagttca

SEQ ID NO: 1188190 - DNA, 25 bp, Homo sapien
ctgggtgaccggtgctggctgcaat

SEQ ID NO: 1188191 - DNA, 25 bp, Homo sapien
tagagttcagggttttgctaaacca

SEQ ID NO: 1188192 - DNA, 25 bp, Homo sapien
tactatgatggatctgaacatggcc

SEQ ID NO: 1188193 - DNA, 25 bp, Homo sapien
ttaggcgtctctggtaaaggctccc

SEQ ID NO: 1188194 - DNA, 25 bp, Homo sapien
actaagatgatgtgagcctgacctc

SEQ ID NO: 1188195 - DNA, 25 bp, Homo sapien
tctctttatgggtacgaaggacaca

SEQ ID NO: 1188196 - DNA, 25 bp, Homo sapien
taggagttacttcatgctgggatgc

SEQ ID NO: 1188197 - DNA, 25 bp, Homo sapien
tgctactgactcaaaggcattgcag

SEQ ID NO: 1188198 - DNA, 25 bp, Homo sapien
gaatgtaatgccgtaatcttggccc

SEQ ID NO: 1188199 - DNA, 25 bp, Homo sapien
tacctggtgatttttcgagacggaa

SEQ ID NO: 1188200 - DNA, 25 bp, Homo sapien
tccccacatccatacaaaggttgct

SEQ ID NO: 1188201 - DNA, 25 bp, Homo sapien
tcaggatgtgggaagctagcaaaca

SEQ ID NO: 1188202 - DNA, 25 bp, Homo sapien
gaagacactggttgaatggcattcc

SEQ ID NO: 1188203 - DNA, 25 bp, Homo sapien
gatgtaactctatctcctctgccca

SEQ ID NO: 1188204 - DNA, 25 bp, Homo sapien
tttgggacatcttggatctgggacc

SEQ ID NO: 1188205 - DNA, 25 bp, Homo sapien
tcagtgtgactatcagcatggcgac

SEQ ID NO: 1188206 - DNA, 25 bp, Homo sapien
caggcagcaaattcaggtggagata

SEQ ID NO: 1188207 - DNA, 25 bp, Homo sapien
tctcctattgaggtgcagccaaggt

SEQ ID NO: 1188208 - DNA, 25 bp, Homo sapien
gcttaatggggccaaaggggcaaca

SEQ ID NO: 1188209 - DNA, 25 bp, Homo sapien
gaaaacatcactggctcacaaaaac

SEQ ID NO: 1188210 - DNA, 25 bp, Homo sapien
taatggggccaaaggggcaacacaa

SEQ ID NO: 1188211 - DNA, 25 bp, Homo sapien
acaaatgtttattactgcttaatgg

SEQ ID NO: 1188212 - DNA, 25 bp, Homo sapien
ctgtagattacagttttagtgtatg

SEQ ID NO: 1188213 - DNA, 25 bp, Homo sapien
ctctgtagattacagttttagtgta

SEQ ID NO: 1188214 - DNA, 25 bp, Homo sapien
tctgtagattacagttttagtgtat

SEQ ID NO: 1188215 - DNA, 25 bp, Homo sapien
cagcctggttactttcaaacgagaa

SEQ ID NO: 1188216 - DNA, 25 bp, Homo sapien
ctcagcctccgcgagaagaaggcga

SEQ ID NO: 1188217 - DNA, 25 bp, Homo sapien
tatgttaagcgtggagggctcctaa

SEQ ID NO: 1188218 - DNA, 25 bp, Homo sapien
tgtgtaaggttagtctctcagcctc

SEQ ID NO: 1188219 - DNA, 25 bp, Homo sapien
agtcacctgctttcgtccgctctag

SEQ ID NO: 1188220 - DNA, 25 bp, Homo sapien
gaagttgactagagagtcacctgct

SEQ ID NO: 1188221 - DNA, 25 bp, Homo sapien
ttcgtccgctctaggacaccagaca

SEQ ID NO: 1188222 - DNA, 25 bp, Homo sapien
tccaagtcggaagttgactagagag

SEQ ID NO: 1188223 - DNA, 25 bp, Homo sapien
ccggcaatccgagaagagtaatgtc

SEQ ID NO: 1188224 - DNA, 25 bp, Homo sapien
gccgaatctcctagcaacgctcaag

SEQ ID NO: 1188225 - DNA, 25 bp, Homo sapien
gagtaatgtcttgctctccgccctg

SEQ ID NO: 1188226 - DNA, 25 bp, Homo sapien
caagtctcgcgagcgaaccggcaat

SEQ ID NO: 1188227 - DNA, 25 bp, Homo sapien
ccaccgcccaccgcgagcacgcaca

SEQ ID NO: 1188228 - DNA, 25 bp, Homo sapien
accgcccaccgcgagcacgcacagc

SEQ ID NO: 1188229 - DNA, 25 bp, Homo sapien
cgcccaccgcgagcacgcacagccc

SEQ ID NO: 1188230 - DNA, 25 bp, Homo sapien
ccgcccaccgcgagcacgcacagcc

SEQ ID NO: 1188231 - DNA, 25 bp, Homo sapien
gcctcccgcacgcgacggatctcga

SEQ ID NO: 1188232 - DNA, 25 bp, Homo sapien
ctcccgcacgcgacggatctcgaac

SEQ ID NO: 1188233 - DNA, 25 bp, Homo sapien
cctgcgcaagatcgcggcccgcctc

SEQ ID NO: 1188234 - DNA, 25 bp, Homo sapien
ccgcctcccgcacgcgacggatctc

SEQ ID NO: 1188235 - DNA, 25 bp, Homo sapien
gagtcgcggcgctgcagcctgcgcc

SEQ ID NO: 1188236 - DNA, 25 bp, Homo sapien
acccgcacgagtcgcggcgctgcag

SEQ ID NO: 1188237 - DNA, 25 bp, Homo sapien
gcgctgcagcctgcgcccacaccga

SEQ ID NO: 1188238 - DNA, 25 bp, Homo sapien
ctacccgcacgagtcgcggcgctgc

SEQ ID NO: 1188239 - DNA, 25 bp, Homo sapien
ccgcgccgagccctcaaaccgagcg

SEQ ID NO: 1188240 - DNA, 25 bp, Homo sapien
caggaaaccccgcgccgagccctca

SEQ ID NO: 1188241 - DNA, 25 bp, Homo sapien
ctgcagccgcgcagaaggaggaaca

SEQ ID NO: 1188242 - DNA, 25 bp, Homo sapien
cgagccctcaaaccgagcgcagacg

SEQ ID NO: 1188243 - DNA, 25 bp, Homo sapien
gggctgggtcaggccgaagtcccga

SEQ ID NO: 1188244 - DNA, 25 bp, Homo sapien
ggctgggtcaggccgaagtcccgag

SEQ ID NO: 1188245 - DNA, 25 bp, Homo sapien
tggggagccgacggcgcagcaaggg

SEQ ID NO: 1188246 - DNA, 25 bp, Homo sapien
ggggagccgacggcgcagcaagggg

SEQ ID NO: 1188247 - DNA, 25 bp, Homo sapien
gggagccgacggcgcagcaaggggc

SEQ ID NO: 1188248 - DNA, 25 bp, Homo sapien
ctggggagccgacggcgcagcaagg

SEQ ID NO: 1188249 - DNA, 25 bp, Homo sapien
cagcaggcgagtggggtgcgaggtc

SEQ ID NO: 1188250 - DNA, 25 bp, Homo sapien
tgcacggataatcgccgcacacccc

SEQ ID NO: 1188251 - DNA, 25 bp, Homo sapien
acccccgctcgagcccagcaggcga

SEQ ID NO: 1188252 - DNA, 25 bp, Homo sapien
cgcctgcacggataatcgccgcaca

SEQ ID NO: 1188253 - DNA, 25 bp, Homo sapien
gcctgaggaacacgcgcaaagggcc

SEQ ID NO: 1188254 - DNA, 25 bp, Homo sapien
aaagggcctgaggaacacgcgcaaa

SEQ ID NO: 1188255 - DNA, 25 bp, Homo sapien
gggcctgaggaacacgcgcaaaggg

SEQ ID NO: 1188256 - DNA, 25 bp, Homo sapien
aagggcctgaggaacacgcgcaaag

SEQ ID NO: 1188257 - DNA, 25 bp, Homo sapien
cctctaccaagaacgacactcatgt

SEQ ID NO: 1188258 - DNA, 25 bp, Homo sapien
catgtttgcacccagctttgcttga

SEQ ID NO: 1188259 - DNA, 25 bp, Homo sapien
gacactcatgtttgcacccagcttt

SEQ ID NO: 1188260 - DNA, 25 bp, Homo sapien
gaacgacactcatgtttgcacccag

SEQ ID NO: 1188261 - DNA, 25 bp, Homo sapien
ccagtaggatggtatcataaaccga

SEQ ID NO: 1188262 - DNA, 25 bp, Homo sapien
ggtaaacgcatatcaaattcccaag

SEQ ID NO: 1188263 - DNA, 25 bp, Homo sapien
ttttcactaggaggcattaacacca

SEQ ID NO: 1188264 - DNA, 25 bp, Homo sapien
tacttcgaattaggcaagggattcc

SEQ ID NO: 1188265 - DNA, 25 bp, Homo sapien
ttactgattttcaccgtatagcccg

SEQ ID NO: 1188266 - DNA, 25 bp, Homo sapien
ccgtatagcccgttgtaatgggagc

SEQ ID NO: 1188267 - DNA, 25 bp, Homo sapien
tatagcccgttgtaatgggagcaac

SEQ ID NO: 1188268 - DNA, 25 bp, Homo sapien
gattttcaccgtatagcccgttgta

SEQ ID NO: 1188269 - DNA, 25 bp, Homo sapien
gatgggtcttgctccaaaccaccaa

SEQ ID NO: 1188270 - DNA, 25 bp, Homo sapien
caatagtgatacacattaggtgctc

SEQ ID NO: 1188271 - DNA, 25 bp, Homo sapien
ccaaagctgtgtcttatactgaaca

SEQ ID NO: 1188272 - DNA, 25 bp, Homo sapien
gttgtgtatccgtaagtcaaagcac

SEQ ID NO: 1188273 - DNA, 25 bp, Homo sapien
ggctcataagtcaggaaagtaaaat

SEQ ID NO: 1188274 - DNA, 25 bp, Homo sapien
ggacgtaagtaagcctctgaaacta

SEQ ID NO: 1188275 - DNA, 25 bp, Homo sapien
aactatctttagaacagcaaatgca

SEQ ID NO: 1188276 - DNA, 25 bp, Homo sapien
caaaagatgggacgtaagtaagcct

SEQ ID NO: 1188277 - DNA, 25 bp, Homo sapien
tccagttaaggtaatgtagattttc

SEQ ID NO: 1188278 - DNA, 25 bp, Homo sapien
gaactccagttaaggtaatgtagat

SEQ ID NO: 1188279 - DNA, 25 bp, Homo sapien
cagttaaggtaatgtagattttcac

SEQ ID NO: 1188280 - DNA, 25 bp, Homo sapien
tgatgaactccagttaaggtaatgt

SEQ ID NO: 1188281 - DNA, 25 bp, Homo sapien
tctttcccattataatgagaactca

SEQ ID NO: 1188282 - DNA, 25 bp, Homo sapien
gactgttaattcactgtctttccca

SEQ ID NO: 1188283 - DNA, 25 bp, Homo sapien
gagtctcaagataaggcaatgttga

SEQ ID NO: 1188284 - DNA, 25 bp, Homo sapien
ggcaatgttgactgttaattcactg

SEQ ID NO: 1188285 - DNA, 25 bp, Homo sapien
tactccatagttcttgtgggaaaaa

SEQ ID NO: 1188286 - DNA, 25 bp, Homo sapien
gcaacacaatggtgaatacatcatc

SEQ ID NO: 1188287 - DNA, 25 bp, Homo sapien
aagctgctggctttatttcagggtg

SEQ ID NO: 1188288 - DNA, 25 bp, Homo sapien
cagggtgtgcatttggccagttaac

SEQ ID NO: 1188289 - DNA, 25 bp, Homo sapien
acaatcatggagtaactcttcccat

SEQ ID NO: 1188290 - DNA, 25 bp, Homo sapien
caatataagaactgtatcagtcttg

SEQ ID NO: 1188291 - DNA, 25 bp, Homo sapien
atataagaactgtatcagtcttgac

SEQ ID NO: 1188292 - DNA, 25 bp, Homo sapien
cacaatataagaactgtatcagtct

SEQ ID NO: 1188293 - DNA, 25 bp, Homo sapien
tacacaatataagaactgtatcagt

SEQ ID NO: 1188294 - DNA, 25 bp, Homo sapien
tttctttgcactccttttcaacctg

SEQ ID NO: 1188295 - DNA, 25 bp, Homo sapien
tctttgcactccttttcaacctggg

SEQ ID NO: 1188296 - DNA, 25 bp, Homo sapien
tgcactccttttcaacctgggtcag

SEQ ID NO: 1188297 - DNA, 25 bp, Homo sapien
cactccttttcaacctgggtcaggt

SEQ ID NO: 1188298 - DNA, 25 bp, Homo sapien
aatccatgatctcaaacaatacact

SEQ ID NO: 1188299 - DNA, 25 bp, Homo sapien
gcagaaatacattatccataaagac

SEQ ID NO: 1188300 - DNA, 25 bp, Homo sapien
ttcaggtagtttgacagttgaaagc

SEQ ID NO: 1188301 - DNA, 25 bp, Homo sapien
gacgtgccctcttcaggtagtttga

SEQ ID NO: 1188302 - DNA, 25 bp, Homo sapien
gaaacgaaagcaccggaagatacta

SEQ ID NO: 1188303 - DNA, 25 bp, Homo sapien
gcaccggaagatactatcattcagg

SEQ ID NO: 1188304 - DNA, 25 bp, Homo sapien
gatactatcattcaggttgttaaca

SEQ ID NO: 1188305 - DNA, 25 bp, Homo sapien
cgaaagcaccggaagatactatcat

SEQ ID NO: 1188306 - DNA, 25 bp, Homo sapien
ggttcgcttcatatcatcgtctcca

SEQ ID NO: 1188307 - DNA, 25 bp, Homo sapien
gaacattcatcaatccctcactagg

SEQ ID NO: 1188308 - DNA, 25 bp, Homo sapien
tcaaaattccgtgtctcctttggct

SEQ ID NO: 1188309 - DNA, 25 bp, Homo sapien
tgattccacccaggctttattaatg

SEQ ID NO: 1188310 - DNA, 25 bp, Homo sapien
aatattcccttactggaaacatcag

SEQ ID NO: 1188311 - DNA, 25 bp, Homo sapien
cctccagtaggaaatggagaattca

SEQ ID NO: 1188312 - DNA, 25 bp, Homo sapien
gtcaaatttatatatgcagctcacc

SEQ ID NO: 1188313 - DNA, 25 bp, Homo sapien
ggctatgtaaatagctatctgtcaa

SEQ ID NO: 1188314 - DNA, 25 bp, Homo sapien
gagaatgcaatataacccttccttg

SEQ ID NO: 1188315 - DNA, 25 bp, Homo sapien
agcgtttttattgggcaagacttgc

SEQ ID NO: 1188316 - DNA, 25 bp, Homo sapien
tacacacaatgtagcgtttttattg

SEQ ID NO: 1188317 - DNA, 25 bp, Homo sapien
gaatgcaatataacccttccttgaa

SEQ ID NO: 1188318 - DNA, 25 bp, Homo sapien
caggcaccgatttgcattttatgca

SEQ ID NO: 1188319 - DNA, 25 bp, Homo sapien
tctgatccacggcaaaactaactgg

SEQ ID NO: 1188320 - DNA, 25 bp, Homo sapien
gggtcagatgctctacagcaacctt

SEQ ID NO: 1188321 - DNA, 25 bp, Homo sapien
tgagcataggaatagacgggctttc

SEQ ID NO: 1188322 - DNA, 25 bp, Homo sapien
tgtgttggctaatacctccaggaaa

SEQ ID NO: 1188323 - DNA, 25 bp, Homo sapien
ttggctaatacctccaggaaaataa

SEQ ID NO: 1188324 - DNA, 25 bp, Homo sapien
ttacgggcgccagccttcatgcctg

SEQ ID NO: 1188325 - DNA, 25 bp, Homo sapien
aaataaagtaatggagatcacaggc

SEQ ID NO: 1188326 - DNA, 25 bp, Homo sapien
ttttacaattagatcgtcaggcggc

SEQ ID NO: 1188327 - DNA, 25 bp, Homo sapien
gctattctgttcatgtgtcaacccc

SEQ ID NO: 1188328 - DNA, 25 bp, Homo sapien
tctcttctgaacaaggtgagcatct

SEQ ID NO: 1188329 - DNA, 25 bp, Homo sapien
tgtcaaccccaattacagaggcata

SEQ ID NO: 1188330 - DNA, 25 bp, Homo sapien
taagtgagccactatgttggtgagc

SEQ ID NO: 1188331 - DNA, 25 bp, Homo sapien
caatggaattcaggctaggtgagag

SEQ ID NO: 1188332 - DNA, 25 bp, Homo sapien
taaagaattacattccccagttgca

SEQ ID NO: 1188333 - DNA, 25 bp, Homo sapien
caaatgtttaatacccctatgtggt

SEQ ID NO: 1188334 - DNA, 25 bp, Homo sapien
catgacccgcttatagaagatgacc

SEQ ID NO: 1188335 - DNA, 25 bp, Homo sapien
gagctagctcgcctatttcatgacc

SEQ ID NO: 1188336 - DNA, 25 bp, Homo sapien
gaagggtattacacgggctgcaaca

SEQ ID NO: 1188337 - DNA, 25 bp, Homo sapien
gtcctgtgcccgctgtagatgtata

SEQ ID NO: 1188338 - DNA, 25 bp, Homo sapien
agactgggtttcacccatattggtc

SEQ ID NO: 1188339 - DNA, 25 bp, Homo sapien
gagactgggtttcacccatattggt

SEQ ID NO: 1188340 - DNA, 25 bp, Homo sapien
ccatgatgaagcaccaggggagtgc

SEQ ID NO: 1188341 - DNA, 25 bp, Homo sapien
gaaggcccatgatgaagcaccaggg

SEQ ID NO: 1188342 - DNA, 25 bp, Homo sapien
catgatgaagcaccaggggagtgca

SEQ ID NO: 1188343 - DNA, 25 bp, Homo sapien
gtggaaggcccatgatgaagcacca

SEQ ID NO: 1188344 - DNA, 25 bp, Homo sapien
tgctaaggccatccacactctaagg

SEQ ID NO: 1188345 - DNA, 25 bp, Homo sapien
tactgccatctcgtgttcagcgtgg

SEQ ID NO: 1188346 - DNA, 25 bp, Homo sapien
tggtgcacagcacatagctccaggg

SEQ ID NO: 1188347 - DNA, 25 bp, Homo sapien
gacctgtggctgcttccggaagtgc

SEQ ID NO: 1188348 - DNA, 25 bp, Homo sapien
gctttcagcccgctgttgaagatgt

SEQ ID NO: 1188349 - DNA, 25 bp, Homo sapien
ttgaagatgttggtgaacatcacct

SEQ ID NO: 1188350 - DNA, 25 bp, Homo sapien
gaaacacagaggtcgggcttcacct

SEQ ID NO: 1188351 - DNA, 25 bp, Homo sapien
gaacatcaccttattgacatcatcc

SEQ ID NO: 1188352 - DNA, 25 bp, Homo sapien
cttgcttggagtcccgaggaaagcc

SEQ ID NO: 1188353 - DNA, 25 bp, Homo sapien
gagtcccgaggaaagcctcctggag

SEQ ID NO: 1188354 - DNA, 25 bp, Homo sapien
tgagggcaggaacaatactgtgtac

SEQ ID NO: 1188355 - DNA, 25 bp, Homo sapien
gacgggtataggttctttgagggca

SEQ ID NO: 1188356 - DNA, 25 bp, Homo sapien
ccaggaatggctggcctgagaactc

SEQ ID NO: 1188357 - DNA, 25 bp, Homo sapien
aactgagggatgaactagatccatc

SEQ ID NO: 1188358 - DNA, 25 bp, Homo sapien
atgaactagatccatctgctgcccc

SEQ ID NO: 1188359 - DNA, 25 bp, Homo sapien
cccaggaatggctggcctgagaact

SEQ ID NO: 1188360 - DNA, 25 bp, Homo sapien
tcaaatagtcccaaagttctgaaca

SEQ ID NO: 1188361 - DNA, 25 bp, Homo sapien
aatagtcccaaagttctgaacactg

SEQ ID NO: 1188362 - DNA, 25 bp, Homo sapien
caaatagtcccaaagttctgaacac

SEQ ID NO: 1188363 - DNA, 25 bp, Homo sapien
aaatagtcccaaagttctgaacact

SEQ ID NO: 1188364 - DNA, 25 bp, Homo sapien
cctactgagtggtagtggtactgtc

SEQ ID NO: 1188365 - DNA, 25 bp, Homo sapien
tactgagtggtagtggtactgtcct

SEQ ID NO: 1188366 - DNA, 25 bp, Homo sapien
ctttcctactgagtggtagtggtac

SEQ ID NO: 1188367 - DNA, 25 bp, Homo sapien
ttcctttcctactgagtggtagtgg

SEQ ID NO: 1188368 - DNA, 25 bp, Homo sapien
tgctctgtgggaagtagattctgga

SEQ ID NO: 1188369 - DNA, 25 bp, Homo sapien
tgaaggagaccatatgtttccagtt

SEQ ID NO: 1188370 - DNA, 25 bp, Homo sapien
gattctggagtgcagatccacaaca

SEQ ID NO: 1188371 - DNA, 25 bp, Homo sapien
aaatgaaggagaccatatgtttcca

SEQ ID NO: 1188372 - DNA, 25 bp, Homo sapien
aaatcaggaaagaatagtcgtgccc

SEQ ID NO: 1188373 - DNA, 25 bp, Homo sapien
aagaatagtcgtgcccctttctggc

SEQ ID NO: 1188374 - DNA, 25 bp, Homo sapien
gccaacagtacaagagctccaaaat

SEQ ID NO: 1188375 - DNA, 25 bp, Homo sapien
acacgccaacagtacaagagctcca

SEQ ID NO: 1188376 - DNA, 25 bp, Homo sapien
cttgctggtcgtccctggttctcgt

SEQ ID NO: 1188377 - DNA, 25 bp, Homo sapien
ctgccgcagaccttggtacttgctg

SEQ ID NO: 1188378 - DNA, 25 bp, Homo sapien
tcctgccgcagaccttggtacttgc

SEQ ID NO: 1188379 - DNA, 25 bp, Homo sapien
tggtcgtccctggttctcgtctctc

SEQ ID NO: 1188380 - DNA, 25 bp, Homo sapien
gaagccacgggatgatttgaaatca

SEQ ID NO: 1188381 - DNA, 25 bp, Homo sapien
tccctccttcgggagtcagctgcag

SEQ ID NO: 1188382 - DNA, 25 bp, Homo sapien
cagaagccacgggatgatttgaaat

SEQ ID NO: 1188383 - DNA, 25 bp, Homo sapien
tattttccctccttcgggagtcagc

SEQ ID NO: 1188384 - DNA, 25 bp, Homo sapien
aatcctgatggtcctcttggacccc

SEQ ID NO: 1188385 - DNA, 25 bp, Homo sapien
ctgaatcctgatggtcctcttggac

SEQ ID NO: 1188386 - DNA, 25 bp, Homo sapien
tcctgatggtcctcttggaccccag

SEQ ID NO: 1188387 - DNA, 25 bp, Homo sapien
ctgatggtcctcttggaccccaggg

SEQ ID NO: 1188388 - DNA, 25 bp, Homo sapien
gttgaggaaacagggggtgaagagc

SEQ ID NO: 1188389 - DNA, 25 bp, Homo sapien
agttgaggaaacagggggtgaagag

SEQ ID NO: 1188390 - DNA, 25 bp, Homo sapien
caggaagttgaggaaacagggggtg

SEQ ID NO: 1188391 - DNA, 25 bp, Homo sapien
ttgaggaaacagggggtgaagagcc

SEQ ID NO: 1188392 - DNA, 25 bp, Homo sapien
ctcctggagactcatccttggaaag

SEQ ID NO: 1188393 - DNA, 25 bp, Homo sapien
gacttgggcacatcgatcttgtagg

SEQ ID NO: 1188394 - DNA, 25 bp, Homo sapien
aggagccccatagggaagcggaaca

SEQ ID NO: 1188395 - DNA, 25 bp, Homo sapien
tcagcgtcaacctgaaccaaggcag

SEQ ID NO: 1188396 - DNA, 25 bp, Homo sapien
caactcgcagtccttctgtggcgtc

SEQ ID NO: 1188397 - DNA, 25 bp, Homo sapien
tgaagtcttcgtggcactggcacac

SEQ ID NO: 1188398 - DNA, 25 bp, Homo sapien
gtgaagccctcctcgcagtagcact

SEQ ID NO: 1188399 - DNA, 25 bp, Homo sapien
gccgtgtccgctgcagttctcaggg

SEQ ID NO: 1188400 - DNA, 25 bp, Homo sapien
agtcggcacccacgtagggctcatg

SEQ ID NO: 1188401 - DNA, 25 bp, Homo sapien
gctgtgggctgctagaaacttcatt

SEQ ID NO: 1188402 - DNA, 25 bp, Homo sapien
gaatcctccgtgttcttgagcagct

SEQ ID NO: 1188403 - DNA, 25 bp, Homo sapien
cattcttgacgttacgcagggtgac

SEQ ID NO: 1188404 - DNA, 25 bp, Homo sapien
cagggtgactatgtacttggttcca

SEQ ID NO: 1188405 - DNA, 25 bp, Homo sapien
gggagttctcagtctcatctgtcac

SEQ ID NO: 1188406 - DNA, 25 bp, Homo sapien
ttcccactccacgtcaagggagttc

SEQ ID NO: 1188407 - DNA, 25 bp, Homo sapien
cagtgatgtcatatcggctcttggg

SEQ ID NO: 1188408 - DNA, 25 bp, Homo sapien
catatcgcagcttgtagtagtccac

SEQ ID NO: 1188409 - DNA, 25 bp, Homo sapien
cttatactcagtccccgggtgcaga

SEQ ID NO: 1188410 - DNA, 25 bp, Homo sapien
cgtgatcttatactcagtccccggg

SEQ ID NO: 1188411 - DNA, 25 bp, Homo sapien
tgggcaccaccgtgatcttatactc

SEQ ID NO: 1188412 - DNA, 25 bp, Homo sapien
aggaggatcggcttgccctccagct

SEQ ID NO: 1188413 - DNA, 25 bp, Homo sapien
tctatgacagcctgcactgggtccc

SEQ ID NO: 1188414 - DNA, 25 bp, Homo sapien
cgatcagtgacaacattggttggac

SEQ ID NO: 1188415 - DNA, 25 bp, Homo sapien
tggtgtccccatcagcagaagtgta

SEQ ID NO: 1188416 - DNA, 25 bp, Homo sapien
tgtgtcttcagtcactcgatcagtg

SEQ ID NO: 1188417 - DNA, 25 bp, Homo sapien
ctggttgcccctttcagcccacacg

SEQ ID NO: 1188418 - DNA, 25 bp, Homo sapien
ttcagcccacacgtagaccttgtat

SEQ ID NO: 1188419 - DNA, 25 bp, Homo sapien
gcccacacgtagaccttgtatgcct

SEQ ID NO: 1188420 - DNA, 25 bp, Homo sapien
agctttcttgctcccctggttgccc

SEQ ID NO: 1188421 - DNA, 25 bp, Homo sapien
tatgtcccagtatagtcccaggacc

SEQ ID NO: 1188422 - DNA, 25 bp, Homo sapien
aatgactgggtgaagtatgagaacc

SEQ ID NO: 1188423 - DNA, 25 bp, Homo sapien
ccctgcaggcgcaaactgagcagaa

SEQ ID NO: 1188424 - DNA, 25 bp, Homo sapien
gatcaggctgctctaaattcagaga

SEQ ID NO: 1188425 - DNA, 25 bp, Homo sapien
agacatgcactgtgtactccacacc

SEQ ID NO: 1188426 - DNA, 25 bp, Homo sapien
cttctgggcccagacatgcactgtg

SEQ ID NO: 1188427 - DNA, 25 bp, Homo sapien
agatggtggcggtattctcagtcac

SEQ ID NO: 1188428 - DNA, 25 bp, Homo sapien
ggtattctcagtcacccggtcagtc

SEQ ID NO: 1188429 - DNA, 25 bp, Homo sapien
ctcatcctgagtctccgctgggagt

SEQ ID NO: 1188430 - DNA, 25 bp, Homo sapien
gagctcttttagaacaaggcaatgg

SEQ ID NO: 1188431 - DNA, 25 bp, Homo sapien
tccagagctcttttagaacaaggca

SEQ ID NO: 1188432 - DNA, 25 bp, Homo sapien
tctcatcctgagtctccgctgggag

SEQ ID NO: 1188433 - DNA, 25 bp, Homo sapien
tagcgcaccacgtacttgtcaatgg

SEQ ID NO: 1188434 - DNA, 25 bp, Homo sapien
ggtgtagcgcaccacgtacttgtca

SEQ ID NO: 1188435 - DNA, 25 bp, Homo sapien
agaggtgtagcgcaccacgtacttg

SEQ ID NO: 1188436 - DNA, 25 bp, Homo sapien
cagcagaggtgtagcgcaccacgta

SEQ ID NO: 1188437 - DNA, 25 bp, Homo sapien
cttctgggcccacacgtgcaccatg

SEQ ID NO: 1188438 - DNA, 25 bp, Homo sapien
cccttctgggcccacacgtgcacca

SEQ ID NO: 1188439 - DNA, 25 bp, Homo sapien
tgggcccacacgtgcaccatgtact

SEQ ID NO: 1188440 - DNA, 25 bp, Homo sapien
tctgggcccacacgtgcaccatgta

SEQ ID NO: 1188441 - DNA, 25 bp, Homo sapien
cttggcagaggtgtagcgcaccaca

SEQ ID NO: 1188442 - DNA, 25 bp, Homo sapien
cctggtctctccgtccttggcagag

SEQ ID NO: 1188443 - DNA, 25 bp, Homo sapien
acatacctgtcaatggtggcccgca

SEQ ID NO: 1188444 - DNA, 25 bp, Homo sapien
tccgtccttggcagaggtgtagcgc

SEQ ID NO: 1188445 - DNA, 25 bp, Homo sapien
tccctggtctctccgttggcagacg

SEQ ID NO: 1188446 - DNA, 25 bp, Homo sapien
atacctgtcaatggtggcctgcacc

SEQ ID NO: 1188447 - DNA, 25 bp, Homo sapien
ctctccgttggcagacgtgtagtgc

SEQ ID NO: 1188448 - DNA, 25 bp, Homo sapien
acatacctgtcaatggtggcctgca

SEQ ID NO: 1188449 - DNA, 25 bp, Homo sapien
ctacccgggtttgctcttctcttca

SEQ ID NO: 1188450 - DNA, 25 bp, Homo sapien
ttgctcttctcttcacttctattac

SEQ ID NO: 1188451 - DNA, 25 bp, Homo sapien
cccgggtttgctcttctcttcactt

SEQ ID NO: 1188452 - DNA, 25 bp, Homo sapien
tttgctcttctcttcacttctatta

SEQ ID NO: 1188453 - DNA, 25 bp, Homo sapien
ctccgtcacccagtcagtcactagg

SEQ ID NO: 1188454 - DNA, 25 bp, Homo sapien
cgtcagcagaggtgtagcgcaccat

SEQ ID NO: 1188455 - DNA, 25 bp, Homo sapien
gtcagcagaggtgtagcgcaccatg

SEQ ID NO: 1188456 - DNA, 25 bp, Homo sapien
ccgtcacccagtcagtcactaggtt

SEQ ID NO: 1188457 - DNA, 25 bp, Homo sapien
tatgccaccagactgcgttacagca

SEQ ID NO: 1188458 - DNA, 25 bp, Homo sapien
taagtcagaatgtagccgtggatct

SEQ ID NO: 1188459 - DNA, 25 bp, Homo sapien
ggcgtccaggtcaatatgccaccag

SEQ ID NO: 1188460 - DNA, 25 bp, Homo sapien
ttacagcagatggacgaaggtttct

SEQ ID NO: 1188461 - DNA, 25 bp, Homo sapien
acctctggtcttcccgtcccagctg

SEQ ID NO: 1188462 - DNA, 25 bp, Homo sapien
caacaagggagacagggtaggtggc

SEQ ID NO: 1188463 - DNA, 25 bp, Homo sapien
taggtggcgccttgctcaaggcctt

SEQ ID NO: 1188464 - DNA, 25 bp, Homo sapien
gctcaaggccttgcaacgcaaacct

SEQ ID NO: 1188465 - DNA, 25 bp, Homo sapien
tggtggatacatttctgctccggcg

SEQ ID NO: 1188466 - DNA, 25 bp, Homo sapien
ggctttccggtgctggttctcattg

SEQ ID NO: 1188467 - DNA, 25 bp, Homo sapien
cgttcagagtacaggattccatatt

SEQ ID NO: 1188468 - DNA, 25 bp, Homo sapien
actcctttgctaggctttccggtgc

SEQ ID NO: 1188469 - DNA, 25 bp, Homo sapien
tggttctcattgcacggtcgttcag

SEQ ID NO: 1188470 - DNA, 25 bp, Homo sapien
agatggtgtacagaccactggcggc

SEQ ID NO: 1188471 - DNA, 25 bp, Homo sapien
ctgctgaacctgactgcagtccgaa

SEQ ID NO: 1188472 - DNA, 25 bp, Homo sapien
atccagccacctccgtccgtttcca

SEQ ID NO: 1188473 - DNA, 25 bp, Homo sapien
acctgactgcagtccgaagggtgtg

SEQ ID NO: 1188474 - DNA, 25 bp, Homo sapien
tattcttcagattgagttcctgttg

SEQ ID NO: 1188475 - DNA, 25 bp, Homo sapien
cttctggcctattcttcagattgag

SEQ ID NO: 1188476 - DNA, 25 bp, Homo sapien
tcagggcacagttcttctggcctat

SEQ ID NO: 1188477 - DNA, 25 bp, Homo sapien
gcctattcttcagattgagttcctg

SEQ ID NO: 1188478 - DNA, 25 bp, Homo sapien
ctgcccagtgttccgcctctggaag

SEQ ID NO: 1188479 - DNA, 25 bp, Homo sapien
ctcctccatcgcttgaagaaatcca

SEQ ID NO: 1188480 - DNA, 25 bp, Homo sapien
tcctccatcgcttgaagaaatccag

SEQ ID NO: 1188481 - DNA, 25 bp, Homo sapien
gctgcccagtgttccgcctctggaa

SEQ ID NO: 1188482 - DNA, 25 bp, Homo sapien
cattggcagtctgtaaatccactct

SEQ ID NO: 1188483 - DNA, 25 bp, Homo sapien
agcttataccgctccttgctggagg

SEQ ID NO: 1188484 - DNA, 25 bp, Homo sapien
tctcacctcataccgcgctggagtg

SEQ ID NO: 1188485 - DNA, 25 bp, Homo sapien
tatagcataggcagattcattggca

SEQ ID NO: 1188486 - DNA, 25 bp, Homo sapien
gccaccatgatgtgtcagggcacag

SEQ ID NO: 1188487 - DNA, 25 bp, Homo sapien
ggcacagttgctgagtgcgatatca

SEQ ID NO: 1188488 - DNA, 25 bp, Homo sapien
ccattgtggtaagtaagagcatccc

SEQ ID NO: 1188489 - DNA, 25 bp, Homo sapien
catatctgccattagggttggccaa

SEQ ID NO: 1188490 - DNA, 25 bp, Homo sapien
ccatgagggcggattttcaactcca

SEQ ID NO: 1188491 - DNA, 25 bp, Homo sapien
tcaactccacgtaaggaatggagaa

SEQ ID NO: 1188492 - DNA, 25 bp, Homo sapien
tcagcgtccgcttctttctgcccag

SEQ ID NO: 1188493 - DNA, 25 bp, Homo sapien
gctccctgctgtagccatgagggcg

SEQ ID NO: 1188494 - DNA, 25 bp, Homo sapien
ttaaaaatagcagtaaggcggcagc

SEQ ID NO: 1188495 - DNA, 25 bp, Homo sapien
gaaggaacctccatggcttgaagct

SEQ ID NO: 1188496 - DNA, 25 bp, Homo sapien
gaagataagctgagaaaccttgccg

SEQ ID NO: 1188497 - DNA, 25 bp, Homo sapien
cataaagacgggcaaaaatgcaggt

SEQ ID NO: 1188498 - DNA, 25 bp, Homo sapien
cactttgcccccctcagacatgcca

SEQ ID NO: 1188499 - DNA, 25 bp, Homo sapien
tccttgctgccaagtctcctgtacc

SEQ ID NO: 1188500 - DNA, 25 bp, Homo sapien
catctaccatggagggctagtacac

SEQ ID NO: 1188501 - DNA, 25 bp, Homo sapien
catggactgctagtgcgcactccga

SEQ ID NO: 1188502 - DNA, 25 bp, Homo sapien
catcttctatggagggctagtgcac

SEQ ID NO: 1188503 - DNA, 25 bp, Homo sapien
tctatggaaggatagtgcgcattcc

SEQ ID NO: 1188504 - DNA, 25 bp, Homo sapien
ggttcaatatggtaccaatagccac

SEQ ID NO: 1188505 - DNA, 25 bp, Homo sapien
tgttcaatatggttcaatatggtac

SEQ ID NO: 1188506 - DNA, 25 bp, Homo sapien
agtgtgtgtacactgttcaatatgg

SEQ ID NO: 1188507 - DNA, 25 bp, Homo sapien
gccactagggcaaaaactgtgtgta

SEQ ID NO: 1188508 - DNA, 25 bp, Homo sapien
aatgtggctgtctcacccttgcttg

SEQ ID NO: 1188509 - DNA, 25 bp, Homo sapien
tatactgatgttccttggcaacact

SEQ ID NO: 1188510 - DNA, 25 bp, Homo sapien
gagtcataggtctgaggatgaggaa

SEQ ID NO: 1188511 - DNA, 25 bp, Homo sapien
tgccagctacaggaaaaatatactg

SEQ ID NO: 1188512 - DNA, 25 bp, Homo sapien
caggtgcatgaaaggagcctaaggc

SEQ ID NO: 1188513 - DNA, 25 bp, Homo sapien
taactagaggagtcccagtgcagga

SEQ ID NO: 1188514 - DNA, 25 bp, Homo sapien
cctgacaacctttcctggcgtaact

SEQ ID NO: 1188515 - DNA, 25 bp, Homo sapien
cagtgcaggataggccctaaacgtt

SEQ ID NO: 1188516 - DNA, 25 bp, Homo sapien
cctctcagtccccctagaatggatg

SEQ ID NO: 1188517 - DNA, 25 bp, Homo sapien
acctctcagtccccctagaatggat

SEQ ID NO: 1188518 - DNA, 25 bp, Homo sapien
ctctcagtccccctagaatggatgg

SEQ ID NO: 1188519 - DNA, 25 bp, Homo sapien
ctggctgtgcccttcacataacaga

SEQ ID NO: 1188520 - DNA, 25 bp, Homo sapien
gctgtgcccttcacataacagaatg

SEQ ID NO: 1188521 - DNA, 25 bp, Homo sapien
tggctgtgcccttcacataacagaa

SEQ ID NO: 1188522 - DNA, 25 bp, Homo sapien
gtgcccttcacataacagaatgact

SEQ ID NO: 1188523 - DNA, 25 bp, Homo sapien
agaaggcatctacaacaccatctgc

SEQ ID NO: 1188524 - DNA, 25 bp, Homo sapien
ttcagctctatctgggacaccatct

SEQ ID NO: 1188525 - DNA, 25 bp, Homo sapien
cttgaccaaacaccaagaaggcatc

SEQ ID NO: 1188526 - DNA, 25 bp, Homo sapien
tgggcctgccactcttggtgatcat

SEQ ID NO: 1188527 - DNA, 25 bp, Homo sapien
tcctaagcccaatataatgtgtgta

SEQ ID NO: 1188528 - DNA, 25 bp, Homo sapien
gttgcatccttttgagcccaggacc

SEQ ID NO: 1188529 - DNA, 25 bp, Homo sapien
caatacaagtttactgaaccctgga

SEQ ID NO: 1188530 - DNA, 25 bp, Homo sapien
tgcttgtaagccgagagggttctct

SEQ ID NO: 1188531 - DNA, 25 bp, Homo sapien
ctgtaggaacagcataacccctggc

SEQ ID NO: 1188532 - DNA, 25 bp, Homo sapien
ggaacagcataacccctggcacaaa

SEQ ID NO: 1188533 - DNA, 25 bp, Homo sapien
ctggcacaaaatagttggtgaacat

SEQ ID NO: 1188534 - DNA, 25 bp, Homo sapien
taggaacagcataacccctggcaca

SEQ ID NO: 1188535 - DNA, 25 bp, Homo sapien
gatctccatgagctcgccctccttc

SEQ ID NO: 1188536 - DNA, 25 bp, Homo sapien
ctgatctccatgagctcgccctcct

SEQ ID NO: 1188537 - DNA, 25 bp, Homo sapien
tgctggctgaacccagaggggcccc

SEQ ID NO: 1188538 - DNA, 25 bp, Homo sapien
ctggctgaacccagaggggcccctg

SEQ ID NO: 1188539 - DNA, 25 bp, Homo sapien
ctgtcaaaatactacgcatcttcaa

SEQ ID NO: 1188540 - DNA, 25 bp, Homo sapien
tactacgcatcttcaaggtcgtccc

SEQ ID NO: 1188541 - DNA, 25 bp, Homo sapien
gtcaaaatactacgcatcttcaagg

SEQ ID NO: 1188542 - DNA, 25 bp, Homo sapien
aaaatactacgcatcttcaaggtcg

SEQ ID NO: 1188543 - DNA, 25 bp, Homo sapien
tttcatttcaatgcggtggggaccc

SEQ ID NO: 1188544 - DNA, 25 bp, Homo sapien
ccatattagggagattatttctgaa

SEQ ID NO: 1188545 - DNA, 25 bp, Homo sapien
ccaaccatattagggagattatttc

SEQ ID NO: 1188546 - DNA, 25 bp, Homo sapien
acagaccaaccatattagggagatt

SEQ ID NO: 1188547 - DNA, 25 bp, Homo sapien
ccaagcgaccgctctccatctgatt

SEQ ID NO: 1188548 - DNA, 25 bp, Homo sapien
atgccagagtctagagcaacagcca

SEQ ID NO: 1188549 - DNA, 25 bp, Homo sapien
tttctggatgccagagtctagagca

SEQ ID NO: 1188550 - DNA, 25 bp, Homo sapien
tcagatgttccccaagcgaccgctc

SEQ ID NO: 1188551 - DNA, 25 bp, Homo sapien
cagtgataggcggttttcttgatca

SEQ ID NO: 1188552 - DNA, 25 bp, Homo sapien
cctccagtgagttttcgtggctgga

SEQ ID NO: 1188553 - DNA, 25 bp, Homo sapien
attgctctcagtgataggcggtttt

SEQ ID NO: 1188554 - DNA, 25 bp, Homo sapien
gtgagttttcgtggctggaagatct

SEQ ID NO: 1188555 - DNA, 25 bp, Homo sapien
taatacttgattgactgaaagattg

SEQ ID NO: 1188556 - DNA, 25 bp, Homo sapien
cccacagtgaaatggagctttttaa

SEQ ID NO: 1188557 - DNA, 25 bp, Homo sapien
atttgaacccacagtgaaatggagc

SEQ ID NO: 1188558 - DNA, 25 bp, Homo sapien
ttgactgaaagattgactcatttga

SEQ ID NO: 1188559 - DNA, 25 bp, Homo sapien
ctaagaaatgcgatcctggaggtca

SEQ ID NO: 1188560 - DNA, 25 bp, Homo sapien
taagaaatgcgatcctggaggtcag

SEQ ID NO: 1188561 - DNA, 25 bp, Homo sapien
ggcttcctggcccatggacatagca

SEQ ID NO: 1188562 - DNA, 25 bp, Homo sapien
cataagtatgagagcttggggtgcc

SEQ ID NO: 1188563 - DNA, 25 bp, Homo sapien
ggacatagcatagccctcacagaga

SEQ ID NO: 1188564 - DNA, 25 bp, Homo sapien
caggggcctacaagaagcttgcata

SEQ ID NO: 1188565 - DNA, 25 bp, Homo sapien
ctgagccataagctgctgctttgag

SEQ ID NO: 1188566 - DNA, 25 bp, Homo sapien
cagcataacagtggcctagataaaa

SEQ ID NO: 1188567 - DNA, 25 bp, Homo sapien
tagataaaagcttcccatctcatta

SEQ ID NO: 1188568 - DNA, 25 bp, Homo sapien
atctcattacatgggtgacccacat

SEQ ID NO: 1188569 - DNA, 25 bp, Homo sapien
tcattacatgggtgacccacatcat

SEQ ID NO: 1188570 - DNA, 25 bp, Homo sapien
tgaaaccacccagaaactaatgctg

SEQ ID NO: 1188571 - DNA, 25 bp, Homo sapien
aatgctggggtcaaagtgaccttcc

SEQ ID NO: 1188572 - DNA, 25 bp, Homo sapien
caaacgtccatccaaactttcttgg

SEQ ID NO: 1188573 - DNA, 25 bp, Homo sapien
gaccttccgagtgatttggaaccca

SEQ ID NO: 1188574 - DNA, 25 bp, Homo sapien
caaagccctggctgtagcctgcaag

SEQ ID NO: 1188575 - DNA, 25 bp, Homo sapien
ccctctgcatgtgattatcatgtac

SEQ ID NO: 1188576 - DNA, 25 bp, Homo sapien
tctgcagccccatgggccaaagtgc

SEQ ID NO: 1188577 - DNA, 25 bp, Homo sapien
tgcaagttccagacagccactcatg

SEQ ID NO: 1188578 - DNA, 25 bp, Homo sapien
gagactcgtcacagacacagtaagg

SEQ ID NO: 1188579 - DNA, 25 bp, Homo sapien
taaagacagtagcatgatagacttt

SEQ ID NO: 1188580 - DNA, 25 bp, Homo sapien
cacagtaagggagataaagacagta

SEQ ID NO: 1188581 - DNA, 25 bp, Homo sapien
gggctttcaggagactcgtcacaga

SEQ ID NO: 1188582 - DNA, 25 bp, Homo sapien
ctccgaacgctcaaggctttctcag

SEQ ID NO: 1188583 - DNA, 25 bp, Homo sapien
tgactttctccgaacgctcaaggct

SEQ ID NO: 1188584 - DNA, 25 bp, Homo sapien
tccagatgactttctccgaacgctc

SEQ ID NO: 1188585 - DNA, 25 bp, Homo sapien
catatcatatgttgacttccagatg

SEQ ID NO: 1188586 - DNA, 25 bp, Homo sapien
agccgggtttgcccggagttctgtg

SEQ ID NO: 1188587 - DNA, 25 bp, Homo sapien
gtttgcccggagttctgtgtcccat

SEQ ID NO: 1188588 - DNA, 25 bp, Homo sapien
ggtttgcccggagttctgtgtccca

SEQ ID NO: 1188589 - DNA, 25 bp, Homo sapien
ttgcccggagttctgtgtcccattc

SEQ ID NO: 1188590 - DNA, 25 bp, Homo sapien
attgaaggttagatatggctccttc

SEQ ID NO: 1188591 - DNA, 25 bp, Homo sapien
cattgaaggttagatatggctcctt

SEQ ID NO: 1188592 - DNA, 25 bp, Homo sapien
tcattgaaggttagatatggctcct

SEQ ID NO: 1188593 - DNA, 25 bp, Homo sapien
ttccttcttttgacaggggatctct

SEQ ID NO: 1188594 - DNA, 25 bp, Homo sapien
cttcttttgacaggggatctcttca

SEQ ID NO: 1188595 - DNA, 25 bp, Homo sapien
ttcttttgacaggggatctcttcat

SEQ ID NO: 1188596 - DNA, 25 bp, Homo sapien
ccttcttttgacaggggatctcttc

SEQ ID NO: 1188597 - DNA, 25 bp, Homo sapien
tcaggccagctggaagaatacacag

SEQ ID NO: 1188598 - DNA, 25 bp, Homo sapien
acaaacatctgtgagagcagcccca

SEQ ID NO: 1188599 - DNA, 25 bp, Homo sapien
tcaaggatgtttaggctctgagcat

SEQ ID NO: 1188600 - DNA, 25 bp, Homo sapien
cagagggagaagcatcctaaagcca

SEQ ID NO: 1188601 - DNA, 25 bp, Homo sapien
tggccaattggtgttgcagtttatt

SEQ ID NO: 1188602 - DNA, 25 bp, Homo sapien
ttggccaattggtgttgcagtttat

SEQ ID NO: 1188603 - DNA, 25 bp, Homo sapien
gttggccaattggtgttgcagttta

SEQ ID NO: 1188604 - DNA, 25 bp, Homo sapien
taagttcccctatgcagaacaagcc

SEQ ID NO: 1188605 - DNA, 25 bp, Homo sapien
caatccgactagaaaaggtgtcaac

SEQ ID NO: 1188606 - DNA, 25 bp, Homo sapien
gaattaagccatgacagttagccca

SEQ ID NO: 1188607 - DNA, 25 bp, Homo sapien
gcagtgggcactaacatatctacaa

SEQ ID NO: 1188608 - DNA, 25 bp, Homo sapien
caaggcatgatatttacacactgaa

SEQ ID NO: 1188609 - DNA, 25 bp, Homo sapien
aaggcatgatatttacacactgaaa

SEQ ID NO: 1188610 - DNA, 25 bp, Homo sapien
ggcatgatatttacacactgaaagc

SEQ ID NO: 1188611 - DNA, 25 bp, Homo sapien
aggcatgatatttacacactgaaag

SEQ ID NO: 1188612 - DNA, 25 bp, Homo sapien
ctctcactctggaggtgttgtgtgg

SEQ ID NO: 1188613 - DNA, 25 bp, Homo sapien
tgcttgcacccaggtggtacagaca

SEQ ID NO: 1188614 - DNA, 25 bp, Homo sapien
tggtacagacaacttggcagttcgt

SEQ ID NO: 1188615 - DNA, 25 bp, Homo sapien
cagttcgttgaatttgttgctctca

SEQ ID NO: 1188616 - DNA, 25 bp, Homo sapien
ctatcaagggtcagctgatagacac

SEQ ID NO: 1188617 - DNA, 25 bp, Homo sapien
aaataagagcatcaacctgctatca

SEQ ID NO: 1188618 - DNA, 25 bp, Homo sapien
gcatcaacctgctatcaagggtcag

SEQ ID NO: 1188619 - DNA, 25 bp, Homo sapien
caacctgctatcaagggtcagctga

SEQ ID NO: 1188620 - DNA, 25 bp, Homo sapien
tgaactctttaagggaagagccttg

SEQ ID NO: 1188621 - DNA, 25 bp, Homo sapien
tcccatcatctgtgaactctttaag

SEQ ID NO: 1188622 - DNA, 25 bp, Homo sapien
attgggaagcaattgggaaagcacc

SEQ ID NO: 1188623 - DNA, 25 bp, Homo sapien
gcaccggtgagaagagaattcccat

SEQ ID NO: 1188624 - DNA, 25 bp, Homo sapien
tcttctttcagatcgagagccagtg

SEQ ID NO: 1188625 - DNA, 25 bp, Homo sapien
ccaagacaaaaacaccctgaggagg

SEQ ID NO: 1188626 - DNA, 25 bp, Homo sapien
gtgaagcatccccaaacaggtctct

SEQ ID NO: 1188627 - DNA, 25 bp, Homo sapien
tggctgcaacccactaccagatttg

SEQ ID NO: 1188628 - DNA, 25 bp, Homo sapien
gaaacgctgataaagtcccttcctg

SEQ ID NO: 1188629 - DNA, 25 bp, Homo sapien
tcagtctctcaagaaacgctgataa

SEQ ID NO: 1188630 - DNA, 25 bp, Homo sapien
taaagtcccttcctgcaagggtgga

SEQ ID NO: 1188631 - DNA, 25 bp, Homo sapien
tcccttcctgcaagggtggacctta

SEQ ID NO: 1188632 - DNA, 25 bp, Homo sapien
tccttccagtctcgtctcctggctc

SEQ ID NO: 1188633 - DNA, 25 bp, Homo sapien
gggtactgccagagaacatttgaca

SEQ ID NO: 1188634 - DNA, 25 bp, Homo sapien
cagagaacatttgacaggcccggtg

SEQ ID NO: 1188635 - DNA, 25 bp, Homo sapien
gccatctgtgggtactgccagagaa

SEQ ID NO: 1188636 - DNA, 25 bp, Homo sapien
acaccatggtcccacagactcaagg

SEQ ID NO: 1188637 - DNA, 25 bp, Homo sapien
ctgcaaaaatgtcggccaactaagt

SEQ ID NO: 1188638 - DNA, 25 bp, Homo sapien
taagtgctcctttaccaactgcgga

SEQ ID NO: 1188639 - DNA, 25 bp, Homo sapien
cagtgacacctgtgcattagatgca

SEQ ID NO: 1188640 - DNA, 25 bp, Homo sapien
gagagggtctatcctctaaagaaag

SEQ ID NO: 1188641 - DNA, 25 bp, Homo sapien
gatgccaggagctgcatactcagct

SEQ ID NO: 1188642 - DNA, 25 bp, Homo sapien
agctgagttacaggctggcccctgg

SEQ ID NO: 1188643 - DNA, 25 bp, Homo sapien
tgcttcaaacttgccacggctgcag

SEQ ID NO: 1188644 - DNA, 25 bp, Homo sapien
ttcttccaaggaggtagggcatggg

SEQ ID NO: 1188645 - DNA, 25 bp, Homo sapien
ttccttgcatctcactgtccactct

SEQ ID NO: 1188646 - DNA, 25 bp, Homo sapien
cactgtccactcttaaatttttatt

SEQ ID NO: 1188647 - DNA, 25 bp, Homo sapien
gggacactttccgccttccttgcat

SEQ ID NO: 1188648 - DNA, 25 bp, Homo sapien
cacatgcccaggatatatggtattc

SEQ ID NO: 1188649 - DNA, 25 bp, Homo sapien
tatatggtattctactgcttgcttt

SEQ ID NO: 1188650 - DNA, 25 bp, Homo sapien
tattctactgcttgctttcttatca

SEQ ID NO: 1188651 - DNA, 25 bp, Homo sapien
ccacatgcccaggatatatggtatt

SEQ ID NO: 1188652 - DNA, 25 bp, Homo sapien
aaccatggttgccaataacctcaat

SEQ ID NO: 1188653 - DNA, 25 bp, Homo sapien
tggttgccaataacctcaatgccaa

SEQ ID NO: 1188654 - DNA, 25 bp, Homo sapien
catggttgccaataacctcaatgcc

SEQ ID NO: 1188655 - DNA, 25 bp, Homo sapien
agaaccatggttgccaataacctca

SEQ ID NO: 1188656 - DNA, 25 bp, Homo sapien
ggtaggactcctaatgccccgcttc

SEQ ID NO: 1188657 - DNA, 25 bp, Homo sapien
aggactcctaatgccccgcttcctt

SEQ ID NO: 1188658 - DNA, 25 bp, Homo sapien
agtggtaggactcctaatgccccgc

SEQ ID NO: 1188659 - DNA, 25 bp, Homo sapien
tggtaggactcctaatgccccgctt

SEQ ID NO: 1188660 - DNA, 25 bp, Homo sapien
cgaggtacaggccaacagctgtcat

SEQ ID NO: 1188661 - DNA, 25 bp, Homo sapien
tcatcttagctacgacatgacatcg

SEQ ID NO: 1188662 - DNA, 25 bp, Homo sapien
tagctacgacatgacatcggctggg

SEQ ID NO: 1188663 - DNA, 25 bp, Homo sapien
acatgacatcggctgggttgtttca

SEQ ID NO: 1188664 - DNA, 25 bp, Homo sapien
tgatcttaagcccaagagagctaga

SEQ ID NO: 1188665 - DNA, 25 bp, Homo sapien
gaagccgtgacctttcaatttctcc

SEQ ID NO: 1188666 - DNA, 25 bp, Homo sapien
gagctagatgctctagaagccgtga

SEQ ID NO: 1188667 - DNA, 25 bp, Homo sapien
taggtgataactgtgggcctacttc

SEQ ID NO: 1188668 - DNA, 25 bp, Homo sapien
caagaggaggtattagaacccctga

SEQ ID NO: 1188669 - DNA, 25 bp, Homo sapien
tctagtaccatggtttggcagagga

SEQ ID NO: 1188670 - DNA, 25 bp, Homo sapien
ggactgtcctctttgcaggaagaaa

SEQ ID NO: 1188671 - DNA, 25 bp, Homo sapien
tgttggaaacccatcagcagacctg

SEQ ID NO: 1188672 - DNA, 25 bp, Homo sapien
acccatgaatcgatacatccataag

SEQ ID NO: 1188673 - DNA, 25 bp, Homo sapien
gggagacaagtgtaatacccatgaa

SEQ ID NO: 1188674 - DNA, 25 bp, Homo sapien
agctgagctgctgtataccattttc

SEQ ID NO: 1188675 - DNA, 25 bp, Homo sapien
agcagacaggactcacgtttcccaa

SEQ ID NO: 1188676 - DNA, 25 bp, Homo sapien
gaaatgaggacagccactccgctta

SEQ ID NO: 1188677 - DNA, 25 bp, Homo sapien
tccttggagaatgttattacctgac

SEQ ID NO: 1188678 - DNA, 25 bp, Homo sapien
cagccactccgcttagttccttgga

SEQ ID NO: 1188679 - DNA, 25 bp, Homo sapien
cagaagcaaggcaaccagccagcca

SEQ ID NO: 1188680 - DNA, 25 bp, Homo sapien
cagcaaagtctgcttgatgaagccc

SEQ ID NO: 1188681 - DNA, 25 bp, Homo sapien
cagccagcaaagtctgcttgatgaa

SEQ ID NO: 1188682 - DNA, 25 bp, Homo sapien
tgatgaagccctctcctacactcag

SEQ ID NO: 1188683 - DNA, 25 bp, Homo sapien
tctcctacactcagagtcaaaggca

SEQ ID NO: 1188684 - DNA, 25 bp, Homo sapien
atgtggacgaatcttgaaaatgcaa

SEQ ID NO: 1188685 - DNA, 25 bp, Homo sapien
ttgaaaatgcaatctggccgcatcc

SEQ ID NO: 1188686 - DNA, 25 bp, Homo sapien
ctggccgcatccagagctttgcatg

SEQ ID NO: 1188687 - DNA, 25 bp, Homo sapien
ggccgcatccagagctttgcatgct

SEQ ID NO: 1188688 - DNA, 25 bp, Homo sapien
ggacagtcgacaccccatatgctaa

SEQ ID NO: 1188689 - DNA, 25 bp, Homo sapien
aggtgatccattatcaggcccaggg

SEQ ID NO: 1188690 - DNA, 25 bp, Homo sapien
caatatcagttggaggactcatctc

SEQ ID NO: 1188691 - DNA, 25 bp, Homo sapien
taacataaaaggtggagcttctctg

SEQ ID NO: 1188692 - DNA, 25 bp, Homo sapien
ctagcttcaggttgggaagacttcc

SEQ ID NO: 1188693 - DNA, 25 bp, Homo sapien
gacttccaaatgcaaaatatgtcat

SEQ ID NO: 1188694 - DNA, 25 bp, Homo sapien
tgggaagacttccaaatgcaaaata

SEQ ID NO: 1188695 - DNA, 25 bp, Homo sapien
cactgcagctagcttcaggttggga

SEQ ID NO: 1188696 - DNA, 25 bp, Homo sapien
ggtcttagatttctcggtcacgaaa

SEQ ID NO: 1188697 - DNA, 25 bp, Homo sapien
tagatttctcggtcacgaaatcaag

SEQ ID NO: 1188698 - DNA, 25 bp, Homo sapien
atttctcggtcacgaaatcaagagg

SEQ ID NO: 1188699 - DNA, 25 bp, Homo sapien
aggggtcttagatttctcggtcacg

SEQ ID NO: 1188700 - DNA, 25 bp, Homo sapien
tgtcatgcacctgttcatgtgcacc

SEQ ID NO: 1188701 - DNA, 25 bp, Homo sapien
tgtccccagattccgttcagctgat

SEQ ID NO: 1188702 - DNA, 25 bp, Homo sapien
tttaaggcctccattgagtctcgca

SEQ ID NO: 1188703 - DNA, 25 bp, Homo sapien
caaatccttagaccatttaaggcct

SEQ ID NO: 1188704 - DNA, 25 bp, Homo sapien
tctggttctgatgcagcagttccct

SEQ ID NO: 1188705 - DNA, 25 bp, Homo sapien
gaaaccctcctctcggaatcagaaa

SEQ ID NO: 1188706 - DNA, 25 bp, Homo sapien
gcagttccctgagtacaagcatcag

SEQ ID NO: 1188707 - DNA, 25 bp, Homo sapien
tgctgcactcaaaccaagaacttcg

SEQ ID NO: 1188708 - DNA, 25 bp, Homo sapien
cccatgggatccccatgcttcttct

SEQ ID NO: 1188709 - DNA, 25 bp, Homo sapien
acctgttggtaaagtctcagtattt

SEQ ID NO: 1188710 - DNA, 25 bp, Homo sapien
catcccatgggatccccatgcttct

SEQ ID NO: 1188711 - DNA, 25 bp, Homo sapien
gacctgttggtaaagtctcagtatt

SEQ ID NO: 1188712 - DNA, 25 bp, Homo sapien
aagatcagctgacagttgcaaggga

SEQ ID NO: 1188713 - DNA, 25 bp, Homo sapien
caagggactagggcttgaggtgagg

SEQ ID NO: 1188714 - DNA, 25 bp, Homo sapien
taagatcagctgacagttgcaaggg

SEQ ID NO: 1188715 - DNA, 25 bp, Homo sapien
agggactagggcttgaggtgagggg

SEQ ID NO: 1188716 - DNA, 25 bp, Homo sapien
gatagacgggctccataaagggctg

SEQ ID NO: 1188717 - DNA, 25 bp, Homo sapien
cagtgacaaaatcccctattggaga

SEQ ID NO: 1188718 - DNA, 25 bp, Homo sapien
tgggacggcgtatccaaaagtgtct

SEQ ID NO: 1188719 - DNA, 25 bp, Homo sapien
tactttcagcaggttccacatgtct

SEQ ID NO: 1188720 - DNA, 25 bp, Homo sapien
ctcagccacgtcaggctttgtattc

SEQ ID NO: 1188721 - DNA, 25 bp, Homo sapien
taatacccaaagcacatgtccactc

SEQ ID NO: 1188722 - DNA, 25 bp, Homo sapien
catggcacagcacacttgacataat

SEQ ID NO: 1188723 - DNA, 25 bp, Homo sapien
gcacacttgacataatacccaaagc

SEQ ID NO: 1188724 - DNA, 25 bp, Homo sapien
gcgttggttgcccctgagtgggagc

SEQ ID NO: 1188725 - DNA, 25 bp, Homo sapien
gctgcgttggttgcccctgagtggg

SEQ ID NO: 1188726 - DNA, 25 bp, Homo sapien
ctgctgcgttggttgcccctgagtg

SEQ ID NO: 1188727 - DNA, 25 bp, Homo sapien
ggctgctgcgttggttgcccctgag

SEQ ID NO: 1188728 - DNA, 25 bp, Homo sapien
tgttagcagtctgccttgcttttca

SEQ ID NO: 1188729 - DNA, 25 bp, Homo sapien
ttcataatgccaatctgggcaccag

SEQ ID NO: 1188730 - DNA, 25 bp, Homo sapien
ataatgccaatctgggcaccagtca

SEQ ID NO: 1188731 - DNA, 25 bp, Homo sapien
cagcaaatgttagcagtctgccttg

SEQ ID NO: 1188732 - DNA, 25 bp, Homo sapien
tgagtccggtgttcatccccttgaa

SEQ ID NO: 1188733 - DNA, 25 bp, Homo sapien
gcccagtgggtctcttggacttgct

SEQ ID NO: 1188734 - DNA, 25 bp, Homo sapien
cctcctgtggccttgcgtgcatgtc

SEQ ID NO: 1188735 - DNA, 25 bp, Homo sapien
tactaatatttcagcatgagtccgg

SEQ ID NO: 1188736 - DNA, 25 bp, Homo sapien
ctttgtaagccaaaacacattgtaa

SEQ ID NO: 1188737 - DNA, 25 bp, Homo sapien
ttatgaggatactttgtaagccaaa

SEQ ID NO: 1188738 - DNA, 25 bp, Homo sapien
gaggatactttgtaagccaaaacac

SEQ ID NO: 1188739 - DNA, 25 bp, Homo sapien
gatactttgtaagccaaaacacatt

SEQ ID NO: 1188740 - DNA, 25 bp, Homo sapien
agcatgtcagctacactttctagcc

SEQ ID NO: 1188741 - DNA, 25 bp, Homo sapien
aaaactcgtggccatctctcgatgc

SEQ ID NO: 1188742 - DNA, 25 bp, Homo sapien
gactcacacctccaaaaactcgtgg

SEQ ID NO: 1188743 - DNA, 25 bp, Homo sapien
tcagtatgttcagtgcagctatcac

SEQ ID NO: 1188744 - DNA, 25 bp, Homo sapien
tgtcccagctttcccgaaatcaaga

SEQ ID NO: 1188745 - DNA, 25 bp, Homo sapien
tttcccgaaatcaagacaccctgtc

SEQ ID NO: 1188746 - DNA, 25 bp, Homo sapien
aggtgtcccagctttcccgaaatca

SEQ ID NO: 1188747 - DNA, 25 bp, Homo sapien
gctactctgcaaatctcctccttca

SEQ ID NO: 1188748 - DNA, 25 bp, Homo sapien
caatagtggtgcagaacatggccac

SEQ ID NO: 1188749 - DNA, 25 bp, Homo sapien
caaatttcagccaatagtggtgcag

SEQ ID NO: 1188750 - DNA, 25 bp, Homo sapien
cagccaatagtggtgcagaacatgg

SEQ ID NO: 1188751 - DNA, 25 bp, Homo sapien
caaccctgtgccaaatttcagccaa

SEQ ID NO: 1188752 - DNA, 25 bp, Homo sapien
acatttggtggcattaacctcttca

SEQ ID NO: 1188753 - DNA, 25 bp, Homo sapien
ctgactctctgctacatttggtggc

SEQ ID NO: 1188754 - DNA, 25 bp, Homo sapien
cagtggtcatcgagttcccacctca

SEQ ID NO: 1188755 - DNA, 25 bp, Homo sapien
gcattaacctcttcattggccagtg

SEQ ID NO: 1188756 - DNA, 25 bp, Homo sapien
gatgtgatgatattgacaggaacag

SEQ ID NO: 1188757 - DNA, 25 bp, Homo sapien
ctaaacaacatctctcccctggtgt

SEQ ID NO: 1188758 - DNA, 25 bp, Homo sapien
tcatcaagggggcaatactggtttt

SEQ ID NO: 1188759 - DNA, 25 bp, Homo sapien
cagcctgaagcatgtcctaaacaac

SEQ ID NO: 1188760 - DNA, 25 bp, Homo sapien
gcttttttagggcatgctgcgttcc

SEQ ID NO: 1188761 - DNA, 25 bp, Homo sapien
tctgtccagcccctttgaacaggga

SEQ ID NO: 1188762 - DNA, 25 bp, Homo sapien
ggaaagccagccaaaggtctaagcg

SEQ ID NO: 1188763 - DNA, 25 bp, Homo sapien
gctaacagcacaactgctaaaaggg

SEQ ID NO: 1188764 - DNA, 25 bp, Homo sapien
cacactgagtagacctggagacagc

SEQ ID NO: 1188765 - DNA, 25 bp, Homo sapien
atgagcacccgactcacagcggagg

SEQ ID NO: 1188766 - DNA, 25 bp, Homo sapien
gggagaaatgagcacccgactcaca

SEQ ID NO: 1188767 - DNA, 25 bp, Homo sapien
tgagggtgaaggacggagtttagag

SEQ ID NO: 1188768 - DNA, 25 bp, Homo sapien
aggcttcctgtcgtactgtggcgca

SEQ ID NO: 1188769 - DNA, 25 bp, Homo sapien
tgagaacgcatgcttagcgcgcggt

SEQ ID NO: 1188770 - DNA, 25 bp, Homo sapien
tgggtagggatctctcagctgcctt

SEQ ID NO: 1188771 - DNA, 25 bp, Homo sapien
gaagcccgagataagcccagtggga

SEQ ID NO: 1188772 - DNA, 25 bp, Homo sapien
cacggatggtaacttgtggtgtctt

SEQ ID NO: 1188773 - DNA, 25 bp, Homo sapien
gagtgagggtcaaaagtaacagata

SEQ ID NO: 1188774 - DNA, 25 bp, Homo sapien
aacttttgtgcacacggatggtaac

SEQ ID NO: 1188775 - DNA, 25 bp, Homo sapien
aaaggtcttcacagttcttaggatc

SEQ ID NO: 1188776 - DNA, 25 bp, Homo sapien
atggtgctgactctcaccaggaaag

SEQ ID NO: 1188777 - DNA, 25 bp, Homo sapien
tgggggacacgggatagaggttgta

SEQ ID NO: 1188778 - DNA, 25 bp, Homo sapien
ggacattatttgactatggttatta

SEQ ID NO: 1188779 - DNA, 25 bp, Homo sapien
tgtagttatagggacattatttgac

SEQ ID NO: 1188780 - DNA, 25 bp, Homo sapien
tttttcaacagcttgtagttatagg

SEQ ID NO: 1188781 - DNA, 25 bp, Homo sapien
caacagcttgtagttatagggacat

SEQ ID NO: 1188782 - DNA, 25 bp, Homo sapien
tctggaagaagagtccgtgatcacc

SEQ ID NO: 1188783 - DNA, 25 bp, Homo sapien
ctttctggaagaagagtccgtgatc

SEQ ID NO: 1188784 - DNA, 25 bp, Homo sapien
tggaagaagagtccgtgatcacctc

SEQ ID NO: 1188785 - DNA, 25 bp, Homo sapien
ttctggaagaagagtccgtgatcac

SEQ ID NO: 1188786 - DNA, 25 bp, Homo sapien
tagggaatgggtatgcactaggatc

SEQ ID NO: 1188787 - DNA, 25 bp, Homo sapien
gtgcttgtctagcacactgggctct

SEQ ID NO: 1188788 - DNA, 25 bp, Homo sapien
tgctggtgtttccgtgctgagcagc

SEQ ID NO: 1188789 - DNA, 25 bp, Homo sapien
aatgggtatgcactaggatctccag

SEQ ID NO: 1188790 - DNA, 25 bp, Homo sapien
cgctaagcctggagctataaagagc

SEQ ID NO: 1188791 - DNA, 25 bp, Homo sapien
aagagcttgctcaatttcactctcc

SEQ ID NO: 1188792 - DNA, 25 bp, Homo sapien
tcctccttcgctaagcctggagcta

SEQ ID NO: 1188793 - DNA, 25 bp, Homo sapien
gcctggagctataaagagcttgctc

SEQ ID NO: 1188794 - DNA, 25 bp, Homo sapien
tggcccagcaggtgtctttcttcta

SEQ ID NO: 1188795 - DNA, 25 bp, Homo sapien
gcccagcaggtgtctttcttctaaa

SEQ ID NO: 1188796 - DNA, 25 bp, Homo sapien
ggcccagcaggtgtctttcttctaa

SEQ ID NO: 1188797 - DNA, 25 bp, Homo sapien
ctggcccagcaggtgtctttcttct

SEQ ID NO: 1188798 - DNA, 25 bp, Homo sapien
tggtgatcacttaacgatcgtgcac

SEQ ID NO: 1188799 - DNA, 25 bp, Homo sapien
ctgtcaagctttggccacccgaact

SEQ ID NO: 1188800 - DNA, 25 bp, Homo sapien
aagctttggccacccgaacttcctg

SEQ ID NO: 1188801 - DNA, 25 bp, Homo sapien
caaagcctcctggtaatgaaacatt

SEQ ID NO: 1188802 - DNA, 25 bp, Homo sapien
tgtgaccttggagagtttcacccaa

SEQ ID NO: 1188803 - DNA, 25 bp, Homo sapien
tgaccttggagagtttcacccaaaa

SEQ ID NO: 1188804 - DNA, 25 bp, Homo sapien
aagaattatcccactcaaaatggca

SEQ ID NO: 1188805 - DNA, 25 bp, Homo sapien
gaattatcccactcaaaatggcaat

SEQ ID NO: 1188806 - DNA, 25 bp, Homo sapien
catattttgcccttgctcaggtttc

SEQ ID NO: 1188807 - DNA, 25 bp, Homo sapien
caaaaccatgtggacatgtctccag

SEQ ID NO: 1188808 - DNA, 25 bp, Homo sapien
tttctgaaacttgacacttccgtct

SEQ ID NO: 1188809 - DNA, 25 bp, Homo sapien
tctccaggtgtacatgactgtgtct

SEQ ID NO: 1188810 - DNA, 25 bp, Homo sapien
tagctcttgctgataataagtgatc

SEQ ID NO: 1188811 - DNA, 25 bp, Homo sapien
gctgcaacctagatgttgaccagga

SEQ ID NO: 1188812 - DNA, 25 bp, Homo sapien
ctgtgcatggctttgttgggtcctc

SEQ ID NO: 1188813 - DNA, 25 bp, Homo sapien
gcttgttgggctgaaggcctcagat

SEQ ID NO: 1188814 - DNA, 25 bp, Homo sapien
caattcctgattattgggcagtggg

SEQ ID NO: 1188815 - DNA, 25 bp, Homo sapien
cagatgtatttcaggcccgtgccaa

SEQ ID NO: 1188816 - DNA, 25 bp, Homo sapien
cgatctcttcgtggaacttggccaa

SEQ ID NO: 1188817 - DNA, 25 bp, Homo sapien
tctatagagatttgtaaggctgccc

SEQ ID NO: 1188818 - DNA, 25 bp, Homo sapien
tagcacttaggaatcactggccatg

SEQ ID NO: 1188819 - DNA, 25 bp, Homo sapien
cacaggctgttctcttgcaaggcgg

SEQ ID NO: 1188820 - DNA, 25 bp, Homo sapien
cgtgttgtcagcacttttctctgcc

SEQ ID NO: 1188821 - DNA, 25 bp, Homo sapien
tgccagagactctcaaacaccgtgt

SEQ ID NO: 1188822 - DNA, 25 bp, Homo sapien
tcagggcccatgtgcaccgcacagg

SEQ ID NO: 1188823 - DNA, 25 bp, Homo sapien
gaaaagcagtccttgaatgggcacc

SEQ ID NO: 1188824 - DNA, 25 bp, Homo sapien
caaacactccgtggtgactgtagga

SEQ ID NO: 1188825 - DNA, 25 bp, Homo sapien
cagtggaaatgcctcgacatgggcc

SEQ ID NO: 1188826 - DNA, 25 bp, Homo sapien
ccatggccatgttagacccgcagat

SEQ ID NO: 1188827 - DNA, 25 bp, Homo sapien
tgtcttcctgcctttgactcctcat

SEQ ID NO: 1188828 - DNA, 25 bp, Homo sapien
cagcccacagcaagcttgtcttcct

SEQ ID NO: 1188829 - DNA, 25 bp, Homo sapien
agcccacagcaagcttgtcttcctg

SEQ ID NO: 1188830 - DNA, 25 bp, Homo sapien
cttcctgcctttgactcctcatcat

SEQ ID NO: 1188831 - DNA, 25 bp, Homo sapien
tttccttatgccgtttggacctcag

SEQ ID NO: 1188832 - DNA, 25 bp, Homo sapien
gatctctgatgtgtctaagttgcca

SEQ ID NO: 1188833 - DNA, 25 bp, Homo sapien
ccgtttggacctcagcatcttttca

SEQ ID NO: 1188834 - DNA, 25 bp, Homo sapien
gggtcgactctgtaggtgaatgcct

SEQ ID NO: 1188835 - DNA, 25 bp, Homo sapien
gcttcgaagaatccaagaggttcaa

SEQ ID NO: 1188836 - DNA, 25 bp, Homo sapien
tcatggcttcgaagaatccaagagg

SEQ ID NO: 1188837 - DNA, 25 bp, Homo sapien
cctcatggcttcgaagaatccaaga

SEQ ID NO: 1188838 - DNA, 25 bp, Homo sapien
tcgaagaatccaagaggttcaactt

SEQ ID NO: 1188839 - DNA, 25 bp, Homo sapien
tcctcgtaatgctctaatggtctgc

SEQ ID NO: 1188840 - DNA, 25 bp, Homo sapien
tagcgttgctgcgatgtctccgcca

SEQ ID NO: 1188841 - DNA, 25 bp, Homo sapien
gctcggtggcatctgcgaattactc

SEQ ID NO: 1188842 - DNA, 25 bp, Homo sapien
aattactccgtcactcggcggcgat

SEQ ID NO: 1188843 - DNA, 25 bp, Homo sapien
gaatgaagcctattattagaactgc

SEQ ID NO: 1188844 - DNA, 25 bp, Homo sapien
ttagaactgcacctgaacactggcc

SEQ ID NO: 1188845 - DNA, 25 bp, Homo sapien
agtgtgattaatgtagctggctagc

SEQ ID NO: 1188846 - DNA, 25 bp, Homo sapien
actgtgagagtcaagaagtgctgaa

SEQ ID NO: 1188847 - DNA, 25 bp, Homo sapien
tgcggcaaagggtgacagaatgagg

SEQ ID NO: 1188848 - DNA, 25 bp, Homo sapien
ctgcggcaaagggtgacagaatgag

SEQ ID NO: 1188849 - DNA, 25 bp, Homo sapien
ggcaaagggtgacagaatgagggcg

SEQ ID NO: 1188850 - DNA, 25 bp, Homo sapien
cggcaaagggtgacagaatgagggc

SEQ ID NO: 1188851 - DNA, 25 bp, Homo sapien
ttctatcataggtggtcatgttgcc

SEQ ID NO: 1188852 - DNA, 25 bp, Homo sapien
aggtatgatttctatcataggtggt

SEQ ID NO: 1188853 - DNA, 25 bp, Homo sapien
gtatgatttctatcataggtggtca

SEQ ID NO: 1188854 - DNA, 25 bp, Homo sapien
tgatttctatcataggtggtcatgt

SEQ ID NO: 1188855 - DNA, 25 bp, Homo sapien
aggcacgcagaagatgacaggtctg

SEQ ID NO: 1188856 - DNA, 25 bp, Homo sapien
caggtctgaatagtctgacaaattt

SEQ ID NO: 1188857 - DNA, 25 bp, Homo sapien
aaggcacgcagaagatgacaggtct

SEQ ID NO: 1188858 - DNA, 25 bp, Homo sapien
gtctgaatagtctgacaaattttta

SEQ ID NO: 1188859 - DNA, 25 bp, Homo sapien
gaagacttatctgggtagttaagga

SEQ ID NO: 1188860 - DNA, 25 bp, Homo sapien
ctgtccagagtctggcttctttgag

SEQ ID NO: 1188861 - DNA, 25 bp, Homo sapien
gccagcccactgagccctgcttggt

SEQ ID NO: 1188862 - DNA, 25 bp, Homo sapien
ttcgctttgacagggcccaacatct

SEQ ID NO: 1188863 - DNA, 25 bp, Homo sapien
ctagttctgctacagtctttgcgtt

SEQ ID NO: 1188864 - DNA, 25 bp, Homo sapien
cagccattacatattcgctttgaca

SEQ ID NO: 1188865 - DNA, 25 bp, Homo sapien
gttctgctacagtctttgcgttcat

SEQ ID NO: 1188866 - DNA, 25 bp, Homo sapien
aacagggtggtgaatcccatgggaa

SEQ ID NO: 1188867 - DNA, 25 bp, Homo sapien
agaacagggtggtgaatcccatggg

SEQ ID NO: 1188868 - DNA, 25 bp, Homo sapien
tggggagccctttaacagcagcaga

SEQ ID NO: 1188869 - DNA, 25 bp, Homo sapien
cagggtggtgaatcccatgggaagg

SEQ ID NO: 1188870 - DNA, 25 bp, Homo sapien
gtcttcttagaaatttgcagcttcc

SEQ ID NO: 1188871 - DNA, 25 bp, Homo sapien
tctcagtggctattatggtaaaggc

SEQ ID NO: 1188872 - DNA, 25 bp, Homo sapien
gagctctctccaataggaaaagttg

SEQ ID NO: 1188873 - DNA, 25 bp, Homo sapien
tacagacctctcattactctcagtg

SEQ ID NO: 1188874 - DNA, 25 bp, Homo sapien
gctcaaagtcgaaaaccttccagat

SEQ ID NO: 1188875 - DNA, 25 bp, Homo sapien
cagctgctcaaagtcgaaaaccttc

SEQ ID NO: 1188876 - DNA, 25 bp, Homo sapien
gcctctaagtcagacctgttgggcc

SEQ ID NO: 1188877 - DNA, 25 bp, Homo sapien
gaaagcttctaagtcagagctggcc

SEQ ID NO: 1188878 - DNA, 25 bp, Homo sapien
gctacttcgtatctcctgccaagca

SEQ ID NO: 1188879 - DNA, 25 bp, Homo sapien
aattatctggctgatgttgcaggca

SEQ ID NO: 1188880 - DNA, 25 bp, Homo sapien
gacaaatcccaactggagaatttcc

SEQ ID NO: 1188881 - DNA, 25 bp, Homo sapien
aaactcactcttgccgaatattgga

SEQ ID NO: 1188882 - DNA, 25 bp, Homo sapien
caggagggaggttgaacatcctcta

SEQ ID NO: 1188883 - DNA, 25 bp, Homo sapien
tttggggccctaatccatgaatgag

SEQ ID NO: 1188884 - DNA, 25 bp, Homo sapien
gcgaagccatccgaaggaaagtcag

SEQ ID NO: 1188885 - DNA, 25 bp, Homo sapien
aatgagagagagcctgacatttccc

SEQ ID NO: 1188886 - DNA, 25 bp, Homo sapien
gctcacatcaaggatagagaaacgt

SEQ ID NO: 1188887 - DNA, 25 bp, Homo sapien
catcaaggatagagaaacgtattct

SEQ ID NO: 1188888 - DNA, 25 bp, Homo sapien
taatatagctcacatcaaggataga

SEQ ID NO: 1188889 - DNA, 25 bp, Homo sapien
tagagaaacgtattcttgattgcag

SEQ ID NO: 1188890 - DNA, 25 bp, Homo sapien
tgttggatccaacttccaataccac

SEQ ID NO: 1188891 - DNA, 25 bp, Homo sapien
tttctgcccacagccataatctggt

SEQ ID NO: 1188892 - DNA, 25 bp, Homo sapien
aacttccaataccaccacgtctgtg

SEQ ID NO: 1188893 - DNA, 25 bp, Homo sapien
catcttccaactgttggatccaact

SEQ ID NO: 1188894 - DNA, 25 bp, Homo sapien
gacattggtgaggtgtgatgtctga

SEQ ID NO: 1188895 - DNA, 25 bp, Homo sapien
cccactctggaaatgaccagaacaa

SEQ ID NO: 1188896 - DNA, 25 bp, Homo sapien
cctcacagggcaggacattggtgag

SEQ ID NO: 1188897 - DNA, 25 bp, Homo sapien
gaaatgaccagaacaacccacttat

SEQ ID NO: 1188898 - DNA, 25 bp, Homo sapien
ggactaaaccataatcaggagctgg

SEQ ID NO: 1188899 - DNA, 25 bp, Homo sapien
gctctgatttcaggactaaaccata

SEQ ID NO: 1188900 - DNA, 25 bp, Homo sapien
tttcaggactaaaccataatcagga

SEQ ID NO: 1188901 - DNA, 25 bp, Homo sapien
ctaaaccataatcaggagctgggct

SEQ ID NO: 1188902 - DNA, 25 bp, Homo sapien
gatgagctgtcatactacaggcacc

SEQ ID NO: 1188903 - DNA, 25 bp, Homo sapien
tgctctgatgagctgtcatactaca

SEQ ID NO: 1188904 - DNA, 25 bp, Homo sapien
cctggcatagggctgacatgaccaa

SEQ ID NO: 1188905 - DNA, 25 bp, Homo sapien
gagctgtcatactacaggcaccagt

SEQ ID NO: 1188906 - DNA, 25 bp, Homo sapien
caaacacagccacgtacaacctcac

SEQ ID NO: 1188907 - DNA, 25 bp, Homo sapien
acacagccacgtacaacctcactca

SEQ ID NO: 1188908 - DNA, 25 bp, Homo sapien
acagccacgtacaacctcactcaga

SEQ ID NO: 1188909 - DNA, 25 bp, Homo sapien
gccacgtacaacctcactcagaaaa

SEQ ID NO: 1188910 - DNA, 25 bp, Homo sapien
caactggccttcctggtttcttaca

SEQ ID NO: 1188911 - DNA, 25 bp, Homo sapien
aatgacgctgtgagaaaggcaggac

SEQ ID NO: 1188912 - DNA, 25 bp, Homo sapien
tatagacgtcagctcctttggccca

SEQ ID NO: 1188913 - DNA, 25 bp, Homo sapien
atcccagtggcctgatcctgcagca

SEQ ID NO: 1188914 - DNA, 25 bp, Homo sapien
ctgtggtttctggtcctaatcccca

SEQ ID NO: 1188915 - DNA, 25 bp, Homo sapien
ccccatgctccaatcctgctctctt

SEQ ID NO: 1188916 - DNA, 25 bp, Homo sapien
gtggtttctggtcctaatccccatg

SEQ ID NO: 1188917 - DNA, 25 bp, Homo sapien
tggtcctaatccccatgctccaatc

SEQ ID NO: 1188918 - DNA, 25 bp, Homo sapien
tgggatcagacatgacaactggagt

SEQ ID NO: 1188919 - DNA, 25 bp, Homo sapien
gacatgacaactggagtaactaggg

SEQ ID NO: 1188920 - DNA, 25 bp, Homo sapien
gaatgagtccaccgggctttgtgga

SEQ ID NO: 1188921 - DNA, 25 bp, Homo sapien
actcacggtgggatcagacatgaca

SEQ ID NO: 1188922 - DNA, 25 bp, Homo sapien
caggcattttccaatactccggaaa

SEQ ID NO: 1188923 - DNA, 25 bp, Homo sapien
cattttccaatactccggaaactca

SEQ ID NO: 1188924 - DNA, 25 bp, Homo sapien
tactccggaaactcaaagtggcctg

SEQ ID NO: 1188925 - DNA, 25 bp, Homo sapien
tccaatactccggaaactcaaagtg

SEQ ID NO: 1188926 - DNA, 25 bp, Homo sapien
ggcctcctgcactgatgcgttgttg

SEQ ID NO: 1188927 - DNA, 25 bp, Homo sapien
tagtttgccatgaaagccagctctt

SEQ ID NO: 1188928 - DNA, 25 bp, Homo sapien
tctttgacttcctgcacctctgggt

SEQ ID NO: 1188929 - DNA, 25 bp, Homo sapien
tccacatcgctgctttagagtctat

SEQ ID NO: 1188930 - DNA, 25 bp, Homo sapien
ggatcaatggggcaagtcgcagcac

SEQ ID NO: 1188931 - DNA, 25 bp, Homo sapien
aaggatcaatggggcaagtcgcagc

SEQ ID NO: 1188932 - DNA, 25 bp, Homo sapien
tggaaggatcaatggggcaagtcgc

SEQ ID NO: 1188933 - DNA, 25 bp, Homo sapien
ttatggaaggatcaatggggcaagt

SEQ ID NO: 1188934 - DNA, 25 bp, Homo sapien
tggtcacatccagactaaatttgat

SEQ ID NO: 1188935 - DNA, 25 bp, Homo sapien
ctggtaacatgttaccacctgctgc

SEQ ID NO: 1188936 - DNA, 25 bp, Homo sapien
gaaaaattgttccagtaaaagcagc

SEQ ID NO: 1188937 - DNA, 25 bp, Homo sapien
gactaaatttgatcagtactggtaa

SEQ ID NO: 1188938 - DNA, 25 bp, Homo sapien
gcattctaatgggatggcatcgagg

SEQ ID NO: 1188939 - DNA, 25 bp, Homo sapien
tattgatgtctgtctgagggcctcc

SEQ ID NO: 1188940 - DNA, 25 bp, Homo sapien
caggaagacacgcattcaagggagc

SEQ ID NO: 1188941 - DNA, 25 bp, Homo sapien
ggcatcgaggccaataaaggcaatg

SEQ ID NO: 1188942 - DNA, 25 bp, Homo sapien
acctgatgtatggaacactgtgccc

SEQ ID NO: 1188943 - DNA, 25 bp, Homo sapien
ggtcacctgatgtatggaacactgt

SEQ ID NO: 1188944 - DNA, 25 bp, Homo sapien
tcacctgatgtatggaacactgtgc

SEQ ID NO: 1188945 - DNA, 25 bp, Homo sapien
tggtcacctgatgtatggaacactg

SEQ ID NO: 1188946 - DNA, 25 bp, Homo sapien
aatcaatgtttctgggactctcttt

SEQ ID NO: 1188947 - DNA, 25 bp, Homo sapien
aaaatcaatgtttctgggactctct

SEQ ID NO: 1188948 - DNA, 25 bp, Homo sapien
ggatccaaaaatcaatgtttctggg

SEQ ID NO: 1188949 - DNA, 25 bp, Homo sapien
tccaaaaatcaatgtttctgggact

SEQ ID NO: 1188950 - DNA, 25 bp, Homo sapien
ttgccaacccctcatattcgttttc

SEQ ID NO: 1188951 - DNA, 25 bp, Homo sapien
catgggataaccagacattgccaac

SEQ ID NO: 1188952 - DNA, 25 bp, Homo sapien
ctgctgtgcctagaggtagaactat

SEQ ID NO: 1188953 - DNA, 25 bp, Homo sapien
gaccctttaccccatttcagcatgg

SEQ ID NO: 1188954 - DNA, 25 bp, Homo sapien
tcctccccattggggaaagcatctc

SEQ ID NO: 1188955 - DNA, 25 bp, Homo sapien
ctccccattggggaaagcatctctg

SEQ ID NO: 1188956 - DNA, 25 bp, Homo sapien
cctccccattggggaaagcatctct

SEQ ID NO: 1188957 - DNA, 25 bp, Homo sapien
gccagtaattaaagcgcctatcgat

SEQ ID NO: 1188958 - DNA, 25 bp, Homo sapien
gctcctggctcaggcagagtaatta

SEQ ID NO: 1188959 - DNA, 25 bp, Homo sapien
gagtaattacagttgaggccctgat

SEQ ID NO: 1188960 - DNA, 25 bp, Homo sapien
gcggtctctgcttattggctcctgg

SEQ ID NO: 1188961 - DNA, 25 bp, Homo sapien
gcatgcagacacagaaactgtgaca

SEQ ID NO: 1188962 - DNA, 25 bp, Homo sapien
accctgcatgcagacacagaaactg

SEQ ID NO: 1188963 - DNA, 25 bp, Homo sapien
ccatgaggacaccctgcatgcagac

SEQ ID NO: 1188964 - DNA, 25 bp, Homo sapien
ggacaccctgcatgcagacacagaa

SEQ ID NO: 1188965 - DNA, 25 bp, Homo sapien
tggagtgctggttctgagagcactt

SEQ ID NO: 1188966 - DNA, 25 bp, Homo sapien
ctggctttctcgattatgcaggtat

SEQ ID NO: 1188967 - DNA, 25 bp, Homo sapien
tgtccctggagtgctggttctgaga

SEQ ID NO: 1188968 - DNA, 25 bp, Homo sapien
tccctggagtgctggttctgagagc

SEQ ID NO: 1188969 - DNA, 25 bp, Homo sapien
tgaacagaaacctctgccatgtgtt

SEQ ID NO: 1188970 - DNA, 25 bp, Homo sapien
gtgaacagaaacctctgccatgtgt

SEQ ID NO: 1188971 - DNA, 25 bp, Homo sapien
gaacagaaacctctgccatgtgtta

SEQ ID NO: 1188972 - DNA, 25 bp, Homo sapien
gggtactccatatcctcactttttg

SEQ ID NO: 1188973 - DNA, 25 bp, Homo sapien
tttttgggccttttctcacccatgc

SEQ ID NO: 1188974 - DNA, 25 bp, Homo sapien
aatatcccgacacccctgtgtgcag

SEQ ID NO: 1188975 - DNA, 25 bp, Homo sapien
tagatcatgccccaatatcccgaca

SEQ ID NO: 1188976 - DNA, 25 bp, Homo sapien
agcagctcatgattgggtttaaaaa

SEQ ID NO: 1188977 - DNA, 25 bp, Homo sapien
cagtcacagctggggtagcagtcca

SEQ ID NO: 1188978 - DNA, 25 bp, Homo sapien
tggggtagcagtccagcagctcatg

SEQ ID NO: 1188979 - DNA, 25 bp, Homo sapien
ggtagcagtccagcagctcatgatt

SEQ ID NO: 1188980 - DNA, 25 bp, Homo sapien
aatttgtcaataccaaggtcagctg

SEQ ID NO: 1188981 - DNA, 25 bp, Homo sapien
tgtgaatttgtcaataccaaggtca

SEQ ID NO: 1188982 - DNA, 25 bp, Homo sapien
ccctgtgaatttgtcaataccaagg

SEQ ID NO: 1188983 - DNA, 25 bp, Homo sapien
gatgtcccctgtgaatttgtcaata

SEQ ID NO: 1188984 - DNA, 25 bp, Homo sapien
aataagccagattttgccagcttgt

SEQ ID NO: 1188985 - DNA, 25 bp, Homo sapien
attttgccagcttgtcctgtgtaag

SEQ ID NO: 1188986 - DNA, 25 bp, Homo sapien
taagccagattttgccagcttgtcc

SEQ ID NO: 1188987 - DNA, 25 bp, Homo sapien
gccagattttgccagcttgtcctgt

SEQ ID NO: 1188988 - DNA, 25 bp, Homo sapien
tactatgcttggcattggatccaga

SEQ ID NO: 1188989 - DNA, 25 bp, Homo sapien
gggagccttctgggtgagagacaca

SEQ ID NO: 1188990 - DNA, 25 bp, Homo sapien
cattggatccagaaatcttagcatc

SEQ ID NO: 1188991 - DNA, 25 bp, Homo sapien
tgagtgaaatggcaccacttttctt

SEQ ID NO: 1188992 - DNA, 25 bp, Homo sapien
ggcactagggttacatctatttctc

SEQ ID NO: 1188993 - DNA, 25 bp, Homo sapien
tctctgctgccagtagagtcgggtt

SEQ ID NO: 1188994 - DNA, 25 bp, Homo sapien
catttggcactagggttacatctat

SEQ ID NO: 1188995 - DNA, 25 bp, Homo sapien
tttggcactagggttacatctattt

SEQ ID NO: 1188996 - DNA, 25 bp, Homo sapien
cagacgctgactttttggagggttc

SEQ ID NO: 1188997 - DNA, 25 bp, Homo sapien
tccttcaatcatgggcaaaggatct

SEQ ID NO: 1188998 - DNA, 25 bp, Homo sapien
tatcccaacccattccaccctggat

SEQ ID NO: 1188999 - DNA, 25 bp, Homo sapien
gagcccggacctcaaaccacttgag

SEQ ID NO: 1189000 - DNA, 25 bp, Homo sapien
ctattccactaacgtagcaggaaga

SEQ ID NO: 1189001 - DNA, 25 bp, Homo sapien
agctgtacaaccatccacctttttt

SEQ ID NO: 1189002 - DNA, 25 bp, Homo sapien
gcctgtaactccaaccttcctgtct

SEQ ID NO: 1189003 - DNA, 25 bp, Homo sapien
taacgtagcaggaagatcctggctc

SEQ ID NO: 1189004 - DNA, 25 bp, Homo sapien
aagtgtgtactcttgcgtaggccca

SEQ ID NO: 1189005 - DNA, 25 bp, Homo sapien
ttccagctggaaagcacagtaagca

SEQ ID NO: 1189006 - DNA, 25 bp, Homo sapien
agagcctcgtgatgccagcagtaac

SEQ ID NO: 1189007 - DNA, 25 bp, Homo sapien
tctattcagatgtagcaatggctgc

SEQ ID NO: 1189008 - DNA, 25 bp, Homo sapien
tgtttcttggtacaacctgacaaag

SEQ ID NO: 1189009 - DNA, 25 bp, Homo sapien
gtacaacctgacaaagccccagaga

SEQ ID NO: 1189010 - DNA, 25 bp, Homo sapien
cttcatctcagaggtgtttcttggt

SEQ ID NO: 1189011 - DNA, 25 bp, Homo sapien
tcatctcagaggtgtttcttggtac

SEQ ID NO: 1189012 - DNA, 25 bp, Homo sapien
tgatttcctctgatcgataagccat

SEQ ID NO: 1189013 - DNA, 25 bp, Homo sapien
ttggacactgcttttgcaacactca

SEQ ID NO: 1189014 - DNA, 25 bp, Homo sapien
tgctgagtttccaccacgttttgga

SEQ ID NO: 1189015 - DNA, 25 bp, Homo sapien
tcaccctcgacaccctgctgagttt

SEQ ID NO: 1189016 - DNA, 25 bp, Homo sapien
tgatccagattgctgctgccagcag

SEQ ID NO: 1189017 - DNA, 25 bp, Homo sapien
tccaatgctgatccagattgctgct

SEQ ID NO: 1189018 - DNA, 25 bp, Homo sapien
cagcaggaacgcagacagacagatg

SEQ ID NO: 1189019 - DNA, 25 bp, Homo sapien
aatgctgatccagattgctgctgcc

SEQ ID NO: 1189020 - DNA, 25 bp, Homo sapien
gagactagcgcaaggaggcttgctt

SEQ ID NO: 1189021 - DNA, 25 bp, Homo sapien
gagaaggcactgagactagcgcaag

SEQ ID NO: 1189022 - DNA, 25 bp, Homo sapien
atattctgtccacccgcagagcaag

SEQ ID NO: 1189023 - DNA, 25 bp, Homo sapien
tctgtccacccgcagagcaaggaag

SEQ ID NO: 1189024 - DNA, 25 bp, Homo sapien
aaaattgtgtggcagggataaccca

SEQ ID NO: 1189025 - DNA, 25 bp, Homo sapien
tgtggcagggataacccagtgcttt

SEQ ID NO: 1189026 - DNA, 25 bp, Homo sapien
tggcagggataacccagtgctttca

SEQ ID NO: 1189027 - DNA, 25 bp, Homo sapien
ttgtgtggcagggataacccagtgc

SEQ ID NO: 1189028 - DNA, 25 bp, Homo sapien
cacactcttgacaccgatcacagga

SEQ ID NO: 1189029 - DNA, 25 bp, Homo sapien
tccagtatgcctttcctgaaaaagc

SEQ ID NO: 1189030 - DNA, 25 bp, Homo sapien
aaagctcttccctgtggtgacagaa

SEQ ID NO: 1189031 - DNA, 25 bp, Homo sapien
gatcacaggatacatgtccctccag

SEQ ID NO: 1189032 - DNA, 25 bp, Homo sapien
gcctggggttgagcatgattgagaa

SEQ ID NO: 1189033 - DNA, 25 bp, Homo sapien
ttgagaagtgaatgatcctattatt

SEQ ID NO: 1189034 - DNA, 25 bp, Homo sapien
tgatcctattattggacttagtgac

SEQ ID NO: 1189035 - DNA, 25 bp, Homo sapien
gaagtgaatgatcctattattggac

SEQ ID NO: 1189036 - DNA, 25 bp, Homo sapien
tgcattgatccctgagtcaagtggg

SEQ ID NO: 1189037 - DNA, 25 bp, Homo sapien
cctcttctgagtatagaagcaggac

SEQ ID NO: 1189038 - DNA, 25 bp, Homo sapien
cttcctgtgcattgatccctgagtc

SEQ ID NO: 1189039 - DNA, 25 bp, Homo sapien
tagaagcaggacctgagagtcctcc

SEQ ID NO: 1189040 - DNA, 25 bp, Homo sapien
caactgaaaggtgaatgctgggccc

SEQ ID NO: 1189041 - DNA, 25 bp, Homo sapien
ttaggcacagaacttagcactgggt

SEQ ID NO: 1189042 - DNA, 25 bp, Homo sapien
tgggtggacacagagtgagatctcc

SEQ ID NO: 1189043 - DNA, 25 bp, Homo sapien
gatcactgttggtcattaaatgccc

SEQ ID NO: 1189044 - DNA, 25 bp, Homo sapien
tgaggcactgcgagtagtgaagagg

SEQ ID NO: 1189045 - DNA, 25 bp, Homo sapien
cttcttattgtcacttagtgagtta

SEQ ID NO: 1189046 - DNA, 25 bp, Homo sapien
agcattgctgagctcccccggtgtg

SEQ ID NO: 1189047 - DNA, 25 bp, Homo sapien
gagcttgaattggacgtggagtccc

SEQ ID NO: 1189048 - DNA, 25 bp, Homo sapien
atagtttcaacgggaacaaggaatg

SEQ ID NO: 1189049 - DNA, 25 bp, Homo sapien
ggagatgaagaaggaatagtttcaa

SEQ ID NO: 1189050 - DNA, 25 bp, Homo sapien
ggaacaaggaatgttgaagaagcat

SEQ ID NO: 1189051 - DNA, 25 bp, Homo sapien
caaggaatgttgaagaagcatcatt

SEQ ID NO: 1189052 - DNA, 25 bp, Homo sapien
tgactctcttgatctcatctgcata

SEQ ID NO: 1189053 - DNA, 25 bp, Homo sapien
tctgactctcttgatctcatctgca

SEQ ID NO: 1189054 - DNA, 25 bp, Homo sapien
ctctcttgatctcatctgcatataa

SEQ ID NO: 1189055 - DNA, 25 bp, Homo sapien
tctctgactctcttgatctcatctg

SEQ ID NO: 1189056 - DNA, 25 bp, Homo sapien
ccaggcctaacaaggccagtggctg

SEQ ID NO: 1189057 - DNA, 25 bp, Homo sapien
gacacaagagccattcaacaatgcc

SEQ ID NO: 1189058 - DNA, 25 bp, Homo sapien
cctaacaaggccagtggctggagtc

SEQ ID NO: 1189059 - DNA, 25 bp, Homo sapien
caggaaacagcccactgaatttaga

SEQ ID NO: 1189060 - DNA, 25 bp, Homo sapien
taacatcaccttttcgaaggcaagc

SEQ ID NO: 1189061 - DNA, 25 bp, Homo sapien
ggcaagcagcaatttgaccattcat

SEQ ID NO: 1189062 - DNA, 25 bp, Homo sapien
tcaccttttcgaaggcaagcagcaa

SEQ ID NO: 1189063 - DNA, 25 bp, Homo sapien
ttcgaaggcaagcagcaatttgacc

SEQ ID NO: 1189064 - DNA, 25 bp, Homo sapien
tctcttcctccatcgttgatgtgct

SEQ ID NO: 1189065 - DNA, 25 bp, Homo sapien
ttctcttcctccatcgttgatgtgc

SEQ ID NO: 1189066 - DNA, 25 bp, Homo sapien
gttctcttcctccatcgttgatgtg

SEQ ID NO: 1189067 - DNA, 25 bp, Homo sapien
catggtgcctattcttagggcctgt

SEQ ID NO: 1189068 - DNA, 25 bp, Homo sapien
atggtgcctattcttagggcctgtc

SEQ ID NO: 1189069 - DNA, 25 bp, Homo sapien
cctggttccaggggtcacaggcagc

SEQ ID NO: 1189070 - DNA, 25 bp, Homo sapien
ctggttccaggggtcacaggcagct

SEQ ID NO: 1189071 - DNA, 25 bp, Homo sapien
agagtcacaggagcagttccgtggt

SEQ ID NO: 1189072 - DNA, 25 bp, Homo sapien
aagagtcacaggagcagttccgtgg

SEQ ID NO: 1189073 - DNA, 25 bp, Homo sapien
tgttggaacacagtaaggatcggtc

SEQ ID NO: 1189074 - DNA, 25 bp, Homo sapien
taaggatcggtctgctgctgttcgc

SEQ ID NO: 1189075 - DNA, 25 bp, Homo sapien
cgccctgtaccttatttatccgtgg

SEQ ID NO: 1189076 - DNA, 25 bp, Homo sapien
gagagctgcgctgatctgttggaac

SEQ ID NO: 1189077 - DNA, 25 bp, Homo sapien
tcaattgagggatgggtaaggctca

SEQ ID NO: 1189078 - DNA, 25 bp, Homo sapien
caattgagggatgggtaaggctcac

SEQ ID NO: 1189079 - DNA, 25 bp, Homo sapien
tgaggaggccattccagcggagctt

SEQ ID NO: 1189080 - DNA, 25 bp, Homo sapien
ctaaggtaaaagtcatgaggaggcc

SEQ ID NO: 1189081 - DNA, 25 bp, Homo sapien
tcccagtaagcccagtgcgctgtgt

SEQ ID NO: 1189082 - DNA, 25 bp, Homo sapien
gtatgagacagccagagccctaggc

SEQ ID NO: 1189083 - DNA, 25 bp, Homo sapien
gccccatagcatatgtagttgagat

SEQ ID NO: 1189084 - DNA, 25 bp, Homo sapien
tcaaactgctaaatgattcacgcag

SEQ ID NO: 1189085 - DNA, 25 bp, Homo sapien
cacgcagaataagaagccccatagc

SEQ ID NO: 1189086 - DNA, 25 bp, Homo sapien
catcttcacttgacgggtctttagg

SEQ ID NO: 1189087 - DNA, 25 bp, Homo sapien
tctccaaccttggaggccggatcaa

SEQ ID NO: 1189088 - DNA, 25 bp, Homo sapien
catctccaaccttggaggccggatc

SEQ ID NO: 1189089 - DNA, 25 bp, Homo sapien
ccttggaggccggatcaatctctct

SEQ ID NO: 1189090 - DNA, 25 bp, Homo sapien
tccaaccttggaggccggatcaatc

SEQ ID NO: 1189091 - DNA, 25 bp, Homo sapien
cagctcctaggactgggaattttga

SEQ ID NO: 1189092 - DNA, 25 bp, Homo sapien
tgggccagctcctaggactgggaat

SEQ ID NO: 1189093 - DNA, 25 bp, Homo sapien
ggccagctcctaggactgggaattt

SEQ ID NO: 1189094 - DNA, 25 bp, Homo sapien
agatgggccagctcctaggactggg

SEQ ID NO: 1189095 - DNA, 25 bp, Homo sapien
gagagttgaagaggcccatcttccc

SEQ ID NO: 1189096 - DNA, 25 bp, Homo sapien
tgagatttttcctcgtcagaatcac

SEQ ID NO: 1189097 - DNA, 25 bp, Homo sapien
aatcacagatgctgagagttgaaga

SEQ ID NO: 1189098 - DNA, 25 bp, Homo sapien
tgttaaatattcagtctggggatga

SEQ ID NO: 1189099 - DNA, 25 bp, Homo sapien
acttttaattggctataatgtgtga

SEQ ID NO: 1189100 - DNA, 25 bp, Homo sapien
tgatgtatcagcttagatacaagca

SEQ ID NO: 1189101 - DNA, 25 bp, Homo sapien
acaagcagtaatgaggctccctttc

SEQ ID NO: 1189102 - DNA, 25 bp, Homo sapien
gtatcagcttagatacaagcagtaa

SEQ ID NO: 1189103 - DNA, 25 bp, Homo sapien
ctaaatcggcctgtgacagattctg

SEQ ID NO: 1189104 - DNA, 25 bp, Homo sapien
cagaaatacctaaatcggcctgtga

SEQ ID NO: 1189105 - DNA, 25 bp, Homo sapien
tcccagaaatacctaaatcggcctg

SEQ ID NO: 1189106 - DNA, 25 bp, Homo sapien
aaatacctaaatcggcctgtgacag

SEQ ID NO: 1189107 - DNA, 25 bp, Homo sapien
atttagggaaatgacacaagggagg

SEQ ID NO: 1189108 - DNA, 25 bp, Homo sapien
tatttagggaaatgacacaagggag

SEQ ID NO: 1189109 - DNA, 25 bp, Homo sapien
tgggggtatttagggaaatgacaca

SEQ ID NO: 1189110 - DNA, 25 bp, Homo sapien
gtatttagggaaatgacacaaggga

SEQ ID NO: 1189111 - DNA, 25 bp, Homo sapien
gctcagtttctgaacggtatacaat

SEQ ID NO: 1189112 - DNA, 25 bp, Homo sapien
tgcactttcaaaggccatgctcagt

SEQ ID NO: 1189113 - DNA, 25 bp, Homo sapien
tgctctgaaacctcggcagagtggg

SEQ ID NO: 1189114 - DNA, 25 bp, Homo sapien
ttttgcagatgccatcaaagtcaac

SEQ ID NO: 1189115 - DNA, 25 bp, Homo sapien
aggttactctgagcactgaattggg

SEQ ID NO: 1189116 - DNA, 25 bp, Homo sapien
taacgactgagttagcgggcctaaa

SEQ ID NO: 1189117 - DNA, 25 bp, Homo sapien
tggcaatatttatgggaggttactc

SEQ ID NO: 1189118 - DNA, 25 bp, Homo sapien
aacaagttgggaatcctaacgactg

SEQ ID NO: 1189119 - DNA, 25 bp, Homo sapien
tatttgccatgagtcgagcttgcag

SEQ ID NO: 1189120 - DNA, 25 bp, Homo sapien
tcaacctgtactcaggcagagctct

SEQ ID NO: 1189121 - DNA, 25 bp, Homo sapien
ttctgtcttctcaaatatgcggcaa

SEQ ID NO: 1189122 - DNA, 25 bp, Homo sapien
gcggcaatgacgtttatggcatcac

SEQ ID NO: 1189123 - DNA, 25 bp, Homo sapien
ggtgtcatgttggcagttttcctgc

SEQ ID NO: 1189124 - DNA, 25 bp, Homo sapien
tgtcatgttggcagttttcctgcat

SEQ ID NO: 1189125 - DNA, 25 bp, Homo sapien
gtgtcatgttggcagttttcctgca

SEQ ID NO: 1189126 - DNA, 25 bp, Homo sapien
caagcctatgattccttatctgtcc

SEQ ID NO: 1189127 - DNA, 25 bp, Homo sapien
tccaaatagaactgtgaagccagtg

SEQ ID NO: 1189128 - DNA, 25 bp, Homo sapien
tgagctcacgtacaatgatgatggc

SEQ ID NO: 1189129 - DNA, 25 bp, Homo sapien
tgtccatctttctctagacctgagt

SEQ ID NO: 1189130 - DNA, 25 bp, Homo sapien
ctgagacagagcagctctgcgccat

SEQ ID NO: 1189131 - DNA, 25 bp, Homo sapien
aacaggtagtgaccaggatgaacac

SEQ ID NO: 1189132 - DNA, 25 bp, Homo sapien
gcctcatgcggagggtacaagacgc

SEQ ID NO: 1189133 - DNA, 25 bp, Homo sapien
ttcccgtgactcaggacatcctggt

SEQ ID NO: 1189134 - DNA, 25 bp, Homo sapien
caaagtcgccttgcctatgttcccg

SEQ ID NO: 1189135 - DNA, 25 bp, Homo sapien
agcctttgccctcgtcgccattctg

SEQ ID NO: 1189136 - DNA, 25 bp, Homo sapien
cctttgccctcgtcgccattctgat

SEQ ID NO: 1189137 - DNA, 25 bp, Homo sapien
ctttgccctcgtcgccattctgatt

SEQ ID NO: 1189138 - DNA, 25 bp, Homo sapien
ctagcctttgccctcgtcgccattc

SEQ ID NO: 1189139 - DNA, 25 bp, Homo sapien
tttttacctttgtggtctcatagcc

SEQ ID NO: 1189140 - DNA, 25 bp, Homo sapien
tcatagcctccgactccttgattca

SEQ ID NO: 1189141 - DNA, 25 bp, Homo sapien
aggcagcagaaactctcgggcgtgg

SEQ ID NO: 1189142 - DNA, 25 bp, Homo sapien
cgggcgtggcctatgaagtctattc

SEQ ID NO: 1189143 - DNA, 25 bp, Homo sapien
ttgtctgcatcagcaaactttggat

SEQ ID NO: 1189144 - DNA, 25 bp, Homo sapien
aactttggatgaaccattgagtgcc

SEQ ID NO: 1189145 - DNA, 25 bp, Homo sapien
tcagcaaactttggatgaaccattg

SEQ ID NO: 1189146 - DNA, 25 bp, Homo sapien
cattgagtgccgaattccactgggc

SEQ ID NO: 1189147 - DNA, 25 bp, Homo sapien
ggacgcagtgatcaaatccagtggc

SEQ ID NO: 1189148 - DNA, 25 bp, Homo sapien
gacgcagtgatcaaatccagtggca

SEQ ID NO: 1189149 - DNA, 25 bp, Homo sapien
ttttcgctgcttctctatcaactgc

SEQ ID NO: 1189150 - DNA, 25 bp, Homo sapien
tggtctggtgttttcgctgcttctc

SEQ ID NO: 1189151 - DNA, 25 bp, Homo sapien
tcccagtgtactgggtcagcgcctg

SEQ ID NO: 1189152 - DNA, 25 bp, Homo sapien
cccagtgtactgggtcagcgcctgc

SEQ ID NO: 1189153 - DNA, 25 bp, Homo sapien
cctggggaggcaactctagccccac

SEQ ID NO: 1189154 - DNA, 25 bp, Homo sapien
tcctggggaggcaactctagcccca

SEQ ID NO: 1189155 - DNA, 25 bp, Homo sapien
tttcttgaatgcaggagcacgttgt

SEQ ID NO: 1189156 - DNA, 25 bp, Homo sapien
gccctgtttcttgaatgcaggagca

SEQ ID NO: 1189157 - DNA, 25 bp, Homo sapien
cctgtttcttgaatgcaggagcacg

SEQ ID NO: 1189158 - DNA, 25 bp, Homo sapien
tgtttcttgaatgcaggagcacgtt

SEQ ID NO: 1189159 - DNA, 25 bp, Homo sapien
ctcaccttctttcggcctccagtgc

SEQ ID NO: 1189160 - DNA, 25 bp, Homo sapien
cttctttcggcctccagtgccagtg

SEQ ID NO: 1189161 - DNA, 25 bp, Homo sapien
cgtggggggctcctttttgtgcttg

SEQ ID NO: 1189162 - DNA, 25 bp, Homo sapien
tctcacttgccctcaccttctttcg

SEQ ID NO: 1189163 - DNA, 25 bp, Homo sapien
aagatctcacagttgctcagcggca

SEQ ID NO: 1189164 - DNA, 25 bp, Homo sapien
ggagtcagccgatcacgcatgagaa

SEQ ID NO: 1189165 - DNA, 25 bp, Homo sapien
gaagcttgaggatccatcacatggc

SEQ ID NO: 1189166 - DNA, 25 bp, Homo sapien
taacatctcaggataaaggagcact

SEQ ID NO: 1189167 - DNA, 25 bp, Homo sapien
gcccttctgttgtatctgcactgga

SEQ ID NO: 1189168 - DNA, 25 bp, Homo sapien
cactggaaggtcaacacatttgggc

SEQ ID NO: 1189169 - DNA, 25 bp, Homo sapien
gatttgctgcgttagctcaggctaa

SEQ ID NO: 1189170 - DNA, 25 bp, Homo sapien
ggctaattatctcatgtctctgggc

SEQ ID NO: 1189171 - DNA, 25 bp, Homo sapien
tgaagaagcctctcaacctgaaggc

SEQ ID NO: 1189172 - DNA, 25 bp, Homo sapien
ggtcctcattgatgaagaagcctct

SEQ ID NO: 1189173 - DNA, 25 bp, Homo sapien
tgaaggcagcgtctggagagagcca

SEQ ID NO: 1189174 - DNA, 25 bp, Homo sapien
gaaggcagcgtctggagagagccag

SEQ ID NO: 1189175 - DNA, 25 bp, Homo sapien
ttcctctccatgagctgatcctgtc

SEQ ID NO: 1189176 - DNA, 25 bp, Homo sapien
tctccatgagctgatcctgtcccca

SEQ ID NO: 1189177 - DNA, 25 bp, Homo sapien
cctctccatgagctgatcctgtccc

SEQ ID NO: 1189178 - DNA, 25 bp, Homo sapien
gttcctctccatgagctgatcctgt

SEQ ID NO: 1189179 - DNA, 25 bp, Homo sapien
gaagctgctgcctttcgtgggggac

SEQ ID NO: 1189180 - DNA, 25 bp, Homo sapien
ccctgggaagctgctgcctttcgtg

SEQ ID NO: 1189181 - DNA, 25 bp, Homo sapien
ctgggaagctgctgcctttcgtggg

SEQ ID NO: 1189182 - DNA, 25 bp, Homo sapien
gaagaggcacagagccccctttctc

SEQ ID NO: 1189183 - DNA, 25 bp, Homo sapien
tctgtaaatacacagccacgctgga

SEQ ID NO: 1189184 - DNA, 25 bp, Homo sapien
ttcgctggacgtgtctgttgacgcc

SEQ ID NO: 1189185 - DNA, 25 bp, Homo sapien
ccctgtgcttgttcgctggacgtgt

SEQ ID NO: 1189186 - DNA, 25 bp, Homo sapien
ctggcggcacaaggctcccggacgg

SEQ ID NO: 1189187 - DNA, 25 bp, Homo sapien
gcccagcacggatcacctctcccta

SEQ ID NO: 1189188 - DNA, 25 bp, Homo sapien
gggcccagcacggatcacctctccc

SEQ ID NO: 1189189 - DNA, 25 bp, Homo sapien
cccagcacggatcacctctccctac

SEQ ID NO: 1189190 - DNA, 25 bp, Homo sapien
ccgggcccagcacggatcacctctc

SEQ ID NO: 1189191 - DNA, 25 bp, Homo sapien
tgtgctgtgcctgccttcgccagca

SEQ ID NO: 1189192 - DNA, 25 bp, Homo sapien
tgagccaaaggctcgcctcccgctg

SEQ ID NO: 1189193 - DNA, 25 bp, Homo sapien
agcctcagttggaactctccttgtt

SEQ ID NO: 1189194 - DNA, 25 bp, Homo sapien
ccttgttgtcgattgttcagaatgc

SEQ ID NO: 1189195 - DNA, 25 bp, Homo sapien
cgtattgacttgactgattgaatga

SEQ ID NO: 1189196 - DNA, 25 bp, Homo sapien
gaaatcgtattgacttgactgattg

SEQ ID NO: 1189197 - DNA, 25 bp, Homo sapien
cactgagaagaaatcgtattgactt

SEQ ID NO: 1189198 - DNA, 25 bp, Homo sapien
gaagaaatcgtattgacttgactga

SEQ ID NO: 1189199 - DNA, 25 bp, Homo sapien
gttctagaagtgacatcccggtttc

SEQ ID NO: 1189200 - DNA, 25 bp, Homo sapien
caggagctggacttgttctagaagt

SEQ ID NO: 1189201 - DNA, 25 bp, Homo sapien
atcccggtttctccgtggagccgca

SEQ ID NO: 1189202 - DNA, 25 bp, Homo sapien
gcacaggagctggacttgttctaga

SEQ ID NO: 1189203 - DNA, 25 bp, Homo sapien
ctatagggacctgggttcggatctg

SEQ ID NO: 1189204 - DNA, 25 bp, Homo sapien
gacctgggttcggatctgctggata

SEQ ID NO: 1189205 - DNA, 25 bp, Homo sapien
tctgctggataaagcgcaggttcct

SEQ ID NO: 1189206 - DNA, 25 bp, Homo sapien
gttcggatctgctggataaagcgca

SEQ ID NO: 1189207 - DNA, 25 bp, Homo sapien
gacatttactgcttcagcagccatc

SEQ ID NO: 1189208 - DNA, 25 bp, Homo sapien
tgacatttactgcttcagcagccat

SEQ ID NO: 1189209 - DNA, 25 bp, Homo sapien
ttgacatttactgcttcagcagcca

SEQ ID NO: 1189210 - DNA, 25 bp, Homo sapien
cttccatctgtaactcctgctcatg

SEQ ID NO: 1189211 - DNA, 25 bp, Homo sapien
atggacacatttgctgggcacctca

SEQ ID NO: 1189212 - DNA, 25 bp, Homo sapien
ctcatggacacatttgctgggcacc

SEQ ID NO: 1189213 - DNA, 25 bp, Homo sapien
ctgtaactcctgctcatggacacat

SEQ ID NO: 1189214 - DNA, 25 bp, Homo sapien
tccacaagcccccatatgtggtgct

SEQ ID NO: 1189215 - DNA, 25 bp, Homo sapien
aagcccccatatgtggtgctgacca

SEQ ID NO: 1189216 - DNA, 25 bp, Homo sapien
ttggtatctgcattgcctgattcac

SEQ ID NO: 1189217 - DNA, 25 bp, Homo sapien
ggatgctcatgaggctgcttggtat

SEQ ID NO: 1189218 - DNA, 25 bp, Homo sapien
ttgtgtctcctaaaacgttcatgga

SEQ ID NO: 1189219 - DNA, 25 bp, Homo sapien
gattttcatgctagataagccaata

SEQ ID NO: 1189220 - DNA, 25 bp, Homo sapien
aaacgttcatggaaaggatagaaag

SEQ ID NO: 1189221 - DNA, 25 bp, Homo sapien
catgctagataagccaataatgaaa

SEQ ID NO: 1189222 - DNA, 25 bp, Homo sapien
tgccctgcttgaggacgtagaattg

SEQ ID NO: 1189223 - DNA, 25 bp, Homo sapien
ggcctatccccaagtccacttcttg

SEQ ID NO: 1189224 - DNA, 25 bp, Homo sapien
ttgaggacgtagaattgactgcccc

SEQ ID NO: 1189225 - DNA, 25 bp, Homo sapien
ttagaccagatttcacctccaggga

SEQ ID NO: 1189226 - DNA, 25 bp, Homo sapien
gctgaaccagcatcacctctactag

SEQ ID NO: 1189227 - DNA, 25 bp, Homo sapien
gaaccagcatcacctctactagtct

SEQ ID NO: 1189228 - DNA, 25 bp, Homo sapien
gcatcacctctactagtcttcttat

SEQ ID NO: 1189229 - DNA, 25 bp, Homo sapien
cctctactagtcttcttatatgcag

SEQ ID NO: 1189230 - DNA, 25 bp, Homo sapien
ctgccggtttgaacagacgcgacaa

SEQ ID NO: 1189231 - DNA, 25 bp, Homo sapien
attttcgcgggtggctccagtacag

SEQ ID NO: 1189232 - DNA, 25 bp, Homo sapien
gacgcgacaagagcgagaaccctgg

SEQ ID NO: 1189233 - DNA, 25 bp, Homo sapien
cctggccgaattttcgcgggtggct

SEQ ID NO: 1189234 - DNA, 25 bp, Homo sapien
tgacggaaacactgggggcacatat

SEQ ID NO: 1189235 - DNA, 25 bp, Homo sapien
aatttaatgaaaccgatatccttcg

SEQ ID NO: 1189236 - DNA, 25 bp, Homo sapien
tgaggccatatttctggatcagacc

SEQ ID NO: 1189237 - DNA, 25 bp, Homo sapien
gatatccttcgcgtactgacggaaa

SEQ ID NO: 1189238 - DNA, 25 bp, Homo sapien
tgtaactccatggacattgctgctc

SEQ ID NO: 1189239 - DNA, 25 bp, Homo sapien
tgacctttgggacattgggaatacc

SEQ ID NO: 1189240 - DNA, 25 bp, Homo sapien
gaaaatgtcatgtgatgtctctccc

SEQ ID NO: 1189241 - DNA, 25 bp, Homo sapien
tatctaatttttgtgatagggaaac

SEQ ID NO: 1189242 - DNA, 25 bp, Homo sapien
taattgttaaagaccaatattgagt

SEQ ID NO: 1189243 - DNA, 25 bp, Homo sapien
catctatattgaacagggagagagg

SEQ ID NO: 1189244 - DNA, 25 bp, Homo sapien
tacaagtgtatacatcagtataact

SEQ ID NO: 1189245 - DNA, 25 bp, Homo sapien
tacctgaatggttacagagatctca

SEQ ID NO: 1189246 - DNA, 25 bp, Homo sapien
gatcatagcatcaaaagcgtttttt

SEQ ID NO: 1189247 - DNA, 25 bp, Homo sapien
taactgtttgaagactgctgatcat

SEQ ID NO: 1189248 - DNA, 25 bp, Homo sapien
gcctggcccacgtattctttcctta

SEQ ID NO: 1189249 - DNA, 25 bp, Homo sapien
tgaaattacctattcgatcttaaac

SEQ ID NO: 1189250 - DNA, 25 bp, Homo sapien
aagggtcccagctaggccttttcag

SEQ ID NO: 1189251 - DNA, 25 bp, Homo sapien
gttaatgtagacaaccatttcccag

SEQ ID NO: 1189252 - DNA, 25 bp, Homo sapien
tctgtcagctagagaaatccacgtt

SEQ ID NO: 1189253 - DNA, 25 bp, Homo sapien
gcagtagtagtgttaaagggtccca

SEQ ID NO: 1189254 - DNA, 25 bp, Homo sapien
taccatttggctttcggctgtgcag

SEQ ID NO: 1189255 - DNA, 25 bp, Homo sapien
gtgttaaattcagcccctcttccag

SEQ ID NO: 1189256 - DNA, 25 bp, Homo sapien
tcctttgcccttagtgaagctgtgg

SEQ ID NO: 1189257 - DNA, 25 bp, Homo sapien
cagtggcaagcattgaggcaaaggc

SEQ ID NO: 1189258 - DNA, 25 bp, Homo sapien
tagtgtattagaccctttcgttctg

SEQ ID NO: 1189259 - DNA, 25 bp, Homo sapien
tgtcttctagctcatgattccttca

SEQ ID NO: 1189260 - DNA, 25 bp, Homo sapien
cacatacttatcaaactactgctag

SEQ ID NO: 1189261 - DNA, 25 bp, Homo sapien
tgttatgtcttggtggactgaatca

SEQ ID NO: 1189262 - DNA, 25 bp, Homo sapien
aacatttgacataaattttctggtt

SEQ ID NO: 1189263 - DNA, 25 bp, Homo sapien
cagggttcgtgggggatatctaaca

SEQ ID NO: 1189264 - DNA, 25 bp, Homo sapien
acatttgacataaattttctggtta

SEQ ID NO: 1189265 - DNA, 25 bp, Homo sapien
gggggatatctaacatttgacataa

SEQ ID NO: 1189266 - DNA, 25 bp, Homo sapien
caagtggcaatagggagatacagta

SEQ ID NO: 1189267 - DNA, 25 bp, Homo sapien
cttctaaggttttggttggagcagc

SEQ ID NO: 1189268 - DNA, 25 bp, Homo sapien
tacagtatgtaggttctgggaggtc

SEQ ID NO: 1189269 - DNA, 25 bp, Homo sapien
aactagggtagccagaacttcgtga

SEQ ID NO: 1189270 - DNA, 25 bp, Homo sapien
agtgctaggatgactggcattagca

SEQ ID NO: 1189271 - DNA, 25 bp, Homo sapien
cagatatacccagcccggcatgtct

SEQ ID NO: 1189272 - DNA, 25 bp, Homo sapien
cagcccggcatgtctcttacctttt

SEQ ID NO: 1189273 - DNA, 25 bp, Homo sapien
gcattagcagatatacccagcccgg

SEQ ID NO: 1189274 - DNA, 25 bp, Homo sapien
gtacgttattctttatcagaattaa

SEQ ID NO: 1189275 - DNA, 25 bp, Homo sapien
tgtacgttattctttatcagaatta

SEQ ID NO: 1189276 - DNA, 25 bp, Homo sapien
cgttattctttatcagaattaatct

SEQ ID NO: 1189277 - DNA, 25 bp, Homo sapien
tttgtacgttattctttatcagaat

SEQ ID NO: 1189278 - DNA, 25 bp, Homo sapien
cgtcctcaggatgcactgaggctga

SEQ ID NO: 1189279 - DNA, 25 bp, Homo sapien
gcggcagcaggaagcgacctctcct

SEQ ID NO: 1189280 - DNA, 25 bp, Homo sapien
ggagtcacgatgtctggtagccgcc

SEQ ID NO: 1189281 - DNA, 25 bp, Homo sapien
ttccgtggcggtttcggcggcagcg

SEQ ID NO: 1189282 - DNA, 25 bp, Homo sapien
gcagtgctgtctgcaaccgctcgga

SEQ ID NO: 1189283 - DNA, 25 bp, Homo sapien
gcttatgagcacctacattccgcga

SEQ ID NO: 1189284 - DNA, 25 bp, Homo sapien
taggttctttccgtgggtctccagc

SEQ ID NO: 1189285 - DNA, 25 bp, Homo sapien
gagtcgttggctcaatgcagtgctg

SEQ ID NO: 1189286 - DNA, 25 bp, Homo sapien
tggtctctaacctcaggttcagcct

SEQ ID NO: 1189287 - DNA, 25 bp, Homo sapien
tataagaatcatagaatgatagaat

SEQ ID NO: 1189288 - DNA, 25 bp, Homo sapien
tggagtgtagggatctccgctccct

SEQ ID NO: 1189289 - DNA, 25 bp, Homo sapien
tcccaccccttagaatgcggcaaat

SEQ ID NO: 1189290 - DNA, 25 bp, Homo sapien
cgcacgtagtttactaagtcatgag

SEQ ID NO: 1189291 - DNA, 25 bp, Homo sapien
gaatacgcacgtagtttactaagtc

SEQ ID NO: 1189292 - DNA, 25 bp, Homo sapien
aatacgcacgtagtttactaagtca

SEQ ID NO: 1189293 - DNA, 25 bp, Homo sapien
tacgcacgtagtttactaagtcatg

SEQ ID NO: 1189294 - DNA, 25 bp, Homo sapien
cacctgggtgctggtacaaatgcat

SEQ ID NO: 1189295 - DNA, 25 bp, Homo sapien
tctgggcaccgatgtttgagaatca

SEQ ID NO: 1189296 - DNA, 25 bp, Homo sapien
tgcatattcataaggtggagctcag

SEQ ID NO: 1189297 - DNA, 25 bp, Homo sapien
cgcacccggccaatcacagtgtttt

SEQ ID NO: 1189298 - DNA, 25 bp, Homo sapien
tgaaggtctcaactctcaacactgt

SEQ ID NO: 1189299 - DNA, 25 bp, Homo sapien
gtcacctcatggtgaaaggcccaag

SEQ ID NO: 1189300 - DNA, 25 bp, Homo sapien
taactaacagtactcctcatgacct

SEQ ID NO: 1189301 - DNA, 25 bp, Homo sapien
gatgggagccaaacttatccagtta

SEQ ID NO: 1189302 - DNA, 25 bp, Homo sapien
ttccaaactgaaggcgaaataccag

SEQ ID NO: 1189303 - DNA, 25 bp, Homo sapien
gaggaatcactgtcagagcaaagct

SEQ ID NO: 1189304 - DNA, 25 bp, Homo sapien
gaactggtttaatggtagatgctca

SEQ ID NO: 1189305 - DNA, 25 bp, Homo sapien
taaaagacatacctgctgtacctga

SEQ ID NO: 1189306 - DNA, 25 bp, Homo sapien
gagagagaaagaagtccaggggaaa

SEQ ID NO: 1189307 - DNA, 25 bp, Homo sapien
caggagagagaaagaagtccagggg

SEQ ID NO: 1189308 - DNA, 25 bp, Homo sapien
acttagaatcgtggtggaaggggag

SEQ ID NO: 1189309 - DNA, 25 bp, Homo sapien
ttagaatcgtggtggaaggggaggc

SEQ ID NO: 1189310 - DNA, 25 bp, Homo sapien
ccctctgaagatctgttaggggcat

SEQ ID NO: 1189311 - DNA, 25 bp, Homo sapien
tgttaggggcattccagtcatcttg

SEQ ID NO: 1189312 - DNA, 25 bp, Homo sapien
gaagatctgttaggggcattccagt

SEQ ID NO: 1189313 - DNA, 25 bp, Homo sapien
agtcatcttggtcccgcagtgggag

SEQ ID NO: 1189314 - DNA, 25 bp, Homo sapien
tttggatttccagtttttcacattc

SEQ ID NO: 1189315 - DNA, 25 bp, Homo sapien
cttttggatttccagtttttcacat

SEQ ID NO: 1189316 - DNA, 25 bp, Homo sapien
ttggatttccagtttttcacattca

SEQ ID NO: 1189317 - DNA, 25 bp, Homo sapien
tggatttccagtttttcacattcat

SEQ ID NO: 1189318 - DNA, 25 bp, Homo sapien
tttaacgattttctgagaggcagcc

SEQ ID NO: 1189319 - DNA, 25 bp, Homo sapien
tctttaacgattttctgagaggcag

SEQ ID NO: 1189320 - DNA, 25 bp, Homo sapien
atgtctttaacgattttctgagagg

SEQ ID NO: 1189321 - DNA, 25 bp, Homo sapien
taacgattttctgagaggcagccat

SEQ ID NO: 1189322 - DNA, 25 bp, Homo sapien
ttatccccatcagcatgcaacttta

SEQ ID NO: 1189323 - DNA, 25 bp, Homo sapien
tgcagctgtttcactattttttgca

SEQ ID NO: 1189324 - DNA, 25 bp, Homo sapien
tttatcaatgcaacctttgcagctg

SEQ ID NO: 1189325 - DNA, 25 bp, Homo sapien
ccccatcagcatgcaactttaattt

SEQ ID NO: 1189326 - DNA, 25 bp, Homo sapien
cagctgtatgttgcttacatgagac

SEQ ID NO: 1189327 - DNA, 25 bp, Homo sapien
tgaaagagatcctatcaaactagat

SEQ ID NO: 1189328 - DNA, 25 bp, Homo sapien
tttttaaggctaactagagcacctg

SEQ ID NO: 1189329 - DNA, 25 bp, Homo sapien
tgaagtaatgcgacataaccataac

SEQ ID NO: 1189330 - DNA, 25 bp, Homo sapien
atatgatctacgggtaaggcttctc

SEQ ID NO: 1189331 - DNA, 25 bp, Homo sapien
ttccaaatatgatctacgggtaagg

SEQ ID NO: 1189332 - DNA, 25 bp, Homo sapien
ccaaatatgatctacgggtaaggct

SEQ ID NO: 1189333 - DNA, 25 bp, Homo sapien
aaatatgatctacgggtaaggcttc

SEQ ID NO: 1189334 - DNA, 25 bp, Homo sapien
tccttgtgatttctgagtcctaaaa

SEQ ID NO: 1189335 - DNA, 25 bp, Homo sapien
tttctgagtcctaaaatcactatcc

SEQ ID NO: 1189336 - DNA, 25 bp, Homo sapien
taaaatcactatcccaagtaagaat

SEQ ID NO: 1189337 - DNA, 25 bp, Homo sapien
tgagtcctaaaatcactatcccaag

SEQ ID NO: 1189338 - DNA, 25 bp, Homo sapien
ttctaaatcaaagtgcctgattgct

SEQ ID NO: 1189339 - DNA, 25 bp, Homo sapien
tcaaagtgcctgattgctttttcat

SEQ ID NO: 1189340 - DNA, 25 bp, Homo sapien
tcattcatatgttgaacatatatct

SEQ ID NO: 1189341 - DNA, 25 bp, Homo sapien
cattctaaatcaaagtgcctgattg

SEQ ID NO: 1189342 - DNA, 25 bp, Homo sapien
catgcatgtatatcattacgcatac

SEQ ID NO: 1189343 - DNA, 25 bp, Homo sapien
tgcatgtatatcattacgcatacat

SEQ ID NO: 1189344 - DNA, 25 bp, Homo sapien
atgtatatcattacgcatacatata

SEQ ID NO: 1189345 - DNA, 25 bp, Homo sapien
gcatgtatatcattacgcatacata

SEQ ID NO: 1189346 - DNA, 25 bp, Homo sapien
ctttgctgacatttggactccccaa

SEQ ID NO: 1189347 - DNA, 25 bp, Homo sapien
ccaacatgatccatacaacaagttt

SEQ ID NO: 1189348 - DNA, 25 bp, Homo sapien
ttttaaaggcatagacacgtaacag

SEQ ID NO: 1189349 - DNA, 25 bp, Homo sapien
caaagtcccacttgattcatagtct

SEQ ID NO: 1189350 - DNA, 25 bp, Homo sapien
gatcatgtctattgtctttgttaag

SEQ ID NO: 1189351 - DNA, 25 bp, Homo sapien
gatactgggtcaaatcacagtgggc

SEQ ID NO: 1189352 - DNA, 25 bp, Homo sapien
tgggatactgggtcaaatcacagtg

SEQ ID NO: 1189353 - DNA, 25 bp, Homo sapien
ggtcaaatcacagtgggcctttttg

SEQ ID NO: 1189354 - DNA, 25 bp, Homo sapien
ttcctttcagtggtcaagatagtct

SEQ ID NO: 1189355 - DNA, 25 bp, Homo sapien
cagcagtaacaagggtattcctttc

SEQ ID NO: 1189356 - DNA, 25 bp, Homo sapien
cctttttgtaatcaacatgtgtgac

SEQ ID NO: 1189357 - DNA, 25 bp, Homo sapien
acaagggtattcctttcagtggtca

SEQ ID NO: 1189358 - DNA, 25 bp, Homo sapien
ggatatagccaaacttcccgtggca

SEQ ID NO: 1189359 - DNA, 25 bp, Homo sapien
aacttcccgtggcattgcagtggga

SEQ ID NO: 1189360 - DNA, 25 bp, Homo sapien
gctcctgggatatagccaaacttcc

SEQ ID NO: 1189361 - DNA, 25 bp, Homo sapien
gctggctcctgggatatagccaaac

SEQ ID NO: 1189362 - DNA, 25 bp, Homo sapien
ctcctaatactaaccactgaacaac

SEQ ID NO: 1189363 - DNA, 25 bp, Homo sapien
taaccactgaacaacctgtagatcc

SEQ ID NO: 1189364 - DNA, 25 bp, Homo sapien
ccactgaacaacctgtagatcccat

SEQ ID NO: 1189365 - DNA, 25 bp, Homo sapien
taatactaaccactgaacaacctgt

SEQ ID NO: 1189366 - DNA, 25 bp, Homo sapien
agggataactgcttcacagtcctcc

SEQ ID NO: 1189367 - DNA, 25 bp, Homo sapien
gcagggataactgcttcacagtcct

SEQ ID NO: 1189368 - DNA, 25 bp, Homo sapien
ctcagcagggataactgcttcacag

SEQ ID NO: 1189369 - DNA, 25 bp, Homo sapien
atccacttggaagccacaagttttc

SEQ ID NO: 1189370 - DNA, 25 bp, Homo sapien
tgagacagagtttgttgtgatttct

SEQ ID NO: 1189371 - DNA, 25 bp, Homo sapien
gagacagagtttgttgtgatttctg

SEQ ID NO: 1189372 - DNA, 25 bp, Homo sapien
gacagagtttgttgtgatttctgtt

SEQ ID NO: 1189373 - DNA, 25 bp, Homo sapien
ctgagacagagtttgttgtgatttc

SEQ ID NO: 1189374 - DNA, 25 bp, Homo sapien
tcttctgtccagagggtttctatgt

SEQ ID NO: 1189375 - DNA, 25 bp, Homo sapien
tctgtccagagggtttctatgttat

SEQ ID NO: 1189376 - DNA, 25 bp, Homo sapien
cttctgtccagagggtttctatgtt

SEQ ID NO: 1189377 - DNA, 25 bp, Homo sapien
ttcttctgtccagagggtttctatg

SEQ ID NO: 1189378 - DNA, 25 bp, Homo sapien
ccacctccaagtttaggttgggcat

SEQ ID NO: 1189379 - DNA, 25 bp, Homo sapien
gatccttaaggtgattgattttgtg

SEQ ID NO: 1189380 - DNA, 25 bp, Homo sapien
ttttctgccgattatcaggtaatcc

SEQ ID NO: 1189381 - DNA, 25 bp, Homo sapien
ccttaaggtgattgattttgtgcct

SEQ ID NO: 1189382 - DNA, 25 bp, Homo sapien
ttcttttctgccgattatcaggtaa

SEQ ID NO: 1189383 - DNA, 25 bp, Homo sapien
tcaacagcatagccagagtccacct

SEQ ID NO: 1189384 - DNA, 25 bp, Homo sapien
cactccccagctttggacctaatga

SEQ ID NO: 1189385 - DNA, 25 bp, Homo sapien
ccttgccaactgctctattaacctt

SEQ ID NO: 1189386 - DNA, 25 bp, Homo sapien
tcatgtctgtgttcaccaagccact

SEQ ID NO: 1189387 - DNA, 25 bp, Homo sapien
ggacctaatgacaacttcgcatgac

SEQ ID NO: 1189388 - DNA, 25 bp, Homo sapien
cttccaaactgagtcctgcaccaag

SEQ ID NO: 1189389 - DNA, 25 bp, Homo sapien
ttccaaactgagtcctgcaccaaga

SEQ ID NO: 1189390 - DNA, 25 bp, Homo sapien
tccaaactgagtcctgcaccaagaa

SEQ ID NO: 1189391 - DNA, 25 bp, Homo sapien
ccaaactgagtcctgcaccaagaaa

SEQ ID NO: 1189392 - DNA, 25 bp, Homo sapien
aatagttgattccatgacattgaca

SEQ ID NO: 1189393 - DNA, 25 bp, Homo sapien
cactgtggtcccaagccacaaagga

SEQ ID NO: 1189394 - DNA, 25 bp, Homo sapien
gccccaaatccaccgattggataaa

SEQ ID NO: 1189395 - DNA, 25 bp, Homo sapien
tcagtatgaaaccataaatcagaac

SEQ ID NO: 1189396 - DNA, 25 bp, Homo sapien
tttgagaggtgtgccaaactcagtg

SEQ ID NO: 1189397 - DNA, 25 bp, Homo sapien
atttgagaggtgtgccaaactcagt

SEQ ID NO: 1189398 - DNA, 25 bp, Homo sapien
cttcacataatccttgggattcact

SEQ ID NO: 1189399 - DNA, 25 bp, Homo sapien
atccttgggattcactattgaaacc

SEQ ID NO: 1189400 - DNA, 25 bp, Homo sapien
tacaccttgaaacctacacactcag

SEQ ID NO: 1189401 - DNA, 25 bp, Homo sapien
acactatccagatgaaaagcctgca

SEQ ID NO: 1189402 - DNA, 25 bp, Homo sapien
cacactcagatatgccaggggctcc

SEQ ID NO: 1189403 - DNA, 25 bp, Homo sapien
tttccaccttctgtatacaccttga

SEQ ID NO: 1189404 - DNA, 25 bp, Homo sapien
tgagattcagatatgctagcctgcg

SEQ ID NO: 1189405 - DNA, 25 bp, Homo sapien
actgtagtggaatgtttgtgaacac

SEQ ID NO: 1189406 - DNA, 25 bp, Homo sapien
catattagtgcattctggctgagat

SEQ ID NO: 1189407 - DNA, 25 bp, Homo sapien
tgcacaaggctattaagggcaactg

SEQ ID NO: 1189408 - DNA, 25 bp, Homo sapien
tgtgtctcaaatggatgaggaatct

SEQ ID NO: 1189409 - DNA, 25 bp, Homo sapien
ggatgaggaatctggcgttgtccct

SEQ ID NO: 1189410 - DNA, 25 bp, Homo sapien
aaatagacaagttctgaaactaatg

SEQ ID NO: 1189411 - DNA, 25 bp, Homo sapien
gacaagttctgaaactaatgtcttt

SEQ ID NO: 1189412 - DNA, 25 bp, Homo sapien
aacaggctcaagaccaagggaggga

SEQ ID NO: 1189413 - DNA, 25 bp, Homo sapien
ggtaccgcctgcctggaacttcttc

SEQ ID NO: 1189414 - DNA, 25 bp, Homo sapien
gcattcttctaacaggctcaagacc

SEQ ID NO: 1189415 - DNA, 25 bp, Homo sapien
gtgaggtaccgcctgcctggaactt

SEQ ID NO: 1189416 - DNA, 25 bp, Homo sapien
gactttattctactctagagcgttc

SEQ ID NO: 1189417 - DNA, 25 bp, Homo sapien
tagagcgttcaataagatgtttgcc

SEQ ID NO: 1189418 - DNA, 25 bp, Homo sapien
gctcagtataggtgtgtataaaccc

SEQ ID NO: 1189419 - DNA, 25 bp, Homo sapien
gcagagaagatatagtcatatgcct

SEQ ID NO: 1189420 - DNA, 25 bp, Homo sapien
gagctcaggaccataagttacaacc

SEQ ID NO: 1189421 - DNA, 25 bp, Homo sapien
gcaagatcaggaaaagtcccagcct

SEQ ID NO: 1189422 - DNA, 25 bp, Homo sapien
ccttgacttaatcctgtagggagct

SEQ ID NO: 1189423 - DNA, 25 bp, Homo sapien
cagggaatcagtagttgtcaggcaa

SEQ ID NO: 1189424 - DNA, 25 bp, Homo sapien
tgtcatctgtggataaggagcattg

SEQ ID NO: 1189425 - DNA, 25 bp, Homo sapien
acttctccttctcagacgaggccaa

SEQ ID NO: 1189426 - DNA, 25 bp, Homo sapien
tcacacttctccttctcagacgagg

SEQ ID NO: 1189427 - DNA, 25 bp, Homo sapien
gacgaggccaactgtgtctttttca

SEQ ID NO: 1189428 - DNA, 25 bp, Homo sapien
gatactgccattgatactcgtgggc

SEQ ID NO: 1189429 - DNA, 25 bp, Homo sapien
aacacccgtaggacctcaatcctgg

SEQ ID NO: 1189430 - DNA, 25 bp, Homo sapien
agtacacacccgagaaaagggagtg

SEQ ID NO: 1189431 - DNA, 25 bp, Homo sapien
cctactcaagagagagagtcatgcc

SEQ ID NO: 1189432 - DNA, 25 bp, Homo sapien
gagtaaacctacctgatagggtgtg

SEQ ID NO: 1189433 - DNA, 25 bp, Homo sapien
tccaataagtattcaccaggctgta

SEQ ID NO: 1189434 - DNA, 25 bp, Homo sapien
caggctgtatcttctgacccaggcc

SEQ ID NO: 1189435 - DNA, 25 bp, Homo sapien
tctcagtgtcggtcagtctagtctc

SEQ ID NO: 1189436 - DNA, 25 bp, Homo sapien
taatgggagtctgtgattccaactc

SEQ ID NO: 1189437 - DNA, 25 bp, Homo sapien
ttcagaaaggtaacataagggagct

SEQ ID NO: 1189438 - DNA, 25 bp, Homo sapien
tagtacatgcatgataatgaacggc

SEQ ID NO: 1189439 - DNA, 25 bp, Homo sapien
gatgcatatttagtctgtgctgccc

SEQ ID NO: 1189440 - DNA, 25 bp, Homo sapien
caagcagttagcaattcccagagtg

SEQ ID NO: 1189441 - DNA, 25 bp, Homo sapien
ccaaaattataagctctggttagaa

SEQ ID NO: 1189442 - DNA, 25 bp, Homo sapien
cagcttcagatttctatcctcacca

SEQ ID NO: 1189443 - DNA, 25 bp, Homo sapien
gtggctaaggagagagaattgctaa

SEQ ID NO: 1189444 - DNA, 25 bp, Homo sapien
tagccaaaaatttctcgccaagacc

SEQ ID NO: 1189445 - DNA, 25 bp, Homo sapien
tgaggtcttacaaagccaaactatc

SEQ ID NO: 1189446 - DNA, 25 bp, Homo sapien
gccctgatgaatgattttagcaaga

SEQ ID NO: 1189447 - DNA, 25 bp, Homo sapien
ccctaaagactacacaaaaaggctg

SEQ ID NO: 1189448 - DNA, 25 bp, Homo sapien
ttagccccactatgaaggcatgact

SEQ ID NO: 1189449 - DNA, 25 bp, Homo sapien
tactataaggatagtttagccccac

SEQ ID NO: 1189450 - DNA, 25 bp, Homo sapien
tacattactggaagatcagcttgat

SEQ ID NO: 1189451 - DNA, 25 bp, Homo sapien
gagtgctacactttgttctggtaaa

SEQ ID NO: 1189452 - DNA, 25 bp, Homo sapien
ccagttatctaggtaccgtttgcct

SEQ ID NO: 1189453 - DNA, 25 bp, Homo sapien
tactcacattggtcagggtcatctt

SEQ ID NO: 1189454 - DNA, 25 bp, Homo sapien
tatgccaagctaaagcagagagagc

SEQ ID NO: 1189455 - DNA, 25 bp, Homo sapien
gtgccaatgtcagaagcccggaaaa

SEQ ID NO: 1189456 - DNA, 25 bp, Homo sapien
gaactattctggcttgggacgtgga

SEQ ID NO: 1189457 - DNA, 25 bp, Homo sapien
tccagattgtgagtcagagacctgt

SEQ ID NO: 1189458 - DNA, 25 bp, Homo sapien
caagaagtcctagaaagttctccag

SEQ ID NO: 1189459 - DNA, 25 bp, Homo sapien
tggtcactaagttctattcgagccc

SEQ ID NO: 1189460 - DNA, 25 bp, Homo sapien
gatatacactgggaaaagcatacct

SEQ ID NO: 1189461 - DNA, 25 bp, Homo sapien
ggattaccagcagccaagtcttcca

SEQ ID NO: 1189462 - DNA, 25 bp, Homo sapien
taggtctaaaggtcatgctctctcc

SEQ ID NO: 1189463 - DNA, 25 bp, Homo sapien
tctagtttagatgaccctggacctt

SEQ ID NO: 1189464 - DNA, 25 bp, Homo sapien
tgagccaacttctaagactttgccc

SEQ ID NO: 1189465 - DNA, 25 bp, Homo sapien
gcttctcagtgctaacttctctgct

SEQ ID NO: 1189466 - DNA, 25 bp, Homo sapien
tttgccccaaggactgtccctgatt

SEQ ID NO: 1189467 - DNA, 25 bp, Homo sapien
aattgagccaaagataaggtacagc

SEQ ID NO: 1189468 - DNA, 25 bp, Homo sapien
gtaatgctacaaagggatgaccttc

SEQ ID NO: 1189469 - DNA, 25 bp, Homo sapien
tgtctagagtaagacaaaactggta

SEQ ID NO: 1189470 - DNA, 25 bp, Homo sapien
gacaaaactggtaatgctacaaagg

SEQ ID NO: 1189471 - DNA, 25 bp, Homo sapien
ccactttgttccttgtctagagtaa

SEQ ID NO: 1189472 - DNA, 25 bp, Homo sapien
gaagtttctcgaaggcattcctcat

SEQ ID NO: 1189473 - DNA, 25 bp, Homo sapien
caggtgtaataagctggtggctgtc

SEQ ID NO: 1189474 - DNA, 25 bp, Homo sapien
cattcctcatgcattctagtataag

SEQ ID NO: 1189475 - DNA, 25 bp, Homo sapien
tagtataaggactatctgccaccac

SEQ ID NO: 1189476 - DNA, 25 bp, Homo sapien
cctaccaggacatcatctcccccat

SEQ ID NO: 1189477 - DNA, 25 bp, Homo sapien
gggcacctaccaggacatcatctcc

SEQ ID NO: 1189478 - DNA, 25 bp, Homo sapien
ctaaagggcacctaccaggacatca

SEQ ID NO: 1189479 - DNA, 25 bp, Homo sapien
taaagggcacctaccaggacatcat

SEQ ID NO: 1189480 - DNA, 25 bp, Homo sapien
tgaaaacagagctagccacaaaatc

SEQ ID NO: 1189481 - DNA, 25 bp, Homo sapien
cgttccacggtattgaaaacagagc

SEQ ID NO: 1189482 - DNA, 25 bp, Homo sapien
accatgctgccaaacgttccacggt

SEQ ID NO: 1189483 - DNA, 25 bp, Homo sapien
cagagctagccacaaaatcattttt

SEQ ID NO: 1189484 - DNA, 25 bp, Homo sapien
tcatgtctccctgggactgtaggca

SEQ ID NO: 1189485 - DNA, 25 bp, Homo sapien
tgcccacttgcaaaaacgaaagaga

SEQ ID NO: 1189486 - DNA, 25 bp, Homo sapien
tagctcctgactttagccaaaggtc

SEQ ID NO: 1189487 - DNA, 25 bp, Homo sapien
caaagtaagccaggatctctagagg

SEQ ID NO: 1189488 - DNA, 25 bp, Homo sapien
ccaattcactgaactttgggcccat

SEQ ID NO: 1189489 - DNA, 25 bp, Homo sapien
ttccaattcactgaactttgggccc

SEQ ID NO: 1189490 - DNA, 25 bp, Homo sapien
ctcttccaattcactgaactttggg

SEQ ID NO: 1189491 - DNA, 25 bp, Homo sapien
tcttccaattcactgaactttgggc

SEQ ID NO: 1189492 - DNA, 25 bp, Homo sapien
cacagttatacagagagaaggcgac

SEQ ID NO: 1189493 - DNA, 25 bp, Homo sapien
gcaagctccttcaatcacacctgag

SEQ ID NO: 1189494 - DNA, 25 bp, Homo sapien
tttttgttattcgtagcaagctcct

SEQ ID NO: 1189495 - DNA, 25 bp, Homo sapien
aaccagccatatggttagagggctg

SEQ ID NO: 1189496 - DNA, 25 bp, Homo sapien
gggatcttgcatcccctataggtct

SEQ ID NO: 1189497 - DNA, 25 bp, Homo sapien
caggaaggagggataacacagccag

SEQ ID NO: 1189498 - DNA, 25 bp, Homo sapien
ggctctcagcttctagtaatccatt

SEQ ID NO: 1189499 - DNA, 25 bp, Homo sapien
ccaggaagaagaattccgcctgctt

SEQ ID NO: 1189500 - DNA, 25 bp, Homo sapien
tgcccacatctaaaacatgcagtcc

SEQ ID NO: 1189501 - DNA, 25 bp, Homo sapien
catactctggagtaagatcgcactg

SEQ ID NO: 1189502 - DNA, 25 bp, Homo sapien
ctctggagtaagatcgcactgcctc

SEQ ID NO: 1189503 - DNA, 25 bp, Homo sapien
cttttaaagtcactgcttgtgttgc

SEQ ID NO: 1189504 - DNA, 25 bp, Homo sapien
gacgctactcttggtttccccagta

SEQ ID NO: 1189505 - DNA, 25 bp, Homo sapien
gcacaggggacagacgctactcttg

SEQ ID NO: 1189506 - DNA, 25 bp, Homo sapien
cagacgctactcttggtttccccag

SEQ ID NO: 1189507 - DNA, 25 bp, Homo sapien
gggacagacgctactcttggtttcc

SEQ ID NO: 1189508 - DNA, 25 bp, Homo sapien
catccaacttgttgataggttgcaa

SEQ ID NO: 1189509 - DNA, 25 bp, Homo sapien
gaaggcttttaatccctcatccaac

SEQ ID NO: 1189510 - DNA, 25 bp, Homo sapien
gagctcttaacttcaccttctggga

SEQ ID NO: 1189511 - DNA, 25 bp, Homo sapien
taggttgcaagtctccgtaaagttc

SEQ ID NO: 1189512 - DNA, 25 bp, Homo sapien
cagacgagaaagaggcagctagcaa

SEQ ID NO: 1189513 - DNA, 25 bp, Homo sapien
gctagaacttttacacagagacacg

SEQ ID NO: 1189514 - DNA, 25 bp, Homo sapien
cacaccagagtgatgggcagacgag

SEQ ID NO: 1189515 - DNA, 25 bp, Homo sapien
tcaaatagccccaagaatgcctctg

SEQ ID NO: 1189516 - DNA, 25 bp, Homo sapien
caaggatttcttgcgtgtccagccc

SEQ ID NO: 1189517 - DNA, 25 bp, Homo sapien
tagactccaaagaggtgatgctgtg

SEQ ID NO: 1189518 - DNA, 25 bp, Homo sapien
gccttaggtagttcccagccctgct

SEQ ID NO: 1189519 - DNA, 25 bp, Homo sapien
aggtgttccctctcaaccaaggatt

SEQ ID NO: 1189520 - DNA, 25 bp, Homo sapien
acttggcgacgctgcctggacttgg

SEQ ID NO: 1189521 - DNA, 25 bp, Homo sapien
catggctgagcctttctgaatcccg

SEQ ID NO: 1189522 - DNA, 25 bp, Homo sapien
tctttgattgccgagataagcgtca

SEQ ID NO: 1189523 - DNA, 25 bp, Homo sapien
cagcagctcagattgcccaatagga

SEQ ID NO: 1189524 - DNA, 25 bp, Homo sapien
tgatggctgggttgttctgtcctcc

SEQ ID NO: 1189525 - DNA, 25 bp, Homo sapien
agagaagtataagatgggcagtcct

SEQ ID NO: 1189526 - DNA, 25 bp, Homo sapien
tgggcagtcctacttgggagttaaa

SEQ ID NO: 1189527 - DNA, 25 bp, Homo sapien
gccagcacttctggacgcagcagca

SEQ ID NO: 1189528 - DNA, 25 bp, Homo sapien
ggatttcagaaagcccaggagaagg

SEQ ID NO: 1189529 - DNA, 25 bp, Homo sapien
caggatttcagaaagcccaggagaa

SEQ ID NO: 1189530 - DNA, 25 bp, Homo sapien
ttcagaaagcccaggagaagggtgt

SEQ ID NO: 1189531 - DNA, 25 bp, Homo sapien
cagaaagcccaggagaagggtgtta

SEQ ID NO: 1189532 - DNA, 25 bp, Homo sapien
ggctcccagggacatgattctattg

SEQ ID NO: 1189533 - DNA, 25 bp, Homo sapien
cagccatcgtaggaatagacaatga

SEQ ID NO: 1189534 - DNA, 25 bp, Homo sapien
cattctgcataggtgaaggccagcc

SEQ ID NO: 1189535 - DNA, 25 bp, Homo sapien
taggtgaaggccagccatcgtagga

SEQ ID NO: 1189536 - DNA, 25 bp, Homo sapien
tcagaagatctaccttgcagggacc

SEQ ID NO: 1189537 - DNA, 25 bp, Homo sapien
tgtgagctccgtgttgtcctcaact

SEQ ID NO: 1189538 - DNA, 25 bp, Homo sapien
gctaaagtgcaagttagtcacaacc

SEQ ID NO: 1189539 - DNA, 25 bp, Homo sapien
tctccgctatgggaaataggccact

SEQ ID NO: 1189540 - DNA, 25 bp, Homo sapien
ccacagccctgataagcgtcagaga

SEQ ID NO: 1189541 - DNA, 25 bp, Homo sapien
tcaatggatcgctgaagaccacagc

SEQ ID NO: 1189542 - DNA, 25 bp, Homo sapien
ggacttagtgactcagtctcctgca

SEQ ID NO: 1189543 - DNA, 25 bp, Homo sapien
agggccttgccgtgctttgcatgga

SEQ ID NO: 1189544 - DNA, 25 bp, Homo sapien
tgatgtgtttcagagcacagcgcct

SEQ ID NO: 1189545 - DNA, 25 bp, Homo sapien
ttggtccatgaaactgcctgcactg

SEQ ID NO: 1189546 - DNA, 25 bp, Homo sapien
gaaagggagccctgtactcagtgat

SEQ ID NO: 1189547 - DNA, 25 bp, Homo sapien
gctttagacctgatgtgacccatag

SEQ ID NO: 1189548 - DNA, 25 bp, Homo sapien
ctttctctaggcatatacactcctc

SEQ ID NO: 1189549 - DNA, 25 bp, Homo sapien
tctaggcatatacactcctcttcct

SEQ ID NO: 1189550 - DNA, 25 bp, Homo sapien
tcccgcccacgggaataatgtgcac

SEQ ID NO: 1189551 - DNA, 25 bp, Homo sapien
gcacaaaacgaaagttctatgagaa

SEQ ID NO: 1189552 - DNA, 25 bp, Homo sapien
taattttgagatccctctcagaaat

SEQ ID NO: 1189553 - DNA, 25 bp, Homo sapien
agcaccacaccaatttcccggatgt

SEQ ID NO: 1189554 - DNA, 25 bp, Homo sapien
ccaatttcccggatgtttctcttct

SEQ ID NO: 1189555 - DNA, 25 bp, Homo sapien
tctttggcagcaccacaccaatttc

SEQ ID NO: 1189556 - DNA, 25 bp, Homo sapien
gattaaagttaggagtgagagtcct

SEQ ID NO: 1189557 - DNA, 25 bp, Homo sapien
ttaaagttaggagtgagagtcctgc

SEQ ID NO: 1189558 - DNA, 25 bp, Homo sapien
ctctgggaggattaaagttaggagt

SEQ ID NO: 1189559 - DNA, 25 bp, Homo sapien
aggattaaagttaggagtgagagtc

SEQ ID NO: 1189560 - DNA, 25 bp, Homo sapien
tgcaaaggcgacagaatctcaggct

SEQ ID NO: 1189561 - DNA, 25 bp, Homo sapien
tcaaagcaggtcttgcgcacatcag

SEQ ID NO: 1189562 - DNA, 25 bp, Homo sapien
gaaatagtgcccatcctcagagctg

SEQ ID NO: 1189563 - DNA, 25 bp, Homo sapien
tgtgttcacaggctcaaagctcgct

SEQ ID NO: 1189564 - DNA, 25 bp, Homo sapien
acggtgcctattggaactgtggaga

SEQ ID NO: 1189565 - DNA, 25 bp, Homo sapien
tacggtgcctattggaactgtggag

SEQ ID NO: 1189566 - DNA, 25 bp, Homo sapien
aatacggtgcctattggaactgtgg

SEQ ID NO: 1189567 - DNA, 25 bp, Homo sapien
atacggtgcctattggaactgtgga

SEQ ID NO: 1189568 - DNA, 25 bp, Homo sapien
ccacaagccaggtgaacagagaaac

SEQ ID NO: 1189569 - DNA, 25 bp, Homo sapien
aaaattcagtgggagttacatcacc

SEQ ID NO: 1189570 - DNA, 25 bp, Homo sapien
taaaattcagtgggagttacatcac

SEQ ID NO: 1189571 - DNA, 25 bp, Homo sapien
ttcagtgggagttacatcaccaaga

SEQ ID NO: 1189572 - DNA, 25 bp, Homo sapien
tgagttataaaagccggttagccaa

SEQ ID NO: 1189573 - DNA, 25 bp, Homo sapien
taaaaacggctaggcagatgtgaca

SEQ ID NO: 1189574 - DNA, 25 bp, Homo sapien
tagaaagtccagtcaacctaagtgt

SEQ ID NO: 1189575 - DNA, 25 bp, Homo sapien
taagtgtctatcagtgaacgactgg

SEQ ID NO: 1189576 - DNA, 25 bp, Homo sapien
tggctatggaataggagacatagac

SEQ ID NO: 1189577 - DNA, 25 bp, Homo sapien
atggctatggaataggagacatagc

SEQ ID NO: 1189578 - DNA, 25 bp, Homo sapien
atggctatggaataggagacataga

SEQ ID NO: 1189579 - DNA, 25 bp, Homo sapien
gctatggaataggagacatagccat

SEQ ID NO: 1189580 - DNA, 25 bp, Homo sapien
tgaataatcgcccacaatgtagacc

SEQ ID NO: 1189581 - DNA, 25 bp, Homo sapien
actgcctacagacaacagtcctttg

SEQ ID NO: 1189582 - DNA, 25 bp, Homo sapien
gtcctttgatctgaataatcgccca

SEQ ID NO: 1189583 - DNA, 25 bp, Homo sapien
cccacaatgtagaccccagatatca

SEQ ID NO: 1189584 - DNA, 25 bp, Homo sapien
gtttggacttccacagacctcatac

SEQ ID NO: 1189585 - DNA, 25 bp, Homo sapien
cacagacctcatacataaataccaa

SEQ ID NO: 1189586 - DNA, 25 bp, Homo sapien
cagacctcatacataaataccaaat

SEQ ID NO: 1189587 - DNA, 25 bp, Homo sapien
tccacagacctcatacataaatacc

SEQ ID NO: 1189588 - DNA, 25 bp, Homo sapien
tcaaacacagactactttaagggtc

SEQ ID NO: 1189589 - DNA, 25 bp, Homo sapien
caatattgatatctgaggctctggc

SEQ ID NO: 1189590 - DNA, 25 bp, Homo sapien
ccaatgcctgatacacggatgttca

SEQ ID NO: 1189591 - DNA, 25 bp, Homo sapien
cctagtctggtttgaatgattcacc

SEQ ID NO: 1189592 - DNA, 25 bp, Homo sapien
atcctctgaggtcttgcttgtttct

SEQ ID NO: 1189593 - DNA, 25 bp, Homo sapien
gagctggcttcatttgattcccaca

SEQ ID NO: 1189594 - DNA, 25 bp, Homo sapien
gatcctctgaggtcttgcttgtttc

SEQ ID NO: 1189595 - DNA, 25 bp, Homo sapien
taagtgactaagaagtgacatcttc

SEQ ID NO: 1189596 - DNA, 25 bp, Homo sapien
gcttaaagtaacagactaagtgact

SEQ ID NO: 1189597 - DNA, 25 bp, Homo sapien
taactcctgcttaaagtaacagact

SEQ ID NO: 1189598 - DNA, 25 bp, Homo sapien
gactaagtgactaagaagtgacatc

SEQ ID NO: 1189599 - DNA, 25 bp, Homo sapien
tcaggcttcacttgttgtgaacctc

SEQ ID NO: 1189600 - DNA, 25 bp, Homo sapien
gatcccagaaggcaagtatcattcc

SEQ ID NO: 1189601 - DNA, 25 bp, Homo sapien
cccctattaggatgttagccatgca

SEQ ID NO: 1189602 - DNA, 25 bp, Homo sapien
ctcagcatgatagaaacttagcaca

SEQ ID NO: 1189603 - DNA, 25 bp, Homo sapien
ttcattagctggacaaagatcccag

SEQ ID NO: 1189604 - DNA, 25 bp, Homo sapien
gcaatagtgttcccgcatccagcca

SEQ ID NO: 1189605 - DNA, 25 bp, Homo sapien
ccgcatccagccatgagcaatgtgg

SEQ ID NO: 1189606 - DNA, 25 bp, Homo sapien
ggtcttcagaaacaagctacggggc

SEQ ID NO: 1189607 - DNA, 25 bp, Homo sapien
caagctacggggcaaaccctctttg

SEQ ID NO: 1189608 - DNA, 25 bp, Homo sapien
gaaagtatatgcctgtgtccatgga

SEQ ID NO: 1189609 - DNA, 25 bp, Homo sapien
ttctggcaagaattaagggacgtca

SEQ ID NO: 1189610 - DNA, 25 bp, Homo sapien
tgttccagctggtgaatctgttgac

SEQ ID NO: 1189611 - DNA, 25 bp, Homo sapien
taaatccaggatagacaagcagttc

SEQ ID NO: 1189612 - DNA, 25 bp, Homo sapien
tgtcactattcgaacaactccccaa

SEQ ID NO: 1189613 - DNA, 25 bp, Homo sapien
gcactgtcactattcgaacaactcc

SEQ ID NO: 1189614 - DNA, 25 bp, Homo sapien
tcaaagcactgtcactattcgaaca

SEQ ID NO: 1189615 - DNA, 25 bp, Homo sapien
aaagcactgtcactattcgaacaac

SEQ ID NO: 1189616 - DNA, 25 bp, Homo sapien
tctgccattccagagataggaatgt

SEQ ID NO: 1189617 - DNA, 25 bp, Homo sapien
acagtggccgtggtctgccattcca

SEQ ID NO: 1189618 - DNA, 25 bp, Homo sapien
gccgtggtctgccattccagagata

SEQ ID NO: 1189619 - DNA, 25 bp, Homo sapien
tggtctgccattccagagataggaa

SEQ ID NO: 1189620 - DNA, 25 bp, Homo sapien
aggtgagtgacagcgtccttgtccc

SEQ ID NO: 1189621 - DNA, 25 bp, Homo sapien
tgacagcgtccttgtcccaaggcca

SEQ ID NO: 1189622 - DNA, 25 bp, Homo sapien
ctgagctggcaaagtagatgttgag

SEQ ID NO: 1189623 - DNA, 25 bp, Homo sapien
caggtggcagcacctgcaaggtctt

SEQ ID NO: 1189624 - DNA, 25 bp, Homo sapien
tactgttgcttttgattagcataac

SEQ ID NO: 1189625 - DNA, 25 bp, Homo sapien
ctacaggaacaggaatatgactttc

SEQ ID NO: 1189626 - DNA, 25 bp, Homo sapien
tcactattaaatggactacaggaac

SEQ ID NO: 1189627 - DNA, 25 bp, Homo sapien
tacaggaacaggaatatgactttct

SEQ ID NO: 1189628 - DNA, 25 bp, Homo sapien
cagtccaaacgtccattaatcaatg

SEQ ID NO: 1189629 - DNA, 25 bp, Homo sapien
gcagcaatatggaaccagtccaaac

SEQ ID NO: 1189630 - DNA, 25 bp, Homo sapien
tacagtatatgtgtataccatagaa

SEQ ID NO: 1189631 - DNA, 25 bp, Homo sapien
gaaccagtccaaacgtccattaatc

SEQ ID NO: 1189632 - DNA, 25 bp, Homo sapien
ttgggtcaagtggctgctggtttca

SEQ ID NO: 1189633 - DNA, 25 bp, Homo sapien
ttagcacatagaccagctgcccttg

SEQ ID NO: 1189634 - DNA, 25 bp, Homo sapien
acaactgcttagcacatagaccagc

SEQ ID NO: 1189635 - DNA, 25 bp, Homo sapien
tatctcgctggcctggtcattattt

SEQ ID NO: 1189636 - DNA, 25 bp, Homo sapien
tcctctaagtcgctcatgctttgtc

SEQ ID NO: 1189637 - DNA, 25 bp, Homo sapien
ggcacagtaggagaacaacctcatc

SEQ ID NO: 1189638 - DNA, 25 bp, Homo sapien
taagtcgctcatgctttgtcttcat

SEQ ID NO: 1189639 - DNA, 25 bp, Homo sapien
agtaggagaacaacctcatcaagga

SEQ ID NO: 1189640 - DNA, 25 bp, Homo sapien
ccataatatgctgggctgaggacaa

SEQ ID NO: 1189641 - DNA, 25 bp, Homo sapien
tgtcggtgtggccaggcatcccata

SEQ ID NO: 1189642 - DNA, 25 bp, Homo sapien
tcggtgtggccaggcatcccataat

SEQ ID NO: 1189643 - DNA, 25 bp, Homo sapien
gcatcccataatatgctgggctgag

SEQ ID NO: 1189644 - DNA, 25 bp, Homo sapien
ggtagagtcccagaacatgtcccac

SEQ ID NO: 1189645 - DNA, 25 bp, Homo sapien
tagagtcccagaacatgtcccactt

SEQ ID NO: 1189646 - DNA, 25 bp, Homo sapien
gagtcccagaacatgtcccacttca

SEQ ID NO: 1189647 - DNA, 25 bp, Homo sapien
gtcccagaacatgtcccacttcatg

SEQ ID NO: 1189648 - DNA, 25 bp, Homo sapien
ggtgtcactagtgggctctggttcc

SEQ ID NO: 1189649 - DNA, 25 bp, Homo sapien
tcatgtagttggtgaacggagcccc

SEQ ID NO: 1189650 - DNA, 25 bp, Homo sapien
ggtgtcggcacagaggtctcccgtt

SEQ ID NO: 1189651 - DNA, 25 bp, Homo sapien
agcccctgggaagcgagtgaagcca

SEQ ID NO: 1189652 - DNA, 25 bp, Homo sapien
tcaaaggcccccatgtattcttaac

SEQ ID NO: 1189653 - DNA, 25 bp, Homo sapien
ggcccccatgtattcttaacagaaa

SEQ ID NO: 1189654 - DNA, 25 bp, Homo sapien
aaggcccccatgtattcttaacaga

SEQ ID NO: 1189655 - DNA, 25 bp, Homo sapien
aaaggcccccatgtattcttaacag

SEQ ID NO: 1189656 - DNA, 25 bp, Homo sapien
ggcgtgagagacagcgaagaataat

SEQ ID NO: 1189657 - DNA, 25 bp, Homo sapien
tttcacaagaaacaaggaaggcgtg

SEQ ID NO: 1189658 - DNA, 25 bp, Homo sapien
tgacaagtttttccgagggccagga

SEQ ID NO: 1189659 - DNA, 25 bp, Homo sapien
gaatttgtgcttgactagtgctgga

SEQ ID NO: 1189660 - DNA, 25 bp, Homo sapien
tctgtccgatgaccataggtggaat

SEQ ID NO: 1189661 - DNA, 25 bp, Homo sapien
agactaggtccaaatagcaatgcat

SEQ ID NO: 1189662 - DNA, 25 bp, Homo sapien
ccacttggttaggagtgaagttgtc

SEQ ID NO: 1189663 - DNA, 25 bp, Homo sapien
tgtcatatacaactccactaatagg

SEQ ID NO: 1189664 - DNA, 25 bp, Homo sapien
tgacgaaaggtcccatcttcagtgc

SEQ ID NO: 1189665 - DNA, 25 bp, Homo sapien
gacgaaaggtcccatcttcagtgca

SEQ ID NO: 1189666 - DNA, 25 bp, Homo sapien
acgaaaggtcccatcttcagtgcaa

SEQ ID NO: 1189667 - DNA, 25 bp, Homo sapien
cgaaaggtcccatcttcagtgcaag

SEQ ID NO: 1189668 - DNA, 25 bp, Homo sapien
cgccgggaggaagctgtgtgcacat

SEQ ID NO: 1189669 - DNA, 25 bp, Homo sapien
gccgggaggaagctgtgtgcacata

SEQ ID NO: 1189670 - DNA, 25 bp, Homo sapien
ccgggaggaagctgtgtgcacatac

SEQ ID NO: 1189671 - DNA, 25 bp, Homo sapien
ccgccgggaggaagctgtgtgcaca

SEQ ID NO: 1189672 - DNA, 25 bp, Homo sapien
tggggtccaataacctgaggagtca

SEQ ID NO: 1189673 - DNA, 25 bp, Homo sapien
tctggggtccaataacctgaggagt

SEQ ID NO: 1189674 - DNA, 25 bp, Homo sapien
ggtccaataacctgaggagtcacac

SEQ ID NO: 1189675 - DNA, 25 bp, Homo sapien
cctcctctggggtccaataacctga

SEQ ID NO: 1189676 - DNA, 25 bp, Homo sapien
tctctcagataactgatttttcccc

SEQ ID NO: 1189677 - DNA, 25 bp, Homo sapien
ctctctcagataactgatttttccc

SEQ ID NO: 1189678 - DNA, 25 bp, Homo sapien
aagcttggctcgcagggctgatcca

SEQ ID NO: 1189679 - DNA, 25 bp, Homo sapien
catgaagaaggaagtgacccacagg

SEQ ID NO: 1189680 - DNA, 25 bp, Homo sapien
tgtcaaagaggacctgcgaggactc

SEQ ID NO: 1189681 - DNA, 25 bp, Homo sapien
ggatcgcggagaacctggtacctca

SEQ ID NO: 1189682 - DNA, 25 bp, Homo sapien
gaacttggtactgatacatctgtcc

SEQ ID NO: 1189683 - DNA, 25 bp, Homo sapien
tgacaccttcccatctccacaataa

SEQ ID NO: 1189684 - DNA, 25 bp, Homo sapien
tccatgaatgtggttcagaggaggc

SEQ ID NO: 1189685 - DNA, 25 bp, Homo sapien
atctccacaataaggagctccatga

SEQ ID NO: 1189686 - DNA, 25 bp, Homo sapien
tacacagttgaaaccttcctccagc

SEQ ID NO: 1189687 - DNA, 25 bp, Homo sapien
gagcagccatctccgctcacaaggt

SEQ ID NO: 1189688 - DNA, 25 bp, Homo sapien
agctcacacaccttggagcagccat

SEQ ID NO: 1189689 - DNA, 25 bp, Homo sapien
aaggtctccatcatcacactcttct

SEQ ID NO: 1189690 - DNA, 25 bp, Homo sapien
catacatgtagcaaaggcttggctc

SEQ ID NO: 1189691 - DNA, 25 bp, Homo sapien
tagatgccacagtctacaatgctgg

SEQ ID NO: 1189692 - DNA, 25 bp, Homo sapien
taagcccgggtagcccattgatcca

SEQ ID NO: 1189693 - DNA, 25 bp, Homo sapien
tcttcatgagaggagtaagcccggg

SEQ ID NO: 1189694 - DNA, 25 bp, Homo sapien
tttgagccaaacctcatcctctttc

SEQ ID NO: 1189695 - DNA, 25 bp, Homo sapien
taaatctggatggtatgatgtgcaa

SEQ ID NO: 1189696 - DNA, 25 bp, Homo sapien
ggctgttcactcctgtcatcctgag

SEQ ID NO: 1189697 - DNA, 25 bp, Homo sapien
ctctttcttcaggctaccttctggc

SEQ ID NO: 1189698 - DNA, 25 bp, Homo sapien
cctttggtgggatccttatggtcaa

SEQ ID NO: 1189699 - DNA, 25 bp, Homo sapien
tattcttttttgcatcggaaagggc

SEQ ID NO: 1189700 - DNA, 25 bp, Homo sapien
tctgccccgggtccattatgtcctt

SEQ ID NO: 1189701 - DNA, 25 bp, Homo sapien
tctgatcctggcttaaacattaggg

SEQ ID NO: 1189702 - DNA, 25 bp, Homo sapien
aatgtgagcgtcagatttattattt

SEQ ID NO: 1189703 - DNA, 25 bp, Homo sapien
tgtggttttgtcagttataagaaaa

SEQ ID NO: 1189704 - DNA, 25 bp, Homo sapien
gtgtggttttgtcagttataagaaa

SEQ ID NO: 1189705 - DNA, 25 bp, Homo sapien
tgtgtggttttgtcagttataagaa

SEQ ID NO: 1189706 - DNA, 25 bp, Homo sapien
aaagatgtaagaatgtacaataaac

SEQ ID NO: 1189707 - DNA, 25 bp, Homo sapien
tcacaatgtgtatgcgtatatatat

SEQ ID NO: 1189708 - DNA, 25 bp, Homo sapien
ataaacaatgaggtttaaatatgcc

SEQ ID NO: 1189709 - DNA, 25 bp, Homo sapien
tggagatacccatactaaagaaaaa

SEQ ID NO: 1189710 - DNA, 25 bp, Homo sapien
ccctgcccacctttgtatggctaaa

SEQ ID NO: 1189711 - DNA, 25 bp, Homo sapien
tgcccacctttgtatggctaaaacc

SEQ ID NO: 1189712 - DNA, 25 bp, Homo sapien
ttcttctgatgtttgagcccctgcc

SEQ ID NO: 1189713 - DNA, 25 bp, Homo sapien
actttcttctgatgtttgagcccct

SEQ ID NO: 1189714 - DNA, 25 bp, Homo sapien
caaatctaatggatgaaggggggat

SEQ ID NO: 1189715 - DNA, 25 bp, Homo sapien
tccaaatctaatggatgaagggggg

SEQ ID NO: 1189716 - DNA, 25 bp, Homo sapien
gaaggggggatataaggcactgagc

SEQ ID NO: 1189717 - DNA, 25 bp, Homo sapien
ggggggatataaggcactgagctgc

SEQ ID NO: 1189718 - DNA, 25 bp, Homo sapien
gagtggttgcttccacggacatcgg

SEQ ID NO: 1189719 - DNA, 25 bp, Homo sapien
gatgctctccgggaactaggccatc

SEQ ID NO: 1189720 - DNA, 25 bp, Homo sapien
gacatcggtcaggtagagagtcact

SEQ ID NO: 1189721 - DNA, 25 bp, Homo sapien
gaactaggccatcagttgtcaaaaa

SEQ ID NO: 1189722 - DNA, 25 bp, Homo sapien
ttatgctggcatgacagtccatagg

SEQ ID NO: 1189723 - DNA, 25 bp, Homo sapien
tgctggcatgacagtccataggttc

SEQ ID NO: 1189724 - DNA, 25 bp, Homo sapien
ggattatgctggcatgacagtccat

SEQ ID NO: 1189725 - DNA, 25 bp, Homo sapien
ttgataatcagtggattatgctggc

SEQ ID NO: 1189726 - DNA, 25 bp, Homo sapien
gaccaatgcgggaggatgtccttag

SEQ ID NO: 1189727 - DNA, 25 bp, Homo sapien
cacagctgagatgccgacccgtggg

SEQ ID NO: 1189728 - DNA, 25 bp, Homo sapien
gatgattctgcccctcgtcctctga

SEQ ID NO: 1189729 - DNA, 25 bp, Homo sapien
tactgggagccgaaagaccaatgcg

SEQ ID NO: 1189730 - DNA, 25 bp, Homo sapien
aggtttccccagcttgcctgtatta

SEQ ID NO: 1189731 - DNA, 25 bp, Homo sapien
ccccttggtaacctacttcatcagg

SEQ ID NO: 1189732 - DNA, 25 bp, Homo sapien
gcctgtattacttggagcctgaatt

SEQ ID NO: 1189733 - DNA, 25 bp, Homo sapien
gggttgtgcccataaaattgcccta

SEQ ID NO: 1189734 - DNA, 25 bp, Homo sapien
tctgctttgtaggacaggaaccagg

SEQ ID NO: 1189735 - DNA, 25 bp, Homo sapien
gaggaccaatgctggtactttgagg

SEQ ID NO: 1189736 - DNA, 25 bp, Homo sapien
tgttgagaaccctactaactgggaa

SEQ ID NO: 1189737 - DNA, 25 bp, Homo sapien
tcttgggaggaccaatgctggtact

SEQ ID NO: 1189738 - DNA, 25 bp, Homo sapien
gttgagaaccagtaaggaggagcaa

SEQ ID NO: 1189739 - DNA, 25 bp, Homo sapien
ccatcttaggactggttgagaacca

SEQ ID NO: 1189740 - DNA, 25 bp, Homo sapien
tgagaaccagtaaggaggagcaatg

SEQ ID NO: 1189741 - DNA, 25 bp, Homo sapien
agagaaatagaaccatcttaggact

SEQ ID NO: 1189742 - DNA, 25 bp, Homo sapien
tgatcaagcagcaatgacggacagc

SEQ ID NO: 1189743 - DNA, 25 bp, Homo sapien
tgggcctatagaggtacagttcacc

SEQ ID NO: 1189744 - DNA, 25 bp, Homo sapien
tggcctgaagggcaaatcccctttg

SEQ ID NO: 1189745 - DNA, 25 bp, Homo sapien
tgatagcacacttcatgagacctgg

SEQ ID NO: 1189746 - DNA, 25 bp, Homo sapien
ctctctgcttgttagagcccccatg

SEQ ID NO: 1189747 - DNA, 25 bp, Homo sapien
tggtgatagtgttctttcaactcac

SEQ ID NO: 1189748 - DNA, 25 bp, Homo sapien
aacttggtcctggtgatagtgttct

SEQ ID NO: 1189749 - DNA, 25 bp, Homo sapien
tctgcttgttagagcccccatgttt

SEQ ID NO: 1189750 - DNA, 25 bp, Homo sapien
tcctgagtcaccctgttaatctaca

SEQ ID NO: 1189751 - DNA, 25 bp, Homo sapien
ttaattccgatctgtctcctgagtc

SEQ ID NO: 1189752 - DNA, 25 bp, Homo sapien
gggaattgaagactctctaaaggca

SEQ ID NO: 1189753 - DNA, 25 bp, Homo sapien
tagttgagaatacatgatcatgctc

SEQ ID NO: 1189754 - DNA, 25 bp, Homo sapien
catctctaagcaagtggaattctcc

SEQ ID NO: 1189755 - DNA, 25 bp, Homo sapien
tctctaagcaagtggaattctccca

SEQ ID NO: 1189756 - DNA, 25 bp, Homo sapien
ctgacatctctaagcaagtggaatt

SEQ ID NO: 1189757 - DNA, 25 bp, Homo sapien
tctaagcaagtggaattctcccaca

SEQ ID NO: 1189758 - DNA, 25 bp, Homo sapien
ctgaggtgacagcacgtttggtcag

SEQ ID NO: 1189759 - DNA, 25 bp, Homo sapien
tagtttcggttcttgcgtcaacaaa

SEQ ID NO: 1189760 - DNA, 25 bp, Homo sapien
tcttgtgatcacgaccaggattcta

SEQ ID NO: 1189761 - DNA, 25 bp, Homo sapien
tgacaccaactcctggctagctgct

SEQ ID NO: 1189762 - DNA, 25 bp, Homo sapien
ttgcttgccagaaggacccaattca

SEQ ID NO: 1189763 - DNA, 25 bp, Homo sapien
aaggcagctcacattctggtcccag

SEQ ID NO: 1189764 - DNA, 25 bp, Homo sapien
catagttcaccaaagacgggtcggg

SEQ ID NO: 1189765 - DNA, 25 bp, Homo sapien
cacaagagattgagcagcgtttcag

SEQ ID NO: 1189766 - DNA, 25 bp, Homo sapien
aacaccgcagtccacgggaaggcag

SEQ ID NO: 1189767 - DNA, 25 bp, Homo sapien
agagcgagggatggcagagaacttg

SEQ ID NO: 1189768 - DNA, 25 bp, Homo sapien
caagagcgagggatggcagagaact

SEQ ID NO: 1189769 - DNA, 25 bp, Homo sapien
aagagcgagggatggcagagaactt

SEQ ID NO: 1189770 - DNA, 25 bp, Homo sapien
ctccaggaaagagaagcacaagatg

SEQ ID NO: 1189771 - DNA, 25 bp, Homo sapien
agacatgtcagccatgggctcagtc

SEQ ID NO: 1189772 - DNA, 25 bp, Homo sapien
caagacatgtcagccatgggctcag

SEQ ID NO: 1189773 - DNA, 25 bp, Homo sapien
tcaagacatgtcagccatgggctca

SEQ ID NO: 1189774 - DNA, 25 bp, Homo sapien
cttcaagacatgtcagccatgggct

SEQ ID NO: 1189775 - DNA, 25 bp, Homo sapien
aggagcaagttggcattcagaataa

SEQ ID NO: 1189776 - DNA, 25 bp, Homo sapien
gaataatagggggagcatcacactc

SEQ ID NO: 1189777 - DNA, 25 bp, Homo sapien
ggagcaagttggcattcagaataat

SEQ ID NO: 1189778 - DNA, 25 bp, Homo sapien
gggagcatcacactccaacttgcag

SEQ ID NO: 1189779 - DNA, 25 bp, Homo sapien
cattcatatttgcagatggtgccca

SEQ ID NO: 1189780 - DNA, 25 bp, Homo sapien
catagtaccctggtttgcattcata

SEQ ID NO: 1189781 - DNA, 25 bp, Homo sapien
cactttctgccacatagtaccctgg

SEQ ID NO: 1189782 - DNA, 25 bp, Homo sapien
agatggtgcccacgtcgtggttgtc

SEQ ID NO: 1189783 - DNA, 25 bp, Homo sapien
tataacacctgagacgctgctaact

SEQ ID NO: 1189784 - DNA, 25 bp, Homo sapien
cacagagttggattcaggtaacaca

SEQ ID NO: 1189785 - DNA, 25 bp, Homo sapien
ggcctgcaattgtaaactggactga

SEQ ID NO: 1189786 - DNA, 25 bp, Homo sapien
tatccacagctcataagtgtctgca

SEQ ID NO: 1189787 - DNA, 25 bp, Homo sapien
tattctgcagatatctgaggtggct

SEQ ID NO: 1189788 - DNA, 25 bp, Homo sapien
tctgcagatatctgaggtggctgct

SEQ ID NO: 1189789 - DNA, 25 bp, Homo sapien
ttctgcagatatctgaggtggctgc

SEQ ID NO: 1189790 - DNA, 25 bp, Homo sapien
ctattctgcagatatctgaggtggc

SEQ ID NO: 1189791 - DNA, 25 bp, Homo sapien
ccttggagttacaattctgcttaca

SEQ ID NO: 1189792 - DNA, 25 bp, Homo sapien
aacacacttactttagcttcccagg

SEQ ID NO: 1189793 - DNA, 25 bp, Homo sapien
gcttcccaggaaatcaggttaatga

SEQ ID NO: 1189794 - DNA, 25 bp, Homo sapien
tctcagagacgtgttaaaatctacc

SEQ ID NO: 1189795 - DNA, 25 bp, Homo sapien
tataattaaccagtaaatgaggaga

SEQ ID NO: 1189796 - DNA, 25 bp, Homo sapien
tgactacattaccttctttagaagt

SEQ ID NO: 1189797 - DNA, 25 bp, Homo sapien
tctcaataatgccagagcctgtata

SEQ ID NO: 1189798 - DNA, 25 bp, Homo sapien
tcttcaagggagaactagacccagt

SEQ ID NO: 1189799 - DNA, 25 bp, Homo sapien
tgccaaatatgcccaggttacaccc

SEQ ID NO: 1189800 - DNA, 25 bp, Homo sapien
caaatatgcccaggttacaccccaa

SEQ ID NO: 1189801 - DNA, 25 bp, Homo sapien
gccaaatatgcccaggttacacccc

SEQ ID NO: 1189802 - DNA, 25 bp, Homo sapien
ctgccaaatatgcccaggttacacc

SEQ ID NO: 1189803 - DNA, 25 bp, Homo sapien
ctctctcacatcaagttcaacagct

SEQ ID NO: 1189804 - DNA, 25 bp, Homo sapien
ttggccaggacgatcatattttgac

SEQ ID NO: 1189805 - DNA, 25 bp, Homo sapien
gcttggccaggacgatcatattttg

SEQ ID NO: 1189806 - DNA, 25 bp, Homo sapien
ttgcttggccaggacgatcatattt

SEQ ID NO: 1189807 - DNA, 25 bp, Homo sapien
gccaggacgatcatattttgacttc

SEQ ID NO: 1189808 - DNA, 25 bp, Homo sapien
agcaggcaataccactgacagcagg

SEQ ID NO: 1189809 - DNA, 25 bp, Homo sapien
ggagaaagcaggcaataccactgac

SEQ ID NO: 1189810 - DNA, 25 bp, Homo sapien
gaaagcaggcaataccactgacagc

SEQ ID NO: 1189811 - DNA, 25 bp, Homo sapien
gcaggcaataccactgacagcaggg

SEQ ID NO: 1189812 - DNA, 25 bp, Homo sapien
gccttgctcccagattccaccttcc

SEQ ID NO: 1189813 - DNA, 25 bp, Homo sapien
agggggtggctcacacaccacagga

SEQ ID NO: 1189814 - DNA, 25 bp, Homo sapien
tcctggttacagttgagcacacact

SEQ ID NO: 1189815 - DNA, 25 bp, Homo sapien
ggctgaagccattggtacattcata

SEQ ID NO: 1189816 - DNA, 25 bp, Homo sapien
attctcacacaacttaaactcctgg

SEQ ID NO: 1189817 - DNA, 25 bp, Homo sapien
atcccatatccttgttcacatttgt

SEQ ID NO: 1189818 - DNA, 25 bp, Homo sapien
gattctcacacaacttaaactcctg

SEQ ID NO: 1189819 - DNA, 25 bp, Homo sapien
gttcacatttgtactccacagaatt

SEQ ID NO: 1189820 - DNA, 25 bp, Homo sapien
cagagtgtcagcagtgatattctca

SEQ ID NO: 1189821 - DNA, 25 bp, Homo sapien
tctcaggtagcatcacggggtcact

SEQ ID NO: 1189822 - DNA, 25 bp, Homo sapien
tgtcagcagtgatattctcaggtag

SEQ ID NO: 1189823 - DNA, 25 bp, Homo sapien
gagtgtcagcagtgatattctcagg

SEQ ID NO: 1189824 - DNA, 25 bp, Homo sapien
aaagaagacctttccatgactcatg

SEQ ID NO: 1189825 - DNA, 25 bp, Homo sapien
gatgcctagagggaatgattccatg

SEQ ID NO: 1189826 - DNA, 25 bp, Homo sapien
ttgtctactctcctccagtgatggg

SEQ ID NO: 1189827 - DNA, 25 bp, Homo sapien
tccagtgatgggacacttgatgcct

SEQ ID NO: 1189828 - DNA, 25 bp, Homo sapien
gagaatggggatctgcaatattttt

SEQ ID NO: 1189829 - DNA, 25 bp, Homo sapien
cgtactgctaaaagctaaaactcct

SEQ ID NO: 1189830 - DNA, 25 bp, Homo sapien
tctggagtcgtactgctaaaagcta

SEQ ID NO: 1189831 - DNA, 25 bp, Homo sapien
caatatttttctggagtcgtactgc

SEQ ID NO: 1189832 - DNA, 25 bp, Homo sapien
catgactggatgcagtggactaaga

SEQ ID NO: 1189833 - DNA, 25 bp, Homo sapien
ctcacatgactggatgcagtggact

SEQ ID NO: 1189834 - DNA, 25 bp, Homo sapien
attgacgccggccagtgcacacaat

SEQ ID NO: 1189835 - DNA, 25 bp, Homo sapien
actaagacggggtctgggtgccatt

SEQ ID NO: 1189836 - DNA, 25 bp, Homo sapien
catggatggagtgaacactcacttc

SEQ ID NO: 1189837 - DNA, 25 bp, Homo sapien
tcttggcttaagtagaatctaggat

SEQ ID NO: 1189838 - DNA, 25 bp, Homo sapien
acttcaattattaccccaggagatg

SEQ ID NO: 1189839 - DNA, 25 bp, Homo sapien
ctctatgctgggaagaaagtacact

SEQ ID NO: 1189840 - DNA, 25 bp, Homo sapien
taatatcttgtttcaatatgaccct

SEQ ID NO: 1189841 - DNA, 25 bp, Homo sapien
cattccttaggcagtatcactgcta

SEQ ID NO: 1189842 - DNA, 25 bp, Homo sapien
cactgctagtacgttatattatttg

SEQ ID NO: 1189843 - DNA, 25 bp, Homo sapien
caaagttacatgtgtcattccttag

SEQ ID NO: 1189844 - DNA, 25 bp, Homo sapien
gggagcagcagacttttagactgaa

SEQ ID NO: 1189845 - DNA, 25 bp, Homo sapien
tgtttctgtagctaagcttggagag

SEQ ID NO: 1189846 - DNA, 25 bp, Homo sapien
ggctatgacattcctgcaaatccta

SEQ ID NO: 1189847 - DNA, 25 bp, Homo sapien
atggtatgaggcacatacaaaaaag

SEQ ID NO: 1189848 - DNA, 25 bp, Homo sapien
gctgggcccacaggacatggaacca

SEQ ID NO: 1189849 - DNA, 25 bp, Homo sapien
acatggaaccaggtcagaggcaatc

SEQ ID NO: 1189850 - DNA, 25 bp, Homo sapien
acagggttggcgctcaggctgggcc

SEQ ID NO: 1189851 - DNA, 25 bp, Homo sapien
tgggcccacaggacatggaaccagg

SEQ ID NO: 1189852 - DNA, 25 bp, Homo sapien
tagagggtcaaggactaatatgtat

SEQ ID NO: 1189853 - DNA, 25 bp, Homo sapien
gaaagccgctgacatactagagggt

SEQ ID NO: 1189854 - DNA, 25 bp, Homo sapien
attttcctattcctctggaaagccg

SEQ ID NO: 1189855 - DNA, 25 bp, Homo sapien
atgctgaactctttgcaccttctaa

SEQ ID NO: 1189856 - DNA, 25 bp, Homo sapien
aggatgcttgtctgtgtatctaatc

SEQ ID NO: 1189857 - DNA, 25 bp, Homo sapien
tgtctgtgtatctaatccactcatc

SEQ ID NO: 1189858 - DNA, 25 bp, Homo sapien
acccatatggaacctattctctgtg

SEQ ID NO: 1189859 - DNA, 25 bp, Homo sapien
tatctaatccactcatcactgattg

SEQ ID NO: 1189860 - DNA, 25 bp, Homo sapien
ggccacatcccacataattgaaaca

SEQ ID NO: 1189861 - DNA, 25 bp, Homo sapien
cataattgaaacatgaggcggtaca

SEQ ID NO: 1189862 - DNA, 25 bp, Homo sapien
tgcacaaggccacatcccacataat

SEQ ID NO: 1189863 - DNA, 25 bp, Homo sapien
atgaggcggtacatgctctgtctgg

SEQ ID NO: 1189864 - DNA, 25 bp, Homo sapien
tctaagtacacagcaatgcttctta

SEQ ID NO: 1189865 - DNA, 25 bp, Homo sapien
tgacacagcaaagtctgtgccgtgg

SEQ ID NO: 1189866 - DNA, 25 bp, Homo sapien
ttgccaggcttccatagtaccaatg

SEQ ID NO: 1189867 - DNA, 25 bp, Homo sapien
catcaggtggactcattgccaggct

SEQ ID NO: 1189868 - DNA, 25 bp, Homo sapien
gactgcgcgtctacttgtgtggcct

SEQ ID NO: 1189869 - DNA, 25 bp, Homo sapien
cacattatgatgctccgcaggtagc

SEQ ID NO: 1189870 - DNA, 25 bp, Homo sapien
caatgaagatacacatcctgctgga

SEQ ID NO: 1189871 - DNA, 25 bp, Homo sapien
tgtacagagtatctcctggaagggc

SEQ ID NO: 1189872 - DNA, 25 bp, Homo sapien
ccatggagaagagcttaggactgga

SEQ ID NO: 1189873 - DNA, 25 bp, Homo sapien
agttaaatacctaatccagattttg

SEQ ID NO: 1189874 - DNA, 25 bp, Homo sapien
aagatgtgaacaggagttaaatacc

SEQ ID NO: 1189875 - DNA, 25 bp, Homo sapien
ggagctggctccacaacatctaggc

SEQ ID NO: 1189876 - DNA, 25 bp, Homo sapien
gatagtgtcacaccaaccatctgct

SEQ ID NO: 1189877 - DNA, 25 bp, Homo sapien
ggctcggttgttgatagtgtcacac

SEQ ID NO: 1189878 - DNA, 25 bp, Homo sapien
ccccgtcatagtggcagtaggctcg

SEQ ID NO: 1189879 - DNA, 25 bp, Homo sapien
aagagcagcagtctcccccgtcata

SEQ ID NO: 1189880 - DNA, 25 bp, Homo sapien
cacagtcagcagcaaatggaatgac

SEQ ID NO: 1189881 - DNA, 25 bp, Homo sapien
gcaggtgcactcatccaggtcacag

SEQ ID NO: 1189882 - DNA, 25 bp, Homo sapien
gtcacagtcagcagcaaatggaatg

SEQ ID NO: 1189883 - DNA, 25 bp, Homo sapien
ttggggtcccggcaggtgcactcat

SEQ ID NO: 1189884 - DNA, 25 bp, Homo sapien
gcctctctttcttactgcctctgag

SEQ ID NO: 1189885 - DNA, 25 bp, Homo sapien
ggcctctctttcttactgcctctga

SEQ ID NO: 1189886 - DNA, 25 bp, Homo sapien
tcctccttcttccatttcatgattg

SEQ ID NO: 1189887 - DNA, 25 bp, Homo sapien
tccttcttccatttcatgattgttc

SEQ ID NO: 1189888 - DNA, 25 bp, Homo sapien
ttcttccatttcatgattgttcttc

SEQ ID NO: 1189889 - DNA, 25 bp, Homo sapien
cctccttcttccatttcatgattgt

SEQ ID NO: 1189890 - DNA, 25 bp, Homo sapien
tgcagaaaatcctaggtctcaccga

SEQ ID NO: 1189891 - DNA, 25 bp, Homo sapien
gaaaaagagccagttgagagcagac

SEQ ID NO: 1189892 - DNA, 25 bp, Homo sapien
taatcctggtgatcagagaatgggc

SEQ ID NO: 1189893 - DNA, 25 bp, Homo sapien
cctacttgggctacttgatgaacta

SEQ ID NO: 1189894 - DNA, 25 bp, Homo sapien
gacaaagtaggattctccaaggcag

SEQ ID NO: 1189895 - DNA, 25 bp, Homo sapien
tcccagagcagtggtgaattgcaga

SEQ ID NO: 1189896 - DNA, 25 bp, Homo sapien
ccacatgggtggataagagtagcag

SEQ ID NO: 1189897 - DNA, 25 bp, Homo sapien
gagttgctcaaaacatcaggtccca

SEQ ID NO: 1189898 - DNA, 25 bp, Homo sapien
caatacagtagatcagctcctttca

SEQ ID NO: 1189899 - DNA, 25 bp, Homo sapien
catccccttgggtgttaactaatgc

SEQ ID NO: 1189900 - DNA, 25 bp, Homo sapien
tacaggaagtgccaagttcaatgcc

SEQ ID NO: 1189901 - DNA, 25 bp, Homo sapien
gctagttgttagagccagctagccc

SEQ ID NO: 1189902 - DNA, 25 bp, Homo sapien
gcgtagccaaaagttcatagaacac

SEQ ID NO: 1189903 - DNA, 25 bp, Homo sapien
taaaacaatgcatatcccaggacag

SEQ ID NO: 1189904 - DNA, 25 bp, Homo sapien
gagagagaaacattaaccagcctat

SEQ ID NO: 1189905 - DNA, 25 bp, Homo sapien
tatgtgagcctgcacgtgtgtgaga

SEQ ID NO: 1189906 - DNA, 25 bp, Homo sapien
ttagctccagctatactagggaaag

SEQ ID NO: 1189907 - DNA, 25 bp, Homo sapien
gtactccctggatgagcacacatga

SEQ ID NO: 1189908 - DNA, 25 bp, Homo sapien
caagatctccctgagctaggattcc

SEQ ID NO: 1189909 - DNA, 25 bp, Homo sapien
caaatgggccctaaaagactcagtc

SEQ ID NO: 1189910 - DNA, 25 bp, Homo sapien
tttgcaaatcgtttctctgatgacc

SEQ ID NO: 1189911 - DNA, 25 bp, Homo sapien
tcacagggattctgtgtagggaagc

SEQ ID NO: 1189912 - DNA, 25 bp, Homo sapien
gtagggaagcaccactgattgcagt

SEQ ID NO: 1189913 - DNA, 25 bp, Homo sapien
gtcactgcccatccagtcacaggga

SEQ ID NO: 1189914 - DNA, 25 bp, Homo sapien
cttggacaggtaaggcttggccgat

SEQ ID NO: 1189915 - DNA, 25 bp, Homo sapien
tggacaggtaaggcttggccgatgt

SEQ ID NO: 1189916 - DNA, 25 bp, Homo sapien
ttggacaggtaaggcttggccgatg

SEQ ID NO: 1189917 - DNA, 25 bp, Homo sapien
aatgaagtaggaaagaggagggatc

SEQ ID NO: 1189918 - DNA, 25 bp, Homo sapien
agaggagggatccatctgggttggt

SEQ ID NO: 1189919 - DNA, 25 bp, Homo sapien
atgaagtaggaaagaggagggatcc

SEQ ID NO: 1189920 - DNA, 25 bp, Homo sapien
aagaggagggatccatctgggttgg

SEQ ID NO: 1189921 - DNA, 25 bp, Homo sapien
caaagagatctagcaccataaggcc

SEQ ID NO: 1189922 - DNA, 25 bp, Homo sapien
ctacagcgagatcaaaccctacgga

SEQ ID NO: 1189923 - DNA, 25 bp, Homo sapien
gagtatcccctacaacgactatggg

SEQ ID NO: 1189924 - DNA, 25 bp, Homo sapien
accctacggacttgactgggcggag

SEQ ID NO: 1189925 - DNA, 25 bp, Homo sapien
tcctgtattcagagtcaaatccagt

SEQ ID NO: 1189926 - DNA, 25 bp, Homo sapien
tgagagtgtcttccttcatgggtct

SEQ ID NO: 1189927 - DNA, 25 bp, Homo sapien
tctatgacaccagaagtgagtgcca

SEQ ID NO: 1189928 - DNA, 25 bp, Homo sapien
tctgcaccagtgacatggtgttgcc

SEQ ID NO: 1189929 - DNA, 25 bp, Homo sapien
ctcttagcccttgactttgctgctg

SEQ ID NO: 1189930 - DNA, 25 bp, Homo sapien
ttagaaatgcagggaggtcatctct

SEQ ID NO: 1189931 - DNA, 25 bp, Homo sapien
tactcttagcccttgactttgctgc

SEQ ID NO: 1189932 - DNA, 25 bp, Homo sapien
tcactttactcttagcccttgactt

SEQ ID NO: 1189933 - DNA, 25 bp, Homo sapien
tttggaaggatgatgtaagttcttt

SEQ ID NO: 1189934 - DNA, 25 bp, Homo sapien
ttttggaaggatgatgtaagttctt

SEQ ID NO: 1189935 - DNA, 25 bp, Homo sapien
ttggaaggatgatgtaagttctttg

SEQ ID NO: 1189936 - DNA, 25 bp, Homo sapien
cattctagccgtgatgtcattagca

SEQ ID NO: 1189937 - DNA, 25 bp, Homo sapien
tagatcctaagctgtctccaaaagc

SEQ ID NO: 1189938 - DNA, 25 bp, Homo sapien
ggagagagattcttaagcagcctca

SEQ ID NO: 1189939 - DNA, 25 bp, Homo sapien
aatgaactgcttctgtcattctagc

SEQ ID NO: 1189940 - DNA, 25 bp, Homo sapien
tcccttcttgacaagaaggtgaact

SEQ ID NO: 1189941 - DNA, 25 bp, Homo sapien
tgtctacaggggtgttgccttcttc

SEQ ID NO: 1189942 - DNA, 25 bp, Homo sapien
gtaggggttcatcccattgaatggg

SEQ ID NO: 1189943 - DNA, 25 bp, Homo sapien
tctggaggacagcattagatctggc

SEQ ID NO: 1189944 - DNA, 25 bp, Homo sapien
tccagcattggttgcttcttgataa

SEQ ID NO: 1189945 - DNA, 25 bp, Homo sapien
caggatacgtgcaaaattccagcat

SEQ ID NO: 1189946 - DNA, 25 bp, Homo sapien
tcttgataacattcgcttcttactg

SEQ ID NO: 1189947 - DNA, 25 bp, Homo sapien
gcaaaattccagcattggttgcttc

SEQ ID NO: 1189948 - DNA, 25 bp, Homo sapien
catgtttatagatgttgggttctgg

SEQ ID NO: 1189949 - DNA, 25 bp, Homo sapien
cagcaggtgaatgccaatagattgg

SEQ ID NO: 1189950 - DNA, 25 bp, Homo sapien
taccaccggaagctgtgtacgacag

SEQ ID NO: 1189951 - DNA, 25 bp, Homo sapien
tctaaaatccgaatgataccaccgg

SEQ ID NO: 1189952 - DNA, 25 bp, Homo sapien
taagaagctggagattgctcattgt

SEQ ID NO: 1189953 - DNA, 25 bp, Homo sapien
aagaagctggagattgctcattgta

SEQ ID NO: 1189954 - DNA, 25 bp, Homo sapien
ttaagaagctggagattgctcattg

SEQ ID NO: 1189955 - DNA, 25 bp, Homo sapien
agaagctggagattgctcattgtac

SEQ ID NO: 1189956 - DNA, 25 bp, Homo sapien
caaccttgaatccagatggactcag

SEQ ID NO: 1189957 - DNA, 25 bp, Homo sapien
aatccagatggactcagtcatctga

SEQ ID NO: 1189958 - DNA, 25 bp, Homo sapien
gccgttattcgaacacaaccttgaa

SEQ ID NO: 1189959 - DNA, 25 bp, Homo sapien
atcctagccccagccgttattcgaa

SEQ ID NO: 1189960 - DNA, 25 bp, Homo sapien
ggtttattccgcagaggcggcttat

SEQ ID NO: 1189961 - DNA, 25 bp, Homo sapien
cagcataatagggtaaaaccacagc

SEQ ID NO: 1189962 - DNA, 25 bp, Homo sapien
tcttcagtcaggtttattccgcaga

SEQ ID NO: 1189963 - DNA, 25 bp, Homo sapien
gaggcggcttataaagtcactcttt

SEQ ID NO: 1189964 - DNA, 25 bp, Homo sapien
caaagctgacagctggcaagccagt

SEQ ID NO: 1189965 - DNA, 25 bp, Homo sapien
aagtaccaaagtgcctataccaaag

SEQ ID NO: 1189966 - DNA, 25 bp, Homo sapien
ataggacagtgtggctgagccctca

SEQ ID NO: 1189967 - DNA, 25 bp, Homo sapien
gaaaaactgttgtaagactcagaac

SEQ ID NO: 1189968 - DNA, 25 bp, Homo sapien
tcttttgggatgagtacttcatgtc

SEQ ID NO: 1189969 - DNA, 25 bp, Homo sapien
cagatgtgagaatctgaacttgaca

SEQ ID NO: 1189970 - DNA, 25 bp, Homo sapien
gaatctgaacttgacatcattggag

SEQ ID NO: 1189971 - DNA, 25 bp, Homo sapien
ttcacatcttttgggatgagtactt

SEQ ID NO: 1189972 - DNA, 25 bp, Homo sapien
gaagactaaattggttcctctccca

SEQ ID NO: 1189973 - DNA, 25 bp, Homo sapien
tcatcctctaaggtgacgctcaggc

SEQ ID NO: 1189974 - DNA, 25 bp, Homo sapien
gaaaggagtaaaccacctacatggc

SEQ ID NO: 1189975 - DNA, 25 bp, Homo sapien
taagcagcggtaaatcagagtcaaa

SEQ ID NO: 1189976 - DNA, 25 bp, Homo sapien
tgtaaaagcccctttactgactgaa

SEQ ID NO: 1189977 - DNA, 25 bp, Homo sapien
gctggaagctttgggcacatttagt

SEQ ID NO: 1189978 - DNA, 25 bp, Homo sapien
gaagctttgggcacatttagttgta

SEQ ID NO: 1189979 - DNA, 25 bp, Homo sapien
gctttgggcacatttagttgtaaaa

SEQ ID NO: 1189980 - DNA, 25 bp, Homo sapien
ggcccctcggtttgcatagccctca

SEQ ID NO: 1189981 - DNA, 25 bp, Homo sapien
tcggtttgcatagccctcattactt

SEQ ID NO: 1189982 - DNA, 25 bp, Homo sapien
gccctcattacttcccaggataaat

SEQ ID NO: 1189983 - DNA, 25 bp, Homo sapien
gcatagccctcattacttcccagga

SEQ ID NO: 1189984 - DNA, 25 bp, Homo sapien
ggtatcgatgaggtatggaggacag

SEQ ID NO: 1189985 - DNA, 25 bp, Homo sapien
cgatgaggtatggaggacagcctcc

SEQ ID NO: 1189986 - DNA, 25 bp, Homo sapien
tatcgatgaggtatggaggacagcc

SEQ ID NO: 1189987 - DNA, 25 bp, Homo sapien
tcgatgaggtatggaggacagcctc

SEQ ID NO: 1189988 - DNA, 25 bp, Homo sapien
aggtgcagcgagggatctgcaccca

SEQ ID NO: 1189989 - DNA, 25 bp, Homo sapien
gaggtgcagcgagggatctgcaccc

SEQ ID NO: 1189990 - DNA, 25 bp, Homo sapien
ggtgcagcgagggatctgcacccac

SEQ ID NO: 1189991 - DNA, 25 bp, Homo sapien
taaaaatcctacttaatggagaaca

SEQ ID NO: 1189992 - DNA, 25 bp, Homo sapien
tcctacttaatggagaacagggttc

SEQ ID NO: 1189993 - DNA, 25 bp, Homo sapien
agctaggactaaagatgacagtttg

SEQ ID NO: 1189994 - DNA, 25 bp, Homo sapien
gagaacagggttcaatacctatacc

SEQ ID NO: 1189995 - DNA, 25 bp, Homo sapien
gctggccacctcagaaaatacccta

SEQ ID NO: 1189996 - DNA, 25 bp, Homo sapien
tggccacctcagaaaataccctaga

SEQ ID NO: 1189997 - DNA, 25 bp, Homo sapien
cctgagtgtatcagggtttcagcct

SEQ ID NO: 1189998 - DNA, 25 bp, Homo sapien
cctcagaaaataccctagatgggag

SEQ ID NO: 1189999 - DNA, 25 bp, Homo sapien
tattcccacctctggagtgatcaga

SEQ ID NO: 1190000 - DNA, 25 bp, Homo sapien
aaagggagacaatgcttctagggac

SEQ ID NO: 1190001 - DNA, 25 bp, Homo sapien
aaatgaagtaagctggaagatgtcc

SEQ ID NO: 1190002 - DNA, 25 bp, Homo sapien
ttctagggacaaaagagcaggctgg

SEQ ID NO: 1190003 - DNA, 25 bp, Homo sapien
cttttcatatccctttgtacctgta

SEQ ID NO: 1190004 - DNA, 25 bp, Homo sapien
taatcttttcatatccctttgtacc

SEQ ID NO: 1190005 - DNA, 25 bp, Homo sapien
cacaaacacccacataatcttttca

SEQ ID NO: 1190006 - DNA, 25 bp, Homo sapien
catatccctttgtacctgtaaggtg

SEQ ID NO: 1190007 - DNA, 25 bp, Homo sapien
taaccgtgagactatactgagtgac

SEQ ID NO: 1190008 - DNA, 25 bp, Homo sapien
aaccgtgagactatactgagtgaca

SEQ ID NO: 1190009 - DNA, 25 bp, Homo sapien
tatagtacttaacatgtgcctgcca

SEQ ID NO: 1190010 - DNA, 25 bp, Homo sapien
tgccactataagcagttaacacgtg

SEQ ID NO: 1190011 - DNA, 25 bp, Homo sapien
tattatcgttgttctacatgggagg

SEQ ID NO: 1190012 - DNA, 25 bp, Homo sapien
tagtatccaataaggtgaatggcat

SEQ ID NO: 1190013 - DNA, 25 bp, Homo sapien
tagtagacaacacatttcccctggg

SEQ ID NO: 1190014 - DNA, 25 bp, Homo sapien
taacaaatgggtgacaattgcagcc

SEQ ID NO: 1190015 - DNA, 25 bp, Homo sapien
cacaggaggcattagatcagggttc

SEQ ID NO: 1190016 - DNA, 25 bp, Homo sapien
gaatgtaggtttagacccagagcca

SEQ ID NO: 1190017 - DNA, 25 bp, Homo sapien
cccaggggaatgaacttgttcaggc

SEQ ID NO: 1190018 - DNA, 25 bp, Homo sapien
aatgaacttgttcaggcatcagtga

SEQ ID NO: 1190019 - DNA, 25 bp, Homo sapien
catcagtgaagtccatttggaaaaa

SEQ ID NO: 1190020 - DNA, 25 bp, Homo sapien
acttgttcaggcatcagtgaagtcc

SEQ ID NO: 1190021 - DNA, 25 bp, Homo sapien
aacactcttggtaatgtgggctaca

SEQ ID NO: 1190022 - DNA, 25 bp, Homo sapien
tgtttggtcagctccgtcctttgga

SEQ ID NO: 1190023 - DNA, 25 bp, Homo sapien
gacgtctgtgagcaaataggaccac

SEQ ID NO: 1190024 - DNA, 25 bp, Homo sapien
tacttctacgctcaggactgctgcc

SEQ ID NO: 1190025 - DNA, 25 bp, Homo sapien
tgaagccacagagactccaatgtag

SEQ ID NO: 1190026 - DNA, 25 bp, Homo sapien
ggcagaatttagctgatgattttgt

SEQ ID NO: 1190027 - DNA, 25 bp, Homo sapien
gactgacatgagtggaaatttgttt

SEQ ID NO: 1190028 - DNA, 25 bp, Homo sapien
ctcccagagcctgatgagctttgca

SEQ ID NO: 1190029 - DNA, 25 bp, Homo sapien
aaatgggtaaaaatgtcactatgcc

SEQ ID NO: 1190030 - DNA, 25 bp, Homo sapien
gggtggctatattctgaacagcaaa

SEQ ID NO: 1190031 - DNA, 25 bp, Homo sapien
ggaatagagctaaagggtggctata

SEQ ID NO: 1190032 - DNA, 25 bp, Homo sapien
tatttataccattccagtgacgtct

SEQ ID NO: 1190033 - DNA, 25 bp, Homo sapien
tagctggttcccacatatcactgct

SEQ ID NO: 1190034 - DNA, 25 bp, Homo sapien
taagcacctttgcattcggaacgaa

SEQ ID NO: 1190035 - DNA, 25 bp, Homo sapien
tgagggcatgacgacttagctggtt

SEQ ID NO: 1190036 - DNA, 25 bp, Homo sapien
ggctacatgaaggatccagtacata

SEQ ID NO: 1190037 - DNA, 25 bp, Homo sapien
acaaacacagacatgttaatcaatt

SEQ ID NO: 1190038 - DNA, 25 bp, Homo sapien
cagacatgttaatcaattccttcat

SEQ ID NO: 1190039 - DNA, 25 bp, Homo sapien
atgttaatcaattccttcatgtttc

SEQ ID NO: 1190040 - DNA, 25 bp, Homo sapien
aacacagacatgttaatcaattcct

SEQ ID NO: 1190041 - DNA, 25 bp, Homo sapien
gcaccccactcaatcacaaccccca

SEQ ID NO: 1190042 - DNA, 25 bp, Homo sapien
caccccactcaatcacaacccccat

SEQ ID NO: 1190043 - DNA, 25 bp, Homo sapien
tgcaccccactcaatcacaaccccc

SEQ ID NO: 1190044 - DNA, 25 bp, Homo sapien
ctgcaccccactcaatcacaacccc

SEQ ID NO: 1190045 - DNA, 25 bp, Homo sapien
ttgagccttttgtcactttccctgg

SEQ ID NO: 1190046 - DNA, 25 bp, Homo sapien
aggtcctggcgggagtaaccagcat

SEQ ID NO: 1190047 - DNA, 25 bp, Homo sapien
gaagagctgccgctcaatttccaac

SEQ ID NO: 1190048 - DNA, 25 bp, Homo sapien
gctacagcccatctttggctggtga

SEQ ID NO: 1190049 - DNA, 25 bp, Homo sapien
gactgtagttcactttctcctggga

SEQ ID NO: 1190050 - DNA, 25 bp, Homo sapien
aaaacatagccgtatcctctgggtg

SEQ ID NO: 1190051 - DNA, 25 bp, Homo sapien
gaagagaagtcctcacacgctctaa

SEQ ID NO: 1190052 - DNA, 25 bp, Homo sapien
aatgaaaccaccacctgactgtagt

SEQ ID NO: 1190053 - DNA, 25 bp, Homo sapien
tacccggtttgtagcctgtatctct

SEQ ID NO: 1190054 - DNA, 25 bp, Homo sapien
ctctcatggtgtggtggcagaaaaa

SEQ ID NO: 1190055 - DNA, 25 bp, Homo sapien
tggtcctgacagtgtttggttctcc

SEQ ID NO: 1190056 - DNA, 25 bp, Homo sapien
aattggagttacagctggtgccagg

SEQ ID NO: 1190057 - DNA, 25 bp, Homo sapien
gcctctttgatcaggcttgattctg

SEQ ID NO: 1190058 - DNA, 25 bp, Homo sapien
caggcttgattctgaagttcgtttt

SEQ ID NO: 1190059 - DNA, 25 bp, Homo sapien
tgatcaggcttgattctgaagttcg

SEQ ID NO: 1190060 - DNA, 25 bp, Homo sapien
tctttgatcaggcttgattctgaag

SEQ ID NO: 1190061 - DNA, 25 bp, Homo sapien
cttgctgactaacaatgctgggacc

SEQ ID NO: 1190062 - DNA, 25 bp, Homo sapien
gccagcctcactggttctcaggaga

SEQ ID NO: 1190063 - DNA, 25 bp, Homo sapien
tctgccttgctgactaacaatgctg

SEQ ID NO: 1190064 - DNA, 25 bp, Homo sapien
gcctcactggttctcaggagagtcc

SEQ ID NO: 1190065 - DNA, 25 bp, Homo sapien
gggagcaagccatgggaagagcctt

SEQ ID NO: 1190066 - DNA, 25 bp, Homo sapien
ggagcaagccatgggaagagccttc

SEQ ID NO: 1190067 - DNA, 25 bp, Homo sapien
ggacactagcaatccctggttgaca

SEQ ID NO: 1190068 - DNA, 25 bp, Homo sapien
ttccatcctgggagggagctatcac

SEQ ID NO: 1190069 - DNA, 25 bp, Homo sapien
ttgaacccttcacatggcccagtgg

SEQ ID NO: 1190070 - DNA, 25 bp, Homo sapien
tcctgggctagctgaacttgtaagt

SEQ ID NO: 1190071 - DNA, 25 bp, Homo sapien
gcttgaagtggctcttatggcccag

SEQ ID NO: 1190072 - DNA, 25 bp, Homo sapien
ctccagcttgaagtggctcttatgg

SEQ ID NO: 1190073 - DNA, 25 bp, Homo sapien
agtggctcttatggcccagactccc

SEQ ID NO: 1190074 - DNA, 25 bp, Homo sapien
ccagcttgaagtggctcttatggcc

SEQ ID NO: 1190075 - DNA, 25 bp, Homo sapien
tctttctatgccacatgttttttct

SEQ ID NO: 1190076 - DNA, 25 bp, Homo sapien
tttttctctacagcagagcttttgc

SEQ ID NO: 1190077 - DNA, 25 bp, Homo sapien
tgtgtgtcagccaaccctcaaggca

SEQ ID NO: 1190078 - DNA, 25 bp, Homo sapien
caggtcagtgagaggcagtgacccc

SEQ ID NO: 1190079 - DNA, 25 bp, Homo sapien
gaaatgtttgtgaggacaggtcagt

SEQ ID NO: 1190080 - DNA, 25 bp, Homo sapien
caagttgctcaatggtgggaaatgt

SEQ ID NO: 1190081 - DNA, 25 bp, Homo sapien
tctcatgctcaatgctgccagtttc

SEQ ID NO: 1190082 - DNA, 25 bp, Homo sapien
ctaatatgatttagtcctggtttca

SEQ ID NO: 1190083 - DNA, 25 bp, Homo sapien
tcatttcctgaatctttgtgttgct

SEQ ID NO: 1190084 - DNA, 25 bp, Homo sapien
ctggatctcatgctcaatgctgcca

SEQ ID NO: 1190085 - DNA, 25 bp, Homo sapien
gtcactaaacctatttctccagata

SEQ ID NO: 1190086 - DNA, 25 bp, Homo sapien
ggaaaatatactgatccatggccag

SEQ ID NO: 1190087 - DNA, 25 bp, Homo sapien
cttgcctctcggtacaaatgtaata

SEQ ID NO: 1190088 - DNA, 25 bp, Homo sapien
aaaatgagactatcttgcctctcgg

SEQ ID NO: 1190089 - DNA, 25 bp, Homo sapien
cagcaattccaatagcgcagagaaa

SEQ ID NO: 1190090 - DNA, 25 bp, Homo sapien
cagatcataattattgagtttgaag

SEQ ID NO: 1190091 - DNA, 25 bp, Homo sapien
gagaaatcctggatcagatcataat

SEQ ID NO: 1190092 - DNA, 25 bp, Homo sapien
ttccaatagcgcagagaaatcctgg

SEQ ID NO: 1190093 - DNA, 25 bp, Homo sapien
gagtccaaaggatttcactaacatg

SEQ ID NO: 1190094 - DNA, 25 bp, Homo sapien
tcaggatctttgcaaattatgttct

SEQ ID NO: 1190095 - DNA, 25 bp, Homo sapien
ggaggtattgtaccagatcaggatc

SEQ ID NO: 1190096 - DNA, 25 bp, Homo sapien
catcatctgtgtcatggaggtattg

SEQ ID NO: 1190097 - DNA, 25 bp, Homo sapien
ctgctttctttacacaagtcacggt

SEQ ID NO: 1190098 - DNA, 25 bp, Homo sapien
ctttctttacacaagtcacggtgct

SEQ ID NO: 1190099 - DNA, 25 bp, Homo sapien
gctttctttacacaagtcacggtgc

SEQ ID NO: 1190100 - DNA, 25 bp, Homo sapien
tgctttctttacacaagtcacggtg

SEQ ID NO: 1190101 - DNA, 25 bp, Homo sapien
cagcatatggcttgctgagcactct

SEQ ID NO: 1190102 - DNA, 25 bp, Homo sapien
tagaggagattcacaaagtatgaag

SEQ ID NO: 1190103 - DNA, 25 bp, Homo sapien
ttcaggctcttgctgaacgggcaga

SEQ ID NO: 1190104 - DNA, 25 bp, Homo sapien
aggccatggtcacctctgaataata

SEQ ID NO: 1190105 - DNA, 25 bp, Homo sapien
cggggacattgattcattgcaacca

SEQ ID NO: 1190106 - DNA, 25 bp, Homo sapien
ctacggggacattgattcattgcaa

SEQ ID NO: 1190107 - DNA, 25 bp, Homo sapien
gggacattgattcattgcaaccagg

SEQ ID NO: 1190108 - DNA, 25 bp, Homo sapien
ggacattgattcattgcaaccaggg

SEQ ID NO: 1190109 - DNA, 25 bp, Homo sapien
tgaaacacggttgcggactagcaga

SEQ ID NO: 1190110 - DNA, 25 bp, Homo sapien
ttttatgcttccatccaaaagttgg

SEQ ID NO: 1190111 - DNA, 25 bp, Homo sapien
caaaagttggtctgcgtgaaacacg

SEQ ID NO: 1190112 - DNA, 25 bp, Homo sapien
tctgcgtgaaacacggttgcggact

SEQ ID NO: 1190113 - DNA, 25 bp, Homo sapien
ccggcctcacaagtggggattaaca

SEQ ID NO: 1190114 - DNA, 25 bp, Homo sapien
gagccggcctcacaagtggggatta

SEQ ID NO: 1190115 - DNA, 25 bp, Homo sapien
agagtaggagccggcctcacaagtg

SEQ ID NO: 1190116 - DNA, 25 bp, Homo sapien
cagagtaggagccggcctcacaagt

SEQ ID NO: 1190117 - DNA, 25 bp, Homo sapien
ctcttgcttgctcaccacctttgtc

SEQ ID NO: 1190118 - DNA, 25 bp, Homo sapien
agccaagaaaaatcagcgtcctctc

SEQ ID NO: 1190119 - DNA, 25 bp, Homo sapien
tagccaagaaaaatcagcgtcctct

SEQ ID NO: 1190120 - DNA, 25 bp, Homo sapien
aactggctgtagctagttatatagc

SEQ ID NO: 1190121 - DNA, 25 bp, Homo sapien
taaatgcctaattagtccatgtccc

SEQ ID NO: 1190122 - DNA, 25 bp, Homo sapien
tatagatggagcacaaaggataaat

SEQ ID NO: 1190123 - DNA, 25 bp, Homo sapien
gatgtatgttcctgaatgtgtctga

SEQ ID NO: 1190124 - DNA, 25 bp, Homo sapien
tagtgggacccatttcagatactgc

SEQ ID NO: 1190125 - DNA, 25 bp, Homo sapien
tgccgacccctgtggatgtgggcct

SEQ ID NO: 1190126 - DNA, 25 bp, Homo sapien
gcctgttgggtggattcacggtcat

SEQ ID NO: 1190127 - DNA, 25 bp, Homo sapien
ggctacagaacaactttgcaccaaa

SEQ ID NO: 1190128 - DNA, 25 bp, Homo sapien
cttccttggaacttgagagggagct

SEQ ID NO: 1190129 - DNA, 25 bp, Homo sapien
tcagaggatagccaaggcgaatacc

SEQ ID NO: 1190130 - DNA, 25 bp, Homo sapien
ccagcagctcagaggatagccaagg

SEQ ID NO: 1190131 - DNA, 25 bp, Homo sapien
ggcgaataccaatgtaggcagaaaa

SEQ ID NO: 1190132 - DNA, 25 bp, Homo sapien
gatagccaaggcgaataccaatgta

SEQ ID NO: 1190133 - DNA, 25 bp, Homo sapien
taagggaagtgcaagacccaactgg

SEQ ID NO: 1190134 - DNA, 25 bp, Homo sapien
atgggatcctccgagctcagcgtaa

SEQ ID NO: 1190135 - DNA, 25 bp, Homo sapien
ccttcaacgactgggaggagactcc

SEQ ID NO: 1190136 - DNA, 25 bp, Homo sapien
tcttatgcatgtaggttggcagcca

SEQ ID NO: 1190137 - DNA, 25 bp, Homo sapien
aatcaccgaaaccctgcactgttac

SEQ ID NO: 1190138 - DNA, 25 bp, Homo sapien
aaaatcaccgaaaccctgcactgtt

SEQ ID NO: 1190139 - DNA, 25 bp, Homo sapien
agaaaaatcaccgaaaccctgcact

SEQ ID NO: 1190140 - DNA, 25 bp, Homo sapien
ggagaaaaatcaccgaaaccctgca

SEQ ID NO: 1190141 - DNA, 25 bp, Homo sapien
caaaagcaatataggtcaggcaggg

SEQ ID NO: 1190142 - DNA, 25 bp, Homo sapien
ttagcgagcatggtcagagagagtc

SEQ ID NO: 1190143 - DNA, 25 bp, Homo sapien
tcattgtggcagcatgtctcggtca

SEQ ID NO: 1190144 - DNA, 25 bp, Homo sapien
gggagactatttgcaacctacaggg

SEQ ID NO: 1190145 - DNA, 25 bp, Homo sapien
gtgtcatccatagagcttgcccctt

SEQ ID NO: 1190146 - DNA, 25 bp, Homo sapien
cattgggacagcatagctcctgaac

SEQ ID NO: 1190147 - DNA, 25 bp, Homo sapien
tgtcagcgggatggccagatcttca

SEQ ID NO: 1190148 - DNA, 25 bp, Homo sapien
taaaggagtatcctgcggcattggg

SEQ ID NO: 1190149 - DNA, 25 bp, Homo sapien
tgtgtgaggtctgatccaaaggaaa

SEQ ID NO: 1190150 - DNA, 25 bp, Homo sapien
gttgagcggccttcatgaggcctgc

SEQ ID NO: 1190151 - DNA, 25 bp, Homo sapien
catatgaagccccagaagctgcaag

SEQ ID NO: 1190152 - DNA, 25 bp, Homo sapien
tgaggcctgctttggctaaactcca

SEQ ID NO: 1190153 - DNA, 25 bp, Homo sapien
caagagcagaacaagagcggaagtc

SEQ ID NO: 1190154 - DNA, 25 bp, Homo sapien
tgttcaagagcagaacaagagcgga

SEQ ID NO: 1190155 - DNA, 25 bp, Homo sapien
agaacaagagcggaagtcgacatac

SEQ ID NO: 1190156 - DNA, 25 bp, Homo sapien
tcactgttcaagagcagaacaagag

SEQ ID NO: 1190157 - DNA, 25 bp, Homo sapien
taacaagtctaagggtaaatggcca

SEQ ID NO: 1190158 - DNA, 25 bp, Homo sapien
ccagacagggtaagtctgtgttaag

SEQ ID NO: 1190159 - DNA, 25 bp, Homo sapien
gttaagaagaacagattagtactct

SEQ ID NO: 1190160 - DNA, 25 bp, Homo sapien
caccccagaggtaatttgccatcgt

SEQ ID NO: 1190161 - DNA, 25 bp, Homo sapien
tgttttggagaagggaagaaggaga

SEQ ID NO: 1190162 - DNA, 25 bp, Homo sapien
ctgttttggagaagggaagaaggag

SEQ ID NO: 1190163 - DNA, 25 bp, Homo sapien
ggagactgccaacctcaacagatgg

SEQ ID NO: 1190164 - DNA, 25 bp, Homo sapien
tcagcagggtccagtttgcctatag

SEQ ID NO: 1190165 - DNA, 25 bp, Homo sapien
cctgtgaaactaaggtccattagtg

SEQ ID NO: 1190166 - DNA, 25 bp, Homo sapien
gctccaaagagggatctaactcccc

SEQ ID NO: 1190167 - DNA, 25 bp, Homo sapien
ctgtcagctgcttttcagggattga

SEQ ID NO: 1190168 - DNA, 25 bp, Homo sapien
attcatccatgacttgggccccaca

SEQ ID NO: 1190169 - DNA, 25 bp, Homo sapien
tgtgttttgttctccggctgctcaa

SEQ ID NO: 1190170 - DNA, 25 bp, Homo sapien
ccccacttgccagcgttggtgttgg

SEQ ID NO: 1190171 - DNA, 25 bp, Homo sapien
tagtggtgacatgaccacgtgcttt

SEQ ID NO: 1190172 - DNA, 25 bp, Homo sapien
gacatgaccacgtgctttaaggcca

SEQ ID NO: 1190173 - DNA, 25 bp, Homo sapien
aagagtagtggtgacatgaccacgt

SEQ ID NO: 1190174 - DNA, 25 bp, Homo sapien
tgaccacgtgctttaaggccaatgc

SEQ ID NO: 1190175 - DNA, 25 bp, Homo sapien
gaagcctcatttgccaacgtagcca

SEQ ID NO: 1190176 - DNA, 25 bp, Homo sapien
cgtagccacgttgagtatccataag

SEQ ID NO: 1190177 - DNA, 25 bp, Homo sapien
taagtcagcacatgtcctagtgcct

SEQ ID NO: 1190178 - DNA, 25 bp, Homo sapien
tatcactggctgtccttatccctct

SEQ ID NO: 1190179 - DNA, 25 bp, Homo sapien
tgttcattaaggaaataacagttaa

SEQ ID NO: 1190180 - DNA, 25 bp, Homo sapien
ctgttcattaaggaaataacagtta

SEQ ID NO: 1190181 - DNA, 25 bp, Homo sapien
ctgtgataactgtgttaaaatcaaa

SEQ ID NO: 1190182 - DNA, 25 bp, Homo sapien
ttccttttcagcacttactgtgata

SEQ ID NO: 1190183 - DNA, 25 bp, Homo sapien
agcacttactgtgataactgtgtta

SEQ ID NO: 1190184 - DNA, 25 bp, Homo sapien
ccttttcagcacttactgtgataac

SEQ ID NO: 1190185 - DNA, 25 bp, Homo sapien
catctcagctggtgtggagggccta

SEQ ID NO: 1190186 - DNA, 25 bp, Homo sapien
cacttggttgctccacttgcgtgag

SEQ ID NO: 1190187 - DNA, 25 bp, Homo sapien
gaagaggctttctgtctcactccat

SEQ ID NO: 1190188 - DNA, 25 bp, Homo sapien
gctttctgtgcttgtcgatccctga

SEQ ID NO: 1190189 - DNA, 25 bp, Homo sapien
cctttttggcttctgtgcctcctgc

SEQ ID NO: 1190190 - DNA, 25 bp, Homo sapien
tgtgcctcctgctctccactccccc

SEQ ID NO: 1190191 - DNA, 25 bp, Homo sapien
tctgtgcctcctgctctccactccc

SEQ ID NO: 1190192 - DNA, 25 bp, Homo sapien
tgcctcctgctctccactcccccat

SEQ ID NO: 1190193 - DNA, 25 bp, Homo sapien
cggttgctttggcttcctacagcct

SEQ ID NO: 1190194 - DNA, 25 bp, Homo sapien
tgcattgattatgcggttgctttgg

SEQ ID NO: 1190195 - DNA, 25 bp, Homo sapien
tctgtgcattgattatgcggttgct

SEQ ID NO: 1190196 - DNA, 25 bp, Homo sapien
ggttgctttggcttcctacagcctc

SEQ ID NO: 1190197 - DNA, 25 bp, Homo sapien
cagctgatgactgtagtgatgggtt

SEQ ID NO: 1190198 - DNA, 25 bp, Homo sapien
tatgagccctgccattgtactcact

SEQ ID NO: 1190199 - DNA, 25 bp, Homo sapien
tccccagttgtctggctatgagccc

SEQ ID NO: 1190200 - DNA, 25 bp, Homo sapien
tagtgatgggttcaacccagggccc

SEQ ID NO: 1190201 - DNA, 25 bp, Homo sapien
cagggagacccttctactccggagc

SEQ ID NO: 1190202 - DNA, 25 bp, Homo sapien
tcatacttgcctgccgggtgtcctt

SEQ ID NO: 1190203 - DNA, 25 bp, Homo sapien
ccagagccctgagcgataaagccag

SEQ ID NO: 1190204 - DNA, 25 bp, Homo sapien
caaactaactgacaggcttgcccag

SEQ ID NO: 1190205 - DNA, 25 bp, Homo sapien
tctctcgccacgctctcccgctccg

SEQ ID NO: 1190206 - DNA, 25 bp, Homo sapien
tctcgccacgctctcccgctccgtg

SEQ ID NO: 1190207 - DNA, 25 bp, Homo sapien
attctctcgccacgctctcccgctc

SEQ ID NO: 1190208 - DNA, 25 bp, Homo sapien
tcattctctcgccacgctctcccgc

SEQ ID NO: 1190209 - DNA, 25 bp, Homo sapien
ctaaaccgagtgccacactgccacc

SEQ ID NO: 1190210 - DNA, 25 bp, Homo sapien
tgctggccagctacggaggcatgct

SEQ ID NO: 1190211 - DNA, 25 bp, Homo sapien
ggaccacagcagccgccgtggctga

SEQ ID NO: 1190212 - DNA, 25 bp, Homo sapien
tgaagtcagcatactcctgagcgcg

SEQ ID NO: 1190213 - DNA, 25 bp, Homo sapien
tggtgaaaccctggcggtaccgctc

SEQ ID NO: 1190214 - DNA, 25 bp, Homo sapien
tctgatgcttctggggatgggccta

SEQ ID NO: 1190215 - DNA, 25 bp, Homo sapien
cctttttcccacaaggcctgcggag

SEQ ID NO: 1190216 - DNA, 25 bp, Homo sapien
tgatgcttctggggatgggcctaaa

SEQ ID NO: 1190217 - DNA, 25 bp, Homo sapien
ctttttcccacaaggcctgcggagc

SEQ ID NO: 1190218 - DNA, 25 bp, Homo sapien
cagccaggaatatgtgcctggctta

SEQ ID NO: 1190219 - DNA, 25 bp, Homo sapien
tccagcagccaggaatatgtgcctg

SEQ ID NO: 1190220 - DNA, 25 bp, Homo sapien
cagcagccaggaatatgtgcctggc

SEQ ID NO: 1190221 - DNA, 25 bp, Homo sapien
gtccagcagccaggaatatgtgcct

SEQ ID NO: 1190222 - DNA, 25 bp, Homo sapien
ggtgctctctgcttcggtgatgcta

SEQ ID NO: 1190223 - DNA, 25 bp, Homo sapien
tgctctctgcttcggtgatgctatg

SEQ ID NO: 1190224 - DNA, 25 bp, Homo sapien
tctctgcttcggtgatgctatgtga

SEQ ID NO: 1190225 - DNA, 25 bp, Homo sapien
tgcttcggtgatgctatgtgaattt

SEQ ID NO: 1190226 - DNA, 25 bp, Homo sapien
taagatactgcatcttggcaatggc

SEQ ID NO: 1190227 - DNA, 25 bp, Homo sapien
gatttacatcgcacccttgtagaaa

SEQ ID NO: 1190228 - DNA, 25 bp, Homo sapien
cttgtagaaacacaccagcagtgca

SEQ ID NO: 1190229 - DNA, 25 bp, Homo sapien
ttccccggagcctaagcacagatgg

SEQ ID NO: 1190230 - DNA, 25 bp, Homo sapien
tcagtccaccaagcgatgacatcac

SEQ ID NO: 1190231 - DNA, 25 bp, Homo sapien
atcacagaactcagtccaccaagcg

SEQ ID NO: 1190232 - DNA, 25 bp, Homo sapien
gtccaccaagcgatgacatcaccat

SEQ ID NO: 1190233 - DNA, 25 bp, Homo sapien
gaactcagtccaccaagcgatgaca

SEQ ID NO: 1190234 - DNA, 25 bp, Homo sapien
gaaggcagcctgagctattcaaaga

SEQ ID NO: 1190235 - DNA, 25 bp, Homo sapien
aggcagcctgagctattcaaagaag

SEQ ID NO: 1190236 - DNA, 25 bp, Homo sapien
gcagcctgagctattcaaagaagaa

SEQ ID NO: 1190237 - DNA, 25 bp, Homo sapien
ggcagcctgagctattcaaagaaga

SEQ ID NO: 1190238 - DNA, 25 bp, Homo sapien
ggcataaaatctgaagtaggtaatg

SEQ ID NO: 1190239 - DNA, 25 bp, Homo sapien
agaggcataaaatctgaagtaggta

SEQ ID NO: 1190240 - DNA, 25 bp, Homo sapien
aaatctgaagtaggtaatgttcttc

SEQ ID NO: 1190241 - DNA, 25 bp, Homo sapien
taaaatctgaagtaggtaatgttct

SEQ ID NO: 1190242 - DNA, 25 bp, Homo sapien
aatgagtgccgtactttttaatcag

SEQ ID NO: 1190243 - DNA, 25 bp, Homo sapien
ttccagagccaagttgttcaccttc

SEQ ID NO: 1190244 - DNA, 25 bp, Homo sapien
taacctgttgcagattgggtctcct

SEQ ID NO: 1190245 - DNA, 25 bp, Homo sapien
tccttccaaggaggcgaatgttccg

SEQ ID NO: 1190246 - DNA, 25 bp, Homo sapien
tctgtttaacatcttctattgaact

SEQ ID NO: 1190247 - DNA, 25 bp, Homo sapien
tctctcaagttgtttacgaggagtc

SEQ ID NO: 1190248 - DNA, 25 bp, Homo sapien
aagaagctcatcagagggagccaca

SEQ ID NO: 1190249 - DNA, 25 bp, Homo sapien
ggccagcggcctcgctgcctgaaag

SEQ ID NO: 1190250 - DNA, 25 bp, Homo sapien
cataaaacccttggccaagatagac

SEQ ID NO: 1190251 - DNA, 25 bp, Homo sapien
aaaacccttggccaagatagacaca

SEQ ID NO: 1190252 - DNA, 25 bp, Homo sapien
acataaaacccttggccaagataga

SEQ ID NO: 1190253 - DNA, 25 bp, Homo sapien
gaacataaaacccttggccaagata

SEQ ID NO: 1190254 - DNA, 25 bp, Homo sapien
ctatggtgaacaacacgagtgtatt

SEQ ID NO: 1190255 - DNA, 25 bp, Homo sapien
tgaacaacacgagtgtattggtgac

SEQ ID NO: 1190256 - DNA, 25 bp, Homo sapien
cacgagtgtattggtgacgctctct

SEQ ID NO: 1190257 - DNA, 25 bp, Homo sapien
gtgacgctctctgctctcgaatccc

SEQ ID NO: 1190258 - DNA, 25 bp, Homo sapien
tatctggatatggtgcagccgtcgc

SEQ ID NO: 1190259 - DNA, 25 bp, Homo sapien
tatagaggcacctcctgttgtctct

SEQ ID NO: 1190260 - DNA, 25 bp, Homo sapien
cacaaaaatggtcagggactcttct

SEQ ID NO: 1190261 - DNA, 25 bp, Homo sapien
gcagcgtgctctctctgtcgatgaa

SEQ ID NO: 1190262 - DNA, 25 bp, Homo sapien
ttcattttctgatatgatccatttt

SEQ ID NO: 1190263 - DNA, 25 bp, Homo sapien
cattttctgatatgatccatttttc

SEQ ID NO: 1190264 - DNA, 25 bp, Homo sapien
ttctgatatgatccatttttctcca

SEQ ID NO: 1190265 - DNA, 25 bp, Homo sapien
ttttctccaactttgacacagtccc

SEQ ID NO: 1190266 - DNA, 25 bp, Homo sapien
cctgccaccaatgcatctgcttccc

SEQ ID NO: 1190267 - DNA, 25 bp, Homo sapien
ctgccaccaatgcatctgcttcccg

SEQ ID NO: 1190268 - DNA, 25 bp, Homo sapien
tgccaccaatgcatctgcttcccgc

SEQ ID NO: 1190269 - DNA, 25 bp, Homo sapien
gccacaataggagctttcctttccc

SEQ ID NO: 1190270 - DNA, 25 bp, Homo sapien
cttggtcactcaccaaccaggtcca

SEQ ID NO: 1190271 - DNA, 25 bp, Homo sapien
gaaggaagctaacaagccttaagtg

SEQ ID NO: 1190272 - DNA, 25 bp, Homo sapien
gtgggaataagatgtgacccaaaga

SEQ ID NO: 1190273 - DNA, 25 bp, Homo sapien
acagtagaagcccacatcatgatga

SEQ ID NO: 1190274 - DNA, 25 bp, Homo sapien
aggaagcacagctctaaacaaaggg

SEQ ID NO: 1190275 - DNA, 25 bp, Homo sapien
aggtgcatacacagctgactgatag

SEQ ID NO: 1190276 - DNA, 25 bp, Homo sapien
ggcaggtaggtgcatacacagctga

SEQ ID NO: 1190277 - DNA, 25 bp, Homo sapien
gatacgtcccttttcgtactccaga

SEQ ID NO: 1190278 - DNA, 25 bp, Homo sapien
ctccagaggtataaagtcactttct

SEQ ID NO: 1190279 - DNA, 25 bp, Homo sapien
agctgtagaagtgatacgtcccttt

SEQ ID NO: 1190280 - DNA, 25 bp, Homo sapien
catcctgtccttgaccagctgtaga

SEQ ID NO: 1190281 - DNA, 25 bp, Homo sapien
attgtcatagttgctgcagcccaga

SEQ ID NO: 1190282 - DNA, 25 bp, Homo sapien
ccagaggaccggtcctggtctcggt

SEQ ID NO: 1190283 - DNA, 25 bp, Homo sapien
agcccagaggaccggtcctggtctc

SEQ ID NO: 1190284 - DNA, 25 bp, Homo sapien
gattgtcatagttgctgcagcccag

SEQ ID NO: 1190285 - DNA, 25 bp, Homo sapien
taactgtactttgttctctggactc

SEQ ID NO: 1190286 - DNA, 25 bp, Homo sapien
tctgtaccaagacagaactgactga

SEQ ID NO: 1190287 - DNA, 25 bp, Homo sapien
taccaagacagaactgactgagtcc

SEQ ID NO: 1190288 - DNA, 25 bp, Homo sapien
caagtaactgtactttgttctctgg

SEQ ID NO: 1190289 - DNA, 25 bp, Homo sapien
tctgggaagaaccagtgaggactca

SEQ ID NO: 1190290 - DNA, 25 bp, Homo sapien
taagaacaggcttattggctacaca

SEQ ID NO: 1190291 - DNA, 25 bp, Homo sapien
tgctgacttgtgcatcctgggccca

SEQ ID NO: 1190292 - DNA, 25 bp, Homo sapien
cagccaaattgagagcgtgcatatc

SEQ ID NO: 1190293 - DNA, 25 bp, Homo sapien
catgtgatgtagctgagtgctgcag

SEQ ID NO: 1190294 - DNA, 25 bp, Homo sapien
tgcagacgagctcaccctcagagct

SEQ ID NO: 1190295 - DNA, 25 bp, Homo sapien
caaactgccggttgtgagtggccca

SEQ ID NO: 1190296 - DNA, 25 bp, Homo sapien
gctacaaagcgctcacgcagatact

SEQ ID NO: 1190297 - DNA, 25 bp, Homo sapien
cattgctctgcttttccttgggacc

SEQ ID NO: 1190298 - DNA, 25 bp, Homo sapien
tctcctggtagaggtctagagagcc

SEQ ID NO: 1190299 - DNA, 25 bp, Homo sapien
ttgggacctgcagctaccaggtctc

SEQ ID NO: 1190300 - DNA, 25 bp, Homo sapien
catggcttctgaactcatgctcagg

SEQ ID NO: 1190301 - DNA, 25 bp, Homo sapien
gagatagctgtggagttcaggaacc

SEQ ID NO: 1190302 - DNA, 25 bp, Homo sapien
tagcggtgctgaaggctggtgtcca

SEQ ID NO: 1190303 - DNA, 25 bp, Homo sapien
cggtcatcgggcagccttttcagca

SEQ ID NO: 1190304 - DNA, 25 bp, Homo sapien
gatccgatgggtctttttgaacagc

SEQ ID NO: 1190305 - DNA, 25 bp, Homo sapien
cctccaggaagggtcaaaccagctg

SEQ ID NO: 1190306 - DNA, 25 bp, Homo sapien
gatggagtgtacctcaatgcggcta

SEQ ID NO: 1190307 - DNA, 25 bp, Homo sapien
taagtcccggatagcatctgggtca

SEQ ID NO: 1190308 - DNA, 25 bp, Homo sapien
tcggctccgtaggtaaacatgaact

SEQ ID NO: 1190309 - DNA, 25 bp, Homo sapien
gccagcttaagccgatgccggagca

SEQ ID NO: 1190310 - DNA, 25 bp, Homo sapien
cagcttaagccgatgccggagcaag

SEQ ID NO: 1190311 - DNA, 25 bp, Homo sapien
gcttaagccgatgccggagcaagca

SEQ ID NO: 1190312 - DNA, 25 bp, Homo sapien
tggccagcttaagccgatgccggag

SEQ ID NO: 1190313 - DNA, 25 bp, Homo sapien
ccggtctcatattccacagggtttg

SEQ ID NO: 1190314 - DNA, 25 bp, Homo sapien
tccacagggtttggcagcttagaat

SEQ ID NO: 1190315 - DNA, 25 bp, Homo sapien
gtttggcagcttagaattgaaagcc

SEQ ID NO: 1190316 - DNA, 25 bp, Homo sapien
ttagctacagagtttgccggtctca

SEQ ID NO: 1190317 - DNA, 25 bp, Homo sapien
gagctctgaagggaccacaatggga

SEQ ID NO: 1190318 - DNA, 25 bp, Homo sapien
ttagttgtagcctccctgtgccagt

SEQ ID NO: 1190319 - DNA, 25 bp, Homo sapien
gagcctcgaggtcccatctactgga

SEQ ID NO: 1190320 - DNA, 25 bp, Homo sapien
gctgaaagtctcgtgggagcacacc

SEQ ID NO: 1190321 - DNA, 25 bp, Homo sapien
tcatgcttgtgctactgaggctcca

SEQ ID NO: 1190322 - DNA, 25 bp, Homo sapien
tagtttaaacctccagataggcaag

SEQ ID NO: 1190323 - DNA, 25 bp, Homo sapien
cacaggtaacagatgactaggtcaa

SEQ ID NO: 1190324 - DNA, 25 bp, Homo sapien
ccacaactgtgggactggcctaggt

SEQ ID NO: 1190325 - DNA, 25 bp, Homo sapien
tcttctcctccaccccagcccattg

SEQ ID NO: 1190326 - DNA, 25 bp, Homo sapien
ttctcctccaccccagcccattgcc

SEQ ID NO: 1190327 - DNA, 25 bp, Homo sapien
ctcctccaccccagcccattgccat

SEQ ID NO: 1190328 - DNA, 25 bp, Homo sapien
gcctcttctcctccaccccagccca

SEQ ID NO: 1190329 - DNA, 25 bp, Homo sapien
atggtgctgtcctcctgtggcgagt

SEQ ID NO: 1190330 - DNA, 25 bp, Homo sapien
tctcctggagtaggggtgcagcagc

SEQ ID NO: 1190331 - DNA, 25 bp, Homo sapien
acaggacccaaggatggtgctgtcc

SEQ ID NO: 1190332 - DNA, 25 bp, Homo sapien
tctgaaagctggcatgggatctcct

SEQ ID NO: 1190333 - DNA, 25 bp, Homo sapien
aataaatgcctcatataaaggttag

SEQ ID NO: 1190334 - DNA, 25 bp, Homo sapien
ttggaagagaataaatgcctcatat

SEQ ID NO: 1190335 - DNA, 25 bp, Homo sapien
taaaggttagtggagattgttttca

SEQ ID NO: 1190336 - DNA, 25 bp, Homo sapien
aggcagagacaatggttggaagaga

SEQ ID NO: 1190337 - DNA, 25 bp, Homo sapien
cattggtatttacaacgctggctct

SEQ ID NO: 1190338 - DNA, 25 bp, Homo sapien
gtgtagaggcaggtgatccccaagt

SEQ ID NO: 1190339 - DNA, 25 bp, Homo sapien
ccattttgggtcagcgatgattgca

SEQ ID NO: 1190340 - DNA, 25 bp, Homo sapien
cccaagtgggtccatttgatttcaa

SEQ ID NO: 1190341 - DNA, 25 bp, Homo sapien
ctctattctccttccgtaaacagtg

SEQ ID NO: 1190342 - DNA, 25 bp, Homo sapien
acctctattctccttccgtaaacag

SEQ ID NO: 1190343 - DNA, 25 bp, Homo sapien
tatgtcgtccaaaacctctattctc

SEQ ID NO: 1190344 - DNA, 25 bp, Homo sapien
ctcttccttatgtcgtccaaaacct

SEQ ID NO: 1190345 - DNA, 25 bp, Homo sapien
tttggagcctttttggcacagcagc

SEQ ID NO: 1190346 - DNA, 25 bp, Homo sapien
catcactttggagcctttttggcac

SEQ ID NO: 1190347 - DNA, 25 bp, Homo sapien
tggagcctttttggcacagcagcca

SEQ ID NO: 1190348 - DNA, 25 bp, Homo sapien
actttggagcctttttggcacagca

SEQ ID NO: 1190349 - DNA, 25 bp, Homo sapien
ctaaaggatccacagacaatctgaa

SEQ ID NO: 1190350 - DNA, 25 bp, Homo sapien
tcctatcaattaatgggaagccaag

SEQ ID NO: 1190351 - DNA, 25 bp, Homo sapien
tccacagacaatctgaacagcagga

SEQ ID NO: 1190352 - DNA, 25 bp, Homo sapien
agtctaatttgccacctgcacagca

SEQ ID NO: 1190353 - DNA, 25 bp, Homo sapien
gatattgcctacagcattgacagca

SEQ ID NO: 1190354 - DNA, 25 bp, Homo sapien
acaattccatgaaacctcatgtgtg

SEQ ID NO: 1190355 - DNA, 25 bp, Homo sapien
caaagatattgcctacagcattgac

SEQ ID NO: 1190356 - DNA, 25 bp, Homo sapien
tttctcaaagatattgcctacagca

SEQ ID NO: 1190357 - DNA, 25 bp, Homo sapien
cattcacacacgttatccccaaact

SEQ ID NO: 1190358 - DNA, 25 bp, Homo sapien
tgtgttatcttcacccttaacaaag

SEQ ID NO: 1190359 - DNA, 25 bp, Homo sapien
ttcacacacgttatccccaaactct

SEQ ID NO: 1190360 - DNA, 25 bp, Homo sapien
cacacacgttatccccaaactctcc

SEQ ID NO: 1190361 - DNA, 25 bp, Homo sapien
ctggataagaacataagtgaagtag

SEQ ID NO: 1190362 - DNA, 25 bp, Homo sapien
taagaacataagtgaagtaggagaa

SEQ ID NO: 1190363 - DNA, 25 bp, Homo sapien
ggataagaacataagtgaagtagga

SEQ ID NO: 1190364 - DNA, 25 bp, Homo sapien
gataagaacataagtgaagtaggag

SEQ ID NO: 1190365 - DNA, 25 bp, Homo sapien
gagtttgtgctgctaactctgggcc

SEQ ID NO: 1190366 - DNA, 25 bp, Homo sapien
caaggtcatgagttcaatcccggga

SEQ ID NO: 1190367 - DNA, 25 bp, Homo sapien
tccaattgataaagagcccaaggtc

SEQ ID NO: 1190368 - DNA, 25 bp, Homo sapien
agtgaaacatttccaattgataaag

SEQ ID NO: 1190369 - DNA, 25 bp, Homo sapien
cagtggtgttaaaacctggttctct

SEQ ID NO: 1190370 - DNA, 25 bp, Homo sapien
tgacacttgtccgtgcgcagccagt

SEQ ID NO: 1190371 - DNA, 25 bp, Homo sapien
gtgtggcaagatgacacttgtccgt

SEQ ID NO: 1190372 - DNA, 25 bp, Homo sapien
tccgtgcgcagccagtcaatacaga

SEQ ID NO: 1190373 - DNA, 25 bp, Homo sapien
caagatgacacttgtccgtgcgcag

SEQ ID NO: 1190374 - DNA, 25 bp, Homo sapien
taaagtttgatcgtgcttgctagga

SEQ ID NO: 1190375 - DNA, 25 bp, Homo sapien
ctccctccgatcctttgcagtttcc

SEQ ID NO: 1190376 - DNA, 25 bp, Homo sapien
ctcataaagtttgatcgtgcttgct

SEQ ID NO: 1190377 - DNA, 25 bp, Homo sapien
atctccctccctccgatcctttgca

SEQ ID NO: 1190378 - DNA, 25 bp, Homo sapien
agtctgggctgtgcccagcatccct

SEQ ID NO: 1190379 - DNA, 25 bp, Homo sapien
tgcattccaagtctgggctgtgccc

SEQ ID NO: 1190380 - DNA, 25 bp, Homo sapien
aagtctgggctgtgcccagcatccc

SEQ ID NO: 1190381 - DNA, 25 bp, Homo sapien
tcatgcattccaagtctgggctgtg

SEQ ID NO: 1190382 - DNA, 25 bp, Homo sapien
gaaggcattaattgcttgctgcctg

SEQ ID NO: 1190383 - DNA, 25 bp, Homo sapien
taatggactcttgaggtgaaccgtg

SEQ ID NO: 1190384 - DNA, 25 bp, Homo sapien
gatggaaaattgaaggacagggaaa

SEQ ID NO: 1190385 - DNA, 25 bp, Homo sapien
tgtaacctgaccataaacacagttt

SEQ ID NO: 1190386 - DNA, 25 bp, Homo sapien
aagatgtattgtataatcatctgcc

SEQ ID NO: 1190387 - DNA, 25 bp, Homo sapien
cccactctcagattaagatgtattg

SEQ ID NO: 1190388 - DNA, 25 bp, Homo sapien
gccttaaggttccagaacgcatccc

SEQ ID NO: 1190389 - DNA, 25 bp, Homo sapien
tgtacagcacattaacatgcagagt

SEQ ID NO: 1190390 - DNA, 25 bp, Homo sapien
ggctctattctccttgagtggaaca

SEQ ID NO: 1190391 - DNA, 25 bp, Homo sapien
tatagaactcccacgacttgtgatg

SEQ ID NO: 1190392 - DNA, 25 bp, Homo sapien
aaggctttggagcaagcctctgttc

SEQ ID NO: 1190393 - DNA, 25 bp, Homo sapien
gagtggaacacccatttccagatac

SEQ ID NO: 1190394 - DNA, 25 bp, Homo sapien
tgtcattagcccgtgaagaggttcg

SEQ ID NO: 1190395 - DNA, 25 bp, Homo sapien
gcccgtgaagaggttcgcttaggct

SEQ ID NO: 1190396 - DNA, 25 bp, Homo sapien
cattagcccgtgaagaggttcgctt

SEQ ID NO: 1190397 - DNA, 25 bp, Homo sapien
ggttcgcttaggctgccacagcaca

SEQ ID NO: 1190398 - DNA, 25 bp, Homo sapien
gaatattagcatctagatctgtgca

SEQ ID NO: 1190399 - DNA, 25 bp, Homo sapien
tgtgttgctctctcacatgaacacc

SEQ ID NO: 1190400 - DNA, 25 bp, Homo sapien
tcattgcagatgccttgccctgcct

SEQ ID NO: 1190401 - DNA, 25 bp, Homo sapien
ctttcccttgacgggactgaaggct

SEQ ID NO: 1190402 - DNA, 25 bp, Homo sapien
tccagacattgtggcggtagttccc

SEQ ID NO: 1190403 - DNA, 25 bp, Homo sapien
agttatcagtgcacgagcagccagg

SEQ ID NO: 1190404 - DNA, 25 bp, Homo sapien
ggtagttcccagatgtccgaaaaga

SEQ ID NO: 1190405 - DNA, 25 bp, Homo sapien
tgttgattcaccttaggacacagcc

SEQ ID NO: 1190406 - DNA, 25 bp, Homo sapien
catattactccaggaacttcccttt

SEQ ID NO: 1190407 - DNA, 25 bp, Homo sapien
gaagggtgaaggtaagtcatcattc

SEQ ID NO: 1190408 - DNA, 25 bp, Homo sapien
ctgattgacaaacagacactcctcc

SEQ ID NO: 1190409 - DNA, 25 bp, Homo sapien
caggaagggtgaaggtaagtcatca

SEQ ID NO: 1190410 - DNA, 25 bp, Homo sapien
attctgattgacaaacagacactcc

SEQ ID NO: 1190411 - DNA, 25 bp, Homo sapien
ggcacacccttaccaccatgcaggt

SEQ ID NO: 1190412 - DNA, 25 bp, Homo sapien
accatgcaggtagccagataaccag

SEQ ID NO: 1190413 - DNA, 25 bp, Homo sapien
ccaccatgcaggtagccagataacc

SEQ ID NO: 1190414 - DNA, 25 bp, Homo sapien
catgcaggtagccagataaccaggg

SEQ ID NO: 1190415 - DNA, 25 bp, Homo sapien
gtggcactcatgattttatatttct

SEQ ID NO: 1190416 - DNA, 25 bp, Homo sapien
tttatatttcttcccactcagaagg

SEQ ID NO: 1190417 - DNA, 25 bp, Homo sapien
tatatttcttcccactcagaaggga

SEQ ID NO: 1190418 - DNA, 25 bp, Homo sapien
attttatatttcttcccactcagaa

SEQ ID NO: 1190419 - DNA, 25 bp, Homo sapien
attcaccagttccatcctcatctga

SEQ ID NO: 1190420 - DNA, 25 bp, Homo sapien
agcagcggagggctgtcatcaccac

SEQ ID NO: 1190421 - DNA, 25 bp, Homo sapien
cagcggagggctgtcatcaccactg

SEQ ID NO: 1190422 - DNA, 25 bp, Homo sapien
tgctcattcaccagttccatcctca

SEQ ID NO: 1190423 - DNA, 25 bp, Homo sapien
tctgaaactcacttcacactgtgat

SEQ ID NO: 1190424 - DNA, 25 bp, Homo sapien
tcacttcacactgtgatggctggat

SEQ ID NO: 1190425 - DNA, 25 bp, Homo sapien
tctgtttgttgataacgaagtttac

SEQ ID NO: 1190426 - DNA, 25 bp, Homo sapien
aagacatcagttgggatggcagctc

SEQ ID NO: 1190427 - DNA, 25 bp, Homo sapien
gagcataagtgccacactctgagaa

SEQ ID NO: 1190428 - DNA, 25 bp, Homo sapien
ccatgaccatccagcttatgttctg

SEQ ID NO: 1190429 - DNA, 25 bp, Homo sapien
tgggagcctgagcacacataaagaa

SEQ ID NO: 1190430 - DNA, 25 bp, Homo sapien
tatgtgcagaaatatccctgagcat

SEQ ID NO: 1190431 - DNA, 25 bp, Homo sapien
tctcttgatatctgtgggaattgaa

SEQ ID NO: 1190432 - DNA, 25 bp, Homo sapien
cccagctcaggaggatctatccttc

SEQ ID NO: 1190433 - DNA, 25 bp, Homo sapien
aaaggtaacatctaatctcttgata

SEQ ID NO: 1190434 - DNA, 25 bp, Homo sapien
ttcttccataggaccgatgggggcc

SEQ ID NO: 1190435 - DNA, 25 bp, Homo sapien
agctctctactggcattgttgggtc

SEQ ID NO: 1190436 - DNA, 25 bp, Homo sapien
cagctctctactggcattgttgggt

SEQ ID NO: 1190437 - DNA, 25 bp, Homo sapien
tcagctctctactggcattgttggg

SEQ ID NO: 1190438 - DNA, 25 bp, Homo sapien
gctcttgtattatctagagaagaat

SEQ ID NO: 1190439 - DNA, 25 bp, Homo sapien
cagagctcttgtattatctagagaa

SEQ ID NO: 1190440 - DNA, 25 bp, Homo sapien
ccttggtcactaaggctgagagaca

SEQ ID NO: 1190441 - DNA, 25 bp, Homo sapien
cacttccttggtcactaaggctgag

SEQ ID NO: 1190442 - DNA, 25 bp, Homo sapien
aatagtatggatggcaagatgtgtc

SEQ ID NO: 1190443 - DNA, 25 bp, Homo sapien
gttaaatagtatggatggcaagatg

SEQ ID NO: 1190444 - DNA, 25 bp, Homo sapien
tatggatggcaagatgtgtccaagg

SEQ ID NO: 1190445 - DNA, 25 bp, Homo sapien
tagtatggatggcaagatgtgtcca

SEQ ID NO: 1190446 - DNA, 25 bp, Homo sapien
gccttgagcaactgatagacatctc

SEQ ID NO: 1190447 - DNA, 25 bp, Homo sapien
ggccagggcaggacatcgatagaca

SEQ ID NO: 1190448 - DNA, 25 bp, Homo sapien
ccttcttccgagttagtgctggcct

SEQ ID NO: 1190449 - DNA, 25 bp, Homo sapien
aagtagtagtctgctcaggccaggg

SEQ ID NO: 1190450 - DNA, 25 bp, Homo sapien
aaagcctgtgaggagtcatcagtgg

SEQ ID NO: 1190451 - DNA, 25 bp, Homo sapien
tcctgtgggccacaaacctgacaaa

SEQ ID NO: 1190452 - DNA, 25 bp, Homo sapien
ggaatggcctgcacttccaaagcca

SEQ ID NO: 1190453 - DNA, 25 bp, Homo sapien
acctgacaaaaggtagtgagtcttg

SEQ ID NO: 1190454 - DNA, 25 bp, Homo sapien
actatctgggagcattattgtcatc

SEQ ID NO: 1190455 - DNA, 25 bp, Homo sapien
aaccaagtgtgataattgacttggc

SEQ ID NO: 1190456 - DNA, 25 bp, Homo sapien
taattgacttggcatggtgatagca

SEQ ID NO: 1190457 - DNA, 25 bp, Homo sapien
tagcattggtgttggtatcattcac

SEQ ID NO: 1190458 - DNA, 25 bp, Homo sapien
gatttccacagaatagtctacgtct

SEQ ID NO: 1190459 - DNA, 25 bp, Homo sapien
cctttgtcactgtgcagatttccac

SEQ ID NO: 1190460 - DNA, 25 bp, Homo sapien
tccttgactaccagaactagattct

SEQ ID NO: 1190461 - DNA, 25 bp, Homo sapien
atgcctctgaggcagcttcaccaag

SEQ ID NO: 1190462 - DNA, 25 bp, Homo sapien
attgtcacatcccttgcagtgatat

SEQ ID NO: 1190463 - DNA, 25 bp, Homo sapien
gtcacatcccttgcagtgatatttg

SEQ ID NO: 1190464 - DNA, 25 bp, Homo sapien
tttattgtcacatcccttgcagtga

SEQ ID NO: 1190465 - DNA, 25 bp, Homo sapien
ttattgtcacatcccttgcagtgat

SEQ ID NO: 1190466 - DNA, 25 bp, Homo sapien
aaggctctgcaaatctgttgccgca

SEQ ID NO: 1190467 - DNA, 25 bp, Homo sapien
actttgcgattctgtttgtaccagc

SEQ ID NO: 1190468 - DNA, 25 bp, Homo sapien
gtaccagctgaaaatcacatgtaaa

SEQ ID NO: 1190469 - DNA, 25 bp, Homo sapien
cacatgtaaacttttgaacagtttc

SEQ ID NO: 1190470 - DNA, 25 bp, Homo sapien
tgatagattcccactgattgaacat

SEQ ID NO: 1190471 - DNA, 25 bp, Homo sapien
taacaataggtgtatgtggaaaaga

SEQ ID NO: 1190472 - DNA, 25 bp, Homo sapien
ttaagatttcctaacaataggtgta

SEQ ID NO: 1190473 - DNA, 25 bp, Homo sapien
gatttcctaacaataggtgtatgtg

SEQ ID NO: 1190474 - DNA, 25 bp, Homo sapien
tcctaacaataggtgtatgtggaaa

SEQ ID NO: 1190475 - DNA, 25 bp, Homo sapien
aatccctggtgctttctaaggctgg

SEQ ID NO: 1190476 - DNA, 25 bp, Homo sapien
ggcaaggtctggcatagatctctaa

SEQ ID NO: 1190477 - DNA, 25 bp, Homo sapien
gaacttgtccaggatttcggaatcc

SEQ ID NO: 1190478 - DNA, 25 bp, Homo sapien
ctaaagtgtggccatgatgtctgca

SEQ ID NO: 1190479 - DNA, 25 bp, Homo sapien
tgtgtgcagatatttaccaatcttg

SEQ ID NO: 1190480 - DNA, 25 bp, Homo sapien
gctctgtttagagatatagcctctt

SEQ ID NO: 1190481 - DNA, 25 bp, Homo sapien
tgtgggctctgtttagagatatagc

SEQ ID NO: 1190482 - DNA, 25 bp, Homo sapien
tttagagatatagcctctttgagct

SEQ ID NO: 1190483 - DNA, 25 bp, Homo sapien
taacatcattgtgtacttggctacc

SEQ ID NO: 1190484 - DNA, 25 bp, Homo sapien
cattgtgtacttggctacccactca

SEQ ID NO: 1190485 - DNA, 25 bp, Homo sapien
tgtacttggctacccactcagcatc

SEQ ID NO: 1190486 - DNA, 25 bp, Homo sapien
gctttctaacatcattgtgtacttg

SEQ ID NO: 1190487 - DNA, 25 bp, Homo sapien
cggatgattccactaatgtcagaca

SEQ ID NO: 1190488 - DNA, 25 bp, Homo sapien
cactgtgttcccaagctcctgtctt

SEQ ID NO: 1190489 - DNA, 25 bp, Homo sapien
cgttgtaaggctaatcctaggattt

SEQ ID NO: 1190490 - DNA, 25 bp, Homo sapien
gaatctgctaaatgtgaaatccgga

SEQ ID NO: 1190491 - DNA, 25 bp, Homo sapien
ggaactgaaaccttgtaagaactgc

SEQ ID NO: 1190492 - DNA, 25 bp, Homo sapien
cttgggatgggaactgaaaccttgt

SEQ ID NO: 1190493 - DNA, 25 bp, Homo sapien
tgggatgggaactgaaaccttgtaa

SEQ ID NO: 1190494 - DNA, 25 bp, Homo sapien
gatgggaactgaaaccttgtaagaa

SEQ ID NO: 1190495 - DNA, 25 bp, Homo sapien
acacagtctagaccccatgaaggag

SEQ ID NO: 1190496 - DNA, 25 bp, Homo sapien
ctcctggtgggaccgcaggcagatt

SEQ ID NO: 1190497 - DNA, 25 bp, Homo sapien
tctcatgaaagtggcttgtaaatgg

SEQ ID NO: 1190498 - DNA, 25 bp, Homo sapien
agtagtatctcatgaaagtggcttg

SEQ ID NO: 1190499 - DNA, 25 bp, Homo sapien
agaaagctcttggtttcaattcccg

SEQ ID NO: 1190500 - DNA, 25 bp, Homo sapien
tcttgaagtgagtttagatcacgtt

SEQ ID NO: 1190501 - DNA, 25 bp, Homo sapien
ttcaattcccggcatgtacttttct

SEQ ID NO: 1190502 - DNA, 25 bp, Homo sapien
tagatcacgtttcagcaaacgtcct

SEQ ID NO: 1190503 - DNA, 25 bp, Homo sapien
tcagagtttaacaataggagggctc

SEQ ID NO: 1190504 - DNA, 25 bp, Homo sapien
cctgtggcattaagcagaagacaga

SEQ ID NO: 1190505 - DNA, 25 bp, Homo sapien
gccgaaaaagaccgaagcgaacagc

SEQ ID NO: 1190506 - DNA, 25 bp, Homo sapien
gccacatcagggaggaggccgaaaa

SEQ ID NO: 1190507 - DNA, 25 bp, Homo sapien
tattgtcactgctaggtttgggctt

SEQ ID NO: 1190508 - DNA, 25 bp, Homo sapien
caaaagggactttgcggttatcttg

SEQ ID NO: 1190509 - DNA, 25 bp, Homo sapien
gggagccataattatagcctagaga

SEQ ID NO: 1190510 - DNA, 25 bp, Homo sapien
gagaactaggcagactgactcccat

SEQ ID NO: 1190511 - DNA, 25 bp, Homo sapien
ccacagcagtaggactgggctaggg

SEQ ID NO: 1190512 - DNA, 25 bp, Homo sapien
ctaggggagggaagcactactgcca

SEQ ID NO: 1190513 - DNA, 25 bp, Homo sapien
cagcagaacaagtgtccctgaaggg

SEQ ID NO: 1190514 - DNA, 25 bp, Homo sapien
gccagcagttctgagctaaggatgc

SEQ ID NO: 1190515 - DNA, 25 bp, Homo sapien
gtatcatagttggaggagtagcagc

SEQ ID NO: 1190516 - DNA, 25 bp, Homo sapien
caagtttgtatcatagttggaggag

SEQ ID NO: 1190517 - DNA, 25 bp, Homo sapien
tatccaataagatcctagatgagct

SEQ ID NO: 1190518 - DNA, 25 bp, Homo sapien
gatgagcttccaatgcacctgcaga

SEQ ID NO: 1190519 - DNA, 25 bp, Homo sapien
acaatccccatgctccctcatcagt

SEQ ID NO: 1190520 - DNA, 25 bp, Homo sapien
tcatcagtcccatgtctgccagagt

SEQ ID NO: 1190521 - DNA, 25 bp, Homo sapien
ccatgtctgccagagtgcccattgt

SEQ ID NO: 1190522 - DNA, 25 bp, Homo sapien
tgcccattgtgattagggtcctgcc

SEQ ID NO: 1190523 - DNA, 25 bp, Homo sapien
ttatgcatgtaaagtcttccgcagg

SEQ ID NO: 1190524 - DNA, 25 bp, Homo sapien
catgtaaagtcttccgcaggtagtc

SEQ ID NO: 1190525 - DNA, 25 bp, Homo sapien
tggtagatgttatgcatgtaaagtc

SEQ ID NO: 1190526 - DNA, 25 bp, Homo sapien
ctcattggctttatggtagatgtta

SEQ ID NO: 1190527 - DNA, 25 bp, Homo sapien
agcttctgtgggtctgctatatgca

SEQ ID NO: 1190528 - DNA, 25 bp, Homo sapien
tccttgtcttgggtcaaagagctga

SEQ ID NO: 1190529 - DNA, 25 bp, Homo sapien
tgaatggcatgggaataagtccaag

SEQ ID NO: 1190530 - DNA, 25 bp, Homo sapien
actaaagcaggttccctgacagtga

SEQ ID NO: 1190531 - DNA, 25 bp, Homo sapien
tagagttttgccatgaattggcata

SEQ ID NO: 1190532 - DNA, 25 bp, Homo sapien
ctggataggaaatggggcatcgtct

SEQ ID NO: 1190533 - DNA, 25 bp, Homo sapien
caagcctatttcattgcatagagtt

SEQ ID NO: 1190534 - DNA, 25 bp, Homo sapien
ttcccacagagacaagcaggcaagc

SEQ ID NO: 1190535 - DNA, 25 bp, Homo sapien
cccgtagggcttggagaatgtttgc

SEQ ID NO: 1190536 - DNA, 25 bp, Homo sapien
cagtaggacttaacgttcccagtca

SEQ ID NO: 1190537 - DNA, 25 bp, Homo sapien
ggtgctgttcacttcgcccttggaa

SEQ ID NO: 1190538 - DNA, 25 bp, Homo sapien
tacttttatgcaggcccaggcaagg

SEQ ID NO: 1190539 - DNA, 25 bp, Homo sapien
ttcacaaaggctccataaatctgtg

SEQ ID NO: 1190540 - DNA, 25 bp, Homo sapien
cttccattttctgcccgacgattgc

SEQ ID NO: 1190541 - DNA, 25 bp, Homo sapien
tgcccgacgattgctagtagagcag

SEQ ID NO: 1190542 - DNA, 25 bp, Homo sapien
acaaaggctccataaatctgtgtat

SEQ ID NO: 1190543 - DNA, 25 bp, Homo sapien
ttagagttgagctttagcccatcct

SEQ ID NO: 1190544 - DNA, 25 bp, Homo sapien
gcactgaggtccaatccaatcagac

SEQ ID NO: 1190545 - DNA, 25 bp, Homo sapien
acagcaactccagcactgaggtcca

SEQ ID NO: 1190546 - DNA, 25 bp, Homo sapien
catcctccaacatggtgggagtcac

SEQ ID NO: 1190547 - DNA, 25 bp, Homo sapien
tcaactaatataggccttgcttcaa

SEQ ID NO: 1190548 - DNA, 25 bp, Homo sapien
taatataggccttgcttcaaggagg

SEQ ID NO: 1190549 - DNA, 25 bp, Homo sapien
gcatgaagatcaactaatataggcc

SEQ ID NO: 1190550 - DNA, 25 bp, Homo sapien
ttaggtgccattggcatgaagatca

SEQ ID NO: 1190551 - DNA, 25 bp, Homo sapien
gatttttattctgatgcttgaccat

SEQ ID NO: 1190552 - DNA, 25 bp, Homo sapien
cagaaggctcgttttcactgaagca

SEQ ID NO: 1190553 - DNA, 25 bp, Homo sapien
agctacccaagggtgtatgtgtgca

SEQ ID NO: 1190554 - DNA, 25 bp, Homo sapien
tccaagcttgagactgtcagaaggc

SEQ ID NO: 1190555 - DNA, 25 bp, Homo sapien
ggttgaagcccaaaataactcagag

SEQ ID NO: 1190556 - DNA, 25 bp, Homo sapien
caggagctgtatggcagtcttgttc

SEQ ID NO: 1190557 - DNA, 25 bp, Homo sapien
tggtaccacatatttctcagaggag

SEQ ID NO: 1190558 - DNA, 25 bp, Homo sapien
gagaaatgagattttacacccttca

SEQ ID NO: 1190559 - DNA, 25 bp, Homo sapien
taaatagggctccagtcaggagctg

SEQ ID NO: 1190560 - DNA, 25 bp, Homo sapien
tgaccatttgtggaaccacattgaa

SEQ ID NO: 1190561 - DNA, 25 bp, Homo sapien
gaccatttgtggaaccacattgaat

SEQ ID NO: 1190562 - DNA, 25 bp, Homo sapien
aaccacattgaatggaatgggtgga

SEQ ID NO: 1190563 - DNA, 25 bp, Homo sapien
cacattgaatggaatgggtggacta

SEQ ID NO: 1190564 - DNA, 25 bp, Homo sapien
gagcctgggcacatgaactgggtag

SEQ ID NO: 1190565 - DNA, 25 bp, Homo sapien
cctacaagggtgagtctctctgttg

SEQ ID NO: 1190566 - DNA, 25 bp, Homo sapien
ccatgttgtgggttgtggccaccca

SEQ ID NO: 1190567 - DNA, 25 bp, Homo sapien
gacagaagcctaagggagtcggcac

SEQ ID NO: 1190568 - DNA, 25 bp, Homo sapien
ggaaatgacagggtttaggaggcat

SEQ ID NO: 1190569 - DNA, 25 bp, Homo sapien
gggaaatgacagggtttaggaggca

SEQ ID NO: 1190570 - DNA, 25 bp, Homo sapien
ttctaaatcctgcttttctcttgca

SEQ ID NO: 1190571 - DNA, 25 bp, Homo sapien
gtcttctaaatcctgcttttctctt

SEQ ID NO: 1190572 - DNA, 25 bp, Homo sapien
cttctaaatcctgcttttctcttgc

SEQ ID NO: 1190573 - DNA, 25 bp, Homo sapien
ttagaccctgatcaacaccagaggg

SEQ ID NO: 1190574 - DNA, 25 bp, Homo sapien
tcctttagaccctgatcaacaccag

SEQ ID NO: 1190575 - DNA, 25 bp, Homo sapien
aacttcctttagaccctgatcaaca

SEQ ID NO: 1190576 - DNA, 25 bp, Homo sapien
gcaacttcctttagaccctgatcaa

SEQ ID NO: 1190577 - DNA, 25 bp, Homo sapien
tcattcatagatgcaccatccttct

SEQ ID NO: 1190578 - DNA, 25 bp, Homo sapien
gatgttgattatagccttcactggg

SEQ ID NO: 1190579 - DNA, 25 bp, Homo sapien
ggttctgataacactaattcctgca

SEQ ID NO: 1190580 - DNA, 25 bp, Homo sapien
tgtagtggctttcatcagttgccag

SEQ ID NO: 1190581 - DNA, 25 bp, Homo sapien
ttcactgggttctgataacactaat

SEQ ID NO: 1190582 - DNA, 25 bp, Homo sapien
catatttagtagactccaaagccca

SEQ ID NO: 1190583 - DNA, 25 bp, Homo sapien
cctctaggacattgaggcttctgtg

SEQ ID NO: 1190584 - DNA, 25 bp, Homo sapien
tgattcatggagctagcctctagga

SEQ ID NO: 1190585 - DNA, 25 bp, Homo sapien
gggcattatcctacagacagagcat

SEQ ID NO: 1190586 - DNA, 25 bp, Homo sapien
cattgagcagaactgcactgagcac

SEQ ID NO: 1190587 - DNA, 25 bp, Homo sapien
tttggctgacagcaatatctagcat

SEQ ID NO: 1190588 - DNA, 25 bp, Homo sapien
tgcctcccatatgtcaaggtgtcag

SEQ ID NO: 1190589 - DNA, 25 bp, Homo sapien
gacaggagtttggttaccctgagga

SEQ ID NO: 1190590 - DNA, 25 bp, Homo sapien
gcattagggcttttggtatgatggc

SEQ ID NO: 1190591 - DNA, 25 bp, Homo sapien
tatgatggctaccagggatgcttcc

SEQ ID NO: 1190592 - DNA, 25 bp, Homo sapien
tgataatgatgctccacatctcttt

SEQ ID NO: 1190593 - DNA, 25 bp, Homo sapien
taggcccaagatttaatgggtagga

SEQ ID NO: 1190594 - DNA, 25 bp, Homo sapien
cccttgtctgctgcgctgcagttca

SEQ ID NO: 1190595 - DNA, 25 bp, Homo sapien
ctgatcacatccagatcactttgct

SEQ ID NO: 1190596 - DNA, 25 bp, Homo sapien
gatcacatccagatcactttgctgt

SEQ ID NO: 1190597 - DNA, 25 bp, Homo sapien
catccagatcactttgctgtttgcc

SEQ ID NO: 1190598 - DNA, 25 bp, Homo sapien
acagggttggtgattctctgttgca

SEQ ID NO: 1190599 - DNA, 25 bp, Homo sapien
gattctctgttgcatcttgggagta

SEQ ID NO: 1190600 - DNA, 25 bp, Homo sapien
atcttgggagtaataagaagattcc

SEQ ID NO: 1190601 - DNA, 25 bp, Homo sapien
tagccccctttttctaatccagatg

SEQ ID NO: 1190602 - DNA, 25 bp, Homo sapien
aaagacttagcttgtggttctgctg

SEQ ID NO: 1190603 - DNA, 25 bp, Homo sapien
tggcaggtctcccttgagcagctaa

SEQ ID NO: 1190604 - DNA, 25 bp, Homo sapien
ccttgagcagctaagatgacctgca

SEQ ID NO: 1190605 - DNA, 25 bp, Homo sapien
acactggtggagcttggcacaaaag

SEQ ID NO: 1190606 - DNA, 25 bp, Homo sapien
cccaacgatcacctttatgatatcc

SEQ ID NO: 1190607 - DNA, 25 bp, Homo sapien
gtccaaattggaatgtactgagttt

SEQ ID NO: 1190608 - DNA, 25 bp, Homo sapien
ctgagtttcacccaacgatcacctt

SEQ ID NO: 1190609 - DNA, 25 bp, Homo sapien
ctggaagtccaaattggaatgtact

SEQ ID NO: 1190610 - DNA, 25 bp, Homo sapien
cccagtatctgaccggtgtctgcat

SEQ ID NO: 1190611 - DNA, 25 bp, Homo sapien
tcccagtatctgaccggtgtctgca

SEQ ID NO: 1190612 - DNA, 25 bp, Homo sapien
ccatacagtccttgtttgcttcaga

SEQ ID NO: 1190613 - DNA, 25 bp, Homo sapien
tgtccaacaaccgtctccatacagt

SEQ ID NO: 1190614 - DNA, 25 bp, Homo sapien
gaaagaaagtttaggccttgcaaga

SEQ ID NO: 1190615 - DNA, 25 bp, Homo sapien
aagaagagcatgtccaacaaccgtc

SEQ ID NO: 1190616 - DNA, 25 bp, Homo sapien
accaccgaggggactattctttcag

SEQ ID NO: 1190617 - DNA, 25 bp, Homo sapien
cagtgttcatagcaggtgtctctat

SEQ ID NO: 1190618 - DNA, 25 bp, Homo sapien
gcaggtgtctctattaggtttttcc

SEQ ID NO: 1190619 - DNA, 25 bp, Homo sapien
catccaggtggatcaaattagttaa

SEQ ID NO: 1190620 - DNA, 25 bp, Homo sapien
tattctgtacacataggaggtcatg

SEQ ID NO: 1190621 - DNA, 25 bp, Homo sapien
aatcctcttaagactgctgcctggg

SEQ ID NO: 1190622 - DNA, 25 bp, Homo sapien
tgctgaccacagattgcgatagaaa

SEQ ID NO: 1190623 - DNA, 25 bp, Homo sapien
ggcagtgcattcatggctagataca

SEQ ID NO: 1190624 - DNA, 25 bp, Homo sapien
ccctgggtataaggcaatatttcat

SEQ ID NO: 1190625 - DNA, 25 bp, Homo sapien
tatttcattgaaggctagcatcagg

SEQ ID NO: 1190626 - DNA, 25 bp, Homo sapien
atctctctaacgcacactggttctt

SEQ ID NO: 1190627 - DNA, 25 bp, Homo sapien
gaaggctagcatcaggacagaagaa

SEQ ID NO: 1190628 - DNA, 25 bp, Homo sapien
ctgtggattccatcttgggttttta

SEQ ID NO: 1190629 - DNA, 25 bp, Homo sapien
tgaacagctcagtaagaatataacg

SEQ ID NO: 1190630 - DNA, 25 bp, Homo sapien
tgcactgagttagaccactgatacc

SEQ ID NO: 1190631 - DNA, 25 bp, Homo sapien
gaatataacgaaacagggttggatg

SEQ ID NO: 1190632 - DNA, 25 bp, Homo sapien
aactggctgcaattgtgaacagctc

SEQ ID NO: 1190633 - DNA, 25 bp, Homo sapien
tatctccaggacaccataggtactg

SEQ ID NO: 1190634 - DNA, 25 bp, Homo sapien
tgtcactgcatctcacgatcaaaag

SEQ ID NO: 1190635 - DNA, 25 bp, Homo sapien
tatagaatcatgctcatgggagatg

SEQ ID NO: 1190636 - DNA, 25 bp, Homo sapien
cttgatcccttgctacagagctata

SEQ ID NO: 1190637 - DNA, 25 bp, Homo sapien
gactccagacccatgtgccacagtg

SEQ ID NO: 1190638 - DNA, 25 bp, Homo sapien
ccctgcaaccattgcagaaaaggat

SEQ ID NO: 1190639 - DNA, 25 bp, Homo sapien
cagtgcaagacaccagcaattccag

SEQ ID NO: 1190640 - DNA, 25 bp, Homo sapien
aaaaggatgtctgagggagcaggcc

SEQ ID NO: 1190641 - DNA, 25 bp, Homo sapien
atccaggaggacttcaccgtgtcca

SEQ ID NO: 1190642 - DNA, 25 bp, Homo sapien
tatccaggaggacttcaccgtgtcc

SEQ ID NO: 1190643 - DNA, 25 bp, Homo sapien
tccaggaggacttcaccgtgtccag

SEQ ID NO: 1190644 - DNA, 25 bp, Homo sapien
ctatccaggaggacttcaccgtgtc

SEQ ID NO: 1190645 - DNA, 25 bp, Homo sapien
gactaagactgggaaatcaagctat

SEQ ID NO: 1190646 - DNA, 25 bp, Homo sapien
tcaagctatgagtggtacagtaact

SEQ ID NO: 1190647 - DNA, 25 bp, Homo sapien
gatggatatggttttgcctacaaca

SEQ ID NO: 1190648 - DNA, 25 bp, Homo sapien
cctacaacacgtgggttaaagatcg

SEQ ID NO: 1190649 - DNA, 25 bp, Homo sapien
tctgagctgcacaaaagagaactgg

SEQ ID NO: 1190650 - DNA, 25 bp, Homo sapien
taagcccttttaccggtgagtgagc

SEQ ID NO: 1190651 - DNA, 25 bp, Homo sapien
tatcaggttcccagattcactgcgc

SEQ ID NO: 1190652 - DNA, 25 bp, Homo sapien
tcacttgtagctcaggccattggcc

SEQ ID NO: 1190653 - DNA, 25 bp, Homo sapien
tctttatggtttactgtgtcatccc

SEQ ID NO: 1190654 - DNA, 25 bp, Homo sapien
tttctttatggtttactgtgtcatc

SEQ ID NO: 1190655 - DNA, 25 bp, Homo sapien
tatggtttactgtgtcatccctcac

SEQ ID NO: 1190656 - DNA, 25 bp, Homo sapien
tgtcatccctcactagacttttaat

SEQ ID NO: 1190657 - DNA, 25 bp, Homo sapien
gtggcggccgaaaggatgtgacaag

SEQ ID NO: 1190658 - DNA, 25 bp, Homo sapien
agtggcggccgaaaggatgtgacaa

SEQ ID NO: 1190659 - DNA, 25 bp, Homo sapien
tggcggccgaaaggatgtgacaagt

SEQ ID NO: 1190660 - DNA, 25 bp, Homo sapien
ccacaggcagtcatttactgggtca

SEQ ID NO: 1190661 - DNA, 25 bp, Homo sapien
gatagcagaagtacaaccagggcct

SEQ ID NO: 1190662 - DNA, 25 bp, Homo sapien
gcagtgtgccatggtttctcagata

SEQ ID NO: 1190663 - DNA, 25 bp, Homo sapien
tcaggcattgaactaggtgggtcat

SEQ ID NO: 1190664 - DNA, 25 bp, Homo sapien
caaagaatttgccagcgacttaaaa

SEQ ID NO: 1190665 - DNA, 25 bp, Homo sapien
ttctcttcgtgccttgggtcttgct

SEQ ID NO: 1190666 - DNA, 25 bp, Homo sapien
tgtcttctcttcgtgccttgggtct

SEQ ID NO: 1190667 - DNA, 25 bp, Homo sapien
gtcttctcttcgtgccttgggtctt

SEQ ID NO: 1190668 - DNA, 25 bp, Homo sapien
tcttctcttcgtgccttgggtcttg

SEQ ID NO: 1190669 - DNA, 25 bp, Homo sapien
gctgtcacattgttcgggggctgtg

SEQ ID NO: 1190670 - DNA, 25 bp, Homo sapien
tggctgtcacattgttcgggggctg

SEQ ID NO: 1190671 - DNA, 25 bp, Homo sapien
ggctgtcacattgttcgggggctgt

SEQ ID NO: 1190672 - DNA, 25 bp, Homo sapien
ctgtcacattgttcgggggctgtgc

SEQ ID NO: 1190673 - DNA, 25 bp, Homo sapien
tgccaataattagacaaactttacc

SEQ ID NO: 1190674 - DNA, 25 bp, Homo sapien
ccttgtacagctgcacattataaga

SEQ ID NO: 1190675 - DNA, 25 bp, Homo sapien
cgatgaagcatttggatcgaggtgt

SEQ ID NO: 1190676 - DNA, 25 bp, Homo sapien
aacttgtttgaaagggcgatgaagc

SEQ ID NO: 1190677 - DNA, 25 bp, Homo sapien
tgaacagtcttagggatagctctgg

SEQ ID NO: 1190678 - DNA, 25 bp, Homo sapien
tcttagggatagctctggagcaagg

SEQ ID NO: 1190679 - DNA, 25 bp, Homo sapien
ctacctgaacagtcttagggatagc

SEQ ID NO: 1190680 - DNA, 25 bp, Homo sapien
tctctccataggcctctagcaggac

SEQ ID NO: 1190681 - DNA, 25 bp, Homo sapien
caccagcagtggctattatcatgac

SEQ ID NO: 1190682 - DNA, 25 bp, Homo sapien
caatccaaggaatatcacatgtgcc

SEQ ID NO: 1190683 - DNA, 25 bp, Homo sapien
tgccgtgctgggacagtaccaggca

SEQ ID NO: 1190684 - DNA, 25 bp, Homo sapien
tcatgactctgctctcaatccaagg

SEQ ID NO: 1190685 - DNA, 25 bp, Homo sapien
tacgctggtgctatgaggaggtcaa

SEQ ID NO: 1190686 - DNA, 25 bp, Homo sapien
tttgatgcccaaacagttaactgcc

SEQ ID NO: 1190687 - DNA, 25 bp, Homo sapien
caggatatgcaggaagctatgtgcc

SEQ ID NO: 1190688 - DNA, 25 bp, Homo sapien
tccagagagccaagagaccgtaaac

SEQ ID NO: 1190689 - DNA, 25 bp, Homo sapien
gtaaaatattagcatgattattgct

SEQ ID NO: 1190690 - DNA, 25 bp, Homo sapien
aaaatattagcatgattattgctgt

SEQ ID NO: 1190691 - DNA, 25 bp, Homo sapien
ctgtaaaatattagcatgattattg

SEQ ID NO: 1190692 - DNA, 25 bp, Homo sapien
atattagcatgattattgctgtatc

SEQ ID NO: 1190693 - DNA, 25 bp, Homo sapien
ctggtaacgtgttccttcgttcgct

SEQ ID NO: 1190694 - DNA, 25 bp, Homo sapien
aacgtgttccttcgttcgctgatgg

SEQ ID NO: 1190695 - DNA, 25 bp, Homo sapien
cgctgatgggtttgattaaagtaat

SEQ ID NO: 1190696 - DNA, 25 bp, Homo sapien
tgttccttcgttcgctgatgggttt

SEQ ID NO: 1190697 - DNA, 25 bp, Homo sapien
cttgctgctgattgctgtaaaatgc

SEQ ID NO: 1190698 - DNA, 25 bp, Homo sapien
cccttgctgctgattgctgtaaaat

SEQ ID NO: 1190699 - DNA, 25 bp, Homo sapien
aatgcaaagtaattaacagcgagcg

SEQ ID NO: 1190700 - DNA, 25 bp, Homo sapien
cagcgagcggtagcagttattccca

SEQ ID NO: 1190701 - DNA, 25 bp, Homo sapien
catcgaatccccggtaaaacatatt

SEQ ID NO: 1190702 - DNA, 25 bp, Homo sapien
atcctcttcccagcggtacctattg

SEQ ID NO: 1190703 - DNA, 25 bp, Homo sapien
gcatcctcttcccagcggtacctat

SEQ ID NO: 1190704 - DNA, 25 bp, Homo sapien
gagcagcggcccatcgaatccccgg

SEQ ID NO: 1190705 - DNA, 25 bp, Homo sapien
gccctagtgctgaggtagtgaactg

SEQ ID NO: 1190706 - DNA, 25 bp, Homo sapien
ccctagtgctgaggtagtgaactgg

SEQ ID NO: 1190707 - DNA, 25 bp, Homo sapien
tatagctagccagttgtccttgcac

SEQ ID NO: 1190708 - DNA, 25 bp, Homo sapien
agctagccagttgtccttgcaccat

SEQ ID NO: 1190709 - DNA, 25 bp, Homo sapien
atagctagccagttgtccttgcacc

SEQ ID NO: 1190710 - DNA, 25 bp, Homo sapien
tagctagccagttgtccttgcacca

SEQ ID NO: 1190711 - DNA, 25 bp, Homo sapien
agaatcttaaatccctgtgtctcag

SEQ ID NO: 1190712 - DNA, 25 bp, Homo sapien
cctgtgtctcagacccagattccaa

SEQ ID NO: 1190713 - DNA, 25 bp, Homo sapien
gtctcagacccagattccaaaatca

SEQ ID NO: 1190714 - DNA, 25 bp, Homo sapien
agcccagaatcttaaatccctgtgt

SEQ ID NO: 1190715 - DNA, 25 bp, Homo sapien
catgatgttttgtgttgctactgca

SEQ ID NO: 1190716 - DNA, 25 bp, Homo sapien
gcggccatcatgagaaatatagtag

SEQ ID NO: 1190717 - DNA, 25 bp, Homo sapien
gactgcacgttttgaggacttttac

SEQ ID NO: 1190718 - DNA, 25 bp, Homo sapien
acaatgtggataggagcggccatca

SEQ ID NO: 1190719 - DNA, 25 bp, Homo sapien
gggctgagaccagagtcttatgcat

SEQ ID NO: 1190720 - DNA, 25 bp, Homo sapien
ctcatgatgagcctctggaacatgg

SEQ ID NO: 1190721 - DNA, 25 bp, Homo sapien
ccttttcaaactcctttccaggcat

SEQ ID NO: 1190722 - DNA, 25 bp, Homo sapien
tccttttcaaactcctttccaggca

SEQ ID NO: 1190723 - DNA, 25 bp, Homo sapien
ttgttaccctggttaaggctgcagt

SEQ ID NO: 1190724 - DNA, 25 bp, Homo sapien
acagccgctatggttgttaccctgg

SEQ ID NO: 1190725 - DNA, 25 bp, Homo sapien
tcagatggttgcaggaaaaacagcc

SEQ ID NO: 1190726 - DNA, 25 bp, Homo sapien
gaaaaacagccgctatggttgttac

SEQ ID NO: 1190727 - DNA, 25 bp, Homo sapien
gagcagcaagccaattgcaggctcc

SEQ ID NO: 1190728 - DNA, 25 bp, Homo sapien
ctgaggtgctgagtataatgaatgg

SEQ ID NO: 1190729 - DNA, 25 bp, Homo sapien
agtataatgaatggggagcagcaag

SEQ ID NO: 1190730 - DNA, 25 bp, Homo sapien
gagcactctctgaggtgctgagtat

SEQ ID NO: 1190731 - DNA, 25 bp, Homo sapien
tgcttctcttttccctgtccaacca

SEQ ID NO: 1190732 - DNA, 25 bp, Homo sapien
ctgcttctcttttccctgtccaacc

SEQ ID NO: 1190733 - DNA, 25 bp, Homo sapien
gcttctcttttccctgtccaaccat

SEQ ID NO: 1190734 - DNA, 25 bp, Homo sapien
gttgttgagttggtatttacacgca

SEQ ID NO: 1190735 - DNA, 25 bp, Homo sapien
gttggtatttacacgcagcacagtc

SEQ ID NO: 1190736 - DNA, 25 bp, Homo sapien
gcaggtgttgttgagttggtattta

SEQ ID NO: 1190737 - DNA, 25 bp, Homo sapien
ttgagttggtatttacacgcagcac

SEQ ID NO: 1190738 - DNA, 25 bp, Homo sapien
atatcttttggctccaacctcccgg

SEQ ID NO: 1190739 - DNA, 25 bp, Homo sapien
tcttttggctccaacctcccggaga

SEQ ID NO: 1190740 - DNA, 25 bp, Homo sapien
tctccatatcttttggctccaacct

SEQ ID NO: 1190741 - DNA, 25 bp, Homo sapien
tggctccaacctcccggagattctt

SEQ ID NO: 1190742 - DNA, 25 bp, Homo sapien
ggttcaggtctgttccatgtgtatt

SEQ ID NO: 1190743 - DNA, 25 bp, Homo sapien
cagatctaatggacttggcttaagg

SEQ ID NO: 1190744 - DNA, 25 bp, Homo sapien
tcaggcttcagatctaatggacttg

SEQ ID NO: 1190745 - DNA, 25 bp, Homo sapien
gacttggcttaaggctgtatttttg

SEQ ID NO: 1190746 - DNA, 25 bp, Homo sapien
gaaaaacacttttgacgtgaataca

SEQ ID NO: 1190747 - DNA, 25 bp, Homo sapien
gacaatttagagccgtttgtaagaa

SEQ ID NO: 1190748 - DNA, 25 bp, Homo sapien
ctgagacaatttagagccgtttgta

SEQ ID NO: 1190749 - DNA, 25 bp, Homo sapien
gagacaatttagagccgtttgtaag

SEQ ID NO: 1190750 - DNA, 25 bp, Homo sapien
cttgtggacggtgtctgtgtcctca

SEQ ID NO: 1190751 - DNA, 25 bp, Homo sapien
ctcttcttgtggacggtgtctgtgt

SEQ ID NO: 1190752 - DNA, 25 bp, Homo sapien
tccccctcttcttgtggacggtgtc

SEQ ID NO: 1190753 - DNA, 25 bp, Homo sapien
ccctcttcttgtggacggtgtctgt

SEQ ID NO: 1190754 - DNA, 25 bp, Homo sapien
ctggacctgtcatgggtgtccgggg

SEQ ID NO: 1190755 - DNA, 25 bp, Homo sapien
acatgtctggcgtgtccacattcac

SEQ ID NO: 1190756 - DNA, 25 bp, Homo sapien
gacatgtctggcgtgtccacattca

SEQ ID NO: 1190757 - DNA, 25 bp, Homo sapien
ctgtcatgggtgtccgggggtgaga

SEQ ID NO: 1190758 - DNA, 25 bp, Homo sapien
gcagaggtggactgatggccacaag

SEQ ID NO: 1190759 - DNA, 25 bp, Homo sapien
cagaggtggactgatggccacaagg

SEQ ID NO: 1190760 - DNA, 25 bp, Homo sapien
tgatagtgatggcaatggcagtgac

SEQ ID NO: 1190761 - DNA, 25 bp, Homo sapien
atgatttgatagtgatggcaatggc

SEQ ID NO: 1190762 - DNA, 25 bp, Homo sapien
tttgatagtgatggcaatggcagtg

SEQ ID NO: 1190763 - DNA, 25 bp, Homo sapien
tagtgatggcaatggcagtgaccat

SEQ ID NO: 1190764 - DNA, 25 bp, Homo sapien
tcttcatggctgctgatgacgctga

SEQ ID NO: 1190765 - DNA, 25 bp, Homo sapien
acgctgagaagcttggggcagatat

SEQ ID NO: 1190766 - DNA, 25 bp, Homo sapien
ctggaagttgtctatggtctctgcc

SEQ ID NO: 1190767 - DNA, 25 bp, Homo sapien
gaagttgtctatggtctctgcctcc

SEQ ID NO: 1190768 - DNA, 25 bp, Homo sapien
tgctgaagaaggtctagtcaggccc

SEQ ID NO: 1190769 - DNA, 25 bp, Homo sapien
aaccaagccgtagagccacaaccat

SEQ ID NO: 1190770 - DNA, 25 bp, Homo sapien
cacaaccatgtgggacctgctgaag

SEQ ID NO: 1190771 - DNA, 25 bp, Homo sapien
tagtcaggcccagggttaaccacca

SEQ ID NO: 1190772 - DNA, 25 bp, Homo sapien
tatagaggcacagtcagcattttgc

SEQ ID NO: 1190773 - DNA, 25 bp, Homo sapien
cagggttatagaggcacagtcagca

SEQ ID NO: 1190774 - DNA, 25 bp, Homo sapien
ggttatagaggcacagtcagcattt

SEQ ID NO: 1190775 - DNA, 25 bp, Homo sapien
cacagggttatagaggcacagtcag

SEQ ID NO: 1190776 - DNA, 25 bp, Homo sapien
aaagctgagatagggcagctccagc

SEQ ID NO: 1190777 - DNA, 25 bp, Homo sapien
gaaagctgagatagggcagctccag

SEQ ID NO: 1190778 - DNA, 25 bp, Homo sapien
aagctgagatagggcagctccagct

SEQ ID NO: 1190779 - DNA, 25 bp, Homo sapien
tctgtaatgtgatagttgcaatgag

SEQ ID NO: 1190780 - DNA, 25 bp, Homo sapien
tgagaggagagttagtaggatgagg

SEQ ID NO: 1190781 - DNA, 25 bp, Homo sapien
tattgcccgtgagtggcattctgtg

SEQ ID NO: 1190782 - DNA, 25 bp, Homo sapien
tgtggcaagtaaaaccatgtggtca

SEQ ID NO: 1190783 - DNA, 25 bp, Homo sapien
tgtcttccggacagcagtcaaaata

SEQ ID NO: 1190784 - DNA, 25 bp, Homo sapien
tgagagtcctctgggatgtcataga

SEQ ID NO: 1190785 - DNA, 25 bp, Homo sapien
cagtatgttatggtaatgtggccct

SEQ ID NO: 1190786 - DNA, 25 bp, Homo sapien
gtcaaaatatcttccgagcagaggg

SEQ ID NO: 1190787 - DNA, 25 bp, Homo sapien
tcctgtgcaaggctaatgttcatat

SEQ ID NO: 1190788 - DNA, 25 bp, Homo sapien
tttcctgtgcaaggctaatgttcat

SEQ ID NO: 1190789 - DNA, 25 bp, Homo sapien
cctgtgcaaggctaatgttcatatg

SEQ ID NO: 1190790 - DNA, 25 bp, Homo sapien
ctgtgcaaggctaatgttcatatgg

SEQ ID NO: 1190791 - DNA, 25 bp, Homo sapien
ttattgtgcgtagcccaggttccaa

SEQ ID NO: 1190792 - DNA, 25 bp, Homo sapien
tctttctttattgtgcgtagcccag

SEQ ID NO: 1190793 - DNA, 25 bp, Homo sapien
ggagttctttctttattgtgcgtag

SEQ ID NO: 1190794 - DNA, 25 bp, Homo sapien
caggttccaaaaggggtcacatttg

SEQ ID NO: 1190795 - DNA, 25 bp, Homo sapien
tctttggtgacattctgtccccgaa

SEQ ID NO: 1190796 - DNA, 25 bp, Homo sapien
tccatatctgttgctccccaactgt

SEQ ID NO: 1190797 - DNA, 25 bp, Homo sapien
tcagaaaatcattggtgtgaaggag

SEQ ID NO: 1190798 - DNA, 25 bp, Homo sapien
ccccaactgtgctgatcagatccaa

SEQ ID NO: 1190799 - DNA, 25 bp, Homo sapien
gaattcatttagaaacgctgcagtg

SEQ ID NO: 1190800 - DNA, 25 bp, Homo sapien
tttcctcccggtgctttcctgtcat

SEQ ID NO: 1190801 - DNA, 25 bp, Homo sapien
gctgacatgattgtcagcaggcagg

SEQ ID NO: 1190802 - DNA, 25 bp, Homo sapien
tgcagtgctgacatgattgtcagca

SEQ ID NO: 1190803 - DNA, 25 bp, Homo sapien
tgctgtccccttggcccgaaatact

SEQ ID NO: 1190804 - DNA, 25 bp, Homo sapien
cttggcccgaaatactcatccacat

SEQ ID NO: 1190805 - DNA, 25 bp, Homo sapien
ccccttggcccgaaatactcatcca

SEQ ID NO: 1190806 - DNA, 25 bp, Homo sapien
ctgctgtccccttggcccgaaatac

SEQ ID NO: 1190807 - DNA, 25 bp, Homo sapien
ttgctccctccgtgcatttttctcc

SEQ ID NO: 1190808 - DNA, 25 bp, Homo sapien
ttgccccttgtctcctctcactgag

SEQ ID NO: 1190809 - DNA, 25 bp, Homo sapien
gatactggcaattggcaggcctgct

SEQ ID NO: 1190810 - DNA, 25 bp, Homo sapien
tctgaaagcacagggcagacttgaa

SEQ ID NO: 1190811 - DNA, 25 bp, Homo sapien
cctggtttccgaggcttgcacagga

SEQ ID NO: 1190812 - DNA, 25 bp, Homo sapien
cgggccctggtttccgaggcttgca

SEQ ID NO: 1190813 - DNA, 25 bp, Homo sapien
tgccctctatgaggactcatagtgt

SEQ ID NO: 1190814 - DNA, 25 bp, Homo sapien
cctctatgaggactcatagtgtcca

SEQ ID NO: 1190815 - DNA, 25 bp, Homo sapien
tctatgaggactcatagtgtccatg

SEQ ID NO: 1190816 - DNA, 25 bp, Homo sapien
tgtgccctctatgaggactcatagt

SEQ ID NO: 1190817 - DNA, 25 bp, Homo sapien
tctcaatggaattggatgctgtcct

SEQ ID NO: 1190818 - DNA, 25 bp, Homo sapien
tgttgaggaaggaaatacataatga

SEQ ID NO: 1190819 - DNA, 25 bp, Homo sapien
cacctcttgtcacagaattctcaat

SEQ ID NO: 1190820 - DNA, 25 bp, Homo sapien
ctctttgatgccacaaaaaactggg

SEQ ID NO: 1190821 - DNA, 25 bp, Homo sapien
taaatggggcgacatgtggagcaac

SEQ ID NO: 1190822 - DNA, 25 bp, Homo sapien
ggacaagtgacgctgacacaatcgg

SEQ ID NO: 1190823 - DNA, 25 bp, Homo sapien
gacgctgacacaatcgggtcacatg

SEQ ID NO: 1190824 - DNA, 25 bp, Homo sapien
aatcgggtcacatgaatgtcgaggg

SEQ ID NO: 1190825 - DNA, 25 bp, Homo sapien
tttgtaggataacaaatagaactgt

SEQ ID NO: 1190826 - DNA, 25 bp, Homo sapien
actgtcaaacccatcagtgctgccg

SEQ ID NO: 1190827 - DNA, 25 bp, Homo sapien
gataacaaatagaactgtcaaaccc

SEQ ID NO: 1190828 - DNA, 25 bp, Homo sapien
aactgtcaaacccatcagtgctgcc

SEQ ID NO: 1190829 - DNA, 25 bp, Homo sapien
ttctgtcccggtccttttccatgct

SEQ ID NO: 1190830 - DNA, 25 bp, Homo sapien
tcctactgcctatttctgtcccggt

SEQ ID NO: 1190831 - DNA, 25 bp, Homo sapien
tactgcctatttctgtcccggtcct

SEQ ID NO: 1190832 - DNA, 25 bp, Homo sapien
ttttcctactgcctatttctgtccc

SEQ ID NO: 1190833 - DNA, 25 bp, Homo sapien
tggctaatatccaagtcacagtgaa

SEQ ID NO: 1190834 - DNA, 25 bp, Homo sapien
atcacacagttcacctcttgtcctg

SEQ ID NO: 1190835 - DNA, 25 bp, Homo sapien
tttcattaggaggatcacacagttc

SEQ ID NO: 1190836 - DNA, 25 bp, Homo sapien
ttttgcagcgtttataaaccaagtc

SEQ ID NO: 1190837 - DNA, 25 bp, Homo sapien
cggaatagtaggaaggatgaatgct

SEQ ID NO: 1190838 - DNA, 25 bp, Homo sapien
ggatgctctttaagcggaatagtag

SEQ ID NO: 1190839 - DNA, 25 bp, Homo sapien
ctgctggaatcactcgaaggatgaa

SEQ ID NO: 1190840 - DNA, 25 bp, Homo sapien
ggaatcactcgaaggatgaatgcta

SEQ ID NO: 1190841 - DNA, 25 bp, Homo sapien
ccttctgtctattgggctgggtcac

SEQ ID NO: 1190842 - DNA, 25 bp, Homo sapien
actgccctctattggaagtctggga

SEQ ID NO: 1190843 - DNA, 25 bp, Homo sapien
cacagaatggtgattagacatcaga

SEQ ID NO: 1190844 - DNA, 25 bp, Homo sapien
tcttgatattacaatggtactgccc

SEQ ID NO: 1190845 - DNA, 25 bp, Homo sapien
agcgatggcagctggaagggtggct

SEQ ID NO: 1190846 - DNA, 25 bp, Homo sapien
tgagcttggactggatagcgcagca

SEQ ID NO: 1190847 - DNA, 25 bp, Homo sapien
ccagcgatggcagctggaagggtgg

SEQ ID NO: 1190848 - DNA, 25 bp, Homo sapien
ttccaagagacctctgtgagcttgg

SEQ ID NO: 1190849 - DNA, 25 bp, Homo sapien
cagggtacagtactccctggacttc

SEQ ID NO: 1190850 - DNA, 25 bp, Homo sapien
agcctccgttatttcagagattata

SEQ ID NO: 1190851 - DNA, 25 bp, Homo sapien
tttaaaaagctgcagtaactcttcc

SEQ ID NO: 1190852 - DNA, 25 bp, Homo sapien
gggtttgctcatagcctccgttatt

SEQ ID NO: 1190853 - DNA, 25 bp, Homo sapien
aagttgggctttggttctctacgcg

SEQ ID NO: 1190854 - DNA, 25 bp, Homo sapien
cccagctggtcaacacacagtaagt

SEQ ID NO: 1190855 - DNA, 25 bp, Homo sapien
tgggctttggttctctacgcgtccc

SEQ ID NO: 1190856 - DNA, 25 bp, Homo sapien
gcgtcccccagctggtcaacacaca

SEQ ID NO: 1190857 - DNA, 25 bp, Homo sapien
attcgacactcgcattccctgttgg

SEQ ID NO: 1190858 - DNA, 25 bp, Homo sapien
ctgagttgaccccattcgacactcg

SEQ ID NO: 1190859 - DNA, 25 bp, Homo sapien
ttgggattgaaaccccattccgatc

SEQ ID NO: 1190860 - DNA, 25 bp, Homo sapien
gcattccctgttgggattgaaaccc

SEQ ID NO: 1190861 - DNA, 25 bp, Homo sapien
tctttcatgaagacgtctttttttc

SEQ ID NO: 1190862 - DNA, 25 bp, Homo sapien
tttccatttgtgcttgctttccctc

SEQ ID NO: 1190863 - DNA, 25 bp, Homo sapien
tttcatgaagacgtctttttttcca

SEQ ID NO: 1190864 - DNA, 25 bp, Homo sapien
tcatgaagacgtctttttttccatt

SEQ ID NO: 1190865 - DNA, 25 bp, Homo sapien
tttccagttgacagctgttttacat

SEQ ID NO: 1190866 - DNA, 25 bp, Homo sapien
cctttttccagttgacagctgtttt

SEQ ID NO: 1190867 - DNA, 25 bp, Homo sapien
tcctcctttttccagttgacagctg

SEQ ID NO: 1190868 - DNA, 25 bp, Homo sapien
tccagttgacagctgttttacattc

SEQ ID NO: 1190869 - DNA, 25 bp, Homo sapien
caacatgctgcagtttgtaatcccc

SEQ ID NO: 1190870 - DNA, 25 bp, Homo sapien
tggagtcttggtacagataattctg

SEQ ID NO: 1190871 - DNA, 25 bp, Homo sapien
tgtaatccccaatttgaaggcttcg

SEQ ID NO: 1190872 - DNA, 25 bp, Homo sapien
gcttcgcagcatctcattagtctgg

SEQ ID NO: 1190873 - DNA, 25 bp, Homo sapien
tgaaagcagcttctgttttggctgg

SEQ ID NO: 1190874 - DNA, 25 bp, Homo sapien
tgtgaaagcagcttctgttttggct

SEQ ID NO: 1190875 - DNA, 25 bp, Homo sapien
gcaatacagtgcgatcagtgttggg

SEQ ID NO: 1190876 - DNA, 25 bp, Homo sapien
ctagacgcaatacagtgcgatcagt

SEQ ID NO: 1190877 - DNA, 25 bp, Homo sapien
gtaggagagttcagcttctgagatg

SEQ ID NO: 1190878 - DNA, 25 bp, Homo sapien
tgtgaggtctgggtcaagcctctct

SEQ ID NO: 1190879 - DNA, 25 bp, Homo sapien
aacagtaggagagttcagcttctga

SEQ ID NO: 1190880 - DNA, 25 bp, Homo sapien
gtgaggtctgggtcaagcctctctc

SEQ ID NO: 1190881 - DNA, 25 bp, Homo sapien
tgctgtaggacgtgcgttttcagtg

SEQ ID NO: 1190882 - DNA, 25 bp, Homo sapien
tgacttgctgtaggacgtgcgtttt

SEQ ID NO: 1190883 - DNA, 25 bp, Homo sapien
cttgctgtaggacgtgcgttttcag

SEQ ID NO: 1190884 - DNA, 25 bp, Homo sapien
gacttgctgtaggacgtgcgttttc

SEQ ID NO: 1190885 - DNA, 25 bp, Homo sapien
cattgggctggatcttgatcagcat

SEQ ID NO: 1190886 - DNA, 25 bp, Homo sapien
gcattgggctggatcttgatcagca

SEQ ID NO: 1190887 - DNA, 25 bp, Homo sapien
ggcattgggctggatcttgatcagc

SEQ ID NO: 1190888 - DNA, 25 bp, Homo sapien
ttgggctggatcttgatcagcatct

SEQ ID NO: 1190889 - DNA, 25 bp, Homo sapien
gaatgcaaacgagctgcttcagaca

SEQ ID NO: 1190890 - DNA, 25 bp, Homo sapien
taacgcctccgactactgtgggtgc

SEQ ID NO: 1190891 - DNA, 25 bp, Homo sapien
ttttgtgagcaacaccagtgcaagc

SEQ ID NO: 1190892 - DNA, 25 bp, Homo sapien
ggcactactgctgcaagccatttgt

SEQ ID NO: 1190893 - DNA, 25 bp, Homo sapien
gaatgcgtttgaaggcaagggcccc

SEQ ID NO: 1190894 - DNA, 25 bp, Homo sapien
ggctgatactacgaagactccataa

SEQ ID NO: 1190895 - DNA, 25 bp, Homo sapien
tgtgggtgccatcccatgaagctca

SEQ ID NO: 1190896 - DNA, 25 bp, Homo sapien
tattgccaagagaagattacgcaga

SEQ ID NO: 1190897 - DNA, 25 bp, Homo sapien
gatctgatttagacttgccaaattg

SEQ ID NO: 1190898 - DNA, 25 bp, Homo sapien
caccatgatctatgaaaggacgatg

SEQ ID NO: 1190899 - DNA, 25 bp, Homo sapien
tctatgaaaggacgatgatctgatt

SEQ ID NO: 1190900 - DNA, 25 bp, Homo sapien
aattgccgttgcagaaattcttcct

SEQ ID NO: 1190901 - DNA, 25 bp, Homo sapien
caaagtctggataaacaagggtaat

SEQ ID NO: 1190902 - DNA, 25 bp, Homo sapien
agacaaagtctggataaacaagggt

SEQ ID NO: 1190903 - DNA, 25 bp, Homo sapien
gacaaagtctggataaacaagggta

SEQ ID NO: 1190904 - DNA, 25 bp, Homo sapien
cagacaaagtctggataaacaaggg

SEQ ID NO: 1190905 - DNA, 25 bp, Homo sapien
cctgcatcccttctaacaccaacat

SEQ ID NO: 1190906 - DNA, 25 bp, Homo sapien
ttgtgcccatgggagcaatggcgta

SEQ ID NO: 1190907 - DNA, 25 bp, Homo sapien
acaccaacattaggccatgaggctt

SEQ ID NO: 1190908 - DNA, 25 bp, Homo sapien
tttgtgcccatgggagcaatggcgt

SEQ ID NO: 1190909 - DNA, 25 bp, Homo sapien
gtataggacaggaatgatgattaaa

SEQ ID NO: 1190910 - DNA, 25 bp, Homo sapien
tgtataggacaggaatgatgattaa

SEQ ID NO: 1190911 - DNA, 25 bp, Homo sapien
tataggacaggaatgatgattaaaa

SEQ ID NO: 1190912 - DNA, 25 bp, Homo sapien
aagaggtttgtgctagcccgatgcc

SEQ ID NO: 1190913 - DNA, 25 bp, Homo sapien
cgcagggccctgtagcaagaaatgg

SEQ ID NO: 1190914 - DNA, 25 bp, Homo sapien
gaatcggccaaatcgcctagctcag

SEQ ID NO: 1190915 - DNA, 25 bp, Homo sapien
aatcaaagatgataccgcagggccc

SEQ ID NO: 1190916 - DNA, 25 bp, Homo sapien
tttacaacccatctcaggtgcctca

SEQ ID NO: 1190917 - DNA, 25 bp, Homo sapien
tcttggtcccgagtttcttcaggcc

SEQ ID NO: 1190918 - DNA, 25 bp, Homo sapien
cccatgtttctgtcttggtcccgag

SEQ ID NO: 1190919 - DNA, 25 bp, Homo sapien
ctgagtatgggtaagcaatgctgag

SEQ ID NO: 1190920 - DNA, 25 bp, Homo sapien
ggcccatcagaccttcgacaacaag

SEQ ID NO: 1190921 - DNA, 25 bp, Homo sapien
gttcctgagacccatctaccaggga

SEQ ID NO: 1190922 - DNA, 25 bp, Homo sapien
tagacagctcgtccttgtgactgct

SEQ ID NO: 1190923 - DNA, 25 bp, Homo sapien
tctggatgtcaaggctactctgaag

SEQ ID NO: 1190924 - DNA, 25 bp, Homo sapien
cgctagggtggccacattgaatgta

SEQ ID NO: 1190925 - DNA, 25 bp, Homo sapien
gctcatgtcggggaggattccacag

SEQ ID NO: 1190926 - DNA, 25 bp, Homo sapien
tccagctcatgtcggggaggattcc

SEQ ID NO: 1190927 - DNA, 25 bp, Homo sapien
ctcatgtcggggaggattccacagg

SEQ ID NO: 1190928 - DNA, 25 bp, Homo sapien
tcttccagctcatgtcggggaggat

SEQ ID NO: 1190929 - DNA, 25 bp, Homo sapien
caaagagaggcgtgttcaggacaga

SEQ ID NO: 1190930 - DNA, 25 bp, Homo sapien
taaaagtaatcagacttaacatagt

SEQ ID NO: 1190931 - DNA, 25 bp, Homo sapien
cagacttaacatagtccagtttgac

SEQ ID NO: 1190932 - DNA, 25 bp, Homo sapien
gaattctcaaagagaggcgtgttca

SEQ ID NO: 1190933 - DNA, 25 bp, Homo sapien
gctcttttaaacaacgttgatacca

SEQ ID NO: 1190934 - DNA, 25 bp, Homo sapien
cttaccaaggtgcagggagtgtgct

SEQ ID NO: 1190935 - DNA, 25 bp, Homo sapien
catttgttggacacttaccaaggtg

SEQ ID NO: 1190936 - DNA, 25 bp, Homo sapien
tgagtgcttttcctagatcatgcat

SEQ ID NO: 1190937 - DNA, 25 bp, Homo sapien
gctgacgtggcaacacagtttacag

SEQ ID NO: 1190938 - DNA, 25 bp, Homo sapien
tcaggagctgcctattaagccattc

SEQ ID NO: 1190939 - DNA, 25 bp, Homo sapien
cagctgacgtggcaacacagtttac

SEQ ID NO: 1190940 - DNA, 25 bp, Homo sapien
agccattccgatgggaaactgctgc

SEQ ID NO: 1190941 - DNA, 25 bp, Homo sapien
ccactgggccttaagtatgtactga

SEQ ID NO: 1190942 - DNA, 25 bp, Homo sapien
tacatgcagcgattgggtaaagcac

SEQ ID NO: 1190943 - DNA, 25 bp, Homo sapien
tgcctgatggtggagttcagagccc

SEQ ID NO: 1190944 - DNA, 25 bp, Homo sapien
tctctgtcaaacgtaagccttcctg

SEQ ID NO: 1190945 - DNA, 25 bp, Homo sapien
agcccaaagtaataaatgatggttc

SEQ ID NO: 1190946 - DNA, 25 bp, Homo sapien
cttataaaattgtctagttcctttg

SEQ ID NO: 1190947 - DNA, 25 bp, Homo sapien
ttggttccctaatactttgcttatg

SEQ ID NO: 1190948 - DNA, 25 bp, Homo sapien
ccctaatactttgcttatggtatat

SEQ ID NO: 1190949 - DNA, 25 bp, Homo sapien
tctgggactagggtaaaggattcca

SEQ ID NO: 1190950 - DNA, 25 bp, Homo sapien
cacattttgagaaccgtgggcttac

SEQ ID NO: 1190951 - DNA, 25 bp, Homo sapien
cctagagaaactactggctacactg

SEQ ID NO: 1190952 - DNA, 25 bp, Homo sapien
tggcactatcacaaaacatagaggc

SEQ ID NO: 1190953 - DNA, 25 bp, Homo sapien
tcaagcagttctcccaccccagtct

SEQ ID NO: 1190954 - DNA, 25 bp, Homo sapien
aagcagttctcccaccccagtctcc

SEQ ID NO: 1190955 - DNA, 25 bp, Homo sapien
gctcaagcagttctcccaccccagt

SEQ ID NO: 1190956 - DNA, 25 bp, Homo sapien
agcagttctcccaccccagtctccc

SEQ ID NO: 1190957 - DNA, 25 bp, Homo sapien
gtttcagcacccaatgtcatgcacg

SEQ ID NO: 1190958 - DNA, 25 bp, Homo sapien
ttcagcacccaatgtcatgcacgtc

SEQ ID NO: 1190959 - DNA, 25 bp, Homo sapien
agcacccaatgtcatgcacgtccat

SEQ ID NO: 1190960 - DNA, 25 bp, Homo sapien
ggtttcagcacccaatgtcatgcac

SEQ ID NO: 1190961 - DNA, 25 bp, Homo sapien
cttccaaggcaatcgggcagcatca

SEQ ID NO: 1190962 - DNA, 25 bp, Homo sapien
gggcttccaaggcaatcgggcagca

SEQ ID NO: 1190963 - DNA, 25 bp, Homo sapien
ttccaaggcaatcgggcagcatcag

SEQ ID NO: 1190964 - DNA, 25 bp, Homo sapien
tctaggggggcttccaaggcaatcg

SEQ ID NO: 1190965 - DNA, 25 bp, Homo sapien
gattatctcgaagacccattccagc

SEQ ID NO: 1190966 - DNA, 25 bp, Homo sapien
tgaggagtgagatctaaacagcatg

SEQ ID NO: 1190967 - DNA, 25 bp, Homo sapien
ggaaagccagatcccaatgctactc

SEQ ID NO: 1190968 - DNA, 25 bp, Homo sapien
gatagttatgttgtggctggcagct

SEQ ID NO: 1190969 - DNA, 25 bp, Homo sapien
gccgcgtgtgcactcgagtaacgaa

SEQ ID NO: 1190970 - DNA, 25 bp, Homo sapien
tgtgcactcgagtaacgaagccggg

SEQ ID NO: 1190971 - DNA, 25 bp, Homo sapien
ctgaagcaatcgagggccgagagcc

SEQ ID NO: 1190972 - DNA, 25 bp, Homo sapien
cggcatcccagggtgataggctgaa

SEQ ID NO: 1190973 - DNA, 25 bp, Homo sapien
cccacttctggaatgagcctgcccg

SEQ ID NO: 1190974 - DNA, 25 bp, Homo sapien
tctctcgcggtcagaccaggctctg

SEQ ID NO: 1190975 - DNA, 25 bp, Homo sapien
cgggagaggacgcagaagaacccgg

SEQ ID NO: 1190976 - DNA, 25 bp, Homo sapien
agtgcccgttccctcagcctgagga

SEQ ID NO: 1190977 - DNA, 25 bp, Homo sapien
aggaggatccagcgtggccccgacc

SEQ ID NO: 1190978 - DNA, 25 bp, Homo sapien
aggccgggaggaggatccagcgtgg

SEQ ID NO: 1190979 - DNA, 25 bp, Homo sapien
cactgcccgaggctcgggcgatgca

SEQ ID NO: 1190980 - DNA, 25 bp, Homo sapien
agccggcgcggacacctctcacctc

SEQ ID NO: 1190981 - DNA, 25 bp, Homo sapien
aggagagcgcgcagcgagggcaggg

SEQ ID NO: 1190982 - DNA, 25 bp, Homo sapien
tgcctgcggtaaggggaggaggaga

SEQ ID NO: 1190983 - DNA, 25 bp, Homo sapien
ggctccgcgccctgcctgcggtaag

SEQ ID NO: 1190984 - DNA, 25 bp, Homo sapien
ggagagcgcgcagcgagggcaggga

SEQ ID NO: 1190985 - DNA, 25 bp, Homo sapien
cgcggctcctccggacgacggagag

SEQ ID NO: 1190986 - DNA, 25 bp, Homo sapien
ctcctccggacgacggagagagctc

SEQ ID NO: 1190987 - DNA, 25 bp, Homo sapien
tccgcggctcctccggacgacggag

SEQ ID NO: 1190988 - DNA, 25 bp, Homo sapien
ctccggacgacggagagagctccat

SEQ ID NO: 1190989 - DNA, 25 bp, Homo sapien
tgactgggacaaccgcgtccaggtc

SEQ ID NO: 1190990 - DNA, 25 bp, Homo sapien
aggatccgatccaacatgccaccgg

SEQ ID NO: 1190991 - DNA, 25 bp, Homo sapien
tggcacacggactccagaaggatcc

SEQ ID NO: 1190992 - DNA, 25 bp, Homo sapien
cccggacccagctctgttgctggca

SEQ ID NO: 1190993 - DNA, 25 bp, Homo sapien
ggtgtctgaagaggtccaaagacca

SEQ ID NO: 1190994 - DNA, 25 bp, Homo sapien
tgcaggtgtctgaagaggtccaaag

SEQ ID NO: 1190995 - DNA, 25 bp, Homo sapien
caggtgtctgaagaggtccaaagac

SEQ ID NO: 1190996 - DNA, 25 bp, Homo sapien
tctgaagaggtccaaagaccatact

SEQ ID NO: 1190997 - DNA, 25 bp, Homo sapien
ctaagaattacgtcttggatagccc

SEQ ID NO: 1190998 - DNA, 25 bp, Homo sapien
ttggatagcccaactcccgcattaa

SEQ ID NO: 1190999 - DNA, 25 bp, Homo sapien
gatagcccaactcccgcattaaact

SEQ ID NO: 1191000 - DNA, 25 bp, Homo sapien
tacgtcttggatagcccaactcccg

SEQ ID NO: 1191001 - DNA, 25 bp, Homo sapien
tagttaacactaggtccagagaacc

SEQ ID NO: 1191002 - DNA, 25 bp, Homo sapien
tcttccggtacgtagagtaacatca

SEQ ID NO: 1191003 - DNA, 25 bp, Homo sapien
aaaaatgtgactcgatctgccccaa

SEQ ID NO: 1191004 - DNA, 25 bp, Homo sapien
tgagaacaaactgggtgaccttgca

SEQ ID NO: 1191005 - DNA, 25 bp, Homo sapien
caacagacactgacttactatgagc

SEQ ID NO: 1191006 - DNA, 25 bp, Homo sapien
tactatgagcaaggtaccaatctgg

SEQ ID NO: 1191007 - DNA, 25 bp, Homo sapien
tcttgacaaggcatgggcacaactt

SEQ ID NO: 1191008 - DNA, 25 bp, Homo sapien
ccaatctggcagacaagttgacaat

SEQ ID NO: 1191009 - DNA, 25 bp, Homo sapien
cgtttcctttcgctatgctgctgag

SEQ ID NO: 1191010 - DNA, 25 bp, Homo sapien
gccaattgactttgctttgaggcta

SEQ ID NO: 1191011 - DNA, 25 bp, Homo sapien
tctcattgtttaccagaaagcacag

SEQ ID NO: 1191012 - DNA, 25 bp, Homo sapien
catatttagctgtttgtggcatgcc

SEQ ID NO: 1191013 - DNA, 25 bp, Homo sapien
gcagtgaaccaacatgatagagggt

SEQ ID NO: 1191014 - DNA, 25 bp, Homo sapien
gaaactatcacctacattaatagag

SEQ ID NO: 1191015 - DNA, 25 bp, Homo sapien
taacataactgtctagtccaaatgg

SEQ ID NO: 1191016 - DNA, 25 bp, Homo sapien
cacttgtttaactgcagaaatatta

SEQ ID NO: 1191017 - DNA, 25 bp, Homo sapien
tgcactgacataaggctatttatag

SEQ ID NO: 1191018 - DNA, 25 bp, Homo sapien
ggcagtaaagtctgacctgcactga

SEQ ID NO: 1191019 - DNA, 25 bp, Homo sapien
gatttgtacagatcctcaattccat

SEQ ID NO: 1191020 - DNA, 25 bp, Homo sapien
caattcctaaatcaaaaaagctctg

SEQ ID NO: 1191021 - DNA, 25 bp, Homo sapien
gactgtgaaactaacaatctggtat

SEQ ID NO: 1191022 - DNA, 25 bp, Homo sapien
gcatttcccttaaaagactgtgaaa

SEQ ID NO: 1191023 - DNA, 25 bp, Homo sapien
tctcactgtcgagttttcctgacct

SEQ ID NO: 1191024 - DNA, 25 bp, Homo sapien
ccttcagctttgagaggccatctcc

SEQ ID NO: 1191025 - DNA, 25 bp, Homo sapien
ctcttaagcttattttggttgaact

SEQ ID NO: 1191026 - DNA, 25 bp, Homo sapien
gttctcttaagcttattttggttga

SEQ ID NO: 1191027 - DNA, 25 bp, Homo sapien
tattttggttgaacttgcaaaagaa

SEQ ID NO: 1191028 - DNA, 25 bp, Homo sapien
aagcttattttggttgaacttgcaa

SEQ ID NO: 1191029 - DNA, 25 bp, Homo sapien
gggaccctgaaactgattctctaaa

SEQ ID NO: 1191030 - DNA, 25 bp, Homo sapien
ctgaaactgattctctaaaacaggg

SEQ ID NO: 1191031 - DNA, 25 bp, Homo sapien
gaaattactgggaccctgaaactga

SEQ ID NO: 1191032 - DNA, 25 bp, Homo sapien
tgtagtatgaaaacttgaggaaaag

SEQ ID NO: 1191033 - DNA, 25 bp, Homo sapien
atctcaggctggtggtacattcagt

SEQ ID NO: 1191034 - DNA, 25 bp, Homo sapien
taatgcacatttcatgaatctcagg

SEQ ID NO: 1191035 - DNA, 25 bp, Homo sapien
caggctggtggtacattcagtcact

SEQ ID NO: 1191036 - DNA, 25 bp, Homo sapien
cacatttcatgaatctcaggctggt

SEQ ID NO: 1191037 - DNA, 25 bp, Homo sapien
tgaaggaagggtccaaggatccgaa

SEQ ID NO: 1191038 - DNA, 25 bp, Homo sapien
caaggatccgaatttttaacaagca

SEQ ID NO: 1191039 - DNA, 25 bp, Homo sapien
atattctgattggtgagagatgggt

SEQ ID NO: 1191040 - DNA, 25 bp, Homo sapien
taaatgcaattcctaggcagctccc

SEQ ID NO: 1191041 - DNA, 25 bp, Homo sapien
aggctgcaatgagccatggctgtac

SEQ ID NO: 1191042 - DNA, 25 bp, Homo sapien
ctgcaatgagccatggctgtaccac

SEQ ID NO: 1191043 - DNA, 25 bp, Homo sapien
tgaggctgcaatgagccatggctgt

SEQ ID NO: 1191044 - DNA, 25 bp, Homo sapien
gctgcaatgagccatggctgtacca

SEQ ID NO: 1191045 - DNA, 25 bp, Homo sapien
tgcatatgaagagatgccattccaa

SEQ ID NO: 1191046 - DNA, 25 bp, Homo sapien
tatattctacgttgcatatgaagag

SEQ ID NO: 1191047 - DNA, 25 bp, Homo sapien
catatgaagagatgccattccaaag

SEQ ID NO: 1191048 - DNA, 25 bp, Homo sapien
tacagtaagcatatattctacgttg

SEQ ID NO: 1191049 - DNA, 25 bp, Homo sapien
tatacaatactagtggaaatgcaga

SEQ ID NO: 1191050 - DNA, 25 bp, Homo sapien
cactttacgtacattaggatggcta

SEQ ID NO: 1191051 - DNA, 25 bp, Homo sapien
cattccagtcctaggtatatgccaa

SEQ ID NO: 1191052 - DNA, 25 bp, Homo sapien
tacaattcattaagcagacagacag

SEQ ID NO: 1191053 - DNA, 25 bp, Homo sapien
aggctgggactgcagtggtgctatc

SEQ ID NO: 1191054 - DNA, 25 bp, Homo sapien
gagaggcactgacaaacttagcact

SEQ ID NO: 1191055 - DNA, 25 bp, Homo sapien
tcagaatcttgaggagcaaggcagc

SEQ ID NO: 1191056 - DNA, 25 bp, Homo sapien
tagaaaaggtatctccacatgatcg

SEQ ID NO: 1191057 - DNA, 25 bp, Homo sapien
caatgttatgagaatccctgagcca

SEQ ID NO: 1191058 - DNA, 25 bp, Homo sapien
gagcaagagcactatcatggtggag

SEQ ID NO: 1191059 - DNA, 25 bp, Homo sapien
gagcaacagttttggcacccactga

SEQ ID NO: 1191060 - DNA, 25 bp, Homo sapien
tcttgtctgcaattgatctgggagc

SEQ ID NO: 1191061 - DNA, 25 bp, Homo sapien
cagctgaaatgtctatggcgttggc

SEQ ID NO: 1191062 - DNA, 25 bp, Homo sapien
aatttctcagtttagccttaggaat

SEQ ID NO: 1191063 - DNA, 25 bp, Homo sapien
cagctactacgtattcggaaatggc

SEQ ID NO: 1191064 - DNA, 25 bp, Homo sapien
gccttaggaattcagctactacgta

SEQ ID NO: 1191065 - DNA, 25 bp, Homo sapien
caacattctccaattaaggttaata

SEQ ID NO: 1191066 - DNA, 25 bp, Homo sapien
gctaactgggatcatgctagattta

SEQ ID NO: 1191067 - DNA, 25 bp, Homo sapien
tacagacccaaagagttcatacggt

SEQ ID NO: 1191068 - DNA, 25 bp, Homo sapien
tcatacggttgatatggtttgtctc

SEQ ID NO: 1191069 - DNA, 25 bp, Homo sapien
aactgggatcatgctagatttaaaa

SEQ ID NO: 1191070 - DNA, 25 bp, Homo sapien
tcttcacaagaaaccttagatacta

SEQ ID NO: 1191071 - DNA, 25 bp, Homo sapien
aacactgggaaacccttcacataat

SEQ ID NO: 1191072 - DNA, 25 bp, Homo sapien
aaaatagagtatctaagaaacactg

SEQ ID NO: 1191073 - DNA, 25 bp, Homo sapien
cacaacaggttcaaggaatcatcct

SEQ ID NO: 1191074 - DNA, 25 bp, Homo sapien
ttggagcagtcgacggccaacctcc

SEQ ID NO: 1191075 - DNA, 25 bp, Homo sapien
ggccgactaacaatttctaagctta

SEQ ID NO: 1191076 - DNA, 25 bp, Homo sapien
taaatcatctctcgcctgacagcac

SEQ ID NO: 1191077 - DNA, 25 bp, Homo sapien
cccctactatgccccaattaagcag

SEQ ID NO: 1191078 - DNA, 25 bp, Homo sapien
tactttcactggttgggcggagtcc

SEQ ID NO: 1191079 - DNA, 25 bp, Homo sapien
cacggtttgaatatgtgttccttcc

SEQ ID NO: 1191080 - DNA, 25 bp, Homo sapien
caaagaacaggccattacccaggag

SEQ ID NO: 1191081 - DNA, 25 bp, Homo sapien
cactagattttacccacatgcccaa

SEQ ID NO: 1191082 - DNA, 25 bp, Homo sapien
tgtacggaatctatctgtgcagaga

SEQ ID NO: 1191083 - DNA, 25 bp, Homo sapien
ccacagaatgttttgttagcccaca

SEQ ID NO: 1191084 - DNA, 25 bp, Homo sapien
aatacagaattggtgtcagagaagc

SEQ ID NO: 1191085 - DNA, 25 bp, Homo sapien
gagattaccaactacgtgtcaagca

SEQ ID NO: 1191086 - DNA, 25 bp, Homo sapien
tcagagcaacggaaaaaaggcaagc

SEQ ID NO: 1191087 - DNA, 25 bp, Homo sapien
taggcacagttgtccataaagtcaa

SEQ ID NO: 1191088 - DNA, 25 bp, Homo sapien
tatttgggccctaacataatcctgc

SEQ ID NO: 1191089 - DNA, 25 bp, Homo sapien
tacaagccagctattatggcaaggg

SEQ ID NO: 1191090 - DNA, 25 bp, Homo sapien
gtatctacactgacaaaaccaattt

SEQ ID NO: 1191091 - DNA, 25 bp, Homo sapien
gaaacagccaaaggctactgctaaa

SEQ ID NO: 1191092 - DNA, 25 bp, Homo sapien
aaataaaacgattatctaccacaag

SEQ ID NO: 1191093 - DNA, 25 bp, Homo sapien
tctgtaacctcagaaattattcaag

SEQ ID NO: 1191094 - DNA, 25 bp, Homo sapien
cccctgatagaagtacacaataact

SEQ ID NO: 1191095 - DNA, 25 bp, Homo sapien
gtgctcttgcaatgtttatccaaag

SEQ ID NO: 1191096 - DNA, 25 bp, Homo sapien
ggctgatatcccaataaaatgagac

SEQ ID NO: 1191097 - DNA, 25 bp, Homo sapien
tgagacaagcatacactatgtgccc

SEQ ID NO: 1191098 - DNA, 25 bp, Homo sapien
aagacagaggtgtaatattctcaac

SEQ ID NO: 1191099 - DNA, 25 bp, Homo sapien
cagtcatctgtggtaaagtcattca

SEQ ID NO: 1191100 - DNA, 25 bp, Homo sapien
gagaaagtccaacatattcagcatg

SEQ ID NO: 1191101 - DNA, 25 bp, Homo sapien
gtagagtacacccagtcagctgaca

SEQ ID NO: 1191102 - DNA, 25 bp, Homo sapien
ggttggagaccaatcctggacatta

SEQ ID NO: 1191103 - DNA, 25 bp, Homo sapien
tgcgggaactctcacctatgtggaa

SEQ ID NO: 1191104 - DNA, 25 bp, Homo sapien
gatgagcatacttaatacaagtccc

SEQ ID NO: 1191105 - DNA, 25 bp, Homo sapien
caactaagctacgtttctttcacag

SEQ ID NO: 1191106 - DNA, 25 bp, Homo sapien
gaggtcttcatttcagattatcatc

SEQ ID NO: 1191107 - DNA, 25 bp, Homo sapien
tgttaagaagcactcaaactgcatt

SEQ ID NO: 1191108 - DNA, 25 bp, Homo sapien
taagcaacactcaatacgaaatttg

SEQ ID NO: 1191109 - DNA, 25 bp, Homo sapien
ttaagttggtacacacatttcccac

SEQ ID NO: 1191110 - DNA, 25 bp, Homo sapien
gctcaactgtgactatatgccttat

SEQ ID NO: 1191111 - DNA, 25 bp, Homo sapien
tctcaaagctacatacaacgacagg

SEQ ID NO: 1191112 - DNA, 25 bp, Homo sapien
ggcgtctcaaagtgcaggtataaca

SEQ ID NO: 1191113 - DNA, 25 bp, Homo sapien
cagatgtcctctggaactagcttcc

SEQ ID NO: 1191114 - DNA, 25 bp, Homo sapien
gataattctttctgcggaaggtggg

SEQ ID NO: 1191115 - DNA, 25 bp, Homo sapien
tcaatgaatcagtacaccaatgcag

SEQ ID NO: 1191116 - DNA, 25 bp, Homo sapien
ggaaagctgtcctgtgaactcaagg

SEQ ID NO: 1191117 - DNA, 25 bp, Homo sapien
caagtagtcagccaacagcaagatg

SEQ ID NO: 1191118 - DNA, 25 bp, Homo sapien
cagcactctacgaggtaggttttat

SEQ ID NO: 1191119 - DNA, 25 bp, Homo sapien
tcgagacgaaaaatatcaagtgtgc

SEQ ID NO: 1191120 - DNA, 25 bp, Homo sapien
tataataacagccttgagacagcag

SEQ ID NO: 1191121 - DNA, 25 bp, Homo sapien
tagtatggctagaaggatgactgtc

SEQ ID NO: 1191122 - DNA, 25 bp, Homo sapien
tgagccaccaagcccagctaatttt

SEQ ID NO: 1191123 - DNA, 25 bp, Homo sapien
tctgtcgctcatgctggagtccaat

SEQ ID NO: 1191124 - DNA, 25 bp, Homo sapien
tcctgcccatctcctgagtagctag

SEQ ID NO: 1191125 - DNA, 25 bp, Homo sapien
gattacagacgtgagccaccaagcc

SEQ ID NO: 1191126 - DNA, 25 bp, Homo sapien
gctcgaagtgatcggctgttgacca

SEQ ID NO: 1191127 - DNA, 25 bp, Homo sapien
tctgccaccgataagcacccagtgg

SEQ ID NO: 1191128 - DNA, 25 bp, Homo sapien
tgttccaaggacctcatcagcagag

SEQ ID NO: 1191129 - DNA, 25 bp, Homo sapien
aacagatctggtgaatggtgctcga

SEQ ID NO: 1191130 - DNA, 25 bp, Homo sapien
ttctggttatctgaaggtttggtaa

SEQ ID NO: 1191131 - DNA, 25 bp, Homo sapien
gatcctttgcacctaatatctgaac

SEQ ID NO: 1191132 - DNA, 25 bp, Homo sapien
tctgaaggtttggtaatcaatagct

SEQ ID NO: 1191133 - DNA, 25 bp, Homo sapien
aatcaatagctttccaattccagta

SEQ ID NO: 1191134 - DNA, 25 bp, Homo sapien
catattggagtacggtgagtctgaa

SEQ ID NO: 1191135 - DNA, 25 bp, Homo sapien
tgtaacaggttgaattgtatgcccc

SEQ ID NO: 1191136 - DNA, 25 bp, Homo sapien
gaaaatatgggtcattgcagacgta

SEQ ID NO: 1191137 - DNA, 25 bp, Homo sapien
ttatggcccttggtatctgcgattg

SEQ ID NO: 1191138 - DNA, 25 bp, Homo sapien
aagcacacgccaccaagcctaattt

SEQ ID NO: 1191139 - DNA, 25 bp, Homo sapien
cattgcagcctcaactcacgggctc

SEQ ID NO: 1191140 - DNA, 25 bp, Homo sapien
tacaagcacacgccaccaagcctaa

SEQ ID NO: 1191141 - DNA, 25 bp, Homo sapien
cagcctcaactcacgggctcaggtg

SEQ ID NO: 1191142 - DNA, 25 bp, Homo sapien
tcaggtcatttgtaagatcattagg

SEQ ID NO: 1191143 - DNA, 25 bp, Homo sapien
atttcaggtcatttgtaagatcatt

SEQ ID NO: 1191144 - DNA, 25 bp, Homo sapien
caggtcatttgtaagatcattaggt

SEQ ID NO: 1191145 - DNA, 25 bp, Homo sapien
ttcaggtcatttgtaagatcattag

SEQ ID NO: 1191146 - DNA, 25 bp, Homo sapien
taaaacaaaatttacatctgtgacg

SEQ ID NO: 1191147 - DNA, 25 bp, Homo sapien
aacgcgcctggcctcaaatatattt

SEQ ID NO: 1191148 - DNA, 25 bp, Homo sapien
acaaaatttacatctgtgacgaagg

SEQ ID NO: 1191149 - DNA, 25 bp, Homo sapien
aacaaaatttacatctgtgacgaag

SEQ ID NO: 1191150 - DNA, 25 bp, Homo sapien
gacgttcattgtgtggatctgtaaa

SEQ ID NO: 1191151 - DNA, 25 bp, Homo sapien
ttttccaaaactatctgaactcctc

SEQ ID NO: 1191152 - DNA, 25 bp, Homo sapien
aaaactatctgaactcctctgtagg

SEQ ID NO: 1191153 - DNA, 25 bp, Homo sapien
ctgtaggtccacaaacaagacgttc

SEQ ID NO: 1191154 - DNA, 25 bp, Homo sapien
ctttgtcctgacacacaatgaacat

SEQ ID NO: 1191155 - DNA, 25 bp, Homo sapien
tgctttgtcctgacacacaatgaac

SEQ ID NO: 1191156 - DNA, 25 bp, Homo sapien
tgtgaactttgctttgtcctgacac

SEQ ID NO: 1191157 - DNA, 25 bp, Homo sapien
ctttgctttgtcctgacacacaatg

SEQ ID NO: 1191158 - DNA, 25 bp, Homo sapien
tgtgaggatgcaatacttccgctcc

SEQ ID NO: 1191159 - DNA, 25 bp, Homo sapien
tctccttgttgagcaataccaactg

SEQ ID NO: 1191160 - DNA, 25 bp, Homo sapien
tgactgaccacaagacagacggtgg

SEQ ID NO: 1191161 - DNA, 25 bp, Homo sapien
ttgtctcggtgtagggtgactgacc

SEQ ID NO: 1191162 - DNA, 25 bp, Homo sapien
tattgatcacaacaaggtgggtgga

SEQ ID NO: 1191163 - DNA, 25 bp, Homo sapien
tagaatgtgaagcactagtccagga

SEQ ID NO: 1191164 - DNA, 25 bp, Homo sapien
tacattaagctgcatagatactggg

SEQ ID NO: 1191165 - DNA, 25 bp, Homo sapien
gatcaatgggtcctaggtctcagaa

SEQ ID NO: 1191166 - DNA, 25 bp, Homo sapien
aatgccaacgcttagaccactctag

SEQ ID NO: 1191167 - DNA, 25 bp, Homo sapien
tacgtagtctttccctggacatgtg

SEQ ID NO: 1191168 - DNA, 25 bp, Homo sapien
gacatgtgcagtccagctaaagact

SEQ ID NO: 1191169 - DNA, 25 bp, Homo sapien
tggtatcctacccagcaggttccag

SEQ ID NO: 1191170 - DNA, 25 bp, Homo sapien
cactgacagttctcctcaggcatcg

SEQ ID NO: 1191171 - DNA, 25 bp, Homo sapien
cctctggtgggtactcgggaaactg

SEQ ID NO: 1191172 - DNA, 25 bp, Homo sapien
tcaggcatcgccctttggtggaatc

SEQ ID NO: 1191173 - DNA, 25 bp, Homo sapien
cctttggtggaatctgtctgctgct

SEQ ID NO: 1191174 - DNA, 25 bp, Homo sapien
tactaagttccaacacatactgctc

SEQ ID NO: 1191175 - DNA, 25 bp, Homo sapien
gaacctcagtgcttcaacaagatca

SEQ ID NO: 1191176 - DNA, 25 bp, Homo sapien
aagatcaccaaatactctctcaaaa

SEQ ID NO: 1191177 - DNA, 25 bp, Homo sapien
catactgctcccttatgaacctcag

SEQ ID NO: 1191178 - DNA, 25 bp, Homo sapien
tcaaaacttgaagagcgaaaggttc

SEQ ID NO: 1191179 - DNA, 25 bp, Homo sapien
tatcatgatgctatattaaacagga

SEQ ID NO: 1191180 - DNA, 25 bp, Homo sapien
ttcactcttagcgactggcatagaa

SEQ ID NO: 1191181 - DNA, 25 bp, Homo sapien
tgttattagatcttttcccctagga

SEQ ID NO: 1191182 - DNA, 25 bp, Homo sapien
tattcatcctatcttgctaactaca

SEQ ID NO: 1191183 - DNA, 25 bp, Homo sapien
aaagtgcacaaccttgttgtgttcc

SEQ ID NO: 1191184 - DNA, 25 bp, Homo sapien
gatttccttatcacactatcttctc

SEQ ID NO: 1191185 - DNA, 25 bp, Homo sapien
tggtaaaagtgcacaaccttgttgt

SEQ ID NO: 1191186 - DNA, 25 bp, Homo sapien
agagtggtaaaagtgcacaaccttg

SEQ ID NO: 1191187 - DNA, 25 bp, Homo sapien
caactatccttgctcatttcaggct

SEQ ID NO: 1191188 - DNA, 25 bp, Homo sapien
tcaggctcatactgtagtttgccca

SEQ ID NO: 1191189 - DNA, 25 bp, Homo sapien
ccagccaagcagtaagcaatatgca

SEQ ID NO: 1191190 - DNA, 25 bp, Homo sapien
tgatgttacatgcaaacaactatcc

SEQ ID NO: 1191191 - DNA, 25 bp, Homo sapien
gagaaagcctcggatttacgaatgt

SEQ ID NO: 1191192 - DNA, 25 bp, Homo sapien
cctcggatttacgaatgtttggcat

SEQ ID NO: 1191193 - DNA, 25 bp, Homo sapien
gactgagaaagcctcggatttacga

SEQ ID NO: 1191194 - DNA, 25 bp, Homo sapien
aagcctcggatttacgaatgtttgg

SEQ ID NO: 1191195 - DNA, 25 bp, Homo sapien
tatattaaaatagaggcatgagatc

SEQ ID NO: 1191196 - DNA, 25 bp, Homo sapien
tctgtaagtaagatgacgggataac

SEQ ID NO: 1191197 - DNA, 25 bp, Homo sapien
taggtttttgaggactctaggataa

SEQ ID NO: 1191198 - DNA, 25 bp, Homo sapien
tctgcagccttgagttagtaaatgt

SEQ ID NO: 1191199 - DNA, 25 bp, Homo sapien
tgagcttatctgagttctcctcaaa

SEQ ID NO: 1191200 - DNA, 25 bp, Homo sapien
gagctttcttatagacagtagtcaa

SEQ ID NO: 1191201 - DNA, 25 bp, Homo sapien
tatcaccataaagttcaaggtctgc

SEQ ID NO: 1191202 - DNA, 25 bp, Homo sapien
tatgcacatatcctgtctaccaatg

SEQ ID NO: 1191203 - DNA, 25 bp, Homo sapien
ctaatctcctgcctgtagggtaaag

SEQ ID NO: 1191204 - DNA, 25 bp, Homo sapien
ggagtcccatcattcagcgtgcaca

SEQ ID NO: 1191205 - DNA, 25 bp, Homo sapien
ggatctgctaccacatatgtctggc

SEQ ID NO: 1191206 - DNA, 25 bp, Homo sapien
ccctcatatgtggtaaaatgccctg

SEQ ID NO: 1191207 - DNA, 25 bp, Homo sapien
ctaatcaaagataatggcttcagtt

SEQ ID NO: 1191208 - DNA, 25 bp, Homo sapien
tacagacgaccagttgggaattcag

SEQ ID NO: 1191209 - DNA, 25 bp, Homo sapien
aacattctagtacagacgaccagtt

SEQ ID NO: 1191210 - DNA, 25 bp, Homo sapien
gaccagttgggaattcaggtctgga

SEQ ID NO: 1191211 - DNA, 25 bp, Homo sapien
tattggtcccttaggataaatggga

SEQ ID NO: 1191212 - DNA, 25 bp, Homo sapien
caggtttatgccctatgtgaacaaa

SEQ ID NO: 1191213 - DNA, 25 bp, Homo sapien
caagagttaatatcttattggtccc

SEQ ID NO: 1191214 - DNA, 25 bp, Homo sapien
tgggatttctacatacagaaggtag

SEQ ID NO: 1191215 - DNA, 25 bp, Homo sapien
tatgatattaaccaacagcacggag

SEQ ID NO: 1191216 - DNA, 25 bp, Homo sapien
tctctcaagtgggtatggttttccc

SEQ ID NO: 1191217 - DNA, 25 bp, Homo sapien
tatactgcttatagtcctgtggctg

SEQ ID NO: 1191218 - DNA, 25 bp, Homo sapien
taaacctgtccaagcaagatgagaa

SEQ ID NO: 1191219 - DNA, 25 bp, Homo sapien
tgtgtgtaatgtgtgagcagtttcc

SEQ ID NO: 1191220 - DNA, 25 bp, Homo sapien
taatgtgtgagcagtttccaaacat

SEQ ID NO: 1191221 - DNA, 25 bp, Homo sapien
tgtaatgtgtgagcagtttccaaac

SEQ ID NO: 1191222 - DNA, 25 bp, Homo sapien
tgtgtaatgtgtgagcagtttccaa

SEQ ID NO: 1191223 - DNA, 25 bp, Homo sapien
cctcagtgtgtattaatccagatgc

SEQ ID NO: 1191224 - DNA, 25 bp, Homo sapien
caactggagagcctgtatcactcag

SEQ ID NO: 1191225 - DNA, 25 bp, Homo sapien
tattggaacgatgtactgaattttc

SEQ ID NO: 1191226 - DNA, 25 bp, Homo sapien
caaaaggacattccacttatgtgct

SEQ ID NO: 1191227 - DNA, 25 bp, Homo sapien
tgtactcgcctgtgctcgctttcct

SEQ ID NO: 1191228 - DNA, 25 bp, Homo sapien
tgatctttccggcacgccagtcaga

SEQ ID NO: 1191229 - DNA, 25 bp, Homo sapien
aagtttctgggtgtgctaacatgat

SEQ ID NO: 1191230 - DNA, 25 bp, Homo sapien
aaaacactttgtatactgtactcgc

SEQ ID NO: 1191231 - DNA, 25 bp, Homo sapien
gaactcacagcaataaaaaccaacc

SEQ ID NO: 1191232 - DNA, 25 bp, Homo sapien
tattaacagaacaagtacatgctgc

SEQ ID NO: 1191233 - DNA, 25 bp, Homo sapien
gaaatgagctttacctgttcccagg

SEQ ID NO: 1191234 - DNA, 25 bp, Homo sapien
gaaagatccagaataaggacccatt

SEQ ID NO: 1191235 - DNA, 25 bp, Homo sapien
tctgctaacacataattcatgaggt

SEQ ID NO: 1191236 - DNA, 25 bp, Homo sapien
cagacgatccttataagcagggaga

SEQ ID NO: 1191237 - DNA, 25 bp, Homo sapien
tgttcactgtctgttgcggctctca

SEQ ID NO: 1191238 - DNA, 25 bp, Homo sapien
catgaggtgaagtaacagacgatcc

SEQ ID NO: 1191239 - DNA, 25 bp, Homo sapien
ggacaacatccctttactgtgctta

SEQ ID NO: 1191240 - DNA, 25 bp, Homo sapien
aggacaacatccctttactgtgctt

SEQ ID NO: 1191241 - DNA, 25 bp, Homo sapien
aagagcaggtcaggctttaatacaa

SEQ ID NO: 1191242 - DNA, 25 bp, Homo sapien
ggtcaggctttaatacaaaaggaca

SEQ ID NO: 1191243 - DNA, 25 bp, Homo sapien
gtaatttggtttccgatatagccga

SEQ ID NO: 1191244 - DNA, 25 bp, Homo sapien
gaaactattccttataacttgctgc

SEQ ID NO: 1191245 - DNA, 25 bp, Homo sapien
cacagacttgtaagtcagtactaca

SEQ ID NO: 1191246 - DNA, 25 bp, Homo sapien
tagccgagaggagtaatgaaactat

SEQ ID NO: 1191247 - DNA, 25 bp, Homo sapien
gattctccagtaagacagacagtct

SEQ ID NO: 1191248 - DNA, 25 bp, Homo sapien
taacttaggtcagtaaaataccagc

SEQ ID NO: 1191249 - DNA, 25 bp, Homo sapien
tacatagatatatcatggcagtcct

SEQ ID NO: 1191250 - DNA, 25 bp, Homo sapien
cacggaaggtatgaacctgcataat

SEQ ID NO: 1191251 - DNA, 25 bp, Homo sapien
tcagctgtacaatagagattcataa

SEQ ID NO: 1191252 - DNA, 25 bp, Homo sapien
ctgaacctggctgatgtggcaaact

SEQ ID NO: 1191253 - DNA, 25 bp, Homo sapien
cctctaccacatgttgaaagcattg

SEQ ID NO: 1191254 - DNA, 25 bp, Homo sapien
ataaagcaggccaaatactgtgtga

SEQ ID NO: 1191255 - DNA, 25 bp, Homo sapien
gaacagtggcgccttctcggcttac

SEQ ID NO: 1191256 - DNA, 25 bp, Homo sapien
agaacagtggcgccttctcggctta

SEQ ID NO: 1191257 - DNA, 25 bp, Homo sapien
cataacataacaggcaactagagga

SEQ ID NO: 1191258 - DNA, 25 bp, Homo sapien
catgattgcatctctatcttgatac

SEQ ID NO: 1191259 - DNA, 25 bp, Homo sapien
tcttgatactcctttgtacatgtac

SEQ ID NO: 1191260 - DNA, 25 bp, Homo sapien
tcctcaaagaagcttaaagtaaata

SEQ ID NO: 1191261 - DNA, 25 bp, Homo sapien
taaggatattacaagtccacttcat

SEQ ID NO: 1191262 - DNA, 25 bp, Homo sapien
ctcgcatggcgactgcactgatcga

SEQ ID NO: 1191263 - DNA, 25 bp, Homo sapien
ctgatcgacaataatggaatctgta

SEQ ID NO: 1191264 - DNA, 25 bp, Homo sapien
caacattaaggatattacaagtcca

SEQ ID NO: 1191265 - DNA, 25 bp, Homo sapien
aaacttttccatacagagcacaatt

SEQ ID NO: 1191266 - DNA, 25 bp, Homo sapien
aacttttccatacagagcacaatta

SEQ ID NO: 1191267 - DNA, 25 bp, Homo sapien
ttctcttcttcggtgctactatcca

SEQ ID NO: 1191268 - DNA, 25 bp, Homo sapien
tcttcggtgctactatccaaccact

SEQ ID NO: 1191269 - DNA, 25 bp, Homo sapien
actccgccacatcaccgggggaaag

SEQ ID NO: 1191270 - DNA, 25 bp, Homo sapien
ccacatcaccgggggaaaggagact

SEQ ID NO: 1191271 - DNA, 25 bp, Homo sapien
tgattaggatgaccctttacatcta

SEQ ID NO: 1191272 - DNA, 25 bp, Homo sapien
gaagacctgattaggatgacccttt

SEQ ID NO: 1191273 - DNA, 25 bp, Homo sapien
gacctgattaggatgaccctttaca

SEQ ID NO: 1191274 - DNA, 25 bp, Homo sapien
ctaggaagacctgattaggatgacc

SEQ ID NO: 1191275 - DNA, 25 bp, Homo sapien
gaatatctaatactgatcccttgaa

SEQ ID NO: 1191276 - DNA, 25 bp, Homo sapien
gaacaactcaatccttgaatgctga

SEQ ID NO: 1191277 - DNA, 25 bp, Homo sapien
cagatagggcctaacacctttattt

SEQ ID NO: 1191278 - DNA, 25 bp, Homo sapien
gtctttcaatgccactaatcttcag

SEQ ID NO: 1191279 - DNA, 25 bp, Homo sapien
ccagatcttagaaaacaaggagtaa

SEQ ID NO: 1191280 - DNA, 25 bp, Homo sapien
tcgtaactccggagactgacatttt

SEQ ID NO: 1191281 - DNA, 25 bp, Homo sapien
cttccagatcttagaaaacaaggag

SEQ ID NO: 1191282 - DNA, 25 bp, Homo sapien
caaggagtaaatcgtaactccggag

SEQ ID NO: 1191283 - DNA, 25 bp, Homo sapien
aaaaggaggaaagttgaaacatcat

SEQ ID NO: 1191284 - DNA, 25 bp, Homo sapien
actggtccctgagatactccgtcta

SEQ ID NO: 1191285 - DNA, 25 bp, Homo sapien
tttgcagtgtccatggagttgggtt

SEQ ID NO: 1191286 - DNA, 25 bp, Homo sapien
ctccgtctacgaggggacctttctg

SEQ ID NO: 1191287 - DNA, 25 bp, Homo sapien
atttgcagtgtccatggagttgggt

SEQ ID NO: 1191288 - DNA, 25 bp, Homo sapien
gccttagttcaattatgctttctgg

SEQ ID NO: 1191289 - DNA, 25 bp, Homo sapien
ttcaattatgctttctggatgtctt

SEQ ID NO: 1191290 - DNA, 25 bp, Homo sapien
ctactgccttagttcaattatgctt

SEQ ID NO: 1191291 - DNA, 25 bp, Homo sapien
actgccttagttcaattatgctttc

SEQ ID NO: 1191292 - DNA, 25 bp, Homo sapien
tggaatctccagtagttagtgctgc

SEQ ID NO: 1191293 - DNA, 25 bp, Homo sapien
tacatcatctataagaatgagctgt

SEQ ID NO: 1191294 - DNA, 25 bp, Homo sapien
ctcttctcctggttagggtaagttg

SEQ ID NO: 1191295 - DNA, 25 bp, Homo sapien
gaatgagctgtgagtgtatctcatc

SEQ ID NO: 1191296 - DNA, 25 bp, Homo sapien
ttttgggttcttgatcacgaagtct

SEQ ID NO: 1191297 - DNA, 25 bp, Homo sapien
gttcttgatcacgaagtctttgcct

SEQ ID NO: 1191298 - DNA, 25 bp, Homo sapien
gcttttgggttcttgatcacgaagt

SEQ ID NO: 1191299 - DNA, 25 bp, Homo sapien
tgggttcttgatcacgaagtctttg

SEQ ID NO: 1191300 - DNA, 25 bp, Homo sapien
ccttcagccacctgaagtgtgccat

SEQ ID NO: 1191301 - DNA, 25 bp, Homo sapien
ccagtcacacggcagatggtttctt

SEQ ID NO: 1191302 - DNA, 25 bp, Homo sapien
aaggttgcaaagatatggcagacac

SEQ ID NO: 1191303 - DNA, 25 bp, Homo sapien
acggcagatggtttctttgccagaa

SEQ ID NO: 1191304 - DNA, 25 bp, Homo sapien
aaaaagcagcacatggcgaggattc

SEQ ID NO: 1191305 - DNA, 25 bp, Homo sapien
ccaaaaaagcagcacatggcgagga

SEQ ID NO: 1191306 - DNA, 25 bp, Homo sapien
caaaaaagcagcacatggcgaggat

SEQ ID NO: 1191307 - DNA, 25 bp, Homo sapien
aaaagcagcacatggcgaggattca

SEQ ID NO: 1191308 - DNA, 25 bp, Homo sapien
tcaagcgggcaagggctctgaaggc

SEQ ID NO: 1191309 - DNA, 25 bp, Homo sapien
tctgaaggccgactggccccaggtc

SEQ ID NO: 1191310 - DNA, 25 bp, Homo sapien
gggctctgaaggccgactggcccca

SEQ ID NO: 1191311 - DNA, 25 bp, Homo sapien
gctctgaaggccgactggccccagg

SEQ ID NO: 1191312 - DNA, 25 bp, Homo sapien
gatgtcctcaatctgcctgatcttc

SEQ ID NO: 1191313 - DNA, 25 bp, Homo sapien
gggtgatgtcctcaatctgcctgat

SEQ ID NO: 1191314 - DNA, 25 bp, Homo sapien
gacggtgaccacagcgaccccactt

SEQ ID NO: 1191315 - DNA, 25 bp, Homo sapien
cacttcctgtgggtgccgtcaagag

SEQ ID NO: 1191316 - DNA, 25 bp, Homo sapien
gatggaagccgaaagctcgtgtttc

SEQ ID NO: 1191317 - DNA, 25 bp, Homo sapien
tctgtactgcgaagggatggaagcc

SEQ ID NO: 1191318 - DNA, 25 bp, Homo sapien
tcctcttgatggagcctttcaggcg

SEQ ID NO: 1191319 - DNA, 25 bp, Homo sapien
ctttcaggcgcttgctgaagaatcc

SEQ ID NO: 1191320 - DNA, 25 bp, Homo sapien
tttaaaaatatgagggctgtgcatg

SEQ ID NO: 1191321 - DNA, 25 bp, Homo sapien
cattatttggtaaaactatggtatt

SEQ ID NO: 1191322 - DNA, 25 bp, Homo sapien
aactgtcacatattgagtgtgttac

SEQ ID NO: 1191323 - DNA, 25 bp, Homo sapien
tcttaaagtggtaactcagacctcc

SEQ ID NO: 1191324 - DNA, 25 bp, Homo sapien
gcagaactgttttcacccattaagt

SEQ ID NO: 1191325 - DNA, 25 bp, Homo sapien
tcacaggccattgccctctaaggtc

SEQ ID NO: 1191326 - DNA, 25 bp, Homo sapien
tgacacttacctcttttactggact

SEQ ID NO: 1191327 - DNA, 25 bp, Homo sapien
ttactggactcctcgaggttgaggg

SEQ ID NO: 1191328 - DNA, 25 bp, Homo sapien
gaagtcttgtccaaggatgctacta

SEQ ID NO: 1191329 - DNA, 25 bp, Homo sapien
gatccagacattccactgtgctgca

SEQ ID NO: 1191330 - DNA, 25 bp, Homo sapien
ggtttcactgatacaggttcccctc

SEQ ID NO: 1191331 - DNA, 25 bp, Homo sapien
ttttagtttaggcagcccacgagac

SEQ ID NO: 1191332 - DNA, 25 bp, Homo sapien
cttattaggttgaactgtcctgcga

SEQ ID NO: 1191333 - DNA, 25 bp, Homo sapien
gcatttacttccacttaagtaggta

SEQ ID NO: 1191334 - DNA, 25 bp, Homo sapien
tctctcagaagcagaattacagctg

SEQ ID NO: 1191335 - DNA, 25 bp, Homo sapien
gtcctgcgaaggttttccatccact

SEQ ID NO: 1191336 - DNA, 25 bp, Homo sapien
caaggtccttggcttcaatgatcca

SEQ ID NO: 1191337 - DNA, 25 bp, Homo sapien
tcatcaaggcacagttcgcagaaat

SEQ ID NO: 1191338 - DNA, 25 bp, Homo sapien
ttaatccgaatagaaggtcctcctg

SEQ ID NO: 1191339 - DNA, 25 bp, Homo sapien
tggttgtacgagcaaagagggtatc

SEQ ID NO: 1191340 - DNA, 25 bp, Homo sapien
gctccatttcatagtatcatctctc

SEQ ID NO: 1191341 - DNA, 25 bp, Homo sapien
agctccccttgctccatttcatagt

SEQ ID NO: 1191342 - DNA, 25 bp, Homo sapien
tttagttcacacatcatttcctcag

SEQ ID NO: 1191343 - DNA, 25 bp, Homo sapien
aaggtgtccctgaccaacattgccc

SEQ ID NO: 1191344 - DNA, 25 bp, Homo sapien
gatttggtggcaatagtgttctctc

SEQ ID NO: 1191345 - DNA, 25 bp, Homo sapien
gacatcaccaagtcagtcagaaaat

SEQ ID NO: 1191346 - DNA, 25 bp, Homo sapien
caacgatccacctcagacatcacca

SEQ ID NO: 1191347 - DNA, 25 bp, Homo sapien
atgctctccacaacgatccacctca

SEQ ID NO: 1191348 - DNA, 25 bp, Homo sapien
cagtgcgtcatgaagatactgttgt

SEQ ID NO: 1191349 - DNA, 25 bp, Homo sapien
ccagtgcgtcatgaagatactgttg

SEQ ID NO: 1191350 - DNA, 25 bp, Homo sapien
gagagaagataacggtatagctata

SEQ ID NO: 1191351 - DNA, 25 bp, Homo sapien
acggtatagctataaacagtgtctt

SEQ ID NO: 1191352 - DNA, 25 bp, Homo sapien
tttgaagagagaagataacggtata

SEQ ID NO: 1191353 - DNA, 25 bp, Homo sapien
gataacggtatagctataaacagtg

SEQ ID NO: 1191354 - DNA, 25 bp, Homo sapien
tctgatggtctatcagttcactaga

SEQ ID NO: 1191355 - DNA, 25 bp, Homo sapien
cacagttctcatcggactcatacaa

SEQ ID NO: 1191356 - DNA, 25 bp, Homo sapien
ctagatgaacatttgctgggatcca

SEQ ID NO: 1191357 - DNA, 25 bp, Homo sapien
catcggactcatacaaagctttgat

SEQ ID NO: 1191358 - DNA, 25 bp, Homo sapien
aacacttctttcaactcacgaggga

SEQ ID NO: 1191359 - DNA, 25 bp, Homo sapien
taagagttagagtccgagatgtgcg

SEQ ID NO: 1191360 - DNA, 25 bp, Homo sapien
gatgtcttgcttgccacggttcagg

SEQ ID NO: 1191361 - DNA, 25 bp, Homo sapien
cctgcataaggttgaaaagactggg

SEQ ID NO: 1191362 - DNA, 25 bp, Homo sapien
gccaggataattgtcttagacattg

SEQ ID NO: 1191363 - DNA, 25 bp, Homo sapien
gtcttttttgaagtggccaggataa

SEQ ID NO: 1191364 - DNA, 25 bp, Homo sapien
gatccaaataagtttcaagtattgc

SEQ ID NO: 1191365 - DNA, 25 bp, Homo sapien
tctcttacataaaccaatgctatta

SEQ ID NO: 1191366 - DNA, 25 bp, Homo sapien
aacaatctgttcactgaagttccaa

SEQ ID NO: 1191367 - DNA, 25 bp, Homo sapien
gattctagctatctgcagggcctag

SEQ ID NO: 1191368 - DNA, 25 bp, Homo sapien
tacaaaccttcaatactgctagctt

SEQ ID NO: 1191369 - DNA, 25 bp, Homo sapien
tagtacacctctaaaaagccaccac

SEQ ID NO: 1191370 - DNA, 25 bp, Homo sapien
gatctccaaaagaaagcgcttcatt

SEQ ID NO: 1191371 - DNA, 25 bp, Homo sapien
gatggtgtctggattagagatctcc

SEQ ID NO: 1191372 - DNA, 25 bp, Homo sapien
atcaatgtaaccatcaaagcctggg

SEQ ID NO: 1191373 - DNA, 25 bp, Homo sapien
atgaatgccatgtattcctctttgt

SEQ ID NO: 1191374 - DNA, 25 bp, Homo sapien
ttcatgggtagttacttaaaacatg

SEQ ID NO: 1191375 - DNA, 25 bp, Homo sapien
tgataaacctagtattttcttagct

SEQ ID NO: 1191376 - DNA, 25 bp, Homo sapien
tactatatgaggtttcatcttatcc

SEQ ID NO: 1191377 - DNA, 25 bp, Homo sapien
cctattagacatgcataaggctgta

SEQ ID NO: 1191378 - DNA, 25 bp, Homo sapien
agggtttatctttggcatagctgca

SEQ ID NO: 1191379 - DNA, 25 bp, Homo sapien
gctcaataatgttgggctacgattc

SEQ ID NO: 1191380 - DNA, 25 bp, Homo sapien
tcagtttggcatagctgcctttggg

SEQ ID NO: 1191381 - DNA, 25 bp, Homo sapien
tactcaaacagggatagatgccacc

SEQ ID NO: 1191382 - DNA, 25 bp, Homo sapien
tgtttttggcacaacgatggccatt

SEQ ID NO: 1191383 - DNA, 25 bp, Homo sapien
aacaaggtgcggcagacatcgagga

SEQ ID NO: 1191384 - DNA, 25 bp, Homo sapien
cagaaccatggcgtcgagatgaatg

SEQ ID NO: 1191385 - DNA, 25 bp, Homo sapien
gcattgcgacatccaccacagattg

SEQ ID NO: 1191386 - DNA, 25 bp, Homo sapien
ttccactgacatttggactggagtt

SEQ ID NO: 1191387 - DNA, 25 bp, Homo sapien
tagtcaatgacttggtaatatcagc

SEQ ID NO: 1191388 - DNA, 25 bp, Homo sapien
cagttgctgttgtattggcgtagga

SEQ ID NO: 1191389 - DNA, 25 bp, Homo sapien
agaacacgagggagaggccccaatt

SEQ ID NO: 1191390 - DNA, 25 bp, Homo sapien
gggagacgctccgaccattaggaag

SEQ ID NO: 1191391 - DNA, 25 bp, Homo sapien
ctacgtaaagaagcactgtgtggca

SEQ ID NO: 1191392 - DNA, 25 bp, Homo sapien
gacatgctcccggtgctacgtaaag

SEQ ID NO: 1191393 - DNA, 25 bp, Homo sapien
tccggtcaagcgtataggcacatca

SEQ ID NO: 1191394 - DNA, 25 bp, Homo sapien
tgggcttgtccatgtaaatagaaat

SEQ ID NO: 1191395 - DNA, 25 bp, Homo sapien
aaatgattagtttcttggcaaagct

SEQ ID NO: 1191396 - DNA, 25 bp, Homo sapien
cttggctcggaatgcaaacctttat

SEQ ID NO: 1191397 - DNA, 25 bp, Homo sapien
cctttaccttgactctacaggtgtt

SEQ ID NO: 1191398 - DNA, 25 bp, Homo sapien
gcttcatctagattttgctcagttt

SEQ ID NO: 1191399 - DNA, 25 bp, Homo sapien
tggcagagtccacaggtgactgaac

SEQ ID NO: 1191400 - DNA, 25 bp, Homo sapien
cttctcagcatgcttggcttcatct

SEQ ID NO: 1191401 - DNA, 25 bp, Homo sapien
tgcccattgttcagaacccaggctg

SEQ ID NO: 1191402 - DNA, 25 bp, Homo sapien
ccagtcgccggctggaaactctcag

SEQ ID NO: 1191403 - DNA, 25 bp, Homo sapien
caggcgctccttcagtttagtaatt

SEQ ID NO: 1191404 - DNA, 25 bp, Homo sapien
agcaagcggcgttcatattcctcca

SEQ ID NO: 1191405 - DNA, 25 bp, Homo sapien
ccagtcgggccttgtattccagcag

SEQ ID NO: 1191406 - DNA, 25 bp, Homo sapien
aatgtggcaggaaggaaatatcaac

SEQ ID NO: 1191407 - DNA, 25 bp, Homo sapien
ctagaatgtggcaggaaggaaatat

SEQ ID NO: 1191408 - DNA, 25 bp, Homo sapien
tggcaggaaggaaatatcaacatct

SEQ ID NO: 1191409 - DNA, 25 bp, Homo sapien
gtggcaggaaggaaatatcaacatc

SEQ ID NO: 1191410 - DNA, 25 bp, Homo sapien
taactgcttgcatctcagcatgatc

SEQ ID NO: 1191411 - DNA, 25 bp, Homo sapien
tttctgctttgcatcaataactgct

SEQ ID NO: 1191412 - DNA, 25 bp, Homo sapien
catcaataactgcttgcatctcagc

SEQ ID NO: 1191413 - DNA, 25 bp, Homo sapien
tgcatctcagcatgatccttcttca

SEQ ID NO: 1191414 - DNA, 25 bp, Homo sapien
gaataatctcatctccatttatgac

SEQ ID NO: 1191415 - DNA, 25 bp, Homo sapien
ctgtttgaataatctcatctccatt

SEQ ID NO: 1191416 - DNA, 25 bp, Homo sapien
tttgaataatctcatctccatttat

SEQ ID NO: 1191417 - DNA, 25 bp, Homo sapien
tgaataatctcatctccatttatga

SEQ ID NO: 1191418 - DNA, 25 bp, Homo sapien
gagcatgcagagtgaagaccacggc

SEQ ID NO: 1191419 - DNA, 25 bp, Homo sapien
cactttgggacacatgctactggga

SEQ ID NO: 1191420 - DNA, 25 bp, Homo sapien
taggatccgtaaggcagcagtgctg

SEQ ID NO: 1191421 - DNA, 25 bp, Homo sapien
cccagggctgtcatgtagtgctaca

SEQ ID NO: 1191422 - DNA, 25 bp, Homo sapien
gctgaatccagggacacgatccgtt

SEQ ID NO: 1191423 - DNA, 25 bp, Homo sapien
cattgcggacctgcatgctgtaccg

SEQ ID NO: 1191424 - DNA, 25 bp, Homo sapien
gggtcagcgcgctcatcagtctggt

SEQ ID NO: 1191425 - DNA, 25 bp, Homo sapien
tgctgtaccgctccttcacttgggt

SEQ ID NO: 1191426 - DNA, 25 bp, Homo sapien
taaagtccagttttgatgcaacagc

SEQ ID NO: 1191427 - DNA, 25 bp, Homo sapien
cattgaccttggaagtcgccgcctt

SEQ ID NO: 1191428 - DNA, 25 bp, Homo sapien
tgaacctacaggctcatgtctcgct

SEQ ID NO: 1191429 - DNA, 25 bp, Homo sapien
ggagtttctcaccacatcgccattg

SEQ ID NO: 1191430 - DNA, 25 bp, Homo sapien
agctatttaaataacctctccaggg

SEQ ID NO: 1191431 - DNA, 25 bp, Homo sapien
gatctggatggcttatggacagcta

SEQ ID NO: 1191432 - DNA, 25 bp, Homo sapien
ccagctgtggtatggttagcccttt

SEQ ID NO: 1191433 - DNA, 25 bp, Homo sapien
aaatattcagagattccagctgtgg

SEQ ID NO: 1191434 - DNA, 25 bp, Homo sapien
tctgtcggcatcactcaaaagaggg

SEQ ID NO: 1191435 - DNA, 25 bp, Homo sapien
tcacagagaaacacggaagcagacc

SEQ ID NO: 1191436 - DNA, 25 bp, Homo sapien
aaaaggttggacaggagtaggctca

SEQ ID NO: 1191437 - DNA, 25 bp, Homo sapien
gaggttgctgaaacgtaaggtccaa

SEQ ID NO: 1191438 - DNA, 25 bp, Homo sapien
gaaggtggcctccaaaggtgtagct

SEQ ID NO: 1191439 - DNA, 25 bp, Homo sapien
caagtctagtctggtgtcaagcgtg

SEQ ID NO: 1191440 - DNA, 25 bp, Homo sapien
ttatgcattcattcccttagggtcg

SEQ ID NO: 1191441 - DNA, 25 bp, Homo sapien
gctgatacggatctcacatacggaa

SEQ ID NO: 1191442 - DNA, 25 bp, Homo sapien
taatccctagtagaacaagattagg

SEQ ID NO: 1191443 - DNA, 25 bp, Homo sapien
taggaagaactcgacatgtgccaaa

SEQ ID NO: 1191444 - DNA, 25 bp, Homo sapien
cacagacctacaactaacacaaaac

SEQ ID NO: 1191445 - DNA, 25 bp, Homo sapien
actaacacaaaacaagactacacat

SEQ ID NO: 1191446 - DNA, 25 bp, Homo sapien
gaaaattcacacgagcacgtgactg

SEQ ID NO: 1191447 - DNA, 25 bp, Homo sapien
taggccaaacaaatatcaccctggg

SEQ ID NO: 1191448 - DNA, 25 bp, Homo sapien
ggagagctttcagtacattttgcta

SEQ ID NO: 1191449 - DNA, 25 bp, Homo sapien
cacgtgactgcatgcttgccaggag

SEQ ID NO: 1191450 - DNA, 25 bp, Homo sapien
tatgcagcctttaaagagaacaagg

SEQ ID NO: 1191451 - DNA, 25 bp, Homo sapien
caaattcgagagtgtgaaggacctt

SEQ ID NO: 1191452 - DNA, 25 bp, Homo sapien
aaacaacgtaatgtccactgaaagc

SEQ ID NO: 1191453 - DNA, 25 bp, Homo sapien
gaacaagggagatctttacacattc

SEQ ID NO: 1191454 - DNA, 25 bp, Homo sapien
tctcagtctgtctgggctccccaga

SEQ ID NO: 1191455 - DNA, 25 bp, Homo sapien
gaaggcaaggccactgagcctgctc

SEQ ID NO: 1191456 - DNA, 25 bp, Homo sapien
tccccagaaggcaaggccactgagc

SEQ ID NO: 1191457 - DNA, 25 bp, Homo sapien
atagcatctcagtctgtctgggctc

SEQ ID NO: 1191458 - DNA, 25 bp, Homo sapien
caaggctgtcctcccccgccttcac

SEQ ID NO: 1191459 - DNA, 25 bp, Homo sapien
tggttcctttgacccttgcctagat

SEQ ID NO: 1191460 - DNA, 25 bp, Homo sapien
agccaccaatgtaactcacacactg

SEQ ID NO: 1191461 - DNA, 25 bp, Homo sapien
ccaccaatgtaactcacacactggg

SEQ ID NO: 1191462 - DNA, 25 bp, Homo sapien
aagctggccgcagggctgtttccac

SEQ ID NO: 1191463 - DNA, 25 bp, Homo sapien
ggaaacgcagctcccacattgggaa

SEQ ID NO: 1191464 - DNA, 25 bp, Homo sapien
cattgggaatgcagatctggtggtt

SEQ ID NO: 1191465 - DNA, 25 bp, Homo sapien
ggccacggcacacaactttagcaaa

SEQ ID NO: 1191466 - DNA, 25 bp, Homo sapien
tctgagcgcacagcccatgtcctct

SEQ ID NO: 1191467 - DNA, 25 bp, Homo sapien
tcgcgcgaaccgaccccacctcgga

SEQ ID NO: 1191468 - DNA, 25 bp, Homo sapien
gcgcacagcccatgtcctctgctgt

SEQ ID NO: 1191469 - DNA, 25 bp, Homo sapien
ctgctgtgcgctcctcgcgcgaacc

SEQ ID NO: 1191470 - DNA, 25 bp, Homo sapien
gcagggtgaccacccctttgtgtac

SEQ ID NO: 1191471 - DNA, 25 bp, Homo sapien
gcaacttacaggtcaaggtgagggc

SEQ ID NO: 1191472 - DNA, 25 bp, Homo sapien
ctaggcaacttacaggtcaaggtga

SEQ ID NO: 1191473 - DNA, 25 bp, Homo sapien
agggcagggtgaccacccctttgtg

SEQ ID NO: 1191474 - DNA, 25 bp, Homo sapien
gggtgttcttcaactccccacaaca

SEQ ID NO: 1191475 - DNA, 25 bp, Homo sapien
tttcttcaattctgccctcttggcc

SEQ ID NO: 1191476 - DNA, 25 bp, Homo sapien
gctgctttatgctcagtacagagaa

SEQ ID NO: 1191477 - DNA, 25 bp, Homo sapien
aaaccagagattcatgcgagcattc

SEQ ID NO: 1191478 - DNA, 25 bp, Homo sapien
catgcgagcattctctgtatccctt

SEQ ID NO: 1191479 - DNA, 25 bp, Homo sapien
tctccattcagtaggagctcagaga

SEQ ID NO: 1191480 - DNA, 25 bp, Homo sapien
caggcaaactgccttgtagttcttg

SEQ ID NO: 1191481 - DNA, 25 bp, Homo sapien
aattccaggcaaactgccttgtagt

SEQ ID NO: 1191482 - DNA, 25 bp, Homo sapien
ttccaggcaaactgccttgtagttc

SEQ ID NO: 1191483 - DNA, 25 bp, Homo sapien
tccaggcaaactgccttgtagttct

SEQ ID NO: 1191484 - DNA, 25 bp, Homo sapien
tgtggattgaaacaggaacacagac

SEQ ID NO: 1191485 - DNA, 25 bp, Homo sapien
ctgtggattgaaacaggaacacaga

SEQ ID NO: 1191486 - DNA, 25 bp, Homo sapien
cactcctgctttggtaaaccgccct

SEQ ID NO: 1191487 - DNA, 25 bp, Homo sapien
tgtcactcctgctttggtaaaccgc

SEQ ID NO: 1191488 - DNA, 25 bp, Homo sapien
ctgctttggtaaaccgcccttcttg

SEQ ID NO: 1191489 - DNA, 25 bp, Homo sapien
gtcactcctgctttggtaaaccgcc

SEQ ID NO: 1191490 - DNA, 25 bp, Homo sapien
cttctctcacttccctgagttcatt

SEQ ID NO: 1191491 - DNA, 25 bp, Homo sapien
tgttttatctcctccattttctcct

SEQ ID NO: 1191492 - DNA, 25 bp, Homo sapien
cttgagctcttctctcacttccctg

SEQ ID NO: 1191493 - DNA, 25 bp, Homo sapien
tctccttgagctcttctctcacttc

SEQ ID NO: 1191494 - DNA, 25 bp, Homo sapien
tccacaaattcgtgaagtttatcaa

SEQ ID NO: 1191495 - DNA, 25 bp, Homo sapien
cacaaattcgtgaagtttatcaaaa

SEQ ID NO: 1191496 - DNA, 25 bp, Homo sapien
aattcgtgaagtttatcaaaatcct

SEQ ID NO: 1191497 - DNA, 25 bp, Homo sapien
atttccacaaattcgtgaagtttat

SEQ ID NO: 1191498 - DNA, 25 bp, Homo sapien
ggagtgtccgtgacatgtacagctt

SEQ ID NO: 1191499 - DNA, 25 bp, Homo sapien
tgcaaaccattctgcatcttacttc

SEQ ID NO: 1191500 - DNA, 25 bp, Homo sapien
tacttcctcaagaatcctcgctaga

SEQ ID NO: 1191501 - DNA, 25 bp, Homo sapien
aagaatcctcgctagacttgggtga

SEQ ID NO: 1191502 - DNA, 25 bp, Homo sapien
tcttctcatccatatctttctgcat

SEQ ID NO: 1191503 - DNA, 25 bp, Homo sapien
tctcatccatatctttctgcatttc

SEQ ID NO: 1191504 - DNA, 25 bp, Homo sapien
catcttctcatccatatctttctgc

SEQ ID NO: 1191505 - DNA, 25 bp, Homo sapien
aaatgtccatcttctcatccatatc

SEQ ID NO: 1191506 - DNA, 25 bp, Homo sapien
tgtggtgccatcgtcttcttgtgaa

SEQ ID NO: 1191507 - DNA, 25 bp, Homo sapien
gctgctcctttggtgctcttctaag

SEQ ID NO: 1191508 - DNA, 25 bp, Homo sapien
tctgtgagtctttcccatcagcctg

SEQ ID NO: 1191509 - DNA, 25 bp, Homo sapien
gggtgctccattgactccactggct

SEQ ID NO: 1191510 - DNA, 25 bp, Homo sapien
agcagcgggcggacctgtcccttca

SEQ ID NO: 1191511 - DNA, 25 bp, Homo sapien
gggaagtcaccagggagccggagcc

SEQ ID NO: 1191512 - DNA, 25 bp, Homo sapien
tgggctcgggcagggtttcacttac

SEQ ID NO: 1191513 - DNA, 25 bp, Homo sapien
cactatgatacagcacaagctcggg

SEQ ID NO: 1191514 - DNA, 25 bp, Homo sapien
ggcgggtaggcccatccagggtcaa

SEQ ID NO: 1191515 - DNA, 25 bp, Homo sapien
agagggtggagctggcgggtaggcc

SEQ ID NO: 1191516 - DNA, 25 bp, Homo sapien
atccagggtcaagtcctgcatggtc

SEQ ID NO: 1191517 - DNA, 25 bp, Homo sapien
tggagctggcgggtaggcccatcca

SEQ ID NO: 1191518 - DNA, 25 bp, Homo sapien
gatcaatttcccctggtccaagaag

SEQ ID NO: 1191519 - DNA, 25 bp, Homo sapien
ccaagaagggcagcctgctaggcac

SEQ ID NO: 1191520 - DNA, 25 bp, Homo sapien
tgcagaggacagaaacggcacaaga

SEQ ID NO: 1191521 - DNA, 25 bp, Homo sapien
gtccaagaagggcagcctgctaggc

SEQ ID NO: 1191522 - DNA, 25 bp, Homo sapien
tagttgttctttagagcacacaaca

SEQ ID NO: 1191523 - DNA, 25 bp, Homo sapien
tgttctttagagcacacaacaaaca

SEQ ID NO: 1191524 - DNA, 25 bp, Homo sapien
cccgattgtagttgttctttagagc

SEQ ID NO: 1191525 - DNA, 25 bp, Homo sapien
cgattgtagttgttctttagagcac

SEQ ID NO: 1191526 - DNA, 25 bp, Homo sapien
gcaaggtcagttccgccactagtgg

SEQ ID NO: 1191527 - DNA, 25 bp, Homo sapien
tgggtggcagcatctgctaacagtc

SEQ ID NO: 1191528 - DNA, 25 bp, Homo sapien
caaggcacctgatcgagaaaaggca

SEQ ID NO: 1191529 - DNA, 25 bp, Homo sapien
tggtgccacatcctgtatgactgag

SEQ ID NO: 1191530 - DNA, 25 bp, Homo sapien
catattcgatgtcaccggggttgag

SEQ ID NO: 1191531 - DNA, 25 bp, Homo sapien
tattcgatgtcaccggggttgaggt

SEQ ID NO: 1191532 - DNA, 25 bp, Homo sapien
gaaacacatattcgatgtcaccggg

SEQ ID NO: 1191533 - DNA, 25 bp, Homo sapien
tggaaacacatattcgatgtcaccg

SEQ ID NO: 1191534 - DNA, 25 bp, Homo sapien
agccctgactgtgcatcttaaggag

SEQ ID NO: 1191535 - DNA, 25 bp, Homo sapien
aactgctggtaggttctgcagctgc

SEQ ID NO: 1191536 - DNA, 25 bp, Homo sapien
gaggtgatgaatcggaactgctggt

SEQ ID NO: 1191537 - DNA, 25 bp, Homo sapien
tgtgcatcttaaggagcttggaggt

SEQ ID NO: 1191538 - DNA, 25 bp, Homo sapien
tggttgggaggaccctaagatgact

SEQ ID NO: 1191539 - DNA, 25 bp, Homo sapien
tgagaagggtggatccccagaaccc

SEQ ID NO: 1191540 - DNA, 25 bp, Homo sapien
tatgacctgggacgtttgcagaccc

SEQ ID NO: 1191541 - DNA, 25 bp, Homo sapien
gaaagctacccagttcctatgagca

SEQ ID NO: 1191542 - DNA, 25 bp, Homo sapien
gcccacagaaggttgggtggtcact

SEQ ID NO: 1191543 - DNA, 25 bp, Homo sapien
ggcccacagaaggttgggtggtcac

SEQ ID NO: 1191544 - DNA, 25 bp, Homo sapien
tggcccacagaaggttgggtggtca

SEQ ID NO: 1191545 - DNA, 25 bp, Homo sapien
tcattcctcgtccttcaaattgaag

SEQ ID NO: 1191546 - DNA, 25 bp, Homo sapien
gaggaactggtgtgaaataaaatat

SEQ ID NO: 1191547 - DNA, 25 bp, Homo sapien
tattagatggtagaagcagccagct

SEQ ID NO: 1191548 - DNA, 25 bp, Homo sapien
tctcatttcaagctggcagttaagc

SEQ ID NO: 1191549 - DNA, 25 bp, Homo sapien
taccatagatccagcagtcccactg

SEQ ID NO: 1191550 - DNA, 25 bp, Homo sapien
tccagcagtcccactgcagcgtata

SEQ ID NO: 1191551 - DNA, 25 bp, Homo sapien
agcagtcccactgcagcgtatatac

SEQ ID NO: 1191552 - DNA, 25 bp, Homo sapien
ctaccatagatccagcagtcccact

SEQ ID NO: 1191553 - DNA, 25 bp, Homo sapien
atttgcagccattaagaacttgacc

SEQ ID NO: 1191554 - DNA, 25 bp, Homo sapien
gccattaagaacttgacccggagaa

SEQ ID NO: 1191555 - DNA, 25 bp, Homo sapien
cagccattaagaacttgacccggag

SEQ ID NO: 1191556 - DNA, 25 bp, Homo sapien
tgcagccattaagaacttgacccgg

SEQ ID NO: 1191557 - DNA, 25 bp, Homo sapien
tctaggagaagcttaaccgagtggt

SEQ ID NO: 1191558 - DNA, 25 bp, Homo sapien
ggtcagccagggttgccatcatctg

SEQ ID NO: 1191559 - DNA, 25 bp, Homo sapien
gcagccggcttcactcagaatgagt

SEQ ID NO: 1191560 - DNA, 25 bp, Homo sapien
gatcttctcaggcagttgcaggcaa

SEQ ID NO: 1191561 - DNA, 25 bp, Homo sapien
cttcaagagaaaagcaggcagagga

SEQ ID NO: 1191562 - DNA, 25 bp, Homo sapien
agaaaagcaggcagaggacaggcat

SEQ ID NO: 1191563 - DNA, 25 bp, Homo sapien
aaagcaggcagaggacaggcattca

SEQ ID NO: 1191564 - DNA, 25 bp, Homo sapien
gcaggcagaggacaggcattcaggg

SEQ ID NO: 1191565 - DNA, 25 bp, Homo sapien
agaagggtcaatagaattggctgtc

SEQ ID NO: 1191566 - DNA, 25 bp, Homo sapien
cagggtcaaaagcaggaactcaatc

SEQ ID NO: 1191567 - DNA, 25 bp, Homo sapien
caggaggtgacgagcttcctttagg

SEQ ID NO: 1191568 - DNA, 25 bp, Homo sapien
gtcaatagaattggctgtcaggagg

SEQ ID NO: 1191569 - DNA, 25 bp, Homo sapien
ggcagaaaaagggcatgctctccac

SEQ ID NO: 1191570 - DNA, 25 bp, Homo sapien
gggcagggcataatcaatgaattct

SEQ ID NO: 1191571 - DNA, 25 bp, Homo sapien
gccacgcagccatcaagtggcaggg

SEQ ID NO: 1191572 - DNA, 25 bp, Homo sapien
ctctgcccttaagggactcacatcc

SEQ ID NO: 1191573 - DNA, 25 bp, Homo sapien
aagcacaagcttgccagtaaagctg

SEQ ID NO: 1191574 - DNA, 25 bp, Homo sapien
ggaaacagctttttgacagccaggc

SEQ ID NO: 1191575 - DNA, 25 bp, Homo sapien
aacgtctggcggtggctccctgcag

SEQ ID NO: 1191576 - DNA, 25 bp, Homo sapien
taaagctggcctgtgcgcagtgtca

SEQ ID NO: 1191577 - DNA, 25 bp, Homo sapien
ctgggtcagggagatgcccaccatg

SEQ ID NO: 1191578 - DNA, 25 bp, Homo sapien
tgggtcagggagatgcccaccatgg

SEQ ID NO: 1191579 - DNA, 25 bp, Homo sapien
gggtcagggagatgcccaccatggc

SEQ ID NO: 1191580 - DNA, 25 bp, Homo sapien
ggtcagggagatgcccaccatggct

SEQ ID NO: 1191581 - DNA, 25 bp, Homo sapien
cggtccagtcaaccggctcctgatt

SEQ ID NO: 1191582 - DNA, 25 bp, Homo sapien
caaccggctcctgattatgtccagg

SEQ ID NO: 1191583 - DNA, 25 bp, Homo sapien
tgggtttggcatccaccccggtcca

SEQ ID NO: 1191584 - DNA, 25 bp, Homo sapien
gctcctgattatgtccaggagggca

SEQ ID NO: 1191585 - DNA, 25 bp, Homo sapien
tatcttcaattctggggccaactga

SEQ ID NO: 1191586 - DNA, 25 bp, Homo sapien
ttacatatcttcaattctggggcca

SEQ ID NO: 1191587 - DNA, 25 bp, Homo sapien
ttcaattctggggccaactgagctc

SEQ ID NO: 1191588 - DNA, 25 bp, Homo sapien
caattctggggccaactgagctctc

SEQ ID NO: 1191589 - DNA, 25 bp, Homo sapien
gtggcagatggcaacccagctccca

SEQ ID NO: 1191590 - DNA, 25 bp, Homo sapien
acggtggcagatggcaacccagctc

SEQ ID NO: 1191591 - DNA, 25 bp, Homo sapien
ctaacggtggcagatggcaacccag

SEQ ID NO: 1191592 - DNA, 25 bp, Homo sapien
tggcagatggcaacccagctcccag

SEQ ID NO: 1191593 - DNA, 25 bp, Homo sapien
ttccaacagatcagctttttctgca

SEQ ID NO: 1191594 - DNA, 25 bp, Homo sapien
cttttccaacagatcagctttttct

SEQ ID NO: 1191595 - DNA, 25 bp, Homo sapien
ctctttggattgcagggcctttccc

SEQ ID NO: 1191596 - DNA, 25 bp, Homo sapien
gacccggagagtggctcttgcagcc

SEQ ID NO: 1191597 - DNA, 25 bp, Homo sapien
tgatgaccacatgcgtcaaggcctg

SEQ ID NO: 1191598 - DNA, 25 bp, Homo sapien
tctgatgaccacatgcgtcaaggcc

SEQ ID NO: 1191599 - DNA, 25 bp, Homo sapien
ctgatgaccacatgcgtcaaggcct

SEQ ID NO: 1191600 - DNA, 25 bp, Homo sapien
tgtgacctcagacagattatgctca

SEQ ID NO: 1191601 - DNA, 25 bp, Homo sapien
gtcagaatgctaggattcgaatttc

SEQ ID NO: 1191602 - DNA, 25 bp, Homo sapien
tcagctctgccacgtatcctgtgac

SEQ ID NO: 1191603 - DNA, 25 bp, Homo sapien
ccaggaagtattgtgaaaatgcaga

SEQ ID NO: 1191604 - DNA, 25 bp, Homo sapien
tgatgtcaaattggctctctgcctg

SEQ ID NO: 1191605 - DNA, 25 bp, Homo sapien
gcagcctgctgctccctaagtgaac

SEQ ID NO: 1191606 - DNA, 25 bp, Homo sapien
tgaacggggagcgttttctccaaca

SEQ ID NO: 1191607 - DNA, 25 bp, Homo sapien
gcctgctgctccctaagtgaacggg

SEQ ID NO: 1191608 - DNA, 25 bp, Homo sapien
ctctccagtcctctcgctcctactt

SEQ ID NO: 1191609 - DNA, 25 bp, Homo sapien
ccagtcctctcgctcctacttgtct

SEQ ID NO: 1191610 - DNA, 25 bp, Homo sapien
cagtcctctcgctcctacttgtctc

SEQ ID NO: 1191611 - DNA, 25 bp, Homo sapien
ctccagtcctctcgctcctacttgt

SEQ ID NO: 1191612 - DNA, 25 bp, Homo sapien
gctttggggcgcctcacataatgct

SEQ ID NO: 1191613 - DNA, 25 bp, Homo sapien
gcagagataagtctcgggtccaggt

SEQ ID NO: 1191614 - DNA, 25 bp, Homo sapien
gggcgcctcacataatgctgtgctc

SEQ ID NO: 1191615 - DNA, 25 bp, Homo sapien
gcctcacataatgctgtgctctgca

SEQ ID NO: 1191616 - DNA, 25 bp, Homo sapien
atttgggtactcattaaaagatgca

SEQ ID NO: 1191617 - DNA, 25 bp, Homo sapien
ttgagctcacaaggggttggagacc

SEQ ID NO: 1191618 - DNA, 25 bp, Homo sapien
aaacaggctgggtgtaagggctcac

SEQ ID NO: 1191619 - DNA, 25 bp, Homo sapien
aaggcaacgtggtgagatctccgcc

SEQ ID NO: 1191620 - DNA, 25 bp, Homo sapien
gagcaagtctctcctgaccacaggg

SEQ ID NO: 1191621 - DNA, 25 bp, Homo sapien
tctgagcaagtctctcctgaccaca

SEQ ID NO: 1191622 - DNA, 25 bp, Homo sapien
tgagcaagtctctcctgaccacagg

SEQ ID NO: 1191623 - DNA, 25 bp, Homo sapien
ttctgagcaagtctctcctgaccac

SEQ ID NO: 1191624 - DNA, 25 bp, Homo sapien
gcagcttctgactcatgactgtgtc

SEQ ID NO: 1191625 - DNA, 25 bp, Homo sapien
cagcagcttctgactcatgactgtg

SEQ ID NO: 1191626 - DNA, 25 bp, Homo sapien
cagcttctgactcatgactgtgtcc

SEQ ID NO: 1191627 - DNA, 25 bp, Homo sapien
aacagcagcttctgactcatgactg

SEQ ID NO: 1191628 - DNA, 25 bp, Homo sapien
ctccagccttccgactgataagttc

SEQ ID NO: 1191629 - DNA, 25 bp, Homo sapien
gataagttctgcacatatttcccca

SEQ ID NO: 1191630 - DNA, 25 bp, Homo sapien
tccgactgataagttctgcacatat

SEQ ID NO: 1191631 - DNA, 25 bp, Homo sapien
agccgccttgatacctgcccatttt

SEQ ID NO: 1191632 - DNA, 25 bp, Homo sapien
ttgcctccctgcgggggtgtagaag

SEQ ID NO: 1191633 - DNA, 25 bp, Homo sapien
agcccggccacctcaaaacggtgct

SEQ ID NO: 1191634 - DNA, 25 bp, Homo sapien
tccctgcgggggtgtagaagcctct

SEQ ID NO: 1191635 - DNA, 25 bp, Homo sapien
cagcccggccacctcaaaacggtgc

SEQ ID NO: 1191636 - DNA, 25 bp, Homo sapien
gccctccatacagtgaagggttgtt

SEQ ID NO: 1191637 - DNA, 25 bp, Homo sapien
ggttgtttccgctggtgacttccac

SEQ ID NO: 1191638 - DNA, 25 bp, Homo sapien
agggagactgccccgccccttgcct

SEQ ID NO: 1191639 - DNA, 25 bp, Homo sapien
cgccccttgcctgccgcccagtggc

SEQ ID NO: 1191640 - DNA, 25 bp, Homo sapien
aattccaagagtgctgatgaagacg

SEQ ID NO: 1191641 - DNA, 25 bp, Homo sapien
gccaaaattccaagagtgctgatga

SEQ ID NO: 1191642 - DNA, 25 bp, Homo sapien
tccaagagtgctgatgaagacggtg

SEQ ID NO: 1191643 - DNA, 25 bp, Homo sapien
caagagtgctgatgaagacggtgac

SEQ ID NO: 1191644 - DNA, 25 bp, Homo sapien
gcctgcagccggataaacgctcggg

SEQ ID NO: 1191645 - DNA, 25 bp, Homo sapien
caagaatgacgcctgcagccggata

SEQ ID NO: 1191646 - DNA, 25 bp, Homo sapien
acgctcggggcaaggccgctatcat

SEQ ID NO: 1191647 - DNA, 25 bp, Homo sapien
atgacgcctgcagccggataaacgc

SEQ ID NO: 1191648 - DNA, 25 bp, Homo sapien
tactgactgggcagcgcggtttccc

SEQ ID NO: 1191649 - DNA, 25 bp, Homo sapien
ctgtaaagcaagaggaagccgagaa

SEQ ID NO: 1191650 - DNA, 25 bp, Homo sapien
tcatcccgggacacggtgcggcgct

SEQ ID NO: 1191651 - DNA, 25 bp, Homo sapien
gcgcggtgggaattgcgctcccttc

SEQ ID NO: 1191652 - DNA, 25 bp, Homo sapien
gagcctgctccgtgaaaagcctttt

SEQ ID NO: 1191653 - DNA, 25 bp, Homo sapien
gccagccccgtaggctccgagcctg

SEQ ID NO: 1191654 - DNA, 25 bp, Homo sapien
gctccgagcctgctccgtgaaaagc

SEQ ID NO: 1191655 - DNA, 25 bp, Homo sapien
gaggccagccccgtaggctccgagc

SEQ ID NO: 1191656 - DNA, 25 bp, Homo sapien
atgggaagtcggagaaattctgagc

SEQ ID NO: 1191657 - DNA, 25 bp, Homo sapien
ggaagtcggagaaattctgagcata

SEQ ID NO: 1191658 - DNA, 25 bp, Homo sapien
tgggaagtcggagaaattctgagca

SEQ ID NO: 1191659 - DNA, 25 bp, Homo sapien
gatgggaagtcggagaaattctgag

SEQ ID NO: 1191660 - DNA, 25 bp, Homo sapien
cagagttgagagaatattcattttc

SEQ ID NO: 1191661 - DNA, 25 bp, Homo sapien
cattttcttgaactcttatgaacga

SEQ ID NO: 1191662 - DNA, 25 bp, Homo sapien
actcttatgaacgacagtttctcgc

SEQ ID NO: 1191663 - DNA, 25 bp, Homo sapien
aacgacagtttctcgcttgccatga

SEQ ID NO: 1191664 - DNA, 25 bp, Homo sapien
cagagatgactccagcaagttgagc

SEQ ID NO: 1191665 - DNA, 25 bp, Homo sapien
tcaagagtccgtgtcctggagctca

SEQ ID NO: 1191666 - DNA, 25 bp, Homo sapien
gggctgctgcagagcaagttctctg

SEQ ID NO: 1191667 - DNA, 25 bp, Homo sapien
aagacggggtgtgcttctgctctgt

SEQ ID NO: 1191668 - DNA, 25 bp, Homo sapien
tggaactggttcagctggagcttag

SEQ ID NO: 1191669 - DNA, 25 bp, Homo sapien
tggagcttagtaagtagtcaaaatc

SEQ ID NO: 1191670 - DNA, 25 bp, Homo sapien
gttcagctggagcttagtaagtagt

SEQ ID NO: 1191671 - DNA, 25 bp, Homo sapien
aagtggaactggttcagctggagct

SEQ ID NO: 1191672 - DNA, 25 bp, Homo sapien
gcagcaccacattcagcagggcatt

SEQ ID NO: 1191673 - DNA, 25 bp, Homo sapien
tggccctttgacgaacaaactgaag

SEQ ID NO: 1191674 - DNA, 25 bp, Homo sapien
tgaagcacccaggatatccaggagg

SEQ ID NO: 1191675 - DNA, 25 bp, Homo sapien
gataatcggcttaagcagcaccaga

SEQ ID NO: 1191676 - DNA, 25 bp, Homo sapien
tgtgtggccctcaaactaaagacaa

SEQ ID NO: 1191677 - DNA, 25 bp, Homo sapien
tattcaacggccatggaagtttcaa

SEQ ID NO: 1191678 - DNA, 25 bp, Homo sapien
gacaagccccttaaggatcaccact

SEQ ID NO: 1191679 - DNA, 25 bp, Homo sapien
gattttgtctacatgatacaggcac

SEQ ID NO: 1191680 - DNA, 25 bp, Homo sapien
acgcccactaggtctgttcattctt

SEQ ID NO: 1191681 - DNA, 25 bp, Homo sapien
ggcaacgcccactaggtctgttcat

SEQ ID NO: 1191682 - DNA, 25 bp, Homo sapien
taaaggcaacgcccactaggtctgt

SEQ ID NO: 1191683 - DNA, 25 bp, Homo sapien
aaggcaacgcccactaggtctgttc

SEQ ID NO: 1191684 - DNA, 25 bp, Homo sapien
caaagaatgttctagaaggatggcc

SEQ ID NO: 1191685 - DNA, 25 bp, Homo sapien
gaagccctagctacccaaagaatgt

SEQ ID NO: 1191686 - DNA, 25 bp, Homo sapien
gacaacacagtccactcaaggagga

SEQ ID NO: 1191687 - DNA, 25 bp, Homo sapien
gcttggcccttgaaagtaatgtccc

SEQ ID NO: 1191688 - DNA, 25 bp, Homo sapien
tatattcagtttgatgtcagctgcc

SEQ ID NO: 1191689 - DNA, 25 bp, Homo sapien
gcacactcgtttttgaggaggaaac

SEQ ID NO: 1191690 - DNA, 25 bp, Homo sapien
ttgaatgggccaagacatacccagg

SEQ ID NO: 1191691 - DNA, 25 bp, Homo sapien
caggctgccttgaacatgtgtgagg

SEQ ID NO: 1191692 - DNA, 25 bp, Homo sapien
ctgtcgttttagattcatcaacccc

SEQ ID NO: 1191693 - DNA, 25 bp, Homo sapien
caccctgatttccagtcattccaac

SEQ ID NO: 1191694 - DNA, 25 bp, Homo sapien
gatttccagtcattccaacccaaac

SEQ ID NO: 1191695 - DNA, 25 bp, Homo sapien
cctgatttccagtcattccaaccca

SEQ ID NO: 1191696 - DNA, 25 bp, Homo sapien
agcactttttagaggcccctgtagg

SEQ ID NO: 1191697 - DNA, 25 bp, Homo sapien
gcagcactttttagaggcccctgta

SEQ ID NO: 1191698 - DNA, 25 bp, Homo sapien
atgcagcagcactttttagaggccc

SEQ ID NO: 1191699 - DNA, 25 bp, Homo sapien
cagcagcactttttagaggcccctg

SEQ ID NO: 1191700 - DNA, 25 bp, Homo sapien
tgtgcaaagctaccagacggtttgg

SEQ ID NO: 1191701 - DNA, 25 bp, Homo sapien
tctttggactcaaagcacaggaccc

SEQ ID NO: 1191702 - DNA, 25 bp, Homo sapien
tgcagccacagagaggactgatgga

SEQ ID NO: 1191703 - DNA, 25 bp, Homo sapien
cactctgtggaaagctctgtcatct

SEQ ID NO: 1191704 - DNA, 25 bp, Homo sapien
tgttcagggtggtattgctgtggac

SEQ ID NO: 1191705 - DNA, 25 bp, Homo sapien
catgttcagggtggtattgctgtgg

SEQ ID NO: 1191706 - DNA, 25 bp, Homo sapien
gcatgttcagggtggtattgctgtg

SEQ ID NO: 1191707 - DNA, 25 bp, Homo sapien
gttcagggtggtattgctgtggaca

SEQ ID NO: 1191708 - DNA, 25 bp, Homo sapien
aggctgcttggccccacacgtcctc

SEQ ID NO: 1191709 - DNA, 25 bp, Homo sapien
gtgaaatctgcggtgtgtgacctgc

SEQ ID NO: 1191710 - DNA, 25 bp, Homo sapien
ccagtgaaatctgcggtgtgtgacc

SEQ ID NO: 1191711 - DNA, 25 bp, Homo sapien
atctgcggtgtgtgacctgcatatg

SEQ ID NO: 1191712 - DNA, 25 bp, Homo sapien
ccccagtgaaatctgcggtgtgtga

SEQ ID NO: 1191713 - DNA, 25 bp, Homo sapien
taggtcagccctctcagatgatctg

SEQ ID NO: 1191714 - DNA, 25 bp, Homo sapien
gaatcacatactccacagtcccatg

SEQ ID NO: 1191715 - DNA, 25 bp, Homo sapien
caggtagacagccacagctatgcgg

SEQ ID NO: 1191716 - DNA, 25 bp, Homo sapien
gcagcgcaatctgtatgaacaaata

SEQ ID NO: 1191717 - DNA, 25 bp, Homo sapien
ggtggtttttcctagttcattgaca

SEQ ID NO: 1191718 - DNA, 25 bp, Homo sapien
gaagcctctcttctcgaggactcga

SEQ ID NO: 1191719 - DNA, 25 bp, Homo sapien
ctcgaggactcgaggagttaaatat

SEQ ID NO: 1191720 - DNA, 25 bp, Homo sapien
tgatgaccggttccctacagagctg

SEQ ID NO: 1191721 - DNA, 25 bp, Homo sapien
aattgccatgtgtcagtgggtgtca

SEQ ID NO: 1191722 - DNA, 25 bp, Homo sapien
tggtcagaggatgtgaagcatccac

SEQ ID NO: 1191723 - DNA, 25 bp, Homo sapien
ccacttagggtcagaaattgccatg

SEQ ID NO: 1191724 - DNA, 25 bp, Homo sapien
ggtgaagtctttagtggtctctgag

SEQ ID NO: 1191725 - DNA, 25 bp, Homo sapien
caggtgcagcatgtaaaagagaagt

SEQ ID NO: 1191726 - DNA, 25 bp, Homo sapien
cccgtttgagagactaggatgttct

SEQ ID NO: 1191727 - DNA, 25 bp, Homo sapien
agcctcagaactggcttgcgagctg

SEQ ID NO: 1191728 - DNA, 25 bp, Homo sapien
gagctggccaaacatgcaaataccc

SEQ ID NO: 1191729 - DNA, 25 bp, Homo sapien
tctcaaaggcgcaagtaaggtgtcg

SEQ ID NO: 1191730 - DNA, 25 bp, Homo sapien
taaggtgtcgctgtcctttactccg

SEQ ID NO: 1191731 - DNA, 25 bp, Homo sapien
gctcctgagctggttgtttcccttc

SEQ ID NO: 1191732 - DNA, 25 bp, Homo sapien
cgctcaaaactttaggcctcctctg

SEQ ID NO: 1191733 - DNA, 25 bp, Homo sapien
gggagctaatgagccatgacaagaa

SEQ ID NO: 1191734 - DNA, 25 bp, Homo sapien
gctaatgagccatgacaagaacaaa

SEQ ID NO: 1191735 - DNA, 25 bp, Homo sapien
agggagctaatgagccatgacaaga

SEQ ID NO: 1191736 - DNA, 25 bp, Homo sapien
agctaatgagccatgacaagaacaa

SEQ ID NO: 1191737 - DNA, 25 bp, Homo sapien
ggacaagattcatggagttgaccag

SEQ ID NO: 1191738 - DNA, 25 bp, Homo sapien
gacaagattcatggagttgaccagg

SEQ ID NO: 1191739 - DNA, 25 bp, Homo sapien
acaagattcatggagttgaccaggc

SEQ ID NO: 1191740 - DNA, 25 bp, Homo sapien
ctggacaagattcatggagttgacc

SEQ ID NO: 1191741 - DNA, 25 bp, Homo sapien
agctgatgaagcttgggtgggctga

SEQ ID NO: 1191742 - DNA, 25 bp, Homo sapien
ggtgggctgagttagtctgctgagg

SEQ ID NO: 1191743 - DNA, 25 bp, Homo sapien
tcttactaagtcaggctgctgctta

SEQ ID NO: 1191744 - DNA, 25 bp, Homo sapien
tactgttactgtctggatgaattcc

SEQ ID NO: 1191745 - DNA, 25 bp, Homo sapien
cagatagcccctttgatactgttac

SEQ ID NO: 1191746 - DNA, 25 bp, Homo sapien
tctagaatctatcccactgagtggc

SEQ ID NO: 1191747 - DNA, 25 bp, Homo sapien
gttgatttcatgagacaaaggagtg

SEQ ID NO: 1191748 - DNA, 25 bp, Homo sapien
gaggctactgatgatgattcctgag

SEQ ID NO: 1191749 - DNA, 25 bp, Homo sapien
ctactgatgatgattcctgagagtc

SEQ ID NO: 1191750 - DNA, 25 bp, Homo sapien
tgttgatttcatgagacaaaggagt

SEQ ID NO: 1191751 - DNA, 25 bp, Homo sapien
ttccttgcccgtgtagacagctgag

SEQ ID NO: 1191752 - DNA, 25 bp, Homo sapien
ttgcccgtgtagacagctgagattt

SEQ ID NO: 1191753 - DNA, 25 bp, Homo sapien
tccttgcccgtgtagacagctgaga

SEQ ID NO: 1191754 - DNA, 25 bp, Homo sapien
ccttgcccgtgtagacagctgagat

SEQ ID NO: 1191755 - DNA, 25 bp, Homo sapien
cgattgctggacacgtggatgttcc

SEQ ID NO: 1191756 - DNA, 25 bp, Homo sapien
ttgttctacgcaactctgtctggct

SEQ ID NO: 1191757 - DNA, 25 bp, Homo sapien
ttcagagagcttccgattgctggac

SEQ ID NO: 1191758 - DNA, 25 bp, Homo sapien
taaatgtaagtagagtgtttctccg

SEQ ID NO: 1191759 - DNA, 25 bp, Homo sapien
agaggtacagctttcagtgtccggg

SEQ ID NO: 1191760 - DNA, 25 bp, Homo sapien
cagaggtacagctttcagtgtccgg

SEQ ID NO: 1191761 - DNA, 25 bp, Homo sapien
ccagaggtacagctttcagtgtccg

SEQ ID NO: 1191762 - DNA, 25 bp, Homo sapien
caggctccttctcccgatcgatccc

SEQ ID NO: 1191763 - DNA, 25 bp, Homo sapien
agtgtgcaagcctgatctccaagcc

SEQ ID NO: 1191764 - DNA, 25 bp, Homo sapien
gatcgatccccattccaggtactgg

SEQ ID NO: 1191765 - DNA, 25 bp, Homo sapien
tccaagccaatctgctcctcccctg

SEQ ID NO: 1191766 - DNA, 25 bp, Homo sapien
tcttgtgtaatggacagagatagcc

SEQ ID NO: 1191767 - DNA, 25 bp, Homo sapien
gggactggcctcaaatcaatctagg

SEQ ID NO: 1191768 - DNA, 25 bp, Homo sapien
tctggataggctggcttcagagcat

SEQ ID NO: 1191769 - DNA, 25 bp, Homo sapien
cattctccagatttagccaggccaa

SEQ ID NO: 1191770 - DNA, 25 bp, Homo sapien
tttcatcaggagtgttgtggctgca

SEQ ID NO: 1191771 - DNA, 25 bp, Homo sapien
tgcgtttgcgcagcatttcatcagg

SEQ ID NO: 1191772 - DNA, 25 bp, Homo sapien
gggccgtcaaagacccactgtgatg

SEQ ID NO: 1191773 - DNA, 25 bp, Homo sapien
tatcaaatttaggtctggagctttc

SEQ ID NO: 1191774 - DNA, 25 bp, Homo sapien
agaagtaggacaagaatgaactgag

SEQ ID NO: 1191775 - DNA, 25 bp, Homo sapien
agaatgaactgagaacatgtggtcc

SEQ ID NO: 1191776 - DNA, 25 bp, Homo sapien
ctgtaagaagtaggacaagaatgaa

SEQ ID NO: 1191777 - DNA, 25 bp, Homo sapien
aacatgtggtccctggtggaaacat

SEQ ID NO: 1191778 - DNA, 25 bp, Homo sapien
atcggcaatgcctcggcagcacagg

SEQ ID NO: 1191779 - DNA, 25 bp, Homo sapien
cttgtcatcggcaatgcctcggcag

SEQ ID NO: 1191780 - DNA, 25 bp, Homo sapien
gtcatcggcaatgcctcggcagcac

SEQ ID NO: 1191781 - DNA, 25 bp, Homo sapien
tgtcatcggcaatgcctcggcagca

SEQ ID NO: 1191782 - DNA, 25 bp, Homo sapien
gatgggaacaaagtacatctgatgt

SEQ ID NO: 1191783 - DNA, 25 bp, Homo sapien
acaacgtggtaaggcagatgggaac

SEQ ID NO: 1191784 - DNA, 25 bp, Homo sapien
cctattggattctgagtccacggag

SEQ ID NO: 1191785 - DNA, 25 bp, Homo sapien
tctgagtccacggagaaataagaca

SEQ ID NO: 1191786 - DNA, 25 bp, Homo sapien
gaggcccatctgcaatcctgctgtt

SEQ ID NO: 1191787 - DNA, 25 bp, Homo sapien
ttggagagacaaatttctgcactgc

SEQ ID NO: 1191788 - DNA, 25 bp, Homo sapien
gcttgcaaacaagagttctaacttt

SEQ ID NO: 1191789 - DNA, 25 bp, Homo sapien
cttgttgcttgcaaacaagagttct

SEQ ID NO: 1191790 - DNA, 25 bp, Homo sapien
ccattgacagatgaaggcccacaga

SEQ ID NO: 1191791 - DNA, 25 bp, Homo sapien
attgacagatgaaggcccacagatg

SEQ ID NO: 1191792 - DNA, 25 bp, Homo sapien
agccagtcctgcagcaggattctca

SEQ ID NO: 1191793 - DNA, 25 bp, Homo sapien
cacagatgatgcatggcagccagtc

SEQ ID NO: 1191794 - DNA, 25 bp, Homo sapien
tgcttgcagaggtcctggatgggat

SEQ ID NO: 1191795 - DNA, 25 bp, Homo sapien
cattcaaaggagccagaaaccttcc

SEQ ID NO: 1191796 - DNA, 25 bp, Homo sapien
caccaatagtaaaactgctgcagac

SEQ ID NO: 1191797 - DNA, 25 bp, Homo sapien
gcagtttgtgagcttggaggatcca

SEQ ID NO: 1191798 - DNA, 25 bp, Homo sapien
aacaaagtttatgcacagcgatgcg

SEQ ID NO: 1191799 - DNA, 25 bp, Homo sapien
ttatgcacagcgatgcgttgcgttg

SEQ ID NO: 1191800 - DNA, 25 bp, Homo sapien
acagcgatgcgttgcgttgccaggc

SEQ ID NO: 1191801 - DNA, 25 bp, Homo sapien
gcgttgcgttgccaggcagctctcc

SEQ ID NO: 1191802 - DNA, 25 bp, Homo sapien
atttaccgagctcccagatgcaagc

SEQ ID NO: 1191803 - DNA, 25 bp, Homo sapien
ccagaagccaagagatttaccgagc

SEQ ID NO: 1191804 - DNA, 25 bp, Homo sapien
ccttgtacgcacaccagaagccaag

SEQ ID NO: 1191805 - DNA, 25 bp, Homo sapien
ttaaatccgattttcttgccatctg

SEQ ID NO: 1191806 - DNA, 25 bp, Homo sapien
tctacagacaagcaggattaacagc

SEQ ID NO: 1191807 - DNA, 25 bp, Homo sapien
ttagggaacatacaaatccctggga

SEQ ID NO: 1191808 - DNA, 25 bp, Homo sapien
tcaacagcaaactgggacgcgactg

SEQ ID NO: 1191809 - DNA, 25 bp, Homo sapien
tgtattaaccatcctcagagacaga

SEQ ID NO: 1191810 - DNA, 25 bp, Homo sapien
tgaaggggattgcactgaccattgg

SEQ ID NO: 1191811 - DNA, 25 bp, Homo sapien
gaccattggccattggggctgcctg

SEQ ID NO: 1191812 - DNA, 25 bp, Homo sapien
gtgaaggggattgcactgaccattg

SEQ ID NO: 1191813 - DNA, 25 bp, Homo sapien
ttctggaggttggtgaaggggattg

SEQ ID NO: 1191814 - DNA, 25 bp, Homo sapien
ttagggtatacgaggagcatttgtg

SEQ ID NO: 1191815 - DNA, 25 bp, Homo sapien
cacagcagtgggttgaaggtagagg

SEQ ID NO: 1191816 - DNA, 25 bp, Homo sapien
tagaggatccgaggtggtggccaac

SEQ ID NO: 1191817 - DNA, 25 bp, Homo sapien
aattgccatagtggattcttccggg

SEQ ID NO: 1191818 - DNA, 25 bp, Homo sapien
tataggtgataattaaagctccagg

SEQ ID NO: 1191819 - DNA, 25 bp, Homo sapien
tttaaacctagcattcaagagagag

SEQ ID NO: 1191820 - DNA, 25 bp, Homo sapien
tattaagggagatttatctgctggc

SEQ ID NO: 1191821 - DNA, 25 bp, Homo sapien
tactacctacgtagacctcaaagag

SEQ ID NO: 1191822 - DNA, 25 bp, Homo sapien
ctttaccatcctgatttgagaagca

SEQ ID NO: 1191823 - DNA, 25 bp, Homo sapien
gacaatatgtactcgcagttatcaa

SEQ ID NO: 1191824 - DNA, 25 bp, Homo sapien
gttatcaaatactgcctttacagag

SEQ ID NO: 1191825 - DNA, 25 bp, Homo sapien
gattctcaagttggaatctttacca

SEQ ID NO: 1191826 - DNA, 25 bp, Homo sapien
actggttggctagatgtgctttgtc

SEQ ID NO: 1191827 - DNA, 25 bp, Homo sapien
ctgcttgtaggaaacatccaggaat

SEQ ID NO: 1191828 - DNA, 25 bp, Homo sapien
gagactaagagaacattgccatctg

SEQ ID NO: 1191829 - DNA, 25 bp, Homo sapien
tgtctggttccgatgagactaagag

SEQ ID NO: 1191830 - DNA, 25 bp, Homo sapien
ggtacacagcgtgacaacctttgca

SEQ ID NO: 1191831 - DNA, 25 bp, Homo sapien
cttcagcttgctcatagcttctatt

SEQ ID NO: 1191832 - DNA, 25 bp, Homo sapien
agggctgcagccatgtaacataagt

SEQ ID NO: 1191833 - DNA, 25 bp, Homo sapien
taacataagtgtcttgcttggccag

SEQ ID NO: 1191834 - DNA, 25 bp, Homo sapien
tgatgacttgatcaccctgctgagg

SEQ ID NO: 1191835 - DNA, 25 bp, Homo sapien
tcacctaggactgagtagtttccca

SEQ ID NO: 1191836 - DNA, 25 bp, Homo sapien
gtgcctccagctgtgatacttcaaa

SEQ ID NO: 1191837 - DNA, 25 bp, Homo sapien
taacgttaccaatgcaggacagatg

SEQ ID NO: 1191838 - DNA, 25 bp, Homo sapien
caagggtgtgctgccttaggcctga

SEQ ID NO: 1191839 - DNA, 25 bp, Homo sapien
tgctgtaatacctctctgaaactaa

SEQ ID NO: 1191840 - DNA, 25 bp, Homo sapien
gcaggaacagctggcttcgactgga

SEQ ID NO: 1191841 - DNA, 25 bp, Homo sapien
cattctgattgaaggccaatgcacg

SEQ ID NO: 1191842 - DNA, 25 bp, Homo sapien
caaaatttaccagcaatagagtcaa

SEQ ID NO: 1191843 - DNA, 25 bp, Homo sapien
aagagaagagggcaaatacttttct

SEQ ID NO: 1191844 - DNA, 25 bp, Homo sapien
cctctacctcattccattcatatta

SEQ ID NO: 1191845 - DNA, 25 bp, Homo sapien
gtttctctcaatgggagaaagtaca

SEQ ID NO: 1191846 - DNA, 25 bp, Homo sapien
taatcttgcatttggaggagtcttg

SEQ ID NO: 1191847 - DNA, 25 bp, Homo sapien
gcagtgtcgaacaaaataatcttgc

SEQ ID NO: 1191848 - DNA, 25 bp, Homo sapien
tggccaggtccttaatactctgaac

SEQ ID NO: 1191849 - DNA, 25 bp, Homo sapien
caattcagggcagattgtacaaatc

SEQ ID NO: 1191850 - DNA, 25 bp, Homo sapien
gtagcacttaatcaacacaccccat

SEQ ID NO: 1191851 - DNA, 25 bp, Homo sapien
cacgtcaggctccaaactcgcattg

SEQ ID NO: 1191852 - DNA, 25 bp, Homo sapien
cattctctcctgagttgttcaaatg

SEQ ID NO: 1191853 - DNA, 25 bp, Homo sapien
tgttcaaatgataaacccacgtcag

SEQ ID NO: 1191854 - DNA, 25 bp, Homo sapien
cagtcagttagccttggaagccaaa

SEQ ID NO: 1191855 - DNA, 25 bp, Homo sapien
aaaggaagccagtctccaacgagag

SEQ ID NO: 1191856 - DNA, 25 bp, Homo sapien
gaggacctaggccaagctcaatctt

SEQ ID NO: 1191857 - DNA, 25 bp, Homo sapien
ggtcactgagaaacagtcagttagc

SEQ ID NO: 1191858 - DNA, 25 bp, Homo sapien
ctagagtagcactcgtcgacccgaa

SEQ ID NO: 1191859 - DNA, 25 bp, Homo sapien
tagcactcgtcgacccgaacagtca

SEQ ID NO: 1191860 - DNA, 25 bp, Homo sapien
aacagtcaccgtctctcattcagcg

SEQ ID NO: 1191861 - DNA, 25 bp, Homo sapien
cgaacagtcaccgtctctcattcag

SEQ ID NO: 1191862 - DNA, 25 bp, Homo sapien
cggccgtcgcctcagaggacggaaa

SEQ ID NO: 1191863 - DNA, 25 bp, Homo sapien
cagccgcggccgtcgcctcagagga

SEQ ID NO: 1191864 - DNA, 25 bp, Homo sapien
ggcctcacgcttcaccgccacggcc

SEQ ID NO: 1191865 - DNA, 25 bp, Homo sapien
aggacggaaagacgatgccggcctc

SEQ ID NO: 1191866 - DNA, 25 bp, Homo sapien
ctggtcctggctccgaggtccggga

SEQ ID NO: 1191867 - DNA, 25 bp, Homo sapien
ctgaccgcgactccgcgggttcgcg

SEQ ID NO: 1191868 - DNA, 25 bp, Homo sapien
gtgtggcccggcttctgctggtcct

SEQ ID NO: 1191869 - DNA, 25 bp, Homo sapien
aactctgcggccaggcttctgggcg

SEQ ID NO: 1191870 - DNA, 25 bp, Homo sapien
caggccgtagagcaagccgacctgg

SEQ ID NO: 1191871 - DNA, 25 bp, Homo sapien
tttgcagacagatctcccggctttg

SEQ ID NO: 1191872 - DNA, 25 bp, Homo sapien
gatgagatacgttcggaatctcctt

SEQ ID NO: 1191873 - DNA, 25 bp, Homo sapien
aatccgatactgcaatggaattccg

SEQ ID NO: 1191874 - DNA, 25 bp, Homo sapien
taattcgctccgcacaggtttacgg

SEQ ID NO: 1191875 - DNA, 25 bp, Homo sapien
tcgtggctcgcgtttcttccaaatc

SEQ ID NO: 1191876 - DNA, 25 bp, Homo sapien
aaaagcacggtgtttatgagcctac

SEQ ID NO: 1191877 - DNA, 25 bp, Homo sapien
gaaactagttcctcgctcgtggctc

SEQ ID NO: 1191878 - DNA, 25 bp, Homo sapien
tggcttgcgtctacacaacacacag

SEQ ID NO: 1191879 - DNA, 25 bp, Homo sapien
cgtacactgaaactggcttgcgtct

SEQ ID NO: 1191880 - DNA, 25 bp, Homo sapien
agctcgcagcttcttcccaaacacg

SEQ ID NO: 1191881 - DNA, 25 bp, Homo sapien
aaacacgcccacgtacactgaaact

SEQ ID NO: 1191882 - DNA, 25 bp, Homo sapien
tccacagctaacatcagtgcccttt

SEQ ID NO: 1191883 - DNA, 25 bp, Homo sapien
taaatgccgagagaatattttcagc

SEQ ID NO: 1191884 - DNA, 25 bp, Homo sapien
gaataaggctgtctaaccacatgta

SEQ ID NO: 1191885 - DNA, 25 bp, Homo sapien
acatgtaaactacgcatcatctgac

SEQ ID NO: 1191886 - DNA, 25 bp, Homo sapien
aaagcatactttcggagaaaatggg

SEQ ID NO: 1191887 - DNA, 25 bp, Homo sapien
tgcattgccagttgggcatcccaaa

SEQ ID NO: 1191888 - DNA, 25 bp, Homo sapien
tggcttggggccagaaaaattcaga

SEQ ID NO: 1191889 - DNA, 25 bp, Homo sapien
acatgaggcagaggaccggagtttt

SEQ ID NO: 1191890 - DNA, 25 bp, Homo sapien
cagaggaccggagttttaattacag

SEQ ID NO: 1191891 - DNA, 25 bp, Homo sapien
tataccacttcatgtacagtacagg

SEQ ID NO: 1191892 - DNA, 25 bp, Homo sapien
gaatcacatcttgtttctagacctg

SEQ ID NO: 1191893 - DNA, 25 bp, Homo sapien
ggttactctgctccaagtgaatcag

SEQ ID NO: 1191894 - DNA, 25 bp, Homo sapien
gtttacacagctcccacacaaggtt

SEQ ID NO: 1191895 - DNA, 25 bp, Homo sapien
agttctacttcaatagtatcccaca

SEQ ID NO: 1191896 - DNA, 25 bp, Homo sapien
taaatgtgcacagtactggccaaca

SEQ ID NO: 1191897 - DNA, 25 bp, Homo sapien
tgtcatgctgaaccgcattatggag

SEQ ID NO: 1191898 - DNA, 25 bp, Homo sapien
cagaagatgtgaagtcgtattatac

SEQ ID NO: 1191899 - DNA, 25 bp, Homo sapien
agtgtgaagctcttgtcagaagatg

SEQ ID NO: 1191900 - DNA, 25 bp, Homo sapien
tctcaagacatagagtggcacactg

SEQ ID NO: 1191901 - DNA, 25 bp, Homo sapien
ggcactcctgaaagagaccgagaag

SEQ ID NO: 1191902 - DNA, 25 bp, Homo sapien
tcaccagactgttgaaggtcaatgc

SEQ ID NO: 1191903 - DNA, 25 bp, Homo sapien
tcagatcatgtataaagggaaccac

SEQ ID NO: 1191904 - DNA, 25 bp, Homo sapien
tttttagcgatccaaatgacacctg

SEQ ID NO: 1191905 - DNA, 25 bp, Homo sapien
aaaatccaccgatgcttaaggccct

SEQ ID NO: 1191906 - DNA, 25 bp, Homo sapien
cacaggtggcaaagtaacacatacc

SEQ ID NO: 1191907 - DNA, 25 bp, Homo sapien
tacttaatacagtgccaatgctacg

SEQ ID NO: 1191908 - DNA, 25 bp, Homo sapien
cagaggactgactgcctcatgtcca

SEQ ID NO: 1191909 - DNA, 25 bp, Homo sapien
ggactgactgcctcatgtccaaggc

SEQ ID NO: 1191910 - DNA, 25 bp, Homo sapien
cttatgttaacagcaacagaggact

SEQ ID NO: 1191911 - DNA, 25 bp, Homo sapien
tgtccaaggccacaaatacattatt

SEQ ID NO: 1191912 - DNA, 25 bp, Homo sapien
cactgcttgcctgcccgttcattag

SEQ ID NO: 1191913 - DNA, 25 bp, Homo sapien
gtagctgcaatattgacactgcttg

SEQ ID NO: 1191914 - DNA, 25 bp, Homo sapien
tattgacactgcttgcctgcccgtt

SEQ ID NO: 1191915 - DNA, 25 bp, Homo sapien
ttgcctgcccgttcattaggtccat

SEQ ID NO: 1191916 - DNA, 25 bp, Homo sapien
aagaacatcgaataccacagcatca

SEQ ID NO: 1191917 - DNA, 25 bp, Homo sapien
caattcagagcctttgtcacttaag

SEQ ID NO: 1191918 - DNA, 25 bp, Homo sapien
tattcttctggtgtaaccttaagaa

SEQ ID NO: 1191919 - DNA, 25 bp, Homo sapien
ttgtcacttaaggattcagagctgc

SEQ ID NO: 1191920 - DNA, 25 bp, Homo sapien
ctttaaatactggaacatccattaa

SEQ ID NO: 1191921 - DNA, 25 bp, Homo sapien
taaatactggaacatccattaatgt

SEQ ID NO: 1191922 - DNA, 25 bp, Homo sapien
ttaaatactggaacatccattaatg

SEQ ID NO: 1191923 - DNA, 25 bp, Homo sapien
agctttaaatactggaacatccatt

SEQ ID NO: 1191924 - DNA, 25 bp, Homo sapien
gggaactgacgatcatttcggccca

SEQ ID NO: 1191925 - DNA, 25 bp, Homo sapien
cgaatttgagatactaagacaggaa

SEQ ID NO: 1191926 - DNA, 25 bp, Homo sapien
tggttctacttagagagccctctga

SEQ ID NO: 1191927 - DNA, 25 bp, Homo sapien
aattgtggaaatgatgggaactgac

SEQ ID NO: 1191928 - DNA, 25 bp, Homo sapien
catcttgtaggttccaatactctta

SEQ ID NO: 1191929 - DNA, 25 bp, Homo sapien
ggaatgttctaagggtgatgctgta

SEQ ID NO: 1191930 - DNA, 25 bp, Homo sapien
tcttgtaggttccaatactcttaaa

SEQ ID NO: 1191931 - DNA, 25 bp, Homo sapien
ttcatcttgtaggttccaatactct

SEQ ID NO: 1191932 - DNA, 25 bp, Homo sapien
attactgaattcacagaagtcagag

SEQ ID NO: 1191933 - DNA, 25 bp, Homo sapien
catttggtgcagaactatatttttc

SEQ ID NO: 1191934 - DNA, 25 bp, Homo sapien
aatcttcttgtgaaggcaactgcat

SEQ ID NO: 1191935 - DNA, 25 bp, Homo sapien
ttgtgaaggcaactgcatttggtgc

SEQ ID NO: 1191936 - DNA, 25 bp, Homo sapien
tttattccatccacaacttgaaagc

SEQ ID NO: 1191937 - DNA, 25 bp, Homo sapien
cttagcagttttaatatagtggctc

SEQ ID NO: 1191938 - DNA, 25 bp, Homo sapien
gaatctctctaacaacccaaaagct

SEQ ID NO: 1191939 - DNA, 25 bp, Homo sapien
gagcatgaagaatctctctaacaac

SEQ ID NO: 1191940 - DNA, 25 bp, Homo sapien
taatatagtggctcaaaacttctgc

SEQ ID NO: 1191941 - DNA, 25 bp, Homo sapien
tcaggtaacacgactgcatatgtag

SEQ ID NO: 1191942 - DNA, 25 bp, Homo sapien
tcacagaggattgggcttaaccacc

SEQ ID NO: 1191943 - DNA, 25 bp, Homo sapien
ggaagaagtcaaatctgcctttatt

SEQ ID NO: 1191944 - DNA, 25 bp, Homo sapien
cctgggagaagagagtatttactcc

SEQ ID NO: 1191945 - DNA, 25 bp, Homo sapien
cataagtgcatgaaggttattcagc

SEQ ID NO: 1191946 - DNA, 25 bp, Homo sapien
ttggggcactctgtaggccagaaac

SEQ ID NO: 1191947 - DNA, 25 bp, Homo sapien
ctgccataagtgcatgaaggttatt

SEQ ID NO: 1191948 - DNA, 25 bp, Homo sapien
tgaaaattggggcactctgtaggcc

SEQ ID NO: 1191949 - DNA, 25 bp, Homo sapien
aactggtgaccaattttgcagctcc

SEQ ID NO: 1191950 - DNA, 25 bp, Homo sapien
tgttgcacatatcttccgcccactg

SEQ ID NO: 1191951 - DNA, 25 bp, Homo sapien
tgttggacacattctagttggacaa

SEQ ID NO: 1191952 - DNA, 25 bp, Homo sapien
tctattcatgccaaaccagagagat

SEQ ID NO: 1191953 - DNA, 25 bp, Homo sapien
agggaatgcaaggtgtcatctttaa

SEQ ID NO: 1191954 - DNA, 25 bp, Homo sapien
cttttgtagttatcttctttactca

SEQ ID NO: 1191955 - DNA, 25 bp, Homo sapien
gctacttatatagtctctgagtctt

SEQ ID NO: 1191956 - DNA, 25 bp, Homo sapien
tgcaaggtgtcatctttaagctact

SEQ ID NO: 1191957 - DNA, 25 bp, Homo sapien
ctatcttgaaatttagtgtgagtaa

SEQ ID NO: 1191958 - DNA, 25 bp, Homo sapien
tagctatcttgaaatttagtgtgag

SEQ ID NO: 1191959 - DNA, 25 bp, Homo sapien
gaaatagctatcttgaaatttagtg

SEQ ID NO: 1191960 - DNA, 25 bp, Homo sapien
cagaaatagctatcttgaaatttag

SEQ ID NO: 1191961 - DNA, 25 bp, Homo sapien
taatatccagcttagagcctctctg

SEQ ID NO: 1191962 - DNA, 25 bp, Homo sapien
gatgcagtggccactaactctactg

SEQ ID NO: 1191963 - DNA, 25 bp, Homo sapien
cacaaggtacacaataggtccccat

SEQ ID NO: 1191964 - DNA, 25 bp, Homo sapien
ttctctgcaatcctagggtgtccca

SEQ ID NO: 1191965 - DNA, 25 bp, Homo sapien
tgaagcagaactacacggtgagagt

SEQ ID NO: 1191966 - DNA, 25 bp, Homo sapien
taaaatgtttcaaccaggaagtcac

SEQ ID NO: 1191967 - DNA, 25 bp, Homo sapien
gaaagactggtgctacttgtggaga

SEQ ID NO: 1191968 - DNA, 25 bp, Homo sapien
cggtgagagtgaaacgtaagatcct

SEQ ID NO: 1191969 - DNA, 25 bp, Homo sapien
tccctgcacatgagatgggtctcct

SEQ ID NO: 1191970 - DNA, 25 bp, Homo sapien
tgtccctgcacatgagatgggtctc

SEQ ID NO: 1191971 - DNA, 25 bp, Homo sapien
gtgtccctgcacatgagatgggtct

SEQ ID NO: 1191972 - DNA, 25 bp, Homo sapien
tgtgtccctgcacatgagatgggtc

SEQ ID NO: 1191973 - DNA, 25 bp, Homo sapien
gagttgagagccgagaaaacatttc

SEQ ID NO: 1191974 - DNA, 25 bp, Homo sapien
catactggaaacgaactaaactgag

SEQ ID NO: 1191975 - DNA, 25 bp, Homo sapien
taagagttttaccagcatataggac

SEQ ID NO: 1191976 - DNA, 25 bp, Homo sapien
tttttgtcaactgtactaagcctcc

SEQ ID NO: 1191977 - DNA, 25 bp, Homo sapien
tctagatgctgtaaggataaaccct

SEQ ID NO: 1191978 - DNA, 25 bp, Homo sapien
taaacagggtgcttttcagagagca

SEQ ID NO: 1191979 - DNA, 25 bp, Homo sapien
tcagagagcagtaggcaaggaacac

SEQ ID NO: 1191980 - DNA, 25 bp, Homo sapien
caaggaacactatattacagagggt

SEQ ID NO: 1191981 - DNA, 25 bp, Homo sapien
ctcatttgtgtggtaggtaaggtcc

SEQ ID NO: 1191982 - DNA, 25 bp, Homo sapien
gaactacaaccttctcttagagctg

SEQ ID NO: 1191983 - DNA, 25 bp, Homo sapien
tcttgtgaaagaccaggttagctca

SEQ ID NO: 1191984 - DNA, 25 bp, Homo sapien
ccatgacagctgttatagtaggcag

SEQ ID NO: 1191985 - DNA, 25 bp, Homo sapien
tttataacgaatgcaaagatagggc

SEQ ID NO: 1191986 - DNA, 25 bp, Homo sapien
aactattatccttatcgtacagaac

SEQ ID NO: 1191987 - DNA, 25 bp, Homo sapien
taaatataacgcaggaaagacacca

SEQ ID NO: 1191988 - DNA, 25 bp, Homo sapien
ctagagaaactgatgtcctcttgat

SEQ ID NO: 1191989 - DNA, 25 bp, Homo sapien
gaggaaatcctaaggagattcccgc

SEQ ID NO: 1191990 - DNA, 25 bp, Homo sapien
tatgatagtttgtttccagatggtg

SEQ ID NO: 1191991 - DNA, 25 bp, Homo sapien
taattgcccgctgaactatgatagt

SEQ ID NO: 1191992 - DNA, 25 bp, Homo sapien
caaaactattcaacctcctgctgat

SEQ ID NO: 1191993 - DNA, 25 bp, Homo sapien
ccccaccattcttctttttcctcat

SEQ ID NO: 1191994 - DNA, 25 bp, Homo sapien
gaaattattcgaaggatattattca

SEQ ID NO: 1191995 - DNA, 25 bp, Homo sapien
gctgccagttgatgggtatgctgaa

SEQ ID NO: 1191996 - DNA, 25 bp, Homo sapien
tattcacaagactgctgtaaatcag

SEQ ID NO: 1191997 - DNA, 25 bp, Homo sapien
gaatcgatgtatgttaaatctgaca

SEQ ID NO: 1191998 - DNA, 25 bp, Homo sapien
gaacagagttgagatatttttggac

SEQ ID NO: 1191999 - DNA, 25 bp, Homo sapien
gtagttcttctatatactgaacaga

SEQ ID NO: 1192000 - DNA, 25 bp, Homo sapien
tgtaattatcgtcttccacaaattt

SEQ ID NO: 1192001 - DNA, 25 bp, Homo sapien
tggacatgaggcaacatgggaatat

SEQ ID NO: 1192002 - DNA, 25 bp, Homo sapien
tcttctcctgagacaagatggacca

SEQ ID NO: 1192003 - DNA, 25 bp, Homo sapien
gatggaccaagtctctcaatccgca

SEQ ID NO: 1192004 - DNA, 25 bp, Homo sapien
ttactgctgtaaaccactggattag

SEQ ID NO: 1192005 - DNA, 25 bp, Homo sapien
gaggataattctgctacattggaga

SEQ ID NO: 1192006 - DNA, 25 bp, Homo sapien
tcacctgttaagattcagcctcaga

SEQ ID NO: 1192007 - DNA, 25 bp, Homo sapien
ttcacgtgagactaactcccactca

SEQ ID NO: 1192008 - DNA, 25 bp, Homo sapien
tctgacattagactgagcttcttga

SEQ ID NO: 1192009 - DNA, 25 bp, Homo sapien
gatgacgctgtctcctgaagctgtt

SEQ ID NO: 1192010 - DNA, 25 bp, Homo sapien
gcttgtccctggttctatctttaat

SEQ ID NO: 1192011 - DNA, 25 bp, Homo sapien
tactaaatcttctctggaagcagca

SEQ ID NO: 1192012 - DNA, 25 bp, Homo sapien
cagcagaacgtggggtgcttgtccc

SEQ ID NO: 1192013 - DNA, 25 bp, Homo sapien
tcttctctggaagcagcagaacgtg

SEQ ID NO: 1192014 - DNA, 25 bp, Homo sapien
gaatcagattccgaggggatggcgg

SEQ ID NO: 1192015 - DNA, 25 bp, Homo sapien
cactttttcgtccactctgtggaga

SEQ ID NO: 1192016 - DNA, 25 bp, Homo sapien
tgccacactttttcgtccactctgt

SEQ ID NO: 1192017 - DNA, 25 bp, Homo sapien
ttttcgtccactctgtggagacgct

SEQ ID NO: 1192018 - DNA, 25 bp, Homo sapien
gcttttaggcaaacaaggcatttta

SEQ ID NO: 1192019 - DNA, 25 bp, Homo sapien
tctactgaactaataaatcgacaat

SEQ ID NO: 1192020 - DNA, 25 bp, Homo sapien
taaatgcattgttgacaaaatccca

SEQ ID NO: 1192021 - DNA, 25 bp, Homo sapien
taatgttcatttatcgtccccaaat

SEQ ID NO: 1192022 - DNA, 25 bp, Homo sapien
gaactttcagcttggcctcgagatg

SEQ ID NO: 1192023 - DNA, 25 bp, Homo sapien
ctattgatattccactagaaagagt

SEQ ID NO: 1192024 - DNA, 25 bp, Homo sapien
ggctccatgacgctatcatctaaca

SEQ ID NO: 1192025 - DNA, 25 bp, Homo sapien
ttggtcctgcatttggaaacgttgc

SEQ ID NO: 1192026 - DNA, 25 bp, Homo sapien
acttagttcagaaccatcgctgcta

SEQ ID NO: 1192027 - DNA, 25 bp, Homo sapien
cttagttcagaaccatcgctgctac

SEQ ID NO: 1192028 - DNA, 25 bp, Homo sapien
tcgatagccatttcgtgccactctt

SEQ ID NO: 1192029 - DNA, 25 bp, Homo sapien
tgtcaccgggccgagagaatggtat

SEQ ID NO: 1192030 - DNA, 25 bp, Homo sapien
tgtgacttcgatagccatttcgtgc

SEQ ID NO: 1192031 - DNA, 25 bp, Homo sapien
ccgggccgagagaatggtataatct

SEQ ID NO: 1192032 - DNA, 25 bp, Homo sapien
cacggagattagacaccatcaaact

SEQ ID NO: 1192033 - DNA, 25 bp, Homo sapien
cactggtgacttgacatgagctgca

SEQ ID NO: 1192034 - DNA, 25 bp, Homo sapien
tggcctaatagctctccacgaaagg

SEQ ID NO: 1192035 - DNA, 25 bp, Homo sapien
tatattcagggaggtacatgcacgg

SEQ ID NO: 1192036 - DNA, 25 bp, Homo sapien
tgtctacaatagtcatcaagtaggt

SEQ ID NO: 1192037 - DNA, 25 bp, Homo sapien
cacataagagcttttgtctacaata

SEQ ID NO: 1192038 - DNA, 25 bp, Homo sapien
taagagcttttgtctacaatagtca

SEQ ID NO: 1192039 - DNA, 25 bp, Homo sapien
gcttttgtctacaatagtcatcaag

SEQ ID NO: 1192040 - DNA, 25 bp, Homo sapien
tagtaacagctcctggatataaatg

SEQ ID NO: 1192041 - DNA, 25 bp, Homo sapien
gagaacaccttgaatagtaacagct

SEQ ID NO: 1192042 - DNA, 25 bp, Homo sapien
cctggatataaatgtactgccaaat

SEQ ID NO: 1192043 - DNA, 25 bp, Homo sapien
tgagaacaccttgaatagtaacagc

SEQ ID NO: 1192044 - DNA, 25 bp, Homo sapien
tatctgaggtttcagtcatccccgg

SEQ ID NO: 1192045 - DNA, 25 bp, Homo sapien
tatttcaagtctactataatcaggt

SEQ ID NO: 1192046 - DNA, 25 bp, Homo sapien
tagtacttttacagagtcttataaa

SEQ ID NO: 1192047 - DNA, 25 bp, Homo sapien
catgttccaaatgatggtaatttgg

SEQ ID NO: 1192048 - DNA, 25 bp, Homo sapien
aaagctgtgtcccacacaaagctgc

SEQ ID NO: 1192049 - DNA, 25 bp, Homo sapien
gctgcccaatattttgtccaagatg

SEQ ID NO: 1192050 - DNA, 25 bp, Homo sapien
ttggcagcatagtaaaaaagctgtg

SEQ ID NO: 1192051 - DNA, 25 bp, Homo sapien
tttcggtagcctttagagatttggc

SEQ ID NO: 1192052 - DNA, 25 bp, Homo sapien
caagaagctgtggatatggttgaca

SEQ ID NO: 1192053 - DNA, 25 bp, Homo sapien
aattggccctaccacaggactgctg

SEQ ID NO: 1192054 - DNA, 25 bp, Homo sapien
aatcagcagtgctatcagagagttc

SEQ ID NO: 1192055 - DNA, 25 bp, Homo sapien
cctcacactgggtggagagtataca

SEQ ID NO: 1192056 - DNA, 25 bp, Homo sapien
tcacagatacgttcttattggatgt

SEQ ID NO: 1192057 - DNA, 25 bp, Homo sapien
gatacgttcttattggatgttgatt

SEQ ID NO: 1192058 - DNA, 25 bp, Homo sapien
cctatcacagatacgttcttattgg

SEQ ID NO: 1192059 - DNA, 25 bp, Homo sapien
ccatcctatcacagatacgttctta

SEQ ID NO: 1192060 - DNA, 25 bp, Homo sapien
actaggttttggctcatcaagttct

SEQ ID NO: 1192061 - DNA, 25 bp, Homo sapien
tcccaatagataaaactacacaaat

SEQ ID NO: 1192062 - DNA, 25 bp, Homo sapien
gggacagaagtatttcccaatagat

SEQ ID NO: 1192063 - DNA, 25 bp, Homo sapien
gaaactaggttttggctcatcaagt

SEQ ID NO: 1192064 - DNA, 25 bp, Homo sapien
tatggcctatatggcaagtctctaa

SEQ ID NO: 1192065 - DNA, 25 bp, Homo sapien
catttcaaggtattgatgaaggaag

SEQ ID NO: 1192066 - DNA, 25 bp, Homo sapien
tcagaacttaagaataacaatccat

SEQ ID NO: 1192067 - DNA, 25 bp, Homo sapien
taggtctctagggattagctgggct

SEQ ID NO: 1192068 - DNA, 25 bp, Homo sapien
gatctgagccaaatatattcagaaa

SEQ ID NO: 1192069 - DNA, 25 bp, Homo sapien
aaagtgatctgagccaaatatattc

SEQ ID NO: 1192070 - DNA, 25 bp, Homo sapien
tggaaagtgatctgagccaaatata

SEQ ID NO: 1192071 - DNA, 25 bp, Homo sapien
agtgatctgagccaaatatattcag

SEQ ID NO: 1192072 - DNA, 25 bp, Homo sapien
ttgccagcttgaaacttgtacgaat

SEQ ID NO: 1192073 - DNA, 25 bp, Homo sapien
ctgttgtttgttactttggcaggct

SEQ ID NO: 1192074 - DNA, 25 bp, Homo sapien
gcttaaaccataacattgcattcat

SEQ ID NO: 1192075 - DNA, 25 bp, Homo sapien
tgtttgttactttggcaggctgcac

SEQ ID NO: 1192076 - DNA, 25 bp, Homo sapien
caaaagtcatcaagtttgtaggaac

SEQ ID NO: 1192077 - DNA, 25 bp, Homo sapien
ctcaaaagtcatcaagtttgtagga

SEQ ID NO: 1192078 - DNA, 25 bp, Homo sapien
ctactcaaaagtcatcaagtttgta

SEQ ID NO: 1192079 - DNA, 25 bp, Homo sapien
tactcaaaagtcatcaagtttgtag

SEQ ID NO: 1192080 - DNA, 25 bp, Homo sapien
gagaactccaacgactgagacagag

SEQ ID NO: 1192081 - DNA, 25 bp, Homo sapien
gaacaaaccttgcaggtgggctgct

SEQ ID NO: 1192082 - DNA, 25 bp, Homo sapien
caaaatacggtttcatgtcagagac

SEQ ID NO: 1192083 - DNA, 25 bp, Homo sapien
ggctgctggtacaatccctgctaag

SEQ ID NO: 1192084 - DNA, 25 bp, Homo sapien
caaggaggtcatagtgcaatcgagt

SEQ ID NO: 1192085 - DNA, 25 bp, Homo sapien
gaaatttagtcagtcagaggccaca

SEQ ID NO: 1192086 - DNA, 25 bp, Homo sapien
gaatgactacttgcctactctggaa

SEQ ID NO: 1192087 - DNA, 25 bp, Homo sapien
tgtgaggcccaaagtaacagaagtc

SEQ ID NO: 1192088 - DNA, 25 bp, Homo sapien
cattataactaggtaagggagttca

SEQ ID NO: 1192089 - DNA, 25 bp, Homo sapien
tcaacaaggttgctagatataagaa

SEQ ID NO: 1192090 - DNA, 25 bp, Homo sapien
cctaaatgaacagagagacatgtgt

SEQ ID NO: 1192091 - DNA, 25 bp, Homo sapien
gaccaatggcattcctacacacaat

SEQ ID NO: 1192092 - DNA, 25 bp, Homo sapien
gaagaaccctctcccagttgtgaca

SEQ ID NO: 1192093 - DNA, 25 bp, Homo sapien
tacttgggctacactataacatgct

SEQ ID NO: 1192094 - DNA, 25 bp, Homo sapien
gaataacacattatggtccaggcca

SEQ ID NO: 1192095 - DNA, 25 bp, Homo sapien
aaacatttctgtaggtctgcactca

SEQ ID NO: 1192096 - DNA, 25 bp, Homo sapien
ggataattaagatgttgcaagaaag

SEQ ID NO: 1192097 - DNA, 25 bp, Homo sapien
gatgttgcaagaaagtcgctggcaa

SEQ ID NO: 1192098 - DNA, 25 bp, Homo sapien
aaatggataattaagatgttgcaag

SEQ ID NO: 1192099 - DNA, 25 bp, Homo sapien
aattaagatgttgcaagaaagtcgc

SEQ ID NO: 1192100 - DNA, 25 bp, Homo sapien
tcacaaaatgcgttgggaacttaga

SEQ ID NO: 1192101 - DNA, 25 bp, Homo sapien
ttcacaaaatgcgttgggaacttag

SEQ ID NO: 1192102 - DNA, 25 bp, Homo sapien
ggaacttagaatggtatcggtagga

SEQ ID NO: 1192103 - DNA, 25 bp, Homo sapien
cttagaatggtatcggtaggaaagt

SEQ ID NO: 1192104 - DNA, 25 bp, Homo sapien
agagagaccacagttcaaacttgct

SEQ ID NO: 1192105 - DNA, 25 bp, Homo sapien
cttcagctgtctgctagtgtctaac

SEQ ID NO: 1192106 - DNA, 25 bp, Homo sapien
tcagctgtctgctagtgtctaacat

SEQ ID NO: 1192107 - DNA, 25 bp, Homo sapien
gttcaaacttgcttgatttcacctt

SEQ ID NO: 1192108 - DNA, 25 bp, Homo sapien
tgaattactatcaaaccacttgaga

SEQ ID NO: 1192109 - DNA, 25 bp, Homo sapien
ggctgaattactatcaaaccacttg

SEQ ID NO: 1192110 - DNA, 25 bp, Homo sapien
ttgctgggctgaattactatcaaac

SEQ ID NO: 1192111 - DNA, 25 bp, Homo sapien
gctgggctgaattactatcaaacca

SEQ ID NO: 1192112 - DNA, 25 bp, Homo sapien
aaacatgacgaataccttggctggc

SEQ ID NO: 1192113 - DNA, 25 bp, Homo sapien
cagccctgcgtgcacataaatcaag

SEQ ID NO: 1192114 - DNA, 25 bp, Homo sapien
taacccggccttgactggaaacgca

SEQ ID NO: 1192115 - DNA, 25 bp, Homo sapien
gcagcagggtagctcggaaacatga

SEQ ID NO: 1192116 - DNA, 25 bp, Homo sapien
ttggaataggacagaggactggcat

SEQ ID NO: 1192117 - DNA, 25 bp, Homo sapien
cagcagagaccttgctccactctgc

SEQ ID NO: 1192118 - DNA, 25 bp, Homo sapien
aggcagcagagaccttgctccactc

SEQ ID NO: 1192119 - DNA, 25 bp, Homo sapien
ggcagcagagaccttgctccactct

SEQ ID NO: 1192120 - DNA, 25 bp, Homo sapien
gcagagaccttgctccactctgccc

SEQ ID NO: 1192121 - DNA, 25 bp, Homo sapien
ctgtggtgccttctatggccacctg

SEQ ID NO: 1192122 - DNA, 25 bp, Homo sapien
actgtggtgccttctatggccacct

SEQ ID NO: 1192123 - DNA, 25 bp, Homo sapien
gaacagcatttctgtgctctcgccc

SEQ ID NO: 1192124 - DNA, 25 bp, Homo sapien
ccaggattcagaccaagatcaaaac

SEQ ID NO: 1192125 - DNA, 25 bp, Homo sapien
tttctgtgctctcgcccttctagct

SEQ ID NO: 1192126 - DNA, 25 bp, Homo sapien
gcatttctgtgctctcgcccttcta

SEQ ID NO: 1192127 - DNA, 25 bp, Homo sapien
gctgttgatcctgcgactgtgacct

SEQ ID NO: 1192128 - DNA, 25 bp, Homo sapien
cgtcccataacagcgggtggaggca

SEQ ID NO: 1192129 - DNA, 25 bp, Homo sapien
cccaagacagagctcgaaagcctta

SEQ ID NO: 1192130 - DNA, 25 bp, Homo sapien
gaaagccttagcatcacacatgagg

SEQ ID NO: 1192131 - DNA, 25 bp, Homo sapien
tgtgtgggtctccagattctggatg

SEQ ID NO: 1192132 - DNA, 25 bp, Homo sapien
gatgccggggccatttccaggaggg

SEQ ID NO: 1192133 - DNA, 25 bp, Homo sapien
ccagattctggatgccggggccatt

SEQ ID NO: 1192134 - DNA, 25 bp, Homo sapien
ccaggagggaccatggagcctcctt

SEQ ID NO: 1192135 - DNA, 25 bp, Homo sapien
tggccggtggaatacctgtggtcac

SEQ ID NO: 1192136 - DNA, 25 bp, Homo sapien
ggtggaatacctgtggtcaccattt

SEQ ID NO: 1192137 - DNA, 25 bp, Homo sapien
gccggtggaatacctgtggtcacca

SEQ ID NO: 1192138 - DNA, 25 bp, Homo sapien
ctggccggtggaatacctgtggtca

SEQ ID NO: 1192139 - DNA, 25 bp, Homo sapien
acttctaccttggaggagtcccacg

SEQ ID NO: 1192140 - DNA, 25 bp, Homo sapien
gccacttgtctatgtggatgagggt

SEQ ID NO: 1192141 - DNA, 25 bp, Homo sapien
gagtcccacgtatttcctatgtaaa

SEQ ID NO: 1192142 - DNA, 25 bp, Homo sapien
caggcgcaaccataaaaacttctac

SEQ ID NO: 1192143 - DNA, 25 bp, Homo sapien
tgaagaccgtgaaaagctacatctg

SEQ ID NO: 1192144 - DNA, 25 bp, Homo sapien
gaccttgtacttgagcgtgtgaatg

SEQ ID NO: 1192145 - DNA, 25 bp, Homo sapien
ccttgtaacttgcatcggcagggac

SEQ ID NO: 1192146 - DNA, 25 bp, Homo sapien
cctggccagctggaagggatgcact

SEQ ID NO: 1192147 - DNA, 25 bp, Homo sapien
atttctgcccagggtccaggccctt

SEQ ID NO: 1192148 - DNA, 25 bp, Homo sapien
ttctgcccagggtccaggcccttac

SEQ ID NO: 1192149 - DNA, 25 bp, Homo sapien
tttctgcccagggtccaggccctta

SEQ ID NO: 1192150 - DNA, 25 bp, Homo sapien
aatttctgcccagggtccaggccct

SEQ ID NO: 1192151 - DNA, 25 bp, Homo sapien
gagacagcagaatggatgggctgcc

SEQ ID NO: 1192152 - DNA, 25 bp, Homo sapien
agacagcagaatggatgggctgccc

SEQ ID NO: 1192153 - DNA, 25 bp, Homo sapien
aagcatcttcgattgcttttgtctc

SEQ ID NO: 1192154 - DNA, 25 bp, Homo sapien
accacaagcatcttcgattgctttt

SEQ ID NO: 1192155 - DNA, 25 bp, Homo sapien
gaagcccaccagagttcctgaagac

SEQ ID NO: 1192156 - DNA, 25 bp, Homo sapien
aagcccaccagagttcctgaagaca

SEQ ID NO: 1192157 - DNA, 25 bp, Homo sapien
tcatgaatctaaggaagtttcaagt

SEQ ID NO: 1192158 - DNA, 25 bp, Homo sapien
catgaatctaaggaagtttcaagtc

SEQ ID NO: 1192159 - DNA, 25 bp, Homo sapien
aaatggcctgtgaagtcatacccca

SEQ ID NO: 1192160 - DNA, 25 bp, Homo sapien
gcaggccctgatagggccaggtcct

SEQ ID NO: 1192161 - DNA, 25 bp, Homo sapien
cagggtcttgtgaagtgagcaggga

SEQ ID NO: 1192162 - DNA, 25 bp, Homo sapien
gagcaaggtcggtcagggagggcct

SEQ ID NO: 1192163 - DNA, 25 bp, Homo sapien
aatctccgcagaaaagcagctccac

SEQ ID NO: 1192164 - DNA, 25 bp, Homo sapien
gaaatctccgcagaaaagcagctcc

SEQ ID NO: 1192165 - DNA, 25 bp, Homo sapien
ctgaaatctccgcagaaaagcagct

SEQ ID NO: 1192166 - DNA, 25 bp, Homo sapien
tgcccctgcttaggctgtctcctgc

SEQ ID NO: 1192167 - DNA, 25 bp, Homo sapien
gaagagttgctcagttttgagcagt

SEQ ID NO: 1192168 - DNA, 25 bp, Homo sapien
caatttgccttgaggcgatggctct

SEQ ID NO: 1192169 - DNA, 25 bp, Homo sapien
gagcagtgggatgcaatttgccttg

SEQ ID NO: 1192170 - DNA, 25 bp, Homo sapien
agttgctcagttttgagcagtggga

SEQ ID NO: 1192171 - DNA, 25 bp, Homo sapien
ctagtcctcaaaggcctctgccatc

SEQ ID NO: 1192172 - DNA, 25 bp, Homo sapien
ttgagcttggaggaaggatggccag

SEQ ID NO: 1192173 - DNA, 25 bp, Homo sapien
cctgcttgagcttggaggaaggatg

SEQ ID NO: 1192174 - DNA, 25 bp, Homo sapien
tggaggaaggatggccagagcccat

SEQ ID NO: 1192175 - DNA, 25 bp, Homo sapien
ttataggagtgttgaggacgtgtct

SEQ ID NO: 1192176 - DNA, 25 bp, Homo sapien
tggtaaccttctgtaggaagccagc

SEQ ID NO: 1192177 - DNA, 25 bp, Homo sapien
aaagccagtgccctgttggtccaga

SEQ ID NO: 1192178 - DNA, 25 bp, Homo sapien
ggcttagacatacagaagcctgtgg

SEQ ID NO: 1192179 - DNA, 25 bp, Homo sapien
caaggatgagaaagatgtgacaagg

SEQ ID NO: 1192180 - DNA, 25 bp, Homo sapien
cacagactctgtgatcactgaaaga

SEQ ID NO: 1192181 - DNA, 25 bp, Homo sapien
ttaatgaatgtctaccaagtgccag

SEQ ID NO: 1192182 - DNA, 25 bp, Homo sapien
gaagggcgtttacatgactagcaca

SEQ ID NO: 1192183 - DNA, 25 bp, Homo sapien
gaaccaaagttaggcagtgctctgt

SEQ ID NO: 1192184 - DNA, 25 bp, Homo sapien
ctagcgtagcgcctgcccgacggcc

SEQ ID NO: 1192185 - DNA, 25 bp, Homo sapien
agcgtagcgcctgcccgacggccaa

SEQ ID NO: 1192186 - DNA, 25 bp, Homo sapien
tagcgcctgcccgacggccaatccc

SEQ ID NO: 1192187 - DNA, 25 bp, Homo sapien
cgtcctagcgtagcgcctgcccgac

SEQ ID NO: 1192188 - DNA, 25 bp, Homo sapien
ccgccacagcggctccggcccaccc

SEQ ID NO: 1192189 - DNA, 25 bp, Homo sapien
tgaagtctgccctaaaactgaagga

SEQ ID NO: 1192190 - DNA, 25 bp, Homo sapien
tgaagctgcacttgactggaacctg

SEQ ID NO: 1192191 - DNA, 25 bp, Homo sapien
tgtacggttcgagaggccaaagtcc

SEQ ID NO: 1192192 - DNA, 25 bp, Homo sapien
ggttgtctaacacactgcccaagga

SEQ ID NO: 1192193 - DNA, 25 bp, Homo sapien
gggaggctgtcactaatttggccaa

SEQ ID NO: 1192194 - DNA, 25 bp, Homo sapien
actgaaacagatgggaagcatgaac

SEQ ID NO: 1192195 - DNA, 25 bp, Homo sapien
tttgagaggtagataagactaggca

SEQ ID NO: 1192196 - DNA, 25 bp, Homo sapien
tatcaaaaacccagatgacctccag

SEQ ID NO: 1192197 - DNA, 25 bp, Homo sapien
cagccattcgctgcatgaactgtgc

SEQ ID NO: 1192198 - DNA, 25 bp, Homo sapien
tcaaaaagggccacagttacgtgca

SEQ ID NO: 1192199 - DNA, 25 bp, Homo sapien
cacagttacgtgcagccattcgctg

SEQ ID NO: 1192200 - DNA, 25 bp, Homo sapien
tacgtgcagccattcgctgcatgaa

SEQ ID NO: 1192201 - DNA, 25 bp, Homo sapien
ttcttcactgatgcaccttccacag

SEQ ID NO: 1192202 - DNA, 25 bp, Homo sapien
cccactcttgctcatgtattaagga

SEQ ID NO: 1192203 - DNA, 25 bp, Homo sapien
atgattatacacattggtccatttc

SEQ ID NO: 1192204 - DNA, 25 bp, Homo sapien
ttgctcatgtattaaggagagctgg

SEQ ID NO: 1192205 - DNA, 25 bp, Homo sapien
aaggtatggtccagcttgggtgcca

SEQ ID NO: 1192206 - DNA, 25 bp, Homo sapien
tcccggttggcagctgatgtatcta

SEQ ID NO: 1192207 - DNA, 25 bp, Homo sapien
gacaaggagaattgctaacagcacg

SEQ ID NO: 1192208 - DNA, 25 bp, Homo sapien
gcacgactcgctgctttagcttcat

SEQ ID NO: 1192209 - DNA, 25 bp, Homo sapien
gctacctctgcattgtgtctatcat

SEQ ID NO: 1192210 - DNA, 25 bp, Homo sapien
ttccaccacatggtctcggctatac

SEQ ID NO: 1192211 - DNA, 25 bp, Homo sapien
tatcataaccagcatacggttcccc

SEQ ID NO: 1192212 - DNA, 25 bp, Homo sapien
ctgtccaagtgaaaggctgctacct

SEQ ID NO: 1192213 - DNA, 25 bp, Homo sapien
tgatctctgtccgaagattaacaaa

SEQ ID NO: 1192214 - DNA, 25 bp, Homo sapien
acaaatctgccaactaccaaggggg

SEQ ID NO: 1192215 - DNA, 25 bp, Homo sapien
aggaaggtgctcaacagctgctctg

SEQ ID NO: 1192216 - DNA, 25 bp, Homo sapien
tgctctgtggcgacaggtttgatct

SEQ ID NO: 1192217 - DNA, 25 bp, Homo sapien
tgattagtctacacttactcctgga

SEQ ID NO: 1192218 - DNA, 25 bp, Homo sapien
ggctttagctcctaaatgattagtc

SEQ ID NO: 1192219 - DNA, 25 bp, Homo sapien
tcatttgtcatccaatccagaaacc

SEQ ID NO: 1192220 - DNA, 25 bp, Homo sapien
ggtgaactaccaactgtgacaagaa

SEQ ID NO: 1192221 - DNA, 25 bp, Homo sapien
ccatgggtgacggtgcttctgcaga

SEQ ID NO: 1192222 - DNA, 25 bp, Homo sapien
ttctcggtaagtcctgccccatggg

SEQ ID NO: 1192223 - DNA, 25 bp, Homo sapien
ggttctgtttctcggcagtaatagc

SEQ ID NO: 1192224 - DNA, 25 bp, Homo sapien
gatccctccattatgtctccatcag

SEQ ID NO: 1192225 - DNA, 25 bp, Homo sapien
caatgatgtccaagaggcgcgggcc

SEQ ID NO: 1192226 - DNA, 25 bp, Homo sapien
ctctcatagtgatggcggtcagcat

SEQ ID NO: 1192227 - DNA, 25 bp, Homo sapien
ggatgagcatactagcgccttcatc

SEQ ID NO: 1192228 - DNA, 25 bp, Homo sapien
catactagcgccttcatcatcttga

SEQ ID NO: 1192229 - DNA, 25 bp, Homo sapien
gaggctcatagagtcttagactcct

SEQ ID NO: 1192230 - DNA, 25 bp, Homo sapien
cttagactccttggaagaaccactt

SEQ ID NO: 1192231 - DNA, 25 bp, Homo sapien
gaacgatgtaggtagtaacaaatga

SEQ ID NO: 1192232 - DNA, 25 bp, Homo sapien
gccaagaaagaacgatgtaggtagt

SEQ ID NO: 1192233 - DNA, 25 bp, Homo sapien
atgcaacactgatagagaggggcaa

SEQ ID NO: 1192234 - DNA, 25 bp, Homo sapien
cactgatagagaggggcaagaatgc

SEQ ID NO: 1192235 - DNA, 25 bp, Homo sapien
caacactgatagagaggggcaagaa

SEQ ID NO: 1192236 - DNA, 25 bp, Homo sapien
tagagaggggcaagaatgcttcttt

SEQ ID NO: 1192237 - DNA, 25 bp, Homo sapien
ctcattatcaaacggagttgaaagc

SEQ ID NO: 1192238 - DNA, 25 bp, Homo sapien
cttctcattatcaaacggagttgaa

SEQ ID NO: 1192239 - DNA, 25 bp, Homo sapien
aacttctcattatcaaacggagttg

SEQ ID NO: 1192240 - DNA, 25 bp, Homo sapien
taaaacttctcattatcaaacggag

SEQ ID NO: 1192241 - DNA, 25 bp, Homo sapien
tcctgtcttccaccagtactgtgtc

SEQ ID NO: 1192242 - DNA, 25 bp, Homo sapien
gctggtccacggcgtccagatgagg

SEQ ID NO: 1192243 - DNA, 25 bp, Homo sapien
gccgctggtccacggcgtccagatg

SEQ ID NO: 1192244 - DNA, 25 bp, Homo sapien
agccgctggtccacggcgtccagat

SEQ ID NO: 1192245 - DNA, 25 bp, Homo sapien
caaccctagaatgagcaattgccga

SEQ ID NO: 1192246 - DNA, 25 bp, Homo sapien
taagactgaccaactatgatgccca

SEQ ID NO: 1192247 - DNA, 25 bp, Homo sapien
tgtttccacaaaatccacgggcgta

SEQ ID NO: 1192248 - DNA, 25 bp, Homo sapien
cacgggcgtagagaaaggactgcaa

SEQ ID NO: 1192249 - DNA, 25 bp, Homo sapien
tacacgggtgatcgagaagaaaggc

SEQ ID NO: 1192250 - DNA, 25 bp, Homo sapien
caactaacatttacagggagagcag

SEQ ID NO: 1192251 - DNA, 25 bp, Homo sapien
gaaggcttaaaatcttggccggcca

SEQ ID NO: 1192252 - DNA, 25 bp, Homo sapien
tcagtgtggcatactaaaggcgtca

SEQ ID NO: 1192253 - DNA, 25 bp, Homo sapien
ggtataccacagcttgcagcacaat

SEQ ID NO: 1192254 - DNA, 25 bp, Homo sapien
caatggcccacagatctactgatga

SEQ ID NO: 1192255 - DNA, 25 bp, Homo sapien
gacagtcactatcatctcaatggta

SEQ ID NO: 1192256 - DNA, 25 bp, Homo sapien
ccatggaaatccagtggctatgacc

SEQ ID NO: 1192257 - DNA, 25 bp, Homo sapien
ggccactgtcaatcactccgctagg

SEQ ID NO: 1192258 - DNA, 25 bp, Homo sapien
cagtcccgagactgacttcaggcca

SEQ ID NO: 1192259 - DNA, 25 bp, Homo sapien
gttgcaaagaaggtgaactcaggct

SEQ ID NO: 1192260 - DNA, 25 bp, Homo sapien
actttcggacggctctggtggccca

SEQ ID NO: 1192261 - DNA, 25 bp, Homo sapien
aaagagccaaagctggcgccacgga

SEQ ID NO: 1192262 - DNA, 25 bp, Homo sapien
gctggcgccacggaccgcgaagcat

SEQ ID NO: 1192263 - DNA, 25 bp, Homo sapien
ggctcaggcgcgcccgggagcagca

SEQ ID NO: 1192264 - DNA, 25 bp, Homo sapien
gaaaaagagccaaagctggcgccac

SEQ ID NO: 1192265 - DNA, 25 bp, Homo sapien
aagagcgtccagtaccgcttggaga

SEQ ID NO: 1192266 - DNA, 25 bp, Homo sapien
tcctcgtcctcgtcacagtcgtcgg

SEQ ID NO: 1192267 - DNA, 25 bp, Homo sapien
gctgaagagcgtccagtaccgcttg

SEQ ID NO: 1192268 - DNA, 25 bp, Homo sapien
cgtcacagtcgtcgggccacacctg

SEQ ID NO: 1192269 - DNA, 25 bp, Homo sapien
aggactgcgggcccagatgtcgccc

SEQ ID NO: 1192270 - DNA, 25 bp, Homo sapien
gatgtcgccccggacaggagcgagg

SEQ ID NO: 1192271 - DNA, 25 bp, Homo sapien
ggatcgcactctgctccgcagcgaa

SEQ ID NO: 1192272 - DNA, 25 bp, Homo sapien
aggagcgaggcgaccacagccgcgc

SEQ ID NO: 1192273 - DNA, 25 bp, Homo sapien
cacacaacttgtcagggacagaggg

SEQ ID NO: 1192274 - DNA, 25 bp, Homo sapien
ctgtgagaccgagaggagaccatcc

SEQ ID NO: 1192275 - DNA, 25 bp, Homo sapien
tgctctacagtgatgcggcaacctt

SEQ ID NO: 1192276 - DNA, 25 bp, Homo sapien
ccaggcatgtccacagcggacgttc

SEQ ID NO: 1192277 - DNA, 25 bp, Homo sapien
tgttggagattctgcaatcccctct

SEQ ID NO: 1192278 - DNA, 25 bp, Homo sapien
tccaggtaccgctggcccaacagag

SEQ ID NO: 1192279 - DNA, 25 bp, Homo sapien
gctggcccaacagaggaaggcgcca

SEQ ID NO: 1192280 - DNA, 25 bp, Homo sapien
cagtctttgaagctgcagtaccacg

SEQ ID NO: 1192281 - DNA, 25 bp, Homo sapien
tacagctgaggaaacggacacttgg

SEQ ID NO: 1192282 - DNA, 25 bp, Homo sapien
gtaacttgctaattgctacctaggg

SEQ ID NO: 1192283 - DNA, 25 bp, Homo sapien
tccgctggccagaacaatttggata

SEQ ID NO: 1192284 - DNA, 25 bp, Homo sapien
ttcagtttgccagcaaggaagaggc

SEQ ID NO: 1192285 - DNA, 25 bp, Homo sapien
cctgtttggccttagaataagaagc

SEQ ID NO: 1192286 - DNA, 25 bp, Homo sapien
ctaaggacaggaaagaggtagtcac

SEQ ID NO: 1192287 - DNA, 25 bp, Homo sapien
tcgggtggaatcagttactcctcct

SEQ ID NO: 1192288 - DNA, 25 bp, Homo sapien
gtagtcacagcaaaaggcacacaca

SEQ ID NO: 1192289 - DNA, 25 bp, Homo sapien
accagccgtggaacgacagagcaag

SEQ ID NO: 1192290 - DNA, 25 bp, Homo sapien
gctggccatgcagccgcacattcag

SEQ ID NO: 1192291 - DNA, 25 bp, Homo sapien
tcactgttcttaggaccagctgctg

SEQ ID NO: 1192292 - DNA, 25 bp, Homo sapien
gcgtctctaagtagcccctcactgt

SEQ ID NO: 1192293 - DNA, 25 bp, Homo sapien
gaaagtggaacgtggcgatgaacat

SEQ ID NO: 1192294 - DNA, 25 bp, Homo sapien
agcatccgtgccacgaagttcttgc

SEQ ID NO: 1192295 - DNA, 25 bp, Homo sapien
gaacgtggcgatgaacatcctgaca

SEQ ID NO: 1192296 - DNA, 25 bp, Homo sapien
tcatcagcccgtcccgatacaggtt

SEQ ID NO: 1192297 - DNA, 25 bp, Homo sapien
tgcagcgtccctgcttaagcgcagt

SEQ ID NO: 1192298 - DNA, 25 bp, Homo sapien
tgtccgtgtggagagtctgacagtt

SEQ ID NO: 1192299 - DNA, 25 bp, Homo sapien
gtccagcctctcgagtgtggctgtt

SEQ ID NO: 1192300 - DNA, 25 bp, Homo sapien
tggtgtttggaacgccagtctcttc

SEQ ID NO: 1192301 - DNA, 25 bp, Homo sapien
gggaagtggtgactccttccacctc

SEQ ID NO: 1192302 - DNA, 25 bp, Homo sapien
cacctccggccttgagggcgtggtt

SEQ ID NO: 1192303 - DNA, 25 bp, Homo sapien
aagtggtgactccttccacctccgg

SEQ ID NO: 1192304 - DNA, 25 bp, Homo sapien
actccttccacctccggccttgagg

SEQ ID NO: 1192305 - DNA, 25 bp, Homo sapien
gcccggcgttctaagtgtggcccaa

SEQ ID NO: 1192306 - DNA, 25 bp, Homo sapien
tcccggatctggctcatcagctgct

SEQ ID NO: 1192307 - DNA, 25 bp, Homo sapien
ggtgcagcttctccgcttcatcgaa

SEQ ID NO: 1192308 - DNA, 25 bp, Homo sapien
aagatagtccatggagactcagccc

SEQ ID NO: 1192309 - DNA, 25 bp, Homo sapien
tctgtaccagagtttgtgctgtttt

SEQ ID NO: 1192310 - DNA, 25 bp, Homo sapien
tcttgaggaaaggttctgaacctgg

SEQ ID NO: 1192311 - DNA, 25 bp, Homo sapien
gctgctttctgtaccagagtttgtg

SEQ ID NO: 1192312 - DNA, 25 bp, Homo sapien
cctgactattgttccccagaaccca

SEQ ID NO: 1192313 - DNA, 25 bp, Homo sapien
gagactatgccgttctctaaccagg

SEQ ID NO: 1192314 - DNA, 25 bp, Homo sapien
tgtcagtgaaagcacaggaacctca

SEQ ID NO: 1192315 - DNA, 25 bp, Homo sapien
taagttggcttcacgcaaagatgtc

SEQ ID NO: 1192316 - DNA, 25 bp, Homo sapien
gactgggtcccgcatggtagcgtca

SEQ ID NO: 1192317 - DNA, 25 bp, Homo sapien
ggaagacactcagcgcaagggagat

SEQ ID NO: 1192318 - DNA, 25 bp, Homo sapien
aagacactcagcgcaagggagatcc

SEQ ID NO: 1192319 - DNA, 25 bp, Homo sapien
gaggaagacactcagcgcaagggag

SEQ ID NO: 1192320 - DNA, 25 bp, Homo sapien
gagacccctgtctcggggagaggga

SEQ ID NO: 1192321 - DNA, 25 bp, Homo sapien
ggcctcggacagtccacccaggctg

SEQ ID NO: 1192322 - DNA, 25 bp, Homo sapien
tctggcaggcggctttcccgcaggc

SEQ ID NO: 1192323 - DNA, 25 bp, Homo sapien
agtctggcaggcggctttcccgcag

SEQ ID NO: 1192324 - DNA, 25 bp, Homo sapien
caaccacatggcctcggacagtcca

SEQ ID NO: 1192325 - DNA, 25 bp, Homo sapien
cggatgaaggacaggctctgagcac

SEQ ID NO: 1192326 - DNA, 25 bp, Homo sapien
cccggatgaaggacaggctctgagc

SEQ ID NO: 1192327 - DNA, 25 bp, Homo sapien
ggcccggatgaaggacaggctctga

SEQ ID NO: 1192328 - DNA, 25 bp, Homo sapien
ctggcccggatgaaggacaggctct

SEQ ID NO: 1192329 - DNA, 25 bp, Homo sapien
tttacagctcccatgagaacagggc

SEQ ID NO: 1192330 - DNA, 25 bp, Homo sapien
tatacttggcagaagtgggcgaagt

SEQ ID NO: 1192331 - DNA, 25 bp, Homo sapien
cagctccgatcgcagagttccacgt

SEQ ID NO: 1192332 - DNA, 25 bp, Homo sapien
gagcccattcctgcagccttctata

SEQ ID NO: 1192333 - DNA, 25 bp, Homo sapien
aaccccacagagtgatactccctca

SEQ ID NO: 1192334 - DNA, 25 bp, Homo sapien
tccagggtgctgtgaaaccccacag

SEQ ID NO: 1192335 - DNA, 25 bp, Homo sapien
tcctaggggcatggactccagggcc

SEQ ID NO: 1192336 - DNA, 25 bp, Homo sapien
atccagggtgctgtgaaaccccaca

SEQ ID NO: 1192337 - DNA, 25 bp, Homo sapien
ctttctgacactgcccctgctgcag

SEQ ID NO: 1192338 - DNA, 25 bp, Homo sapien
actttctgacactgcccctgctgca

SEQ ID NO: 1192339 - DNA, 25 bp, Homo sapien
tgcagggagcatgaaaagatggtaa

SEQ ID NO: 1192340 - DNA, 25 bp, Homo sapien
cgtgtattcggttccaggacagtgt

SEQ ID NO: 1192341 - DNA, 25 bp, Homo sapien
ggcaagcgctaatggaggagtgact

SEQ ID NO: 1192342 - DNA, 25 bp, Homo sapien
tgaaaagatggtaagatatggttct

SEQ ID NO: 1192343 - DNA, 25 bp, Homo sapien
gagcaactttaggaccacctcattg

SEQ ID NO: 1192344 - DNA, 25 bp, Homo sapien
tcattgattatatcgcccctgagat

SEQ ID NO: 1192345 - DNA, 25 bp, Homo sapien
gggctccaggtgttccatcgtaatt

SEQ ID NO: 1192346 - DNA, 25 bp, Homo sapien
ggaccatccagccttgagcaacttt

SEQ ID NO: 1192347 - DNA, 25 bp, Homo sapien
tcttctttatacaggagctcctggc

SEQ ID NO: 1192348 - DNA, 25 bp, Homo sapien
tcacgtgacggtactccaaaggcag

SEQ ID NO: 1192349 - DNA, 25 bp, Homo sapien
caggaagtagttaatcctctgggaa

SEQ ID NO: 1192350 - DNA, 25 bp, Homo sapien
aatcaggttttccttcacaagacgg

SEQ ID NO: 1192351 - DNA, 25 bp, Homo sapien
tccactttggaatgcgtgtctttaa

SEQ ID NO: 1192352 - DNA, 25 bp, Homo sapien
tcccagggtcctgttagtggaagaa

SEQ ID NO: 1192353 - DNA, 25 bp, Homo sapien
tatctatctcggtgggacctccaaa

SEQ ID NO: 1192354 - DNA, 25 bp, Homo sapien
agttgtgtgtttgttagtggctgct

SEQ ID NO: 1192355 - DNA, 25 bp, Homo sapien
ccatctggagtgtcataataagccc

SEQ ID NO: 1192356 - DNA, 25 bp, Homo sapien
tgattcgctcacaacagaagcagct

SEQ ID NO: 1192357 - DNA, 25 bp, Homo sapien
gaagtaccaatttgaaagcccacca

SEQ ID NO: 1192358 - DNA, 25 bp, Homo sapien
ccagcctgcaaacctagagtgtatt

SEQ ID NO: 1192359 - DNA, 25 bp, Homo sapien
aaagcaaacagactagacaggcaga

SEQ ID NO: 1192360 - DNA, 25 bp, Homo sapien
ccaaagcaaacagactagacaggca

SEQ ID NO: 1192361 - DNA, 25 bp, Homo sapien
caggattacccagtgtttgtttgaa

SEQ ID NO: 1192362 - DNA, 25 bp, Homo sapien
tctgccaggccttatcaggattacc

SEQ ID NO: 1192363 - DNA, 25 bp, Homo sapien
taagagcaatgtgctatgggagtct

SEQ ID NO: 1192364 - DNA, 25 bp, Homo sapien
gtgctatgggagtctcttcagtagg

SEQ ID NO: 1192365 - DNA, 25 bp, Homo sapien
gcaatgtgctatgggagtctcttca

SEQ ID NO: 1192366 - DNA, 25 bp, Homo sapien
ttcatatataagagcaatgtgctat

SEQ ID NO: 1192367 - DNA, 25 bp, Homo sapien
aaaaagacctgtgttattccagagg

SEQ ID NO: 1192368 - DNA, 25 bp, Homo sapien
gaaaaaagacctgtgttattccaga

SEQ ID NO: 1192369 - DNA, 25 bp, Homo sapien
taggtactttctaaccttgaggcag

SEQ ID NO: 1192370 - DNA, 25 bp, Homo sapien
cattttacaagaactaaaggagaga

SEQ ID NO: 1192371 - DNA, 25 bp, Homo sapien
taaactgttgaatgtgggagagaca

SEQ ID NO: 1192372 - DNA, 25 bp, Homo sapien
ttgagtacctaatgtggctcagggt

SEQ ID NO: 1192373 - DNA, 25 bp, Homo sapien
aagcatggggaatcgaagctgttct

SEQ ID NO: 1192374 - DNA, 25 bp, Homo sapien
ataatttggtgagtaaaagcatggg

SEQ ID NO: 1192375 - DNA, 25 bp, Homo sapien
ggaatcgaagctgttctcttctgct

SEQ ID NO: 1192376 - DNA, 25 bp, Homo sapien
ggccatctggttgttagaaatgaaa

SEQ ID NO: 1192377 - DNA, 25 bp, Homo sapien
cagatctttccttggatgaacagca

SEQ ID NO: 1192378 - DNA, 25 bp, Homo sapien
tgctgtcgtgcccattaagaaaggg

SEQ ID NO: 1192379 - DNA, 25 bp, Homo sapien
gaactttgtccccaaacatgcggat

SEQ ID NO: 1192380 - DNA, 25 bp, Homo sapien
taatgactgtcactggacaaacccc

SEQ ID NO: 1192381 - DNA, 25 bp, Homo sapien
cctccattatgttttgagaggaatt

SEQ ID NO: 1192382 - DNA, 25 bp, Homo sapien
ggcctccattatgttttgagaggaa

SEQ ID NO: 1192383 - DNA, 25 bp, Homo sapien
tttcttgagatcttgagaaatcacc

SEQ ID NO: 1192384 - DNA, 25 bp, Homo sapien
ttggcctccattatgttttgagagg

SEQ ID NO: 1192385 - DNA, 25 bp, Homo sapien
gggaacgctttagtgtcatcaacag

SEQ ID NO: 1192386 - DNA, 25 bp, Homo sapien
tattgtgagtggcaagaacgccagg

SEQ ID NO: 1192387 - DNA, 25 bp, Homo sapien
tcatcaacagtaaacctcagatact

SEQ ID NO: 1192388 - DNA, 25 bp, Homo sapien
aggttttgcaggactgggaacgctt

SEQ ID NO: 1192389 - DNA, 25 bp, Homo sapien
gcaaactgtcgaatgctagcaggct

SEQ ID NO: 1192390 - DNA, 25 bp, Homo sapien
tcagaagctgaggtctccgagcatg

SEQ ID NO: 1192391 - DNA, 25 bp, Homo sapien
gcttcggaattaggcaccataaact

SEQ ID NO: 1192392 - DNA, 25 bp, Homo sapien
tactgagctgaaccctcagaagctg

SEQ ID NO: 1192393 - DNA, 25 bp, Homo sapien
gtagcaaagccctgttcactctgag

SEQ ID NO: 1192394 - DNA, 25 bp, Homo sapien
catctgtgtctattctggaaggttc

SEQ ID NO: 1192395 - DNA, 25 bp, Homo sapien
cagaccacaccatatttggagcaga

SEQ ID NO: 1192396 - DNA, 25 bp, Homo sapien
tttggagcagaattgtgatacatgt

SEQ ID NO: 1192397 - DNA, 25 bp, Homo sapien
ataagaagatcccatacttcttccc

SEQ ID NO: 1192398 - DNA, 25 bp, Homo sapien
caagataagaagatcccatacttct

SEQ ID NO: 1192399 - DNA, 25 bp, Homo sapien
actcaatatcctagatccaaaggac

SEQ ID NO: 1192400 - DNA, 25 bp, Homo sapien
caatatcctagatccaaaggacagg

SEQ ID NO: 1192401 - DNA, 25 bp, Homo sapien
ttccagcaagccagtagtaatagtt

SEQ ID NO: 1192402 - DNA, 25 bp, Homo sapien
tgggacaagctacagcctactctgg

SEQ ID NO: 1192403 - DNA, 25 bp, Homo sapien
tcctctcttactgagaagcatgggt

SEQ ID NO: 1192404 - DNA, 25 bp, Homo sapien
tgcaatgtgcagacggatgaatttc

SEQ ID NO: 1192405 - DNA, 25 bp, Homo sapien
tagtggagaccctttaccagcagca

SEQ ID NO: 1192406 - DNA, 25 bp, Homo sapien
tgcacagcagaatcccctagggtta

SEQ ID NO: 1192407 - DNA, 25 bp, Homo sapien
gaacggttaattagtggcggagcca

SEQ ID NO: 1192408 - DNA, 25 bp, Homo sapien
cattgactattggagcataccccgt

SEQ ID NO: 1192409 - DNA, 25 bp, Homo sapien
gagacatgcttcaccagggatagga

SEQ ID NO: 1192410 - DNA, 25 bp, Homo sapien
cactgggcttacgagcaggtaaacc

SEQ ID NO: 1192411 - DNA, 25 bp, Homo sapien
ccataagaaatacgaactcacgggt

SEQ ID NO: 1192412 - DNA, 25 bp, Homo sapien
tcctgcccagcaagaggcgaatctg

SEQ ID NO: 1192413 - DNA, 25 bp, Homo sapien
tcggctcagtgacgtgatttcggct

SEQ ID NO: 1192414 - DNA, 25 bp, Homo sapien
gcacaatctttgcaacctccgtccc

SEQ ID NO: 1192415 - DNA, 25 bp, Homo sapien
gtgacgtgatttcggctcagtgacg

SEQ ID NO: 1192416 - DNA, 25 bp, Homo sapien
tggcacaatctttgcaacctccgtc

SEQ ID NO: 1192417 - DNA, 25 bp, Homo sapien
gatctggtttctactgctctgagag

SEQ ID NO: 1192418 - DNA, 25 bp, Homo sapien
tcaggagaatacattctaagacccc

SEQ ID NO: 1192419 - DNA, 25 bp, Homo sapien
cagtggttctcctttatcctcagga

SEQ ID NO: 1192420 - DNA, 25 bp, Homo sapien
tgaagcttagtagactgaacaatct

SEQ ID NO: 1192421 - DNA, 25 bp, Homo sapien
ttttttctataatccggagaatgag

SEQ ID NO: 1192422 - DNA, 25 bp, Homo sapien
gagaatgagatattcaatctggtat

SEQ ID NO: 1192423 - DNA, 25 bp, Homo sapien
tccggagaatgagatattcaatctg

SEQ ID NO: 1192424 - DNA, 25 bp, Homo sapien
tctataatccggagaatgagatatt

SEQ ID NO: 1192425 - DNA, 25 bp, Homo sapien
ttccacatcttgatctggccttgaa

SEQ ID NO: 1192426 - DNA, 25 bp, Homo sapien
aggtttccacatcttgatctggcct

SEQ ID NO: 1192427 - DNA, 25 bp, Homo sapien
ctggccttgaatttggactaccttt

SEQ ID NO: 1192428 - DNA, 25 bp, Homo sapien
tggccttgaatttggactacctttc

SEQ ID NO: 1192429 - DNA, 25 bp, Homo sapien
tcagagtttccgaatataataaatt

SEQ ID NO: 1192430 - DNA, 25 bp, Homo sapien
cttgaggatagagtcgaaagacaag

SEQ ID NO: 1192431 - DNA, 25 bp, Homo sapien
tcctgtttgatccttgtgagaagaa

SEQ ID NO: 1192432 - DNA, 25 bp, Homo sapien
gaaagacaagatcctgtttgatcct

SEQ ID NO: 1192433 - DNA, 25 bp, Homo sapien
tatgataccaaaaacattcaggcca

SEQ ID NO: 1192434 - DNA, 25 bp, Homo sapien
gcttctctgcgttttgtgtatccta

SEQ ID NO: 1192435 - DNA, 25 bp, Homo sapien
ccgtattagtacatgaggttcttga

SEQ ID NO: 1192436 - DNA, 25 bp, Homo sapien
tgtatcctagtagacactcttgctc

SEQ ID NO: 1192437 - DNA, 25 bp, Homo sapien
ttctctcttcggcaagtctagagag

SEQ ID NO: 1192438 - DNA, 25 bp, Homo sapien
ttttctctcttcggcaagtctagag

SEQ ID NO: 1192439 - DNA, 25 bp, Homo sapien
aatctcctcccttagttcattaagc

SEQ ID NO: 1192440 - DNA, 25 bp, Homo sapien
tcagaatctcctcccttagttcatt

SEQ ID NO: 1192441 - DNA, 25 bp, Homo sapien
ggtcagataatgcagtgcgtctttg

SEQ ID NO: 1192442 - DNA, 25 bp, Homo sapien
cagataatgcagtgcgtctttgtcc

SEQ ID NO: 1192443 - DNA, 25 bp, Homo sapien
ctttggtcagataatgcagtgcgtc

SEQ ID NO: 1192444 - DNA, 25 bp, Homo sapien
ttggtcagataatgcagtgcgtctt

SEQ ID NO: 1192445 - DNA, 25 bp, Homo sapien
taaaagtctattctgtaacctgact

SEQ ID NO: 1192446 - DNA, 25 bp, Homo sapien
ataaaagtctattctgtaacctgac

SEQ ID NO: 1192447 - DNA, 25 bp, Homo sapien
tctgtaacctgacttagtatcttca

SEQ ID NO: 1192448 - DNA, 25 bp, Homo sapien
tattctgtaacctgacttagtatct

SEQ ID NO: 1192449 - DNA, 25 bp, Homo sapien
tgtttcatcgcatcctttccagctt

SEQ ID NO: 1192450 - DNA, 25 bp, Homo sapien
tgaatgtttcatcgcatcctttcca

SEQ ID NO: 1192451 - DNA, 25 bp, Homo sapien
tttgacttgaatgtttcatcgcatc

SEQ ID NO: 1192452 - DNA, 25 bp, Homo sapien
gacttgaatgtttcatcgcatcctt

SEQ ID NO: 1192453 - DNA, 25 bp, Homo sapien
gatgaactttcctaacatatgagca

SEQ ID NO: 1192454 - DNA, 25 bp, Homo sapien
tagtactgtaatgggatgggacaaa

SEQ ID NO: 1192455 - DNA, 25 bp, Homo sapien
taatgggatgggacaaatgtcatct

SEQ ID NO: 1192456 - DNA, 25 bp, Homo sapien
ctgtaatgggatgggacaaatgtca

SEQ ID NO: 1192457 - DNA, 25 bp, Homo sapien
catgaaggatttcattactgtcatc

SEQ ID NO: 1192458 - DNA, 25 bp, Homo sapien
tgtggccttcttggcaattgagagg

SEQ ID NO: 1192459 - DNA, 25 bp, Homo sapien
tagtctagtattggtccatgaagga

SEQ ID NO: 1192460 - DNA, 25 bp, Homo sapien
tctgaaagtgacgttcttcctgtgg

SEQ ID NO: 1192461 - DNA, 25 bp, Homo sapien
gctacttcctgagagggtcactgga

SEQ ID NO: 1192462 - DNA, 25 bp, Homo sapien
gtcactggatgtcccccttggagaa

SEQ ID NO: 1192463 - DNA, 25 bp, Homo sapien
ttctattccaagttgctacttcctg

SEQ ID NO: 1192464 - DNA, 25 bp, Homo sapien
gagagggtcactggatgtccccctt

SEQ ID NO: 1192465 - DNA, 25 bp, Homo sapien
ggcatgccagattctgttccaggtt

SEQ ID NO: 1192466 - DNA, 25 bp, Homo sapien
gggcactggatgttccccttggaga

SEQ ID NO: 1192467 - DNA, 25 bp, Homo sapien
tccccaaatgccttaggcatgccag

SEQ ID NO: 1192468 - DNA, 25 bp, Homo sapien
aataaccagccctgttccccaaatg

SEQ ID NO: 1192469 - DNA, 25 bp, Homo sapien
tgtgcacaagaggacacgctatccc

SEQ ID NO: 1192470 - DNA, 25 bp, Homo sapien
gaggacacgctatcccgaaaggaag

SEQ ID NO: 1192471 - DNA, 25 bp, Homo sapien
gctatcccgaaaggaagactcttgg

SEQ ID NO: 1192472 - DNA, 25 bp, Homo sapien
agcatgtgcacaagaggacacgcta

SEQ ID NO: 1192473 - DNA, 25 bp, Homo sapien
tctcctgctgttcctcggacccctg

SEQ ID NO: 1192474 - DNA, 25 bp, Homo sapien
ttcctcggacccctgagattgagcc

SEQ ID NO: 1192475 - DNA, 25 bp, Homo sapien
ctgctgttcctcggacccctgagat

SEQ ID NO: 1192476 - DNA, 25 bp, Homo sapien
ctgttcctcggacccctgagattga

SEQ ID NO: 1192477 - DNA, 25 bp, Homo sapien
ttgggcattgtataacccaacccac

SEQ ID NO: 1192478 - DNA, 25 bp, Homo sapien
tctttgggcattgtataacccaacc

SEQ ID NO: 1192479 - DNA, 25 bp, Homo sapien
tggcaccaaatctttgggcattgta

SEQ ID NO: 1192480 - DNA, 25 bp, Homo sapien
caaatctttgggcattgtataaccc

SEQ ID NO: 1192481 - DNA, 25 bp, Homo sapien
aatcacacatccaaattgacagaca

SEQ ID NO: 1192482 - DNA, 25 bp, Homo sapien
ggtattatactgtatgggtccagtc

SEQ ID NO: 1192483 - DNA, 25 bp, Homo sapien
tgggggtattatactgtatgggtcc

SEQ ID NO: 1192484 - DNA, 25 bp, Homo sapien
ctctccaacccagccgccttcttgt

SEQ ID NO: 1192485 - DNA, 25 bp, Homo sapien
ctttgggggtattatactgtatggg

SEQ ID NO: 1192486 - DNA, 25 bp, Homo sapien
ctgccactgtcctagttaaggtcat

SEQ ID NO: 1192487 - DNA, 25 bp, Homo sapien
ttccaccccagcagtagaatgtgca

SEQ ID NO: 1192488 - DNA, 25 bp, Homo sapien
aaacggcaccctgcgtggtagcatg

SEQ ID NO: 1192489 - DNA, 25 bp, Homo sapien
taggccgactggaagaagccgcttc

SEQ ID NO: 1192490 - DNA, 25 bp, Homo sapien
aatgtgcagccaaaacgggactgcg

SEQ ID NO: 1192491 - DNA, 25 bp, Homo sapien
aagctaaagcgccggacagcccggc

SEQ ID NO: 1192492 - DNA, 25 bp, Homo sapien
taagctaaagcgccggacagcccgg

SEQ ID NO: 1192493 - DNA, 25 bp, Homo sapien
ctaagctaaagcgccggacagcccg

SEQ ID NO: 1192494 - DNA, 25 bp, Homo sapien
gctaaagcgccggacagcccggccc

SEQ ID NO: 1192495 - DNA, 25 bp, Homo sapien
ggcgcccagggcccgcaacgtcgcc

SEQ ID NO: 1192496 - DNA, 25 bp, Homo sapien
tggcgcccagggcccgcaacgtcgc

SEQ ID NO: 1192497 - DNA, 25 bp, Homo sapien
cgcccagggcccgcaacgtcgcctg

SEQ ID NO: 1192498 - DNA, 25 bp, Homo sapien
gcgcccagggcccgcaacgtcgcct

SEQ ID NO: 1192499 - DNA, 25 bp, Homo sapien
ccagcaggaaggtcgactccgggaa

SEQ ID NO: 1192500 - DNA, 25 bp, Homo sapien
ccggcagcgggcacttcggccaaga

SEQ ID NO: 1192501 - DNA, 25 bp, Homo sapien
ggaaggtcgactccgggaagctctc

SEQ ID NO: 1192502 - DNA, 25 bp, Homo sapien
gcagagccgggaagcggtcacagag

SEQ ID NO: 1192503 - DNA, 25 bp, Homo sapien
gactttgacagccggtttcttagag

SEQ ID NO: 1192504 - DNA, 25 bp, Homo sapien
ctggactttgacagccggtttctta

SEQ ID NO: 1192505 - DNA, 25 bp, Homo sapien
tggactttgacagccggtttcttag

SEQ ID NO: 1192506 - DNA, 25 bp, Homo sapien
ggactttgacagccggtttcttaga

SEQ ID NO: 1192507 - DNA, 25 bp, Homo sapien
tgctacttttaacgcttctggaacc

SEQ ID NO: 1192508 - DNA, 25 bp, Homo sapien
ttggtggtgctacttttaacgcttc

SEQ ID NO: 1192509 - DNA, 25 bp, Homo sapien
ggtgctacttttaacgcttctggaa

SEQ ID NO: 1192510 - DNA, 25 bp, Homo sapien
cttttaacgcttctggaaccctcat

SEQ ID NO: 1192511 - DNA, 25 bp, Homo sapien
tcacaactgccaactgcacagatgt

SEQ ID NO: 1192512 - DNA, 25 bp, Homo sapien
acaactgccaactgcacagatgtct

SEQ ID NO: 1192513 - DNA, 25 bp, Homo sapien
tcactcacaactgccaactgcacag

SEQ ID NO: 1192514 - DNA, 25 bp, Homo sapien
actcacaactgccaactgcacagat

SEQ ID NO: 1192515 - DNA, 25 bp, Homo sapien
agcagatatcccacgcaacccaggt

SEQ ID NO: 1192516 - DNA, 25 bp, Homo sapien
gaccagccgtctgttttggcaaaca

SEQ ID NO: 1192517 - DNA, 25 bp, Homo sapien
ttctgaccagccgtctgttttggca

SEQ ID NO: 1192518 - DNA, 25 bp, Homo sapien
agatatcccacgcaacccaggtata

SEQ ID NO: 1192519 - DNA, 25 bp, Homo sapien
gaaattatacagaggatagcccaga

SEQ ID NO: 1192520 - DNA, 25 bp, Homo sapien
ccaattggagatgggagccaaccac

SEQ ID NO: 1192521 - DNA, 25 bp, Homo sapien
gaagaggtccaaccaaacagccaat

SEQ ID NO: 1192522 - DNA, 25 bp, Homo sapien
cacagctgcgctagagatggaggat

SEQ ID NO: 1192523 - DNA, 25 bp, Homo sapien
tatcaactgttttatgtcaattcga

SEQ ID NO: 1192524 - DNA, 25 bp, Homo sapien
atcaactgttttatgtcaattcgac

SEQ ID NO: 1192525 - DNA, 25 bp, Homo sapien
ctatcaactgttttatgtcaattcg

SEQ ID NO: 1192526 - DNA, 25 bp, Homo sapien
tgctatcaactgttttatgtcaatt

SEQ ID NO: 1192527 - DNA, 25 bp, Homo sapien
tactagctaaaccagggtccaccat

SEQ ID NO: 1192528 - DNA, 25 bp, Homo sapien
tacacatattaatactagctaaacc

SEQ ID NO: 1192529 - DNA, 25 bp, Homo sapien
taatactagctaaaccagggtccac

SEQ ID NO: 1192530 - DNA, 25 bp, Homo sapien
catattaatactagctaaaccaggg

SEQ ID NO: 1192531 - DNA, 25 bp, Homo sapien
taaagcaaagctaggccagggatgg

SEQ ID NO: 1192532 - DNA, 25 bp, Homo sapien
caagcatgttagacctcgaggcgac

SEQ ID NO: 1192533 - DNA, 25 bp, Homo sapien
tcgaggcgaccttaagagattcagt

SEQ ID NO: 1192534 - DNA, 25 bp, Homo sapien
tatgaccccactggcattagataaa

SEQ ID NO: 1192535 - DNA, 25 bp, Homo sapien
tatctaaagtatctaaactcttcct

SEQ ID NO: 1192536 - DNA, 25 bp, Homo sapien
taaagtatctaaactcttcctacta

SEQ ID NO: 1192537 - DNA, 25 bp, Homo sapien
tactctttacagagcttgaatgttc

SEQ ID NO: 1192538 - DNA, 25 bp, Homo sapien
ctactaaaatccttactctttacag

SEQ ID NO: 1192539 - DNA, 25 bp, Homo sapien
tcttggtggcatggtaccagaaacc

SEQ ID NO: 1192540 - DNA, 25 bp, Homo sapien
tggaacaggtaatacagtgcttagg

SEQ ID NO: 1192541 - DNA, 25 bp, Homo sapien
taaagaacattaactccacaaggtc

SEQ ID NO: 1192542 - DNA, 25 bp, Homo sapien
ggcttccaggcagagattactttgg

SEQ ID NO: 1192543 - DNA, 25 bp, Homo sapien
tcctgaatctcctcctttcacagat

SEQ ID NO: 1192544 - DNA, 25 bp, Homo sapien
ttcctgaatctcctcctttcacaga

SEQ ID NO: 1192545 - DNA, 25 bp, Homo sapien
atttcctgaatctcctcctttcaca

SEQ ID NO: 1192546 - DNA, 25 bp, Homo sapien
cctgaatctcctcctttcacagatc

SEQ ID NO: 1192547 - DNA, 25 bp, Homo sapien
caggatagcacctgacacagttgtc

SEQ ID NO: 1192548 - DNA, 25 bp, Homo sapien
gctcggcaggatagaaactattaca

SEQ ID NO: 1192549 - DNA, 25 bp, Homo sapien
catggataacggtctggaactgaaa

SEQ ID NO: 1192550 - DNA, 25 bp, Homo sapien
gattctataaatgaagctcggcagg

SEQ ID NO: 1192551 - DNA, 25 bp, Homo sapien
agggcaacggcatgatactagctca

SEQ ID NO: 1192552 - DNA, 25 bp, Homo sapien
ggcaacggcatgatactagctcacc

SEQ ID NO: 1192553 - DNA, 25 bp, Homo sapien
gctagagggcaacggcatgatacta

SEQ ID NO: 1192554 - DNA, 25 bp, Homo sapien
agagggcaacggcatgatactagct

SEQ ID NO: 1192555 - DNA, 25 bp, Homo sapien
tgacacctcagacggtacagaatgt

SEQ ID NO: 1192556 - DNA, 25 bp, Homo sapien
tctatgatgatacacagctttccaa

SEQ ID NO: 1192557 - DNA, 25 bp, Homo sapien
tagtttaggtatccatatgcgagac

SEQ ID NO: 1192558 - DNA, 25 bp, Homo sapien
ggcccagtattgtaaatttctttca

SEQ ID NO: 1192559 - DNA, 25 bp, Homo sapien
tgtataccccttgtaagcataaaac

SEQ ID NO: 1192560 - DNA, 25 bp, Homo sapien
tagaattacaggcaggcggcactgt

SEQ ID NO: 1192561 - DNA, 25 bp, Homo sapien
ggcaggcggcactgtgccttatccc

SEQ ID NO: 1192562 - DNA, 25 bp, Homo sapien
tacctaaaaggcaacatagtgattt

SEQ ID NO: 1192563 - DNA, 25 bp, Homo sapien
tcatcaaagtgactgccaacttcct

SEQ ID NO: 1192564 - DNA, 25 bp, Homo sapien
gacttttcaatgagattggtcacaa

SEQ ID NO: 1192565 - DNA, 25 bp, Homo sapien
gagcgcacccaccattatctaatga

SEQ ID NO: 1192566 - DNA, 25 bp, Homo sapien
gaacagaaaaggttgtgagagcgca

SEQ ID NO: 1192567 - DNA, 25 bp, Homo sapien
ctaagagagagcgccttgcaataaa

SEQ ID NO: 1192568 - DNA, 25 bp, Homo sapien
aagagagagcgccttgcaataaaaa

SEQ ID NO: 1192569 - DNA, 25 bp, Homo sapien
gagagagcgccttgcaataaaaatc

SEQ ID NO: 1192570 - DNA, 25 bp, Homo sapien
agagagcgccttgcaataaaaatct

SEQ ID NO: 1192571 - DNA, 25 bp, Homo sapien
tgttctgatgtggtccacttcaagc

SEQ ID NO: 1192572 - DNA, 25 bp, Homo sapien
ttgttctgatgtggtccacttcaag

SEQ ID NO: 1192573 - DNA, 25 bp, Homo sapien
gaggagggcaataaacatgtgatat

SEQ ID NO: 1192574 - DNA, 25 bp, Homo sapien
ttccttcatcaatgtaatctactac

SEQ ID NO: 1192575 - DNA, 25 bp, Homo sapien
cttccttcatcaatgtaatctacta

SEQ ID NO: 1192576 - DNA, 25 bp, Homo sapien
tgatccaccaggtccaaacaacggt

SEQ ID NO: 1192577 - DNA, 25 bp, Homo sapien
tgttggtccaaaacctagaactcca

SEQ ID NO: 1192578 - DNA, 25 bp, Homo sapien
cggatcagcggatgagaactcttgc

SEQ ID NO: 1192579 - DNA, 25 bp, Homo sapien
gacaggaggctgaactcaagcacca

SEQ ID NO: 1192580 - DNA, 25 bp, Homo sapien
ctgctcgaatataatgatgaaccgg

SEQ ID NO: 1192581 - DNA, 25 bp, Homo sapien
cgaatataatgatgaaccgggaagc

SEQ ID NO: 1192582 - DNA, 25 bp, Homo sapien
tataatgatgaaccgggaagctggt

SEQ ID NO: 1192583 - DNA, 25 bp, Homo sapien
atgatgaaccgggaagctggtggca

SEQ ID NO: 1192584 - DNA, 25 bp, Homo sapien
tgacaaatgagtgggccttcattac

SEQ ID NO: 1192585 - DNA, 25 bp, Homo sapien
ccttagctgaatttagtacccgagg

SEQ ID NO: 1192586 - DNA, 25 bp, Homo sapien
aaatgagtgggccttcattacaaaa

SEQ ID NO: 1192587 - DNA, 25 bp, Homo sapien
tagtacccgaggcacgttctctctg

SEQ ID NO: 1192588 - DNA, 25 bp, Homo sapien
taagaagtacaaatactggttgact

SEQ ID NO: 1192589 - DNA, 25 bp, Homo sapien
tcacggtagataagggtaggagcaa

SEQ ID NO: 1192590 - DNA, 25 bp, Homo sapien
ctgggatagctgtcacggtagataa

SEQ ID NO: 1192591 - DNA, 25 bp, Homo sapien
ttgactgtaggtattggaacagtgc

SEQ ID NO: 1192592 - DNA, 25 bp, Homo sapien
aaacttcatagcgacataaccccat

SEQ ID NO: 1192593 - DNA, 25 bp, Homo sapien
acttcatagcgacataaccccatct

SEQ ID NO: 1192594 - DNA, 25 bp, Homo sapien
ctgtgcaaacttcatagcgacataa

SEQ ID NO: 1192595 - DNA, 25 bp, Homo sapien
tgcaaacttcatagcgacataaccc

SEQ ID NO: 1192596 - DNA, 25 bp, Homo sapien
taataacgatggcttaataagatgg

SEQ ID NO: 1192597 - DNA, 25 bp, Homo sapien
aaagtacagatgtgacccttacagt

SEQ ID NO: 1192598 - DNA, 25 bp, Homo sapien
ttagaagagcttactcttggaacct

SEQ ID NO: 1192599 - DNA, 25 bp, Homo sapien
cagtaatgttcgcatatgtattcca

SEQ ID NO: 1192600 - DNA, 25 bp, Homo sapien
gggcacaaagcctttcaaagatgta

SEQ ID NO: 1192601 - DNA, 25 bp, Homo sapien
cctgtttgatattccgaaacaaggg

SEQ ID NO: 1192602 - DNA, 25 bp, Homo sapien
agttaaatacacataggaccagaac

SEQ ID NO: 1192603 - DNA, 25 bp, Homo sapien
accagaacacgagcgctgaagggct

SEQ ID NO: 1192604 - DNA, 25 bp, Homo sapien
caagatgggcatagatgtatagaag

SEQ ID NO: 1192605 - DNA, 25 bp, Homo sapien
acctcgtgaatttatgcatgaccaa

SEQ ID NO: 1192606 - DNA, 25 bp, Homo sapien
aatagctttctatttacctcgtgaa

SEQ ID NO: 1192607 - DNA, 25 bp, Homo sapien
ggcaaagcaaaggtgctcataggca

SEQ ID NO: 1192608 - DNA, 25 bp, Homo sapien
catcctgtcaccaaagcgtaacatc

SEQ ID NO: 1192609 - DNA, 25 bp, Homo sapien
gtcaccaaagcgtaacatctcagca

SEQ ID NO: 1192610 - DNA, 25 bp, Homo sapien
tcagcaaaggcattgagccagcagt

SEQ ID NO: 1192611 - DNA, 25 bp, Homo sapien
gagccagcagtgcaaaaaggcaaaa

SEQ ID NO: 1192612 - DNA, 25 bp, Homo sapien
gagtatgacgtggagttccaccaat

SEQ ID NO: 1192613 - DNA, 25 bp, Homo sapien
catagtaatatagccagtcatggac

SEQ ID NO: 1192614 - DNA, 25 bp, Homo sapien
tctataatagttggagtatgacgtg

SEQ ID NO: 1192615 - DNA, 25 bp, Homo sapien
cagagaaagtccttgtaagcatagt

SEQ ID NO: 1192616 - DNA, 25 bp, Homo sapien
aaggcatattcgtgtactacagcag

SEQ ID NO: 1192617 - DNA, 25 bp, Homo sapien
gagcacgaagagcacgggatagaaa

SEQ ID NO: 1192618 - DNA, 25 bp, Homo sapien
gacagctaacatggcagcagatttg

SEQ ID NO: 1192619 - DNA, 25 bp, Homo sapien
cagatacagcaaagacagctaacat

SEQ ID NO: 1192620 - DNA, 25 bp, Homo sapien
cgtgcataccattcttgagaataaa

SEQ ID NO: 1192621 - DNA, 25 bp, Homo sapien
cagaacattccaaatcggctttttc

SEQ ID NO: 1192622 - DNA, 25 bp, Homo sapien
tgagaataaaagcagagtaagactc

SEQ ID NO: 1192623 - DNA, 25 bp, Homo sapien
tttcagaggacagtgctgacgtgca

SEQ ID NO: 1192624 - DNA, 25 bp, Homo sapien
ctaaaacacgtaacgacaagtccag

SEQ ID NO: 1192625 - DNA, 25 bp, Homo sapien
cacgtaacgacaagtccaggaacgt

SEQ ID NO: 1192626 - DNA, 25 bp, Homo sapien
cgtggccggacataatccaaaaatg

SEQ ID NO: 1192627 - DNA, 25 bp, Homo sapien
gtccaggaacgtggccggacataat

SEQ ID NO: 1192628 - DNA, 25 bp, Homo sapien
catctgtaaagcctggagtggtcca

SEQ ID NO: 1192629 - DNA, 25 bp, Homo sapien
gggagctacccaatcttcagtgaca

SEQ ID NO: 1192630 - DNA, 25 bp, Homo sapien
ttcagctgttagtcggtcttctccc

SEQ ID NO: 1192631 - DNA, 25 bp, Homo sapien
gcttaagtgtacaagactccagtga

SEQ ID NO: 1192632 - DNA, 25 bp, Homo sapien
gattaatacttatggtacagactca

SEQ ID NO: 1192633 - DNA, 25 bp, Homo sapien
ggtacagactcactagtctgcaaaa

SEQ ID NO: 1192634 - DNA, 25 bp, Homo sapien
tgatcactttaatatgagtggaggt

SEQ ID NO: 1192635 - DNA, 25 bp, Homo sapien
aatatgagtggaggtgattaatact

SEQ ID NO: 1192636 - DNA, 25 bp, Homo sapien
acatactaccattaaaagtataact

SEQ ID NO: 1192637 - DNA, 25 bp, Homo sapien
tattccacctaaaaacatactacca

SEQ ID NO: 1192638 - DNA, 25 bp, Homo sapien
tttccttgaaaccaatcacatatta

SEQ ID NO: 1192639 - DNA, 25 bp, Homo sapien
gtataactgagcaaatgcagaagcc

SEQ ID NO: 1192640 - DNA, 25 bp, Homo sapien
tactgttgtgcagaacattactgcg

SEQ ID NO: 1192641 - DNA, 25 bp, Homo sapien
ttactgcgggaacatgcagagtacc

SEQ ID NO: 1192642 - DNA, 25 bp, Homo sapien
tggaccagtggtatcgtgagtaaga

SEQ ID NO: 1192643 - DNA, 25 bp, Homo sapien
taagatacgtgattaagctggatac

SEQ ID NO: 1192644 - DNA, 25 bp, Homo sapien
aaagattggcttgctcataaccagg

SEQ ID NO: 1192645 - DNA, 25 bp, Homo sapien
tgttgcaatcttgggcaggaaaatc

SEQ ID NO: 1192646 - DNA, 25 bp, Homo sapien
taaccaggtctcagcgcaatctgtc

SEQ ID NO: 1192647 - DNA, 25 bp, Homo sapien
tagaaagtgaccattccttgaagtg

SEQ ID NO: 1192648 - DNA, 25 bp, Homo sapien
taaattctaacatgaggcaagcaac

SEQ ID NO: 1192649 - DNA, 25 bp, Homo sapien
tcacacataaaggtactagaaggtc

SEQ ID NO: 1192650 - DNA, 25 bp, Homo sapien
cctgcaaagttttagtatgtgaatc

SEQ ID NO: 1192651 - DNA, 25 bp, Homo sapien
gaaaataattttcgccacaatagca

SEQ ID NO: 1192652 - DNA, 25 bp, Homo sapien
catatgtagcattgttatgtagtat

SEQ ID NO: 1192653 - DNA, 25 bp, Homo sapien
tgtagcattgttatgtagtattaca

SEQ ID NO: 1192654 - DNA, 25 bp, Homo sapien
accatatgtagcattgttatgtagt

SEQ ID NO: 1192655 - DNA, 25 bp, Homo sapien
gcataagattagtaagcaagtcact

SEQ ID NO: 1192656 - DNA, 25 bp, Homo sapien
caaaagtcaaatccttatataaact

SEQ ID NO: 1192657 - DNA, 25 bp, Homo sapien
agtcaaatccttatataaacttcac

SEQ ID NO: 1192658 - DNA, 25 bp, Homo sapien
tacaaaagtcaaatccttatataaa

SEQ ID NO: 1192659 - DNA, 25 bp, Homo sapien
caaatccttatataaacttcaccca

SEQ ID NO: 1192660 - DNA, 25 bp, Homo sapien
gatatgcactcgtgaaattaaccca

SEQ ID NO: 1192661 - DNA, 25 bp, Homo sapien
cagatttacatgacccttctggtgc

SEQ ID NO: 1192662 - DNA, 25 bp, Homo sapien
taaagtttatcactccattagggct

SEQ ID NO: 1192663 - DNA, 25 bp, Homo sapien
caggaatctgctgcattaccccaaa

SEQ ID NO: 1192664 - DNA, 25 bp, Homo sapien
gacaatccctacaccctcttggagt

SEQ ID NO: 1192665 - DNA, 25 bp, Homo sapien
taatcccgccgttgtcacggaatcc

SEQ ID NO: 1192666 - DNA, 25 bp, Homo sapien
taagtcacagcataggttcagtagc

SEQ ID NO: 1192667 - DNA, 25 bp, Homo sapien
tttgtcgtcatagaaacccagggcc

SEQ ID NO: 1192668 - DNA, 25 bp, Homo sapien
tagtcctccggaaagctaatttaga

SEQ ID NO: 1192669 - DNA, 25 bp, Homo sapien
aatttagacacaaatcagcgccgca

SEQ ID NO: 1192670 - DNA, 25 bp, Homo sapien
ccttccttggctacagacactttta

SEQ ID NO: 1192671 - DNA, 25 bp, Homo sapien
gggcgttttcgggagagacataata

SEQ ID NO: 1192672 - DNA, 25 bp, Homo sapien
tttttctcctttagctcaggaagtc

SEQ ID NO: 1192673 - DNA, 25 bp, Homo sapien
gaaggagttttgaacgatccaccat

SEQ ID NO: 1192674 - DNA, 25 bp, Homo sapien
agaagaacttctttgggaatgaact

SEQ ID NO: 1192675 - DNA, 25 bp, Homo sapien
gaacttctttgggaatgaactcatt

SEQ ID NO: 1192676 - DNA, 25 bp, Homo sapien
aagaacttctttgggaatgaactca

SEQ ID NO: 1192677 - DNA, 25 bp, Homo sapien
gaagaacttctttgggaatgaactc

SEQ ID NO: 1192678 - DNA, 25 bp, Homo sapien
caggacaaggaccagcattggccgc

SEQ ID NO: 1192679 - DNA, 25 bp, Homo sapien
caaggaccagcattggccgcatagg

SEQ ID NO: 1192680 - DNA, 25 bp, Homo sapien
agcattggccgcataggtcagagaa

SEQ ID NO: 1192681 - DNA, 25 bp, Homo sapien
cagcattggccgcataggtcagaga

SEQ ID NO: 1192682 - DNA, 25 bp, Homo sapien
agacatggtctacaaggcgtggaag

SEQ ID NO: 1192683 - DNA, 25 bp, Homo sapien
tcctgtgagggagacgggatggtca

SEQ ID NO: 1192684 - DNA, 25 bp, Homo sapien
tttattccttcgaacagggtgatgc

SEQ ID NO: 1192685 - DNA, 25 bp, Homo sapien
gacgggatggtcaatcaggtatttg

SEQ ID NO: 1192686 - DNA, 25 bp, Homo sapien
acaatgacaccatcatgtgactgta

SEQ ID NO: 1192687 - DNA, 25 bp, Homo sapien
gactgtaatgaacgggccaaatgtg

SEQ ID NO: 1192688 - DNA, 25 bp, Homo sapien
gggacaaactgccttctccctagtc

SEQ ID NO: 1192689 - DNA, 25 bp, Homo sapien
tccctagtctgtcctttggcatatg

SEQ ID NO: 1192690 - DNA, 25 bp, Homo sapien
cctgtacttgacacaatatgaaatt

SEQ ID NO: 1192691 - DNA, 25 bp, Homo sapien
cttcaggaatcaaagtatctgttag

SEQ ID NO: 1192692 - DNA, 25 bp, Homo sapien
ggaatcaaagtatctgttagtgtct

SEQ ID NO: 1192693 - DNA, 25 bp, Homo sapien
tcatcataacactccaaacctgaaa

SEQ ID NO: 1192694 - DNA, 25 bp, Homo sapien
actatctgtgaggagagtagtgtat

SEQ ID NO: 1192695 - DNA, 25 bp, Homo sapien
ctatctgtgaggagagtagtgtatt

SEQ ID NO: 1192696 - DNA, 25 bp, Homo sapien
tatctgtgaggagagtagtgtattt

SEQ ID NO: 1192697 - DNA, 25 bp, Homo sapien
atctgtgaggagagtagtgtatttg

SEQ ID NO: 1192698 - DNA, 25 bp, Homo sapien
gctgggccacttctactcttttatt

SEQ ID NO: 1192699 - DNA, 25 bp, Homo sapien
acaccagccctctctagcatagtat

SEQ ID NO: 1192700 - DNA, 25 bp, Homo sapien
tcagctgggccacttctactctttt

SEQ ID NO: 1192701 - DNA, 25 bp, Homo sapien
tctagcatagtatccatcacatcat

SEQ ID NO: 1192702 - DNA, 25 bp, Homo sapien
tgtcgaataagttcatgaaatatca

SEQ ID NO: 1192703 - DNA, 25 bp, Homo sapien
tagacagaagttctcctctgtctgc

SEQ ID NO: 1192704 - DNA, 25 bp, Homo sapien
acagtccacactgacttgtcgaata

SEQ ID NO: 1192705 - DNA, 25 bp, Homo sapien
tatcatgttgtaaatggtctgttcc

SEQ ID NO: 1192706 - DNA, 25 bp, Homo sapien
ggtcaagcatttgcacatacctctc

SEQ ID NO: 1192707 - DNA, 25 bp, Homo sapien
aatcaatcatctgccgagcaatctg

SEQ ID NO: 1192708 - DNA, 25 bp, Homo sapien
cgctgagttaccaagtctttgtaga

SEQ ID NO: 1192709 - DNA, 25 bp, Homo sapien
cgctggtccatcactcgctgagtta

SEQ ID NO: 1192710 - DNA, 25 bp, Homo sapien
catgtgcccgaactagacacagttc

SEQ ID NO: 1192711 - DNA, 25 bp, Homo sapien
cttgtgccaaatccttgtgggcttt

SEQ ID NO: 1192712 - DNA, 25 bp, Homo sapien
ttaatttcacatcatgtgcccgaac

SEQ ID NO: 1192713 - DNA, 25 bp, Homo sapien
agagcttgtgccaaatccttgtggg

SEQ ID NO: 1192714 - DNA, 25 bp, Homo sapien
gctgagctccagatatctctttctg

SEQ ID NO: 1192715 - DNA, 25 bp, Homo sapien
gggccaattcatatgtggctgagct

SEQ ID NO: 1192716 - DNA, 25 bp, Homo sapien
tctgccactaactttttcatatcat

SEQ ID NO: 1192717 - DNA, 25 bp, Homo sapien
ctctttctgccactaactttttcat

SEQ ID NO: 1192718 - DNA, 25 bp, Homo sapien
tctagccaatatgactctatttctt

SEQ ID NO: 1192719 - DNA, 25 bp, Homo sapien
agcagtatgatgaaatgcttagtgt

SEQ ID NO: 1192720 - DNA, 25 bp, Homo sapien
gtcttctagccaatatgactctatt

SEQ ID NO: 1192721 - DNA, 25 bp, Homo sapien
cagtatgatgaaatgcttagtgtat

SEQ ID NO: 1192722 - DNA, 25 bp, Homo sapien
tgtctcgcttgtagactcttccatt

SEQ ID NO: 1192723 - DNA, 25 bp, Homo sapien
taagcccatccttaacaattttcag

SEQ ID NO: 1192724 - DNA, 25 bp, Homo sapien
tgccatttgataagcccatccttaa

SEQ ID NO: 1192725 - DNA, 25 bp, Homo sapien
tcagtgtctcgcttgtagactcttc

SEQ ID NO: 1192726 - DNA, 25 bp, Homo sapien
ttctgccactgtttgaagtctaaaa

SEQ ID NO: 1192727 - DNA, 25 bp, Homo sapien
cttctgccactgtttgaagtctaaa

SEQ ID NO: 1192728 - DNA, 25 bp, Homo sapien
gtagaacatccccagtaaactcttc

SEQ ID NO: 1192729 - DNA, 25 bp, Homo sapien
gagagtatcgtattttgacagtaga

SEQ ID NO: 1192730 - DNA, 25 bp, Homo sapien
ttttatgccgattaaatatcccaag

SEQ ID NO: 1192731 - DNA, 25 bp, Homo sapien
tcccaagcccaatatctgcccagtt

SEQ ID NO: 1192732 - DNA, 25 bp, Homo sapien
tcaaagagttacactgtcagttggt

SEQ ID NO: 1192733 - DNA, 25 bp, Homo sapien
caaagagttacactgtcagttggtg

SEQ ID NO: 1192734 - DNA, 25 bp, Homo sapien
tgcggtggattatgcctctaattcc

SEQ ID NO: 1192735 - DNA, 25 bp, Homo sapien
ggtgcggtggattatgcctctaatt

SEQ ID NO: 1192736 - DNA, 25 bp, Homo sapien
gtgcggtggattatgcctctaattc

SEQ ID NO: 1192737 - DNA, 25 bp, Homo sapien
aattagccaggagtcacagcatgca

SEQ ID NO: 1192738 - DNA, 25 bp, Homo sapien
cagaatgtcagccagttagcaacaa

SEQ ID NO: 1192739 - DNA, 25 bp, Homo sapien
tccaaatacaaggtatccatggctg

SEQ ID NO: 1192740 - DNA, 25 bp, Homo sapien
tagttaccacatgcctgaaagtcaa

SEQ ID NO: 1192741 - DNA, 25 bp, Homo sapien
caagagaactaatcaaacttggaag

SEQ ID NO: 1192742 - DNA, 25 bp, Homo sapien
ccagtaaggtttaacaatatatcca

SEQ ID NO: 1192743 - DNA, 25 bp, Homo sapien
catctatgtgctgtggaacaatacc

SEQ ID NO: 1192744 - DNA, 25 bp, Homo sapien
cattcttcaagaggcgtatcaggaa

SEQ ID NO: 1192745 - DNA, 25 bp, Homo sapien
tgaagtgtattgcaacaaaccttta

SEQ ID NO: 1192746 - DNA, 25 bp, Homo sapien
caaacctttaggaaaattatctcag

SEQ ID NO: 1192747 - DNA, 25 bp, Homo sapien
taggaaaattatctcagaacaaaag

SEQ ID NO: 1192748 - DNA, 25 bp, Homo sapien
tcagaacaaaagaaacctatgggaa

SEQ ID NO: 1192749 - DNA, 25 bp, Homo sapien
gttaaatatatacgcttggagtacc

SEQ ID NO: 1192750 - DNA, 25 bp, Homo sapien
tcaatgttaccgttgttaatttcat

SEQ ID NO: 1192751 - DNA, 25 bp, Homo sapien
gctgaagttcaatgttaccgttgtt

SEQ ID NO: 1192752 - DNA, 25 bp, Homo sapien
tgaagttcaatgttaccgttgttaa

SEQ ID NO: 1192753 - DNA, 25 bp, Homo sapien
ggtgctgaagttcaatgttaccgtt

SEQ ID NO: 1192754 - DNA, 25 bp, Homo sapien
caactttcttgtacgttgatgatct

SEQ ID NO: 1192755 - DNA, 25 bp, Homo sapien
cttggaggtttgattcaggtataag

SEQ ID NO: 1192756 - DNA, 25 bp, Homo sapien
taatggcatttcatctatcagctcc

SEQ ID NO: 1192757 - DNA, 25 bp, Homo sapien
agaaacattgctggggaacagtgtg

SEQ ID NO: 1192758 - DNA, 25 bp, Homo sapien
tagctggagtattggtacaacttcc

SEQ ID NO: 1192759 - DNA, 25 bp, Homo sapien
ttgtcagttcaatcgcatctagctc

SEQ ID NO: 1192760 - DNA, 25 bp, Homo sapien
tcagcaagtttaccatccactggat

SEQ ID NO: 1192761 - DNA, 25 bp, Homo sapien
cctccaactttaggagacagtcttg

SEQ ID NO: 1192762 - DNA, 25 bp, Homo sapien
tgtgtgagttagtggatttactcag

SEQ ID NO: 1192763 - DNA, 25 bp, Homo sapien
aacttatccacctcataaaggtctt

SEQ ID NO: 1192764 - DNA, 25 bp, Homo sapien
cttcaacttatccacctcataaagg

SEQ ID NO: 1192765 - DNA, 25 bp, Homo sapien
ttttgtgtgagttagtggatttact

SEQ ID NO: 1192766 - DNA, 25 bp, Homo sapien
aatttttctgcctttgatattagaa

SEQ ID NO: 1192767 - DNA, 25 bp, Homo sapien
ttcaagtagccgctctatttcttca

SEQ ID NO: 1192768 - DNA, 25 bp, Homo sapien
agccgctctatttcttcatatgtca

SEQ ID NO: 1192769 - DNA, 25 bp, Homo sapien
ggcaagagcatgtgttgatccattc

SEQ ID NO: 1192770 - DNA, 25 bp, Homo sapien
ctttaaaagactcgtctatttcagg

SEQ ID NO: 1192771 - DNA, 25 bp, Homo sapien
gactcgtctatttcaggctcaatga

SEQ ID NO: 1192772 - DNA, 25 bp, Homo sapien
aaaagactcgtctatttcaggctca

SEQ ID NO: 1192773 - DNA, 25 bp, Homo sapien
ttctttaaaagactcgtctatttca

SEQ ID NO: 1192774 - DNA, 25 bp, Homo sapien
tgtttcaaatagaggtttggaatga

SEQ ID NO: 1192775 - DNA, 25 bp, Homo sapien
ccaatgaatcgaatgagtttttcct

SEQ ID NO: 1192776 - DNA, 25 bp, Homo sapien
caaatagaggtttggaatgaacatt

SEQ ID NO: 1192777 - DNA, 25 bp, Homo sapien
tcttctccaatgaatcgaatgagtt

SEQ ID NO: 1192778 - DNA, 25 bp, Homo sapien
agcctgccacaatcacagcatgatc

SEQ ID NO: 1192779 - DNA, 25 bp, Homo sapien
ggtgggctaaagcaagcctgcatct

SEQ ID NO: 1192780 - DNA, 25 bp, Homo sapien
cagcatgatccggtgggctaaagca

SEQ ID NO: 1192781 - DNA, 25 bp, Homo sapien
caatcacagcatgatccggtgggct

SEQ ID NO: 1192782 - DNA, 25 bp, Homo sapien
tatttttgggccaatgtaccttgct

SEQ ID NO: 1192783 - DNA, 25 bp, Homo sapien
aatgtaccttgcttagctgactctc

SEQ ID NO: 1192784 - DNA, 25 bp, Homo sapien
cctgcatatgttcaattacagccat

SEQ ID NO: 1192785 - DNA, 25 bp, Homo sapien
tacagccattgcttcaagatatttt

SEQ ID NO: 1192786 - DNA, 25 bp, Homo sapien
tgtcagagtagaaatcatgctgcta

SEQ ID NO: 1192787 - DNA, 25 bp, Homo sapien
tagaaataagggaagcaacagcatc

SEQ ID NO: 1192788 - DNA, 25 bp, Homo sapien
catcaatgattaactgagaactggg

SEQ ID NO: 1192789 - DNA, 25 bp, Homo sapien
gcccaggagcgactctgaatgctaa

SEQ ID NO: 1192790 - DNA, 25 bp, Homo sapien
ttgatttcgaaactcattttctaaa

SEQ ID NO: 1192791 - DNA, 25 bp, Homo sapien
tgatttcgaaactcattttctaaaa

SEQ ID NO: 1192792 - DNA, 25 bp, Homo sapien
catgactaattcctctagatcttta

SEQ ID NO: 1192793 - DNA, 25 bp, Homo sapien
ttctttagactcctttcttgatgtc

SEQ ID NO: 1192794 - DNA, 25 bp, Homo sapien
ttggagattttgaggaattttctgc

SEQ ID NO: 1192795 - DNA, 25 bp, Homo sapien
tttataagggtatgatgaagtttct

SEQ ID NO: 1192796 - DNA, 25 bp, Homo sapien
tttctggagactctgtttaggtccc

SEQ ID NO: 1192797 - DNA, 25 bp, Homo sapien
ctgccgtgagtaggaggcagctctc

SEQ ID NO: 1192798 - DNA, 25 bp, Homo sapien
gctaactctaaggatggatttaacc

SEQ ID NO: 1192799 - DNA, 25 bp, Homo sapien
gctttgcaaggcgtctcatcttcca

SEQ ID NO: 1192800 - DNA, 25 bp, Homo sapien
gagagcaccgtccttgcatggtacc

SEQ ID NO: 1192801 - DNA, 25 bp, Homo sapien
gaagtgagctaatgcacctgactcc

SEQ ID NO: 1192802 - DNA, 25 bp, Homo sapien
tccagatttaatgttgagagcaccg

SEQ ID NO: 1192803 - DNA, 25 bp, Homo sapien
cagccatcgctgtgacttaaagaga

SEQ ID NO: 1192804 - DNA, 25 bp, Homo sapien
tccaaacctgttgagccactaaatc

SEQ ID NO: 1192805 - DNA, 25 bp, Homo sapien
taatgtgactgtaaaggggcctgcc

SEQ ID NO: 1192806 - DNA, 25 bp, Homo sapien
aggggcctgccatagaaaagtcaca

SEQ ID NO: 1192807 - DNA, 25 bp, Homo sapien
catgcctgagggagacactctgtcc

SEQ ID NO: 1192808 - DNA, 25 bp, Homo sapien
gttcagcttcgatacctccacaccc

SEQ ID NO: 1192809 - DNA, 25 bp, Homo sapien
tgtcaggcacccctgctgccgttca

SEQ ID NO: 1192810 - DNA, 25 bp, Homo sapien
ctgccgttcagcttcgatacctcca

SEQ ID NO: 1192811 - DNA, 25 bp, Homo sapien
cagagaagccttccactgtggtttt

SEQ ID NO: 1192812 - DNA, 25 bp, Homo sapien
gtgcttgtctgctgagtcatactgc

SEQ ID NO: 1192813 - DNA, 25 bp, Homo sapien
tcgtcacatgttttctagatgattg

SEQ ID NO: 1192814 - DNA, 25 bp, Homo sapien
ctttcgtcacatgttttctagatga

SEQ ID NO: 1192815 - DNA, 25 bp, Homo sapien
agtgcttgtctgctgagtcatactg

SEQ ID NO: 1192816 - DNA, 25 bp, Homo sapien
tcaggcatgacagcaagaggcaaag

SEQ ID NO: 1192817 - DNA, 25 bp, Homo sapien
cacaagttttagagggacaaccacg

SEQ ID NO: 1192818 - DNA, 25 bp, Homo sapien
taaagtgtgttaatagtcccctgac

SEQ ID NO: 1192819 - DNA, 25 bp, Homo sapien
cattcattaggcactgggcagaagc

SEQ ID NO: 1192820 - DNA, 25 bp, Homo sapien
ctttttcagtaaagatgtgaggttg

SEQ ID NO: 1192821 - DNA, 25 bp, Homo sapien
ttcagtaaagatgtgaggttgccag

SEQ ID NO: 1192822 - DNA, 25 bp, Homo sapien
cagtaaagatgtgaggttgccagct

SEQ ID NO: 1192823 - DNA, 25 bp, Homo sapien
ttttcagtaaagatgtgaggttgcc

SEQ ID NO: 1192824 - DNA, 25 bp, Homo sapien
tttattatcagtagtgtggctcttc

SEQ ID NO: 1192825 - DNA, 25 bp, Homo sapien
ggctcttcaagccattgttcaaatt

SEQ ID NO: 1192826 - DNA, 25 bp, Homo sapien
ttatgcaatacattaagcgttgttc

SEQ ID NO: 1192827 - DNA, 25 bp, Homo sapien
gggcttagattatatcctaagcgga

SEQ ID NO: 1192828 - DNA, 25 bp, Homo sapien
aacacaatcactataacatttggac

SEQ ID NO: 1192829 - DNA, 25 bp, Homo sapien
cataacacaatcactataacatttg

SEQ ID NO: 1192830 - DNA, 25 bp, Homo sapien
cacaatcactataacatttggacaa

SEQ ID NO: 1192831 - DNA, 25 bp, Homo sapien
caatcactataacatttggacaaat

SEQ ID NO: 1192832 - DNA, 25 bp, Homo sapien
tggccaccagggtttaggcatgctc

SEQ ID NO: 1192833 - DNA, 25 bp, Homo sapien
ttcttctttccacaggttgccttgg

SEQ ID NO: 1192834 - DNA, 25 bp, Homo sapien
tgcacagatatttattgggtggcac

SEQ ID NO: 1192835 - DNA, 25 bp, Homo sapien
ggcaccatgcaagttaaacaactct

SEQ ID NO: 1192836 - DNA, 25 bp, Homo sapien
gaatatcaatgagcgttccttagag

SEQ ID NO: 1192837 - DNA, 25 bp, Homo sapien
gcgagattctcatagcttcaatgtc

SEQ ID NO: 1192838 - DNA, 25 bp, Homo sapien
aaattaatatgttggtagagcagca

SEQ ID NO: 1192839 - DNA, 25 bp, Homo sapien
tacctggtcaaatgtgtgtaaacaa

SEQ ID NO: 1192840 - DNA, 25 bp, Homo sapien
actgttcctctccacgaaaatctgc

SEQ ID NO: 1192841 - DNA, 25 bp, Homo sapien
gtaaaagatgtattcgttttgaaga

SEQ ID NO: 1192842 - DNA, 25 bp, Homo sapien
tgttcctctccacgaaaatctgcag

SEQ ID NO: 1192843 - DNA, 25 bp, Homo sapien
aaaagatgtattcgttttgaagaga

SEQ ID NO: 1192844 - DNA, 25 bp, Homo sapien
tcaggtcgttggagcacttccttac

SEQ ID NO: 1192845 - DNA, 25 bp, Homo sapien
gggtccccttcatatttaatcagca

SEQ ID NO: 1192846 - DNA, 25 bp, Homo sapien
gacatcttcgatggcaatgacgtgc

SEQ ID NO: 1192847 - DNA, 25 bp, Homo sapien
tataactgcatccaccgacatggca

SEQ ID NO: 1192848 - DNA, 25 bp, Homo sapien
gttcagcccatacatagcacacgtc

SEQ ID NO: 1192849 - DNA, 25 bp, Homo sapien
ccatacatagcacacgtctcatagt

SEQ ID NO: 1192850 - DNA, 25 bp, Homo sapien
agcccatacatagcacacgtctcat

SEQ ID NO: 1192851 - DNA, 25 bp, Homo sapien
tacatagcacacgtctcatagtacg

SEQ ID NO: 1192852 - DNA, 25 bp, Homo sapien
ccttgtggcaacaatcttctgggca

SEQ ID NO: 1192853 - DNA, 25 bp, Homo sapien
gcttgtgaatgggtgtgggcgtgtt

SEQ ID NO: 1192854 - DNA, 25 bp, Homo sapien
gtgaatgggtgtgggcgtgttggca

SEQ ID NO: 1192855 - DNA, 25 bp, Homo sapien
ggaacatccatctgaagttccttct

SEQ ID NO: 1192856 - DNA, 25 bp, Homo sapien
ggaggaacatccatctgaagttcct

SEQ ID NO: 1192857 - DNA, 25 bp, Homo sapien
ggtcagtctccttaccatggacatt

SEQ ID NO: 1192858 - DNA, 25 bp, Homo sapien
gaaggtcagtctccttaccatggac

SEQ ID NO: 1192859 - DNA, 25 bp, Homo sapien
cagaaggtcagtctccttaccatgg

SEQ ID NO: 1192860 - DNA, 25 bp, Homo sapien
gttctcagaaggtcagtctccttac

SEQ ID NO: 1192861 - DNA, 25 bp, Homo sapien
gactccactggttggctctggagac

SEQ ID NO: 1192862 - DNA, 25 bp, Homo sapien
gtcactgctaatggccgagtttgca

SEQ ID NO: 1192863 - DNA, 25 bp, Homo sapien
tggttttagtcctggagatgggcac

SEQ ID NO: 1192864 - DNA, 25 bp, Homo sapien
gtaggagtgctggtgcatgccatct

SEQ ID NO: 1192865 - DNA, 25 bp, Homo sapien
gagttactgcgactggagcatacag

SEQ ID NO: 1192866 - DNA, 25 bp, Homo sapien
gactggagcatacagagtcacccac

SEQ ID NO: 1192867 - DNA, 25 bp, Homo sapien
tgctggagttactgcgactggagca

SEQ ID NO: 1192868 - DNA, 25 bp, Homo sapien
tactgcgactggagcatacagagtc

SEQ ID NO: 1192869 - DNA, 25 bp, Homo sapien
ggccatcagctttgaagttgctggt

SEQ ID NO: 1192870 - DNA, 25 bp, Homo sapien
agcagtgtcagacaggccatcagct

SEQ ID NO: 1192871 - DNA, 25 bp, Homo sapien
cagtgtcagacaggccatcagcttt

SEQ ID NO: 1192872 - DNA, 25 bp, Homo sapien
caggccatcagctttgaagttgctg

SEQ ID NO: 1192873 - DNA, 25 bp, Homo sapien
tccgtgcatgtgtcagattgactgc

SEQ ID NO: 1192874 - DNA, 25 bp, Homo sapien
gagttccgtgcatgtgtcagattga

SEQ ID NO: 1192875 - DNA, 25 bp, Homo sapien
cacagtgggagttccgtgcatgtgt

SEQ ID NO: 1192876 - DNA, 25 bp, Homo sapien
tgggagttccgtgcatgtgtcagat

SEQ ID NO: 1192877 - DNA, 25 bp, Homo sapien
gggtgccaagattccaatggattcc

SEQ ID NO: 1192878 - DNA, 25 bp, Homo sapien
cacttgatgcacgtgagcactccca

SEQ ID NO: 1192879 - DNA, 25 bp, Homo sapien
tcctaagcacttgatgcacgtgagc

SEQ ID NO: 1192880 - DNA, 25 bp, Homo sapien
taagcacttgatgcacgtgagcact

SEQ ID NO: 1192881 - DNA, 25 bp, Homo sapien
gccagtcatccaggtccagagatca

SEQ ID NO: 1192882 - DNA, 25 bp, Homo sapien
agtcatccaggtccagagatcagac

SEQ ID NO: 1192883 - DNA, 25 bp, Homo sapien
ctggccagtcatccaggtccagaga

SEQ ID NO: 1192884 - DNA, 25 bp, Homo sapien
tggccagtcatccaggtccagagat

SEQ ID NO: 1192885 - DNA, 25 bp, Homo sapien
ctaagggtttcatccgcccctggct

SEQ ID NO: 1192886 - DNA, 25 bp, Homo sapien
gacgctgttgaatatctcgttccca

SEQ ID NO: 1192887 - DNA, 25 bp, Homo sapien
cttgtggagtctactaagggtttca

SEQ ID NO: 1192888 - DNA, 25 bp, Homo sapien
gaatatctcgttcccaatggatgac

SEQ ID NO: 1192889 - DNA, 25 bp, Homo sapien
caggatggccatctgccggtcttcg

SEQ ID NO: 1192890 - DNA, 25 bp, Homo sapien
ccagatgcagtgcagtgcggccatc

SEQ ID NO: 1192891 - DNA, 25 bp, Homo sapien
ctgctcgtagttggcatggatccat

SEQ ID NO: 1192892 - DNA, 25 bp, Homo sapien
cggtcttcgtctgcggtggcccgaa

SEQ ID NO: 1192893 - DNA, 25 bp, Homo sapien
gacttgacacataccatcataaggg

SEQ ID NO: 1192894 - DNA, 25 bp, Homo sapien
caagtgagtatgctgcgaggctgcc

SEQ ID NO: 1192895 - DNA, 25 bp, Homo sapien
tcacattgtggcgatcaccggagca

SEQ ID NO: 1192896 - DNA, 25 bp, Homo sapien
tcagtgctcgttgggcagccatact

SEQ ID NO: 1192897 - DNA, 25 bp, Homo sapien
ggtcttggttagcaaaaactgtatc

SEQ ID NO: 1192898 - DNA, 25 bp, Homo sapien
aaactgtatctgatctaaatcatgc

SEQ ID NO: 1192899 - DNA, 25 bp, Homo sapien
aactgtatctgatctaaatcatgct

SEQ ID NO: 1192900 - DNA, 25 bp, Homo sapien
gaatcagacgaggtactagcatgga

SEQ ID NO: 1192901 - DNA, 25 bp, Homo sapien
gaaggcagctgatgtctcaagcagc

SEQ ID NO: 1192902 - DNA, 25 bp, Homo sapien
gatactgtggcgatgggaatcagac

SEQ ID NO: 1192903 - DNA, 25 bp, Homo sapien
tgtctcaagcagctggatactgtgg

SEQ ID NO: 1192904 - DNA, 25 bp, Homo sapien
gaatcaacaaagaggcttaagcaca

SEQ ID NO: 1192905 - DNA, 25 bp, Homo sapien
taagggatgccatggtttggctgac

SEQ ID NO: 1192906 - DNA, 25 bp, Homo sapien
gctgccagcgcatgtgacttcgtgt

SEQ ID NO: 1192907 - DNA, 25 bp, Homo sapien
tatagttggtttggtagaatgagcc

SEQ ID NO: 1192908 - DNA, 25 bp, Homo sapien
tacgtcctccgacgcggtgggaaga

SEQ ID NO: 1192909 - DNA, 25 bp, Homo sapien
gctgcagcccttgaaccaatccaac

SEQ ID NO: 1192910 - DNA, 25 bp, Homo sapien
tgcagcccttgaaccaatccaacca

SEQ ID NO: 1192911 - DNA, 25 bp, Homo sapien
cttccaggatcccaggcgcctacgt

SEQ ID NO: 1192912 - DNA, 25 bp, Homo sapien
gttccagccccgagggcacgtggca

SEQ ID NO: 1192913 - DNA, 25 bp, Homo sapien
cgtggcaggtgggacggttgggcag

SEQ ID NO: 1192914 - DNA, 25 bp, Homo sapien
ggacggttgggcaggattagccgct

SEQ ID NO: 1192915 - DNA, 25 bp, Homo sapien
aggtgtgaggtccgccccagtctca

SEQ ID NO: 1192916 - DNA, 25 bp, Homo sapien
gaaggtagctgcgacggcggccccg

SEQ ID NO: 1192917 - DNA, 25 bp, Homo sapien
tccgaatcggcgcaggaaggtagct

SEQ ID NO: 1192918 - DNA, 25 bp, Homo sapien
gccctgctgccagtcacccgtcttg

SEQ ID NO: 1192919 - DNA, 25 bp, Homo sapien
tggtgcgggccgagtagagattagg

SEQ ID NO: 1192920 - DNA, 25 bp, Homo sapien
gtctctcggtgaccctcacgggagc

SEQ ID NO: 1192921 - DNA, 25 bp, Homo sapien
ccccaacgtctctcggtgaccctca

SEQ ID NO: 1192922 - DNA, 25 bp, Homo sapien
aacgtctctcggtgaccctcacggg

SEQ ID NO: 1192923 - DNA, 25 bp, Homo sapien
ctctcggtgaccctcacgggagcgg

SEQ ID NO: 1192924 - DNA, 25 bp, Homo sapien
cagaagtagtagtatgagggtgccc

SEQ ID NO: 1192925 - DNA, 25 bp, Homo sapien
ttcctgtcgggtgttggactccaac

SEQ ID NO: 1192926 - DNA, 25 bp, Homo sapien
tacaggtgtcaagaactctgcccct

SEQ ID NO: 1192927 - DNA, 25 bp, Homo sapien
tctccacctgcgttgattaagctac

SEQ ID NO: 1192928 - DNA, 25 bp, Homo sapien
gcagacattcctgtatacgctcttg

SEQ ID NO: 1192929 - DNA, 25 bp, Homo sapien
tatttccttccgcagacattcctgt

SEQ ID NO: 1192930 - DNA, 25 bp, Homo sapien
ccttccgcagacattcctgtatacg

SEQ ID NO: 1192931 - DNA, 25 bp, Homo sapien
cattcctgtatacgctcttgttcag

SEQ ID NO: 1192932 - DNA, 25 bp, Homo sapien
tacccaaggattcggagtggtagat

SEQ ID NO: 1192933 - DNA, 25 bp, Homo sapien
ttacagtaccacctgcaccggggca

SEQ ID NO: 1192934 - DNA, 25 bp, Homo sapien
accggggcagacacgaacaacatca

SEQ ID NO: 1192935 - DNA, 25 bp, Homo sapien
caataccagctccatagtggaccga

SEQ ID NO: 1192936 - DNA, 25 bp, Homo sapien
gagtttcgaagcttatggctgctcc

SEQ ID NO: 1192937 - DNA, 25 bp, Homo sapien
cattaagcacttcaaacatagagag

SEQ ID NO: 1192938 - DNA, 25 bp, Homo sapien
gaacaggagataacgccaacaggtc

SEQ ID NO: 1192939 - DNA, 25 bp, Homo sapien
ttcctcggtaaggtactcgccgatg

SEQ ID NO: 1192940 - DNA, 25 bp, Homo sapien
tggagtatgacccttgtttcattct

SEQ ID NO: 1192941 - DNA, 25 bp, Homo sapien
ggagtatgacccttgtttcattcta

SEQ ID NO: 1192942 - DNA, 25 bp, Homo sapien
tgtggagtatgacccttgtttcatt

SEQ ID NO: 1192943 - DNA, 25 bp, Homo sapien
gtggagtatgacccttgtttcattc

SEQ ID NO: 1192944 - DNA, 25 bp, Homo sapien
cagtgtgattcagtcttgaagtctc

SEQ ID NO: 1192945 - DNA, 25 bp, Homo sapien
gaagtctccactacatttaacttgg

SEQ ID NO: 1192946 - DNA, 25 bp, Homo sapien
tccatgctcattatttgcttcggtg

SEQ ID NO: 1192947 - DNA, 25 bp, Homo sapien
ttcggtggttccatgtttgaagtgg

SEQ ID NO: 1192948 - DNA, 25 bp, Homo sapien
cttaatctcatggtgaatgttacaa

SEQ ID NO: 1192949 - DNA, 25 bp, Homo sapien
tcatggtgaatgttacaataaggtc

SEQ ID NO: 1192950 - DNA, 25 bp, Homo sapien
atggtgaatgttacaataaggtctt

SEQ ID NO: 1192951 - DNA, 25 bp, Homo sapien
ttaatctcatggtgaatgttacaat

SEQ ID NO: 1192952 - DNA, 25 bp, Homo sapien
gttttggcaagtacatggctcccta

SEQ ID NO: 1192953 - DNA, 25 bp, Homo sapien
attcagcagaagcccctccaagttt

SEQ ID NO: 1192954 - DNA, 25 bp, Homo sapien
ttttggcaagtacatggctccctat

SEQ ID NO: 1192955 - DNA, 25 bp, Homo sapien
cagcagaagcccctccaagttttgg

SEQ ID NO: 1192956 - DNA, 25 bp, Homo sapien
ctgtgcaataactgatttgaatgtg

SEQ ID NO: 1192957 - DNA, 25 bp, Homo sapien
ggtccaatctgtgcaataactgatt

SEQ ID NO: 1192958 - DNA, 25 bp, Homo sapien
ctgaactgatagttcctccaggtcc

SEQ ID NO: 1192959 - DNA, 25 bp, Homo sapien
ttagttctgaactgatagttcctcc

SEQ ID NO: 1192960 - DNA, 25 bp, Homo sapien
ctcatactctccaagcagtttagaa

SEQ ID NO: 1192961 - DNA, 25 bp, Homo sapien
ttcttatccgcatcaaacactagta

SEQ ID NO: 1192962 - DNA, 25 bp, Homo sapien
tagaggcttcttatccgcatcaaac

SEQ ID NO: 1192963 - DNA, 25 bp, Homo sapien
gtgtcctttcctgaactcaacatgg

SEQ ID NO: 1192964 - DNA, 25 bp, Homo sapien
gaatgtcactaagagctccaacaag

SEQ ID NO: 1192965 - DNA, 25 bp, Homo sapien
taccaccagattaggcttcttgcaa

SEQ ID NO: 1192966 - DNA, 25 bp, Homo sapien
gaatttctaggtggactggagacac

SEQ ID NO: 1192967 - DNA, 25 bp, Homo sapien
ggcaattccatacagtctctttgac

SEQ ID NO: 1192968 - DNA, 25 bp, Homo sapien
tctctttgacagcagcagtagacaa

SEQ ID NO: 1192969 - DNA, 25 bp, Homo sapien
cccctatgagggaactggtgtctaa

SEQ ID NO: 1192970 - DNA, 25 bp, Homo sapien
gagtaactctgacgaatccctgcta

SEQ ID NO: 1192971 - DNA, 25 bp, Homo sapien
tatactccacaaagacccctatgag

SEQ ID NO: 1192972 - DNA, 25 bp, Homo sapien
tccctgctatagatccggatgtaga

SEQ ID NO: 1192973 - DNA, 25 bp, Homo sapien
tcaaattgtagaggcagaccagtgg

SEQ ID NO: 1192974 - DNA, 25 bp, Homo sapien
cagggccagcaattacactgccagt

SEQ ID NO: 1192975 - DNA, 25 bp, Homo sapien
attttaattttgcaccagggccagc

SEQ ID NO: 1192976 - DNA, 25 bp, Homo sapien
cagactacacattggtatgaggcca

SEQ ID NO: 1192977 - DNA, 25 bp, Homo sapien
caacagagatgtcccggctgaataa

SEQ ID NO: 1192978 - DNA, 25 bp, Homo sapien
ggataatgacccgataccaccactt

SEQ ID NO: 1192979 - DNA, 25 bp, Homo sapien
tgtttctcaaggactcgatggataa

SEQ ID NO: 1192980 - DNA, 25 bp, Homo sapien
tgacatatcgatcagaaaccagctg

SEQ ID NO: 1192981 - DNA, 25 bp, Homo sapien
acaagggatagcctgagctggaagc

SEQ ID NO: 1192982 - DNA, 25 bp, Homo sapien
caagggatagcctgagctggaagct

SEQ ID NO: 1192983 - DNA, 25 bp, Homo sapien
aagggatagcctgagctggaagctt

SEQ ID NO: 1192984 - DNA, 25 bp, Homo sapien
aacaagggatagcctgagctggaag

SEQ ID NO: 1192985 - DNA, 25 bp, Homo sapien
gcaaaatagctttcgatgtccagtg

SEQ ID NO: 1192986 - DNA, 25 bp, Homo sapien
cttcgtttgaggatgtgtcacacaa

SEQ ID NO: 1192987 - DNA, 25 bp, Homo sapien
ggcatacaatagcatggccctctgt

SEQ ID NO: 1192988 - DNA, 25 bp, Homo sapien
taatggcttcaaaccgcacaacttc

SEQ ID NO: 1192989 - DNA, 25 bp, Homo sapien
ggataacccagttctgtcaagacaa

SEQ ID NO: 1192990 - DNA, 25 bp, Homo sapien
tcgtgtataaagctaaagggttgag

SEQ ID NO: 1192991 - DNA, 25 bp, Homo sapien
tcggtcttcattaaaatagtgctgc

SEQ ID NO: 1192992 - DNA, 25 bp, Homo sapien
gccctccactggatgtcgtgtataa

SEQ ID NO: 1192993 - DNA, 25 bp, Homo sapien
ttcttcaaagctcttattacaggtt

SEQ ID NO: 1192994 - DNA, 25 bp, Homo sapien
ggttggaccactttggatcttcttc

SEQ ID NO: 1192995 - DNA, 25 bp, Homo sapien
gatcgtttggttctgggttggacca

SEQ ID NO: 1192996 - DNA, 25 bp, Homo sapien
aatggctcctttgactcagatttaa

SEQ ID NO: 1192997 - DNA, 25 bp, Homo sapien
ggtaaccagttctcatcccaaatat

SEQ ID NO: 1192998 - DNA, 25 bp, Homo sapien
ccaccaaggcttgcagtaaatagat

SEQ ID NO: 1192999 - DNA, 25 bp, Homo sapien
cccatcttagcctgtagaggtaacc

SEQ ID NO: 1193000 - DNA, 25 bp, Homo sapien
gactccaggcatggcattccagtgg

SEQ ID NO: 1193001 - DNA, 25 bp, Homo sapien
gcacccagtacttctggcttatgaa

SEQ ID NO: 1193002 - DNA, 25 bp, Homo sapien
tctggcttatgaacttctactttcg

SEQ ID NO: 1193003 - DNA, 25 bp, Homo sapien
tctactttcgttccatttacaaggc

SEQ ID NO: 1193004 - DNA, 25 bp, Homo sapien
ggctgccaagaatcatcccatgtat

SEQ ID NO: 1193005 - DNA, 25 bp, Homo sapien
catccactgcagttgttgaacaggg

SEQ ID NO: 1193006 - DNA, 25 bp, Homo sapien
tgttgggttcagactggctcccgtc

SEQ ID NO: 1193007 - DNA, 25 bp, Homo sapien
tacagaattcttccaatttgggcag

SEQ ID NO: 1193008 - DNA, 25 bp, Homo sapien
gagggcttttctgcggaatcatcca

SEQ ID NO: 1193009 - DNA, 25 bp, Homo sapien
cattctttaggatctctggtgagct

SEQ ID NO: 1193010 - DNA, 25 bp, Homo sapien
gtgcggcagcacctaaggcagcagt

SEQ ID NO: 1193011 - DNA, 25 bp, Homo sapien
tcctggatgtagctaaccgtgcggc

SEQ ID NO: 1193012 - DNA, 25 bp, Homo sapien
gcagcagtggctgtacttcgaggaa

SEQ ID NO: 1193013 - DNA, 25 bp, Homo sapien
aagtagactgttagcataataaagc

SEQ ID NO: 1193014 - DNA, 25 bp, Homo sapien
gctaacatatagtcacagaaagaca

SEQ ID NO: 1193015 - DNA, 25 bp, Homo sapien
tgggagttcatcaaagcctaagcgg

SEQ ID NO: 1193016 - DNA, 25 bp, Homo sapien
gcctaagcggctggattctgttttt

SEQ ID NO: 1193017 - DNA, 25 bp, Homo sapien
tgaaggctgtaacatctgtcacccc

SEQ ID NO: 1193018 - DNA, 25 bp, Homo sapien
tggtctgagtaactttgcttccttg

SEQ ID NO: 1193019 - DNA, 25 bp, Homo sapien
gcaccgtcctacgttcccagaaaga

SEQ ID NO: 1193020 - DNA, 25 bp, Homo sapien
tgtcaccccatgatcaccaggattg

SEQ ID NO: 1193021 - DNA, 25 bp, Homo sapien
tcatgtgccgtcttttctcagcaca

SEQ ID NO: 1193022 - DNA, 25 bp, Homo sapien
tgagctcagattttcatgtgccgtc

SEQ ID NO: 1193023 - DNA, 25 bp, Homo sapien
tgccgtcttttctcagcacagttaa

SEQ ID NO: 1193024 - DNA, 25 bp, Homo sapien
ggttttacattttgagctcagattt

SEQ ID NO: 1193025 - DNA, 25 bp, Homo sapien
tcaacccggttaatgctcgaggagg

SEQ ID NO: 1193026 - DNA, 25 bp, Homo sapien
tgattggactgaagacagcgaggac

SEQ ID NO: 1193027 - DNA, 25 bp, Homo sapien
gacatcagtaattcagagggtctgc

SEQ ID NO: 1193028 - DNA, 25 bp, Homo sapien
gggagcgttcccactacatcaacag

SEQ ID NO: 1193029 - DNA, 25 bp, Homo sapien
caggtaccgcgcgacctgattggcg

SEQ ID NO: 1193030 - DNA, 25 bp, Homo sapien
agtgaagccacgcagtcaaacagcg

SEQ ID NO: 1193031 - DNA, 25 bp, Homo sapien
ctaagaaatgtaaacgcgggaggcg

SEQ ID NO: 1193032 - DNA, 25 bp, Homo sapien
ggactttgcgccctacagatcgggt

SEQ ID NO: 1193033 - DNA, 25 bp, Homo sapien
gaaagtacgcggtggccagacacat

SEQ ID NO: 1193034 - DNA, 25 bp, Homo sapien
tgaggcgccctcgaaagtacgcggt

SEQ ID NO: 1193035 - DNA, 25 bp, Homo sapien
tgttgaggcgccctcgaaagtacgc

SEQ ID NO: 1193036 - DNA, 25 bp, Homo sapien
gccctcgaaagtacgcggtggccag

SEQ ID NO: 1193037 - DNA, 25 bp, Homo sapien
tcagttgaccgtatcatgtgtggat

SEQ ID NO: 1193038 - DNA, 25 bp, Homo sapien
tggttttgtaatcccacatgtccat

SEQ ID NO: 1193039 - DNA, 25 bp, Homo sapien
attaccaagactaatgtgatgaagc

SEQ ID NO: 1193040 - DNA, 25 bp, Homo sapien
actttgcgtattcttggcactcttg

SEQ ID NO: 1193041 - DNA, 25 bp, Homo sapien
gccaccgacagtgaagataaaagtt

SEQ ID NO: 1193042 - DNA, 25 bp, Homo sapien
aaagagactggtgcttcagagatgg

SEQ ID NO: 1193043 - DNA, 25 bp, Homo sapien
tggtcagcactctgctagccaccga

SEQ ID NO: 1193044 - DNA, 25 bp, Homo sapien
agaatctaccctggcttagcaccac

SEQ ID NO: 1193045 - DNA, 25 bp, Homo sapien
aatgagttccaaagtcttctgtata

SEQ ID NO: 1193046 - DNA, 25 bp, Homo sapien
ggaatgagttccaaagtcttctgta

SEQ ID NO: 1193047 - DNA, 25 bp, Homo sapien
attggaggaatgagttccaaagtct

SEQ ID NO: 1193048 - DNA, 25 bp, Homo sapien
tggaggaatgagttccaaagtcttc

SEQ ID NO: 1193049 - DNA, 25 bp, Homo sapien
agcacatcagaaccgctgcccagag

SEQ ID NO: 1193050 - DNA, 25 bp, Homo sapien
agcagcacatcagaaccgctgccca

SEQ ID NO: 1193051 - DNA, 25 bp, Homo sapien
cagcacatcagaaccgctgcccaga

SEQ ID NO: 1193052 - DNA, 25 bp, Homo sapien
gcagcacatcagaaccgctgcccag

SEQ ID NO: 1193053 - DNA, 25 bp, Homo sapien
tgaggactaacacccaggtacggct

SEQ ID NO: 1193054 - DNA, 25 bp, Homo sapien
cccaggggagtctgaggactaacac

SEQ ID NO: 1193055 - DNA, 25 bp, Homo sapien
taacacccaggtacggctctttgaa

SEQ ID NO: 1193056 - DNA, 25 bp, Homo sapien
gggagtctgaggactaacacccagg

SEQ ID NO: 1193057 - DNA, 25 bp, Homo sapien
gattatatccatgcgcacagaggcc

SEQ ID NO: 1193058 - DNA, 25 bp, Homo sapien
ttacattagtgtccgtctcatcccc

SEQ ID NO: 1193059 - DNA, 25 bp, Homo sapien
tctgttaaattaagcccactgctgc

SEQ ID NO: 1193060 - DNA, 25 bp, Homo sapien
gaatcctctaacagctctaattgga

SEQ ID NO: 1193061 - DNA, 25 bp, Homo sapien
ctgtgctgcccggaccacatcacca

SEQ ID NO: 1193062 - DNA, 25 bp, Homo sapien
tcctgcttgcacaagctttcccgcc

SEQ ID NO: 1193063 - DNA, 25 bp, Homo sapien
tgtgtccctgccgaccggcccttct

SEQ ID NO: 1193064 - DNA, 25 bp, Homo sapien
ctttcccgcccgccaaatgagaaga

SEQ ID NO: 1193065 - DNA, 25 bp, Homo sapien
cataacctgtgttcgttttactttg

SEQ ID NO: 1193066 - DNA, 25 bp, Homo sapien
acctgtgttcgttttactttgtgca

SEQ ID NO: 1193067 - DNA, 25 bp, Homo sapien
tcctaggtccataacctgtgttcgt

SEQ ID NO: 1193068 - DNA, 25 bp, Homo sapien
agctctgctcctaggtccataacct

SEQ ID NO: 1193069 - DNA, 25 bp, Homo sapien
gccaccagacagaagttccctaaaa

SEQ ID NO: 1193070 - DNA, 25 bp, Homo sapien
ttccctaaaacacatggagtcaggt

SEQ ID NO: 1193071 - DNA, 25 bp, Homo sapien
gttgacatccaggtcgctttgtaac

SEQ ID NO: 1193072 - DNA, 25 bp, Homo sapien
catccaggtcgctttgtaacggtcc

SEQ ID NO: 1193073 - DNA, 25 bp, Homo sapien
acctggaccagcagtttccaagcct

SEQ ID NO: 1193074 - DNA, 25 bp, Homo sapien
tttccaagcctggttgacatccagg

SEQ ID NO: 1193075 - DNA, 25 bp, Homo sapien
gttctcacaggctttgtcatgtaaa

SEQ ID NO: 1193076 - DNA, 25 bp, Homo sapien
ggttctcacaggctttgtcatgtaa

SEQ ID NO: 1193077 - DNA, 25 bp, Homo sapien
gggagacaaagctatagaggccagg

SEQ ID NO: 1193078 - DNA, 25 bp, Homo sapien
tctcagtgagtgctgactgccatcc

SEQ ID NO: 1193079 - DNA, 25 bp, Homo sapien
aggtctgcctcacttgccgaaccaa

SEQ ID NO: 1193080 - DNA, 25 bp, Homo sapien
caactcgtcgtttatccagcctgta

SEQ ID NO: 1193081 - DNA, 25 bp, Homo sapien
ctgtgaatgaagctgtaagggactg

SEQ ID NO: 1193082 - DNA, 25 bp, Homo sapien
taagggactggtgctgatgtcttct

SEQ ID NO: 1193083 - DNA, 25 bp, Homo sapien
aatgaagctgtaagggactggtgct

SEQ ID NO: 1193084 - DNA, 25 bp, Homo sapien
gtaagggactggtgctgatgtcttc

SEQ ID NO: 1193085 - DNA, 25 bp, Homo sapien
acaggcgtgtgagaagcatcctgga

SEQ ID NO: 1193086 - DNA, 25 bp, Homo sapien
ctggatgtacttagacaatgagaga

SEQ ID NO: 1193087 - DNA, 25 bp, Homo sapien
catgacaggcgtgtgagaagcatcc

SEQ ID NO: 1193088 - DNA, 25 bp, Homo sapien
gagatatcaaagagccagcatgaca

SEQ ID NO: 1193089 - DNA, 25 bp, Homo sapien
gccgcctgtcttgacaagtcttatt

SEQ ID NO: 1193090 - DNA, 25 bp, Homo sapien
caagctagttatatgcatgacctca

SEQ ID NO: 1193091 - DNA, 25 bp, Homo sapien
aatagaggtcttgaacttatgccgc

SEQ ID NO: 1193092 - DNA, 25 bp, Homo sapien
tataatatattgctgggaactgtag

SEQ ID NO: 1193093 - DNA, 25 bp, Homo sapien
gagccctataatgggggcttgagca

SEQ ID NO: 1193094 - DNA, 25 bp, Homo sapien
gaagaattcagtggagggaggagtt

SEQ ID NO: 1193095 - DNA, 25 bp, Homo sapien
aagaagaattcagtggagggaggag

SEQ ID NO: 1193096 - DNA, 25 bp, Homo sapien
agagtttgggtttccgctgagccct

SEQ ID NO: 1193097 - DNA, 25 bp, Homo sapien
tggtggtcagatcagggacgatggg

SEQ ID NO: 1193098 - DNA, 25 bp, Homo sapien
aggagagacgtctccatgctcactc

SEQ ID NO: 1193099 - DNA, 25 bp, Homo sapien
ggctcaggggttccactgggtctcc

SEQ ID NO: 1193100 - DNA, 25 bp, Homo sapien
atgagccctgaaaaccagctgaggc

SEQ ID NO: 1193101 - DNA, 25 bp, Homo sapien
tgtcttcctggacggcaatcctcag

SEQ ID NO: 1193102 - DNA, 25 bp, Homo sapien
ctgtcttcctggacggcaatcctca

SEQ ID NO: 1193103 - DNA, 25 bp, Homo sapien
tgaaacagggtcacctcgcctcact

SEQ ID NO: 1193104 - DNA, 25 bp, Homo sapien
ggcaccagcacatgtaattaaccat

SEQ ID NO: 1193105 - DNA, 25 bp, Homo sapien
catgtaattaaccatcgactgcccc

SEQ ID NO: 1193106 - DNA, 25 bp, Homo sapien
gaaacagggtcacctcgcctcactg

SEQ ID NO: 1193107 - DNA, 25 bp, Homo sapien
gtctctgctgtatctgaaggttccc

SEQ ID NO: 1193108 - DNA, 25 bp, Homo sapien
tctgctgtatctgaaggttccctgt

SEQ ID NO: 1193109 - DNA, 25 bp, Homo sapien
gggtctctgctgtatctgaaggttc

SEQ ID NO: 1193110 - DNA, 25 bp, Homo sapien
tctctgctgtatctgaaggttccct

SEQ ID NO: 1193111 - DNA, 25 bp, Homo sapien
tctggccctttggaaaatgatgcaa

SEQ ID NO: 1193112 - DNA, 25 bp, Homo sapien
atctggccctttggaaaatgatgca

SEQ ID NO: 1193113 - DNA, 25 bp, Homo sapien
ctggccctttggaaaatgatgcaag

SEQ ID NO: 1193114 - DNA, 25 bp, Homo sapien
tggccctttggaaaatgatgcaaga

SEQ ID NO: 1193115 - DNA, 25 bp, Homo sapien
tgagcagacagcagttgggggtgcg

SEQ ID NO: 1193116 - DNA, 25 bp, Homo sapien
gagcagacagcagttgggggtgcgt

SEQ ID NO: 1193117 - DNA, 25 bp, Homo sapien
gggggtgcgtctggccaagggcatc

SEQ ID NO: 1193118 - DNA, 25 bp, Homo sapien
ctgagcagacagcagttgggggtgc

SEQ ID NO: 1193119 - DNA, 25 bp, Homo sapien
tggagcagcggtgactcagtcacgc

SEQ ID NO: 1193120 - DNA, 25 bp, Homo sapien
cagcggtgactcagtcacgcgggct

SEQ ID NO: 1193121 - DNA, 25 bp, Homo sapien
ggtgactcagtcacgcgggctacac

SEQ ID NO: 1193122 - DNA, 25 bp, Homo sapien
gctggagcagcggtgactcagtcac

SEQ ID NO: 1193123 - DNA, 25 bp, Homo sapien
aagggagtggcccgtgccttacact

SEQ ID NO: 1193124 - DNA, 25 bp, Homo sapien
ggagtggcccgtgccttacacttac

SEQ ID NO: 1193125 - DNA, 25 bp, Homo sapien
gggagtggcccgtgccttacactta

SEQ ID NO: 1193126 - DNA, 25 bp, Homo sapien
agggagtggcccgtgccttacactt

SEQ ID NO: 1193127 - DNA, 25 bp, Homo sapien
ggatgggtgtgagagctctttgtga

SEQ ID NO: 1193128 - DNA, 25 bp, Homo sapien
agggggatgggtgtgagagctcttt

SEQ ID NO: 1193129 - DNA, 25 bp, Homo sapien
ggggatgggtgtgagagctctttgt

SEQ ID NO: 1193130 - DNA, 25 bp, Homo sapien
agagggggatgggtgtgagagctct

SEQ ID NO: 1193131 - DNA, 25 bp, Homo sapien
taggattgcgaggaatcgtaaccaa

SEQ ID NO: 1193132 - DNA, 25 bp, Homo sapien
tcacgtctcccttgccagtaggatt

SEQ ID NO: 1193133 - DNA, 25 bp, Homo sapien
cccttgccagtaggattgcgaggaa

SEQ ID NO: 1193134 - DNA, 25 bp, Homo sapien
gaatcgtaaccaaggcttgcctctc

SEQ ID NO: 1193135 - DNA, 25 bp, Homo sapien
cagacttgagcgtcactgttcgaga

SEQ ID NO: 1193136 - DNA, 25 bp, Homo sapien
ctgttcgagaccactttgattttgc

SEQ ID NO: 1193137 - DNA, 25 bp, Homo sapien
caggtgcatggcgggccatgcttca

SEQ ID NO: 1193138 - DNA, 25 bp, Homo sapien
agctcaatcccatctgcagacttga

SEQ ID NO: 1193139 - DNA, 25 bp, Homo sapien
tctgtgactctcatgcaccacattg

SEQ ID NO: 1193140 - DNA, 25 bp, Homo sapien
cagttttgtctctgagtacccttcc

SEQ ID NO: 1193141 - DNA, 25 bp, Homo sapien
ttcctgccaccagctgttaagcctt

SEQ ID NO: 1193142 - DNA, 25 bp, Homo sapien
accagctgttaagccttccttcata

SEQ ID NO: 1193143 - DNA, 25 bp, Homo sapien
gattcccagacaaccctcattttgc

SEQ ID NO: 1193144 - DNA, 25 bp, Homo sapien
tttcttcgctgtgtggcatatcatc

SEQ ID NO: 1193145 - DNA, 25 bp, Homo sapien
aaaggccagaagggttagatgattc

SEQ ID NO: 1193146 - DNA, 25 bp, Homo sapien
catatcatcagtgagcccacagacc

SEQ ID NO: 1193147 - DNA, 25 bp, Homo sapien
gggccacatctcgaaaacaccaggt

SEQ ID NO: 1193148 - DNA, 25 bp, Homo sapien
cacatctcgaaaacaccaggtggct

SEQ ID NO: 1193149 - DNA, 25 bp, Homo sapien
tcgaaaacaccaggtggctcttctc

SEQ ID NO: 1193150 - DNA, 25 bp, Homo sapien
gggaaagggccacatctcgaaaaca

SEQ ID NO: 1193151 - DNA, 25 bp, Homo sapien
cagcccgttcatcccaaaggctgtg

SEQ ID NO: 1193152 - DNA, 25 bp, Homo sapien
gaataatttggctgcgattccaccc

SEQ ID NO: 1193153 - DNA, 25 bp, Homo sapien
aaaggctgtgctcttgatccccgcc

SEQ ID NO: 1193154 - DNA, 25 bp, Homo sapien
gggctgcgaataatttggctgcgat

SEQ ID NO: 1193155 - DNA, 25 bp, Homo sapien
gggagtcttcctggaactgccccga

SEQ ID NO: 1193156 - DNA, 25 bp, Homo sapien
cttcctggaactgccccgaggctgg

SEQ ID NO: 1193157 - DNA, 25 bp, Homo sapien
aaagatgtgcggagggctgaggacc

SEQ ID NO: 1193158 - DNA, 25 bp, Homo sapien
ctgcaaagatgtgcggagggctgag

SEQ ID NO: 1193159 - DNA, 25 bp, Homo sapien
gagcctgcagtagcacaggacggca

SEQ ID NO: 1193160 - DNA, 25 bp, Homo sapien
agcacaggacggcaatgatgcagag

SEQ ID NO: 1193161 - DNA, 25 bp, Homo sapien
cagtgatcacaaccgttcccgctgt

SEQ ID NO: 1193162 - DNA, 25 bp, Homo sapien
gatcaccgtagctaggattccgcca

SEQ ID NO: 1193163 - DNA, 25 bp, Homo sapien
cattccatagctttgggctctgtgg

SEQ ID NO: 1193164 - DNA, 25 bp, Homo sapien
ttctgcccccataatgaaaaagagg

SEQ ID NO: 1193165 - DNA, 25 bp, Homo sapien
tctggctacgggtcccggggactga

SEQ ID NO: 1193166 - DNA, 25 bp, Homo sapien
gcctgctacattccatagctttggg

SEQ ID NO: 1193167 - DNA, 25 bp, Homo sapien
taactccaggctgtagttgagcggg

SEQ ID NO: 1193168 - DNA, 25 bp, Homo sapien
atgcctgagagggtgaatgctcccc

SEQ ID NO: 1193169 - DNA, 25 bp, Homo sapien
catgcatttttgagcgtgcacaggt

SEQ ID NO: 1193170 - DNA, 25 bp, Homo sapien
ccagaatggtgctcttcccatgctc

SEQ ID NO: 1193171 - DNA, 25 bp, Homo sapien
tgtcagccgtccgtatgtaaaaggg

SEQ ID NO: 1193172 - DNA, 25 bp, Homo sapien
tgcaacctcggttccgctcttcttg

SEQ ID NO: 1193173 - DNA, 25 bp, Homo sapien
ccctctttgtagtatgtgggagcaa

SEQ ID NO: 1193174 - DNA, 25 bp, Homo sapien
gtgggaaggtcgtgctcccgctcct

SEQ ID NO: 1193175 - DNA, 25 bp, Homo sapien
acgtctgtactaatagcccttggat

SEQ ID NO: 1193176 - DNA, 25 bp, Homo sapien
acagaaacaacccatgtggggctgt

SEQ ID NO: 1193177 - DNA, 25 bp, Homo sapien
aacaacccatgtggggctgttggag

SEQ ID NO: 1193178 - DNA, 25 bp, Homo sapien
gaaacaacccatgtggggctgttgg

SEQ ID NO: 1193179 - DNA, 25 bp, Homo sapien
gggctgttggagggtcattcatcac

SEQ ID NO: 1193180 - DNA, 25 bp, Homo sapien
gaagctgcagactcgacctagcagt

SEQ ID NO: 1193181 - DNA, 25 bp, Homo sapien
ggagtgtcccaaccaagaaactggc

SEQ ID NO: 1193182 - DNA, 25 bp, Homo sapien
gcactcaaaagcttaaatcctagta

SEQ ID NO: 1193183 - DNA, 25 bp, Homo sapien
tcaatgcactcaaaagcttaaatcc

SEQ ID NO: 1193184 - DNA, 25 bp, Homo sapien
taggcacggatgcttcatctcccga

SEQ ID NO: 1193185 - DNA, 25 bp, Homo sapien
ccttttcctaggcacggatgcttca

SEQ ID NO: 1193186 - DNA, 25 bp, Homo sapien
cacggatgcttcatctcccgaggac

SEQ ID NO: 1193187 - DNA, 25 bp, Homo sapien
tctgtccccttttcctaggcacgga

SEQ ID NO: 1193188 - DNA, 25 bp, Homo sapien
tcaggaatcaacgaccctacgggag

SEQ ID NO: 1193189 - DNA, 25 bp, Homo sapien
tgttggagtcgtttcagcaagcgcg

SEQ ID NO: 1193190 - DNA, 25 bp, Homo sapien
tttgctaagctaccagaagtcggct

SEQ ID NO: 1193191 - DNA, 25 bp, Homo sapien
tggtaaccaacgtacaaagctgggc

SEQ ID NO: 1193192 - DNA, 25 bp, Homo sapien
ttgacgtggtttcagccgctgcagc

SEQ ID NO: 1193193 - DNA, 25 bp, Homo sapien
gacttgacgtggtttcagccgctgc

SEQ ID NO: 1193194 - DNA, 25 bp, Homo sapien
ctctgggggacttgacgtggtttca

SEQ ID NO: 1193195 - DNA, 25 bp, Homo sapien
gggacttgacgtggtttcagccgct

SEQ ID NO: 1193196 - DNA, 25 bp, Homo sapien
ggcgagcgtggaatcccaaggctaa

SEQ ID NO: 1193197 - DNA, 25 bp, Homo sapien
taaatggctcatcgccaggaaactg

SEQ ID NO: 1193198 - DNA, 25 bp, Homo sapien
atgaagatcctgctccacggcgtca

SEQ ID NO: 1193199 - DNA, 25 bp, Homo sapien
cacggcgtcacaggtggatgcttac

SEQ ID NO: 1193200 - DNA, 25 bp, Homo sapien
taggaagtcggagttggaaatgagg

SEQ ID NO: 1193201 - DNA, 25 bp, Homo sapien
aagtaggaagtcggagttggaaatg

SEQ ID NO: 1193202 - DNA, 25 bp, Homo sapien
gtaggaagtcggagttggaaatgag

SEQ ID NO: 1193203 - DNA, 25 bp, Homo sapien
agtaggaagtcggagttggaaatga

SEQ ID NO: 1193204 - DNA, 25 bp, Homo sapien
actcatcaggattctcactcacaaa

SEQ ID NO: 1193205 - DNA, 25 bp, Homo sapien
tagctatgcccttagaagggggcca

SEQ ID NO: 1193206 - DNA, 25 bp, Homo sapien
ctcgaattcagtgactcaggagtgg

SEQ ID NO: 1193207 - DNA, 25 bp, Homo sapien
ccactggaaaactcatcaggattct

SEQ ID NO: 1193208 - DNA, 25 bp, Homo sapien
gacaggtgccttaatagtggcgcaa

SEQ ID NO: 1193209 - DNA, 25 bp, Homo sapien
tgttagtctatctgggcaagcctcg

SEQ ID NO: 1193210 - DNA, 25 bp, Homo sapien
gagtgaccaaagtgtgaccagagcc

SEQ ID NO: 1193211 - DNA, 25 bp, Homo sapien
gactggtcctagagctaatgagtga

SEQ ID NO: 1193212 - DNA, 25 bp, Homo sapien
tgctgctaatcttgttttattgtgg

SEQ ID NO: 1193213 - DNA, 25 bp, Homo sapien
gctgctaatcttgttttattgtggt

SEQ ID NO: 1193214 - DNA, 25 bp, Homo sapien
tttgctgctaatcttgttttattgt

SEQ ID NO: 1193215 - DNA, 25 bp, Homo sapien
ttgctgctaatcttgttttattgtg

SEQ ID NO: 1193216 - DNA, 25 bp, Homo sapien
tgtggaattccaggggagcaaggca

SEQ ID NO: 1193217 - DNA, 25 bp, Homo sapien
ctgtggaattccaggggagcaaggc

SEQ ID NO: 1193218 - DNA, 25 bp, Homo sapien
tttctggcaaggaggacacggctgc

SEQ ID NO: 1193219 - DNA, 25 bp, Homo sapien
ttctggcaaggaggacacggctgct

SEQ ID NO: 1193220 - DNA, 25 bp, Homo sapien
tatttctggcaaggaggacacggct

SEQ ID NO: 1193221 - DNA, 25 bp, Homo sapien
atttctggcaaggaggacacggctg

SEQ ID NO: 1193222 - DNA, 25 bp, Homo sapien
gtagtgtcccttagcacagactaga

SEQ ID NO: 1193223 - DNA, 25 bp, Homo sapien
cagactagacagcagaaaaggacag

SEQ ID NO: 1193224 - DNA, 25 bp, Homo sapien
caatctcgagcctggttggagaccg

SEQ ID NO: 1193225 - DNA, 25 bp, Homo sapien
ctcttccaatttagggcaccgtttg

SEQ ID NO: 1193226 - DNA, 25 bp, Homo sapien
agaggaggcttcacccttaaatcca

SEQ ID NO: 1193227 - DNA, 25 bp, Homo sapien
cgtggaacacagacgctctgggtgt

SEQ ID NO: 1193228 - DNA, 25 bp, Homo sapien
catccactcggttatgactccaagt

SEQ ID NO: 1193229 - DNA, 25 bp, Homo sapien
ccggtgaagaacgaaggaccctgtg

SEQ ID NO: 1193230 - DNA, 25 bp, Homo sapien
agccactttcccaacaaacagcaaa

SEQ ID NO: 1193231 - DNA, 25 bp, Homo sapien
caaacagcaaatctccgccgattga

SEQ ID NO: 1193232 - DNA, 25 bp, Homo sapien
gcaatgggggcatgccaggcaacaa

SEQ ID NO: 1193233 - DNA, 25 bp, Homo sapien
tccgccgattgaactctgactgagg

SEQ ID NO: 1193234 - DNA, 25 bp, Homo sapien
gctgcccctgtaacaaagggctggc

SEQ ID NO: 1193235 - DNA, 25 bp, Homo sapien
tacacacaaagctagttcccagttc

SEQ ID NO: 1193236 - DNA, 25 bp, Homo sapien
cccttgctgcccctgtaacaaaggg

SEQ ID NO: 1193237 - DNA, 25 bp, Homo sapien
aaagctagttcccagttctccagtc

SEQ ID NO: 1193238 - DNA, 25 bp, Homo sapien
aggttgtgcactacttggttctcca

SEQ ID NO: 1193239 - DNA, 25 bp, Homo sapien
gttctccacccagcgagctgacagg

SEQ ID NO: 1193240 - DNA, 25 bp, Homo sapien
tccctccgaggcacgctgtgaaggt

SEQ ID NO: 1193241 - DNA, 25 bp, Homo sapien
catcctcagcatgagccagctgcat

SEQ ID NO: 1193242 - DNA, 25 bp, Homo sapien
gtgaaacaagaagcgcagccaggtg

SEQ ID NO: 1193243 - DNA, 25 bp, Homo sapien
tgctcagtgatatctggagtccctg

SEQ ID NO: 1193244 - DNA, 25 bp, Homo sapien
gagtccctgcccacttctggtagta

SEQ ID NO: 1193245 - DNA, 25 bp, Homo sapien
tctgtctccaagcagagatctgtgc

SEQ ID NO: 1193246 - DNA, 25 bp, Homo sapien
tctcatgactaaagtattaaggagc

SEQ ID NO: 1193247 - DNA, 25 bp, Homo sapien
gttggatctagaataaaaactctca

SEQ ID NO: 1193248 - DNA, 25 bp, Homo sapien
caagctcaagttgttcagttggatc

SEQ ID NO: 1193249 - DNA, 25 bp, Homo sapien
tcttctagcagaaatagtacttcta

SEQ ID NO: 1193250 - DNA, 25 bp, Homo sapien
ggagccacgtcgtcttctgtctaca

SEQ ID NO: 1193251 - DNA, 25 bp, Homo sapien
gagccacgtcgtcttctgtctacac

SEQ ID NO: 1193252 - DNA, 25 bp, Homo sapien
ttgctgggacatcctgggaccacga

SEQ ID NO: 1193253 - DNA, 25 bp, Homo sapien
tactcctgtggtcagtgctccgctt

SEQ ID NO: 1193254 - DNA, 25 bp, Homo sapien
ggacctgtgagtggtctgccccgag

SEQ ID NO: 1193255 - DNA, 25 bp, Homo sapien
gggtctaccccagtgaacagcttct

SEQ ID NO: 1193256 - DNA, 25 bp, Homo sapien
tggacctggatacccaggtcagtca

SEQ ID NO: 1193257 - DNA, 25 bp, Homo sapien
ggctctagaatcctacctttcacag

SEQ ID NO: 1193258 - DNA, 25 bp, Homo sapien
tctctggacctggatacccaggtca

SEQ ID NO: 1193259 - DNA, 25 bp, Homo sapien
ctgccagtggctctagaatcctacc

SEQ ID NO: 1193260 - DNA, 25 bp, Homo sapien
tgtggactcaatcgtagaggaaacc

SEQ ID NO: 1193261 - DNA, 25 bp, Homo sapien
cacacttcagcgtaggagcacgtcg

SEQ ID NO: 1193262 - DNA, 25 bp, Homo sapien
caccattagagtaacggatctcagg

SEQ ID NO: 1193263 - DNA, 25 bp, Homo sapien
cggcccctttctacataacttcatg

SEQ ID NO: 1193264 - DNA, 25 bp, Homo sapien
gattatggccagtctttgaacacct

SEQ ID NO: 1193265 - DNA, 25 bp, Homo sapien
tctaacacctgacacaaacgtttgg

SEQ ID NO: 1193266 - DNA, 25 bp, Homo sapien
aagtcatgattccacatttggcagg

SEQ ID NO: 1193267 - DNA, 25 bp, Homo sapien
tagtctcaagcaagtaaatacctgg

SEQ ID NO: 1193268 - DNA, 25 bp, Homo sapien
tttagtccctgtgtggttccagtgt

SEQ ID NO: 1193269 - DNA, 25 bp, Homo sapien
ctgttttagtccctgtgtggttcca

SEQ ID NO: 1193270 - DNA, 25 bp, Homo sapien
aatcacaaagatgtaggaagtcctg

SEQ ID NO: 1193271 - DNA, 25 bp, Homo sapien
caaagatgtaggaagtcctgcatct

SEQ ID NO: 1193272 - DNA, 25 bp, Homo sapien
tttcatcccgaacatcaaagtcgtt

SEQ ID NO: 1193273 - DNA, 25 bp, Homo sapien
tttctttttcatcccgaacatcaaa

SEQ ID NO: 1193274 - DNA, 25 bp, Homo sapien
ccgaacatcaaagtcgttcagtggt

SEQ ID NO: 1193275 - DNA, 25 bp, Homo sapien
tcgttcagtggttttgagatcacat

SEQ ID NO: 1193276 - DNA, 25 bp, Homo sapien
tcccagctggtagcatcaatgagca

SEQ ID NO: 1193277 - DNA, 25 bp, Homo sapien
gcatagacaaccttttgcagaggaa

SEQ ID NO: 1193278 - DNA, 25 bp, Homo sapien
gagagatggcttgttctggtgcata

SEQ ID NO: 1193279 - DNA, 25 bp, Homo sapien
gaaggatgagaacctgtagatttac

SEQ ID NO: 1193280 - DNA, 25 bp, Homo sapien
tctccaagtggatcaacattttgag

SEQ ID NO: 1193281 - DNA, 25 bp, Homo sapien
gctgacaatagggtatccataagca

SEQ ID NO: 1193282 - DNA, 25 bp, Homo sapien
catgcttcgaagaggatacaggagg

SEQ ID NO: 1193283 - DNA, 25 bp, Homo sapien
gggaggatgtccttttttgctgaca

SEQ ID NO: 1193284 - DNA, 25 bp, Homo sapien
tattatctgcattatctgtgcccgc

SEQ ID NO: 1193285 - DNA, 25 bp, Homo sapien
tctaggcctgaggacgcatcaacac

SEQ ID NO: 1193286 - DNA, 25 bp, Homo sapien
gcccgcttgctgtgatgtcttgaaa

SEQ ID NO: 1193287 - DNA, 25 bp, Homo sapien
taaatttgcctttggctaagcgcag

SEQ ID NO: 1193288 - DNA, 25 bp, Homo sapien
gagctaaataaagttaagatacctg

SEQ ID NO: 1193289 - DNA, 25 bp, Homo sapien
tctttatggcaaatgcttggttgaa

SEQ ID NO: 1193290 - DNA, 25 bp, Homo sapien
aatacctaatgatgtgggcctaaat

SEQ ID NO: 1193291 - DNA, 25 bp, Homo sapien
caaagatgttaattctacagagagc

SEQ ID NO: 1193292 - DNA, 25 bp, Homo sapien
ctacttcaggaattatgccaccatg

SEQ ID NO: 1193293 - DNA, 25 bp, Homo sapien
taaaccagtatgtctttgtaaagcc

SEQ ID NO: 1193294 - DNA, 25 bp, Homo sapien
catgcccggctagttgagaagtact

SEQ ID NO: 1193295 - DNA, 25 bp, Homo sapien
gcgacataggcaggtctctggcact

SEQ ID NO: 1193296 - DNA, 25 bp, Homo sapien
tagtttccaggagttggcggacaag

SEQ ID NO: 1193297 - DNA, 25 bp, Homo sapien
tgtatgtggtacctaaacgttgcca

SEQ ID NO: 1193298 - DNA, 25 bp, Homo sapien
cactaaatagtgctagccgctgaga

SEQ ID NO: 1193299 - DNA, 25 bp, Homo sapien
tggttaataaggctcagcatgctgg

SEQ ID NO: 1193300 - DNA, 25 bp, Homo sapien
gtctcttacaatggaggttctctcc

SEQ ID NO: 1193301 - DNA, 25 bp, Homo sapien
gatgcaccctgtatctgccttatgt

SEQ ID NO: 1193302 - DNA, 25 bp, Homo sapien
tacttgctacatgttgtgaaacctg

SEQ ID NO: 1193303 - DNA, 25 bp, Homo sapien
tcttttagcaaggaaaacgtgagga

SEQ ID NO: 1193304 - DNA, 25 bp, Homo sapien
tatgaacagtctagaggaagcatct

SEQ ID NO: 1193305 - DNA, 25 bp, Homo sapien
ggaggtctgctgaacattggccaca

SEQ ID NO: 1193306 - DNA, 25 bp, Homo sapien
aatgccacctgtccatacttacgtg

SEQ ID NO: 1193307 - DNA, 25 bp, Homo sapien
tacctatcaggagatgtatgacaaa

SEQ ID NO: 1193308 - DNA, 25 bp, Homo sapien
gcacggaggtgcaagccaagtttat

SEQ ID NO: 1193309 - DNA, 25 bp, Homo sapien
ggagctatcctgagatctgtactgc

SEQ ID NO: 1193310 - DNA, 25 bp, Homo sapien
cattataaactggatcggtccctga

SEQ ID NO: 1193311 - DNA, 25 bp, Homo sapien
caaagcagagtaagccaagtgcctc

SEQ ID NO: 1193312 - DNA, 25 bp, Homo sapien
ttccggcggaaagtgtttgtcatat

SEQ ID NO: 1193313 - DNA, 25 bp, Homo sapien
agtcccaggattccacgggcgcctt

SEQ ID NO: 1193314 - DNA, 25 bp, Homo sapien
cacgggcgccttccggcggaaagtg

SEQ ID NO: 1193315 - DNA, 25 bp, Homo sapien
tagtcccaggattccacgggcgcct

SEQ ID NO: 1193316 - DNA, 25 bp, Homo sapien
agtgcgacgagggtggagaagaccc

SEQ ID NO: 1193317 - DNA, 25 bp, Homo sapien
gaagacccaagtttcgcttctcggc

SEQ ID NO: 1193318 - DNA, 25 bp, Homo sapien
ccctggaatctttttgatcgactgc

SEQ ID NO: 1193319 - DNA, 25 bp, Homo sapien
gactgctacgttgaccatgtccttc

SEQ ID NO: 1193320 - DNA, 25 bp, Homo sapien
caagtgttgactgcgtgtaggagac

SEQ ID NO: 1193321 - DNA, 25 bp, Homo sapien
aggatggcagggcaacttgcctgtc

SEQ ID NO: 1193322 - DNA, 25 bp, Homo sapien
tgtcctaagtctagccgctcgtggc

SEQ ID NO: 1193323 - DNA, 25 bp, Homo sapien
tgccatcgcccttaagtaaaggagg

SEQ ID NO: 1193324 - DNA, 25 bp, Homo sapien
gctgtggatcgctcccgcctcctgg

SEQ ID NO: 1193325 - DNA, 25 bp, Homo sapien
ggtcagctgctgtggatcgctcccg

SEQ ID NO: 1193326 - DNA, 25 bp, Homo sapien
gtcagctgctgtggatcgctcccgc

SEQ ID NO: 1193327 - DNA, 25 bp, Homo sapien
agctgctgtggatcgctcccgcctc

SEQ ID NO: 1193328 - DNA, 25 bp, Homo sapien
tcagggaggcagttgcgagtcgctg

SEQ ID NO: 1193329 - DNA, 25 bp, Homo sapien
cctgcgtcgtcgctgctgtgtagca

SEQ ID NO: 1193330 - DNA, 25 bp, Homo sapien
tcgtcgctgctgtgtagcaaacctg

SEQ ID NO: 1193331 - DNA, 25 bp, Homo sapien
gccgcctgcgtcgtcgctgctgtgt

SEQ ID NO: 1193332 - DNA, 25 bp, Homo sapien
tgacgtagctttagtcgatcgcgaa

SEQ ID NO: 1193333 - DNA, 25 bp, Homo sapien
gctttagtcgatcgcgaagatggct

SEQ ID NO: 1193334 - DNA, 25 bp, Homo sapien
cgaagatggctttatggaccctagg

SEQ ID NO: 1193335 - DNA, 25 bp, Homo sapien
tggaccctaggttctcctgccggtg

SEQ ID NO: 1193336 - DNA, 25 bp, Homo sapien
gaagtcgccgtacacttctggcggc

SEQ ID NO: 1193337 - DNA, 25 bp, Homo sapien
gaggagttctgtacgcaggcgcatc

SEQ ID NO: 1193338 - DNA, 25 bp, Homo sapien
gaatcggaccggaactcttctagcc

SEQ ID NO: 1193339 - DNA, 25 bp, Homo sapien
tccgctgcctagaccgaaggtagta

SEQ ID NO: 1193340 - DNA, 25 bp, Homo sapien
gcagccctctcctggtcataacagg

SEQ ID NO: 1193341 - DNA, 25 bp, Homo sapien
agaggaatgagagtcccgcagccct

SEQ ID NO: 1193342 - DNA, 25 bp, Homo sapien
tcataacaggagacggctgtagcgg

SEQ ID NO: 1193343 - DNA, 25 bp, Homo sapien
ggcgggtagtccttcgcgtcttcat

SEQ ID NO: 1193344 - DNA, 25 bp, Homo sapien
tccttccccgctgcgggtcagggtg

SEQ ID NO: 1193345 - DNA, 25 bp, Homo sapien
ttgcacggcggcacaagtccagagg

SEQ ID NO: 1193346 - DNA, 25 bp, Homo sapien
gctgtcccctcgtgaaggcctgcag

SEQ ID NO: 1193347 - DNA, 25 bp, Homo sapien
gactcccctaaattgatgcccgatg

SEQ ID NO: 1193348 - DNA, 25 bp, Homo sapien
actctggcccgcgagcgttaaagaa

SEQ ID NO: 1193349 - DNA, 25 bp, Homo sapien
acatccgcagggtagagggaaccga

SEQ ID NO: 1193350 - DNA, 25 bp, Homo sapien
ttctgtagaaacatccgcagggtag

SEQ ID NO: 1193351 - DNA, 25 bp, Homo sapien
cccgcgagcgttaaagaaggaaatg

SEQ ID NO: 1193352 - DNA, 25 bp, Homo sapien
ctacttgaggttacagtgacggcca

SEQ ID NO: 1193353 - DNA, 25 bp, Homo sapien
aaagtggcagatttttggcagggac

SEQ ID NO: 1193354 - DNA, 25 bp, Homo sapien
tgacggccaccaaagtggcagattt

SEQ ID NO: 1193355 - DNA, 25 bp, Homo sapien
tgaggttacagtgacggccaccaaa

SEQ ID NO: 1193356 - DNA, 25 bp, Homo sapien
cgagtcagcaggtaaacttgcagcc

SEQ ID NO: 1193357 - DNA, 25 bp, Homo sapien
cacgagtcagcaggtaaacttgcag

SEQ ID NO: 1193358 - DNA, 25 bp, Homo sapien
cttcacgagtcagcaggtaaacttg

SEQ ID NO: 1193359 - DNA, 25 bp, Homo sapien
tcacgagtcagcaggtaaacttgca

SEQ ID NO: 1193360 - DNA, 25 bp, Homo sapien
acagacataacaagagttaaaattc

SEQ ID NO: 1193361 - DNA, 25 bp, Homo sapien
agacataacaagagttaaaattcag

SEQ ID NO: 1193362 - DNA, 25 bp, Homo sapien
cagacataacaagagttaaaattca

SEQ ID NO: 1193363 - DNA, 25 bp, Homo sapien
aaacagacataacaagagttaaaat

SEQ ID NO: 1193364 - DNA, 25 bp, Homo sapien
tttgagatcgtttggcttaaatcag

SEQ ID NO: 1193365 - DNA, 25 bp, Homo sapien
acagttttctttgagatcgtttggc

SEQ ID NO: 1193366 - DNA, 25 bp, Homo sapien
ctggagcctcttgtatgctcctgac

SEQ ID NO: 1193367 - DNA, 25 bp, Homo sapien
gagcctcttgtatgctcctgacagt

SEQ ID NO: 1193368 - DNA, 25 bp, Homo sapien
tcttgagtactcacgtgtctgccct

SEQ ID NO: 1193369 - DNA, 25 bp, Homo sapien
gatcacactgtgtcaagattttacc

SEQ ID NO: 1193370 - DNA, 25 bp, Homo sapien
gaattttggctcagtcacatatgtg

SEQ ID NO: 1193371 - DNA, 25 bp, Homo sapien
acaaggttatatgggtggctggtac

SEQ ID NO: 1193372 - DNA, 25 bp, Homo sapien
gtcgacgtaacctgattacaagatc

SEQ ID NO: 1193373 - DNA, 25 bp, Homo sapien
catatcttgggtatcttagaggggg

SEQ ID NO: 1193374 - DNA, 25 bp, Homo sapien
gggtcgacgtaacctgattacaaga

SEQ ID NO: 1193375 - DNA, 25 bp, Homo sapien
tatcttgggtatcttagagggggtc

SEQ ID NO: 1193376 - DNA, 25 bp, Homo sapien
tatttctatttgttttgtatgtcga

SEQ ID NO: 1193377 - DNA, 25 bp, Homo sapien
aattcactcattttagtatttctat

SEQ ID NO: 1193378 - DNA, 25 bp, Homo sapien
agtatttctatttgttttgtatgtc

SEQ ID NO: 1193379 - DNA, 25 bp, Homo sapien
ataattcactcattttagtatttct

SEQ ID NO: 1193380 - DNA, 25 bp, Homo sapien
aatatttgcatgatgctatttgatt

SEQ ID NO: 1193381 - DNA, 25 bp, Homo sapien
tattcacatagcatgcaaatacaag

SEQ ID NO: 1193382 - DNA, 25 bp, Homo sapien
ctattcacatagcatgcaaatacaa

SEQ ID NO: 1193383 - DNA, 25 bp, Homo sapien
tatttgcatgatgctatttgatttt

SEQ ID NO: 1193384 - DNA, 25 bp, Homo sapien
taaaatgtaacctttgtatgcaaaa

SEQ ID NO: 1193385 - DNA, 25 bp, Homo sapien
tataggtttgctatattctcattct

SEQ ID NO: 1193386 - DNA, 25 bp, Homo sapien
ctaactggactgataacccagttct

SEQ ID NO: 1193387 - DNA, 25 bp, Homo sapien
tactctaaaatgtaacctttgtatg

SEQ ID NO: 1193388 - DNA, 25 bp, Homo sapien
aaattgaccttctgttggacactgg

SEQ ID NO: 1193389 - DNA, 25 bp, Homo sapien
gagaaattgaccttctgttggacac

SEQ ID NO: 1193390 - DNA, 25 bp, Homo sapien
attgaccttctgttggacactggtg

SEQ ID NO: 1193391 - DNA, 25 bp, Homo sapien
gaaattgaccttctgttggacactg

SEQ ID NO: 1193392 - DNA, 25 bp, Homo sapien
actgaatggattcacccctctttag

SEQ ID NO: 1193393 - DNA, 25 bp, Homo sapien
tctgaactgaatggattcacccctc

SEQ ID NO: 1193394 - DNA, 25 bp, Homo sapien
ttctgaactgaatggattcacccct

SEQ ID NO: 1193395 - DNA, 25 bp, Homo sapien
tgaactgaatggattcacccctctt

SEQ ID NO: 1193396 - DNA, 25 bp, Homo sapien
ctgctgtgagagctgtcttgatcat

SEQ ID NO: 1193397 - DNA, 25 bp, Homo sapien
gctgtgagagctgtcttgatcatct

SEQ ID NO: 1193398 - DNA, 25 bp, Homo sapien
tcatcagaatccctggatctggcct

SEQ ID NO: 1193399 - DNA, 25 bp, Homo sapien
ccttaacagtagtgacactgctgtg

SEQ ID NO: 1193400 - DNA, 25 bp, Homo sapien
aggaatggaacccagaaattctagc

SEQ ID NO: 1193401 - DNA, 25 bp, Homo sapien
ctaataacagcacttagtgtttact

SEQ ID NO: 1193402 - DNA, 25 bp, Homo sapien
tctagctagacactaccagcgtgtt

SEQ ID NO: 1193403 - DNA, 25 bp, Homo sapien
gcttcatgtaatatgtatgaacact

SEQ ID NO: 1193404 - DNA, 25 bp, Homo sapien
atgattctatatattgactagatga

SEQ ID NO: 1193405 - DNA, 25 bp, Homo sapien
aatgattctatatattgactagatg

SEQ ID NO: 1193406 - DNA, 25 bp, Homo sapien
aaatgattctatatattgactagat

SEQ ID NO: 1193407 - DNA, 25 bp, Homo sapien
cttatcatgagctgtgaagttttga

SEQ ID NO: 1193408 - DNA, 25 bp, Homo sapien
gcttatcatgagctgtgaagttttg

SEQ ID NO: 1193409 - DNA, 25 bp, Homo sapien
ttatcatgagctgtgaagttttgac

SEQ ID NO: 1193410 - DNA, 25 bp, Homo sapien
ggtccttattcttgcagtttgtggg

SEQ ID NO: 1193411 - DNA, 25 bp, Homo sapien
cctggtccttattcttgcagtttgt

SEQ ID NO: 1193412 - DNA, 25 bp, Homo sapien
ttgcatcctggtccttattcttgca

SEQ ID NO: 1193413 - DNA, 25 bp, Homo sapien
tttgcatcctggtccttattcttgc

SEQ ID NO: 1193414 - DNA, 25 bp, Homo sapien
agctctgatttcagaatgctgtcat

SEQ ID NO: 1193415 - DNA, 25 bp, Homo sapien
ttgatggtgactggtttccaagctc

SEQ ID NO: 1193416 - DNA, 25 bp, Homo sapien
gtcggctggaggttgatggtgactg

SEQ ID NO: 1193417 - DNA, 25 bp, Homo sapien
ggtgactggtttccaagctctgatt

SEQ ID NO: 1193418 - DNA, 25 bp, Homo sapien
tcctcttgacaaaagatgcattttg

SEQ ID NO: 1193419 - DNA, 25 bp, Homo sapien
caaaagatgcattttggggttgtcc

SEQ ID NO: 1193420 - DNA, 25 bp, Homo sapien
aagtagccaccaccggttcctcttg

SEQ ID NO: 1193421 - DNA, 25 bp, Homo sapien
ctatcagaggaagtagccaccaccg

SEQ ID NO: 1193422 - DNA, 25 bp, Homo sapien
gcagtggtttctacctcaggagtac

SEQ ID NO: 1193423 - DNA, 25 bp, Homo sapien
gtttctacctcaggagtactaaaga

SEQ ID NO: 1193424 - DNA, 25 bp, Homo sapien
tacctcaggagtactaaagaaccaa

SEQ ID NO: 1193425 - DNA, 25 bp, Homo sapien
accaaaaactcccagaggcaagagc

SEQ ID NO: 1193426 - DNA, 25 bp, Homo sapien
ggaaatgactcaaagcggtgtacca

SEQ ID NO: 1193427 - DNA, 25 bp, Homo sapien
ggatggcacggacactacgaaaaga

SEQ ID NO: 1193428 - DNA, 25 bp, Homo sapien
ttcttcagcatctcgggcagcagtg

SEQ ID NO: 1193429 - DNA, 25 bp, Homo sapien
tacgaaaagaagaataggcatcagc

SEQ ID NO: 1193430 - DNA, 25 bp, Homo sapien
cttcctccaataagacagtcaggac

SEQ ID NO: 1193431 - DNA, 25 bp, Homo sapien
taaggctacatctttgaaggccgcg

SEQ ID NO: 1193432 - DNA, 25 bp, Homo sapien
tttaggcctagacttgttccaagtg

SEQ ID NO: 1193433 - DNA, 25 bp, Homo sapien
gaaggccgcgttttcatggtcacaa

SEQ ID NO: 1193434 - DNA, 25 bp, Homo sapien
ctaagtgagaaatacggctccagag

SEQ ID NO: 1193435 - DNA, 25 bp, Homo sapien
ccagaggccattcagtttgtctggg

SEQ ID NO: 1193436 - DNA, 25 bp, Homo sapien
gtccatatgattgtaggagttgggt

SEQ ID NO: 1193437 - DNA, 25 bp, Homo sapien
ttataagcagatgccccttttcagg

SEQ ID NO: 1193438 - DNA, 25 bp, Homo sapien
gactgcaacaagtggatgcgcggaa

SEQ ID NO: 1193439 - DNA, 25 bp, Homo sapien
aaagcttcagggtgtgtccaaaata

SEQ ID NO: 1193440 - DNA, 25 bp, Homo sapien
actggagggcaataagcatggtctc

SEQ ID NO: 1193441 - DNA, 25 bp, Homo sapien
tatggcgttgcactagaggacttgg

SEQ ID NO: 1193442 - DNA, 25 bp, Homo sapien
ttaaagtcatttacagatcagctgc

SEQ ID NO: 1193443 - DNA, 25 bp, Homo sapien
gaatactggtagtactagaggaaag

SEQ ID NO: 1193444 - DNA, 25 bp, Homo sapien
ctctcaaagggtaaatgacaaagcc

SEQ ID NO: 1193445 - DNA, 25 bp, Homo sapien
tctactaccacttgtggaactctca

SEQ ID NO: 1193446 - DNA, 25 bp, Homo sapien
tgttcaaggaaaatacttggatttc

SEQ ID NO: 1193447 - DNA, 25 bp, Homo sapien
attgttcaaggaaaatacttggatt

SEQ ID NO: 1193448 - DNA, 25 bp, Homo sapien
aaaggttaagaagccaggtgtagtg

SEQ ID NO: 1193449 - DNA, 25 bp, Homo sapien
aagtcaggaatatctaacttaactg

SEQ ID NO: 1193450 - DNA, 25 bp, Homo sapien
gaaagttacggctattccacttcta

SEQ ID NO: 1193451 - DNA, 25 bp, Homo sapien
tggagattcttttgctaagtcagga

SEQ ID NO: 1193452 - DNA, 25 bp, Homo sapien
ttttcctttctaggccaggctccgc

SEQ ID NO: 1193453 - DNA, 25 bp, Homo sapien
aacttgagatcatagggaaactgga

SEQ ID NO: 1193454 - DNA, 25 bp, Homo sapien
ctgttgtcagccagttacaatgtgc

SEQ ID NO: 1193455 - DNA, 25 bp, Homo sapien
tagaccctagctcctattctgaagc

SEQ ID NO: 1193456 - DNA, 25 bp, Homo sapien
taaaaattagcagaacatgagattg

SEQ ID NO: 1193457 - DNA, 25 bp, Homo sapien
cacgctgctgggttttgtaacaata

SEQ ID NO: 1193458 - DNA, 25 bp, Homo sapien
tttcactgaagtgctgccctaagaa

SEQ ID NO: 1193459 - DNA, 25 bp, Homo sapien
tatcttgtaatgcttgcgatgaatt

SEQ ID NO: 1193460 - DNA, 25 bp, Homo sapien
tgctgccacagggtaataaaggata

SEQ ID NO: 1193461 - DNA, 25 bp, Homo sapien
cattctgtgattgccacggtgcata

SEQ ID NO: 1193462 - DNA, 25 bp, Homo sapien
gaagattcaccagtcatttgagccc

SEQ ID NO: 1193463 - DNA, 25 bp, Homo sapien
cagtcactttaaaatgcgcaggaaa

SEQ ID NO: 1193464 - DNA, 25 bp, Homo sapien
caagtttgatctagtacatggccac

SEQ ID NO: 1193465 - DNA, 25 bp, Homo sapien
tatagagggctgtatagcatgcagt

SEQ ID NO: 1193466 - DNA, 25 bp, Homo sapien
taaagcttggtgttctattgaggga

SEQ ID NO: 1193467 - DNA, 25 bp, Homo sapien
aacataattaactactcagggtgaa

SEQ ID NO: 1193468 - DNA, 25 bp, Homo sapien
gcaaactaatggagctcaagaaggg

SEQ ID NO: 1193469 - DNA, 25 bp, Homo sapien
cagcatgactgtatagtgtttccga

SEQ ID NO: 1193470 - DNA, 25 bp, Homo sapien
tatagctagttggttaggacccttg

SEQ ID NO: 1193471 - DNA, 25 bp, Homo sapien
ggatcaccattgtctatgcaggctg

SEQ ID NO: 1193472 - DNA, 25 bp, Homo sapien
gcagttccagtaagaagtaactacc

SEQ ID NO: 1193473 - DNA, 25 bp, Homo sapien
cctagggaacggtagggcagaatca

SEQ ID NO: 1193474 - DNA, 25 bp, Homo sapien
gtagggcagaatcaactctacccat

SEQ ID NO: 1193475 - DNA, 25 bp, Homo sapien
ttagcagcagttccagtaagaagta

SEQ ID NO: 1193476 - DNA, 25 bp, Homo sapien
ctgaaaggcagagtagcctgtggct

SEQ ID NO: 1193477 - DNA, 25 bp, Homo sapien
tgaaaggcagagtagcctgtggctg

SEQ ID NO: 1193478 - DNA, 25 bp, Homo sapien
tcaggcctgaaaaaggcatagcaac

SEQ ID NO: 1193479 - DNA, 25 bp, Homo sapien
gattcaggcctgaaaaaggcatagc

SEQ ID NO: 1193480 - DNA, 25 bp, Homo sapien
tcgtagtaggggcattgagaagaca

SEQ ID NO: 1193481 - DNA, 25 bp, Homo sapien
gagagcttgatgcgtgggccaaaat

SEQ ID NO: 1193482 - DNA, 25 bp, Homo sapien
caagctcgtagtaggggcattgaga

SEQ ID NO: 1193483 - DNA, 25 bp, Homo sapien
aagacaatatggagagcttgatgcg

SEQ ID NO: 1193484 - DNA, 25 bp, Homo sapien
ctgtatttctgttcatggccgtcac

SEQ ID NO: 1193485 - DNA, 25 bp, Homo sapien
tcctcctcgtttcctctgtatttct

SEQ ID NO: 1193486 - DNA, 25 bp, Homo sapien
gttcatggccgtcacagaacactct

SEQ ID NO: 1193487 - DNA, 25 bp, Homo sapien
tcagctcccatattaaggttatcat

SEQ ID NO: 1193488 - DNA, 25 bp, Homo sapien
gatagttatttacccagagactgtt

SEQ ID NO: 1193489 - DNA, 25 bp, Homo sapien
gaactccgatagttatttacccaga

SEQ ID NO: 1193490 - DNA, 25 bp, Homo sapien
ctgtccaccttctgaactccgatag

SEQ ID NO: 1193491 - DNA, 25 bp, Homo sapien
tctgaactccgatagttatttaccc

SEQ ID NO: 1193492 - DNA, 25 bp, Homo sapien
agccatgtttggtgcgtcgaagttt

SEQ ID NO: 1193493 - DNA, 25 bp, Homo sapien
gtgggagcgaaataaaacaaggagc

SEQ ID NO: 1193494 - DNA, 25 bp, Homo sapien
gagcgaaataaaacaaggagcagaa

SEQ ID NO: 1193495 - DNA, 25 bp, Homo sapien
tgcgtcgaagtttaaactcgtagga

SEQ ID NO: 1193496 - DNA, 25 bp, Homo sapien
gagtcacttcgtcaggggcggccca

SEQ ID NO: 1193497 - DNA, 25 bp, Homo sapien
tacagcccaacaactgacacggagg

SEQ ID NO: 1193498 - DNA, 25 bp, Homo sapien
gcagttctctctggcgcaggtctgg

SEQ ID NO: 1193499 - DNA, 25 bp, Homo sapien
aggggcggcccagtcgccattacag

SEQ ID NO: 1193500 - DNA, 25 bp, Homo sapien
aaggaagacaaggcggaaaggctgc

SEQ ID NO: 1193501 - DNA, 25 bp, Homo sapien
gaaggaagacaaggcggaaaggctg

SEQ ID NO: 1193502 - DNA, 25 bp, Homo sapien
cgcaccggctccggggatccgccgg

SEQ ID NO: 1193503 - DNA, 25 bp, Homo sapien
ccacggtgcatcccgcggagcctgg

SEQ ID NO: 1193504 - DNA, 25 bp, Homo sapien
ggagggtgcagtgacgccgccccga

SEQ ID NO: 1193505 - DNA, 25 bp, Homo sapien
cggagggtgcagtgacgccgccccg

SEQ ID NO: 1193506 - DNA, 25 bp, Homo sapien
agggtgcagtgacgccgccccgacc

SEQ ID NO: 1193507 - DNA, 25 bp, Homo sapien
ctgagagtgtcgcctccgccctcgg

SEQ ID NO: 1193508 - DNA, 25 bp, Homo sapien
cactggcacgtaaggaaggaaattc

SEQ ID NO: 1193509 - DNA, 25 bp, Homo sapien
agggccaagactctccgcgcccggc

SEQ ID NO: 1193510 - DNA, 25 bp, Homo sapien
aggacactggcacgtaaggaaggaa

SEQ ID NO: 1193511 - DNA, 25 bp, Homo sapien
aaggaaattccgtcttcagcaggca

SEQ ID NO: 1193512 - DNA, 25 bp, Homo sapien
cagcaaaggctagaggtatcttacc

SEQ ID NO: 1193513 - DNA, 25 bp, Homo sapien
tcagcagccgctagactagagtaga

SEQ ID NO: 1193514 - DNA, 25 bp, Homo sapien
tccctatacttgagaatgtgatccc

SEQ ID NO: 1193515 - DNA, 25 bp, Homo sapien
aaatacgcctgatcgccagatgaag

SEQ ID NO: 1193516 - DNA, 25 bp, Homo sapien
caaaacaatcaggtggagtacatgg

SEQ ID NO: 1193517 - DNA, 25 bp, Homo sapien
taacatggcaacaataacgacttcc

SEQ ID NO: 1193518 - DNA, 25 bp, Homo sapien
cataaattgattgccccacagaagg

SEQ ID NO: 1193519 - DNA, 25 bp, Homo sapien
ggcaggaggtatcgttaacatggca

SEQ ID NO: 1193520 - DNA, 25 bp, Homo sapien
catcaagatattactacttttcagt

SEQ ID NO: 1193521 - DNA, 25 bp, Homo sapien
caacaataaaatcatcaagatatta

SEQ ID NO: 1193522 - DNA, 25 bp, Homo sapien
caataaaatcatcaagatattacta

SEQ ID NO: 1193523 - DNA, 25 bp, Homo sapien
aatcatcaagatattactacttttc

SEQ ID NO: 1193524 - DNA, 25 bp, Homo sapien
taatagtgattaaaggatctctgcc

SEQ ID NO: 1193525 - DNA, 25 bp, Homo sapien
aattaccgtaacctgttgccagagc

SEQ ID NO: 1193526 - DNA, 25 bp, Homo sapien
catggaacttacagaccagatgaga

SEQ ID NO: 1193527 - DNA, 25 bp, Homo sapien
tatattcccaagagttgaggtgtgc

SEQ ID NO: 1193528 - DNA, 25 bp, Homo sapien
taagttaacactttggattcatgaa

SEQ ID NO: 1193529 - DNA, 25 bp, Homo sapien
aacaaatgtagacttagcagctgtg

SEQ ID NO: 1193530 - DNA, 25 bp, Homo sapien
gccaagttgatcacaattatgttct

SEQ ID NO: 1193531 - DNA, 25 bp, Homo sapien
taatactgaatagactgccaagttg

SEQ ID NO: 1193532 - DNA, 25 bp, Homo sapien
cttttaatcttgatagggaatgcca

SEQ ID NO: 1193533 - DNA, 25 bp, Homo sapien
cttccagaaggttgctccaatggta

SEQ ID NO: 1193534 - DNA, 25 bp, Homo sapien
aggttgctccaatggtatcaattta

SEQ ID NO: 1193535 - DNA, 25 bp, Homo sapien
ttaatcttgatagggaatgccaaat

SEQ ID NO: 1193536 - DNA, 25 bp, Homo sapien
gaacttaaggacatcaaggcctctg

SEQ ID NO: 1193537 - DNA, 25 bp, Homo sapien
gacatcaaggcctctggatattgta

SEQ ID NO: 1193538 - DNA, 25 bp, Homo sapien
catcaaggcctctggatattgtaaa

SEQ ID NO: 1193539 - DNA, 25 bp, Homo sapien
taaggacatcaaggcctctggatat

SEQ ID NO: 1193540 - DNA, 25 bp, Homo sapien
gacatcagcggggttttcaaaggta

SEQ ID NO: 1193541 - DNA, 25 bp, Homo sapien
cactgacatcagcggggttttcaaa

SEQ ID NO: 1193542 - DNA, 25 bp, Homo sapien
acactgacatcagcggggttttcaa

SEQ ID NO: 1193543 - DNA, 25 bp, Homo sapien
ctgacatcagcggggttttcaaagg

SEQ ID NO: 1193544 - DNA, 25 bp, Homo sapien
aaggttccaggagtaaagcagtcag

SEQ ID NO: 1193545 - DNA, 25 bp, Homo sapien
caacacagccttctggccagtattt

SEQ ID NO: 1193546 - DNA, 25 bp, Homo sapien
gaaggttccaggagtaaagcagtca

SEQ ID NO: 1193547 - DNA, 25 bp, Homo sapien
cagcagcaaacttcaacacagcctt

SEQ ID NO: 1193548 - DNA, 25 bp, Homo sapien
tcacaggaaatggtggcacacacac

SEQ ID NO: 1193549 - DNA, 25 bp, Homo sapien
acacacagaacttccccggccagca

SEQ ID NO: 1193550 - DNA, 25 bp, Homo sapien
cggccagcacccaccatatcaaacc

SEQ ID NO: 1193551 - DNA, 25 bp, Homo sapien
gagcttccttattgttgcacgggat

SEQ ID NO: 1193552 - DNA, 25 bp, Homo sapien
ttatcactacggcagtaaatgaggg

SEQ ID NO: 1193553 - DNA, 25 bp, Homo sapien
tctcagctacccatgcaaagcaaag

SEQ ID NO: 1193554 - DNA, 25 bp, Homo sapien
gactactaggtctatggcttcaacc

SEQ ID NO: 1193555 - DNA, 25 bp, Homo sapien
aaatttgacccgctgataacagggc

SEQ ID NO: 1193556 - DNA, 25 bp, Homo sapien
ggttctgacctctacaatctcataa

SEQ ID NO: 1193557 - DNA, 25 bp, Homo sapien
aaaccttagccacagtaattaggca

SEQ ID NO: 1193558 - DNA, 25 bp, Homo sapien
gcatatcaactgcttgtgctaacaa

SEQ ID NO: 1193559 - DNA, 25 bp, Homo sapien
gaaatggtccttacagatgaaaaaa

SEQ ID NO: 1193560 - DNA, 25 bp, Homo sapien
ttgctttgagagttccttggatttg

SEQ ID NO: 1193561 - DNA, 25 bp, Homo sapien
cttgaacagtatccttgctttgaga

SEQ ID NO: 1193562 - DNA, 25 bp, Homo sapien
gagttccttggatttggtaaaggca

SEQ ID NO: 1193563 - DNA, 25 bp, Homo sapien
tgaacagtatccttgctttgagagt

SEQ ID NO: 1193564 - DNA, 25 bp, Homo sapien
ggtttgagaaagtgcatcccacgat

SEQ ID NO: 1193565 - DNA, 25 bp, Homo sapien
tttgagaaagtgcatcccacgatgt

SEQ ID NO: 1193566 - DNA, 25 bp, Homo sapien
tgagaaagtgcatcccacgatgtgg

SEQ ID NO: 1193567 - DNA, 25 bp, Homo sapien
cttggtttgagaaagtgcatcccac

SEQ ID NO: 1193568 - DNA, 25 bp, Homo sapien
ctccctcagcctccctagaggctgg

SEQ ID NO: 1193569 - DNA, 25 bp, Homo sapien
tctccctcagcctccctagaggctg

SEQ ID NO: 1193570 - DNA, 25 bp, Homo sapien
cttgtaggggctacttctaatttat

SEQ ID NO: 1193571 - DNA, 25 bp, Homo sapien
ctgtacttgtaggggctacttctaa

SEQ ID NO: 1193572 - DNA, 25 bp, Homo sapien
tatttttcgagtagcacttgtagaa

SEQ ID NO: 1193573 - DNA, 25 bp, Homo sapien
acttatttttcgagtagcacttgta

SEQ ID NO: 1193574 - DNA, 25 bp, Homo sapien
tttcgagtagcacttgtagaagact

SEQ ID NO: 1193575 - DNA, 25 bp, Homo sapien
tttctacttatttttcgagtagcac

SEQ ID NO: 1193576 - DNA, 25 bp, Homo sapien
gtggccctgagaggactacgagatt

SEQ ID NO: 1193577 - DNA, 25 bp, Homo sapien
ggttcacgaaattccacacgattat

SEQ ID NO: 1193578 - DNA, 25 bp, Homo sapien
gatttggagattggagcattaaccc

SEQ ID NO: 1193579 - DNA, 25 bp, Homo sapien
cttttcgtgatttagtggatttgga

SEQ ID NO: 1193580 - DNA, 25 bp, Homo sapien
tacaaacatatacctagaactacca

SEQ ID NO: 1193581 - DNA, 25 bp, Homo sapien
agatttatattctcaggcctgacca

SEQ ID NO: 1193582 - DNA, 25 bp, Homo sapien
cattagtaaagtgtccctcaaatac

SEQ ID NO: 1193583 - DNA, 25 bp, Homo sapien
gcttcgatactagtgataactccca

SEQ ID NO: 1193584 - DNA, 25 bp, Homo sapien
tcaagaccaccccatgagttcaaga

SEQ ID NO: 1193585 - DNA, 25 bp, Homo sapien
aaattagtcggtcatggtagctagc

SEQ ID NO: 1193586 - DNA, 25 bp, Homo sapien
ggtagctagcgcctgtaagcctcag

SEQ ID NO: 1193587 - DNA, 25 bp, Homo sapien
ctgtaagcctcagctaggaagctga

SEQ ID NO: 1193588 - DNA, 25 bp, Homo sapien
tggaactgaaattggaaggtgcacc

SEQ ID NO: 1193589 - DNA, 25 bp, Homo sapien
cattaacatctacacagtatacgtg

SEQ ID NO: 1193590 - DNA, 25 bp, Homo sapien
acagtatacgtgctttgattccaga

SEQ ID NO: 1193591 - DNA, 25 bp, Homo sapien
tatcatccagttaccgctctcagtc

SEQ ID NO: 1193592 - DNA, 25 bp, Homo sapien
gattgggagctctcaaaatcacagc

SEQ ID NO: 1193593 - DNA, 25 bp, Homo sapien
caatgcatcaattgctggtcgatca

SEQ ID NO: 1193594 - DNA, 25 bp, Homo sapien
catgggccatgttattcacagaaag

SEQ ID NO: 1193595 - DNA, 25 bp, Homo sapien
cgcttttggatcagtatcatgggcc

SEQ ID NO: 1193596 - DNA, 25 bp, Homo sapien
catcatgttgtcgccgctttagaat

SEQ ID NO: 1193597 - DNA, 25 bp, Homo sapien
tcatgttgtcgccgctttagaatat

SEQ ID NO: 1193598 - DNA, 25 bp, Homo sapien
gacatcatgttgtcgccgctttaga

SEQ ID NO: 1193599 - DNA, 25 bp, Homo sapien
tgacatcatgttgtcgccgctttag

SEQ ID NO: 1193600 - DNA, 25 bp, Homo sapien
tatcaacattaacaaccattactgg

SEQ ID NO: 1193601 - DNA, 25 bp, Homo sapien
ttttgctgttactgagttatcaaca

SEQ ID NO: 1193602 - DNA, 25 bp, Homo sapien
atggtcaatatgacccagcttctgg

SEQ ID NO: 1193603 - DNA, 25 bp, Homo sapien
ctggccccggccatttgtttcttct

SEQ ID NO: 1193604 - DNA, 25 bp, Homo sapien
ggtgatcctctctattcaaatacac

SEQ ID NO: 1193605 - DNA, 25 bp, Homo sapien
tattcaaatacaccctagggagaaa

SEQ ID NO: 1193606 - DNA, 25 bp, Homo sapien
gcagtcaagaataacatcctgttct

SEQ ID NO: 1193607 - DNA, 25 bp, Homo sapien
ctgttctaaaggtgatcctctctat

SEQ ID NO: 1193608 - DNA, 25 bp, Homo sapien
tttcccatcaggtgttcgaatcttg

SEQ ID NO: 1193609 - DNA, 25 bp, Homo sapien
ccatcaggtgttcgaatcttggtct

SEQ ID NO: 1193610 - DNA, 25 bp, Homo sapien
cccatcaggtgttcgaatcttggtc

SEQ ID NO: 1193611 - DNA, 25 bp, Homo sapien
acactttcccatcaggtgttcgaat

SEQ ID NO: 1193612 - DNA, 25 bp, Homo sapien
aagtgaagtgctaaatctcgataca

SEQ ID NO: 1193613 - DNA, 25 bp, Homo sapien
gctaaatctcgatacagttctctac

SEQ ID NO: 1193614 - DNA, 25 bp, Homo sapien
gaagtgctaaatctcgatacagttc

SEQ ID NO: 1193615 - DNA, 25 bp, Homo sapien
gtgctaaatctcgatacagttctct

SEQ ID NO: 1193616 - DNA, 25 bp, Homo sapien
tacttgataactgtgctactttttg

SEQ ID NO: 1193617 - DNA, 25 bp, Homo sapien
tactggcttgactactttcttctct

SEQ ID NO: 1193618 - DNA, 25 bp, Homo sapien
cattctgtacttgataactgtgcta

SEQ ID NO: 1193619 - DNA, 25 bp, Homo sapien
ttttggacttttcgtactggcttga

SEQ ID NO: 1193620 - DNA, 25 bp, Homo sapien
tctgtcacttgatgctgttctttgc

SEQ ID NO: 1193621 - DNA, 25 bp, Homo sapien
gatgtacttataagatgactactac

SEQ ID NO: 1193622 - DNA, 25 bp, Homo sapien
ttccacctctgtcacttgatgctgt

SEQ ID NO: 1193623 - DNA, 25 bp, Homo sapien
taatttttgtccatctcgccaagaa

SEQ ID NO: 1193624 - DNA, 25 bp, Homo sapien
gtgatataccgaaattctatactca

SEQ ID NO: 1193625 - DNA, 25 bp, Homo sapien
aaagtatgaactgttagtgatatac

SEQ ID NO: 1193626 - DNA, 25 bp, Homo sapien
tatgaactgttagtgatataccgaa

SEQ ID NO: 1193627 - DNA, 25 bp, Homo sapien
actgttagtgatataccgaaattct

SEQ ID NO: 1193628 - DNA, 25 bp, Homo sapien
gagatttacttctcgaacgttctga

SEQ ID NO: 1193629 - DNA, 25 bp, Homo sapien
tattattttcagaccgagatttact

SEQ ID NO: 1193630 - DNA, 25 bp, Homo sapien
ttgaagatgtctatgtaaaacgtcc

SEQ ID NO: 1193631 - DNA, 25 bp, Homo sapien
taaaacgtccaacctgggatcagat

SEQ ID NO: 1193632 - DNA, 25 bp, Homo sapien
cagctgtaggtcatcaagaatgcca

SEQ ID NO: 1193633 - DNA, 25 bp, Homo sapien
aagtttcctgtagtcgcctagttgc

SEQ ID NO: 1193634 - DNA, 25 bp, Homo sapien
catagtggcgccttttggaaataac

SEQ ID NO: 1193635 - DNA, 25 bp, Homo sapien
tactgggctgtgactcctaggagca

SEQ ID NO: 1193636 - DNA, 25 bp, Homo sapien
catgaaggccatgattattataagt

SEQ ID NO: 1193637 - DNA, 25 bp, Homo sapien
gactctcctttgtatatgtcactac

SEQ ID NO: 1193638 - DNA, 25 bp, Homo sapien
tctgagcatactaggaatgatgggt

SEQ ID NO: 1193639 - DNA, 25 bp, Homo sapien
cacatttatcacattactcctcata

SEQ ID NO: 1193640 - DNA, 25 bp, Homo sapien
ttaagtcacctcagctctacaaaga

SEQ ID NO: 1193641 - DNA, 25 bp, Homo sapien
taaaatccaacggagagccaggcac

SEQ ID NO: 1193642 - DNA, 25 bp, Homo sapien
gttctgtcacaaagatatattcagg

SEQ ID NO: 1193643 - DNA, 25 bp, Homo sapien
aataaacaatttccggccaggagcg

SEQ ID NO: 1193644 - DNA, 25 bp, Homo sapien
catgtcactactggaagatgcactt

SEQ ID NO: 1193645 - DNA, 25 bp, Homo sapien
tgcacttgggggacgttcctgtact

SEQ ID NO: 1193646 - DNA, 25 bp, Homo sapien
cagattctccagatggctgataccc

SEQ ID NO: 1193647 - DNA, 25 bp, Homo sapien
tctgagagagacatgtcactactgg

SEQ ID NO: 1193648 - DNA, 25 bp, Homo sapien
tgaacatagaccactccgctaaatt

SEQ ID NO: 1193649 - DNA, 25 bp, Homo sapien
ttctctgaacatagaccactccgct

SEQ ID NO: 1193650 - DNA, 25 bp, Homo sapien
agaccactccgctaaatttcatgaa

SEQ ID NO: 1193651 - DNA, 25 bp, Homo sapien
tagaccactccgctaaatttcatga

SEQ ID NO: 1193652 - DNA, 25 bp, Homo sapien
tggctggcactaggttttaacaagg

SEQ ID NO: 1193653 - DNA, 25 bp, Homo sapien
tgctgacccatagttaatgctggcc

SEQ ID NO: 1193654 - DNA, 25 bp, Homo sapien
agttgcatgagatacacagcttccc

SEQ ID NO: 1193655 - DNA, 25 bp, Homo sapien
tttcaaggcttcaatacgatccagt

SEQ ID NO: 1193656 - DNA, 25 bp, Homo sapien
taaagcttgatatggcactctgtgg

SEQ ID NO: 1193657 - DNA, 25 bp, Homo sapien
catatcagagctagaagagtcagtc

SEQ ID NO: 1193658 - DNA, 25 bp, Homo sapien
gagactcccctcactaagaagaggc

SEQ ID NO: 1193659 - DNA, 25 bp, Homo sapien
tattaatgacgctatgtggacttcc

SEQ ID NO: 1193660 - DNA, 25 bp, Homo sapien
tcatatgaaacaccacttagaggag

SEQ ID NO: 1193661 - DNA, 25 bp, Homo sapien
tgatgttcctctgtccaacttgtct

SEQ ID NO: 1193662 - DNA, 25 bp, Homo sapien
ttgcggtggcattcaaaggccgtga

SEQ ID NO: 1193663 - DNA, 25 bp, Homo sapien
tttctgtcgaagtcccagtccctgg

SEQ ID NO: 1193664 - DNA, 25 bp, Homo sapien
tatgtaatcactaggagactataac

SEQ ID NO: 1193665 - DNA, 25 bp, Homo sapien
aaagatggcttaacactttattatt

SEQ ID NO: 1193666 - DNA, 25 bp, Homo sapien
actaggagactataactacaatcaa

SEQ ID NO: 1193667 - DNA, 25 bp, Homo sapien
aaaatctatgtaatcactaggagac

SEQ ID NO: 1193668 - DNA, 25 bp, Homo sapien
cacagaggaaggatcataggcagac

SEQ ID NO: 1193669 - DNA, 25 bp, Homo sapien
acagaggaaggatcataggcagact

SEQ ID NO: 1193670 - DNA, 25 bp, Homo sapien
tccacagaggaaggatcataggcag

SEQ ID NO: 1193671 - DNA, 25 bp, Homo sapien
ccacagaggaaggatcataggcaga

SEQ ID NO: 1193672 - DNA, 25 bp, Homo sapien
cagcagactgggctcctgatgaatg

SEQ ID NO: 1193673 - DNA, 25 bp, Homo sapien
aagaagtagatgaacgagacgatgc

SEQ ID NO: 1193674 - DNA, 25 bp, Homo sapien
cgagacgatgcagcagactgggctc

SEQ ID NO: 1193675 - DNA, 25 bp, Homo sapien
tagatgaacgagacgatgcagcaga

SEQ ID NO: 1193676 - DNA, 25 bp, Homo sapien
gaaaagattcatgatgttatatatc

SEQ ID NO: 1193677 - DNA, 25 bp, Homo sapien
gaaagctaattacattaccataaga

SEQ ID NO: 1193678 - DNA, 25 bp, Homo sapien
taccataagaaattcttctaacttc

SEQ ID NO: 1193679 - DNA, 25 bp, Homo sapien
tctaacttcttatgcaatcaaatca

SEQ ID NO: 1193680 - DNA, 25 bp, Homo sapien
agagtctgctcaaaatctttaacag

SEQ ID NO: 1193681 - DNA, 25 bp, Homo sapien
gatcctccaaagtgctatctgtatc

SEQ ID NO: 1193682 - DNA, 25 bp, Homo sapien
tttttcctcatcaagaagtgagttc

SEQ ID NO: 1193683 - DNA, 25 bp, Homo sapien
cacagaatgtccagaaagatcctcc

SEQ ID NO: 1193684 - DNA, 25 bp, Homo sapien
agatcttcccttatctgatgagaca

SEQ ID NO: 1193685 - DNA, 25 bp, Homo sapien
tttctgagatcttcccttatctgat

SEQ ID NO: 1193686 - DNA, 25 bp, Homo sapien
tgagatcttcccttatctgatgaga

SEQ ID NO: 1193687 - DNA, 25 bp, Homo sapien
ctgagatcttcccttatctgatgag

SEQ ID NO: 1193688 - DNA, 25 bp, Homo sapien
ggcattactgacgacttagatcttt

SEQ ID NO: 1193689 - DNA, 25 bp, Homo sapien
tgaagaagttcctgcaacgtcaaac

SEQ ID NO: 1193690 - DNA, 25 bp, Homo sapien
tctctgtcgttgttctgctggctgc

SEQ ID NO: 1193691 - DNA, 25 bp, Homo sapien
cagatcagtgagaggtgcattaggc

SEQ ID NO: 1193692 - DNA, 25 bp, Homo sapien
tcctcaatggcgttcagataactga

SEQ ID NO: 1193693 - DNA, 25 bp, Homo sapien
gccatacgatgatggaggccagcag

SEQ ID NO: 1193694 - DNA, 25 bp, Homo sapien
gctagagacacactctcctgctgag

SEQ ID NO: 1193695 - DNA, 25 bp, Homo sapien
gctgagcaagtgaaatgcctctaac

SEQ ID NO: 1193696 - DNA, 25 bp, Homo sapien
ttgttcagcctttagtttcaagagg

SEQ ID NO: 1193697 - DNA, 25 bp, Homo sapien
ggccaagtctctttcatggcgttgc

SEQ ID NO: 1193698 - DNA, 25 bp, Homo sapien
ctttagtttcaagagggccaagtct

SEQ ID NO: 1193699 - DNA, 25 bp, Homo sapien
ctctttcatggcgttgctgttgtgc

SEQ ID NO: 1193700 - DNA, 25 bp, Homo sapien
cgggtttcttctaattgtctctgac

SEQ ID NO: 1193701 - DNA, 25 bp, Homo sapien
ctgagctgctttgtttcgggtttct

SEQ ID NO: 1193702 - DNA, 25 bp, Homo sapien
gagctgctttgtttcgggtttcttc

SEQ ID NO: 1193703 - DNA, 25 bp, Homo sapien
ttcgggtttcttctaattgtctctg

SEQ ID NO: 1193704 - DNA, 25 bp, Homo sapien
tcacagatttgacgtgctgcgtctg

SEQ ID NO: 1193705 - DNA, 25 bp, Homo sapien
cccgttgtgattgaaccacctgctg

SEQ ID NO: 1193706 - DNA, 25 bp, Homo sapien
gctattttacacgttgcttcctgca

SEQ ID NO: 1193707 - DNA, 25 bp, Homo sapien
ggacttcagttacttcccgttgtga

SEQ ID NO: 1193708 - DNA, 25 bp, Homo sapien
aaggtgctgccgttggtggtcatac

SEQ ID NO: 1193709 - DNA, 25 bp, Homo sapien
ttgcaaggggagctcctgaagccac

SEQ ID NO: 1193710 - DNA, 25 bp, Homo sapien
gaagccacgacagcatctgagatat

SEQ ID NO: 1193711 - DNA, 25 bp, Homo sapien
tatgagttctagtcaactctgccat

SEQ ID NO: 1193712 - DNA, 25 bp, Homo sapien
tgagagagtgaaacagatggacttt

SEQ ID NO: 1193713 - DNA, 25 bp, Homo sapien
gagagagtgaaacagatggactttt

SEQ ID NO: 1193714 - DNA, 25 bp, Homo sapien
ctgagagagtgaaacagatggactt

SEQ ID NO: 1193715 - DNA, 25 bp, Homo sapien
agagagtgaaacagatggacttttc

SEQ ID NO: 1193716 - DNA, 25 bp, Homo sapien
gattcttgtatcctgaagactcaga

SEQ ID NO: 1193717 - DNA, 25 bp, Homo sapien
tctatcatgattcttgtatcctgaa

SEQ ID NO: 1193718 - DNA, 25 bp, Homo sapien
tgatgctttgagtcaagggtccctt

SEQ ID NO: 1193719 - DNA, 25 bp, Homo sapien
tcagaataactatcatatgaagcag

SEQ ID NO: 1193720 - DNA, 25 bp, Homo sapien
agtctgaacctgttcatcaatggaa

SEQ ID NO: 1193721 - DNA, 25 bp, Homo sapien
tcaggaagagatggaacactatcac

SEQ ID NO: 1193722 - DNA, 25 bp, Homo sapien
gaactgaaggactttcttggcggct

SEQ ID NO: 1193723 - DNA, 25 bp, Homo sapien
cacttcgtagagaatcatctgcagc

SEQ ID NO: 1193724 - DNA, 25 bp, Homo sapien
tgggacaatccaacataaattcata

SEQ ID NO: 1193725 - DNA, 25 bp, Homo sapien
ccactaatgcacctatagaaaaatg

SEQ ID NO: 1193726 - DNA, 25 bp, Homo sapien
caattaatagccctttgcctcttta

SEQ ID NO: 1193727 - DNA, 25 bp, Homo sapien
gccagatcagatgctttacaaagga

SEQ ID NO: 1193728 - DNA, 25 bp, Homo sapien
catcttctgtcatggattcatcaaa

SEQ ID NO: 1193729 - DNA, 25 bp, Homo sapien
taaatctgcggtgactctctgaagg

SEQ ID NO: 1193730 - DNA, 25 bp, Homo sapien
gaatattctgttgcaatagacgttg

SEQ ID NO: 1193731 - DNA, 25 bp, Homo sapien
tctctgaaggtagtaatgatcgaaa

SEQ ID NO: 1193732 - DNA, 25 bp, Homo sapien
gatgctctaaccaggccaattcagc

SEQ ID NO: 1193733 - DNA, 25 bp, Homo sapien
tagaaaagctatcttgtcctcctga

SEQ ID NO: 1193734 - DNA, 25 bp, Homo sapien
tatactgtcgaaccatctccatagt

SEQ ID NO: 1193735 - DNA, 25 bp, Homo sapien
tcaaggccttttcacggagacgcag

SEQ ID NO: 1193736 - DNA, 25 bp, Homo sapien
aagcaaaccacgctgtttcttccgg

SEQ ID NO: 1193737 - DNA, 25 bp, Homo sapien
tgcaaccttaaaagcaaaccacgct

SEQ ID NO: 1193738 - DNA, 25 bp, Homo sapien
aaaccacgctgtttcttccggagcg

SEQ ID NO: 1193739 - DNA, 25 bp, Homo sapien
tgctgcaaccttaaaagcaaaccac

SEQ ID NO: 1193740 - DNA, 25 bp, Homo sapien
tctcctgtagttttatggtggtctg

SEQ ID NO: 1193741 - DNA, 25 bp, Homo sapien
ggtctgtcggatcttttctatctcc

SEQ ID NO: 1193742 - DNA, 25 bp, Homo sapien
gaatcagctgtctttccttccgagc

SEQ ID NO: 1193743 - DNA, 25 bp, Homo sapien
tccgagctgccttattggcttcttg

SEQ ID NO: 1193744 - DNA, 25 bp, Homo sapien
taagtggtagtaatgtatcaatgtt

SEQ ID NO: 1193745 - DNA, 25 bp, Homo sapien
atgagaagggcacccactttcaggt

SEQ ID NO: 1193746 - DNA, 25 bp, Homo sapien
caggtagtctgcagattaagtggta

SEQ ID NO: 1193747 - DNA, 25 bp, Homo sapien
tctcagataactcaggataatagaa

SEQ ID NO: 1193748 - DNA, 25 bp, Homo sapien
gaagatgggtagcaacagtaatgac

SEQ ID NO: 1193749 - DNA, 25 bp, Homo sapien
ttttaatcatactagggcatgggtt

SEQ ID NO: 1193750 - DNA, 25 bp, Homo sapien
tcttcctcttgaacagttaagtctt

SEQ ID NO: 1193751 - DNA, 25 bp, Homo sapien
taagtcttatagtcattggatgcga

SEQ ID NO: 1193752 - DNA, 25 bp, Homo sapien
gaaggactgcgggtctccaagtcag

SEQ ID NO: 1193753 - DNA, 25 bp, Homo sapien
ccaagtcagttggaccaggactggt

SEQ ID NO: 1193754 - DNA, 25 bp, Homo sapien
gcataatgctgctagtttcactgct

SEQ ID NO: 1193755 - DNA, 25 bp, Homo sapien
cactgctggagattgaaatgggaga

SEQ ID NO: 1193756 - DNA, 25 bp, Homo sapien
cttgctctgtacagctattcaactc

SEQ ID NO: 1193757 - DNA, 25 bp, Homo sapien
ttgctctgtacagctattcaactcc

SEQ ID NO: 1193758 - DNA, 25 bp, Homo sapien
acttgctctgtacagctattcaact

SEQ ID NO: 1193759 - DNA, 25 bp, Homo sapien
aacttgctctgtacagctattcaac

SEQ ID NO: 1193760 - DNA, 25 bp, Homo sapien
aagggaaagcgtaagagctgagtga

SEQ ID NO: 1193761 - DNA, 25 bp, Homo sapien
ggaaagcgtaagagctgagtgaaga

SEQ ID NO: 1193762 - DNA, 25 bp, Homo sapien
aatgagaaagggaaagcgtaagagc

SEQ ID NO: 1193763 - DNA, 25 bp, Homo sapien
gaaagggaaagcgtaagagctgagt

SEQ ID NO: 1193764 - DNA, 25 bp, Homo sapien
tgtagatatacagctggaatttggg

SEQ ID NO: 1193765 - DNA, 25 bp, Homo sapien
tgatgagacgtaaagacagagaaga

SEQ ID NO: 1193766 - DNA, 25 bp, Homo sapien
gcccagtgatgagacgtaaagacag

SEQ ID NO: 1193767 - DNA, 25 bp, Homo sapien
aagaagtagtgaacaggagagcagt

SEQ ID NO: 1193768 - DNA, 25 bp, Homo sapien
taatttttgctcccgctttgtcaga

SEQ ID NO: 1193769 - DNA, 25 bp, Homo sapien
atttttgctcccgctttgtcagaaa

SEQ ID NO: 1193770 - DNA, 25 bp, Homo sapien
aatttttgctcccgctttgtcagaa

SEQ ID NO: 1193771 - DNA, 25 bp, Homo sapien
tttttgctcccgctttgtcagaaac

SEQ ID NO: 1193772 - DNA, 25 bp, Homo sapien
gtttttccatttgacgaatttctgc

SEQ ID NO: 1193773 - DNA, 25 bp, Homo sapien
tccatttgacgaatttctgcttctt

SEQ ID NO: 1193774 - DNA, 25 bp, Homo sapien
tcttctgcatctaaacgtcgcttcc

SEQ ID NO: 1193775 - DNA, 25 bp, Homo sapien
taaacgtcgcttccactctaggagc

SEQ ID NO: 1193776 - DNA, 25 bp, Homo sapien
cggatggtacatattcaacagcagg

SEQ ID NO: 1193777 - DNA, 25 bp, Homo sapien
aatggagctttcactgtttagatga

SEQ ID NO: 1193778 - DNA, 25 bp, Homo sapien
gctgctcctgtcctatagactcgga

SEQ ID NO: 1193779 - DNA, 25 bp, Homo sapien
tatactgtgatctggactccctggc

SEQ ID NO: 1193780 - DNA, 25 bp, Homo sapien
ttgacacagatgtgcagcttttggg

SEQ ID NO: 1193781 - DNA, 25 bp, Homo sapien
tgacacagatgtgcagcttttggga

SEQ ID NO: 1193782 - DNA, 25 bp, Homo sapien
ctttgacacagatgtgcagcttttg

SEQ ID NO: 1193783 - DNA, 25 bp, Homo sapien
tgctttgacacagatgtgcagcttt

SEQ ID NO: 1193784 - DNA, 25 bp, Homo sapien
cagtcctatgacttcctttgctaga

SEQ ID NO: 1193785 - DNA, 25 bp, Homo sapien
tgaccaactataacagtgctgatgg

SEQ ID NO: 1193786 - DNA, 25 bp, Homo sapien
ctgactgtgtcatagataatgactc

SEQ ID NO: 1193787 - DNA, 25 bp, Homo sapien
tgatgggacttgataggcaggtgac

SEQ ID NO: 1193788 - DNA, 25 bp, Homo sapien
ttcttttccgcaactcatccttcag

SEQ ID NO: 1193789 - DNA, 25 bp, Homo sapien
tcaatatcactctggtcagatgtag

SEQ ID NO: 1193790 - DNA, 25 bp, Homo sapien
gatcctaccttcaatatcactctgg

SEQ ID NO: 1193791 - DNA, 25 bp, Homo sapien
tccttcagagctctgatcctacctt

SEQ ID NO: 1193792 - DNA, 25 bp, Homo sapien
taatgaagaatcctaatccattact

SEQ ID NO: 1193793 - DNA, 25 bp, Homo sapien
aaaaacattttagacgtcacataca

SEQ ID NO: 1193794 - DNA, 25 bp, Homo sapien
attttagacgtcacatacacattag

SEQ ID NO: 1193795 - DNA, 25 bp, Homo sapien
cacattagccttgatactaaacccc

SEQ ID NO: 1193796 - DNA, 25 bp, Homo sapien
tgttacacaacaaggaccaatgggt

SEQ ID NO: 1193797 - DNA, 25 bp, Homo sapien
tatgtgtaattagctgagctcctgg

SEQ ID NO: 1193798 - DNA, 25 bp, Homo sapien
ggctaaatacaacaaagagctcttc

SEQ ID NO: 1193799 - DNA, 25 bp, Homo sapien
cacttagagtctaacaaggaaacca

SEQ ID NO: 1193800 - DNA, 25 bp, Homo sapien
gagtttcaatagcagtaagtttctt

SEQ ID NO: 1193801 - DNA, 25 bp, Homo sapien
ttcatggtatctttaagaagttagt

SEQ ID NO: 1193802 - DNA, 25 bp, Homo sapien
ctctaaagagtgtactattactttc

SEQ ID NO: 1193803 - DNA, 25 bp, Homo sapien
gagtgtactattactttcatggtat

SEQ ID NO: 1193804 - DNA, 25 bp, Homo sapien
gaagctgaggagagcgttttaatct

SEQ ID NO: 1193805 - DNA, 25 bp, Homo sapien
tgaggagagcgttttaatctgaggc

SEQ ID NO: 1193806 - DNA, 25 bp, Homo sapien
ggctaagctcggcttcagttttctt

SEQ ID NO: 1193807 - DNA, 25 bp, Homo sapien
tccaaatcttggctaagctcggctt

SEQ ID NO: 1193808 - DNA, 25 bp, Homo sapien
cgttctgactctgttagtgatttcc

SEQ ID NO: 1193809 - DNA, 25 bp, Homo sapien
tttccaattctttgccgtttcagat

SEQ ID NO: 1193810 - DNA, 25 bp, Homo sapien
tgactctgttagtgatttccaattc

SEQ ID NO: 1193811 - DNA, 25 bp, Homo sapien
tctggaacgttctgactctgttagt

SEQ ID NO: 1193812 - DNA, 25 bp, Homo sapien
gtaggcctttgcataaatccttaga

SEQ ID NO: 1193813 - DNA, 25 bp, Homo sapien
ataaatccttagactatgtagctac

SEQ ID NO: 1193814 - DNA, 25 bp, Homo sapien
ggcctttgcataaatccttagacta

SEQ ID NO: 1193815 - DNA, 25 bp, Homo sapien
tgcataaatccttagactatgtagc

SEQ ID NO: 1193816 - DNA, 25 bp, Homo sapien
catatcaagaattctactagtggca

SEQ ID NO: 1193817 - DNA, 25 bp, Homo sapien
ctttgagaagatgtaatgcaggtac

SEQ ID NO: 1193818 - DNA, 25 bp, Homo sapien
gaaaatcttctgttcgactgtccca

SEQ ID NO: 1193819 - DNA, 25 bp, Homo sapien
tgattttccttgatgatctgagaac

SEQ ID NO: 1193820 - DNA, 25 bp, Homo sapien
tgtggaaatcaaataactcgtctgc

SEQ ID NO: 1193821 - DNA, 25 bp, Homo sapien
cattggctgtggcttatctctgcaa

SEQ ID NO: 1193822 - DNA, 25 bp, Homo sapien
tgaacatgggcttcaagtaccccag

SEQ ID NO: 1193823 - DNA, 25 bp, Homo sapien
tctgcagcgatggaaaccttttctg

SEQ ID NO: 1193824 - DNA, 25 bp, Homo sapien
tggtcatcaccaagaagctcctgat

SEQ ID NO: 1193825 - DNA, 25 bp, Homo sapien
gcaacctgaaatacttggcgactgt

SEQ ID NO: 1193826 - DNA, 25 bp, Homo sapien
tcaacattttgggataggtcttggg

SEQ ID NO: 1193827 - DNA, 25 bp, Homo sapien
cggtctgggacacatatctggagag

SEQ ID NO: 1193828 - DNA, 25 bp, Homo sapien
caggccaaccatgactgagtagata

SEQ ID NO: 1193829 - DNA, 25 bp, Homo sapien
gtccatgggcaacataaacaagctg

SEQ ID NO: 1193830 - DNA, 25 bp, Homo sapien
tggtgaccatctggctcaagttact

SEQ ID NO: 1193831 - DNA, 25 bp, Homo sapien
tacttttgctcaactgtccatgggc

SEQ ID NO: 1193832 - DNA, 25 bp, Homo sapien
ctagacctttactggcacagccaag

SEQ ID NO: 1193833 - DNA, 25 bp, Homo sapien
gggactgccaataatgtttcacatg

SEQ ID NO: 1193834 - DNA, 25 bp, Homo sapien
gatgctatgaagatcgtggcctaat

SEQ ID NO: 1193835 - DNA, 25 bp, Homo sapien
ttgatcatctcctaacgcgctcagg

SEQ ID NO: 1193836 - DNA, 25 bp, Homo sapien
tggatttttcactcgtcggaaataa

SEQ ID NO: 1193837 - DNA, 25 bp, Homo sapien
cggaaataactagagttgattctac

SEQ ID NO: 1193838 - DNA, 25 bp, Homo sapien
ttaagttgggatcctcagcaaatat

SEQ ID NO: 1193839 - DNA, 25 bp, Homo sapien
tggcttcatccagacaggttgattt

SEQ ID NO: 1193840 - DNA, 25 bp, Homo sapien
tgagtacttcacttgctatgaagct

SEQ ID NO: 1193841 - DNA, 25 bp, Homo sapien
taagactgaacaacttgagtacttc

SEQ ID NO: 1193842 - DNA, 25 bp, Homo sapien
caatctgttttgtggtttggctcct

SEQ ID NO: 1193843 - DNA, 25 bp, Homo sapien
caggatatgatccactcggtctctt

SEQ ID NO: 1193844 - DNA, 25 bp, Homo sapien
gatcccgtcggctagctgcattttc

SEQ ID NO: 1193845 - DNA, 25 bp, Homo sapien
tcagggtctcaaagatcccgtcggc

SEQ ID NO: 1193846 - DNA, 25 bp, Homo sapien
ctgatctgattcagaacatcaatag

SEQ ID NO: 1193847 - DNA, 25 bp, Homo sapien
caatagtatctttgatcagggtctc

SEQ ID NO: 1193848 - DNA, 25 bp, Homo sapien
ctcagcgttcgatttatttgcaaga

SEQ ID NO: 1193849 - DNA, 25 bp, Homo sapien
tagcactcagcgttcgatttatttg

SEQ ID NO: 1193850 - DNA, 25 bp, Homo sapien
ttagcactcagcgttcgatttattt

SEQ ID NO: 1193851 - DNA, 25 bp, Homo sapien
cactcagcgttcgatttatttgcaa

SEQ ID NO: 1193852 - DNA, 25 bp, Homo sapien
ggtgctgctcaactacaataatgga

SEQ ID NO: 1193853 - DNA, 25 bp, Homo sapien
gacaagtgcaggagtaaaccaaggg

SEQ ID NO: 1193854 - DNA, 25 bp, Homo sapien
tggatagtctcgaaaggcaaaggct

SEQ ID NO: 1193855 - DNA, 25 bp, Homo sapien
gcctggatgcctgagatggtcctga

SEQ ID NO: 1193856 - DNA, 25 bp, Homo sapien
gaggctgaacctcccagagaatgct

SEQ ID NO: 1193857 - DNA, 25 bp, Homo sapien
caagaaggcagggtactgaggtccc

SEQ ID NO: 1193858 - DNA, 25 bp, Homo sapien
gaccaggctatttacacgcacacag

SEQ ID NO: 1193859 - DNA, 25 bp, Homo sapien
taccaatatggaacgagtggctggg

SEQ ID NO: 1193860 - DNA, 25 bp, Homo sapien
ccagctttctgcctttcagacccca

SEQ ID NO: 1193861 - DNA, 25 bp, Homo sapien
cagctttctgcctttcagaccccat

SEQ ID NO: 1193862 - DNA, 25 bp, Homo sapien
gagcaaagtattacagtgggtgggg

SEQ ID NO: 1193863 - DNA, 25 bp, Homo sapien
cttgagcaaagtattacagtgggtg

SEQ ID NO: 1193864 - DNA, 25 bp, Homo sapien
ttgagcaaagtattacagtgggtgg

SEQ ID NO: 1193865 - DNA, 25 bp, Homo sapien
tgagcaaagtattacagtgggtggg

SEQ ID NO: 1193866 - DNA, 25 bp, Homo sapien
agacctccgattggcaggggttaat

SEQ ID NO: 1193867 - DNA, 25 bp, Homo sapien
gacctccgattggcaggggttaatc

SEQ ID NO: 1193868 - DNA, 25 bp, Homo sapien
tagacctccgattggcaggggttaa

SEQ ID NO: 1193869 - DNA, 25 bp, Homo sapien
catagacctccgattggcaggggtt

SEQ ID NO: 1193870 - DNA, 25 bp, Homo sapien
cagactcatagttaggaagccagga

SEQ ID NO: 1193871 - DNA, 25 bp, Homo sapien
gcttatgaggtagaataggcccgca

SEQ ID NO: 1193872 - DNA, 25 bp, Homo sapien
gataatctaccctgtcttaacagtg

SEQ ID NO: 1193873 - DNA, 25 bp, Homo sapien
gcaggccccgaagcaatctagctga

SEQ ID NO: 1193874 - DNA, 25 bp, Homo sapien
ggaagagggtaacagagattccttc

SEQ ID NO: 1193875 - DNA, 25 bp, Homo sapien
gaagagggtaacagagattccttcc

SEQ ID NO: 1193876 - DNA, 25 bp, Homo sapien
tatgggttggaagtactgcagcggc

SEQ ID NO: 1193877 - DNA, 25 bp, Homo sapien
gcagcggctggatcaggttccagta

SEQ ID NO: 1193878 - DNA, 25 bp, Homo sapien
gatcaggttccagtaaagttttgta

SEQ ID NO: 1193879 - DNA, 25 bp, Homo sapien
ttggaagtactgcagcggctggatc

SEQ ID NO: 1193880 - DNA, 25 bp, Homo sapien
gacggtcctctagtaacgctggatt

SEQ ID NO: 1193881 - DNA, 25 bp, Homo sapien
tctggaaccagaatggacggtcctc

SEQ ID NO: 1193882 - DNA, 25 bp, Homo sapien
gacgcagccaattccagttgctggg

SEQ ID NO: 1193883 - DNA, 25 bp, Homo sapien
ggactcagtccctgtacagcttctg

SEQ ID NO: 1193884 - DNA, 25 bp, Homo sapien
ctggtgtcatgggcactaaggtgtt

SEQ ID NO: 1193885 - DNA, 25 bp, Homo sapien
tgtcatgggcactaaggtgttaatg

SEQ ID NO: 1193886 - DNA, 25 bp, Homo sapien
catgggcactaaggtgttaatggat

SEQ ID NO: 1193887 - DNA, 25 bp, Homo sapien
ggtgtcatgggcactaaggtgttaa

SEQ ID NO: 1193888 - DNA, 25 bp, Homo sapien
cctctcgcaagtagcccgatcaact

SEQ ID NO: 1193889 - DNA, 25 bp, Homo sapien
tccctctcgcaagtagcccgatcaa

SEQ ID NO: 1193890 - DNA, 25 bp, Homo sapien
gtccctctcgcaagtagcccgatca

SEQ ID NO: 1193891 - DNA, 25 bp, Homo sapien
tctcgcaagtagcccgatcaactca

SEQ ID NO: 1193892 - DNA, 25 bp, Homo sapien
aagagggacgcttggtctgcgacca

SEQ ID NO: 1193893 - DNA, 25 bp, Homo sapien
ccgtatccaacggaagaggagtccg

SEQ ID NO: 1193894 - DNA, 25 bp, Homo sapien
gatttcggctgttgtagggcagttc

SEQ ID NO: 1193895 - DNA, 25 bp, Homo sapien
tggaatagacgacccggatttcggc

SEQ ID NO: 1193896 - DNA, 25 bp, Homo sapien
cacacgcaagcaccggatgagtcgg

SEQ ID NO: 1193897 - DNA, 25 bp, Homo sapien
gcaagcaccggatgagtcgggtccc

SEQ ID NO: 1193898 - DNA, 25 bp, Homo sapien
gcgctgcgctcaccaccacacgcaa

SEQ ID NO: 1193899 - DNA, 25 bp, Homo sapien
caccacacgcaagcaccggatgagt

SEQ ID NO: 1193900 - DNA, 25 bp, Homo sapien
tcggaaggcgaatagagcgccgacc

SEQ ID NO: 1193901 - DNA, 25 bp, Homo sapien
gcccggagccgctgttgcacctcct

SEQ ID NO: 1193902 - DNA, 25 bp, Homo sapien
cagcgggtcggaaggcgaatagagc

SEQ ID NO: 1193903 - DNA, 25 bp, Homo sapien
tgcagcagcgtcagcgggtcggaag

SEQ ID NO: 1193904 - DNA, 25 bp, Homo sapien
ccagcaccgcgccgcgcaccgtgtc

SEQ ID NO: 1193905 - DNA, 25 bp, Homo sapien
gggagcccagcaccgcgccgcgcac

SEQ ID NO: 1193906 - DNA, 25 bp, Homo sapien
gcaccgcgccgcgcaccgtgtccgc

SEQ ID NO: 1193907 - DNA, 25 bp, Homo sapien
ctgcgggagcccagcaccgcgccgc

SEQ ID NO: 1193908 - DNA, 25 bp, Homo sapien
ctttgacgtcttcggccagcgcctt

SEQ ID NO: 1193909 - DNA, 25 bp, Homo sapien
cacgtcggggcgaaggcgatgcagt

SEQ ID NO: 1193910 - DNA, 25 bp, Homo sapien
caccaggaggcgaagaactccacgg

SEQ ID NO: 1193911 - DNA, 25 bp, Homo sapien
ggcgaagaactccacggcccaggcg

SEQ ID NO: 1193912 - DNA, 25 bp, Homo sapien
acggtaaggtgtcagcggaccatgc

SEQ ID NO: 1193913 - DNA, 25 bp, Homo sapien
tggcccaggaaacggtaaggtgtca

SEQ ID NO: 1193914 - DNA, 25 bp, Homo sapien
aacaaaggagacctctcgcagggaa

SEQ ID NO: 1193915 - DNA, 25 bp, Homo sapien
ccctggacgagaggaagaggactgc

SEQ ID NO: 1193916 - DNA, 25 bp, Homo sapien
gtcatttggaatcctgtgaggctca

SEQ ID NO: 1193917 - DNA, 25 bp, Homo sapien
tctgagtcaagaggatccacggcac

SEQ ID NO: 1193918 - DNA, 25 bp, Homo sapien
gcagaaggttctacactcacgctgt

SEQ ID NO: 1193919 - DNA, 25 bp, Homo sapien
caccatgaacgtgcagtgggctcct

SEQ ID NO: 1193920 - DNA, 25 bp, Homo sapien
ctctgaagtctcttccctcacccaa

SEQ ID NO: 1193921 - DNA, 25 bp, Homo sapien
cctccacatcctgtccactctcctc

SEQ ID NO: 1193922 - DNA, 25 bp, Homo sapien
cacatcctgtccactctcctctgaa

SEQ ID NO: 1193923 - DNA, 25 bp, Homo sapien
tctgaagtctcttccctcacccaaa

SEQ ID NO: 1193924 - DNA, 25 bp, Homo sapien
gctggccgctgaaacattggcagag

SEQ ID NO: 1193925 - DNA, 25 bp, Homo sapien
tgccccgtgagcatccaccaaagtt

SEQ ID NO: 1193926 - DNA, 25 bp, Homo sapien
tctaaatgggatcagttccagaggg

SEQ ID NO: 1193927 - DNA, 25 bp, Homo sapien
gagaataatggcaccattctgggcc

SEQ ID NO: 1193928 - DNA, 25 bp, Homo sapien
tcacagtcgggaagccagggatgtt

SEQ ID NO: 1193929 - DNA, 25 bp, Homo sapien
gactgcactgttggtctcctcagca

SEQ ID NO: 1193930 - DNA, 25 bp, Homo sapien
gggcggcgagatacagggccggcct

SEQ ID NO: 1193931 - DNA, 25 bp, Homo sapien
gtctctgcagactgcactgttggtc

SEQ ID NO: 1193932 - DNA, 25 bp, Homo sapien
gacagatgactaccagactggccct

SEQ ID NO: 1193933 - DNA, 25 bp, Homo sapien
taagaaactatttgagagccgctgc

SEQ ID NO: 1193934 - DNA, 25 bp, Homo sapien
gtcagaaagctcaggtgtcaggccc

SEQ ID NO: 1193935 - DNA, 25 bp, Homo sapien
tgcataggacctcagagcagagacc

SEQ ID NO: 1193936 - DNA, 25 bp, Homo sapien
agtgagatgggacaacgggaaggaa

SEQ ID NO: 1193937 - DNA, 25 bp, Homo sapien
cccaggagtgagatgggacaacggg

SEQ ID NO: 1193938 - DNA, 25 bp, Homo sapien
ggagtgagatgggacaacgggaagg

SEQ ID NO: 1193939 - DNA, 25 bp, Homo sapien
caggagtgagatgggacaacgggaa

SEQ ID NO: 1193940 - DNA, 25 bp, Homo sapien
tctctgaccagtgaaagagctccgt

SEQ ID NO: 1193941 - DNA, 25 bp, Homo sapien
tgacagatggatggactgccacaca

SEQ ID NO: 1193942 - DNA, 25 bp, Homo sapien
gcataccctgggtacctatccctgg

SEQ ID NO: 1193943 - DNA, 25 bp, Homo sapien
tgagcccagcaaactcctgtggcat

SEQ ID NO: 1193944 - DNA, 25 bp, Homo sapien
gaagcccatgcggaaatcaagtcag

SEQ ID NO: 1193945 - DNA, 25 bp, Homo sapien
taaggaaaatggtccagcctccaga

SEQ ID NO: 1193946 - DNA, 25 bp, Homo sapien
tatccttattaagtcaaccactggg

SEQ ID NO: 1193947 - DNA, 25 bp, Homo sapien
ggctggtcttcacgaaactatggag

SEQ ID NO: 1193948 - DNA, 25 bp, Homo sapien
caggaagcaggacgacattttattt

SEQ ID NO: 1193949 - DNA, 25 bp, Homo sapien
gaagcaggacgacattttatttatc

SEQ ID NO: 1193950 - DNA, 25 bp, Homo sapien
accaggaagcaggacgacattttat

SEQ ID NO: 1193951 - DNA, 25 bp, Homo sapien
agcaggacgacattttatttatctc

SEQ ID NO: 1193952 - DNA, 25 bp, Homo sapien
tgccaaagccaatgactttgtccaa

SEQ ID NO: 1193953 - DNA, 25 bp, Homo sapien
gccaaagccaatgactttgtccaaa

SEQ ID NO: 1193954 - DNA, 25 bp, Homo sapien
tagcttcactttcgactgctctcct

SEQ ID NO: 1193955 - DNA, 25 bp, Homo sapien
ttcactttcgactgctctcctgtgc

SEQ ID NO: 1193956 - DNA, 25 bp, Homo sapien
cttgccctggtcctagcttcacttt

SEQ ID NO: 1193957 - DNA, 25 bp, Homo sapien
ggtcctagcttcactttcgactgct

SEQ ID NO: 1193958 - DNA, 25 bp, Homo sapien
gccaatgttcctggaacagcgtctg

SEQ ID NO: 1193959 - DNA, 25 bp, Homo sapien
tgttcctggaacagcgtctgccctt

SEQ ID NO: 1193960 - DNA, 25 bp, Homo sapien
caatgttcctggaacagcgtctgcc

SEQ ID NO: 1193961 - DNA, 25 bp, Homo sapien
aatgttcctggaacagcgtctgccc

SEQ ID NO: 1193962 - DNA, 25 bp, Homo sapien
tcccacgcctcacgctcttcaggaa

SEQ ID NO: 1193963 - DNA, 25 bp, Homo sapien
tctcctccgagttctggctcccacg

SEQ ID NO: 1193964 - DNA, 25 bp, Homo sapien
tgtctcctccgagttctggctccca

SEQ ID NO: 1193965 - DNA, 25 bp, Homo sapien
cacgcctcacgctcttcaggaactt

SEQ ID NO: 1193966 - DNA, 25 bp, Homo sapien
acttttcactaccttggacttctgc

SEQ ID NO: 1193967 - DNA, 25 bp, Homo sapien
tgtgggactctagcctcggggccac

SEQ ID NO: 1193968 - DNA, 25 bp, Homo sapien
ttcctgtgggactctagcctcgggg

SEQ ID NO: 1193969 - DNA, 25 bp, Homo sapien
gccacttttcactaccttggacttc

SEQ ID NO: 1193970 - DNA, 25 bp, Homo sapien
cgctcttccgattcaggagggaaca

SEQ ID NO: 1193971 - DNA, 25 bp, Homo sapien
gagggaacacagttgagttgtcctg

SEQ ID NO: 1193972 - DNA, 25 bp, Homo sapien
caagaggacagaccgaacagagcct

SEQ ID NO: 1193973 - DNA, 25 bp, Homo sapien
atgtacatgacaccccaagcctagt

SEQ ID NO: 1193974 - DNA, 25 bp, Homo sapien
tgctcccgagccgttcttggtaaag

SEQ ID NO: 1193975 - DNA, 25 bp, Homo sapien
tggaaatactgctcccgagccgttc

SEQ ID NO: 1193976 - DNA, 25 bp, Homo sapien
tactgctcccgagccgttcttggta

SEQ ID NO: 1193977 - DNA, 25 bp, Homo sapien
aatactgctcccgagccgttcttgg

SEQ ID NO: 1193978 - DNA, 25 bp, Homo sapien
gtcaatgagcctctcccgcagtgtc

SEQ ID NO: 1193979 - DNA, 25 bp, Homo sapien
ccgcagtgtctgcacgtcagcacca

SEQ ID NO: 1193980 - DNA, 25 bp, Homo sapien
ggactccagggcgtcaatgagcctc

SEQ ID NO: 1193981 - DNA, 25 bp, Homo sapien
gggccacgtgtcatgatgggactcc

SEQ ID NO: 1193982 - DNA, 25 bp, Homo sapien
ctaagcctgccccagcccaaagtac

SEQ ID NO: 1193983 - DNA, 25 bp, Homo sapien
gacctgtgcgataggaagcccacca

SEQ ID NO: 1193984 - DNA, 25 bp, Homo sapien
ctgtgcgataggaagcccaccacca

SEQ ID NO: 1193985 - DNA, 25 bp, Homo sapien
agccccagaaaaacagggctcttca

SEQ ID NO: 1193986 - DNA, 25 bp, Homo sapien
gcaggacctgtgcgataggaagccc

SEQ ID NO: 1193987 - DNA, 25 bp, Homo sapien
cagcagcaggtacaacctggagaag

SEQ ID NO: 1193988 - DNA, 25 bp, Homo sapien
gtacaacctggagaagccccatcca

SEQ ID NO: 1193989 - DNA, 25 bp, Homo sapien
tgaaatcctgctgcgtcccgcaaac

SEQ ID NO: 1193990 - DNA, 25 bp, Homo sapien
gctgcgtcccgcaaacattttgagg

SEQ ID NO: 1193991 - DNA, 25 bp, Homo sapien
tgctctgccatacagagagccaggg

SEQ ID NO: 1193992 - DNA, 25 bp, Homo sapien
atgctctgccatacagagagccagg

SEQ ID NO: 1193993 - DNA, 25 bp, Homo sapien
gaccatgcaccttactgtcttcatt

SEQ ID NO: 1193994 - DNA, 25 bp, Homo sapien
gggcaagaccatgcaccttactgtc

SEQ ID NO: 1193995 - DNA, 25 bp, Homo sapien
ttgggaaagtatgggcaagaccatg

SEQ ID NO: 1193996 - DNA, 25 bp, Homo sapien
gcaagaccatgcaccttactgtctt

SEQ ID NO: 1193997 - DNA, 25 bp, Homo sapien
gcaagagacaattctggcagtcact

SEQ ID NO: 1193998 - DNA, 25 bp, Homo sapien
gacaattctggcagtcactctgcac

SEQ ID NO: 1193999 - DNA, 25 bp, Homo sapien
aataagacaaaaccgctggcaacgc

SEQ ID NO: 1194000 - DNA, 25 bp, Homo sapien
ctggcaacgccagacgctggtgatg

SEQ ID NO: 1194001 - DNA, 25 bp, Homo sapien
gccaggtactcttcgttatttctcg

SEQ ID NO: 1194002 - DNA, 25 bp, Homo sapien
tctcgcaaagaatccatcaatctcc

SEQ ID NO: 1194003 - DNA, 25 bp, Homo sapien
aaagatcagagccaggtactcttcg

SEQ ID NO: 1194004 - DNA, 25 bp, Homo sapien
cgttatttctcgcaaagaatccatc

SEQ ID NO: 1194005 - DNA, 25 bp, Homo sapien
tgagcataatcggacaggccatctg

SEQ ID NO: 1194006 - DNA, 25 bp, Homo sapien
tgggtaaacttctaaacagcaggct

SEQ ID NO: 1194007 - DNA, 25 bp, Homo sapien
gatgcggcaccgtacactacagttg

SEQ ID NO: 1194008 - DNA, 25 bp, Homo sapien
taaccagtaggtagcaagtgccaat

SEQ ID NO: 1194009 - DNA, 25 bp, Homo sapien
tctaaacccacaaagagtggaccac

SEQ ID NO: 1194010 - DNA, 25 bp, Homo sapien
ccagactctaaacccacaaagagtg

SEQ ID NO: 1194011 - DNA, 25 bp, Homo sapien
cccagctcggtgacctgtgaaggca

SEQ ID NO: 1194012 - DNA, 25 bp, Homo sapien
acctgtgaaggcacccagatggcag

SEQ ID NO: 1194013 - DNA, 25 bp, Homo sapien
accgccacgcctttgtgctgggaca

SEQ ID NO: 1194014 - DNA, 25 bp, Homo sapien
gccattccggaacagcaggtagcaa

SEQ ID NO: 1194015 - DNA, 25 bp, Homo sapien
gaagtcggtgacaccaaactttctc

SEQ ID NO: 1194016 - DNA, 25 bp, Homo sapien
gcctctgtgttcagcaccctgcgca

SEQ ID NO: 1194017 - DNA, 25 bp, Homo sapien
acgtaatgagggtgcaggcgacact

SEQ ID NO: 1194018 - DNA, 25 bp, Homo sapien
ctctgagctgcggaacagggttagc

SEQ ID NO: 1194019 - DNA, 25 bp, Homo sapien
gttagcgtttcaggcccaggctcct

SEQ ID NO: 1194020 - DNA, 25 bp, Homo sapien
gaaagaacatgttggccactgtgaa

SEQ ID NO: 1194021 - DNA, 25 bp, Homo sapien
ccattaacgggccattcagcagcag

SEQ ID NO: 1194022 - DNA, 25 bp, Homo sapien
catctggtgccattaacgggccatt

SEQ ID NO: 1194023 - DNA, 25 bp, Homo sapien
aggcctgtagcctgccaatgagtct

SEQ ID NO: 1194024 - DNA, 25 bp, Homo sapien
gcatatacgagtgcttgccaggcct

SEQ ID NO: 1194025 - DNA, 25 bp, Homo sapien
aaacaggtagcaacaatgacaaaga

SEQ ID NO: 1194026 - DNA, 25 bp, Homo sapien
ttcaaaaaacaggtagcaacaatga

SEQ ID NO: 1194027 - DNA, 25 bp, Homo sapien
aagtccagggagtttgatatgggat

SEQ ID NO: 1194028 - DNA, 25 bp, Homo sapien
cagggcacgggatacctcctgagtg

SEQ ID NO: 1194029 - DNA, 25 bp, Homo sapien
caaggaccccgagattcaatatggc

SEQ ID NO: 1194030 - DNA, 25 bp, Homo sapien
cccacagacaggaacggcggagtgt

SEQ ID NO: 1194031 - DNA, 25 bp, Homo sapien
cgccctgaggtactataagtgacat

SEQ ID NO: 1194032 - DNA, 25 bp, Homo sapien
ctggtaaggcaattgggcccaagaa

SEQ ID NO: 1194033 - DNA, 25 bp, Homo sapien
aaacagtgggagctatcttgttagc

SEQ ID NO: 1194034 - DNA, 25 bp, Homo sapien
tccaaacagtgggagctatcttgtt

SEQ ID NO: 1194035 - DNA, 25 bp, Homo sapien
ctctgcaggtaagcggtatagaagg

SEQ ID NO: 1194036 - DNA, 25 bp, Homo sapien
tatagaaggacctggattccatgag

SEQ ID NO: 1194037 - DNA, 25 bp, Homo sapien
ctgcccttccaggaccgggaacctg

SEQ ID NO: 1194038 - DNA, 25 bp, Homo sapien
ctgcccacttctatccgcaggatgt

SEQ ID NO: 1194039 - DNA, 25 bp, Homo sapien
acttctatccgcaggatgtagtgca

SEQ ID NO: 1194040 - DNA, 25 bp, Homo sapien
ttggccagcactgccacaaactttt

SEQ ID NO: 1194041 - DNA, 25 bp, Homo sapien
aggaacgcacactgaccatccgtag

SEQ ID NO: 1194042 - DNA, 25 bp, Homo sapien
cacactgaccatccgtagaattgca

SEQ ID NO: 1194043 - DNA, 25 bp, Homo sapien
catccgtagaattgcacagacaagg

SEQ ID NO: 1194044 - DNA, 25 bp, Homo sapien
tgaccatccgtagaattgcacagac

SEQ ID NO: 1194045 - DNA, 25 bp, Homo sapien
ccttcgtggagtagccaccttcccg

SEQ ID NO: 1194046 - DNA, 25 bp, Homo sapien
cttcgtggagtagccaccttcccgg

SEQ ID NO: 1194047 - DNA, 25 bp, Homo sapien
atctgactcagcagtactgagcagc

SEQ ID NO: 1194048 - DNA, 25 bp, Homo sapien
gagccacatctgactcagcagtact

SEQ ID NO: 1194049 - DNA, 25 bp, Homo sapien
gaggagggtgggctcagatccgggc

SEQ ID NO: 1194050 - DNA, 25 bp, Homo sapien
ggtgggctcagatccgggccccagg

SEQ ID NO: 1194051 - DNA, 25 bp, Homo sapien
attcccagcccttgctgaaggcaga

SEQ ID NO: 1194052 - DNA, 25 bp, Homo sapien
acagagggggtgatgcctctgccca

SEQ ID NO: 1194053 - DNA, 25 bp, Homo sapien
aagctcattcccagcccttgctgaa

SEQ ID NO: 1194054 - DNA, 25 bp, Homo sapien
cagctcagggacttttctgtatctc

SEQ ID NO: 1194055 - DNA, 25 bp, Homo sapien
cctggtgcccacacgccacccagtg

SEQ ID NO: 1194056 - DNA, 25 bp, Homo sapien
tgacttagaaacttccgccttctaa

SEQ ID NO: 1194057 - DNA, 25 bp, Homo sapien
tggacaactgggagcaaggaaaccc

SEQ ID NO: 1194058 - DNA, 25 bp, Homo sapien
gccttctaaggcgacagtgccagaa

SEQ ID NO: 1194059 - DNA, 25 bp, Homo sapien
caactgactggccagctgggttagg

SEQ ID NO: 1194060 - DNA, 25 bp, Homo sapien
ggtggtcctcggatagagctgactt

SEQ ID NO: 1194061 - DNA, 25 bp, Homo sapien
ggttaggtgggcacgagacctttca

SEQ ID NO: 1194062 - DNA, 25 bp, Homo sapien
cacacagtcctgtctttgggtggtc

SEQ ID NO: 1194063 - DNA, 25 bp, Homo sapien
cattcacggagtgcaggaagttctg

SEQ ID NO: 1194064 - DNA, 25 bp, Homo sapien
tcttgagccattcattcacggagtg

SEQ ID NO: 1194065 - DNA, 25 bp, Homo sapien
tcctgtcgtccagggcagttttaaa

SEQ ID NO: 1194066 - DNA, 25 bp, Homo sapien
gaagttctggactaagggccggcca

SEQ ID NO: 1194067 - DNA, 25 bp, Homo sapien
gaagtggaagaggacccacagggag

SEQ ID NO: 1194068 - DNA, 25 bp, Homo sapien
tacattttgccgagctgcctgcaca

SEQ ID NO: 1194069 - DNA, 25 bp, Homo sapien
tcccctggcagccaatccagttcac

SEQ ID NO: 1194070 - DNA, 25 bp, Homo sapien
ggaaatgcggctcactcccctggca

SEQ ID NO: 1194071 - DNA, 25 bp, Homo sapien
agatgccacgcaccagcccttcagg

SEQ ID NO: 1194072 - DNA, 25 bp, Homo sapien
acagccgttgcctccccaggccacc

SEQ ID NO: 1194073 - DNA, 25 bp, Homo sapien
cagaggagatgccacgcaccagccc

SEQ ID NO: 1194074 - DNA, 25 bp, Homo sapien
gggcagaggagatgccacgcaccag

SEQ ID NO: 1194075 - DNA, 25 bp, Homo sapien
tgaccctgttgtggctagaccagag

SEQ ID NO: 1194076 - DNA, 25 bp, Homo sapien
tctcggcagccgaagaagtagtgca

SEQ ID NO: 1194077 - DNA, 25 bp, Homo sapien
ccatctgctcgaagtggctagcgca

SEQ ID NO: 1194078 - DNA, 25 bp, Homo sapien
ctgcaaggcgagcattgaccctgtt

SEQ ID NO: 1194079 - DNA, 25 bp, Homo sapien
ggtggccactgcaccttggggaact

SEQ ID NO: 1194080 - DNA, 25 bp, Homo sapien
tggccactgcaccttggggaactgg

SEQ ID NO: 1194081 - DNA, 25 bp, Homo sapien
ggggtggccactgcaccttggggaa

SEQ ID NO: 1194082 - DNA, 25 bp, Homo sapien
gaactgggggtcctcgctgggggca

SEQ ID NO: 1194083 - DNA, 25 bp, Homo sapien
cagagttgaattccggctttccagc

SEQ ID NO: 1194084 - DNA, 25 bp, Homo sapien
tcaggtccctcagccggcacatgtg

SEQ ID NO: 1194085 - DNA, 25 bp, Homo sapien
catccaggcgttcattgtggcaggc

SEQ ID NO: 1194086 - DNA, 25 bp, Homo sapien
tgggggacttcatcatctcaggctt

SEQ ID NO: 1194087 - DNA, 25 bp, Homo sapien
agcccctgtgtctcgcttgctcaag

SEQ ID NO: 1194088 - DNA, 25 bp, Homo sapien
tcaagtgccactgcccaagcggctg

SEQ ID NO: 1194089 - DNA, 25 bp, Homo sapien
ccagaggcggttcttctcagccctg

SEQ ID NO: 1194090 - DNA, 25 bp, Homo sapien
cctctgaagctctgccatgtgctca

SEQ ID NO: 1194091 - DNA, 25 bp, Homo sapien
ctcagggatgtcgaccagctgcttg

SEQ ID NO: 1194092 - DNA, 25 bp, Homo sapien
ccctcagggatgtcgaccagctgct

SEQ ID NO: 1194093 - DNA, 25 bp, Homo sapien
cctcagggatgtcgaccagctgctt

SEQ ID NO: 1194094 - DNA, 25 bp, Homo sapien
ctggaagtaggtgtacatggccagc

SEQ ID NO: 1194095 - DNA, 25 bp, Homo sapien
gcctggaagtaggtgtacatggcca

SEQ ID NO: 1194096 - DNA, 25 bp, Homo sapien
ttcagggcccttatcttggcctgga

SEQ ID NO: 1194097 - DNA, 25 bp, Homo sapien
tggcccttcagggcccttatcttgg

SEQ ID NO: 1194098 - DNA, 25 bp, Homo sapien
ttttgtgtcaaaggagctctctgtc

SEQ ID NO: 1194099 - DNA, 25 bp, Homo sapien
gaatttcccacacttctaggccaga

SEQ ID NO: 1194100 - DNA, 25 bp, Homo sapien
aacaggaatgtggtgctaagaggcc

SEQ ID NO: 1194101 - DNA, 25 bp, Homo sapien
gcaaccccaagaagcttcactggag

SEQ ID NO: 1194102 - DNA, 25 bp, Homo sapien
gggagaccagcacgacttccagaag

SEQ ID NO: 1194103 - DNA, 25 bp, Homo sapien
atggcttgcctcacctgggagacca

SEQ ID NO: 1194104 - DNA, 25 bp, Homo sapien
cttcttcattgtccggaagggagca

SEQ ID NO: 1194105 - DNA, 25 bp, Homo sapien
gggcaaggcactagagacccacatc

SEQ ID NO: 1194106 - DNA, 25 bp, Homo sapien
tcaagcatgtgtaaggcactgcccc

SEQ ID NO: 1194107 - DNA, 25 bp, Homo sapien
ctccctagcttctacctggcaccct

SEQ ID NO: 1194108 - DNA, 25 bp, Homo sapien
agagaagacactcccctccctagct

SEQ ID NO: 1194109 - DNA, 25 bp, Homo sapien
aggacaaaagaccaggctcagaggg

SEQ ID NO: 1194110 - DNA, 25 bp, Homo sapien
tggacactaggtctccaagtagcaa

SEQ ID NO: 1194111 - DNA, 25 bp, Homo sapien
gtccagactggacactaggtctcca

SEQ ID NO: 1194112 - DNA, 25 bp, Homo sapien
tagcaagttaaagaacacaccaatg

SEQ ID NO: 1194113 - DNA, 25 bp, Homo sapien
aagtagcaagttaaagaacacacca

SEQ ID NO: 1194114 - DNA, 25 bp, Homo sapien
cagaggcctgtctccgtgcatgaaa

SEQ ID NO: 1194115 - DNA, 25 bp, Homo sapien
tgtgctgagggacatcgagtctggc

SEQ ID NO: 1194116 - DNA, 25 bp, Homo sapien
tgcagctctgacaaacaagcccttg

SEQ ID NO: 1194117 - DNA, 25 bp, Homo sapien
gcaggagctctcagggaggattggg

SEQ ID NO: 1194118 - DNA, 25 bp, Homo sapien
gtttatcgatgttgccgagagccct

SEQ ID NO: 1194119 - DNA, 25 bp, Homo sapien
ttggacctccaagaatgccgcatgg

SEQ ID NO: 1194120 - DNA, 25 bp, Homo sapien
caaggcgctgcagctaaagaggtcg

SEQ ID NO: 1194121 - DNA, 25 bp, Homo sapien
tagaaataccgtcactggagccaca

SEQ ID NO: 1194122 - DNA, 25 bp, Homo sapien
tcccctggagccctctcctccaccc

SEQ ID NO: 1194123 - DNA, 25 bp, Homo sapien
cccacacccagaggacaggctgcat

SEQ ID NO: 1194124 - DNA, 25 bp, Homo sapien
ctgactttcctccagggtcaaggct

SEQ ID NO: 1194125 - DNA, 25 bp, Homo sapien
ctttcctccagggtcaaggctggct

SEQ ID NO: 1194126 - DNA, 25 bp, Homo sapien
cacgacatgagcagtgggctaccat

SEQ ID NO: 1194127 - DNA, 25 bp, Homo sapien
cacatttcaggcattttaggagccc

SEQ ID NO: 1194128 - DNA, 25 bp, Homo sapien
taggagccccatctcatgaaggaaa

SEQ ID NO: 1194129 - DNA, 25 bp, Homo sapien
tcaagacaggagacgacacgacatg

SEQ ID NO: 1194130 - DNA, 25 bp, Homo sapien
cctcttgggtgtgaatgacccttga

SEQ ID NO: 1194131 - DNA, 25 bp, Homo sapien
gggctctgtcctgcacaacagcatg

SEQ ID NO: 1194132 - DNA, 25 bp, Homo sapien
ctcttgggtgtgaatgacccttgag

SEQ ID NO: 1194133 - DNA, 25 bp, Homo sapien
cagggctctgtcctgcacaacagca

SEQ ID NO: 1194134 - DNA, 25 bp, Homo sapien
ggaagggatgagagggcagcttctt

SEQ ID NO: 1194135 - DNA, 25 bp, Homo sapien
agaggaagggatgagagggcagctt

SEQ ID NO: 1194136 - DNA, 25 bp, Homo sapien
ggagaggaagggatgagagggcagc

SEQ ID NO: 1194137 - DNA, 25 bp, Homo sapien
aagggatgagagggcagcttcttac

SEQ ID NO: 1194138 - DNA, 25 bp, Homo sapien
tgagtgagttacagggaattcttct

SEQ ID NO: 1194139 - DNA, 25 bp, Homo sapien
cctctgcagcaaacagtgaactgtg

SEQ ID NO: 1194140 - DNA, 25 bp, Homo sapien
cactggctcccacggccattggtga

SEQ ID NO: 1194141 - DNA, 25 bp, Homo sapien
agctatgcagtccaactgaccctcg

SEQ ID NO: 1194142 - DNA, 25 bp, Homo sapien
tctgtaaccattggaacccgggatg

SEQ ID NO: 1194143 - DNA, 25 bp, Homo sapien
tttcctatggaagaacatgcagccc

SEQ ID NO: 1194144 - DNA, 25 bp, Homo sapien
gagtctgtagatgttccctgagtcc

SEQ ID NO: 1194145 - DNA, 25 bp, Homo sapien
gaggatctcaccctagccctagagt

SEQ ID NO: 1194146 - DNA, 25 bp, Homo sapien
gattcagtaattggacagccctcag

SEQ ID NO: 1194147 - DNA, 25 bp, Homo sapien
tacaattgactaaagctcagaggct

SEQ ID NO: 1194148 - DNA, 25 bp, Homo sapien
tgttggttacatcataggagcctag

SEQ ID NO: 1194149 - DNA, 25 bp, Homo sapien
actagggcgaggctactgagacact

SEQ ID NO: 1194150 - DNA, 25 bp, Homo sapien
aatgatatcgcactaatctttcacc

SEQ ID NO: 1194151 - DNA, 25 bp, Homo sapien
tactgtttcacgtaagtattgctct

SEQ ID NO: 1194152 - DNA, 25 bp, Homo sapien
taagctgacggttcatattcttggc

SEQ ID NO: 1194153 - DNA, 25 bp, Homo sapien
aattgcattatcacctttccagtac

SEQ ID NO: 1194154 - DNA, 25 bp, Homo sapien
ctctcgctctagctcgattcagaaa

SEQ ID NO: 1194155 - DNA, 25 bp, Homo sapien
tgtttccagtccctttgatctcgct

SEQ ID NO: 1194156 - DNA, 25 bp, Homo sapien
tcgctctagctcgattcagaaattt

SEQ ID NO: 1194157 - DNA, 25 bp, Homo sapien
ccagtctgtttccagtccctttgat

SEQ ID NO: 1194158 - DNA, 25 bp, Homo sapien
ctcggagcgaaagccagcgagtcgc

SEQ ID NO: 1194159 - DNA, 25 bp, Homo sapien
cggagcgaaagccagcgagtcgcag

SEQ ID NO: 1194160 - DNA, 25 bp, Homo sapien
tcggagcgaaagccagcgagtcgca

SEQ ID NO: 1194161 - DNA, 25 bp, Homo sapien
ggagcgaaagccagcgagtcgcagt

SEQ ID NO: 1194162 - DNA, 25 bp, Homo sapien
gttgcatcggcacacctagcatctc

SEQ ID NO: 1194163 - DNA, 25 bp, Homo sapien
cttccgcggggacagtcgcactctg

SEQ ID NO: 1194164 - DNA, 25 bp, Homo sapien
cggggacagtcgcactctgcatcat

SEQ ID NO: 1194165 - DNA, 25 bp, Homo sapien
tcggcacacctagcatctccgggag

SEQ ID NO: 1194166 - DNA, 25 bp, Homo sapien
gcgaactgctaagtccgcacgggag

SEQ ID NO: 1194167 - DNA, 25 bp, Homo sapien
gattcggatctcgacgtccctacag

SEQ ID NO: 1194168 - DNA, 25 bp, Homo sapien
aaccaggagggctacggcgcgaact

SEQ ID NO: 1194169 - DNA, 25 bp, Homo sapien
gctcttttccgcgtctcctcagagg

SEQ ID NO: 1194170 - DNA, 25 bp, Homo sapien
ggaagaggagagagaggcactgtga

SEQ ID NO: 1194171 - DNA, 25 bp, Homo sapien
aagaggagagagaggcactgtgagc

SEQ ID NO: 1194172 - DNA, 25 bp, Homo sapien
ctgtgaggaagaggagagagaggca

SEQ ID NO: 1194173 - DNA, 25 bp, Homo sapien
gaggaagaggagagagaggcactgt

SEQ ID NO: 1194174 - DNA, 25 bp, Homo sapien
tgctggttgcagccagcgcactggg

SEQ ID NO: 1194175 - DNA, 25 bp, Homo sapien
gaagtcctccttgcagtagacgctc

SEQ ID NO: 1194176 - DNA, 25 bp, Homo sapien
gcagtagacgctcccagccctggag

SEQ ID NO: 1194177 - DNA, 25 bp, Homo sapien
ctggagaagcacctgtccgccagct

SEQ ID NO: 1194178 - DNA, 25 bp, Homo sapien
ccacctacggcctgcagactggcag

SEQ ID NO: 1194179 - DNA, 25 bp, Homo sapien
tggcggacagcccacctacggcctg

SEQ ID NO: 1194180 - DNA, 25 bp, Homo sapien
cccttggcggacagcccacctacgg

SEQ ID NO: 1194181 - DNA, 25 bp, Homo sapien
acagcccacctacggcctgcagact

SEQ ID NO: 1194182 - DNA, 25 bp, Homo sapien
agccatgtcatgggcacataaagtt

SEQ ID NO: 1194183 - DNA, 25 bp, Homo sapien
tgctgatatttactgttactgtatg

SEQ ID NO: 1194184 - DNA, 25 bp, Homo sapien
gttactgtatgtaccaatatttcca

SEQ ID NO: 1194185 - DNA, 25 bp, Homo sapien
tatatcaccgcccactctaaggcca

SEQ ID NO: 1194186 - DNA, 25 bp, Homo sapien
taagttccgacctctgagcagaccc

SEQ ID NO: 1194187 - DNA, 25 bp, Homo sapien
gcagacccgcatgatgtaccacaag

SEQ ID NO: 1194188 - DNA, 25 bp, Homo sapien
cactgagacgctggtaataaaggca

SEQ ID NO: 1194189 - DNA, 25 bp, Homo sapien
tgcagggaccgagccttctagaacc

SEQ ID NO: 1194190 - DNA, 25 bp, Homo sapien
cagtgcaagacaggcttgagggtct

SEQ ID NO: 1194191 - DNA, 25 bp, Homo sapien
gtgcaagacaggcttgagggtctgg

SEQ ID NO: 1194192 - DNA, 25 bp, Homo sapien
gcaagacaggcttgagggtctggac

SEQ ID NO: 1194193 - DNA, 25 bp, Homo sapien
caagacaggcttgagggtctggacc

SEQ ID NO: 1194194 - DNA, 25 bp, Homo sapien
gctgactctcatgggccactctgga

SEQ ID NO: 1194195 - DNA, 25 bp, Homo sapien
gttgatttgtccacccctgctgctc

SEQ ID NO: 1194196 - DNA, 25 bp, Homo sapien
gctgctgttgatttgtccacccctg

SEQ ID NO: 1194197 - DNA, 25 bp, Homo sapien
ggctgactctcatgggccactctgg

SEQ ID NO: 1194198 - DNA, 25 bp, Homo sapien
acacatgtaattggcccgctgtcca

SEQ ID NO: 1194199 - DNA, 25 bp, Homo sapien
aaccccaacacatgtaattggcccg

SEQ ID NO: 1194200 - DNA, 25 bp, Homo sapien
cccaacacatgtaattggcccgctg

SEQ ID NO: 1194201 - DNA, 25 bp, Homo sapien
ttaaccccaacacatgtaattggcc

SEQ ID NO: 1194202 - DNA, 25 bp, Homo sapien
cagccagcgggacccttgccgaggg

SEQ ID NO: 1194203 - DNA, 25 bp, Homo sapien
gagggagccgcatgcagcacctcct

SEQ ID NO: 1194204 - DNA, 25 bp, Homo sapien
agcgggacccttgccgagggagccg

SEQ ID NO: 1194205 - DNA, 25 bp, Homo sapien
cttgccgagggagccgcatgcagca

SEQ ID NO: 1194206 - DNA, 25 bp, Homo sapien
aacagagggaagacccttcagcagc

SEQ ID NO: 1194207 - DNA, 25 bp, Homo sapien
gaacagagggaagacccttcagcag

SEQ ID NO: 1194208 - DNA, 25 bp, Homo sapien
agagggaagacccttcagcagcctc

SEQ ID NO: 1194209 - DNA, 25 bp, Homo sapien
acagagggaagacccttcagcagcc

SEQ ID NO: 1194210 - DNA, 25 bp, Homo sapien
gaacacaggtgagaaccaggtcctc

SEQ ID NO: 1194211 - DNA, 25 bp, Homo sapien
gatgtgcacggagatggccgaacct

SEQ ID NO: 1194212 - DNA, 25 bp, Homo sapien
tgtagaacaaagcacacagtcggct

SEQ ID NO: 1194213 - DNA, 25 bp, Homo sapien
cagtcggctctggatggttctagac

SEQ ID NO: 1194214 - DNA, 25 bp, Homo sapien
ggctatcatgatgaataccagatta

SEQ ID NO: 1194215 - DNA, 25 bp, Homo sapien
attaattatggtcatggctatcatg

SEQ ID NO: 1194216 - DNA, 25 bp, Homo sapien
taccagattaatgcagaatgatagg

SEQ ID NO: 1194217 - DNA, 25 bp, Homo sapien
tctgttatgcagtaatgatacctgc

SEQ ID NO: 1194218 - DNA, 25 bp, Homo sapien
caggatgaaagacttcgcctaatgg

SEQ ID NO: 1194219 - DNA, 25 bp, Homo sapien
tcaggatgaaagacttcgcctaatg

SEQ ID NO: 1194220 - DNA, 25 bp, Homo sapien
aggatgaaagacttcgcctaatgga

SEQ ID NO: 1194221 - DNA, 25 bp, Homo sapien
ggatgaaagacttcgcctaatggat

SEQ ID NO: 1194222 - DNA, 25 bp, Homo sapien
acctttccagaacaacaccgaggca

SEQ ID NO: 1194223 - DNA, 25 bp, Homo sapien
gaacaacaccgaggcaaaaggaagc

SEQ ID NO: 1194224 - DNA, 25 bp, Homo sapien
gcaaaaggaagctacctgctgccac

SEQ ID NO: 1194225 - DNA, 25 bp, Homo sapien
ggcaaaaggaagctacctgctgcca

SEQ ID NO: 1194226 - DNA, 25 bp, Homo sapien
aaagccctccaagcctacctccatc

SEQ ID NO: 1194227 - DNA, 25 bp, Homo sapien
atccccttcctatgcacgcacacag

SEQ ID NO: 1194228 - DNA, 25 bp, Homo sapien
ccttcctatgcacgcacacagcctg

SEQ ID NO: 1194229 - DNA, 25 bp, Homo sapien
acacacaaagccctccaagcctacc

SEQ ID NO: 1194230 - DNA, 25 bp, Homo sapien
tttccaaagctgatgcccccggatt

SEQ ID NO: 1194231 - DNA, 25 bp, Homo sapien
caaagctgatgcccccggattccag

SEQ ID NO: 1194232 - DNA, 25 bp, Homo sapien
cttttccaaagctgatgcccccgga

SEQ ID NO: 1194233 - DNA, 25 bp, Homo sapien
tccaaagctgatgcccccggattcc

SEQ ID NO: 1194234 - DNA, 25 bp, Homo sapien
accaaagaagggactgatgagaact

SEQ ID NO: 1194235 - DNA, 25 bp, Homo sapien
gatgagaactagagtctccctcagg

SEQ ID NO: 1194236 - DNA, 25 bp, Homo sapien
gaagggactgatgagaactagagtc

SEQ ID NO: 1194237 - DNA, 25 bp, Homo sapien
gactgatgagaactagagtctccct

SEQ ID NO: 1194238 - DNA, 25 bp, Homo sapien
gcaggccgtgcattttgtgccgaag

SEQ ID NO: 1194239 - DNA, 25 bp, Homo sapien
tggcaggccgtgcattttgtgccga

SEQ ID NO: 1194240 - DNA, 25 bp, Homo sapien
ggccgtgcattttgtgccgaagcgc

SEQ ID NO: 1194241 - DNA, 25 bp, Homo sapien
gctggcaggccgtgcattttgtgcc

SEQ ID NO: 1194242 - DNA, 25 bp, Homo sapien
tctcgtagtcttccttgcacaccag

SEQ ID NO: 1194243 - DNA, 25 bp, Homo sapien
gatgatgcaagcaaagcagtgcagg

SEQ ID NO: 1194244 - DNA, 25 bp, Homo sapien
tggccagctgccggttgcagatgat

SEQ ID NO: 1194245 - DNA, 25 bp, Homo sapien
gcttggctgtctcgtagtcttcctt

SEQ ID NO: 1194246 - DNA, 25 bp, Homo sapien
tgggcaacacactgactgatcaaca

SEQ ID NO: 1194247 - DNA, 25 bp, Homo sapien
cctggaggacacacggaataaagtc

SEQ ID NO: 1194248 - DNA, 25 bp, Homo sapien
gagtgaacaagctcaagttcctgtt

SEQ ID NO: 1194249 - DNA, 25 bp, Homo sapien
caaagtcaggtacagagagaggcgc

SEQ ID NO: 1194250 - DNA, 25 bp, Homo sapien
tcttgtatgcattctttaatgtctc

SEQ ID NO: 1194251 - DNA, 25 bp, Homo sapien
gggagttcttgtatgcattctttaa

SEQ ID NO: 1194252 - DNA, 25 bp, Homo sapien
caggcttgggggagttcttgtatgc

SEQ ID NO: 1194253 - DNA, 25 bp, Homo sapien
gctgctccctcacgtgccgggcagg

SEQ ID NO: 1194254 - DNA, 25 bp, Homo sapien
ccggctcctcttgacgctcttatag

SEQ ID NO: 1194255 - DNA, 25 bp, Homo sapien
ctcttatagaactgcccccagcggt

SEQ ID NO: 1194256 - DNA, 25 bp, Homo sapien
cttcttcaggcgtttctctttggcc

SEQ ID NO: 1194257 - DNA, 25 bp, Homo sapien
tcttcaggcgtttctctttggccct

SEQ ID NO: 1194258 - DNA, 25 bp, Homo sapien
tagttgattgggaagcaagcaggcc

SEQ ID NO: 1194259 - DNA, 25 bp, Homo sapien
tgcagccaagcatgggtcagacaca

SEQ ID NO: 1194260 - DNA, 25 bp, Homo sapien
aacggagatttattgtcagctgcca

SEQ ID NO: 1194261 - DNA, 25 bp, Homo sapien
aatgtttggtgagctcgttggtccc

SEQ ID NO: 1194262 - DNA, 25 bp, Homo sapien
gatgcccaaattactgtccaccgtg

SEQ ID NO: 1194263 - DNA, 25 bp, Homo sapien
tggaaagtcgggatagcctacactg

SEQ ID NO: 1194264 - DNA, 25 bp, Homo sapien
tccatttcatcgagccaagagcctg

SEQ ID NO: 1194265 - DNA, 25 bp, Homo sapien
tgtcctgtcccgtccatggagaagc

SEQ ID NO: 1194266 - DNA, 25 bp, Homo sapien
cagccttctaggaatcagcggagga

SEQ ID NO: 1194267 - DNA, 25 bp, Homo sapien
ttgaagatattctctcaagccaggg

SEQ ID NO: 1194268 - DNA, 25 bp, Homo sapien
cacaccagttggagcaaagttccca

SEQ ID NO: 1194269 - DNA, 25 bp, Homo sapien
gaaacaatgccctagtgtggtctca

SEQ ID NO: 1194270 - DNA, 25 bp, Homo sapien
gaaatcccatgagttgctaagccaa

SEQ ID NO: 1194271 - DNA, 25 bp, Homo sapien
caaaagatgtagcagtccaagagga

SEQ ID NO: 1194272 - DNA, 25 bp, Homo sapien
tcaggcaatctgcagcggtggtcca

SEQ ID NO: 1194273 - DNA, 25 bp, Homo sapien
ggagctgcagcaccattcaggacag

SEQ ID NO: 1194274 - DNA, 25 bp, Homo sapien
tcaggccagtgctctcaagggtttt

SEQ ID NO: 1194275 - DNA, 25 bp, Homo sapien
taatgctaacccaacctgtagggag

SEQ ID NO: 1194276 - DNA, 25 bp, Homo sapien
catgcaatggctcattagtggcacc

SEQ ID NO: 1194277 - DNA, 25 bp, Homo sapien
taaccagccctactgatgccaaaga

SEQ ID NO: 1194278 - DNA, 25 bp, Homo sapien
tgtggtcctaccaagcagagtgtgg

SEQ ID NO: 1194279 - DNA, 25 bp, Homo sapien
tagacttccaagcaacagaggagtg

SEQ ID NO: 1194280 - DNA, 25 bp, Homo sapien
taaccaagttgtcagtcgtggcacg

SEQ ID NO: 1194281 - DNA, 25 bp, Homo sapien
aaaggaatgcttggtgcacctccca

SEQ ID NO: 1194282 - DNA, 25 bp, Homo sapien
catactgagtatagaagttctggcc

SEQ ID NO: 1194283 - DNA, 25 bp, Homo sapien
gcattctgaacgaagcttggcatcc

SEQ ID NO: 1194284 - DNA, 25 bp, Homo sapien
gctggccagtgaggaggcaaccttc

SEQ ID NO: 1194285 - DNA, 25 bp, Homo sapien
cgatacagaaagtggttaatgcgca

SEQ ID NO: 1194286 - DNA, 25 bp, Homo sapien
ttatcactgctttagagggtgggca

SEQ ID NO: 1194287 - DNA, 25 bp, Homo sapien
cagtctgtaatagcataaggcttcc

SEQ ID NO: 1194288 - DNA, 25 bp, Homo sapien
cattctaggcagtacagttttggtg

SEQ ID NO: 1194289 - DNA, 25 bp, Homo sapien
tacacatggtctgaataggcagcta

SEQ ID NO: 1194290 - DNA, 25 bp, Homo sapien
ctcaccactggaatggtcacatcat

SEQ ID NO: 1194291 - DNA, 25 bp, Homo sapien
atatctcaccactggaatggtcaca

SEQ ID NO: 1194292 - DNA, 25 bp, Homo sapien
tctcaccactggaatggtcacatca

SEQ ID NO: 1194293 - DNA, 25 bp, Homo sapien
tatctcaccactggaatggtcacat

SEQ ID NO: 1194294 - DNA, 25 bp, Homo sapien
gggcttgacagctgtccttgtgttg

SEQ ID NO: 1194295 - DNA, 25 bp, Homo sapien
tatagcagttgtcaaactccatcct

SEQ ID NO: 1194296 - DNA, 25 bp, Homo sapien
ttaagcaggttgtaaatcctggctc

SEQ ID NO: 1194297 - DNA, 25 bp, Homo sapien
cttgacagctgtccttgtgttgaca

SEQ ID NO: 1194298 - DNA, 25 bp, Homo sapien
tatatgatgccactgtgaacatgga

SEQ ID NO: 1194299 - DNA, 25 bp, Homo sapien
tcatctgctgatggatatgcatatt

SEQ ID NO: 1194300 - DNA, 25 bp, Homo sapien
tctcattagcaatacttgaaggttc

SEQ ID NO: 1194301 - DNA, 25 bp, Homo sapien
taatttgttgaggaattgccaagcc

SEQ ID NO: 1194302 - DNA, 25 bp, Homo sapien
gattggatagatgttcagagttgca

SEQ ID NO: 1194303 - DNA, 25 bp, Homo sapien
tagtctgagcatacataattctgac

SEQ ID NO: 1194304 - DNA, 25 bp, Homo sapien
tctccgaggaatgctaattaaatac

SEQ ID NO: 1194305 - DNA, 25 bp, Homo sapien
tgtcttctatgaaatgctgcccaaa

SEQ ID NO: 1194306 - DNA, 25 bp, Homo sapien
tggcccatttatcctgctccttaaa

SEQ ID NO: 1194307 - DNA, 25 bp, Homo sapien
aatgttccctggtgaattggggata

SEQ ID NO: 1194308 - DNA, 25 bp, Homo sapien
gctgtcttggcccatttatcctgct

SEQ ID NO: 1194309 - DNA, 25 bp, Homo sapien
tcatccatacgaaagcatttggtag

SEQ ID NO: 1194310 - DNA, 25 bp, Homo sapien
gaagtggtagcagttaatctctcca

SEQ ID NO: 1194311 - DNA, 25 bp, Homo sapien
gcctggtgccagcagtgtctttaca

SEQ ID NO: 1194312 - DNA, 25 bp, Homo sapien
cgacagctggtctgacatgggcctg

SEQ ID NO: 1194313 - DNA, 25 bp, Homo sapien
aagactgcatagaggaggtcagtgc

SEQ ID NO: 1194314 - DNA, 25 bp, Homo sapien
ccttcggcttagaggcattggcagc

SEQ ID NO: 1194315 - DNA, 25 bp, Homo sapien
agccaccttcggcttagaggcattg

SEQ ID NO: 1194316 - DNA, 25 bp, Homo sapien
ggcacagccaccttcggcttagagg

SEQ ID NO: 1194317 - DNA, 25 bp, Homo sapien
caccttcggcttagaggcattggca

SEQ ID NO: 1194318 - DNA, 25 bp, Homo sapien
tctctgtaaacgtcaggccgtactc

SEQ ID NO: 1194319 - DNA, 25 bp, Homo sapien
ctgtaaacgtcaggccgtactcagt

SEQ ID NO: 1194320 - DNA, 25 bp, Homo sapien
aaacgtcaggccgtactcagtccat

SEQ ID NO: 1194321 - DNA, 25 bp, Homo sapien
atttctctgtaaacgtcaggccgta

SEQ ID NO: 1194322 - DNA, 25 bp, Homo sapien
ccgagaagcagctgtcagagtcaat

SEQ ID NO: 1194323 - DNA, 25 bp, Homo sapien
ttagccgagaagcagctgtcagagt

SEQ ID NO: 1194324 - DNA, 25 bp, Homo sapien
tcactttagccgagaagcagctgtc

SEQ ID NO: 1194325 - DNA, 25 bp, Homo sapien
gcagctgtcagagtcaatctgatac

SEQ ID NO: 1194326 - DNA, 25 bp, Homo sapien
atacagacacttctaagcttatagg

SEQ ID NO: 1194327 - DNA, 25 bp, Homo sapien
tacagacacttctaagcttataggt

SEQ ID NO: 1194328 - DNA, 25 bp, Homo sapien
tgtaggacatttagcagtgactctg

SEQ ID NO: 1194329 - DNA, 25 bp, Homo sapien
agatgtcaatagcactgcgtagtgt

SEQ ID NO: 1194330 - DNA, 25 bp, Homo sapien
tagtgtgacagctaaaaaattgccc

SEQ ID NO: 1194331 - DNA, 25 bp, Homo sapien
caaatatctgtggatggagagggca

SEQ ID NO: 1194332 - DNA, 25 bp, Homo sapien
tcaattatttgcgtcacttaggagc

SEQ ID NO: 1194333 - DNA, 25 bp, Homo sapien
ttcacacagtggcatttggtctcaa

SEQ ID NO: 1194334 - DNA, 25 bp, Homo sapien
ctttaagagacggatttatttcatc

SEQ ID NO: 1194335 - DNA, 25 bp, Homo sapien
tcatcaaagaaattgagcagtcaat

SEQ ID NO: 1194336 - DNA, 25 bp, Homo sapien
aaaacaagcgccttcatgggccaag

SEQ ID NO: 1194337 - DNA, 25 bp, Homo sapien
gccagttattgccatgaatgctcag

SEQ ID NO: 1194338 - DNA, 25 bp, Homo sapien
gaatgctcagtagtgccagatctga

SEQ ID NO: 1194339 - DNA, 25 bp, Homo sapien
gaagtgcatgccctatttaaagagg

SEQ ID NO: 1194340 - DNA, 25 bp, Homo sapien
ctcatcatgtggtactgttgagtct

SEQ ID NO: 1194341 - DNA, 25 bp, Homo sapien
ccttgctctgcctgcgatgtcttct

SEQ ID NO: 1194342 - DNA, 25 bp, Homo sapien
atgtggtactgttgagtctccttgc

SEQ ID NO: 1194343 - DNA, 25 bp, Homo sapien
atgtcttctggaaggtaagcagctc

SEQ ID NO: 1194344 - DNA, 25 bp, Homo sapien
tctgtggctgttatcccaaccaggg

SEQ ID NO: 1194345 - DNA, 25 bp, Homo sapien
tgaatgtccgctcccttttatctgt

SEQ ID NO: 1194346 - DNA, 25 bp, Homo sapien
ggagaaccacggtgtgtactttata

SEQ ID NO: 1194347 - DNA, 25 bp, Homo sapien
ctctgggttaaggtctctgtgggac

SEQ ID NO: 1194348 - DNA, 25 bp, Homo sapien
caaacacttgatgcagcacccagag

SEQ ID NO: 1194349 - DNA, 25 bp, Homo sapien
cggaaggtagcaagggacacaccaa

SEQ ID NO: 1194350 - DNA, 25 bp, Homo sapien
tcctgtctgcagtaagaggctgatg

SEQ ID NO: 1194351 - DNA, 25 bp, Homo sapien
taagatcgcaggtatgctccttcca

SEQ ID NO: 1194352 - DNA, 25 bp, Homo sapien
ggtagcaatggaagcctggtccctt

SEQ ID NO: 1194353 - DNA, 25 bp, Homo sapien
cttttgcatcaagctggacatctgg

SEQ ID NO: 1194354 - DNA, 25 bp, Homo sapien
tgcatgatggtgcattgacccgtat

SEQ ID NO: 1194355 - DNA, 25 bp, Homo sapien
gacatctgggtttgcggttgcatgt

SEQ ID NO: 1194356 - DNA, 25 bp, Homo sapien
gcctcagagtcatggcagggtgtgg

SEQ ID NO: 1194357 - DNA, 25 bp, Homo sapien
gtgtgggggtggtgaaaggcacttc

SEQ ID NO: 1194358 - DNA, 25 bp, Homo sapien
gaggcctcagagtcatggcagggtg

SEQ ID NO: 1194359 - DNA, 25 bp, Homo sapien
cagggtgtgggggtggtgaaaggca

SEQ ID NO: 1194360 - DNA, 25 bp, Homo sapien
cttatatcgagtgcttgtgggcttc

SEQ ID NO: 1194361 - DNA, 25 bp, Homo sapien
tgctctgaagagatacacagttctt

SEQ ID NO: 1194362 - DNA, 25 bp, Homo sapien
tacacagttcttatatcgagtgctt

SEQ ID NO: 1194363 - DNA, 25 bp, Homo sapien
aggaactgcccttgctctgaagaga

SEQ ID NO: 1194364 - DNA, 25 bp, Homo sapien
tggccacttcttgccataactgcag

SEQ ID NO: 1194365 - DNA, 25 bp, Homo sapien
gggctgccactaagtatctggtcac

SEQ ID NO: 1194366 - DNA, 25 bp, Homo sapien
ttcgagcaacccttccaacagtatg

SEQ ID NO: 1194367 - DNA, 25 bp, Homo sapien
cactactgtggtttgggtttggtct

SEQ ID NO: 1194368 - DNA, 25 bp, Homo sapien
gcaaatgccaggtccctaatgccca

SEQ ID NO: 1194369 - DNA, 25 bp, Homo sapien
acagcaaatgccaggtccctaatgc

SEQ ID NO: 1194370 - DNA, 25 bp, Homo sapien
ctgacagcaaatgccaggtccctaa

SEQ ID NO: 1194371 - DNA, 25 bp, Homo sapien
cctgactggattgttctgacagcaa

SEQ ID NO: 1194372 - DNA, 25 bp, Homo sapien
catagccaaagtggatggctggtcc

SEQ ID NO: 1194373 - DNA, 25 bp, Homo sapien
cagaaagccttgctgccatagccaa

SEQ ID NO: 1194374 - DNA, 25 bp, Homo sapien
cttgctgccatagccaaagtggatg

SEQ ID NO: 1194375 - DNA, 25 bp, Homo sapien
agccaaagtggatggctggtcctcc

SEQ ID NO: 1194376 - DNA, 25 bp, Homo sapien
catacctactgatttccagactgac

SEQ ID NO: 1194377 - DNA, 25 bp, Homo sapien
tgcaagccaatctccatacctactg

SEQ ID NO: 1194378 - DNA, 25 bp, Homo sapien
aaaataggagctctgatgagtactt

SEQ ID NO: 1194379 - DNA, 25 bp, Homo sapien
gtacttgcaagccaatctccatacc

SEQ ID NO: 1194380 - DNA, 25 bp, Homo sapien
cattctgggagtaccacatatagtc

SEQ ID NO: 1194381 - DNA, 25 bp, Homo sapien
tatagtcacagttcttgttcagaac

SEQ ID NO: 1194382 - DNA, 25 bp, Homo sapien
tctcccccaaaatgcctgagttact

SEQ ID NO: 1194383 - DNA, 25 bp, Homo sapien
cagaacagcagtcagttcagtcttt

SEQ ID NO: 1194384 - DNA, 25 bp, Homo sapien
gatccctgagttacagcattcgtac

SEQ ID NO: 1194385 - DNA, 25 bp, Homo sapien
cctgtgcctctgcttgacttagggc

SEQ ID NO: 1194386 - DNA, 25 bp, Homo sapien
tcatattcagcacctgatggcagcc

SEQ ID NO: 1194387 - DNA, 25 bp, Homo sapien
gatggcagcctcaggtttgtctcct

SEQ ID NO: 1194388 - DNA, 25 bp, Homo sapien
catgtttatctatagctggtgtctt

SEQ ID NO: 1194389 - DNA, 25 bp, Homo sapien
atctatagctggtgtctttaatctg

SEQ ID NO: 1194390 - DNA, 25 bp, Homo sapien
ttcatgtttatctatagctggtgtc

SEQ ID NO: 1194391 - DNA, 25 bp, Homo sapien
tgaaaacgaagggaagtagcagtaa

SEQ ID NO: 1194392 - DNA, 25 bp, Homo sapien
gccagtgtcatcagtataggctgca

SEQ ID NO: 1194393 - DNA, 25 bp, Homo sapien
gggtcttcagtccaagccaatagga

SEQ ID NO: 1194394 - DNA, 25 bp, Homo sapien
ttctctctaaggctaaatgtctggg

SEQ ID NO: 1194395 - DNA, 25 bp, Homo sapien
aagccaataggatggccacttgatg

SEQ ID NO: 1194396 - DNA, 25 bp, Homo sapien
ttctgctgctgtcaacggtatcctc

SEQ ID NO: 1194397 - DNA, 25 bp, Homo sapien
tgtcaacggtatcctccctagcttg

SEQ ID NO: 1194398 - DNA, 25 bp, Homo sapien
tcctccctagcttgttagaaagaaa

SEQ ID NO: 1194399 - DNA, 25 bp, Homo sapien
tttggaaagcaaaccactgctaccc

SEQ ID NO: 1194400 - DNA, 25 bp, Homo sapien
cttgtcctgactgcaaccctggtgg

SEQ ID NO: 1194401 - DNA, 25 bp, Homo sapien
tctaggagccgaagacgttcaaacc

SEQ ID NO: 1194402 - DNA, 25 bp, Homo sapien
tccaaacgaagcaggagagtccatt

SEQ ID NO: 1194403 - DNA, 25 bp, Homo sapien
ggtaagattcataggctccagggac

SEQ ID NO: 1194404 - DNA, 25 bp, Homo sapien
aatgctgccatcttggacaacacag

SEQ ID NO: 1194405 - DNA, 25 bp, Homo sapien
tccttcctggaagataaatgctgcc

SEQ ID NO: 1194406 - DNA, 25 bp, Homo sapien
tggaagataaatgctgccatcttgg

SEQ ID NO: 1194407 - DNA, 25 bp, Homo sapien
gctgccatcttggacaacacagatg

SEQ ID NO: 1194408 - DNA, 25 bp, Homo sapien
gatactgccctttgcagtagaagca

SEQ ID NO: 1194409 - DNA, 25 bp, Homo sapien
gcagtagaagcagcccaaggtgtcg

SEQ ID NO: 1194410 - DNA, 25 bp, Homo sapien
gcacagtatgtaacccagtcctctt

SEQ ID NO: 1194411 - DNA, 25 bp, Homo sapien
tgttaaacaagcacagtatgtaacc

SEQ ID NO: 1194412 - DNA, 25 bp, Homo sapien
ctccattcctgagggcggattttga

SEQ ID NO: 1194413 - DNA, 25 bp, Homo sapien
gagatagcagagtcccctggctgcc

SEQ ID NO: 1194414 - DNA, 25 bp, Homo sapien
gcggattttgagagtggcctataga

SEQ ID NO: 1194415 - DNA, 25 bp, Homo sapien
ctgcacgaatgagtccatgagctcc

SEQ ID NO: 1194416 - DNA, 25 bp, Homo sapien
ttatagagcagagataggtgatggc

SEQ ID NO: 1194417 - DNA, 25 bp, Homo sapien
tcccacaaattagttagccagtcat

SEQ ID NO: 1194418 - DNA, 25 bp, Homo sapien
tctagcaccttgttttggaatgcat

SEQ ID NO: 1194419 - DNA, 25 bp, Homo sapien
tgagtattcccttgatgccgcttcc

SEQ ID NO: 1194420 - DNA, 25 bp, Homo sapien
ttctaagatcataaccttaagggaa

SEQ ID NO: 1194421 - DNA, 25 bp, Homo sapien
tctaagatcataaccttaagggaaa

SEQ ID NO: 1194422 - DNA, 25 bp, Homo sapien
ggatcatcaacctcattgcccagct

SEQ ID NO: 1194423 - DNA, 25 bp, Homo sapien
attctaagatcataaccttaaggga

SEQ ID NO: 1194424 - DNA, 25 bp, Homo sapien
gctaaggttacttgcagctccagca

SEQ ID NO: 1194425 - DNA, 25 bp, Homo sapien
tagacaaggcatcaaatacagtcat

SEQ ID NO: 1194426 - DNA, 25 bp, Homo sapien
tgctttgttgctaaggttacttgca

SEQ ID NO: 1194427 - DNA, 25 bp, Homo sapien
tccagcatttcaggccacgttttag

SEQ ID NO: 1194428 - DNA, 25 bp, Homo sapien
taatgcgctgggtatctaaggaaaa

SEQ ID NO: 1194429 - DNA, 25 bp, Homo sapien
taataggacataatgggaaagccct

SEQ ID NO: 1194430 - DNA, 25 bp, Homo sapien
gaaagccctggacttacagctggga

SEQ ID NO: 1194431 - DNA, 25 bp, Homo sapien
tctttcaaacaaagggaccaccatg

SEQ ID NO: 1194432 - DNA, 25 bp, Homo sapien
agcgtgttgtttgtgacctctgcca

SEQ ID NO: 1194433 - DNA, 25 bp, Homo sapien
cagaaacagataggagagcgtgttg

SEQ ID NO: 1194434 - DNA, 25 bp, Homo sapien
tgaggagcaggtgaaccacagaaac

SEQ ID NO: 1194435 - DNA, 25 bp, Homo sapien
ctgccagacgttgcaaagagattaa

SEQ ID NO: 1194436 - DNA, 25 bp, Homo sapien
ggcctatcatcgatgaacagagtgt

SEQ ID NO: 1194437 - DNA, 25 bp, Homo sapien
tcatcgatgaacagagtgtcagcca

SEQ ID NO: 1194438 - DNA, 25 bp, Homo sapien
aaggcaggcctatcatcgatgaaca

SEQ ID NO: 1194439 - DNA, 25 bp, Homo sapien
gatgaacagagtgtcagccaatgcc

SEQ ID NO: 1194440 - DNA, 25 bp, Homo sapien
cgccgccgaggtctcttcagagcag

SEQ ID NO: 1194441 - DNA, 25 bp, Homo sapien
gccgaggtctcttcagagcagcccg

SEQ ID NO: 1194442 - DNA, 25 bp, Homo sapien
ggcggcaacagcgactccgactcct

SEQ ID NO: 1194443 - DNA, 25 bp, Homo sapien
ctcgggtccagcagctacaggcggc

SEQ ID NO: 1194444 - DNA, 25 bp, Homo sapien
tgatgtgcgcggagaggtgctcggc

SEQ ID NO: 1194445 - DNA, 25 bp, Homo sapien
cggagaggtgctcggcgaacttcat

SEQ ID NO: 1194446 - DNA, 25 bp, Homo sapien
ttgcttcctccactcgggagtgatg

SEQ ID NO: 1194447 - DNA, 25 bp, Homo sapien
cctccactcgggagtgatgtgcgcg

SEQ ID NO: 1194448 - DNA, 25 bp, Homo sapien
aagagattttctttatatggcttct

SEQ ID NO: 1194449 - DNA, 25 bp, Homo sapien
gattttctttatatggcttctccat

SEQ ID NO: 1194450 - DNA, 25 bp, Homo sapien
aaatggattgaagagattttcttta

SEQ ID NO: 1194451 - DNA, 25 bp, Homo sapien
gagattttctttatatggcttctcc

SEQ ID NO: 1194452 - DNA, 25 bp, Homo sapien
catactgtgatcaggagaccaccca

SEQ ID NO: 1194453 - DNA, 25 bp, Homo sapien
tacactctagagcaaaatcaattgg

SEQ ID NO: 1194454 - DNA, 25 bp, Homo sapien
tgcagatccttccaagataaacgtc

SEQ ID NO: 1194455 - DNA, 25 bp, Homo sapien
gaattctggttctaacactccctag

SEQ ID NO: 1194456 - DNA, 25 bp, Homo sapien
gcagcacatataagcataatccagg

SEQ ID NO: 1194457 - DNA, 25 bp, Homo sapien
gaaccactggcctgtaacatatagg

SEQ ID NO: 1194458 - DNA, 25 bp, Homo sapien
ggaaagtctcaaaacaacggcagca

SEQ ID NO: 1194459 - DNA, 25 bp, Homo sapien
tcaaattagtctgttggaatccaac

SEQ ID NO: 1194460 - DNA, 25 bp, Homo sapien
gattgtggtaatagctgtaaattct

SEQ ID NO: 1194461 - DNA, 25 bp, Homo sapien
ctgattgtggtaatagctgtaaatt

SEQ ID NO: 1194462 - DNA, 25 bp, Homo sapien
tgattgtggtaatagctgtaaattc

SEQ ID NO: 1194463 - DNA, 25 bp, Homo sapien
ggtgcctggtcctgagctgaataca

SEQ ID NO: 1194464 - DNA, 25 bp, Homo sapien
cttccacagaaggtgcctggtcctg

SEQ ID NO: 1194465 - DNA, 25 bp, Homo sapien
cctggtcctgagctgaatacagcat

SEQ ID NO: 1194466 - DNA, 25 bp, Homo sapien
ttccacagaaggtgcctggtcctga

SEQ ID NO: 1194467 - DNA, 25 bp, Homo sapien
gccatgtattctatatttacaagtc

SEQ ID NO: 1194468 - DNA, 25 bp, Homo sapien
ctgccatgtattctatatttacaag

SEQ ID NO: 1194469 - DNA, 25 bp, Homo sapien
ctaatctactgccatgtattctata

SEQ ID NO: 1194470 - DNA, 25 bp, Homo sapien
aatctactgccatgtattctatatt

SEQ ID NO: 1194471 - DNA, 25 bp, Homo sapien
aacatgtatgtacccaacaccagag

SEQ ID NO: 1194472 - DNA, 25 bp, Homo sapien
taagggaattctacatctgaaagct

SEQ ID NO: 1194473 - DNA, 25 bp, Homo sapien
tatatgctgcctaccagaaacccat

SEQ ID NO: 1194474 - DNA, 25 bp, Homo sapien
cacccagatatttaaggcaaatgct

SEQ ID NO: 1194475 - DNA, 25 bp, Homo sapien
tcatcaggaaacacgaattggcact

SEQ ID NO: 1194476 - DNA, 25 bp, Homo sapien
ttccaatttcactgattgcacctct

SEQ ID NO: 1194477 - DNA, 25 bp, Homo sapien
ctcatcaggaaacacgaattggcac

SEQ ID NO: 1194478 - DNA, 25 bp, Homo sapien
cctcttacagtaaacacatagctgg

SEQ ID NO: 1194479 - DNA, 25 bp, Homo sapien
tatagactgggatctcggtatttgc

SEQ ID NO: 1194480 - DNA, 25 bp, Homo sapien
taatatttcccaatccacacccaag

SEQ ID NO: 1194481 - DNA, 25 bp, Homo sapien
gagacagttccagcgtgccactaaa

SEQ ID NO: 1194482 - DNA, 25 bp, Homo sapien
ccaacctaatagtagtgtgctagaa

SEQ ID NO: 1194483 - DNA, 25 bp, Homo sapien
caccagggcataacagataaaggac

SEQ ID NO: 1194484 - DNA, 25 bp, Homo sapien
catgtgacacaataatgaaacggcc

SEQ ID NO: 1194485 - DNA, 25 bp, Homo sapien
gctaactgcttctcctggtaaatga

SEQ ID NO: 1194486 - DNA, 25 bp, Homo sapien
tgaaacggccaaatatctcaagagg

SEQ ID NO: 1194487 - DNA, 25 bp, Homo sapien
ttcttgcatttctagtagaggcagg

SEQ ID NO: 1194488 - DNA, 25 bp, Homo sapien
aattcttgcatttctagtagaggca

SEQ ID NO: 1194489 - DNA, 25 bp, Homo sapien
ctaattcttgcatttctagtagagg

SEQ ID NO: 1194490 - DNA, 25 bp, Homo sapien
tcttgcatttctagtagaggcaggg

SEQ ID NO: 1194491 - DNA, 25 bp, Homo sapien
agatctgccacttgctgtcccacat

SEQ ID NO: 1194492 - DNA, 25 bp, Homo sapien
gaagatctgccacttgctgtcccac

SEQ ID NO: 1194493 - DNA, 25 bp, Homo sapien
tgaagatctgccacttgctgtccca

SEQ ID NO: 1194494 - DNA, 25 bp, Homo sapien
actgaagatctgccacttgctgtcc

SEQ ID NO: 1194495 - DNA, 25 bp, Homo sapien
gggaaaacactattactccatgcta

SEQ ID NO: 1194496 - DNA, 25 bp, Homo sapien
tgaagacaaatgttgcacctgcata

SEQ ID NO: 1194497 - DNA, 25 bp, Homo sapien
aaaatcccaggagactgttttgcaa

SEQ ID NO: 1194498 - DNA, 25 bp, Homo sapien
tggaaagggatctccatgttccatt

SEQ ID NO: 1194499 - DNA, 25 bp, Homo sapien
tataggccacaagtgacaggccaga

SEQ ID NO: 1194500 - DNA, 25 bp, Homo sapien
gatgtatggctaaacgatcttctgc

SEQ ID NO: 1194501 - DNA, 25 bp, Homo sapien
gaatttctacgacatgctaggtcct

SEQ ID NO: 1194502 - DNA, 25 bp, Homo sapien
caaagtgattgccaacagttgacta

SEQ ID NO: 1194503 - DNA, 25 bp, Homo sapien
ttgcgtgtcatcctcatgctaatct

SEQ ID NO: 1194504 - DNA, 25 bp, Homo sapien
tttgcgtgtcatcctcatgctaatc

SEQ ID NO: 1194505 - DNA, 25 bp, Homo sapien
taatgtgatttaccaaaactatctt

SEQ ID NO: 1194506 - DNA, 25 bp, Homo sapien
aaatacactctgtgcatcagaaaag

SEQ ID NO: 1194507 - DNA, 25 bp, Homo sapien
aatgtgatttaccaaaactatcttc

SEQ ID NO: 1194508 - DNA, 25 bp, Homo sapien
caaaagattataatagaaataaatg

SEQ ID NO: 1194509 - DNA, 25 bp, Homo sapien
aaagattataatagaaataaatgcc

SEQ ID NO: 1194510 - DNA, 25 bp, Homo sapien
tccccaaaagattataatagaaata

SEQ ID NO: 1194511 - DNA, 25 bp, Homo sapien
agattataatagaaataaatgccat

SEQ ID NO: 1194512 - DNA, 25 bp, Homo sapien
cagatgcagctcttataataactaa

SEQ ID NO: 1194513 - DNA, 25 bp, Homo sapien
tacccatgaatcagtctcctaagaa

SEQ ID NO: 1194514 - DNA, 25 bp, Homo sapien
caaaagcaaaacatgggcttggtcg

SEQ ID NO: 1194515 - DNA, 25 bp, Homo sapien
gaagctctatggtaacagatgcagc

SEQ ID NO: 1194516 - DNA, 25 bp, Homo sapien
gcaagttctttttcacaggtttgga

SEQ ID NO: 1194517 - DNA, 25 bp, Homo sapien
tgtgttgattttggcaagttctttt

SEQ ID NO: 1194518 - DNA, 25 bp, Homo sapien
aaatacctctttactgtgtcctcat

SEQ ID NO: 1194519 - DNA, 25 bp, Homo sapien
aacttggcaaaatacctctttactg

SEQ ID NO: 1194520 - DNA, 25 bp, Homo sapien
gttgtcgcagcgtagtaacaccagt

SEQ ID NO: 1194521 - DNA, 25 bp, Homo sapien
tctatgttggacacgttcctcatgg

SEQ ID NO: 1194522 - DNA, 25 bp, Homo sapien
agactggctttctgcgttgtcgcag

SEQ ID NO: 1194523 - DNA, 25 bp, Homo sapien
cattctgaagtgtagcaaacctgcg

SEQ ID NO: 1194524 - DNA, 25 bp, Homo sapien
gcaggattagactgaggtagaactc

SEQ ID NO: 1194525 - DNA, 25 bp, Homo sapien
agcaggattagactgaggtagaact

SEQ ID NO: 1194526 - DNA, 25 bp, Homo sapien
aggattagactgaggtagaactcac

SEQ ID NO: 1194527 - DNA, 25 bp, Homo sapien
caggattagactgaggtagaactca

SEQ ID NO: 1194528 - DNA, 25 bp, Homo sapien
aaaaactcaatttgcaaggttacat

SEQ ID NO: 1194529 - DNA, 25 bp, Homo sapien
caaggttacatctttaaaccagagg

SEQ ID NO: 1194530 - DNA, 25 bp, Homo sapien
atttgctgattacatgtccccaaca

SEQ ID NO: 1194531 - DNA, 25 bp, Homo sapien
cactcactccagaacaggctttcct

SEQ ID NO: 1194532 - DNA, 25 bp, Homo sapien
ttcagagataagctggttgattttc

SEQ ID NO: 1194533 - DNA, 25 bp, Homo sapien
tctgctccacgagatgtttccagga

SEQ ID NO: 1194534 - DNA, 25 bp, Homo sapien
taaaatggggccacctctacgtgag

SEQ ID NO: 1194535 - DNA, 25 bp, Homo sapien
tctacgtgagccactcgccaatctg

SEQ ID NO: 1194536 - DNA, 25 bp, Homo sapien
gggggacacgtaaacgcttcatagc

SEQ ID NO: 1194537 - DNA, 25 bp, Homo sapien
taaacgcttcatagccttttgtctg

SEQ ID NO: 1194538 - DNA, 25 bp, Homo sapien
gggacacgtaaacgcttcatagcct

SEQ ID NO: 1194539 - DNA, 25 bp, Homo sapien
cacgtaaacgcttcatagccttttg

SEQ ID NO: 1194540 - DNA, 25 bp, Homo sapien
aggtttatccacattgttacattta

SEQ ID NO: 1194541 - DNA, 25 bp, Homo sapien
gtgtaatagctagaccatatggcag

SEQ ID NO: 1194542 - DNA, 25 bp, Homo sapien
gctttctctccacataattaatttg

SEQ ID NO: 1194543 - DNA, 25 bp, Homo sapien
tatatttgcacttgtcttgggtaaa

SEQ ID NO: 1194544 - DNA, 25 bp, Homo sapien
cactctattcacaagcaaccactga

SEQ ID NO: 1194545 - DNA, 25 bp, Homo sapien
ctgatctcctttctgtcactattta

SEQ ID NO: 1194546 - DNA, 25 bp, Homo sapien
ccagcctaccctaccccactctatt

SEQ ID NO: 1194547 - DNA, 25 bp, Homo sapien
taccctaccccactctattcacaag

SEQ ID NO: 1194548 - DNA, 25 bp, Homo sapien
caagggtaatattcagtacaatgaa

SEQ ID NO: 1194549 - DNA, 25 bp, Homo sapien
ttccacaaaataggccaactctaaa

SEQ ID NO: 1194550 - DNA, 25 bp, Homo sapien
atattccacaaaataggccaactct

SEQ ID NO: 1194551 - DNA, 25 bp, Homo sapien
cggcaagcacaagggtaatattcag

SEQ ID NO: 1194552 - DNA, 25 bp, Homo sapien
gtggtgatagatttgctctaatata

SEQ ID NO: 1194553 - DNA, 25 bp, Homo sapien
tggtggtgatagatttgctctaata

SEQ ID NO: 1194554 - DNA, 25 bp, Homo sapien
gtggtggtgatagatttgctctaat

SEQ ID NO: 1194555 - DNA, 25 bp, Homo sapien
agtggtggtgatagatttgctctaa

SEQ ID NO: 1194556 - DNA, 25 bp, Homo sapien
gaattccaagaggtcccaaatagct

SEQ ID NO: 1194557 - DNA, 25 bp, Homo sapien
cagcttagtcctgtgacaactggat

SEQ ID NO: 1194558 - DNA, 25 bp, Homo sapien
gaagttggtcccttgtctcacagca

SEQ ID NO: 1194559 - DNA, 25 bp, Homo sapien
gataaacctatacatcgatggctga

SEQ ID NO: 1194560 - DNA, 25 bp, Homo sapien
tatcaagggccatatacttctatct

SEQ ID NO: 1194561 - DNA, 25 bp, Homo sapien
tcagaagaaagccaccccgatagat

SEQ ID NO: 1194562 - DNA, 25 bp, Homo sapien
gagacaaattgcttctcggattaag

SEQ ID NO: 1194563 - DNA, 25 bp, Homo sapien
tgttgatgcccagtagaaaaaggaa

SEQ ID NO: 1194564 - DNA, 25 bp, Homo sapien
taagcagccaaaaccgggatttata

SEQ ID NO: 1194565 - DNA, 25 bp, Homo sapien
ccataaagggcaagtggatacacat

SEQ ID NO: 1194566 - DNA, 25 bp, Homo sapien
taattggagcaaagaagcatgccag

SEQ ID NO: 1194567 - DNA, 25 bp, Homo sapien
tcaggcaccacaatatcccgaggaa

SEQ ID NO: 1194568 - DNA, 25 bp, Homo sapien
cagttgtacaacctagcagccttgg

SEQ ID NO: 1194569 - DNA, 25 bp, Homo sapien
tatttggccacctgatactcgatct

SEQ ID NO: 1194570 - DNA, 25 bp, Homo sapien
caggaggaaaatatacgtgagtact

SEQ ID NO: 1194571 - DNA, 25 bp, Homo sapien
taaactataatgtgaaccacggcct

SEQ ID NO: 1194572 - DNA, 25 bp, Homo sapien
gacactacctagttattttgcccat

SEQ ID NO: 1194573 - DNA, 25 bp, Homo sapien
tatgacactacctagttattttgcc

SEQ ID NO: 1194574 - DNA, 25 bp, Homo sapien
tgtcattatgacactacctagttat

SEQ ID NO: 1194575 - DNA, 25 bp, Homo sapien
atgctgtcattatgacactacctag

SEQ ID NO: 1194576 - DNA, 25 bp, Homo sapien
gacaggctgttcagctgatccgcca

SEQ ID NO: 1194577 - DNA, 25 bp, Homo sapien
catatattccaggtccatcagtatc

SEQ ID NO: 1194578 - DNA, 25 bp, Homo sapien
gatccgccagccagaaatcagcaaa

SEQ ID NO: 1194579 - DNA, 25 bp, Homo sapien
tttgagctccaaactgtagaagcag

SEQ ID NO: 1194580 - DNA, 25 bp, Homo sapien
ggctctgtaatttgaaacatctgga

SEQ ID NO: 1194581 - DNA, 25 bp, Homo sapien
cagatttatggatatctgtccagga

SEQ ID NO: 1194582 - DNA, 25 bp, Homo sapien
tgcgcccagtctattctcaagcttt

SEQ ID NO: 1194583 - DNA, 25 bp, Homo sapien
cacaagacacccaagagcacattct

SEQ ID NO: 1194584 - DNA, 25 bp, Homo sapien
tgtggagtatttgccagcattaact

SEQ ID NO: 1194585 - DNA, 25 bp, Homo sapien
ctttgtgagtgctgtaaagggctgc

SEQ ID NO: 1194586 - DNA, 25 bp, Homo sapien
atgaagcgaagccaagcaggaatgc

SEQ ID NO: 1194587 - DNA, 25 bp, Homo sapien
tgtgtctcgatatcggcgcaggcac

SEQ ID NO: 1194588 - DNA, 25 bp, Homo sapien
tgttttagatttggactgttcacag

SEQ ID NO: 1194589 - DNA, 25 bp, Homo sapien
taagcccacaatactatctaaactg

SEQ ID NO: 1194590 - DNA, 25 bp, Homo sapien
cagtaagaaatgtcttaagcccaca

SEQ ID NO: 1194591 - DNA, 25 bp, Homo sapien
ggactgttcacagatttgaggaatt

SEQ ID NO: 1194592 - DNA, 25 bp, Homo sapien
cactgaaacggtatcttttgtaatt

SEQ ID NO: 1194593 - DNA, 25 bp, Homo sapien
aaatacactgaaacggtatcttttg

SEQ ID NO: 1194594 - DNA, 25 bp, Homo sapien
tacatgtttatgtagcagacaagtc

SEQ ID NO: 1194595 - DNA, 25 bp, Homo sapien
cattatagttcaacagcaaagagat

SEQ ID NO: 1194596 - DNA, 25 bp, Homo sapien
ccagagatgacgcttatcaatggag

SEQ ID NO: 1194597 - DNA, 25 bp, Homo sapien
ttttcacaatttaccatccagaagc

SEQ ID NO: 1194598 - DNA, 25 bp, Homo sapien
ccaactttggtatgcataacaaacc

SEQ ID NO: 1194599 - DNA, 25 bp, Homo sapien
caatttaccatccagaagcccaatc

SEQ ID NO: 1194600 - DNA, 25 bp, Homo sapien
tagttaggctaggaaattacagcag

SEQ ID NO: 1194601 - DNA, 25 bp, Homo sapien
tacggcatcgtcagttcttaagcaa

SEQ ID NO: 1194602 - DNA, 25 bp, Homo sapien
tctcatatttggctttacggcatcg

SEQ ID NO: 1194603 - DNA, 25 bp, Homo sapien
acaatgccaagtagataaaaaccac

SEQ ID NO: 1194604 - DNA, 25 bp, Homo sapien
tgcccacgcaggagtacattggtac

SEQ ID NO: 1194605 - DNA, 25 bp, Homo sapien
taataggagataggcacagagagaa

SEQ ID NO: 1194606 - DNA, 25 bp, Homo sapien
gattggagtacatctttaagcagct

SEQ ID NO: 1194607 - DNA, 25 bp, Homo sapien
tgtgcgcacgcatgtacctgtattg

SEQ ID NO: 1194608 - DNA, 25 bp, Homo sapien
ttgagatcccagatgagggtatagc

SEQ ID NO: 1194609 - DNA, 25 bp, Homo sapien
cagatgagggtatagcaggaactga

SEQ ID NO: 1194610 - DNA, 25 bp, Homo sapien
gatcccagatgagggtatagcagga

SEQ ID NO: 1194611 - DNA, 25 bp, Homo sapien
cccagatgagggtatagcaggaact

SEQ ID NO: 1194612 - DNA, 25 bp, Homo sapien
atctcttcccggaggaaagtgttct

SEQ ID NO: 1194613 - DNA, 25 bp, Homo sapien
acaatctcttcccggaggaaagtgt

SEQ ID NO: 1194614 - DNA, 25 bp, Homo sapien
ccagcattcttatcgaagagacccc

SEQ ID NO: 1194615 - DNA, 25 bp, Homo sapien
tctccagcattcttatcgaagagac

SEQ ID NO: 1194616 - DNA, 25 bp, Homo sapien
ggtaatcgagatttggatagtccaa

SEQ ID NO: 1194617 - DNA, 25 bp, Homo sapien
gcaaagcgcagaatcacatcctcta

SEQ ID NO: 1194618 - DNA, 25 bp, Homo sapien
caacaaagttgtagaggtaatcgag

SEQ ID NO: 1194619 - DNA, 25 bp, Homo sapien
gtccccagaatgaggcaacaaagtt

SEQ ID NO: 1194620 - DNA, 25 bp, Homo sapien
ttcaagtacaagttataataaattc

SEQ ID NO: 1194621 - DNA, 25 bp, Homo sapien
aattctaatttgtaagtattgggtg

SEQ ID NO: 1194622 - DNA, 25 bp, Homo sapien
ctaatttgtaagtattgggtgtctt

SEQ ID NO: 1194623 - DNA, 25 bp, Homo sapien
ttctaatttgtaagtattgggtgtc
